United States Patent Application Publication US 2007/0042381 A1 - sequence listing, part 80

SEQ ID NO: 3658194 - RNA, 14 nt, Human
aacagaaugaaaaa

SEQ ID NO: 3658195 - RNA, 15 nt, Human
aacagaaugaaaaau

SEQ ID NO: 3658196 - RNA, 16 nt, Human
aacagaaugaaaaaug

SEQ ID NO: 3658197 - RNA, 18 nt, Human
aacagaaugaaaaaugaa

SEQ ID NO: 3658198 - RNA, 19 nt, Human
aacagaaugaaaaaugaaa

SEQ ID NO: 3658199 - RNA, 21 nt, Human
aacagaaugaaaaaugaaaga

SEQ ID NO: 3658200 - RNA, 21 nt, Human
aacagaaugucucuuccuggu

SEQ ID NO: 3658201 - RNA, 13 nt, Human
aacagaauuuuaa

SEQ ID NO: 3658202 - RNA, 16 nt, Human
aacagacaacagaagu

SEQ ID NO: 3658203 - RNA, 15 nt, Human
aacagacauuguuuu

SEQ ID NO: 3658204 - RNA, 18 nt, Human
aacagacauuguuuugcc

SEQ ID NO: 3658205 - RNA, 13 nt, Human
aacagagaaggca

SEQ ID NO: 3658206 - RNA, 13 nt, Human
aacagagauguga

SEQ ID NO: 3658207 - RNA, 21 nt, Human
aacagaggaccagcacacucc

SEQ ID NO: 3658208 - RNA, 19 nt, Human
aacagagugagacccuguc

SEQ ID NO: 3658209 - RNA, 16 nt, Human
aacagauaaauaguuu

SEQ ID NO: 3658210 - RNA, 22 nt, Human
aacagauaccauacucauuucu

SEQ ID NO: 3658211 - RNA, 14 nt, Human
aacagaucaguaaa

SEQ ID NO: 3658212 - RNA, 20 nt, Human
aacagaucuccaaagcuuuc

SEQ ID NO: 3658213 - RNA, 22 nt, Human
aacagaucuggaaccucagccu

SEQ ID NO: 3658214 - RNA, 21 nt, Human
aacagaugcaaugugcuacug

SEQ ID NO: 3658215 - RNA, 17 nt, Human
aacagauguuucuuuug

SEQ ID NO: 3658216 - RNA, 17 nt, Human
cggcucccagccucagc

SEQ ID NO: 3658217 - RNA, 15 nt, Human
cggcucccuggagcc

SEQ ID NO: 3658218 - RNA, 13 nt, Human
cggcuccucaggg

SEQ ID NO: 3658219 - RNA, 20 nt, Human
cggcuccucagggacucagg

SEQ ID NO: 3658220 - RNA, 23 nt, Human
cggcuccucgagaucccaacacu

SEQ ID NO: 3658221 - RNA, 19 nt, Human
cggcuccucggacucugcu

SEQ ID NO: 3658222 - RNA, 22 nt, Human
cggcuccucucuaaccuccuuu

SEQ ID NO: 3658223 - RNA, 12 nt, Human
cggcuccugcug

SEQ ID NO: 3658224 - RNA, 13 nt, Human
cggcuccugcugc

SEQ ID NO: 3658225 - RNA, 23 nt, Human
cggcuccugcugcaccaacccag

SEQ ID NO: 3658226 - RNA, 17 nt, Human
cggcuccuggacucauu

SEQ ID NO: 3658227 - RNA, 21 nt, Human
cggcuccuggacucauugcuu

SEQ ID NO: 3658228 - RNA, 19 nt, Human
cggcuccuggucaccuagg

SEQ ID NO: 3658229 - RNA, 20 nt, Human
cggcucgagcaguccugccu

SEQ ID NO: 3658230 - RNA, 18 nt, Human
cggcucuagguggggcgg

SEQ ID NO: 3658231 - RNA, 13 nt, Human
cggcucucaccug

SEQ ID NO: 3658232 - RNA, 21 nt, Human
cggcucugaagcaaggcggug

SEQ ID NO: 3658233 - RNA, 13 nt, Human
cggcucugcaguc

SEQ ID NO: 3658234 - RNA, 13 nt, Human
cggcucugggugg

SEQ ID NO: 3658235 - RNA, 16 nt, Human
cggcucuguccccagc

SEQ ID NO: 3658236 - RNA, 22 nt, Human
cggcucugugggugauggggag

SEQ ID NO: 3658237 - RNA, 11 nt, Human
cggcugaccau

SEQ ID NO: 3658238 - RNA, 14 nt, Human
cggcugaccaugcu

SEQ ID NO: 3658239 - RNA, 15 nt, Human
cggcugaccaugcuc

SEQ ID NO: 3658240 - RNA, 16 nt, Human
cggcugaccaugcuca

SEQ ID NO: 3658241 - RNA, 23 nt, Human
cggcugaccaugcucaucugcug

SEQ ID NO: 3658242 - RNA, 20 nt, Human
cggcugcagaggccagaggc

SEQ ID NO: 3658243 - RNA, 18 nt, Human
cggcugcauugaagaucc

SEQ ID NO: 3658244 - RNA, 11 nt, Human
cggcugcccuu

SEQ ID NO: 3658245 - RNA, 12 nt, Human
cggcugcccuuu

SEQ ID NO: 3658246 - RNA, 21 nt, Human
cggcuggagaccaugcagagc

SEQ ID NO: 3658247 - RNA, 22 nt, Human
cggcuggagaccaugcagagcg

SEQ ID NO: 3658248 - RNA, 23 nt, Human
cggcuggcagcccaccccucaac

SEQ ID NO: 3658249 - RNA, 19 nt, Human
cggcuggccuggccccuca

SEQ ID NO: 3658250 - RNA, 18 nt, Human
cggcuggcuccccugcag

SEQ ID NO: 3658251 - RNA, 22 nt, Human
cggcugggaggagggcaggcau

SEQ ID NO: 3658252 - RNA, 23 nt, Human
cggcugggaggagggcaggcauc

SEQ ID NO: 3658253 - RNA, 15 nt, Human
cggcuggugcagggc

SEQ ID NO: 3658254 - RNA, 23 nt, Human
cggcugguuuuguaagaugcugg

SEQ ID NO: 3658255 - RNA, 14 nt, Human
cggcugugcuggga

SEQ ID NO: 3658256 - RNA, 19 nt, Human
cggcuucaugccagcuacu

SEQ ID NO: 3658257 - RNA, 14 nt, Human
cgggaaagaagagc

SEQ ID NO: 3658258 - RNA, 20 nt, Human
cgggaacaguguuucccaua

SEQ ID NO: 3658259 - RNA, 22 nt, Human
cgggaacaguguuucccauaau

SEQ ID NO: 3658260 - RNA, 16 nt, Human
cgggaacaugcccccu

SEQ ID NO: 3658261 - RNA, 14 nt, Human
cgggaaccucacuc

SEQ ID NO: 3658262 - RNA, 19 nt, Human
cgggaaccuccccagccug

SEQ ID NO: 3658263 - RNA, 21 nt, Human
cgggaaccuccccagccugcg

SEQ ID NO: 3658264 - RNA, 22 nt, Human
cgggaagagaggaguucaauga

SEQ ID NO: 3658265 - RNA, 16 nt, Human
cgggaagccacccucc

SEQ ID NO: 3658266 - RNA, 23 nt, Human
cgggaagccacccucccagcucu

SEQ ID NO: 3658267 - RNA, 14 nt, Human
cgggaaggaggguu

SEQ ID NO: 3658268 - RNA, 22 nt, Human
cgggaagggggcugggacaugg

SEQ ID NO: 3658269 - RNA, 20 nt, Human
cgggaaggucaccagcacca

SEQ ID NO: 3658270 - RNA, 17 nt, Human
cgggaauaaccuuccau

SEQ ID NO: 3658271 - RNA, 16 nt, Human
cgggaauauuguuucu

SEQ ID NO: 3658272 - RNA, 18 nt, Human
cgggacaccuaggcuagg

SEQ ID NO: 3658273 - RNA, 15 nt, Human
cgggacaccugcccu

SEQ ID NO: 3658274 - RNA, 18 nt, Human
cgggacaccugcccugcc

SEQ ID NO: 3658275 - RNA, 14 nt, Human
cgggacccagggcc

SEQ ID NO: 3658276 - RNA, 13 nt, Human
cgggaccuggugc

SEQ ID NO: 3658277 - RNA, 14 nt, Human
cgggaccuguggcu

SEQ ID NO: 3658278 - RNA, 13 nt, Human
cgggacugcggag

SEQ ID NO: 3658279 - RNA, 23 nt, Human
cgggagcagugucuuccauaaug

SEQ ID NO: 3658280 - RNA, 15 nt, Human
cuuguuuaccuuucu

SEQ ID NO: 3658281 - RNA, 12 nt, Human
cuuguuucaauu

SEQ ID NO: 3658282 - RNA, 15 nt, Human
cuuguuuccaauguu

SEQ ID NO: 3658283 - RNA, 12 nt, Human
cuuguuucugaa

SEQ ID NO: 3658284 - RNA, 20 nt, Human
cuuguuugauuuuagcugca

SEQ ID NO: 3658285 - RNA, 18 nt, Human
cuuguuugcucaccuggg

SEQ ID NO: 3658286 - RNA, 14 nt, Human
cuuguuuggggcag

SEQ ID NO: 3658287 - RNA, 14 nt, Human
cuuguuuucuggga

SEQ ID NO: 3658288 - RNA, 17 nt, Human
cuuguuuucuugccaau

SEQ ID NO: 3658289 - RNA, 13 nt, Human
cuuguuuugcuuc

SEQ ID NO: 3658290 - RNA, 21 nt, Human
cuuguuuuggacuuuguuaca

SEQ ID NO: 3658291 - RNA, 14 nt, Human
cuuguuuuuaaguu

SEQ ID NO: 3658292 - RNA, 20 nt, Human
cuuguuuuuaaguuugcacu

SEQ ID NO: 3658293 - RNA, 23 nt, Human
cuuguuuuuauaauaaaaagcuu

SEQ ID NO: 3658294 - RNA, 16 nt, Human
cuuguuuuugcacaug

SEQ ID NO: 3658295 - RNA, 16 nt, Human
cuuguuuuuguaaaga

SEQ ID NO: 3658296 - RNA, 23 nt, Human
cuuguuuuuguuuuuguuuuguu

SEQ ID NO: 3658297 - RNA, 20 nt, Human
cuuguuuuuuuuuuccacuu

SEQ ID NO: 3658298 - RNA, 18 nt, Human
cuuuaaaaaaauuuaagu

SEQ ID NO: 3658299 - RNA, 19 nt, Human
cuuuaaaaaaauuuaagug

SEQ ID NO: 3658300 - RNA, 19 nt, Human
cuuuaaaaaagcuauaaau

SEQ ID NO: 3658301 - RNA, 17 nt, Human
cuuuaaaaaauauuuau

SEQ ID NO: 3658302 - RNA, 18 nt, Human
cuuuaaaaaauauuuauu

SEQ ID NO: 3658303 - RNA, 23 nt, Human
cuuuaaaaacuauuuaacuugag

SEQ ID NO: 3658304 - RNA, 21 nt, Human
cuuuaaaaagcuccaaaugca

SEQ ID NO: 3658305 - RNA, 20 nt, Human
cuuuaaaaagggaagaaacu

SEQ ID NO: 3658306 - RNA, 18 nt, Human
cuuuaaaaaugucuuauu

SEQ ID NO: 3658307 - RNA, 15 nt, Human
cuuuaaaaauuuacu

SEQ ID NO: 3658308 - RNA, 17 nt, Human
cuuuaaaacaaaacaaa

SEQ ID NO: 3658309 - RNA, 15 nt, Human
cuuuaaaagaaugac

SEQ ID NO: 3658310 - RNA, 20 nt, Human
cuuuaaaagacaaaucaaag

SEQ ID NO: 3658311 - RNA, 13 nt, Human
cuuuaaaagagag

SEQ ID NO: 3658312 - RNA, 16 nt, Human
cuuuaaaauguaaagc

SEQ ID NO: 3658313 - RNA, 21 nt, Human
cuuuaaaauuggguucacagc

SEQ ID NO: 3658314 - RNA, 21 nt, Human
cuuuaaaauuuuuuuagaaag

SEQ ID NO: 3658315 - RNA, 17 nt, Human
cuuuaaacaguauuuca

SEQ ID NO: 3658316 - RNA, 21 nt, Human
cuuuaaacauugguucuugua

SEQ ID NO: 3658317 - RNA, 15 nt, Human
cuuuaaacucaggga

SEQ ID NO: 3658318 - RNA, 22 nt, Human
cuuuaaacucagggacagagcc

SEQ ID NO: 3658319 - RNA, 14 nt, Human
cuuuaaacugucgu

SEQ ID NO: 3658320 - RNA, 13 nt, Human
cuuuaaaggaaaa

SEQ ID NO: 3658321 - RNA, 21 nt, Human
cuuuaaaggaaaaaauguugg

SEQ ID NO: 3658322 - RNA, 16 nt, Human
cuuuaaaggcccagcc

SEQ ID NO: 3658323 - RNA, 18 nt, Human
cuuuaaagggccugccug

SEQ ID NO: 3658324 - RNA, 16 nt, Human
cuuuaaaguaugaauc

SEQ ID NO: 3658325 - RNA, 13 nt, Human
cuuuaaaguucuu

SEQ ID NO: 3658326 - RNA, 15 nt, Human
cuuuaaaucauuuua

SEQ ID NO: 3658327 - RNA, 18 nt, Human
cuuuaaauguuuuauaag

SEQ ID NO: 3658328 - RNA, 12 nt, Human
cuuuaaauuaug

SEQ ID NO: 3658329 - RNA, 16 nt, Human
cuuuaacaacauguuu

SEQ ID NO: 3658330 - RNA, 15 nt, Human
cuuuaaccuuguaua

SEQ ID NO: 3658331 - RNA, 22 nt, Human
cuuuaacucccauuaccaugua

SEQ ID NO: 3658332 - RNA, 18 nt, Human
cuuuaacugacaagccau

SEQ ID NO: 3658333 - RNA, 21 nt, Human
cuuuaacugccguaauuuaac

SEQ ID NO: 3658334 - RNA, 15 nt, Human
cuuuaacuuaaauag

SEQ ID NO: 3658335 - RNA, 19 nt, Human
cuuuaacuuaauugcuaug

SEQ ID NO: 3658336 - RNA, 18 nt, Human
cuuuaacuucuguuuuac

SEQ ID NO: 3658337 - RNA, 11 nt, Human
cuuuaagaaaa

SEQ ID NO: 3658338 - RNA, 12 nt, Human
cuuuaagaaaaa

SEQ ID NO: 3658339 - RNA, 15 nt, Human
cuuuaagaacuaaaa

SEQ ID NO: 3658340 - RNA, 17 nt, Human
cuuuaagagagaaaucu

SEQ ID NO: 3658341 - RNA, 15 nt, Human
cuuuaagaguuuaaa

SEQ ID NO: 3658342 - RNA, 19 nt, Human
cuuuaagaguuuaaaauca

SEQ ID NO: 3658343 - RNA, 22 nt, Human
cuuuaagaguuuaaaaucauca

SEQ ID NO: 3658344 - RNA, 19 nt, Human
cuuuaagcacuacauaaac

SEQ ID NO: 3658345 - RNA, 16 nt, Human
cuuuaagcagcucuug

SEQ ID NO: 3658346 - RNA, 18 nt, Human
cuuuaagcagcucuugcu

SEQ ID NO: 3658347 - RNA, 21 nt, Human
cuuuaagggaguguacuccca

SEQ ID NO: 3658348 - RNA, 20 nt, Human
cuuuaagugccuacauuauc

SEQ ID NO: 3658349 - RNA, 15 nt, Human
cuuuaauauaaaugc

SEQ ID NO: 3658350 - RNA, 18 nt, Human
cuuuaauaucaucaguau

SEQ ID NO: 3658351 - RNA, 14 nt, Human
cuuuaauauguauu

SEQ ID NO: 3658352 - RNA, 22 nt, Human
cuuuaaucacuuaacauuccua

SEQ ID NO: 3658353 - RNA, 22 nt, Human
cuuuaauggacuuauuucuuca

SEQ ID NO: 3658354 - RNA, 18 nt, Human
cuuuaaugucacaggcag

SEQ ID NO: 3658355 - RNA, 19 nt, Human
cuuuaaugucacaggcagg

SEQ ID NO: 3658356 - RNA, 22 nt, Human
cuuuaaugucacaggcaggucc

SEQ ID NO: 3658357 - RNA, 17 nt, Human
cuuuaauguuuuuugcc

SEQ ID NO: 3658358 - RNA, 23 nt, Human
cuuuaauguuuuuugccacagcu

SEQ ID NO: 3658359 - RNA, 20 nt, Human
cuuuaauucucaugugaucc

SEQ ID NO: 3658360 - RNA, 16 nt, Human
cuuucucuuucguuac

SEQ ID NO: 3658361 - RNA, 13 nt, Human
cuuucucuuucuc

SEQ ID NO: 3658362 - RNA, 21 nt, Human
cuuucucuuuuccccuuuccu

SEQ ID NO: 3658363 - RNA, 22 nt, Human
cuuucucuuuuccccuuuccug

SEQ ID NO: 3658364 - RNA, 20 nt, Human
cuuucucuuuuccucuacca

SEQ ID NO: 3658365 - RNA, 17 nt, Human
cuuucucuuuucuaaaa

SEQ ID NO: 3658366 - RNA, 20 nt, Human
cuuucucuuuucuaaaagac

SEQ ID NO: 3658367 - RNA, 13 nt, Human
cuuucugaacagc

SEQ ID NO: 3658368 - RNA, 16 nt, Human
cuuucugaacagcugg

SEQ ID NO: 3658369 - RNA, 17 nt, Human
cuuucugaacagcuggu

SEQ ID NO: 3658370 - RNA, 21 nt, Human
cuuucugaacagcugguguag

SEQ ID NO: 3658371 - RNA, 14 nt, Human
cuuucugaccuuca

SEQ ID NO: 3658372 - RNA, 23 nt, Human
cuuucugauaacuagauggugcu

SEQ ID NO: 3658373 - RNA, 17 nt, Human
cuuucugaucaaggccu

SEQ ID NO: 3658374 - RNA, 21 nt, Human
cuuucugcaguuuuucaggag

SEQ ID NO: 3658375 - RNA, 15 nt, Human
cuuucugccaccccu

SEQ ID NO: 3658376 - RNA, 14 nt, Human
cuuucugcucagcu

SEQ ID NO: 3658377 - RNA, 16 nt, Human
cuuucugcuuguguua

SEQ ID NO: 3658378 - RNA, 15 nt, Human
cuuucuggccugccu

SEQ ID NO: 3658379 - RNA, 17 nt, Human
cuuucuggccugccuuc

SEQ ID NO: 3658380 - RNA, 17 nt, Human
cuuucuggcuaugcauu

SEQ ID NO: 3658381 - RNA, 20 nt, Human
cuuucugggcaccggggccu

SEQ ID NO: 3658382 - RNA, 22 nt, Human
cuuucuggggccuaauaaaacu

SEQ ID NO: 3658383 - RNA, 23 nt, Human
cuuucuggggccuaauaaaacug

SEQ ID NO: 3658384 - RNA, 16 nt, Human
cuuucuguaaccauaa

SEQ ID NO: 3658385 - RNA, 18 nt, Human
cuuucugucccuucuguc

SEQ ID NO: 3658386 - RNA, 23 nt, Human
cuuucugucccuucugucccuca

SEQ ID NO: 3658387 - RNA, 19 nt, Human
cuuucuguccuuuuggcac

SEQ ID NO: 3658388 - RNA, 18 nt, Human
cuuucugucuucuacaga

SEQ ID NO: 3658389 - RNA, 12 nt, Human
cuuucugugugc

SEQ ID NO: 3658390 - RNA, 15 nt, Human
cuuucugugugcacc

SEQ ID NO: 3658391 - RNA, 13 nt, Human
cuuucuguuaaaa

SEQ ID NO: 3658392 - RNA, 14 nt, Human
cuuucuguuaaaau

SEQ ID NO: 3658393 - RNA, 16 nt, Human
cuuucuguuaaaaugc

SEQ ID NO: 3658394 - RNA, 15 nt, Human
cuuucuguuccaaau

SEQ ID NO: 3658395 - RNA, 16 nt, Human
cuuucuguugccacaa

SEQ ID NO: 3658396 - RNA, 21 nt, Human
cuuucuguuggauuccaugcu

SEQ ID NO: 3658397 - RNA, 14 nt, Human
cuuucuguugucau

SEQ ID NO: 3658398 - RNA, 22 nt, Human
cuuucuguugucauugcuguug

SEQ ID NO: 3658399 - RNA, 23 nt, Human
cuuucuuaauauuuuuacaugca

SEQ ID NO: 3658400 - RNA, 22 nt, Human
cuuucuuacaaggaagguggug

SEQ ID NO: 3658401 - RNA, 11 nt, Human
cuuucuuagaa

SEQ ID NO: 3658402 - RNA, 17 nt, Human
cuuucuuagaaauuuau

SEQ ID NO: 3658403 - RNA, 22 nt, Human
cuuucuuauccuagcacaugcu

SEQ ID NO: 3658404 - RNA, 19 nt, Human
cuuucuuccaaacaggcuc

SEQ ID NO: 3658405 - RNA, 21 nt, Human
cuuucuuccucauucccucgu

SEQ ID NO: 3658406 - RNA, 15 nt, Human
cuuucuuccucugcu

SEQ ID NO: 3658407 - RNA, 11 nt, Human
cuuucuuccuu

SEQ ID NO: 3658408 - RNA, 16 nt, Human
cuuucuucuauuuuau

SEQ ID NO: 3658409 - RNA, 16 nt, Human
cuuucuucuuccacac

SEQ ID NO: 3658410 - RNA, 20 nt, Human
cuuucuugacaaaaccuaac

SEQ ID NO: 3658411 - RNA, 21 nt, Human
cuuucuugaucaacaucuuuu

SEQ ID NO: 3658412 - RNA, 21 nt, Human
cuuucuugcugguugucauuu

SEQ ID NO: 3658413 - RNA, 17 nt, Human
cuuucuuuaccugagac

SEQ ID NO: 3658414 - RNA, 21 nt, Human
cuuucuuucaauaaaacgcag

SEQ ID NO: 3658415 - RNA, 16 nt, Human
cuuucuuucacaaaaa

SEQ ID NO: 3658416 - RNA, 17 nt, Human
cuuucuuucuaacucca

SEQ ID NO: 3658417 - RNA, 15 nt, Human
cuuucuuucuuagaa

SEQ ID NO: 3658418 - RNA, 12 nt, Human
cuuucuuugauu

SEQ ID NO: 3658419 - RNA, 22 nt, Human
cuuucuuugggaauauuugaau

SEQ ID NO: 3658420 - RNA, 15 nt, Human
cuuucuuuggugccu

SEQ ID NO: 3658421 - RNA, 15 nt, Human
cuuucuuuucuuucu

SEQ ID NO: 3658422 - RNA, 14 nt, Human
cuuucuuuuucuuc

SEQ ID NO: 3658423 - RNA, 21 nt, Human
cuuucuuuuuguagcuggggc

SEQ ID NO: 3658424 - RNA, 16 nt, Human
cuuucuuuuuugauau

SEQ ID NO: 3658425 - RNA, 19 nt, Human
cuuucuuuuuuuccccccc

SEQ ID NO: 3658426 - RNA, 23 nt, Human
cuuugaaaaaguuaaugcuuaag

SEQ ID NO: 3658427 - RNA, 14 nt, Human
cuuugaaauaccuc

SEQ ID NO: 3658428 - RNA, 19 nt, Human
cuuugaaauaccucauguu

SEQ ID NO: 3658429 - RNA, 18 nt, Human
cuuugaaauguguuucug

SEQ ID NO: 3658430 - RNA, 21 nt, Human
cuuugaaauguguuucuguau

SEQ ID NO: 3658431 - RNA, 23 nt, Human
cuuugaaauguguuucuguauaa

SEQ ID NO: 3658432 - RNA, 20 nt, Human
cuuugaaauugaaccuuugu

SEQ ID NO: 3658433 - RNA, 14 nt, Human
cuuugaagaggaaa

SEQ ID NO: 3658434 - RNA, 18 nt, Human
cuuugaagagugaaauac

SEQ ID NO: 3658435 - RNA, 19 nt, Human
cuuugaagcaguuguguca

SEQ ID NO: 3658436 - RNA, 16 nt, Human
cuuugaagccucagcu

SEQ ID NO: 3658437 - RNA, 17 nt, Human
cuuugaagcugaaaaua

SEQ ID NO: 3658438 - RNA, 19 nt, Human
cuuugaagcugaaaauaua

SEQ ID NO: 3658439 - RNA, 16 nt, Human
cuuugaaggggccuca

SEQ ID NO: 3658440 - RNA, 18 nt, Human
cuuugaaggggccucacc

SEQ ID NO: 3658441 - RNA, 11 nt, Human
cuuugaauaaa

SEQ ID NO: 3658442 - RNA, 17 nt, Human
cuuugaauaaagaauac

SEQ ID NO: 3658443 - RNA, 18 nt, Human
cuuugaauaaagaauacu

SEQ ID NO: 3658444 - RNA, 12 nt, Human
cuuugaauaaau

SEQ ID NO: 3658445 - RNA, 14 nt, Human
cuuugaauaaaugu

SEQ ID NO: 3658446 - RNA, 16 nt, Human
cuuugaauaaauguca

SEQ ID NO: 3658447 - RNA, 19 nt, Human
cuuugaauccucucucugu

SEQ ID NO: 3658448 - RNA, 23 nt, Human
cuuugaauccucucucuguguua

SEQ ID NO: 3658449 - RNA, 14 nt, Human
cuuugaauguguuu

SEQ ID NO: 3658450 - RNA, 16 nt, Human
cuuugaauguguuuca

SEQ ID NO: 3658451 - RNA, 18 nt, Human
cuuugaauguguuucaca

SEQ ID NO: 3658452 - RNA, 23 nt, Human
cuuugaauguguuucacaguuug

SEQ ID NO: 3658453 - RNA, 17 nt, Human
cuuugaauguuaauuuu

SEQ ID NO: 3658454 - RNA, 12 nt, Human
cuuugaauuuuc

SEQ ID NO: 3658455 - RNA, 14 nt, Human
cuuugaauuuucau

SEQ ID NO: 3658456 - RNA, 17 nt, Human
cuuugaauuuucugugu

SEQ ID NO: 3658457 - RNA, 21 nt, Human
cuuugacaauuccuagauaaa

SEQ ID NO: 3658458 - RNA, 22 nt, Human
cuuugacaauugggagcugcca

SEQ ID NO: 3658459 - RNA, 19 nt, Human
cuuugacagcgcacagcug

SEQ ID NO: 3658460 - RNA, 18 nt, Human
cuuugacauuuaauuuag

SEQ ID NO: 3658461 - RNA, 18 nt, Human
cuuugaccucaaccugug

SEQ ID NO: 3658462 - RNA, 18 nt, Human
cuuugaccugccucccuu

SEQ ID NO: 3658463 - RNA, 16 nt, Human
cuuugacgccauccca

SEQ ID NO: 3658464 - RNA, 19 nt, Human
cuuugacgccaucccagcc

SEQ ID NO: 3658465 - RNA, 14 nt, Human
cuuugacucaccug

SEQ ID NO: 3658466 - RNA, 19 nt, Human
cuuugacucaccuguuacu

SEQ ID NO: 3658467 - RNA, 19 nt, Human
cuuugacucuauaagcaaa

SEQ ID NO: 3658468 - RNA, 21 nt, Human
cuuugacucuuuugccauuaa

SEQ ID NO: 3658469 - RNA, 14 nt, Human
cuuugacuuucuuc

SEQ ID NO: 3658470 - RNA, 22 nt, Human
cuuugagaagccuucagcucca

SEQ ID NO: 3658471 - RNA, 13 nt, Human
cuuugagacaguu

SEQ ID NO: 3658472 - RNA, 15 nt, Human
cuuugagacaguuuc

SEQ ID NO: 3658473 - RNA, 15 nt, Human
cuuugagagagaaag

SEQ ID NO: 3658474 - RNA, 19 nt, Human
cuuugagaucuaaaaauaa

SEQ ID NO: 3658475 - RNA, 19 nt, Human
cuuugagccugggaaauaa

SEQ ID NO: 3658476 - RNA, 19 nt, Human
cuuugagggacugccucug

SEQ ID NO: 3658477 - RNA, 22 nt, Human
cuuugagguggaagagggcugc

SEQ ID NO: 3658478 - RNA, 17 nt, Human
cuuugagguugcuuugu

SEQ ID NO: 3658479 - RNA, 20 nt, Human
cuuugagucccccagagaug

SEQ ID NO: 3658480 - RNA, 21 nt, Human
cuuugagugcaguccugauca

SEQ ID NO: 3658481 - RNA, 17 nt, Human
cuuugaguuuccucagg

SEQ ID NO: 3658482 - RNA, 17 nt, Human
cuuugauaaaauaaaug

SEQ ID NO: 3658483 - RNA, 13 nt, Human
cuuugauaauguu

SEQ ID NO: 3658484 - RNA, 21 nt, Human
cuuugauaauguuaaauuugu

SEQ ID NO: 3658485 - RNA, 22 nt, Human
cuuugauacagucaacaagccu

SEQ ID NO: 3658486 - RNA, 22 nt, Human
cuuugauauuuucaacgcagcc

SEQ ID NO: 3658487 - RNA, 19 nt, Human
cuuuuaagaugugucuuca

SEQ ID NO: 3658488 - RNA, 14 nt, Human
cuuuuaaggauaaa

SEQ ID NO: 3658489 - RNA, 22 nt, Human
cuuuuaauaaacuuuuuuuuga

SEQ ID NO: 3658490 - RNA, 16 nt, Human
cuuuuaaugaacaaau

SEQ ID NO: 3658491 - RNA, 18 nt, Human
cuuuuaaugcuccaaaug

SEQ ID NO: 3658492 - RNA, 13 nt, Human
cuuuuaauucauu

SEQ ID NO: 3658493 - RNA, 11 nt, Human
cuuuuaauuuu

SEQ ID NO: 3658494 - RNA, 18 nt, Human
cuuuuaccagcuuuuaac

SEQ ID NO: 3658495 - RNA, 16 nt, Human
cuuuuaccaugccccu

SEQ ID NO: 3658496 - RNA, 15 nt, Human
cuuuuacccuggccc

SEQ ID NO: 3658497 - RNA, 23 nt, Human
cuuuuacuacagcuaugaagaaa

SEQ ID NO: 3658498 - RNA, 23 nt, Human
cuuuuacucaugaucuugugaca

SEQ ID NO: 3658499 - RNA, 21 nt, Human
cuuuuacugguugcauggaaa

SEQ ID NO: 3658500 - RNA, 23 nt, Human
cuuuuagaaaagggaguuuaaaa

SEQ ID NO: 3658501 - RNA, 19 nt, Human
cuuuuagaaauacugcaag

SEQ ID NO: 3658502 - RNA, 22 nt, Human
cuuuuagcucaaacguggcuuu

SEQ ID NO: 3658503 - RNA, 14 nt, Human
cuuuuaggaaaauc

SEQ ID NO: 3658504 - RNA, 14 nt, Human
cuuugauguauuuu

SEQ ID NO: 3658505 - RNA, 17 nt, Human
cuuugauguauuuuccc

SEQ ID NO: 3658506 - RNA, 11 nt, Human
cuuugauguca

SEQ ID NO: 3658507 - RNA, 22 nt, Human
cuuugaugucagcaguugcugg

SEQ ID NO: 3658508 - RNA, 18 nt, Human
cuuugaugucauguguuc

SEQ ID NO: 3658509 - RNA, 18 nt, Human
cuuugauguguuguucuu

SEQ ID NO: 3658510 - RNA, 20 nt, Human
cuuugauguguuguucuugg

SEQ ID NO: 3658511 - RNA, 16 nt, Human
cuuugauguuccuucc

SEQ ID NO: 3658512 - RNA, 20 nt, Human
cuuugauuaaagacuccagu

SEQ ID NO: 3658513 - RNA, 18 nt, Human
cuuugauuauuugcaugu

SEQ ID NO: 3658514 - RNA, 19 nt, Human
cuuugauuauuugcauguu

SEQ ID NO: 3658515 - RNA, 15 nt, Human
cuuugauucacaugu

SEQ ID NO: 3658516 - RNA, 17 nt, Human
cuuugauucacauguuu

SEQ ID NO: 3658517 - RNA, 20 nt, Human
cuuugauucacauguuuuca

SEQ ID NO: 3658518 - RNA, 13 nt, Human
cuuugauucuccu

SEQ ID NO: 3658519 - RNA, 15 nt, Human
cuuugauucuccuuc

SEQ ID NO: 3658520 - RNA, 16 nt, Human
cuuugauucuccuuca

SEQ ID NO: 3658521 - RNA, 22 nt, Human
cuuugauucuccuuuuaugugu

SEQ ID NO: 3658522 - RNA, 14 nt, Human
cuuugauugcacau

SEQ ID NO: 3658523 - RNA, 18 nt, Human
cuuugauugcacauuguu

SEQ ID NO: 3658524 - RNA, 15 nt, Human
cuuugcaaaguauug

SEQ ID NO: 3658525 - RNA, 19 nt, Human
cuuugcaaaguauuguaaa

SEQ ID NO: 3658526 - RNA, 20 nt, Human
cuuugcaaaguauuguaaau

SEQ ID NO: 3658527 - RNA, 22 nt, Human
cuuugcaaaguauuguaaauua

SEQ ID NO: 3658528 - RNA, 20 nt, Human
cuuugcacacuuuggcccag

SEQ ID NO: 3658529 - RNA, 21 nt, Human
cuuugcacgacgcccucuccc

SEQ ID NO: 3658530 - RNA, 14 nt, Human
cuuugcacgugcug

SEQ ID NO: 3658531 - RNA, 18 nt, Human
cuuugcacugagggccac

SEQ ID NO: 3658532 - RNA, 19 nt, Human
cuuugcacugagggccaca

SEQ ID NO: 3658533 - RNA, 17 nt, Human
cuuugcacuuuuucuua

SEQ ID NO: 3658534 - RNA, 22 nt, Human
cuuugcacuuuuucuuaaucau

SEQ ID NO: 3658535 - RNA, 15 nt, Human
cuuugcagacaggca

SEQ ID NO: 3658536 - RNA, 16 nt, Human
cuuugcagacaggcaa

SEQ ID NO: 3658537 - RNA, 12 nt, Human
cuuugcaggcau

SEQ ID NO: 3658538 - RNA, 18 nt, Human
cuuugcagggcagcccca

SEQ ID NO: 3658539 - RNA, 15 nt, Human
cuuugcagguugcuu

SEQ ID NO: 3658540 - RNA, 21 nt, Human
cuuugcaguucccaucuccuu

SEQ ID NO: 3658541 - RNA, 22 nt, Human
cuuugcauaacguauaaaagcc

SEQ ID NO: 3658542 - RNA, 15 nt, Human
cuuugcauauuauaa

SEQ ID NO: 3658543 - RNA, 23 nt, Human
cuuugcauauuauaaaggauaaa

SEQ ID NO: 3658544 - RNA, 18 nt, Human
cuuugcaucguccccucc

SEQ ID NO: 3658545 - RNA, 21 nt, Human
cuuugcauggaauuuguaagu

SEQ ID NO: 3658546 - RNA, 22 nt, Human
cuuugcauguuccacuaacccc

SEQ ID NO: 3658547 - RNA, 12 nt, Human
cuuugcauuuua

SEQ ID NO: 3658548 - RNA, 17 nt, Human
cuuugccaaaaagcaua

SEQ ID NO: 3658549 - RNA, 16 nt, Human
cuuugccaagaccuuu

SEQ ID NO: 3658550 - RNA, 16 nt, Human
cuuugccacccucaug

SEQ ID NO: 3658551 - RNA, 21 nt, Human
cuuugccaggugacugucugg

SEQ ID NO: 3658552 - RNA, 22 nt, Human
cuuugccaggugacugucuggg

SEQ ID NO: 3658553 - RNA, 12 nt, Human
cuuugccaucuc

SEQ ID NO: 3658554 - RNA, 14 nt, Human
cuuugccaucucug

SEQ ID NO: 3658555 - RNA, 18 nt, Human
cuuugccaucucugcucc

SEQ ID NO: 3658556 - RNA, 18 nt, Human
cuuugcccaaccucagca

SEQ ID NO: 3658557 - RNA, 15 nt, Human
cuuugcccagaaaga

SEQ ID NO: 3658558 - RNA, 23 nt, Human
cuuugcccccaaacccccauucu

SEQ ID NO: 3658559 - RNA, 18 nt, Human
cuuugcccugcugcccuc

SEQ ID NO: 3658560 - RNA, 20 nt, Human
cuuugcccugguagggcagu

SEQ ID NO: 3658561 - RNA, 21 nt, Human
cuuugccuccagaagcacugg

SEQ ID NO: 3658562 - RNA, 11 nt, Human
cuuugccuggu

SEQ ID NO: 3658563 - RNA, 14 nt, Human
cuuugccuguucag

SEQ ID NO: 3658564 - RNA, 19 nt, Human
cuuugccuugggcugcucc

SEQ ID NO: 3658565 - RNA, 23 nt, Human
cuuugccuugggcugcuccucau

SEQ ID NO: 3658566 - RNA, 14 nt, Human
cuuugccuuuugca

SEQ ID NO: 3658567 - RNA, 15 nt, Human
cuuugcgccugugac

SEQ ID NO: 3658568 - RNA, 13 nt, Human
cuuugcgcuccug

SEQ ID NO: 3658569 - RNA, 19 nt, Human
cuuugcgugcccggggcag

SEQ ID NO: 3658570 - RNA, 18 nt, Human
cuuugcuccaccccacuc

SEQ ID NO: 3658571 - RNA, 13 nt, Human
cuuugcuccuccc

SEQ ID NO: 3658572 - RNA, 13 nt, Human
cuuugcucugggu

SEQ ID NO: 3658573 - RNA, 12 nt, Human
cuuugcucuggu

SEQ ID NO: 3658574 - RNA, 15 nt, Human
cuuugcugcauggca

SEQ ID NO: 3658575 - RNA, 10 nt, Human
cuuugcugcu

SEQ ID NO: 3658576 - RNA, 19 nt, Human
cuuugcugcugaaggcuca

SEQ ID NO: 3658577 - RNA, 17 nt, Human
cuuugcugugaggcugu

SEQ ID NO: 3658578 - RNA, 19 nt, Human
cuuugcuuaugaauauuua

SEQ ID NO: 3658579 - RNA, 20 nt, Human
cuuugcuucaaauccaucca

SEQ ID NO: 3658580 - RNA, 14 nt, Human
cuuugcuugaacac

SEQ ID NO: 3658581 - RNA, 19 nt, Human
cuuugcuugcaguagauuu

SEQ ID NO: 3658582 - RNA, 17 nt, Human
cuuugcuuuaauauaaa

SEQ ID NO: 3658583 - RNA, 18 nt, Human
cuuugcuuuaauauaaau

SEQ ID NO: 3658584 - RNA, 12 nt, Human
cuuugcuuucug

SEQ ID NO: 3658585 - RNA, 14 nt, Human
cuuugcuuucugcu

SEQ ID NO: 3658586 - RNA, 19 nt, Human
cuuugcuuucugcucagcu

SEQ ID NO: 3658587 - RNA, 18 nt, Human
cuuugcuuugucuggaag

SEQ ID NO: 3658588 - RNA, 17 nt, Human
cuuuggaaaaauguuug

SEQ ID NO: 3658589 - RNA, 24 nt, Human
cuuuggaaaguacacucugcuguu

SEQ ID NO: 3658590 - RNA, 15 nt, Human
cuuuggaaccagacu

SEQ ID NO: 3658591 - RNA, 16 nt, Human
cuuuggaaccagacuc

SEQ ID NO: 3658592 - RNA, 22 nt, Human
cuuuggaaccagacucuugccu

SEQ ID NO: 3658593 - RNA, 17 nt, Human
cuuuggaagaaaaaauc

SEQ ID NO: 3658594 - RNA, 15 nt, Human
cuuuggaaggaguga

SEQ ID NO: 3658595 - RNA, 18 nt, Human
cuuuggaaguuuagcucu

SEQ ID NO: 3658596 - RNA, 22 nt, Human
cuuuggaaguuuagcucugaga

SEQ ID NO: 3658597 - RNA, 17 nt, Human
cuuuggaaguuuguguu

SEQ ID NO: 3658598 - RNA, 17 nt, Human
cuuuggacacacacagc

SEQ ID NO: 3658599 - RNA, 18 nt, Human
cuuuggacagaagcagcu

SEQ ID NO: 3658600 - RNA, 18 nt, Human
cuuuggacccugaggccc

SEQ ID NO: 3658601 - RNA, 21 nt, Human
cuuuggaccuaaauggccuca

SEQ ID NO: 3658602 - RNA, 16 nt, Human
cuuuggaccuaaucca

SEQ ID NO: 3658603 - RNA, 17 nt, Human
cuuuggaccuaauccaa

SEQ ID NO: 3658604 - RNA, 16 nt, Human
cuuuggacgcacacag

SEQ ID NO: 3658605 - RNA, 15 nt, Human
cuuuggacucucccc

SEQ ID NO: 3658606 - RNA, 21 nt, Human
cuuuggacucuccccucuuau

SEQ ID NO: 3658607 - RNA, 19 nt, Human
cuuuggagaccauuaucag

SEQ ID NO: 3658608 - RNA, 20 nt, Human
cuuuggagacuuucuuuaaa

SEQ ID NO: 3658609 - RNA, 16 nt, Human
cuuuggauaauaagga

SEQ ID NO: 3658610 - RNA, 18 nt, Human
cuuuggauucuaaauaca

SEQ ID NO: 3658611 - RNA, 13 nt, Human
cuuuggauuugac

SEQ ID NO: 3658612 - RNA, 15 nt, Human
cuuuggauuugacau

SEQ ID NO: 3658613 - RNA, 16 nt, Human
cuuuggauuugacauu

SEQ ID NO: 3658614 - RNA, 16 nt, Human
cuuuggcacucugacu

SEQ ID NO: 3658615 - RNA, 14 nt, Human
cuuuggcccagggu

SEQ ID NO: 3658616 - RNA, 19 nt, Human
cuuuggcuaugagggccuu

SEQ ID NO: 3658617 - RNA, 15 nt, Human
cuuuggcuccccugu

SEQ ID NO: 3658618 - RNA, 22 nt, Human
cuuuggcugaaaggaagcugug

SEQ ID NO: 3658619 - RNA, 16 nt, Human
cuuuggcugcaugcga

SEQ ID NO: 3658620 - RNA, 12 nt, Human
cuuuggcuuuuu

SEQ ID NO: 3658621 - RNA, 14 nt, Human
cuuugggaaaacau

SEQ ID NO: 3658622 - RNA, 21 nt, Human
cuuugggaaaacauguuaaug

SEQ ID NO: 3658623 - RNA, 19 nt, Human
cuuugggaagccuuuacug

SEQ ID NO: 3658624 - RNA, 13 nt, Human
cuuugggaagggg

SEQ ID NO: 3658625 - RNA, 18 nt, Human
cuuugggaauauuugaau

SEQ ID NO: 3658626 - RNA, 19 nt, Human
cuuugggaauauuugaauc

SEQ ID NO: 3658627 - RNA, 13 nt, Human
cuuugggagacca

SEQ ID NO: 3658628 - RNA, 15 nt, Human
cuuugggauuuaauu

SEQ ID NO: 3658629 - RNA, 12 nt, Human
cuuugggccaga

SEQ ID NO: 3658630 - RNA, 18 nt, Human
cuuugggcuucagcugcc

SEQ ID NO: 3658631 - RNA, 21 nt, Human
cuuugggcuucagcugccagu

SEQ ID NO: 3658632 - RNA, 21 nt, Human
cuuuggggucagccagggcca

SEQ ID NO: 3658633 - RNA, 17 nt, Human
cuuugggguuuuuuaau

SEQ ID NO: 3658634 - RNA, 20 nt, Human
cuuuggguuaagcauuacca

SEQ ID NO: 3658635 - RNA, 22 nt, Human
cuuuggguuaagcauuaccacu

SEQ ID NO: 3658636 - RNA, 22 nt, Human
cuuugguacauggccaguguga

SEQ ID NO: 3658637 - RNA, 15 nt, Human
cuuugguaccagaua

SEQ ID NO: 3658638 - RNA, 17 nt, Human
cuuuggucucuugcuug

SEQ ID NO: 3658639 - RNA, 15 nt, Human
cuuuggucuugcccc

SEQ ID NO: 3658640 - RNA, 23 nt, Human
cuuuggugccaacugguguuuga

SEQ ID NO: 3658641 - RNA, 16 nt, Human
cuuuggugccuuuccu

SEQ ID NO: 3658642 - RNA, 20 nt, Human
cuuugguguacaaaauggaa

SEQ ID NO: 3658643 - RNA, 20 nt, Human
cuuugguuaaauagucuaga

SEQ ID NO: 3658644 - RNA, 19 nt, Human
cuuugguucuggccagaau

SEQ ID NO: 3658645 - RNA, 21 nt, Human
cuuugguucuggccagaaugc

SEQ ID NO: 3658646 - RNA, 20 nt, Human
cuuugguuuaauuuaaagcc

SEQ ID NO: 3658647 - RNA, 16 nt, Human
cuuugguuucugucug

SEQ ID NO: 3658648 - RNA, 19 nt, Human
cuuugguuuuuuucuucug

SEQ ID NO: 3658649 - RNA, 19 nt, Human
gaaaucuuacagcugggug

SEQ ID NO: 3658650 - RNA, 12 nt, Human
gaaaucuuuaaa

SEQ ID NO: 3658651 - RNA, 20 nt, Human
gaaaugaaaacaguguguaa

SEQ ID NO: 3658652 - RNA, 21 nt, Human
gaaaugaaauauuguuuccaa

SEQ ID NO: 3658653 - RNA, 16 nt, Human
gaaaugaaauuuuacc

SEQ ID NO: 3658654 - RNA, 17 nt, Human
gaaaugaaauuuuacca

SEQ ID NO: 3658655 - RNA, 15 nt, Human
gaaaugaacauucca

SEQ ID NO: 3658656 - RNA, 14 nt, Human
gaaaugaauaauuu

SEQ ID NO: 3658657 - RNA, 15 nt, Human
gaaaugaaugugugu

SEQ ID NO: 3658658 - RNA, 15 nt, Human
gaaaugaauuaaagu

SEQ ID NO: 3658659 - RNA, 15 nt, Human
gaaaugagaaggcag

SEQ ID NO: 3658660 - RNA, 18 nt, Human
gaaaugagaucaggcucu

SEQ ID NO: 3658661 - RNA, 22 nt, Human
gaaaugagcaccuccauuaaag

SEQ ID NO: 3658662 - RNA, 17 nt, Human
gaaaugaggucuguuua

SEQ ID NO: 3658663 - RNA, 23 nt, Human
gaaaugaggucuguuuaaagugg

SEQ ID NO: 3658664 - RNA, 14 nt, Human
gaaaugaucaguuu

SEQ ID NO: 3658665 - RNA, 12 nt, Human
gaaaugcacaau

SEQ ID NO: 3658666 - RNA, 16 nt, Human
gaaaugcacaaugucu

SEQ ID NO: 3658667 - RNA, 23 nt, Human
gaaaugcauccauuccucaggga

SEQ ID NO: 3658668 - RNA, 18 nt, Human
gaaaugccuaagaagaug

SEQ ID NO: 3658669 - RNA, 23 nt, Human
gaaaugccuaagaagaugacuuc

SEQ ID NO: 3658670 - RNA, 17 nt, Human
gaaaugccuuacuuugu

SEQ ID NO: 3658671 - RNA, 23 nt, Human
gaaaugccuuacuuuguaugaua

SEQ ID NO: 3658672 - RNA, 18 nt, Human
gaaaugcuaugucauuuc

SEQ ID NO: 3658673 - RNA, 19 nt, Human
gaaaugcuaugucauuuca

SEQ ID NO: 3658674 - RNA, 20 nt, Human
gaaaugcuaugucauuucau

SEQ ID NO: 3658675 - RNA, 22 nt, Human
gaaaugcugacccaugggcagg

SEQ ID NO: 3658676 - RNA, 14 nt, Human
gaaaugcugauuua

SEQ ID NO: 3658677 - RNA, 17 nt, Human
gaaaugcugccugccug

SEQ ID NO: 3658678 - RNA, 16 nt, Human
gaaauggaaagcagag

SEQ ID NO: 3658679 - RNA, 14 nt, Human
gaaauggaaauuuu

SEQ ID NO: 3658680 - RNA, 21 nt, Human
gaaauggauacuacaucuuua

SEQ ID NO: 3658681 - RNA, 14 nt, Human
gaaaugggcagagc

SEQ ID NO: 3658682 - RNA, 18 nt, Human
gaaaugguacuguacagc

SEQ ID NO: 3658683 - RNA, 21 nt, Human
gaaaugguacuguacagcugg

SEQ ID NO: 3658684 - RNA, 17 nt, Human
gaaaugguauccagaau

SEQ ID NO: 3658685 - RNA, 16 nt, Human
gaaaugguaugagcug

SEQ ID NO: 3658686 - RNA, 18 nt, Human
gaaaugguuguauuagau

SEQ ID NO: 3658687 - RNA, 16 nt, Human
gaaauguaaacugcca

SEQ ID NO: 3658688 - RNA, 21 nt, Human
gaaauguaaggcuguguaaga

SEQ ID NO: 3658689 - RNA, 16 nt, Human
gaaauguaccuucuuu

SEQ ID NO: 3658690 - RNA, 16 nt, Human
gaaaugucccuuucuu

SEQ ID NO: 3658691 - RNA, 18 nt, Human
gaaaugucccuuucuucu

SEQ ID NO: 3658692 - RNA, 19 nt, Human
gaaaugugaauuuuuauug

SEQ ID NO: 3658693 - RNA, 14 nt, Human
gaaauguguuucug

SEQ ID NO: 3658694 - RNA, 16 nt, Human
gaaauguguuucugua

SEQ ID NO: 3658695 - RNA, 19 nt, Human
gaaauguuuuguaaacauu

SEQ ID NO: 3658696 - RNA, 20 nt, Human
gaaauguuuuguaaacauuu

SEQ ID NO: 3658697 - RNA, 18 nt, Human
gaaauuaagaaggcaaaa

SEQ ID NO: 3658698 - RNA, 23 nt, Human
gaaauuaagacuuuauguaguuu

SEQ ID NO: 3658699 - RNA, 17 nt, Human
gaaauuacacccaaaga

SEQ ID NO: 3658700 - RNA, 15 nt, Human
gaaauuaccugugga

SEQ ID NO: 3658701 - RNA, 19 nt, Human
gaaauuacuaauuuuacuu

SEQ ID NO: 3658702 - RNA, 18 nt, Human
gaaauuacuacaaaauuu

SEQ ID NO: 3658703 - RNA, 19 nt, Human
gaaauuacuacaaaauuug

SEQ ID NO: 3658704 - RNA, 17 nt, Human
gaaauuagguugaaaca

SEQ ID NO: 3658705 - RNA, 19 nt, Human
gaaauuagguugaaacaua

SEQ ID NO: 3658706 - RNA, 17 nt, Human
gaaauuauauaaguauu

SEQ ID NO: 3658707 - RNA, 21 nt, Human
gaaauuauguauguuuacaua

SEQ ID NO: 3658708 - RNA, 23 nt, Human
gaaauuaugugacauuuuacauu

SEQ ID NO: 3658709 - RNA, 13 nt, Human
gaaauucccugga

SEQ ID NO: 3658710 - RNA, 23 nt, Human
gaaauucccuggaccagaugcug

SEQ ID NO: 3658711 - RNA, 17 nt, Human
gaaauucccuucaucug

SEQ ID NO: 3658712 - RNA, 20 nt, Human
cuacaguuguuuuuugaaaa

SEQ ID NO: 3658713 - RNA, 22 nt, Human
cuacaguuguuuuuugaaaaca

SEQ ID NO: 3658714 - RNA, 15 nt, Human
cuacaguuuuaacug

SEQ ID NO: 3658715 - RNA, 21 nt, Human
cuacauaaaauaaaucuacug

SEQ ID NO: 3658716 - RNA, 12 nt, Human
cuacauaaacug

SEQ ID NO: 3658717 - RNA, 18 nt, Human
cuacauaaacugacuuua

SEQ ID NO: 3658718 - RNA, 20 nt, Human
cuacauaaacugacuuuauc

SEQ ID NO: 3658719 - RNA, 19 nt, Human
cuacauaacuaauacagcu

SEQ ID NO: 3658720 - RNA, 23 nt, Human
cuacauaaguaauucaagaaaac

SEQ ID NO: 3658721 - RNA, 18 nt, Human
cuacauacaauuccaaac

SEQ ID NO: 3658722 - RNA, 19 nt, Human
cuacauaucccuuccagau

SEQ ID NO: 3658723 - RNA, 16 nt, Human
cuacauaugaucuguc

SEQ ID NO: 3658724 - RNA, 14 nt, Human
cuacauauugaaua

SEQ ID NO: 3658725 - RNA, 16 nt, Human
cuacaucuucugccuu

SEQ ID NO: 3658726 - RNA, 13 nt, Human
cuacaugaaacag

SEQ ID NO: 3658727 - RNA, 14 nt, Human
cuacaugaaacaga

SEQ ID NO: 3658728 - RNA, 18 nt, Human
cuacaugaaacagaaaca

SEQ ID NO: 3658729 - RNA, 19 nt, Human
cuacaugacgacaaagcug

SEQ ID NO: 3658730 - RNA, 21 nt, Human
cuacaugaggaacuguagaug

SEQ ID NO: 3658731 - RNA, 22 nt, Human
cuacaugaucuagagccaguua

SEQ ID NO: 3658732 - RNA, 23 nt, Human
cuacaugcagcccaugcccaccu

SEQ ID NO: 3658733 - RNA, 14 nt, Human
cuacaugcuggggu

SEQ ID NO: 3658734 - RNA, 23 nt, Human
cuacaugguugaaaccccaucuc

SEQ ID NO: 3658735 - RNA, 13 nt, Human
cuacauguauugc

SEQ ID NO: 3658736 - RNA, 22 nt, Human
cuacauguauugcacauuguaa

SEQ ID NO: 3658737 - RNA, 16 nt, Human
cuacaugugggagcuu

SEQ ID NO: 3658738 - RNA, 17 nt, Human
cuacaugugggagcuuu

SEQ ID NO: 3658739 - RNA, 17 nt, Human
cuacauuagguugugaa

SEQ ID NO: 3658740 - RNA, 17 nt, Human
cuacauuauaaacgcuu

SEQ ID NO: 3658741 - RNA, 13 nt, Human
cuacauucuguua

SEQ ID NO: 3658742 - RNA, 17 nt, Human
cuacauugacagauuga

SEQ ID NO: 3658743 - RNA, 23 nt, Human
cuacauuucaccuacuuuguaag

SEQ ID NO: 3658744 - RNA, 13 nt, Human
cuacauuuuaaca

SEQ ID NO: 3658745 - RNA, 15 nt, Human
cuacauuuuaacaug

SEQ ID NO: 3658746 - RNA, 15 nt, Human
cuaccaaaggacacu

SEQ ID NO: 3658747 - RNA, 18 nt, Human
cuaccaaggcauaucaug

SEQ ID NO: 3658748 - RNA, 15 nt, Human
cuaccacagugucug

SEQ ID NO: 3658749 - RNA, 16 nt, Human
cuaccaccacgcccgg

SEQ ID NO: 3658750 - RNA, 11 nt, Human
cuaccaccucc

SEQ ID NO: 3658751 - RNA, 18 nt, Human
cuaccacggccuccuuuc

SEQ ID NO: 3658752 - RNA, 19 nt, Human
cuaccacggccuccuuucc

SEQ ID NO: 3658753 - RNA, 20 nt, Human
cuaccagacuguguauucau

SEQ ID NO: 3658754 - RNA, 19 nt, Human
cuaccagcgcccgcugggc

SEQ ID NO: 3658755 - RNA, 19 nt, Human
cuaccagugcaggcuggcc

SEQ ID NO: 3658756 - RNA, 20 nt, Human
cuaccagugcaggcuggcca

SEQ ID NO: 3658757 - RNA, 22 nt, Human
cuaccagugcaggcuggccagc

SEQ ID NO: 3658758 - RNA, 23 nt, Human
cuaccagugcaggcuggccagcc

SEQ ID NO: 3658759 - RNA, 21 nt, Human
cuaccauugcuguucuacuuu

SEQ ID NO: 3658760 - RNA, 19 nt, Human
cuacccaaaacaagccugg

SEQ ID NO: 3658761 - RNA, 17 nt, Human
cuacccaaacccuaggu

SEQ ID NO: 3658762 - RNA, 14 nt, Human
cuacccaaccacuc

SEQ ID NO: 3658763 - RNA, 17 nt, Human
cuacccacccuccuuuc

SEQ ID NO: 3658764 - RNA, 20 nt, Human
cuacccacuauccuucguga

SEQ ID NO: 3658765 - RNA, 16 nt, Human
cuacccacuucuaaau

SEQ ID NO: 3658766 - RNA, 22 nt, Human
cuacccacuucuaaauagcaau

SEQ ID NO: 3658767 - RNA, 13 nt, Human
cuacccagcccau

SEQ ID NO: 3658768 - RNA, 15 nt, Human
cuacccagcgagccc

SEQ ID NO: 3658769 - RNA, 14 nt, Human
cuacccagggccug

SEQ ID NO: 3658770 - RNA, 15 nt, Human
cuacccagggccugc

SEQ ID NO: 3658771 - RNA, 13 nt, Human
cuacccaggugcu

SEQ ID NO: 3658772 - RNA, 15 nt, Human
cuacccauccccgca

SEQ ID NO: 3658773 - RNA, 16 nt, Human
cuaccccaauuccuug

SEQ ID NO: 3658774 - RNA, 17 nt, Human
cuaccccacaccaggcc

SEQ ID NO: 3658775 - RNA, 17 nt, Human
cuacccccagcugugcu

SEQ ID NO: 3658776 - RNA, 17 nt, Human
cuacccccuaagagcca

SEQ ID NO: 3658777 - RNA, 14 nt, Human
cuacccccugugcc

SEQ ID NO: 3658778 - RNA, 13 nt, Human
cuaccccucccag

SEQ ID NO: 3658779 - RNA, 16 nt, Human
cuaccccucccagcug

SEQ ID NO: 3658780 - RNA, 24 nt, Human
cuaccccucccggcccugccugcu

SEQ ID NO: 3658781 - RNA, 19 nt, Human
cuaccccuggcuguacugc

SEQ ID NO: 3658782 - RNA, 14 nt, Human
cuacccgggaaggg

SEQ ID NO: 3658783 - RNA, 15 nt, Human
cuacccgggaagggg

SEQ ID NO: 3658784 - RNA, 18 nt, Human
cuacccuagccauuccug

SEQ ID NO: 3658785 - RNA, 13 nt, Human
cuacccucacaau

SEQ ID NO: 3658786 - RNA, 15 nt, Human
cuacccucagugagc

SEQ ID NO: 3658787 - RNA, 14 nt, Human
cuacccucccccag

SEQ ID NO: 3658788 - RNA, 18 nt, Human
cuacccucccugcugucc

SEQ ID NO: 3658789 - RNA, 19 nt, Human
cuacccuccugcacuguuu

SEQ ID NO: 3658790 - RNA, 23 nt, Human
cuacccucgggcccaccuggcca

SEQ ID NO: 3658791 - RNA, 16 nt, Human
cuacccucuagagaaa

SEQ ID NO: 3658792 - RNA, 20 nt, Human
cuacccugcauggcugagcu

SEQ ID NO: 3658793 - RNA, 20 nt, Human
cuacuuccuccuccccacuu

SEQ ID NO: 3658794 - RNA, 15 nt, Human
cuacuuccugccugg

SEQ ID NO: 3658795 - RNA, 20 nt, Human
cuacuuccugccuggucucc

SEQ ID NO: 3658796 - RNA, 17 nt, Human
cuacuucuguaauugug

SEQ ID NO: 3658797 - RNA, 18 nt, Human
cuacuucuguaauugugu

SEQ ID NO: 3658798 - RNA, 15 nt, Human
cuacuugagaggcug

SEQ ID NO: 3658799 - RNA, 14 nt, Human
cuacuugcucaggu

SEQ ID NO: 3658800 - RNA, 13 nt, Human
cuacuugcucugg

SEQ ID NO: 3658801 - RNA, 16 nt, Human
cuacuugcucuggacc

SEQ ID NO: 3658802 - RNA, 16 nt, Human
cuacuugggaggcuga

SEQ ID NO: 3658803 - RNA, 20 nt, Human
cuacuugggaggcugaggca

SEQ ID NO: 3658804 - RNA, 13 nt, Human
cuacuugggccau

SEQ ID NO: 3658805 - RNA, 14 nt, Human
cuacuuuccaggcu

SEQ ID NO: 3658806 - RNA, 17 nt, Human
cuacuuugauaugacug

SEQ ID NO: 3658807 - RNA, 21 nt, Human
cuacuuugauaugacuguuuu

SEQ ID NO: 3658808 - RNA, 22 nt, Human
cuacuuuguccuuuuuguuauu

SEQ ID NO: 3658809 - RNA, 21 nt, Human
cuacuuuuccuucccucaaag

SEQ ID NO: 3658810 - RNA, 17 nt, Human
cuacuuuugcaugaaaa

SEQ ID NO: 3658811 - RNA, 11 nt, Human
cuagaaaaaca

SEQ ID NO: 3658812 - RNA, 22 nt, Human
cuagaaaacaaugcaaaaccuu

SEQ ID NO: 3658813 - RNA, 22 nt, Human
cuagaaaacuugacuccauuuc

SEQ ID NO: 3658814 - RNA, 18 nt, Human
cuagaaaagcugaucaua

SEQ ID NO: 3658815 - RNA, 17 nt, Human
cuagaaacaacacugua

SEQ ID NO: 3658816 - RNA, 19 nt, Human
cuagaaacaacacuguagu

SEQ ID NO: 3658817 - RNA, 20 nt, Human
cuagaaacaacacuguagua

SEQ ID NO: 3658818 - RNA, 18 nt, Human
cuagaaagcagagauuuu

SEQ ID NO: 3658819 - RNA, 13 nt, Human
cuagaaauuuuca

SEQ ID NO: 3658820 - RNA, 13 nt, Human
cuagaaauuuuuc

SEQ ID NO: 3658821 - RNA, 16 nt, Human
cuagaacacagaaagc

SEQ ID NO: 3658822 - RNA, 21 nt, Human
cuagaacacaggcaaaauccu

SEQ ID NO: 3658823 - RNA, 16 nt, Human
cuagaacacuaacuca

SEQ ID NO: 3658824 - RNA, 22 nt, Human
cuagaacacuaacucaccagcc

SEQ ID NO: 3658825 - RNA, 18 nt, Human
cuagaacaucccugccag

SEQ ID NO: 3658826 - RNA, 15 nt, Human
cuagaaccuggagag

SEQ ID NO: 3658827 - RNA, 12 nt, Human
cuagaacucccu

SEQ ID NO: 3658828 - RNA, 13 nt, Human
cuagaacucccuu

SEQ ID NO: 3658829 - RNA, 18 nt, Human
cuagaacucccuuucaac

SEQ ID NO: 3658830 - RNA, 23 nt, Human
cuagaacuuuuuuaaauaaacuu

SEQ ID NO: 3658831 - RNA, 15 nt, Human
cuagaagaaaugaaa

SEQ ID NO: 3658832 - RNA, 22 nt, Human
cuagaagaaaugaaauuuuacc

SEQ ID NO: 3658833 - RNA, 13 nt, Human
cuagaagaagcua

SEQ ID NO: 3658834 - RNA, 19 nt, Human
cuagaagagucuauugucu

SEQ ID NO: 3658835 - RNA, 20 nt, Human
cuagaagaugaauacaaaca

SEQ ID NO: 3658836 - RNA, 14 nt, Human
cuagaaggccacau

SEQ ID NO: 3658837 - RNA, 20 nt, Human
cuagaagugggccaggacag

SEQ ID NO: 3658838 - RNA, 18 nt, Human
cuagaaguuacugaaugc

SEQ ID NO: 3658839 - RNA, 17 nt, Human
cuagaauaaucuugcuc

SEQ ID NO: 3658840 - RNA, 18 nt, Human
cuagaauacuuuuuaaaa

SEQ ID NO: 3658841 - RNA, 22 nt, Human
cuagaaucagccuaggggucag

SEQ ID NO: 3658842 - RNA, 20 nt, Human
cuagaauucccucucucuga

SEQ ID NO: 3658843 - RNA, 15 nt, Human
cuagaauucuagugc

SEQ ID NO: 3658844 - RNA, 16 nt, Human
cuagaauugaguguuu

SEQ ID NO: 3658845 - RNA, 21 nt, Human
cuagaauuuaucacacuucug

SEQ ID NO: 3658846 - RNA, 15 nt, Human
cuagaauuuauucaa

SEQ ID NO: 3658847 - RNA, 23 nt, Human
cuagaauuuauucaauuccucug

SEQ ID NO: 3658848 - RNA, 15 nt, Human
cuagaauuuuaagcc

SEQ ID NO: 3658849 - RNA, 13 nt, Human
cuagacaacccug

SEQ ID NO: 3658850 - RNA, 15 nt, Human
cuagacaacccugca

SEQ ID NO: 3658851 - RNA, 15 nt, Human
cuagacaagauauug

SEQ ID NO: 3658852 - RNA, 18 nt, Human
cuagacaagauauuguac

SEQ ID NO: 3658853 - RNA, 16 nt, Human
cuagacaagccagaac

SEQ ID NO: 3658854 - RNA, 13 nt, Human
cuagacacacaaa

SEQ ID NO: 3658855 - RNA, 13 nt, Human
cuagacacagaua

SEQ ID NO: 3658856 - RNA, 14 nt, Human
cuagacacaugaag

SEQ ID NO: 3658857 - RNA, 15 nt, Human
cuagacaccaaaguu

SEQ ID NO: 3658858 - RNA, 21 nt, Human
cuagacaccaaaguucuaaua

SEQ ID NO: 3658859 - RNA, 17 nt, Human
cuagacauggagguucu

SEQ ID NO: 3658860 - RNA, 18 nt, Human
cuagacauggagguucua

SEQ ID NO: 3658861 - RNA, 20 nt, Human
cuagacauggagguucuaag

SEQ ID NO: 3658862 - RNA, 21 nt, Human
cuagacauggagguucuaagg

SEQ ID NO: 3658863 - RNA, 23 nt, Human
cuagacauggagguucuaaggcc

SEQ ID NO: 3658864 - RNA, 15 nt, Human
cuagacauucugucg

SEQ ID NO: 3658865 - RNA, 12 nt, Human
cuagaccaauaa

SEQ ID NO: 3658866 - RNA, 17 nt, Human
cuagaccagcagacaga

SEQ ID NO: 3658867 - RNA, 23 nt, Human
cuagaccagcagacagagccagg

SEQ ID NO: 3658868 - RNA, 21 nt, Human
cuagacuaaaagauugagaag

SEQ ID NO: 3658869 - RNA, 22 nt, Human
cuagacucaagguucccagaga

SEQ ID NO: 3658870 - RNA, 18 nt, Human
cuagacucccaagcugga

SEQ ID NO: 3658871 - RNA, 18 nt, Human
cuagacuggugacugauu

SEQ ID NO: 3658872 - RNA, 19 nt, Human
cuagacuggugacugauuc

SEQ ID NO: 3658873 - RNA, 18 nt, Human
cuagacuuuaggcuuuca

SEQ ID NO: 3658874 - RNA, 12 nt, Human
cuagacuuucug

SEQ ID NO: 3658875 - RNA, 15 nt, Human
cuagagaagaggcug

SEQ ID NO: 3658876 - RNA, 19 nt, Human
cuagagaagaggcuggugc

SEQ ID NO: 3658877 - RNA, 14 nt, Human
gaaaccagggccug

SEQ ID NO: 3658878 - RNA, 20 nt, Human
gaaaccagggccugagccaa

SEQ ID NO: 3658879 - RNA, 18 nt, Human
gaaaccagugcaacagca

SEQ ID NO: 3658880 - RNA, 13 nt, Human
gaaacccaagcuc

SEQ ID NO: 3658881 - RNA, 14 nt, Human
gaaacccagcucug

SEQ ID NO: 3658882 - RNA, 16 nt, Human
gaaacccagcucuggu

SEQ ID NO: 3658883 - RNA, 18 nt, Human
gaaacccagcucuggucc

SEQ ID NO: 3658884 - RNA, 18 nt, Human
gaaacccauaggcccaca

SEQ ID NO: 3658885 - RNA, 14 nt, Human
gaaacccugagcag

SEQ ID NO: 3658886 - RNA, 17 nt, Human
gaaacccuugaaaagac

SEQ ID NO: 3658887 - RNA, 17 nt, Human
gaaaccguccucuuuuu

SEQ ID NO: 3658888 - RNA, 13 nt, Human
gaaaccuacugcc

SEQ ID NO: 3658889 - RNA, 18 nt, Human
gaaaccuaguacugcccc

SEQ ID NO: 3658890 - RNA, 13 nt, Human
gaaaccugaaaaa

SEQ ID NO: 3658891 - RNA, 16 nt, Human
gaaaccugggauucag

SEQ ID NO: 3658892 - RNA, 12 nt, Human
gaaaccugggcu

SEQ ID NO: 3658893 - RNA, 18 nt, Human
gaaaccugggcucugguu

SEQ ID NO: 3658894 - RNA, 21 nt, Human
gaaaccuguauaacccuguua

SEQ ID NO: 3658895 - RNA, 13 nt, Human
gaaaccuguaucu

SEQ ID NO: 3658896 - RNA, 14 nt, Human
gaaaccuguaucuu

SEQ ID NO: 3658897 - RNA, 18 nt, Human
gaaaccuguaucuuucua

SEQ ID NO: 3658898 - RNA, 13 nt, Human
gaaaccugucuga

SEQ ID NO: 3658899 - RNA, 12 nt, Human
gaaaccugugaa

SEQ ID NO: 3658900 - RNA, 20 nt, Human
gaaaccuuauuguaccucuc

SEQ ID NO: 3658901 - RNA, 14 nt, Human
gaaaccuuccaccc

SEQ ID NO: 3658902 - RNA, 18 nt, Human
gaaaccuuuagggcagcu

SEQ ID NO: 3658903 - RNA, 20 nt, Human
gaaaccuuuagggcagcuug

SEQ ID NO: 3658904 - RNA, 23 nt, Human
gaaaccuuuuuuaagauuuuucu

SEQ ID NO: 3658905 - RNA, 23 nt, Human
gaaacgagacuuuccauuacaag

SEQ ID NO: 3658906 - RNA, 14 nt, Human
gaaacgcagacacu

SEQ ID NO: 3658907 - RNA, 18 nt, Human
gaaacgcuaccucucugu

SEQ ID NO: 3658908 - RNA, 17 nt, Human
gaaacggaugauuucua

SEQ ID NO: 3658909 - RNA, 15 nt, Human
gaaacgugcccucug

SEQ ID NO: 3658910 - RNA, 12 nt, Human
gaaacuaacaga

SEQ ID NO: 3658911 - RNA, 17 nt, Human
gaaacuaagauucuuuu

SEQ ID NO: 3658912 - RNA, 13 nt, Human
gaaacuaauaaaa

SEQ ID NO: 3658913 - RNA, 21 nt, Human
gaaacuaauaaaauauuuucu

SEQ ID NO: 3658914 - RNA, 21 nt, Human
gaaacuaauugacuuuagaaa

SEQ ID NO: 3658915 - RNA, 20 nt, Human
gaaacuagcuuacaugagaa

SEQ ID NO: 3658916 - RNA, 17 nt, Human
gaaacuauguguuuuuc

SEQ ID NO: 3658917 - RNA, 21 nt, Human
gaaacuauguguuuuucucau

SEQ ID NO: 3658918 - RNA, 18 nt, Human
gaaacucaccugcuggcc

SEQ ID NO: 3658919 - RNA, 21 nt, Human
gaaacucaccugcuggccccu

SEQ ID NO: 3658920 - RNA, 18 nt, Human
gaaacucauagacacuga

SEQ ID NO: 3658921 - RNA, 19 nt, Human
gaaacuccacaucugccuu

SEQ ID NO: 3658922 - RNA, 21 nt, Human
gaaacucuuaucucagucaug

SEQ ID NO: 3658923 - RNA, 20 nt, Human
gaaacucuugcuauugaauu

SEQ ID NO: 3658924 - RNA, 16 nt, Human
gaaacugacuugcugu

SEQ ID NO: 3658925 - RNA, 21 nt, Human
gaaacugcuuguuuccuagca

SEQ ID NO: 3658926 - RNA, 16 nt, Human
gaaacuggaaguuauu

SEQ ID NO: 3658927 - RNA, 17 nt, Human
gaaacuggcacugaauu

SEQ ID NO: 3658928 - RNA, 18 nt, Human
gaaacuggccauggccug

SEQ ID NO: 3658929 - RNA, 19 nt, Human
gaaacuggccauggccugc

SEQ ID NO: 3658930 - RNA, 20 nt, Human
gaaacuggccauggccugca

SEQ ID NO: 3658931 - RNA, 21 nt, Human
gaaacugucgguuugcuuuga

SEQ ID NO: 3658932 - RNA, 22 nt, Human
gaaacugucuagcacuuccuug

SEQ ID NO: 3658933 - RNA, 22 nt, Human
gaaacuguucccaccugcugga

SEQ ID NO: 3658934 - RNA, 15 nt, Human
gaaacuguugccaga

SEQ ID NO: 3658935 - RNA, 15 nt, Human
gaaacuuacacacaa

SEQ ID NO: 3658936 - RNA, 20 nt, Human
gaaacuuauuuuuuucugau

SEQ ID NO: 3658937 - RNA, 22 nt, Human
gaaacuucaagcaccagggaag

SEQ ID NO: 3658938 - RNA, 21 nt, Human
cuagugagcagucaggaaaga

SEQ ID NO: 3658939 - RNA, 15 nt, Human
cuagugauggucaga

SEQ ID NO: 3658940 - RNA, 16 nt, Human
cuagugcaaaucauag

SEQ ID NO: 3658941 - RNA, 17 nt, Human
cuagugcagcugaaauu

SEQ ID NO: 3658942 - RNA, 19 nt, Human
cuagugcagcugaaauuga

SEQ ID NO: 3658943 - RNA, 15 nt, Human
cuagugcagcugauu

SEQ ID NO: 3658944 - RNA, 18 nt, Human
cuagugcccuccacagcc

SEQ ID NO: 3658945 - RNA, 19 nt, Human
cuagugcccuccacagccg

SEQ ID NO: 3658946 - RNA, 22 nt, Human
cuagugcuccauaguuuggcau

SEQ ID NO: 3658947 - RNA, 13 nt, Human
cuagugcugaagc

SEQ ID NO: 3658948 - RNA, 14 nt, Human
cuagugcugaagcu

SEQ ID NO: 3658949 - RNA, 15 nt, Human
cuagugcugaagcuu

SEQ ID NO: 3658950 - RNA, 20 nt, Human
cuagugcugaagcuuauuaa

SEQ ID NO: 3658951 - RNA, 14 nt, Human
cuagugcugugaaa

SEQ ID NO: 3658952 - RNA, 13 nt, Human
cuagugcuuuccu

SEQ ID NO: 3658953 - RNA, 22 nt, Human
cuagugcuuuccuuuuuuaaaa

SEQ ID NO: 3658954 - RNA, 23 nt, Human
cuagugcuuuccuuuuuuaaaaa

SEQ ID NO: 3658955 - RNA, 18 nt, Human
cuaguggccgaaccagaa

SEQ ID NO: 3658956 - RNA, 20 nt, Human
cuaguggcuguccagugccc

SEQ ID NO: 3658957 - RNA, 15 nt, Human
cuaguggcuucaaaa

SEQ ID NO: 3658958 - RNA, 23 nt, Human
cuagugggacagcccagagccug

SEQ ID NO: 3658959 - RNA, 14 nt, Human
cuaguggucuuugu

SEQ ID NO: 3658960 - RNA, 19 nt, Human
cuaguggucuuuguaagag

SEQ ID NO: 3658961 - RNA, 20 nt, Human
cuaguggucuuuguaagagu

SEQ ID NO: 3658962 - RNA, 19 nt, Human
cuaguguaccuccucucag

SEQ ID NO: 3658963 - RNA, 14 nt, Human
cuagugugaauuaa

SEQ ID NO: 3658964 - RNA, 13 nt, Human
cuaguguucuguc

SEQ ID NO: 3658965 - RNA, 18 nt, Human
cuaguguucuguuuguua

SEQ ID NO: 3658966 - RNA, 18 nt, Human
cuaguguucuuucucuuu

SEQ ID NO: 3658967 - RNA, 18 nt, Human
cuaguguuuucaauuuua

SEQ ID NO: 3658968 - RNA, 12 nt, Human
cuaguuauuuau

SEQ ID NO: 3658969 - RNA, 20 nt, Human
cuaguuauuuauucugggaa

SEQ ID NO: 3658970 - RNA, 12 nt, Human
cuaguucaucca

SEQ ID NO: 3658971 - RNA, 20 nt, Human
cuaguucauccaauccucac

SEQ ID NO: 3658972 - RNA, 21 nt, Human
cuaguucauccaauccucacu

SEQ ID NO: 3658973 - RNA, 20 nt, Human
cuaguuccccuguuuauuca

SEQ ID NO: 3658974 - RNA, 14 nt, Human
cuaguucuagaaaa

SEQ ID NO: 3658975 - RNA, 22 nt, Human
cuaguucuuuguucauagccca

SEQ ID NO: 3658976 - RNA, 12 nt, Human
cuaguugaauac

SEQ ID NO: 3658977 - RNA, 18 nt, Human
cuaguugaauacuugaac

SEQ ID NO: 3658978 - RNA, 21 nt, Human
cuaguugaauacuugaaccau

SEQ ID NO: 3658979 - RNA, 14 nt, Human
cuaguuuacagaaa

SEQ ID NO: 3658980 - RNA, 21 nt, Human
cuaguuuacagaaaaaucuug

SEQ ID NO: 3658981 - RNA, 17 nt, Human
cuaguuuacuguuuuga

SEQ ID NO: 3658982 - RNA, 15 nt, Human
cuaguuuccucuccu

SEQ ID NO: 3658983 - RNA, 15 nt, Human
cuaguuugauuaaau

SEQ ID NO: 3658984 - RNA, 19 nt, Human
cuaguuugauuaaauucuu

SEQ ID NO: 3658985 - RNA, 13 nt, Human
cuaguuugcauuc

SEQ ID NO: 3658986 - RNA, 20 nt, Human
cuaguuugugagaaacaucu

SEQ ID NO: 3658987 - RNA, 17 nt, Human
cuaguuuucuccuccca

SEQ ID NO: 3658988 - RNA, 18 nt, Human
cuaguuuucuccucccag

SEQ ID NO: 3658989 - RNA, 16 nt, Human
cuaguuuucuuuccuc

SEQ ID NO: 3658990 - RNA, 19 nt, Human
cuaguuuuuaguaaucugu

SEQ ID NO: 3658991 - RNA, 22 nt, Human
cuaguuuuuaguaaucuguaca

SEQ ID NO: 3658992 - RNA, 23 nt, Human
cuaguuuuuaguaaucuguacau

SEQ ID NO: 3658993 - RNA, 11 nt, Human
cuaguuuuuua

SEQ ID NO: 3658994 - RNA, 23 nt, Human
cuaguuuuuucuuccuuuucacu

SEQ ID NO: 3658995 - RNA, 18 nt, Human
cuauaaaaaauaaaauaa

SEQ ID NO: 3658996 - RNA, 16 nt, Human
cuauaaaagcuuucug

SEQ ID NO: 3658997 - RNA, 21 nt, Human
cuauaaaauagauauaaauuu

SEQ ID NO: 3658998 - RNA, 17 nt, Human
cuauaaacaauuacaug

SEQ ID NO: 3658999 - RNA, 19 nt, Human
cuauaaagagaagacgaaa

SEQ ID NO: 3659000 - RNA, 14 nt, Human
cuauaaagcaguau

SEQ ID NO: 3659001 - RNA, 16 nt, Human
cuauaaagcaguauuu

SEQ ID NO: 3659002 - RNA, 11 nt, Human
cuauaaagcau

SEQ ID NO: 3659003 - RNA, 13 nt, Human
cuauaaagcauuu

SEQ ID NO: 3659004 - RNA, 20 nt, Human
cuauaaagcgauauacagau

SEQ ID NO: 3659005 - RNA, 18 nt, Human
cuauaaagcuagaugcuu

SEQ ID NO: 3659006 - RNA, 19 nt, Human
cuauaaagcuagaugcuuu

SEQ ID NO: 3659007 - RNA, 23 nt, Human
cuauaaaugguguuuuuuuaaua

SEQ ID NO: 3659008 - RNA, 19 nt, Human
cuauaaauuccucuuugcu

SEQ ID NO: 3659009 - RNA, 17 nt, Human
cuauaacacugugaaga

SEQ ID NO: 3659010 - RNA, 19 nt, Human
cuauaacacugugaagagc

SEQ ID NO: 3659011 - RNA, 19 nt, Human
cuauaacauagaauugcaa

SEQ ID NO: 3659012 - RNA, 16 nt, Human
cuauaaccagacacau

SEQ ID NO: 3659013 - RNA, 18 nt, Human
cuauaaccccagcucccu

SEQ ID NO: 3659014 - RNA, 20 nt, Human
cuauaacuacauauugaaua

SEQ ID NO: 3659015 - RNA, 15 nt, Human
cuauaacuugaugca

SEQ ID NO: 3659016 - RNA, 16 nt, Human
cuauaacuugaugcau

SEQ ID NO: 3659017 - RNA, 17 nt, Human
cuauaagaacuuugagc

SEQ ID NO: 3659018 - RNA, 12 nt, Human
cuauaaucuguc

SEQ ID NO: 3659019 - RNA, 12 nt, Human
cuauaaugaagc

SEQ ID NO: 3659020 - RNA, 13 nt, Human
cuauaaugugugu

SEQ ID NO: 3659021 - RNA, 22 nt, Human
cuauaauucccuaucuuuuagu

SEQ ID NO: 3659022 - RNA, 16 nt, Human
cuauaauugccacuga

SEQ ID NO: 3659023 - RNA, 20 nt, Human
cuauaauuuugauaguggga

SEQ ID NO: 3659024 - RNA, 13 nt, Human
cuauacaaauaua

SEQ ID NO: 3659025 - RNA, 15 nt, Human
cuauacaaauauaaa

SEQ ID NO: 3659026 - RNA, 15 nt, Human
cuauacauaucuuua

SEQ ID NO: 3659027 - RNA, 17 nt, Human
cuauacauaucuuuauu

SEQ ID NO: 3659028 - RNA, 16 nt, Human
cuauaccaauaaagug

SEQ ID NO: 3659029 - RNA, 21 nt, Human
cuauaccauuuccguaauucu

SEQ ID NO: 3659030 - RNA, 15 nt, Human
cuauacccacccaga

SEQ ID NO: 3659031 - RNA, 21 nt, Human
cuauaccugggcauacuaaua

SEQ ID NO: 3659032 - RNA, 15 nt, Human
cuauaccugugccuc

SEQ ID NO: 3659033 - RNA, 23 nt, Human
cuauaccuguguuucuugccuca

SEQ ID NO: 3659034 - RNA, 21 nt, Human
cuauacugcauacuuuuuaaa

SEQ ID NO: 3659035 - RNA, 12 nt, Human
cuauacugcuug

SEQ ID NO: 3659036 - RNA, 20 nt, Human
cuauagacuggaaaaaauga

SEQ ID NO: 3659037 - RNA, 16 nt, Human
cuauagaugucuuuuc

SEQ ID NO: 3659038 - RNA, 21 nt, Human
cuauagccuaggugacagagu

SEQ ID NO: 3659039 - RNA, 19 nt, Human
cuauagccuggacuuuccu

SEQ ID NO: 3659040 - RNA, 14 nt, Human
cuauagccuggggu

SEQ ID NO: 3659041 - RNA, 15 nt, Human
cuauagcuaaguaca

SEQ ID NO: 3659042 - RNA, 16 nt, Human
cuauagcucaggaccu

SEQ ID NO: 3659043 - RNA, 15 nt, Human
cuauagcuugcagaa

SEQ ID NO: 3659044 - RNA, 15 nt, Human
cuauaggcuggagaa

SEQ ID NO: 3659045 - RNA, 17 nt, Human
cuauaggcuggagaagc

SEQ ID NO: 3659046 - RNA, 15 nt, Human
cuauaggugcuacaa

SEQ ID NO: 3659047 - RNA, 20 nt, Human
cuauaggugcuacaaaaaca

SEQ ID NO: 3659048 - RNA, 18 nt, Human
cuauaguauuugauucaa

SEQ ID NO: 3659049 - RNA, 18 nt, Human
cuauauaauuccuguuuu

SEQ ID NO: 3659050 - RNA, 14 nt, Human
cuauauaauuuauu

SEQ ID NO: 3659051 - RNA, 22 nt, Human
cuauauacaucacguuaaagua

SEQ ID NO: 3659052 - RNA, 18 nt, Human
cuauauagaaugcugcac

SEQ ID NO: 3659053 - RNA, 18 nt, Human
cuauauauauaugccuuu

SEQ ID NO: 3659054 - RNA, 13 nt, Human
cuauauaugugua

SEQ ID NO: 3659055 - RNA, 13 nt, Human
cuauauauuucua

SEQ ID NO: 3659056 - RNA, 16 nt, Human
cuauauauuucuauua

SEQ ID NO: 3659057 - RNA, 21 nt, Human
cuauaucauuaaaagaacaua

SEQ ID NO: 3659058 - RNA, 12 nt, Human
cuauauccaugu

SEQ ID NO: 3659059 - RNA, 13 nt, Human
cuauauccaugua

SEQ ID NO: 3659060 - RNA, 16 nt, Human
cuauauccauguacug

SEQ ID NO: 3659061 - RNA, 20 nt, Human
cuauauccauguacuguagu

SEQ ID NO: 3659062 - RNA, 21 nt, Human
cuauauccauguacuguaguu

SEQ ID NO: 3659063 - RNA, 16 nt, Human
cuauaucuguauauaa

SEQ ID NO: 3659064 - RNA, 19 nt, Human
cuauaucuguauauaaaau

SEQ ID NO: 3659065 - RNA, 14 nt, Human
cuauaucuguuuua

SEQ ID NO: 3659066 - RNA, 15 nt, Human
cuauaucuguuuuac

SEQ ID NO: 3659067 - RNA, 23 nt, Human
cuauaucuguuuuacugcuuuua

SEQ ID NO: 3659068 - RNA, 15 nt, Human
cuauaugaauuuaaa

SEQ ID NO: 3659069 - RNA, 13 nt, Human
cuauaugauuuau

SEQ ID NO: 3659070 - RNA, 17 nt, Human
cuauaugauuuauaguu

SEQ ID NO: 3659071 - RNA, 18 nt, Human
cuauaugauuuauaguuu

SEQ ID NO: 3659072 - RNA, 13 nt, Human
cuauauggcaaga

SEQ ID NO: 3659073 - RNA, 19 nt, Human
cuauauguuuguauaauga

SEQ ID NO: 3659074 - RNA, 19 nt, Human
cuauauuacgguuugcccc

SEQ ID NO: 3659075 - RNA, 22 nt, Human
cuauauuccagguuuaaguaga

SEQ ID NO: 3659076 - RNA, 16 nt, Human
cuauauuguucagcau

SEQ ID NO: 3659077 - RNA, 18 nt, Human
cuauauuguuugcuaagc

SEQ ID NO: 3659078 - RNA, 18 nt, Human
cuauauuuaaguauucaa

SEQ ID NO: 3659079 - RNA, 15 nt, Human
cuauauuuacaguga

SEQ ID NO: 3659080 - RNA, 22 nt, Human
cuauauuuagauuguuaaaaua

SEQ ID NO: 3659081 - RNA, 23 nt, Human
cuauauuuagauuguuaaaauaa

SEQ ID NO: 3659082 - RNA, 12 nt, Human
cuauauuugcua

SEQ ID NO: 3659083 - RNA, 15 nt, Human
gaauauauauauaua

SEQ ID NO: 3659084 - RNA, 20 nt, Human
gaauauaucucuauuugaga

SEQ ID NO: 3659085 - RNA, 15 nt, Human
gaauauauggcagag

SEQ ID NO: 3659086 - RNA, 21 nt, Human
gaauauauggcagaguuguaa

SEQ ID NO: 3659087 - RNA, 22 nt, Human
gaauauauggcagaguuguaaa

SEQ ID NO: 3659088 - RNA, 14 nt, Human
gaauauauggcauu

SEQ ID NO: 3659089 - RNA, 19 nt, Human
gaauauauggcauuugcag

SEQ ID NO: 3659090 - RNA, 15 nt, Human
gaauauaugugugcc

SEQ ID NO: 3659091 - RNA, 16 nt, Human
gaauauauuuaagcaa

SEQ ID NO: 3659092 - RNA, 17 nt, Human
gaauauauuuauuuaaa

SEQ ID NO: 3659093 - RNA, 21 nt, Human
gaauauauuuauuuaaagcau

SEQ ID NO: 3659094 - RNA, 19 nt, Human
gaauauccuuuaaaauuua

SEQ ID NO: 3659095 - RNA, 15 nt, Human
gaauaucuguaaugg

SEQ ID NO: 3659096 - RNA, 14 nt, Human
gaauaugacagcug

SEQ ID NO: 3659097 - RNA, 19 nt, Human
gaauaugacggaagaacau

SEQ ID NO: 3659098 - RNA, 19 nt, Human
gaauaugauuaaaaauauc

SEQ ID NO: 3659099 - RNA, 21 nt, Human
gaauaugauuaaaaauaucaa

SEQ ID NO: 3659100 - RNA, 18 nt, Human
gaauaugccuguaauuca

SEQ ID NO: 3659101 - RNA, 20 nt, Human
gaauaugccuguaauucagu

SEQ ID NO: 3659102 - RNA, 20 nt, Human
cuauauuuuuuguuaaauga

SEQ ID NO: 3659103 - RNA, 22 nt, Human
cuauauuuuuuguuaaaugauu

SEQ ID NO: 3659104 - RNA, 13 nt, Human
cuaucaaacugaa

SEQ ID NO: 3659105 - RNA, 16 nt, Human
cuaucaaacugaagcc

SEQ ID NO: 3659106 - RNA, 21 nt, Human
cuaucaaacugaagccagaaa

SEQ ID NO: 3659107 - RNA, 15 nt, Human
cuaucaacaauaaaa

SEQ ID NO: 3659108 - RNA, 19 nt, Human
cuaucaagaggcugagaca

SEQ ID NO: 3659109 - RNA, 21 nt, Human
cuaucaagaggcugagacagg

SEQ ID NO: 3659110 - RNA, 21 nt, Human
cuaucaagucaaucauuucuc

SEQ ID NO: 3659111 - RNA, 23 nt, Human
cuaucaagugugcuuuagcuuga

SEQ ID NO: 3659112 - RNA, 14 nt, Human
cuaucaauagucaa

SEQ ID NO: 3659113 - RNA, 16 nt, Human
cuaucaauagucaaga

SEQ ID NO: 3659114 - RNA, 20 nt, Human
cuaucaauagucaagaaaaa

SEQ ID NO: 3659115 - RNA, 17 nt, Human
cuaucaccuauuuccau

SEQ ID NO: 3659116 - RNA, 17 nt, Human
cuaucaccuccccuccu

SEQ ID NO: 3659117 - RNA, 18 nt, Human
cuaucagugugcccccca

SEQ ID NO: 3659118 - RNA, 17 nt, Human
cuaucauaguuaacaua

SEQ ID NO: 3659119 - RNA, 14 nt, Human
cuaucauggaguga

SEQ ID NO: 3659120 - RNA, 17 nt, Human
cuaucauuuaauaauau

SEQ ID NO: 3659121 - RNA, 22 nt, Human
cuaucauuuuuguacaguuugc

SEQ ID NO: 3659122 - RNA, 14 nt, Human
cuauccaaacaugu

SEQ ID NO: 3659123 - RNA, 20 nt, Human
cuauccaaucaaucuugcau

SEQ ID NO: 3659124 - RNA, 15 nt, Human
cuauccacagagagu

SEQ ID NO: 3659125 - RNA, 23 nt, Human
cuauccacagagagucccacugc

SEQ ID NO: 3659126 - RNA, 15 nt, Human
cuauccacccagccc

SEQ ID NO: 3659127 - RNA, 16 nt, Human
cuauccacccagccca

SEQ ID NO: 3659128 - RNA, 12 nt, Human
cuaucccauccc

SEQ ID NO: 3659129 - RNA, 17 nt, Human
cuauccccaucucccug

SEQ ID NO: 3659130 - RNA, 18 nt, Human
cuauccccaucucccugc

SEQ ID NO: 3659131 - RNA, 21 nt, Human
cuauccccaucucccugccug

SEQ ID NO: 3659132 - RNA, 17 nt, Human
cuauccgcugccagccu

SEQ ID NO: 3659133 - RNA, 18 nt, Human
cuauccuacaaggccuau

SEQ ID NO: 3659134 - RNA, 15 nt, Human
cuauccucucuuccu

SEQ ID NO: 3659135 - RNA, 16 nt, Human
cuauccucucuuccuc

SEQ ID NO: 3659136 - RNA, 13 nt, Human
cuauccucuguaa

SEQ ID NO: 3659137 - RNA, 11 nt, Human
cuauccugauu

SEQ ID NO: 3659138 - RNA, 14 nt, Human
cuauccuggcuuug

SEQ ID NO: 3659139 - RNA, 21 nt, Human
cuauccuggcuuugcccaacc

SEQ ID NO: 3659140 - RNA, 18 nt, Human
cuauccuuggcaccaaag

SEQ ID NO: 3659141 - RNA, 22 nt, Human
cuaucggagaacaugaaucaaa

SEQ ID NO: 3659142 - RNA, 16 nt, Human
cuaucuaacccuccca

SEQ ID NO: 3659143 - RNA, 17 nt, Human
cuaucuaacccucccau

SEQ ID NO: 3659144 - RNA, 20 nt, Human
cuaucuagguggaguugaaa

SEQ ID NO: 3659145 - RNA, 22 nt, Human
cuaucuagguggaguugaaaga

SEQ ID NO: 3659146 - RNA, 18 nt, Human
cuaucuaguucuaacagu

SEQ ID NO: 3659147 - RNA, 18 nt, Human
cuaucucaauccuaauuu

SEQ ID NO: 3659148 - RNA, 21 nt, Human
cuaucuccagcggcccuguca

SEQ ID NO: 3659149 - RNA, 17 nt, Human
cuaucucccccagcccc

SEQ ID NO: 3659150 - RNA, 15 nt, Human
cuaucucccugccuc

SEQ ID NO: 3659151 - RNA, 12 nt, Human
cuaucuccugac

SEQ ID NO: 3659152 - RNA, 14 nt, Human
cuaucuccugacag

SEQ ID NO: 3659153 - RNA, 21 nt, Human
cuaucugaaccauuaaagucg

SEQ ID NO: 3659154 - RNA, 20 nt, Human
cuaucuggaggccuuccagc

SEQ ID NO: 3659155 - RNA, 13 nt, Human
cuaucugggccug

SEQ ID NO: 3659156 - RNA, 17 nt, Human
cuaucugggccugggcu

SEQ ID NO: 3659157 - RNA, 21 nt, Human
cuaucugggccugggcuaggg

SEQ ID NO: 3659158 - RNA, 18 nt, Human
cuaucugggcuuccugga

SEQ ID NO: 3659159 - RNA, 11 nt, Human
cuaucugucug

SEQ ID NO: 3659160 - RNA, 14 nt, Human
cuaucugucuggug

SEQ ID NO: 3659161 - RNA, 20 nt, Human
cuaucuguuuacaguguucc

SEQ ID NO: 3659162 - RNA, 22 nt, Human
cuaucuuaauuuugguuguauu

SEQ ID NO: 3659163 - RNA, 21 nt, Human
cuaucuuauauaguuuacuau

SEQ ID NO: 3659164 - RNA, 16 nt, Human
cuaucuucauguaaau

SEQ ID NO: 3659165 - RNA, 17 nt, Human
cuaucuucauguaaauu

SEQ ID NO: 3659166 - RNA, 12 nt, Human
cuaucuuugcca

SEQ ID NO: 3659167 - RNA, 15 nt, Human
cuaucuuugccaccc

SEQ ID NO: 3659168 - RNA, 18 nt, Human
cuaucuuugccacccuca

SEQ ID NO: 3659169 - RNA, 18 nt, Human
cuaucuuuuguuuccuuu

SEQ ID NO: 3659170 - RNA, 16 nt, Human
cuaugaaaagcuagaa

SEQ ID NO: 3659171 - RNA, 12 nt, Human
cuaugaacaacu

SEQ ID NO: 3659172 - RNA, 13 nt, Human
cuaugaacuacaa

SEQ ID NO: 3659173 - RNA, 22 nt, Human
cuaugaaguuuuuuuuauacag

SEQ ID NO: 3659174 - RNA, 22 nt, Human
cuaugaaugggcaaaacugaau

SEQ ID NO: 3659175 - RNA, 17 nt, Human
cuaugacagaaaaguaa

SEQ ID NO: 3659176 - RNA, 18 nt, Human
cuaugacauaaaaacaac

SEQ ID NO: 3659177 - RNA, 17 nt, Human
cuaugacugcuccccag

SEQ ID NO: 3659178 - RNA, 16 nt, Human
cuaugacuugggcacc

SEQ ID NO: 3659179 - RNA, 14 nt, Human
cuaugagcauccug

SEQ ID NO: 3659180 - RNA, 19 nt, Human
cuaugagcauccugagccc

SEQ ID NO: 3659181 - RNA, 21 nt, Human
cuaugagcauccugagccccg

SEQ ID NO: 3659182 - RNA, 22 nt, Human
cuaugagcauccugagccccgc

SEQ ID NO: 3659183 - RNA, 16 nt, Human
cuaugagcuaaauguc

SEQ ID NO: 3659184 - RNA, 22 nt, Human
cuaugaggaauaauuauuuauu

SEQ ID NO: 3659185 - RNA, 15 nt, Human
cuaugagucuagaug

SEQ ID NO: 3659186 - RNA, 19 nt, Human
cuaugagucuagauguuua

SEQ ID NO: 3659187 - RNA, 15 nt, Human
cuaugaguggaaaaa

SEQ ID NO: 3659188 - RNA, 21 nt, Human
cuaugaucccagcacuuuggg

SEQ ID NO: 3659189 - RNA, 14 nt, Human
cuaugaucucaggu

SEQ ID NO: 3659190 - RNA, 16 nt, Human
cuaugaugcuguugcc

SEQ ID NO: 3659191 - RNA, 23 nt, Human
cuaugaugugaaacacuuugccu

SEQ ID NO: 3659192 - RNA, 19 nt, Human
cuaugauuuaauuugaaau

SEQ ID NO: 3659193 - RNA, 18 nt, Human
cuaugcacauauggacuc

SEQ ID NO: 3659194 - RNA, 20 nt, Human
cuaugcacauauggacucug

SEQ ID NO: 3659195 - RNA, 22 nt, Human
cuaugcacauauggacucugca

SEQ ID NO: 3659196 - RNA, 21 nt, Human
cuaugcauggugccccaggac

SEQ ID NO: 3659197 - RNA, 23 nt, Human
cuaugcauggugccccaggacca

SEQ ID NO: 3659198 - RNA, 11 nt, Human
cuaugcauuug

SEQ ID NO: 3659199 - RNA, 19 nt, Human
cuaugcauuuuaaaguuaa

SEQ ID NO: 3659200 - RNA, 18 nt, Human
cuaugccaaagaucacuu

SEQ ID NO: 3659201 - RNA, 16 nt, Human
cuaugcuauugacaau

SEQ ID NO: 3659202 - RNA, 17 nt, Human
cuaugcucaggggcccu

SEQ ID NO: 3659203 - RNA, 20 nt, Human
cuaugcucauaacuguguca

SEQ ID NO: 3659204 - RNA, 15 nt, Human
cuaugcugaguuugu

SEQ ID NO: 3659205 - RNA, 19 nt, Human
cuaugcugccuaggcugac

SEQ ID NO: 3659206 - RNA, 16 nt, Human
cuaugcugcuuuuaua

SEQ ID NO: 3659207 - RNA, 19 nt, Human
cuaugcugcuuuuauaucu

SEQ ID NO: 3659208 - RNA, 22 nt, Human
cuaugcuguucacuggacacuu

SEQ ID NO: 3659209 - RNA, 11 nt, Human
cuaugcuuuga

SEQ ID NO: 3659210 - RNA, 17 nt, Human
cuaugcuuugaaacaga

SEQ ID NO: 3659211 - RNA, 16 nt, Human
cuauggaaaaucagcu

SEQ ID NO: 3659212 - RNA, 22 nt, Human
cuauggaauuuauaauucagua

SEQ ID NO: 3659213 - RNA, 15 nt, Human
cuauggacacagggu

SEQ ID NO: 3659214 - RNA, 21 nt, Human
cuauggacagcauugccagua

SEQ ID NO: 3659215 - RNA, 19 nt, Human
cuauggacggugcuccagg

SEQ ID NO: 3659216 - RNA, 22 nt, Human
cuauggacggugcuccaggcag

SEQ ID NO: 3659217 - RNA, 23 nt, Human
cuauggacggugcuccaggcagg

SEQ ID NO: 3659218 - RNA, 11 nt, Human
cuauggagagc

SEQ ID NO: 3659219 - RNA, 18 nt, Human
cuauggagagcccuggga

SEQ ID NO: 3659220 - RNA, 19 nt, Human
cuauggagccuggcacagg

SEQ ID NO: 3659221 - RNA, 14 nt, Human
cuauggauggcuuc

SEQ ID NO: 3659222 - RNA, 15 nt, Human
cuauggauggcuucu

SEQ ID NO: 3659223 - RNA, 18 nt, Human
cuauggaugugggguccc

SEQ ID NO: 3659224 - RNA, 16 nt, Human
cuauggcagaaaaaau

SEQ ID NO: 3659225 - RNA, 14 nt, Human
cuauggccucaugu

SEQ ID NO: 3659226 - RNA, 22 nt, Human
cuaugggacucaaugcacugac

SEQ ID NO: 3659227 - RNA, 18 nt, Human
gaaugccuccugugggga

SEQ ID NO: 3659228 - RNA, 19 nt, Human
gaaugccugagugccuggc

SEQ ID NO: 3659229 - RNA, 21 nt, Human
gaaugcggccgcauucccuga

SEQ ID NO: 3659230 - RNA, 11 nt, Human
gaaugcugcca

SEQ ID NO: 3659231 - RNA, 17 nt, Human
gaaugcugggacucagc

SEQ ID NO: 3659232 - RNA, 18 nt, Human
gaaugcugguuuuccuaa

SEQ ID NO: 3659233 - RNA, 14 nt, Human
gaaugcuguacauc

SEQ ID NO: 3659234 - RNA, 15 nt, Human
gaaugcuguacaucu

SEQ ID NO: 3659235 - RNA, 17 nt, Human
gaaugcuguacaucuau

SEQ ID NO: 3659236 - RNA, 20 nt, Human
gaaugcuguacaucuauuuu

SEQ ID NO: 3659237 - RNA, 15 nt, Human
gaaugcuguauaugu

SEQ ID NO: 3659238 - RNA, 13 nt, Human
gaaugcuguguua

SEQ ID NO: 3659239 - RNA, 14 nt, Human
gaaugcuguguuaa

SEQ ID NO: 3659240 - RNA, 23 nt, Human
gaaugcuuaaagaauucaaauuu

SEQ ID NO: 3659241 - RNA, 18 nt, Human
gaaugcuuauagguggcc

SEQ ID NO: 3659242 - RNA, 13 nt, Human
gaaugcuugaaaa

SEQ ID NO: 3659243 - RNA, 17 nt, Human
gaaugcuugaaaaaugu

SEQ ID NO: 3659244 - RNA, 20 nt, Human
gaaugcuugaaaaaugugca

SEQ ID NO: 3659245 - RNA, 18 nt, Human
gaaugcuuuuugaauguu

SEQ ID NO: 3659246 - RNA, 15 nt, Human
gaauggacauccugu

SEQ ID NO: 3659247 - RNA, 19 nt, Human
gaauggacauccuguauaa

SEQ ID NO: 3659248 - RNA, 19 nt, Human
gaauggacuuuggaagcag

SEQ ID NO: 3659249 - RNA, 21 nt, Human
gaauggacuuuggaagcaggg

SEQ ID NO: 3659250 - RNA, 11 nt, Human
gaauggagcag

SEQ ID NO: 3659251 - RNA, 20 nt, Human
gaauggaggggcagagccag

SEQ ID NO: 3659252 - RNA, 19 nt, Human
gaauggauuggauuauuua

SEQ ID NO: 3659253 - RNA, 13 nt, Human
gaauggcaauggu

SEQ ID NO: 3659254 - RNA, 11 nt, Human
gaauggcagca

SEQ ID NO: 3659255 - RNA, 18 nt, Human
gaauggcauuugcaauaa

SEQ ID NO: 3659256 - RNA, 19 nt, Human
gaauggcuauguuuuuaau

SEQ ID NO: 3659257 - RNA, 21 nt, Human
gaauggcuuuguauagaaccu

SEQ ID NO: 3659258 - RNA, 23 nt, Human
gaaugggagguugaucagaucug

SEQ ID NO: 3659259 - RNA, 15 nt, Human
gaaugggcaguuaca

SEQ ID NO: 3659260 - RNA, 16 nt, Human
gaaugggugcccacag

SEQ ID NO: 3659261 - RNA, 23 nt, Human
gaaugguagucuaaccaaaugca

SEQ ID NO: 3659262 - RNA, 23 nt, Human
gaauggucagcguugcaugucgu

SEQ ID NO: 3659263 - RNA, 14 nt, Human
gaaugguccagggu

SEQ ID NO: 3659264 - RNA, 15 nt, Human
gaaugguccaggguu

SEQ ID NO: 3659265 - RNA, 20 nt, Human
gaaugguccgugcuaaggac

SEQ ID NO: 3659266 - RNA, 19 nt, Human
gaauggugauuuuaaaugu

SEQ ID NO: 3659267 - RNA, 21 nt, Human
gaauggugauuuuaaaugugu

SEQ ID NO: 3659268 - RNA, 19 nt, Human
gaauggugugaacccggga

SEQ ID NO: 3659269 - RNA, 20 nt, Human
gaaugguuccaugccugagg

SEQ ID NO: 3659270 - RNA, 22 nt, Human
gaaugguuuucaaaauaaaaau

SEQ ID NO: 3659271 - RNA, 14 nt, Human
gaauguaaaugucu

SEQ ID NO: 3659272 - RNA, 16 nt, Human
gaauguaaaugucuca

SEQ ID NO: 3659273 - RNA, 19 nt, Human
gaauguaaucaauguuucu

SEQ ID NO: 3659274 - RNA, 20 nt, Human
gaauguaauuuguguaauaa

SEQ ID NO: 3659275 - RNA, 13 nt, Human
gaauguaggcugg

SEQ ID NO: 3659276 - RNA, 16 nt, Human
gaauguaguuugagga

SEQ ID NO: 3659277 - RNA, 17 nt, Human
gaauguaguuugaggaa

SEQ ID NO: 3659278 - RNA, 15 nt, Human
gaauguaucaggaaa

SEQ ID NO: 3659279 - RNA, 18 nt, Human
gaauguaugcuucauaca

SEQ ID NO: 3659280 - RNA, 12 nt, Human
gaauguauugua

SEQ ID NO: 3659281 - RNA, 14 nt, Human
gaauguauuguacc

SEQ ID NO: 3659282 - RNA, 22 nt, Human
gaauguauuguaccuuuuaaca

SEQ ID NO: 3659283 - RNA, 13 nt, Human
gaauguauuuauu

SEQ ID NO: 3659284 - RNA, 23 nt, Human
gaauguauuuauuugggagaccg

SEQ ID NO: 3659285 - RNA, 15 nt, Human
gaaugucagauuccu

SEQ ID NO: 3659286 - RNA, 13 nt, Human
gaaugucaguaug

SEQ ID NO: 3659287 - RNA, 16 nt, Human
gaaugucaguaugugg

SEQ ID NO: 3659288 - RNA, 13 nt, Human
gaaugucagugug

SEQ ID NO: 3659289 - RNA, 20 nt, Human
gaaugucagugugacugauc

SEQ ID NO: 3659290 - RNA, 21 nt, Human
gaaugucagugugacugaucu

SEQ ID NO: 3659291 - RNA, 17 nt, Human
gaaugucccuuuuccua

SEQ ID NO: 3659292 - RNA, 22 nt, Human
gaaugucuuuguuggaaaagaa

SEQ ID NO: 3659293 - RNA, 13 nt, Human
gaaugugaagccu

SEQ ID NO: 3659294 - RNA, 18 nt, Human
gaaugugauaaggaaauc

SEQ ID NO: 3659295 - RNA, 19 nt, Human
gaaugugauaaggaaauca

SEQ ID NO: 3659296 - RNA, 14 nt, Human
gaaugugauuuuaa

SEQ ID NO: 3659297 - RNA, 15 nt, Human
gaaugugcagguuug

SEQ ID NO: 3659298 - RNA, 15 nt, Human
gaaugugggcacugg

SEQ ID NO: 3659299 - RNA, 20 nt, Human
gaaugugggcacuggcccag

SEQ ID NO: 3659300 - RNA, 14 nt, Human
gaauguggucucag

SEQ ID NO: 3659301 - RNA, 15 nt, Human
gaauguggucucagg

SEQ ID NO: 3659302 - RNA, 18 nt, Human
gaauguguacaaagugua

SEQ ID NO: 3659303 - RNA, 14 nt, Human
gaaugugucuuuag

SEQ ID NO: 3659304 - RNA, 14 nt, Human
gaauguguuucaca

SEQ ID NO: 3659305 - RNA, 20 nt, Human
gaauguguuucacaguuuga

SEQ ID NO: 3659306 - RNA, 13 nt, Human
gaauguuaaaggg

SEQ ID NO: 3659307 - RNA, 17 nt, Human
gaauguuacauuguuug

SEQ ID NO: 3659308 - RNA, 20 nt, Human
gaauguuacauuguuugucu

SEQ ID NO: 3659309 - RNA, 18 nt, Human
aacagauuugugaacuca

SEQ ID NO: 3659310 - RNA, 16 nt, Human
aacagauuuugggguu

SEQ ID NO: 3659311 - RNA, 17 nt, Human
aacagcaaaccaagaga

SEQ ID NO: 3659312 - RNA, 19 nt, Human
aacagcaaaccaagagauu

SEQ ID NO: 3659313 - RNA, 14 nt, Human
aacagcacuggcuc

SEQ ID NO: 3659314 - RNA, 18 nt, Human
aacagcacuggcucucuc

SEQ ID NO: 3659315 - RNA, 20 nt, Human
aacagcacuggcucucucca

SEQ ID NO: 3659316 - RNA, 20 nt, Human
aacagcagacucagcucuga

SEQ ID NO: 3659317 - RNA, 16 nt, Human
aacagcagagguucuu

SEQ ID NO: 3659318 - RNA, 21 nt, Human
aacagcagagguucuuuuaaa

SEQ ID NO: 3659319 - RNA, 13 nt, Human
aacagcaguguuc

SEQ ID NO: 3659320 - RNA, 23 nt, Human
aacagcauucuugucacaauaaa

SEQ ID NO: 3659321 - RNA, 17 nt, Human
aacagcauugcuuucug

SEQ ID NO: 3659322 - RNA, 12 nt, Human
aacagccaacag

SEQ ID NO: 3659323 - RNA, 18 nt, Human
aacagccacuacauuacu

SEQ ID NO: 3659324 - RNA, 11 nt, Human
aacagccaugc

SEQ ID NO: 3659325 - RNA, 16 nt, Human
aacagccaugcccgca

SEQ ID NO: 3659326 - RNA, 22 nt, Human
aacagccgucagccaaauguaa

SEQ ID NO: 3659327 - RNA, 17 nt, Human
aacagccuauuccugaa

SEQ ID NO: 3659328 - RNA, 16 nt, Human
aacagccucuuuuuga

SEQ ID NO: 3659329 - RNA, 18 nt, Human
aacagccugacaacauuu

SEQ ID NO: 3659330 - RNA, 13 nt, Human
aacagcgcccaaa

SEQ ID NO: 3659331 - RNA, 13 nt, Human
aacagcgcugggu

SEQ ID NO: 3659332 - RNA, 14 nt, Human
aacagcguuuaaga

SEQ ID NO: 3659333 - RNA, 23 nt, Human
aacagcguuuaagacuguaauga

SEQ ID NO: 3659334 - RNA, 18 nt, Human
aacagcuaugggagcccc

SEQ ID NO: 3659335 - RNA, 18 nt, Human
aacagcucaagucuuccc

SEQ ID NO: 3659336 - RNA, 14 nt, Human
aacagcucaggauc

SEQ ID NO: 3659337 - RNA, 14 nt, Human
aacagcuccuuggg

SEQ ID NO: 3659338 - RNA, 21 nt, Human
aacagcugaggucucuugagg

SEQ ID NO: 3659339 - RNA, 11 nt, Human
aacagcugcaa

SEQ ID NO: 3659340 - RNA, 19 nt, Human
aacagcugcaauucccugg

SEQ ID NO: 3659341 - RNA, 11 nt, Human
aacagcugccu

SEQ ID NO: 3659342 - RNA, 13 nt, Human
aacagcugccucu

SEQ ID NO: 3659343 - RNA, 12 nt, Human
aacagcugccuu

SEQ ID NO: 3659344 - RNA, 20 nt, Human
aacagcugccuuagcuucag

SEQ ID NO: 3659345 - RNA, 11 nt, Human
aacagcuggug

SEQ ID NO: 3659346 - RNA, 20 nt, Human
aacagcuggugcccugcuuu

SEQ ID NO: 3659347 - RNA, 21 nt, Human
aacagcuggugcccugcuuuc

SEQ ID NO: 3659348 - RNA, 17 nt, Human
aacagcugguguagcua

SEQ ID NO: 3659349 - RNA, 13 nt, Human
aacagcuguggcu

SEQ ID NO: 3659350 - RNA, 20 nt, Human
aacagcuucaugccuuugua

SEQ ID NO: 3659351 - RNA, 15 nt, Human
aacagcuucauguuc

SEQ ID NO: 3659352 - RNA, 16 nt, Human
aacagcuuucaagugc

SEQ ID NO: 3659353 - RNA, 20 nt, Human
aacaggaaacuccugugacc

SEQ ID NO: 3659354 - RNA, 10 nt, Human
aacaggaagc

SEQ ID NO: 3659355 - RNA, 20 nt, Human
aacaggaccacaaaaaugaa

SEQ ID NO: 3659356 - RNA, 12 nt, Human
aacaggaccggg

SEQ ID NO: 3659357 - RNA, 17 nt, Human
aacaggaccggguggaa

SEQ ID NO: 3659358 - RNA, 12 nt, Human
aacaggagaauu

SEQ ID NO: 3659359 - RNA, 17 nt, Human
aacaggaggacaauuca

SEQ ID NO: 3659360 - RNA, 18 nt, Human
aacaggaggacaauucau

SEQ ID NO: 3659361 - RNA, 19 nt, Human
aacaggaggacaauucaug

SEQ ID NO: 3659362 - RNA, 14 nt, Human
aacaggauaacccu

SEQ ID NO: 3659363 - RNA, 18 nt, Human
aacaggcacugcccuggu

SEQ ID NO: 3659364 - RNA, 13 nt, Human
aacaggcacuugg

SEQ ID NO: 3659365 - RNA, 11 nt, Human
aacaggcagau

SEQ ID NO: 3659366 - RNA, 11 nt, Human
aacaggcccag

SEQ ID NO: 3659367 - RNA, 23 nt, Human
aacaggcccagcauugcugguuc

SEQ ID NO: 3659368 - RNA, 20 nt, Human
aacaggcucaauauuccuga

SEQ ID NO: 3659369 - RNA, 22 nt, Human
aacaggcuguucugcacugaaa

SEQ ID NO: 3659370 - RNA, 20 nt, Human
aacagggaaggcaggcaggg

SEQ ID NO: 3659371 - RNA, 23 nt, Human
aacagggaaggcaggcagggcuc

SEQ ID NO: 3659372 - RNA, 22 nt, Human
aacagggauugauuuuaaaaug

SEQ ID NO: 3659373 - RNA, 21 nt, Human
cucacuguucccucugcuccu

SEQ ID NO: 3659374 - RNA, 21 nt, Human
cucacuguuuguuuuuauuua

SEQ ID NO: 3659375 - RNA, 20 nt, Human
cucacuuccauacagcucua

SEQ ID NO: 3659376 - RNA, 13 nt, Human
cucacuuuaaacc

SEQ ID NO: 3659377 - RNA, 16 nt, Human
cucacuuuaaaccugu

SEQ ID NO: 3659378 - RNA, 14 nt, Human
cucacuuuucccac

SEQ ID NO: 3659379 - RNA, 16 nt, Human
cucacuuuucccacuc

SEQ ID NO: 3659380 - RNA, 17 nt, Human
cucacuuuucccacucc

SEQ ID NO: 3659381 - RNA, 22 nt, Human
cucagaaaagacgcaccagccc

SEQ ID NO: 3659382 - RNA, 18 nt, Human
cucagaaacacuggggcu

SEQ ID NO: 3659383 - RNA, 13 nt, Human
cucagaaaggcaa

SEQ ID NO: 3659384 - RNA, 15 nt, Human
cucagaacacauucu

SEQ ID NO: 3659385 - RNA, 14 nt, Human
cucagaacccaggg

SEQ ID NO: 3659386 - RNA, 17 nt, Human
cucagaacccagggcuc

SEQ ID NO: 3659387 - RNA, 21 nt, Human
cucagaacccuuggcuugccc

SEQ ID NO: 3659388 - RNA, 21 nt, Human
cucagaacugucggaggaaag

SEQ ID NO: 3659389 - RNA, 14 nt, Human
cucagaacuugcug

SEQ ID NO: 3659390 - RNA, 18 nt, Human
cucagaacuugcugcugu

SEQ ID NO: 3659391 - RNA, 19 nt, Human
cucagaacuugcugcuguc

SEQ ID NO: 3659392 - RNA, 11 nt, Human
cucagaagccu

SEQ ID NO: 3659393 - RNA, 15 nt, Human
cucagaagccucugg

SEQ ID NO: 3659394 - RNA, 17 nt, Human
cucagaagccucugggu

SEQ ID NO: 3659395 - RNA, 13 nt, Human
cucagaagccuga

SEQ ID NO: 3659396 - RNA, 14 nt, Human
cucagaagccuggg

SEQ ID NO: 3659397 - RNA, 17 nt, Human
cucagaagccugggggc

SEQ ID NO: 3659398 - RNA, 20 nt, Human
cucagaagccugggggccug

SEQ ID NO: 3659399 - RNA, 21 nt, Human
cucagaagccugggggccugg

SEQ ID NO: 3659400 - RNA, 19 nt, Human
cucagaaggcaaaugacuu

SEQ ID NO: 3659401 - RNA, 13 nt, Human
cucagaagggagg

SEQ ID NO: 3659402 - RNA, 20 nt, Human
cucagaagggaggcuggggu

SEQ ID NO: 3659403 - RNA, 17 nt, Human
cucagaaggucuguuuu

SEQ ID NO: 3659404 - RNA, 22 nt, Human
cucagaagugaaaaucuuggag

SEQ ID NO: 3659405 - RNA, 16 nt, Human
cucagaaguuucuucu

SEQ ID NO: 3659406 - RNA, 12 nt, Human
cucagaauauug

SEQ ID NO: 3659407 - RNA, 23 nt, Human
cucagaauccaagugaacacuag

SEQ ID NO: 3659408 - RNA, 20 nt, Human
cucagaaucuacccaaagga

SEQ ID NO: 3659409 - RNA, 17 nt, Human
cucagaaucucaaauaa

SEQ ID NO: 3659410 - RNA, 19 nt, Human
cucagaaucuuuccuuccu

SEQ ID NO: 3659411 - RNA, 17 nt, Human
cucagaauuauuuuuaa

SEQ ID NO: 3659412 - RNA, 19 nt, Human
cucagacauguuuuccgug

SEQ ID NO: 3659413 - RNA, 13 nt, Human
cucagacauuggc

SEQ ID NO: 3659414 - RNA, 18 nt, Human
cucagaccacaugcccca

SEQ ID NO: 3659415 - RNA, 13 nt, Human
cucagacccccac

SEQ ID NO: 3659416 - RNA, 15 nt, Human
cucagacccccacuc

SEQ ID NO: 3659417 - RNA, 22 nt, Human
cucagacccccacucucauucc

SEQ ID NO: 3659418 - RNA, 23 nt, Human
cucagacccccacucucauuccc

SEQ ID NO: 3659419 - RNA, 23 nt, Human
cucagaccgucuuccuccaaccc

SEQ ID NO: 3659420 - RNA, 14 nt, Human
cucagacucuaaga

SEQ ID NO: 3659421 - RNA, 19 nt, Human
cucagacugcacccaggag

SEQ ID NO: 3659422 - RNA, 14 nt, Human
cucagacugcucaa

SEQ ID NO: 3659423 - RNA, 14 nt, Human
cucagacuggggca

SEQ ID NO: 3659424 - RNA, 16 nt, Human
cucagacuuaccagga

SEQ ID NO: 3659425 - RNA, 17 nt, Human
cucagacuuuuguacau

SEQ ID NO: 3659426 - RNA, 21 nt, Human
cucagagaaaaaugcucccca

SEQ ID NO: 3659427 - RNA, 17 nt, Human
cucagagaaaagagauu

SEQ ID NO: 3659428 - RNA, 17 nt, Human
cucagagacaugcagag

SEQ ID NO: 3659429 - RNA, 16 nt, Human
cucagagaccagggcu

SEQ ID NO: 3659430 - RNA, 21 nt, Human
cucagagaccagggcuccagc

SEQ ID NO: 3659431 - RNA, 22 nt, Human
cucagagaccagggcuccagcc

SEQ ID NO: 3659432 - RNA, 13 nt, Human
cucagagagggca

SEQ ID NO: 3659433 - RNA, 20 nt, Human
cucagagaugugcacccaug

SEQ ID NO: 3659434 - RNA, 22 nt, Human
cucagagaugugcacccauggg

SEQ ID NO: 3659435 - RNA, 15 nt, Human
cucagagcucucucu

SEQ ID NO: 3659436 - RNA, 13 nt, Human
cucagaggcccca

SEQ ID NO: 3659437 - RNA, 18 nt, Human
cucagaggcgcacuguga

SEQ ID NO: 3659438 - RNA, 16 nt, Human
cucagaggguguccug

SEQ ID NO: 3659439 - RNA, 17 nt, Human
cucagaguauggagcuc

SEQ ID NO: 3659440 - RNA, 15 nt, Human
cucagaguccaggcc

SEQ ID NO: 3659441 - RNA, 23 nt, Human
cucagauaagguaaaaugccaug

SEQ ID NO: 3659442 - RNA, 18 nt, Human
cucagauagaaugacagu

SEQ ID NO: 3659443 - RNA, 14 nt, Human
cucagauauuuaua

SEQ ID NO: 3659444 - RNA, 13 nt, Human
cucagaucacugc

SEQ ID NO: 3659445 - RNA, 17 nt, Human
cucagaucacugcaacc

SEQ ID NO: 3659446 - RNA, 10 nt, Human
cucagaucca

SEQ ID NO: 3659447 - RNA, 22 nt, Human
cucagaucccacuuuugccaga

SEQ ID NO: 3659448 - RNA, 14 nt, Human
cucagauccuccuc

SEQ ID NO: 3659449 - RNA, 16 nt, Human
cucagauccuccucau

SEQ ID NO: 3659450 - RNA, 21 nt, Human
cucagaugcacaugagcuggc

SEQ ID NO: 3659451 - RNA, 18 nt, Human
cucagaugcaguuuggag

SEQ ID NO: 3659452 - RNA, 15 nt, Human
cucagaugcucaaag

SEQ ID NO: 3659453 - RNA, 12 nt, Human
cucagauggcag

SEQ ID NO: 3659454 - RNA, 23 nt, Human
cucagaugucccuugaugcacag

SEQ ID NO: 3659455 - RNA, 13 nt, Human
cucagauguuaaa

SEQ ID NO: 3659456 - RNA, 14 nt, Human
cucagauguuaaaa

SEQ ID NO: 3659457 - RNA, 17 nt, Human
cucagauguuaaaauaa

SEQ ID NO: 3659458 - RNA, 15 nt, Human
cucagauuauuuaaa

SEQ ID NO: 3659459 - RNA, 21 nt, Human
cucagauuccuucccauggag

SEQ ID NO: 3659460 - RNA, 22 nt, Human
cucagauuguaauauguaaaug

SEQ ID NO: 3659461 - RNA, 16 nt, Human
cucagauuucugagga

SEQ ID NO: 3659462 - RNA, 15 nt, Human
cucagauuuuauuau

SEQ ID NO: 3659463 - RNA, 23 nt, Human
cucagauuuuauuauguaaaucc

SEQ ID NO: 3659464 - RNA, 20 nt, Human
cucagcaaaagaugcuucuc

SEQ ID NO: 3659465 - RNA, 21 nt, Human
cucagcaaaagaugcuucuca

SEQ ID NO: 3659466 - RNA, 15 nt, Human
cucagcaaggccacc

SEQ ID NO: 3659467 - RNA, 18 nt, Human
cucagcaaggggcucugc

SEQ ID NO: 3659468 - RNA, 20 nt, Human
cucagcaaggggcucugccc

SEQ ID NO: 3659469 - RNA, 14 nt, Human
cucagcaccacuca

SEQ ID NO: 3659470 - RNA, 18 nt, Human
cucagcaccacucaagac

SEQ ID NO: 3659471 - RNA, 21 nt, Human
cucagcaccacucaagaccaa

SEQ ID NO: 3659472 - RNA, 22 nt, Human
cucagcaccacucaagaccaaa

SEQ ID NO: 3659473 - RNA, 15 nt, Human
gacaggcagaaagag

SEQ ID NO: 3659474 - RNA, 14 nt, Human
gacaggcagcagag

SEQ ID NO: 3659475 - RNA, 19 nt, Human
gacaggcauguucucugag

SEQ ID NO: 3659476 - RNA, 15 nt, Human
gacaggcccaagaga

SEQ ID NO: 3659477 - RNA, 18 nt, Human
gacaggcccaagagauga

SEQ ID NO: 3659478 - RNA, 11 nt, Human
gacaggccuca

SEQ ID NO: 3659479 - RNA, 21 nt, Human
gacaggccucaccucuaccca

SEQ ID NO: 3659480 - RNA, 24 nt, Human
gacaggcgagagaggagccagaca

SEQ ID NO: 3659481 - RNA, 13 nt, Human
gacaggcucuuag

SEQ ID NO: 3659482 - RNA, 18 nt, Human
gacaggcugcggccccuc

SEQ ID NO: 3659483 - RNA, 23 nt, Human
gacaggcugcggccccucccccg

SEQ ID NO: 3659484 - RNA, 14 nt, Human
gacaggcuggcucc

SEQ ID NO: 3659485 - RNA, 21 nt, Human
gacaggcuggcuccagaugca

SEQ ID NO: 3659486 - RNA, 22 nt, Human
gacaggcuggcuccagaugcag

SEQ ID NO: 3659487 - RNA, 15 nt, Human
gacagggaagagcag

SEQ ID NO: 3659488 - RNA, 23 nt, Human
gacagggaugagcauggagcugg

SEQ ID NO: 3659489 - RNA, 15 nt, Human
gacagggcauggcca

SEQ ID NO: 3659490 - RNA, 12 nt, Human
gacagggccagu

SEQ ID NO: 3659491 - RNA, 19 nt, Human
gacagggccaguggggccu

SEQ ID NO: 3659492 - RNA, 14 nt, Human
gacagggcuggccc

SEQ ID NO: 3659493 - RNA, 18 nt, Human
gacagggcuggcccagcc

SEQ ID NO: 3659494 - RNA, 20 nt, Human
gacaggggagggggcaaagg

SEQ ID NO: 3659495 - RNA, 14 nt, Human
gacagggguuccuu

SEQ ID NO: 3659496 - RNA, 20 nt, Human
gacagggguuccuucugggc

SEQ ID NO: 3659497 - RNA, 23 nt, Human
gacaggguuuggcugugucuaaa

SEQ ID NO: 3659498 - RNA, 20 nt, Human
gacaggguuuugccauguug

SEQ ID NO: 3659499 - RNA, 14 nt, Human
gacagguaaauuaa

SEQ ID NO: 3659500 - RNA, 17 nt, Human
gacaggucccucaccca

SEQ ID NO: 3659501 - RNA, 19 nt, Human
gacagguuuucacauaaau

SEQ ID NO: 3659502 - RNA, 15 nt, Human
gacaguaauuguguu

SEQ ID NO: 3659503 - RNA, 19 nt, Human
gacaguaauuguguuuaca

SEQ ID NO: 3659504 - RNA, 16 nt, Human
gacaguaucccacauc

SEQ ID NO: 3659505 - RNA, 19 nt, Human
gacagucaaggaguggcuu

SEQ ID NO: 3659506 - RNA, 22 nt, Human
gacagucaaggaguggcuuacu

SEQ ID NO: 3659507 - RNA, 16 nt, Human
gacagucaccccagga

SEQ ID NO: 3659508 - RNA, 22 nt, Human
gacagucacugccacuuugcac

SEQ ID NO: 3659509 - RNA, 19 nt, Human
gacagucaucaucagggcc

SEQ ID NO: 3659510 - RNA, 20 nt, Human
gacagucaucaucagggccu

SEQ ID NO: 3659511 - RNA, 13 nt, Human
gacagucccugcc

SEQ ID NO: 3659512 - RNA, 16 nt, Human
gacagucccugccaau

SEQ ID NO: 3659513 - RNA, 15 nt, Human
gacaguccucuccac

SEQ ID NO: 3659514 - RNA, 24 nt, Human
gacaguccucuccaccuaguggcu

SEQ ID NO: 3659515 - RNA, 18 nt, Human
gacaguccugggagaacc

SEQ ID NO: 3659516 - RNA, 14 nt, Human
gacagucucaccau

SEQ ID NO: 3659517 - RNA, 19 nt, Human
gacccugaggcccagaggg

SEQ ID NO: 3659518 - RNA, 20 nt, Human
gacccugcaaacagaacagg

SEQ ID NO: 3659519 - RNA, 14 nt, Human
gacccugcacccuc

SEQ ID NO: 3659520 - RNA, 13 nt, Human
gacccugccaggc

SEQ ID NO: 3659521 - RNA, 15 nt, Human
gacccugccaggcac

SEQ ID NO: 3659522 - RNA, 23 nt, Human
gacccugccaggcacaggcaggg

SEQ ID NO: 3659523 - RNA, 16 nt, Human
gacccugcccuguggg

SEQ ID NO: 3659524 - RNA, 23 nt, Human
gacccugcccuuguuuggggcag

SEQ ID NO: 3659525 - RNA, 21 nt, Human
gacccugccucucccaggcag

SEQ ID NO: 3659526 - RNA, 23 nt, Human
gacccugccucucccaggcaggg

SEQ ID NO: 3659527 - RNA, 15 nt, Human
gacccuggcuuucau

SEQ ID NO: 3659528 - RNA, 14 nt, Human
gacccuggggcugg

SEQ ID NO: 3659529 - RNA, 11 nt, Human
gacccuggggg

SEQ ID NO: 3659530 - RNA, 17 nt, Human
gacccugggugggcucu

SEQ ID NO: 3659531 - RNA, 18 nt, Human
gacccuggugccuggcuc

SEQ ID NO: 3659532 - RNA, 22 nt, Human
gacccugguuauugauguggcc

SEQ ID NO: 3659533 - RNA, 23 nt, Human
gacggagucccaccuuggcugca

SEQ ID NO: 3659534 - RNA, 19 nt, Human
gacggcacccacccagcac

SEQ ID NO: 3659535 - RNA, 11 nt, Human
gacggcaggcu

SEQ ID NO: 3659536 - RNA, 16 nt, Human
gacggccaagaaugua

SEQ ID NO: 3659537 - RNA, 23 nt, Human
gacggccugaugcucccuccccu

SEQ ID NO: 3659538 - RNA, 21 nt, Human
gacggcgagaaaugccucugg

SEQ ID NO: 3659539 - RNA, 12 nt, Human
gacggcuccacu

SEQ ID NO: 3659540 - RNA, 12 nt, Human
gacggcugggca

SEQ ID NO: 3659541 - RNA, 13 nt, Human
gacggcugggcac

SEQ ID NO: 3659542 - RNA, 16 nt, Human
gacggggacuggggau

SEQ ID NO: 3659543 - RNA, 17 nt, Human
gacggggggccccaguc

SEQ ID NO: 3659544 - RNA, 16 nt, Human
gacggguuucaccaug

SEQ ID NO: 3659545 - RNA, 19 nt, Human
gacgguauuaugcuucuug

SEQ ID NO: 3659546 - RNA, 21 nt, Human
gacggucaguuuggugucaac

SEQ ID NO: 3659547 - RNA, 14 nt, Human
gacggugacaaaga

SEQ ID NO: 3659548 - RNA, 21 nt, Human
gacggugacaaagauggcuca

SEQ ID NO: 3659549 - RNA, 17 nt, Human
gacggugcuccaggcag

SEQ ID NO: 3659550 - RNA, 18 nt, Human
gacgguucaccagccucu

SEQ ID NO: 3659551 - RNA, 18 nt, Human
gacgguuccuacacagga

SEQ ID NO: 3659552 - RNA, 22 nt, Human
gacgguuccuacacaggacagg

SEQ ID NO: 3659553 - RNA, 22 nt, Human
gacgguuuccagggaggggccg

SEQ ID NO: 3659554 - RNA, 16 nt, Human
gacguacaaguaguuc

SEQ ID NO: 3659555 - RNA, 21 nt, Human
gacguacguaucagcggcccc

SEQ ID NO: 3659556 - RNA, 15 nt, Human
gacguaggggagggg

SEQ ID NO: 3659557 - RNA, 14 nt, Human
gacgucaagucucc

SEQ ID NO: 3659558 - RNA, 18 nt, Human
gacgucccuuuuuucucu

SEQ ID NO: 3659559 - RNA, 23 nt, Human
gacgugcacugagagugaaguga

SEQ ID NO: 3659560 - RNA, 22 nt, Human
gacgugccuuuugcaccccucc

SEQ ID NO: 3659561 - RNA, 23 nt, Human
gacgugccuuuugcaccccuccc

SEQ ID NO: 3659562 - RNA, 14 nt, Human
gacguggcaccucc

SEQ ID NO: 3659563 - RNA, 20 nt, Human
gacguucauuugugugcuca

SEQ ID NO: 3659564 - RNA, 22 nt, Human
gacguuccagccggcauggcug

SEQ ID NO: 3659565 - RNA, 18 nt, Human
gacguuuacaagcccccc

SEQ ID NO: 3659566 - RNA, 23 nt, Human
gacguuuauaaacagaaauggaa

SEQ ID NO: 3659567 - RNA, 16 nt, Human
gacguuuuauaagcau

SEQ ID NO: 3659568 - RNA, 18 nt, Human
gacuaaaaauauuauaac

SEQ ID NO: 3659569 - RNA, 18 nt, Human
gacuaaaagauauaagug

SEQ ID NO: 3659570 - RNA, 18 nt, Human
gacuaaacuuuuuuucug

SEQ ID NO: 3659571 - RNA, 23 nt, Human
gacuaacacucagaagccugggg

SEQ ID NO: 3659572 - RNA, 22 nt, Human
gacuaaccccaacgcacaggaa

SEQ ID NO: 3659573 - RNA, 18 nt, Human
gacuaaccccaccacacc

SEQ ID NO: 3659574 - RNA, 23 nt, Human
gacuaagagaaguuguaaaguau

SEQ ID NO: 3659575 - RNA, 12 nt, Human
gacuaagccagc

SEQ ID NO: 3659576 - RNA, 18 nt, Human
gacuaagccuaccugcuc

SEQ ID NO: 3659577 - RNA, 22 nt, Human
gacuaauagaaaaguauguucu

SEQ ID NO: 3659578 - RNA, 15 nt, Human
gacuaauuaggcaag

SEQ ID NO: 3659579 - RNA, 22 nt, Human
gacuaauuaggguacauuuaua

SEQ ID NO: 3659580 - RNA, 12 nt, Human
gacuaauucuug

SEQ ID NO: 3659581 - RNA, 18 nt, Human
gacuaauucuugcauauu

SEQ ID NO: 3659582 - RNA, 20 nt, Human
gacuaauuguauaacagguu

SEQ ID NO: 3659583 - RNA, 21 nt, Human
gacuaauuguauaacagguua

SEQ ID NO: 3659584 - RNA, 13 nt, Human
gacuacaggcacc

SEQ ID NO: 3659585 - RNA, 13 nt, Human
gacuacagggccg

SEQ ID NO: 3659586 - RNA, 18 nt, Human
gacuacaggugugaguca

SEQ ID NO: 3659587 - RNA, 15 nt, Human
gacuagaaccuggag

SEQ ID NO: 3659588 - RNA, 22 nt, Human
gacuagagaaaccguccucuuu

SEQ ID NO: 3659589 - RNA, 15 nt, Human
gacuagagcuuucuu

SEQ ID NO: 3659590 - RNA, 17 nt, Human
gacuagaggcagggagg

SEQ ID NO: 3659591 - RNA, 19 nt, Human
gacuagagggaccucuccc

SEQ ID NO: 3659592 - RNA, 16 nt, Human
gacuagaugauggaug

SEQ ID NO: 3659593 - RNA, 17 nt, Human
gacuagauggaccugcc

SEQ ID NO: 3659594 - RNA, 17 nt, Human
gacuagcaaucucuuca

SEQ ID NO: 3659595 - RNA, 23 nt, Human
gacuaggccuugcggcuccucag

SEQ ID NO: 3659596 - RNA, 23 nt, Human
gacuagggaaaugaucaguuuuu

SEQ ID NO: 3659597 - RNA, 17 nt, Human
gacuagggauucaggcu

SEQ ID NO: 3659598 - RNA, 13 nt, Human
gacuagugcugaa

SEQ ID NO: 3659599 - RNA, 15 nt, Human
gacuagugcugaagc

SEQ ID NO: 3659600 - RNA, 16 nt, Human
gacuagugcugaagcu

SEQ ID NO: 3659601 - RNA, 17 nt, Human
gacuagugcugaagcuu

SEQ ID NO: 3659602 - RNA, 18 nt, Human
gacuagugcugaagcuua

SEQ ID NO: 3659603 - RNA, 23 nt, Human
gacuagugcugaagcuuauuaau

SEQ ID NO: 3659604 - RNA, 12 nt, Human
gacuauaaaugu

SEQ ID NO: 3659605 - RNA, 17 nt, Human
gacuauagcuguucuaa

SEQ ID NO: 3659606 - RNA, 12 nt, Human
gacuauauacau

SEQ ID NO: 3659607 - RNA, 23 nt, Human
gacuauauacauguguguauaua

SEQ ID NO: 3659608 - RNA, 16 nt, Human
gacuauauagagaugu

SEQ ID NO: 3659609 - RNA, 23 nt, Human
gacuauauagagauguuuuuaaa

SEQ ID NO: 3659610 - RNA, 19 nt, Human
gacuauauauauaaaugua

SEQ ID NO: 3659611 - RNA, 21 nt, Human
gacuaucccaacagucauguu

SEQ ID NO: 3659612 - RNA, 19 nt, Human
gacuaucuuacuauuucac

SEQ ID NO: 3659613 - RNA, 15 nt, Human
gacuaugaaaagcua

SEQ ID NO: 3659614 - RNA, 19 nt, Human
gacuaugaaaaugcuggcu

SEQ ID NO: 3659615 - RNA, 19 nt, Human
gacuaugaacuucucucag

SEQ ID NO: 3659616 - RNA, 20 nt, Human
gacuaugaacuucucucaga

SEQ ID NO: 3659617 - RNA, 13 nt, Human
gacuaugaauauu

SEQ ID NO: 3659618 - RNA, 21 nt, Human
gacuaugaaugggcaaaacug

SEQ ID NO: 3659619 - RNA, 19 nt, Human
gacuaugcguuuuuauaaa

SEQ ID NO: 3659620 - RNA, 12 nt, Human
gacuauggagcc

SEQ ID NO: 3659621 - RNA, 20 nt, Human
gacuauggagccuggcacag

SEQ ID NO: 3659622 - RNA, 15 nt, Human
gacuauggagcugag

SEQ ID NO: 3659623 - RNA, 22 nt, Human
gacuauuaggugcaauuucaag

SEQ ID NO: 3659624 - RNA, 16 nt, Human
gacuauuauguuguua

SEQ ID NO: 3659625 - RNA, 16 nt, Human
gacuauucaaacaguc

SEQ ID NO: 3659626 - RNA, 22 nt, Human
gacuauucaaacagucucagga

SEQ ID NO: 3659627 - RNA, 16 nt, Human
gacuauugacaucagc

SEQ ID NO: 3659628 - RNA, 13 nt, Human
gacuauuuaugaa

SEQ ID NO: 3659629 - RNA, 18 nt, Human
gacuauuuuuguuuuuau

SEQ ID NO: 3659630 - RNA, 21 nt, Human
gacuauuuuuguuuuuauuaa

SEQ ID NO: 3659631 - RNA, 14 nt, Human
gacucaaaccaaau

SEQ ID NO: 3659632 - RNA, 22 nt, Human
gacucaaaugcucagaccagcu

SEQ ID NO: 3659633 - RNA, 18 nt, Human
gacucaaauguucuaagu

SEQ ID NO: 3659634 - RNA, 19 nt, Human
gacucaaauguucuaaguu

SEQ ID NO: 3659635 - RNA, 19 nt, Human
gacucaagauucccaggag

SEQ ID NO: 3659636 - RNA, 20 nt, Human
gacucaagauucccaggagu

SEQ ID NO: 3659637 - RNA, 16 nt, Human
gacucaagugucucag

SEQ ID NO: 3659638 - RNA, 14 nt, Human
gacucaaugcacug

SEQ ID NO: 3659639 - RNA, 17 nt, Human
gacucaauuucucccca

SEQ ID NO: 3659640 - RNA, 22 nt, Human
gacucacaagaagaccagacug

SEQ ID NO: 3659641 - RNA, 14 nt, Human
gacucacaccugaa

SEQ ID NO: 3659642 - RNA, 14 nt, Human
gacucacaggaagg

SEQ ID NO: 3659643 - RNA, 12 nt, Human
gacucacccaag

SEQ ID NO: 3659644 - RNA, 15 nt, Human
gacucaccuccccca

SEQ ID NO: 3659645 - RNA, 22 nt, Human
gacucaccucccccaucucuuc

SEQ ID NO: 3659646 - RNA, 12 nt, Human
gacucaccucug

SEQ ID NO: 3659647 - RNA, 17 nt, Human
gacucaccuguuacuug

SEQ ID NO: 3659648 - RNA, 23 nt, Human
gacucacuuaucccaagagaaug

SEQ ID NO: 3659649 - RNA, 18 nt, Human
gacucagacauuggcacc

SEQ ID NO: 3659650 - RNA, 18 nt, Human
gacucagagcucucucua

SEQ ID NO: 3659651 - RNA, 11 nt, Human
gacucagcccu

SEQ ID NO: 3659652 - RNA, 12 nt, Human
gacucagccuuc

SEQ ID NO: 3659653 - RNA, 17 nt, Human
gacucagcuccccagag

SEQ ID NO: 3659654 - RNA, 22 nt, Human
gacucagcucugacauucugau

SEQ ID NO: 3659655 - RNA, 17 nt, Human
gacucaggauccagucc

SEQ ID NO: 3659656 - RNA, 15 nt, Human
gacucaggaugccca

SEQ ID NO: 3659657 - RNA, 16 nt, Human
gacucaggaugcccag

SEQ ID NO: 3659658 - RNA, 23 nt, Human
gacucaggcccccaccuggcuca

SEQ ID NO: 3659659 - RNA, 12 nt, Human
gacucagggcag

SEQ ID NO: 3659660 - RNA, 15 nt, Human
gacucagggccccag

SEQ ID NO: 3659661 - RNA, 21 nt, Human
gacugcagguuggaccccaga

SEQ ID NO: 3659662 - RNA, 23 nt, Human
gacugcagguuggaccccagaga

SEQ ID NO: 3659663 - RNA, 14 nt, Human
gacugcauuauauu

SEQ ID NO: 3659664 - RNA, 20 nt, Human
gacugcauuuuacuguacag

SEQ ID NO: 3659665 - RNA, 18 nt, Human
gacugccacaaggaagaa

SEQ ID NO: 3659666 - RNA, 19 nt, Human
gacugccacaaggaagaaa

SEQ ID NO: 3659667 - RNA, 14 nt, Human
gacugccagcucuu

SEQ ID NO: 3659668 - RNA, 18 nt, Human
gacugccagcucuuccua

SEQ ID NO: 3659669 - RNA, 13 nt, Human
gacugcccggcag

SEQ ID NO: 3659670 - RNA, 16 nt, Human
gacugccgaccgaggc

SEQ ID NO: 3659671 - RNA, 19 nt, Human
gacugccgaccgaggcugg

SEQ ID NO: 3659672 - RNA, 12 nt, Human
gacugccucugc

SEQ ID NO: 3659673 - RNA, 15 nt, Human
gacugccucugccac

SEQ ID NO: 3659674 - RNA, 21 nt, Human
gacugcgggaugguccugggg

SEQ ID NO: 3659675 - RNA, 12 nt, Human
gacugcuaaaua

SEQ ID NO: 3659676 - RNA, 21 nt, Human
gacugcuaccuuucaaagcuu

SEQ ID NO: 3659677 - RNA, 15 nt, Human
gacugcucagaacuu

SEQ ID NO: 3659678 - RNA, 20 nt, Human
gacugcucagaacuugcugc

SEQ ID NO: 3659679 - RNA, 23 nt, Human
gacugcucagaacuugcugcugu

SEQ ID NO: 3659680 - RNA, 15 nt, Human
gacugcuccccagcc

SEQ ID NO: 3659681 - RNA, 24 nt, Human
gacugcuccccagcccuggcucug

SEQ ID NO: 3659682 - RNA, 19 nt, Human
gacugcuccugagccccca

SEQ ID NO: 3659683 - RNA, 22 nt, Human
gacugcuccugagcccccagcu

SEQ ID NO: 3659684 - RNA, 16 nt, Human
gacugcugcugccugg

SEQ ID NO: 3659685 - RNA, 17 nt, Human
gacugcugcugccuggc

SEQ ID NO: 3659686 - RNA, 16 nt, Human
gacugcugguuuguag

SEQ ID NO: 3659687 - RNA, 15 nt, Human
gacugcuguggccag

SEQ ID NO: 3659688 - RNA, 17 nt, Human
gacugcuguggccagga

SEQ ID NO: 3659689 - RNA, 20 nt, Human
gacugcuguggccaggaggu

SEQ ID NO: 3659690 - RNA, 17 nt, Human
gacugcuucccauccua

SEQ ID NO: 3659691 - RNA, 20 nt, Human
gacugcuugcccuaagcaga

SEQ ID NO: 3659692 - RNA, 21 nt, Human
gacugcuugcccuaagcagaa

SEQ ID NO: 3659693 - RNA, 16 nt, Human
gacuggaagcacagcu

SEQ ID NO: 3659694 - RNA, 20 nt, Human
gacuggaagcuaauuugcau

SEQ ID NO: 3659695 - RNA, 19 nt, Human
gacuggaaguucauaccua

SEQ ID NO: 3659696 - RNA, 21 nt, Human
gacuggaaguucauaccuaag

SEQ ID NO: 3659697 - RNA, 23 nt, Human
gaccuuuauuggguaucaagaca

SEQ ID NO: 3659698 - RNA, 11 nt, Human
gaccuuucaau

SEQ ID NO: 3659699 - RNA, 20 nt, Human
gaccuuucaauaggaaaaac

SEQ ID NO: 3659700 - RNA, 18 nt, Human
gaccuuuccugaggaaga

SEQ ID NO: 3659701 - RNA, 18 nt, Human
gaccuuuguacagcccag

SEQ ID NO: 3659702 - RNA, 19 nt, Human
gaccuuuguacagcccaga

SEQ ID NO: 3659703 - RNA, 21 nt, Human
gaccuuugucaucuuucuucu

SEQ ID NO: 3659704 - RNA, 14 nt, Human
gaccuuuugcugcc

SEQ ID NO: 3659705 - RNA, 18 nt, Human
gaccuuuugggggagggc

SEQ ID NO: 3659706 - RNA, 22 nt, Human
gacgagacccaagggcagagca

SEQ ID NO: 3659707 - RNA, 17 nt, Human
gacgaggcccucgggcc

SEQ ID NO: 3659708 - RNA, 18 nt, Human
gacgaggggugucuuggg

SEQ ID NO: 3659709 - RNA, 23 nt, Human
gacgauacuccaaccauauggau

SEQ ID NO: 3659710 - RNA, 19 nt, Human
gacgcaagggccugauggg

SEQ ID NO: 3659711 - RNA, 13 nt, Human
gacgcacacagcu

SEQ ID NO: 3659712 - RNA, 14 nt, Human
gacgcacacagcuu

SEQ ID NO: 3659713 - RNA, 12 nt, Human
gacgcacugagc

SEQ ID NO: 3659714 - RNA, 23 nt, Human
gacgccacagcccagccacggac

SEQ ID NO: 3659715 - RNA, 14 nt, Human
gacgccacucauuu

SEQ ID NO: 3659716 - RNA, 16 nt, Human
gacgccacucauuuca

SEQ ID NO: 3659717 - RNA, 18 nt, Human
gacgccacucauuucauc

SEQ ID NO: 3659718 - RNA, 12 nt, Human
gacgccauccca

SEQ ID NO: 3659719 - RNA, 21 nt, Human
gacgccaucccagccccaaug

SEQ ID NO: 3659720 - RNA, 11 nt, Human
gacgcccaccc

SEQ ID NO: 3659721 - RNA, 22 nt, Human
gacgccggggacagaggccugc

SEQ ID NO: 3659722 - RNA, 13 nt, Human
gacgccugagcuc

SEQ ID NO: 3659723 - RNA, 17 nt, Human
gacgccugagcucacuc

SEQ ID NO: 3659724 - RNA, 13 nt, Human
gacgccugaggaa

SEQ ID NO: 3659725 - RNA, 22 nt, Human
gacgccugcccuccccagagca

SEQ ID NO: 3659726 - RNA, 19 nt, Human
gacgccugggggugccagg

SEQ ID NO: 3659727 - RNA, 15 nt, Human
gacgcgucuccuguu

SEQ ID NO: 3659728 - RNA, 16 nt, Human
gacgcuacccgggaag

SEQ ID NO: 3659729 - RNA, 19 nt, Human
gacgcuacccgggaagggg

SEQ ID NO: 3659730 - RNA, 13 nt, Human
gacgcucugcugu

SEQ ID NO: 3659731 - RNA, 13 nt, Human
gacgcugcagagc

SEQ ID NO: 3659732 - RNA, 18 nt, Human
gacgcugguagagaugga

SEQ ID NO: 3659733 - RNA, 12 nt, Human
gacgcugugcug

SEQ ID NO: 3659734 - RNA, 21 nt, Human
gacggaagccuuuuuccccaa

SEQ ID NO: 3659735 - RNA, 18 nt, Human
gacggaaggguaaacaau

SEQ ID NO: 3659736 - RNA, 22 nt, Human
gacggcacugagagagcgcagc

SEQ ID NO: 3659737 - RNA, 19 nt, Human
gacggcaggcucacugcca

SEQ ID NO: 3659738 - RNA, 17 nt, Human
gacggcgcccccagugu

SEQ ID NO: 3659739 - RNA, 18 nt, Human
gacggcuccacuaggacu

SEQ ID NO: 3659740 - RNA, 22 nt, Human
gacggggggccccagucagccu

SEQ ID NO: 3659741 - RNA, 19 nt, Human
gacggguuggggccgggca

SEQ ID NO: 3659742 - RNA, 22 nt, Human
gacggucaguuuggugucaaca

SEQ ID NO: 3659743 - RNA, 23 nt, Human
gacgguguuuugccauguuggcc

SEQ ID NO: 3659744 - RNA, 19 nt, Human
gacgguucaccagccucuc

SEQ ID NO: 3659745 - RNA, 11 nt, Human
gacgguuccua

SEQ ID NO: 3659746 - RNA, 18 nt, Human
gacgguuuccagggaggg

SEQ ID NO: 3659747 - RNA, 18 nt, Human
gacguacaaguaguucug

SEQ ID NO: 3659748 - RNA, 20 nt, Human
gacguacuccaacagaagaa

SEQ ID NO: 3659749 - RNA, 12 nt, Human
gacguagcugca

SEQ ID NO: 3659750 - RNA, 23 nt, Human
gacguaugcuuauuuuaaaauuu

SEQ ID NO: 3659751 - RNA, 13 nt, Human
gacguccugccac

SEQ ID NO: 3659752 - RNA, 14 nt, Human
gacguccugccacc

SEQ ID NO: 3659753 - RNA, 17 nt, Human
gacgucuggguggcccu

SEQ ID NO: 3659754 - RNA, 22 nt, Human
gacgucuuucuuuuuuuccccc

SEQ ID NO: 3659755 - RNA, 22 nt, Human
gacgugaccggacuuuucugca

SEQ ID NO: 3659756 - RNA, 22 nt, Human
gacgugauucaauucaacacuc

SEQ ID NO: 3659757 - RNA, 20 nt, Human
gacguggaaccucugucuca

SEQ ID NO: 3659758 - RNA, 12 nt, Human
gacguggcucag

SEQ ID NO: 3659759 - RNA, 11 nt, Human
gacguguuaug

SEQ ID NO: 3659760 - RNA, 15 nt, Human
gacguguuaugacuc

SEQ ID NO: 3659761 - RNA, 17 nt, Human
gacguguuaugacucca

SEQ ID NO: 3659762 - RNA, 22 nt, Human
gacguguuaugacuccagaauu

SEQ ID NO: 3659763 - RNA, 14 nt, Human
gacguguuuguguu

SEQ ID NO: 3659764 - RNA, 13 nt, Human
gacguuuccauca

SEQ ID NO: 3659765 - RNA, 12 nt, Human
gacguuucucau

SEQ ID NO: 3659766 - RNA, 23 nt, Human
gacguuucucauuuguuuuucuc

SEQ ID NO: 3659767 - RNA, 17 nt, Human
gacuaaaagauauaagu

SEQ ID NO: 3659768 - RNA, 21 nt, Human
gacuaaaagauauaagugcug

SEQ ID NO: 3659769 - RNA, 22 nt, Human
gacuaaaagauauaagugcugu

SEQ ID NO: 3659770 - RNA, 20 nt, Human
gacuaaacuuuuuuucugua

SEQ ID NO: 3659771 - RNA, 22 nt, Human
gacuaaacuuuuuuucuguacc

SEQ ID NO: 3659772 - RNA, 14 nt, Human
gacuaaagagagaa

SEQ ID NO: 3659773 - RNA, 17 nt, Human
gacuaaagagagaaugu

SEQ ID NO: 3659774 - RNA, 20 nt, Human
gacuaaauuuggggacagau

SEQ ID NO: 3659775 - RNA, 21 nt, Human
gacuaacacucagaagccugg

SEQ ID NO: 3659776 - RNA, 23 nt, Human
gacuaaccccaacgcacaggaaa

SEQ ID NO: 3659777 - RNA, 21 nt, Human
gacuaacuagacaccaaaguu

SEQ ID NO: 3659778 - RNA, 16 nt, Human
gacuaacuugucuuug

SEQ ID NO: 3659779 - RNA, 17 nt, Human
gacuaauauauuaauau

SEQ ID NO: 3659780 - RNA, 14 nt, Human
gacuaauggcauga

SEQ ID NO: 3659781 - RNA, 21 nt, Human
gacuaauuaggguacauuuau

SEQ ID NO: 3659782 - RNA, 15 nt, Human
gacuaauuguauaac

SEQ ID NO: 3659783 - RNA, 19 nt, Human
gacuaauuguauaacaggu

SEQ ID NO: 3659784 - RNA, 22 nt, Human
gacuaauuucaaaaugcuuuuu

SEQ ID NO: 3659785 - RNA, 15 nt, Human
gacuaauuuuacaug

SEQ ID NO: 3659786 - RNA, 15 nt, Human
gacuacaccuacgga

SEQ ID NO: 3659787 - RNA, 19 nt, Human
gacuacagcuggggugcag

SEQ ID NO: 3659788 - RNA, 18 nt, Human
gacuacagucaggaaagg

SEQ ID NO: 3659789 - RNA, 17 nt, Human
gacuacucccccaggug

SEQ ID NO: 3659790 - RNA, 14 nt, Human
gacuacuguucagc

SEQ ID NO: 3659791 - RNA, 13 nt, Human
gacuacuuagcau

SEQ ID NO: 3659792 - RNA, 18 nt, Human
gacuagaaagugaauaaa

SEQ ID NO: 3659793 - RNA, 23 nt, Human
gacuagaagggccaguccugccu

SEQ ID NO: 3659794 - RNA, 19 nt, Human
gacuagaauucuagugcug

SEQ ID NO: 3659795 - RNA, 16 nt, Human
gacuagacacacaaag

SEQ ID NO: 3659796 - RNA, 19 nt, Human
gacuagaccuccagcuguu

SEQ ID NO: 3659797 - RNA, 21 nt, Human
gacuagaugauggaugccaau

SEQ ID NO: 3659798 - RNA, 18 nt, Human
gacuaggguccuggggaa

SEQ ID NO: 3659799 - RNA, 12 nt, Human
gacuagugcuga

SEQ ID NO: 3659800 - RNA, 14 nt, Human
gacuagugcugaag

SEQ ID NO: 3659801 - RNA, 19 nt, Human
gacuagugcugaagcuuau

SEQ ID NO: 3659802 - RNA, 21 nt, Human
gacuauauacauguguguaua

SEQ ID NO: 3659803 - RNA, 20 nt, Human
gacuauauagagauguuuuu

SEQ ID NO: 3659804 - RNA, 18 nt, Human
gacuauauauauaaaugu

SEQ ID NO: 3659805 - RNA, 14 nt, Human
cucccuuguucucu

SEQ ID NO: 3659806 - RNA, 17 nt, Human
cucccuuguucucuaag

SEQ ID NO: 3659807 - RNA, 15 nt, Human
cucccuuucuccccu

SEQ ID NO: 3659808 - RNA, 19 nt, Human
cucccuuuuaauccuggcu

SEQ ID NO: 3659809 - RNA, 21 nt, Human
cucccuuuuuauaucccauuu

SEQ ID NO: 3659810 - RNA, 20 nt, Human
cucccuuuuuccuugucccc

SEQ ID NO: 3659811 - RNA, 22 nt, Human
cucccuuuuuccuuguccccac

SEQ ID NO: 3659812 - RNA, 18 nt, Human
cuccgaaaugcugucuuu

SEQ ID NO: 3659813 - RNA, 15 nt, Human
cuccgagaggugggc

SEQ ID NO: 3659814 - RNA, 18 nt, Human
cuccgagaggugggccag

SEQ ID NO: 3659815 - RNA, 17 nt, Human
cuccgaggacccaggaa

SEQ ID NO: 3659816 - RNA, 16 nt, Human
cuccgauccuuccucc

SEQ ID NO: 3659817 - RNA, 13 nt, Human
cuccgccagccuc

SEQ ID NO: 3659818 - RNA, 21 nt, Human
cuccgccagccuccucuggac

SEQ ID NO: 3659819 - RNA, 13 nt, Human
cuccgccaggcga

SEQ ID NO: 3659820 - RNA, 13 nt, Human
cuccgccauccac

SEQ ID NO: 3659821 - RNA, 15 nt, Human
cuccgcccccagccu

SEQ ID NO: 3659822 - RNA, 14 nt, Human
cuccgcccugccac

SEQ ID NO: 3659823 - RNA, 15 nt, Human
cuccgcccugccacu

SEQ ID NO: 3659824 - RNA, 14 nt, Human
cuccgccuucacau

SEQ ID NO: 3659825 - RNA, 21 nt, Human
cuccgccuucacuccggugug

SEQ ID NO: 3659826 - RNA, 16 nt, Human
cuccgcggcgggcccu

SEQ ID NO: 3659827 - RNA, 15 nt, Human
cuccgcucuguagug

SEQ ID NO: 3659828 - RNA, 21 nt, Human
cuccgcugccgugccgccugc

SEQ ID NO: 3659829 - RNA, 13 nt, Human
cuccgcugcuccu

SEQ ID NO: 3659830 - RNA, 18 nt, Human
cuccgcugcuccuuggcu

SEQ ID NO: 3659831 - RNA, 14 nt, Human
cuccgcuggaggug

SEQ ID NO: 3659832 - RNA, 20 nt, Human
cuccgcuuucuacccagcga

SEQ ID NO: 3659833 - RNA, 15 nt, Human
cuccggacuggugcc

SEQ ID NO: 3659834 - RNA, 16 nt, Human
cuccggacuggugccc

SEQ ID NO: 3659835 - RNA, 13 nt, Human
cuccggagacagg

SEQ ID NO: 3659836 - RNA, 22 nt, Human
cuccggagugagaagcuuugcc

SEQ ID NO: 3659837 - RNA, 19 nt, Human
cuccggccaggugccuccu

SEQ ID NO: 3659838 - RNA, 20 nt, Human
cuccggccaggugccuccug

SEQ ID NO: 3659839 - RNA, 14 nt, Human
cuccggcucccagc

SEQ ID NO: 3659840 - RNA, 20 nt, Human
cuccggcucccagccucagc

SEQ ID NO: 3659841 - RNA, 13 nt, Human
cuccggcugugcu

SEQ ID NO: 3659842 - RNA, 21 nt, Human
cuccggcugugcugggagaaa

SEQ ID NO: 3659843 - RNA, 15 nt, Human
cuccgggacccccag

SEQ ID NO: 3659844 - RNA, 14 nt, Human
cuccgggagagggg

SEQ ID NO: 3659845 - RNA, 21 nt, Human
cuccggggagcgcccgcgccc

SEQ ID NO: 3659846 - RNA, 19 nt, Human
cuccggggccauuugcaau

SEQ ID NO: 3659847 - RNA, 20 nt, Human
cuccgguaaaacaccggaga

SEQ ID NO: 3659848 - RNA, 13 nt, Human
cuccguauuucag

SEQ ID NO: 3659849 - RNA, 14 nt, Human
cuccguauuucaga

SEQ ID NO: 3659850 - RNA, 14 nt, Human
cuccgucaacucau

SEQ ID NO: 3659851 - RNA, 16 nt, Human
cuccgucacuaccugg

SEQ ID NO: 3659852 - RNA, 22 nt, Human
cuccguccagccgccauugcca

SEQ ID NO: 3659853 - RNA, 19 nt, Human
cuccguccaggagccuggc

SEQ ID NO: 3659854 - RNA, 22 nt, Human
cuccgucuuagaaguggaccag

SEQ ID NO: 3659855 - RNA, 14 nt, Human
cuccgugccuccac

SEQ ID NO: 3659856 - RNA, 13 nt, Human
cuccguggaggag

SEQ ID NO: 3659857 - RNA, 12 nt, Human
cuccguguggga

SEQ ID NO: 3659858 - RNA, 14 nt, Human
cuccgugugggaga

SEQ ID NO: 3659859 - RNA, 16 nt, Human
cuccguuagcuccugu

SEQ ID NO: 3659860 - RNA, 18 nt, Human
cuccguuagcuccugugg

SEQ ID NO: 3659861 - RNA, 12 nt, Human
cuccuaaaacaa

SEQ ID NO: 3659862 - RNA, 13 nt, Human
cuccuaaaacaac

SEQ ID NO: 3659863 - RNA, 16 nt, Human
cuccuaaaaggcccag

SEQ ID NO: 3659864 - RNA, 18 nt, Human
cuccuaaaaggcccagag

SEQ ID NO: 3659865 - RNA, 17 nt, Human
cuccuaaaguagacuuc

SEQ ID NO: 3659866 - RNA, 20 nt, Human
cuccuaacugccagcccccu

SEQ ID NO: 3659867 - RNA, 20 nt, Human
cuccuacaagauuuagaaaa

SEQ ID NO: 3659868 - RNA, 20 nt, Human
cuccuacauaucccuuccag

SEQ ID NO: 3659869 - RNA, 19 nt, Human
cuccuaccccucccagcug

SEQ ID NO: 3659870 - RNA, 15 nt, Human
cuccuacccugcgcc

SEQ ID NO: 3659871 - RNA, 14 nt, Human
cuccuaccucagcc

SEQ ID NO: 3659872 - RNA, 20 nt, Human
cuccuaccugcccuggaaca

SEQ ID NO: 3659873 - RNA, 12 nt, Human
cuccuagacuga

SEQ ID NO: 3659874 - RNA, 20 nt, Human
cuccuagagaacgcagcccu

SEQ ID NO: 3659875 - RNA, 15 nt, Human
cuccuagagggaggg

SEQ ID NO: 3659876 - RNA, 23 nt, Human
cuccuagagggaggggccuaggc

SEQ ID NO: 3659877 - RNA, 15 nt, Human
cuccuagcagagaga

SEQ ID NO: 3659878 - RNA, 22 nt, Human
cuccuaggacauguucccuucu

SEQ ID NO: 3659879 - RNA, 21 nt, Human
cuccuaggacccgucuccagc

SEQ ID NO: 3659880 - RNA, 15 nt, Human
cuccuagggcauugu

SEQ ID NO: 3659881 - RNA, 23 nt, Human
cuccuagguagcccccucuuccc

SEQ ID NO: 3659882 - RNA, 23 nt, Human
cuccuaguagggguaccacugaa

SEQ ID NO: 3659883 - RNA, 23 nt, Human
cuccuaguucuagaaaaacaggc

SEQ ID NO: 3659884 - RNA, 14 nt, Human
cuccuauaaucugu

SEQ ID NO: 3659885 - RNA, 18 nt, Human
cuccuaucuguguuuuga

SEQ ID NO: 3659886 - RNA, 16 nt, Human
cuccuaugaucugagu

SEQ ID NO: 3659887 - RNA, 23 nt, Human
cuccuaugaucugagucagagcc

SEQ ID NO: 3659888 - RNA, 19 nt, Human
cuccuauuuuuguaaacug

SEQ ID NO: 3659889 - RNA, 20 nt, Human
cuccucaaccccuccccucc

SEQ ID NO: 3659890 - RNA, 21 nt, Human
cuccucaaccccuccccucca

SEQ ID NO: 3659891 - RNA, 17 nt, Human
cuccucacacacccuga

SEQ ID NO: 3659892 - RNA, 19 nt, Human
cuccucacacacccugagg

SEQ ID NO: 3659893 - RNA, 16 nt, Human
cuccucacacuuacug

SEQ ID NO: 3659894 - RNA, 12 nt, Human
cuccucaccuca

SEQ ID NO: 3659895 - RNA, 16 nt, Human
cuccucaccucaugcc

SEQ ID NO: 3659896 - RNA, 15 nt, Human
cuccucaccucugga

SEQ ID NO: 3659897 - RNA, 16 nt, Human
cuccucaccucuggac

SEQ ID NO: 3659898 - RNA, 21 nt, Human
cuccucaccucuggacuggcu

SEQ ID NO: 3659899 - RNA, 14 nt, Human
cuccucacucccuu

SEQ ID NO: 3659900 - RNA, 23 nt, Human
gagacugguccugugugcaguga

SEQ ID NO: 3659901 - RNA, 21 nt, Human
gagacugucuggccccccugg

SEQ ID NO: 3659902 - RNA, 20 nt, Human
gagacuguggagacugcucc

SEQ ID NO: 3659903 - RNA, 13 nt, Human
gagacuugccaga

SEQ ID NO: 3659904 - RNA, 12 nt, Human
gagacuugccuu

SEQ ID NO: 3659905 - RNA, 14 nt, Human
gagacuuuaaaagc

SEQ ID NO: 3659906 - RNA, 17 nt, Human
gagacuuuaaaagcauu

SEQ ID NO: 3659907 - RNA, 10 nt, Human
gagacuuuga

SEQ ID NO: 3659908 - RNA, 15 nt, Human
gagacuuugauguca

SEQ ID NO: 3659909 - RNA, 14 nt, Human
gagacuuuuuucua

SEQ ID NO: 3659910 - RNA, 16 nt, Human
gagacuuuuuucuagu

SEQ ID NO: 3659911 - RNA, 14 nt, Human
gagagaaaaacaaa

SEQ ID NO: 3659912 - RNA, 18 nt, Human
gagagaaaacagaccuaa

SEQ ID NO: 3659913 - RNA, 22 nt, Human
gagagaaaacagaccuaaugcu

SEQ ID NO: 3659914 - RNA, 11 nt, Human
gagagaaaaua

SEQ ID NO: 3659915 - RNA, 13 nt, Human
gagagaaaauaaa

SEQ ID NO: 3659916 - RNA, 14 nt, Human
gagagaaaauaaaa

SEQ ID NO: 3659917 - RNA, 18 nt, Human
gagagaaaauaaaaaguu

SEQ ID NO: 3659918 - RNA, 21 nt, Human
gagagaaaauaaaaaguuaaa

SEQ ID NO: 3659919 - RNA, 21 nt, Human
gagagaaaauauauguauuuu

SEQ ID NO: 3659920 - RNA, 13 nt, Human
gagagaaacaaac

SEQ ID NO: 3659921 - RNA, 18 nt, Human
gagagaaagccaggcagg

SEQ ID NO: 3659922 - RNA, 16 nt, Human
gagagaaaggacuccu

SEQ ID NO: 3659923 - RNA, 15 nt, Human
gagagaaauauuuua

SEQ ID NO: 3659924 - RNA, 14 nt, Human
gagagaaauucugu

SEQ ID NO: 3659925 - RNA, 17 nt, Human
gagagaaccuaacugua

SEQ ID NO: 3659926 - RNA, 17 nt, Human
gagagaagagaaugcac

SEQ ID NO: 3659927 - RNA, 16 nt, Human
gagagaagagccccac

SEQ ID NO: 3659928 - RNA, 12 nt, Human
gagagaaggggc

SEQ ID NO: 3659929 - RNA, 13 nt, Human
gagagaagugccc

SEQ ID NO: 3659930 - RNA, 16 nt, Human
gagagaauuggcucaa

SEQ ID NO: 3659931 - RNA, 17 nt, Human
gagagaauuggcucaau

SEQ ID NO: 3659932 - RNA, 19 nt, Human
gagagacacacugaagaag

SEQ ID NO: 3659933 - RNA, 16 nt, Human
gagagaccaggcaaag

SEQ ID NO: 3659934 - RNA, 15 nt, Human
gagagaccucaucag

SEQ ID NO: 3659935 - RNA, 20 nt, Human
gagagacguguacauagugu

SEQ ID NO: 3659936 - RNA, 21 nt, Human
gagagacucccaugaagccuu

SEQ ID NO: 3659937 - RNA, 11 nt, Human
gagagagaaau

SEQ ID NO: 3659938 - RNA, 20 nt, Human
gagagagaaauucuguuaaa

SEQ ID NO: 3659939 - RNA, 11 nt, Human
gagagagagag

SEQ ID NO: 3659940 - RNA, 14 nt, Human
gagagagagagaaa

SEQ ID NO: 3659941 - RNA, 13 nt, Human
gagagagagagag

SEQ ID NO: 3659942 - RNA, 15 nt, Human
gagagagauguguaa

SEQ ID NO: 3659943 - RNA, 15 nt, Human
gagagagcagcuucu

SEQ ID NO: 3659944 - RNA, 16 nt, Human
gagagaggcagagagc

SEQ ID NO: 3659945 - RNA, 19 nt, Human
gagagagguugaaaaacaa

SEQ ID NO: 3659946 - RNA, 15 nt, Human
gagagauacucuggg

SEQ ID NO: 3659947 - RNA, 16 nt, Human
gagagauagccugugg

SEQ ID NO: 3659948 - RNA, 18 nt, Human
gagagauagccuguggcc

SEQ ID NO: 3659949 - RNA, 20 nt, Human
gagagauagccuguggcccu

SEQ ID NO: 3659950 - RNA, 17 nt, Human
gagagauauaucugaaa

SEQ ID NO: 3659951 - RNA, 13 nt, Human
gagagaucugcug

SEQ ID NO: 3659952 - RNA, 18 nt, Human
gagagauguguaauuuuu

SEQ ID NO: 3659953 - RNA, 14 nt, Human
gagagauguguguu

SEQ ID NO: 3659954 - RNA, 16 nt, Human
gagagcagaggucucc

SEQ ID NO: 3659955 - RNA, 19 nt, Human
gagagcagcuucugccacu

SEQ ID NO: 3659956 - RNA, 22 nt, Human
gagagcagcuucugccacuucc

SEQ ID NO: 3659957 - RNA, 14 nt, Human
gagagcaggcuggc

SEQ ID NO: 3659958 - RNA, 17 nt, Human
gagagcaggcuggcagc

SEQ ID NO: 3659959 - RNA, 22 nt, Human
gagagcauuauaaucaccaggg

SEQ ID NO: 3659960 - RNA, 16 nt, Human
gagagccaccaagagg

SEQ ID NO: 3659961 - RNA, 22 nt, Human
gagagccagagaagugacaggg

SEQ ID NO: 3659962 - RNA, 21 nt, Human
gagagcccagagguaacagaa

SEQ ID NO: 3659963 - RNA, 20 nt, Human
gagagcccagagucccccca

SEQ ID NO: 3659964 - RNA, 11 nt, Human
gagagcccagc

SEQ ID NO: 3659965 - RNA, 16 nt, Human
gagagcccaggagcuc

SEQ ID NO: 3659966 - RNA, 13 nt, Human
gagagccccagcu

SEQ ID NO: 3659967 - RNA, 18 nt, Human
gagagccccucacacagc

SEQ ID NO: 3659968 - RNA, 20 nt, Human
gagagccccuggggccuaga

SEQ ID NO: 3659969 - RNA, 23 nt, Human
gagagcccgaggaggugucucag

SEQ ID NO: 3659970 - RNA, 20 nt, Human
gagagccguggucccugagg

SEQ ID NO: 3659971 - RNA, 14 nt, Human
gagagccugcagga

SEQ ID NO: 3659972 - RNA, 14 nt, Human
gagagccugcuccc

SEQ ID NO: 3659973 - RNA, 21 nt, Human
gagagccugcucccccacccc

SEQ ID NO: 3659974 - RNA, 23 nt, Human
gagagccugcucccccacccccu

SEQ ID NO: 3659975 - RNA, 15 nt, Human
gagagccugcuggca

SEQ ID NO: 3659976 - RNA, 17 nt, Human
gagagccuggugcugcu

SEQ ID NO: 3659977 - RNA, 16 nt, Human
gagagcgccugccccu

SEQ ID NO: 3659978 - RNA, 14 nt, Human
gagagcggucucag

SEQ ID NO: 3659979 - RNA, 22 nt, Human
gagagcgugcuccagccuggcu

SEQ ID NO: 3659980 - RNA, 20 nt, Human
gagagcuagaaccuggagag

SEQ ID NO: 3659981 - RNA, 14 nt, Human
gagagcuaggagca

SEQ ID NO: 3659982 - RNA, 14 nt, Human
gagagcuggagccu

SEQ ID NO: 3659983 - RNA, 14 nt, Human
gagagcuggggaag

SEQ ID NO: 3659984 - RNA, 23 nt, Human
gagagcuggggaagcuucuuaaa

SEQ ID NO: 3659985 - RNA, 20 nt, Human
gagagcugggugucaagagg

SEQ ID NO: 3659986 - RNA, 18 nt, Human
gagagcuuagccuggagc

SEQ ID NO: 3659987 - RNA, 20 nt, Human
gagaggaaaaguaaggugca

SEQ ID NO: 3659988 - RNA, 12 nt, Human
gagaggaaauca

SEQ ID NO: 3659989 - RNA, 18 nt, Human
gagaggaaauucuccacu

SEQ ID NO: 3659990 - RNA, 23 nt, Human
gagaggaacuccuuggccuagcc

SEQ ID NO: 3659991 - RNA, 17 nt, Human
gagaggacaagaugggu

SEQ ID NO: 3659992 - RNA, 10 nt, Human
gagaggacag

SEQ ID NO: 3659993 - RNA, 17 nt, Human
gagaggacgugggcggc

SEQ ID NO: 3659994 - RNA, 11 nt, Human
gagaggagaga

SEQ ID NO: 3659995 - RNA, 18 nt, Human
gagaggagagaggcagag

SEQ ID NO: 3659996 - RNA, 13 nt, Human
gagaggagagcca

SEQ ID NO: 3659997 - RNA, 15 nt, Human
gagaggagagccaga

SEQ ID NO: 3659998 - RNA, 19 nt, Human
gagaggagcgggaccugug

SEQ ID NO: 3659999 - RNA, 21 nt, Human
gagaggagcgggaccuguggc

SEQ ID NO: 3660000 - RNA, 15 nt, Human
gagaggaguucaaug

SEQ ID NO: 3660001 - RNA, 17 nt, Human
gagaggaguucaaugau

SEQ ID NO: 3660002 - RNA, 19 nt, Human
gagaggaguucaaugaucu

SEQ ID NO: 3660003 - RNA, 16 nt, Human
gagaggaugagagccc

SEQ ID NO: 3660004 - RNA, 15 nt, Human
gagaggcaauggcca

SEQ ID NO: 3660005 - RNA, 14 nt, Human
gagaggcagagagc

SEQ ID NO: 3660006 - RNA, 13 nt, Human
gagaggcagagug

SEQ ID NO: 3660007 - RNA, 15 nt, Human
gagaggcagagugcc

SEQ ID NO: 3660008 - RNA, 16 nt, Human
gagaggcagagugccc

SEQ ID NO: 3660009 - RNA, 21 nt, Human
gagaggcagcccaggaagucu

SEQ ID NO: 3660010 - RNA, 21 nt, Human
gagaggcaggcauagaggcuu

SEQ ID NO: 3660011 - RNA, 12 nt, Human
gagaggcccugg

SEQ ID NO: 3660012 - RNA, 21 nt, Human
gagaggcccuggaucagcgug

SEQ ID NO: 3660013 - RNA, 12 nt, Human
gagaggcuggga

SEQ ID NO: 3660014 - RNA, 21 nt, Human
gagaggcugugguuuggggga

SEQ ID NO: 3660015 - RNA, 14 nt, Human
gagagggaauguga

SEQ ID NO: 3660016 - RNA, 14 nt, Human
gagagggagaagaa

SEQ ID NO: 3660017 - RNA, 15 nt, Human
gagagggagaagaag

SEQ ID NO: 3660018 - RNA, 19 nt, Human
gagagggaggcaagcccug

SEQ ID NO: 3660019 - RNA, 16 nt, Human
gagagggcaggcauga

SEQ ID NO: 3660020 - RNA, 23 nt, Human
gagagggccgggcagaggggcag

SEQ ID NO: 3660021 - RNA, 20 nt, Human
gagagggcucgagggguggg

SEQ ID NO: 3660022 - RNA, 21 nt, Human
gagagggcucgaggggugggc

SEQ ID NO: 3660023 - RNA, 18 nt, Human
gagaggggagagcugaac

SEQ ID NO: 3660024 - RNA, 16 nt, Human
gagaggggaggccaag

SEQ ID NO: 3660025 - RNA, 13 nt, Human
gagagggggcugg

SEQ ID NO: 3660026 - RNA, 13 nt, Human
gagagggucugga

SEQ ID NO: 3660027 - RNA, 14 nt, Human
gagagggugggagu

SEQ ID NO: 3660028 - RNA, 16 nt, Human
gagagggugggagugg

SEQ ID NO: 3660029 - RNA, 20 nt, Human
gagagggugggagugggccc

SEQ ID NO: 3660030 - RNA, 18 nt, Human
gagaggucaagcccagga

SEQ ID NO: 3660031 - RNA, 13 nt, Human
gagaggugccagc

SEQ ID NO: 3660032 - RNA, 14 nt, Human
gagaggugccagca

SEQ ID NO: 3660033 - RNA, 14 nt, Human
gagaggugggccag

SEQ ID NO: 3660034 - RNA, 17 nt, Human
gagaguauuuuuauaca

SEQ ID NO: 3660035 - RNA, 22 nt, Human
gagaguauuuuuauacaaaccu

SEQ ID NO: 3660036 - RNA, 20 nt, Human
gagagucagcucucugcccu

SEQ ID NO: 3660037 - RNA, 21 nt, Human
gagagucagcucucugcccug

SEQ ID NO: 3660038 - RNA, 15 nt, Human
gagagucccacugcc

SEQ ID NO: 3660039 - RNA, 20 nt, Human
gagagucccacugccucagg

SEQ ID NO: 3660040 - RNA, 14 nt, Human
gagagucuggcccu

SEQ ID NO: 3660041 - RNA, 15 nt, Human
gagagucuggcccua

SEQ ID NO: 3660042 - RNA, 18 nt, Human
gagagugcaacaguagca

SEQ ID NO: 3660043 - RNA, 14 nt, Human
gagaguggcugggg

SEQ ID NO: 3660044 - RNA, 20 nt, Human
gagaguggcuggggcaugga

SEQ ID NO: 3660045 - RNA, 12 nt, Human
gagagugggggu

SEQ ID NO: 3660046 - RNA, 14 nt, Human
gagagugucaacca

SEQ ID NO: 3660047 - RNA, 13 nt, Human
gagaguguugaaa

SEQ ID NO: 3660048 - RNA, 22 nt, Human
gagaguuaaucaacugaaagug

SEQ ID NO: 3660049 - RNA, 21 nt, Human
gagaguucaauggcugcugaa

SEQ ID NO: 3660050 - RNA, 13 nt, Human
gagauacauacag

SEQ ID NO: 3660051 - RNA, 21 nt, Human
gagauaccaagaugccaucug

SEQ ID NO: 3660052 - RNA, 22 nt, Human
gagacugucuggccccccuggu

SEQ ID NO: 3660053 - RNA, 21 nt, Human
gagacuguggagacugcuccu

SEQ ID NO: 3660054 - RNA, 19 nt, Human
gagacugugugugcccucu

SEQ ID NO: 3660055 - RNA, 21 nt, Human
gagacugugugugcccucugg

SEQ ID NO: 3660056 - RNA, 16 nt, Human
gagacuguuuggaaau

SEQ ID NO: 3660057 - RNA, 21 nt, Human
gagacuuagggcaccaggggu

SEQ ID NO: 3660058 - RNA, 13 nt, Human
gagacuugccuuc

SEQ ID NO: 3660059 - RNA, 14 nt, Human
gagacuugcucucu

SEQ ID NO: 3660060 - RNA, 11 nt, Human
gagacuuguuu

SEQ ID NO: 3660061 - RNA, 16 nt, Human
gagacuuuaaaagcau

SEQ ID NO: 3660062 - RNA, 11 nt, Human
gagacuuugau

SEQ ID NO: 3660063 - RNA, 19 nt, Human
gagacuuugaugucagcag

SEQ ID NO: 3660064 - RNA, 22 nt, Human
gagacuuuuaaucagacaaagu

SEQ ID NO: 3660065 - RNA, 19 nt, Human
gagacuuuuugguggaugu

SEQ ID NO: 3660066 - RNA, 20 nt, Human
gagagaaaacuuauuugagu

SEQ ID NO: 3660067 - RNA, 12 nt, Human
gagagaaaauaa

SEQ ID NO: 3660068 - RNA, 19 nt, Human
gagagaaaauaaaaaguua

SEQ ID NO: 3660069 - RNA, 17 nt, Human
gagagaaaauauaugua

SEQ ID NO: 3660070 - RNA, 16 nt, Human
gagagaaagccaggca

SEQ ID NO: 3660071 - RNA, 19 nt, Human
gagagaaagccaggcaggu

SEQ ID NO: 3660072 - RNA, 20 nt, Human
gagagaaagugggugagaug

SEQ ID NO: 3660073 - RNA, 13 nt, Human
gagagaaauauuu

SEQ ID NO: 3660074 - RNA, 13 nt, Human
gagagaaauucug

SEQ ID NO: 3660075 - RNA, 16 nt, Human
gagagaaccuaacugu

SEQ ID NO: 3660076 - RNA, 18 nt, Human
gagagaaccuaacuguau

SEQ ID NO: 3660077 - RNA, 15 nt, Human
gagagaaggggagga

SEQ ID NO: 3660078 - RNA, 16 nt, Human
gagagaaggggaggag

SEQ ID NO: 3660079 - RNA, 18 nt, Human
gagagacacagcgucccu

SEQ ID NO: 3660080 - RNA, 16 nt, Human
gagagacacugguggg

SEQ ID NO: 3660081 - RNA, 14 nt, Human
gagagaccaggcaa

SEQ ID NO: 3660082 - RNA, 19 nt, Human
gagagacguguacauagug

SEQ ID NO: 3660083 - RNA, 20 nt, Human
gagagacucccaugaagccu

SEQ ID NO: 3660084 - RNA, 12 nt, Human
gagagacuuguu

SEQ ID NO: 3660085 - RNA, 11 nt, Human
gagagagaaaa

SEQ ID NO: 3660086 - RNA, 13 nt, Human
gagagagaaaaaa

SEQ ID NO: 3660087 - RNA, 19 nt, Human
gagagagaaacaaacuuuu

SEQ ID NO: 3660088 - RNA, 18 nt, Human
gagagagaaagccaggca

SEQ ID NO: 3660089 - RNA, 9 nt, Human
gagagagag

SEQ ID NO: 3660090 - RNA, 14 nt, Human
gagagagagaaauu

SEQ ID NO: 3660091 - RNA, 12 nt, Human
gagagagagaga

SEQ ID NO: 3660092 - RNA, 14 nt, Human
gagagagagagaga

SEQ ID NO: 3660093 - RNA, 13 nt, Human
gagagagaggaca

SEQ ID NO: 3660094 - RNA, 22 nt, Human
gagagagauguguaauuuuucu

SEQ ID NO: 3660095 - RNA, 14 nt, Human
gagagagcagccag

SEQ ID NO: 3660096 - RNA, 19 nt, Human
gagagagcagcuucugcca

SEQ ID NO: 3660097 - RNA, 18 nt, Human
gagcuccacucugcuucu

SEQ ID NO: 3660098 - RNA, 21 nt, Human
gagcuccacucugcuucucug

SEQ ID NO: 3660099 - RNA, 16 nt, Human
gagcuccaguguccug

SEQ ID NO: 3660100 - RNA, 19 nt, Human
gagcuccaguguccugagc

SEQ ID NO: 3660101 - RNA, 23 nt, Human
gagcuccaguguccugagcucag

SEQ ID NO: 3660102 - RNA, 18 nt, Human
gagcuccauacacacgcu

SEQ ID NO: 3660103 - RNA, 20 nt, Human
gagcuccauacacacgcugc

SEQ ID NO: 3660104 - RNA, 19 nt, Human
gagcuccccaccaccccag

SEQ ID NO: 3660105 - RNA, 17 nt, Human
gagcuccccccaggucu

SEQ ID NO: 3660106 - RNA, 20 nt, Human
gagcuccccuacggaccagg

SEQ ID NO: 3660107 - RNA, 18 nt, Human
gagcuccccuccccaacu

SEQ ID NO: 3660108 - RNA, 17 nt, Human
gagcucccucugcccca

SEQ ID NO: 3660109 - RNA, 16 nt, Human
cucgggcccaccuggc

SEQ ID NO: 3660110 - RNA, 13 nt, Human
cucgggcccagcc

SEQ ID NO: 3660111 - RNA, 15 nt, Human
cucgggcccagcccc

SEQ ID NO: 3660112 - RNA, 18 nt, Human
cucgggcccagcccccac

SEQ ID NO: 3660113 - RNA, 12 nt, Human
cucgggcccagg

SEQ ID NO: 3660114 - RNA, 14 nt, Human
cucgggcccaggcc

SEQ ID NO: 3660115 - RNA, 14 nt, Human
cucgggcuccugug

SEQ ID NO: 3660116 - RNA, 21 nt, Human
cucgguacccggggcccaggg

SEQ ID NO: 3660117 - RNA, 18 nt, Human
cucgguauaguuuuguca

SEQ ID NO: 3660118 - RNA, 14 nt, Human
cucgguggacccag

SEQ ID NO: 3660119 - RNA, 18 nt, Human
cucgguggacccagggau

SEQ ID NO: 3660120 - RNA, 23 nt, Human
cucgguguccccaccaucugcug

SEQ ID NO: 3660121 - RNA, 16 nt, Human
cucgguguggagaagc

SEQ ID NO: 3660122 - RNA, 16 nt, Human
cucgguuugccaaaau

SEQ ID NO: 3660123 - RNA, 16 nt, Human
cucguaagauuuccuu

SEQ ID NO: 3660124 - RNA, 23 nt, Human
cucguauagaagucuucaugaaa

SEQ ID NO: 3660125 - RNA, 20 nt, Human
cucguauaugucucaggucc

SEQ ID NO: 3660126 - RNA, 18 nt, Human
cucguccccaagugaccu

SEQ ID NO: 3660127 - RNA, 24 nt, Human
cucguccucccccugccagugccu

SEQ ID NO: 3660128 - RNA, 17 nt, Human
cucgucugacugugugu

SEQ ID NO: 3660129 - RNA, 15 nt, Human
cucgucuuccgucuc

SEQ ID NO: 3660130 - RNA, 18 nt, Human
cucgucuuccgucucccc

SEQ ID NO: 3660131 - RNA, 19 nt, Human
cucgucuuccgucuccccc

SEQ ID NO: 3660132 - RNA, 15 nt, Human
cucgugagucauuua

SEQ ID NO: 3660133 - RNA, 12 nt, Human
cucgugcuuuaa

SEQ ID NO: 3660134 - RNA, 13 nt, Human
cucguggccagcc

SEQ ID NO: 3660135 - RNA, 14 nt, Human
cucguggccagccc

SEQ ID NO: 3660136 - RNA, 19 nt, Human
cucguggccagcccggcug

SEQ ID NO: 3660137 - RNA, 14 nt, Human
cucguggccuuccc

SEQ ID NO: 3660138 - RNA, 14 nt, Human
cucguguauccugg

SEQ ID NO: 3660139 - RNA, 19 nt, Human
cucguguauccuggggcuc

SEQ ID NO: 3660140 - RNA, 15 nt, Human
cucgugucuggcaca

SEQ ID NO: 3660141 - RNA, 18 nt, Human
cucguuagggaagagaaa

SEQ ID NO: 3660142 - RNA, 15 nt, Human
cucguuccuuucucc

SEQ ID NO: 3660143 - RNA, 12 nt, Human
cucguuugugau

SEQ ID NO: 3660144 - RNA, 20 nt, Human
cucuaaaagauccuuuuuaa

SEQ ID NO: 3660145 - RNA, 13 nt, Human
cucuaaaagcacc

SEQ ID NO: 3660146 - RNA, 16 nt, Human
cucuaaaagguucagg

SEQ ID NO: 3660147 - RNA, 11 nt, Human
cucuaaaauau

SEQ ID NO: 3660148 - RNA, 17 nt, Human
cucuaaaauuauaaaug

SEQ ID NO: 3660149 - RNA, 14 nt, Human
cucuaaagaccaaa

SEQ ID NO: 3660150 - RNA, 22 nt, Human
cucuaaagucuguugauuaaag

SEQ ID NO: 3660151 - RNA, 18 nt, Human
cucuaaaugggaaaguau

SEQ ID NO: 3660152 - RNA, 13 nt, Human
cucuaaauucuuu

SEQ ID NO: 3660153 - RNA, 17 nt, Human
cucuaaauucuuucauu

SEQ ID NO: 3660154 - RNA, 21 nt, Human
cucuaacaauguauuuucuuc

SEQ ID NO: 3660155 - RNA, 15 nt, Human
cucuaaccccaggcc

SEQ ID NO: 3660156 - RNA, 19 nt, Human
cucuaaccccaggccccga

SEQ ID NO: 3660157 - RNA, 21 nt, Human
cucuaaccccaggccccgagg

SEQ ID NO: 3660158 - RNA, 12 nt, Human
cucuaacgccug

SEQ ID NO: 3660159 - RNA, 18 nt, Human
cucuaacgccugagccca

SEQ ID NO: 3660160 - RNA, 16 nt, Human
cucuaacuguauauuu

SEQ ID NO: 3660161 - RNA, 17 nt, Human
cucuaacuguauauuug

SEQ ID NO: 3660162 - RNA, 20 nt, Human
cucuaacuguauauuuguau

SEQ ID NO: 3660163 - RNA, 14 nt, Human
cucuaagaucuuag

SEQ ID NO: 3660164 - RNA, 19 nt, Human
cucuaagaucuuagauucu

SEQ ID NO: 3660165 - RNA, 20 nt, Human
cucuaagucauguauguuuc

SEQ ID NO: 3660166 - RNA, 21 nt, Human
cucuaagucauguauguuucu

SEQ ID NO: 3660167 - RNA, 16 nt, Human
cucuaaguuccacuga

SEQ ID NO: 3660168 - RNA, 18 nt, Human
cucuaaguuccacugagc

SEQ ID NO: 3660169 - RNA, 19 nt, Human
cucuaaguuccacugagcu

SEQ ID NO: 3660170 - RNA, 14 nt, Human
cucuaauaagaaaa

SEQ ID NO: 3660171 - RNA, 15 nt, Human
cucuaauaagaaaac

SEQ ID NO: 3660172 - RNA, 18 nt, Human
cucuaauaagaaaaccac

SEQ ID NO: 3660173 - RNA, 23 nt, Human
cucuaauagcgaggcucuaacca

SEQ ID NO: 3660174 - RNA, 19 nt, Human
cucuaauauggcaaccauu

SEQ ID NO: 3660175 - RNA, 12 nt, Human
cucuaauucuaa

SEQ ID NO: 3660176 - RNA, 18 nt, Human
cucuaauucuaaccagag

SEQ ID NO: 3660177 - RNA, 18 nt, Human
cucuaauugaauuuucaa

SEQ ID NO: 3660178 - RNA, 17 nt, Human
cucuaauuggaagaaau

SEQ ID NO: 3660179 - RNA, 11 nt, Human
cucuaauuucc

SEQ ID NO: 3660180 - RNA, 13 nt, Human
cucuacaaaaagc

SEQ ID NO: 3660181 - RNA, 18 nt, Human
cucuacagagcuucccug

SEQ ID NO: 3660182 - RNA, 13 nt, Human
cucuacagugcca

SEQ ID NO: 3660183 - RNA, 15 nt, Human
cucuacaucuucugc

SEQ ID NO: 3660184 - RNA, 19 nt, Human
cucuacauggacucagaga

SEQ ID NO: 3660185 - RNA, 20 nt, Human
cucuaccauccccuguagag

SEQ ID NO: 3660186 - RNA, 15 nt, Human
cucuacccagcccau

SEQ ID NO: 3660187 - RNA, 17 nt, Human
cucuacccagggccugc

SEQ ID NO: 3660188 - RNA, 21 nt, Human
cucuacccaucuuaaaaacaa

SEQ ID NO: 3660189 - RNA, 13 nt, Human
cucuacccuggca

SEQ ID NO: 3660190 - RNA, 12 nt, Human
cucuaccugaca

SEQ ID NO: 3660191 - RNA, 16 nt, Human
cucuaccuucucccca

SEQ ID NO: 3660192 - RNA, 21 nt, Human
cucuaccuucuccccagcucc

SEQ ID NO: 3660193 - RNA, 22 nt, Human
cucuaccuucuccccagcuccc

SEQ ID NO: 3660194 - RNA, 19 nt, Human
cucuacuaaaaagaaggaa

SEQ ID NO: 3660195 - RNA, 19 nt, Human
cucuacuaaggcuuuccua

SEQ ID NO: 3660196 - RNA, 19 nt, Human
cucuacuccuaccucagcc

SEQ ID NO: 3660197 - RNA, 21 nt, Human
cucuacugggagccuacccac

SEQ ID NO: 3660198 - RNA, 15 nt, Human
cucuacuuaaugaga

SEQ ID NO: 3660199 - RNA, 16 nt, Human
cucuacuuagcauguc

SEQ ID NO: 3660200 - RNA, 13 nt, Human
cucuacuuuccag

SEQ ID NO: 3660201 - RNA, 18 nt, Human
cucuacuuuccaggcuag

SEQ ID NO: 3660202 - RNA, 19 nt, Human
cucuagaagccaagggaaa

SEQ ID NO: 3660203 - RNA, 20 nt, Human
cucuagaauuuuaagccuuu

SEQ ID NO: 3660204 - RNA, 18 nt, Human
cucuagacaacccugcaa

SEQ ID NO: 3660205 - RNA, 23 nt, Human
cucuagacaacccugcaaaggac

SEQ ID NO: 3660206 - RNA, 16 nt, Human
cucuagacaagauauu

SEQ ID NO: 3660207 - RNA, 21 nt, Human
cucuagacacugccacacagg

SEQ ID NO: 3660208 - RNA, 23 nt, Human
cucuagagaaguggacuggagga

SEQ ID NO: 3660209 - RNA, 19 nt, Human
cucuagagcagacuacagc

SEQ ID NO: 3660210 - RNA, 13 nt, Human
cucuagagcaggg

SEQ ID NO: 3660211 - RNA, 16 nt, Human
cucuagagcagggauu

SEQ ID NO: 3660212 - RNA, 14 nt, Human
cucuagaucauaag

SEQ ID NO: 3660213 - RNA, 15 nt, Human
cucuagaugagcugg

SEQ ID NO: 3660214 - RNA, 17 nt, Human
cucuagcagcaccuccu

SEQ ID NO: 3660215 - RNA, 14 nt, Human
cucuagcccugccc

SEQ ID NO: 3660216 - RNA, 16 nt, Human
cucuagcccugcccgg

SEQ ID NO: 3660217 - RNA, 13 nt, Human
cucuagccugggc

SEQ ID NO: 3660218 - RNA, 13 nt, Human
cucuagcugaauu

SEQ ID NO: 3660219 - RNA, 23 nt, Human
cucuagcugggggugggccaggc

SEQ ID NO: 3660220 - RNA, 17 nt, Human
cucuagcuggugguuuc

SEQ ID NO: 3660221 - RNA, 21 nt, Human
cucuaggaagacauuuuuccg

SEQ ID NO: 3660222 - RNA, 16 nt, Human
cucuaggauguauauu

SEQ ID NO: 3660223 - RNA, 22 nt, Human
cucuaggauguauauuuuauau

SEQ ID NO: 3660224 - RNA, 17 nt, Human
cucuaggcucugccuuc

SEQ ID NO: 3660225 - RNA, 13 nt, Human
cucuaggcugggg

SEQ ID NO: 3660226 - RNA, 15 nt, Human
cucuaggcuggggaa

SEQ ID NO: 3660227 - RNA, 23 nt, Human
cucuagggaaaaaccagcgugug

SEQ ID NO: 3660228 - RNA, 21 nt, Human
cucuagggaaggccaccugca

SEQ ID NO: 3660229 - RNA, 14 nt, Human
cucuagggcagugg

SEQ ID NO: 3660230 - RNA, 18 nt, Human
cucuaggguugcuggagc

SEQ ID NO: 3660231 - RNA, 14 nt, Human
cucuagguggggcg

SEQ ID NO: 3660232 - RNA, 14 nt, Human
cucuaguacuguga

SEQ ID NO: 3660233 - RNA, 16 nt, Human
cucuaguaguuaaaaa

SEQ ID NO: 3660234 - RNA, 13 nt, Human
cucuagugcccuc

SEQ ID NO: 3660235 - RNA, 12 nt, Human
cucuagugcugu

SEQ ID NO: 3660236 - RNA, 18 nt, Human
cucuagugggacagccca

SEQ ID NO: 3660237 - RNA, 15 nt, Human
cucuaguucuuuguu

SEQ ID NO: 3660238 - RNA, 21 nt, Human
cucuaguuugauuaaauucuu

SEQ ID NO: 3660239 - RNA, 16 nt, Human
cucuauaauugccacu

SEQ ID NO: 3660240 - RNA, 18 nt, Human
cucuauacaucucucccc

SEQ ID NO: 3660241 - RNA, 15 nt, Human
cucuauagcaccagg

SEQ ID NO: 3660242 - RNA, 16 nt, Human
gaggcagacagcagcu

SEQ ID NO: 3660243 - RNA, 21 nt, Human
gaggcagacagcagcucaggc

SEQ ID NO: 3660244 - RNA, 16 nt, Human
gaggcagagaaagaag

SEQ ID NO: 3660245 - RNA, 15 nt, Human
gaggcagagagcggu

SEQ ID NO: 3660246 - RNA, 11 nt, Human
gaggcagagga

SEQ ID NO: 3660247 - RNA, 19 nt, Human
gaggcagagguugcaguga

SEQ ID NO: 3660248 - RNA, 20 nt, Human
gaggcagagguugcagugag

SEQ ID NO: 3660249 - RNA, 22 nt, Human
gaggcagagugccccaccugcc

SEQ ID NO: 3660250 - RNA, 21 nt, Human
gaggcagcagugugaggccag

SEQ ID NO: 3660251 - RNA, 16 nt, Human
gaggcagcccaggaag

SEQ ID NO: 3660252 - RNA, 19 nt, Human
gaggcagccccauucugcc

SEQ ID NO: 3660253 - RNA, 20 nt, Human
gaggcagccccauucugccu

SEQ ID NO: 3660254 - RNA, 22 nt, Human
gaggcagccccauucugccugc

SEQ ID NO: 3660255 - RNA, 16 nt, Human
gaggcaggcauggccc

SEQ ID NO: 3660256 - RNA, 18 nt, Human
gaggcaggcauggcccug

SEQ ID NO: 3660257 - RNA, 22 nt, Human
gaggcaggccgacuguacuaaa

SEQ ID NO: 3660258 - RNA, 14 nt, Human
gaggcaggcuccag

SEQ ID NO: 3660259 - RNA, 15 nt, Human
gaggcagggagggga

SEQ ID NO: 3660260 - RNA, 16 nt, Human
gaggcagggaggggac

SEQ ID NO: 3660261 - RNA, 19 nt, Human
gaggcagggcaaaugacau

SEQ ID NO: 3660262 - RNA, 17 nt, Human
gaggcagggccuugccc

SEQ ID NO: 3660263 - RNA, 23 nt, Human
gaggcagggccuugcccagagau

SEQ ID NO: 3660264 - RNA, 17 nt, Human
gaggcaggggcuuccug

SEQ ID NO: 3660265 - RNA, 18 nt, Human
gaggcaggggcuuccugg

SEQ ID NO: 3660266 - RNA, 18 nt, Human
gaggcagggucucacucu

SEQ ID NO: 3660267 - RNA, 20 nt, Human
gaggcagggucucacucugu

SEQ ID NO: 3660268 - RNA, 12 nt, Human
gaggcagguccc

SEQ ID NO: 3660269 - RNA, 22 nt, Human
gaggcagugggucccacuuccc

SEQ ID NO: 3660270 - RNA, 21 nt, Human
gaggcaguugcccagccucuu

SEQ ID NO: 3660271 - RNA, 15 nt, Human
gaggcaguuugagga

SEQ ID NO: 3660272 - RNA, 13 nt, Human
gaggcauccagca

SEQ ID NO: 3660273 - RNA, 21 nt, Human
gaggcauccagcagucucugc

SEQ ID NO: 3660274 - RNA, 20 nt, Human
gaggcauccuacccuuuucu

SEQ ID NO: 3660275 - RNA, 14 nt, Human
cucuauuuaaauuc

SEQ ID NO: 3660276 - RNA, 18 nt, Human
cucuauuuaaauucuuuu

SEQ ID NO: 3660277 - RNA, 13 nt, Human
cucuauuuaauau

SEQ ID NO: 3660278 - RNA, 14 nt, Human
cucuauuuaauauu

SEQ ID NO: 3660279 - RNA, 17 nt, Human
cucuauuuauguuugca

SEQ ID NO: 3660280 - RNA, 14 nt, Human
cucuauuucccccu

SEQ ID NO: 3660281 - RNA, 17 nt, Human
cucuauuucccccuuuc

SEQ ID NO: 3660282 - RNA, 23 nt, Human
cucuauuucccccuuucuuccuc

SEQ ID NO: 3660283 - RNA, 17 nt, Human
cucuauuugaauuauuu

SEQ ID NO: 3660284 - RNA, 17 nt, Human
cucucaaagcaaauaau

SEQ ID NO: 3660285 - RNA, 20 nt, Human
cucucaaccaccuuucagau

SEQ ID NO: 3660286 - RNA, 17 nt, Human
cucucaacccaggagca

SEQ ID NO: 3660287 - RNA, 21 nt, Human
cucucacacacauagauuaau

SEQ ID NO: 3660288 - RNA, 19 nt, Human
cucucacacugguucucaa

SEQ ID NO: 3660289 - RNA, 22 nt, Human
cucucacacugguucucaauga

SEQ ID NO: 3660290 - RNA, 17 nt, Human
cucucacagcugaguug

SEQ ID NO: 3660291 - RNA, 15 nt, Human
cucucaccucagccu

SEQ ID NO: 3660292 - RNA, 14 nt, Human
cucucaccucuagg

SEQ ID NO: 3660293 - RNA, 14 nt, Human
cucucaccuggccc

SEQ ID NO: 3660294 - RNA, 15 nt, Human
cucucacuaaacuuu

SEQ ID NO: 3660295 - RNA, 21 nt, Human
cucucacuaaacuuuacccaa

SEQ ID NO: 3660296 - RNA, 12 nt, Human
cucucacucccc

SEQ ID NO: 3660297 - RNA, 13 nt, Human
cucucacucccca

SEQ ID NO: 3660298 - RNA, 21 nt, Human
cucucacuccccagccugggc

SEQ ID NO: 3660299 - RNA, 12 nt, Human
cucucacuccuu

SEQ ID NO: 3660300 - RNA, 21 nt, Human
cucucacuuguuuuauuuaac

SEQ ID NO: 3660301 - RNA, 19 nt, Human
cucucagaagggaggcugg

SEQ ID NO: 3660302 - RNA, 17 nt, Human
cucucagaauucuucag

SEQ ID NO: 3660303 - RNA, 18 nt, Human
cucucagaccgucuuccu

SEQ ID NO: 3660304 - RNA, 21 nt, Human
cucucagaccgucuuccucca

SEQ ID NO: 3660305 - RNA, 15 nt, Human
cucucagcccagaag

SEQ ID NO: 3660306 - RNA, 21 nt, Human
cucucagcccucacacacccu

SEQ ID NO: 3660307 - RNA, 17 nt, Human
cucucagccuuacauuu

SEQ ID NO: 3660308 - RNA, 16 nt, Human
cucucagcucagcgcc

SEQ ID NO: 3660309 - RNA, 17 nt, Human
cucucagcucagcgcca

SEQ ID NO: 3660310 - RNA, 12 nt, Human
cucucagcucca

SEQ ID NO: 3660311 - RNA, 13 nt, Human
cucucagcuccag

SEQ ID NO: 3660312 - RNA, 13 nt, Human
cucucaggagcca

SEQ ID NO: 3660313 - RNA, 14 nt, Human
cucucaggagccau

SEQ ID NO: 3660314 - RNA, 21 nt, Human
cucucaggagccaucaucggc

SEQ ID NO: 3660315 - RNA, 16 nt, Human
cucucaggauccaagc

SEQ ID NO: 3660316 - RNA, 16 nt, Human
cucucaggcaugccug

SEQ ID NO: 3660317 - RNA, 12 nt, Human
cucucaggccaa

SEQ ID NO: 3660318 - RNA, 13 nt, Human
cucucaggccagc

SEQ ID NO: 3660319 - RNA, 17 nt, Human
cucucaggccagcugcu

SEQ ID NO: 3660320 - RNA, 18 nt, Human
cucucaggccggcagccc

SEQ ID NO: 3660321 - RNA, 15 nt, Human
cucucagggccaggc

SEQ ID NO: 3660322 - RNA, 18 nt, Human
cucucaguacuuuggagg

SEQ ID NO: 3660323 - RNA, 22 nt, Human
cucucaguguuuuggacuccau

SEQ ID NO: 3660324 - RNA, 22 nt, Human
cucucaucaguguccucuugcu

SEQ ID NO: 3660325 - RNA, 15 nt, Human
cucucaucccccauu

SEQ ID NO: 3660326 - RNA, 19 nt, Human
cucucauccuccaguaccu

SEQ ID NO: 3660327 - RNA, 18 nt, Human
cucucauccuuuucuccu

SEQ ID NO: 3660328 - RNA, 11 nt, Human
cucucaucuga

SEQ ID NO: 3660329 - RNA, 14 nt, Human
cucucaugaaccuc

SEQ ID NO: 3660330 - RNA, 17 nt, Human
cucucauuuagccuguc

SEQ ID NO: 3660331 - RNA, 14 nt, Human
cucucauuugugug

SEQ ID NO: 3660332 - RNA, 13 nt, Human
cucuccaaccugg

SEQ ID NO: 3660333 - RNA, 14 nt, Human
cucuccaagggcuu

SEQ ID NO: 3660334 - RNA, 21 nt, Human
cucuccaagggcuucugcacc

SEQ ID NO: 3660335 - RNA, 23 nt, Human
cucuccaagggcuucugcacccu

SEQ ID NO: 3660336 - RNA, 17 nt, Human
cucuccaagucucagug

SEQ ID NO: 3660337 - RNA, 20 nt, Human
cucuccaagucucaguggcu

SEQ ID NO: 3660338 - RNA, 19 nt, Human
cucuccaagugccagaggu

SEQ ID NO: 3660339 - RNA, 17 nt, Human
cucuccacagcugccuc

SEQ ID NO: 3660340 - RNA, 22 nt, Human
cucuccaccuaguggcugucca

SEQ ID NO: 3660341 - RNA, 23 nt, Human
cucuccaccuaguggcuguccag

SEQ ID NO: 3660342 - RNA, 18 nt, Human
cucuccaccucagccuug

SEQ ID NO: 3660343 - RNA, 20 nt, Human
cucuccaccucagccuugga

SEQ ID NO: 3660344 - RNA, 11 nt, Human
cucuccacugc

SEQ ID NO: 3660345 - RNA, 16 nt, Human
cucuccacuuucagcu

SEQ ID NO: 3660346 - RNA, 17 nt, Human
cucuccacuuucagcug

SEQ ID NO: 3660347 - RNA, 19 nt, Human
cucuccacuuucagcuguc

SEQ ID NO: 3660348 - RNA, 15 nt, Human
cucuccagccccugg

SEQ ID NO: 3660349 - RNA, 16 nt, Human
cucuccagccccugga

SEQ ID NO: 3660350 - RNA, 17 nt, Human
cucuccagccccuggau

SEQ ID NO: 3660351 - RNA, 18 nt, Human
cucuccagccccuggaug

SEQ ID NO: 3660352 - RNA, 19 nt, Human
cucuccagccccuggaugc

SEQ ID NO: 3660353 - RNA, 23 nt, Human
cucuccagccucagcccccugcu

SEQ ID NO: 3660354 - RNA, 13 nt, Human
cucuccagcucca

SEQ ID NO: 3660355 - RNA, 13 nt, Human
cucuccaggcacc

SEQ ID NO: 3660356 - RNA, 19 nt, Human
cucuccaggcacccuucuu

SEQ ID NO: 3660357 - RNA, 22 nt, Human
cucuccaguuugcaccuguccc

SEQ ID NO: 3660358 - RNA, 16 nt, Human
cucuccauaaccccac

SEQ ID NO: 3660359 - RNA, 15 nt, Human
cucuccaucuucagc

SEQ ID NO: 3660360 - RNA, 15 nt, Human
cucuccauucugcuc

SEQ ID NO: 3660361 - RNA, 13 nt, Human
cucucccaaaaaa

SEQ ID NO: 3660362 - RNA, 13 nt, Human
cucucccaacucu

SEQ ID NO: 3660363 - RNA, 14 nt, Human
cucucccacccucu

SEQ ID NO: 3660364 - RNA, 20 nt, Human
cucucccacgggaccugggg

SEQ ID NO: 3660365 - RNA, 13 nt, Human
cucucccaggcag

SEQ ID NO: 3660366 - RNA, 14 nt, Human
cucucccaggcccc

SEQ ID NO: 3660367 - RNA, 24 nt, Human
cucucccaggccccaugaccucca

SEQ ID NO: 3660368 - RNA, 11 nt, Human
cucucccaggg

SEQ ID NO: 3660369 - RNA, 13 nt, Human
cucucccaucacu

SEQ ID NO: 3660370 - RNA, 16 nt, Human
cucucccaucccccug

SEQ ID NO: 3660371 - RNA, 14 nt, Human
cucucccauggagc

SEQ ID NO: 3660372 - RNA, 19 nt, Human
cucucccauggagccccag

SEQ ID NO: 3660373 - RNA, 22 nt, Human
cucucccauggagccccagccc

SEQ ID NO: 3660374 - RNA, 13 nt, Human
cucucccauggcu

SEQ ID NO: 3660375 - RNA, 14 nt, Human
cucucccauuuccu

SEQ ID NO: 3660376 - RNA, 17 nt, Human
cucuccccaccccuacc

SEQ ID NO: 3660377 - RNA, 11 nt, Human
cucuccccagc

SEQ ID NO: 3660378 - RNA, 15 nt, Human
cucuccccagcccag

SEQ ID NO: 3660379 - RNA, 20 nt, Human
cucuccccagcccagagaca

SEQ ID NO: 3660380 - RNA, 22 nt, Human
cucuccccagggaagcagcagc

SEQ ID NO: 3660381 - RNA, 16 nt, Human
cucuccccagguccag

SEQ ID NO: 3660382 - RNA, 23 nt, Human
cucuccccagguccagcucugga

SEQ ID NO: 3660383 - RNA, 16 nt, Human
cucucccccacccccu

SEQ ID NO: 3660384 - RNA, 21 nt, Human
cucuccccccccccuccaauc

SEQ ID NO: 3660385 - RNA, 19 nt, Human
cucuccccccgccugccac

SEQ ID NO: 3660386 - RNA, 14 nt, Human
cucuccccucaaag

SEQ ID NO: 3660387 - RNA, 19 nt, Human
gaguucuuuuugaaguauu

SEQ ID NO: 3660388 - RNA, 21 nt, Human
gaguugaaaaucuuauaauuu

SEQ ID NO: 3660389 - RNA, 17 nt, Human
gaguugaagacagagcu

SEQ ID NO: 3660390 - RNA, 15 nt, Human
gaguugaggaacugu

SEQ ID NO: 3660391 - RNA, 16 nt, Human
gaguugaggccacugu

SEQ ID NO: 3660392 - RNA, 20 nt, Human
gaguugaucuggaacccaga

SEQ ID NO: 3660393 - RNA, 21 nt, Human
gaguugaucuggaacccagac

SEQ ID NO: 3660394 - RNA, 17 nt, Human
gaguugccaagacaaau

SEQ ID NO: 3660395 - RNA, 17 nt, Human
gaguugccccgucucug

SEQ ID NO: 3660396 - RNA, 22 nt, Human
gaguugcuuuucagcugagguu

SEQ ID NO: 3660397 - RNA, 16 nt, Human
gaguuggcauugcauu

SEQ ID NO: 3660398 - RNA, 14 nt, Human
gaguugucacugcu

SEQ ID NO: 3660399 - RNA, 16 nt, Human
gaguuguggaaagccu

SEQ ID NO: 3660400 - RNA, 20 nt, Human
gaguuguggaaagccucugc

SEQ ID NO: 3660401 - RNA, 23 nt, Human
gaguugugugaauaccccaagac

SEQ ID NO: 3660402 - RNA, 16 nt, Human
gaguuguguuguucuu

SEQ ID NO: 3660403 - RNA, 13 nt, Human
gaguuguuuuugu

SEQ ID NO: 3660404 - RNA, 14 nt, Human
gaguuuaaaaauca

SEQ ID NO: 3660405 - RNA, 14 nt, Human
gaguuuaaaaucau

SEQ ID NO: 3660406 - RNA, 13 nt, Human
gaguuuaaagcaa

SEQ ID NO: 3660407 - RNA, 14 nt, Human
gaguuuaccauuug

SEQ ID NO: 3660408 - RNA, 17 nt, Human
gaguuuaccauuuguaa

SEQ ID NO: 3660409 - RNA, 20 nt, Human
gaguuuaccauuuguaauaa

SEQ ID NO: 3660410 - RNA, 22 nt, Human
gaguuuagggaacaauuuggca

SEQ ID NO: 3660411 - RNA, 21 nt, Human
gaguuuagugaucugaacaga

SEQ ID NO: 3660412 - RNA, 18 nt, Human
gaguuuauguuccauuaa

SEQ ID NO: 3660413 - RNA, 22 nt, Human
gaguuuauguuccauuaaacga

SEQ ID NO: 3660414 - RNA, 18 nt, Human
gaguuucauucuccugcc

SEQ ID NO: 3660415 - RNA, 20 nt, Human
gaguuucauucuccugccug

SEQ ID NO: 3660416 - RNA, 23 nt, Human
gaguuuccucaggcugcuggagg

SEQ ID NO: 3660417 - RNA, 12 nt, Human
gaguuucuaagg

SEQ ID NO: 3660418 - RNA, 16 nt, Human
gaguuucuaagguccg

SEQ ID NO: 3660419 - RNA, 17 nt, Human
gaguuugagcugccuuc

SEQ ID NO: 3660420 - RNA, 17 nt, Human
gaguuugaugaggcccu

SEQ ID NO: 3660421 - RNA, 15 nt, Human
gaguuuggucccugg

SEQ ID NO: 3660422 - RNA, 16 nt, Human
gaguuuggucuggacu

SEQ ID NO: 3660423 - RNA, 17 nt, Human
gaguuuggucuggacug

SEQ ID NO: 3660424 - RNA, 19 nt, Human
gaguuuggucuggacugac

SEQ ID NO: 3660425 - RNA, 17 nt, Human
gaguuugucgcucaugu

SEQ ID NO: 3660426 - RNA, 22 nt, Human
gaguuugucgcucaugugugca

SEQ ID NO: 3660427 - RNA, 18 nt, Human
gaguuuguguguugucuu

SEQ ID NO: 3660428 - RNA, 18 nt, Human
gaguuuuccauggcagga

SEQ ID NO: 3660429 - RNA, 21 nt, Human
gaguuuugggaaguuaaaggg

SEQ ID NO: 3660430 - RNA, 16 nt, Human
gaguuuugucauucag

SEQ ID NO: 3660431 - RNA, 13 nt, Human
gaguuuuguguuu

SEQ ID NO: 3660432 - RNA, 18 nt, Human
gaguuuuguguuuguugu

SEQ ID NO: 3660433 - RNA, 17 nt, Human
gaguuuuguuuccucug

SEQ ID NO: 3660434 - RNA, 19 nt, Human
gaguuuuuauggggcugaa

SEQ ID NO: 3660435 - RNA, 16 nt, Human
gauaaaaaaacagcuu

SEQ ID NO: 3660436 - RNA, 20 nt, Human
gauaaaaagccagggcugga

SEQ ID NO: 3660437 - RNA, 20 nt, Human
gauaaaaauaucaucauagu

SEQ ID NO: 3660438 - RNA, 16 nt, Human
gauaaaagauacauuu

SEQ ID NO: 3660439 - RNA, 14 nt, Human
gauaaaauaaauga

SEQ ID NO: 3660440 - RNA, 18 nt, Human
gauaaaaugagguucaac

SEQ ID NO: 3660441 - RNA, 18 nt, Human
gauaaacaacaagguggu

SEQ ID NO: 3660442 - RNA, 15 nt, Human
gauaaacacaagauu

SEQ ID NO: 3660443 - RNA, 16 nt, Human
gauaaagaccagaaau

SEQ ID NO: 3660444 - RNA, 14 nt, Human
gauaaagagacagu

SEQ ID NO: 3660445 - RNA, 11 nt, Human
gauaaagauga

SEQ ID NO: 3660446 - RNA, 12 nt, Human
gauaaagaugau

SEQ ID NO: 3660447 - RNA, 16 nt, Human
gauaaagauuucuuga

SEQ ID NO: 3660448 - RNA, 14 nt, Human
gauaaagcacagcu

SEQ ID NO: 3660449 - RNA, 17 nt, Human
gauaaagccucaagguu

SEQ ID NO: 3660450 - RNA, 14 nt, Human
gauaaaguuucuca

SEQ ID NO: 3660451 - RNA, 20 nt, Human
gauaaauauucacacuugaa

SEQ ID NO: 3660452 - RNA, 21 nt, Human
gauaaauauugagcagaucua

SEQ ID NO: 3660453 - RNA, 18 nt, Human
gauaaaucagugguuauu

SEQ ID NO: 3660454 - RNA, 13 nt, Human
gauaaaucauuuu

SEQ ID NO: 3660455 - RNA, 20 nt, Human
gauaaaucauuuuaugucaa

SEQ ID NO: 3660456 - RNA, 15 nt, Human
gauaaaugauagaca

SEQ ID NO: 3660457 - RNA, 20 nt, Human
gauaaaugccaucaauaaaa

SEQ ID NO: 3660458 - RNA, 22 nt, Human
gauaacaaagauaucuuuucuu

SEQ ID NO: 3660459 - RNA, 20 nt, Human
gauaacaaugcagcaaggcc

SEQ ID NO: 3660460 - RNA, 21 nt, Human
gauaacaccaccauucacaag

SEQ ID NO: 3660461 - RNA, 15 nt, Human
gauaacagcuaccau

SEQ ID NO: 3660462 - RNA, 20 nt, Human
gauaacagcuaccaugacaa

SEQ ID NO: 3660463 - RNA, 22 nt, Human
gauaacagggauugauuuuaaa

SEQ ID NO: 3660464 - RNA, 17 nt, Human
gauaacauuuguguguu

SEQ ID NO: 3660465 - RNA, 14 nt, Human
gauaaccauagcau

SEQ ID NO: 3660466 - RNA, 21 nt, Human
gauaaccuguacuucaaguua

SEQ ID NO: 3660467 - RNA, 22 nt, Human
gauaaccuguacuucaaguuaa

SEQ ID NO: 3660468 - RNA, 17 nt, Human
gauaacuagauggugcu

SEQ ID NO: 3660469 - RNA, 13 nt, Human
gauaacucuuugg

SEQ ID NO: 3660470 - RNA, 18 nt, Human
gauaacuguuauuuauaa

SEQ ID NO: 3660471 - RNA, 22 nt, Human
gauaagaaugcugguuuuccua

SEQ ID NO: 3660472 - RNA, 16 nt, Human
gauaagcuucaaagcu

SEQ ID NO: 3660473 - RNA, 16 nt, Human
gauaagggaaaagaua

SEQ ID NO: 3660474 - RNA, 19 nt, Human
gauaaguguucugucugac

SEQ ID NO: 3660475 - RNA, 13 nt, Human
gauaaguuggaaa

SEQ ID NO: 3660476 - RNA, 17 nt, Human
gauaaguuggaaacacu

SEQ ID NO: 3660477 - RNA, 20 nt, Human
gauaauaaggaaaaguuuaa

SEQ ID NO: 3660478 - RNA, 18 nt, Human
gauaauaauauuguuuuu

SEQ ID NO: 3660479 - RNA, 14 nt, Human
gauaauacaccacu

SEQ ID NO: 3660480 - RNA, 12 nt, Human
gauaauagauuc

SEQ ID NO: 3660481 - RNA, 14 nt, Human
gauaauagauucuc

SEQ ID NO: 3660482 - RNA, 16 nt, Human
gagucccagugggagg

SEQ ID NO: 3660483 - RNA, 16 nt, Human
gagucccccagagaug

SEQ ID NO: 3660484 - RNA, 20 nt, Human
gaguccccccucccaccucc

SEQ ID NO: 3660485 - RNA, 11 nt, Human
gaguccccuca

SEQ ID NO: 3660486 - RNA, 19 nt, Human
gaguccccucaccuccucu

SEQ ID NO: 3660487 - RNA, 12 nt, Human
gaguccccuguu

SEQ ID NO: 3660488 - RNA, 23 nt, Human
gaguccccuguuuguuucugaaa

SEQ ID NO: 3660489 - RNA, 16 nt, Human
gagucccugccuggac

SEQ ID NO: 3660490 - RNA, 21 nt, Human
gagucccugccuggaccagcc

SEQ ID NO: 3660491 - RNA, 23 nt, Human
gagucccugccuggaccagccuc

SEQ ID NO: 3660492 - RNA, 14 nt, Human
gagucccuuccagg

SEQ ID NO: 3660493 - RNA, 14 nt, Human
gaguccuccagaac

SEQ ID NO: 3660494 - RNA, 12 nt, Human
gaguccucugga

SEQ ID NO: 3660495 - RNA, 14 nt, Human
gaguccuuaaaaug

SEQ ID NO: 3660496 - RNA, 15 nt, Human
gagucgaggacaggg

SEQ ID NO: 3660497 - RNA, 17 nt, Human
gagucgaggacagggag

SEQ ID NO: 3660498 - RNA, 17 nt, Human
gagucguacagaaagcu

SEQ ID NO: 3660499 - RNA, 22 nt, Human
gagucguggggugugcugggag

SEQ ID NO: 3660500 - RNA, 21 nt, Human
gagucuaaagauggaguuucu

SEQ ID NO: 3660501 - RNA, 13 nt, Human
gagucuagauucu

SEQ ID NO: 3660502 - RNA, 14 nt, Human
gagucuagauucuc

SEQ ID NO: 3660503 - RNA, 19 nt, Human
gagucuagcguagugcagc

SEQ ID NO: 3660504 - RNA, 21 nt, Human
gagucuauuuacggaacucaa

SEQ ID NO: 3660505 - RNA, 20 nt, Human
gagucuccagugguugcugu

SEQ ID NO: 3660506 - RNA, 14 nt, Human
gagucucccaggga

SEQ ID NO: 3660507 - RNA, 15 nt, Human
gagucucuucuccac

SEQ ID NO: 3660508 - RNA, 17 nt, Human
gagucucuucuccacug

SEQ ID NO: 3660509 - RNA, 14 nt, Human
gagucugaagcaga

SEQ ID NO: 3660510 - RNA, 19 nt, Human
gagucugaggccguugcug

SEQ ID NO: 3660511 - RNA, 20 nt, Human
gagucugagggcuuguaguu

SEQ ID NO: 3660512 - RNA, 15 nt, Human
gagucugagguccug

SEQ ID NO: 3660513 - RNA, 19 nt, Human
gagucugagguccugagca

SEQ ID NO: 3660514 - RNA, 11 nt, Human
gagucugcaca

SEQ ID NO: 3660515 - RNA, 13 nt, Human
gagucugccaggg

SEQ ID NO: 3660516 - RNA, 21 nt, Human
gagucugccagggccccucuc

SEQ ID NO: 3660517 - RNA, 21 nt, Human
gagucugcuauauuuucauga

SEQ ID NO: 3660518 - RNA, 23 nt, Human
gagucuggugaagcucacuucug

SEQ ID NO: 3660519 - RNA, 20 nt, Human
gagucuugcuaccucaguca

SEQ ID NO: 3660520 - RNA, 15 nt, Human
gagucuugcuauauu

SEQ ID NO: 3660521 - RNA, 21 nt, Human
gagucuuggcggcagcagcca

SEQ ID NO: 3660522 - RNA, 22 nt, Human
gagucuuugaagcugaaaauau

SEQ ID NO: 3660523 - RNA, 17 nt, Human
gagugaagaggggcagc

SEQ ID NO: 3660524 - RNA, 18 nt, Human
gagugaagaggggcagcc

SEQ ID NO: 3660525 - RNA, 20 nt, Human
gagugaagaggggcagcccu

SEQ ID NO: 3660526 - RNA, 15 nt, Human
gagugacagaggcag

SEQ ID NO: 3660527 - RNA, 16 nt, Human
gagugacagaggcagc

SEQ ID NO: 3660528 - RNA, 18 nt, Human
gagugacagaggcagccc

SEQ ID NO: 3660529 - RNA, 19 nt, Human
gagugacaguggauugcau

SEQ ID NO: 3660530 - RNA, 15 nt, Human
gagugacggucccac

SEQ ID NO: 3660531 - RNA, 18 nt, Human
gagugacggucccacacu

SEQ ID NO: 3660532 - RNA, 22 nt, Human
gauaccagcgaggaggcuccag

SEQ ID NO: 3660533 - RNA, 18 nt, Human
gauacccaggaccaagcc

SEQ ID NO: 3660534 - RNA, 14 nt, Human
gauacccaucccau

SEQ ID NO: 3660535 - RNA, 14 nt, Human
gauaccuaaaacau

SEQ ID NO: 3660536 - RNA, 17 nt, Human
gauaccuccaacccugc

SEQ ID NO: 3660537 - RNA, 17 nt, Human
gauacgacaguacacug

SEQ ID NO: 3660538 - RNA, 22 nt, Human
gauacgcuacuauaaagagaag

SEQ ID NO: 3660539 - RNA, 23 nt, Human
gauacuccgcugucggcacauuc

SEQ ID NO: 3660540 - RNA, 11 nt, Human
gauacucuggg

SEQ ID NO: 3660541 - RNA, 14 nt, Human
gauacucugggaac

SEQ ID NO: 3660542 - RNA, 17 nt, Human
gauacucugucagaugg

SEQ ID NO: 3660543 - RNA, 15 nt, Human
gauacugcccggggc

SEQ ID NO: 3660544 - RNA, 18 nt, Human
gauacugcgacuuucugc

SEQ ID NO: 3660545 - RNA, 19 nt, Human
gauacugcgacuuucugcc

SEQ ID NO: 3660546 - RNA, 14 nt, Human
gauacuggaaguuu

SEQ ID NO: 3660547 - RNA, 16 nt, Human
gauacuggcacagagg

SEQ ID NO: 3660548 - RNA, 12 nt, Human
gauacuguugca

SEQ ID NO: 3660549 - RNA, 14 nt, Human
gauacuguugcacg

SEQ ID NO: 3660550 - RNA, 17 nt, Human
gauacuguugcacgugu

SEQ ID NO: 3660551 - RNA, 18 nt, Human
gauacuguugcacgugug

SEQ ID NO: 3660552 - RNA, 14 nt, Human
gauacuuauauuuu

SEQ ID NO: 3660553 - RNA, 13 nt, Human
gauacuuauuuaa

SEQ ID NO: 3660554 - RNA, 19 nt, Human
gauacuuauuuaaauagau

SEQ ID NO: 3660555 - RNA, 16 nt, Human
gauagaaagcauuaca

SEQ ID NO: 3660556 - RNA, 16 nt, Human
gauagaaauaaauagc

SEQ ID NO: 3660557 - RNA, 14 nt, Human
gauagaaaugccaa

SEQ ID NO: 3660558 - RNA, 17 nt, Human
gauagaagaaaaaagaa

SEQ ID NO: 3660559 - RNA, 17 nt, Human
gauagaagauguuugcu

SEQ ID NO: 3660560 - RNA, 20 nt, Human
gauagacacauaugaggggg

SEQ ID NO: 3660561 - RNA, 14 nt, Human
gauagaggaagccu

SEQ ID NO: 3660562 - RNA, 15 nt, Human
gauagaggaagccug

SEQ ID NO: 3660563 - RNA, 12 nt, Human
gauagagggggg

SEQ ID NO: 3660564 - RNA, 21 nt, Human
gauagaguaaaaagaaaacaa

SEQ ID NO: 3660565 - RNA, 13 nt, Human
gauagaguuccau

SEQ ID NO: 3660566 - RNA, 15 nt, Human
gauagauaacucuuu

SEQ ID NO: 3660567 - RNA, 23 nt, Human
gauagauaggucagugcaaauac

SEQ ID NO: 3660568 - RNA, 21 nt, Human
gauagaugcacuuaugcagua

SEQ ID NO: 3660569 - RNA, 14 nt, Human
gauagaugcccugc

SEQ ID NO: 3660570 - RNA, 12 nt, Human
gauagaugcugg

SEQ ID NO: 3660571 - RNA, 17 nt, Human
gauagaugcuggcccag

SEQ ID NO: 3660572 - RNA, 18 nt, Human
gauagaugcuggcccagg

SEQ ID NO: 3660573 - RNA, 15 nt, Human
gauagauuuggaaua

SEQ ID NO: 3660574 - RNA, 15 nt, Human
gauagcacagacccu

SEQ ID NO: 3660575 - RNA, 17 nt, Human
gauagcacagacccugc

SEQ ID NO: 3660576 - RNA, 19 nt, Human
gauagcacagacccugccc

SEQ ID NO: 3660577 - RNA, 22 nt, Human
gauagcacagacccugcccugu

SEQ ID NO: 3660578 - RNA, 12 nt, Human
gauagcacuuuc

SEQ ID NO: 3660579 - RNA, 20 nt, Human
gauagcacuuucuacaaugu

SEQ ID NO: 3660580 - RNA, 16 nt, Human
gauagcauaugacaaa

SEQ ID NO: 3660581 - RNA, 17 nt, Human
gauagcauuuuugauuu

SEQ ID NO: 3660582 - RNA, 23 nt, Human
gauagcauuuuugauuuaugcau

SEQ ID NO: 3660583 - RNA, 13 nt, Human
gauagccaaggcc

SEQ ID NO: 3660584 - RNA, 14 nt, Human
gauagccaaggcca

SEQ ID NO: 3660585 - RNA, 21 nt, Human
gauagcccuguccugguggua

SEQ ID NO: 3660586 - RNA, 20 nt, Human
gauagccuuccguaacccaa

SEQ ID NO: 3660587 - RNA, 14 nt, Human
gauagcguuggaau

SEQ ID NO: 3660588 - RNA, 15 nt, Human
gauagcguuggaauu

SEQ ID NO: 3660589 - RNA, 22 nt, Human
gauagcguuggaauuaaaacaa

SEQ ID NO: 3660590 - RNA, 23 nt, Human
gauagcguuggaauuaaaacaau

SEQ ID NO: 3660591 - RNA, 13 nt, Human
gauagcugugacu

SEQ ID NO: 3660592 - RNA, 20 nt, Human
gauagcuuuauuuuuuaagu

SEQ ID NO: 3660593 - RNA, 18 nt, Human
gauaggaaggucauuucc

SEQ ID NO: 3660594 - RNA, 15 nt, Human
gauaggaccuugggc

SEQ ID NO: 3660595 - RNA, 17 nt, Human
gauaggaccuugggcca

SEQ ID NO: 3660596 - RNA, 20 nt, Human
gauaggcacauagagaggga

SEQ ID NO: 3660597 - RNA, 12 nt, Human
gauaggcucugc

SEQ ID NO: 3660598 - RNA, 15 nt, Human
gauagggcugggcaa

SEQ ID NO: 3660599 - RNA, 22 nt, Human
gauagggcugggcaaggaaaaa

SEQ ID NO: 3660600 - RNA, 13 nt, Human
gauaggggcagag

SEQ ID NO: 3660601 - RNA, 17 nt, Human
gauaggucagugcaaau

SEQ ID NO: 3660602 - RNA, 18 nt, Human
gauaguagcauacauuua

SEQ ID NO: 3660603 - RNA, 14 nt, Human
gauaguagcuuccu

SEQ ID NO: 3660604 - RNA, 23 nt, Human
gauagucuuggaagcuguuugga

SEQ ID NO: 3660605 - RNA, 14 nt, Human
gauagucuuucagu

SEQ ID NO: 3660606 - RNA, 13 nt, Human
gauagugggacca

SEQ ID NO: 3660607 - RNA, 17 nt, Human
gauagugggauuuccag

SEQ ID NO: 3660608 - RNA, 21 nt, Human
gauaguuaucuguucuuuuga

SEQ ID NO: 3660609 - RNA, 22 nt, Human
gauaguugcuauuuuuguaaag

SEQ ID NO: 3660610 - RNA, 23 nt, Human
gauaguugcuauuuuuguaaagu

SEQ ID NO: 3660611 - RNA, 14 nt, Human
gauaguuuucaucc

SEQ ID NO: 3660612 - RNA, 23 nt, Human
gauaguuuucauccauaacugaa

SEQ ID NO: 3660613 - RNA, 14 nt, Human
gauauaaaaugugc

SEQ ID NO: 3660614 - RNA, 14 nt, Human
gauauaaacagcuu

SEQ ID NO: 3660615 - RNA, 15 nt, Human
gauauaaauauauau

SEQ ID NO: 3660616 - RNA, 16 nt, Human
gauauaaauauauaua

SEQ ID NO: 3660617 - RNA, 16 nt, Human
gauauaaauggcuggu

SEQ ID NO: 3660618 - RNA, 12 nt, Human
gauauaaauucu

SEQ ID NO: 3660619 - RNA, 13 nt, Human
gauauaaauucug

SEQ ID NO: 3660620 - RNA, 21 nt, Human
gauauaaauuuuuaagagaaa

SEQ ID NO: 3660621 - RNA, 18 nt, Human
gauauaagugcuguauaa

SEQ ID NO: 3660622 - RNA, 21 nt, Human
gauauaagugcuguauaaaau

SEQ ID NO: 3660623 - RNA, 23 nt, Human
gauauaagugcuguauaaaauca

SEQ ID NO: 3660624 - RNA, 17 nt, Human
gauauaaguguguguuu

SEQ ID NO: 3660625 - RNA, 21 nt, Human
gauauaaguguguguuuuuca

SEQ ID NO: 3660626 - RNA, 18 nt, Human
gauauacacggaugacuu

SEQ ID NO: 3660627 - RNA, 17 nt, Human
gauauacagaugaaaau

SEQ ID NO: 3660628 - RNA, 19 nt, Human
gauauacagaugaaaauuu

SEQ ID NO: 3660629 - RNA, 13 nt, Human
gauauaccaaauu

SEQ ID NO: 3660630 - RNA, 15 nt, Human
gauauacuuguuuuu

SEQ ID NO: 3660631 - RNA, 22 nt, Human
gauauacuuguuuuuguaaaga

SEQ ID NO: 3660632 - RNA, 16 nt, Human
gauauacuuuguggac

SEQ ID NO: 3660633 - RNA, 22 nt, Human
gauauacuuuguggaccaauua

SEQ ID NO: 3660634 - RNA, 12 nt, Human
gauauagaacag

SEQ ID NO: 3660635 - RNA, 19 nt, Human
gauauagaaguauaaagaa

SEQ ID NO: 3660636 - RNA, 14 nt, Human
gauauagagucauu

SEQ ID NO: 3660637 - RNA, 20 nt, Human
gauauagaucacauaacaga

SEQ ID NO: 3660638 - RNA, 21 nt, Human
gauauagcuaggugacauaua

SEQ ID NO: 3660639 - RNA, 19 nt, Human
gauauaguuuuacuuuuaa

SEQ ID NO: 3660640 - RNA, 21 nt, Human
gauauaguuuuacuuuuaaac

SEQ ID NO: 3660641 - RNA, 17 nt, Human
gauauauaaguguacau

SEQ ID NO: 3660642 - RNA, 20 nt, Human
gauauaucaugagugaauaa

SEQ ID NO: 3660643 - RNA, 23 nt, Human
gauauaugcucugcauguuacau

SEQ ID NO: 3660644 - RNA, 22 nt, Human
gauauauguguuuuucacauuu

SEQ ID NO: 3660645 - RNA, 19 nt, Human
gauauauguuuuugaaggc

SEQ ID NO: 3660646 - RNA, 13 nt, Human
gauauauuaaaaa

SEQ ID NO: 3660647 - RNA, 18 nt, Human
gauauauuaaaaauauaa

SEQ ID NO: 3660648 - RNA, 21 nt, Human
cucuucugagcuauuucaucu

SEQ ID NO: 3660649 - RNA, 22 nt, Human
cucuucugagcuauuucaucua

SEQ ID NO: 3660650 - RNA, 13 nt, Human
cucuucugcucca

SEQ ID NO: 3660651 - RNA, 15 nt, Human
cucuucugcuccacc

SEQ ID NO: 3660652 - RNA, 20 nt, Human
cucuucugcuccacccuugg

SEQ ID NO: 3660653 - RNA, 20 nt, Human
cucuucugcuuaggagagac

SEQ ID NO: 3660654 - RNA, 11 nt, Human
cucuucuggcu

SEQ ID NO: 3660655 - RNA, 15 nt, Human
cucuucugggccuga

SEQ ID NO: 3660656 - RNA, 19 nt, Human
cucuucuuauacagauaaa

SEQ ID NO: 3660657 - RNA, 20 nt, Human
cucuucuuccagguagcuga

SEQ ID NO: 3660658 - RNA, 16 nt, Human
cucuucuucccagcac

SEQ ID NO: 3660659 - RNA, 15 nt, Human
cucuucuucuucaga

SEQ ID NO: 3660660 - RNA, 14 nt, Human
cucuucuucuuucu

SEQ ID NO: 3660661 - RNA, 16 nt, Human
cucuucuuggggccca

SEQ ID NO: 3660662 - RNA, 20 nt, Human
cucuucuuggggcccagugc

SEQ ID NO: 3660663 - RNA, 22 nt, Human
cucuucuuuaaagggauggcaa

SEQ ID NO: 3660664 - RNA, 17 nt, Human
cucuucuuuagaacagg

SEQ ID NO: 3660665 - RNA, 22 nt, Human
cucuugaaauauaggaacuuaa

SEQ ID NO: 3660666 - RNA, 20 nt, Human
cucuugaagacacugaaaua

SEQ ID NO: 3660667 - RNA, 21 nt, Human
cucuugaagacacugaaauau

SEQ ID NO: 3660668 - RNA, 17 nt, Human
cucuugacccugcaccc

SEQ ID NO: 3660669 - RNA, 16 nt, Human
cucuugaccuuguaga

SEQ ID NO: 3660670 - RNA, 20 nt, Human
cucuugagaucuugguccug

SEQ ID NO: 3660671 - RNA, 18 nt, Human
cucuugagcaguggcugg

SEQ ID NO: 3660672 - RNA, 15 nt, Human
cucuugagccuggga

SEQ ID NO: 3660673 - RNA, 13 nt, Human
cucuugagcuggc

SEQ ID NO: 3660674 - RNA, 22 nt, Human
cucuugagcuggccucucuagc

SEQ ID NO: 3660675 - RNA, 16 nt, Human
cucuugaggccaggag

SEQ ID NO: 3660676 - RNA, 17 nt, Human
cucuugaggccaggagu

SEQ ID NO: 3660677 - RNA, 19 nt, Human
cugacuaaacuuuuuuucu

SEQ ID NO: 3660678 - RNA, 14 nt, Human
cugacuaagaaauu

SEQ ID NO: 3660679 - RNA, 15 nt, Human
cugacuacugggcaa

SEQ ID NO: 3660680 - RNA, 23 nt, Human
cugacuagaagggccaguccugc

SEQ ID NO: 3660681 - RNA, 18 nt, Human
cugacuagggagccaugu

SEQ ID NO: 3660682 - RNA, 21 nt, Human
cugacuagggagccauguuuc

SEQ ID NO: 3660683 - RNA, 18 nt, Human
cugacuauucuugaugua

SEQ ID NO: 3660684 - RNA, 19 nt, Human
cugacuauucuugauguaa

SEQ ID NO: 3660685 - RNA, 20 nt, Human
cugacuauucuugauguaaa

SEQ ID NO: 3660686 - RNA, 18 nt, Human
cugacucaacauguuacu

SEQ ID NO: 3660687 - RNA, 15 nt, Human
cugacucacaagaag

SEQ ID NO: 3660688 - RNA, 16 nt, Human
cugacucacaagaaga

SEQ ID NO: 3660689 - RNA, 21 nt, Human
cugacucacaagaagaccaga

SEQ ID NO: 3660690 - RNA, 22 nt, Human
cugacucacaccugaacugaac

SEQ ID NO: 3660691 - RNA, 15 nt, Human
cugacucagggcucc

SEQ ID NO: 3660692 - RNA, 16 nt, Human
cugacucagggcuccu

SEQ ID NO: 3660693 - RNA, 19 nt, Human
cugacucagggcuccuggg

SEQ ID NO: 3660694 - RNA, 16 nt, Human
cugacucaucauuugu

SEQ ID NO: 3660695 - RNA, 13 nt, Human
cugacuccagugg

SEQ ID NO: 3660696 - RNA, 20 nt, Human
cugacucccaaagagcugcc

SEQ ID NO: 3660697 - RNA, 17 nt, Human
cugacucccccaguccc

SEQ ID NO: 3660698 - RNA, 17 nt, Human
cugacuccucuaagcca

SEQ ID NO: 3660699 - RNA, 13 nt, Human
cugacuccuuaga

SEQ ID NO: 3660700 - RNA, 14 nt, Human
cugacucucuguga

SEQ ID NO: 3660701 - RNA, 12 nt, Human
cugacucugccc

SEQ ID NO: 3660702 - RNA, 17 nt, Human
cugacucuuaagaagac

SEQ ID NO: 3660703 - RNA, 13 nt, Human
cugacugacauga

SEQ ID NO: 3660704 - RNA, 14 nt, Human
cugacugccaagcc

SEQ ID NO: 3660705 - RNA, 15 nt, Human
cugacugcccagcau

SEQ ID NO: 3660706 - RNA, 18 nt, Human
cugacugcccagcauuug

SEQ ID NO: 3660707 - RNA, 13 nt, Human
cugacugcucaga

SEQ ID NO: 3660708 - RNA, 14 nt, Human
cugacugcucagaa

SEQ ID NO: 3660709 - RNA, 20 nt, Human
cugacuggauucauucucau

SEQ ID NO: 3660710 - RNA, 19 nt, Human
gaugcuucaugugaacgug

SEQ ID NO: 3660711 - RNA, 20 nt, Human
gaugcuucuucagagacucc

SEQ ID NO: 3660712 - RNA, 20 nt, Human
gaugcuugcggcaaaaggaa

SEQ ID NO: 3660713 - RNA, 16 nt, Human
gaugcuugggaagacu

SEQ ID NO: 3660714 - RNA, 16 nt, Human
gaugcuuguacauaau

SEQ ID NO: 3660715 - RNA, 23 nt, Human
gaugcuuuguuucuuucauauga

SEQ ID NO: 3660716 - RNA, 14 nt, Human
gaugcuuuuaacag

SEQ ID NO: 3660717 - RNA, 15 nt, Human
gaugcuuuuaacaga

SEQ ID NO: 3660718 - RNA, 16 nt, Human
gaugcuuuucugucuc

SEQ ID NO: 3660719 - RNA, 14 nt, Human
gauggaaacaaagu

SEQ ID NO: 3660720 - RNA, 17 nt, Human
gauggaacacggccaca

SEQ ID NO: 3660721 - RNA, 21 nt, Human
gauggaacaggcucagaucuc

SEQ ID NO: 3660722 - RNA, 20 nt, Human
gauggaacccuuuuggcccc

SEQ ID NO: 3660723 - RNA, 20 nt, Human
gauggaaccgcaggaagcug

SEQ ID NO: 3660724 - RNA, 13 nt, Human
gauggaaugaugg

SEQ ID NO: 3660725 - RNA, 20 nt, Human
gauggacaguucacacccug

SEQ ID NO: 3660726 - RNA, 16 nt, Human
gauggagaaggaaggc

SEQ ID NO: 3660727 - RNA, 22 nt, Human
gauggagacuccaugagaagcc

SEQ ID NO: 3660728 - RNA, 15 nt, Human
gauggagagagggga

SEQ ID NO: 3660729 - RNA, 22 nt, Human
gauggagcagagcaagucugca

SEQ ID NO: 3660730 - RNA, 22 nt, Human
gauggagcccaggcgggagcgg

SEQ ID NO: 3660731 - RNA, 19 nt, Human
gauggaggacuccaggcag

SEQ ID NO: 3660732 - RNA, 13 nt, Human
gauggaggagaag

SEQ ID NO: 3660733 - RNA, 16 nt, Human
gauggaggggaguguu

SEQ ID NO: 3660734 - RNA, 16 nt, Human
gauggagguuucauac

SEQ ID NO: 3660735 - RNA, 19 nt, Human
gauggaguucuugugccau

SEQ ID NO: 3660736 - RNA, 13 nt, Human
gauggaguuucua

SEQ ID NO: 3660737 - RNA, 18 nt, Human
gauggauaaccuauauga

SEQ ID NO: 3660738 - RNA, 22 nt, Human
gauggauuccaaccccaacucc

SEQ ID NO: 3660739 - RNA, 22 nt, Human
gauggauucucagauauuuaua

SEQ ID NO: 3660740 - RNA, 17 nt, Human
gauggauucuccacuca

SEQ ID NO: 3660741 - RNA, 22 nt, Human
gauggcacagggcaugaaauga

SEQ ID NO: 3660742 - RNA, 21 nt, Human
gauggcacuuagcuaucagaa

SEQ ID NO: 3660743 - RNA, 15 nt, Human
gauggcagcuguuua

SEQ ID NO: 3660744 - RNA, 20 nt, Human
gauggcaggacgugggcugg

SEQ ID NO: 3660745 - RNA, 15 nt, Human
gauggcaggauggcc

SEQ ID NO: 3660746 - RNA, 22 nt, Human
gauggcaggauggccuggccag

SEQ ID NO: 3660747 - RNA, 21 nt, Human
gauggcauccugugaaguccu

SEQ ID NO: 3660748 - RNA, 14 nt, Human
gauggccagccccu

SEQ ID NO: 3660749 - RNA, 14 nt, Human
gauggcccauccug

SEQ ID NO: 3660750 - RNA, 18 nt, Human
gauggcccauucuacuug

SEQ ID NO: 3660751 - RNA, 14 nt, Human
gauggccuuaauuu

SEQ ID NO: 3660752 - RNA, 21 nt, Human
gauggcuaaaaccaucauagu

SEQ ID NO: 3660753 - RNA, 21 nt, Human
gauggcuaguaucaaaagaaa

SEQ ID NO: 3660754 - RNA, 14 nt, Human
gauggcuccucuca

SEQ ID NO: 3660755 - RNA, 17 nt, Human
gauggcugugccucugc

SEQ ID NO: 3660756 - RNA, 19 nt, Human
gauggcugugccucugccu

SEQ ID NO: 3660757 - RNA, 13 nt, Human
gauggcuugucua

SEQ ID NO: 3660758 - RNA, 14 nt, Human
gaugggaaugaagc

SEQ ID NO: 3660759 - RNA, 22 nt, Human
gaugggacauuccaaagaacag

SEQ ID NO: 3660760 - RNA, 23 nt, Human
gaugggacuagagcuuucuuuca

SEQ ID NO: 3660761 - RNA, 14 nt, Human
gaugggacugggag

SEQ ID NO: 3660762 - RNA, 23 nt, Human
gaugggagcuccucuccuggagg

SEQ ID NO: 3660763 - RNA, 15 nt, Human
gaugggagugagaca

SEQ ID NO: 3660764 - RNA, 19 nt, Human
gaugggaugauugaagaaa

SEQ ID NO: 3660765 - RNA, 19 nt, Human
gaugggaugguggagggcc

SEQ ID NO: 3660766 - RNA, 13 nt, Human
gaugggauucugg

SEQ ID NO: 3660767 - RNA, 22 nt, Human
gaugggcaacccccagccugcu

SEQ ID NO: 3660768 - RNA, 23 nt, Human
gaugggcauaugugucagugggg

SEQ ID NO: 3660769 - RNA, 17 nt, Human
gaugggcaugggguggg

SEQ ID NO: 3660770 - RNA, 20 nt, Human
gaugggcauggggugggccu

SEQ ID NO: 3660771 - RNA, 22 nt, Human
gaugggcaugguguucuccugc

SEQ ID NO: 3660772 - RNA, 13 nt, Human
gaugggccaccgc

SEQ ID NO: 3660773 - RNA, 14 nt, Human
gaugggccaccgcc

SEQ ID NO: 3660774 - RNA, 18 nt, Human
gaugggccaccgccuugc

SEQ ID NO: 3660775 - RNA, 13 nt, Human
gaugggccugagu

SEQ ID NO: 3660776 - RNA, 20 nt, Human
gaugggccugcuuccugucu

SEQ ID NO: 3660777 - RNA, 18 nt, Human
gaugggcuuguuuucuug

SEQ ID NO: 3660778 - RNA, 14 nt, Human
gauggggaaggagg

SEQ ID NO: 3660779 - RNA, 12 nt, Human
gauggggagcgu

SEQ ID NO: 3660780 - RNA, 14 nt, Human
gauggggccacagc

SEQ ID NO: 3660781 - RNA, 15 nt, Human
gauggggccacagcc

SEQ ID NO: 3660782 - RNA, 14 nt, Human
gauggggcccugcc

SEQ ID NO: 3660783 - RNA, 15 nt, Human
gauggggcugcaccg

SEQ ID NO: 3660784 - RNA, 23 nt, Human
gauggggcugcaccggcuggccu

SEQ ID NO: 3660785 - RNA, 12 nt, Human
gauggggcuggg

SEQ ID NO: 3660786 - RNA, 21 nt, Human
gaugggggaaagcacaggugg

SEQ ID NO: 3660787 - RNA, 20 nt, Human
gaugggggaacucagaucca

SEQ ID NO: 3660788 - RNA, 22 nt, Human
gaugggggaacucagauccagg

SEQ ID NO: 3660789 - RNA, 17 nt, Human
gaugggggcagggcugu

SEQ ID NO: 3660790 - RNA, 20 nt, Human
gaugggggcagggcugugcu

SEQ ID NO: 3660791 - RNA, 22 nt, Human
gauggggugggguggagaacuc

SEQ ID NO: 3660792 - RNA, 20 nt, Human
gaugggucagguagggggga

SEQ ID NO: 3660793 - RNA, 15 nt, Human
gaugggucaguugua

SEQ ID NO: 3660794 - RNA, 19 nt, Human
gaugggugcuuggaggaag

SEQ ID NO: 3660795 - RNA, 22 nt, Human
gauggguucuaauuuuggaugg

SEQ ID NO: 3660796 - RNA, 18 nt, Human
gauggguuugacaagguu

SEQ ID NO: 3660797 - RNA, 15 nt, Human
gaugguaagaaacaa

SEQ ID NO: 3660798 - RNA, 13 nt, Human
gaugguaauucuu

SEQ ID NO: 3660799 - RNA, 20 nt, Human
gaugguacgugacccucugc

SEQ ID NO: 3660800 - RNA, 17 nt, Human
gaugguaguuuuuucau

SEQ ID NO: 3660801 - RNA, 17 nt, Human
gauggucuuacagcagg

SEQ ID NO: 3660802 - RNA, 21 nt, Human
gauggucuuacagcaggcagu

SEQ ID NO: 3660803 - RNA, 14 nt, Human
gauggugcaaugac

SEQ ID NO: 3660804 - RNA, 15 nt, Human
gauggugcaaugacc

SEQ ID NO: 3660805 - RNA, 16 nt, Human
gauggugcaaugaccu

SEQ ID NO: 3660806 - RNA, 17 nt, Human
gauggugcaaugaccuu

SEQ ID NO: 3660807 - RNA, 23 nt, Human
gauggugcaaugaccuuucaaua

SEQ ID NO: 3660808 - RNA, 14 nt, Human
gauggugcugagaa

SEQ ID NO: 3660809 - RNA, 16 nt, Human
gauggugcugagaagc

SEQ ID NO: 3660810 - RNA, 14 nt, Human
gaugguggagggcc

SEQ ID NO: 3660811 - RNA, 13 nt, Human
gauggugggcuuc

SEQ ID NO: 3660812 - RNA, 15 nt, Human
gauggugggcuucag

SEQ ID NO: 3660813 - RNA, 19 nt, Human
gauggugggcuucagggca

SEQ ID NO: 3660814 - RNA, 20 nt, Human
gaugguguagcccucccacu

SEQ ID NO: 3660815 - RNA, 20 nt, Human
gaugguguuacugcaguuga

SEQ ID NO: 3660816 - RNA, 18 nt, Human
gaugguuacacuguuaga

SEQ ID NO: 3660817 - RNA, 23 nt, Human
gaugguuacacuguuagaacacu

SEQ ID NO: 3660818 - RNA, 17 nt, Human
gaugguuauuuucuuuu

SEQ ID NO: 3660819 - RNA, 23 nt, Human
gaugguuauuuucuuuucuuuca

SEQ ID NO: 3660820 - RNA, 18 nt, Human
gaugguuccccuguucac

SEQ ID NO: 3660821 - RNA, 14 nt, Human
gauuaccagggacu

SEQ ID NO: 3660822 - RNA, 14 nt, Human
gauuacccaagcaa

SEQ ID NO: 3660823 - RNA, 17 nt, Human
gauuaccuccugagaaa

SEQ ID NO: 3660824 - RNA, 23 nt, Human
gauuacucuuugagauagaagaa

SEQ ID NO: 3660825 - RNA, 18 nt, Human
gauuacugccuauuuuaa

SEQ ID NO: 3660826 - RNA, 22 nt, Human
gauuacuggccuuuuucauuua

SEQ ID NO: 3660827 - RNA, 18 nt, Human
gauuacugucaauaaaca

SEQ ID NO: 3660828 - RNA, 20 nt, Human
gauuacuucucuauaaaaaa

SEQ ID NO: 3660829 - RNA, 15 nt, Human
gauuagaaauuaccu

SEQ ID NO: 3660830 - RNA, 20 nt, Human
gauuagaaauuaccugugga

SEQ ID NO: 3660831 - RNA, 22 nt, Human
gauuagaaugaaaauuguaugu

SEQ ID NO: 3660832 - RNA, 23 nt, Human
gauuagaauucuguauagauuag

SEQ ID NO: 3660833 - RNA, 18 nt, Human
gauuagacuggacagcuu

SEQ ID NO: 3660834 - RNA, 17 nt, Human
gauuagagccuguaaac

SEQ ID NO: 3660835 - RNA, 20 nt, Human
gauuagcaaggucauuucuu

SEQ ID NO: 3660836 - RNA, 12 nt, Human
gauuagcucugg

SEQ ID NO: 3660837 - RNA, 10 nt, Human
gauuagcuuu

SEQ ID NO: 3660838 - RNA, 13 nt, Human
gauuagcuuugug

SEQ ID NO: 3660839 - RNA, 14 nt, Human
gauuagcuuugugu

SEQ ID NO: 3660840 - RNA, 23 nt, Human
gauuagggcauuugagaaaugca

SEQ ID NO: 3660841 - RNA, 15 nt, Human
gauuaguaagaucuc

SEQ ID NO: 3660842 - RNA, 23 nt, Human
gauuaguuuucuuguugcuuugu

SEQ ID NO: 3660843 - RNA, 20 nt, Human
gauuauaaaauuaaucacaa

SEQ ID NO: 3660844 - RNA, 14 nt, Human
gauuauaaucagaa

SEQ ID NO: 3660845 - RNA, 13 nt, Human
gauuauaauuguu

SEQ ID NO: 3660846 - RNA, 13 nt, Human
gauuauagauucu

SEQ ID NO: 3660847 - RNA, 15 nt, Human
gauuauagauucuaa

SEQ ID NO: 3660848 - RNA, 17 nt, Human
gauuauagauucuaaag

SEQ ID NO: 3660849 - RNA, 18 nt, Human
gauuauagauucuaaaga

SEQ ID NO: 3660850 - RNA, 20 nt, Human
gauuauagauuggagccacc

SEQ ID NO: 3660851 - RNA, 20 nt, Human
gauuauaucaaaguauuugu

SEQ ID NO: 3660852 - RNA, 20 nt, Human
gauuaucuauuugugugugu

SEQ ID NO: 3660853 - RNA, 17 nt, Human
gauuauggaaaaauaaa

SEQ ID NO: 3660854 - RNA, 14 nt, Human
gauuauggagcuuu

SEQ ID NO: 3660855 - RNA, 13 nt, Human
gauuaugggucac

SEQ ID NO: 3660856 - RNA, 17 nt, Human
gauuaugguuuugugau

SEQ ID NO: 3660857 - RNA, 19 nt, Human
gauuauguagcaaaauaca

SEQ ID NO: 3660858 - RNA, 21 nt, Human
gauuaugucuuuuauauuugu

SEQ ID NO: 3660859 - RNA, 19 nt, Human
gauuauuaacgauguccaa

SEQ ID NO: 3660860 - RNA, 23 nt, Human
gauuauuaacuaauaugggcauu

SEQ ID NO: 3660861 - RNA, 13 nt, Human
gauuauucacuga

SEQ ID NO: 3660862 - RNA, 13 nt, Human
gauuauucagugu

SEQ ID NO: 3660863 - RNA, 13 nt, Human
gauuauucauuua

SEQ ID NO: 3660864 - RNA, 12 nt, Human
cugacugggagu

SEQ ID NO: 3660865 - RNA, 15 nt, Human
cugacugggggcaga

SEQ ID NO: 3660866 - RNA, 16 nt, Human
cugacuggugcugcag

SEQ ID NO: 3660867 - RNA, 17 nt, Human
cugacuguacuccuccc

SEQ ID NO: 3660868 - RNA, 18 nt, Human
cugacuguagcuuuggaa

SEQ ID NO: 3660869 - RNA, 14 nt, Human
cugacuguccucuc

SEQ ID NO: 3660870 - RNA, 16 nt, Human
cugacuguccucuccc

SEQ ID NO: 3660871 - RNA, 21 nt, Human
cugacugucgggcuuuaaaaa

SEQ ID NO: 3660872 - RNA, 20 nt, Human
cugacugucucccgggacua

SEQ ID NO: 3660873 - RNA, 19 nt, Human
cugacuuaagcaaaagaaa

SEQ ID NO: 3660874 - RNA, 17 nt, Human
cugacuucaucucccac

SEQ ID NO: 3660875 - RNA, 21 nt, Human
cugacuuccccgcauuccagg

SEQ ID NO: 3660876 - RNA, 23 nt, Human
cugacuuccccgcauuccaggcu

SEQ ID NO: 3660877 - RNA, 13 nt, Human
cugacuucuaagu

SEQ ID NO: 3660878 - RNA, 16 nt, Human
cugacuucugccugga

SEQ ID NO: 3660879 - RNA, 19 nt, Human
cugacuuggggaccuuuug

SEQ ID NO: 3660880 - RNA, 19 nt, Human
cugacuuucuuuuuugaua

SEQ ID NO: 3660881 - RNA, 14 nt, Human
cugacuuugcucuu

SEQ ID NO: 3660882 - RNA, 15 nt, Human
cugacuuugcucuuu

SEQ ID NO: 3660883 - RNA, 19 nt, Human
cugacuuugcuugcuuuga

SEQ ID NO: 3660884 - RNA, 14 nt, Human
cugagaaaacaagc

SEQ ID NO: 3660885 - RNA, 19 nt, Human
cugagaaaacgaaacugcu

SEQ ID NO: 3660886 - RNA, 21 nt, Human
cugagaaaacgaaacugcucu

SEQ ID NO: 3660887 - RNA, 23 nt, Human
cugagaaaaugagugacuagacg

SEQ ID NO: 3660888 - RNA, 12 nt, Human
cugagaaagacu

SEQ ID NO: 3660889 - RNA, 13 nt, Human
cugagaaagacua

SEQ ID NO: 3660890 - RNA, 18 nt, Human
cugagaaagacuauucaa

SEQ ID NO: 3660891 - RNA, 19 nt, Human
cugagaaagacuauucaaa

SEQ ID NO: 3660892 - RNA, 16 nt, Human
cugagaaagcccuguc

SEQ ID NO: 3660893 - RNA, 12 nt, Human
cugagaaccugg

SEQ ID NO: 3660894 - RNA, 16 nt, Human
cugagaaccuggccuu

SEQ ID NO: 3660895 - RNA, 17 nt, Human
cugagaagauugugaau

SEQ ID NO: 3660896 - RNA, 17 nt, Human
cugagaagguccuuaau

SEQ ID NO: 3660897 - RNA, 18 nt, Human
cugagaaugaacaaagac

SEQ ID NO: 3660898 - RNA, 16 nt, Human
cugagaauuccaagga

SEQ ID NO: 3660899 - RNA, 21 nt, Human
cugagaauuguugagauacuu

SEQ ID NO: 3660900 - RNA, 22 nt, Human
cugagacagcccgggcucugcc

SEQ ID NO: 3660901 - RNA, 14 nt, Human
cugagaccaguugg

SEQ ID NO: 3660902 - RNA, 23 nt, Human
cugagaccaguugggagcacugg

SEQ ID NO: 3660903 - RNA, 13 nt, Human
cugagacccagga

SEQ ID NO: 3660904 - RNA, 16 nt, Human
cugagaccccuggccu

SEQ ID NO: 3660905 - RNA, 19 nt, Human
cugagaccccuggccuccg

SEQ ID NO: 3660906 - RNA, 20 nt, Human
cugagaccccuggccuccgg

SEQ ID NO: 3660907 - RNA, 18 nt, Human
cugagacgucaugaggag

SEQ ID NO: 3660908 - RNA, 19 nt, Human
cugagacucacaggaagga

SEQ ID NO: 3660909 - RNA, 21 nt, Human
cugagacucagacaggaaagg

SEQ ID NO: 3660910 - RNA, 17 nt, Human
cugagacucucuuagga

SEQ ID NO: 3660911 - RNA, 14 nt, Human
cugagacugcggga

SEQ ID NO: 3660912 - RNA, 12 nt, Human
cugagacugugc

SEQ ID NO: 3660913 - RNA, 14 nt, Human
cugagagaaaauaa

SEQ ID NO: 3660914 - RNA, 20 nt, Human
cugagagaauuggcucaaua

SEQ ID NO: 3660915 - RNA, 16 nt, Human
cugagagacauggcuu

SEQ ID NO: 3660916 - RNA, 15 nt, Human
cugagagacccaagg

SEQ ID NO: 3660917 - RNA, 19 nt, Human
cugagagacccaaggagga

SEQ ID NO: 3660918 - RNA, 16 nt, Human
cugagagacuuuuaau

SEQ ID NO: 3660919 - RNA, 16 nt, Human
cugagagagcgcagcc

SEQ ID NO: 3660920 - RNA, 13 nt, Human
cugagagaggcca

SEQ ID NO: 3660921 - RNA, 21 nt, Human
cugagagaggcuaaaauguuu

SEQ ID NO: 3660922 - RNA, 14 nt, Human
cugagagaguggca

SEQ ID NO: 3660923 - RNA, 15 nt, Human
cugagagaucugcug

SEQ ID NO: 3660924 - RNA, 17 nt, Human
cugagagcccagaaaag

SEQ ID NO: 3660925 - RNA, 16 nt, Human
cugagagccccagcug

SEQ ID NO: 3660926 - RNA, 20 nt, Human
cugagaggacagagagaaau

SEQ ID NO: 3660927 - RNA, 12 nt, Human
cugagaggccac

SEQ ID NO: 3660928 - RNA, 13 nt, Human
cugagaggcccug

SEQ ID NO: 3660929 - RNA, 14 nt, Human
cugagaggcccugg

SEQ ID NO: 3660930 - RNA, 15 nt, Human
cugagaggcccugga

SEQ ID NO: 3660931 - RNA, 16 nt, Human
cugagaggcccuggau

SEQ ID NO: 3660932 - RNA, 14 nt, Human
cugagaggggaagc

SEQ ID NO: 3660933 - RNA, 17 nt, Human
cugagagucagcucucu

SEQ ID NO: 3660934 - RNA, 18 nt, Human
cugagagucagcucucug

SEQ ID NO: 3660935 - RNA, 15 nt, Human
cugagagucuagagg

SEQ ID NO: 3660936 - RNA, 13 nt, Human
cugagagucugca

SEQ ID NO: 3660937 - RNA, 19 nt, Human
cugagauacauacagaauu

SEQ ID NO: 3660938 - RNA, 18 nt, Human
cugagauaccagcgagga

SEQ ID NO: 3660939 - RNA, 12 nt, Human
cugagauaugaa

SEQ ID NO: 3660940 - RNA, 21 nt, Human
cugagaucaaaacgguuuuac

SEQ ID NO: 3660941 - RNA, 18 nt, Human
cugagauccccugagccc

SEQ ID NO: 3660942 - RNA, 20 nt, Human
cugagaugggcuucccaagg

SEQ ID NO: 3660943 - RNA, 20 nt, Human
cugagaugugaacacaucag

SEQ ID NO: 3660944 - RNA, 23 nt, Human
cugagauuauaggcaccuaccac

SEQ ID NO: 3660945 - RNA, 15 nt, Human
cugagauuuauuaaa

SEQ ID NO: 3660946 - RNA, 17 nt, Human
cugagauuuauuaaaga

SEQ ID NO: 3660947 - RNA, 14 nt, Human
cugagauuucaucu

SEQ ID NO: 3660948 - RNA, 16 nt, Human
cugagauuucaucugc

SEQ ID NO: 3660949 - RNA, 20 nt, Human
cugagauuucaucugcucuc

SEQ ID NO: 3660950 - RNA, 21 nt, Human
cugagauuucaucugcucucc

SEQ ID NO: 3660951 - RNA, 21 nt, Human
cugagcaaauguggcuccugg

SEQ ID NO: 3660952 - RNA, 19 nt, Human
cugagcaacgcuauuccag

SEQ ID NO: 3660953 - RNA, 20 nt, Human
cugagcaacgcuauuccagc

SEQ ID NO: 3660954 - RNA, 17 nt, Human
cugagcaagagcuggca

SEQ ID NO: 3660955 - RNA, 20 nt, Human
cugagcaagagcuggcaaag

SEQ ID NO: 3660956 - RNA, 15 nt, Human
cugagcaaugucugu

SEQ ID NO: 3660957 - RNA, 15 nt, Human
cugagcacccucugg

SEQ ID NO: 3660958 - RNA, 16 nt, Human
cugagcacccucugga

SEQ ID NO: 3660959 - RNA, 20 nt, Human
cugagcacccucuggauucu

SEQ ID NO: 3660960 - RNA, 20 nt, Human
cugagcaccgugucaagcug

SEQ ID NO: 3660961 - RNA, 15 nt, Human
cugagcaccucccag

SEQ ID NO: 3660962 - RNA, 17 nt, Human
cugagcaccugcuucau

SEQ ID NO: 3660963 - RNA, 15 nt, Human
cugagcacugccagg

SEQ ID NO: 3660964 - RNA, 16 nt, Human
cugagcacugccagga

SEQ ID NO: 3660965 - RNA, 17 nt, Human
cugagcacugccaggag

SEQ ID NO: 3660966 - RNA, 14 nt, Human
gauuuccaagccuc

SEQ ID NO: 3660967 - RNA, 16 nt, Human
gauuucccguggcccc

SEQ ID NO: 3660968 - RNA, 18 nt, Human
gauuucccguggccccag

SEQ ID NO: 3660969 - RNA, 22 nt, Human
gauuucccguggccccagccug

SEQ ID NO: 3660970 - RNA, 14 nt, Human
gauuuccucuugaa

SEQ ID NO: 3660971 - RNA, 20 nt, Human
gauuucgugggucuguuuuc

SEQ ID NO: 3660972 - RNA, 22 nt, Human
gauuucucuuugaaacaugcuu

SEQ ID NO: 3660973 - RNA, 12 nt, Human
gauuucugauuu

SEQ ID NO: 3660974 - RNA, 17 nt, Human
gauuucuguaaacucug

SEQ ID NO: 3660975 - RNA, 11 nt, Human
gauuucuguuu

SEQ ID NO: 3660976 - RNA, 19 nt, Human
gauuucuguuuagauaaua

SEQ ID NO: 3660977 - RNA, 12 nt, Human
gauuucuuaggg

SEQ ID NO: 3660978 - RNA, 14 nt, Human
gauuucuuugaaaa

SEQ ID NO: 3660979 - RNA, 17 nt, Human
gauuucuuugaaaaaaa

SEQ ID NO: 3660980 - RNA, 18 nt, Human
gauuucuuuucuuccugg

SEQ ID NO: 3660981 - RNA, 13 nt, Human
gauuugaacacuu

SEQ ID NO: 3660982 - RNA, 13 nt, Human
gauuugaacucag

SEQ ID NO: 3660983 - RNA, 22 nt, Human
gauuugaacucagaucugucug

SEQ ID NO: 3660984 - RNA, 17 nt, Human
gauuugaaggucuugau

SEQ ID NO: 3660985 - RNA, 12 nt, Human
gauuugaccucc

SEQ ID NO: 3660986 - RNA, 14 nt, Human
gauuugacuguuuu

SEQ ID NO: 3660987 - RNA, 21 nt, Human
gauuugacuguuuuuacccau

SEQ ID NO: 3660988 - RNA, 16 nt, Human
gauuugagauuuuuau

SEQ ID NO: 3660989 - RNA, 22 nt, Human
gauuugaggagcagcuucaguu

SEQ ID NO: 3660990 - RNA, 15 nt, Human
gauuugcauugaaca

SEQ ID NO: 3660991 - RNA, 21 nt, Human
gauuugcauugaacacaaacu

SEQ ID NO: 3660992 - RNA, 18 nt, Human
gauuugccacaucuuaaa

SEQ ID NO: 3660993 - RNA, 13 nt, Human
gauuugccauaga

SEQ ID NO: 3660994 - RNA, 17 nt, Human
gauuugcccauuuacac

SEQ ID NO: 3660995 - RNA, 19 nt, Human
gauuugcccauuuacacuu

SEQ ID NO: 3660996 - RNA, 21 nt, Human
gauuugcuaucaaaauaaauu

SEQ ID NO: 3660997 - RNA, 23 nt, Human
gauuugcucagugucuggcugca

SEQ ID NO: 3660998 - RNA, 15 nt, Human
gauuuggaagggaaa

SEQ ID NO: 3660999 - RNA, 22 nt, Human
gauuuggagcacucugaguuua

SEQ ID NO: 3661000 - RNA, 17 nt, Human
gauuugggcugaaugua

SEQ ID NO: 3661001 - RNA, 19 nt, Human
gauuugggcugaauguaug

SEQ ID NO: 3661002 - RNA, 22 nt, Human
gauuuggucaacacuaacauga

SEQ ID NO: 3661003 - RNA, 17 nt, Human
gauuuggugaauuugaa

SEQ ID NO: 3661004 - RNA, 19 nt, Human
gauuuguacuacaguucuu

SEQ ID NO: 3661005 - RNA, 17 nt, Human
gauuuguugauucucuc

SEQ ID NO: 3661006 - RNA, 14 nt, Human
gauuuguuuuagaa

SEQ ID NO: 3661007 - RNA, 19 nt, Human
gauuuguuuuuguauuuuu

SEQ ID NO: 3661008 - RNA, 22 nt, Human
gauuuuaaaauguacauguauu

SEQ ID NO: 3661009 - RNA, 22 nt, Human
gauuuuaaacuagaugaccuca

SEQ ID NO: 3661010 - RNA, 14 nt, Human
gauuuuaacucugu

SEQ ID NO: 3661011 - RNA, 16 nt, Human
gauuuuaacucugucu

SEQ ID NO: 3661012 - RNA, 21 nt, Human
gauuuuaaguuucucugcaga

SEQ ID NO: 3661013 - RNA, 23 nt, Human
gauuuuaauagggaauauaucuc

SEQ ID NO: 3661014 - RNA, 20 nt, Human
gauuuuaauggauuguuaau

SEQ ID NO: 3661015 - RNA, 18 nt, Human
gauuuuacaauugaaaug

SEQ ID NO: 3661016 - RNA, 20 nt, Human
gauuuuacaugaaguauuuu

SEQ ID NO: 3661017 - RNA, 19 nt, Human
gauuuuaggagcuaaggcu

SEQ ID NO: 3661018 - RNA, 19 nt, Human
gauuuuaguuuuauuuucu

SEQ ID NO: 3661019 - RNA, 20 nt, Human
gauuuuaucugugaauucag

SEQ ID NO: 3661020 - RNA, 13 nt, Human
gauuuuaugcuuu

SEQ ID NO: 3661021 - RNA, 14 nt, Human
gauuuuaugcuuua

SEQ ID NO: 3661022 - RNA, 19 nt, Human
gauuuuaugcuuuaaacau

SEQ ID NO: 3661023 - RNA, 13 nt, Human
gauuuuauguuga

SEQ ID NO: 3661024 - RNA, 14 nt, Human
gauuuuauguugac

SEQ ID NO: 3661025 - RNA, 16 nt, Human
gauuuuauguugacau

SEQ ID NO: 3661026 - RNA, 19 nt, Human
gauuuuauuauguaaaucc

SEQ ID NO: 3661027 - RNA, 19 nt, Human
gauuuucacauucuuggcu

SEQ ID NO: 3661028 - RNA, 15 nt, Human
cugagccucugcucc

SEQ ID NO: 3661029 - RNA, 18 nt, Human
cugagccugcagggaagc

SEQ ID NO: 3661030 - RNA, 19 nt, Human
cugagccugcagggaagcc

SEQ ID NO: 3661031 - RNA, 13 nt, Human
cugagccuggcca

SEQ ID NO: 3661032 - RNA, 12 nt, Human
cugagccugguc

SEQ ID NO: 3661033 - RNA, 12 nt, Human
cugagccuucag

SEQ ID NO: 3661034 - RNA, 16 nt, Human
cugagccuugggaccc

SEQ ID NO: 3661035 - RNA, 16 nt, Human
cugagccuuguaauuc

SEQ ID NO: 3661036 - RNA, 20 nt, Human
cugagcgaggagaugcuccu

SEQ ID NO: 3661037 - RNA, 14 nt, Human
cugagcgggaggca

SEQ ID NO: 3661038 - RNA, 16 nt, Human
cugagcuauguaguau

SEQ ID NO: 3661039 - RNA, 16 nt, Human
cugagcuauuucaucu

SEQ ID NO: 3661040 - RNA, 17 nt, Human
cugagcucacaaggcag

SEQ ID NO: 3661041 - RNA, 18 nt, Human
cugagcucacaaggcagc

SEQ ID NO: 3661042 - RNA, 19 nt, Human
cugagcucacaaggcagca

SEQ ID NO: 3661043 - RNA, 20 nt, Human
cugagcucacaaggcagcaa

SEQ ID NO: 3661044 - RNA, 23 nt, Human
cugagcucacaaggcagcaaggc

SEQ ID NO: 3661045 - RNA, 16 nt, Human
cugagcucagcgugga

SEQ ID NO: 3661046 - RNA, 16 nt, Human
cugagcuccaguggaa

SEQ ID NO: 3661047 - RNA, 18 nt, Human
cugagcuccccaccaccc

SEQ ID NO: 3661048 - RNA, 18 nt, Human
cugagcuccucugggcag

SEQ ID NO: 3661049 - RNA, 12 nt, Human
cugagcucugag

SEQ ID NO: 3661050 - RNA, 13 nt, Human
cugagcucugaga

SEQ ID NO: 3661051 - RNA, 17 nt, Human
cugagcucugagaggcc

SEQ ID NO: 3661052 - RNA, 15 nt, Human
cugagcugaccagcc

SEQ ID NO: 3661053 - RNA, 15 nt, Human
cugagcugagccagg

SEQ ID NO: 3661054 - RNA, 15 nt, Human
cugagcugccaucca

SEQ ID NO: 3661055 - RNA, 13 nt, Human
cugagcugcucug

SEQ ID NO: 3661056 - RNA, 16 nt, Human
cugagcugcucugaau

SEQ ID NO: 3661057 - RNA, 16 nt, Human
cugagcuggccucuca

SEQ ID NO: 3661058 - RNA, 12 nt, Human
cugagcugggau

SEQ ID NO: 3661059 - RNA, 11 nt, Human
cugagcuguca

SEQ ID NO: 3661060 - RNA, 14 nt, Human
cugagcuuggaagc

SEQ ID NO: 3661061 - RNA, 12 nt, Human
cugagcuuggcc

SEQ ID NO: 3661062 - RNA, 16 nt, Human
cugagcuuggccagaa

SEQ ID NO: 3661063 - RNA, 14 nt, Human
cugagcuuucugcu

SEQ ID NO: 3661064 - RNA, 15 nt, Human
cugagcuuugcaugu

SEQ ID NO: 3661065 - RNA, 22 nt, Human
cugagcuuuggacacacacagc

SEQ ID NO: 3661066 - RNA, 23 nt, Human
cugagcuuuggacgcacacagcu

SEQ ID NO: 3661067 - RNA, 18 nt, Human
cugaggaaaggccagcug

SEQ ID NO: 3661068 - RNA, 15 nt, Human
cugaggaagaacggg

SEQ ID NO: 3661069 - RNA, 23 nt, Human
cugaggaagagggacuguucuuu

SEQ ID NO: 3661070 - RNA, 20 nt, Human
cugaggaagcacagcagcau

SEQ ID NO: 3661071 - RNA, 21 nt, Human
cugaggaaucaacagggcagc

SEQ ID NO: 3661072 - RNA, 14 nt, Human
cugaggaauccaga

SEQ ID NO: 3661073 - RNA, 21 nt, Human
cugaggaauccagacccggcu

SEQ ID NO: 3661074 - RNA, 19 nt, Human
cugaggaauucuguauaga

SEQ ID NO: 3661075 - RNA, 16 nt, Human
cugaggaauuucaccu

SEQ ID NO: 3661076 - RNA, 20 nt, Human
cugaggacaaaguggaggag

SEQ ID NO: 3661077 - RNA, 23 nt, Human
cugaggacaaaguggaggagggc

SEQ ID NO: 3661078 - RNA, 15 nt, Human
cugaggacagaugcc

SEQ ID NO: 3661079 - RNA, 18 nt, Human
cugaggacagaugccucc

SEQ ID NO: 3661080 - RNA, 13 nt, Human
cugaggacagcug

SEQ ID NO: 3661081 - RNA, 16 nt, Human
cugaggacagcugucc

SEQ ID NO: 3661082 - RNA, 15 nt, Human
cugaggacugcacca

SEQ ID NO: 3661083 - RNA, 23 nt, Human
cugaggacugcaccauugcugcu

SEQ ID NO: 3661084 - RNA, 22 nt, Human
cugaggacuuaaaauauuccug

SEQ ID NO: 3661085 - RNA, 14 nt, Human
cugaggagcagcag

SEQ ID NO: 3661086 - RNA, 21 nt, Human
cugaggagcagcaggaggggg

SEQ ID NO: 3661087 - RNA, 13 nt, Human
cugaggaggccuc

SEQ ID NO: 3661088 - RNA, 16 nt, Human
cugaggaggccuccau

SEQ ID NO: 3661089 - RNA, 16 nt, Human
cugaggagucugaggu

SEQ ID NO: 3661090 - RNA, 21 nt, Human
cugaggauauggacacuggug

SEQ ID NO: 3661091 - RNA, 15 nt, Human
cugaggaucagaaag

SEQ ID NO: 3661092 - RNA, 17 nt, Human
cugaggaucagaaagua

SEQ ID NO: 3661093 - RNA, 18 nt, Human
cugaggaucagaaaguaa

SEQ ID NO: 3661094 - RNA, 19 nt, Human
cugaggaucagaguaaucc

SEQ ID NO: 3661095 - RNA, 16 nt, Human
cugaggaugaccagaa

SEQ ID NO: 3661096 - RNA, 15 nt, Human
cugaggaugagcugg

SEQ ID NO: 3661097 - RNA, 16 nt, Human
cugaggaugagcugga

SEQ ID NO: 3661098 - RNA, 17 nt, Human
cugaggaugagcuggaa

SEQ ID NO: 3661099 - RNA, 22 nt, Human
cugaggauuuaagggauggaaa

SEQ ID NO: 3661100 - RNA, 17 nt, Human
cugaggauuucaagccu

SEQ ID NO: 3661101 - RNA, 12 nt, Human
cugaggcaagag

SEQ ID NO: 3661102 - RNA, 15 nt, Human
cugaggcagaagaau

SEQ ID NO: 3661103 - RNA, 16 nt, Human
cugaggcagacagcag

SEQ ID NO: 3661104 - RNA, 18 nt, Human
cugaggcagacagcagcu

SEQ ID NO: 3661105 - RNA, 13 nt, Human
cugaggcaggaga

SEQ ID NO: 3661106 - RNA, 14 nt, Human
cugaggcagggaag

SEQ ID NO: 3661107 - RNA, 21 nt, Human
cugaggcagggaaguccccag

SEQ ID NO: 3661108 - RNA, 17 nt, Human
cugaggcaguuugagga

SEQ ID NO: 3661109 - RNA, 22 nt, Human
cugaggcauccagcagucucug

SEQ ID NO: 3661110 - RNA, 12 nt, Human
cugaggccacac

SEQ ID NO: 3661111 - RNA, 19 nt, Human
gcaaauuugcauuaaauua

SEQ ID NO: 3661112 - RNA, 21 nt, Human
gcaaauuuuuauuuuuuagug

SEQ ID NO: 3661113 - RNA, 14 nt, Human
gcaacaaacugcac

SEQ ID NO: 3661114 - RNA, 15 nt, Human
gcaacaaacugcaca

SEQ ID NO: 3661115 - RNA, 15 nt, Human
gcaacaacaauuggu

SEQ ID NO: 3661116 - RNA, 14 nt, Human
gcaacaauuuauga

SEQ ID NO: 3661117 - RNA, 14 nt, Human
gcaacaauuuucag

SEQ ID NO: 3661118 - RNA, 16 nt, Human
gcaacacaagcuggaa

SEQ ID NO: 3661119 - RNA, 23 nt, Human
gcaacacaagcuggaagcacaug

SEQ ID NO: 3661120 - RNA, 14 nt, Human
gcaacacagccugg

SEQ ID NO: 3661121 - RNA, 19 nt, Human
gcaacacuggucugcuguu

SEQ ID NO: 3661122 - RNA, 19 nt, Human
gcaacagacaagugacugu

SEQ ID NO: 3661123 - RNA, 12 nt, Human
gcaacagaucug

SEQ ID NO: 3661124 - RNA, 18 nt, Human
gcaacagaucuggaaccu

SEQ ID NO: 3661125 - RNA, 15 nt, Human
gcaacaggcugggcu

SEQ ID NO: 3661126 - RNA, 19 nt, Human
gcaacaggcugggcuucag

SEQ ID NO: 3661127 - RNA, 13 nt, Human
gcaacauccaaaa

SEQ ID NO: 3661128 - RNA, 18 nt, Human
gcaacaucuagcaaaugu

SEQ ID NO: 3661129 - RNA, 22 nt, Human
gcaacaugaugagguaguaccu

SEQ ID NO: 3661130 - RNA, 13 nt, Human
gcaacauggcuuu

SEQ ID NO: 3661131 - RNA, 14 nt, Human
gcaacauucauugc

SEQ ID NO: 3661132 - RNA, 20 nt, Human
gcaaccacaggcagcauuua

SEQ ID NO: 3661133 - RNA, 13 nt, Human
gcaaccaccacca

SEQ ID NO: 3661134 - RNA, 18 nt, Human
gcaaccagagcacuguau

SEQ ID NO: 3661135 - RNA, 20 nt, Human
gcaaccaggaacagcaaaug

SEQ ID NO: 3661136 - RNA, 18 nt, Human
gcaaccaguuggcuaggg

SEQ ID NO: 3661137 - RNA, 18 nt, Human
gcaaccauauagaaagcu

SEQ ID NO: 3661138 - RNA, 16 nt, Human
gcaaccccaguucugc

SEQ ID NO: 3661139 - RNA, 18 nt, Human
gcaaccccaguucugcuc

SEQ ID NO: 3661140 - RNA, 20 nt, Human
gcaaccccaguucugcuccu

SEQ ID NO: 3661141 - RNA, 24 nt, Human
gcaaccccaguucugcuccucucc

SEQ ID NO: 3661142 - RNA, 16 nt, Human
gcaacccccagccugc

SEQ ID NO: 3661143 - RNA, 19 nt, Human
gcaaccccuggaccccagc

SEQ ID NO: 3661144 - RNA, 15 nt, Human
gcaacccgugccaag

SEQ ID NO: 3661145 - RNA, 19 nt, Human
gcaacccgugccaagucca

SEQ ID NO: 3661146 - RNA, 14 nt, Human
gcaaccgcuucccu

SEQ ID NO: 3661147 - RNA, 19 nt, Human
gcaaccguggcccuuccug

SEQ ID NO: 3661148 - RNA, 23 nt, Human
gcaaccguggcccuuccuggaca

SEQ ID NO: 3661149 - RNA, 24 nt, Human
gcaaccguggcccuuccuggacag

SEQ ID NO: 3661150 - RNA, 20 nt, Human
gcaaccuccgccucuugggu

SEQ ID NO: 3661151 - RNA, 20 nt, Human
gcaaccucugcuucccaggu

SEQ ID NO: 3661152 - RNA, 18 nt, Human
gcaaccuggguccaaaua

SEQ ID NO: 3661153 - RNA, 19 nt, Human
gcaaccuggguccaaauaa

SEQ ID NO: 3661154 - RNA, 17 nt, Human
gcaaccuguaagacuga

SEQ ID NO: 3661155 - RNA, 23 nt, Human
gcaacgaagaaaaaaaauaacac

SEQ ID NO: 3661156 - RNA, 20 nt, Human
gcaacgaucacaaaugacuu

SEQ ID NO: 3661157 - RNA, 22 nt, Human
gcaacgaucacaaaugacuuua

SEQ ID NO: 3661158 - RNA, 17 nt, Human
gcaacgcuauuccagcu

SEQ ID NO: 3661159 - RNA, 18 nt, Human
gcaacgcuauuccagcug

SEQ ID NO: 3661160 - RNA, 22 nt, Human
gcaacggucuccugacuggugc

SEQ ID NO: 3661161 - RNA, 13 nt, Human
gcaacuauucaca

SEQ ID NO: 3661162 - RNA, 22 nt, Human
gcaacucaaggacuuugcagcc

SEQ ID NO: 3661163 - RNA, 14 nt, Human
gcaacucaucuuag

SEQ ID NO: 3661164 - RNA, 15 nt, Human
gcaacucuugauuau

SEQ ID NO: 3661165 - RNA, 15 nt, Human
gcaacugaacaaaaa

SEQ ID NO: 3661166 - RNA, 13 nt, Human
gcaacugaauaaa

SEQ ID NO: 3661167 - RNA, 18 nt, Human
gcaacugaauaaauaccu

SEQ ID NO: 3661168 - RNA, 21 nt, Human
gcaacugaauaaauaccucuu

SEQ ID NO: 3661169 - RNA, 15 nt, Human
gcaacugacacuccc

SEQ ID NO: 3661170 - RNA, 21 nt, Human
gcaacugaggcagacagcagc

SEQ ID NO: 3661171 - RNA, 18 nt, Human
gcaacugcauuggcuuug

SEQ ID NO: 3661172 - RNA, 20 nt, Human
gcaacugcugaugcucaugg

SEQ ID NO: 3661173 - RNA, 17 nt, Human
gcaacuucaguccuggg

SEQ ID NO: 3661174 - RNA, 20 nt, Human
gcaacuuguccuagcacaga

SEQ ID NO: 3661175 - RNA, 21 nt, Human
gcaacuuguccuagcacagau

SEQ ID NO: 3661176 - RNA, 22 nt, Human
gcaacuugucuuuuucuggacu

SEQ ID NO: 3661177 - RNA, 17 nt, Human
gcaacuuuaagcagcuc

SEQ ID NO: 3661178 - RNA, 13 nt, Human
gcaagaaaagagu

SEQ ID NO: 3661179 - RNA, 20 nt, Human
gcaagaacucaucacugugg

SEQ ID NO: 3661180 - RNA, 22 nt, Human
gcaagaacucaucacuguggcu

SEQ ID NO: 3661181 - RNA, 19 nt, Human
gcaagaagaucacgcuccc

SEQ ID NO: 3661182 - RNA, 21 nt, Human
gcaagaaggcaaaaauaguuu

SEQ ID NO: 3661183 - RNA, 23 nt, Human
gcaagaaggcaaaaauaguuugg

SEQ ID NO: 3661184 - RNA, 16 nt, Human
gcaagaauaaaaaaga

SEQ ID NO: 3661185 - RNA, 20 nt, Human
gcaagaaugguggcuucuuu

SEQ ID NO: 3661186 - RNA, 16 nt, Human
gcaagacccugucucu

SEQ ID NO: 3661187 - RNA, 23 nt, Human
gcaagacgcugugcugcccugcc

SEQ ID NO: 3661188 - RNA, 22 nt, Human
gcaagagagaaccuaacuguau

SEQ ID NO: 3661189 - RNA, 22 nt, Human
gcaagagccuugguguccaccu

SEQ ID NO: 3661190 - RNA, 18 nt, Human
gcaagaggcaagcugaaa

SEQ ID NO: 3661191 - RNA, 18 nt, Human
gcaagaggccguggcugc

SEQ ID NO: 3661192 - RNA, 22 nt, Human
gcaagaggccguggcugcugug

SEQ ID NO: 3661193 - RNA, 22 nt, Human
gcaagaggggguggaggggugu

SEQ ID NO: 3661194 - RNA, 18 nt, Human
gcaagagugauugcagcu

SEQ ID NO: 3661195 - RNA, 19 nt, Human
gcaagagugauugcagcuu

SEQ ID NO: 3661196 - RNA, 19 nt, Human
gcaagaguguggaggcuga

SEQ ID NO: 3661197 - RNA, 19 nt, Human
gcaagauagauuuggaaua

SEQ ID NO: 3661198 - RNA, 15 nt, Human
gcaagauauuuauau

SEQ ID NO: 3661199 - RNA, 15 nt, Human
gcaagaugugaauua

SEQ ID NO: 3661200 - RNA, 12 nt, Human
gcaagauguggg

SEQ ID NO: 3661201 - RNA, 18 nt, Human
gcaagauucugaaacauu

SEQ ID NO: 3661202 - RNA, 16 nt, Human
gcaagauugauguuuc

SEQ ID NO: 3661203 - RNA, 14 nt, Human
gcaagauugugucc

SEQ ID NO: 3661204 - RNA, 14 nt, Human
gcaagcacaucugc

SEQ ID NO: 3661205 - RNA, 15 nt, Human
gcaagcaccaucccc

SEQ ID NO: 3661206 - RNA, 21 nt, Human
gcaagcacugcaugggcaagc

SEQ ID NO: 3661207 - RNA, 12 nt, Human
gcaagcagagga

SEQ ID NO: 3661208 - RNA, 14 nt, Human
gcaagcaguuucaa

SEQ ID NO: 3661209 - RNA, 10 nt, Human
gcaagccaga

SEQ ID NO: 3661210 - RNA, 15 nt, Human
gcaagccccugcucc

SEQ ID NO: 3661211 - RNA, 20 nt, Human
gcaagccuguaaucccagcu

SEQ ID NO: 3661212 - RNA, 16 nt, Human
gcaagcgacgacagau

SEQ ID NO: 3661213 - RNA, 14 nt, Human
gcaagcuaaccuua

SEQ ID NO: 3661214 - RNA, 13 nt, Human
gcaagcucccaag

SEQ ID NO: 3661215 - RNA, 19 nt, Human
gcaagcucccaagggaugg

SEQ ID NO: 3661216 - RNA, 18 nt, Human
gcaagcuccgcaggacuu

SEQ ID NO: 3661217 - RNA, 14 nt, Human
gcaagcucucuugc

SEQ ID NO: 3661218 - RNA, 22 nt, Human
gcaagcugccgaaccaaaagaa

SEQ ID NO: 3661219 - RNA, 13 nt, Human
gcaagcuggguaa

SEQ ID NO: 3661220 - RNA, 22 nt, Human
gcaagcuuggcuguagaaggag

SEQ ID NO: 3661221 - RNA, 19 nt, Human
gcaagcuuuuuuauuuuuu

SEQ ID NO: 3661222 - RNA, 16 nt, Human
gcaaggaaaaagaaaa

SEQ ID NO: 3661223 - RNA, 13 nt, Human
gcaaggaaggaaa

SEQ ID NO: 3661224 - RNA, 17 nt, Human
gcaaggaccuaaaacau

SEQ ID NO: 3661225 - RNA, 18 nt, Human
gcaaggagauuuacaacu

SEQ ID NO: 3661226 - RNA, 16 nt, Human
gcaaggagcacaagcc

SEQ ID NO: 3661227 - RNA, 13 nt, Human
gcaaggaggcugg

SEQ ID NO: 3661228 - RNA, 13 nt, Human
gcaaggcagccgu

SEQ ID NO: 3661229 - RNA, 11 nt, Human
gcaaggcaggu

SEQ ID NO: 3661230 - RNA, 13 nt, Human
gcaaggcaggugc

SEQ ID NO: 3661231 - RNA, 13 nt, Human
gcaaggccaccuc

SEQ ID NO: 3661232 - RNA, 14 nt, Human
gcaaggccaccucu

SEQ ID NO: 3661233 - RNA, 20 nt, Human
gcaaggccaccucuuccugg

SEQ ID NO: 3661234 - RNA, 18 nt, Human
gcaaggcccgagcagcug

SEQ ID NO: 3661235 - RNA, 19 nt, Human
gcaaggcccgagcagcuga

SEQ ID NO: 3661236 - RNA, 18 nt, Human
gcacccuucuuuucucau

SEQ ID NO: 3661237 - RNA, 16 nt, Human
gcaccgaagcccagag

SEQ ID NO: 3661238 - RNA, 15 nt, Human
gcaccgaauauugag

SEQ ID NO: 3661239 - RNA, 13 nt, Human
gcaccgaccacgg

SEQ ID NO: 3661240 - RNA, 21 nt, Human
gcaccgaccacggggccgaca

SEQ ID NO: 3661241 - RNA, 20 nt, Human
gcaccgacuagacacacaaa

SEQ ID NO: 3661242 - RNA, 20 nt, Human
gcaccgccggccagcuggga

SEQ ID NO: 3661243 - RNA, 14 nt, Human
gcaccgccuucucu

SEQ ID NO: 3661244 - RNA, 22 nt, Human
gcaccgcggcgcuucccagcac

SEQ ID NO: 3661245 - RNA, 22 nt, Human
gcaccgcuuuuguucucgcaaa

SEQ ID NO: 3661246 - RNA, 19 nt, Human
gcaccggaccagccuggcc

SEQ ID NO: 3661247 - RNA, 16 nt, Human
gcaccggcuggccugg

SEQ ID NO: 3661248 - RNA, 17 nt, Human
gcaccggcuggccuggc

SEQ ID NO: 3661249 - RNA, 20 nt, Human
gcaccggggccugggcagga

SEQ ID NO: 3661250 - RNA, 19 nt, Human
gcaccgugucaagcugcuc

SEQ ID NO: 3661251 - RNA, 15 nt, Human
gcaccguucugugca

SEQ ID NO: 3661252 - RNA, 19 nt, Human
gcaccuaaaccaccagugc

SEQ ID NO: 3661253 - RNA, 14 nt, Human
gcaccuaaagaaaa

SEQ ID NO: 3661254 - RNA, 17 nt, Human
gcaccuaaagaaaaaca

SEQ ID NO: 3661255 - RNA, 22 nt, Human
aacauccuuucuauugaaaaau

SEQ ID NO: 3661256 - RNA, 19 nt, Human
aacauccuuugcagggcag

SEQ ID NO: 3661257 - RNA, 21 nt, Human
aacauccuuugcagggcagcc

SEQ ID NO: 3661258 - RNA, 12 nt, Human
aacaucuagaaa

SEQ ID NO: 3661259 - RNA, 17 nt, Human
aacaucuagcaaauguu

SEQ ID NO: 3661260 - RNA, 16 nt, Human
aacaucuucaacaugu

SEQ ID NO: 3661261 - RNA, 21 nt, Human
aacaucuuugaaauuauguaa

SEQ ID NO: 3661262 - RNA, 20 nt, Human
aacaugaaagucuagaaaua

SEQ ID NO: 3661263 - RNA, 18 nt, Human
aacaugaaaugauagauu

SEQ ID NO: 3661264 - RNA, 15 nt, Human
aacaugaacaaauuu

SEQ ID NO: 3661265 - RNA, 22 nt, Human
aacaugaacacccuuagaaaau

SEQ ID NO: 3661266 - RNA, 13 nt, Human
aacaugaaucaaa

SEQ ID NO: 3661267 - RNA, 20 nt, Human
aacaugagaaacgcuuaugu

SEQ ID NO: 3661268 - RNA, 17 nt, Human
aacaugaugagguagua

SEQ ID NO: 3661269 - RNA, 21 nt, Human
aacaugaugagguaguaccuu

SEQ ID NO: 3661270 - RNA, 19 nt, Human
aacaugcaauuuugcauuu

SEQ ID NO: 3661271 - RNA, 16 nt, Human
aacaugcacugauguu

SEQ ID NO: 3661272 - RNA, 12 nt, Human
aacaugcagaac

SEQ ID NO: 3661273 - RNA, 13 nt, Human
aacaugcaguuug

SEQ ID NO: 3661274 - RNA, 21 nt, Human
aacaugcaguuugaaauucug

SEQ ID NO: 3661275 - RNA, 14 nt, Human
aacaugcccuguuc

SEQ ID NO: 3661276 - RNA, 21 nt, Human
aacaugccugccccaaacaaa

SEQ ID NO: 3661277 - RNA, 18 nt, Human
aacaugcuggugaauauu

SEQ ID NO: 3661278 - RNA, 18 nt, Human
aacaugcuguacauacuu

SEQ ID NO: 3661279 - RNA, 21 nt, Human
aacaugcuguacauacuuuuu

SEQ ID NO: 3661280 - RNA, 16 nt, Human
aacaugcuucaugaaa

SEQ ID NO: 3661281 - RNA, 14 nt, Human
aacauggacuugua

SEQ ID NO: 3661282 - RNA, 20 nt, Human
aacauggacuuguauauuug

SEQ ID NO: 3661283 - RNA, 16 nt, Human
aacaugguuuaaaaga

SEQ ID NO: 3661284 - RNA, 20 nt, Human
aacauguaaccggcauguuu

SEQ ID NO: 3661285 - RNA, 22 nt, Human
aacauguaauauaaagauguua

SEQ ID NO: 3661286 - RNA, 21 nt, Human
aacauguaauuaaguacuaug

SEQ ID NO: 3661287 - RNA, 15 nt, Human
aacauguaggaagua

SEQ ID NO: 3661288 - RNA, 15 nt, Human
aacauguauuuaugu

SEQ ID NO: 3661289 - RNA, 21 nt, Human
aacauguauuuauguaaugaa

SEQ ID NO: 3661290 - RNA, 17 nt, Human
aacaugugaaaagaaua

SEQ ID NO: 3661291 - RNA, 14 nt, Human
aacauguuaaacca

SEQ ID NO: 3661292 - RNA, 20 nt, Human
aacauguuaaugacaauauu

SEQ ID NO: 3661293 - RNA, 16 nt, Human
aacauguuacugacca

SEQ ID NO: 3661294 - RNA, 17 nt, Human
aacauguuacugaccag

SEQ ID NO: 3661295 - RNA, 13 nt, Human
aacauguuccuga

SEQ ID NO: 3661296 - RNA, 18 nt, Human
aacauguugguauuuauc

SEQ ID NO: 3661297 - RNA, 20 nt, Human
aacauguuuacuuuucaggg

SEQ ID NO: 3661298 - RNA, 19 nt, Human
aacauguuuccagcauucc

SEQ ID NO: 3661299 - RNA, 19 nt, Human
aacauuaaaaauggaacug

SEQ ID NO: 3661300 - RNA, 21 nt, Human
aacauuaaaacaauauuguuu

SEQ ID NO: 3661301 - RNA, 23 nt, Human
aacauuaaaacaauauuguuucu

SEQ ID NO: 3661302 - RNA, 13 nt, Human
aacauuaaaauau

SEQ ID NO: 3661303 - RNA, 12 nt, Human
aacauuaaaugu

SEQ ID NO: 3661304 - RNA, 14 nt, Human
aacauuaaaugucu

SEQ ID NO: 3661305 - RNA, 20 nt, Human
aacauuaauagcagccuuuc

SEQ ID NO: 3661306 - RNA, 14 nt, Human
aacauuaauguuga

SEQ ID NO: 3661307 - RNA, 22 nt, Human
aacauuacagggaaugccugag

SEQ ID NO: 3661308 - RNA, 21 nt, Human
aacauuacucugaaauuguaa

SEQ ID NO: 3661309 - RNA, 16 nt, Human
aacauuaguacuuuau

SEQ ID NO: 3661310 - RNA, 17 nt, Human
aacauuaguacuuuaua

SEQ ID NO: 3661311 - RNA, 15 nt, Human
aacauuauauugcaa

SEQ ID NO: 3661312 - RNA, 23 nt, Human
aacauuauuaaguaacuuauuua

SEQ ID NO: 3661313 - RNA, 12 nt, Human
aacauuauuuau

SEQ ID NO: 3661314 - RNA, 13 nt, Human
aacauucaggagc

SEQ ID NO: 3661315 - RNA, 16 nt, Human
aacauucauagucuuu

SEQ ID NO: 3661316 - RNA, 13 nt, Human
aacauuccaagaa

SEQ ID NO: 3661317 - RNA, 20 nt, Human
aacauuccaaggaguuggaa

SEQ ID NO: 3661318 - RNA, 17 nt, Human
aacauuccuaaaaugcu

SEQ ID NO: 3661319 - RNA, 16 nt, Human
aacauuccucaaaaug

SEQ ID NO: 3661320 - RNA, 19 nt, Human
aacauucuaucuacugauu

SEQ ID NO: 3661321 - RNA, 15 nt, Human
aacauucuauuucaa

SEQ ID NO: 3661322 - RNA, 17 nt, Human
aacauucugauuuggaa

SEQ ID NO: 3661323 - RNA, 18 nt, Human
aacauugaaguaaugaau

SEQ ID NO: 3661324 - RNA, 19 nt, Human
aacauugaaguaaugaauu

SEQ ID NO: 3661325 - RNA, 17 nt, Human
aacauugaccaagaacu

SEQ ID NO: 3661326 - RNA, 18 nt, Human
aacauugaccaagaacug

SEQ ID NO: 3661327 - RNA, 21 nt, Human
aacauugaccaagaacugcau

SEQ ID NO: 3661328 - RNA, 18 nt, Human
aacauugauugcuguguc

SEQ ID NO: 3661329 - RNA, 14 nt, Human
aacauugcaauaga

SEQ ID NO: 3661330 - RNA, 21 nt, Human
aacauugcauauaacuuauau

SEQ ID NO: 3661331 - RNA, 22 nt, Human
aacauugcauauaacuuauauu

SEQ ID NO: 3661332 - RNA, 22 nt, Human
aacauuggaagcagguuaaaug

SEQ ID NO: 3661333 - RNA, 16 nt, Human
aacauuggaauguucu

SEQ ID NO: 3661334 - RNA, 16 nt, Human
aacauuggauuauccu

SEQ ID NO: 3661335 - RNA, 14 nt, Human
aacauuguagccuc

SEQ ID NO: 3661336 - RNA, 22 nt, Human
aacauuguccccaaugaauaua

SEQ ID NO: 3661337 - RNA, 17 nt, Human
aacauuuauuuuaugag

SEQ ID NO: 3661338 - RNA, 15 nt, Human
aacauuuauuuugac

SEQ ID NO: 3661339 - RNA, 19 nt, Human
aacauuuauuuugacauaa

SEQ ID NO: 3661340 - RNA, 22 nt, Human
aacauuuauuuuuuuuaaagaa

SEQ ID NO: 3661341 - RNA, 14 nt, Human
aacauuucauaauu

SEQ ID NO: 3661342 - RNA, 19 nt, Human
aacauuucuguaaauacca

SEQ ID NO: 3661343 - RNA, 14 nt, Human
aacauuugccuugc

SEQ ID NO: 3661344 - RNA, 22 nt, Human
aacauuugccuugcagaacugc

SEQ ID NO: 3661345 - RNA, 16 nt, Human
aacauuugcugccauu

SEQ ID NO: 3661346 - RNA, 15 nt, Human
aacauuugcuguuuu

SEQ ID NO: 3661347 - RNA, 16 nt, Human
aacauuugcuguuuua

SEQ ID NO: 3661348 - RNA, 13 nt, Human
aacauuugugaua

SEQ ID NO: 3661349 - RNA, 15 nt, Human
aacauuuguguguua

SEQ ID NO: 3661350 - RNA, 17 nt, Human
aacauuuucucuuagaa

SEQ ID NO: 3661351 - RNA, 20 nt, Human
aacauuuugagaacaaagau

SEQ ID NO: 3661352 - RNA, 15 nt, Human
aacauuuuguucuua

SEQ ID NO: 3661353 - RNA, 13 nt, Human
aacauuuuuaagu

SEQ ID NO: 3661354 - RNA, 13 nt, Human
aacauuuuuggua

SEQ ID NO: 3661355 - RNA, 16 nt, Human
aaccaaaaugacaucu

SEQ ID NO: 3661356 - RNA, 19 nt, Human
aaccaaagagacuggagca

SEQ ID NO: 3661357 - RNA, 19 nt, Human
aaccaaagagggcuuccuc

SEQ ID NO: 3661358 - RNA, 13 nt, Human
aaccaaaggacau

SEQ ID NO: 3661359 - RNA, 16 nt, Human
aaccaaauauuccaga

SEQ ID NO: 3661360 - RNA, 22 nt, Human
aaccaaaucacugaacuuugcu

SEQ ID NO: 3661361 - RNA, 15 nt, Human
aaccaaaucuggaag

SEQ ID NO: 3661362 - RNA, 13 nt, Human
aaccaacacccaa

SEQ ID NO: 3661363 - RNA, 20 nt, Human
aaccaacccuucccugaaaa

SEQ ID NO: 3661364 - RNA, 16 nt, Human
aaccaacuuuucuauu

SEQ ID NO: 3661365 - RNA, 14 nt, Human
aaccaagagauugc

SEQ ID NO: 3661366 - RNA, 10 nt, Human
aaccaagagg

SEQ ID NO: 3661367 - RNA, 13 nt, Human
aaccaagaggcug

SEQ ID NO: 3661368 - RNA, 14 nt, Human
aaccaagaggcugg

SEQ ID NO: 3661369 - RNA, 21 nt, Human
aaccaagaucuauaaagcgau

SEQ ID NO: 3661370 - RNA, 22 nt, Human
aaccaagcaucagggggaagaa

SEQ ID NO: 3661371 - RNA, 16 nt, Human
aaccaagccguggcuu

SEQ ID NO: 3661372 - RNA, 20 nt, Human
aaccaagcuauuccuuuccc

SEQ ID NO: 3661373 - RNA, 20 nt, Human
aaccaagcugaguuuccuau

SEQ ID NO: 3661374 - RNA, 20 nt, Human
aaccaagucaugugcauuuc

SEQ ID NO: 3661375 - RNA, 13 nt, Human
aaccaauccugga

SEQ ID NO: 3661376 - RNA, 22 nt, Human
aaccacaaaaaaauaccucagg

SEQ ID NO: 3661377 - RNA, 20 nt, Human
aaccacaaaggccaaacugc

SEQ ID NO: 3661378 - RNA, 17 nt, Human
aaccacaacugacacag

SEQ ID NO: 3661379 - RNA, 13 nt, Human
aaccacaccacau

SEQ ID NO: 3661380 - RNA, 21 nt, Human
aaccacaccacaucuaagccu

SEQ ID NO: 3661381 - RNA, 19 nt, Human
aaccacacuugaaaccuuu

SEQ ID NO: 3661382 - RNA, 13 nt, Human
aaccacagcugcu

SEQ ID NO: 3661383 - RNA, 14 nt, Human
aaccacagcugcug

SEQ ID NO: 3661384 - RNA, 17 nt, Human
aaccacaguguaccauu

SEQ ID NO: 3661385 - RNA, 21 nt, Human
aaccacaguguaccauuaaaa

SEQ ID NO: 3661386 - RNA, 22 nt, Human
aaccacauacaacacaaagaga

SEQ ID NO: 3661387 - RNA, 18 nt, Human
aaccaccagaagcccaga

SEQ ID NO: 3661388 - RNA, 23 nt, Human
aaccaccuggcccuuagaaauag

SEQ ID NO: 3661389 - RNA, 13 nt, Human
aaccacgcuggac

SEQ ID NO: 3661390 - RNA, 22 nt, Human
aaccacggaggaugaugccagu

SEQ ID NO: 3661391 - RNA, 21 nt, Human
aaccacgucugucuucacagc

SEQ ID NO: 3661392 - RNA, 12 nt, Human
aaccacuagaaa

SEQ ID NO: 3661393 - RNA, 19 nt, Human
aaccacucaaauuaaucuu

SEQ ID NO: 3661394 - RNA, 13 nt, Human
aaccacugaaaaa

SEQ ID NO: 3661395 - RNA, 16 nt, Human
aaccacugaaaaaaua

SEQ ID NO: 3661396 - RNA, 13 nt, Human
aaccacugaaucu

SEQ ID NO: 3661397 - RNA, 20 nt, Human
aaccacugcaaguccuuuug

SEQ ID NO: 3661398 - RNA, 16 nt, Human
aaccacuguaaaauga

SEQ ID NO: 3661399 - RNA, 12 nt, Human
aaccacuucccu

SEQ ID NO: 3661400 - RNA, 20 nt, Human
gcaggcaugcaugugcuugu

SEQ ID NO: 3661401 - RNA, 16 nt, Human
gcaggcauugaggaag

SEQ ID NO: 3661402 - RNA, 20 nt, Human
gcaggccaaggccuucuccu

SEQ ID NO: 3661403 - RNA, 23 nt, Human
gcaggccaaggccuucuccuccc

SEQ ID NO: 3661404 - RNA, 17 nt, Human
gcaggccaccuggcucu

SEQ ID NO: 3661405 - RNA, 21 nt, Human
gcaggccaccuggcucucacc

SEQ ID NO: 3661406 - RNA, 22 nt, Human
gcaggccaccuggcucucaccu

SEQ ID NO: 3661407 - RNA, 11 nt, Human
gcaggcccugc

SEQ ID NO: 3661408 - RNA, 12 nt, Human
gcaggcccugca

SEQ ID NO: 3661409 - RNA, 14 nt, Human
gcaggcccugcacu

SEQ ID NO: 3661410 - RNA, 23 nt, Human
gcaggcccugcacuguccugcuc

SEQ ID NO: 3661411 - RNA, 13 nt, Human
gcaggcccugcag

SEQ ID NO: 3661412 - RNA, 14 nt, Human
gcaggcccugcagu

SEQ ID NO: 3661413 - RNA, 19 nt, Human
gcaggccgugacgucuggg

SEQ ID NO: 3661414 - RNA, 13 nt, Human
gcaggccucccug

SEQ ID NO: 3661415 - RNA, 17 nt, Human
gcaggccucccugccag

SEQ ID NO: 3661416 - RNA, 16 nt, Human
gcaggcgguggggaga

SEQ ID NO: 3661417 - RNA, 21 nt, Human
gcaggcuaaggcguggagcug

SEQ ID NO: 3661418 - RNA, 15 nt, Human
gcaggcuacugucag

SEQ ID NO: 3661419 - RNA, 22 nt, Human
gcaggcucacugccaggccagc

SEQ ID NO: 3661420 - RNA, 14 nt, Human
gcaggcucccaggg

SEQ ID NO: 3661421 - RNA, 13 nt, Human
gcaggcucucagg

SEQ ID NO: 3661422 - RNA, 15 nt, Human
gcaggcucucaggcc

SEQ ID NO: 3661423 - RNA, 17 nt, Human
gcaggcugagccacucu

SEQ ID NO: 3661424 - RNA, 19 nt, Human
gcaggcugagugcauuugg

SEQ ID NO: 3661425 - RNA, 15 nt, Human
gcaggcuucaaacua

SEQ ID NO: 3661426 - RNA, 22 nt, Human
gcagggaaacagcuaaugggac

SEQ ID NO: 3661427 - RNA, 18 nt, Human
gcagggaacauggggagg

SEQ ID NO: 3661428 - RNA, 23 nt, Human
gcagggaagccccacauguccag

SEQ ID NO: 3661429 - RNA, 21 nt, Human
gcagggaaggggaggcagccg

SEQ ID NO: 3661430 - RNA, 21 nt, Human
gcagggacaaagaggccuuua

SEQ ID NO: 3661431 - RNA, 19 nt, Human
gcagggacacgggcagccu

SEQ ID NO: 3661432 - RNA, 22 nt, Human
gcagggacacgggcagccuggc

SEQ ID NO: 3661433 - RNA, 20 nt, Human
gcagggacuguaaacacaga

SEQ ID NO: 3661434 - RNA, 19 nt, Human
gcagggacuugaacccaua

SEQ ID NO: 3661435 - RNA, 22 nt, Human
gcagggagaggagugacugagc

SEQ ID NO: 3661436 - RNA, 19 nt, Human
gcagggagcggccggccag

SEQ ID NO: 3661437 - RNA, 22 nt, Human
gcagggagcugggcccgacaug

SEQ ID NO: 3661438 - RNA, 19 nt, Human
gcagggaggcaccauucag

SEQ ID NO: 3661439 - RNA, 14 nt, Human
gcagggaggcagcc

SEQ ID NO: 3661440 - RNA, 13 nt, Human
gcagggagggccu

SEQ ID NO: 3661441 - RNA, 17 nt, Human
gcagggagggccugggc

SEQ ID NO: 3661442 - RNA, 18 nt, Human
gcagggagggccugggcc

SEQ ID NO: 3661443 - RNA, 13 nt, Human
gcagggaggggac

SEQ ID NO: 3661444 - RNA, 15 nt, Human
gcagggaggggacua

SEQ ID NO: 3661445 - RNA, 16 nt, Human
gcagggaggucaggcc

SEQ ID NO: 3661446 - RNA, 20 nt, Human
gcagggaggucaggcccugg

SEQ ID NO: 3661447 - RNA, 22 nt, Human
gcagggauugcugccacuuuuu

SEQ ID NO: 3661448 - RNA, 15 nt, Human
gcagggauuugagga

SEQ ID NO: 3661449 - RNA, 14 nt, Human
gcagggcacagggc

SEQ ID NO: 3661450 - RNA, 16 nt, Human
gcagggcaggaccagc

SEQ ID NO: 3661451 - RNA, 21 nt, Human
gcagggcaggaccagcccacg

SEQ ID NO: 3661452 - RNA, 14 nt, Human
gcagggcaucuccu

SEQ ID NO: 3661453 - RNA, 15 nt, Human
gcagggcaucuccug

SEQ ID NO: 3661454 - RNA, 21 nt, Human
gcagggcaucuccugugcaug

SEQ ID NO: 3661455 - RNA, 14 nt, Human
gcagggccaggacu

SEQ ID NO: 3661456 - RNA, 15 nt, Human
gcagggccaggacug

SEQ ID NO: 3661457 - RNA, 18 nt, Human
cugccgccucccagccug

SEQ ID NO: 3661458 - RNA, 19 nt, Human
cugccgccucccagccugg

SEQ ID NO: 3661459 - RNA, 15 nt, Human
cugccgcgcagugug

SEQ ID NO: 3661460 - RNA, 14 nt, Human
cugccgcuaccucc

SEQ ID NO: 3661461 - RNA, 18 nt, Human
cugccgcuaccucccucc

SEQ ID NO: 3661462 - RNA, 16 nt, Human
cugccggcuccuuggu

SEQ ID NO: 3661463 - RNA, 20 nt, Human
cugccggcucuuuccuugcu

SEQ ID NO: 3661464 - RNA, 21 nt, Human
cugccgggcugagggccugcu

SEQ ID NO: 3661465 - RNA, 22 nt, Human
cugccgggcugagggccugcug

SEQ ID NO: 3661466 - RNA, 23 nt, Human
cugccgggcugagggccugcugg

SEQ ID NO: 3661467 - RNA, 19 nt, Human
cugccggggcagcccccuc

SEQ ID NO: 3661468 - RNA, 23 nt, Human
cugccggggcagcccccucacag

SEQ ID NO: 3661469 - RNA, 14 nt, Human
cugccggguucuag

SEQ ID NO: 3661470 - RNA, 18 nt, Human
cugccgguaaacacgccu

SEQ ID NO: 3661471 - RNA, 23 nt, Human
cugccgguucuuaaauccauccu

SEQ ID NO: 3661472 - RNA, 14 nt, Human
cugccgguuugaaa

SEQ ID NO: 3661473 - RNA, 18 nt, Human
cugccgucaccaccaccc

SEQ ID NO: 3661474 - RNA, 13 nt, Human
cugccgucagugc

SEQ ID NO: 3661475 - RNA, 19 nt, Human
cugccgucagugcugugcu

SEQ ID NO: 3661476 - RNA, 22 nt, Human
cugccguccccuagagucccag

SEQ ID NO: 3661477 - RNA, 15 nt, Human
cugccgucucuggag

SEQ ID NO: 3661478 - RNA, 17 nt, Human
cugccgugccgccugca

SEQ ID NO: 3661479 - RNA, 22 nt, Human
cugccgugccgccugcacuccu

SEQ ID NO: 3661480 - RNA, 14 nt, Human
cugccgugugcccu

SEQ ID NO: 3661481 - RNA, 20 nt, Human
cugccuaaauccacucugca

SEQ ID NO: 3661482 - RNA, 14 nt, Human
cugccuaacaaaau

SEQ ID NO: 3661483 - RNA, 15 nt, Human
cugccuaagacaugu

SEQ ID NO: 3661484 - RNA, 20 nt, Human
cugccuaaggacuucuuuaa

SEQ ID NO: 3661485 - RNA, 21 nt, Human
cugccuaaggacuucuuuaau

SEQ ID NO: 3661486 - RNA, 22 nt, Human
cugccuaaggacuucuuuaauu

SEQ ID NO: 3661487 - RNA, 16 nt, Human
cugccuaaggcugaac

SEQ ID NO: 3661488 - RNA, 20 nt, Human
cugccuaaguggcugcugac

SEQ ID NO: 3661489 - RNA, 14 nt, Human
cugccuacugcauc

SEQ ID NO: 3661490 - RNA, 18 nt, Human
cugccuagaaacaacacu

SEQ ID NO: 3661491 - RNA, 23 nt, Human
cugccuagaaacaacacuguagu

SEQ ID NO: 3661492 - RNA, 17 nt, Human
cugccuagcacucacau

SEQ ID NO: 3661493 - RNA, 17 nt, Human
cugccuauuaucuguca

SEQ ID NO: 3661494 - RNA, 15 nt, Human
cugccuauugauuua

SEQ ID NO: 3661495 - RNA, 21 nt, Human
cugccuauugcagcugggaga

SEQ ID NO: 3661496 - RNA, 24 nt, Human
cugccucaaugugaaucagacccu

SEQ ID NO: 3661497 - RNA, 14 nt, Human
cugccucagccucc

SEQ ID NO: 3661498 - RNA, 15 nt, Human
cugccucaggccucu

SEQ ID NO: 3661499 - RNA, 20 nt, Human
cugccuccacccucugagcu

SEQ ID NO: 3661500 - RNA, 13 nt, Human
cugccuccacucc

SEQ ID NO: 3661501 - RNA, 14 nt, Human
cugccuccacuccc

SEQ ID NO: 3661502 - RNA, 15 nt, Human
cugccuccacuccca

SEQ ID NO: 3661503 - RNA, 16 nt, Human
cugccuccacucccac

SEQ ID NO: 3661504 - RNA, 18 nt, Human
cugccuccacucccacuu

SEQ ID NO: 3661505 - RNA, 20 nt, Human
cugccuccagggcuggacug

SEQ ID NO: 3661506 - RNA, 22 nt, Human
cugccuccagggcuggacugag

SEQ ID NO: 3661507 - RNA, 23 nt, Human
cugccuccagggcuggacugagg

SEQ ID NO: 3661508 - RNA, 14 nt, Human
cugccucccacuuc

SEQ ID NO: 3661509 - RNA, 18 nt, Human
cugccucccacuucacug

SEQ ID NO: 3661510 - RNA, 14 nt, Human
cugccucccaucac

SEQ ID NO: 3661511 - RNA, 19 nt, Human
cugccucccaucacccgcu

SEQ ID NO: 3661512 - RNA, 18 nt, Human
cugccuccccaacccugc

SEQ ID NO: 3661513 - RNA, 20 nt, Human
cugccuccccuccucugcuu

SEQ ID NO: 3661514 - RNA, 21 nt, Human
cugccuccccuccucugcuug

SEQ ID NO: 3661515 - RNA, 20 nt, Human
cugccuccccucuccuuccu

SEQ ID NO: 3661516 - RNA, 13 nt, Human
cugccuccccugu

SEQ ID NO: 3661517 - RNA, 16 nt, Human
cugccuccccugugca

SEQ ID NO: 3661518 - RNA, 17 nt, Human
cugccuccccugugcag

SEQ ID NO: 3661519 - RNA, 22 nt, Human
cugccuccccugugcaguccug

SEQ ID NO: 3661520 - RNA, 14 nt, Human
cugccucccuucau

SEQ ID NO: 3661521 - RNA, 17 nt, Human
cugccucccuucaugca

SEQ ID NO: 3661522 - RNA, 18 nt, Human
cugccucccuucaugcau

SEQ ID NO: 3661523 - RNA, 19 nt, Human
cugccucccuucaugcaug

SEQ ID NO: 3661524 - RNA, 21 nt, Human
cugccucccuucaugcaugga

SEQ ID NO: 3661525 - RNA, 21 nt, Human
cugccucccuuguggcagcaa

SEQ ID NO: 3661526 - RNA, 23 nt, Human
cugccuccgcgugaucaaagcca

SEQ ID NO: 3661527 - RNA, 12 nt, Human
cugccuccugcc

SEQ ID NO: 3661528 - RNA, 23 nt, Human
cugccuccugccggcuccuuggu

SEQ ID NO: 3661529 - RNA, 16 nt, Human
cugccuccugccugcc

SEQ ID NO: 3661530 - RNA, 19 nt, Human
cugccuccugccugccccu

SEQ ID NO: 3661531 - RNA, 14 nt, Human
cugccuccuuugug

SEQ ID NO: 3661532 - RNA, 14 nt, Human
cugccucgaacugg

SEQ ID NO: 3661533 - RNA, 19 nt, Human
cugccucgaacuggcugca

SEQ ID NO: 3661534 - RNA, 15 nt, Human
cugccucuacuggga

SEQ ID NO: 3661535 - RNA, 17 nt, Human
cugccucuacugggaag

SEQ ID NO: 3661536 - RNA, 13 nt, Human
cugccucucacac

SEQ ID NO: 3661537 - RNA, 16 nt, Human
cugccucucacagcug

SEQ ID NO: 3661538 - RNA, 15 nt, Human
cugccucucccauca

SEQ ID NO: 3661539 - RNA, 12 nt, Human
cugccucucccu

SEQ ID NO: 3661540 - RNA, 14 nt, Human
cugccucucccucu

SEQ ID NO: 3661541 - RNA, 16 nt, Human
cugccucucccuggcc

SEQ ID NO: 3661542 - RNA, 19 nt, Human
cugccucuccgccccugag

SEQ ID NO: 3661543 - RNA, 16 nt, Human
cugccucucugcaggu

SEQ ID NO: 3661544 - RNA, 19 nt, Human
gcaggaauugguggcagau

SEQ ID NO: 3661545 - RNA, 17 nt, Human
gcaggacaacgaggaag

SEQ ID NO: 3661546 - RNA, 19 nt, Human
gcaggaccagcccacgcug

SEQ ID NO: 3661547 - RNA, 12 nt, Human
gcaggaccagga

SEQ ID NO: 3661548 - RNA, 13 nt, Human
gcaggaccaggac

SEQ ID NO: 3661549 - RNA, 14 nt, Human
gcaggaccucagag

SEQ ID NO: 3661550 - RNA, 15 nt, Human
gcaggaccucagagu

SEQ ID NO: 3661551 - RNA, 16 nt, Human
gcaggaccucagaguc

SEQ ID NO: 3661552 - RNA, 22 nt, Human
gcaggaccucagaguccaggcc

SEQ ID NO: 3661553 - RNA, 18 nt, Human
gcaggaccucccuuccga

SEQ ID NO: 3661554 - RNA, 12 nt, Human
gcaggaccucug

SEQ ID NO: 3661555 - RNA, 16 nt, Human
gcaggaccugccugua

SEQ ID NO: 3661556 - RNA, 21 nt, Human
gcaggaccuucgggcugugcc

SEQ ID NO: 3661557 - RNA, 13 nt, Human
gcaggacuccagg

SEQ ID NO: 3661558 - RNA, 23 nt, Human
gcaggacuccaggcccaaggcuc

SEQ ID NO: 3661559 - RNA, 18 nt, Human
gcaggacugaugucuccu

SEQ ID NO: 3661560 - RNA, 15 nt, Human
gcaggacuguccccu

SEQ ID NO: 3661561 - RNA, 22 nt, Human
gcaggagaaucacuugcacucc

SEQ ID NO: 3661562 - RNA, 17 nt, Human
gcaggagaggagagcca

SEQ ID NO: 3661563 - RNA, 19 nt, Human
gcaggagauugagaaggag

SEQ ID NO: 3661564 - RNA, 21 nt, Human
gcaggagauugagaaggagag

SEQ ID NO: 3661565 - RNA, 21 nt, Human
gcaggagcggcagauggggag

SEQ ID NO: 3661566 - RNA, 15 nt, Human
gcaggaggccaggcc

SEQ ID NO: 3661567 - RNA, 16 nt, Human
gcaggaggccaggccg

SEQ ID NO: 3661568 - RNA, 19 nt, Human
gcaggaggccccuggccca

SEQ ID NO: 3661569 - RNA, 22 nt, Human
gcaggaggccccuggcccagcg

SEQ ID NO: 3661570 - RNA, 22 nt, Human
gcaggagggcccuaccugauug

SEQ ID NO: 3661571 - RNA, 21 nt, Human
gcaggaguagcugagcucaca

SEQ ID NO: 3661572 - RNA, 19 nt, Human
gcaggagucccugccauca

SEQ ID NO: 3661573 - RNA, 21 nt, Human
gcaggauaguugcuccgccuc

SEQ ID NO: 3661574 - RNA, 22 nt, Human
gcaggauaguugcuccgccucu

SEQ ID NO: 3661575 - RNA, 17 nt, Human
gcaggaucucaccaggc

SEQ ID NO: 3661576 - RNA, 22 nt, Human
gcaggaucucaccaggcagccu

SEQ ID NO: 3661577 - RNA, 18 nt, Human
gcaggaugauuguacaga

SEQ ID NO: 3661578 - RNA, 24 nt, Human
gcaggauggccuggccagggccug

SEQ ID NO: 3661579 - RNA, 19 nt, Human
gcaggauugauuaugcaga

SEQ ID NO: 3661580 - RNA, 22 nt, Human
gcaggauuuguucucuguccag

SEQ ID NO: 3661581 - RNA, 20 nt, Human
gcaggcaccuagcaauucca

SEQ ID NO: 3661582 - RNA, 19 nt, Human
gcaggcacggguggucccc

SEQ ID NO: 3661583 - RNA, 20 nt, Human
gcaggcacucaaugcagcca

SEQ ID NO: 3661584 - RNA, 12 nt, Human
gcaggcagacac

SEQ ID NO: 3661585 - RNA, 16 nt, Human
gcaggcagaggcccag

SEQ ID NO: 3661586 - RNA, 15 nt, Human
gcaggcagccaggcc

SEQ ID NO: 3661587 - RNA, 18 nt, Human
gcaggcagcgccaagcaa

SEQ ID NO: 3661588 - RNA, 13 nt, Human
gcaggcagggcuc

SEQ ID NO: 3661589 - RNA, 22 nt, Human
gcaggcagggcucuccuggcuu

SEQ ID NO: 3661590 - RNA, 22 nt, Human
gcaggcaucggggagccgggag

SEQ ID NO: 3661591 - RNA, 23 nt, Human
gcaggcaucggggagccgggagc

SEQ ID NO: 3661592 - RNA, 15 nt, Human
gcaggcauugaggaa

SEQ ID NO: 3661593 - RNA, 18 nt, Human
gcaggcauugaggaagag

SEQ ID NO: 3661594 - RNA, 23 nt, Human
gcaggcauugccucggcuggcuc

SEQ ID NO: 3661595 - RNA, 22 nt, Human
gcaggccaagagcagaggcagc

SEQ ID NO: 3661596 - RNA, 24 nt, Human
gcaggccaagagcagaggcagcga

SEQ ID NO: 3661597 - RNA, 19 nt, Human
gcaggccaaggccuucucc

SEQ ID NO: 3661598 - RNA, 20 nt, Human
gcaggccaagucaggcccuu

SEQ ID NO: 3661599 - RNA, 16 nt, Human
gcaggccaggccagcu

SEQ ID NO: 3661600 - RNA, 19 nt, Human
gcaggccagguccagagag

SEQ ID NO: 3661601 - RNA, 22 nt, Human
gcaggcccaaauuaucaagcua

SEQ ID NO: 3661602 - RNA, 11 nt, Human
gcaggcccacc

SEQ ID NO: 3661603 - RNA, 20 nt, Human
gcaggcccacccugcuuggc

SEQ ID NO: 3661604 - RNA, 12 nt, Human
gcaggcccaccu

SEQ ID NO: 3661605 - RNA, 14 nt, Human
gcaggcccauggga

SEQ ID NO: 3661606 - RNA, 22 nt, Human
gcaggcccaugggaggcuggag

SEQ ID NO: 3661607 - RNA, 15 nt, Human
gcaggcccugcacug

SEQ ID NO: 3661608 - RNA, 20 nt, Human
gcaggcccugcacuguccug

SEQ ID NO: 3661609 - RNA, 15 nt, Human
gcaggcccuggccuc

SEQ ID NO: 3661610 - RNA, 16 nt, Human
gcaggcccuggccucc

SEQ ID NO: 3661611 - RNA, 20 nt, Human
gcaggccgugacgucugggu

SEQ ID NO: 3661612 - RNA, 15 nt, Human
gcaggccuauuucau

SEQ ID NO: 3661613 - RNA, 22 nt, Human
gcaggcggccuuuguugcucag

SEQ ID NO: 3661614 - RNA, 14 nt, Human
gcaggcggugggca

SEQ ID NO: 3661615 - RNA, 16 nt, Human
gcaggcggugggcacc

SEQ ID NO: 3661616 - RNA, 19 nt, Human
gcaggcguucagcucacug

SEQ ID NO: 3661617 - RNA, 20 nt, Human
gcaggcuacacugacacugg

SEQ ID NO: 3661618 - RNA, 16 nt, Human
gcaggcuagaaccugg

SEQ ID NO: 3661619 - RNA, 19 nt, Human
cugccuguagcccacucug

SEQ ID NO: 3661620 - RNA, 22 nt, Human
cugccuguagcccacucugcuc

SEQ ID NO: 3661621 - RNA, 16 nt, Human
cugccuguaguuagga

SEQ ID NO: 3661622 - RNA, 18 nt, Human
cugccuguaguuaggaaa

SEQ ID NO: 3661623 - RNA, 20 nt, Human
cugccuguaguuaggaaaua

SEQ ID NO: 3661624 - RNA, 22 nt, Human
cugccuguaguuaggaaauaaa

SEQ ID NO: 3661625 - RNA, 17 nt, Human
cugccuguauacuuuag

SEQ ID NO: 3661626 - RNA, 17 nt, Human
cugccuguccccaugcu

SEQ ID NO: 3661627 - RNA, 16 nt, Human
cugccugucccucuca

SEQ ID NO: 3661628 - RNA, 18 nt, Human
cugccugucccucucagg

SEQ ID NO: 3661629 - RNA, 15 nt, Human
cugccugucugaagc

SEQ ID NO: 3661630 - RNA, 13 nt, Human
cugccugucugcc

SEQ ID NO: 3661631 - RNA, 23 nt, Human
cugccugucugccccagcccaga

SEQ ID NO: 3661632 - RNA, 15 nt, Human
cugccugugagccag

SEQ ID NO: 3661633 - RNA, 18 nt, Human
cugccugugagccagucu

SEQ ID NO: 3661634 - RNA, 21 nt, Human
cugccugugcacggccagcug

SEQ ID NO: 3661635 - RNA, 20 nt, Human
cugccuguuauaacucugca

SEQ ID NO: 3661636 - RNA, 14 nt, Human
cugccuguucagcu

SEQ ID NO: 3661637 - RNA, 22 nt, Human
cugccuguugggccaggagccu

SEQ ID NO: 3661638 - RNA, 23 nt, Human
cugccuguugggccaggagccuc

SEQ ID NO: 3661639 - RNA, 16 nt, Human
cugccuuaaaaccaaa

SEQ ID NO: 3661640 - RNA, 19 nt, Human
cugccuuaaaaccaaagag

SEQ ID NO: 3661641 - RNA, 22 nt, Human
cugccuuaaaaccaaagagggc

SEQ ID NO: 3661642 - RNA, 20 nt, Human
cugccuuaaagucaguaacu

SEQ ID NO: 3661643 - RNA, 16 nt, Human
cugccuuagcuucagg

SEQ ID NO: 3661644 - RNA, 17 nt, Human
cugccuuagcuucagga

SEQ ID NO: 3661645 - RNA, 23 nt, Human
cugccuuagucucaguuugugug

SEQ ID NO: 3661646 - RNA, 15 nt, Human
cugccuuaucuugca

SEQ ID NO: 3661647 - RNA, 21 nt, Human
cugccuuauucagggaaggag

SEQ ID NO: 3661648 - RNA, 13 nt, Human
cugccuuccuccu

SEQ ID NO: 3661649 - RNA, 15 nt, Human
cugccuuccuugcua

SEQ ID NO: 3661650 - RNA, 20 nt, Human
cugccuucgcuucuugccuc

SEQ ID NO: 3661651 - RNA, 19 nt, Human
cugccuucgguacccacca

SEQ ID NO: 3661652 - RNA, 13 nt, Human
cugccuucguuaa

SEQ ID NO: 3661653 - RNA, 20 nt, Human
cugccuucguuaacugugua

SEQ ID NO: 3661654 - RNA, 20 nt, Human
cugccuucugacggcccugc

SEQ ID NO: 3661655 - RNA, 21 nt, Human
cugccuucugacggcccugca

SEQ ID NO: 3661656 - RNA, 23 nt, Human
cugccuucugacggcccugcaau

SEQ ID NO: 3661657 - RNA, 15 nt, Human
cugccuucuguccug

SEQ ID NO: 3661658 - RNA, 16 nt, Human
cugccuucuguccugg

SEQ ID NO: 3661659 - RNA, 20 nt, Human
cugccuugaagccacugaag

SEQ ID NO: 3661660 - RNA, 17 nt, Human
cugccuugcccacuccu

SEQ ID NO: 3661661 - RNA, 20 nt, Human
cugccuugcccacuccugcu

SEQ ID NO: 3661662 - RNA, 14 nt, Human
cugccuugccuuua

SEQ ID NO: 3661663 - RNA, 23 nt, Human
cugccuuggacuguguuuuuccu

SEQ ID NO: 3661664 - RNA, 14 nt, Human
cugccuuggccucc

SEQ ID NO: 3661665 - RNA, 17 nt, Human
cugccuuggccucccaa

SEQ ID NO: 3661666 - RNA, 17 nt, Human
cugccuuggcucagaca

SEQ ID NO: 3661667 - RNA, 19 nt, Human
cugccuuggggucagguug

SEQ ID NO: 3661668 - RNA, 15 nt, Human
cugccuuuagaaaau

SEQ ID NO: 3661669 - RNA, 18 nt, Human
cugccuuuauuguguuug

SEQ ID NO: 3661670 - RNA, 20 nt, Human
cugccuuuccauccauggcc

SEQ ID NO: 3661671 - RNA, 21 nt, Human
cugccuuugacauuuaauuua

SEQ ID NO: 3661672 - RNA, 15 nt, Human
cugccuuugccaggu

SEQ ID NO: 3661673 - RNA, 16 nt, Human
cugccuuugccaggug

SEQ ID NO: 3661674 - RNA, 18 nt, Human
cugccuuugccaggugac

SEQ ID NO: 3661675 - RNA, 20 nt, Human
cugccuuugccuccagaagc

SEQ ID NO: 3661676 - RNA, 21 nt, Human
cugccuuuuaguuccugugca

SEQ ID NO: 3661677 - RNA, 13 nt, Human
cugccuuuuguuc

SEQ ID NO: 3661678 - RNA, 22 nt, Human
cugcgaagacccucuugcccau

SEQ ID NO: 3661679 - RNA, 13 nt, Human
cugcgacccuggg

SEQ ID NO: 3661680 - RNA, 16 nt, Human
cugcgacgcuugcucu

SEQ ID NO: 3661681 - RNA, 23 nt, Human
cugcgacgcuugcucuguuugug

SEQ ID NO: 3661682 - RNA, 14 nt, Human
cugcgacuuucugc

SEQ ID NO: 3661683 - RNA, 17 nt, Human
cugcgacuuucugccug

SEQ ID NO: 3661684 - RNA, 20 nt, Human
cugcgacuuucugccuggag

SEQ ID NO: 3661685 - RNA, 16 nt, Human
cugcgaggcuaugagu

SEQ ID NO: 3661686 - RNA, 14 nt, Human
cugcgaucuucaga

SEQ ID NO: 3661687 - RNA, 18 nt, Human
gcauucuauugccuucuu

SEQ ID NO: 3661688 - RNA, 18 nt, Human
gcauucucauuggaaauu

SEQ ID NO: 3661689 - RNA, 15 nt, Human
gcauucuggcaguuu

SEQ ID NO: 3661690 - RNA, 19 nt, Human
gcauucuugucacaauaaa

SEQ ID NO: 3661691 - RNA, 12 nt, Human
gcauucuuuccc

SEQ ID NO: 3661692 - RNA, 18 nt, Human
gcauucuuucccagugag

SEQ ID NO: 3661693 - RNA, 17 nt, Human
gcauugaaaugagcacc

SEQ ID NO: 3661694 - RNA, 19 nt, Human
gcauugaacacaaacugua

SEQ ID NO: 3661695 - RNA, 16 nt, Human
gcauugaauauauuau

SEQ ID NO: 3661696 - RNA, 20 nt, Human
gcauugacaaaucuguguau

SEQ ID NO: 3661697 - RNA, 13 nt, Human
gcauugacauuau

SEQ ID NO: 3661698 - RNA, 22 nt, Human
gcauugacugguuuacaggccc

SEQ ID NO: 3661699 - RNA, 22 nt, Human
gcauugacuuucaguaaacaua

SEQ ID NO: 3661700 - RNA, 16 nt, Human
gcauugacuuucccca

SEQ ID NO: 3661701 - RNA, 16 nt, Human
gcauugauauugugaa

SEQ ID NO: 3661702 - RNA, 17 nt, Human
gcauugauggggaagga

SEQ ID NO: 3661703 - RNA, 18 nt, Human
gcauugauggggaaggag

SEQ ID NO: 3661704 - RNA, 16 nt, Human
gcauugauucaguauu

SEQ ID NO: 3661705 - RNA, 13 nt, Human
gcauugcauggac

SEQ ID NO: 3661706 - RNA, 14 nt, Human
gcauugccaagggc

SEQ ID NO: 3661707 - RNA, 15 nt, Human
gcauugcuuuccacu

SEQ ID NO: 3661708 - RNA, 13 nt, Human
gcauugcuuucug

SEQ ID NO: 3661709 - RNA, 16 nt, Human
gcauuggaacuggagg

SEQ ID NO: 3661710 - RNA, 20 nt, Human
gcauuggauacagcaguaga

SEQ ID NO: 3661711 - RNA, 16 nt, Human
gcauugggugaucauu

SEQ ID NO: 3661712 - RNA, 17 nt, Human
gcauugguucccuuugc

SEQ ID NO: 3661713 - RNA, 20 nt, Human
gcauuguaaaagcauuuugu

SEQ ID NO: 3661714 - RNA, 16 nt, Human
gcauuguaaaauaauu

SEQ ID NO: 3661715 - RNA, 12 nt, Human
gcauuguaaaua

SEQ ID NO: 3661716 - RNA, 16 nt, Human
gcauuguaaaugugcu

SEQ ID NO: 3661717 - RNA, 19 nt, Human
gcauuguaucgauguuaug

SEQ ID NO: 3661718 - RNA, 13 nt, Human
gcauugugggaag

SEQ ID NO: 3661719 - RNA, 22 nt, Human
gcauugugugugcagacuucag

SEQ ID NO: 3661720 - RNA, 20 nt, Human
gcauuguuugcuuauuguuc

SEQ ID NO: 3661721 - RNA, 20 nt, Human
gcauuuaaccccccuguaca

SEQ ID NO: 3661722 - RNA, 21 nt, Human
gcauuuaaccccccuguacac

SEQ ID NO: 3661723 - RNA, 22 nt, Human
gcauuuaaccccccuguacaca

SEQ ID NO: 3661724 - RNA, 14 nt, Human
gcauuuaagaauug

SEQ ID NO: 3661725 - RNA, 16 nt, Human
gcauuuaauguagcca

SEQ ID NO: 3661726 - RNA, 13 nt, Human
gcauuuagaugua

SEQ ID NO: 3661727 - RNA, 16 nt, Human
gcauuuagcacaaaaa

SEQ ID NO: 3661728 - RNA, 16 nt, Human
gcauuuagcuggccac

SEQ ID NO: 3661729 - RNA, 19 nt, Human
gcauuuaggccaugggaca

SEQ ID NO: 3661730 - RNA, 19 nt, Human
gcauuuagggaguauucua

SEQ ID NO: 3661731 - RNA, 22 nt, Human
gcauuuagggaguauucuaaua

SEQ ID NO: 3661732 - RNA, 20 nt, Human
gcauuuaugguaaucauauu

SEQ ID NO: 3661733 - RNA, 23 nt, Human
gcauuuaugguaaucauauuaga

SEQ ID NO: 3661734 - RNA, 17 nt, Human
gcauuuauuugugauga

SEQ ID NO: 3661735 - RNA, 20 nt, Human
gcauuucacaaaacagccuu

SEQ ID NO: 3661736 - RNA, 22 nt, Human
gcauuucacuuucccgguguuc

SEQ ID NO: 3661737 - RNA, 11 nt, Human
gcauuucauuc

SEQ ID NO: 3661738 - RNA, 13 nt, Human
gcauuucauucuu

SEQ ID NO: 3661739 - RNA, 23 nt, Human
gcauuuccaacaccacagacaca

SEQ ID NO: 3661740 - RNA, 18 nt, Human
gcauuucccuuccuuccu

SEQ ID NO: 3661741 - RNA, 21 nt, Human
gcauuuccuaucaccuauuuc

SEQ ID NO: 3661742 - RNA, 14 nt, Human
gcauuuccugggug

SEQ ID NO: 3661743 - RNA, 21 nt, Human
gcauuuccuggguggcuacuc

SEQ ID NO: 3661744 - RNA, 19 nt, Human
gcauuucugaauagaaaug

SEQ ID NO: 3661745 - RNA, 13 nt, Human
gcauuugaaugca

SEQ ID NO: 3661746 - RNA, 15 nt, Human
gcauuugaaugcauu

SEQ ID NO: 3661747 - RNA, 14 nt, Human
gcauuugagaaaug

SEQ ID NO: 3661748 - RNA, 15 nt, Human
gcauuugagaaaugc

SEQ ID NO: 3661749 - RNA, 17 nt, Human
gcauuugaucuguugca

SEQ ID NO: 3661750 - RNA, 17 nt, Human
gcauuugcagauuuuua

SEQ ID NO: 3661751 - RNA, 16 nt, Human
gcauuuggauuggggu

SEQ ID NO: 3661752 - RNA, 15 nt, Human
gcauuuggguccagg

SEQ ID NO: 3661753 - RNA, 22 nt, Human
gcauuuggugguuucagaaaug

SEQ ID NO: 3661754 - RNA, 23 nt, Human
gcauuuggugguuucagaaaugu

SEQ ID NO: 3661755 - RNA, 20 nt, Human
gcauuuguaaauauuaaacc

SEQ ID NO: 3661756 - RNA, 21 nt, Human
gcauuuguauuuugugugacc

SEQ ID NO: 3661757 - RNA, 12 nt, Human
gcauuugucuau

SEQ ID NO: 3661758 - RNA, 17 nt, Human
gcauuugugcuagaaau

SEQ ID NO: 3661759 - RNA, 22 nt, Human
gcauuuguuucuuucucugagg

SEQ ID NO: 3661760 - RNA, 18 nt, Human
gcauuuguuugaacugau

SEQ ID NO: 3661761 - RNA, 17 nt, Human
gcauuuguuuuguuuac

SEQ ID NO: 3661762 - RNA, 13 nt, Human
gcauuuuauaaau

SEQ ID NO: 3661763 - RNA, 13 nt, Human
gcauuuuauagac

SEQ ID NO: 3661764 - RNA, 12 nt, Human
gcauuuuauucu

SEQ ID NO: 3661765 - RNA, 18 nt, Human
gcauuuuccagcacuuug

SEQ ID NO: 3661766 - RNA, 13 nt, Human
gcauuuuccucug

SEQ ID NO: 3661767 - RNA, 16 nt, Human
gcauuuucuaaacaga

SEQ ID NO: 3661768 - RNA, 22 nt, Human
gcauuuugcuaaaugugaauga

SEQ ID NO: 3661769 - RNA, 13 nt, Human
gcauuuugcuauu

SEQ ID NO: 3661770 - RNA, 16 nt, Human
gcauuuuguuugguau

SEQ ID NO: 3661771 - RNA, 18 nt, Human
gcauuuuguuugguauug

SEQ ID NO: 3661772 - RNA, 11 nt, Human
gcauuuuuaga

SEQ ID NO: 3661773 - RNA, 23 nt, Human
gcauuuuuauuucagauuuugau

SEQ ID NO: 3661774 - RNA, 21 nt, Human
gcauuuuucaauauauugaac

SEQ ID NO: 3661775 - RNA, 15 nt, Human
gcauuuuuuaaaaca

SEQ ID NO: 3661776 - RNA, 13 nt, Human
gccaaaaauagcu

SEQ ID NO: 3661777 - RNA, 23 nt, Human
gccaaaacaauguuuaaaccuuu

SEQ ID NO: 3661778 - RNA, 16 nt, Human
gccaaaacccagcugc

SEQ ID NO: 3661779 - RNA, 19 nt, Human
gccaaaacccagcugcacc

SEQ ID NO: 3661780 - RNA, 16 nt, Human
gccaaaagcuagacag

SEQ ID NO: 3661781 - RNA, 15 nt, Human
gccaaaagcugcuca

SEQ ID NO: 3661782 - RNA, 14 nt, Human
gccaaaagcuuccc

SEQ ID NO: 3661783 - RNA, 15 nt, Human
gccaaaagcuucccu

SEQ ID NO: 3661784 - RNA, 18 nt, Human
gccaaaaggaaaaagcuc

SEQ ID NO: 3661785 - RNA, 19 nt, Human
gccaaaaggaaaaagcucc

SEQ ID NO: 3661786 - RNA, 11 nt, Human
gccaaaauaau

SEQ ID NO: 3661787 - RNA, 19 nt, Human
gccaaaauaaugucuuguu

SEQ ID NO: 3661788 - RNA, 17 nt, Human
gccaaaauucauuucua

SEQ ID NO: 3661789 - RNA, 23 nt, Human
gccaaacaaaaagguucucaggu

SEQ ID NO: 3661790 - RNA, 14 nt, Human
gccaaacaggcccu

SEQ ID NO: 3661791 - RNA, 12 nt, Human
gccaaacauuaa

SEQ ID NO: 3661792 - RNA, 19 nt, Human
gccaaacauuaauguugau

SEQ ID NO: 3661793 - RNA, 22 nt, Human
gccaaacauuaauguugauuuc

SEQ ID NO: 3661794 - RNA, 22 nt, Human
gccaaaccucuguucaguguaa

SEQ ID NO: 3661795 - RNA, 21 nt, Human
gccaaacucaccugccccuca

SEQ ID NO: 3661796 - RNA, 18 nt, Human
gccaaacucugccagcca

SEQ ID NO: 3661797 - RNA, 13 nt, Human
gccaaagaaauga

SEQ ID NO: 3661798 - RNA, 18 nt, Human
gccaaagaaaugaacauu

SEQ ID NO: 3661799 - RNA, 17 nt, Human
gccaaagaaugccuuga

SEQ ID NO: 3661800 - RNA, 19 nt, Human
gccaaagacuuaguauauu

SEQ ID NO: 3661801 - RNA, 20 nt, Human
gccaaagccaaagcuaggcc

SEQ ID NO: 3661802 - RNA, 16 nt, Human
gccaaagcuaggccug

SEQ ID NO: 3661803 - RNA, 16 nt, Human
gccaaagcuagggugg

SEQ ID NO: 3661804 - RNA, 20 nt, Human
gccaaagcuaggguggcccu

SEQ ID NO: 3661805 - RNA, 16 nt, Human
gccaaaggaagcacau

SEQ ID NO: 3661806 - RNA, 23 nt, Human
gccaaaggagggucaggaaggau

SEQ ID NO: 3661807 - RNA, 16 nt, Human
gccaaaggaugugaua

SEQ ID NO: 3661808 - RNA, 20 nt, Human
gccaaaggcugguggcaagu

SEQ ID NO: 3661809 - RNA, 19 nt, Human
gccaaagggaaauaucauu

SEQ ID NO: 3661810 - RNA, 18 nt, Human
gccaaaggggaccuggaa

SEQ ID NO: 3661811 - RNA, 19 nt, Human
gccaaaggggaccuggaag

SEQ ID NO: 3661812 - RNA, 19 nt, Human
gccaaauaaaguuaaaagu

SEQ ID NO: 3661813 - RNA, 13 nt, Human
gccaaauauaaau

SEQ ID NO: 3661814 - RNA, 15 nt, Human
gccaaauauauucuc

SEQ ID NO: 3661815 - RNA, 15 nt, Human
gccaaauauguccug

SEQ ID NO: 3661816 - RNA, 17 nt, Human
gccaaauauguccuggg

SEQ ID NO: 3661817 - RNA, 20 nt, Human
gccaaauccgcucucuuccu

SEQ ID NO: 3661818 - RNA, 18 nt, Human
gccaaauuaaaaaagaua

SEQ ID NO: 3661819 - RNA, 21 nt, Human
gccaaauuaaaaaagauaaac

SEQ ID NO: 3661820 - RNA, 23 nt, Human
gccaaauuaaaaaagauaaacac

SEQ ID NO: 3661821 - RNA, 11 nt, Human
gccaaauuauu

SEQ ID NO: 3661822 - RNA, 15 nt, Human
gccaaauuauuugug

SEQ ID NO: 3661823 - RNA, 23 nt, Human
gccaaauuauuuguguaauagaa

SEQ ID NO: 3661824 - RNA, 13 nt, Human
gccaacaaagcug

SEQ ID NO: 3661825 - RNA, 15 nt, Human
gccaacaaagcuguu

SEQ ID NO: 3661826 - RNA, 20 nt, Human
gccaacaagaaugcauugau

SEQ ID NO: 3661827 - RNA, 17 nt, Human
gccaacacgcaccugcc

SEQ ID NO: 3661828 - RNA, 20 nt, Human
gccaacacgcaccugccuca

SEQ ID NO: 3661829 - RNA, 19 nt, Human
gccaacagaagcuuccauu

SEQ ID NO: 3661830 - RNA, 11 nt, Human
gccaacagcua

SEQ ID NO: 3661831 - RNA, 21 nt, Human
gccaacagguagcauagcucu

SEQ ID NO: 3661832 - RNA, 23 nt, Human
gcccaggacggggccggccaggu

SEQ ID NO: 3661833 - RNA, 10 nt, Human
gcccaggaga

SEQ ID NO: 3661834 - RNA, 13 nt, Human
gcccaggagagag

SEQ ID NO: 3661835 - RNA, 15 nt, Human
gcccaggagagagaa

SEQ ID NO: 3661836 - RNA, 16 nt, Human
gcccaggagagagaaa

SEQ ID NO: 3661837 - RNA, 20 nt, Human
gcccaggagagagaaagcca

SEQ ID NO: 3661838 - RNA, 19 nt, Human
gcccaggagagccagcccu

SEQ ID NO: 3661839 - RNA, 11 nt, Human
gcccaggagcc

SEQ ID NO: 3661840 - RNA, 13 nt, Human
gcccaggagccca

SEQ ID NO: 3661841 - RNA, 14 nt, Human
gcccaggagcccau

SEQ ID NO: 3661842 - RNA, 20 nt, Human
gcccaggagggcauccauac

SEQ ID NO: 3661843 - RNA, 22 nt, Human
gcccaggagggcauccauacca

SEQ ID NO: 3661844 - RNA, 19 nt, Human
gcccaggccaggacucugc

SEQ ID NO: 3661845 - RNA, 22 nt, Human
gcccaggccaucuuccaggugg

SEQ ID NO: 3661846 - RNA, 13 nt, Human
gcccaggccccug

SEQ ID NO: 3661847 - RNA, 17 nt, Human
gcccaggccccugccac

SEQ ID NO: 3661848 - RNA, 13 nt, Human
gcccaggccccuu

SEQ ID NO: 3661849 - RNA, 17 nt, Human
gcccaggccggccagcc

SEQ ID NO: 3661850 - RNA, 18 nt, Human
gcccaggccggccagccu

SEQ ID NO: 3661851 - RNA, 20 nt, Human
gcccaggccggccagccuca

SEQ ID NO: 3661852 - RNA, 22 nt, Human
gcccaggccgggguggagcaug

SEQ ID NO: 3661853 - RNA, 23 nt, Human
gcccaggccgggguggagcaugg

SEQ ID NO: 3661854 - RNA, 10 nt, Human
gcccaggccu

SEQ ID NO: 3661855 - RNA, 16 nt, Human
gcccaggccuccagcu

SEQ ID NO: 3661856 - RNA, 18 nt, Human
gcccaggccuccagcuca

SEQ ID NO: 3661857 - RNA, 13 nt, Human
gcccaggccuccu

SEQ ID NO: 3661858 - RNA, 17 nt, Human
gcccaggccugccuguu

SEQ ID NO: 3661859 - RNA, 12 nt, Human
gcccaggcugcc

SEQ ID NO: 3661860 - RNA, 13 nt, Human
gcccaggcuggcc

SEQ ID NO: 3661861 - RNA, 16 nt, Human
gcccaggcuggcgugc

SEQ ID NO: 3661862 - RNA, 20 nt, Human
gcccaggcuggcgugcagug

SEQ ID NO: 3661863 - RNA, 15 nt, Human
gcccaggcugggaac

SEQ ID NO: 3661864 - RNA, 16 nt, Human
gcccaggcugguuucg

SEQ ID NO: 3661865 - RNA, 20 nt, Human
gcccagggacaccagccagg

SEQ ID NO: 3661866 - RNA, 16 nt, Human
gcccagggagaggcca

SEQ ID NO: 3661867 - RNA, 19 nt, Human
gcccagggagaggccauga

SEQ ID NO: 3661868 - RNA, 21 nt, Human
gcccagggaggccgaagcuaa

SEQ ID NO: 3661869 - RNA, 17 nt, Human
gcccagggauuuguccu

SEQ ID NO: 3661870 - RNA, 18 nt, Human
gcccagggcaucugggag

SEQ ID NO: 3661871 - RNA, 13 nt, Human
gcccagggccacu

SEQ ID NO: 3661872 - RNA, 14 nt, Human
gcccagggcccaga

SEQ ID NO: 3661873 - RNA, 13 nt, Human
gcccagggcucag

SEQ ID NO: 3661874 - RNA, 15 nt, Human
gcccagggcuccugc

SEQ ID NO: 3661875 - RNA, 19 nt, Human
gcccaggggugcccccucc

SEQ ID NO: 3661876 - RNA, 21 nt, Human
gcccagggugagguggcaugg

SEQ ID NO: 3661877 - RNA, 14 nt, Human
gcccaggguggacu

SEQ ID NO: 3661878 - RNA, 16 nt, Human
gcccaggguuccccca

SEQ ID NO: 3661879 - RNA, 19 nt, Human
gcccaggguucccccagcc

SEQ ID NO: 3661880 - RNA, 20 nt, Human
gcccaggguucccccagccc

SEQ ID NO: 3661881 - RNA, 21 nt, Human
gcccaggguucccccagcccu

SEQ ID NO: 3661882 - RNA, 22 nt, Human
gcccaggguucccccagcccug

SEQ ID NO: 3661883 - RNA, 16 nt, Human
gcccagguccucugau

SEQ ID NO: 3661884 - RNA, 21 nt, Human
gcccaggugaguccuagagcu

SEQ ID NO: 3661885 - RNA, 14 nt, Human
gcccagguuucugg

SEQ ID NO: 3661886 - RNA, 19 nt, Human
gcccaguacauuuaaauuu

SEQ ID NO: 3661887 - RNA, 14 nt, Human
gcccagucccagca

SEQ ID NO: 3661888 - RNA, 16 nt, Human
gcccagucccagcagc

SEQ ID NO: 3661889 - RNA, 20 nt, Human
gcccagucccagcagccagc

SEQ ID NO: 3661890 - RNA, 15 nt, Human
gcccagucccccaac

SEQ ID NO: 3661891 - RNA, 18 nt, Human
gcccaguccucucccaag

SEQ ID NO: 3661892 - RNA, 22 nt, Human
gccaggacuccccaggccaggc

SEQ ID NO: 3661893 - RNA, 15 nt, Human
gccaggacucugcag

SEQ ID NO: 3661894 - RNA, 17 nt, Human
gccaggacucugcagcc

SEQ ID NO: 3661895 - RNA, 12 nt, Human
gccaggagaagc

SEQ ID NO: 3661896 - RNA, 17 nt, Human
gccaggagaagcucagc

SEQ ID NO: 3661897 - RNA, 19 nt, Human
gccaggagaagcucagcug

SEQ ID NO: 3661898 - RNA, 15 nt, Human
gccaggagcaaaugu

SEQ ID NO: 3661899 - RNA, 22 nt, Human
gccaggagcaaauguuucugca

SEQ ID NO: 3661900 - RNA, 18 nt, Human
gccaggagcacggcucug

SEQ ID NO: 3661901 - RNA, 14 nt, Human
gccaggagccuccu

SEQ ID NO: 3661902 - RNA, 19 nt, Human
gccaggagccuccugcccu

SEQ ID NO: 3661903 - RNA, 22 nt, Human
gccaggagcucuucaggccucc

SEQ ID NO: 3661904 - RNA, 13 nt, Human
gccaggagcuggg

SEQ ID NO: 3661905 - RNA, 15 nt, Human
gccaggaggacccag

SEQ ID NO: 3661906 - RNA, 16 nt, Human
gccaggaggccaggcu

SEQ ID NO: 3661907 - RNA, 22 nt, Human
gccaggagggcguucuuaggcu

SEQ ID NO: 3661908 - RNA, 22 nt, Human
gccaggaucaugguguaauaag

SEQ ID NO: 3661909 - RNA, 24 nt, Human
gccaggaucaugguguaauaagac

SEQ ID NO: 3661910 - RNA, 14 nt, Human
gccaggauggaaug

SEQ ID NO: 3661911 - RNA, 22 nt, Human
gccaggcaacuucaguccuggg

SEQ ID NO: 3661912 - RNA, 15 nt, Human
gccaggcacacacug

SEQ ID NO: 3661913 - RNA, 22 nt, Human
gccaggcacacacugugcuuuc

SEQ ID NO: 3661914 - RNA, 21 nt, Human
gccaggcacccccuggagaga

SEQ ID NO: 3661915 - RNA, 15 nt, Human
gccaggcagaucugu

SEQ ID NO: 3661916 - RNA, 15 nt, Human
gccaggcaggggugg

SEQ ID NO: 3661917 - RNA, 17 nt, Human
gccaggcaggggugggg

SEQ ID NO: 3661918 - RNA, 17 nt, Human
gccaggcagguccacag

SEQ ID NO: 3661919 - RNA, 20 nt, Human
gccaggccaccuccagaaac

SEQ ID NO: 3661920 - RNA, 13 nt, Human
gccaggccagccu

SEQ ID NO: 3661921 - RNA, 19 nt, Human
gccaggccagccuccgaga

SEQ ID NO: 3661922 - RNA, 14 nt, Human
gccaggcccagccg

SEQ ID NO: 3661923 - RNA, 14 nt, Human
gccaggccccaggc

SEQ ID NO: 3661924 - RNA, 18 nt, Human
gccaggcccccaagccug

SEQ ID NO: 3661925 - RNA, 21 nt, Human
gccaggcccccaccacacauc

SEQ ID NO: 3661926 - RNA, 18 nt, Human
gccaggcccggggcuggc

SEQ ID NO: 3661927 - RNA, 17 nt, Human
gccaggcccucugccca

SEQ ID NO: 3661928 - RNA, 19 nt, Human
gccaggcccucugcccacu

SEQ ID NO: 3661929 - RNA, 18 nt, Human
gccaggccgggccuguac

SEQ ID NO: 3661930 - RNA, 14 nt, Human
gccaggccucuccc

SEQ ID NO: 3661931 - RNA, 17 nt, Human
gccaggccucuuggcag

SEQ ID NO: 3661932 - RNA, 15 nt, Human
gccaggcuaauuuuu

SEQ ID NO: 3661933 - RNA, 22 nt, Human
gccaggcucacucacagaguca

SEQ ID NO: 3661934 - RNA, 17 nt, Human
gccaggcucaggccaug

SEQ ID NO: 3661935 - RNA, 15 nt, Human
gccaggcuccuuccu

SEQ ID NO: 3661936 - RNA, 21 nt, Human
gccaggcuccuuccugucuuc

SEQ ID NO: 3661937 - RNA, 13 nt, Human
gccaggcucucuu

SEQ ID NO: 3661938 - RNA, 20 nt, Human
gccaggcucugugcugaccc

SEQ ID NO: 3661939 - RNA, 21 nt, Human
gccaggcucugugcugacccu

SEQ ID NO: 3661940 - RNA, 17 nt, Human
gccaggcugaccacagc

SEQ ID NO: 3661941 - RNA, 22 nt, Human
gccaggcugaccacagcacagc

SEQ ID NO: 3661942 - RNA, 15 nt, Human
gccaggcugaucucg

SEQ ID NO: 3661943 - RNA, 14 nt, Human
gccaggcugcucuu

SEQ ID NO: 3661944 - RNA, 19 nt, Human
gccaggcuggagugcagug

SEQ ID NO: 3661945 - RNA, 17 nt, Human
gccaggcugggucgccc

SEQ ID NO: 3661946 - RNA, 20 nt, Human
gccaggcugggucgcccugg

SEQ ID NO: 3661947 - RNA, 22 nt, Human
gccaggcuggucucgaacuccu

SEQ ID NO: 3661948 - RNA, 23 nt, Human
gccagggacagaggggguggccu

SEQ ID NO: 3661949 - RNA, 16 nt, Human
gccagggaccccagaa

SEQ ID NO: 3661950 - RNA, 15 nt, Human
gccagggagaagcuc

SEQ ID NO: 3661951 - RNA, 20 nt, Human
gccagggagaagcuccucuc

SEQ ID NO: 3661952 - RNA, 16 nt, Human
gccagggagacagagc

SEQ ID NO: 3661953 - RNA, 15 nt, Human
gccagggagaccugg

SEQ ID NO: 3661954 - RNA, 20 nt, Human
gccagggagagcccaggagc

SEQ ID NO: 3661955 - RNA, 19 nt, Human
gccagggauggggccacag

SEQ ID NO: 3661956 - RNA, 14 nt, Human
gccagggcagggcc

SEQ ID NO: 3661957 - RNA, 14 nt, Human
gccagggccccucu

SEQ ID NO: 3661958 - RNA, 22 nt, Human
gccagggccccucuccccaggg

SEQ ID NO: 3661959 - RNA, 15 nt, Human
gccagggcccugcag

SEQ ID NO: 3661960 - RNA, 17 nt, Human
gccagggcccugcagag

SEQ ID NO: 3661961 - RNA, 19 nt, Human
gccagggcccugcagaggg

SEQ ID NO: 3661962 - RNA, 13 nt, Human
gccagggccugcg

SEQ ID NO: 3661963 - RNA, 14 nt, Human
gccagggcugcccu

SEQ ID NO: 3661964 - RNA, 14 nt, Human
gccagggcuggaga

SEQ ID NO: 3661965 - RNA, 22 nt, Human
gccaggggaaaaucagccugcu

SEQ ID NO: 3661966 - RNA, 23 nt, Human
gccaggggaaaaucagccugcuc

SEQ ID NO: 3661967 - RNA, 14 nt, Human
gccaggggagcaga

SEQ ID NO: 3661968 - RNA, 21 nt, Human
gccaggggagcagaggggcag

SEQ ID NO: 3661969 - RNA, 22 nt, Human
gccaggggagguuacagguacc

SEQ ID NO: 3661970 - RNA, 16 nt, Human
gccaggggcuuuugcu

SEQ ID NO: 3661971 - RNA, 20 nt, Human
gccagggggacuagccccug

SEQ ID NO: 3661972 - RNA, 20 nt, Human
gccagggggagcugggccug

SEQ ID NO: 3661973 - RNA, 22 nt, Human
gccagggggagcugggccuggu

SEQ ID NO: 3661974 - RNA, 21 nt, Human
gccaggggggugaggagcugg

SEQ ID NO: 3661975 - RNA, 22 nt, Human
gccaggggggugaggagcuggg

SEQ ID NO: 3661976 - RNA, 23 nt, Human
gcccccagcuaagaaccuggaac

SEQ ID NO: 3661977 - RNA, 12 nt, Human
gcccccagcugg

SEQ ID NO: 3661978 - RNA, 13 nt, Human
gcccccagcuggc

SEQ ID NO: 3661979 - RNA, 15 nt, Human
gcccccagcuggccc

SEQ ID NO: 3661980 - RNA, 16 nt, Human
gcccccaggacugggc

SEQ ID NO: 3661981 - RNA, 16 nt, Human
gcccccaggcugcugg

SEQ ID NO: 3661982 - RNA, 14 nt, Human
gcccccagguaggg

SEQ ID NO: 3661983 - RNA, 18 nt, Human
gcccccaguccccacccc

SEQ ID NO: 3661984 - RNA, 19 nt, Human
gcccccaucauccucuggc

SEQ ID NO: 3661985 - RNA, 17 nt, Human
gccccccacacuucccu

SEQ ID NO: 3661986 - RNA, 19 nt, Human
gccccccacacuucccugg

SEQ ID NO: 3661987 - RNA, 14 nt, Human
gccccccaccccag

SEQ ID NO: 3661988 - RNA, 16 nt, Human
gccccccagcucaggg

SEQ ID NO: 3661989 - RNA, 15 nt, Human
gccccccauccuggc

SEQ ID NO: 3661990 - RNA, 16 nt, Human
gccccccauccuggcc

SEQ ID NO: 3661991 - RNA, 17 nt, Human
gccccccauccuggccc

SEQ ID NO: 3661992 - RNA, 19 nt, Human
gccccccauccuggcccau

SEQ ID NO: 3661993 - RNA, 17 nt, Human
gcccccccaacacugug

SEQ ID NO: 3661994 - RNA, 14 nt, Human
gcccccccuuccac

SEQ ID NO: 3661995 - RNA, 23 nt, Human
gcccccccuucccccuuuuuugu

SEQ ID NO: 3661996 - RNA, 14 nt, Human
gccccccucccaga

SEQ ID NO: 3661997 - RNA, 17 nt, Human
gccccccucccagaggc

SEQ ID NO: 3661998 - RNA, 16 nt, Human
gccccccuccuugcuc

SEQ ID NO: 3661999 - RNA, 20 nt, Human
gcccccgcauccccugccuc

SEQ ID NO: 3662000 - RNA, 13 nt, Human
gcccccgccccgc

SEQ ID NO: 3662001 - RNA, 22 nt, Human
gcccccuccccggcacccucug

SEQ ID NO: 3662002 - RNA, 16 nt, Human
gcccccuccgcccugc

SEQ ID NO: 3662003 - RNA, 18 nt, Human
gcccccuccgcccugcca

SEQ ID NO: 3662004 - RNA, 19 nt, Human
gcccccuccucuagcugug

SEQ ID NO: 3662005 - RNA, 20 nt, Human
gcccccuccucuagcugugg

SEQ ID NO: 3662006 - RNA, 17 nt, Human
gcccccuccucucccau

SEQ ID NO: 3662007 - RNA, 13 nt, Human
gcccccuccugaa

SEQ ID NO: 3662008 - RNA, 21 nt, Human
gcccccuccugaaccgcacag

SEQ ID NO: 3662009 - RNA, 22 nt, Human
gcccccuccugaaccgcacagc

SEQ ID NO: 3662010 - RNA, 17 nt, Human
gcccccucugcccugcg

SEQ ID NO: 3662011 - RNA, 18 nt, Human
gcccccugaaacuuauuu

SEQ ID NO: 3662012 - RNA, 18 nt, Human
gcccccugaccacucaga

SEQ ID NO: 3662013 - RNA, 12 nt, Human
gcccccugcaga

SEQ ID NO: 3662014 - RNA, 13 nt, Human
gcccccugcagga

SEQ ID NO: 3662015 - RNA, 16 nt, Human
gcccccugcaggaagg

SEQ ID NO: 3662016 - RNA, 18 nt, Human
gcccccugcaggaaggag

SEQ ID NO: 3662017 - RNA, 21 nt, Human
gcccccugcaggaaggagcug

SEQ ID NO: 3662018 - RNA, 23 nt, Human
gcccccugcaggaaggagcugcc

SEQ ID NO: 3662019 - RNA, 11 nt, Human
gcccccugccc

SEQ ID NO: 3662020 - RNA, 14 nt, Human
gcccccugcccccc

SEQ ID NO: 3662021 - RNA, 14 nt, Human
gcccccugcccucc

SEQ ID NO: 3662022 - RNA, 13 nt, Human
gcccccugccugc

SEQ ID NO: 3662023 - RNA, 13 nt, Human
gcccccugcuggc

SEQ ID NO: 3662024 - RNA, 13 nt, Human
gcccccuggccuc

SEQ ID NO: 3662025 - RNA, 14 nt, Human
gcccccuggccucu

SEQ ID NO: 3662026 - RNA, 22 nt, Human
gcccccugguggacaguccugg

SEQ ID NO: 3662027 - RNA, 19 nt, Human
gcccccuucucccacacug

SEQ ID NO: 3662028 - RNA, 16 nt, Human
gcccccuuucagaugu

SEQ ID NO: 3662029 - RNA, 15 nt, Human
gcccccuuucccggg

SEQ ID NO: 3662030 - RNA, 18 nt, Human
gcccccuuucccgggcug

SEQ ID NO: 3662031 - RNA, 19 nt, Human
gcccccuuugggcccaggg

SEQ ID NO: 3662032 - RNA, 21 nt, Human
gcccccuuugggcccagggac

SEQ ID NO: 3662033 - RNA, 16 nt, Human
gccccgacuccagcca

SEQ ID NO: 3662034 - RNA, 21 nt, Human
gccccgacuccagccagcgcc

SEQ ID NO: 3662035 - RNA, 17 nt, Human
gccccgaggacccagac

SEQ ID NO: 3662036 - RNA, 18 nt, Human
gccccgaggacccagacc

SEQ ID NO: 3662037 - RNA, 19 nt, Human
gccccgaggacccagaccc

SEQ ID NO: 3662038 - RNA, 21 nt, Human
gccccgaggacccagacccag

SEQ ID NO: 3662039 - RNA, 15 nt, Human
gccccgaggccuucu

SEQ ID NO: 3662040 - RNA, 14 nt, Human
gccccgcccaggcu

SEQ ID NO: 3662041 - RNA, 15 nt, Human
gccccgccccacauu

SEQ ID NO: 3662042 - RNA, 21 nt, Human
gccccgcccccaguccccacc

SEQ ID NO: 3662043 - RNA, 17 nt, Human
gccccgcccucuuccug

SEQ ID NO: 3662044 - RNA, 15 nt, Human
gccccgcccugcccc

SEQ ID NO: 3662045 - RNA, 14 nt, Human
gccccgcuugucca

SEQ ID NO: 3662046 - RNA, 19 nt, Human
gccccgcuuguccagcgcc

SEQ ID NO: 3662047 - RNA, 15 nt, Human
gccccggaucagagc

SEQ ID NO: 3662048 - RNA, 17 nt, Human
gccccggaucagagcag

SEQ ID NO: 3662049 - RNA, 22 nt, Human
gccccggaucagagcaggaccu

SEQ ID NO: 3662050 - RNA, 18 nt, Human
gccccggccaccucugcg

SEQ ID NO: 3662051 - RNA, 17 nt, Human
gccccggccccagccag

SEQ ID NO: 3662052 - RNA, 18 nt, Human
gccccggccccagccaga

SEQ ID NO: 3662053 - RNA, 17 nt, Human
gccccggcccugggcuc

SEQ ID NO: 3662054 - RNA, 21 nt, Human
gccccggcccugggcucggag

SEQ ID NO: 3662055 - RNA, 18 nt, Human
gccccgggacuuggaggg

SEQ ID NO: 3662056 - RNA, 19 nt, Human
gccccggggugaguccauu

SEQ ID NO: 3662057 - RNA, 21 nt, Human
gccccgucuacagcuccccca

SEQ ID NO: 3662058 - RNA, 17 nt, Human
gccccgucucaggucug

SEQ ID NO: 3662059 - RNA, 14 nt, Human
gccccgucucuguu

SEQ ID NO: 3662060 - RNA, 15 nt, Human
gccccgugcagacug

SEQ ID NO: 3662061 - RNA, 14 nt, Human
cuggcuggaaggga

SEQ ID NO: 3662062 - RNA, 12 nt, Human
cuggcuggagcc

SEQ ID NO: 3662063 - RNA, 15 nt, Human
cuggcuggagccuag

SEQ ID NO: 3662064 - RNA, 13 nt, Human
cuggcuggaguga

SEQ ID NO: 3662065 - RNA, 15 nt, Human
cuggcuggcacagaa

SEQ ID NO: 3662066 - RNA, 16 nt, Human
cuggcuggcugagggc

SEQ ID NO: 3662067 - RNA, 19 nt, Human
cuggcugggacguggcuca

SEQ ID NO: 3662068 - RNA, 21 nt, Human
cuggcugggacguggcucagc

SEQ ID NO: 3662069 - RNA, 15 nt, Human
cuggcugggacuggg

SEQ ID NO: 3662070 - RNA, 17 nt, Human
cuggcugggacugggaa

SEQ ID NO: 3662071 - RNA, 18 nt, Human
cuggcuggggccuaucag

SEQ ID NO: 3662072 - RNA, 21 nt, Human
cuggcuggggccuaucagugu

SEQ ID NO: 3662073 - RNA, 23 nt, Human
cuggcugggguggccuguguggc

SEQ ID NO: 3662074 - RNA, 21 nt, Human
cuggcuggguggcaccagcag

SEQ ID NO: 3662075 - RNA, 18 nt, Human
cuggcugguaagggccaa

SEQ ID NO: 3662076 - RNA, 22 nt, Human
cuggcugguguuaacagaaggg

SEQ ID NO: 3662077 - RNA, 15 nt, Human
cuggcuguaaggcuc

SEQ ID NO: 3662078 - RNA, 17 nt, Human
cuggcuguaaggcucua

SEQ ID NO: 3662079 - RNA, 20 nt, Human
cuggcuguaaggcucuagau

SEQ ID NO: 3662080 - RNA, 13 nt, Human
cuggcugucgaga

SEQ ID NO: 3662081 - RNA, 18 nt, Human
cuggcuguggccuaaccu

SEQ ID NO: 3662082 - RNA, 14 nt, Human
cuggcugugggcuc

SEQ ID NO: 3662083 - RNA, 16 nt, Human
cuggcugugggcuccc

SEQ ID NO: 3662084 - RNA, 17 nt, Human
cuggcuguuggcugggg

SEQ ID NO: 3662085 - RNA, 18 nt, Human
cuggcuuacacuggcaau

SEQ ID NO: 3662086 - RNA, 13 nt, Human
cuggcuucaggag

SEQ ID NO: 3662087 - RNA, 21 nt, Human
cuggcuucaggcaauucuccu

SEQ ID NO: 3662088 - RNA, 12 nt, Human
cuggcuuccagg

SEQ ID NO: 3662089 - RNA, 14 nt, Human
cuggcuuccaggua

SEQ ID NO: 3662090 - RNA, 18 nt, Human
cuggcuucccauccccag

SEQ ID NO: 3662091 - RNA, 22 nt, Human
cuggcuucccauccccagcgau

SEQ ID NO: 3662092 - RNA, 17 nt, Human
cuggcuucuggccagga

SEQ ID NO: 3662093 - RNA, 17 nt, Human
cuggcuucuguggggcc

SEQ ID NO: 3662094 - RNA, 21 nt, Human
cuggcuucuguggggccccuc

SEQ ID NO: 3662095 - RNA, 20 nt, Human
cuggcuuggccacagccagg

SEQ ID NO: 3662096 - RNA, 20 nt, Human
cuggcuuggggucaagaaac

SEQ ID NO: 3662097 - RNA, 17 nt, Human
cuggcuuguaacuccac

SEQ ID NO: 3662098 - RNA, 19 nt, Human
cuggcuuguaacuccacca

SEQ ID NO: 3662099 - RNA, 16 nt, Human
cuggcuuguuguaaag

SEQ ID NO: 3662100 - RNA, 14 nt, Human
cuggcuuguuuauu

SEQ ID NO: 3662101 - RNA, 18 nt, Human
cuggcuuguuuauuuugu

SEQ ID NO: 3662102 - RNA, 14 nt, Human
cuggcuuugagaag

SEQ ID NO: 3662103 - RNA, 19 nt, Human
cuggcuuugcccaaccuca

SEQ ID NO: 3662104 - RNA, 11 nt, Human
cuggcuuuggc

SEQ ID NO: 3662105 - RNA, 22 nt, Human
cuggcuuuucacugcuggcugc

SEQ ID NO: 3662106 - RNA, 22 nt, Human
cugggaaaaacuuuggaaccag

SEQ ID NO: 3662107 - RNA, 11 nt, Human
cugggaaacag

SEQ ID NO: 3662108 - RNA, 17 nt, Human
cugggaaagcauaaagc

SEQ ID NO: 3662109 - RNA, 16 nt, Human
cugggaaauaagagag

SEQ ID NO: 3662110 - RNA, 17 nt, Human
cugggaaauaagagaga

SEQ ID NO: 3662111 - RNA, 16 nt, Human
cugggaaaugagcagg

SEQ ID NO: 3662112 - RNA, 14 nt, Human
cugggaacagaacu

SEQ ID NO: 3662113 - RNA, 15 nt, Human
cugggaacagaacuc

SEQ ID NO: 3662114 - RNA, 21 nt, Human
cugggaacagugugcaaggca

SEQ ID NO: 3662115 - RNA, 23 nt, Human
cugggaacaucacauuccucugc

SEQ ID NO: 3662116 - RNA, 19 nt, Human
cugggaaccccuuucccac

SEQ ID NO: 3662117 - RNA, 15 nt, Human
cugggaaccucccag

SEQ ID NO: 3662118 - RNA, 17 nt, Human
cugggaaccucccagag

SEQ ID NO: 3662119 - RNA, 22 nt, Human
cugggaaccucccagaggucca

SEQ ID NO: 3662120 - RNA, 23 nt, Human
cugggaaccucccagagguccag

SEQ ID NO: 3662121 - RNA, 18 nt, Human
cugguuaggauggcagga

SEQ ID NO: 3662122 - RNA, 22 nt, Human
cugguuagguuaggacuugccc

SEQ ID NO: 3662123 - RNA, 20 nt, Human
cugguucacacugaccaaga

SEQ ID NO: 3662124 - RNA, 12 nt, Human
gccgaagcucug

SEQ ID NO: 3662125 - RNA, 15 nt, Human
gccgaaugcccucag

SEQ ID NO: 3662126 - RNA, 17 nt, Human
gccgaccagagccccac

SEQ ID NO: 3662127 - RNA, 12 nt, Human
gccgaccagagg

SEQ ID NO: 3662128 - RNA, 23 nt, Human
gccgacccccucucccugcaugg

SEQ ID NO: 3662129 - RNA, 22 nt, Human
gccgaccccuaguucccucugc

SEQ ID NO: 3662130 - RNA, 13 nt, Human
gccgaccucagcc

SEQ ID NO: 3662131 - RNA, 14 nt, Human
gccgaccucagccu

SEQ ID NO: 3662132 - RNA, 13 nt, Human
gccgaccucgucc

SEQ ID NO: 3662133 - RNA, 20 nt, Human
gccgaccucguccucccccu

SEQ ID NO: 3662134 - RNA, 12 nt, Human
gccgacucuggc

SEQ ID NO: 3662135 - RNA, 22 nt, Human
gccgacugcacagcggccccug

SEQ ID NO: 3662136 - RNA, 13 nt, Human
gccgagaagcaag

SEQ ID NO: 3662137 - RNA, 19 nt, Human
gccgagacucgacucugug

SEQ ID NO: 3662138 - RNA, 23 nt, Human
gccgagacucgacucugugccuc

SEQ ID NO: 3662139 - RNA, 16 nt, Human
gccgagagccugcucc

SEQ ID NO: 3662140 - RNA, 20 nt, Human
gccgagagccugcuccccca

SEQ ID NO: 3662141 - RNA, 16 nt, Human
gccgagauagccaagg

SEQ ID NO: 3662142 - RNA, 17 nt, Human
gccgagauagccaaggc

SEQ ID NO: 3662143 - RNA, 19 nt, Human
gccgagauagccaaggcca

SEQ ID NO: 3662144 - RNA, 18 nt, Human
gccgagaucacgccacug

SEQ ID NO: 3662145 - RNA, 19 nt, Human
gccgagaucacgccacugc

SEQ ID NO: 3662146 - RNA, 22 nt, Human
gccgagaucacgccacugcacu

SEQ ID NO: 3662147 - RNA, 15 nt, Human
gccgagcaggaggcc

SEQ ID NO: 3662148 - RNA, 23 nt, Human
gccgagcucguguauccuggggc

SEQ ID NO: 3662149 - RNA, 18 nt, Human
gccgaggccaugugcaua

SEQ ID NO: 3662150 - RNA, 21 nt, Human
gccgauagagggacggccaag

SEQ ID NO: 3662151 - RNA, 17 nt, Human
gccgauauacucuagau

SEQ ID NO: 3662152 - RNA, 22 nt, Human
gccgauauacucuagaugaagu

SEQ ID NO: 3662153 - RNA, 17 nt, Human
gccgauucaccugagca

SEQ ID NO: 3662154 - RNA, 17 nt, Human
gccgcaaaccacacugg

SEQ ID NO: 3662155 - RNA, 19 nt, Human
gccgcaaaccacacuggac

SEQ ID NO: 3662156 - RNA, 20 nt, Human
gccgcaccuaaagcagccag

SEQ ID NO: 3662157 - RNA, 13 nt, Human
gccgcagcccugc

SEQ ID NO: 3662158 - RNA, 16 nt, Human
gccgcagcccugcaga

SEQ ID NO: 3662159 - RNA, 14 nt, Human
gccgcagcucuugc

SEQ ID NO: 3662160 - RNA, 19 nt, Human
gccgcagcucuugcccuuc

SEQ ID NO: 3662161 - RNA, 18 nt, Human
gccgcaucucacagcuau

SEQ ID NO: 3662162 - RNA, 14 nt, Human
gccgcauucccuga

SEQ ID NO: 3662163 - RNA, 15 nt, Human
gccgcauucccugag

SEQ ID NO: 3662164 - RNA, 16 nt, Human
gccgcauucccugagu

SEQ ID NO: 3662165 - RNA, 17 nt, Human
gccgccaguacuuguca

SEQ ID NO: 3662166 - RNA, 15 nt, Human
gccgccaugcuccug

SEQ ID NO: 3662167 - RNA, 16 nt, Human
gccgccauugccacca

SEQ ID NO: 3662168 - RNA, 17 nt, Human
gccgccauugccaccag

SEQ ID NO: 3662169 - RNA, 18 nt, Human
gccgccauugccaccagg

SEQ ID NO: 3662170 - RNA, 21 nt, Human
gccgccauugccaccaggaga

SEQ ID NO: 3662171 - RNA, 14 nt, Human
gccgcccaaggccu

SEQ ID NO: 3662172 - RNA, 15 nt, Human
gccgcccgggcccag

SEQ ID NO: 3662173 - RNA, 17 nt, Human
gccgcccuguacccucu

SEQ ID NO: 3662174 - RNA, 14 nt, Human
gccgccgccucgcc

SEQ ID NO: 3662175 - RNA, 16 nt, Human
gccgccgccucgccca

SEQ ID NO: 3662176 - RNA, 17 nt, Human
gccgccuaggcucagcg

SEQ ID NO: 3662177 - RNA, 13 nt, Human
gccgccucaaugu

SEQ ID NO: 3662178 - RNA, 12 nt, Human
gccgccucccag

SEQ ID NO: 3662179 - RNA, 15 nt, Human
gccgccucccagccu

SEQ ID NO: 3662180 - RNA, 19 nt, Human
gccgccucccagccugggg

SEQ ID NO: 3662181 - RNA, 16 nt, Human
gccgccucgcccaccg

SEQ ID NO: 3662182 - RNA, 19 nt, Human
gccgccugcacuccucagg

SEQ ID NO: 3662183 - RNA, 16 nt, Human
gccgcgcguccagcug

SEQ ID NO: 3662184 - RNA, 15 nt, Human
gccgcggagccugca

SEQ ID NO: 3662185 - RNA, 20 nt, Human
gccgcguggugccaucccca

SEQ ID NO: 3662186 - RNA, 16 nt, Human
gccgcuaccucccucc

SEQ ID NO: 3662187 - RNA, 17 nt, Human
gccgcuaccucccuccc

SEQ ID NO: 3662188 - RNA, 15 nt, Human
gccgcuagaggccug

SEQ ID NO: 3662189 - RNA, 18 nt, Human
gccgcuagaggccugagg

SEQ ID NO: 3662190 - RNA, 19 nt, Human
gccgcuagaggccugagga

SEQ ID NO: 3662191 - RNA, 21 nt, Human
gccgcuccugucugccagcca

SEQ ID NO: 3662192 - RNA, 15 nt, Human
gccgcucuccugcca

SEQ ID NO: 3662193 - RNA, 17 nt, Human
gccgcugccacccaccu

SEQ ID NO: 3662194 - RNA, 15 nt, Human
gccgcuguucaccca

SEQ ID NO: 3662195 - RNA, 22 nt, Human
gccggacccggaggccgaggcc

SEQ ID NO: 3662196 - RNA, 19 nt, Human
gccggaguccacucccagu

SEQ ID NO: 3662197 - RNA, 15 nt, Human
gccggaugugcuuuu

SEQ ID NO: 3662198 - RNA, 11 nt, Human
gccggcaaccc

SEQ ID NO: 3662199 - RNA, 21 nt, Human
gccggcaauaaaagcccagga

SEQ ID NO: 3662200 - RNA, 22 nt, Human
gccggcaauaaaagcccaggag

SEQ ID NO: 3662201 - RNA, 17 nt, Human
gccggcagccccagccu

SEQ ID NO: 3662202 - RNA, 20 nt, Human
gccggcagccccagccugcu

SEQ ID NO: 3662203 - RNA, 16 nt, Human
gccggcaggccuggac

SEQ ID NO: 3662204 - RNA, 15 nt, Human
gccggcauggcuggg

SEQ ID NO: 3662205 - RNA, 19 nt, Human
gccggccaauggaaaccuc

SEQ ID NO: 3662206 - RNA, 12 nt, Human
gccggccagccc

SEQ ID NO: 3662207 - RNA, 14 nt, Human
gccggccagccccu

SEQ ID NO: 3662208 - RNA, 13 nt, Human
gccggccaggugg

SEQ ID NO: 3662209 - RNA, 16 nt, Human
gccggcccgccucucc

SEQ ID NO: 3662210 - RNA, 13 nt, Human
gccggcccugggg

SEQ ID NO: 3662211 - RNA, 15 nt, Human
gccggcccugugugc

SEQ ID NO: 3662212 - RNA, 16 nt, Human
gccggcccugugugca

SEQ ID NO: 3662213 - RNA, 18 nt, Human
gccggccucucuggccuc

SEQ ID NO: 3662214 - RNA, 17 nt, Human
gccggcgagcccugugg

SEQ ID NO: 3662215 - RNA, 22 nt, Human
gccggcuggaaaugcugggcug

SEQ ID NO: 3662216 - RNA, 22 nt, Human
gccgggaacagacaacagaagu

SEQ ID NO: 3662217 - RNA, 18 nt, Human
gccgggaccacccugagc

SEQ ID NO: 3662218 - RNA, 18 nt, Human
gccgggaccccgagccug

SEQ ID NO: 3662219 - RNA, 23 nt, Human
gccgggaccccgagccuggcucc

SEQ ID NO: 3662220 - RNA, 12 nt, Human
gccgggcacagc

SEQ ID NO: 3662221 - RNA, 20 nt, Human
gccgggcgugguggugagug

SEQ ID NO: 3662222 - RNA, 21 nt, Human
gccgggcuacccgugagcccu

SEQ ID NO: 3662223 - RNA, 13 nt, Human
gccgggcugaggg

SEQ ID NO: 3662224 - RNA, 16 nt, Human
gccggggaacuggcca

SEQ ID NO: 3662225 - RNA, 22 nt, Human
gccggggaacuggccaagcuga

SEQ ID NO: 3662226 - RNA, 23 nt, Human
gccggggaagacuugaaagaaag

SEQ ID NO: 3662227 - RNA, 12 nt, Human
gccggggaagag

SEQ ID NO: 3662228 - RNA, 16 nt, Human
gccggggacagaggcc

SEQ ID NO: 3662229 - RNA, 23 nt, Human
gccggggacagaggccugcccgg

SEQ ID NO: 3662230 - RNA, 17 nt, Human
gccggggccugccuagc

SEQ ID NO: 3662231 - RNA, 23 nt, Human
gccggggccuuaucgggcuccag

SEQ ID NO: 3662232 - RNA, 22 nt, Human
gccgggguggagcaugggccug

SEQ ID NO: 3662233 - RNA, 22 nt, Human
gccggggugggguggcugcagc

SEQ ID NO: 3662234 - RNA, 16 nt, Human
gccgggugcgguggcu

SEQ ID NO: 3662235 - RNA, 19 nt, Human
gccgggugcgguggcucac

SEQ ID NO: 3662236 - RNA, 17 nt, Human
gccgggugcucagggcu

SEQ ID NO: 3662237 - RNA, 23 nt, Human
gccggguguccccaacagcgccc

SEQ ID NO: 3662238 - RNA, 18 nt, Human
gccggguucuagucuccu

SEQ ID NO: 3662239 - RNA, 17 nt, Human
gccgguaacuguccugu

SEQ ID NO: 3662240 - RNA, 24 nt, Human
gccggucgcccuuugcugcauggc

SEQ ID NO: 3662241 - RNA, 21 nt, Human
gccggugugccugacugccca

SEQ ID NO: 3662242 - RNA, 16 nt, Human
gccggugugggggccc

SEQ ID NO: 3662243 - RNA, 14 nt, Human
gccguaauuuaacu

SEQ ID NO: 3662244 - RNA, 12 nt, Human
gccguacaguuc

SEQ ID NO: 3662245 - RNA, 16 nt, Human
gccguaccccacccuc

SEQ ID NO: 3662246 - RNA, 18 nt, Human
gccguaccccacccucag

SEQ ID NO: 3662247 - RNA, 20 nt, Human
gccguaucuccggcucccag

SEQ ID NO: 3662248 - RNA, 16 nt, Human
gccgucaccaccaccc

SEQ ID NO: 3662249 - RNA, 17 nt, Human
gccgucaccaccacccc

SEQ ID NO: 3662250 - RNA, 17 nt, Human
gccgucagugcugugcu

SEQ ID NO: 3662251 - RNA, 23 nt, Human
gccguccuaaccucgggccugcu

SEQ ID NO: 3662252 - RNA, 17 nt, Human
gccgucuaccugagggg

SEQ ID NO: 3662253 - RNA, 20 nt, Human
gccgucuaccugaggggccu

SEQ ID NO: 3662254 - RNA, 11 nt, Human
gccgucucaac

SEQ ID NO: 3662255 - RNA, 23 nt, Human
gccgucuccaggggcugcuuccu

SEQ ID NO: 3662256 - RNA, 14 nt, Human
gccgugaccccugc

SEQ ID NO: 3662257 - RNA, 18 nt, Human
gccgugacgucugggugg

SEQ ID NO: 3662258 - RNA, 15 nt, Human
gccgugaugccuccc

SEQ ID NO: 3662259 - RNA, 16 nt, Human
gccgugcauuagcaca

SEQ ID NO: 3662260 - RNA, 14 nt, Human
gccgugccuucagc

SEQ ID NO: 3662261 - RNA, 17 nt, Human
gccgugccuucagcucu

SEQ ID NO: 3662262 - RNA, 18 nt, Human
gccgugcugggcagcccg

SEQ ID NO: 3662263 - RNA, 12 nt, Human
gccguggaugcg

SEQ ID NO: 3662264 - RNA, 23 nt, Human
gccguggauugcacguggccucu

SEQ ID NO: 3662265 - RNA, 18 nt, Human
gccguggcugcggcaccc

SEQ ID NO: 3662266 - RNA, 22 nt, Human
gccucaguaaguaucuggagga

SEQ ID NO: 3662267 - RNA, 15 nt, Human
gccucaguauauuua

SEQ ID NO: 3662268 - RNA, 18 nt, Human
gccucaguccuccccuca

SEQ ID NO: 3662269 - RNA, 24 nt, Human
gccucaguccuccccucacagccu

SEQ ID NO: 3662270 - RNA, 18 nt, Human
gccucagucucccucccu

SEQ ID NO: 3662271 - RNA, 15 nt, Human
gccucagugccacua

SEQ ID NO: 3662272 - RNA, 22 nt, Human
gccucaucuauaacaugcauuu

SEQ ID NO: 3662273 - RNA, 13 nt, Human
gccucauguggcu

SEQ ID NO: 3662274 - RNA, 19 nt, Human
gccucauguggcuggaaga

SEQ ID NO: 3662275 - RNA, 21 nt, Human
gccucauuacuuuaccacccc

SEQ ID NO: 3662276 - RNA, 22 nt, Human
gccuccaaaugccaacuugucc

SEQ ID NO: 3662277 - RNA, 20 nt, Human
gccuccaacccuagcaaaag

SEQ ID NO: 3662278 - RNA, 22 nt, Human
gccuccaaggaggggcuguaaa

SEQ ID NO: 3662279 - RNA, 21 nt, Human
gccuccacagcgagggcagcu

SEQ ID NO: 3662280 - RNA, 21 nt, Human
gccuccaccaccacuggccac

SEQ ID NO: 3662281 - RNA, 18 nt, Human
gccuccaccccccagaac

SEQ ID NO: 3662282 - RNA, 22 nt, Human
gccuccacccucugagcuuugc

SEQ ID NO: 3662283 - RNA, 16 nt, Human
gccuccacucccacuu

SEQ ID NO: 3662284 - RNA, 21 nt, Human
gccuccacucccacuucccug

SEQ ID NO: 3662285 - RNA, 12 nt, Human
gccuccagaacu

SEQ ID NO: 3662286 - RNA, 22 nt, Human
gccuccagaggggcucagguca

SEQ ID NO: 3662287 - RNA, 13 nt, Human
gccuccagggcug

SEQ ID NO: 3662288 - RNA, 19 nt, Human
gcccucaaacuugacucua

SEQ ID NO: 3662289 - RNA, 17 nt, Human
gcccucaaggccuccca

SEQ ID NO: 3662290 - RNA, 23 nt, Human
gcccucaaggccucccacaguga

SEQ ID NO: 3662291 - RNA, 14 nt, Human
gcccucaagucuuu

SEQ ID NO: 3662292 - RNA, 16 nt, Human
gcccucaauugugaaa

SEQ ID NO: 3662293 - RNA, 13 nt, Human
gcccucaccccug

SEQ ID NO: 3662294 - RNA, 19 nt, Human
gcccucaccccugcccugg

SEQ ID NO: 3662295 - RNA, 22 nt, Human
gcccucaccccugguucucauc

SEQ ID NO: 3662296 - RNA, 19 nt, Human
gcccucagaacccuuggcu

SEQ ID NO: 3662297 - RNA, 23 nt, Human
gcccucagaacccuuggcuugcc

SEQ ID NO: 3662298 - RNA, 17 nt, Human
gcccucagaugucccuu

SEQ ID NO: 3662299 - RNA, 22 nt, Human
gcccucaggucagggugaggau

SEQ ID NO: 3662300 - RNA, 19 nt, Human
gcccucauggccccucuga

SEQ ID NO: 3662301 - RNA, 18 nt, Human
gcccucauuacugggccu

SEQ ID NO: 3662302 - RNA, 19 nt, Human
gcccucauuacugggccuu

SEQ ID NO: 3662303 - RNA, 19 nt, Human
gcccuccaagaccuucucc

SEQ ID NO: 3662304 - RNA, 13 nt, Human
gcccuccacaccu

SEQ ID NO: 3662305 - RNA, 14 nt, Human
gcccuccacaccug

SEQ ID NO: 3662306 - RNA, 18 nt, Human
gcccuccacaccugcggc

SEQ ID NO: 3662307 - RNA, 14 nt, Human
gcccuccacagccg

SEQ ID NO: 3662308 - RNA, 23 nt, Human
gcccuccacagccgcagccuccc

SEQ ID NO: 3662309 - RNA, 13 nt, Human
gcccuccacugcc

SEQ ID NO: 3662310 - RNA, 16 nt, Human
gcccuccagagcccca

SEQ ID NO: 3662311 - RNA, 22 nt, Human
gcccuccaucccgacauggacc

SEQ ID NO: 3662312 - RNA, 20 nt, Human
gcccuccaucuaaacugccc

SEQ ID NO: 3662313 - RNA, 14 nt, Human
gcccucccacuuug

SEQ ID NO: 3662314 - RNA, 23 nt, Human
gcccucccacuuugcuguuccuu

SEQ ID NO: 3662315 - RNA, 12 nt, Human
gcccucccaggc

SEQ ID NO: 3662316 - RNA, 19 nt, Human
gcccuccccucucugcacc

SEQ ID NO: 3662317 - RNA, 18 nt, Human
gcccucccuguccuccuc

SEQ ID NO: 3662318 - RNA, 21 nt, Human
gcccucccuguuccccagaga

SEQ ID NO: 3662319 - RNA, 21 nt, Human
gcccucccuuggaaaccugcc

SEQ ID NO: 3662320 - RNA, 14 nt, Human
gcccuccgacagcc

SEQ ID NO: 3662321 - RNA, 17 nt, Human
gcccuccuacccugcgc

SEQ ID NO: 3662322 - RNA, 18 nt, Human
gcccuccuacccugcgcc

SEQ ID NO: 3662323 - RNA, 19 nt, Human
gcccuccuacccugcgccc

SEQ ID NO: 3662324 - RNA, 14 nt, Human
gcccuccucuccca

SEQ ID NO: 3662325 - RNA, 17 nt, Human
gcccuccucucccauug

SEQ ID NO: 3662326 - RNA, 12 nt, Human
gcccuccugugc

SEQ ID NO: 3662327 - RNA, 19 nt, Human
gcccuccugugcucagccc

SEQ ID NO: 3662328 - RNA, 22 nt, Human
gcccuccugugcucagcccuga

SEQ ID NO: 3662329 - RNA, 15 nt, Human
gcccuccuuguccac

SEQ ID NO: 3662330 - RNA, 17 nt, Human
gcccuccuuucugugcc

SEQ ID NO: 3662331 - RNA, 13 nt, Human
gcccucgacacuc

SEQ ID NO: 3662332 - RNA, 16 nt, Human
gcccucgcccccgccc

SEQ ID NO: 3662333 - RNA, 15 nt, Human
gcccucgggcccagc

SEQ ID NO: 3662334 - RNA, 16 nt, Human
gcccucgggcccagcc

SEQ ID NO: 3662335 - RNA, 16 nt, Human
gcccucguggccagcc

SEQ ID NO: 3662336 - RNA, 17 nt, Human
gcccucgugguggaaac

SEQ ID NO: 3662337 - RNA, 13 nt, Human
gcccucuaccccu

SEQ ID NO: 3662338 - RNA, 17 nt, Human
gcccucuagggagggac

SEQ ID NO: 3662339 - RNA, 20 nt, Human
gcccucucccacccucuucc

SEQ ID NO: 3662340 - RNA, 15 nt, Human
gcccucuccccaccc

SEQ ID NO: 3662341 - RNA, 22 nt, Human
gcccucuccccaccccuacccc

SEQ ID NO: 3662342 - RNA, 17 nt, Human
gcccucuccccucagcc

SEQ ID NO: 3662343 - RNA, 20 nt, Human
gcccucuccccucagccucu

SEQ ID NO: 3662344 - RNA, 17 nt, Human
gcccucuccccugcccc

SEQ ID NO: 3662345 - RNA, 22 nt, Human
gcccucucccucuaggcucugc

SEQ ID NO: 3662346 - RNA, 17 nt, Human
gcccucucccuuacccu

SEQ ID NO: 3662347 - RNA, 12 nt, Human
gcccucuccugg

SEQ ID NO: 3662348 - RNA, 15 nt, Human
gcccucuccugggca

SEQ ID NO: 3662349 - RNA, 18 nt, Human
gcccucuccugggcagcu

SEQ ID NO: 3662350 - RNA, 22 nt, Human
gcccucucugaaggaggccacc

SEQ ID NO: 3662351 - RNA, 11 nt, Human
gcccucucuuc

SEQ ID NO: 3662352 - RNA, 19 nt, Human
gcccucugcauccucugga

SEQ ID NO: 3662353 - RNA, 12 nt, Human
gcccucugccca

SEQ ID NO: 3662354 - RNA, 19 nt, Human
gcccucugcccacucccug

SEQ ID NO: 3662355 - RNA, 14 nt, Human
gcccucuggagugg

SEQ ID NO: 3662356 - RNA, 16 nt, Human
gcccucuggaguggcc

SEQ ID NO: 3662357 - RNA, 17 nt, Human
gcccucuggaguggcca

SEQ ID NO: 3662358 - RNA, 20 nt, Human
gcccucuggaguggccacua

SEQ ID NO: 3662359 - RNA, 22 nt, Human
gcccucuggaguggccacuaag

SEQ ID NO: 3662360 - RNA, 11 nt, Human
gcccucugggc

SEQ ID NO: 3662361 - RNA, 12 nt, Human
gcccucugggcu

SEQ ID NO: 3662362 - RNA, 16 nt, Human
gcccucugggcucuga

SEQ ID NO: 3662363 - RNA, 12 nt, Human
gcccucuguccu

SEQ ID NO: 3662364 - RNA, 14 nt, Human
gcccucuguccuga

SEQ ID NO: 3662365 - RNA, 15 nt, Human
gcccucuguccugac

SEQ ID NO: 3662366 - RNA, 14 nt, Human
gcccucuuccauca

SEQ ID NO: 3662367 - RNA, 21 nt, Human
gcccucuuccccucuaaugcu

SEQ ID NO: 3662368 - RNA, 14 nt, Human
gcccucuuccugac

SEQ ID NO: 3662369 - RNA, 18 nt, Human
gcccugaagaauggcgcc

SEQ ID NO: 3662370 - RNA, 12 nt, Human
gcccugaccucc

SEQ ID NO: 3662371 - RNA, 15 nt, Human
gcccugaccucccag

SEQ ID NO: 3662372 - RNA, 19 nt, Human
gcccugagaaagcccuguc

SEQ ID NO: 3662373 - RNA, 20 nt, Human
gcccugagaagcugcuccag

SEQ ID NO: 3662374 - RNA, 12 nt, Human
gcccugagccag

SEQ ID NO: 3662375 - RNA, 23 nt, Human
gcccugagccagggucuccagaa

SEQ ID NO: 3662376 - RNA, 16 nt, Human
gcccugagcucggugg

SEQ ID NO: 3662377 - RNA, 22 nt, Human
gcccugaggaaggaggggaagc

SEQ ID NO: 3662378 - RNA, 16 nt, Human
gcccugaggaggccuu

SEQ ID NO: 3662379 - RNA, 21 nt, Human
gcccugaggugaaagggagcu

SEQ ID NO: 3662380 - RNA, 22 nt, Human
gcccugaggugaaagggagcua

SEQ ID NO: 3662381 - RNA, 18 nt, Human
gcccugaguuccuagcca

SEQ ID NO: 3662382 - RNA, 18 nt, Human
gcccugcaaaaggacucu

SEQ ID NO: 3662383 - RNA, 21 nt, Human
gcccugcaccaugcugcuggg

SEQ ID NO: 3662384 - RNA, 16 nt, Human
gcccugcaccugugca

SEQ ID NO: 3662385 - RNA, 15 nt, Human
gcccugcacuguccu

SEQ ID NO: 3662386 - RNA, 21 nt, Human
gcccugcacuguccugcucca

SEQ ID NO: 3662387 - RNA, 22 nt, Human
gcccugcacuguccugcuccac

SEQ ID NO: 3662388 - RNA, 14 nt, Human
gcccugcagagggc

SEQ ID NO: 3662389 - RNA, 16 nt, Human
gcccugcagagggcac

SEQ ID NO: 3662390 - RNA, 18 nt, Human
gcccugcagagggcacag

SEQ ID NO: 3662391 - RNA, 21 nt, Human
gcccugcagaggggaaaccag

SEQ ID NO: 3662392 - RNA, 22 nt, Human
gcccugcaguguucgcuuggcu

SEQ ID NO: 3662393 - RNA, 19 nt, Human
gcccugcaugggccagccc

SEQ ID NO: 3662394 - RNA, 21 nt, Human
gcccugcaugggccagccccu

SEQ ID NO: 3662395 - RNA, 20 nt, Human
gcccugccaccugucugucu

SEQ ID NO: 3662396 - RNA, 13 nt, Human
gcccugccacuca

SEQ ID NO: 3662397 - RNA, 19 nt, Human
gcccugccaucuucccagc

SEQ ID NO: 3662398 - RNA, 13 nt, Human
gcccugcccacac

SEQ ID NO: 3662399 - RNA, 17 nt, Human
gcccugcccaccuggcc

SEQ ID NO: 3662400 - RNA, 20 nt, Human
gcccugcccucuccuuccuu

SEQ ID NO: 3662401 - RNA, 15 nt, Human
gcccugcccugagga

SEQ ID NO: 3662402 - RNA, 16 nt, Human
gcccugcccugguuuc

SEQ ID NO: 3662403 - RNA, 13 nt, Human
gcccugccuccuu

SEQ ID NO: 3662404 - RNA, 14 nt, Human
gcccugccuccuuu

SEQ ID NO: 3662405 - RNA, 16 nt, Human
gcccugccuccuuugu

SEQ ID NO: 3662406 - RNA, 17 nt, Human
gcccugccucuccgccc

SEQ ID NO: 3662407 - RNA, 15 nt, Human
gcccugccucuguuu

SEQ ID NO: 3662408 - RNA, 23 nt, Human
gcccugccugagggccccucugc

SEQ ID NO: 3662409 - RNA, 11 nt, Human
gcccugccugg

SEQ ID NO: 3662410 - RNA, 19 nt, Human
gccucgaggugccuucuuc

SEQ ID NO: 3662411 - RNA, 19 nt, Human
gccucgcaggccucccugc

SEQ ID NO: 3662412 - RNA, 21 nt, Human
gccucgcaggccucccugcca

SEQ ID NO: 3662413 - RNA, 14 nt, Human
gccucgccuggccu

SEQ ID NO: 3662414 - RNA, 15 nt, Human
gccucgccuggccug

SEQ ID NO: 3662415 - RNA, 19 nt, Human
gccucgcucuguuacccag

SEQ ID NO: 3662416 - RNA, 16 nt, Human
gccucggacuuagcug

SEQ ID NO: 3662417 - RNA, 21 nt, Human
gccucggacuuagcugggaga

SEQ ID NO: 3662418 - RNA, 17 nt, Human
gccucggagccucaucc

SEQ ID NO: 3662419 - RNA, 17 nt, Human
gccucggauccccuucc

SEQ ID NO: 3662420 - RNA, 16 nt, Human
gccucggcuggcuccc

SEQ ID NO: 3662421 - RNA, 22 nt, Human
gccucggcuggcuccccugcag

SEQ ID NO: 3662422 - RNA, 20 nt, Human
gccucggcuuuucucagcug

SEQ ID NO: 3662423 - RNA, 18 nt, Human
gccucgggaaccucacuc

SEQ ID NO: 3662424 - RNA, 13 nt, Human
gccucgggaccuc

SEQ ID NO: 3662425 - RNA, 15 nt, Human
gccucuaaccccagg

SEQ ID NO: 3662426 - RNA, 20 nt, Human
gccucuaaccccaggccccg

SEQ ID NO: 3662427 - RNA, 18 nt, Human
gccucuacugggaaggcu

SEQ ID NO: 3662428 - RNA, 11 nt, Human
gccucuagcug

SEQ ID NO: 3662429 - RNA, 15 nt, Human
gccucucagugcccu

SEQ ID NO: 3662430 - RNA, 19 nt, Human
gccucucagugcccuccag

SEQ ID NO: 3662431 - RNA, 15 nt, Human
gccucuccagccuca

SEQ ID NO: 3662432 - RNA, 16 nt, Human
gccucuccaggcacca

SEQ ID NO: 3662433 - RNA, 22 nt, Human
gccucuccauuugcucuucaga

SEQ ID NO: 3662434 - RNA, 17 nt, Human
gccucucccaggcaggg

SEQ ID NO: 3662435 - RNA, 18 nt, Human
gccucuccccagguccag

SEQ ID NO: 3662436 - RNA, 18 nt, Human
gccucucccgucagggcc

SEQ ID NO: 3662437 - RNA, 19 nt, Human
gccucucccgucagggccc

SEQ ID NO: 3662438 - RNA, 23 nt, Human
gccucucccuccuccaggaagcc

SEQ ID NO: 3662439 - RNA, 19 nt, Human
gccucucccucugguccca

SEQ ID NO: 3662440 - RNA, 20 nt, Human
gccucucccucuggucccac

SEQ ID NO: 3662441 - RNA, 24 nt, Human
gccucuccgccccugagcccacug

SEQ ID NO: 3662442 - RNA, 22 nt, Human
gccucuccuuguggccugggcc

SEQ ID NO: 3662443 - RNA, 12 nt, Human
gccucuccuuug

SEQ ID NO: 3662444 - RNA, 23 nt, Human
gccucuccuuuguauauuauuuc

SEQ ID NO: 3662445 - RNA, 13 nt, Human
gccucucucaggc

SEQ ID NO: 3662446 - RNA, 15 nt, Human
gccucucucccaguc

SEQ ID NO: 3662447 - RNA, 14 nt, Human
gccucucucccucu

SEQ ID NO: 3662448 - RNA, 10 nt, Human
gccucucugc

SEQ ID NO: 3662449 - RNA, 18 nt, Human
gccucucugcaggucccu

SEQ ID NO: 3662450 - RNA, 14 nt, Human
gccucucuggccuc

SEQ ID NO: 3662451 - RNA, 20 nt, Human
gccucucuggccucccaccc

SEQ ID NO: 3662452 - RNA, 18 nt, Human
gccucucuuccuauccca

SEQ ID NO: 3662453 - RNA, 19 nt, Human
gccucugaaguuggacagc

SEQ ID NO: 3662454 - RNA, 18 nt, Human
gccucugacacacagcuc

SEQ ID NO: 3662455 - RNA, 20 nt, Human
gccucugacacacagcucug

SEQ ID NO: 3662456 - RNA, 13 nt, Human
gccucugaccccu

SEQ ID NO: 3662457 - RNA, 17 nt, Human
gccucugaccccuccuc

SEQ ID NO: 3662458 - RNA, 16 nt, Human
gccucugagagcauca

SEQ ID NO: 3662459 - RNA, 12 nt, Human
gccucugaggcc

SEQ ID NO: 3662460 - RNA, 16 nt, Human
gccucugaggccagcc

SEQ ID NO: 3662461 - RNA, 22 nt, Human
gccucugaggccagccuggccu

SEQ ID NO: 3662462 - RNA, 15 nt, Human
gccucugauauggga

SEQ ID NO: 3662463 - RNA, 17 nt, Human
gccucugcaaaggaaau

SEQ ID NO: 3662464 - RNA, 14 nt, Human
gccucugcacuccc

SEQ ID NO: 3662465 - RNA, 12 nt, Human
gccucugcauuc

SEQ ID NO: 3662466 - RNA, 21 nt, Human
gccucugcccaggcacugcua

SEQ ID NO: 3662467 - RNA, 15 nt, Human
gccucugccccgucu

SEQ ID NO: 3662468 - RNA, 16 nt, Human
gccucugccccgucuc

SEQ ID NO: 3662469 - RNA, 13 nt, Human
gccucugccugug

SEQ ID NO: 3662470 - RNA, 16 nt, Human
gccucugccugugcac

SEQ ID NO: 3662471 - RNA, 21 nt, Human
gccucugcggagcacacuggc

SEQ ID NO: 3662472 - RNA, 24 nt, Human
gccucugcggagcacacuggcuca

SEQ ID NO: 3662473 - RNA, 20 nt, Human
gccucuggaggccucugggc

SEQ ID NO: 3662474 - RNA, 21 nt, Human
gccucuggaggccucugggcc

SEQ ID NO: 3662475 - RNA, 17 nt, Human
gccucuggauuguggga

SEQ ID NO: 3662476 - RNA, 19 nt, Human
gccucuggcuagaggccag

SEQ ID NO: 3662477 - RNA, 22 nt, Human
gccucuggcuagaggccagccc

SEQ ID NO: 3662478 - RNA, 19 nt, Human
gccucuggcucuacacaua

SEQ ID NO: 3662479 - RNA, 23 nt, Human
gccucugggggguggccaggccg

SEQ ID NO: 3662480 - RNA, 12 nt, Human
gccucuggguca

SEQ ID NO: 3662481 - RNA, 17 nt, Human
gccucuggucugggugc

SEQ ID NO: 3662482 - RNA, 16 nt, Human
gccucugucaggccuu

SEQ ID NO: 3662483 - RNA, 18 nt, Human
gccucugucaggccuuca

SEQ ID NO: 3662484 - RNA, 19 nt, Human
gccucugucauaucuucac

SEQ ID NO: 3662485 - RNA, 20 nt, Human
gccucuguccccuucucuca

SEQ ID NO: 3662486 - RNA, 21 nt, Human
gccucuguccccuucucucau

SEQ ID NO: 3662487 - RNA, 20 nt, Human
gccucugucuggcaaugcca

SEQ ID NO: 3662488 - RNA, 23 nt, Human
gccucugucuggcaaugccacag

SEQ ID NO: 3662489 - RNA, 18 nt, Human
gccucuuaaagcugccug

SEQ ID NO: 3662490 - RNA, 23 nt, Human
gccucuuaaagcugccuguaguu

SEQ ID NO: 3662491 - RNA, 20 nt, Human
gccucuuacgguaguuagga

SEQ ID NO: 3662492 - RNA, 19 nt, Human
gccucuuacuaauguaaaa

SEQ ID NO: 3662493 - RNA, 19 nt, Human
cugugcccagcucagucuu

SEQ ID NO: 3662494 - RNA, 12 nt, Human
cugugcccaugg

SEQ ID NO: 3662495 - RNA, 12 nt, Human
cugugcccccag

SEQ ID NO: 3662496 - RNA, 14 nt, Human
cugugcccccaggg

SEQ ID NO: 3662497 - RNA, 18 nt, Human
cugugccccuggccuugg

SEQ ID NO: 3662498 - RNA, 13 nt, Human
cugugccccuucc

SEQ ID NO: 3662499 - RNA, 18 nt, Human
cugugccccuuccgccac

SEQ ID NO: 3662500 - RNA, 19 nt, Human
cugugcccuaaaguguauu

SEQ ID NO: 3662501 - RNA, 13 nt, Human
cugugcccuggug

SEQ ID NO: 3662502 - RNA, 16 nt, Human
cugugccucagagacc

SEQ ID NO: 3662503 - RNA, 19 nt, Human
cugugccucagagaccagg

SEQ ID NO: 3662504 - RNA, 22 nt, Human
cugugccucagagaccagggcu

SEQ ID NO: 3662505 - RNA, 15 nt, Human
cugugccuccucacc

SEQ ID NO: 3662506 - RNA, 14 nt, Human
cugugccuccuccc

SEQ ID NO: 3662507 - RNA, 23 nt, Human
cugugccucgcuccccacucugc

SEQ ID NO: 3662508 - RNA, 17 nt, Human
cugugccucugccuguc

SEQ ID NO: 3662509 - RNA, 19 nt, Human
cugugccugaccuugagga

SEQ ID NO: 3662510 - RNA, 18 nt, Human
cugugccuggagcuccug

SEQ ID NO: 3662511 - RNA, 19 nt, Human
cugugccuucuuuugauua

SEQ ID NO: 3662512 - RNA, 23 nt, Human
cugugccuuguuuuuuguuuguu

SEQ ID NO: 3662513 - RNA, 19 nt, Human
cugugccuuugcaaaucag

SEQ ID NO: 3662514 - RNA, 20 nt, Human
cugugccuuuuuuauaucuu

SEQ ID NO: 3662515 - RNA, 19 nt, Human
cugugcgaucccacccgug

SEQ ID NO: 3662516 - RNA, 21 nt, Human
cugugcgcauaggccugcuuu

SEQ ID NO: 3662517 - RNA, 14 nt, Human
cugugcuacuuugc

SEQ ID NO: 3662518 - RNA, 18 nt, Human
cugugcuacuuugccuuu

SEQ ID NO: 3662519 - RNA, 22 nt, Human
cugugcuagggaaacuucccgu

SEQ ID NO: 3662520 - RNA, 19 nt, Human
cugugcucagcccugagga

SEQ ID NO: 3662521 - RNA, 23 nt, Human
cugugcucaggacucagaagccu

SEQ ID NO: 3662522 - RNA, 14 nt, Human
cugugcucccuggu

SEQ ID NO: 3662523 - RNA, 17 nt, Human
cugugcuccgugccucc

SEQ ID NO: 3662524 - RNA, 19 nt, Human
cugugcuccgugccuccac

SEQ ID NO: 3662525 - RNA, 22 nt, Human
cugugcuccgugccuccaccac

SEQ ID NO: 3662526 - RNA, 14 nt, Human
cugugcugacccuc

SEQ ID NO: 3662527 - RNA, 18 nt, Human
cugugcugcccugcccac

SEQ ID NO: 3662528 - RNA, 21 nt, Human
cugugcugcccugcccaccug

SEQ ID NO: 3662529 - RNA, 22 nt, Human
cugugcugcccugcccaccugg

SEQ ID NO: 3662530 - RNA, 20 nt, Human
cugugcugcuguuacuguua

SEQ ID NO: 3662531 - RNA, 14 nt, Human
cugugcuggccagc

SEQ ID NO: 3662532 - RNA, 19 nt, Human
cugugcugguguccugacc

SEQ ID NO: 3662533 - RNA, 23 nt, Human
cugugcugguguccugaccaccc

SEQ ID NO: 3662534 - RNA, 18 nt, Human
cugugcugugcccaaguu

SEQ ID NO: 3662535 - RNA, 19 nt, Human
cugugcuguuguuaugaug

SEQ ID NO: 3662536 - RNA, 19 nt, Human
cugugcuguuucaaaguuc

SEQ ID NO: 3662537 - RNA, 18 nt, Human
cugugcuucaauuaauaa

SEQ ID NO: 3662538 - RNA, 19 nt, Human
cugugcuucgggcccuucc

SEQ ID NO: 3662539 - RNA, 20 nt, Human
cugugcuucgggcccuuccc

SEQ ID NO: 3662540 - RNA, 18 nt, Human
cugugcuugaaggcccug

SEQ ID NO: 3662541 - RNA, 22 nt, Human
cugugcuugaaggcccugcuga

SEQ ID NO: 3662542 - RNA, 16 nt, Human
cugugcuuucuauugu

SEQ ID NO: 3662543 - RNA, 19 nt, Human
cugugcuuugacucaccug

SEQ ID NO: 3662544 - RNA, 19 nt, Human
cuguggaaaagaaacacgc

SEQ ID NO: 3662545 - RNA, 13 nt, Human
cuguggaaagugu

SEQ ID NO: 3662546 - RNA, 16 nt, Human
cuguggaaaguguaaa

SEQ ID NO: 3662547 - RNA, 18 nt, Human
cuguggaaaguguaaagc

SEQ ID NO: 3662548 - RNA, 23 nt, Human
cuguggaaaguguaaagcauucc

SEQ ID NO: 3662549 - RNA, 22 nt, Human
cuguggaacccagcaguucugu

SEQ ID NO: 3662550 - RNA, 18 nt, Human
cuguggaacuaauaaaua

SEQ ID NO: 3662551 - RNA, 18 nt, Human
cuguggaaggcagagaaa

SEQ ID NO: 3662552 - RNA, 21 nt, Human
cuguggaaugagugugcaugg

SEQ ID NO: 3662553 - RNA, 18 nt, Human
gccugagcccagggaggc

SEQ ID NO: 3662554 - RNA, 16 nt, Human
gccugagccuggccag

SEQ ID NO: 3662555 - RNA, 22 nt, Human
gccugagcgcuccugccgcaga

SEQ ID NO: 3662556 - RNA, 14 nt, Human
gccugagcucacuc

SEQ ID NO: 3662557 - RNA, 12 nt, Human
gccugagcuggg

SEQ ID NO: 3662558 - RNA, 13 nt, Human
gccugaggagcag

SEQ ID NO: 3662559 - RNA, 17 nt, Human
gccugaggaugagcugg

SEQ ID NO: 3662560 - RNA, 21 nt, Human
gccugaggaugagcuggaagg

SEQ ID NO: 3662561 - RNA, 13 nt, Human
gccugaggcugag

SEQ ID NO: 3662562 - RNA, 20 nt, Human
gccugagggaaaggccagca

SEQ ID NO: 3662563 - RNA, 22 nt, Human
gccugagggccccucugcccag

SEQ ID NO: 3662564 - RNA, 16 nt, Human
gccugaggggcagccu

SEQ ID NO: 3662565 - RNA, 14 nt, Human
gccugaggguggag

SEQ ID NO: 3662566 - RNA, 15 nt, Human
gccugaggguggaga

SEQ ID NO: 3662567 - RNA, 19 nt, Human
gccugaggucaucggcgug

SEQ ID NO: 3662568 - RNA, 16 nt, Human
gccugaggucuggcug

SEQ ID NO: 3662569 - RNA, 13 nt, Human
gccugaggucugu

SEQ ID NO: 3662570 - RNA, 21 nt, Human
gccugaguagaaaggccuuua

SEQ ID NO: 3662571 - RNA, 12 nt, Human
gccugagucagg

SEQ ID NO: 3662572 - RNA, 19 nt, Human
gccugagucagggcccaga

SEQ ID NO: 3662573 - RNA, 20 nt, Human
gccugagucagggcccagag

SEQ ID NO: 3662574 - RNA, 18 nt, Human
gccugagucgugaccugc

SEQ ID NO: 3662575 - RNA, 13 nt, Human
gccugagucuccu

SEQ ID NO: 3662576 - RNA, 20 nt, Human
gccugagugacagagcaaga

SEQ ID NO: 3662577 - RNA, 15 nt, Human
gccugauaagcuuca

SEQ ID NO: 3662578 - RNA, 16 nt, Human
gccugauccuccaaca

SEQ ID NO: 3662579 - RNA, 17 nt, Human
gccugaucucuuccugu

SEQ ID NO: 3662580 - RNA, 20 nt, Human
gccugaugagauuuuuaaaa

SEQ ID NO: 3662581 - RNA, 14 nt, Human
gccugaugcucccu

SEQ ID NO: 3662582 - RNA, 14 nt, Human
gccugauggaccug

SEQ ID NO: 3662583 - RNA, 20 nt, Human
gccugauugccaagcucagg

SEQ ID NO: 3662584 - RNA, 15 nt, Human
gccugauuuguuccu

SEQ ID NO: 3662585 - RNA, 16 nt, Human
gccugcaaacgcugcc

SEQ ID NO: 3662586 - RNA, 19 nt, Human
gccugcaaacgcugccugc

SEQ ID NO: 3662587 - RNA, 14 nt, Human
gccugcaaacuggg

SEQ ID NO: 3662588 - RNA, 16 nt, Human
gccugcaaacugggaa

SEQ ID NO: 3662589 - RNA, 13 nt, Human
gccugcaagggag

SEQ ID NO: 3662590 - RNA, 15 nt, Human
gccugcaagggagug

SEQ ID NO: 3662591 - RNA, 16 nt, Human
gccugcacaauaaaaa

SEQ ID NO: 3662592 - RNA, 14 nt, Human
gccugcaccaggag

SEQ ID NO: 3662593 - RNA, 15 nt, Human
gccugcaccaggaga

SEQ ID NO: 3662594 - RNA, 22 nt, Human
gccugcacuugggggcucagca

SEQ ID NO: 3662595 - RNA, 23 nt, Human
gccugcacuugggggcucagcaa

SEQ ID NO: 3662596 - RNA, 19 nt, Human
gccugcagaaguaagccuc

SEQ ID NO: 3662597 - RNA, 12 nt, Human
gccugcagagcu

SEQ ID NO: 3662598 - RNA, 15 nt, Human
gccugcagagcugcg

SEQ ID NO: 3662599 - RNA, 19 nt, Human
gccugcagaggucugugcu

SEQ ID NO: 3662600 - RNA, 11 nt, Human
gccugcagccc

SEQ ID NO: 3662601 - RNA, 14 nt, Human
gccugcaggaccug

SEQ ID NO: 3662602 - RNA, 16 nt, Human
gccugcaggaccugcc

SEQ ID NO: 3662603 - RNA, 18 nt, Human
gccugcaggaccugccug

SEQ ID NO: 3662604 - RNA, 19 nt, Human
gccugcaggaccugccugu

SEQ ID NO: 3662605 - RNA, 21 nt, Human
gccugcaggaccugccuguag

SEQ ID NO: 3662606 - RNA, 13 nt, Human
gccugcaggaucu

SEQ ID NO: 3662607 - RNA, 12 nt, Human
gccugcagggaa

SEQ ID NO: 3662608 - RNA, 16 nt, Human
gccugcagggccaugg

SEQ ID NO: 3662609 - RNA, 20 nt, Human
gccugcaggguggugcuggg

SEQ ID NO: 3662610 - RNA, 23 nt, Human
gccugcauaggaguuuggaggaa

SEQ ID NO: 3662611 - RNA, 21 nt, Human
gccugcauccauucuccugag

SEQ ID NO: 3662612 - RNA, 21 nt, Human
gccugccaccuccccccacaa

SEQ ID NO: 3662613 - RNA, 12 nt, Human
gccugccaccug

SEQ ID NO: 3662614 - RNA, 17 nt, Human
gccugccaccuggaccc

SEQ ID NO: 3662615 - RNA, 23 nt, Human
gccugccaccuggaccccugcau

SEQ ID NO: 3662616 - RNA, 15 nt, Human
gccugccacucaggc

SEQ ID NO: 3662617 - RNA, 13 nt, Human
gccugccaggagg

SEQ ID NO: 3662618 - RNA, 16 nt, Human
gccugccaguccuagc

SEQ ID NO: 3662619 - RNA, 23 nt, Human
gccugccaguccuagcugcacag

SEQ ID NO: 3662620 - RNA, 20 nt, Human
gccugcccaagcccaggcca

SEQ ID NO: 3662621 - RNA, 14 nt, Human
gccugcccacccgu

SEQ ID NO: 3662622 - RNA, 13 nt, Human
gccugcccaccug

SEQ ID NO: 3662623 - RNA, 15 nt, Human
gccugcccaccugcc

SEQ ID NO: 3662624 - RNA, 21 nt, Human
gccugcccaccugccuggccg

SEQ ID NO: 3662625 - RNA, 15 nt, Human
gccugcccaggcccc

SEQ ID NO: 3662626 - RNA, 19 nt, Human
gccugcccaguugcacuca

SEQ ID NO: 3662627 - RNA, 18 nt, Human
gccugcccccaccccauu

SEQ ID NO: 3662628 - RNA, 15 nt, Human
gccugcccgcacagc

SEQ ID NO: 3662629 - RNA, 18 nt, Human
gccugcccgucucucucc

SEQ ID NO: 3662630 - RNA, 20 nt, Human
gccugcccucauggccccuc

SEQ ID NO: 3662631 - RNA, 19 nt, Human
gccugcccuccccagagca

SEQ ID NO: 3662632 - RNA, 14 nt, Human
gccugcccugguga

SEQ ID NO: 3662633 - RNA, 13 nt, Human
gccugcccuguca

SEQ ID NO: 3662634 - RNA, 20 nt, Human
gccugcccuuuguccuccug

SEQ ID NO: 3662635 - RNA, 22 nt, Human
gccugcccuuuguccuccugcu

SEQ ID NO: 3662636 - RNA, 12 nt, Human
gccugccgagca

SEQ ID NO: 3662637 - RNA, 14 nt, Human
gccugccgagcaac

SEQ ID NO: 3662638 - RNA, 19 nt, Human
gccugccgagcaaccgugg

SEQ ID NO: 3662639 - RNA, 17 nt, Human
gccugccgggcugaggg

SEQ ID NO: 3662640 - RNA, 20 nt, Human
gccugccgggcugagggccu

SEQ ID NO: 3662641 - RNA, 21 nt, Human
gccugccuagcacucacaugc

SEQ ID NO: 3662642 - RNA, 22 nt, Human
gccugccuagcacucacaugcu

SEQ ID NO: 3662643 - RNA, 16 nt, Human
gccugccucuucucua

SEQ ID NO: 3662644 - RNA, 13 nt, Human
gccugccuggagc

SEQ ID NO: 3662645 - RNA, 14 nt, Human
gccugccuggagcg

SEQ ID NO: 3662646 - RNA, 14 nt, Human
gccugccuggcccc

SEQ ID NO: 3662647 - RNA, 20 nt, Human
gccugccuuaagugaggaaa

SEQ ID NO: 3662648 - RNA, 22 nt, Human
gccugccuugcccacuccugcu

SEQ ID NO: 3662649 - RNA, 23 nt, Human
gccugcgacccugggggcacagg

SEQ ID NO: 3662650 - RNA, 20 nt, Human
gccugcgcccaccccgcucu

SEQ ID NO: 3662651 - RNA, 16 nt, Human
gccugcggucaaggcc

SEQ ID NO: 3662652 - RNA, 19 nt, Human
gccugcggucaaggccagc

SEQ ID NO: 3662653 - RNA, 13 nt, Human
gccugcgucuucc

SEQ ID NO: 3662654 - RNA, 14 nt, Human
gccugcgucuuccg

SEQ ID NO: 3662655 - RNA, 15 nt, Human
gccugcgucuuccgc

SEQ ID NO: 3662656 - RNA, 18 nt, Human
gccugcgucuuccgcccc

SEQ ID NO: 3662657 - RNA, 23 nt, Human
gccugcgucuuccgccccugccu

SEQ ID NO: 3662658 - RNA, 20 nt, Human
gccugcguucuugugacaga

SEQ ID NO: 3662659 - RNA, 16 nt, Human
cuguguacaaagaaau

SEQ ID NO: 3662660 - RNA, 17 nt, Human
cuguguacaccucugga

SEQ ID NO: 3662661 - RNA, 19 nt, Human
cuguguacauaacugaaaa

SEQ ID NO: 3662662 - RNA, 12 nt, Human
cuguguacugug

SEQ ID NO: 3662663 - RNA, 14 nt, Human
cuguguacuguguc

SEQ ID NO: 3662664 - RNA, 19 nt, Human
cuguguagcugugaccugc

SEQ ID NO: 3662665 - RNA, 22 nt, Human
cuguguagcugugaccugcuga

SEQ ID NO: 3662666 - RNA, 17 nt, Human
cuguguauauuauuugg

SEQ ID NO: 3662667 - RNA, 15 nt, Human
cuguguauauuugau

SEQ ID NO: 3662668 - RNA, 18 nt, Human
cuguguauauuugauuua

SEQ ID NO: 3662669 - RNA, 15 nt, Human
cuguguauggaaaaa

SEQ ID NO: 3662670 - RNA, 18 nt, Human
cuguguauguacauauau

SEQ ID NO: 3662671 - RNA, 17 nt, Human
cuguguauuuaauugua

SEQ ID NO: 3662672 - RNA, 20 nt, Human
cuguguauuuaauuguaaac

SEQ ID NO: 3662673 - RNA, 23 nt, Human
cuguguauuuuuuaaagcuacaa

SEQ ID NO: 3662674 - RNA, 14 nt, Human
cugugucacccagg

SEQ ID NO: 3662675 - RNA, 21 nt, Human
cugugucacuggcugccucca

SEQ ID NO: 3662676 - RNA, 20 nt, Human
cugugucaguuuauguuuug

SEQ ID NO: 3662677 - RNA, 16 nt, Human
cuguguccaacuccag

SEQ ID NO: 3662678 - RNA, 18 nt, Human
cuguguccaugcgcucag

SEQ ID NO: 3662679 - RNA, 13 nt, Human
cugugucccauga

SEQ ID NO: 3662680 - RNA, 17 nt, Human
cugugucccaugaccca

SEQ ID NO: 3662681 - RNA, 19 nt, Human
cugugucccaugacccacc

SEQ ID NO: 3662682 - RNA, 21 nt, Human
cugugucccaugacccacccc

SEQ ID NO: 3662683 - RNA, 16 nt, Human
cugugucccucucucu

SEQ ID NO: 3662684 - RNA, 19 nt, Human
cuguguccuggugcucucu

SEQ ID NO: 3662685 - RNA, 20 nt, Human
cuguguccuggugcucucug

SEQ ID NO: 3662686 - RNA, 20 nt, Human
cuguguccugguuagcagag

SEQ ID NO: 3662687 - RNA, 15 nt, Human
cuguguccuucccug

SEQ ID NO: 3662688 - RNA, 14 nt, Human
cuguguccuugcac

SEQ ID NO: 3662689 - RNA, 13 nt, Human
cugugucuaaacu

SEQ ID NO: 3662690 - RNA, 15 nt, Human
cugugucuaaacugc

SEQ ID NO: 3662691 - RNA, 13 nt, Human
cugugucuaagau

SEQ ID NO: 3662692 - RNA, 16 nt, Human
cugugucuaagauucu

SEQ ID NO: 3662693 - RNA, 14 nt, Human
cugugucucccuuc

SEQ ID NO: 3662694 - RNA, 19 nt, Human
cugugucucccuucauccu

SEQ ID NO: 3662695 - RNA, 20 nt, Human
cugugucuugcaauggcagc

SEQ ID NO: 3662696 - RNA, 19 nt, Human
cugugucuuuaaaugcugc

SEQ ID NO: 3662697 - RNA, 21 nt, Human
cugugugaaauaccagugugg

SEQ ID NO: 3662698 - RNA, 21 nt, Human
cuuacuauucauuaaauguuu

SEQ ID NO: 3662699 - RNA, 23 nt, Human
cuuacuauucauuaaauguuuga

SEQ ID NO: 3662700 - RNA, 20 nt, Human
cuuacuccugugggagccuc

SEQ ID NO: 3662701 - RNA, 15 nt, Human
cuuacugauuaacuc

SEQ ID NO: 3662702 - RNA, 17 nt, Human
cuuacugauuauuuucu

SEQ ID NO: 3662703 - RNA, 21 nt, Human
cuuacugauuuuuaaguuauu

SEQ ID NO: 3662704 - RNA, 17 nt, Human
cuuacugcgacuaaacu

SEQ ID NO: 3662705 - RNA, 16 nt, Human
cuuacuguagccucag

SEQ ID NO: 3662706 - RNA, 17 nt, Human
cuuacuguagccucaga

SEQ ID NO: 3662707 - RNA, 16 nt, Human
cuuacuguggaggaag

SEQ ID NO: 3662708 - RNA, 18 nt, Human
cuuacuguggaggaagga

SEQ ID NO: 3662709 - RNA, 21 nt, Human
cuuacuguuucugucaggaga

SEQ ID NO: 3662710 - RNA, 23 nt, Human
cuuacuuaaacccagcucccuuc

SEQ ID NO: 3662711 - RNA, 16 nt, Human
cuuacuuacuaaaaua

SEQ ID NO: 3662712 - RNA, 19 nt, Human
cuuacuuacuaaaauauau

SEQ ID NO: 3662713 - RNA, 14 nt, Human
cuuacuucuugccc

SEQ ID NO: 3662714 - RNA, 15 nt, Human
cuuacuucuugcccu

SEQ ID NO: 3662715 - RNA, 20 nt, Human
cuuacuuuccuuuccccagc

SEQ ID NO: 3662716 - RNA, 23 nt, Human
cuuacuuuccuuuccccagccca

SEQ ID NO: 3662717 - RNA, 14 nt, Human
cuuacuuuguaaau

SEQ ID NO: 3662718 - RNA, 13 nt, Human
cuuacuuuguaug

SEQ ID NO: 3662719 - RNA, 19 nt, Human
cuuacuuuguaugauauuc

SEQ ID NO: 3662720 - RNA, 16 nt, Human
cuuacuuuuuauauau

SEQ ID NO: 3662721 - RNA, 11 nt, Human
cuuagaaaacc

SEQ ID NO: 3662722 - RNA, 24 nt, Human
cuuagaaaaccagcucagcacugc

SEQ ID NO: 3662723 - RNA, 12 nt, Human
gcgacagagcag

SEQ ID NO: 3662724 - RNA, 19 nt, Human
gcgacagagcgagagucug

SEQ ID NO: 3662725 - RNA, 23 nt, Human
gcgacagagcgagagucugucuc

SEQ ID NO: 3662726 - RNA, 12 nt, Human
gcgacagugaga

SEQ ID NO: 3662727 - RNA, 17 nt, Human
gcgacauagcccauccc

SEQ ID NO: 3662728 - RNA, 21 nt, Human
gcgacauagcccaucccugcc

SEQ ID NO: 3662729 - RNA, 17 nt, Human
gcgaccauguggccaca

SEQ ID NO: 3662730 - RNA, 17 nt, Human
gcgaccccaucugccca

SEQ ID NO: 3662731 - RNA, 19 nt, Human
gcgaccccaucugcccagg

SEQ ID NO: 3662732 - RNA, 15 nt, Human
gcgaccuuggccgca

SEQ ID NO: 3662733 - RNA, 17 nt, Human
gcgacggagagaaaaaa

SEQ ID NO: 3662734 - RNA, 19 nt, Human
gcgacuccguuggccacuc

SEQ ID NO: 3662735 - RNA, 20 nt, Human
gcgacuccguuggccacucc

SEQ ID NO: 3662736 - RNA, 12 nt, Human
gcgacuuucugc

SEQ ID NO: 3662737 - RNA, 16 nt, Human
gcgacuuucugccugg

SEQ ID NO: 3662738 - RNA, 20 nt, Human
gcgagaaccuaaguuucagu

SEQ ID NO: 3662739 - RNA, 12 nt, Human
gcgagagaugug

SEQ ID NO: 3662740 - RNA, 13 nt, Human
gcgagagaugugu

SEQ ID NO: 3662741 - RNA, 14 nt, Human
gcgagagaugugug

SEQ ID NO: 3662742 - RNA, 16 nt, Human
gcgagagauguguguu

SEQ ID NO: 3662743 - RNA, 15 nt, Human
gcgagaggcagagaa

SEQ ID NO: 3662744 - RNA, 15 nt, Human
gcgagagucccugca

SEQ ID NO: 3662745 - RNA, 23 nt, Human
gcgagauggggugggguggagaa

SEQ ID NO: 3662746 - RNA, 15 nt, Human
gcgagcaucccccaa

SEQ ID NO: 3662747 - RNA, 24 nt, Human
gcgagccauuugucccaagugcca

SEQ ID NO: 3662748 - RNA, 21 nt, Human
gcgagcuaugaucgcgccacu

SEQ ID NO: 3662749 - RNA, 20 nt, Human
gcgaggagaugcuccuuggg

SEQ ID NO: 3662750 - RNA, 15 nt, Human
gcgaggaggcuccag

SEQ ID NO: 3662751 - RNA, 18 nt, Human
gcgaggaggcuccagagg

SEQ ID NO: 3662752 - RNA, 13 nt, Human
gcgaggcagagga

SEQ ID NO: 3662753 - RNA, 12 nt, Human
gcgaggcaggcc

SEQ ID NO: 3662754 - RNA, 17 nt, Human
gcgagggcagcugcuau

SEQ ID NO: 3662755 - RNA, 19 nt, Human
gcgaggucaacagagaagg

SEQ ID NO: 3662756 - RNA, 22 nt, Human
gcgaggucaacagagaaggcag

SEQ ID NO: 3662757 - RNA, 17 nt, Human
gcgaguuguggaaagcc

SEQ ID NO: 3662758 - RNA, 14 nt, Human
gcgauauacagaug

SEQ ID NO: 3662759 - RNA, 15 nt, Human
gcgaucccacacagg

SEQ ID NO: 3662760 - RNA, 16 nt, Human
gcgaucucuccuggcc

SEQ ID NO: 3662761 - RNA, 18 nt, Human
gcgaucucuccuggccua

SEQ ID NO: 3662762 - RNA, 22 nt, Human
gcgaucuggguucacugcaacc

SEQ ID NO: 3662763 - RNA, 19 nt, Human
gcgaugaauuuggagacuc

SEQ ID NO: 3662764 - RNA, 21 nt, Human
gcgauguggaacugcugccac

SEQ ID NO: 3662765 - RNA, 21 nt, Human
gcgauguuucaggaggcugga

SEQ ID NO: 3662766 - RNA, 21 nt, Human
gcgauucucuugccucagcuu

SEQ ID NO: 3662767 - RNA, 19 nt, Human
gcgauucuggauaaagcca

SEQ ID NO: 3662768 - RNA, 22 nt, Human
gcgauucuucugcuucagccuc

SEQ ID NO: 3662769 - RNA, 13 nt, Human
gcgcaaaacugaa

SEQ ID NO: 3662770 - RNA, 20 nt, Human
gcgcaagauagauuuggaau

SEQ ID NO: 3662771 - RNA, 19 nt, Human
gcgcaagggaggcccagcg

SEQ ID NO: 3662772 - RNA, 11 nt, Human
gcgcacacaca

SEQ ID NO: 3662773 - RNA, 15 nt, Human
gcgcacacacacaca

SEQ ID NO: 3662774 - RNA, 13 nt, Human
gcgcacccucccc

SEQ ID NO: 3662775 - RNA, 18 nt, Human
gcgcacccuccccucccg

SEQ ID NO: 3662776 - RNA, 22 nt, Human
gcgcacugugacccccagcucc

SEQ ID NO: 3662777 - RNA, 21 nt, Human
gcgcagcauauucaggaagcu

SEQ ID NO: 3662778 - RNA, 16 nt, Human
gcgcagcccgcggcaa

SEQ ID NO: 3662779 - RNA, 17 nt, Human
gcgcaggcuggcccugc

SEQ ID NO: 3662780 - RNA, 19 nt, Human
gcgcaggugggcuggacuu

SEQ ID NO: 3662781 - RNA, 16 nt, Human
gcgcagugccucuggu

SEQ ID NO: 3662782 - RNA, 23 nt, Human
gcgcauaggccugcuuugucucc

SEQ ID NO: 3662783 - RNA, 11 nt, Human
gcgcaucuaac

SEQ ID NO: 3662784 - RNA, 13 nt, Human
gcgccacaggacc

SEQ ID NO: 3662785 - RNA, 22 nt, Human
gcgccacuacacuccagccuga

SEQ ID NO: 3662786 - RNA, 24 nt, Human
gcgccacuacacuccagccugagc

SEQ ID NO: 3662787 - RNA, 23 nt, Human
gcgccacucgcuucccccauagc

SEQ ID NO: 3662788 - RNA, 11 nt, Human
gcgccacugcu

SEQ ID NO: 3662789 - RNA, 23 nt, Human
gcgccacugugcuccagccuggg

SEQ ID NO: 3662790 - RNA, 21 nt, Human
gcgccagcacagaaacagagg

SEQ ID NO: 3662791 - RNA, 22 nt, Human
gcgccaggauggaacacggcca

SEQ ID NO: 3662792 - RNA, 14 nt, Human
gcgccaggauggcg

SEQ ID NO: 3662793 - RNA, 15 nt, Human
gcgccaggcugacca

SEQ ID NO: 3662794 - RNA, 20 nt, Human
gcgccaggcugaccacagca

SEQ ID NO: 3662795 - RNA, 19 nt, Human
gcgccaguguaauccccca

SEQ ID NO: 3662796 - RNA, 12 nt, Human
gcgcccaccucc

SEQ ID NO: 3662797 - RNA, 13 nt, Human
gcgcccaccuccc

SEQ ID NO: 3662798 - RNA, 15 nt, Human
gcgcccagcuccuga

SEQ ID NO: 3662799 - RNA, 22 nt, Human
gcgccccaacccguggaggcug

SEQ ID NO: 3662800 - RNA, 13 nt, Human
gcgcccccagugu

SEQ ID NO: 3662801 - RNA, 15 nt, Human
gcgccccccucccag

SEQ ID NO: 3662802 - RNA, 16 nt, Human
gcgccccccucccaga

SEQ ID NO: 3662803 - RNA, 22 nt, Human
gcgccccgaaaggucaccucac

SEQ ID NO: 3662804 - RNA, 13 nt, Human
gcgccccuucccc

SEQ ID NO: 3662805 - RNA, 17 nt, Human
gcgcccgccccugcagc

SEQ ID NO: 3662806 - RNA, 13 nt, Human
gcgcccgcugggc

SEQ ID NO: 3662807 - RNA, 16 nt, Human
gcgcccgcugggcuga

SEQ ID NO: 3662808 - RNA, 16 nt, Human
gcgcccucuguccuga

SEQ ID NO: 3662809 - RNA, 13 nt, Human
gcgcccuggaagc

SEQ ID NO: 3662810 - RNA, 14 nt, Human
gcgcccuggaagcc

SEQ ID NO: 3662811 - RNA, 14 nt, Human
gcgcccuggccccc

SEQ ID NO: 3662812 - RNA, 12 nt, Human
gcgcccuuccuc

SEQ ID NO: 3662813 - RNA, 16 nt, Human
gcgcccuuggcuucug

SEQ ID NO: 3662814 - RNA, 12 nt, Human
gcgcccuuuccc

SEQ ID NO: 3662815 - RNA, 18 nt, Human
gcgcccuuuccccgacgc

SEQ ID NO: 3662816 - RNA, 17 nt, Human
gcgccggcgggcgggcc

SEQ ID NO: 3662817 - RNA, 16 nt, Human
gcgccgugcugggcag

SEQ ID NO: 3662818 - RNA, 17 nt, Human
gcgccgugcugggcagc

SEQ ID NO: 3662819 - RNA, 18 nt, Human
gcgccuacaggagugagc

SEQ ID NO: 3662820 - RNA, 21 nt, Human
gcgccucccuccaccccagga

SEQ ID NO: 3662821 - RNA, 23 nt, Human
gcgccucccuccaccccaggacg

SEQ ID NO: 3662822 - RNA, 15 nt, Human
gcgccuccuuccuug

SEQ ID NO: 3662823 - RNA, 12 nt, Human
gcgccucugcaa

SEQ ID NO: 3662824 - RNA, 16 nt, Human
gcgccugccccuccca

SEQ ID NO: 3662825 - RNA, 17 nt, Human
gcgccuggccuccaggc

SEQ ID NO: 3662826 - RNA, 22 nt, Human
gcgccuggccuccaggcccguc

SEQ ID NO: 3662827 - RNA, 12 nt, Human
gcgccugugacc

SEQ ID NO: 3662828 - RNA, 16 nt, Human
gcgccugugcacacac

SEQ ID NO: 3662829 - RNA, 21 nt, Human
gcgccuuaaggauguucuagc

SEQ ID NO: 3662830 - RNA, 14 nt, Human
gcgcgccacucgcu

SEQ ID NO: 3662831 - RNA, 17 nt, Human
gcgcgcucuucgcgccc

SEQ ID NO: 3662832 - RNA, 23 nt, Human
gcgcgcucuucgcgcccgccccu

SEQ ID NO: 3662833 - RNA, 13 nt, Human
gcgcggccagccc

SEQ ID NO: 3662834 - RNA, 14 nt, Human
gcgcggccagcccc

SEQ ID NO: 3662835 - RNA, 12 nt, Human
gcgcggcugcuu

SEQ ID NO: 3662836 - RNA, 12 nt, Human
gcgcggcuggga

SEQ ID NO: 3662837 - RNA, 13 nt, Human
gcgcgguggcuca

SEQ ID NO: 3662838 - RNA, 15 nt, Human
gcgcgguggcucacg

SEQ ID NO: 3662839 - RNA, 22 nt, Human
gcgcuaauucaaggaauuucuu

SEQ ID NO: 3662840 - RNA, 13 nt, Human
gcgcuacccacuu

SEQ ID NO: 3662841 - RNA, 18 nt, Human
gcgcuagcacagcucccu

SEQ ID NO: 3662842 - RNA, 21 nt, Human
gcgcuagcacagcucccuucu

SEQ ID NO: 3662843 - RNA, 18 nt, Human
gcugccugagcaccuccc

SEQ ID NO: 3662844 - RNA, 22 nt, Human
gcugccugagcaccucccagcc

SEQ ID NO: 3662845 - RNA, 22 nt, Human
gcugccugcccgcacagcagcc

SEQ ID NO: 3662846 - RNA, 23 nt, Human
gcugccugcccgcacagcagccu

SEQ ID NO: 3662847 - RNA, 11 nt, Human
gcugccugccu

SEQ ID NO: 3662848 - RNA, 13 nt, Human
gcugccuggaccc

SEQ ID NO: 3662849 - RNA, 16 nt, Human
gcugccuggagcccca

SEQ ID NO: 3662850 - RNA, 17 nt, Human
gcugccuggagccccac

SEQ ID NO: 3662851 - RNA, 21 nt, Human
gcugccuggcccccagcugug

SEQ ID NO: 3662852 - RNA, 18 nt, Human
gcugccugggaucccuca

SEQ ID NO: 3662853 - RNA, 18 nt, Human
gcugccugggcuguuggc

SEQ ID NO: 3662854 - RNA, 13 nt, Human
gcugccuguaguu

SEQ ID NO: 3662855 - RNA, 15 nt, Human
gcugccuguaguuag

SEQ ID NO: 3662856 - RNA, 16 nt, Human
gcugccuguccccaug

SEQ ID NO: 3662857 - RNA, 13 nt, Human
gcugccugugugg

SEQ ID NO: 3662858 - RNA, 13 nt, Human
gcugccuguucag

SEQ ID NO: 3662859 - RNA, 20 nt, Human
gcugccuuagcuucaggaac

SEQ ID NO: 3662860 - RNA, 21 nt, Human
gcugccuucccaugaaucugu

SEQ ID NO: 3662861 - RNA, 12 nt, Human
gcugccuucccu

SEQ ID NO: 3662862 - RNA, 16 nt, Human
gcugccuucuggauuc

SEQ ID NO: 3662863 - RNA, 21 nt, Human
gcugccuuggcucagacaugu

SEQ ID NO: 3662864 - RNA, 20 nt, Human
gcugccuuuagucgcugagg

SEQ ID NO: 3662865 - RNA, 15 nt, Human
gcugccuuuggacuu

SEQ ID NO: 3662866 - RNA, 15 nt, Human
gcugcgcccugggcu

SEQ ID NO: 3662867 - RNA, 19 nt, Human
gcugcgcccuuaccuuccc

SEQ ID NO: 3662868 - RNA, 15 nt, Human
gcugcgcuugcuuuu

SEQ ID NO: 3662869 - RNA, 17 nt, Human
gcugcgcuugcuuuucu

SEQ ID NO: 3662870 - RNA, 17 nt, Human
gcugcggcguacaggcu

SEQ ID NO: 3662871 - RNA, 17 nt, Human
gcugcgguccacccagg

SEQ ID NO: 3662872 - RNA, 18 nt, Human
gcugcgguccacccagga

SEQ ID NO: 3662873 - RNA, 21 nt, Human
gcugcgguccacccaggagcc

SEQ ID NO: 3662874 - RNA, 17 nt, Human
gcugcgucauuacaggg

SEQ ID NO: 3662875 - RNA, 13 nt, Human
gcugcgucuccca

SEQ ID NO: 3662876 - RNA, 16 nt, Human
gcugcgucuggagggg

SEQ ID NO: 3662877 - RNA, 16 nt, Human
gcugcgugccccugcu

SEQ ID NO: 3662878 - RNA, 18 nt, Human
gcugcuaaucuucagggc

SEQ ID NO: 3662879 - RNA, 16 nt, Human
gcugcuaauucuuugc

SEQ ID NO: 3662880 - RNA, 17 nt, Human
gcugcuaauucuuugca

SEQ ID NO: 3662881 - RNA, 15 nt, Human
gcugcuacaaagaag

SEQ ID NO: 3662882 - RNA, 20 nt, Human
gcugcuacaaagaagacaug

SEQ ID NO: 3662883 - RNA, 21 nt, Human
gcugcuacaaagaagacaugu

SEQ ID NO: 3662884 - RNA, 14 nt, Human
gcugcuacccuccc

SEQ ID NO: 3662885 - RNA, 22 nt, Human
gcugcuaccguugacuuccagg

SEQ ID NO: 3662886 - RNA, 14 nt, Human
gcugcuacuuauau

SEQ ID NO: 3662887 - RNA, 10 nt, Human
gcugcuagaa

SEQ ID NO: 3662888 - RNA, 13 nt, Human
gcugcuagaacuu

SEQ ID NO: 3662889 - RNA, 18 nt, Human
gcugcuagaacuuuuuua

SEQ ID NO: 3662890 - RNA, 21 nt, Human
gcugcuagaacuuuuuuaaau

SEQ ID NO: 3662891 - RNA, 16 nt, Human
gcugcuagagccagca

SEQ ID NO: 3662892 - RNA, 17 nt, Human
gcugcuauagccugggg

SEQ ID NO: 3662893 - RNA, 23 nt, Human
gcugcuauccccaucucccugcc

SEQ ID NO: 3662894 - RNA, 21 nt, Human
gcugcucacuaccuccucagg

SEQ ID NO: 3662895 - RNA, 16 nt, Human
gcugcuccaggccugc

SEQ ID NO: 3662896 - RNA, 22 nt, Human
gcugcuccaggccugcagcagg

SEQ ID NO: 3662897 - RNA, 11 nt, Human
gcugcucccac

SEQ ID NO: 3662898 - RNA, 13 nt, Human
gcugcuccccacg

SEQ ID NO: 3662899 - RNA, 12 nt, Human
gcugcuccccuc

SEQ ID NO: 3662900 - RNA, 13 nt, Human
gcugcucccucag

SEQ ID NO: 3662901 - RNA, 16 nt, Human
gcugcucccucagacu

SEQ ID NO: 3662902 - RNA, 19 nt, Human
gcugcucccucagacuggg

SEQ ID NO: 3662903 - RNA, 20 nt, Human
gcugcuccgaggacccagga

SEQ ID NO: 3662904 - RNA, 11 nt, Human
gcugcuccucc

SEQ ID NO: 3662905 - RNA, 15 nt, Human
gcugcuccuccaggg

SEQ ID NO: 3662906 - RNA, 23 nt, Human
gcugcuccuccagggccacgugc

SEQ ID NO: 3662907 - RNA, 20 nt, Human
gcugcuccuuagcugccaag

SEQ ID NO: 3662908 - RNA, 22 nt, Human
gcugcucugaauuaguccuugc

SEQ ID NO: 3662909 - RNA, 13 nt, Human
gcugcucugccca

SEQ ID NO: 3662910 - RNA, 14 nt, Human
gcugcucugcccca

SEQ ID NO: 3662911 - RNA, 14 nt, Human
gcugcucuggaaaa

SEQ ID NO: 3662912 - RNA, 22 nt, Human
gcugcucuucaucccauuccag

SEQ ID NO: 3662913 - RNA, 23 nt, Human
gcugcucuugaacuccugaccuc

SEQ ID NO: 3662914 - RNA, 18 nt, Human
gcugcucuuggcuggacc

SEQ ID NO: 3662915 - RNA, 22 nt, Human
gcugcucuuggcuggacccagc

SEQ ID NO: 3662916 - RNA, 23 nt, Human
gcugcucuuggcuggacccagcc

SEQ ID NO: 3662917 - RNA, 16 nt, Human
gcugcugaagcugccu

SEQ ID NO: 3662918 - RNA, 23 nt, Human
gcugcugaagcugccugcuuuuc

SEQ ID NO: 3662919 - RNA, 12 nt, Human
gcugcugaaggc

SEQ ID NO: 3662920 - RNA, 13 nt, Human
gcugcugaaggcu

SEQ ID NO: 3662921 - RNA, 21 nt, Human
gcugcugaaggcucgagcaug

SEQ ID NO: 3662922 - RNA, 10 nt, Human
gcugcugacc

SEQ ID NO: 3662923 - RNA, 11 nt, Human
gcugcugacca

SEQ ID NO: 3662924 - RNA, 21 nt, Human
gcugcugaccaauugugcugc

SEQ ID NO: 3662925 - RNA, 18 nt, Human
gcugcugaccuccacagc

SEQ ID NO: 3662926 - RNA, 14 nt, Human
gcugcugagaaccu

SEQ ID NO: 3662927 - RNA, 17 nt, Human
gcugcugagaaccuggc

SEQ ID NO: 3662928 - RNA, 21 nt, Human
gcugcugagaaccuggccuuc

SEQ ID NO: 3662929 - RNA, 22 nt, Human
gcugcugagaaccuggccuuca

SEQ ID NO: 3662930 - RNA, 14 nt, Human
gcugcugagccgca

SEQ ID NO: 3662931 - RNA, 13 nt, Human
gcuauuuugugaa

SEQ ID NO: 3662932 - RNA, 15 nt, Human
gcuauuuuuauggaa

SEQ ID NO: 3662933 - RNA, 12 nt, Human
gcuauuuuuccc

SEQ ID NO: 3662934 - RNA, 16 nt, Human
gcuauuuuucccccug

SEQ ID NO: 3662935 - RNA, 21 nt, Human
gcuauuuuucuaacuacaaag

SEQ ID NO: 3662936 - RNA, 13 nt, Human
gcucaaaacuuuc

SEQ ID NO: 3662937 - RNA, 12 nt, Human
gcucaaaaucuu

SEQ ID NO: 3662938 - RNA, 14 nt, Human
gcucaaaggcacag

SEQ ID NO: 3662939 - RNA, 22 nt, Human
gcucaaagguuuggaaggagca

SEQ ID NO: 3662940 - RNA, 14 nt, Human
gcucaaauaaaaau

SEQ ID NO: 3662941 - RNA, 14 nt, Human
gcucaaaucuauuc

SEQ ID NO: 3662942 - RNA, 17 nt, Human
gcucaaaucuauucaga

SEQ ID NO: 3662943 - RNA, 18 nt, Human
gcucaaaucuauucagac

SEQ ID NO: 3662944 - RNA, 23 nt, Human
gcucaaaucuauucagacaagca

SEQ ID NO: 3662945 - RNA, 16 nt, Human
gcucaacaauaaaaca

SEQ ID NO: 3662946 - RNA, 14 nt, Human
gcucaacuuucugu

SEQ ID NO: 3662947 - RNA, 23 nt, Human
gcucaagcaauccuccugaguga

SEQ ID NO: 3662948 - RNA, 15 nt, Human
gcucaagcagcgacc

SEQ ID NO: 3662949 - RNA, 21 nt, Human
gcucaagcagcgaccgccccc

SEQ ID NO: 3662950 - RNA, 22 nt, Human
gcucaagcagcgaccgcccccu

SEQ ID NO: 3662951 - RNA, 23 nt, Human
gcucaagcagcgaccgcccccuc

SEQ ID NO: 3662952 - RNA, 18 nt, Human
gcucaagcgauucuccug

SEQ ID NO: 3662953 - RNA, 23 nt, Human
gcucaaggaaagggggucccagu

SEQ ID NO: 3662954 - RNA, 14 nt, Human
gcucaaggccagcu

SEQ ID NO: 3662955 - RNA, 19 nt, Human
gcucaaguccucuuuucug

SEQ ID NO: 3662956 - RNA, 22 nt, Human
gcucaaguccucuuuucugaga

SEQ ID NO: 3662957 - RNA, 17 nt, Human
gcucaagucuucccuga

SEQ ID NO: 3662958 - RNA, 20 nt, Human
gcucaaugagcauguuuaga

SEQ ID NO: 3662959 - RNA, 20 nt, Human
gcucacaaggcagcaaggcc

SEQ ID NO: 3662960 - RNA, 21 nt, Human
gcucacaaggcagcaaggccc

SEQ ID NO: 3662961 - RNA, 22 nt, Human
gcucacaaggcagcaaggcccg

SEQ ID NO: 3662962 - RNA, 13 nt, Human
gcucacacaccug

SEQ ID NO: 3662963 - RNA, 15 nt, Human
gcucacaccaaauuu

SEQ ID NO: 3662964 - RNA, 22 nt, Human
gcucacaccccauugguggacu

SEQ ID NO: 3662965 - RNA, 14 nt, Human
gcucacacugagaa

SEQ ID NO: 3662966 - RNA, 22 nt, Human
gcucacacugagaauguaagaa

SEQ ID NO: 3662967 - RNA, 18 nt, Human
gcucacagaacccuugga

SEQ ID NO: 3662968 - RNA, 22 nt, Human
gcucacagaacccuuggagcca

SEQ ID NO: 3662969 - RNA, 17 nt, Human
gcucacagacuggagac

SEQ ID NO: 3662970 - RNA, 15 nt, Human
gcucacaguuccucg

SEQ ID NO: 3662971 - RNA, 17 nt, Human
gcucacaguuccucgcc

SEQ ID NO: 3662972 - RNA, 13 nt, Human
gcucaccagcccc

SEQ ID NO: 3662973 - RNA, 23 nt, Human
gcucaccagccccagugcccaca

SEQ ID NO: 3662974 - RNA, 17 nt, Human
gcucaccccccacacuc

SEQ ID NO: 3662975 - RNA, 19 nt, Human
gcucaccccccacacucac

SEQ ID NO: 3662976 - RNA, 13 nt, Human
gcucaccuagagc

SEQ ID NO: 3662977 - RNA, 16 nt, Human
gcucaccuagagccag

SEQ ID NO: 3662978 - RNA, 17 nt, Human
gcucaccuagagccaga

SEQ ID NO: 3662979 - RNA, 19 nt, Human
gcucaccuagagccagacc

SEQ ID NO: 3662980 - RNA, 11 nt, Human
gcucaccuggg

SEQ ID NO: 3662981 - RNA, 22 nt, Human
gcucaccuggggugugggaggc

SEQ ID NO: 3662982 - RNA, 15 nt, Human
gcucaccuguugcuu

SEQ ID NO: 3662983 - RNA, 19 nt, Human
gcucaccuguugcuuacaa

SEQ ID NO: 3662984 - RNA, 22 nt, Human
gcucacgccuaugaucccagca

SEQ ID NO: 3662985 - RNA, 21 nt, Human
gcucacgccuguaaucccagc

SEQ ID NO: 3662986 - RNA, 20 nt, Human
gcucacguccugagaaagcu

SEQ ID NO: 3662987 - RNA, 13 nt, Human
gcucacgugugug

SEQ ID NO: 3662988 - RNA, 17 nt, Human
gcugggauuacaggugu

SEQ ID NO: 3662989 - RNA, 19 nt, Human
gcugggcaacaugccugcu

SEQ ID NO: 3662990 - RNA, 15 nt, Human
gcugggcacugcucu

SEQ ID NO: 3662991 - RNA, 14 nt, Human
gcugggcacuuccc

SEQ ID NO: 3662992 - RNA, 18 nt, Human
gcugggcacuucccugcu

SEQ ID NO: 3662993 - RNA, 13 nt, Human
gcugggcagagga

SEQ ID NO: 3662994 - RNA, 17 nt, Human
gcugggcagaggaaagc

SEQ ID NO: 3662995 - RNA, 19 nt, Human
gcugggcagaggaaagcaa

SEQ ID NO: 3662996 - RNA, 12 nt, Human
gcugggcagccc

SEQ ID NO: 3662997 - RNA, 13 nt, Human
gcugggcagcccg

SEQ ID NO: 3662998 - RNA, 13 nt, Human
gcugggcagcuac

SEQ ID NO: 3662999 - RNA, 12 nt, Human
gcugggcagcug

SEQ ID NO: 3663000 - RNA, 14 nt, Human
gcugggcaguuuuu

SEQ ID NO: 3663001 - RNA, 19 nt, Human
gcugggccauguccaaaga

SEQ ID NO: 3663002 - RNA, 20 nt, Human
gcugggccauguccaaagag

SEQ ID NO: 3663003 - RNA, 13 nt, Human
gcugggcccagag

SEQ ID NO: 3663004 - RNA, 19 nt, Human
gcugggcccagaggcacag

SEQ ID NO: 3663005 - RNA, 20 nt, Human
gcugggcccagaggcacagc

SEQ ID NO: 3663006 - RNA, 14 nt, Human
gcugggccccagcc

SEQ ID NO: 3663007 - RNA, 16 nt, Human
gcugggccccagccca

SEQ ID NO: 3663008 - RNA, 18 nt, Human
gcugggccccccagcuca

SEQ ID NO: 3663009 - RNA, 21 nt, Human
gcugggccccccagcucaggg

SEQ ID NO: 3663010 - RNA, 13 nt, Human
gcugggccccugc

SEQ ID NO: 3663011 - RNA, 18 nt, Human
gcugggccccugccucuc

SEQ ID NO: 3663012 - RNA, 22 nt, Human
gcugggccccugccucucugca

SEQ ID NO: 3663013 - RNA, 23 nt, Human
gcugggccccugccucucugcag

SEQ ID NO: 3663014 - RNA, 15 nt, Human
gcugggcccucucuu

SEQ ID NO: 3663015 - RNA, 17 nt, Human
gcugggccgggacccag

SEQ ID NO: 3663016 - RNA, 13 nt, Human
gcugggcucccgu

SEQ ID NO: 3663017 - RNA, 20 nt, Human
gcugggcucccuucccaccu

SEQ ID NO: 3663018 - RNA, 14 nt, Human
gcugggcucuccac

SEQ ID NO: 3663019 - RNA, 15 nt, Human
gcugggcucuccacc

SEQ ID NO: 3663020 - RNA, 21 nt, Human
gcugggcucugccacccuacc

SEQ ID NO: 3663021 - RNA, 22 nt, Human
gcugggcugagccccuacccca

SEQ ID NO: 3663022 - RNA, 17 nt, Human
gcugggcuggggccuga

SEQ ID NO: 3663023 - RNA, 14 nt, Human
gcugggcugggugc

SEQ ID NO: 3663024 - RNA, 19 nt, Human
gcugggcuucaguggcagc

SEQ ID NO: 3663025 - RNA, 21 nt, Human
gcugggcuucaguggcagcug

SEQ ID NO: 3663026 - RNA, 13 nt, Human
gcuggggaagaau

SEQ ID NO: 3663027 - RNA, 14 nt, Human
gcuggggaagacag

SEQ ID NO: 3663028 - RNA, 15 nt, Human
gcuggggaagacagu

SEQ ID NO: 3663029 - RNA, 12 nt, Human
gcuggggaagga

SEQ ID NO: 3663030 - RNA, 16 nt, Human
gcuggggaccugguac

SEQ ID NO: 3663031 - RNA, 23 nt, Human
gcuggggaccugguacccuccug

SEQ ID NO: 3663032 - RNA, 22 nt, Human
gcuggggacggggggccccagu

SEQ ID NO: 3663033 - RNA, 23 nt, Human
gcuggggacggggggccccaguc

SEQ ID NO: 3663034 - RNA, 15 nt, Human
gcuggggagaggaaa

SEQ ID NO: 3663035 - RNA, 13 nt, Human
gcuggggaggagc

SEQ ID NO: 3663036 - RNA, 21 nt, Human
gcuggggauccccgccuggcc

SEQ ID NO: 3663037 - RNA, 23 nt, Human
gcuggggauccccgccuggccag

SEQ ID NO: 3663038 - RNA, 14 nt, Human
gcuggggaugucuc

SEQ ID NO: 3663039 - RNA, 14 nt, Human
gcuggggccucaga

SEQ ID NO: 3663040 - RNA, 16 nt, Human
gcuggggccucagacg

SEQ ID NO: 3663041 - RNA, 17 nt, Human
gcuggggccucagacga

SEQ ID NO: 3663042 - RNA, 15 nt, Human
gcuggggccugaugg

SEQ ID NO: 3663043 - RNA, 19 nt, Human
gcuggggccugauggggag

SEQ ID NO: 3663044 - RNA, 15 nt, Human
gcuggggccugggac

SEQ ID NO: 3663045 - RNA, 22 nt, Human
gcugggggaaugagcccagaga

SEQ ID NO: 3663046 - RNA, 18 nt, Human
gcugggggaugggccuga

SEQ ID NO: 3663047 - RNA, 19 nt, Human
gcugggggaugggccugag

SEQ ID NO: 3663048 - RNA, 23 nt, Human
gcugggggcaggagggcccuacc

SEQ ID NO: 3663049 - RNA, 14 nt, Human
gcugggggccucac

SEQ ID NO: 3663050 - RNA, 15 nt, Human
gcugggggugggcca

SEQ ID NO: 3663051 - RNA, 19 nt, Human
gcugggggugggccaggcu

SEQ ID NO: 3663052 - RNA, 17 nt, Human
gcuggggucccagcagc

SEQ ID NO: 3663053 - RNA, 13 nt, Human
gcuggggugcagg

SEQ ID NO: 3663054 - RNA, 20 nt, Human
gcuggggugcagggaugugg

SEQ ID NO: 3663055 - RNA, 20 nt, Human
gcugggguggccuguguggc

SEQ ID NO: 3663056 - RNA, 21 nt, Human
gcuggguaaacuguggaugau

SEQ ID NO: 3663057 - RNA, 15 nt, Human
gcugggucaggcagg

SEQ ID NO: 3663058 - RNA, 14 nt, Human
gcugggucgcccug

SEQ ID NO: 3663059 - RNA, 15 nt, Human
gcugggugcccacag

SEQ ID NO: 3663060 - RNA, 17 nt, Human
gcugggugcccacagcc

SEQ ID NO: 3663061 - RNA, 21 nt, Human
gcugggugcgaccccaucugc

SEQ ID NO: 3663062 - RNA, 23 nt, Human
gcugggugcgaccccaucugccc

SEQ ID NO: 3663063 - RNA, 21 nt, Human
gcuggguggcaccagcagccu

SEQ ID NO: 3663064 - RNA, 13 nt, Human
gcuggguggccca

SEQ ID NO: 3663065 - RNA, 14 nt, Human
gcuggguggcccau

SEQ ID NO: 3663066 - RNA, 22 nt, Human
gcuggguggcccauccccccuc

SEQ ID NO: 3663067 - RNA, 15 nt, Human
gcuggguguggcgca

SEQ ID NO: 3663068 - RNA, 20 nt, Human
gcuggguucuacccaggugc

SEQ ID NO: 3663069 - RNA, 15 nt, Human
gcuggguucugaucc

SEQ ID NO: 3663070 - RNA, 14 nt, Human
gcuggguuggaggg

SEQ ID NO: 3663071 - RNA, 21 nt, Human
gcuggguuggaggguguccca

SEQ ID NO: 3663072 - RNA, 16 nt, Human
gcuggguuggugcaca

SEQ ID NO: 3663073 - RNA, 17 nt, Human
gcuggguuggugcacag

SEQ ID NO: 3663074 - RNA, 18 nt, Human
gcugguagagauggagga

SEQ ID NO: 3663075 - RNA, 21 nt, Human
gcugguagagauggaggagga

SEQ ID NO: 3663076 - RNA, 19 nt, Human
gcugguaggcauuccagcu

SEQ ID NO: 3663077 - RNA, 13 nt, Human
gcuggucacagcc

SEQ ID NO: 3663078 - RNA, 17 nt, Human
gcuggucacagccuccu

SEQ ID NO: 3663079 - RNA, 18 nt, Human
gcuggucacugccaugga

SEQ ID NO: 3663080 - RNA, 20 nt, Human
gcuggucccacucaguccau

SEQ ID NO: 3663081 - RNA, 15 nt, Human
gcugguccgugggac

SEQ ID NO: 3663082 - RNA, 19 nt, Human
gcugguccuauggccucau

SEQ ID NO: 3663083 - RNA, 20 nt, Human
gcugguccucauucaaaggg

SEQ ID NO: 3663084 - RNA, 23 nt, Human
gcuggucguaaacaucucagaga

SEQ ID NO: 3663085 - RNA, 19 nt, Human
gcuggucucgaacuccuga

SEQ ID NO: 3663086 - RNA, 22 nt, Human
gcuggucucgaacuccugaccu

SEQ ID NO: 3663087 - RNA, 23 nt, Human
gcuggucucgaacuccugaccuu

SEQ ID NO: 3663088 - RNA, 18 nt, Human
gcuggugagugaugcggc

SEQ ID NO: 3663089 - RNA, 19 nt, Human
gcuggugauggagguuuca

SEQ ID NO: 3663090 - RNA, 18 nt, Human
gcuggugcauuacagaga

SEQ ID NO: 3663091 - RNA, 22 nt, Human
gcuggugccagccuuccucugc

SEQ ID NO: 3663092 - RNA, 20 nt, Human
gcuggugcggcuggccaugg

SEQ ID NO: 3663093 - RNA, 19 nt, Human
gcuggugcuguggccaggg

SEQ ID NO: 3663094 - RNA, 21 nt, Human
gcugguggacccagggaacag

SEQ ID NO: 3663095 - RNA, 21 nt, Human
gcugguggagaacucuggcuu

SEQ ID NO: 3663096 - RNA, 12 nt, Human
gcuccaaacccu

SEQ ID NO: 3663097 - RNA, 13 nt, Human
gcuccaaacccuc

SEQ ID NO: 3663098 - RNA, 16 nt, Human
gcuccaaacccucgag

SEQ ID NO: 3663099 - RNA, 19 nt, Human
gcuccaaacccucgaggcg

SEQ ID NO: 3663100 - RNA, 15 nt, Human
gcuccaaaccuucac

SEQ ID NO: 3663101 - RNA, 19 nt, Human
gcuccaaagucauaauugc

SEQ ID NO: 3663102 - RNA, 16 nt, Human
gcuccaaaugcagcuu

SEQ ID NO: 3663103 - RNA, 21 nt, Human
gcuccaacuccaacauccacu

SEQ ID NO: 3663104 - RNA, 18 nt, Human
gcuccaagaccuaggcuc

SEQ ID NO: 3663105 - RNA, 22 nt, Human
gcuccaagaccuguugguucca

SEQ ID NO: 3663106 - RNA, 15 nt, Human
gcuccaagauucuag

SEQ ID NO: 3663107 - RNA, 17 nt, Human
gcuccaagauucuagau

SEQ ID NO: 3663108 - RNA, 16 nt, Human
gcuccaagccccaucu

SEQ ID NO: 3663109 - RNA, 13 nt, Human
gcuccaagcuccc

SEQ ID NO: 3663110 - RNA, 17 nt, Human
gcuccaagcucccaggc

SEQ ID NO: 3663111 - RNA, 21 nt, Human
gcuccaagcucccaggcauuc

SEQ ID NO: 3663112 - RNA, 23 nt, Human
gcuccaaggggaaucagaacuca

SEQ ID NO: 3663113 - RNA, 23 nt, Human
gcuccacacccucucccaggacc

SEQ ID NO: 3663114 - RNA, 18 nt, Human
gcuccaccagcaucaccu

SEQ ID NO: 3663115 - RNA, 15 nt, Human
gcuccaccccacuca

SEQ ID NO: 3663116 - RNA, 19 nt, Human
gcuccaccccacucacaga

SEQ ID NO: 3663117 - RNA, 23 nt, Human
gcuccaccccgcaagcaccaucc

SEQ ID NO: 3663118 - RNA, 11 nt, Human
gcuccacccuu

SEQ ID NO: 3663119 - RNA, 13 nt, Human
gcuccacccuugg

SEQ ID NO: 3663120 - RNA, 15 nt, Human
gcuccacccuuggcc

SEQ ID NO: 3663121 - RNA, 23 nt, Human
gcuccacccuuggccugucucau

SEQ ID NO: 3663122 - RNA, 19 nt, Human
gcuccacgucugcgccgcc

SEQ ID NO: 3663123 - RNA, 20 nt, Human
gcuccacucugcuucucuga

SEQ ID NO: 3663124 - RNA, 12 nt, Human
gcuccacuguca

SEQ ID NO: 3663125 - RNA, 15 nt, Human
gcuccacuuggucug

SEQ ID NO: 3663126 - RNA, 19 nt, Human
gcuccacuuggucugugag

SEQ ID NO: 3663127 - RNA, 20 nt, Human
gcuccacuuggucugugaga

SEQ ID NO: 3663128 - RNA, 19 nt, Human
gcuccagaauuuggaaauc

SEQ ID NO: 3663129 - RNA, 18 nt, Human
gcuccagacacaugucca

SEQ ID NO: 3663130 - RNA, 14 nt, Human
gcuccagacaggga

SEQ ID NO: 3663131 - RNA, 21 nt, Human
gcuccagaccugauccuggag

SEQ ID NO: 3663132 - RNA, 17 nt, Human
gcuuuuugaaaugaaau

SEQ ID NO: 3663133 - RNA, 18 nt, Human
gcuuuuugaaaugaaauu

SEQ ID NO: 3663134 - RNA, 12 nt, Human
gcuuuuuggaaa

SEQ ID NO: 3663135 - RNA, 15 nt, Human
gcuuuuuuaucaugu

SEQ ID NO: 3663136 - RNA, 20 nt, Human
gcuuuuuuauuuuuuauaca

SEQ ID NO: 3663137 - RNA, 20 nt, Human
gcuuuuuuccaaaacaaaaa

SEQ ID NO: 3663138 - RNA, 22 nt, Human
gcuuuuuucucugauacagaaa

SEQ ID NO: 3663139 - RNA, 20 nt, Human
gcuuuuuuugaaacuuugag

SEQ ID NO: 3663140 - RNA, 21 nt, Human
gcuuuuuuuguguguauuugc

SEQ ID NO: 3663141 - RNA, 17 nt, Human
ggaaaaaaaaaaaagag

SEQ ID NO: 3663142 - RNA, 17 nt, Human
ggaaaaaaaugaaugag

SEQ ID NO: 3663143 - RNA, 21 nt, Human
ggaaaaacaucugaaagccac

SEQ ID NO: 3663144 - RNA, 19 nt, Human
ggaaaaaccacccccaaau

SEQ ID NO: 3663145 - RNA, 20 nt, Human
ggaaaaagaaaauaaagaca

SEQ ID NO: 3663146 - RNA, 17 nt, Human
ggaaaaagcacaagaag

SEQ ID NO: 3663147 - RNA, 13 nt, Human
ggaaaaauaaaca

SEQ ID NO: 3663148 - RNA, 11 nt, Human
ggaaaaauauu

SEQ ID NO: 3663149 - RNA, 15 nt, Human
ggaaaaauccagaaa

SEQ ID NO: 3663150 - RNA, 15 nt, Human
ggaaaaauguaggag

SEQ ID NO: 3663151 - RNA, 11 nt, Human
gcugaaauuga

SEQ ID NO: 3663152 - RNA, 19 nt, Human
gcugaacacauuucuuuuu

SEQ ID NO: 3663153 - RNA, 23 nt, Human
gcugaacagaugaccccugccca

SEQ ID NO: 3663154 - RNA, 13 nt, Human
gcugaacagugga

SEQ ID NO: 3663155 - RNA, 15 nt, Human
gcugaacauugcaua

SEQ ID NO: 3663156 - RNA, 17 nt, Human
gcugaacccugugcugg

SEQ ID NO: 3663157 - RNA, 20 nt, Human
gcugaacccugugcuggugu

SEQ ID NO: 3663158 - RNA, 21 nt, Human
gcugaacccugugcugguguc

SEQ ID NO: 3663159 - RNA, 16 nt, Human
gcugaacggggagaaa

SEQ ID NO: 3663160 - RNA, 15 nt, Human
gcugaacucaugaga

SEQ ID NO: 3663161 - RNA, 18 nt, Human
gcugaagaauuauuuuuu

SEQ ID NO: 3663162 - RNA, 16 nt, Human
gcugaagaauugaaaa

SEQ ID NO: 3663163 - RNA, 18 nt, Human
gcugaagaugaaucaaug

SEQ ID NO: 3663164 - RNA, 13 nt, Human
gcugaagcugccu

SEQ ID NO: 3663165 - RNA, 17 nt, Human
gcugaagcugccugcuu

SEQ ID NO: 3663166 - RNA, 22 nt, Human
gcugaagcuuauuaaugcuaag

SEQ ID NO: 3663167 - RNA, 19 nt, Human
gcugaaggaaaccagugca

SEQ ID NO: 3663168 - RNA, 21 nt, Human
gcugaaggacugugacaggca

SEQ ID NO: 3663169 - RNA, 20 nt, Human
gcugaagugcauccaaaggu

SEQ ID NO: 3663170 - RNA, 17 nt, Human
gcugaauaaaugucuuu

SEQ ID NO: 3663171 - RNA, 22 nt, Human
gcugaauacagaggcaacugca

SEQ ID NO: 3663172 - RNA, 19 nt, Human
gcugaaugccuccuguggg

SEQ ID NO: 3663173 - RNA, 18 nt, Human
gcugaauguauguaaaua

SEQ ID NO: 3663174 - RNA, 20 nt, Human
gcugaauguugggacugcua

SEQ ID NO: 3663175 - RNA, 17 nt, Human
gcugaauguuuuucuaa

SEQ ID NO: 3663176 - RNA, 14 nt, Human
gcugaauuaucuau

SEQ ID NO: 3663177 - RNA, 13 nt, Human
gcugaauugagcc

SEQ ID NO: 3663178 - RNA, 21 nt, Human
gcugaauugagccuaaaaaua

SEQ ID NO: 3663179 - RNA, 22 nt, Human
gcugacaaccaccgcuccccag

SEQ ID NO: 3663180 - RNA, 22 nt, Human
gcugacaaccauuaaagucaga

SEQ ID NO: 3663181 - RNA, 17 nt, Human
gcugacacaaaccugcc

SEQ ID NO: 3663182 - RNA, 21 nt, Human
gcugacacaaaccugccuggg

SEQ ID NO: 3663183 - RNA, 16 nt, Human
gcugacaccuaacucu

SEQ ID NO: 3663184 - RNA, 22 nt, Human
gcugacacuucaaggugacaga

SEQ ID NO: 3663185 - RNA, 21 nt, Human
gcugacagacacaggcccggc

SEQ ID NO: 3663186 - RNA, 15 nt, Human
gcugacagcugcucc

SEQ ID NO: 3663187 - RNA, 14 nt, Human
gcugacaguccucu

SEQ ID NO: 3663188 - RNA, 16 nt, Human
gcugacaucuguguuu

SEQ ID NO: 3663189 - RNA, 16 nt, Human
gcugacaucuugaauc

SEQ ID NO: 3663190 - RNA, 16 nt, Human
gcugacauucaccugc

SEQ ID NO: 3663191 - RNA, 17 nt, Human
gcugacauucaccugcc

SEQ ID NO: 3663192 - RNA, 13 nt, Human
gcugaccaagaga

SEQ ID NO: 3663193 - RNA, 15 nt, Human
gcugaccaagagaga

SEQ ID NO: 3663194 - RNA, 16 nt, Human
gcugaccacagcacag

SEQ ID NO: 3663195 - RNA, 19 nt, Human
gcugaccacagcacagcca

SEQ ID NO: 3663196 - RNA, 15 nt, Human
gcugacccagucccu

SEQ ID NO: 3663197 - RNA, 19 nt, Human
gcugacccagucccugggg

SEQ ID NO: 3663198 - RNA, 16 nt, Human
gcugacccaugggcag

SEQ ID NO: 3663199 - RNA, 18 nt, Human
gcugacccaugggcagga

SEQ ID NO: 3663200 - RNA, 21 nt, Human
gcugacccaugggcaggagac

SEQ ID NO: 3663201 - RNA, 14 nt, Human
gcugaccuccacag

SEQ ID NO: 3663202 - RNA, 15 nt, Human
gcugaccuccacagc

SEQ ID NO: 3663203 - RNA, 19 nt, Human
gcugaccucuguuguccuc

SEQ ID NO: 3663204 - RNA, 22 nt, Human
gcugaccucuguuguccucccc

SEQ ID NO: 3663205 - RNA, 22 nt, Human
gcugaccugccucucacacaca

SEQ ID NO: 3663206 - RNA, 23 nt, Human
gcugaccugccucucacacacau

SEQ ID NO: 3663207 - RNA, 13 nt, Human
gcugaccugcuga

SEQ ID NO: 3663208 - RNA, 14 nt, Human
gcugaccuugcuga

SEQ ID NO: 3663209 - RNA, 17 nt, Human
gcugacgaacuuccaug

SEQ ID NO: 3663210 - RNA, 18 nt, Human
gcugacgaggcugggcca

SEQ ID NO: 3663211 - RNA, 13 nt, Human
gcugacggccagg

SEQ ID NO: 3663212 - RNA, 22 nt, Human
gcugacuauaaugccucuccuu

SEQ ID NO: 3663213 - RNA, 13 nt, Human
gcugacuccuggu

SEQ ID NO: 3663214 - RNA, 14 nt, Human
gcugacuccugguc

SEQ ID NO: 3663215 - RNA, 15 nt, Human
gcugacuccuggucc

SEQ ID NO: 3663216 - RNA, 23 nt, Human
gcugacucuaggugcccuuggag

SEQ ID NO: 3663217 - RNA, 18 nt, Human
gcugacugauguugaggg

SEQ ID NO: 3663218 - RNA, 18 nt, Human
gcugacuguacuccuccc

SEQ ID NO: 3663219 - RNA, 16 nt, Human
gcugacuuacaucaug

SEQ ID NO: 3663220 - RNA, 21 nt, Human
gcugacuucacuuauuagucu

SEQ ID NO: 3663221 - RNA, 24 nt, Human
gcugacuucaucucccaccuagca

SEQ ID NO: 3663222 - RNA, 13 nt, Human
gcugagaaccugg

SEQ ID NO: 3663223 - RNA, 14 nt, Human
gcugagaaccuggc

SEQ ID NO: 3663224 - RNA, 17 nt, Human
gcugagaaccuggccuu

SEQ ID NO: 3663225 - RNA, 15 nt, Human
gcugagaacuccuga

SEQ ID NO: 3663226 - RNA, 12 nt, Human
gcugagaagacu

SEQ ID NO: 3663227 - RNA, 15 nt, Human
gcugagaauagaagg

SEQ ID NO: 3663228 - RNA, 19 nt, Human
gcugagaauagaaggaaac

SEQ ID NO: 3663229 - RNA, 15 nt, Human
gcugagacaggagaa

SEQ ID NO: 3663230 - RNA, 19 nt, Human
gcugagacuggauacugcc

SEQ ID NO: 3663231 - RNA, 20 nt, Human
gcugagacuggauacugccc

SEQ ID NO: 3663232 - RNA, 14 nt, Human
gcugagagaaccuc

SEQ ID NO: 3663233 - RNA, 14 nt, Human
gcugagagacuuuu

SEQ ID NO: 3663234 - RNA, 13 nt, Human
gcugagagcccca

SEQ ID NO: 3663235 - RNA, 18 nt, Human
gcugagagccccagcuga

SEQ ID NO: 3663236 - RNA, 13 nt, Human
gcugagaggggcu

SEQ ID NO: 3663237 - RNA, 18 nt, Human
gcugagcaaaucaccaca

SEQ ID NO: 3663238 - RNA, 17 nt, Human
gcugagcaccaggggau

SEQ ID NO: 3663239 - RNA, 13 nt, Human
gcugagcagggcc

SEQ ID NO: 3663240 - RNA, 20 nt, Human
gcugagccaccugcccuuuu

SEQ ID NO: 3663241 - RNA, 11 nt, Human
gcugagccagg

SEQ ID NO: 3663242 - RNA, 17 nt, Human
gcugagccccuacccca

SEQ ID NO: 3663243 - RNA, 15 nt, Human
gcugagccccugucu

SEQ ID NO: 3663244 - RNA, 22 nt, Human
gcugagccccugucuagagagg

SEQ ID NO: 3663245 - RNA, 11 nt, Human
gcugagcccug

SEQ ID NO: 3663246 - RNA, 12 nt, Human
gcugagcccugg

SEQ ID NO: 3663247 - RNA, 14 nt, Human
gcugagcccuggca

SEQ ID NO: 3663248 - RNA, 15 nt, Human
gcugagcccuggcag

SEQ ID NO: 3663249 - RNA, 19 nt, Human
gcugagccucacagcagug

SEQ ID NO: 3663250 - RNA, 14 nt, Human
gcugagccucucac

SEQ ID NO: 3663251 - RNA, 13 nt, Human
gcugagccucugc

SEQ ID NO: 3663252 - RNA, 19 nt, Human
gcugagccucugcucccca

SEQ ID NO: 3663253 - RNA, 15 nt, Human
gcugagccugcaggg

SEQ ID NO: 3663254 - RNA, 20 nt, Human
gcugagccugcagggaagcc

SEQ ID NO: 3663255 - RNA, 15 nt, Human
gcugagccuggacaa

SEQ ID NO: 3663256 - RNA, 14 nt, Human
gcugagcgccagga

SEQ ID NO: 3663257 - RNA, 16 nt, Human
gcugagcucacaaggc

SEQ ID NO: 3663258 - RNA, 14 nt, Human
gcugagcucugaga

SEQ ID NO: 3663259 - RNA, 15 nt, Human
gcugagcucugagag

SEQ ID NO: 3663260 - RNA, 18 nt, Human
gcugagcucugagaggcc

SEQ ID NO: 3663261 - RNA, 19 nt, Human
gcugagcucugagaggccc

SEQ ID NO: 3663262 - RNA, 23 nt, Human
gcugagcucugagaggcccugga

SEQ ID NO: 3663263 - RNA, 17 nt, Human
gcugaggaaaggccagc

SEQ ID NO: 3663264 - RNA, 21 nt, Human
gcugaggaaaggccagcuggc

SEQ ID NO: 3663265 - RNA, 12 nt, Human
gcugaggagcag

SEQ ID NO: 3663266 - RNA, 14 nt, Human
gcugaggaggccuc

SEQ ID NO: 3663267 - RNA, 16 nt, Human
gcugaggaggccucca

SEQ ID NO: 3663268 - RNA, 19 nt, Human
gcugaggauuucaagccug

SEQ ID NO: 3663269 - RNA, 14 nt, Human
gcugaggcaggaga

SEQ ID NO: 3663270 - RNA, 21 nt, Human
gcugaggccacacucagcaca

SEQ ID NO: 3663271 - RNA, 22 nt, Human
gcugaggccggaugcgguggcu

SEQ ID NO: 3663272 - RNA, 13 nt, Human
gcugaggccugga

SEQ ID NO: 3663273 - RNA, 14 nt, Human
gcugaggccuggac

SEQ ID NO: 3663274 - RNA, 14 nt, Human
gcugaggccugggc

SEQ ID NO: 3663275 - RNA, 23 nt, Human
gcugaggccugggccgcugccac

SEQ ID NO: 3663276 - RNA, 21 nt, Human
gcugaggccuuaucauucauu

SEQ ID NO: 3663277 - RNA, 23 nt, Human
cuugaggucuuuugacaugugga

SEQ ID NO: 3663278 - RNA, 15 nt, Human
cuugagguggccucc

SEQ ID NO: 3663279 - RNA, 21 nt, Human
cuugaggugguaguaaaacac

SEQ ID NO: 3663280 - RNA, 13 nt, Human
cuugaguaaaaua

SEQ ID NO: 3663281 - RNA, 16 nt, Human
cuugagucacaaagaa

SEQ ID NO: 3663282 - RNA, 16 nt, Human
cuugagugcucaguag

SEQ ID NO: 3663283 - RNA, 20 nt, Human
cuugaguguaauguuuguua

SEQ ID NO: 3663284 - RNA, 19 nt, Human
cuugaguuguuuuuguaua

SEQ ID NO: 3663285 - RNA, 21 nt, Human
cuugaguuguuuuuguauauu

SEQ ID NO: 3663286 - RNA, 22 nt, Human
cuugaguuguuuuuguauauug

SEQ ID NO: 3663287 - RNA, 19 nt, Human
cuugaguuuaaauuguaau

SEQ ID NO: 3663288 - RNA, 16 nt, Human
cuugaguuuuguuuua

SEQ ID NO: 3663289 - RNA, 23 nt, Human
cuugauacuaaaaguucuucucc

SEQ ID NO: 3663290 - RNA, 22 nt, Human
cuugauagaaaugccaagcacu

SEQ ID NO: 3663291 - RNA, 22 nt, Human
cuugauauccucuuugagugaa

SEQ ID NO: 3663292 - RNA, 14 nt, Human
cuugauauuuguau

SEQ ID NO: 3663293 - RNA, 16 nt, Human
cuugauauuuguauuu

SEQ ID NO: 3663294 - RNA, 20 nt, Human
cuugaucaguaguuugcauu

SEQ ID NO: 3663295 - RNA, 17 nt, Human
cuugaucugcucagccc

SEQ ID NO: 3663296 - RNA, 22 nt, Human
cuugaucugcucagcccuggag

SEQ ID NO: 3663297 - RNA, 13 nt, Human
cuugaugaagcaa

SEQ ID NO: 3663298 - RNA, 14 nt, Human
cuugaugaagcaag

SEQ ID NO: 3663299 - RNA, 18 nt, Human
cuugaugaccaaaguccu

SEQ ID NO: 3663300 - RNA, 16 nt, Human
cuugaugacuggaauu

SEQ ID NO: 3663301 - RNA, 17 nt, Human
cuugaugacuggaauuu

SEQ ID NO: 3663302 - RNA, 15 nt, Human
cuugaugcacagaga

SEQ ID NO: 3663303 - RNA, 19 nt, Human
cuugaugcacagagaagcu

SEQ ID NO: 3663304 - RNA, 22 nt, Human
cuugaugccaguaggcucaacu

SEQ ID NO: 3663305 - RNA, 13 nt, Human
cuugaugccuggc

SEQ ID NO: 3663306 - RNA, 15 nt, Human
cuugauggauuuuca

SEQ ID NO: 3663307 - RNA, 16 nt, Human
cuugauggcuaacuua

SEQ ID NO: 3663308 - RNA, 21 nt, Human
cuugauggcuaacuuacaaag

SEQ ID NO: 3663309 - RNA, 21 nt, Human
cuugauggcuccgaacacccu

SEQ ID NO: 3663310 - RNA, 22 nt, Human
cuugauggucagacacaaacaa

SEQ ID NO: 3663311 - RNA, 14 nt, Human
cuugauguaaaauc

SEQ ID NO: 3663312 - RNA, 18 nt, Human
cuugauguaaaaucuugu

SEQ ID NO: 3663313 - RNA, 17 nt, Human
cuugauguuuggggucu

SEQ ID NO: 3663314 - RNA, 13 nt, Human
cuugauuaaaagu

SEQ ID NO: 3663315 - RNA, 14 nt, Human
cuugauuaaaucaa

SEQ ID NO: 3663316 - RNA, 22 nt, Human
cuugauuaagauuuuacaaaag

SEQ ID NO: 3663317 - RNA, 12 nt, Human
ggaaccucagcc

SEQ ID NO: 3663318 - RNA, 14 nt, Human
ggaaccucagccug

SEQ ID NO: 3663319 - RNA, 22 nt, Human
ggaaccucagccuggccagaca

SEQ ID NO: 3663320 - RNA, 15 nt, Human
ggaaccucccagagg

SEQ ID NO: 3663321 - RNA, 22 nt, Human
ggaaccucccagagguccagcc

SEQ ID NO: 3663322 - RNA, 23 nt, Human
ggaaccucccagagguccagccc

SEQ ID NO: 3663323 - RNA, 21 nt, Human
ggaaccuccccagccugcgcc

SEQ ID NO: 3663324 - RNA, 19 nt, Human
ggaaccucgaguacugugg

SEQ ID NO: 3663325 - RNA, 23 nt, Human
ggaaccucugucucauccuccug

SEQ ID NO: 3663326 - RNA, 13 nt, Human
ggaaccugacccc

SEQ ID NO: 3663327 - RNA, 18 nt, Human
ggaaccugacguagcugc

SEQ ID NO: 3663328 - RNA, 19 nt, Human
ggaaccugaggccugaagg

SEQ ID NO: 3663329 - RNA, 11 nt, Human
ggaaccugcca

SEQ ID NO: 3663330 - RNA, 13 nt, Human
ggaaccuggacca

SEQ ID NO: 3663331 - RNA, 19 nt, Human
ggaaccuggaccaaagcug

SEQ ID NO: 3663332 - RNA, 13 nt, Human
ggaaccuugcugu

SEQ ID NO: 3663333 - RNA, 16 nt, Human
ggaaccuugcuguccu

SEQ ID NO: 3663334 - RNA, 17 nt, Human
ggaacgcguugaaauug

SEQ ID NO: 3663335 - RNA, 21 nt, Human
ggaacgcguugaaauuguaau

SEQ ID NO: 3663336 - RNA, 20 nt, Human
ggaacgguaaauuucugugg

SEQ ID NO: 3663337 - RNA, 22 nt, Human
ggaacggugaaggugacagcag

SEQ ID NO: 3663338 - RNA, 17 nt, Human
ggaacgugacugcccca

SEQ ID NO: 3663339 - RNA, 14 nt, Human
ggaacgugauuagu

SEQ ID NO: 3663340 - RNA, 23 nt, Human
ggaacuagacucccaagcuggac

SEQ ID NO: 3663341 - RNA, 20 nt, Human
ggaacucagauccagggaca

SEQ ID NO: 3663342 - RNA, 13 nt, Human
ggaacucccagca

SEQ ID NO: 3663343 - RNA, 13 nt, Human
ggaacuccuuggc

SEQ ID NO: 3663344 - RNA, 17 nt, Human
ggaacucgugucuggca

SEQ ID NO: 3663345 - RNA, 18 nt, Human
ggaacucuaucugggccu

SEQ ID NO: 3663346 - RNA, 11 nt, Human
ggaacucugac

SEQ ID NO: 3663347 - RNA, 16 nt, Human
ggaacucugacaaggg

SEQ ID NO: 3663348 - RNA, 19 nt, Human
ggaacucuggcuuccaggu

SEQ ID NO: 3663349 - RNA, 12 nt, Human
ggaacugaaggg

SEQ ID NO: 3663350 - RNA, 21 nt, Human
ggaacugcagaccuguccucc

SEQ ID NO: 3663351 - RNA, 12 nt, Human
ggaacugcagca

SEQ ID NO: 3663352 - RNA, 12 nt, Human
ggaacugcugcc

SEQ ID NO: 3663353 - RNA, 14 nt, Human
ggaacugcugccac

SEQ ID NO: 3663354 - RNA, 15 nt, Human
ggaacugcugggcuu

SEQ ID NO: 3663355 - RNA, 20 nt, Human
ggaacugcugggcuuggcag

SEQ ID NO: 3663356 - RNA, 11 nt, Human
ggaacuggagg

SEQ ID NO: 3663357 - RNA, 12 nt, Human
ggaacuggaggc

SEQ ID NO: 3663358 - RNA, 22 nt, Human
ggaacuggccaagcugaggugc

SEQ ID NO: 3663359 - RNA, 15 nt, Human
ggaacuguccagaga

SEQ ID NO: 3663360 - RNA, 15 nt, Human
ggaacuguuuccuuc

SEQ ID NO: 3663361 - RNA, 20 nt, Human
ggaacuuauuaaauggaaac

SEQ ID NO: 3663362 - RNA, 14 nt, Human
ggaacuugaacuga

SEQ ID NO: 3663363 - RNA, 20 nt, Human
ggaacuugccugccuuucca

SEQ ID NO: 3663364 - RNA, 23 nt, Human
ggaacuuggggaguuaagaccug

SEQ ID NO: 3663365 - RNA, 17 nt, Human
ggaagaaaaaaaucuuc

SEQ ID NO: 3663366 - RNA, 20 nt, Human
ggaagaaaaugguuuauuuu

SEQ ID NO: 3663367 - RNA, 19 nt, Human
ggaagaaacacuuucucuu

SEQ ID NO: 3663368 - RNA, 15 nt, Human
ggaagaaacugcuga

SEQ ID NO: 3663369 - RNA, 16 nt, Human
ggaagaaauuccugua

SEQ ID NO: 3663370 - RNA, 18 nt, Human
ggaagaaauuccuguagc

SEQ ID NO: 3663371 - RNA, 23 nt, Human
ggaagaaauuccuguagcaucuu

SEQ ID NO: 3663372 - RNA, 11 nt, Human
ggaagaacacc

SEQ ID NO: 3663373 - RNA, 13 nt, Human
ggaagaacauaga

SEQ ID NO: 3663374 - RNA, 16 nt, Human
ggaagaacauagaacu

SEQ ID NO: 3663375 - RNA, 15 nt, Human
ggaagaagagggaga

SEQ ID NO: 3663376 - RNA, 14 nt, Human
ggaagaagcagaga

SEQ ID NO: 3663377 - RNA, 18 nt, Human
ggaagaagcuuaggcagg

SEQ ID NO: 3663378 - RNA, 19 nt, Human
ggaagaauuuacuuuggaa

SEQ ID NO: 3663379 - RNA, 19 nt, Human
ggaagaauuuuaaaaauga

SEQ ID NO: 3663380 - RNA, 15 nt, Human
ggaagacaguggccc

SEQ ID NO: 3663381 - RNA, 19 nt, Human
ggaagacauuucuuuucuu

SEQ ID NO: 3663382 - RNA, 20 nt, Human
ggaagacccauuccuuccca

SEQ ID NO: 3663383 - RNA, 18 nt, Human
ggaagacgcaagggccug

SEQ ID NO: 3663384 - RNA, 12 nt, Human
ggaagacuuugg

SEQ ID NO: 3663385 - RNA, 18 nt, Human
ggaagacuuuggaaagag

SEQ ID NO: 3663386 - RNA, 13 nt, Human
ggaagagaaaaaa

SEQ ID NO: 3663387 - RNA, 15 nt, Human
ggaagagaaaaaaua

SEQ ID NO: 3663388 - RNA, 14 nt, Human
ggaagagaaacagg

SEQ ID NO: 3663389 - RNA, 13 nt, Human
ggaagagaaucac

SEQ ID NO: 3663390 - RNA, 18 nt, Human
ggaagagagccugcagga

SEQ ID NO: 3663391 - RNA, 17 nt, Human
ggaagagauccaaagac

SEQ ID NO: 3663392 - RNA, 18 nt, Human
ggaagagauccaaagacu

SEQ ID NO: 3663393 - RNA, 19 nt, Human
ggaagagcacagcccuccc

SEQ ID NO: 3663394 - RNA, 16 nt, Human
ggaagagcaggacucc

SEQ ID NO: 3663395 - RNA, 15 nt, Human
ggaagagcccagucu

SEQ ID NO: 3663396 - RNA, 16 nt, Human
ggaagagcccagucug

SEQ ID NO: 3663397 - RNA, 13 nt, Human
ggaagagccuugc

SEQ ID NO: 3663398 - RNA, 20 nt, Human
ggaagagcucaagggacaag

SEQ ID NO: 3663399 - RNA, 23 nt, Human
ggaagagcucaagggacaaggac

SEQ ID NO: 3663400 - RNA, 22 nt, Human
ggaagagcuccuugauauccuc

SEQ ID NO: 3663401 - RNA, 19 nt, Human
ggaagaggcuacagggcca

SEQ ID NO: 3663402 - RNA, 15 nt, Human
ggaagaguguacugg

SEQ ID NO: 3663403 - RNA, 18 nt, Human
ggaagauaaguuggaaac

SEQ ID NO: 3663404 - RNA, 14 nt, Human
ggaagauagcugug

SEQ ID NO: 3663405 - RNA, 14 nt, Human
ggaagaucccccag

SEQ ID NO: 3663406 - RNA, 21 nt, Human
ggaagaucccuuuguccacaa

SEQ ID NO: 3663407 - RNA, 22 nt, Human
ggaagauggggaccagcagccc

SEQ ID NO: 3663408 - RNA, 20 nt, Human
ggaagaugggggcaagaaga

SEQ ID NO: 3663409 - RNA, 19 nt, Human
ggaagcacagaaaacuaga

SEQ ID NO: 3663410 - RNA, 13 nt, Human
ggaagcacaugcc

SEQ ID NO: 3663411 - RNA, 14 nt, Human
ggaagcacaugccu

SEQ ID NO: 3663412 - RNA, 23 nt, Human
ggaagcacaugccucucucaggc

SEQ ID NO: 3663413 - RNA, 18 nt, Human
ggaagcagaaauccaagc

SEQ ID NO: 3663414 - RNA, 14 nt, Human
ggaagcagaauaaa

SEQ ID NO: 3663415 - RNA, 18 nt, Human
ggaagcagaauaaagcaa

SEQ ID NO: 3663416 - RNA, 22 nt, Human
ggaagcagauacauaugagugu

SEQ ID NO: 3663417 - RNA, 13 nt, Human
ggaagcagcagcc

SEQ ID NO: 3663418 - RNA, 18 nt, Human
ggaagcagcagccucgcc

SEQ ID NO: 3663419 - RNA, 13 nt, Human
ggaagcagcuuuc

SEQ ID NO: 3663420 - RNA, 14 nt, Human
ggaagcagugccca

SEQ ID NO: 3663421 - RNA, 15 nt, Human
ggaagcagugcccag

SEQ ID NO: 3663422 - RNA, 17 nt, Human
ggacggggaagccgagc

SEQ ID NO: 3663423 - RNA, 17 nt, Human
ggacggugcccaagcca

SEQ ID NO: 3663424 - RNA, 14 nt, Human
ggacggugcuccag

SEQ ID NO: 3663425 - RNA, 17 nt, Human
ggacggugcuccaggca

SEQ ID NO: 3663426 - RNA, 18 nt, Human
ggacggugcuccaggcag

SEQ ID NO: 3663427 - RNA, 17 nt, Human
ggacgucagacuuggcu

SEQ ID NO: 3663428 - RNA, 22 nt, Human
ggacguccugccaccuggggca

SEQ ID NO: 3663429 - RNA, 20 nt, Human
ggacguguuaugacuccaga

SEQ ID NO: 3663430 - RNA, 19 nt, Human
ggacuaaaagauauaagug

SEQ ID NO: 3663431 - RNA, 21 nt, Human
ggacuaaaugccuaguuuuua

SEQ ID NO: 3663432 - RNA, 10 nt, Human
ggacuaaauu

SEQ ID NO: 3663433 - RNA, 19 nt, Human
ggacuaacacucagaagcc

SEQ ID NO: 3663434 - RNA, 21 nt, Human
ggacuaacacucagaagccug

SEQ ID NO: 3663435 - RNA, 22 nt, Human
ggacuaaccccaacgcacagga

SEQ ID NO: 3663436 - RNA, 21 nt, Human
ggacuacguuaagggaaggaa

SEQ ID NO: 3663437 - RNA, 14 nt, Human
ggacuagaaccugg

SEQ ID NO: 3663438 - RNA, 17 nt, Human
ggacuagaaccuggagg

SEQ ID NO: 3663439 - RNA, 21 nt, Human
ggacuagagggaccucuccca

SEQ ID NO: 3663440 - RNA, 19 nt, Human
ggacuaugaaaagcuagaa

SEQ ID NO: 3663441 - RNA, 22 nt, Human
ggacucaaugcacugacauugu

SEQ ID NO: 3663442 - RNA, 14 nt, Human
ggacucagcccuga

SEQ ID NO: 3663443 - RNA, 15 nt, Human
ggacucagccuucag

SEQ ID NO: 3663444 - RNA, 17 nt, Human
ggacucagccuucagac

SEQ ID NO: 3663445 - RNA, 13 nt, Human
ggacucagcuccc

SEQ ID NO: 3663446 - RNA, 19 nt, Human
ggacucaggaugcccaggg

SEQ ID NO: 3663447 - RNA, 20 nt, Human
ggacucagggccaugccugc

SEQ ID NO: 3663448 - RNA, 19 nt, Human
ggacucaguggguuaacau

SEQ ID NO: 3663449 - RNA, 20 nt, Human
ggacucaucuuucccuccuu

SEQ ID NO: 3663450 - RNA, 14 nt, Human
ggacucaugaggag

SEQ ID NO: 3663451 - RNA, 22 nt, Human
ggacucauuuuaaaaaauggaa

SEQ ID NO: 3663452 - RNA, 11 nt, Human
ggacuccaccc

SEQ ID NO: 3663453 - RNA, 14 nt, Human
ggacuccagacucu

SEQ ID NO: 3663454 - RNA, 22 nt, Human
ggacuccagaucugcaccgccg

SEQ ID NO: 3663455 - RNA, 21 nt, Human
ggacuccaggcagcagacaca

SEQ ID NO: 3663456 - RNA, 11 nt, Human
ggacuccaucu

SEQ ID NO: 3663457 - RNA, 22 nt, Human
ggacuccaucucucauccucca

SEQ ID NO: 3663458 - RNA, 18 nt, Human
ggacucccaacccuggcu

SEQ ID NO: 3663459 - RNA, 21 nt, Human
ggacucccaacccuggcuugg

SEQ ID NO: 3663460 - RNA, 17 nt, Human
ggacuccccaggccagg

SEQ ID NO: 3663461 - RNA, 18 nt, Human
ggacuccccaggccaggc

SEQ ID NO: 3663462 - RNA, 12 nt, Human
ggacuccucugu

SEQ ID NO: 3663463 - RNA, 13 nt, Human
ggacucuaaaguc

SEQ ID NO: 3663464 - RNA, 20 nt, Human
ggacucugaaauaucccggg

SEQ ID NO: 3663465 - RNA, 19 nt, Human
ggacucugaagccucuggg

SEQ ID NO: 3663466 - RNA, 15 nt, Human
ggacucugagcggga

SEQ ID NO: 3663467 - RNA, 13 nt, Human
ggacucugaggcu

SEQ ID NO: 3663468 - RNA, 21 nt, Human
ggacucugcacaugucuugua

SEQ ID NO: 3663469 - RNA, 13 nt, Human
ggacucugcagcc

SEQ ID NO: 3663470 - RNA, 14 nt, Human
ggacucugcagccu

SEQ ID NO: 3663471 - RNA, 15 nt, Human
ggacucugcagccuc

SEQ ID NO: 3663472 - RNA, 17 nt, Human
ggacucugcagccucag

SEQ ID NO: 3663473 - RNA, 21 nt, Human
ggacucugcaucccagcaccu

SEQ ID NO: 3663474 - RNA, 20 nt, Human
ggacucugggcuauggacac

SEQ ID NO: 3663475 - RNA, 17 nt, Human
ggacucuggugccucca

SEQ ID NO: 3663476 - RNA, 22 nt, Human
ggacucuguccugaaggccuga

SEQ ID NO: 3663477 - RNA, 21 nt, Human
ggacucuugcucuuucuacuc

SEQ ID NO: 3663478 - RNA, 19 nt, Human
ggacucuuugguggcuuug

SEQ ID NO: 3663479 - RNA, 17 nt, Human
ggacugaauuaugaaac

SEQ ID NO: 3663480 - RNA, 19 nt, Human
ggacugaauuaugaaacuu

SEQ ID NO: 3663481 - RNA, 21 nt, Human
ggacugacagcaugugcccuc

SEQ ID NO: 3663482 - RNA, 15 nt, Human
ggacugaccagcagc

SEQ ID NO: 3663483 - RNA, 21 nt, Human
ggacugaccuuguaaaagaca

SEQ ID NO: 3663484 - RNA, 15 nt, Human
ggacugacugaggca

SEQ ID NO: 3663485 - RNA, 14 nt, Human
ggacugagaaauuu

SEQ ID NO: 3663486 - RNA, 18 nt, Human
ggacugagaaauuuauaa

SEQ ID NO: 3663487 - RNA, 18 nt, Human
ggacugagccagucccag

SEQ ID NO: 3663488 - RNA, 17 nt, Human
ggacugagccuggccca

SEQ ID NO: 3663489 - RNA, 21 nt, Human
ggacugagggacucugaagcc

SEQ ID NO: 3663490 - RNA, 15 nt, Human
ggacugagugggaag

SEQ ID NO: 3663491 - RNA, 16 nt, Human
ggacugaugucuccua

SEQ ID NO: 3663492 - RNA, 23 nt, Human
ggacugcacagcguccuguccac

SEQ ID NO: 3663493 - RNA, 10 nt, Human
ggacugcaug

SEQ ID NO: 3663494 - RNA, 15 nt, Human
ggacugccaccuccc

SEQ ID NO: 3663495 - RNA, 21 nt, Human
ggacugccaccuccccuugcc

SEQ ID NO: 3663496 - RNA, 23 nt, Human
ggacugccaccuccccuugccag

SEQ ID NO: 3663497 - RNA, 19 nt, Human
ggacugccagucccccugc

SEQ ID NO: 3663498 - RNA, 21 nt, Human
ggacugccagucccccugccc

SEQ ID NO: 3663499 - RNA, 21 nt, Human
ggacugccccgugcagacugg

SEQ ID NO: 3663500 - RNA, 18 nt, Human
ggacugcuaaauaaaauu

SEQ ID NO: 3663501 - RNA, 18 nt, Human
ggacuggccucugcugau

SEQ ID NO: 3663502 - RNA, 23 nt, Human
ggacuggcuagaguccucacucc

SEQ ID NO: 3663503 - RNA, 15 nt, Human
ggacuggcuguccuu

SEQ ID NO: 3663504 - RNA, 21 nt, Human
ggacuggcuuugucccacagc

SEQ ID NO: 3663505 - RNA, 18 nt, Human
ggacugggagcccccagc

SEQ ID NO: 3663506 - RNA, 12 nt, Human
ggacugggaggu

SEQ ID NO: 3663507 - RNA, 23 nt, Human
ggacuggguuuggaccccagcug

SEQ ID NO: 3663508 - RNA, 15 nt, Human
ggacuggugcccucc

SEQ ID NO: 3663509 - RNA, 17 nt, Human
ggacuggugcccuccuc

SEQ ID NO: 3663510 - RNA, 15 nt, Human
ggacuguaagggauu

SEQ ID NO: 3663511 - RNA, 18 nt, Human
ggacuguaaguugggcuu

SEQ ID NO: 3663512 - RNA, 13 nt, Human
ggacuguacacac

SEQ ID NO: 3663513 - RNA, 19 nt, Human
ggacuguacacacuuuauu

SEQ ID NO: 3663514 - RNA, 20 nt, Human
ggacuguagggagggcggca

SEQ ID NO: 3663515 - RNA, 14 nt, Human
ggacugucgcugcu

SEQ ID NO: 3663516 - RNA, 20 nt, Human
ggacugucgcugcuucgugg

SEQ ID NO: 3663517 - RNA, 20 nt, Human
ggacugucuuucagauacau

SEQ ID NO: 3663518 - RNA, 20 nt, Human
ggacugugacaggcagcaga

SEQ ID NO: 3663519 - RNA, 14 nt, Human
ggacuguggugacu

SEQ ID NO: 3663520 - RNA, 15 nt, Human
ggacuguggugacuu

SEQ ID NO: 3663521 - RNA, 21 nt, Human
ggacuguggugacuuuggaua

SEQ ID NO: 3663522 - RNA, 18 nt, Human
gcuguuauuucuauuuuu

SEQ ID NO: 3663523 - RNA, 23 nt, Human
gcuguucacagccagacuggcac

SEQ ID NO: 3663524 - RNA, 22 nt, Human
gcuguucacccacagggcuaag

SEQ ID NO: 3663525 - RNA, 14 nt, Human
gcuguucuuccugg

SEQ ID NO: 3663526 - RNA, 23 nt, Human
gcuguucuuuaguagcaacuaaa

SEQ ID NO: 3663527 - RNA, 19 nt, Human
gcuguugaaagcaaaaaug

SEQ ID NO: 3663528 - RNA, 19 nt, Human
gcuguugacauauuuaaug

SEQ ID NO: 3663529 - RNA, 18 nt, Human
gcuguugaccaggcaccu

SEQ ID NO: 3663530 - RNA, 23 nt, Human
gcuguugaccaggcaccuccccu

SEQ ID NO: 3663531 - RNA, 18 nt, Human
gcuguugagcuguuuucc

SEQ ID NO: 3663532 - RNA, 15 nt, Human
gcuguugcugaauag

SEQ ID NO: 3663533 - RNA, 19 nt, Human
gcuguugcuuaaaccacuu

SEQ ID NO: 3663534 - RNA, 13 nt, Human
gcuguuggcacuc

SEQ ID NO: 3663535 - RNA, 16 nt, Human
gcuguuggcagugagu

SEQ ID NO: 3663536 - RNA, 23 nt, Human
gcuguuggccucugcaaaggaaa

SEQ ID NO: 3663537 - RNA, 13 nt, Human
gcuguuggcuggg

SEQ ID NO: 3663538 - RNA, 14 nt, Human
gcuguuggcugggg

SEQ ID NO: 3663539 - RNA, 16 nt, Human
gcuguuggcugggggc

SEQ ID NO: 3663540 - RNA, 20 nt, Human
gcuguuggcugggggccuca

SEQ ID NO: 3663541 - RNA, 15 nt, Human
gcuguuggugggacc

SEQ ID NO: 3663542 - RNA, 18 nt, Human
gcuguugucauugcuuua

SEQ ID NO: 3663543 - RNA, 22 nt, Human
gcuguugucauugcuuuacugg

SEQ ID NO: 3663544 - RNA, 14 nt, Human
gcuguugucucuuc

SEQ ID NO: 3663545 - RNA, 17 nt, Human
gcuguuguuaugaugug

SEQ ID NO: 3663546 - RNA, 21 nt, Human
gcuguuuaaauguuuuucuau

SEQ ID NO: 3663547 - RNA, 15 nt, Human
gcuguuuacuaggga

SEQ ID NO: 3663548 - RNA, 14 nt, Human
gcuguuuauggccu

SEQ ID NO: 3663549 - RNA, 16 nt, Human
gcuguuuauggccuca

SEQ ID NO: 3663550 - RNA, 17 nt, Human
gcuguuuauguuuuuau

SEQ ID NO: 3663551 - RNA, 16 nt, Human
gcuguuuauuaaucuu

SEQ ID NO: 3663552 - RNA, 13 nt, Human
gcuguuucaaagu

SEQ ID NO: 3663553 - RNA, 13 nt, Human
gcuguuuccauag

SEQ ID NO: 3663554 - RNA, 13 nt, Human
gcuguuugaggau

SEQ ID NO: 3663555 - RNA, 14 nt, Human
gcuguuuggaaaag

SEQ ID NO: 3663556 - RNA, 12 nt, Human
gcuguuugucau

SEQ ID NO: 3663557 - RNA, 17 nt, Human
gcuguuuguccugagau

SEQ ID NO: 3663558 - RNA, 21 nt, Human
gcuguuuguuugacaaagaaa

SEQ ID NO: 3663559 - RNA, 21 nt, Human
gcuguuuuaguuaaauuucug

SEQ ID NO: 3663560 - RNA, 20 nt, Human
gcuguuuuccucccuucugc

SEQ ID NO: 3663561 - RNA, 21 nt, Human
gcuguuuuccucccuucugcu

SEQ ID NO: 3663562 - RNA, 22 nt, Human
gcuguuuuccucccuucugcua

SEQ ID NO: 3663563 - RNA, 13 nt, Human
gcuguuuugugga

SEQ ID NO: 3663564 - RNA, 19 nt, Human
gcuguuuuguggauuuuug

SEQ ID NO: 3663565 - RNA, 14 nt, Human
gcuguuuuguugac

SEQ ID NO: 3663566 - RNA, 16 nt, Human
ggagaaagggcccugg

SEQ ID NO: 3663567 - RNA, 23 nt, Human
ggagaaaugcauccauuccucag

SEQ ID NO: 3663568 - RNA, 20 nt, Human
ggagaacaagaaagggccag

SEQ ID NO: 3663569 - RNA, 18 nt, Human
ggagaaccuugugccugg

SEQ ID NO: 3663570 - RNA, 18 nt, Human
ggagaacuagaaccugga

SEQ ID NO: 3663571 - RNA, 18 nt, Human
ggagaacuugcugccucg

SEQ ID NO: 3663572 - RNA, 15 nt, Human
ggagaagagaggaga

SEQ ID NO: 3663573 - RNA, 16 nt, Human
ggagaagagaggagag

SEQ ID NO: 3663574 - RNA, 14 nt, Human
ggagaagagcgcag

SEQ ID NO: 3663575 - RNA, 19 nt, Human
ggagaagaguugaggaacu

SEQ ID NO: 3663576 - RNA, 20 nt, Human
ggagaagaguugaggaacug

SEQ ID NO: 3663577 - RNA, 15 nt, Human
ggagaagcagugagc

SEQ ID NO: 3663578 - RNA, 16 nt, Human
ggagaagcagugagcc

SEQ ID NO: 3663579 - RNA, 13 nt, Human
ggagaagcaugaa

SEQ ID NO: 3663580 - RNA, 18 nt, Human
ggagaagccacaggccug

SEQ ID NO: 3663581 - RNA, 19 nt, Human
ggagaagccacaggccuga

SEQ ID NO: 3663582 - RNA, 15 nt, Human
ggagaagccaggaau

SEQ ID NO: 3663583 - RNA, 17 nt, Human
ggagaaggaaggagacu

SEQ ID NO: 3663584 - RNA, 14 nt, Human
ggagaaggaucuag

SEQ ID NO: 3663585 - RNA, 22 nt, Human
ggagaagucucagcuaagcuca

SEQ ID NO: 3663586 - RNA, 19 nt, Human
ggagaagucuucuauuuau

SEQ ID NO: 3663587 - RNA, 16 nt, Human
ggagaaucacaggcug

SEQ ID NO: 3663588 - RNA, 22 nt, Human
ggagaaucacaggcugggcugg

SEQ ID NO: 3663589 - RNA, 15 nt, Human
ggagaaucacuugaa

SEQ ID NO: 3663590 - RNA, 17 nt, Human
ggagaaucaugugaacc

SEQ ID NO: 3663591 - RNA, 19 nt, Human
ggagaaucauguuucuuug

SEQ ID NO: 3663592 - RNA, 16 nt, Human
ggagaauuuuacugug

SEQ ID NO: 3663593 - RNA, 22 nt, Human
ggagacaaugcagaugccagag

SEQ ID NO: 3663594 - RNA, 13 nt, Human
ggagacacagaug

SEQ ID NO: 3663595 - RNA, 20 nt, Human
ggagacacuggccccucaaa

SEQ ID NO: 3663596 - RNA, 14 nt, Human
ggagacagcaucag

SEQ ID NO: 3663597 - RNA, 17 nt, Human
ggagacagcaucagggu

SEQ ID NO: 3663598 - RNA, 21 nt, Human
ggagacagccccagagcaggg

SEQ ID NO: 3663599 - RNA, 22 nt, Human
ggagacagccccagagcagggu

SEQ ID NO: 3663600 - RNA, 17 nt, Human
ggagacaggcagagcug

SEQ ID NO: 3663601 - RNA, 12 nt, Human
ggagacaggguu

SEQ ID NO: 3663602 - RNA, 13 nt, Human
ggagacagugauc

SEQ ID NO: 3663603 - RNA, 19 nt, Human
ggagaccggccugccagga

SEQ ID NO: 3663604 - RNA, 21 nt, Human
ggagaccucuccuuccuaccc

SEQ ID NO: 3663605 - RNA, 19 nt, Human
ggagacgccaugugaugga

SEQ ID NO: 3663606 - RNA, 13 nt, Human
ggagacucaccuc

SEQ ID NO: 3663607 - RNA, 21 nt, Human
ggagacucaccucugccucaa

SEQ ID NO: 3663608 - RNA, 21 nt, Human
ggagacuccaugagaagccgu

SEQ ID NO: 3663609 - RNA, 21 nt, Human
ggagacuccuaggcaggacau

SEQ ID NO: 3663610 - RNA, 18 nt, Human
ggagacugcuccugagcc

SEQ ID NO: 3663611 - RNA, 20 nt, Human
ggagacugucuggccccccu

SEQ ID NO: 3663612 - RNA, 16 nt, Human
ggagacuugccagagc

SEQ ID NO: 3663613 - RNA, 22 nt, Human
ggagacuugccagagccgggca

SEQ ID NO: 3663614 - RNA, 19 nt, Human
ggagacuuugaugucagca

SEQ ID NO: 3663615 - RNA, 21 nt, Human
ggagacuuugaugucagcagu

SEQ ID NO: 3663616 - RNA, 15 nt, Human
ggagagaaaaaagaa

SEQ ID NO: 3663617 - RNA, 16 nt, Human
ggagagaaaauauaug

SEQ ID NO: 3663618 - RNA, 24 nt, Human
ggagagaaagugggugagaugcug

SEQ ID NO: 3663619 - RNA, 15 nt, Human
ggagagaaauauuuu

SEQ ID NO: 3663620 - RNA, 18 nt, Human
ggagagaaauauuuuaau

SEQ ID NO: 3663621 - RNA, 16 nt, Human
ggagagaagagaaugc

SEQ ID NO: 3663622 - RNA, 20 nt, Human
ggagagaaggggaggagggc

SEQ ID NO: 3663623 - RNA, 13 nt, Human
ggagagaccucau

SEQ ID NO: 3663624 - RNA, 17 nt, Human
ggagagacgggcccugg

SEQ ID NO: 3663625 - RNA, 20 nt, Human
ggagagacucccaugaagcc

SEQ ID NO: 3663626 - RNA, 10 nt, Human
ggagagagaa

SEQ ID NO: 3663627 - RNA, 11 nt, Human
ggagagagaaa

SEQ ID NO: 3663628 - RNA, 17 nt, Human
ggagagagaaagccagg

SEQ ID NO: 3663629 - RNA, 18 nt, Human
ggagagagaaagccaggc

SEQ ID NO: 3663630 - RNA, 21 nt, Human
ggagagagaaagccaggcagg

SEQ ID NO: 3663631 - RNA, 20 nt, Human
ggagagagaccacacgcagu

SEQ ID NO: 3663632 - RNA, 14 nt, Human
ggagagagacucca

SEQ ID NO: 3663633 - RNA, 13 nt, Human
ggagagaggcaga

SEQ ID NO: 3663634 - RNA, 18 nt, Human
ggagagaggcagagagcg

SEQ ID NO: 3663635 - RNA, 14 nt, Human
ggagagaggggaau

SEQ ID NO: 3663636 - RNA, 16 nt, Human
ggagagauagccugug

SEQ ID NO: 3663637 - RNA, 14 nt, Human
ggagagcaggcugg

SEQ ID NO: 3663638 - RNA, 23 nt, Human
ggagagcaggcuggcagcucucc

SEQ ID NO: 3663639 - RNA, 19 nt, Human
ggagagccagaaccuggag

SEQ ID NO: 3663640 - RNA, 20 nt, Human
ggagagccagaaccuggagg

SEQ ID NO: 3663641 - RNA, 21 nt, Human
ggagagccagaaccuggaggg

SEQ ID NO: 3663642 - RNA, 18 nt, Human
ggagagccagcccucccu

SEQ ID NO: 3663643 - RNA, 21 nt, Human
ggagagccauacauaaaagaa

SEQ ID NO: 3663644 - RNA, 15 nt, Human
ggagagcccaggagc

SEQ ID NO: 3663645 - RNA, 17 nt, Human
ggagagccccuggggcc

SEQ ID NO: 3663646 - RNA, 12 nt, Human
ggagagccugcu

SEQ ID NO: 3663647 - RNA, 14 nt, Human
ggagagccugcugg

SEQ ID NO: 3663648 - RNA, 12 nt, Human
ggagagccuggu

SEQ ID NO: 3663649 - RNA, 13 nt, Human
ggagagccuucca

SEQ ID NO: 3663650 - RNA, 22 nt, Human
ggagagccuuccagggguggga

SEQ ID NO: 3663651 - RNA, 18 nt, Human
ggagagcgccugccccuc

SEQ ID NO: 3663652 - RNA, 22 nt, Human
ggagagcgccugccccucccag

SEQ ID NO: 3663653 - RNA, 22 nt, Human
ggagagcuagaaccuggagagc

SEQ ID NO: 3663654 - RNA, 20 nt, Human
ggagagcuagaaccuggagg

SEQ ID NO: 3663655 - RNA, 21 nt, Human
ggagagcuagaaccuggaggg

SEQ ID NO: 3663656 - RNA, 22 nt, Human
ggagagcuagaaccuggagggc

SEQ ID NO: 3663657 - RNA, 15 nt, Human
ggagagcuagcagca

SEQ ID NO: 3663658 - RNA, 12 nt, Human
ggagagcuagga

SEQ ID NO: 3663659 - RNA, 22 nt, Human
ggagagcuaggagcaaagccug

SEQ ID NO: 3663660 - RNA, 17 nt, Human
ggagagcuggugcccgg

SEQ ID NO: 3663661 - RNA, 18 nt, Human
ggagagcuggugcccgga

SEQ ID NO: 3663662 - RNA, 16 nt, Human
ggagaggaacuccuug

SEQ ID NO: 3663663 - RNA, 13 nt, Human
ggagaggagagag

SEQ ID NO: 3663664 - RNA, 15 nt, Human
ggagaggagagccag

SEQ ID NO: 3663665 - RNA, 16 nt, Human
ggagaggagagccaga

SEQ ID NO: 3663666 - RNA, 20 nt, Human
ggagaggagagccagagaag

SEQ ID NO: 3663667 - RNA, 15 nt, Human
ggagaggagcccugc

SEQ ID NO: 3663668 - RNA, 21 nt, Human
ggagaggaugagagcccagag

SEQ ID NO: 3663669 - RNA, 19 nt, Human
ggagagggaaugugaaauu

SEQ ID NO: 3663670 - RNA, 19 nt, Human
ggagagggacagcccacug

SEQ ID NO: 3663671 - RNA, 14 nt, Human
ggagagggggcugg

SEQ ID NO: 3663672 - RNA, 21 nt, Human
ggagagggggcuggugggugc

SEQ ID NO: 3663673 - RNA, 18 nt, Human
ggagagggucuggagaag

SEQ ID NO: 3663674 - RNA, 20 nt, Human
ggagagggucuggagaagca

SEQ ID NO: 3663675 - RNA, 21 nt, Human
ggagagggucuggagaagcag

SEQ ID NO: 3663676 - RNA, 23 nt, Human
ggagaggucuuuuuuaaaaggaa

SEQ ID NO: 3663677 - RNA, 15 nt, Human
ggagaggugccagca

SEQ ID NO: 3663678 - RNA, 22 nt, Human
ggagaguacauugaaggccugg

SEQ ID NO: 3663679 - RNA, 17 nt, Human
ggagagucacagaacaa

SEQ ID NO: 3663680 - RNA, 20 nt, Human
ggagagucccagagcaggag

SEQ ID NO: 3663681 - RNA, 21 nt, Human
ggagaguccccugaaggucug

SEQ ID NO: 3663682 - RNA, 22 nt, Human
ggagagugucaaccagacagag

SEQ ID NO: 3663683 - RNA, 19 nt, Human
ggagauaauuacugccuug

SEQ ID NO: 3663684 - RNA, 21 nt, Human
ggagauagccccacaggaggu

SEQ ID NO: 3663685 - RNA, 20 nt, Human
ggagaucaaggagaggaggc

SEQ ID NO: 3663686 - RNA, 18 nt, Human
ggagaucggggccagagg

SEQ ID NO: 3663687 - RNA, 15 nt, Human
ggagaugaggccaga

SEQ ID NO: 3663688 - RNA, 18 nt, Human
ggagaugaggccagacca

SEQ ID NO: 3663689 - RNA, 15 nt, Human
ggagaugcugugccc

SEQ ID NO: 3663690 - RNA, 23 nt, Human
ggagaugcugugccccuggccuu

SEQ ID NO: 3663691 - RNA, 18 nt, Human
ggagaugggccuuuugga

SEQ ID NO: 3663692 - RNA, 16 nt, Human
ggagauguagcaaaac

SEQ ID NO: 3663693 - RNA, 12 nt, Human
ggagaugucuuc

SEQ ID NO: 3663694 - RNA, 13 nt, Human
ggagaugucuucg

SEQ ID NO: 3663695 - RNA, 20 nt, Human
ggagauugagaaggagagaa

SEQ ID NO: 3663696 - RNA, 16 nt, Human
ggagcaaacucugcug

SEQ ID NO: 3663697 - RNA, 20 nt, Human
ggagcaaacugcaugcccag

SEQ ID NO: 3663698 - RNA, 22 nt, Human
ggagcaaacugcaugcccagag

SEQ ID NO: 3663699 - RNA, 13 nt, Human
ggagcaaagccug

SEQ ID NO: 3663700 - RNA, 17 nt, Human
ggagcaaagugagggcc

SEQ ID NO: 3663701 - RNA, 15 nt, Human
ggagcaagaggaggc

SEQ ID NO: 3663702 - RNA, 21 nt, Human
ggagcacaaagacccuggcuu

SEQ ID NO: 3663703 - RNA, 21 nt, Human
ggagcacaauaaauggcugua

SEQ ID NO: 3663704 - RNA, 13 nt, Human
ggagcacaggcag

SEQ ID NO: 3663705 - RNA, 18 nt, Human
ggagcacaggucccaccu

SEQ ID NO: 3663706 - RNA, 13 nt, Human
ggagcacccugag

SEQ ID NO: 3663707 - RNA, 22 nt, Human
ggagcacggcucuguccccagc

SEQ ID NO: 3663708 - RNA, 23 nt, Human
ggagcacggcucuguccccagcc

SEQ ID NO: 3663709 - RNA, 13 nt, Human
ggagcacuggagu

SEQ ID NO: 3663710 - RNA, 17 nt, Human
ggaagcgcucagaacag

SEQ ID NO: 3663711 - RNA, 21 nt, Human
ggaagcgugaaggccgagaag

SEQ ID NO: 3663712 - RNA, 15 nt, Human
ggaagcuacagguua

SEQ ID NO: 3663713 - RNA, 21 nt, Human
ggaagcuacagguuacaacag

SEQ ID NO: 3663714 - RNA, 22 nt, Human
ggaagcuagacacaugaaggua

SEQ ID NO: 3663715 - RNA, 21 nt, Human
ggaagcuagcuccccuccucu

SEQ ID NO: 3663716 - RNA, 22 nt, Human
ggaagcuagcuccccuccucuc

SEQ ID NO: 3663717 - RNA, 16 nt, Human
ggaagcuagucuuuug

SEQ ID NO: 3663718 - RNA, 15 nt, Human
ggaagcucagggccu

SEQ ID NO: 3663719 - RNA, 13 nt, Human
ggaagcugaggcg

SEQ ID NO: 3663720 - RNA, 17 nt, Human
ggaagcugcccugccca

SEQ ID NO: 3663721 - RNA, 13 nt, Human
ggaagcugcuacu

SEQ ID NO: 3663722 - RNA, 13 nt, Human
ggaagcugcuccg

SEQ ID NO: 3663723 - RNA, 15 nt, Human
ggaagcuggccugag

SEQ ID NO: 3663724 - RNA, 21 nt, Human
ggaagcuguguccuugcaccu

SEQ ID NO: 3663725 - RNA, 23 nt, Human
ggaagcuguguccuugcaccugc

SEQ ID NO: 3663726 - RNA, 20 nt, Human
ggaagcuuccaguccaaucu

SEQ ID NO: 3663727 - RNA, 21 nt, Human
ggaagcuuuggugagaaccug

SEQ ID NO: 3663728 - RNA, 17 nt, Human
ggaaggaacucuggcuu

SEQ ID NO: 3663729 - RNA, 23 nt, Human
ggaaggaacucuggcuuccaggu

SEQ ID NO: 3663730 - RNA, 11 nt, Human
ggaaggaagcc

SEQ ID NO: 3663731 - RNA, 17 nt, Human
ggaaggaccuauguuug

SEQ ID NO: 3663732 - RNA, 14 nt, Human
ggaaggagacacag

SEQ ID NO: 3663733 - RNA, 17 nt, Human
ggaaggagacacagaug

SEQ ID NO: 3663734 - RNA, 22 nt, Human
ggaaggagacucaccucugccu

SEQ ID NO: 3663735 - RNA, 12 nt, Human
ggaaggagagaa

SEQ ID NO: 3663736 - RNA, 13 nt, Human
ggaaggagagccu

SEQ ID NO: 3663737 - RNA, 15 nt, Human
ggaaggagagccugc

SEQ ID NO: 3663738 - RNA, 12 nt, Human
ggaaggagcugc

SEQ ID NO: 3663739 - RNA, 16 nt, Human
ggaaggaggagccgac

SEQ ID NO: 3663740 - RNA, 15 nt, Human
ggcaaaaaaauuaaa

SEQ ID NO: 3663741 - RNA, 13 nt, Human
ggcaaaaacaaag

SEQ ID NO: 3663742 - RNA, 15 nt, Human
ggcaaaaaggcagga

SEQ ID NO: 3663743 - RNA, 15 nt, Human
ggcaaaaccuugcua

SEQ ID NO: 3663744 - RNA, 18 nt, Human
ggcaaaacuuuggcacug

SEQ ID NO: 3663745 - RNA, 13 nt, Human
ggcaaacaggcag

SEQ ID NO: 3663746 - RNA, 17 nt, Human
ggcaaacagggccucug

SEQ ID NO: 3663747 - RNA, 21 nt, Human
ggcaaacauuuucucuuagaa

SEQ ID NO: 3663748 - RNA, 22 nt, Human
ggcaaacauuuucucuuagaaa

SEQ ID NO: 3663749 - RNA, 20 nt, Human
ggcaaagcagcaacacacau

SEQ ID NO: 3663750 - RNA, 19 nt, Human
ggcaaaggaagguggaugg

SEQ ID NO: 3663751 - RNA, 20 nt, Human
ggcaaagguggcucuccagu

SEQ ID NO: 3663752 - RNA, 13 nt, Human
ggcaaauaaaauu

SEQ ID NO: 3663753 - RNA, 16 nt, Human
ggcaaauaucuugaaa

SEQ ID NO: 3663754 - RNA, 20 nt, Human
ggcaaauccgaaaucagcag

SEQ ID NO: 3663755 - RNA, 18 nt, Human
ggcaaaugacaugcacug

SEQ ID NO: 3663756 - RNA, 15 nt, Human
ggcaaaugccagggc

SEQ ID NO: 3663757 - RNA, 16 nt, Human
ggcaaauguuuauuua

SEQ ID NO: 3663758 - RNA, 19 nt, Human
ggcaacaaaagaagcccgg

SEQ ID NO: 3663759 - RNA, 14 nt, Human
ggcaacacagaggc

SEQ ID NO: 3663760 - RNA, 18 nt, Human
ggcaacagaucaguaaag

SEQ ID NO: 3663761 - RNA, 16 nt, Human
ggcaaccacuaagaau

SEQ ID NO: 3663762 - RNA, 19 nt, Human
ggcaaccacuaagaauuca

SEQ ID NO: 3663763 - RNA, 20 nt, Human
ggcaaccccaguucugcucc

SEQ ID NO: 3663764 - RNA, 19 nt, Human
ggcaacccccagccugcua

SEQ ID NO: 3663765 - RNA, 17 nt, Human
ggcaaccugauuguaaa

SEQ ID NO: 3663766 - RNA, 15 nt, Human
ggcaacgaagaaaaa

SEQ ID NO: 3663767 - RNA, 16 nt, Human
ggcaacgaagaaaaaa

SEQ ID NO: 3663768 - RNA, 16 nt, Human
ggcaacgcacaaaaca

SEQ ID NO: 3663769 - RNA, 19 nt, Human
ggcaacugaacaaaaaaau

SEQ ID NO: 3663770 - RNA, 19 nt, Human
ggcaacugaggcagacagc

SEQ ID NO: 3663771 - RNA, 22 nt, Human
ggcaacugcugaugcucauggu

SEQ ID NO: 3663772 - RNA, 12 nt, Human
ggcaacuggcca

SEQ ID NO: 3663773 - RNA, 19 nt, Human
ggcaacuggccauuugcca

SEQ ID NO: 3663774 - RNA, 22 nt, Human
ggcaacuuuccuuguuccccau

SEQ ID NO: 3663775 - RNA, 19 nt, Human
ggcaagagcccccuugaca

SEQ ID NO: 3663776 - RNA, 17 nt, Human
ggcaagagggugacagc

SEQ ID NO: 3663777 - RNA, 17 nt, Human
ggcaagcaccuccugcc

SEQ ID NO: 3663778 - RNA, 19 nt, Human
ggcaagcaccuccugccuc

SEQ ID NO: 3663779 - RNA, 16 nt, Human
ggcaagcauguaacuu

SEQ ID NO: 3663780 - RNA, 21 nt, Human
ggcaagcauguaacuuauauu

SEQ ID NO: 3663781 - RNA, 13 nt, Human
ggcaagccaggcu

SEQ ID NO: 3663782 - RNA, 19 nt, Human
ggcaagccccugcccaucu

SEQ ID NO: 3663783 - RNA, 14 nt, Human
ggcaagcuccgcag

SEQ ID NO: 3663784 - RNA, 18 nt, Human
ggcaagcuccgcaggacu

SEQ ID NO: 3663785 - RNA, 14 nt, Human
ggcaaggaaaaaga

SEQ ID NO: 3663786 - RNA, 11 nt, Human
ggcaaggaaag

SEQ ID NO: 3663787 - RNA, 24 nt, Human
ggcaaggacgcuucacaggacagg

SEQ ID NO: 3663788 - RNA, 13 nt, Human
ggcaaggcugugc

SEQ ID NO: 3663789 - RNA, 17 nt, Human
ggcaaggggugccuggg

SEQ ID NO: 3663790 - RNA, 19 nt, Human
ggcaaggguuaaggccuga

SEQ ID NO: 3663791 - RNA, 22 nt, Human
ggcaagucccugacucucugug

SEQ ID NO: 3663792 - RNA, 16 nt, Human
ggcaaguuuucccuga

SEQ ID NO: 3663793 - RNA, 20 nt, Human
ggcaauaaaagcccaggagc

SEQ ID NO: 3663794 - RNA, 22 nt, Human
ggcaauaaaagcccaggagccc

SEQ ID NO: 3663795 - RNA, 19 nt, Human
ggcaauaaauuuugaaaag

SEQ ID NO: 3663796 - RNA, 18 nt, Human
ggcaauaguguguucuga

SEQ ID NO: 3663797 - RNA, 21 nt, Human
ggcaauauaaccaauguuuaa

SEQ ID NO: 3663798 - RNA, 22 nt, Human
ggcaauauaaccaauguuuaaa

SEQ ID NO: 3663799 - RNA, 16 nt, Human
ggcaauauucucugua

SEQ ID NO: 3663800 - RNA, 17 nt, Human
ggcaaugccacagcccu

SEQ ID NO: 3663801 - RNA, 20 nt, Human
ggcaaugggagcugaggcca

SEQ ID NO: 3663802 - RNA, 21 nt, Human
ggcaaugggagcugaggccac

SEQ ID NO: 3663803 - RNA, 13 nt, Human
ggcaauuuagaaa

SEQ ID NO: 3663804 - RNA, 14 nt, Human
ggcaauuuuguaac

SEQ ID NO: 3663805 - RNA, 15 nt, Human
ggcaauuuugugguu

SEQ ID NO: 3663806 - RNA, 15 nt, Human
ggcacaacugcaaua

SEQ ID NO: 3663807 - RNA, 20 nt, Human
ggcacaauggcuaauuccca

SEQ ID NO: 3663808 - RNA, 22 nt, Human
ggcacaauggcuaauucccaga

SEQ ID NO: 3663809 - RNA, 17 nt, Human
ggcacacaaggggcccu

SEQ ID NO: 3663810 - RNA, 13 nt, Human
ggcacacacugug

SEQ ID NO: 3663811 - RNA, 17 nt, Human
ggcacaccuccucccac

SEQ ID NO: 3663812 - RNA, 20 nt, Human
ggcacaccuccucccacugc

SEQ ID NO: 3663813 - RNA, 12 nt, Human
ggcacacgccuc

SEQ ID NO: 3663814 - RNA, 20 nt, Human
ggcacacgcugcucugcccc

SEQ ID NO: 3663815 - RNA, 15 nt, Human
ggcacacucugccag

SEQ ID NO: 3663816 - RNA, 21 nt, Human
ggcacagaaacacaauauuuu

SEQ ID NO: 3663817 - RNA, 15 nt, Human
ggcacagaugcucca

SEQ ID NO: 3663818 - RNA, 17 nt, Human
ggcacagcaucuguagu

SEQ ID NO: 3663819 - RNA, 22 nt, Human
ggcacagcaucuguagucagcc

SEQ ID NO: 3663820 - RNA, 20 nt, Human
ggcacagccggggccugccu

SEQ ID NO: 3663821 - RNA, 13 nt, Human
ggcacagccugca

SEQ ID NO: 3663822 - RNA, 20 nt, Human
ggcacagcggagucuguccu

SEQ ID NO: 3663823 - RNA, 17 nt, Human
ggcacaggagcuaccug

SEQ ID NO: 3663824 - RNA, 20 nt, Human
ggcacaggagcuaccugugu

SEQ ID NO: 3663825 - RNA, 12 nt, Human
ggcacaggaggc

SEQ ID NO: 3663826 - RNA, 16 nt, Human
ggcacaggaggcaggc

SEQ ID NO: 3663827 - RNA, 21 nt, Human
ggcacaggcagggcaggacca

SEQ ID NO: 3663828 - RNA, 14 nt, Human
ggcacagggagaag

SEQ ID NO: 3663829 - RNA, 16 nt, Human
ggcacagggcaguggg

SEQ ID NO: 3663830 - RNA, 12 nt, Human
ggcacagggccu

SEQ ID NO: 3663831 - RNA, 17 nt, Human
ggcacagggccuggccc

SEQ ID NO: 3663832 - RNA, 14 nt, Human
ggcacaguccagga

SEQ ID NO: 3663833 - RNA, 14 nt, Human
ggcacaucauuuca

SEQ ID NO: 3663834 - RNA, 21 nt, Human
ggcacauccuaugcaauauau

SEQ ID NO: 3663835 - RNA, 18 nt, Human
ggcacauugagcugugca

SEQ ID NO: 3663836 - RNA, 18 nt, Human
ggcacauuuaagagacag

SEQ ID NO: 3663837 - RNA, 20 nt, Human
ggcacauuuccccagaccug

SEQ ID NO: 3663838 - RNA, 18 nt, Human
ggcacauuuuuuuuuuua

SEQ ID NO: 3663839 - RNA, 20 nt, Human
ggcaccaaagaugcagccgc

SEQ ID NO: 3663840 - RNA, 13 nt, Human
ggcaccagacacc

SEQ ID NO: 3663841 - RNA, 16 nt, Human
ggcaccagcagccugg

SEQ ID NO: 3663842 - RNA, 18 nt, Human
ggcaccagccggggaaga

SEQ ID NO: 3663843 - RNA, 15 nt, Human
ggcaccagucccugu

SEQ ID NO: 3663844 - RNA, 17 nt, Human
ggcaccagucccugucc

SEQ ID NO: 3663845 - RNA, 18 nt, Human
ggcaccagucccuguccg

SEQ ID NO: 3663846 - RNA, 21 nt, Human
ggcaccaguguccuccccuca

SEQ ID NO: 3663847 - RNA, 22 nt, Human
ggcacccaagaccucagggcac

SEQ ID NO: 3663848 - RNA, 16 nt, Human
ggcacccacccagcac

SEQ ID NO: 3663849 - RNA, 13 nt, Human
ggcacccacccug

SEQ ID NO: 3663850 - RNA, 20 nt, Human
ggcacccaccguggaggagg

SEQ ID NO: 3663851 - RNA, 13 nt, Human
ggcacccccagcc

SEQ ID NO: 3663852 - RNA, 16 nt, Human
ggcacccccagccugg

SEQ ID NO: 3663853 - RNA, 17 nt, Human
ggcacccccagccuggg

SEQ ID NO: 3663854 - RNA, 17 nt, Human
ggcacccccgucaagag

SEQ ID NO: 3663855 - RNA, 13 nt, Human
ggaccaaagcuga

SEQ ID NO: 3663856 - RNA, 22 nt, Human
ggaccaaagggagucugccagg

SEQ ID NO: 3663857 - RNA, 18 nt, Human
ggaccaacaagggcagug

SEQ ID NO: 3663858 - RNA, 22 nt, Human
ggaccaacaagggcaguggagg

SEQ ID NO: 3663859 - RNA, 20 nt, Human
ggaccaacccuggggaagga

SEQ ID NO: 3663860 - RNA, 18 nt, Human
ggaccaacccuguuuccu

SEQ ID NO: 3663861 - RNA, 22 nt, Human
ggaccaacccuguuuccugagu

SEQ ID NO: 3663862 - RNA, 16 nt, Human
ggaccaagcaucuugg

SEQ ID NO: 3663863 - RNA, 15 nt, Human
ggaccaaggaccccu

SEQ ID NO: 3663864 - RNA, 15 nt, Human
ggaccaaggcaaggc

SEQ ID NO: 3663865 - RNA, 20 nt, Human
ggaccaaggcaaggcaggug

SEQ ID NO: 3663866 - RNA, 22 nt, Human
ggaccaaggcaaggcaggugcc

SEQ ID NO: 3663867 - RNA, 21 nt, Human
ggaccaauaaaauuucuaaga

SEQ ID NO: 3663868 - RNA, 20 nt, Human
ggaccacaacuauuuucaga

SEQ ID NO: 3663869 - RNA, 13 nt, Human
ggaccacaccucc

SEQ ID NO: 3663870 - RNA, 13 nt, Human
ggaccagagcugc

SEQ ID NO: 3663871 - RNA, 17 nt, Human
ggaccagagcugccacc

SEQ ID NO: 3663872 - RNA, 16 nt, Human
ggaccagccuggccca

SEQ ID NO: 3663873 - RNA, 22 nt, Human
ggaccagccuggcccaccccac

SEQ ID NO: 3663874 - RNA, 18 nt, Human
ggaccagcucaggacaga

SEQ ID NO: 3663875 - RNA, 19 nt, Human
ggaccagcuggggcguggg

SEQ ID NO: 3663876 - RNA, 17 nt, Human
ggaccagcuuuucccaa

SEQ ID NO: 3663877 - RNA, 22 nt, Human
ggaccagcuuuucccaaaagcc

SEQ ID NO: 3663878 - RNA, 14 nt, Human
ggaccaggacagga

SEQ ID NO: 3663879 - RNA, 17 nt, Human
ggaccaggacucccucc

SEQ ID NO: 3663880 - RNA, 16 nt, Human
ggaccagucccagagc

SEQ ID NO: 3663881 - RNA, 17 nt, Human
ggaccagucccagagca

SEQ ID NO: 3663882 - RNA, 18 nt, Human
ggaccagucccagagcag

SEQ ID NO: 3663883 - RNA, 22 nt, Human
ggaccagugguuuccagucaug

SEQ ID NO: 3663884 - RNA, 21 nt, Human
ggaccaugcugucuggcacag

SEQ ID NO: 3663885 - RNA, 22 nt, Human
ggaccaugcugucuggcacagc

SEQ ID NO: 3663886 - RNA, 23 nt, Human
ggaccaugcugucuggcacagcc

SEQ ID NO: 3663887 - RNA, 21 nt, Human
ggaccaugugucacuugugcu

SEQ ID NO: 3663888 - RNA, 16 nt, Human
ggaccauuuuccugca

SEQ ID NO: 3663889 - RNA, 12 nt, Human
ggacccagaccc

SEQ ID NO: 3663890 - RNA, 18 nt, Human
ggacccagcgggcagguu

SEQ ID NO: 3663891 - RNA, 13 nt, Human
ggacccagcuaau

SEQ ID NO: 3663892 - RNA, 13 nt, Human
ggacccagugcag

SEQ ID NO: 3663893 - RNA, 17 nt, Human
ggacccaguggcagggc

SEQ ID NO: 3663894 - RNA, 21 nt, Human
ggacccaguggcagggcacag

SEQ ID NO: 3663895 - RNA, 19 nt, Human
ggacccauagaucuucuga

SEQ ID NO: 3663896 - RNA, 20 nt, Human
ggacccauagaucuucugaa

SEQ ID NO: 3663897 - RNA, 19 nt, Human
ggacccaucacgccugugc

SEQ ID NO: 3663898 - RNA, 23 nt, Human
ggaccccacuccggcccuccaga

SEQ ID NO: 3663899 - RNA, 12 nt, Human
ggaccccagaga

SEQ ID NO: 3663900 - RNA, 17 nt, Human
ggaccccagccauccag

SEQ ID NO: 3663901 - RNA, 12 nt, Human
ggaccccagccu

SEQ ID NO: 3663902 - RNA, 11 nt, Human
ggaccccagcu

SEQ ID NO: 3663903 - RNA, 12 nt, Human
ggaccccagcuc

SEQ ID NO: 3663904 - RNA, 14 nt, Human
ggaccccaucugug

SEQ ID NO: 3663905 - RNA, 23 nt, Human
ggaccccccuuucacaggcagcc

SEQ ID NO: 3663906 - RNA, 16 nt, Human
ggacccccguggggca

SEQ ID NO: 3663907 - RNA, 14 nt, Human
ggacccccuucccc

SEQ ID NO: 3663908 - RNA, 15 nt, Human
ggaccccgagccugg

SEQ ID NO: 3663909 - RNA, 14 nt, Human
ggaccccuaugaag

SEQ ID NO: 3663910 - RNA, 18 nt, Human
ggcaggcuagaaccuggc

SEQ ID NO: 3663911 - RNA, 13 nt, Human
ggcaggcucacug

SEQ ID NO: 3663912 - RNA, 15 nt, Human
ggcaggcucacugcc

SEQ ID NO: 3663913 - RNA, 19 nt, Human
ggcaggcucacugccaggc

SEQ ID NO: 3663914 - RNA, 16 nt, Human
ggcaggcugacaucug

SEQ ID NO: 3663915 - RNA, 12 nt, Human
ggcaggcuggcc

SEQ ID NO: 3663916 - RNA, 22 nt, Human
ggcagggagcggccggccagcc

SEQ ID NO: 3663917 - RNA, 17 nt, Human
ggcagggagcugggccc

SEQ ID NO: 3663918 - RNA, 10 nt, Human
ggcagggagg

SEQ ID NO: 3663919 - RNA, 15 nt, Human
ggcagggaggcacca

SEQ ID NO: 3663920 - RNA, 19 nt, Human
ggcagggagggccugggcc

SEQ ID NO: 3663921 - RNA, 20 nt, Human
ggcagggagggccugggccc

SEQ ID NO: 3663922 - RNA, 17 nt, Human
ggcagggaggucaggcc

SEQ ID NO: 3663923 - RNA, 19 nt, Human
ggcagggaggucaggcccu

SEQ ID NO: 3663924 - RNA, 22 nt, Human
ggcagggaggucaggcccugga

SEQ ID NO: 3663925 - RNA, 17 nt, Human
ggcagggcacagggccu

SEQ ID NO: 3663926 - RNA, 18 nt, Human
ggcagggccuugcccaga

SEQ ID NO: 3663927 - RNA, 20 nt, Human
ggcagggccuugcccagaga

SEQ ID NO: 3663928 - RNA, 21 nt, Human
ggcagggccuugcccagagau

SEQ ID NO: 3663929 - RNA, 13 nt, Human
ggcagggcucucc

SEQ ID NO: 3663930 - RNA, 13 nt, Human
ggcagggcucuga

SEQ ID NO: 3663931 - RNA, 14 nt, Human
ggcagggcucugau

SEQ ID NO: 3663932 - RNA, 16 nt, Human
ggcagggcugugcuug

SEQ ID NO: 3663933 - RNA, 14 nt, Human
ggcaggggacagga

SEQ ID NO: 3663934 - RNA, 19 nt, Human
ggcaggggaggccaucugg

SEQ ID NO: 3663935 - RNA, 22 nt, Human
ggcaggggagggucagccaggg

SEQ ID NO: 3663936 - RNA, 19 nt, Human
ggcaggggcccugcagcuc

SEQ ID NO: 3663937 - RNA, 14 nt, Human
ggcaggggccugga

SEQ ID NO: 3663938 - RNA, 16 nt, Human
ggcaggggccuggaga

SEQ ID NO: 3663939 - RNA, 17 nt, Human
ggcagggggcugcugcu

SEQ ID NO: 3663940 - RNA, 15 nt, Human
ggcagggucaggaga

SEQ ID NO: 3663941 - RNA, 17 nt, Human
ggcagggucaggagagg

SEQ ID NO: 3663942 - RNA, 14 nt, Human
ggcagggugacccu

SEQ ID NO: 3663943 - RNA, 21 nt, Human
ggcagggugggauggaggaga

SEQ ID NO: 3663944 - RNA, 17 nt, Human
ggcagguaaacuccugu

SEQ ID NO: 3663945 - RNA, 23 nt, Human
ggcagguaugaucggcaggacac

SEQ ID NO: 3663946 - RNA, 18 nt, Human
ggcagguccuccccucuc

SEQ ID NO: 3663947 - RNA, 16 nt, Human
ggcaggugacagugag

SEQ ID NO: 3663948 - RNA, 19 nt, Human
ggcaggugacagugagguc

SEQ ID NO: 3663949 - RNA, 21 nt, Human
ggcaggugccaugucugggaa

SEQ ID NO: 3663950 - RNA, 15 nt, Human
ggcaggugccuccag

SEQ ID NO: 3663951 - RNA, 21 nt, Human
ggcaggugcuggagcacuggg

SEQ ID NO: 3663952 - RNA, 16 nt, Human
ggcaggugggagcuug

SEQ ID NO: 3663953 - RNA, 17 nt, Human
ggcaggugguggcacug

SEQ ID NO: 3663954 - RNA, 21 nt, Human
ggcaggugguggcacugagcc

SEQ ID NO: 3663955 - RNA, 17 nt, Human
ggcagguuggugggggc

SEQ ID NO: 3663956 - RNA, 16 nt, Human
ggcaguaaagagaaac

SEQ ID NO: 3663957 - RNA, 13 nt, Human
ggcaguaccugag

SEQ ID NO: 3663958 - RNA, 21 nt, Human
ggcaguagaacuccaggcccu

SEQ ID NO: 3663959 - RNA, 14 nt, Human
ggcaguaggccggu

SEQ ID NO: 3663960 - RNA, 22 nt, Human
ggcagucauucagcaccagagc

SEQ ID NO: 3663961 - RNA, 19 nt, Human
ggcagucgauagagcugua

SEQ ID NO: 3663962 - RNA, 14 nt, Human
ggcagucgggggcu

SEQ ID NO: 3663963 - RNA, 19 nt, Human
ggcagucgggggcuggccu

SEQ ID NO: 3663964 - RNA, 14 nt, Human
ggcagucucucucu

SEQ ID NO: 3663965 - RNA, 16 nt, Human
ggcagugagggagggc

SEQ ID NO: 3663966 - RNA, 19 nt, Human
ggcagugagugagccuggc

SEQ ID NO: 3663967 - RNA, 22 nt, Human
ggcagugcagcaaccagagcac

SEQ ID NO: 3663968 - RNA, 19 nt, Human
ggcagugcucacccacacc

SEQ ID NO: 3663969 - RNA, 16 nt, Human
ggcagugcuuggccca

SEQ ID NO: 3663970 - RNA, 21 nt, Human
ggcagugcuuggcccaggagu

SEQ ID NO: 3663971 - RNA, 22 nt, Human
ggcagugcuuggcccaggaguu

SEQ ID NO: 3663972 - RNA, 23 nt, Human
ggcagugcuuggcccaggaguuu

SEQ ID NO: 3663973 - RNA, 11 nt, Human
ggcaguggagg

SEQ ID NO: 3663974 - RNA, 20 nt, Human
ggcaguggagucggaagggc

SEQ ID NO: 3663975 - RNA, 13 nt, Human
ggcagugggaaaa

SEQ ID NO: 3663976 - RNA, 21 nt, Human
ggcagugggacagggcauggc

SEQ ID NO: 3663977 - RNA, 18 nt, Human
ggcagugggagcugccug

SEQ ID NO: 3663978 - RNA, 13 nt, Human
ggcaguggggcug

SEQ ID NO: 3663979 - RNA, 15 nt, Human
ggcaguggggcuggg

SEQ ID NO: 3663980 - RNA, 18 nt, Human
ggcaguggggcugggggu

SEQ ID NO: 3663981 - RNA, 21 nt, Human
ggcaguggugguuuucuguuc

SEQ ID NO: 3663982 - RNA, 16 nt, Human
ggcaguuaccauuaaa

SEQ ID NO: 3663983 - RNA, 12 nt, Human
ggcaguuauauu

SEQ ID NO: 3663984 - RNA, 16 nt, Human
ggcaguuauauuuugc

SEQ ID NO: 3663985 - RNA, 21 nt, Human
ggcaguucgcagccacccuga

SEQ ID NO: 3663986 - RNA, 23 nt, Human
ggcaguucgcagccacccugagg

SEQ ID NO: 3663987 - RNA, 15 nt, Human
ggcaguucugggugc

SEQ ID NO: 3663988 - RNA, 20 nt, Human
ggcaguuuugacaucagcca

SEQ ID NO: 3663989 - RNA, 12 nt, Human
ggcaguuuuucu

SEQ ID NO: 3663990 - RNA, 13 nt, Human
ggcauaaaacagc

SEQ ID NO: 3663991 - RNA, 14 nt, Human
ggcauacuaauaaa

SEQ ID NO: 3663992 - RNA, 15 nt, Human
ggcauagcccagaca

SEQ ID NO: 3663993 - RNA, 13 nt, Human
ggcauagcucugg

SEQ ID NO: 3663994 - RNA, 17 nt, Human
ggcauaggccugggugc

SEQ ID NO: 3663995 - RNA, 22 nt, Human
ggcauauauuggguuccauucu

SEQ ID NO: 3663996 - RNA, 15 nt, Human
ggcauauuuuucaca

SEQ ID NO: 3663997 - RNA, 17 nt, Human
ggcaucacagggcagag

SEQ ID NO: 3663998 - RNA, 21 nt, Human
ggcaucacaugcucaaugacu

SEQ ID NO: 3663999 - RNA, 23 nt, Human
ggcaucaccuuaggcagggaagu

SEQ ID NO: 3664000 - RNA, 17 nt, Human
ggccucaacuccuccca

SEQ ID NO: 3664001 - RNA, 20 nt, Human
ggccucaacuccucccauag

SEQ ID NO: 3664002 - RNA, 14 nt, Human
ggccucaagugauu

SEQ ID NO: 3664003 - RNA, 22 nt, Human
ggccucaagugauucuccugcc

SEQ ID NO: 3664004 - RNA, 12 nt, Human
ggccucacccac

SEQ ID NO: 3664005 - RNA, 17 nt, Human
ggccucacccaccccug

SEQ ID NO: 3664006 - RNA, 19 nt, Human
ggccucaccgagugggggc

SEQ ID NO: 3664007 - RNA, 10 nt, Human
ggccucagaa

SEQ ID NO: 3664008 - RNA, 11 nt, Human
ggccucagacu

SEQ ID NO: 3664009 - RNA, 20 nt, Human
ggccucagacugcacccagg

SEQ ID NO: 3664010 - RNA, 17 nt, Human
ggccucagcugaaugcc

SEQ ID NO: 3664011 - RNA, 13 nt, Human
ggccucagcugcc

SEQ ID NO: 3664012 - RNA, 16 nt, Human
ggccucagcugccuca

SEQ ID NO: 3664013 - RNA, 17 nt, Human
ggccucagcugccucac

SEQ ID NO: 3664014 - RNA, 17 nt, Human
ggccucagggcuccuug

SEQ ID NO: 3664015 - RNA, 19 nt, Human
ggccucaggugcuguccau

SEQ ID NO: 3664016 - RNA, 20 nt, Human
ggccucaguggacuuuccac

SEQ ID NO: 3664017 - RNA, 22 nt, Human
ggccucaguggacuuuccaccc

SEQ ID NO: 3664018 - RNA, 20 nt, Human
ggccucauguggcuggaaga

SEQ ID NO: 3664019 - RNA, 23 nt, Human
ggccuccaaguccacaguggaac

SEQ ID NO: 3664020 - RNA, 20 nt, Human
ggccuccagaacucacuggg

SEQ ID NO: 3664021 - RNA, 15 nt, Human
ggccuccagcucagc

SEQ ID NO: 3664022 - RNA, 19 nt, Human
ggccuccaggcccgucugu

SEQ ID NO: 3664023 - RNA, 22 nt, Human
ggccuccaggcccgucugucca

SEQ ID NO: 3664024 - RNA, 17 nt, Human
ggccuccauccugaggc

SEQ ID NO: 3664025 - RNA, 16 nt, Human
ggccucccaaagugcu

SEQ ID NO: 3664026 - RNA, 18 nt, Human
ggccucccaacucacccc

SEQ ID NO: 3664027 - RNA, 20 nt, Human
ggccucccaacucaccccag

SEQ ID NO: 3664028 - RNA, 14 nt, Human
ggccucccacagac

SEQ ID NO: 3664029 - RNA, 14 nt, Human
ggccucccacagug

SEQ ID NO: 3664030 - RNA, 11 nt, Human
ggccucccacc

SEQ ID NO: 3664031 - RNA, 11 nt, Human
ggccuccccca

SEQ ID NO: 3664032 - RNA, 13 nt, Human
ggccucccccacu

SEQ ID NO: 3664033 - RNA, 15 nt, Human
ggccucccccacuuu

SEQ ID NO: 3664034 - RNA, 15 nt, Human
ggccuccccugccac

SEQ ID NO: 3664035 - RNA, 14 nt, Human
ggccuccccugcug

SEQ ID NO: 3664036 - RNA, 23 nt, Human
ggccucccucucucuucugcucc

SEQ ID NO: 3664037 - RNA, 16 nt, Human
ggccuccggccucccc

SEQ ID NO: 3664038 - RNA, 19 nt, Human
ggccuccggcgucagccuc

SEQ ID NO: 3664039 - RNA, 20 nt, Human
ggccuccggcgucagccucc

SEQ ID NO: 3664040 - RNA, 22 nt, Human
ggccuccggcgucagccuccag

SEQ ID NO: 3664041 - RNA, 19 nt, Human
ggccuccucuguccagggc

SEQ ID NO: 3664042 - RNA, 22 nt, Human
ggccuccucuucaccccggcag

SEQ ID NO: 3664043 - RNA, 13 nt, Human
ggccuccugccuc

SEQ ID NO: 3664044 - RNA, 15 nt, Human
ggccuccugccucua

SEQ ID NO: 3664045 - RNA, 14 nt, Human
ggccuccugugugu

SEQ ID NO: 3664046 - RNA, 22 nt, Human
ggccuccuucugagcuccuguc

SEQ ID NO: 3664047 - RNA, 17 nt, Human
ggccucgccuggccuga

SEQ ID NO: 3664048 - RNA, 18 nt, Human
ggccucgccuggccugag

SEQ ID NO: 3664049 - RNA, 22 nt, Human
ggccucggacuuagcugggaga

SEQ ID NO: 3664050 - RNA, 13 nt, Human
ggccucggagccu

SEQ ID NO: 3664051 - RNA, 19 nt, Human
ggccucggagccucauccg

SEQ ID NO: 3664052 - RNA, 14 nt, Human
ggccucggccccuc

SEQ ID NO: 3664053 - RNA, 17 nt, Human
ggccucuaaccccaggc

SEQ ID NO: 3664054 - RNA, 19 nt, Human
ggccucuaaccccaggccc

SEQ ID NO: 3664055 - RNA, 20 nt, Human
ggccucuaaccccaggcccc

SEQ ID NO: 3664056 - RNA, 12 nt, Human
ggccucuccagu

SEQ ID NO: 3664057 - RNA, 20 nt, Human
ggccucucccuccuccagga

SEQ ID NO: 3664058 - RNA, 23 nt, Human
ggccucucccuccuccaggaagc

SEQ ID NO: 3664059 - RNA, 13 nt, Human
ggccucucuagca

SEQ ID NO: 3664060 - RNA, 14 nt, Human
ggccucucucccuc

SEQ ID NO: 3664061 - RNA, 13 nt, Human
ggccucucuggcc

SEQ ID NO: 3664062 - RNA, 19 nt, Human
ggccucucuggccucccac

SEQ ID NO: 3664063 - RNA, 14 nt, Human
ggccucugcacucc

SEQ ID NO: 3664064 - RNA, 19 nt, Human
ggccucugcggagcacacu

SEQ ID NO: 3664065 - RNA, 17 nt, Human
ggccucuuaugggcugg

SEQ ID NO: 3664066 - RNA, 18 nt, Human
ggccucuucaaauuagaa

SEQ ID NO: 3664067 - RNA, 17 nt, Human
ggccucuucucucagac

SEQ ID NO: 3664068 - RNA, 18 nt, Human
ggccucuugagcaguggc

SEQ ID NO: 3664069 - RNA, 17 nt, Human
ggccugaaagaggcuga

SEQ ID NO: 3664070 - RNA, 22 nt, Human
ggccugaaaggagcccuuaucu

SEQ ID NO: 3664071 - RNA, 20 nt, Human
ggccugaaauccugguuccu

SEQ ID NO: 3664072 - RNA, 12 nt, Human
ggccugaaccac

SEQ ID NO: 3664073 - RNA, 22 nt, Human
ggccugaauccaaaagaaaaac

SEQ ID NO: 3664074 - RNA, 22 nt, Human
ggccugaaugcuuauagguggc

SEQ ID NO: 3664075 - RNA, 20 nt, Human
ggccugaccaaacagccaac

SEQ ID NO: 3664076 - RNA, 16 nt, Human
ggccugaccucccccu

SEQ ID NO: 3664077 - RNA, 18 nt, Human
ggccugacugccaagcca

SEQ ID NO: 3664078 - RNA, 15 nt, Human
ggccugacugcucag

SEQ ID NO: 3664079 - RNA, 16 nt, Human
ggccugagacccagga

SEQ ID NO: 3664080 - RNA, 13 nt, Human
ggccugagagaau

SEQ ID NO: 3664081 - RNA, 15 nt, Human
ggccugagagucagc

SEQ ID NO: 3664082 - RNA, 16 nt, Human
ggccugagccuggcca

SEQ ID NO: 3664083 - RNA, 18 nt, Human
ggccugagcgcuccugcc

SEQ ID NO: 3664084 - RNA, 21 nt, Human
ggccugagcguccagaaaugg

SEQ ID NO: 3664085 - RNA, 12 nt, Human
ggccugagcugg

SEQ ID NO: 3664086 - RNA, 22 nt, Human
ggccugaggaugagcuggaagg

SEQ ID NO: 3664087 - RNA, 18 nt, Human
ggccugaggucucgcuga

SEQ ID NO: 3664088 - RNA, 19 nt, Human
ggccugaggucuggcugcu

SEQ ID NO: 3664089 - RNA, 14 nt, Human
ggccugaugacaga

SEQ ID NO: 3664090 - RNA, 18 nt, Human
ggccugaugcucccuccc

SEQ ID NO: 3664091 - RNA, 22 nt, Human
ggccugaugcucccuccccugc

SEQ ID NO: 3664092 - RNA, 17 nt, Human
ggccugcacggugggcc

SEQ ID NO: 3664093 - RNA, 13 nt, Human
ggccugcacuaau

SEQ ID NO: 3664094 - RNA, 17 nt, Human
ggccugcaggaccugcc

SEQ ID NO: 3664095 - RNA, 20 nt, Human
ggccugcaggaccugccugu

SEQ ID NO: 3664096 - RNA, 17 nt, Human
ggccugccaccuggacc

SEQ ID NO: 3664097 - RNA, 13 nt, Human
ggccugcccccac

SEQ ID NO: 3664098 - RNA, 17 nt, Human
ggccugcccucagggau

SEQ ID NO: 3664099 - RNA, 20 nt, Human
ggccugccuccagggcugga

SEQ ID NO: 3664100 - RNA, 15 nt, Human
ggccugccucccacu

SEQ ID NO: 3664101 - RNA, 12 nt, Human
ggccugccuggc

SEQ ID NO: 3664102 - RNA, 18 nt, Human
ggccugcucccagcagcc

SEQ ID NO: 3664103 - RNA, 10 nt, Human
ggccugcugc

SEQ ID NO: 3664104 - RNA, 11 nt, Human
ggccugcugcu

SEQ ID NO: 3664105 - RNA, 15 nt, Human
ggccugcuggaggcc

SEQ ID NO: 3664106 - RNA, 21 nt, Human
ggccugcuggaggccucaggu

SEQ ID NO: 3664107 - RNA, 16 nt, Human
ggccuggaagacagag

SEQ ID NO: 3664108 - RNA, 23 nt, Human
ggccuggaauuagcuuggggcca

SEQ ID NO: 3664109 - RNA, 15 nt, Human
ggccuggaccugccu

SEQ ID NO: 3664110 - RNA, 21 nt, Human
ggccuggaccugccuccugcc

SEQ ID NO: 3664111 - RNA, 14 nt, Human
ggccuggagauccu

SEQ ID NO: 3664112 - RNA, 19 nt, Human
ggccuggaggugggguugg

SEQ ID NO: 3664113 - RNA, 16 nt, Human
ggccuggauucauuuc

SEQ ID NO: 3664114 - RNA, 17 nt, Human
ggccuggauucauuucc

SEQ ID NO: 3664115 - RNA, 22 nt, Human
ggccuggcacagugucugggcu

SEQ ID NO: 3664116 - RNA, 20 nt, Human
gaaaaaaaauguucuuuggg

SEQ ID NO: 3664117 - RNA, 16 nt, Human
gaaaaaaaccacacaa

SEQ ID NO: 3664118 - RNA, 18 nt, Human
gaaaaaaaguuugccaga

SEQ ID NO: 3664119 - RNA, 22 nt, Human
gaaaaaaauaauuuuaaaaaug

SEQ ID NO: 3664120 - RNA, 15 nt, Human
gaaaaaaauacuauu

SEQ ID NO: 3664121 - RNA, 14 nt, Human
gaaaaaaauguauu

SEQ ID NO: 3664122 - RNA, 20 nt, Human
gaaaaaaauguauuuuaugu

SEQ ID NO: 3664123 - RNA, 12 nt, Human
gaaaaaaauuga

SEQ ID NO: 3664124 - RNA, 23 nt, Human
gaaaaaagaaauucccuggacca

SEQ ID NO: 3664125 - RNA, 10 nt, Human
gaaaaaagcu

SEQ ID NO: 3664126 - RNA, 11 nt, Human
gaaaaaagcuc

SEQ ID NO: 3664127 - RNA, 13 nt, Human
gaaaaaagcucau

SEQ ID NO: 3664128 - RNA, 15 nt, Human
gaaaaaaggaagugg

SEQ ID NO: 3664129 - RNA, 23 nt, Human
gaaaaaaguuguaggcgaaucau

SEQ ID NO: 3664130 - RNA, 16 nt, Human
gaaaaaauaauuauuu

SEQ ID NO: 3664131 - RNA, 15 nt, Human
gaaaaaauacauuuu

SEQ ID NO: 3664132 - RNA, 11 nt, Human
gaaaaaauaua

SEQ ID NO: 3664133 - RNA, 22 nt, Human
gaaaaaaugguagcauuuuaaa

SEQ ID NO: 3664134 - RNA, 14 nt, Human
gaaaaaauguugga

SEQ ID NO: 3664135 - RNA, 20 nt, Human
gaaaaaauuuacuuuaaacu

SEQ ID NO: 3664136 - RNA, 20 nt, Human
gaaaaacaacaacacaauaa

SEQ ID NO: 3664137 - RNA, 18 nt, Human
gaaaaacaucugaaagcc

SEQ ID NO: 3664138 - RNA, 15 nt, Human
gaaaaaccauuugaa

SEQ ID NO: 3664139 - RNA, 15 nt, Human
gaaaaaccuuggguu

SEQ ID NO: 3664140 - RNA, 19 nt, Human
gaaaaacucuuuauuuucc

SEQ ID NO: 3664141 - RNA, 17 nt, Human
gaaaaacuggcaacauu

SEQ ID NO: 3664142 - RNA, 20 nt, Human
gaaaaacuuccaugaggcca

SEQ ID NO: 3664143 - RNA, 12 nt, Human
gaaaaacuugug

SEQ ID NO: 3664144 - RNA, 22 nt, Human
gaaaaacuuuggaaccagacuc

SEQ ID NO: 3664145 - RNA, 20 nt, Human
aacgugaugaucagcuguuu

SEQ ID NO: 3664146 - RNA, 12 nt, Human
aacgugcaacug

SEQ ID NO: 3664147 - RNA, 17 nt, Human
aacgugcucuuuguuuu

SEQ ID NO: 3664148 - RNA, 13 nt, Human
aacguggcccaga

SEQ ID NO: 3664149 - RNA, 13 nt, Human
aacguggcugcuu

SEQ ID NO: 3664150 - RNA, 17 nt, Human
aacguggggcagcacag

SEQ ID NO: 3664151 - RNA, 19 nt, Human
aacgugugcuguguuugcu

SEQ ID NO: 3664152 - RNA, 19 nt, Human
aacguguugccuugaacca

SEQ ID NO: 3664153 - RNA, 13 nt, Human
aacguuggacuuu

SEQ ID NO: 3664154 - RNA, 20 nt, Human
aacguuuaagccaaaacaau

SEQ ID NO: 3664155 - RNA, 18 nt, Human
aacguuuagcugacaaaa

SEQ ID NO: 3664156 - RNA, 18 nt, Human
aacguuucaguaauaaaa

SEQ ID NO: 3664157 - RNA, 17 nt, Human
aacguuuucuaauugcu

SEQ ID NO: 3664158 - RNA, 23 nt, Human
aacguuuucuguuuggaggagca

SEQ ID NO: 3664159 - RNA, 18 nt, Human
aacguuuuguuugaaaaa

SEQ ID NO: 3664160 - RNA, 11 nt, Human
aacguuuuucc

SEQ ID NO: 3664161 - RNA, 19 nt, Human
aacuaaaauaauuuuguaa

SEQ ID NO: 3664162 - RNA, 16 nt, Human
aacuaaacucauuuau

SEQ ID NO: 3664163 - RNA, 17 nt, Human
aacuaaacuuucacacc

SEQ ID NO: 3664164 - RNA, 20 nt, Human
aacuaaagugcugcacucaa

SEQ ID NO: 3664165 - RNA, 19 nt, Human
aacuaaaguuguacuuuaa

SEQ ID NO: 3664166 - RNA, 17 nt, Human
aacuaaauagcauguau

SEQ ID NO: 3664167 - RNA, 20 nt, Human
aacuaaauagcauguauugu

SEQ ID NO: 3664168 - RNA, 16 nt, Human
aacuaaauuugauacu

SEQ ID NO: 3664169 - RNA, 21 nt, Human
aacuaaauuugauacuuauau

SEQ ID NO: 3664170 - RNA, 12 nt, Human
aacuaacacuau

SEQ ID NO: 3664171 - RNA, 22 nt, Human
aacuaacaggcuuagugaugua

SEQ ID NO: 3664172 - RNA, 14 nt, Human
aacuaacauguccu

SEQ ID NO: 3664173 - RNA, 15 nt, Human
aacuaacauguccug

SEQ ID NO: 3664174 - RNA, 13 nt, Human
aacuaacuaaaac

SEQ ID NO: 3664175 - RNA, 19 nt, Human
aacuaagaaacuuuuguaa

SEQ ID NO: 3664176 - RNA, 23 nt, Human
aacuaagaaauaugcacaauagc

SEQ ID NO: 3664177 - RNA, 14 nt, Human
aacuaagauucuuu

SEQ ID NO: 3664178 - RNA, 15 nt, Human
aacuaagauucuuuu

SEQ ID NO: 3664179 - RNA, 18 nt, Human
aacuaaggugcuaaaucu

SEQ ID NO: 3664180 - RNA, 14 nt, Human
aacuaauaaaagca

SEQ ID NO: 3664181 - RNA, 15 nt, Human
aacuaauaaaagcau

SEQ ID NO: 3664182 - RNA, 12 nt, Human
aacuaauaaaau

SEQ ID NO: 3664183 - RNA, 13 nt, Human
aacuaauaaaaua

SEQ ID NO: 3664184 - RNA, 14 nt, Human
aacuaauaaaauau

SEQ ID NO: 3664185 - RNA, 19 nt, Human
aacuaauaaaauauuuucu

SEQ ID NO: 3664186 - RNA, 22 nt, Human
aacuaauaugggcauuguaguu

SEQ ID NO: 3664187 - RNA, 12 nt, Human
aacuaaugccuu

SEQ ID NO: 3664188 - RNA, 19 nt, Human
aacuacaaacaaaauuucu

SEQ ID NO: 3664189 - RNA, 21 nt, Human
aacuacaaagguuuaaaugaa

SEQ ID NO: 3664190 - RNA, 20 nt, Human
aacuacauuagguugugaau

SEQ ID NO: 3664191 - RNA, 16 nt, Human
aacuacauuuuaacau

SEQ ID NO: 3664192 - RNA, 17 nt, Human
aacuacccuuaauuacu

SEQ ID NO: 3664193 - RNA, 18 nt, Human
aacuacccuuaauuacuu

SEQ ID NO: 3664194 - RNA, 17 nt, Human
aacuacuaauagaauaa

SEQ ID NO: 3664195 - RNA, 14 nt, Human
aacuacucuuugau

SEQ ID NO: 3664196 - RNA, 15 nt, Human
aacuacucuuugauu

SEQ ID NO: 3664197 - RNA, 23 nt, Human
aacuacugaaugaagcaguauuu

SEQ ID NO: 3664198 - RNA, 17 nt, Human
aacuacugcaccauuua

SEQ ID NO: 3664199 - RNA, 19 nt, Human
aacuacugccuuuagaaaa

SEQ ID NO: 3664200 - RNA, 17 nt, Human
aacuacuguguuccugg

SEQ ID NO: 3664201 - RNA, 16 nt, Human
aacuacuuugcugcua

SEQ ID NO: 3664202 - RNA, 16 nt, Human
aacuagacauucuguc

SEQ ID NO: 3664203 - RNA, 20 nt, Human
aacuagacucccaagcugga

SEQ ID NO: 3664204 - RNA, 16 nt, Human
aacuagagaugugcaa

SEQ ID NO: 3664205 - RNA, 20 nt, Human
aacuagaggugagaaauuua

SEQ ID NO: 3664206 - RNA, 21 nt, Human
aacuagaggugagaaauuuaa

SEQ ID NO: 3664207 - RNA, 14 nt, Human
aacuagcaccaggg

SEQ ID NO: 3664208 - RNA, 18 nt, Human
aacuagccaccaacucuu

SEQ ID NO: 3664209 - RNA, 16 nt, Human
aacuagccccuggggu

SEQ ID NO: 3664210 - RNA, 22 nt, Human
aacuagcuuacaugagaacaga

SEQ ID NO: 3664211 - RNA, 23 nt, Human
aacuaggaaggcacuucugccug

SEQ ID NO: 3664212 - RNA, 15 nt, Human
aacuaggaaguggcu

SEQ ID NO: 3664213 - RNA, 17 nt, Human
aacuagggaagauaaua

SEQ ID NO: 3664214 - RNA, 18 nt, Human
aacuagggaagauaauau

SEQ ID NO: 3664215 - RNA, 20 nt, Human
aacuauacuugaacaaaagg

SEQ ID NO: 3664216 - RNA, 22 nt, Human
aacuauacuugaacaaaagggu

SEQ ID NO: 3664217 - RNA, 23 nt, Human
aacuauagcuugcagaacuguag

SEQ ID NO: 3664218 - RNA, 24 nt, Human
aacuauauauaaucaucaaguaau

SEQ ID NO: 3664219 - RNA, 18 nt, Human
aacuauccugacuucuaa

SEQ ID NO: 3664220 - RNA, 18 nt, Human
aacuaucuuggugaauuu

SEQ ID NO: 3664221 - RNA, 17 nt, Human
aacuaugaacuacaaag

SEQ ID NO: 3664222 - RNA, 22 nt, Human
aacuauguguuuuucucauauu

SEQ ID NO: 3664223 - RNA, 14 nt, Human
aacuauucaugcua

SEQ ID NO: 3664224 - RNA, 17 nt, Human
aacuauucgaaugaaaa

SEQ ID NO: 3664225 - RNA, 20 nt, Human
aacuauucgaaugaaaagac

SEQ ID NO: 3664226 - RNA, 16 nt, Human
aacuauugcauuuaua

SEQ ID NO: 3664227 - RNA, 22 nt, Human
aacuauugugcucagagacacu

SEQ ID NO: 3664228 - RNA, 24 nt, Human
aacuauugugcucagagacacugu

SEQ ID NO: 3664229 - RNA, 23 nt, Human
aacuauuuaacuugagcuuuaaa

SEQ ID NO: 3664230 - RNA, 16 nt, Human
aacuauuucuacacag

SEQ ID NO: 3664231 - RNA, 20 nt, Human
aacuauuucuuauauaugug

SEQ ID NO: 3664232 - RNA, 14 nt, Human
aacuauuuucagau

SEQ ID NO: 3664233 - RNA, 20 nt, Human
aacuauuuucagaugugaac

SEQ ID NO: 3664234 - RNA, 16 nt, Human
aacucaaaauauuugu

SEQ ID NO: 3664235 - RNA, 14 nt, Human
aacucaaacacaga

SEQ ID NO: 3664236 - RNA, 22 nt, Human
aacucaaacuucuggcucccuc

SEQ ID NO: 3664237 - RNA, 13 nt, Human
aacucaaauacac

SEQ ID NO: 3664238 - RNA, 23 nt, Human
aacucaaauggggccagauccag

SEQ ID NO: 3664239 - RNA, 21 nt, Human
aacucaaaugugaguguuuuu

SEQ ID NO: 3664240 - RNA, 13 nt, Human
aacucaagacaau

SEQ ID NO: 3664241 - RNA, 12 nt, Human
aacucaauauuu

SEQ ID NO: 3664242 - RNA, 13 nt, Human
aacucaauauuuu

SEQ ID NO: 3664243 - RNA, 16 nt, Human
aacucaaugcuuuauu

SEQ ID NO: 3664244 - RNA, 19 nt, Human
aacucaaugcuuuauuugu

SEQ ID NO: 3664245 - RNA, 20 nt, Human
aacucaaugcuuuauuugua

SEQ ID NO: 3664246 - RNA, 21 nt, Human
aacucaccauguaaaagaguc

SEQ ID NO: 3664247 - RNA, 16 nt, Human
aacucaccugcuggcc

SEQ ID NO: 3664248 - RNA, 21 nt, Human
aacucacugcucaagaagaca

SEQ ID NO: 3664249 - RNA, 14 nt, Human
aacucacuuuccuc

SEQ ID NO: 3664250 - RNA, 13 nt, Human
aacucagaaauuu

SEQ ID NO: 3664251 - RNA, 23 nt, Human
aacucagaacugucggaggaaag

SEQ ID NO: 3664252 - RNA, 14 nt, Human
aacucagaucacua

SEQ ID NO: 3664253 - RNA, 15 nt, Human
aacucagaucacuac

SEQ ID NO: 3664254 - RNA, 19 nt, Human
aacucagaucacuacugca

SEQ ID NO: 3664255 - RNA, 21 nt, Human
aacucagaucacuacugcagu

SEQ ID NO: 3664256 - RNA, 12 nt, Human
aacucagaucca

SEQ ID NO: 3664257 - RNA, 22 nt, Human
aacucagauccagggacagagg

SEQ ID NO: 3664258 - RNA, 14 nt, Human
aacucagccaagca

SEQ ID NO: 3664259 - RNA, 16 nt, Human
aacucagccaagcaca

SEQ ID NO: 3664260 - RNA, 20 nt, Human
aacucaggacuccagcccau

SEQ ID NO: 3664261 - RNA, 13 nt, Human
aacucagggacag

SEQ ID NO: 3664262 - RNA, 18 nt, Human
aacucagggacagagcca

SEQ ID NO: 3664263 - RNA, 22 nt, Human
aacucagucauuagacuccucc

SEQ ID NO: 3664264 - RNA, 23 nt, Human
aacucagucauuagacuccuccu

SEQ ID NO: 3664265 - RNA, 15 nt, Human
aacucauauuuucau

SEQ ID NO: 3664266 - RNA, 16 nt, Human
aacucaucauaaaaua

SEQ ID NO: 3664267 - RNA, 18 nt, Human
aacucaucauaaaauaaa

SEQ ID NO: 3664268 - RNA, 20 nt, Human
aacucaucuggaguucucaa

SEQ ID NO: 3664269 - RNA, 23 nt, Human
aacucauuccugccugucuccuu

SEQ ID NO: 3664270 - RNA, 20 nt, Human
aacucauugcaucauuuaca

SEQ ID NO: 3664271 - RNA, 22 nt, Human
aacucauuuccuauguaacugc

SEQ ID NO: 3664272 - RNA, 19 nt, Human
aacucauuuguuaaaauua

SEQ ID NO: 3664273 - RNA, 17 nt, Human
aacucauuuugcuugug

SEQ ID NO: 3664274 - RNA, 20 nt, Human
aacucauuuuugccauacau

SEQ ID NO: 3664275 - RNA, 19 nt, Human
aacuccaacauccacucuc

SEQ ID NO: 3664276 - RNA, 15 nt, Human
aacuccacaucugcc

SEQ ID NO: 3664277 - RNA, 16 nt, Human
aacuccacaucugccu

SEQ ID NO: 3664278 - RNA, 18 nt, Human
aacuccacaucugccuua

SEQ ID NO: 3664279 - RNA, 19 nt, Human
aacuccaccuugcggggau

SEQ ID NO: 3664280 - RNA, 13 nt, Human
aacuccagcaacu

SEQ ID NO: 3664281 - RNA, 15 nt, Human
ggaugacaugucccu

SEQ ID NO: 3664282 - RNA, 16 nt, Human
ggaugacaugugacuc

SEQ ID NO: 3664283 - RNA, 15 nt, Human
ggaugagagcccaga

SEQ ID NO: 3664284 - RNA, 20 nt, Human
ggaugagaguuuuggaugca

SEQ ID NO: 3664285 - RNA, 20 nt, Human
ggaugagcauggagcuggcc

SEQ ID NO: 3664286 - RNA, 13 nt, Human
ggaugagcauuua

SEQ ID NO: 3664287 - RNA, 20 nt, Human
ggaugaggccgcuagaggcc

SEQ ID NO: 3664288 - RNA, 16 nt, Human
ggaugaggugcuggga

SEQ ID NO: 3664289 - RNA, 13 nt, Human
gggagaggaaaga

SEQ ID NO: 3664290 - RNA, 21 nt, Human
gggagaggcagcccaggaagu

SEQ ID NO: 3664291 - RNA, 17 nt, Human
gggagagggaggucacu

SEQ ID NO: 3664292 - RNA, 14 nt, Human
gggagagggcgcag

SEQ ID NO: 3664293 - RNA, 17 nt, Human
gggagaggggccucaaa

SEQ ID NO: 3664294 - RNA, 17 nt, Human
gggagagugcaggccug

SEQ ID NO: 3664295 - RNA, 18 nt, Human
gggagagugucaaccaga

SEQ ID NO: 3664296 - RNA, 19 nt, Human
gggagauggaguucuugug

SEQ ID NO: 3664297 - RNA, 12 nt, Human
gggagcaggaga

SEQ ID NO: 3664298 - RNA, 13 nt, Human
gggagcaggagau

SEQ ID NO: 3664299 - RNA, 18 nt, Human
gggagcaggagauugaga

SEQ ID NO: 3664300 - RNA, 12 nt, Human
gggagcaggcag

SEQ ID NO: 3664301 - RNA, 14 nt, Human
gggagcaggcagcc

SEQ ID NO: 3664302 - RNA, 15 nt, Human
gggagcaggcggugg

SEQ ID NO: 3664303 - RNA, 21 nt, Human
gggagcaggcggugggcaccc

SEQ ID NO: 3664304 - RNA, 23 nt, Human
gggagcaggcucgggcuccccag

SEQ ID NO: 3664305 - RNA, 17 nt, Human
gggagcaguccaugcau

SEQ ID NO: 3664306 - RNA, 11 nt, Human
gggagcagugu

SEQ ID NO: 3664307 - RNA, 19 nt, Human
gggagcagugucuuccaua

SEQ ID NO: 3664308 - RNA, 18 nt, Human
gggagcauagaaggcagg

SEQ ID NO: 3664309 - RNA, 19 nt, Human
gggagcauagaaggcaggu

SEQ ID NO: 3664310 - RNA, 17 nt, Human
gggagcaugagaggagg

SEQ ID NO: 3664311 - RNA, 21 nt, Human
gggagcaugagaggaggcagc

SEQ ID NO: 3664312 - RNA, 16 nt, Human
gggagcauggcuguga

SEQ ID NO: 3664313 - RNA, 9 nt, Human
gggagccaa

SEQ ID NO: 3664314 - RNA, 12 nt, Human
gggagccaaggg

SEQ ID NO: 3664315 - RNA, 13 nt, Human
gggagccaaggga

SEQ ID NO: 3664316 - RNA, 11 nt, Human
gggagccagcc

SEQ ID NO: 3664317 - RNA, 21 nt, Human
gggagcccacuguccugggcc

SEQ ID NO: 3664318 - RNA, 16 nt, Human
gggagccccagggucu

SEQ ID NO: 3664319 - RNA, 17 nt, Human
gggagcccccagccugu

SEQ ID NO: 3664320 - RNA, 13 nt, Human
gggagccgggagc

SEQ ID NO: 3664321 - RNA, 20 nt, Human
gggagccgggcaaacuggcc

SEQ ID NO: 3664322 - RNA, 20 nt, Human
gggagccgguaacuguccug

SEQ ID NO: 3664323 - RNA, 16 nt, Human
gggagccuaggaccac

SEQ ID NO: 3664324 - RNA, 12 nt, Human
gggagccuccug

SEQ ID NO: 3664325 - RNA, 14 nt, Human
gggagccuccugcc

SEQ ID NO: 3664326 - RNA, 21 nt, Human
gggagccuccugcccaguccc

SEQ ID NO: 3664327 - RNA, 13 nt, Human
gggagcggagguu

SEQ ID NO: 3664328 - RNA, 16 nt, Human
gggagcguagaaucug

SEQ ID NO: 3664329 - RNA, 15 nt, Human
gggagcuagccagag

SEQ ID NO: 3664330 - RNA, 18 nt, Human
gggagcuccucuccugga

SEQ ID NO: 3664331 - RNA, 21 nt, Human
gggagcuccucuccuggagga

SEQ ID NO: 3664332 - RNA, 13 nt, Human
gggagcugggccc

SEQ ID NO: 3664333 - RNA, 16 nt, Human
gggagcugggccuggu

SEQ ID NO: 3664334 - RNA, 24 nt, Human
gggaggaaauuugaauggguccau

SEQ ID NO: 3664335 - RNA, 23 nt, Human
gggaggaagaagcuuaggcaggg

SEQ ID NO: 3664336 - RNA, 13 nt, Human
gggaggaagcaga

SEQ ID NO: 3664337 - RNA, 21 nt, Human
gggaggaagcagaauaaagca

SEQ ID NO: 3664338 - RNA, 14 nt, Human
ggcaggcagguguu

SEQ ID NO: 3664339 - RNA, 23 nt, Human
ggcaggcaucggggagccgggag

SEQ ID NO: 3664340 - RNA, 15 nt, Human
ggcaggcauggcccu

SEQ ID NO: 3664341 - RNA, 15 nt, Human
ggcaggccaccuggc

SEQ ID NO: 3664342 - RNA, 19 nt, Human
ggcaggcccugcacugucc

SEQ ID NO: 3664343 - RNA, 22 nt, Human
ggcaggcuaaggcguggagcug

SEQ ID NO: 3664344 - RNA, 19 nt, Human
ggcaggcuagaaccuggca

SEQ ID NO: 3664345 - RNA, 16 nt, Human
ggcaggcucacugcca

SEQ ID NO: 3664346 - RNA, 18 nt, Human
ggcaggcugacaucugug

SEQ ID NO: 3664347 - RNA, 11 nt, Human
ggcaggcuggc

SEQ ID NO: 3664348 - RNA, 13 nt, Human
ggcaggcuggcca

SEQ ID NO: 3664349 - RNA, 12 nt, Human
ggcaggcugggc

SEQ ID NO: 3664350 - RNA, 13 nt, Human
ggcaggcugggcc

SEQ ID NO: 3664351 - RNA, 16 nt, Human
ggcaggcugggccaug

SEQ ID NO: 3664352 - RNA, 22 nt, Human
ggcaggcugucuggccaggccu

SEQ ID NO: 3664353 - RNA, 18 nt, Human
ggcagggaaaggcucuga

SEQ ID NO: 3664354 - RNA, 18 nt, Human
ggcagggaacauggggag

SEQ ID NO: 3664355 - RNA, 16 nt, Human
ggcagggacagggccg

SEQ ID NO: 3664356 - RNA, 14 nt, Human
ggcagggaggcagc

SEQ ID NO: 3664357 - RNA, 17 nt, Human
ggcagggagggccuggg

SEQ ID NO: 3664358 - RNA, 18 nt, Human
ggcagggagggccugggc

SEQ ID NO: 3664359 - RNA, 15 nt, Human
ggcagggauuugagg

SEQ ID NO: 3664360 - RNA, 15 nt, Human
ggcagggcacagggc

SEQ ID NO: 3664361 - RNA, 16 nt, Human
ggcagggcacagggcc

SEQ ID NO: 3664362 - RNA, 16 nt, Human
ggcagggcaggaccag

SEQ ID NO: 3664363 - RNA, 19 nt, Human
ggcagggccuugcccagag

SEQ ID NO: 3664364 - RNA, 11 nt, Human
ggcagggcuca

SEQ ID NO: 3664365 - RNA, 13 nt, Human
ggcagggcucagg

SEQ ID NO: 3664366 - RNA, 15 nt, Human
ggcagggcucaggau

SEQ ID NO: 3664367 - RNA, 21 nt, Human
ggcagggcucccacagagaca

SEQ ID NO: 3664368 - RNA, 16 nt, Human
ggcagggcucuccugg

SEQ ID NO: 3664369 - RNA, 18 nt, Human
ggcagggcucuccuggcu

SEQ ID NO: 3664370 - RNA, 19 nt, Human
ggcagggcucuccuggcuu

SEQ ID NO: 3664371 - RNA, 21 nt, Human
ggcaggggccuccaugggccc

SEQ ID NO: 3664372 - RNA, 16 nt, Human
ggcaggggcuggaggg

SEQ ID NO: 3664373 - RNA, 15 nt, Human
ggcaggggcuuccug

SEQ ID NO: 3664374 - RNA, 13 nt, Human
ggcagggggcugc

SEQ ID NO: 3664375 - RNA, 18 nt, Human
ggcagggggcugcugcug

SEQ ID NO: 3664376 - RNA, 15 nt, Human
ggcagggguggagga

SEQ ID NO: 3664377 - RNA, 16 nt, Human
ggcaggggugggggug

SEQ ID NO: 3664378 - RNA, 17 nt, Human
ggcagggguuagagcag

SEQ ID NO: 3664379 - RNA, 12 nt, Human
ggcaggguccua

SEQ ID NO: 3664380 - RNA, 17 nt, Human
ggcagggucucacucug

SEQ ID NO: 3664381 - RNA, 20 nt, Human
ggcagggucucacucugucg

SEQ ID NO: 3664382 - RNA, 16 nt, Human
ggcagggugggaugga

SEQ ID NO: 3664383 - RNA, 23 nt, Human
ggcagggugggauggaggagaag

SEQ ID NO: 3664384 - RNA, 20 nt, Human
ggcaggguuuuaucucuguc

SEQ ID NO: 3664385 - RNA, 20 nt, Human
ggcagguagccagggggacu

SEQ ID NO: 3664386 - RNA, 14 nt, Human
ggcagguccccaga

SEQ ID NO: 3664387 - RNA, 15 nt, Human
ggcagguccuggcca

SEQ ID NO: 3664388 - RNA, 16 nt, Human
ggcaggugaccuucug

SEQ ID NO: 3664389 - RNA, 13 nt, Human
ggcaggugccucc

SEQ ID NO: 3664390 - RNA, 21 nt, Human
ggcaggugccuccaggugugc

SEQ ID NO: 3664391 - RNA, 17 nt, Human
ggcaggugggagcuuga

SEQ ID NO: 3664392 - RNA, 22 nt, Human
ggcaggugguggcacugagccc

SEQ ID NO: 3664393 - RNA, 16 nt, Human
ggcagguuagaaccua

SEQ ID NO: 3664394 - RNA, 19 nt, Human
ggcaguaaagagaaacuuu

SEQ ID NO: 3664395 - RNA, 16 nt, Human
ggcaguaccugagggu

SEQ ID NO: 3664396 - RNA, 23 nt, Human
ggcaguaccugggcaagcuggcg

SEQ ID NO: 3664397 - RNA, 15 nt, Human
ggcaguccgugggac

SEQ ID NO: 3664398 - RNA, 15 nt, Human
ggcagucgggggcug

SEQ ID NO: 3664399 - RNA, 18 nt, Human
ggcagucgggggcuggcc

SEQ ID NO: 3664400 - RNA, 21 nt, Human
ggcagucgggggcuggccuag

SEQ ID NO: 3664401 - RNA, 22 nt, Human
ggcagucgggggcuggccuagg

SEQ ID NO: 3664402 - RNA, 21 nt, Human
ggcagugagggagggcuguca

SEQ ID NO: 3664403 - RNA, 15 nt, Human
ggcagugagugagcc

SEQ ID NO: 3664404 - RNA, 16 nt, Human
ggcagugagugagccu

SEQ ID NO: 3664405 - RNA, 18 nt, Human
ggcagugaugcuggaugc

SEQ ID NO: 3664406 - RNA, 16 nt, Human
ggcagugccagggcag

SEQ ID NO: 3664407 - RNA, 17 nt, Human
ggcagugcuuggcccag

SEQ ID NO: 3664408 - RNA, 20 nt, Human
ggcagugcuuggcccaggag

SEQ ID NO: 3664409 - RNA, 12 nt, Human
ggcaguggaggu

SEQ ID NO: 3664410 - RNA, 16 nt, Human
ggcagugggagcugcc

SEQ ID NO: 3664411 - RNA, 20 nt, Human
ggcagugggucccacuuccc

SEQ ID NO: 3664412 - RNA, 21 nt, Human
ggcaguguagggaguuguggg

SEQ ID NO: 3664413 - RNA, 15 nt, Human
ggcaguguuuugaga

SEQ ID NO: 3664414 - RNA, 24 nt, Human
ggcaguuaccauuaaaccaucucc

SEQ ID NO: 3664415 - RNA, 17 nt, Human
ggcaguuagagaugccu

SEQ ID NO: 3664416 - RNA, 14 nt, Human
ggcaguuauauuuu

SEQ ID NO: 3664417 - RNA, 22 nt, Human
ggcaguucgcagccacccugag

SEQ ID NO: 3664418 - RNA, 14 nt, Human
ggcaguuggccaga

SEQ ID NO: 3664419 - RNA, 23 nt, Human
ggcaguuuugacaucagccagcu

SEQ ID NO: 3664420 - RNA, 10 nt, Human
ggcaguuuuu

SEQ ID NO: 3664421 - RNA, 17 nt, Human
ggcauacuauguggaug

SEQ ID NO: 3664422 - RNA, 16 nt, Human
ggcauagaggcuucuc

SEQ ID NO: 3664423 - RNA, 21 nt, Human
ggcauagcuccccgcuucugc

SEQ ID NO: 3664424 - RNA, 15 nt, Human
ggcauagcucugggg

SEQ ID NO: 3664425 - RNA, 14 nt, Human
ggcauaggccuggg

SEQ ID NO: 3664426 - RNA, 16 nt, Human
ggcauaggccugggug

SEQ ID NO: 3664427 - RNA, 20 nt, Human
ggcauauauuaaaagcaggc

SEQ ID NO: 3664428 - RNA, 17 nt, Human
ggcauauuuuucacaua

SEQ ID NO: 3664429 - RNA, 13 nt, Human
ggcaucacagggc

SEQ ID NO: 3664430 - RNA, 14 nt, Human
ggcaucacagggca

SEQ ID NO: 3664431 - RNA, 20 nt, Human
ggcaucaccuuaggcaggga

SEQ ID NO: 3664432 - RNA, 13 nt, Human
ggcaucagcuggc

SEQ ID NO: 3664433 - RNA, 23 nt, Human
ggcaucaucucagcucacugcaa

SEQ ID NO: 3664434 - RNA, 15 nt, Human
ggcauccacuucaca

SEQ ID NO: 3664435 - RNA, 12 nt, Human
ggcccagagccc

SEQ ID NO: 3664436 - RNA, 13 nt, Human
ggcccagagccca

SEQ ID NO: 3664437 - RNA, 14 nt, Human
ggcccagagcccag

SEQ ID NO: 3664438 - RNA, 17 nt, Human
ggcccagagcccagcuc

SEQ ID NO: 3664439 - RNA, 14 nt, Human
ggcccagaggcaca

SEQ ID NO: 3664440 - RNA, 13 nt, Human
ggcccagaggcug

SEQ ID NO: 3664441 - RNA, 14 nt, Human
ggcccagaggcuga

SEQ ID NO: 3664442 - RNA, 23 nt, Human
ggcccagaggcugaguuuucucu

SEQ ID NO: 3664443 - RNA, 14 nt, Human
ggcccagagggccu

SEQ ID NO: 3664444 - RNA, 20 nt, Human
ggcccagcauugcugguucu

SEQ ID NO: 3664445 - RNA, 13 nt, Human
ggcccagccccca

SEQ ID NO: 3664446 - RNA, 11 nt, Human
ggcccagcccg

SEQ ID NO: 3664447 - RNA, 16 nt, Human
ggcccagccgaccccc

SEQ ID NO: 3664448 - RNA, 16 nt, Human
ggcccagccggccucu

SEQ ID NO: 3664449 - RNA, 21 nt, Human
ggcccagccggccucucuggc

SEQ ID NO: 3664450 - RNA, 22 nt, Human
ggcccagccggccucucuggcc

SEQ ID NO: 3664451 - RNA, 19 nt, Human
ggcccagccuuuguucccc

SEQ ID NO: 3664452 - RNA, 16 nt, Human
ggcccagcggccccuc

SEQ ID NO: 3664453 - RNA, 17 nt, Human
ggcccagcggccccucc

SEQ ID NO: 3664454 - RNA, 14 nt, Human
ggcccagcuccccc

SEQ ID NO: 3664455 - RNA, 16 nt, Human
ggcccagcucccccgg

SEQ ID NO: 3664456 - RNA, 22 nt, Human
ggcccaggaccaucauccuacu

SEQ ID NO: 3664457 - RNA, 13 nt, Human
ggcccaggccauc

SEQ ID NO: 3664458 - RNA, 13 nt, Human
ggcccaggcugcc

SEQ ID NO: 3664459 - RNA, 20 nt, Human
ggcccagggacaccagccag

SEQ ID NO: 3664460 - RNA, 20 nt, Human
ggcccagggagaggccauga

SEQ ID NO: 3664461 - RNA, 17 nt, Human
ggcccagggcaagcucc

SEQ ID NO: 3664462 - RNA, 20 nt, Human
ggcccagggcaagcuccgca

SEQ ID NO: 3664463 - RNA, 15 nt, Human
ggcccagggcaucug

SEQ ID NO: 3664464 - RNA, 19 nt, Human
ggcccagggcccagagccc

SEQ ID NO: 3664465 - RNA, 15 nt, Human
ggcccaggugagucc

SEQ ID NO: 3664466 - RNA, 23 nt, Human
ggcccagugucaaguugugcuug

SEQ ID NO: 3664467 - RNA, 19 nt, Human
ggcccauagaaacaugaca

SEQ ID NO: 3664468 - RNA, 14 nt, Human
ggcccaucaugggg

SEQ ID NO: 3664469 - RNA, 15 nt, Human
ggcccaucucccugc

SEQ ID NO: 3664470 - RNA, 20 nt, Human
ggcccauguauggccaggaa

SEQ ID NO: 3664471 - RNA, 19 nt, Human
ggcccauucuacuugcucu

SEQ ID NO: 3664472 - RNA, 22 nt, Human
ggcccauucuacuugcucugga

SEQ ID NO: 3664473 - RNA, 20 nt, Human
ggccccaaaaccacagcccu

SEQ ID NO: 3664474 - RNA, 19 nt, Human
ggccccaacucgggcuccc

SEQ ID NO: 3664475 - RNA, 17 nt, Human
ggccccaccagugccuc

SEQ ID NO: 3664476 - RNA, 18 nt, Human
ggccccaccagugccucu

SEQ ID NO: 3664477 - RNA, 23 nt, Human
ggccccacccucguggacaccug

SEQ ID NO: 3664478 - RNA, 15 nt, Human
ggccccacccugggc

SEQ ID NO: 3664479 - RNA, 17 nt, Human
ggccccacccugggccc

SEQ ID NO: 3664480 - RNA, 21 nt, Human
ggccccacccugggcccuggg

SEQ ID NO: 3664481 - RNA, 13 nt, Human
ggccccaccugca

SEQ ID NO: 3664482 - RNA, 15 nt, Human
ggccccaccuggccc

SEQ ID NO: 3664483 - RNA, 13 nt, Human
ggccccacugaug

SEQ ID NO: 3664484 - RNA, 12 nt, Human
ggccccacuggg

SEQ ID NO: 3664485 - RNA, 11 nt, Human
ggccccagaga

SEQ ID NO: 3664486 - RNA, 23 nt, Human
ggccccagagacucagagggagg

SEQ ID NO: 3664487 - RNA, 15 nt, Human
ggccccagcacagcu

SEQ ID NO: 3664488 - RNA, 12 nt, Human
ggccccagccag

SEQ ID NO: 3664489 - RNA, 12 nt, Human
ggccccagccca

SEQ ID NO: 3664490 - RNA, 14 nt, Human
ggccccagcccacc

SEQ ID NO: 3664491 - RNA, 13 nt, Human
ggccccagcccug

SEQ ID NO: 3664492 - RNA, 18 nt, Human
ggccccagcccugcuggg

SEQ ID NO: 3664493 - RNA, 21 nt, Human
ggccccagcccugcuggggau

SEQ ID NO: 3664494 - RNA, 11 nt, Human
ggccccagccu

SEQ ID NO: 3664495 - RNA, 13 nt, Human
ggccccagccucc

SEQ ID NO: 3664496 - RNA, 15 nt, Human
ggccccagccuggcc

SEQ ID NO: 3664497 - RNA, 16 nt, Human
ggccccagccuggccc

SEQ ID NO: 3664498 - RNA, 18 nt, Human
ggccccagccuggcccag

SEQ ID NO: 3664499 - RNA, 23 nt, Human
ggccccagccuggcccagcuccc

SEQ ID NO: 3664500 - RNA, 18 nt, Human
ggccccaggaaaggccca

SEQ ID NO: 3664501 - RNA, 15 nt, Human
ggccccaggaagccg

SEQ ID NO: 3664502 - RNA, 22 nt, Human
ggccccaggcauugccaagggc

SEQ ID NO: 3664503 - RNA, 17 nt, Human
ggccccagggcuacccu

SEQ ID NO: 3664504 - RNA, 13 nt, Human
ggccccagucagc

SEQ ID NO: 3664505 - RNA, 21 nt, Human
ggccccagucagccucucucc

SEQ ID NO: 3664506 - RNA, 16 nt, Human
ggccccaugaccucca

SEQ ID NO: 3664507 - RNA, 16 nt, Human
ggcccccaccuggcuc

SEQ ID NO: 3664508 - RNA, 17 nt, Human
ggcccccaccuggcuca

SEQ ID NO: 3664509 - RNA, 13 nt, Human
gggcagagggcug

SEQ ID NO: 3664510 - RNA, 22 nt, Human
gggcagagggcuggaggcccag

SEQ ID NO: 3664511 - RNA, 17 nt, Human
gggcagagugagaccca

SEQ ID NO: 3664512 - RNA, 16 nt, Human
gggcagcacagagagg

SEQ ID NO: 3664513 - RNA, 12 nt, Human
gggcagcacagc

SEQ ID NO: 3664514 - RNA, 13 nt, Human
gggcagcacagca

SEQ ID NO: 3664515 - RNA, 14 nt, Human
gggcagcacagcaa

SEQ ID NO: 3664516 - RNA, 20 nt, Human
gggcagcagaaggggguggu

SEQ ID NO: 3664517 - RNA, 16 nt, Human
gggcagcagcagcccu

SEQ ID NO: 3664518 - RNA, 19 nt, Human
gggcagcagcagcccugcc

SEQ ID NO: 3664519 - RNA, 12 nt, Human
gggcagcagcca

SEQ ID NO: 3664520 - RNA, 13 nt, Human
gggcagcagccag

SEQ ID NO: 3664521 - RNA, 14 nt, Human
gggcagcagccagc

SEQ ID NO: 3664522 - RNA, 17 nt, Human
gggcagcagccagcccu

SEQ ID NO: 3664523 - RNA, 20 nt, Human
gggcagcagccagcccugcc

SEQ ID NO: 3664524 - RNA, 22 nt, Human
gggcagcagccagcccugccug

SEQ ID NO: 3664525 - RNA, 23 nt, Human
gggcagcagccagcccugccugg

SEQ ID NO: 3664526 - RNA, 20 nt, Human
gggcagcauagcaagacaca

SEQ ID NO: 3664527 - RNA, 19 nt, Human
gggcagccagggagagccc

SEQ ID NO: 3664528 - RNA, 22 nt, Human
gggcagccuggcucccaggaca

SEQ ID NO: 3664529 - RNA, 18 nt, Human
gggcagcgcccuuccucu

SEQ ID NO: 3664530 - RNA, 23 nt, Human
gggcagcgcccuuccucuccacc

SEQ ID NO: 3664531 - RNA, 14 nt, Human
gggcagcuccucug

SEQ ID NO: 3664532 - RNA, 19 nt, Human
gggcagcugccuccccucc

SEQ ID NO: 3664533 - RNA, 14 nt, Human
gggcagcugggccc

SEQ ID NO: 3664534 - RNA, 16 nt, Human
gggcagcugggcccaa

SEQ ID NO: 3664535 - RNA, 19 nt, Human
gggcagcugggcccaaccc

SEQ ID NO: 3664536 - RNA, 15 nt, Human
gggcagcugucccuu

SEQ ID NO: 3664537 - RNA, 20 nt, Human
gggcagcuuagggcccugga

SEQ ID NO: 3664538 - RNA, 19 nt, Human
gggcaggaaggagagccug

SEQ ID NO: 3664539 - RNA, 17 nt, Human
gggcaggaccagcccac

SEQ ID NO: 3664540 - RNA, 21 nt, Human
gggcaggaccagcccacgcug

SEQ ID NO: 3664541 - RNA, 22 nt, Human
gggcaggacucagcuccccaga

SEQ ID NO: 3664542 - RNA, 14 nt, Human
gggcaggaguagcu

SEQ ID NO: 3664543 - RNA, 12 nt, Human
gggcaggcacag

SEQ ID NO: 3664544 - RNA, 23 nt, Human
gggcaggccaccuggcucucacc

SEQ ID NO: 3664545 - RNA, 15 nt, Human
gggcaggccagagcu

SEQ ID NO: 3664546 - RNA, 23 nt, Human
gggcaggcccugcacuguccugc

SEQ ID NO: 3664547 - RNA, 12 nt, Human
gggcaggcuggg

SEQ ID NO: 3664548 - RNA, 16 nt, Human
gggcaggcugggccau

SEQ ID NO: 3664549 - RNA, 20 nt, Human
gggcagggaaggggaggcag

SEQ ID NO: 3664550 - RNA, 18 nt, Human
gggcagggagcugggccc

SEQ ID NO: 3664551 - RNA, 13 nt, Human
gggcagggcagcc

SEQ ID NO: 3664552 - RNA, 15 nt, Human
gggcagggcucccac

SEQ ID NO: 3664553 - RNA, 17 nt, Human
gggcaggugggagcuug

SEQ ID NO: 3664554 - RNA, 22 nt, Human
gggcaggugguggcacugagcc

SEQ ID NO: 3664555 - RNA, 15 nt, Human
gggcagucuggaggg

SEQ ID NO: 3664556 - RNA, 19 nt, Human
gggcagugcuagugagcug

SEQ ID NO: 3664557 - RNA, 18 nt, Human
gggcagugcuuggcccag

SEQ ID NO: 3664558 - RNA, 14 nt, Human
gggcaguggaggug

SEQ ID NO: 3664559 - RNA, 18 nt, Human
gggcagugggucccagau

SEQ ID NO: 3664560 - RNA, 21 nt, Human
gggcagugguaagcucuggcu

SEQ ID NO: 3664561 - RNA, 20 nt, Human
gggcagugguguggagaagc

SEQ ID NO: 3664562 - RNA, 22 nt, Human
gggcaguucgcagccacccuga

SEQ ID NO: 3664563 - RNA, 23 nt, Human
gggcauaucggcucacaaagaga

SEQ ID NO: 3664564 - RNA, 13 nt, Human
gggcauccucagg

SEQ ID NO: 3664565 - RNA, 16 nt, Human
gggcaucucugggcug

SEQ ID NO: 3664566 - RNA, 18 nt, Human
gggcaucuggccuuacac

SEQ ID NO: 3664567 - RNA, 17 nt, Human
gggcaucuugcuggcua

SEQ ID NO: 3664568 - RNA, 12 nt, Human
gggcaugacacg

SEQ ID NO: 3664569 - RNA, 14 nt, Human
gggcaugcuggggc

SEQ ID NO: 3664570 - RNA, 20 nt, Human
gggcauggacguucggggca

SEQ ID NO: 3664571 - RNA, 22 nt, Human
gggcauggacguucggggcaug

SEQ ID NO: 3664572 - RNA, 17 nt, Human
gggcauggccagguggc

SEQ ID NO: 3664573 - RNA, 18 nt, Human
gggcaugguaccagcccu

SEQ ID NO: 3664574 - RNA, 19 nt, Human
gggcaugguaccagcccug

SEQ ID NO: 3664575 - RNA, 18 nt, Human
gggcauguauuggccugg

SEQ ID NO: 3664576 - RNA, 21 nt, Human
gggcauguauuggccuggagg

SEQ ID NO: 3664577 - RNA, 14 nt, Human
gggcaugugggcuu

SEQ ID NO: 3664578 - RNA, 13 nt, Human
gggcauugacaaa

SEQ ID NO: 3664579 - RNA, 20 nt, Human
gggccaaaagcuucccuccc

SEQ ID NO: 3664580 - RNA, 16 nt, Human
gaacuugaggacacau

SEQ ID NO: 3664581 - RNA, 19 nt, Human
gaacuugaggacacauguc

SEQ ID NO: 3664582 - RNA, 21 nt, Human
gaacuugaggacacaugucca

SEQ ID NO: 3664583 - RNA, 12 nt, Human
gaacuugcaugg

SEQ ID NO: 3664584 - RNA, 16 nt, Human
gaacuugccugccuuu

SEQ ID NO: 3664585 - RNA, 19 nt, Human
gaacuugccugccuuucca

SEQ ID NO: 3664586 - RNA, 13 nt, Human
gaacuuggaagca

SEQ ID NO: 3664587 - RNA, 15 nt, Human
gaacuuggaggcacc

SEQ ID NO: 3664588 - RNA, 13 nt, Human
gaacuuggcgcug

SEQ ID NO: 3664589 - RNA, 15 nt, Human
gaacuuggcgcugcc

SEQ ID NO: 3664590 - RNA, 17 nt, Human
gaacuuggcgcugcccc

SEQ ID NO: 3664591 - RNA, 23 nt, Human
gaacuugguucccauuugcuccu

SEQ ID NO: 3664592 - RNA, 15 nt, Human
gaacuuguagcugua

SEQ ID NO: 3664593 - RNA, 17 nt, Human
gaacuuguagcuguaaa

SEQ ID NO: 3664594 - RNA, 15 nt, Human
gaacuugucucuuca

SEQ ID NO: 3664595 - RNA, 13 nt, Human
gaacuuucauuuu

SEQ ID NO: 3664596 - RNA, 14 nt, Human
gaacuuucauuuuu

SEQ ID NO: 3664597 - RNA, 16 nt, Human
gaacuuugaccucugc

SEQ ID NO: 3664598 - RNA, 22 nt, Human
gaacuuuuccucuguaucacug

SEQ ID NO: 3664599 - RNA, 15 nt, Human
gaacuuuuucuuuuc

SEQ ID NO: 3664600 - RNA, 19 nt, Human
gaacuuuuuuaaauaaacu

SEQ ID NO: 3664601 - RNA, 16 nt, Human
gaagaaaaaaaauaac

SEQ ID NO: 3664602 - RNA, 20 nt, Human
gaagaaaaaaacgaaaacag

SEQ ID NO: 3664603 - RNA, 16 nt, Human
gaagaaaaaaaucuuc

SEQ ID NO: 3664604 - RNA, 19 nt, Human
gaagaaaaaaggccuugaa

SEQ ID NO: 3664605 - RNA, 13 nt, Human
gaagaaaaacuca

SEQ ID NO: 3664606 - RNA, 17 nt, Human
gaagaaaagagaagaag

SEQ ID NO: 3664607 - RNA, 19 nt, Human
gaagaaaagagaagaagaa

SEQ ID NO: 3664608 - RNA, 20 nt, Human
gaagaaaagugggccagugu

SEQ ID NO: 3664609 - RNA, 20 nt, Human
gaagaaaauacuuaaauguu

SEQ ID NO: 3664610 - RNA, 15 nt, Human
gaagaaaauagaauu

SEQ ID NO: 3664611 - RNA, 21 nt, Human
gaagaaaauguucuuccaguu

SEQ ID NO: 3664612 - RNA, 17 nt, Human
gaagaaacacuuucucu

SEQ ID NO: 3664613 - RNA, 16 nt, Human
gaagaaacagcuauga

SEQ ID NO: 3664614 - RNA, 18 nt, Human
gaagaaaggccaucagag

SEQ ID NO: 3664615 - RNA, 17 nt, Human
gaagaaauacugcacuu

SEQ ID NO: 3664616 - RNA, 13 nt, Human
gaagaaaugaaau

SEQ ID NO: 3664617 - RNA, 14 nt, Human
gaagaaaugaaauu

SEQ ID NO: 3664618 - RNA, 15 nt, Human
gaagaaaugaaauuu

SEQ ID NO: 3664619 - RNA, 23 nt, Human
gaagaaaugaaauuuuaccaagu

SEQ ID NO: 3664620 - RNA, 13 nt, Human
gaagaacaggccu

SEQ ID NO: 3664621 - RNA, 14 nt, Human
gaagaacugcaggc

SEQ ID NO: 3664622 - RNA, 19 nt, Human
gaagaacugcaggcccugg

SEQ ID NO: 3664623 - RNA, 15 nt, Human
gaagaagaaaagaga

SEQ ID NO: 3664624 - RNA, 15 nt, Human
gaagaagaagaagaa

SEQ ID NO: 3664625 - RNA, 19 nt, Human
gaagaagagaagcugcuga

SEQ ID NO: 3664626 - RNA, 14 nt, Human
gaagaagagccaca

SEQ ID NO: 3664627 - RNA, 14 nt, Human
gaagaagagggaga

SEQ ID NO: 3664628 - RNA, 13 nt, Human
gaagaagcagaga

SEQ ID NO: 3664629 - RNA, 12 nt, Human
gaagaagccugu

SEQ ID NO: 3664630 - RNA, 18 nt, Human
gaagaagcuuaggcaggg

SEQ ID NO: 3664631 - RNA, 14 nt, Human
gaagaagggagaag

SEQ ID NO: 3664632 - RNA, 15 nt, Human
gaagaagggagaaga

SEQ ID NO: 3664633 - RNA, 16 nt, Human
gaagaagggagaagaa

SEQ ID NO: 3664634 - RNA, 17 nt, Human
gaagaagggagaagaaa

SEQ ID NO: 3664635 - RNA, 20 nt, Human
gaagaagguggaccuuuuaa

SEQ ID NO: 3664636 - RNA, 16 nt, Human
gaagaaggugggagga

SEQ ID NO: 3664637 - RNA, 12 nt, Human
gaagaauaauuu

SEQ ID NO: 3664638 - RNA, 14 nt, Human
gaagaauauucagg

SEQ ID NO: 3664639 - RNA, 15 nt, Human
gaagaauauuguauu

SEQ ID NO: 3664640 - RNA, 19 nt, Human
gaagaauauuguuccuaag

SEQ ID NO: 3664641 - RNA, 20 nt, Human
gaagaauauuguuccuaagu

SEQ ID NO: 3664642 - RNA, 22 nt, Human
gaagaauauuguuccuaaguuc

SEQ ID NO: 3664643 - RNA, 21 nt, Human
gaagaaucucaucucagugaa

SEQ ID NO: 3664644 - RNA, 20 nt, Human
gaagaaugcaugcuuuccau

SEQ ID NO: 3664645 - RNA, 24 nt, Human
gaagaaugcuuaaucagauagaua

SEQ ID NO: 3664646 - RNA, 15 nt, Human
gaagaauggagagga

SEQ ID NO: 3664647 - RNA, 16 nt, Human
gaagaauggagaggaa

SEQ ID NO: 3664648 - RNA, 17 nt, Human
gaagaauugaaaaguuu

SEQ ID NO: 3664649 - RNA, 21 nt, Human
gaagaauugaaaaguuuuugu

SEQ ID NO: 3664650 - RNA, 20 nt, Human
gaagaauugaacccaggagg

SEQ ID NO: 3664651 - RNA, 13 nt, Human
gaagaauuuaaag

SEQ ID NO: 3664652 - RNA, 17 nt, Human
gaagaauuuucagaccc

SEQ ID NO: 3664653 - RNA, 21 nt, Human
gaagaauuuucagaccccagc

SEQ ID NO: 3664654 - RNA, 20 nt, Human
gaagacaaaaagacaaacau

SEQ ID NO: 3664655 - RNA, 17 nt, Human
gaagacaaaaauacucu

SEQ ID NO: 3664656 - RNA, 23 nt, Human
gaagacaaaacauacauuuugua

SEQ ID NO: 3664657 - RNA, 20 nt, Human
gaagacaauuugauacauaa

SEQ ID NO: 3664658 - RNA, 21 nt, Human
gaagacacugaaauauacaca

SEQ ID NO: 3664659 - RNA, 21 nt, Human
gaagacacugaugggcaaccc

SEQ ID NO: 3664660 - RNA, 13 nt, Human
gaagacagcucuu

SEQ ID NO: 3664661 - RNA, 14 nt, Human
gaagacagcucuua

SEQ ID NO: 3664662 - RNA, 15 nt, Human
gaagacagcucuuau

SEQ ID NO: 3664663 - RNA, 13 nt, Human
gaagacaggaaag

SEQ ID NO: 3664664 - RNA, 10 nt, Human
gaagacagug

SEQ ID NO: 3664665 - RNA, 13 nt, Human
gaagacaguggcc

SEQ ID NO: 3664666 - RNA, 18 nt, Human
gaagacaugaaccaagug

SEQ ID NO: 3664667 - RNA, 14 nt, Human
gaagacauuucuuu

SEQ ID NO: 3664668 - RNA, 18 nt, Human
gaagaccagacuguggag

SEQ ID NO: 3664669 - RNA, 20 nt, Human
gaagaccagcuuugcaguga

SEQ ID NO: 3664670 - RNA, 20 nt, Human
gaagacccauuccuucccag

SEQ ID NO: 3664671 - RNA, 18 nt, Human
gaagaccccacccaagcu

SEQ ID NO: 3664672 - RNA, 14 nt, Human
gaagacgaggcccu

SEQ ID NO: 3664673 - RNA, 16 nt, Human
gaagacgccugagcuc

SEQ ID NO: 3664674 - RNA, 21 nt, Human
gaagacgugaugccaggacca

SEQ ID NO: 3664675 - RNA, 17 nt, Human
gaagacucauucuucug

SEQ ID NO: 3664676 - RNA, 19 nt, Human
gaagacucauucuucugua

SEQ ID NO: 3664677 - RNA, 21 nt, Human
gaagacucauucuucuguacg

SEQ ID NO: 3664678 - RNA, 14 nt, Human
gaagacuccagaaa

SEQ ID NO: 3664679 - RNA, 19 nt, Human
gaagacugcauuauauuua

SEQ ID NO: 3664680 - RNA, 12 nt, Human
gaagacuguggc

SEQ ID NO: 3664681 - RNA, 13 nt, Human
gaagacuguggcu

SEQ ID NO: 3664682 - RNA, 16 nt, Human
gaagacuucaucccuc

SEQ ID NO: 3664683 - RNA, 17 nt, Human
gaagacuucaucccucu

SEQ ID NO: 3664684 - RNA, 23 nt, Human
gaagacuucaucccucuggggcu

SEQ ID NO: 3664685 - RNA, 14 nt, Human
gaagacuuuggaaa

SEQ ID NO: 3664686 - RNA, 17 nt, Human
gaagagaagcugcugac

SEQ ID NO: 3664687 - RNA, 13 nt, Human
gaagagaaggagc

SEQ ID NO: 3664688 - RNA, 18 nt, Human
gaagagacaggagggcaa

SEQ ID NO: 3664689 - RNA, 13 nt, Human
gaagagaggagag

SEQ ID NO: 3664690 - RNA, 14 nt, Human
gaagagaggagagg

SEQ ID NO: 3664691 - RNA, 15 nt, Human
gaagagaggaguuca

SEQ ID NO: 3664692 - RNA, 14 nt, Human
gaagagaggggaag

SEQ ID NO: 3664693 - RNA, 18 nt, Human
gaagagaugggcuuguuu

SEQ ID NO: 3664694 - RNA, 18 nt, Human
gaagagauuuuucaugau

SEQ ID NO: 3664695 - RNA, 22 nt, Human
gaagagcaaaaauaucccuucc

SEQ ID NO: 3664696 - RNA, 16 nt, Human
gaagagcagcuccuuc

SEQ ID NO: 3664697 - RNA, 22 nt, Human
gaagagcaggacuccaggccca

SEQ ID NO: 3664698 - RNA, 13 nt, Human
gaagagccccacu

SEQ ID NO: 3664699 - RNA, 23 nt, Human
gaagagccccacucucagaggcc

SEQ ID NO: 3664700 - RNA, 16 nt, Human
gaagagccggagccuc

SEQ ID NO: 3664701 - RNA, 15 nt, Human
gaagagccuuccacc

SEQ ID NO: 3664702 - RNA, 22 nt, Human
gaagagccuuccacccaggggc

SEQ ID NO: 3664703 - RNA, 12 nt, Human
gaagagccuugc

SEQ ID NO: 3664704 - RNA, 16 nt, Human
gaagagcuagagaaau

SEQ ID NO: 3664705 - RNA, 20 nt, Human
gaagagcucaagggacaagg

SEQ ID NO: 3664706 - RNA, 21 nt, Human
gaagagcucaagggacaagga

SEQ ID NO: 3664707 - RNA, 20 nt, Human
gaagagcuguugaugggaug

SEQ ID NO: 3664708 - RNA, 14 nt, Human
gaagaggaaaauga

SEQ ID NO: 3664709 - RNA, 18 nt, Human
gaagaggaaaaugaauaa

SEQ ID NO: 3664710 - RNA, 20 nt, Human
gaagaggccuguuuggccuc

SEQ ID NO: 3664711 - RNA, 18 nt, Human
gaagaggcgggccagcca

SEQ ID NO: 3664712 - RNA, 15 nt, Human
gaagaggcugguucu

SEQ ID NO: 3664713 - RNA, 19 nt, Human
gaagaggggacaggucccu

SEQ ID NO: 3664714 - RNA, 11 nt, Human
gaagaggggca

SEQ ID NO: 3664715 - RNA, 14 nt, Human
gaagaggggcagcc

SEQ ID NO: 3664716 - RNA, 19 nt, Human
ggcuccuuucuccagccag

SEQ ID NO: 3664717 - RNA, 17 nt, Human
ggcucgaaucucugugc

SEQ ID NO: 3664718 - RNA, 19 nt, Human
ggcucgaaucucugugccu

SEQ ID NO: 3664719 - RNA, 20 nt, Human
ggcucgaaucucugugccuu

SEQ ID NO: 3664720 - RNA, 21 nt, Human
ggcucgagcaguccugccuca

SEQ ID NO: 3664721 - RNA, 16 nt, Human
ggcucgccaugccggg

SEQ ID NO: 3664722 - RNA, 22 nt, Human
ggcucgccucaggaaugggcug

SEQ ID NO: 3664723 - RNA, 22 nt, Human
ggcucgccuucccuccugcuuu

SEQ ID NO: 3664724 - RNA, 16 nt, Human
ggcucggaggcugccc

SEQ ID NO: 3664725 - RNA, 14 nt, Human
ggcucggccugccc

SEQ ID NO: 3664726 - RNA, 14 nt, Human
gguacagagaagcc

SEQ ID NO: 3664727 - RNA, 16 nt, Human
gguacagagaagccag

SEQ ID NO: 3664728 - RNA, 21 nt, Human
gguacagagaagccagcuugu

SEQ ID NO: 3664729 - RNA, 17 nt, Human
gguacaguauggggguu

SEQ ID NO: 3664730 - RNA, 15 nt, Human
gguacauuucccugu

SEQ ID NO: 3664731 - RNA, 17 nt, Human
gaagaggggcagcccuu

SEQ ID NO: 3664732 - RNA, 20 nt, Human
gaagagguuuuaaagcuucc

SEQ ID NO: 3664733 - RNA, 16 nt, Human
gaagaguagcauuuca

SEQ ID NO: 3664734 - RNA, 20 nt, Human
gaagaguagcauuucauucu

SEQ ID NO: 3664735 - RNA, 20 nt, Human
gaagaguauuuuugacagaa

SEQ ID NO: 3664736 - RNA, 17 nt, Human
gaagagucuauugucuc

SEQ ID NO: 3664737 - RNA, 16 nt, Human
gaagagucuggaggga

SEQ ID NO: 3664738 - RNA, 14 nt, Human
gaagagugaaauac

SEQ ID NO: 3664739 - RNA, 21 nt, Human
gaagaguguggagucauucuc

SEQ ID NO: 3664740 - RNA, 20 nt, Human
gaagaguucccuugaaacuu

SEQ ID NO: 3664741 - RNA, 21 nt, Human
gaagaguucccuugaaacuuu

SEQ ID NO: 3664742 - RNA, 14 nt, Human
gaagaguugaggaa

SEQ ID NO: 3664743 - RNA, 23 nt, Human
gaagaguugaggaacuguacaga

SEQ ID NO: 3664744 - RNA, 18 nt, Human
gaagauaaguuggaaaca

SEQ ID NO: 3664745 - RNA, 16 nt, Human
gaagauaauuguugaa

SEQ ID NO: 3664746 - RNA, 15 nt, Human
gaagauacugaaaua

SEQ ID NO: 3664747 - RNA, 14 nt, Human
gaagauacuuugua

SEQ ID NO: 3664748 - RNA, 15 nt, Human
gaagauacuuuguau

SEQ ID NO: 3664749 - RNA, 14 nt, Human
gaagauagaagaaa

SEQ ID NO: 3664750 - RNA, 16 nt, Human
gaagauaggcucugca

SEQ ID NO: 3664751 - RNA, 14 nt, Human
gaagauaucuugaa

SEQ ID NO: 3664752 - RNA, 14 nt, Human
gaagauauuuuucc

SEQ ID NO: 3664753 - RNA, 15 nt, Human
gaagaucccccagaa

SEQ ID NO: 3664754 - RNA, 16 nt, Human
gaagauccccucagga

SEQ ID NO: 3664755 - RNA, 13 nt, Human
gaagauccuaccc

SEQ ID NO: 3664756 - RNA, 13 nt, Human
gaagauccuguga

SEQ ID NO: 3664757 - RNA, 14 nt, Human
gaagauccugugag

SEQ ID NO: 3664758 - RNA, 19 nt, Human
gaagaucucugcagggccg

SEQ ID NO: 3664759 - RNA, 15 nt, Human
gaagaucuuaaauuu

SEQ ID NO: 3664760 - RNA, 17 nt, Human
gaagaucuuugggcaua

SEQ ID NO: 3664761 - RNA, 17 nt, Human
gaagaugaaagaggagg

SEQ ID NO: 3664762 - RNA, 13 nt, Human
gaagaugacugag

SEQ ID NO: 3664763 - RNA, 14 nt, Human
gaagaugacugagg

SEQ ID NO: 3664764 - RNA, 20 nt, Human
gaagauggcauccugugaag

SEQ ID NO: 3664765 - RNA, 12 nt, Human
gaagaugggggc

SEQ ID NO: 3664766 - RNA, 18 nt, Human
gaagaugggggcaagaag

SEQ ID NO: 3664767 - RNA, 17 nt, Human
gaagauguagaggagaa

SEQ ID NO: 3664768 - RNA, 18 nt, Human
gaagauguagaggagaaa

SEQ ID NO: 3664769 - RNA, 13 nt, Human
gaagauguuuaac

SEQ ID NO: 3664770 - RNA, 15 nt, Human
gaagauuauuuuuua

SEQ ID NO: 3664771 - RNA, 20 nt, Human
gaagauucuauguuaauauu

SEQ ID NO: 3664772 - RNA, 23 nt, Human
gaagauucuauguuaauauuuua

SEQ ID NO: 3664773 - RNA, 17 nt, Human
gaagauucuccugugcu

SEQ ID NO: 3664774 - RNA, 20 nt, Human
gaagauucuuguauuuauua

SEQ ID NO: 3664775 - RNA, 13 nt, Human
gaagauuguuuau

SEQ ID NO: 3664776 - RNA, 15 nt, Human
gaagcaaacacauua

SEQ ID NO: 3664777 - RNA, 17 nt, Human
gaagcaaacacauuaag

SEQ ID NO: 3664778 - RNA, 17 nt, Human
gaagcaaacuaagcccc

SEQ ID NO: 3664779 - RNA, 22 nt, Human
gaagcaaaugucaugcugccuu

SEQ ID NO: 3664780 - RNA, 22 nt, Human
gaagcaacauuuuagcucuauu

SEQ ID NO: 3664781 - RNA, 16 nt, Human
gaagcaacgaagggaa

SEQ ID NO: 3664782 - RNA, 22 nt, Human
gaagcacaccaaucuuacuuug

SEQ ID NO: 3664783 - RNA, 18 nt, Human
gaagcacagaaaacuaga

SEQ ID NO: 3664784 - RNA, 21 nt, Human
gaagcaccccaugccaaagcu

SEQ ID NO: 3664785 - RNA, 18 nt, Human
gaagcacugggaucacag

SEQ ID NO: 3664786 - RNA, 19 nt, Human
gaagcacuguuccagccug

SEQ ID NO: 3664787 - RNA, 12 nt, Human
gaagcagaauaa

SEQ ID NO: 3664788 - RNA, 16 nt, Human
gaagcagaauaaagca

SEQ ID NO: 3664789 - RNA, 23 nt, Human
gaagcagaauaaagcaauuuucc

SEQ ID NO: 3664790 - RNA, 19 nt, Human
gaagcagaugcaaagaggc

SEQ ID NO: 3664791 - RNA, 23 nt, Human
gaagcagcuaaaccaaggacuga

SEQ ID NO: 3664792 - RNA, 23 nt, Human
gaagcaggcuacacugacacugg

SEQ ID NO: 3664793 - RNA, 12 nt, Human
gaagcaggcugg

SEQ ID NO: 3664794 - RNA, 18 nt, Human
gaagcagguuaaauguuu

SEQ ID NO: 3664795 - RNA, 12 nt, Human
gaagcagguucc

SEQ ID NO: 3664796 - RNA, 13 nt, Human
gaagcaguauuuu

SEQ ID NO: 3664797 - RNA, 15 nt, Human
gaagcagugagccgc

SEQ ID NO: 3664798 - RNA, 12 nt, Human
gaagcagugccc

SEQ ID NO: 3664799 - RNA, 14 nt, Human
gaagcaguggccuu

SEQ ID NO: 3664800 - RNA, 22 nt, Human
gaagcaguuguaccaagugaaa

SEQ ID NO: 3664801 - RNA, 13 nt, Human
gaagcaguugugu

SEQ ID NO: 3664802 - RNA, 22 nt, Human
gaagcauggugcccuggcuucu

SEQ ID NO: 3664803 - RNA, 16 nt, Human
gaagcauguuucaugu

SEQ ID NO: 3664804 - RNA, 17 nt, Human
gaagcauuaacuucucu

SEQ ID NO: 3664805 - RNA, 16 nt, Human
gaagcauucagagagc

SEQ ID NO: 3664806 - RNA, 16 nt, Human
gaagcauuuguauuuu

SEQ ID NO: 3664807 - RNA, 19 nt, Human
gaagcauuuguuucuacuu

SEQ ID NO: 3664808 - RNA, 15 nt, Human
gaagcauuuuauaaa

SEQ ID NO: 3664809 - RNA, 13 nt, Human
gaagccaaagaaa

SEQ ID NO: 3664810 - RNA, 15 nt, Human
gaagccaacuuggcu

SEQ ID NO: 3664811 - RNA, 14 nt, Human
gaagccaagggaaa

SEQ ID NO: 3664812 - RNA, 16 nt, Human
gaagccaagggaaagg

SEQ ID NO: 3664813 - RNA, 19 nt, Human
gaagccaagggaaaggggu

SEQ ID NO: 3664814 - RNA, 19 nt, Human
gaagccaaguggggugcug

SEQ ID NO: 3664815 - RNA, 18 nt, Human
gaagccacagcccaggcc

SEQ ID NO: 3664816 - RNA, 19 nt, Human
gaagccacagcccaggccu

SEQ ID NO: 3664817 - RNA, 16 nt, Human
gaagccacaggccuga

SEQ ID NO: 3664818 - RNA, 18 nt, Human
gaagccacccucccagcu

SEQ ID NO: 3664819 - RNA, 20 nt, Human
gaagccacgggugccagaag

SEQ ID NO: 3664820 - RNA, 15 nt, Human
gaagccacugaagcu

SEQ ID NO: 3664821 - RNA, 20 nt, Human
gaagccagcaggcucucagg

SEQ ID NO: 3664822 - RNA, 10 nt, Human
gaagccagcu

SEQ ID NO: 3664823 - RNA, 13 nt, Human
gaagccagcugcc

SEQ ID NO: 3664824 - RNA, 18 nt, Human
gaagccagcuuguuuaca

SEQ ID NO: 3664825 - RNA, 14 nt, Human
gaagccagggcccg

SEQ ID NO: 3664826 - RNA, 18 nt, Human
gaagccagugcggcaggu

SEQ ID NO: 3664827 - RNA, 18 nt, Human
gaagccaucaccucagau

SEQ ID NO: 3664828 - RNA, 20 nt, Human
gaagccaucaccucagaugg

SEQ ID NO: 3664829 - RNA, 22 nt, Human
gaagccaucaccucagauggca

SEQ ID NO: 3664830 - RNA, 12 nt, Human
gaagccauuguc

SEQ ID NO: 3664831 - RNA, 13 nt, Human
gaagccauugucu

SEQ ID NO: 3664832 - RNA, 15 nt, Human
gaagcccaagugaaa

SEQ ID NO: 3664833 - RNA, 19 nt, Human
gaagcccaauaaaccucuu

SEQ ID NO: 3664834 - RNA, 13 nt, Human
gaagcccagaggg

SEQ ID NO: 3664835 - RNA, 17 nt, Human
gaagcccagagggucug

SEQ ID NO: 3664836 - RNA, 19 nt, Human
gaagcccaggaaaggcucc

SEQ ID NO: 3664837 - RNA, 22 nt, Human
gaagcccaggaaaggcuccagg

SEQ ID NO: 3664838 - RNA, 23 nt, Human
gaagcccaggaaaggcuccagga

SEQ ID NO: 3664839 - RNA, 16 nt, Human
gaagcccaggggccgg

SEQ ID NO: 3664840 - RNA, 17 nt, Human
gaagcccauccugacca

SEQ ID NO: 3664841 - RNA, 14 nt, Human
gaagcccggcuccu

SEQ ID NO: 3664842 - RNA, 15 nt, Human
gaagcccggcuccug

SEQ ID NO: 3664843 - RNA, 18 nt, Human
gaagcccuaacucagcca

SEQ ID NO: 3664844 - RNA, 14 nt, Human
gaagcccuccuucc

SEQ ID NO: 3664845 - RNA, 13 nt, Human
gaagcccuggaga

SEQ ID NO: 3664846 - RNA, 23 nt, Human
gaagcccuucuaccuuccugcaa

SEQ ID NO: 3664847 - RNA, 16 nt, Human
gaagccgacucuggcc

SEQ ID NO: 3664848 - RNA, 21 nt, Human
gaagccgacucuggcccuggc

SEQ ID NO: 3664849 - RNA, 22 nt, Human
gaagccgacucuggcccuggcc

SEQ ID NO: 3664850 - RNA, 21 nt, Human
gaagccggggaagagauccaa

SEQ ID NO: 3664851 - RNA, 16 nt, Human
gaagccuauuguaaau

SEQ ID NO: 3664852 - RNA, 22 nt, Human
gaagccucagauuccuucccau

SEQ ID NO: 3664853 - RNA, 17 nt, Human
gaagccucagcuaccca

SEQ ID NO: 3664854 - RNA, 12 nt, Human
gaagccucuggc

SEQ ID NO: 3664855 - RNA, 13 nt, Human
gaagccucuggcu

SEQ ID NO: 3664856 - RNA, 14 nt, Human
gaagccucuggcua

SEQ ID NO: 3664857 - RNA, 21 nt, Human
gaagccucugggucagugguc

SEQ ID NO: 3664858 - RNA, 12 nt, Human
gaagccugaggc

SEQ ID NO: 3664859 - RNA, 12 nt, Human
gaagccugcccu

SEQ ID NO: 3664860 - RNA, 16 nt, Human
gaagccugcccuuguc

SEQ ID NO: 3664861 - RNA, 12 nt, Human
gaagccuggggg

SEQ ID NO: 3664862 - RNA, 13 nt, Human
gaagccugggggc

SEQ ID NO: 3664863 - RNA, 20 nt, Human
gaagccugggggccuggcug

SEQ ID NO: 3664864 - RNA, 18 nt, Human
gaagccuuaccacgcagu

SEQ ID NO: 3664865 - RNA, 20 nt, Human
gaagccuucaagcucugagg

SEQ ID NO: 3664866 - RNA, 15 nt, Human
gaagccuucagcucc

SEQ ID NO: 3664867 - RNA, 17 nt, Human
gaagccuucagcuccag

SEQ ID NO: 3664868 - RNA, 23 nt, Human
gaagccuuccccuuauccucccu

SEQ ID NO: 3664869 - RNA, 15 nt, Human
gaagccuuuccugua

SEQ ID NO: 3664870 - RNA, 10 nt, Human
gaagccuuug

SEQ ID NO: 3664871 - RNA, 18 nt, Human
gaagccuuugggaagggg

SEQ ID NO: 3664872 - RNA, 13 nt, Human
gaauauaaaugug

SEQ ID NO: 3664873 - RNA, 12 nt, Human
gaauauaauuau

SEQ ID NO: 3664874 - RNA, 19 nt, Human
gaauauaauuguuuuaucu

SEQ ID NO: 3664875 - RNA, 14 nt, Human
gaauauaggucucu

SEQ ID NO: 3664876 - RNA, 15 nt, Human
gaauauauaaccagu

SEQ ID NO: 3664877 - RNA, 20 nt, Human
gaauauauggcagaguugua

SEQ ID NO: 3664878 - RNA, 23 nt, Human
gaauauauggcagaguuguaaau

SEQ ID NO: 3664879 - RNA, 16 nt, Human
gaauauccauguacuu

SEQ ID NO: 3664880 - RNA, 19 nt, Human
gaauauccauguacuuguu

SEQ ID NO: 3664881 - RNA, 14 nt, Human
gaauaucugggauu

SEQ ID NO: 3664882 - RNA, 22 nt, Human
gaauaugaacggugagcauugu

SEQ ID NO: 3664883 - RNA, 13 nt, Human
gaauaugccugua

SEQ ID NO: 3664884 - RNA, 16 nt, Human
gaauaugccuguaauu

SEQ ID NO: 3664885 - RNA, 11 nt, Human
gaauaugccuu

SEQ ID NO: 3664886 - RNA, 21 nt, Human
gaauaugggagaaauagugug

SEQ ID NO: 3664887 - RNA, 19 nt, Human
gaauauguaguaucuauau

SEQ ID NO: 3664888 - RNA, 21 nt, Human
gaauaugucagugcugaugua

SEQ ID NO: 3664889 - RNA, 20 nt, Human
gaauauguuucaaacuuugg

SEQ ID NO: 3664890 - RNA, 13 nt, Human
gaauauuaaaaaa

SEQ ID NO: 3664891 - RNA, 20 nt, Human
gaauauuagugaccucagcu

SEQ ID NO: 3664892 - RNA, 17 nt, Human
gaauauuaucuucauaa

SEQ ID NO: 3664893 - RNA, 19 nt, Human
gaauauuauuggaaaauuc

SEQ ID NO: 3664894 - RNA, 12 nt, Human
gaauauucagga

SEQ ID NO: 3664895 - RNA, 18 nt, Human
gaauauucccaagcccau

SEQ ID NO: 3664896 - RNA, 13 nt, Human
gaauauugcaaaa

SEQ ID NO: 3664897 - RNA, 14 nt, Human
gaauauugcaaaau

SEQ ID NO: 3664898 - RNA, 20 nt, Human
gaauauugcaaaauacauga

SEQ ID NO: 3664899 - RNA, 19 nt, Human
gaauauugccauuaugcuu

SEQ ID NO: 3664900 - RNA, 12 nt, Human
gaauauugcuga

SEQ ID NO: 3664901 - RNA, 14 nt, Human
gaauauugcugaug

SEQ ID NO: 3664902 - RNA, 19 nt, Human
gaauauugcugauggugca

SEQ ID NO: 3664903 - RNA, 24 nt, Human
gaauauugcugauggugcaaugac

SEQ ID NO: 3664904 - RNA, 22 nt, Human
gaauauugcuuuggucauauga

SEQ ID NO: 3664905 - RNA, 14 nt, Human
gaauauuguuucuu

SEQ ID NO: 3664906 - RNA, 13 nt, Human
gaauauuuauaac

SEQ ID NO: 3664907 - RNA, 15 nt, Human
gaauauuuauaacag

SEQ ID NO: 3664908 - RNA, 18 nt, Human
gaauauuuauaacagcau

SEQ ID NO: 3664909 - RNA, 20 nt, Human
gaauauuuauauuucacuau

SEQ ID NO: 3664910 - RNA, 12 nt, Human
gaauauuuauua

SEQ ID NO: 3664911 - RNA, 13 nt, Human
gaauauuuauuac

SEQ ID NO: 3664912 - RNA, 17 nt, Human
gaauauuuauuaccucu

SEQ ID NO: 3664913 - RNA, 19 nt, Human
gaauauuuauuaccucuga

SEQ ID NO: 3664914 - RNA, 19 nt, Human
gaauauuuccauauggauu

SEQ ID NO: 3664915 - RNA, 18 nt, Human
gaauauuugaaucuuguc

SEQ ID NO: 3664916 - RNA, 12 nt, Human
gaauauuuuauu

SEQ ID NO: 3664917 - RNA, 14 nt, Human
gaauauuuuauuca

SEQ ID NO: 3664918 - RNA, 20 nt, Human
gaauauuuucauuaaaagcu

SEQ ID NO: 3664919 - RNA, 21 nt, Human
gaauauuuucauuaaaagcua

SEQ ID NO: 3664920 - RNA, 23 nt, Human
gaauauuuuguuuugugcagaga

SEQ ID NO: 3664921 - RNA, 20 nt, Human
gaauauuuuuauauuuccuu

SEQ ID NO: 3664922 - RNA, 21 nt, Human
gaauauuuuuauauuuccuuu

SEQ ID NO: 3664923 - RNA, 13 nt, Human
gaaucaaaacucu

SEQ ID NO: 3664924 - RNA, 14 nt, Human
gaaucaaaacucuc

SEQ ID NO: 3664925 - RNA, 15 nt, Human
gaaucaaaacucucc

SEQ ID NO: 3664926 - RNA, 15 nt, Human
gaaucaaaagugccu

SEQ ID NO: 3664927 - RNA, 14 nt, Human
gaaucaacagggca

SEQ ID NO: 3664928 - RNA, 15 nt, Human
gaaucaacagggcag

SEQ ID NO: 3664929 - RNA, 17 nt, Human
gaaucaagagcugcccu

SEQ ID NO: 3664930 - RNA, 20 nt, Human
gaaucaagcuagaaggccac

SEQ ID NO: 3664931 - RNA, 17 nt, Human
gaaucaagggucaggcc

SEQ ID NO: 3664932 - RNA, 17 nt, Human
gaaucacaggcugggcu

SEQ ID NO: 3664933 - RNA, 23 nt, Human
gaaucacguaaagcuagaaauga

SEQ ID NO: 3664934 - RNA, 19 nt, Human
gaaucacucuuguggaugu

SEQ ID NO: 3664935 - RNA, 11 nt, Human
gaaucacuguu

SEQ ID NO: 3664936 - RNA, 14 nt, Human
gaaucacuguuuuu

SEQ ID NO: 3664937 - RNA, 16 nt, Human
gaaucacuguuuuuag

SEQ ID NO: 3664938 - RNA, 23 nt, Human
gaaucagagaccuuccagaaaua

SEQ ID NO: 3664939 - RNA, 13 nt, Human
gguuaaaacuguc

SEQ ID NO: 3664940 - RNA, 13 nt, Human
gguuaaauguuuu

SEQ ID NO: 3664941 - RNA, 21 nt, Human
gguuaacaaauaacaacuuuu

SEQ ID NO: 3664942 - RNA, 18 nt, Human
gguuaacagcugucuaug

SEQ ID NO: 3664943 - RNA, 21 nt, Human
gguuaagcauuaccacucagg

SEQ ID NO: 3664944 - RNA, 16 nt, Human
gguuaagcccugaggg

SEQ ID NO: 3664945 - RNA, 23 nt, Human
gguuaagucuguuuuaugacuuc

SEQ ID NO: 3664946 - RNA, 22 nt, Human
gguuaauuuuuacauggagaaa

SEQ ID NO: 3664947 - RNA, 15 nt, Human
gguuacaaacugcaa

SEQ ID NO: 3664948 - RNA, 21 nt, Human
gguuacaacagauuugugaac

SEQ ID NO: 3664949 - RNA, 13 nt, Human
gguuacacuguua

SEQ ID NO: 3664950 - RNA, 21 nt, Human
gguuacccaguuagcucucaa

SEQ ID NO: 3664951 - RNA, 23 nt, Human
gguuagaccuacagggggucugg

SEQ ID NO: 3664952 - RNA, 18 nt, Human
gguuagauguugccaugu

SEQ ID NO: 3664953 - RNA, 13 nt, Human
gguuagggagggg

SEQ ID NO: 3664954 - RNA, 15 nt, Human
gguuagggaggggua

SEQ ID NO: 3664955 - RNA, 21 nt, Human
gguuaguggauggaaggggcu

SEQ ID NO: 3664956 - RNA, 14 nt, Human
gguuauaaaaguga

SEQ ID NO: 3664957 - RNA, 23 nt, Human
gguuauaacuuaaugaaaacaau

SEQ ID NO: 3664958 - RNA, 15 nt, Human
gguuauaguaacauc

SEQ ID NO: 3664959 - RNA, 18 nt, Human
gguuaucaaaaauuucau

SEQ ID NO: 3664960 - RNA, 17 nt, Human
gguuaucgaaauaacaa

SEQ ID NO: 3664961 - RNA, 23 nt, Human
gguuaucgaaauaacaauguuaa

SEQ ID NO: 3664962 - RNA, 13 nt, Human
gguuauggagagg

SEQ ID NO: 3664963 - RNA, 22 nt, Human
gguuauguguaugugccauuua

SEQ ID NO: 3664964 - RNA, 20 nt, Human
gguuauugaaaauaugaugu

SEQ ID NO: 3664965 - RNA, 16 nt, Human
gguuauuuuacuuuuu

SEQ ID NO: 3664966 - RNA, 21 nt, Human
gguucaaagauauuuugcuuu

SEQ ID NO: 3664967 - RNA, 23 nt, Human
gguucaacaaagaaacaaagaug

SEQ ID NO: 3664968 - RNA, 22 nt, Human
gguucaagcgauucuucugcuu

SEQ ID NO: 3664969 - RNA, 23 nt, Human
gguucaagcgauucuucugcuuc

SEQ ID NO: 3664970 - RNA, 18 nt, Human
gguucaaggucacuguuu

SEQ ID NO: 3664971 - RNA, 18 nt, Human
gguucaauucccugaagg

SEQ ID NO: 3664972 - RNA, 21 nt, Human
gguucacgccuguaaucccag

SEQ ID NO: 3664973 - RNA, 20 nt, Human
gguucacgugcagcucaagg

SEQ ID NO: 3664974 - RNA, 20 nt, Human
gguucacugcaaccuccgcc

SEQ ID NO: 3664975 - RNA, 20 nt, Human
gguucagccccuccucugcc

SEQ ID NO: 3664976 - RNA, 12 nt, Human
gguucagcuugu

SEQ ID NO: 3664977 - RNA, 22 nt, Human
gguucaggguuggccccugccc

SEQ ID NO: 3664978 - RNA, 14 nt, Human
gguuccagccugcc

SEQ ID NO: 3664979 - RNA, 15 nt, Human
gguuccaugccugag

SEQ ID NO: 3664980 - RNA, 18 nt, Human
gguuccaugccugagggu

SEQ ID NO: 3664981 - RNA, 14 nt, Human
gguucccccagccc

SEQ ID NO: 3664982 - RNA, 21 nt, Human
gguucccccagcccuguggaa

SEQ ID NO: 3664983 - RNA, 16 nt, Human
gguucccggucccgag

SEQ ID NO: 3664984 - RNA, 13 nt, Human
gguucccucugag

SEQ ID NO: 3664985 - RNA, 15 nt, Human
gguuccgcuuggagc

SEQ ID NO: 3664986 - RNA, 21 nt, Human
gguuccgcuuggagcagaggg

SEQ ID NO: 3664987 - RNA, 15 nt, Human
gguuccuacacagga

SEQ ID NO: 3664988 - RNA, 17 nt, Human
gguuccuacacaggaca

SEQ ID NO: 3664989 - RNA, 18 nt, Human
gguuccuacacaggacag

SEQ ID NO: 3664990 - RNA, 17 nt, Human
gguuccuaggggaauga

SEQ ID NO: 3664991 - RNA, 19 nt, Human
gguuccuaggggaaugagg

SEQ ID NO: 3664992 - RNA, 18 nt, Human
gguuccuccccuccagcu

SEQ ID NO: 3664993 - RNA, 14 nt, Human
gguuccucucuggu

SEQ ID NO: 3664994 - RNA, 17 nt, Human
gguuccucugccugccc

SEQ ID NO: 3664995 - RNA, 19 nt, Human
gguuccuuccucugagccu

SEQ ID NO: 3664996 - RNA, 22 nt, Human
gguucuaaaguucuaagauucu

SEQ ID NO: 3664997 - RNA, 22 nt, Human
gguucuacgccaggggaaaauc

SEQ ID NO: 3664998 - RNA, 23 nt, Human
gguucuagucuccuuugcacuga

SEQ ID NO: 3664999 - RNA, 13 nt, Human
gguucuauuugga

SEQ ID NO: 3665000 - RNA, 12 nt, Human
gguucucaauga

SEQ ID NO: 3665001 - RNA, 21 nt, Human
gguucucaauuccaacaguuu

SEQ ID NO: 3665002 - RNA, 22 nt, Human
gguucucaauuccaacaguuua

SEQ ID NO: 3665003 - RNA, 18 nt, Human
gguucucagguguugcca

SEQ ID NO: 3665004 - RNA, 12 nt, Human
gguucucaucuu

SEQ ID NO: 3665005 - RNA, 19 nt, Human
gguucugccugccagcugc

SEQ ID NO: 3665006 - RNA, 16 nt, Human
gguucugccugcuuug

SEQ ID NO: 3665007 - RNA, 12 nt, Human
gguucuggcugc

SEQ ID NO: 3665008 - RNA, 17 nt, Human
gguucuggggccccuuu

SEQ ID NO: 3665009 - RNA, 12 nt, Human
gguucugggugg

SEQ ID NO: 3665010 - RNA, 18 nt, Human
gguucugguuagcucagc

SEQ ID NO: 3665011 - RNA, 20 nt, Human
gguucugguuagcucagccc

SEQ ID NO: 3665012 - RNA, 12 nt, Human
gguucuguaaaa

SEQ ID NO: 3665013 - RNA, 20 nt, Human
gguucuugaggggaccagga

SEQ ID NO: 3665014 - RNA, 21 nt, Human
gguucuugaggggaccaggag

SEQ ID NO: 3665015 - RNA, 10 nt, Human
gguucuuguu

SEQ ID NO: 3665016 - RNA, 16 nt, Human
gguucuuucuuccucu

SEQ ID NO: 3665017 - RNA, 15 nt, Human
gggccgaugcccaga

SEQ ID NO: 3665018 - RNA, 20 nt, Human
gggccgccagggagaccugg

SEQ ID NO: 3665019 - RNA, 14 nt, Human
gggccgccuguccu

SEQ ID NO: 3665020 - RNA, 12 nt, Human
gggccgcugcca

SEQ ID NO: 3665021 - RNA, 14 nt, Human
gggccggccaggug

SEQ ID NO: 3665022 - RNA, 17 nt, Human
gggccggccaguggccu

SEQ ID NO: 3665023 - RNA, 19 nt, Human
gggccggcccugugugcag

SEQ ID NO: 3665024 - RNA, 17 nt, Human
gggccgggcagaggggc

SEQ ID NO: 3665025 - RNA, 17 nt, Human
gggccggggaacuggcc

SEQ ID NO: 3665026 - RNA, 20 nt, Human
gggccguaccccacccucag

SEQ ID NO: 3665027 - RNA, 22 nt, Human
gggccguaccccacccucagca

SEQ ID NO: 3665028 - RNA, 20 nt, Human
gggccguaucuccggcuccc

SEQ ID NO: 3665029 - RNA, 16 nt, Human
gggccuaauaaaacug

SEQ ID NO: 3665030 - RNA, 17 nt, Human
gggccuacuagagucug

SEQ ID NO: 3665031 - RNA, 22 nt, Human
gggccuagauccacacacagag

SEQ ID NO: 3665032 - RNA, 14 nt, Human
gggccuauggagag

SEQ ID NO: 3665033 - RNA, 21 nt, Human
gggccuauggagagcccuggg

SEQ ID NO: 3665034 - RNA, 16 nt, Human
gggccucaaggacuug

SEQ ID NO: 3665035 - RNA, 15 nt, Human
gggccucagugccac

SEQ ID NO: 3665036 - RNA, 23 nt, Human
gggccuccucuaacaggggcugg

SEQ ID NO: 3665037 - RNA, 13 nt, Human
gggccuccugugu

SEQ ID NO: 3665038 - RNA, 15 nt, Human
gggccuccugugugu

SEQ ID NO: 3665039 - RNA, 17 nt, Human
gggccucggagccucau

SEQ ID NO: 3665040 - RNA, 21 nt, Human
gggccucugcggagcacacug

SEQ ID NO: 3665041 - RNA, 18 nt, Human
gggccucuuaugggcugg

SEQ ID NO: 3665042 - RNA, 12 nt, Human
gggccugagcag

SEQ ID NO: 3665043 - RNA, 23 nt, Human
gggccugaggucuggcugcuugc

SEQ ID NO: 3665044 - RNA, 19 nt, Human
gggccugccaccuggaccc

SEQ ID NO: 3665045 - RNA, 23 nt, Human
gggccugccuagcacucacaugc

SEQ ID NO: 3665046 - RNA, 13 nt, Human
gggccugccuggc

SEQ ID NO: 3665047 - RNA, 16 nt, Human
gggccugcgagggcag

SEQ ID NO: 3665048 - RNA, 19 nt, Human
gggccugcgccaguccugc

SEQ ID NO: 3665049 - RNA, 15 nt, Human
gggccugcuccagac

SEQ ID NO: 3665050 - RNA, 18 nt, Human
gggccugcuccagaccug

SEQ ID NO: 3665051 - RNA, 16 nt, Human
gggccuggaccugccu

SEQ ID NO: 3665052 - RNA, 12 nt, Human
gggccuggagau

SEQ ID NO: 3665053 - RNA, 21 nt, Human
gggccuggagauccuccugca

SEQ ID NO: 3665054 - RNA, 16 nt, Human
gggccuggcagcucag

SEQ ID NO: 3665055 - RNA, 12 nt, Human
gggccuggccug

SEQ ID NO: 3665056 - RNA, 13 nt, Human
gggccuggccuga

SEQ ID NO: 3665057 - RNA, 18 nt, Human
gggccuggccugagcugg

SEQ ID NO: 3665058 - RNA, 18 nt, Human
gggccuggcuggcugagg

SEQ ID NO: 3665059 - RNA, 20 nt, Human
gggccuggcuggcugagggc

SEQ ID NO: 3665060 - RNA, 15 nt, Human
gggccugggcuccug

SEQ ID NO: 3665061 - RNA, 17 nt, Human
gggccugggcuccugga

SEQ ID NO: 3665062 - RNA, 14 nt, Human
gggccuggggccug

SEQ ID NO: 3665063 - RNA, 16 nt, Human
gggccuggggccugag

SEQ ID NO: 3665064 - RNA, 19 nt, Human
gggccuggucucacccugg

SEQ ID NO: 3665065 - RNA, 23 nt, Human
gggccugguuaaauaaggcaggg

SEQ ID NO: 3665066 - RNA, 23 nt, Human
gggccuguacaaaagggacauga

SEQ ID NO: 3665067 - RNA, 19 nt, Human
gggccuguacagucugucu

SEQ ID NO: 3665068 - RNA, 15 nt, Human
gggccuguacugccu

SEQ ID NO: 3665069 - RNA, 16 nt, Human
gggccuguggaaugag

SEQ ID NO: 3665070 - RNA, 18 nt, Human
gggccuuaggaagagccu

SEQ ID NO: 3665071 - RNA, 17 nt, Human
gggccuuagggcacugg

SEQ ID NO: 3665072 - RNA, 12 nt, Human
gggccuugccca

SEQ ID NO: 3665073 - RNA, 14 nt, Human
gggccuugcccaga

SEQ ID NO: 3665074 - RNA, 14 nt, Human
gggccuuggccugg

SEQ ID NO: 3665075 - RNA, 15 nt, Human
gggccuuggccugga

SEQ ID NO: 3665076 - RNA, 14 nt, Human
gggccuugggcucc

SEQ ID NO: 3665077 - RNA, 18 nt, Human
gggccuuuucuggcaccg

SEQ ID NO: 3665078 - RNA, 20 nt, Human
gggcgaccccgucacagccu

SEQ ID NO: 3665079 - RNA, 20 nt, Human
gggcgagacuccgucucaaa

SEQ ID NO: 3665080 - RNA, 20 nt, Human
gggcgagacucugucucaaa

SEQ ID NO: 3665081 - RNA, 12 nt, Human
gggcgaggcagg

SEQ ID NO: 3665082 - RNA, 22 nt, Human
gggcgaucgcggcggagcuggc

SEQ ID NO: 3665083 - RNA, 14 nt, Human
gggcgcccuggaag

SEQ ID NO: 3665084 - RNA, 15 nt, Human
gggcgcccuggaagc

SEQ ID NO: 3665085 - RNA, 22 nt, Human
gggcgccgcaaaccacacugga

SEQ ID NO: 3665086 - RNA, 15 nt, Human
gggcgcggccagccc

SEQ ID NO: 3665087 - RNA, 13 nt, Human
gggcgcuggccca

SEQ ID NO: 3665088 - RNA, 23 nt, Human
gggcgcuggcccagccggccucu

SEQ ID NO: 3665089 - RNA, 17 nt, Human
gggcggcaggggccugg

SEQ ID NO: 3665090 - RNA, 22 nt, Human
gggcggccuaugacuugggcac

SEQ ID NO: 3665091 - RNA, 21 nt, Human
gggcggugagaggggaacaga

SEQ ID NO: 3665092 - RNA, 18 nt, Human
gggcgugagaccugcccc

SEQ ID NO: 3665093 - RNA, 23 nt, Human
gggcuaagagcuagcgcugccgc

SEQ ID NO: 3665094 - RNA, 15 nt, Human
gggcuaccaggaaag

SEQ ID NO: 3665095 - RNA, 20 nt, Human
gggcuacccugagcugaggc

SEQ ID NO: 3665096 - RNA, 16 nt, Human
gggcuagaaccuggca

SEQ ID NO: 3665097 - RNA, 12 nt, Human
gggcuagaaucu

SEQ ID NO: 3665098 - RNA, 20 nt, Human
gggcuaggaaauccagggug

SEQ ID NO: 3665099 - RNA, 14 nt, Human
gggcuagggagacg

SEQ ID NO: 3665100 - RNA, 15 nt, Human
gggcuaguugggcuu

SEQ ID NO: 3665101 - RNA, 14 nt, Human
gggcuauggacaca

SEQ ID NO: 3665102 - RNA, 15 nt, Human
gggcuauggacacag

SEQ ID NO: 3665103 - RNA, 16 nt, Human
gggcucaagcagucua

SEQ ID NO: 3665104 - RNA, 14 nt, Human
gggcucacacaccu

SEQ ID NO: 3665105 - RNA, 17 nt, Human
gggcucagcaaggccac

SEQ ID NO: 3665106 - RNA, 18 nt, Human
gggcucagcaaggccacc

SEQ ID NO: 3665107 - RNA, 18 nt, Human
gggcucagcucuggcuca

SEQ ID NO: 3665108 - RNA, 23 nt, Human
gggcucagcucuggcucacagac

SEQ ID NO: 3665109 - RNA, 22 nt, Human
gggcucaggucacauaaaacuu

SEQ ID NO: 3665110 - RNA, 15 nt, Human
gggcucccagccagg

SEQ ID NO: 3665111 - RNA, 17 nt, Human
gggcucccagccaggcc

SEQ ID NO: 3665112 - RNA, 14 nt, Human
gggcucccaggggu

SEQ ID NO: 3665113 - RNA, 22 nt, Human
gggcucccaggggucucccugg

SEQ ID NO: 3665114 - RNA, 16 nt, Human
gggcuccccucuuccu

SEQ ID NO: 3665115 - RNA, 18 nt, Human
gggcuccccucuuccucu

SEQ ID NO: 3665116 - RNA, 21 nt, Human
gggcuccccuucgcguauuuc

SEQ ID NO: 3665117 - RNA, 13 nt, Human
gggcucccgcccg

SEQ ID NO: 3665118 - RNA, 19 nt, Human
gggcucccggguccuuggc

SEQ ID NO: 3665119 - RNA, 12 nt, Human
gggcucccugac

SEQ ID NO: 3665120 - RNA, 21 nt, Human
gggcucccuguaaccucuuca

SEQ ID NO: 3665121 - RNA, 17 nt, Human
gggcuccgugugggaga

SEQ ID NO: 3665122 - RNA, 14 nt, Human
gggcuccucccagc

SEQ ID NO: 3665123 - RNA, 22 nt, Human
gggcuccugcacuuacuugcuu

SEQ ID NO: 3665124 - RNA, 13 nt, Human
gggcuccuggacc

SEQ ID NO: 3665125 - RNA, 20 nt, Human
gggcuccuucuccaccccag

SEQ ID NO: 3665126 - RNA, 20 nt, Human
gggcuccuugugggccuggg

SEQ ID NO: 3665127 - RNA, 20 nt, Human
gggcuccuuucuccagccag

SEQ ID NO: 3665128 - RNA, 20 nt, Human
gggcucgaggggugggcugg

SEQ ID NO: 3665129 - RNA, 20 nt, Human
gggcucgccaugccgggggu

SEQ ID NO: 3665130 - RNA, 15 nt, Human
gggcucuaacgccug

SEQ ID NO: 3665131 - RNA, 16 nt, Human
gggcucuaacgccuga

SEQ ID NO: 3665132 - RNA, 17 nt, Human
gggcucuaacgccugag

SEQ ID NO: 3665133 - RNA, 19 nt, Human
gggcucuaacgccugagcc

SEQ ID NO: 3665134 - RNA, 20 nt, Human
gggcucuaacgccugagccc

SEQ ID NO: 3665135 - RNA, 13 nt, Human
gggcucuccaccu

SEQ ID NO: 3665136 - RNA, 19 nt, Human
gggcucucugcuguacaua

SEQ ID NO: 3665137 - RNA, 11 nt, Human
gggcucugagu

SEQ ID NO: 3665138 - RNA, 16 nt, Human
gggcucugaguacccc

SEQ ID NO: 3665139 - RNA, 15 nt, Human
gggcucugccacccu

SEQ ID NO: 3665140 - RNA, 21 nt, Human
gggcucugccccagcucuggc

SEQ ID NO: 3665141 - RNA, 15 nt, Human
gggcucugccccagu

SEQ ID NO: 3665142 - RNA, 21 nt, Human
gggcucugcccucccuccuuc

SEQ ID NO: 3665143 - RNA, 15 nt, Human
gggcucugccuccca

SEQ ID NO: 3665144 - RNA, 16 nt, Human
gggcucugugcaguca

SEQ ID NO: 3665145 - RNA, 14 nt, Human
gggcucugugggcu

SEQ ID NO: 3665146 - RNA, 23 nt, Human
gggcugaccuuccucgcagagag

SEQ ID NO: 3665147 - RNA, 14 nt, Human
gggcugacugggac

SEQ ID NO: 3665148 - RNA, 20 nt, Human
gggcugacugggccagggga

SEQ ID NO: 3665149 - RNA, 16 nt, Human
gggcugagcccuggca

SEQ ID NO: 3665150 - RNA, 13 nt, Human
gggcugagccugg

SEQ ID NO: 3665151 - RNA, 18 nt, Human
gggcugaggagcagcagg

SEQ ID NO: 3665152 - RNA, 14 nt, Human
gggcugagggagcc

SEQ ID NO: 3665153 - RNA, 17 nt, Human
gggcugagggccugcug

SEQ ID NO: 3665154 - RNA, 18 nt, Human
gggcugagggccugcugg

SEQ ID NO: 3665155 - RNA, 14 nt, Human
gggcugaucucagg

SEQ ID NO: 3665156 - RNA, 16 nt, Human
gggcugaucucaggga

SEQ ID NO: 3665157 - RNA, 14 nt, Human
gggcugcaccggcu

SEQ ID NO: 3665158 - RNA, 17 nt, Human
gggcugcaccggcuggc

SEQ ID NO: 3665159 - RNA, 19 nt, Human
gggcugcaccggcuggccu

SEQ ID NO: 3665160 - RNA, 18 nt, Human
gggcugcacucugugccc

SEQ ID NO: 3665161 - RNA, 19 nt, Human
gggcugcagcauguugcug

SEQ ID NO: 3665162 - RNA, 21 nt, Human
ggucccaagcugggccccagc

SEQ ID NO: 3665163 - RNA, 23 nt, Human
ggucccaaggcaaggggugccug

SEQ ID NO: 3665164 - RNA, 19 nt, Human
ggucccacaaaugggcgcc

SEQ ID NO: 3665165 - RNA, 19 nt, Human
gacagaugccuccuuccuc

SEQ ID NO: 3665166 - RNA, 14 nt, Human
gacagauuaauauu

SEQ ID NO: 3665167 - RNA, 20 nt, Human
gacagauucagucuugccuu

SEQ ID NO: 3665168 - RNA, 22 nt, Human
gacagcaacggggaggccaagu

SEQ ID NO: 3665169 - RNA, 15 nt, Human
gacagcagcucaggc

SEQ ID NO: 3665170 - RNA, 17 nt, Human
gacagcaggcagcgcca

SEQ ID NO: 3665171 - RNA, 23 nt, Human
gacagcagucuuaugcuuccaga

SEQ ID NO: 3665172 - RNA, 21 nt, Human
gacagcauggugcaugccgcu

SEQ ID NO: 3665173 - RNA, 22 nt, Human
gacagcauggugcaugccgcug

SEQ ID NO: 3665174 - RNA, 17 nt, Human
gacagccaaaggcuggc

SEQ ID NO: 3665175 - RNA, 22 nt, Human
gacagccaacuauggccugugg

SEQ ID NO: 3665176 - RNA, 14 nt, Human
gacagccacggcca

SEQ ID NO: 3665177 - RNA, 20 nt, Human
gacagccacggccaggccag

SEQ ID NO: 3665178 - RNA, 21 nt, Human
gacagccacggccaggccaga

SEQ ID NO: 3665179 - RNA, 11 nt, Human
gacagcccaga

SEQ ID NO: 3665180 - RNA, 21 nt, Human
gacagcccaggauacuggcac

SEQ ID NO: 3665181 - RNA, 15 nt, Human
gacagccccacccug

SEQ ID NO: 3665182 - RNA, 15 nt, Human
gacagccccucccuc

SEQ ID NO: 3665183 - RNA, 17 nt, Human
gacagccccucccuccu

SEQ ID NO: 3665184 - RNA, 19 nt, Human
gacagcccgauccuccccu

SEQ ID NO: 3665185 - RNA, 13 nt, Human
gacagcccgggcu

SEQ ID NO: 3665186 - RNA, 19 nt, Human
gacagcccgggcucugccu

SEQ ID NO: 3665187 - RNA, 13 nt, Human
gacagcccuccau

SEQ ID NO: 3665188 - RNA, 21 nt, Human
gacagcccuucuuuccacaga

SEQ ID NO: 3665189 - RNA, 19 nt, Human
gacagccucagugacccug

SEQ ID NO: 3665190 - RNA, 20 nt, Human
gacagccucccccugucccc

SEQ ID NO: 3665191 - RNA, 11 nt, Human
gacagccuggc

SEQ ID NO: 3665192 - RNA, 20 nt, Human
gacagccuguggcggugccu

SEQ ID NO: 3665193 - RNA, 18 nt, Human
gacagcucccucugccug

SEQ ID NO: 3665194 - RNA, 16 nt, Human
gacagcuccuucuguc

SEQ ID NO: 3665195 - RNA, 12 nt, Human
gacagcucugca

SEQ ID NO: 3665196 - RNA, 17 nt, Human
gacagcugauacuucau

SEQ ID NO: 3665197 - RNA, 12 nt, Human
gacagcugccug

SEQ ID NO: 3665198 - RNA, 13 nt, Human
gacagcugccugg

SEQ ID NO: 3665199 - RNA, 17 nt, Human
gacagcugcuccuagag

SEQ ID NO: 3665200 - RNA, 15 nt, Human
gacagcugucccugu

SEQ ID NO: 3665201 - RNA, 16 nt, Human
gacagcugucccuguc

SEQ ID NO: 3665202 - RNA, 18 nt, Human
gacagcugucccugucac

SEQ ID NO: 3665203 - RNA, 14 nt, Human
gacagcugugccuc

SEQ ID NO: 3665204 - RNA, 15 nt, Human
gacagcuuugcugcu

SEQ ID NO: 3665205 - RNA, 16 nt, Human
gacagcuuugcugcug

SEQ ID NO: 3665206 - RNA, 17 nt, Human
gacaggaaagggaaggc

SEQ ID NO: 3665207 - RNA, 16 nt, Human
gacaggacagcauggu

SEQ ID NO: 3665208 - RNA, 16 nt, Human
gacaggaccccagcuc

SEQ ID NO: 3665209 - RNA, 17 nt, Human
gacaggaccccagcucu

SEQ ID NO: 3665210 - RNA, 17 nt, Human
gacaggaccccugcagu

SEQ ID NO: 3665211 - RNA, 23 nt, Human
gacaggacuaacacucagaagcc

SEQ ID NO: 3665212 - RNA, 20 nt, Human
gacaggagggcaagggccau

SEQ ID NO: 3665213 - RNA, 13 nt, Human
gacaggauccagg

SEQ ID NO: 3665214 - RNA, 14 nt, Human
gacaggauguguuu

SEQ ID NO: 3665215 - RNA, 18 nt, Human
gacaggauguuugcucag

SEQ ID NO: 3665216 - RNA, 16 nt, Human
gacaggcaaauaaaag

SEQ ID NO: 3665217 - RNA, 13 nt, Human
gacaggcaagcac

SEQ ID NO: 3665218 - RNA, 18 nt, Human
gacaggcaagcaccuccu

SEQ ID NO: 3665219 - RNA, 21 nt, Human
gacaggcaagcaccuccugcc

SEQ ID NO: 3665220 - RNA, 15 nt, Human
gacaggcagccugga

SEQ ID NO: 3665221 - RNA, 18 nt, Human
gacaggcauguucucuga

SEQ ID NO: 3665222 - RNA, 22 nt, Human
gacaggcauguucucugaggac

SEQ ID NO: 3665223 - RNA, 15 nt, Human
gacaggccagguggu

SEQ ID NO: 3665224 - RNA, 19 nt, Human
gacaggcgagagaggagcc

SEQ ID NO: 3665225 - RNA, 23 nt, Human
gacaggcgagagaggagccagac

SEQ ID NO: 3665226 - RNA, 18 nt, Human
gacaggcucuuagcagcu

SEQ ID NO: 3665227 - RNA, 15 nt, Human
gacaggcugcggccc

SEQ ID NO: 3665228 - RNA, 21 nt, Human
gacaggcuggaagauagcugu

SEQ ID NO: 3665229 - RNA, 22 nt, Human
gacaggcuggaagauagcugug

SEQ ID NO: 3665230 - RNA, 20 nt, Human
gacagggaacaguauuucca

SEQ ID NO: 3665231 - RNA, 16 nt, Human
gacagggaagagcaga

SEQ ID NO: 3665232 - RNA, 20 nt, Human
gacagggaauuaggccccca

SEQ ID NO: 3665233 - RNA, 13 nt, Human
gacagggacccac

SEQ ID NO: 3665234 - RNA, 19 nt, Human
gacagggacccacuucaca

SEQ ID NO: 3665235 - RNA, 23 nt, Human
gacagggcacaccgggcacucag

SEQ ID NO: 3665236 - RNA, 14 nt, Human
gacagggcauggcc

SEQ ID NO: 3665237 - RNA, 10 nt, Human
gacagggcca

SEQ ID NO: 3665238 - RNA, 11 nt, Human
gacagggccag

SEQ ID NO: 3665239 - RNA, 13 nt, Human
gacagggccagug

SEQ ID NO: 3665240 - RNA, 16 nt, Human
gacagggcgggggugg

SEQ ID NO: 3665241 - RNA, 12 nt, Human
gacagggcuggc

SEQ ID NO: 3665242 - RNA, 17 nt, Human
gacagggcuggcccagc

SEQ ID NO: 3665243 - RNA, 19 nt, Human
gacagggcuggcccagccc

SEQ ID NO: 3665244 - RNA, 14 nt, Human
gacaggguccugcu

SEQ ID NO: 3665245 - RNA, 15 nt, Human
gacaggguccugcua

SEQ ID NO: 3665246 - RNA, 21 nt, Human
gacaggguuuggcugugucua

SEQ ID NO: 3665247 - RNA, 16 nt, Human
gacaggucccuccccu

SEQ ID NO: 3665248 - RNA, 16 nt, Human
gacaggugugccgaca

SEQ ID NO: 3665249 - RNA, 19 nt, Human
gacagguuugggaccccug

SEQ ID NO: 3665250 - RNA, 17 nt, Human
gacaguaacuugguuau

SEQ ID NO: 3665251 - RNA, 21 nt, Human
gacaguaacuugguuauacau

SEQ ID NO: 3665252 - RNA, 18 nt, Human
gacaguaauuguguuuac

SEQ ID NO: 3665253 - RNA, 14 nt, Human
gacaguauauaacu

SEQ ID NO: 3665254 - RNA, 18 nt, Human
gacaguaucccacaucca

SEQ ID NO: 3665255 - RNA, 21 nt, Human
gacaguaucccacauccaacu

SEQ ID NO: 3665256 - RNA, 16 nt, Human
gacagucaaggagugg

SEQ ID NO: 3665257 - RNA, 17 nt, Human
gacagucaucaucaggg

SEQ ID NO: 3665258 - RNA, 21 nt, Human
gacagucaucaucagggccug

SEQ ID NO: 3665259 - RNA, 15 nt, Human
gacaguccagccugg

SEQ ID NO: 3665260 - RNA, 17 nt, Human
gacaguccagccuggag

SEQ ID NO: 3665261 - RNA, 14 nt, Human
gacaguccugggag

SEQ ID NO: 3665262 - RNA, 15 nt, Human
gacaguccugggaga

SEQ ID NO: 3665263 - RNA, 17 nt, Human
gacagucguucccagug

SEQ ID NO: 3665264 - RNA, 13 nt, Human
gacagucucacca

SEQ ID NO: 3665265 - RNA, 23 nt, Human
gacagucuuuggguaccuauuuu

SEQ ID NO: 3665266 - RNA, 22 nt, Human
gacagugaaagaaaauaacaau

SEQ ID NO: 3665267 - RNA, 17 nt, Human
gacagugagguccuggg

SEQ ID NO: 3665268 - RNA, 19 nt, Human
gacagugagguccuggggg

SEQ ID NO: 3665269 - RNA, 19 nt, Human
gacagugauauuggaacuu

SEQ ID NO: 3665270 - RNA, 21 nt, Human
gacagugaucuccauauguua

SEQ ID NO: 3665271 - RNA, 21 nt, Human
gacagugccugggaauguauu

SEQ ID NO: 3665272 - RNA, 18 nt, Human
gacagugcuucagccuga

SEQ ID NO: 3665273 - RNA, 20 nt, Human
gacagugcuucagccugagg

SEQ ID NO: 3665274 - RNA, 15 nt, Human
gacagugggaaauau

SEQ ID NO: 3665275 - RNA, 21 nt, Human
gacaguguuccccgauaccau

SEQ ID NO: 3665276 - RNA, 14 nt, Human
gacaguuaagagaa

SEQ ID NO: 3665277 - RNA, 15 nt, Human
gacaguucacacccu

SEQ ID NO: 3665278 - RNA, 15 nt, Human
gacaguucauaugua

SEQ ID NO: 3665279 - RNA, 17 nt, Human
gacaguucauauguacc

SEQ ID NO: 3665280 - RNA, 18 nt, Human
gacaguucauucagggcc

SEQ ID NO: 3665281 - RNA, 14 nt, Human
gacaguugugcagg

SEQ ID NO: 3665282 - RNA, 19 nt, Human
gacaguuuaccaguugccu

SEQ ID NO: 3665283 - RNA, 23 nt, Human
gacaguuuaccaguugccuuuua

SEQ ID NO: 3665284 - RNA, 19 nt, Human
gacaguuuaucaugaagcc

SEQ ID NO: 3665285 - RNA, 20 nt, Human
gacaguuuaucaugaagccu

SEQ ID NO: 3665286 - RNA, 13 nt, Human
gacaguuuguaaa

SEQ ID NO: 3665287 - RNA, 12 nt, Human
gacauaaagcca

SEQ ID NO: 3665288 - RNA, 14 nt, Human
gacauaaaggaaaa

SEQ ID NO: 3665289 - RNA, 17 nt, Human
gacauaaaggaaaagac

SEQ ID NO: 3665290 - RNA, 22 nt, Human
gacauaaaguugauaaagauuu

SEQ ID NO: 3665291 - RNA, 17 nt, Human
gacauaaccacugcuuc

SEQ ID NO: 3665292 - RNA, 15 nt, Human
gacauacuugaaggg

SEQ ID NO: 3665293 - RNA, 20 nt, Human
gacauacuugaagggccaga

SEQ ID NO: 3665294 - RNA, 22 nt, Human
gacauacuugaagggccagagc

SEQ ID NO: 3665295 - RNA, 20 nt, Human
gacauagauauuuucacaau

SEQ ID NO: 3665296 - RNA, 20 nt, Human
gacauagcauccaaguggca

SEQ ID NO: 3665297 - RNA, 23 nt, Human
gacauaggccaugaaaaaaauga

SEQ ID NO: 3665298 - RNA, 20 nt, Human
gacauauauuuuuuaaaaua

SEQ ID NO: 3665299 - RNA, 20 nt, Human
gacauauucauuuggaaaua

SEQ ID NO: 3665300 - RNA, 11 nt, Human
gacauauuuaa

SEQ ID NO: 3665301 - RNA, 20 nt, Human
gacauauuuaauguuuuaaa

SEQ ID NO: 3665302 - RNA, 21 nt, Human
gacauauuuaauguuuuaaau

SEQ ID NO: 3665303 - RNA, 18 nt, Human
gacaucaaaaaaggcagu

SEQ ID NO: 3665304 - RNA, 19 nt, Human
gacaucaaaaaaggcaguu

SEQ ID NO: 3665305 - RNA, 18 nt, Human
gacaucacagcagccucc

SEQ ID NO: 3665306 - RNA, 18 nt, Human
gaccuaggauaucuucuc

SEQ ID NO: 3665307 - RNA, 21 nt, Human
gaccuagggaggaccuuaucu

SEQ ID NO: 3665308 - RNA, 20 nt, Human
gaccuagggauguucuggcc

SEQ ID NO: 3665309 - RNA, 22 nt, Human
gaccuagggauguucuggcccu

SEQ ID NO: 3665310 - RNA, 21 nt, Human
gaccuauguccuaaggacaca

SEQ ID NO: 3665311 - RNA, 14 nt, Human
gaccuauguuugcu

SEQ ID NO: 3665312 - RNA, 22 nt, Human
gaccuauguuugcucagaacac

SEQ ID NO: 3665313 - RNA, 16 nt, Human
gaccucaaaugaugug

SEQ ID NO: 3665314 - RNA, 20 nt, Human
gaccucacagugacccuucc

SEQ ID NO: 3665315 - RNA, 21 nt, Human
gaccucacagugacccuuccc

SEQ ID NO: 3665316 - RNA, 22 nt, Human
gaccucacagugacccuuccca

SEQ ID NO: 3665317 - RNA, 16 nt, Human
gaccucaccuaggaag

SEQ ID NO: 3665318 - RNA, 17 nt, Human
gaccucaccuaggaagu

SEQ ID NO: 3665319 - RNA, 16 nt, Human
gaccucacugugaccu

SEQ ID NO: 3665320 - RNA, 17 nt, Human
gaccucagaguccaggc

SEQ ID NO: 3665321 - RNA, 11 nt, Human
gaccucagccu

SEQ ID NO: 3665322 - RNA, 16 nt, Human
gaccucagccugugcu

SEQ ID NO: 3665323 - RNA, 19 nt, Human
gaccucagccugugcugcc

SEQ ID NO: 3665324 - RNA, 14 nt, Human
gaccucagccuucc

SEQ ID NO: 3665325 - RNA, 14 nt, Human
gaccucagcugcuu

SEQ ID NO: 3665326 - RNA, 18 nt, Human
gaccucaggcaaucugcc

SEQ ID NO: 3665327 - RNA, 17 nt, Human
gaccucaggcacuagcc

SEQ ID NO: 3665328 - RNA, 18 nt, Human
gaccucaggcacuagccu

SEQ ID NO: 3665329 - RNA, 21 nt, Human
gaccucaggcacuagccuuug

SEQ ID NO: 3665330 - RNA, 19 nt, Human
gaccucaggccugggggcu

SEQ ID NO: 3665331 - RNA, 13 nt, Human
gaccucaggugag

SEQ ID NO: 3665332 - RNA, 19 nt, Human
gaccucaggugagaagcag

SEQ ID NO: 3665333 - RNA, 21 nt, Human
gaccucaggugagaagcagag

SEQ ID NO: 3665334 - RNA, 14 nt, Human
gaccucauccaaac

SEQ ID NO: 3665335 - RNA, 17 nt, Human
gaccucaugcaucucca

SEQ ID NO: 3665336 - RNA, 14 nt, Human
gaccucccagcccu

SEQ ID NO: 3665337 - RNA, 22 nt, Human
gaccucccagcccuauggaugu

SEQ ID NO: 3665338 - RNA, 14 nt, Human
gaccucccccuccu

SEQ ID NO: 3665339 - RNA, 16 nt, Human
gaccucccccuccuuc

SEQ ID NO: 3665340 - RNA, 14 nt, Human
gaccucccuuccga

SEQ ID NO: 3665341 - RNA, 19 nt, Human
gaccucccuuccgacccuc

SEQ ID NO: 3665342 - RNA, 19 nt, Human
gaccucggugggcccagug

SEQ ID NO: 3665343 - RNA, 13 nt, Human
gaccucguccucc

SEQ ID NO: 3665344 - RNA, 15 nt, Human
gaccucguccucccc

SEQ ID NO: 3665345 - RNA, 24 nt, Human
gaccucguccucccccugccagug

SEQ ID NO: 3665346 - RNA, 15 nt, Human
gaccucgugcuuuaa

SEQ ID NO: 3665347 - RNA, 18 nt, Human
gaccucgugcuuuaagug

SEQ ID NO: 3665348 - RNA, 18 nt, Human
gaccucuacuuuccaggc

SEQ ID NO: 3665349 - RNA, 19 nt, Human
gaccucuccaucuucagcu

SEQ ID NO: 3665350 - RNA, 14 nt, Human
gaccucugacagca

SEQ ID NO: 3665351 - RNA, 16 nt, Human
gaccucugacagcagc

SEQ ID NO: 3665352 - RNA, 13 nt, Human
gaccucugggcuu

SEQ ID NO: 3665353 - RNA, 15 nt, Human
gaccucuggguuggg

SEQ ID NO: 3665354 - RNA, 12 nt, Human
gaccucuguugu

SEQ ID NO: 3665355 - RNA, 16 nt, Human
gaccucuguuguccuc

SEQ ID NO: 3665356 - RNA, 12 nt, Human
gaccugaagaau

SEQ ID NO: 3665357 - RNA, 24 nt, Human
gaccugaaggguugacuuuaccca

SEQ ID NO: 3665358 - RNA, 16 nt, Human
gaccugagaauguauc

SEQ ID NO: 3665359 - RNA, 14 nt, Human
gaccugagccugcc

SEQ ID NO: 3665360 - RNA, 18 nt, Human
gaccugagccugccgagc

SEQ ID NO: 3665361 - RNA, 13 nt, Human
gaccugaggcccu

SEQ ID NO: 3665362 - RNA, 20 nt, Human
gaccugaggcuccugugcua

SEQ ID NO: 3665363 - RNA, 17 nt, Human
gaccugaggcugugguc

SEQ ID NO: 3665364 - RNA, 14 nt, Human
gaccugaucacuag

SEQ ID NO: 3665365 - RNA, 14 nt, Human
gaccugauccugga

SEQ ID NO: 3665366 - RNA, 18 nt, Human
gaccugauccuggaggcc

SEQ ID NO: 3665367 - RNA, 16 nt, Human
gaccugcauuguaaau

SEQ ID NO: 3665368 - RNA, 19 nt, Human
gaccugccaggcaggggug

SEQ ID NO: 3665369 - RNA, 20 nt, Human
gaccugccuccugccugccc

SEQ ID NO: 3665370 - RNA, 15 nt, Human
gaccugccucggccu

SEQ ID NO: 3665371 - RNA, 22 nt, Human
gaccugccucucacacacauag

SEQ ID NO: 3665372 - RNA, 16 nt, Human
gaccugcggcugcugu

SEQ ID NO: 3665373 - RNA, 17 nt, Human
gaccugcuaggccagag

SEQ ID NO: 3665374 - RNA, 15 nt, Human
gaccugcuccgcugc

SEQ ID NO: 3665375 - RNA, 21 nt, Human
gaccugcuccgcugcuccuug

SEQ ID NO: 3665376 - RNA, 16 nt, Human
guaaagcuugucugau

SEQ ID NO: 3665377 - RNA, 15 nt, Human
guaaagguuuuuauu

SEQ ID NO: 3665378 - RNA, 22 nt, Human
guaaaguaucaggauacuauau

SEQ ID NO: 3665379 - RNA, 21 nt, Human
guaaaguauguaaacaggaga

SEQ ID NO: 3665380 - RNA, 17 nt, Human
guaaaguauguauuauu

SEQ ID NO: 3665381 - RNA, 15 nt, Human
guaaaguguaacaua

SEQ ID NO: 3665382 - RNA, 17 nt, Human
guaaaguguaacauaug

SEQ ID NO: 3665383 - RNA, 19 nt, Human
guaaaguguaacauaugca

SEQ ID NO: 3665384 - RNA, 11 nt, Human
guaaagugugg

SEQ ID NO: 3665385 - RNA, 23 nt, Human
guaaaguuuccgugcguggcacu

SEQ ID NO: 3665386 - RNA, 13 nt, Human
guaaauaaaaaga

SEQ ID NO: 3665387 - RNA, 14 nt, Human
guaaauaaaaagaa

SEQ ID NO: 3665388 - RNA, 18 nt, Human
guaaauaaauuguuugac

SEQ ID NO: 3665389 - RNA, 20 nt, Human
guaaauaaccccauucuuug

SEQ ID NO: 3665390 - RNA, 20 nt, Human
guaaauaacuggaaaacaga

SEQ ID NO: 3665391 - RNA, 19 nt, Human
guaaauaagagauuuggag

SEQ ID NO: 3665392 - RNA, 14 nt, Human
guaaauaauacauu

SEQ ID NO: 3665393 - RNA, 15 nt, Human
guaaauaauucuuuu

SEQ ID NO: 3665394 - RNA, 18 nt, Human
guaaauacaaguucuauu

SEQ ID NO: 3665395 - RNA, 20 nt, Human
guaaauacaaguucuauuua

SEQ ID NO: 3665396 - RNA, 19 nt, Human
guaaauacaauuuuuuuua

SEQ ID NO: 3665397 - RNA, 21 nt, Human
guaaauacaauuuuuuuuauu

SEQ ID NO: 3665398 - RNA, 17 nt, Human
guaaauacaugcauaua

SEQ ID NO: 3665399 - RNA, 16 nt, Human
guaaauacccauaugu

SEQ ID NO: 3665400 - RNA, 18 nt, Human
guaaauagcaacaugcuu

SEQ ID NO: 3665401 - RNA, 20 nt, Human
guaaauaggauuuuuagaau

SEQ ID NO: 3665402 - RNA, 17 nt, Human
guaaauagguucuucuu

SEQ ID NO: 3665403 - RNA, 17 nt, Human
guaaauaguauuugaga

SEQ ID NO: 3665404 - RNA, 20 nt, Human
guaaauaguuacuccagugc

SEQ ID NO: 3665405 - RNA, 15 nt, Human
guaaauauaaagacg

SEQ ID NO: 3665406 - RNA, 16 nt, Human
guaaauauaugaacau

SEQ ID NO: 3665407 - RNA, 21 nt, Human
guaaauaucccaaacugugau

SEQ ID NO: 3665408 - RNA, 16 nt, Human
guaaauaugaaucugc

SEQ ID NO: 3665409 - RNA, 13 nt, Human
guaaauauuuuaa

SEQ ID NO: 3665410 - RNA, 23 nt, Human
guaaauauuuuaaagaauugugu

SEQ ID NO: 3665411 - RNA, 21 nt, Human
guaaaucacgcuuuuugaaaa

SEQ ID NO: 3665412 - RNA, 21 nt, Human
guaaaucccauuauucaaagu

SEQ ID NO: 3665413 - RNA, 20 nt, Human
guaaauccugccauuuaaaa

SEQ ID NO: 3665414 - RNA, 21 nt, Human
guaaaucuaacauuauuacuu

SEQ ID NO: 3665415 - RNA, 13 nt, Human
guaaaucuacaca

SEQ ID NO: 3665416 - RNA, 19 nt, Human
guaaaucucuucuguguuu

SEQ ID NO: 3665417 - RNA, 17 nt, Human
guaaaugcagcgugaag

SEQ ID NO: 3665418 - RNA, 20 nt, Human
guaaaugggggugcauuuga

SEQ ID NO: 3665419 - RNA, 12 nt, Human
guaaauguaaac

SEQ ID NO: 3665420 - RNA, 18 nt, Human
guaaauguuauuucugca

SEQ ID NO: 3665421 - RNA, 20 nt, Human
guaaauguuauuucugcaaa

SEQ ID NO: 3665422 - RNA, 23 nt, Human
guaaauuaccaguaaaguguaac

SEQ ID NO: 3665423 - RNA, 23 nt, Human
guaaauuauauuugugcuauagu

SEQ ID NO: 3665424 - RNA, 22 nt, Human
guaaauuauucaguuaagaaaa

SEQ ID NO: 3665425 - RNA, 17 nt, Human
guaaauuauuuuaaauu

SEQ ID NO: 3665426 - RNA, 21 nt, Human
guaaauuauuuuaaauuauaa

SEQ ID NO: 3665427 - RNA, 22 nt, Human
guaaauucucuauuuuuuguaa

SEQ ID NO: 3665428 - RNA, 18 nt, Human
guaaauucugauuucuuu

SEQ ID NO: 3665429 - RNA, 19 nt, Human
guaaauuuagcauaucaau

SEQ ID NO: 3665430 - RNA, 17 nt, Human
guaaauuuaugugaugg

SEQ ID NO: 3665431 - RNA, 20 nt, Human
guaaauuuccccaacagugu

SEQ ID NO: 3665432 - RNA, 15 nt, Human
guaaauuuggcuucu

SEQ ID NO: 3665433 - RNA, 16 nt, Human
guaaauuuggcuucug

SEQ ID NO: 3665434 - RNA, 13 nt, Human
guaacaaaaauaa

SEQ ID NO: 3665435 - RNA, 13 nt, Human
guaacaaaugaac

SEQ ID NO: 3665436 - RNA, 16 nt, Human
guaacaagaaaacaua

SEQ ID NO: 3665437 - RNA, 13 nt, Human
guaacaagaaagg

SEQ ID NO: 3665438 - RNA, 21 nt, Human
guaacaagagugauucuugcu

SEQ ID NO: 3665439 - RNA, 16 nt, Human
guaacaagccagauuu

SEQ ID NO: 3665440 - RNA, 17 nt, Human
guaacaauacaaaugga

SEQ ID NO: 3665441 - RNA, 18 nt, Human
guaacaauacaaauggau

SEQ ID NO: 3665442 - RNA, 17 nt, Human
guaacaaugaagauaaa

SEQ ID NO: 3665443 - RNA, 23 nt, Human
guaacacagugccuucaauaaau

SEQ ID NO: 3665444 - RNA, 15 nt, Human
guaacacuaauauau

SEQ ID NO: 3665445 - RNA, 16 nt, Human
guaacacuaauauauu

SEQ ID NO: 3665446 - RNA, 20 nt, Human
guaacacuagggccuuggaa

SEQ ID NO: 3665447 - RNA, 15 nt, Human
guaacacuccucugc

SEQ ID NO: 3665448 - RNA, 16 nt, Human
guaacacuuuacaaug

SEQ ID NO: 3665449 - RNA, 15 nt, Human
guaacagaaagggca

SEQ ID NO: 3665450 - RNA, 20 nt, Human
gucagacauccauguuugua

SEQ ID NO: 3665451 - RNA, 16 nt, Human
gucagacccuggaggc

SEQ ID NO: 3665452 - RNA, 16 nt, Human
gucagacgccugagga

SEQ ID NO: 3665453 - RNA, 16 nt, Human
gucagacugcugggac

SEQ ID NO: 3665454 - RNA, 22 nt, Human
gucagacugcugggacuggcca

SEQ ID NO: 3665455 - RNA, 24 nt, Human
gucagacugcugggacuggccagg

SEQ ID NO: 3665456 - RNA, 18 nt, Human
gucagacuggcuggcugc

SEQ ID NO: 3665457 - RNA, 15 nt, Human
gucagacuuuaaaga

SEQ ID NO: 3665458 - RNA, 12 nt, Human
gucagagagaau

SEQ ID NO: 3665459 - RNA, 21 nt, Human
gucagaggagagauagccugu

SEQ ID NO: 3665460 - RNA, 16 nt, Human
gucagaggauggccag

SEQ ID NO: 3665461 - RNA, 20 nt, Human
gucagaggauggccaguguc

SEQ ID NO: 3665462 - RNA, 14 nt, Human
gucagauccaggag

SEQ ID NO: 3665463 - RNA, 17 nt, Human
gucagauccaggagcuc

SEQ ID NO: 3665464 - RNA, 18 nt, Human
gucagaucugccuaagga

SEQ ID NO: 3665465 - RNA, 21 nt, Human
gucagaucugccuaaggacuu

SEQ ID NO: 3665466 - RNA, 16 nt, Human
gucagaugagaacaaa

SEQ ID NO: 3665467 - RNA, 22 nt, Human
gucagaugagaacaaagcuguu

SEQ ID NO: 3665468 - RNA, 16 nt, Human
gucagauuccuuuccc

SEQ ID NO: 3665469 - RNA, 17 nt, Human
gucagauucuugcaucc

SEQ ID NO: 3665470 - RNA, 14 nt, Human
gucagauuuccagu

SEQ ID NO: 3665471 - RNA, 20 nt, Human
gucagcaaaaagcaaaauca

SEQ ID NO: 3665472 - RNA, 17 nt, Human
gucagcaaauuaauugg

SEQ ID NO: 3665473 - RNA, 20 nt, Human
gucagcagccucccugaaga

SEQ ID NO: 3665474 - RNA, 10 nt, Human
gucagccagg

SEQ ID NO: 3665475 - RNA, 12 nt, Human
gucagccagggc

SEQ ID NO: 3665476 - RNA, 23 nt, Human
gucagcccaaaccaccagaagcc

SEQ ID NO: 3665477 - RNA, 17 nt, Human
gucagccgggcccugag

SEQ ID NO: 3665478 - RNA, 15 nt, Human
gucagccuccagccu

SEQ ID NO: 3665479 - RNA, 18 nt, Human
gucagccuccagccucug

SEQ ID NO: 3665480 - RNA, 19 nt, Human
gucagccuccagccucugu

SEQ ID NO: 3665481 - RNA, 21 nt, Human
gucagcgcagguuuaguuuac

SEQ ID NO: 3665482 - RNA, 21 nt, Human
gucagcgccuggccuacccag

SEQ ID NO: 3665483 - RNA, 20 nt, Human
gucagcgugcuuagccuccu

SEQ ID NO: 3665484 - RNA, 15 nt, Human
gucagcguugcaugu

SEQ ID NO: 3665485 - RNA, 14 nt, Human
gucagcuacuaaug

SEQ ID NO: 3665486 - RNA, 19 nt, Human
gucagcuacuaaugauguu

SEQ ID NO: 3665487 - RNA, 23 nt, Human
gucagcuagaucauuuguucugg

SEQ ID NO: 3665488 - RNA, 12 nt, Human
gucagcuccagc

SEQ ID NO: 3665489 - RNA, 13 nt, Human
gucagcuccagcu

SEQ ID NO: 3665490 - RNA, 19 nt, Human
gucagcuccccucggagaa

SEQ ID NO: 3665491 - RNA, 16 nt, Human
gucagcucccuucucu

SEQ ID NO: 3665492 - RNA, 15 nt, Human
gucagcucucugccc

SEQ ID NO: 3665493 - RNA, 16 nt, Human
gucagcucucugcccu

SEQ ID NO: 3665494 - RNA, 17 nt, Human
gucagcugcucccuggc

SEQ ID NO: 3665495 - RNA, 22 nt, Human
gucagcugggacaccccgacuu

SEQ ID NO: 3665496 - RNA, 16 nt, Human
gucagcuuugccuucc

SEQ ID NO: 3665497 - RNA, 17 nt, Human
gucagcuuugccuucca

SEQ ID NO: 3665498 - RNA, 23 nt, Human
gucagcuuugccuuccacgcugu

SEQ ID NO: 3665499 - RNA, 14 nt, Human
gucaggaaagagaa

SEQ ID NO: 3665500 - RNA, 15 nt, Human
gucaggaacagaagg

SEQ ID NO: 3665501 - RNA, 16 nt, Human
gucaggaacagaagga

SEQ ID NO: 3665502 - RNA, 17 nt, Human
gucaggaaggaugagca

SEQ ID NO: 3665503 - RNA, 12 nt, Human
gucaggagagca

SEQ ID NO: 3665504 - RNA, 14 nt, Human
gucaggagagcagc

SEQ ID NO: 3665505 - RNA, 15 nt, Human
gucaggagagcagcg

SEQ ID NO: 3665506 - RNA, 15 nt, Human
gucaggaggcagaag

SEQ ID NO: 3665507 - RNA, 18 nt, Human
gucaggaguccaagacca

SEQ ID NO: 3665508 - RNA, 21 nt, Human
gucaggauugcgagagaugug

SEQ ID NO: 3665509 - RNA, 22 nt, Human
gucaggauugcgagagaugugu

SEQ ID NO: 3665510 - RNA, 23 nt, Human
gucaggauugcgagagaugugug

SEQ ID NO: 3665511 - RNA, 18 nt, Human
gucaggcacugggcauga

SEQ ID NO: 3665512 - RNA, 12 nt, Human
gucaggccacgg

SEQ ID NO: 3665513 - RNA, 18 nt, Human
gucaggccacggcagccu

SEQ ID NO: 3665514 - RNA, 13 nt, Human
gucaggcccuggu

SEQ ID NO: 3665515 - RNA, 22 nt, Human
gucaggcccuuauuuucaagaa

SEQ ID NO: 3665516 - RNA, 13 nt, Human
gucaggccugugu

SEQ ID NO: 3665517 - RNA, 15 nt, Human
gucaggccugugugu

SEQ ID NO: 3665518 - RNA, 19 nt, Human
gucaggcguagaucaccag

SEQ ID NO: 3665519 - RNA, 20 nt, Human
gucaggcuaauguuggcaga

SEQ ID NO: 3665520 - RNA, 19 nt, Human
gucaggcucucugggcuga

SEQ ID NO: 3665521 - RNA, 13 nt, Human
gucaggcugcugg

SEQ ID NO: 3665522 - RNA, 20 nt, Human
gucaggcugcuggcgccucu

SEQ ID NO: 3665523 - RNA, 11 nt, Human
gucaggcuggu

SEQ ID NO: 3665524 - RNA, 21 nt, Human
gucagggaccaaggaccccuc

SEQ ID NO: 3665525 - RNA, 22 nt, Human
gucagggagugcuggcucacag

SEQ ID NO: 3665526 - RNA, 12 nt, Human
gucagggcccaa

SEQ ID NO: 3665527 - RNA, 20 nt, Human
gucagggcccaagucccugu

SEQ ID NO: 3665528 - RNA, 19 nt, Human
gucagggcccagaggcuga

SEQ ID NO: 3665529 - RNA, 21 nt, Human
gucagggcccagaggcugagu

SEQ ID NO: 3665530 - RNA, 17 nt, Human
gucaggggcagcugacc

SEQ ID NO: 3665531 - RNA, 21 nt, Human
gucaggggugacacagacuca

SEQ ID NO: 3665532 - RNA, 22 nt, Human
gucagguggggcagcuugaggg

SEQ ID NO: 3665533 - RNA, 19 nt, Human
gucagguuauacuccuccu

SEQ ID NO: 3665534 - RNA, 15 nt, Human
gucagguuuaacauu

SEQ ID NO: 3665535 - RNA, 16 nt, Human
gucagguuuaacauuu

SEQ ID NO: 3665536 - RNA, 13 nt, Human
gucagguuugagu

SEQ ID NO: 3665537 - RNA, 13 nt, Human
gucaguacccacc

SEQ ID NO: 3665538 - RNA, 14 nt, Human
gucaguauccaggc

SEQ ID NO: 3665539 - RNA, 16 nt, Human
gucaguauccaggcuu

SEQ ID NO: 3665540 - RNA, 14 nt, Human
gucaguauuguuuu

SEQ ID NO: 3665541 - RNA, 16 nt, Human
gucaguauuguuuugg

SEQ ID NO: 3665542 - RNA, 13 nt, Human
gucagucacagcc

SEQ ID NO: 3665543 - RNA, 16 nt, Human
gucagucacagccacc

SEQ ID NO: 3665544 - RNA, 19 nt, Human
gucagucaugauggcacca

SEQ ID NO: 3665545 - RNA, 21 nt, Human
gucaguccaagggguccccuc

SEQ ID NO: 3665546 - RNA, 16 nt, Human
guacaaaauaaacaaa

SEQ ID NO: 3665547 - RNA, 20 nt, Human
guacaaaauccagcuaugaa

SEQ ID NO: 3665548 - RNA, 14 nt, Human
guacaaaauuaagc

SEQ ID NO: 3665549 - RNA, 20 nt, Human
guacaaaguauuaagcauau

SEQ ID NO: 3665550 - RNA, 21 nt, Human
guacaaaguauuaagcauaua

SEQ ID NO: 3665551 - RNA, 13 nt, Human
guacaaauauaag

SEQ ID NO: 3665552 - RNA, 22 nt, Human
guacaaauauaagaauaaaaug

SEQ ID NO: 3665553 - RNA, 22 nt, Human
guacaaauuauaaaaagccacu

SEQ ID NO: 3665554 - RNA, 23 nt, Human
guacaacggaggccugcgacccu

SEQ ID NO: 3665555 - RNA, 21 nt, Human
guacaagaagcauuuuguaag

SEQ ID NO: 3665556 - RNA, 17 nt, Human
guacaaggcgaucccau

SEQ ID NO: 3665557 - RNA, 13 nt, Human
guacaaguaguuc

SEQ ID NO: 3665558 - RNA, 21 nt, Human
guacaaguaguucuguauuug

SEQ ID NO: 3665559 - RNA, 12 nt, Human
guacaauauuua

SEQ ID NO: 3665560 - RNA, 15 nt, Human
guacaauauuuuaag

SEQ ID NO: 3665561 - RNA, 19 nt, Human
guacaauauuuuaagcauu

SEQ ID NO: 3665562 - RNA, 21 nt, Human
guacacaacuaguuuuguuua

SEQ ID NO: 3665563 - RNA, 20 nt, Human
guacacaauaagcaaaaaca

SEQ ID NO: 3665564 - RNA, 16 nt, Human
guacacagcaccagaa

SEQ ID NO: 3665565 - RNA, 15 nt, Human
guacacguguccugu

SEQ ID NO: 3665566 - RNA, 20 nt, Human
guacacucugagugaaagga

SEQ ID NO: 3665567 - RNA, 15 nt, Human
guacacugaauauuu

SEQ ID NO: 3665568 - RNA, 23 nt, Human
guacacugccuucucaacuccaa

SEQ ID NO: 3665569 - RNA, 18 nt, Human
guacacuguuucaaacuu

SEQ ID NO: 3665570 - RNA, 14 nt, Human
guacacuugugaau

SEQ ID NO: 3665571 - RNA, 14 nt, Human
guacagaauauuuc

SEQ ID NO: 3665572 - RNA, 18 nt, Human
guacagaaucauugcuua

SEQ ID NO: 3665573 - RNA, 23 nt, Human
guacagacagagaauaugucugc

SEQ ID NO: 3665574 - RNA, 17 nt, Human
guacagacguaugcuua

SEQ ID NO: 3665575 - RNA, 20 nt, Human
guacagagaacuaacacuau

SEQ ID NO: 3665576 - RNA, 21 nt, Human
guacagagaacuaacacuauu

SEQ ID NO: 3665577 - RNA, 15 nt, Human
guacagagaagccag

SEQ ID NO: 3665578 - RNA, 19 nt, Human
guacagagaagccagcuug

SEQ ID NO: 3665579 - RNA, 15 nt, Human
guacagagaagccau

SEQ ID NO: 3665580 - RNA, 16 nt, Human
guacagagaagccauc

SEQ ID NO: 3665581 - RNA, 20 nt, Human
guacagagaccucccuguuc

SEQ ID NO: 3665582 - RNA, 18 nt, Human
guacagagcccacgcccc

SEQ ID NO: 3665583 - RNA, 19 nt, Human
guacagaguggaauaagac

SEQ ID NO: 3665584 - RNA, 19 nt, Human
guacagauugcugcuucug

SEQ ID NO: 3665585 - RNA, 15 nt, Human
guacagcaugugccu

SEQ ID NO: 3665586 - RNA, 12 nt, Human
guacagcccaga

SEQ ID NO: 3665587 - RNA, 14 nt, Human
guacagcccagagg

SEQ ID NO: 3665588 - RNA, 16 nt, Human
guacagcccagaggcc

SEQ ID NO: 3665589 - RNA, 18 nt, Human
guacagcuguuuaagaug

SEQ ID NO: 3665590 - RNA, 18 nt, Human
guacaggaugcuuugguu

SEQ ID NO: 3665591 - RNA, 15 nt, Human
guacaggcagcacag

SEQ ID NO: 3665592 - RNA, 16 nt, Human
guacaggguuaucugc

SEQ ID NO: 3665593 - RNA, 16 nt, Human
guacaggguuuuuacc

SEQ ID NO: 3665594 - RNA, 14 nt, Human
guacagguacuuug

SEQ ID NO: 3665595 - RNA, 13 nt, Human
gagaaacagagac

SEQ ID NO: 3665596 - RNA, 17 nt, Human
gagaaacaguugguaac

SEQ ID NO: 3665597 - RNA, 22 nt, Human
gagaaacaguugguaacuuuug

SEQ ID NO: 3665598 - RNA, 14 nt, Human
gagaaaccagcuuc

SEQ ID NO: 3665599 - RNA, 23 nt, Human
guauaaaaucagccaauuauguu

SEQ ID NO: 3665600 - RNA, 16 nt, Human
guauaaacaagaaaaa

SEQ ID NO: 3665601 - RNA, 13 nt, Human
guauaaacauuaa

SEQ ID NO: 3665602 - RNA, 13 nt, Human
guauaaacuauca

SEQ ID NO: 3665603 - RNA, 17 nt, Human
guauaaacuaucaguuu

SEQ ID NO: 3665604 - RNA, 22 nt, Human
guauaaagaauaggacuuguuu

SEQ ID NO: 3665605 - RNA, 17 nt, Human
guauaaagaauuguggu

SEQ ID NO: 3665606 - RNA, 18 nt, Human
guauaaagcaacuguuau

SEQ ID NO: 3665607 - RNA, 20 nt, Human
guauaaagcaacuguuauga

SEQ ID NO: 3665608 - RNA, 21 nt, Human
guauaaagcaacuguuaugaa

SEQ ID NO: 3665609 - RNA, 23 nt, Human
guauaaagcaacuguuaugaaau

SEQ ID NO: 3665610 - RNA, 18 nt, Human
guauaaauaggagaggau

SEQ ID NO: 3665611 - RNA, 17 nt, Human
guauaaaugguugucug

SEQ ID NO: 3665612 - RNA, 12 nt, Human
guauaaauguau

SEQ ID NO: 3665613 - RNA, 13 nt, Human
guauaaauguaua

SEQ ID NO: 3665614 - RNA, 16 nt, Human
guauaaauguauauac

SEQ ID NO: 3665615 - RNA, 18 nt, Human
guauaaauguauauacac

SEQ ID NO: 3665616 - RNA, 19 nt, Human
guauaaauguauauacaca

SEQ ID NO: 3665617 - RNA, 13 nt, Human
guauaaauuuauu

SEQ ID NO: 3665618 - RNA, 20 nt, Human
guauaacacaauaugaauac

SEQ ID NO: 3665619 - RNA, 18 nt, Human
guauaacccuguuacaaa

SEQ ID NO: 3665620 - RNA, 21 nt, Human
guauaacuuuaacuucuguuu

SEQ ID NO: 3665621 - RNA, 15 nt, Human
guauaaguaagaaaa

SEQ ID NO: 3665622 - RNA, 20 nt, Human
guauaaguggaggcacuuua

SEQ ID NO: 3665623 - RNA, 15 nt, Human
guauaaguggugugu

SEQ ID NO: 3665624 - RNA, 14 nt, Human
guauaauaaaauua

SEQ ID NO: 3665625 - RNA, 13 nt, Human
guauaauacuuug

SEQ ID NO: 3665626 - RNA, 12 nt, Human
guauaauauaaa

SEQ ID NO: 3665627 - RNA, 21 nt, Human
guauaaugguugacuggguuu

SEQ ID NO: 3665628 - RNA, 23 nt, Human
guauaaugguugacuggguuucu

SEQ ID NO: 3665629 - RNA, 13 nt, Human
guauaauguuuau

SEQ ID NO: 3665630 - RNA, 15 nt, Human
guauaauuaacaugu

SEQ ID NO: 3665631 - RNA, 17 nt, Human
guauaauucacauugua

SEQ ID NO: 3665632 - RNA, 18 nt, Human
guauaauuggauuuccua

SEQ ID NO: 3665633 - RNA, 14 nt, Human
guauaauuguguga

SEQ ID NO: 3665634 - RNA, 21 nt, Human
guauaauuucgagauuuguag

SEQ ID NO: 3665635 - RNA, 22 nt, Human
guauaauuuuuuaaaguuacuu

SEQ ID NO: 3665636 - RNA, 23 nt, Human
guauacaccauauacuguucuuc

SEQ ID NO: 3665637 - RNA, 15 nt, Human
guauacguuuuucag

SEQ ID NO: 3665638 - RNA, 23 nt, Human
guauacuagggagccauuugaga

SEQ ID NO: 3665639 - RNA, 12 nt, Human
guauacuuuagu

SEQ ID NO: 3665640 - RNA, 14 nt, Human
guauacuuuaguau

SEQ ID NO: 3665641 - RNA, 14 nt, Human
guauagaaaugcug

SEQ ID NO: 3665642 - RNA, 15 nt, Human
guauagaauaggcac

SEQ ID NO: 3665643 - RNA, 19 nt, Human
guauagacaguuuguaaau

SEQ ID NO: 3665644 - RNA, 15 nt, Human
guauagagauaugca

SEQ ID NO: 3665645 - RNA, 16 nt, Human
guauagauguugcuaa

SEQ ID NO: 3665646 - RNA, 15 nt, Human
guauagcuguauuga

SEQ ID NO: 3665647 - RNA, 16 nt, Human
guauagcuguauugaa

SEQ ID NO: 3665648 - RNA, 17 nt, Human
guauagcuguauugaau

SEQ ID NO: 3665649 - RNA, 19 nt, Human
guauagcuguauugaauca

SEQ ID NO: 3665650 - RNA, 18 nt, Human
guauagguagauguucag

SEQ ID NO: 3665651 - RNA, 16 nt, Human
guauaguauuugaaaa

SEQ ID NO: 3665652 - RNA, 14 nt, Human
guauaguguaaaau

SEQ ID NO: 3665653 - RNA, 18 nt, Human
guauaguuauguaaauaa

SEQ ID NO: 3665654 - RNA, 12 nt, Human
guauaguugcuu

SEQ ID NO: 3665655 - RNA, 20 nt, Human
guauauaaugguuucaaaga

SEQ ID NO: 3665656 - RNA, 12 nt, Human
guauauacacau

SEQ ID NO: 3665657 - RNA, 16 nt, Human
guauauacacauauac

SEQ ID NO: 3665658 - RNA, 23 nt, Human
guauauacacccaagaugggcau

SEQ ID NO: 3665659 - RNA, 19 nt, Human
guauauauaagaaagacau

SEQ ID NO: 3665660 - RNA, 17 nt, Human
guauauauacauaacag

SEQ ID NO: 3665661 - RNA, 13 nt, Human
guauauaugugua

SEQ ID NO: 3665662 - RNA, 16 nt, Human
guauauauguguauau

SEQ ID NO: 3665663 - RNA, 23 nt, Human
guauauauguguauauauacaua

SEQ ID NO: 3665664 - RNA, 18 nt, Human
guauauauguguguuuaa

SEQ ID NO: 3665665 - RNA, 11 nt, Human
guauauauuua

SEQ ID NO: 3665666 - RNA, 22 nt, Human
guauauauuuugugugaaauug

SEQ ID NO: 3665667 - RNA, 14 nt, Human
guauaucagaaaag

SEQ ID NO: 3665668 - RNA, 19 nt, Human
guauaucauucuaaagaua

SEQ ID NO: 3665669 - RNA, 12 nt, Human
guauaucguuau

SEQ ID NO: 3665670 - RNA, 23 nt, Human
guauaucuagguuuaugacagua

SEQ ID NO: 3665671 - RNA, 21 nt, Human
guauaucuggacaagccaacu

SEQ ID NO: 3665672 - RNA, 14 nt, Human
guauaucugggcug

SEQ ID NO: 3665673 - RNA, 18 nt, Human
guauauggugguaauaag

SEQ ID NO: 3665674 - RNA, 23 nt, Human
guauauguagauguaugcacaca

SEQ ID NO: 3665675 - RNA, 22 nt, Human
guauaugucaagccauaauugu

SEQ ID NO: 3665676 - RNA, 15 nt, Human
guauaugucucaggu

SEQ ID NO: 3665677 - RNA, 21 nt, Human
guauaugucucaggucccugc

SEQ ID NO: 3665678 - RNA, 16 nt, Human
guauauguugggugca

SEQ ID NO: 3665679 - RNA, 19 nt, Human
guauauuaaaaaagagaca

SEQ ID NO: 3665680 - RNA, 15 nt, Human
guauauuaaaaaugg

SEQ ID NO: 3665681 - RNA, 16 nt, Human
guauauuaaaaauggu

SEQ ID NO: 3665682 - RNA, 21 nt, Human
guauauuaaaaaugguaaaau

SEQ ID NO: 3665683 - RNA, 13 nt, Human
guauauuacaaug

SEQ ID NO: 3665684 - RNA, 15 nt, Human
guauauuacaaugau

SEQ ID NO: 3665685 - RNA, 12 nt, Human
guauauuauaau

SEQ ID NO: 3665686 - RNA, 16 nt, Human
guauauuauguauuua

SEQ ID NO: 3665687 - RNA, 11 nt, Human
guauauuauuu

SEQ ID NO: 3665688 - RNA, 12 nt, Human
guauauucacuu

SEQ ID NO: 3665689 - RNA, 15 nt, Human
guauauucauauauu

SEQ ID NO: 3665690 - RNA, 13 nt, Human
guauauugguuuu

SEQ ID NO: 3665691 - RNA, 13 nt, Human
guauauuguguuu

SEQ ID NO: 3665692 - RNA, 13 nt, Human
guauauuuauagu

SEQ ID NO: 3665693 - RNA, 19 nt, Human
guauauuuauauaauuaug

SEQ ID NO: 3665694 - RNA, 14 nt, Human
guauauuuguacaa

SEQ ID NO: 3665695 - RNA, 14 nt, Human
guauauuuguauau

SEQ ID NO: 3665696 - RNA, 22 nt, Human
guauauuuguauuuaaaugaaa

SEQ ID NO: 3665697 - RNA, 21 nt, Human
guauauuuuauauuacugaca

SEQ ID NO: 3665698 - RNA, 15 nt, Human
guauauuuuccuaua

SEQ ID NO: 3665699 - RNA, 19 nt, Human
guauauuuuuuuaauuuaa

SEQ ID NO: 3665700 - RNA, 22 nt, Human
guaucaaaaugcucuuauuuca

SEQ ID NO: 3665701 - RNA, 20 nt, Human
guaucaaacagcucaggcug

SEQ ID NO: 3665702 - RNA, 15 nt, Human
guaucaaauaaaauu

SEQ ID NO: 3665703 - RNA, 19 nt, Human
guaucaaauauuagaugug

SEQ ID NO: 3665704 - RNA, 21 nt, Human
guaucaaauauuagaugugau

SEQ ID NO: 3665705 - RNA, 19 nt, Human
guaucaacacacauuuuaa

SEQ ID NO: 3665706 - RNA, 19 nt, Human
guaucaauaccaaauagcu

SEQ ID NO: 3665707 - RNA, 18 nt, Human
guaucaauccuuguucag

SEQ ID NO: 3665708 - RNA, 20 nt, Human
guaucacugucuuuccuaga

SEQ ID NO: 3665709 - RNA, 20 nt, Human
guaucagaauugaaacacuu

SEQ ID NO: 3665710 - RNA, 22 nt, Human
guaucaggacccagaggaaggg

SEQ ID NO: 3665711 - RNA, 18 nt, Human
guaucaggugcugccauc

SEQ ID NO: 3665712 - RNA, 14 nt, Human
guaucaguguuuau

SEQ ID NO: 3665713 - RNA, 15 nt, Human
guaucaguguuuuaa

SEQ ID NO: 3665714 - RNA, 17 nt, Human
guaucaguguuuuaaau

SEQ ID NO: 3665715 - RNA, 19 nt, Human
guaucaguguuuuaaauuc

SEQ ID NO: 3665716 - RNA, 12 nt, Human
guaucauagaaa

SEQ ID NO: 3665717 - RNA, 15 nt, Human
guaucauagaaaugu

SEQ ID NO: 3665718 - RNA, 14 nt, Human
guaucauauauuua

SEQ ID NO: 3665719 - RNA, 11 nt, Human
guaucaugcau

SEQ ID NO: 3665720 - RNA, 17 nt, Human
guaucaugcccugugca

SEQ ID NO: 3665721 - RNA, 19 nt, Human
guauccacuuugcacagcu

SEQ ID NO: 3665722 - RNA, 15 nt, Human
guauccagaauggaa

SEQ ID NO: 3665723 - RNA, 20 nt, Human
guauccagguucccucccag

SEQ ID NO: 3665724 - RNA, 11 nt, Human
guauccaguca

SEQ ID NO: 3665725 - RNA, 15 nt, Human
guauccauauuuuau

SEQ ID NO: 3665726 - RNA, 20 nt, Human
guauccaugggggcagggca

SEQ ID NO: 3665727 - RNA, 17 nt, Human
guauccauuaucaugug

SEQ ID NO: 3665728 - RNA, 18 nt, Human
guauccauuaucaugugu

SEQ ID NO: 3665729 - RNA, 18 nt, Human
guauccccccaucuugcu

SEQ ID NO: 3665730 - RNA, 17 nt, Human
guauccuccagguuuuu

SEQ ID NO: 3665731 - RNA, 20 nt, Human
guauccuccagguuuuucaa

SEQ ID NO: 3665732 - RNA, 21 nt, Human
guauccugcuucugauaugca

SEQ ID NO: 3665733 - RNA, 18 nt, Human
guauccugggggacccaa

SEQ ID NO: 3665734 - RNA, 16 nt, Human
guauccuucagccuga

SEQ ID NO: 3665735 - RNA, 15 nt, Human
guaucgauguuaugu

SEQ ID NO: 3665736 - RNA, 17 nt, Human
guaucggagacagugau

SEQ ID NO: 3665737 - RNA, 18 nt, Human
guaucggcacuguacaaa

SEQ ID NO: 3665738 - RNA, 17 nt, Human
guaucgggggcuggggc

SEQ ID NO: 3665739 - RNA, 15 nt, Human
guaucguaaccagcc

SEQ ID NO: 3665740 - RNA, 17 nt, Human
guaucguaaccagccag

SEQ ID NO: 3665741 - RNA, 16 nt, Human
gucuguguguguguau

SEQ ID NO: 3665742 - RNA, 14 nt, Human
gucuguguuuuaau

SEQ ID NO: 3665743 - RNA, 17 nt, Human
gucuguguuuugaaaga

SEQ ID NO: 3665744 - RNA, 14 nt, Human
gucuguuacacugg

SEQ ID NO: 3665745 - RNA, 15 nt, Human
gucuguucuugaagc

SEQ ID NO: 3665746 - RNA, 14 nt, Human
gucuguucuuucca

SEQ ID NO: 3665747 - RNA, 11 nt, Human
gucuguugagu

SEQ ID NO: 3665748 - RNA, 20 nt, Human
gucuguuggcaggcuggcca

SEQ ID NO: 3665749 - RNA, 21 nt, Human
gucuguuggcaggcuggccag

SEQ ID NO: 3665750 - RNA, 14 nt, Human
gucuguuuaagaaa

SEQ ID NO: 3665751 - RNA, 13 nt, Human
gucuguuuacugc

SEQ ID NO: 3665752 - RNA, 17 nt, Human
gucuguuuauaaacauu

SEQ ID NO: 3665753 - RNA, 21 nt, Human
gucuguuuggacugcagaagc

SEQ ID NO: 3665754 - RNA, 21 nt, Human
gucuguuuuccuuucucaccg

SEQ ID NO: 3665755 - RNA, 23 nt, Human
gucuguuuuguaaaguccccaga

SEQ ID NO: 3665756 - RNA, 20 nt, Human
gucuguuuuguguacuuuua

SEQ ID NO: 3665757 - RNA, 21 nt, Human
gucuuaaaaaguggaaaaaua

SEQ ID NO: 3665758 - RNA, 14 nt, Human
gucuuaaaaccugc

SEQ ID NO: 3665759 - RNA, 22 nt, Human
gucuuaaacuaaaugugcaaua

SEQ ID NO: 3665760 - RNA, 20 nt, Human
gucuuaaauaaaagaaaugc

SEQ ID NO: 3665761 - RNA, 19 nt, Human
gucuuaaggacaaagugcc

SEQ ID NO: 3665762 - RNA, 16 nt, Human
gucuuaaugaaguuug

SEQ ID NO: 3665763 - RNA, 17 nt, Human
gucuuaaugaaguuuga

SEQ ID NO: 3665764 - RNA, 19 nt, Human
gucuuaaugaaguuugaau

SEQ ID NO: 3665765 - RNA, 14 nt, Human
gucuuaauuaaaag

SEQ ID NO: 3665766 - RNA, 20 nt, Human
gucuuaauuaaguaaacuaa

SEQ ID NO: 3665767 - RNA, 20 nt, Human
gucuuaauuucuaucuuguu

SEQ ID NO: 3665768 - RNA, 18 nt, Human
gucuuacauaaaccauuu

SEQ ID NO: 3665769 - RNA, 19 nt, Human
gucuuagaaguggaccagg

SEQ ID NO: 3665770 - RNA, 18 nt, Human
gucuuagacuugaaauac

SEQ ID NO: 3665771 - RNA, 15 nt, Human
gucuuagauguauau

SEQ ID NO: 3665772 - RNA, 21 nt, Human
gucuuauauuuacaacacuuu

SEQ ID NO: 3665773 - RNA, 14 nt, Human
gucuuaugcuucca

SEQ ID NO: 3665774 - RNA, 23 nt, Human
gucuuauuaaaacacuucauuga

SEQ ID NO: 3665775 - RNA, 15 nt, Human
gucuuauuuuuagau

SEQ ID NO: 3665776 - RNA, 12 nt, Human
gagacaggaagg

SEQ ID NO: 3665777 - RNA, 16 nt, Human
gagacaggaccugacu

SEQ ID NO: 3665778 - RNA, 16 nt, Human
gagacaggcagagcug

SEQ ID NO: 3665779 - RNA, 19 nt, Human
gagacaggcagagcugcuc

SEQ ID NO: 3665780 - RNA, 20 nt, Human
gagacaggguuucaccaugu

SEQ ID NO: 3665781 - RNA, 17 nt, Human
gagacaguccagccugg

SEQ ID NO: 3665782 - RNA, 17 nt, Human
gagacagugcacaugaa

SEQ ID NO: 3665783 - RNA, 16 nt, Human
gagacaguucaagaaa

SEQ ID NO: 3665784 - RNA, 21 nt, Human
gagacaguuucuuagcuuuuu

SEQ ID NO: 3665785 - RNA, 15 nt, Human
gagacauacuugaag

SEQ ID NO: 3665786 - RNA, 21 nt, Human
gagacauacuugaagggccag

SEQ ID NO: 3665787 - RNA, 12 nt, Human
gagacauccagc

SEQ ID NO: 3665788 - RNA, 22 nt, Human
gagacauuaacucauuagacug

SEQ ID NO: 3665789 - RNA, 18 nt, Human
gagacauuccaaaacgaa

SEQ ID NO: 3665790 - RNA, 15 nt, Human
gagaccaaccugacc

SEQ ID NO: 3665791 - RNA, 16 nt, Human
gagaccaaccugacca

SEQ ID NO: 3665792 - RNA, 23 nt, Human
gagaccaagacucugaaaucuca

SEQ ID NO: 3665793 - RNA, 15 nt, Human
gagaccacuugggcg

SEQ ID NO: 3665794 - RNA, 16 nt, Human
gagaccagccugggca

SEQ ID NO: 3665795 - RNA, 17 nt, Human
gagaccaggagggcacu

SEQ ID NO: 3665796 - RNA, 18 nt, Human
gagaccaggcccuggcua

SEQ ID NO: 3665797 - RNA, 12 nt, Human
gagaccagggcu

SEQ ID NO: 3665798 - RNA, 13 nt, Human
gagaccagggcuc

SEQ ID NO: 3665799 - RNA, 20 nt, Human
gagaccaguugggagcacug

SEQ ID NO: 3665800 - RNA, 21 nt, Human
gagaccaguugggagcacugg

SEQ ID NO: 3665801 - RNA, 14 nt, Human
gagaccauccuggc

SEQ ID NO: 3665802 - RNA, 16 nt, Human
gagaccauccuggcua

SEQ ID NO: 3665803 - RNA, 14 nt, Human
gagacccaaggagg

SEQ ID NO: 3665804 - RNA, 18 nt, Human
gagacccagcccucaucc

SEQ ID NO: 3665805 - RNA, 15 nt, Human
gagacccucugccac

SEQ ID NO: 3665806 - RNA, 21 nt, Human
gagacccugucucaaaaaaag

SEQ ID NO: 3665807 - RNA, 16 nt, Human
gagaccgagccucugu

SEQ ID NO: 3665808 - RNA, 14 nt, Human
gagaccgagugaac

SEQ ID NO: 3665809 - RNA, 19 nt, Human
gagaccggccugccaggag

SEQ ID NO: 3665810 - RNA, 21 nt, Human
gagaccggccugccaggagga

SEQ ID NO: 3665811 - RNA, 22 nt, Human
gagaccgugaagauacuuugua

SEQ ID NO: 3665812 - RNA, 21 nt, Human
gagaccuaccucagguugcug

SEQ ID NO: 3665813 - RNA, 16 nt, Human
gagaccuauguaagaa

SEQ ID NO: 3665814 - RNA, 11 nt, Human
gagaccucagc

SEQ ID NO: 3665815 - RNA, 14 nt, Human
gagaccucagccau

SEQ ID NO: 3665816 - RNA, 16 nt, Human
gagaccucccuguuca

SEQ ID NO: 3665817 - RNA, 23 nt, Human
gagaccucccuguucaaggcccc

SEQ ID NO: 3665818 - RNA, 15 nt, Human
gagaccuccugccuc

SEQ ID NO: 3665819 - RNA, 16 nt, Human
gagaccuccugccucc

SEQ ID NO: 3665820 - RNA, 11 nt, Human
gagaccugccc

SEQ ID NO: 3665821 - RNA, 18 nt, Human
gagaccugcccucaagag

SEQ ID NO: 3665822 - RNA, 20 nt, Human
gagaccuggacacaggccug

SEQ ID NO: 3665823 - RNA, 16 nt, Human
gagaccugugugccag

SEQ ID NO: 3665824 - RNA, 16 nt, Human
gagacggagucccacc

SEQ ID NO: 3665825 - RNA, 18 nt, Human
gagacgggggcagagagg

SEQ ID NO: 3665826 - RNA, 22 nt, Human
gagacggugucuuguucuguca

SEQ ID NO: 3665827 - RNA, 18 nt, Human
gagacgguguuuugccau

SEQ ID NO: 3665828 - RNA, 20 nt, Human
gagacguggaaccucugucu

SEQ ID NO: 3665829 - RNA, 22 nt, Human
gagacguuuuuggaagaguagu

SEQ ID NO: 3665830 - RNA, 16 nt, Human
gagacuaagcccuguc

SEQ ID NO: 3665831 - RNA, 22 nt, Human
gagacuauuuaaacuuauaaau

SEQ ID NO: 3665832 - RNA, 14 nt, Human
gagacucagacagg

SEQ ID NO: 3665833 - RNA, 13 nt, Human
gagacucagccug

SEQ ID NO: 3665834 - RNA, 15 nt, Human
gagacucagugcaga

SEQ ID NO: 3665835 - RNA, 15 nt, Human
gagacuccauaguuu

SEQ ID NO: 3665836 - RNA, 16 nt, Human
gagacucccaugaagc

SEQ ID NO: 3665837 - RNA, 15 nt, Human
gagacuccugcaggc

SEQ ID NO: 3665838 - RNA, 20 nt, Human
gagacuccugcaggcagcca

SEQ ID NO: 3665839 - RNA, 22 nt, Human
gagacuccugcaggcagccagg

SEQ ID NO: 3665840 - RNA, 17 nt, Human
gagacuccugcccuguu

SEQ ID NO: 3665841 - RNA, 18 nt, Human
gagacucgcgacaaugca

SEQ ID NO: 3665842 - RNA, 19 nt, Human
gagacucuaggguccagug

SEQ ID NO: 3665843 - RNA, 13 nt, Human
gagacucuggccu

SEQ ID NO: 3665844 - RNA, 13 nt, Human
gagacucugucuc

SEQ ID NO: 3665845 - RNA, 15 nt, Human
gagacugcccagcua

SEQ ID NO: 3665846 - RNA, 23 nt, Human
gagacugcguucugcaagcauca

SEQ ID NO: 3665847 - RNA, 18 nt, Human
gagacugcuccugagccc

SEQ ID NO: 3665848 - RNA, 14 nt, Human
gagacugcuuccca

SEQ ID NO: 3665849 - RNA, 23 nt, Human
gagacugcuucccauccuacccu

SEQ ID NO: 3665850 - RNA, 21 nt, Human
gagacugggaagauaggcucu

SEQ ID NO: 3665851 - RNA, 14 nt, Human
gagacugggaaggc

SEQ ID NO: 3665852 - RNA, 22 nt, Human
gagacugggaaggcuugggauu

SEQ ID NO: 3665853 - RNA, 14 nt, Human
gagacuggggggcu

SEQ ID NO: 3665854 - RNA, 18 nt, Human
gagacuggggggcuugaa

SEQ ID NO: 3665855 - RNA, 19 nt, Human
gagacuggggggcuugaaa

SEQ ID NO: 3665856 - RNA, 15 nt, Human
gagacuggguaggaa

SEQ ID NO: 3665857 - RNA, 22 nt, Human
gagacugucucaagagggcacu

SEQ ID NO: 3665858 - RNA, 13 nt, Human
gagacugugcugu

SEQ ID NO: 3665859 - RNA, 17 nt, Human
gagacugugugugcccu

SEQ ID NO: 3665860 - RNA, 23 nt, Human
gagacugugugugcccucugggc

SEQ ID NO: 3665861 - RNA, 14 nt, Human
gagacuguuuggaa

SEQ ID NO: 3665862 - RNA, 20 nt, Human
gagacuuccaaaccugacag

SEQ ID NO: 3665863 - RNA, 13 nt, Human
gagacuugggaau

SEQ ID NO: 3665864 - RNA, 14 nt, Human
gagacuuguaguuu

SEQ ID NO: 3665865 - RNA, 20 nt, Human
gagacuuucuuucuguaggu

SEQ ID NO: 3665866 - RNA, 13 nt, Human
gagacuuugaugu

SEQ ID NO: 3665867 - RNA, 13 nt, Human
gagacuuuguaga

SEQ ID NO: 3665868 - RNA, 11 nt, Human
gagagaaaaaa

SEQ ID NO: 3665869 - RNA, 16 nt, Human
gagagaaaauaaaaag

SEQ ID NO: 3665870 - RNA, 17 nt, Human
gagagaaaauaaaaagu

SEQ ID NO: 3665871 - RNA, 13 nt, Human
gagagaaaauaua

SEQ ID NO: 3665872 - RNA, 17 nt, Human
gagagaaagugggugag

SEQ ID NO: 3665873 - RNA, 22 nt, Human
gagagaaagugugagcaaacua

SEQ ID NO: 3665874 - RNA, 21 nt, Human
gagagaaauaagugcccucuc

SEQ ID NO: 3665875 - RNA, 16 nt, Human
gagagaaauucuguua

SEQ ID NO: 3665876 - RNA, 21 nt, Human
gagagaaccuaacuguaucuu

SEQ ID NO: 3665877 - RNA, 15 nt, Human
gagagaagagcccca

SEQ ID NO: 3665878 - RNA, 18 nt, Human
gagagaaggaggggagca

SEQ ID NO: 3665879 - RNA, 12 nt, Human
gagagaagggga

SEQ ID NO: 3665880 - RNA, 13 nt, Human
gagagacaagaag

SEQ ID NO: 3665881 - RNA, 17 nt, Human
gagagacaagaagcaaa

SEQ ID NO: 3665882 - RNA, 18 nt, Human
gagagacacuggugggga

SEQ ID NO: 3665883 - RNA, 14 nt, Human
gagagacccaagga

SEQ ID NO: 3665884 - RNA, 19 nt, Human
gagagacccaaggaggaaa

SEQ ID NO: 3665885 - RNA, 20 nt, Human
gagagacccaaggaggaaaa

SEQ ID NO: 3665886 - RNA, 12 nt, Human
gagccagcagac

SEQ ID NO: 3665887 - RNA, 22 nt, Human
gagccagcagacauugucagca

SEQ ID NO: 3665888 - RNA, 12 nt, Human
gagccagcccuc

SEQ ID NO: 3665889 - RNA, 15 nt, Human
gagccagcccucccu

SEQ ID NO: 3665890 - RNA, 16 nt, Human
gagccagcccucccug

SEQ ID NO: 3665891 - RNA, 18 nt, Human
gagccagcucccucuauu

SEQ ID NO: 3665892 - RNA, 12 nt, Human
gagccaggagaa

SEQ ID NO: 3665893 - RNA, 15 nt, Human
gagccaggagaagcu

SEQ ID NO: 3665894 - RNA, 12 nt, Human
gagccaggcaca

SEQ ID NO: 3665895 - RNA, 14 nt, Human
gagccagggucuca

SEQ ID NO: 3665896 - RNA, 22 nt, Human
gagccagguaaugagggacugg

SEQ ID NO: 3665897 - RNA, 18 nt, Human
gagccaguaaacagagga

SEQ ID NO: 3665898 - RNA, 19 nt, Human
gagccagucuaguuccuga

SEQ ID NO: 3665899 - RNA, 21 nt, Human
gagccaguucaguaccuggag

SEQ ID NO: 3665900 - RNA, 22 nt, Human
gagccaguucaguaccuggagg

SEQ ID NO: 3665901 - RNA, 14 nt, Human
gagccauacauaaa

SEQ ID NO: 3665902 - RNA, 23 nt, Human
gagccauauaaguuugaaggaaa

SEQ ID NO: 3665903 - RNA, 22 nt, Human
gagccaucggugaaacuaacag

SEQ ID NO: 3665904 - RNA, 22 nt, Human
gagccaugauguggaguggggc

SEQ ID NO: 3665905 - RNA, 15 nt, Human
gagccauuuguccca

SEQ ID NO: 3665906 - RNA, 19 nt, Human
gagccauuugucccaagug

SEQ ID NO: 3665907 - RNA, 20 nt, Human
gagccauuugucccaagugc

SEQ ID NO: 3665908 - RNA, 14 nt, Human
gagccauuuuguga

SEQ ID NO: 3665909 - RNA, 11 nt, Human
gagcccacgcc

SEQ ID NO: 3665910 - RNA, 15 nt, Human
gagcccacgccccca

SEQ ID NO: 3665911 - RNA, 18 nt, Human
gagcccacggcuaagagg

SEQ ID NO: 3665912 - RNA, 22 nt, Human
gagcccacuccaucugguagaa

SEQ ID NO: 3665913 - RNA, 21 nt, Human
gagcccacugcccacccccuc

SEQ ID NO: 3665914 - RNA, 24 nt, Human
gagcccacuguccugggccugcag

SEQ ID NO: 3665915 - RNA, 22 nt, Human
gagcccagauugugccacugcu

SEQ ID NO: 3665916 - RNA, 17 nt, Human
gagcccagcccuguucu

SEQ ID NO: 3665917 - RNA, 20 nt, Human
gagcccagcccuguucuggg

SEQ ID NO: 3665918 - RNA, 11 nt, Human
gagcccaggag

SEQ ID NO: 3665919 - RNA, 23 nt, Human
gagcccaggaguucgaggcugca

SEQ ID NO: 3665920 - RNA, 16 nt, Human
gagcccaggccaggac

SEQ ID NO: 3665921 - RNA, 22 nt, Human
gagcccaggccaggacucugca

SEQ ID NO: 3665922 - RNA, 15 nt, Human
gagcccaggcgggag

SEQ ID NO: 3665923 - RNA, 22 nt, Human
gagcccagggcaucuugcuggc

SEQ ID NO: 3665924 - RNA, 16 nt, Human
gagcccagucuguuga

SEQ ID NO: 3665925 - RNA, 17 nt, Human
gagcccauacucagccu

SEQ ID NO: 3665926 - RNA, 20 nt, Human
gagcccauacucagccugcu

SEQ ID NO: 3665927 - RNA, 23 nt, Human
gagcccauguucugcccccagcc

SEQ ID NO: 3665928 - RNA, 16 nt, Human
gagccccacccucaga

SEQ ID NO: 3665929 - RNA, 12 nt, Human
gagccccacucu

SEQ ID NO: 3665930 - RNA, 13 nt, Human
gagccccacucuc

SEQ ID NO: 3665931 - RNA, 16 nt, Human
gagccccacucucaga

SEQ ID NO: 3665932 - RNA, 17 nt, Human
gagccccacucucagag

SEQ ID NO: 3665933 - RNA, 19 nt, Human
gagccccacucucagaggc

SEQ ID NO: 3665934 - RNA, 23 nt, Human
gagccccacucucagaggcccca

SEQ ID NO: 3665935 - RNA, 13 nt, Human
gagccccaggccu

SEQ ID NO: 3665936 - RNA, 14 nt, Human
gagccccagggaga

SEQ ID NO: 3665937 - RNA, 12 nt, Human
gagccccagggu

SEQ ID NO: 3665938 - RNA, 18 nt, Human
gagccccaucagcuccag

SEQ ID NO: 3665939 - RNA, 12 nt, Human
gagccccaucuu

SEQ ID NO: 3665940 - RNA, 20 nt, Human
gagccccaucuucacccagg

SEQ ID NO: 3665941 - RNA, 18 nt, Human
gagccccauuccugggaa

SEQ ID NO: 3665942 - RNA, 14 nt, Human
gagcccccacccug

SEQ ID NO: 3665943 - RNA, 22 nt, Human
gagcccccacccuguuccugcu

SEQ ID NO: 3665944 - RNA, 21 nt, Human
gagcccccagcuuccagcagg

SEQ ID NO: 3665945 - RNA, 13 nt, Human
gagcccccccaac

SEQ ID NO: 3665946 - RNA, 21 nt, Human
gagcccccgccccgccccaca

SEQ ID NO: 3665947 - RNA, 22 nt, Human
gagcccccgccccgccccacau

SEQ ID NO: 3665948 - RNA, 18 nt, Human
gagccccgcagaccuccc

SEQ ID NO: 3665949 - RNA, 15 nt, Human
gagccccgcccucuu

SEQ ID NO: 3665950 - RNA, 16 nt, Human
gagccccgcccucuuc

SEQ ID NO: 3665951 - RNA, 18 nt, Human
gagccccgcccucuuccu

SEQ ID NO: 3665952 - RNA, 21 nt, Human
gagccccgcccucuuccugac

SEQ ID NO: 3665953 - RNA, 13 nt, Human
gagccccuggucc

SEQ ID NO: 3665954 - RNA, 20 nt, Human
gagccccugguccugagggu

SEQ ID NO: 3665955 - RNA, 21 nt, Human
gagccccugucuagagaggga

SEQ ID NO: 3665956 - RNA, 13 nt, Human
gagccccuuccuu

SEQ ID NO: 3665957 - RNA, 19 nt, Human
gagccccuuccuugcucug

SEQ ID NO: 3665958 - RNA, 17 nt, Human
gagccccuucugcucag

SEQ ID NO: 3665959 - RNA, 22 nt, Human
gagccccuucugcucagcucug

SEQ ID NO: 3665960 - RNA, 23 nt, Human
gagcccgcacccccacccuuugg

SEQ ID NO: 3665961 - RNA, 14 nt, Human
gagcccgggagcug

SEQ ID NO: 3665962 - RNA, 22 nt, Human
gagcccgggagcugcugcccug

SEQ ID NO: 3665963 - RNA, 19 nt, Human
gagcccuaaccccuuccag

SEQ ID NO: 3665964 - RNA, 17 nt, Human
gagcccuacucccugca

SEQ ID NO: 3665965 - RNA, 18 nt, Human
gagcccuacucccugcag

SEQ ID NO: 3665966 - RNA, 21 nt, Human
gagcccucaaagugaggggaa

SEQ ID NO: 3665967 - RNA, 15 nt, Human
gagcccucagaaccc

SEQ ID NO: 3665968 - RNA, 15 nt, Human
gagcccuccgccuuc

SEQ ID NO: 3665969 - RNA, 17 nt, Human
gagcccuccgccuucac

SEQ ID NO: 3665970 - RNA, 17 nt, Human
gagcccugaggccuaga

SEQ ID NO: 3665971 - RNA, 18 nt, Human
gagcccugccucuccgcc

SEQ ID NO: 3665972 - RNA, 12 nt, Human
gagcccugggac

SEQ ID NO: 3665973 - RNA, 18 nt, Human
gagcccuguggaugagcc

SEQ ID NO: 3665974 - RNA, 22 nt, Human
gagcccuguggaugagcccuca

SEQ ID NO: 3665975 - RNA, 19 nt, Human
gagcccuuaucugugcuca

SEQ ID NO: 3665976 - RNA, 22 nt, Human
gagcccuucuauacccacccag

SEQ ID NO: 3665977 - RNA, 22 nt, Human
gagcccuugccuccccauuucc

SEQ ID NO: 3665978 - RNA, 20 nt, Human
gagccgagaucgcgccacug

SEQ ID NO: 3665979 - RNA, 13 nt, Human
gagccgcagagaa

SEQ ID NO: 3665980 - RNA, 16 nt, Human
gagccgcccaaggccu

SEQ ID NO: 3665981 - RNA, 19 nt, Human
gugcauuaucuagauacug

SEQ ID NO: 3665982 - RNA, 18 nt, Human
gugcauuggauaacacca

SEQ ID NO: 3665983 - RNA, 11 nt, Human
gugcauugugc

SEQ ID NO: 3665984 - RNA, 13 nt, Human
gugcauugugcuu

SEQ ID NO: 3665985 - RNA, 17 nt, Human
gugcauuuaugagcucu

SEQ ID NO: 3665986 - RNA, 19 nt, Human
gugcauuugaggucuguuc

SEQ ID NO: 3665987 - RNA, 20 nt, Human
gugcauuugaggucuguucu

SEQ ID NO: 3665988 - RNA, 21 nt, Human
gugcauuuggugguuucagaa

SEQ ID NO: 3665989 - RNA, 17 nt, Human
gugcauuuucccagaua

SEQ ID NO: 3665990 - RNA, 13 nt, Human
gugcauuuuugua

SEQ ID NO: 3665991 - RNA, 18 nt, Human
gugcauuuuugugaaaug

SEQ ID NO: 3665992 - RNA, 18 nt, Human
gugccaacacucaagaag

SEQ ID NO: 3665993 - RNA, 16 nt, Human
gugccaagcacagugc

SEQ ID NO: 3665994 - RNA, 11 nt, Human
gugccaaggac

SEQ ID NO: 3665995 - RNA, 20 nt, Human
gugccaauauguauuguaaa

SEQ ID NO: 3665996 - RNA, 22 nt, Human
gugccaauggaaccuccuuucu

SEQ ID NO: 3665997 - RNA, 12 nt, Human
gugccacccugg

SEQ ID NO: 3665998 - RNA, 15 nt, Human
gugccacccugggcu

SEQ ID NO: 3665999 - RNA, 22 nt, Human
gugccacccugggcucuguggg

SEQ ID NO: 3666000 - RNA, 18 nt, Human
gugccacugcccgagcug

SEQ ID NO: 3666001 - RNA, 19 nt, Human
gugccacugcccgagcugg

SEQ ID NO: 3666002 - RNA, 20 nt, Human
gugccacugcccgagcuggu

SEQ ID NO: 3666003 - RNA, 22 nt, Human
gugccacugcccgagcuggugc

SEQ ID NO: 3666004 - RNA, 15 nt, Human
gugccacuuaaugua

SEQ ID NO: 3666005 - RNA, 23 nt, Human
gugccacuuuacccaccuagaac

SEQ ID NO: 3666006 - RNA, 16 nt, Human
gugccagagaacccag

SEQ ID NO: 3666007 - RNA, 16 nt, Human
gugccagagccugggg

SEQ ID NO: 3666008 - RNA, 17 nt, Human
gugccagagccuggggc

SEQ ID NO: 3666009 - RNA, 20 nt, Human
gugccagaggaauccuggca

SEQ ID NO: 3666010 - RNA, 14 nt, Human
gugccagagguggg

SEQ ID NO: 3666011 - RNA, 17 nt, Human
gugccagaggugggcag

SEQ ID NO: 3666012 - RNA, 19 nt, Human
gugccagaggugggcaggu

SEQ ID NO: 3666013 - RNA, 22 nt, Human
gugccagaggugggcagguggu

SEQ ID NO: 3666014 - RNA, 19 nt, Human
gugccagcaaagccccaug

SEQ ID NO: 3666015 - RNA, 16 nt, Human
gugccagcaacugaau

SEQ ID NO: 3666016 - RNA, 22 nt, Human
gugccagccgugaugcucaggc

SEQ ID NO: 3666017 - RNA, 19 nt, Human
gugccaggaaacucuugcu

SEQ ID NO: 3666018 - RNA, 13 nt, Human
gugccaggaccag

SEQ ID NO: 3666019 - RNA, 21 nt, Human
gugccaggauggaaugauggg

SEQ ID NO: 3666020 - RNA, 19 nt, Human
gugccaggcccggggcugg

SEQ ID NO: 3666021 - RNA, 16 nt, Human
gugccagguccuugcc

SEQ ID NO: 3666022 - RNA, 20 nt, Human
gugccagguuuuuggucuga

SEQ ID NO: 3666023 - RNA, 18 nt, Human
gugccaguauuuuaaaau

SEQ ID NO: 3666024 - RNA, 19 nt, Human
gugccagucgcgcugccug

SEQ ID NO: 3666025 - RNA, 18 nt, Human
gugccauagucacauggc

SEQ ID NO: 3666026 - RNA, 16 nt, Human
gugccaucauugcugu

SEQ ID NO: 3666027 - RNA, 12 nt, Human
gugccaugucug

SEQ ID NO: 3666028 - RNA, 17 nt, Human
gugccauuuugcauuuu

SEQ ID NO: 3666029 - RNA, 19 nt, Human
gugcccaagccagaggcug

SEQ ID NO: 3666030 - RNA, 21 nt, Human
gugcucagggggcgccugugg

SEQ ID NO: 3666031 - RNA, 19 nt, Human
gugcucaguuguagaaugu

SEQ ID NO: 3666032 - RNA, 22 nt, Human
gugcucaguuguagaauguauu

SEQ ID NO: 3666033 - RNA, 22 nt, Human
gugcucaucagaaacaauuucu

SEQ ID NO: 3666034 - RNA, 13 nt, Human
gugcucauuuaag

SEQ ID NO: 3666035 - RNA, 13 nt, Human
gugcuccaggcag

SEQ ID NO: 3666036 - RNA, 16 nt, Human
gugcuccccucugaaa

SEQ ID NO: 3666037 - RNA, 17 nt, Human
gugcuccgugccuccac

SEQ ID NO: 3666038 - RNA, 18 nt, Human
gugcuccgugccuccacc

SEQ ID NO: 3666039 - RNA, 15 nt, Human
gugcucucaccagcu

SEQ ID NO: 3666040 - RNA, 15 nt, Human
gugcucuccaagccc

SEQ ID NO: 3666041 - RNA, 20 nt, Human
gugcucucugccacuggaag

SEQ ID NO: 3666042 - RNA, 16 nt, Human
gugcucugaucaucca

SEQ ID NO: 3666043 - RNA, 15 nt, Human
gugcucuuuguuuug

SEQ ID NO: 3666044 - RNA, 16 nt, Human
gugcucuuuguuuugu

SEQ ID NO: 3666045 - RNA, 14 nt, Human
gugcucuuuucucc

SEQ ID NO: 3666046 - RNA, 22 nt, Human
gugcugaacaaaaaauaaaaau

SEQ ID NO: 3666047 - RNA, 21 nt, Human
gugcugaagcuuauuaaugcu

SEQ ID NO: 3666048 - RNA, 19 nt, Human
gugcugaaugguuuucaaa

SEQ ID NO: 3666049 - RNA, 17 nt, Human
gugcugacagcugcucc

SEQ ID NO: 3666050 - RNA, 16 nt, Human
gugcugacccuccugu

SEQ ID NO: 3666051 - RNA, 18 nt, Human
gugcugacggccagggag

SEQ ID NO: 3666052 - RNA, 20 nt, Human
gugcugaguagaugcgcagc

SEQ ID NO: 3666053 - RNA, 20 nt, Human
gugcugaucgugcuaaauuu

SEQ ID NO: 3666054 - RNA, 22 nt, Human
gugcugaucgugcuaaauuuuc

SEQ ID NO: 3666055 - RNA, 14 nt, Human
gugcugcagcaccg

SEQ ID NO: 3666056 - RNA, 18 nt, Human
gugcugcagcucccuggc

SEQ ID NO: 3666057 - RNA, 22 nt, Human
gugcugccauccagguucagcu

SEQ ID NO: 3666058 - RNA, 19 nt, Human
gugcugcccgucuucagcc

SEQ ID NO: 3666059 - RNA, 16 nt, Human
gugcugcccugaagaa

SEQ ID NO: 3666060 - RNA, 12 nt, Human
gugcugcccugc

SEQ ID NO: 3666061 - RNA, 14 nt, Human
gugcugcccugccc

SEQ ID NO: 3666062 - RNA, 18 nt, Human
gugcugcccugcccaccu

SEQ ID NO: 3666063 - RNA, 18 nt, Human
gugcugccgcgcagugug

SEQ ID NO: 3666064 - RNA, 15 nt, Human
gugcugcuacccucc

SEQ ID NO: 3666065 - RNA, 21 nt, Human
gugcugcuacccucccugcug

SEQ ID NO: 3666066 - RNA, 14 nt, Human
gugcugcugcugcu

SEQ ID NO: 3666067 - RNA, 16 nt, Human
gugcugcugugugcuu

SEQ ID NO: 3666068 - RNA, 18 nt, Human
gugcuggaauucuaacaa

SEQ ID NO: 3666069 - RNA, 16 nt, Human
gugcuggaggugggag

SEQ ID NO: 3666070 - RNA, 17 nt, Human
gugcuggaggugggagc

SEQ ID NO: 3666071 - RNA, 18 nt, Human
gugcuggagguuggaucu

SEQ ID NO: 3666072 - RNA, 15 nt, Human
gugcuggcaaccacu

SEQ ID NO: 3666073 - RNA, 14 nt, Human
gugcuggcucacag

SEQ ID NO: 3666074 - RNA, 20 nt, Human
gugcuggcucacaguacagc

SEQ ID NO: 3666075 - RNA, 15 nt, Human
gugcuggcugcccag

SEQ ID NO: 3666076 - RNA, 20 nt, Human
gugcugggaaccucagggua

SEQ ID NO: 3666077 - RNA, 19 nt, Human
gugcugggacugagccagu

SEQ ID NO: 3666078 - RNA, 22 nt, Human
gugcugggacugagccaguccc

SEQ ID NO: 3666079 - RNA, 16 nt, Human
gugcugggagcuccac

SEQ ID NO: 3666080 - RNA, 19 nt, Human
gugcugggaggagggagag

SEQ ID NO: 3666081 - RNA, 23 nt, Human
gugcugggaggagggagagggag

SEQ ID NO: 3666082 - RNA, 15 nt, Human
gugcugggagggaua

SEQ ID NO: 3666083 - RNA, 21 nt, Human
gugcugggauuacaagcguga

SEQ ID NO: 3666084 - RNA, 20 nt, Human
gugcugggauuacaggcgug

SEQ ID NO: 3666085 - RNA, 20 nt, Human
gugcugggauuacaggugug

SEQ ID NO: 3666086 - RNA, 13 nt, Human
gugcugggcagcc

SEQ ID NO: 3666087 - RNA, 14 nt, Human
gugcugggcagccc

SEQ ID NO: 3666088 - RNA, 15 nt, Human
gugcugggcagcccg

SEQ ID NO: 3666089 - RNA, 15 nt, Human
gugcuggggccuggu

SEQ ID NO: 3666090 - RNA, 19 nt, Human
gugcuggggccugguuccc

SEQ ID NO: 3666091 - RNA, 19 nt, Human
gugcugguguaugugugaa

SEQ ID NO: 3666092 - RNA, 13 nt, Human
gugcugguguccu

SEQ ID NO: 3666093 - RNA, 15 nt, Human
gugcuguauaaaauc

SEQ ID NO: 3666094 - RNA, 20 nt, Human
gugcugucugaucugugcuu

SEQ ID NO: 3666095 - RNA, 18 nt, Human
gugcugugaccauuuaua

SEQ ID NO: 3666096 - RNA, 14 nt, Human
gugcugugagggag

SEQ ID NO: 3666097 - RNA, 15 nt, Human
gugcugugagggagg

SEQ ID NO: 3666098 - RNA, 13 nt, Human
gugcuguggaagc

SEQ ID NO: 3666099 - RNA, 14 nt, Human
gugcuguggaagca

SEQ ID NO: 3666100 - RNA, 17 nt, Human
gugcuguggccugggca

SEQ ID NO: 3666101 - RNA, 15 nt, Human
gugcugugguuccug

SEQ ID NO: 3666102 - RNA, 15 nt, Human
gugcuguguaaaguu

SEQ ID NO: 3666103 - RNA, 16 nt, Human
gugcuguguaaaguua

SEQ ID NO: 3666104 - RNA, 11 nt, Human
gugcugugugu

SEQ ID NO: 3666105 - RNA, 15 nt, Human
gugcuguuguuauga

SEQ ID NO: 3666106 - RNA, 17 nt, Human
gugcuguuguuaugaug

SEQ ID NO: 3666107 - RNA, 22 nt, Human
gugcuguuguuaugaugugcuu

SEQ ID NO: 3666108 - RNA, 15 nt, Human
gugcuguuucaaagu

SEQ ID NO: 3666109 - RNA, 13 nt, Human
gugcuguuucccg

SEQ ID NO: 3666110 - RNA, 21 nt, Human
gugcuguuuuguuauauaauu

SEQ ID NO: 3666111 - RNA, 21 nt, Human
gugcuuaucccauagccagga

SEQ ID NO: 3666112 - RNA, 16 nt, Human
gugcuuaugguaccag

SEQ ID NO: 3666113 - RNA, 18 nt, Human
gugcuuauguaugaggua

SEQ ID NO: 3666114 - RNA, 21 nt, Human
gugcuuauugauauucuaaga

SEQ ID NO: 3666115 - RNA, 15 nt, Human
gugcuucagccugag

SEQ ID NO: 3666116 - RNA, 16 nt, Human
gugcuuccaaggcaga

SEQ ID NO: 3666117 - RNA, 14 nt, Human
gugcuucgggcccu

SEQ ID NO: 3666118 - RNA, 21 nt, Human
gugcuucuaauauuuauugcu

SEQ ID NO: 3666119 - RNA, 21 nt, Human
gugcuucuaguucugccagga

SEQ ID NO: 3666120 - RNA, 16 nt, Human
gugcuucuccccagaa

SEQ ID NO: 3666121 - RNA, 21 nt, Human
gugcuucuccccagaauucac

SEQ ID NO: 3666122 - RNA, 21 nt, Human
gugcuugaaggcccugcugag

SEQ ID NO: 3666123 - RNA, 12 nt, Human
gugcuuggagga

SEQ ID NO: 3666124 - RNA, 13 nt, Human
gugcuuggcccag

SEQ ID NO: 3666125 - RNA, 16 nt, Human
gugcuuggcccaggag

SEQ ID NO: 3666126 - RNA, 20 nt, Human
gugcuuguuuuauaaaauuu

SEQ ID NO: 3666127 - RNA, 14 nt, Human
gugcuuuaaagaua

SEQ ID NO: 3666128 - RNA, 12 nt, Human
gugcuuuaagug

SEQ ID NO: 3666129 - RNA, 17 nt, Human
gugcuuuaugcugaaac

SEQ ID NO: 3666130 - RNA, 13 nt, Human
gugcuuuccagcu

SEQ ID NO: 3666131 - RNA, 16 nt, Human
gugcuuuccagcucac

SEQ ID NO: 3666132 - RNA, 22 nt, Human
gugcuuuccguggcacugcaua

SEQ ID NO: 3666133 - RNA, 19 nt, Human
gugcuuuccuuuuuuaaaa

SEQ ID NO: 3666134 - RNA, 20 nt, Human
gugcuuucuauuguacagaa

SEQ ID NO: 3666135 - RNA, 19 nt, Human
gugcuuuuauagaggcuag

SEQ ID NO: 3666136 - RNA, 19 nt, Human
gugcuuuuccuauuuguuu

SEQ ID NO: 3666137 - RNA, 23 nt, Human
gugcuuuuggcggggaggaggaa

SEQ ID NO: 3666138 - RNA, 18 nt, Human
guggaaaaauagccugcc

SEQ ID NO: 3666139 - RNA, 14 nt, Human
guggaaaaauauuu

SEQ ID NO: 3666140 - RNA, 19 nt, Human
guggaaaaaugagagaagg

SEQ ID NO: 3666141 - RNA, 17 nt, Human
guggaaauuaagaagaa

SEQ ID NO: 3666142 - RNA, 19 nt, Human
guggaaauuaagaagaaac

SEQ ID NO: 3666143 - RNA, 24 nt, Human
guggaaccucugucucauccuccu

SEQ ID NO: 3666144 - RNA, 22 nt, Human
guggaacguuuuuccuguucuu

SEQ ID NO: 3666145 - RNA, 14 nt, Human
guggaacugcugcc

SEQ ID NO: 3666146 - RNA, 15 nt, Human
guggaacugcugcca

SEQ ID NO: 3666147 - RNA, 17 nt, Human
guggaagagggcugcaa

SEQ ID NO: 3666148 - RNA, 15 nt, Human
guggaagaggggaca

SEQ ID NO: 3666149 - RNA, 20 nt, Human
guggaagaggggacaggucc

SEQ ID NO: 3666150 - RNA, 12 nt, Human
guggaagcaacc

SEQ ID NO: 3666151 - RNA, 13 nt, Human
guggaagcaacca

SEQ ID NO: 3666152 - RNA, 13 nt, Human
guggaagcccucc

SEQ ID NO: 3666153 - RNA, 19 nt, Human
guggaaguaguggagcccc

SEQ ID NO: 3666154 - RNA, 14 nt, Human
guggaagugugggu

SEQ ID NO: 3666155 - RNA, 19 nt, Human
guggaagugugggucugug

SEQ ID NO: 3666156 - RNA, 15 nt, Human
guggaauuucuuguu

SEQ ID NO: 3666157 - RNA, 24 nt, Human
guggacacagcucuucuccaggcu

SEQ ID NO: 3666158 - RNA, 15 nt, Human
guggacaccaggagu

SEQ ID NO: 3666159 - RNA, 13 nt, Human
guggacaccugcc

SEQ ID NO: 3666160 - RNA, 16 nt, Human
guggacaguccuggga

SEQ ID NO: 3666161 - RNA, 17 nt, Human
guggacauggcuguuca

SEQ ID NO: 3666162 - RNA, 13 nt, Human
guggaccaggaca

SEQ ID NO: 3666163 - RNA, 16 nt, Human
guggaccauggagugg

SEQ ID NO: 3666164 - RNA, 21 nt, Human
guggaccauggaguggcagcc

SEQ ID NO: 3666165 - RNA, 19 nt, Human
guggacccugaaaugugug

SEQ ID NO: 3666166 - RNA, 18 nt, Human
guggaccuuaggccuucc

SEQ ID NO: 3666167 - RNA, 13 nt, Human
guggaccuuccug

SEQ ID NO: 3666168 - RNA, 18 nt, Human
guggaccuuuuaaagugu

SEQ ID NO: 3666169 - RNA, 21 nt, Human
guggaccuuuuaaaguguuuc

SEQ ID NO: 3666170 - RNA, 15 nt, Human
guggacuaaaagaua

SEQ ID NO: 3666171 - RNA, 17 nt, Human
guggacucugcacaugu

SEQ ID NO: 3666172 - RNA, 20 nt, Human
guggacugaccuuguaaaag

SEQ ID NO: 3666173 - RNA, 15 nt, Human
guggacuggccccug

SEQ ID NO: 3666174 - RNA, 16 nt, Human
guggacuguucccuga

SEQ ID NO: 3666175 - RNA, 16 nt, Human
gugacccccagcuccg

SEQ ID NO: 3666176 - RNA, 15 nt, Human
gugaccccuccuggg

SEQ ID NO: 3666177 - RNA, 17 nt, Human
gugaccccuccuggggc

SEQ ID NO: 3666178 - RNA, 20 nt, Human
gugaccccuuuucagcuucu

SEQ ID NO: 3666179 - RNA, 22 nt, Human
gugaccccuuuucagcuucugc

SEQ ID NO: 3666180 - RNA, 16 nt, Human
gugacccgaccuggcc

SEQ ID NO: 3666181 - RNA, 21 nt, Human
gugacccucugaaugguccag

SEQ ID NO: 3666182 - RNA, 19 nt, Human
gugaccggacuuuucugca

SEQ ID NO: 3666183 - RNA, 18 nt, Human
gugaccuauaccuguguu

SEQ ID NO: 3666184 - RNA, 19 nt, Human
gugaccuccggccaggugc

SEQ ID NO: 3666185 - RNA, 13 nt, Human
gugaccucugccu

SEQ ID NO: 3666186 - RNA, 14 nt, Human
gugaccucugccug

SEQ ID NO: 3666187 - RNA, 23 nt, Human
gugaccugaggauuuaagggaug

SEQ ID NO: 3666188 - RNA, 12 nt, Human
gugaccugcuga

SEQ ID NO: 3666189 - RNA, 23 nt, Human
gugaccuguggggauuucuccca

SEQ ID NO: 3666190 - RNA, 22 nt, Human
gugaccuuaguguuucugugca

SEQ ID NO: 3666191 - RNA, 15 nt, Human
gugaccuucugggaa

SEQ ID NO: 3666192 - RNA, 16 nt, Human
gugacggcccucaucu

SEQ ID NO: 3666193 - RNA, 13 nt, Human
gugacggucccac

SEQ ID NO: 3666194 - RNA, 22 nt, Human
gugacggucccacacuggugac

SEQ ID NO: 3666195 - RNA, 24 nt, Human
gugacgguuccuacacaggacagg

SEQ ID NO: 3666196 - RNA, 16 nt, Human
gugacgucuggguggc

SEQ ID NO: 3666197 - RNA, 19 nt, Human
gugacgucuggguggcccu

SEQ ID NO: 3666198 - RNA, 15 nt, Human
gugacuaauuguaua

SEQ ID NO: 3666199 - RNA, 21 nt, Human
gugacuaauuguauaacaggu

SEQ ID NO: 3666200 - RNA, 11 nt, Human
gugacuagugc

SEQ ID NO: 3666201 - RNA, 17 nt, Human
gugacuagugcugaagc

SEQ ID NO: 3666202 - RNA, 18 nt, Human
gugacuagugcugaagcu

SEQ ID NO: 3666203 - RNA, 23 nt, Human
gugugaaccaccacacccagccc

SEQ ID NO: 3666204 - RNA, 13 nt, Human
gugugaagguccu

SEQ ID NO: 3666205 - RNA, 13 nt, Human
gugugaaguuaga

SEQ ID NO: 3666206 - RNA, 17 nt, Human
gugugaaguuagaauuc

SEQ ID NO: 3666207 - RNA, 14 nt, Human
gugugaaugaacac

SEQ ID NO: 3666208 - RNA, 11 nt, Human
gugugaaugug

SEQ ID NO: 3666209 - RNA, 15 nt, Human
gugugaaugugggca

SEQ ID NO: 3666210 - RNA, 23 nt, Human
gugugaaugugggcacuggccca

SEQ ID NO: 3666211 - RNA, 22 nt, Human
gugugacaaggauugcuacugu

SEQ ID NO: 3666212 - RNA, 22 nt, Human
gugugacaauucuguuuuuaau

SEQ ID NO: 3666213 - RNA, 23 nt, Human
gugugacagggccaguggggccu

SEQ ID NO: 3666214 - RNA, 15 nt, Human
gugugacaucagugg

SEQ ID NO: 3666215 - RNA, 12 nt, Human
gugugaccccuc

SEQ ID NO: 3666216 - RNA, 16 nt, Human
gugugaccccuccugg

SEQ ID NO: 3666217 - RNA, 18 nt, Human
gugugaccccuccugggg

SEQ ID NO: 3666218 - RNA, 15 nt, Human
gugugaccugagggc

SEQ ID NO: 3666219 - RNA, 17 nt, Human
gugugacuacuccccca

SEQ ID NO: 3666220 - RNA, 13 nt, Human
gugugagcaguga

SEQ ID NO: 3666221 - RNA, 18 nt, Human
gugugaggagcugcuggc

SEQ ID NO: 3666222 - RNA, 17 nt, Human
gugugaguaagagcugg

SEQ ID NO: 3666223 - RNA, 13 nt, Human
gugugagucacca

SEQ ID NO: 3666224 - RNA, 20 nt, Human
gugugagucaccaagcccag

SEQ ID NO: 3666225 - RNA, 11 nt, Human
gugugagugug

SEQ ID NO: 3666226 - RNA, 18 nt, Human
gugugauaaaucagucaa

SEQ ID NO: 3666227 - RNA, 19 nt, Human
gugugauccaguuuuucau

SEQ ID NO: 3666228 - RNA, 17 nt, Human
gugugaucccaagugcc

SEQ ID NO: 3666229 - RNA, 21 nt, Human
gugugaucuuaauauauuuga

SEQ ID NO: 3666230 - RNA, 22 nt, Human
gugugaucuuaauauauuugaa

SEQ ID NO: 3666231 - RNA, 21 nt, Human
gugugauugggaauaaauaug

SEQ ID NO: 3666232 - RNA, 16 nt, Human
gugugcaacagacaag

SEQ ID NO: 3666233 - RNA, 17 nt, Human
gugugcaaggcagccgu

SEQ ID NO: 3666234 - RNA, 20 nt, Human
gugugcacaaauauuuauuu

SEQ ID NO: 3666235 - RNA, 15 nt, Human
gugugcacgaguggg

SEQ ID NO: 3666236 - RNA, 19 nt, Human
gugugcacgcgugugcagg

SEQ ID NO: 3666237 - RNA, 23 nt, Human
gugugcacuaaggggcccggcca

SEQ ID NO: 3666238 - RNA, 13 nt, Human
gugugcagugaag

SEQ ID NO: 3666239 - RNA, 16 nt, Human
gugugcauauuguaca

SEQ ID NO: 3666240 - RNA, 13 nt, Human
gugugcccagcuu

SEQ ID NO: 3666241 - RNA, 18 nt, Human
gugugccccccauccugg

SEQ ID NO: 3666242 - RNA, 20 nt, Human
gugugccccccauccuggcc

SEQ ID NO: 3666243 - RNA, 16 nt, Human
gugugcccccuucaag

SEQ ID NO: 3666244 - RNA, 16 nt, Human
gugugcccucugggcu

SEQ ID NO: 3666245 - RNA, 13 nt, Human
gugugccucuagc

SEQ ID NO: 3666246 - RNA, 23 nt, Human
gugugccucuagcugaauugagc

SEQ ID NO: 3666247 - RNA, 16 nt, Human
gugugcgcucugugga

SEQ ID NO: 3666248 - RNA, 17 nt, Human
gugugcucaggagcccu

SEQ ID NO: 3666249 - RNA, 18 nt, Human
gugugcucaggagcccug

SEQ ID NO: 3666250 - RNA, 15 nt, Human
gugugcucuccauuc

SEQ ID NO: 3666251 - RNA, 21 nt, Human
gugugcucuccauucugcucc

SEQ ID NO: 3666252 - RNA, 15 nt, Human
gugugcucugcuuca

SEQ ID NO: 3666253 - RNA, 16 nt, Human
gugugcugagguguua

SEQ ID NO: 3666254 - RNA, 11 nt, Human
gugugcuggga

SEQ ID NO: 3666255 - RNA, 18 nt, Human
gugugcuuuaugcugaaa

SEQ ID NO: 3666256 - RNA, 20 nt, Human
guguggaaauuaagaagaaa

SEQ ID NO: 3666257 - RNA, 21 nt, Human
guguggaaguuauuaacuuua

SEQ ID NO: 3666258 - RNA, 22 nt, Human
guguggagaagccacaggccug

SEQ ID NO: 3666259 - RNA, 21 nt, Human
guguggagaagcggcuggcag

SEQ ID NO: 3666260 - RNA, 18 nt, Human
guguggagagggaaugug

SEQ ID NO: 3666261 - RNA, 21 nt, Human
guguggagucauuucugauuu

SEQ ID NO: 3666262 - RNA, 14 nt, Human
guguggcagcaggc

SEQ ID NO: 3666263 - RNA, 12 nt, Human
guguggcagugg

SEQ ID NO: 3666264 - RNA, 19 nt, Human
guguggccacuucugucca

SEQ ID NO: 3666265 - RNA, 15 nt, Human
guguggcuccccucu

SEQ ID NO: 3666266 - RNA, 15 nt, Human
guguggcugaggagg

SEQ ID NO: 3666267 - RNA, 13 nt, Human
gugugggaaggga

SEQ ID NO: 3666268 - RNA, 19 nt, Human
gugugggggccccgucuca

SEQ ID NO: 3666269 - RNA, 18 nt, Human
gugugggguucugcuggg

SEQ ID NO: 3666270 - RNA, 15 nt, Human
gugugguacagagaa

SEQ ID NO: 3666271 - RNA, 16 nt, Human
gugugguacagagaag

SEQ ID NO: 3666272 - RNA, 23 nt, Human
gugugguggguucuuuggaagga

SEQ ID NO: 3666273 - RNA, 13 nt, Human
guguguaauuguu

SEQ ID NO: 3666274 - RNA, 16 nt, Human
guguguaauuguuccu

SEQ ID NO: 3666275 - RNA, 15 nt, Human
guguguacucugucc

SEQ ID NO: 3666276 - RNA, 14 nt, Human
guguguagccaagg

SEQ ID NO: 3666277 - RNA, 21 nt, Human
guguguaugacuaaagagaga

SEQ ID NO: 3666278 - RNA, 18 nt, Human
guguguaugggugugugu

SEQ ID NO: 3666279 - RNA, 13 nt, Human
guguguauguggg

SEQ ID NO: 3666280 - RNA, 14 nt, Human
guguguauucuuaa

SEQ ID NO: 3666281 - RNA, 15 nt, Human
guguguauuguuccc

SEQ ID NO: 3666282 - RNA, 18 nt, Human
guguguccaaaacugccu

SEQ ID NO: 3666283 - RNA, 18 nt, Human
gugugucccaggcaggga

SEQ ID NO: 3666284 - RNA, 16 nt, Human
gugugucccccucugu

SEQ ID NO: 3666285 - RNA, 17 nt, Human
gugugucccccucuguc

SEQ ID NO: 3666286 - RNA, 18 nt, Human
gugugucccccucugucc

SEQ ID NO: 3666287 - RNA, 11 nt, Human
guguguccuug

SEQ ID NO: 3666288 - RNA, 19 nt, Human
gugugucuccugcaugcag

SEQ ID NO: 3666289 - RNA, 15 nt, Human
gugugucugcucagu

SEQ ID NO: 3666290 - RNA, 17 nt, Human
gugugugacaauucugu

SEQ ID NO: 3666291 - RNA, 11 nt, Human
gugugugcccu

SEQ ID NO: 3666292 - RNA, 21 nt, Human
gugugugcgccuacaggagug

SEQ ID NO: 3666293 - RNA, 10 nt, Human
gugugugcgu

SEQ ID NO: 3666294 - RNA, 21 nt, Human
guguguggguggauauaaaua

SEQ ID NO: 3666295 - RNA, 19 nt, Human
guguguguaugcgugugug

SEQ ID NO: 3666296 - RNA, 15 nt, Human
gugugugugucagcu

SEQ ID NO: 3666297 - RNA, 13 nt, Human
gugugugugugcg

SEQ ID NO: 3666298 - RNA, 13 nt, Human
guguguguguugc

SEQ ID NO: 3666299 - RNA, 16 nt, Human
guguguuaagcucugc

SEQ ID NO: 3666300 - RNA, 13 nt, Human
guguguuacaaug

SEQ ID NO: 3666301 - RNA, 19 nt, Human
guguguuacaauguaacuu

SEQ ID NO: 3666302 - RNA, 18 nt, Human
guguguuccaacugcccc

SEQ ID NO: 3666303 - RNA, 16 nt, Human
guguguuccaaguuuc

SEQ ID NO: 3666304 - RNA, 12 nt, Human
guguguuccugg

SEQ ID NO: 3666305 - RNA, 14 nt, Human
guguguugauacug

SEQ ID NO: 3666306 - RNA, 21 nt, Human
guguguugauacuguugcacg

SEQ ID NO: 3666307 - RNA, 15 nt, Human
guguguugccacagg

SEQ ID NO: 3666308 - RNA, 14 nt, Human
guguguugucucuu

SEQ ID NO: 3666309 - RNA, 16 nt, Human
guguguugucucuuga

SEQ ID NO: 3666310 - RNA, 16 nt, Human
guguguugucuugaaa

SEQ ID NO: 3666311 - RNA, 18 nt, Human
guguguuucauccuuccc

SEQ ID NO: 3666312 - RNA, 12 nt, Human
guguguuuuaaa

SEQ ID NO: 3666313 - RNA, 13 nt, Human
guguguuuuaaaa

SEQ ID NO: 3666314 - RNA, 14 nt, Human
guguguuuuucuau

SEQ ID NO: 3666315 - RNA, 21 nt, Human
guguguuuuugggaugucuua

SEQ ID NO: 3666316 - RNA, 19 nt, Human
guguuaaaugaaauuguaa

SEQ ID NO: 3666317 - RNA, 21 nt, Human
guguuaaaugugaugaauacu

SEQ ID NO: 3666318 - RNA, 14 nt, Human
guguuaagcucugc

SEQ ID NO: 3666319 - RNA, 18 nt, Human
guguuaauuuaaguuuug

SEQ ID NO: 3666320 - RNA, 12 nt, Human
guguuaauuuau

SEQ ID NO: 3666321 - RNA, 14 nt, Human
guucuuguuggugc

SEQ ID NO: 3666322 - RNA, 14 nt, Human
guucuuuaaacugu

SEQ ID NO: 3666323 - RNA, 14 nt, Human
guucuuuaauuuau

SEQ ID NO: 3666324 - RNA, 17 nt, Human
guucuuuaggagauuuu

SEQ ID NO: 3666325 - RNA, 22 nt, Human
guucuuuauauacaauaaugga

SEQ ID NO: 3666326 - RNA, 13 nt, Human
guucuuuccaaag

SEQ ID NO: 3666327 - RNA, 18 nt, Human
guucuuucuuccucugcu

SEQ ID NO: 3666328 - RNA, 23 nt, Human
guucuuugagggacugccucugc

SEQ ID NO: 3666329 - RNA, 14 nt, Human
guucuuuggauucu

SEQ ID NO: 3666330 - RNA, 15 nt, Human
guucuuugggccaga

SEQ ID NO: 3666331 - RNA, 19 nt, Human
guucuuuuugaaguauuua

SEQ ID NO: 3666332 - RNA, 14 nt, Human
guugaaaagccaug

SEQ ID NO: 3666333 - RNA, 22 nt, Human
guugaaaagccauguuuaagau

SEQ ID NO: 3666334 - RNA, 22 nt, Human
guugaaaauaaaguguauauuu

SEQ ID NO: 3666335 - RNA, 19 nt, Human
guugaaaauuauuuuaaac

SEQ ID NO: 3666336 - RNA, 18 nt, Human
guugaaaauucaaaaagu

SEQ ID NO: 3666337 - RNA, 18 nt, Human
guugaacaaaauaaauug

SEQ ID NO: 3666338 - RNA, 18 nt, Human
guugaaccaaaccucccu

SEQ ID NO: 3666339 - RNA, 15 nt, Human
guugaaccuauuucu

SEQ ID NO: 3666340 - RNA, 16 nt, Human
guugaaccuauuucuc

SEQ ID NO: 3666341 - RNA, 18 nt, Human
guugaagagguuuuaaag

SEQ ID NO: 3666342 - RNA, 18 nt, Human
guugaagcaaaucgaaug

SEQ ID NO: 3666343 - RNA, 13 nt, Human
guugaagccuuug

SEQ ID NO: 3666344 - RNA, 14 nt, Human
guugaagccuuugu

SEQ ID NO: 3666345 - RNA, 22 nt, Human
guugaagggagguggcaagagu

SEQ ID NO: 3666346 - RNA, 19 nt, Human
guugaagucaugcuccccu

SEQ ID NO: 3666347 - RNA, 18 nt, Human
guugaauaaaagugcaca

SEQ ID NO: 3666348 - RNA, 13 nt, Human
guugaauacuuuu

SEQ ID NO: 3666349 - RNA, 13 nt, Human
guugaauaugauu

SEQ ID NO: 3666350 - RNA, 15 nt, Human
guugaaugacaacag

SEQ ID NO: 3666351 - RNA, 16 nt, Human
guugaauggccugccu

SEQ ID NO: 3666352 - RNA, 21 nt, Human
guugaauuuuuuuuaacauuc

SEQ ID NO: 3666353 - RNA, 15 nt, Human
guugacacggccaug

SEQ ID NO: 3666354 - RNA, 20 nt, Human
guugacacggccaugaccac

SEQ ID NO: 3666355 - RNA, 22 nt, Human
guugacauaccuuuuauuuuuu

SEQ ID NO: 3666356 - RNA, 19 nt, Human
guugacauauuuaauguuu

SEQ ID NO: 3666357 - RNA, 22 nt, Human
guugacauauuuaauguuuuaa

SEQ ID NO: 3666358 - RNA, 23 nt, Human
guugacauauuuaauguuuuaaa

SEQ ID NO: 3666359 - RNA, 19 nt, Human
guugacaucacuggcaugg

SEQ ID NO: 3666360 - RNA, 19 nt, Human
guugacauucugaaugcuu

SEQ ID NO: 3666361 - RNA, 16 nt, Human
guugaccaugucuaug

SEQ ID NO: 3666362 - RNA, 19 nt, Human
guugacucuaguacuguga

SEQ ID NO: 3666363 - RNA, 22 nt, Human
guugacuuccaggcacgguuug

SEQ ID NO: 3666364 - RNA, 19 nt, Human
guugagaaucccaaauuug

SEQ ID NO: 3666365 - RNA, 15 nt, Human
guugagagugugacc

SEQ ID NO: 3666366 - RNA, 18 nt, Human
guugagccagcagacauu

SEQ ID NO: 3666367 - RNA, 22 nt, Human
guugagccagcagacauuguca

SEQ ID NO: 3666368 - RNA, 23 nt, Human
guugagccaggccugggucugug

SEQ ID NO: 3666369 - RNA, 14 nt, Human
guugagccuuuucc

SEQ ID NO: 3666370 - RNA, 24 nt, Human
guugagcucucggaacugcaugcu

SEQ ID NO: 3666371 - RNA, 16 nt, Human
guugaggaacuguaca

SEQ ID NO: 3666372 - RNA, 18 nt, Human
guugaggggcuccuggaa

SEQ ID NO: 3666373 - RNA, 23 nt, Human
guugagguggucugaauguucug

SEQ ID NO: 3666374 - RNA, 21 nt, Human
guugaguucagguagcugccc

SEQ ID NO: 3666375 - RNA, 22 nt, Human
guugaguucagguagcugcccc

SEQ ID NO: 3666376 - RNA, 15 nt, Human
guugauaaaaauacu

SEQ ID NO: 3666377 - RNA, 12 nt, Human
guugauaaaucc

SEQ ID NO: 3666378 - RNA, 18 nt, Human
guugauaaauuccacugg

SEQ ID NO: 3666379 - RNA, 21 nt, Human
guugauaaauuccacuggacu

SEQ ID NO: 3666380 - RNA, 12 nt, Human
guugauacuguu

SEQ ID NO: 3666381 - RNA, 15 nt, Human
guugauacuguugca

SEQ ID NO: 3666382 - RNA, 16 nt, Human
guugauacuguugcac

SEQ ID NO: 3666383 - RNA, 17 nt, Human
guugauacuguugcacg

SEQ ID NO: 3666384 - RNA, 18 nt, Human
guugauacuguugcacgu

SEQ ID NO: 3666385 - RNA, 21 nt, Human
guugauacuguugcacgugug

SEQ ID NO: 3666386 - RNA, 23 nt, Human
guugauagcaagugaauuuuucu

SEQ ID NO: 3666387 - RNA, 22 nt, Human
guugauagcacagacccugccc

SEQ ID NO: 3666388 - RNA, 15 nt, Human
guugaucuggaaccc

SEQ ID NO: 3666389 - RNA, 22 nt, Human
guugaugaucuuugcagacagg

SEQ ID NO: 3666390 - RNA, 21 nt, Human
guugaugccugugaacugaac

SEQ ID NO: 3666391 - RNA, 17 nt, Human
guugaugggaugauuga

SEQ ID NO: 3666392 - RNA, 22 nt, Human
guugaugggaugauugaagaaa

SEQ ID NO: 3666393 - RNA, 17 nt, Human
guugauggguucuaauu

SEQ ID NO: 3666394 - RNA, 21 nt, Human
guugauggugguauguuuuca

SEQ ID NO: 3666395 - RNA, 17 nt, Human
guugauguacugauuga

SEQ ID NO: 3666396 - RNA, 14 nt, Human
guugauuaaagaug

SEQ ID NO: 3666397 - RNA, 19 nt, Human
guugauuaauuucugccau

SEQ ID NO: 3666398 - RNA, 23 nt, Human
guugauucgguauccccccaucu

SEQ ID NO: 3666399 - RNA, 17 nt, Human
guugauugcuaaaugua

SEQ ID NO: 3666400 - RNA, 20 nt, Human
guugauugcuaaauguaaca

SEQ ID NO: 3666401 - RNA, 23 nt, Human
guugauuucagcaccuacagugu

SEQ ID NO: 3666402 - RNA, 23 nt, Human
guugauuuuuuuuuuuuuuuccu

SEQ ID NO: 3666403 - RNA, 13 nt, Human
guugcaaccacug

SEQ ID NO: 3666404 - RNA, 14 nt, Human
guugcaaccacugc

SEQ ID NO: 3666405 - RNA, 14 nt, Human
guugcaagauguga

SEQ ID NO: 3666406 - RNA, 16 nt, Human
guugcaagaugugaau

SEQ ID NO: 3666407 - RNA, 17 nt, Human
guugcaagaugugaauu

SEQ ID NO: 3666408 - RNA, 14 nt, Human
guugcaagccccuc

SEQ ID NO: 3666409 - RNA, 15 nt, Human
guugcaaggccgcug

SEQ ID NO: 3666410 - RNA, 17 nt, Human
guugcaaguacugcugu

SEQ ID NO: 3666411 - RNA, 15 nt, Human
guugcacacuuuggu

SEQ ID NO: 3666412 - RNA, 14 nt, Human
guugcacccagccc

SEQ ID NO: 3666413 - RNA, 16 nt, Human
guugcacccagcccug

SEQ ID NO: 3666414 - RNA, 23 nt, Human
guugcacccagcccuggucucag

SEQ ID NO: 3666415 - RNA, 21 nt, Human
guugcacguguguuuuucuau

SEQ ID NO: 3666416 - RNA, 14 nt, Human
guugcacuuuguag

SEQ ID NO: 3666417 - RNA, 23 nt, Human
guugcagcccugcugcugccugc

SEQ ID NO: 3666418 - RNA, 20 nt, Human
guugcagcuguuuuguugac

SEQ ID NO: 3666419 - RNA, 17 nt, Human
guugcagucacucuagu

SEQ ID NO: 3666420 - RNA, 16 nt, Human
guugcagugagcugag

SEQ ID NO: 3666421 - RNA, 16 nt, Human
guugcauagcaguaua

SEQ ID NO: 3666422 - RNA, 22 nt, Human
guggagaagccacaggccugag

SEQ ID NO: 3666423 - RNA, 19 nt, Human
guggagaagccauugucuu

SEQ ID NO: 3666424 - RNA, 13 nt, Human
guggagacagggc

SEQ ID NO: 3666425 - RNA, 14 nt, Human
guggagacugcucc

SEQ ID NO: 3666426 - RNA, 22 nt, Human
guggagacugcuccugagcccc

SEQ ID NO: 3666427 - RNA, 18 nt, Human
guggagacugcuucccau

SEQ ID NO: 3666428 - RNA, 19 nt, Human
guggagacuggggggcuug

SEQ ID NO: 3666429 - RNA, 14 nt, Human
guggagagcccggc

SEQ ID NO: 3666430 - RNA, 16 nt, Human
guggagagcuggugcc

SEQ ID NO: 3666431 - RNA, 14 nt, Human
guggagagggaaug

SEQ ID NO: 3666432 - RNA, 15 nt, Human
guggagagggaaugu

SEQ ID NO: 3666433 - RNA, 18 nt, Human
guggagaugucuucguac

SEQ ID NO: 3666434 - RNA, 21 nt, Human
guggagcacaaaagccucuca

SEQ ID NO: 3666435 - RNA, 17 nt, Human
guggagcaugggccugg

SEQ ID NO: 3666436 - RNA, 12 nt, Human
guggagccaggc

SEQ ID NO: 3666437 - RNA, 15 nt, Human
guggagccagggagc

SEQ ID NO: 3666438 - RNA, 23 nt, Human
guggagcccgcacccccacccuu

SEQ ID NO: 3666439 - RNA, 19 nt, Human
guggagccugacagccaga

SEQ ID NO: 3666440 - RNA, 21 nt, Human
guggagccuuuuaacugugca

SEQ ID NO: 3666441 - RNA, 16 nt, Human
guggagcucagccccg

SEQ ID NO: 3666442 - RNA, 23 nt, Human
guggagcuuaagccacugccucu

SEQ ID NO: 3666443 - RNA, 13 nt, Human
guggaggaaggau

SEQ ID NO: 3666444 - RNA, 16 nt, Human
guggaggaaggauugu

SEQ ID NO: 3666445 - RNA, 23 nt, Human
guggaggaaugcucccccauccu

SEQ ID NO: 3666446 - RNA, 15 nt, Human
guggaggagcagugc

SEQ ID NO: 3666447 - RNA, 20 nt, Human
guggaggagcucaggacacu

SEQ ID NO: 3666448 - RNA, 23 nt, Human
guggaggagcucaggacacuaau

SEQ ID NO: 3666449 - RNA, 17 nt, Human
guggaggaggaaggcaa

SEQ ID NO: 3666450 - RNA, 14 nt, Human
guggaggaggccug

SEQ ID NO: 3666451 - RNA, 14 nt, Human
guggaggagguugg

SEQ ID NO: 3666452 - RNA, 15 nt, Human
guggaggagguuggg

SEQ ID NO: 3666453 - RNA, 17 nt, Human
guggaggaguccaggcc

SEQ ID NO: 3666454 - RNA, 14 nt, Human
guggaggcacuuua

SEQ ID NO: 3666455 - RNA, 12 nt, Human
guggaggcugcu

SEQ ID NO: 3666456 - RNA, 12 nt, Human
guggagggaggc

SEQ ID NO: 3666457 - RNA, 15 nt, Human
guggagggaggcccc

SEQ ID NO: 3666458 - RNA, 16 nt, Human
guggagggcguggagg

SEQ ID NO: 3666459 - RNA, 19 nt, Human
guggagggguaggggcugg

SEQ ID NO: 3666460 - RNA, 16 nt, Human
guggagggguguggca

SEQ ID NO: 3666461 - RNA, 18 nt, Human
guggaggugucaggcugc

SEQ ID NO: 3666462 - RNA, 22 nt, Human
guggagucagccucgcaggccu

SEQ ID NO: 3666463 - RNA, 17 nt, Human
guggagucugccaccca

SEQ ID NO: 3666464 - RNA, 17 nt, Human
guggagugcaguggugc

SEQ ID NO: 3666465 - RNA, 21 nt, Human
gauauauaggcuauuuucuaa

SEQ ID NO: 3666466 - RNA, 14 nt, Human
gauauaucugaaaa

SEQ ID NO: 3666467 - RNA, 18 nt, Human
gauauaugcucugcaugu

SEQ ID NO: 3666468 - RNA, 14 nt, Human
gauauauuaaaaau

SEQ ID NO: 3666469 - RNA, 20 nt, Human
gauauauuaaaaauauaaaa

SEQ ID NO: 3666470 - RNA, 23 nt, Human
gauauauuuaaaaacaaaaggca

SEQ ID NO: 3666471 - RNA, 23 nt, Human
gauauauuuuacaauuuuuuauc

SEQ ID NO: 3666472 - RNA, 20 nt, Human
gauauauuuuauuuuuagaa

SEQ ID NO: 3666473 - RNA, 15 nt, Human
gauauauuuucuuuc

SEQ ID NO: 3666474 - RNA, 17 nt, Human
gauauauuuuuaagaua

SEQ ID NO: 3666475 - RNA, 13 nt, Human
gauaucaaaggca

SEQ ID NO: 3666476 - RNA, 13 nt, Human
gauaucagaauuu

SEQ ID NO: 3666477 - RNA, 17 nt, Human
gauaucagaauuugugu

SEQ ID NO: 3666478 - RNA, 19 nt, Human
gauauccauucuuucugau

SEQ ID NO: 3666479 - RNA, 13 nt, Human
gauaucucaucuc

SEQ ID NO: 3666480 - RNA, 14 nt, Human
gauaucucaucucu

SEQ ID NO: 3666481 - RNA, 16 nt, Human
gauaucugagggagga

SEQ ID NO: 3666482 - RNA, 15 nt, Human
gauaucuugaaauga

SEQ ID NO: 3666483 - RNA, 16 nt, Human
gauaucuuuucuuuag

SEQ ID NO: 3666484 - RNA, 14 nt, Human
gauaugaaaaauau

SEQ ID NO: 3666485 - RNA, 15 nt, Human
gauaugaaaaaugag

SEQ ID NO: 3666486 - RNA, 14 nt, Human
gauaugauuggcaa

SEQ ID NO: 3666487 - RNA, 16 nt, Human
gauaugccugcucuuu

SEQ ID NO: 3666488 - RNA, 14 nt, Human
gauaugcuuaguaa

SEQ ID NO: 3666489 - RNA, 17 nt, Human
gauauggcagaagacac

SEQ ID NO: 3666490 - RNA, 16 nt, Human
gauaugggacauuuuu

SEQ ID NO: 3666491 - RNA, 22 nt, Human
gauaugggacugagccuggccc

SEQ ID NO: 3666492 - RNA, 20 nt, Human
gauauguauguugugaauua

SEQ ID NO: 3666493 - RNA, 15 nt, Human
gauaugugaaacaau

SEQ ID NO: 3666494 - RNA, 23 nt, Human
gauauguuuuauuucauugguua

SEQ ID NO: 3666495 - RNA, 22 nt, Human
gauauuaauuuaucagauugcu

SEQ ID NO: 3666496 - RNA, 16 nt, Human
gauauuacuuuaucac

SEQ ID NO: 3666497 - RNA, 19 nt, Human
gauauuacuuuaucacuuu

SEQ ID NO: 3666498 - RNA, 22 nt, Human
gauauuacuuuaucacuuuuug

SEQ ID NO: 3666499 - RNA, 23 nt, Human
gauauuauucaccauguaaaaca

SEQ ID NO: 3666500 - RNA, 12 nt, Human
gauauuccauag

SEQ ID NO: 3666501 - RNA, 19 nt, Human
gauauuccaugaauguauc

SEQ ID NO: 3666502 - RNA, 18 nt, Human
gauauucuuuguuaauuu

SEQ ID NO: 3666503 - RNA, 20 nt, Human
gauauugaggccaagaauau

SEQ ID NO: 3666504 - RNA, 15 nt, Human
gauauuggaacuugc

SEQ ID NO: 3666505 - RNA, 22 nt, Human
gauauuguucaaacaauaucau

SEQ ID NO: 3666506 - RNA, 13 nt, Human
gauauuuaagaaa

SEQ ID NO: 3666507 - RNA, 15 nt, Human
gauauuuaagaaaau

SEQ ID NO: 3666508 - RNA, 16 nt, Human
gauauuuaagaaaaua

SEQ ID NO: 3666509 - RNA, 19 nt, Human
gauauuuauggggggagaa

SEQ ID NO: 3666510 - RNA, 17 nt, Human
gauauuuccaucauuaa

SEQ ID NO: 3666511 - RNA, 22 nt, Human
gauauuucccuccccuggggac

SEQ ID NO: 3666512 - RNA, 17 nt, Human
gauauuucucuaguagu

SEQ ID NO: 3666513 - RNA, 22 nt, Human
gauauuugucaugcugggauuu

SEQ ID NO: 3666514 - RNA, 19 nt, Human
gauauuuucaaauuguauc

SEQ ID NO: 3666515 - RNA, 19 nt, Human
gauauuuucaacgcagccc

SEQ ID NO: 3666516 - RNA, 21 nt, Human
gauauuuucaacgcagcccug

SEQ ID NO: 3666517 - RNA, 22 nt, Human
gauauuuucaacgcagcccugc

SEQ ID NO: 3666518 - RNA, 23 nt, Human
gauauuuucaacgcagcccugcu

SEQ ID NO: 3666519 - RNA, 18 nt, Human
gauauuuuguaaaaugua

SEQ ID NO: 3666520 - RNA, 17 nt, Human
gauauuuuuaucuuuau

SEQ ID NO: 3666521 - RNA, 22 nt, Human
gauauuuuucauaaacaaguuc

SEQ ID NO: 3666522 - RNA, 21 nt, Human
gauauuuuuucagaaauaugu

SEQ ID NO: 3666523 - RNA, 15 nt, Human
gauauuuuuuucuuu

SEQ ID NO: 3666524 - RNA, 17 nt, Human
gauauuuuuuucuuuuc

SEQ ID NO: 3666525 - RNA, 20 nt, Human
gaucaaaaaggcuuauaaaa

SEQ ID NO: 3666526 - RNA, 22 nt, Human
gaucaaaauaaaaagugacaca

SEQ ID NO: 3666527 - RNA, 12 nt, Human
gaucaaagauga

SEQ ID NO: 3666528 - RNA, 17 nt, Human
gaucaaaggcacacagc

SEQ ID NO: 3666529 - RNA, 16 nt, Human
gaucaaauguuuaauc

SEQ ID NO: 3666530 - RNA, 16 nt, Human
gaucaaauucuacaac

SEQ ID NO: 3666531 - RNA, 14 nt, Human
gaucaacaucuuuu

SEQ ID NO: 3666532 - RNA, 22 nt, Human
gaucaaccccuucgcuccugug

SEQ ID NO: 3666533 - RNA, 23 nt, Human
gaucaaccccuucgcuccugugu

SEQ ID NO: 3666534 - RNA, 14 nt, Human
gaucaagaaagugu

SEQ ID NO: 3666535 - RNA, 16 nt, Human
gaucaaggagaggagg

SEQ ID NO: 3666536 - RNA, 13 nt, Human
gaucaaggccuua

SEQ ID NO: 3666537 - RNA, 22 nt, Human
gaucaaggccuuauuggaaagc

SEQ ID NO: 3666538 - RNA, 23 nt, Human
gaucaaggccuuauuggaaagca

SEQ ID NO: 3666539 - RNA, 14 nt, Human
gaucaauccuuuau

SEQ ID NO: 3666540 - RNA, 15 nt, Human
gaucaauccuuuauu

SEQ ID NO: 3666541 - RNA, 14 nt, Human
gaucaaugacagag

SEQ ID NO: 3666542 - RNA, 23 nt, Human
gaucaauggcgcagugccucugg

SEQ ID NO: 3666543 - RNA, 18 nt, Human
gaucacaacgugcauugu

SEQ ID NO: 3666544 - RNA, 20 nt, Human
gaucacaacgugcauugugc

SEQ ID NO: 3666545 - RNA, 23 nt, Human
gaucacaacgugcauugugcuuc

SEQ ID NO: 3666546 - RNA, 13 nt, Human
gaucacaagaugg

SEQ ID NO: 3666547 - RNA, 15 nt, Human
gaucacacuauuuua

SEQ ID NO: 3666548 - RNA, 19 nt, Human
gaucacagagacauuccuc

SEQ ID NO: 3666549 - RNA, 14 nt, Human
gaucacagccucug

SEQ ID NO: 3666550 - RNA, 17 nt, Human
gaucacagcugcuuucu

SEQ ID NO: 3666551 - RNA, 18 nt, Human
gaucacauaacagaaugc

SEQ ID NO: 3666552 - RNA, 14 nt, Human
gaucaccagaauaa

SEQ ID NO: 3666553 - RNA, 15 nt, Human
gaucaccagcccggc

SEQ ID NO: 3666554 - RNA, 22 nt, Human
gaucaccagcccggccugcucc

SEQ ID NO: 3666555 - RNA, 14 nt, Human
gaucacgccacugc

SEQ ID NO: 3666556 - RNA, 18 nt, Human
gaucacgccacugcacua

SEQ ID NO: 3666557 - RNA, 23 nt, Human
gaucacgccacugcacuccagcc

SEQ ID NO: 3666558 - RNA, 24 nt, Human
gaucacgccacugcacuccagccu

SEQ ID NO: 3666559 - RNA, 14 nt, Human
gaucacgccuggcu

SEQ ID NO: 3666560 - RNA, 18 nt, Human
gaucacggcucacugcag

SEQ ID NO: 3666561 - RNA, 18 nt, Human
gaucacuagccugucauc

SEQ ID NO: 3666562 - RNA, 18 nt, Human
gaucacuaugcauuuuaa

SEQ ID NO: 3666563 - RNA, 20 nt, Human
gaucacugaaauaaaagcua

SEQ ID NO: 3666564 - RNA, 13 nt, Human
gaucacugaauuu

SEQ ID NO: 3666565 - RNA, 17 nt, Human
gaucacugaauuuauaa

SEQ ID NO: 3666566 - RNA, 15 nt, Human
gaucacugccacacu

SEQ ID NO: 3666567 - RNA, 13 nt, Human
gaucacugccaga

SEQ ID NO: 3666568 - RNA, 14 nt, Human
gaucacuguuuaga

SEQ ID NO: 3666569 - RNA, 18 nt, Human
gaucacuguuuagauuug

SEQ ID NO: 3666570 - RNA, 18 nt, Human
gaucagaaaaauggagca

SEQ ID NO: 3666571 - RNA, 22 nt, Human
gaucagaccuuggaucagauga

SEQ ID NO: 3666572 - RNA, 14 nt, Human
gaucagagcagcag

SEQ ID NO: 3666573 - RNA, 17 nt, Human
gaucagagcaggaccuc

SEQ ID NO: 3666574 - RNA, 20 nt, Human
gaucagaguaauccaagcaa

SEQ ID NO: 3666575 - RNA, 22 nt, Human
gaucagaugcuccaagauucua

SEQ ID NO: 3666576 - RNA, 15 nt, Human
gaucagauugcaugu

SEQ ID NO: 3666577 - RNA, 14 nt, Human
gaucagccagaagc

SEQ ID NO: 3666578 - RNA, 18 nt, Human
gaucagccagugaccaac

SEQ ID NO: 3666579 - RNA, 22 nt, Human
gaucagccccacccuggccuag

SEQ ID NO: 3666580 - RNA, 23 nt, Human
gaucagccccacccuggccuaga

SEQ ID NO: 3666581 - RNA, 14 nt, Human
guggcccuguccug

SEQ ID NO: 3666582 - RNA, 19 nt, Human
guggcccuguccugccaug

SEQ ID NO: 3666583 - RNA, 17 nt, Human
guggcccuuccuggaca

SEQ ID NO: 3666584 - RNA, 18 nt, Human
guggcccuuccuggacag

SEQ ID NO: 3666585 - RNA, 21 nt, Human
guggcccuuccuggacagcug

SEQ ID NO: 3666586 - RNA, 11 nt, Human
guggcccuugc

SEQ ID NO: 3666587 - RNA, 17 nt, Human
guggccgcccaaggccc

SEQ ID NO: 3666588 - RNA, 22 nt, Human
guggccuaaccugccgagaguc

SEQ ID NO: 3666589 - RNA, 15 nt, Human
guggccucccaacuc

SEQ ID NO: 3666590 - RNA, 21 nt, Human
guggccucccaacucacccca

SEQ ID NO: 3666591 - RNA, 22 nt, Human
guggccucgggacaccugcccu

SEQ ID NO: 3666592 - RNA, 24 nt, Human
guggccucugccccgucucaugag

SEQ ID NO: 3666593 - RNA, 17 nt, Human
guggccucuugagcagu

SEQ ID NO: 3666594 - RNA, 20 nt, Human
guggccucuugagcaguggc

SEQ ID NO: 3666595 - RNA, 20 nt, Human
guggccuggccaggagcucu

SEQ ID NO: 3666596 - RNA, 21 nt, Human
guggccuggccaggagcucuu

SEQ ID NO: 3666597 - RNA, 17 nt, Human
guggccuguggcugucg

SEQ ID NO: 3666598 - RNA, 18 nt, Human
guggccuguggcugucgg

SEQ ID NO: 3666599 - RNA, 17 nt, Human
guggccugugucccaug

SEQ ID NO: 3666600 - RNA, 19 nt, Human
guggccugugucccaugac

SEQ ID NO: 3666601 - RNA, 15 nt, Human
guggccuuccccagc

SEQ ID NO: 3666602 - RNA, 21 nt, Human
guggccuuccccagcaugcac

SEQ ID NO: 3666603 - RNA, 17 nt, Human
guggccuuccccagccu

SEQ ID NO: 3666604 - RNA, 20 nt, Human
guggcgaaaucccugcucac

SEQ ID NO: 3666605 - RNA, 15 nt, Human
guggcggccccagca

SEQ ID NO: 3666606 - RNA, 14 nt, Human
guggcgggcaccug

SEQ ID NO: 3666607 - RNA, 15 nt, Human
guggcgggcgccugu

SEQ ID NO: 3666608 - RNA, 22 nt, Human
guggcuaaaugccuaauaaaca

SEQ ID NO: 3666609 - RNA, 18 nt, Human
gaucauagauuucugauu

SEQ ID NO: 3666610 - RNA, 13 nt, Human
gaucauaguuuua

SEQ ID NO: 3666611 - RNA, 16 nt, Human
gaucauccacugugcc

SEQ ID NO: 3666612 - RNA, 19 nt, Human
gaucaucgccagaggugcu

SEQ ID NO: 3666613 - RNA, 13 nt, Human
gaucaugcauugu

SEQ ID NO: 3666614 - RNA, 14 nt, Human
gaucaugcauuguu

SEQ ID NO: 3666615 - RNA, 15 nt, Human
gaucaugcauuguug

SEQ ID NO: 3666616 - RNA, 15 nt, Human
gaucaugguguaaua

SEQ ID NO: 3666617 - RNA, 13 nt, Human
gaucauguacuuu

SEQ ID NO: 3666618 - RNA, 15 nt, Human
gaucauguacuuuuu

SEQ ID NO: 3666619 - RNA, 15 nt, Human
gaucauguguggaag

SEQ ID NO: 3666620 - RNA, 21 nt, Human
gaucauguguggaaguuauua

SEQ ID NO: 3666621 - RNA, 15 nt, Human
gaucauguuguuaaa

SEQ ID NO: 3666622 - RNA, 22 nt, Human
gaucauuuauuuuaagcacucu

SEQ ID NO: 3666623 - RNA, 21 nt, Human
gaucauuugcccuuaaggaca

SEQ ID NO: 3666624 - RNA, 16 nt, Human
gauccaaaagaagccc

SEQ ID NO: 3666625 - RNA, 12 nt, Human
gauccaaagacu

SEQ ID NO: 3666626 - RNA, 19 nt, Human
gauccaacuaaugccuuac

SEQ ID NO: 3666627 - RNA, 17 nt, Human
gauccaagcuaagcacu

SEQ ID NO: 3666628 - RNA, 16 nt, Human
gauccaagcugguccc

SEQ ID NO: 3666629 - RNA, 19 nt, Human
gauccaaguuuacucaacc

SEQ ID NO: 3666630 - RNA, 14 nt, Human
gauccacacacaga

SEQ ID NO: 3666631 - RNA, 19 nt, Human
gauccacccaccucagccu

SEQ ID NO: 3666632 - RNA, 12 nt, Human
gauccacccgcc

SEQ ID NO: 3666633 - RNA, 13 nt, Human
gauccaggagcuc

SEQ ID NO: 3666634 - RNA, 21 nt, Human
gauccaggccccucccucucc

SEQ ID NO: 3666635 - RNA, 12 nt, Human
gauccagggaca

SEQ ID NO: 3666636 - RNA, 22 nt, Human
gauccagggacagaggccccag

SEQ ID NO: 3666637 - RNA, 19 nt, Human
gauccagggaggcuggucc

SEQ ID NO: 3666638 - RNA, 17 nt, Human
gauccaguauaagacua

SEQ ID NO: 3666639 - RNA, 13 nt, Human
gauccauccagcu

SEQ ID NO: 3666640 - RNA, 17 nt, Human
gauccauguaacugccu

SEQ ID NO: 3666641 - RNA, 16 nt, Human
gauccauguagcagga

SEQ ID NO: 3666642 - RNA, 14 nt, Human
gauccauuucuaau

SEQ ID NO: 3666643 - RNA, 16 nt, Human
gauccauuuuuuauau

SEQ ID NO: 3666644 - RNA, 18 nt, Human
gaucccaacacugccagc

SEQ ID NO: 3666645 - RNA, 15 nt, Human
gaucccaggccccug

SEQ ID NO: 3666646 - RNA, 15 nt, Human
gaucccaguagaaaa

SEQ ID NO: 3666647 - RNA, 18 nt, Human
gauccccacgccacagcc

SEQ ID NO: 3666648 - RNA, 12 nt, Human
gaucccccagaa

SEQ ID NO: 3666649 - RNA, 13 nt, Human
gauccccgccugg

SEQ ID NO: 3666650 - RNA, 20 nt, Human
gauccccgccuggccaggag

SEQ ID NO: 3666651 - RNA, 14 nt, Human
gauccccucaggac

SEQ ID NO: 3666652 - RNA, 13 nt, Human
gauccccugagcc

SEQ ID NO: 3666653 - RNA, 14 nt, Human
gauccccugagccc

SEQ ID NO: 3666654 - RNA, 21 nt, Human
gaucccgccucuucuucuuca

SEQ ID NO: 3666655 - RNA, 17 nt, Human
gaucccguuuuccccau

SEQ ID NO: 3666656 - RNA, 15 nt, Human
gaucccuagcuguga

SEQ ID NO: 3666657 - RNA, 19 nt, Human
gaucccuagcugugaccuc

SEQ ID NO: 3666658 - RNA, 16 nt, Human
gaucccucauccucau

SEQ ID NO: 3666659 - RNA, 13 nt, Human
gaucccucccccc

SEQ ID NO: 3666660 - RNA, 19 nt, Human
gaucccugucuuuccuaag

SEQ ID NO: 3666661 - RNA, 14 nt, Human
gaucccuguguugu

SEQ ID NO: 3666662 - RNA, 19 nt, Human
gaucccuguguugucucua

SEQ ID NO: 3666663 - RNA, 24 nt, Human
gaucccuguguugucucuagagca

SEQ ID NO: 3666664 - RNA, 13 nt, Human
gaucccuuccacc

SEQ ID NO: 3666665 - RNA, 19 nt, Human
gaucccuuccaccugcucu

SEQ ID NO: 3666666 - RNA, 22 nt, Human
gaucccuuccaccugcucugcu

SEQ ID NO: 3666667 - RNA, 23 nt, Human
gaucccuuccaccugcucugcug

SEQ ID NO: 3666668 - RNA, 17 nt, Human
gauccgacugcuuugga

SEQ ID NO: 3666669 - RNA, 23 nt, Human
gauccgacuugaauuuucccacu

SEQ ID NO: 3666670 - RNA, 18 nt, Human
gauccuauccuccuaccu

SEQ ID NO: 3666671 - RNA, 18 nt, Human
gauccuauucucaccagg

SEQ ID NO: 3666672 - RNA, 19 nt, Human
gauccuauucucaccagga

SEQ ID NO: 3666673 - RNA, 16 nt, Human
gauccucccaccucag

SEQ ID NO: 3666674 - RNA, 15 nt, Human
gauccuccugcagac

SEQ ID NO: 3666675 - RNA, 16 nt, Human
gauccucucuggggcu

SEQ ID NO: 3666676 - RNA, 22 nt, Human
gauccugagccagauuucacuc

SEQ ID NO: 3666677 - RNA, 13 nt, Human
gauccuggaaauc

SEQ ID NO: 3666678 - RNA, 16 nt, Human
gauccugucuuuaagg

SEQ ID NO: 3666679 - RNA, 19 nt, Human
gauccugucuuuaaggaaa

SEQ ID NO: 3666680 - RNA, 20 nt, Human
gauccugucuuuaaggaaaa

SEQ ID NO: 3666681 - RNA, 23 nt, Human
gauccugugaggagccccaucug

SEQ ID NO: 3666682 - RNA, 22 nt, Human
gauccuuagagguccucuggag

SEQ ID NO: 3666683 - RNA, 17 nt, Human
gaucgaaccguuuugaa

SEQ ID NO: 3666684 - RNA, 13 nt, Human
gaucgcaguuugc

SEQ ID NO: 3666685 - RNA, 17 nt, Human
gaucgccuuccccaccc

SEQ ID NO: 3666686 - RNA, 23 nt, Human
gaucgcgccacuacacuccagcc

SEQ ID NO: 3666687 - RNA, 21 nt, Human
gaucgcggcggagcuggcccc

SEQ ID NO: 3666688 - RNA, 17 nt, Human
gaucggagccuccucuc

SEQ ID NO: 3666689 - RNA, 20 nt, Human
gaucggagccuccucucuca

SEQ ID NO: 3666690 - RNA, 13 nt, Human
gaucggcaggaca

SEQ ID NO: 3666691 - RNA, 22 nt, Human
gaucggccaucaagggaagaac

SEQ ID NO: 3666692 - RNA, 16 nt, Human
gaucgguuaacaaaua

SEQ ID NO: 3666693 - RNA, 20 nt, Human
gaucgucugguuagaaaaca

SEQ ID NO: 3666694 - RNA, 16 nt, Human
gaucgugacgcugaau

SEQ ID NO: 3666695 - RNA, 15 nt, Human
gaucgugcuaaauuu

SEQ ID NO: 3666696 - RNA, 22 nt, Human
gaucgugcuacugcacuccagc

SEQ ID NO: 3666697 - RNA, 16 nt, Human
gaucuaaauaaaaugc

SEQ ID NO: 3666698 - RNA, 18 nt, Human
gaucuaccagcauaaaua

SEQ ID NO: 3666699 - RNA, 17 nt, Human
gaucuaccccuuacuua

SEQ ID NO: 3666700 - RNA, 20 nt, Human
gaucuacuucuguaauugug

SEQ ID NO: 3666701 - RNA, 16 nt, Human
gaucuagaauguguuu

SEQ ID NO: 3666702 - RNA, 21 nt, Human
gaucuagaauguguuuucuga

SEQ ID NO: 3666703 - RNA, 17 nt, Human
gaucuagguuuaacuca

SEQ ID NO: 3666704 - RNA, 22 nt, Human
gaucuagguuuaacucagauca

SEQ ID NO: 3666705 - RNA, 17 nt, Human
gaucuaguucacucucc

SEQ ID NO: 3666706 - RNA, 13 nt, Human
gaucuauaaagcg

SEQ ID NO: 3666707 - RNA, 14 nt, Human
gaucuauuucaugu

SEQ ID NO: 3666708 - RNA, 16 nt, Human
gaucuauuucauguuu

SEQ ID NO: 3666709 - RNA, 20 nt, Human
gaucucaccaggcagccucu

SEQ ID NO: 3666710 - RNA, 23 nt, Human
gaucucaccaggcagccucuggg

SEQ ID NO: 3666711 - RNA, 15 nt, Human
gaucucacucugccc

SEQ ID NO: 3666712 - RNA, 14 nt, Human
gaucucagggaagc

SEQ ID NO: 3666713 - RNA, 21 nt, Human
gaucucauucaguauuaaagg

SEQ ID NO: 3666714 - RNA, 14 nt, Human
gaucuccaaagcuu

SEQ ID NO: 3666715 - RNA, 13 nt, Human
gaucuccaaggac

SEQ ID NO: 3666716 - RNA, 13 nt, Human
gaucucccugccg

SEQ ID NO: 3666717 - RNA, 18 nt, Human
gaucucccugccgccuca

SEQ ID NO: 3666718 - RNA, 14 nt, Human
gaucuccuugcccu

SEQ ID NO: 3666719 - RNA, 14 nt, Human
gaucucgguuugcc

SEQ ID NO: 3666720 - RNA, 20 nt, Human
gaucucgguuugccaaaauu

SEQ ID NO: 3666721 - RNA, 15 nt, Human
gaucucuaacuucac

SEQ ID NO: 3666722 - RNA, 17 nt, Human
gaucucucaggagcaca

SEQ ID NO: 3666723 - RNA, 21 nt, Human
gaucucucaggagcacaggca

SEQ ID NO: 3666724 - RNA, 19 nt, Human
gaucucugaagccacaaau

SEQ ID NO: 3666725 - RNA, 15 nt, Human
gaucucugcagggcc

SEQ ID NO: 3666726 - RNA, 16 nt, Human
gaucucugcagggccg

SEQ ID NO: 3666727 - RNA, 20 nt, Human
gaucucugcagggccgccag

SEQ ID NO: 3666728 - RNA, 14 nt, Human
gaucucuuccuguu

SEQ ID NO: 3666729 - RNA, 16 nt, Human
gaucucuugagccugg

SEQ ID NO: 3666730 - RNA, 17 nt, Human
gaucucuugagccuggg

SEQ ID NO: 3666731 - RNA, 18 nt, Human
gaucucuugagccuggga

SEQ ID NO: 3666732 - RNA, 12 nt, Human
gaucugaacaga

SEQ ID NO: 3666733 - RNA, 21 nt, Human
gaucugacaugauuccuuccu

SEQ ID NO: 3666734 - RNA, 13 nt, Human
gaucugacugcac

SEQ ID NO: 3666735 - RNA, 15 nt, Human
gaucugagucccagg

SEQ ID NO: 3666736 - RNA, 19 nt, Human
gaucugauaggguuuguga

SEQ ID NO: 3666737 - RNA, 23 nt, Human
gaucugauaggguuugugacagg

SEQ ID NO: 3666738 - RNA, 11 nt, Human
gaucugcccau

SEQ ID NO: 3666739 - RNA, 15 nt, Human
gaucugccuaaggac

SEQ ID NO: 3666740 - RNA, 17 nt, Human
gaucugccuaaggacuu

SEQ ID NO: 3666741 - RNA, 18 nt, Human
gaucugccuaaggacuuc

SEQ ID NO: 3666742 - RNA, 23 nt, Human
gaucugccuaaggacuucuuuaa

SEQ ID NO: 3666743 - RNA, 19 nt, Human
gaucugcggaucucagcuu

SEQ ID NO: 3666744 - RNA, 15 nt, Human
gaucugcucagcccu

SEQ ID NO: 3666745 - RNA, 17 nt, Human
gaucugcucagcccugg

SEQ ID NO: 3666746 - RNA, 18 nt, Human
guguaucguaaccagcca

SEQ ID NO: 3666747 - RNA, 15 nt, Human
guguaugacuaaaga

SEQ ID NO: 3666748 - RNA, 17 nt, Human
guguaugcacaugaacu

SEQ ID NO: 3666749 - RNA, 19 nt, Human
guguaugcuacuacaaaaa

SEQ ID NO: 3666750 - RNA, 14 nt, Human
guguaugcugcuuu

SEQ ID NO: 3666751 - RNA, 22 nt, Human
guguauggguguguguuugugu

SEQ ID NO: 3666752 - RNA, 16 nt, Human
guguaugugcgugugu

SEQ ID NO: 3666753 - RNA, 13 nt, Human
guguauguggggg

SEQ ID NO: 3666754 - RNA, 12 nt, Human
guguauguguau

SEQ ID NO: 3666755 - RNA, 15 nt, Human
guucaguguuucugg

SEQ ID NO: 3666756 - RNA, 12 nt, Human
guucaguuacag

SEQ ID NO: 3666757 - RNA, 20 nt, Human
guucaguuccucuuugcaug

SEQ ID NO: 3666758 - RNA, 18 nt, Human
guucaguuucuucugcgc

SEQ ID NO: 3666759 - RNA, 20 nt, Human
guucauaacagugccauugu

SEQ ID NO: 3666760 - RNA, 10 nt, Human
guucauacau

SEQ ID NO: 3666761 - RNA, 14 nt, Human
guucauacauuuga

SEQ ID NO: 3666762 - RNA, 17 nt, Human
guucauaccuaaguacu

SEQ ID NO: 3666763 - RNA, 19 nt, Human
guucauaccuaaguacugu

SEQ ID NO: 3666764 - RNA, 14 nt, Human
guucauagcccagu

SEQ ID NO: 3666765 - RNA, 18 nt, Human
guucauagggucucuuca

SEQ ID NO: 3666766 - RNA, 12 nt, Human
guucaucagugu

SEQ ID NO: 3666767 - RNA, 14 nt, Human
guucaucaguguua

SEQ ID NO: 3666768 - RNA, 16 nt, Human
guucaucaguguuaaa

SEQ ID NO: 3666769 - RNA, 15 nt, Human
guucauccaauccuc

SEQ ID NO: 3666770 - RNA, 18 nt, Human
guucauccaauccucacu

SEQ ID NO: 3666771 - RNA, 16 nt, Human
guucaucccuucucuu

SEQ ID NO: 3666772 - RNA, 18 nt, Human
guucaucccuucucuucc

SEQ ID NO: 3666773 - RNA, 19 nt, Human
guucaucccuucucuucca

SEQ ID NO: 3666774 - RNA, 17 nt, Human
guucauccuauuguuga

SEQ ID NO: 3666775 - RNA, 16 nt, Human
guucaucgauuuucua

SEQ ID NO: 3666776 - RNA, 17 nt, Human
guucaucguauaacaca

SEQ ID NO: 3666777 - RNA, 18 nt, Human
guucaucuugaauuguaa

SEQ ID NO: 3666778 - RNA, 17 nt, Human
guucaugaugcagucuc

SEQ ID NO: 3666779 - RNA, 23 nt, Human
guucaugaugcagucuccucuuu

SEQ ID NO: 3666780 - RNA, 16 nt, Human
guucaugccaccaugg

SEQ ID NO: 3666781 - RNA, 23 nt, Human
guucauggaacgcguugaaauug

SEQ ID NO: 3666782 - RNA, 20 nt, Human
guucaugggggagggggcag

SEQ ID NO: 3666783 - RNA, 15 nt, Human
guucauguagagaaa

SEQ ID NO: 3666784 - RNA, 15 nt, Human
guucauguuugcuuc

SEQ ID NO: 3666785 - RNA, 24 nt, Human
guucauguuugcuucauaaaugaa

SEQ ID NO: 3666786 - RNA, 16 nt, Human
guucauguuuggugca

SEQ ID NO: 3666787 - RNA, 16 nt, Human
guucauuagaaauauu

SEQ ID NO: 3666788 - RNA, 15 nt, Human
guucauuauuggaau

SEQ ID NO: 3666789 - RNA, 22 nt, Human
guucauuauuggaauuaaccug

SEQ ID NO: 3666790 - RNA, 14 nt, Human
guucauucauauua

SEQ ID NO: 3666791 - RNA, 14 nt, Human
guucauuccuccag

SEQ ID NO: 3666792 - RNA, 15 nt, Human
guucauucuucagau

SEQ ID NO: 3666793 - RNA, 19 nt, Human
guucauuguaauguuacug

SEQ ID NO: 3666794 - RNA, 23 nt, Human
guucauuguaauguuacugauca

SEQ ID NO: 3666795 - RNA, 16 nt, Human
guucauuugugugcuc

SEQ ID NO: 3666796 - RNA, 17 nt, Human
guuccaaacaugagguu

SEQ ID NO: 3666797 - RNA, 23 nt, Human
guuccaaacaugagguucucucu

SEQ ID NO: 3666798 - RNA, 14 nt, Human
guuccaaauucagu

SEQ ID NO: 3666799 - RNA, 20 nt, Human
guuccaaauucaguuucaua

SEQ ID NO: 3666800 - RNA, 16 nt, Human
guuccaagacauuguc

SEQ ID NO: 3666801 - RNA, 14 nt, Human
guuccaaggccagg

SEQ ID NO: 3666802 - RNA, 21 nt, Human
guuuuuuuuuuuuuuuuggcu

SEQ ID NO: 3666803 - RNA, 17 nt, Human
uaaaaaaaaaaaaguua

SEQ ID NO: 3666804 - RNA, 15 nt, Human
uaaaaaaaaaaguca

SEQ ID NO: 3666805 - RNA, 21 nt, Human
uaaaaaaaaaaguuacagaaa

SEQ ID NO: 3666806 - RNA, 14 nt, Human
uaaaaaaaaaauug

SEQ ID NO: 3666807 - RNA, 19 nt, Human
uaaaaaaaaagaucuguuu

SEQ ID NO: 3666808 - RNA, 16 nt, Human
uaaaaaaaaaggcaua

SEQ ID NO: 3666809 - RNA, 21 nt, Human
uaaaaaaaaauagaugucuuu

SEQ ID NO: 3666810 - RNA, 13 nt, Human
uaaaaaaaacaaa

SEQ ID NO: 3666811 - RNA, 18 nt, Human
uaaaaaaaacaaaaagaa

SEQ ID NO: 3666812 - RNA, 12 nt, Human
uaaaaaaaagaa

SEQ ID NO: 3666813 - RNA, 14 nt, Human
uaaaaaaagaaaaa

SEQ ID NO: 3666814 - RNA, 15 nt, Human
uaaaaaaagagaauu

SEQ ID NO: 3666815 - RNA, 12 nt, Human
uaaaaaaauuua

SEQ ID NO: 3666816 - RNA, 12 nt, Human
uaaaaaacacug

SEQ ID NO: 3666817 - RNA, 19 nt, Human
uaaaaaacuaaaaacuaga

SEQ ID NO: 3666818 - RNA, 21 nt, Human
uaaaaaacuaucuuuuugcuu

SEQ ID NO: 3666819 - RNA, 15 nt, Human
uaaaaaacuuguaaa

SEQ ID NO: 3666820 - RNA, 12 nt, Human
uaaaaaagauaa

SEQ ID NO: 3666821 - RNA, 13 nt, Human
uaaaaaagauaaa

SEQ ID NO: 3666822 - RNA, 18 nt, Human
uaaaaaagcauacuucua

SEQ ID NO: 3666823 - RNA, 17 nt, Human
uaaaaaagcuuaaaacu

SEQ ID NO: 3666824 - RNA, 18 nt, Human
uaaaaaagcuuaaaacuu

SEQ ID NO: 3666825 - RNA, 12 nt, Human
uaaaaaagucuc

SEQ ID NO: 3666826 - RNA, 21 nt, Human
uaaaaaagucucuauuuaaau

SEQ ID NO: 3666827 - RNA, 20 nt, Human
uaaaaaaguuuaaaauguau

SEQ ID NO: 3666828 - RNA, 17 nt, Human
uaaaaaauaauaauaca

SEQ ID NO: 3666829 - RNA, 17 nt, Human
uaaaaaauggugccuga

SEQ ID NO: 3666830 - RNA, 12 nt, Human
uaaaaaaugguu

SEQ ID NO: 3666831 - RNA, 15 nt, Human
uaaaaaaugugugua

SEQ ID NO: 3666832 - RNA, 23 nt, Human
uaaaaaauguguguauucuuaaa

SEQ ID NO: 3666833 - RNA, 21 nt, Human
uaaaaaauuuaaaaagcccaa

SEQ ID NO: 3666834 - RNA, 14 nt, Human
uaaaaaauuuuaaa

SEQ ID NO: 3666835 - RNA, 15 nt, Human
uaaaaaauuuuguaa

SEQ ID NO: 3666836 - RNA, 17 nt, Human
uaaaaaauuuuguaauu

SEQ ID NO: 3666837 - RNA, 23 nt, Human
uaaaaacaaaaacaucccaagau

SEQ ID NO: 3666838 - RNA, 22 nt, Human
uaaaaacagauuuggaaagacu

SEQ ID NO: 3666839 - RNA, 19 nt, Human
uaaaaacagcauugcuuuc

SEQ ID NO: 3666840 - RNA, 20 nt, Human
uaaaaacagcauugcuuucu

SEQ ID NO: 3666841 - RNA, 15 nt, Human
uaaaaacauaacaua

SEQ ID NO: 3666842 - RNA, 19 nt, Human
uaaaaacauugccuuugaa

SEQ ID NO: 3666843 - RNA, 21 nt, Human
uaaaaacauugccuuugaaug

SEQ ID NO: 3666844 - RNA, 17 nt, Human
uaaaaacccacaaaaau

SEQ ID NO: 3666845 - RNA, 16 nt, Human
uaaaaaccgaauaaau

SEQ ID NO: 3666846 - RNA, 18 nt, Human
uaaaaaccgaauaaaugu

SEQ ID NO: 3666847 - RNA, 20 nt, Human
uaaaaacuaguaguucucuu

SEQ ID NO: 3666848 - RNA, 15 nt, Human
uaaaaacugaaguuc

SEQ ID NO: 3666849 - RNA, 12 nt, Human
uaaaaagaaaaa

SEQ ID NO: 3666850 - RNA, 17 nt, Human
uaaaaagaaaacaaaac

SEQ ID NO: 3666851 - RNA, 13 nt, Human
uaaaaagaaggaa

SEQ ID NO: 3666852 - RNA, 15 nt, Human
uaaaaagaagugcug

SEQ ID NO: 3666853 - RNA, 12 nt, Human
uaaaaagauaau

SEQ ID NO: 3666854 - RNA, 23 nt, Human
uaaaaagauaaucucagugcuuu

SEQ ID NO: 3666855 - RNA, 16 nt, Human
uaaaaagauuagcaag

SEQ ID NO: 3666856 - RNA, 14 nt, Human
uaaaaagcaaaaau

SEQ ID NO: 3666857 - RNA, 17 nt, Human
uaaaaagccagggcugg

SEQ ID NO: 3666858 - RNA, 12 nt, Human
uaaaaagcccaa

SEQ ID NO: 3666859 - RNA, 20 nt, Human
uaaaaagcccaaccucuucc

SEQ ID NO: 3666860 - RNA, 13 nt, Human
uaaaaagcugacc

SEQ ID NO: 3666861 - RNA, 20 nt, Human
uaaaaagcuuccaugauucu

SEQ ID NO: 3666862 - RNA, 17 nt, Human
uaaaaagcuuuugucua

SEQ ID NO: 3666863 - RNA, 15 nt, Human
uaaaaaggaacugca

SEQ ID NO: 3666864 - RNA, 18 nt, Human
uaaaaaggaacugcagca

SEQ ID NO: 3666865 - RNA, 20 nt, Human
uaaaaaggaauccacuccca

SEQ ID NO: 3666866 - RNA, 20 nt, Human
uaaaaaggagaauuuuuccu

SEQ ID NO: 3666867 - RNA, 17 nt, Human
uaaaaaggcuaaaugga

SEQ ID NO: 3666868 - RNA, 20 nt, Human
uaaaaagggcagggcaucuc

SEQ ID NO: 3666869 - RNA, 15 nt, Human
uaaaaaggugaccau

SEQ ID NO: 3666870 - RNA, 13 nt, Human
uaaaaaguauugc

SEQ ID NO: 3666871 - RNA, 22 nt, Human
uaaaaaguccauaccuuauaua

SEQ ID NO: 3666872 - RNA, 17 nt, Human
uaaaaagucuucacucu

SEQ ID NO: 3666873 - RNA, 14 nt, Human
uaaaaagucuuuua

SEQ ID NO: 3666874 - RNA, 16 nt, Human
uaaaaagucuuuuaaa

SEQ ID NO: 3666875 - RNA, 17 nt, Human
uaaaaagugacacagca

SEQ ID NO: 3666876 - RNA, 18 nt, Human
uaaaaagugacacagcag

SEQ ID NO: 3666877 - RNA, 12 nt, Human
uaaaaaguggaa

SEQ ID NO: 3666878 - RNA, 14 nt, Human
uaaaaaguguuuaa

SEQ ID NO: 3666879 - RNA, 17 nt, Human
uaaaaaguguuuaaaug

SEQ ID NO: 3666880 - RNA, 12 nt, Human
uaaaaaguuaaa

SEQ ID NO: 3666881 - RNA, 15 nt, Human
uaaaaaguuguucaa

SEQ ID NO: 3666882 - RNA, 19 nt, Human
uaaaaauaaaaaacacugg

SEQ ID NO: 3666883 - RNA, 21 nt, Human
uaaaaauaaaaaacacuggga

SEQ ID NO: 3666884 - RNA, 21 nt, Human
uaaaaauaaaaaagaucccaa

SEQ ID NO: 3666885 - RNA, 12 nt, Human
uaaaaauaaagc

SEQ ID NO: 3666886 - RNA, 17 nt, Human
uaaaaauaaauagaaaa

SEQ ID NO: 3666887 - RNA, 14 nt, Human
uaaaaauaaauccc

SEQ ID NO: 3666888 - RNA, 19 nt, Human
uaaaaauaaaucccaugga

SEQ ID NO: 3666889 - RNA, 14 nt, Human
uaaaaauaaauuca

SEQ ID NO: 3666890 - RNA, 17 nt, Human
uaaaaauaaauuugguu

SEQ ID NO: 3666891 - RNA, 11 nt, Human
uaaaaauaacc

SEQ ID NO: 3666892 - RNA, 14 nt, Human
uaaaaauacaaaca

SEQ ID NO: 3666893 - RNA, 14 nt, Human
uaaaaauauaaaac

SEQ ID NO: 3666894 - RNA, 13 nt, Human
uaaaaauauauau

SEQ ID NO: 3666895 - RNA, 22 nt, Human
uaaaaauaugcuaauucucaga

SEQ ID NO: 3666896 - RNA, 23 nt, Human
uaaaaauauggaacuucuaauau

SEQ ID NO: 3666897 - RNA, 19 nt, Human
uaaaaauauuguuucugca

SEQ ID NO: 3666898 - RNA, 15 nt, Human
uaaaaaucacacugu

SEQ ID NO: 3666899 - RNA, 11 nt, Human
uaaaaaucaua

SEQ ID NO: 3666900 - RNA, 17 nt, Human
uaaaaaucauaaacugu

SEQ ID NO: 3666901 - RNA, 18 nt, Human
gauucccaagcucugcuc

SEQ ID NO: 3666902 - RNA, 22 nt, Human
gauucccaagcucugcuccucu

SEQ ID NO: 3666903 - RNA, 22 nt, Human
gauucccaccaaggucuucagc

SEQ ID NO: 3666904 - RNA, 13 nt, Human
gauucccaggagu

SEQ ID NO: 3666905 - RNA, 17 nt, Human
gauucccaggaugagca

SEQ ID NO: 3666906 - RNA, 14 nt, Human
gauucccucuccca

SEQ ID NO: 3666907 - RNA, 18 nt, Human
gauucccucucccaggcc

SEQ ID NO: 3666908 - RNA, 20 nt, Human
gauucccucucccaggcccc

SEQ ID NO: 3666909 - RNA, 18 nt, Human
gauuccggauccuaagca

SEQ ID NO: 3666910 - RNA, 22 nt, Human
gauuccuaagccacuugaaaug

SEQ ID NO: 3666911 - RNA, 12 nt, Human
gauuccugaccc

SEQ ID NO: 3666912 - RNA, 16 nt, Human
gauuccugacccaggc

SEQ ID NO: 3666913 - RNA, 19 nt, Human
gauuccugacccaggccgc

SEQ ID NO: 3666914 - RNA, 13 nt, Human
gauuccuucccau

SEQ ID NO: 3666915 - RNA, 15 nt, Human
gauuccuuccuguuc

SEQ ID NO: 3666916 - RNA, 14 nt, Human
gauuccuuuaacaa

SEQ ID NO: 3666917 - RNA, 21 nt, Human
gauuccuuugaagaggaaaau

SEQ ID NO: 3666918 - RNA, 10 nt, Human
gauuccuuuu

SEQ ID NO: 3666919 - RNA, 16 nt, Human
gauuccuuuucuuguu

SEQ ID NO: 3666920 - RNA, 12 nt, Human
gauucuaaaaug

SEQ ID NO: 3666921 - RNA, 12 nt, Human
gauucuaaagau

SEQ ID NO: 3666922 - RNA, 14 nt, Human
gauucuaaagauuc

SEQ ID NO: 3666923 - RNA, 16 nt, Human
gauucuaaagauucua

SEQ ID NO: 3666924 - RNA, 15 nt, Human
gauucuaaugucuuc

SEQ ID NO: 3666925 - RNA, 22 nt, Human
gauucuacuuuaagcacuacau

SEQ ID NO: 3666926 - RNA, 23 nt, Human
gauucuacuuuaagcacuacaua

SEQ ID NO: 3666927 - RNA, 19 nt, Human
gauucuagaucagaugcuc

SEQ ID NO: 3666928 - RNA, 23 nt, Human
gauucuagaucagaugcuccaag

SEQ ID NO: 3666929 - RNA, 15 nt, Human
gauucuauaguucua

SEQ ID NO: 3666930 - RNA, 18 nt, Human
gauucuauaguucuagac

SEQ ID NO: 3666931 - RNA, 18 nt, Human
gauucucaaaggagcgag

SEQ ID NO: 3666932 - RNA, 23 nt, Human
gauucucagggucucugcugccg

SEQ ID NO: 3666933 - RNA, 14 nt, Human
gauucuccugccuc

SEQ ID NO: 3666934 - RNA, 15 nt, Human
gauucuccugccuca

SEQ ID NO: 3666935 - RNA, 20 nt, Human
gauucuccugccucagccuc

SEQ ID NO: 3666936 - RNA, 18 nt, Human
gauucuccuucagcccuc

SEQ ID NO: 3666937 - RNA, 11 nt, Human
gauucucucca

SEQ ID NO: 3666938 - RNA, 22 nt, Human
gauucucuggcuguaaggcucu

SEQ ID NO: 3666939 - RNA, 23 nt, Human
gauucucuggcuguaaggcucua

SEQ ID NO: 3666940 - RNA, 22 nt, Human
gauucucugugucuaagauucu

SEQ ID NO: 3666941 - RNA, 16 nt, Human
gauucucuugccucaa

SEQ ID NO: 3666942 - RNA, 23 nt, Human
gauucugaccuuaaaugcaacca

SEQ ID NO: 3666943 - RNA, 14 nt, Human
gauucugagagcug

SEQ ID NO: 3666944 - RNA, 12 nt, Human
gauucugccuuu

SEQ ID NO: 3666945 - RNA, 17 nt, Human
gauucugccuuugccag

SEQ ID NO: 3666946 - RNA, 19 nt, Human
gauucugcuggccucugcg

SEQ ID NO: 3666947 - RNA, 19 nt, Human
gauucuguguguuuucaua

SEQ ID NO: 3666948 - RNA, 16 nt, Human
gauucuuaaaguugaa

SEQ ID NO: 3666949 - RNA, 17 nt, Human
gauucuuaaaguugaau

SEQ ID NO: 3666950 - RNA, 21 nt, Human
gauucuuaaaguugaauuuau

SEQ ID NO: 3666951 - RNA, 17 nt, Human
gauucuuccucccuccc

SEQ ID NO: 3666952 - RNA, 13 nt, Human
gauucuucugcuu

SEQ ID NO: 3666953 - RNA, 21 nt, Human
gauucuucugcuucagccucc

SEQ ID NO: 3666954 - RNA, 15 nt, Human
gauucuuguauuuau

SEQ ID NO: 3666955 - RNA, 21 nt, Human
gauucuuguuuugcuuccccu

SEQ ID NO: 3666956 - RNA, 20 nt, Human
gauucuuuccugaggcuggg

SEQ ID NO: 3666957 - RNA, 22 nt, Human
gauucuuuccugaggcugggcu

SEQ ID NO: 3666958 - RNA, 23 nt, Human
gauucuuuuguauguaacaauug

SEQ ID NO: 3666959 - RNA, 14 nt, Human
gauucuuuuucuga

SEQ ID NO: 3666960 - RNA, 14 nt, Human
gauugaaaacuuuu

SEQ ID NO: 3666961 - RNA, 21 nt, Human
gauugaaaacuuuucucagau

SEQ ID NO: 3666962 - RNA, 16 nt, Human
gauugacagcuuugcu

SEQ ID NO: 3666963 - RNA, 12 nt, Human
gauugaccugcu

SEQ ID NO: 3666964 - RNA, 23 nt, Human
gauugacgggacuguugguauug

SEQ ID NO: 3666965 - RNA, 16 nt, Human
gauugagaagaggaca

SEQ ID NO: 3666966 - RNA, 18 nt, Human
gauugagaaggagagaaa

SEQ ID NO: 3666967 - RNA, 13 nt, Human
guucucaaugaaa

SEQ ID NO: 3666968 - RNA, 16 nt, Human
guucucaaugugaaaa

SEQ ID NO: 3666969 - RNA, 14 nt, Human
guucucaauuccaa

SEQ ID NO: 3666970 - RNA, 21 nt, Human
guucucacacuggucugcugu

SEQ ID NO: 3666971 - RNA, 14 nt, Human
guucucagcucccc

SEQ ID NO: 3666972 - RNA, 15 nt, Human
guucucagcuccccc

SEQ ID NO: 3666973 - RNA, 17 nt, Human
guucucagcucccccug

SEQ ID NO: 3666974 - RNA, 14 nt, Human
guucucagggcucc

SEQ ID NO: 3666975 - RNA, 11 nt, Human
guucucaucuu

SEQ ID NO: 3666976 - RNA, 18 nt, Human
guucuccagucauuaugu

SEQ ID NO: 3666977 - RNA, 16 nt, Human
guucucccugggaggc

SEQ ID NO: 3666978 - RNA, 22 nt, Human
guucuccguuagcuccuguggc

SEQ ID NO: 3666979 - RNA, 23 nt, Human
guucuccguuagcuccuguggcc

SEQ ID NO: 3666980 - RNA, 15 nt, Human
guucucuagaaagaa

SEQ ID NO: 3666981 - RNA, 22 nt, Human
guucucuaucauuuaauaauau

SEQ ID NO: 3666982 - RNA, 21 nt, Human
guucucucccaggggcuggcu

SEQ ID NO: 3666983 - RNA, 13 nt, Human
guucucuccuucu

SEQ ID NO: 3666984 - RNA, 22 nt, Human
guucucucugccugugagccag

SEQ ID NO: 3666985 - RNA, 15 nt, Human
guucucucuuugcau

SEQ ID NO: 3666986 - RNA, 11 nt, Human
guucucugccc

SEQ ID NO: 3666987 - RNA, 15 nt, Human
guucucugggagaaa

SEQ ID NO: 3666988 - RNA, 16 nt, Human
guucucugggagaaaa

SEQ ID NO: 3666989 - RNA, 16 nt, Human
guucucuuaaaaggua

SEQ ID NO: 3666990 - RNA, 14 nt, Human
guucucuucuugaa

SEQ ID NO: 3666991 - RNA, 15 nt, Human
guucugaaauaaacu

SEQ ID NO: 3666992 - RNA, 20 nt, Human
guucugaaaugucaguucug

SEQ ID NO: 3666993 - RNA, 15 nt, Human
guucugaagaagaug

SEQ ID NO: 3666994 - RNA, 18 nt, Human
guucugaauaauuucuua

SEQ ID NO: 3666995 - RNA, 13 nt, Human
guucugacuugac

SEQ ID NO: 3666996 - RNA, 20 nt, Human
guucugagauggcucccagg

SEQ ID NO: 3666997 - RNA, 16 nt, Human
guucugagcugccagu

SEQ ID NO: 3666998 - RNA, 18 nt, Human
guucugagcugccagugg

SEQ ID NO: 3666999 - RNA, 19 nt, Human
guucugauccuaguuccac

SEQ ID NO: 3667000 - RNA, 15 nt, Human
guucugcaaauagaa

SEQ ID NO: 3667001 - RNA, 15 nt, Human
guucugcagguugaa

SEQ ID NO: 3667002 - RNA, 14 nt, Human
guucugccaggaga

SEQ ID NO: 3667003 - RNA, 17 nt, Human
guucugcccccagccca

SEQ ID NO: 3667004 - RNA, 13 nt, Human
guucugccucucc

SEQ ID NO: 3667005 - RNA, 15 nt, Human
guucugccugccagc

SEQ ID NO: 3667006 - RNA, 23 nt, Human
guucugccugccagcugcacuga

SEQ ID NO: 3667007 - RNA, 15 nt, Human
guucugcucaucauu

SEQ ID NO: 3667008 - RNA, 18 nt, Human
guucugcucaucauucuc

SEQ ID NO: 3667009 - RNA, 14 nt, Human
guucugcuccucuc

SEQ ID NO: 3667010 - RNA, 15 nt, Human
guucugcuccucucc

SEQ ID NO: 3667011 - RNA, 14 nt, Human
guucugcuggccug

SEQ ID NO: 3667012 - RNA, 20 nt, Human
guucuggaaaagaacuguuu

SEQ ID NO: 3667013 - RNA, 20 nt, Human
guucuggaggaaagggagga

SEQ ID NO: 3667014 - RNA, 17 nt, Human
guucuggauggugugcc

SEQ ID NO: 3667015 - RNA, 12 nt, Human
guucuggcucuu

SEQ ID NO: 3667016 - RNA, 22 nt, Human
guucuggcugccccaaccugcu

SEQ ID NO: 3667017 - RNA, 15 nt, Human
guucugggacacagu

SEQ ID NO: 3667018 - RNA, 16 nt, Human
guucugggacacaguu

SEQ ID NO: 3667019 - RNA, 18 nt, Human
guucugggcucuuuccuc

SEQ ID NO: 3667020 - RNA, 14 nt, Human
guucuggggccccu

SEQ ID NO: 3667021 - RNA, 20 nt, Human
guucuggggggacccagugc

SEQ ID NO: 3667022 - RNA, 11 nt, Human
guucugggugg

SEQ ID NO: 3667023 - RNA, 18 nt, Human
guucugggugguugcccu

SEQ ID NO: 3667024 - RNA, 15 nt, Human
guucuggugugaacu

SEQ ID NO: 3667025 - RNA, 21 nt, Human
guucugguuagcucagcccca

SEQ ID NO: 3667026 - RNA, 23 nt, Human
guucugguuagcucagccccagc

SEQ ID NO: 3667027 - RNA, 11 nt, Human
guucugucccu

SEQ ID NO: 3667028 - RNA, 18 nt, Human
guucugucccuugccccc

SEQ ID NO: 3667029 - RNA, 17 nt, Human
guucugucucauaugau

SEQ ID NO: 3667030 - RNA, 11 nt, Human
guucugugcac

SEQ ID NO: 3667031 - RNA, 14 nt, Human
guucuguggaaagu

SEQ ID NO: 3667032 - RNA, 16 nt, Human
guucuguggaaagugu

SEQ ID NO: 3667033 - RNA, 19 nt, Human
guucuguggaaaguguaaa

SEQ ID NO: 3667034 - RNA, 21 nt, Human
guucuguggaaaguguaaagc

SEQ ID NO: 3667035 - RNA, 18 nt, Human
guucugugguuccucugc

SEQ ID NO: 3667036 - RNA, 16 nt, Human
guucugugguuucaug

SEQ ID NO: 3667037 - RNA, 19 nt, Human
guucugugguuucauguua

SEQ ID NO: 3667038 - RNA, 19 nt, Human
guucuguguauuuaauugu

SEQ ID NO: 3667039 - RNA, 14 nt, Human
guucuguuaacuga

SEQ ID NO: 3667040 - RNA, 16 nt, Human
guucuguuaacugaau

SEQ ID NO: 3667041 - RNA, 21 nt, Human
guucuguuaacugaauaccac

SEQ ID NO: 3667042 - RNA, 19 nt, Human
guucuguuacaaaauguaa

SEQ ID NO: 3667043 - RNA, 22 nt, Human
guucuguuacaaaauguaacug

SEQ ID NO: 3667044 - RNA, 23 nt, Human
guucuguuauauccccugcuacc

SEQ ID NO: 3667045 - RNA, 14 nt, Human
guucuguuuacauc

SEQ ID NO: 3667046 - RNA, 15 nt, Human
guuucucccgugcuu

SEQ ID NO: 3667047 - RNA, 20 nt, Human
guuucucccucucacugucu

SEQ ID NO: 3667048 - RNA, 19 nt, Human
guuucucucuacagugcca

SEQ ID NO: 3667049 - RNA, 13 nt, Human
guuucucugcugu

SEQ ID NO: 3667050 - RNA, 14 nt, Human
guuucucuguggcu

SEQ ID NO: 3667051 - RNA, 18 nt, Human
guuucucuuagaaaagcu

SEQ ID NO: 3667052 - RNA, 20 nt, Human
guuucucuucuagaugauuu

SEQ ID NO: 3667053 - RNA, 13 nt, Human
guuucucuucucc

SEQ ID NO: 3667054 - RNA, 19 nt, Human
guuucucuuugauuauuug

SEQ ID NO: 3667055 - RNA, 13 nt, Human
guuucugaaaaga

SEQ ID NO: 3667056 - RNA, 22 nt, Human
guuucugaaaagaaauaauaau

SEQ ID NO: 3667057 - RNA, 17 nt, Human
guuucugacucugagcu

SEQ ID NO: 3667058 - RNA, 14 nt, Human
guuucugagaaaag

SEQ ID NO: 3667059 - RNA, 20 nt, Human
guuucugaguuccugcaugc

SEQ ID NO: 3667060 - RNA, 19 nt, Human
guuucugauuaaugcuaaa

SEQ ID NO: 3667061 - RNA, 14 nt, Human
guuucugcaguagu

SEQ ID NO: 3667062 - RNA, 18 nt, Human
guuucugccgcagcccug

SEQ ID NO: 3667063 - RNA, 22 nt, Human
guuucugccgcagcccugcaga

SEQ ID NO: 3667064 - RNA, 22 nt, Human
guuucuggacccuuauaaaauc

SEQ ID NO: 3667065 - RNA, 22 nt, Human
guuucuggguccugaagaauua

SEQ ID NO: 3667066 - RNA, 14 nt, Human
guuucuggucucua

SEQ ID NO: 3667067 - RNA, 18 nt, Human
guuucugguggucuguug

SEQ ID NO: 3667068 - RNA, 15 nt, Human
guuucuguacuuuuu

SEQ ID NO: 3667069 - RNA, 16 nt, Human
guuucuguccugcugg

SEQ ID NO: 3667070 - RNA, 15 nt, Human
guuucuguccuguaa

SEQ ID NO: 3667071 - RNA, 19 nt, Human
guuucuguccuguaacugu

SEQ ID NO: 3667072 - RNA, 21 nt, Human
guuucugugguuggcugggaa

SEQ ID NO: 3667073 - RNA, 14 nt, Human
guuucuguucugug

SEQ ID NO: 3667074 - RNA, 20 nt, Human
guuucuguucuguggaaagu

SEQ ID NO: 3667075 - RNA, 22 nt, Human
guuucuguucuguggaaagugu

SEQ ID NO: 3667076 - RNA, 22 nt, Human
guuucuuaaauaagaaacuuuu

SEQ ID NO: 3667077 - RNA, 15 nt, Human
guuucuuaauuugga

SEQ ID NO: 3667078 - RNA, 13 nt, Human
guuucuuagcuuu

SEQ ID NO: 3667079 - RNA, 16 nt, Human
guuucuuagcuuuuua

SEQ ID NO: 3667080 - RNA, 23 nt, Human
guuucuucauccggcagccugga

SEQ ID NO: 3667081 - RNA, 11 nt, Human
guuucuuccug

SEQ ID NO: 3667082 - RNA, 13 nt, Human
guuucuugcuugu

SEQ ID NO: 3667083 - RNA, 13 nt, Human
guuucuuguuuau

SEQ ID NO: 3667084 - RNA, 15 nt, Human
guuucuuuaaaauug

SEQ ID NO: 3667085 - RNA, 21 nt, Human
guuucuuuaaccuuguauaaa

SEQ ID NO: 3667086 - RNA, 19 nt, Human
guuucuuuauuuuguguaa

SEQ ID NO: 3667087 - RNA, 12 nt, Human
guuucuuugaau

SEQ ID NO: 3667088 - RNA, 18 nt, Human
guuucuuugaauuuucau

SEQ ID NO: 3667089 - RNA, 19 nt, Human
guuucuuugaauuuucauu

SEQ ID NO: 3667090 - RNA, 20 nt, Human
guuucuuugaauuuucauuu

SEQ ID NO: 3667091 - RNA, 21 nt, Human
guuucuuugaauuuucauuuu

SEQ ID NO: 3667092 - RNA, 14 nt, Human
guuucuuuguaaug

SEQ ID NO: 3667093 - RNA, 17 nt, Human
guuucuuuguaaugaaa

SEQ ID NO: 3667094 - RNA, 20 nt, Human
guuucuuuuguauguaaaug

SEQ ID NO: 3667095 - RNA, 19 nt, Human
guuucuuuuuaaguaaugu

SEQ ID NO: 3667096 - RNA, 13 nt, Human
guuucuuuuugaa

SEQ ID NO: 3667097 - RNA, 16 nt, Human
guuucuuuuugaaucu

SEQ ID NO: 3667098 - RNA, 14 nt, Human
guuugaaaacuuca

SEQ ID NO: 3667099 - RNA, 18 nt, Human
guuugaaaacuucagaag

SEQ ID NO: 3667100 - RNA, 11 nt, Human
guuugaaaagc

SEQ ID NO: 3667101 - RNA, 13 nt, Human
guuugaaaauauu

SEQ ID NO: 3667102 - RNA, 22 nt, Human
guuugaaaugaggucuguuuaa

SEQ ID NO: 3667103 - RNA, 14 nt, Human
guuugaaauucuga

SEQ ID NO: 3667104 - RNA, 21 nt, Human
guuugaaauucugaauuugca

SEQ ID NO: 3667105 - RNA, 23 nt, Human
guuugaaauucugaauuugcaaa

SEQ ID NO: 3667106 - RNA, 21 nt, Human
guuugaagccugcccuugucu

SEQ ID NO: 3667107 - RNA, 18 nt, Human
guuugaauauggacaaga

SEQ ID NO: 3667108 - RNA, 17 nt, Human
guuugaauguuaaauaa

SEQ ID NO: 3667109 - RNA, 15 nt, Human
guuugacauuguaug

SEQ ID NO: 3667110 - RNA, 18 nt, Human
guuugacuagaugaugga

SEQ ID NO: 3667111 - RNA, 19 nt, Human
guuugacuagaugauggau

SEQ ID NO: 3667112 - RNA, 11 nt, Human
guuugagaaau

SEQ ID NO: 3667113 - RNA, 23 nt, Human
guuugagcucugcagcccaggga

SEQ ID NO: 3667114 - RNA, 14 nt, Human
guuugagcugccuu

SEQ ID NO: 3667115 - RNA, 18 nt, Human
guuugagcugccuucccu

SEQ ID NO: 3667116 - RNA, 18 nt, Human
guuugaggaaauuugcag

SEQ ID NO: 3667117 - RNA, 14 nt, Human
guuugauaaauagu

SEQ ID NO: 3667118 - RNA, 15 nt, Human
guuugauaaauagug

SEQ ID NO: 3667119 - RNA, 20 nt, Human
guuugaugaggcccuccaca

SEQ ID NO: 3667120 - RNA, 17 nt, Human
guuugauuaaauucuug

SEQ ID NO: 3667121 - RNA, 19 nt, Human
guuugauuaaauucuugca

SEQ ID NO: 3667122 - RNA, 22 nt, Human
guuugauuaaauucuugcaaag

SEQ ID NO: 3667123 - RNA, 19 nt, Human
guuugauucagacagcugc

SEQ ID NO: 3667124 - RNA, 21 nt, Human
guuugauucagacagcugccu

SEQ ID NO: 3667125 - RNA, 22 nt, Human
guuugauucagacagcugccug

SEQ ID NO: 3667126 - RNA, 15 nt, Human
guuugauuucauuaa

SEQ ID NO: 3667127 - RNA, 21 nt, Human
guuugauuuuagcugcagaac

SEQ ID NO: 3667128 - RNA, 13 nt, Human
guuugcaaggaag

SEQ ID NO: 3667129 - RNA, 15 nt, Human
guuugcaaggaagcc

SEQ ID NO: 3667130 - RNA, 22 nt, Human
guuugcaaggaagccacagcug

SEQ ID NO: 3667131 - RNA, 17 nt, Human
guuugcaccuuucuagu

SEQ ID NO: 3667132 - RNA, 23 nt, Human
guuugcacguuaugguguuucuc

SEQ ID NO: 3667133 - RNA, 17 nt, Human
guuugcacuaucuuuca

SEQ ID NO: 3667134 - RNA, 17 nt, Human
guuugcacucaaaucuu

SEQ ID NO: 3667135 - RNA, 21 nt, Human
guuugcacucaaaucuuaaga

SEQ ID NO: 3667136 - RNA, 20 nt, Human
guuugcacuguaugcuggac

SEQ ID NO: 3667137 - RNA, 15 nt, Human
guuugcaggggugac

SEQ ID NO: 3667138 - RNA, 22 nt, Human
guuugcagguggccaaguuccu

SEQ ID NO: 3667139 - RNA, 23 nt, Human
guuugcauauaagggaaguaguu

SEQ ID NO: 3667140 - RNA, 14 nt, Human
guuugcauuucaga

SEQ ID NO: 3667141 - RNA, 20 nt, Human
guuugccacuuugcaaagga

SEQ ID NO: 3667142 - RNA, 23 nt, Human
guuugcccaaaauuuauuuuaua

SEQ ID NO: 3667143 - RNA, 19 nt, Human
guuugccgguggugcaggu

SEQ ID NO: 3667144 - RNA, 22 nt, Human
guuugccuccguccccugccca

SEQ ID NO: 3667145 - RNA, 15 nt, Human
guuugccuuccagaa

SEQ ID NO: 3667146 - RNA, 18 nt, Human
guuugccuucuacuuuua

SEQ ID NO: 3667147 - RNA, 18 nt, Human
guuugcuaucuuaauuuu

SEQ ID NO: 3667148 - RNA, 20 nt, Human
guuugcuaucuuaauuuugg

SEQ ID NO: 3667149 - RNA, 17 nt, Human
guuugcuauuagagcau

SEQ ID NO: 3667150 - RNA, 22 nt, Human
guuugcuccccuuccccuuccu

SEQ ID NO: 3667151 - RNA, 19 nt, Human
guuugcugaacaccuugug

SEQ ID NO: 3667152 - RNA, 16 nt, Human
guuugcuuauuguucc

SEQ ID NO: 3667153 - RNA, 15 nt, Human
guuugcuucaugugu

SEQ ID NO: 3667154 - RNA, 20 nt, Human
guuugcuuugcccuucuuuc

SEQ ID NO: 3667155 - RNA, 17 nt, Human
guuuggaagauccugug

SEQ ID NO: 3667156 - RNA, 15 nt, Human
guuuggaauauuaaa

SEQ ID NO: 3667157 - RNA, 16 nt, Human
guuuggaauauuaaaa

SEQ ID NO: 3667158 - RNA, 15 nt, Human
guuuggaaugcuucu

SEQ ID NO: 3667159 - RNA, 16 nt, Human
guuuggaccccagcug

SEQ ID NO: 3667160 - RNA, 17 nt, Human
guuuggaccccagcugg

SEQ ID NO: 3667161 - RNA, 23 nt, Human
guuuggacuuuguauacuuuaaa

SEQ ID NO: 3667162 - RNA, 21 nt, Human
guuuggaggagcaaaggcuga

SEQ ID NO: 3667163 - RNA, 20 nt, Human
guuuggauucuuauguagca

SEQ ID NO: 3667164 - RNA, 17 nt, Human
guuuggcaauaguuugc

SEQ ID NO: 3667165 - RNA, 11 nt, Human
guuuggccaga

SEQ ID NO: 3667166 - RNA, 15 nt, Human
guuuggccaucucug

SEQ ID NO: 3667167 - RNA, 21 nt, Human
guuuggcgggccaaggacugc

SEQ ID NO: 3667168 - RNA, 15 nt, Human
guuuggcugugucua

SEQ ID NO: 3667169 - RNA, 17 nt, Human
guuuggcugugucuaaa

SEQ ID NO: 3667170 - RNA, 14 nt, Human
guuuggcuuccucc

SEQ ID NO: 3667171 - RNA, 18 nt, Human
guuuggcuuucagggagg

SEQ ID NO: 3667172 - RNA, 21 nt, Human
guuugggcagaagggagaagg

SEQ ID NO: 3667173 - RNA, 11 nt, Human
guuugggcuuc

SEQ ID NO: 3667174 - RNA, 13 nt, Human
guuugggcuucag

SEQ ID NO: 3667175 - RNA, 19 nt, Human
uaaauccuuuuucuuuaua

SEQ ID NO: 3667176 - RNA, 18 nt, Human
uaaaucgcuuuugauaau

SEQ ID NO: 3667177 - RNA, 19 nt, Human
uaaaucgcuuuugauaauc

SEQ ID NO: 3667178 - RNA, 14 nt, Human
uaaaucuaaaucua

SEQ ID NO: 3667179 - RNA, 15 nt, Human
uaaaucuacacacgg

SEQ ID NO: 3667180 - RNA, 20 nt, Human
uaaaucuaugaaguauauaa

SEQ ID NO: 3667181 - RNA, 20 nt, Human
uaaaucuauuuauuaauauu

SEQ ID NO: 3667182 - RNA, 15 nt, Human
uaaaucuccaaaaua

SEQ ID NO: 3667183 - RNA, 18 nt, Human
uaaaucuguaagcucuuu

SEQ ID NO: 3667184 - RNA, 15 nt, Human
uaaaucugugaacuu

SEQ ID NO: 3667185 - RNA, 19 nt, Human
uaaaucugugaacuugaaa

SEQ ID NO: 3667186 - RNA, 13 nt, Human
uaaaucugugaug

SEQ ID NO: 3667187 - RNA, 14 nt, Human
uaaaucugugauga

SEQ ID NO: 3667188 - RNA, 15 nt, Human
uaaaucugugaugau

SEQ ID NO: 3667189 - RNA, 15 nt, Human
uaaaucuuaauguuc

SEQ ID NO: 3667190 - RNA, 11 nt, Human
guuuggggcga

SEQ ID NO: 3667191 - RNA, 20 nt, Human
guuugggggacguuucucau

SEQ ID NO: 3667192 - RNA, 22 nt, Human
guuuggguauccugcccagugu

SEQ ID NO: 3667193 - RNA, 17 nt, Human
guuugguauuguauuua

SEQ ID NO: 3667194 - RNA, 17 nt, Human
guuuggucuggacugac

SEQ ID NO: 3667195 - RNA, 13 nt, Human
guuuggugcuuuu

SEQ ID NO: 3667196 - RNA, 13 nt, Human
guuugguucaaau

SEQ ID NO: 3667197 - RNA, 14 nt, Human
guuugguuccucuc

SEQ ID NO: 3667198 - RNA, 16 nt, Human
guuugguuuacauuua

SEQ ID NO: 3667199 - RNA, 16 nt, Human
guuugguuuuaaaaua

SEQ ID NO: 3667200 - RNA, 14 nt, Human
guuugguuuuuauu

SEQ ID NO: 3667201 - RNA, 15 nt, Human
guuuguaaaaaugua

SEQ ID NO: 3667202 - RNA, 13 nt, Human
guuuguaaaacua

SEQ ID NO: 3667203 - RNA, 19 nt, Human
guuuguaaauguuauuucu

SEQ ID NO: 3667204 - RNA, 20 nt, Human
guuuguaaauuaacuuuuau

SEQ ID NO: 3667205 - RNA, 14 nt, Human
guuuguagguaaaa

SEQ ID NO: 3667206 - RNA, 22 nt, Human
guuuguagugccacuguuguuu

SEQ ID NO: 3667207 - RNA, 16 nt, Human
guuuguauaacuucuu

SEQ ID NO: 3667208 - RNA, 20 nt, Human
guuugucaucagauggaaau

SEQ ID NO: 3667209 - RNA, 15 nt, Human
guuugucauuagccu

SEQ ID NO: 3667210 - RNA, 22 nt, Human
guuuguccugaugcuuuugucu

SEQ ID NO: 3667211 - RNA, 18 nt, Human
guuugucgcucaugugug

SEQ ID NO: 3667212 - RNA, 19 nt, Human
guuugucuauuuuaaaaua

SEQ ID NO: 3667213 - RNA, 19 nt, Human
guuugucucaguuggaaau

SEQ ID NO: 3667214 - RNA, 15 nt, Human
guuugucucuccuuu

SEQ ID NO: 3667215 - RNA, 17 nt, Human
guuugucucuccuuuuc

SEQ ID NO: 3667216 - RNA, 15 nt, Human
guuugucuucucccc

SEQ ID NO: 3667217 - RNA, 19 nt, Human
guuugugcuguaaagaguu

SEQ ID NO: 3667218 - RNA, 12 nt, Human
guuuguggccuc

SEQ ID NO: 3667219 - RNA, 15 nt, Human
guuuguggcuauuaa

SEQ ID NO: 3667220 - RNA, 13 nt, Human
guuuguggcuggg

SEQ ID NO: 3667221 - RNA, 20 nt, Human
guuuguggcugggggcagga

SEQ ID NO: 3667222 - RNA, 22 nt, Human
guuuguguauuuacgcuuugau

SEQ ID NO: 3667223 - RNA, 14 nt, Human
guuugugugucuua

SEQ ID NO: 3667224 - RNA, 14 nt, Human
guuuguuaaaacug

SEQ ID NO: 3667225 - RNA, 15 nt, Human
guuuguuaaaacugg

SEQ ID NO: 3667226 - RNA, 18 nt, Human
guuuguuccccaagacau

SEQ ID NO: 3667227 - RNA, 19 nt, Human
guuuguugagcugguaaca

SEQ ID NO: 3667228 - RNA, 16 nt, Human
guuuguugcuggcuug

SEQ ID NO: 3667229 - RNA, 19 nt, Human
guuuguuuauuagaugaau

SEQ ID NO: 3667230 - RNA, 10 nt, Human
guuuguuuca

SEQ ID NO: 3667231 - RNA, 18 nt, Human
guuuguuucaagaaccug

SEQ ID NO: 3667232 - RNA, 18 nt, Human
guuuguuucucccccugg

SEQ ID NO: 3667233 - RNA, 18 nt, Human
guuuguuucugaaaggga

SEQ ID NO: 3667234 - RNA, 13 nt, Human
guuuguuuguugc

SEQ ID NO: 3667235 - RNA, 18 nt, Human
guuuguuuuccuuuuauu

SEQ ID NO: 3667236 - RNA, 13 nt, Human
guuuguuuuugcu

SEQ ID NO: 3667237 - RNA, 19 nt, Human
guuuguuuuuuguuuuucu

SEQ ID NO: 3667238 - RNA, 23 nt, Human
guuuguuuuuuguuuuucugcuu

SEQ ID NO: 3667239 - RNA, 12 nt, Human
guuuguuuuuuu

SEQ ID NO: 3667240 - RNA, 20 nt, Human
guuuuaaaaaggaacugcag

SEQ ID NO: 3667241 - RNA, 22 nt, Human
guuuuaaaaaggaacugcagca

SEQ ID NO: 3667242 - RNA, 18 nt, Human
guuuuaaaacuggaccug

SEQ ID NO: 3667243 - RNA, 21 nt, Human
guuuuaaaauaaaaauucuga

SEQ ID NO: 3667244 - RNA, 24 nt, Human
guuuuaaaauaaaaauucugaaug

SEQ ID NO: 3667245 - RNA, 12 nt, Human
guuuuaaaauua

SEQ ID NO: 3667246 - RNA, 22 nt, Human
guuuuaaagaccugacaccuuu

SEQ ID NO: 3667247 - RNA, 13 nt, Human
guuuuaaauguac

SEQ ID NO: 3667248 - RNA, 14 nt, Human
guuuuaaauucuga

SEQ ID NO: 3667249 - RNA, 19 nt, Human
guuuuaaauuuauuucaaa

SEQ ID NO: 3667250 - RNA, 14 nt, Human
guuuuaacaaaaac

SEQ ID NO: 3667251 - RNA, 22 nt, Human
guuuuaacaauuuccuuuauau

SEQ ID NO: 3667252 - RNA, 20 nt, Human
guuuuaaccgcacaugcaca

SEQ ID NO: 3667253 - RNA, 15 nt, Human
guuuuaacuguggau

SEQ ID NO: 3667254 - RNA, 16 nt, Human
guuuuaacuguggaua

SEQ ID NO: 3667255 - RNA, 14 nt, Human
guuuuaacuuuguu

SEQ ID NO: 3667256 - RNA, 14 nt, Human
guuuuaagaaaugu

SEQ ID NO: 3667257 - RNA, 18 nt, Human
guuuuaaggaugcuugua

SEQ ID NO: 3667258 - RNA, 18 nt, Human
guuuuaaguuguuugcau

SEQ ID NO: 3667259 - RNA, 18 nt, Human
guuuuaaucugaaauucu

SEQ ID NO: 3667260 - RNA, 16 nt, Human
guuuuaauuccaugaa

SEQ ID NO: 3667261 - RNA, 19 nt, Human
guuuuaauugaaggaaaga

SEQ ID NO: 3667262 - RNA, 20 nt, Human
guuuuaauugaaggaaagau

SEQ ID NO: 3667263 - RNA, 12 nt, Human
guuuuacaaagg

SEQ ID NO: 3667264 - RNA, 16 nt, Human
guuuuacaaguuggag

SEQ ID NO: 3667265 - RNA, 16 nt, Human
guuuuacagauuuauu

SEQ ID NO: 3667266 - RNA, 22 nt, Human
guuuuacagauuuauuccuuug

SEQ ID NO: 3667267 - RNA, 15 nt, Human
guuuuacugcagcuu

SEQ ID NO: 3667268 - RNA, 18 nt, Human
guuuuacugcagcuuugu

SEQ ID NO: 3667269 - RNA, 19 nt, Human
guuuuagaaacaauaugga

SEQ ID NO: 3667270 - RNA, 18 nt, Human
guuuuagacaaauacuca

SEQ ID NO: 3667271 - RNA, 22 nt, Human
guuuuagacaaauacucaugug

SEQ ID NO: 3667272 - RNA, 21 nt, Human
guuuuaggacaaacagcucag

SEQ ID NO: 3667273 - RNA, 17 nt, Human
guuuuagguagaaaaac

SEQ ID NO: 3667274 - RNA, 12 nt, Human
guuuuagguucu

SEQ ID NO: 3667275 - RNA, 13 nt, Human
guuuuagguucua

SEQ ID NO: 3667276 - RNA, 12 nt, Human
guuuuauaagca

SEQ ID NO: 3667277 - RNA, 18 nt, Human
guuuuauacuguacuuaa

SEQ ID NO: 3667278 - RNA, 11 nt, Human
guuuuauauau

SEQ ID NO: 3667279 - RNA, 20 nt, Human
guuuuauauauuauauggaa

SEQ ID NO: 3667280 - RNA, 19 nt, Human
guuuuauauuuuuauagac

SEQ ID NO: 3667281 - RNA, 18 nt, Human
guuuuaucacauguaugu

SEQ ID NO: 3667282 - RNA, 21 nt, Human
guuuuaucacauguauguuuu

SEQ ID NO: 3667283 - RNA, 21 nt, Human
guuuuaugagaaagccuucuu

SEQ ID NO: 3667284 - RNA, 19 nt, Human
guuuuaugagauggaucac

SEQ ID NO: 3667285 - RNA, 22 nt, Human
guuuuaugagauggaucacaua

SEQ ID NO: 3667286 - RNA, 11 nt, Human
guuuuaugaua

SEQ ID NO: 3667287 - RNA, 20 nt, Human
guuuuaugguuacuucuucu

SEQ ID NO: 3667288 - RNA, 17 nt, Human
guuuuauucuugguuuu

SEQ ID NO: 3667289 - RNA, 12 nt, Human
guuuuauuuaua

SEQ ID NO: 3667290 - RNA, 17 nt, Human
guuuuauuuauauuuau

SEQ ID NO: 3667291 - RNA, 22 nt, Human
guuuuauuuauauuuauugacu

SEQ ID NO: 3667292 - RNA, 19 nt, Human
guuuucaaccucuagaauu

SEQ ID NO: 3667293 - RNA, 13 nt, Human
guuuucaagucaa

SEQ ID NO: 3667294 - RNA, 18 nt, Human
guuuucaauuuuaaacau

SEQ ID NO: 3667295 - RNA, 19 nt, Human
guuuucagaaaaagaaaug

SEQ ID NO: 3667296 - RNA, 19 nt, Human
guuuucagaaccucuuccc

SEQ ID NO: 3667297 - RNA, 20 nt, Human
guuuucagaaccucuucccc

SEQ ID NO: 3667298 - RNA, 16 nt, Human
guuuucagaagaaaua

SEQ ID NO: 3667299 - RNA, 22 nt, Human
guuuucagcuaggaacaaaucu

SEQ ID NO: 3667300 - RNA, 24 nt, Human
guuuucaggaguggguugauuuca

SEQ ID NO: 3667301 - RNA, 16 nt, Human
guuuucaguuuguaua

SEQ ID NO: 3667302 - RNA, 14 nt, Human
guuuucauaauaaa

SEQ ID NO: 3667303 - RNA, 14 nt, Human
guuuucaucaagac

SEQ ID NO: 3667304 - RNA, 18 nt, Human
guuuucauccauaacuga

SEQ ID NO: 3667305 - RNA, 20 nt, Human
guuuuccacuaauuuugcau

SEQ ID NO: 3667306 - RNA, 17 nt, Human
guuuuccaugaaaacgu

SEQ ID NO: 3667307 - RNA, 16 nt, Human
guuuucccuccuugga

SEQ ID NO: 3667308 - RNA, 16 nt, Human
guuuuccuaaaugcag

SEQ ID NO: 3667309 - RNA, 15 nt, Human
guuuuccucccuucu

SEQ ID NO: 3667310 - RNA, 17 nt, Human
guuuuccucucaauaaa

SEQ ID NO: 3667311 - RNA, 19 nt, Human
guuuuccuuugucaucauu

SEQ ID NO: 3667312 - RNA, 19 nt, Human
guuuucgaagcucagccca

SEQ ID NO: 3667313 - RNA, 23 nt, Human
guuuucgaagcucagcccacccc

SEQ ID NO: 3667314 - RNA, 23 nt, Human
guuuucuaguguaucaaaaugcu

SEQ ID NO: 3667315 - RNA, 23 nt, Human
guuuucucaacaaauggaaugcc

SEQ ID NO: 3667316 - RNA, 21 nt, Human
guuuucuccucccaggaacug

SEQ ID NO: 3667317 - RNA, 17 nt, Human
guuuucucucggcuccc

SEQ ID NO: 3667318 - RNA, 12 nt, Human
guuuucucuuga

SEQ ID NO: 3667319 - RNA, 19 nt, Human
guuuucucuugagagggug

SEQ ID NO: 3667320 - RNA, 20 nt, Human
guuuucucuuuguggggcuu

SEQ ID NO: 3667321 - RNA, 17 nt, Human
guuuucugaaaauauaa

SEQ ID NO: 3667322 - RNA, 13 nt, Human
guuuucugagccc

SEQ ID NO: 3667323 - RNA, 16 nt, Human
guuuucugagggaaag

SEQ ID NO: 3667324 - RNA, 15 nt, Human
guuuucuguagucau

SEQ ID NO: 3667325 - RNA, 17 nt, Human
guuuucuguagucauuu

SEQ ID NO: 3667326 - RNA, 11 nt, Human
guuuucuguuc

SEQ ID NO: 3667327 - RNA, 20 nt, Human
guuuucuuaaccagaucauu

SEQ ID NO: 3667328 - RNA, 16 nt, Human
guuuucuugauaauuu

SEQ ID NO: 3667329 - RNA, 19 nt, Human
guuuucuuguugcuuuguu

SEQ ID NO: 3667330 - RNA, 16 nt, Human
guuuucuuucuuuaaa

SEQ ID NO: 3667331 - RNA, 20 nt, Human
guuuucuuugcaaaguauug

SEQ ID NO: 3667332 - RNA, 22 nt, Human
guuuugaaaaccuaaaagacag

SEQ ID NO: 3667333 - RNA, 15 nt, Human
guuuugaaaagcuau

SEQ ID NO: 3667334 - RNA, 17 nt, Human
guuuugaagauucuaug

SEQ ID NO: 3667335 - RNA, 15 nt, Human
gcaccuggggagugg

SEQ ID NO: 3667336 - RNA, 12 nt, Human
gcaccuguacag

SEQ ID NO: 3667337 - RNA, 19 nt, Human
gcaccuguacucaggaggc

SEQ ID NO: 3667338 - RNA, 21 nt, Human
gcaccuguacucaggaggcug

SEQ ID NO: 3667339 - RNA, 15 nt, Human
gcaccuguaguccca

SEQ ID NO: 3667340 - RNA, 11 nt, Human
gcaccuguccc

SEQ ID NO: 3667341 - RNA, 23 nt, Human
gcaccuguccccacccuccacuc

SEQ ID NO: 3667342 - RNA, 12 nt, Human
gcaccugucugc

SEQ ID NO: 3667343 - RNA, 15 nt, Human
gcaccugucugcucc

SEQ ID NO: 3667344 - RNA, 21 nt, Human
gcaccuuaccaacuuucugua

SEQ ID NO: 3667345 - RNA, 18 nt, Human
gcaccuuagacagucccu

SEQ ID NO: 3667346 - RNA, 21 nt, Human
gcaccuuagacagucccugcc

SEQ ID NO: 3667347 - RNA, 19 nt, Human
gcaccuucccccuccccca

SEQ ID NO: 3667348 - RNA, 16 nt, Human
gcaccuuccucacuuc

SEQ ID NO: 3667349 - RNA, 14 nt, Human
gcaccuugugccug

SEQ ID NO: 3667350 - RNA, 13 nt, Human
gcaccuuucuagu

SEQ ID NO: 3667351 - RNA, 23 nt, Human
gcaccuuuuacugugauguuugu

SEQ ID NO: 3667352 - RNA, 14 nt, Human
gcacgacgcccucu

SEQ ID NO: 3667353 - RNA, 17 nt, Human
gcacgacgcccucuccc

SEQ ID NO: 3667354 - RNA, 16 nt, Human
gcacgauuucuguuua

SEQ ID NO: 3667355 - RNA, 12 nt, Human
gcacgcaguggc

SEQ ID NO: 3667356 - RNA, 17 nt, Human
gcacgcccaugugugag

SEQ ID NO: 3667357 - RNA, 13 nt, Human
gcacgccugcccc

SEQ ID NO: 3667358 - RNA, 12 nt, Human
gcacgcuguggg

SEQ ID NO: 3667359 - RNA, 20 nt, Human
gcacgcuugcguaugucugu

SEQ ID NO: 3667360 - RNA, 21 nt, Human
gcacggaccaugcgacacugg

SEQ ID NO: 3667361 - RNA, 14 nt, Human
gcacggcagccaca

SEQ ID NO: 3667362 - RNA, 18 nt, Human
gcacggccucgcgucugu

SEQ ID NO: 3667363 - RNA, 19 nt, Human
gcacggcucuguccccagc

SEQ ID NO: 3667364 - RNA, 13 nt, Human
gcacggguggucc

SEQ ID NO: 3667365 - RNA, 15 nt, Human
gcacggguggucccc

SEQ ID NO: 3667366 - RNA, 20 nt, Human
gcacgguggacccagacaca

SEQ ID NO: 3667367 - RNA, 21 nt, Human
gcacguaaaguacuuguaguu

SEQ ID NO: 3667368 - RNA, 22 nt, Human
gcacguagcugaggccggaugc

SEQ ID NO: 3667369 - RNA, 20 nt, Human
gcacguaguagggucaggcc

SEQ ID NO: 3667370 - RNA, 21 nt, Human
gcacguaguagggucaggcca

SEQ ID NO: 3667371 - RNA, 15 nt, Human
gcacguauuuuaaua

SEQ ID NO: 3667372 - RNA, 16 nt, Human
gcacguggagagcugg

SEQ ID NO: 3667373 - RNA, 18 nt, Human
gcacguggcauguggccu

SEQ ID NO: 3667374 - RNA, 17 nt, Human
gcacguggccucuugag

SEQ ID NO: 3667375 - RNA, 19 nt, Human
gcacguggccucuugagca

SEQ ID NO: 3667376 - RNA, 18 nt, Human
gcacgugguaaaacacuu

SEQ ID NO: 3667377 - RNA, 22 nt, Human
gcacguuaugguguuucucccu

SEQ ID NO: 3667378 - RNA, 20 nt, Human
gcacuaaagcaguggacacc

SEQ ID NO: 3667379 - RNA, 17 nt, Human
gcacuaaaguuaguaaa

SEQ ID NO: 3667380 - RNA, 20 nt, Human
gcacuaacguugagccccug

SEQ ID NO: 3667381 - RNA, 14 nt, Human
gcacuaaggggccc

SEQ ID NO: 3667382 - RNA, 15 nt, Human
gcacuaagucucuuu

SEQ ID NO: 3667383 - RNA, 19 nt, Human
gcacuaagucucuuuuuua

SEQ ID NO: 3667384 - RNA, 23 nt, Human
gcacuaagucucuuuuuuacaaa

SEQ ID NO: 3667385 - RNA, 19 nt, Human
gcacuaauuugauguuuac

SEQ ID NO: 3667386 - RNA, 14 nt, Human
gcacuacauaaacu

SEQ ID NO: 3667387 - RNA, 15 nt, Human
gcacuacauaaacug

SEQ ID NO: 3667388 - RNA, 21 nt, Human
gcacuacaugugguuuauaga

SEQ ID NO: 3667389 - RNA, 16 nt, Human
gcacuacuccucugca

SEQ ID NO: 3667390 - RNA, 19 nt, Human
gcacuacuccucugcagug

SEQ ID NO: 3667391 - RNA, 15 nt, Human
gcacuacucugugcc

SEQ ID NO: 3667392 - RNA, 21 nt, Human
gcacuacugggugucauuuca

SEQ ID NO: 3667393 - RNA, 14 nt, Human
uaagccuucaaaac

SEQ ID NO: 3667394 - RNA, 12 nt, Human
uaagccuugucg

SEQ ID NO: 3667395 - RNA, 15 nt, Human
uaagccuuuccauaa

SEQ ID NO: 3667396 - RNA, 16 nt, Human
uaagccuuuccauaag

SEQ ID NO: 3667397 - RNA, 22 nt, Human
uaagcuaacccccuucuacuga

SEQ ID NO: 3667398 - RNA, 14 nt, Human
uaagcuacugccau

SEQ ID NO: 3667399 - RNA, 16 nt, Human
uaagcuacugccaucc

SEQ ID NO: 3667400 - RNA, 23 nt, Human
uaagcuaggauguugcucagaag

SEQ ID NO: 3667401 - RNA, 18 nt, Human
uaagcuaguugaauacuu

SEQ ID NO: 3667402 - RNA, 19 nt, Human
uaagcuaguugaauacuug

SEQ ID NO: 3667403 - RNA, 20 nt, Human
uaagcuaguugaauacuuga

SEQ ID NO: 3667404 - RNA, 22 nt, Human
uaagcuaguugaauacuugaac

SEQ ID NO: 3667405 - RNA, 19 nt, Human
uaagcuauccguguugcag

SEQ ID NO: 3667406 - RNA, 13 nt, Human
uaagcuaugugaa

SEQ ID NO: 3667407 - RNA, 14 nt, Human
uaagcuauuugaug

SEQ ID NO: 3667408 - RNA, 14 nt, Human
uaagcuauuuuucu

SEQ ID NO: 3667409 - RNA, 17 nt, Human
uaagcucuuugaaacaa

SEQ ID NO: 3667410 - RNA, 13 nt, Human
uaagcugaaaaua

SEQ ID NO: 3667411 - RNA, 14 nt, Human
uaagcugaaaauau

SEQ ID NO: 3667412 - RNA, 18 nt, Human
uaagcugauccugcggag

SEQ ID NO: 3667413 - RNA, 15 nt, Human
uaagcugcagcuucc

SEQ ID NO: 3667414 - RNA, 12 nt, Human
uaagcuguaaaa

SEQ ID NO: 3667415 - RNA, 13 nt, Human
uaagcugugucug

SEQ ID NO: 3667416 - RNA, 11 nt, Human
uaagcuguuuc

SEQ ID NO: 3667417 - RNA, 18 nt, Human
uaagcuguuugguuuuaa

SEQ ID NO: 3667418 - RNA, 21 nt, Human
uaagcuguuugguuuuaaaau

SEQ ID NO: 3667419 - RNA, 15 nt, Human
uaagcuuaugcuuaa

SEQ ID NO: 3667420 - RNA, 14 nt, Human
uaagcuuauuuaau

SEQ ID NO: 3667421 - RNA, 20 nt, Human
uaagcuuccaggaaaaagga

SEQ ID NO: 3667422 - RNA, 15 nt, Human
uaagcuuugacacug

SEQ ID NO: 3667423 - RNA, 17 nt, Human
uaagcuuugccagcugc

SEQ ID NO: 3667424 - RNA, 17 nt, Human
uaaggaaaaaaagacaa

SEQ ID NO: 3667425 - RNA, 22 nt, Human
uaaggaaaacuaccuguauuua

SEQ ID NO: 3667426 - RNA, 10 nt, Human
uaaggaaacu

SEQ ID NO: 3667427 - RNA, 19 nt, Human
uaaggaaacuggguuccug

SEQ ID NO: 3667428 - RNA, 17 nt, Human
uaaggaaccaacaaucu

SEQ ID NO: 3667429 - RNA, 19 nt, Human
uaaggaaccuuccuuccug

SEQ ID NO: 3667430 - RNA, 20 nt, Human
uaaggaagaucacuuugcuc

SEQ ID NO: 3667431 - RNA, 9 nt, Human
uaaggaaua

SEQ ID NO: 3667432 - RNA, 17 nt, Human
uaaggaauaccuguccc

SEQ ID NO: 3667433 - RNA, 18 nt, Human
uaaggaauaccugucccc

SEQ ID NO: 3667434 - RNA, 14 nt, Human
uaaggaauauggga

SEQ ID NO: 3667435 - RNA, 23 nt, Human
uaaggaccguggcccugcccucu

SEQ ID NO: 3667436 - RNA, 14 nt, Human
uaaggacugacuga

SEQ ID NO: 3667437 - RNA, 19 nt, Human
uaaggagaaaucuauagaa

SEQ ID NO: 3667438 - RNA, 20 nt, Human
uaaggaggggaaaaaaaugu

SEQ ID NO: 3667439 - RNA, 19 nt, Human
uaaggaguaaucuguguac

SEQ ID NO: 3667440 - RNA, 17 nt, Human
uaaggauacaggcugga

SEQ ID NO: 3667441 - RNA, 21 nt, Human
uaaggauacaggcuggaaagu

SEQ ID NO: 3667442 - RNA, 19 nt, Human
uaaggaucagaacagcaga

SEQ ID NO: 3667443 - RNA, 17 nt, Human
uaaggaugcuaaaccuu

SEQ ID NO: 3667444 - RNA, 23 nt, Human
uaaggaugcuuguacauaaugcg

SEQ ID NO: 3667445 - RNA, 12 nt, Human
uaaggaugggaa

SEQ ID NO: 3667446 - RNA, 20 nt, Human
uaaggaugggguuaugaacc

SEQ ID NO: 3667447 - RNA, 17 nt, Human
uaaggauguagcuuuuc

SEQ ID NO: 3667448 - RNA, 19 nt, Human
uaaggaugucacagggcca

SEQ ID NO: 3667449 - RNA, 12 nt, Human
uaaggauuuuau

SEQ ID NO: 3667450 - RNA, 19 nt, Human
uaaggcaacugaacaaaaa

SEQ ID NO: 3667451 - RNA, 14 nt, Human
uaaggcaaucaugg

SEQ ID NO: 3667452 - RNA, 18 nt, Human
uaaggcaugugugaaaca

SEQ ID NO: 3667453 - RNA, 22 nt, Human
uaaggccaaguacacugagagc

SEQ ID NO: 3667454 - RNA, 22 nt, Human
uaaggcccccucucaggagcca

SEQ ID NO: 3667455 - RNA, 20 nt, Human
uaaggccgaagaaggguccu

SEQ ID NO: 3667456 - RNA, 16 nt, Human
uaaggccugugggggg

SEQ ID NO: 3667457 - RNA, 16 nt, Human
uaaggcguggagcugc

SEQ ID NO: 3667458 - RNA, 12 nt, Human
uaaggcucuaga

SEQ ID NO: 3667459 - RNA, 14 nt, Human
uaaggcucuagauc

SEQ ID NO: 3667460 - RNA, 20 nt, Human
uaaggcugaggaaaggccag

SEQ ID NO: 3667461 - RNA, 14 nt, Human
uaaggcuucaauuu

SEQ ID NO: 3667462 - RNA, 23 nt, Human
uaaggcuucaauuuauugcacaa

SEQ ID NO: 3667463 - RNA, 17 nt, Human
uaagggaacaaguugag

SEQ ID NO: 3667464 - RNA, 15 nt, Human
uaagggaagacauuu

SEQ ID NO: 3667465 - RNA, 16 nt, Human
uaagggaagacauuuc

SEQ ID NO: 3667466 - RNA, 17 nt, Human
uaagggaagacauuucu

SEQ ID NO: 3667467 - RNA, 20 nt, Human
uaagggacauguuuugauaa

SEQ ID NO: 3667468 - RNA, 15 nt, Human
uaagggacugauguu

SEQ ID NO: 3667469 - RNA, 22 nt, Human
uaagggaggaggagcuucuggg

SEQ ID NO: 3667470 - RNA, 14 nt, Human
uaagggauuucuua

SEQ ID NO: 3667471 - RNA, 16 nt, Human
uaagggauuucuuagg

SEQ ID NO: 3667472 - RNA, 14 nt, Human
uaagggcagaguca

SEQ ID NO: 3667473 - RNA, 18 nt, Human
uaagggcaugccuugugc

SEQ ID NO: 3667474 - RNA, 17 nt, Human
uaagggucgaaagcucu

SEQ ID NO: 3667475 - RNA, 13 nt, Human
uaagggugggugc

SEQ ID NO: 3667476 - RNA, 21 nt, Human
uaagguaccuuucacauagag

SEQ ID NO: 3667477 - RNA, 20 nt, Human
uaagguauaucauucuaaag

SEQ ID NO: 3667478 - RNA, 18 nt, Human
uaaggucuguuugcuguu

SEQ ID NO: 3667479 - RNA, 19 nt, Human
uaaggucuguuugcuguug

SEQ ID NO: 3667480 - RNA, 18 nt, Human
uaauaaaguauuccaccu

SEQ ID NO: 3667481 - RNA, 10 nt, Human
uaauaaagug

SEQ ID NO: 3667482 - RNA, 18 nt, Human
uaauaaaguguuuucaga

SEQ ID NO: 3667483 - RNA, 15 nt, Human
uaauaaauagagcaa

SEQ ID NO: 3667484 - RNA, 12 nt, Human
uaauaaauaguu

SEQ ID NO: 3667485 - RNA, 15 nt, Human
uaauaaauucagaua

SEQ ID NO: 3667486 - RNA, 17 nt, Human
uaauaaauugaaauugu

SEQ ID NO: 3667487 - RNA, 20 nt, Human
uaauaaauugaaauugugaa

SEQ ID NO: 3667488 - RNA, 17 nt, Human
uaauaacagugcauauu

SEQ ID NO: 3667489 - RNA, 13 nt, Human
uaauaaccagaca

SEQ ID NO: 3667490 - RNA, 15 nt, Human
uaauaaccagacaca

SEQ ID NO: 3667491 - RNA, 15 nt, Human
uaauaacugugaagu

SEQ ID NO: 3667492 - RNA, 17 nt, Human
uaauaacuguguacugu

SEQ ID NO: 3667493 - RNA, 11 nt, Human
uaauaagaaaa

SEQ ID NO: 3667494 - RNA, 19 nt, Human
uaauaagaaugguugccuu

SEQ ID NO: 3667495 - RNA, 19 nt, Human
uaauaagacauaacguuuu

SEQ ID NO: 3667496 - RNA, 22 nt, Human
uaauaagacauaacguuuuucc

SEQ ID NO: 3667497 - RNA, 15 nt, Human
uaauaagcacuguaa

SEQ ID NO: 3667498 - RNA, 19 nt, Human
uaauaagcuacuagcaaaa

SEQ ID NO: 3667499 - RNA, 12 nt, Human
uaauaagcuagu

SEQ ID NO: 3667500 - RNA, 17 nt, Human
uaauaagcuaguugaau

SEQ ID NO: 3667501 - RNA, 23 nt, Human
uaauaagcuaguugaauacuuga

SEQ ID NO: 3667502 - RNA, 15 nt, Human
uaauaagggaaaaau

SEQ ID NO: 3667503 - RNA, 16 nt, Human
uaauaagguuuuaauu

SEQ ID NO: 3667504 - RNA, 16 nt, Human
uaauaauaaagaauag

SEQ ID NO: 3667505 - RNA, 14 nt, Human
uaauaauaaauagu

SEQ ID NO: 3667506 - RNA, 18 nt, Human
uaauaauaaauaguucuu

SEQ ID NO: 3667507 - RNA, 14 nt, Human
uaauaauaauguuu

SEQ ID NO: 3667508 - RNA, 20 nt, Human
uaauaauaccucaauguuug

SEQ ID NO: 3667509 - RNA, 14 nt, Human
uaauaauauacuug

SEQ ID NO: 3667510 - RNA, 14 nt, Human
uaauaaucaagagc

SEQ ID NO: 3667511 - RNA, 20 nt, Human
uaauaaucaagagccuuaaa

SEQ ID NO: 3667512 - RNA, 22 nt, Human
uaauaaucaagagccuuaaaac

SEQ ID NO: 3667513 - RNA, 23 nt, Human
uaauaaucauuggauucugagag

SEQ ID NO: 3667514 - RNA, 20 nt, Human
uaauaaucucacauauacaa

SEQ ID NO: 3667515 - RNA, 18 nt, Human
uaauaaucuuguuucuga

SEQ ID NO: 3667516 - RNA, 21 nt, Human
uaauaaugagcuauuaaaacu

SEQ ID NO: 3667517 - RNA, 22 nt, Human
uaauaaugagcuauuaaaacuc

SEQ ID NO: 3667518 - RNA, 23 nt, Human
uaauaaugagcuauuaaaacuca

SEQ ID NO: 3667519 - RNA, 13 nt, Human
uaauaaugugaau

SEQ ID NO: 3667520 - RNA, 18 nt, Human
uaauaauguuaaccaagg

SEQ ID NO: 3667521 - RNA, 15 nt, Human
uaauaauguuucaaa

SEQ ID NO: 3667522 - RNA, 22 nt, Human
uaauaauuauaugcuauuucua

SEQ ID NO: 3667523 - RNA, 14 nt, Human
uaauacaaacuaau

SEQ ID NO: 3667524 - RNA, 14 nt, Human
uaauacaaaggcuu

SEQ ID NO: 3667525 - RNA, 18 nt, Human
uaauacaccacuacauuc

SEQ ID NO: 3667526 - RNA, 22 nt, Human
uaauacacuaauuccuuucuau

SEQ ID NO: 3667527 - RNA, 16 nt, Human
uaauacacuugcccug

SEQ ID NO: 3667528 - RNA, 18 nt, Human
uaauacagcaacaauuua

SEQ ID NO: 3667529 - RNA, 15 nt, Human
uaauacagcugagcu

SEQ ID NO: 3667530 - RNA, 17 nt, Human
uaauacauuaaagcagu

SEQ ID NO: 3667531 - RNA, 16 nt, Human
uaauaccacagcuuuu

SEQ ID NO: 3667532 - RNA, 11 nt, Human
uaauaccucaa

SEQ ID NO: 3667533 - RNA, 18 nt, Human
uaauaccucaauguuuga

SEQ ID NO: 3667534 - RNA, 23 nt, Human
uaauaccucuaauaguauaaacc

SEQ ID NO: 3667535 - RNA, 18 nt, Human
uaauaccucugugugcuc

SEQ ID NO: 3667536 - RNA, 20 nt, Human
uaauaccugggugauuacau

SEQ ID NO: 3667537 - RNA, 17 nt, Human
uaauaccuuagaaggua

SEQ ID NO: 3667538 - RNA, 20 nt, Human
uaauacgaauuguuucacaa

SEQ ID NO: 3667539 - RNA, 15 nt, Human
uaauacuaccuugaa

SEQ ID NO: 3667540 - RNA, 15 nt, Human
uaauacuaguuguga

SEQ ID NO: 3667541 - RNA, 23 nt, Human
uaauacuaguugugaccuuagug

SEQ ID NO: 3667542 - RNA, 13 nt, Human
uaauacugaacca

SEQ ID NO: 3667543 - RNA, 14 nt, Human
uaauacugaaccac

SEQ ID NO: 3667544 - RNA, 20 nt, Human
uaauacugaaccacuuguag

SEQ ID NO: 3667545 - RNA, 19 nt, Human
uaauacugcugagauacau

SEQ ID NO: 3667546 - RNA, 21 nt, Human
uaauacugguauuuuuacuua

SEQ ID NO: 3667547 - RNA, 12 nt, Human
uaauacuguauu

SEQ ID NO: 3667548 - RNA, 15 nt, Human
uaauacuguuauucu

SEQ ID NO: 3667549 - RNA, 16 nt, Human
uaauacuguuauucuu

SEQ ID NO: 3667550 - RNA, 17 nt, Human
uaauacuucuugugugu

SEQ ID NO: 3667551 - RNA, 15 nt, Human
uaauagaaaugucuc

SEQ ID NO: 3667552 - RNA, 22 nt, Human
uaauagaauaaaggcaguuuuc

SEQ ID NO: 3667553 - RNA, 21 nt, Human
uaauagaauauaauuaucgga

SEQ ID NO: 3667554 - RNA, 14 nt, Human
uaauagacaauuua

SEQ ID NO: 3667555 - RNA, 17 nt, Human
gcacuagccaaaccuca

SEQ ID NO: 3667556 - RNA, 20 nt, Human
gcacuagccuuuggcucugg

SEQ ID NO: 3667557 - RNA, 22 nt, Human
gcacuagccuuuggcucuggag

SEQ ID NO: 3667558 - RNA, 21 nt, Human
gcacuaggcacccagcugcca

SEQ ID NO: 3667559 - RNA, 15 nt, Human
gcacuaucuuuaaac

SEQ ID NO: 3667560 - RNA, 15 nt, Human
gcacuauuuauuuac

SEQ ID NO: 3667561 - RNA, 16 nt, Human
gcacucacacaggacc

SEQ ID NO: 3667562 - RNA, 16 nt, Human
gcacucacagaccugg

SEQ ID NO: 3667563 - RNA, 16 nt, Human
gcacucagaagacacu

SEQ ID NO: 3667564 - RNA, 14 nt, Human
gcacucaggcucuc

SEQ ID NO: 3667565 - RNA, 17 nt, Human
gcacucauuuucuauaa

SEQ ID NO: 3667566 - RNA, 20 nt, Human
gcacuccaaccuaaccugug

SEQ ID NO: 3667567 - RNA, 17 nt, Human
gcacuccagccugggca

SEQ ID NO: 3667568 - RNA, 23 nt, Human
gcacuccaugcuuagucacugcc

SEQ ID NO: 3667569 - RNA, 17 nt, Human
gcacucccaccugacac

SEQ ID NO: 3667570 - RNA, 17 nt, Human
gcacucccuccagcaca

SEQ ID NO: 3667571 - RNA, 14 nt, Human
gcacuccggaggua

SEQ ID NO: 3667572 - RNA, 19 nt, Human
gcacuccucccugauguac

SEQ ID NO: 3667573 - RNA, 21 nt, Human
gcacucgggaaaccuggggcu

SEQ ID NO: 3667574 - RNA, 11 nt, Human
gcacucuagau

SEQ ID NO: 3667575 - RNA, 14 nt, Human
gcacucuagccgga

SEQ ID NO: 3667576 - RNA, 18 nt, Human
gcacucuagccggaguga

SEQ ID NO: 3667577 - RNA, 13 nt, Human
gcacucuggcagc

SEQ ID NO: 3667578 - RNA, 14 nt, Human
gcacucuggcagca

SEQ ID NO: 3667579 - RNA, 21 nt, Human
gcacugaaggcuuucagggcc

SEQ ID NO: 3667580 - RNA, 21 nt, Human
gcacugaauaaauuguacagc

SEQ ID NO: 3667581 - RNA, 12 nt, Human
gcacugacauug

SEQ ID NO: 3667582 - RNA, 16 nt, Human
gcacugacccuuccag

SEQ ID NO: 3667583 - RNA, 20 nt, Human
gcacugacugggaccaggca

SEQ ID NO: 3667584 - RNA, 21 nt, Human
gcacugagauauuuauuguuu

SEQ ID NO: 3667585 - RNA, 11 nt, Human
gcacugagccc

SEQ ID NO: 3667586 - RNA, 14 nt, Human
gcacugagcccccc

SEQ ID NO: 3667587 - RNA, 18 nt, Human
gcacugaggaagaacggg

SEQ ID NO: 3667588 - RNA, 13 nt, Human
gcacugagggcca

SEQ ID NO: 3667589 - RNA, 24 nt, Human
gcacugagggccacacuauuacca

SEQ ID NO: 3667590 - RNA, 13 nt, Human
gcacugaugcugc

SEQ ID NO: 3667591 - RNA, 20 nt, Human
gcacugauguuguguuuuua

SEQ ID NO: 3667592 - RNA, 14 nt, Human
gcacugccacuggg

SEQ ID NO: 3667593 - RNA, 15 nt, Human
gcacugccaggaggg

SEQ ID NO: 3667594 - RNA, 17 nt, Human
gcacugccaggagggac

SEQ ID NO: 3667595 - RNA, 13 nt, Human
gcacugcccuggu

SEQ ID NO: 3667596 - RNA, 13 nt, Human
gcacugccucuca

SEQ ID NO: 3667597 - RNA, 19 nt, Human
gcacugccugcucccaucc

SEQ ID NO: 3667598 - RNA, 23 nt, Human
gcacugcuaggcgagugccagga

SEQ ID NO: 3667599 - RNA, 18 nt, Human
gcacugcugcccagccuc

SEQ ID NO: 3667600 - RNA, 21 nt, Human
gcacugcuggguggcccaucc

SEQ ID NO: 3667601 - RNA, 13 nt, Human
gcacugcuuccag

SEQ ID NO: 3667602 - RNA, 17 nt, Human
gcacuggaguccagucu

SEQ ID NO: 3667603 - RNA, 14 nt, Human
gcacuggagugcag

SEQ ID NO: 3667604 - RNA, 23 nt, Human
gcacuggaguggcucgccaggcc

SEQ ID NO: 3667605 - RNA, 17 nt, Human
gcacuggcaaacagggc

SEQ ID NO: 3667606 - RNA, 20 nt, Human
gcacuggcaaacagggccuc

SEQ ID NO: 3667607 - RNA, 23 nt, Human
gcacuggcaaacagggccucugc

SEQ ID NO: 3667608 - RNA, 20 nt, Human
gcacuggcauugucccugug

SEQ ID NO: 3667609 - RNA, 14 nt, Human
gcacuggccccacc

SEQ ID NO: 3667610 - RNA, 16 nt, Human
gcacuggcgaggagag

SEQ ID NO: 3667611 - RNA, 18 nt, Human
gcacugggaggcuccccu

SEQ ID NO: 3667612 - RNA, 14 nt, Human
gcacugggcucccg

SEQ ID NO: 3667613 - RNA, 15 nt, Human
gcacuggggagcccg

SEQ ID NO: 3667614 - RNA, 23 nt, Human
gcacuggggcaggggccgggggc

SEQ ID NO: 3667615 - RNA, 18 nt, Human
gcacuggguugacuuuca

SEQ ID NO: 3667616 - RNA, 24 nt, Human
gcacugguggcccgacagccuggc

SEQ ID NO: 3667617 - RNA, 22 nt, Human
gcacugguggcuugcaguuugc

SEQ ID NO: 3667618 - RNA, 17 nt, Human
gcacuguaguucuaaga

SEQ ID NO: 3667619 - RNA, 15 nt, Human
gcacuguaugcugga

SEQ ID NO: 3667620 - RNA, 20 nt, Human
gcacugucacuuugcucugg

SEQ ID NO: 3667621 - RNA, 17 nt, Human
gcacugucccuugccuc

SEQ ID NO: 3667622 - RNA, 18 nt, Human
gcacugucccuugccuca

SEQ ID NO: 3667623 - RNA, 23 nt, Human
gcacugucccuugccucaaugcc

SEQ ID NO: 3667624 - RNA, 14 nt, Human
gcacuguccugcuc

SEQ ID NO: 3667625 - RNA, 23 nt, Human
uacaacauaaucuaguuuacaga

SEQ ID NO: 3667626 - RNA, 23 nt, Human
uacaaccaagcucucugcaucua

SEQ ID NO: 3667627 - RNA, 21 nt, Human
uacaaccucccucuuguuuug

SEQ ID NO: 3667628 - RNA, 22 nt, Human
uacaaccucccucuuguuuugu

SEQ ID NO: 3667629 - RNA, 15 nt, Human
uacaaccuucauuua

SEQ ID NO: 3667630 - RNA, 15 nt, Human
uacaacggaggccug

SEQ ID NO: 3667631 - RNA, 22 nt, Human
uacaacggagucaaaaauuaaa

SEQ ID NO: 3667632 - RNA, 14 nt, Human
uacaacugaguccu

SEQ ID NO: 3667633 - RNA, 18 nt, Human
uacaacuuaaauaauaaa

SEQ ID NO: 3667634 - RNA, 21 nt, Human
uacaagaagcauuuuguaagu

SEQ ID NO: 3667635 - RNA, 15 nt, Human
uacaagaaguuuauu

SEQ ID NO: 3667636 - RNA, 19 nt, Human
uacaagagcagccuguggc

SEQ ID NO: 3667637 - RNA, 20 nt, Human
uacaagagcagccuguggca

SEQ ID NO: 3667638 - RNA, 21 nt, Human
uacaagauuagaagcugaaaa

SEQ ID NO: 3667639 - RNA, 20 nt, Human
uacaagauugaaaaucuugu

SEQ ID NO: 3667640 - RNA, 21 nt, Human
uacaagccauucuaaggaaau

SEQ ID NO: 3667641 - RNA, 14 nt, Human
uacaagcccccccu

SEQ ID NO: 3667642 - RNA, 16 nt, Human
uacaagcgugagccac

SEQ ID NO: 3667643 - RNA, 19 nt, Human
uacaagcgugagccacugc

SEQ ID NO: 3667644 - RNA, 19 nt, Human
uacaaguaacaaaaauaaa

SEQ ID NO: 3667645 - RNA, 15 nt, Human
uacaaguaguucugu

SEQ ID NO: 3667646 - RNA, 20 nt, Human
uacaaguauacuuauauuuc

SEQ ID NO: 3667647 - RNA, 17 nt, Human
uacaaguauucugccuu

SEQ ID NO: 3667648 - RNA, 14 nt, Human
uacaagucaguagg

SEQ ID NO: 3667649 - RNA, 18 nt, Human
uacaagucaguuucuaca

SEQ ID NO: 3667650 - RNA, 15 nt, Human
uacaaguguauauca

SEQ ID NO: 3667651 - RNA, 16 nt, Human
uacaaguuuauauaua

SEQ ID NO: 3667652 - RNA, 14 nt, Human
uacaaguuucaucc

SEQ ID NO: 3667653 - RNA, 15 nt, Human
uacaaguuucaucca

SEQ ID NO: 3667654 - RNA, 18 nt, Human
uacaaguuucauccagaa

SEQ ID NO: 3667655 - RNA, 21 nt, Human
uacaauaaaacuuugcugcca

SEQ ID NO: 3667656 - RNA, 13 nt, Human
uacaauaaaagua

SEQ ID NO: 3667657 - RNA, 20 nt, Human
uacaauaaaaucuugaaaau

SEQ ID NO: 3667658 - RNA, 13 nt, Human
uacaauaaacuau

SEQ ID NO: 3667659 - RNA, 14 nt, Human
uacaauaaauugcu

SEQ ID NO: 3667660 - RNA, 23 nt, Human
uacaauaaauugcuaauguugcu

SEQ ID NO: 3667661 - RNA, 16 nt, Human
uacaauaauggaaaaa

SEQ ID NO: 3667662 - RNA, 16 nt, Human
uacaauaauucuauga

SEQ ID NO: 3667663 - RNA, 13 nt, Human
uacaauauauaaa

SEQ ID NO: 3667664 - RNA, 20 nt, Human
uacaauauauaaaaauauau

SEQ ID NO: 3667665 - RNA, 15 nt, Human
uacaauauauauucu

SEQ ID NO: 3667666 - RNA, 16 nt, Human
uacaauauguacauuu

SEQ ID NO: 3667667 - RNA, 12 nt, Human
uacaauauuuaa

SEQ ID NO: 3667668 - RNA, 14 nt, Human
uacaauauuuaaaa

SEQ ID NO: 3667669 - RNA, 17 nt, Human
uacaauauuuaaaauuu

SEQ ID NO: 3667670 - RNA, 17 nt, Human
uacaauauuugugugcu

SEQ ID NO: 3667671 - RNA, 15 nt, Human
uacaauauuuuaagc

SEQ ID NO: 3667672 - RNA, 18 nt, Human
uacaauauuuuaagcauu

SEQ ID NO: 3667673 - RNA, 18 nt, Human
uacaaucagcugcuuugu

SEQ ID NO: 3667674 - RNA, 23 nt, Human
uacaaucagcugcuuuguuaccu

SEQ ID NO: 3667675 - RNA, 22 nt, Human
uacaaucauugcugaaaauggu

SEQ ID NO: 3667676 - RNA, 23 nt, Human
uacaaucauugcugaaaauggua

SEQ ID NO: 3667677 - RNA, 15 nt, Human
uacaaucgcaaauca

SEQ ID NO: 3667678 - RNA, 16 nt, Human
uacaaucuauuuauug

SEQ ID NO: 3667679 - RNA, 15 nt, Human
uacaaugaacacuua

SEQ ID NO: 3667680 - RNA, 18 nt, Human
uacaaugacuuuauugca

SEQ ID NO: 3667681 - RNA, 13 nt, Human
uacaauguaauua

SEQ ID NO: 3667682 - RNA, 14 nt, Human
uacaauguaauuau

SEQ ID NO: 3667683 - RNA, 18 nt, Human
uacaauguauuuauuuaa

SEQ ID NO: 3667684 - RNA, 15 nt, Human
uacaaugugaacuuu

SEQ ID NO: 3667685 - RNA, 16 nt, Human
uacaaugugacuuuga

SEQ ID NO: 3667686 - RNA, 17 nt, Human
uacaauguguuuuucuc

SEQ ID NO: 3667687 - RNA, 20 nt, Human
uacaauguguuuuucuccag

SEQ ID NO: 3667688 - RNA, 16 nt, Human
uacaauguucauccca

SEQ ID NO: 3667689 - RNA, 16 nt, Human
uacaauucauuguguu

SEQ ID NO: 3667690 - RNA, 21 nt, Human
uacaauucauuguguuaccug

SEQ ID NO: 3667691 - RNA, 14 nt, Human
uacaauugaaauga

SEQ ID NO: 3667692 - RNA, 20 nt, Human
uacaauugaacuuaaauaaa

SEQ ID NO: 3667693 - RNA, 19 nt, Human
uacaauuucuuuugguuca

SEQ ID NO: 3667694 - RNA, 19 nt, Human
uacaauuuucucccaggaa

SEQ ID NO: 3667695 - RNA, 21 nt, Human
uacaauuuucucccaggaagc

SEQ ID NO: 3667696 - RNA, 12 nt, Human
uacaauuuuguu

SEQ ID NO: 3667697 - RNA, 17 nt, Human
uacaauuuuuuaucaug

SEQ ID NO: 3667698 - RNA, 23 nt, Human
uacaauuuuuuaucaugcauguc

SEQ ID NO: 3667699 - RNA, 19 nt, Human
uacaauuuuuuuuauuagu

SEQ ID NO: 3667700 - RNA, 13 nt, Human
uacacaaaaucaa

SEQ ID NO: 3667701 - RNA, 23 nt, Human
uacacaaaucuauuuaauuagga

SEQ ID NO: 3667702 - RNA, 18 nt, Human
uacacaauagaauuauaa

SEQ ID NO: 3667703 - RNA, 21 nt, Human
uacacaaugguuuucuugugu

SEQ ID NO: 3667704 - RNA, 17 nt, Human
uacacaaugguuuuuaa

SEQ ID NO: 3667705 - RNA, 13 nt, Human
uacacaauucuua

SEQ ID NO: 3667706 - RNA, 16 nt, Human
uacacacacaaagaga

SEQ ID NO: 3667707 - RNA, 18 nt, Human
uacacacacacacacagc

SEQ ID NO: 3667708 - RNA, 19 nt, Human
uacacacacacacacagcc

SEQ ID NO: 3667709 - RNA, 21 nt, Human
uacacacacacacacagccac

SEQ ID NO: 3667710 - RNA, 22 nt, Human
uacacacacacacacagccaca

SEQ ID NO: 3667711 - RNA, 19 nt, Human
uacacacacacgcgugcac

SEQ ID NO: 3667712 - RNA, 15 nt, Human
uacacacacagaugu

SEQ ID NO: 3667713 - RNA, 23 nt, Human
uacacacgcugccuucgguaccc

SEQ ID NO: 3667714 - RNA, 16 nt, Human
uacacacgugcaauuu

SEQ ID NO: 3667715 - RNA, 23 nt, Human
uacacacgugcaauuuguuugug

SEQ ID NO: 3667716 - RNA, 16 nt, Human
uacacacucaaaucaa

SEQ ID NO: 3667717 - RNA, 17 nt, Human
uacacacugcauguuug

SEQ ID NO: 3667718 - RNA, 22 nt, Human
uacacacugcauguuugugauu

SEQ ID NO: 3667719 - RNA, 17 nt, Human
uacacacuuuauuuacu

SEQ ID NO: 3667720 - RNA, 18 nt, Human
uacacagaaacacugccu

SEQ ID NO: 3667721 - RNA, 22 nt, Human
uacacagaucacagcuucagcc

SEQ ID NO: 3667722 - RNA, 17 nt, Human
uacacagcaccagaaug

SEQ ID NO: 3667723 - RNA, 15 nt, Human
uacacagcucuagac

SEQ ID NO: 3667724 - RNA, 22 nt, Human
uacacaggacagggguuccuuc

SEQ ID NO: 3667725 - RNA, 23 nt, Human
uacacaggauccuauucucacca

SEQ ID NO: 3667726 - RNA, 20 nt, Human
uacacagggauguacaaggc

SEQ ID NO: 3667727 - RNA, 16 nt, Human
uacacauacaguuuua

SEQ ID NO: 3667728 - RNA, 18 nt, Human
uacacauauaccuauaau

SEQ ID NO: 3667729 - RNA, 20 nt, Human
uacacauauuugaagggucu

SEQ ID NO: 3667730 - RNA, 22 nt, Human
uacacaucagccaucaacuaaa

SEQ ID NO: 3667731 - RNA, 14 nt, Human
uacacaucuuccac

SEQ ID NO: 3667732 - RNA, 16 nt, Human
uacacauguauccuuu

SEQ ID NO: 3667733 - RNA, 15 nt, Human
uacacauuagauuuu

SEQ ID NO: 3667734 - RNA, 18 nt, Human
uacacauucaauaagcau

SEQ ID NO: 3667735 - RNA, 17 nt, Human
uacacauuugcuacugu

SEQ ID NO: 3667736 - RNA, 15 nt, Human
uacacauuuguacag

SEQ ID NO: 3667737 - RNA, 19 nt, Human
uacacauuuuauuuuauua

SEQ ID NO: 3667738 - RNA, 22 nt, Human
uacacauuuuauuuuauuaugc

SEQ ID NO: 3667739 - RNA, 17 nt, Human
uacacauuuuucagaua

SEQ ID NO: 3667740 - RNA, 19 nt, Human
uacaccacacacaacagcc

SEQ ID NO: 3667741 - RNA, 23 nt, Human
uacaccacacacaacagccaaca

SEQ ID NO: 3667742 - RNA, 15 nt, Human
uacaccacuacauuc

SEQ ID NO: 3667743 - RNA, 18 nt, Human
uacaccacuacauucugu

SEQ ID NO: 3667744 - RNA, 19 nt, Human
uacaccacuacauucuguu

SEQ ID NO: 3667745 - RNA, 12 nt, Human
uacaccacucug

SEQ ID NO: 3667746 - RNA, 16 nt, Human
uacaccauauacuguu

SEQ ID NO: 3667747 - RNA, 19 nt, Human
uacaccauguuugagcuca

SEQ ID NO: 3667748 - RNA, 24 nt, Human
uacaccauguuugagcucagaccc

SEQ ID NO: 3667749 - RNA, 19 nt, Human
uacaccauuaucuuggaaa

SEQ ID NO: 3667750 - RNA, 19 nt, Human
uacacccagaccccaggcu

SEQ ID NO: 3667751 - RNA, 16 nt, Human
uacacccuuuuccagc

SEQ ID NO: 3667752 - RNA, 17 nt, Human
uacaccuaugucauuuc

SEQ ID NO: 3667753 - RNA, 21 nt, Human
uacaccuaugucauuucauuu

SEQ ID NO: 3667754 - RNA, 22 nt, Human
uacaccucguuagggaagagaa

SEQ ID NO: 3667755 - RNA, 23 nt, Human
uacaccuggcugagguuccucug

SEQ ID NO: 3667756 - RNA, 20 nt, Human
uacaccuugccuugcuguuu

SEQ ID NO: 3667757 - RNA, 18 nt, Human
uacaccuuucuccuuugu

SEQ ID NO: 3667758 - RNA, 15 nt, Human
uacacgaaagagaga

SEQ ID NO: 3667759 - RNA, 22 nt, Human
uaacuguuuauauguguugaaa

SEQ ID NO: 3667760 - RNA, 11 nt, Human
uaacuguuuca

SEQ ID NO: 3667761 - RNA, 23 nt, Human
uaacuuaaaaauguaaauauucu

SEQ ID NO: 3667762 - RNA, 14 nt, Human
uaacuuaaauagua

SEQ ID NO: 3667763 - RNA, 14 nt, Human
uaacuuaauaauca

SEQ ID NO: 3667764 - RNA, 17 nt, Human
uaacuuaauaaucaaga

SEQ ID NO: 3667765 - RNA, 14 nt, Human
uaacuuacuuccaa

SEQ ID NO: 3667766 - RNA, 21 nt, Human
uaacuuagacucuaguauuua

SEQ ID NO: 3667767 - RNA, 15 nt, Human
uaacuuaguuuugca

SEQ ID NO: 3667768 - RNA, 16 nt, Human
uaagccccagcaagca

SEQ ID NO: 3667769 - RNA, 22 nt, Human
uaagcccugucgagacacuugc

SEQ ID NO: 3667770 - RNA, 14 nt, Human
uaagcccuugaaga

SEQ ID NO: 3667771 - RNA, 16 nt, Human
uaagccuaaaaguggg

SEQ ID NO: 3667772 - RNA, 15 nt, Human
uaagccuaccugcuc

SEQ ID NO: 3667773 - RNA, 19 nt, Human
uaagccucaaauuugaaca

SEQ ID NO: 3667774 - RNA, 20 nt, Human
gcagcugagaaaaugaguga

SEQ ID NO: 3667775 - RNA, 12 nt, Human
gcagcugagcag

SEQ ID NO: 3667776 - RNA, 14 nt, Human
gcagcugagcaggg

SEQ ID NO: 3667777 - RNA, 19 nt, Human
gcagcugagcagggccggg

SEQ ID NO: 3667778 - RNA, 17 nt, Human
gcagcugauuuuaacaa

SEQ ID NO: 3667779 - RNA, 18 nt, Human
gcagcugauuuuaacaau

SEQ ID NO: 3667780 - RNA, 21 nt, Human
gcagcugccaggagcacggcu

SEQ ID NO: 3667781 - RNA, 17 nt, Human
gcagcugccuccccucc

SEQ ID NO: 3667782 - RNA, 22 nt, Human
gcagcugccuccccuccucugc

SEQ ID NO: 3667783 - RNA, 15 nt, Human
gcagcugcgcgggcu

SEQ ID NO: 3667784 - RNA, 19 nt, Human
gcagcugcgguccacccag

SEQ ID NO: 3667785 - RNA, 23 nt, Human
gcagcugcgguccacccaggagc

SEQ ID NO: 3667786 - RNA, 23 nt, Human
gcagcugcuauccccaucucccu

SEQ ID NO: 3667787 - RNA, 22 nt, Human
gcagcugcuauuuauuuuccua

SEQ ID NO: 3667788 - RNA, 14 nt, Human
gcagcuggacagag

SEQ ID NO: 3667789 - RNA, 22 nt, Human
gcagcugggcccaacccugucu

SEQ ID NO: 3667790 - RNA, 12 nt, Human
gcagcugggcug

SEQ ID NO: 3667791 - RNA, 22 nt, Human
gcagcugucccuugcuugccug

SEQ ID NO: 3667792 - RNA, 17 nt, Human
gcagcuguuagagucca

SEQ ID NO: 3667793 - RNA, 16 nt, Human
gcagcuguugucucuu

SEQ ID NO: 3667794 - RNA, 18 nt, Human
gcagcuguugucucuucu

SEQ ID NO: 3667795 - RNA, 21 nt, Human
gcagcuguuuuaguuaaauuu

SEQ ID NO: 3667796 - RNA, 19 nt, Human
gcagcuuagaguuggccau

SEQ ID NO: 3667797 - RNA, 19 nt, Human
gcagcuuagggcccuggag

SEQ ID NO: 3667798 - RNA, 21 nt, Human
gcagcuuagggcccuggaggc

SEQ ID NO: 3667799 - RNA, 15 nt, Human
gcagcuuauucacaa

SEQ ID NO: 3667800 - RNA, 13 nt, Human
gcagcuuauuguu

SEQ ID NO: 3667801 - RNA, 13 nt, Human
gcagcuuccuguc

SEQ ID NO: 3667802 - RNA, 15 nt, Human
gcagcuucugccacu

SEQ ID NO: 3667803 - RNA, 21 nt, Human
gcagcuucugcccccugcaga

SEQ ID NO: 3667804 - RNA, 21 nt, Human
gcagcuugaggguugggcugg

SEQ ID NO: 3667805 - RNA, 12 nt, Human
gcagcuugcccc

SEQ ID NO: 3667806 - RNA, 14 nt, Human
gcagcuuguagcca

SEQ ID NO: 3667807 - RNA, 15 nt, Human
gcagcuuguagccag

SEQ ID NO: 3667808 - RNA, 20 nt, Human
gcagcuuuaaacucagggac

SEQ ID NO: 3667809 - RNA, 14 nt, Human
gcagcuuuauguuc

SEQ ID NO: 3667810 - RNA, 15 nt, Human
gcagcuuucuagaag

SEQ ID NO: 3667811 - RNA, 23 nt, Human
gcaggaaaaggugauauccauuc

SEQ ID NO: 3667812 - RNA, 21 nt, Human
gcaggaaaguuuacccaugaa

SEQ ID NO: 3667813 - RNA, 18 nt, Human
gcaggaacaaacagggcu

SEQ ID NO: 3667814 - RNA, 20 nt, Human
gcaggaagcauucagagagc

SEQ ID NO: 3667815 - RNA, 18 nt, Human
gcaggaagcucagacugg

SEQ ID NO: 3667816 - RNA, 15 nt, Human
gcaggaagcugcucc

SEQ ID NO: 3667817 - RNA, 16 nt, Human
gcaggaagcugcuccg

SEQ ID NO: 3667818 - RNA, 16 nt, Human
gcaggaagcugugaga

SEQ ID NO: 3667819 - RNA, 13 nt, Human
gcaggaaggagag

SEQ ID NO: 3667820 - RNA, 16 nt, Human
gcaggaaggagagccu

SEQ ID NO: 3667821 - RNA, 23 nt, Human
gcaggaaggagagccugcugcau

SEQ ID NO: 3667822 - RNA, 21 nt, Human
gcaggaaggagcugccuggac

SEQ ID NO: 3667823 - RNA, 17 nt, Human
gcaggaauguguggcag

SEQ ID NO: 3667824 - RNA, 15 nt, Human
gcaggaccagcccac

SEQ ID NO: 3667825 - RNA, 18 nt, Human
gcaggaccagcccacgcu

SEQ ID NO: 3667826 - RNA, 22 nt, Human
gcaggaccagcccacgcugacu

SEQ ID NO: 3667827 - RNA, 20 nt, Human
gcaggaccucugaaacccug

SEQ ID NO: 3667828 - RNA, 20 nt, Human
gcaggaccugccuguagccc

SEQ ID NO: 3667829 - RNA, 19 nt, Human
gcaggaccuucgggcugug

SEQ ID NO: 3667830 - RNA, 14 nt, Human
gcaggacuccaggc

SEQ ID NO: 3667831 - RNA, 17 nt, Human
gcaggacuccaggccca

SEQ ID NO: 3667832 - RNA, 18 nt, Human
gcaggacuccaggcccaa

SEQ ID NO: 3667833 - RNA, 22 nt, Human
gcaggacuccaggcccaaggcu

SEQ ID NO: 3667834 - RNA, 14 nt, Human
gcaggacugauguc

SEQ ID NO: 3667835 - RNA, 19 nt, Human
gcaggacugaugucuccua

SEQ ID NO: 3667836 - RNA, 23 nt, Human
gcaggacugaugucuccuaagca

SEQ ID NO: 3667837 - RNA, 19 nt, Human
gcaggacugcacagcgucc

SEQ ID NO: 3667838 - RNA, 22 nt, Human
gcaggacuuccccggagggcug

SEQ ID NO: 3667839 - RNA, 20 nt, Human
gcaggagaggagagccagag

SEQ ID NO: 3667840 - RNA, 22 nt, Human
gcaggagaggagagccagagaa

SEQ ID NO: 3667841 - RNA, 18 nt, Human
gcaggagauugagaagga

SEQ ID NO: 3667842 - RNA, 22 nt, Human
gcaggagauugagaaggagaga

SEQ ID NO: 3667843 - RNA, 23 nt, Human
gcaggagauugagaaggagagaa

SEQ ID NO: 3667844 - RNA, 14 nt, Human
gcaggagcucagau

SEQ ID NO: 3667845 - RNA, 11 nt, Human
gcaggaggaag

SEQ ID NO: 3667846 - RNA, 12 nt, Human
gcaggaggaagg

SEQ ID NO: 3667847 - RNA, 13 nt, Human
gcaggaggaggug

SEQ ID NO: 3667848 - RNA, 14 nt, Human
gcaggaggaggugc

SEQ ID NO: 3667849 - RNA, 20 nt, Human
gcaggaggaggugccaacag

SEQ ID NO: 3667850 - RNA, 23 nt, Human
gcaggaggauugcuugagcccag

SEQ ID NO: 3667851 - RNA, 18 nt, Human
gcaggaggccccuggccc

SEQ ID NO: 3667852 - RNA, 21 nt, Human
gcaggagggacagucucacca

SEQ ID NO: 3667853 - RNA, 14 nt, Human
gcaggaguagcuga

SEQ ID NO: 3667854 - RNA, 16 nt, Human
gcaggaguagcugagc

SEQ ID NO: 3667855 - RNA, 18 nt, Human
gcaggaguagcugagcuc

SEQ ID NO: 3667856 - RNA, 19 nt, Human
gcaggaucucaccaggcag

SEQ ID NO: 3667857 - RNA, 20 nt, Human
gcaggaucucaccaggcagc

SEQ ID NO: 3667858 - RNA, 21 nt, Human
gcaggaucucaccaggcagcc

SEQ ID NO: 3667859 - RNA, 18 nt, Human
gcaggauucagccggagg

SEQ ID NO: 3667860 - RNA, 20 nt, Human
gcaggauucuuccucccucc

SEQ ID NO: 3667861 - RNA, 19 nt, Human
gcaggauuuguucucuguc

SEQ ID NO: 3667862 - RNA, 15 nt, Human
gcaggcacagcacag

SEQ ID NO: 3667863 - RNA, 20 nt, Human
gcaggcacgggugguccccg

SEQ ID NO: 3667864 - RNA, 23 nt, Human
gcaggcagacacggaucugagaa

SEQ ID NO: 3667865 - RNA, 19 nt, Human
gcaggcagaggcccaggcu

SEQ ID NO: 3667866 - RNA, 20 nt, Human
gcaggcagaggcccaggcug

SEQ ID NO: 3667867 - RNA, 21 nt, Human
gcaggcagaggcccaggcugc

SEQ ID NO: 3667868 - RNA, 20 nt, Human
gcaggcagaucaccugaggu

SEQ ID NO: 3667869 - RNA, 9 nt, Human
gcaggcagc

SEQ ID NO: 3667870 - RNA, 21 nt, Human
gcaggcagccagcaucugggc

SEQ ID NO: 3667871 - RNA, 13 nt, Human
gcaggcagccagg

SEQ ID NO: 3667872 - RNA, 14 nt, Human
gcaggcagccaggc

SEQ ID NO: 3667873 - RNA, 16 nt, Human
gcaggcagccaggcca

SEQ ID NO: 3667874 - RNA, 17 nt, Human
gcaggcagccaggccac

SEQ ID NO: 3667875 - RNA, 13 nt, Human
gcaggcagccuug

SEQ ID NO: 3667876 - RNA, 13 nt, Human
gcaggcagcgcca

SEQ ID NO: 3667877 - RNA, 15 nt, Human
gcaggcaggcuccca

SEQ ID NO: 3667878 - RNA, 14 nt, Human
gcaggcagggcucu

SEQ ID NO: 3667879 - RNA, 15 nt, Human
gcaggcagggcucuc

SEQ ID NO: 3667880 - RNA, 19 nt, Human
gcaggcagggcucuccugg

SEQ ID NO: 3667881 - RNA, 20 nt, Human
gcaggcagggcucuccuggc

SEQ ID NO: 3667882 - RNA, 11 nt, Human
gcaggcagggg

SEQ ID NO: 3667883 - RNA, 14 nt, Human
gcaggcaucugauu

SEQ ID NO: 3667884 - RNA, 19 nt, Human
gcaggcauggcccugggcg

SEQ ID NO: 3667885 - RNA, 20 nt, Human
gcaggccaagagcagaggca

SEQ ID NO: 3667886 - RNA, 21 nt, Human
gcaggccaaggccuucuccuc

SEQ ID NO: 3667887 - RNA, 15 nt, Human
gcaggccaaggucug

SEQ ID NO: 3667888 - RNA, 16 nt, Human
gcaggccaaggucuga

SEQ ID NO: 3667889 - RNA, 21 nt, Human
gcaggccacacuucaaacuac

SEQ ID NO: 3667890 - RNA, 18 nt, Human
gcaggccaccuggcucuc

SEQ ID NO: 3667891 - RNA, 22 nt, Human
gcaggccagcugugguuuucuu

SEQ ID NO: 3667892 - RNA, 17 nt, Human
gcaggccaggccagcug

SEQ ID NO: 3667893 - RNA, 16 nt, Human
gcaggcccacccugcu

SEQ ID NO: 3667894 - RNA, 21 nt, Human
gcaggcccugcacuguccugc

SEQ ID NO: 3667895 - RNA, 12 nt, Human
gcaggcccuggc

SEQ ID NO: 3667896 - RNA, 14 nt, Human
gcaggcccuggccu

SEQ ID NO: 3667897 - RNA, 22 nt, Human
gcaggcgcaagggaggcccagc

SEQ ID NO: 3667898 - RNA, 15 nt, Human
gcaggcggugggcac

SEQ ID NO: 3667899 - RNA, 17 nt, Human
gcaggcuaaggcgugga

SEQ ID NO: 3667900 - RNA, 22 nt, Human
gcaggcuaaggcguggagcugc

SEQ ID NO: 3667901 - RNA, 16 nt, Human
gcaggcuacacugaca

SEQ ID NO: 3667902 - RNA, 15 nt, Human
gcaggcucacugcca

SEQ ID NO: 3667903 - RNA, 12 nt, Human
gcaggcucucag

SEQ ID NO: 3667904 - RNA, 17 nt, Human
gcaggcucucaggccag

SEQ ID NO: 3667905 - RNA, 18 nt, Human
gcaggcucucaggccagc

SEQ ID NO: 3667906 - RNA, 11 nt, Human
gcaggcugaca

SEQ ID NO: 3667907 - RNA, 15 nt, Human
gcaggcugacaucug

SEQ ID NO: 3667908 - RNA, 12 nt, Human
gcaggcugauuu

SEQ ID NO: 3667909 - RNA, 18 nt, Human
gcaggcugccagugccug

SEQ ID NO: 3667910 - RNA, 14 nt, Human
gcaggcuggaguua

SEQ ID NO: 3667911 - RNA, 18 nt, Human
gcaggcuggcaccgccuu

SEQ ID NO: 3667912 - RNA, 14 nt, Human
uacucuuucuguau

SEQ ID NO: 3667913 - RNA, 17 nt, Human
uacucuuugagauagaa

SEQ ID NO: 3667914 - RNA, 22 nt, Human
uacucuuugagauagaagaacu

SEQ ID NO: 3667915 - RNA, 14 nt, Human
uacugaaaacuuca

SEQ ID NO: 3667916 - RNA, 22 nt, Human
uacugaacaaucaaagcacuug

SEQ ID NO: 3667917 - RNA, 16 nt, Human
uacugaaccacuugua

SEQ ID NO: 3667918 - RNA, 23 nt, Human
uacugaaccacuuguagauuuga

SEQ ID NO: 3667919 - RNA, 19 nt, Human
uacugaaggaaaaacacaa

SEQ ID NO: 3667920 - RNA, 20 nt, Human
uacugaaggaaaaacacaag

SEQ ID NO: 3667921 - RNA, 17 nt, Human
uacugaagguaaaauug

SEQ ID NO: 3667922 - RNA, 19 nt, Human
uacugaauuuuuuuguaau

SEQ ID NO: 3667923 - RNA, 23 nt, Human
uacugacacuuugccagaaagca

SEQ ID NO: 3667924 - RNA, 13 nt, Human
uacugacaugugg

SEQ ID NO: 3667925 - RNA, 17 nt, Human
uacugacugagaauaua

SEQ ID NO: 3667926 - RNA, 19 nt, Human
uacugagagugaacaaauu

SEQ ID NO: 3667927 - RNA, 18 nt, Human
uacugagcagugauauuc

SEQ ID NO: 3667928 - RNA, 23 nt, Human
uacugagccuuguaauucuaaau

SEQ ID NO: 3667929 - RNA, 17 nt, Human
uacugagcuucucugug

SEQ ID NO: 3667930 - RNA, 18 nt, Human
uacugagcuucucuguga

SEQ ID NO: 3667931 - RNA, 16 nt, Human
uacugaucaugcauug

SEQ ID NO: 3667932 - RNA, 14 nt, Human
uacugauggaauuu

SEQ ID NO: 3667933 - RNA, 23 nt, Human
uacugauguuccuagugaaagag

SEQ ID NO: 3667934 - RNA, 17 nt, Human
uacugauguuccuuugg

SEQ ID NO: 3667935 - RNA, 22 nt, Human
uacugauuauuuucuucaucca

SEQ ID NO: 3667936 - RNA, 18 nt, Human
uacugauucacugcaugg

SEQ ID NO: 3667937 - RNA, 16 nt, Human
uacugauugagaaguu

SEQ ID NO: 3667938 - RNA, 22 nt, Human
uacugauuugggcugaauguau

SEQ ID NO: 3667939 - RNA, 21 nt, Human
uacugcaaaucaggcuuuugu

SEQ ID NO: 3667940 - RNA, 20 nt, Human
uacugcaccauuuaaaaaca

SEQ ID NO: 3667941 - RNA, 17 nt, Human
uacugcacuccagccug

SEQ ID NO: 3667942 - RNA, 20 nt, Human
uacugcacuccagccugggg

SEQ ID NO: 3667943 - RNA, 17 nt, Human
uacugcagaauacagua

SEQ ID NO: 3667944 - RNA, 22 nt, Human
uacugcagaauacaguaagcug

SEQ ID NO: 3667945 - RNA, 15 nt, Human
uacugcagcaccucc

SEQ ID NO: 3667946 - RNA, 16 nt, Human
uacugcagcaccucca

SEQ ID NO: 3667947 - RNA, 12 nt, Human
uacugcagccuc

SEQ ID NO: 3667948 - RNA, 12 nt, Human
uacugcagggcc

SEQ ID NO: 3667949 - RNA, 14 nt, Human
uacugcagggccag

SEQ ID NO: 3667950 - RNA, 11 nt, Human
uacugcaguug

SEQ ID NO: 3667951 - RNA, 19 nt, Human
uacugcaguugaaagggca

SEQ ID NO: 3667952 - RNA, 15 nt, Human
uacugcauacuuuuu

SEQ ID NO: 3667953 - RNA, 17 nt, Human
uacugcauacuuuuuaa

SEQ ID NO: 3667954 - RNA, 18 nt, Human
uacugcauacuuuuuaaa

SEQ ID NO: 3667955 - RNA, 13 nt, Human
uacugcaugcacu

SEQ ID NO: 3667956 - RNA, 14 nt, Human
uacugcauucuucu

SEQ ID NO: 3667957 - RNA, 17 nt, Human
uacugcauucuucugau

SEQ ID NO: 3667958 - RNA, 11 nt, Human
uacugccaaag

SEQ ID NO: 3667959 - RNA, 12 nt, Human
uacugccagaug

SEQ ID NO: 3667960 - RNA, 21 nt, Human
uacugccagaugcugauguuc

SEQ ID NO: 3667961 - RNA, 20 nt, Human
uacugcccaggccugccugu

SEQ ID NO: 3667962 - RNA, 19 nt, Human
uacugcccggggcagcugc

SEQ ID NO: 3667963 - RNA, 22 nt, Human
uacugcccggggcagcugccag

SEQ ID NO: 3667964 - RNA, 22 nt, Human
uacugccgucagugcugugcug

SEQ ID NO: 3667965 - RNA, 20 nt, Human
uacugccugaauaaagagcc

SEQ ID NO: 3667966 - RNA, 16 nt, Human
uacugccugcuugggg

SEQ ID NO: 3667967 - RNA, 13 nt, Human
uacugccuugaaa

SEQ ID NO: 3667968 - RNA, 19 nt, Human
uacugcgacuuucugccug

SEQ ID NO: 3667969 - RNA, 20 nt, Human
uacugcuacagcaauuucua

SEQ ID NO: 3667970 - RNA, 19 nt, Human
uacugcuagucuuaagaac

SEQ ID NO: 3667971 - RNA, 13 nt, Human
uacugcucugaga

SEQ ID NO: 3667972 - RNA, 20 nt, Human
uacugcugagauacauacag

SEQ ID NO: 3667973 - RNA, 20 nt, Human
uacugcuuaauucaaauaau

SEQ ID NO: 3667974 - RNA, 23 nt, Human
uacugcuucuaccaacuggaagc

SEQ ID NO: 3667975 - RNA, 17 nt, Human
uacugcuuuaaucagaa

SEQ ID NO: 3667976 - RNA, 14 nt, Human
uacuggauuguacu

SEQ ID NO: 3667977 - RNA, 12 nt, Human
uacuggcgugga

SEQ ID NO: 3667978 - RNA, 21 nt, Human
uacuggcguggauuaaacuua

SEQ ID NO: 3667979 - RNA, 23 nt, Human
uacuggcguggauuaaacuuaug

SEQ ID NO: 3667980 - RNA, 18 nt, Human
uacugggcccugagucug

SEQ ID NO: 3667981 - RNA, 22 nt, Human
uacuggggaaacuggccauggc

SEQ ID NO: 3667982 - RNA, 22 nt, Human
uacugggugucauuucauucca

SEQ ID NO: 3667983 - RNA, 23 nt, Human
uacugggugucauuucauuccau

SEQ ID NO: 3667984 - RNA, 23 nt, Human
uaauguugugaauaauuacagug

SEQ ID NO: 3667985 - RNA, 14 nt, Human
uaauguuguuauuu

SEQ ID NO: 3667986 - RNA, 23 nt, Human
uaauguuguuccuuuugaaagaa

SEQ ID NO: 3667987 - RNA, 15 nt, Human
uaauguuuaugagcc

SEQ ID NO: 3667988 - RNA, 18 nt, Human
uaauguuuaugagccaga

SEQ ID NO: 3667989 - RNA, 22 nt, Human
uaauguuuauuaaaugcuucau

SEQ ID NO: 3667990 - RNA, 20 nt, Human
uaauguuuuaaauguacaga

SEQ ID NO: 3667991 - RNA, 13 nt, Human
uaauguuuucaaa

SEQ ID NO: 3667992 - RNA, 14 nt, Human
uaauguuuucaaaa

SEQ ID NO: 3667993 - RNA, 13 nt, Human
uaauguuuucuuu

SEQ ID NO: 3667994 - RNA, 18 nt, Human
uaauguuuucuuugcaaa

SEQ ID NO: 3667995 - RNA, 20 nt, Human
uaauguuuucuuugcaaagu

SEQ ID NO: 3667996 - RNA, 21 nt, Human
uaauguuuucuuugcaaagua

SEQ ID NO: 3667997 - RNA, 16 nt, Human
uaauguuuuuaaauau

SEQ ID NO: 3667998 - RNA, 16 nt, Human
uaauguuuuuaauauu

SEQ ID NO: 3667999 - RNA, 21 nt, Human
uaauguuuuuugccacagcuu

SEQ ID NO: 3668000 - RNA, 18 nt, Human
uaauuaaaaaguuaaucu

SEQ ID NO: 3668001 - RNA, 12 nt, Human
uaauuaaagugu

SEQ ID NO: 3668002 - RNA, 20 nt, Human
uaauuaacauauaauauaug

SEQ ID NO: 3668003 - RNA, 17 nt, Human
uaauuaacauguuaaac

SEQ ID NO: 3668004 - RNA, 18 nt, Human
uaauuaacauguuaaacc

SEQ ID NO: 3668005 - RNA, 21 nt, Human
uaauuaacauguuaaaccaug

SEQ ID NO: 3668006 - RNA, 19 nt, Human
uaauuaaccuuacuaauua

SEQ ID NO: 3668007 - RNA, 21 nt, Human
uaauuaaguaaacuaaugagu

SEQ ID NO: 3668008 - RNA, 20 nt, Human
uaauuaaguacuauguauca

SEQ ID NO: 3668009 - RNA, 17 nt, Human
uaauuaauauauuaaaa

SEQ ID NO: 3668010 - RNA, 15 nt, Human
uaauuaaucaugaau

SEQ ID NO: 3668011 - RNA, 21 nt, Human
uaauuaaucaugaauguguaa

SEQ ID NO: 3668012 - RNA, 20 nt, Human
uaauuaaugaaauaucugua

SEQ ID NO: 3668013 - RNA, 21 nt, Human
uaauuaaugaaauaucuguau

SEQ ID NO: 3668014 - RNA, 21 nt, Human
uaauuaauugggccagcuuuu

SEQ ID NO: 3668015 - RNA, 19 nt, Human
uaauuacagugccuaaaau

SEQ ID NO: 3668016 - RNA, 22 nt, Human
uaauuacagugccuaaaauaag

SEQ ID NO: 3668017 - RNA, 17 nt, Human
uaauuaccaaccuguua

SEQ ID NO: 3668018 - RNA, 15 nt, Human
uaauuacgauaagga

SEQ ID NO: 3668019 - RNA, 20 nt, Human
uaauuacgauaaggaagaaa

SEQ ID NO: 3668020 - RNA, 22 nt, Human
uaauuacuuauuguauuuaugu

SEQ ID NO: 3668021 - RNA, 17 nt, Human
uaauuagauccauuaau

SEQ ID NO: 3668022 - RNA, 18 nt, Human
uaauuagauccauuaauu

SEQ ID NO: 3668023 - RNA, 13 nt, Human
uaauuagguuaac

SEQ ID NO: 3668024 - RNA, 14 nt, Human
uaauuagugccacu

SEQ ID NO: 3668025 - RNA, 19 nt, Human
uaauuagugccacuuaaug

SEQ ID NO: 3668026 - RNA, 12 nt, Human
uaauuagugcua

SEQ ID NO: 3668027 - RNA, 15 nt, Human
uaauuagugcuaagu

SEQ ID NO: 3668028 - RNA, 20 nt, Human
uaauuagugcuaagugugaa

SEQ ID NO: 3668029 - RNA, 21 nt, Human
uaauuagugcuaagugugaac

SEQ ID NO: 3668030 - RNA, 14 nt, Human
uaauuauauaacug

SEQ ID NO: 3668031 - RNA, 19 nt, Human
uaauuauaucugaggaauu

SEQ ID NO: 3668032 - RNA, 21 nt, Human
uaauuauaucugaggaauucu

SEQ ID NO: 3668033 - RNA, 14 nt, Human
uaauuauccaggaa

SEQ ID NO: 3668034 - RNA, 21 nt, Human
uaauuaucggaagcagugccu

SEQ ID NO: 3668035 - RNA, 18 nt, Human
uaauuaucgggaacagug

SEQ ID NO: 3668036 - RNA, 19 nt, Human
uaauuaucgggaacagugu

SEQ ID NO: 3668037 - RNA, 20 nt, Human
uaauuaucgggaacaguguu

SEQ ID NO: 3668038 - RNA, 21 nt, Human
uaauuaugccuuuuuugauca

SEQ ID NO: 3668039 - RNA, 17 nt, Human
uaauuauggagucauuu

SEQ ID NO: 3668040 - RNA, 15 nt, Human
uaauuauguuauuga

SEQ ID NO: 3668041 - RNA, 15 nt, Human
uaauuauuauaaaaa

SEQ ID NO: 3668042 - RNA, 19 nt, Human
uaauuauuauaaaaauauu

SEQ ID NO: 3668043 - RNA, 13 nt, Human
uaauuauuauuaa

SEQ ID NO: 3668044 - RNA, 12 nt, Human
uaauuauuauuu

SEQ ID NO: 3668045 - RNA, 22 nt, Human
uaauuauuauuuauauauguau

SEQ ID NO: 3668046 - RNA, 22 nt, Human
uaauuauuguuuauauuuucaa

SEQ ID NO: 3668047 - RNA, 16 nt, Human
uaauuauuuauguaug

SEQ ID NO: 3668048 - RNA, 18 nt, Human
uaauuauuuauguauggu

SEQ ID NO: 3668049 - RNA, 17 nt, Human
uaauuauuuauuacaua

SEQ ID NO: 3668050 - RNA, 18 nt, Human
uaauuauuuuaauuaggu

SEQ ID NO: 3668051 - RNA, 16 nt, Human
uaauuauuuugguacu

SEQ ID NO: 3668052 - RNA, 21 nt, Human
uaauucaaagcaccaaaauaa

SEQ ID NO: 3668053 - RNA, 22 nt, Human
uaauucaaagcucuauuaagau

SEQ ID NO: 3668054 - RNA, 21 nt, Human
uaauucacagugcucuuuucu

SEQ ID NO: 3668055 - RNA, 19 nt, Human
uaauuucugccauuucaug

SEQ ID NO: 3668056 - RNA, 18 nt, Human
uaauuucugucagaaugc

SEQ ID NO: 3668057 - RNA, 20 nt, Human
uaauuucuucaaaauguaua

SEQ ID NO: 3668058 - RNA, 21 nt, Human
uaauuucuucaaaauguauau

SEQ ID NO: 3668059 - RNA, 18 nt, Human
uaauuucuuugccuguuc

SEQ ID NO: 3668060 - RNA, 22 nt, Human
uaauuugaaaacauaaucugca

SEQ ID NO: 3668061 - RNA, 20 nt, Human
uaauuugaagguagaauguu

SEQ ID NO: 3668062 - RNA, 12 nt, Human
uaauuugaucuu

SEQ ID NO: 3668063 - RNA, 17 nt, Human
uaauuugaugagguauu

SEQ ID NO: 3668064 - RNA, 20 nt, Human
uaauuugaugagguauuuuu

SEQ ID NO: 3668065 - RNA, 16 nt, Human
uaauuugauuaacaaa

SEQ ID NO: 3668066 - RNA, 12 nt, Human
uaauuugcauua

SEQ ID NO: 3668067 - RNA, 17 nt, Human
uaauuugcauuaaauuc

SEQ ID NO: 3668068 - RNA, 22 nt, Human
uaauuugccaaaauaaugucuu

SEQ ID NO: 3668069 - RNA, 20 nt, Human
uaauuuggaaacuaauaaaa

SEQ ID NO: 3668070 - RNA, 23 nt, Human
uaauuuggaaacuaauaaaauau

SEQ ID NO: 3668071 - RNA, 17 nt, Human
uaauuuggagcacaaaa

SEQ ID NO: 3668072 - RNA, 12 nt, Human
uaauuuggcagg

SEQ ID NO: 3668073 - RNA, 15 nt, Human
uaauuugguuuucac

SEQ ID NO: 3668074 - RNA, 13 nt, Human
uaauuuguaaagu

SEQ ID NO: 3668075 - RNA, 16 nt, Human
uaauuuguaaaguugg

SEQ ID NO: 3668076 - RNA, 18 nt, Human
uaauuugugauacaaugc

SEQ ID NO: 3668077 - RNA, 19 nt, Human
uaauuugugauacaaugcu

SEQ ID NO: 3668078 - RNA, 13 nt, Human
uaauuuguguaau

SEQ ID NO: 3668079 - RNA, 20 nt, Human
uaauuuguguaauaaagugu

SEQ ID NO: 3668080 - RNA, 21 nt, Human
uaauuuguguaauaaaguguu

SEQ ID NO: 3668081 - RNA, 15 nt, Human
uaauuuguguguuuu

SEQ ID NO: 3668082 - RNA, 21 nt, Human
uaauuuguuggggcuuuacau

SEQ ID NO: 3668083 - RNA, 15 nt, Human
uaauuuuaaaaaugg

SEQ ID NO: 3668084 - RNA, 14 nt, Human
uaauuuuaaagugc

SEQ ID NO: 3668085 - RNA, 22 nt, Human
uaauuuuaaccaaaacaugucu

SEQ ID NO: 3668086 - RNA, 15 nt, Human
uaauuuuacacauua

SEQ ID NO: 3668087 - RNA, 18 nt, Human
uaauuuuacacgcuuuug

SEQ ID NO: 3668088 - RNA, 21 nt, Human
uaauuuuacacgcuuuuguga

SEQ ID NO: 3668089 - RNA, 23 nt, Human
uaauuuuaguauucauucugcau

SEQ ID NO: 3668090 - RNA, 15 nt, Human
uaauuuuauuccaga

SEQ ID NO: 3668091 - RNA, 14 nt, Human
uaauuuuauuuugu

SEQ ID NO: 3668092 - RNA, 17 nt, Human
uaauuuuccuaauaaag

SEQ ID NO: 3668093 - RNA, 22 nt, Human
uaauuuuccuuuaauaugaaau

SEQ ID NO: 3668094 - RNA, 12 nt, Human
uaauuuucuacc

SEQ ID NO: 3668095 - RNA, 12 nt, Human
uaauuuucucaa

SEQ ID NO: 3668096 - RNA, 13 nt, Human
uaauuuuggaauu

SEQ ID NO: 3668097 - RNA, 18 nt, Human
uaauuuugguuguauucu

SEQ ID NO: 3668098 - RNA, 16 nt, Human
uaauuuuguaaaggug

SEQ ID NO: 3668099 - RNA, 13 nt, Human
uaauuuuguauuu

SEQ ID NO: 3668100 - RNA, 15 nt, Human
uaauuuuguauuuuc

SEQ ID NO: 3668101 - RNA, 21 nt, Human
uaauuuuguauuuuccaagug

SEQ ID NO: 3668102 - RNA, 13 nt, Human
uaauuuugugaag

SEQ ID NO: 3668103 - RNA, 18 nt, Human
uaauuuugugaagcaaaa

SEQ ID NO: 3668104 - RNA, 17 nt, Human
uaauuuuuacagaauug

SEQ ID NO: 3668105 - RNA, 22 nt, Human
uaauuuuuacagaauugcuugu

SEQ ID NO: 3668106 - RNA, 21 nt, Human
uaauuuuuacccuaaugucuu

SEQ ID NO: 3668107 - RNA, 12 nt, Human
uaauuuuuauau

SEQ ID NO: 3668108 - RNA, 18 nt, Human
uaauuuuuauauuugaaa

SEQ ID NO: 3668109 - RNA, 18 nt, Human
uaauuuuuauuucuuccu

SEQ ID NO: 3668110 - RNA, 17 nt, Human
uaauuuuucacuucaaa

SEQ ID NO: 3668111 - RNA, 13 nt, Human
uaauuuuuccaac

SEQ ID NO: 3668112 - RNA, 16 nt, Human
uaauuuuuccuauauu

SEQ ID NO: 3668113 - RNA, 12 nt, Human
uaauuuuucugu

SEQ ID NO: 3668114 - RNA, 20 nt, Human
uaauuuuugauacuaagcau

SEQ ID NO: 3668115 - RNA, 17 nt, Human
uaauuuuuguauuauuu

SEQ ID NO: 3668116 - RNA, 21 nt, Human
uaauuuuuguauuuuuaguag

SEQ ID NO: 3668117 - RNA, 13 nt, Human
uaauuuuuuacua

SEQ ID NO: 3668118 - RNA, 17 nt, Human
uaauuuuuuauucaagu

SEQ ID NO: 3668119 - RNA, 16 nt, Human
uaauuuuuugguacaa

SEQ ID NO: 3668120 - RNA, 14 nt, Human
uaauuuuuuuaauu

SEQ ID NO: 3668121 - RNA, 21 nt, Human
uaauuuuuuuauguuuuguuu

SEQ ID NO: 3668122 - RNA, 14 nt, Human
uaauuuuuuuauug

SEQ ID NO: 3668123 - RNA, 15 nt, Human
uaauuuuuuuauugu

SEQ ID NO: 3668124 - RNA, 16 nt, Human
uaauuuuuuuauuguu

SEQ ID NO: 3668125 - RNA, 18 nt, Human
uaauuuuuuugagacaga

SEQ ID NO: 3668126 - RNA, 18 nt, Human
uaauuuuuuuuucauaga

SEQ ID NO: 3668127 - RNA, 13 nt, Human
uacaaaaacacag

SEQ ID NO: 3668128 - RNA, 16 nt, Human
uacaaaaacacagcaa

SEQ ID NO: 3668129 - RNA, 15 nt, Human
uacaaaaagcauaaa

SEQ ID NO: 3668130 - RNA, 14 nt, Human
uacaaaaauaaauu

SEQ ID NO: 3668131 - RNA, 14 nt, Human
uacaaaaauauaaa

SEQ ID NO: 3668132 - RNA, 19 nt, Human
uacaaaaaucagccagaca

SEQ ID NO: 3668133 - RNA, 12 nt, Human
uacaaaacauua

SEQ ID NO: 3668134 - RNA, 14 nt, Human
uacaaaacauuaaa

SEQ ID NO: 3668135 - RNA, 13 nt, Human
uacaaaagaugua

SEQ ID NO: 3668136 - RNA, 11 nt, Human
uacaaaauaaa

SEQ ID NO: 3668137 - RNA, 20 nt, Human
uacaaaauaaacaaauaaca

SEQ ID NO: 3668138 - RNA, 19 nt, Human
uacaaaauaaaguuacauu

SEQ ID NO: 3668139 - RNA, 18 nt, Human
uacaaaauguaacuguua

SEQ ID NO: 3668140 - RNA, 17 nt, Human
uacaaacaagcauauaa

SEQ ID NO: 3668141 - RNA, 14 nt, Human
uacaaacaaucucu

SEQ ID NO: 3668142 - RNA, 12 nt, Human
uacaaacaaugg

SEQ ID NO: 3668143 - RNA, 17 nt, Human
uacaaacaugugguuaa

SEQ ID NO: 3668144 - RNA, 22 nt, Human
uacaaacugcaauagagacugu

SEQ ID NO: 3668145 - RNA, 13 nt, Human
uacaaagaaauaa

SEQ ID NO: 3668146 - RNA, 19 nt, Human
uacaaagaaccaagaaaaa

SEQ ID NO: 3668147 - RNA, 14 nt, Human
uacaaagaagacau

SEQ ID NO: 3668148 - RNA, 15 nt, Human
uacaaagaagacaug

SEQ ID NO: 3668149 - RNA, 21 nt, Human
uacaaagagguguacagguac

SEQ ID NO: 3668150 - RNA, 17 nt, Human
uacaaagcccuuuuaua

SEQ ID NO: 3668151 - RNA, 17 nt, Human
uacaaagcgugcacaag

SEQ ID NO: 3668152 - RNA, 17 nt, Human
uacaaaggcuguauuca

SEQ ID NO: 3668153 - RNA, 18 nt, Human
uacaaaggcuuauuaauu

SEQ ID NO: 3668154 - RNA, 16 nt, Human
gcauugcucuggaucu

SEQ ID NO: 3668155 - RNA, 20 nt, Human
gcauugcuuucugaaauuag

SEQ ID NO: 3668156 - RNA, 16 nt, Human
gcauuggaagacccca

SEQ ID NO: 3668157 - RNA, 17 nt, Human
gcauuggauacagcagu

SEQ ID NO: 3668158 - RNA, 15 nt, Human
gcauuggcagcaggu

SEQ ID NO: 3668159 - RNA, 13 nt, Human
gcauugggauuuu

SEQ ID NO: 3668160 - RNA, 21 nt, Human
gcauuguaagcguauggcuuu

SEQ ID NO: 3668161 - RNA, 12 nt, Human
gcauuguccucu

SEQ ID NO: 3668162 - RNA, 17 nt, Human
gcauugugauuggccug

SEQ ID NO: 3668163 - RNA, 16 nt, Human
gcauuguugagguggu

SEQ ID NO: 3668164 - RNA, 12 nt, Human
gcauuuaaaaga

SEQ ID NO: 3668165 - RNA, 23 nt, Human
gcauuuaagaauugccagucuuu

SEQ ID NO: 3668166 - RNA, 17 nt, Human
gcauuuacuuugaauuu

SEQ ID NO: 3668167 - RNA, 18 nt, Human
gcauuuaugguaaucaua

SEQ ID NO: 3668168 - RNA, 16 nt, Human
gcauuuauuugugaug

SEQ ID NO: 3668169 - RNA, 12 nt, Human
gcauuucagaaa

SEQ ID NO: 3668170 - RNA, 21 nt, Human
gcauuucagaaagccuuucau

SEQ ID NO: 3668171 - RNA, 20 nt, Human
gcauuucauucuucucuagc

SEQ ID NO: 3668172 - RNA, 15 nt, Human
gcauuucccacccug

SEQ ID NO: 3668173 - RNA, 12 nt, Human
gcauuuccuggg

SEQ ID NO: 3668174 - RNA, 18 nt, Human
gcauuucugaauagaaau

SEQ ID NO: 3668175 - RNA, 21 nt, Human
gcauuugaggucuguucuuuc

SEQ ID NO: 3668176 - RNA, 14 nt, Human
gcauuugaguuuau

SEQ ID NO: 3668177 - RNA, 20 nt, Human
gcauuugauaaugauaaaac

SEQ ID NO: 3668178 - RNA, 21 nt, Human
gcauuugauaaugauaaaaca

SEQ ID NO: 3668179 - RNA, 21 nt, Human
gcauuugaucuguugcaagcc

SEQ ID NO: 3668180 - RNA, 22 nt, Human
gcauuuggauuggggucccucu

SEQ ID NO: 3668181 - RNA, 16 nt, Human
gcauuugguuuuucac

SEQ ID NO: 3668182 - RNA, 17 nt, Human
gcauuuguaaauauuaa

SEQ ID NO: 3668183 - RNA, 11 nt, Human
gcauuugucua

SEQ ID NO: 3668184 - RNA, 12 nt, Human
gcauuugugaaa

SEQ ID NO: 3668185 - RNA, 13 nt, Human
gcauuugugaggc

SEQ ID NO: 3668186 - RNA, 13 nt, Human
gcauuugugauca

SEQ ID NO: 3668187 - RNA, 21 nt, Human
gcauuugugcuagaaauuuuc

SEQ ID NO: 3668188 - RNA, 15 nt, Human
gcauuugugucaucu

SEQ ID NO: 3668189 - RNA, 15 nt, Human
gcauuuguguguuac

SEQ ID NO: 3668190 - RNA, 16 nt, Human
gcauuuguguugaaga

SEQ ID NO: 3668191 - RNA, 12 nt, Human
gcauuuguucac

SEQ ID NO: 3668192 - RNA, 18 nt, Human
gcauuuguugguuuauca

SEQ ID NO: 3668193 - RNA, 18 nt, Human
gcauuuguuuauguaauu

SEQ ID NO: 3668194 - RNA, 20 nt, Human
gcauuuguuuauguaauuuc

SEQ ID NO: 3668195 - RNA, 16 nt, Human
gcauuuuauugcuuga

SEQ ID NO: 3668196 - RNA, 18 nt, Human
gcauuuucaccccacccu

SEQ ID NO: 3668197 - RNA, 20 nt, Human
gcauuuucccccuuggcucu

SEQ ID NO: 3668198 - RNA, 21 nt, Human
gcauuuuccucugcuuugaaa

SEQ ID NO: 3668199 - RNA, 17 nt, Human
gcauuuucugcaucucc

SEQ ID NO: 3668200 - RNA, 18 nt, Human
gcauuuucugcaucucca

SEQ ID NO: 3668201 - RNA, 11 nt, Human
uaccucccucc

SEQ ID NO: 3668202 - RNA, 12 nt, Human
uaccucccuccc

SEQ ID NO: 3668203 - RNA, 15 nt, Human
uaccucccuugccuu

SEQ ID NO: 3668204 - RNA, 13 nt, Human
uaccuccucaggg

SEQ ID NO: 3668205 - RNA, 17 nt, Human
uaccuccucagggaugg

SEQ ID NO: 3668206 - RNA, 23 nt, Human
uaccuccucagggauggccguug

SEQ ID NO: 3668207 - RNA, 19 nt, Human
uaccuccuccccccuccuc

SEQ ID NO: 3668208 - RNA, 11 nt, Human
uaccuccuccu

SEQ ID NO: 3668209 - RNA, 19 nt, Human
uaccuccucucaguguuuu

SEQ ID NO: 3668210 - RNA, 16 nt, Human
uaccuccugcccagga

SEQ ID NO: 3668211 - RNA, 18 nt, Human
uaccucggugccuuccuc

SEQ ID NO: 3668212 - RNA, 15 nt, Human
uaccucuauauacca

SEQ ID NO: 3668213 - RNA, 12 nt, Human
uaccucucuguc

SEQ ID NO: 3668214 - RNA, 21 nt, Human
uaccucucuuauagaauauuu

SEQ ID NO: 3668215 - RNA, 16 nt, Human
gccagaugcugauguu

SEQ ID NO: 3668216 - RNA, 19 nt, Human
gccagaugcugauguucag

SEQ ID NO: 3668217 - RNA, 12 nt, Human
gccagaugcugc

SEQ ID NO: 3668218 - RNA, 14 nt, Human
gccagauggggccu

SEQ ID NO: 3668219 - RNA, 24 nt, Human
gccagauucuuuccugaggcuggg

SEQ ID NO: 3668220 - RNA, 13 nt, Human
gccagauuucacu

SEQ ID NO: 3668221 - RNA, 18 nt, Human
gccagauuucacucuccu

SEQ ID NO: 3668222 - RNA, 19 nt, Human
gccagauuuuccugaaaac

SEQ ID NO: 3668223 - RNA, 12 nt, Human
gccagauuuuuu

SEQ ID NO: 3668224 - RNA, 13 nt, Human
gccagauuuuuua

SEQ ID NO: 3668225 - RNA, 23 nt, Human
gccagcaaagaggacucgcuugu

SEQ ID NO: 3668226 - RNA, 17 nt, Human
gccagcaacacagagca

SEQ ID NO: 3668227 - RNA, 19 nt, Human
gccagcaagaguuaggggc

SEQ ID NO: 3668228 - RNA, 20 nt, Human
gccagcacagaaacagagga

SEQ ID NO: 3668229 - RNA, 15 nt, Human
gccagcaccggacca

SEQ ID NO: 3668230 - RNA, 19 nt, Human
gccagcaccggaccagccu

SEQ ID NO: 3668231 - RNA, 15 nt, Human
gccagcagacauugu

SEQ ID NO: 3668232 - RNA, 14 nt, Human
gccagcagcaccug

SEQ ID NO: 3668233 - RNA, 19 nt, Human
gccagcagcaccugcccua

SEQ ID NO: 3668234 - RNA, 13 nt, Human
gccagcagcagca

SEQ ID NO: 3668235 - RNA, 15 nt, Human
gccagcagcagcagg

SEQ ID NO: 3668236 - RNA, 17 nt, Human
gccagcagccagcucuc

SEQ ID NO: 3668237 - RNA, 18 nt, Human
gccagcaggcucucaggc

SEQ ID NO: 3668238 - RNA, 19 nt, Human
gccagcaggcucucaggcc

SEQ ID NO: 3668239 - RNA, 19 nt, Human
gccagccaaacacacagaa

SEQ ID NO: 3668240 - RNA, 15 nt, Human
gccagccaagcucug

SEQ ID NO: 3668241 - RNA, 16 nt, Human
gccagccaagcucugc

SEQ ID NO: 3668242 - RNA, 19 nt, Human
gccagccaagcucugcagu

SEQ ID NO: 3668243 - RNA, 16 nt, Human
gccagccacucuacca

SEQ ID NO: 3668244 - RNA, 18 nt, Human
gccagccaggcgggcuca

SEQ ID NO: 3668245 - RNA, 17 nt, Human
gccagccccacacagcu

SEQ ID NO: 3668246 - RNA, 17 nt, Human
gccagccccggcccugg

SEQ ID NO: 3668247 - RNA, 16 nt, Human
gccagccccucccacc

SEQ ID NO: 3668248 - RNA, 15 nt, Human
gccagccccucuucc

SEQ ID NO: 3668249 - RNA, 20 nt, Human
gccagccccucuuccccaau

SEQ ID NO: 3668250 - RNA, 20 nt, Human
gccagccccuggccccagga

SEQ ID NO: 3668251 - RNA, 20 nt, Human
gccagccccuuagacagagg

SEQ ID NO: 3668252 - RNA, 10 nt, Human
gccagcccuc

SEQ ID NO: 3668253 - RNA, 17 nt, Human
gccagcccucccugucc

SEQ ID NO: 3668254 - RNA, 14 nt, Human
gccagcccugccug

SEQ ID NO: 3668255 - RNA, 17 nt, Human
gccagcccugccuggag

SEQ ID NO: 3668256 - RNA, 18 nt, Human
gccagcccugccuggagg

SEQ ID NO: 3668257 - RNA, 20 nt, Human
gccagcccugccuggaggac

SEQ ID NO: 3668258 - RNA, 24 nt, Human
gccagccgagcaggaggccuagga

SEQ ID NO: 3668259 - RNA, 22 nt, Human
gccagccgcucuccugccacau

SEQ ID NO: 3668260 - RNA, 20 nt, Human
gccagccgugaugcucaggc

SEQ ID NO: 3668261 - RNA, 18 nt, Human
gccagccuccgagaggga

SEQ ID NO: 3668262 - RNA, 12 nt, Human
gccagccuccuc

SEQ ID NO: 3668263 - RNA, 13 nt, Human
gccagccuccucu

SEQ ID NO: 3668264 - RNA, 17 nt, Human
gccagccugaccuuccu

SEQ ID NO: 3668265 - RNA, 22 nt, Human
gccagccugaccuuccuuccug

SEQ ID NO: 3668266 - RNA, 11 nt, Human
gccagccuggc

SEQ ID NO: 3668267 - RNA, 17 nt, Human
gccagccuggccuccug

SEQ ID NO: 3668268 - RNA, 20 nt, Human
gccagccuggccuccugccu

SEQ ID NO: 3668269 - RNA, 14 nt, Human
gccagccuggcugg

SEQ ID NO: 3668270 - RNA, 20 nt, Human
gccagccuggggccuggcag

SEQ ID NO: 3668271 - RNA, 14 nt, Human
gccagccuugacca

SEQ ID NO: 3668272 - RNA, 21 nt, Human
gccagccuugaccauucucca

SEQ ID NO: 3668273 - RNA, 22 nt, Human
gccagccuugaccauucuccac

SEQ ID NO: 3668274 - RNA, 17 nt, Human
gccagccuugagcccug

SEQ ID NO: 3668275 - RNA, 20 nt, Human
gccagccuugagcccuggcu

SEQ ID NO: 3668276 - RNA, 12 nt, Human
gccagcgaacuu

SEQ ID NO: 3668277 - RNA, 16 nt, Human
gccagcgccucccucc

SEQ ID NO: 3668278 - RNA, 23 nt, Human
gccagcgccucccuccaccccag

SEQ ID NO: 3668279 - RNA, 19 nt, Human
gccagcgucggucugugcc

SEQ ID NO: 3668280 - RNA, 17 nt, Human
gccagcucacagugcug

SEQ ID NO: 3668281 - RNA, 13 nt, Human
gccagcucuguau

SEQ ID NO: 3668282 - RNA, 15 nt, Human
gccagcucuguauca

SEQ ID NO: 3668283 - RNA, 17 nt, Human
gccagcucuuccuagcu

SEQ ID NO: 3668284 - RNA, 16 nt, Human
gccagcugaugacuca

SEQ ID NO: 3668285 - RNA, 18 nt, Human
gccagcugaugacucaag

SEQ ID NO: 3668286 - RNA, 14 nt, Human
gccagcugcagcug

SEQ ID NO: 3668287 - RNA, 20 nt, Human
gccagcugcaggaaucaaaa

SEQ ID NO: 3668288 - RNA, 18 nt, Human
gccagcugcaucuacuca

SEQ ID NO: 3668289 - RNA, 19 nt, Human
gccagcugcaucuacucag

SEQ ID NO: 3668290 - RNA, 22 nt, Human
gccagcugcaucuacucaggcc

SEQ ID NO: 3668291 - RNA, 18 nt, Human
gccagcugccccagccag

SEQ ID NO: 3668292 - RNA, 15 nt, Human
gccagcugcccuaug

SEQ ID NO: 3668293 - RNA, 22 nt, Human
gccagcugcccuaugggccugc

SEQ ID NO: 3668294 - RNA, 13 nt, Human
gccagcugccucc

SEQ ID NO: 3668295 - RNA, 17 nt, Human
gccagcuggaggcaggg

SEQ ID NO: 3668296 - RNA, 14 nt, Human
gccagcuggcagca

SEQ ID NO: 3668297 - RNA, 13 nt, Human
gccagcuggccuu

SEQ ID NO: 3668298 - RNA, 19 nt, Human
gccagcugggaucugacug

SEQ ID NO: 3668299 - RNA, 20 nt, Human
gccagcuuguuuacaugcuu

SEQ ID NO: 3668300 - RNA, 23 nt, Human
gccagcuuguuuacaugcuuauu

SEQ ID NO: 3668301 - RNA, 12 nt, Human
gccaggaagcca

SEQ ID NO: 3668302 - RNA, 15 nt, Human
gccaggaagccagca

SEQ ID NO: 3668303 - RNA, 18 nt, Human
gccaggaagccagcaggc

SEQ ID NO: 3668304 - RNA, 19 nt, Human
gccaggaaguagcacaggc

SEQ ID NO: 3668305 - RNA, 13 nt, Human
gccaggaauauug

SEQ ID NO: 3668306 - RNA, 14 nt, Human
gccaggacaggccc

SEQ ID NO: 3668307 - RNA, 19 nt, Human
gccaggacagucagcucuc

SEQ ID NO: 3668308 - RNA, 22 nt, Human
gccaggacaugcaauaaaauuu

SEQ ID NO: 3668309 - RNA, 21 nt, Human
gccaggacuccccaggccagg

SEQ ID NO: 3668310 - RNA, 14 nt, Human
gccaggacucugca

SEQ ID NO: 3668311 - RNA, 16 nt, Human
gccaggacugagcccc

SEQ ID NO: 3668312 - RNA, 9 nt, Human
gccaggaga

SEQ ID NO: 3668313 - RNA, 15 nt, Human
gccaggagaagcuca

SEQ ID NO: 3668314 - RNA, 17 nt, Human
gccaggagagcuuaggg

SEQ ID NO: 3668315 - RNA, 21 nt, Human
gccaggagcacggcucugucc

SEQ ID NO: 3668316 - RNA, 21 nt, Human
gccaggagcaggcacgggugg

SEQ ID NO: 3668317 - RNA, 20 nt, Human
gccaggagcucuucaggccu

SEQ ID NO: 3668318 - RNA, 23 nt, Human
gccaggagcugggcagaaggcca

SEQ ID NO: 3668319 - RNA, 23 nt, Human
gccaggagcugucaccaaggaaa

SEQ ID NO: 3668320 - RNA, 13 nt, Human
gccaggagggaca

SEQ ID NO: 3668321 - RNA, 19 nt, Human
gccaggagggacaaaggag

SEQ ID NO: 3668322 - RNA, 21 nt, Human
gccaggagggacaaaggagcc

SEQ ID NO: 3668323 - RNA, 18 nt, Human
gccaggaggugccacugg

SEQ ID NO: 3668324 - RNA, 19 nt, Human
gccaggaguuugagaccag

SEQ ID NO: 3668325 - RNA, 22 nt, Human
gccaggauggaacacggccaca

SEQ ID NO: 3668326 - RNA, 14 nt, Human
gccaggauggcgca

SEQ ID NO: 3668327 - RNA, 14 nt, Human
gccaggcacaggca

SEQ ID NO: 3668328 - RNA, 20 nt, Human
gccaggcacaggcagggcag

SEQ ID NO: 3668329 - RNA, 20 nt, Human
gccaggcacccccuggagag

SEQ ID NO: 3668330 - RNA, 14 nt, Human
gccaggcaggggug

SEQ ID NO: 3668331 - RNA, 19 nt, Human
gccaggcagguagccaggg

SEQ ID NO: 3668332 - RNA, 18 nt, Human
gccaggcaggugccugga

SEQ ID NO: 3668333 - RNA, 15 nt, Human
gccaggccaccagga

SEQ ID NO: 3668334 - RNA, 19 nt, Human
gccaggccaccaggauggc

SEQ ID NO: 3668335 - RNA, 19 nt, Human
gccaggccacuggccccug

SEQ ID NO: 3668336 - RNA, 15 nt, Human
gccaggccagccucc

SEQ ID NO: 3668337 - RNA, 23 nt, Human
gccaggcccccaagccugcaguc

SEQ ID NO: 3668338 - RNA, 17 nt, Human
gccaggcccccaccaca

SEQ ID NO: 3668339 - RNA, 19 nt, Human
gccaggccggcgagcccug

SEQ ID NO: 3668340 - RNA, 20 nt, Human
gccaggccggcgagcccugu

SEQ ID NO: 3668341 - RNA, 23 nt, Human
gccaggccucucccuccuccagg

SEQ ID NO: 3668342 - RNA, 21 nt, Human
gccaggccucucucaccucuc

SEQ ID NO: 3668343 - RNA, 21 nt, Human
gccaggccugggucugugucu

SEQ ID NO: 3668344 - RNA, 22 nt, Human
gccaggcgcuagcacagcuccc

SEQ ID NO: 3668345 - RNA, 14 nt, Human
gccaggcuccuucc

SEQ ID NO: 3668346 - RNA, 16 nt, Human
uauaacuagcuagaag

SEQ ID NO: 3668347 - RNA, 14 nt, Human
uauaacuaguccuu

SEQ ID NO: 3668348 - RNA, 18 nt, Human
uauaacuaguccuuuacu

SEQ ID NO: 3668349 - RNA, 15 nt, Human
uauaacucauuuguu

SEQ ID NO: 3668350 - RNA, 16 nt, Human
uauaacugaaggagaa

SEQ ID NO: 3668351 - RNA, 19 nt, Human
uauaacugccuuaaaacuu

SEQ ID NO: 3668352 - RNA, 18 nt, Human
uauaacuuaaaaaaauga

SEQ ID NO: 3668353 - RNA, 22 nt, Human
uauaacuuaaaaauguaaauau

SEQ ID NO: 3668354 - RNA, 21 nt, Human
uauaacuuauauuguaagaaa

SEQ ID NO: 3668355 - RNA, 22 nt, Human
uauaacuuauauuguaagaaau

SEQ ID NO: 3668356 - RNA, 16 nt, Human
uauaacuucuuaaaag

SEQ ID NO: 3668357 - RNA, 19 nt, Human
uauaacuugucuaaauaag

SEQ ID NO: 3668358 - RNA, 17 nt, Human
uauaacuuuaacuucug

SEQ ID NO: 3668359 - RNA, 16 nt, Human
uauaacuuuagaaaua

SEQ ID NO: 3668360 - RNA, 20 nt, Human
uauaacuuuuuauauucuca

SEQ ID NO: 3668361 - RNA, 16 nt, Human
uauaagaaaaauguga

SEQ ID NO: 3668362 - RNA, 15 nt, Human
uauaagaaagacauc

SEQ ID NO: 3668363 - RNA, 17 nt, Human
uauaagaaagacaucuu

SEQ ID NO: 3668364 - RNA, 13 nt, Human
uauaagaaagccu

SEQ ID NO: 3668365 - RNA, 19 nt, Human
uauaagaauaaaauguuga

SEQ ID NO: 3668366 - RNA, 16 nt, Human
uauaagaggcugauaa

SEQ ID NO: 3668367 - RNA, 22 nt, Human
uauaagauuccaaaaagcacau

SEQ ID NO: 3668368 - RNA, 15 nt, Human
uauaagcaaauuuca

SEQ ID NO: 3668369 - RNA, 22 nt, Human
uauaagcaaauuucaaaagaca

SEQ ID NO: 3668370 - RNA, 18 nt, Human
uauaagcacugaaaaaca

SEQ ID NO: 3668371 - RNA, 21 nt, Human
uauaagcaucauuauuuaugu

SEQ ID NO: 3668372 - RNA, 18 nt, Human
uauaagcauugaaauuau

SEQ ID NO: 3668373 - RNA, 19 nt, Human
uauaagcauugaaauuaua

SEQ ID NO: 3668374 - RNA, 18 nt, Human
uauaagccaaaauuaagg

SEQ ID NO: 3668375 - RNA, 23 nt, Human
uauaagccaaaauuaagguguuu

SEQ ID NO: 3668376 - RNA, 16 nt, Human
uauaagcccacuguua

SEQ ID NO: 3668377 - RNA, 21 nt, Human
uauaagcccuugauuggaagg

SEQ ID NO: 3668378 - RNA, 23 nt, Human
uauaaggaaagcaauaaaugaau

SEQ ID NO: 3668379 - RNA, 16 nt, Human
uauaaggugcucucuu

SEQ ID NO: 3668380 - RNA, 18 nt, Human
uauaaguaacuuuauucu

SEQ ID NO: 3668381 - RNA, 18 nt, Human
uauaaguaagaaaauauu

SEQ ID NO: 3668382 - RNA, 16 nt, Human
uauaaguagcaggcca

SEQ ID NO: 3668383 - RNA, 15 nt, Human
uauaagucacaaaga

SEQ ID NO: 3668384 - RNA, 14 nt, Human
uauaagugaaguga

SEQ ID NO: 3668385 - RNA, 19 nt, Human
uauaagugauugcugguuu

SEQ ID NO: 3668386 - RNA, 13 nt, Human
uauaagugcugua

SEQ ID NO: 3668387 - RNA, 15 nt, Human
uauaagugcuguaua

SEQ ID NO: 3668388 - RNA, 16 nt, Human
uauaagugcuguauaa

SEQ ID NO: 3668389 - RNA, 17 nt, Human
uauaagugcuguauaaa

SEQ ID NO: 3668390 - RNA, 20 nt, Human
uauaagugcuguauaaaauc

SEQ ID NO: 3668391 - RNA, 14 nt, Human
uauaaguguacaua

SEQ ID NO: 3668392 - RNA, 15 nt, Human
uauaaguguacauau

SEQ ID NO: 3668393 - RNA, 15 nt, Human
uauaaguguguguuu

SEQ ID NO: 3668394 - RNA, 17 nt, Human
uauaaguucacaaaaug

SEQ ID NO: 3668395 - RNA, 14 nt, Human
uauaauaaaaggaa

SEQ ID NO: 3668396 - RNA, 14 nt, Human
uauaauaaaggacu

SEQ ID NO: 3668397 - RNA, 19 nt, Human
uauaauaaaggacuguaau

SEQ ID NO: 3668398 - RNA, 22 nt, Human
uauaauaaaggacuguaaucuu

SEQ ID NO: 3668399 - RNA, 17 nt, Human
uauaauagcaacuuuug

SEQ ID NO: 3668400 - RNA, 20 nt, Human
uauaauauacuauauuuaug

SEQ ID NO: 3668401 - RNA, 20 nt, Human
uauaauauauauauauauca

SEQ ID NO: 3668402 - RNA, 13 nt, Human
uauaauauauguu

SEQ ID NO: 3668403 - RNA, 17 nt, Human
uauaauauauguuuuaa

SEQ ID NO: 3668404 - RNA, 15 nt, Human
uauaauauauuugug

SEQ ID NO: 3668405 - RNA, 14 nt, Human
uauaauaucuaaag

SEQ ID NO: 3668406 - RNA, 16 nt, Human
uauaauauugaaaauu

SEQ ID NO: 3668407 - RNA, 22 nt, Human
uauaaucaucaaguaauacaaa

SEQ ID NO: 3668408 - RNA, 21 nt, Human
uauaaucucuucuuauacaga

SEQ ID NO: 3668409 - RNA, 19 nt, Human
uauaaucugucaaaacacu

SEQ ID NO: 3668410 - RNA, 22 nt, Human
uauaaucugucaaaacacugug

SEQ ID NO: 3668411 - RNA, 17 nt, Human
uauaaucuuauaauugu

SEQ ID NO: 3668412 - RNA, 14 nt, Human
uauaaugaaaacau

SEQ ID NO: 3668413 - RNA, 15 nt, Human
uauaaugaauaaauc

SEQ ID NO: 3668414 - RNA, 19 nt, Human
uauaauggacagauuaaua

SEQ ID NO: 3668415 - RNA, 19 nt, Human
uauaaugguuucaaagauu

SEQ ID NO: 3668416 - RNA, 23 nt, Human
uauaaugguuucaaagauucaaa

SEQ ID NO: 3668417 - RNA, 20 nt, Human
uauaauguauucauauuugu

SEQ ID NO: 3668418 - RNA, 17 nt, Human
uauaaugucauuaaaca

SEQ ID NO: 3668419 - RNA, 15 nt, Human
uauaaugugaaaugu

SEQ ID NO: 3668420 - RNA, 16 nt, Human
uauaaugugaaaugua

SEQ ID NO: 3668421 - RNA, 16 nt, Human
uagaaauaauaugcau

SEQ ID NO: 3668422 - RNA, 21 nt, Human
uagaaauagcuccguggagca

SEQ ID NO: 3668423 - RNA, 22 nt, Human
uagaaauagcuccguggagcag

SEQ ID NO: 3668424 - RNA, 15 nt, Human
uagaaauauaauuga

SEQ ID NO: 3668425 - RNA, 20 nt, Human
uagaaauaucugaaaaugua

SEQ ID NO: 3668426 - RNA, 23 nt, Human
uagaaauaucugaaaauguaugu

SEQ ID NO: 3668427 - RNA, 14 nt, Human
uagaaauaugauuu

SEQ ID NO: 3668428 - RNA, 15 nt, Human
uagaaauauucacau

SEQ ID NO: 3668429 - RNA, 16 nt, Human
uagaaauauuuuaaaa

SEQ ID NO: 3668430 - RNA, 13 nt, Human
uagaaaucauuuu

SEQ ID NO: 3668431 - RNA, 16 nt, Human
uagaaaugguuguauu

SEQ ID NO: 3668432 - RNA, 15 nt, Human
uagaaaugugaauga

SEQ ID NO: 3668433 - RNA, 19 nt, Human
uagaaauuacacccaaaga

SEQ ID NO: 3668434 - RNA, 22 nt, Human
uagaaauuaccagaguuguucu

SEQ ID NO: 3668435 - RNA, 16 nt, Human
uagaaauuaccugugg

SEQ ID NO: 3668436 - RNA, 22 nt, Human
uagaaauuagaaaaaaauuacu

SEQ ID NO: 3668437 - RNA, 23 nt, Human
uagaaauuagaaaaaaauuacua

SEQ ID NO: 3668438 - RNA, 14 nt, Human
uagaaauuuccaga

SEQ ID NO: 3668439 - RNA, 14 nt, Human
uagaaauuuuguaa

SEQ ID NO: 3668440 - RNA, 15 nt, Human
uagaaauuuuguaag

SEQ ID NO: 3668441 - RNA, 16 nt, Human
uagaacaaaggacaga

SEQ ID NO: 3668442 - RNA, 13 nt, Human
uagaacaaggcug

SEQ ID NO: 3668443 - RNA, 17 nt, Human
uagaacacacacacuua

SEQ ID NO: 3668444 - RNA, 15 nt, Human
uagaacacuaauuca

SEQ ID NO: 3668445 - RNA, 18 nt, Human
uagaacacuaauucauaa

SEQ ID NO: 3668446 - RNA, 23 nt, Human
uagaacacuauuuucagaaucug

SEQ ID NO: 3668447 - RNA, 12 nt, Human
uagaacagaaaa

SEQ ID NO: 3668448 - RNA, 12 nt, Human
uagaacagguuu

SEQ ID NO: 3668449 - RNA, 14 nt, Human
uagaacagguuuuu

SEQ ID NO: 3668450 - RNA, 18 nt, Human
uagaacaguggaaacuau

SEQ ID NO: 3668451 - RNA, 16 nt, Human
uagaacauaaagcaaa

SEQ ID NO: 3668452 - RNA, 22 nt, Human
uagaacauaaagcaaauagaca

SEQ ID NO: 3668453 - RNA, 18 nt, Human
uagaacaucccugccagc

SEQ ID NO: 3668454 - RNA, 22 nt, Human
uagaacauggagagcuagaacc

SEQ ID NO: 3668455 - RNA, 23 nt, Human
uagaaccaagaagggcuagaacc

SEQ ID NO: 3668456 - RNA, 21 nt, Human
uagaacccucuguuccuuccc

SEQ ID NO: 3668457 - RNA, 22 nt, Human
uagaacccucuguuccuucccu

SEQ ID NO: 3668458 - RNA, 14 nt, Human
uagaaccuagaagg

SEQ ID NO: 3668459 - RNA, 17 nt, Human
uagaaccuagaagggcu

SEQ ID NO: 3668460 - RNA, 13 nt, Human
uagaaccuggaga

SEQ ID NO: 3668461 - RNA, 22 nt, Human
uagaaccuggagagcuagaacc

SEQ ID NO: 3668462 - RNA, 17 nt, Human
uagaaccuggagggcug

SEQ ID NO: 3668463 - RNA, 17 nt, Human
uagaacucacucugggc

SEQ ID NO: 3668464 - RNA, 18 nt, Human
uagaacucacucugggcu

SEQ ID NO: 3668465 - RNA, 15 nt, Human
uagaacucccuuuca

SEQ ID NO: 3668466 - RNA, 22 nt, Human
uagaacuggagaggcuagaacc

SEQ ID NO: 3668467 - RNA, 18 nt, Human
uagaacuggguaaaugca

SEQ ID NO: 3668468 - RNA, 15 nt, Human
uagaacugucuguga

SEQ ID NO: 3668469 - RNA, 21 nt, Human
uagaacuugcagcugauguug

SEQ ID NO: 3668470 - RNA, 22 nt, Human
uagaacuuggauguaccugccc

SEQ ID NO: 3668471 - RNA, 17 nt, Human
uagaacuuuuuuaaaua

SEQ ID NO: 3668472 - RNA, 18 nt, Human
uagaacuuuuuuaaauaa

SEQ ID NO: 3668473 - RNA, 15 nt, Human
uagaagaaaaaagaa

SEQ ID NO: 3668474 - RNA, 23 nt, Human
uagaagaaaugaaauuuuaccaa

SEQ ID NO: 3668475 - RNA, 12 nt, Human
uagaagaacugc

SEQ ID NO: 3668476 - RNA, 18 nt, Human
uagaagaagcuaugucaa

SEQ ID NO: 3668477 - RNA, 21 nt, Human
uagaagaauacaaacauauuu

SEQ ID NO: 3668478 - RNA, 22 nt, Human
uagaagagagagguugaaaaac

SEQ ID NO: 3668479 - RNA, 23 nt, Human
uagaagauauuagucuuggggca

SEQ ID NO: 3668480 - RNA, 18 nt, Human
uagaagauggcacuuaua

SEQ ID NO: 3668481 - RNA, 15 nt, Human
uagaagauguuugcu

SEQ ID NO: 3668482 - RNA, 23 nt, Human
uagaagcaaauuaaacgguaaca

SEQ ID NO: 3668483 - RNA, 22 nt, Human
uagaagcacuacaccuugccuu

SEQ ID NO: 3668484 - RNA, 22 nt, Human
uagaagcauuccuucuuugaua

SEQ ID NO: 3668485 - RNA, 16 nt, Human
uagaagcuguaguagc

SEQ ID NO: 3668486 - RNA, 11 nt, Human
uagaaggaaac

SEQ ID NO: 3668487 - RNA, 17 nt, Human
uagaagggaaagcccau

SEQ ID NO: 3668488 - RNA, 22 nt, Human
uagaagggcuagaaccuggaga

SEQ ID NO: 3668489 - RNA, 24 nt, Human
uagaagggcuagaaccuggagagc

SEQ ID NO: 3668490 - RNA, 16 nt, Human
uauaguguguugugcu

SEQ ID NO: 3668491 - RNA, 15 nt, Human
uauaguuaacacacu

SEQ ID NO: 3668492 - RNA, 13 nt, Human
uauaguuacugug

SEQ ID NO: 3668493 - RNA, 16 nt, Human
uauaguuacuguguaa

SEQ ID NO: 3668494 - RNA, 22 nt, Human
uauaguuacuguguaauuagug

SEQ ID NO: 3668495 - RNA, 18 nt, Human
uauaguuaggauagcauu

SEQ ID NO: 3668496 - RNA, 22 nt, Human
uauaguuauguaaauaauucuu

SEQ ID NO: 3668497 - RNA, 21 nt, Human
uauaguucaugucugcuauca

SEQ ID NO: 3668498 - RNA, 22 nt, Human
uauaguuccuaagaagcuucua

SEQ ID NO: 3668499 - RNA, 23 nt, Human
uauaguuccuaagaagcuucuaa

SEQ ID NO: 3668500 - RNA, 13 nt, Human
uauaguucuaggc

SEQ ID NO: 3668501 - RNA, 13 nt, Human
uauaguuucagau

SEQ ID NO: 3668502 - RNA, 18 nt, Human
uauaguuuguacaugcau

SEQ ID NO: 3668503 - RNA, 22 nt, Human
uauaguuuuacuuuuaaacugu

SEQ ID NO: 3668504 - RNA, 23 nt, Human
uauaguuuugaauccuuugccug

SEQ ID NO: 3668505 - RNA, 18 nt, Human
uauauaaaaagaaaagau

SEQ ID NO: 3668506 - RNA, 19 nt, Human
uauauaaaaagaaaagaua

SEQ ID NO: 3668507 - RNA, 20 nt, Human
uauauaaaaagaaaagauaa

SEQ ID NO: 3668508 - RNA, 15 nt, Human
uauauaaaaauauau

SEQ ID NO: 3668509 - RNA, 12 nt, Human
uauauaaaaaug

SEQ ID NO: 3668510 - RNA, 15 nt, Human
uauauaaaaauggcu

SEQ ID NO: 3668511 - RNA, 21 nt, Human
uauauaaaccuaaaaaagaua

SEQ ID NO: 3668512 - RNA, 23 nt, Human
uauauaaagagaaaauugaauuu

SEQ ID NO: 3668513 - RNA, 12 nt, Human
uauauaaaguau

SEQ ID NO: 3668514 - RNA, 19 nt, Human
uauauaaaguauucuuuuu

SEQ ID NO: 3668515 - RNA, 11 nt, Human
uauauaaauaa

SEQ ID NO: 3668516 - RNA, 14 nt, Human
uauauaaaugggaa

SEQ ID NO: 3668517 - RNA, 12 nt, Human
uauauaaaugua

SEQ ID NO: 3668518 - RNA, 13 nt, Human
uauauaaauguau

SEQ ID NO: 3668519 - RNA, 13 nt, Human
uauauaacagaua

SEQ ID NO: 3668520 - RNA, 14 nt, Human
uauauaacauauau

SEQ ID NO: 3668521 - RNA, 18 nt, Human
uauauaacauauauggaa

SEQ ID NO: 3668522 - RNA, 15 nt, Human
uauauaagaaagaca

SEQ ID NO: 3668523 - RNA, 16 nt, Human
uauauaagaaagacau

SEQ ID NO: 3668524 - RNA, 23 nt, Human
uauauaagagcaugaaauuuuua

SEQ ID NO: 3668525 - RNA, 23 nt, Human
uauauaauacugacugagaauau

SEQ ID NO: 3668526 - RNA, 12 nt, Human
uauauaauaucu

SEQ ID NO: 3668527 - RNA, 13 nt, Human
uauauaauucacu

SEQ ID NO: 3668528 - RNA, 17 nt, Human
uauauaauucuguacau

SEQ ID NO: 3668529 - RNA, 22 nt, Human
uauauaauuuuuuuauguuuug

SEQ ID NO: 3668530 - RNA, 20 nt, Human
uauauacaaccugcuugggu

SEQ ID NO: 3668531 - RNA, 17 nt, Human
uauauacaauaacauaa

SEQ ID NO: 3668532 - RNA, 22 nt, Human
uauauacaauaacauaauuugu

SEQ ID NO: 3668533 - RNA, 16 nt, Human
uauauacaauaaugga

SEQ ID NO: 3668534 - RNA, 14 nt, Human
uauauacacacaca

SEQ ID NO: 3668535 - RNA, 18 nt, Human
uauauacacacacaaaga

SEQ ID NO: 3668536 - RNA, 22 nt, Human
uauauacacacacaaagagagu

SEQ ID NO: 3668537 - RNA, 16 nt, Human
uauauacagaggaaau

SEQ ID NO: 3668538 - RNA, 23 nt, Human
uauauacaguaacuuuaugugua

SEQ ID NO: 3668539 - RNA, 15 nt, Human
uauauacauauguag

SEQ ID NO: 3668540 - RNA, 23 nt, Human
uauauacaucacguuaaaguagg

SEQ ID NO: 3668541 - RNA, 16 nt, Human
uauauacaugugugua

SEQ ID NO: 3668542 - RNA, 16 nt, Human
uauauaccaaagcaca

SEQ ID NO: 3668543 - RNA, 21 nt, Human
uauauaccaaagcacauuuua

SEQ ID NO: 3668544 - RNA, 20 nt, Human
uauauacccguacaacgugu

SEQ ID NO: 3668545 - RNA, 17 nt, Human
uauauacgaacaaaaca

SEQ ID NO: 3668546 - RNA, 20 nt, Human
uauauacucaagagugguau

SEQ ID NO: 3668547 - RNA, 14 nt, Human
uauauagaaugcug

SEQ ID NO: 3668548 - RNA, 16 nt, Human
uauauagacagcuuug

SEQ ID NO: 3668549 - RNA, 16 nt, Human
uauauagagauguuuu

SEQ ID NO: 3668550 - RNA, 19 nt, Human
uauauagagauguuuuuaa

SEQ ID NO: 3668551 - RNA, 21 nt, Human
uauauagauuauaacuugucu

SEQ ID NO: 3668552 - RNA, 18 nt, Human
uauauagcaagacauuau

SEQ ID NO: 3668553 - RNA, 22 nt, Human
uauauagcagcaaaaauauaaa

SEQ ID NO: 3668554 - RNA, 15 nt, Human
uauauagcaguaaaa

SEQ ID NO: 3668555 - RNA, 16 nt, Human
uauauagcaguaaaaa

SEQ ID NO: 3668556 - RNA, 18 nt, Human
uauauagcuggcaagaau

SEQ ID NO: 3668557 - RNA, 14 nt, Human
uauauagcuugaaa

SEQ ID NO: 3668558 - RNA, 18 nt, Human
uauauaggcaucacauuu

SEQ ID NO: 3668559 - RNA, 15 nt, Human
uauauagugcuauau

SEQ ID NO: 3668560 - RNA, 17 nt, Human
uauauaguuuacuauuu

SEQ ID NO: 3668561 - RNA, 13 nt, Human
uauauauaaaacg

SEQ ID NO: 3668562 - RNA, 13 nt, Human
uauauauaaaccu

SEQ ID NO: 3668563 - RNA, 16 nt, Human
uauauauaaaccuaaa

SEQ ID NO: 3668564 - RNA, 13 nt, Human
uauauauaaagua

SEQ ID NO: 3668565 - RNA, 15 nt, Human
uauauauaaaguaua

SEQ ID NO: 3668566 - RNA, 11 nt, Human
uauauauaaau

SEQ ID NO: 3668567 - RNA, 20 nt, Human
uauauauaauucuguacaua

SEQ ID NO: 3668568 - RNA, 15 nt, Human
uauauauacacacac

SEQ ID NO: 3668569 - RNA, 22 nt, Human
uauauauacauacacuuguaua

SEQ ID NO: 3668570 - RNA, 13 nt, Human
uauauauauaaaa

SEQ ID NO: 3668571 - RNA, 14 nt, Human
uauauauauaaagu

SEQ ID NO: 3668572 - RNA, 15 nt, Human
uauauauauaauaua

SEQ ID NO: 3668573 - RNA, 13 nt, Human
uauauaucaaaua

SEQ ID NO: 3668574 - RNA, 15 nt, Human
uauauaucaguuuga

SEQ ID NO: 3668575 - RNA, 20 nt, Human
uauauaucuaucuauuugag

SEQ ID NO: 3668576 - RNA, 22 nt, Human
uauauaugaaaacuauacaaca

SEQ ID NO: 3668577 - RNA, 21 nt, Human
uauauaugcacuuaauuuguu

SEQ ID NO: 3668578 - RNA, 19 nt, Human
uauauaugccuuuuuccua

SEQ ID NO: 3668579 - RNA, 20 nt, Human
uauauauguguauauauaca

SEQ ID NO: 3668580 - RNA, 22 nt, Human
uauauauguguauauauacaua

SEQ ID NO: 3668581 - RNA, 23 nt, Human
uauauauguguauauauacauac

SEQ ID NO: 3668582 - RNA, 14 nt, Human
uauauauguguaug

SEQ ID NO: 3668583 - RNA, 17 nt, Human
uauauauguguguuuaa

SEQ ID NO: 3668584 - RNA, 20 nt, Human
uauauauucuuauaaaaaug

SEQ ID NO: 3668585 - RNA, 14 nt, Human
uauauauuuauaac

SEQ ID NO: 3668586 - RNA, 14 nt, Human
uauauauuuuaauu

SEQ ID NO: 3668587 - RNA, 16 nt, Human
uauauauuuuguguga

SEQ ID NO: 3668588 - RNA, 22 nt, Human
uauauauuuuuuucugaaauuu

SEQ ID NO: 3668589 - RNA, 19 nt, Human
uauaucacauguuuucucu

SEQ ID NO: 3668590 - RNA, 16 nt, Human
uagaguguuguugaga

SEQ ID NO: 3668591 - RNA, 12 nt, Human
uagaguuaagaa

SEQ ID NO: 3668592 - RNA, 23 nt, Human
uagaguuaagaagcuguuguaca

SEQ ID NO: 3668593 - RNA, 15 nt, Human
uagaguuagacuguu

SEQ ID NO: 3668594 - RNA, 14 nt, Human
uagaguucauccca

SEQ ID NO: 3668595 - RNA, 12 nt, Human
uagaguugcuga

SEQ ID NO: 3668596 - RNA, 12 nt, Human
uagaguuuaaca

SEQ ID NO: 3668597 - RNA, 13 nt, Human
uagaguuuaacac

SEQ ID NO: 3668598 - RNA, 22 nt, Human
uagaguuucaaccaugaagucu

SEQ ID NO: 3668599 - RNA, 13 nt, Human
uagaguuucuguu

SEQ ID NO: 3668600 - RNA, 21 nt, Human
uagaguuucuguuugauucuu

SEQ ID NO: 3668601 - RNA, 19 nt, Human
uagauaaaacaucuuugaa

SEQ ID NO: 3668602 - RNA, 15 nt, Human
uagauaaaagcugaa

SEQ ID NO: 3668603 - RNA, 18 nt, Human
uagauaaauaaauauaug

SEQ ID NO: 3668604 - RNA, 16 nt, Human
uagauaaauauuugac

SEQ ID NO: 3668605 - RNA, 13 nt, Human
uagauaacucuuu

SEQ ID NO: 3668606 - RNA, 13 nt, Human
uagauaauauugu

SEQ ID NO: 3668607 - RNA, 12 nt, Human
uagauacaauaa

SEQ ID NO: 3668608 - RNA, 14 nt, Human
uagauacaauaaau

SEQ ID NO: 3668609 - RNA, 16 nt, Human
uagauacaaucagcug

SEQ ID NO: 3668610 - RNA, 23 nt, Human
uagauacccuacgcuguccagaa

SEQ ID NO: 3668611 - RNA, 23 nt, Human
uagauauaaauuuuuaagagaaa

SEQ ID NO: 3668612 - RNA, 20 nt, Human
uagauauaaugaacaaaauu

SEQ ID NO: 3668613 - RNA, 16 nt, Human
uagauauagagucauu

SEQ ID NO: 3668614 - RNA, 20 nt, Human
uagauaucuuuuuauugaug

SEQ ID NO: 3668615 - RNA, 15 nt, Human
uagauaugaaagcug

SEQ ID NO: 3668616 - RNA, 22 nt, Human
uagauauguauucuuuucucag

SEQ ID NO: 3668617 - RNA, 14 nt, Human
uagauauuacuuua

SEQ ID NO: 3668618 - RNA, 17 nt, Human
uagauauuacuuuauca

SEQ ID NO: 3668619 - RNA, 22 nt, Human
uagauauuacuuuaucacuuuu

SEQ ID NO: 3668620 - RNA, 22 nt, Human
uagauauugaggccaagaauau

SEQ ID NO: 3668621 - RNA, 14 nt, Human
uagauauuuggcuu

SEQ ID NO: 3668622 - RNA, 18 nt, Human
uagauauuuggcuuaaau

SEQ ID NO: 3668623 - RNA, 19 nt, Human
uagauauuuggcuuaaaua

SEQ ID NO: 3668624 - RNA, 21 nt, Human
uagauauuuggcuuaaauaua

SEQ ID NO: 3668625 - RNA, 24 nt, Human
uagauauuuucacaaugucaguau

SEQ ID NO: 3668626 - RNA, 13 nt, Human
uagauauuuuuca

SEQ ID NO: 3668627 - RNA, 20 nt, Human
uagauauuuuucauaaacaa

SEQ ID NO: 3668628 - RNA, 20 nt, Human
uagaucaaauaguugcauag

SEQ ID NO: 3668629 - RNA, 17 nt, Human
uagaucacgagaucaag

SEQ ID NO: 3668630 - RNA, 20 nt, Human
uagaucagaugcuccaagau

SEQ ID NO: 3668631 - RNA, 23 nt, Human
uagaucagaugcuccaagauucu

SEQ ID NO: 3668632 - RNA, 15 nt, Human
uagaucauaaggcuu

SEQ ID NO: 3668633 - RNA, 21 nt, Human
uagaucauaaggcuucaaaau

SEQ ID NO: 3668634 - RNA, 14 nt, Human
uagaucaugaagaa

SEQ ID NO: 3668635 - RNA, 11 nt, Human
uauguaacaug

SEQ ID NO: 3668636 - RNA, 12 nt, Human
uauguaacaugu

SEQ ID NO: 3668637 - RNA, 14 nt, Human
uauguaacugcauu

SEQ ID NO: 3668638 - RNA, 16 nt, Human
uauguaagagcaccuu

SEQ ID NO: 3668639 - RNA, 23 nt, Human
uauguaaugaaguaaagccauua

SEQ ID NO: 3668640 - RNA, 17 nt, Human
uauguaaugcaaaauuu

SEQ ID NO: 3668641 - RNA, 23 nt, Human
uauguaaugugugguggccucag

SEQ ID NO: 3668642 - RNA, 23 nt, Human
uauguacaauauuuuaagcauua

SEQ ID NO: 3668643 - RNA, 15 nt, Human
uauguacaugagaag

SEQ ID NO: 3668644 - RNA, 10 nt, Human
uauguaccaa

SEQ ID NO: 3668645 - RNA, 16 nt, Human
uauguacccucugaaa

SEQ ID NO: 3668646 - RNA, 17 nt, Human
uauguacuaguacugug

SEQ ID NO: 3668647 - RNA, 13 nt, Human
uauguagaagcau

SEQ ID NO: 3668648 - RNA, 22 nt, Human
uauguagacuauauacaugugu

SEQ ID NO: 3668649 - RNA, 16 nt, Human
uauguagauauuuggc

SEQ ID NO: 3668650 - RNA, 22 nt, Human
uauguagauauuuggcuuaaau

SEQ ID NO: 3668651 - RNA, 13 nt, Human
gccccugagccca

SEQ ID NO: 3668652 - RNA, 15 nt, Human
gccccugagcccacu

SEQ ID NO: 3668653 - RNA, 13 nt, Human
gccccugcacaaa

SEQ ID NO: 3668654 - RNA, 15 nt, Human
gccccugcagcacgg

SEQ ID NO: 3668655 - RNA, 14 nt, Human
gccccugccacccu

SEQ ID NO: 3668656 - RNA, 17 nt, Human
gccccugccacccuggg

SEQ ID NO: 3668657 - RNA, 15 nt, Human
gccccugccccagcc

SEQ ID NO: 3668658 - RNA, 21 nt, Human
gccccugccccagcccaaguc

SEQ ID NO: 3668659 - RNA, 20 nt, Human
gccccugccccgucaccauc

SEQ ID NO: 3668660 - RNA, 19 nt, Human
gccccugccccucaugcca

SEQ ID NO: 3668661 - RNA, 21 nt, Human
gccccugccuuggggucaggu

SEQ ID NO: 3668662 - RNA, 12 nt, Human
gccccugcuggu

SEQ ID NO: 3668663 - RNA, 15 nt, Human
gccccugcugguuca

SEQ ID NO: 3668664 - RNA, 16 nt, Human
gccccugcugguucag

SEQ ID NO: 3668665 - RNA, 22 nt, Human
gccccugcugguucaggguugg

SEQ ID NO: 3668666 - RNA, 19 nt, Human
gccccuggacaagcagagg

SEQ ID NO: 3668667 - RNA, 19 nt, Human
gccccuggaggcugccucc

SEQ ID NO: 3668668 - RNA, 15 nt, Human
gccccuggaugcagc

SEQ ID NO: 3668669 - RNA, 22 nt, Human
gccccuggcagagaugccuccc

SEQ ID NO: 3668670 - RNA, 17 nt, Human
gccccuggcagccccug

SEQ ID NO: 3668671 - RNA, 14 nt, Human
gccccuggcuggga

SEQ ID NO: 3668672 - RNA, 16 nt, Human
gccccuggcugggacg

SEQ ID NO: 3668673 - RNA, 23 nt, Human
gccccuggcugggacguggcuca

SEQ ID NO: 3668674 - RNA, 18 nt, Human
gccccugggcuuggccug

SEQ ID NO: 3668675 - RNA, 22 nt, Human
gccccugggcuuggccugcugu

SEQ ID NO: 3668676 - RNA, 12 nt, Human
gccccuggggcc

SEQ ID NO: 3668677 - RNA, 21 nt, Human
gccccugggguggccaccagu

SEQ ID NO: 3668678 - RNA, 20 nt, Human
gccccugggugggugguggg

SEQ ID NO: 3668679 - RNA, 22 nt, Human
gccccuggguggguggugggga

SEQ ID NO: 3668680 - RNA, 17 nt, Human
gccccuguauggcacug

SEQ ID NO: 3668681 - RNA, 18 nt, Human
gccccuguggagacuggg

SEQ ID NO: 3668682 - RNA, 22 nt, Human
gccccuguuaccuaauuagagc

SEQ ID NO: 3668683 - RNA, 21 nt, Human
gccccuguucuggcagaguug

SEQ ID NO: 3668684 - RNA, 17 nt, Human
gccccuuagacagaggc

SEQ ID NO: 3668685 - RNA, 23 nt, Human
gccccuucacuucugaccacacu

SEQ ID NO: 3668686 - RNA, 22 nt, Human
gccccuucauugauuuccugug

SEQ ID NO: 3668687 - RNA, 15 nt, Human
gccccuuccccaugg

SEQ ID NO: 3668688 - RNA, 16 nt, Human
gccccuuccccauggg

SEQ ID NO: 3668689 - RNA, 12 nt, Human
gccccuuccccc

SEQ ID NO: 3668690 - RNA, 17 nt, Human
gccccuucccccuccaa

SEQ ID NO: 3668691 - RNA, 16 nt, Human
gccccuuccccgaggg

SEQ ID NO: 3668692 - RNA, 12 nt, Human
gccccuucccuu

SEQ ID NO: 3668693 - RNA, 14 nt, Human
gccccuuccgccac

SEQ ID NO: 3668694 - RNA, 17 nt, Human
gccccuuccgccacugg

SEQ ID NO: 3668695 - RNA, 19 nt, Human
gccccuuccgccacugggg

SEQ ID NO: 3668696 - RNA, 19 nt, Human
gccccuucuacacucuccu

SEQ ID NO: 3668697 - RNA, 20 nt, Human
gccccuucuacacucuccug

SEQ ID NO: 3668698 - RNA, 16 nt, Human
gccccuucucucccug

SEQ ID NO: 3668699 - RNA, 20 nt, Human
gccccuucugacccaugcug

SEQ ID NO: 3668700 - RNA, 20 nt, Human
gccccuucugcucagcucug

SEQ ID NO: 3668701 - RNA, 23 nt, Human
gccccuucugcucagcucugggc

SEQ ID NO: 3668702 - RNA, 15 nt, Human
gccccuuggacacgc

SEQ ID NO: 3668703 - RNA, 20 nt, Human
gccccuuuacggacaccccc

SEQ ID NO: 3668704 - RNA, 13 nt, Human
gccccuuuccaaa

SEQ ID NO: 3668705 - RNA, 16 nt, Human
gccccuuugcugaccc

SEQ ID NO: 3668706 - RNA, 19 nt, Human
gccccuuugggcccugcau

SEQ ID NO: 3668707 - RNA, 21 nt, Human
gccccuuuuuacuccccuuga

SEQ ID NO: 3668708 - RNA, 23 nt, Human
gccccuuuuucauauguugcuca

SEQ ID NO: 3668709 - RNA, 24 nt, Human
gcccgaagcaugaacagugcaccu

SEQ ID NO: 3668710 - RNA, 12 nt, Human
gcccgacagccu

SEQ ID NO: 3668711 - RNA, 22 nt, Human
gcccgacauggcuccggccucu

SEQ ID NO: 3668712 - RNA, 14 nt, Human
gcccgagcagcuga

SEQ ID NO: 3668713 - RNA, 16 nt, Human
gcccgagcagcugagc

SEQ ID NO: 3668714 - RNA, 17 nt, Human
gcccgagcagcugagca

SEQ ID NO: 3668715 - RNA, 19 nt, Human
gcccgagcagcugagcagg

SEQ ID NO: 3668716 - RNA, 23 nt, Human
gcccgagcagcugagcagggccg

SEQ ID NO: 3668717 - RNA, 15 nt, Human
gcccgagcuggugca

SEQ ID NO: 3668718 - RNA, 18 nt, Human
gcccgagcuguuuauguu

SEQ ID NO: 3668719 - RNA, 21 nt, Human
gcccgaggaggugucucaggc

SEQ ID NO: 3668720 - RNA, 22 nt, Human
gcccgaggaggugucucaggcu

SEQ ID NO: 3668721 - RNA, 16 nt, Human
gcccgaggcaccagug

SEQ ID NO: 3668722 - RNA, 22 nt, Human
gcccgagggaggggaagcuucu

SEQ ID NO: 3668723 - RNA, 16 nt, Human
gcccgcacagcagccu

SEQ ID NO: 3668724 - RNA, 17 nt, Human
gcccgcagaccucugga

SEQ ID NO: 3668725 - RNA, 23 nt, Human
gcccgcagagcgcgccccuagcc

SEQ ID NO: 3668726 - RNA, 16 nt, Human
gcccgcaugcagcagc

SEQ ID NO: 3668727 - RNA, 21 nt, Human
gcccgccaagguagccauccc

SEQ ID NO: 3668728 - RNA, 14 nt, Human
gcccgcccacuguc

SEQ ID NO: 3668729 - RNA, 20 nt, Human
gcccgcccacuguccugggc

SEQ ID NO: 3668730 - RNA, 22 nt, Human
gcccgcccacuguccugggcgc

SEQ ID NO: 3668731 - RNA, 15 nt, Human
gcccgccccugcagc

SEQ ID NO: 3668732 - RNA, 12 nt, Human
gcccgccugcca

SEQ ID NO: 3668733 - RNA, 23 nt, Human
gcccgccugccaguccuagcugc

SEQ ID NO: 3668734 - RNA, 14 nt, Human
gcccgccugcccac

SEQ ID NO: 3668735 - RNA, 16 nt, Human
gcccgccugcccaccu

SEQ ID NO: 3668736 - RNA, 23 nt, Human
gcccgccugcccaccugccuggc

SEQ ID NO: 3668737 - RNA, 14 nt, Human
gcccgccuggcaga

SEQ ID NO: 3668738 - RNA, 16 nt, Human
gcccgcgccacaggac

SEQ ID NO: 3668739 - RNA, 13 nt, Human
gcccgcucccagu

SEQ ID NO: 3668740 - RNA, 22 nt, Human
gcccgcucuacaucuucugccu

SEQ ID NO: 3668741 - RNA, 18 nt, Human
gcccgcugggcugagccc

SEQ ID NO: 3668742 - RNA, 14 nt, Human
gcccgcuugccucg

SEQ ID NO: 3668743 - RNA, 22 nt, Human
gcccggagauuggacggccuga

SEQ ID NO: 3668744 - RNA, 17 nt, Human
gcccggauucugggagg

SEQ ID NO: 3668745 - RNA, 15 nt, Human
gcccggcagggcggg

SEQ ID NO: 3668746 - RNA, 17 nt, Human
gcccggcagggcgggca

SEQ ID NO: 3668747 - RNA, 14 nt, Human
gcccggccugcucc

SEQ ID NO: 3668748 - RNA, 18 nt, Human
gcccggccugcucccagc

SEQ ID NO: 3668749 - RNA, 20 nt, Human
gcccggcgccuggccuccag

SEQ ID NO: 3668750 - RNA, 14 nt, Human
gcccggcuccaggc

SEQ ID NO: 3668751 - RNA, 17 nt, Human
gcccggcuccaggcucc

SEQ ID NO: 3668752 - RNA, 18 nt, Human
gcccggcuccaggcuccu

SEQ ID NO: 3668753 - RNA, 14 nt, Human
gcccggcuccuggu

SEQ ID NO: 3668754 - RNA, 14 nt, Human
gcccggcugguuuu

SEQ ID NO: 3668755 - RNA, 23 nt, Human
gcccgggaaggucaccagcacca

SEQ ID NO: 3668756 - RNA, 14 nt, Human
gcccgggagcugcu

SEQ ID NO: 3668757 - RNA, 19 nt, Human
gcccgggagcugcugcccu

SEQ ID NO: 3668758 - RNA, 13 nt, Human
gcccgggcccaga

SEQ ID NO: 3668759 - RNA, 14 nt, Human
gcccgggcccagag

SEQ ID NO: 3668760 - RNA, 21 nt, Human
gcccggggcagcagcagcccu

SEQ ID NO: 3668761 - RNA, 23 nt, Human
gcccggggcagcagcagcccugc

SEQ ID NO: 3668762 - RNA, 16 nt, Human
gcccguccugccugug

SEQ ID NO: 3668763 - RNA, 13 nt, Human
gcccgucucucuc

SEQ ID NO: 3668764 - RNA, 15 nt, Human
gcccgucucucuccc

SEQ ID NO: 3668765 - RNA, 19 nt, Human
gcccgucuguccaucugcc

SEQ ID NO: 3668766 - RNA, 21 nt, Human
gcccgucuguccaucugcccg

SEQ ID NO: 3668767 - RNA, 16 nt, Human
gcccgucuucagccua

SEQ ID NO: 3668768 - RNA, 14 nt, Human
gcccguguacauag

SEQ ID NO: 3668769 - RNA, 15 nt, Human
gcccguguggccccu

SEQ ID NO: 3668770 - RNA, 16 nt, Human
gcccguguggccccuu

SEQ ID NO: 3668771 - RNA, 16 nt, Human
gcccguugucucccug

SEQ ID NO: 3668772 - RNA, 20 nt, Human
gcccguugucucccuggccc

SEQ ID NO: 3668773 - RNA, 22 nt, Human
gcccuaaaguguauuuuuuuac

SEQ ID NO: 3668774 - RNA, 21 nt, Human
gcccuaaccucugagucacca

SEQ ID NO: 3668775 - RNA, 21 nt, Human
gcccuaagauugaaaaggaag

SEQ ID NO: 3668776 - RNA, 17 nt, Human
gcccuaagcagaaagug

SEQ ID NO: 3668777 - RNA, 19 nt, Human
gcccuaaugcgcaggcugg

SEQ ID NO: 3668778 - RNA, 20 nt, Human
gcccuaaugcgcaggcuggc

SEQ ID NO: 3668779 - RNA, 18 nt, Human
gcccuggagccaacugcu

SEQ ID NO: 3668780 - RNA, 22 nt, Human
gcccuggaggcggugcggcagg

SEQ ID NO: 3668781 - RNA, 17 nt, Human
gcccuggaggugccagc

SEQ ID NO: 3668782 - RNA, 23 nt, Human
gcccuggaggugccagcaaagcc

SEQ ID NO: 3668783 - RNA, 24 nt, Human
gcccuggaggugccagcaaagccc

SEQ ID NO: 3668784 - RNA, 14 nt, Human
gcccuggagguggc

SEQ ID NO: 3668785 - RNA, 15 nt, Human
gcccuggagucaugc

SEQ ID NO: 3668786 - RNA, 18 nt, Human
gcccuggaucagcguggc

SEQ ID NO: 3668787 - RNA, 21 nt, Human
gcccuggaucagcguggccuu

SEQ ID NO: 3668788 - RNA, 22 nt, Human
gcccuggaucagcguggccuug

SEQ ID NO: 3668789 - RNA, 12 nt, Human
gcccuggcagcc

SEQ ID NO: 3668790 - RNA, 13 nt, Human
gcccuggccccca

SEQ ID NO: 3668791 - RNA, 20 nt, Human
gcccuggccuccccugccac

SEQ ID NO: 3668792 - RNA, 21 nt, Human
gcccuggccuccccugccacc

SEQ ID NO: 3668793 - RNA, 15 nt, Human
gcccuggccugcugg

SEQ ID NO: 3668794 - RNA, 17 nt, Human
gcccuggccugcugggc

SEQ ID NO: 3668795 - RNA, 20 nt, Human
gcccuggcucccacaggccc

SEQ ID NO: 3668796 - RNA, 13 nt, Human
gcccuggcugaag

SEQ ID NO: 3668797 - RNA, 14 nt, Human
gcccuggcugaagg

SEQ ID NO: 3668798 - RNA, 21 nt, Human
gcccuggcugaaggacuguga

SEQ ID NO: 3668799 - RNA, 17 nt, Human
gcccuggcugcugcccc

SEQ ID NO: 3668800 - RNA, 14 nt, Human
gcccugggaccgcu

SEQ ID NO: 3668801 - RNA, 22 nt, Human
gcccugggaccgcuacaccacu

SEQ ID NO: 3668802 - RNA, 23 nt, Human
gcccugggagaaucgcuccugca

SEQ ID NO: 3668803 - RNA, 13 nt, Human
gcccugggaggcu

SEQ ID NO: 3668804 - RNA, 16 nt, Human
gcccugggaggcucug

SEQ ID NO: 3668805 - RNA, 18 nt, Human
gcccugggaggcucugga

SEQ ID NO: 3668806 - RNA, 19 nt, Human
gcccugggaggcucuggag

SEQ ID NO: 3668807 - RNA, 21 nt, Human
gcccugggaggcucuggagcc

SEQ ID NO: 3668808 - RNA, 17 nt, Human
gcccugggcucggaggc

SEQ ID NO: 3668809 - RNA, 16 nt, Human
gcccugggcuggaauc

SEQ ID NO: 3668810 - RNA, 19 nt, Human
gcccuggggccuguacugc

SEQ ID NO: 3668811 - RNA, 15 nt, Human
gcccuggggcugauc

SEQ ID NO: 3668812 - RNA, 21 nt, Human
gcccuggggcugaucucaggg

SEQ ID NO: 3668813 - RNA, 16 nt, Human
gcccugguagggcagu

SEQ ID NO: 3668814 - RNA, 14 nt, Human
gcccugguccaggg

SEQ ID NO: 3668815 - RNA, 18 nt, Human
gcccugguccagggaagc

SEQ ID NO: 3668816 - RNA, 14 nt, Human
gcccuggucucagc

SEQ ID NO: 3668817 - RNA, 21 nt, Human
gcccuggugcgaauggacuuu

SEQ ID NO: 3668818 - RNA, 14 nt, Human
gcccugguggcagu

SEQ ID NO: 3668819 - RNA, 20 nt, Human
uauuaacaauuaauugucuu

SEQ ID NO: 3668820 - RNA, 12 nt, Human
uauuaacuacau

SEQ ID NO: 3668821 - RNA, 18 nt, Human
uauuaacuuaauaaucaa

SEQ ID NO: 3668822 - RNA, 24 nt, Human
uauuaagaaagacuaucuaaaugu

SEQ ID NO: 3668823 - RNA, 13 nt, Human
uauuaagaaugaa

SEQ ID NO: 3668824 - RNA, 16 nt, Human
uauuaagaaugaaaua

SEQ ID NO: 3668825 - RNA, 20 nt, Human
uauuaagagguaagacuuag

SEQ ID NO: 3668826 - RNA, 16 nt, Human
uauuaagauggauucu

SEQ ID NO: 3668827 - RNA, 22 nt, Human
uauuaagauuauaauuguugca

SEQ ID NO: 3668828 - RNA, 20 nt, Human
uauuaagcaguaaaaacugu

SEQ ID NO: 3668829 - RNA, 15 nt, Human
uauuaagcaucagaa

SEQ ID NO: 3668830 - RNA, 16 nt, Human
uauuaagcaugacaga

SEQ ID NO: 3668831 - RNA, 20 nt, Human
uauuaagcaugacagaaaau

SEQ ID NO: 3668832 - RNA, 21 nt, Human
uauuaagcccacaguauauuu

SEQ ID NO: 3668833 - RNA, 13 nt, Human
uauuaagcuuuuu

SEQ ID NO: 3668834 - RNA, 19 nt, Human
uauuaagcuuuuuggaauc

SEQ ID NO: 3668835 - RNA, 14 nt, Human
uauuaaggaagaca

SEQ ID NO: 3668836 - RNA, 18 nt, Human
uauuaaggauguagcuuu

SEQ ID NO: 3668837 - RNA, 20 nt, Human
uauuaaggauguagcuuuuc

SEQ ID NO: 3668838 - RNA, 16 nt, Human
uauuaagguguggcuu

SEQ ID NO: 3668839 - RNA, 17 nt, Human
uauuaauaguaauuugu

SEQ ID NO: 3668840 - RNA, 18 nt, Human
uauuaauaguaauuugua

SEQ ID NO: 3668841 - RNA, 18 nt, Human
uauuaauauauaucugcu

SEQ ID NO: 3668842 - RNA, 23 nt, Human
uauuaauauauauuaucuuuuca

SEQ ID NO: 3668843 - RNA, 13 nt, Human
uauuaaucacugu

SEQ ID NO: 3668844 - RNA, 23 nt, Human
uauuaaucacuguguauauuuga

SEQ ID NO: 3668845 - RNA, 11 nt, Human
uauuaaucuug

SEQ ID NO: 3668846 - RNA, 21 nt, Human
uauuaaucuuggauagcuaau

SEQ ID NO: 3668847 - RNA, 13 nt, Human
uauuaaugcacuu

SEQ ID NO: 3668848 - RNA, 15 nt, Human
uauuaaugcccagac

SEQ ID NO: 3668849 - RNA, 13 nt, Human
uauuaaugcuaag

SEQ ID NO: 3668850 - RNA, 17 nt, Human
uauuaauuuaugcagaa

SEQ ID NO: 3668851 - RNA, 14 nt, Human
uauuaauuuuaguu

SEQ ID NO: 3668852 - RNA, 21 nt, Human
uauuaauuuuaguuuuucauu

SEQ ID NO: 3668853 - RNA, 16 nt, Human
uauuacaaaaacaaaa

SEQ ID NO: 3668854 - RNA, 14 nt, Human
uauuacaaugauca

SEQ ID NO: 3668855 - RNA, 23 nt, Human
uauuacacaaauacuuauucauu

SEQ ID NO: 3668856 - RNA, 16 nt, Human
uauuacacucuguaau

SEQ ID NO: 3668857 - RNA, 19 nt, Human
uauuacacucuguaauuga

SEQ ID NO: 3668858 - RNA, 13 nt, Human
uauuacacuguau

SEQ ID NO: 3668859 - RNA, 19 nt, Human
uauuacacuguauuuguau

SEQ ID NO: 3668860 - RNA, 19 nt, Human
uauuacagauaaaauguaa

SEQ ID NO: 3668861 - RNA, 15 nt, Human
uauuacaguguuuau

SEQ ID NO: 3668862 - RNA, 16 nt, Human
uauuacaguguuuauc

SEQ ID NO: 3668863 - RNA, 19 nt, Human
uauuacaguguuuauccuu

SEQ ID NO: 3668864 - RNA, 12 nt, Human
uauuacaucuuu

SEQ ID NO: 3668865 - RNA, 15 nt, Human
uauuacauuuucagu

SEQ ID NO: 3668866 - RNA, 20 nt, Human
uauuaccaccaucccgugcu

SEQ ID NO: 3668867 - RNA, 20 nt, Human
uauuaccagcaagaauaaaa

SEQ ID NO: 3668868 - RNA, 22 nt, Human
uauuacccaagaaguaaagaug

SEQ ID NO: 3668869 - RNA, 22 nt, Human
uauuacccccuccuucagacac

SEQ ID NO: 3668870 - RNA, 11 nt, Human
uauuaccucug

SEQ ID NO: 3668871 - RNA, 20 nt, Human
uauuacgaaguucaagauca

SEQ ID NO: 3668872 - RNA, 21 nt, Human
uauuacgaaguucaagaucaa

SEQ ID NO: 3668873 - RNA, 16 nt, Human
uauuacgguuugcccc

SEQ ID NO: 3668874 - RNA, 16 nt, Human
uauuacguaugucugg

SEQ ID NO: 3668875 - RNA, 14 nt, Human
uauuacuaaauuga

SEQ ID NO: 3668876 - RNA, 22 nt, Human
uauuacuagacugccacaagga

SEQ ID NO: 3668877 - RNA, 19 nt, Human
uauuacuuguaaauauaaa

SEQ ID NO: 3668878 - RNA, 14 nt, Human
uauuacuuguugca

SEQ ID NO: 3668879 - RNA, 21 nt, Human
uauuacuuguugcaaaggucu

SEQ ID NO: 3668880 - RNA, 14 nt, Human
uauuacuuuaucac

SEQ ID NO: 3668881 - RNA, 23 nt, Human
uauuacuuuaucacuuuuugaac

SEQ ID NO: 3668882 - RNA, 16 nt, Human
uauuagaaaacuuugu

SEQ ID NO: 3668883 - RNA, 16 nt, Human
uauuagacuuuagaaa

SEQ ID NO: 3668884 - RNA, 12 nt, Human
uauuagagaaga

SEQ ID NO: 3668885 - RNA, 16 nt, Human
uauuagagcauugaau

SEQ ID NO: 3668886 - RNA, 22 nt, Human
uauuagaucaaauaguugcaua

SEQ ID NO: 3668887 - RNA, 20 nt, Human
uauuagaugugauuuaauag

SEQ ID NO: 3668888 - RNA, 12 nt, Human
uauuagauguuc

SEQ ID NO: 3668889 - RNA, 23 nt, Human
uauuagcagcugacuuucaaagu

SEQ ID NO: 3668890 - RNA, 23 nt, Human
uauuagccacaaaauugggaaag

SEQ ID NO: 3668891 - RNA, 19 nt, Human
uauuagccaggaucauggu

SEQ ID NO: 3668892 - RNA, 23 nt, Human
uauuagccaggaucaugguguaa

SEQ ID NO: 3668893 - RNA, 21 nt, Human
uauuagccagguaaugugaau

SEQ ID NO: 3668894 - RNA, 20 nt, Human
uauuagcgacaacagauugg

SEQ ID NO: 3668895 - RNA, 21 nt, Human
uauuagcgacaacagauugga

SEQ ID NO: 3668896 - RNA, 16 nt, Human
uauuagggagaaaauu

SEQ ID NO: 3668897 - RNA, 15 nt, Human
uauuagguugucacg

SEQ ID NO: 3668898 - RNA, 20 nt, Human
uauuaguauuguuguccuuu

SEQ ID NO: 3668899 - RNA, 21 nt, Human
uauuaguauuguuguccuuuu

SEQ ID NO: 3668900 - RNA, 19 nt, Human
uauuagugaccucagcuuu

SEQ ID NO: 3668901 - RNA, 21 nt, Human
uauuagugaccucagcuuuga

SEQ ID NO: 3668902 - RNA, 18 nt, Human
uauuagugauauuucucu

SEQ ID NO: 3668903 - RNA, 16 nt, Human
uauuagugcuuugcca

SEQ ID NO: 3668904 - RNA, 16 nt, Human
uauuaguguaugcuuu

SEQ ID NO: 3668905 - RNA, 21 nt, Human
uauuaguguuauaugaacaua

SEQ ID NO: 3668906 - RNA, 23 nt, Human
uauuaguucccugucucuugaaa

SEQ ID NO: 3668907 - RNA, 17 nt, Human
uauuauaaaaauauuaa

SEQ ID NO: 3668908 - RNA, 13 nt, Human
uauuauaaacaag

SEQ ID NO: 3668909 - RNA, 16 nt, Human
uauuauaaaggauaaa

SEQ ID NO: 3668910 - RNA, 15 nt, Human
uauuauaaauauaua

SEQ ID NO: 3668911 - RNA, 20 nt, Human
uauuauaaauauauauaaag

SEQ ID NO: 3668912 - RNA, 15 nt, Human
uauuauaaauuaugu

SEQ ID NO: 3668913 - RNA, 13 nt, Human
uauuauaagcauu

SEQ ID NO: 3668914 - RNA, 19 nt, Human
uauuauaaucuuauaauug

SEQ ID NO: 3668915 - RNA, 19 nt, Human
uauuauaauuuuuuucaau

SEQ ID NO: 3668916 - RNA, 14 nt, Human
uauuauacauguga

SEQ ID NO: 3668917 - RNA, 14 nt, Human
uauuauaccuuuuu

SEQ ID NO: 3668918 - RNA, 15 nt, Human
uauuauacuguauua

SEQ ID NO: 3668919 - RNA, 19 nt, Human
uauuauacuguauuaagag

SEQ ID NO: 3668920 - RNA, 17 nt, Human
uauuauagagcagaaau

SEQ ID NO: 3668921 - RNA, 18 nt, Human
uauuauagagcagaaauu

SEQ ID NO: 3668922 - RNA, 19 nt, Human
uauuauagagcagaaauuc

SEQ ID NO: 3668923 - RNA, 16 nt, Human
uaucauacaaaucagu

SEQ ID NO: 3668924 - RNA, 15 nt, Human
uaucauagaaaugua

SEQ ID NO: 3668925 - RNA, 16 nt, Human
uaucaucaguauugaa

SEQ ID NO: 3668926 - RNA, 17 nt, Human
uaucaucuaccuagauu

SEQ ID NO: 3668927 - RNA, 12 nt, Human
uaucaugaagcc

SEQ ID NO: 3668928 - RNA, 14 nt, Human
uaucaugaagccug

SEQ ID NO: 3668929 - RNA, 18 nt, Human
uaucaugaauuuuaaagu

SEQ ID NO: 3668930 - RNA, 13 nt, Human
uaucaugacaugu

SEQ ID NO: 3668931 - RNA, 14 nt, Human
uaucaugacauguu

SEQ ID NO: 3668932 - RNA, 16 nt, Human
uaucaugagugaauaa

SEQ ID NO: 3668933 - RNA, 15 nt, Human
uaucaugcaaaauau

SEQ ID NO: 3668934 - RNA, 15 nt, Human
uaucaugcaaaugcu

SEQ ID NO: 3668935 - RNA, 23 nt, Human
uaucaugcacacaauuagauuuc

SEQ ID NO: 3668936 - RNA, 17 nt, Human
uaucaugcauguccugu

SEQ ID NO: 3668937 - RNA, 19 nt, Human
uaucaugcauguccuguaa

SEQ ID NO: 3668938 - RNA, 17 nt, Human
uaucaugcuuugaaaaa

SEQ ID NO: 3668939 - RNA, 14 nt, Human
uaucauggaaauau

SEQ ID NO: 3668940 - RNA, 21 nt, Human
uaucauguaaagaaaugucuu

SEQ ID NO: 3668941 - RNA, 17 nt, Human
uaucaugugaaaucauu

SEQ ID NO: 3668942 - RNA, 22 nt, Human
uaucaugugaaaucauucauuu

SEQ ID NO: 3668943 - RNA, 17 nt, Human
uaucauguguaaucaau

SEQ ID NO: 3668944 - RNA, 20 nt, Human
uaucauguguaaucaauaaa

SEQ ID NO: 3668945 - RNA, 18 nt, Human
uaucauuaaaagaacaua

SEQ ID NO: 3668946 - RNA, 12 nt, Human
uaucauuaaagu

SEQ ID NO: 3668947 - RNA, 14 nt, Human
uaucauucuaaaga

SEQ ID NO: 3668948 - RNA, 22 nt, Human
uaucauuuaauaauauacuugu

SEQ ID NO: 3668949 - RNA, 15 nt, Human
uaucauuucuuaacc

SEQ ID NO: 3668950 - RNA, 17 nt, Human
uaucauuucuuaaccca

SEQ ID NO: 3668951 - RNA, 20 nt, Human
uaucauuuucuuuuuuaacc

SEQ ID NO: 3668952 - RNA, 15 nt, Human
uaucauuuuuguaca

SEQ ID NO: 3668953 - RNA, 17 nt, Human
uaucauuuuuguacagu

SEQ ID NO: 3668954 - RNA, 18 nt, Human
uaucauuuuuuccuguuu

SEQ ID NO: 3668955 - RNA, 22 nt, Human
uauccaaaauguguauuucuua

SEQ ID NO: 3668956 - RNA, 19 nt, Human
uauccaacaucaacaucuu

SEQ ID NO: 3668957 - RNA, 18 nt, Human
uauccaaccaacuugguu

SEQ ID NO: 3668958 - RNA, 14 nt, Human
uauccaaucuuguu

SEQ ID NO: 3668959 - RNA, 16 nt, Human
uauccacaugaaaaua

SEQ ID NO: 3668960 - RNA, 12 nt, Human
uauccacccagc

SEQ ID NO: 3668961 - RNA, 20 nt, Human
uauccacccagcccauucuc

SEQ ID NO: 3668962 - RNA, 21 nt, Human
uauccagaauggaauuuugcu

SEQ ID NO: 3668963 - RNA, 18 nt, Human
uauccagaggacccaacu

SEQ ID NO: 3668964 - RNA, 15 nt, Human
uauccaggcaccagg

SEQ ID NO: 3668965 - RNA, 18 nt, Human
uauccaggcaccaggacu

SEQ ID NO: 3668966 - RNA, 18 nt, Human
uauccagguaauccaaga

SEQ ID NO: 3668967 - RNA, 15 nt, Human
uauccaggucaacag

SEQ ID NO: 3668968 - RNA, 17 nt, Human
uauccaggucaacagaa

SEQ ID NO: 3668969 - RNA, 11 nt, Human
uauccagucua

SEQ ID NO: 3668970 - RNA, 22 nt, Human
uauccauauugagucaaauggu

SEQ ID NO: 3668971 - RNA, 17 nt, Human
uauccaugggggcaggg

SEQ ID NO: 3668972 - RNA, 18 nt, Human
uauccaugggggcagggc

SEQ ID NO: 3668973 - RNA, 20 nt, Human
uauccaugggggcagggcau

SEQ ID NO: 3668974 - RNA, 20 nt, Human
uauccauguacuuguuugca

SEQ ID NO: 3668975 - RNA, 14 nt, Human
uauccauuaucaug

SEQ ID NO: 3668976 - RNA, 15 nt, Human
uauccauuaucaugu

SEQ ID NO: 3668977 - RNA, 17 nt, Human
uauccauuaucaugugu

SEQ ID NO: 3668978 - RNA, 16 nt, Human
uauccauucuuucuga

SEQ ID NO: 3668979 - RNA, 22 nt, Human
uaucccaccugacauguccuuc

SEQ ID NO: 3668980 - RNA, 14 nt, Human
uaucccagaaauua

SEQ ID NO: 3668981 - RNA, 16 nt, Human
uaucccagcugccuag

SEQ ID NO: 3668982 - RNA, 21 nt, Human
uauccccaucucccugccugg

SEQ ID NO: 3668983 - RNA, 22 nt, Human
uauccccaucucccugccuggc

SEQ ID NO: 3668984 - RNA, 17 nt, Human
uauccccccaucuugcu

SEQ ID NO: 3668985 - RNA, 14 nt, Human
uauccccugcuacc

SEQ ID NO: 3668986 - RNA, 16 nt, Human
uaucccggcugcccuu

SEQ ID NO: 3668987 - RNA, 15 nt, Human
uaucccucaccugua

SEQ ID NO: 3668988 - RNA, 12 nt, Human
uaucccuuccgg

SEQ ID NO: 3668989 - RNA, 19 nt, Human
uaucccuuggacauuuuau

SEQ ID NO: 3668990 - RNA, 16 nt, Human
uauccuaaacaucauu

SEQ ID NO: 3668991 - RNA, 12 nt, Human
uauccuaauaaa

SEQ ID NO: 3668992 - RNA, 19 nt, Human
uauccuaauaaaaagguga

SEQ ID NO: 3668993 - RNA, 22 nt, Human
uauccuaauaaaaaggugacca

SEQ ID NO: 3668994 - RNA, 15 nt, Human
uauccuacaacaaga

SEQ ID NO: 3668995 - RNA, 19 nt, Human
uauccuagcacaugcuuca

SEQ ID NO: 3668996 - RNA, 24 nt, Human
uauccuagcacaugcuucaauagu

SEQ ID NO: 3668997 - RNA, 20 nt, Human
uauccuagucauucuucccu

SEQ ID NO: 3668998 - RNA, 12 nt, Human
uauccuccaggu

SEQ ID NO: 3668999 - RNA, 13 nt, Human
uauccuccagguu

SEQ ID NO: 3669000 - RNA, 17 nt, Human
uauccuccagguuuuuc

SEQ ID NO: 3669001 - RNA, 21 nt, Human
uauccuccagguuuuucaauu

SEQ ID NO: 3669002 - RNA, 23 nt, Human
uauccuccagguuuuucaauuaa

SEQ ID NO: 3669003 - RNA, 12 nt, Human
uauccucccugu

SEQ ID NO: 3669004 - RNA, 17 nt, Human
uauccucccuguaacuu

SEQ ID NO: 3669005 - RNA, 14 nt, Human
uauccucucuuccu

SEQ ID NO: 3669006 - RNA, 15 nt, Human
uauccucucuuccuc

SEQ ID NO: 3669007 - RNA, 14 nt, Human
uauccucugaucuc

SEQ ID NO: 3669008 - RNA, 20 nt, Human
uauccucugaucuccauggc

SEQ ID NO: 3669009 - RNA, 14 nt, Human
uauccucuguugau

SEQ ID NO: 3669010 - RNA, 16 nt, Human
uauccucuuuagaguu

SEQ ID NO: 3669011 - RNA, 23 nt, Human
uauccucuuuagaguuagacugu

SEQ ID NO: 3669012 - RNA, 14 nt, Human
uauccugaaauuuc

SEQ ID NO: 3669013 - RNA, 16 nt, Human
uauccugaaauuucag

SEQ ID NO: 3669014 - RNA, 23 nt, Human
uauccugacuucuaauaucauuc

SEQ ID NO: 3669015 - RNA, 18 nt, Human
uauccugagagcccagaa

SEQ ID NO: 3669016 - RNA, 13 nt, Human
uauccugagccau

SEQ ID NO: 3669017 - RNA, 22 nt, Human
uauccugauuauaggauuuuaa

SEQ ID NO: 3669018 - RNA, 15 nt, Human
uauccugcauuguua

SEQ ID NO: 3669019 - RNA, 20 nt, Human
uauccugccucagcccgcca

SEQ ID NO: 3669020 - RNA, 22 nt, Human
uauccugcuucugauaugcagu

SEQ ID NO: 3669021 - RNA, 20 nt, Human
uauccuggagcauuguguau

SEQ ID NO: 3669022 - RNA, 22 nt, Human
uauccugggggacccaauguag

SEQ ID NO: 3669023 - RNA, 19 nt, Human
uauccugugacauguaaca

SEQ ID NO: 3669024 - RNA, 17 nt, Human
uauuuugaaguuuacau

SEQ ID NO: 3669025 - RNA, 15 nt, Human
uauuuugaaucaaua

SEQ ID NO: 3669026 - RNA, 23 nt, Human
uauuuugaaucaauaauauauuu

SEQ ID NO: 3669027 - RNA, 14 nt, Human
uauuuugauaauaa

SEQ ID NO: 3669028 - RNA, 15 nt, Human
uauuuugauaauaau

SEQ ID NO: 3669029 - RNA, 18 nt, Human
uauuuugauaauaauauu

SEQ ID NO: 3669030 - RNA, 12 nt, Human
uauuuugaucuu

SEQ ID NO: 3669031 - RNA, 18 nt, Human
uauuuugaucuucaacaa

SEQ ID NO: 3669032 - RNA, 16 nt, Human
uauuuugauuauugua

SEQ ID NO: 3669033 - RNA, 17 nt, Human
uauuuugauuauuguau

SEQ ID NO: 3669034 - RNA, 21 nt, Human
uauuuugcaguucccacauua

SEQ ID NO: 3669035 - RNA, 18 nt, Human
uauuuuggaaagaagaaa

SEQ ID NO: 3669036 - RNA, 16 nt, Human
uauuuuggagaaauua

SEQ ID NO: 3669037 - RNA, 19 nt, Human
uauuuugguucuuaguucu

SEQ ID NO: 3669038 - RNA, 22 nt, Human
uauuuuguaaaauguauuaugu

SEQ ID NO: 3669039 - RNA, 15 nt, Human
uauuuuguaugaaau

SEQ ID NO: 3669040 - RNA, 14 nt, Human
uauuuuguaugcaa

SEQ ID NO: 3669041 - RNA, 20 nt, Human
uauuuuguauuauugcuguu

SEQ ID NO: 3669042 - RNA, 12 nt, Human
uauuuugucuaa

SEQ ID NO: 3669043 - RNA, 14 nt, Human
uauuuugucuaaaa

SEQ ID NO: 3669044 - RNA, 13 nt, Human
uauuuugugaaga

SEQ ID NO: 3669045 - RNA, 23 nt, Human
uauuuuguggaggcagugucauu

SEQ ID NO: 3669046 - RNA, 17 nt, Human
uauuuugugugaccaac

SEQ ID NO: 3669047 - RNA, 16 nt, Human
uauuuuguucauacau

SEQ ID NO: 3669048 - RNA, 17 nt, Human
uauuuuguuucuuuuaa

SEQ ID NO: 3669049 - RNA, 13 nt, Human
uauuuuuaaaaga

SEQ ID NO: 3669050 - RNA, 17 nt, Human
uauuuuuaaaagaucuu

SEQ ID NO: 3669051 - RNA, 14 nt, Human
uauuuuuaagauaa

SEQ ID NO: 3669052 - RNA, 21 nt, Human
uauuuuuaauauauacuauga

SEQ ID NO: 3669053 - RNA, 14 nt, Human
uauuuuuaauuaau

SEQ ID NO: 3669054 - RNA, 16 nt, Human
uauuuuuacaugcaga

SEQ ID NO: 3669055 - RNA, 18 nt, Human
uauuuuuacauucugaau

SEQ ID NO: 3669056 - RNA, 15 nt, Human
uauuuuuacugccac

SEQ ID NO: 3669057 - RNA, 16 nt, Human
uauuuuuacugccacu

SEQ ID NO: 3669058 - RNA, 19 nt, Human
uauuuuuagacucaucaau

SEQ ID NO: 3669059 - RNA, 22 nt, Human
uauuuuuauaaauauaagccuu

SEQ ID NO: 3669060 - RNA, 21 nt, Human
uauuuuuauacucuuccuauu

SEQ ID NO: 3669061 - RNA, 19 nt, Human
uauuuuuauagauuugacc

SEQ ID NO: 3669062 - RNA, 18 nt, Human
uauuuuuauauaauaucu

SEQ ID NO: 3669063 - RNA, 19 nt, Human
uauuuuuauauaauaucua

SEQ ID NO: 3669064 - RNA, 15 nt, Human
uauuuuucaaggaag

SEQ ID NO: 3669065 - RNA, 18 nt, Human
uauuuuucaauaaagcau

SEQ ID NO: 3669066 - RNA, 22 nt, Human
uauuuuucacucuaagucaugu

SEQ ID NO: 3669067 - RNA, 16 nt, Human
uauuuuucauaaacaa

SEQ ID NO: 3669068 - RNA, 15 nt, Human
ucaaacuuacuauuu

SEQ ID NO: 3669069 - RNA, 22 nt, Human
ucaaacuuccagugcaacacug

SEQ ID NO: 3669070 - RNA, 16 nt, Human
ucaaagaaaugcugau

SEQ ID NO: 3669071 - RNA, 13 nt, Human
ucaaagaaauuuc

SEQ ID NO: 3669072 - RNA, 20 nt, Human
ucaaagaaauuuccacucag

SEQ ID NO: 3669073 - RNA, 15 nt, Human
ucaaagaacaaacau

SEQ ID NO: 3669074 - RNA, 22 nt, Human
ucaaagaaggauggcaccuaaa

SEQ ID NO: 3669075 - RNA, 19 nt, Human
ucaaagaccuuguguguau

SEQ ID NO: 3669076 - RNA, 22 nt, Human
ucaaagauauuuugcuuuguga

SEQ ID NO: 3669077 - RNA, 16 nt, Human
ucaaagcaaggaaacu

SEQ ID NO: 3669078 - RNA, 14 nt, Human
ucaaagcaaugcau

SEQ ID NO: 3669079 - RNA, 21 nt, Human
ucaaagcaauugaaaugcauu

SEQ ID NO: 3669080 - RNA, 19 nt, Human
ucaaagcaggggaguaugc

SEQ ID NO: 3669081 - RNA, 20 nt, Human
ucaaagcaugggauuauuag

SEQ ID NO: 3669082 - RNA, 15 nt, Human
ucaaagccacacucu

SEQ ID NO: 3669083 - RNA, 18 nt, Human
ucaaagccacauuauuuc

SEQ ID NO: 3669084 - RNA, 21 nt, Human
ucaaagccccauuaacugcuu

SEQ ID NO: 3669085 - RNA, 11 nt, Human
ucaaagccuuc

SEQ ID NO: 3669086 - RNA, 19 nt, Human
ucaaagcucacaccaaauu

SEQ ID NO: 3669087 - RNA, 19 nt, Human
ucaaagcuguguguuugga

SEQ ID NO: 3669088 - RNA, 21 nt, Human
ucaaagcuuccauuccacauc

SEQ ID NO: 3669089 - RNA, 15 nt, Human
ucaaagcuuuuugaa

SEQ ID NO: 3669090 - RNA, 15 nt, Human
ucaaaggacaaagug

SEQ ID NO: 3669091 - RNA, 22 nt, Human
ucaaaggagagucacagaacaa

SEQ ID NO: 3669092 - RNA, 17 nt, Human
ucaaagggacggucagu

SEQ ID NO: 3669093 - RNA, 19 nt, Human
ucaaagguagccaucaugg

SEQ ID NO: 3669094 - RNA, 12 nt, Human
ucaaagguucua

SEQ ID NO: 3669095 - RNA, 14 nt, Human
ucaaaguaaaacuu

SEQ ID NO: 3669096 - RNA, 19 nt, Human
ucaaagucaugauguuuuu

SEQ ID NO: 3669097 - RNA, 18 nt, Human
ucaaagucauuaaagaca

SEQ ID NO: 3669098 - RNA, 20 nt, Human
ucaaagucucaaugaaauag

SEQ ID NO: 3669099 - RNA, 13 nt, Human
ucaaaguuuaaua

SEQ ID NO: 3669100 - RNA, 15 nt, Human
ucaaaguuuugaaaa

SEQ ID NO: 3669101 - RNA, 13 nt, Human
ucaaaguuuuguu

SEQ ID NO: 3669102 - RNA, 14 nt, Human
ucaaauaaaaauaa

SEQ ID NO: 3669103 - RNA, 14 nt, Human
ucaaauaaacacug

SEQ ID NO: 3669104 - RNA, 18 nt, Human
ucaaauaacuaaaaggua

SEQ ID NO: 3669105 - RNA, 16 nt, Human
ucaaauacacauuugc

SEQ ID NO: 3669106 - RNA, 22 nt, Human
ucaaauacauuuaaaacauuaa

SEQ ID NO: 3669107 - RNA, 12 nt, Human
ucaaauacuuua

SEQ ID NO: 3669108 - RNA, 22 nt, Human
ucaaauauauucagccuggcuu

SEQ ID NO: 3669109 - RNA, 18 nt, Human
ucaaauaucucuauuuaa

SEQ ID NO: 3669110 - RNA, 14 nt, Human
ucaaauaugcaaag

SEQ ID NO: 3669111 - RNA, 16 nt, Human
ucaaauaugcaaagca

SEQ ID NO: 3669112 - RNA, 19 nt, Human
ucaaauaugcaaagcacug

SEQ ID NO: 3669113 - RNA, 20 nt, Human
ucaaaucaaucuguaaaacu

SEQ ID NO: 3669114 - RNA, 22 nt, Human
ucaaaucagguuuucuuuuaag

SEQ ID NO: 3669115 - RNA, 14 nt, Human
ucaaaucagucagu

SEQ ID NO: 3669116 - RNA, 15 nt, Human
ucaaauccaggaccc

SEQ ID NO: 3669117 - RNA, 16 nt, Human
ucaaauccaggacccu

SEQ ID NO: 3669118 - RNA, 21 nt, Human
ucaaauccuuccaaaaauuau

SEQ ID NO: 3669119 - RNA, 14 nt, Human
ucaaaucuauucag

SEQ ID NO: 3669120 - RNA, 18 nt, Human
ucaaaucuauucagacaa

SEQ ID NO: 3669121 - RNA, 19 nt, Human
ucaaaugacccaaagacca

SEQ ID NO: 3669122 - RNA, 21 nt, Human
ucaaaugaugugccugcuuca

SEQ ID NO: 3669123 - RNA, 16 nt, Human
ucaaaugcaguauauu

SEQ ID NO: 3669124 - RNA, 18 nt, Human
ucaaaugcuagaaaaauu

SEQ ID NO: 3669125 - RNA, 21 nt, Human
ucaaaugcuuggcuucucaua

SEQ ID NO: 3669126 - RNA, 23 nt, Human
ucaaauggaaaggagaggaaaga

SEQ ID NO: 3669127 - RNA, 18 nt, Human
ucaaaugggcugcugcuu

SEQ ID NO: 3669128 - RNA, 19 nt, Human
ucaaauggggccagaucca

SEQ ID NO: 3669129 - RNA, 20 nt, Human
ucaaaugguaggcauuuccu

SEQ ID NO: 3669130 - RNA, 16 nt, Human
ucaaaugguaucuuuu

SEQ ID NO: 3669131 - RNA, 16 nt, Human
ucaaauguguuuuggu

SEQ ID NO: 3669132 - RNA, 20 nt, Human
ucaaauguucuaaguuucua

SEQ ID NO: 3669133 - RNA, 21 nt, Human
ucaaauguucuaaguuucuaa

SEQ ID NO: 3669134 - RNA, 22 nt, Human
ucaaauguucuaaguuucuaag

SEQ ID NO: 3669135 - RNA, 22 nt, Human
ucaaauuaauaaucuuauuagg

SEQ ID NO: 3669136 - RNA, 13 nt, Human
ucaaauuaauugu

SEQ ID NO: 3669137 - RNA, 14 nt, Human
ucaaauucuucuga

SEQ ID NO: 3669138 - RNA, 20 nt, Human
ucaaauuggacuuucaaaau

SEQ ID NO: 3669139 - RNA, 12 nt, Human
ucaaauuguauc

SEQ ID NO: 3669140 - RNA, 13 nt, Human
ucaaauuguaucu

SEQ ID NO: 3669141 - RNA, 14 nt, Human
ucaaauuguaucua

SEQ ID NO: 3669142 - RNA, 22 nt, Human
ucaaauugugcaguacuuugug

SEQ ID NO: 3669143 - RNA, 12 nt, Human
ucaaauuucaca

SEQ ID NO: 3669144 - RNA, 14 nt, Human
ucaaauuucuaaau

SEQ ID NO: 3669145 - RNA, 14 nt, Human
ucaaauuuuaucug

SEQ ID NO: 3669146 - RNA, 18 nt, Human
ucaacaaaaauugucccu

SEQ ID NO: 3669147 - RNA, 15 nt, Human
ucaacaaagcacagu

SEQ ID NO: 3669148 - RNA, 22 nt, Human
ucaacaaauauucacuggcccc

SEQ ID NO: 3669149 - RNA, 16 nt, Human
ucaacaaauugcccuu

SEQ ID NO: 3669150 - RNA, 14 nt, Human
ucaacaacuacuac

SEQ ID NO: 3669151 - RNA, 18 nt, Human
ucaacaagaaauaauaga

SEQ ID NO: 3669152 - RNA, 16 nt, Human
ucaacaagaagaauuu

SEQ ID NO: 3669153 - RNA, 20 nt, Human
ucaacaagauuuccuugugc

SEQ ID NO: 3669154 - RNA, 16 nt, Human
ucaacaagggagagac

SEQ ID NO: 3669155 - RNA, 19 nt, Human
ucaacaagggagagaccuc

SEQ ID NO: 3669156 - RNA, 22 nt, Human
ucaacaagggagagaccucauc

SEQ ID NO: 3669157 - RNA, 17 nt, Human
ucaacaauucuaaaaug

SEQ ID NO: 3669158 - RNA, 14 nt, Human
ucaacacccaguuu

SEQ ID NO: 3669159 - RNA, 23 nt, Human
ucaacacuaccagcguauauaua

SEQ ID NO: 3669160 - RNA, 18 nt, Human
ucaacacucccuucccau

SEQ ID NO: 3669161 - RNA, 15 nt, Human
ucaacagaagcauuu

SEQ ID NO: 3669162 - RNA, 12 nt, Human
ucaacagaauga

SEQ ID NO: 3669163 - RNA, 19 nt, Human
ucaacagaaugaaaaauga

SEQ ID NO: 3669164 - RNA, 22 nt, Human
ucaacagagaaggcaggaaugu

SEQ ID NO: 3669165 - RNA, 22 nt, Human
ucaacagauuauuuuggaaagu

SEQ ID NO: 3669166 - RNA, 22 nt, Human
ucaacagcaagugugaauacug

SEQ ID NO: 3669167 - RNA, 19 nt, Human
ucaacagcagggugggcuu

SEQ ID NO: 3669168 - RNA, 22 nt, Human
ucaacagcguuccuagagaaga

SEQ ID NO: 3669169 - RNA, 23 nt, Human
ucaacaggccucagggcuccuug

SEQ ID NO: 3669170 - RNA, 14 nt, Human
ucaacagggcagca

SEQ ID NO: 3669171 - RNA, 18 nt, Human
ucaacaguaaaccacuga

SEQ ID NO: 3669172 - RNA, 15 nt, Human
ucaacagugaagaca

SEQ ID NO: 3669173 - RNA, 16 nt, Human
ucaacagugagagacu

SEQ ID NO: 3669174 - RNA, 23 nt, Human
ucaacaguuuuccuaugcuuuga

SEQ ID NO: 3669175 - RNA, 17 nt, Human
ucaacauaccuuggcca

SEQ ID NO: 3669176 - RNA, 20 nt, Human
ucaacaucaauguucauugu

SEQ ID NO: 3669177 - RNA, 23 nt, Human
ucaacaucaauguucauuguaau

SEQ ID NO: 3669178 - RNA, 17 nt, Human
ucaacaucacugaaacc

SEQ ID NO: 3669179 - RNA, 20 nt, Human
ucaacauccugccagcccca

SEQ ID NO: 3669180 - RNA, 15 nt, Human
ucaacaugaaacacc

SEQ ID NO: 3669181 - RNA, 21 nt, Human
ucaacauggcuacuugcuuug

SEQ ID NO: 3669182 - RNA, 20 nt, Human
ucaacauguuacugaccagc

SEQ ID NO: 3669183 - RNA, 14 nt, Human
ucaacauuucucaa

SEQ ID NO: 3669184 - RNA, 14 nt, Human
ucaaccacaaaacu

SEQ ID NO: 3669185 - RNA, 17 nt, Human
ucaaccaccuuucagau

SEQ ID NO: 3669186 - RNA, 23 nt, Human
ucaaccacuguaaaaugaaauua

SEQ ID NO: 3669187 - RNA, 12 nt, Human
ucaaccagacag

SEQ ID NO: 3669188 - RNA, 19 nt, Human
ucaaccagacagaggguca

SEQ ID NO: 3669189 - RNA, 14 nt, Human
uaugaaacuugugu

SEQ ID NO: 3669190 - RNA, 19 nt, Human
uaugaaacuuguguaaaua

SEQ ID NO: 3669191 - RNA, 21 nt, Human
uaugaaacuuguguaaauaca

SEQ ID NO: 3669192 - RNA, 23 nt, Human
uaugaaagaauauauuuauuuaa

SEQ ID NO: 3669193 - RNA, 19 nt, Human
uaugaaagcaacaaagaaa

SEQ ID NO: 3669194 - RNA, 20 nt, Human
uaugaaauuuaauauagcua

SEQ ID NO: 3669195 - RNA, 20 nt, Human
uaugaaauuuuuuuucaugc

SEQ ID NO: 3669196 - RNA, 14 nt, Human
uaugaacaacucca

SEQ ID NO: 3669197 - RNA, 14 nt, Human
uaugaacagacuuu

SEQ ID NO: 3669198 - RNA, 17 nt, Human
uaugaacauacaaaugc

SEQ ID NO: 3669199 - RNA, 14 nt, Human
uaugaacauauugu

SEQ ID NO: 3669200 - RNA, 19 nt, Human
uaugaacauauuguugaaa

SEQ ID NO: 3669201 - RNA, 22 nt, Human
uaugaacccuuccugagcuuua

SEQ ID NO: 3669202 - RNA, 20 nt, Human
uaugaacccuuuguuucuug

SEQ ID NO: 3669203 - RNA, 21 nt, Human
uaugaacccuuuguuucuugu

SEQ ID NO: 3669204 - RNA, 18 nt, Human
uaugaacucaucauuuuu

SEQ ID NO: 3669205 - RNA, 14 nt, Human
uaugaacuuaacau

SEQ ID NO: 3669206 - RNA, 23 nt, Human
uaugaacuuaacaugcuguguaa

SEQ ID NO: 3669207 - RNA, 20 nt, Human
uaugaacuugaggacacaug

SEQ ID NO: 3669208 - RNA, 15 nt, Human
uaugaagaaaaaaua

SEQ ID NO: 3669209 - RNA, 14 nt, Human
uaugaagaaaauac

SEQ ID NO: 3669210 - RNA, 22 nt, Human
uaugaagaaaauacuuaaaugu

SEQ ID NO: 3669211 - RNA, 14 nt, Human
uaugaagaacugag

SEQ ID NO: 3669212 - RNA, 18 nt, Human
gccugggaaagccccugc

SEQ ID NO: 3669213 - RNA, 17 nt, Human
gccugggacuuccaugc

SEQ ID NO: 3669214 - RNA, 14 nt, Human
gccugggaucccuc

SEQ ID NO: 3669215 - RNA, 23 nt, Human
gccugggaucccucauccucaua

SEQ ID NO: 3669216 - RNA, 21 nt, Human
gccugggauuucuaugcagug

SEQ ID NO: 3669217 - RNA, 18 nt, Human
gccugggcaacagagcaa

SEQ ID NO: 3669218 - RNA, 12 nt, Human
gccugggcaaga

SEQ ID NO: 3669219 - RNA, 11 nt, Human
gccugggcaga

SEQ ID NO: 3669220 - RNA, 15 nt, Human
gccugggcagaagga

SEQ ID NO: 3669221 - RNA, 16 nt, Human
gccugggcagaaggaa

SEQ ID NO: 3669222 - RNA, 18 nt, Human
gccugggcagaaggaaga

SEQ ID NO: 3669223 - RNA, 18 nt, Human
gccugggcagccaggcug

SEQ ID NO: 3669224 - RNA, 23 nt, Human
gccugggcagccaggcugccaag

SEQ ID NO: 3669225 - RNA, 16 nt, Human
gccugggcaggaggga

SEQ ID NO: 3669226 - RNA, 13 nt, Human
gccugggccagag

SEQ ID NO: 3669227 - RNA, 23 nt, Human
gccugggcccaucucccugcuuu

SEQ ID NO: 3669228 - RNA, 15 nt, Human
gccugggccccagcu

SEQ ID NO: 3669229 - RNA, 18 nt, Human
gccugggccuauggagag

SEQ ID NO: 3669230 - RNA, 17 nt, Human
gccugggccuggcuccc

SEQ ID NO: 3669231 - RNA, 12 nt, Human
gccugggcuagg

SEQ ID NO: 3669232 - RNA, 23 nt, Human
gccugggcucccuugugcguggg

SEQ ID NO: 3669233 - RNA, 13 nt, Human
gccugggcuccug

SEQ ID NO: 3669234 - RNA, 15 nt, Human
gccugggcuccugga

SEQ ID NO: 3669235 - RNA, 16 nt, Human
gccugggcuccuggac

SEQ ID NO: 3669236 - RNA, 15 nt, Human
gccugggcugggaaa

SEQ ID NO: 3669237 - RNA, 15 nt, Human
gccugggcuguuggc

SEQ ID NO: 3669238 - RNA, 15 nt, Human
gccuggggccugaga

SEQ ID NO: 3669239 - RNA, 17 nt, Human
gccuggggcgggccccu

SEQ ID NO: 3669240 - RNA, 23 nt, Human
gccuggggcuccuuucuccagcc

SEQ ID NO: 3669241 - RNA, 21 nt, Human
gccugggggaguuuuccucua

SEQ ID NO: 3669242 - RNA, 15 nt, Human
gccugggggccuggc

SEQ ID NO: 3669243 - RNA, 19 nt, Human
gccugggggccuggcuggc

SEQ ID NO: 3669244 - RNA, 22 nt, Human
gccugggggcugggcagaggaa

SEQ ID NO: 3669245 - RNA, 18 nt, Human
gccuggggugacccggca

SEQ ID NO: 3669246 - RNA, 14 nt, Human
gccugggguggggu

SEQ ID NO: 3669247 - RNA, 16 nt, Human
gccuggggugggguca

SEQ ID NO: 3669248 - RNA, 22 nt, Human
ucaccuaagagauucugauuug

SEQ ID NO: 3669249 - RNA, 21 nt, Human
ucaccuaauguuuaugagcca

SEQ ID NO: 3669250 - RNA, 22 nt, Human
ucaccuaauguuuaugagccag

SEQ ID NO: 3669251 - RNA, 19 nt, Human
ucaccuacucacacaggca

SEQ ID NO: 3669252 - RNA, 15 nt, Human
ucaccuagagccaga

SEQ ID NO: 3669253 - RNA, 20 nt, Human
ucaccuagcugaauguuuuu

SEQ ID NO: 3669254 - RNA, 21 nt, Human
ucaccucacucagcaccacuc

SEQ ID NO: 3669255 - RNA, 17 nt, Human
ucaccucagauggcagc

SEQ ID NO: 3669256 - RNA, 19 nt, Human
ucaccucagauggcagcuu

SEQ ID NO: 3669257 - RNA, 21 nt, Human
ucaccucagauggcagcuuuu

SEQ ID NO: 3669258 - RNA, 23 nt, Human
ucaccucagauggcagcuuuuaa

SEQ ID NO: 3669259 - RNA, 13 nt, Human
ucaccucagccuc

SEQ ID NO: 3669260 - RNA, 23 nt, Human
ucaccucaugcccacccccugcc

SEQ ID NO: 3669261 - RNA, 13 nt, Human
ucaccuccccucc

SEQ ID NO: 3669262 - RNA, 14 nt, Human
ucaccuccccuccu

SEQ ID NO: 3669263 - RNA, 17 nt, Human
ucaccuccccuccuugc

SEQ ID NO: 3669264 - RNA, 15 nt, Human
ucaccuccugcuggg

SEQ ID NO: 3669265 - RNA, 20 nt, Human
ucaccucuaaaacaguccuu

SEQ ID NO: 3669266 - RNA, 18 nt, Human
ucaccucuacccaaaccc

SEQ ID NO: 3669267 - RNA, 12 nt, Human
ucaccucugccu

SEQ ID NO: 3669268 - RNA, 14 nt, Human
ucaccucugccuca

SEQ ID NO: 3669269 - RNA, 17 nt, Human
ucaccucuuaaagaaaa

SEQ ID NO: 3669270 - RNA, 16 nt, Human
ucaccugaagacucau

SEQ ID NO: 3669271 - RNA, 15 nt, Human
ucaccugaggucggg

SEQ ID NO: 3669272 - RNA, 12 nt, Human
ucaccugauuca

SEQ ID NO: 3669273 - RNA, 18 nt, Human
ucaccugauucaacuaaa

SEQ ID NO: 3669274 - RNA, 13 nt, Human
ucaccugccccuc

SEQ ID NO: 3669275 - RNA, 12 nt, Human
ucaccugccugu

SEQ ID NO: 3669276 - RNA, 11 nt, Human
ucaccugcugg

SEQ ID NO: 3669277 - RNA, 15 nt, Human
ucaccugcuggcccc

SEQ ID NO: 3669278 - RNA, 13 nt, Human
ucaccugcuucuc

SEQ ID NO: 3669279 - RNA, 12 nt, Human
ucaccuggcccu

SEQ ID NO: 3669280 - RNA, 14 nt, Human
ucaccuggcccugc

SEQ ID NO: 3669281 - RNA, 17 nt, Human
ucaccuggggcugcugg

SEQ ID NO: 3669282 - RNA, 22 nt, Human
ucaccuggggcugcuggccuga

SEQ ID NO: 3669283 - RNA, 19 nt, Human
ucaccuggggugugggagg

SEQ ID NO: 3669284 - RNA, 16 nt, Human
ucaccuguaaaacuuu

SEQ ID NO: 3669285 - RNA, 19 nt, Human
ucaccuguaaaacuuuauu

SEQ ID NO: 3669286 - RNA, 16 nt, Human
ucaccuguaaaccuga

SEQ ID NO: 3669287 - RNA, 16 nt, Human
ucaccuguacucuucc

SEQ ID NO: 3669288 - RNA, 18 nt, Human
ucaccuguacucuuccga

SEQ ID NO: 3669289 - RNA, 23 nt, Human
ucaccuguuacugaaagugguuu

SEQ ID NO: 3669290 - RNA, 14 nt, Human
ucaccuguugcuua

SEQ ID NO: 3669291 - RNA, 21 nt, Human
ucaccuguugcuuacaauuuu

SEQ ID NO: 3669292 - RNA, 18 nt, Human
ucaccuguuuuuaagcug

SEQ ID NO: 3669293 - RNA, 18 nt, Human
ucaccuuaggcagggaag

SEQ ID NO: 3669294 - RNA, 16 nt, Human
ucaccuucaguaaccc

SEQ ID NO: 3669295 - RNA, 12 nt, Human
ucaccuucccuu

SEQ ID NO: 3669296 - RNA, 17 nt, Human
ucaccuugaagaaccuc

SEQ ID NO: 3669297 - RNA, 21 nt, Human
ucaccuugcaacacacagaca

SEQ ID NO: 3669298 - RNA, 18 nt, Human
ucaccuuggcaccagaca

SEQ ID NO: 3669299 - RNA, 15 nt, Human
ucaccuugguuccug

SEQ ID NO: 3669300 - RNA, 20 nt, Human
ucaccuuguguguuccaagu

SEQ ID NO: 3669301 - RNA, 18 nt, Human
ucaccuuguuucucaacu

SEQ ID NO: 3669302 - RNA, 17 nt, Human
ucaccuuuacuuuagaa

SEQ ID NO: 3669303 - RNA, 15 nt, Human
ucaccuuuguagcac

SEQ ID NO: 3669304 - RNA, 19 nt, Human
ucaccuuuguagcacucag

SEQ ID NO: 3669305 - RNA, 12 nt, Human
ucaccuuugucc

SEQ ID NO: 3669306 - RNA, 14 nt, Human
ucaccuuugucccc

SEQ ID NO: 3669307 - RNA, 15 nt, Human
ucaccuuugucccca

SEQ ID NO: 3669308 - RNA, 17 nt, Human
ucaccuuuguccccacc

SEQ ID NO: 3669309 - RNA, 22 nt, Human
ucaccuuuguccccaccgcaga

SEQ ID NO: 3669310 - RNA, 17 nt, Human
ucaccuuuguguauuuu

SEQ ID NO: 3669311 - RNA, 12 nt, Human
ucaccuuuuaaa

SEQ ID NO: 3669312 - RNA, 22 nt, Human
ucaccuuuuaaauccuguugaa

SEQ ID NO: 3669313 - RNA, 16 nt, Human
ucacgaaguguugcau

SEQ ID NO: 3669314 - RNA, 22 nt, Human
ucacgaaguguugcauggaugu

SEQ ID NO: 3669315 - RNA, 19 nt, Human
ucacgaauauuaugcccag

SEQ ID NO: 3669316 - RNA, 13 nt, Human
ucacgauucauuu

SEQ ID NO: 3669317 - RNA, 16 nt, Human
ucacgcaccucccauc

SEQ ID NO: 3669318 - RNA, 14 nt, Human
ucacgccacugcac

SEQ ID NO: 3669319 - RNA, 16 nt, Human
ucacgccacugcacua

SEQ ID NO: 3669320 - RNA, 19 nt, Human
ucacgccuaugaucccagc

SEQ ID NO: 3669321 - RNA, 21 nt, Human
ucacgccuguaaucccagcac

SEQ ID NO: 3669322 - RNA, 23 nt, Human
ucacgccuguaaucccagcacuu

SEQ ID NO: 3669323 - RNA, 20 nt, Human
ucacgccuguaauccuagca

SEQ ID NO: 3669324 - RNA, 21 nt, Human
ucacgcuccccgccuguuccc

SEQ ID NO: 3669325 - RNA, 15 nt, Human
ucacgcuucacagug

SEQ ID NO: 3669326 - RNA, 14 nt, Human
ucacgcuucuucuu

SEQ ID NO: 3669327 - RNA, 16 nt, Human
ucacggaagagccuug

SEQ ID NO: 3669328 - RNA, 15 nt, Human
ucacggcucacugca

SEQ ID NO: 3669329 - RNA, 17 nt, Human
ucacgggacuauuucca

SEQ ID NO: 3669330 - RNA, 20 nt, Human
ucacguaaagcuagaaauga

SEQ ID NO: 3669331 - RNA, 13 nt, Human
ucacgucacacuu

SEQ ID NO: 3669332 - RNA, 16 nt, Human
ucacgucauaggaagu

SEQ ID NO: 3669333 - RNA, 17 nt, Human
ucacgucauaggaaguu

SEQ ID NO: 3669334 - RNA, 20 nt, Human
ucacguccugagaaagcuca

SEQ ID NO: 3669335 - RNA, 17 nt, Human
ucacgugcagcucaagg

SEQ ID NO: 3669336 - RNA, 17 nt, Human
ucacguuagaggaaaaa

SEQ ID NO: 3669337 - RNA, 18 nt, Human
ucacguuagaggaaaaau

SEQ ID NO: 3669338 - RNA, 19 nt, Human
ucacuaaaaggaagacagu

SEQ ID NO: 3669339 - RNA, 13 nt, Human
ucacuaaacucug

SEQ ID NO: 3669340 - RNA, 15 nt, Human
ucacuaaagcaugaa

SEQ ID NO: 3669341 - RNA, 22 nt, Human
ucacuaaagcaugaaaugugaa

SEQ ID NO: 3669342 - RNA, 14 nt, Human
ucacuaacauuaua

SEQ ID NO: 3669343 - RNA, 15 nt, Human
ucacuaacauuauau

SEQ ID NO: 3669344 - RNA, 21 nt, Human
ucacuaacauuauauugcaau

SEQ ID NO: 3669345 - RNA, 18 nt, Human
ucacuaauucauuaaucu

SEQ ID NO: 3669346 - RNA, 16 nt, Human
ucacuaauuuuuguau

SEQ ID NO: 3669347 - RNA, 22 nt, Human
ucacuaccauuguaacuuggau

SEQ ID NO: 3669348 - RNA, 14 nt, Human
ucacuaccuccuca

SEQ ID NO: 3669349 - RNA, 19 nt, Human
ucacuaccuccucagggau

SEQ ID NO: 3669350 - RNA, 22 nt, Human
ucacuacucacagucucuuuaa

SEQ ID NO: 3669351 - RNA, 12 nt, Human
ucacuacugcag

SEQ ID NO: 3669352 - RNA, 19 nt, Human
ucacuagaauggauaaaau

SEQ ID NO: 3669353 - RNA, 14 nt, Human
ucacuagccaugau

SEQ ID NO: 3669354 - RNA, 20 nt, Human
ucacuagugaccccuucccu

SEQ ID NO: 3669355 - RNA, 13 nt, Human
ucacuauaaaugg

SEQ ID NO: 3669356 - RNA, 19 nt, Human
ucacuauaaugugaaaugu

SEQ ID NO: 3669357 - RNA, 19 nt, Human
ucaaauaaaaauucuagau

SEQ ID NO: 3669358 - RNA, 23 nt, Human
ucaaauaaaacuagugacagcuu

SEQ ID NO: 3669359 - RNA, 13 nt, Human
ucaaauaagaaau

SEQ ID NO: 3669360 - RNA, 19 nt, Human
ucaaauaaguauuuauaau

SEQ ID NO: 3669361 - RNA, 11 nt, Human
ucaaauaauac

SEQ ID NO: 3669362 - RNA, 19 nt, Human
ucaaauaauaccuuagaag

SEQ ID NO: 3669363 - RNA, 21 nt, Human
ucaaauaauaccuuagaaggu

SEQ ID NO: 3669364 - RNA, 15 nt, Human
ucaaauacuuuaaag

SEQ ID NO: 3669365 - RNA, 21 nt, Human
ucaaauauauucagccuggcu

SEQ ID NO: 3669366 - RNA, 23 nt, Human
ucaaauauauucagccuggcuuc

SEQ ID NO: 3669367 - RNA, 17 nt, Human
ucaaauaugcaaagcac

SEQ ID NO: 3669368 - RNA, 16 nt, Human
ucaaauauuagaugug

SEQ ID NO: 3669369 - RNA, 16 nt, Human
ucaaaucagguuuucu

SEQ ID NO: 3669370 - RNA, 15 nt, Human
ucaaaucagucagug

SEQ ID NO: 3669371 - RNA, 16 nt, Human
ucaaauccacccauau

SEQ ID NO: 3669372 - RNA, 14 nt, Human
ucaaauccaggacc

SEQ ID NO: 3669373 - RNA, 19 nt, Human
ucaaauccuuccaaaaauu

SEQ ID NO: 3669374 - RNA, 16 nt, Human
ucaaauccuugaagau

SEQ ID NO: 3669375 - RNA, 20 nt, Human
ucaaaucuaccacuguauga

SEQ ID NO: 3669376 - RNA, 15 nt, Human
ucaaaucuauucaga

SEQ ID NO: 3669377 - RNA, 17 nt, Human
ucaaaucuauucagaca

SEQ ID NO: 3669378 - RNA, 14 nt, Human
ucaaaugaaaugua

SEQ ID NO: 3669379 - RNA, 22 nt, Human
ucaaaugaauaaugccuuugua

SEQ ID NO: 3669380 - RNA, 23 nt, Human
ucaaaugaauggaggaacuuucc

SEQ ID NO: 3669381 - RNA, 17 nt, Human
ucaaaugacccaaagac

SEQ ID NO: 3669382 - RNA, 22 nt, Human
ucaaaugaguaacauuugcugu

SEQ ID NO: 3669383 - RNA, 15 nt, Human
ucaaaugaugugcaa

SEQ ID NO: 3669384 - RNA, 19 nt, Human
ucaaaugcaguauauuucu

SEQ ID NO: 3669385 - RNA, 20 nt, Human
ucaaaugcaguauauuucuu

SEQ ID NO: 3669386 - RNA, 15 nt, Human
ucaaauggaaaggag

SEQ ID NO: 3669387 - RNA, 18 nt, Human
ucaaauggggccagaucc

SEQ ID NO: 3669388 - RNA, 20 nt, Human
ucaaauggggccagauccag

SEQ ID NO: 3669389 - RNA, 15 nt, Human
ucaaauguaaaguuu

SEQ ID NO: 3669390 - RNA, 22 nt, Human
ucaaauguaauguggcuucugg

SEQ ID NO: 3669391 - RNA, 18 nt, Human
ucaaauguguuuuggucc

SEQ ID NO: 3669392 - RNA, 23 nt, Human
ucaaauguucuaaguuucuaaga

SEQ ID NO: 3669393 - RNA, 12 nt, Human
ucaaauguuuaa

SEQ ID NO: 3669394 - RNA, 20 nt, Human
ucaaauguuuaaucauauaa

SEQ ID NO: 3669395 - RNA, 10 nt, Human
ucaaauuaau

SEQ ID NO: 3669396 - RNA, 17 nt, Human
ucaaauuaauuguguga

SEQ ID NO: 3669397 - RNA, 18 nt, Human
ucaaauuaauugugugaa

SEQ ID NO: 3669398 - RNA, 16 nt, Human
ucaaauuagaagacau

SEQ ID NO: 3669399 - RNA, 13 nt, Human
ucaaauucaaaua

SEQ ID NO: 3669400 - RNA, 21 nt, Human
ucaaauuccuauuuuuaaaua

SEQ ID NO: 3669401 - RNA, 15 nt, Human
ucaaauucuucugaa

SEQ ID NO: 3669402 - RNA, 16 nt, Human
ucaaauugagagaaug

SEQ ID NO: 3669403 - RNA, 13 nt, Human
ucaaauuguaauu

SEQ ID NO: 3669404 - RNA, 13 nt, Human
ucaaauuuaaagg

SEQ ID NO: 3669405 - RNA, 23 nt, Human
ucaaauuuagaaacuaauugacu

SEQ ID NO: 3669406 - RNA, 18 nt, Human
ucaaauuuauuuccaaug

SEQ ID NO: 3669407 - RNA, 16 nt, Human
ucaaauuucuaaaucu

SEQ ID NO: 3669408 - RNA, 17 nt, Human
ucaaauuucuaaaucuc

SEQ ID NO: 3669409 - RNA, 22 nt, Human
ucaaauuuuaucugccucucuu

SEQ ID NO: 3669410 - RNA, 20 nt, Human
ucaaauuuuuuaaaagagac

SEQ ID NO: 3669411 - RNA, 15 nt, Human
ucaacaaaaauuguc

SEQ ID NO: 3669412 - RNA, 14 nt, Human
ucaacaaacuauuu

SEQ ID NO: 3669413 - RNA, 14 nt, Human
ucaacaaagaaaca

SEQ ID NO: 3669414 - RNA, 20 nt, Human
ucaacaaagaaacaaagaug

SEQ ID NO: 3669415 - RNA, 15 nt, Human
ucaacaaagaaauau

SEQ ID NO: 3669416 - RNA, 18 nt, Human
ucaacaaagaaauauuau

SEQ ID NO: 3669417 - RNA, 14 nt, Human
ucaacaaagcacag

SEQ ID NO: 3669418 - RNA, 23 nt, Human
ucaacaaagcacaguguuaaaug

SEQ ID NO: 3669419 - RNA, 14 nt, Human
ucaacaaccaggga

SEQ ID NO: 3669420 - RNA, 15 nt, Human
ucaacaagaagaauu

SEQ ID NO: 3669421 - RNA, 21 nt, Human
ucaacaaggcaaaaacaaaga

SEQ ID NO: 3669422 - RNA, 20 nt, Human
ucaacaaggcuugcugcaga

SEQ ID NO: 3669423 - RNA, 17 nt, Human
ucaacaauaaaauuuuu

SEQ ID NO: 3669424 - RNA, 14 nt, Human
ucaacaccaugauu

SEQ ID NO: 3669425 - RNA, 22 nt, Human
ucaacacccaguuuccuuggga

SEQ ID NO: 3669426 - RNA, 18 nt, Human
ucaacaccuuaauaugcu

SEQ ID NO: 3669427 - RNA, 20 nt, Human
ucaacagaagcauuuguauu

SEQ ID NO: 3669428 - RNA, 22 nt, Human
ucaacagaagcauuuguauuuu

SEQ ID NO: 3669429 - RNA, 14 nt, Human
ucaacagaaugaaa

SEQ ID NO: 3669430 - RNA, 15 nt, Human
ucaacagaaugaaaa

SEQ ID NO: 3669431 - RNA, 23 nt, Human
ucaacagaaugaaaaaugaaaga

SEQ ID NO: 3669432 - RNA, 12 nt, Human
ucaacagagaag

SEQ ID NO: 3669433 - RNA, 17 nt, Human
ucaacagagaaggcagg

SEQ ID NO: 3669434 - RNA, 16 nt, Human
ucaacagagacugaau

SEQ ID NO: 3669435 - RNA, 18 nt, Human
ucaacagcuaugcuggua

SEQ ID NO: 3669436 - RNA, 15 nt, Human
ucaacagcuccccau

SEQ ID NO: 3669437 - RNA, 16 nt, Human
ucaacaggccucaggg

SEQ ID NO: 3669438 - RNA, 17 nt, Human
ucaacaggccucagggc

SEQ ID NO: 3669439 - RNA, 22 nt, Human
ucaacaggccucagggcuccuu

SEQ ID NO: 3669440 - RNA, 23 nt, Human
ucaacaggggcgugaggucccag

SEQ ID NO: 3669441 - RNA, 17 nt, Human
ucaacagugaagacaga

SEQ ID NO: 3669442 - RNA, 18 nt, Human
ucaacagugaagacagaa

SEQ ID NO: 3669443 - RNA, 22 nt, Human
ucaacagugaagacagaaguuu

SEQ ID NO: 3669444 - RNA, 14 nt, Human
ucaacaguuuuccu

SEQ ID NO: 3669445 - RNA, 16 nt, Human
ucaacaucaauguuca

SEQ ID NO: 3669446 - RNA, 15 nt, Human
ucaacaucacugaaa

SEQ ID NO: 3669447 - RNA, 14 nt, Human
ucaacauuuacaug

SEQ ID NO: 3669448 - RNA, 16 nt, Human
ucaacauuuacaugua

SEQ ID NO: 3669449 - RNA, 13 nt, Human
ucaaccaaauggu

SEQ ID NO: 3669450 - RNA, 16 nt, Human
ucaaccaaaugguaca

SEQ ID NO: 3669451 - RNA, 18 nt, Human
ucaaccaaaugguacaaa

SEQ ID NO: 3669452 - RNA, 20 nt, Human
ucaaccaaaugguacaaaac

SEQ ID NO: 3669453 - RNA, 15 nt, Human
ucaaccaauguagaa

SEQ ID NO: 3669454 - RNA, 20 nt, Human
ucaaccagggauuguuucug

SEQ ID NO: 3669455 - RNA, 12 nt, Human
ucagccccucuu

SEQ ID NO: 3669456 - RNA, 19 nt, Human
ucagcccuaggguggagag

SEQ ID NO: 3669457 - RNA, 13 nt, Human
ucagcccucccug

SEQ ID NO: 3669458 - RNA, 15 nt, Human
ucagcccucccugcc

SEQ ID NO: 3669459 - RNA, 13 nt, Human
ucagcccugaccc

SEQ ID NO: 3669460 - RNA, 14 nt, Human
ucagcccugcccuu

SEQ ID NO: 3669461 - RNA, 12 nt, Human
ucagcccuggag

SEQ ID NO: 3669462 - RNA, 19 nt, Human
ucagcccugggccccacca

SEQ ID NO: 3669463 - RNA, 21 nt, Human
ucagccgagccgggccugggg

SEQ ID NO: 3669464 - RNA, 22 nt, Human
ucagccgagccgggccuggggc

SEQ ID NO: 3669465 - RNA, 23 nt, Human
ucagccuagccgaccucagccuu

SEQ ID NO: 3669466 - RNA, 18 nt, Human
ucagccuaggggucaggg

SEQ ID NO: 3669467 - RNA, 17 nt, Human
ucagccuccagccucug

SEQ ID NO: 3669468 - RNA, 16 nt, Human
ucagccucccaaagug

SEQ ID NO: 3669469 - RNA, 19 nt, Human
ucagccucccaaagugcug

SEQ ID NO: 3669470 - RNA, 20 nt, Human
ucagccucccaaguagcugg

SEQ ID NO: 3669471 - RNA, 20 nt, Human
ucagccucccgaauagcugg

SEQ ID NO: 3669472 - RNA, 22 nt, Human
ucagccucccgaauagcuggga

SEQ ID NO: 3669473 - RNA, 18 nt, Human
ucagccucccgaguagcu

SEQ ID NO: 3669474 - RNA, 21 nt, Human
ucagccucccgaguagcugag

SEQ ID NO: 3669475 - RNA, 20 nt, Human
ucagccuccggaguagcugg

SEQ ID NO: 3669476 - RNA, 21 nt, Human
ucagccuccugaguagcugga

SEQ ID NO: 3669477 - RNA, 14 nt, Human
ucagccuccugugu

SEQ ID NO: 3669478 - RNA, 16 nt, Human
ucagccuccuguguag

SEQ ID NO: 3669479 - RNA, 21 nt, Human
ucagccucuuaaagcugccug

SEQ ID NO: 3669480 - RNA, 20 nt, Human
ucagccugaggcugagacug

SEQ ID NO: 3669481 - RNA, 19 nt, Human
ucagccuggcuucaaauug

SEQ ID NO: 3669482 - RNA, 10 nt, Human
ucagccuggg

SEQ ID NO: 3669483 - RNA, 19 nt, Human
ucagccugggacaguuuau

SEQ ID NO: 3669484 - RNA, 13 nt, Human
ucagccugggcgc

SEQ ID NO: 3669485 - RNA, 17 nt, Human
ucagccuggugggccuc

SEQ ID NO: 3669486 - RNA, 18 nt, Human
ucagccuggugggccucc

SEQ ID NO: 3669487 - RNA, 17 nt, Human
ucagccugucucuucca

SEQ ID NO: 3669488 - RNA, 12 nt, Human
ucagccugugcu

SEQ ID NO: 3669489 - RNA, 17 nt, Human
ucagccuuaagaaccau

SEQ ID NO: 3669490 - RNA, 22 nt, Human
ucagccuucccccucccagggc

SEQ ID NO: 3669491 - RNA, 22 nt, Human
ucagccuuccccuugcccaggg

SEQ ID NO: 3669492 - RNA, 17 nt, Human
ucagccuugccagagau

SEQ ID NO: 3669493 - RNA, 22 nt, Human
ucagccuuggauaaugcuguug

SEQ ID NO: 3669494 - RNA, 23 nt, Human
ucagcgacuccguuggccacucc

SEQ ID NO: 3669495 - RNA, 14 nt, Human
ucagcgccuggccu

SEQ ID NO: 3669496 - RNA, 14 nt, Human
ucagcguugcaugu

SEQ ID NO: 3669497 - RNA, 15 nt, Human
ucagcuaagcucacg

SEQ ID NO: 3669498 - RNA, 19 nt, Human
ucagcuaagggaagacauu

SEQ ID NO: 3669499 - RNA, 23 nt, Human
ucagcuaagggaagacauuucuu

SEQ ID NO: 3669500 - RNA, 19 nt, Human
ucagcuacccacuauccuu

SEQ ID NO: 3669501 - RNA, 19 nt, Human
ucaggaugagggaaaagaa

SEQ ID NO: 3669502 - RNA, 20 nt, Human
ucaggaugauacacuaugaa

SEQ ID NO: 3669503 - RNA, 13 nt, Human
ucaggaugcccag

SEQ ID NO: 3669504 - RNA, 22 nt, Human
ucaggaugcccagggccacucu

SEQ ID NO: 3669505 - RNA, 20 nt, Human
ucaggcacacaaggggcccu

SEQ ID NO: 3669506 - RNA, 13 nt, Human
ucaggcacagguc

SEQ ID NO: 3669507 - RNA, 19 nt, Human
ucaggcaccagucccuguc

SEQ ID NO: 3669508 - RNA, 15 nt, Human
ucaggcacuagccuu

SEQ ID NO: 3669509 - RNA, 18 nt, Human
ucaggcacugggcaugag

SEQ ID NO: 3669510 - RNA, 12 nt, Human
ucaggcagccag

SEQ ID NO: 3669511 - RNA, 13 nt, Human
ucaggcagccagu

SEQ ID NO: 3669512 - RNA, 23 nt, Human
ucaggcaggcaccuagcaauucc

SEQ ID NO: 3669513 - RNA, 16 nt, Human
ucaggcaggggccucc

SEQ ID NO: 3669514 - RNA, 18 nt, Human
ucaggcauaggccugggu

SEQ ID NO: 3669515 - RNA, 22 nt, Human
ucaggcauaggccugggugcug

SEQ ID NO: 3669516 - RNA, 17 nt, Human
ucaggcauuuucccccu

SEQ ID NO: 3669517 - RNA, 19 nt, Human
ucaggccaccugcccccuu

SEQ ID NO: 3669518 - RNA, 17 nt, Human
ucaggccacggcagccu

SEQ ID NO: 3669519 - RNA, 13 nt, Human
ucaggccacuuga

SEQ ID NO: 3669520 - RNA, 20 nt, Human
ucaggccagcugcuugggcu

SEQ ID NO: 3669521 - RNA, 13 nt, Human
ucaggccaggccc

SEQ ID NO: 3669522 - RNA, 19 nt, Human
ucaggccaggcccucugcc

SEQ ID NO: 3669523 - RNA, 22 nt, Human
ucaggccaggcccucugcccac

SEQ ID NO: 3669524 - RNA, 19 nt, Human
ucaggccaggugcaguggc

SEQ ID NO: 3669525 - RNA, 22 nt, Human
ucaggccaucaucaguggagcc

SEQ ID NO: 3669526 - RNA, 20 nt, Human
ucaggcccccaccuggcuca

SEQ ID NO: 3669527 - RNA, 19 nt, Human
ucaggcccccgccuuggcc

SEQ ID NO: 3669528 - RNA, 20 nt, Human
ucaggcccccgccuuggccu

SEQ ID NO: 3669529 - RNA, 21 nt, Human
ucaggccggcagccccagccu

SEQ ID NO: 3669530 - RNA, 17 nt, Human
ucaggccucccucucuc

SEQ ID NO: 3669531 - RNA, 11 nt, Human
ucaggccucug

SEQ ID NO: 3669532 - RNA, 21 nt, Human
ucaggccugggggcugggcag

SEQ ID NO: 3669533 - RNA, 18 nt, Human
ucaggccuuugagcucag

SEQ ID NO: 3669534 - RNA, 15 nt, Human
ucaggcuccauuagg

SEQ ID NO: 3669535 - RNA, 16 nt, Human
ucaggcucuucuccuu

SEQ ID NO: 3669536 - RNA, 20 nt, Human
ucaggcugcagcuggacaga

SEQ ID NO: 3669537 - RNA, 12 nt, Human
ucaggcugccug

SEQ ID NO: 3669538 - RNA, 16 nt, Human
ucaggcugcuggagga

SEQ ID NO: 3669539 - RNA, 19 nt, Human
ucaggcugcuggaggaaaa

SEQ ID NO: 3669540 - RNA, 14 nt, Human
ucaggcugcuggcg

SEQ ID NO: 3669541 - RNA, 19 nt, Human
ucaggcugcuggcgccucu

SEQ ID NO: 3669542 - RNA, 22 nt, Human
ucaggcugcuggcgccucugca

SEQ ID NO: 3669543 - RNA, 18 nt, Human
ucaggcuugaaaugcauu

SEQ ID NO: 3669544 - RNA, 15 nt, Human
ucaggcuugauaaua

SEQ ID NO: 3669545 - RNA, 20 nt, Human
ucaggcuuucacuauuuccu

SEQ ID NO: 3669546 - RNA, 19 nt, Human
ucagggaaaagcagcucuc

SEQ ID NO: 3669547 - RNA, 18 nt, Human
ucagggaaagugggacag

SEQ ID NO: 3669548 - RNA, 22 nt, Human
ucagggaaccguuauuauaauu

SEQ ID NO: 3669549 - RNA, 15 nt, Human
ucagggaagcccagc

SEQ ID NO: 3669550 - RNA, 21 nt, Human
ucagggaagcccagcuccagg

SEQ ID NO: 3669551 - RNA, 16 nt, Human
ucagggaccacagcaa

SEQ ID NO: 3669552 - RNA, 21 nt, Human
ucagggagcagggaaggccug

SEQ ID NO: 3669553 - RNA, 22 nt, Human
ucagggagugcuggcucacagu

SEQ ID NO: 3669554 - RNA, 15 nt, Human
ucagggaucuugcau

SEQ ID NO: 3669555 - RNA, 20 nt, Human
ucagggauuuuuuuuuuaaa

SEQ ID NO: 3669556 - RNA, 14 nt, Human
ucagggcagauuuu

SEQ ID NO: 3669557 - RNA, 15 nt, Human
ucagggcagccugcc

SEQ ID NO: 3669558 - RNA, 19 nt, Human
ucagggcagcgccaggcug

SEQ ID NO: 3669559 - RNA, 17 nt, Human
ucagggccaggccucuc

SEQ ID NO: 3669560 - RNA, 14 nt, Human
ucagggccaugccu

SEQ ID NO: 3669561 - RNA, 13 nt, Human
ucagggccaugcu

SEQ ID NO: 3669562 - RNA, 15 nt, Human
ucagggcccaagucc

SEQ ID NO: 3669563 - RNA, 18 nt, Human
ucagggcccaagucccug

SEQ ID NO: 3669564 - RNA, 19 nt, Human
ucagggcccaagucccugu

SEQ ID NO: 3669565 - RNA, 13 nt, Human
ucagggcccagag

SEQ ID NO: 3669566 - RNA, 20 nt, Human
ucagggcuccugccuucugu

SEQ ID NO: 3669567 - RNA, 12 nt, Human
ucagggcugaca

SEQ ID NO: 3669568 - RNA, 22 nt, Human
ucagggcuucuaguuucucuua

SEQ ID NO: 3669569 - RNA, 18 nt, Human
ucaggggacucagcccug

SEQ ID NO: 3669570 - RNA, 18 nt, Human
ucaggggcccuggagcag

SEQ ID NO: 3669571 - RNA, 20 nt, Human
ucaggggcugcccgcuccca

SEQ ID NO: 3669572 - RNA, 14 nt, Human
ucaggggcuguuug

SEQ ID NO: 3669573 - RNA, 12 nt, Human
ucagggggccag

SEQ ID NO: 3669574 - RNA, 13 nt, Human
ucagggggccagg

SEQ ID NO: 3669575 - RNA, 17 nt, Human
ucagggggcgccugugg

SEQ ID NO: 3669576 - RNA, 20 nt, Human
ucagggggguugugaggccu

SEQ ID NO: 3669577 - RNA, 17 nt, Human
ucaggggugacacagac

SEQ ID NO: 3669578 - RNA, 18 nt, Human
ucaggggugacacagacu

SEQ ID NO: 3669579 - RNA, 19 nt, Human
ucaggggugacacagacuc

SEQ ID NO: 3669580 - RNA, 19 nt, Human
ucaggggugugcggccuuu

SEQ ID NO: 3669581 - RNA, 23 nt, Human
ucaggggugugcggccuuuggcu

SEQ ID NO: 3669582 - RNA, 18 nt, Human
ucagggguucgagaccag

SEQ ID NO: 3669583 - RNA, 13 nt, Human
ucagggucccugg

SEQ ID NO: 3669584 - RNA, 18 nt, Human
ucagggucccugguggca

SEQ ID NO: 3669585 - RNA, 12 nt, Human
ucagggucucug

SEQ ID NO: 3669586 - RNA, 22 nt, Human
ucagggugcagcccaaucugcc

SEQ ID NO: 3669587 - RNA, 16 nt, Human
ucaggguuggccccug

SEQ ID NO: 3669588 - RNA, 15 nt, Human
ucagguaacaggcag

SEQ ID NO: 3669589 - RNA, 23 nt, Human
ucagguaacaggcagauacagga

SEQ ID NO: 3669590 - RNA, 18 nt, Human
ucagguaaucgaccugcc

SEQ ID NO: 3669591 - RNA, 19 nt, Human
ucagguaaucgaccugccu

SEQ ID NO: 3669592 - RNA, 17 nt, Human
ucagguacagagaagga

SEQ ID NO: 3669593 - RNA, 16 nt, Human
ucagguaguacuaaga

SEQ ID NO: 3669594 - RNA, 19 nt, Human
ucagguaguugcaauugaa

SEQ ID NO: 3669595 - RNA, 15 nt, Human
ucagguauguugccu

SEQ ID NO: 3669596 - RNA, 15 nt, Human
ucagguauuaagaaa

SEQ ID NO: 3669597 - RNA, 16 nt, Human
ucagguccucagagaa

SEQ ID NO: 3669598 - RNA, 16 nt, Human
ucagguccugcucagc

SEQ ID NO: 3669599 - RNA, 18 nt, Human
ucagguccugcucagcag

SEQ ID NO: 3669600 - RNA, 19 nt, Human
ucaggucucccacguggga

SEQ ID NO: 3669601 - RNA, 21 nt, Human
ucaggucucccacgugggaga

SEQ ID NO: 3669602 - RNA, 17 nt, Human
ucaggugaaaauguuca

SEQ ID NO: 3669603 - RNA, 16 nt, Human
ucaggugacaugugaa

SEQ ID NO: 3669604 - RNA, 17 nt, Human
ucaggugacaugugaaa

SEQ ID NO: 3669605 - RNA, 21 nt, Human
ucaggugacaugugaaaccuu

SEQ ID NO: 3669606 - RNA, 22 nt, Human
ucaggugaccaaaauccccuuc

SEQ ID NO: 3669607 - RNA, 23 nt, Human
ucaggugagaagcagaggaagga

SEQ ID NO: 3669608 - RNA, 16 nt, Human
ucaggugauccaccca

SEQ ID NO: 3669609 - RNA, 15 nt, Human
ucaggugcuggggcc

SEQ ID NO: 3669610 - RNA, 16 nt, Human
ucagguggggcagcuu

SEQ ID NO: 3669611 - RNA, 18 nt, Human
ucagguggggcagcuuga

SEQ ID NO: 3669612 - RNA, 21 nt, Human
ucagguggggcagcuugaggg

SEQ ID NO: 3669613 - RNA, 15 nt, Human
ucaggugucccugca

SEQ ID NO: 3669614 - RNA, 18 nt, Human
ucaggugucccugcacuu

SEQ ID NO: 3669615 - RNA, 18 nt, Human
ucagguucaguauuaugu

SEQ ID NO: 3669616 - RNA, 16 nt, Human
ucagguucuccuugau

SEQ ID NO: 3669617 - RNA, 15 nt, Human
ucagguugcugguug

SEQ ID NO: 3669618 - RNA, 17 nt, Human
ucagguugcugguugcu

SEQ ID NO: 3669619 - RNA, 19 nt, Human
ucagguuguaguaaagaaa

SEQ ID NO: 3669620 - RNA, 15 nt, Human
ucagguuuaacauuu

SEQ ID NO: 3669621 - RNA, 17 nt, Human
ucagguuugaguagagg

SEQ ID NO: 3669622 - RNA, 14 nt, Human
ucagguuuguuuug

SEQ ID NO: 3669623 - RNA, 19 nt, Human
ucagguuuucuuuuaagaa

SEQ ID NO: 3669624 - RNA, 20 nt, Human
ucagguuuucuuuuaagaau

SEQ ID NO: 3669625 - RNA, 23 nt, Human
ucaaguauuauaccuuuuuuaga

SEQ ID NO: 3669626 - RNA, 15 nt, Human
ucaaguauuggcaaa

SEQ ID NO: 3669627 - RNA, 16 nt, Human
ucaaguauuuaagccu

SEQ ID NO: 3669628 - RNA, 22 nt, Human
ucaaguauuuaagccuaaagau

SEQ ID NO: 3669629 - RNA, 12 nt, Human
ucaaguauuugg

SEQ ID NO: 3669630 - RNA, 15 nt, Human
ucaagucacucccaa

SEQ ID NO: 3669631 - RNA, 22 nt, Human
ucaaguccucuuuucugagagg

SEQ ID NO: 3669632 - RNA, 18 nt, Human
ucaaguccuuaccucuuc

SEQ ID NO: 3669633 - RNA, 20 nt, Human
ucaagucuuucucuuucccu

SEQ ID NO: 3669634 - RNA, 23 nt, Human
ucaagucuuucucuuucccuggu

SEQ ID NO: 3669635 - RNA, 23 nt, Human
ucaagugaaaaaggaggaagaga

SEQ ID NO: 3669636 - RNA, 15 nt, Human
ucaagugaaucuaaa

SEQ ID NO: 3669637 - RNA, 20 nt, Human
ucaagugaucugcccaccuc

SEQ ID NO: 3669638 - RNA, 21 nt, Human
ucaagugauucucaugccuca

SEQ ID NO: 3669639 - RNA, 20 nt, Human
ucaagugauucuccugccuc

SEQ ID NO: 3669640 - RNA, 21 nt, Human
ucaagugauucuccugccuca

SEQ ID NO: 3669641 - RNA, 19 nt, Human
ucaagugcaugcucucugc

SEQ ID NO: 3669642 - RNA, 21 nt, Human
ucaagugcaugcucucugcag

SEQ ID NO: 3669643 - RNA, 22 nt, Human
ucaagugcaugcucucugcagc

SEQ ID NO: 3669644 - RNA, 23 nt, Human
ucaagugcccucuccgagcuggu

SEQ ID NO: 3669645 - RNA, 20 nt, Human
ucacucccuucuaccugcca

SEQ ID NO: 3669646 - RNA, 23 nt, Human
ucacucccuucuccuugauaaca

SEQ ID NO: 3669647 - RNA, 14 nt, Human
ucacuccggugugc

SEQ ID NO: 3669648 - RNA, 19 nt, Human
ucacuccggugugccugca

SEQ ID NO: 3669649 - RNA, 23 nt, Human
ucacuccggugugccugcagccc

SEQ ID NO: 3669650 - RNA, 19 nt, Human
ucacuccugagaccccugg

SEQ ID NO: 3669651 - RNA, 13 nt, Human
ucacuccugcugu

SEQ ID NO: 3669652 - RNA, 15 nt, Human
ucacuccugcuguaa

SEQ ID NO: 3669653 - RNA, 14 nt, Human
ucacucggcacccu

SEQ ID NO: 3669654 - RNA, 17 nt, Human
ucacucuaagauguuau

SEQ ID NO: 3669655 - RNA, 22 nt, Human
ucacucuaagauguuauauuuu

SEQ ID NO: 3669656 - RNA, 20 nt, Human
ucacucuagucaaugacaug

SEQ ID NO: 3669657 - RNA, 12 nt, Human
ucacucucagga

SEQ ID NO: 3669658 - RNA, 13 nt, Human
ucacucucagugc

SEQ ID NO: 3669659 - RNA, 14 nt, Human
ucacucuccuuggu

SEQ ID NO: 3669660 - RNA, 15 nt, Human
ucacucucugaagau

SEQ ID NO: 3669661 - RNA, 11 nt, Human
ucacucugcca

SEQ ID NO: 3669662 - RNA, 21 nt, Human
ucacucugccagggcagugcu

SEQ ID NO: 3669663 - RNA, 14 nt, Human
ucacucugcuaccu

SEQ ID NO: 3669664 - RNA, 14 nt, Human
ucacucugcugcuu

SEQ ID NO: 3669665 - RNA, 12 nt, Human
ucacucuggcag

SEQ ID NO: 3669666 - RNA, 14 nt, Human
ucacucuggcagcu

SEQ ID NO: 3669667 - RNA, 13 nt, Human
ucacucugggcug

SEQ ID NO: 3669668 - RNA, 21 nt, Human
ucacucuguucauuccuccag

SEQ ID NO: 3669669 - RNA, 12 nt, Human
ucacucuuaggc

SEQ ID NO: 3669670 - RNA, 23 nt, Human
ucacucuuauugcccacgcugga

SEQ ID NO: 3669671 - RNA, 17 nt, Human
ucacucuuccagaaucc

SEQ ID NO: 3669672 - RNA, 21 nt, Human
ucacucuuccagaaucccaag

SEQ ID NO: 3669673 - RNA, 17 nt, Human
ucacucuucucagccac

SEQ ID NO: 3669674 - RNA, 17 nt, Human
ucacucuuggagccugc

SEQ ID NO: 3669675 - RNA, 18 nt, Human
ucacucuuggagccugca

SEQ ID NO: 3669676 - RNA, 21 nt, Human
ucacucuuguggauguuuuaa

SEQ ID NO: 3669677 - RNA, 11 nt, Human
ucacucuuuau

SEQ ID NO: 3669678 - RNA, 18 nt, Human
ucacugaaauaaaagcua

SEQ ID NO: 3669679 - RNA, 23 nt, Human
ucacugaaugcuucugacuucau

SEQ ID NO: 3669680 - RNA, 16 nt, Human
ucacugacacaaagga

SEQ ID NO: 3669681 - RNA, 11 nt, Human
ucauguuuggu

SEQ ID NO: 3669682 - RNA, 19 nt, Human
ucauguuuggugcauagaa

SEQ ID NO: 3669683 - RNA, 21 nt, Human
ucauguuuuaaagcuugcuca

SEQ ID NO: 3669684 - RNA, 13 nt, Human
ucauguuuuaaca

SEQ ID NO: 3669685 - RNA, 14 nt, Human
ucauguuuuaacaa

SEQ ID NO: 3669686 - RNA, 16 nt, Human
ucauguuuuaacaaaa

SEQ ID NO: 3669687 - RNA, 18 nt, Human
ucauguuuuaacaaaaac

SEQ ID NO: 3669688 - RNA, 15 nt, Human
ucauguuuugugacu

SEQ ID NO: 3669689 - RNA, 12 nt, Human
ucauguuuuuga

SEQ ID NO: 3669690 - RNA, 15 nt, Human
ucauguuuuugauca

SEQ ID NO: 3669691 - RNA, 17 nt, Human
ucauuaaacuuuuuuaa

SEQ ID NO: 3669692 - RNA, 15 nt, Human
ucauuaaagacagga

SEQ ID NO: 3669693 - RNA, 15 nt, Human
ucauuaaagcauuua

SEQ ID NO: 3669694 - RNA, 13 nt, Human
ucauuaaaguucu

SEQ ID NO: 3669695 - RNA, 14 nt, Human
ucauuaaauuaccu

SEQ ID NO: 3669696 - RNA, 18 nt, Human
ucauuaagcccucuucca

SEQ ID NO: 3669697 - RNA, 13 nt, Human
ucauuaaugacac

SEQ ID NO: 3669698 - RNA, 15 nt, Human
ucauuaaugacacuu

SEQ ID NO: 3669699 - RNA, 19 nt, Human
ucauuaaugacacuugucc

SEQ ID NO: 3669700 - RNA, 14 nt, Human
ucauuaauguguug

SEQ ID NO: 3669701 - RNA, 15 nt, Human
ucauuaauuaacccc

SEQ ID NO: 3669702 - RNA, 15 nt, Human
ucauuacccuucccu

SEQ ID NO: 3669703 - RNA, 22 nt, Human
ucauuaccuuuuaccagcuuuu

SEQ ID NO: 3669704 - RNA, 12 nt, Human
ucauuacuaaaa

SEQ ID NO: 3669705 - RNA, 15 nt, Human
ucauuacuugauuaa

SEQ ID NO: 3669706 - RNA, 17 nt, Human
ucauuacuuguugccua

SEQ ID NO: 3669707 - RNA, 16 nt, Human
ucauuacuuuugaagu

SEQ ID NO: 3669708 - RNA, 18 nt, Human
ucauuagacuccuccucc

SEQ ID NO: 3669709 - RNA, 13 nt, Human
ucauuagagcagg

SEQ ID NO: 3669710 - RNA, 15 nt, Human
ucauuagagcaggcg

SEQ ID NO: 3669711 - RNA, 19 nt, Human
ucauuagccugaguagaaa

SEQ ID NO: 3669712 - RNA, 20 nt, Human
ucauuagccugaguagaaag

SEQ ID NO: 3669713 - RNA, 17 nt, Human
ucauuagcugugauuuu

SEQ ID NO: 3669714 - RNA, 16 nt, Human
ucauuaggauggcuag

SEQ ID NO: 3669715 - RNA, 22 nt, Human
ucauuagucauguuuaucugcu

SEQ ID NO: 3669716 - RNA, 23 nt, Human
ucauuaguuuugaagauucuaug

SEQ ID NO: 3669717 - RNA, 17 nt, Human
ucauuauagauccccca

SEQ ID NO: 3669718 - RNA, 20 nt, Human
ucauuaucucaaaacugcac

SEQ ID NO: 3669719 - RNA, 22 nt, Human
ucauuaugcacuugggagaaaa

SEQ ID NO: 3669720 - RNA, 18 nt, Human
ucauuauuggaauuaacc

SEQ ID NO: 3669721 - RNA, 21 nt, Human
ucauuauuggaauuaaccugg

SEQ ID NO: 3669722 - RNA, 11 nt, Human
ucauuauuuau

SEQ ID NO: 3669723 - RNA, 22 nt, Human
ucauuauuuauguauugugcaa

SEQ ID NO: 3669724 - RNA, 18 nt, Human
ucauuauuuauuaaauuu

SEQ ID NO: 3669725 - RNA, 16 nt, Human
ucauuauuugcagaga

SEQ ID NO: 3669726 - RNA, 13 nt, Human
ucauuauuuuauu

SEQ ID NO: 3669727 - RNA, 17 nt, Human
ucauuauuuuuccacuu

SEQ ID NO: 3669728 - RNA, 18 nt, Human
ucauucaaaaguugaaau

SEQ ID NO: 3669729 - RNA, 22 nt, Human
ucauucaaaaguugaaauuaac

SEQ ID NO: 3669730 - RNA, 21 nt, Human
ucauucaacccaccugcgucu

SEQ ID NO: 3669731 - RNA, 16 nt, Human
ucauucaauauugaca

SEQ ID NO: 3669732 - RNA, 20 nt, Human
ucauucaauauugacauuug

SEQ ID NO: 3669733 - RNA, 20 nt, Human
ucauucacaucgcagauucu

SEQ ID NO: 3669734 - RNA, 14 nt, Human
ucauucagaaaaaa

SEQ ID NO: 3669735 - RNA, 14 nt, Human
ucauucagaaaugu

SEQ ID NO: 3669736 - RNA, 14 nt, Human
ucauucagagucag

SEQ ID NO: 3669737 - RNA, 20 nt, Human
ucauucagagucagccagga

SEQ ID NO: 3669738 - RNA, 19 nt, Human
ucauucagcagcaaauuuu

SEQ ID NO: 3669739 - RNA, 21 nt, Human
ucauucagcagcaaauuuuca

SEQ ID NO: 3669740 - RNA, 15 nt, Human
ucauucauacuuaaa

SEQ ID NO: 3669741 - RNA, 19 nt, Human
ucauucauacuuaaaaauu

SEQ ID NO: 3669742 - RNA, 20 nt, Human
ucauucauauuacaauauuu

SEQ ID NO: 3669743 - RNA, 16 nt, Human
ucauucauuuauucau

SEQ ID NO: 3669744 - RNA, 14 nt, Human
ucauucauuuuaua

SEQ ID NO: 3669745 - RNA, 20 nt, Human
ucauucauuuuauauugaaa

SEQ ID NO: 3669746 - RNA, 21 nt, Human
ucauuccaacuucccaguuca

SEQ ID NO: 3669747 - RNA, 14 nt, Human
ucauuccagaggaa

SEQ ID NO: 3669748 - RNA, 18 nt, Human
ucauuccaugugcccagu

SEQ ID NO: 3669749 - RNA, 19 nt, Human
ucauuccaugugcccaguu

SEQ ID NO: 3669750 - RNA, 20 nt, Human
ucauuccaugugcccaguua

SEQ ID NO: 3669751 - RNA, 16 nt, Human
ucauuccauucuggaa

SEQ ID NO: 3669752 - RNA, 13 nt, Human
ucauuccauugcc

SEQ ID NO: 3669753 - RNA, 19 nt, Human
ucauucccucgucuuuccc

SEQ ID NO: 3669754 - RNA, 20 nt, Human
ucauucccuucgacagcauu

SEQ ID NO: 3669755 - RNA, 21 nt, Human
ucauucccuucgacagcauuu

SEQ ID NO: 3669756 - RNA, 22 nt, Human
ucauucccuucgacagcauuuu

SEQ ID NO: 3669757 - RNA, 17 nt, Human
ucauuccguugucugug

SEQ ID NO: 3669758 - RNA, 12 nt, Human
ucauuccuccag

SEQ ID NO: 3669759 - RNA, 14 nt, Human
ucauuccuccaggu

SEQ ID NO: 3669760 - RNA, 20 nt, Human
ucauuccugaaagaaacagu

SEQ ID NO: 3669761 - RNA, 13 nt, Human
ucauuccugccug

SEQ ID NO: 3669762 - RNA, 21 nt, Human
ucauuccuucuuuuuaaaaug

SEQ ID NO: 3669763 - RNA, 23 nt, Human
ucauuccuugagaaaaacaauga

SEQ ID NO: 3669764 - RNA, 23 nt, Human
ucauucgcuacuaugauuuaauu

SEQ ID NO: 3669765 - RNA, 18 nt, Human
ucauucgggccccaccug

SEQ ID NO: 3669766 - RNA, 13 nt, Human
ucauucuaaagau

SEQ ID NO: 3669767 - RNA, 15 nt, Human
ucauucuaucaagcc

SEQ ID NO: 3669768 - RNA, 15 nt, Human
ucauucuccugccug

SEQ ID NO: 3669769 - RNA, 16 nt, Human
ucauucugcaaguaua

SEQ ID NO: 3669770 - RNA, 19 nt, Human
ucauucugcauugcuagau

SEQ ID NO: 3669771 - RNA, 22 nt, Human
ucauucugcauugcuagauaaa

SEQ ID NO: 3669772 - RNA, 18 nt, Human
ucauucuuauuucaugaa

SEQ ID NO: 3669773 - RNA, 12 nt, Human
ucauucuucugu

SEQ ID NO: 3669774 - RNA, 14 nt, Human
ucauugaaauguca

SEQ ID NO: 3669775 - RNA, 17 nt, Human
ucauugaagucagaugu

SEQ ID NO: 3669776 - RNA, 18 nt, Human
ucauugaauuauaaaagc

SEQ ID NO: 3669777 - RNA, 12 nt, Human
ucauugaccuga

SEQ ID NO: 3669778 - RNA, 14 nt, Human
ucauugaccugagg

SEQ ID NO: 3669779 - RNA, 22 nt, Human
ucauugaccugaggcccuucuc

SEQ ID NO: 3669780 - RNA, 21 nt, Human
ucauugacuuuuauaaagcau

SEQ ID NO: 3669781 - RNA, 24 nt, Human
ucauugacuuuuauaaagcauguu

SEQ ID NO: 3669782 - RNA, 18 nt, Human
ucauugagaguuuugucu

SEQ ID NO: 3669783 - RNA, 19 nt, Human
ucauugagaguuuugucuu

SEQ ID NO: 3669784 - RNA, 19 nt, Human
ucauugauaugaaaaauau

SEQ ID NO: 3669785 - RNA, 13 nt, Human
ucauugccagugu

SEQ ID NO: 3669786 - RNA, 16 nt, Human
ucauugccagugucuu

SEQ ID NO: 3669787 - RNA, 17 nt, Human
ucauugccagugucuuu

SEQ ID NO: 3669788 - RNA, 22 nt, Human
ucauugccagugucuuucuuug

SEQ ID NO: 3669789 - RNA, 17 nt, Human
ucauugccuuaacugga

SEQ ID NO: 3669790 - RNA, 17 nt, Human
gcuccuggacucauugc

SEQ ID NO: 3669791 - RNA, 18 nt, Human
gcuccuggagccuuugaa

SEQ ID NO: 3669792 - RNA, 18 nt, Human
gcuccuggcccacugcau

SEQ ID NO: 3669793 - RNA, 14 nt, Human
gcuccugucugcca

SEQ ID NO: 3669794 - RNA, 19 nt, Human
gcuccugucugccagccag

SEQ ID NO: 3669795 - RNA, 20 nt, Human
gcuccugucugccagccagc

SEQ ID NO: 3669796 - RNA, 12 nt, Human
gcuccugugccc

SEQ ID NO: 3669797 - RNA, 13 nt, Human
gcuccugugcccu

SEQ ID NO: 3669798 - RNA, 16 nt, Human
gcuccugugcuuuccc

SEQ ID NO: 3669799 - RNA, 15 nt, Human
gcuccuguggcccca

SEQ ID NO: 3669800 - RNA, 13 nt, Human
gcuccugugucuu

SEQ ID NO: 3669801 - RNA, 22 nt, Human
gcuccuguuuugcacagccaaa

SEQ ID NO: 3669802 - RNA, 16 nt, Human
gcuccuuagcugccaa

SEQ ID NO: 3669803 - RNA, 19 nt, Human
gcuccuucccuugcuacca

SEQ ID NO: 3669804 - RNA, 20 nt, Human
gcuccuuccucugaggcuga

SEQ ID NO: 3669805 - RNA, 19 nt, Human
gcuccuuccugucuuccug

SEQ ID NO: 3669806 - RNA, 21 nt, Human
gcuccuucucucuuacauuga

SEQ ID NO: 3669807 - RNA, 20 nt, Human
gcuccuugggaggaagcaga

SEQ ID NO: 3669808 - RNA, 15 nt, Human
gcuccuugugccaga

SEQ ID NO: 3669809 - RNA, 16 nt, Human
gcuccuugugggccug

SEQ ID NO: 3669810 - RNA, 22 nt, Human
gcuccuugugggccugggcucc

SEQ ID NO: 3669811 - RNA, 23 nt, Human
gcuccuuuacaaaagaaauaccu

SEQ ID NO: 3669812 - RNA, 13 nt, Human
gcuccuuuccccu

SEQ ID NO: 3669813 - RNA, 16 nt, Human
gcuccuuucuccagcc

SEQ ID NO: 3669814 - RNA, 18 nt, Human
gcuccuuucuccagccag

SEQ ID NO: 3669815 - RNA, 19 nt, Human
gcuccuuucuccagccagc

SEQ ID NO: 3669816 - RNA, 20 nt, Human
gcuccuuucuccagccagca

SEQ ID NO: 3669817 - RNA, 19 nt, Human
gcuccuuucugaucuucac

SEQ ID NO: 3669818 - RNA, 13 nt, Human
gcuccuuugugug

SEQ ID NO: 3669819 - RNA, 22 nt, Human
gcuccuuugugugugugucagc

SEQ ID NO: 3669820 - RNA, 18 nt, Human
gcucgacuauagaaaacu

SEQ ID NO: 3669821 - RNA, 19 nt, Human
gcucgagcaugccuggaug

SEQ ID NO: 3669822 - RNA, 16 nt, Human
gcucgaggggugggcu

SEQ ID NO: 3669823 - RNA, 20 nt, Human
gcucgauccaaauugugcuu

SEQ ID NO: 3669824 - RNA, 20 nt, Human
gcucgcaccccccuguucua

SEQ ID NO: 3669825 - RNA, 13 nt, Human
gcucgccaugccg

SEQ ID NO: 3669826 - RNA, 16 nt, Human
gcucgcccuccuuucu

SEQ ID NO: 3669827 - RNA, 12 nt, Human
gcucgccuuccc

SEQ ID NO: 3669828 - RNA, 22 nt, Human
gcucgcugcugcgcccugggcu

SEQ ID NO: 3669829 - RNA, 16 nt, Human
gcucgcuguugcugaa

SEQ ID NO: 3669830 - RNA, 23 nt, Human
gcucggagaagagcgcaguguuu

SEQ ID NO: 3669831 - RNA, 18 nt, Human
gcucggaggccccaaagg

SEQ ID NO: 3669832 - RNA, 14 nt, Human
gcucggaggcugcc

SEQ ID NO: 3669833 - RNA, 12 nt, Human
gcucgggcccag

SEQ ID NO: 3669834 - RNA, 15 nt, Human
gcucgggcccaggcc

SEQ ID NO: 3669835 - RNA, 18 nt, Human
gcucggggugcacaggag

SEQ ID NO: 3669836 - RNA, 20 nt, Human
gcucggggugcacaggaggg

SEQ ID NO: 3669837 - RNA, 17 nt, Human
gcucgguacccggggcc

SEQ ID NO: 3669838 - RNA, 21 nt, Human
gcucgucggggggacagcucc

SEQ ID NO: 3669839 - RNA, 19 nt, Human
gcucguguauccuggggcu

SEQ ID NO: 3669840 - RNA, 13 nt, Human
gcucuaaaauauu

SEQ ID NO: 3669841 - RNA, 15 nt, Human
gcucuaaaauauuua

SEQ ID NO: 3669842 - RNA, 19 nt, Human
gcucuaaaauauuuaugaa

SEQ ID NO: 3669843 - RNA, 13 nt, Human
gcucuaacgccug

SEQ ID NO: 3669844 - RNA, 17 nt, Human
gcucuaacgccugagcc

SEQ ID NO: 3669845 - RNA, 18 nt, Human
gcucuaacgccugagccc

SEQ ID NO: 3669846 - RNA, 23 nt, Human
gcucuaacgccugagcccaggga

SEQ ID NO: 3669847 - RNA, 15 nt, Human
gcucuaauguuugca

SEQ ID NO: 3669848 - RNA, 12 nt, Human
gcucuaauugaa

SEQ ID NO: 3669849 - RNA, 22 nt, Human
gcucuacagcuaaucagcauuc

SEQ ID NO: 3669850 - RNA, 18 nt, Human
gcucuacaucuucugccu

SEQ ID NO: 3669851 - RNA, 20 nt, Human
gcucuacaucuucugccuua

SEQ ID NO: 3669852 - RNA, 18 nt, Human
gcucuacccagggccugc

SEQ ID NO: 3669853 - RNA, 12 nt, Human
uccaagauucua

SEQ ID NO: 3669854 - RNA, 11 nt, Human
uccaagcaaag

SEQ ID NO: 3669855 - RNA, 17 nt, Human
uccaagcaaauguuaca

SEQ ID NO: 3669856 - RNA, 17 nt, Human
uccaagcauuuagaugu

SEQ ID NO: 3669857 - RNA, 15 nt, Human
uccaagccagcaagc

SEQ ID NO: 3669858 - RNA, 19 nt, Human
uccaagcccagcccaugga

SEQ ID NO: 3669859 - RNA, 22 nt, Human
uccaagcccaguucagcuuggg

SEQ ID NO: 3669860 - RNA, 23 nt, Human
uccaagccccaucuucuaaaugg

SEQ ID NO: 3669861 - RNA, 17 nt, Human
uccaagcucacucccca

SEQ ID NO: 3669862 - RNA, 14 nt, Human
uccaagcuccaucu

SEQ ID NO: 3669863 - RNA, 13 nt, Human
uccaagcucccag

SEQ ID NO: 3669864 - RNA, 18 nt, Human
uccaagcucccugcccca

SEQ ID NO: 3669865 - RNA, 20 nt, Human
uccaaggaaaccacagcugc

SEQ ID NO: 3669866 - RNA, 19 nt, Human
uccaaggaacuaauuucuu

SEQ ID NO: 3669867 - RNA, 16 nt, Human
uccaaggagaaacaga

SEQ ID NO: 3669868 - RNA, 23 nt, Human
uccaaggagaaacagagacaggc

SEQ ID NO: 3669869 - RNA, 21 nt, Human
uccaaggagcugagaauagaa

SEQ ID NO: 3669870 - RNA, 20 nt, Human
uccaaggaggggcuguaaaa

SEQ ID NO: 3669871 - RNA, 12 nt, Human
uccaaggaguuc

SEQ ID NO: 3669872 - RNA, 23 nt, Human
uccaaggcagaagcagcagggga

SEQ ID NO: 3669873 - RNA, 22 nt, Human
uccaaggcauuuuagcggggag

SEQ ID NO: 3669874 - RNA, 16 nt, Human
uccaaggugauguugu

SEQ ID NO: 3669875 - RNA, 15 nt, Human
uccaagguggucugc

SEQ ID NO: 3669876 - RNA, 14 nt, Human
uccaagucacugca

SEQ ID NO: 3669877 - RNA, 20 nt, Human
uccaagugaacacuagccag

SEQ ID NO: 3669878 - RNA, 21 nt, Human
uccaagugaacacuagccaga

SEQ ID NO: 3669879 - RNA, 20 nt, Human
uccaaguggccuccgucacu

SEQ ID NO: 3669880 - RNA, 11 nt, Human
uccaagugugc

SEQ ID NO: 3669881 - RNA, 13 nt, Human
uccaagugugcau

SEQ ID NO: 3669882 - RNA, 18 nt, Human
uccaagugugugugcgug

SEQ ID NO: 3669883 - RNA, 17 nt, Human
uccaaguuaaauguaga

SEQ ID NO: 3669884 - RNA, 17 nt, Human
uccaaguuguucgggcc

SEQ ID NO: 3669885 - RNA, 15 nt, Human
uccaaguuuccaaac

SEQ ID NO: 3669886 - RNA, 12 nt, Human
uccaauaaacag

SEQ ID NO: 3669887 - RNA, 23 nt, Human
uccaauaaaugugaaauucuguc

SEQ ID NO: 3669888 - RNA, 16 nt, Human
uccaauaggaaugcua

SEQ ID NO: 3669889 - RNA, 21 nt, Human
uccaaucaaucuugcauguaa

SEQ ID NO: 3669890 - RNA, 14 nt, Human
uccaauccucacug

SEQ ID NO: 3669891 - RNA, 16 nt, Human
uccaauccugcccccu

SEQ ID NO: 3669892 - RNA, 18 nt, Human
uccaauccugcccccuga

SEQ ID NO: 3669893 - RNA, 12 nt, Human
uccaaugagcuu

SEQ ID NO: 3669894 - RNA, 15 nt, Human
uccaaugagcuuucu

SEQ ID NO: 3669895 - RNA, 22 nt, Human
uccaaugccacauacuugcagc

SEQ ID NO: 3669896 - RNA, 22 nt, Human
uccaaugccucuugucuuccua

SEQ ID NO: 3669897 - RNA, 19 nt, Human
uccaaugucugcugaggag

SEQ ID NO: 3669898 - RNA, 19 nt, Human
uccaauguuuagcaaauac

SEQ ID NO: 3669899 - RNA, 16 nt, Human
uccaauuaaggauuuu

SEQ ID NO: 3669900 - RNA, 19 nt, Human
uccaauuccuugcacauag

SEQ ID NO: 3669901 - RNA, 15 nt, Human
uccaauucuccuuua

SEQ ID NO: 3669902 - RNA, 17 nt, Human
uccaauuuuaauuuagu

SEQ ID NO: 3669903 - RNA, 18 nt, Human
uccaauuuucuggaauac

SEQ ID NO: 3669904 - RNA, 20 nt, Human
uccacaaaauaaccaauccu

SEQ ID NO: 3669905 - RNA, 14 nt, Human
uccacaaagaaaau

SEQ ID NO: 3669906 - RNA, 21 nt, Human
uccacaaauuauuaaugaaaa

SEQ ID NO: 3669907 - RNA, 16 nt, Human
uccacaagagcccagg

SEQ ID NO: 3669908 - RNA, 21 nt, Human
uccacaagugccgcaaauugu

SEQ ID NO: 3669909 - RNA, 15 nt, Human
uccacacaagggaag

SEQ ID NO: 3669910 - RNA, 18 nt, Human
uccacacacacaaaaaaa

SEQ ID NO: 3669911 - RNA, 21 nt, Human
uccacacacacaaaaaaagac

SEQ ID NO: 3669912 - RNA, 12 nt, Human
uccacacacaga

SEQ ID NO: 3669913 - RNA, 20 nt, Human
uccacacacagcugggcugu

SEQ ID NO: 3669914 - RNA, 15 nt, Human
uccacacacgcagga

SEQ ID NO: 3669915 - RNA, 13 nt, Human
uccacacccccac

SEQ ID NO: 3669916 - RNA, 12 nt, Human
uccacacccgcg

SEQ ID NO: 3669917 - RNA, 22 nt, Human
uccacaccuggcacugcugugc

SEQ ID NO: 3669918 - RNA, 15 nt, Human
uccacaccuuuuauu

SEQ ID NO: 3669919 - RNA, 15 nt, Human
uccacacugcacaau

SEQ ID NO: 3669920 - RNA, 10 nt, Human
uccacagacg

SEQ ID NO: 3669921 - RNA, 15 nt, Human
uccacagauuguuuc

SEQ ID NO: 3669922 - RNA, 16 nt, Human
uccacagauuguuucu

SEQ ID NO: 3669923 - RNA, 15 nt, Human
uccacagccauccca

SEQ ID NO: 3669924 - RNA, 22 nt, Human
uccacagccaucccagccuugg

SEQ ID NO: 3669925 - RNA, 16 nt, Human
uccacagccgcagccu

SEQ ID NO: 3669926 - RNA, 19 nt, Human
uccacagcgagggcagcug

SEQ ID NO: 3669927 - RNA, 23 nt, Human
uccacagcuuccuguccccaucu

SEQ ID NO: 3669928 - RNA, 15 nt, Human
uccacagggucccac

SEQ ID NO: 3669929 - RNA, 16 nt, Human
uccacagggucccaca

SEQ ID NO: 3669930 - RNA, 20 nt, Human
uccacagggucccacagcca

SEQ ID NO: 3669931 - RNA, 17 nt, Human
uccacaggucuagacua

SEQ ID NO: 3669932 - RNA, 20 nt, Human
uccacaguggaaccagccca

SEQ ID NO: 3669933 - RNA, 13 nt, Human
uccacaguucagu

SEQ ID NO: 3669934 - RNA, 23 nt, Human
uccacaguucaguggcagggcuc

SEQ ID NO: 3669935 - RNA, 24 nt, Human
uccauuuuuacaaguuauaguacu

SEQ ID NO: 3669936 - RNA, 15 nt, Human
uccauuuuuuauauu

SEQ ID NO: 3669937 - RNA, 23 nt, Human
uccauuuuuucaagguaauuucu

SEQ ID NO: 3669938 - RNA, 12 nt, Human
ucccaaaagcua

SEQ ID NO: 3669939 - RNA, 17 nt, Human
ucccaaaaucaccguac

SEQ ID NO: 3669940 - RNA, 15 nt, Human
ucccaaaauuguuuu

SEQ ID NO: 3669941 - RNA, 18 nt, Human
ucccaaacccuucagugc

SEQ ID NO: 3669942 - RNA, 22 nt, Human
ucccaaacgcccuuuccuccuc

SEQ ID NO: 3669943 - RNA, 19 nt, Human
ucccaaagccagaaccaga

SEQ ID NO: 3669944 - RNA, 16 nt, Human
ucccaaaggacuccac

SEQ ID NO: 3669945 - RNA, 22 nt, Human
ucccaaaggacuccacccaucc

SEQ ID NO: 3669946 - RNA, 21 nt, Human
ucccaaaguccugggauuaca

SEQ ID NO: 3669947 - RNA, 18 nt, Human
ucccaaagugcugagauu

SEQ ID NO: 3669948 - RNA, 20 nt, Human
ucccaaagugcugagauuac

SEQ ID NO: 3669949 - RNA, 14 nt, Human
ucccaaagugcugg

SEQ ID NO: 3669950 - RNA, 19 nt, Human
ucccaaauccuucccaagu

SEQ ID NO: 3669951 - RNA, 20 nt, Human
ucccaaaugugugcccagcu

SEQ ID NO: 3669952 - RNA, 21 nt, Human
ucccaaaugugugcccagcuu

SEQ ID NO: 3669953 - RNA, 15 nt, Human
ucccaacaagcagcu

SEQ ID NO: 3669954 - RNA, 14 nt, Human
ucccaacacugcca

SEQ ID NO: 3669955 - RNA, 18 nt, Human
ucccaacacuucagacug

SEQ ID NO: 3669956 - RNA, 15 nt, Human
ucccaacagccaugc

SEQ ID NO: 3669957 - RNA, 17 nt, Human
ucccaacagccaugccc

SEQ ID NO: 3669958 - RNA, 16 nt, Human
ucccaacagucauguu

SEQ ID NO: 3669959 - RNA, 11 nt, Human
ucccaacaucg

SEQ ID NO: 3669960 - RNA, 14 nt, Human
ucccaaccagugcc

SEQ ID NO: 3669961 - RNA, 15 nt, Human
ucccaacccuggcuu

SEQ ID NO: 3669962 - RNA, 13 nt, Human
ucccaacucaccc

SEQ ID NO: 3669963 - RNA, 16 nt, Human
ucccaacucaccccag

SEQ ID NO: 3669964 - RNA, 17 nt, Human
ucccaacucaccccagc

SEQ ID NO: 3669965 - RNA, 18 nt, Human
ucccaacucaccccagcc

SEQ ID NO: 3669966 - RNA, 20 nt, Human
ucccaacuugccuuugaaga

SEQ ID NO: 3669967 - RNA, 14 nt, Human
ucccaacuuguaaa

SEQ ID NO: 3669968 - RNA, 19 nt, Human
ucccaagaacagcaggccc

SEQ ID NO: 3669969 - RNA, 21 nt, Human
ucccaagaacagcaggcccac

SEQ ID NO: 3669970 - RNA, 22 nt, Human
ucccaagaacagcaggcccacc

SEQ ID NO: 3669971 - RNA, 23 nt, Human
ucccaagaacagcaggcccaccu

SEQ ID NO: 3669972 - RNA, 13 nt, Human
ucccaagaaugca

SEQ ID NO: 3669973 - RNA, 14 nt, Human
ucccaagauguuga

SEQ ID NO: 3669974 - RNA, 23 nt, Human
ucccaagauguugauuuuuacug

SEQ ID NO: 3669975 - RNA, 14 nt, Human
ucccaagauuuuuu

SEQ ID NO: 3669976 - RNA, 20 nt, Human
ucccaagcaccugggauuac

SEQ ID NO: 3669977 - RNA, 20 nt, Human
ucccaagcuaucuaaaguuu

SEQ ID NO: 3669978 - RNA, 12 nt, Human
ucccaagcucug

SEQ ID NO: 3669979 - RNA, 14 nt, Human
ucccaagcucugcu

SEQ ID NO: 3669980 - RNA, 20 nt, Human
ucccaagcuggagugcagug

SEQ ID NO: 3669981 - RNA, 13 nt, Human
ucccaagcuggcu

SEQ ID NO: 3669982 - RNA, 16 nt, Human
ucccaagcuggcuggg

SEQ ID NO: 3669983 - RNA, 17 nt, Human
ucccaagcuggcugggg

SEQ ID NO: 3669984 - RNA, 16 nt, Human
ucccaagcugggcccc

SEQ ID NO: 3669985 - RNA, 22 nt, Human
ucccaagcugggccccagccca

SEQ ID NO: 3669986 - RNA, 12 nt, Human
ucccaaggaaag

SEQ ID NO: 3669987 - RNA, 17 nt, Human
ucccaaggagaacaaau

SEQ ID NO: 3669988 - RNA, 22 nt, Human
ucccaaggcucugagcaaaugu

SEQ ID NO: 3669989 - RNA, 18 nt, Human
ucccaagggauggugccc

SEQ ID NO: 3669990 - RNA, 19 nt, Human
ucccaaggggccugagcag

SEQ ID NO: 3669991 - RNA, 16 nt, Human
ucccaagguucugggu

SEQ ID NO: 3669992 - RNA, 21 nt, Human
ucccaagguuggagcccaggg

SEQ ID NO: 3669993 - RNA, 23 nt, Human
ucccaagguuggagcccagggca

SEQ ID NO: 3669994 - RNA, 20 nt, Human
ucccaaguaacugggauuac

SEQ ID NO: 3669995 - RNA, 18 nt, Human
ucccaaguaagaggcugg

SEQ ID NO: 3669996 - RNA, 16 nt, Human
ucccaaguagaaucuc

SEQ ID NO: 3669997 - RNA, 15 nt, Human
ucccaagugccaaag

SEQ ID NO: 3669998 - RNA, 16 nt, Human
ucccaaguggugccua

SEQ ID NO: 3669999 - RNA, 15 nt, Human
ucccaaguguacuau

SEQ ID NO: 3670000 - RNA, 19 nt, Human
ucccaaguuuccauagcaa

SEQ ID NO: 3670001 - RNA, 21 nt, Human
ucccaaguuuccauagcaaca

SEQ ID NO: 3670002 - RNA, 23 nt, Human
ucccaaguuuuaggacaaacagc

SEQ ID NO: 3670003 - RNA, 16 nt, Human
ucccaaucagcacuga

SEQ ID NO: 3670004 - RNA, 13 nt, Human
ucccaaugguguu

SEQ ID NO: 3670005 - RNA, 22 nt, Human
ucccaaugguguuuuucuugua

SEQ ID NO: 3670006 - RNA, 19 nt, Human
ucccaauuaggaaguguaa

SEQ ID NO: 3670007 - RNA, 14 nt, Human
ucccacaagccucu

SEQ ID NO: 3670008 - RNA, 18 nt, Human
ucccacaggacauuucuc

SEQ ID NO: 3670009 - RNA, 14 nt, Human
ucccacaggcagcu

SEQ ID NO: 3670010 - RNA, 17 nt, Human
ucccacaggcagcuuua

SEQ ID NO: 3670011 - RNA, 21 nt, Human
ucccacaggcccuuccucucc

SEQ ID NO: 3670012 - RNA, 18 nt, Human
ucccacagguucaggcga

SEQ ID NO: 3670013 - RNA, 21 nt, Human
ucccacagucccaucugcuuc

SEQ ID NO: 3670014 - RNA, 19 nt, Human
ucccacauccaacuccagc

SEQ ID NO: 3670015 - RNA, 20 nt, Human
ucccacauccaacuccagca

SEQ ID NO: 3670016 - RNA, 21 nt, Human
ucccacaucccugggccugcu

SEQ ID NO: 3670017 - RNA, 23 nt, Human
ucccacaucccugggccugcugc

SEQ ID NO: 3670018 - RNA, 19 nt, Human
ucccaccaacccucagagc

SEQ ID NO: 3670019 - RNA, 15 nt, Human
ucccaccacucccug

SEQ ID NO: 3670020 - RNA, 16 nt, Human
ucccaccacucccugg

SEQ ID NO: 3670021 - RNA, 22 nt, Human
ucccacccacaugugacacaua

SEQ ID NO: 3670022 - RNA, 14 nt, Human
ucccaccccacaca

SEQ ID NO: 3670023 - RNA, 20 nt, Human
ucccaccccacacacgccag

SEQ ID NO: 3670024 - RNA, 12 nt, Human
ucccaccccacc

SEQ ID NO: 3670025 - RNA, 18 nt, Human
ucccaccccacccccuuc

SEQ ID NO: 3670026 - RNA, 22 nt, Human
ucccaccccauuuucugugggc

SEQ ID NO: 3670027 - RNA, 22 nt, Human
ucccacccccacccccagcuca

SEQ ID NO: 3670028 - RNA, 12 nt, Human
ucccacccccag

SEQ ID NO: 3670029 - RNA, 15 nt, Human
ucccacccccagccc

SEQ ID NO: 3670030 - RNA, 17 nt, Human
ucccacccgaugcugcu

SEQ ID NO: 3670031 - RNA, 14 nt, Human
ucccacccguggug

SEQ ID NO: 3670032 - RNA, 12 nt, Human
ucccacccucuu

SEQ ID NO: 3670033 - RNA, 11 nt, Human
ucccacccugu

SEQ ID NO: 3670034 - RNA, 23 nt, Human
ucccaccgcccagcggcuugccu

SEQ ID NO: 3670035 - RNA, 22 nt, Human
ucccaccucaaaugggucuggg

SEQ ID NO: 3670036 - RNA, 16 nt, Human
ucccaccuccagcccg

SEQ ID NO: 3670037 - RNA, 13 nt, Human
ucccaccuccagu

SEQ ID NO: 3670038 - RNA, 17 nt, Human
ucccaccuccaucccag

SEQ ID NO: 3670039 - RNA, 17 nt, Human
ucccaccucccugccca

SEQ ID NO: 3670040 - RNA, 18 nt, Human
ucccaccucccugcccag

SEQ ID NO: 3670041 - RNA, 21 nt, Human
ucccaccuccugacacccuuc

SEQ ID NO: 3670042 - RNA, 14 nt, Human
ucccaccucucuca

SEQ ID NO: 3670043 - RNA, 18 nt, Human
ucccaccucucucacucc

SEQ ID NO: 3670044 - RNA, 20 nt, Human
ucccaccucucucacuccuu

SEQ ID NO: 3670045 - RNA, 22 nt, Human
ucccaccucucucacuccuuga

SEQ ID NO: 3670046 - RNA, 18 nt, Human
ucccaccucugugaccuc

SEQ ID NO: 3670047 - RNA, 22 nt, Human
ucccaccucugugaccucaggc

SEQ ID NO: 3670048 - RNA, 19 nt, Human
ucccaccugacacaccagg

SEQ ID NO: 3670049 - RNA, 14 nt, Human
ucccaccuggcucu

SEQ ID NO: 3670050 - RNA, 16 nt, Human
ucccaccuggcucugu

SEQ ID NO: 3670051 - RNA, 20 nt, Human
ucccaccuggcucuguggcg

SEQ ID NO: 3670052 - RNA, 18 nt, Human
ucccacgagggugccgug

SEQ ID NO: 3670053 - RNA, 23 nt, Human
ucccacggaaaaugccaaucucu

SEQ ID NO: 3670054 - RNA, 14 nt, Human
ucccacgugucuuc

SEQ ID NO: 3670055 - RNA, 18 nt, Human
ucccacucaagccaagca

SEQ ID NO: 3670056 - RNA, 17 nt, Human
ucccacucacaacagcu

SEQ ID NO: 3670057 - RNA, 22 nt, Human
ucccacucacaacagcugccug

SEQ ID NO: 3670058 - RNA, 23 nt, Human
ucccacucaccccggcagacgcc

SEQ ID NO: 3670059 - RNA, 16 nt, Human
ucccacuccaagccag

SEQ ID NO: 3670060 - RNA, 14 nt, Human
ucccacuccuagga

SEQ ID NO: 3670061 - RNA, 15 nt, Human
ucaggcccaggcacu

SEQ ID NO: 3670062 - RNA, 16 nt, Human
ucaggcccggcagggc

SEQ ID NO: 3670063 - RNA, 15 nt, Human
ucaggccgaaggagg

SEQ ID NO: 3670064 - RNA, 18 nt, Human
ucaggccggcagccccag

SEQ ID NO: 3670065 - RNA, 17 nt, Human
ucaggccuagaggccug

SEQ ID NO: 3670066 - RNA, 18 nt, Human
ucaggccuauaaccccag

SEQ ID NO: 3670067 - RNA, 22 nt, Human
ucaggccuauaaccccagcucc

SEQ ID NO: 3670068 - RNA, 15 nt, Human
ucaggcuacuagaau

SEQ ID NO: 3670069 - RNA, 13 nt, Human
ucaggcuagaugu

SEQ ID NO: 3670070 - RNA, 16 nt, Human
ucaggcuccauuagga

SEQ ID NO: 3670071 - RNA, 12 nt, Human
ucaggcucccag

SEQ ID NO: 3670072 - RNA, 15 nt, Human
ucaggcucucugggc

SEQ ID NO: 3670073 - RNA, 17 nt, Human
ucaggcucucugggcug

SEQ ID NO: 3670074 - RNA, 19 nt, Human
ucaggcucugcccugcccu

SEQ ID NO: 3670075 - RNA, 16 nt, Human
ucaggcugaaaacaau

SEQ ID NO: 3670076 - RNA, 14 nt, Human
ucaggcugagcuga

SEQ ID NO: 3670077 - RNA, 13 nt, Human
ucaggcugaggug

SEQ ID NO: 3670078 - RNA, 12 nt, Human
ucaggcugcagc

SEQ ID NO: 3670079 - RNA, 14 nt, Human
gcugcccagaguug

SEQ ID NO: 3670080 - RNA, 17 nt, Human
gcugcccagaguugcug

SEQ ID NO: 3670081 - RNA, 16 nt, Human
gcugcccauuucguga

SEQ ID NO: 3670082 - RNA, 18 nt, Human
gcugccccaaccugcuga

SEQ ID NO: 3670083 - RNA, 16 nt, Human
gcugccccagccagau

SEQ ID NO: 3670084 - RNA, 18 nt, Human
gcugccccaucagugcuc

SEQ ID NO: 3670085 - RNA, 21 nt, Human
gcugccccaucuccccucagc

SEQ ID NO: 3670086 - RNA, 22 nt, Human
gcugccccaucuccccucagcu

SEQ ID NO: 3670087 - RNA, 20 nt, Human
gcugccccaugaagccacag

SEQ ID NO: 3670088 - RNA, 20 nt, Human
gcugcccccagagccacagu

SEQ ID NO: 3670089 - RNA, 19 nt, Human
gcugcccccggcccccugg

SEQ ID NO: 3670090 - RNA, 13 nt, Human
gcugccccggccc

SEQ ID NO: 3670091 - RNA, 22 nt, Human
gcugccccucaucucucugccc

SEQ ID NO: 3670092 - RNA, 14 nt, Human
gcugccccucccug

SEQ ID NO: 3670093 - RNA, 15 nt, Human
gcugccccucucacc

SEQ ID NO: 3670094 - RNA, 19 nt, Human
gcugccccucucugggccu

SEQ ID NO: 3670095 - RNA, 23 nt, Human
gcugccccucucugggccucaga

SEQ ID NO: 3670096 - RNA, 15 nt, Human
gcugccccuggcagc

SEQ ID NO: 3670097 - RNA, 19 nt, Human
gcugccccuggcagccccu

SEQ ID NO: 3670098 - RNA, 17 nt, Human
gcugccccuggcucuga

SEQ ID NO: 3670099 - RNA, 18 nt, Human
gcugcccggcgcccucug

SEQ ID NO: 3670100 - RNA, 20 nt, Human
gcugcccggcgcccucuguc

SEQ ID NO: 3670101 - RNA, 19 nt, Human
gcugcccgucuucagccua

SEQ ID NO: 3670102 - RNA, 17 nt, Human
gcugcccuaugggccug

SEQ ID NO: 3670103 - RNA, 14 nt, Human
gcugcccuccaucc

SEQ ID NO: 3670104 - RNA, 21 nt, Human
gcugcccuccaucccgacaug

SEQ ID NO: 3670105 - RNA, 22 nt, Human
gcugcccuccugugcucagccc

SEQ ID NO: 3670106 - RNA, 16 nt, Human
gcugcccuccuugucc

SEQ ID NO: 3670107 - RNA, 22 nt, Human
gcugcccuccuuguccacccac

SEQ ID NO: 3670108 - RNA, 12 nt, Human
gcugcccucucc

SEQ ID NO: 3670109 - RNA, 14 nt, Human
gcugcccucuccug

SEQ ID NO: 3670110 - RNA, 18 nt, Human
gcugcccucuccugggca

SEQ ID NO: 3670111 - RNA, 20 nt, Human
gcugcccucuccugggcagc

SEQ ID NO: 3670112 - RNA, 16 nt, Human
gcugcccugagaagcu

SEQ ID NO: 3670113 - RNA, 21 nt, Human
gcugcccugagaagcugcucc

SEQ ID NO: 3670114 - RNA, 20 nt, Human
gcugcccugagcgccuggau

SEQ ID NO: 3670115 - RNA, 14 nt, Human
gcugcccugcccac

SEQ ID NO: 3670116 - RNA, 18 nt, Human
gcugcccugcccaccugg

SEQ ID NO: 3670117 - RNA, 21 nt, Human
gcugcccuggaggaaccgaaa

SEQ ID NO: 3670118 - RNA, 15 nt, Human
gcugcccuggcccug

SEQ ID NO: 3670119 - RNA, 23 nt, Human
gcugcccuggcccugaggugugg

SEQ ID NO: 3670120 - RNA, 13 nt, Human
gcugcccuggugc

SEQ ID NO: 3670121 - RNA, 14 nt, Human
gcugccgcacccca

SEQ ID NO: 3670122 - RNA, 20 nt, Human
gcugccgccucccagccugg

SEQ ID NO: 3670123 - RNA, 19 nt, Human
gcugccggggcagcccccu

SEQ ID NO: 3670124 - RNA, 19 nt, Human
gcugccggucgcccuuugc

SEQ ID NO: 3670125 - RNA, 18 nt, Human
gcugccgugccgccugca

SEQ ID NO: 3670126 - RNA, 22 nt, Human
gcugccgugccgccugcacucc

SEQ ID NO: 3670127 - RNA, 22 nt, Human
gcugccguggggccgccgccuc

SEQ ID NO: 3670128 - RNA, 14 nt, Human
gcugccuaaaucca

SEQ ID NO: 3670129 - RNA, 16 nt, Human
gcugccuaaguggcug

SEQ ID NO: 3670130 - RNA, 20 nt, Human
gcugccuagauucagggaaa

SEQ ID NO: 3670131 - RNA, 17 nt, Human
gcugccuaggauucaca

SEQ ID NO: 3670132 - RNA, 15 nt, Human
gcugccuccacuccc

SEQ ID NO: 3670133 - RNA, 17 nt, Human
gcugccuccccaacccu

SEQ ID NO: 3670134 - RNA, 20 nt, Human
gcugccuccccaacccugcc

SEQ ID NO: 3670135 - RNA, 20 nt, Human
gcugccuccccuccucugcu

SEQ ID NO: 3670136 - RNA, 12 nt, Human
gcugccucccug

SEQ ID NO: 3670137 - RNA, 19 nt, Human
gcugccucccuguccaccc

SEQ ID NO: 3670138 - RNA, 19 nt, Human
gcugccucggauccccuuc

SEQ ID NO: 3670139 - RNA, 21 nt, Human
gcugccucuaccugacacucc

SEQ ID NO: 3670140 - RNA, 18 nt, Human
gcugccucucgguggcca

SEQ ID NO: 3670141 - RNA, 13 nt, Human
gcugccucuuucc

SEQ ID NO: 3670142 - RNA, 23 nt, Human
gcugccugagcaccucccagccc

SEQ ID NO: 3670143 - RNA, 11 nt, Human
gcugccugagu

SEQ ID NO: 3670144 - RNA, 17 nt, Human
gcugccugcccacacag

SEQ ID NO: 3670145 - RNA, 22 nt, Human
gcugccugcccguaaacacgcc

SEQ ID NO: 3670146 - RNA, 15 nt, Human
gcugccugccugucu

SEQ ID NO: 3670147 - RNA, 16 nt, Human
gcugccugccugucug

SEQ ID NO: 3670148 - RNA, 22 nt, Human
gcugccugcgcccaccccgcuc

SEQ ID NO: 3670149 - RNA, 22 nt, Human
gcugccuggagccccacugccc

SEQ ID NO: 3670150 - RNA, 19 nt, Human
gcugccuggcccccagcug

SEQ ID NO: 3670151 - RNA, 22 nt, Human
gcugccuggcccccagcugugg

SEQ ID NO: 3670152 - RNA, 14 nt, Human
gcugccugggcugu

SEQ ID NO: 3670153 - RNA, 16 nt, Human
gcugccugggcuguug

SEQ ID NO: 3670154 - RNA, 22 nt, Human
gcugccugggcuguuggcacuc

SEQ ID NO: 3670155 - RNA, 23 nt, Human
gcugccugggcuguuggcacuca

SEQ ID NO: 3670156 - RNA, 12 nt, Human
gcugccuguagu

SEQ ID NO: 3670157 - RNA, 16 nt, Human
gcugccuguaguuagg

SEQ ID NO: 3670158 - RNA, 19 nt, Human
gcugccuguaguuaggaaa

SEQ ID NO: 3670159 - RNA, 20 nt, Human
gcugccuuagaaccuuucuu

SEQ ID NO: 3670160 - RNA, 13 nt, Human
gcugccuucccua

SEQ ID NO: 3670161 - RNA, 21 nt, Human
gcugccuucgguacccaccac

SEQ ID NO: 3670162 - RNA, 19 nt, Human
gcugccuucuggauucuug

SEQ ID NO: 3670163 - RNA, 23 nt, Human
gcugccuuggcucagacauguuu

SEQ ID NO: 3670164 - RNA, 15 nt, Human
gcugcgauacuggca

SEQ ID NO: 3670165 - RNA, 16 nt, Human
gcugcgcccugggcuc

SEQ ID NO: 3670166 - RNA, 17 nt, Human
gcugcggccccuccccc

SEQ ID NO: 3670167 - RNA, 18 nt, Human
gcugcggcguacaggcug

SEQ ID NO: 3670168 - RNA, 19 nt, Human
gcugcgguccacccaggag

SEQ ID NO: 3670169 - RNA, 18 nt, Human
gcugcgugccccugcugc

SEQ ID NO: 3670170 - RNA, 21 nt, Human
gcugcuaaaucuccuauuuuu

SEQ ID NO: 3670171 - RNA, 20 nt, Human
gcugcuaaucuucagggcac

SEQ ID NO: 3670172 - RNA, 18 nt, Human
gcugcuacaaagaagaca

SEQ ID NO: 3670173 - RNA, 23 nt, Human
gcugcuacaaagaagacauguuu

SEQ ID NO: 3670174 - RNA, 14 nt, Human
gcugcuacccagaa

SEQ ID NO: 3670175 - RNA, 17 nt, Human
gcugcuacccucccugc

SEQ ID NO: 3670176 - RNA, 20 nt, Human
gcugcuacccucccugcugu

SEQ ID NO: 3670177 - RNA, 21 nt, Human
gcugcuacccucccugcuguc

SEQ ID NO: 3670178 - RNA, 23 nt, Human
gcugcuacccucccugcuguccc

SEQ ID NO: 3670179 - RNA, 23 nt, Human
gcugcuacuuaauuccuuucuca

SEQ ID NO: 3670180 - RNA, 16 nt, Human
gcugcuagaacuuuuu

SEQ ID NO: 3670181 - RNA, 22 nt, Human
gcugcuagaacuuuuuuaaaua

SEQ ID NO: 3670182 - RNA, 20 nt, Human
gcugcuagagugacucacua

SEQ ID NO: 3670183 - RNA, 15 nt, Human
gcugcuauagccugg

SEQ ID NO: 3670184 - RNA, 17 nt, Human
gcugcuauccccaucuc

SEQ ID NO: 3670185 - RNA, 14 nt, Human
gcugcuccaggccu

SEQ ID NO: 3670186 - RNA, 19 nt, Human
gcugcuccaggccugcagc

SEQ ID NO: 3670187 - RNA, 15 nt, Human
gcugcucccaccugg

SEQ ID NO: 3670188 - RNA, 20 nt, Human
gcugcucccaccuggcucug

SEQ ID NO: 3670189 - RNA, 16 nt, Human
gcugcuccccagcagc

SEQ ID NO: 3670190 - RNA, 21 nt, Human
gcugcucccucagacuggggc

SEQ ID NO: 3670191 - RNA, 19 nt, Human
gcugcuccuagagggaggg

SEQ ID NO: 3670192 - RNA, 21 nt, Human
gcugcuccuagagggaggggc

SEQ ID NO: 3670193 - RNA, 23 nt, Human
gcugcuccuagagggaggggccu

SEQ ID NO: 3670194 - RNA, 13 nt, Human
gcugcuccucaug

SEQ ID NO: 3670195 - RNA, 18 nt, Human
gcugcuccuuagcugcca

SEQ ID NO: 3670196 - RNA, 19 nt, Human
gcugcuccuuagcugccaa

SEQ ID NO: 3670197 - RNA, 23 nt, Human
gcugcuccuuagcugccaagccc

SEQ ID NO: 3670198 - RNA, 17 nt, Human
gcugcuccuuccuucac

SEQ ID NO: 3670199 - RNA, 14 nt, Human
gcugcuccuuggcu

SEQ ID NO: 3670200 - RNA, 19 nt, Human
gcugcucggggugcacagg

SEQ ID NO: 3670201 - RNA, 20 nt, Human
gcugcucggggugcacagga

SEQ ID NO: 3670202 - RNA, 21 nt, Human
gcugcucggggugcacaggag

SEQ ID NO: 3670203 - RNA, 23 nt, Human
gcugcucggggugcacaggaggg

SEQ ID NO: 3670204 - RNA, 14 nt, Human
gcugcucugagcca

SEQ ID NO: 3670205 - RNA, 19 nt, Human
gcugcucugcccagagcug

SEQ ID NO: 3670206 - RNA, 13 nt, Human
gcugcucugcccc

SEQ ID NO: 3670207 - RNA, 23 nt, Human
gcugcucugccccagcuugggca

SEQ ID NO: 3670208 - RNA, 22 nt, Human
gcugcugaaaaccaucuggccu

SEQ ID NO: 3670209 - RNA, 13 nt, Human
gcugcugaaacaa

SEQ ID NO: 3670210 - RNA, 15 nt, Human
gcugcugaagaugaa

SEQ ID NO: 3670211 - RNA, 15 nt, Human
gcugcugaaggcucg

SEQ ID NO: 3670212 - RNA, 18 nt, Human
gcugcugaaggcucgagc

SEQ ID NO: 3670213 - RNA, 12 nt, Human
gcugcugacagu

SEQ ID NO: 3670214 - RNA, 12 nt, Human
gcugcugaccaa

SEQ ID NO: 3670215 - RNA, 15 nt, Human
gcugcugagaaccug

SEQ ID NO: 3670216 - RNA, 16 nt, Human
gcugcugagaaccugg

SEQ ID NO: 3670217 - RNA, 19 nt, Human
gcugcugagaaccuggccu

SEQ ID NO: 3670218 - RNA, 20 nt, Human
gcugcugagaaccuggccuu

SEQ ID NO: 3670219 - RNA, 15 nt, Human
gcugcugagccgcag

SEQ ID NO: 3670220 - RNA, 17 nt, Human
gcugcugaucgccuucc

SEQ ID NO: 3670221 - RNA, 20 nt, Human
gcugcugaucgccuucccca

SEQ ID NO: 3670222 - RNA, 13 nt, Human
ucccuccacccca

SEQ ID NO: 3670223 - RNA, 14 nt, Human
ucccuccaccccag

SEQ ID NO: 3670224 - RNA, 14 nt, Human
ucccuccaccuccc

SEQ ID NO: 3670225 - RNA, 15 nt, Human
ucccuccaccucccu

SEQ ID NO: 3670226 - RNA, 17 nt, Human
ucccuccaccucccugc

SEQ ID NO: 3670227 - RNA, 21 nt, Human
ucccuccaccucccugcaaua

SEQ ID NO: 3670228 - RNA, 20 nt, Human
ucccuccacguucaccccuc

SEQ ID NO: 3670229 - RNA, 14 nt, Human
ucccuccagcacaa

SEQ ID NO: 3670230 - RNA, 13 nt, Human
ucccucccaccuc

SEQ ID NO: 3670231 - RNA, 23 nt, Human
ucccucccagagcaccugcuguc

SEQ ID NO: 3670232 - RNA, 22 nt, Human
ucccucccagaggagccaccag

SEQ ID NO: 3670233 - RNA, 13 nt, Human
ucccucccaggac

SEQ ID NO: 3670234 - RNA, 18 nt, Human
ucccucccaucaugcccg

SEQ ID NO: 3670235 - RNA, 15 nt, Human
ucccuccccagcucc

SEQ ID NO: 3670236 - RNA, 14 nt, Human
ucccucccccccau

SEQ ID NO: 3670237 - RNA, 14 nt, Human
ucccucccccuugu

SEQ ID NO: 3670238 - RNA, 17 nt, Human
ucccuccccugcccucg

SEQ ID NO: 3670239 - RNA, 16 nt, Human
ucccuccccugcccug

SEQ ID NO: 3670240 - RNA, 19 nt, Human
ucccuccccugcccugguc

SEQ ID NO: 3670241 - RNA, 15 nt, Human
ucccuccccuucucu

SEQ ID NO: 3670242 - RNA, 13 nt, Human
ucccucccuccac

SEQ ID NO: 3670243 - RNA, 16 nt, Human
ucccucccuccaccuc

SEQ ID NO: 3670244 - RNA, 16 nt, Human
ucccucccugcuguca

SEQ ID NO: 3670245 - RNA, 14 nt, Human
ucccucccuugggg

SEQ ID NO: 3670246 - RNA, 15 nt, Human
ucccucccuuugaaa

SEQ ID NO: 3670247 - RNA, 14 nt, Human
ucccuccgggaccu

SEQ ID NO: 3670248 - RNA, 14 nt, Human
ucccuccuccaggc

SEQ ID NO: 3670249 - RNA, 16 nt, Human
ucccuccuccaggccu

SEQ ID NO: 3670250 - RNA, 21 nt, Human
ucccuccuccaggccugccuc

SEQ ID NO: 3670251 - RNA, 20 nt, Human
ucccuccucccaugucacug

SEQ ID NO: 3670252 - RNA, 16 nt, Human
ucccuccucugcccgg

SEQ ID NO: 3670253 - RNA, 22 nt, Human
ucccuccugcccgccacacaga

SEQ ID NO: 3670254 - RNA, 16 nt, Human
ucccuccugccgacuc

SEQ ID NO: 3670255 - RNA, 14 nt, Human
ucccuccugcuacu

SEQ ID NO: 3670256 - RNA, 22 nt, Human
ucccuccuggugucaccccaga

SEQ ID NO: 3670257 - RNA, 11 nt, Human
ucccuccuugg

SEQ ID NO: 3670258 - RNA, 17 nt, Human
ucccucgaacccacacu

SEQ ID NO: 3670259 - RNA, 20 nt, Human
ucccucgaacccacacugca

SEQ ID NO: 3670260 - RNA, 20 nt, Human
ucccucggaguucuucuuga

SEQ ID NO: 3670261 - RNA, 16 nt, Human
ucccucgucuuuccca

SEQ ID NO: 3670262 - RNA, 14 nt, Human
ucccucuaauuuau

SEQ ID NO: 3670263 - RNA, 16 nt, Human
ucccucuaauuuaucu

SEQ ID NO: 3670264 - RNA, 22 nt, Human
ucccucuacuaaggcuuuccua

SEQ ID NO: 3670265 - RNA, 15 nt, Human
ucccucuacugggag

SEQ ID NO: 3670266 - RNA, 23 nt, Human
ucccucuacugggagccuaccca

SEQ ID NO: 3670267 - RNA, 17 nt, Human
ucccucucaacacccag

SEQ ID NO: 3670268 - RNA, 16 nt, Human
ucccucucaggaucca

SEQ ID NO: 3670269 - RNA, 20 nt, Human
ucccucucaggcaugccugu

SEQ ID NO: 3670270 - RNA, 22 nt, Human
ucccucucaggcaugccugugu

SEQ ID NO: 3670271 - RNA, 23 nt, Human
ucccucucaggcaugccugugug

SEQ ID NO: 3670272 - RNA, 21 nt, Human
ucccucucauuuagccugucc

SEQ ID NO: 3670273 - RNA, 22 nt, Human
ucccucucauuuagccuguccu

SEQ ID NO: 3670274 - RNA, 20 nt, Human
ucccucuccauaaccccacc

SEQ ID NO: 3670275 - RNA, 23 nt, Human
uccaaccuaaccccuuuccugcg

SEQ ID NO: 3670276 - RNA, 19 nt, Human
uccaaccuaaccugugucu

SEQ ID NO: 3670277 - RNA, 21 nt, Human
uccaaccugcaaagaucuguc

SEQ ID NO: 3670278 - RNA, 14 nt, Human
uccaaccuucccaa

SEQ ID NO: 3670279 - RNA, 18 nt, Human
uccaacguggggcagcac

SEQ ID NO: 3670280 - RNA, 19 nt, Human
uccaacguggggcagcaca

SEQ ID NO: 3670281 - RNA, 15 nt, Human
uccaacguuuggaag

SEQ ID NO: 3670282 - RNA, 19 nt, Human
uccaacuaaugccuuacuc

SEQ ID NO: 3670283 - RNA, 21 nt, Human
uccaacuacuaauagaauaaa

SEQ ID NO: 3670284 - RNA, 23 nt, Human
uccaacuacuaauagaauaaagg

SEQ ID NO: 3670285 - RNA, 21 nt, Human
uccaacuccaacauccacucu

SEQ ID NO: 3670286 - RNA, 11 nt, Human
uccaacuccag

SEQ ID NO: 3670287 - RNA, 14 nt, Human
uccaacugcaacuc

SEQ ID NO: 3670288 - RNA, 12 nt, Human
uccaagaagccc

SEQ ID NO: 3670289 - RNA, 16 nt, Human
uccaagaagcccagga

SEQ ID NO: 3670290 - RNA, 19 nt, Human
uccaagaagcccaggaaag

SEQ ID NO: 3670291 - RNA, 19 nt, Human
uccaagaauagcaucugua

SEQ ID NO: 3670292 - RNA, 18 nt, Human
uccaagaaucuaucugcu

SEQ ID NO: 3670293 - RNA, 20 nt, Human
uccaagacaugucuguucua

SEQ ID NO: 3670294 - RNA, 17 nt, Human
uccaagacauugucaau

SEQ ID NO: 3670295 - RNA, 14 nt, Human
uccaagaccagacu

SEQ ID NO: 3670296 - RNA, 19 nt, Human
uccaagaccuguugguucc

SEQ ID NO: 3670297 - RNA, 14 nt, Human
uccaagacucuaga

SEQ ID NO: 3670298 - RNA, 16 nt, Human
uccaagacucuagagu

SEQ ID NO: 3670299 - RNA, 21 nt, Human
uccaagagcuacauaauuuag

SEQ ID NO: 3670300 - RNA, 19 nt, Human
uccaagaggguccuuuagu

SEQ ID NO: 3670301 - RNA, 16 nt, Human
uccaagagucugauga

SEQ ID NO: 3670302 - RNA, 22 nt, Human
uccaagauauuuuaaaaucugu

SEQ ID NO: 3670303 - RNA, 20 nt, Human
uccaagauuuaaaugccaua

SEQ ID NO: 3670304 - RNA, 18 nt, Human
uccaagcaaauguuacau

SEQ ID NO: 3670305 - RNA, 23 nt, Human
uccaagcagccugagcaacucuu

SEQ ID NO: 3670306 - RNA, 14 nt, Human
uccaagcagcuuag

SEQ ID NO: 3670307 - RNA, 15 nt, Human
uccaagcagcuuaga

SEQ ID NO: 3670308 - RNA, 23 nt, Human
uccaagcauaccaacacgagcag

SEQ ID NO: 3670309 - RNA, 20 nt, Human
uccaagcauuuagauguaua

SEQ ID NO: 3670310 - RNA, 15 nt, Human
uccaagccagcggga

SEQ ID NO: 3670311 - RNA, 15 nt, Human
uccaagccccaucuu

SEQ ID NO: 3670312 - RNA, 19 nt, Human
uccaagccccaucuucuaa

SEQ ID NO: 3670313 - RNA, 12 nt, Human
uccaagcccugg

SEQ ID NO: 3670314 - RNA, 20 nt, Human
uccaagccucauguccacug

SEQ ID NO: 3670315 - RNA, 14 nt, Human
uccaagccuccaca

SEQ ID NO: 3670316 - RNA, 17 nt, Human
uccaagccuccacagcg

SEQ ID NO: 3670317 - RNA, 11 nt, Human
uccaagccugc

SEQ ID NO: 3670318 - RNA, 21 nt, Human
uccaagcgaggucaacagaga

SEQ ID NO: 3670319 - RNA, 22 nt, Human
uccaagcgaggucaacagagaa

SEQ ID NO: 3670320 - RNA, 14 nt, Human
uccaagcuaagcac

SEQ ID NO: 3670321 - RNA, 22 nt, Human
uccaagcucacuccccaacccc

SEQ ID NO: 3670322 - RNA, 12 nt, Human
uccaagcuccca

SEQ ID NO: 3670323 - RNA, 16 nt, Human
uccaagcucccaggca

SEQ ID NO: 3670324 - RNA, 11 nt, Human
uccaagcuggu

SEQ ID NO: 3670325 - RNA, 22 nt, Human
uccaagcuuccauagcugcugc

SEQ ID NO: 3670326 - RNA, 23 nt, Human
uccaaggaaaccacagcugcugg

SEQ ID NO: 3670327 - RNA, 23 nt, Human
uccaaggacagaaggcuccugcc

SEQ ID NO: 3670328 - RNA, 15 nt, Human
uccaaggagaaacag

SEQ ID NO: 3670329 - RNA, 19 nt, Human
uccaaggagaaacagagac

SEQ ID NO: 3670330 - RNA, 22 nt, Human
uccaaggagaaacagagacagg

SEQ ID NO: 3670331 - RNA, 19 nt, Human
uccaaggagcugagaauag

SEQ ID NO: 3670332 - RNA, 16 nt, Human
uccaaggcagaagcag

SEQ ID NO: 3670333 - RNA, 22 nt, Human
uccaagggcuucugcacccucc

SEQ ID NO: 3670334 - RNA, 23 nt, Human
uccaagggcuucugcacccucca

SEQ ID NO: 3670335 - RNA, 15 nt, Human
uccaagguucccuug

SEQ ID NO: 3670336 - RNA, 16 nt, Human
uccaagguucccuugu

SEQ ID NO: 3670337 - RNA, 15 nt, Human
uccaagguuuaaaga

SEQ ID NO: 3670338 - RNA, 16 nt, Human
uccaagguuuaaagag

SEQ ID NO: 3670339 - RNA, 19 nt, Human
uccaagguuuaaagagucu

SEQ ID NO: 3670340 - RNA, 22 nt, Human
uccaagguuuaaagagucuaga

SEQ ID NO: 3670341 - RNA, 17 nt, Human
uccaaguccaauaagac

SEQ ID NO: 3670342 - RNA, 17 nt, Human
uccaagucucaguggcu

SEQ ID NO: 3670343 - RNA, 21 nt, Human
uccaagucuuugcuauuguga

SEQ ID NO: 3670344 - RNA, 18 nt, Human
uccaagugccagaggugg

SEQ ID NO: 3670345 - RNA, 14 nt, Human
uccaagugugcaua

SEQ ID NO: 3670346 - RNA, 20 nt, Human
uccaagugugcauauuguac

SEQ ID NO: 3670347 - RNA, 15 nt, Human
uccaaguuaaaugua

SEQ ID NO: 3670348 - RNA, 17 nt, Human
uccaauaaaaugccuca

SEQ ID NO: 3670349 - RNA, 19 nt, Human
uccaauaggaaugcuaaca

SEQ ID NO: 3670350 - RNA, 14 nt, Human
uccaauaugugauu

SEQ ID NO: 3670351 - RNA, 16 nt, Human
uccaauaugugauuuu

SEQ ID NO: 3670352 - RNA, 13 nt, Human
uccaauauuucug

SEQ ID NO: 3670353 - RNA, 15 nt, Human
uccaauauuucugcu

SEQ ID NO: 3670354 - RNA, 16 nt, Human
uccaauauuucugcuu

SEQ ID NO: 3670355 - RNA, 23 nt, Human
uccaauauuucugcuuucuuuga

SEQ ID NO: 3670356 - RNA, 20 nt, Human
uccaaucaaucuugcaugua

SEQ ID NO: 3670357 - RNA, 23 nt, Human
uccaaucagagaccaggcccugg

SEQ ID NO: 3670358 - RNA, 15 nt, Human
uccaauccucacugg

SEQ ID NO: 3670359 - RNA, 17 nt, Human
uccaauccucacugggu

SEQ ID NO: 3670360 - RNA, 18 nt, Human
uccaauccucacugggug

SEQ ID NO: 3670361 - RNA, 14 nt, Human
uccaauccugcccc

SEQ ID NO: 3670362 - RNA, 22 nt, Human
uccaauccuggcucuguggcuu

SEQ ID NO: 3670363 - RNA, 19 nt, Human
uccaaucucaaggaaucuu

SEQ ID NO: 3670364 - RNA, 17 nt, Human
uccaaucuuguuuccaa

SEQ ID NO: 3670365 - RNA, 17 nt, Human
uccaaugagcuuucuga

SEQ ID NO: 3670366 - RNA, 18 nt, Human
ucccuggcccccucccug

SEQ ID NO: 3670367 - RNA, 13 nt, Human
ucccuggccuguu

SEQ ID NO: 3670368 - RNA, 24 nt, Human
ucccuggccuuucauauuuuagcu

SEQ ID NO: 3670369 - RNA, 11 nt, Human
ucccuggcgca

SEQ ID NO: 3670370 - RNA, 19 nt, Human
ucccuggcggccccaacuc

SEQ ID NO: 3670371 - RNA, 20 nt, Human
ucccuggcucucagaaggua

SEQ ID NO: 3670372 - RNA, 16 nt, Human
ucccuggcugcccugg

SEQ ID NO: 3670373 - RNA, 19 nt, Human
ucccuggcugcccuggccc

SEQ ID NO: 3670374 - RNA, 22 nt, Human
ucccuggcugcccuggcccuga

SEQ ID NO: 3670375 - RNA, 17 nt, Human
ucccuggcuuccuuacu

SEQ ID NO: 3670376 - RNA, 12 nt, Human
ucccuggcuucu

SEQ ID NO: 3670377 - RNA, 11 nt, Human
ucccuggcuug

SEQ ID NO: 3670378 - RNA, 21 nt, Human
ucccuggcuuguaacuccacc

SEQ ID NO: 3670379 - RNA, 17 nt, Human
ucccugggaucuggugg

SEQ ID NO: 3670380 - RNA, 16 nt, Human
ucccugggcagaaagu

SEQ ID NO: 3670381 - RNA, 24 nt, Human
ucccugggccagggucugugugaa

SEQ ID NO: 3670382 - RNA, 18 nt, Human
ucccugggccugcugcug

SEQ ID NO: 3670383 - RNA, 13 nt, Human
ucccugggccuug

SEQ ID NO: 3670384 - RNA, 14 nt, Human
ucccugggccuugg

SEQ ID NO: 3670385 - RNA, 15 nt, Human
ucccugggccuuggg

SEQ ID NO: 3670386 - RNA, 20 nt, Human
ucccuggggaaaacuugcag

SEQ ID NO: 3670387 - RNA, 20 nt, Human
ucccuggggcuagggggagc

SEQ ID NO: 3670388 - RNA, 18 nt, Human
ucccugggggaagcccug

SEQ ID NO: 3670389 - RNA, 21 nt, Human
ucccugggggaagcccuggau

SEQ ID NO: 3670390 - RNA, 22 nt, Human
ucccuggguuagacugccagcu

SEQ ID NO: 3670391 - RNA, 14 nt, Human
ucccuggucccuug

SEQ ID NO: 3670392 - RNA, 23 nt, Human
ucccuggugagagggccgggcag

SEQ ID NO: 3670393 - RNA, 15 nt, Human
ucccuggugcuuaug

SEQ ID NO: 3670394 - RNA, 20 nt, Human
ucccugguggcagcucaccu

SEQ ID NO: 3670395 - RNA, 14 nt, Human
ucccuguaaccucu

SEQ ID NO: 3670396 - RNA, 22 nt, Human
ucccuguaaccucuucagaggc

SEQ ID NO: 3670397 - RNA, 23 nt, Human
ucccuguaaccucuucagaggcc

SEQ ID NO: 3670398 - RNA, 12 nt, Human
ucccuguaacuu

SEQ ID NO: 3670399 - RNA, 21 nt, Human
ucccuguaauuguuguuugua

SEQ ID NO: 3670400 - RNA, 16 nt, Human
ucccuguaggauuuuu

SEQ ID NO: 3670401 - RNA, 19 nt, Human
ucccuguaggguccaacca

SEQ ID NO: 3670402 - RNA, 22 nt, Human
ucccuguauuuucuuucucuac

SEQ ID NO: 3670403 - RNA, 14 nt, Human
ucccugucaccaag

SEQ ID NO: 3670404 - RNA, 15 nt, Human
ucccugucaccaagc

SEQ ID NO: 3670405 - RNA, 17 nt, Human
ucccugucaccucuucc

SEQ ID NO: 3670406 - RNA, 14 nt, Human
ucccugucuuuccu

SEQ ID NO: 3670407 - RNA, 20 nt, Human
ucccugucuuuccuaagacc

SEQ ID NO: 3670408 - RNA, 23 nt, Human
ucccugucuuuccuaagaccugg

SEQ ID NO: 3670409 - RNA, 12 nt, Human
ucccugugaggg

SEQ ID NO: 3670410 - RNA, 16 nt, Human
ucccuguuccccagag

SEQ ID NO: 3670411 - RNA, 14 nt, Human
ucccuguucuuccu

SEQ ID NO: 3670412 - RNA, 18 nt, Human
ucccuguucuuccuccag

SEQ ID NO: 3670413 - RNA, 11 nt, Human
ucccuguuuaa

SEQ ID NO: 3670414 - RNA, 16 nt, Human
ucccuguuuaauauuu

SEQ ID NO: 3670415 - RNA, 19 nt, Human
ucccuguuuucugagcccg

SEQ ID NO: 3670416 - RNA, 16 nt, Human
ucccuuaacaguugua

SEQ ID NO: 3670417 - RNA, 17 nt, Human
ucccuuaacaguuguau

SEQ ID NO: 3670418 - RNA, 19 nt, Human
ucccuuaagaaugaguuuc

SEQ ID NO: 3670419 - RNA, 21 nt, Human
ucccuuaauauccuaaacauc

SEQ ID NO: 3670420 - RNA, 15 nt, Human
ucccuuacuuugcug

SEQ ID NO: 3670421 - RNA, 14 nt, Human
ucccuucacauagu

SEQ ID NO: 3670422 - RNA, 14 nt, Human
ucccuucaccuccu

SEQ ID NO: 3670423 - RNA, 12 nt, Human
ucccuucagccc

SEQ ID NO: 3670424 - RNA, 17 nt, Human
ucccuucagcccccagc

SEQ ID NO: 3670425 - RNA, 19 nt, Human
ucccuucagcccccagccc

SEQ ID NO: 3670426 - RNA, 16 nt, Human
ucccuucaguacccuc

SEQ ID NO: 3670427 - RNA, 16 nt, Human
ucccuucauacuugaa

SEQ ID NO: 3670428 - RNA, 13 nt, Human
ucccuucaucucc

SEQ ID NO: 3670429 - RNA, 14 nt, Human
ucccuuccacugcc

SEQ ID NO: 3670430 - RNA, 18 nt, Human
ucccuuccacugccucug

SEQ ID NO: 3670431 - RNA, 19 nt, Human
ucccuuccacugccucugc

SEQ ID NO: 3670432 - RNA, 17 nt, Human
ucccuuccagaugguca

SEQ ID NO: 3670433 - RNA, 19 nt, Human
ucccuuccaguuuauucca

SEQ ID NO: 3670434 - RNA, 16 nt, Human
ucccuucccaccucuc

SEQ ID NO: 3670435 - RNA, 16 nt, Human
ucccuucccauaagcu

SEQ ID NO: 3670436 - RNA, 21 nt, Human
ucccuuccccucccuggcucc

SEQ ID NO: 3670437 - RNA, 14 nt, Human
ucccuucccuccuc

SEQ ID NO: 3670438 - RNA, 12 nt, Human
gcuguuggucau

SEQ ID NO: 3670439 - RNA, 12 nt, Human
gcuguuguacau

SEQ ID NO: 3670440 - RNA, 13 nt, Human
gcuguuguacauu

SEQ ID NO: 3670441 - RNA, 15 nt, Human
gcuguuguacauuua

SEQ ID NO: 3670442 - RNA, 18 nt, Human
gcuguugucccucugcua

SEQ ID NO: 3670443 - RNA, 16 nt, Human
gcuguugucucuucuc

SEQ ID NO: 3670444 - RNA, 16 nt, Human
gcuguuuauuuuauau

SEQ ID NO: 3670445 - RNA, 11 nt, Human
gcuguuuccuu

SEQ ID NO: 3670446 - RNA, 17 nt, Human
gcuguuuggguuuccaa

SEQ ID NO: 3670447 - RNA, 20 nt, Human
gcuguuuguuugacaaagaa

SEQ ID NO: 3670448 - RNA, 15 nt, Human
gcuguuuuccucccu

SEQ ID NO: 3670449 - RNA, 14 nt, Human
gcuguuuuguuaua

SEQ ID NO: 3670450 - RNA, 18 nt, Human
gcuguuuuguucuguggu

SEQ ID NO: 3670451 - RNA, 15 nt, Human
gcuguuuuuguugug

SEQ ID NO: 3670452 - RNA, 12 nt, Human
gcuuaaaacuuu

SEQ ID NO: 3670453 - RNA, 16 nt, Human
gcuuaaaacuuuucaa

SEQ ID NO: 3670454 - RNA, 19 nt, Human
gcuuaaaauaaacaguugu

SEQ ID NO: 3670455 - RNA, 17 nt, Human
gcuuaaaauaagcaggu

SEQ ID NO: 3670456 - RNA, 18 nt, Human
gcuuaaagaauucaaauu

SEQ ID NO: 3670457 - RNA, 23 nt, Human
gcuuaaaggcaguauuuuguguc

SEQ ID NO: 3670458 - RNA, 20 nt, Human
gcuuaaaggugucuuccucc

SEQ ID NO: 3670459 - RNA, 22 nt, Human
gcuuaaaggugucuuccuccca

SEQ ID NO: 3670460 - RNA, 23 nt, Human
gcuuaaaggugucuuccucccaa

SEQ ID NO: 3670461 - RNA, 13 nt, Human
gcuuaaaugugaa

SEQ ID NO: 3670462 - RNA, 23 nt, Human
gcuuaaaugugaauuacuaacuu

SEQ ID NO: 3670463 - RNA, 15 nt, Human
gcuuaaauuucuuau

SEQ ID NO: 3670464 - RNA, 14 nt, Human
gcuuaaauuuuaac

SEQ ID NO: 3670465 - RNA, 19 nt, Human
gcuuaacagggaacgugau

SEQ ID NO: 3670466 - RNA, 17 nt, Human
gcuuaacuucacauauu

SEQ ID NO: 3670467 - RNA, 13 nt, Human
gcuuaagaaaaaa

SEQ ID NO: 3670468 - RNA, 16 nt, Human
gcuuaagcagaagcau

SEQ ID NO: 3670469 - RNA, 17 nt, Human
gcuuaagggaguuuaau

SEQ ID NO: 3670470 - RNA, 19 nt, Human
gcuuaauaaaaaugacaga

SEQ ID NO: 3670471 - RNA, 12 nt, Human
gcuuaauaccaa

SEQ ID NO: 3670472 - RNA, 17 nt, Human
gcuuaaucagauagaua

SEQ ID NO: 3670473 - RNA, 16 nt, Human
gcuuaaucauuuucau

SEQ ID NO: 3670474 - RNA, 21 nt, Human
gcuuaaucauuuucauuccua

SEQ ID NO: 3670475 - RNA, 12 nt, Human
gcuuaauguuua

SEQ ID NO: 3670476 - RNA, 14 nt, Human
gcuuaauguuuauu

SEQ ID NO: 3670477 - RNA, 23 nt, Human
gcuuaauguuuauuccugauaau

SEQ ID NO: 3670478 - RNA, 22 nt, Human
gcuuaauuauugauguuuucau

SEQ ID NO: 3670479 - RNA, 14 nt, Human
gcuuaauucaaaua

SEQ ID NO: 3670480 - RNA, 19 nt, Human
gcuuacaagccagcuggag

SEQ ID NO: 3670481 - RNA, 14 nt, Human
gcuuacaauucccu

SEQ ID NO: 3670482 - RNA, 12 nt, Human
gcuuacaauuuu

SEQ ID NO: 3670483 - RNA, 14 nt, Human
gcuuacaauuuuuu

SEQ ID NO: 3670484 - RNA, 21 nt, Human
gcuuacaauuuuuuuaauuuu

SEQ ID NO: 3670485 - RNA, 22 nt, Human
gcuuacaauuuuuuuaauuuug

SEQ ID NO: 3670486 - RNA, 18 nt, Human
gcuuacaugagaacagac

SEQ ID NO: 3670487 - RNA, 14 nt, Human
gcuuacauuuuuac

SEQ ID NO: 3670488 - RNA, 19 nt, Human
gcuuacauuuuuacaauaa

SEQ ID NO: 3670489 - RNA, 14 nt, Human
gcuuaccucccacc

SEQ ID NO: 3670490 - RNA, 13 nt, Human
gcuuaccugaccu

SEQ ID NO: 3670491 - RNA, 23 nt, Human
gcuuaccugaccucuugcugucu

SEQ ID NO: 3670492 - RNA, 22 nt, Human
gcuuaccuggcccaucagggua

SEQ ID NO: 3670493 - RNA, 15 nt, Human
gcuuacggcccuggc

SEQ ID NO: 3670494 - RNA, 19 nt, Human
gcuuacggcccuggccuug

SEQ ID NO: 3670495 - RNA, 17 nt, Human
gcuuacugauauauuuu

SEQ ID NO: 3670496 - RNA, 19 nt, Human
gcuuagaaauaacagaaga

SEQ ID NO: 3670497 - RNA, 15 nt, Human
gcuuagacauaacaa

SEQ ID NO: 3670498 - RNA, 14 nt, Human
gcuuagaccucagc

SEQ ID NO: 3670499 - RNA, 15 nt, Human
gcuuagaccucagcc

SEQ ID NO: 3670500 - RNA, 23 nt, Human
gcuuagaccucagccugugcugc

SEQ ID NO: 3670501 - RNA, 18 nt, Human
gcuuagagaauguucucc

SEQ ID NO: 3670502 - RNA, 18 nt, Human
gcuuagaggcaugggcuu

SEQ ID NO: 3670503 - RNA, 21 nt, Human
gcuuagaggcaugggcuugcu

SEQ ID NO: 3670504 - RNA, 22 nt, Human
gcuuagcaggagaggagagcca

SEQ ID NO: 3670505 - RNA, 22 nt, Human
gcuuagccuccugaccugaggc

SEQ ID NO: 3670506 - RNA, 20 nt, Human
gcuuagcucaauuagugugg

SEQ ID NO: 3670507 - RNA, 23 nt, Human
gcuuagcuuuagaaacagugcaa

SEQ ID NO: 3670508 - RNA, 19 nt, Human
gcuuagcuuugcucugcca

SEQ ID NO: 3670509 - RNA, 12 nt, Human
gcuuaggagaga

SEQ ID NO: 3670510 - RNA, 13 nt, Human
gcuuaggagagac

SEQ ID NO: 3670511 - RNA, 13 nt, Human
uccucuccuggag

SEQ ID NO: 3670512 - RNA, 18 nt, Human
uccucucuaaccuccuuu

SEQ ID NO: 3670513 - RNA, 12 nt, Human
uccucucugccc

SEQ ID NO: 3670514 - RNA, 15 nt, Human
uccucucugcccuaa

SEQ ID NO: 3670515 - RNA, 14 nt, Human
uccucugaaacagc

SEQ ID NO: 3670516 - RNA, 18 nt, Human
uccucugaaacagcugcc

SEQ ID NO: 3670517 - RNA, 21 nt, Human
uccucugaggaugauguacuu

SEQ ID NO: 3670518 - RNA, 14 nt, Human
uccucugaggcuga

SEQ ID NO: 3670519 - RNA, 12 nt, Human
uccucugcacuc

SEQ ID NO: 3670520 - RNA, 18 nt, Human
uccucugcagcugaccuc

SEQ ID NO: 3670521 - RNA, 14 nt, Human
uccucugccaccuc

SEQ ID NO: 3670522 - RNA, 16 nt, Human
uccucugcccgggagc

SEQ ID NO: 3670523 - RNA, 18 nt, Human
uccucugcuaaauugaug

SEQ ID NO: 3670524 - RNA, 23 nt, Human
uccucugcuaaauugauguugau

SEQ ID NO: 3670525 - RNA, 20 nt, Human
uccucugcucaccgcccauc

SEQ ID NO: 3670526 - RNA, 16 nt, Human
uccucugcugcuggcu

SEQ ID NO: 3670527 - RNA, 17 nt, Human
uccucugcugcuggcug

SEQ ID NO: 3670528 - RNA, 17 nt, Human
uccucugcuuaaaaacu

SEQ ID NO: 3670529 - RNA, 14 nt, Human
uccucugcuugcca

SEQ ID NO: 3670530 - RNA, 19 nt, Human
uccucugcuugccuggaga

SEQ ID NO: 3670531 - RNA, 17 nt, Human
uccucugcuuugaaagc

SEQ ID NO: 3670532 - RNA, 22 nt, Human
uccucuggacggcaggcucacu

SEQ ID NO: 3670533 - RNA, 12 nt, Human
uccucuggagcc

SEQ ID NO: 3670534 - RNA, 13 nt, Human
uccucuggagcca

SEQ ID NO: 3670535 - RNA, 23 nt, Human
uccucuggcuuggccacagccag

SEQ ID NO: 3670536 - RNA, 22 nt, Human
uccucuguccaggcacugcugc

SEQ ID NO: 3670537 - RNA, 19 nt, Human
uccucuguccugcuucuga

SEQ ID NO: 3670538 - RNA, 14 nt, Human
uccucugucugccc

SEQ ID NO: 3670539 - RNA, 19 nt, Human
uccucuguucaaagcugcc

SEQ ID NO: 3670540 - RNA, 23 nt, Human
uccucuguucaaagcugccuguc

SEQ ID NO: 3670541 - RNA, 20 nt, Human
uccucuucaccccggcaggc

SEQ ID NO: 3670542 - RNA, 17 nt, Human
uccucuucccccaagau

SEQ ID NO: 3670543 - RNA, 15 nt, Human
uccucuuccccuugc

SEQ ID NO: 3670544 - RNA, 16 nt, Human
uccucuuccucugagg

SEQ ID NO: 3670545 - RNA, 20 nt, Human
uccucuucuacucacuuuuc

SEQ ID NO: 3670546 - RNA, 23 nt, Human
uccucuucuacucacuuuuccca

SEQ ID NO: 3670547 - RNA, 19 nt, Human
uccucuucuauuuuguaaa

SEQ ID NO: 3670548 - RNA, 15 nt, Human
uccucuucugacgug

SEQ ID NO: 3670549 - RNA, 17 nt, Human
uccucuugacccugcac

SEQ ID NO: 3670550 - RNA, 17 nt, Human
uccucuugcauuucacu

SEQ ID NO: 3670551 - RNA, 19 nt, Human
uccucuugccacugccucu

SEQ ID NO: 3670552 - RNA, 12 nt, Human
uccucuugccau

SEQ ID NO: 3670553 - RNA, 13 nt, Human
uccucuugcucaa

SEQ ID NO: 3670554 - RNA, 20 nt, Human
uccucuugucugauuucuua

SEQ ID NO: 3670555 - RNA, 15 nt, Human
uccucuuuagaguua

SEQ ID NO: 3670556 - RNA, 18 nt, Human
uccucuuuaguuuuuggu

SEQ ID NO: 3670557 - RNA, 18 nt, Human
uccucuuucagaaaacag

SEQ ID NO: 3670558 - RNA, 13 nt, Human
uccucuuucagcu

SEQ ID NO: 3670559 - RNA, 15 nt, Human
uccucuuucagcucc

SEQ ID NO: 3670560 - RNA, 16 nt, Human
uccucuuucagcuccu

SEQ ID NO: 3670561 - RNA, 11 nt, Human
uccucuuucca

SEQ ID NO: 3670562 - RNA, 12 nt, Human
uccucuuuccau

SEQ ID NO: 3670563 - RNA, 15 nt, Human
uccucuuucucuccc

SEQ ID NO: 3670564 - RNA, 23 nt, Human
uccucuuugcuuugcuuucugcu

SEQ ID NO: 3670565 - RNA, 19 nt, Human
uccucuuuggucuacacug

SEQ ID NO: 3670566 - RNA, 21 nt, Human
uccucuuuggucuacacugug

SEQ ID NO: 3670567 - RNA, 11 nt, Human
uccucuuuguu

SEQ ID NO: 3670568 - RNA, 22 nt, Human
uccucuuuuguuguuucuuaau

SEQ ID NO: 3670569 - RNA, 13 nt, Human
uccucuuuuucca

SEQ ID NO: 3670570 - RNA, 21 nt, Human
uccugaaaacccuugccaugu

SEQ ID NO: 3670571 - RNA, 22 nt, Human
uccugaaaacccuugccaugug

SEQ ID NO: 3670572 - RNA, 16 nt, Human
uccugaaacgcuccuu

SEQ ID NO: 3670573 - RNA, 21 nt, Human
uccugaaacgcuccuuugugu

SEQ ID NO: 3670574 - RNA, 23 nt, Human
uccugaaacuauauuuugucaua

SEQ ID NO: 3670575 - RNA, 18 nt, Human
uccugaaagaaacaguua

SEQ ID NO: 3670576 - RNA, 23 nt, Human
uccugaacagcauggcacucccu

SEQ ID NO: 3670577 - RNA, 23 nt, Human
uccugaaccgcacagcucaggag

SEQ ID NO: 3670578 - RNA, 20 nt, Human
uccugaaccugaugcugacu

SEQ ID NO: 3670579 - RNA, 14 nt, Human
uccugaagaauuaa

SEQ ID NO: 3670580 - RNA, 14 nt, Human
uccugaagaggcgg

SEQ ID NO: 3670581 - RNA, 22 nt, Human
uccugaauccaaacuaauccau

SEQ ID NO: 3670582 - RNA, 19 nt, Human
uccugaaugaaauaucaga

SEQ ID NO: 3670583 - RNA, 21 nt, Human
uccugaauuuuauuuuuuggg

SEQ ID NO: 3670584 - RNA, 15 nt, Human
uccugacaccccacu

SEQ ID NO: 3670585 - RNA, 19 nt, Human
uccugacaccccacuuagc

SEQ ID NO: 3670586 - RNA, 21 nt, Human
uccugacacccuucucccacu

SEQ ID NO: 3670587 - RNA, 15 nt, Human
uccugacacugcugg

SEQ ID NO: 3670588 - RNA, 13 nt, Human
uccugacacuuua

SEQ ID NO: 3670589 - RNA, 16 nt, Human
uccugacaucacagca

SEQ ID NO: 3670590 - RNA, 18 nt, Human
uccugacaucacagcagc

SEQ ID NO: 3670591 - RNA, 19 nt, Human
uccugacaucacagcagcc

SEQ ID NO: 3670592 - RNA, 16 nt, Human
uccugaccacccuccc

SEQ ID NO: 3670593 - RNA, 21 nt, Human
uccugaccaguugcagucacu

SEQ ID NO: 3670594 - RNA, 22 nt, Human
uccugaccaguugcagucacuc

SEQ ID NO: 3670595 - RNA, 16 nt, Human
uccugacccagucccc

SEQ ID NO: 3670596 - RNA, 15 nt, Human
uccugaccugucuca

SEQ ID NO: 3670597 - RNA, 22 nt, Human
uccugacggcgcccccagugug

SEQ ID NO: 3670598 - RNA, 18 nt, Human
uccugacuauuauguugu

SEQ ID NO: 3670599 - RNA, 22 nt, Human
uccugacuauuauguuguuaga

SEQ ID NO: 3670600 - RNA, 14 nt, Human
uccugacucugccc

SEQ ID NO: 3670601 - RNA, 16 nt, Human
uccugacucugccccc

SEQ ID NO: 3670602 - RNA, 15 nt, Human
uccugacuggugcug

SEQ ID NO: 3670603 - RNA, 22 nt, Human
uccugacuucaggggcugcccg

SEQ ID NO: 3670604 - RNA, 13 nt, Human
uccugacuucuaa

SEQ ID NO: 3670605 - RNA, 13 nt, Human
uccugacuuuuaa

SEQ ID NO: 3670606 - RNA, 19 nt, Human
uccugagaaaaaagguucc

SEQ ID NO: 3670607 - RNA, 15 nt, Human
uccugagaaagcuca

SEQ ID NO: 3670608 - RNA, 13 nt, Human
uccugagaagcau

SEQ ID NO: 3670609 - RNA, 16 nt, Human
uccugagaccccuggc

SEQ ID NO: 3670610 - RNA, 17 nt, Human
uccugagaccccuggcc

SEQ ID NO: 3670611 - RNA, 20 nt, Human
uccugagaccccuggccucc

SEQ ID NO: 3670612 - RNA, 21 nt, Human
uccugagaccccuggccuccg

SEQ ID NO: 3670613 - RNA, 13 nt, Human
uccugagagcugc

SEQ ID NO: 3670614 - RNA, 14 nt, Human
uccugagcacugcc

SEQ ID NO: 3670615 - RNA, 15 nt, Human
uccugagcacugcca

SEQ ID NO: 3670616 - RNA, 17 nt, Human
uccugagcacugccagg

SEQ ID NO: 3670617 - RNA, 18 nt, Human
uccugagcacugccagga

SEQ ID NO: 3670618 - RNA, 19 nt, Human
uccugagcacugccaggag

SEQ ID NO: 3670619 - RNA, 23 nt, Human
uccugagccagugucaggaggaa

SEQ ID NO: 3670620 - RNA, 12 nt, Human
uccugagccccg

SEQ ID NO: 3670621 - RNA, 22 nt, Human
uccugagccccgcccucuuccu

SEQ ID NO: 3670622 - RNA, 23 nt, Human
uccugagccccgcccucuuccug

SEQ ID NO: 3670623 - RNA, 13 nt, Human
uccugagcuagga

SEQ ID NO: 3670624 - RNA, 14 nt, Human
uccugagcucagcg

SEQ ID NO: 3670625 - RNA, 15 nt, Human
uccugagcuuuaugg

SEQ ID NO: 3670626 - RNA, 18 nt, Human
uccugaggacagcugucc

SEQ ID NO: 3670627 - RNA, 15 nt, Human
uccugaggcuccacu

SEQ ID NO: 3670628 - RNA, 16 nt, Human
uccugaggcuccacuu

SEQ ID NO: 3670629 - RNA, 21 nt, Human
uccugaggcuccacuuggucu

SEQ ID NO: 3670630 - RNA, 15 nt, Human
uccugaggcugggcu

SEQ ID NO: 3670631 - RNA, 16 nt, Human
uccugaggcugggcuc

SEQ ID NO: 3670632 - RNA, 17 nt, Human
uccugaggcuuuggauu

SEQ ID NO: 3670633 - RNA, 21 nt, Human
uccugagggaggaccuggggc

SEQ ID NO: 3670634 - RNA, 23 nt, Human
uccugaggggagacagagcaacc

SEQ ID NO: 3670635 - RNA, 19 nt, Human
uccugaggguccccaccug

SEQ ID NO: 3670636 - RNA, 22 nt, Human
uccugaggguccccaccuggga

SEQ ID NO: 3670637 - RNA, 19 nt, Human
uccugaguagcuggauuac

SEQ ID NO: 3670638 - RNA, 16 nt, Human
uccugaguggccaggg

SEQ ID NO: 3670639 - RNA, 21 nt, Human
uccugauaaaacaacagcucg

SEQ ID NO: 3670640 - RNA, 23 nt, Human
uccugauaugauuuaaaacaugu

SEQ ID NO: 3670641 - RNA, 20 nt, Human
uccugauccacuuuggggga

SEQ ID NO: 3670642 - RNA, 21 nt, Human
ggaaacuaggugcauauuuau

SEQ ID NO: 3670643 - RNA, 22 nt, Human
ggaaacucaccugcuggccccu

SEQ ID NO: 3670644 - RNA, 14 nt, Human
ggaaacucagggcu

SEQ ID NO: 3670645 - RNA, 20 nt, Human
ggaaacuccacaucugccuu

SEQ ID NO: 3670646 - RNA, 21 nt, Human
ggaaacuccacaucugccuua

SEQ ID NO: 3670647 - RNA, 15 nt, Human
ggaaacucuugcuau

SEQ ID NO: 3670648 - RNA, 12 nt, Human
ggaaacugaaug

SEQ ID NO: 3670649 - RNA, 13 nt, Human
ggaaacugccagc

SEQ ID NO: 3670650 - RNA, 21 nt, Human
ggaaacuuccaagaccugacu

SEQ ID NO: 3670651 - RNA, 19 nt, Human
ggaaacuugucacuugcau

SEQ ID NO: 3670652 - RNA, 18 nt, Human
ggaaagaagagccggagc

SEQ ID NO: 3670653 - RNA, 15 nt, Human
ggaaagacacugccu

SEQ ID NO: 3670654 - RNA, 20 nt, Human
ggaaagacacugccugggcu

SEQ ID NO: 3670655 - RNA, 19 nt, Human
uccugggccccucccuacc

SEQ ID NO: 3670656 - RNA, 19 nt, Human
uccugggcgcccuggaagc

SEQ ID NO: 3670657 - RNA, 11 nt, Human
ucccaggaccc

SEQ ID NO: 3670658 - RNA, 12 nt, Human
ucccaggacccu

SEQ ID NO: 3670659 - RNA, 13 nt, Human
ucccaggacccug

SEQ ID NO: 3670660 - RNA, 16 nt, Human
ucccaggacccugaag

SEQ ID NO: 3670661 - RNA, 22 nt, Human
ucccaggagacaguucaagaaa

SEQ ID NO: 3670662 - RNA, 18 nt, Human
ucccaggaguucugcuca

SEQ ID NO: 3670663 - RNA, 19 nt, Human
ucccaggaguucugcucau

SEQ ID NO: 3670664 - RNA, 16 nt, Human
ucccaggaugagcauc

SEQ ID NO: 3670665 - RNA, 24 nt, Human
ucccaggaugagcaucccaggauc

SEQ ID NO: 3670666 - RNA, 19 nt, Human
ucccaggcaaggcugugga

SEQ ID NO: 3670667 - RNA, 15 nt, Human
ucccaggcagggaga

SEQ ID NO: 3670668 - RNA, 18 nt, Human
ucccaggcauuccccagg

SEQ ID NO: 3670669 - RNA, 20 nt, Human
ucccaggcauuccccaggag

SEQ ID NO: 3670670 - RNA, 22 nt, Human
ucccaggcauuccccaggaggc

SEQ ID NO: 3670671 - RNA, 24 nt, Human
ucccaggcauuccccaggaggcca

SEQ ID NO: 3670672 - RNA, 12 nt, Human
ucccaggcccac

SEQ ID NO: 3670673 - RNA, 11 nt, Human
ucccaggcccc

SEQ ID NO: 3670674 - RNA, 18 nt, Human
ucccaggccccaugaccu

SEQ ID NO: 3670675 - RNA, 22 nt, Human
ucccaggccccaugaccuccag

SEQ ID NO: 3670676 - RNA, 18 nt, Human
ucccaggcgccccuuccc

SEQ ID NO: 3670677 - RNA, 21 nt, Human
ucccaggcgccccuucccccu

SEQ ID NO: 3670678 - RNA, 15 nt, Human
ucccaggcuggggcu

SEQ ID NO: 3670679 - RNA, 16 nt, Human
ucccaggcuggggcug

SEQ ID NO: 3670680 - RNA, 19 nt, Human
ucccagggagcaagggcag

SEQ ID NO: 3670681 - RNA, 21 nt, Human
ucccagggagcaugagaggag

SEQ ID NO: 3670682 - RNA, 22 nt, Human
ucccagggagcaugagaggagg

SEQ ID NO: 3670683 - RNA, 16 nt, Human
ucccagggccagggcc

SEQ ID NO: 3670684 - RNA, 20 nt, Human
ucccagggccagggcccugc

SEQ ID NO: 3670685 - RNA, 17 nt, Human
ucccaggggaccacacc

SEQ ID NO: 3670686 - RNA, 18 nt, Human
ucccaggggcucccuccg

SEQ ID NO: 3670687 - RNA, 17 nt, Human
ucccaggggucucccug

SEQ ID NO: 3670688 - RNA, 19 nt, Human
ucccaggggucucccuggc

SEQ ID NO: 3670689 - RNA, 21 nt, Human
ucccaggggucucccuggcuc

SEQ ID NO: 3670690 - RNA, 23 nt, Human
ucccaggguagcccgccugccag

SEQ ID NO: 3670691 - RNA, 19 nt, Human
ucccaggguuuuaacuuug

SEQ ID NO: 3670692 - RNA, 16 nt, Human
ucccagguaccagcug

SEQ ID NO: 3670693 - RNA, 19 nt, Human
ucccagguaccagcugcgc

SEQ ID NO: 3670694 - RNA, 17 nt, Human
ucccaggugcagccaga

SEQ ID NO: 3670695 - RNA, 15 nt, Human
ucccagguguuaaca

SEQ ID NO: 3670696 - RNA, 23 nt, Human
ucccagguguuaacauuccaaga

SEQ ID NO: 3670697 - RNA, 17 nt, Human
ucccagguuggcucugc

SEQ ID NO: 3670698 - RNA, 19 nt, Human
ucccagguuggcucugcca

SEQ ID NO: 3670699 - RNA, 22 nt, Human
ucccagucaccuuguggcaagc

SEQ ID NO: 3670700 - RNA, 23 nt, Human
ucccaguccccagcccuucacau

SEQ ID NO: 3670701 - RNA, 15 nt, Human
ucccagugaauucuu

SEQ ID NO: 3670702 - RNA, 19 nt, Human
ucccagugacacuucagag

SEQ ID NO: 3670703 - RNA, 18 nt, Human
ucccaguggccucaaccc

SEQ ID NO: 3670704 - RNA, 22 nt, Human
ucccaguggccucaacccuccc

SEQ ID NO: 3670705 - RNA, 16 nt, Human
ucccaguggcugcugc

SEQ ID NO: 3670706 - RNA, 18 nt, Human
ucccaguggcugcugccc

SEQ ID NO: 3670707 - RNA, 19 nt, Human
ucccaguggcugcugccca

SEQ ID NO: 3670708 - RNA, 15 nt, Human
ucccagugggaggcg

SEQ ID NO: 3670709 - RNA, 17 nt, Human
ucccagugggaggggca

SEQ ID NO: 3670710 - RNA, 23 nt, Human
ucccagugggaggggcaggcuga

SEQ ID NO: 3670711 - RNA, 15 nt, Human
ucccagugucuuccu

SEQ ID NO: 3670712 - RNA, 19 nt, Human
ucccagugucuuccugugg

SEQ ID NO: 3670713 - RNA, 20 nt, Human
ucccaguucaggagucccaa

SEQ ID NO: 3670714 - RNA, 22 nt, Human
ucccaguuggagcuccagccug

SEQ ID NO: 3670715 - RNA, 13 nt, Human
ucccaguuuuguu

SEQ ID NO: 3670716 - RNA, 18 nt, Human
ucccauaaccgcugauuc

SEQ ID NO: 3670717 - RNA, 14 nt, Human
ucccauaccaccca

SEQ ID NO: 3670718 - RNA, 18 nt, Human
ucccauagauacucucuu

SEQ ID NO: 3670719 - RNA, 19 nt, Human
ucccauagauacucucuuc

SEQ ID NO: 3670720 - RNA, 16 nt, Human
ucccauagucccugcc

SEQ ID NO: 3670721 - RNA, 20 nt, Human
ucccauaucaaaagacacag

SEQ ID NO: 3670722 - RNA, 15 nt, Human
ucccauauccugccu

SEQ ID NO: 3670723 - RNA, 18 nt, Human
ucccauauccugccucag

SEQ ID NO: 3670724 - RNA, 15 nt, Human
ucccaucacccgcua

SEQ ID NO: 3670725 - RNA, 23 nt, Human
ucccaucacguguacuggcuccu

SEQ ID NO: 3670726 - RNA, 18 nt, Human
ucccaucccacugcuccc

SEQ ID NO: 3670727 - RNA, 13 nt, Human
ucccaucccaucc

SEQ ID NO: 3670728 - RNA, 15 nt, Human
ucccaucccauccca

SEQ ID NO: 3670729 - RNA, 17 nt, Human
ucccaucccaucccauc

SEQ ID NO: 3670730 - RNA, 16 nt, Human
ucccaucccccugccc

SEQ ID NO: 3670731 - RNA, 18 nt, Human
ucccaucccccugcccuc

SEQ ID NO: 3670732 - RNA, 19 nt, Human
ucccaucccccugcccucg

SEQ ID NO: 3670733 - RNA, 15 nt, Human
ucccauccccugugg

SEQ ID NO: 3670734 - RNA, 18 nt, Human
ucccaucccgcucuuuuc

SEQ ID NO: 3670735 - RNA, 19 nt, Human
ucccaucccgcucuuuucc

SEQ ID NO: 3670736 - RNA, 20 nt, Human
ucccaucccgcucuuuuccu

SEQ ID NO: 3670737 - RNA, 14 nt, Human
ucccauccuacccu

SEQ ID NO: 3670738 - RNA, 18 nt, Human
ucccauccuacccucggg

SEQ ID NO: 3670739 - RNA, 23 nt, Human
ucccaucuaagcugcagcuuccu

SEQ ID NO: 3670740 - RNA, 20 nt, Human
ucccaucucacacaugagca

SEQ ID NO: 3670741 - RNA, 19 nt, Human
ucccaucugcaccccuucu

SEQ ID NO: 3670742 - RNA, 14 nt, Human
ucccaucugggagu

SEQ ID NO: 3670743 - RNA, 15 nt, Human
ucccaucuuccaagg

SEQ ID NO: 3670744 - RNA, 23 nt, Human
ucccaucuuuuuaaccucuguuc

SEQ ID NO: 3670745 - RNA, 14 nt, Human
ucccaugaacacac

SEQ ID NO: 3670746 - RNA, 16 nt, Human
ucccaugaagccuuuu

SEQ ID NO: 3670747 - RNA, 19 nt, Human
ucccaugaagccuuuugaa

SEQ ID NO: 3670748 - RNA, 18 nt, Human
ucccaugacccaccccug

SEQ ID NO: 3670749 - RNA, 22 nt, Human
ucccaugacccaccccugugcu

SEQ ID NO: 3670750 - RNA, 16 nt, Human
ucccaugcaggcccuu

SEQ ID NO: 3670751 - RNA, 22 nt, Human
ucccauggacacuccagugcca

SEQ ID NO: 3670752 - RNA, 17 nt, Human
ucccauggagccccagc

SEQ ID NO: 3670753 - RNA, 18 nt, Human
ucccauggagccccagcc

SEQ ID NO: 3670754 - RNA, 19 nt, Human
ucccauggagccccagccc

SEQ ID NO: 3670755 - RNA, 21 nt, Human
ucccauggagccccagccccc

SEQ ID NO: 3670756 - RNA, 11 nt, Human
ucccauggugc

SEQ ID NO: 3670757 - RNA, 16 nt, Human
ucccauguaacagaaa

SEQ ID NO: 3670758 - RNA, 19 nt, Human
ucccauguaacagaaaggg

SEQ ID NO: 3670759 - RNA, 13 nt, Human
ucccaugugcaua

SEQ ID NO: 3670760 - RNA, 20 nt, Human
ucccauuaaucauuucccca

SEQ ID NO: 3670761 - RNA, 21 nt, Human
ucccauuaaucauuuccccau

SEQ ID NO: 3670762 - RNA, 14 nt, Human
ucccauuauucaaa

SEQ ID NO: 3670763 - RNA, 18 nt, Human
ucccauuauucaaaguug

SEQ ID NO: 3670764 - RNA, 13 nt, Human
ucccauuccccca

SEQ ID NO: 3670765 - RNA, 19 nt, Human
ucccauucccccagugcgg

SEQ ID NO: 3670766 - RNA, 13 nt, Human
ucccauuccugaa

SEQ ID NO: 3670767 - RNA, 14 nt, Human
ucccauuccugaag

SEQ ID NO: 3670768 - RNA, 14 nt, Human
ucccauugcccugg

SEQ ID NO: 3670769 - RNA, 15 nt, Human
ucccauugcccuggu

SEQ ID NO: 3670770 - RNA, 17 nt, Human
ucccauugucccucugc

SEQ ID NO: 3670771 - RNA, 22 nt, Human
ucccauugucuucugaccucua

SEQ ID NO: 3670772 - RNA, 16 nt, Human
ucccauuguggcuccu

SEQ ID NO: 3670773 - RNA, 21 nt, Human
ucccauuuagaauggugauuu

SEQ ID NO: 3670774 - RNA, 23 nt, Human
ucccauuuagaauggugauuuua

SEQ ID NO: 3670775 - RNA, 16 nt, Human
ucccauuuaucgcaga

SEQ ID NO: 3670776 - RNA, 17 nt, Human
ucccauuuaucuaaaua

SEQ ID NO: 3670777 - RNA, 13 nt, Human
ucccauuucagcu

SEQ ID NO: 3670778 - RNA, 21 nt, Human
ucccauuucuaaaggccucuu

SEQ ID NO: 3670779 - RNA, 23 nt, Human
ucccauuucuaccuaagucagcu

SEQ ID NO: 3670780 - RNA, 14 nt, Human
ucccauuucuuaau

SEQ ID NO: 3670781 - RNA, 22 nt, Human
ucccauuuucagacugcuuuaa

SEQ ID NO: 3670782 - RNA, 18 nt, Human
ucccauuuuggaaguuuu

SEQ ID NO: 3670783 - RNA, 14 nt, Human
uccccaaaacaaag

SEQ ID NO: 3670784 - RNA, 17 nt, Human
uccccaaaacaaagucu

SEQ ID NO: 3670785 - RNA, 21 nt, Human
uccccaaaacaaagucuuugg

SEQ ID NO: 3670786 - RNA, 23 nt, Human
uccccaaaggcuuugcccugcug

SEQ ID NO: 3670787 - RNA, 14 nt, Human
uccccaaagggugu

SEQ ID NO: 3670788 - RNA, 18 nt, Human
uccccaaaucaauacacu

SEQ ID NO: 3670789 - RNA, 15 nt, Human
uccccaacagcgccc

SEQ ID NO: 3670790 - RNA, 17 nt, Human
uccccaacagcgcccaa

SEQ ID NO: 3670791 - RNA, 22 nt, Human
uccccaaccgugucugucuggc

SEQ ID NO: 3670792 - RNA, 19 nt, Human
uccccaacugaccaccuuu

SEQ ID NO: 3670793 - RNA, 17 nt, Human
uccccaagaaagccuca

SEQ ID NO: 3670794 - RNA, 22 nt, Human
uccccaaguacaaccacaccca

SEQ ID NO: 3670795 - RNA, 20 nt, Human
uccccaauaauugcagaacu

SEQ ID NO: 3670796 - RNA, 16 nt, Human
uccccaaugagacuug

SEQ ID NO: 3670797 - RNA, 19 nt, Human
uccccaaugagacuugccu

SEQ ID NO: 3670798 - RNA, 22 nt, Human
ggacugggagcccccagccugu

SEQ ID NO: 3670799 - RNA, 23 nt, Human
ggacuggggaugugggagggagc

SEQ ID NO: 3670800 - RNA, 15 nt, Human
ggacugggggccaga

SEQ ID NO: 3670801 - RNA, 11 nt, Human
ggacuggguuu

SEQ ID NO: 3670802 - RNA, 9 nt, Human
ggacuggug

SEQ ID NO: 3670803 - RNA, 21 nt, Human
ggacuggugcccuccucacuc

SEQ ID NO: 3670804 - RNA, 19 nt, Human
ggacugguggccccugccu

SEQ ID NO: 3670805 - RNA, 21 nt, Human
ggacuguaaguugggcuugcu

SEQ ID NO: 3670806 - RNA, 21 nt, Human
ggacugugacaggcagcagag

SEQ ID NO: 3670807 - RNA, 17 nt, Human
ggacuguggugacuuug

SEQ ID NO: 3670808 - RNA, 22 nt, Human
ggacuguggugacuuuggauaa

SEQ ID NO: 3670809 - RNA, 17 nt, Human
ggacugugugcucagga

SEQ ID NO: 3670810 - RNA, 22 nt, Human
ggacugugugcucaggagcccu

SEQ ID NO: 3670811 - RNA, 23 nt, Human
ggacuguugacauccaagcuucc

SEQ ID NO: 3670812 - RNA, 21 nt, Human
ggacuguuuuuuccugagcuu

SEQ ID NO: 3670813 - RNA, 20 nt, Human
ggacuuaacggcuccaggau

SEQ ID NO: 3670814 - RNA, 23 nt, Human
ggacuuaagcaucuggcucuaau

SEQ ID NO: 3670815 - RNA, 15 nt, Human
ggacuuagaaagcag

SEQ ID NO: 3670816 - RNA, 19 nt, Human
ggacuucaaagcaagcugg

SEQ ID NO: 3670817 - RNA, 21 nt, Human
ggacuucacgaaguguugcau

SEQ ID NO: 3670818 - RNA, 15 nt, Human
ggacuuccaugccuu

SEQ ID NO: 3670819 - RNA, 20 nt, Human
ggacuuccuguccagcucca

SEQ ID NO: 3670820 - RNA, 21 nt, Human
ggacuuccuguccagcuccaa

SEQ ID NO: 3670821 - RNA, 22 nt, Human
ggacuucuuuaauuuuggaauu

SEQ ID NO: 3670822 - RNA, 19 nt, Human
ggacuugaacuuuccugga

SEQ ID NO: 3670823 - RNA, 18 nt, Human
ggacuugaggauuuugag

SEQ ID NO: 3670824 - RNA, 15 nt, Human
ggacuuggaagcucc

SEQ ID NO: 3670825 - RNA, 17 nt, Human
ggacuuggaagcuccgc

SEQ ID NO: 3670826 - RNA, 19 nt, Human
ggacuuguauauuuguaca

SEQ ID NO: 3670827 - RNA, 20 nt, Human
ggacuuguauauuuguacaa

SEQ ID NO: 3670828 - RNA, 20 nt, Human
ggacuuucucuaauaauaaa

SEQ ID NO: 3670829 - RNA, 14 nt, Human
ggacuuugcacacu

SEQ ID NO: 3670830 - RNA, 22 nt, Human
ggacuuugcugauuuccccucu

SEQ ID NO: 3670831 - RNA, 12 nt, Human
ggacuuuguaca

SEQ ID NO: 3670832 - RNA, 21 nt, Human
ggacuuuguuaguuucuccaa

SEQ ID NO: 3670833 - RNA, 18 nt, Human
ggacuuuuauuuccagug

SEQ ID NO: 3670834 - RNA, 22 nt, Human
ggacuuuucguuaacauugacc

SEQ ID NO: 3670835 - RNA, 13 nt, Human
ggacuuuucugca

SEQ ID NO: 3670836 - RNA, 13 nt, Human
ggagaaaacacuu

SEQ ID NO: 3670837 - RNA, 15 nt, Human
ggagaaaaggaaaag

SEQ ID NO: 3670838 - RNA, 20 nt, Human
ggagaaaauucaauuguaaa

SEQ ID NO: 3670839 - RNA, 11 nt, Human
ggagaaacaca

SEQ ID NO: 3670840 - RNA, 23 nt, Human
ggagaaagcugacuuggcuggug

SEQ ID NO: 3670841 - RNA, 22 nt, Human
ggagaaauacuugaacuugccu

SEQ ID NO: 3670842 - RNA, 18 nt, Human
ggagaaaugaaaaaauau

SEQ ID NO: 3670843 - RNA, 17 nt, Human
ggagaaauguuguucau

SEQ ID NO: 3670844 - RNA, 15 nt, Human
ggagaaauugacaga

SEQ ID NO: 3670845 - RNA, 16 nt, Human
ggagaaccaccuaccc

SEQ ID NO: 3670846 - RNA, 15 nt, Human
ggagaaccucaggcu

SEQ ID NO: 3670847 - RNA, 19 nt, Human
ggagaagaaagaacuaucu

SEQ ID NO: 3670848 - RNA, 23 nt, Human
ggagaagaaagaggugaccccag

SEQ ID NO: 3670849 - RNA, 13 nt, Human
ggagaagaaguca

SEQ ID NO: 3670850 - RNA, 13 nt, Human
ggagaagagagga

SEQ ID NO: 3670851 - RNA, 15 nt, Human
ggagaagagcuguuc

SEQ ID NO: 3670852 - RNA, 23 nt, Human
ggagaagagcuguucacagccag

SEQ ID NO: 3670853 - RNA, 19 nt, Human
ucgcccaugcuggagugca

SEQ ID NO: 3670854 - RNA, 15 nt, Human
ucgccccagaucacc

SEQ ID NO: 3670855 - RNA, 22 nt, Human
ucgccccagaucaccagcccgg

SEQ ID NO: 3670856 - RNA, 14 nt, Human
ucgccccagcaggu

SEQ ID NO: 3670857 - RNA, 14 nt, Human
ucgccccuggcaga

SEQ ID NO: 3670858 - RNA, 14 nt, Human
ucgcccucccaggc

SEQ ID NO: 3670859 - RNA, 17 nt, Human
ucgcccucccaggcucu

SEQ ID NO: 3670860 - RNA, 18 nt, Human
ucgcccuccuuucugugc

SEQ ID NO: 3670861 - RNA, 22 nt, Human
ucgcccuuacuucuugcccugg

SEQ ID NO: 3670862 - RNA, 14 nt, Human
ucgccguggcugcg

SEQ ID NO: 3670863 - RNA, 17 nt, Human
ucgccucggaucagcug

SEQ ID NO: 3670864 - RNA, 21 nt, Human
ucgccugacaaccacuggucu

SEQ ID NO: 3670865 - RNA, 14 nt, Human
ucgccuggccugag

SEQ ID NO: 3670866 - RNA, 15 nt, Human
ucgccuggccugagg

SEQ ID NO: 3670867 - RNA, 12 nt, Human
ucgccuguaauc

SEQ ID NO: 3670868 - RNA, 21 nt, Human
ucgccuuagcauguuugcuga

SEQ ID NO: 3670869 - RNA, 15 nt, Human
ucgccuuccaccucu

SEQ ID NO: 3670870 - RNA, 12 nt, Human
ucgccuucccca

SEQ ID NO: 3670871 - RNA, 14 nt, Human
ucgccuucccuccu

SEQ ID NO: 3670872 - RNA, 22 nt, Human
ucgccuuucagcaggcagccuu

SEQ ID NO: 3670873 - RNA, 23 nt, Human
ucgccuuucccaggugcuacacc

SEQ ID NO: 3670874 - RNA, 13 nt, Human
ucgcgacaaugca

SEQ ID NO: 3670875 - RNA, 16 nt, Human
ucgcgacaaugcaaac

SEQ ID NO: 3670876 - RNA, 14 nt, Human
ucgcgcucaguaaa

SEQ ID NO: 3670877 - RNA, 14 nt, Human
ucgcgcucugcuca

SEQ ID NO: 3670878 - RNA, 12 nt, Human
ucgcgcugccug

SEQ ID NO: 3670879 - RNA, 17 nt, Human
ucgcggcccucaguagu

SEQ ID NO: 3670880 - RNA, 21 nt, Human
ucgcggccucuucucucagac

SEQ ID NO: 3670881 - RNA, 20 nt, Human
ucgcgugcccucgcugcuuc

SEQ ID NO: 3670882 - RNA, 21 nt, Human
ucgcuacuggcauaguuucau

SEQ ID NO: 3670883 - RNA, 21 nt, Human
ucgcuagcaguggcaggcaga

SEQ ID NO: 3670884 - RNA, 23 nt, Human
ucgcuagcauuucccaacacaaa

SEQ ID NO: 3670885 - RNA, 18 nt, Human
ucgcucaaucaagaaaau

SEQ ID NO: 3670886 - RNA, 23 nt, Human
ucgcuccaacuccaacauccacu

SEQ ID NO: 3670887 - RNA, 18 nt, Human
ucgcuccccacucugcuc

SEQ ID NO: 3670888 - RNA, 20 nt, Human
ucgcuccccacucugcucug

SEQ ID NO: 3670889 - RNA, 16 nt, Human
ucgcuccucaaccccu

SEQ ID NO: 3670890 - RNA, 22 nt, Human
ucgcuccucaaccccuccccuc

SEQ ID NO: 3670891 - RNA, 14 nt, Human
ucgcuccugcccac

SEQ ID NO: 3670892 - RNA, 18 nt, Human
ucgcucugucacccaggc

SEQ ID NO: 3670893 - RNA, 18 nt, Human
ucgcucuguugcccaggc

SEQ ID NO: 3670894 - RNA, 21 nt, Human
ucgcucuguugcccaggcugg

SEQ ID NO: 3670895 - RNA, 13 nt, Human
ucgcucuuugaga

SEQ ID NO: 3670896 - RNA, 17 nt, Human
ucgcugacuucauggaa

SEQ ID NO: 3670897 - RNA, 19 nt, Human
ucgcugauauauguguuuu

SEQ ID NO: 3670898 - RNA, 18 nt, Human
ucgcugaugcugggcugg

SEQ ID NO: 3670899 - RNA, 19 nt, Human
ucgcugaugcugggcuggg

SEQ ID NO: 3670900 - RNA, 20 nt, Human
ucgcugaugcugggcugggu

SEQ ID NO: 3670901 - RNA, 19 nt, Human
ucgcugccagcucuguauc

SEQ ID NO: 3670902 - RNA, 20 nt, Human
ucgcuggacucucagucucu

SEQ ID NO: 3670903 - RNA, 15 nt, Human
ucgcuggcccccacu

SEQ ID NO: 3670904 - RNA, 20 nt, Human
ucgcuggcccccacuggcug

SEQ ID NO: 3670905 - RNA, 21 nt, Human
ucgcuggcccccacuggcugu

SEQ ID NO: 3670906 - RNA, 23 nt, Human
ucgcugugucagcauagaaguaa

SEQ ID NO: 3670907 - RNA, 21 nt, Human
ucgcuguuaccgccugucucu

SEQ ID NO: 3670908 - RNA, 12 nt, Human
ucgcuguugcug

SEQ ID NO: 3670909 - RNA, 17 nt, Human
ucgcuguugcugaauag

SEQ ID NO: 3670910 - RNA, 14 nt, Human
ucgcuucccccaua

SEQ ID NO: 3670911 - RNA, 16 nt, Human
ucgcuucccccauagc

SEQ ID NO: 3670912 - RNA, 14 nt, Human
ucgcuucuugccuc

SEQ ID NO: 3670913 - RNA, 16 nt, Human
ucgcuucuugccucug

SEQ ID NO: 3670914 - RNA, 16 nt, Human
ucgcuuggcuccaugc

SEQ ID NO: 3670915 - RNA, 16 nt, Human
ucgcuuguaaauacca

SEQ ID NO: 3670916 - RNA, 15 nt, Human
ucgcuuuugauaauc

SEQ ID NO: 3670917 - RNA, 19 nt, Human
ucggaaaaauaaucaaaag

SEQ ID NO: 3670918 - RNA, 14 nt, Human
ucggaacagcagau

SEQ ID NO: 3670919 - RNA, 20 nt, Human
ucggaaccgcucaccuagag

SEQ ID NO: 3670920 - RNA, 18 nt, Human
ucggaacugcaugcugcu

SEQ ID NO: 3670921 - RNA, 18 nt, Human
ucggaacuguccuuuccu

SEQ ID NO: 3670922 - RNA, 19 nt, Human
ucggaacuguccuuuccuu

SEQ ID NO: 3670923 - RNA, 21 nt, Human
ucggacaagacccccagcacu

SEQ ID NO: 3670924 - RNA, 22 nt, Human
ucggacuaagccuaccugcucu

SEQ ID NO: 3670925 - RNA, 14 nt, Human
ucggagacagugau

SEQ ID NO: 3670926 - RNA, 21 nt, Human
ucggagacagugaucuccaua

SEQ ID NO: 3670927 - RNA, 14 nt, Human
ucggagcccugucu

SEQ ID NO: 3670928 - RNA, 12 nt, Human
ucggaggcccca

SEQ ID NO: 3670929 - RNA, 23 nt, Human
ucggaggcugcccccggcccccu

SEQ ID NO: 3670930 - RNA, 14 nt, Human
ucggaggcuuggga

SEQ ID NO: 3670931 - RNA, 20 nt, Human
ucggagggaauugaggucug

SEQ ID NO: 3670932 - RNA, 19 nt, Human
ucggaguaucugggaacug

SEQ ID NO: 3670933 - RNA, 23 nt, Human
ucggauaguugcuauuuuuguaa

SEQ ID NO: 3670934 - RNA, 14 nt, Human
ucggaucagcugag

SEQ ID NO: 3670935 - RNA, 19 nt, Human
ucggaucagcugagccuuc

SEQ ID NO: 3670936 - RNA, 16 nt, Human
ucggaucaggcuccca

SEQ ID NO: 3670937 - RNA, 13 nt, Human
ucggauccccuuc

SEQ ID NO: 3670938 - RNA, 15 nt, Human
ucggauccccuuccu

SEQ ID NO: 3670939 - RNA, 13 nt, Human
ucggauuuuuucc

SEQ ID NO: 3670940 - RNA, 16 nt, Human
ucggcccacagcuccc

SEQ ID NO: 3670941 - RNA, 15 nt, Human
ucggccccaccagug

SEQ ID NO: 3670942 - RNA, 11 nt, Human
ucuaaagcaaa

SEQ ID NO: 3670943 - RNA, 20 nt, Human
ucuaaagccauuguaguccu

SEQ ID NO: 3670944 - RNA, 16 nt, Human
ucuaaagcugccagcc

SEQ ID NO: 3670945 - RNA, 13 nt, Human
ucuaaaggaguuu

SEQ ID NO: 3670946 - RNA, 18 nt, Human
ucuaaaggaguuuauguu

SEQ ID NO: 3670947 - RNA, 19 nt, Human
ucuaaaggcuaccuuugua

SEQ ID NO: 3670948 - RNA, 14 nt, Human
ucuaaagguccaca

SEQ ID NO: 3670949 - RNA, 17 nt, Human
ucuaaaguuauauuuca

SEQ ID NO: 3670950 - RNA, 12 nt, Human
ucuaaaguucua

SEQ ID NO: 3670951 - RNA, 20 nt, Human
ucuaaaguucuaagauucug

SEQ ID NO: 3670952 - RNA, 12 nt, Human
ucuaaaguuuac

SEQ ID NO: 3670953 - RNA, 17 nt, Human
ucuaaaguuuacaguaa

SEQ ID NO: 3670954 - RNA, 19 nt, Human
ucuaaaguuuacaguaaau

SEQ ID NO: 3670955 - RNA, 17 nt, Human
ucuaaauaaaaugcuag

SEQ ID NO: 3670956 - RNA, 17 nt, Human
ucuaaauaccugcccug

SEQ ID NO: 3670957 - RNA, 23 nt, Human
ucuaaauauuuccuuaaacugug

SEQ ID NO: 3670958 - RNA, 17 nt, Human
ucuaaaucuauuuauua

SEQ ID NO: 3670959 - RNA, 20 nt, Human
ucuaaaucuauuuauuaaua

SEQ ID NO: 3670960 - RNA, 21 nt, Human
ucuaaaucuauuuauuaauau

SEQ ID NO: 3670961 - RNA, 14 nt, Human
ucuaaaucugucca

SEQ ID NO: 3670962 - RNA, 14 nt, Human
ucuaaaugcauauc

SEQ ID NO: 3670963 - RNA, 22 nt, Human
ucuaaauguuuggcauguaaau

SEQ ID NO: 3670964 - RNA, 16 nt, Human
ucuaaauucuuucauu

SEQ ID NO: 3670965 - RNA, 13 nt, Human
ucuaaauugaaua

SEQ ID NO: 3670966 - RNA, 17 nt, Human
ucuaaauugaauaaugg

SEQ ID NO: 3670967 - RNA, 13 nt, Human
ucuaaauuugaau

SEQ ID NO: 3670968 - RNA, 17 nt, Human
ucuaaauuugaauguua

SEQ ID NO: 3670969 - RNA, 18 nt, Human
ucuaaauuugaauguuaa

SEQ ID NO: 3670970 - RNA, 18 nt, Human
ucuaaauuuuauaucuug

SEQ ID NO: 3670971 - RNA, 19 nt, Human
ucuaacacuggcauguuca

SEQ ID NO: 3670972 - RNA, 13 nt, Human
ucuaacagcacca

SEQ ID NO: 3670973 - RNA, 22 nt, Human
ucuaacagcaccaaaucaaaau

SEQ ID NO: 3670974 - RNA, 13 nt, Human
ucuaacagcccuc

SEQ ID NO: 3670975 - RNA, 20 nt, Human
ucuaacagcccuccucugca

SEQ ID NO: 3670976 - RNA, 22 nt, Human
ucuaacagcccuccucugcacu

SEQ ID NO: 3670977 - RNA, 22 nt, Human
ucuaacagugaaguuuuacugu

SEQ ID NO: 3670978 - RNA, 23 nt, Human
ucuaacauuugagucccuuccag

SEQ ID NO: 3670979 - RNA, 19 nt, Human
ucuaaccacagcuccuuuu

SEQ ID NO: 3670980 - RNA, 15 nt, Human
ucuaacccucccaug

SEQ ID NO: 3670981 - RNA, 18 nt, Human
ucuaaccucaucuucuuc

SEQ ID NO: 3670982 - RNA, 18 nt, Human
ucuaaccucgcccucucc

SEQ ID NO: 3670983 - RNA, 22 nt, Human
ucuaaccuugaaugcugccagu

SEQ ID NO: 3670984 - RNA, 14 nt, Human
ucuaaccuuuacau

SEQ ID NO: 3670985 - RNA, 15 nt, Human
ucuaacuacaaaggu

SEQ ID NO: 3670986 - RNA, 14 nt, Human
ucuaacucagaauu

SEQ ID NO: 3670987 - RNA, 12 nt, Human
ucuaacuguaua

SEQ ID NO: 3670988 - RNA, 12 nt, Human
ucuaagaaaccc

SEQ ID NO: 3670989 - RNA, 17 nt, Human
ucuaagaauaauaaaau

SEQ ID NO: 3670990 - RNA, 20 nt, Human
ucuaagaauuuuaucuguuu

SEQ ID NO: 3670991 - RNA, 18 nt, Human
ucuaagacucaaauguuc

SEQ ID NO: 3670992 - RNA, 23 nt, Human
ucuaagacuuacucuaagaucuu

SEQ ID NO: 3670993 - RNA, 12 nt, Human
ucuaagaucuua

SEQ ID NO: 3670994 - RNA, 15 nt, Human
ucuaagaucuuagau

SEQ ID NO: 3670995 - RNA, 19 nt, Human
ucuaagaucuuagauucuc

SEQ ID NO: 3670996 - RNA, 18 nt, Human
ucuaagaugugauauucu

SEQ ID NO: 3670997 - RNA, 21 nt, Human
ucuaagaugugauauucuaag

SEQ ID NO: 3670998 - RNA, 22 nt, Human
ucuaagaugugauauucuaaga

SEQ ID NO: 3670999 - RNA, 16 nt, Human
ucuaagauguuauauu

SEQ ID NO: 3671000 - RNA, 23 nt, Human
ucuaagauguuauauuuuucuua

SEQ ID NO: 3671001 - RNA, 18 nt, Human
ucuaagauuaauagcauu

SEQ ID NO: 3671002 - RNA, 13 nt, Human
ucuaagauucuaa

SEQ ID NO: 3671003 - RNA, 16 nt, Human
ucuaagauucuaaagg

SEQ ID NO: 3671004 - RNA, 15 nt, Human
ucuaagauucuaaug

SEQ ID NO: 3671005 - RNA, 19 nt, Human
ucuaagauucuaaugauga

SEQ ID NO: 3671006 - RNA, 13 nt, Human
ucuaagauucuga

SEQ ID NO: 3671007 - RNA, 17 nt, Human
ucuaagcauaaaagaug

SEQ ID NO: 3671008 - RNA, 16 nt, Human
ucuaagccugaagggg

SEQ ID NO: 3671009 - RNA, 17 nt, Human
ucuaagccuuuccauaa

SEQ ID NO: 3671010 - RNA, 14 nt, Human
ucuaagcugcagcu

SEQ ID NO: 3671011 - RNA, 11 nt, Human
ucuaaggacaa

SEQ ID NO: 3671012 - RNA, 21 nt, Human
ucuaaggaccugaaauuccaa

SEQ ID NO: 3671013 - RNA, 23 nt, Human
ucuaaggaugucacagggccaac

SEQ ID NO: 3671014 - RNA, 20 nt, Human
ucuaaggccuaggauucuaa

SEQ ID NO: 3671015 - RNA, 17 nt, Human
ucuaaggcucugagagu

SEQ ID NO: 3671016 - RNA, 22 nt, Human
ucuaaggcucugagagucuaga

SEQ ID NO: 3671017 - RNA, 16 nt, Human
ucuaaggcuguuugcu

SEQ ID NO: 3671018 - RNA, 15 nt, Human
ggagcauggcuguga

SEQ ID NO: 3671019 - RNA, 22 nt, Human
ggagcauuggggauguuuuucu

SEQ ID NO: 3671020 - RNA, 15 nt, Human
ggagcauuuggagag

SEQ ID NO: 3671021 - RNA, 17 nt, Human
ggagccaacugcugcuu

SEQ ID NO: 3671022 - RNA, 16 nt, Human
ggagccaauggagacu

SEQ ID NO: 3671023 - RNA, 18 nt, Human
ggagccacuaacuagagc

SEQ ID NO: 3671024 - RNA, 23 nt, Human
ggagccaugcgcccccuccgccc

SEQ ID NO: 3671025 - RNA, 20 nt, Human
ggagcccacgcucacccccu

SEQ ID NO: 3671026 - RNA, 18 nt, Human
ggagcccacuguccuggg

SEQ ID NO: 3671027 - RNA, 20 nt, Human
ggagcccacuguccugggcc

SEQ ID NO: 3671028 - RNA, 22 nt, Human
ggagcccacuguccugggccug

SEQ ID NO: 3671029 - RNA, 23 nt, Human
ggagcccacuguccugggccugc

SEQ ID NO: 3671030 - RNA, 12 nt, Human
ggagcccaggag

SEQ ID NO: 3671031 - RNA, 13 nt, Human
ggagcccaggagu

SEQ ID NO: 3671032 - RNA, 14 nt, Human
ggagcccaggccag

SEQ ID NO: 3671033 - RNA, 20 nt, Human
ggagccccaggccucugugu

SEQ ID NO: 3671034 - RNA, 23 nt, Human
ggagccccaggccucuguguccu

SEQ ID NO: 3671035 - RNA, 12 nt, Human
ggagccccaggg

SEQ ID NO: 3671036 - RNA, 14 nt, Human
ggagcccccacccu

SEQ ID NO: 3671037 - RNA, 15 nt, Human
ggagcccccacccug

SEQ ID NO: 3671038 - RNA, 17 nt, Human
ggagcccccagccuguc

SEQ ID NO: 3671039 - RNA, 20 nt, Human
ggagcccccgccccgcccca

SEQ ID NO: 3671040 - RNA, 16 nt, Human
ggagccccgaggccuu

SEQ ID NO: 3671041 - RNA, 22 nt, Human
ggagccccgaggccuucucuga

SEQ ID NO: 3671042 - RNA, 15 nt, Human
ggagccccugggugg

SEQ ID NO: 3671043 - RNA, 14 nt, Human
ggagcccgcacccc

SEQ ID NO: 3671044 - RNA, 16 nt, Human
ggagcccgcaccccca

SEQ ID NO: 3671045 - RNA, 21 nt, Human
ggagcccgcacccccacccuu

SEQ ID NO: 3671046 - RNA, 12 nt, Human
ggagcccugccu

SEQ ID NO: 3671047 - RNA, 17 nt, Human
ggagcccuggagacccc

SEQ ID NO: 3671048 - RNA, 20 nt, Human
ggagcccugggaggcucugg

SEQ ID NO: 3671049 - RNA, 18 nt, Human
ggagcccugucuccucuc

SEQ ID NO: 3671050 - RNA, 22 nt, Human
ggagccgaagcccaggggccgg

SEQ ID NO: 3671051 - RNA, 21 nt, Human
ggagccgagaucacgccacug

SEQ ID NO: 3671052 - RNA, 13 nt, Human
ggagccgcagcag

SEQ ID NO: 3671053 - RNA, 20 nt, Human
ggagccgcuggcagaaggga

SEQ ID NO: 3671054 - RNA, 15 nt, Human
ggagccgggccgcag

SEQ ID NO: 3671055 - RNA, 18 nt, Human
ggagccgguaacuguccu

SEQ ID NO: 3671056 - RNA, 20 nt, Human
ggagccgguaacuguccugu

SEQ ID NO: 3671057 - RNA, 14 nt, Human
ggagccuaggacca

SEQ ID NO: 3671058 - RNA, 21 nt, Human
ggagccucauccgaggcaggg

SEQ ID NO: 3671059 - RNA, 15 nt, Human
ggagccucccugccu

SEQ ID NO: 3671060 - RNA, 12 nt, Human
ggagccuccugc

SEQ ID NO: 3671061 - RNA, 13 nt, Human
ggagccugacagc

SEQ ID NO: 3671062 - RNA, 21 nt, Human
ggagccugcaggguggugcug

SEQ ID NO: 3671063 - RNA, 20 nt, Human
ggagccuggcacaggacuga

SEQ ID NO: 3671064 - RNA, 12 nt, Human
ggagccuggugc

SEQ ID NO: 3671065 - RNA, 14 nt, Human
ggagcggaaagcag

SEQ ID NO: 3671066 - RNA, 19 nt, Human
ggagcggauugcaaagcaa

SEQ ID NO: 3671067 - RNA, 17 nt, Human
ggagcgggaccuguggc

SEQ ID NO: 3671068 - RNA, 14 nt, Human
ggagcgggucugcu

SEQ ID NO: 3671069 - RNA, 15 nt, Human
ggagcgguggcccug

SEQ ID NO: 3671070 - RNA, 15 nt, Human
ggagcuaaggcucua

SEQ ID NO: 3671071 - RNA, 12 nt, Human
ggagcuagccag

SEQ ID NO: 3671072 - RNA, 15 nt, Human
ggagcuagccagagg

SEQ ID NO: 3671073 - RNA, 20 nt, Human
ggagcucacuguggugucug

SEQ ID NO: 3671074 - RNA, 23 nt, Human
ggagcucacuguggugucugugu

SEQ ID NO: 3671075 - RNA, 13 nt, Human
ggagcuccagccu

SEQ ID NO: 3671076 - RNA, 15 nt, Human
ggagcuccagccuga

SEQ ID NO: 3671077 - RNA, 13 nt, Human
ggagcuccccucc

SEQ ID NO: 3671078 - RNA, 16 nt, Human
ggagcuccccucccca

SEQ ID NO: 3671079 - RNA, 18 nt, Human
ggagcuccucuccuggag

SEQ ID NO: 3671080 - RNA, 11 nt, Human
ggagcuccugg

SEQ ID NO: 3671081 - RNA, 12 nt, Human
ggagcugcaggg

SEQ ID NO: 3671082 - RNA, 17 nt, Human
ggagcugccuggacccg

SEQ ID NO: 3671083 - RNA, 17 nt, Human
ggagcugccuuggcuca

SEQ ID NO: 3671084 - RNA, 19 nt, Human
ggagcugcuauagccuggg

SEQ ID NO: 3671085 - RNA, 13 nt, Human
ggagcugcuggcu

SEQ ID NO: 3671086 - RNA, 15 nt, Human
ggagcugcuggcuug

SEQ ID NO: 3671087 - RNA, 17 nt, Human
ggagcuggaguccacug

SEQ ID NO: 3671088 - RNA, 18 nt, Human
uccugacccauugcuguu

SEQ ID NO: 3671089 - RNA, 15 nt, Human
uccugaccucaggca

SEQ ID NO: 3671090 - RNA, 18 nt, Human
uccugacgaaacuggccc

SEQ ID NO: 3671091 - RNA, 21 nt, Human
uccugacgaaacuggccccgg

SEQ ID NO: 3671092 - RNA, 22 nt, Human
uccugacuccuaccugcccugg

SEQ ID NO: 3671093 - RNA, 23 nt, Human
uccugacuccuaccugcccugga

SEQ ID NO: 3671094 - RNA, 17 nt, Human
uccugacucugcccccu

SEQ ID NO: 3671095 - RNA, 20 nt, Human
uccugacugaaaguaggggg

SEQ ID NO: 3671096 - RNA, 13 nt, Human
uccugacuggugc

SEQ ID NO: 3671097 - RNA, 23 nt, Human
uccugacugucucccgggacuac

SEQ ID NO: 3671098 - RNA, 14 nt, Human
uccugagaccccug

SEQ ID NO: 3671099 - RNA, 18 nt, Human
uccugagagcugcaugug

SEQ ID NO: 3671100 - RNA, 19 nt, Human
uccugagagcugcaugugu

SEQ ID NO: 3671101 - RNA, 13 nt, Human
uccugagccagau

SEQ ID NO: 3671102 - RNA, 14 nt, Human
uccugagccagauu

SEQ ID NO: 3671103 - RNA, 17 nt, Human
uccugagccagauuuca

SEQ ID NO: 3671104 - RNA, 19 nt, Human
uccugagccagauuucacu

SEQ ID NO: 3671105 - RNA, 21 nt, Human
uccugagccagauuucacucu

SEQ ID NO: 3671106 - RNA, 14 nt, Human
uccugagccccagg

SEQ ID NO: 3671107 - RNA, 17 nt, Human
uccugagcccccagcuu

SEQ ID NO: 3671108 - RNA, 19 nt, Human
uccugagcccccagcuucc

SEQ ID NO: 3671109 - RNA, 13 nt, Human
uccugagcucagc

SEQ ID NO: 3671110 - RNA, 19 nt, Human
uccugagcucagcguggag

SEQ ID NO: 3671111 - RNA, 22 nt, Human
uccugagcuuggccagaagggg

SEQ ID NO: 3671112 - RNA, 13 nt, Human
uccugagcuuuau

SEQ ID NO: 3671113 - RNA, 16 nt, Human
uccugaggacagcugu

SEQ ID NO: 3671114 - RNA, 19 nt, Human
uccugaggaucagaaagua

SEQ ID NO: 3671115 - RNA, 20 nt, Human
uccugaggcuccacuugguc

SEQ ID NO: 3671116 - RNA, 13 nt, Human
uccugaggcugag

SEQ ID NO: 3671117 - RNA, 12 nt, Human
uccugaggcugg

SEQ ID NO: 3671118 - RNA, 19 nt, Human
uccugaggcugggcucccu

SEQ ID NO: 3671119 - RNA, 15 nt, Human
uccugaggggcaucu

SEQ ID NO: 3671120 - RNA, 16 nt, Human
uccugaggggcaucug

SEQ ID NO: 3671121 - RNA, 20 nt, Human
uccugauaaagcacagcugu

SEQ ID NO: 3671122 - RNA, 19 nt, Human
uccugauaauaauugauca

SEQ ID NO: 3671123 - RNA, 21 nt, Human
uccugauccacuuugggggag

SEQ ID NO: 3671124 - RNA, 14 nt, Human
uccugaugacccag

SEQ ID NO: 3671125 - RNA, 16 nt, Human
uccugaugacccaggc

SEQ ID NO: 3671126 - RNA, 20 nt, Human
uccugaugacccaggcugcc

SEQ ID NO: 3671127 - RNA, 21 nt, Human
uccugauggcaggauggccug

SEQ ID NO: 3671128 - RNA, 21 nt, Human
uccugauggucagcucccuuc

SEQ ID NO: 3671129 - RNA, 19 nt, Human
uccugcaaaauuuuauagc

SEQ ID NO: 3671130 - RNA, 23 nt, Human
uccugcaaccaaacucccaucag

SEQ ID NO: 3671131 - RNA, 14 nt, Human
uccugcaaugaaag

SEQ ID NO: 3671132 - RNA, 18 nt, Human
uccugcaaugaagucucu

SEQ ID NO: 3671133 - RNA, 15 nt, Human
uccugcaauuuucua

SEQ ID NO: 3671134 - RNA, 16 nt, Human
uccugcaauuuucuaa

SEQ ID NO: 3671135 - RNA, 21 nt, Human
uccugcacaguuuucuggcug

SEQ ID NO: 3671136 - RNA, 18 nt, Human
uccugcaccggggccugg

SEQ ID NO: 3671137 - RNA, 19 nt, Human
uccugcagcaaacacucca

SEQ ID NO: 3671138 - RNA, 15 nt, Human
uccugcagcagagcc

SEQ ID NO: 3671139 - RNA, 17 nt, Human
uccugcagcaugguccc

SEQ ID NO: 3671140 - RNA, 22 nt, Human
uccugcagcauggucccugccu

SEQ ID NO: 3671141 - RNA, 12 nt, Human
uccugcagcccc

SEQ ID NO: 3671142 - RNA, 13 nt, Human
uccugcagcccca

SEQ ID NO: 3671143 - RNA, 22 nt, Human
uccugcagccuccuccugacca

SEQ ID NO: 3671144 - RNA, 17 nt, Human
uccugcaggcagccagg

SEQ ID NO: 3671145 - RNA, 11 nt, Human
uccugcaugca

SEQ ID NO: 3671146 - RNA, 22 nt, Human
uccugcauucacccagacagcu

SEQ ID NO: 3671147 - RNA, 16 nt, Human
uccugccaccagucac

SEQ ID NO: 3671148 - RNA, 17 nt, Human
uccugccaccagucacu

SEQ ID NO: 3671149 - RNA, 22 nt, Human
uccugccacccagccccagcca

SEQ ID NO: 3671150 - RNA, 13 nt, Human
uccugccaccugc

SEQ ID NO: 3671151 - RNA, 13 nt, Human
uccugccagcccc

SEQ ID NO: 3671152 - RNA, 17 nt, Human
uccugccaguguggaac

SEQ ID NO: 3671153 - RNA, 16 nt, Human
uccugcccaggagagc

SEQ ID NO: 3671154 - RNA, 19 nt, Human
uccugcccaggagagccag

SEQ ID NO: 3671155 - RNA, 14 nt, Human
uccugcccaguccc

SEQ ID NO: 3671156 - RNA, 19 nt, Human
uccugcccaguguuguuug

SEQ ID NO: 3671157 - RNA, 21 nt, Human
uccugcccccacaccuggccc

SEQ ID NO: 3671158 - RNA, 19 nt, Human
uccugcccccugaaacuua

SEQ ID NO: 3671159 - RNA, 22 nt, Human
uccugcccccugaaacuuauuu

SEQ ID NO: 3671160 - RNA, 21 nt, Human
uccugcccgcagaccucugga

SEQ ID NO: 3671161 - RNA, 16 nt, Human
uccugcccugcuguuu

SEQ ID NO: 3671162 - RNA, 11 nt, Human
uccugcccugg

SEQ ID NO: 3671163 - RNA, 14 nt, Human
uccugcccugggag

SEQ ID NO: 3671164 - RNA, 14 nt, Human
uccugccgacuccu

SEQ ID NO: 3671165 - RNA, 15 nt, Human
uccugccgacuccug

SEQ ID NO: 3671166 - RNA, 18 nt, Human
uccugccgcagagcuggc

SEQ ID NO: 3671167 - RNA, 16 nt, Human
uccugccggagaggaa

SEQ ID NO: 3671168 - RNA, 17 nt, Human
uccugccggagaggaag

SEQ ID NO: 3671169 - RNA, 14 nt, Human
uccugccucagccu

SEQ ID NO: 3671170 - RNA, 19 nt, Human
uccugccucagccucccaa

SEQ ID NO: 3671171 - RNA, 18 nt, Human
uccugccucagccucccg

SEQ ID NO: 3671172 - RNA, 21 nt, Human
uccugccuccuugauauuugu

SEQ ID NO: 3671173 - RNA, 15 nt, Human
uccugccucuacugg

SEQ ID NO: 3671174 - RNA, 22 nt, Human
uccugccucuacugggaaggcu

SEQ ID NO: 3671175 - RNA, 20 nt, Human
uccugccugccccucucccg

SEQ ID NO: 3671176 - RNA, 13 nt, Human
uccugccuggcca

SEQ ID NO: 3671177 - RNA, 18 nt, Human
uccugccuggucuccugc

SEQ ID NO: 3671178 - RNA, 17 nt, Human
uccugccugucugcccc

SEQ ID NO: 3671179 - RNA, 14 nt, Human
uccugccugugcug

SEQ ID NO: 3671180 - RNA, 14 nt, Human
uccugccuguggcc

SEQ ID NO: 3671181 - RNA, 15 nt, Human
uccugccuguggcca

SEQ ID NO: 3671182 - RNA, 17 nt, Human
uccugccuuagagccag

SEQ ID NO: 3671183 - RNA, 16 nt, Human
uccugccuuccuccug

SEQ ID NO: 3671184 - RNA, 22 nt, Human
uccugccuuccuccugggcccu

SEQ ID NO: 3671185 - RNA, 23 nt, Human
uccugccuuccuccugggcccuc

SEQ ID NO: 3671186 - RNA, 14 nt, Human
uccugccuucuguc

SEQ ID NO: 3671187 - RNA, 23 nt, Human
uccugccuucuguccugguguca

SEQ ID NO: 3671188 - RNA, 21 nt, Human
uccugccuuggccucccaagu

SEQ ID NO: 3671189 - RNA, 14 nt, Human
uccugccuuugccu

SEQ ID NO: 3671190 - RNA, 14 nt, Human
uccugcgggugggg

SEQ ID NO: 3671191 - RNA, 14 nt, Human
uccugcguccuccu

SEQ ID NO: 3671192 - RNA, 18 nt, Human
uccugcguccuccucacc

SEQ ID NO: 3671193 - RNA, 15 nt, Human
uccugcguguucuca

SEQ ID NO: 3671194 - RNA, 17 nt, Human
uccugcuaaaacaauga

SEQ ID NO: 3671195 - RNA, 20 nt, Human
uccugcuaacggugcucagg

SEQ ID NO: 3671196 - RNA, 18 nt, Human
uccugcuaaguuaauguu

SEQ ID NO: 3671197 - RNA, 14 nt, Human
uccugcuacucugu

SEQ ID NO: 3671198 - RNA, 19 nt, Human
uccugcuauuucccaagcu

SEQ ID NO: 3671199 - RNA, 15 nt, Human
uccugcuccacagug

SEQ ID NO: 3671200 - RNA, 13 nt, Human
uccugcuccagaa

SEQ ID NO: 3671201 - RNA, 14 nt, Human
uccugcuccagaau

SEQ ID NO: 3671202 - RNA, 20 nt, Human
uccugcuccagaauuuggaa

SEQ ID NO: 3671203 - RNA, 15 nt, Human
uccugcucucuaccc

SEQ ID NO: 3671204 - RNA, 13 nt, Human
uccugcucugcuc

SEQ ID NO: 3671205 - RNA, 20 nt, Human
uccugcugagccucacagca

SEQ ID NO: 3671206 - RNA, 12 nt, Human
uccugcugcacc

SEQ ID NO: 3671207 - RNA, 22 nt, Human
uccugcugcaccaacccagccg

SEQ ID NO: 3671208 - RNA, 16 nt, Human
uccugcugcagagggg

SEQ ID NO: 3671209 - RNA, 18 nt, Human
uccugcugcagaggggca

SEQ ID NO: 3671210 - RNA, 15 nt, Human
uccugcugcucccuc

SEQ ID NO: 3671211 - RNA, 19 nt, Human
uccugcugcucccucagac

SEQ ID NO: 3671212 - RNA, 14 nt, Human
uccugcugcugucu

SEQ ID NO: 3671213 - RNA, 15 nt, Human
uccugcugcugucug

SEQ ID NO: 3671214 - RNA, 13 nt, Human
uccugcugggcag

SEQ ID NO: 3671215 - RNA, 22 nt, Human
uccugcuguaaauuuggcuucu

SEQ ID NO: 3671216 - RNA, 14 nt, Human
uccugcuguuacau

SEQ ID NO: 3671217 - RNA, 22 nt, Human
uccugcuugaugggauucugga

SEQ ID NO: 3671218 - RNA, 23 nt, Human
uccugcuugaugggauucuggac

SEQ ID NO: 3671219 - RNA, 17 nt, Human
uccugcuugccaaggca

SEQ ID NO: 3671220 - RNA, 14 nt, Human
uccuggaaaccaca

SEQ ID NO: 3671221 - RNA, 22 nt, Human
uccuggaagcgcgagggccuca

SEQ ID NO: 3671222 - RNA, 23 nt, Human
uccuggaagugcuaauuuugaaa

SEQ ID NO: 3671223 - RNA, 15 nt, Human
uccuggacagcugug

SEQ ID NO: 3671224 - RNA, 18 nt, Human
uccuggacagcugugccu

SEQ ID NO: 3671225 - RNA, 22 nt, Human
uccuggacagcugugccucgcu

SEQ ID NO: 3671226 - RNA, 14 nt, Human
uccuggacauuuuu

SEQ ID NO: 3671227 - RNA, 18 nt, Human
ggaugccaucugugggca

SEQ ID NO: 3671228 - RNA, 19 nt, Human
ggaugccaucugugggcac

SEQ ID NO: 3671229 - RNA, 22 nt, Human
ggaugcccagggccacucugcc

SEQ ID NO: 3671230 - RNA, 23 nt, Human
ggaugcccagggccacucugccu

SEQ ID NO: 3671231 - RNA, 12 nt, Human
ggaugcccugga

SEQ ID NO: 3671232 - RNA, 13 nt, Human
ggaugcccuggag

SEQ ID NO: 3671233 - RNA, 22 nt, Human
uccuguggccccacccugggcc

SEQ ID NO: 3671234 - RNA, 23 nt, Human
uccuguggccccacccugggccc

SEQ ID NO: 3671235 - RNA, 17 nt, Human
uccuguggccugccagu

SEQ ID NO: 3671236 - RNA, 23 nt, Human
uccugugggggaagagcacagcc

SEQ ID NO: 3671237 - RNA, 19 nt, Human
uccugugugauugacagcu

SEQ ID NO: 3671238 - RNA, 15 nt, Human
uccuguguggagagg

SEQ ID NO: 3671239 - RNA, 16 nt, Human
uccuguguggagaggg

SEQ ID NO: 3671240 - RNA, 22 nt, Human
uccuguguggagagggaaugug

SEQ ID NO: 3671241 - RNA, 18 nt, Human
uccugugugguuuagugu

SEQ ID NO: 3671242 - RNA, 15 nt, Human
ggcaauauucucugu

SEQ ID NO: 3671243 - RNA, 18 nt, Human
ggcaauauucucuguaca

SEQ ID NO: 3671244 - RNA, 20 nt, Human
ggcaauauucucuguacaua

SEQ ID NO: 3671245 - RNA, 16 nt, Human
ggcaaugguaguuucu

SEQ ID NO: 3671246 - RNA, 18 nt, Human
ggcaaugguaguuucugu

SEQ ID NO: 3671247 - RNA, 19 nt, Human
ggcaauuaauuccuucagc

SEQ ID NO: 3671248 - RNA, 19 nt, Human
ggcaauucuccugccuuug

SEQ ID NO: 3671249 - RNA, 11 nt, Human
ggcaauuuugu

SEQ ID NO: 3671250 - RNA, 15 nt, Human
ggcacaagaaucacu

SEQ ID NO: 3671251 - RNA, 14 nt, Human
ggcacaagacugac

SEQ ID NO: 3671252 - RNA, 18 nt, Human
ggcacaaguccuggaugu

SEQ ID NO: 3671253 - RNA, 12 nt, Human
ggcacaauaaau

SEQ ID NO: 3671254 - RNA, 20 nt, Human
ggcacacaaggggcccuugg

SEQ ID NO: 3671255 - RNA, 21 nt, Human
ggcacacaaggggcccuugga

SEQ ID NO: 3671256 - RNA, 21 nt, Human
ggcacacaccuguagucccag

SEQ ID NO: 3671257 - RNA, 21 nt, Human
ggcacacacugugcuuucuau

SEQ ID NO: 3671258 - RNA, 13 nt, Human
ggcacaccgggca

SEQ ID NO: 3671259 - RNA, 15 nt, Human
ggcacacgccuccca

SEQ ID NO: 3671260 - RNA, 19 nt, Human
ggcacacgccucccacugg

SEQ ID NO: 3671261 - RNA, 18 nt, Human
ggcacacgcugcucugcc

SEQ ID NO: 3671262 - RNA, 24 nt, Human
ggcacagaaaauggaagacagcuc

SEQ ID NO: 3671263 - RNA, 16 nt, Human
ggcacagaaaccucua

SEQ ID NO: 3671264 - RNA, 17 nt, Human
ggcacagccggggccug

SEQ ID NO: 3671265 - RNA, 21 nt, Human
ggcacagccggggccugccua

SEQ ID NO: 3671266 - RNA, 14 nt, Human
ggcacagccugcac

SEQ ID NO: 3671267 - RNA, 13 nt, Human
ggcacagccuggc

SEQ ID NO: 3671268 - RNA, 18 nt, Human
ggcacagcggggccccag

SEQ ID NO: 3671269 - RNA, 22 nt, Human
ggcacaggacugauucugggau

SEQ ID NO: 3671270 - RNA, 16 nt, Human
ggcacaggagcuaccu

SEQ ID NO: 3671271 - RNA, 20 nt, Human
ggcacaggaggcaggcaugg

SEQ ID NO: 3671272 - RNA, 23 nt, Human
ggcacaggaggcaggcauggccc

SEQ ID NO: 3671273 - RNA, 17 nt, Human
ggcacaggccauggaug

SEQ ID NO: 3671274 - RNA, 14 nt, Human
ggcacaggcccccu

SEQ ID NO: 3671275 - RNA, 13 nt, Human
ggcacagggagag

SEQ ID NO: 3671276 - RNA, 19 nt, Human
ggcacagggcaugaaauga

SEQ ID NO: 3671277 - RNA, 20 nt, Human
ggcacagggccuggcccaug

SEQ ID NO: 3671278 - RNA, 12 nt, Human
ggcacagggucu

SEQ ID NO: 3671279 - RNA, 18 nt, Human
ggcacagggucugcucuu

SEQ ID NO: 3671280 - RNA, 17 nt, Human
ggcacaguaugucccau

SEQ ID NO: 3671281 - RNA, 21 nt, Human
ggcacaguuuucugagaaaga

SEQ ID NO: 3671282 - RNA, 15 nt, Human
ggcacaucauuucaa

SEQ ID NO: 3671283 - RNA, 18 nt, Human
ggcacauccuaugcaaua

SEQ ID NO: 3671284 - RNA, 12 nt, Human
ggcacauuuuuu

SEQ ID NO: 3671285 - RNA, 10 nt, Human
ggcaccaaag

SEQ ID NO: 3671286 - RNA, 18 nt, Human
ggcaccaaagaugcagcc

SEQ ID NO: 3671287 - RNA, 22 nt, Human
ggcaccacugcacuccagccug

SEQ ID NO: 3671288 - RNA, 19 nt, Human
ggcaccagacacccaggac

SEQ ID NO: 3671289 - RNA, 12 nt, Human
ggcaccagaggc

SEQ ID NO: 3671290 - RNA, 22 nt, Human
ggcaccagaggcugcagaaggc

SEQ ID NO: 3671291 - RNA, 15 nt, Human
ggcaccagcagccug

SEQ ID NO: 3671292 - RNA, 17 nt, Human
ggcaccagcagccugga

SEQ ID NO: 3671293 - RNA, 14 nt, Human
ggcaccaucucccu

SEQ ID NO: 3671294 - RNA, 19 nt, Human
ggcaccauucaggaaccug

SEQ ID NO: 3671295 - RNA, 18 nt, Human
ggcacccaagaccucagg

SEQ ID NO: 3671296 - RNA, 21 nt, Human
ggcacccaagaccucagggca

SEQ ID NO: 3671297 - RNA, 14 nt, Human
ggcacccacccugg

SEQ ID NO: 3671298 - RNA, 14 nt, Human
ggcacccccagccu

SEQ ID NO: 3671299 - RNA, 19 nt, Human
ggcacccccagccugggcc

SEQ ID NO: 3671300 - RNA, 20 nt, Human
ggcacccccagccugggccu

SEQ ID NO: 3671301 - RNA, 15 nt, Human
ggcacccccugcagc

SEQ ID NO: 3671302 - RNA, 18 nt, Human
ggcacccccuggagagaa

SEQ ID NO: 3671303 - RNA, 18 nt, Human
ggcacccggccccugcug

SEQ ID NO: 3671304 - RNA, 20 nt, Human
ggcacccucuggccgccuag

SEQ ID NO: 3671305 - RNA, 15 nt, Human
ggcaccgaagcccag

SEQ ID NO: 3671306 - RNA, 23 nt, Human
ggcaccgaagcccagagggucug

SEQ ID NO: 3671307 - RNA, 15 nt, Human
ggcaccgagaauguu

SEQ ID NO: 3671308 - RNA, 16 nt, Human
ggcaccuaauccaggc

SEQ ID NO: 3671309 - RNA, 19 nt, Human
ggcaccuaauccaggcaga

SEQ ID NO: 3671310 - RNA, 19 nt, Human
ggcaccuauagucccagcu

SEQ ID NO: 3671311 - RNA, 16 nt, Human
ggcaccugggcccugg

SEQ ID NO: 3671312 - RNA, 23 nt, Human
ggcaccugggcccuggggccugu

SEQ ID NO: 3671313 - RNA, 17 nt, Human
ggcaccuggggaguggg

SEQ ID NO: 3671314 - RNA, 22 nt, Human
ggcaccugguggccaugcuccu

SEQ ID NO: 3671315 - RNA, 22 nt, Human
ggcaccugucugcuccagcucu

SEQ ID NO: 3671316 - RNA, 16 nt, Human
ggcaccuuuuacugug

SEQ ID NO: 3671317 - RNA, 17 nt, Human
ggcacgaacccaccugc

SEQ ID NO: 3671318 - RNA, 18 nt, Human
ggcacgaacccaccugcu

SEQ ID NO: 3671319 - RNA, 15 nt, Human
ggcacgggcccguga

SEQ ID NO: 3671320 - RNA, 17 nt, Human
ggcacgggugguccccg

SEQ ID NO: 3671321 - RNA, 20 nt, Human
ggcacggucuucccucuucc

SEQ ID NO: 3671322 - RNA, 16 nt, Human
ggcacuagccaaagcg

SEQ ID NO: 3671323 - RNA, 15 nt, Human
ggcacuagccuuugg

SEQ ID NO: 3671324 - RNA, 19 nt, Human
ggcacuauuuauuuacaaa

SEQ ID NO: 3671325 - RNA, 17 nt, Human
ggcacucacagaccugg

SEQ ID NO: 3671326 - RNA, 23 nt, Human
ggcacucacagaccuggagcccc

SEQ ID NO: 3671327 - RNA, 20 nt, Human
ggcacucagaagacacugau

SEQ ID NO: 3671328 - RNA, 14 nt, Human
ggcacuccaaccua

SEQ ID NO: 3671329 - RNA, 18 nt, Human
ggcacucccuccagcaca

SEQ ID NO: 3671330 - RNA, 19 nt, Human
ggcacugagagagcgcagc

SEQ ID NO: 3671331 - RNA, 12 nt, Human
ggcacugagccc

SEQ ID NO: 3671332 - RNA, 19 nt, Human
ggcacugagcccccccaac

SEQ ID NO: 3671333 - RNA, 23 nt, Human
ggcacugagcccccccaacacug

SEQ ID NO: 3671334 - RNA, 14 nt, Human
ggcacugcaggggc

SEQ ID NO: 3671335 - RNA, 12 nt, Human
ggcacugcccug

SEQ ID NO: 3671336 - RNA, 14 nt, Human
ggcacugcccuggu

SEQ ID NO: 3671337 - RNA, 12 nt, Human
ggcacugccuga

SEQ ID NO: 3671338 - RNA, 12 nt, Human
ggcacugcuggg

SEQ ID NO: 3671339 - RNA, 14 nt, Human
ggcacugcugugcu

SEQ ID NO: 3671340 - RNA, 16 nt, Human
ggcacugcuuccagug

SEQ ID NO: 3671341 - RNA, 22 nt, Human
ggcacugcuuccagugaggcuc

SEQ ID NO: 3671342 - RNA, 24 nt, Human
ggcacugcuuccagugaggcucug

SEQ ID NO: 3671343 - RNA, 17 nt, Human
ggcacuggaccccagca

SEQ ID NO: 3671344 - RNA, 22 nt, Human
ggcacuggcaaacagggccucu

SEQ ID NO: 3671345 - RNA, 20 nt, Human
ggcacuggcauugucccugu

SEQ ID NO: 3671346 - RNA, 16 nt, Human
ggcacugggcaugagg

SEQ ID NO: 3671347 - RNA, 12 nt, Human
ggcacugggcug

SEQ ID NO: 3671348 - RNA, 13 nt, Human
ggcacugggcugu

SEQ ID NO: 3671349 - RNA, 15 nt, Human
ggcacuggggcaggg

SEQ ID NO: 3671350 - RNA, 15 nt, Human
ggcacugguggcccg

SEQ ID NO: 3671351 - RNA, 24 nt, Human
ggcacuguacuaggcgugagaagc

SEQ ID NO: 3671352 - RNA, 13 nt, Human
ggcacuguggccu

SEQ ID NO: 3671353 - RNA, 13 nt, Human
ggcacuucacaga

SEQ ID NO: 3671354 - RNA, 14 nt, Human
ggcacuucacagag

SEQ ID NO: 3671355 - RNA, 13 nt, Human
ggcacuucccugc

SEQ ID NO: 3671356 - RNA, 13 nt, Human
ggcacuucugccu

SEQ ID NO: 3671357 - RNA, 15 nt, Human
ggcacuucugccuga

SEQ ID NO: 3671358 - RNA, 15 nt, Human
ggcacuugccugggu

SEQ ID NO: 3671359 - RNA, 12 nt, Human
ggcacuuugggg

SEQ ID NO: 3671360 - RNA, 10 nt, Human
ggcagaaaga

SEQ ID NO: 3671361 - RNA, 18 nt, Human
ggcagaaagcagaggcug

SEQ ID NO: 3671362 - RNA, 22 nt, Human
ggcagaaaggaaaaccugaaga

SEQ ID NO: 3671363 - RNA, 17 nt, Human
ggcagaaauacagucuu

SEQ ID NO: 3671364 - RNA, 20 nt, Human
ggcagaacacuaaccugacc

SEQ ID NO: 3671365 - RNA, 20 nt, Human
ggcagaacagccgcuccugu

SEQ ID NO: 3671366 - RNA, 17 nt, Human
ggcagaagaauugaacc

SEQ ID NO: 3671367 - RNA, 12 nt, Human
ggcagaagacac

SEQ ID NO: 3671368 - RNA, 20 nt, Human
ggcagaagacaccagagcag

SEQ ID NO: 3671369 - RNA, 22 nt, Human
ggcagaagacaccagagcagau

SEQ ID NO: 3671370 - RNA, 17 nt, Human
ggcagaaggcaaaccca

SEQ ID NO: 3671371 - RNA, 16 nt, Human
ggcagaaggccaagag

SEQ ID NO: 3671372 - RNA, 21 nt, Human
ggcagaaguaggggaagaaua

SEQ ID NO: 3671373 - RNA, 20 nt, Human
ggcagacacagggacuugaa

SEQ ID NO: 3671374 - RNA, 17 nt, Human
ggcagacacggaucuga

SEQ ID NO: 3671375 - RNA, 21 nt, Human
ggcagacacggaucugagaau

SEQ ID NO: 3671376 - RNA, 13 nt, Human
ggcagacagcagc

SEQ ID NO: 3671377 - RNA, 16 nt, Human
ggcagacagcagcuca

SEQ ID NO: 3671378 - RNA, 14 nt, Human
ggccagccccacag

SEQ ID NO: 3671379 - RNA, 19 nt, Human
ggccagccccacagcccac

SEQ ID NO: 3671380 - RNA, 14 nt, Human
ggccagccccuccc

SEQ ID NO: 3671381 - RNA, 15 nt, Human
ggccagccccuccca

SEQ ID NO: 3671382 - RNA, 21 nt, Human
ggccagccccucccaccacag

SEQ ID NO: 3671383 - RNA, 19 nt, Human
ggccagccccuuagacaga

SEQ ID NO: 3671384 - RNA, 14 nt, Human
ggccagcccggcug

SEQ ID NO: 3671385 - RNA, 19 nt, Human
ggccagcccggcugguuuu

SEQ ID NO: 3671386 - RNA, 19 nt, Human
ggccagccgcucuccugcc

SEQ ID NO: 3671387 - RNA, 14 nt, Human
ggccagccucaccc

SEQ ID NO: 3671388 - RNA, 15 nt, Human
ggccagccucacccu

SEQ ID NO: 3671389 - RNA, 17 nt, Human
ggccagccucacccuug

SEQ ID NO: 3671390 - RNA, 16 nt, Human
ggccagccuccgagag

SEQ ID NO: 3671391 - RNA, 19 nt, Human
ggccagccuccgagaggga

SEQ ID NO: 3671392 - RNA, 20 nt, Human
ggccagccuccgagagggag

SEQ ID NO: 3671393 - RNA, 13 nt, Human
ggccagccuggau

SEQ ID NO: 3671394 - RNA, 12 nt, Human
ggccagccuggc

SEQ ID NO: 3671395 - RNA, 14 nt, Human
ggccagccuggccu

SEQ ID NO: 3671396 - RNA, 18 nt, Human
ggccagccuggccuccug

SEQ ID NO: 3671397 - RNA, 20 nt, Human
ggccagccuggccuccugcc

SEQ ID NO: 3671398 - RNA, 21 nt, Human
ggccagccuggccuccugccu

SEQ ID NO: 3671399 - RNA, 22 nt, Human
ggccagccuggggccuggcagg

SEQ ID NO: 3671400 - RNA, 11 nt, Human
ggccagcuccg

SEQ ID NO: 3671401 - RNA, 19 nt, Human
ggccagcugccccagccag

SEQ ID NO: 3671402 - RNA, 20 nt, Human
ggccagcugccccagccaga

SEQ ID NO: 3671403 - RNA, 15 nt, Human
ggccagcuggaggca

SEQ ID NO: 3671404 - RNA, 16 nt, Human
ggccagcuggcagcag

SEQ ID NO: 3671405 - RNA, 17 nt, Human
ggccagcuggcagcaga

SEQ ID NO: 3671406 - RNA, 18 nt, Human
ggccagcuggcagcagag

SEQ ID NO: 3671407 - RNA, 18 nt, Human
ggccagcugugguuuucu

SEQ ID NO: 3671408 - RNA, 20 nt, Human
ggccaggaaguagcacaggc

SEQ ID NO: 3671409 - RNA, 22 nt, Human
ggccaggaaguagcacaggcug

SEQ ID NO: 3671410 - RNA, 15 nt, Human
ggccaggacugagcc

SEQ ID NO: 3671411 - RNA, 21 nt, Human
ggccaggagcaggcacgggug

SEQ ID NO: 3671412 - RNA, 13 nt, Human
ggccaggagccuc

SEQ ID NO: 3671413 - RNA, 14 nt, Human
ggccaggccagagg

SEQ ID NO: 3671414 - RNA, 17 nt, Human
ggccaggccagcugccu

SEQ ID NO: 3671415 - RNA, 14 nt, Human
ggccaggcccucug

SEQ ID NO: 3671416 - RNA, 16 nt, Human
ggccaggcccucugcc

SEQ ID NO: 3671417 - RNA, 21 nt, Human
ggccaggcugaugggacagaa

SEQ ID NO: 3671418 - RNA, 18 nt, Human
ggccaggcugccuggccu

SEQ ID NO: 3671419 - RNA, 15 nt, Human
ggccaggcugcucuu

SEQ ID NO: 3671420 - RNA, 11 nt, Human
ggccaggcugg

SEQ ID NO: 3671421 - RNA, 18 nt, Human
ggccaggcugggucgccc

SEQ ID NO: 3671422 - RNA, 22 nt, Human
ggccaggcugggucgcccugga

SEQ ID NO: 3671423 - RNA, 16 nt, Human
ggccaggcuggucuca

SEQ ID NO: 3671424 - RNA, 17 nt, Human
ggccagggagaagcucc

SEQ ID NO: 3671425 - RNA, 18 nt, Human
ggccagggagaagcuccu

SEQ ID NO: 3671426 - RNA, 16 nt, Human
ggccagggcccugcag

SEQ ID NO: 3671427 - RNA, 19 nt, Human
ggccagggccuggaagaca

SEQ ID NO: 3671428 - RNA, 19 nt, Human
ggccagggcuauagcucag

SEQ ID NO: 3671429 - RNA, 11 nt, Human
ggccagggcug

SEQ ID NO: 3671430 - RNA, 16 nt, Human
ggccagggugagagcu

SEQ ID NO: 3671431 - RNA, 21 nt, Human
ggccaggucccagcuugagcu

SEQ ID NO: 3671432 - RNA, 19 nt, Human
ggccagguggccacuccag

SEQ ID NO: 3671433 - RNA, 23 nt, Human
ggccaggugggcgggcagcacag

SEQ ID NO: 3671434 - RNA, 16 nt, Human
ggccaguaccuuucca

SEQ ID NO: 3671435 - RNA, 17 nt, Human
ggccagucccugaggca

SEQ ID NO: 3671436 - RNA, 16 nt, Human
ggccaguccugccugg

SEQ ID NO: 3671437 - RNA, 18 nt, Human
ggccaguccugccuggcc

SEQ ID NO: 3671438 - RNA, 15 nt, Human
ggccagucugggcug

SEQ ID NO: 3671439 - RNA, 16 nt, Human
ggccagucugggcugc

SEQ ID NO: 3671440 - RNA, 13 nt, Human
ggccagucugugg

SEQ ID NO: 3671441 - RNA, 14 nt, Human
ggccagucugugga

SEQ ID NO: 3671442 - RNA, 18 nt, Human
ggccagucuguggaucag

SEQ ID NO: 3671443 - RNA, 16 nt, Human
ggccaguggggccugu

SEQ ID NO: 3671444 - RNA, 17 nt, Human
ggccaguggggccugug

SEQ ID NO: 3671445 - RNA, 16 nt, Human
ggccagugugacaagg

SEQ ID NO: 3671446 - RNA, 19 nt, Human
ggccagugugaucccaagu

SEQ ID NO: 3671447 - RNA, 16 nt, Human
ggccauacuggccucg

SEQ ID NO: 3671448 - RNA, 23 nt, Human
ggccauacuggccucgccuggcc

SEQ ID NO: 3671449 - RNA, 14 nt, Human
ggccaucccuguga

SEQ ID NO: 3671450 - RNA, 15 nt, Human
ucugagguuuuauuu

SEQ ID NO: 3671451 - RNA, 15 nt, Human
ucugagucagagcca

SEQ ID NO: 3671452 - RNA, 24 nt, Human
ucugagucccaggagcugcccaga

SEQ ID NO: 3671453 - RNA, 14 nt, Human
ucugagugcaaacu

SEQ ID NO: 3671454 - RNA, 22 nt, Human
ucugagugcaaacuucagaguu

SEQ ID NO: 3671455 - RNA, 22 nt, Human
ucugagugccuucuguggggac

SEQ ID NO: 3671456 - RNA, 23 nt, Human
ucugaguuguuaccccaagcgcc

SEQ ID NO: 3671457 - RNA, 15 nt, Human
ucugaguuuaccauu

SEQ ID NO: 3671458 - RNA, 15 nt, Human
ucugaguuucauucu

SEQ ID NO: 3671459 - RNA, 14 nt, Human
ucugaguuuugugu

SEQ ID NO: 3671460 - RNA, 20 nt, Human
ucugaguuuuguguuuguug

SEQ ID NO: 3671461 - RNA, 14 nt, Human
ucugauaacuagau

SEQ ID NO: 3671462 - RNA, 15 nt, Human
ucugauaaugaaaau

SEQ ID NO: 3671463 - RNA, 16 nt, Human
ucugauacagaaaagu

SEQ ID NO: 3671464 - RNA, 13 nt, Human
ucugauacuuuuu

SEQ ID NO: 3671465 - RNA, 19 nt, Human
ucugauacuuuuuugaaau

SEQ ID NO: 3671466 - RNA, 23 nt, Human
ucugauaggaaugugaaagcacg

SEQ ID NO: 3671467 - RNA, 22 nt, Human
ucugauaggguuugugacaggg

SEQ ID NO: 3671468 - RNA, 20 nt, Human
ucugauaucuauaguagaca

SEQ ID NO: 3671469 - RNA, 14 nt, Human
ucugauaugggacu

SEQ ID NO: 3671470 - RNA, 15 nt, Human
ucugauaugggacug

SEQ ID NO: 3671471 - RNA, 21 nt, Human
ucugauaugggacugagccug

SEQ ID NO: 3671472 - RNA, 14 nt, Human
ucugauauguuugu

SEQ ID NO: 3671473 - RNA, 20 nt, Human
ucugauauuccaugaaugua

SEQ ID NO: 3671474 - RNA, 22 nt, Human
ucugaucacugaaauaaaagcu

SEQ ID NO: 3671475 - RNA, 11 nt, Human
ucugauccagu

SEQ ID NO: 3671476 - RNA, 21 nt, Human
ucugaucccucuacagagcuu

SEQ ID NO: 3671477 - RNA, 21 nt, Human
ucugaucgugacgcugaauaa

SEQ ID NO: 3671478 - RNA, 21 nt, Human
ucugaucuccauggcuuccuc

SEQ ID NO: 3671479 - RNA, 22 nt, Human
ucugaugaaaaauugcugacug

SEQ ID NO: 3671480 - RNA, 15 nt, Human
ucugaugaaauguua

SEQ ID NO: 3671481 - RNA, 12 nt, Human
ucugaugaaucu

SEQ ID NO: 3671482 - RNA, 21 nt, Human
ucugauggccuuaauuuccuu

SEQ ID NO: 3671483 - RNA, 23 nt, Human
ucugauggccuuaauuuccuuuu

SEQ ID NO: 3671484 - RNA, 18 nt, Human
ucugauggcuucuccagg

SEQ ID NO: 3671485 - RNA, 19 nt, Human
ucugauuaaaaugcuuccu

SEQ ID NO: 3671486 - RNA, 16 nt, Human
ucugauuagcuuugug

SEQ ID NO: 3671487 - RNA, 21 nt, Human
ucugauuagcuuuguguuugg

SEQ ID NO: 3671488 - RNA, 19 nt, Human
ucugauucccugauuuaau

SEQ ID NO: 3671489 - RNA, 16 nt, Human
ucugauuggacauuuu

SEQ ID NO: 3671490 - RNA, 20 nt, Human
ucugauuggacauuuucuuc

SEQ ID NO: 3671491 - RNA, 23 nt, Human
ucugauuggacauuuucuucaga

SEQ ID NO: 3671492 - RNA, 13 nt, Human
ucugauuggcuca

SEQ ID NO: 3671493 - RNA, 17 nt, Human
ucugauuggcuuguaga

SEQ ID NO: 3671494 - RNA, 21 nt, Human
ucugauuguaacguugcugug

SEQ ID NO: 3671495 - RNA, 22 nt, Human
ucugauuguaacguugcugugg

SEQ ID NO: 3671496 - RNA, 13 nt, Human
ucugauuucaggg

SEQ ID NO: 3671497 - RNA, 22 nt, Human
ucugauuuguaacccacugaga

SEQ ID NO: 3671498 - RNA, 17 nt, Human
ucugauuuuauguaaaa

SEQ ID NO: 3671499 - RNA, 19 nt, Human
ucugcaaaaauauuuauaa

SEQ ID NO: 3671500 - RNA, 15 nt, Human
ucugcaaaaggagag

SEQ ID NO: 3671501 - RNA, 23 nt, Human
ucugcaaaaugaggaauguauau

SEQ ID NO: 3671502 - RNA, 24 nt, Human
ucugcaaacaccaacauguuggga

SEQ ID NO: 3671503 - RNA, 23 nt, Human
ucugcaaagcauguuuugcaugu

SEQ ID NO: 3671504 - RNA, 22 nt, Human
ucugcaacuuuaagcagcucuu

SEQ ID NO: 3671505 - RNA, 17 nt, Human
ucugcaaggucuuuggu

SEQ ID NO: 3671506 - RNA, 12 nt, Human
ucugcaagucag

SEQ ID NO: 3671507 - RNA, 14 nt, Human
ucugcaagucagag

SEQ ID NO: 3671508 - RNA, 16 nt, Human
ucugcaagucagagga

SEQ ID NO: 3671509 - RNA, 21 nt, Human
ucugcaaugggcacugggaug

SEQ ID NO: 3671510 - RNA, 16 nt, Human
ucugcaauucaaaagu

SEQ ID NO: 3671511 - RNA, 23 nt, Human
ucugcaauucaaaaguuccaaga

SEQ ID NO: 3671512 - RNA, 21 nt, Human
ucugcaauuccccucugcugc

SEQ ID NO: 3671513 - RNA, 22 nt, Human
ucugcaauuccccucugcugcu

SEQ ID NO: 3671514 - RNA, 15 nt, Human
ucugcaauuucuacu

SEQ ID NO: 3671515 - RNA, 14 nt, Human
ucugcacacagcac

SEQ ID NO: 3671516 - RNA, 15 nt, Human
ucugcacagauggau

SEQ ID NO: 3671517 - RNA, 17 nt, Human
ucugcacaugucuugua

SEQ ID NO: 3671518 - RNA, 15 nt, Human
ucugcacccaggggu

SEQ ID NO: 3671519 - RNA, 16 nt, Human
ucugcaccccccuggg

SEQ ID NO: 3671520 - RNA, 20 nt, Human
ucugcaccccuucucuccuc

SEQ ID NO: 3671521 - RNA, 14 nt, Human
ucugcacccuccac

SEQ ID NO: 3671522 - RNA, 20 nt, Human
ucugccuuaaaaccaaagag

SEQ ID NO: 3671523 - RNA, 13 nt, Human
ucugccuuagagg

SEQ ID NO: 3671524 - RNA, 15 nt, Human
ucugccuuagucuca

SEQ ID NO: 3671525 - RNA, 15 nt, Human
ucugccuuccuugcu

SEQ ID NO: 3671526 - RNA, 13 nt, Human
ucugccuugccuu

SEQ ID NO: 3671527 - RNA, 20 nt, Human
ucugccuuuauuguguuugu

SEQ ID NO: 3671528 - RNA, 20 nt, Human
ucugccuuugacauuuaauu

SEQ ID NO: 3671529 - RNA, 21 nt, Human
ucugccuuugccaggugacug

SEQ ID NO: 3671530 - RNA, 13 nt, Human
ucugccuuugcuc

SEQ ID NO: 3671531 - RNA, 21 nt, Human
ucugccuuuuguucauuucau

SEQ ID NO: 3671532 - RNA, 14 nt, Human
ucugcgaaguccua

SEQ ID NO: 3671533 - RNA, 13 nt, Human
ucugcgccucagg

SEQ ID NO: 3671534 - RNA, 14 nt, Human
ucugcggaccccag

SEQ ID NO: 3671535 - RNA, 15 nt, Human
ucugcggaccccagc

SEQ ID NO: 3671536 - RNA, 22 nt, Human
ucugcggaccccagcugugagc

SEQ ID NO: 3671537 - RNA, 15 nt, Human
ucugcgucuguguug

SEQ ID NO: 3671538 - RNA, 17 nt, Human
ucugcgugggucagaag

SEQ ID NO: 3671539 - RNA, 19 nt, Human
ucugcgugucaccugugcu

SEQ ID NO: 3671540 - RNA, 19 nt, Human
ucugcuaaauugauguuga

SEQ ID NO: 3671541 - RNA, 17 nt, Human
ucugcuaaauuucaaau

SEQ ID NO: 3671542 - RNA, 17 nt, Human
ucugcuaccucacuggg

SEQ ID NO: 3671543 - RNA, 21 nt, Human
ucugcuaccuugccccaaccc

SEQ ID NO: 3671544 - RNA, 14 nt, Human
ucugcuauauauaa

SEQ ID NO: 3671545 - RNA, 19 nt, Human
ucugcucacauaucuguca

SEQ ID NO: 3671546 - RNA, 20 nt, Human
ucugcucacauaucugucau

SEQ ID NO: 3671547 - RNA, 21 nt, Human
ucugcucaccgcccaucaggg

SEQ ID NO: 3671548 - RNA, 15 nt, Human
ucugcucagcagcua

SEQ ID NO: 3671549 - RNA, 16 nt, Human
ucugcucagccaagcu

SEQ ID NO: 3671550 - RNA, 17 nt, Human
ucugcucagccaagcuu

SEQ ID NO: 3671551 - RNA, 18 nt, Human
ucugcucagcccuggagg

SEQ ID NO: 3671552 - RNA, 19 nt, Human
ucugcucagcccuggaggu

SEQ ID NO: 3671553 - RNA, 14 nt, Human
ucugcucagcucug

SEQ ID NO: 3671554 - RNA, 22 nt, Human
ucugcucaguaauuugaggaca

SEQ ID NO: 3671555 - RNA, 14 nt, Human
ucugcucaucauuc

SEQ ID NO: 3671556 - RNA, 15 nt, Human
ucugcucauucuaau

SEQ ID NO: 3671557 - RNA, 12 nt, Human
ucugcuccacca

SEQ ID NO: 3671558 - RNA, 12 nt, Human
ucugcuccaccc

SEQ ID NO: 3671559 - RNA, 20 nt, Human
ucugcuccacccuuggccug

SEQ ID NO: 3671560 - RNA, 23 nt, Human
ucugcuccacccuuggccugucu

SEQ ID NO: 3671561 - RNA, 14 nt, Human
ucugcuccagacag

SEQ ID NO: 3671562 - RNA, 15 nt, Human
ucugcuccagcucug

SEQ ID NO: 3671563 - RNA, 12 nt, Human
ucugcucccaag

SEQ ID NO: 3671564 - RNA, 23 nt, Human
ucugcucccaaggggccugagca

SEQ ID NO: 3671565 - RNA, 16 nt, Human
ucugcucccccuuuuc

SEQ ID NO: 3671566 - RNA, 20 nt, Human
ucugcucccccuuuucccuc

SEQ ID NO: 3671567 - RNA, 22 nt, Human
ucugcuccccuaaagccucaaa

SEQ ID NO: 3671568 - RNA, 13 nt, Human
ucugcuccucucc

SEQ ID NO: 3671569 - RNA, 14 nt, Human
ucugcuccucucca

SEQ ID NO: 3671570 - RNA, 18 nt, Human
ucugcuccucuccaggca

SEQ ID NO: 3671571 - RNA, 18 nt, Human
ucugcuccucuccccagc

SEQ ID NO: 3671572 - RNA, 12 nt, Human
ucugcuccugga

SEQ ID NO: 3671573 - RNA, 21 nt, Human
ucugcuccuuuccccuuccuu

SEQ ID NO: 3671574 - RNA, 16 nt, Human
ucugcucgccuuagca

SEQ ID NO: 3671575 - RNA, 15 nt, Human
ucugcucggccgucu

SEQ ID NO: 3671576 - RNA, 18 nt, Human
ucugcucggccgucuuca

SEQ ID NO: 3671577 - RNA, 12 nt, Human
ucugcucuccuu

SEQ ID NO: 3671578 - RNA, 13 nt, Human
ucugcucuccuuc

SEQ ID NO: 3671579 - RNA, 15 nt, Human
ucugcucuccuuccu

SEQ ID NO: 3671580 - RNA, 20 nt, Human
ucugcucuccuuccuggagc

SEQ ID NO: 3671581 - RNA, 14 nt, Human
ucugcucugcccuu

SEQ ID NO: 3671582 - RNA, 17 nt, Human
ucugcucuuucucugcc

SEQ ID NO: 3671583 - RNA, 17 nt, Human
ucugcugacagacacag

SEQ ID NO: 3671584 - RNA, 20 nt, Human
ucugcugacagacacaggcc

SEQ ID NO: 3671585 - RNA, 18 nt, Human
ucugcugaccugcugacc

SEQ ID NO: 3671586 - RNA, 16 nt, Human
ucugcugaggguccag

SEQ ID NO: 3671587 - RNA, 22 nt, Human
ucugcugauccucccaggcuuc

SEQ ID NO: 3671588 - RNA, 13 nt, Human
ucugcugcccucc

SEQ ID NO: 3671589 - RNA, 14 nt, Human
ucugcugcccucca

SEQ ID NO: 3671590 - RNA, 18 nt, Human
ucugcugcccuccauccc

SEQ ID NO: 3671591 - RNA, 22 nt, Human
ucugcugccgccccacccagau

SEQ ID NO: 3671592 - RNA, 19 nt, Human
ucugcugccucccucugcu

SEQ ID NO: 3671593 - RNA, 23 nt, Human
ucugcugccugcccgcacagcag

SEQ ID NO: 3671594 - RNA, 14 nt, Human
ucugcugcuggcug

SEQ ID NO: 3671595 - RNA, 18 nt, Human
ucugcugcugucccuccc

SEQ ID NO: 3671596 - RNA, 13 nt, Human
ucugcuggaguuu

SEQ ID NO: 3671597 - RNA, 16 nt, Human
ucugcuggauaaaaug

SEQ ID NO: 3671598 - RNA, 22 nt, Human
ucugcuggauaaaaugagguuc

SEQ ID NO: 3671599 - RNA, 23 nt, Human
ucugcuggcaucaagagguggga

SEQ ID NO: 3671600 - RNA, 13 nt, Human
ucugcuggccucu

SEQ ID NO: 3671601 - RNA, 14 nt, Human
ucugcuggccugga

SEQ ID NO: 3671602 - RNA, 16 nt, Human
ucugcuggccuggauc

SEQ ID NO: 3671603 - RNA, 16 nt, Human
ucugcuggccuggccg

SEQ ID NO: 3671604 - RNA, 13 nt, Human
ucugcugggcugg

SEQ ID NO: 3671605 - RNA, 21 nt, Human
ucugcuggucacuucuucugu

SEQ ID NO: 3671606 - RNA, 15 nt, Human
ucugcuguuccagug

SEQ ID NO: 3671607 - RNA, 23 nt, Human
ucugcuuacaauucccugcuguc

SEQ ID NO: 3671608 - RNA, 17 nt, Human
ucugcuuagaaauaaca

SEQ ID NO: 3671609 - RNA, 22 nt, Human
ucugcuuagaaauaacagaaga

SEQ ID NO: 3671610 - RNA, 16 nt, Human
ucugcuuaggagagac

SEQ ID NO: 3671611 - RNA, 21 nt, Human
ucugcuuaugcaguuuuucag

SEQ ID NO: 3671612 - RNA, 18 nt, Human
ucugcuucaauaaaucuu

SEQ ID NO: 3671613 - RNA, 15 nt, Human
ucuaguuuacagaaa

SEQ ID NO: 3671614 - RNA, 21 nt, Human
ucuaguuuacagaaaaaucuu

SEQ ID NO: 3671615 - RNA, 14 nt, Human
ucuaguuucccaca

SEQ ID NO: 3671616 - RNA, 22 nt, Human
ucuaguuugauuaaauucuugc

SEQ ID NO: 3671617 - RNA, 18 nt, Human
ucuaguuugcauuccuga

SEQ ID NO: 3671618 - RNA, 14 nt, Human
ucuaguuuucaguu

SEQ ID NO: 3671619 - RNA, 16 nt, Human
ucuauaaaacucugca

SEQ ID NO: 3671620 - RNA, 17 nt, Human
ucuauaaaauagauaua

SEQ ID NO: 3671621 - RNA, 19 nt, Human
ucuauaaaauagauauaaa

SEQ ID NO: 3671622 - RNA, 15 nt, Human
ucuauaaagcauuua

SEQ ID NO: 3671623 - RNA, 16 nt, Human
ucuauaaagcauuuaa

SEQ ID NO: 3671624 - RNA, 22 nt, Human
ucuauaacaaaggauacuuauu

SEQ ID NO: 3671625 - RNA, 20 nt, Human
ucuauaaccaaaugaaauau

SEQ ID NO: 3671626 - RNA, 13 nt, Human
ucuauaaggccau

SEQ ID NO: 3671627 - RNA, 14 nt, Human
ucuauaaggccaua

SEQ ID NO: 3671628 - RNA, 22 nt, Human
ucuauaaggccauaaaacaggu

SEQ ID NO: 3671629 - RNA, 22 nt, Human
ucuauaauuuaaauauaugcua

SEQ ID NO: 3671630 - RNA, 13 nt, Human
ucuauaauuucca

SEQ ID NO: 3671631 - RNA, 14 nt, Human
ucuauaauuuuaca

SEQ ID NO: 3671632 - RNA, 16 nt, Human
ucuauacaaauauaaa

SEQ ID NO: 3671633 - RNA, 21 nt, Human
ucuauacaaauauaaaucuua

SEQ ID NO: 3671634 - RNA, 16 nt, Human
ucuauacaucucuccc

SEQ ID NO: 3671635 - RNA, 15 nt, Human
ucuauacccacccag

SEQ ID NO: 3671636 - RNA, 13 nt, Human
ucuauagaaagug

SEQ ID NO: 3671637 - RNA, 15 nt, Human
ucuauagaaaguguu

SEQ ID NO: 3671638 - RNA, 17 nt, Human
ucuauagaacugaauga

SEQ ID NO: 3671639 - RNA, 18 nt, Human
ucuauaggaacauaugaa

SEQ ID NO: 3671640 - RNA, 13 nt, Human
ucuauauauaauu

SEQ ID NO: 3671641 - RNA, 14 nt, Human
ucuauauauauaau

SEQ ID NO: 3671642 - RNA, 18 nt, Human
ucuauauuagaucaaaua

SEQ ID NO: 3671643 - RNA, 22 nt, Human
ucuauauuauugcccaugauau

SEQ ID NO: 3671644 - RNA, 19 nt, Human
ucuauauuuucauucuccu

SEQ ID NO: 3671645 - RNA, 20 nt, Human
ucuaucaaccccagacacug

SEQ ID NO: 3671646 - RNA, 14 nt, Human
ucuaucaagcccag

SEQ ID NO: 3671647 - RNA, 21 nt, Human
ucuaucaaguauuauaccuuu

SEQ ID NO: 3671648 - RNA, 14 nt, Human
ucuaucagagaaaa

SEQ ID NO: 3671649 - RNA, 15 nt, Human
ucuaucauuaaaguu

SEQ ID NO: 3671650 - RNA, 16 nt, Human
ucuaucauuaaaguuc

SEQ ID NO: 3671651 - RNA, 17 nt, Human
ucuaucauuuaauaaua

SEQ ID NO: 3671652 - RNA, 19 nt, Human
ucuaucauuuuuguacagu

SEQ ID NO: 3671653 - RNA, 23 nt, Human
ucuaucauuuuuguacaguuugc

SEQ ID NO: 3671654 - RNA, 15 nt, Human
ucuauccaaacaugu

SEQ ID NO: 3671655 - RNA, 22 nt, Human
ucuauccaaacauguauuuaug

SEQ ID NO: 3671656 - RNA, 14 nt, Human
ucuauccacagaga

SEQ ID NO: 3671657 - RNA, 15 nt, Human
ucuauccacagagag

SEQ ID NO: 3671658 - RNA, 16 nt, Human
ucuauccuacaacaag

SEQ ID NO: 3671659 - RNA, 14 nt, Human
ucuauccucuguaa

SEQ ID NO: 3671660 - RNA, 13 nt, Human
ucuaucuaaauga

SEQ ID NO: 3671661 - RNA, 15 nt, Human
ucuaucuauuugagg

SEQ ID NO: 3671662 - RNA, 14 nt, Human
ucuaucucacagca

SEQ ID NO: 3671663 - RNA, 18 nt, Human
ucuaucucacagcacacu

SEQ ID NO: 3671664 - RNA, 15 nt, Human
ucuaucugggccugg

SEQ ID NO: 3671665 - RNA, 16 nt, Human
ucuaucuuauauaguu

SEQ ID NO: 3671666 - RNA, 14 nt, Human
ucuaucuuccaaau

SEQ ID NO: 3671667 - RNA, 23 nt, Human
ucuaucuuccaaaugcaauuuga

SEQ ID NO: 3671668 - RNA, 12 nt, Human
ucucugcccauu

SEQ ID NO: 3671669 - RNA, 13 nt, Human
ggccuggccuggc

SEQ ID NO: 3671670 - RNA, 23 nt, Human
ggccuggcgggaugggccaccgc

SEQ ID NO: 3671671 - RNA, 14 nt, Human
ggccuggcucccuc

SEQ ID NO: 3671672 - RNA, 14 nt, Human
ggccuggcuccgcu

SEQ ID NO: 3671673 - RNA, 17 nt, Human
ggccuggcuggcugagg

SEQ ID NO: 3671674 - RNA, 11 nt, Human
ggccugggccc

SEQ ID NO: 3671675 - RNA, 23 nt, Human
ggccugggccguaucuccggcuc

SEQ ID NO: 3671676 - RNA, 18 nt, Human
ggccugggccuggcuccc

SEQ ID NO: 3671677 - RNA, 14 nt, Human
ggccugggcuccug

SEQ ID NO: 3671678 - RNA, 15 nt, Human
ggccuggggccugag

SEQ ID NO: 3671679 - RNA, 22 nt, Human
ggccugggggcugggcagagga

SEQ ID NO: 3671680 - RNA, 21 nt, Human
ggccuggggugacccggcacc

SEQ ID NO: 3671681 - RNA, 14 nt, Human
ggccugggucugug

SEQ ID NO: 3671682 - RNA, 19 nt, Human
ggccugggucugugucucu

SEQ ID NO: 3671683 - RNA, 21 nt, Human
ggccugggugcuggcugccca

SEQ ID NO: 3671684 - RNA, 21 nt, Human
ggccugguccaugauggaguc

SEQ ID NO: 3671685 - RNA, 19 nt, Human
ggccugguguucuguggga

SEQ ID NO: 3671686 - RNA, 19 nt, Human
ggccugguugaagaagaug

SEQ ID NO: 3671687 - RNA, 19 nt, Human
ggccuguacaaaagggaca

SEQ ID NO: 3671688 - RNA, 14 nt, Human
ggccuguacugccu

SEQ ID NO: 3671689 - RNA, 16 nt, Human
ggccuguacugccugc

SEQ ID NO: 3671690 - RNA, 18 nt, Human
ggccuguacugccugcuu

SEQ ID NO: 3671691 - RNA, 17 nt, Human
ggccuguagaguugcug

SEQ ID NO: 3671692 - RNA, 22 nt, Human
ggccuguccacaggcuucugag

SEQ ID NO: 3671693 - RNA, 14 nt, Human
ggccugucccuggc

SEQ ID NO: 3671694 - RNA, 19 nt, Human
ggccugucucauccccagg

SEQ ID NO: 3671695 - RNA, 19 nt, Human
ggccuguggaaugagugug

SEQ ID NO: 3671696 - RNA, 15 nt, Human
ggccuguggcugucg

SEQ ID NO: 3671697 - RNA, 20 nt, Human
ggccugugggagccugcaaa

SEQ ID NO: 3671698 - RNA, 22 nt, Human
ggccugugucccaugacccacc

SEQ ID NO: 3671699 - RNA, 22 nt, Human
ggccugugugugaaaggaagcu

SEQ ID NO: 3671700 - RNA, 19 nt, Human
ggccuguguucuuccuggc

SEQ ID NO: 3671701 - RNA, 17 nt, Human
ggccuguuuggccucuc

SEQ ID NO: 3671702 - RNA, 18 nt, Human
ggccuguuuggccucucu

SEQ ID NO: 3671703 - RNA, 21 nt, Human
ggccuguuuuagaagguucuc

SEQ ID NO: 3671704 - RNA, 13 nt, Human
ggccuuaauuucc

SEQ ID NO: 3671705 - RNA, 15 nt, Human
ggccuuaauuuccuu

SEQ ID NO: 3671706 - RNA, 16 nt, Human
ggccuuagugggccag

SEQ ID NO: 3671707 - RNA, 16 nt, Human
ggccuuccccagccuc

SEQ ID NO: 3671708 - RNA, 22 nt, Human
ggccuucccuguuuucccccca

SEQ ID NO: 3671709 - RNA, 13 nt, Human
ggccuuccugccc

SEQ ID NO: 3671710 - RNA, 22 nt, Human
ggccuucggccuccauccugag

SEQ ID NO: 3671711 - RNA, 16 nt, Human
ggccuucucugaagga

SEQ ID NO: 3671712 - RNA, 23 nt, Human
ggccuugacaucaguuccuuugu

SEQ ID NO: 3671713 - RNA, 18 nt, Human
ggccuugcggcuccucag

SEQ ID NO: 3671714 - RNA, 19 nt, Human
ggccuugcggcuccucagg

SEQ ID NO: 3671715 - RNA, 18 nt, Human
ggccuuggccuggagcac

SEQ ID NO: 3671716 - RNA, 15 nt, Human
ggccuugugguccaa

SEQ ID NO: 3671717 - RNA, 18 nt, Human
ggccuugugguccaaaua

SEQ ID NO: 3671718 - RNA, 15 nt, Human
ggccuuguucucucu

SEQ ID NO: 3671719 - RNA, 13 nt, Human
ggccuuguucugu

SEQ ID NO: 3671720 - RNA, 18 nt, Human
ggccuuguucugucacca

SEQ ID NO: 3671721 - RNA, 17 nt, Human
ggccuuucccuaagcca

SEQ ID NO: 3671722 - RNA, 13 nt, Human
ggccuuuccucuc

SEQ ID NO: 3671723 - RNA, 19 nt, Human
ggccuuugagcccacaaag

SEQ ID NO: 3671724 - RNA, 23 nt, Human
ggccuuugagcccacaaagccuu

SEQ ID NO: 3671725 - RNA, 13 nt, Human
ggccuuugagcuc

SEQ ID NO: 3671726 - RNA, 21 nt, Human
ggccuuuuaacauuuuguucu

SEQ ID NO: 3671727 - RNA, 18 nt, Human
ggcgaaaucccugcucac

SEQ ID NO: 3671728 - RNA, 22 nt, Human
ggcgaaaucccugcucacugca

SEQ ID NO: 3671729 - RNA, 15 nt, Human
ggcgaaucauuuguu

SEQ ID NO: 3671730 - RNA, 13 nt, Human
ggcgaaucucaaa

SEQ ID NO: 3671731 - RNA, 18 nt, Human
ggcgacaguuuuccuucu

SEQ ID NO: 3671732 - RNA, 16 nt, Human
ggcgaccgcccuccgc

SEQ ID NO: 3671733 - RNA, 22 nt, Human
ggcgagagucuggcccuagacu

SEQ ID NO: 3671734 - RNA, 18 nt, Human
ggcgaggacgacuucugc

SEQ ID NO: 3671735 - RNA, 11 nt, Human
ggcgaggcaga

SEQ ID NO: 3671736 - RNA, 15 nt, Human
ggcgaggcagaggac

SEQ ID NO: 3671737 - RNA, 19 nt, Human
ggcgaggcagaggacagau

SEQ ID NO: 3671738 - RNA, 15 nt, Human
ggcgagucacugccu

SEQ ID NO: 3671739 - RNA, 15 nt, Human
ggcgagugccaggac

SEQ ID NO: 3671740 - RNA, 18 nt, Human
ggcgauccaccugucuca

SEQ ID NO: 3671741 - RNA, 22 nt, Human
ggcgauccaccugucucagccu

SEQ ID NO: 3671742 - RNA, 14 nt, Human
ggcgcaagccugua

SEQ ID NO: 3671743 - RNA, 17 nt, Human
ggcgcacccuccccucc

SEQ ID NO: 3671744 - RNA, 18 nt, Human
ggcgcacccuccccuccc

SEQ ID NO: 3671745 - RNA, 17 nt, Human
ggcgcagccaaggccga

SEQ ID NO: 3671746 - RNA, 14 nt, Human
ggcgcaggccguga

SEQ ID NO: 3671747 - RNA, 17 nt, Human
ggcgccaccagcucugc

SEQ ID NO: 3671748 - RNA, 13 nt, Human
ggcgcccaccucc

SEQ ID NO: 3671749 - RNA, 18 nt, Human
ggcgccccaacccgugga

SEQ ID NO: 3671750 - RNA, 15 nt, Human
ggcgcccccagugug

SEQ ID NO: 3671751 - RNA, 20 nt, Human
ggcgccccgcaccuguacag

SEQ ID NO: 3671752 - RNA, 21 nt, Human
ggcgccccgcaccuguacagu

SEQ ID NO: 3671753 - RNA, 15 nt, Human
ggcgccccugccacc

SEQ ID NO: 3671754 - RNA, 16 nt, Human
ggcgcccucuguccug

SEQ ID NO: 3671755 - RNA, 17 nt, Human
ggcgcccucuguccuga

SEQ ID NO: 3671756 - RNA, 14 nt, Human
ggcgcccuggaagc

SEQ ID NO: 3671757 - RNA, 18 nt, Human
ggcgcccuuggcuucugu

SEQ ID NO: 3671758 - RNA, 20 nt, Human
ggcgccgcaaaccacacugg

SEQ ID NO: 3671759 - RNA, 21 nt, Human
ggcgccgucuccaggggcugc

SEQ ID NO: 3671760 - RNA, 17 nt, Human
ggcgccgugcugggcag

SEQ ID NO: 3671761 - RNA, 13 nt, Human
ggcgccucugcaa

SEQ ID NO: 3671762 - RNA, 22 nt, Human
ggcgcgcaccuguaaucccagc

SEQ ID NO: 3671763 - RNA, 19 nt, Human
ggcgcgguggcucacgccu

SEQ ID NO: 3671764 - RNA, 21 nt, Human
ggcgcuagaggccauggaggc

SEQ ID NO: 3671765 - RNA, 19 nt, Human
ggcgcuagcacagcucccu

SEQ ID NO: 3671766 - RNA, 23 nt, Human
ggcgcucgaaguugaucucccca

SEQ ID NO: 3671767 - RNA, 17 nt, Human
ggcgcugccccuggcag

SEQ ID NO: 3671768 - RNA, 18 nt, Human
ggcgcugccccuggcagc

SEQ ID NO: 3671769 - RNA, 16 nt, Human
ggcgcuggcccagccg

SEQ ID NO: 3671770 - RNA, 22 nt, Human
ggcggaaagccuguaagccugc

SEQ ID NO: 3671771 - RNA, 19 nt, Human
ggcggagaguacagugagc

SEQ ID NO: 3671772 - RNA, 20 nt, Human
ggcggagaguacagugagcc

SEQ ID NO: 3671773 - RNA, 13 nt, Human
ggcggagcuggcc

SEQ ID NO: 3671774 - RNA, 15 nt, Human
ggcggagcuggcccc

SEQ ID NO: 3671775 - RNA, 20 nt, Human
ggcggagcuggccccgccgc

SEQ ID NO: 3671776 - RNA, 12 nt, Human
ggcggcagcagc

SEQ ID NO: 3671777 - RNA, 11 nt, Human
ggcggcgccgg

SEQ ID NO: 3671778 - RNA, 20 nt, Human
ggcggcuggggucccagcag

SEQ ID NO: 3671779 - RNA, 18 nt, Human
ggcgggacagugcugcag

SEQ ID NO: 3671780 - RNA, 16 nt, Human
ggcgggagcaucucuu

SEQ ID NO: 3671781 - RNA, 15 nt, Human
ggcgggcagcacagc

SEQ ID NO: 3671782 - RNA, 17 nt, Human
ggcgggccaaggacugc

SEQ ID NO: 3671783 - RNA, 20 nt, Human
ggcgggcgaaucacgagguc

SEQ ID NO: 3671784 - RNA, 14 nt, Human
ggcgggcggucagg

SEQ ID NO: 3671785 - RNA, 16 nt, Human
ggcggggaggaggaaa

SEQ ID NO: 3671786 - RNA, 12 nt, Human
ggcggggguggc

SEQ ID NO: 3671787 - RNA, 14 nt, Human
ggcggggguggcgg

SEQ ID NO: 3671788 - RNA, 22 nt, Human
ggcgggugccuguaaucccagc

SEQ ID NO: 3671789 - RNA, 20 nt, Human
ggcggguggaucacgagguc

SEQ ID NO: 3671790 - RNA, 16 nt, Human
ggcgggugggggugga

SEQ ID NO: 3671791 - RNA, 14 nt, Human
ggcggucccagcuc

SEQ ID NO: 3671792 - RNA, 14 nt, Human
ggcgguggacuuga

SEQ ID NO: 3671793 - RNA, 22 nt, Human
ggcggugggcacccacccuggg

SEQ ID NO: 3671794 - RNA, 14 nt, Human
ggcguaaguacaga

SEQ ID NO: 3671795 - RNA, 21 nt, Human
ggcguaaguacagagaagcca

SEQ ID NO: 3671796 - RNA, 14 nt, Human
ggcguacaggcugg

SEQ ID NO: 3671797 - RNA, 17 nt, Human
ggcguaggcuacagaga

SEQ ID NO: 3671798 - RNA, 22 nt, Human
ggcguaggcuacagagaagccu

SEQ ID NO: 3671799 - RNA, 16 nt, Human
ggcgucagccuccagc

SEQ ID NO: 3671800 - RNA, 19 nt, Human
ggcgucagccuccagccuc

SEQ ID NO: 3671801 - RNA, 22 nt, Human
ggcgucagccuccagccucugu

SEQ ID NO: 3671802 - RNA, 15 nt, Human
ggcgugaacccagga

SEQ ID NO: 3671803 - RNA, 15 nt, Human
ggcgugacucaccca

SEQ ID NO: 3671804 - RNA, 16 nt, Human
ggcgugagaccugccc

SEQ ID NO: 3671805 - RNA, 20 nt, Human
ggcguggagagcccggcgcc

SEQ ID NO: 3671806 - RNA, 16 nt, Human
ggcguggagccaggga

SEQ ID NO: 3671807 - RNA, 15 nt, Human
ggcguggagggaggc

SEQ ID NO: 3671808 - RNA, 16 nt, Human
ggcguggauuaaacuu

SEQ ID NO: 3671809 - RNA, 16 nt, Human
ggcguggcaaauauaa

SEQ ID NO: 3671810 - RNA, 15 nt, Human
ggcguggucacugcu

SEQ ID NO: 3671811 - RNA, 18 nt, Human
ggcguggucacugcuguc

SEQ ID NO: 3671812 - RNA, 16 nt, Human
ggcgugguggcgggca

SEQ ID NO: 3671813 - RNA, 20 nt, Human
ucuugccccaacccccagca

SEQ ID NO: 3671814 - RNA, 17 nt, Human
ucuugcccgcucaggcu

SEQ ID NO: 3671815 - RNA, 15 nt, Human
ucuugcccuucccug

SEQ ID NO: 3671816 - RNA, 20 nt, Human
ucuugcccuucccugucccu

SEQ ID NO: 3671817 - RNA, 20 nt, Human
ucuugccuauauuuuccuga

SEQ ID NO: 3671818 - RNA, 18 nt, Human
ucuugccucagcuucccc

SEQ ID NO: 3671819 - RNA, 19 nt, Human
ucuugccucagcuucccca

SEQ ID NO: 3671820 - RNA, 14 nt, Human
ucuugccuccaggu

SEQ ID NO: 3671821 - RNA, 19 nt, Human
ucuugccuccaggugcaga

SEQ ID NO: 3671822 - RNA, 15 nt, Human
ucuugccucugugcu

SEQ ID NO: 3671823 - RNA, 16 nt, Human
ucuugccucugugcug

SEQ ID NO: 3671824 - RNA, 21 nt, Human
ucuugccugaacuccugccau

SEQ ID NO: 3671825 - RNA, 16 nt, Human
ucuugccuuacacaaa

SEQ ID NO: 3671826 - RNA, 17 nt, Human
ucuugccuuuuucauua

SEQ ID NO: 3671827 - RNA, 19 nt, Human
ucuugcgaauccaagcucc

SEQ ID NO: 3671828 - RNA, 15 nt, Human
ucuugcuaaucagug

SEQ ID NO: 3671829 - RNA, 17 nt, Human
ucuugcuaaucaguguc

SEQ ID NO: 3671830 - RNA, 21 nt, Human
ucuugcuaucggggaagccag

SEQ ID NO: 3671831 - RNA, 14 nt, Human
ucuugcucccuuca

SEQ ID NO: 3671832 - RNA, 15 nt, Human
ucuugcucucuuuua

SEQ ID NO: 3671833 - RNA, 13 nt, Human
ucuugcucugcug

SEQ ID NO: 3671834 - RNA, 23 nt, Human
ucuugcucugcugacagacacag

SEQ ID NO: 3671835 - RNA, 22 nt, Human
ggcuaaggcguggagcugccug

SEQ ID NO: 3671836 - RNA, 20 nt, Human
ggcuaagugauccucccacc

SEQ ID NO: 3671837 - RNA, 13 nt, Human
ggcuaauuuaaca

SEQ ID NO: 3671838 - RNA, 18 nt, Human
ggcuaauuuuuguuuugu

SEQ ID NO: 3671839 - RNA, 15 nt, Human
ggcuacacagggaug

SEQ ID NO: 3671840 - RNA, 11 nt, Human
ggcuacagaga

SEQ ID NO: 3671841 - RNA, 14 nt, Human
ggcuacagagaagc

SEQ ID NO: 3671842 - RNA, 16 nt, Human
ggcuacagagaagccu

SEQ ID NO: 3671843 - RNA, 12 nt, Human
ggcuacccuccc

SEQ ID NO: 3671844 - RNA, 13 nt, Human
ggcuacgccucuu

SEQ ID NO: 3671845 - RNA, 13 nt, Human
ggcuacucugugc

SEQ ID NO: 3671846 - RNA, 15 nt, Human
ggcuacucugugcca

SEQ ID NO: 3671847 - RNA, 18 nt, Human
ggcuacucugugccagag

SEQ ID NO: 3671848 - RNA, 22 nt, Human
ggcuacucugugccagagccug

SEQ ID NO: 3671849 - RNA, 23 nt, Human
ggcuacugcagcuuuacaugcaa

SEQ ID NO: 3671850 - RNA, 23 nt, Human
ggcuacuucggggcugggaaguc

SEQ ID NO: 3671851 - RNA, 15 nt, Human
ggcuacuugcuuuga

SEQ ID NO: 3671852 - RNA, 15 nt, Human
ggcuagaacuggaga

SEQ ID NO: 3671853 - RNA, 16 nt, Human
ggcuagaggccagccc

SEQ ID NO: 3671854 - RNA, 16 nt, Human
ggcuagagguucaaag

SEQ ID NO: 3671855 - RNA, 13 nt, Human
ggcuagaguccuc

SEQ ID NO: 3671856 - RNA, 18 nt, Human
ggcuagaguccucacucc

SEQ ID NO: 3671857 - RNA, 20 nt, Human
ggcuagaguccucacuccca

SEQ ID NO: 3671858 - RNA, 15 nt, Human
ggcuagcuggagccu

SEQ ID NO: 3671859 - RNA, 22 nt, Human
ggcuagggagacgccaugugau

SEQ ID NO: 3671860 - RNA, 16 nt, Human
ggcuagucaagcuccu

SEQ ID NO: 3671861 - RNA, 17 nt, Human
ggcuagucaagcuccuc

SEQ ID NO: 3671862 - RNA, 14 nt, Human
ggcuagucagagag

SEQ ID NO: 3671863 - RNA, 16 nt, Human
ggcuaguugggcuucc

SEQ ID NO: 3671864 - RNA, 12 nt, Human
ggcuaugcauuu

SEQ ID NO: 3671865 - RNA, 17 nt, Human
ggcuauggacacagggu

SEQ ID NO: 3671866 - RNA, 21 nt, Human
ggcuauggggauagaugugug

SEQ ID NO: 3671867 - RNA, 17 nt, Human
ggcuauguauaaaauac

SEQ ID NO: 3671868 - RNA, 15 nt, Human
ggcuauuuaccaggg

SEQ ID NO: 3671869 - RNA, 16 nt, Human
ggcuauuuguaaaucu

SEQ ID NO: 3671870 - RNA, 14 nt, Human
ggcucaagcagucu

SEQ ID NO: 3671871 - RNA, 19 nt, Human
ggcucaagcgauucuccug

SEQ ID NO: 3671872 - RNA, 16 nt, Human
ggcucacaccuguaau

SEQ ID NO: 3671873 - RNA, 12 nt, Human
ggcucacacuga

SEQ ID NO: 3671874 - RNA, 16 nt, Human
ggcucacccaguccug

SEQ ID NO: 3671875 - RNA, 21 nt, Human
ggcucacgccuaugaucccag

SEQ ID NO: 3671876 - RNA, 17 nt, Human
ggcucacgccuguaauc

SEQ ID NO: 3671877 - RNA, 13 nt, Human
ggcucacgugugu

SEQ ID NO: 3671878 - RNA, 22 nt, Human
ggcucacucagcacuuggcccu

SEQ ID NO: 3671879 - RNA, 16 nt, Human
ggcucacugcagccuc

SEQ ID NO: 3671880 - RNA, 13 nt, Human
ggcucacugccag

SEQ ID NO: 3671881 - RNA, 16 nt, Human
ggcucacugccaggcc

SEQ ID NO: 3671882 - RNA, 20 nt, Human
ggcucacugccaggccagcc

SEQ ID NO: 3671883 - RNA, 21 nt, Human
ggcucacugccaggccagccu

SEQ ID NO: 3671884 - RNA, 17 nt, Human
ggcucacuggcuuugaa

SEQ ID NO: 3671885 - RNA, 13 nt, Human
ggcucagagaugu

SEQ ID NO: 3671886 - RNA, 18 nt, Human
ggcucagagaugugcacc

SEQ ID NO: 3671887 - RNA, 18 nt, Human
ggcucagagccggggugg

SEQ ID NO: 3671888 - RNA, 15 nt, Human
ggcucagagggggac

SEQ ID NO: 3671889 - RNA, 17 nt, Human
ggcucagaugaaaugca

SEQ ID NO: 3671890 - RNA, 13 nt, Human
ggcucagcaaggc

SEQ ID NO: 3671891 - RNA, 15 nt, Human
ggcucagcaaggcca

SEQ ID NO: 3671892 - RNA, 19 nt, Human
ggcucagcaaggccaccuc

SEQ ID NO: 3671893 - RNA, 20 nt, Human
ggcucagcucggggagccuu

SEQ ID NO: 3671894 - RNA, 16 nt, Human
ggcucaggucacauaa

SEQ ID NO: 3671895 - RNA, 20 nt, Human
ggcucagguggggucacucu

SEQ ID NO: 3671896 - RNA, 18 nt, Human
ggcucagugaaguugcug

SEQ ID NO: 3671897 - RNA, 19 nt, Human
ggcucagugaaguugcugc

SEQ ID NO: 3671898 - RNA, 18 nt, Human
ggcucagugcaaccucug

SEQ ID NO: 3671899 - RNA, 21 nt, Human
ggcucauauuccugcagccug

SEQ ID NO: 3671900 - RNA, 22 nt, Human
ggcucauauuccugcagccugg

SEQ ID NO: 3671901 - RNA, 22 nt, Human
ggcuccacacacacaaaaaaag

SEQ ID NO: 3671902 - RNA, 16 nt, Human
ggcuccacuuggucug

SEQ ID NO: 3671903 - RNA, 17 nt, Human
ggcuccagaugcagggc

SEQ ID NO: 3671904 - RNA, 13 nt, Human
ggcuccaggagca

SEQ ID NO: 3671905 - RNA, 18 nt, Human
ggcuccaggccagggggc

SEQ ID NO: 3671906 - RNA, 14 nt, Human
ggcuccaggcuccu

SEQ ID NO: 3671907 - RNA, 15 nt, Human
ggcuccaggcuccuu

SEQ ID NO: 3671908 - RNA, 15 nt, Human
ggcuccagucugcug

SEQ ID NO: 3671909 - RNA, 22 nt, Human
ggcuccagucugcugcccucca

SEQ ID NO: 3671910 - RNA, 13 nt, Human
ggcuccaugccag

SEQ ID NO: 3671911 - RNA, 14 nt, Human
ggcuccaugccagc

SEQ ID NO: 3671912 - RNA, 11 nt, Human
ggcuccaugcu

SEQ ID NO: 3671913 - RNA, 15 nt, Human
ggcucccacagagac

SEQ ID NO: 3671914 - RNA, 18 nt, Human
ggcucccacaggcccuuc

SEQ ID NO: 3671915 - RNA, 19 nt, Human
ggcucccacaggcccuucc

SEQ ID NO: 3671916 - RNA, 21 nt, Human
ggcucccacaggcccuuccuc

SEQ ID NO: 3671917 - RNA, 17 nt, Human
ggcucccagccaggccc

SEQ ID NO: 3671918 - RNA, 18 nt, Human
ggcucccagccaggcccu

SEQ ID NO: 3671919 - RNA, 22 nt, Human
ggcucccaggagccugcccagc

SEQ ID NO: 3671920 - RNA, 17 nt, Human
ggcucccagggacaccu

SEQ ID NO: 3671921 - RNA, 13 nt, Human
ggcucccaggggc

SEQ ID NO: 3671922 - RNA, 20 nt, Human
ggcucccaggggucucccug

SEQ ID NO: 3671923 - RNA, 19 nt, Human
ggcucccaugaccauacug

SEQ ID NO: 3671924 - RNA, 12 nt, Human
ggcuccccucua

SEQ ID NO: 3671925 - RNA, 15 nt, Human
ggcuccccucuuccu

SEQ ID NO: 3671926 - RNA, 17 nt, Human
ggcuccccucuuccucu

SEQ ID NO: 3671927 - RNA, 13 nt, Human
ggcuccccugggg

SEQ ID NO: 3671928 - RNA, 17 nt, Human
ggcucccggguccuugg

SEQ ID NO: 3671929 - RNA, 16 nt, Human
ggcucccguggccugu

SEQ ID NO: 3671930 - RNA, 22 nt, Human
ggcucccguguaucuggacacu

SEQ ID NO: 3671931 - RNA, 17 nt, Human
ggcucccuccgccccca

SEQ ID NO: 3671932 - RNA, 16 nt, Human
ggcucccuccuccagg

SEQ ID NO: 3671933 - RNA, 17 nt, Human
ggcucccugacugggag

SEQ ID NO: 3671934 - RNA, 16 nt, Human
ggcucccuggggggag

SEQ ID NO: 3671935 - RNA, 22 nt, Human
ggcuccgacuugugcacaggca

SEQ ID NO: 3671936 - RNA, 22 nt, Human
ggcuccgcccuuagucccccaa

SEQ ID NO: 3671937 - RNA, 17 nt, Human
ggcuccggccucugccu

SEQ ID NO: 3671938 - RNA, 22 nt, Human
ggcuccgucaguaucaggccug

SEQ ID NO: 3671939 - RNA, 16 nt, Human
ggcuccgugugggaga

SEQ ID NO: 3671940 - RNA, 23 nt, Human
ggcuccuccaggguggcagcaac

SEQ ID NO: 3671941 - RNA, 13 nt, Human
ggcuccucccagc

SEQ ID NO: 3671942 - RNA, 14 nt, Human
ggcuccucccuccc

SEQ ID NO: 3671943 - RNA, 11 nt, Human
ggcuccugauc

SEQ ID NO: 3671944 - RNA, 12 nt, Human
ggcuccugccac

SEQ ID NO: 3671945 - RNA, 12 nt, Human
ggcuccugcccc

SEQ ID NO: 3671946 - RNA, 13 nt, Human
ggcuccugccccc

SEQ ID NO: 3671947 - RNA, 12 nt, Human
ggcuccugcugc

SEQ ID NO: 3671948 - RNA, 14 nt, Human
ggcuccugcugcac

SEQ ID NO: 3671949 - RNA, 15 nt, Human
ggcuccugcugcacc

SEQ ID NO: 3671950 - RNA, 22 nt, Human
ggcuccugcugcaccaacccag

SEQ ID NO: 3671951 - RNA, 11 nt, Human
ggcuccuggac

SEQ ID NO: 3671952 - RNA, 12 nt, Human
ggcuccuggacc

SEQ ID NO: 3671953 - RNA, 12 nt, Human
ggcuccuggacu

SEQ ID NO: 3671954 - RNA, 23 nt, Human
ggcuccuggucaccuaggaagcc

SEQ ID NO: 3671955 - RNA, 19 nt, Human
ggcuccuugugccagagaa

SEQ ID NO: 3671956 - RNA, 17 nt, Human
ggcuccuugugggccug

SEQ ID NO: 3671957 - RNA, 19 nt, Human
ggcuccuugugggccuggg

SEQ ID NO: 3671958 - RNA, 17 nt, Human
ggcuccuuucuccagcc

SEQ ID NO: 3671959 - RNA, 23 nt, Human
gggaaaucgagugccgcaucuca

SEQ ID NO: 3671960 - RNA, 18 nt, Human
gggaaaugcugauuuaaa

SEQ ID NO: 3671961 - RNA, 23 nt, Human
gggaaauguuuuguaaacauuua

SEQ ID NO: 3671962 - RNA, 15 nt, Human
gggaacacuggggac

SEQ ID NO: 3671963 - RNA, 16 nt, Human
gggaacagacaggaga

SEQ ID NO: 3671964 - RNA, 13 nt, Human
gggaacagccacu

SEQ ID NO: 3671965 - RNA, 20 nt, Human
gggaacaguguuucccauaa

SEQ ID NO: 3671966 - RNA, 16 nt, Human
gggaacauggggagga

SEQ ID NO: 3671967 - RNA, 22 nt, Human
gggaacauuucuguaaauacca

SEQ ID NO: 3671968 - RNA, 17 nt, Human
gggaaccccuuucccac

SEQ ID NO: 3671969 - RNA, 19 nt, Human
gggaacccugcccacuccc

SEQ ID NO: 3671970 - RNA, 11 nt, Human
gggaaccuccc

SEQ ID NO: 3671971 - RNA, 14 nt, Human
gggaaccucccaga

SEQ ID NO: 3671972 - RNA, 16 nt, Human
gggaaccuccccagcc

SEQ ID NO: 3671973 - RNA, 20 nt, Human
gggaaccuccccagccugcg

SEQ ID NO: 3671974 - RNA, 13 nt, Human
gggaaccuggaac

SEQ ID NO: 3671975 - RNA, 14 nt, Human
gggaaccugugucc

SEQ ID NO: 3671976 - RNA, 15 nt, Human
gggaacucccaagaa

SEQ ID NO: 3671977 - RNA, 14 nt, Human
gggaacucugacaa

SEQ ID NO: 3671978 - RNA, 21 nt, Human
gggaacucugacaagggcuga

SEQ ID NO: 3671979 - RNA, 12 nt, Human
gggaacuggcca

SEQ ID NO: 3671980 - RNA, 16 nt, Human
gggaacuggccaagcu

SEQ ID NO: 3671981 - RNA, 21 nt, Human
gggaagaaacacuuucucuuc

SEQ ID NO: 3671982 - RNA, 14 nt, Human
gggaagacaguggc

SEQ ID NO: 3671983 - RNA, 16 nt, Human
gggaagacaguggccc

SEQ ID NO: 3671984 - RNA, 22 nt, Human
gggaagacuccuagcuguccuu

SEQ ID NO: 3671985 - RNA, 18 nt, Human
gggaagagacagcccagg

SEQ ID NO: 3671986 - RNA, 20 nt, Human
gggaagagcacagcccuccc

SEQ ID NO: 3671987 - RNA, 16 nt, Human
gggaagagcuuagaaa

SEQ ID NO: 3671988 - RNA, 12 nt, Human
gggaagaggccu

SEQ ID NO: 3671989 - RNA, 22 nt, Human
gggaagcagaauagcaaggugc

SEQ ID NO: 3671990 - RNA, 13 nt, Human
gggaagcagcagc

SEQ ID NO: 3671991 - RNA, 12 nt, Human
gggaagcccugg

SEQ ID NO: 3671992 - RNA, 23 nt, Human
gggaagcggagguugcagggagc

SEQ ID NO: 3671993 - RNA, 16 nt, Human
gggaagcuacagguua

SEQ ID NO: 3671994 - RNA, 20 nt, Human
gggaagcuucugucuccagc

SEQ ID NO: 3671995 - RNA, 21 nt, Human
gggaagcuucugucuccagcu

SEQ ID NO: 3671996 - RNA, 20 nt, Human
gggaagcuucuuaaaugaga

SEQ ID NO: 3671997 - RNA, 22 nt, Human
gggaaggaagaggaagagugca

SEQ ID NO: 3671998 - RNA, 18 nt, Human
gggaaggacuuggcgcgc

SEQ ID NO: 3671999 - RNA, 20 nt, Human
gggaaggaggguuagggagg

SEQ ID NO: 3672000 - RNA, 22 nt, Human
gggaaggauucugcuggccucu

SEQ ID NO: 3672001 - RNA, 13 nt, Human
gggaaggccugac

SEQ ID NO: 3672002 - RNA, 21 nt, Human
gggaaggcuacuucggggcug

SEQ ID NO: 3672003 - RNA, 13 nt, Human
gggaagggagagc

SEQ ID NO: 3672004 - RNA, 16 nt, Human
gggaagggagccaagg

SEQ ID NO: 3672005 - RNA, 12 nt, Human
gggaagggccag

SEQ ID NO: 3672006 - RNA, 18 nt, Human
gggaaggggacccccgcc

SEQ ID NO: 3672007 - RNA, 14 nt, Human
gggaaggggcggug

SEQ ID NO: 3672008 - RNA, 15 nt, Human
gggaaguaguccuug

SEQ ID NO: 3672009 - RNA, 18 nt, Human
gggaaguaguuaucaugu

SEQ ID NO: 3672010 - RNA, 22 nt, Human
gggaaguaguuaucauguuagu

SEQ ID NO: 3672011 - RNA, 19 nt, Human
gggaagucccugggaggcc

SEQ ID NO: 3672012 - RNA, 21 nt, Human
gggaagugacaaggccccaga

SEQ ID NO: 3672013 - RNA, 14 nt, Human
gggaaguuaaaggg

SEQ ID NO: 3672014 - RNA, 22 nt, Human
gggaaguugcauuccuuugucu

SEQ ID NO: 3672015 - RNA, 18 nt, Human
gggaauauuugaaucuug

SEQ ID NO: 3672016 - RNA, 12 nt, Human
gggaaucaagau

SEQ ID NO: 3672017 - RNA, 15 nt, Human
gggaauccaagccuc

SEQ ID NO: 3672018 - RNA, 18 nt, Human
gggaaugagcccagagaa

SEQ ID NO: 3672019 - RNA, 20 nt, Human
gggaaugaggcuugcugaga

SEQ ID NO: 3672020 - RNA, 13 nt, Human
gggaaugaggggg

SEQ ID NO: 3672021 - RNA, 17 nt, Human
gggaaugccugagugcc

SEQ ID NO: 3672022 - RNA, 15 nt, Human
gggaauggcagcugc

SEQ ID NO: 3672023 - RNA, 21 nt, Human
gggaauguauuauucugcagc

SEQ ID NO: 3672024 - RNA, 21 nt, Human
gggaauguuugccucugccuc

SEQ ID NO: 3672025 - RNA, 12 nt, Human
gggaauucucuu

SEQ ID NO: 3672026 - RNA, 18 nt, Human
gggaauugugugauguuu

SEQ ID NO: 3672027 - RNA, 13 nt, Human
gggaauuuccucu

SEQ ID NO: 3672028 - RNA, 16 nt, Human
gggacaaagaggccuu

SEQ ID NO: 3672029 - RNA, 20 nt, Human
gggacaaguagccaccugag

SEQ ID NO: 3672030 - RNA, 18 nt, Human
gggacacaaaacuccgcc

SEQ ID NO: 3672031 - RNA, 20 nt, Human
gggacaccaagccuuggcuc

SEQ ID NO: 3672032 - RNA, 18 nt, Human
gggacaccagccaggcuc

SEQ ID NO: 3672033 - RNA, 22 nt, Human
gggacaccagccaggcucugug

SEQ ID NO: 3672034 - RNA, 14 nt, Human
gggacacccuguga

SEQ ID NO: 3672035 - RNA, 14 nt, Human
gggacaccuaggcu

SEQ ID NO: 3672036 - RNA, 14 nt, Human
gggacacgggcagc

SEQ ID NO: 3672037 - RNA, 20 nt, Human
gggacagaggccccagccuc

SEQ ID NO: 3672038 - RNA, 14 nt, Human
gggacagaggccug

SEQ ID NO: 3672039 - RNA, 17 nt, Human
gggacagaggccugccc

SEQ ID NO: 3672040 - RNA, 23 nt, Human
gggacagaggggguggccuccca

SEQ ID NO: 3672041 - RNA, 22 nt, Human
gggacagaguagccagguucug

SEQ ID NO: 3672042 - RNA, 16 nt, Human
gggacagcccagagcc

SEQ ID NO: 3672043 - RNA, 13 nt, Human
gggacagcuccuu

SEQ ID NO: 3672044 - RNA, 19 nt, Human
ugaaagaguuaagaauguc

SEQ ID NO: 3672045 - RNA, 12 nt, Human
ugaaagauuaaa

SEQ ID NO: 3672046 - RNA, 14 nt, Human
ugaaagauuguggg

SEQ ID NO: 3672047 - RNA, 12 nt, Human
ugaaagcaaaaa

SEQ ID NO: 3672048 - RNA, 15 nt, Human
ugaaagcaaaaaugc

SEQ ID NO: 3672049 - RNA, 20 nt, Human
ugaaagcagggaauuucuau

SEQ ID NO: 3672050 - RNA, 22 nt, Human
ugaaagcagggaauuucuaucu

SEQ ID NO: 3672051 - RNA, 15 nt, Human
ugaaagcauccaugu

SEQ ID NO: 3672052 - RNA, 23 nt, Human
ugaaagccaaggagucacugaga

SEQ ID NO: 3672053 - RNA, 14 nt, Human
ugaaagccauuugu

SEQ ID NO: 3672054 - RNA, 15 nt, Human
ugaaagccccagaaa

SEQ ID NO: 3672055 - RNA, 17 nt, Human
ugaaagccccagaaauc

SEQ ID NO: 3672056 - RNA, 17 nt, Human
ugaaagccuuagggaag

SEQ ID NO: 3672057 - RNA, 22 nt, Human
ugaaagccuuagggaagcuggc

SEQ ID NO: 3672058 - RNA, 22 nt, Human
ugaaagcuccucgagggcaggg

SEQ ID NO: 3672059 - RNA, 22 nt, Human
ugaaagcugauuacugucaaua

SEQ ID NO: 3672060 - RNA, 16 nt, Human
ugaaagcugauuuuuu

SEQ ID NO: 3672061 - RNA, 12 nt, Human
ugaaaggaaauu

SEQ ID NO: 3672062 - RNA, 17 nt, Human
ugaaaggaauuuugcua

SEQ ID NO: 3672063 - RNA, 15 nt, Human
ugaaaggacccugug

SEQ ID NO: 3672064 - RNA, 20 nt, Human
ugaaaggcaggccuauuuca

SEQ ID NO: 3672065 - RNA, 21 nt, Human
ugaaaggcaggccuauuucau

SEQ ID NO: 3672066 - RNA, 19 nt, Human
ugaaaggcauucucugaag

SEQ ID NO: 3672067 - RNA, 11 nt, Human
ugaaaggcuuu

SEQ ID NO: 3672068 - RNA, 15 nt, Human
ugaaaggcuuuucaa

SEQ ID NO: 3672069 - RNA, 23 nt, Human
ugaaagggaguauuacaaaaaca

SEQ ID NO: 3672070 - RNA, 16 nt, Human
ugaaagggcccagaga

SEQ ID NO: 3672071 - RNA, 19 nt, Human
ugaaagguacuauauuugc

SEQ ID NO: 3672072 - RNA, 15 nt, Human
ugaaagguacuucaa

SEQ ID NO: 3672073 - RNA, 19 nt, Human
ugaaagguuagagaauaaa

SEQ ID NO: 3672074 - RNA, 19 nt, Human
ugaaagucacggcugcgca

SEQ ID NO: 3672075 - RNA, 15 nt, Human
ugaaagucagaugcc

SEQ ID NO: 3672076 - RNA, 18 nt, Human
ugaaaguccagaaacugu

SEQ ID NO: 3672077 - RNA, 15 nt, Human
ugaaagucuguccuu

SEQ ID NO: 3672078 - RNA, 23 nt, Human
ugaaagucuguccuugaaggacu

SEQ ID NO: 3672079 - RNA, 17 nt, Human
ugaaagucuugugacua

SEQ ID NO: 3672080 - RNA, 23 nt, Human
ugaaagucuugugacuagugcug

SEQ ID NO: 3672081 - RNA, 21 nt, Human
ugaaagugaauaaacuucagc

SEQ ID NO: 3672082 - RNA, 20 nt, Human
ugaaagugaugacauauuuu

SEQ ID NO: 3672083 - RNA, 17 nt, Human
ugaaagugccuuugcag

SEQ ID NO: 3672084 - RNA, 21 nt, Human
ugaaagugccuuugcagcuca

SEQ ID NO: 3672085 - RNA, 15 nt, Human
ugaaaguuacccacu

SEQ ID NO: 3672086 - RNA, 22 nt, Human
ugaaaguuacccacugaagccc

SEQ ID NO: 3672087 - RNA, 14 nt, Human
ugaaaguucuugcu

SEQ ID NO: 3672088 - RNA, 14 nt, Human
ugaaaguuguacau

SEQ ID NO: 3672089 - RNA, 19 nt, Human
ugaaaguuguacaugaaau

SEQ ID NO: 3672090 - RNA, 20 nt, Human
ugaaaguuuucagaaccucu

SEQ ID NO: 3672091 - RNA, 22 nt, Human
ugaaaguuuugaguagauauua

SEQ ID NO: 3672092 - RNA, 14 nt, Human
ugaaaguuuuguaa

SEQ ID NO: 3672093 - RNA, 12 nt, Human
ugaaauaaaaua

SEQ ID NO: 3672094 - RNA, 13 nt, Human
ugaaauaaacguc

SEQ ID NO: 3672095 - RNA, 22 nt, Human
ugaaauaaacgucuuaaauauu

SEQ ID NO: 3672096 - RNA, 23 nt, Human
ugaaauaaacgucuuaaauauuc

SEQ ID NO: 3672097 - RNA, 21 nt, Human
ugaaauaaagaaauugcaaua

SEQ ID NO: 3672098 - RNA, 18 nt, Human
ugaaauaacaaaauggac

SEQ ID NO: 3672099 - RNA, 16 nt, Human
ugaaauaacauggccu

SEQ ID NO: 3672100 - RNA, 17 nt, Human
ugaaauaacauggccuu

SEQ ID NO: 3672101 - RNA, 18 nt, Human
ugaaauaaccguaaaggu

SEQ ID NO: 3672102 - RNA, 17 nt, Human
ugaaauaagccagacau

SEQ ID NO: 3672103 - RNA, 10 nt, Human
gggacucugc

SEQ ID NO: 3672104 - RNA, 18 nt, Human
gggacugaagccaaaguu

SEQ ID NO: 3672105 - RNA, 11 nt, Human
gggacugagag

SEQ ID NO: 3672106 - RNA, 13 nt, Human
gggacugagccag

SEQ ID NO: 3672107 - RNA, 14 nt, Human
gggacugccaccuc

SEQ ID NO: 3672108 - RNA, 15 nt, Human
gggacugcuaaauaa

SEQ ID NO: 3672109 - RNA, 16 nt, Human
gggacugcuaaauaaa

SEQ ID NO: 3672110 - RNA, 18 nt, Human
gggacugcugcugccugg

SEQ ID NO: 3672111 - RNA, 19 nt, Human
gggacugcugcugccuggc

SEQ ID NO: 3672112 - RNA, 19 nt, Human
gggacuggaaccagggaga

SEQ ID NO: 3672113 - RNA, 20 nt, Human
gggacugggagccgcagcag

SEQ ID NO: 3672114 - RNA, 12 nt, Human
gggacuggguuu

SEQ ID NO: 3672115 - RNA, 21 nt, Human
gggacuggguuuggaccccag

SEQ ID NO: 3672116 - RNA, 18 nt, Human
gggacuugaaucuuucca

SEQ ID NO: 3672117 - RNA, 18 nt, Human
gggacuuggaagcuccgc

SEQ ID NO: 3672118 - RNA, 23 nt, Human
gggacuuggaagcuccgcuuucu

SEQ ID NO: 3672119 - RNA, 14 nt, Human
gggacuugugucug

SEQ ID NO: 3672120 - RNA, 23 nt, Human
gggacuuugcugauuuccccucu

SEQ ID NO: 3672121 - RNA, 10 nt, Human
gggagaaaac

SEQ ID NO: 3672122 - RNA, 13 nt, Human
gggagaaaauuca

SEQ ID NO: 3672123 - RNA, 12 nt, Human
gggagaaauacu

SEQ ID NO: 3672124 - RNA, 21 nt, Human
gggagaaccaaaaagaggcua

SEQ ID NO: 3672125 - RNA, 21 nt, Human
gggagacaccucagagccccg

SEQ ID NO: 3672126 - RNA, 15 nt, Human
gggagacaugugaca

SEQ ID NO: 3672127 - RNA, 20 nt, Human
gggagaccggccugccagga

SEQ ID NO: 3672128 - RNA, 18 nt, Human
gggagacgguuuccaggg

SEQ ID NO: 3672129 - RNA, 19 nt, Human
gggagacugggcugaggga

SEQ ID NO: 3672130 - RNA, 13 nt, Human
gggagagacccuu

SEQ ID NO: 3672131 - RNA, 18 nt, Human
gggagagagacguguaca

SEQ ID NO: 3672132 - RNA, 12 nt, Human
gggagagagaga

SEQ ID NO: 3672133 - RNA, 12 nt, Human
gggagagcaggc

SEQ ID NO: 3672134 - RNA, 14 nt, Human
gggagagcaggcug

SEQ ID NO: 3672135 - RNA, 16 nt, Human
gggagagcccaggagc

SEQ ID NO: 3672136 - RNA, 14 nt, Human
gggagagccccugg

SEQ ID NO: 3672137 - RNA, 13 nt, Human
gggagagccugcu

SEQ ID NO: 3672138 - RNA, 21 nt, Human
gggagaggauuuuuuucugag

SEQ ID NO: 3672139 - RNA, 20 nt, Human
gggagagggcgcaggccgug

SEQ ID NO: 3672140 - RNA, 19 nt, Human
gggagaucggggccagagg

SEQ ID NO: 3672141 - RNA, 20 nt, Human
gggagaucggggccagaggc

SEQ ID NO: 3672142 - RNA, 19 nt, Human
gggagauggaucaaucaaa

SEQ ID NO: 3672143 - RNA, 17 nt, Human
gggagauucaagggacc

SEQ ID NO: 3672144 - RNA, 13 nt, Human
gggagcagagaca

SEQ ID NO: 3672145 - RNA, 12 nt, Human
gggagcagcccc

SEQ ID NO: 3672146 - RNA, 21 nt, Human
gggagcaggagauugagaagg

SEQ ID NO: 3672147 - RNA, 13 nt, Human
gggagcaggcagc

SEQ ID NO: 3672148 - RNA, 22 nt, Human
gggagccaaaaucucaagaaau

SEQ ID NO: 3672149 - RNA, 11 nt, Human
gggagccaagg

SEQ ID NO: 3672150 - RNA, 15 nt, Human
gggagccauuugaga

SEQ ID NO: 3672151 - RNA, 20 nt, Human
gggagcccacuguccugggc

SEQ ID NO: 3672152 - RNA, 12 nt, Human
gggagccccagg

SEQ ID NO: 3672153 - RNA, 21 nt, Human
gggagccccagggucuucccu

SEQ ID NO: 3672154 - RNA, 21 nt, Human
gggagcccccagccugucaga

SEQ ID NO: 3672155 - RNA, 20 nt, Human
gggagccuaggaccacucag

SEQ ID NO: 3672156 - RNA, 12 nt, Human
gggagccucccu

SEQ ID NO: 3672157 - RNA, 17 nt, Human
gggagccuccugcccag

SEQ ID NO: 3672158 - RNA, 21 nt, Human
gggagccugaucaccugcccu

SEQ ID NO: 3672159 - RNA, 22 nt, Human
gggagccuuugguucuggccag

SEQ ID NO: 3672160 - RNA, 23 nt, Human
gggagcucaggaaccgaggcagg

SEQ ID NO: 3672161 - RNA, 19 nt, Human
gggagcuccacucugcuuc

SEQ ID NO: 3672162 - RNA, 22 nt, Human
gggagcuccucuccuggaggau

SEQ ID NO: 3672163 - RNA, 12 nt, Human
gggagcucugca

SEQ ID NO: 3672164 - RNA, 14 nt, Human
gggagcucugucug

SEQ ID NO: 3672165 - RNA, 12 nt, Human
gggagcugccaa

SEQ ID NO: 3672166 - RNA, 21 nt, Human
gggagcugccuguucagcucc

SEQ ID NO: 3672167 - RNA, 22 nt, Human
gggagcugccuguucagcucca

SEQ ID NO: 3672168 - RNA, 22 nt, Human
gggagcuggcuccagccuggaa

SEQ ID NO: 3672169 - RNA, 19 nt, Human
gggagcugggcccgacaug

SEQ ID NO: 3672170 - RNA, 14 nt, Human
gggagcugggccug

SEQ ID NO: 3672171 - RNA, 16 nt, Human
gggaggaagcagaaua

SEQ ID NO: 3672172 - RNA, 20 nt, Human
gggaggaagcagaauaaagc

SEQ ID NO: 3672173 - RNA, 23 nt, Human
gggaggaagcagguugaggggcu

SEQ ID NO: 3672174 - RNA, 21 nt, Human
gggaggaccagggcagggcca

SEQ ID NO: 3672175 - RNA, 19 nt, Human
gggaggaccugacccuacu

SEQ ID NO: 3672176 - RNA, 13 nt, Human
gggaggaccuggg

SEQ ID NO: 3672177 - RNA, 19 nt, Human
gggaggaccuggggcacag

SEQ ID NO: 3672178 - RNA, 17 nt, Human
gggaggacgcucucugg

SEQ ID NO: 3672179 - RNA, 20 nt, Human
gggaggacgcucucuggccu

SEQ ID NO: 3672180 - RNA, 21 nt, Human
gggaggagaggggaagggcca

SEQ ID NO: 3672181 - RNA, 15 nt, Human
gggaggaggcagaga

SEQ ID NO: 3672182 - RNA, 13 nt, Human
gggaggagggaga

SEQ ID NO: 3672183 - RNA, 14 nt, Human
gggaggagggagag

SEQ ID NO: 3672184 - RNA, 18 nt, Human
gggaggagggagagggag

SEQ ID NO: 3672185 - RNA, 12 nt, Human
gggaggagggca

SEQ ID NO: 3672186 - RNA, 23 nt, Human
gggaggaucacuggagcccagga

SEQ ID NO: 3672187 - RNA, 23 nt, Human
gggaggaucucuugagccuggga

SEQ ID NO: 3672188 - RNA, 22 nt, Human
gggaggauguucugggacacag

SEQ ID NO: 3672189 - RNA, 21 nt, Human
gggaggauugcuugagcucag

SEQ ID NO: 3672190 - RNA, 19 nt, Human
gggaggccaagaguggccc

SEQ ID NO: 3672191 - RNA, 13 nt, Human
gggaggccaagga

SEQ ID NO: 3672192 - RNA, 19 nt, Human
gggaggccaaggugggagg

SEQ ID NO: 3672193 - RNA, 19 nt, Human
gggaggccaucuggagagc

SEQ ID NO: 3672194 - RNA, 21 nt, Human
gggaggcggacguuccagccg

SEQ ID NO: 3672195 - RNA, 18 nt, Human
gggaggcggagaguacag

SEQ ID NO: 3672196 - RNA, 20 nt, Human
gggaggcggagcuugcagug

SEQ ID NO: 3672197 - RNA, 19 nt, Human
gggaggcugaggcaggaga

SEQ ID NO: 3672198 - RNA, 13 nt, Human
gggagggaaaagg

SEQ ID NO: 3672199 - RNA, 18 nt, Human
gggagggaagggagccaa

SEQ ID NO: 3672200 - RNA, 15 nt, Human
gggagggagggcucc

SEQ ID NO: 3672201 - RNA, 22 nt, Human
gggagggauucugguuccaggg

SEQ ID NO: 3672202 - RNA, 21 nt, Human
gggagggcggcaggggccugg

SEQ ID NO: 3672203 - RNA, 14 nt, Human
gggagggcucugag

SEQ ID NO: 3672204 - RNA, 20 nt, Human
gggagggcucugaggcgccc

SEQ ID NO: 3672205 - RNA, 17 nt, Human
gggaggggaagcuucug

SEQ ID NO: 3672206 - RNA, 12 nt, Human
gggaggggaagu

SEQ ID NO: 3672207 - RNA, 13 nt, Human
gggaggggcaggc

SEQ ID NO: 3672208 - RNA, 19 nt, Human
gggaggggcgcuggcccag

SEQ ID NO: 3672209 - RNA, 22 nt, Human
ucugucaagaguaguuauauaa

SEQ ID NO: 3672210 - RNA, 19 nt, Human
ucugucacaguaaaaauaa

SEQ ID NO: 3672211 - RNA, 22 nt, Human
ucugucacaguaaaaauaaaau

SEQ ID NO: 3672212 - RNA, 16 nt, Human
ucugucacccaggcug

SEQ ID NO: 3672213 - RNA, 17 nt, Human
ucugucacugcaggcac

SEQ ID NO: 3672214 - RNA, 13 nt, Human
ucugucacuuaau

SEQ ID NO: 3672215 - RNA, 18 nt, Human
ucugucagaaugcuauug

SEQ ID NO: 3672216 - RNA, 21 nt, Human
ucugucagaugagaacaaagc

SEQ ID NO: 3672217 - RNA, 22 nt, Human
ucugucagaugagaacaaagcu

SEQ ID NO: 3672218 - RNA, 24 nt, Human
ucugucagaugagaacaaagcugu

SEQ ID NO: 3672219 - RNA, 16 nt, Human
ucugucaggagagcag

SEQ ID NO: 3672220 - RNA, 17 nt, Human
ucugucaggagagcagc

SEQ ID NO: 3672221 - RNA, 19 nt, Human
ucugucagucacagccacc

SEQ ID NO: 3672222 - RNA, 22 nt, Human
ucugucaugaacauguuccuga

SEQ ID NO: 3672223 - RNA, 23 nt, Human
ucugucauuugagcagggcucag

SEQ ID NO: 3672224 - RNA, 13 nt, Human
ucugucauuuguu

SEQ ID NO: 3672225 - RNA, 15 nt, Human
ucuguccaaaggagg

SEQ ID NO: 3672226 - RNA, 16 nt, Human
ucuguccaaaggaggc

SEQ ID NO: 3672227 - RNA, 19 nt, Human
ucuguccaaaggaggcugg

SEQ ID NO: 3672228 - RNA, 13 nt, Human
ucuguccaaggaa

SEQ ID NO: 3672229 - RNA, 13 nt, Human
ucuguccagggcc

SEQ ID NO: 3672230 - RNA, 17 nt, Human
ucugucccacuuggcau

SEQ ID NO: 3672231 - RNA, 14 nt, Human
ucugucccauuccc

SEQ ID NO: 3672232 - RNA, 18 nt, Human
ucugucccauucccuggg

SEQ ID NO: 3672233 - RNA, 19 nt, Human
ucuguccccuucucucauc

SEQ ID NO: 3672234 - RNA, 20 nt, Human
ucuguccccuucucucaucu

SEQ ID NO: 3672235 - RNA, 21 nt, Human
ucuguccccuucucucaucuc

SEQ ID NO: 3672236 - RNA, 20 nt, Human
ucugucccgggguccugugg

SEQ ID NO: 3672237 - RNA, 23 nt, Human
ucugucccuagguguuuuguuca

SEQ ID NO: 3672238 - RNA, 15 nt, Human
ucugucccuguuaga

SEQ ID NO: 3672239 - RNA, 22 nt, Human
ucugucccuugccccccuggcc

SEQ ID NO: 3672240 - RNA, 15 nt, Human
ucugucccuugcugu

SEQ ID NO: 3672241 - RNA, 16 nt, Human
ucugucccuugcugua

SEQ ID NO: 3672242 - RNA, 19 nt, Human
ucuguccgagcuuugaaaa

SEQ ID NO: 3672243 - RNA, 15 nt, Human
ucuguccgagugugc

SEQ ID NO: 3672244 - RNA, 17 nt, Human
ucuguccgagugugcca

SEQ ID NO: 3672245 - RNA, 14 nt, Human
ucuguccuacucug

SEQ ID NO: 3672246 - RNA, 20 nt, Human
ucuguccuacucugugucag

SEQ ID NO: 3672247 - RNA, 22 nt, Human
ugacagggcacaccgggcacuc

SEQ ID NO: 3672248 - RNA, 17 nt, Human
ugacagggccagugggg

SEQ ID NO: 3672249 - RNA, 23 nt, Human
ugacagggccaguggggccugug

SEQ ID NO: 3672250 - RNA, 21 nt, Human
ugacagggcggggguggcggc

SEQ ID NO: 3672251 - RNA, 15 nt, Human
ugacagguaaacuau

SEQ ID NO: 3672252 - RNA, 17 nt, Human
ugacagguaaauuaaga

SEQ ID NO: 3672253 - RNA, 17 nt, Human
ugacaguaacuugguua

SEQ ID NO: 3672254 - RNA, 20 nt, Human
ugacaguaauuguguuuaca

SEQ ID NO: 3672255 - RNA, 14 nt, Human
ugacagucaucauc

SEQ ID NO: 3672256 - RNA, 19 nt, Human
ugacagucaucaucagggc

SEQ ID NO: 3672257 - RNA, 12 nt, Human
ugacagugaggu

SEQ ID NO: 3672258 - RNA, 16 nt, Human
ugacaguggaacuaca

SEQ ID NO: 3672259 - RNA, 18 nt, Human
ugacaguggcguuuguaa

SEQ ID NO: 3672260 - RNA, 17 nt, Human
ugacaguucugaagaau

SEQ ID NO: 3672261 - RNA, 16 nt, Human
ugacaguuuuucuguu

SEQ ID NO: 3672262 - RNA, 18 nt, Human
ugacauaaaaacaacuuu

SEQ ID NO: 3672263 - RNA, 23 nt, Human
ugacauaaguauuuaauucaugu

SEQ ID NO: 3672264 - RNA, 21 nt, Human
ugacauacgcuuuuaaugaaa

SEQ ID NO: 3672265 - RNA, 17 nt, Human
ugacauagucuggcugu

SEQ ID NO: 3672266 - RNA, 11 nt, Human
ugacauauuua

SEQ ID NO: 3672267 - RNA, 12 nt, Human
ugacauauuuaa

SEQ ID NO: 3672268 - RNA, 16 nt, Human
ugacauauuuaauguu

SEQ ID NO: 3672269 - RNA, 19 nt, Human
ugacauauuuaauguuuua

SEQ ID NO: 3672270 - RNA, 20 nt, Human
ugacauauuuaauguuuuaa

SEQ ID NO: 3672271 - RNA, 23 nt, Human
ugacauauuuaauguuuuaaaug

SEQ ID NO: 3672272 - RNA, 20 nt, Human
ugacaucaagaaucuucugu

SEQ ID NO: 3672273 - RNA, 18 nt, Human
ugacaucacagcagccuc

SEQ ID NO: 3672274 - RNA, 14 nt, Human
ugacaucacuggca

SEQ ID NO: 3672275 - RNA, 18 nt, Human
ugacaucacuuguacaaa

SEQ ID NO: 3672276 - RNA, 20 nt, Human
ugacaucacuuguacaaaau

SEQ ID NO: 3672277 - RNA, 23 nt, Human
ugacaucacuuguacaaaauaaa

SEQ ID NO: 3672278 - RNA, 17 nt, Human
ugacaucaguggcaugg

SEQ ID NO: 3672279 - RNA, 23 nt, Human
ugacaucaguuccuuugugugua

SEQ ID NO: 3672280 - RNA, 13 nt, Human
ugacauccaagcu

SEQ ID NO: 3672281 - RNA, 20 nt, Human
ugacaucgccaguaaaauua

SEQ ID NO: 3672282 - RNA, 19 nt, Human
ugacaucggaaaaauaauc

SEQ ID NO: 3672283 - RNA, 21 nt, Human
ugacaucggaaaaauaaucaa

SEQ ID NO: 3672284 - RNA, 14 nt, Human
ugacaucucagggg

SEQ ID NO: 3672285 - RNA, 19 nt, Human
ugacaucucaggggccaga

SEQ ID NO: 3672286 - RNA, 22 nt, Human
ugacaucucaggggccagagga

SEQ ID NO: 3672287 - RNA, 13 nt, Human
ugacaucucugca

SEQ ID NO: 3672288 - RNA, 14 nt, Human
ugacaucucugcaa

SEQ ID NO: 3672289 - RNA, 23 nt, Human
ugacaucucugcaaucuucucag

SEQ ID NO: 3672290 - RNA, 12 nt, Human
ugacaucucuuu

SEQ ID NO: 3672291 - RNA, 14 nt, Human
ugacaucucuuuga

SEQ ID NO: 3672292 - RNA, 19 nt, Human
ugacaucuuuuuaaagcuu

SEQ ID NO: 3672293 - RNA, 18 nt, Human
ugacaugauuccuuccug

SEQ ID NO: 3672294 - RNA, 19 nt, Human
ugacaugauuccuuccugu

SEQ ID NO: 3672295 - RNA, 14 nt, Human
ugacaugcacugac

SEQ ID NO: 3672296 - RNA, 17 nt, Human
ugacaugcaucaucuca

SEQ ID NO: 3672297 - RNA, 21 nt, Human
ugacaugcgggcugggcagcu

SEQ ID NO: 3672298 - RNA, 15 nt, Human
ugacauggaaaugaa

SEQ ID NO: 3672299 - RNA, 12 nt, Human
ugacauguacag

SEQ ID NO: 3672300 - RNA, 15 nt, Human
ugacauguacagaga

SEQ ID NO: 3672301 - RNA, 16 nt, Human
ugacaugucccuacac

SEQ ID NO: 3672302 - RNA, 16 nt, Human
ugacaugugaaaccuu

SEQ ID NO: 3672303 - RNA, 17 nt, Human
ugacaugugaaaccuuu

SEQ ID NO: 3672304 - RNA, 19 nt, Human
ugacauguguuggcagccu

SEQ ID NO: 3672305 - RNA, 21 nt, Human
ugacauuaacaguuuuccaug

SEQ ID NO: 3672306 - RNA, 18 nt, Human
ugacauucaccugcccca

SEQ ID NO: 3672307 - RNA, 17 nt, Human
ugacauucaugccuggc

SEQ ID NO: 3672308 - RNA, 19 nt, Human
ugacauucugaaugcuucu

SEQ ID NO: 3672309 - RNA, 13 nt, Human
ugacauugaaauc

SEQ ID NO: 3672310 - RNA, 20 nt, Human
ugacauugaaaucuaggaaa

SEQ ID NO: 3672311 - RNA, 17 nt, Human
ugacauugcaccuggau

SEQ ID NO: 3672312 - RNA, 14 nt, Human
ugacauugccaaaa

SEQ ID NO: 3672313 - RNA, 19 nt, Human
ugacauugccaaaaaggau

SEQ ID NO: 3672314 - RNA, 15 nt, Human
ugacauugcguuuga

SEQ ID NO: 3672315 - RNA, 19 nt, Human
ugacauugcguuugaccuu

SEQ ID NO: 3672316 - RNA, 19 nt, Human
ugacauuguauguaucuau

SEQ ID NO: 3672317 - RNA, 15 nt, Human
ugacauuuauauauu

SEQ ID NO: 3672318 - RNA, 16 nt, Human
ugacauuuauauauug

SEQ ID NO: 3672319 - RNA, 21 nt, Human
ugacauuuauuuuucauuuag

SEQ ID NO: 3672320 - RNA, 21 nt, Human
ugacauuuauuuuucucauga

SEQ ID NO: 3672321 - RNA, 22 nt, Human
ugacauuucuucuagugaugau

SEQ ID NO: 3672322 - RNA, 21 nt, Human
ugacauuuggaguguuccccu

SEQ ID NO: 3672323 - RNA, 21 nt, Human
ugacauuugggagacauguga

SEQ ID NO: 3672324 - RNA, 23 nt, Human
ugacauuugggagacaugugaca

SEQ ID NO: 3672325 - RNA, 16 nt, Human
ugacauuugucauuuu

SEQ ID NO: 3672326 - RNA, 15 nt, Human
ugaccaaaaguuaca

SEQ ID NO: 3672327 - RNA, 22 nt, Human
ugaccaaaaguuacauguuugc

SEQ ID NO: 3672328 - RNA, 21 nt, Human
ugaccaaauaucaccaggacu

SEQ ID NO: 3672329 - RNA, 18 nt, Human
ugaccaacaggcuguucu

SEQ ID NO: 3672330 - RNA, 18 nt, Human
ugaccaacuagacauucu

SEQ ID NO: 3672331 - RNA, 22 nt, Human
ugaccaacuagacauucugucg

SEQ ID NO: 3672332 - RNA, 15 nt, Human
ugaccaacuguguug

SEQ ID NO: 3672333 - RNA, 19 nt, Human
ugaccaagaacugcaugga

SEQ ID NO: 3672334 - RNA, 15 nt, Human
ugaccaagagagaaa

SEQ ID NO: 3672335 - RNA, 14 nt, Human
ugaccaagcaggaa

SEQ ID NO: 3672336 - RNA, 15 nt, Human
ugaccaagcaggaag

SEQ ID NO: 3672337 - RNA, 16 nt, Human
ugaccaagcaggaagc

SEQ ID NO: 3672338 - RNA, 18 nt, Human
ugaccaagcaggaagcuc

SEQ ID NO: 3672339 - RNA, 19 nt, Human
ugaccaagcaggaagcuca

SEQ ID NO: 3672340 - RNA, 21 nt, Human
ugaccaagcaggaagcucaga

SEQ ID NO: 3672341 - RNA, 18 nt, Human
ugaccaauauuguacagu

SEQ ID NO: 3672342 - RNA, 16 nt, Human
ugaccaauuuuaacuu

SEQ ID NO: 3672343 - RNA, 19 nt, Human
ugaccacacuccagcuggg

SEQ ID NO: 3672344 - RNA, 20 nt, Human
ugaccacacuccagcuggga

SEQ ID NO: 3672345 - RNA, 18 nt, Human
ugaccacacuuccugucc

SEQ ID NO: 3672346 - RNA, 23 nt, Human
ugaccacacuuccuguccagaga

SEQ ID NO: 3672347 - RNA, 22 nt, Human
ugaccacagcaucauuuugcau

SEQ ID NO: 3672348 - RNA, 21 nt, Human
ugaccacauagcaugaggcca

SEQ ID NO: 3672349 - RNA, 13 nt, Human
ugaccacccuccc

SEQ ID NO: 3672350 - RNA, 14 nt, Human
ugaccacucagaga

SEQ ID NO: 3672351 - RNA, 18 nt, Human
ugaccacucagagacaug

SEQ ID NO: 3672352 - RNA, 20 nt, Human
ugaccacugcagaagacagu

SEQ ID NO: 3672353 - RNA, 18 nt, Human
ugaccacuugaggccuga

SEQ ID NO: 3672354 - RNA, 20 nt, Human
ugaccacuugaggccugauc

SEQ ID NO: 3672355 - RNA, 22 nt, Human
ugaccagcagaucccagcucac

SEQ ID NO: 3672356 - RNA, 17 nt, Human
ugaccagcucccccucc

SEQ ID NO: 3672357 - RNA, 18 nt, Human
ugaccagcucccccuccc

SEQ ID NO: 3672358 - RNA, 20 nt, Human
ugaccagcucccccucccuc

SEQ ID NO: 3672359 - RNA, 22 nt, Human
ugaccagcucccccucccuccc

SEQ ID NO: 3672360 - RNA, 20 nt, Human
ugaccaggccugggccagag

SEQ ID NO: 3672361 - RNA, 22 nt, Human
ugaccaggggugauuucagaga

SEQ ID NO: 3672362 - RNA, 23 nt, Human
ugaccaguuuaaccugaugcagu

SEQ ID NO: 3672363 - RNA, 19 nt, Human
ugaccauccacucuacccu

SEQ ID NO: 3672364 - RNA, 14 nt, Human
ugaccaucugcuuu

SEQ ID NO: 3672365 - RNA, 15 nt, Human
ugaccaugaaagacu

SEQ ID NO: 3672366 - RNA, 18 nt, Human
ugaccaugcucaucugcu

SEQ ID NO: 3672367 - RNA, 13 nt, Human
ugaccauucucca

SEQ ID NO: 3672368 - RNA, 20 nt, Human
ugaccauucuccaccugcca

SEQ ID NO: 3672369 - RNA, 23 nt, Human
ugaccauucuccaccugccaggg

SEQ ID NO: 3672370 - RNA, 14 nt, Human
ugacccaauuaagu

SEQ ID NO: 3672371 - RNA, 13 nt, Human
ugacccacagccu

SEQ ID NO: 3672372 - RNA, 17 nt, Human
ugacccaccccugugcu

SEQ ID NO: 3672373 - RNA, 17 nt, Human
ugacccacugguuccuu

SEQ ID NO: 3672374 - RNA, 17 nt, Human
ugacccacuucucauca

SEQ ID NO: 3672375 - RNA, 23 nt, Human
ugacccacuucucaucacacaca

SEQ ID NO: 3672376 - RNA, 21 nt, Human
ugacccagccccuugagaaac

SEQ ID NO: 3672377 - RNA, 23 nt, Human
ugacccagccccuugagaaaccu

SEQ ID NO: 3672378 - RNA, 12 nt, Human
ugacccaggccg

SEQ ID NO: 3672379 - RNA, 21 nt, Human
ugacccaggccgcagcucuug

SEQ ID NO: 3672380 - RNA, 12 nt, Human
ugacccaggcug

SEQ ID NO: 3672381 - RNA, 15 nt, Human
ugacccaggcugggc

SEQ ID NO: 3672382 - RNA, 16 nt, Human
ugacccagugccccca

SEQ ID NO: 3672383 - RNA, 17 nt, Human
ugacccagugcccccac

SEQ ID NO: 3672384 - RNA, 18 nt, Human
ugacccagugcccccacu

SEQ ID NO: 3672385 - RNA, 18 nt, Human
ugacccaugcugcccugu

SEQ ID NO: 3672386 - RNA, 16 nt, Human
ugacccaugggcagga

SEQ ID NO: 3672387 - RNA, 18 nt, Human
ugacccaugggcaggaga

SEQ ID NO: 3672388 - RNA, 13 nt, Human
ugacccauugcug

SEQ ID NO: 3672389 - RNA, 21 nt, Human
ugaccccaaacaccuuccagc

SEQ ID NO: 3672390 - RNA, 15 nt, Human
ugacuaauuuuacau

SEQ ID NO: 3672391 - RNA, 22 nt, Human
ugacuaauuuuacauguuuaua

SEQ ID NO: 3672392 - RNA, 19 nt, Human
ugacuacuuagcauccuaa

SEQ ID NO: 3672393 - RNA, 22 nt, Human
ugacuacuuagcauccuaagaa

SEQ ID NO: 3672394 - RNA, 15 nt, Human
ugacuacuuugccuu

SEQ ID NO: 3672395 - RNA, 15 nt, Human
ugacuagaaucgaca

SEQ ID NO: 3672396 - RNA, 23 nt, Human
ugacuagaugauggaugccaaua

SEQ ID NO: 3672397 - RNA, 14 nt, Human
ugacuaggaaaaaa

SEQ ID NO: 3672398 - RNA, 17 nt, Human
ugacuagggaaaugauc

SEQ ID NO: 3672399 - RNA, 13 nt, Human
ugacuagggagcc

SEQ ID NO: 3672400 - RNA, 19 nt, Human
ugacuagggauucaggcug

SEQ ID NO: 3672401 - RNA, 21 nt, Human
ugacuagggauucaggcugcu

SEQ ID NO: 3672402 - RNA, 20 nt, Human
ugacuaguacaaauuauaaa

SEQ ID NO: 3672403 - RNA, 13 nt, Human
ugacuagugcuga

SEQ ID NO: 3672404 - RNA, 21 nt, Human
ugacuagugcugaagcuuauu

SEQ ID NO: 3672405 - RNA, 16 nt, Human
ugacuauaaugccucu

SEQ ID NO: 3672406 - RNA, 18 nt, Human
ugacuauauaauuuauuu

SEQ ID NO: 3672407 - RNA, 17 nt, Human
ugacuauauagagaugu

SEQ ID NO: 3672408 - RNA, 14 nt, Human
ugacuaucauaaaa

SEQ ID NO: 3672409 - RNA, 21 nt, Human
ugacuaucccaacagucaugu

SEQ ID NO: 3672410 - RNA, 20 nt, Human
ugacuaugcguggcuggaac

SEQ ID NO: 3672411 - RNA, 12 nt, Human
ugacuauuaugu

SEQ ID NO: 3672412 - RNA, 22 nt, Human
ugacuauucugagaugacuauu

SEQ ID NO: 3672413 - RNA, 20 nt, Human
ugacuauucuguaucuuuca

SEQ ID NO: 3672414 - RNA, 17 nt, Human
ugacuauucuugaugua

SEQ ID NO: 3672415 - RNA, 17 nt, Human
ugacuauuuucguucau

SEQ ID NO: 3672416 - RNA, 19 nt, Human
ugacuauuuuucagaaucu

SEQ ID NO: 3672417 - RNA, 22 nt, Human
ugacucaacauguuacugacca

SEQ ID NO: 3672418 - RNA, 12 nt, Human
ugacucaagaag

SEQ ID NO: 3672419 - RNA, 15 nt, Human
ugacucaagaaguga

SEQ ID NO: 3672420 - RNA, 22 nt, Human
ugacucaagaagugaagaaugc

SEQ ID NO: 3672421 - RNA, 16 nt, Human
ugacucaagauuccca

SEQ ID NO: 3672422 - RNA, 17 nt, Human
ugacucaagauucccag

SEQ ID NO: 3672423 - RNA, 11 nt, Human
ugacucaccca

SEQ ID NO: 3672424 - RNA, 13 nt, Human
ugacucacccaag

SEQ ID NO: 3672425 - RNA, 14 nt, Human
ugacucacccaagc

SEQ ID NO: 3672426 - RNA, 12 nt, Human
ugacucaggagc

SEQ ID NO: 3672427 - RNA, 19 nt, Human
ugacucaggagccugugac

SEQ ID NO: 3672428 - RNA, 18 nt, Human
ugacucagggcuccuggg

SEQ ID NO: 3672429 - RNA, 15 nt, Human
ugacucaucauuugu

SEQ ID NO: 3672430 - RNA, 16 nt, Human
ugacuccaaccauuca

SEQ ID NO: 3672431 - RNA, 20 nt, Human
ugacuccacgauccugccac

SEQ ID NO: 3672432 - RNA, 18 nt, Human
ugacuccaggagaggagc

SEQ ID NO: 3672433 - RNA, 17 nt, Human
ugacuccauagaccuuu

SEQ ID NO: 3672434 - RNA, 18 nt, Human
ugacucccccaguccccu

SEQ ID NO: 3672435 - RNA, 16 nt, Human
ugacuccgcuggaggu

SEQ ID NO: 3672436 - RNA, 18 nt, Human
ugacuccuaccugcccug

SEQ ID NO: 3672437 - RNA, 19 nt, Human
ugacuccuaccugcccugg

SEQ ID NO: 3672438 - RNA, 22 nt, Human
ugacuccuuagagacaucaaaa

SEQ ID NO: 3672439 - RNA, 14 nt, Human
ugacuccuuguggu

SEQ ID NO: 3672440 - RNA, 21 nt, Human
ugacuccuugugguuuauguc

SEQ ID NO: 3672441 - RNA, 18 nt, Human
ugacucgagucacacuca

SEQ ID NO: 3672442 - RNA, 16 nt, Human
ugacucgggcuccugu

SEQ ID NO: 3672443 - RNA, 17 nt, Human
ugacucgggcuccugug

SEQ ID NO: 3672444 - RNA, 19 nt, Human
ugacucgggcuccugugcc

SEQ ID NO: 3672445 - RNA, 20 nt, Human
ugacucgggcuccugugccc

SEQ ID NO: 3672446 - RNA, 16 nt, Human
ugacucgguuucucca

SEQ ID NO: 3672447 - RNA, 19 nt, Human
ugacucuaguacugugaau

SEQ ID NO: 3672448 - RNA, 21 nt, Human
ugacucuauaagcaaauugcu

SEQ ID NO: 3672449 - RNA, 13 nt, Human
ugacucucaaauc

SEQ ID NO: 3672450 - RNA, 13 nt, Human
ugacucuccaggg

SEQ ID NO: 3672451 - RNA, 14 nt, Human
ugacucugcccccu

SEQ ID NO: 3672452 - RNA, 16 nt, Human
ugacucugcucuugca

SEQ ID NO: 3672453 - RNA, 17 nt, Human
ugacucuggcaaagcuu

SEQ ID NO: 3672454 - RNA, 15 nt, Human
ugacucuggguccuu

SEQ ID NO: 3672455 - RNA, 21 nt, Human
ugacucuggguccuuccugaa

SEQ ID NO: 3672456 - RNA, 14 nt, Human
ugacucuuaagaag

SEQ ID NO: 3672457 - RNA, 18 nt, Human
ugacucuuccccaggaag

SEQ ID NO: 3672458 - RNA, 15 nt, Human
ugacucuucccucaa

SEQ ID NO: 3672459 - RNA, 19 nt, Human
ugacucuugaguuguuuuu

SEQ ID NO: 3672460 - RNA, 14 nt, Human
ugacucuuuccaac

SEQ ID NO: 3672461 - RNA, 22 nt, Human
ugacucuuuuuagggccaggca

SEQ ID NO: 3672462 - RNA, 23 nt, Human
ugacucuuuuuagggccaggcag

SEQ ID NO: 3672463 - RNA, 22 nt, Human
ugacugaacgauccuucaaagu

SEQ ID NO: 3672464 - RNA, 19 nt, Human
ugacugaagaugcagcuca

SEQ ID NO: 3672465 - RNA, 15 nt, Human
ugacugaauuucuuu

SEQ ID NO: 3672466 - RNA, 15 nt, Human
ugacugagcuucccu

SEQ ID NO: 3672467 - RNA, 20 nt, Human
ugacugaugcugagauucuu

SEQ ID NO: 3672468 - RNA, 15 nt, Human
ugacugauucuucag

SEQ ID NO: 3672469 - RNA, 22 nt, Human
ugacugcacguggcuucugaug

SEQ ID NO: 3672470 - RNA, 13 nt, Human
ugacugccaagcc

SEQ ID NO: 3672471 - RNA, 16 nt, Human
ugacugccccaacucc

SEQ ID NO: 3672472 - RNA, 20 nt, Human
ugacugcucagaacuugcug

SEQ ID NO: 3672473 - RNA, 22 nt, Human
ugacugcuccccagcccuggcu

SEQ ID NO: 3672474 - RNA, 23 nt, Human
ugacuggaauuuuuauuaugcau

SEQ ID NO: 3672475 - RNA, 23 nt, Human
ugacuggaggguccauuuuucuu

SEQ ID NO: 3672476 - RNA, 11 nt, Human
ugacuggauau

SEQ ID NO: 3672477 - RNA, 14 nt, Human
ugacugggggcaga

SEQ ID NO: 3672478 - RNA, 20 nt, Human
ugacuggggugggaggucuu

SEQ ID NO: 3672479 - RNA, 19 nt, Human
ugacugguuuacaggcccu

SEQ ID NO: 3672480 - RNA, 16 nt, Human
ugacuguacuccuccc

SEQ ID NO: 3672481 - RNA, 22 nt, Human
ugacuguacuccucccaggcgc

SEQ ID NO: 3672482 - RNA, 24 nt, Human
ugacuguccucuccccuccagccu

SEQ ID NO: 3672483 - RNA, 22 nt, Human
ugacugucuggggagcgggucu

SEQ ID NO: 3672484 - RNA, 16 nt, Human
ugacugugcuacuguc

SEQ ID NO: 3672485 - RNA, 11 nt, Human
ugacugugugu

SEQ ID NO: 3672486 - RNA, 17 nt, Human
ugacuguuuuuacccau

SEQ ID NO: 3672487 - RNA, 16 nt, Human
ugacuuaacugcauuu

SEQ ID NO: 3672488 - RNA, 16 nt, Human
ugacuuaaugugauua

SEQ ID NO: 3672489 - RNA, 12 nt, Human
ugacuuacugua

SEQ ID NO: 3672490 - RNA, 20 nt, Human
ugacuuacuguacaugaaaa

SEQ ID NO: 3672491 - RNA, 13 nt, Human
ugacuuagaaucc

SEQ ID NO: 3672492 - RNA, 22 nt, Human
ugacuuagaaucccuguguuaa

SEQ ID NO: 3672493 - RNA, 15 nt, Human
ugacuuauaguacau

SEQ ID NO: 3672494 - RNA, 17 nt, Human
ugacuuauaguacauga

SEQ ID NO: 3672495 - RNA, 14 nt, Human
ugacuuaugggccc

SEQ ID NO: 3672496 - RNA, 17 nt, Human
ugacuucaaugauagua

SEQ ID NO: 3672497 - RNA, 17 nt, Human
ugacuucaggggcugcc

SEQ ID NO: 3672498 - RNA, 18 nt, Human
ugacuucaggggcugccc

SEQ ID NO: 3672499 - RNA, 21 nt, Human
ugacuucaggggcugcccgcu

SEQ ID NO: 3672500 - RNA, 21 nt, Human
ugacuuccccaauaucuugcu

SEQ ID NO: 3672501 - RNA, 20 nt, Human
ugacuucgacugugaccugu

SEQ ID NO: 3672502 - RNA, 20 nt, Human
ugacuucuaauaucauucac

SEQ ID NO: 3672503 - RNA, 15 nt, Human
ugacuucuccagguc

SEQ ID NO: 3672504 - RNA, 13 nt, Human
ugacuucugagau

SEQ ID NO: 3672505 - RNA, 16 nt, Human
ugacuugacuuuaguc

SEQ ID NO: 3672506 - RNA, 21 nt, Human
ugacuuggcuggugugguaca

SEQ ID NO: 3672507 - RNA, 17 nt, Human
ugacuugggcaccccca

SEQ ID NO: 3672508 - RNA, 19 nt, Human
ugacuuguauauuuuaaga

SEQ ID NO: 3672509 - RNA, 19 nt, Human
ugacuugugguugaauuaa

SEQ ID NO: 3672510 - RNA, 16 nt, Human
ugacuuuaauuuaugu

SEQ ID NO: 3672511 - RNA, 20 nt, Human
ugacuuuagaaagcugacau

SEQ ID NO: 3672512 - RNA, 18 nt, Human
ugacuuuagucugcaaaa

SEQ ID NO: 3672513 - RNA, 19 nt, Human
ugacuuuagucugcaaaau

SEQ ID NO: 3672514 - RNA, 22 nt, Human
ugacuuucaaaguggaugcaau

SEQ ID NO: 3672515 - RNA, 21 nt, Human
ugacuuucaggaauugcccau

SEQ ID NO: 3672516 - RNA, 14 nt, Human
ugacuuucaguaaa

SEQ ID NO: 3672517 - RNA, 13 nt, Human
ugacuuucucagc

SEQ ID NO: 3672518 - RNA, 16 nt, Human
ugacuuugcucuuucu

SEQ ID NO: 3672519 - RNA, 15 nt, Human
ugacuuugcuugcuu

SEQ ID NO: 3672520 - RNA, 16 nt, Human
ugacuuugcuugcuuu

SEQ ID NO: 3672521 - RNA, 14 nt, Human
ugacuuuggauaau

SEQ ID NO: 3672522 - RNA, 15 nt, Human
ugacuuuggauaaua

SEQ ID NO: 3672523 - RNA, 23 nt, Human
ugacuuuucaaguauuuaagccu

SEQ ID NO: 3672524 - RNA, 13 nt, Human
ugacuuuucugua

SEQ ID NO: 3672525 - RNA, 13 nt, Human
ugacuuuuuauaa

SEQ ID NO: 3672526 - RNA, 14 nt, Human
ugacuuuuuauaaa

SEQ ID NO: 3672527 - RNA, 14 nt, Human
ugacuuuuugcauu

SEQ ID NO: 3672528 - RNA, 23 nt, Human
ugacuuuuugcauuuaaaacaga

SEQ ID NO: 3672529 - RNA, 15 nt, Human
ugacuuuuuuucacu

SEQ ID NO: 3672530 - RNA, 15 nt, Human
ugacuuuuuuuguau

SEQ ID NO: 3672531 - RNA, 16 nt, Human
ugagaaaaagcuccug

SEQ ID NO: 3672532 - RNA, 21 nt, Human
ugagaaaaauuuacauggcaa

SEQ ID NO: 3672533 - RNA, 14 nt, Human
ugagaaaacaagca

SEQ ID NO: 3672534 - RNA, 23 nt, Human
ugagaaaacaagcaaguucugag

SEQ ID NO: 3672535 - RNA, 23 nt, Human
ggucccagugggaggggcaggcu

SEQ ID NO: 3672536 - RNA, 22 nt, Human
gguccccagcccuuccucugcu

SEQ ID NO: 3672537 - RNA, 21 nt, Human
gguccccaucaucccagcugc

SEQ ID NO: 3672538 - RNA, 21 nt, Human
ggucccccacucuaaagcaaa

SEQ ID NO: 3672539 - RNA, 18 nt, Human
ggucccccuuccauggac

SEQ ID NO: 3672540 - RNA, 12 nt, Human
gguccccuccuu

SEQ ID NO: 3672541 - RNA, 17 nt, Human
ggucccggcucuguggg

SEQ ID NO: 3672542 - RNA, 18 nt, Human
ggucccggcucugugggu

SEQ ID NO: 3672543 - RNA, 19 nt, Human
ggucccggcucugugggug

SEQ ID NO: 3672544 - RNA, 18 nt, Human
ggucccuaauaaagcugu

SEQ ID NO: 3672545 - RNA, 14 nt, Human
ggucccucugugua

SEQ ID NO: 3672546 - RNA, 22 nt, Human
ggucccugauaacaaccuggag

SEQ ID NO: 3672547 - RNA, 14 nt, Human
ggucccugccuuag

SEQ ID NO: 3672548 - RNA, 21 nt, Human
ggucccuucuuacucacacac

SEQ ID NO: 3672549 - RNA, 19 nt, Human
ggucccuuguauccccugc

SEQ ID NO: 3672550 - RNA, 17 nt, Human
gguccggacacuccuag

SEQ ID NO: 3672551 - RNA, 20 nt, Human
gguccggacacuccuagaga

SEQ ID NO: 3672552 - RNA, 21 nt, Human
gguccggacacuccuagagaa

SEQ ID NO: 3672553 - RNA, 16 nt, Human
gguccgguguucuaag

SEQ ID NO: 3672554 - RNA, 21 nt, Human
gguccgguguucuaagaugug

SEQ ID NO: 3672555 - RNA, 16 nt, Human
gguccgugcuaaggac

SEQ ID NO: 3672556 - RNA, 17 nt, Human
gguccuacccauccccg

SEQ ID NO: 3672557 - RNA, 23 nt, Human
gguccuagaaauuccccacccug

SEQ ID NO: 3672558 - RNA, 14 nt, Human
gguccuaggcugga

SEQ ID NO: 3672559 - RNA, 17 nt, Human
gguccuaggcuggaagg

SEQ ID NO: 3672560 - RNA, 23 nt, Human
gguccuccaucccaacagccaug

SEQ ID NO: 3672561 - RNA, 17 nt, Human
gguccuccuccagggac

SEQ ID NO: 3672562 - RNA, 18 nt, Human
gguccuccuccagggaca

SEQ ID NO: 3672563 - RNA, 15 nt, Human
gguccucuggagccc

SEQ ID NO: 3672564 - RNA, 13 nt, Human
gguccucugucag

SEQ ID NO: 3672565 - RNA, 21 nt, Human
gguccucugucagucacagcc

SEQ ID NO: 3672566 - RNA, 19 nt, Human
gguccugagcacugccagg

SEQ ID NO: 3672567 - RNA, 20 nt, Human
gguccugauuucuagaaccc

SEQ ID NO: 3672568 - RNA, 16 nt, Human
gguccugcagccugca

SEQ ID NO: 3672569 - RNA, 20 nt, Human
gguccugcagucuggcugag

SEQ ID NO: 3672570 - RNA, 13 nt, Human
gguccugcugcag

SEQ ID NO: 3672571 - RNA, 21 nt, Human
gguccuggagcagaccacccc

SEQ ID NO: 3672572 - RNA, 21 nt, Human
gguccuggccaucccacaagu

SEQ ID NO: 3672573 - RNA, 15 nt, Human
gguccuggcuccuga

SEQ ID NO: 3672574 - RNA, 16 nt, Human
gguccuggcuccugag

SEQ ID NO: 3672575 - RNA, 15 nt, Human
gguccuggggcucug

SEQ ID NO: 3672576 - RNA, 23 nt, Human
gguccuggggcucugugcaggga

SEQ ID NO: 3672577 - RNA, 15 nt, Human
gguccugggggccug

SEQ ID NO: 3672578 - RNA, 16 nt, Human
gguccugggggccuga

SEQ ID NO: 3672579 - RNA, 18 nt, Human
gguccugguggggcagcu

SEQ ID NO: 3672580 - RNA, 17 nt, Human
gguccuguggcaggcag

SEQ ID NO: 3672581 - RNA, 22 nt, Human
gguccuguggcaggcagcgcca

SEQ ID NO: 3672582 - RNA, 15 nt, Human
gguccuuccaggccc

SEQ ID NO: 3672583 - RNA, 16 nt, Human
gguccuugcaccccuc

SEQ ID NO: 3672584 - RNA, 21 nt, Human
gguccuuugggaaaggagaag

SEQ ID NO: 3672585 - RNA, 15 nt, Human
gguccuuugggguga

SEQ ID NO: 3672586 - RNA, 16 nt, Human
gguccuuuugacacug

SEQ ID NO: 3672587 - RNA, 20 nt, Human
ggucgcccuggacugugugc

SEQ ID NO: 3672588 - RNA, 22 nt, Human
ggucgcuuacuuugagugaucc

SEQ ID NO: 3672589 - RNA, 22 nt, Human
ggucgggcagcacaaguguaau

SEQ ID NO: 3672590 - RNA, 14 nt, Human
ggucgggggggacc

SEQ ID NO: 3672591 - RNA, 20 nt, Human
ggucgguagguucagccaag

SEQ ID NO: 3672592 - RNA, 14 nt, Human
ggucggugccuuca

SEQ ID NO: 3672593 - RNA, 15 nt, Human
ggucguggagagcua

SEQ ID NO: 3672594 - RNA, 19 nt, Human
ggucguggagagcuaggag

SEQ ID NO: 3672595 - RNA, 14 nt, Human
ggucguuuuuuuca

SEQ ID NO: 3672596 - RNA, 13 nt, Human
ggucuaauguuua

SEQ ID NO: 3672597 - RNA, 16 nt, Human
ggucuacacugcaauc

SEQ ID NO: 3672598 - RNA, 21 nt, Human
ggucuacacugcaaucauaug

SEQ ID NO: 3672599 - RNA, 23 nt, Human
ggucuauguaaaugcaucugucc

SEQ ID NO: 3672600 - RNA, 14 nt, Human
ggucuauuccagcu

SEQ ID NO: 3672601 - RNA, 18 nt, Human
ggucuauuccagcucauu

SEQ ID NO: 3672602 - RNA, 19 nt, Human
ggucuauugucuguauuug

SEQ ID NO: 3672603 - RNA, 13 nt, Human
ggucucacccaug

SEQ ID NO: 3672604 - RNA, 15 nt, Human
ggucucacccuggag

SEQ ID NO: 3672605 - RNA, 20 nt, Human
ggucucacccuggaggcacc

SEQ ID NO: 3672606 - RNA, 11 nt, Human
ggucucagccc

SEQ ID NO: 3672607 - RNA, 18 nt, Human
ggucucaugcuccuuaau

SEQ ID NO: 3672608 - RNA, 11 nt, Human
ggucucccugg

SEQ ID NO: 3672609 - RNA, 13 nt, Human
ggucucccuggcu

SEQ ID NO: 3672610 - RNA, 17 nt, Human
ggucucccuggcucccu

SEQ ID NO: 3672611 - RNA, 21 nt, Human
ggucucccuucucuacacucu

SEQ ID NO: 3672612 - RNA, 12 nt, Human
ggucuccucagg

SEQ ID NO: 3672613 - RNA, 20 nt, Human
ggucucgcugaugcugggcu

SEQ ID NO: 3672614 - RNA, 22 nt, Human
ggucucgucuuccgucuccccc

SEQ ID NO: 3672615 - RNA, 15 nt, Human
ggucucuaggcuggg

SEQ ID NO: 3672616 - RNA, 19 nt, Human
ggucucuagugcugugaaa

SEQ ID NO: 3672617 - RNA, 19 nt, Human
ggucucucucucucuacaa

SEQ ID NO: 3672618 - RNA, 20 nt, Human
ggucucuuacuuuccuuucc

SEQ ID NO: 3672619 - RNA, 20 nt, Human
ggucucuucugaauaaagca

SEQ ID NO: 3672620 - RNA, 20 nt, Human
ggucucuuuuguaaauuaaa

SEQ ID NO: 3672621 - RNA, 12 nt, Human
ggucugaaaugg

SEQ ID NO: 3672622 - RNA, 21 nt, Human
ggucugaauguucugacauua

SEQ ID NO: 3672623 - RNA, 22 nt, Human
ggucugaauguucugacauuaa

SEQ ID NO: 3672624 - RNA, 14 nt, Human
ggucugacccacug

SEQ ID NO: 3672625 - RNA, 21 nt, Human
ggucugaguuguuaccccaag

SEQ ID NO: 3672626 - RNA, 14 nt, Human
ggucugcaagucag

SEQ ID NO: 3672627 - RNA, 19 nt, Human
ggucugcaagucagaggau

SEQ ID NO: 3672628 - RNA, 13 nt, Human
ggucugcaggcag

SEQ ID NO: 3672629 - RNA, 12 nt, Human
ggucugccacca

SEQ ID NO: 3672630 - RNA, 18 nt, Human
ugaaauuuaaacauuaaa

SEQ ID NO: 3672631 - RNA, 16 nt, Human
ugaaauuuauacacca

SEQ ID NO: 3672632 - RNA, 23 nt, Human
ugaaauuuauugaggaaaaauau

SEQ ID NO: 3672633 - RNA, 21 nt, Human
ugaaauuuauuuaaugugagu

SEQ ID NO: 3672634 - RNA, 23 nt, Human
ugaaauuuccugggagcuuuugu

SEQ ID NO: 3672635 - RNA, 14 nt, Human
ugaaauuugaauuu

SEQ ID NO: 3672636 - RNA, 13 nt, Human
ugaaauuuuacca

SEQ ID NO: 3672637 - RNA, 16 nt, Human
ugaaauuuuauaugcu

SEQ ID NO: 3672638 - RNA, 18 nt, Human
ugaaauuuuauaugcuua

SEQ ID NO: 3672639 - RNA, 20 nt, Human
ugaaauuuuccaaugucugc

SEQ ID NO: 3672640 - RNA, 20 nt, Human
ugaaauuuucuagacuuucu

SEQ ID NO: 3672641 - RNA, 21 nt, Human
ugaaauuuucuagacuuucug

SEQ ID NO: 3672642 - RNA, 20 nt, Human
ugaaauuuucuugauuugag

SEQ ID NO: 3672643 - RNA, 18 nt, Human
ugaaauuuugcaaauaua

SEQ ID NO: 3672644 - RNA, 22 nt, Human
ugaaauuuuuaaaaauacacuu

SEQ ID NO: 3672645 - RNA, 15 nt, Human
ugaaauuuuucuucu

SEQ ID NO: 3672646 - RNA, 18 nt, Human
ugaacaaaaaauaaaaau

SEQ ID NO: 3672647 - RNA, 15 nt, Human
ugaacaaaaggguca

SEQ ID NO: 3672648 - RNA, 15 nt, Human
ugaacaaaauuauuu

SEQ ID NO: 3672649 - RNA, 23 nt, Human
ugaacaaaguuuaccagaaagca

SEQ ID NO: 3672650 - RNA, 19 nt, Human
ugaacaaauuuacagagac

SEQ ID NO: 3672651 - RNA, 20 nt, Human
ugaacaaauuuacagagaca

SEQ ID NO: 3672652 - RNA, 18 nt, Human
ugaacaagaauuggaagc

SEQ ID NO: 3672653 - RNA, 14 nt, Human
ugaacaagagaagc

SEQ ID NO: 3672654 - RNA, 20 nt, Human
ugaacaaguuguuucauuga

SEQ ID NO: 3672655 - RNA, 16 nt, Human
ugaacaaucaaagcac

SEQ ID NO: 3672656 - RNA, 14 nt, Human
ugaacaaugaaguu

SEQ ID NO: 3672657 - RNA, 15 nt, Human
ugaacaaugaaguug

SEQ ID NO: 3672658 - RNA, 14 nt, Human
ugaacacaaauuau

SEQ ID NO: 3672659 - RNA, 15 nt, Human
ugaacacaggcagcu

SEQ ID NO: 3672660 - RNA, 16 nt, Human
ugaacacaggcagcuu

SEQ ID NO: 3672661 - RNA, 20 nt, Human
ugaacacaggcagcuuucua

SEQ ID NO: 3672662 - RNA, 23 nt, Human
ugaacacaggcagcuuucuagaa

SEQ ID NO: 3672663 - RNA, 12 nt, Human
ugaacacaguau

SEQ ID NO: 3672664 - RNA, 15 nt, Human
ugaacacaguauuuu

SEQ ID NO: 3672665 - RNA, 19 nt, Human
ugaacacaguauuuuccca

SEQ ID NO: 3672666 - RNA, 19 nt, Human
ugaacacaucagcuagcaa

SEQ ID NO: 3672667 - RNA, 20 nt, Human
ugaacacaucagcuagcaaa

SEQ ID NO: 3672668 - RNA, 20 nt, Human
ugaacacaugguuggaaaga

SEQ ID NO: 3672669 - RNA, 17 nt, Human
ugaacaccauugaaggc

SEQ ID NO: 3672670 - RNA, 20 nt, Human
ugaacaccauugaaggcuua

SEQ ID NO: 3672671 - RNA, 21 nt, Human
ugaacagaugaccccugccca

SEQ ID NO: 3672672 - RNA, 18 nt, Human
ugaacagcugguguagcu

SEQ ID NO: 3672673 - RNA, 17 nt, Human
ugaacaggaaacuccug

SEQ ID NO: 3672674 - RNA, 15 nt, Human
ugaacauacaaaugc

SEQ ID NO: 3672675 - RNA, 13 nt, Human
ugaacauguacug

SEQ ID NO: 3672676 - RNA, 13 nt, Human
ugaacauguuuua

SEQ ID NO: 3672677 - RNA, 22 nt, Human
ugaacauuaauccacauguuuc

SEQ ID NO: 3672678 - RNA, 12 nt, Human
ugaacauuccaa

SEQ ID NO: 3672679 - RNA, 17 nt, Human
ggucuuuuuaugcauuu

SEQ ID NO: 3672680 - RNA, 18 nt, Human
ggugaaaauuaggguugg

SEQ ID NO: 3672681 - RNA, 13 nt, Human
ggugaaaauuauu

SEQ ID NO: 3672682 - RNA, 16 nt, Human
ggugaaagaaaucaug

SEQ ID NO: 3672683 - RNA, 19 nt, Human
ggugaaagaaaucauguua

SEQ ID NO: 3672684 - RNA, 13 nt, Human
ggugaaagggagc

SEQ ID NO: 3672685 - RNA, 13 nt, Human
ggugaacagaaca

SEQ ID NO: 3672686 - RNA, 14 nt, Human
ggugaacauugcaa

SEQ ID NO: 3672687 - RNA, 16 nt, Human
ggugaagaaaacuccu

SEQ ID NO: 3672688 - RNA, 21 nt, Human
ggugaagcucacuucugggcu

SEQ ID NO: 3672689 - RNA, 14 nt, Human
ggugaaggaauaua

SEQ ID NO: 3672690 - RNA, 17 nt, Human
ggugaauggcuuuguau

SEQ ID NO: 3672691 - RNA, 17 nt, Human
ggugacaagagccugau

SEQ ID NO: 3672692 - RNA, 14 nt, Human
ggugacacagacuc

SEQ ID NO: 3672693 - RNA, 23 nt, Human
ggugacagucaucaucagggccu

SEQ ID NO: 3672694 - RNA, 12 nt, Human
ggugacaguggc

SEQ ID NO: 3672695 - RNA, 18 nt, Human
ggugacaugugaaaccuu

SEQ ID NO: 3672696 - RNA, 21 nt, Human
ggugaccaaaauccccuucuc

SEQ ID NO: 3672697 - RNA, 14 nt, Human
ggugaccccagggc

SEQ ID NO: 3672698 - RNA, 17 nt, Human
ggugaccccagggcaca

SEQ ID NO: 3672699 - RNA, 22 nt, Human
ggugacccggcacccccugcag

SEQ ID NO: 3672700 - RNA, 18 nt, Human
ggugaccuccggccaggu

SEQ ID NO: 3672701 - RNA, 14 nt, Human
ggugaccucugccu

SEQ ID NO: 3672702 - RNA, 21 nt, Human
ggugaccuuccaagagccuga

SEQ ID NO: 3672703 - RNA, 15 nt, Human
ggugaccuucuggga

SEQ ID NO: 3672704 - RNA, 16 nt, Human
ggugacgguugggagc

SEQ ID NO: 3672705 - RNA, 21 nt, Human
ggugacugucuggggagcggg

SEQ ID NO: 3672706 - RNA, 19 nt, Human
ggugacuucacagugaagu

SEQ ID NO: 3672707 - RNA, 15 nt, Human
ggugagaaauuuaaa

SEQ ID NO: 3672708 - RNA, 21 nt, Human
ggugagaauugggcggcucug

SEQ ID NO: 3672709 - RNA, 14 nt, Human
ggugagaccaccuc

SEQ ID NO: 3672710 - RNA, 15 nt, Human
ggugagaccaccucu

SEQ ID NO: 3672711 - RNA, 21 nt, Human
ggugagagggccgggcagagg

SEQ ID NO: 3672712 - RNA, 16 nt, Human
ggugagaggggaacag

SEQ ID NO: 3672713 - RNA, 14 nt, Human
ggugagaugcugga

SEQ ID NO: 3672714 - RNA, 22 nt, Human
ggugagaugcuggagaagagag

SEQ ID NO: 3672715 - RNA, 18 nt, Human
ggugagcagacugguggg

SEQ ID NO: 3672716 - RNA, 19 nt, Human
ggugagcauuacaggcaag

SEQ ID NO: 3672717 - RNA, 19 nt, Human
ggugagcccauggcccucc

SEQ ID NO: 3672718 - RNA, 13 nt, Human
ggugaggagcaca

SEQ ID NO: 3672719 - RNA, 15 nt, Human
ggugaggcaauaaaa

SEQ ID NO: 3672720 - RNA, 20 nt, Human
ggugaggcagugggucccac

SEQ ID NO: 3672721 - RNA, 16 nt, Human
ggugaggucagcacau

SEQ ID NO: 3672722 - RNA, 20 nt, Human
ggugagucuuggcggcagca

SEQ ID NO: 3672723 - RNA, 23 nt, Human
ggugagucuuggcggcagcagcc

SEQ ID NO: 3672724 - RNA, 15 nt, Human
ggugauaaggacaug

SEQ ID NO: 3672725 - RNA, 18 nt, Human
ggugauccacccaccuca

SEQ ID NO: 3672726 - RNA, 21 nt, Human
ggugauccauguaacugccua

SEQ ID NO: 3672727 - RNA, 19 nt, Human
ggugaucccguuuucccca

SEQ ID NO: 3672728 - RNA, 17 nt, Human
ggugaucugggauuagg

SEQ ID NO: 3672729 - RNA, 17 nt, Human
ggugaugagggcagcag

SEQ ID NO: 3672730 - RNA, 22 nt, Human
ggugauguugacaucacuggca

SEQ ID NO: 3672731 - RNA, 18 nt, Human
ggugauuccgcagugaga

SEQ ID NO: 3672732 - RNA, 18 nt, Human
ggugauuggaccaggcca

SEQ ID NO: 3672733 - RNA, 23 nt, Human
ggugcaacccaaggacugaggga

SEQ ID NO: 3672734 - RNA, 16 nt, Human
ggugcaacccuuaccc

SEQ ID NO: 3672735 - RNA, 12 nt, Human
ggugcaaugacc

SEQ ID NO: 3672736 - RNA, 13 nt, Human
ggugcaaugaccu

SEQ ID NO: 3672737 - RNA, 18 nt, Human
ggugcaaugaccuuucaa

SEQ ID NO: 3672738 - RNA, 13 nt, Human
ggugcacaggagg

SEQ ID NO: 3672739 - RNA, 15 nt, Human
ggugcacaggagggg

SEQ ID NO: 3672740 - RNA, 13 nt, Human
ggugcacugggag

SEQ ID NO: 3672741 - RNA, 15 nt, Human
ggugcacuuuguaaa

SEQ ID NO: 3672742 - RNA, 19 nt, Human
ggugcagacaaucuucugu

SEQ ID NO: 3672743 - RNA, 15 nt, Human
ggugcagacagaagu

SEQ ID NO: 3672744 - RNA, 23 nt, Human
ggugcagacagaagucuccucaa

SEQ ID NO: 3672745 - RNA, 13 nt, Human
ggugcagaggcug

SEQ ID NO: 3672746 - RNA, 11 nt, Human
ggugcagaggu

SEQ ID NO: 3672747 - RNA, 17 nt, Human
ggugcagagugcccaga

SEQ ID NO: 3672748 - RNA, 17 nt, Human
ggugcagccagaggcac

SEQ ID NO: 3672749 - RNA, 21 nt, Human
ggugcauuugaggucuguucu

SEQ ID NO: 3672750 - RNA, 22 nt, Human
ggugccaacaguguuaggccug

SEQ ID NO: 3672751 - RNA, 10 nt, Human
ggugccaccu

SEQ ID NO: 3672752 - RNA, 19 nt, Human
ggugccacuuuacccaccu

SEQ ID NO: 3672753 - RNA, 18 nt, Human
ggugccagcaaagcccca

SEQ ID NO: 3672754 - RNA, 19 nt, Human
ggugccagcaaagccccau

SEQ ID NO: 3672755 - RNA, 15 nt, Human
ggugccagcaacuga

SEQ ID NO: 3672756 - RNA, 13 nt, Human
ggugccagccuga

SEQ ID NO: 3672757 - RNA, 22 nt, Human
ggugccaugucagcgcucuggu

SEQ ID NO: 3672758 - RNA, 14 nt, Human
ggugcccaagccag

SEQ ID NO: 3672759 - RNA, 18 nt, Human
ggugcccaagccagaggc

SEQ ID NO: 3672760 - RNA, 23 nt, Human
ggugcccagaauaaguuauugca

SEQ ID NO: 3672761 - RNA, 22 nt, Human
ggugcccagcuauaccugugcc

SEQ ID NO: 3672762 - RNA, 23 nt, Human
ggugcccccuccucucccauccc

SEQ ID NO: 3672763 - RNA, 13 nt, Human
ggugcccuccacu

SEQ ID NO: 3672764 - RNA, 20 nt, Human
ggugcccuggaugcccagga

SEQ ID NO: 3672765 - RNA, 14 nt, Human
ggugccgccugccc

SEQ ID NO: 3672766 - RNA, 17 nt, Human
ggugccuaguauugaca

SEQ ID NO: 3672767 - RNA, 13 nt, Human
ggugccuccaggu

SEQ ID NO: 3672768 - RNA, 14 nt, Human
ggugccuccaggug

SEQ ID NO: 3672769 - RNA, 17 nt, Human
ggugccuccaggugugc

SEQ ID NO: 3672770 - RNA, 15 nt, Human
ggugccugagaggca

SEQ ID NO: 3672771 - RNA, 18 nt, Human
ggugccugagaggcaggc

SEQ ID NO: 3672772 - RNA, 19 nt, Human
ggugccuggguggggcugc

SEQ ID NO: 3672773 - RNA, 13 nt, Human
ggugccuguccca

SEQ ID NO: 3672774 - RNA, 18 nt, Human
ggugccugugaggcaggg

SEQ ID NO: 3672775 - RNA, 16 nt, Human
ggugccuuuccuguuc

SEQ ID NO: 3672776 - RNA, 18 nt, Human
ggugccuuuccuguucag

SEQ ID NO: 3672777 - RNA, 19 nt, Human
ggugccuuuccuguucagc

SEQ ID NO: 3672778 - RNA, 22 nt, Human
ggugcgaccccaucugcccagg

SEQ ID NO: 3672779 - RNA, 19 nt, Human
ggugcggcggucccagcuc

SEQ ID NO: 3672780 - RNA, 12 nt, Human
ggugcggcugug

SEQ ID NO: 3672781 - RNA, 17 nt, Human
ggugcgggcaccuguag

SEQ ID NO: 3672782 - RNA, 22 nt, Human
ggugcuaaauggucgcccagga

SEQ ID NO: 3672783 - RNA, 20 nt, Human
ggugcuaaugucaaaccacu

SEQ ID NO: 3672784 - RNA, 23 nt, Human
ggugcuacacccuuuuccagcug

SEQ ID NO: 3672785 - RNA, 14 nt, Human
ggugcuaggaagag

SEQ ID NO: 3672786 - RNA, 19 nt, Human
ggugcuauaggcuggagaa

SEQ ID NO: 3672787 - RNA, 16 nt, Human
ggugcuaucuccccca

SEQ ID NO: 3672788 - RNA, 23 nt, Human
ggugcuaucucccccagccccau

SEQ ID NO: 3672789 - RNA, 23 nt, Human
ggugcucagaauaaggcaggcau

SEQ ID NO: 3672790 - RNA, 15 nt, Human
ggugcugacggccag

SEQ ID NO: 3672791 - RNA, 16 nt, Human
ggugcugacggccagg

SEQ ID NO: 3672792 - RNA, 18 nt, Human
ggugcugcaguauguugc

SEQ ID NO: 3672793 - RNA, 15 nt, Human
ggugcugccauccag

SEQ ID NO: 3672794 - RNA, 21 nt, Human
ggugcugccauccagguucag

SEQ ID NO: 3672795 - RNA, 14 nt, Human
ugaagaacauguga

SEQ ID NO: 3672796 - RNA, 13 nt, Human
ugaagaacugagg

SEQ ID NO: 3672797 - RNA, 23 nt, Human
ugaagaacugcaggcccuggccu

SEQ ID NO: 3672798 - RNA, 20 nt, Human
ugaagaagcaccaaucauga

SEQ ID NO: 3672799 - RNA, 14 nt, Human
ugaagaagccugua

SEQ ID NO: 3672800 - RNA, 14 nt, Human
ugaagaauacaguu

SEQ ID NO: 3672801 - RNA, 21 nt, Human
ugaagaauacuucucauuuuu

SEQ ID NO: 3672802 - RNA, 13 nt, Human
ugaagaauguuaa

SEQ ID NO: 3672803 - RNA, 14 nt, Human
ugaagaauuaagau

SEQ ID NO: 3672804 - RNA, 20 nt, Human
ugaagaauuauuuuuuuucu

SEQ ID NO: 3672805 - RNA, 15 nt, Human
ugaagaauuuaaaga

SEQ ID NO: 3672806 - RNA, 17 nt, Human
ugaagacaaaaauacuc

SEQ ID NO: 3672807 - RNA, 11 nt, Human
ugaagacaaug

SEQ ID NO: 3672808 - RNA, 17 nt, Human
ugaagacaaugacuuac

SEQ ID NO: 3672809 - RNA, 22 nt, Human
ugaagacaaugacuuacuguac

SEQ ID NO: 3672810 - RNA, 13 nt, Human
ugaagacaauuug

SEQ ID NO: 3672811 - RNA, 23 nt, Human
ugaagacaauuugauacauaaua

SEQ ID NO: 3672812 - RNA, 14 nt, Human
ugaagacagagcua

SEQ ID NO: 3672813 - RNA, 23 nt, Human
ugaagacagcccgauccuccccu

SEQ ID NO: 3672814 - RNA, 12 nt, Human
ugaagacauaaa

SEQ ID NO: 3672815 - RNA, 20 nt, Human
ugaagaccacauccacacac

SEQ ID NO: 3672816 - RNA, 19 nt, Human
ugaagaccuaaccagggcc

SEQ ID NO: 3672817 - RNA, 21 nt, Human
ugaagaccuuuuucugcacua

SEQ ID NO: 3672818 - RNA, 19 nt, Human
ugaagacucauucuucugu

SEQ ID NO: 3672819 - RNA, 15 nt, Human
ugaagacuccagaaa

SEQ ID NO: 3672820 - RNA, 17 nt, Human
ugaagacuggaagcuaa

SEQ ID NO: 3672821 - RNA, 23 nt, Human
ugaagacuuacagcaaauccuuu

SEQ ID NO: 3672822 - RNA, 23 nt, Human
ugaagagaaccgagcaaagauca

SEQ ID NO: 3672823 - RNA, 20 nt, Human
ugaagagaagggcagggcug

SEQ ID NO: 3672824 - RNA, 19 nt, Human
guaaaguccuuuucuugcu

SEQ ID NO: 3672825 - RNA, 18 nt, Human
guaaagugauaauuucug

SEQ ID NO: 3672826 - RNA, 23 nt, Human
guaaagugauaauuucuggaauu

SEQ ID NO: 3672827 - RNA, 14 nt, Human
guaaagugucagaa

SEQ ID NO: 3672828 - RNA, 15 nt, Human
guaaaguuaaaagaa

SEQ ID NO: 3672829 - RNA, 14 nt, Human
guaaaguuagucua

SEQ ID NO: 3672830 - RNA, 21 nt, Human
guaaaguuuccgugcguggca

SEQ ID NO: 3672831 - RNA, 14 nt, Human
guaaauaaagcccu

SEQ ID NO: 3672832 - RNA, 15 nt, Human
guaaauaaagcccug

SEQ ID NO: 3672833 - RNA, 21 nt, Human
guaaauaaccccauucuuugc

SEQ ID NO: 3672834 - RNA, 21 nt, Human
guaaauaacuggaaaacagaa

SEQ ID NO: 3672835 - RNA, 16 nt, Human
guaaauaauacauuau

SEQ ID NO: 3672836 - RNA, 14 nt, Human
guaaauaauucuuu

SEQ ID NO: 3672837 - RNA, 15 nt, Human
guaaauaauuuauuu

SEQ ID NO: 3672838 - RNA, 13 nt, Human
guaaauacaauuu

SEQ ID NO: 3672839 - RNA, 23 nt, Human
guaaauacaauuuuguuucugua

SEQ ID NO: 3672840 - RNA, 12 nt, Human
guaaauacacca

SEQ ID NO: 3672841 - RNA, 13 nt, Human
guaaauaccagga

SEQ ID NO: 3672842 - RNA, 17 nt, Human
guaaauaggaaucauuc

SEQ ID NO: 3672843 - RNA, 14 nt, Human
guaaauaggaauug

SEQ ID NO: 3672844 - RNA, 13 nt, Human
guaaauagguuuc

SEQ ID NO: 3672845 - RNA, 16 nt, Human
guaaauaguauuugag

SEQ ID NO: 3672846 - RNA, 19 nt, Human
guaaauauaaagacguuuu

SEQ ID NO: 3672847 - RNA, 16 nt, Human
guaaauauauaaauau

SEQ ID NO: 3672848 - RNA, 20 nt, Human
guaaauauauaaauauauau

SEQ ID NO: 3672849 - RNA, 15 nt, Human
guaaauaugaaucug

SEQ ID NO: 3672850 - RNA, 23 nt, Human
guaaauaugaaucugcucacuuu

SEQ ID NO: 3672851 - RNA, 12 nt, Human
guaaauauuaaa

SEQ ID NO: 3672852 - RNA, 13 nt, Human
guaaauauucuau

SEQ ID NO: 3672853 - RNA, 15 nt, Human
guaaauauucuauau

SEQ ID NO: 3672854 - RNA, 22 nt, Human
guaaauauugaggcuuuguguu

SEQ ID NO: 3672855 - RNA, 14 nt, Human
guaaauauuuuaaa

SEQ ID NO: 3672856 - RNA, 22 nt, Human
guaaaucagauguugaauucuu

SEQ ID NO: 3672857 - RNA, 21 nt, Human
guaaaucaguaagagguguua

SEQ ID NO: 3672858 - RNA, 16 nt, Human
guaaaucccauuauuc

SEQ ID NO: 3672859 - RNA, 18 nt, Human
ugacagccucagugaccc

SEQ ID NO: 3672860 - RNA, 20 nt, Human
ugacagcucuuuuugugaag

SEQ ID NO: 3672861 - RNA, 13 nt, Human
ugacagcugcucc

SEQ ID NO: 3672862 - RNA, 22 nt, Human
ugacagcugcuccuagagggag

SEQ ID NO: 3672863 - RNA, 14 nt, Human
ugacagcugucccu

SEQ ID NO: 3672864 - RNA, 15 nt, Human
ugacagcugucccug

SEQ ID NO: 3672865 - RNA, 16 nt, Human
ugacagcugucccugu

SEQ ID NO: 3672866 - RNA, 18 nt, Human
ugacagcugucccuguca

SEQ ID NO: 3672867 - RNA, 16 nt, Human
ugacagcugugcugua

SEQ ID NO: 3672868 - RNA, 16 nt, Human
ugacagcuuugcugcu

SEQ ID NO: 3672869 - RNA, 17 nt, Human
ugacagcuuugcugcug

SEQ ID NO: 3672870 - RNA, 18 nt, Human
ugacagcuuugcugcuga

SEQ ID NO: 3672871 - RNA, 13 nt, Human
ugacaggaaccuu

SEQ ID NO: 3672872 - RNA, 23 nt, Human
ugacaggacgcugaccguggagc

SEQ ID NO: 3672873 - RNA, 19 nt, Human
ugacaggcaaugcuggcug

SEQ ID NO: 3672874 - RNA, 12 nt, Human
ugacagggaagc

SEQ ID NO: 3672875 - RNA, 20 nt, Human
ugacagggaagcuacagguu

SEQ ID NO: 3672876 - RNA, 21 nt, Human
ugacagggcacaccgggcacu

SEQ ID NO: 3672877 - RNA, 13 nt, Human
ugacagggccagu

SEQ ID NO: 3672878 - RNA, 18 nt, Human
ugacagggccaguggggc

SEQ ID NO: 3672879 - RNA, 21 nt, Human
ugacagggccaguggggccug

SEQ ID NO: 3672880 - RNA, 15 nt, Human
ugacagguuugggac

SEQ ID NO: 3672881 - RNA, 21 nt, Human
ugacaguaacuugguuauaca

SEQ ID NO: 3672882 - RNA, 15 nt, Human
ugacaguaauugugu

SEQ ID NO: 3672883 - RNA, 14 nt, Human
ugacaguaguacca

SEQ ID NO: 3672884 - RNA, 22 nt, Human
ugacaguauuauacgcuggcaa

SEQ ID NO: 3672885 - RNA, 17 nt, Human
ugacagucaucaucagg

SEQ ID NO: 3672886 - RNA, 20 nt, Human
ugacagucaucaucagggcc

SEQ ID NO: 3672887 - RNA, 22 nt, Human
ugacaguccgucaaaacagauu

SEQ ID NO: 3672888 - RNA, 23 nt, Human
ugacagucuugugcuuuuccuau

SEQ ID NO: 3672889 - RNA, 20 nt, Human
ugacagugccugggaaugua

SEQ ID NO: 3672890 - RNA, 14 nt, Human
ugacaguguuuuua

SEQ ID NO: 3672891 - RNA, 16 nt, Human
ugacaguucugaagaa

SEQ ID NO: 3672892 - RNA, 17 nt, Human
ugacauaaaaacaacuu

SEQ ID NO: 3672893 - RNA, 16 nt, Human
ugacauaaaguugaua

SEQ ID NO: 3672894 - RNA, 17 nt, Human
ugacauaacagugcagg

SEQ ID NO: 3672895 - RNA, 16 nt, Human
ugacauaauauauucu

SEQ ID NO: 3672896 - RNA, 15 nt, Human
ugacauacccccucc

SEQ ID NO: 3672897 - RNA, 20 nt, Human
ugacauacccccucccccac

SEQ ID NO: 3672898 - RNA, 16 nt, Human
ugacauaccuuuuauu

SEQ ID NO: 3672899 - RNA, 16 nt, Human
ugacauagucuggcug

SEQ ID NO: 3672900 - RNA, 17 nt, Human
ugacauauuuaauguuu

SEQ ID NO: 3672901 - RNA, 18 nt, Human
ugacauauuuaauguuuu

SEQ ID NO: 3672902 - RNA, 21 nt, Human
ugacauauuuaauguuuuaaa

SEQ ID NO: 3672903 - RNA, 18 nt, Human
ugacaucacuggcauggu

SEQ ID NO: 3672904 - RNA, 13 nt, Human
ugacaucacuugu

SEQ ID NO: 3672905 - RNA, 21 nt, Human
ugacaucacuuguacaaaaua

SEQ ID NO: 3672906 - RNA, 18 nt, Human
ugacaucagccagcugcc

SEQ ID NO: 3672907 - RNA, 15 nt, Human
ugacaucucaggggc

SEQ ID NO: 3672908 - RNA, 22 nt, Human
ugacaucucuauuccccacccu

SEQ ID NO: 3672909 - RNA, 17 nt, Human
ugacaucuuaguauuug

SEQ ID NO: 3672910 - RNA, 20 nt, Human
ugacaucuuuuuaaagcuua

SEQ ID NO: 3672911 - RNA, 21 nt, Human
ugacaugaauuuuagcuuuug

SEQ ID NO: 3672912 - RNA, 23 nt, Human
ugacaugaggaaaauaauguaau

SEQ ID NO: 3672913 - RNA, 15 nt, Human
ugacaugauuccuuc

SEQ ID NO: 3672914 - RNA, 18 nt, Human
ugacaugcacucagcucu

SEQ ID NO: 3672915 - RNA, 19 nt, Human
ugacaugcacugacccuuc

SEQ ID NO: 3672916 - RNA, 23 nt, Human
ugacaugcccucccuucucccug

SEQ ID NO: 3672917 - RNA, 17 nt, Human
ugacaugccuauaugag

SEQ ID NO: 3672918 - RNA, 23 nt, Human
ugacaugccuauaugagaagaau

SEQ ID NO: 3672919 - RNA, 16 nt, Human
ugacauggaaaugaag

SEQ ID NO: 3672920 - RNA, 18 nt, Human
ugacaugggacauuugcu

SEQ ID NO: 3672921 - RNA, 15 nt, Human
ugacauggugccuga

SEQ ID NO: 3672922 - RNA, 21 nt, Human
ugacauggugccugagaggca

SEQ ID NO: 3672923 - RNA, 17 nt, Human
ugacauguacagagaac

SEQ ID NO: 3672924 - RNA, 18 nt, Human
ugacauguauuuuuuccu

SEQ ID NO: 3672925 - RNA, 14 nt, Human
ugacauguccuucu

SEQ ID NO: 3672926 - RNA, 13 nt, Human
ugacaugucuuuu

SEQ ID NO: 3672927 - RNA, 21 nt, Human
ugacauguggaaagugaauuu

SEQ ID NO: 3672928 - RNA, 18 nt, Human
ugacauguggggccaggu

SEQ ID NO: 3672929 - RNA, 14 nt, Human
ugacauuaacaaau

SEQ ID NO: 3672930 - RNA, 19 nt, Human
ugacauuaacaaauaaaaa

SEQ ID NO: 3672931 - RNA, 17 nt, Human
ugacauuaacaguuuuc

SEQ ID NO: 3672932 - RNA, 22 nt, Human
ugacauuaacaguuuuccauga

SEQ ID NO: 3672933 - RNA, 19 nt, Human
ugacauuaagaauguuggu

SEQ ID NO: 3672934 - RNA, 15 nt, Human
ugacauucaaggcau

SEQ ID NO: 3672935 - RNA, 21 nt, Human
ugacauuccuaaacuaucuuu

SEQ ID NO: 3672936 - RNA, 15 nt, Human
ugacauuccuugcug

SEQ ID NO: 3672937 - RNA, 22 nt, Human
ugacauucucaggaagccccca

SEQ ID NO: 3672938 - RNA, 16 nt, Human
ugacauugacuauuuu

SEQ ID NO: 3672939 - RNA, 19 nt, Human
ugacauugcuaagaugcuc

SEQ ID NO: 3672940 - RNA, 13 nt, Human
ugacauugcuuua

SEQ ID NO: 3672941 - RNA, 15 nt, Human
ugacauugcuuuacu

SEQ ID NO: 3672942 - RNA, 18 nt, Human
ugacauuguagagcuucu

SEQ ID NO: 3672943 - RNA, 14 nt, Human
ugacauugucuccu

SEQ ID NO: 3672944 - RNA, 20 nt, Human
ugacauuguggcacauucuu

SEQ ID NO: 3672945 - RNA, 16 nt, Human
ugacauuuaauuuagu

SEQ ID NO: 3672946 - RNA, 20 nt, Human
ugacauuuauauauugaauu

SEQ ID NO: 3672947 - RNA, 13 nt, Human
ugacauuucuucu

SEQ ID NO: 3672948 - RNA, 13 nt, Human
ugacauuucuuug

SEQ ID NO: 3672949 - RNA, 14 nt, Human
ugacauuuguaguu

SEQ ID NO: 3672950 - RNA, 16 nt, Human
ugacauuuguaguugg

SEQ ID NO: 3672951 - RNA, 14 nt, Human
ugacauuugucauu

SEQ ID NO: 3672952 - RNA, 18 nt, Human
ugacauuugucauuuuca

SEQ ID NO: 3672953 - RNA, 20 nt, Human
ugacauuugucauuuucauu

SEQ ID NO: 3672954 - RNA, 22 nt, Human
ugacauuuguuugguuauagug

SEQ ID NO: 3672955 - RNA, 12 nt, Human
ugacauuuuaca

SEQ ID NO: 3672956 - RNA, 14 nt, Human
ugacauuuuacauu

SEQ ID NO: 3672957 - RNA, 16 nt, Human
ugacauuuuacauuaa

SEQ ID NO: 3672958 - RNA, 14 nt, Human
ugacauuuugccaa

SEQ ID NO: 3672959 - RNA, 16 nt, Human
ugaccaaaaguuacau

SEQ ID NO: 3672960 - RNA, 20 nt, Human
ugaccaaaauggugaaaccu

SEQ ID NO: 3672961 - RNA, 14 nt, Human
ugaccaaaguccuu

SEQ ID NO: 3672962 - RNA, 23 nt, Human
ugaccaacaggcuguucugcacu

SEQ ID NO: 3672963 - RNA, 17 nt, Human
ugaccaacaguuccuuc

SEQ ID NO: 3672964 - RNA, 17 nt, Human
ugaccaacauggagaaa

SEQ ID NO: 3672965 - RNA, 18 nt, Human
ugaccaacauggagaaac

SEQ ID NO: 3672966 - RNA, 20 nt, Human
ugaccaacuagacauucugu

SEQ ID NO: 3672967 - RNA, 21 nt, Human
ugaccaacuagacauucuguc

SEQ ID NO: 3672968 - RNA, 23 nt, Human
ugaccaacuguguuguauuaaca

SEQ ID NO: 3672969 - RNA, 15 nt, Human
ugacuggcuaaagcu

SEQ ID NO: 3672970 - RNA, 18 nt, Human
ugacugggcccugccucu

SEQ ID NO: 3672971 - RNA, 17 nt, Human
ugacuggggugggaggu

SEQ ID NO: 3672972 - RNA, 21 nt, Human
ugacuggguuucucuguauag

SEQ ID NO: 3672973 - RNA, 23 nt, Human
ugacuggguuucucuguauagua

SEQ ID NO: 3672974 - RNA, 15 nt, Human
ugacuggugcugcag

SEQ ID NO: 3672975 - RNA, 20 nt, Human
ugacugguuaucacaccauc

SEQ ID NO: 3672976 - RNA, 20 nt, Human
ugacugguuuacaggcccug

SEQ ID NO: 3672977 - RNA, 21 nt, Human
ugacugguuuacaggcccugc

SEQ ID NO: 3672978 - RNA, 23 nt, Human
ugacugguuuacaggcccugcuc

SEQ ID NO: 3672979 - RNA, 17 nt, Human
ugacuguacuccuccca

SEQ ID NO: 3672980 - RNA, 18 nt, Human
ugacuguacuccucccag

SEQ ID NO: 3672981 - RNA, 14 nt, Human
ugacuguauauaaa

SEQ ID NO: 3672982 - RNA, 18 nt, Human
ugacuguaucuguguaga

SEQ ID NO: 3672983 - RNA, 13 nt, Human
ugacugucacugu

SEQ ID NO: 3672984 - RNA, 17 nt, Human
ugacugucacuguuccu

SEQ ID NO: 3672985 - RNA, 14 nt, Human
ugacugucugggga

SEQ ID NO: 3672986 - RNA, 18 nt, Human
ugacuguucaagagcaca

SEQ ID NO: 3672987 - RNA, 15 nt, Human
ugacuguuuccauca

SEQ ID NO: 3672988 - RNA, 19 nt, Human
ugacuguuuuucggacagu

SEQ ID NO: 3672989 - RNA, 19 nt, Human
ugacuuaacauagccaaaa

SEQ ID NO: 3672990 - RNA, 22 nt, Human
ugacuuaacauagccaaaaugu

SEQ ID NO: 3672991 - RNA, 15 nt, Human
ugacuuaagaagccu

SEQ ID NO: 3672992 - RNA, 13 nt, Human
ugacuuaauguga

SEQ ID NO: 3672993 - RNA, 13 nt, Human
ugacuuacuguac

SEQ ID NO: 3672994 - RNA, 16 nt, Human
ugacuuacuguacaug

SEQ ID NO: 3672995 - RNA, 21 nt, Human
ugacuuagaaucccuguguua

SEQ ID NO: 3672996 - RNA, 19 nt, Human
ugacuuauaguacaugaua

SEQ ID NO: 3672997 - RNA, 18 nt, Human
ugacuuauuguggauaac

SEQ ID NO: 3672998 - RNA, 20 nt, Human
ugacuuauuuauauaaauuu

SEQ ID NO: 3672999 - RNA, 19 nt, Human
ugacuuauuuucucugugu

SEQ ID NO: 3673000 - RNA, 22 nt, Human
ugacuucaggggcugcccgcuc

SEQ ID NO: 3673001 - RNA, 22 nt, Human
ugacuuccccgcauuccaggcu

SEQ ID NO: 3673002 - RNA, 21 nt, Human
ugacuuccucgccucucccac

SEQ ID NO: 3673003 - RNA, 24 nt, Human
ugacuucuaaguaaaaccacagca

SEQ ID NO: 3673004 - RNA, 16 nt, Human
ugacuucuccaggucu

SEQ ID NO: 3673005 - RNA, 15 nt, Human
ugacuucugccugga

SEQ ID NO: 3673006 - RNA, 16 nt, Human
ugacuucugccuggag

SEQ ID NO: 3673007 - RNA, 18 nt, Human
ugacuucugccuggagac

SEQ ID NO: 3673008 - RNA, 13 nt, Human
ugacuucugugag

SEQ ID NO: 3673009 - RNA, 17 nt, Human
ugacuugacagaacacu

SEQ ID NO: 3673010 - RNA, 17 nt, Human
ugacuugcaugaagaga

SEQ ID NO: 3673011 - RNA, 21 nt, Human
ugacuugggcacccccagccu

SEQ ID NO: 3673012 - RNA, 12 nt, Human
ugacuuggggga

SEQ ID NO: 3673013 - RNA, 12 nt, Human
ugacuuguauau

SEQ ID NO: 3673014 - RNA, 15 nt, Human
ugacuugugucccau

SEQ ID NO: 3673015 - RNA, 18 nt, Human
ugacuuguuugucuucca

SEQ ID NO: 3673016 - RNA, 17 nt, Human
ugacuuuaauuuaugua

SEQ ID NO: 3673017 - RNA, 22 nt, Human
ugacuuuacgcccaucucagga

SEQ ID NO: 3673018 - RNA, 12 nt, Human
ugacuuuauaaa

SEQ ID NO: 3673019 - RNA, 15 nt, Human
ugacuuuauuauuua

SEQ ID NO: 3673020 - RNA, 16 nt, Human
ugacuuuauuauuuau

SEQ ID NO: 3673021 - RNA, 15 nt, Human
ugacuuucaggaauu

SEQ ID NO: 3673022 - RNA, 12 nt, Human
ugacuuucccca

SEQ ID NO: 3673023 - RNA, 22 nt, Human
ugacuuuccccaccagaugcug

SEQ ID NO: 3673024 - RNA, 13 nt, Human
ugacuuucuuuuu

SEQ ID NO: 3673025 - RNA, 14 nt, Human
ugacuuugaaaaua

SEQ ID NO: 3673026 - RNA, 13 nt, Human
ugacuuugcuugc

SEQ ID NO: 3673027 - RNA, 12 nt, Human
ugacuuuggaua

SEQ ID NO: 3673028 - RNA, 20 nt, Human
ugacuuuggauaauaaggaa

SEQ ID NO: 3673029 - RNA, 14 nt, Human
guaauaauaccuca

SEQ ID NO: 3673030 - RNA, 22 nt, Human
guaauaauaccucaauguuuga

SEQ ID NO: 3673031 - RNA, 16 nt, Human
guaauaaugugaauca

SEQ ID NO: 3673032 - RNA, 19 nt, Human
guaauagaaaacugaaaau

SEQ ID NO: 3673033 - RNA, 17 nt, Human
guaauagauuauaguug

SEQ ID NO: 3673034 - RNA, 15 nt, Human
guaauauagaaaaaa

SEQ ID NO: 3673035 - RNA, 22 nt, Human
guaauauauucugaagcaacau

SEQ ID NO: 3673036 - RNA, 13 nt, Human
guaauauauugcu

SEQ ID NO: 3673037 - RNA, 16 nt, Human
guaauaugcacacauu

SEQ ID NO: 3673038 - RNA, 17 nt, Human
guaauaugcacacauuu

SEQ ID NO: 3673039 - RNA, 16 nt, Human
guaauauugacuugua

SEQ ID NO: 3673040 - RNA, 23 nt, Human
guaauauuuacaauguauuaagc

SEQ ID NO: 3673041 - RNA, 17 nt, Human
guaauauuuauuaaauu

SEQ ID NO: 3673042 - RNA, 18 nt, Human
guaauauuuauuaaauuu

SEQ ID NO: 3673043 - RNA, 21 nt, Human
guaauauuuauuaaauuuuuu

SEQ ID NO: 3673044 - RNA, 19 nt, Human
guaauauuuuguauuauug

SEQ ID NO: 3673045 - RNA, 13 nt, Human
guaaucaauaaac

SEQ ID NO: 3673046 - RNA, 17 nt, Human
guaaucaauaaacgauu

SEQ ID NO: 3673047 - RNA, 12 nt, Human
guaaucaaugaa

SEQ ID NO: 3673048 - RNA, 18 nt, Human
guaauccaggcacagcug

SEQ ID NO: 3673049 - RNA, 17 nt, Human
guaauccaucacuagcc

SEQ ID NO: 3673050 - RNA, 12 nt, Human
guaaucccagcu

SEQ ID NO: 3673051 - RNA, 16 nt, Human
guaaucccagcuacuu

SEQ ID NO: 3673052 - RNA, 18 nt, Human
guaaucccgccaccuauc

SEQ ID NO: 3673053 - RNA, 12 nt, Human
guaauccuguag

SEQ ID NO: 3673054 - RNA, 22 nt, Human
guaaucuccacagucaaagaag

SEQ ID NO: 3673055 - RNA, 20 nt, Human
guaaucucguuucaaaaaca

SEQ ID NO: 3673056 - RNA, 18 nt, Human
guaaucucucugcagcug

SEQ ID NO: 3673057 - RNA, 21 nt, Human
guaaucucucugcagcugccg

SEQ ID NO: 3673058 - RNA, 22 nt, Human
guaaucugaauaaaguguaaca

SEQ ID NO: 3673059 - RNA, 24 nt, Human
guaaucugaucguucuuucuagcu

SEQ ID NO: 3673060 - RNA, 22 nt, Human
guaaucuguauaauacuuugua

SEQ ID NO: 3673061 - RNA, 20 nt, Human
guaaucuuuaccuguauaca

SEQ ID NO: 3673062 - RNA, 13 nt, Human
guaaugaaaacca

SEQ ID NO: 3673063 - RNA, 22 nt, Human
guaaugaaacaccuucucugga

SEQ ID NO: 3673064 - RNA, 17 nt, Human
guaaugaaccgcugaau

SEQ ID NO: 3673065 - RNA, 20 nt, Human
guaaugaguuuaaaaaucaa

SEQ ID NO: 3673066 - RNA, 19 nt, Human
guaaugauaacuggaaacu

SEQ ID NO: 3673067 - RNA, 19 nt, Human
guaaugcauacagaaauau

SEQ ID NO: 3673068 - RNA, 20 nt, Human
guaaugcgauuuuauuacug

SEQ ID NO: 3673069 - RNA, 22 nt, Human
guaaugcuacgugugauuuuuc

SEQ ID NO: 3673070 - RNA, 14 nt, Human
guaauggagcauca

SEQ ID NO: 3673071 - RNA, 22 nt, Human
guaauggggcagaaaucugagg

SEQ ID NO: 3673072 - RNA, 23 nt, Human
guaaugguacugacuuugcuugc

SEQ ID NO: 3673073 - RNA, 17 nt, Human
guaaugguguagaacac

SEQ ID NO: 3673074 - RNA, 18 nt, Human
guaauguagcguguuuac

SEQ ID NO: 3673075 - RNA, 21 nt, Human
guaauguagcguguuuacaug

SEQ ID NO: 3673076 - RNA, 19 nt, Human
guaauguaucaaauacauu

SEQ ID NO: 3673077 - RNA, 16 nt, Human
guaaugugaauaaauu

SEQ ID NO: 3673078 - RNA, 22 nt, Human
guaauguuaauauugauuuauu

SEQ ID NO: 3673079 - RNA, 14 nt, Human
guaauguuacugau

SEQ ID NO: 3673080 - RNA, 15 nt, Human
guaauguugugaaua

SEQ ID NO: 3673081 - RNA, 17 nt, Human
guaauguugugaauaau

SEQ ID NO: 3673082 - RNA, 21 nt, Human
guaauguuuucuuugcaaagu

SEQ ID NO: 3673083 - RNA, 16 nt, Human
guaauuaaacuguuaa

SEQ ID NO: 3673084 - RNA, 14 nt, Human
guaauuaaauuaug

SEQ ID NO: 3673085 - RNA, 17 nt, Human
guaauuaaguacuaugu

SEQ ID NO: 3673086 - RNA, 23 nt, Human
guaauuaauaauagauugugaau

SEQ ID NO: 3673087 - RNA, 15 nt, Human
guaauuaguaacaug

SEQ ID NO: 3673088 - RNA, 13 nt, Human
guaauuauggagu

SEQ ID NO: 3673089 - RNA, 23 nt, Human
guaauuauugugauuucccgugg

SEQ ID NO: 3673090 - RNA, 13 nt, Human
guaauuauuugaa

SEQ ID NO: 3673091 - RNA, 14 nt, Human
guaauuauuugaau

SEQ ID NO: 3673092 - RNA, 17 nt, Human
guaauucagguuuuucc

SEQ ID NO: 3673093 - RNA, 21 nt, Human
guaauucaguguauuucaguu

SEQ ID NO: 3673094 - RNA, 15 nt, Human
guaauucuaaaugaa

SEQ ID NO: 3673095 - RNA, 12 nt, Human
guaauugcuuac

SEQ ID NO: 3673096 - RNA, 12 nt, Human
guaauugcuuuu

SEQ ID NO: 3673097 - RNA, 23 nt, Human
guaauuguacuaaagccaaacau

SEQ ID NO: 3673098 - RNA, 15 nt, Human
guaauuguguggauu

SEQ ID NO: 3673099 - RNA, 17 nt, Human
guaauuguguuuacauu

SEQ ID NO: 3673100 - RNA, 20 nt, Human
guaauuguguuuacauuuua

SEQ ID NO: 3673101 - RNA, 19 nt, Human
guaauuguuguuuguaugu

SEQ ID NO: 3673102 - RNA, 19 nt, Human
guaauuuaaaauugugaug

SEQ ID NO: 3673103 - RNA, 21 nt, Human
guaauuuaaacaggcccagca

SEQ ID NO: 3673104 - RNA, 19 nt, Human
guaauuuaaaugaaagaaa

SEQ ID NO: 3673105 - RNA, 12 nt, Human
guaauuuaacuu

SEQ ID NO: 3673106 - RNA, 20 nt, Human
guaauuuaggguacuaaauu

SEQ ID NO: 3673107 - RNA, 14 nt, Human
guaauuuauaaaau

SEQ ID NO: 3673108 - RNA, 15 nt, Human
guaauuuauaaaauu

SEQ ID NO: 3673109 - RNA, 18 nt, Human
guaauuuauaaaauuaga

SEQ ID NO: 3673110 - RNA, 23 nt, Human
guaauuuauaguuuauacaguuu

SEQ ID NO: 3673111 - RNA, 22 nt, Human
guaauuucuuugccuguucagu

SEQ ID NO: 3673112 - RNA, 14 nt, Human
guaauuugaagauu

SEQ ID NO: 3673113 - RNA, 12 nt, Human
ugaggcauuugu

SEQ ID NO: 3673114 - RNA, 19 nt, Human
ugaggcauuuguuugaacu

SEQ ID NO: 3673115 - RNA, 20 nt, Human
ugaggcauuuguuugaacug

SEQ ID NO: 3673116 - RNA, 23 nt, Human
ugaggcauuuguuugaacugaua

SEQ ID NO: 3673117 - RNA, 19 nt, Human
ugaggccaagaauauugca

SEQ ID NO: 3673118 - RNA, 19 nt, Human
ugaggccacacucagcaca

SEQ ID NO: 3673119 - RNA, 22 nt, Human
ugaggccacugaagaggaggag

SEQ ID NO: 3673120 - RNA, 22 nt, Human
ugaggccacugcugcuucucca

SEQ ID NO: 3673121 - RNA, 21 nt, Human
ugaggccacuguguuccuucc

SEQ ID NO: 3673122 - RNA, 12 nt, Human
ugaggccagccu

SEQ ID NO: 3673123 - RNA, 20 nt, Human
ugaggccagccuggccuccu

SEQ ID NO: 3673124 - RNA, 14 nt, Human
ugaggccagggcag

SEQ ID NO: 3673125 - RNA, 15 nt, Human
ugaggccagggcaga

SEQ ID NO: 3673126 - RNA, 21 nt, Human
ugaggcccagagggccugcaa

SEQ ID NO: 3673127 - RNA, 22 nt, Human
ugaggcccagagggccugcaag

SEQ ID NO: 3673128 - RNA, 20 nt, Human
ugaggcccagggagaggcca

SEQ ID NO: 3673129 - RNA, 21 nt, Human
ugaggcccuccacaccugcgg

SEQ ID NO: 3673130 - RNA, 16 nt, Human
ugaggcccuucucucc

SEQ ID NO: 3673131 - RNA, 20 nt, Human
ugaggcccuucucuccagcc

SEQ ID NO: 3673132 - RNA, 23 nt, Human
ugaggcccuucucuccagccccu

SEQ ID NO: 3673133 - RNA, 16 nt, Human
ugaggccgcuagaggc

SEQ ID NO: 3673134 - RNA, 17 nt, Human
ugaggccgcuagaggcc

SEQ ID NO: 3673135 - RNA, 18 nt, Human
ugaggccgcuagaggccu

SEQ ID NO: 3673136 - RNA, 23 nt, Human
ugaggccgcuagaggccugagga

SEQ ID NO: 3673137 - RNA, 19 nt, Human
ugaggccguugcugacuua

SEQ ID NO: 3673138 - RNA, 22 nt, Human
ugaggccguugcugacuuagaa

SEQ ID NO: 3673139 - RNA, 16 nt, Human
ugaggccuagacucug

SEQ ID NO: 3673140 - RNA, 19 nt, Human
ugaggccucaguggacuuu

SEQ ID NO: 3673141 - RNA, 21 nt, Human
ugaggccucuuggaccucugc

SEQ ID NO: 3673142 - RNA, 21 nt, Human
ugaggccugcccucagggauc

SEQ ID NO: 3673143 - RNA, 12 nt, Human
ugaggccuggac

SEQ ID NO: 3673144 - RNA, 19 nt, Human
ugaggccuggacuuuccug

SEQ ID NO: 3673145 - RNA, 20 nt, Human
ugaggccuggacuuuccugc

SEQ ID NO: 3673146 - RNA, 12 nt, Human
ugaggccugggc

SEQ ID NO: 3673147 - RNA, 16 nt, Human
ugaggccugucuguga

SEQ ID NO: 3673148 - RNA, 18 nt, Human
ugaggcuccacuuggucu

SEQ ID NO: 3673149 - RNA, 16 nt, Human
ugaggcuccugugcua

SEQ ID NO: 3673150 - RNA, 21 nt, Human
ugaggcucugacccagugaga

SEQ ID NO: 3673151 - RNA, 13 nt, Human
ugaggcucugccc

SEQ ID NO: 3673152 - RNA, 14 nt, Human
ugaggcucugcccu

SEQ ID NO: 3673153 - RNA, 15 nt, Human
ugaggcucugcccuu

SEQ ID NO: 3673154 - RNA, 18 nt, Human
ugaggcugagacugcggg

SEQ ID NO: 3673155 - RNA, 16 nt, Human
ugaggcugcuuuccaa

SEQ ID NO: 3673156 - RNA, 23 nt, Human
ugaggcugcuuuccaaagccaau

SEQ ID NO: 3673157 - RNA, 16 nt, Human
ugaggcuggacuccag

SEQ ID NO: 3673158 - RNA, 14 nt, Human
ugaggcuggcacag

SEQ ID NO: 3673159 - RNA, 17 nt, Human
ugaggcuggcacaggac

SEQ ID NO: 3673160 - RNA, 21 nt, Human
ugaggcugggcucccuuccca

SEQ ID NO: 3673161 - RNA, 10 nt, Human
ugaggcugua

SEQ ID NO: 3673162 - RNA, 13 nt, Human
ugaggcuguagga

SEQ ID NO: 3673163 - RNA, 14 nt, Human
ugaggcuguccugu

SEQ ID NO: 3673164 - RNA, 18 nt, Human
ugaggcuguccuguacau

SEQ ID NO: 3673165 - RNA, 16 nt, Human
ugaggcuuaacaaugu

SEQ ID NO: 3673166 - RNA, 16 nt, Human
ugaggcuuccagagag

SEQ ID NO: 3673167 - RNA, 15 nt, Human
ugaggcuugcugaga

SEQ ID NO: 3673168 - RNA, 21 nt, Human
ugaggcuugcugagaggggcu

SEQ ID NO: 3673169 - RNA, 14 nt, Human
ugaggcuuuccaug

SEQ ID NO: 3673170 - RNA, 13 nt, Human
ugagggaaauguu

SEQ ID NO: 3673171 - RNA, 21 nt, Human
ugagggaagaauaaagagcug

SEQ ID NO: 3673172 - RNA, 16 nt, Human
ugagggacugccucug

SEQ ID NO: 3673173 - RNA, 19 nt, Human
ugagggacugccucugcca

SEQ ID NO: 3673174 - RNA, 14 nt, Human
ugagggagccuggc

SEQ ID NO: 3673175 - RNA, 14 nt, Human
ugagggagcuuagc

SEQ ID NO: 3673176 - RNA, 23 nt, Human
ugagggaggaccuggggcacagu

SEQ ID NO: 3673177 - RNA, 23 nt, Human
ugagggaggaggccaccucucca

SEQ ID NO: 3673178 - RNA, 16 nt, Human
ugagggauaagcaaaa

SEQ ID NO: 3673179 - RNA, 19 nt, Human
ugagggaugggccuggcau

SEQ ID NO: 3673180 - RNA, 15 nt, Human
ugagggauuaucuuu

SEQ ID NO: 3673181 - RNA, 19 nt, Human
ugagggcaguucgcagcca

SEQ ID NO: 3673182 - RNA, 18 nt, Human
ugagggccaagaaagagu

SEQ ID NO: 3673183 - RNA, 19 nt, Human
ugagggcccagagcaggaa

SEQ ID NO: 3673184 - RNA, 19 nt, Human
ugagggccccucugcccag

SEQ ID NO: 3673185 - RNA, 21 nt, Human
ugagggccugcuggaggccuc

SEQ ID NO: 3673186 - RNA, 13 nt, Human
ugagggcuuguag

SEQ ID NO: 3673187 - RNA, 18 nt, Human
ugaggggaccaggagugg

SEQ ID NO: 3673188 - RNA, 14 nt, Human
ugaggggcuggccu

SEQ ID NO: 3673189 - RNA, 13 nt, Human
ugagggggcucag

SEQ ID NO: 3673190 - RNA, 14 nt, Human
ugagggggcucagu

SEQ ID NO: 3673191 - RNA, 19 nt, Human
ugagggggcucaguucugg

SEQ ID NO: 3673192 - RNA, 20 nt, Human
ugaggggggccgugcccagg

SEQ ID NO: 3673193 - RNA, 20 nt, Human
ugagggggggcucccugggg

SEQ ID NO: 3673194 - RNA, 23 nt, Human
ugaggggucgacuucgggcuggc

SEQ ID NO: 3673195 - RNA, 23 nt, Human
ugaggguaaccccaaaccuccaa

SEQ ID NO: 3673196 - RNA, 21 nt, Human
ugaggguaauaaacuuagaau

SEQ ID NO: 3673197 - RNA, 22 nt, Human
ugagggucagagaggagucaga

SEQ ID NO: 3673198 - RNA, 15 nt, Human
ugaggguccccaccu

SEQ ID NO: 3673199 - RNA, 23 nt, Human
ugaggguccugcagccugcagga

SEQ ID NO: 3673200 - RNA, 23 nt, Human
ugagggucuguagguugcacacu

SEQ ID NO: 3673201 - RNA, 19 nt, Human
ugaggguuucugagcugcu

SEQ ID NO: 3673202 - RNA, 19 nt, Human
ugagguacaaccuguucug

SEQ ID NO: 3673203 - RNA, 17 nt, Human
ugagguacugagaguga

SEQ ID NO: 3673204 - RNA, 22 nt, Human
ugagguacugagagugaacaaa

SEQ ID NO: 3673205 - RNA, 22 nt, Human
ugagguagaccaggauuucuaa

SEQ ID NO: 3673206 - RNA, 13 nt, Human
ugaggucagagcc

SEQ ID NO: 3673207 - RNA, 16 nt, Human
ugaggucagagccugc

SEQ ID NO: 3673208 - RNA, 18 nt, Human
ugaggucagagccugcag

SEQ ID NO: 3673209 - RNA, 15 nt, Human
ugaggucagggagug

SEQ ID NO: 3673210 - RNA, 16 nt, Human
ugaggucagggagugc

SEQ ID NO: 3673211 - RNA, 18 nt, Human
ugagguccugagcacugc

SEQ ID NO: 3673212 - RNA, 19 nt, Human
ugagguccugagcacugcc

SEQ ID NO: 3673213 - RNA, 13 nt, Human
ugagguccugggg

SEQ ID NO: 3673214 - RNA, 15 nt, Human
ugagguccugggggc

SEQ ID NO: 3673215 - RNA, 21 nt, Human
ugagguccugggggccugacc

SEQ ID NO: 3673216 - RNA, 13 nt, Human
ugaggucucagcc

SEQ ID NO: 3673217 - RNA, 15 nt, Human
ugaggucucagcccc

SEQ ID NO: 3673218 - RNA, 14 nt, Human
ugaggucucgcuga

SEQ ID NO: 3673219 - RNA, 17 nt, Human
ugaggucucuugaggga

SEQ ID NO: 3673220 - RNA, 18 nt, Human
ugaggucucuugagggag

SEQ ID NO: 3673221 - RNA, 15 nt, Human
ugaggucugaaaugg

SEQ ID NO: 3673222 - RNA, 15 nt, Human
ugaggucuggcugcu

SEQ ID NO: 3673223 - RNA, 15 nt, Human
ugaggucuguucuuu

SEQ ID NO: 3673224 - RNA, 14 nt, Human
ugaggucuguuuaa

SEQ ID NO: 3673225 - RNA, 17 nt, Human
ugaggucuuuugacaug

SEQ ID NO: 3673226 - RNA, 12 nt, Human
ugaggugcccag

SEQ ID NO: 3673227 - RNA, 18 nt, Human
ugaggugcccaggagaag

SEQ ID NO: 3673228 - RNA, 15 nt, Human
ugaggugcuauguuc

SEQ ID NO: 3673229 - RNA, 15 nt, Human
ugaggugcugggagg

SEQ ID NO: 3673230 - RNA, 15 nt, Human
ugagguggaagcccu

SEQ ID NO: 3673231 - RNA, 21 nt, Human
ugagguggaagcccuccuucc

SEQ ID NO: 3673232 - RNA, 23 nt, Human
ugagguggcacuuuuucauuugc

SEQ ID NO: 3673233 - RNA, 18 nt, Human
ugagguggcaugguccau

SEQ ID NO: 3673234 - RNA, 13 nt, Human
ugaggugggagga

SEQ ID NO: 3673235 - RNA, 11 nt, Human
ugaggugggcc

SEQ ID NO: 3673236 - RNA, 23 nt, Human
ugaggugguaguaaaacacagag

SEQ ID NO: 3673237 - RNA, 15 nt, Human
ugaggugugggggcu

SEQ ID NO: 3673238 - RNA, 23 nt, Human
guauauuauguauuuauauuuug

SEQ ID NO: 3673239 - RNA, 15 nt, Human
guauauuauuucuag

SEQ ID NO: 3673240 - RNA, 15 nt, Human
guauauuauuuggca

SEQ ID NO: 3673241 - RNA, 14 nt, Human
guauauucauuuca

SEQ ID NO: 3673242 - RNA, 17 nt, Human
guauauucuauuuuaca

SEQ ID NO: 3673243 - RNA, 18 nt, Human
guauauucuauuuuacaa

SEQ ID NO: 3673244 - RNA, 12 nt, Human
guauauuggaag

SEQ ID NO: 3673245 - RNA, 17 nt, Human
guauauuuaaaagaaag

SEQ ID NO: 3673246 - RNA, 23 nt, Human
guauauuuauaaauaaaaauauu

SEQ ID NO: 3673247 - RNA, 22 nt, Human
guauauuuauagucacaagagc

SEQ ID NO: 3673248 - RNA, 16 nt, Human
guauauuuccgcacuu

SEQ ID NO: 3673249 - RNA, 17 nt, Human
guauauuugauuuauua

SEQ ID NO: 3673250 - RNA, 19 nt, Human
guauauuugauuuauuaac

SEQ ID NO: 3673251 - RNA, 17 nt, Human
guauauuuguaaagcua

SEQ ID NO: 3673252 - RNA, 15 nt, Human
guauauuuguacaaa

SEQ ID NO: 3673253 - RNA, 17 nt, Human
guauauuuuauuucaau

SEQ ID NO: 3673254 - RNA, 15 nt, Human
guaucaaaauuacau

SEQ ID NO: 3673255 - RNA, 13 nt, Human
guaucaaauacau

SEQ ID NO: 3673256 - RNA, 19 nt, Human
guaucaaauacauuuaaaa

SEQ ID NO: 3673257 - RNA, 20 nt, Human
ugcccagagggcccaggcag

SEQ ID NO: 3673258 - RNA, 21 nt, Human
ugcccagagggcccaggcagg

SEQ ID NO: 3673259 - RNA, 23 nt, Human
ugcccagagggcccaggcaggcc

SEQ ID NO: 3673260 - RNA, 17 nt, Human
ugcccagaucagccaga

SEQ ID NO: 3673261 - RNA, 9 nt, Human
ugcccagcc

SEQ ID NO: 3673262 - RNA, 10 nt, Human
ugcccagccc

SEQ ID NO: 3673263 - RNA, 17 nt, Human
ugcccagccccuucuga

SEQ ID NO: 3673264 - RNA, 18 nt, Human
ugcccagccucuuucccu

SEQ ID NO: 3673265 - RNA, 14 nt, Human
ugcccagccuggau

SEQ ID NO: 3673266 - RNA, 21 nt, Human
ugcccagccuggaugccaucc

SEQ ID NO: 3673267 - RNA, 14 nt, Human
ugcccagcuagcug

SEQ ID NO: 3673268 - RNA, 20 nt, Human
ugcccagcuauaccugugcc

SEQ ID NO: 3673269 - RNA, 22 nt, Human
ugcccagcuauaccugugccuc

SEQ ID NO: 3673270 - RNA, 13 nt, Human
ugcccagcucucg

SEQ ID NO: 3673271 - RNA, 16 nt, Human
ugcccagcuugggccc

SEQ ID NO: 3673272 - RNA, 23 nt, Human
ugcccagcuuuucauugcuguga

SEQ ID NO: 3673273 - RNA, 22 nt, Human
ugcccaggacggggccggccag

SEQ ID NO: 3673274 - RNA, 11 nt, Human
ugcccaggaga

SEQ ID NO: 3673275 - RNA, 12 nt, Human
ugcccaggagaa

SEQ ID NO: 3673276 - RNA, 18 nt, Human
ugcccaggagagccagcc

SEQ ID NO: 3673277 - RNA, 23 nt, Human
ugcccaggagagccagcccuccc

SEQ ID NO: 3673278 - RNA, 12 nt, Human
ugcccaggcacu

SEQ ID NO: 3673279 - RNA, 15 nt, Human
ugcccaggccugccu

SEQ ID NO: 3673280 - RNA, 18 nt, Human
ugcccaggcuggagugca

SEQ ID NO: 3673281 - RNA, 20 nt, Human
ugcccaggcuggagugcagu

SEQ ID NO: 3673282 - RNA, 13 nt, Human
ugcccaggcuggc

SEQ ID NO: 3673283 - RNA, 18 nt, Human
ugcccaggcuggcgugca

SEQ ID NO: 3673284 - RNA, 14 nt, Human
ugcccagggcucag

SEQ ID NO: 3673285 - RNA, 16 nt, Human
ugcccagggcucagcc

SEQ ID NO: 3673286 - RNA, 21 nt, Human
ugcccagggcucagccuggug

SEQ ID NO: 3673287 - RNA, 23 nt, Human
ugcccagggcucagccugguggg

SEQ ID NO: 3673288 - RNA, 11 nt, Human
ugcccaggggu

SEQ ID NO: 3673289 - RNA, 15 nt, Human
ugcccaggggugccc

SEQ ID NO: 3673290 - RNA, 20 nt, Human
ugcccaggggugcccccucc

SEQ ID NO: 3673291 - RNA, 22 nt, Human
ugcccaggggugcccccuccuc

SEQ ID NO: 3673292 - RNA, 20 nt, Human
ugcccagguuucuggucucu

SEQ ID NO: 3673293 - RNA, 20 nt, Human
ugcccagucccccaacccca

SEQ ID NO: 3673294 - RNA, 17 nt, Human
ugcccaguuucagggcu

SEQ ID NO: 3673295 - RNA, 17 nt, Human
ugcccaguuucugccuc

SEQ ID NO: 3673296 - RNA, 13 nt, Human
ugcccaucccugg

SEQ ID NO: 3673297 - RNA, 23 nt, Human
ugcccaucgugaagaagccugua

SEQ ID NO: 3673298 - RNA, 20 nt, Human
ugcccaugcugggagcccac

SEQ ID NO: 3673299 - RNA, 16 nt, Human
ugcccaugggagcugg

SEQ ID NO: 3673300 - RNA, 17 nt, Human
ugcccaugggcacugcu

SEQ ID NO: 3673301 - RNA, 20 nt, Human
ugcccaugggcacugcuggg

SEQ ID NO: 3673302 - RNA, 13 nt, Human
ugcccauguuuca

SEQ ID NO: 3673303 - RNA, 18 nt, Human
ugcccauuccccagccuc

SEQ ID NO: 3673304 - RNA, 17 nt, Human
ugcccauuccucaccuu

SEQ ID NO: 3673305 - RNA, 21 nt, Human
ugcccauucugcccuguggga

SEQ ID NO: 3673306 - RNA, 14 nt, Human
ugcccauuuugaau

SEQ ID NO: 3673307 - RNA, 20 nt, Human
ugccccaaacaaauaugcaa

SEQ ID NO: 3673308 - RNA, 21 nt, Human
ugccccaaaggaagcuuucuc

SEQ ID NO: 3673309 - RNA, 21 nt, Human
ugccccaaauaacuucagucc

SEQ ID NO: 3673310 - RNA, 17 nt, Human
ugccccaacccccagca

SEQ ID NO: 3673311 - RNA, 17 nt, Human
ugccccaacccuucuuc

SEQ ID NO: 3673312 - RNA, 13 nt, Human
ugccccaacuccu

SEQ ID NO: 3673313 - RNA, 15 nt, Human
ugccccaacuccugg

SEQ ID NO: 3673314 - RNA, 16 nt, Human
ugccccaacuccugga

SEQ ID NO: 3673315 - RNA, 19 nt, Human
ugccccaacuccuuccagc

SEQ ID NO: 3673316 - RNA, 20 nt, Human
ugccccaacuccuuccagcu

SEQ ID NO: 3673317 - RNA, 17 nt, Human
ugccccacaccuccucu

SEQ ID NO: 3673318 - RNA, 20 nt, Human
ugccccacaccuccucucac

SEQ ID NO: 3673319 - RNA, 12 nt, Human
ugccccaccugc

SEQ ID NO: 3673320 - RNA, 15 nt, Human
ugccccaccugccac

SEQ ID NO: 3673321 - RNA, 14 nt, Human
ugccccacuugucc

SEQ ID NO: 3673322 - RNA, 13 nt, Human
ugccccagagcug

SEQ ID NO: 3673323 - RNA, 16 nt, Human
ugccccagaggccucu

SEQ ID NO: 3673324 - RNA, 16 nt, Human
ugccccagcccaaguc

SEQ ID NO: 3673325 - RNA, 17 nt, Human
ugccccagcccaagucc

SEQ ID NO: 3673326 - RNA, 13 nt, Human
ugccccagcccag

SEQ ID NO: 3673327 - RNA, 13 nt, Human
ugccccagcucug

SEQ ID NO: 3673328 - RNA, 20 nt, Human
ugccccaggaccagcucagg

SEQ ID NO: 3673329 - RNA, 20 nt, Human
ugccccagucguuagaauau

SEQ ID NO: 3673330 - RNA, 18 nt, Human
ugccccaucagugcuccc

SEQ ID NO: 3673331 - RNA, 20 nt, Human
ugccccaucagugcucccuc

SEQ ID NO: 3673332 - RNA, 17 nt, Human
ugccccauccuccagca

SEQ ID NO: 3673333 - RNA, 18 nt, Human
ugccccauccuccagcag

SEQ ID NO: 3673334 - RNA, 19 nt, Human
ugccccauccuccagcagg

SEQ ID NO: 3673335 - RNA, 12 nt, Human
ugccccaugccu

SEQ ID NO: 3673336 - RNA, 15 nt, Human
ugccccaugccuguc

SEQ ID NO: 3673337 - RNA, 16 nt, Human
ugccccauucaacauc

SEQ ID NO: 3673338 - RNA, 21 nt, Human
ugcccccaccacggccacugg

SEQ ID NO: 3673339 - RNA, 17 nt, Human
ugcccccagcccaaagg

SEQ ID NO: 3673340 - RNA, 16 nt, Human
ugcccccagccccggg

SEQ ID NO: 3673341 - RNA, 13 nt, Human
ugcccccagcugg

SEQ ID NO: 3673342 - RNA, 13 nt, Human
ugcccccaggacu

SEQ ID NO: 3673343 - RNA, 14 nt, Human
ugcccccaggacug

SEQ ID NO: 3673344 - RNA, 15 nt, Human
ugcccccagggcacu

SEQ ID NO: 3673345 - RNA, 18 nt, Human
ugcccccaggguccuggg

SEQ ID NO: 3673346 - RNA, 13 nt, Human
ugccccccacccc

SEQ ID NO: 3673347 - RNA, 20 nt, Human
ugccccccaccccagccuaa

SEQ ID NO: 3673348 - RNA, 17 nt, Human
ugccccccaccccugga

SEQ ID NO: 3673349 - RNA, 19 nt, Human
ugccccccagccucuggca

SEQ ID NO: 3673350 - RNA, 18 nt, Human
ugccccccauccuggccc

SEQ ID NO: 3673351 - RNA, 21 nt, Human
ugccccccauccuggcccauc

SEQ ID NO: 3673352 - RNA, 18 nt, Human
ugccccccuugccagaca

SEQ ID NO: 3673353 - RNA, 23 nt, Human
ugcccccuaauccccuucucccc

SEQ ID NO: 3673354 - RNA, 11 nt, Human
ugcccccuccu

SEQ ID NO: 3673355 - RNA, 16 nt, Human
ugcccccuccucuccc

SEQ ID NO: 3673356 - RNA, 16 nt, Human
ugcccccucugcccug

SEQ ID NO: 3673357 - RNA, 18 nt, Human
ugcccccucugcccugcg

SEQ ID NO: 3673358 - RNA, 13 nt, Human
ugcccccugcaga

SEQ ID NO: 3673359 - RNA, 14 nt, Human
ugcccccugcagaa

SEQ ID NO: 3673360 - RNA, 14 nt, Human
ugcccccugcagga

SEQ ID NO: 3673361 - RNA, 18 nt, Human
ugcccccugcaggaagga

SEQ ID NO: 3673362 - RNA, 21 nt, Human
ugcccccugcaggaaggagcu

SEQ ID NO: 3673363 - RNA, 23 nt, Human
ugcccccugcaggaaggagcugc

SEQ ID NO: 3673364 - RNA, 14 nt, Human
ugcccccugcuggc

SEQ ID NO: 3673365 - RNA, 21 nt, Human
ugcccccugguggacaguccu

SEQ ID NO: 3673366 - RNA, 22 nt, Human
ugcccccugguggacaguccug

SEQ ID NO: 3673367 - RNA, 21 nt, Human
ugcccccuguggaugcugcug

SEQ ID NO: 3673368 - RNA, 12 nt, Human
ugcccccuucuc

SEQ ID NO: 3673369 - RNA, 16 nt, Human
ugcccccuucucccac

SEQ ID NO: 3673370 - RNA, 18 nt, Human
ugcccccuucucccacac

SEQ ID NO: 3673371 - RNA, 16 nt, Human
ugcccccuuucagaug

SEQ ID NO: 3673372 - RNA, 21 nt, Human
ugcccccuuucagaugucuuc

SEQ ID NO: 3673373 - RNA, 22 nt, Human
ugccccgcccccaguccccacc

SEQ ID NO: 3673374 - RNA, 14 nt, Human
ugccccggccaccu

SEQ ID NO: 3673375 - RNA, 17 nt, Human
ugccccggccaccucug

SEQ ID NO: 3673376 - RNA, 21 nt, Human
ugccccggccccggccccagc

SEQ ID NO: 3673377 - RNA, 17 nt, Human
ugccccggccccucccc

SEQ ID NO: 3673378 - RNA, 16 nt, Human
ugccccgucccccucu

SEQ ID NO: 3673379 - RNA, 23 nt, Human
ugccccucaacucuccuccagag

SEQ ID NO: 3673380 - RNA, 14 nt, Human
ugccccucagagac

SEQ ID NO: 3673381 - RNA, 16 nt, Human
ugccccucagagacug

SEQ ID NO: 3673382 - RNA, 21 nt, Human
ugccccucccagaacacacuc

SEQ ID NO: 3673383 - RNA, 13 nt, Human
ugccccucccuuc

SEQ ID NO: 3673384 - RNA, 17 nt, Human
ugccccuccucucugcc

SEQ ID NO: 3673385 - RNA, 18 nt, Human
ugccccuccucucugccc

SEQ ID NO: 3673386 - RNA, 20 nt, Human
ugccccucuccaggcgccgg

SEQ ID NO: 3673387 - RNA, 15 nt, Human
ugccccucuccuucu

SEQ ID NO: 3673388 - RNA, 13 nt, Human
ugccccucucucc

SEQ ID NO: 3673389 - RNA, 15 nt, Human
ugccccucucuccau

SEQ ID NO: 3673390 - RNA, 14 nt, Human
ugccccucucuggg

SEQ ID NO: 3673391 - RNA, 18 nt, Human
ugccccuggcagccccug

SEQ ID NO: 3673392 - RNA, 15 nt, Human
ugccccuggccuugg

SEQ ID NO: 3673393 - RNA, 22 nt, Human
ugccccuucauugauuuccugu

SEQ ID NO: 3673394 - RNA, 18 nt, Human
ugccccuuccgccacugg

SEQ ID NO: 3673395 - RNA, 21 nt, Human
ugccccuuccgccacuggggc

SEQ ID NO: 3673396 - RNA, 16 nt, Human
ugccccuucuacacuc

SEQ ID NO: 3673397 - RNA, 20 nt, Human
ugccccuucuacacucuccu

SEQ ID NO: 3673398 - RNA, 22 nt, Human
ugccccuucuacacucuccugg

SEQ ID NO: 3673399 - RNA, 20 nt, Human
ugccccuuggacacgcucag

SEQ ID NO: 3673400 - RNA, 11 nt, Human
ugccccuuucu

SEQ ID NO: 3673401 - RNA, 18 nt, Human
ugccccuuucucuuuucc

SEQ ID NO: 3673402 - RNA, 14 nt, Human
ugcggcggucccag

SEQ ID NO: 3673403 - RNA, 16 nt, Human
ugcggcguacaggcug

SEQ ID NO: 3673404 - RNA, 22 nt, Human
ugcggcuggccauggagaaagc

SEQ ID NO: 3673405 - RNA, 20 nt, Human
ugcggcugugcagccugucc

SEQ ID NO: 3673406 - RNA, 14 nt, Human
ugcgggacagagua

SEQ ID NO: 3673407 - RNA, 21 nt, Human
ugcgggaccgguacagaaagg

SEQ ID NO: 3673408 - RNA, 19 nt, Human
ugcgggaugguccuggggc

SEQ ID NO: 3673409 - RNA, 13 nt, Human
ugcgggcugggca

SEQ ID NO: 3673410 - RNA, 14 nt, Human
ugcgggcugggcag

SEQ ID NO: 3673411 - RNA, 17 nt, Human
ugcgggcuuuuccccgg

SEQ ID NO: 3673412 - RNA, 14 nt, Human
ugcggggcgggcac

SEQ ID NO: 3673413 - RNA, 23 nt, Human
ugcggguggggcuuggggcucac

SEQ ID NO: 3673414 - RNA, 17 nt, Human
ugcggguuugaggauag

SEQ ID NO: 3673415 - RNA, 18 nt, Human
ugcgguagccagcacaca

SEQ ID NO: 3673416 - RNA, 14 nt, Human
ugcggucaaggcca

SEQ ID NO: 3673417 - RNA, 23 nt, Human
ugcggugcuaucucccccagccc

SEQ ID NO: 3673418 - RNA, 21 nt, Human
ugcgguuaauuuugaagugcu

SEQ ID NO: 3673419 - RNA, 23 nt, Human
ugcgguucaggaaaauugaaugc

SEQ ID NO: 3673420 - RNA, 18 nt, Human
ugcgguuccggcauggac

SEQ ID NO: 3673421 - RNA, 16 nt, Human
ugcguaacuggcugug

SEQ ID NO: 3673422 - RNA, 17 nt, Human
ugcguaacuggcugugu

SEQ ID NO: 3673423 - RNA, 14 nt, Human
ugcguaugucuguu

SEQ ID NO: 3673424 - RNA, 20 nt, Human
ugcgucauuacagggcacag

SEQ ID NO: 3673425 - RNA, 12 nt, Human
ugcgucccaaga

SEQ ID NO: 3673426 - RNA, 23 nt, Human
ugcguccuccucaccucaugccc

SEQ ID NO: 3673427 - RNA, 15 nt, Human
ugcgucuggaggggc

SEQ ID NO: 3673428 - RNA, 20 nt, Human
ugcgucuggaggggccccug

SEQ ID NO: 3673429 - RNA, 23 nt, Human
ugcgucuuagcagugauuuuuau

SEQ ID NO: 3673430 - RNA, 19 nt, Human
ugcgucuuccgccccugcc

SEQ ID NO: 3673431 - RNA, 20 nt, Human
ugcgucuuccgccccugccu

SEQ ID NO: 3673432 - RNA, 21 nt, Human
ugcgucuuccgccccugccug

SEQ ID NO: 3673433 - RNA, 15 nt, Human
ugcgucuugguguaa

SEQ ID NO: 3673434 - RNA, 16 nt, Human
ugcgucuugguguaau

SEQ ID NO: 3673435 - RNA, 15 nt, Human
ugcgugacaauaaaa

SEQ ID NO: 3673436 - RNA, 17 nt, Human
ugcgugacaauaaaaca

SEQ ID NO: 3673437 - RNA, 15 nt, Human
ugcgugacacucucc

SEQ ID NO: 3673438 - RNA, 15 nt, Human
ugcgugcauaccacu

SEQ ID NO: 3673439 - RNA, 14 nt, Human
ugcguggcugaccc

SEQ ID NO: 3673440 - RNA, 17 nt, Human
ugcguggcugacccccc

SEQ ID NO: 3673441 - RNA, 18 nt, Human
ugcgugggagugugugcc

SEQ ID NO: 3673442 - RNA, 21 nt, Human
ugcguggguggggagggaggu

SEQ ID NO: 3673443 - RNA, 21 nt, Human
ugcgugguggucccuggguag

SEQ ID NO: 3673444 - RNA, 19 nt, Human
ugcguguguagaguuaaga

SEQ ID NO: 3673445 - RNA, 24 nt, Human
ugcguguguagaguuaagaagcug

SEQ ID NO: 3673446 - RNA, 15 nt, Human
ugcguguucucagag

SEQ ID NO: 3673447 - RNA, 13 nt, Human
ugcguuacuaauu

SEQ ID NO: 3673448 - RNA, 17 nt, Human
ugcguuccaugaugcug

SEQ ID NO: 3673449 - RNA, 17 nt, Human
ugcguuggucucugcau

SEQ ID NO: 3673450 - RNA, 13 nt, Human
ugcguuuuggaag

SEQ ID NO: 3673451 - RNA, 12 nt, Human
ugcuaaaaaugg

SEQ ID NO: 3673452 - RNA, 13 nt, Human
ugcuaaaaccuga

SEQ ID NO: 3673453 - RNA, 14 nt, Human
ugcuaaaccuuagu

SEQ ID NO: 3673454 - RNA, 15 nt, Human
ugcuaaacguguaug

SEQ ID NO: 3673455 - RNA, 22 nt, Human
ugcuaaauaaaauuuguugcau

SEQ ID NO: 3673456 - RNA, 17 nt, Human
ugcuaaaucuccuauuu

SEQ ID NO: 3673457 - RNA, 18 nt, Human
ugcuaaauguaacagucu

SEQ ID NO: 3673458 - RNA, 19 nt, Human
ugcuaaauguaacagucug

SEQ ID NO: 3673459 - RNA, 16 nt, Human
ugcuaaauugauguug

SEQ ID NO: 3673460 - RNA, 17 nt, Human
ugcuaaauugauguuga

SEQ ID NO: 3673461 - RNA, 12 nt, Human
ugcuaaauuuca

SEQ ID NO: 3673462 - RNA, 22 nt, Human
ugcuaacagcaacacaaagcuu

SEQ ID NO: 3673463 - RNA, 23 nt, Human
ugcuaacagcaacacaaagcuuu

SEQ ID NO: 3673464 - RNA, 16 nt, Human
ugcuaacaucuaaaaa

SEQ ID NO: 3673465 - RNA, 12 nt, Human
ugcuaacugaac

SEQ ID NO: 3673466 - RNA, 22 nt, Human
ugcuaagaagcgagcacugacc

SEQ ID NO: 3673467 - RNA, 17 nt, Human
ugcuaagaauauuugaa

SEQ ID NO: 3673468 - RNA, 20 nt, Human
ugcuaagaauuuuuuauuuu

SEQ ID NO: 3673469 - RNA, 19 nt, Human
ugcuaagcauuccaacuau

SEQ ID NO: 3673470 - RNA, 13 nt, Human
ugcuaagguucua

SEQ ID NO: 3673471 - RNA, 14 nt, Human
ugcuaagguucuaa

SEQ ID NO: 3673472 - RNA, 19 nt, Human
ugcuaagugugaacuggac

SEQ ID NO: 3673473 - RNA, 12 nt, Human
ugcuaauaaaac

SEQ ID NO: 3673474 - RNA, 21 nt, Human
ugcuaauauaaguuucuuugc

SEQ ID NO: 3673475 - RNA, 15 nt, Human
ugcuaauauuaaaag

SEQ ID NO: 3673476 - RNA, 20 nt, Human
ugcuaauauuuuccuccuga

SEQ ID NO: 3673477 - RNA, 19 nt, Human
ugcuaaucagugucucaca

SEQ ID NO: 3673478 - RNA, 17 nt, Human
ugcuaaucuucagggca

SEQ ID NO: 3673479 - RNA, 22 nt, Human
ugcuaaucuucuuaugcaauuu

SEQ ID NO: 3673480 - RNA, 18 nt, Human
ugcuaaucuugugaaaau

SEQ ID NO: 3673481 - RNA, 16 nt, Human
ugcuaaugucaaacca

SEQ ID NO: 3673482 - RNA, 14 nt, Human
ugcuaauucuuugc

SEQ ID NO: 3673483 - RNA, 20 nt, Human
ugcuaauucuuugcaaaaau

SEQ ID NO: 3673484 - RNA, 21 nt, Human
ugcuaauucuuugcaaaaauc

SEQ ID NO: 3673485 - RNA, 17 nt, Human
ugcuaauugcuguugaa

SEQ ID NO: 3673486 - RNA, 23 nt, Human
ugcuaauugcuguugaaagcaaa

SEQ ID NO: 3673487 - RNA, 17 nt, Human
ugcuaauuuaaagagac

SEQ ID NO: 3673488 - RNA, 18 nt, Human
ugcuaauuuugaaaaacu

SEQ ID NO: 3673489 - RNA, 17 nt, Human
ugcuacaaaaacacagc

SEQ ID NO: 3673490 - RNA, 16 nt, Human
ugcuacaaagaagaca

SEQ ID NO: 3673491 - RNA, 19 nt, Human
ugcuacaacuucagcagua

SEQ ID NO: 3673492 - RNA, 14 nt, Human
ugcuacacaguaua

SEQ ID NO: 3673493 - RNA, 19 nt, Human
ugcuacagaggaaacaaua

SEQ ID NO: 3673494 - RNA, 20 nt, Human
ugcuacaggguccaacauag

SEQ ID NO: 3673495 - RNA, 13 nt, Human
ugcuaccaaagca

SEQ ID NO: 3673496 - RNA, 13 nt, Human
ugcuaccaccagc

SEQ ID NO: 3673497 - RNA, 20 nt, Human
ugcuaccaccagcugugucc

SEQ ID NO: 3673498 - RNA, 18 nt, Human
ugcuaccacggccuccuu

SEQ ID NO: 3673499 - RNA, 23 nt, Human
ugcuacccaugacuuuauaugga

SEQ ID NO: 3673500 - RNA, 20 nt, Human
ugcuacccucccugcugucc

SEQ ID NO: 3673501 - RNA, 23 nt, Human
ugcuacccucccugcuguccccu

SEQ ID NO: 3673502 - RNA, 22 nt, Human
ugcuaccuggguccuuuucaga

SEQ ID NO: 3673503 - RNA, 13 nt, Human
ugcuacgccugca

SEQ ID NO: 3673504 - RNA, 19 nt, Human
ugcuacguacaugugaggc

SEQ ID NO: 3673505 - RNA, 16 nt, Human
ugcuacgugugauuuu

SEQ ID NO: 3673506 - RNA, 14 nt, Human
ugcuacugauuguu

SEQ ID NO: 3673507 - RNA, 18 nt, Human
ugcuacugcacuccagcc

SEQ ID NO: 3673508 - RNA, 21 nt, Human
ugcuacugcacuccagccugg

SEQ ID NO: 3673509 - RNA, 14 nt, Human
ugcuacugccaacc

SEQ ID NO: 3673510 - RNA, 13 nt, Human
ugcuacuggggaa

SEQ ID NO: 3673511 - RNA, 19 nt, Human
ugcuacuggggaaacuggc

SEQ ID NO: 3673512 - RNA, 22 nt, Human
ugcuacugucucacugaaacau

SEQ ID NO: 3673513 - RNA, 20 nt, Human
ugcuacuguuguaagaauuc

SEQ ID NO: 3673514 - RNA, 15 nt, Human
ugcuagaaauuuuca

SEQ ID NO: 3673515 - RNA, 18 nt, Human
ugcuagaacucccuuuca

SEQ ID NO: 3673516 - RNA, 13 nt, Human
ugcuagaacuuuu

SEQ ID NO: 3673517 - RNA, 19 nt, Human
ugcuagaacuuuuuuaaau

SEQ ID NO: 3673518 - RNA, 23 nt, Human
ugcuagaacuuuuuuaaauaaac

SEQ ID NO: 3673519 - RNA, 16 nt, Human
ugcuagaauacuuuuu

SEQ ID NO: 3673520 - RNA, 13 nt, Human
ugcuagauaaaag

SEQ ID NO: 3673521 - RNA, 20 nt, Human
ugcuagcaaauggcagaacc

SEQ ID NO: 3673522 - RNA, 18 nt, Human
ugcuagcacuuggagcca

SEQ ID NO: 3673523 - RNA, 17 nt, Human
ugcuagcuaugugaccu

SEQ ID NO: 3673524 - RNA, 16 nt, Human
ugcuaggaacacuccu

SEQ ID NO: 3673525 - RNA, 20 nt, Human
ugcuaggaacacuccuucac

SEQ ID NO: 3673526 - RNA, 21 nt, Human
ugcuaggaacacuccuucaca

SEQ ID NO: 3673527 - RNA, 22 nt, Human
ugcuaggaacacuccuucacag

SEQ ID NO: 3673528 - RNA, 18 nt, Human
ugcuaggaagaggagugg

SEQ ID NO: 3673529 - RNA, 20 nt, Human
ugcuaggaugcggaaauccc

SEQ ID NO: 3673530 - RNA, 14 nt, Human
ugcuaggccagagc

SEQ ID NO: 3673531 - RNA, 17 nt, Human
ugcuaggccagagccca

SEQ ID NO: 3673532 - RNA, 20 nt, Human
ugcuaggcccccggguguga

SEQ ID NO: 3673533 - RNA, 22 nt, Human
ugcuagggaaacuucccguccc

SEQ ID NO: 3673534 - RNA, 20 nt, Human
ugcuagggguuuuaggucuc

SEQ ID NO: 3673535 - RNA, 21 nt, Human
ugcuagggguuuuaggucucu

SEQ ID NO: 3673536 - RNA, 14 nt, Human
ugcuaggugggcca

SEQ ID NO: 3673537 - RNA, 17 nt, Human
ugcuaggugggccagcc

SEQ ID NO: 3673538 - RNA, 19 nt, Human
ugcuaggugggccagcccc

SEQ ID NO: 3673539 - RNA, 20 nt, Human
ugcuaggugggccagccccu

SEQ ID NO: 3673540 - RNA, 13 nt, Human
ugcuagguucuac

SEQ ID NO: 3673541 - RNA, 16 nt, Human
ugcuaguaauuggaaa

SEQ ID NO: 3673542 - RNA, 14 nt, Human
ugcuaguauuugaa

SEQ ID NO: 3673543 - RNA, 16 nt, Human
ugcuaguauuugaauu

SEQ ID NO: 3673544 - RNA, 18 nt, Human
ugcuaguauuugaauuaa

SEQ ID NO: 3673545 - RNA, 20 nt, Human
ugcuaguauuugaauuaaaa

SEQ ID NO: 3673546 - RNA, 18 nt, Human
guccccuucucucaucuc

SEQ ID NO: 3673547 - RNA, 22 nt, Human
guccccuuuguauuccuuaaau

SEQ ID NO: 3673548 - RNA, 23 nt, Human
guccccuuuucuuuucuacccua

SEQ ID NO: 3673549 - RNA, 15 nt, Human
gucccggcucugugg

SEQ ID NO: 3673550 - RNA, 15 nt, Human
gucccggggcuccac

SEQ ID NO: 3673551 - RNA, 21 nt, Human
gucccgggguccuguggcagg

SEQ ID NO: 3673552 - RNA, 19 nt, Human
gucccgucaggacguugag

SEQ ID NO: 3673553 - RNA, 17 nt, Human
gucccuaaagaaaaaaa

SEQ ID NO: 3673554 - RNA, 12 nt, Human
gucccuaauaaa

SEQ ID NO: 3673555 - RNA, 17 nt, Human
gucccuaauaaagcugu

SEQ ID NO: 3673556 - RNA, 23 nt, Human
gucccuaccgagucucuucucca

SEQ ID NO: 3673557 - RNA, 20 nt, Human
gucccuagcagcccacccug

SEQ ID NO: 3673558 - RNA, 19 nt, Human
gucccuccacguucacccc

SEQ ID NO: 3673559 - RNA, 18 nt, Human
gucccucccaccucugug

SEQ ID NO: 3673560 - RNA, 16 nt, Human
gucccucccccuuguc

SEQ ID NO: 3673561 - RNA, 23 nt, Human
gucccuccgggaccuggugcugc

SEQ ID NO: 3673562 - RNA, 13 nt, Human
gucccuccuggga

SEQ ID NO: 3673563 - RNA, 22 nt, Human
gucccucucauuuagccugucc

SEQ ID NO: 3673564 - RNA, 14 nt, Human
gucccucucucugg

SEQ ID NO: 3673565 - RNA, 11 nt, Human
gucccucugug

SEQ ID NO: 3673566 - RNA, 12 nt, Human
gucccucugugu

SEQ ID NO: 3673567 - RNA, 22 nt, Human
gucccucuguguauuugcuuuu

SEQ ID NO: 3673568 - RNA, 20 nt, Human
gucccugacucucugugacc

SEQ ID NO: 3673569 - RNA, 12 nt, Human
gucccugaggau

SEQ ID NO: 3673570 - RNA, 14 nt, Human
gucccugccaaugg

SEQ ID NO: 3673571 - RNA, 14 nt, Human
gucccugcccccuc

SEQ ID NO: 3673572 - RNA, 16 nt, Human
gucccugcccuucuuc

SEQ ID NO: 3673573 - RNA, 15 nt, Human
gucccuggccaucuc

SEQ ID NO: 3673574 - RNA, 19 nt, Human
gucccugggagggacaugc

SEQ ID NO: 3673575 - RNA, 19 nt, Human
gucccugggccagggucug

SEQ ID NO: 3673576 - RNA, 22 nt, Human
gucccuggggcuagggggagcc

SEQ ID NO: 3673577 - RNA, 19 nt, Human
gucccugggggaagcccug

SEQ ID NO: 3673578 - RNA, 20 nt, Human
gucccugggggaagcccugg

SEQ ID NO: 3673579 - RNA, 23 nt, Human
gucccugggggaagcccuggauu

SEQ ID NO: 3673580 - RNA, 20 nt, Human
gucccuggguagcgggggag

SEQ ID NO: 3673581 - RNA, 14 nt, Human
gucccugucaccuc

SEQ ID NO: 3673582 - RNA, 15 nt, Human
gucccugucaccucu

SEQ ID NO: 3673583 - RNA, 15 nt, Human
gucccugugccuaac

SEQ ID NO: 3673584 - RNA, 18 nt, Human
gucccuguuuucugagcc

SEQ ID NO: 3673585 - RNA, 18 nt, Human
gucccuuccacaccccca

SEQ ID NO: 3673586 - RNA, 20 nt, Human
gucccuuccccaugcuuccu

SEQ ID NO: 3673587 - RNA, 20 nt, Human
gucccuuccccucccuggcu

SEQ ID NO: 3673588 - RNA, 19 nt, Human
gucccuucucuuaauuuaa

SEQ ID NO: 3673589 - RNA, 14 nt, Human
gucccuugagaccu

SEQ ID NO: 3673590 - RNA, 17 nt, Human
gucccuugagaccucag

SEQ ID NO: 3673591 - RNA, 18 nt, Human
gucccuugagaccucagc

SEQ ID NO: 3673592 - RNA, 19 nt, Human
gucccuugagaccucagcc

SEQ ID NO: 3673593 - RNA, 18 nt, Human
gucccuugaugcacagag

SEQ ID NO: 3673594 - RNA, 14 nt, Human
gucccuugccucaa

SEQ ID NO: 3673595 - RNA, 20 nt, Human
gucccuugcuugccugcagg

SEQ ID NO: 3673596 - RNA, 22 nt, Human
gucccuugcuugccugcagggc

SEQ ID NO: 3673597 - RNA, 13 nt, Human
guccgagcuuuga

SEQ ID NO: 3673598 - RNA, 15 nt, Human
guccgauaauaucuu

SEQ ID NO: 3673599 - RNA, 12 nt, Human
guccgcccucuu

SEQ ID NO: 3673600 - RNA, 19 nt, Human
guccgcccucuuccccucu

SEQ ID NO: 3673601 - RNA, 20 nt, Human
guccgcccugcuccucccug

SEQ ID NO: 3673602 - RNA, 18 nt, Human
guccggacacuccuagag

SEQ ID NO: 3673603 - RNA, 19 nt, Human
guccgugggacggugccca

SEQ ID NO: 3673604 - RNA, 17 nt, Human
guccguggguugcuaac

SEQ ID NO: 3673605 - RNA, 20 nt, Human
guccguggguugcuaacuga

SEQ ID NO: 3673606 - RNA, 19 nt, Human
guccguucacauguguggu

SEQ ID NO: 3673607 - RNA, 16 nt, Human
guccuaacugguauag

SEQ ID NO: 3673608 - RNA, 18 nt, Human
guccuaaggaaccuuccu

SEQ ID NO: 3673609 - RNA, 21 nt, Human
guccuaauggugaugcagucu

SEQ ID NO: 3673610 - RNA, 16 nt, Human
guccuacagaaaaacc

SEQ ID NO: 3673611 - RNA, 13 nt, Human
guccuacccaccc

SEQ ID NO: 3673612 - RNA, 23 nt, Human
guccuacucugugucaggugggg

SEQ ID NO: 3673613 - RNA, 18 nt, Human
guccuagaauguuucauu

SEQ ID NO: 3673614 - RNA, 15 nt, Human
guccuagcacagaug

SEQ ID NO: 3673615 - RNA, 17 nt, Human
guccuagcacagauggc

SEQ ID NO: 3673616 - RNA, 22 nt, Human
guccuaggccacaccaucuccu

SEQ ID NO: 3673617 - RNA, 16 nt, Human
guccuaggcuggaagg

SEQ ID NO: 3673618 - RNA, 22 nt, Human
guccuaggcuggaaggaggaag

SEQ ID NO: 3673619 - RNA, 18 nt, Human
ugcucacuaccuccucag

SEQ ID NO: 3673620 - RNA, 21 nt, Human
ugcucagaacuugcugcuguc

SEQ ID NO: 3673621 - RNA, 14 nt, Human
ugcucagaagggcu

SEQ ID NO: 3673622 - RNA, 11 nt, Human
ugcucagcccu

SEQ ID NO: 3673623 - RNA, 17 nt, Human
ugcucagcccugacugg

SEQ ID NO: 3673624 - RNA, 13 nt, Human
ugcucagcccugg

SEQ ID NO: 3673625 - RNA, 17 nt, Human
ugcucaggacucagaag

SEQ ID NO: 3673626 - RNA, 19 nt, Human
ugcucaggagcccugggag

SEQ ID NO: 3673627 - RNA, 19 nt, Human
ugcucaggcugcagcugga

SEQ ID NO: 3673628 - RNA, 22 nt, Human
ugcucagggaaaagcagcucuc

SEQ ID NO: 3673629 - RNA, 23 nt, Human
ugcucagggacucaucuuucccu

SEQ ID NO: 3673630 - RNA, 20 nt, Human
ugcucaggggcccuggagca

SEQ ID NO: 3673631 - RNA, 14 nt, Human
ugcucaguugcuaa

SEQ ID NO: 3673632 - RNA, 16 nt, Human
ugcucaguuguagaau

SEQ ID NO: 3673633 - RNA, 19 nt, Human
ugcucaguuguagaaugua

SEQ ID NO: 3673634 - RNA, 14 nt, Human
ugcucauaacggau

SEQ ID NO: 3673635 - RNA, 16 nt, Human
ugcucauaacggauca

SEQ ID NO: 3673636 - RNA, 22 nt, Human
ugcucauauugugauucugccu

SEQ ID NO: 3673637 - RNA, 14 nt, Human
ugcucauauuuccc

SEQ ID NO: 3673638 - RNA, 22 nt, Human
ugcucauauuucccaugauuuc

SEQ ID NO: 3673639 - RNA, 14 nt, Human
ugcucaucugcugg

SEQ ID NO: 3673640 - RNA, 11 nt, Human
ugcucauggaa

SEQ ID NO: 3673641 - RNA, 19 nt, Human
ugcucauucuaaugauggc

SEQ ID NO: 3673642 - RNA, 23 nt, Human
ugcucauucuaaugauggcccau

SEQ ID NO: 3673643 - RNA, 22 nt, Human
ugcucauuuuuuuuuuaucaga

SEQ ID NO: 3673644 - RNA, 22 nt, Human
ugcuccacccuuggccugucuc

SEQ ID NO: 3673645 - RNA, 12 nt, Human
ugcuccagaccu

SEQ ID NO: 3673646 - RNA, 14 nt, Human
ugcuccagaccuga

SEQ ID NO: 3673647 - RNA, 15 nt, Human
ugcuccagcaacaca

SEQ ID NO: 3673648 - RNA, 23 nt, Human
ugcuccagcaacacagccugggc

SEQ ID NO: 3673649 - RNA, 15 nt, Human
ugcuccagccaaccc

SEQ ID NO: 3673650 - RNA, 13 nt, Human
ugcuccagccugg

SEQ ID NO: 3673651 - RNA, 15 nt, Human
ugcuccagccuggcu

SEQ ID NO: 3673652 - RNA, 17 nt, Human
ugcuccagcucuggcau

SEQ ID NO: 3673653 - RNA, 20 nt, Human
ugcuccagcuguucagcugg

SEQ ID NO: 3673654 - RNA, 22 nt, Human
ugcuccaggcaggcuaaggcgu

SEQ ID NO: 3673655 - RNA, 20 nt, Human
ugcuccaggccugcagcagg

SEQ ID NO: 3673656 - RNA, 23 nt, Human
ugcuccagucaacaaacuauuuc

SEQ ID NO: 3673657 - RNA, 18 nt, Human
ugcuccauaguuuggcau

SEQ ID NO: 3673658 - RNA, 18 nt, Human
ugcucccaccuccugaca

SEQ ID NO: 3673659 - RNA, 17 nt, Human
ugcucccagcagcccua

SEQ ID NO: 3673660 - RNA, 18 nt, Human
ugcucccauccugugugu

SEQ ID NO: 3673661 - RNA, 19 nt, Human
ugcuccccacagcgucccu

SEQ ID NO: 3673662 - RNA, 13 nt, Human
ugcucccccaucc

SEQ ID NO: 3673663 - RNA, 14 nt, Human
ugcuccccucccuc

SEQ ID NO: 3673664 - RNA, 21 nt, Human
ugcucccuaagccagccuggu

SEQ ID NO: 3673665 - RNA, 12 nt, Human
ugcucccucaga

SEQ ID NO: 3673666 - RNA, 13 nt, Human
ugcucccuccccu

SEQ ID NO: 3673667 - RNA, 18 nt, Human
ugcucccuccccugcccu

SEQ ID NO: 3673668 - RNA, 21 nt, Human
ugcucccuccgggucuuccua

SEQ ID NO: 3673669 - RNA, 21 nt, Human
ugcucccugaagccagccuuc

SEQ ID NO: 3673670 - RNA, 14 nt, Human
ugcucccugacugg

SEQ ID NO: 3673671 - RNA, 22 nt, Human
ugcucccuguaggguccaacca

SEQ ID NO: 3673672 - RNA, 18 nt, Human
ugcuccgcugcuccuugg

SEQ ID NO: 3673673 - RNA, 20 nt, Human
ugcuccgcugcuccuuggcu

SEQ ID NO: 3673674 - RNA, 14 nt, Human
ugcuccgugccucc

SEQ ID NO: 3673675 - RNA, 15 nt, Human
ugcuccgugccucca

SEQ ID NO: 3673676 - RNA, 19 nt, Human
ugcuccgugccuccaccac

SEQ ID NO: 3673677 - RNA, 20 nt, Human
ugcuccgugccuccaccacc

SEQ ID NO: 3673678 - RNA, 24 nt, Human
ugcuccuagagggaggggccuagg

SEQ ID NO: 3673679 - RNA, 22 nt, Human
ugcuccuccagggccacgugcc

SEQ ID NO: 3673680 - RNA, 12 nt, Human
ugcuccucccug

SEQ ID NO: 3673681 - RNA, 23 nt, Human
ugcuccuccuuggugccuggccu

SEQ ID NO: 3673682 - RNA, 11 nt, Human
ugcuccucucc

SEQ ID NO: 3673683 - RNA, 16 nt, Human
ugcuccucuccaggca

SEQ ID NO: 3673684 - RNA, 19 nt, Human
ugcuccucuuccccagacg

SEQ ID NO: 3673685 - RNA, 15 nt, Human
ugcuccugagccccc

SEQ ID NO: 3673686 - RNA, 13 nt, Human
ugcuccugcagca

SEQ ID NO: 3673687 - RNA, 14 nt, Human
ugcuccuggagccu

SEQ ID NO: 3673688 - RNA, 21 nt, Human
ugcuccuguucacaccagaga

SEQ ID NO: 3673689 - RNA, 18 nt, Human
ugcuccuuagcugccaag

SEQ ID NO: 3673690 - RNA, 21 nt, Human
ugcaguucccacauuaaagaa

SEQ ID NO: 3673691 - RNA, 19 nt, Human
ugcaguucuaguuugcauu

SEQ ID NO: 3673692 - RNA, 20 nt, Human
ugcaguucuaguuugcauuc

SEQ ID NO: 3673693 - RNA, 20 nt, Human
ugcaguucuuuggcugaaag

SEQ ID NO: 3673694 - RNA, 16 nt, Human
ugcaguugacagcagg

SEQ ID NO: 3673695 - RNA, 14 nt, Human
ugcaguugccaguc

SEQ ID NO: 3673696 - RNA, 16 nt, Human
ugcaguugccagucac

SEQ ID NO: 3673697 - RNA, 12 nt, Human
ugcaguugcugu

SEQ ID NO: 3673698 - RNA, 13 nt, Human
ugcaguugucucu

SEQ ID NO: 3673699 - RNA, 17 nt, Human
ugcaguugucucuguuu

SEQ ID NO: 3673700 - RNA, 19 nt, Human
ugcaguuuaagagcagaac

SEQ ID NO: 3673701 - RNA, 10 nt, Human
ugcaguuuau

SEQ ID NO: 3673702 - RNA, 14 nt, Human
ugcaguuugaaauu

SEQ ID NO: 3673703 - RNA, 23 nt, Human
ugcaguuugaaauucugaauuug

SEQ ID NO: 3673704 - RNA, 15 nt, Human
ugcaguuuuucagga

SEQ ID NO: 3673705 - RNA, 18 nt, Human
ugcaguuuuucauuuuaa

SEQ ID NO: 3673706 - RNA, 17 nt, Human
ugcauaaagucagugcc

SEQ ID NO: 3673707 - RNA, 13 nt, Human
ugcauaaauaugc

SEQ ID NO: 3673708 - RNA, 19 nt, Human
ugcauaaauaugcagugau

SEQ ID NO: 3673709 - RNA, 19 nt, Human
ugcauaauaaaugcuucag

SEQ ID NO: 3673710 - RNA, 23 nt, Human
ugcauaauaagcuaaagaggcug

SEQ ID NO: 3673711 - RNA, 11 nt, Human
ugcauaauaau

SEQ ID NO: 3673712 - RNA, 18 nt, Human
ugcauaauguuucuggau

SEQ ID NO: 3673713 - RNA, 23 nt, Human
ugcauaauucugaaguuauauuu

SEQ ID NO: 3673714 - RNA, 12 nt, Human
ugcauacaaaca

SEQ ID NO: 3673715 - RNA, 13 nt, Human
ugcauacaaacaa

SEQ ID NO: 3673716 - RNA, 11 nt, Human
ugcauacacac

SEQ ID NO: 3673717 - RNA, 12 nt, Human
ugcauacacaca

SEQ ID NO: 3673718 - RNA, 22 nt, Human
ugcauacacacacacacacagc

SEQ ID NO: 3673719 - RNA, 23 nt, Human
ugcauacacacacacacacagcc

SEQ ID NO: 3673720 - RNA, 16 nt, Human
ugcauacauacacaua

SEQ ID NO: 3673721 - RNA, 18 nt, Human
ugcauaccaaccugggca

SEQ ID NO: 3673722 - RNA, 19 nt, Human
ugcauacucauuaggaugg

SEQ ID NO: 3673723 - RNA, 17 nt, Human
ugcauacugagccaagu

SEQ ID NO: 3673724 - RNA, 14 nt, Human
ugcauacuggacuc

SEQ ID NO: 3673725 - RNA, 17 nt, Human
ugcauacuucaaaagua

SEQ ID NO: 3673726 - RNA, 19 nt, Human
ugcauacuuuuuaaaugua

SEQ ID NO: 3673727 - RNA, 18 nt, Human
ugcauagaaggaggagag

SEQ ID NO: 3673728 - RNA, 20 nt, Human
ugcauaggugaucucauuua

SEQ ID NO: 3673729 - RNA, 16 nt, Human
ugcauagguuuagcag

SEQ ID NO: 3673730 - RNA, 20 nt, Human
ugcauaguaccaaucauuuu

SEQ ID NO: 3673731 - RNA, 16 nt, Human
ugcauagucccagcua

SEQ ID NO: 3673732 - RNA, 14 nt, Human
ugcauagugcuggg

SEQ ID NO: 3673733 - RNA, 23 nt, Human
ugcauaguuucuuuauuuugugu

SEQ ID NO: 3673734 - RNA, 15 nt, Human
ugcauauaacuuaua

SEQ ID NO: 3673735 - RNA, 16 nt, Human
ugcauauaacuuauau

SEQ ID NO: 3673736 - RNA, 20 nt, Human
ugcauauaacuuauauugua

SEQ ID NO: 3673737 - RNA, 22 nt, Human
ugcauauaacuuauauuguaag

SEQ ID NO: 3673738 - RNA, 21 nt, Human
ugcauauaagggaaguaguua

SEQ ID NO: 3673739 - RNA, 16 nt, Human
ugcauauaaugaauaa

SEQ ID NO: 3673740 - RNA, 13 nt, Human
ugcauauauauau

SEQ ID NO: 3673741 - RNA, 15 nt, Human
ugcauauauauaugu

SEQ ID NO: 3673742 - RNA, 13 nt, Human
ugcauauccugag

SEQ ID NO: 3673743 - RNA, 17 nt, Human
ugcauauccugagccau

SEQ ID NO: 3673744 - RNA, 15 nt, Human
ugcauaugaaauccu

SEQ ID NO: 3673745 - RNA, 12 nt, Human
ugcauauguaug

SEQ ID NO: 3673746 - RNA, 17 nt, Human
ugcauauguugaauacu

SEQ ID NO: 3673747 - RNA, 23 nt, Human
ugcauauuauaaaggauaaagaa

SEQ ID NO: 3673748 - RNA, 23 nt, Human
ugcauauucuuauguaugugaaa

SEQ ID NO: 3673749 - RNA, 23 nt, Human
ugcauauugcauacuauuaaaca

SEQ ID NO: 3673750 - RNA, 15 nt, Human
ugcauauuguacacu

SEQ ID NO: 3673751 - RNA, 16 nt, Human
ugcauauuguacacuu

SEQ ID NO: 3673752 - RNA, 19 nt, Human
ugcauauuguacacuuuuu

SEQ ID NO: 3673753 - RNA, 21 nt, Human
ugcauauuuauaaaaauaaaa

SEQ ID NO: 3673754 - RNA, 22 nt, Human
ugcauauuuauccaaaaugugu

SEQ ID NO: 3673755 - RNA, 14 nt, Human
ugcaucaagaugug

SEQ ID NO: 3673756 - RNA, 13 nt, Human
ugcaucaaggggu

SEQ ID NO: 3673757 - RNA, 19 nt, Human
ugcaucagaaagcuuuauu

SEQ ID NO: 3673758 - RNA, 18 nt, Human
ugcaucagaaagggaggg

SEQ ID NO: 3673759 - RNA, 21 nt, Human
ugcaucagaaaugucuggaga

SEQ ID NO: 3673760 - RNA, 23 nt, Human
ugcaucagaaaugucuggagaau

SEQ ID NO: 3673761 - RNA, 20 nt, Human
ugcaucaguauuaauacuaa

SEQ ID NO: 3673762 - RNA, 16 nt, Human
ugcaucaucuguagau

SEQ ID NO: 3673763 - RNA, 21 nt, Human
ugcauccagccuggggcugag

SEQ ID NO: 3673764 - RNA, 14 nt, Human
ugcauccauuccuc

SEQ ID NO: 3673765 - RNA, 19 nt, Human
ugcauccauuccucaggga

SEQ ID NO: 3673766 - RNA, 18 nt, Human
ugcauccauucuccugag

SEQ ID NO: 3673767 - RNA, 20 nt, Human
ugcaucccagcaccugccuc

SEQ ID NO: 3673768 - RNA, 15 nt, Human
ugcaucccccccacc

SEQ ID NO: 3673769 - RNA, 14 nt, Human
ugcaucccuggcug

SEQ ID NO: 3673770 - RNA, 20 nt, Human
ugcauccguaguucccugaa

SEQ ID NO: 3673771 - RNA, 22 nt, Human
ugcauccuccaagaaucuaucu

SEQ ID NO: 3673772 - RNA, 18 nt, Human
ugcauccuccgccucccg

SEQ ID NO: 3673773 - RNA, 21 nt, Human
ugcauccuccgccucccgggu

SEQ ID NO: 3673774 - RNA, 22 nt, Human
ugcaucgagucaaaacucaaau

SEQ ID NO: 3673775 - RNA, 19 nt, Human
ugcaucuacucccaaguau

SEQ ID NO: 3673776 - RNA, 18 nt, Human
ugcaucuagauuauggag

SEQ ID NO: 3673777 - RNA, 14 nt, Human
ugcaucucaaaauu

SEQ ID NO: 3673778 - RNA, 13 nt, Human
ugcaucuccaccu

SEQ ID NO: 3673779 - RNA, 22 nt, Human
ugcaucugaaauaggaaacaag

SEQ ID NO: 3673780 - RNA, 15 nt, Human
ugcaucugaccagca

SEQ ID NO: 3673781 - RNA, 18 nt, Human
ugcaucugaccagcagcg

SEQ ID NO: 3673782 - RNA, 22 nt, Human
ugcaucugaccagcagcgccuu

SEQ ID NO: 3673783 - RNA, 17 nt, Human
ugcaucuggagagaaca

SEQ ID NO: 3673784 - RNA, 21 nt, Human
ugcaucuggagagaacagguu

SEQ ID NO: 3673785 - RNA, 20 nt, Human
ugcaucugggauucccacca

SEQ ID NO: 3673786 - RNA, 11 nt, Human
ugcaucuguau

SEQ ID NO: 3673787 - RNA, 23 nt, Human
ugcaucuguauaaguaagaaaau

SEQ ID NO: 3673788 - RNA, 12 nt, Human
ugcaucuuugau

SEQ ID NO: 3673789 - RNA, 18 nt, Human
ugcaucuuugauguguug

SEQ ID NO: 3673790 - RNA, 16 nt, Human
ugcaugaagagaagca

SEQ ID NO: 3673791 - RNA, 23 nt, Human
ugcaugaagagaagcaauuuugg

SEQ ID NO: 3673792 - RNA, 21 nt, Human
ugcaugaagguuucugaaaau

SEQ ID NO: 3673793 - RNA, 22 nt, Human
ugcaugagcuacgccugccucc

SEQ ID NO: 3673794 - RNA, 15 nt, Human
ugcaugagcuuuuau

SEQ ID NO: 3673795 - RNA, 21 nt, Human
ugcaugaggcuaguguggugu

SEQ ID NO: 3673796 - RNA, 18 nt, Human
ugcaugauguuugcccaa

SEQ ID NO: 3673797 - RNA, 14 nt, Human
ugcaugcccagaga

SEQ ID NO: 3673798 - RNA, 20 nt, Human
ugcaugcccagagacccagc

SEQ ID NO: 3673799 - RNA, 14 nt, Human
ugcaugccgcugca

SEQ ID NO: 3673800 - RNA, 13 nt, Human
ugcaugcggccca

SEQ ID NO: 3673801 - RNA, 17 nt, Human
ugcaugcucucugcagc

SEQ ID NO: 3673802 - RNA, 17 nt, Human
ugcaugcugcuggacag

SEQ ID NO: 3673803 - RNA, 15 nt, Human
ugcaugcugcuuuaa

SEQ ID NO: 3673804 - RNA, 13 nt, Human
ugcaugcuguccc

SEQ ID NO: 3673805 - RNA, 14 nt, Human
ugcaugcugucccu

SEQ ID NO: 3673806 - RNA, 16 nt, Human
ugcaugcugucccuua

SEQ ID NO: 3673807 - RNA, 19 nt, Human
ugcauggaaaccugaaaaa

SEQ ID NO: 3673808 - RNA, 11 nt, Human
ugcauggaaau

SEQ ID NO: 3673809 - RNA, 15 nt, Human
ugcauggaaaucagc

SEQ ID NO: 3673810 - RNA, 19 nt, Human
ugcauggaauuuguaaguu

SEQ ID NO: 3673811 - RNA, 15 nt, Human
ugcauggaccuaaca

SEQ ID NO: 3673812 - RNA, 17 nt, Human
ugcauggaccuaacauu

SEQ ID NO: 3673813 - RNA, 21 nt, Human
ugcauggaccuaacauucgau

SEQ ID NO: 3673814 - RNA, 18 nt, Human
ugcauggaggcccuccug

SEQ ID NO: 3673815 - RNA, 19 nt, Human
ugcauggcagggggcugcu

SEQ ID NO: 3673816 - RNA, 11 nt, Human
ugcauggcauc

SEQ ID NO: 3673817 - RNA, 17 nt, Human
ugcaugggccagccccu

SEQ ID NO: 3673818 - RNA, 19 nt, Human
ugcaugggcuaaugaagau

SEQ ID NO: 3673819 - RNA, 17 nt, Human
ugcauggggaaagagau

SEQ ID NO: 3673820 - RNA, 23 nt, Human
ugcauggggugggguagggcuga

SEQ ID NO: 3673821 - RNA, 23 nt, Human
ugcauggugcaguugacagcagg

SEQ ID NO: 3673822 - RNA, 22 nt, Human
ugcauggugccccaggaccagc

SEQ ID NO: 3673823 - RNA, 14 nt, Human
ugcaugguggccag

SEQ ID NO: 3673824 - RNA, 14 nt, Human
ugcaugguuucagc

SEQ ID NO: 3673825 - RNA, 12 nt, Human
ugcauguaauca

SEQ ID NO: 3673826 - RNA, 15 nt, Human
ugcauguaugucuug

SEQ ID NO: 3673827 - RNA, 16 nt, Human
ugcauguaugucuugg

SEQ ID NO: 3673828 - RNA, 23 nt, Human
ugcauguccuuugcgccugugac

SEQ ID NO: 3673829 - RNA, 16 nt, Human
ugcaugugaagaaagg

SEQ ID NO: 3673830 - RNA, 14 nt, Human
gucuggcccuuccu

SEQ ID NO: 3673831 - RNA, 16 nt, Human
gucuggcugagcccug

SEQ ID NO: 3673832 - RNA, 15 nt, Human
gucuggcugagcuga

SEQ ID NO: 3673833 - RNA, 21 nt, Human
gucugggagaaauugacagau

SEQ ID NO: 3673834 - RNA, 19 nt, Human
gucugggagaggcagagug

SEQ ID NO: 3673835 - RNA, 21 nt, Human
ugccaaguccagguccuggug

SEQ ID NO: 3673836 - RNA, 19 nt, Human
ugccaaguuguuugagaaa

SEQ ID NO: 3673837 - RNA, 21 nt, Human
ugccaauacuagucaccccaa

SEQ ID NO: 3673838 - RNA, 14 nt, Human
ugccaauauccuaa

SEQ ID NO: 3673839 - RNA, 21 nt, Human
ugccaauauccuaauaaaaag

SEQ ID NO: 3673840 - RNA, 18 nt, Human
ugccaauauuaaaucugc

SEQ ID NO: 3673841 - RNA, 20 nt, Human
ugccaaugaggucugaaaug

SEQ ID NO: 3673842 - RNA, 17 nt, Human
ugccaaugcuacaguaa

SEQ ID NO: 3673843 - RNA, 22 nt, Human
ugccaaugcuacaguaauaaau

SEQ ID NO: 3673844 - RNA, 15 nt, Human
uggaccucugcucug

SEQ ID NO: 3673845 - RNA, 11 nt, Human
uggaccugccc

SEQ ID NO: 3673846 - RNA, 19 nt, Human
uggaccuuaggccuuccuc

SEQ ID NO: 3673847 - RNA, 19 nt, Human
uggaccuuccugccaccag

SEQ ID NO: 3673848 - RNA, 22 nt, Human
uggaccuuuccugaggaagagg

SEQ ID NO: 3673849 - RNA, 24 nt, Human
uggacgacacggucggggcaucug

SEQ ID NO: 3673850 - RNA, 18 nt, Human
uggacgagaaaacaauaa

SEQ ID NO: 3673851 - RNA, 21 nt, Human
uggacggcaggcucacugcca

SEQ ID NO: 3673852 - RNA, 22 nt, Human
uggacggcaggcucacugccag

SEQ ID NO: 3673853 - RNA, 17 nt, Human
uggacggugcuccaggc

SEQ ID NO: 3673854 - RNA, 22 nt, Human
uggacggugcuccaggcaggcu

SEQ ID NO: 3673855 - RNA, 14 nt, Human
uggacuaaaagaua

SEQ ID NO: 3673856 - RNA, 21 nt, Human
uggacuaaaagauauaagugc

SEQ ID NO: 3673857 - RNA, 23 nt, Human
uggacuaaaagauauaagugcug

SEQ ID NO: 3673858 - RNA, 12 nt, Human
uggacucagaaa

SEQ ID NO: 3673859 - RNA, 14 nt, Human
uggacucagggcag

SEQ ID NO: 3673860 - RNA, 15 nt, Human
uggacucagggcagc

SEQ ID NO: 3673861 - RNA, 18 nt, Human
uggacuccagacucucug

SEQ ID NO: 3673862 - RNA, 14 nt, Human
uggacuccagccug

SEQ ID NO: 3673863 - RNA, 22 nt, Human
uggacuccagccugccuggcag

SEQ ID NO: 3673864 - RNA, 15 nt, Human
uggacuccugcacac

SEQ ID NO: 3673865 - RNA, 17 nt, Human
uggacucuaaagaccaa

SEQ ID NO: 3673866 - RNA, 18 nt, Human
uggacucuaaagaccaaa

SEQ ID NO: 3673867 - RNA, 17 nt, Human
uggacucuacacuguga

SEQ ID NO: 3673868 - RNA, 14 nt, Human
uggacucugcacau

SEQ ID NO: 3673869 - RNA, 15 nt, Human
uggacucugcacaug

SEQ ID NO: 3673870 - RNA, 19 nt, Human
uggacucugcacaugucuu

SEQ ID NO: 3673871 - RNA, 14 nt, Human
uggacucugcaucc

SEQ ID NO: 3673872 - RNA, 20 nt, Human
uggacucugcaucccagcac

SEQ ID NO: 3673873 - RNA, 21 nt, Human
uggacucuggugccuccagag

SEQ ID NO: 3673874 - RNA, 13 nt, Human
uggacucuucaaa

SEQ ID NO: 3673875 - RNA, 22 nt, Human
uggacugaaugggaucaugaaa

SEQ ID NO: 3673876 - RNA, 21 nt, Human
uggacugacagcaugugcccu

SEQ ID NO: 3673877 - RNA, 19 nt, Human
uggacugaccugguccaca

SEQ ID NO: 3673878 - RNA, 11 nt, Human
uggacugaggc

SEQ ID NO: 3673879 - RNA, 21 nt, Human
uggacuggaggccccuggagc

SEQ ID NO: 3673880 - RNA, 15 nt, Human
uggacuggccccugg

SEQ ID NO: 3673881 - RNA, 20 nt, Human
uggacuggccccugggucag

SEQ ID NO: 3673882 - RNA, 21 nt, Human
uggacuggguugcguccugac

SEQ ID NO: 3673883 - RNA, 16 nt, Human
uggacugguggccccu

SEQ ID NO: 3673884 - RNA, 21 nt, Human
uggacugucauagaaauuaca

SEQ ID NO: 3673885 - RNA, 21 nt, Human
uggacugugaugccacacaga

SEQ ID NO: 3673886 - RNA, 12 nt, Human
uggacuguggca

SEQ ID NO: 3673887 - RNA, 13 nt, Human
uggacuguggcac

SEQ ID NO: 3673888 - RNA, 18 nt, Human
uggacuguggcacuugcc

SEQ ID NO: 3673889 - RNA, 20 nt, Human
uggacuguggcacuugccug

SEQ ID NO: 3673890 - RNA, 16 nt, Human
uggacuguggugacuu

SEQ ID NO: 3673891 - RNA, 21 nt, Human
uggacuguggugacuuuggau

SEQ ID NO: 3673892 - RNA, 18 nt, Human
uggacuucaaagcaagcu

SEQ ID NO: 3673893 - RNA, 23 nt, Human
uggacuucacauaagcucagaau

SEQ ID NO: 3673894 - RNA, 17 nt, Human
uggacuucuaccugccc

SEQ ID NO: 3673895 - RNA, 20 nt, Human
uggacuucuuuuacucauga

SEQ ID NO: 3673896 - RNA, 18 nt, Human
uggacuugaacuuuccug

SEQ ID NO: 3673897 - RNA, 17 nt, Human
uggacuugagcuuggca

SEQ ID NO: 3673898 - RNA, 18 nt, Human
uggacuuggucaccagcu

SEQ ID NO: 3673899 - RNA, 20 nt, Human
uggacuuggucaccagcucc

SEQ ID NO: 3673900 - RNA, 20 nt, Human
uggacuuguauauuuguaca

SEQ ID NO: 3673901 - RNA, 22 nt, Human
uggacuuguauauuuguacaaa

SEQ ID NO: 3673902 - RNA, 23 nt, Human
uggacuuucaaaauuaaaucugu

SEQ ID NO: 3673903 - RNA, 14 nt, Human
uggacuuuccugca

SEQ ID NO: 3673904 - RNA, 17 nt, Human
uggacuuugcacacuuu

SEQ ID NO: 3673905 - RNA, 18 nt, Human
uggacuuuucguuaacau

SEQ ID NO: 3673906 - RNA, 21 nt, Human
uggacuuuucguuaacauuga

SEQ ID NO: 3673907 - RNA, 22 nt, Human
uggacuuuucguuaacauugac

SEQ ID NO: 3673908 - RNA, 23 nt, Human
uggagaaaaauaucuguaagagu

SEQ ID NO: 3673909 - RNA, 16 nt, Human
uggagaaacccugucu

SEQ ID NO: 3673910 - RNA, 15 nt, Human
uggagaaagcugacu

SEQ ID NO: 3673911 - RNA, 21 nt, Human
uggagaaauaaaaauaccucu

SEQ ID NO: 3673912 - RNA, 15 nt, Human
uggagaaauuauuua

SEQ ID NO: 3673913 - RNA, 19 nt, Human
uggagaacuagaaccugga

SEQ ID NO: 3673914 - RNA, 20 nt, Human
uggagaacuagaaccuggag

SEQ ID NO: 3673915 - RNA, 15 nt, Human
uggagaacucuggcu

SEQ ID NO: 3673916 - RNA, 13 nt, Human
uggagaagaacug

SEQ ID NO: 3673917 - RNA, 12 nt, Human
uggagaagagag

SEQ ID NO: 3673918 - RNA, 13 nt, Human
uggagaagcagug

SEQ ID NO: 3673919 - RNA, 20 nt, Human
uggagaagccacaggccuga

SEQ ID NO: 3673920 - RNA, 21 nt, Human
uggagaagccacaggccugag

SEQ ID NO: 3673921 - RNA, 12 nt, Human
uggagaagccau

SEQ ID NO: 3673922 - RNA, 19 nt, Human
uggagaagccauugucuuc

SEQ ID NO: 3673923 - RNA, 13 nt, Human
uggagaagcggcu

SEQ ID NO: 3673924 - RNA, 13 nt, Human
uggagaaggaagg

SEQ ID NO: 3673925 - RNA, 16 nt, Human
uggagaagucucagcu

SEQ ID NO: 3673926 - RNA, 15 nt, Human
uggagaaucacaggc

SEQ ID NO: 3673927 - RNA, 18 nt, Human
uggagaaucacaggcugg

SEQ ID NO: 3673928 - RNA, 22 nt, Human
uggagaaucacaggcugggcug

SEQ ID NO: 3673929 - RNA, 14 nt, Human
uggagaauuauaua

SEQ ID NO: 3673930 - RNA, 19 nt, Human
uggagaauugcugaagggc

SEQ ID NO: 3673931 - RNA, 18 nt, Human
uggagacaaugcagaugc

SEQ ID NO: 3673932 - RNA, 19 nt, Human
uggagacaaugucugcagc

SEQ ID NO: 3673933 - RNA, 21 nt, Human
uggagacaaugucugcagccc

SEQ ID NO: 3673934 - RNA, 24 nt, Human
uggagacaaugucugcagcccuga

SEQ ID NO: 3673935 - RNA, 17 nt, Human
uggagacacaacuauuu

SEQ ID NO: 3673936 - RNA, 20 nt, Human
uggagacagccccagagcag

SEQ ID NO: 3673937 - RNA, 17 nt, Human
uggagaccaccagggca

SEQ ID NO: 3673938 - RNA, 19 nt, Human
uggagaccagggagccuuu

SEQ ID NO: 3673939 - RNA, 18 nt, Human
uggagaccaugcagagcg

SEQ ID NO: 3673940 - RNA, 20 nt, Human
uggagaccaugcagagcgcc

SEQ ID NO: 3673941 - RNA, 22 nt, Human
uggagacguggaaccucugucu

SEQ ID NO: 3673942 - RNA, 18 nt, Human
uggagacuccuaggcagg

SEQ ID NO: 3673943 - RNA, 22 nt, Human
uggagacuccuaggcaggacau

SEQ ID NO: 3673944 - RNA, 14 nt, Human
uggagacucugugg

SEQ ID NO: 3673945 - RNA, 19 nt, Human
uggagacucuguggggccu

SEQ ID NO: 3673946 - RNA, 23 nt, Human
uggagacugcuccugagccccca

SEQ ID NO: 3673947 - RNA, 12 nt, Human
uggagacugcuu

SEQ ID NO: 3673948 - RNA, 14 nt, Human
uggagacugcuucc

SEQ ID NO: 3673949 - RNA, 17 nt, Human
uggagacugcuucccau

SEQ ID NO: 3673950 - RNA, 20 nt, Human
uggagacugguccugugugc

SEQ ID NO: 3673951 - RNA, 18 nt, Human
uggagacugugugugccc

SEQ ID NO: 3673952 - RNA, 23 nt, Human
uggagacugugugugcccucugg

SEQ ID NO: 3673953 - RNA, 16 nt, Human
uggagacuuagggcac

SEQ ID NO: 3673954 - RNA, 21 nt, Human
uggagacuuagggcaccaggg

SEQ ID NO: 3673955 - RNA, 12 nt, Human
uggagagaaaac

SEQ ID NO: 3673956 - RNA, 21 nt, Human
uggagagaaacaauaaagaga

SEQ ID NO: 3673957 - RNA, 15 nt, Human
uggagagaaggccuc

SEQ ID NO: 3673958 - RNA, 13 nt, Human
uggagagaaguuu

SEQ ID NO: 3673959 - RNA, 12 nt, Human
uggagagagggg

SEQ ID NO: 3673960 - RNA, 13 nt, Human
uggagagagggga

SEQ ID NO: 3673961 - RNA, 14 nt, Human
uggagagauaggaa

SEQ ID NO: 3673962 - RNA, 18 nt, Human
uggagagccagaaccugg

SEQ ID NO: 3673963 - RNA, 20 nt, Human
uggagagccagaaccuggag

SEQ ID NO: 3673964 - RNA, 16 nt, Human
uggagagcccagaguc

SEQ ID NO: 3673965 - RNA, 21 nt, Human
uggagagcccggcgccccugc

SEQ ID NO: 3673966 - RNA, 22 nt, Human
uggagagcuagaaccuggagag

SEQ ID NO: 3673967 - RNA, 21 nt, Human
uggagagcuagaaccuggagg

SEQ ID NO: 3673968 - RNA, 14 nt, Human
uggagagcuaggag

SEQ ID NO: 3673969 - RNA, 23 nt, Human
uggagaggagggaugcugccuga

SEQ ID NO: 3673970 - RNA, 18 nt, Human
uggagaggcccggccucu

SEQ ID NO: 3673971 - RNA, 20 nt, Human
uggagagggacagcccacug

SEQ ID NO: 3673972 - RNA, 23 nt, Human
uggagaguucaauggcugcugaa

SEQ ID NO: 3673973 - RNA, 16 nt, Human
uggagaguuuccugaa

SEQ ID NO: 3673974 - RNA, 21 nt, Human
uggagauccuccugcagacca

SEQ ID NO: 3673975 - RNA, 15 nt, Human
uggagaugaggccag

SEQ ID NO: 3673976 - RNA, 17 nt, Human
uggagaugaggccagac

SEQ ID NO: 3673977 - RNA, 24 nt, Human
uggagaugaggccagaccauggac

SEQ ID NO: 3673978 - RNA, 20 nt, Human
ugccccuccucucugcccua

SEQ ID NO: 3673979 - RNA, 15 nt, Human
ugccccucucaccaa

SEQ ID NO: 3673980 - RNA, 13 nt, Human
ugccccucuuucu

SEQ ID NO: 3673981 - RNA, 14 nt, Human
ugccccucuuucuc

SEQ ID NO: 3673982 - RNA, 11 nt, Human
ugccccugcug

SEQ ID NO: 3673983 - RNA, 12 nt, Human
ugccccugcugc

SEQ ID NO: 3673984 - RNA, 13 nt, Human
ugccccugcugcc

SEQ ID NO: 3673985 - RNA, 19 nt, Human
ugccccugcugcugucacc

SEQ ID NO: 3673986 - RNA, 16 nt, Human
ugccccuggcagcccc

SEQ ID NO: 3673987 - RNA, 14 nt, Human
ugccccuggcucug

SEQ ID NO: 3673988 - RNA, 13 nt, Human
ugccccuggcugg

SEQ ID NO: 3673989 - RNA, 19 nt, Human
ugccccuucccaucucuuc

SEQ ID NO: 3673990 - RNA, 21 nt, Human
ugccccuucccaucucuuccu

SEQ ID NO: 3673991 - RNA, 14 nt, Human
ugccccuuccgcca

SEQ ID NO: 3673992 - RNA, 18 nt, Human
ugccccuucuacacucuc

SEQ ID NO: 3673993 - RNA, 16 nt, Human
ugcccgagggagggga

SEQ ID NO: 3673994 - RNA, 14 nt, Human
ugcccgcacagcag

SEQ ID NO: 3673995 - RNA, 17 nt, Human
ugcccgccugcccaccu

SEQ ID NO: 3673996 - RNA, 15 nt, Human
ugcccgcucccagug

SEQ ID NO: 3673997 - RNA, 20 nt, Human
ugcccggcuaauuuuuguaa

SEQ ID NO: 3673998 - RNA, 20 nt, Human
ugcccgggcgcggccagccc

SEQ ID NO: 3673999 - RNA, 20 nt, Human
ugcccguaaacacgccugca

SEQ ID NO: 3674000 - RNA, 17 nt, Human
ugcccgucucucuccca

SEQ ID NO: 3674001 - RNA, 20 nt, Human
ugcccgucucucucccaugg

SEQ ID NO: 3674002 - RNA, 23 nt, Human
ugcccgucucucucccauggagc

SEQ ID NO: 3674003 - RNA, 17 nt, Human
ugcccgucuucagccua

SEQ ID NO: 3674004 - RNA, 19 nt, Human
ugcccgucuucagccuagc

SEQ ID NO: 3674005 - RNA, 17 nt, Human
ugcccguucuugaaaug

SEQ ID NO: 3674006 - RNA, 13 nt, Human
ugcccuaaacccu

SEQ ID NO: 3674007 - RNA, 15 nt, Human
ugcccuaagcagaaa

SEQ ID NO: 3674008 - RNA, 20 nt, Human
ugcccuaagcagaaagugcc

SEQ ID NO: 3674009 - RNA, 22 nt, Human
ugcccuaagcagaaagugccuu

SEQ ID NO: 3674010 - RNA, 23 nt, Human
ugcccuaaugcgcaggcuggccc

SEQ ID NO: 3674011 - RNA, 16 nt, Human
ugcccuaaugucugua

SEQ ID NO: 3674012 - RNA, 15 nt, Human
ugcccuacucacucu

SEQ ID NO: 3674013 - RNA, 19 nt, Human
ugcccuacucauugggguu

SEQ ID NO: 3674014 - RNA, 18 nt, Human
ugcccuaguuuucuuucc

SEQ ID NO: 3674015 - RNA, 16 nt, Human
ugcccuaugggccugc

SEQ ID NO: 3674016 - RNA, 16 nt, Human
ugcccucaaucccagc

SEQ ID NO: 3674017 - RNA, 16 nt, Human
ugcccucaccacccac

SEQ ID NO: 3674018 - RNA, 12 nt, Human
ugcccucagggg

SEQ ID NO: 3674019 - RNA, 21 nt, Human
ugcccucauggccccucugac

SEQ ID NO: 3674020 - RNA, 18 nt, Human
ugcccucauuacugggcc

SEQ ID NO: 3674021 - RNA, 18 nt, Human
ugcccucauuuuauguca

SEQ ID NO: 3674022 - RNA, 14 nt, Human
ugcccuccacugcc

SEQ ID NO: 3674023 - RNA, 16 nt, Human
ugcccuccacugcccu

SEQ ID NO: 3674024 - RNA, 13 nt, Human
ugcccuccauccc

SEQ ID NO: 3674025 - RNA, 12 nt, Human
ugcccucccauc

SEQ ID NO: 3674026 - RNA, 17 nt, Human
ugcccuccccagagcac

SEQ ID NO: 3674027 - RNA, 20 nt, Human
ugcccuccccagagcacugg

SEQ ID NO: 3674028 - RNA, 14 nt, Human
ugcccuccccucuc

SEQ ID NO: 3674029 - RNA, 17 nt, Human
ugcccuccccucucugc

SEQ ID NO: 3674030 - RNA, 13 nt, Human
ugcccucccuucu

SEQ ID NO: 3674031 - RNA, 14 nt, Human
ugcccucccuucuc

SEQ ID NO: 3674032 - RNA, 20 nt, Human
ugcccucccuucucccugga

SEQ ID NO: 3674033 - RNA, 16 nt, Human
ugcccucguggccagc

SEQ ID NO: 3674034 - RNA, 13 nt, Human
ugcccucucccac

SEQ ID NO: 3674035 - RNA, 16 nt, Human
ugcccucucccacccu

SEQ ID NO: 3674036 - RNA, 12 nt, Human
ugcccucuccug

SEQ ID NO: 3674037 - RNA, 13 nt, Human
ugcccucuccugg

SEQ ID NO: 3674038 - RNA, 17 nt, Human
ugcccucuccuuccuua

SEQ ID NO: 3674039 - RNA, 13 nt, Human
ugcccucugggcu

SEQ ID NO: 3674040 - RNA, 19 nt, Human
ugcccucugggcucugagu

SEQ ID NO: 3674041 - RNA, 11 nt, Human
ugcccucuguu

SEQ ID NO: 3674042 - RNA, 18 nt, Human
ugcccugaccaugcauuu

SEQ ID NO: 3674043 - RNA, 21 nt, Human
ugcccugaccucccagcccua

SEQ ID NO: 3674044 - RNA, 22 nt, Human
ugcccugaccucccagcccuau

SEQ ID NO: 3674045 - RNA, 22 nt, Human
ugcccugaguggaucuccaagg

SEQ ID NO: 3674046 - RNA, 16 nt, Human
ugcccugccaccuguc

SEQ ID NO: 3674047 - RNA, 20 nt, Human
ugcccugccaccugucuguc

SEQ ID NO: 3674048 - RNA, 21 nt, Human
ugcccugccaccugucugucu

SEQ ID NO: 3674049 - RNA, 21 nt, Human
gugcacaaaguggcauaaaaa

SEQ ID NO: 3674050 - RNA, 23 nt, Human
gugcacaaaguggcauaaaaaac

SEQ ID NO: 3674051 - RNA, 23 nt, Human
gugcacaagcuccaagcucccag

SEQ ID NO: 3674052 - RNA, 14 nt, Human
gugcacacaccaga

SEQ ID NO: 3674053 - RNA, 21 nt, Human
gugcacacaccagagcccacc

SEQ ID NO: 3674054 - RNA, 20 nt, Human
gugcacagacgucccuccac

SEQ ID NO: 3674055 - RNA, 14 nt, Human
gugcacagccccua

SEQ ID NO: 3674056 - RNA, 22 nt, Human
gugcacauauccaggcaccagg

SEQ ID NO: 3674057 - RNA, 18 nt, Human
gugcaccaccacacccgg

SEQ ID NO: 3674058 - RNA, 16 nt, Human
gugcaccaucccuuuu

SEQ ID NO: 3674059 - RNA, 23 nt, Human
gugcaccaucccuuuuugaagug

SEQ ID NO: 3674060 - RNA, 15 nt, Human
gugcacccacucugc

SEQ ID NO: 3674061 - RNA, 12 nt, Human
gugcaccugggc

SEQ ID NO: 3674062 - RNA, 18 nt, Human
gugcacgcaguggccuuc

SEQ ID NO: 3674063 - RNA, 23 nt, Human
gugcacguaaaguacuuguaguu

SEQ ID NO: 3674064 - RNA, 18 nt, Human
gugcacguggagagcugg

SEQ ID NO: 3674065 - RNA, 21 nt, Human
gugcacguggagagcuggugc

SEQ ID NO: 3674066 - RNA, 22 nt, Human
gugcacuaauguguaagacaaa

SEQ ID NO: 3674067 - RNA, 18 nt, Human
gugcacuggccccacccu

SEQ ID NO: 3674068 - RNA, 13 nt, Human
gugcacugucacu

SEQ ID NO: 3674069 - RNA, 23 nt, Human
gugcacugucacuuugcucuggg

SEQ ID NO: 3674070 - RNA, 20 nt, Human
gugcacuuggggcacaggga

SEQ ID NO: 3674071 - RNA, 19 nt, Human
gugcacuuucuaauguuuc

SEQ ID NO: 3674072 - RNA, 15 nt, Human
gugcacuuuguaaau

SEQ ID NO: 3674073 - RNA, 14 nt, Human
gugcagaaaacauu

SEQ ID NO: 3674074 - RNA, 16 nt, Human
gugcagaaaacauugu

SEQ ID NO: 3674075 - RNA, 17 nt, Human
gugcagaaaacauuguu

SEQ ID NO: 3674076 - RNA, 22 nt, Human
gugcagaauguaagugggccca

SEQ ID NO: 3674077 - RNA, 18 nt, Human
gugcagacaaucuucugu

SEQ ID NO: 3674078 - RNA, 16 nt, Human
gugcagacagaagucu

SEQ ID NO: 3674079 - RNA, 12 nt, Human
gugcagaggaag

SEQ ID NO: 3674080 - RNA, 13 nt, Human
gugcagaggcugu

SEQ ID NO: 3674081 - RNA, 17 nt, Human
gugcagaggcuguggcu

SEQ ID NO: 3674082 - RNA, 19 nt, Human
gugcagagguacccugggu

SEQ ID NO: 3674083 - RNA, 19 nt, Human
gugcagaugcaauuguuug

SEQ ID NO: 3674084 - RNA, 16 nt, Human
gugcagcaaccagagc

SEQ ID NO: 3674085 - RNA, 15 nt, Human
gugcagcauuucacu

SEQ ID NO: 3674086 - RNA, 12 nt, Human
gugcagccagag

SEQ ID NO: 3674087 - RNA, 14 nt, Human
gugcagccagaggc

SEQ ID NO: 3674088 - RNA, 21 nt, Human
gugcagcccguguggccccuu

SEQ ID NO: 3674089 - RNA, 21 nt, Human
gugcagccuguccugggcugg

SEQ ID NO: 3674090 - RNA, 13 nt, Human
gugcagcugauuu

SEQ ID NO: 3674091 - RNA, 16 nt, Human
gugcagcuucuguccu

SEQ ID NO: 3674092 - RNA, 18 nt, Human
gugcaggcuggccagccg

SEQ ID NO: 3674093 - RNA, 20 nt, Human
gugcaggcuggccagccgcu

SEQ ID NO: 3674094 - RNA, 23 nt, Human
gugcagggaggagguggcagccc

SEQ ID NO: 3674095 - RNA, 14 nt, Human
gugcagggaugugg

SEQ ID NO: 3674096 - RNA, 15 nt, Human
gugcaguaauagcac

SEQ ID NO: 3674097 - RNA, 12 nt, Human
gugcagucuggg

SEQ ID NO: 3674098 - RNA, 24 nt, Human
gugcaguggcgugaucucagcuca

SEQ ID NO: 3674099 - RNA, 20 nt, Human
gugcaguggugcgaucuggg

SEQ ID NO: 3674100 - RNA, 20 nt, Human
gugcaguucuaguuugcauu

SEQ ID NO: 3674101 - RNA, 15 nt, Human
gugcaguugacagca

SEQ ID NO: 3674102 - RNA, 19 nt, Human
gugcaguugacagcaggug

SEQ ID NO: 3674103 - RNA, 14 nt, Human
gugcauaccacuuu

SEQ ID NO: 3674104 - RNA, 19 nt, Human
gugcauagaacuggguaaa

SEQ ID NO: 3674105 - RNA, 20 nt, Human
gugcauaguuguagacaaag

SEQ ID NO: 3674106 - RNA, 15 nt, Human
gugcauaguuucuuu

SEQ ID NO: 3674107 - RNA, 21 nt, Human
gugcauauuccuuucuaucau

SEQ ID NO: 3674108 - RNA, 13 nt, Human
gugcauauuguac

SEQ ID NO: 3674109 - RNA, 12 nt, Human
gugcauccaaag

SEQ ID NO: 3674110 - RNA, 18 nt, Human
gugcauccgggggcagcu

SEQ ID NO: 3674111 - RNA, 13 nt, Human
gugcaugcucucu

SEQ ID NO: 3674112 - RNA, 21 nt, Human
gugcaugcucucugcagccag

SEQ ID NO: 3674113 - RNA, 20 nt, Human
gugcaugggacccacgaaac

SEQ ID NO: 3674114 - RNA, 15 nt, Human
gugcaugguggccag

SEQ ID NO: 3674115 - RNA, 16 nt, Human
gugcauguaugucuug

SEQ ID NO: 3674116 - RNA, 14 nt, Human
gugcauguccuuug

SEQ ID NO: 3674117 - RNA, 14 nt, Human
gugcauguguguau

SEQ ID NO: 3674118 - RNA, 18 nt, Human
gugcaugugugugcucag

SEQ ID NO: 3674119 - RNA, 19 nt, Human
gugcauguguguucaugca

SEQ ID NO: 3674120 - RNA, 23 nt, Human
gugcauuagcacagauuuuaauu

SEQ ID NO: 3674121 - RNA, 19 nt, Human
gugcauucuuuuaaaagac

SEQ ID NO: 3674122 - RNA, 23 nt, Human
gugcauucuuuuaaaagacaaga

SEQ ID NO: 3674123 - RNA, 20 nt, Human
uggccucuuuccucagccuu

SEQ ID NO: 3674124 - RNA, 14 nt, Human
uggccucuuugucu

SEQ ID NO: 3674125 - RNA, 17 nt, Human
uggccugacuuggggga

SEQ ID NO: 3674126 - RNA, 21 nt, Human
uggccugaugaccaauuuuaa

SEQ ID NO: 3674127 - RNA, 19 nt, Human
uggccugcaaacugggaac

SEQ ID NO: 3674128 - RNA, 23 nt, Human
uggccugcaaacugggaaccccu

SEQ ID NO: 3674129 - RNA, 23 nt, Human
uggccugcacggugggccuugcu

SEQ ID NO: 3674130 - RNA, 24 nt, Human
uggccugcacggugggccuugcug

SEQ ID NO: 3674131 - RNA, 14 nt, Human
uggccugcacuaau

SEQ ID NO: 3674132 - RNA, 16 nt, Human
uggccugcacuaauuu

SEQ ID NO: 3674133 - RNA, 21 nt, Human
uggccugcugggcucuccacc

SEQ ID NO: 3674134 - RNA, 12 nt, Human
uggccugcugug

SEQ ID NO: 3674135 - RNA, 12 nt, Human
uggccuggagca

SEQ ID NO: 3674136 - RNA, 18 nt, Human
uggccuggaggugggguu

SEQ ID NO: 3674137 - RNA, 14 nt, Human
uggccuggaucucc

SEQ ID NO: 3674138 - RNA, 12 nt, Human
uggccuggcaca

SEQ ID NO: 3674139 - RNA, 18 nt, Human
uggccuggcacacaucag

SEQ ID NO: 3674140 - RNA, 13 nt, Human
uggccuggccagg

SEQ ID NO: 3674141 - RNA, 17 nt, Human
uggccuggccaggagcu

SEQ ID NO: 3674142 - RNA, 20 nt, Human
uggccuggccagugcccuga

SEQ ID NO: 3674143 - RNA, 13 nt, Human
uggccuggcccug

SEQ ID NO: 3674144 - RNA, 13 nt, Human
uggccuggccggc

SEQ ID NO: 3674145 - RNA, 12 nt, Human
uggccuggcucc

SEQ ID NO: 3674146 - RNA, 21 nt, Human
uggccuguagaauagccugug

SEQ ID NO: 3674147 - RNA, 15 nt, Human
uggccuguagaguug

SEQ ID NO: 3674148 - RNA, 18 nt, Human
uggccuguagaguugcug

SEQ ID NO: 3674149 - RNA, 12 nt, Human
uggccugucuca

SEQ ID NO: 3674150 - RNA, 18 nt, Human
uggccugucucaucccca

SEQ ID NO: 3674151 - RNA, 20 nt, Human
uggccugucucauccccagg

SEQ ID NO: 3674152 - RNA, 21 nt, Human
uggccugugcgaucccacccg

SEQ ID NO: 3674153 - RNA, 19 nt, Human
uggccuguguucuuccugg

SEQ ID NO: 3674154 - RNA, 23 nt, Human
uggccuuccccagcaugcaccac

SEQ ID NO: 3674155 - RNA, 18 nt, Human
uggccuuccccagccucu

SEQ ID NO: 3674156 - RNA, 14 nt, Human
uggccuuccugccc

SEQ ID NO: 3674157 - RNA, 14 nt, Human
uggccuucggccuc

SEQ ID NO: 3674158 - RNA, 20 nt, Human
uggccuucggccuccauccu

SEQ ID NO: 3674159 - RNA, 23 nt, Human
uggccuuguaagacccuuauugc

SEQ ID NO: 3674160 - RNA, 19 nt, Human
uggccuuguucugucacca

SEQ ID NO: 3674161 - RNA, 22 nt, Human
uggccuuuauuaaaaacugagu

SEQ ID NO: 3674162 - RNA, 20 nt, Human
uggccuuucauauuuuagcu

SEQ ID NO: 3674163 - RNA, 16 nt, Human
uggccuuugcgcuccu

SEQ ID NO: 3674164 - RNA, 18 nt, Human
uggccuuuguaagugcag

SEQ ID NO: 3674165 - RNA, 19 nt, Human
uggccuuuuucauuuaucu

SEQ ID NO: 3674166 - RNA, 14 nt, Human
uggcgcacccuccc

SEQ ID NO: 3674167 - RNA, 16 nt, Human
uggcgcacccuccccu

SEQ ID NO: 3674168 - RNA, 12 nt, Human
uggcgcagccaa

SEQ ID NO: 3674169 - RNA, 21 nt, Human
uggcgcaggugggcuggacuu

SEQ ID NO: 3674170 - RNA, 17 nt, Human
uggcgcagugccucugg

SEQ ID NO: 3674171 - RNA, 15 nt, Human
uggcgccgucuccag

SEQ ID NO: 3674172 - RNA, 18 nt, Human
uggcgcuagaggccaugg

SEQ ID NO: 3674173 - RNA, 14 nt, Human
uggcgcugccccug

SEQ ID NO: 3674174 - RNA, 23 nt, Human
uggcgcugccccuggcagccccu

SEQ ID NO: 3674175 - RNA, 14 nt, Human
uggcggcagcagcc

SEQ ID NO: 3674176 - RNA, 21 nt, Human
uggcggccccaacucgggcuc

SEQ ID NO: 3674177 - RNA, 16 nt, Human
uggcggcuacucagca

SEQ ID NO: 3674178 - RNA, 22 nt, Human
uggcggcuacucagcagcccuc

SEQ ID NO: 3674179 - RNA, 17 nt, Human
uggcggggaggaggaaa

SEQ ID NO: 3674180 - RNA, 18 nt, Human
uggcggggggcccauugg

SEQ ID NO: 3674181 - RNA, 12 nt, Human
uggcgggugggg

SEQ ID NO: 3674182 - RNA, 15 nt, Human
uggcgggugggggug

SEQ ID NO: 3674183 - RNA, 13 nt, Human
uggcggugccugg

SEQ ID NO: 3674184 - RNA, 16 nt, Human
uggcguaaguacagag

SEQ ID NO: 3674185 - RNA, 17 nt, Human
uggcguaaguacagaga

SEQ ID NO: 3674186 - RNA, 18 nt, Human
uggcguaaguacagagaa

SEQ ID NO: 3674187 - RNA, 20 nt, Human
uggcguaaguacagagaagc

SEQ ID NO: 3674188 - RNA, 19 nt, Human
uggcguagagggugcugcc

SEQ ID NO: 3674189 - RNA, 18 nt, Human
uggcguaggcuacagaga

SEQ ID NO: 3674190 - RNA, 19 nt, Human
uggcguaggcuacagagaa

SEQ ID NO: 3674191 - RNA, 13 nt, Human
uggcgucugucuu

SEQ ID NO: 3674192 - RNA, 20 nt, Human
uggcgucugucuucaagggc

SEQ ID NO: 3674193 - RNA, 12 nt, Human
uggcgugacccg

SEQ ID NO: 3674194 - RNA, 18 nt, Human
uggcguggauuaaacuua

SEQ ID NO: 3674195 - RNA, 20 nt, Human
uggcuaaaugccuaauaaac

SEQ ID NO: 3674196 - RNA, 14 nt, Human
uggcuaaauucaug

SEQ ID NO: 3674197 - RNA, 17 nt, Human
uggcuaacuuacaaaga

SEQ ID NO: 3674198 - RNA, 12 nt, Human
uggcuaagaccc

SEQ ID NO: 3674199 - RNA, 15 nt, Human
uggcuaagagugucc

SEQ ID NO: 3674200 - RNA, 20 nt, Human
uggcuaagcuuaaaaaaaac

SEQ ID NO: 3674201 - RNA, 14 nt, Human
uggcuaaggcacca

SEQ ID NO: 3674202 - RNA, 19 nt, Human
uggcuacgccucuucuguc

SEQ ID NO: 3674203 - RNA, 22 nt, Human
uggcuacgccucuucugucccu

SEQ ID NO: 3674204 - RNA, 22 nt, Human
uggcuacucugugccagagccu

SEQ ID NO: 3674205 - RNA, 23 nt, Human
uggcuacucugugccagagccug

SEQ ID NO: 3674206 - RNA, 20 nt, Human
uggcuagaauauccuacuuc

SEQ ID NO: 3674207 - RNA, 23 nt, Human
uggcuagauuaaccuucucuguc

SEQ ID NO: 3674208 - RNA, 18 nt, Human
uggcuagucaagcuccuc

SEQ ID NO: 3674209 - RNA, 17 nt, Human
uggcuauagaugucuuu

SEQ ID NO: 3674210 - RNA, 18 nt, Human
uggcuauagaugucuuuu

SEQ ID NO: 3674211 - RNA, 23 nt, Human
uggcuauaggugcuacaaaaaca

SEQ ID NO: 3674212 - RNA, 14 nt, Human
uggcuaugcauuug

SEQ ID NO: 3674213 - RNA, 20 nt, Human
ugccucccugacccugcaga

SEQ ID NO: 3674214 - RNA, 16 nt, Human
ugccucccuucaugca

SEQ ID NO: 3674215 - RNA, 23 nt, Human
ugccuccguccccugcccaugcu

SEQ ID NO: 3674216 - RNA, 19 nt, Human
ugccuccucacccccagcu

SEQ ID NO: 3674217 - RNA, 20 nt, Human
ugccuccugccggcuccuug

SEQ ID NO: 3674218 - RNA, 17 nt, Human
ugccuccuguguacugu

SEQ ID NO: 3674219 - RNA, 18 nt, Human
ugccuccuguguacugug

SEQ ID NO: 3674220 - RNA, 21 nt, Human
ugccuccuguguacuguguca

SEQ ID NO: 3674221 - RNA, 20 nt, Human
ugccuccuuugugaggaagc

SEQ ID NO: 3674222 - RNA, 21 nt, Human
ugccuccuuugugaggaagcc

SEQ ID NO: 3674223 - RNA, 24 nt, Human
ugccucgacacgugggcuccccuc

SEQ ID NO: 3674224 - RNA, 18 nt, Human
ugccucggauccccuucc

SEQ ID NO: 3674225 - RNA, 15 nt, Human
ugccucggcuccugc

SEQ ID NO: 3674226 - RNA, 17 nt, Human
ugccucggcuccugcug

SEQ ID NO: 3674227 - RNA, 19 nt, Human
ugccucggcuccugcugca

SEQ ID NO: 3674228 - RNA, 21 nt, Human
ugccucggcuccugcugcacc

SEQ ID NO: 3674229 - RNA, 16 nt, Human
ugccucggcuggcucc

SEQ ID NO: 3674230 - RNA, 20 nt, Human
ugccucggcuggcuccccug

SEQ ID NO: 3674231 - RNA, 21 nt, Human
ugccucggcuggcuccccugc

SEQ ID NO: 3674232 - RNA, 24 nt, Human
ugccucggcuuuucucagcuggau

SEQ ID NO: 3674233 - RNA, 24 nt, Human
ugccucgggaaccucacucuugcc

SEQ ID NO: 3674234 - RNA, 17 nt, Human
ugccucuaccugacacu

SEQ ID NO: 3674235 - RNA, 19 nt, Human
ugccucuacugggaaggcu

SEQ ID NO: 3674236 - RNA, 14 nt, Human
ugccucucacagcu

SEQ ID NO: 3674237 - RNA, 21 nt, Human
ugccucucacagcugaguugu

SEQ ID NO: 3674238 - RNA, 17 nt, Human
ugccucucccaggcagg

SEQ ID NO: 3674239 - RNA, 12 nt, Human
ugccucucccuc

SEQ ID NO: 3674240 - RNA, 20 nt, Human
ugccucucccugcugcuccu

SEQ ID NO: 3674241 - RNA, 21 nt, Human
ugccucuccgccccugagccc

SEQ ID NO: 3674242 - RNA, 16 nt, Human
ugccucuccuuuguau

SEQ ID NO: 3674243 - RNA, 17 nt, Human
ugccucuccuuuguaua

SEQ ID NO: 3674244 - RNA, 9 nt, Human
ugccucucu

SEQ ID NO: 3674245 - RNA, 12 nt, Human
ugccucucuaca

SEQ ID NO: 3674246 - RNA, 15 nt, Human
ugccucucucaggcc

SEQ ID NO: 3674247 - RNA, 15 nt, Human
ugccucucugcaggu

SEQ ID NO: 3674248 - RNA, 16 nt, Human
ugccucucugcagguc

SEQ ID NO: 3674249 - RNA, 19 nt, Human
ugccucucugcaggucccu

SEQ ID NO: 3674250 - RNA, 20 nt, Human
ugccucucugcaggucccua

SEQ ID NO: 3674251 - RNA, 12 nt, Human
ugccucucuguu

SEQ ID NO: 3674252 - RNA, 20 nt, Human
ugccucugacacacagcucu

SEQ ID NO: 3674253 - RNA, 13 nt, Human
ugccucugaggcc

SEQ ID NO: 3674254 - RNA, 19 nt, Human
ugccucugaggccagccug

SEQ ID NO: 3674255 - RNA, 21 nt, Human
ugccucugauaugggacugag

SEQ ID NO: 3674256 - RNA, 19 nt, Human
ugccucugauguauuuugu

SEQ ID NO: 3674257 - RNA, 22 nt, Human
ugccucugauguauuuugugag

SEQ ID NO: 3674258 - RNA, 21 nt, Human
ugccucugccaaaggauguga

SEQ ID NO: 3674259 - RNA, 12 nt, Human
ugccucugccac

SEQ ID NO: 3674260 - RNA, 16 nt, Human
ugccucugccugcauu

SEQ ID NO: 3674261 - RNA, 13 nt, Human
ugccucugccuua

SEQ ID NO: 3674262 - RNA, 15 nt, Human
ugccucuguccccuu

SEQ ID NO: 3674263 - RNA, 16 nt, Human
ugccucuguccccuuc

SEQ ID NO: 3674264 - RNA, 17 nt, Human
ugccucuguccccuucu

SEQ ID NO: 3674265 - RNA, 20 nt, Human
ugccucuguccccuucucuc

SEQ ID NO: 3674266 - RNA, 13 nt, Human
ugccucugugcug

SEQ ID NO: 3674267 - RNA, 11 nt, Human
uggggcugaac

SEQ ID NO: 3674268 - RNA, 20 nt, Human
uggggcugaagguugaagag

SEQ ID NO: 3674269 - RNA, 22 nt, Human
uggggcugaucucagggaagcc

SEQ ID NO: 3674270 - RNA, 14 nt, Human
uggggcugauugua

SEQ ID NO: 3674271 - RNA, 14 nt, Human
uggggcuggcacaa

SEQ ID NO: 3674272 - RNA, 14 nt, Human
uggggcuggccucc

SEQ ID NO: 3674273 - RNA, 16 nt, Human
uggggcugggcagcua

SEQ ID NO: 3674274 - RNA, 19 nt, Human
uggggcuggggaaggaagc

SEQ ID NO: 3674275 - RNA, 13 nt, Human
uggggcuggggga

SEQ ID NO: 3674276 - RNA, 16 nt, Human
uggggcugggggaugg

SEQ ID NO: 3674277 - RNA, 15 nt, Human
uggggcuucuccuga

SEQ ID NO: 3674278 - RNA, 16 nt, Human
uggggcuucuccugac

SEQ ID NO: 3674279 - RNA, 13 nt, Human
uggggcuucuugg

SEQ ID NO: 3674280 - RNA, 16 nt, Human
uggggcuuggcgugga

SEQ ID NO: 3674281 - RNA, 22 nt, Human
uggggcuuucguccacagcuuc

SEQ ID NO: 3674282 - RNA, 20 nt, Human
ugcugacggccagggagaag

SEQ ID NO: 3674283 - RNA, 18 nt, Human
ugcugacuggcuucagca

SEQ ID NO: 3674284 - RNA, 15 nt, Human
ugcugacuguacucc

SEQ ID NO: 3674285 - RNA, 14 nt, Human
ugcugacuguagcu

SEQ ID NO: 3674286 - RNA, 22 nt, Human
ugcugacuguagcuuuggaagu

SEQ ID NO: 3674287 - RNA, 17 nt, Human
ugcugacuguuuucucu

SEQ ID NO: 3674288 - RNA, 14 nt, Human
ugcugacuuagaau

SEQ ID NO: 3674289 - RNA, 15 nt, Human
ugcugacuuagaauc

SEQ ID NO: 3674290 - RNA, 17 nt, Human
ugcugagaaccuggccu

SEQ ID NO: 3674291 - RNA, 18 nt, Human
ugcugagaaccuggccuu

SEQ ID NO: 3674292 - RNA, 20 nt, Human
ugcugagaaccuggccuuca

SEQ ID NO: 3674293 - RNA, 21 nt, Human
ugcugagaaccuggccuucag

SEQ ID NO: 3674294 - RNA, 17 nt, Human
ugcugagaagcuuuuga

SEQ ID NO: 3674295 - RNA, 17 nt, Human
ugcugagagacccaagg

SEQ ID NO: 3674296 - RNA, 19 nt, Human
ugcugagauacauacagaa

SEQ ID NO: 3674297 - RNA, 20 nt, Human
ugcugagauacauacagaau

SEQ ID NO: 3674298 - RNA, 19 nt, Human
ugcugagccucacagcagu

SEQ ID NO: 3674299 - RNA, 17 nt, Human
ugcugagccucugcucc

SEQ ID NO: 3674300 - RNA, 20 nt, Human
ugcugagccucugcucccca

SEQ ID NO: 3674301 - RNA, 14 nt, Human
ugcugagcucugag

SEQ ID NO: 3674302 - RNA, 17 nt, Human
ugcugaggccuccagcu

SEQ ID NO: 3674303 - RNA, 16 nt, Human
ugcugaggccugggcc

SEQ ID NO: 3674304 - RNA, 16 nt, Human
ugcugaggcucugacc

SEQ ID NO: 3674305 - RNA, 17 nt, Human
ugcugagggaccagcca

SEQ ID NO: 3674306 - RNA, 22 nt, Human
ugcugaggguguuucuuccugc

SEQ ID NO: 3674307 - RNA, 17 nt, Human
ugcugaggguuugaaua

SEQ ID NO: 3674308 - RNA, 22 nt, Human
ugcugagucccaggcugagccu

SEQ ID NO: 3674309 - RNA, 16 nt, Human
ugcugagucucccaag

SEQ ID NO: 3674310 - RNA, 16 nt, Human
ugcugagucuguucug

SEQ ID NO: 3674311 - RNA, 15 nt, Human
ugcugaguuugugcu

SEQ ID NO: 3674312 - RNA, 18 nt, Human
ugcugauauuuaaauuca

SEQ ID NO: 3674313 - RNA, 15 nt, Human
ugcugauauuuucuc

SEQ ID NO: 3674314 - RNA, 23 nt, Human
ugcugaucaucgccagaggugcu

SEQ ID NO: 3674315 - RNA, 16 nt, Human
ugcugaucgccuuccc

SEQ ID NO: 3674316 - RNA, 14 nt, Human
ugcugaugaaucac

SEQ ID NO: 3674317 - RNA, 16 nt, Human
ugcugaugcucauggu

SEQ ID NO: 3674318 - RNA, 16 nt, Human
ugcugauggagccuuc

SEQ ID NO: 3674319 - RNA, 14 nt, Human
ugcugauggucugg

SEQ ID NO: 3674320 - RNA, 19 nt, Human
ugcugauggucuggucuau

SEQ ID NO: 3674321 - RNA, 15 nt, Human
ugcugauggugcaau

SEQ ID NO: 3674322 - RNA, 20 nt, Human
ugcugauggugcaaugaccu

SEQ ID NO: 3674323 - RNA, 17 nt, Human
ugcugauguggcaacug

SEQ ID NO: 3674324 - RNA, 14 nt, Human
ugcugauguucagu

SEQ ID NO: 3674325 - RNA, 16 nt, Human
ugcugauguucagugu

SEQ ID NO: 3674326 - RNA, 21 nt, Human
ugcugauguucaguguaauuu

SEQ ID NO: 3674327 - RNA, 14 nt, Human
ugcugauuuaaaca

SEQ ID NO: 3674328 - RNA, 12 nt, Human
ugcugauuuuaa

SEQ ID NO: 3674329 - RNA, 14 nt, Human
ugcugauuuuaaug

SEQ ID NO: 3674330 - RNA, 16 nt, Human
ugcugauuuuaaugga

SEQ ID NO: 3674331 - RNA, 18 nt, Human
ugcugauuuuauucuuga

SEQ ID NO: 3674332 - RNA, 15 nt, Human
ugcugcaaggccuuu

SEQ ID NO: 3674333 - RNA, 20 nt, Human
ugcugcaaggccuuucugug

SEQ ID NO: 3674334 - RNA, 23 nt, Human
ugcugcaaggccuuucugugugu

SEQ ID NO: 3674335 - RNA, 18 nt, Human
ugcugcaccaacccagcc

SEQ ID NO: 3674336 - RNA, 20 nt, Human
ugcugcaccaacccagccgc

SEQ ID NO: 3674337 - RNA, 22 nt, Human
ugcugcaccaacccagccgcug

SEQ ID NO: 3674338 - RNA, 14 nt, Human
ugcugcacuaauug

SEQ ID NO: 3674339 - RNA, 21 nt, Human
ugcugcagggcuuuaaaauuc

SEQ ID NO: 3674340 - RNA, 17 nt, Human
ugcugcaggggcucugg

SEQ ID NO: 3674341 - RNA, 18 nt, Human
ugcugcaggggcucugga

SEQ ID NO: 3674342 - RNA, 18 nt, Human
ugcugcaugcccucucag

SEQ ID NO: 3674343 - RNA, 14 nt, Human
ugcugcauggcagg

SEQ ID NO: 3674344 - RNA, 21 nt, Human
ugcugcauggcagggggcugc

SEQ ID NO: 3674345 - RNA, 17 nt, Human
ugcugcauuuaaaagau

SEQ ID NO: 3674346 - RNA, 17 nt, Human
ugcugccaaccauaccu

SEQ ID NO: 3674347 - RNA, 16 nt, Human
ugcugccaauauccua

SEQ ID NO: 3674348 - RNA, 22 nt, Human
ugcugccaauauccuaauaaaa

SEQ ID NO: 3674349 - RNA, 20 nt, Human
ugcugccacaaccagccagg

SEQ ID NO: 3674350 - RNA, 22 nt, Human
ugcugccacacuucaggcucuu

SEQ ID NO: 3674351 - RNA, 17 nt, Human
ugcugccaguaccagcc

SEQ ID NO: 3674352 - RNA, 20 nt, Human
ugcugccaguaccagcccca

SEQ ID NO: 3674353 - RNA, 13 nt, Human
ugcugccauccag

SEQ ID NO: 3674354 - RNA, 20 nt, Human
ugcugccauuugauuuuucu

SEQ ID NO: 3674355 - RNA, 16 nt, Human
ugcugcccagccucca

SEQ ID NO: 3674356 - RNA, 17 nt, Human
ugcugcccauguuucaa

SEQ ID NO: 3674357 - RNA, 18 nt, Human
ugcugccccaucagugcu

SEQ ID NO: 3674358 - RNA, 18 nt, Human
ugcugccccaugaagcca

SEQ ID NO: 3674359 - RNA, 20 nt, Human
ugcugccccaugaagccaca

SEQ ID NO: 3674360 - RNA, 17 nt, Human
ugcugcccgcucugcag

SEQ ID NO: 3674361 - RNA, 17 nt, Human
ugcugcccgucuucagc

SEQ ID NO: 3674362 - RNA, 21 nt, Human
ugcugcccgucuucagccuag

SEQ ID NO: 3674363 - RNA, 22 nt, Human
ugcugcccgucuucagccuagc

SEQ ID NO: 3674364 - RNA, 22 nt, Human
ugcugcccugaagaauggcgcc

SEQ ID NO: 3674365 - RNA, 12 nt, Human
ugcugcccugcc

SEQ ID NO: 3674366 - RNA, 13 nt, Human
ugcugcccugccc

SEQ ID NO: 3674367 - RNA, 12 nt, Human
ugcugcccugug

SEQ ID NO: 3674368 - RNA, 15 nt, Human
ugcugcccugugagu

SEQ ID NO: 3674369 - RNA, 19 nt, Human
ugcugccgccccacccaga

SEQ ID NO: 3674370 - RNA, 23 nt, Human
ugcugccgccccacccagauggg

SEQ ID NO: 3674371 - RNA, 17 nt, Human
ugcugccgccucccagc

SEQ ID NO: 3674372 - RNA, 21 nt, Human
ugcugccgccucccagccugg

SEQ ID NO: 3674373 - RNA, 13 nt, Human
ugcugccuaggcu

SEQ ID NO: 3674374 - RNA, 18 nt, Human
ugcugccuaggcugaccu

SEQ ID NO: 3674375 - RNA, 12 nt, Human
ugcugccucccc

SEQ ID NO: 3674376 - RNA, 14 nt, Human
ugcugccuccccaa

SEQ ID NO: 3674377 - RNA, 22 nt, Human
ugcugccucggauccccuuccu

SEQ ID NO: 3674378 - RNA, 13 nt, Human
ugcugccugccug

SEQ ID NO: 3674379 - RNA, 20 nt, Human
ugcugccuucugacggcccu

SEQ ID NO: 3674380 - RNA, 20 nt, Human
ugcugcggagcaagaggagg

SEQ ID NO: 3674381 - RNA, 23 nt, Human
ugcugcgucauuacagggcacag

SEQ ID NO: 3674382 - RNA, 14 nt, Human
ugcugcgucuccca

SEQ ID NO: 3674383 - RNA, 15 nt, Human
ugcugcgucucccau

SEQ ID NO: 3674384 - RNA, 14 nt, Human
ugcugcgugccugu

SEQ ID NO: 3674385 - RNA, 21 nt, Human
ugcugcuaaucuucagggcac

SEQ ID NO: 3674386 - RNA, 21 nt, Human
ugcugcuaauucuuugcaaaa

SEQ ID NO: 3674387 - RNA, 17 nt, Human
ugcugcuacccucccug

SEQ ID NO: 3674388 - RNA, 13 nt, Human
ugcugcuagaacu

SEQ ID NO: 3674389 - RNA, 16 nt, Human
ugcugcuagaacuuuu

SEQ ID NO: 3674390 - RNA, 17 nt, Human
ugcugcuagaacuuuuu

SEQ ID NO: 3674391 - RNA, 20 nt, Human
ugcugcuagaacuuuuuuaa

SEQ ID NO: 3674392 - RNA, 19 nt, Human
ugcugcuauccugccaaaa

SEQ ID NO: 3674393 - RNA, 19 nt, Human
ugcugcuauuuuacugucu

SEQ ID NO: 3674394 - RNA, 22 nt, Human
ugcugcuauuuuacugucuuaa

SEQ ID NO: 3674395 - RNA, 13 nt, Human
ugcugcucccuca

SEQ ID NO: 3674396 - RNA, 18 nt, Human
ugcugcucuuggcuggac

SEQ ID NO: 3674397 - RNA, 19 nt, Human
ugcugcucuuggcuggacc

SEQ ID NO: 3674398 - RNA, 11 nt, Human
ugcugcugaga

SEQ ID NO: 3674399 - RNA, 12 nt, Human
ugcugcugcccc

SEQ ID NO: 3674400 - RNA, 16 nt, Human
ugcugcugccuggcca

SEQ ID NO: 3674401 - RNA, 19 nt, Human
ugcugcugccuggccacug

SEQ ID NO: 3674402 - RNA, 13 nt, Human
ugcugcuggacag

SEQ ID NO: 3674403 - RNA, 12 nt, Human
ugcugcuggcca

SEQ ID NO: 3674404 - RNA, 14 nt, Human
ugcugcuggccaaa

SEQ ID NO: 3674405 - RNA, 13 nt, Human
ugcugcuggcugg

SEQ ID NO: 3674406 - RNA, 14 nt, Human
ugcugcugggcuca

SEQ ID NO: 3674407 - RNA, 16 nt, Human
ugcugcuggugcacag

SEQ ID NO: 3674408 - RNA, 18 nt, Human
ugcugcuggugcacagcc

SEQ ID NO: 3674409 - RNA, 14 nt, Human
ugcugcugugugcu

SEQ ID NO: 3674410 - RNA, 20 nt, Human
ugcugcuuagacauaacaaa

SEQ ID NO: 3674411 - RNA, 15 nt, Human
ugcugcuucucccag

SEQ ID NO: 3674412 - RNA, 22 nt, Human
ugguucugagauggcucccagg

SEQ ID NO: 3674413 - RNA, 15 nt, Human
ugguucugcuucaau

SEQ ID NO: 3674414 - RNA, 22 nt, Human
ugguucuugaggggaccaggag

SEQ ID NO: 3674415 - RNA, 23 nt, Human
ugguucuugaggggaccaggagu

SEQ ID NO: 3674416 - RNA, 12 nt, Human
ugguugaauaug

SEQ ID NO: 3674417 - RNA, 16 nt, Human
ugguugagugggggga

SEQ ID NO: 3674418 - RNA, 22 nt, Human
ugguugaguucagguagcugcc

SEQ ID NO: 3674419 - RNA, 18 nt, Human
ugguugccuuaaagaaag

SEQ ID NO: 3674420 - RNA, 18 nt, Human
ugguuggcugggaaaucg

SEQ ID NO: 3674421 - RNA, 23 nt, Human
ugguugggaaugaggaaaauucu

SEQ ID NO: 3674422 - RNA, 21 nt, Human
ugguugggacccaguggcagg

SEQ ID NO: 3674423 - RNA, 22 nt, Human
ugguugguaacacaaauuuuca

SEQ ID NO: 3674424 - RNA, 12 nt, Human
ugguuguauuag

SEQ ID NO: 3674425 - RNA, 23 nt, Human
ugguugucauuuuugcaguagag

SEQ ID NO: 3674426 - RNA, 20 nt, Human
ugguuguguguccccuugca

SEQ ID NO: 3674427 - RNA, 17 nt, Human
ugguuguuucuguucca

SEQ ID NO: 3674428 - RNA, 15 nt, Human
ugguuguuucuucca

SEQ ID NO: 3674429 - RNA, 20 nt, Human
ugguuuaaaaauacauguuc

SEQ ID NO: 3674430 - RNA, 18 nt, Human
ugguuuaaaagaaaaaau

SEQ ID NO: 3674431 - RNA, 18 nt, Human
ugguuuaacuucugccug

SEQ ID NO: 3674432 - RNA, 15 nt, Human
ugguuuaauuuaaag

SEQ ID NO: 3674433 - RNA, 19 nt, Human
ugguuuacaggcccugcuc

SEQ ID NO: 3674434 - RNA, 20 nt, Human
ugguuuacaggcccugcucc

SEQ ID NO: 3674435 - RNA, 14 nt, Human
ugguuuacuuucaa

SEQ ID NO: 3674436 - RNA, 16 nt, Human
ugguuuacuuucaaau

SEQ ID NO: 3674437 - RNA, 11 nt, Human
ugguuuauaga

SEQ ID NO: 3674438 - RNA, 21 nt, Human
ugguuuauagagggccaagac

SEQ ID NO: 3674439 - RNA, 17 nt, Human
ugguuuauauauuuaaa

SEQ ID NO: 3674440 - RNA, 20 nt, Human
ugguuuauauuuuuucaguu

SEQ ID NO: 3674441 - RNA, 19 nt, Human
ugguuuaucagcaaaaaag

SEQ ID NO: 3674442 - RNA, 11 nt, Human
ugguuuauguc

SEQ ID NO: 3674443 - RNA, 16 nt, Human
ugguuucaaagauuca

SEQ ID NO: 3674444 - RNA, 13 nt, Human
ugguuucagcacu

SEQ ID NO: 3674445 - RNA, 22 nt, Human
ugguuucauaacuuccuguacu

SEQ ID NO: 3674446 - RNA, 23 nt, Human
ugguuuccaaggagcugagaaua

SEQ ID NO: 3674447 - RNA, 20 nt, Human
ugguuuccacgaugaaaaac

SEQ ID NO: 3674448 - RNA, 18 nt, Human
ugguuuccagucaugagc

SEQ ID NO: 3674449 - RNA, 18 nt, Human
ugguuucccaagagcuac

SEQ ID NO: 3674450 - RNA, 17 nt, Human
ugguuucccccuucuac

SEQ ID NO: 3674451 - RNA, 14 nt, Human
ugguuuccugcccu

SEQ ID NO: 3674452 - RNA, 15 nt, Human
ugguuuccugcccug

SEQ ID NO: 3674453 - RNA, 13 nt, Human
ugguuuccuuccu

SEQ ID NO: 3674454 - RNA, 16 nt, Human
ugguuucuagacuugu

SEQ ID NO: 3674455 - RNA, 21 nt, Human
ugguuucucucuacagugcca

SEQ ID NO: 3674456 - RNA, 14 nt, Human
ugguuucucuucuc

SEQ ID NO: 3674457 - RNA, 13 nt, Human
ugguuugagauug

SEQ ID NO: 3674458 - RNA, 20 nt, Human
ugguuuggaauauuaaaaaa

SEQ ID NO: 3674459 - RNA, 22 nt, Human
ugguuuggugcuuuuuauaaaa

SEQ ID NO: 3674460 - RNA, 15 nt, Human
ugguuuguucccugu

SEQ ID NO: 3674461 - RNA, 20 nt, Human
ugguuuuaacaacugugcuu

SEQ ID NO: 3674462 - RNA, 18 nt, Human
ugguuuuaguugcaacuu

SEQ ID NO: 3674463 - RNA, 15 nt, Human
ugguuuuaugaugac

SEQ ID NO: 3674464 - RNA, 19 nt, Human
ugguuuucaaccucuagaa

SEQ ID NO: 3674465 - RNA, 21 nt, Human
ugguuuucaaccucuagaauu

SEQ ID NO: 3674466 - RNA, 14 nt, Human
ugguuuuccccucc

SEQ ID NO: 3674467 - RNA, 21 nt, Human
ugguuuuccccucccuggguu

SEQ ID NO: 3674468 - RNA, 13 nt, Human
ugguuuuccugua

SEQ ID NO: 3674469 - RNA, 20 nt, Human
ugguuuucuccaagagcuac

SEQ ID NO: 3674470 - RNA, 16 nt, Human
ugguuuucuguucuuu

SEQ ID NO: 3674471 - RNA, 15 nt, Human
ugguuuucuugugug

SEQ ID NO: 3674472 - RNA, 19 nt, Human
ugguuuucuuuugccauga

SEQ ID NO: 3674473 - RNA, 22 nt, Human
ugguuuugugccaucuguagcu

SEQ ID NO: 3674474 - RNA, 17 nt, Human
ugguuuuguuccccucc

SEQ ID NO: 3674475 - RNA, 23 nt, Human
ugguuuuuaaaaaacugcugacu

SEQ ID NO: 3674476 - RNA, 20 nt, Human
ugguuuuuaaauuuuguaau

SEQ ID NO: 3674477 - RNA, 18 nt, Human
ugguuuuuacugcucuga

SEQ ID NO: 3674478 - RNA, 21 nt, Human
ugguuuuuacugcucugagaa

SEQ ID NO: 3674479 - RNA, 23 nt, Human
ugguuuuuuuuuuuuuuuuggcu

SEQ ID NO: 3674480 - RNA, 19 nt, Human
uguaaaaaaaaaugccuuu

SEQ ID NO: 3674481 - RNA, 17 nt, Human
uguaaaaaaugugugua

SEQ ID NO: 3674482 - RNA, 20 nt, Human
uguaaaaacagcauugcuuu

SEQ ID NO: 3674483 - RNA, 14 nt, Human
uguaaaaacugugg

SEQ ID NO: 3674484 - RNA, 13 nt, Human
uguaaaaagaaaa

SEQ ID NO: 3674485 - RNA, 22 nt, Human
uguaaaaagagagaaaacuuau

SEQ ID NO: 3674486 - RNA, 20 nt, Human
uguaaaaaggaauaugaaag

SEQ ID NO: 3674487 - RNA, 15 nt, Human
uggaaccuugcuguc

SEQ ID NO: 3674488 - RNA, 23 nt, Human
uggaaccuugcuguccugaucug

SEQ ID NO: 3674489 - RNA, 16 nt, Human
uggaacgcguugaaau

SEQ ID NO: 3674490 - RNA, 20 nt, Human
uggaacggugaaggugacag

SEQ ID NO: 3674491 - RNA, 14 nt, Human
uggaacuaauaaau

SEQ ID NO: 3674492 - RNA, 16 nt, Human
uggaacucuagggaua

SEQ ID NO: 3674493 - RNA, 22 nt, Human
uggaacucuaucugggccuggg

SEQ ID NO: 3674494 - RNA, 23 nt, Human
uggaacucuaucugggccugggc

SEQ ID NO: 3674495 - RNA, 14 nt, Human
uggaacucucgagc

SEQ ID NO: 3674496 - RNA, 11 nt, Human
uggaacucuug

SEQ ID NO: 3674497 - RNA, 20 nt, Human
uggaacugaagggggcggcc

SEQ ID NO: 3674498 - RNA, 20 nt, Human
uggaacugcugccacugagg

SEQ ID NO: 3674499 - RNA, 20 nt, Human
uggaacuggaauccuuucag

SEQ ID NO: 3674500 - RNA, 16 nt, Human
uggaacuggaggcagg

SEQ ID NO: 3674501 - RNA, 17 nt, Human
uggaacuggaggcaggg

SEQ ID NO: 3674502 - RNA, 13 nt, Human
uggaacuguuucc

SEQ ID NO: 3674503 - RNA, 15 nt, Human
uggaacuguuuccuu

SEQ ID NO: 3674504 - RNA, 15 nt, Human
uggaacuucuaauau

SEQ ID NO: 3674505 - RNA, 22 nt, Human
uggaacuugccugccuuuccau

SEQ ID NO: 3674506 - RNA, 22 nt, Human
uggaagaaaaugguuuauuuug

SEQ ID NO: 3674507 - RNA, 16 nt, Human
uggaagaacaggccuc

SEQ ID NO: 3674508 - RNA, 15 nt, Human
uggaagaagagggag

SEQ ID NO: 3674509 - RNA, 15 nt, Human
uggaagaagggagaa

SEQ ID NO: 3674510 - RNA, 17 nt, Human
uggaagaagggagaaga

SEQ ID NO: 3674511 - RNA, 19 nt, Human
uggaagaagggagaagaaa

SEQ ID NO: 3674512 - RNA, 16 nt, Human
uggaagaaggggcagg

SEQ ID NO: 3674513 - RNA, 18 nt, Human
uggaagacaaaauguuuu

SEQ ID NO: 3674514 - RNA, 23 nt, Human
uggaagacagagaccuccugccu

SEQ ID NO: 3674515 - RNA, 17 nt, Human
uggaagaccccacccaa

SEQ ID NO: 3674516 - RNA, 23 nt, Human
uggaagagagaaagcauauugac

SEQ ID NO: 3674517 - RNA, 17 nt, Human
uggaagagcccagucug

SEQ ID NO: 3674518 - RNA, 14 nt, Human
uggaagauagcugu

SEQ ID NO: 3674519 - RNA, 16 nt, Human
uggaagauagcuguga

SEQ ID NO: 3674520 - RNA, 14 nt, Human
uggaagauccugug

SEQ ID NO: 3674521 - RNA, 15 nt, Human
uggaagauccuguga

SEQ ID NO: 3674522 - RNA, 23 nt, Human
uggaagauggggaccagcagccc

SEQ ID NO: 3674523 - RNA, 14 nt, Human
uggaagauucagcu

SEQ ID NO: 3674524 - RNA, 22 nt, Human
uggaagauuugcccauuuacac

SEQ ID NO: 3674525 - RNA, 23 nt, Human
uggaagauuugcccauuuacacu

SEQ ID NO: 3674526 - RNA, 18 nt, Human
uggaagcaacaggaauca

SEQ ID NO: 3674527 - RNA, 22 nt, Human
uggaagcacaccaaucuuacuu

SEQ ID NO: 3674528 - RNA, 16 nt, Human
uggaagcacagcuuca

SEQ ID NO: 3674529 - RNA, 18 nt, Human
uggaagcagugcccaggu

SEQ ID NO: 3674530 - RNA, 19 nt, Human
uggaagcagugcccaggug

SEQ ID NO: 3674531 - RNA, 20 nt, Human
uggaagccccugggcccagu

SEQ ID NO: 3674532 - RNA, 17 nt, Human
uggaagccggagggugu

SEQ ID NO: 3674533 - RNA, 19 nt, Human
uggaagcuagacacaugaa

SEQ ID NO: 3674534 - RNA, 14 nt, Human
uggaagcuagcucc

SEQ ID NO: 3674535 - RNA, 20 nt, Human
uggaagcuagcuccccuccu

SEQ ID NO: 3674536 - RNA, 14 nt, Human
uggaagcucuucuu

SEQ ID NO: 3674537 - RNA, 18 nt, Human
uggaagcugcccugccca

SEQ ID NO: 3674538 - RNA, 15 nt, Human
uggaagcuguguccu

SEQ ID NO: 3674539 - RNA, 16 nt, Human
uggaagcuguguccuu

SEQ ID NO: 3674540 - RNA, 20 nt, Human
uggaagcuguuuggaaaaga

SEQ ID NO: 3674541 - RNA, 19 nt, Human
uggaaggaccacauuuuau

SEQ ID NO: 3674542 - RNA, 22 nt, Human
uggaaggaccacauuuuauauu

SEQ ID NO: 3674543 - RNA, 16 nt, Human
uggaaggagacacaga

SEQ ID NO: 3674544 - RNA, 17 nt, Human
uggaaggagacacagau

SEQ ID NO: 3674545 - RNA, 20 nt, Human
uggaaggagacacagauguu

SEQ ID NO: 3674546 - RNA, 12 nt, Human
uggaaggagcag

SEQ ID NO: 3674547 - RNA, 20 nt, Human
uggaaggcaagauugugucc

SEQ ID NO: 3674548 - RNA, 19 nt, Human
uggaaggcaagccaggcuc

SEQ ID NO: 3674549 - RNA, 13 nt, Human
uggaaggcccagc

SEQ ID NO: 3674550 - RNA, 13 nt, Human
uggaaggugggga

SEQ ID NO: 3674551 - RNA, 17 nt, Human
uggaaguaguggagccc

SEQ ID NO: 3674552 - RNA, 15 nt, Human
uggaagugacuuugg

SEQ ID NO: 3674553 - RNA, 23 nt, Human
uggaagugacuuuggcugcaugc

SEQ ID NO: 3674554 - RNA, 20 nt, Human
uggaagugugggucugugug

SEQ ID NO: 3674555 - RNA, 21 nt, Human
uguaaagaaagagagaaaaua

SEQ ID NO: 3674556 - RNA, 23 nt, Human
uguaaagaaagagagaaaauaaa

SEQ ID NO: 3674557 - RNA, 23 nt, Human
uguaaagagaccuaccucagguu

SEQ ID NO: 3674558 - RNA, 19 nt, Human
uguaaagaucuacaugaau

SEQ ID NO: 3674559 - RNA, 11 nt, Human
uguaaagaugu

SEQ ID NO: 3674560 - RNA, 18 nt, Human
uguaaaggucacuuuuca

SEQ ID NO: 3674561 - RNA, 21 nt, Human
uguaaaggucacuuuucacau

SEQ ID NO: 3674562 - RNA, 19 nt, Human
uguaaaguaggaaaaauaa

SEQ ID NO: 3674563 - RNA, 15 nt, Human
uguaaagugaagaau

SEQ ID NO: 3674564 - RNA, 21 nt, Human
uguaaagugaagaauccuuuu

SEQ ID NO: 3674565 - RNA, 12 nt, Human
uguaaagugugg

SEQ ID NO: 3674566 - RNA, 17 nt, Human
uguaaaguuagucuacu

SEQ ID NO: 3674567 - RNA, 19 nt, Human
uguaaauaaagaacuagca

SEQ ID NO: 3674568 - RNA, 13 nt, Human
uguaaauaaagcc

SEQ ID NO: 3674569 - RNA, 19 nt, Human
uguaaauaaccccauucuu

SEQ ID NO: 3674570 - RNA, 23 nt, Human
uguaaauaaccccauucuuugcu

SEQ ID NO: 3674571 - RNA, 12 nt, Human
uguaaauaagag

SEQ ID NO: 3674572 - RNA, 14 nt, Human
uguaaauaauucuu

SEQ ID NO: 3674573 - RNA, 22 nt, Human
uguaaauaauucuuuuuuauua

SEQ ID NO: 3674574 - RNA, 21 nt, Human
uguaaauacaauuuuguuucu

SEQ ID NO: 3674575 - RNA, 12 nt, Human
uguaaauacacc

SEQ ID NO: 3674576 - RNA, 15 nt, Human
uguaaauaccaggau

SEQ ID NO: 3674577 - RNA, 17 nt, Human
uguaaauaggauuuuua

SEQ ID NO: 3674578 - RNA, 12 nt, Human
uguaaauagguu

SEQ ID NO: 3674579 - RNA, 18 nt, Human
uguaaauagguucuucuu

SEQ ID NO: 3674580 - RNA, 16 nt, Human
uguaaauauaaagacg

SEQ ID NO: 3674581 - RNA, 17 nt, Human
uguaaauauaaagacgu

SEQ ID NO: 3674582 - RNA, 12 nt, Human
uguaaauauaua

SEQ ID NO: 3674583 - RNA, 17 nt, Human
uguaaauauauaaauau

SEQ ID NO: 3674584 - RNA, 13 nt, Human
uguaaauauuaaa

SEQ ID NO: 3674585 - RNA, 16 nt, Human
uguaaaucacauccuu

SEQ ID NO: 3674586 - RNA, 16 nt, Human
uguaaauccugccauu

SEQ ID NO: 3674587 - RNA, 12 nt, Human
uguaaauccuuu

SEQ ID NO: 3674588 - RNA, 19 nt, Human
uguaaauccuuuuucuuua

SEQ ID NO: 3674589 - RNA, 16 nt, Human
uguaaaucuaacauua

SEQ ID NO: 3674590 - RNA, 14 nt, Human
uguaaaucugccac

SEQ ID NO: 3674591 - RNA, 18 nt, Human
uguaaaugguguacauaa

SEQ ID NO: 3674592 - RNA, 14 nt, Human
uguaaauguaaacu

SEQ ID NO: 3674593 - RNA, 15 nt, Human
uguaaauguaaacuc

SEQ ID NO: 3674594 - RNA, 17 nt, Human
uguaaaugucucacuga

SEQ ID NO: 3674595 - RNA, 20 nt, Human
uguaaaugucucacugagca

SEQ ID NO: 3674596 - RNA, 22 nt, Human
uguaaaugucucacugagcacu

SEQ ID NO: 3674597 - RNA, 14 nt, Human
uguaaauguuaguu

SEQ ID NO: 3674598 - RNA, 22 nt, Human
uguaaauguuuguuaaaaauaa

SEQ ID NO: 3674599 - RNA, 13 nt, Human
uguaaauuaacuu

SEQ ID NO: 3674600 - RNA, 21 nt, Human
uguaaauuaccaguaaagugu

SEQ ID NO: 3674601 - RNA, 13 nt, Human
uguaaauuauauu

SEQ ID NO: 3674602 - RNA, 13 nt, Human
uguaaauuaugua

SEQ ID NO: 3674603 - RNA, 20 nt, Human
uguaaauuauguaaugcaaa

SEQ ID NO: 3674604 - RNA, 12 nt, Human
uguaaauuauuu

SEQ ID NO: 3674605 - RNA, 14 nt, Human
uguaaauucugauu

SEQ ID NO: 3674606 - RNA, 18 nt, Human
uguaaauucugauuucuu

SEQ ID NO: 3674607 - RNA, 22 nt, Human
uguaaauucugauuucuuuuca

SEQ ID NO: 3674608 - RNA, 22 nt, Human
uguaaauugaaucaguauaaac

SEQ ID NO: 3674609 - RNA, 12 nt, Human
uguaaauuggca

SEQ ID NO: 3674610 - RNA, 15 nt, Human
uguaaauuuauguga

SEQ ID NO: 3674611 - RNA, 16 nt, Human
uguaaauuuaugugau

SEQ ID NO: 3674612 - RNA, 13 nt, Human
uguaaauuuguac

SEQ ID NO: 3674613 - RNA, 13 nt, Human
uguaacaagaaaa

SEQ ID NO: 3674614 - RNA, 14 nt, Human
uguaacaagaaaau

SEQ ID NO: 3674615 - RNA, 14 nt, Human
uguaacaagccaga

SEQ ID NO: 3674616 - RNA, 18 nt, Human
uguaacaagccagauuuu

SEQ ID NO: 3674617 - RNA, 16 nt, Human
uguaacaauuguguag

SEQ ID NO: 3674618 - RNA, 21 nt, Human
uguaacaauuguguagccuuu

SEQ ID NO: 3674619 - RNA, 22 nt, Human
uguaacaauuguguagccuuuu

SEQ ID NO: 3674620 - RNA, 24 nt, Human
uguaacacaagccacagaagccag

SEQ ID NO: 3674621 - RNA, 11 nt, Human
uguaacacugu

SEQ ID NO: 3674622 - RNA, 16 nt, Human
uguaacacuuuacaau

SEQ ID NO: 3674623 - RNA, 13 nt, Human
uguaacagaaagg

SEQ ID NO: 3674624 - RNA, 15 nt, Human
uguaacagacauugu

SEQ ID NO: 3674625 - RNA, 12 nt, Human
uguaacagcucc

SEQ ID NO: 3674626 - RNA, 13 nt, Human
uguaacagcuccu

SEQ ID NO: 3674627 - RNA, 16 nt, Human
uguaacagcuccuugg

SEQ ID NO: 3674628 - RNA, 18 nt, Human
uguaacagcuccuuggga

SEQ ID NO: 3674629 - RNA, 14 nt, Human
uguaacagcugagg

SEQ ID NO: 3674630 - RNA, 20 nt, Human
uguaacaggucuccucuuaa

SEQ ID NO: 3674631 - RNA, 22 nt, Human
uguaacaggucuccucuuaaaa

SEQ ID NO: 3674632 - RNA, 11 nt, Human
uguaacaugua

SEQ ID NO: 3674633 - RNA, 12 nt, Human
uguaaccauuuu

SEQ ID NO: 3674634 - RNA, 13 nt, Human
uguaaccauuuua

SEQ ID NO: 3674635 - RNA, 22 nt, Human
uguaaccauuuuauaaagugcu

SEQ ID NO: 3674636 - RNA, 22 nt, Human
uguaaccgauucaucucucaga

SEQ ID NO: 3674637 - RNA, 18 nt, Human
uguaaccucagcucuggg

SEQ ID NO: 3674638 - RNA, 19 nt, Human
uguaaccucagcucuggga

SEQ ID NO: 3674639 - RNA, 23 nt, Human
uguaaccucagcucugggagagg

SEQ ID NO: 3674640 - RNA, 19 nt, Human
uguaaccugagauggcccu

SEQ ID NO: 3674641 - RNA, 19 nt, Human
uguaaccuguugcuguguu

SEQ ID NO: 3674642 - RNA, 19 nt, Human
uguaacgcaaguucccagu

SEQ ID NO: 3674643 - RNA, 23 nt, Human
uguaacgcaaguucccaguugga

SEQ ID NO: 3674644 - RNA, 20 nt, Human
uguaacuauagacuggaaaa

SEQ ID NO: 3674645 - RNA, 12 nt, Human
uguaacuauguu

SEQ ID NO: 3674646 - RNA, 13 nt, Human
uguaacuauguuu

SEQ ID NO: 3674647 - RNA, 13 nt, Human
uguaacuccacca

SEQ ID NO: 3674648 - RNA, 16 nt, Human
uguaacucuaaaagau

SEQ ID NO: 3674649 - RNA, 18 nt, Human
uguaacugccaggcucuc

SEQ ID NO: 3674650 - RNA, 11 nt, Human
uguaacugccc

SEQ ID NO: 3674651 - RNA, 12 nt, Human
uguaacuguuac

SEQ ID NO: 3674652 - RNA, 16 nt, Human
uguaacuguuacagua

SEQ ID NO: 3674653 - RNA, 22 nt, Human
guucagagcugcccucuccugg

SEQ ID NO: 3674654 - RNA, 23 nt, Human
guucagaucuuaauauaaauuca

SEQ ID NO: 3674655 - RNA, 14 nt, Human
guucagcacugucc

SEQ ID NO: 3674656 - RNA, 22 nt, Human
guucagcacugucccuugccuc

SEQ ID NO: 3674657 - RNA, 15 nt, Human
guucagcacuugucu

SEQ ID NO: 3674658 - RNA, 20 nt, Human
guucagcacuugucucauuu

SEQ ID NO: 3674659 - RNA, 12 nt, Human
guucagccaagg

SEQ ID NO: 3674660 - RNA, 19 nt, Human
guucagccccuccucugcc

SEQ ID NO: 3674661 - RNA, 20 nt, Human
guucagccccuccucugcca

SEQ ID NO: 3674662 - RNA, 19 nt, Human
guucagcuaagcuaggaau

SEQ ID NO: 3674663 - RNA, 13 nt, Human
guucagcuacucc

SEQ ID NO: 3674664 - RNA, 16 nt, Human
guucagcuccagcuca

SEQ ID NO: 3674665 - RNA, 17 nt, Human
guucagcuguccucccu

SEQ ID NO: 3674666 - RNA, 18 nt, Human
guucagcuguccucccuc

SEQ ID NO: 3674667 - RNA, 19 nt, Human
guucagcuguccucccucc

SEQ ID NO: 3674668 - RNA, 21 nt, Human
guucagcuguccucccuccac

SEQ ID NO: 3674669 - RNA, 15 nt, Human
guucaggagucccaa

SEQ ID NO: 3674670 - RNA, 19 nt, Human
guucaggcccggcagggcg

SEQ ID NO: 3674671 - RNA, 19 nt, Human
guucagggaagauaaguug

SEQ ID NO: 3674672 - RNA, 16 nt, Human
guucagggcuuuucuu

SEQ ID NO: 3674673 - RNA, 22 nt, Human
guucaggguuggccccugcccg

SEQ ID NO: 3674674 - RNA, 17 nt, Human
guucagguaacaggcag

SEQ ID NO: 3674675 - RNA, 18 nt, Human
guucagguaacaggcaga

SEQ ID NO: 3674676 - RNA, 13 nt, Human
guucaguaccugg

SEQ ID NO: 3674677 - RNA, 20 nt, Human
guucaguggcagggcucagg

SEQ ID NO: 3674678 - RNA, 21 nt, Human
guucaguggcagggcucagga

SEQ ID NO: 3674679 - RNA, 16 nt, Human
guucagugucccgggc

SEQ ID NO: 3674680 - RNA, 13 nt, Human
guucaguuacaga

SEQ ID NO: 3674681 - RNA, 22 nt, Human
guucauaacagugccauugucu

SEQ ID NO: 3674682 - RNA, 24 nt, Human
guucauaacagugccauugucuuu

SEQ ID NO: 3674683 - RNA, 22 nt, Human
guucauacacuaaccaaaucuc

SEQ ID NO: 3674684 - RNA, 11 nt, Human
guucauacauu

SEQ ID NO: 3674685 - RNA, 16 nt, Human
guucauaccuaaguac

SEQ ID NO: 3674686 - RNA, 20 nt, Human
guucauaccuaaguacugua

SEQ ID NO: 3674687 - RNA, 13 nt, Human
guucauagcccag

SEQ ID NO: 3674688 - RNA, 17 nt, Human
guucauagggucucuuc

SEQ ID NO: 3674689 - RNA, 22 nt, Human
guucauagggucucuucagguu

SEQ ID NO: 3674690 - RNA, 20 nt, Human
guucauaggucacuggcucu

SEQ ID NO: 3674691 - RNA, 19 nt, Human
guucauauuccauauuuau

SEQ ID NO: 3674692 - RNA, 21 nt, Human
guucaucaguguuaaaaaauu

SEQ ID NO: 3674693 - RNA, 22 nt, Human
guucaucauccagauguggcua

SEQ ID NO: 3674694 - RNA, 21 nt, Human
guucauccaauccucacuggg

SEQ ID NO: 3674695 - RNA, 16 nt, Human
guucaucccagcccca

SEQ ID NO: 3674696 - RNA, 20 nt, Human
guucaucccuucucuuccag

SEQ ID NO: 3674697 - RNA, 20 nt, Human
guucaucugagcaagagcug

SEQ ID NO: 3674698 - RNA, 12 nt, Human
guucaugagaau

SEQ ID NO: 3674699 - RNA, 15 nt, Human
guucaugcagcugug

SEQ ID NO: 3674700 - RNA, 19 nt, Human
uggccaggcugccuggccu

SEQ ID NO: 3674701 - RNA, 13 nt, Human
uggccaggcugcu

SEQ ID NO: 3674702 - RNA, 16 nt, Human
uggccaggcugcucuu

SEQ ID NO: 3674703 - RNA, 17 nt, Human
uggccaggcugcucuug

SEQ ID NO: 3674704 - RNA, 20 nt, Human
uggccaggcugcucuugaac

SEQ ID NO: 3674705 - RNA, 13 nt, Human
uggccaggcuggu

SEQ ID NO: 3674706 - RNA, 15 nt, Human
uggccaggcuggucu

SEQ ID NO: 3674707 - RNA, 20 nt, Human
uggccaggcuggucucgaac

SEQ ID NO: 3674708 - RNA, 14 nt, Human
uguauaaauguaua

SEQ ID NO: 3674709 - RNA, 14 nt, Human
uguauaacagguua

SEQ ID NO: 3674710 - RNA, 13 nt, Human
uguauaacuuuaa

SEQ ID NO: 3674711 - RNA, 22 nt, Human
uguauaagauuagaaugaaaau

SEQ ID NO: 3674712 - RNA, 15 nt, Human
uguauaauacuuugu

SEQ ID NO: 3674713 - RNA, 13 nt, Human
uguauaauauaaa

SEQ ID NO: 3674714 - RNA, 14 nt, Human
uguauaauauugaa

SEQ ID NO: 3674715 - RNA, 21 nt, Human
uguauaauauugaaaauugaa

SEQ ID NO: 3674716 - RNA, 22 nt, Human
uguauaauauugaaaauugaaa

SEQ ID NO: 3674717 - RNA, 12 nt, Human
uguauaauuucg

SEQ ID NO: 3674718 - RNA, 13 nt, Human
uguauacaaauau

SEQ ID NO: 3674719 - RNA, 18 nt, Human
uguauacaaauauauugu

SEQ ID NO: 3674720 - RNA, 13 nt, Human
uguauacuuuaaa

SEQ ID NO: 3674721 - RNA, 12 nt, Human
uguauacuuuag

SEQ ID NO: 3674722 - RNA, 19 nt, Human
uguauacuuuaguaugacg

SEQ ID NO: 3674723 - RNA, 16 nt, Human
uguauagaaccucuuu

SEQ ID NO: 3674724 - RNA, 17 nt, Human
uguauagacaguuugua

SEQ ID NO: 3674725 - RNA, 19 nt, Human
uguauagaugcaagauauu

SEQ ID NO: 3674726 - RNA, 20 nt, Human
uguauagaugcaagauauuu

SEQ ID NO: 3674727 - RNA, 15 nt, Human
uguauagauuagaau

SEQ ID NO: 3674728 - RNA, 23 nt, Human
uguauagauuagauuauauugag

SEQ ID NO: 3674729 - RNA, 13 nt, Human
uguauagcaugaa

SEQ ID NO: 3674730 - RNA, 16 nt, Human
uguauagguagauguu

SEQ ID NO: 3674731 - RNA, 23 nt, Human
uguauaguaaagugauaauuucu

SEQ ID NO: 3674732 - RNA, 15 nt, Human
uguauaguacuggca

SEQ ID NO: 3674733 - RNA, 17 nt, Human
uguauaguauuugaaaa

SEQ ID NO: 3674734 - RNA, 17 nt, Human
uguauaguuaacacacu

SEQ ID NO: 3674735 - RNA, 13 nt, Human
uguauaguugcuu

SEQ ID NO: 3674736 - RNA, 22 nt, Human
uguauaguugcuugccugauau

SEQ ID NO: 3674737 - RNA, 14 nt, Human
uguauaguugcuuu

SEQ ID NO: 3674738 - RNA, 14 nt, Human
uguauauaaauggg

SEQ ID NO: 3674739 - RNA, 20 nt, Human
uguauauaaaugggaacauu

SEQ ID NO: 3674740 - RNA, 13 nt, Human
uguauauacuuuu

SEQ ID NO: 3674741 - RNA, 17 nt, Human
uguauauauacauacac

SEQ ID NO: 3674742 - RNA, 18 nt, Human
uguauauauacauacacu

SEQ ID NO: 3674743 - RNA, 20 nt, Human
uguauauauacauacacuug

SEQ ID NO: 3674744 - RNA, 17 nt, Human
uguauauaucugcuuca

SEQ ID NO: 3674745 - RNA, 12 nt, Human
uguauauaugug

SEQ ID NO: 3674746 - RNA, 14 nt, Human
uguauauaugugua

SEQ ID NO: 3674747 - RNA, 20 nt, Human
uguauauauguguauauaua

SEQ ID NO: 3674748 - RNA, 18 nt, Human
uguauauauguguguuua

SEQ ID NO: 3674749 - RNA, 20 nt, Human
uguauauauguguguuuaaa

SEQ ID NO: 3674750 - RNA, 20 nt, Human
uguauauauuuugugugaaa

SEQ ID NO: 3674751 - RNA, 22 nt, Human
uguauauauuuugugugaaauu

SEQ ID NO: 3674752 - RNA, 18 nt, Human
uguauaucagaaaaggga

SEQ ID NO: 3674753 - RNA, 18 nt, Human
uguauauccuuucuaaca

SEQ ID NO: 3674754 - RNA, 19 nt, Human
uguauaucguuaucacugu

SEQ ID NO: 3674755 - RNA, 15 nt, Human
uguauauuacaauga

SEQ ID NO: 3674756 - RNA, 19 nt, Human
uguauauuacaaugaucac

SEQ ID NO: 3674757 - RNA, 14 nt, Human
uguauauuauuucu

SEQ ID NO: 3674758 - RNA, 15 nt, Human
uguauauuauuucua

SEQ ID NO: 3674759 - RNA, 13 nt, Human
uguauauuauuug

SEQ ID NO: 3674760 - RNA, 18 nt, Human
uguauauuauuuggcagu

SEQ ID NO: 3674761 - RNA, 13 nt, Human
uguauauuccuuu

SEQ ID NO: 3674762 - RNA, 18 nt, Human
uguauauucuauuuuaca

SEQ ID NO: 3674763 - RNA, 13 nt, Human
uguauauugguuu

SEQ ID NO: 3674764 - RNA, 21 nt, Human
uguauauugguuuuaugauga

SEQ ID NO: 3674765 - RNA, 13 nt, Human
uguauauuguaau

SEQ ID NO: 3674766 - RNA, 14 nt, Human
uguauauuguaauu

SEQ ID NO: 3674767 - RNA, 18 nt, Human
uguauauuuaaaagaaag

SEQ ID NO: 3674768 - RNA, 17 nt, Human
uguauauuugauuuauu

SEQ ID NO: 3674769 - RNA, 19 nt, Human
uguauauuugauuuauuaa

SEQ ID NO: 3674770 - RNA, 22 nt, Human
uguauauuuguaaagcuauuua

SEQ ID NO: 3674771 - RNA, 15 nt, Human
uguauauuuguacaa

SEQ ID NO: 3674772 - RNA, 19 nt, Human
uguauauuuguauauuaca

SEQ ID NO: 3674773 - RNA, 17 nt, Human
uguauauuuguaugaua

SEQ ID NO: 3674774 - RNA, 21 nt, Human
uguauauuugugauagcacuu

SEQ ID NO: 3674775 - RNA, 15 nt, Human
uguauauuuuauaua

SEQ ID NO: 3674776 - RNA, 18 nt, Human
uguaucaguguuuaugug

SEQ ID NO: 3674777 - RNA, 19 nt, Human
uguaucauaauuaccaagu

SEQ ID NO: 3674778 - RNA, 16 nt, Human
uguaucauagaaaugu

SEQ ID NO: 3674779 - RNA, 17 nt, Human
uguaucauuugaacaac

SEQ ID NO: 3674780 - RNA, 16 nt, Human
uguauccaugggggca

SEQ ID NO: 3674781 - RNA, 19 nt, Human
uguauccaugggggcaggg

SEQ ID NO: 3674782 - RNA, 13 nt, Human
uguauccauuauc

SEQ ID NO: 3674783 - RNA, 19 nt, Human
uguauccauuaucaugugu

SEQ ID NO: 3674784 - RNA, 22 nt, Human
uguauccauuaucauguguaau

SEQ ID NO: 3674785 - RNA, 19 nt, Human
uguaucccaugagccucag

SEQ ID NO: 3674786 - RNA, 16 nt, Human
uguauccccugcaggc

SEQ ID NO: 3674787 - RNA, 20 nt, Human
uguauccugaggcugagaga

SEQ ID NO: 3674788 - RNA, 12 nt, Human
uguauccugggg

SEQ ID NO: 3674789 - RNA, 14 nt, Human
uguauccuggggcu

SEQ ID NO: 3674790 - RNA, 15 nt, Human
uguauccuggggcuc

SEQ ID NO: 3674791 - RNA, 18 nt, Human
uguauccuggggcucccu

SEQ ID NO: 3674792 - RNA, 15 nt, Human
uguaucggaugcuuu

SEQ ID NO: 3674793 - RNA, 19 nt, Human
uguaucguaaccagccaga

SEQ ID NO: 3674794 - RNA, 12 nt, Human
uguaucuaagaa

SEQ ID NO: 3674795 - RNA, 20 nt, Human
uguaucuaagaauaauaaaa

SEQ ID NO: 3674796 - RNA, 15 nt, Human
uguaucuaccucacu

SEQ ID NO: 3674797 - RNA, 17 nt, Human
uguaucuagugcagcug

SEQ ID NO: 3674798 - RNA, 19 nt, Human
uguaucuagugcagcugau

SEQ ID NO: 3674799 - RNA, 18 nt, Human
uguaucuaugcauuuucu

SEQ ID NO: 3674800 - RNA, 19 nt, Human
uguaucuaugcauuuucug

SEQ ID NO: 3674801 - RNA, 21 nt, Human
uguaucucugaagcauguuuc

SEQ ID NO: 3674802 - RNA, 19 nt, Human
uguaucugcaggcagacac

SEQ ID NO: 3674803 - RNA, 21 nt, Human
uguaucugcaggcagacacgg

SEQ ID NO: 3674804 - RNA, 22 nt, Human
uguaucugcaggcagacacgga

SEQ ID NO: 3674805 - RNA, 12 nt, Human
uguaucugucuu

SEQ ID NO: 3674806 - RNA, 14 nt, Human
uguaucugugcuuu

SEQ ID NO: 3674807 - RNA, 11 nt, Human
uguaucugugu

SEQ ID NO: 3674808 - RNA, 15 nt, Human
uguaucuuaaauuug

SEQ ID NO: 3674809 - RNA, 21 nt, Human
uguaucuuucuaugcugcuuu

SEQ ID NO: 3674810 - RNA, 16 nt, Human
uguaugaaauauaugu

SEQ ID NO: 3674811 - RNA, 18 nt, Human
uguaugaaauauauguga

SEQ ID NO: 3674812 - RNA, 14 nt, Human
uguaugaaggcuuu

SEQ ID NO: 3674813 - RNA, 19 nt, Human
uguaugaauacagcagcaa

SEQ ID NO: 3674814 - RNA, 15 nt, Human
uguaugacuaaagag

SEQ ID NO: 3674815 - RNA, 16 nt, Human
uguaugacuaaagaga

SEQ ID NO: 3674816 - RNA, 23 nt, Human
uguaugacuaaagagagaaugua

SEQ ID NO: 3674817 - RNA, 16 nt, Human
uguaugauauuccaua

SEQ ID NO: 3674818 - RNA, 12 nt, Human
uguaugaucaaa

SEQ ID NO: 3674819 - RNA, 14 nt, Human
uguaugaucaaaug

SEQ ID NO: 3674820 - RNA, 16 nt, Human
uguaugaucaaauguu

SEQ ID NO: 3674821 - RNA, 16 nt, Human
uguaugaucugugccu

SEQ ID NO: 3674822 - RNA, 12 nt, Human
uguaugauuacu

SEQ ID NO: 3674823 - RNA, 13 nt, Human
uguaugauuacug

SEQ ID NO: 3674824 - RNA, 22 nt, Human
uguaugauuacuggccuuuuuc

SEQ ID NO: 3674825 - RNA, 16 nt, Human
uguaugauucccagcc

SEQ ID NO: 3674826 - RNA, 16 nt, Human
uguaugcaagcaguuu

SEQ ID NO: 3674827 - RNA, 16 nt, Human
uguaugcacacacaua

SEQ ID NO: 3674828 - RNA, 19 nt, Human
uguaugcacacacauauau

SEQ ID NO: 3674829 - RNA, 21 nt, Human
uguaugcacacacauauauua

SEQ ID NO: 3674830 - RNA, 21 nt, Human
uguaugcacaugaacuuagau

SEQ ID NO: 3674831 - RNA, 17 nt, Human
uguaugcagcuaucugg

SEQ ID NO: 3674832 - RNA, 12 nt, Human
uguaugccuuua

SEQ ID NO: 3674833 - RNA, 13 nt, Human
uguaugcgugugu

SEQ ID NO: 3674834 - RNA, 14 nt, Human
uguaugcugaucau

SEQ ID NO: 3674835 - RNA, 15 nt, Human
uguaugcugaucauc

SEQ ID NO: 3674836 - RNA, 13 nt, Human
uguaugcuucaua

SEQ ID NO: 3674837 - RNA, 16 nt, Human
uguaugcuucauacag

SEQ ID NO: 3674838 - RNA, 16 nt, Human
uguauggaauacagug

SEQ ID NO: 3674839 - RNA, 17 nt, Human
uguauggaauacagugu

SEQ ID NO: 3674840 - RNA, 19 nt, Human
uguauggaaucccacugua

SEQ ID NO: 3674841 - RNA, 16 nt, Human
uguauggauaguaaaa

SEQ ID NO: 3674842 - RNA, 17 nt, Human
uguauggggaaucuaag

SEQ ID NO: 3674843 - RNA, 22 nt, Human
uguauggguaggguaaaucagu

SEQ ID NO: 3674844 - RNA, 21 nt, Human
uguaugguuuuugagauauua

SEQ ID NO: 3674845 - RNA, 15 nt, Human
uguauguaaauaggu

SEQ ID NO: 3674846 - RNA, 20 nt, Human
ugucaaugcaguugucucug

SEQ ID NO: 3674847 - RNA, 19 nt, Human
ugucaauuuaugaauauaa

SEQ ID NO: 3674848 - RNA, 14 nt, Human
ugucacaauccuaa

SEQ ID NO: 3674849 - RNA, 19 nt, Human
ugucacaauccuaacacau

SEQ ID NO: 3674850 - RNA, 14 nt, Human
ugucacaccagcca

SEQ ID NO: 3674851 - RNA, 15 nt, Human
ugucacaccagccau

SEQ ID NO: 3674852 - RNA, 12 nt, Human
ugucacaggcag

SEQ ID NO: 3674853 - RNA, 21 nt, Human
ugucacaggcagguccagggu

SEQ ID NO: 3674854 - RNA, 12 nt, Human
ugucacagggcc

SEQ ID NO: 3674855 - RNA, 16 nt, Human
ugucacaguaaaaaua

SEQ ID NO: 3674856 - RNA, 23 nt, Human
ugucacaguaaaaauaaaauacu

SEQ ID NO: 3674857 - RNA, 20 nt, Human
ugucacaugaaacauuugca

SEQ ID NO: 3674858 - RNA, 17 nt, Human
ugucacauugcauucua

SEQ ID NO: 3674859 - RNA, 20 nt, Human
ugucacauuuagcugugcuc

SEQ ID NO: 3674860 - RNA, 23 nt, Human
ugucacauuuuucuuguuuuguc

SEQ ID NO: 3674861 - RNA, 14 nt, Human
ugucaccaaggaaa

SEQ ID NO: 3674862 - RNA, 18 nt, Human
ugucaccacccugcucau

SEQ ID NO: 3674863 - RNA, 23 nt, Human
ugucaccaccuucccagcucucc

SEQ ID NO: 3674864 - RNA, 17 nt, Human
ugucaccccagagccac

SEQ ID NO: 3674865 - RNA, 19 nt, Human
ugucaccccagagccacac

SEQ ID NO: 3674866 - RNA, 21 nt, Human
ugucaccccagagccacacau

SEQ ID NO: 3674867 - RNA, 22 nt, Human
ugucaccccagagccacacaug

SEQ ID NO: 3674868 - RNA, 22 nt, Human
ugucacccuuaggccagcacca

SEQ ID NO: 3674869 - RNA, 22 nt, Human
ugucaccgugagcagcuuugga

SEQ ID NO: 3674870 - RNA, 23 nt, Human
ugucaccgugagcagcuuuggaa

SEQ ID NO: 3674871 - RNA, 21 nt, Human
ugucaccguggaccuuccugc

SEQ ID NO: 3674872 - RNA, 16 nt, Human
ugucaccucuuccgac

SEQ ID NO: 3674873 - RNA, 15 nt, Human
ugucacuagaaugga

SEQ ID NO: 3674874 - RNA, 14 nt, Human
ugucacucaaggcg

SEQ ID NO: 3674875 - RNA, 17 nt, Human
ugucacucaaggcggug

SEQ ID NO: 3674876 - RNA, 15 nt, Human
ugucacucaggcugg

SEQ ID NO: 3674877 - RNA, 15 nt, Human
ugucacugcaggcac

SEQ ID NO: 3674878 - RNA, 13 nt, Human
ugucacugcuuuu

SEQ ID NO: 3674879 - RNA, 18 nt, Human
ugucacuggcugccucca

SEQ ID NO: 3674880 - RNA, 18 nt, Human
ugucacugucccuccugg

SEQ ID NO: 3674881 - RNA, 22 nt, Human
ugucacugucccuccugguguc

SEQ ID NO: 3674882 - RNA, 17 nt, Human
ugucacuguuucucugc

SEQ ID NO: 3674883 - RNA, 22 nt, Human
ugucacuucgcgugcccucgcu

SEQ ID NO: 3674884 - RNA, 14 nt, Human
ugucacuugcaugu

SEQ ID NO: 3674885 - RNA, 17 nt, Human
ugucacuugugcuuugc

SEQ ID NO: 3674886 - RNA, 17 nt, Human
ugucacuuugcucuggg

SEQ ID NO: 3674887 - RNA, 12 nt, Human
ugucacuuuuua

SEQ ID NO: 3674888 - RNA, 16 nt, Human
ugucacuuuuuaugcu

SEQ ID NO: 3674889 - RNA, 18 nt, Human
ugucacuuuuugaggcaa

SEQ ID NO: 3674890 - RNA, 21 nt, Human
ugucagaaaccaguuauguga

SEQ ID NO: 3674891 - RNA, 21 nt, Human
ugucagaacuagaauuugauu

SEQ ID NO: 3674892 - RNA, 12 nt, Human
ugucagaagugc

SEQ ID NO: 3674893 - RNA, 17 nt, Human
ugucagaagugcagaau

SEQ ID NO: 3674894 - RNA, 22 nt, Human
ugucagaaugcuauugaaaaug

SEQ ID NO: 3674895 - RNA, 15 nt, Human
ugucagacauaaagc

SEQ ID NO: 3674896 - RNA, 23 nt, Human
ugucagacauccauguuuguaaa

SEQ ID NO: 3674897 - RNA, 16 nt, Human
ugucagacccuggagg

SEQ ID NO: 3674898 - RNA, 17 nt, Human
ugucagacccuggaggc

SEQ ID NO: 3674899 - RNA, 23 nt, Human
ugucagacuuuaaagaauaauau

SEQ ID NO: 3674900 - RNA, 11 nt, Human
ugucagagcug

SEQ ID NO: 3674901 - RNA, 12 nt, Human
ugucagagcugg

SEQ ID NO: 3674902 - RNA, 15 nt, Human
ugucagagcugggag

SEQ ID NO: 3674903 - RNA, 20 nt, Human
ugucagaggcacaaaagggu

SEQ ID NO: 3674904 - RNA, 16 nt, Human
ugucagauacaaugua

SEQ ID NO: 3674905 - RNA, 20 nt, Human
ugucagauccaggagcucca

SEQ ID NO: 3674906 - RNA, 15 nt, Human
ugucagauuccuuuc

SEQ ID NO: 3674907 - RNA, 13 nt, Human
ugucagcaaaaag

SEQ ID NO: 3674908 - RNA, 14 nt, Human
ugucagcaaaaagc

SEQ ID NO: 3674909 - RNA, 19 nt, Human
ugucagcaaaaagcaaaau

SEQ ID NO: 3674910 - RNA, 22 nt, Human
ugucagcaaaaagcaaaaucau

SEQ ID NO: 3674911 - RNA, 14 nt, Human
ugucagcaugaauu

SEQ ID NO: 3674912 - RNA, 17 nt, Human
ugucagccgggcccuga

SEQ ID NO: 3674913 - RNA, 22 nt, Human
ugucagcgcucuggugcugcag

SEQ ID NO: 3674914 - RNA, 18 nt, Human
ugucagcuacuaaugaug

SEQ ID NO: 3674915 - RNA, 23 nt, Human
ugucagcuacugcggaaaaggaa

SEQ ID NO: 3674916 - RNA, 23 nt, Human
ugucagcuccccucggagaagag

SEQ ID NO: 3674917 - RNA, 17 nt, Human
ugucagcucucaucuga

SEQ ID NO: 3674918 - RNA, 13 nt, Human
ugucagcugaggc

SEQ ID NO: 3674919 - RNA, 18 nt, Human
ugucagcuuuugcuucau

SEQ ID NO: 3674920 - RNA, 14 nt, Human
ugucaggaggaacu

SEQ ID NO: 3674921 - RNA, 13 nt, Human
ugucaggauugcg

SEQ ID NO: 3674922 - RNA, 23 nt, Human
ugucaggauugcgagagaugugu

SEQ ID NO: 3674923 - RNA, 14 nt, Human
ugucaggccuucag

SEQ ID NO: 3674924 - RNA, 17 nt, Human
ugucaggcugaaaacaa

SEQ ID NO: 3674925 - RNA, 16 nt, Human
ugucaggcugcuggcg

SEQ ID NO: 3674926 - RNA, 22 nt, Human
ugucaggcugcuggcgccucug

SEQ ID NO: 3674927 - RNA, 23 nt, Human
ugucaggcugcuggcgccucugc

SEQ ID NO: 3674928 - RNA, 19 nt, Human
ugucagggaguguucccua

SEQ ID NO: 3674929 - RNA, 16 nt, Human
ugucagguggggcagc

SEQ ID NO: 3674930 - RNA, 20 nt, Human
ugucaguaccuucaaacuag

SEQ ID NO: 3674931 - RNA, 20 nt, Human
ugucaguaucuguaucucuc

SEQ ID NO: 3674932 - RNA, 19 nt, Human
ugucaguauguggaagugu

SEQ ID NO: 3674933 - RNA, 16 nt, Human
ugucagugcagcccgu

SEQ ID NO: 3674934 - RNA, 16 nt, Human
ugucagugccgccgcc

SEQ ID NO: 3674935 - RNA, 16 nt, Human
ugucagugugacugau

SEQ ID NO: 3674936 - RNA, 19 nt, Human
ugucaguucugauauggaa

SEQ ID NO: 3674937 - RNA, 17 nt, Human
ugucaguuguuauuuau

SEQ ID NO: 3674938 - RNA, 22 nt, Human
ugucaguuguuauuuauugaaa

SEQ ID NO: 3674939 - RNA, 14 nt, Human
ugucaguuuauguu

SEQ ID NO: 3674940 - RNA, 16 nt, Human
ugucaguuuauguuuu

SEQ ID NO: 3674941 - RNA, 14 nt, Human
ugucaguuuucaua

SEQ ID NO: 3674942 - RNA, 21 nt, Human
ugucauaaacagaugaauaaa

SEQ ID NO: 3674943 - RNA, 18 nt, Human
ugucauaaagugagaaaa

SEQ ID NO: 3674944 - RNA, 20 nt, Human
ugucauaaagugagaaaacu

SEQ ID NO: 3674945 - RNA, 16 nt, Human
ugucauaagaaugaau

SEQ ID NO: 3674946 - RNA, 13 nt, Human
ugucauacagaga

SEQ ID NO: 3674947 - RNA, 15 nt, Human
ugucauacagagaag

SEQ ID NO: 3674948 - RNA, 16 nt, Human
ugucauacagagaagu

SEQ ID NO: 3674949 - RNA, 23 nt, Human
ugucauaccaggccgccccagcc

SEQ ID NO: 3674950 - RNA, 20 nt, Human
ugucauacucgagucugagg

SEQ ID NO: 3674951 - RNA, 17 nt, Human
ugucauagaaagugcca

SEQ ID NO: 3674952 - RNA, 22 nt, Human
ugucauagaaagugccagaaag

SEQ ID NO: 3674953 - RNA, 15 nt, Human
ugucauagaaauuac

SEQ ID NO: 3674954 - RNA, 21 nt, Human
ugucauagaauagcauguugu

SEQ ID NO: 3674955 - RNA, 18 nt, Human
ugucauauagcugguuau

SEQ ID NO: 3674956 - RNA, 20 nt, Human
ugucauauguagccuucaca

SEQ ID NO: 3674957 - RNA, 23 nt, Human
ugucaucaauaguguccuaugca

SEQ ID NO: 3674958 - RNA, 16 nt, Human
ugucaucaccauggaa

SEQ ID NO: 3674959 - RNA, 22 nt, Human
ugucaucacucuagguuuuaca

SEQ ID NO: 3674960 - RNA, 17 nt, Human
ugucaucagaagauaac

SEQ ID NO: 3674961 - RNA, 16 nt, Human
ugucauccucaaagaa

SEQ ID NO: 3674962 - RNA, 19 nt, Human
ugucauccucaaagaaagu

SEQ ID NO: 3674963 - RNA, 21 nt, Human
ugucauccucaaagaaagugu

SEQ ID NO: 3674964 - RNA, 22 nt, Human
ugucauccucaaagaaagugua

SEQ ID NO: 3674965 - RNA, 13 nt, Human
ugucaucugugca

SEQ ID NO: 3674966 - RNA, 13 nt, Human
ugucaugcaugaa

SEQ ID NO: 3674967 - RNA, 14 nt, Human
ugucaugccccccu

SEQ ID NO: 3674968 - RNA, 20 nt, Human
ugucaugcugggauuuccaa

SEQ ID NO: 3674969 - RNA, 22 nt, Human
ugucaugcuucaucauucccuc

SEQ ID NO: 3674970 - RNA, 14 nt, Human
ugucaugugcagau

SEQ ID NO: 3674971 - RNA, 15 nt, Human
ugucauguguauaaa

SEQ ID NO: 3674972 - RNA, 17 nt, Human
ugucauguguucccuuu

SEQ ID NO: 3674973 - RNA, 19 nt, Human
ugucauguguucccuuugu

SEQ ID NO: 3674974 - RNA, 23 nt, Human
ugucauuaaauggggcucacaaa

SEQ ID NO: 3674975 - RNA, 17 nt, Human
ugucauuagccugagua

SEQ ID NO: 3674976 - RNA, 16 nt, Human
ugucauugaaaaacua

SEQ ID NO: 3674977 - RNA, 17 nt, Human
ugucauugcuucuucug

SEQ ID NO: 3674978 - RNA, 13 nt, Human
ugucauugcuuua

SEQ ID NO: 3674979 - RNA, 20 nt, Human
ugucauuguuauauaaucau

SEQ ID NO: 3674980 - RNA, 15 nt, Human
ugucauuucagaagu

SEQ ID NO: 3674981 - RNA, 16 nt, Human
ugucauuucagaaguu

SEQ ID NO: 3674982 - RNA, 15 nt, Human
ugucauuucauucca

SEQ ID NO: 3674983 - RNA, 16 nt, Human
ugucauuucauuccau

SEQ ID NO: 3674984 - RNA, 14 nt, Human
ugucauuucauuuc

SEQ ID NO: 3674985 - RNA, 20 nt, Human
ugucauuugagcagggcuca

SEQ ID NO: 3674986 - RNA, 21 nt, Human
ugucauuugagcagggcucag

SEQ ID NO: 3674987 - RNA, 18 nt, Human
ugucauuuguugugaugu

SEQ ID NO: 3674988 - RNA, 12 nt, Human
ugucauuuucau

SEQ ID NO: 3674989 - RNA, 13 nt, Human
ugucauuuucauu

SEQ ID NO: 3674990 - RNA, 15 nt, Human
ugugccuccucaccc

SEQ ID NO: 3674991 - RNA, 16 nt, Human
ugugccuccucacccc

SEQ ID NO: 3674992 - RNA, 12 nt, Human
ugugccucggcu

SEQ ID NO: 3674993 - RNA, 14 nt, Human
ugugccucuagcug

SEQ ID NO: 3674994 - RNA, 18 nt, Human
ugugccucuagcugaauu

SEQ ID NO: 3674995 - RNA, 16 nt, Human
ugugccucugggacug

SEQ ID NO: 3674996 - RNA, 19 nt, Human
ugugccugcaccaggagac

SEQ ID NO: 3674997 - RNA, 12 nt, Human
ugugccugcagc

SEQ ID NO: 3674998 - RNA, 17 nt, Human
ugugccuugucacgcca

SEQ ID NO: 3674999 - RNA, 15 nt, Human
ugugccuuguuuuuu

SEQ ID NO: 3675000 - RNA, 18 nt, Human
ugugccuuuuauagcuau

SEQ ID NO: 3675001 - RNA, 16 nt, Human
ugugccuuuugccauc

SEQ ID NO: 3675002 - RNA, 20 nt, Human
ugugccuuuuuuauaucuug

SEQ ID NO: 3675003 - RNA, 14 nt, Human
ugugcgccuacagg

SEQ ID NO: 3675004 - RNA, 14 nt, Human
ugugcgcuaaacuu

SEQ ID NO: 3675005 - RNA, 23 nt, Human
ugugcgcuaaacuuuucugauag

SEQ ID NO: 3675006 - RNA, 15 nt, Human
ugugcgcucugugga

SEQ ID NO: 3675007 - RNA, 13 nt, Human
ugugcgugaaaca

SEQ ID NO: 3675008 - RNA, 22 nt, Human
ugugcgugaaacacaccaggcu

SEQ ID NO: 3675009 - RNA, 20 nt, Human
ugugcgugcauguguguuca

SEQ ID NO: 3675010 - RNA, 21 nt, Human
ugugcguggggcucccgccuc

SEQ ID NO: 3675011 - RNA, 15 nt, Human
ugugcuaaacgugua

SEQ ID NO: 3675012 - RNA, 22 nt, Human
ugugcuacaauucauuguguua

SEQ ID NO: 3675013 - RNA, 21 nt, Human
ugugcuacugucuuuggaaaa

SEQ ID NO: 3675014 - RNA, 16 nt, Human
ugugcuacuuugccuu

SEQ ID NO: 3675015 - RNA, 17 nt, Human
ugugcuagaaauuuuca

SEQ ID NO: 3675016 - RNA, 14 nt, Human
ugugcuagaauacu

SEQ ID NO: 3675017 - RNA, 15 nt, Human
ugugcuauaaauccu

SEQ ID NO: 3675018 - RNA, 13 nt, Human
ugugcuauacugc

SEQ ID NO: 3675019 - RNA, 21 nt, Human
ugugcuauacugcauacuuuu

SEQ ID NO: 3675020 - RNA, 13 nt, Human
ugugcuauaguau

SEQ ID NO: 3675021 - RNA, 17 nt, Human
ugugcuauaguauuuga

SEQ ID NO: 3675022 - RNA, 16 nt, Human
ugugcucaaaauuuga

SEQ ID NO: 3675023 - RNA, 15 nt, Human
ugugcucagagacac

SEQ ID NO: 3675024 - RNA, 12 nt, Human
ugugcucagccc

SEQ ID NO: 3675025 - RNA, 15 nt, Human
ugugcucaggagccc

SEQ ID NO: 3675026 - RNA, 20 nt, Human
ugugcucaggagcccuggga

SEQ ID NO: 3675027 - RNA, 21 nt, Human
ugugcucaggagcccugggag

SEQ ID NO: 3675028 - RNA, 15 nt, Human
ugugcucauuuaagu

SEQ ID NO: 3675029 - RNA, 21 nt, Human
ugugcucccugguucugauga

SEQ ID NO: 3675030 - RNA, 23 nt, Human
ugugcuccgugccuccaccacca

SEQ ID NO: 3675031 - RNA, 22 nt, Human
ugugcucugaucauccacugug

SEQ ID NO: 3675032 - RNA, 23 nt, Human
ugugcucugaucauccacugugc

SEQ ID NO: 3675033 - RNA, 16 nt, Human
ugugcucuggacaggc

SEQ ID NO: 3675034 - RNA, 19 nt, Human
ugugcucuggacaggcaug

SEQ ID NO: 3675035 - RNA, 14 nt, Human
ugugcugacccucc

SEQ ID NO: 3675036 - RNA, 17 nt, Human
ugugcugacccuccugu

SEQ ID NO: 3675037 - RNA, 21 nt, Human
ugugcugacggaagccaacuu

SEQ ID NO: 3675038 - RNA, 14 nt, Human
ugugcugaggccuu

SEQ ID NO: 3675039 - RNA, 18 nt, Human
ugugcugagucugaaggc

SEQ ID NO: 3675040 - RNA, 19 nt, Human
ugugcugagucugaaggcu

SEQ ID NO: 3675041 - RNA, 16 nt, Human
ugugcugccauuugau

SEQ ID NO: 3675042 - RNA, 12 nt, Human
ugugcugcccug

SEQ ID NO: 3675043 - RNA, 19 nt, Human
ugugcuggauggagcccag

SEQ ID NO: 3675044 - RNA, 20 nt, Human
ugugcuggauggagcccagg

SEQ ID NO: 3675045 - RNA, 21 nt, Human
ugugcuggauggagcccaggc

SEQ ID NO: 3675046 - RNA, 13 nt, Human
ugugcuggccagc

SEQ ID NO: 3675047 - RNA, 12 nt, Human
ugugcugggagc

SEQ ID NO: 3675048 - RNA, 16 nt, Human
ugugcugggggaauga

SEQ ID NO: 3675049 - RNA, 19 nt, Human
ugugcugguguccugacca

SEQ ID NO: 3675050 - RNA, 14 nt, Human
ugugcuguggaagc

SEQ ID NO: 3675051 - RNA, 17 nt, Human
ugugcuguggaagcaac

SEQ ID NO: 3675052 - RNA, 17 nt, Human
ugugcuguggggcuggu

SEQ ID NO: 3675053 - RNA, 12 nt, Human
ugugcuguguaa

SEQ ID NO: 3675054 - RNA, 15 nt, Human
ugugcuuccuccugc

SEQ ID NO: 3675055 - RNA, 15 nt, Human
ugugcuucuccccag

SEQ ID NO: 3675056 - RNA, 20 nt, Human
ugugcuucuccccagaauuc

SEQ ID NO: 3675057 - RNA, 21 nt, Human
ugugcuugaaggcccugcuga

SEQ ID NO: 3675058 - RNA, 19 nt, Human
ugugcuuguuuuauaaaau

SEQ ID NO: 3675059 - RNA, 14 nt, Human
ugugcuuuagcuug

SEQ ID NO: 3675060 - RNA, 13 nt, Human
ugugcuuuaugcu

SEQ ID NO: 3675061 - RNA, 17 nt, Human
ugugcuuuaugcugaaa

SEQ ID NO: 3675062 - RNA, 18 nt, Human
ugugcuuuaugcugaaac

SEQ ID NO: 3675063 - RNA, 20 nt, Human
ugugcuuuaugcugaaacag

SEQ ID NO: 3675064 - RNA, 14 nt, Human
ugugcuuuccagcu

SEQ ID NO: 3675065 - RNA, 16 nt, Human
ugugcuuuccagcuca

SEQ ID NO: 3675066 - RNA, 11 nt, Human
ugugcuuucua

SEQ ID NO: 3675067 - RNA, 16 nt, Human
ugugcuuugcucuugu

SEQ ID NO: 3675068 - RNA, 14 nt, Human
ugugcuuuuccuga

SEQ ID NO: 3675069 - RNA, 15 nt, Human
ugugcuuuucuccaa

SEQ ID NO: 3675070 - RNA, 16 nt, Human
uguggaaaaauauuua

SEQ ID NO: 3675071 - RNA, 19 nt, Human
uguggaaaaaugagagaag

SEQ ID NO: 3675072 - RNA, 20 nt, Human
uguggaaaaaugagagaagg

SEQ ID NO: 3675073 - RNA, 15 nt, Human
uguggaaaagaaaca

SEQ ID NO: 3675074 - RNA, 18 nt, Human
uguggaaaccuccacagg

SEQ ID NO: 3675075 - RNA, 14 nt, Human
uguggaaagccucu

SEQ ID NO: 3675076 - RNA, 17 nt, Human
uguggaaagccucugcu

SEQ ID NO: 3675077 - RNA, 19 nt, Human
uguggaaaguguaaagcau

SEQ ID NO: 3675078 - RNA, 14 nt, Human
uguggaagcaaaaa

SEQ ID NO: 3675079 - RNA, 15 nt, Human
uguggaagggacuag

SEQ ID NO: 3675080 - RNA, 18 nt, Human
uguggaagggacuaggag

SEQ ID NO: 3675081 - RNA, 20 nt, Human
uguggaaguguguguggcag

SEQ ID NO: 3675082 - RNA, 21 nt, Human
ugggagcuccucuccuggagg

SEQ ID NO: 3675083 - RNA, 23 nt, Human
ugggagcuccucuccuggaggau

SEQ ID NO: 3675084 - RNA, 20 nt, Human
ugggagcugaggccacacuc

SEQ ID NO: 3675085 - RNA, 22 nt, Human
ugggagcugaggccacacucag

SEQ ID NO: 3675086 - RNA, 12 nt, Human
ugggagcugccu

SEQ ID NO: 3675087 - RNA, 14 nt, Human
ugggagcugccugu

SEQ ID NO: 3675088 - RNA, 21 nt, Human
ugggagcugccuguucagcuc

SEQ ID NO: 3675089 - RNA, 20 nt, Human
ugggagcugguuagaaaugc

SEQ ID NO: 3675090 - RNA, 20 nt, Human
ugggagcuugauucucagca

SEQ ID NO: 3675091 - RNA, 12 nt, Human
ugggaggaaaag

SEQ ID NO: 3675092 - RNA, 18 nt, Human
ugggaggaagcagaauaa

SEQ ID NO: 3675093 - RNA, 21 nt, Human
ugggaggaagcagaauaaagc

SEQ ID NO: 3675094 - RNA, 24 nt, Human
ugggaggaagcagguugaggggcu

SEQ ID NO: 3675095 - RNA, 17 nt, Human
ugggaggagggcaggca

SEQ ID NO: 3675096 - RNA, 16 nt, Human
ugggaggaucucuuga

SEQ ID NO: 3675097 - RNA, 20 nt, Human
ugggaggaucucuugagccu

SEQ ID NO: 3675098 - RNA, 18 nt, Human
ugggaggauugcuugagc

SEQ ID NO: 3675099 - RNA, 18 nt, Human
ugggaggcauggcccugg

SEQ ID NO: 3675100 - RNA, 16 nt, Human
ugggaggccccacugg

SEQ ID NO: 3675101 - RNA, 20 nt, Human
ugggaggccccuucucuccc

SEQ ID NO: 3675102 - RNA, 17 nt, Human
ugggaggcgggagugga

SEQ ID NO: 3675103 - RNA, 14 nt, Human
ugggaggcuccccu

SEQ ID NO: 3675104 - RNA, 15 nt, Human
ugggaggcuccccuu

SEQ ID NO: 3675105 - RNA, 17 nt, Human
ugggaggcuccuguuag

SEQ ID NO: 3675106 - RNA, 15 nt, Human
ugggaggcugaggcg

SEQ ID NO: 3675107 - RNA, 18 nt, Human
ugggagggaaaagggaag

SEQ ID NO: 3675108 - RNA, 17 nt, Human
ugggagggagcagacag

SEQ ID NO: 3675109 - RNA, 18 nt, Human
ugggagggagcagacagg

SEQ ID NO: 3675110 - RNA, 16 nt, Human
ugggagggaggcucag

SEQ ID NO: 3675111 - RNA, 17 nt, Human
ugggagggaggcucagg

SEQ ID NO: 3675112 - RNA, 14 nt, Human
ugggagggcagcag

SEQ ID NO: 3675113 - RNA, 17 nt, Human
ugggagggcagcagggc

SEQ ID NO: 3675114 - RNA, 12 nt, Human
ugggagggccca

SEQ ID NO: 3675115 - RNA, 16 nt, Human
ugggaggggcaggcug

SEQ ID NO: 3675116 - RNA, 18 nt, Human
ugggaggggcaggcugac

SEQ ID NO: 3675117 - RNA, 23 nt, Human
ugggaggggcgcccaccucccca

SEQ ID NO: 3675118 - RNA, 18 nt, Human
ugggagggggagaaaagg

SEQ ID NO: 3675119 - RNA, 24 nt, Human
ugggaggggguuggggugguugag

SEQ ID NO: 3675120 - RNA, 17 nt, Human
ugggaggucaaggcugc

SEQ ID NO: 3675121 - RNA, 20 nt, Human
ugggaggucaaggcugcagu

SEQ ID NO: 3675122 - RNA, 18 nt, Human
ugggagguggaagaaggg

SEQ ID NO: 3675123 - RNA, 20 nt, Human
ugggagguggagguugcagu

SEQ ID NO: 3675124 - RNA, 15 nt, Human
ugggagguuaaaaag

SEQ ID NO: 3675125 - RNA, 15 nt, Human
ugggagucacacagu

SEQ ID NO: 3675126 - RNA, 19 nt, Human
ugggaguccaggcacagga

SEQ ID NO: 3675127 - RNA, 15 nt, Human
ugggagugagcuggu

SEQ ID NO: 3675128 - RNA, 13 nt, Human
ugggaguguguaa

SEQ ID NO: 3675129 - RNA, 18 nt, Human
ugggaguguugagcaucu

SEQ ID NO: 3675130 - RNA, 14 nt, Human
ugggauaaaugcca

SEQ ID NO: 3675131 - RNA, 15 nt, Human
ugggauacaaccucc

SEQ ID NO: 3675132 - RNA, 20 nt, Human
ugggauacaaccucccucuu

SEQ ID NO: 3675133 - RNA, 16 nt, Human
ugggauacugcagggc

SEQ ID NO: 3675134 - RNA, 19 nt, Human
ugggaucacauguggacuu

SEQ ID NO: 3675135 - RNA, 16 nt, Human
uaaaaggaaaagcaaa

SEQ ID NO: 3675136 - RNA, 19 nt, Human
uaaaaggaagccaaagagu

SEQ ID NO: 3675137 - RNA, 15 nt, Human
uaaaaggauaguauu

SEQ ID NO: 3675138 - RNA, 23 nt, Human
uaaaaggauaguauuuuuaucca

SEQ ID NO: 3675139 - RNA, 15 nt, Human
uaaaaggccaaaccu

SEQ ID NO: 3675140 - RNA, 20 nt, Human
uaaaagggacugagaaauuu

SEQ ID NO: 3675141 - RNA, 20 nt, Human
uaaaagggauuacccaagca

SEQ ID NO: 3675142 - RNA, 17 nt, Human
uaaaagggcaaaucugc

SEQ ID NO: 3675143 - RNA, 19 nt, Human
uaaaaggggguccguggaa

SEQ ID NO: 3675144 - RNA, 21 nt, Human
uaaaagguucagggaaccguu

SEQ ID NO: 3675145 - RNA, 18 nt, Human
uaaaaguaaaaugucuuu

SEQ ID NO: 3675146 - RNA, 13 nt, Human
uaaaaguaaacau

SEQ ID NO: 3675147 - RNA, 18 nt, Human
uaaaagugaaugaaagau

SEQ ID NO: 3675148 - RNA, 17 nt, Human
uaaaagugcacaccuua

SEQ ID NO: 3675149 - RNA, 18 nt, Human
uaaaaguguccauugaaa

SEQ ID NO: 3675150 - RNA, 12 nt, Human
uaaaaguuacuu

SEQ ID NO: 3675151 - RNA, 12 nt, Human
uaaaaguucuuu

SEQ ID NO: 3675152 - RNA, 15 nt, Human
uaaaaguugugauuc

SEQ ID NO: 3675153 - RNA, 18 nt, Human
uaaaaguuucaaugugau

SEQ ID NO: 3675154 - RNA, 18 nt, Human
uaaaaguuugaaaagcaa

SEQ ID NO: 3675155 - RNA, 15 nt, Human
uaaaauaaaaugaaa

SEQ ID NO: 3675156 - RNA, 17 nt, Human
uaaaauaaaaugaaaau

SEQ ID NO: 3675157 - RNA, 19 nt, Human
uaaaauaaaaugaaaauug

SEQ ID NO: 3675158 - RNA, 15 nt, Human
uaaaauaaacaguug

SEQ ID NO: 3675159 - RNA, 13 nt, Human
uaaaauaaacuuu

SEQ ID NO: 3675160 - RNA, 15 nt, Human
uaaaauaaacuuucu

SEQ ID NO: 3675161 - RNA, 16 nt, Human
uaaaauaaacuuucuu

SEQ ID NO: 3675162 - RNA, 22 nt, Human
uaaaauaaaguauauauagaau

SEQ ID NO: 3675163 - RNA, 13 nt, Human
uaaaauaaauggu

SEQ ID NO: 3675164 - RNA, 19 nt, Human
uaaaauaacagauuucuca

SEQ ID NO: 3675165 - RNA, 17 nt, Human
uaaaauaacuaaaaugu

SEQ ID NO: 3675166 - RNA, 19 nt, Human
uaaaauaacuaaaauguau

SEQ ID NO: 3675167 - RNA, 24 nt, Human
uaaaauaacuaguguugcuuggac

SEQ ID NO: 3675168 - RNA, 20 nt, Human
uaaaauaagcacugugcuaa

SEQ ID NO: 3675169 - RNA, 22 nt, Human
uaaaauaaggauuuuucucuua

SEQ ID NO: 3675170 - RNA, 12 nt, Human
uaaaauaauaaa

SEQ ID NO: 3675171 - RNA, 18 nt, Human
uaaaauaauuucucuaca

SEQ ID NO: 3675172 - RNA, 22 nt, Human
uaaaauaauuuuaucucuuucu

SEQ ID NO: 3675173 - RNA, 15 nt, Human
uaaaauaauuuugua

SEQ ID NO: 3675174 - RNA, 18 nt, Human
uaaaauacaagacugcca

SEQ ID NO: 3675175 - RNA, 16 nt, Human
uaaaauacagaauaca

SEQ ID NO: 3675176 - RNA, 15 nt, Human
uaaaauacauuuaaa

SEQ ID NO: 3675177 - RNA, 16 nt, Human
uaaaauacauuuaaaa

SEQ ID NO: 3675178 - RNA, 18 nt, Human
uaaaauacauuuaaaacu

SEQ ID NO: 3675179 - RNA, 22 nt, Human
uaaaauaccagccaguaaaugg

SEQ ID NO: 3675180 - RNA, 12 nt, Human
uaaaauacuauu

SEQ ID NO: 3675181 - RNA, 14 nt, Human
uaaaauacuguaga

SEQ ID NO: 3675182 - RNA, 13 nt, Human
uaaaauacuucuu

SEQ ID NO: 3675183 - RNA, 22 nt, Human
uaaaauacuucuuuuuacaaug

SEQ ID NO: 3675184 - RNA, 19 nt, Human
uaaaauacuuuuacucugc

SEQ ID NO: 3675185 - RNA, 20 nt, Human
uaaaauacuuuuacucugcc

SEQ ID NO: 3675186 - RNA, 17 nt, Human
uaaaauagaaauaagug

SEQ ID NO: 3675187 - RNA, 22 nt, Human
uaaaauagaaauuuuguaagaa

SEQ ID NO: 3675188 - RNA, 21 nt, Human
uaaaauagaguguaguuuaca

SEQ ID NO: 3675189 - RNA, 20 nt, Human
uaaaauagauaaauaaauau

SEQ ID NO: 3675190 - RNA, 16 nt, Human
uaaaauagauauaaau

SEQ ID NO: 3675191 - RNA, 22 nt, Human
uaaaauagcaaaagaagaaguu

SEQ ID NO: 3675192 - RNA, 14 nt, Human
uaaaauagcuugua

SEQ ID NO: 3675193 - RNA, 18 nt, Human
uaaaauagcuuguauagu

SEQ ID NO: 3675194 - RNA, 14 nt, Human
uaaaauauaaacaa

SEQ ID NO: 3675195 - RNA, 16 nt, Human
uaaaauauaauuguuu

SEQ ID NO: 3675196 - RNA, 18 nt, Human
uaaaauaucauucagcaa

SEQ ID NO: 3675197 - RNA, 14 nt, Human
uaaaauaucuacau

SEQ ID NO: 3675198 - RNA, 13 nt, Human
uaaaauaugcacu

SEQ ID NO: 3675199 - RNA, 14 nt, Human
uaaaauauggcuau

SEQ ID NO: 3675200 - RNA, 13 nt, Human
uaaaauauuccug

SEQ ID NO: 3675201 - RNA, 23 nt, Human
uaaaauauuguugaacacuugaa

SEQ ID NO: 3675202 - RNA, 15 nt, Human
uaaaauauuuaucug

SEQ ID NO: 3675203 - RNA, 17 nt, Human
uaaaauauuuaugaaga

SEQ ID NO: 3675204 - RNA, 18 nt, Human
uaaaauauuuaugaagaa

SEQ ID NO: 3675205 - RNA, 18 nt, Human
uaaaauauuuucugugug

SEQ ID NO: 3675206 - RNA, 22 nt, Human
uaaaauauuuucuguguguucc

SEQ ID NO: 3675207 - RNA, 17 nt, Human
uaaaaucaaaacaagug

SEQ ID NO: 3675208 - RNA, 19 nt, Human
uaaaaucaauuuuuaggaa

SEQ ID NO: 3675209 - RNA, 16 nt, Human
uaaaaucacuaacauu

SEQ ID NO: 3675210 - RNA, 19 nt, Human
uaaaaucacuaacauuaua

SEQ ID NO: 3675211 - RNA, 16 nt, Human
uaaaaucauaaguauu

SEQ ID NO: 3675212 - RNA, 15 nt, Human
uaaaauccauacauu

SEQ ID NO: 3675213 - RNA, 19 nt, Human
uaaaauccauacauuugug

SEQ ID NO: 3675214 - RNA, 17 nt, Human
uaaaauccuaagacaca

SEQ ID NO: 3675215 - RNA, 16 nt, Human
uaaaaucuauucugug

SEQ ID NO: 3675216 - RNA, 15 nt, Human
uaaaaucuccuaaau

SEQ ID NO: 3675217 - RNA, 17 nt, Human
uaaaaucugagggaaau

SEQ ID NO: 3675218 - RNA, 23 nt, Human
uaaaaucugauauguauuguuug

SEQ ID NO: 3675219 - RNA, 21 nt, Human
uaaaaucugcuuguauuccaa

SEQ ID NO: 3675220 - RNA, 13 nt, Human
uaaaaucugucac

SEQ ID NO: 3675221 - RNA, 17 nt, Human
uaaaaucuuauaguucu

SEQ ID NO: 3675222 - RNA, 18 nt, Human
uaaaaucuuauaguucua

SEQ ID NO: 3675223 - RNA, 14 nt, Human
uaaaaucuuauuaa

SEQ ID NO: 3675224 - RNA, 17 nt, Human
uaaaaucuuauuaaagu

SEQ ID NO: 3675225 - RNA, 22 nt, Human
uaaaaucuuauuaaaguuucaa

SEQ ID NO: 3675226 - RNA, 23 nt, Human
uaaaaucuuauuaaaguuucaaa

SEQ ID NO: 3675227 - RNA, 11 nt, Human
uaaaaucuugu

SEQ ID NO: 3675228 - RNA, 12 nt, Human
uaaaaucuuguc

SEQ ID NO: 3675229 - RNA, 18 nt, Human
uaaaaucuugucaugugu

SEQ ID NO: 3675230 - RNA, 21 nt, Human
uaaaaucuugucauguguaua

SEQ ID NO: 3675231 - RNA, 20 nt, Human
uaaaaucuuucuuucuuaga

SEQ ID NO: 3675232 - RNA, 21 nt, Human
uaaaaucuuucuuucuuagaa

SEQ ID NO: 3675233 - RNA, 17 nt, Human
uaaaaugacaaucaugu

SEQ ID NO: 3675234 - RNA, 19 nt, Human
uaaaaugacaaucaugugu

SEQ ID NO: 3675235 - RNA, 20 nt, Human
uaaaaugacuacuuagcauc

SEQ ID NO: 3675236 - RNA, 17 nt, Human
uaaaaugaggacauguu

SEQ ID NO: 3675237 - RNA, 15 nt, Human
uaaaaugauugaaaa

SEQ ID NO: 3675238 - RNA, 15 nt, Human
uaaaaugauuguaaa

SEQ ID NO: 3675239 - RNA, 20 nt, Human
uaaaaugauuguaaaauagc

SEQ ID NO: 3675240 - RNA, 17 nt, Human
uaaaaugauuuuaucug

SEQ ID NO: 3675241 - RNA, 17 nt, Human
uaaaaugcaaaaaaucu

SEQ ID NO: 3675242 - RNA, 17 nt, Human
uaaaaugcaacaugugu

SEQ ID NO: 3675243 - RNA, 18 nt, Human
uaaaaugcaacaugugua

SEQ ID NO: 3675244 - RNA, 20 nt, Human
uaaaaugcaacauguguacu

SEQ ID NO: 3675245 - RNA, 16 nt, Human
uaaaaugcaauauuug

SEQ ID NO: 3675246 - RNA, 14 nt, Human
uaaaaugcuagguu

SEQ ID NO: 3675247 - RNA, 18 nt, Human
ugggccauagcuccugcu

SEQ ID NO: 3675248 - RNA, 17 nt, Human
ugggccauguccaaaga

SEQ ID NO: 3675249 - RNA, 24 nt, Human
ugggccauguccaaagaggcugcc

SEQ ID NO: 3675250 - RNA, 18 nt, Human
ugggcccaacccugucug

SEQ ID NO: 3675251 - RNA, 23 nt, Human
ugggcccaagacagaugccccag

SEQ ID NO: 3675252 - RNA, 18 nt, Human
ugggcccacaaaggcaaa

SEQ ID NO: 3675253 - RNA, 19 nt, Human
ugggcccacccaagcagga

SEQ ID NO: 3675254 - RNA, 18 nt, Human
ugggcccagaggcacagc

SEQ ID NO: 3675255 - RNA, 14 nt, Human
ugggcccagaucug

SEQ ID NO: 3675256 - RNA, 13 nt, Human
ugggcccagcugg

SEQ ID NO: 3675257 - RNA, 20 nt, Human
ugggcccagcugggcucugc

SEQ ID NO: 3675258 - RNA, 22 nt, Human
ugggcccagcugggcucugcca

SEQ ID NO: 3675259 - RNA, 20 nt, Human
ugggcccaggaccagcuggg

SEQ ID NO: 3675260 - RNA, 23 nt, Human
ugggcccaggaccagcuggggcg

SEQ ID NO: 3675261 - RNA, 13 nt, Human
ugggcccagggac

SEQ ID NO: 3675262 - RNA, 13 nt, Human
ugggccccagccc

SEQ ID NO: 3675263 - RNA, 12 nt, Human
ugggccccagcu

SEQ ID NO: 3675264 - RNA, 18 nt, Human
ugggccccaguuguauuu

SEQ ID NO: 3675265 - RNA, 19 nt, Human
ugggccccauguuaacccc

SEQ ID NO: 3675266 - RNA, 13 nt, Human
ugggccccucccu

SEQ ID NO: 3675267 - RNA, 16 nt, Human
ugggccccucccuacc

SEQ ID NO: 3675268 - RNA, 14 nt, Human
ugggccccucugac

SEQ ID NO: 3675269 - RNA, 19 nt, Human
ugggccccugccucucugc

SEQ ID NO: 3675270 - RNA, 20 nt, Human
ugggccccugccucucugca

SEQ ID NO: 3675271 - RNA, 21 nt, Human
ugggccccugccucucugcag

SEQ ID NO: 3675272 - RNA, 12 nt, Human
ugggccccuggc

SEQ ID NO: 3675273 - RNA, 16 nt, Human
ugggcccucugguuug

SEQ ID NO: 3675274 - RNA, 11 nt, Human
ugggcccugca

SEQ ID NO: 3675275 - RNA, 16 nt, Human
ugggcccugggcugga

SEQ ID NO: 3675276 - RNA, 14 nt, Human
ugggcccuggggcc

SEQ ID NO: 3675277 - RNA, 22 nt, Human
ugggcccuggggccuguacugc

SEQ ID NO: 3675278 - RNA, 22 nt, Human
ugggccuauggagagcccuggg

SEQ ID NO: 3675279 - RNA, 20 nt, Human
ugggccuccucacaacaugg

SEQ ID NO: 3675280 - RNA, 15 nt, Human
uguuuacaagaaaaa

SEQ ID NO: 3675281 - RNA, 16 nt, Human
uguuuacacucuuugu

SEQ ID NO: 3675282 - RNA, 22 nt, Human
uguuuacagauaauuaccuacu

SEQ ID NO: 3675283 - RNA, 20 nt, Human
uguuuacagggagccuccug

SEQ ID NO: 3675284 - RNA, 21 nt, Human
uguuuacagggagccuccugc

SEQ ID NO: 3675285 - RNA, 12 nt, Human
uguuuacagugu

SEQ ID NO: 3675286 - RNA, 12 nt, Human
uguuuacauauc

SEQ ID NO: 3675287 - RNA, 14 nt, Human
uguuuacaucaguu

SEQ ID NO: 3675288 - RNA, 16 nt, Human
uguuuacaugcuuauu

SEQ ID NO: 3675289 - RNA, 22 nt, Human
uguuuacaugcuuauuccauga

SEQ ID NO: 3675290 - RNA, 22 nt, Human
uguuuacauuugaugcaugucu

SEQ ID NO: 3675291 - RNA, 16 nt, Human
uguuuaccuuucucuc

SEQ ID NO: 3675292 - RNA, 19 nt, Human
uguuuacuagggaucccuc

SEQ ID NO: 3675293 - RNA, 17 nt, Human
uguuuacuuaaagauuu

SEQ ID NO: 3675294 - RNA, 17 nt, Human
uguuuacuuuaaacuug

SEQ ID NO: 3675295 - RNA, 18 nt, Human
uguuuacuuuaaacuugu

SEQ ID NO: 3675296 - RNA, 12 nt, Human
uguuuagaauug

SEQ ID NO: 3675297 - RNA, 15 nt, Human
uguuuagaauugaag

SEQ ID NO: 3675298 - RNA, 13 nt, Human
uguuuagacuuua

SEQ ID NO: 3675299 - RNA, 20 nt, Human
uguuuagaugaaugucaguu

SEQ ID NO: 3675300 - RNA, 15 nt, Human
uguuuagauuuugug

SEQ ID NO: 3675301 - RNA, 20 nt, Human
uguuuagauuuuguguuuau

SEQ ID NO: 3675302 - RNA, 17 nt, Human
uguuuagucuugucuca

SEQ ID NO: 3675303 - RNA, 20 nt, Human
uaaagccugaguuugcuuuc

SEQ ID NO: 3675304 - RNA, 16 nt, Human
uaaagccugcuuuuua

SEQ ID NO: 3675305 - RNA, 21 nt, Human
uaaagccuuuaguaucagugu

SEQ ID NO: 3675306 - RNA, 15 nt, Human
uaaagcuaaaauaaa

SEQ ID NO: 3675307 - RNA, 23 nt, Human
uaaagcuaaaaugauuuuaucug

SEQ ID NO: 3675308 - RNA, 15 nt, Human
uaaagcucaaaugaa

SEQ ID NO: 3675309 - RNA, 18 nt, Human
uaaagcucaaaugaaaug

SEQ ID NO: 3675310 - RNA, 20 nt, Human
uaaagcucaaaugaaaugua

SEQ ID NO: 3675311 - RNA, 18 nt, Human
uaaagcucgaaaacaauu

SEQ ID NO: 3675312 - RNA, 14 nt, Human
uaaagcucugacau

SEQ ID NO: 3675313 - RNA, 17 nt, Human
uaaagcugccuguaguu

SEQ ID NO: 3675314 - RNA, 16 nt, Human
uaaagcuuauccauaa

SEQ ID NO: 3675315 - RNA, 20 nt, Human
uaaagcuuguugacucagcu

SEQ ID NO: 3675316 - RNA, 14 nt, Human
uaaaggaaaagaca

SEQ ID NO: 3675317 - RNA, 17 nt, Human
uaaaggagaaggcauga

SEQ ID NO: 3675318 - RNA, 15 nt, Human
uaaaggaguuuaugu

SEQ ID NO: 3675319 - RNA, 16 nt, Human
uaaaggaugugauugu

SEQ ID NO: 3675320 - RNA, 22 nt, Human
uaaaggaugugauuguggaaug

SEQ ID NO: 3675321 - RNA, 17 nt, Human
uaaaggcuaccuuugua

SEQ ID NO: 3675322 - RNA, 17 nt, Human
uaaaggcucgauuuugu

SEQ ID NO: 3675323 - RNA, 15 nt, Human
uaaaggcuucucucu

SEQ ID NO: 3675324 - RNA, 17 nt, Human
uaaaggcuucucucuca

SEQ ID NO: 3675325 - RNA, 21 nt, Human
uaaagggaaaggauucaugug

SEQ ID NO: 3675326 - RNA, 14 nt, Human
uaaagggaagaaaa

SEQ ID NO: 3675327 - RNA, 17 nt, Human
uaaagggcaaauaauga

SEQ ID NO: 3675328 - RNA, 19 nt, Human
uaaagggcccaaugaauua

SEQ ID NO: 3675329 - RNA, 21 nt, Human
uaaagggcccaaugaauuauu

SEQ ID NO: 3675330 - RNA, 15 nt, Human
uaaagggccugccug

SEQ ID NO: 3675331 - RNA, 16 nt, Human
uaaagggccugccugg

SEQ ID NO: 3675332 - RNA, 13 nt, Human
uaaagguggauuu

SEQ ID NO: 3675333 - RNA, 22 nt, Human
uaaaggugguauguguguguau

SEQ ID NO: 3675334 - RNA, 21 nt, Human
uaaagguggugaggcaauaaa

SEQ ID NO: 3675335 - RNA, 19 nt, Human
uaaaggugucuuccuccca

SEQ ID NO: 3675336 - RNA, 22 nt, Human
uaaagguucaugcaaacuuuau

SEQ ID NO: 3675337 - RNA, 20 nt, Human
uaaagguugacaauaaaugu

SEQ ID NO: 3675338 - RNA, 15 nt, Human
uaaagguuuauuuuu

SEQ ID NO: 3675339 - RNA, 21 nt, Human
uaaagguuuauuuuucuguua

SEQ ID NO: 3675340 - RNA, 13 nt, Human
uaaaguaaagcua

SEQ ID NO: 3675341 - RNA, 13 nt, Human
uaaaguaauuggu

SEQ ID NO: 3675342 - RNA, 21 nt, Human
uaaaguagauuagaucuuuua

SEQ ID NO: 3675343 - RNA, 19 nt, Human
uaaaguaguaaaaauuaaa

SEQ ID NO: 3675344 - RNA, 17 nt, Human
uaaaguaguccugugaa

SEQ ID NO: 3675345 - RNA, 15 nt, Human
uaaaguauaauguuu

SEQ ID NO: 3675346 - RNA, 20 nt, Human
uaaaguauagagagaaguuc

SEQ ID NO: 3675347 - RNA, 14 nt, Human
uaaaguauauauuu

SEQ ID NO: 3675348 - RNA, 19 nt, Human
uaaaguaugguauugaaac

SEQ ID NO: 3675349 - RNA, 22 nt, Human
uaaaguauguaaaguauguaaa

SEQ ID NO: 3675350 - RNA, 14 nt, Human
uaaaguauuccacc

SEQ ID NO: 3675351 - RNA, 18 nt, Human
uaaaguauucuucucuuc

SEQ ID NO: 3675352 - RNA, 12 nt, Human
uaaaguauuuaa

SEQ ID NO: 3675353 - RNA, 19 nt, Human
uaaaguauuuggguuuugu

SEQ ID NO: 3675354 - RNA, 12 nt, Human
uaaaguauuuuu

SEQ ID NO: 3675355 - RNA, 21 nt, Human
uaaaguauuuuuauaaauaua

SEQ ID NO: 3675356 - RNA, 23 nt, Human
uaaaguauuuuuauaaauauaag

SEQ ID NO: 3675357 - RNA, 15 nt, Human
uaaagucagaaguuu

SEQ ID NO: 3675358 - RNA, 17 nt, Human
uaaagucagauggaaaa

SEQ ID NO: 3675359 - RNA, 23 nt, Human
uaaagucauggucauugcaggaa

SEQ ID NO: 3675360 - RNA, 20 nt, Human
uaaagucgagcuuuucuaaa

SEQ ID NO: 3675361 - RNA, 19 nt, Human
uaaagugacuaauggcaug

SEQ ID NO: 3675362 - RNA, 17 nt, Human
uaaagugagaaaacugu

SEQ ID NO: 3675363 - RNA, 19 nt, Human
uaaagugaggccacugaag

SEQ ID NO: 3675364 - RNA, 16 nt, Human
uaaagugauaauuucu

SEQ ID NO: 3675365 - RNA, 16 nt, Human
uaaagugauuaaacgu

SEQ ID NO: 3675366 - RNA, 15 nt, Human
uaaagugccaguauu

SEQ ID NO: 3675367 - RNA, 23 nt, Human
uaaagugccaguauuuuaaaaua

SEQ ID NO: 3675368 - RNA, 16 nt, Human
uaaagugcuaagguuc

SEQ ID NO: 3675369 - RNA, 21 nt, Human
uaaagugcuaagguucuaagg

SEQ ID NO: 3675370 - RNA, 11 nt, Human
uaaagugcuug

SEQ ID NO: 3675371 - RNA, 13 nt, Human
uaaaguguaacau

SEQ ID NO: 3675372 - RNA, 16 nt, Human
uaaaguguaauaauau

SEQ ID NO: 3675373 - RNA, 18 nt, Human
uaaaguguauuauaacag

SEQ ID NO: 3675374 - RNA, 22 nt, Human
uaaaguguccauugacauguac

SEQ ID NO: 3675375 - RNA, 23 nt, Human
uaaaguguccauugacauguaca

SEQ ID NO: 3675376 - RNA, 18 nt, Human
uaaaguguggucccaaca

SEQ ID NO: 3675377 - RNA, 17 nt, Human
uaaaguguguuguugcu

SEQ ID NO: 3675378 - RNA, 18 nt, Human
uaaaguguuucuguuauu

SEQ ID NO: 3675379 - RNA, 16 nt, Human
uaaaguguuuucagag

SEQ ID NO: 3675380 - RNA, 16 nt, Human
uaaaguuagaaucuau

SEQ ID NO: 3675381 - RNA, 20 nt, Human
uaaaguuagaaucuauuuuc

SEQ ID NO: 3675382 - RNA, 20 nt, Human
uaaaguuagucuacucuuaa

SEQ ID NO: 3675383 - RNA, 18 nt, Human
uaaaguucaacauguuau

SEQ ID NO: 3675384 - RNA, 16 nt, Human
uaaaguucuaagauuc

SEQ ID NO: 3675385 - RNA, 19 nt, Human
uaaaguucuaagauucuga

SEQ ID NO: 3675386 - RNA, 14 nt, Human
uaaaguucugugua

SEQ ID NO: 3675387 - RNA, 20 nt, Human
uaaaguugaagcuaagauuu

SEQ ID NO: 3675388 - RNA, 14 nt, Human
uaaaguugaauuua

SEQ ID NO: 3675389 - RNA, 20 nt, Human
uaaaguugauaaagauuuuu

SEQ ID NO: 3675390 - RNA, 18 nt, Human
uaaaguuggaauuuacca

SEQ ID NO: 3675391 - RNA, 13 nt, Human
uaaaguuguacuu

SEQ ID NO: 3675392 - RNA, 22 nt, Human
uaaaguuguacuuuaaaaauuu

SEQ ID NO: 3675393 - RNA, 18 nt, Human
uaaaguuguuugugccuu

SEQ ID NO: 3675394 - RNA, 13 nt, Human
uaaaguuuacagu

SEQ ID NO: 3675395 - RNA, 23 nt, Human
uaaaguuuacaguaaauaaauug

SEQ ID NO: 3675396 - RNA, 20 nt, Human
uaaaguuucaaaaaucugaa

SEQ ID NO: 3675397 - RNA, 14 nt, Human
uaaaguuucucaga

SEQ ID NO: 3675398 - RNA, 21 nt, Human
uaaaguuugcuuguuucuugg

SEQ ID NO: 3675399 - RNA, 14 nt, Human
uaaaguuuuauaua

SEQ ID NO: 3675400 - RNA, 21 nt, Human
uaaauaaaaaauaauaauaca

SEQ ID NO: 3675401 - RNA, 22 nt, Human
uaaauaaaaaauaauaauacaa

SEQ ID NO: 3675402 - RNA, 14 nt, Human
uaaauaaaaacuaa

SEQ ID NO: 3675403 - RNA, 22 nt, Human
uaaauaaaacauuuucacacaa

SEQ ID NO: 3675404 - RNA, 21 nt, Human
uaaauaaaacuuaaaucucac

SEQ ID NO: 3675405 - RNA, 13 nt, Human
uaaauaaaagaaa

SEQ ID NO: 3675406 - RNA, 15 nt, Human
uaaauaaaagcagca

SEQ ID NO: 3675407 - RNA, 17 nt, Human
uaaauaaaagugaucaa

SEQ ID NO: 3675408 - RNA, 13 nt, Human
uaaauaaaaugac

SEQ ID NO: 3675409 - RNA, 20 nt, Human
uaaauaaaaugcuagguucu

SEQ ID NO: 3675410 - RNA, 23 nt, Human
uaaauaaaaugcuagguucuacc

SEQ ID NO: 3675411 - RNA, 20 nt, Human
uaaauaaaauuuguugcaua

SEQ ID NO: 3675412 - RNA, 20 nt, Human
uaaauaaacacauagauuca

SEQ ID NO: 3675413 - RNA, 12 nt, Human
uaaauaaacuuu

SEQ ID NO: 3675414 - RNA, 13 nt, Human
uaaauaaacuuuu

SEQ ID NO: 3675415 - RNA, 18 nt, Human
uaaauaaacuuuuuuuca

SEQ ID NO: 3675416 - RNA, 19 nt, Human
uaaauaaacuuuuuuucaa

SEQ ID NO: 3675417 - RNA, 21 nt, Human
uaaauaaacuuuuuuucaaug

SEQ ID NO: 3675418 - RNA, 14 nt, Human
uaaauaaaguauca

SEQ ID NO: 3675419 - RNA, 15 nt, Human
uaaauaaauauauau

SEQ ID NO: 3675420 - RNA, 16 nt, Human
uaaauaaaugucauua

SEQ ID NO: 3675421 - RNA, 21 nt, Human
uaaauaaauuguauauucacu

SEQ ID NO: 3675422 - RNA, 15 nt, Human
uaaauaaauuguuug

SEQ ID NO: 3675423 - RNA, 13 nt, Human
uaaauaaauuuga

SEQ ID NO: 3675424 - RNA, 20 nt, Human
ugguuugggaauauccaugu

SEQ ID NO: 3675425 - RNA, 22 nt, Human
ugguuuggggcgaggcagagga

SEQ ID NO: 3675426 - RNA, 21 nt, Human
ugguuuguaaauuaacuuuua

SEQ ID NO: 3675427 - RNA, 16 nt, Human
ugguuuuaaaauacug

SEQ ID NO: 3675428 - RNA, 13 nt, Human
ugguuuuagauuu

SEQ ID NO: 3675429 - RNA, 15 nt, Human
ugguuuucaaaauaa

SEQ ID NO: 3675430 - RNA, 20 nt, Human
ugguuuucaaccucuagaau

SEQ ID NO: 3675431 - RNA, 18 nt, Human
ugguuuuccccucccugg

SEQ ID NO: 3675432 - RNA, 20 nt, Human
ugguuuuccccucccugggu

SEQ ID NO: 3675433 - RNA, 13 nt, Human
ugguuuucugcca

SEQ ID NO: 3675434 - RNA, 21 nt, Human
ugguuuucugccaaugaccaa

SEQ ID NO: 3675435 - RNA, 18 nt, Human
ugguuuuguaagaugcug

SEQ ID NO: 3675436 - RNA, 18 nt, Human
ugguuuugugccaucugu

SEQ ID NO: 3675437 - RNA, 21 nt, Human
ugguuuuuaaaaaacugcuga

SEQ ID NO: 3675438 - RNA, 20 nt, Human
ugguuuuuacugcucugaga

SEQ ID NO: 3675439 - RNA, 19 nt, Human
ugguuuuuauuucuccuuu

SEQ ID NO: 3675440 - RNA, 19 nt, Human
ugguuuuucuuuucuugga

SEQ ID NO: 3675441 - RNA, 10 nt, Human
ugguuuuuuu

SEQ ID NO: 3675442 - RNA, 22 nt, Human
ugguuuuuuuuuuuuuuuuggc

SEQ ID NO: 3675443 - RNA, 20 nt, Human
uguaaaaaaaaaaaaguuau

SEQ ID NO: 3675444 - RNA, 22 nt, Human
uguaaaaaaaaaaaaguuauau

SEQ ID NO: 3675445 - RNA, 23 nt, Human
uguaaaaaaaccaccaaaaacaa

SEQ ID NO: 3675446 - RNA, 14 nt, Human
uguaaaaacacuga

SEQ ID NO: 3675447 - RNA, 16 nt, Human
uguaaaaacacugaaa

SEQ ID NO: 3675448 - RNA, 24 nt, Human
uguaaaaacagcauugcuuucuga

SEQ ID NO: 3675449 - RNA, 12 nt, Human
uguaaaaaucuu

SEQ ID NO: 3675450 - RNA, 20 nt, Human
uguaaaaauuggucacccua

SEQ ID NO: 3675451 - RNA, 11 nt, Human
uguaaaacaaa

SEQ ID NO: 3675452 - RNA, 16 nt, Human
uguaaaacgcugucaa

SEQ ID NO: 3675453 - RNA, 16 nt, Human
uguaaaacugaggcac

SEQ ID NO: 3675454 - RNA, 22 nt, Human
uguaaaagcaacaucagcuuga

SEQ ID NO: 3675455 - RNA, 18 nt, Human
uguaaaagcauuuuguaa

SEQ ID NO: 3675456 - RNA, 19 nt, Human
uguaaaagcauuuuguaau

SEQ ID NO: 3675457 - RNA, 14 nt, Human
uguaaaauaaaauu

SEQ ID NO: 3675458 - RNA, 16 nt, Human
uguaaaauaauucuga

SEQ ID NO: 3675459 - RNA, 12 nt, Human
uguaaaauagcu

SEQ ID NO: 3675460 - RNA, 18 nt, Human
uguaaaauauacuuaaau

SEQ ID NO: 3675461 - RNA, 13 nt, Human
uaaauaguauuuc

SEQ ID NO: 3675462 - RNA, 12 nt, Human
uaaauaguguua

SEQ ID NO: 3675463 - RNA, 15 nt, Human
uaaauaguguuauug

SEQ ID NO: 3675464 - RNA, 19 nt, Human
uaaauaguguuauugagag

SEQ ID NO: 3675465 - RNA, 13 nt, Human
uaaauauaaagac

SEQ ID NO: 3675466 - RNA, 14 nt, Human
uaaauauaaagacg

SEQ ID NO: 3675467 - RNA, 18 nt, Human
uaaauauaauucuguaaa

SEQ ID NO: 3675468 - RNA, 17 nt, Human
uaaauauaccacucuuu

SEQ ID NO: 3675469 - RNA, 16 nt, Human
uaaauauaguuccuaa

SEQ ID NO: 3675470 - RNA, 19 nt, Human
uaaauauaguuccuaagaa

SEQ ID NO: 3675471 - RNA, 15 nt, Human
uaaauauauauaaag

SEQ ID NO: 3675472 - RNA, 19 nt, Human
uaaauauauauaaauauau

SEQ ID NO: 3675473 - RNA, 21 nt, Human
uaaauauauauauauauaaaa

SEQ ID NO: 3675474 - RNA, 14 nt, Human
uaaauauaucuacc

SEQ ID NO: 3675475 - RNA, 18 nt, Human
uaaauauaugcuaagucu

SEQ ID NO: 3675476 - RNA, 18 nt, Human
uaaauaucuuuuauguuu

SEQ ID NO: 3675477 - RNA, 22 nt, Human
uaaauaugaacccuuuguuucu

SEQ ID NO: 3675478 - RNA, 22 nt, Human
uaaauaugaaucugcucacuuu

SEQ ID NO: 3675479 - RNA, 13 nt, Human
uaaauaugcagug

SEQ ID NO: 3675480 - RNA, 21 nt, Human
uaaauauggacugcucaggaa

SEQ ID NO: 3675481 - RNA, 14 nt, Human
uaaauauuaagcau

SEQ ID NO: 3675482 - RNA, 18 nt, Human
uaaauauuaguuaaugga

SEQ ID NO: 3675483 - RNA, 12 nt, Human
uaaauauugagg

SEQ ID NO: 3675484 - RNA, 13 nt, Human
uaaauauugucuu

SEQ ID NO: 3675485 - RNA, 15 nt, Human
uaaauauugucuuuu

SEQ ID NO: 3675486 - RNA, 18 nt, Human
uaaauauuuacauaugaa

SEQ ID NO: 3675487 - RNA, 17 nt, Human
uaaauauuuauguagau

SEQ ID NO: 3675488 - RNA, 14 nt, Human
uaaauauuucaaga

SEQ ID NO: 3675489 - RNA, 19 nt, Human
uaaauauuuggucucuauu

SEQ ID NO: 3675490 - RNA, 14 nt, Human
uaaauauuuuaaag

SEQ ID NO: 3675491 - RNA, 15 nt, Human
uaaauauuuuaaaga

SEQ ID NO: 3675492 - RNA, 13 nt, Human
uaaauauuuucua

SEQ ID NO: 3675493 - RNA, 14 nt, Human
uaaauauuuucuau

SEQ ID NO: 3675494 - RNA, 18 nt, Human
uaaauauuuugacuuguu

SEQ ID NO: 3675495 - RNA, 19 nt, Human
uaaauauuuugacuuguug

SEQ ID NO: 3675496 - RNA, 13 nt, Human
uaaaucaauaaag

SEQ ID NO: 3675497 - RNA, 20 nt, Human
uaaaucauauauaauaaauu

SEQ ID NO: 3675498 - RNA, 14 nt, Human
uaaaucauuaauac

SEQ ID NO: 3675499 - RNA, 17 nt, Human
uaaaucauucuuacuaa

SEQ ID NO: 3675500 - RNA, 17 nt, Human
uaaaucauuuuaggaaa

SEQ ID NO: 3675501 - RNA, 20 nt, Human
uaaaucauuuuaggaaagga

SEQ ID NO: 3675502 - RNA, 21 nt, Human
uaaaucauuuuaggaaaggau

SEQ ID NO: 3675503 - RNA, 19 nt, Human
uaaaucauuuuaugucaag

SEQ ID NO: 3675504 - RNA, 14 nt, Human
uaaauccaguucua

SEQ ID NO: 3675505 - RNA, 21 nt, Human
uaaauccaucacuauaauaaa

SEQ ID NO: 3675506 - RNA, 17 nt, Human
uaaaucccauuauucaa

SEQ ID NO: 3675507 - RNA, 15 nt, Human
uaaaucccauucaua

SEQ ID NO: 3675508 - RNA, 17 nt, Human
uaaauccuuuacuguua

SEQ ID NO: 3675509 - RNA, 19 nt, Human
uaaaucuaaaucuauuuau

SEQ ID NO: 3675510 - RNA, 13 nt, Human
uaaaucuaacauu

SEQ ID NO: 3675511 - RNA, 18 nt, Human
uaaaucuaguauacauug

SEQ ID NO: 3675512 - RNA, 19 nt, Human
uaaaucuaugaaguauaua

SEQ ID NO: 3675513 - RNA, 21 nt, Human
uaaaucuaugaaguauauaau

SEQ ID NO: 3675514 - RNA, 18 nt, Human
uaaaucuauuuauuaaua

SEQ ID NO: 3675515 - RNA, 19 nt, Human
uaaaucuauuuauuaauau

SEQ ID NO: 3675516 - RNA, 18 nt, Human
uaaaucuccaaaauaaaa

SEQ ID NO: 3675517 - RNA, 20 nt, Human
uaaaucuccaaaauaaaacu

SEQ ID NO: 3675518 - RNA, 22 nt, Human
uaaaucuccaaaauaaaacuuu

SEQ ID NO: 3675519 - RNA, 18 nt, Human
uaaaucucuaauauggca

SEQ ID NO: 3675520 - RNA, 18 nt, Human
uaaaucucuucuguguuu

SEQ ID NO: 3675521 - RNA, 14 nt, Human
uaaaucugacccag

SEQ ID NO: 3675522 - RNA, 17 nt, Human
uaaaucugacccagugc

SEQ ID NO: 3675523 - RNA, 12 nt, Human
uaaaucugccac

SEQ ID NO: 3675524 - RNA, 20 nt, Human
uaaaucugcuggaguuucau

SEQ ID NO: 3675525 - RNA, 16 nt, Human
uaaaucuguaagcucu

SEQ ID NO: 3675526 - RNA, 16 nt, Human
uaaaucugugaacuug

SEQ ID NO: 3675527 - RNA, 18 nt, Human
uaaaucugugaacuugaa

SEQ ID NO: 3675528 - RNA, 12 nt, Human
uaaaucugugau

SEQ ID NO: 3675529 - RNA, 21 nt, Human
uaaaucuguucugggcucuuu

SEQ ID NO: 3675530 - RNA, 19 nt, Human
uaaaucuuaaaaaguuguu

SEQ ID NO: 3675531 - RNA, 19 nt, Human
uaaaucuuuuauaggauuu

SEQ ID NO: 3675532 - RNA, 18 nt, Human
uaaaugaaaaucgugaca

SEQ ID NO: 3675533 - RNA, 14 nt, Human
uaaaugaaauugua

SEQ ID NO: 3675534 - RNA, 16 nt, Human
uaaaugaaauuguaaa

SEQ ID NO: 3675535 - RNA, 16 nt, Human
uaaaugaacaagagaa

SEQ ID NO: 3675536 - RNA, 23 nt, Human
uaaaugaacaagagaagcauucu

SEQ ID NO: 3675537 - RNA, 22 nt, Human
uaaaugaagcagcuuuaaacaa

SEQ ID NO: 3675538 - RNA, 16 nt, Human
uaaaugaauauuuuga

SEQ ID NO: 3675539 - RNA, 12 nt, Human
uaaaugaauguu

SEQ ID NO: 3675540 - RNA, 22 nt, Human
uaaaugagcaaauaucauacug

SEQ ID NO: 3675541 - RNA, 21 nt, Human
uaaaugauguggugccugagg

SEQ ID NO: 3675542 - RNA, 20 nt, Human
uaaaugauuuaaauuuaagu

SEQ ID NO: 3675543 - RNA, 16 nt, Human
uaaaugcaaaguucug

SEQ ID NO: 3675544 - RNA, 19 nt, Human
uaaaugcaaaguucugugu

SEQ ID NO: 3675545 - RNA, 15 nt, Human
uaaaugcaauaugua

SEQ ID NO: 3675546 - RNA, 23 nt, Human
uaaaugcaccuggaauauauaac

SEQ ID NO: 3675547 - RNA, 14 nt, Human
uaaaugcagcccau

SEQ ID NO: 3675548 - RNA, 16 nt, Human
uaaaugcaguuacaaa

SEQ ID NO: 3675549 - RNA, 10 nt, Human
uaaaugcaua

SEQ ID NO: 3675550 - RNA, 11 nt, Human
uaaaugccaca

SEQ ID NO: 3675551 - RNA, 15 nt, Human
uaaaugccacacacc

SEQ ID NO: 3675552 - RNA, 15 nt, Human
uaaaugcccagcccc

SEQ ID NO: 3675553 - RNA, 12 nt, Human
uaaaugcccugc

SEQ ID NO: 3675554 - RNA, 14 nt, Human
uaaaugccuaauaa

SEQ ID NO: 3675555 - RNA, 13 nt, Human
uaaauggcuguaa

SEQ ID NO: 3675556 - RNA, 18 nt, Human
uaaaugggggugcauuug

SEQ ID NO: 3675557 - RNA, 19 nt, Human
uaaaugguaauaagcacug

SEQ ID NO: 3675558 - RNA, 17 nt, Human
uaaauggucgcccagga

SEQ ID NO: 3675559 - RNA, 20 nt, Human
uaaaugguuuggugcuuuuu

SEQ ID NO: 3675560 - RNA, 21 nt, Human
uaaaugguuuggugcuuuuua

SEQ ID NO: 3675561 - RNA, 22 nt, Human
uaaaugguuuggugcuuuuuau

SEQ ID NO: 3675562 - RNA, 16 nt, Human
uaaauguaaacucagc

SEQ ID NO: 3675563 - RNA, 13 nt, Human
uaaauguaaagau

SEQ ID NO: 3675564 - RNA, 16 nt, Human
uaaauguaaagauauu

SEQ ID NO: 3675565 - RNA, 17 nt, Human
uaaauguaaagauauuu

SEQ ID NO: 3675566 - RNA, 13 nt, Human
uaaauguaacagu

SEQ ID NO: 3675567 - RNA, 17 nt, Human
uaaauguaccugaugua

SEQ ID NO: 3675568 - RNA, 18 nt, Human
uaaauguagaguuuuuaa

SEQ ID NO: 3675569 - RNA, 22 nt, Human
uuaacucaggacuccagcccau

SEQ ID NO: 3675570 - RNA, 15 nt, Human
uuaacuccacugcuu

SEQ ID NO: 3675571 - RNA, 20 nt, Human
uuaacuccacugcuuaccua

SEQ ID NO: 3675572 - RNA, 20 nt, Human
uuaacucuuugccuuugcca

SEQ ID NO: 3675573 - RNA, 21 nt, Human
uuaacugaacaauggcccugu

SEQ ID NO: 3675574 - RNA, 17 nt, Human
uuaacugcucaguguuu

SEQ ID NO: 3675575 - RNA, 21 nt, Human
uuaacuggugcacuuuguaaa

SEQ ID NO: 3675576 - RNA, 22 nt, Human
uuaacuggugcacuuuguaaau

SEQ ID NO: 3675577 - RNA, 13 nt, Human
uuaacuuaaauag

SEQ ID NO: 3675578 - RNA, 18 nt, Human
uuaacuuaacauucugua

SEQ ID NO: 3675579 - RNA, 17 nt, Human
uuaacuuaguuuugcau

SEQ ID NO: 3675580 - RNA, 14 nt, Human
uuaacuucucugga

SEQ ID NO: 3675581 - RNA, 12 nt, Human
uuaacuucugcc

SEQ ID NO: 3675582 - RNA, 14 nt, Human
uuaacuucuugcuu

SEQ ID NO: 3675583 - RNA, 21 nt, Human
uuaacuucuugcuucuuucua

SEQ ID NO: 3675584 - RNA, 17 nt, Human
uuaacuugagcuuuaaa

SEQ ID NO: 3675585 - RNA, 22 nt, Human
uuaacuugucaaaaaacaaaaa

SEQ ID NO: 3675586 - RNA, 16 nt, Human
uuaacuuuaaguuuca

SEQ ID NO: 3675587 - RNA, 14 nt, Human
uuaacuuuaauguu

SEQ ID NO: 3675588 - RNA, 13 nt, Human
uuaacuuuaccau

SEQ ID NO: 3675589 - RNA, 14 nt, Human
uuaacuuuuauaaa

SEQ ID NO: 3675590 - RNA, 17 nt, Human
uuaagaaaaaaauaauu

SEQ ID NO: 3675591 - RNA, 20 nt, Human
uuaagaaaaaggaugcacag

SEQ ID NO: 3675592 - RNA, 21 nt, Human
uuaagaaaaaggaugcacaga

SEQ ID NO: 3675593 - RNA, 17 nt, Human
uuaagaaaauacaauaa

SEQ ID NO: 3675594 - RNA, 20 nt, Human
uuaagaaagaaauacuguau

SEQ ID NO: 3675595 - RNA, 15 nt, Human
uuaagaaauagaauu

SEQ ID NO: 3675596 - RNA, 22 nt, Human
uuaagaaaucuguuuuuguuua

SEQ ID NO: 3675597 - RNA, 20 nt, Human
uuaagaacuaaaauguucua

SEQ ID NO: 3675598 - RNA, 13 nt, Human
uuaagaagaaacu

SEQ ID NO: 3675599 - RNA, 11 nt, Human
uuaagaagcug

SEQ ID NO: 3675600 - RNA, 13 nt, Human
uuaagaagcuguu

SEQ ID NO: 3675601 - RNA, 18 nt, Human
uuaagaagcuguuguaca

SEQ ID NO: 3675602 - RNA, 22 nt, Human
uuaagaagcuguuguacauuua

SEQ ID NO: 3675603 - RNA, 14 nt, Human
uuaagaaggcaaaa

SEQ ID NO: 3675604 - RNA, 10 nt, Human
uuaagaauau

SEQ ID NO: 3675605 - RNA, 18 nt, Human
uuaagaaugaguuucuua

SEQ ID NO: 3675606 - RNA, 22 nt, Human
uuaagaaugaguuucuuagacu

SEQ ID NO: 3675607 - RNA, 15 nt, Human
uuaagaaugaucuga

SEQ ID NO: 3675608 - RNA, 23 nt, Human
uuaagacauuuuuggaaggggac

SEQ ID NO: 3675609 - RNA, 14 nt, Human
uuaagaccagccug

SEQ ID NO: 3675610 - RNA, 17 nt, Human
uuaagacguguuugugu

SEQ ID NO: 3675611 - RNA, 13 nt, Human
uuaagacuugaca

SEQ ID NO: 3675612 - RNA, 17 nt, Human
uuaagacuugacagugg

SEQ ID NO: 3675613 - RNA, 19 nt, Human
uuaagagaaacuuuauaca

SEQ ID NO: 3675614 - RNA, 23 nt, Human
uuaagagaaacuuuauacauuag

SEQ ID NO: 3675615 - RNA, 13 nt, Human
uuaagagaaaugg

SEQ ID NO: 3675616 - RNA, 15 nt, Human
uuaagagaaauggca

SEQ ID NO: 3675617 - RNA, 23 nt, Human
uuaagagcagaacagaucuuuua

SEQ ID NO: 3675618 - RNA, 16 nt, Human
uuaagagcaguccauu

SEQ ID NO: 3675619 - RNA, 15 nt, Human
uuaagaggcaggguc

SEQ ID NO: 3675620 - RNA, 13 nt, Human
uuaagaguccaag

SEQ ID NO: 3675621 - RNA, 14 nt, Human
uuaagaguccaaga

SEQ ID NO: 3675622 - RNA, 19 nt, Human
uuaagaguccaagaaucca

SEQ ID NO: 3675623 - RNA, 19 nt, Human
uuaagauaauaauauaugu

SEQ ID NO: 3675624 - RNA, 16 nt, Human
uuaagauaauuauaau

SEQ ID NO: 3675625 - RNA, 14 nt, Human
uuaagauaugaugu

SEQ ID NO: 3675626 - RNA, 12 nt, Human
uuaagauucuug

SEQ ID NO: 3675627 - RNA, 15 nt, Human
uuaagauuuaauuug

SEQ ID NO: 3675628 - RNA, 16 nt, Human
uuaagauuuuacaaaa

SEQ ID NO: 3675629 - RNA, 21 nt, Human
uuaagauuuuucucaaaguuu

SEQ ID NO: 3675630 - RNA, 22 nt, Human
uuaagauuuuucucaaaguuuu

SEQ ID NO: 3675631 - RNA, 14 nt, Human
uuaagcaacaucuu

SEQ ID NO: 3675632 - RNA, 22 nt, Human
uuaagcacuacauaaacugacu

SEQ ID NO: 3675633 - RNA, 15 nt, Human
uuaagcacucuuaaa

SEQ ID NO: 3675634 - RNA, 15 nt, Human
uuaagcagaagcauu

SEQ ID NO: 3675635 - RNA, 22 nt, Human
uuaagcagcuaaauuuucugaa

SEQ ID NO: 3675636 - RNA, 19 nt, Human
uuaagcauauauuuuuaua

SEQ ID NO: 3675637 - RNA, 15 nt, Human
uuaagcaugacagaa

SEQ ID NO: 3675638 - RNA, 19 nt, Human
uuaagcauuacucuuguaa

SEQ ID NO: 3675639 - RNA, 22 nt, Human
uuaagcauuacucuuguaagau

SEQ ID NO: 3675640 - RNA, 12 nt, Human
uuaagcauuguu

SEQ ID NO: 3675641 - RNA, 22 nt, Human
uuaagcauuguuugcuuauugu

SEQ ID NO: 3675642 - RNA, 16 nt, Human
uuaagccaaaacaaug

SEQ ID NO: 3675643 - RNA, 13 nt, Human
uuaagccacugcc

SEQ ID NO: 3675644 - RNA, 19 nt, Human
uuaagccacugccucuccc

SEQ ID NO: 3675645 - RNA, 19 nt, Human
uuaagcccacaguauauuu

SEQ ID NO: 3675646 - RNA, 20 nt, Human
uuaagcccagugcacugaaa

SEQ ID NO: 3675647 - RNA, 16 nt, Human
uuaagccuucaaaacu

SEQ ID NO: 3675648 - RNA, 18 nt, Human
uuaagccuuuguugaacu

SEQ ID NO: 3675649 - RNA, 14 nt, Human
uuaagcucugagcu

SEQ ID NO: 3675650 - RNA, 23 nt, Human
uuaagcugcagagauuucucauu

SEQ ID NO: 3675651 - RNA, 17 nt, Human
uuaagcuguggucaagg

SEQ ID NO: 3675652 - RNA, 22 nt, Human
uuaagcuuuggacccaaggaaa

SEQ ID NO: 3675653 - RNA, 14 nt, Human
uuaaggaaacucuu

SEQ ID NO: 3675654 - RNA, 13 nt, Human
uuaaggaagaaaa

SEQ ID NO: 3675655 - RNA, 21 nt, Human
uuaaggaagacaaugugaaaa

SEQ ID NO: 3675656 - RNA, 22 nt, Human
uuaaggacaaagugccaaagaa

SEQ ID NO: 3675657 - RNA, 17 nt, Human
uuaaggagaaucauguu

SEQ ID NO: 3675658 - RNA, 20 nt, Human
uuaaggagaaucauguuucu

SEQ ID NO: 3675659 - RNA, 23 nt, Human
uuaaggauaaaucauaaagucag

SEQ ID NO: 3675660 - RNA, 18 nt, Human
uuaaggaugcuuguacau

SEQ ID NO: 3675661 - RNA, 19 nt, Human
uuaaggaugcuuguacaua

SEQ ID NO: 3675662 - RNA, 23 nt, Human
uuaaggaugggguuaugaacccu

SEQ ID NO: 3675663 - RNA, 20 nt, Human
uuaaggauugugauauuuuu

SEQ ID NO: 3675664 - RNA, 15 nt, Human
uuaaggccacaucca

SEQ ID NO: 3675665 - RNA, 11 nt, Human
uuaaggccuga

SEQ ID NO: 3675666 - RNA, 16 nt, Human
uuaaggcuaaaaagua

SEQ ID NO: 3675667 - RNA, 23 nt, Human
uuaaggcugaggaaaggccagcu

SEQ ID NO: 3675668 - RNA, 14 nt, Human
uaacucagaauuau

SEQ ID NO: 3675669 - RNA, 21 nt, Human
uaacucagaucacuacugcag

SEQ ID NO: 3675670 - RNA, 15 nt, Human
uaacucaucauaaaa

SEQ ID NO: 3675671 - RNA, 16 nt, Human
uaacucaucauaaaau

SEQ ID NO: 3675672 - RNA, 15 nt, Human
uaacucaucugucac

SEQ ID NO: 3675673 - RNA, 20 nt, Human
uaacucauuuguuaaaauua

SEQ ID NO: 3675674 - RNA, 11 nt, Human
uaacuccacca

SEQ ID NO: 3675675 - RNA, 16 nt, Human
uaacuccaccaaccca

SEQ ID NO: 3675676 - RNA, 14 nt, Human
uaacuccacugcuu

SEQ ID NO: 3675677 - RNA, 21 nt, Human
uaacuccuaguagggguacca

SEQ ID NO: 3675678 - RNA, 17 nt, Human
uaacuccucaauuccaa

SEQ ID NO: 3675679 - RNA, 21 nt, Human
uaacuccucccaggguuuuaa

SEQ ID NO: 3675680 - RNA, 19 nt, Human
uaacuccugagaaauguua

SEQ ID NO: 3675681 - RNA, 17 nt, Human
uaacucuaaaagauccu

SEQ ID NO: 3675682 - RNA, 14 nt, Human
uaacucucuuuaug

SEQ ID NO: 3675683 - RNA, 15 nt, Human
uaacucugauguaaa

SEQ ID NO: 3675684 - RNA, 19 nt, Human
uaacucugauguaaaugaa

SEQ ID NO: 3675685 - RNA, 21 nt, Human
uaacucugcacuacuccucug

SEQ ID NO: 3675686 - RNA, 20 nt, Human
uaacugaaaaugugcuauac

SEQ ID NO: 3675687 - RNA, 14 nt, Human
uaacugaagagaca

SEQ ID NO: 3675688 - RNA, 19 nt, Human
uaacugaagauguugagaa

SEQ ID NO: 3675689 - RNA, 14 nt, Human
uaacugaaggagaa

SEQ ID NO: 3675690 - RNA, 16 nt, Human
uaacugaaggagaagg

SEQ ID NO: 3675691 - RNA, 16 nt, Human
uaacugaauaccacuc

SEQ ID NO: 3675692 - RNA, 21 nt, Human
uaacugaauaccacucuguaa

SEQ ID NO: 3675693 - RNA, 12 nt, Human
uaacugacaaau

SEQ ID NO: 3675694 - RNA, 15 nt, Human
uaacugacaaaucaa

SEQ ID NO: 3675695 - RNA, 17 nt, Human
uaacugacaaaucaagu

SEQ ID NO: 3675696 - RNA, 22 nt, Human
uaacugacuauucuugauguaa

SEQ ID NO: 3675697 - RNA, 18 nt, Human
uaacugacuuaguucuuc

SEQ ID NO: 3675698 - RNA, 11 nt, Human
uaacugccagg

SEQ ID NO: 3675699 - RNA, 17 nt, Human
uaacugcccaaagcagc

SEQ ID NO: 3675700 - RNA, 16 nt, Human
uaacugccuagaaaca

SEQ ID NO: 3675701 - RNA, 23 nt, Human
uaacugcucuugggcaauauucu

SEQ ID NO: 3675702 - RNA, 20 nt, Human
uaacuggaaaacagaacacu

SEQ ID NO: 3675703 - RNA, 15 nt, Human
uaacuggaaacuuca

SEQ ID NO: 3675704 - RNA, 10 nt, Human
uaacuggaac

SEQ ID NO: 3675705 - RNA, 24 nt, Human
uaacuggcaguuuuccauugguuu

SEQ ID NO: 3675706 - RNA, 19 nt, Human
uaacuggguaaugaaacaa

SEQ ID NO: 3675707 - RNA, 17 nt, Human
uaacuggugauauaucu

SEQ ID NO: 3675708 - RNA, 17 nt, Human
uaacuggugcacuuugu

SEQ ID NO: 3675709 - RNA, 22 nt, Human
uaacuggugcacuuuguaaauu

SEQ ID NO: 3675710 - RNA, 12 nt, Human
uaacuguaaauc

SEQ ID NO: 3675711 - RNA, 13 nt, Human
uaacuguacauuu

SEQ ID NO: 3675712 - RNA, 14 nt, Human
uaacuguacauuuc

SEQ ID NO: 3675713 - RNA, 12 nt, Human
uaacuguaucuu

SEQ ID NO: 3675714 - RNA, 13 nt, Human
uaagacuccucgg

SEQ ID NO: 3675715 - RNA, 23 nt, Human
uaagacuccucggccuggcuccu

SEQ ID NO: 3675716 - RNA, 15 nt, Human
uaagacuuaaugaga

SEQ ID NO: 3675717 - RNA, 17 nt, Human
uaagacuuacucuaaga

SEQ ID NO: 3675718 - RNA, 21 nt, Human
uaagacuuaguacuaucugug

SEQ ID NO: 3675719 - RNA, 14 nt, Human
uaagagaaacuuua

SEQ ID NO: 3675720 - RNA, 22 nt, Human
uaagagaaacuuuauacauuag

SEQ ID NO: 3675721 - RNA, 23 nt, Human
uaagagaaacuuuauacauuagu

SEQ ID NO: 3675722 - RNA, 18 nt, Human
uaagagaaagaaaaugaa

SEQ ID NO: 3675723 - RNA, 14 nt, Human
uaagagaauguuau

SEQ ID NO: 3675724 - RNA, 21 nt, Human
uaagagacagucaccccagga

SEQ ID NO: 3675725 - RNA, 18 nt, Human
uaagagacucagccugca

SEQ ID NO: 3675726 - RNA, 12 nt, Human
uaagagagaaau

SEQ ID NO: 3675727 - RNA, 13 nt, Human
uaagagauucuga

SEQ ID NO: 3675728 - RNA, 14 nt, Human
uaagagauucugau

SEQ ID NO: 3675729 - RNA, 15 nt, Human
uaagagauucugauu

SEQ ID NO: 3675730 - RNA, 22 nt, Human
uaagagauuggaucaaguauua

SEQ ID NO: 3675731 - RNA, 22 nt, Human
uaagagcaaaagaauggcagaa

SEQ ID NO: 3675732 - RNA, 15 nt, Human
uaagaggaaaguaca

SEQ ID NO: 3675733 - RNA, 19 nt, Human
uaagaggaaaguacauuuu

SEQ ID NO: 3675734 - RNA, 21 nt, Human
uaagaggacauaauggggucc

SEQ ID NO: 3675735 - RNA, 16 nt, Human
uaagaggaucuccugu

SEQ ID NO: 3675736 - RNA, 15 nt, Human
uaagaggaugaagug

SEQ ID NO: 3675737 - RNA, 12 nt, Human
uaagaggcaggg

SEQ ID NO: 3675738 - RNA, 22 nt, Human
uaagaggcagggucucacucug

SEQ ID NO: 3675739 - RNA, 17 nt, Human
uaagagggcacacacug

SEQ ID NO: 3675740 - RNA, 18 nt, Human
uaagagguguuauuugga

SEQ ID NO: 3675741 - RNA, 18 nt, Human
uaagagugaaaauugucu

SEQ ID NO: 3675742 - RNA, 19 nt, Human
uaagagugggggagagcag

SEQ ID NO: 3675743 - RNA, 16 nt, Human
uaagauaaaaaagcug

SEQ ID NO: 3675744 - RNA, 14 nt, Human
uaagauaaaugugc

SEQ ID NO: 3675745 - RNA, 14 nt, Human
uaagauaauaauau

SEQ ID NO: 3675746 - RNA, 15 nt, Human
uaagauaauaauaua

SEQ ID NO: 3675747 - RNA, 23 nt, Human
uaagauaauaguuuacauguagu

SEQ ID NO: 3675748 - RNA, 16 nt, Human
uaagauauacuuguuu

SEQ ID NO: 3675749 - RNA, 15 nt, Human
uaagauauuugcagu

SEQ ID NO: 3675750 - RNA, 22 nt, Human
uaagauauuugcaguuuuucau

SEQ ID NO: 3675751 - RNA, 17 nt, Human
uaagauauuuuucauga

SEQ ID NO: 3675752 - RNA, 18 nt, Human
uaagauauuuuucaugau

SEQ ID NO: 3675753 - RNA, 16 nt, Human
uaagaucacugccaga

SEQ ID NO: 3675754 - RNA, 12 nt, Human
uaagaucacugu

SEQ ID NO: 3675755 - RNA, 17 nt, Human
uaagaucacuguuuaga

SEQ ID NO: 3675756 - RNA, 19 nt, Human
uaagaucgguuaacaaaua

SEQ ID NO: 3675757 - RNA, 18 nt, Human
uaagaucguucucugccu

SEQ ID NO: 3675758 - RNA, 14 nt, Human
uaagaucuuagauu

SEQ ID NO: 3675759 - RNA, 17 nt, Human
uaagaucuuagauucuc

SEQ ID NO: 3675760 - RNA, 16 nt, Human
uaagaugacauugcua

SEQ ID NO: 3675761 - RNA, 23 nt, Human
uaagaugcuaccuugugacccag

SEQ ID NO: 3675762 - RNA, 21 nt, Human
uaagauggauucucagauauu

SEQ ID NO: 3675763 - RNA, 12 nt, Human
uaagaugucugu

SEQ ID NO: 3675764 - RNA, 14 nt, Human
uaagaugugauauu

SEQ ID NO: 3675765 - RNA, 20 nt, Human
uaagaugugauauucuaaga

SEQ ID NO: 3675766 - RNA, 21 nt, Human
uaagaugugcagcauuucacu

SEQ ID NO: 3675767 - RNA, 15 nt, Human
uaagauguguucuua

SEQ ID NO: 3675768 - RNA, 21 nt, Human
uaagauguuauauuuuucuua

SEQ ID NO: 3675769 - RNA, 22 nt, Human
uaagauuacaaaucagaaguca

SEQ ID NO: 3675770 - RNA, 14 nt, Human
uaagauuccagaga

SEQ ID NO: 3675771 - RNA, 14 nt, Human
uaagauucuaaagg

SEQ ID NO: 3675772 - RNA, 17 nt, Human
uaagauucuaaaggucc

SEQ ID NO: 3675773 - RNA, 17 nt, Human
uaagauucuaacggucu

SEQ ID NO: 3675774 - RNA, 14 nt, Human
uaagauucuagauc

SEQ ID NO: 3675775 - RNA, 14 nt, Human
uaagauucuuggua

SEQ ID NO: 3675776 - RNA, 15 nt, Human
uaagauucuuuuaaa

SEQ ID NO: 3675777 - RNA, 23 nt, Human
uaagauucuuuuaaauuagaaaa

SEQ ID NO: 3675778 - RNA, 21 nt, Human
uaagauugauaucuauaaaau

SEQ ID NO: 3675779 - RNA, 22 nt, Human
uaagauugauaucuauaaaaua

SEQ ID NO: 3675780 - RNA, 12 nt, Human
uaagauuuaccc

SEQ ID NO: 3675781 - RNA, 13 nt, Human
uaagauuuaccca

SEQ ID NO: 3675782 - RNA, 22 nt, Human
uaagauuuacccagaaugucag

SEQ ID NO: 3675783 - RNA, 16 nt, Human
uaagauuuccuucuuu

SEQ ID NO: 3675784 - RNA, 16 nt, Human
uaagauuuuacaaaag

SEQ ID NO: 3675785 - RNA, 17 nt, Human
uaagauuuugaaaacua

SEQ ID NO: 3675786 - RNA, 16 nt, Human
uaagauuuuucucaaa

SEQ ID NO: 3675787 - RNA, 23 nt, Human
uaagcaaaaacaaaaagaaaaga

SEQ ID NO: 3675788 - RNA, 14 nt, Human
uaagcaaaauguga

SEQ ID NO: 3675789 - RNA, 17 nt, Human
uaagcaaaggggacagc

SEQ ID NO: 3675790 - RNA, 16 nt, Human
uaagcaaauacuuagc

SEQ ID NO: 3675791 - RNA, 18 nt, Human
uaagcaaauguuaaaagu

SEQ ID NO: 3675792 - RNA, 19 nt, Human
uaagcaaauguuaaaaguu

SEQ ID NO: 3675793 - RNA, 13 nt, Human
uaagcaaauuuca

SEQ ID NO: 3675794 - RNA, 18 nt, Human
uaagcaaauuucaaaaga

SEQ ID NO: 3675795 - RNA, 13 nt, Human
uaagcaacaauuu

SEQ ID NO: 3675796 - RNA, 17 nt, Human
uaagcaacauggcuuug

SEQ ID NO: 3675797 - RNA, 18 nt, Human
uaagcacacuugacauca

SEQ ID NO: 3675798 - RNA, 13 nt, Human
uaagcacuacaua

SEQ ID NO: 3675799 - RNA, 22 nt, Human
uaagcacuacauaaacugacuu

SEQ ID NO: 3675800 - RNA, 20 nt, Human
uaagcacugaaaaacaacaa

SEQ ID NO: 3675801 - RNA, 17 nt, Human
uaagcacugugcuaaua

SEQ ID NO: 3675802 - RNA, 16 nt, Human
uaagcacuguuuuucc

SEQ ID NO: 3675803 - RNA, 17 nt, Human
uaagcacuguuuuucca

SEQ ID NO: 3675804 - RNA, 15 nt, Human
uaagcacuuuuuaaa

SEQ ID NO: 3675805 - RNA, 21 nt, Human
uaagcacuuuuuaaaaaacuu

SEQ ID NO: 3675806 - RNA, 15 nt, Human
uaagcagaaagugcc

SEQ ID NO: 3675807 - RNA, 15 nt, Human
uaagcagaaauccug

SEQ ID NO: 3675808 - RNA, 24 nt, Human
uaagcagagaagggcauaaaacag

SEQ ID NO: 3675809 - RNA, 13 nt, Human
uaagcagaggagg

SEQ ID NO: 3675810 - RNA, 17 nt, Human
uaagcagaggaggggcc

SEQ ID NO: 3675811 - RNA, 21 nt, Human
uaagcagauuuaacaauucca

SEQ ID NO: 3675812 - RNA, 18 nt, Human
uaagcagcauuucugaag

SEQ ID NO: 3675813 - RNA, 19 nt, Human
uaagcagcauuucugaagu

SEQ ID NO: 3675814 - RNA, 21 nt, Human
uaagcagcauuucugaagugg

SEQ ID NO: 3675815 - RNA, 23 nt, Human
uaagcagcauuucugaaguggac

SEQ ID NO: 3675816 - RNA, 17 nt, Human
uaagcagcuaaauuuuc

SEQ ID NO: 3675817 - RNA, 21 nt, Human
uaagcaggagagaaauuucuc

SEQ ID NO: 3675818 - RNA, 15 nt, Human
uaagcaggaggaggu

SEQ ID NO: 3675819 - RNA, 18 nt, Human
uaagcaggaggaggugcc

SEQ ID NO: 3675820 - RNA, 16 nt, Human
uaagcaggcgcaaggg

SEQ ID NO: 3675821 - RNA, 12 nt, Human
uaagcaguauau

SEQ ID NO: 3675822 - RNA, 23 nt, Human
uaagcauaaaagaugaaagagca

SEQ ID NO: 3675823 - RNA, 13 nt, Human
uaagcauauauuu

SEQ ID NO: 3675824 - RNA, 16 nt, Human
uaagcauauauuuuua

SEQ ID NO: 3675825 - RNA, 23 nt, Human
uaagcauauauuuuuauauuuac

SEQ ID NO: 3675826 - RNA, 14 nt, Human
uaagcaucauuauu

SEQ ID NO: 3675827 - RNA, 23 nt, Human
uaagcaucuaaggacaagguaag

SEQ ID NO: 3675828 - RNA, 15 nt, Human
uaagcaucuacuuca

SEQ ID NO: 3675829 - RNA, 17 nt, Human
uaagcaucuacuucagg

SEQ ID NO: 3675830 - RNA, 18 nt, Human
uaagcaucuggcucuaau

SEQ ID NO: 3675831 - RNA, 19 nt, Human
uaagcauuacucuuguaag

SEQ ID NO: 3675832 - RNA, 21 nt, Human
uaagcauuacucuuguaagau

SEQ ID NO: 3675833 - RNA, 16 nt, Human
uaagcauuccaacuau

SEQ ID NO: 3675834 - RNA, 14 nt, Human
uguauuuuguguga

SEQ ID NO: 3675835 - RNA, 15 nt, Human
uguauuuugugugac

SEQ ID NO: 3675836 - RNA, 17 nt, Human
uguauuuuuaguagaga

SEQ ID NO: 3675837 - RNA, 19 nt, Human
uguauuuuucuacauuauu

SEQ ID NO: 3675838 - RNA, 16 nt, Human
uguauuuuugucaauu

SEQ ID NO: 3675839 - RNA, 20 nt, Human
uguauuuuugucaauuacca

SEQ ID NO: 3675840 - RNA, 19 nt, Human
uguauuuuuucuugcauug

SEQ ID NO: 3675841 - RNA, 21 nt, Human
uguauuuuuucuugcauugac

SEQ ID NO: 3675842 - RNA, 14 nt, Human
uguauuuuuuuacu

SEQ ID NO: 3675843 - RNA, 16 nt, Human
uguauuuuuuuacuaa

SEQ ID NO: 3675844 - RNA, 13 nt, Human
ugucaaaacacug

SEQ ID NO: 3675845 - RNA, 12 nt, Human
ugucaaaaguag

SEQ ID NO: 3675846 - RNA, 21 nt, Human
ugucaaaaguagaacuuugua

SEQ ID NO: 3675847 - RNA, 16 nt, Human
ugucaaaaguuggacu

SEQ ID NO: 3675848 - RNA, 20 nt, Human
ugucaaaaguuggacuaaau

SEQ ID NO: 3675849 - RNA, 21 nt, Human
ugucaaaaguuggacuaaaug

SEQ ID NO: 3675850 - RNA, 22 nt, Human
ugucaaaaguuggacuaaaugc

SEQ ID NO: 3675851 - RNA, 22 nt, Human
ugucaaacaaagccagaagcug

SEQ ID NO: 3675852 - RNA, 13 nt, Human
ugucaaacaaaua

SEQ ID NO: 3675853 - RNA, 12 nt, Human
ugucaaagaagg

SEQ ID NO: 3675854 - RNA, 14 nt, Human
ugucaaagaagguu

SEQ ID NO: 3675855 - RNA, 12 nt, Human
ugucaaagcagg

SEQ ID NO: 3675856 - RNA, 16 nt, Human
ugucaaaguggugaga

SEQ ID NO: 3675857 - RNA, 17 nt, Human
ugucaaauaaacacugu

SEQ ID NO: 3675858 - RNA, 17 nt, Human
ugucaacaugaaacacc

SEQ ID NO: 3675859 - RNA, 13 nt, Human
uaaucaauuuaaa

SEQ ID NO: 3675860 - RNA, 21 nt, Human
uaaucaccagggccaaaagcu

SEQ ID NO: 3675861 - RNA, 17 nt, Human
uaaucacgcuuuccuga

SEQ ID NO: 3675862 - RNA, 18 nt, Human
uaaucacgcuuuccugaa

SEQ ID NO: 3675863 - RNA, 16 nt, Human
uaaucacucagagcag

SEQ ID NO: 3675864 - RNA, 19 nt, Human
uaaucacuuaacauuccua

SEQ ID NO: 3675865 - RNA, 16 nt, Human
uaaucacuuuuuucca

SEQ ID NO: 3675866 - RNA, 17 nt, Human
uaaucacuuuuuuccac

SEQ ID NO: 3675867 - RNA, 19 nt, Human
uaaucacuuuuuuccacau

SEQ ID NO: 3675868 - RNA, 13 nt, Human
uaaucagaaauuu

SEQ ID NO: 3675869 - RNA, 12 nt, Human
uaaucagccucu

SEQ ID NO: 3675870 - RNA, 19 nt, Human
uaaucagggaggucauuuu

SEQ ID NO: 3675871 - RNA, 23 nt, Human
uaaucaguucauuagaaauauuu

SEQ ID NO: 3675872 - RNA, 22 nt, Human
uaaucauauaauaaauguacau

SEQ ID NO: 3675873 - RNA, 22 nt, Human
uaaucaucaagagaauuugggg

SEQ ID NO: 3675874 - RNA, 17 nt, Human
uaaucauccaaugcuca

SEQ ID NO: 3675875 - RNA, 14 nt, Human
uaaucaucuaaguc

SEQ ID NO: 3675876 - RNA, 15 nt, Human
uaaucaugaaccaau

SEQ ID NO: 3675877 - RNA, 13 nt, Human
uaaucaugaauau

SEQ ID NO: 3675878 - RNA, 20 nt, Human
uaaucauucuuauuucauga

SEQ ID NO: 3675879 - RNA, 14 nt, Human
uaaucauugccugg

SEQ ID NO: 3675880 - RNA, 16 nt, Human
uaaucauuuccccaua

SEQ ID NO: 3675881 - RNA, 14 nt, Human
uaaucauuuucauu

SEQ ID NO: 3675882 - RNA, 18 nt, Human
uaauccaggcacagcuga

SEQ ID NO: 3675883 - RNA, 19 nt, Human
uaauccaggcagauccagg

SEQ ID NO: 3675884 - RNA, 22 nt, Human
uaauccaggcagauccaggacu

SEQ ID NO: 3675885 - RNA, 12 nt, Human
uaauccaguaaa

SEQ ID NO: 3675886 - RNA, 19 nt, Human
uaauccaguuauaagaaga

SEQ ID NO: 3675887 - RNA, 23 nt, Human
uaauccaguuauaagaagaaguu

SEQ ID NO: 3675888 - RNA, 21 nt, Human
uaaucccagcauuuugggaag

SEQ ID NO: 3675889 - RNA, 16 nt, Human
ugucuuccucccaagu

SEQ ID NO: 3675890 - RNA, 14 nt, Human
ugucuuccuuggag

SEQ ID NO: 3675891 - RNA, 20 nt, Human
ugucuucggaaaccuuggug

SEQ ID NO: 3675892 - RNA, 13 nt, Human
ugucuucucccug

SEQ ID NO: 3675893 - RNA, 20 nt, Human
ugucuucucuaacaccuugu

SEQ ID NO: 3675894 - RNA, 17 nt, Human
ugucuucugccuguuau

SEQ ID NO: 3675895 - RNA, 11 nt, Human
ugucuucugcu

SEQ ID NO: 3675896 - RNA, 14 nt, Human
ugucuucugcuuug

SEQ ID NO: 3675897 - RNA, 23 nt, Human
ugucuucuggacaggcucugcuu

SEQ ID NO: 3675898 - RNA, 15 nt, Human
ugucuugcaauggca

SEQ ID NO: 3675899 - RNA, 18 nt, Human
ugucuugcaauggcagcc

SEQ ID NO: 3675900 - RNA, 17 nt, Human
ugucuugccuuuuucau

SEQ ID NO: 3675901 - RNA, 13 nt, Human
ugucuuggaacau

SEQ ID NO: 3675902 - RNA, 13 nt, Human
ugucuuggacacu

SEQ ID NO: 3675903 - RNA, 12 nt, Human
ugucuugggcag

SEQ ID NO: 3675904 - RNA, 17 nt, Human
ugucuuguacaugugua

SEQ ID NO: 3675905 - RNA, 15 nt, Human
ugucuuguuaauauu

SEQ ID NO: 3675906 - RNA, 18 nt, Human
ugucuuguuaauauucuu

SEQ ID NO: 3675907 - RNA, 13 nt, Human
ugucuuguucugu

SEQ ID NO: 3675908 - RNA, 15 nt, Human
ugucuuguucuguca

SEQ ID NO: 3675909 - RNA, 14 nt, Human
ugucuuuaaaaacu

SEQ ID NO: 3675910 - RNA, 14 nt, Human
ugucuuuaaaagua

SEQ ID NO: 3675911 - RNA, 14 nt, Human
ugucuuuaaggaaa

SEQ ID NO: 3675912 - RNA, 15 nt, Human
ugucuuuaaggaaaa

SEQ ID NO: 3675913 - RNA, 22 nt, Human
ugucuuuaauuucugucagaau

SEQ ID NO: 3675914 - RNA, 15 nt, Human
ugucuuuacuccuca

SEQ ID NO: 3675915 - RNA, 13 nt, Human
ugucuuucaaacu

SEQ ID NO: 3675916 - RNA, 18 nt, Human
ugucuuuccacuccuccu

SEQ ID NO: 3675917 - RNA, 13 nt, Human
ugucuuucugggg

SEQ ID NO: 3675918 - RNA, 19 nt, Human
ugucuuuggacccugaggc

SEQ ID NO: 3675919 - RNA, 23 nt, Human
ugucuuuggacccugaggcccag

SEQ ID NO: 3675920 - RNA, 16 nt, Human
ugucuuuggaggugcu

SEQ ID NO: 3675921 - RNA, 12 nt, Human
ugucuuuguaag

SEQ ID NO: 3675922 - RNA, 17 nt, Human
ugucuuuguaagucagu

SEQ ID NO: 3675923 - RNA, 16 nt, Human
ugucuuuuauauuugu

SEQ ID NO: 3675924 - RNA, 14 nt, Human
ugucuuuucuuggc

SEQ ID NO: 3675925 - RNA, 23 nt, Human
ugucuuuucuuggcaaaagccuu

SEQ ID NO: 3675926 - RNA, 19 nt, Human
ugucuuuucuuugccaucu

SEQ ID NO: 3675927 - RNA, 12 nt, Human
ugucuuuugcau

SEQ ID NO: 3675928 - RNA, 15 nt, Human
ugucuuuuuguugua

SEQ ID NO: 3675929 - RNA, 14 nt, Human
ugucuuuuuucuaa

SEQ ID NO: 3675930 - RNA, 16 nt, Human
ugucuuuuuuuguaua

SEQ ID NO: 3675931 - RNA, 23 nt, Human
ugucuuuuuuuguauaguuaaca

SEQ ID NO: 3675932 - RNA, 17 nt, Human
ugugaaaaaaaaaaugc

SEQ ID NO: 3675933 - RNA, 17 nt, Human
ugugaaaaaauuuacuu

SEQ ID NO: 3675934 - RNA, 15 nt, Human
ugugaaaagaaaaau

SEQ ID NO: 3675935 - RNA, 23 nt, Human
ugugaaaagaaaaaugagccugg

SEQ ID NO: 3675936 - RNA, 14 nt, Human
ugugaaaauggguu

SEQ ID NO: 3675937 - RNA, 18 nt, Human
ugugaaaaugguccagga

SEQ ID NO: 3675938 - RNA, 17 nt, Human
ugugaaaaugugugugu

SEQ ID NO: 3675939 - RNA, 14 nt, Human
ugugaaaauguguu

SEQ ID NO: 3675940 - RNA, 16 nt, Human
ugugaaacacagcugu

SEQ ID NO: 3675941 - RNA, 19 nt, Human
ugugaaacacuuugccucc

SEQ ID NO: 3675942 - RNA, 21 nt, Human
ugugaaaggaaagagggaggu

SEQ ID NO: 3675943 - RNA, 20 nt, Human
ugugaaaggaagcuccacug

SEQ ID NO: 3675944 - RNA, 12 nt, Human
ugugaaauuauu

SEQ ID NO: 3675945 - RNA, 13 nt, Human
ugugaaauugcau

SEQ ID NO: 3675946 - RNA, 19 nt, Human
ugugaaauuuuucauauuu

SEQ ID NO: 3675947 - RNA, 20 nt, Human
ugugaaauuuuucauauuuu

SEQ ID NO: 3675948 - RNA, 14 nt, Human
ugugaaccaaugca

SEQ ID NO: 3675949 - RNA, 15 nt, Human
ugugaaccaccacac

SEQ ID NO: 3675950 - RNA, 20 nt, Human
ugugaacccuggggccugac

SEQ ID NO: 3675951 - RNA, 14 nt, Human
ugugaacucagcca

SEQ ID NO: 3675952 - RNA, 21 nt, Human
ugugaacucagccaagcacag

SEQ ID NO: 3675953 - RNA, 18 nt, Human
ugugaacuggacccuguu

SEQ ID NO: 3675954 - RNA, 22 nt, Human
ugugaacuggacccuguugcua

SEQ ID NO: 3675955 - RNA, 15 nt, Human
ugugaacuugaaauu

SEQ ID NO: 3675956 - RNA, 20 nt, Human
ugugaacuuggggaacaagg

SEQ ID NO: 3675957 - RNA, 21 nt, Human
ugugaacuuguagcuguaaaa

SEQ ID NO: 3675958 - RNA, 18 nt, Human
ugugaacuuuauuaaaua

SEQ ID NO: 3675959 - RNA, 16 nt, Human
ugugaagacuugccuu

SEQ ID NO: 3675960 - RNA, 14 nt, Human
ugugaagagaacca

SEQ ID NO: 3675961 - RNA, 20 nt, Human
ugugaagcaaacucuaaaau

SEQ ID NO: 3675962 - RNA, 12 nt, Human
ugugaagcauuc

SEQ ID NO: 3675963 - RNA, 10 nt, Human
ugugaagcca

SEQ ID NO: 3675964 - RNA, 13 nt, Human
ugugaagccuucc

SEQ ID NO: 3675965 - RNA, 13 nt, Human
ugugaaggacccu

SEQ ID NO: 3675966 - RNA, 13 nt, Human
ugugaaggaccuu

SEQ ID NO: 3675967 - RNA, 16 nt, Human
ugugaaggaccuucac

SEQ ID NO: 3675968 - RNA, 23 nt, Human
ugugaaggauuauggaaaaauaa

SEQ ID NO: 3675969 - RNA, 23 nt, Human
ugugaaggcaggggaauguaugu

SEQ ID NO: 3675970 - RNA, 23 nt, Human
ugugaaguccuucaccucacuga

SEQ ID NO: 3675971 - RNA, 18 nt, Human
ugugaagugaaugaaaca

SEQ ID NO: 3675972 - RNA, 14 nt, Human
ugugaaguuagaau

SEQ ID NO: 3675973 - RNA, 21 nt, Human
ugugaaguuagguucuuaaaa

SEQ ID NO: 3675974 - RNA, 12 nt, Human
ugugaauaaauu

SEQ ID NO: 3675975 - RNA, 18 nt, Human
ugugaauacugcuugaau

SEQ ID NO: 3675976 - RNA, 22 nt, Human
ugugaauagaacucugaaauga

SEQ ID NO: 3675977 - RNA, 17 nt, Human
ugugaauauaaaugugu

SEQ ID NO: 3675978 - RNA, 20 nt, Human
ugugaauauaaaugugugua

SEQ ID NO: 3675979 - RNA, 21 nt, Human
ugugaaucaagggucaggccu

SEQ ID NO: 3675980 - RNA, 18 nt, Human
ugugaaucagacccuacc

SEQ ID NO: 3675981 - RNA, 22 nt, Human
ugugaaugauucauguuauauu

SEQ ID NO: 3675982 - RNA, 17 nt, Human
ugugaaugcuucucacu

SEQ ID NO: 3675983 - RNA, 16 nt, Human
ugugaauggauuggau

SEQ ID NO: 3675984 - RNA, 19 nt, Human
ugugaauggauuggauuau

SEQ ID NO: 3675985 - RNA, 18 nt, Human
ugugaaugugggcacugg

SEQ ID NO: 3675986 - RNA, 21 nt, Human
ugugaauguugugauguauuc

SEQ ID NO: 3675987 - RNA, 16 nt, Human
ugugaauuauugacac

SEQ ID NO: 3675988 - RNA, 17 nt, Human
ugugaauuauugacacu

SEQ ID NO: 3675989 - RNA, 20 nt, Human
ugugaauuauugacacugaa

SEQ ID NO: 3675990 - RNA, 21 nt, Human
ugugaauuauugacacugaac

SEQ ID NO: 3675991 - RNA, 18 nt, Human
ugugaauugcaugacuug

SEQ ID NO: 3675992 - RNA, 22 nt, Human
ugugaauugccugcagagagaa

SEQ ID NO: 3675993 - RNA, 23 nt, Human
ugugaauuucuucacuguugaaa

SEQ ID NO: 3675994 - RNA, 17 nt, Human
ugugaauuuuuaagcug

SEQ ID NO: 3675995 - RNA, 19 nt, Human
ugugaauuuuuaagcugca

SEQ ID NO: 3675996 - RNA, 16 nt, Human
ugugaauuuuuauugu

SEQ ID NO: 3675997 - RNA, 12 nt, Human
ugugacaaaauu

SEQ ID NO: 3675998 - RNA, 21 nt, Human
ugugacaacugucuaacuuua

SEQ ID NO: 3675999 - RNA, 21 nt, Human
ugugacaaggauugcuacugu

SEQ ID NO: 3676000 - RNA, 20 nt, Human
ugugacaauaauauuguugu

SEQ ID NO: 3676001 - RNA, 16 nt, Human
ugugacacacuacacc

SEQ ID NO: 3676002 - RNA, 22 nt, Human
ugugacacacuacaccacacac

SEQ ID NO: 3676003 - RNA, 17 nt, Human
ugugacacauaugcacc

SEQ ID NO: 3676004 - RNA, 16 nt, Human
uaaugcuguugccuca

SEQ ID NO: 3676005 - RNA, 14 nt, Human
uaaugcuuuuauau

SEQ ID NO: 3676006 - RNA, 13 nt, Human
uaauggaagagaa

SEQ ID NO: 3676007 - RNA, 14 nt, Human
uaauggaagagaaa

SEQ ID NO: 3676008 - RNA, 19 nt, Human
uaauggaaguguauuuauu

SEQ ID NO: 3676009 - RNA, 23 nt, Human
uaauggaaguguauuuauuuuac

SEQ ID NO: 3676010 - RNA, 19 nt, Human
uaauggacaugagauaaug

SEQ ID NO: 3676011 - RNA, 17 nt, Human
uaauggagcaucaagcc

SEQ ID NO: 3676012 - RNA, 12 nt, Human
uaauggauccuu

SEQ ID NO: 3676013 - RNA, 16 nt, Human
uaauggauuguuaauu

SEQ ID NO: 3676014 - RNA, 20 nt, Human
uaauggauuguuaauuucag

SEQ ID NO: 3676015 - RNA, 17 nt, Human
uaauggcacuuaucauu

SEQ ID NO: 3676016 - RNA, 20 nt, Human
uaauggcagcagaaaacuug

SEQ ID NO: 3676017 - RNA, 15 nt, Human
uaauggcaguuauau

SEQ ID NO: 3676018 - RNA, 15 nt, Human
uaauggcaugagaaa

SEQ ID NO: 3676019 - RNA, 17 nt, Human
uaauggcaugagaaaua

SEQ ID NO: 3676020 - RNA, 17 nt, Human
uaauggccggcuggaaa

SEQ ID NO: 3676021 - RNA, 23 nt, Human
uaauggccggcuggaaaugcugg

SEQ ID NO: 3676022 - RNA, 18 nt, Human
uaauggggguagcagcug

SEQ ID NO: 3676023 - RNA, 17 nt, Human
uaaugggguccuggcca

SEQ ID NO: 3676024 - RNA, 22 nt, Human
uaaugggguccuggccauccca

SEQ ID NO: 3676025 - RNA, 18 nt, Human
uaauggguuucauauuuc

SEQ ID NO: 3676026 - RNA, 14 nt, Human
uaaugguaccagau

SEQ ID NO: 3676027 - RNA, 16 nt, Human
uaaugguaccagauaa

SEQ ID NO: 3676028 - RNA, 19 nt, Human
uaaugguacugacuuugcu

SEQ ID NO: 3676029 - RNA, 16 nt, Human
uaaugguaguuuuaca

SEQ ID NO: 3676030 - RNA, 15 nt, Human
uaauggucccaucca

SEQ ID NO: 3676031 - RNA, 20 nt, Human
uaauggucccauccaggcag

SEQ ID NO: 3676032 - RNA, 22 nt, Human
uaauggugaugcagucuuagau

SEQ ID NO: 3676033 - RNA, 12 nt, Human
uaauguaaagau

SEQ ID NO: 3676034 - RNA, 17 nt, Human
uaauguaauaacuguga

SEQ ID NO: 3676035 - RNA, 18 nt, Human
uaauguaauaacugugaa

SEQ ID NO: 3676036 - RNA, 19 nt, Human
uaauguacauagugcuaac

SEQ ID NO: 3676037 - RNA, 15 nt, Human
uaauguauucauauu

SEQ ID NO: 3676038 - RNA, 19 nt, Human
uaauguauucauauuugua

SEQ ID NO: 3676039 - RNA, 20 nt, Human
uaauguauuuguucauguuu

SEQ ID NO: 3676040 - RNA, 12 nt, Human
uaauguauuuua

SEQ ID NO: 3676041 - RNA, 22 nt, Human
uaaugucuguaucacucugugu

SEQ ID NO: 3676042 - RNA, 14 nt, Human
uaaugucuucauaa

SEQ ID NO: 3676043 - RNA, 17 nt, Human
uaaugucuucauuucau

SEQ ID NO: 3676044 - RNA, 19 nt, Human
uaaugucuucauuucauug

SEQ ID NO: 3676045 - RNA, 15 nt, Human
uaaugucuuguuaau

SEQ ID NO: 3676046 - RNA, 22 nt, Human
uaaugugaaacuggauuaaacu

SEQ ID NO: 3676047 - RNA, 18 nt, Human
uaaugugaacuuguagcu

SEQ ID NO: 3676048 - RNA, 13 nt, Human
uaaugugaagugu

SEQ ID NO: 3676049 - RNA, 22 nt, Human
uaaugugaccuagcaauaggca

SEQ ID NO: 3676050 - RNA, 12 nt, Human
uaaugugcugug

SEQ ID NO: 3676051 - RNA, 13 nt, Human
uaaugugcugugu

SEQ ID NO: 3676052 - RNA, 14 nt, Human
uaaugugcugugua

SEQ ID NO: 3676053 - RNA, 19 nt, Human
uaaugugcuguguaaaguu

SEQ ID NO: 3676054 - RNA, 20 nt, Human
uaaugugcuguguaaaguua

SEQ ID NO: 3676055 - RNA, 15 nt, Human
uaauguggaagaaaa

SEQ ID NO: 3676056 - RNA, 17 nt, Human
uuauaaacuuuuaaaga

SEQ ID NO: 3676057 - RNA, 13 nt, Human
uuauaaagcaugu

SEQ ID NO: 3676058 - RNA, 12 nt, Human
uuauaaaggaau

SEQ ID NO: 3676059 - RNA, 17 nt, Human
uuauaaagugcuugugu

SEQ ID NO: 3676060 - RNA, 21 nt, Human
uuauaaagugcuuguguaauu

SEQ ID NO: 3676061 - RNA, 19 nt, Human
uuauaaaguggaaguaugu

SEQ ID NO: 3676062 - RNA, 19 nt, Human
uuauaaauacugcaaauca

SEQ ID NO: 3676063 - RNA, 18 nt, Human
uuauaaauauaagccuuu

SEQ ID NO: 3676064 - RNA, 16 nt, Human
uuauaaauauauauaa

SEQ ID NO: 3676065 - RNA, 17 nt, Human
uuauaaauauauauaaa

SEQ ID NO: 3676066 - RNA, 19 nt, Human
uuauaaauauauauaaaga

SEQ ID NO: 3676067 - RNA, 12 nt, Human
uuauaaaucaua

SEQ ID NO: 3676068 - RNA, 17 nt, Human
uuauaaaucauauugau

SEQ ID NO: 3676069 - RNA, 19 nt, Human
uuauaaaucauauugauga

SEQ ID NO: 3676070 - RNA, 17 nt, Human
uuauaaaucgcuuuuga

SEQ ID NO: 3676071 - RNA, 14 nt, Human
uuauaaaugcuauu

SEQ ID NO: 3676072 - RNA, 12 nt, Human
uuauaaauuaaa

SEQ ID NO: 3676073 - RNA, 21 nt, Human
uuauaaauuauguuuauauaa

SEQ ID NO: 3676074 - RNA, 21 nt, Human
uuauaaauuggugaugcuugu

SEQ ID NO: 3676075 - RNA, 19 nt, Human
uuauaaccuuaauuuauua

SEQ ID NO: 3676076 - RNA, 15 nt, Human
uuauaacuaacaugu

SEQ ID NO: 3676077 - RNA, 17 nt, Human
uuauaacucaucauaaa

SEQ ID NO: 3676078 - RNA, 16 nt, Human
uuauaacuggaaagaa

SEQ ID NO: 3676079 - RNA, 17 nt, Human
uuauaacuggaaagaag

SEQ ID NO: 3676080 - RNA, 14 nt, Human
uuauaagaaaaacu

SEQ ID NO: 3676081 - RNA, 16 nt, Human
uuauaagaaaaacuuu

SEQ ID NO: 3676082 - RNA, 18 nt, Human
uuauaagaagaaguucau

SEQ ID NO: 3676083 - RNA, 14 nt, Human
uuauaagacucuca

SEQ ID NO: 3676084 - RNA, 16 nt, Human
uuauaagcagauuuaa

SEQ ID NO: 3676085 - RNA, 19 nt, Human
uuauaagcaucauuauuua

SEQ ID NO: 3676086 - RNA, 17 nt, Human
uuauaagcauugaaauu

SEQ ID NO: 3676087 - RNA, 13 nt, Human
uuauaaggacugc

SEQ ID NO: 3676088 - RNA, 16 nt, Human
uuauaaggacugcaug

SEQ ID NO: 3676089 - RNA, 18 nt, Human
uuauaauaaaggacugua

SEQ ID NO: 3676090 - RNA, 14 nt, Human
uuauaauacucugu

SEQ ID NO: 3676091 - RNA, 11 nt, Human
uuauaauagca

SEQ ID NO: 3676092 - RNA, 16 nt, Human
uuauaaucagaaugga

SEQ ID NO: 3676093 - RNA, 23 nt, Human
uuauaaucagaauggaagagaga

SEQ ID NO: 3676094 - RNA, 18 nt, Human
uuauaaucuuauaauugu

SEQ ID NO: 3676095 - RNA, 13 nt, Human
uuauaauggguaa

SEQ ID NO: 3676096 - RNA, 12 nt, Human
uuauaauguauu

SEQ ID NO: 3676097 - RNA, 13 nt, Human
uuauaauguauuc

SEQ ID NO: 3676098 - RNA, 22 nt, Human
uuauaauguauucauauuugua

SEQ ID NO: 3676099 - RNA, 17 nt, Human
uuauaauucucauuaaa

SEQ ID NO: 3676100 - RNA, 15 nt, Human
uuauaauuguugcau

SEQ ID NO: 3676101 - RNA, 12 nt, Human
uuauaauuuaaa

SEQ ID NO: 3676102 - RNA, 16 nt, Human
uuauaauuuuuuucaa

SEQ ID NO: 3676103 - RNA, 20 nt, Human
uuauaauuuuuuuuaaaaua

SEQ ID NO: 3676104 - RNA, 19 nt, Human
uuauacaaauuaaaaagau

SEQ ID NO: 3676105 - RNA, 16 nt, Human
uuauacaaccuucauu

SEQ ID NO: 3676106 - RNA, 18 nt, Human
uuauacacauaauuaaag

SEQ ID NO: 3676107 - RNA, 13 nt, Human
uuauacacugugu

SEQ ID NO: 3676108 - RNA, 20 nt, Human
uuauacacuguguaaauacc

SEQ ID NO: 3676109 - RNA, 13 nt, Human
uuauacagcugua

SEQ ID NO: 3676110 - RNA, 21 nt, Human
uuauacagcuguauugucuga

SEQ ID NO: 3676111 - RNA, 21 nt, Human
uuauacaggggaauauuuuau

SEQ ID NO: 3676112 - RNA, 14 nt, Human
uuauacaggucaua

SEQ ID NO: 3676113 - RNA, 12 nt, Human
uuauacaguaca

SEQ ID NO: 3676114 - RNA, 21 nt, Human
uuauacaguuuuaaagaauca

SEQ ID NO: 3676115 - RNA, 14 nt, Human
uuauacauuaguaa

SEQ ID NO: 3676116 - RNA, 16 nt, Human
uuauaccaaaauguug

SEQ ID NO: 3676117 - RNA, 22 nt, Human
uuauaccaaaauguugcugaaa

SEQ ID NO: 3676118 - RNA, 19 nt, Human
uuauacccagaaaguuauu

SEQ ID NO: 3676119 - RNA, 23 nt, Human
uuauacccagaaaguuauugaua

SEQ ID NO: 3676120 - RNA, 18 nt, Human
uuauaccccaauaaucaa

SEQ ID NO: 3676121 - RNA, 18 nt, Human
uuauacccccugcaaagc

SEQ ID NO: 3676122 - RNA, 14 nt, Human
uuauaccucaauuu

SEQ ID NO: 3676123 - RNA, 21 nt, Human
uuauaccucaauuuucacugu

SEQ ID NO: 3676124 - RNA, 22 nt, Human
uuauaccucaauuuucacugug

SEQ ID NO: 3676125 - RNA, 16 nt, Human
uuauaccugcuaucag

SEQ ID NO: 3676126 - RNA, 14 nt, Human
uuauaccuguugcu

SEQ ID NO: 3676127 - RNA, 12 nt, Human
uuauaccuguuu

SEQ ID NO: 3676128 - RNA, 16 nt, Human
uuauacgaaauaauug

SEQ ID NO: 3676129 - RNA, 17 nt, Human
uuauacgaaauaauugu

SEQ ID NO: 3676130 - RNA, 14 nt, Human
uuauacgcuuuucu

SEQ ID NO: 3676131 - RNA, 18 nt, Human
uuauacguguagcuauau

SEQ ID NO: 3676132 - RNA, 16 nt, Human
uuauacguuauagagu

SEQ ID NO: 3676133 - RNA, 18 nt, Human
uuauacuaacuuauuuau

SEQ ID NO: 3676134 - RNA, 12 nt, Human
uuauacuaagaa

SEQ ID NO: 3676135 - RNA, 16 nt, Human
uuauacuaagaaaaga

SEQ ID NO: 3676136 - RNA, 23 nt, Human
uuauacuacuuuguuaggauuuu

SEQ ID NO: 3676137 - RNA, 14 nt, Human
uuauacuguacaau

SEQ ID NO: 3676138 - RNA, 14 nt, Human
uuauacuguauuaa

SEQ ID NO: 3676139 - RNA, 15 nt, Human
uuauacuuguaauua

SEQ ID NO: 3676140 - RNA, 19 nt, Human
uuauacuuguaauuaugga

SEQ ID NO: 3676141 - RNA, 14 nt, Human
uuauagaaaguuca

SEQ ID NO: 3676142 - RNA, 15 nt, Human
uuauagaagaaugca

SEQ ID NO: 3676143 - RNA, 22 nt, Human
uuauagaagaaugcaugcuuuc

SEQ ID NO: 3676144 - RNA, 15 nt, Human
uuauagaauauuuau

SEQ ID NO: 3676145 - RNA, 17 nt, Human
uuauagacacccuggca

SEQ ID NO: 3676146 - RNA, 21 nt, Human
uuauagagaaugaugauaaca

SEQ ID NO: 3676147 - RNA, 15 nt, Human
uuauagagcagaaau

SEQ ID NO: 3676148 - RNA, 22 nt, Human
uuauagagcagaaauucuguuu

SEQ ID NO: 3676149 - RNA, 15 nt, Human
uuauagaugucuagg

SEQ ID NO: 3676150 - RNA, 20 nt, Human
uguuaugacuauguaaacua

SEQ ID NO: 3676151 - RNA, 13 nt, Human
uguuaugacucca

SEQ ID NO: 3676152 - RNA, 21 nt, Human
uguuaugauaaaaaauuuugu

SEQ ID NO: 3676153 - RNA, 12 nt, Human
uguuaugaugug

SEQ ID NO: 3676154 - RNA, 22 nt, Human
uguuaugaugugcuuaacaggg

SEQ ID NO: 3676155 - RNA, 17 nt, Human
uguuaugcaaaagcaag

SEQ ID NO: 3676156 - RNA, 20 nt, Human
uguuauguacuaguguucug

SEQ ID NO: 3676157 - RNA, 13 nt, Human
uguuauguacugu

SEQ ID NO: 3676158 - RNA, 14 nt, Human
uguuauguauuucc

SEQ ID NO: 3676159 - RNA, 20 nt, Human
uguuauguuuucgaaaauca

SEQ ID NO: 3676160 - RNA, 14 nt, Human
uguuauuaaaugua

SEQ ID NO: 3676161 - RNA, 14 nt, Human
uguuauuacauccu

SEQ ID NO: 3676162 - RNA, 20 nt, Human
uguuauuauagagcagaaau

SEQ ID NO: 3676163 - RNA, 16 nt, Human
uguuauuaucugggcu

SEQ ID NO: 3676164 - RNA, 22 nt, Human
uguuauuauuacuuauuuuuga

SEQ ID NO: 3676165 - RNA, 13 nt, Human
uguuauucuuugc

SEQ ID NO: 3676166 - RNA, 13 nt, Human
uguuauugaaaaa

SEQ ID NO: 3676167 - RNA, 23 nt, Human
uguuauugaaaaaaauuggcauu

SEQ ID NO: 3676168 - RNA, 22 nt, Human
uguuauugggcaagugauugaa

SEQ ID NO: 3676169 - RNA, 15 nt, Human
uguuauugugaauga

SEQ ID NO: 3676170 - RNA, 22 nt, Human
uguuauuguuuuguuaauuaca

SEQ ID NO: 3676171 - RNA, 17 nt, Human
uguuauuuagacucauc

SEQ ID NO: 3676172 - RNA, 18 nt, Human
uguuauuuauaaucacuu

SEQ ID NO: 3676173 - RNA, 21 nt, Human
uguuauuuauaaucacuuuuu

SEQ ID NO: 3676174 - RNA, 21 nt, Human
uguuauuucuauuuuuguaga

SEQ ID NO: 3676175 - RNA, 13 nt, Human
uguuauuucucag

SEQ ID NO: 3676176 - RNA, 18 nt, Human
uguuauuucuuacaggca

SEQ ID NO: 3676177 - RNA, 14 nt, Human
uguuauuuucagua

SEQ ID NO: 3676178 - RNA, 15 nt, Human
uguuauuuucaguga

SEQ ID NO: 3676179 - RNA, 20 nt, Human
uguuauuuuuauaagaaaac

SEQ ID NO: 3676180 - RNA, 18 nt, Human
uguuauuuuuuaauuauu

SEQ ID NO: 3676181 - RNA, 19 nt, Human
uguucaaaaaaacacuagu

SEQ ID NO: 3676182 - RNA, 19 nt, Human
uguucaaacaauaucauau

SEQ ID NO: 3676183 - RNA, 20 nt, Human
uguucaaacaauaucauauc

SEQ ID NO: 3676184 - RNA, 20 nt, Human
uguucaaagccacauuauuu

SEQ ID NO: 3676185 - RNA, 21 nt, Human
uguucaaagccagcguccucc

SEQ ID NO: 3676186 - RNA, 22 nt, Human
uguucaaaggagcaagaacuuu

SEQ ID NO: 3676187 - RNA, 19 nt, Human
uguucaacuaggaucagaa

SEQ ID NO: 3676188 - RNA, 15 nt, Human
uguucaacuauuuua

SEQ ID NO: 3676189 - RNA, 23 nt, Human
uguucaagaccagccugaccaac

SEQ ID NO: 3676190 - RNA, 18 nt, Human
uguucaauuauuuccccc

SEQ ID NO: 3676191 - RNA, 22 nt, Human
uguucacacucucacauguuua

SEQ ID NO: 3676192 - RNA, 18 nt, Human
uguucacgcaacuugaaa

SEQ ID NO: 3676193 - RNA, 15 nt, Human
uguucacugaagacg

SEQ ID NO: 3676194 - RNA, 18 nt, Human
uguucacugaaggugauu

SEQ ID NO: 3676195 - RNA, 12 nt, Human
uguucagaaaaa

SEQ ID NO: 3676196 - RNA, 22 nt, Human
uguucagaagaaauucugucau

SEQ ID NO: 3676197 - RNA, 22 nt, Human
uguucagaagguugcucuagau

SEQ ID NO: 3676198 - RNA, 17 nt, Human
uguucagauugcuuuga

SEQ ID NO: 3676199 - RNA, 14 nt, Human
uguucagcacuguc

SEQ ID NO: 3676200 - RNA, 15 nt, Human
uguucagcacugucc

SEQ ID NO: 3676201 - RNA, 18 nt, Human
uguucagccacugaggga

SEQ ID NO: 3676202 - RNA, 19 nt, Human
uguucagccacugagggac

SEQ ID NO: 3676203 - RNA, 18 nt, Human
uguucagcuccagcucac

SEQ ID NO: 3676204 - RNA, 21 nt, Human
uguucagcuccagcucaccag

SEQ ID NO: 3676205 - RNA, 15 nt, Human
uguucaguguaaaua

SEQ ID NO: 3676206 - RNA, 13 nt, Human
uguucaguguaau

SEQ ID NO: 3676207 - RNA, 21 nt, Human
uguucaguguaauuucuuugc

SEQ ID NO: 3676208 - RNA, 12 nt, Human
uguucaguguua

SEQ ID NO: 3676209 - RNA, 15 nt, Human
uguucaguuacagaa

SEQ ID NO: 3676210 - RNA, 18 nt, Human
uguucaguugcacuucua

SEQ ID NO: 3676211 - RNA, 13 nt, Human
uguucauaaauaa

SEQ ID NO: 3676212 - RNA, 17 nt, Human
uguucauaaauaaaguu

SEQ ID NO: 3676213 - RNA, 12 nt, Human
uguucauacaua

SEQ ID NO: 3676214 - RNA, 18 nt, Human
uguucauauuaagaauga

SEQ ID NO: 3676215 - RNA, 23 nt, Human
uguucauauuaagaaugaucuga

SEQ ID NO: 3676216 - RNA, 13 nt, Human
uguucaugaaaga

SEQ ID NO: 3676217 - RNA, 16 nt, Human
uguucauuguaauguu

SEQ ID NO: 3676218 - RNA, 18 nt, Human
uguucauuguaauguuac

SEQ ID NO: 3676219 - RNA, 21 nt, Human
uguucauuguaauguuacuga

SEQ ID NO: 3676220 - RNA, 13 nt, Human
uguucauuuccuc

SEQ ID NO: 3676221 - RNA, 19 nt, Human
uguucauuuguuauucuua

SEQ ID NO: 3676222 - RNA, 17 nt, Human
uguucauuuugagcuga

SEQ ID NO: 3676223 - RNA, 20 nt, Human
uguucauuuugagcugaaau

SEQ ID NO: 3676224 - RNA, 20 nt, Human
uguuccaaauucaguuucau

SEQ ID NO: 3676225 - RNA, 16 nt, Human
uguuccaaggccaggg

SEQ ID NO: 3676226 - RNA, 17 nt, Human
uguuccaaguuuccaaa

SEQ ID NO: 3676227 - RNA, 20 nt, Human
uguuccaaugccacauacuu

SEQ ID NO: 3676228 - RNA, 12 nt, Human
uguuccagacau

SEQ ID NO: 3676229 - RNA, 17 nt, Human
uguuccagccugcccuc

SEQ ID NO: 3676230 - RNA, 18 nt, Human
uguuccaguaaucuaaua

SEQ ID NO: 3676231 - RNA, 23 nt, Human
uguucccaagagcaucaugccuc

SEQ ID NO: 3676232 - RNA, 17 nt, Human
uguucccaccugcugga

SEQ ID NO: 3676233 - RNA, 18 nt, Human
uguucccauccucuucuu

SEQ ID NO: 3676234 - RNA, 16 nt, Human
uguucccauuucagcu

SEQ ID NO: 3676235 - RNA, 13 nt, Human
uguuccccacugg

SEQ ID NO: 3676236 - RNA, 14 nt, Human
uguuccccacugga

SEQ ID NO: 3676237 - RNA, 13 nt, Human
uguuccccagaga

SEQ ID NO: 3676238 - RNA, 18 nt, Human
uguuccccauggccacuu

SEQ ID NO: 3676239 - RNA, 15 nt, Human
uguucccccugugca

SEQ ID NO: 3676240 - RNA, 16 nt, Human
uguucccccugugcag

SEQ ID NO: 3676241 - RNA, 15 nt, Human
uguuccccucacugg

SEQ ID NO: 3676242 - RNA, 15 nt, Human
uguuccccuccucca

SEQ ID NO: 3676243 - RNA, 13 nt, Human
uguuccccucucc

SEQ ID NO: 3676244 - RNA, 12 nt, Human
uguuccccucuu

SEQ ID NO: 3676245 - RNA, 21 nt, Human
uguuccccucuugucuccccu

SEQ ID NO: 3676246 - RNA, 23 nt, Human
uguuccccucuugucuccccugu

SEQ ID NO: 3676247 - RNA, 21 nt, Human
uguucccuauuuuucucuccu

SEQ ID NO: 3676248 - RNA, 23 nt, Human
uguucccuauuuuucucuccugu

SEQ ID NO: 3676249 - RNA, 18 nt, Human
uguucccucucccuguug

SEQ ID NO: 3676250 - RNA, 18 nt, Human
uguucccuuugucuuuca

SEQ ID NO: 3676251 - RNA, 21 nt, Human
uguuccgugguuaaacucgcu

SEQ ID NO: 3676252 - RNA, 15 nt, Human
uguuccuaaguucuu

SEQ ID NO: 3676253 - RNA, 15 nt, Human
uguuccuacagcccc

SEQ ID NO: 3676254 - RNA, 19 nt, Human
uguuccuacagccccuuuu

SEQ ID NO: 3676255 - RNA, 14 nt, Human
uguuccuagaguag

SEQ ID NO: 3676256 - RNA, 16 nt, Human
uguuccuagaguagag

SEQ ID NO: 3676257 - RNA, 22 nt, Human
uguuccugaauucuauuugcug

SEQ ID NO: 3676258 - RNA, 15 nt, Human
uguuccuggcaguuu

SEQ ID NO: 3676259 - RNA, 19 nt, Human
uguuccuggcaguuuaaaa

SEQ ID NO: 3676260 - RNA, 19 nt, Human
uguuccuuaagucagaaca

SEQ ID NO: 3676261 - RNA, 19 nt, Human
uguuccuuagaccuuccau

SEQ ID NO: 3676262 - RNA, 17 nt, Human
uguuccuucccugugcc

SEQ ID NO: 3676263 - RNA, 14 nt, Human
uguucgcuuggcuc

SEQ ID NO: 3676264 - RNA, 16 nt, Human
uuauuuuaguuucugu

SEQ ID NO: 3676265 - RNA, 23 nt, Human
uuauuuuaugagaaauguaaugc

SEQ ID NO: 3676266 - RNA, 20 nt, Human
uuauuuuauguugcauagaa

SEQ ID NO: 3676267 - RNA, 18 nt, Human
uuauuuuauguuuagaua

SEQ ID NO: 3676268 - RNA, 18 nt, Human
uuauuuuauuuuagcagu

SEQ ID NO: 3676269 - RNA, 18 nt, Human
uuauuuucaagaaacuga

SEQ ID NO: 3676270 - RNA, 16 nt, Human
uuauuuucaaguagcu

SEQ ID NO: 3676271 - RNA, 14 nt, Human
uuauuuucagugau

SEQ ID NO: 3676272 - RNA, 14 nt, Human
uuauuuuccucccc

SEQ ID NO: 3676273 - RNA, 16 nt, Human
uuauuuuccuccccag

SEQ ID NO: 3676274 - RNA, 18 nt, Human
uuauuuucuacguuucuu

SEQ ID NO: 3676275 - RNA, 21 nt, Human
uuauuuucugguagauagaaa

SEQ ID NO: 3676276 - RNA, 13 nt, Human
uuauuuucuguca

SEQ ID NO: 3676277 - RNA, 17 nt, Human
uuauuuucuuugaaauu

SEQ ID NO: 3676278 - RNA, 21 nt, Human
uuauuuugaaaagcuucuuaa

SEQ ID NO: 3676279 - RNA, 11 nt, Human
uuauuuugaug

SEQ ID NO: 3676280 - RNA, 21 nt, Human
uuauuuuggagagauaggaag

SEQ ID NO: 3676281 - RNA, 15 nt, Human
uuauuuuguaauuau

SEQ ID NO: 3676282 - RNA, 18 nt, Human
uuauuuuguaauuauugu

SEQ ID NO: 3676283 - RNA, 22 nt, Human
uuauuuugugaugcaaauaaau

SEQ ID NO: 3676284 - RNA, 18 nt, Human
uuauuuuuagacagaguc

SEQ ID NO: 3676285 - RNA, 14 nt, Human
uuauuuuuauacag

SEQ ID NO: 3676286 - RNA, 14 nt, Human
uuauuuuucacucu

SEQ ID NO: 3676287 - RNA, 14 nt, Human
uuauuuuucuaaaa

SEQ ID NO: 3676288 - RNA, 14 nt, Human
uuauuuuucuguua

SEQ ID NO: 3676289 - RNA, 14 nt, Human
uuauuuuucuuguc

SEQ ID NO: 3676290 - RNA, 12 nt, Human
uuauuuuugcuu

SEQ ID NO: 3676291 - RNA, 14 nt, Human
uuauuuuuguacau

SEQ ID NO: 3676292 - RNA, 16 nt, Human
uuauuuuuguacaugu

SEQ ID NO: 3676293 - RNA, 17 nt, Human
uuauuuuuguacauguu

SEQ ID NO: 3676294 - RNA, 18 nt, Human
uuauuuuuuaaguauuua

SEQ ID NO: 3676295 - RNA, 13 nt, Human
uucaauaaaucuu

SEQ ID NO: 3676296 - RNA, 19 nt, Human
uucaauaaaugucuguuga

SEQ ID NO: 3676297 - RNA, 16 nt, Human
uucaauaacuggaaca

SEQ ID NO: 3676298 - RNA, 14 nt, Human
uucaauacagauau

SEQ ID NO: 3676299 - RNA, 18 nt, Human
uucaauacagauauauuu

SEQ ID NO: 3676300 - RNA, 17 nt, Human
uucaauagcacauaugg

SEQ ID NO: 3676301 - RNA, 14 nt, Human
uucaauagccacua

SEQ ID NO: 3676302 - RNA, 23 nt, Human
uucaauagccacuaaccuugccu

SEQ ID NO: 3676303 - RNA, 15 nt, Human
uucaauauauugaac

SEQ ID NO: 3676304 - RNA, 17 nt, Human
uucaauauauugaacuu

SEQ ID NO: 3676305 - RNA, 16 nt, Human
uucaauauauuuguau

SEQ ID NO: 3676306 - RNA, 16 nt, Human
uucaaucccaggaugu

SEQ ID NO: 3676307 - RNA, 18 nt, Human
uucaaucucaauugcuuu

SEQ ID NO: 3676308 - RNA, 23 nt, Human
uucaaucugaagauacaugucuu

SEQ ID NO: 3676309 - RNA, 14 nt, Human
uucaaucuguaaac

SEQ ID NO: 3676310 - RNA, 18 nt, Human
uucaaucuguaaacugug

SEQ ID NO: 3676311 - RNA, 20 nt, Human
uucaaucuguaaacugugua

SEQ ID NO: 3676312 - RNA, 16 nt, Human
uucaaugauaguaaga

SEQ ID NO: 3676313 - RNA, 16 nt, Human
uucaaugguucugaaa

SEQ ID NO: 3676314 - RNA, 22 nt, Human
uucaaugguuugcaaggaagcc

SEQ ID NO: 3676315 - RNA, 21 nt, Human
uucaaugugauucuaaugucu

SEQ ID NO: 3676316 - RNA, 12 nt, Human
uucaauuaaacg

SEQ ID NO: 3676317 - RNA, 15 nt, Human
uucaauuaaacggau

SEQ ID NO: 3676318 - RNA, 16 nt, Human
uucaauuaaacggauu

SEQ ID NO: 3676319 - RNA, 16 nt, Human
uucaauuaaagaaaua

SEQ ID NO: 3676320 - RNA, 17 nt, Human
uucaauuauuuccccca

SEQ ID NO: 3676321 - RNA, 16 nt, Human
uucaauucaaaaaugu

SEQ ID NO: 3676322 - RNA, 20 nt, Human
uucaauucaaaaauguacaa

SEQ ID NO: 3676323 - RNA, 15 nt, Human
uucaauucaaagcug

SEQ ID NO: 3676324 - RNA, 12 nt, Human
uucaauuccucu

SEQ ID NO: 3676325 - RNA, 13 nt, Human
uucaauucucaaa

SEQ ID NO: 3676326 - RNA, 17 nt, Human
uucaauugcaucuccca

SEQ ID NO: 3676327 - RNA, 14 nt, Human
uucaauuguaaauu

SEQ ID NO: 3676328 - RNA, 15 nt, Human
uucaauuuauaccuc

SEQ ID NO: 3676329 - RNA, 16 nt, Human
uucaauuuauaccuca

SEQ ID NO: 3676330 - RNA, 16 nt, Human
uucaauuuauucaaga

SEQ ID NO: 3676331 - RNA, 17 nt, Human
uucaauuuauucaagaa

SEQ ID NO: 3676332 - RNA, 15 nt, Human
uucaauuugaugugg

SEQ ID NO: 3676333 - RNA, 16 nt, Human
uucacaaaguaauuug

SEQ ID NO: 3676334 - RNA, 12 nt, Human
uucacaaauauu

SEQ ID NO: 3676335 - RNA, 14 nt, Human
uucacaacccaucu

SEQ ID NO: 3676336 - RNA, 21 nt, Human
uucacaaccuucuguggcuca

SEQ ID NO: 3676337 - RNA, 14 nt, Human
uucacaagcugccu

SEQ ID NO: 3676338 - RNA, 13 nt, Human
uucacaauaaaag

SEQ ID NO: 3676339 - RNA, 15 nt, Human
uucacaauaaaagcu

SEQ ID NO: 3676340 - RNA, 22 nt, Human
uucacaauggugcucauuucau

SEQ ID NO: 3676341 - RNA, 13 nt, Human
uucacaauguuaa

SEQ ID NO: 3676342 - RNA, 16 nt, Human
uucacaccccaccugc

SEQ ID NO: 3676343 - RNA, 12 nt, Human
uucacacccugc

SEQ ID NO: 3676344 - RNA, 13 nt, Human
uucacacccugca

SEQ ID NO: 3676345 - RNA, 14 nt, Human
uucacacccugcaa

SEQ ID NO: 3676346 - RNA, 15 nt, Human
uucacacccugcaag

SEQ ID NO: 3676347 - RNA, 14 nt, Human
uucacaccugcaga

SEQ ID NO: 3676348 - RNA, 18 nt, Human
uucacacuuccaccagcc

SEQ ID NO: 3676349 - RNA, 19 nt, Human
uucacacuuccaccagccu

SEQ ID NO: 3676350 - RNA, 12 nt, Human
uucacagagugu

SEQ ID NO: 3676351 - RNA, 16 nt, Human
uucacagcuuuuauca

SEQ ID NO: 3676352 - RNA, 19 nt, Human
uucacaggcagccagugcc

SEQ ID NO: 3676353 - RNA, 18 nt, Human
uucacaggugugguguaa

SEQ ID NO: 3676354 - RNA, 20 nt, Human
uucacaggugugguguaauu

SEQ ID NO: 3676355 - RNA, 12 nt, Human
uucacaguguuu

SEQ ID NO: 3676356 - RNA, 21 nt, Human
uucacaguucuuugggccaga

SEQ ID NO: 3676357 - RNA, 23 nt, Human
uucacaguuggcuggaugaaauu

SEQ ID NO: 3676358 - RNA, 16 nt, Human
uucacaguuugaaaua

SEQ ID NO: 3676359 - RNA, 23 nt, Human
uucacaguuugaaauaagcuauu

SEQ ID NO: 3676360 - RNA, 13 nt, Human
uucacaguuuuuc

SEQ ID NO: 3676361 - RNA, 19 nt, Human
uucacauaaaauagauuuu

SEQ ID NO: 3676362 - RNA, 15 nt, Human
uucacauacccuccc

SEQ ID NO: 3676363 - RNA, 18 nt, Human
uucacauagcugucuaga

SEQ ID NO: 3676364 - RNA, 18 nt, Human
uucacauccuguguuucu

SEQ ID NO: 3676365 - RNA, 19 nt, Human
uucacauccuguguuucua

SEQ ID NO: 3676366 - RNA, 18 nt, Human
uucacaugcaucaaguua

SEQ ID NO: 3676367 - RNA, 13 nt, Human
uucacauucuuau

SEQ ID NO: 3676368 - RNA, 16 nt, Human
uucacauucuuggcuu

SEQ ID NO: 3676369 - RNA, 14 nt, Human
uucacauuggaaac

SEQ ID NO: 3676370 - RNA, 21 nt, Human
uucacauuguuaagaaaaaua

SEQ ID NO: 3676371 - RNA, 14 nt, Human
uucacauuuagaaa

SEQ ID NO: 3676372 - RNA, 14 nt, Human
uucaccacagacuu

SEQ ID NO: 3676373 - RNA, 19 nt, Human
uucaccagaggaaucacuc

SEQ ID NO: 3676374 - RNA, 23 nt, Human
uucaccauguaaaacaaaaaaca

SEQ ID NO: 3676375 - RNA, 24 nt, Human
uucaccauuuggcaaugccaucau

SEQ ID NO: 3676376 - RNA, 16 nt, Human
uucacccaucuuauca

SEQ ID NO: 3676377 - RNA, 17 nt, Human
uucaccccaaucccagc

SEQ ID NO: 3676378 - RNA, 22 nt, Human
uucaccccggcaggcccugcag

SEQ ID NO: 3676379 - RNA, 20 nt, Human
uucaccccucccuuucuccc

SEQ ID NO: 3676380 - RNA, 22 nt, Human
uucacccuguccaaacugccua

SEQ ID NO: 3676381 - RNA, 19 nt, Human
uucaccuaagagauucuga

SEQ ID NO: 3676382 - RNA, 21 nt, Human
uucaccuaagucucugugaau

SEQ ID NO: 3676383 - RNA, 19 nt, Human
uucaccucacugaaaacau

SEQ ID NO: 3676384 - RNA, 15 nt, Human
uucaccuccuucaau

SEQ ID NO: 3676385 - RNA, 16 nt, Human
uucaccuccuucaauu

SEQ ID NO: 3676386 - RNA, 14 nt, Human
uucaccuguaaaac

SEQ ID NO: 3676387 - RNA, 16 nt, Human
uucaccuguaaaccug

SEQ ID NO: 3676388 - RNA, 19 nt, Human
uucaccuguuuuuaagcug

SEQ ID NO: 3676389 - RNA, 23 nt, Human
uucaccuguuuuuaagcuguuuc

SEQ ID NO: 3676390 - RNA, 14 nt, Human
uucaccuugaagaa

SEQ ID NO: 3676391 - RNA, 16 nt, Human
uucaccuugggaugau

SEQ ID NO: 3676392 - RNA, 13 nt, Human
uucaccuuuguag

SEQ ID NO: 3676393 - RNA, 22 nt, Human
uucaccuuuguccccaccgcag

SEQ ID NO: 3676394 - RNA, 20 nt, Human
uucacgaaguguugcaugga

SEQ ID NO: 3676395 - RNA, 17 nt, Human
uucacggaagagccuug

SEQ ID NO: 3676396 - RNA, 19 nt, Human
uucacgucauaggaaguua

SEQ ID NO: 3676397 - RNA, 13 nt, Human
uucacuaaagcag

SEQ ID NO: 3676398 - RNA, 14 nt, Human
uucacuaaagcagu

SEQ ID NO: 3676399 - RNA, 14 nt, Human
uucacuacucagca

SEQ ID NO: 3676400 - RNA, 15 nt, Human
uucacuacucagcau

SEQ ID NO: 3676401 - RNA, 13 nt, Human
uucacuagcuuug

SEQ ID NO: 3676402 - RNA, 16 nt, Human
uucacucuaagauguu

SEQ ID NO: 3676403 - RNA, 18 nt, Human
uucacucuaagucaugua

SEQ ID NO: 3676404 - RNA, 13 nt, Human
uucacucuuaggc

SEQ ID NO: 3676405 - RNA, 20 nt, Human
uucacucuucaaaugccuga

SEQ ID NO: 3676406 - RNA, 14 nt, Human
uucacucuuggagc

SEQ ID NO: 3676407 - RNA, 19 nt, Human
uucacucuuggagccugca

SEQ ID NO: 3676408 - RNA, 20 nt, Human
uucacugcauggcucccaca

SEQ ID NO: 3676409 - RNA, 13 nt, Human
uucacugcugcaa

SEQ ID NO: 3676410 - RNA, 19 nt, Human
uucacugcugcaaggccuu

SEQ ID NO: 3676411 - RNA, 23 nt, Human
uucacugcugcaaggccuuucug

SEQ ID NO: 3676412 - RNA, 13 nt, Human
uucacugcuggcu

SEQ ID NO: 3676413 - RNA, 15 nt, Human
uucacugcuguuaua

SEQ ID NO: 3676414 - RNA, 23 nt, Human
uucacugcuguuauauuucauca

SEQ ID NO: 3676415 - RNA, 17 nt, Human
uucacuguagcucuaaa

SEQ ID NO: 3676416 - RNA, 15 nt, Human
uucacuguauaaaua

SEQ ID NO: 3676417 - RNA, 16 nt, Human
uucacuguauaaauag

SEQ ID NO: 3676418 - RNA, 23 nt, Human
uucacugucaccacccugcucau

SEQ ID NO: 3676419 - RNA, 15 nt, Human
uucacuuaacaaaca

SEQ ID NO: 3676420 - RNA, 12 nt, Human
uucacuucacug

SEQ ID NO: 3676421 - RNA, 14 nt, Human
uucacuucacugug

SEQ ID NO: 3676422 - RNA, 16 nt, Human
uucacuucacugugcu

SEQ ID NO: 3676423 - RNA, 19 nt, Human
uucacuucauaauccagua

SEQ ID NO: 3676424 - RNA, 16 nt, Human
uucacuucaucuucuc

SEQ ID NO: 3676425 - RNA, 20 nt, Human
uucacuucgggcuguguaaa

SEQ ID NO: 3676426 - RNA, 21 nt, Human
uucacuugaugauacaaugaa

SEQ ID NO: 3676427 - RNA, 16 nt, Human
uucacuuuagaugcug

SEQ ID NO: 3676428 - RNA, 14 nt, Human
uucacuuugacacu

SEQ ID NO: 3676429 - RNA, 20 nt, Human
uucacuuuuagggagaguca

SEQ ID NO: 3676430 - RNA, 20 nt, Human
uucacuuuugacaaaggcaa

SEQ ID NO: 3676431 - RNA, 21 nt, Human
uguuggacaccuuuagguucu

SEQ ID NO: 3676432 - RNA, 18 nt, Human
uguuggacccgcucugga

SEQ ID NO: 3676433 - RNA, 14 nt, Human
uguuggagaagaac

SEQ ID NO: 3676434 - RNA, 19 nt, Human
uguuggagaagaacugaaa

SEQ ID NO: 3676435 - RNA, 14 nt, Human
uguuggagccugca

SEQ ID NO: 3676436 - RNA, 19 nt, Human
uguuggauaaaucaguggu

SEQ ID NO: 3676437 - RNA, 11 nt, Human
uguuggauaag

SEQ ID NO: 3676438 - RNA, 21 nt, Human
uguuggauaaggaauuauaga

SEQ ID NO: 3676439 - RNA, 17 nt, Human
uguuggauuccaugcua

SEQ ID NO: 3676440 - RNA, 18 nt, Human
uguuggcacauccuaugc

SEQ ID NO: 3676441 - RNA, 12 nt, Human
uuaaaauuuauu

SEQ ID NO: 3676442 - RNA, 15 nt, Human
uuaaaauuugaaaca

SEQ ID NO: 3676443 - RNA, 17 nt, Human
uuaaaauuugaaacauu

SEQ ID NO: 3676444 - RNA, 18 nt, Human
uuaaaauuugaaacauug

SEQ ID NO: 3676445 - RNA, 19 nt, Human
uuaaaauuuguucuuguau

SEQ ID NO: 3676446 - RNA, 21 nt, Human
uuaaaauuuuaagcuaggaaa

SEQ ID NO: 3676447 - RNA, 20 nt, Human
uuaaacaaacauuguguuga

SEQ ID NO: 3676448 - RNA, 12 nt, Human
uuaaacaaacca

SEQ ID NO: 3676449 - RNA, 14 nt, Human
uuaaacaaagguug

SEQ ID NO: 3676450 - RNA, 14 nt, Human
uuaaacaaaguuuc

SEQ ID NO: 3676451 - RNA, 22 nt, Human
uuaaacaaauguaugauuacau

SEQ ID NO: 3676452 - RNA, 18 nt, Human
uuaaacaauuuauuuuau

SEQ ID NO: 3676453 - RNA, 14 nt, Human
uuaaacacauuguc

SEQ ID NO: 3676454 - RNA, 16 nt, Human
uuaaacaccuccucau

SEQ ID NO: 3676455 - RNA, 12 nt, Human
uuaaacagauga

SEQ ID NO: 3676456 - RNA, 16 nt, Human
uuaaacagauguccau

SEQ ID NO: 3676457 - RNA, 15 nt, Human
uuaaacaggcccagc

SEQ ID NO: 3676458 - RNA, 16 nt, Human
uuaaacaguauuucau

SEQ ID NO: 3676459 - RNA, 22 nt, Human
uuaaacaugcuguacauacuuu

SEQ ID NO: 3676460 - RNA, 23 nt, Human
uuaaacauuaauagcagccuuuc

SEQ ID NO: 3676461 - RNA, 13 nt, Human
uuaaacauugaag

SEQ ID NO: 3676462 - RNA, 15 nt, Human
uuaaacauugaagua

SEQ ID NO: 3676463 - RNA, 18 nt, Human
uuaaacauugguucuugu

SEQ ID NO: 3676464 - RNA, 22 nt, Human
uuaaaccaucucccuggugcuu

SEQ ID NO: 3676465 - RNA, 23 nt, Human
uuaaaccaucucccuggugcuua

SEQ ID NO: 3676466 - RNA, 23 nt, Human
uuaaaccaugggauaaaugccau

SEQ ID NO: 3676467 - RNA, 13 nt, Human
uuaaacccauuuu

SEQ ID NO: 3676468 - RNA, 19 nt, Human
uuaaaccgcuaaaagaaac

SEQ ID NO: 3676469 - RNA, 17 nt, Human
uuaaaccuauacucacu

SEQ ID NO: 3676470 - RNA, 15 nt, Human
uuaaaccugucucca

SEQ ID NO: 3676471 - RNA, 19 nt, Human
uuaaaccugucuccacugu

SEQ ID NO: 3676472 - RNA, 20 nt, Human
uuaaaccugucuccacugug

SEQ ID NO: 3676473 - RNA, 21 nt, Human
uuaaaccuguuuuuuuuucau

SEQ ID NO: 3676474 - RNA, 22 nt, Human
uuaaacgauuuuuaaaauguac

SEQ ID NO: 3676475 - RNA, 15 nt, Human
uuaaacggauuauuu

SEQ ID NO: 3676476 - RNA, 20 nt, Human
uuaaacguaugcaugugaag

SEQ ID NO: 3676477 - RNA, 17 nt, Human
uuaaacuagcauaucug

SEQ ID NO: 3676478 - RNA, 23 nt, Human
uuaaacuagcauaucugccuuua

SEQ ID NO: 3676479 - RNA, 16 nt, Human
uuaaacucagggacag

SEQ ID NO: 3676480 - RNA, 20 nt, Human
uuaaacucugaauuuaucuu

SEQ ID NO: 3676481 - RNA, 22 nt, Human
uuaaacucugaauuuaucuuug

SEQ ID NO: 3676482 - RNA, 21 nt, Human
uuaaacucugagugcaaacuu

SEQ ID NO: 3676483 - RNA, 22 nt, Human
uuaaacugguauuuuaucuuug

SEQ ID NO: 3676484 - RNA, 12 nt, Human
uuaaacuguaca

SEQ ID NO: 3676485 - RNA, 14 nt, Human
uuaaacuguacagu

SEQ ID NO: 3676486 - RNA, 16 nt, Human
uuaaacuguuagcacu

SEQ ID NO: 3676487 - RNA, 19 nt, Human
uuaaacuguuagcacuguu

SEQ ID NO: 3676488 - RNA, 22 nt, Human
uuaaacuguuagcacuguugau

SEQ ID NO: 3676489 - RNA, 23 nt, Human
uaccugaagcuaucguaaaauua

SEQ ID NO: 3676490 - RNA, 14 nt, Human
uaccugaaugcucu

SEQ ID NO: 3676491 - RNA, 19 nt, Human
uaccugaccucuugcuguc

SEQ ID NO: 3676492 - RNA, 13 nt, Human
uaccugaggggcc

SEQ ID NO: 3676493 - RNA, 17 nt, Human
uaccugaguugaagagg

SEQ ID NO: 3676494 - RNA, 18 nt, Human
uaccugauuuuuuuuccu

SEQ ID NO: 3676495 - RNA, 16 nt, Human
uaccugccacucacac

SEQ ID NO: 3676496 - RNA, 15 nt, Human
uaccugcccuggaac

SEQ ID NO: 3676497 - RNA, 16 nt, Human
uaccugcgcuuguuuu

SEQ ID NO: 3676498 - RNA, 10 nt, Human
uaccugcugc

SEQ ID NO: 3676499 - RNA, 15 nt, Human
uaccuggaaucaaau

SEQ ID NO: 3676500 - RNA, 19 nt, Human
uaccuggguccccagcccu

SEQ ID NO: 3676501 - RNA, 18 nt, Human
uaccugggugauuacaua

SEQ ID NO: 3676502 - RNA, 19 nt, Human
uaccuguacacugacuuga

SEQ ID NO: 3676503 - RNA, 20 nt, Human
uaccuguauacguuucaaaa

SEQ ID NO: 3676504 - RNA, 18 nt, Human
uaccugucacauugcauu

SEQ ID NO: 3676505 - RNA, 17 nt, Human
uaccugucccccugaca

SEQ ID NO: 3676506 - RNA, 13 nt, Human
uaccugugaaaua

SEQ ID NO: 3676507 - RNA, 12 nt, Human
uaccuguggaua

SEQ ID NO: 3676508 - RNA, 20 nt, Human
uaccuguucagugucccggg

SEQ ID NO: 3676509 - RNA, 21 nt, Human
uaccuguucagugucccgggc

SEQ ID NO: 3676510 - RNA, 13 nt, Human
uaccuguuccuua

SEQ ID NO: 3676511 - RNA, 14 nt, Human
uaccuguugagcau

SEQ ID NO: 3676512 - RNA, 21 nt, Human
uaccuguugagcaucacagaa

SEQ ID NO: 3676513 - RNA, 14 nt, Human
uaccuguuuaaauu

SEQ ID NO: 3676514 - RNA, 22 nt, Human
uaccuguuuuguggucagcugu

SEQ ID NO: 3676515 - RNA, 15 nt, Human
uaccuuaaaauuuga

SEQ ID NO: 3676516 - RNA, 16 nt, Human
uaccuuaaaauuugaa

SEQ ID NO: 3676517 - RNA, 20 nt, Human
uaccuuaaaauuugaaacau

SEQ ID NO: 3676518 - RNA, 20 nt, Human
uaccuuacagugagggcuau

SEQ ID NO: 3676519 - RNA, 16 nt, Human
uaccuuagauuagcuc

SEQ ID NO: 3676520 - RNA, 20 nt, Human
uaccuuagauuagcucugga

SEQ ID NO: 3676521 - RNA, 21 nt, Human
uaccuuagauuagcucuggac

SEQ ID NO: 3676522 - RNA, 22 nt, Human
uaccuuagauuagcucuggacc

SEQ ID NO: 3676523 - RNA, 18 nt, Human
uaccuuagugcaguuauu

SEQ ID NO: 3676524 - RNA, 20 nt, Human
uaccuuagugcaguuauuug

SEQ ID NO: 3676525 - RNA, 22 nt, Human
uaccuuagugcaguuauuugcu

SEQ ID NO: 3676526 - RNA, 15 nt, Human
uaccuucaaacuuua

SEQ ID NO: 3676527 - RNA, 14 nt, Human
uaccuucaaagcug

SEQ ID NO: 3676528 - RNA, 20 nt, Human
uaccuucaauaaaguaucua

SEQ ID NO: 3676529 - RNA, 15 nt, Human
uaccuucagauccua

SEQ ID NO: 3676530 - RNA, 13 nt, Human
uaccuucauuuca

SEQ ID NO: 3676531 - RNA, 12 nt, Human
uaccuuccaguc

SEQ ID NO: 3676532 - RNA, 14 nt, Human
uaccuuccuucccu

SEQ ID NO: 3676533 - RNA, 15 nt, Human
uaccuuccuucccug

SEQ ID NO: 3676534 - RNA, 19 nt, Human
uaccuucuccccagcuccc

SEQ ID NO: 3676535 - RNA, 22 nt, Human
uaccuucuccccagcucccagg

SEQ ID NO: 3676536 - RNA, 12 nt, Human
uaccuugcccca

SEQ ID NO: 3676537 - RNA, 15 nt, Human
uaccuugccccaacc

SEQ ID NO: 3676538 - RNA, 21 nt, Human
uaccuugccccaacccuucuu

SEQ ID NO: 3676539 - RNA, 13 nt, Human
uaccuugguuccc

SEQ ID NO: 3676540 - RNA, 20 nt, Human
uaccuuguauacuguaggca

SEQ ID NO: 3676541 - RNA, 18 nt, Human
uaccuuucucucucuaag

SEQ ID NO: 3676542 - RNA, 18 nt, Human
uaccuuuucagggcuggc

SEQ ID NO: 3676543 - RNA, 15 nt, Human
uaccuuuucucuuca

SEQ ID NO: 3676544 - RNA, 20 nt, Human
uaccuuuuuauuugcaugug

SEQ ID NO: 3676545 - RNA, 16 nt, Human
uaccuuuuuuuuuucu

SEQ ID NO: 3676546 - RNA, 18 nt, Human
uaccuuuuuuuuuucuug

SEQ ID NO: 3676547 - RNA, 18 nt, Human
uacgaaaagaggggaaga

SEQ ID NO: 3676548 - RNA, 21 nt, Human
uacgaaaagaggggaagagac

SEQ ID NO: 3676549 - RNA, 16 nt, Human
uacgaaauaauuguug

SEQ ID NO: 3676550 - RNA, 22 nt, Human
uacgaaauaauuguuguucugu

SEQ ID NO: 3676551 - RNA, 22 nt, Human
uacgaagaguauuuuugacaga

SEQ ID NO: 3676552 - RNA, 15 nt, Human
uacgaauauuuucag

SEQ ID NO: 3676553 - RNA, 15 nt, Human
uacgacaacuugcac

SEQ ID NO: 3676554 - RNA, 21 nt, Human
uacgacacggguggggaaagg

SEQ ID NO: 3676555 - RNA, 14 nt, Human
uacgacuuuauuuu

SEQ ID NO: 3676556 - RNA, 20 nt, Human
uacgagcaccuccagccuga

SEQ ID NO: 3676557 - RNA, 20 nt, Human
uacgaguaauugcauuugcu

SEQ ID NO: 3676558 - RNA, 15 nt, Human
uacgauaaggaagaa

SEQ ID NO: 3676559 - RNA, 21 nt, Human
uacgauaaggaagaaacagaa

SEQ ID NO: 3676560 - RNA, 17 nt, Human
uacgcacagacagguuu

SEQ ID NO: 3676561 - RNA, 21 nt, Human
uacgcacagacagguuuucac

SEQ ID NO: 3676562 - RNA, 23 nt, Human
uacgcacuacaugugguuuauag

SEQ ID NO: 3676563 - RNA, 22 nt, Human
uacgccaggggaaaaucagccu

SEQ ID NO: 3676564 - RNA, 19 nt, Human
uacgcccaacccuucccca

SEQ ID NO: 3676565 - RNA, 17 nt, Human
uacgcccaucucaggac

SEQ ID NO: 3676566 - RNA, 18 nt, Human
uacgccucuucugucccu

SEQ ID NO: 3676567 - RNA, 24 nt, Human
uacgcuccaucgcugucaucucag

SEQ ID NO: 3676568 - RNA, 22 nt, Human
uacgcugaagauggcauccugu

SEQ ID NO: 3676569 - RNA, 12 nt, Human
uacgcuuuguca

SEQ ID NO: 3676570 - RNA, 12 nt, Human
uacgcuuuucuu

SEQ ID NO: 3676571 - RNA, 17 nt, Human
uacggacagagaccaag

SEQ ID NO: 3676572 - RNA, 19 nt, Human
uacggaccagguauagaga

SEQ ID NO: 3676573 - RNA, 22 nt, Human
uacggauccugcacugacucug

SEQ ID NO: 3676574 - RNA, 18 nt, Human
uacgggaggguaaggcug

SEQ ID NO: 3676575 - RNA, 22 nt, Human
uacguaaaaaucucucauuugu

SEQ ID NO: 3676576 - RNA, 16 nt, Human
uacguacaugugaggc

SEQ ID NO: 3676577 - RNA, 21 nt, Human
uacguagccuaaggcuccugu

SEQ ID NO: 3676578 - RNA, 21 nt, Human
uacguaugucugguucucaau

SEQ ID NO: 3676579 - RNA, 16 nt, Human
uacguauuuaauagca

SEQ ID NO: 3676580 - RNA, 14 nt, Human
uacgucugacaggc

SEQ ID NO: 3676581 - RNA, 13 nt, Human
uacgucugggaga

SEQ ID NO: 3676582 - RNA, 14 nt, Human
uacgucugggagaa

SEQ ID NO: 3676583 - RNA, 22 nt, Human
uacgugacccucugcugaagac

SEQ ID NO: 3676584 - RNA, 16 nt, Human
uacgugucaaugugug

SEQ ID NO: 3676585 - RNA, 19 nt, Human
uuaacucucuuuaugucug

SEQ ID NO: 3676586 - RNA, 12 nt, Human
uuaacucugucu

SEQ ID NO: 3676587 - RNA, 11 nt, Human
uuaacucuuug

SEQ ID NO: 3676588 - RNA, 12 nt, Human
uuaacucuuugc

SEQ ID NO: 3676589 - RNA, 19 nt, Human
uuaacugaagauguugaga

SEQ ID NO: 3676590 - RNA, 21 nt, Human
uuaacugaauaccacucugua

SEQ ID NO: 3676591 - RNA, 17 nt, Human
uuaacuggguaaugaaa

SEQ ID NO: 3676592 - RNA, 21 nt, Human
uuaacuggguaaugaaacaaa

SEQ ID NO: 3676593 - RNA, 22 nt, Human
uuaacuguccguaagcaguaua

SEQ ID NO: 3676594 - RNA, 12 nt, Human
uuaacuguggau

SEQ ID NO: 3676595 - RNA, 13 nt, Human
uuaacuguggaua

SEQ ID NO: 3676596 - RNA, 15 nt, Human
uuaacuguggauauu

SEQ ID NO: 3676597 - RNA, 19 nt, Human
uuaacuguguauguacaua

SEQ ID NO: 3676598 - RNA, 15 nt, Human
uuaacuuaaauagua

SEQ ID NO: 3676599 - RNA, 22 nt, Human
uuaacuuaaauuuuaauuuauu

SEQ ID NO: 3676600 - RNA, 14 nt, Human
uuaacuuaauaauc

SEQ ID NO: 3676601 - RNA, 18 nt, Human
uuaacuuaguuuugcaua

SEQ ID NO: 3676602 - RNA, 16 nt, Human
uuaacuucacauauug

SEQ ID NO: 3676603 - RNA, 17 nt, Human
uuaacuucuguuuuacc

SEQ ID NO: 3676604 - RNA, 15 nt, Human
uuaacuugaguuuua

SEQ ID NO: 3676605 - RNA, 16 nt, Human
uuaacuugucaaaaaa

SEQ ID NO: 3676606 - RNA, 16 nt, Human
uuaacuuuaagacuga

SEQ ID NO: 3676607 - RNA, 18 nt, Human
uuaacuuuaucacauuau

SEQ ID NO: 3676608 - RNA, 12 nt, Human
uuaacuuuuaua

SEQ ID NO: 3676609 - RNA, 13 nt, Human
uuaacuuuuauaa

SEQ ID NO: 3676610 - RNA, 18 nt, Human
uuaacuuuuauaaacuuu

SEQ ID NO: 3676611 - RNA, 23 nt, Human
uuaacuuuuauaaacuuuaccuu

SEQ ID NO: 3676612 - RNA, 18 nt, Human
uuaacuuuuuuucuucua

SEQ ID NO: 3676613 - RNA, 14 nt, Human
uuaagaaaaaaaua

SEQ ID NO: 3676614 - RNA, 23 nt, Human
uuaagaaaaaaauaauuuuauga

SEQ ID NO: 3676615 - RNA, 20 nt, Human
uuaagaaaaaauaacacaca

SEQ ID NO: 3676616 - RNA, 21 nt, Human
uuaagaaaaaauaacacacau

SEQ ID NO: 3676617 - RNA, 19 nt, Human
uuaagaaaaaggaugcaca

SEQ ID NO: 3676618 - RNA, 21 nt, Human
uuaagaaaaguauuuugaagu

SEQ ID NO: 3676619 - RNA, 23 nt, Human
uuaagaaaaguauuuugaaguuu

SEQ ID NO: 3676620 - RNA, 18 nt, Human
uuaagaaaauacaauaaa

SEQ ID NO: 3676621 - RNA, 14 nt, Human
uuaagaaaaucaua

SEQ ID NO: 3676622 - RNA, 22 nt, Human
uuaagaaagacuaucuaaaugu

SEQ ID NO: 3676623 - RNA, 22 nt, Human
uuaagaaauagacagcaugaga

SEQ ID NO: 3676624 - RNA, 15 nt, Human
uuaagaaauguaguu

SEQ ID NO: 3676625 - RNA, 21 nt, Human
uuaagaaauguaguugaugua

SEQ ID NO: 3676626 - RNA, 19 nt, Human
uuaagaaauguauaaacuu

SEQ ID NO: 3676627 - RNA, 22 nt, Human
uuaagaagacugcauuauauuu

SEQ ID NO: 3676628 - RNA, 14 nt, Human
uuaagaagcuguug

SEQ ID NO: 3676629 - RNA, 12 nt, Human
uuaagaaggcaa

SEQ ID NO: 3676630 - RNA, 18 nt, Human
uuaagaaggcaaaaaugu

SEQ ID NO: 3676631 - RNA, 20 nt, Human
uuaagaauaucuguaauggu

SEQ ID NO: 3676632 - RNA, 16 nt, Human
uuaagaauauguuucc

SEQ ID NO: 3676633 - RNA, 19 nt, Human
uuaagaauauguuuccuug

SEQ ID NO: 3676634 - RNA, 20 nt, Human
uuaagaaugaaauacuguuu

SEQ ID NO: 3676635 - RNA, 20 nt, Human
uuaagaaugaguuucuuaga

SEQ ID NO: 3676636 - RNA, 19 nt, Human
uuaagaaugaucugauuga

SEQ ID NO: 3676637 - RNA, 22 nt, Human
uuaagaauguugguuuacuuuc

SEQ ID NO: 3676638 - RNA, 14 nt, Human
uuaagaauugacca

SEQ ID NO: 3676639 - RNA, 10 nt, Human
uuaagacaag

SEQ ID NO: 3676640 - RNA, 15 nt, Human
uuaagaccagccugg

SEQ ID NO: 3676641 - RNA, 18 nt, Human
uuaagaccuacuguucua

SEQ ID NO: 3676642 - RNA, 20 nt, Human
uuaagaccuacuguucuaaa

SEQ ID NO: 3676643 - RNA, 19 nt, Human
uuaagacgaaacauuuguu

SEQ ID NO: 3676644 - RNA, 13 nt, Human
uuaagacguguuu

SEQ ID NO: 3676645 - RNA, 16 nt, Human
uuaagacguguuugug

SEQ ID NO: 3676646 - RNA, 21 nt, Human
uuaagacugagcaccugcuuc

SEQ ID NO: 3676647 - RNA, 18 nt, Human
uuaagacugauuuuaaua

SEQ ID NO: 3676648 - RNA, 16 nt, Human
uuaagacuuaaugaga

SEQ ID NO: 3676649 - RNA, 13 nt, Human
uuaagagaaacuu

SEQ ID NO: 3676650 - RNA, 21 nt, Human
uuaagagaaacuuuauacauu

SEQ ID NO: 3676651 - RNA, 14 nt, Human
uuaagagagaaauc

SEQ ID NO: 3676652 - RNA, 16 nt, Human
uuaagaggcagggucu

SEQ ID NO: 3676653 - RNA, 14 nt, Human
uuaagauaauuaua

SEQ ID NO: 3676654 - RNA, 14 nt, Human
uuccgucacauccc

SEQ ID NO: 3676655 - RNA, 15 nt, Human
uuccgucagaaagug

SEQ ID NO: 3676656 - RNA, 14 nt, Human
uuccgugcguggca

SEQ ID NO: 3676657 - RNA, 15 nt, Human
uuccgugucuggcca

SEQ ID NO: 3676658 - RNA, 15 nt, Human
uuccguuugcuuuug

SEQ ID NO: 3676659 - RNA, 13 nt, Human
uuccuaaagaaaa

SEQ ID NO: 3676660 - RNA, 20 nt, Human
uuccuaaauuuuccuguccu

SEQ ID NO: 3676661 - RNA, 14 nt, Human
uuccuaacacagca

SEQ ID NO: 3676662 - RNA, 19 nt, Human
uuccuaacaggauuagaca

SEQ ID NO: 3676663 - RNA, 22 nt, Human
uuccuaacuuuucaaugacauu

SEQ ID NO: 3676664 - RNA, 13 nt, Human
uuccuaagccacu

SEQ ID NO: 3676665 - RNA, 18 nt, Human
uuccuaaguucuuagaua

SEQ ID NO: 3676666 - RNA, 16 nt, Human
uuccuaauaaaguucu

SEQ ID NO: 3676667 - RNA, 22 nt, Human
uuccuaauaaaguucuguacuc

SEQ ID NO: 3676668 - RNA, 13 nt, Human
uuccuaauuuuag

SEQ ID NO: 3676669 - RNA, 15 nt, Human
uuccuacacaggaca

SEQ ID NO: 3676670 - RNA, 18 nt, Human
uuccuacacccuuggacu

SEQ ID NO: 3676671 - RNA, 21 nt, Human
uuccuacacccuuggacuuga

SEQ ID NO: 3676672 - RNA, 14 nt, Human
uuccuacagcacua

SEQ ID NO: 3676673 - RNA, 17 nt, Human
uuccuacagcacuacug

SEQ ID NO: 3676674 - RNA, 23 nt, Human
uuccuacagcacuacuggguguc

SEQ ID NO: 3676675 - RNA, 14 nt, Human
uuccuacagccccu

SEQ ID NO: 3676676 - RNA, 18 nt, Human
uuccuacagccccuuuuu

SEQ ID NO: 3676677 - RNA, 13 nt, Human
uuccuacaggcag

SEQ ID NO: 3676678 - RNA, 20 nt, Human
uuccuacccacaccucugcc

SEQ ID NO: 3676679 - RNA, 13 nt, Human
uuccuaccucccu

SEQ ID NO: 3676680 - RNA, 12 nt, Human
uuccuacucuuc

SEQ ID NO: 3676681 - RNA, 15 nt, Human
uuccuacucuucucu

SEQ ID NO: 3676682 - RNA, 20 nt, Human
uuccuacucuucucucugcu

SEQ ID NO: 3676683 - RNA, 18 nt, Human
uuccuacuuuuccuuccc

SEQ ID NO: 3676684 - RNA, 19 nt, Human
uuccuagaaguuacugaau

SEQ ID NO: 3676685 - RNA, 14 nt, Human
uuccuagagaacug

SEQ ID NO: 3676686 - RNA, 16 nt, Human
uuccuagccuguuucu

SEQ ID NO: 3676687 - RNA, 18 nt, Human
uuccuaggggaaugaggg

SEQ ID NO: 3676688 - RNA, 14 nt, Human
uuccuagggguuug

SEQ ID NO: 3676689 - RNA, 20 nt, Human
uuccuagguauaauucacau

SEQ ID NO: 3676690 - RNA, 12 nt, Human
uuccuagugaaa

SEQ ID NO: 3676691 - RNA, 18 nt, Human
uuccuaguucaucccuuc

SEQ ID NO: 3676692 - RNA, 18 nt, Human
uuccuaguuuucuccucc

SEQ ID NO: 3676693 - RNA, 17 nt, Human
uuccuauaacuugaugc

SEQ ID NO: 3676694 - RNA, 11 nt, Human
uuccuauaagg

SEQ ID NO: 3676695 - RNA, 15 nt, Human
uuccuaucauguuaa

SEQ ID NO: 3676696 - RNA, 14 nt, Human
uuccuaucccaucc

SEQ ID NO: 3676697 - RNA, 18 nt, Human
uuccuaucccaucccauc

SEQ ID NO: 3676698 - RNA, 18 nt, Human
uuccuaugauguauacug

SEQ ID NO: 3676699 - RNA, 18 nt, Human
uuccuaugcuauugacaa

SEQ ID NO: 3676700 - RNA, 16 nt, Human
uuccuaugcuuugaaa

SEQ ID NO: 3676701 - RNA, 19 nt, Human
uuccuauuccaagcuucca

SEQ ID NO: 3676702 - RNA, 13 nt, Human
uuccuauugucau

SEQ ID NO: 3676703 - RNA, 15 nt, Human
uuccuauuucuuaua

SEQ ID NO: 3676704 - RNA, 23 nt, Human
uuccuauuugccaugggcuucac

SEQ ID NO: 3676705 - RNA, 21 nt, Human
uuccucaaaauaaagaaguau

SEQ ID NO: 3676706 - RNA, 13 nt, Human
uuccucacuucca

SEQ ID NO: 3676707 - RNA, 18 nt, Human
uuccucagacucuaagaa

SEQ ID NO: 3676708 - RNA, 11 nt, Human
uuccucagcca

SEQ ID NO: 3676709 - RNA, 19 nt, Human
uuccucagccagccucgcc

SEQ ID NO: 3676710 - RNA, 12 nt, Human
uuccucagcuua

SEQ ID NO: 3676711 - RNA, 17 nt, Human
uuccucaguuacacaaa

SEQ ID NO: 3676712 - RNA, 23 nt, Human
uuccucaguucauccauucuauu

SEQ ID NO: 3676713 - RNA, 18 nt, Human
uuccucauccaccccauc

SEQ ID NO: 3676714 - RNA, 22 nt, Human
uuccucauccucagaugcucaa

SEQ ID NO: 3676715 - RNA, 16 nt, Human
uuccucaugaauguaa

SEQ ID NO: 3676716 - RNA, 18 nt, Human
uuccucaugaauguaaau

SEQ ID NO: 3676717 - RNA, 13 nt, Human
uuccucauuagca

SEQ ID NO: 3676718 - RNA, 22 nt, Human
uuccuccagcugcaccagagca

SEQ ID NO: 3676719 - RNA, 24 nt, Human
uuccuccauccuccuccuuccuag

SEQ ID NO: 3676720 - RNA, 17 nt, Human
uuccuccauuugagaaa

SEQ ID NO: 3676721 - RNA, 18 nt, Human
uuccucccauucaagauu

SEQ ID NO: 3676722 - RNA, 13 nt, Human
uuccuccccagca

SEQ ID NO: 3676723 - RNA, 11 nt, Human
uuccucccuuc

SEQ ID NO: 3676724 - RNA, 12 nt, Human
uuccucccuucu

SEQ ID NO: 3676725 - RNA, 14 nt, Human
uuccuccuccacca

SEQ ID NO: 3676726 - RNA, 18 nt, Human
uuccuccuccaccaccgc

SEQ ID NO: 3676727 - RNA, 16 nt, Human
uuccuccuccccacuu

SEQ ID NO: 3676728 - RNA, 17 nt, Human
uuccuccucccuccugc

SEQ ID NO: 3676729 - RNA, 20 nt, Human
uuccuccucugacuugggga

SEQ ID NO: 3676730 - RNA, 13 nt, Human
uuccuccugcuca

SEQ ID NO: 3676731 - RNA, 23 nt, Human
uacuugccuuauuagagugucuu

SEQ ID NO: 3676732 - RNA, 17 nt, Human
uacuugcucagguacuu

SEQ ID NO: 3676733 - RNA, 12 nt, Human
uacuugcucugg

SEQ ID NO: 3676734 - RNA, 13 nt, Human
uacuugcucuuga

SEQ ID NO: 3676735 - RNA, 18 nt, Human
uacuugcucuugaugccu

SEQ ID NO: 3676736 - RNA, 20 nt, Human
uacuugcucuugaugccugg

SEQ ID NO: 3676737 - RNA, 21 nt, Human
uacuugcucuugaugccuggc

SEQ ID NO: 3676738 - RNA, 19 nt, Human
uacuugcuuuaccuuuuca

SEQ ID NO: 3676739 - RNA, 14 nt, Human
uacuugcuuugugu

SEQ ID NO: 3676740 - RNA, 17 nt, Human
uacuugggaagcugagg

SEQ ID NO: 3676741 - RNA, 21 nt, Human
uacuugggagaccuguaauca

SEQ ID NO: 3676742 - RNA, 18 nt, Human
uacuuggucacagccagg

SEQ ID NO: 3676743 - RNA, 15 nt, Human
uacuuguaauuaugg

SEQ ID NO: 3676744 - RNA, 18 nt, Human
uacuugucaaagaagguu

SEQ ID NO: 3676745 - RNA, 13 nt, Human
uacuugucaauau

SEQ ID NO: 3676746 - RNA, 19 nt, Human
uacuugugaaacacagcug

SEQ ID NO: 3676747 - RNA, 16 nt, Human
uacuugugauuucgau

SEQ ID NO: 3676748 - RNA, 15 nt, Human
uacuuguggacuaaa

SEQ ID NO: 3676749 - RNA, 23 nt, Human
uacuuguggacuaaaagauauaa

SEQ ID NO: 3676750 - RNA, 14 nt, Human
uacuuguuauaaac

SEQ ID NO: 3676751 - RNA, 20 nt, Human
uacuuguuucucuguuguaa

SEQ ID NO: 3676752 - RNA, 19 nt, Human
uacuuguuuuuguaaagaa

SEQ ID NO: 3676753 - RNA, 15 nt, Human
uacuuuaaaggaaaa

SEQ ID NO: 3676754 - RNA, 20 nt, Human
uacuuuaaaggaaaaaaugu

SEQ ID NO: 3676755 - RNA, 22 nt, Human
uacuuuaacuuaguuuugcaua

SEQ ID NO: 3676756 - RNA, 13 nt, Human
uacuuuaauaaau

SEQ ID NO: 3676757 - RNA, 15 nt, Human
uacuuuaccaccccc

SEQ ID NO: 3676758 - RNA, 19 nt, Human
uacuuuaccacccccacac

SEQ ID NO: 3676759 - RNA, 18 nt, Human
uacuuuauagaagaaugc

SEQ ID NO: 3676760 - RNA, 19 nt, Human
uacuuuauagaagaaugca

SEQ ID NO: 3676761 - RNA, 20 nt, Human
uacuuuaucacuuuuugaac

SEQ ID NO: 3676762 - RNA, 20 nt, Human
uacuuuauguuacuacaugc

SEQ ID NO: 3676763 - RNA, 17 nt, Human
uacuuuccaauucuccu

SEQ ID NO: 3676764 - RNA, 19 nt, Human
uacuuuccaauucuccuuu

SEQ ID NO: 3676765 - RNA, 15 nt, Human
uacuuucccuacccu

SEQ ID NO: 3676766 - RNA, 18 nt, Human
uacuuucccuacccucua

SEQ ID NO: 3676767 - RNA, 12 nt, Human
uacuuucccuug

SEQ ID NO: 3676768 - RNA, 23 nt, Human
uacuuucccuugcuuuucccucu

SEQ ID NO: 3676769 - RNA, 15 nt, Human
uacuuucuguuaaaa

SEQ ID NO: 3676770 - RNA, 17 nt, Human
uacuuucuguuaaaaug

SEQ ID NO: 3676771 - RNA, 18 nt, Human
uacuuucuuaaugugacc

SEQ ID NO: 3676772 - RNA, 15 nt, Human
uacuuucuucaaaau

SEQ ID NO: 3676773 - RNA, 19 nt, Human
uacuuugaaaccagaaaau

SEQ ID NO: 3676774 - RNA, 13 nt, Human
uacuuugaaugug

SEQ ID NO: 3676775 - RNA, 18 nt, Human
uacuuugaauguguuuca

SEQ ID NO: 3676776 - RNA, 12 nt, Human
uacuuugauuca

SEQ ID NO: 3676777 - RNA, 16 nt, Human
uacuuugcauugucug

SEQ ID NO: 3676778 - RNA, 19 nt, Human
uacuuugccuuuugcaaac

SEQ ID NO: 3676779 - RNA, 22 nt, Human
uacuuugccuuuugcaaacuuu

SEQ ID NO: 3676780 - RNA, 17 nt, Human
uacuuuggaauucuuag

SEQ ID NO: 3676781 - RNA, 20 nt, Human
uacuuuggggcuaauuuaac

SEQ ID NO: 3676782 - RNA, 20 nt, Human
uacuuugguagcugggaaag

SEQ ID NO: 3676783 - RNA, 23 nt, Human
uacuuugguagcugggaaagcau

SEQ ID NO: 3676784 - RNA, 19 nt, Human
uacuuugguuucugucugu

SEQ ID NO: 3676785 - RNA, 18 nt, Human
uacuuuguaaauucugau

SEQ ID NO: 3676786 - RNA, 19 nt, Human
uacuuuguaaauucugauu

SEQ ID NO: 3676787 - RNA, 22 nt, Human
uacuuuguaaauucugauuucu

SEQ ID NO: 3676788 - RNA, 22 nt, Human
uacuuuguacaaagaccacaca

SEQ ID NO: 3676789 - RNA, 12 nt, Human
uacuuuguauug

SEQ ID NO: 3676790 - RNA, 14 nt, Human
uacuuuguauuguc

SEQ ID NO: 3676791 - RNA, 21 nt, Human
uacuuugucuaagaaacauug

SEQ ID NO: 3676792 - RNA, 16 nt, Human
uacuuugucugaaaaa

SEQ ID NO: 3676793 - RNA, 21 nt, Human
uacuuuuaaacagugagccug

SEQ ID NO: 3676794 - RNA, 20 nt, Human
uacuuuuaaagaauuucuuu

SEQ ID NO: 3676795 - RNA, 16 nt, Human
uacuuuuauaauaaaa

SEQ ID NO: 3676796 - RNA, 23 nt, Human
uacuuuuauuuuacacagaaaca

SEQ ID NO: 3676797 - RNA, 20 nt, Human
uacuuuucauauuugcacua

SEQ ID NO: 3676798 - RNA, 16 nt, Human
uacuuuucauucucuu

SEQ ID NO: 3676799 - RNA, 19 nt, Human
uacuuuucccauuuguaau

SEQ ID NO: 3676800 - RNA, 21 nt, Human
uacuuuuccuugcauacaaac

SEQ ID NO: 3676801 - RNA, 13 nt, Human
uacuuuugagugu

SEQ ID NO: 3676802 - RNA, 11 nt, Human
uacuuuuggaa

SEQ ID NO: 3676803 - RNA, 20 nt, Human
uacuuuuggaaucuagaaga

SEQ ID NO: 3676804 - RNA, 14 nt, Human
uacuuuuuauauau

SEQ ID NO: 3676805 - RNA, 13 nt, Human
uacuuuuucuaau

SEQ ID NO: 3676806 - RNA, 14 nt, Human
uacuuuuucuaaug

SEQ ID NO: 3676807 - RNA, 16 nt, Human
uacuuuuucuaaugag

SEQ ID NO: 3676808 - RNA, 18 nt, Human
uacuuuuucuuuuguaag

SEQ ID NO: 3676809 - RNA, 20 nt, Human
uacuuuuuggcauaacauaa

SEQ ID NO: 3676810 - RNA, 15 nt, Human
uacuuuuugugaaga

SEQ ID NO: 3676811 - RNA, 14 nt, Human
uacuuuuuugaaau

SEQ ID NO: 3676812 - RNA, 16 nt, Human
uagaaaaacaggcacu

SEQ ID NO: 3676813 - RNA, 16 nt, Human
uagaaaaacccugccc

SEQ ID NO: 3676814 - RNA, 20 nt, Human
uagaaaaagaacaugcaguu

SEQ ID NO: 3676815 - RNA, 13 nt, Human
uagaaaaaggguc

SEQ ID NO: 3676816 - RNA, 14 nt, Human
uagaaaaaggguca

SEQ ID NO: 3676817 - RNA, 18 nt, Human
uagaaaaauagcaacuug

SEQ ID NO: 3676818 - RNA, 13 nt, Human
uagaaaaauuuca

SEQ ID NO: 3676819 - RNA, 17 nt, Human
uagaaaaauuucacgau

SEQ ID NO: 3676820 - RNA, 22 nt, Human
uagaaaacaggaaaaaaacuuu

SEQ ID NO: 3676821 - RNA, 16 nt, Human
uagaaaacauaaucuu

SEQ ID NO: 3676822 - RNA, 13 nt, Human
uagaaaacugaaa

SEQ ID NO: 3676823 - RNA, 15 nt, Human
uagaaaacuuuaaag

SEQ ID NO: 3676824 - RNA, 13 nt, Human
uagaaaacuuugu

SEQ ID NO: 3676825 - RNA, 21 nt, Human
uagaaaagaaaaaaaaaauau

SEQ ID NO: 3676826 - RNA, 16 nt, Human
uagaaaagaacuggaa

SEQ ID NO: 3676827 - RNA, 11 nt, Human
uagaaaaggca

SEQ ID NO: 3676828 - RNA, 14 nt, Human
uagaaaagugaauu

SEQ ID NO: 3676829 - RNA, 13 nt, Human
uagaaaauauucu

SEQ ID NO: 3676830 - RNA, 16 nt, Human
uagaaaauauucucua

SEQ ID NO: 3676831 - RNA, 14 nt, Human
uagaaaaucuucau

SEQ ID NO: 3676832 - RNA, 12 nt, Human
uagaaaaugguc

SEQ ID NO: 3676833 - RNA, 18 nt, Human
uagaaaaugugacccucc

SEQ ID NO: 3676834 - RNA, 21 nt, Human
uagaaaaugugacccuccaaa

SEQ ID NO: 3676835 - RNA, 17 nt, Human
uagaaaauuuaaaacau

SEQ ID NO: 3676836 - RNA, 20 nt, Human
uagaaacaacacuguaguaa

SEQ ID NO: 3676837 - RNA, 18 nt, Human
uagaaacauaaauaaaau

SEQ ID NO: 3676838 - RNA, 17 nt, Human
uagaaacauguaauccu

SEQ ID NO: 3676839 - RNA, 20 nt, Human
uagaaacccaagcuccuccu

SEQ ID NO: 3676840 - RNA, 19 nt, Human
uagaaacuaauugacuuua

SEQ ID NO: 3676841 - RNA, 15 nt, Human
uagaaagaagaugaa

SEQ ID NO: 3676842 - RNA, 21 nt, Human
uagaaagaagcccaauauuau

SEQ ID NO: 3676843 - RNA, 14 nt, Human
uagaaagcaggggc

SEQ ID NO: 3676844 - RNA, 15 nt, Human
uagaaagcauuacau

SEQ ID NO: 3676845 - RNA, 23 nt, Human
uagaaagcugcugugaucccagu

SEQ ID NO: 3676846 - RNA, 20 nt, Human
uagaaaguucaaaaagucua

SEQ ID NO: 3676847 - RNA, 15 nt, Human
uagaaauaaaccuua

SEQ ID NO: 3676848 - RNA, 16 nt, Human
uagaaauaaagcaucu

SEQ ID NO: 3676849 - RNA, 13 nt, Human
uagaaauaacaga

SEQ ID NO: 3676850 - RNA, 11 nt, Human
uagaaauaagu

SEQ ID NO: 3676851 - RNA, 16 nt, Human
uagaaauaagugguua

SEQ ID NO: 3676852 - RNA, 11 nt, Human
uagaaaucaua

SEQ ID NO: 3676853 - RNA, 12 nt, Human
uagaaaucauuu

SEQ ID NO: 3676854 - RNA, 16 nt, Human
uagaaaucauuuugca

SEQ ID NO: 3676855 - RNA, 17 nt, Human
uagaaaucauuuugcaa

SEQ ID NO: 3676856 - RNA, 22 nt, Human
uagaaaucccccuuucucuaau

SEQ ID NO: 3676857 - RNA, 16 nt, Human
uagaaauggaaauuuu

SEQ ID NO: 3676858 - RNA, 15 nt, Human
uagaaaugguuguau

SEQ ID NO: 3676859 - RNA, 17 nt, Human
uagaaaugguuguauua

SEQ ID NO: 3676860 - RNA, 16 nt, Human
uagaaauguaaacugc

SEQ ID NO: 3676861 - RNA, 14 nt, Human
uuacuugcuucucu

SEQ ID NO: 3676862 - RNA, 18 nt, Human
uuacuuuaaaaggagcca

SEQ ID NO: 3676863 - RNA, 15 nt, Human
uuacuuuaccacccc

SEQ ID NO: 3676864 - RNA, 15 nt, Human
uuacuuuaucacuuu

SEQ ID NO: 3676865 - RNA, 16 nt, Human
uuacuuuaucacuuuu

SEQ ID NO: 3676866 - RNA, 15 nt, Human
uuacuuuauguuugu

SEQ ID NO: 3676867 - RNA, 11 nt, Human
uuacuuucugu

SEQ ID NO: 3676868 - RNA, 18 nt, Human
uuacuuucuguugccaca

SEQ ID NO: 3676869 - RNA, 15 nt, Human
uuacuuucuuaaugu

SEQ ID NO: 3676870 - RNA, 11 nt, Human
uuacuuuguaa

SEQ ID NO: 3676871 - RNA, 18 nt, Human
uuacuuuguaaauucuga

SEQ ID NO: 3676872 - RNA, 13 nt, Human
uuacuuuguauga

SEQ ID NO: 3676873 - RNA, 13 nt, Human
uuacuuugugaau

SEQ ID NO: 3676874 - RNA, 14 nt, Human
uuacuuuguguuca

SEQ ID NO: 3676875 - RNA, 17 nt, Human
uuacuuuuaaacaguga

SEQ ID NO: 3676876 - RNA, 16 nt, Human
uuacuuuuaaacugug

SEQ ID NO: 3676877 - RNA, 22 nt, Human
uuagauuucauaguucagaauu

SEQ ID NO: 3676878 - RNA, 23 nt, Human
uuagauuugccauagaguacacu

SEQ ID NO: 3676879 - RNA, 13 nt, Human
uuagauuugugug

SEQ ID NO: 3676880 - RNA, 14 nt, Human
uuagauuuuacaug

SEQ ID NO: 3676881 - RNA, 20 nt, Human
uuagauuuuacaugaaguau

SEQ ID NO: 3676882 - RNA, 21 nt, Human
uuagauuuuauuuuacuauug

SEQ ID NO: 3676883 - RNA, 16 nt, Human
uuagauuuuguguuua

SEQ ID NO: 3676884 - RNA, 18 nt, Human
uuagauuuuguguuuauu

SEQ ID NO: 3676885 - RNA, 14 nt, Human
uuagcaaacuuugu

SEQ ID NO: 3676886 - RNA, 15 nt, Human
uuagcaaauacauau

SEQ ID NO: 3676887 - RNA, 23 nt, Human
uuagcacagauuuuaauugucau

SEQ ID NO: 3676888 - RNA, 11 nt, Human
uuagcacagcg

SEQ ID NO: 3676889 - RNA, 18 nt, Human
uuagcacguuuaaaguuc

SEQ ID NO: 3676890 - RNA, 18 nt, Human
uuagcacuguugauguau

SEQ ID NO: 3676891 - RNA, 17 nt, Human
uuagcagaagaaaggaa

SEQ ID NO: 3676892 - RNA, 15 nt, Human
uuagcagaaucaaaa

SEQ ID NO: 3676893 - RNA, 21 nt, Human
uuagcagcagccuuuaaugca

SEQ ID NO: 3676894 - RNA, 21 nt, Human
uuagcagcugacuuucaaagu

SEQ ID NO: 3676895 - RNA, 16 nt, Human
uuagcaguucugcaaa

SEQ ID NO: 3676896 - RNA, 18 nt, Human
uuagcauccuaagaaaua

SEQ ID NO: 3676897 - RNA, 24 nt, Human
uuagcaugacaagccccaggcagg

SEQ ID NO: 3676898 - RNA, 16 nt, Human
uuagcauguuugcuga

SEQ ID NO: 3676899 - RNA, 15 nt, Human
uuagccaggaucaug

SEQ ID NO: 3676900 - RNA, 19 nt, Human
uuagccagguaaugugaau

SEQ ID NO: 3676901 - RNA, 16 nt, Human
uuagccccugaaagcc

SEQ ID NO: 3676902 - RNA, 21 nt, Human
uuagcccucacauuagaucua

SEQ ID NO: 3676903 - RNA, 14 nt, Human
uuagccggagaucc

SEQ ID NO: 3676904 - RNA, 13 nt, Human
uuagccgggcgug

SEQ ID NO: 3676905 - RNA, 17 nt, Human
uuagccugaguagaaag

SEQ ID NO: 3676906 - RNA, 22 nt, Human
uuagccuggaccucugacagca

SEQ ID NO: 3676907 - RNA, 12 nt, Human
uuagccuucucu

SEQ ID NO: 3676908 - RNA, 15 nt, Human
uuagccuucucuguu

SEQ ID NO: 3676909 - RNA, 17 nt, Human
uuagccuucucuguuca

SEQ ID NO: 3676910 - RNA, 23 nt, Human
uuagccuuuuuuccccagacuug

SEQ ID NO: 3676911 - RNA, 14 nt, Human
uuagcggagacgga

SEQ ID NO: 3676912 - RNA, 21 nt, Human
uuagcuaaacggauuccaaag

SEQ ID NO: 3676913 - RNA, 12 nt, Human
uuagcuaaagga

SEQ ID NO: 3676914 - RNA, 23 nt, Human
uuagcuaauaaaaagcuuuuguc

SEQ ID NO: 3676915 - RNA, 18 nt, Human
uuagcuacguuuacucac

SEQ ID NO: 3676916 - RNA, 14 nt, Human
uuagcuaggauuug

SEQ ID NO: 3676917 - RNA, 18 nt, Human
uuagcuaggauuugaaca

SEQ ID NO: 3676918 - RNA, 18 nt, Human
uuagcucaaugagcaugu

SEQ ID NO: 3676919 - RNA, 13 nt, Human
uuagcuccccucc

SEQ ID NO: 3676920 - RNA, 16 nt, Human
uuagcucccucccgca

SEQ ID NO: 3676921 - RNA, 12 nt, Human
uuagcucuuaau

SEQ ID NO: 3676922 - RNA, 16 nt, Human
uuagcugaagaauuga

SEQ ID NO: 3676923 - RNA, 15 nt, Human
uuagcugccaagccc

SEQ ID NO: 3676924 - RNA, 17 nt, Human
uuagcugccaagcccca

SEQ ID NO: 3676925 - RNA, 12 nt, Human
uuagcuggaaaa

SEQ ID NO: 3676926 - RNA, 16 nt, Human
uuagcuggcauuacag

SEQ ID NO: 3676927 - RNA, 15 nt, Human
uuagcugucugcuca

SEQ ID NO: 3676928 - RNA, 14 nt, Human
uuagcuguguuauu

SEQ ID NO: 3676929 - RNA, 21 nt, Human
uuagcuguuauuucuauuuuu

SEQ ID NO: 3676930 - RNA, 17 nt, Human
uuagcuuagaccucagc

SEQ ID NO: 3676931 - RNA, 18 nt, Human
uuagcuuagaccucagcc

SEQ ID NO: 3676932 - RNA, 13 nt, Human
uuagcuucaggaa

SEQ ID NO: 3676933 - RNA, 14 nt, Human
uuagcuucaggaac

SEQ ID NO: 3676934 - RNA, 16 nt, Human
uuagcuucaggaaccu

SEQ ID NO: 3676935 - RNA, 21 nt, Human
uuagcuugaaggaucuguuuu

SEQ ID NO: 3676936 - RNA, 15 nt, Human
uuagcuuggggccag

SEQ ID NO: 3676937 - RNA, 13 nt, Human
uuagcuuuaacuu

SEQ ID NO: 3676938 - RNA, 18 nt, Human
uuagcuuuuuaauuguug

SEQ ID NO: 3676939 - RNA, 18 nt, Human
uuagcuuuuucauccccu

SEQ ID NO: 3676940 - RNA, 18 nt, Human
uuaggaaagaaaaaaagu

SEQ ID NO: 3676941 - RNA, 15 nt, Human
uuaggaaauaaaacc

SEQ ID NO: 3676942 - RNA, 17 nt, Human
uuaggaaauaaaaccuu

SEQ ID NO: 3676943 - RNA, 19 nt, Human
uuaggaaauaaaaccuuuc

SEQ ID NO: 3676944 - RNA, 15 nt, Human
uuaggaaaugaaugu

SEQ ID NO: 3676945 - RNA, 11 nt, Human
uuaggaagagc

SEQ ID NO: 3676946 - RNA, 22 nt, Human
uuaggaagagccuuccacccag

SEQ ID NO: 3676947 - RNA, 20 nt, Human
uuaggaaguguaacagcuga

SEQ ID NO: 3676948 - RNA, 20 nt, Human
uuaggaaguguuuauguugu

SEQ ID NO: 3676949 - RNA, 15 nt, Human
uuaggaaugagaagu

SEQ ID NO: 3676950 - RNA, 12 nt, Human
uuaggacaaauc

SEQ ID NO: 3676951 - RNA, 21 nt, Human
uuaggacaaucaguccccucc

SEQ ID NO: 3676952 - RNA, 16 nt, Human
uuaggagaagccagga

SEQ ID NO: 3676953 - RNA, 17 nt, Human
uuaggagaagccaggaa

SEQ ID NO: 3676954 - RNA, 20 nt, Human
uuaggagaagucuucuauuu

SEQ ID NO: 3676955 - RNA, 13 nt, Human
uuaggagcaugag

SEQ ID NO: 3676956 - RNA, 16 nt, Human
uuaggagcuaaggcuc

SEQ ID NO: 3676957 - RNA, 17 nt, Human
uuaggagcuaaggcucu

SEQ ID NO: 3676958 - RNA, 18 nt, Human
uuaggaggcucaacaaua

SEQ ID NO: 3676959 - RNA, 22 nt, Human
uuaggagugggugacaagagcc

SEQ ID NO: 3676960 - RNA, 15 nt, Human
uuaggaguuuugaga

SEQ ID NO: 3676961 - RNA, 16 nt, Human
uuaggaugugugcaug

SEQ ID NO: 3676962 - RNA, 22 nt, Human
uuaggauuuaacagucauuuaa

SEQ ID NO: 3676963 - RNA, 16 nt, Human
uuaggauuuucacauu

SEQ ID NO: 3676964 - RNA, 15 nt, Human
uuaggcagauugaaa

SEQ ID NO: 3676965 - RNA, 13 nt, Human
uuaggcagcagcu

SEQ ID NO: 3676966 - RNA, 12 nt, Human
uuaggcagggau

SEQ ID NO: 3676967 - RNA, 10 nt, Human
uuaggccagc

SEQ ID NO: 3676968 - RNA, 14 nt, Human
uuaggccuggcaca

SEQ ID NO: 3676969 - RNA, 15 nt, Human
uuaggccuggcacag

SEQ ID NO: 3676970 - RNA, 17 nt, Human
uuaggccuggcacagug

SEQ ID NO: 3676971 - RNA, 23 nt, Human
uuaggcuauuuguaaaucugcca

SEQ ID NO: 3676972 - RNA, 14 nt, Human
uuaggcuguaacua

SEQ ID NO: 3676973 - RNA, 14 nt, Human
uuaggcuuucagcu

SEQ ID NO: 3676974 - RNA, 14 nt, Human
uuagggaaaacauu

SEQ ID NO: 3676975 - RNA, 16 nt, Human
uuagggaacaauuugg

SEQ ID NO: 3676976 - RNA, 13 nt, Human
uuagggaagagaa

SEQ ID NO: 3676977 - RNA, 18 nt, Human
uuagggaagagaaacagg

SEQ ID NO: 3676978 - RNA, 20 nt, Human
uuagggaaggauacaaaagc

SEQ ID NO: 3676979 - RNA, 14 nt, Human
uuagggaagggccu

SEQ ID NO: 3676980 - RNA, 23 nt, Human
uuagggacuacccauagacauga

SEQ ID NO: 3676981 - RNA, 17 nt, Human
uuagggagaaaauucaa

SEQ ID NO: 3676982 - RNA, 23 nt, Human
uuagggagagucauauuuugauu

SEQ ID NO: 3676983 - RNA, 14 nt, Human
uuagggaguauucu

SEQ ID NO: 3676984 - RNA, 18 nt, Human
uuagggaguauucuaaua

SEQ ID NO: 3676985 - RNA, 15 nt, Human
uuagggcacugggcu

SEQ ID NO: 3676986 - RNA, 15 nt, Human
uuaggggaacugggu

SEQ ID NO: 3676987 - RNA, 16 nt, Human
uuaggguuaugauuaa

SEQ ID NO: 3676988 - RNA, 16 nt, Human
uuaggguucugccucu

SEQ ID NO: 3676989 - RNA, 15 nt, Human
uuaggguuucugauu

SEQ ID NO: 3676990 - RNA, 15 nt, Human
uuagguagaaaaaca

SEQ ID NO: 3676991 - RNA, 13 nt, Human
uuaggucaagaag

SEQ ID NO: 3676992 - RNA, 18 nt, Human
uuaggugcaauuucaagg

SEQ ID NO: 3676993 - RNA, 12 nt, Human
uuagguuaacau

SEQ ID NO: 3676994 - RNA, 13 nt, Human
uuagguuaacuau

SEQ ID NO: 3676995 - RNA, 12 nt, Human
uuagguucuaaa

SEQ ID NO: 3676996 - RNA, 13 nt, Human
uuagguucuaaag

SEQ ID NO: 3676997 - RNA, 18 nt, Human
uuagguucuaaaguucua

SEQ ID NO: 3676998 - RNA, 22 nt, Human
uuagguucuaaaguucuaagau

SEQ ID NO: 3676999 - RNA, 14 nt, Human
uuagguucuuaaaa

SEQ ID NO: 3677000 - RNA, 14 nt, Human
uuagguugaaacau

SEQ ID NO: 3677001 - RNA, 16 nt, Human
uuagguugaaacauau

SEQ ID NO: 3677002 - RNA, 13 nt, Human
uuagguugugaau

SEQ ID NO: 3677003 - RNA, 14 nt, Human
uuagguuuaacaua

SEQ ID NO: 3677004 - RNA, 14 nt, Human
uuagguuuuguaca

SEQ ID NO: 3677005 - RNA, 19 nt, Human
uuagguuuuuuuguauagu

SEQ ID NO: 3677006 - RNA, 14 nt, Human
uuaguaaagaaaug

SEQ ID NO: 3677007 - RNA, 15 nt, Human
uuaguaaagaaauga

SEQ ID NO: 3677008 - RNA, 13 nt, Human
uuaguaaaugucu

SEQ ID NO: 3677009 - RNA, 20 nt, Human
uuaguaaaugucuuuguaag

SEQ ID NO: 3677010 - RNA, 13 nt, Human
uuaguaaauguua

SEQ ID NO: 3677011 - RNA, 17 nt, Human
uuaguaauaccucuaau

SEQ ID NO: 3677012 - RNA, 14 nt, Human
uuaguaaucauauu

SEQ ID NO: 3677013 - RNA, 14 nt, Human
uuaguaaucuguau

SEQ ID NO: 3677014 - RNA, 20 nt, Human
uuaguaaugcuacgugugau

SEQ ID NO: 3677015 - RNA, 21 nt, Human
uuaguaaugcuacgugugauu

SEQ ID NO: 3677016 - RNA, 17 nt, Human
uuaguacaaaguuucaa

SEQ ID NO: 3677017 - RNA, 14 nt, Human
uuaguacccaccug

SEQ ID NO: 3677018 - RNA, 13 nt, Human
uuaguacuuuaua

SEQ ID NO: 3677019 - RNA, 19 nt, Human
uuaguaggauaugccugcu

SEQ ID NO: 3677020 - RNA, 18 nt, Human
uuaguaucuaacauguau

SEQ ID NO: 3677021 - RNA, 23 nt, Human
uuaguaucuaacauguaucccaa

SEQ ID NO: 3677022 - RNA, 18 nt, Human
uuaguaugaggcauuugu

SEQ ID NO: 3677023 - RNA, 15 nt, Human
uuaguauucauucug

SEQ ID NO: 3677024 - RNA, 12 nt, Human
uuauucauaauu

SEQ ID NO: 3677025 - RNA, 14 nt, Human
uuauucauaugcau

SEQ ID NO: 3677026 - RNA, 15 nt, Human
uuauucauaugcaua

SEQ ID NO: 3677027 - RNA, 17 nt, Human
uuauucauuagcuguga

SEQ ID NO: 3677028 - RNA, 12 nt, Human
uuauucauuauu

SEQ ID NO: 3677029 - RNA, 15 nt, Human
uuauucauuauuugu

SEQ ID NO: 3677030 - RNA, 19 nt, Human
uuauucauuauuugucaaa

SEQ ID NO: 3677031 - RNA, 17 nt, Human
uuauucauuuaaaauga

SEQ ID NO: 3677032 - RNA, 18 nt, Human
uuauucauuuaaaaugau

SEQ ID NO: 3677033 - RNA, 20 nt, Human
uuauucauuuaaaaugauua

SEQ ID NO: 3677034 - RNA, 22 nt, Human
uuauuccagaaugcuguacauc

SEQ ID NO: 3677035 - RNA, 20 nt, Human
uuauuccauauuagaaaacu

SEQ ID NO: 3677036 - RNA, 20 nt, Human
uuauuccccauucuuccuag

SEQ ID NO: 3677037 - RNA, 16 nt, Human
uuauucccuguacaau

SEQ ID NO: 3677038 - RNA, 13 nt, Human
uuauucccuuccu

SEQ ID NO: 3677039 - RNA, 23 nt, Human
uuauucccuuccugccagccccu

SEQ ID NO: 3677040 - RNA, 13 nt, Human
uuauuccuguaug

SEQ ID NO: 3677041 - RNA, 19 nt, Human
uuauucuaaacagacucau

SEQ ID NO: 3677042 - RNA, 12 nt, Human
uuauucuaauua

SEQ ID NO: 3677043 - RNA, 13 nt, Human
uuauucuucuaga

SEQ ID NO: 3677044 - RNA, 13 nt, Human
uuauucuugauca

SEQ ID NO: 3677045 - RNA, 13 nt, Human
uuauugaagcaga

SEQ ID NO: 3677046 - RNA, 22 nt, Human
uuauugaaggaagccaaauuua

SEQ ID NO: 3677047 - RNA, 18 nt, Human
uuauugaaucuauuuaag

SEQ ID NO: 3677048 - RNA, 22 nt, Human
uuauugacaauaauuucagguu

SEQ ID NO: 3677049 - RNA, 23 nt, Human
uuauugacacagaaaauguugag

SEQ ID NO: 3677050 - RNA, 13 nt, Human
uuauugacacuga

SEQ ID NO: 3677051 - RNA, 22 nt, Human
uuauugaccauuuuuuaauuua

SEQ ID NO: 3677052 - RNA, 18 nt, Human
uuauugagaaagagcacu

SEQ ID NO: 3677053 - RNA, 20 nt, Human
uuauugagagagauguguaa

SEQ ID NO: 3677054 - RNA, 22 nt, Human
uuauugagagagauguguaauu

SEQ ID NO: 3677055 - RNA, 22 nt, Human
uuauugaggaaaaauaugugaa

SEQ ID NO: 3677056 - RNA, 17 nt, Human
uuauugauauucuaaga

SEQ ID NO: 3677057 - RNA, 19 nt, Human
uuauugauauucuaagaaa

SEQ ID NO: 3677058 - RNA, 17 nt, Human
uuauugcaauaaaguau

SEQ ID NO: 3677059 - RNA, 14 nt, Human
uuauugcaguuuau

SEQ ID NO: 3677060 - RNA, 16 nt, Human
uuauugcaguuuauca

SEQ ID NO: 3677061 - RNA, 21 nt, Human
uuauugcaguuuaucauucaa

SEQ ID NO: 3677062 - RNA, 15 nt, Human
uuauugcccacgcug

SEQ ID NO: 3677063 - RNA, 22 nt, Human
uuauugccuucucaccagcugc

SEQ ID NO: 3677064 - RNA, 23 nt, Human
uuauugccuucucaccagcugca

SEQ ID NO: 3677065 - RNA, 17 nt, Human
uuauugcuaguauuuga

SEQ ID NO: 3677066 - RNA, 20 nt, Human
uuauugcuaguauuugaauu

SEQ ID NO: 3677067 - RNA, 13 nt, Human
uuauugcugauuu

SEQ ID NO: 3677068 - RNA, 18 nt, Human
uuauugcugauuuuaaug

SEQ ID NO: 3677069 - RNA, 15 nt, Human
uuauugcuuaguaaa

SEQ ID NO: 3677070 - RNA, 16 nt, Human
uuauuggaauuaaccu

SEQ ID NO: 3677071 - RNA, 22 nt, Human
uuauuggaauuaaccuggugcu

SEQ ID NO: 3677072 - RNA, 12 nt, Human
uuauuggcuuuu

SEQ ID NO: 3677073 - RNA, 17 nt, Human
uuauuguaccucucuua

SEQ ID NO: 3677074 - RNA, 21 nt, Human
uuauuguacguuuaaagugua

SEQ ID NO: 3677075 - RNA, 15 nt, Human
uuauugucuagugaa

SEQ ID NO: 3677076 - RNA, 14 nt, Human
uuauugucuguaaa

SEQ ID NO: 3677077 - RNA, 14 nt, Human
uuauuguggauaac

SEQ ID NO: 3677078 - RNA, 23 nt, Human
uuauuguggauaacaaagauauc

SEQ ID NO: 3677079 - RNA, 18 nt, Human
uuauuguguuugucauua

SEQ ID NO: 3677080 - RNA, 20 nt, Human
uuauuguguuugucauuagc

SEQ ID NO: 3677081 - RNA, 22 nt, Human
uuauuguguuugucauuagccu

SEQ ID NO: 3677082 - RNA, 14 nt, Human
uuauuguuaauaca

SEQ ID NO: 3677083 - RNA, 20 nt, Human
uugaguuaagucuaucuggu

SEQ ID NO: 3677084 - RNA, 20 nt, Human
uugaguugguuacuucauau

SEQ ID NO: 3677085 - RNA, 17 nt, Human
uugaguuguuuuuguau

SEQ ID NO: 3677086 - RNA, 19 nt, Human
uugaguuguuuuuguauau

SEQ ID NO: 3677087 - RNA, 19 nt, Human
uugaguuuccucaggcugc

SEQ ID NO: 3677088 - RNA, 13 nt, Human
uugaguuuguagg

SEQ ID NO: 3677089 - RNA, 11 nt, Human
uugaguuuguc

SEQ ID NO: 3677090 - RNA, 19 nt, Human
uugaguuuucaguggggca

SEQ ID NO: 3677091 - RNA, 17 nt, Human
uugaguuuugacugcuu

SEQ ID NO: 3677092 - RNA, 22 nt, Human
uugauaaagauuuuuuaauaau

SEQ ID NO: 3677093 - RNA, 12 nt, Human
uugauaaaguaa

SEQ ID NO: 3677094 - RNA, 14 nt, Human
uugauaaaguuucu

SEQ ID NO: 3677095 - RNA, 17 nt, Human
uugauaaaguuucucag

SEQ ID NO: 3677096 - RNA, 15 nt, Human
uugauaaauaguguu

SEQ ID NO: 3677097 - RNA, 11 nt, Human
uugauaacagc

SEQ ID NO: 3677098 - RNA, 15 nt, Human
uugauaacagcacug

SEQ ID NO: 3677099 - RNA, 13 nt, Human
uugauaacuuugc

SEQ ID NO: 3677100 - RNA, 21 nt, Human
uugauaagggacugauguuug

SEQ ID NO: 3677101 - RNA, 19 nt, Human
uugauaaucaacugggcug

SEQ ID NO: 3677102 - RNA, 23 nt, Human
uugauaaugcuuucacaacauuu

SEQ ID NO: 3677103 - RNA, 22 nt, Human
uugauaauguuaaauuuguaag

SEQ ID NO: 3677104 - RNA, 14 nt, Human
uugauaauuuuccu

SEQ ID NO: 3677105 - RNA, 18 nt, Human
uugauaauuuuccuuuaa

SEQ ID NO: 3677106 - RNA, 17 nt, Human
uugauacauaauaaaaa

SEQ ID NO: 3677107 - RNA, 13 nt, Human
uugauaccccccu

SEQ ID NO: 3677108 - RNA, 13 nt, Human
uugauaccccugg

SEQ ID NO: 3677109 - RNA, 23 nt, Human
uugauaccccuggggaacauuuc

SEQ ID NO: 3677110 - RNA, 13 nt, Human
uugauacuguugc

SEQ ID NO: 3677111 - RNA, 15 nt, Human
uugauacuguugcac

SEQ ID NO: 3677112 - RNA, 17 nt, Human
uugauacuguugcacgu

SEQ ID NO: 3677113 - RNA, 18 nt, Human
uugauacuguugcacgug

SEQ ID NO: 3677114 - RNA, 13 nt, Human
uugauagaaccau

SEQ ID NO: 3677115 - RNA, 23 nt, Human
uugauagcacagacccugcccug

SEQ ID NO: 3677116 - RNA, 14 nt, Human
uugauagcuuuauu

SEQ ID NO: 3677117 - RNA, 19 nt, Human
uugauagcuuuauuuuuua

SEQ ID NO: 3677118 - RNA, 16 nt, Human
uugauagggaacuggg

SEQ ID NO: 3677119 - RNA, 17 nt, Human
uugauauagaacagugc

SEQ ID NO: 3677120 - RNA, 19 nt, Human
uugauaucacagucuaauu

SEQ ID NO: 3677121 - RNA, 17 nt, Human
uugauaucuauaaaaua

SEQ ID NO: 3677122 - RNA, 15 nt, Human
uugauaugacuguuu

SEQ ID NO: 3677123 - RNA, 22 nt, Human
uugauauuuguauuuauucuuu

SEQ ID NO: 3677124 - RNA, 15 nt, Human
uugauauuuucuaua

SEQ ID NO: 3677125 - RNA, 17 nt, Human
uugaucaacaucuuuuc

SEQ ID NO: 3677126 - RNA, 15 nt, Human
uugaucauguacuuu

SEQ ID NO: 3677127 - RNA, 16 nt, Human
uugaucauguacuuuu

SEQ ID NO: 3677128 - RNA, 18 nt, Human
uugaucauuuucccccca

SEQ ID NO: 3677129 - RNA, 21 nt, Human
uugauccauccagcuugccag

SEQ ID NO: 3677130 - RNA, 15 nt, Human
uugauccauuucuaa

SEQ ID NO: 3677131 - RNA, 18 nt, Human
uugauccauuucuaauua

SEQ ID NO: 3677132 - RNA, 16 nt, Human
uugaucuucaacaaau

SEQ ID NO: 3677133 - RNA, 15 nt, Human
uugaugaaaagcuuu

SEQ ID NO: 3677134 - RNA, 18 nt, Human
uugaugaagcaaggaaga

SEQ ID NO: 3677135 - RNA, 23 nt, Human
uugaugaagcaaggaagauauac

SEQ ID NO: 3677136 - RNA, 18 nt, Human
uugaugaguguaacaaga

SEQ ID NO: 3677137 - RNA, 21 nt, Human
uugaugaguguaacaagaaag

SEQ ID NO: 3677138 - RNA, 22 nt, Human
uugaugaguguaacaagaaagg

SEQ ID NO: 3677139 - RNA, 16 nt, Human
uugaugaucuuugcag

SEQ ID NO: 3677140 - RNA, 17 nt, Human
uugaugcaauccuuaca

SEQ ID NO: 3677141 - RNA, 20 nt, Human
uugaugcaauccuuacaaau

SEQ ID NO: 3677142 - RNA, 16 nt, Human
uugaugcaugcuauuc

SEQ ID NO: 3677143 - RNA, 12 nt, Human
uugaugccuggc

SEQ ID NO: 3677144 - RNA, 14 nt, Human
uugauggagauauu

SEQ ID NO: 3677145 - RNA, 22 nt, Human
uugaugggaugauugaagaaac

SEQ ID NO: 3677146 - RNA, 17 nt, Human
uugaugggauucuggac

SEQ ID NO: 3677147 - RNA, 21 nt, Human
uugaugguaaccauaauggaa

SEQ ID NO: 3677148 - RNA, 13 nt, Human
uugauguaaaauc

SEQ ID NO: 3677149 - RNA, 14 nt, Human
uugauguaaagaug

SEQ ID NO: 3677150 - RNA, 20 nt, Human
uugauguaaggaugggcaug

SEQ ID NO: 3677151 - RNA, 20 nt, Human
uugauguacagucugucaug

SEQ ID NO: 3677152 - RNA, 20 nt, Human
uugauguacugauugagaag

SEQ ID NO: 3677153 - RNA, 20 nt, Human
uugauguaucugaguugcca

SEQ ID NO: 3677154 - RNA, 15 nt, Human
uugaugugacaauaa

SEQ ID NO: 3677155 - RNA, 18 nt, Human
uugaugugcaaaaauuuu

SEQ ID NO: 3677156 - RNA, 19 nt, Human
uugauguggcccuggcugc

SEQ ID NO: 3677157 - RNA, 12 nt, Human
uugauguguugu

SEQ ID NO: 3677158 - RNA, 14 nt, Human
uugauguguuguuc

SEQ ID NO: 3677159 - RNA, 20 nt, Human
uugauguguuuauuuauaga

SEQ ID NO: 3677160 - RNA, 14 nt, Human
uugauguuacagau

SEQ ID NO: 3677161 - RNA, 15 nt, Human
uugauguuacagauu

SEQ ID NO: 3677162 - RNA, 19 nt, Human
uugauguuccuuccagugu

SEQ ID NO: 3677163 - RNA, 14 nt, Human
uugauguugaugca

SEQ ID NO: 3677164 - RNA, 16 nt, Human
uugauguuggcuggga

SEQ ID NO: 3677165 - RNA, 13 nt, Human
uugauguuuccuu

SEQ ID NO: 3677166 - RNA, 16 nt, Human
uugauguuuguggccu

SEQ ID NO: 3677167 - RNA, 18 nt, Human
uugauguuuguggccuca

SEQ ID NO: 3677168 - RNA, 13 nt, Human
uugauuaaagaug

SEQ ID NO: 3677169 - RNA, 15 nt, Human
uugcagguugcuuug

SEQ ID NO: 3677170 - RNA, 20 nt, Human
uugcaguagagucaucucca

SEQ ID NO: 3677171 - RNA, 16 nt, Human
uugcagucacucuagu

SEQ ID NO: 3677172 - RNA, 14 nt, Human
uugcagucauagaa

SEQ ID NO: 3677173 - RNA, 21 nt, Human
uugcagucccaagcggugucu

SEQ ID NO: 3677174 - RNA, 23 nt, Human
uugcagucccaagcggugucucu

SEQ ID NO: 3677175 - RNA, 16 nt, Human
uugcaguucagcacca

SEQ ID NO: 3677176 - RNA, 13 nt, Human
uugcaguuuauca

SEQ ID NO: 3677177 - RNA, 23 nt, Human
uugcaguuuaucauucaagugua

SEQ ID NO: 3677178 - RNA, 13 nt, Human
uugcauaaaauug

SEQ ID NO: 3677179 - RNA, 16 nt, Human
uugcauaacguauaaa

SEQ ID NO: 3677180 - RNA, 13 nt, Human
uugcauaagagcu

SEQ ID NO: 3677181 - RNA, 13 nt, Human
uugcauaagguuu

SEQ ID NO: 3677182 - RNA, 15 nt, Human
uugcauaauaagcua

SEQ ID NO: 3677183 - RNA, 20 nt, Human
uugcauacaaacaagcauau

SEQ ID NO: 3677184 - RNA, 18 nt, Human
uugcauacuauuaaacau

SEQ ID NO: 3677185 - RNA, 22 nt, Human
uugcauaguaccaaucauuuua

SEQ ID NO: 3677186 - RNA, 23 nt, Human
uugcauaguaccaaucauuuuaa

SEQ ID NO: 3677187 - RNA, 23 nt, Human
uugcauauaacuuauauuguaag

SEQ ID NO: 3677188 - RNA, 13 nt, Human
uugcauauucauu

SEQ ID NO: 3677189 - RNA, 20 nt, Human
uugcaucaaggggucacuua

SEQ ID NO: 3677190 - RNA, 13 nt, Human
uugcaucaauuuu

SEQ ID NO: 3677191 - RNA, 20 nt, Human
uugcaucacuguaucauuuu

SEQ ID NO: 3677192 - RNA, 13 nt, Human
uugcaucagaaau

SEQ ID NO: 3677193 - RNA, 15 nt, Human
uugcaucagaaaugu

SEQ ID NO: 3677194 - RNA, 17 nt, Human
uugcaucucaaaauuau

SEQ ID NO: 3677195 - RNA, 18 nt, Human
uugcaucuggguagcugu

SEQ ID NO: 3677196 - RNA, 19 nt, Human
uugcaucuguauaaguaag

SEQ ID NO: 3677197 - RNA, 21 nt, Human
uugcaugaagagaagcaauuu

SEQ ID NO: 3677198 - RNA, 14 nt, Human
uugcaugaggcuag

SEQ ID NO: 3677199 - RNA, 14 nt, Human
uugcaugauguauu

SEQ ID NO: 3677200 - RNA, 11 nt, Human
uugcaugcaug

SEQ ID NO: 3677201 - RNA, 15 nt, Human
uugcaugcaugcaaa

SEQ ID NO: 3677202 - RNA, 21 nt, Human
uugcaugcugcuuuaauugug

SEQ ID NO: 3677203 - RNA, 22 nt, Human
uugcaugggcuaaugaagauca

SEQ ID NO: 3677204 - RNA, 17 nt, Human
uugcauggguuuuguag

SEQ ID NO: 3677205 - RNA, 20 nt, Human
uugcauggguuuuguaggua

SEQ ID NO: 3677206 - RNA, 21 nt, Human
uugcauguuauguuuaauaag

SEQ ID NO: 3677207 - RNA, 17 nt, Human
uugcauguuccacuaac

SEQ ID NO: 3677208 - RNA, 13 nt, Human
uugcauuaaauua

SEQ ID NO: 3677209 - RNA, 20 nt, Human
uugcauuaaauucacaaacu

SEQ ID NO: 3677210 - RNA, 21 nt, Human
uugcauuaaauucacaaacuu

SEQ ID NO: 3677211 - RNA, 11 nt, Human
uugcauucaaa

SEQ ID NO: 3677212 - RNA, 22 nt, Human
uugcauucuauugccuucuuug

SEQ ID NO: 3677213 - RNA, 15 nt, Human
uugcauugaacacaa

SEQ ID NO: 3677214 - RNA, 18 nt, Human
uugcauugaacacaaacu

SEQ ID NO: 3677215 - RNA, 14 nt, Human
uugcauugaauaua

SEQ ID NO: 3677216 - RNA, 17 nt, Human
uugcauugaauauauua

SEQ ID NO: 3677217 - RNA, 15 nt, Human
uugcauugacauuau

SEQ ID NO: 3677218 - RNA, 13 nt, Human
uugcauugacuuu

SEQ ID NO: 3677219 - RNA, 16 nt, Human
uugcauugagcugaga

SEQ ID NO: 3677220 - RNA, 21 nt, Human
uugcauuuaaaacagacacug

SEQ ID NO: 3677221 - RNA, 15 nt, Human
uugcauuuaugguca

SEQ ID NO: 3677222 - RNA, 14 nt, Human
uugcauuucagaaa

SEQ ID NO: 3677223 - RNA, 14 nt, Human
uugcauuugcuuuu

SEQ ID NO: 3677224 - RNA, 15 nt, Human
uugcauuuggucaag

SEQ ID NO: 3677225 - RNA, 14 nt, Human
uugcauuuguuuau

SEQ ID NO: 3677226 - RNA, 20 nt, Human
uugcauuuguuuauguaauu

SEQ ID NO: 3677227 - RNA, 12 nt, Human
uugcauuuuugc

SEQ ID NO: 3677228 - RNA, 18 nt, Human
uugcauuuuuuaaaacaa

SEQ ID NO: 3677229 - RNA, 15 nt, Human
uugccaaaaaggaua

SEQ ID NO: 3677230 - RNA, 23 nt, Human
uugccaaaaagugaaauaaugug

SEQ ID NO: 3677231 - RNA, 17 nt, Human
uugccaaaacccagcug

SEQ ID NO: 3677232 - RNA, 22 nt, Human
uugccaaaacccagcugcaccc

SEQ ID NO: 3677233 - RNA, 23 nt, Human
uugccaaaauaaugucuuguuaa

SEQ ID NO: 3677234 - RNA, 13 nt, Human
uugccaaaauggu

SEQ ID NO: 3677235 - RNA, 13 nt, Human
uugccaaaauuca

SEQ ID NO: 3677236 - RNA, 16 nt, Human
uugccaaaguacagaa

SEQ ID NO: 3677237 - RNA, 15 nt, Human
uugccaaaucuggcu

SEQ ID NO: 3677238 - RNA, 22 nt, Human
uugccaaccuguaauaaauaug

SEQ ID NO: 3677239 - RNA, 23 nt, Human
uugccaaccuguaauaaauauga

SEQ ID NO: 3677240 - RNA, 22 nt, Human
uugccaaccuuauagggaugag

SEQ ID NO: 3677241 - RNA, 12 nt, Human
uugccaagacaa

SEQ ID NO: 3677242 - RNA, 24 nt, Human
uugccaagacaaaucaacagaagc

SEQ ID NO: 3677243 - RNA, 14 nt, Human
uugccaagaccuuu

SEQ ID NO: 3677244 - RNA, 15 nt, Human
uugccaagaccuuuc

SEQ ID NO: 3677245 - RNA, 15 nt, Human
uugccaagcucagga

SEQ ID NO: 3677246 - RNA, 22 nt, Human
uugccaagcuccaagccccauc

SEQ ID NO: 3677247 - RNA, 21 nt, Human
uugccaagggcauaaauuauu

SEQ ID NO: 3677248 - RNA, 12 nt, Human
uugccacagcuu

SEQ ID NO: 3677249 - RNA, 20 nt, Human
uugccacaguagaacugucu

SEQ ID NO: 3677250 - RNA, 16 nt, Human
uucaaauccuuccaaa

SEQ ID NO: 3677251 - RNA, 17 nt, Human
uucaaauccuuccaaaa

SEQ ID NO: 3677252 - RNA, 18 nt, Human
uucaaaugcuguaacuuu

SEQ ID NO: 3677253 - RNA, 19 nt, Human
uucaaauuagaagacauuu

SEQ ID NO: 3677254 - RNA, 17 nt, Human
uucaaauuuuaucugcc

SEQ ID NO: 3677255 - RNA, 22 nt, Human
uucaacaaagaaacaaagaugu

SEQ ID NO: 3677256 - RNA, 19 nt, Human
uucaacaaauaucuugugu

SEQ ID NO: 3677257 - RNA, 14 nt, Human
uucaacaauucuaa

SEQ ID NO: 3677258 - RNA, 18 nt, Human
uucaacaauucuaaaaug

SEQ ID NO: 3677259 - RNA, 21 nt, Human
uucaacagguuuuccugaaga

SEQ ID NO: 3677260 - RNA, 17 nt, Human
uucaacaguuucaaaau

SEQ ID NO: 3677261 - RNA, 16 nt, Human
uucaacaucaauguuc

SEQ ID NO: 3677262 - RNA, 19 nt, Human
uucaacaucaauguucauu

SEQ ID NO: 3677263 - RNA, 21 nt, Human
uucaacaucaauguucauugu

SEQ ID NO: 3677264 - RNA, 22 nt, Human
uucaacaucaauguucauugua

SEQ ID NO: 3677265 - RNA, 21 nt, Human
uucaacauccugccagcccca

SEQ ID NO: 3677266 - RNA, 21 nt, Human
uucaacauguuauuuguaaua

SEQ ID NO: 3677267 - RNA, 22 nt, Human
uucaaccagggauuguuucugu

SEQ ID NO: 3677268 - RNA, 21 nt, Human
uucaaccauggacuuuauaag

SEQ ID NO: 3677269 - RNA, 14 nt, Human
uucaaccccacccu

SEQ ID NO: 3677270 - RNA, 13 nt, Human
uucaacgcagccc

SEQ ID NO: 3677271 - RNA, 14 nt, Human
uucaacgcagcccu

SEQ ID NO: 3677272 - RNA, 15 nt, Human
uucaacgcagcccug

SEQ ID NO: 3677273 - RNA, 17 nt, Human
uucaacuauuuuauuau

SEQ ID NO: 3677274 - RNA, 16 nt, Human
uucaacucagacuagu

SEQ ID NO: 3677275 - RNA, 21 nt, Human
uucaacuccucgacaucacug

SEQ ID NO: 3677276 - RNA, 15 nt, Human
uucaacugucuuccu

SEQ ID NO: 3677277 - RNA, 19 nt, Human
uucaacugucuuccucaaa

SEQ ID NO: 3677278 - RNA, 16 nt, Human
uucaacuuugaauaaa

SEQ ID NO: 3677279 - RNA, 12 nt, Human
uucaacuuuucc

SEQ ID NO: 3677280 - RNA, 12 nt, Human
uucaagaaacug

SEQ ID NO: 3677281 - RNA, 23 nt, Human
uucaagaaacugaggaauuuucu

SEQ ID NO: 3677282 - RNA, 21 nt, Human
uucaagaaagccagucuuaac

SEQ ID NO: 3677283 - RNA, 22 nt, Human
uucaagaaagccagucuuaaca

SEQ ID NO: 3677284 - RNA, 14 nt, Human
uucaagaacuuguu

SEQ ID NO: 3677285 - RNA, 15 nt, Human
uucaagaacuuguuu

SEQ ID NO: 3677286 - RNA, 11 nt, Human
uucaagaauga

SEQ ID NO: 3677287 - RNA, 18 nt, Human
uucaagacauuaaaucua

SEQ ID NO: 3677288 - RNA, 18 nt, Human
uucaagacugaauuccaa

SEQ ID NO: 3677289 - RNA, 23 nt, Human
uucaagaggagcccccacccugu

SEQ ID NO: 3677290 - RNA, 23 nt, Human
uucaagcaucuccugaggaucag

SEQ ID NO: 3677291 - RNA, 17 nt, Human
uucaagcauucuucaac

SEQ ID NO: 3677292 - RNA, 14 nt, Human
uucaagccauucca

SEQ ID NO: 3677293 - RNA, 18 nt, Human
uucaagcgauucuccugc

SEQ ID NO: 3677294 - RNA, 23 nt, Human
uucaagcgauucucuugccucag

SEQ ID NO: 3677295 - RNA, 12 nt, Human
uucaagcucuga

SEQ ID NO: 3677296 - RNA, 14 nt, Human
uucaagcucugagg

SEQ ID NO: 3677297 - RNA, 14 nt, Human
uucaagcuuauuuu

SEQ ID NO: 3677298 - RNA, 17 nt, Human
uucaaggaauuucuuaa

SEQ ID NO: 3677299 - RNA, 19 nt, Human
uucaaggaauuucuuaacu

SEQ ID NO: 3677300 - RNA, 21 nt, Human
uucaaggauccugagccagau

SEQ ID NO: 3677301 - RNA, 19 nt, Human
uucaaggcacucuagauuc

SEQ ID NO: 3677302 - RNA, 16 nt, Human
uucaaggccauccuuc

SEQ ID NO: 3677303 - RNA, 17 nt, Human
uucaaggccauccuucc

SEQ ID NO: 3677304 - RNA, 12 nt, Human
uucaaggcuuca

SEQ ID NO: 3677305 - RNA, 22 nt, Human
uucaagggcuuuccugugccag

SEQ ID NO: 3677306 - RNA, 18 nt, Human
uucaagguaaaauucuaa

SEQ ID NO: 3677307 - RNA, 17 nt, Human
uucaagguggccaaauu

SEQ ID NO: 3677308 - RNA, 14 nt, Human
uucaagguucuaac

SEQ ID NO: 3677309 - RNA, 15 nt, Human
uucaagguucuaacc

SEQ ID NO: 3677310 - RNA, 16 nt, Human
uucaaguaauugugaa

SEQ ID NO: 3677311 - RNA, 15 nt, Human
uucaaguacacugaa

SEQ ID NO: 3677312 - RNA, 16 nt, Human
uucaaguagcugggau

SEQ ID NO: 3677313 - RNA, 16 nt, Human
uucaagucaccuccuu

SEQ ID NO: 3677314 - RNA, 21 nt, Human
uaguuuuauuuuauguuuaga

SEQ ID NO: 3677315 - RNA, 17 nt, Human
uaguuuucaguuuguau

SEQ ID NO: 3677316 - RNA, 22 nt, Human
uaguuuucauccauaacugaac

SEQ ID NO: 3677317 - RNA, 15 nt, Human
uaguuuugucaaacu

SEQ ID NO: 3677318 - RNA, 15 nt, Human
uaguuuuuauauguu

SEQ ID NO: 3677319 - RNA, 17 nt, Human
uaguuuuucuucaacau

SEQ ID NO: 3677320 - RNA, 17 nt, Human
uaguuuuuguaauuuau

SEQ ID NO: 3677321 - RNA, 15 nt, Human
uaguuuuuguucuua

SEQ ID NO: 3677322 - RNA, 23 nt, Human
uauaaaaaaaauaguugagccag

SEQ ID NO: 3677323 - RNA, 16 nt, Human
uauaaaaaauauguau

SEQ ID NO: 3677324 - RNA, 17 nt, Human
uauaaaaaauggugccu

SEQ ID NO: 3677325 - RNA, 19 nt, Human
uauaaaaaauggugccuga

SEQ ID NO: 3677326 - RNA, 14 nt, Human
uauaaaaaaugguu

SEQ ID NO: 3677327 - RNA, 15 nt, Human
uauaaaaaaugguuc

SEQ ID NO: 3677328 - RNA, 21 nt, Human
uauaaaaaaugguucagaauu

SEQ ID NO: 3677329 - RNA, 19 nt, Human
uauaaaaagaaaagauaaa

SEQ ID NO: 3677330 - RNA, 21 nt, Human
uauaaaaauaaaaaacacugg

SEQ ID NO: 3677331 - RNA, 16 nt, Human
uauaaaaauauauaua

SEQ ID NO: 3677332 - RNA, 21 nt, Human
uauaaaacagaguaaucuugu

SEQ ID NO: 3677333 - RNA, 19 nt, Human
uauaaaacuguacuucacu

SEQ ID NO: 3677334 - RNA, 15 nt, Human
uauaaaacuuuccuc

SEQ ID NO: 3677335 - RNA, 20 nt, Human
uauaaaagauggggucugua

SEQ ID NO: 3677336 - RNA, 22 nt, Human
uauaaaagauggggucuguaaa

SEQ ID NO: 3677337 - RNA, 23 nt, Human
uauaaaagauggggucuguaaaa

SEQ ID NO: 3677338 - RNA, 22 nt, Human
uauaaaagggacugagaaauuu

SEQ ID NO: 3677339 - RNA, 13 nt, Human
uauaaaauaaaua

SEQ ID NO: 3677340 - RNA, 19 nt, Human
uauaaaauaacuaaaaugu

SEQ ID NO: 3677341 - RNA, 21 nt, Human
uauaaaauaauuuuuauauuu

SEQ ID NO: 3677342 - RNA, 14 nt, Human
uauaaaaucagcca

SEQ ID NO: 3677343 - RNA, 16 nt, Human
uauaaaaucagccaau

SEQ ID NO: 3677344 - RNA, 22 nt, Human
uauaaaauggcaacaaacugca

SEQ ID NO: 3677345 - RNA, 22 nt, Human
uauaaaaugguguuuucaugua

SEQ ID NO: 3677346 - RNA, 15 nt, Human
uauaaaauuuacugu

SEQ ID NO: 3677347 - RNA, 19 nt, Human
uauaaacaagaaaaauaaa

SEQ ID NO: 3677348 - RNA, 16 nt, Human
uauaaacagaaaugga

SEQ ID NO: 3677349 - RNA, 18 nt, Human
uauaaacagaaauggaaa

SEQ ID NO: 3677350 - RNA, 17 nt, Human
uauaaacaucacacaca

SEQ ID NO: 3677351 - RNA, 18 nt, Human
uauaaaccuaaaaaagau

SEQ ID NO: 3677352 - RNA, 16 nt, Human
uauaaacuuuaccuuu

SEQ ID NO: 3677353 - RNA, 18 nt, Human
uauaaacuuuaccuuuuu

SEQ ID NO: 3677354 - RNA, 15 nt, Human
uauaaacuuuagagu

SEQ ID NO: 3677355 - RNA, 15 nt, Human
uauaaagaacaaggu

SEQ ID NO: 3677356 - RNA, 23 nt, Human
uauaaagaagguuggugaauuuc

SEQ ID NO: 3677357 - RNA, 14 nt, Human
uauaaagaauugug

SEQ ID NO: 3677358 - RNA, 21 nt, Human
uauaaagacguuuuauaagca

SEQ ID NO: 3677359 - RNA, 17 nt, Human
uauaaagauggcugacu

SEQ ID NO: 3677360 - RNA, 16 nt, Human
uauaaagguugacaau

SEQ ID NO: 3677361 - RNA, 19 nt, Human
uauaaaguacccaucuagu

SEQ ID NO: 3677362 - RNA, 17 nt, Human
uauaaagugcuugugua

SEQ ID NO: 3677363 - RNA, 12 nt, Human
uauaaauaaaua

SEQ ID NO: 3677364 - RNA, 15 nt, Human
uauaaauaaauauau

SEQ ID NO: 3677365 - RNA, 17 nt, Human
uauaaauaaauauauau

SEQ ID NO: 3677366 - RNA, 12 nt, Human
uauaaauauaua

SEQ ID NO: 3677367 - RNA, 20 nt, Human
uauaaauauauauaaagaau

SEQ ID NO: 3677368 - RNA, 21 nt, Human
uauaaauauauauaaauauau

SEQ ID NO: 3677369 - RNA, 22 nt, Human
uauaaauauauauaaauauaua

SEQ ID NO: 3677370 - RNA, 19 nt, Human
uauaaauauauauucuauu

SEQ ID NO: 3677371 - RNA, 19 nt, Human
uauaaauauauuauuacuu

SEQ ID NO: 3677372 - RNA, 15 nt, Human
uauaaauaucauugu

SEQ ID NO: 3677373 - RNA, 16 nt, Human
uauaaaucaaugucac

SEQ ID NO: 3677374 - RNA, 20 nt, Human
uauaaaucaaugucacuuaa

SEQ ID NO: 3677375 - RNA, 14 nt, Human
uauaaaucauauug

SEQ ID NO: 3677376 - RNA, 21 nt, Human
uauaaaucauauugaugaaaa

SEQ ID NO: 3677377 - RNA, 22 nt, Human
uauaaaucauauugaugaaaag

SEQ ID NO: 3677378 - RNA, 19 nt, Human
uauaaaucgcuuuugauaa

SEQ ID NO: 3677379 - RNA, 20 nt, Human
uauaaaucgcuuuugauaau

SEQ ID NO: 3677380 - RNA, 20 nt, Human
uauaaaugaaguuuauacag

SEQ ID NO: 3677381 - RNA, 24 nt, Human
uauaaaugaaguuuauacaguaca

SEQ ID NO: 3677382 - RNA, 15 nt, Human
uauaaaugcaaauaa

SEQ ID NO: 3677383 - RNA, 16 nt, Human
uauaaaugcaaauaac

SEQ ID NO: 3677384 - RNA, 16 nt, Human
uauaaaugcuauuuuu

SEQ ID NO: 3677385 - RNA, 12 nt, Human
uauaaauguaua

SEQ ID NO: 3677386 - RNA, 14 nt, Human
uauaaauguauaaa

SEQ ID NO: 3677387 - RNA, 18 nt, Human
uauaaauguauauacaca

SEQ ID NO: 3677388 - RNA, 23 nt, Human
uauaaauguauauacacauauac

SEQ ID NO: 3677389 - RNA, 17 nt, Human
uauaaaugucuuuaaug

SEQ ID NO: 3677390 - RNA, 13 nt, Human
uauaaaugugugu

SEQ ID NO: 3677391 - RNA, 16 nt, Human
uauaaauguguguaug

SEQ ID NO: 3677392 - RNA, 14 nt, Human
uauaaauuaaauau

SEQ ID NO: 3677393 - RNA, 14 nt, Human
uauaaauuccucuu

SEQ ID NO: 3677394 - RNA, 11 nt, Human
uauaaauucug

SEQ ID NO: 3677395 - RNA, 17 nt, Human
uauaaauugucuuaaug

SEQ ID NO: 3677396 - RNA, 22 nt, Human
uauaaauuuauuuacugcuagu

SEQ ID NO: 3677397 - RNA, 15 nt, Human
uauaaauuuguguaa

SEQ ID NO: 3677398 - RNA, 22 nt, Human
uauaaauuuuuaagagaaagaa

SEQ ID NO: 3677399 - RNA, 22 nt, Human
uauaacaaaggauacuuauuua

SEQ ID NO: 3677400 - RNA, 14 nt, Human
uauaacacauuuuu

SEQ ID NO: 3677401 - RNA, 14 nt, Human
uauaacagauacau

SEQ ID NO: 3677402 - RNA, 16 nt, Human
uauaacagauacauuu

SEQ ID NO: 3677403 - RNA, 19 nt, Human
uauaacauauauggaagag

SEQ ID NO: 3677404 - RNA, 17 nt, Human
uauaacauauguacaua

SEQ ID NO: 3677405 - RNA, 11 nt, Human
uauaacaugaa

SEQ ID NO: 3677406 - RNA, 14 nt, Human
uauaacaugaaaug

SEQ ID NO: 3677407 - RNA, 21 nt, Human
uauaaccaauguuuaaaaaag

SEQ ID NO: 3677408 - RNA, 17 nt, Human
uauaaccagcugaaguu

SEQ ID NO: 3677409 - RNA, 22 nt, Human
uauaaccaguguuguggauuua

SEQ ID NO: 3677410 - RNA, 15 nt, Human
uauaaccccagcucc

SEQ ID NO: 3677411 - RNA, 14 nt, Human
uauaacguguucaa

SEQ ID NO: 3677412 - RNA, 15 nt, Human
uauaacuaacagcau

SEQ ID NO: 3677413 - RNA, 13 nt, Human
uauaacuacauau

SEQ ID NO: 3677414 - RNA, 18 nt, Human
uauaacuacauauugaau

SEQ ID NO: 3677415 - RNA, 22 nt, Human
uauaacucaaggauaccuucuu

SEQ ID NO: 3677416 - RNA, 19 nt, Human
uauaacucaucauaaaaua

SEQ ID NO: 3677417 - RNA, 20 nt, Human
uauaacucaucauaaaauaa

SEQ ID NO: 3677418 - RNA, 14 nt, Human
uauaacugcccagc

SEQ ID NO: 3677419 - RNA, 23 nt, Human
uauaacuguauuugaaauaagaa

SEQ ID NO: 3677420 - RNA, 20 nt, Human
uauaacuuaaaaauguaaau

SEQ ID NO: 3677421 - RNA, 18 nt, Human
uauaacuuaaugaaaaca

SEQ ID NO: 3677422 - RNA, 19 nt, Human
uauaacuuaaugaaaacaa

SEQ ID NO: 3677423 - RNA, 16 nt, Human
uauaacuucaaauuuu

SEQ ID NO: 3677424 - RNA, 12 nt, Human
uauaacuugaug

SEQ ID NO: 3677425 - RNA, 17 nt, Human
uauaacuugaugcaugu

SEQ ID NO: 3677426 - RNA, 16 nt, Human
uauaacuuuaacuucu

SEQ ID NO: 3677427 - RNA, 13 nt, Human
uauaacuuuagaa

SEQ ID NO: 3677428 - RNA, 17 nt, Human
uauaacuuuuuauauuc

SEQ ID NO: 3677429 - RNA, 13 nt, Human
uauaagaaaaacu

SEQ ID NO: 3677430 - RNA, 15 nt, Human
uauaagaaaaacuuu

SEQ ID NO: 3677431 - RNA, 21 nt, Human
uauaagaaagacaucuuucuc

SEQ ID NO: 3677432 - RNA, 22 nt, Human
uauaagaaagacaucuuucucu

SEQ ID NO: 3677433 - RNA, 12 nt, Human
uauaagaaagcc

SEQ ID NO: 3677434 - RNA, 14 nt, Human
uauaagaaagccug

SEQ ID NO: 3677435 - RNA, 20 nt, Human
uauaagaagcuuucaguauu

SEQ ID NO: 3677436 - RNA, 16 nt, Human
uauaagagcaugaaau

SEQ ID NO: 3677437 - RNA, 15 nt, Human
uauaagcacugaaaa

SEQ ID NO: 3677438 - RNA, 15 nt, Human
uauaagcaucauuau

SEQ ID NO: 3677439 - RNA, 20 nt, Human
uauaagccaguguugccuaa

SEQ ID NO: 3677440 - RNA, 21 nt, Human
uauaagccaguguugccuaag

SEQ ID NO: 3677441 - RNA, 16 nt, Human
uauaaggaaagcaaua

SEQ ID NO: 3677442 - RNA, 10 nt, Human
uauaaggacu

SEQ ID NO: 3677443 - RNA, 12 nt, Human
uauaaggacugc

SEQ ID NO: 3677444 - RNA, 21 nt, Human
uauaaggacugcaugguaauu

SEQ ID NO: 3677445 - RNA, 16 nt, Human
uauaaggacuuccuga

SEQ ID NO: 3677446 - RNA, 21 nt, Human
uauaagggaaguaguuaucau

SEQ ID NO: 3677447 - RNA, 21 nt, Human
uauaagguguuuucuguguaa

SEQ ID NO: 3677448 - RNA, 23 nt, Human
uauaaguaaagugauuaaagugc

SEQ ID NO: 3677449 - RNA, 22 nt, Human
uauaaguaacuuuauucuugaa

SEQ ID NO: 3677450 - RNA, 14 nt, Human
uauaaguaagaaaa

SEQ ID NO: 3677451 - RNA, 16 nt, Human
uauaaguaagaaaaua

SEQ ID NO: 3677452 - RNA, 14 nt, Human
uauaagucacaaag

SEQ ID NO: 3677453 - RNA, 18 nt, Human
uauaagucauuguauguu

SEQ ID NO: 3677454 - RNA, 17 nt, Human
uauaagugcacacagaa

SEQ ID NO: 3677455 - RNA, 18 nt, Human
uauaaguguacauaugug

SEQ ID NO: 3677456 - RNA, 12 nt, Human
uauaauaaaaau

SEQ ID NO: 3677457 - RNA, 13 nt, Human
uauaauaaaaaua

SEQ ID NO: 3677458 - RNA, 14 nt, Human
uauaauaaaaauau

SEQ ID NO: 3677459 - RNA, 18 nt, Human
uuguggaaagccucugcu

SEQ ID NO: 3677460 - RNA, 13 nt, Human
uuguggaauguug

SEQ ID NO: 3677461 - RNA, 18 nt, Human
uuguggaauguuggauaa

SEQ ID NO: 3677462 - RNA, 15 nt, Human
uuguggacauuuaag

SEQ ID NO: 3677463 - RNA, 16 nt, Human
uuguggacauuuaaga

SEQ ID NO: 3677464 - RNA, 18 nt, Human
uuguggacuaaaagauau

SEQ ID NO: 3677465 - RNA, 18 nt, Human
uuguggauaacaaagaua

SEQ ID NO: 3677466 - RNA, 18 nt, Human
uuguggauguuuuaauuc

SEQ ID NO: 3677467 - RNA, 15 nt, Human
uuguggauuucaguu

SEQ ID NO: 3677468 - RNA, 19 nt, Human
uuguggauuucaguuuuaa

SEQ ID NO: 3677469 - RNA, 22 nt, Human
uuguggcaagugaauuugccug

SEQ ID NO: 3677470 - RNA, 17 nt, Human
uuguggcuauuaaaacu

SEQ ID NO: 3677471 - RNA, 19 nt, Human
uuguggcuccuaucugugu

SEQ ID NO: 3677472 - RNA, 15 nt, Human
uuguggcugucagca

SEQ ID NO: 3677473 - RNA, 16 nt, Human
uugugggaauuuaaga

SEQ ID NO: 3677474 - RNA, 14 nt, Human
uugugggccugggc

SEQ ID NO: 3677475 - RNA, 22 nt, Human
uauaauaaaaggaaaagcaaau

SEQ ID NO: 3677476 - RNA, 14 nt, Human
uauaauaaaaugug

SEQ ID NO: 3677477 - RNA, 12 nt, Human
uauaauaaauau

SEQ ID NO: 3677478 - RNA, 16 nt, Human
uauaauaaauguacau

SEQ ID NO: 3677479 - RNA, 15 nt, Human
uauaauacacaaaau

SEQ ID NO: 3677480 - RNA, 14 nt, Human
uauaauacucuguu

SEQ ID NO: 3677481 - RNA, 15 nt, Human
uauaauacuguauuu

SEQ ID NO: 3677482 - RNA, 17 nt, Human
uauaauauacuauauuu

SEQ ID NO: 3677483 - RNA, 14 nt, Human
uauaauauauauau

SEQ ID NO: 3677484 - RNA, 16 nt, Human
uauaauauauuugugu

SEQ ID NO: 3677485 - RNA, 20 nt, Human
uauaauaucuaaaguuauau

SEQ ID NO: 3677486 - RNA, 16 nt, Human
uauaaucaucaaguaa

SEQ ID NO: 3677487 - RNA, 17 nt, Human
uauaaucaucaaguaau

SEQ ID NO: 3677488 - RNA, 23 nt, Human
uauaaucauuauuacuuuugcug

SEQ ID NO: 3677489 - RNA, 18 nt, Human
uauaaucccagcacuuug

SEQ ID NO: 3677490 - RNA, 19 nt, Human
uauaauccuuaaaucuuaa

SEQ ID NO: 3677491 - RNA, 22 nt, Human
uauaauccuuaaaucuuaaugu

SEQ ID NO: 3677492 - RNA, 14 nt, Human
uauaaucugucaaa

SEQ ID NO: 3677493 - RNA, 20 nt, Human
uauaaucugucaaaacacug

SEQ ID NO: 3677494 - RNA, 21 nt, Human
uauaaucugucaaaacacugu

SEQ ID NO: 3677495 - RNA, 16 nt, Human
uauaaucuuauaauug

SEQ ID NO: 3677496 - RNA, 20 nt, Human
uauaaucuuccauacuucuu

SEQ ID NO: 3677497 - RNA, 16 nt, Human
uauaaugaacaaaauu

SEQ ID NO: 3677498 - RNA, 13 nt, Human
uauaaugaauaaa

SEQ ID NO: 3677499 - RNA, 16 nt, Human
uauaaugaauaaauca

SEQ ID NO: 3677500 - RNA, 18 nt, Human
uauaaugggauuggguuu

SEQ ID NO: 3677501 - RNA, 15 nt, Human
uauaaugguugacug

SEQ ID NO: 3677502 - RNA, 14 nt, Human
uauaauguaagcuc

SEQ ID NO: 3677503 - RNA, 15 nt, Human
uauaauguauucaua

SEQ ID NO: 3677504 - RNA, 12 nt, Human
uauaaugugugu

SEQ ID NO: 3677505 - RNA, 14 nt, Human
uauaauguguguau

SEQ ID NO: 3677506 - RNA, 17 nt, Human
uauaauguguguaugug

SEQ ID NO: 3677507 - RNA, 16 nt, Human
uauaauguugcccagu

SEQ ID NO: 3677508 - RNA, 17 nt, Human
uauaauguuuuuaauau

SEQ ID NO: 3677509 - RNA, 12 nt, Human
uauaauuaacau

SEQ ID NO: 3677510 - RNA, 14 nt, Human
uauaauuaacaugu

SEQ ID NO: 3677511 - RNA, 15 nt, Human
uauaauucaccuucu

SEQ ID NO: 3677512 - RNA, 23 nt, Human
uauaauucacucaagcacugaua

SEQ ID NO: 3677513 - RNA, 16 nt, Human
uauaauucucauuaaa

SEQ ID NO: 3677514 - RNA, 17 nt, Human
uauaauugccaaaaagu

SEQ ID NO: 3677515 - RNA, 18 nt, Human
uauaauuggauuuccuaa

SEQ ID NO: 3677516 - RNA, 23 nt, Human
uauaauuguacaaaauuaagcaa

SEQ ID NO: 3677517 - RNA, 12 nt, Human
uauaauuguauc

SEQ ID NO: 3677518 - RNA, 15 nt, Human
uauaauuguuuuuua

SEQ ID NO: 3677519 - RNA, 22 nt, Human
uauaauuuaacuucagagggaa

SEQ ID NO: 3677520 - RNA, 16 nt, Human
uauaauuuaaugcaug

SEQ ID NO: 3677521 - RNA, 14 nt, Human
uauaauuuaccuaa

SEQ ID NO: 3677522 - RNA, 22 nt, Human
uauaauuuccauuuacuuaaga

SEQ ID NO: 3677523 - RNA, 16 nt, Human
uauaauuuucugaaag

SEQ ID NO: 3677524 - RNA, 19 nt, Human
uauaauuuuuuagagagcu

SEQ ID NO: 3677525 - RNA, 21 nt, Human
uauaauuuuuuucaauauuua

SEQ ID NO: 3677526 - RNA, 13 nt, Human
uauacaaaacuuu

SEQ ID NO: 3677527 - RNA, 15 nt, Human
uauacaaaacuuuau

SEQ ID NO: 3677528 - RNA, 17 nt, Human
uauacaaaacuuuauca

SEQ ID NO: 3677529 - RNA, 14 nt, Human
uauacaaaauaaga

SEQ ID NO: 3677530 - RNA, 14 nt, Human
uauacaaauauauu

SEQ ID NO: 3677531 - RNA, 23 nt, Human
uauacaaauuaaaaagauucuuu

SEQ ID NO: 3677532 - RNA, 13 nt, Human
uauacaacaccaa

SEQ ID NO: 3677533 - RNA, 21 nt, Human
uauacaacccuggcauuaugu

SEQ ID NO: 3677534 - RNA, 23 nt, Human
uauacaaguacugguaagauugu

SEQ ID NO: 3677535 - RNA, 20 nt, Human
uauacaauaauggaaaaaaa

SEQ ID NO: 3677536 - RNA, 13 nt, Human
uauacaauauaua

SEQ ID NO: 3677537 - RNA, 15 nt, Human
uauacacacacacac

SEQ ID NO: 3677538 - RNA, 15 nt, Human
uauacacauauaccu

SEQ ID NO: 3677539 - RNA, 21 nt, Human
uauacaccauauacuguucuu

SEQ ID NO: 3677540 - RNA, 19 nt, Human
uauacacgaauagacauca

SEQ ID NO: 3677541 - RNA, 13 nt, Human
uauacagaggaaa

SEQ ID NO: 3677542 - RNA, 18 nt, Human
uauacagaugaaaauuug

SEQ ID NO: 3677543 - RNA, 20 nt, Human
uauacagcuguauugucuga

SEQ ID NO: 3677544 - RNA, 15 nt, Human
uauacaggggaauau

SEQ ID NO: 3677545 - RNA, 16 nt, Human
uauacaggggaauauu

SEQ ID NO: 3677546 - RNA, 15 nt, Human
uauacaggucauauu

SEQ ID NO: 3677547 - RNA, 16 nt, Human
uauacaguaacuuuau

SEQ ID NO: 3677548 - RNA, 21 nt, Human
uauacaguaacuuuaugugua

SEQ ID NO: 3677549 - RNA, 16 nt, Human
uauacaguacaguggu

SEQ ID NO: 3677550 - RNA, 23 nt, Human
uauacaguagugagaagaauauu

SEQ ID NO: 3677551 - RNA, 17 nt, Human
uauacagugcagagccu

SEQ ID NO: 3677552 - RNA, 19 nt, Human
uauacaguuauaaaauuaa

SEQ ID NO: 3677553 - RNA, 16 nt, Human
uauacaguuuuaaaga

SEQ ID NO: 3677554 - RNA, 22 nt, Human
uauacaguuuuccuaaauguau

SEQ ID NO: 3677555 - RNA, 13 nt, Human
uauacauaaacaa

SEQ ID NO: 3677556 - RNA, 21 nt, Human
uauacauacuaugaaauaugu

SEQ ID NO: 3677557 - RNA, 15 nt, Human
uauacauaucuuuau

SEQ ID NO: 3677558 - RNA, 15 nt, Human
uauacauccugggua

SEQ ID NO: 3677559 - RNA, 22 nt, Human
uauacaugaagaauagaaacaa

SEQ ID NO: 3677560 - RNA, 22 nt, Human
uauacaugacacugaaaugccu

SEQ ID NO: 3677561 - RNA, 18 nt, Human
uauacaugugauacauuu

SEQ ID NO: 3677562 - RNA, 20 nt, Human
uauacaugugauacauuuuu

SEQ ID NO: 3677563 - RNA, 14 nt, Human
uauacaugugugua

SEQ ID NO: 3677564 - RNA, 17 nt, Human
uauacauguguguauau

SEQ ID NO: 3677565 - RNA, 19 nt, Human
uauacauguuuauguaaac

SEQ ID NO: 3677566 - RNA, 19 nt, Human
uauacauuaguaaaugucu

SEQ ID NO: 3677567 - RNA, 14 nt, Human
uauacauuugauaa

SEQ ID NO: 3677568 - RNA, 17 nt, Human
uauaccaaagcacauuu

SEQ ID NO: 3677569 - RNA, 22 nt, Human
uauaccaaagcacauuuuaaaa

SEQ ID NO: 3677570 - RNA, 16 nt, Human
uauaccaaauuaaaaa

SEQ ID NO: 3677571 - RNA, 12 nt, Human
uauaccaauaaa

SEQ ID NO: 3677572 - RNA, 13 nt, Human
uauaccaauaaag

SEQ ID NO: 3677573 - RNA, 13 nt, Human
uauaccauuuccg

SEQ ID NO: 3677574 - RNA, 17 nt, Human
uauaccauuuccguaau

SEQ ID NO: 3677575 - RNA, 14 nt, Human
uauaccauuuccuc

SEQ ID NO: 3677576 - RNA, 15 nt, Human
uauacccacccagaa

SEQ ID NO: 3677577 - RNA, 22 nt, Human
uauacccacccagaaugagaca

SEQ ID NO: 3677578 - RNA, 17 nt, Human
uauacccccugcaaagc

SEQ ID NO: 3677579 - RNA, 20 nt, Human
uauaccccgugaagcaucca

SEQ ID NO: 3677580 - RNA, 22 nt, Human
uauaccccgugaagcauccagg

SEQ ID NO: 3677581 - RNA, 19 nt, Human
uauacccguacaacguguc

SEQ ID NO: 3677582 - RNA, 15 nt, Human
uauaccucaaacuau

SEQ ID NO: 3677583 - RNA, 12 nt, Human
uauaccugauuu

SEQ ID NO: 3677584 - RNA, 15 nt, Human
uauaccugugccucg

SEQ ID NO: 3677585 - RNA, 15 nt, Human
uauacgaacaaaaca

SEQ ID NO: 3677586 - RNA, 16 nt, Human
uauacgagaacaggca

SEQ ID NO: 3677587 - RNA, 18 nt, Human
uauacgauaaauaacuuu

SEQ ID NO: 3677588 - RNA, 20 nt, Human
uauacgcagcgugcuuuaaa

SEQ ID NO: 3677589 - RNA, 14 nt, Human
uauacguguagcua

SEQ ID NO: 3677590 - RNA, 21 nt, Human
uauacuacuuuguuaggauuu

SEQ ID NO: 3677591 - RNA, 20 nt, Human
uauacuagggagccauuuga

SEQ ID NO: 3677592 - RNA, 17 nt, Human
uauacuauaguaccagu

SEQ ID NO: 3677593 - RNA, 15 nt, Human
uauacucauuagaau

SEQ ID NO: 3677594 - RNA, 18 nt, Human
uauacuccaguguacaua

SEQ ID NO: 3677595 - RNA, 21 nt, Human
uauacucucaccauuuggauc

SEQ ID NO: 3677596 - RNA, 23 nt, Human
uauacugaucuucauuaccaaua

SEQ ID NO: 3677597 - RNA, 17 nt, Human
uauacugauuaugucuu

SEQ ID NO: 3677598 - RNA, 22 nt, Human
uauacugcaaacuauuuaaaga

SEQ ID NO: 3677599 - RNA, 16 nt, Human
uauacuggagaagucu

SEQ ID NO: 3677600 - RNA, 10 nt, Human
uauacuguaa

SEQ ID NO: 3677601 - RNA, 13 nt, Human
uauacuguaaaga

SEQ ID NO: 3677602 - RNA, 15 nt, Human
uauacuguaauuuag

SEQ ID NO: 3677603 - RNA, 13 nt, Human
uauacuguacaau

SEQ ID NO: 3677604 - RNA, 22 nt, Human
uauacuguacaauaaaaacauu

SEQ ID NO: 3677605 - RNA, 21 nt, Human
uuuaauggcagcagaaaacuu

SEQ ID NO: 3677606 - RNA, 14 nt, Human
uuuaauguaaagau

SEQ ID NO: 3677607 - RNA, 15 nt, Human
uuuaauguaaagauu

SEQ ID NO: 3677608 - RNA, 21 nt, Human
uuuaauguaauagggaaaauu

SEQ ID NO: 3677609 - RNA, 18 nt, Human
uuuaauguacuaauauuu

SEQ ID NO: 3677610 - RNA, 19 nt, Human
uuuaaugugaacuuguagc

SEQ ID NO: 3677611 - RNA, 23 nt, Human
uuuaauguugaacaaaauaaauu

SEQ ID NO: 3677612 - RNA, 21 nt, Human
uuuaauguuuaaaacaucauu

SEQ ID NO: 3677613 - RNA, 18 nt, Human
uuuaauguuuuaaaugua

SEQ ID NO: 3677614 - RNA, 18 nt, Human
uuuaauuaaaaacuagua

SEQ ID NO: 3677615 - RNA, 13 nt, Human
uuuaauuaaauaa

SEQ ID NO: 3677616 - RNA, 14 nt, Human
uuuaauuaagcaaa

SEQ ID NO: 3677617 - RNA, 22 nt, Human
uuuaauuaaugaaauaucugua

SEQ ID NO: 3677618 - RNA, 19 nt, Human
uuuaauuagguuaacuaug

SEQ ID NO: 3677619 - RNA, 15 nt, Human
uuuaauuagugcuaa

SEQ ID NO: 3677620 - RNA, 11 nt, Human
uuuaauuauua

SEQ ID NO: 3677621 - RNA, 19 nt, Human
uuuaauuauuaacuacauu

SEQ ID NO: 3677622 - RNA, 21 nt, Human
uuuaauuccaauaugaugacu

SEQ ID NO: 3677623 - RNA, 22 nt, Human
uuuaauuccaugaaucgcuucu

SEQ ID NO: 3677624 - RNA, 17 nt, Human
uuuaauugaaagaaugu

SEQ ID NO: 3677625 - RNA, 21 nt, Human
uuuaauuguaaaguaaaagcu

SEQ ID NO: 3677626 - RNA, 12 nt, Human
uuuaauugucau

SEQ ID NO: 3677627 - RNA, 15 nt, Human
uuuaauuguuuaaaa

SEQ ID NO: 3677628 - RNA, 22 nt, Human
uuuaauuuaguaaaccaauccu

SEQ ID NO: 3677629 - RNA, 19 nt, Human
uuuaauuuauuuauuaaga

SEQ ID NO: 3677630 - RNA, 20 nt, Human
uuuaauuucaagcuuauuuu

SEQ ID NO: 3677631 - RNA, 13 nt, Human
uuuaauuucuuca

SEQ ID NO: 3677632 - RNA, 16 nt, Human
uuuaauuugaaauaug

SEQ ID NO: 3677633 - RNA, 19 nt, Human
uuuaauuugaugaaagcug

SEQ ID NO: 3677634 - RNA, 14 nt, Human
uuuaauuuucacuu

SEQ ID NO: 3677635 - RNA, 15 nt, Human
uuuaauuuugacacu

SEQ ID NO: 3677636 - RNA, 14 nt, Human
uuuaauuuuggaau

SEQ ID NO: 3677637 - RNA, 16 nt, Human
uuuaauuuuguauuuu

SEQ ID NO: 3677638 - RNA, 18 nt, Human
uuuaauuuuuuuuaguau

SEQ ID NO: 3677639 - RNA, 15 nt, Human
uuuacaaaaauauaa

SEQ ID NO: 3677640 - RNA, 18 nt, Human
uuuacaaaacaaacucau

SEQ ID NO: 3677641 - RNA, 19 nt, Human
uuuacaaaacuacaugaga

SEQ ID NO: 3677642 - RNA, 21 nt, Human
uuuacaaaagaaauaccuuga

SEQ ID NO: 3677643 - RNA, 15 nt, Human
uuuacaaacugaaga

SEQ ID NO: 3677644 - RNA, 23 nt, Human
uuuacaaaggcuguauucagcaa

SEQ ID NO: 3677645 - RNA, 18 nt, Human
uuuacaaaguguguauua

SEQ ID NO: 3677646 - RNA, 20 nt, Human
uuuacaaauguuaaaaugug

SEQ ID NO: 3677647 - RNA, 11 nt, Human
uuuacaacuca

SEQ ID NO: 3677648 - RNA, 22 nt, Human
uuuacaacucauuccagauccc

SEQ ID NO: 3677649 - RNA, 20 nt, Human
uuuacaagacaacauuguaa

SEQ ID NO: 3677650 - RNA, 21 nt, Human
uuuacaaucagccacauucua

SEQ ID NO: 3677651 - RNA, 16 nt, Human
uuuacaauguaauuau

SEQ ID NO: 3677652 - RNA, 15 nt, Human
uuuacaaugucauau

SEQ ID NO: 3677653 - RNA, 18 nt, Human
uuuacacacuguacacau

SEQ ID NO: 3677654 - RNA, 15 nt, Human
uuuacacagaaacac

SEQ ID NO: 3677655 - RNA, 19 nt, Human
uuuacacagaaacacugcc

SEQ ID NO: 3677656 - RNA, 16 nt, Human
uuuacacgcuuuugug

SEQ ID NO: 3677657 - RNA, 14 nt, Human
uuuacacucaggcu

SEQ ID NO: 3677658 - RNA, 17 nt, Human
uuuacagaaaaaucuug

SEQ ID NO: 3677659 - RNA, 13 nt, Human
uuuacagagacag

SEQ ID NO: 3677660 - RNA, 17 nt, Human
uuuacagaugaauguau

SEQ ID NO: 3677661 - RNA, 23 nt, Human
uuuacagauuuauuccuuuguua

SEQ ID NO: 3677662 - RNA, 15 nt, Human
uuuacagcacuacuc

SEQ ID NO: 3677663 - RNA, 18 nt, Human
uuuacagcacuacucugu

SEQ ID NO: 3677664 - RNA, 21 nt, Human
uuuacagcucauuaaacuuuu

SEQ ID NO: 3677665 - RNA, 20 nt, Human
uuuacagcucugacuuuaca

SEQ ID NO: 3677666 - RNA, 18 nt, Human
uuuacagcuuuacacaca

SEQ ID NO: 3677667 - RNA, 18 nt, Human
uuuacaggaacuucauca

SEQ ID NO: 3677668 - RNA, 13 nt, Human
uuuacaggcccug

SEQ ID NO: 3677669 - RNA, 22 nt, Human
uuuacaggcccugcuccugcag

SEQ ID NO: 3677670 - RNA, 15 nt, Human
uuuacaguccuucaa

SEQ ID NO: 3677671 - RNA, 19 nt, Human
uuuacaguuacuuuuccuu

SEQ ID NO: 3677672 - RNA, 15 nt, Human
uuuacauaacugccu

SEQ ID NO: 3677673 - RNA, 14 nt, Human
uuuacaugaaguau

SEQ ID NO: 3677674 - RNA, 15 nt, Human
uuuacaugaaguauu

SEQ ID NO: 3677675 - RNA, 21 nt, Human
uuuacaugaaguauuuuuuca

SEQ ID NO: 3677676 - RNA, 18 nt, Human
uuuacaugaauugcauuu

SEQ ID NO: 3677677 - RNA, 12 nt, Human
uuuacaugcuua

SEQ ID NO: 3677678 - RNA, 18 nt, Human
uuuacaugggguuuucaa

SEQ ID NO: 3677679 - RNA, 19 nt, Human
uuuacaugggguuuucaau

SEQ ID NO: 3677680 - RNA, 19 nt, Human
uuuacauguguagccuaug

SEQ ID NO: 3677681 - RNA, 20 nt, Human
uuuacauuguaaauaguauu

SEQ ID NO: 3677682 - RNA, 10 nt, Human
uuuacauuua

SEQ ID NO: 3677683 - RNA, 20 nt, Human
uuuaccaaguuauauaaaga

SEQ ID NO: 3677684 - RNA, 22 nt, Human
uuuaccacugcugugaacaagu

SEQ ID NO: 3677685 - RNA, 16 nt, Human
uuuaccacuugcugca

SEQ ID NO: 3677686 - RNA, 13 nt, Human
uucuauaauuuaa

SEQ ID NO: 3677687 - RNA, 20 nt, Human
uucuauagcaucacuuaaaa

SEQ ID NO: 3677688 - RNA, 14 nt, Human
uucuauagccaaaa

SEQ ID NO: 3677689 - RNA, 23 nt, Human
uucuauagccaaaaauagcuaaa

SEQ ID NO: 3677690 - RNA, 20 nt, Human
uucuauaggaacauaugaaa

SEQ ID NO: 3677691 - RNA, 16 nt, Human
uucuauaguuauuaag

SEQ ID NO: 3677692 - RNA, 21 nt, Human
uucuauauaauuccuguuuuu

SEQ ID NO: 3677693 - RNA, 12 nt, Human
uucuauaugaau

SEQ ID NO: 3677694 - RNA, 20 nt, Human
uucuauaugcgaguuagcca

SEQ ID NO: 3677695 - RNA, 15 nt, Human
uucuauauuuucauu

SEQ ID NO: 3677696 - RNA, 18 nt, Human
uucuauauuuucauucuc

SEQ ID NO: 3677697 - RNA, 17 nt, Human
uucuaucacauauuuga

SEQ ID NO: 3677698 - RNA, 17 nt, Human
uucuauccaaacaugua

SEQ ID NO: 3677699 - RNA, 23 nt, Human
uucuaucccaaacuaagcuaugu

SEQ ID NO: 3677700 - RNA, 15 nt, Human
uucuauccucaucuu

SEQ ID NO: 3677701 - RNA, 14 nt, Human
uucuauccucugua

SEQ ID NO: 3677702 - RNA, 21 nt, Human
uucuaugaaauauuauguuaa

SEQ ID NO: 3677703 - RNA, 16 nt, Human
uucuaugacacaugca

SEQ ID NO: 3677704 - RNA, 14 nt, Human
uucuaugcaguggc

SEQ ID NO: 3677705 - RNA, 23 nt, Human
uucuaugcugcuuuuauaucugu

SEQ ID NO: 3677706 - RNA, 18 nt, Human
uucuauggguguuaucac

SEQ ID NO: 3677707 - RNA, 16 nt, Human
uucuaugguuaugaaa

SEQ ID NO: 3677708 - RNA, 23 nt, Human
uucuaugguuaugaaagaauaua

SEQ ID NO: 3677709 - RNA, 14 nt, Human
uucuauuaaaagac

SEQ ID NO: 3677710 - RNA, 22 nt, Human
uucuauuaaaagacucauccgu

SEQ ID NO: 3677711 - RNA, 12 nt, Human
uucuauuaaagu

SEQ ID NO: 3677712 - RNA, 20 nt, Human
uucuauuacauuuucaguga

SEQ ID NO: 3677713 - RNA, 19 nt, Human
uucuauuauuuuuauaauu

SEQ ID NO: 3677714 - RNA, 18 nt, Human
uucuauuccuucuggccu

SEQ ID NO: 3677715 - RNA, 12 nt, Human
uucuauugccuu

SEQ ID NO: 3677716 - RNA, 14 nt, Human
uucuauuguuucuu

SEQ ID NO: 3677717 - RNA, 13 nt, Human
uucuauuuaaugg

SEQ ID NO: 3677718 - RNA, 14 nt, Human
uucuauuuaaugga

SEQ ID NO: 3677719 - RNA, 18 nt, Human
uucuauuuauauguacau

SEQ ID NO: 3677720 - RNA, 21 nt, Human
uucuauuuauuuauuuauuca

SEQ ID NO: 3677721 - RNA, 14 nt, Human
uucuauuuauuugu

SEQ ID NO: 3677722 - RNA, 15 nt, Human
uucuauuucacugga

SEQ ID NO: 3677723 - RNA, 13 nt, Human
uucuauuuuacaa

SEQ ID NO: 3677724 - RNA, 18 nt, Human
uucuauuuuauuaugaag

SEQ ID NO: 3677725 - RNA, 16 nt, Human
uucuauuuuguaaacu

SEQ ID NO: 3677726 - RNA, 15 nt, Human
uucuauuuuuguaga

SEQ ID NO: 3677727 - RNA, 23 nt, Human
uucuauuuuuuguuuuguuuccu

SEQ ID NO: 3677728 - RNA, 16 nt, Human
uucucaaaagcauuua

SEQ ID NO: 3677729 - RNA, 23 nt, Human
uucucaaacacaguuacacuugu

SEQ ID NO: 3677730 - RNA, 22 nt, Human
uucucaaaccuguuuaaauauu

SEQ ID NO: 3677731 - RNA, 22 nt, Human
uucucaaaguuuugaaaagcua

SEQ ID NO: 3677732 - RNA, 12 nt, Human
uucucaaaucuu

SEQ ID NO: 3677733 - RNA, 21 nt, Human
uucucaacaaagcacaguguu

SEQ ID NO: 3677734 - RNA, 22 nt, Human
uucucaacaaagcacaguguua

SEQ ID NO: 3677735 - RNA, 14 nt, Human
uucucaaccuacca

SEQ ID NO: 3677736 - RNA, 22 nt, Human
uucucaagauacugcuacugua

SEQ ID NO: 3677737 - RNA, 23 nt, Human
uucucaagccgcaucccagacuu

SEQ ID NO: 3677738 - RNA, 15 nt, Human
uucucaagugccuua

SEQ ID NO: 3677739 - RNA, 18 nt, Human
uucucaaguucuaagauu

SEQ ID NO: 3677740 - RNA, 14 nt, Human
uucucaaugaaaaa

SEQ ID NO: 3677741 - RNA, 14 nt, Human
uucucaauuccaac

SEQ ID NO: 3677742 - RNA, 17 nt, Human
uucucaauuccaacagu

SEQ ID NO: 3677743 - RNA, 23 nt, Human
uucucacaauagccgauaucaga

SEQ ID NO: 3677744 - RNA, 15 nt, Human
uucucacacccaccg

SEQ ID NO: 3677745 - RNA, 21 nt, Human
uucucacacucuaacuguaua

SEQ ID NO: 3677746 - RNA, 13 nt, Human
uucucacagaaga

SEQ ID NO: 3677747 - RNA, 20 nt, Human
uucucacauggaaugagggu

SEQ ID NO: 3677748 - RNA, 16 nt, Human
uucucacuccaccacc

SEQ ID NO: 3677749 - RNA, 18 nt, Human
uucucuguguuuguuccu

SEQ ID NO: 3677750 - RNA, 22 nt, Human
uucucuuagaaaaggugauaaa

SEQ ID NO: 3677751 - RNA, 13 nt, Human
uucucuucacuca

SEQ ID NO: 3677752 - RNA, 15 nt, Human
uucucuuccaggcag

SEQ ID NO: 3677753 - RNA, 16 nt, Human
uucucuuccaggcagc

SEQ ID NO: 3677754 - RNA, 13 nt, Human
uucucuuccugua

SEQ ID NO: 3677755 - RNA, 20 nt, Human
uucucuuccuuuuaucagua

SEQ ID NO: 3677756 - RNA, 19 nt, Human
uucucuucuccccuuccau

SEQ ID NO: 3677757 - RNA, 17 nt, Human
uucucuugagcuggccu

SEQ ID NO: 3677758 - RNA, 18 nt, Human
uucucuugagcuggccuc

SEQ ID NO: 3677759 - RNA, 14 nt, Human
uucucuugccucag

SEQ ID NO: 3677760 - RNA, 14 nt, Human
uucucuugcuuucu

SEQ ID NO: 3677761 - RNA, 16 nt, Human
uucucuuggcuggcuu

SEQ ID NO: 3677762 - RNA, 22 nt, Human
uucucuugggaacugaacucac

SEQ ID NO: 3677763 - RNA, 23 nt, Human
uucucuuguauaagauccuagau

SEQ ID NO: 3677764 - RNA, 17 nt, Human
uucucuuuaacucagga

SEQ ID NO: 3677765 - RNA, 21 nt, Human
uucucuuuaacucaggacucc

SEQ ID NO: 3677766 - RNA, 21 nt, Human
uucucuuucccuggucccuug

SEQ ID NO: 3677767 - RNA, 13 nt, Human
uucucuuuccuug

SEQ ID NO: 3677768 - RNA, 13 nt, Human
uucucuuucucuc

SEQ ID NO: 3677769 - RNA, 17 nt, Human
uucucuuucucucuucc

SEQ ID NO: 3677770 - RNA, 22 nt, Human
uucucuuuguggggcuuggcgu

SEQ ID NO: 3677771 - RNA, 15 nt, Human
uucucuuuuccuuug

SEQ ID NO: 3677772 - RNA, 22 nt, Human
uucucuuuucuaguuugcucau

SEQ ID NO: 3677773 - RNA, 13 nt, Human
uucugaaaagaaa

SEQ ID NO: 3677774 - RNA, 12 nt, Human
uucugaaagagu

SEQ ID NO: 3677775 - RNA, 13 nt, Human
uucugaacagcug

SEQ ID NO: 3677776 - RNA, 22 nt, Human
uucugaacagcugguguagcua

SEQ ID NO: 3677777 - RNA, 16 nt, Human
uucugaaccugucuuu

SEQ ID NO: 3677778 - RNA, 22 nt, Human
uucugaacucaaacugaggaau

SEQ ID NO: 3677779 - RNA, 23 nt, Human
uucugaacuuggcgcugccccug

SEQ ID NO: 3677780 - RNA, 13 nt, Human
uucugaagaagau

SEQ ID NO: 3677781 - RNA, 18 nt, Human
uucugaagcuuuaccagc

SEQ ID NO: 3677782 - RNA, 19 nt, Human
uucugaagguagcauucuu

SEQ ID NO: 3677783 - RNA, 13 nt, Human
uucugaaguuaua

SEQ ID NO: 3677784 - RNA, 18 nt, Human
uucugaaguuauauuucc

SEQ ID NO: 3677785 - RNA, 20 nt, Human
uucugaaguuauauuuccua

SEQ ID NO: 3677786 - RNA, 17 nt, Human
uucugaauaaagcaauu

SEQ ID NO: 3677787 - RNA, 17 nt, Human
uucugaauaacauuugu

SEQ ID NO: 3677788 - RNA, 15 nt, Human
uucugaauaugcugc

SEQ ID NO: 3677789 - RNA, 16 nt, Human
uucugaaucuucugaa

SEQ ID NO: 3677790 - RNA, 16 nt, Human
uucugaaugcugcuac

SEQ ID NO: 3677791 - RNA, 15 nt, Human
uucugaaugcuucua

SEQ ID NO: 3677792 - RNA, 19 nt, Human
uucugaaugugcugaucau

SEQ ID NO: 3677793 - RNA, 15 nt, Human
uucugaauuugcaaa

SEQ ID NO: 3677794 - RNA, 18 nt, Human
uucugaauuugcaaagua

SEQ ID NO: 3677795 - RNA, 19 nt, Human
uucugaauuugcaaaguac

SEQ ID NO: 3677796 - RNA, 20 nt, Human
uucugaauuugcaaaguacu

SEQ ID NO: 3677797 - RNA, 17 nt, Human
uucugaccacagcauca

SEQ ID NO: 3677798 - RNA, 14 nt, Human
uucugacccaugcu

SEQ ID NO: 3677799 - RNA, 20 nt, Human
uucugacccaugcugcccug

SEQ ID NO: 3677800 - RNA, 21 nt, Human
uucugacccaugcugcccugu

SEQ ID NO: 3677801 - RNA, 15 nt, Human
uucugacggcccugc

SEQ ID NO: 3677802 - RNA, 17 nt, Human
uucugacggcccugcaa

SEQ ID NO: 3677803 - RNA, 18 nt, Human
uucugagaagguccuuaa

SEQ ID NO: 3677804 - RNA, 20 nt, Human
uucugagacaugugucaaca

SEQ ID NO: 3677805 - RNA, 13 nt, Human
uucugagaccaaa

SEQ ID NO: 3677806 - RNA, 22 nt, Human
uucugagacgucaugaggagau

SEQ ID NO: 3677807 - RNA, 13 nt, Human
uucugagagcugu

SEQ ID NO: 3677808 - RNA, 19 nt, Human
uucugagagcugugcauca

SEQ ID NO: 3677809 - RNA, 20 nt, Human
uucugagcaccgaauauuga

SEQ ID NO: 3677810 - RNA, 21 nt, Human
uucugagcaccgaauauugag

SEQ ID NO: 3677811 - RNA, 19 nt, Human
uucugagcccgggcugccu

SEQ ID NO: 3677812 - RNA, 22 nt, Human
uucugagcccgguaagagcaaa

SEQ ID NO: 3677813 - RNA, 16 nt, Human
uucugagcuauuucau

SEQ ID NO: 3677814 - RNA, 19 nt, Human
uucugagcuccuguccccu

SEQ ID NO: 3677815 - RNA, 14 nt, Human
uucugagcuggccu

SEQ ID NO: 3677816 - RNA, 19 nt, Human
uucugaggacauuccaaga

SEQ ID NO: 3677817 - RNA, 16 nt, Human
uucugaggcuuuauga

SEQ ID NO: 3677818 - RNA, 13 nt, Human
uucugaguacaga

SEQ ID NO: 3677819 - RNA, 16 nt, Human
uucugaguuucauucu

SEQ ID NO: 3677820 - RNA, 19 nt, Human
uucugaguuucauucuccu

SEQ ID NO: 3677821 - RNA, 16 nt, Human
uucugaguuuuaccaa

SEQ ID NO: 3677822 - RNA, 16 nt, Human
uucugaguuuuguguu

SEQ ID NO: 3677823 - RNA, 18 nt, Human
uucugauaaaagauggcc

SEQ ID NO: 3677824 - RNA, 23 nt, Human
uucugauaacuagauggugcuga

SEQ ID NO: 3677825 - RNA, 18 nt, Human
uucugauauagaauugca

SEQ ID NO: 3677826 - RNA, 22 nt, Human
uucugaucaaggccuuauugga

SEQ ID NO: 3677827 - RNA, 13 nt, Human
uucugaugaaucu

SEQ ID NO: 3677828 - RNA, 13 nt, Human
uucugaugagcaa

SEQ ID NO: 3677829 - RNA, 18 nt, Human
uucugaugaugugccugg

SEQ ID NO: 3677830 - RNA, 16 nt, Human
uucugaugucucuaaa

SEQ ID NO: 3677831 - RNA, 15 nt, Human
uucugauguugccuu

SEQ ID NO: 3677832 - RNA, 15 nt, Human
uucugauuagaaaug

SEQ ID NO: 3677833 - RNA, 23 nt, Human
uucugauucuggcuuuaagccuu

SEQ ID NO: 3677834 - RNA, 15 nt, Human
uucugauucuucaaa

SEQ ID NO: 3677835 - RNA, 23 nt, Human
uucugauuguaacguugcugugg

SEQ ID NO: 3677836 - RNA, 21 nt, Human
uucugauuugccacugauauu

SEQ ID NO: 3677837 - RNA, 14 nt, Human
uucugauuuuaugu

SEQ ID NO: 3677838 - RNA, 16 nt, Human
uucugauuuuauguaa

SEQ ID NO: 3677839 - RNA, 23 nt, Human
uucugauuuuauguaaaauuuug

SEQ ID NO: 3677840 - RNA, 13 nt, Human
uucugcaaaauag

SEQ ID NO: 3677841 - RNA, 23 nt, Human
uucugcaaauagaaaacaggaaa

SEQ ID NO: 3677842 - RNA, 21 nt, Human
uucugcaagcacaucugcauu

SEQ ID NO: 3677843 - RNA, 22 nt, Human
uucugcaagcacaucugcauuu

SEQ ID NO: 3677844 - RNA, 17 nt, Human
uucugcacccuccaccc

SEQ ID NO: 3677845 - RNA, 12 nt, Human
uucugcacugaa

SEQ ID NO: 3677846 - RNA, 15 nt, Human
uucugcacugaaaag

SEQ ID NO: 3677847 - RNA, 22 nt, Human
uucugcacuugcgguuccggca

SEQ ID NO: 3677848 - RNA, 21 nt, Human
uucugcagcaugaccugugac

SEQ ID NO: 3677849 - RNA, 19 nt, Human
uucugcagccacuauuguu

SEQ ID NO: 3677850 - RNA, 12 nt, Human
uucugcagcugu

SEQ ID NO: 3677851 - RNA, 17 nt, Human
uuuaguuuuauuuucua

SEQ ID NO: 3677852 - RNA, 15 nt, Human
uuuaguuuuucauua

SEQ ID NO: 3677853 - RNA, 16 nt, Human
uuuaguuuuuguucuu

SEQ ID NO: 3677854 - RNA, 17 nt, Human
uuuauaaaaaaaaugaa

SEQ ID NO: 3677855 - RNA, 18 nt, Human
uuuauaaaaaaaaugaaa

SEQ ID NO: 3677856 - RNA, 21 nt, Human
uuuauaaaaauaaaaaacacu

SEQ ID NO: 3677857 - RNA, 23 nt, Human
uuuauaaaagaauaaaauugcac

SEQ ID NO: 3677858 - RNA, 17 nt, Human
uuuauaaaauuaaagaa

SEQ ID NO: 3677859 - RNA, 12 nt, Human
uuuauaaaauug

SEQ ID NO: 3677860 - RNA, 17 nt, Human
uuuauaaaauuuugcuu

SEQ ID NO: 3677861 - RNA, 15 nt, Human
uuuauaaacagaaau

SEQ ID NO: 3677862 - RNA, 14 nt, Human
uuuauaaacuuuac

SEQ ID NO: 3677863 - RNA, 16 nt, Human
uuuauaaacuuuaccu

SEQ ID NO: 3677864 - RNA, 20 nt, Human
uuuauaaauaaacuguugcu

SEQ ID NO: 3677865 - RNA, 22 nt, Human
uuuauaaauauaagccuuuuau

SEQ ID NO: 3677866 - RNA, 18 nt, Human
uuuauaaaucgcuuuuga

SEQ ID NO: 3677867 - RNA, 19 nt, Human
uuuauaaaucgcuuuugau

SEQ ID NO: 3677868 - RNA, 22 nt, Human
uuuauaaaucgcuuuugauaau

SEQ ID NO: 3677869 - RNA, 12 nt, Human
uuuauaaaugcu

SEQ ID NO: 3677870 - RNA, 16 nt, Human
uuuauaaauuaaauau

SEQ ID NO: 3677871 - RNA, 17 nt, Human
uuuauaacaucuuuauu

SEQ ID NO: 3677872 - RNA, 14 nt, Human
uuuauaacuaacau

SEQ ID NO: 3677873 - RNA, 21 nt, Human
uuuauaacuauucaguugugu

SEQ ID NO: 3677874 - RNA, 18 nt, Human
uuuauaacucaucauaaa

SEQ ID NO: 3677875 - RNA, 20 nt, Human
uuuauaacucaucauaaaau

SEQ ID NO: 3677876 - RNA, 13 nt, Human
uuuauaacuuuuu

SEQ ID NO: 3677877 - RNA, 12 nt, Human
uuuauaagcauc

SEQ ID NO: 3677878 - RNA, 13 nt, Human
uuuauaagcauca

SEQ ID NO: 3677879 - RNA, 16 nt, Human
uuuauaagcaucauua

SEQ ID NO: 3677880 - RNA, 13 nt, Human
uuuauaagguuuu

SEQ ID NO: 3677881 - RNA, 19 nt, Human
uuuauaagucauuguaugu

SEQ ID NO: 3677882 - RNA, 14 nt, Human
uuuauaauaaaaau

SEQ ID NO: 3677883 - RNA, 17 nt, Human
uuuauaauucucauuaa

SEQ ID NO: 3677884 - RNA, 15 nt, Human
uuuauaauuguacaa

SEQ ID NO: 3677885 - RNA, 17 nt, Human
uuuauaauuguacaaaa

SEQ ID NO: 3677886 - RNA, 20 nt, Human
uuuauaauuguacaaaauua

SEQ ID NO: 3677887 - RNA, 13 nt, Human
uuuauacaaaaua

SEQ ID NO: 3677888 - RNA, 13 nt, Human
uuuauacaaauua

SEQ ID NO: 3677889 - RNA, 19 nt, Human
uuuauacaaauuagaaaau

SEQ ID NO: 3677890 - RNA, 15 nt, Human
uuuauacaacagugc

SEQ ID NO: 3677891 - RNA, 18 nt, Human
uuuauacaacagugcuaa

SEQ ID NO: 3677892 - RNA, 16 nt, Human
uuuauacaauaucauc

SEQ ID NO: 3677893 - RNA, 15 nt, Human
uuuauacacauaauu

SEQ ID NO: 3677894 - RNA, 17 nt, Human
uugaauacuugaaccau

SEQ ID NO: 3677895 - RNA, 20 nt, Human
uugaauacuuugaauguguu

SEQ ID NO: 3677896 - RNA, 23 nt, Human
uugaauagggcuaggaauauaga

SEQ ID NO: 3677897 - RNA, 13 nt, Human
uugaauauaaaaa

SEQ ID NO: 3677898 - RNA, 17 nt, Human
uugaauauaaaaaauca

SEQ ID NO: 3677899 - RNA, 20 nt, Human
uugaauauaauauauuugug

SEQ ID NO: 3677900 - RNA, 21 nt, Human
uugaauauaauauauuugugu

SEQ ID NO: 3677901 - RNA, 22 nt, Human
uugaauauaauauauuugugua

SEQ ID NO: 3677902 - RNA, 13 nt, Human
uugaauauauuau

SEQ ID NO: 3677903 - RNA, 13 nt, Human
uugaauauugugu

SEQ ID NO: 3677904 - RNA, 10 nt, Human
uugaaucaau

SEQ ID NO: 3677905 - RNA, 21 nt, Human
uugaaucaguuuccaauuauu

SEQ ID NO: 3677906 - RNA, 19 nt, Human
uauuaaaacuaaauuucac

SEQ ID NO: 3677907 - RNA, 16 nt, Human
uauuaaaacucagccu

SEQ ID NO: 3677908 - RNA, 12 nt, Human
uauuaaaagacu

SEQ ID NO: 3677909 - RNA, 15 nt, Human
uauuaaaagacucau

SEQ ID NO: 3677910 - RNA, 16 nt, Human
uauuaaaagacucauc

SEQ ID NO: 3677911 - RNA, 13 nt, Human
uauuaaaaucuua

SEQ ID NO: 3677912 - RNA, 17 nt, Human
uauuaaaaugauuguaa

SEQ ID NO: 3677913 - RNA, 19 nt, Human
uauuaaaaugauuguaaaa

SEQ ID NO: 3677914 - RNA, 20 nt, Human
uauuaaaaugauuguaaaau

SEQ ID NO: 3677915 - RNA, 15 nt, Human
uauuaaaauuccaaa

SEQ ID NO: 3677916 - RNA, 11 nt, Human
uauuaaaauug

SEQ ID NO: 3677917 - RNA, 15 nt, Human
uauuaaaauuguugu

SEQ ID NO: 3677918 - RNA, 18 nt, Human
uauuaaaauuguuguccg

SEQ ID NO: 3677919 - RNA, 12 nt, Human
uauuaaacaaag

SEQ ID NO: 3677920 - RNA, 23 nt, Human
uauuaaacagauuuuuacaaaug

SEQ ID NO: 3677921 - RNA, 12 nt, Human
uauuaaagacag

SEQ ID NO: 3677922 - RNA, 12 nt, Human
uauuaaagccau

SEQ ID NO: 3677923 - RNA, 17 nt, Human
uauuaaagccauguuua

SEQ ID NO: 3677924 - RNA, 18 nt, Human
uauuaaagccauguuuau

SEQ ID NO: 3677925 - RNA, 23 nt, Human
uauuaaaggaagcacucuguaua

SEQ ID NO: 3677926 - RNA, 13 nt, Human
uauuaaagggggg

SEQ ID NO: 3677927 - RNA, 16 nt, Human
uauuaaaguggagaag

SEQ ID NO: 3677928 - RNA, 14 nt, Human
uauuaaaguuucaa

SEQ ID NO: 3677929 - RNA, 18 nt, Human
uauuaaaguuucaaaaau

SEQ ID NO: 3677930 - RNA, 12 nt, Human
uauuaaauacag

SEQ ID NO: 3677931 - RNA, 13 nt, Human
uauuaaauacaga

SEQ ID NO: 3677932 - RNA, 15 nt, Human
uauuaaauagaaggu

SEQ ID NO: 3677933 - RNA, 12 nt, Human
uauuaaauaguu

SEQ ID NO: 3677934 - RNA, 17 nt, Human
uauuaaauaguuaauau

SEQ ID NO: 3677935 - RNA, 20 nt, Human
uauuaaauggaaacugaaac

SEQ ID NO: 3677936 - RNA, 21 nt, Human
uauuaaauuaaauuuuguguc

SEQ ID NO: 3677937 - RNA, 20 nt, Human
uauuaaauuacauuuguaau

SEQ ID NO: 3677938 - RNA, 22 nt, Human
uauuaaauuuguugacaaaauu

SEQ ID NO: 3677939 - RNA, 19 nt, Human
uauuaaauuuuuuguugac

SEQ ID NO: 3677940 - RNA, 23 nt, Human
uauuaaauuuuuuguugacauua

SEQ ID NO: 3677941 - RNA, 23 nt, Human
uauuaaauuuuuuuguaugaaaa

SEQ ID NO: 3677942 - RNA, 13 nt, Human
uauuaacaaaaca

SEQ ID NO: 3677943 - RNA, 23 nt, Human
uauuaacaacaauaacacugucu

SEQ ID NO: 3677944 - RNA, 17 nt, Human
uauuaacacuacucaaa

SEQ ID NO: 3677945 - RNA, 13 nt, Human
uauuaacauaccu

SEQ ID NO: 3677946 - RNA, 15 nt, Human
uauuaacuuaauaau

SEQ ID NO: 3677947 - RNA, 16 nt, Human
uauuaacuuaauaauc

SEQ ID NO: 3677948 - RNA, 18 nt, Human
uauuaacuuuaauguuuu

SEQ ID NO: 3677949 - RNA, 13 nt, Human
uauuaagaaagga

SEQ ID NO: 3677950 - RNA, 14 nt, Human
uauuaagaaaggaa

SEQ ID NO: 3677951 - RNA, 20 nt, Human
uauuaagaaaggaagcauug

SEQ ID NO: 3677952 - RNA, 21 nt, Human
uauuaagaaaggaagcauugu

SEQ ID NO: 3677953 - RNA, 18 nt, Human
uauuaagacaauagcacu

SEQ ID NO: 3677954 - RNA, 21 nt, Human
uauuaagacaauagcacuuaa

SEQ ID NO: 3677955 - RNA, 22 nt, Human
uauuaagaggcagaaaauugca

SEQ ID NO: 3677956 - RNA, 15 nt, Human
uauuaagauggauuc

SEQ ID NO: 3677957 - RNA, 17 nt, Human
uauuaagauuauaauug

SEQ ID NO: 3677958 - RNA, 15 nt, Human
uauuaaguuguuaau

SEQ ID NO: 3677959 - RNA, 20 nt, Human
uauuaauaguaauuuguaaa

SEQ ID NO: 3677960 - RNA, 22 nt, Human
uauuaauauauauuaucuuuuc

SEQ ID NO: 3677961 - RNA, 12 nt, Human
uauuaauauauu

SEQ ID NO: 3677962 - RNA, 22 nt, Human
uauuaauauucaggguaaauag

SEQ ID NO: 3677963 - RNA, 20 nt, Human
uauuaauauucauuguauaa

SEQ ID NO: 3677964 - RNA, 15 nt, Human
uauuaauauuuuaau

SEQ ID NO: 3677965 - RNA, 14 nt, Human
uauuaaucacugug

SEQ ID NO: 3677966 - RNA, 15 nt, Human
uauuaaucacugugu

SEQ ID NO: 3677967 - RNA, 18 nt, Human
uauuaaucuuaguguaug

SEQ ID NO: 3677968 - RNA, 20 nt, Human
uauuaaugcacuuucuaucc

SEQ ID NO: 3677969 - RNA, 13 nt, Human
uauuaaugccuuu

SEQ ID NO: 3677970 - RNA, 14 nt, Human
uauuaaugccuuua

SEQ ID NO: 3677971 - RNA, 12 nt, Human
uauuaaugcuaa

SEQ ID NO: 3677972 - RNA, 15 nt, Human
uauuaaugcuaaggg

SEQ ID NO: 3677973 - RNA, 13 nt, Human
uauuaauugcuuu

SEQ ID NO: 3677974 - RNA, 14 nt, Human
uauuaauugcuuug

SEQ ID NO: 3677975 - RNA, 12 nt, Human
uauuacaauauu

SEQ ID NO: 3677976 - RNA, 15 nt, Human
uauuacaauauuugu

SEQ ID NO: 3677977 - RNA, 19 nt, Human
uauuacaauauuugugugc

SEQ ID NO: 3677978 - RNA, 21 nt, Human
uauuacacuguauuuguaucu

SEQ ID NO: 3677979 - RNA, 13 nt, Human
uauuacaguauaa

SEQ ID NO: 3677980 - RNA, 20 nt, Human
uauuacaguauaauuaacau

SEQ ID NO: 3677981 - RNA, 23 nt, Human
uauuacauccuuguggcacauuu

SEQ ID NO: 3677982 - RNA, 13 nt, Human
uauuaccagcaag

SEQ ID NO: 3677983 - RNA, 16 nt, Human
uauuaccagcaagaau

SEQ ID NO: 3677984 - RNA, 22 nt, Human
uauuaccaguggcguuguugca

SEQ ID NO: 3677985 - RNA, 15 nt, Human
uauuaccaugagaag

SEQ ID NO: 3677986 - RNA, 21 nt, Human
uauuacccccuccuucagaca

SEQ ID NO: 3677987 - RNA, 15 nt, Human
uauuaccccuuuucg

SEQ ID NO: 3677988 - RNA, 17 nt, Human
uauuaccuaaugaaagu

SEQ ID NO: 3677989 - RNA, 13 nt, Human
uauuaccucugau

SEQ ID NO: 3677990 - RNA, 17 nt, Human
uauuacuccuauuuuug

SEQ ID NO: 3677991 - RNA, 19 nt, Human
uauuacuggcguggauuaa

SEQ ID NO: 3677992 - RNA, 18 nt, Human
uauuacugucugguuuua

SEQ ID NO: 3677993 - RNA, 23 nt, Human
uauuacugucugguuuuaacaau

SEQ ID NO: 3677994 - RNA, 18 nt, Human
uauuacuguuuauuucug

SEQ ID NO: 3677995 - RNA, 14 nt, Human
uauuacuuauuugg

SEQ ID NO: 3677996 - RNA, 13 nt, Human
uauuacuucugcu

SEQ ID NO: 3677997 - RNA, 14 nt, Human
uauuacuucugcua

SEQ ID NO: 3677998 - RNA, 19 nt, Human
uauuagaaaacuuuguuag

SEQ ID NO: 3677999 - RNA, 17 nt, Human
uauuagaaucaaacauu

SEQ ID NO: 3678000 - RNA, 21 nt, Human
uauuagaaucaaacauuuuga

SEQ ID NO: 3678001 - RNA, 17 nt, Human
uauuagacuucuguuuu

SEQ ID NO: 3678002 - RNA, 20 nt, Human
uauuagacuucuguuuucaa

SEQ ID NO: 3678003 - RNA, 23 nt, Human
uauuagacuucuguuuucaaucu

SEQ ID NO: 3678004 - RNA, 11 nt, Human
uauuagaugaa

SEQ ID NO: 3678005 - RNA, 15 nt, Human
uauuagaugcacuua

SEQ ID NO: 3678006 - RNA, 13 nt, Human
uauuagaugugau

SEQ ID NO: 3678007 - RNA, 23 nt, Human
uauuagaugugauuuaauagugu

SEQ ID NO: 3678008 - RNA, 14 nt, Human
uauuagauguucuc

SEQ ID NO: 3678009 - RNA, 15 nt, Human
uauuagauguucucu

SEQ ID NO: 3678010 - RNA, 17 nt, Human
uauuagauguucucuau

SEQ ID NO: 3678011 - RNA, 22 nt, Human
uauuagauguucucuaucauuu

SEQ ID NO: 3678012 - RNA, 16 nt, Human
uauuagcccugcauuu

SEQ ID NO: 3678013 - RNA, 20 nt, Human
uauuagcccugcauuuucau

SEQ ID NO: 3678014 - RNA, 22 nt, Human
uauuagcccugcauuuucauag

SEQ ID NO: 3678015 - RNA, 18 nt, Human
uauuagcgacaacagauu

SEQ ID NO: 3678016 - RNA, 16 nt, Human
uauuagcuuuacuguu

SEQ ID NO: 3678017 - RNA, 21 nt, Human
uauuagggagaaaauucaauu

SEQ ID NO: 3678018 - RNA, 17 nt, Human
uauuagggguaauauau

SEQ ID NO: 3678019 - RNA, 21 nt, Human
uauuaggugcaauuucaaggu

SEQ ID NO: 3678020 - RNA, 21 nt, Human
uauuaguacugcucuuguuuc

SEQ ID NO: 3678021 - RNA, 16 nt, Human
uauuaguauuguuguc

SEQ ID NO: 3678022 - RNA, 19 nt, Human
uauuaguauuguuguccuu

SEQ ID NO: 3678023 - RNA, 16 nt, Human
uauuagucuuggggca

SEQ ID NO: 3678024 - RNA, 19 nt, Human
uauuagugauauuucucua

SEQ ID NO: 3678025 - RNA, 21 nt, Human
uauuagugauauuucucuagu

SEQ ID NO: 3678026 - RNA, 22 nt, Human
uauuagugguuuaucagcaaaa

SEQ ID NO: 3678027 - RNA, 13 nt, Human
uauuaguguuaua

SEQ ID NO: 3678028 - RNA, 14 nt, Human
uauuaguguuauau

SEQ ID NO: 3678029 - RNA, 17 nt, Human
uauuaguguuauaugaa

SEQ ID NO: 3678030 - RNA, 13 nt, Human
uauuaguugcuuu

SEQ ID NO: 3678031 - RNA, 13 nt, Human
uauuauaaauaua

SEQ ID NO: 3678032 - RNA, 22 nt, Human
uauuauaaauauauauaaagaa

SEQ ID NO: 3678033 - RNA, 18 nt, Human
uauuauaaauuauguuua

SEQ ID NO: 3678034 - RNA, 20 nt, Human
uauuauaagcauugaaauua

SEQ ID NO: 3678035 - RNA, 14 nt, Human
uauuauaaucuuau

SEQ ID NO: 3678036 - RNA, 12 nt, Human
uauuauaauuua

SEQ ID NO: 3678037 - RNA, 15 nt, Human
uauuauaauuuaaug

SEQ ID NO: 3678038 - RNA, 19 nt, Human
uauuauacaugugauacau

SEQ ID NO: 3678039 - RNA, 14 nt, Human
uuucuguguguucc

SEQ ID NO: 3678040 - RNA, 15 nt, Human
uuucuguguguuccu

SEQ ID NO: 3678041 - RNA, 14 nt, Human
uuucuguuccaaau

SEQ ID NO: 3678042 - RNA, 14 nt, Human
uuucuguugccaca

SEQ ID NO: 3678043 - RNA, 15 nt, Human
uuucuguuggauucc

SEQ ID NO: 3678044 - RNA, 15 nt, Human
uuucuguugguguau

SEQ ID NO: 3678045 - RNA, 15 nt, Human
uuucuguuguaacuu

SEQ ID NO: 3678046 - RNA, 16 nt, Human
uuucuguuguaacuua

SEQ ID NO: 3678047 - RNA, 17 nt, Human
uuucuguugucauugcu

SEQ ID NO: 3678048 - RNA, 23 nt, Human
uuucuguugucauugcuguuguc

SEQ ID NO: 3678049 - RNA, 18 nt, Human
uuucuguuuccuuuuuua

SEQ ID NO: 3678050 - RNA, 20 nt, Human
uuucuguuucuaauuugcug

SEQ ID NO: 3678051 - RNA, 16 nt, Human
uuucuuaaaccuucag

SEQ ID NO: 3678052 - RNA, 18 nt, Human
uuucuuaaaccuucaguu

SEQ ID NO: 3678053 - RNA, 12 nt, Human
uuucuuaaauaa

SEQ ID NO: 3678054 - RNA, 13 nt, Human
uuucuuaaauaag

SEQ ID NO: 3678055 - RNA, 15 nt, Human
uuucuuaaaugggcu

SEQ ID NO: 3678056 - RNA, 21 nt, Human
uuucuuaaccaguuguggugu

SEQ ID NO: 3678057 - RNA, 23 nt, Human
uuucuuaaggugaggccugucug

SEQ ID NO: 3678058 - RNA, 23 nt, Human
uuucuuaauuauuauaaaaauau

SEQ ID NO: 3678059 - RNA, 15 nt, Human
uuucuuaauuuggaa

SEQ ID NO: 3678060 - RNA, 17 nt, Human
uuucuuacuccuccucu

SEQ ID NO: 3678061 - RNA, 22 nt, Human
uuucuuacugucuuuuuucuaa

SEQ ID NO: 3678062 - RNA, 13 nt, Human
uuucuuagacuuu

SEQ ID NO: 3678063 - RNA, 13 nt, Human
uuucuuagcuuuu

SEQ ID NO: 3678064 - RNA, 16 nt, Human
uuucuuagcuuuuuaa

SEQ ID NO: 3678065 - RNA, 18 nt, Human
uuucuuagggaaggauac

SEQ ID NO: 3678066 - RNA, 23 nt, Human
uuucuuagggaaggauacaaaag

SEQ ID NO: 3678067 - RNA, 16 nt, Human
uuucuuagugccugug

SEQ ID NO: 3678068 - RNA, 23 nt, Human
uuucuuaucacaaaaaagaaaau

SEQ ID NO: 3678069 - RNA, 15 nt, Human
uuucuuaugugacau

SEQ ID NO: 3678070 - RNA, 16 nt, Human
uuucuuaugugacauu

SEQ ID NO: 3678071 - RNA, 13 nt, Human
uuucuuauugcgc

SEQ ID NO: 3678072 - RNA, 14 nt, Human
uauuaugcuucuug

SEQ ID NO: 3678073 - RNA, 21 nt, Human
uauuauguccugugagaugug

SEQ ID NO: 3678074 - RNA, 22 nt, Human
uauuauguccugugagaugugu

SEQ ID NO: 3678075 - RNA, 13 nt, Human
uauuauuagaaau

SEQ ID NO: 3678076 - RNA, 19 nt, Human
uauuauuaguuuugauuua

SEQ ID NO: 3678077 - RNA, 20 nt, Human
uauuauugugguaggccuuu

SEQ ID NO: 3678078 - RNA, 20 nt, Human
uauuauuucuaggaagaauu

SEQ ID NO: 3678079 - RNA, 21 nt, Human
uauuauuugcagugcaguaua

SEQ ID NO: 3678080 - RNA, 15 nt, Human
uauuauuuucaccug

SEQ ID NO: 3678081 - RNA, 23 nt, Human
uauucaaaaauuaucuauagcua

SEQ ID NO: 3678082 - RNA, 14 nt, Human
uauucaaacugaaa

SEQ ID NO: 3678083 - RNA, 13 nt, Human
uauucaaaguugc

SEQ ID NO: 3678084 - RNA, 16 nt, Human
uauucaaaguugccua

SEQ ID NO: 3678085 - RNA, 19 nt, Human
uauucaacucauaagacuu

SEQ ID NO: 3678086 - RNA, 23 nt, Human
uauucaagaaagccagucuuaac

SEQ ID NO: 3678087 - RNA, 21 nt, Human
uauucaagguaaaauucuaaa

SEQ ID NO: 3678088 - RNA, 16 nt, Human
uauucaaguuauugua

SEQ ID NO: 3678089 - RNA, 20 nt, Human
uauucaaguuauuguacagc

SEQ ID NO: 3678090 - RNA, 22 nt, Human
uauucaauaaaaaaaagaaaug

SEQ ID NO: 3678091 - RNA, 23 nt, Human
uauucaauaaaaaaaagaaauga

SEQ ID NO: 3678092 - RNA, 12 nt, Human
uauucaauaaag

SEQ ID NO: 3678093 - RNA, 15 nt, Human
uauucacaaaauauc

SEQ ID NO: 3678094 - RNA, 21 nt, Human
uauucacaucgcuucugugua

SEQ ID NO: 3678095 - RNA, 20 nt, Human
uauucaccauguaaaacaaa

SEQ ID NO: 3678096 - RNA, 22 nt, Human
uauucacugauuugacauaguc

SEQ ID NO: 3678097 - RNA, 14 nt, Human
uauucacuggcccc

SEQ ID NO: 3678098 - RNA, 12 nt, Human
uauucacugggc

SEQ ID NO: 3678099 - RNA, 18 nt, Human
uauucagaaucuuuguua

SEQ ID NO: 3678100 - RNA, 16 nt, Human
uauucagacaaaaugg

SEQ ID NO: 3678101 - RNA, 17 nt, Human
uauucagacaaaaugga

SEQ ID NO: 3678102 - RNA, 15 nt, Human
uauucagauguaugu

SEQ ID NO: 3678103 - RNA, 14 nt, Human
uauucagcuucauu

SEQ ID NO: 3678104 - RNA, 21 nt, Human
uauucagcuucauuuguguca

SEQ ID NO: 3678105 - RNA, 19 nt, Human
uauucagcuuuaguagaua

SEQ ID NO: 3678106 - RNA, 15 nt, Human
uauucaggguaaaua

SEQ ID NO: 3678107 - RNA, 16 nt, Human
uauucaggguaaauag

SEQ ID NO: 3678108 - RNA, 14 nt, Human
uauucaguaaaaaa

SEQ ID NO: 3678109 - RNA, 20 nt, Human
uauucaguaauaacucuacc

SEQ ID NO: 3678110 - RNA, 18 nt, Human
uauucagugcuguggccu

SEQ ID NO: 3678111 - RNA, 21 nt, Human
uauucagugcuguggccuggg

SEQ ID NO: 3678112 - RNA, 17 nt, Human
uauucaguuaagaaaaa

SEQ ID NO: 3678113 - RNA, 14 nt, Human
uauucaguucccag

SEQ ID NO: 3678114 - RNA, 21 nt, Human
uauucaguucccagaaucaaa

SEQ ID NO: 3678115 - RNA, 23 nt, Human
uauucauagcagcuuauucacaa

SEQ ID NO: 3678116 - RNA, 17 nt, Human
uauucauaguagaacuu

SEQ ID NO: 3678117 - RNA, 14 nt, Human
uauucauaugcaua

SEQ ID NO: 3678118 - RNA, 17 nt, Human
uauucauauuuguacuu

SEQ ID NO: 3678119 - RNA, 23 nt, Human
uauucauuauuugucaaauuguc

SEQ ID NO: 3678120 - RNA, 18 nt, Human
uauucauucuuuuugaaa

SEQ ID NO: 3678121 - RNA, 21 nt, Human
uauucauugugguuauuuuua

SEQ ID NO: 3678122 - RNA, 15 nt, Human
uauucauuuaaaaug

SEQ ID NO: 3678123 - RNA, 16 nt, Human
uauucauuuaaaauga

SEQ ID NO: 3678124 - RNA, 14 nt, Human
uauucauuuucucu

SEQ ID NO: 3678125 - RNA, 15 nt, Human
uauucauuuucucua

SEQ ID NO: 3678126 - RNA, 16 nt, Human
uauucauuuuuguuau

SEQ ID NO: 3678127 - RNA, 17 nt, Human
uauuccaaaccaaauuu

SEQ ID NO: 3678128 - RNA, 14 nt, Human
uauuccaaaugucu

SEQ ID NO: 3678129 - RNA, 13 nt, Human
uauuccacaucua

SEQ ID NO: 3678130 - RNA, 14 nt, Human
uauuccaccuuaaa

SEQ ID NO: 3678131 - RNA, 17 nt, Human
uauuccagaaugcugua

SEQ ID NO: 3678132 - RNA, 12 nt, Human
uauuccagagcu

SEQ ID NO: 3678133 - RNA, 17 nt, Human
uauuccagagcugccag

SEQ ID NO: 3678134 - RNA, 23 nt, Human
uauuccagcucauucauuuuaua

SEQ ID NO: 3678135 - RNA, 17 nt, Human
uauuccagcuguccccc

SEQ ID NO: 3678136 - RNA, 18 nt, Human
uauuccauaguauauuaa

SEQ ID NO: 3678137 - RNA, 17 nt, Human
uauuccauauuuauuca

SEQ ID NO: 3678138 - RNA, 18 nt, Human
uauuccauccauauacuu

SEQ ID NO: 3678139 - RNA, 19 nt, Human
uauuccauccauauacuuu

SEQ ID NO: 3678140 - RNA, 12 nt, Human
uauuccaugacu

SEQ ID NO: 3678141 - RNA, 23 nt, Human
uauuccaugacugcuugcccuaa

SEQ ID NO: 3678142 - RNA, 23 nt, Human
uauuccccagcagggucuuuuca

SEQ ID NO: 3678143 - RNA, 22 nt, Human
uauuccccuaucucuagaauuu

SEQ ID NO: 3678144 - RNA, 21 nt, Human
uauucccuagaaacuuccaaa

SEQ ID NO: 3678145 - RNA, 14 nt, Human
uauuccuaguuggu

SEQ ID NO: 3678146 - RNA, 23 nt, Human
uauuccuaguuggugagaaaccu

SEQ ID NO: 3678147 - RNA, 22 nt, Human
uauuccuauauaguuuauugac

SEQ ID NO: 3678148 - RNA, 14 nt, Human
uauuccuauugugc

SEQ ID NO: 3678149 - RNA, 16 nt, Human
uauuccucaaaaaauu

SEQ ID NO: 3678150 - RNA, 20 nt, Human
uauuccucuugcauuucacu

SEQ ID NO: 3678151 - RNA, 14 nt, Human
uauuccugaaugaa

SEQ ID NO: 3678152 - RNA, 20 nt, Human
uauuccugaaugaaauauca

SEQ ID NO: 3678153 - RNA, 21 nt, Human
uauuccugcauuugugaaaug

SEQ ID NO: 3678154 - RNA, 19 nt, Human
uauuccugcccugcuguuu

SEQ ID NO: 3678155 - RNA, 16 nt, Human
uauuccuucuggccuu

SEQ ID NO: 3678156 - RNA, 19 nt, Human
uauuccuucuggccuuucc

SEQ ID NO: 3678157 - RNA, 16 nt, Human
uauuccuugaucauuu

SEQ ID NO: 3678158 - RNA, 16 nt, Human
uauuccuuucuaucau

SEQ ID NO: 3678159 - RNA, 22 nt, Human
uauuccuuuguuacuucucuaa

SEQ ID NO: 3678160 - RNA, 19 nt, Human
uauuccuuuuguguacagu

SEQ ID NO: 3678161 - RNA, 21 nt, Human
uauuccuuuuguguacagugu

SEQ ID NO: 3678162 - RNA, 17 nt, Human
uauucgaaugaaaagac

SEQ ID NO: 3678163 - RNA, 14 nt, Human
uauucgcuugagaa

SEQ ID NO: 3678164 - RNA, 15 nt, Human
uauucuaaaaccauu

SEQ ID NO: 3678165 - RNA, 14 nt, Human
uauucuaaauuuua

SEQ ID NO: 3678166 - RNA, 19 nt, Human
uauucuaaauuuuauaucu

SEQ ID NO: 3678167 - RNA, 12 nt, Human
uauucuaagacu

SEQ ID NO: 3678168 - RNA, 13 nt, Human
uauucuaagacuu

SEQ ID NO: 3678169 - RNA, 13 nt, Human
uauucuaauaagc

SEQ ID NO: 3678170 - RNA, 17 nt, Human
uauucuaauaagcuagu

SEQ ID NO: 3678171 - RNA, 14 nt, Human
uauucuacauuuca

SEQ ID NO: 3678172 - RNA, 13 nt, Human
uauucuacuauac

SEQ ID NO: 3678173 - RNA, 15 nt, Human
uauucuauaugaauu

SEQ ID NO: 3678174 - RNA, 17 nt, Human
uauucuauaugaauuua

SEQ ID NO: 3678175 - RNA, 19 nt, Human
uauucuauuaacuuuaauu

SEQ ID NO: 3678176 - RNA, 12 nt, Human
uauucuauugca

SEQ ID NO: 3678177 - RNA, 16 nt, Human
uauucucaaagcagga

SEQ ID NO: 3678178 - RNA, 16 nt, Human
uauucucacuccacca

SEQ ID NO: 3678179 - RNA, 19 nt, Human
uauucucacuccaccaccc

SEQ ID NO: 3678180 - RNA, 16 nt, Human
uauucucuccucagac

SEQ ID NO: 3678181 - RNA, 19 nt, Human
uauucucugagcugugcag

SEQ ID NO: 3678182 - RNA, 15 nt, Human
uauucucuguacaua

SEQ ID NO: 3678183 - RNA, 18 nt, Human
uauucucuguacauauua

SEQ ID NO: 3678184 - RNA, 15 nt, Human
uauuugcuuuuugcu

SEQ ID NO: 3678185 - RNA, 17 nt, Human
uauuuggaaauaaaguc

SEQ ID NO: 3678186 - RNA, 21 nt, Human
uauuuggaagaaaaaaaucuu

SEQ ID NO: 3678187 - RNA, 11 nt, Human
uauuuggaauu

SEQ ID NO: 3678188 - RNA, 15 nt, Human
uauuuggaauuagaa

SEQ ID NO: 3678189 - RNA, 20 nt, Human
uauuuggaauuuauauacaa

SEQ ID NO: 3678190 - RNA, 21 nt, Human
uauuuggaauuuauauacaac

SEQ ID NO: 3678191 - RNA, 16 nt, Human
uauuuggaugcagagu

SEQ ID NO: 3678192 - RNA, 19 nt, Human
uauuuggaugcagaguuca

SEQ ID NO: 3678193 - RNA, 20 nt, Human
uauuuggaugcagaguucag

SEQ ID NO: 3678194 - RNA, 14 nt, Human
uauuuggcuuaaau

SEQ ID NO: 3678195 - RNA, 19 nt, Human
uauuuggcuuaaauauagu

SEQ ID NO: 3678196 - RNA, 23 nt, Human
uauuugggagggaaaagggaagu

SEQ ID NO: 3678197 - RNA, 21 nt, Human
uauuugguuuggccaucucug

SEQ ID NO: 3678198 - RNA, 14 nt, Human
uauuuguaaaauga

SEQ ID NO: 3678199 - RNA, 15 nt, Human
uauuuguaaaaugac

SEQ ID NO: 3678200 - RNA, 23 nt, Human
uauuuguaaaaugacaaucaugu

SEQ ID NO: 3678201 - RNA, 17 nt, Human
uauuuguaaauuuaugu

SEQ ID NO: 3678202 - RNA, 22 nt, Human
uauuuguaaauuuaugugaugg

SEQ ID NO: 3678203 - RNA, 23 nt, Human
uauuuguaaggcuuguuccaaug

SEQ ID NO: 3678204 - RNA, 15 nt, Human
uauuuguaauagaug

SEQ ID NO: 3678205 - RNA, 23 nt, Human
uauuuguacuguuuaauguucug

SEQ ID NO: 3678206 - RNA, 15 nt, Human
uauuuguacuuucug

SEQ ID NO: 3678207 - RNA, 20 nt, Human
uauuuguacuuucuguuaaa

SEQ ID NO: 3678208 - RNA, 15 nt, Human
uauuuguaggagaaa

SEQ ID NO: 3678209 - RNA, 23 nt, Human
uauuuguauaguugcuugccuga

SEQ ID NO: 3678210 - RNA, 17 nt, Human
uauuuguauuuauucuu

SEQ ID NO: 3678211 - RNA, 12 nt, Human
uauuugucaaau

SEQ ID NO: 3678212 - RNA, 20 nt, Human
uauuugucaguguagaucaa

SEQ ID NO: 3678213 - RNA, 14 nt, Human
uauuugugacuaau

SEQ ID NO: 3678214 - RNA, 17 nt, Human
uauuugugacuaauugu

SEQ ID NO: 3678215 - RNA, 18 nt, Human
uauuugugauagcacuuu

SEQ ID NO: 3678216 - RNA, 17 nt, Human
uauuugugcauuuucua

SEQ ID NO: 3678217 - RNA, 14 nt, Human
uauuuguggaauaa

SEQ ID NO: 3678218 - RNA, 14 nt, Human
uauuuguguaauag

SEQ ID NO: 3678219 - RNA, 17 nt, Human
uauuuguguauuuaaca

SEQ ID NO: 3678220 - RNA, 21 nt, Human
uauuuguguuuuaauuuaaac

SEQ ID NO: 3678221 - RNA, 20 nt, Human
uauuuguuaaugguuugaau

SEQ ID NO: 3678222 - RNA, 14 nt, Human
uauuuguuauuuuc

SEQ ID NO: 3678223 - RNA, 21 nt, Human
uauuuguuuaugguaaaaaau

SEQ ID NO: 3678224 - RNA, 17 nt, Human
uauuuguuuuucauuca

SEQ ID NO: 3678225 - RNA, 23 nt, Human
uauuuuaaaagccacauagagug

SEQ ID NO: 3678226 - RNA, 13 nt, Human
uauuuuaaaauga

SEQ ID NO: 3678227 - RNA, 14 nt, Human
uauuuuaaaauuug

SEQ ID NO: 3678228 - RNA, 17 nt, Human
uauuuuaaaauuuguuc

SEQ ID NO: 3678229 - RNA, 19 nt, Human
uauuuuaaacaaaauagaa

SEQ ID NO: 3678230 - RNA, 12 nt, Human
uauuuuaaagaa

SEQ ID NO: 3678231 - RNA, 13 nt, Human
uauuuuaaagaau

SEQ ID NO: 3678232 - RNA, 16 nt, Human
uauuuuaaagaauugu

SEQ ID NO: 3678233 - RNA, 18 nt, Human
uauuuuaaauuauaagga

SEQ ID NO: 3678234 - RNA, 21 nt, Human
uauuuuaaauuauaaggacug

SEQ ID NO: 3678235 - RNA, 23 nt, Human
uauuuuaagacugauuuuaauag

SEQ ID NO: 3678236 - RNA, 12 nt, Human
uauuuuaagcau

SEQ ID NO: 3678237 - RNA, 14 nt, Human
uauuuuaauaaaca

SEQ ID NO: 3678238 - RNA, 19 nt, Human
uauuuuaauuuaugaguuu

SEQ ID NO: 3678239 - RNA, 14 nt, Human
uauuuuaauuucaa

SEQ ID NO: 3678240 - RNA, 15 nt, Human
uauuuuaauuucaag

SEQ ID NO: 3678241 - RNA, 14 nt, Human
uauuuuacacagaa

SEQ ID NO: 3678242 - RNA, 19 nt, Human
uauuuuacacagaaacacu

SEQ ID NO: 3678243 - RNA, 24 nt, Human
uauuuuacacagaaacacugccuu

SEQ ID NO: 3678244 - RNA, 12 nt, Human
uauuuuacuuuu

SEQ ID NO: 3678245 - RNA, 14 nt, Human
uauuuuacuuuuau

SEQ ID NO: 3678246 - RNA, 14 nt, Human
uauuuuacuuuuug

SEQ ID NO: 3678247 - RNA, 15 nt, Human
uauuuuacuuuuugg

SEQ ID NO: 3678248 - RNA, 16 nt, Human
uauuuuagaauaaauu

SEQ ID NO: 3678249 - RNA, 21 nt, Human
uauuuuaggcagggauuugag

SEQ ID NO: 3678250 - RNA, 22 nt, Human
uauuuuaguggacccugaaaug

SEQ ID NO: 3678251 - RNA, 18 nt, Human
uauuuuaguuucuguucu

SEQ ID NO: 3678252 - RNA, 17 nt, Human
uauuuuauauuguuaua

SEQ ID NO: 3678253 - RNA, 15 nt, Human
uauuuuauccucugg

SEQ ID NO: 3678254 - RNA, 23 nt, Human
uauuuuaucuuugauucuccuuc

SEQ ID NO: 3678255 - RNA, 18 nt, Human
uauuuuaugagaaaugua

SEQ ID NO: 3678256 - RNA, 14 nt, Human
uauuuuaugcaaau

SEQ ID NO: 3678257 - RNA, 19 nt, Human
uauuuuaugguuauguuuu

SEQ ID NO: 3678258 - RNA, 21 nt, Human
uauuuuauguuauauauaaau

SEQ ID NO: 3678259 - RNA, 13 nt, Human
uauuuuauuaaua

SEQ ID NO: 3678260 - RNA, 13 nt, Human
uauuuuauuacug

SEQ ID NO: 3678261 - RNA, 23 nt, Human
uauuuuauuaugaaacuugugua

SEQ ID NO: 3678262 - RNA, 15 nt, Human
uauuuuauuucaaug

SEQ ID NO: 3678263 - RNA, 16 nt, Human
uauuuuauuucaaugu

SEQ ID NO: 3678264 - RNA, 20 nt, Human
uauuuuauuuccaucauguc

SEQ ID NO: 3678265 - RNA, 21 nt, Human
uauuuucaauucaaaaaugua

SEQ ID NO: 3678266 - RNA, 11 nt, Human
uauuuucacaa

SEQ ID NO: 3678267 - RNA, 16 nt, Human
uauuuucacaauguca

SEQ ID NO: 3678268 - RNA, 13 nt, Human
uauuuucagaauc

SEQ ID NO: 3678269 - RNA, 20 nt, Human
uauuuucagaaucugaaugu

SEQ ID NO: 3678270 - RNA, 14 nt, Human
uauuuucagaugug

SEQ ID NO: 3678271 - RNA, 19 nt, Human
uauuuucauccuugucuua

SEQ ID NO: 3678272 - RNA, 14 nt, Human
uauuuuccaagugu

SEQ ID NO: 3678273 - RNA, 19 nt, Human
uauuuuccaagugugcaua

SEQ ID NO: 3678274 - RNA, 22 nt, Human
uauuuuccaagugugcauauug

SEQ ID NO: 3678275 - RNA, 18 nt, Human
uauuuucccaauagcacu

SEQ ID NO: 3678276 - RNA, 15 nt, Human
uauuuuccuccccag

SEQ ID NO: 3678277 - RNA, 16 nt, Human
uugcuguugaaagcaa

SEQ ID NO: 3678278 - RNA, 20 nt, Human
uugcuguugacauauuuaau

SEQ ID NO: 3678279 - RNA, 15 nt, Human
uugcuguugcuugaa

SEQ ID NO: 3678280 - RNA, 14 nt, Human
uugcuguuguccaa

SEQ ID NO: 3678281 - RNA, 19 nt, Human
uugcuguuguccaacuauu

SEQ ID NO: 3678282 - RNA, 18 nt, Human
uugcuguuuuccucccuu

SEQ ID NO: 3678283 - RNA, 16 nt, Human
uugcuguuuuguucug

SEQ ID NO: 3678284 - RNA, 14 nt, Human
uugcuuaaauguga

SEQ ID NO: 3678285 - RNA, 20 nt, Human
uugcuuaaaugugaauuacu

SEQ ID NO: 3678286 - RNA, 13 nt, Human
uugcuuacaauuu

SEQ ID NO: 3678287 - RNA, 22 nt, Human
uugcuuacaauuuuuuuaauuu

SEQ ID NO: 3678288 - RNA, 18 nt, Human
uugcuuacauuuuuacaa

SEQ ID NO: 3678289 - RNA, 17 nt, Human
uugcuuaccuugacugu

SEQ ID NO: 3678290 - RNA, 23 nt, Human
uugcuuacuuuggaauacauuuc

SEQ ID NO: 3678291 - RNA, 13 nt, Human
uugcuuaugacau

SEQ ID NO: 3678292 - RNA, 20 nt, Human
uugcuuauuguuccaagaca

SEQ ID NO: 3678293 - RNA, 22 nt, Human
uugcuuauuguuccaagacauu

SEQ ID NO: 3678294 - RNA, 17 nt, Human
uugcuucaccauggccu

SEQ ID NO: 3678295 - RNA, 12 nt, Human
uugcuucacuca

SEQ ID NO: 3678296 - RNA, 17 nt, Human
uugcuucauaaaugaag

SEQ ID NO: 3678297 - RNA, 12 nt, Human
uugcuucuguag

SEQ ID NO: 3678298 - RNA, 21 nt, Human
uugcuucuguaguacuccuua

SEQ ID NO: 3678299 - RNA, 20 nt, Human
uugcuucuuucuagaaagag

SEQ ID NO: 3678300 - RNA, 13 nt, Human
uugcuugaaacca

SEQ ID NO: 3678301 - RNA, 12 nt, Human
uugcuugaaaga

SEQ ID NO: 3678302 - RNA, 14 nt, Human
uugcuugaaagaaa

SEQ ID NO: 3678303 - RNA, 16 nt, Human
uugcuugaacacagua

SEQ ID NO: 3678304 - RNA, 21 nt, Human
uugcuugaacacaguauuuuc

SEQ ID NO: 3678305 - RNA, 17 nt, Human
uugcuugacuucaguua

SEQ ID NO: 3678306 - RNA, 16 nt, Human
uugcuugccugcaggg

SEQ ID NO: 3678307 - RNA, 16 nt, Human
uugcuuggacuauuau

SEQ ID NO: 3678308 - RNA, 15 nt, Human
uugcuuggcugcuug

SEQ ID NO: 3678309 - RNA, 19 nt, Human
uugcuuggcugcuuggccu

SEQ ID NO: 3678310 - RNA, 12 nt, Human
uugcuuuacugg

SEQ ID NO: 3678311 - RNA, 16 nt, Human
uugcuuuauaaauaaa

SEQ ID NO: 3678312 - RNA, 20 nt, Human
uugcuuuaugccuucuuauu

SEQ ID NO: 3678313 - RNA, 14 nt, Human
uugcuuugaaaaag

SEQ ID NO: 3678314 - RNA, 14 nt, Human
uugcuuugaagcag

SEQ ID NO: 3678315 - RNA, 14 nt, Human
uugcuuugcccagc

SEQ ID NO: 3678316 - RNA, 13 nt, Human
uugcuuugcccuu

SEQ ID NO: 3678317 - RNA, 15 nt, Human
uugcuuuguguucuu

SEQ ID NO: 3678318 - RNA, 17 nt, Human
uugcuuuuaaaacuacu

SEQ ID NO: 3678319 - RNA, 21 nt, Human
uugcuuuuaaaacuacuuagc

SEQ ID NO: 3678320 - RNA, 14 nt, Human
uugcuuuuagaaaa

SEQ ID NO: 3678321 - RNA, 17 nt, Human
uugcuuuuauuuugaaa

SEQ ID NO: 3678322 - RNA, 15 nt, Human
uugcuuuucacaaau

SEQ ID NO: 3678323 - RNA, 17 nt, Human
uugcuuuucaugcaaac

SEQ ID NO: 3678324 - RNA, 23 nt, Human
uugcuuuugaaggaauacaauau

SEQ ID NO: 3678325 - RNA, 15 nt, Human
uugcuuuugagagaa

SEQ ID NO: 3678326 - RNA, 20 nt, Human
uugcuuuuggcaaaacucua

SEQ ID NO: 3678327 - RNA, 15 nt, Human
uugcuuuuucuaaug

SEQ ID NO: 3678328 - RNA, 22 nt, Human
uugcuuuuucuaaugugguuau

SEQ ID NO: 3678329 - RNA, 17 nt, Human
uuggcaaaagccuugug

SEQ ID NO: 3678330 - RNA, 16 nt, Human
uuggcaaacucuccac

SEQ ID NO: 3678331 - RNA, 16 nt, Human
uuggcaaauuccuagu

SEQ ID NO: 3678332 - RNA, 14 nt, Human
uuggcaacagaagc

SEQ ID NO: 3678333 - RNA, 22 nt, Human
uuggcaauaaauuuugaaaagu

SEQ ID NO: 3678334 - RNA, 16 nt, Human
uuggcaauauuccuua

SEQ ID NO: 3678335 - RNA, 17 nt, Human
uuggcaaugccaucauc

SEQ ID NO: 3678336 - RNA, 23 nt, Human
uuggcacagaaacacaauauuuu

SEQ ID NO: 3678337 - RNA, 12 nt, Human
uuggcaccaaag

SEQ ID NO: 3678338 - RNA, 18 nt, Human
uuggcaccaaagaugcag

SEQ ID NO: 3678339 - RNA, 18 nt, Human
uuggcaccgaagcccaga

SEQ ID NO: 3678340 - RNA, 21 nt, Human
uuggcaccuaauccaggcaga

SEQ ID NO: 3678341 - RNA, 23 nt, Human
uuggcacucacagaccuggagcc

SEQ ID NO: 3678342 - RNA, 22 nt, Human
uuggcacugagauauuuauugu

SEQ ID NO: 3678343 - RNA, 18 nt, Human
uuggcacuuauugaauau

SEQ ID NO: 3678344 - RNA, 19 nt, Human
uuggcacuugccauuccaa

SEQ ID NO: 3678345 - RNA, 12 nt, Human
uuggcagcagau

SEQ ID NO: 3678346 - RNA, 22 nt, Human
uuggcagcaggugcugcuaccc

SEQ ID NO: 3678347 - RNA, 16 nt, Human
uuggcagcucuacucu

SEQ ID NO: 3678348 - RNA, 12 nt, Human
uuggcaggcugg

SEQ ID NO: 3678349 - RNA, 13 nt, Human
uuggcaggcuggc

SEQ ID NO: 3678350 - RNA, 14 nt, Human
uuggcaggcuggcc

SEQ ID NO: 3678351 - RNA, 19 nt, Human
uuggcagguaggaauauua

SEQ ID NO: 3678352 - RNA, 20 nt, Human
uuggcagugagugagccugg

SEQ ID NO: 3678353 - RNA, 19 nt, Human
uuggcaguggacucagaaa

SEQ ID NO: 3678354 - RNA, 18 nt, Human
uuggcauaacauaaaucu

SEQ ID NO: 3678355 - RNA, 17 nt, Human
uuggcaucucuguccca

SEQ ID NO: 3678356 - RNA, 21 nt, Human
uuggcauggaaauuuaaagca

SEQ ID NO: 3678357 - RNA, 13 nt, Human
uuggcauuccgca

SEQ ID NO: 3678358 - RNA, 15 nt, Human
uuggccaagcaggga

SEQ ID NO: 3678359 - RNA, 17 nt, Human
uuggccaaggaaaggca

SEQ ID NO: 3678360 - RNA, 20 nt, Human
uuggccagaagucaaggcuu

SEQ ID NO: 3678361 - RNA, 21 nt, Human
uuggccauauuuaccucagcc

SEQ ID NO: 3678362 - RNA, 14 nt, Human
uuggccaugggagg

SEQ ID NO: 3678363 - RNA, 16 nt, Human
uuggcccaagcucuug

SEQ ID NO: 3678364 - RNA, 13 nt, Human
uuggcccaggagu

SEQ ID NO: 3678365 - RNA, 23 nt, Human
uuggcccccaaagauagacaggu

SEQ ID NO: 3678366 - RNA, 19 nt, Human
uuggcccccuuucccgggc

SEQ ID NO: 3678367 - RNA, 19 nt, Human
uuggcccuuuccuuccaga

SEQ ID NO: 3678368 - RNA, 19 nt, Human
uuggccgcuguaugucuua

SEQ ID NO: 3678369 - RNA, 22 nt, Human
uuggccgggugcgguggcucac

SEQ ID NO: 3678370 - RNA, 16 nt, Human
uuggccucucucuagg

SEQ ID NO: 3678371 - RNA, 22 nt, Human
uuggccucugcaaaggaaauac

SEQ ID NO: 3678372 - RNA, 17 nt, Human
uuggccugaucagacca

SEQ ID NO: 3678373 - RNA, 13 nt, Human
uuggccugcugug

SEQ ID NO: 3678374 - RNA, 14 nt, Human
uuggccuggagcac

SEQ ID NO: 3678375 - RNA, 16 nt, Human
uuggccuggagcacaa

SEQ ID NO: 3678376 - RNA, 12 nt, Human
uuggccuggagg

SEQ ID NO: 3678377 - RNA, 22 nt, Human
uuggccugucucauccccaggg

SEQ ID NO: 3678378 - RNA, 21 nt, Human
uuggccuuggcuuuucuagcc

SEQ ID NO: 3678379 - RNA, 16 nt, Human
uuggcgcuauuacaaa

SEQ ID NO: 3678380 - RNA, 18 nt, Human
uuggcgcuauuacaaaua

SEQ ID NO: 3678381 - RNA, 14 nt, Human
uuggcgggccaagg

SEQ ID NO: 3678382 - RNA, 19 nt, Human
uuggcguaggcuacagaga

SEQ ID NO: 3678383 - RNA, 23 nt, Human
uuggcguaggcuacagagaagcc

SEQ ID NO: 3678384 - RNA, 13 nt, Human
uuggcguggagca

SEQ ID NO: 3678385 - RNA, 14 nt, Human
uuggcguggagcag

SEQ ID NO: 3678386 - RNA, 20 nt, Human
uuggcuaacuauauuugcuu

SEQ ID NO: 3678387 - RNA, 23 nt, Human
uuggcuauuagagaucaaccccu

SEQ ID NO: 3678388 - RNA, 13 nt, Human
uuggcucaauccu

SEQ ID NO: 3678389 - RNA, 14 nt, Human
uuggcucaauccuc

SEQ ID NO: 3678390 - RNA, 16 nt, Human
uuggcucacacugaga

SEQ ID NO: 3678391 - RNA, 17 nt, Human
uuggcucacacugagaa

SEQ ID NO: 3678392 - RNA, 12 nt, Human
uuggcucaccca

SEQ ID NO: 3678393 - RNA, 22 nt, Human
uuggcucacccaagcaaggcca

SEQ ID NO: 3678394 - RNA, 13 nt, Human
uuggcucagacau

SEQ ID NO: 3678395 - RNA, 17 nt, Human
uuggcucccaucuuuug

SEQ ID NO: 3678396 - RNA, 20 nt, Human
uuggcucgaaucucugugcc

SEQ ID NO: 3678397 - RNA, 12 nt, Human
uuggcucugcca

SEQ ID NO: 3678398 - RNA, 17 nt, Human
uuggcucuggagacagc

SEQ ID NO: 3678399 - RNA, 20 nt, Human
uuggcucuggagacagcccc

SEQ ID NO: 3678400 - RNA, 23 nt, Human
uuggcucuggagacagccccaga

SEQ ID NO: 3678401 - RNA, 22 nt, Human
uuggcugaaauucuccuggagg

SEQ ID NO: 3678402 - RNA, 13 nt, Human
uuggcugcaggga

SEQ ID NO: 3678403 - RNA, 14 nt, Human
uuggcugcagggag

SEQ ID NO: 3678404 - RNA, 15 nt, Human
uuggcugcugaaggc

SEQ ID NO: 3678405 - RNA, 16 nt, Human
uuggcugcuuggccuu

SEQ ID NO: 3678406 - RNA, 13 nt, Human
uuggcugggccca

SEQ ID NO: 3678407 - RNA, 18 nt, Human
uuggcugggcccagaagg

SEQ ID NO: 3678408 - RNA, 18 nt, Human
uuggcugggggccucagu

SEQ ID NO: 3678409 - RNA, 21 nt, Human
uuggcuggugugguacagaga

SEQ ID NO: 3678410 - RNA, 21 nt, Human
uuggcuguagaaggagacaga

SEQ ID NO: 3678411 - RNA, 17 nt, Human
uuggcugugaggccccu

SEQ ID NO: 3678412 - RNA, 14 nt, Human
uuggcugugucuaa

SEQ ID NO: 3678413 - RNA, 15 nt, Human
uuggcugugucuaaa

SEQ ID NO: 3678414 - RNA, 17 nt, Human
uuggcugugucuaaacu

SEQ ID NO: 3678415 - RNA, 20 nt, Human
uuggcugugucuaaacugca

SEQ ID NO: 3678416 - RNA, 21 nt, Human
uuggcugugucuaaacugcau

SEQ ID NO: 3678417 - RNA, 14 nt, Human
uuggcuuaccuggc

SEQ ID NO: 3678418 - RNA, 17 nt, Human
uuggcuuauaauucuuu

SEQ ID NO: 3678419 - RNA, 22 nt, Human
uuggcuuccuuucuugguucau

SEQ ID NO: 3678420 - RNA, 18 nt, Human
uuggcuucuguuucuagu

SEQ ID NO: 3678421 - RNA, 19 nt, Human
uuggcuucuucuuuaggau

SEQ ID NO: 3678422 - RNA, 13 nt, Human
uuggcuuggcccu

SEQ ID NO: 3678423 - RNA, 17 nt, Human
uuggcuugugaucuggg

SEQ ID NO: 3678424 - RNA, 16 nt, Human
uugggaaacuuggcuc

SEQ ID NO: 3678425 - RNA, 18 nt, Human
uugggaacugaacucacu

SEQ ID NO: 3678426 - RNA, 21 nt, Human
uugggaaggggacccccgccc

SEQ ID NO: 3678427 - RNA, 15 nt, Human
uugggaauaaauaug

SEQ ID NO: 3678428 - RNA, 15 nt, Human
uugggaauauuugaa

SEQ ID NO: 3678429 - RNA, 19 nt, Human
uugggaauauuugaaucuu

SEQ ID NO: 3678430 - RNA, 16 nt, Human
uugggaaugaggcuug

SEQ ID NO: 3678431 - RNA, 15 nt, Human
uugggacccaguggc

SEQ ID NO: 3678432 - RNA, 15 nt, Human
uugggaccccuggug

SEQ ID NO: 3678433 - RNA, 20 nt, Human
uugggaccccuggugguuca

SEQ ID NO: 3678434 - RNA, 22 nt, Human
uugggacccugcuuuagagcua

SEQ ID NO: 3678435 - RNA, 16 nt, Human
uugggaccgccagaug

SEQ ID NO: 3678436 - RNA, 23 nt, Human
uugggacuggguuuggaccccag

SEQ ID NO: 3678437 - RNA, 23 nt, Human
uugggagagacuuguuuuggaug

SEQ ID NO: 3678438 - RNA, 16 nt, Human
uugggagagccccugg

SEQ ID NO: 3678439 - RNA, 16 nt, Human
uugggagagggcgcag

SEQ ID NO: 3678440 - RNA, 22 nt, Human
uugggagcacuggagugcaggg

SEQ ID NO: 3678441 - RNA, 19 nt, Human
uugggagcuugggaaugga

SEQ ID NO: 3678442 - RNA, 15 nt, Human
uugggaggaagcaga

SEQ ID NO: 3678443 - RNA, 20 nt, Human
uuuuaaaagaugcaauguag

SEQ ID NO: 3678444 - RNA, 21 nt, Human
uuuuaaaagguauuuugaaua

SEQ ID NO: 3678445 - RNA, 16 nt, Human
uuuuaaaaguuauuaa

SEQ ID NO: 3678446 - RNA, 18 nt, Human
uuuuaaaaguuucaaugu

SEQ ID NO: 3678447 - RNA, 19 nt, Human
uuuuaaaaguuucaaugug

SEQ ID NO: 3678448 - RNA, 21 nt, Human
uuuuaaaauagaaauuuugua

SEQ ID NO: 3678449 - RNA, 20 nt, Human
uuuuaaaaucacuaacauua

SEQ ID NO: 3678450 - RNA, 14 nt, Human
uuuuaaaauccacu

SEQ ID NO: 3678451 - RNA, 23 nt, Human
uuuuaaaaucugagggaaauguu

SEQ ID NO: 3678452 - RNA, 12 nt, Human
uuuuaaaaucuu

SEQ ID NO: 3678453 - RNA, 13 nt, Human
uuuuaaaaucuua

SEQ ID NO: 3678454 - RNA, 15 nt, Human
uuuuaaaaucuuauu

SEQ ID NO: 3678455 - RNA, 22 nt, Human
uuuuaaaaucuuauuaaaguuu

SEQ ID NO: 3678456 - RNA, 21 nt, Human
uuuuaaaauggugcuuaaguu

SEQ ID NO: 3678457 - RNA, 14 nt, Human
uuuuaaaauguaca

SEQ ID NO: 3678458 - RNA, 14 nt, Human
uuuuaaacaaaaua

SEQ ID NO: 3678459 - RNA, 20 nt, Human
uuuuaaacuagaugaccuca

SEQ ID NO: 3678460 - RNA, 15 nt, Human
uuuuaaacuguacag

SEQ ID NO: 3678461 - RNA, 16 nt, Human
uuuuaaacuguacagu

SEQ ID NO: 3678462 - RNA, 20 nt, Human
uuuuaaacuguacagugucu

SEQ ID NO: 3678463 - RNA, 13 nt, Human
uuuuaaacugugu

SEQ ID NO: 3678464 - RNA, 23 nt, Human
uuuuaaacuguguacauaacuga

SEQ ID NO: 3678465 - RNA, 14 nt, Human
uuuuaaagaaaagu

SEQ ID NO: 3678466 - RNA, 12 nt, Human
uuuuaaagaauu

SEQ ID NO: 3678467 - RNA, 18 nt, Human
uuuuaaagaccccuaacc

SEQ ID NO: 3678468 - RNA, 20 nt, Human
uuuuaaagaucuguaaguaa

SEQ ID NO: 3678469 - RNA, 16 nt, Human
uuuuaaagguggauuu

SEQ ID NO: 3678470 - RNA, 21 nt, Human
uuuuaaaguaacccuacaaaa

SEQ ID NO: 3678471 - RNA, 16 nt, Human
uuuuaaaguauauauu

SEQ ID NO: 3678472 - RNA, 22 nt, Human
uuuuaaaguauguuauugcaua

SEQ ID NO: 3678473 - RNA, 12 nt, Human
uuuuguuugucu

SEQ ID NO: 3678474 - RNA, 20 nt, Human
uuuuguuugucucuccuuuu

SEQ ID NO: 3678475 - RNA, 16 nt, Human
uuuuguuuguuucuuu

SEQ ID NO: 3678476 - RNA, 18 nt, Human
uuuuguuuguuuguuuau

SEQ ID NO: 3678477 - RNA, 16 nt, Human
uuuuguuuuaaaacug

SEQ ID NO: 3678478 - RNA, 16 nt, Human
uuuuguuuuaaaauua

SEQ ID NO: 3678479 - RNA, 15 nt, Human
uuuuguuuuggcuga

SEQ ID NO: 3678480 - RNA, 15 nt, Human
uuuuguuuuguugca

SEQ ID NO: 3678481 - RNA, 17 nt, Human
uuuuguuuuucauucag

SEQ ID NO: 3678482 - RNA, 18 nt, Human
uuuuguuuuuucaaaaua

SEQ ID NO: 3678483 - RNA, 19 nt, Human
uuuuguuuuuucaaaauag

SEQ ID NO: 3678484 - RNA, 15 nt, Human
uuuuuaaaaaaagaa

SEQ ID NO: 3678485 - RNA, 18 nt, Human
uuuuuaaaaacuaaaaaa

SEQ ID NO: 3678486 - RNA, 17 nt, Human
uuuuuaaaauaucuuuu

SEQ ID NO: 3678487 - RNA, 16 nt, Human
uuuuuaaaauauuuau

SEQ ID NO: 3678488 - RNA, 12 nt, Human
uuuuuaaaaucu

SEQ ID NO: 3678489 - RNA, 19 nt, Human
uuuuuaaaaucuuauuaaa

SEQ ID NO: 3678490 - RNA, 19 nt, Human
uuuuuaaacaaacauugug

SEQ ID NO: 3678491 - RNA, 17 nt, Human
uuuuuaaacuguacagu

SEQ ID NO: 3678492 - RNA, 21 nt, Human
uuuuuaaacuguacagugucu

SEQ ID NO: 3678493 - RNA, 12 nt, Human
uuuuuaaagaaa

SEQ ID NO: 3678494 - RNA, 20 nt, Human
uuuuuaaagaaaaguuuugu

SEQ ID NO: 3678495 - RNA, 13 nt, Human
uuuuuaaagacuu

SEQ ID NO: 3678496 - RNA, 15 nt, Human
uuuuuaaagcuacaa

SEQ ID NO: 3678497 - RNA, 12 nt, Human
uuuuuaaagcuu

SEQ ID NO: 3678498 - RNA, 18 nt, Human
uuuuuaaaguuacuuugu

SEQ ID NO: 3678499 - RNA, 20 nt, Human
uuuuuaaauuuucuucaguu

SEQ ID NO: 3678500 - RNA, 12 nt, Human
uuuuuaagaaaa

SEQ ID NO: 3678501 - RNA, 13 nt, Human
uuuuuaagauuuu

SEQ ID NO: 3678502 - RNA, 14 nt, Human
uuuuuaagcucuga

SEQ ID NO: 3678503 - RNA, 20 nt, Human
uuuuuaagcugcaaaucuga

SEQ ID NO: 3678504 - RNA, 17 nt, Human
uuuuuaagguuauuuau

SEQ ID NO: 3678505 - RNA, 20 nt, Human
uuuuuaagugaaaauauagc

SEQ ID NO: 3678506 - RNA, 15 nt, Human
uuuuuaagugaaauu

SEQ ID NO: 3678507 - RNA, 17 nt, Human
uuguguacucuggccuc

SEQ ID NO: 3678508 - RNA, 13 nt, Human
uuguguagccuuu

SEQ ID NO: 3678509 - RNA, 16 nt, Human
uuguguauagaacugg

SEQ ID NO: 3678510 - RNA, 14 nt, Human
uuguguauauuugu

SEQ ID NO: 3678511 - RNA, 22 nt, Human
uuguguauccauuaucaugugu

SEQ ID NO: 3678512 - RNA, 13 nt, Human
uuguguauuuaac

SEQ ID NO: 3678513 - RNA, 21 nt, Human
uuguguauuuaacagggaggg

SEQ ID NO: 3678514 - RNA, 20 nt, Human
uuguguauuuacgcuuugau

SEQ ID NO: 3678515 - RNA, 18 nt, Human
uugugucccaugaucccu

SEQ ID NO: 3678516 - RNA, 16 nt, Human
uugugucccuaaugug

SEQ ID NO: 3678517 - RNA, 19 nt, Human
uuguguccuccaggagcuu

SEQ ID NO: 3678518 - RNA, 15 nt, Human
uugugucucuuaugg

SEQ ID NO: 3678519 - RNA, 19 nt, Human
uugugucuggcaguuuaua

SEQ ID NO: 3678520 - RNA, 12 nt, Human
uugugugaaauu

SEQ ID NO: 3678521 - RNA, 16 nt, Human
uugugugaaauugcau

SEQ ID NO: 3678522 - RNA, 11 nt, Human
uugugugaccc

SEQ ID NO: 3678523 - RNA, 14 nt, Human
uugugugauuuaag

SEQ ID NO: 3678524 - RNA, 20 nt, Human
uugugugccucuagcugaau

SEQ ID NO: 3678525 - RNA, 13 nt, Human
uugugugcucucc

SEQ ID NO: 3678526 - RNA, 13 nt, Human
uuguguggauucu

SEQ ID NO: 3678527 - RNA, 22 nt, Human
uuguguguaugcacaugaacuu

SEQ ID NO: 3678528 - RNA, 14 nt, Human
uuguguguauuugc

SEQ ID NO: 3678529 - RNA, 16 nt, Human
uuguguguauuugcua

SEQ ID NO: 3678530 - RNA, 19 nt, Human
uugugugugggcugugagu

SEQ ID NO: 3678531 - RNA, 12 nt, Human
uugugugugugc

SEQ ID NO: 3678532 - RNA, 20 nt, Human
uugugugugugucagcugag

SEQ ID NO: 3678533 - RNA, 15 nt, Human
uuguguguuccaagu

SEQ ID NO: 3678534 - RNA, 22 nt, Human
uuguguguuccaaguuuccaaa

SEQ ID NO: 3678535 - RNA, 15 nt, Human
uuguguguugucucu

SEQ ID NO: 3678536 - RNA, 15 nt, Human
uuguguuacuaaguu

SEQ ID NO: 3678537 - RNA, 16 nt, Human
uuguguuccuuuuuau

SEQ ID NO: 3678538 - RNA, 13 nt, Human
uuguguucuuugu

SEQ ID NO: 3678539 - RNA, 12 nt, Human
uuguguugaaga

SEQ ID NO: 3678540 - RNA, 21 nt, Human
uuguguuguaauucuucaguu

SEQ ID NO: 3678541 - RNA, 13 nt, Human
uuguguuguccuu

SEQ ID NO: 3678542 - RNA, 13 nt, Human
uuguguuguuuga

SEQ ID NO: 3678543 - RNA, 21 nt, Human
uuguguuguuugaaaauauua

SEQ ID NO: 3678544 - RNA, 18 nt, Human
uuguguuuacauuuuaug

SEQ ID NO: 3678545 - RNA, 21 nt, Human
uuguguuuauucuugaugaaa

SEQ ID NO: 3678546 - RNA, 17 nt, Human
uuguguuugguuuacau

SEQ ID NO: 3678547 - RNA, 18 nt, Human
uuguguuugguuuacauu

SEQ ID NO: 3678548 - RNA, 14 nt, Human
uuguguuugucauu

SEQ ID NO: 3678549 - RNA, 15 nt, Human
uuguguuugucauua

SEQ ID NO: 3678550 - RNA, 16 nt, Human
uuguguuuuuuaagau

SEQ ID NO: 3678551 - RNA, 21 nt, Human
uuguuaaaaauaaaucccaug

SEQ ID NO: 3678552 - RNA, 20 nt, Human
uuguuaaaacuggcaucuga

SEQ ID NO: 3678553 - RNA, 16 nt, Human
uuguuaaaauaacuag

SEQ ID NO: 3678554 - RNA, 22 nt, Human
uuguuaaaauuaugaaucugau

SEQ ID NO: 3678555 - RNA, 14 nt, Human
uuguuaaauauuua

SEQ ID NO: 3678556 - RNA, 11 nt, Human
uuguuaaauga

SEQ ID NO: 3678557 - RNA, 11 nt, Human
uuguuaacuuu

SEQ ID NO: 3678558 - RNA, 14 nt, Human
uuguuaacuuuggg

SEQ ID NO: 3678559 - RNA, 17 nt, Human
uuguuaaguccuuggcu

SEQ ID NO: 3678560 - RNA, 22 nt, Human
uuguuaagucuaaauauuuccu

SEQ ID NO: 3678561 - RNA, 14 nt, Human
uuguuaauaaaagu

SEQ ID NO: 3678562 - RNA, 16 nt, Human
uuguuaauaguuccug

SEQ ID NO: 3678563 - RNA, 20 nt, Human
uuguuaauaucacucauuaa

SEQ ID NO: 3678564 - RNA, 13 nt, Human
uuguuaauauucu

SEQ ID NO: 3678565 - RNA, 20 nt, Human
uuguuaaucucuguuaugua

SEQ ID NO: 3678566 - RNA, 18 nt, Human
uuguuaaucuucaauagu

SEQ ID NO: 3678567 - RNA, 11 nt, Human
uuguuacuguu

SEQ ID NO: 3678568 - RNA, 20 nt, Human
uuguuacuguucuugcugcu

SEQ ID NO: 3678569 - RNA, 16 nt, Human
uuguuagaaaaaugga

SEQ ID NO: 3678570 - RNA, 19 nt, Human
uuguuagagaaaaaugcuu

SEQ ID NO: 3678571 - RNA, 17 nt, Human
uuguuagaucuaguuca

SEQ ID NO: 3678572 - RNA, 12 nt, Human
uuguuagauguu

SEQ ID NO: 3678573 - RNA, 20 nt, Human
uuguuaggccaaagacaaau

SEQ ID NO: 3678574 - RNA, 22 nt, Human
uuguuaguuucugaguuuuacc

SEQ ID NO: 3678575 - RNA, 16 nt, Human
uuguuauauaaucauu

SEQ ID NO: 3678576 - RNA, 16 nt, Human
uuguuaucaaaauagu

SEQ ID NO: 3678577 - RNA, 13 nt, Human
uuguuaucaguaa

SEQ ID NO: 3678578 - RNA, 16 nt, Human
uuguuaucagucaaua

SEQ ID NO: 3678579 - RNA, 22 nt, Human
uuguuaucagucaauauuuuua

SEQ ID NO: 3678580 - RNA, 14 nt, Human
uuguuaugcuauua

SEQ ID NO: 3678581 - RNA, 22 nt, Human
uuguuauuacauccuuguggca

SEQ ID NO: 3678582 - RNA, 15 nt, Human
uuguuauuuauugaa

SEQ ID NO: 3678583 - RNA, 23 nt, Human
uuguuauuugaaaacauguuuau

SEQ ID NO: 3678584 - RNA, 15 nt, Human
uuguuauuuugcaac

SEQ ID NO: 3678585 - RNA, 15 nt, Human
uuguuauuuuggaaa

SEQ ID NO: 3678586 - RNA, 17 nt, Human
uuguucaaacaauauca

SEQ ID NO: 3678587 - RNA, 13 nt, Human
uuguucaaacauu

SEQ ID NO: 3678588 - RNA, 13 nt, Human
uuguucaacuauu

SEQ ID NO: 3678589 - RNA, 13 nt, Human
uuguucaaguuuu

SEQ ID NO: 3678590 - RNA, 19 nt, Human
uuguucaccauuauaauga

SEQ ID NO: 3678591 - RNA, 21 nt, Human
uuguuccaagacauugucaau

SEQ ID NO: 3678592 - RNA, 16 nt, Human
uuguuccaaugccaca

SEQ ID NO: 3678593 - RNA, 15 nt, Human
uuguuccccuccucc

SEQ ID NO: 3678594 - RNA, 23 nt, Human
uuguuccuuggagaaaugaaaac

SEQ ID NO: 3678595 - RNA, 16 nt, Human
uuguucucagaauccc

SEQ ID NO: 3678596 - RNA, 17 nt, Human
uuguucucucuauggua

SEQ ID NO: 3678597 - RNA, 18 nt, Human
uuguucucucuaugguaa

SEQ ID NO: 3678598 - RNA, 12 nt, Human
uuguucucuggg

SEQ ID NO: 3678599 - RNA, 23 nt, Human
uuguucugaaaugucaguucuga

SEQ ID NO: 3678600 - RNA, 16 nt, Human
uuguucuguuaacuga

SEQ ID NO: 3678601 - RNA, 18 nt, Human
uuguucuguuaacugaau

SEQ ID NO: 3678602 - RNA, 17 nt, Human
uuguucuuaauugcacu

SEQ ID NO: 3678603 - RNA, 15 nt, Human
uuguucuuacacaua

SEQ ID NO: 3678604 - RNA, 18 nt, Human
uuguucuuauucuggcau

SEQ ID NO: 3678605 - RNA, 14 nt, Human
uuguucuucuuaaa

SEQ ID NO: 3678606 - RNA, 19 nt, Human
uuguucuugguuuguaaau

SEQ ID NO: 3678607 - RNA, 15 nt, Human
uuguucuuguuuuua

SEQ ID NO: 3678608 - RNA, 16 nt, Human
uuguugaaaaaguuug

SEQ ID NO: 3678609 - RNA, 22 nt, Human
uuguugaaaaaguuuguuuuug

SEQ ID NO: 3678610 - RNA, 18 nt, Human
uuguugaaauuuugcaaa

SEQ ID NO: 3678611 - RNA, 17 nt, Human
uuguugaacagguguuu

SEQ ID NO: 3678612 - RNA, 22 nt, Human
uuguugaacuguuagaauguaa

SEQ ID NO: 3678613 - RNA, 12 nt, Human
uuguugacauua

SEQ ID NO: 3678614 - RNA, 15 nt, Human
uuguugacauucuga

SEQ ID NO: 3678615 - RNA, 17 nt, Human
uuguugacauucugaau

SEQ ID NO: 3678616 - RNA, 21 nt, Human
uuguugagguggucugaaugu

SEQ ID NO: 3678617 - RNA, 17 nt, Human
uuguugauucucuccau

SEQ ID NO: 3678618 - RNA, 22 nt, Human
uuguugcucccugugacaaaau

SEQ ID NO: 3678619 - RNA, 12 nt, Human
ucacauguuuuc

SEQ ID NO: 3678620 - RNA, 18 nt, Human
ucacauguuuucaaaugg

SEQ ID NO: 3678621 - RNA, 22 nt, Human
ucacauuaaaaaaugaaauauu

SEQ ID NO: 3678622 - RNA, 19 nt, Human
ucacauuaauggucuaaaa

SEQ ID NO: 3678623 - RNA, 15 nt, Human
ucacauuauuugcau

SEQ ID NO: 3678624 - RNA, 21 nt, Human
ucacauuccccuggggaccca

SEQ ID NO: 3678625 - RNA, 15 nt, Human
ucacauucuuauaaa

SEQ ID NO: 3678626 - RNA, 18 nt, Human
ucacauucuuauaaauau

SEQ ID NO: 3678627 - RNA, 20 nt, Human
ucacauucuuauaaauauga

SEQ ID NO: 3678628 - RNA, 21 nt, Human
ucacauucuuauaaauaugaa

SEQ ID NO: 3678629 - RNA, 21 nt, Human
ucacauucuuggcuuaaucau

SEQ ID NO: 3678630 - RNA, 21 nt, Human
ucacauugagcugauauaaau

SEQ ID NO: 3678631 - RNA, 12 nt, Human
ucacauugcauu

SEQ ID NO: 3678632 - RNA, 15 nt, Human
ucacauugcauucua

SEQ ID NO: 3678633 - RNA, 16 nt, Human
ucacauugcauucuau

SEQ ID NO: 3678634 - RNA, 22 nt, Human
ucacauugcauucuauugccuu

SEQ ID NO: 3678635 - RNA, 18 nt, Human
ucacauuguuaagaaaaa

SEQ ID NO: 3678636 - RNA, 11 nt, Human
ucacauuguuu

SEQ ID NO: 3678637 - RNA, 18 nt, Human
ucacauuguuugcugcua

SEQ ID NO: 3678638 - RNA, 16 nt, Human
ucacauuuuccuuuuc

SEQ ID NO: 3678639 - RNA, 22 nt, Human
ucacauuuuuauaccuguuuaa

SEQ ID NO: 3678640 - RNA, 17 nt, Human
ucacauuuuuuaugggc

SEQ ID NO: 3678641 - RNA, 15 nt, Human
ucaccaaaagacacu

SEQ ID NO: 3678642 - RNA, 18 nt, Human
ucaccaaaagacacugca

SEQ ID NO: 3678643 - RNA, 17 nt, Human
ucaccaaaguauuuuuu

SEQ ID NO: 3678644 - RNA, 17 nt, Human
ucaccaaauagugugaa

SEQ ID NO: 3678645 - RNA, 19 nt, Human
ucaccaaaucagcugcuac

SEQ ID NO: 3678646 - RNA, 16 nt, Human
ucaccaagcucacagu

SEQ ID NO: 3678647 - RNA, 12 nt, Human
ucaccaaggaaa

SEQ ID NO: 3678648 - RNA, 15 nt, Human
ucaccaauguaccca

SEQ ID NO: 3678649 - RNA, 23 nt, Human
ucaccaauguacccaccgggcca

SEQ ID NO: 3678650 - RNA, 19 nt, Human
ucaccacaguaaguuccua

SEQ ID NO: 3678651 - RNA, 20 nt, Human
ucaccacaugcggagaacaa

SEQ ID NO: 3678652 - RNA, 16 nt, Human
ucaccacaugugcaca

SEQ ID NO: 3678653 - RNA, 22 nt, Human
ucaccacucaaaggccagaccu

SEQ ID NO: 3678654 - RNA, 23 nt, Human
ucaccacucaaaggccagaccug

SEQ ID NO: 3678655 - RNA, 15 nt, Human
ucaccacuccauucc

SEQ ID NO: 3678656 - RNA, 21 nt, Human
ucaccacuucaauagaucaaa

SEQ ID NO: 3678657 - RNA, 18 nt, Human
ucaccagaauugugcaaa

SEQ ID NO: 3678658 - RNA, 15 nt, Human
ucaccagacggggcu

SEQ ID NO: 3678659 - RNA, 19 nt, Human
ucaccagaggaaucacucu

SEQ ID NO: 3678660 - RNA, 15 nt, Human
ucaccagauuugcua

SEQ ID NO: 3678661 - RNA, 21 nt, Human
ucaccagauuugcuaauuuau

SEQ ID NO: 3678662 - RNA, 19 nt, Human
ucaccagccccacugccag

SEQ ID NO: 3678663 - RNA, 16 nt, Human
ucaccagccccagugc

SEQ ID NO: 3678664 - RNA, 17 nt, Human
ucaccagccccagugcc

SEQ ID NO: 3678665 - RNA, 16 nt, Human
ucaccagcugcaaagu

SEQ ID NO: 3678666 - RNA, 21 nt, Human
ucaccagcugcaaaguguuuu

SEQ ID NO: 3678667 - RNA, 20 nt, Human
ucaccagcugccucuucugu

SEQ ID NO: 3678668 - RNA, 18 nt, Human
ucaccagcugcugcucug

SEQ ID NO: 3678669 - RNA, 22 nt, Human
ucaccaggaauguuaaagucag

SEQ ID NO: 3678670 - RNA, 19 nt, Human
ucaccaguacauucucagu

SEQ ID NO: 3678671 - RNA, 17 nt, Human
ucaccaguguccccucc

SEQ ID NO: 3678672 - RNA, 20 nt, Human
ucaccaguguccccuccacu

SEQ ID NO: 3678673 - RNA, 17 nt, Human
uuuuuaagugcugcauu

SEQ ID NO: 3678674 - RNA, 22 nt, Human
uuuuuaagugcugcauuuaaaa

SEQ ID NO: 3678675 - RNA, 18 nt, Human
uuuuuaaguuaauagauu

SEQ ID NO: 3678676 - RNA, 12 nt, Human
uuuuuaauagaa

SEQ ID NO: 3678677 - RNA, 13 nt, Human
uuuuuaauagaac

SEQ ID NO: 3678678 - RNA, 23 nt, Human
uuuuuaauagucauuccaaauau

SEQ ID NO: 3678679 - RNA, 14 nt, Human
uuuuuaauaugcuu

SEQ ID NO: 3678680 - RNA, 16 nt, Human
uuuuuaaucuagacaa

SEQ ID NO: 3678681 - RNA, 13 nt, Human
uuuuuaaucucca

SEQ ID NO: 3678682 - RNA, 13 nt, Human
uuuuuaaucuuua

SEQ ID NO: 3678683 - RNA, 13 nt, Human
uuuuuaaugcuau

SEQ ID NO: 3678684 - RNA, 10 nt, Human
uuuuuaaugg

SEQ ID NO: 3678685 - RNA, 19 nt, Human
uuuuuaaugugcuguguaa

SEQ ID NO: 3678686 - RNA, 20 nt, Human
uuuuuaauuguuguuucuuu

SEQ ID NO: 3678687 - RNA, 23 nt, Human
uuuuuaauuuacaaaaauauaaa

SEQ ID NO: 3678688 - RNA, 22 nt, Human
uuuuuaauuugaugaaagcuga

SEQ ID NO: 3678689 - RNA, 18 nt, Human
uuuuuaauuuuguauuuu

SEQ ID NO: 3678690 - RNA, 22 nt, Human
uuuuuacccauauccccucucc

SEQ ID NO: 3678691 - RNA, 15 nt, Human
uuuuuaccugucaca

SEQ ID NO: 3678692 - RNA, 21 nt, Human
uuuuuaccugucacauugcau

SEQ ID NO: 3678693 - RNA, 11 nt, Human
uuuuuacuaau

SEQ ID NO: 3678694 - RNA, 14 nt, Human
uuuuuacugaacaa

SEQ ID NO: 3678695 - RNA, 22 nt, Human
uuuuuagaauaagaauuugcau

SEQ ID NO: 3678696 - RNA, 15 nt, Human
uuuuuagaucaaaua

SEQ ID NO: 3678697 - RNA, 21 nt, Human
uuuuuagaucaaauacuuuaa

SEQ ID NO: 3678698 - RNA, 17 nt, Human
uuuuuagaugguuacac

SEQ ID NO: 3678699 - RNA, 20 nt, Human
uuuuuagaugguuacacugu

SEQ ID NO: 3678700 - RNA, 19 nt, Human
uuuuuagauugagaaaugu

SEQ ID NO: 3678701 - RNA, 20 nt, Human
uuuuuagauugagaaaugug

SEQ ID NO: 3678702 - RNA, 13 nt, Human
uuuuuaggaaaug

SEQ ID NO: 3678703 - RNA, 13 nt, Human
uuuuuaguaaucu

SEQ ID NO: 3678704 - RNA, 15 nt, Human
uuuuuaguaaucugu

SEQ ID NO: 3678705 - RNA, 12 nt, Human
uuuuuauaaaaa

SEQ ID NO: 3678706 - RNA, 20 nt, Human
uuuuuauacaaaccuaccaa

SEQ ID NO: 3678707 - RNA, 18 nt, Human
uuuuuauauagcuugaaa

SEQ ID NO: 3678708 - RNA, 21 nt, Human
uuuuuauaucaugcaaaauau

SEQ ID NO: 3678709 - RNA, 21 nt, Human
uuuuuauauucucagcagagu

SEQ ID NO: 3678710 - RNA, 22 nt, Human
uuuuuauauucucagcagagug

SEQ ID NO: 3678711 - RNA, 23 nt, Human
uuuuuaucuccccuucacaugca

SEQ ID NO: 3678712 - RNA, 13 nt, Human
uuuuuaucuuuuc

SEQ ID NO: 3678713 - RNA, 21 nt, Human
uuuuuaucuuuucuacagcaa

SEQ ID NO: 3678714 - RNA, 12 nt, Human
uuuuuaugugau

SEQ ID NO: 3678715 - RNA, 16 nt, Human
uuuuuaugugaucaau

SEQ ID NO: 3678716 - RNA, 23 nt, Human
uuuuuauuaaaauauuucagguu

SEQ ID NO: 3678717 - RNA, 21 nt, Human
uuuuuauuaaucacuguguau

SEQ ID NO: 3678718 - RNA, 14 nt, Human
uuuuuauuaauuua

SEQ ID NO: 3678719 - RNA, 23 nt, Human
uuuuuauuaauuuuaguuuuuca

SEQ ID NO: 3678720 - RNA, 14 nt, Human
uuuuuauucuugug

SEQ ID NO: 3678721 - RNA, 13 nt, Human
uuuuuauuuaaaa

SEQ ID NO: 3678722 - RNA, 14 nt, Human
uuuuuauuuaugaa

SEQ ID NO: 3678723 - RNA, 19 nt, Human
uuuuuauuuccuaugaugu

SEQ ID NO: 3678724 - RNA, 14 nt, Human
uuuuuauuucuccu

SEQ ID NO: 3678725 - RNA, 15 nt, Human
uuuuuauuucuuccu

SEQ ID NO: 3678726 - RNA, 19 nt, Human
uuuuuauuuguuugugcau

SEQ ID NO: 3678727 - RNA, 15 nt, Human
uuuuucaaaauagaa

SEQ ID NO: 3678728 - RNA, 21 nt, Human
uuuuucaaaauccaaaaagaa

SEQ ID NO: 3678729 - RNA, 9 nt, Human
uuuuucaac

SEQ ID NO: 3678730 - RNA, 20 nt, Human
uuuuucaauauauugaacuu

SEQ ID NO: 3678731 - RNA, 21 nt, Human
uuuuucaauuaaacggauuau

SEQ ID NO: 3678732 - RNA, 19 nt, Human
uuuuucacggaaguuuuca

SEQ ID NO: 3678733 - RNA, 18 nt, Human
uuuuucaguauuauaugu

SEQ ID NO: 3678734 - RNA, 14 nt, Human
uuuuucaguucaaa

SEQ ID NO: 3678735 - RNA, 18 nt, Human
uuuuucauaaacaaguuc

SEQ ID NO: 3678736 - RNA, 12 nt, Human
uuuuucaucccc

SEQ ID NO: 3678737 - RNA, 11 nt, Human
uuuuucaugau

SEQ ID NO: 3678738 - RNA, 20 nt, Human
uuuuucauguuuuaacaaaa

SEQ ID NO: 3678739 - RNA, 23 nt, Human
uuuuucauucaucccauuaauca

SEQ ID NO: 3678740 - RNA, 18 nt, Human
uuuuucauuuuaaaaagu

SEQ ID NO: 3678741 - RNA, 14 nt, Human
uuuuucauuuucca

SEQ ID NO: 3678742 - RNA, 16 nt, Human
uuuuucauuuuccaau

SEQ ID NO: 3678743 - RNA, 13 nt, Human
uuuuuccaaaaaa

SEQ ID NO: 3678744 - RNA, 19 nt, Human
uuuuuccaaaaaaauacug

SEQ ID NO: 3678745 - RNA, 14 nt, Human
uuuuuccaacugug

SEQ ID NO: 3678746 - RNA, 14 nt, Human
uuuuuccacuuugu

SEQ ID NO: 3678747 - RNA, 23 nt, Human
uuuuuccuaacaaaagaugaaag

SEQ ID NO: 3678748 - RNA, 14 nt, Human
uuuuuccuguccuu

SEQ ID NO: 3678749 - RNA, 15 nt, Human
uuuuuccuuacauaa

SEQ ID NO: 3678750 - RNA, 19 nt, Human
uuuuuccuucagugccuua

SEQ ID NO: 3678751 - RNA, 11 nt, Human
uuuuuccuuua

SEQ ID NO: 3678752 - RNA, 17 nt, Human
uuuuuccuuuuucugau

SEQ ID NO: 3678753 - RNA, 18 nt, Human
uuuuucuaaaacuaaaua

SEQ ID NO: 3678754 - RNA, 15 nt, Human
uuuuucuaagagaag

SEQ ID NO: 3678755 - RNA, 16 nt, Human
uuuuucuaagagaagu

SEQ ID NO: 3678756 - RNA, 15 nt, Human
uuuuucuauauuauu

SEQ ID NO: 3678757 - RNA, 19 nt, Human
uuuuucucaugaaucugca

SEQ ID NO: 3678758 - RNA, 18 nt, Human
uuuuucucucaacaccau

SEQ ID NO: 3678759 - RNA, 16 nt, Human
uuuuucugauuagcuu

SEQ ID NO: 3678760 - RNA, 22 nt, Human
uuuuucugcacuauaugcaaac

SEQ ID NO: 3678761 - RNA, 13 nt, Human
uuuuucugcagaa

SEQ ID NO: 3678762 - RNA, 12 nt, Human
uuuuucugccuc

SEQ ID NO: 3678763 - RNA, 13 nt, Human
uuuuucugccucc

SEQ ID NO: 3678764 - RNA, 15 nt, Human
agaaguuaagcaaca

SEQ ID NO: 3678765 - RNA, 14 nt, Human
agaaguuacugaau

SEQ ID NO: 3678766 - RNA, 15 nt, Human
agaaguucuaguguu

SEQ ID NO: 3678767 - RNA, 17 nt, Human
agaaguucuaguguuuu

SEQ ID NO: 3678768 - RNA, 20 nt, Human
agaaguucuuugauucugua

SEQ ID NO: 3678769 - RNA, 21 nt, Human
agaaguuguaaaguauguauu

SEQ ID NO: 3678770 - RNA, 12 nt, Human
agaaguuuaaau

SEQ ID NO: 3678771 - RNA, 16 nt, Human
agaaguuuagauuuua

SEQ ID NO: 3678772 - RNA, 18 nt, Human
agaaguuuagauuuuaau

SEQ ID NO: 3678773 - RNA, 21 nt, Human
agaaguuucaucauuuuuuac

SEQ ID NO: 3678774 - RNA, 14 nt, Human
agaaguuucccuuc

SEQ ID NO: 3678775 - RNA, 23 nt, Human
agaaguuucugccgcagcccugc

SEQ ID NO: 3678776 - RNA, 20 nt, Human
agaaguuugauauuaaagga

SEQ ID NO: 3678777 - RNA, 21 nt, Human
agaaguuugcacuaucuuuca

SEQ ID NO: 3678778 - RNA, 23 nt, Human
agaaguuugcacuaucuuucagc

SEQ ID NO: 3678779 - RNA, 15 nt, Human
agaaguuuguccauu

SEQ ID NO: 3678780 - RNA, 16 nt, Human
agaaguuuuaaauuuu

SEQ ID NO: 3678781 - RNA, 11 nt, Human
agaaguuuuug

SEQ ID NO: 3678782 - RNA, 12 nt, Human
agaaguuuuugu

SEQ ID NO: 3678783 - RNA, 20 nt, Human
agaaguuuuuguacuguaaa

SEQ ID NO: 3678784 - RNA, 12 nt, Human
agaauaaaauug

SEQ ID NO: 3678785 - RNA, 14 nt, Human
agaauaaaauuuuu

SEQ ID NO: 3678786 - RNA, 16 nt, Human
agaauaaaccaagaau

SEQ ID NO: 3678787 - RNA, 20 nt, Human
agaauaaacuuacauauuua

SEQ ID NO: 3678788 - RNA, 13 nt, Human
agaauaaagcaau

SEQ ID NO: 3678789 - RNA, 18 nt, Human
agaauaaagcaauuuucc

SEQ ID NO: 3678790 - RNA, 19 nt, Human
agaauaaagcaauuuuccu

SEQ ID NO: 3678791 - RNA, 20 nt, Human
agaauaaagcaauuuuccuu

SEQ ID NO: 3678792 - RNA, 22 nt, Human
agaauaaagcaauuuuccuuga

SEQ ID NO: 3678793 - RNA, 23 nt, Human
agaauaaagccuugugaucacuu

SEQ ID NO: 3678794 - RNA, 14 nt, Human
agaauaaaggcagu

SEQ ID NO: 3678795 - RNA, 18 nt, Human
agaauaaaggcaguuuuc

SEQ ID NO: 3678796 - RNA, 21 nt, Human
agaauaaaggcaguuuucuaa

SEQ ID NO: 3678797 - RNA, 17 nt, Human
agaauaaaguucugagu

SEQ ID NO: 3678798 - RNA, 16 nt, Human
agaauaagaauuugca

SEQ ID NO: 3678799 - RNA, 17 nt, Human
agaauaagaauuugcau

SEQ ID NO: 3678800 - RNA, 16 nt, Human
agaauaagagaaagaa

SEQ ID NO: 3678801 - RNA, 21 nt, Human
agaauaagagaaagaaaauga

SEQ ID NO: 3678802 - RNA, 13 nt, Human
agaauaaguuauu

SEQ ID NO: 3678803 - RNA, 14 nt, Human
agaauaaguuauug

SEQ ID NO: 3678804 - RNA, 16 nt, Human
agaauaaguuauugca

SEQ ID NO: 3678805 - RNA, 19 nt, Human
agaauaaguuauugcaguu

SEQ ID NO: 3678806 - RNA, 21 nt, Human
agaauaaguuauugcaguuua

SEQ ID NO: 3678807 - RNA, 23 nt, Human
agaauaauaugcugccaaauuuu

SEQ ID NO: 3678808 - RNA, 13 nt, Human
agaauaaucuuug

SEQ ID NO: 3678809 - RNA, 21 nt, Human
agaauaaugugggaagaaaca

SEQ ID NO: 3678810 - RNA, 17 nt, Human
agaauaauuuauaguaa

SEQ ID NO: 3678811 - RNA, 22 nt, Human
agaauaauuuauaguaaugagu

SEQ ID NO: 3678812 - RNA, 15 nt, Human
agaauaauuugguau

SEQ ID NO: 3678813 - RNA, 15 nt, Human
agaauacaaacauau

SEQ ID NO: 3678814 - RNA, 18 nt, Human
agaauacagaaagaugga

SEQ ID NO: 3678815 - RNA, 21 nt, Human
agaauacagaaagauggaugu

SEQ ID NO: 3678816 - RNA, 16 nt, Human
agaauacagcuuucug

SEQ ID NO: 3678817 - RNA, 18 nt, Human
agaauacaguaagcugcu

SEQ ID NO: 3678818 - RNA, 11 nt, Human
agaauacugau

SEQ ID NO: 3678819 - RNA, 19 nt, Human
agaauacuguuaaaggaaa

SEQ ID NO: 3678820 - RNA, 20 nt, Human
agaauacuguuaaaggaaaa

SEQ ID NO: 3678821 - RNA, 19 nt, Human
agaauacuucucauuuuuu

SEQ ID NO: 3678822 - RNA, 12 nt, Human
agaauacuugaa

SEQ ID NO: 3678823 - RNA, 16 nt, Human
agaauacuugaacuug

SEQ ID NO: 3678824 - RNA, 14 nt, Human
agaauacuuuuuaa

SEQ ID NO: 3678825 - RNA, 13 nt, Human
agaauagaaagaa

SEQ ID NO: 3678826 - RNA, 19 nt, Human
agaauagaacaacauauac

SEQ ID NO: 3678827 - RNA, 21 nt, Human
agaauagaacaacauauacaa

SEQ ID NO: 3678828 - RNA, 14 nt, Human
agaauagaagcuaa

SEQ ID NO: 3678829 - RNA, 17 nt, Human
agaauagccacauuugg

SEQ ID NO: 3678830 - RNA, 20 nt, Human
agaauagccacauuuggaau

SEQ ID NO: 3678831 - RNA, 17 nt, Human
agaauaggacuuguuuu

SEQ ID NO: 3678832 - RNA, 18 nt, Human
agaauaggcacuuuaaaa

SEQ ID NO: 3678833 - RNA, 14 nt, Human
agaauauaacauga

SEQ ID NO: 3678834 - RNA, 21 nt, Human
agaauauaacaugaaaugaua

SEQ ID NO: 3678835 - RNA, 23 nt, Human
agaauauaauuaucggaagcagu

SEQ ID NO: 3678836 - RNA, 11 nt, Human
agaauauauau

SEQ ID NO: 3678837 - RNA, 18 nt, Human
agaauauauuuauuuaaa

SEQ ID NO: 3678838 - RNA, 21 nt, Human
agaauauauuuauuuaaagca

SEQ ID NO: 3678839 - RNA, 17 nt, Human
agaauauccaugaccua

SEQ ID NO: 3678840 - RNA, 21 nt, Human
agaauauccuuuaaaauuuaa

SEQ ID NO: 3678841 - RNA, 16 nt, Human
agaauaugacuuuuua

SEQ ID NO: 3678842 - RNA, 14 nt, Human
agaauaugucagug

SEQ ID NO: 3678843 - RNA, 18 nt, Human
agaauauguuucaaacuu

SEQ ID NO: 3678844 - RNA, 19 nt, Human
agaauauguuucaaacuuu

SEQ ID NO: 3678845 - RNA, 21 nt, Human
agaauauguuucaaacuuugg

SEQ ID NO: 3678846 - RNA, 13 nt, Human
agaauauucagga

SEQ ID NO: 3678847 - RNA, 15 nt, Human
agaauauucaggacu

SEQ ID NO: 3678848 - RNA, 22 nt, Human
agaauauugaaguacuugccag

SEQ ID NO: 3678849 - RNA, 19 nt, Human
agaauauugcaaaauacau

SEQ ID NO: 3678850 - RNA, 13 nt, Human
agaauauuguauu

SEQ ID NO: 3678851 - RNA, 15 nt, Human
agaauauuguauugu

SEQ ID NO: 3678852 - RNA, 12 nt, Human
agaauauugucc

SEQ ID NO: 3678853 - RNA, 14 nt, Human
agaauauuguuccu

SEQ ID NO: 3678854 - RNA, 20 nt, Human
agaauauuguuccuaaguuc

SEQ ID NO: 3678855 - RNA, 22 nt, Human
agaauauuguuccuaaguucuu

SEQ ID NO: 3678856 - RNA, 22 nt, Human
agaauauuuauuaccucugaua

SEQ ID NO: 3678857 - RNA, 13 nt, Human
agaauauuucuau

SEQ ID NO: 3678858 - RNA, 19 nt, Human
agaauauuugguuuuccug

SEQ ID NO: 3678859 - RNA, 19 nt, Human
agaauauuuuaaguauugc

SEQ ID NO: 3678860 - RNA, 14 nt, Human
agaaucaaaacucu

SEQ ID NO: 3678861 - RNA, 13 nt, Human
agaaucaaagcaa

SEQ ID NO: 3678862 - RNA, 19 nt, Human
agaaucaaagcaaugcauu

SEQ ID NO: 3678863 - RNA, 14 nt, Human
agaaucacuugaac

SEQ ID NO: 3678864 - RNA, 17 nt, Human
agaaucacuugaacccg

SEQ ID NO: 3678865 - RNA, 16 nt, Human
agaaucagaagauagu

SEQ ID NO: 3678866 - RNA, 13 nt, Human
agaaucagccuag

SEQ ID NO: 3678867 - RNA, 22 nt, Human
agaaucagucuauccacagaga

SEQ ID NO: 3678868 - RNA, 21 nt, Human
agaaucaugugaacccgggac

SEQ ID NO: 3678869 - RNA, 18 nt, Human
agaaucauguuucuuuga

SEQ ID NO: 3678870 - RNA, 21 nt, Human
agaaucauguuucuuugauca

SEQ ID NO: 3678871 - RNA, 12 nt, Human
agaauccaaacu

SEQ ID NO: 3678872 - RNA, 16 nt, Human
agaauccaaacuugga

SEQ ID NO: 3678873 - RNA, 21 nt, Human
agaauccaaacuuggauuuuu

SEQ ID NO: 3678874 - RNA, 16 nt, Human
agaauccacauuucua

SEQ ID NO: 3678875 - RNA, 17 nt, Human
agaauccacauuucuaa

SEQ ID NO: 3678876 - RNA, 19 nt, Human
agaauccacauuucuaaaa

SEQ ID NO: 3678877 - RNA, 20 nt, Human
agaauccacauuucuaaaau

SEQ ID NO: 3678878 - RNA, 20 nt, Human
agaauccagcaccggcccca

SEQ ID NO: 3678879 - RNA, 19 nt, Human
agaaucccaaauuugauug

SEQ ID NO: 3678880 - RNA, 18 nt, Human
agaaucccacuuucuaua

SEQ ID NO: 3678881 - RNA, 21 nt, Human
agaaucccagcccccugacca

SEQ ID NO: 3678882 - RNA, 16 nt, Human
agaaucccuagacuuu

SEQ ID NO: 3678883 - RNA, 18 nt, Human
agaaucccuggcaaaggg

SEQ ID NO: 3678884 - RNA, 17 nt, Human
agaaucccuguguuaau

SEQ ID NO: 3678885 - RNA, 21 nt, Human
agaaucccuguguuaauuuaa

SEQ ID NO: 3678886 - RNA, 16 nt, Human
agaauccuuuuguaga

SEQ ID NO: 3678887 - RNA, 17 nt, Human
agaaucgaggugcuguu

SEQ ID NO: 3678888 - RNA, 17 nt, Human
agaaucuacccaaagga

SEQ ID NO: 3678889 - RNA, 19 nt, Human
agaaucuacccaaaggaua

SEQ ID NO: 3678890 - RNA, 13 nt, Human
agaaucuauuuuc

SEQ ID NO: 3678891 - RNA, 21 nt, Human
agaaucuauuuucuauguacu

SEQ ID NO: 3678892 - RNA, 22 nt, Human
agaaucuauuuucuauguacua

SEQ ID NO: 3678893 - RNA, 17 nt, Human
agaaucucaaauaacua

SEQ ID NO: 3678894 - RNA, 18 nt, Human
agaaucucaacaugucuc

SEQ ID NO: 3678895 - RNA, 16 nt, Human
agaaucuggagagcua

SEQ ID NO: 3678896 - RNA, 22 nt, Human
agaaucuuguuuugaaaauaac

SEQ ID NO: 3678897 - RNA, 16 nt, Human
agaaucuuuauugaga

SEQ ID NO: 3678898 - RNA, 19 nt, Human
agaaucuuuauugagaaag

SEQ ID NO: 3678899 - RNA, 15 nt, Human
agaaugaaaaaugaa

SEQ ID NO: 3678900 - RNA, 21 nt, Human
agaaugaaagaguaaaggaaa

SEQ ID NO: 3678901 - RNA, 15 nt, Human
agaaugaaagcuccu

SEQ ID NO: 3678902 - RNA, 16 nt, Human
agaaugaaauguaugu

SEQ ID NO: 3678903 - RNA, 13 nt, Human
agaaugaacaaag

SEQ ID NO: 3678904 - RNA, 18 nt, Human
agaaugaagguuuuugua

SEQ ID NO: 3678905 - RNA, 20 nt, Human
agaaugaagguuuuuguaaa

SEQ ID NO: 3678906 - RNA, 15 nt, Human
agaaugaccuuguaa

SEQ ID NO: 3678907 - RNA, 17 nt, Human
agaaugaccuuguaaug

SEQ ID NO: 3678908 - RNA, 23 nt, Human
agaaugaccuuguaauguaacug

SEQ ID NO: 3678909 - RNA, 16 nt, Human
agaccugagcucccca

SEQ ID NO: 3678910 - RNA, 16 nt, Human
agaccugauccuggag

SEQ ID NO: 3678911 - RNA, 21 nt, Human
agaccugauccuggaggccca

SEQ ID NO: 3678912 - RNA, 19 nt, Human
agaccugcagacgcccaga

SEQ ID NO: 3678913 - RNA, 22 nt, Human
agaccugccccuccucucugcc

SEQ ID NO: 3678914 - RNA, 23 nt, Human
agaccugccccuccucucugccc

SEQ ID NO: 3678915 - RNA, 22 nt, Human
agaccugcccucaagagcaaag

SEQ ID NO: 3678916 - RNA, 23 nt, Human
agaccugcuuuuugaaaugaaau

SEQ ID NO: 3678917 - RNA, 16 nt, Human
agaccuggacacaggc

SEQ ID NO: 3678918 - RNA, 18 nt, Human
agaccuggacacaggccu

SEQ ID NO: 3678919 - RNA, 16 nt, Human
agaccuggcagcucug

SEQ ID NO: 3678920 - RNA, 17 nt, Human
agaccuggcagcucugg

SEQ ID NO: 3678921 - RNA, 23 nt, Human
agaccuggcagcucuggacagcc

SEQ ID NO: 3678922 - RNA, 20 nt, Human
agaccuggggcugcugugaa

SEQ ID NO: 3678923 - RNA, 13 nt, Human
agaccuguaauca

SEQ ID NO: 3678924 - RNA, 18 nt, Human
agaccuguuagcagacag

SEQ ID NO: 3678925 - RNA, 11 nt, Human
agaccuuaccc

SEQ ID NO: 3678926 - RNA, 23 nt, Human
agaccuuccauaaugcuacuguc

SEQ ID NO: 3678927 - RNA, 11 nt, Human
agaccuucucc

SEQ ID NO: 3678928 - RNA, 18 nt, Human
agaccuucuccuucaccu

SEQ ID NO: 3678929 - RNA, 16 nt, Human
agaccuuguucacacu

SEQ ID NO: 3678930 - RNA, 19 nt, Human
agaccuuucaaagccauuu

SEQ ID NO: 3678931 - RNA, 19 nt, Human
agaccuuuuaacuccucaa

SEQ ID NO: 3678932 - RNA, 22 nt, Human
agaccuuuuggcccaaucucug

SEQ ID NO: 3678933 - RNA, 16 nt, Human
agaccuuuuuuaggaa

SEQ ID NO: 3678934 - RNA, 20 nt, Human
agaccuuuuuuuuuuuucca

SEQ ID NO: 3678935 - RNA, 14 nt, Human
agacgaacauguag

SEQ ID NO: 3678936 - RNA, 20 nt, Human
agacgaggcccucgggccca

SEQ ID NO: 3678937 - RNA, 20 nt, Human
agacgauaguuaucuguucu

SEQ ID NO: 3678938 - RNA, 17 nt, Human
agacgaugucuucauac

SEQ ID NO: 3678939 - RNA, 19 nt, Human
agacgaugucuucauaccu

SEQ ID NO: 3678940 - RNA, 17 nt, Human
agacgauuugucaguua

SEQ ID NO: 3678941 - RNA, 23 nt, Human
agacgcacuuuggcuuauaauuc

SEQ ID NO: 3678942 - RNA, 22 nt, Human
agacgccggggacagaggccug

SEQ ID NO: 3678943 - RNA, 15 nt, Human
agacgccugagcuca

SEQ ID NO: 3678944 - RNA, 17 nt, Human
agacgcugugcugcccu

SEQ ID NO: 3678945 - RNA, 18 nt, Human
agacgcugugcugcccug

SEQ ID NO: 3678946 - RNA, 19 nt, Human
agacgcugugcugcccugc

SEQ ID NO: 3678947 - RNA, 21 nt, Human
agacgcugugcugcccugccc

SEQ ID NO: 3678948 - RNA, 18 nt, Human
agacggaaggguaaacaa

SEQ ID NO: 3678949 - RNA, 21 nt, Human
agacggaggccuacucuucca

SEQ ID NO: 3678950 - RNA, 18 nt, Human
agacggagucccaccuug

SEQ ID NO: 3678951 - RNA, 18 nt, Human
agacgggaggccuggccu

SEQ ID NO: 3678952 - RNA, 18 nt, Human
agacgggggcagagaggg

SEQ ID NO: 3678953 - RNA, 21 nt, Human
agacggugucuuguucuguca

SEQ ID NO: 3678954 - RNA, 16 nt, Human
agacgguguuuugcca

SEQ ID NO: 3678955 - RNA, 20 nt, Human
agacguacguaucagcggcc

SEQ ID NO: 3678956 - RNA, 21 nt, Human
agagagaaaacuuauuugagu

SEQ ID NO: 3678957 - RNA, 14 nt, Human
agagagaaaauaaa

SEQ ID NO: 3678958 - RNA, 16 nt, Human
agagagaaagccaggc

SEQ ID NO: 3678959 - RNA, 21 nt, Human
agagagaaccuaacuguaucu

SEQ ID NO: 3678960 - RNA, 15 nt, Human
agagagaagugcccc

SEQ ID NO: 3678961 - RNA, 19 nt, Human
agagagaagugccccugcu

SEQ ID NO: 3678962 - RNA, 20 nt, Human
agagagacacagcugcagag

SEQ ID NO: 3678963 - RNA, 12 nt, Human
agagagagaaaa

SEQ ID NO: 3678964 - RNA, 10 nt, Human
agagagagag

SEQ ID NO: 3678965 - RNA, 15 nt, Human
agagagagagagaaa

SEQ ID NO: 3678966 - RNA, 15 nt, Human
agagagagagagaga

SEQ ID NO: 3678967 - RNA, 14 nt, Human
agagagauguguaa

SEQ ID NO: 3678968 - RNA, 19 nt, Human
agagagcaagacgcugugc

SEQ ID NO: 3678969 - RNA, 18 nt, Human
agagagcaccccucucug

SEQ ID NO: 3678970 - RNA, 13 nt, Human
agagagccauuuu

SEQ ID NO: 3678971 - RNA, 15 nt, Human
agagagccauuuugu

SEQ ID NO: 3678972 - RNA, 17 nt, Human
agagagccauuuuguga

SEQ ID NO: 3678973 - RNA, 23 nt, Human
agagagccuugguucaucagugu

SEQ ID NO: 3678974 - RNA, 22 nt, Human
agagagcgcagccgccuucaca

SEQ ID NO: 3678975 - RNA, 16 nt, Human
agagagcggucucagg

SEQ ID NO: 3678976 - RNA, 11 nt, Human
agagagcuggu

SEQ ID NO: 3678977 - RNA, 17 nt, Human
agagagcuguucccaaa

SEQ ID NO: 3678978 - RNA, 18 nt, Human
agagagcuuaaugauaau

SEQ ID NO: 3678979 - RNA, 14 nt, Human
agagaggaaucaga

SEQ ID NO: 3678980 - RNA, 13 nt, Human
agagaggacagcu

SEQ ID NO: 3678981 - RNA, 18 nt, Human
agagaggacgugggcggc

SEQ ID NO: 3678982 - RNA, 13 nt, Human
agagaggagagga

SEQ ID NO: 3678983 - RNA, 14 nt, Human
agagaggagccaga

SEQ ID NO: 3678984 - RNA, 13 nt, Human
agagaggagucag

SEQ ID NO: 3678985 - RNA, 14 nt, Human
agagaggaguucaa

SEQ ID NO: 3678986 - RNA, 15 nt, Human
agagaggaguucaau

SEQ ID NO: 3678987 - RNA, 13 nt, Human
agagaggcagaga

SEQ ID NO: 3678988 - RNA, 15 nt, Human
agagaggcagagagc

SEQ ID NO: 3678989 - RNA, 20 nt, Human
agagaggccuuuuggaaugu

SEQ ID NO: 3678990 - RNA, 19 nt, Human
agagaggcuaaaauguuuu

SEQ ID NO: 3678991 - RNA, 18 nt, Human
agagagggaauucucuug

SEQ ID NO: 3678992 - RNA, 15 nt, Human
agagagggagaagaa

SEQ ID NO: 3678993 - RNA, 15 nt, Human
agagagggcagaggg

SEQ ID NO: 3678994 - RNA, 15 nt, Human
agagagggcuuuaau

SEQ ID NO: 3678995 - RNA, 19 nt, Human
agagagggguacauuuccc

SEQ ID NO: 3678996 - RNA, 23 nt, Human
agagagggugaguccuccagaac

SEQ ID NO: 3678997 - RNA, 20 nt, Human
agagaggguggugaccucug

SEQ ID NO: 3678998 - RNA, 22 nt, Human
agagagguuugcagucccaagc

SEQ ID NO: 3678999 - RNA, 22 nt, Human
agagaguaauggguuucauauu

SEQ ID NO: 3679000 - RNA, 13 nt, Human
agagaguggcugg

SEQ ID NO: 3679001 - RNA, 14 nt, Human
agagauacucuggg

SEQ ID NO: 3679002 - RNA, 16 nt, Human
agagauagccuguggc

SEQ ID NO: 3679003 - RNA, 23 nt, Human
agagauaggaaggucauuuccau

SEQ ID NO: 3679004 - RNA, 14 nt, Human
agagauauaucuga

SEQ ID NO: 3679005 - RNA, 20 nt, Human
agagauauguagaaggcaca

SEQ ID NO: 3679006 - RNA, 20 nt, Human
agagauauuuuaaaaugaga

SEQ ID NO: 3679007 - RNA, 15 nt, Human
agagauauuuugggc

SEQ ID NO: 3679008 - RNA, 23 nt, Human
agagauauuuugggcaugugggc

SEQ ID NO: 3679009 - RNA, 14 nt, Human
agagauauuuugua

SEQ ID NO: 3679010 - RNA, 15 nt, Human
agagaucaaauggaa

SEQ ID NO: 3679011 - RNA, 19 nt, Human
agagaucaaauggaaagga

SEQ ID NO: 3679012 - RNA, 19 nt, Human
agagaucaggaagagaagg

SEQ ID NO: 3679013 - RNA, 20 nt, Human
agagaucaggaagagaagga

SEQ ID NO: 3679014 - RNA, 18 nt, Human
agagauccaaaagaagcc

SEQ ID NO: 3679015 - RNA, 13 nt, Human
agagauccaaaga

SEQ ID NO: 3679016 - RNA, 12 nt, Human
agagaugaauua

SEQ ID NO: 3679017 - RNA, 17 nt, Human
agagaugacugaguccu

SEQ ID NO: 3679018 - RNA, 17 nt, Human
agagaugccuccaccgc

SEQ ID NO: 3679019 - RNA, 13 nt, Human
agagaugccuccc

SEQ ID NO: 3679020 - RNA, 18 nt, Human
agagaugccucccugagc

SEQ ID NO: 3679021 - RNA, 15 nt, Human
agagauggaggagga

SEQ ID NO: 3679022 - RNA, 21 nt, Human
agagaugggagcuccucuccu

SEQ ID NO: 3679023 - RNA, 13 nt, Human
agagauguguaau

SEQ ID NO: 3679024 - RNA, 14 nt, Human
agagauguguguug

SEQ ID NO: 3679025 - RNA, 21 nt, Human
agagauguguguugauacugu

SEQ ID NO: 3679026 - RNA, 22 nt, Human
agagauguuuuuaaaaguuuca

SEQ ID NO: 3679027 - RNA, 14 nt, Human
agagauugcuaauu

SEQ ID NO: 3679028 - RNA, 15 nt, Human
agagauugcuucuca

SEQ ID NO: 3679029 - RNA, 22 nt, Human
agagauuggaaugggcagcuca

SEQ ID NO: 3679030 - RNA, 20 nt, Human
agagauuggaucaaguauua

SEQ ID NO: 3679031 - RNA, 23 nt, Human
agagauuggguuuuuggacuucu

SEQ ID NO: 3679032 - RNA, 12 nt, Human
agagauuucuca

SEQ ID NO: 3679033 - RNA, 17 nt, Human
agagauuugucuaauug

SEQ ID NO: 3679034 - RNA, 22 nt, Human
agagauuuuuuuguuguuuguu

SEQ ID NO: 3679035 - RNA, 17 nt, Human
agagauuuuuuuuuaaa

SEQ ID NO: 3679036 - RNA, 18 nt, Human
agagcaaaauaauuuuaa

SEQ ID NO: 3679037 - RNA, 15 nt, Human
agagcaaagggccag

SEQ ID NO: 3679038 - RNA, 22 nt, Human
agagcaaccccuggaccccagc

SEQ ID NO: 3679039 - RNA, 15 nt, Human
agagcaagacucugu

SEQ ID NO: 3679040 - RNA, 20 nt, Human
agagcaagagagcagcaagg

SEQ ID NO: 3679041 - RNA, 17 nt, Human
agagcaaggaagguaaa

SEQ ID NO: 3679042 - RNA, 14 nt, Human
agagcacagcccuc

SEQ ID NO: 3679043 - RNA, 14 nt, Human
agagcacugccacc

SEQ ID NO: 3679044 - RNA, 15 nt, Human
agagcacuuaagaga

SEQ ID NO: 3679045 - RNA, 19 nt, Human
agagcacuuaagagaauau

SEQ ID NO: 3679046 - RNA, 20 nt, Human
agagcacuuaagagaauauu

SEQ ID NO: 3679047 - RNA, 14 nt, Human
agagcagagaauau

SEQ ID NO: 3679048 - RNA, 15 nt, Human
agagcagaugcagag

SEQ ID NO: 3679049 - RNA, 16 nt, Human
agagcagcaccuccuc

SEQ ID NO: 3679050 - RNA, 23 nt, Human
agagcagcagugaaaacaagugc

SEQ ID NO: 3679051 - RNA, 17 nt, Human
agagcagccuguggcau

SEQ ID NO: 3679052 - RNA, 21 nt, Human
agagcagcuuuaaacucaggg

SEQ ID NO: 3679053 - RNA, 13 nt, Human
agagcaggaccuc

SEQ ID NO: 3679054 - RNA, 23 nt, Human
agagcaggaggccccuggcccag

SEQ ID NO: 3679055 - RNA, 15 nt, Human
agagcaggccaggcg

SEQ ID NO: 3679056 - RNA, 22 nt, Human
agagcagggauuaaccucugca

SEQ ID NO: 3679057 - RNA, 13 nt, Human
agagcagggcaag

SEQ ID NO: 3679058 - RNA, 19 nt, Human
agagcaguaccagcgcucu

SEQ ID NO: 3679059 - RNA, 20 nt, Human
agagcagugaagacuagaaa

SEQ ID NO: 3679060 - RNA, 13 nt, Human
agagcagugcuuu

SEQ ID NO: 3679061 - RNA, 22 nt, Human
agagcaguuucuguccugcugg

SEQ ID NO: 3679062 - RNA, 23 nt, Human
agagcaguuugguuucuagcaug

SEQ ID NO: 3679063 - RNA, 14 nt, Human
agagcauaauuuaa

SEQ ID NO: 3679064 - RNA, 18 nt, Human
agagcauaauuuaaaaau

SEQ ID NO: 3679065 - RNA, 21 nt, Human
agagcauaauuuaaaaauaua

SEQ ID NO: 3679066 - RNA, 13 nt, Human
agagcauaggguc

SEQ ID NO: 3679067 - RNA, 14 nt, Human
agagcaucaugccu

SEQ ID NO: 3679068 - RNA, 17 nt, Human
agagcaucaugccucug

SEQ ID NO: 3679069 - RNA, 19 nt, Human
agagcaucaugccucugag

SEQ ID NO: 3679070 - RNA, 19 nt, Human
agagcauuacgugagccag

SEQ ID NO: 3679071 - RNA, 20 nt, Human
agagcauuacgugagccagg

SEQ ID NO: 3679072 - RNA, 16 nt, Human
agagcauuccagucag

SEQ ID NO: 3679073 - RNA, 17 nt, Human
agagcauuccagucagg

SEQ ID NO: 3679074 - RNA, 15 nt, Human
agagcauugccauuc

SEQ ID NO: 3679075 - RNA, 18 nt, Human
agagcauugccauucccu

SEQ ID NO: 3679076 - RNA, 21 nt, Human
agagccacaaaagaaaagacu

SEQ ID NO: 3679077 - RNA, 20 nt, Human
agagccacaggucuuuaugu

SEQ ID NO: 3679078 - RNA, 15 nt, Human
agagccaccaagagg

SEQ ID NO: 3679079 - RNA, 19 nt, Human
agagccaccaagagggacg

SEQ ID NO: 3679080 - RNA, 15 nt, Human
agagccacugccauu

SEQ ID NO: 3679081 - RNA, 22 nt, Human
agagccagaaccuggagggcua

SEQ ID NO: 3679082 - RNA, 13 nt, Human
agagccagaccaa

SEQ ID NO: 3679083 - RNA, 15 nt, Human
agagccagagaagug

SEQ ID NO: 3679084 - RNA, 17 nt, Human
agagccagagaagugac

SEQ ID NO: 3679085 - RNA, 20 nt, Human
agagccagagaagugacagg

SEQ ID NO: 3679086 - RNA, 13 nt, Human
agagccagcaacu

SEQ ID NO: 3679087 - RNA, 12 nt, Human
agagccagcccu

SEQ ID NO: 3679088 - RNA, 13 nt, Human
agagccagcccuc

SEQ ID NO: 3679089 - RNA, 21 nt, Human
agagccagcccucccuguccu

SEQ ID NO: 3679090 - RNA, 22 nt, Human
agagccagcccucccuguccuc

SEQ ID NO: 3679091 - RNA, 11 nt, Human
agagccagcuu

SEQ ID NO: 3679092 - RNA, 15 nt, Human
agagccaggagaagc

SEQ ID NO: 3679093 - RNA, 16 nt, Human
agagccaggagaagcu

SEQ ID NO: 3679094 - RNA, 13 nt, Human
agagccaggcaca

SEQ ID NO: 3679095 - RNA, 19 nt, Human
agagccaggcacacacugu

SEQ ID NO: 3679096 - RNA, 20 nt, Human
agagccaggcacacacugug

SEQ ID NO: 3679097 - RNA, 22 nt, Human
agagccaggggggugaggagcu

SEQ ID NO: 3679098 - RNA, 13 nt, Human
agagccagggucu

SEQ ID NO: 3679099 - RNA, 13 nt, Human
agagccauacaua

SEQ ID NO: 3679100 - RNA, 21 nt, Human
agagccauacauaaaagaaau

SEQ ID NO: 3679101 - RNA, 22 nt, Human
agagccauauaaguuugaagga

SEQ ID NO: 3679102 - RNA, 22 nt, Human
agagccaugucuucucccugga

SEQ ID NO: 3679103 - RNA, 17 nt, Human
agagccauuuugugaau

SEQ ID NO: 3679104 - RNA, 13 nt, Human
agagcccaccuug

SEQ ID NO: 3679105 - RNA, 16 nt, Human
agagcccacgccccca

SEQ ID NO: 3679106 - RNA, 18 nt, Human
agagcccacgcccccacu

SEQ ID NO: 3679107 - RNA, 23 nt, Human
agauguaauguuuucuuugcaaa

SEQ ID NO: 3679108 - RNA, 14 nt, Human
agauguaauuuugu

SEQ ID NO: 3679109 - RNA, 15 nt, Human
agauguaauuuugug

SEQ ID NO: 3679110 - RNA, 18 nt, Human
agauguacgacuugcaua

SEQ ID NO: 3679111 - RNA, 20 nt, Human
agauguagacaguuggguuu

SEQ ID NO: 3679112 - RNA, 16 nt, Human
agauguagaggagaaa

SEQ ID NO: 3679113 - RNA, 15 nt, Human
agauguagauuuauu

SEQ ID NO: 3679114 - RNA, 21 nt, Human
agauguagcaaaacgcaugga

SEQ ID NO: 3679115 - RNA, 21 nt, Human
agauguagcaaacccugucaa

SEQ ID NO: 3679116 - RNA, 22 nt, Human
agauguagcaaacccugucaaa

SEQ ID NO: 3679117 - RNA, 23 nt, Human
agauguagcaaacccugucaaac

SEQ ID NO: 3679118 - RNA, 13 nt, Human
agauguaggaggg

SEQ ID NO: 3679119 - RNA, 17 nt, Human
agauguauccuuccaau

SEQ ID NO: 3679120 - RNA, 15 nt, Human
agauguaugaaggcu

SEQ ID NO: 3679121 - RNA, 14 nt, Human
agauguaugcacac

SEQ ID NO: 3679122 - RNA, 23 nt, Human
agauguaugcacacacauauauu

SEQ ID NO: 3679123 - RNA, 20 nt, Human
agaugucagccgagccgggc

SEQ ID NO: 3679124 - RNA, 16 nt, Human
agaugucaucccauug

SEQ ID NO: 3679125 - RNA, 23 nt, Human
agaugucauuuaguucagcaucc

SEQ ID NO: 3679126 - RNA, 21 nt, Human
agauguccaucagaugacaag

SEQ ID NO: 3679127 - RNA, 21 nt, Human
agauguccauuuuuacaaguu

SEQ ID NO: 3679128 - RNA, 16 nt, Human
agaugucccuugaugc

SEQ ID NO: 3679129 - RNA, 23 nt, Human
agaugucccuugaugcacagaga

SEQ ID NO: 3679130 - RNA, 17 nt, Human
agauguccuaaugguga

SEQ ID NO: 3679131 - RNA, 14 nt, Human
agaugucuauauug

SEQ ID NO: 3679132 - RNA, 14 nt, Human
agaugucucuaaaa

SEQ ID NO: 3679133 - RNA, 13 nt, Human
agaugucuuccua

SEQ ID NO: 3679134 - RNA, 18 nt, Human
agaugucuucguacaguu

SEQ ID NO: 3679135 - RNA, 13 nt, Human
agaugucuuggaa

SEQ ID NO: 3679136 - RNA, 13 nt, Human
agaugucuuuuau

SEQ ID NO: 3679137 - RNA, 17 nt, Human
agaugucuuuuauagug

SEQ ID NO: 3679138 - RNA, 18 nt, Human
agaugucuuuucccauuu

SEQ ID NO: 3679139 - RNA, 15 nt, Human
agaugugaaaauuac

SEQ ID NO: 3679140 - RNA, 20 nt, Human
agaugugaauuauugacacu

SEQ ID NO: 3679141 - RNA, 21 nt, Human
agaugugaauuauugacacug

SEQ ID NO: 3679142 - RNA, 15 nt, Human
agaugugauauucua

SEQ ID NO: 3679143 - RNA, 20 nt, Human
agaugugauuuaauaguguu

SEQ ID NO: 3679144 - RNA, 18 nt, Human
agaugugcagcagauugg

SEQ ID NO: 3679145 - RNA, 23 nt, Human
agaugugcagcagauuggaagga

SEQ ID NO: 3679146 - RNA, 22 nt, Human
agauguggaaaagccaagaggc

SEQ ID NO: 3679147 - RNA, 12 nt, Human
agauguggagcc

SEQ ID NO: 3679148 - RNA, 14 nt, Human
agauguggagccag

SEQ ID NO: 3679149 - RNA, 15 nt, Human
agauguggagccagg

SEQ ID NO: 3679150 - RNA, 16 nt, Human
agauguggauuuggca

SEQ ID NO: 3679151 - RNA, 16 nt, Human
agauguggcuacugac

SEQ ID NO: 3679152 - RNA, 22 nt, Human
agaugugguugcauaagguuuu

SEQ ID NO: 3679153 - RNA, 21 nt, Human
agauguguaauuuuucuguau

SEQ ID NO: 3679154 - RNA, 13 nt, Human
agauguguguuga

SEQ ID NO: 3679155 - RNA, 15 nt, Human
agauguguguugaua

SEQ ID NO: 3679156 - RNA, 18 nt, Human
agauguguguugauacug

SEQ ID NO: 3679157 - RNA, 22 nt, Human
agauguguguugauacuguugc

SEQ ID NO: 3679158 - RNA, 23 nt, Human
agauguguguugauacuguugca

SEQ ID NO: 3679159 - RNA, 15 nt, Human
agauguguucuuauu

SEQ ID NO: 3679160 - RNA, 19 nt, Human
agauguguugcuauccuga

SEQ ID NO: 3679161 - RNA, 14 nt, Human
agauguuaaaauaa

SEQ ID NO: 3679162 - RNA, 17 nt, Human
agauguuagaucagggg

SEQ ID NO: 3679163 - RNA, 21 nt, Human
agauguuauauuuuucuuaaa

SEQ ID NO: 3679164 - RNA, 21 nt, Human
agauguucagauugcuuugau

SEQ ID NO: 3679165 - RNA, 14 nt, Human
agauguucccccau

SEQ ID NO: 3679166 - RNA, 22 nt, Human
agauguucuaagucuuuccauu

SEQ ID NO: 3679167 - RNA, 14 nt, Human
agauguucuacuuu

SEQ ID NO: 3679168 - RNA, 22 nt, Human
agauguucuacuuuguucugcu

SEQ ID NO: 3679169 - RNA, 20 nt, Human
agauguucucuaucauuuaa

SEQ ID NO: 3679170 - RNA, 22 nt, Human
agauguugagaaaccugggcuc

SEQ ID NO: 3679171 - RNA, 22 nt, Human
agauguugauuuuuacuguguu

SEQ ID NO: 3679172 - RNA, 18 nt, Human
agauguugccauguguuu

SEQ ID NO: 3679173 - RNA, 15 nt, Human
agauguuuaaaacac

SEQ ID NO: 3679174 - RNA, 19 nt, Human
agauguuuauucuucuaga

SEQ ID NO: 3679175 - RNA, 20 nt, Human
agauguuuauucuucuagag

SEQ ID NO: 3679176 - RNA, 22 nt, Human
agauguuuauucuucuagaguu

SEQ ID NO: 3679177 - RNA, 15 nt, Human
agauguuuauuucag

SEQ ID NO: 3679178 - RNA, 21 nt, Human
agauguuuccagacuuccuug

SEQ ID NO: 3679179 - RNA, 17 nt, Human
agauguuugucagauau

SEQ ID NO: 3679180 - RNA, 17 nt, Human
agauguuuuacgucugg

SEQ ID NO: 3679181 - RNA, 11 nt, Human
agauguuuuag

SEQ ID NO: 3679182 - RNA, 13 nt, Human
agauguuuuuaaa

SEQ ID NO: 3679183 - RNA, 16 nt, Human
agauguuuuuaaaagu

SEQ ID NO: 3679184 - RNA, 21 nt, Human
agauuaaaaauuauaggaaua

SEQ ID NO: 3679185 - RNA, 13 nt, Human
agauuaaauauag

SEQ ID NO: 3679186 - RNA, 18 nt, Human
agauuaauagcauucgaa

SEQ ID NO: 3679187 - RNA, 20 nt, Human
agauuaauauuguucucugu

SEQ ID NO: 3679188 - RNA, 14 nt, Human
agauuaauggcacu

SEQ ID NO: 3679189 - RNA, 21 nt, Human
agauuagaaugaaaauuguau

SEQ ID NO: 3679190 - RNA, 21 nt, Human
agauuagcaaggucauuucuu

SEQ ID NO: 3679191 - RNA, 14 nt, Human
agauuauaacuugu

SEQ ID NO: 3679192 - RNA, 13 nt, Human
agauuauaauugu

SEQ ID NO: 3679193 - RNA, 18 nt, Human
agauuauaauuguugcau

SEQ ID NO: 3679194 - RNA, 14 nt, Human
agauuauacagaau

SEQ ID NO: 3679195 - RNA, 15 nt, Human
agauuauagauucua

SEQ ID NO: 3679196 - RNA, 21 nt, Human
agauuauagauucuaaagauu

SEQ ID NO: 3679197 - RNA, 16 nt, Human
agauuaucguuuucuu

SEQ ID NO: 3679198 - RNA, 17 nt, Human
agauuaucguuuucuua

SEQ ID NO: 3679199 - RNA, 19 nt, Human
agauuaucguuuucuuaaa

SEQ ID NO: 3679200 - RNA, 13 nt, Human
agauuauuuugga

SEQ ID NO: 3679201 - RNA, 14 nt, Human
agauuauuuuggaa

SEQ ID NO: 3679202 - RNA, 17 nt, Human
agauucaaagguucuag

SEQ ID NO: 3679203 - RNA, 18 nt, Human
agauucaaagguucuagg

SEQ ID NO: 3679204 - RNA, 16 nt, Human
agauucaaucccagga

SEQ ID NO: 3679205 - RNA, 11 nt, Human
agauucaauuu

SEQ ID NO: 3679206 - RNA, 17 nt, Human
agauucacacugucugg

SEQ ID NO: 3679207 - RNA, 16 nt, Human
agauucaccuaagaga

SEQ ID NO: 3679208 - RNA, 17 nt, Human
agauucaccuaagagau

SEQ ID NO: 3679209 - RNA, 18 nt, Human
agauucaccuaagagauu

SEQ ID NO: 3679210 - RNA, 14 nt, Human
agauucaccuguaa

SEQ ID NO: 3679211 - RNA, 19 nt, Human
agauucaccuguaaaacuu

SEQ ID NO: 3679212 - RNA, 21 nt, Human
agauucaccuguaaaacuuua

SEQ ID NO: 3679213 - RNA, 23 nt, Human
agauucacuuugacacuuuucau

SEQ ID NO: 3679214 - RNA, 13 nt, Human
agauucagcuagu

SEQ ID NO: 3679215 - RNA, 18 nt, Human
agauucagguaauacaaa

SEQ ID NO: 3679216 - RNA, 18 nt, Human
agauucagguauguugcc

SEQ ID NO: 3679217 - RNA, 13 nt, Human
agauucagucuug

SEQ ID NO: 3679218 - RNA, 17 nt, Human
agauucagucuugccuu

SEQ ID NO: 3679219 - RNA, 13 nt, Human
agauucauauuua

SEQ ID NO: 3679220 - RNA, 16 nt, Human
agauucauauuuacuu

SEQ ID NO: 3679221 - RNA, 19 nt, Human
agauucauauuuacuucuu

SEQ ID NO: 3679222 - RNA, 17 nt, Human
agauucauuuucuagau

SEQ ID NO: 3679223 - RNA, 12 nt, Human
agauucauuuuu

SEQ ID NO: 3679224 - RNA, 17 nt, Human
agauucauuuuuaauca

SEQ ID NO: 3679225 - RNA, 17 nt, Human
agauucauuuuucuuuc

SEQ ID NO: 3679226 - RNA, 19 nt, Human
agauuccagagaguggcuc

SEQ ID NO: 3679227 - RNA, 21 nt, Human
agauuccagagaguggcuccu

SEQ ID NO: 3679228 - RNA, 22 nt, Human
agauuccagagaguggcuccuc

SEQ ID NO: 3679229 - RNA, 16 nt, Human
agauucccaggaguuc

SEQ ID NO: 3679230 - RNA, 16 nt, Human
agauuccccuguguca

SEQ ID NO: 3679231 - RNA, 15 nt, Human
agauucccugagcag

SEQ ID NO: 3679232 - RNA, 23 nt, Human
agauuccggauccuaagcaucua

SEQ ID NO: 3679233 - RNA, 15 nt, Human
agauuccucuguauu

SEQ ID NO: 3679234 - RNA, 13 nt, Human
agauuccuuccca

SEQ ID NO: 3679235 - RNA, 20 nt, Human
agauuccuuucccuuuagca

SEQ ID NO: 3679236 - RNA, 14 nt, Human
agauuccuuuucuu

SEQ ID NO: 3679237 - RNA, 12 nt, Human
agauucuaaaga

SEQ ID NO: 3679238 - RNA, 13 nt, Human
agauucuaaaggu

SEQ ID NO: 3679239 - RNA, 23 nt, Human
agauucuaaagguccacaggucu

SEQ ID NO: 3679240 - RNA, 12 nt, Human
agauucuaacgg

SEQ ID NO: 3679241 - RNA, 13 nt, Human
agauucuaaugau

SEQ ID NO: 3679242 - RNA, 20 nt, Human
agauucuauaguucuagaca

SEQ ID NO: 3679243 - RNA, 17 nt, Human
agauucuauccucaucu

SEQ ID NO: 3679244 - RNA, 14 nt, Human
agauucucuaugua

SEQ ID NO: 3679245 - RNA, 21 nt, Human
agauucucuggcuguaaggcu

SEQ ID NO: 3679246 - RNA, 13 nt, Human
agauucugccuuu

SEQ ID NO: 3679247 - RNA, 22 nt, Human
agauucugugaucuuuuaaagu

SEQ ID NO: 3679248 - RNA, 17 nt, Human
agcaaaggggacagcug

SEQ ID NO: 3679249 - RNA, 22 nt, Human
agcaaaguaguacuucuucugu

SEQ ID NO: 3679250 - RNA, 15 nt, Human
agcaaagucuaaagu

SEQ ID NO: 3679251 - RNA, 23 nt, Human
agcaaagucuaaaguuuacagua

SEQ ID NO: 3679252 - RNA, 22 nt, Human
agcaaagugguagguacuuuuu

SEQ ID NO: 3679253 - RNA, 18 nt, Human
agcaaaucaccacaaacu

SEQ ID NO: 3679254 - RNA, 21 nt, Human
agcaaaucaccacaaacugua

SEQ ID NO: 3679255 - RNA, 22 nt, Human
agcaaaucaccacaaacuguaa

SEQ ID NO: 3679256 - RNA, 20 nt, Human
agcaaaucagaaacuuguga

SEQ ID NO: 3679257 - RNA, 22 nt, Human
agcaaaucauuuguuuaaaaag

SEQ ID NO: 3679258 - RNA, 20 nt, Human
agcaaauccuuugugaaaaa

SEQ ID NO: 3679259 - RNA, 15 nt, Human
agcaaaucgaaugaa

SEQ ID NO: 3679260 - RNA, 22 nt, Human
agcaaaucgaaugaaauuaacu

SEQ ID NO: 3679261 - RNA, 13 nt, Human
agcaaaugcaaaa

SEQ ID NO: 3679262 - RNA, 14 nt, Human
agcaaaugcaaaaa

SEQ ID NO: 3679263 - RNA, 19 nt, Human
agcaaaugucaugcugccu

SEQ ID NO: 3679264 - RNA, 21 nt, Human
agcaaaugucaugcugccuua

SEQ ID NO: 3679265 - RNA, 19 nt, Human
agcauccccaaaacaaagu

SEQ ID NO: 3679266 - RNA, 16 nt, Human
agcaucccccaaaguu

SEQ ID NO: 3679267 - RNA, 18 nt, Human
agcauccccuugaacucu

SEQ ID NO: 3679268 - RNA, 14 nt, Human
agcaucccggagga

SEQ ID NO: 3679269 - RNA, 19 nt, Human
agcaucccggaggaaaucu

SEQ ID NO: 3679270 - RNA, 22 nt, Human
agcaucccuugaccaggccugg

SEQ ID NO: 3679271 - RNA, 16 nt, Human
agcauccgcaggugcu

SEQ ID NO: 3679272 - RNA, 21 nt, Human
agcauccgcaggugcuggucc

SEQ ID NO: 3679273 - RNA, 23 nt, Human
agcauccuaagaaauaugugaga

SEQ ID NO: 3679274 - RNA, 15 nt, Human
agcauccucaguucc

SEQ ID NO: 3679275 - RNA, 13 nt, Human
agcauccugagcc

SEQ ID NO: 3679276 - RNA, 19 nt, Human
agcauccugagccccgccc

SEQ ID NO: 3679277 - RNA, 14 nt, Human
agcaucgcacucug

SEQ ID NO: 3679278 - RNA, 23 nt, Human
agcaucggacaagacccccagca

SEQ ID NO: 3679279 - RNA, 13 nt, Human
agcaucggaggga

SEQ ID NO: 3679280 - RNA, 12 nt, Human
agcaucuaaguu

SEQ ID NO: 3679281 - RNA, 20 nt, Human
agcaucucagccuaccauga

SEQ ID NO: 3679282 - RNA, 16 nt, Human
agcaucuccaagcagc

SEQ ID NO: 3679283 - RNA, 19 nt, Human
agcaucucuaccuucuccc

SEQ ID NO: 3679284 - RNA, 19 nt, Human
agcaucucuugaggccagg

SEQ ID NO: 3679285 - RNA, 22 nt, Human
agcaucucuugaggccaggagu

SEQ ID NO: 3679286 - RNA, 19 nt, Human
agcaucugcauugcccagu

SEQ ID NO: 3679287 - RNA, 24 nt, Human
agcaucugcauugcccagucuuuc

SEQ ID NO: 3679288 - RNA, 23 nt, Human
agcaucuggaagaucauuuugaa

SEQ ID NO: 3679289 - RNA, 13 nt, Human
agcaucugggccu

SEQ ID NO: 3679290 - RNA, 19 nt, Human
agcaucugggccuuggccu

SEQ ID NO: 3679291 - RNA, 13 nt, Human
agcaucuguacaa

SEQ ID NO: 3679292 - RNA, 17 nt, Human
agcaucuguacaaaggg

SEQ ID NO: 3679293 - RNA, 23 nt, Human
agcaucuucacuucuaaaugcau

SEQ ID NO: 3679294 - RNA, 17 nt, Human
agcaucuuccagaagug

SEQ ID NO: 3679295 - RNA, 19 nt, Human
agcaucuucucacucccuu

SEQ ID NO: 3679296 - RNA, 21 nt, Human
agcaucuuggggggguggccg

SEQ ID NO: 3679297 - RNA, 21 nt, Human
agcaucuuugaauacaaagaa

SEQ ID NO: 3679298 - RNA, 19 nt, Human
agcaugaaauaaaauauau

SEQ ID NO: 3679299 - RNA, 14 nt, Human
agcaugaaauguga

SEQ ID NO: 3679300 - RNA, 15 nt, Human
agcaugaagacagag

SEQ ID NO: 3679301 - RNA, 17 nt, Human
agcaugacaagccccag

SEQ ID NO: 3679302 - RNA, 19 nt, Human
agcaugacaagccccaggc

SEQ ID NO: 3679303 - RNA, 21 nt, Human
agcaugacaagccccaggcag

SEQ ID NO: 3679304 - RNA, 14 nt, Human
agcaugacagccug

SEQ ID NO: 3679305 - RNA, 15 nt, Human
agcaugacauuucuu

SEQ ID NO: 3679306 - RNA, 22 nt, Human
agcaugagacuauguaaaaaua

SEQ ID NO: 3679307 - RNA, 19 nt, Human
agcaugagagaauuguauc

SEQ ID NO: 3679308 - RNA, 17 nt, Human
agcaugagaggaggcag

SEQ ID NO: 3679309 - RNA, 17 nt, Human
agcaugccaacaagaau

SEQ ID NO: 3679310 - RNA, 12 nt, Human
agcaugccugga

SEQ ID NO: 3679311 - RNA, 21 nt, Human
agcaugcugugauugugccua

SEQ ID NO: 3679312 - RNA, 13 nt, Human
agcaugcuuucug

SEQ ID NO: 3679313 - RNA, 16 nt, Human
agcauggagaacagug

SEQ ID NO: 3679314 - RNA, 13 nt, Human
agcauggagcugg

SEQ ID NO: 3679315 - RNA, 16 nt, Human
agcauggagcuggccg

SEQ ID NO: 3679316 - RNA, 16 nt, Human
agcauggcacucccuc

SEQ ID NO: 3679317 - RNA, 21 nt, Human
agcauggcacucccuccagca

SEQ ID NO: 3679318 - RNA, 18 nt, Human
agcauggcuauuuuauau

SEQ ID NO: 3679319 - RNA, 18 nt, Human
agcauggcucaaagugca

SEQ ID NO: 3679320 - RNA, 13 nt, Human
agcauggcugcca

SEQ ID NO: 3679321 - RNA, 19 nt, Human
agcauggcugccaauggga

SEQ ID NO: 3679322 - RNA, 14 nt, Human
agcaugggccuggc

SEQ ID NO: 3679323 - RNA, 16 nt, Human
agcauggguucauccu

SEQ ID NO: 3679324 - RNA, 21 nt, Human
agcaugguacuuggccuuugg

SEQ ID NO: 3679325 - RNA, 21 nt, Human
agcauggucccacaucccugg

SEQ ID NO: 3679326 - RNA, 16 nt, Human
agcauggucccugccu

SEQ ID NO: 3679327 - RNA, 19 nt, Human
agcauguaacuuauauuaa

SEQ ID NO: 3679328 - RNA, 16 nt, Human
agcauguacaguguuc

SEQ ID NO: 3679329 - RNA, 19 nt, Human
agcagugccuuccauaauu

SEQ ID NO: 3679330 - RNA, 14 nt, Human
agcagugcuucuca

SEQ ID NO: 3679331 - RNA, 19 nt, Human
agcaguggacaccaggagu

SEQ ID NO: 3679332 - RNA, 16 nt, Human
agcaguggagcccagg

SEQ ID NO: 3679333 - RNA, 18 nt, Human
agcaguggagcccaggag

SEQ ID NO: 3679334 - RNA, 23 nt, Human
agcaguggccuacaaaucaguaa

SEQ ID NO: 3679335 - RNA, 11 nt, Human
agcaguggcug

SEQ ID NO: 3679336 - RNA, 18 nt, Human
agcaguggcugguccagg

SEQ ID NO: 3679337 - RNA, 21 nt, Human
agcaguggcugguccagggcu

SEQ ID NO: 3679338 - RNA, 19 nt, Human
agcagugucaucagaagau

SEQ ID NO: 3679339 - RNA, 20 nt, Human
agcagugucuuccauaaugu

SEQ ID NO: 3679340 - RNA, 21 nt, Human
agcagugugaggccagggcag

SEQ ID NO: 3679341 - RNA, 16 nt, Human
agcagugugucuccug

SEQ ID NO: 3679342 - RNA, 13 nt, Human
agcaguguuagcu

SEQ ID NO: 3679343 - RNA, 22 nt, Human
agcaguucaccuauuucaaaaa

SEQ ID NO: 3679344 - RNA, 20 nt, Human
agcaguucagagcugcccuc

SEQ ID NO: 3679345 - RNA, 14 nt, Human
agcaguuccggauu

SEQ ID NO: 3679346 - RNA, 16 nt, Human
agcaguucugcaaaua

SEQ ID NO: 3679347 - RNA, 21 nt, Human
agcaguucuguuauauccccu

SEQ ID NO: 3679348 - RNA, 21 nt, Human
agcaguucuuaacccaguguc

SEQ ID NO: 3679349 - RNA, 16 nt, Human
agcaguugaaaagacu

SEQ ID NO: 3679350 - RNA, 12 nt, Human
agcaguuucaau

SEQ ID NO: 3679351 - RNA, 13 nt, Human
agcaguuucaaua

SEQ ID NO: 3679352 - RNA, 20 nt, Human
agcaguuucaauaaaguuug

SEQ ID NO: 3679353 - RNA, 18 nt, Human
agcaguuucuguccugcu

SEQ ID NO: 3679354 - RNA, 19 nt, Human
agcaguuucuguccugcug

SEQ ID NO: 3679355 - RNA, 14 nt, Human
agcaguuugcuuug

SEQ ID NO: 3679356 - RNA, 21 nt, Human
agcaguuuucaagucaaauua

SEQ ID NO: 3679357 - RNA, 20 nt, Human
agcaguuuucuuuuaauuuu

SEQ ID NO: 3679358 - RNA, 15 nt, Human
agcauaaaagaugaa

SEQ ID NO: 3679359 - RNA, 18 nt, Human
agcauaaagcucaaauga

SEQ ID NO: 3679360 - RNA, 22 nt, Human
agcauacaugcaaaaagaaaug

SEQ ID NO: 3679361 - RNA, 13 nt, Human
agcauaccaacac

SEQ ID NO: 3679362 - RNA, 16 nt, Human
agcauaccuuuauugu

SEQ ID NO: 3679363 - RNA, 16 nt, Human
agcauacguacacauu

SEQ ID NO: 3679364 - RNA, 21 nt, Human
agcauacguacacauuuuauu

SEQ ID NO: 3679365 - RNA, 17 nt, Human
agcauacuuuguaaaua

SEQ ID NO: 3679366 - RNA, 22 nt, Human
agcauacuuuguaaauaggauu

SEQ ID NO: 3679367 - RNA, 14 nt, Human
agcauagauguuuu

SEQ ID NO: 3679368 - RNA, 16 nt, Human
agcauagcucuguaca

SEQ ID NO: 3679369 - RNA, 19 nt, Human
agcauauaaaauggcaaca

SEQ ID NO: 3679370 - RNA, 14 nt, Human
agcauauagagaug

SEQ ID NO: 3679371 - RNA, 15 nt, Human
agcauauagauuguc

SEQ ID NO: 3679372 - RNA, 16 nt, Human
agcauaucugauuguu

SEQ ID NO: 3679373 - RNA, 23 nt, Human
agcauaucugccuuuauuguguu

SEQ ID NO: 3679374 - RNA, 17 nt, Human
agcauaugacaaauguu

SEQ ID NO: 3679375 - RNA, 18 nt, Human
agcauaugacaaauguuu

SEQ ID NO: 3679376 - RNA, 23 nt, Human
agcauaugaggaugcagagucag

SEQ ID NO: 3679377 - RNA, 16 nt, Human
agcauauguguuggcu

SEQ ID NO: 3679378 - RNA, 22 nt, Human
agcauauuuguauaguugcuug

SEQ ID NO: 3679379 - RNA, 20 nt, Human
agcaucacaugaacuuguaa

SEQ ID NO: 3679380 - RNA, 15 nt, Human
agcaucaccucaggc

SEQ ID NO: 3679381 - RNA, 20 nt, Human
agcaucaccucaggccaggu

SEQ ID NO: 3679382 - RNA, 22 nt, Human
agcaucacuccccaaggaagag

SEQ ID NO: 3679383 - RNA, 17 nt, Human
agcaucacuuaaaacac

SEQ ID NO: 3679384 - RNA, 22 nt, Human
agcaucacuuaaaacacguuuu

SEQ ID NO: 3679385 - RNA, 17 nt, Human
agcaucaggccaggccc

SEQ ID NO: 3679386 - RNA, 20 nt, Human
agcaucaggccaggcccucu

SEQ ID NO: 3679387 - RNA, 23 nt, Human
agcaucaggccaggcccucugcc

SEQ ID NO: 3679388 - RNA, 18 nt, Human
agcaucagggggaagaag

SEQ ID NO: 3679389 - RNA, 20 nt, Human
agcaucagggggaagaagca

SEQ ID NO: 3679390 - RNA, 14 nt, Human
agcaucauccugca

SEQ ID NO: 3679391 - RNA, 18 nt, Human
agcaucaugccucugagg

SEQ ID NO: 3679392 - RNA, 21 nt, Human
agcaucauuauuugcagagac

SEQ ID NO: 3679393 - RNA, 20 nt, Human
agcaucauuuugcauucaaa

SEQ ID NO: 3679394 - RNA, 22 nt, Human
agcaucauuuugcauucaaauu

SEQ ID NO: 3679395 - RNA, 17 nt, Human
agcauccaccuccuucu

SEQ ID NO: 3679396 - RNA, 20 nt, Human
agcauccaccuccuucucug

SEQ ID NO: 3679397 - RNA, 24 nt, Human
agcauccauguguggacucaaguc

SEQ ID NO: 3679398 - RNA, 13 nt, Human
agcucagcugcau

SEQ ID NO: 3679399 - RNA, 22 nt, Human
agcucaggaaccgaggcaggga

SEQ ID NO: 3679400 - RNA, 17 nt, Human
agcucaggacagaugcc

SEQ ID NO: 3679401 - RNA, 18 nt, Human
agcucaggaccaggcaau

SEQ ID NO: 3679402 - RNA, 18 nt, Human
agcucaggaccugggacc

SEQ ID NO: 3679403 - RNA, 15 nt, Human
agcucaggaggcgcc

SEQ ID NO: 3679404 - RNA, 17 nt, Human
agcucaggaggcgcccu

SEQ ID NO: 3679405 - RNA, 18 nt, Human
agcucaggaugagggaaa

SEQ ID NO: 3679406 - RNA, 12 nt, Human
agcucagggccu

SEQ ID NO: 3679407 - RNA, 13 nt, Human
agcucagggccug

SEQ ID NO: 3679408 - RNA, 15 nt, Human
agcucagggccuggc

SEQ ID NO: 3679409 - RNA, 19 nt, Human
agcucagggccuggcucag

SEQ ID NO: 3679410 - RNA, 14 nt, Human
agcucagggcuuca

SEQ ID NO: 3679411 - RNA, 15 nt, Human
agcucagggcuucau

SEQ ID NO: 3679412 - RNA, 14 nt, Human
agcucaggggcagc

SEQ ID NO: 3679413 - RNA, 23 nt, Human
agcucagucuucccuagggcugg

SEQ ID NO: 3679414 - RNA, 18 nt, Human
agcucauaagagccacag

SEQ ID NO: 3679415 - RNA, 20 nt, Human
agcucauagaguccccccuc

SEQ ID NO: 3679416 - RNA, 18 nt, Human
agcucauauuuuguauau

SEQ ID NO: 3679417 - RNA, 21 nt, Human
agcucauccaugccucagaag

SEQ ID NO: 3679418 - RNA, 22 nt, Human
agcucauucauuuuauauugaa

SEQ ID NO: 3679419 - RNA, 15 nt, Human
agcucauuucacuuu

SEQ ID NO: 3679420 - RNA, 15 nt, Human
agcuccaaccugcaa

SEQ ID NO: 3679421 - RNA, 16 nt, Human
agcuccaaccugcaaa

SEQ ID NO: 3679422 - RNA, 18 nt, Human
agcuccaaccugcaaaga

SEQ ID NO: 3679423 - RNA, 15 nt, Human
agcuccaagaauuuc

SEQ ID NO: 3679424 - RNA, 17 nt, Human
agcuccaagcucccagg

SEQ ID NO: 3679425 - RNA, 18 nt, Human
agcuccaagcucccaggc

SEQ ID NO: 3679426 - RNA, 22 nt, Human
agcuccacacccucucccagga

SEQ ID NO: 3679427 - RNA, 15 nt, Human
agcuccacccuggcc

SEQ ID NO: 3679428 - RNA, 17 nt, Human
agcuccacccuggccga

SEQ ID NO: 3679429 - RNA, 21 nt, Human
agcuccacugucacccuccac

SEQ ID NO: 3679430 - RNA, 11 nt, Human
agcuccagccc

SEQ ID NO: 3679431 - RNA, 19 nt, Human
agcuccagccccuuuccaa

SEQ ID NO: 3679432 - RNA, 17 nt, Human
agcuccagcucaccagc

SEQ ID NO: 3679433 - RNA, 19 nt, Human
agcuccagcucaccagccc

SEQ ID NO: 3679434 - RNA, 21 nt, Human
agcuccagcucaccagcccca

SEQ ID NO: 3679435 - RNA, 14 nt, Human
agcuccagcuuucu

SEQ ID NO: 3679436 - RNA, 15 nt, Human
agcuccagggccaga

SEQ ID NO: 3679437 - RNA, 14 nt, Human
agcuccaguccugc

SEQ ID NO: 3679438 - RNA, 20 nt, Human
agcuccaguggaagaagaaa

SEQ ID NO: 3679439 - RNA, 14 nt, Human
agcuccaguguccu

SEQ ID NO: 3679440 - RNA, 18 nt, Human
agcuccauacacacgcug

SEQ ID NO: 3679441 - RNA, 19 nt, Human
agcuccauacacacgcugc

SEQ ID NO: 3679442 - RNA, 22 nt, Human
agcuccaucaaugagguaucuu

SEQ ID NO: 3679443 - RNA, 13 nt, Human
agcuccaucucca

SEQ ID NO: 3679444 - RNA, 15 nt, Human
agcuccaucuccacu

SEQ ID NO: 3679445 - RNA, 14 nt, Human
agcuccauuuaaac

SEQ ID NO: 3679446 - RNA, 15 nt, Human
agcuccauuuaaaca

SEQ ID NO: 3679447 - RNA, 18 nt, Human
agcuccauuuaaacagau

SEQ ID NO: 3679448 - RNA, 22 nt, Human
agcucuuuuuuguuuguuucuu

SEQ ID NO: 3679449 - RNA, 23 nt, Human
agcucuuuuuuguuuguuucuuu

SEQ ID NO: 3679450 - RNA, 21 nt, Human
agcugaaaaaucacauccugg

SEQ ID NO: 3679451 - RNA, 14 nt, Human
agcugaaaguuggg

SEQ ID NO: 3679452 - RNA, 12 nt, Human
agcugaaauuga

SEQ ID NO: 3679453 - RNA, 13 nt, Human
agcugaaauugaa

SEQ ID NO: 3679454 - RNA, 16 nt, Human
agcugaaauugaaaag

SEQ ID NO: 3679455 - RNA, 23 nt, Human
agcugaacaauaggcuguuccca

SEQ ID NO: 3679456 - RNA, 22 nt, Human
agcugaacagccaaaugcaugg

SEQ ID NO: 3679457 - RNA, 24 nt, Human
agcugaacaguguuggcuuucaug

SEQ ID NO: 3679458 - RNA, 20 nt, Human
agcugaagaguugccccguc

SEQ ID NO: 3679459 - RNA, 15 nt, Human
agcugaauguuuuuc

SEQ ID NO: 3679460 - RNA, 20 nt, Human
agcugaauguuuuucuaaag

SEQ ID NO: 3679461 - RNA, 15 nt, Human
agcugaauugagccu

SEQ ID NO: 3679462 - RNA, 21 nt, Human
agcugaauugagccuaaaaau

SEQ ID NO: 3679463 - RNA, 21 nt, Human
agcugacaaaauacuugucug

SEQ ID NO: 3679464 - RNA, 14 nt, Human
agcugacacaaacc

SEQ ID NO: 3679465 - RNA, 21 nt, Human
agcugacacaaaccugccugg

SEQ ID NO: 3679466 - RNA, 18 nt, Human
agcugacauugccaaaaa

SEQ ID NO: 3679467 - RNA, 19 nt, Human
agcugaccagccgugagca

SEQ ID NO: 3679468 - RNA, 23 nt, Human
agcugacccagccccuugagaaa

SEQ ID NO: 3679469 - RNA, 22 nt, Human
agcugaccucuguuguccuccc

SEQ ID NO: 3679470 - RNA, 19 nt, Human
agcugacgaggcugggcca

SEQ ID NO: 3679471 - RNA, 13 nt, Human
agcugacucacac

SEQ ID NO: 3679472 - RNA, 16 nt, Human
agcugacuuggcuggu

SEQ ID NO: 3679473 - RNA, 13 nt, Human
agcugagaagacu

SEQ ID NO: 3679474 - RNA, 15 nt, Human
agcugagagacuuuu

SEQ ID NO: 3679475 - RNA, 20 nt, Human
agcugagaucgugccacugc

SEQ ID NO: 3679476 - RNA, 15 nt, Human
agcugagcaccaggg

SEQ ID NO: 3679477 - RNA, 15 nt, Human
agcugagcagggccg

SEQ ID NO: 3679478 - RNA, 14 nt, Human
agcugagccucuca

SEQ ID NO: 3679479 - RNA, 14 nt, Human
agcugagccugcag

SEQ ID NO: 3679480 - RNA, 16 nt, Human
agcugagccugcaggg

SEQ ID NO: 3679481 - RNA, 17 nt, Human
agcugagccugcaggga

SEQ ID NO: 3679482 - RNA, 12 nt, Human
agcugagcgcca

SEQ ID NO: 3679483 - RNA, 17 nt, Human
agcugagcgccaggaug

SEQ ID NO: 3679484 - RNA, 17 nt, Human
agcugagcucacaaggc

SEQ ID NO: 3679485 - RNA, 18 nt, Human
agcugagcucacaaggca

SEQ ID NO: 3679486 - RNA, 16 nt, Human
agcugaggcagcagug

SEQ ID NO: 3679487 - RNA, 17 nt, Human
agcugaggcagcagugu

SEQ ID NO: 3679488 - RNA, 22 nt, Human
agcugaggccacacucagcaca

SEQ ID NO: 3679489 - RNA, 21 nt, Human
agcugaggucucuugagggag

SEQ ID NO: 3679490 - RNA, 18 nt, Human
agcugaggugcccaggag

SEQ ID NO: 3679491 - RNA, 16 nt, Human
agcugagguuucaccc

SEQ ID NO: 3679492 - RNA, 18 nt, Human
agcugagguuucacccuu

SEQ ID NO: 3679493 - RNA, 21 nt, Human
agcugaguuuccuaugggaac

SEQ ID NO: 3679494 - RNA, 21 nt, Human
agcugauacaaauugcagacu

SEQ ID NO: 3679495 - RNA, 20 nt, Human
agcugauacuuugacagugu

SEQ ID NO: 3679496 - RNA, 17 nt, Human
agcugauauaaauucug

SEQ ID NO: 3679497 - RNA, 22 nt, Human
agcugaucugcggaucucagcu

SEQ ID NO: 3679498 - RNA, 11 nt, Human
agcugaugaaa

SEQ ID NO: 3679499 - RNA, 13 nt, Human
agcugaugaaacu

SEQ ID NO: 3679500 - RNA, 14 nt, Human
agcugauggagaag

SEQ ID NO: 3679501 - RNA, 16 nt, Human
agcugauggagaagga

SEQ ID NO: 3679502 - RNA, 20 nt, Human
agcugauguuggaagagaaa

SEQ ID NO: 3679503 - RNA, 16 nt, Human
agcugauuacugucaa

SEQ ID NO: 3679504 - RNA, 18 nt, Human
agcugauuacugucaaua

SEQ ID NO: 3679505 - RNA, 20 nt, Human
agcugauuuuaacaauaacu

SEQ ID NO: 3679506 - RNA, 13 nt, Human
agcugcaaagugu

SEQ ID NO: 3679507 - RNA, 15 nt, Human
agcugcaaaguguuu

SEQ ID NO: 3679508 - RNA, 15 nt, Human
agcugcaagugacau

SEQ ID NO: 3679509 - RNA, 17 nt, Human
agcugcaauucccugga

SEQ ID NO: 3679510 - RNA, 19 nt, Human
agcugcacagggcagcugg

SEQ ID NO: 3679511 - RNA, 16 nt, Human
agcugcaccagagcaa

SEQ ID NO: 3679512 - RNA, 13 nt, Human
agcugcaccccuu

SEQ ID NO: 3679513 - RNA, 21 nt, Human
agcugcaccccuuccugggca

SEQ ID NO: 3679514 - RNA, 17 nt, Human
agcugcacccucaggca

SEQ ID NO: 3679515 - RNA, 16 nt, Human
agcugcaccugccagc

SEQ ID NO: 3679516 - RNA, 21 nt, Human
agcugcaccugccagccuggc

SEQ ID NO: 3679517 - RNA, 11 nt, Human
agcugcacuga

SEQ ID NO: 3679518 - RNA, 11 nt, Human
agcugcagaac

SEQ ID NO: 3679519 - RNA, 15 nt, Human
agcugcagagacaga

SEQ ID NO: 3679520 - RNA, 13 nt, Human
agcugcagagcca

SEQ ID NO: 3679521 - RNA, 15 nt, Human
agcugcagcuuccug

SEQ ID NO: 3679522 - RNA, 16 nt, Human
agcugcagcuuccugu

SEQ ID NO: 3679523 - RNA, 14 nt, Human
agcugcagcuuggg

SEQ ID NO: 3679524 - RNA, 16 nt, Human
agcugcaggaaucaaa

SEQ ID NO: 3679525 - RNA, 13 nt, Human
agcugcagugagc

SEQ ID NO: 3679526 - RNA, 17 nt, Human
agcugcauaucuucauc

SEQ ID NO: 3679527 - RNA, 18 nt, Human
agcugcauccuccaagaa

SEQ ID NO: 3679528 - RNA, 21 nt, Human
agcugcauccuccaagaaucu

SEQ ID NO: 3679529 - RNA, 15 nt, Human
agcugcauuccgcag

SEQ ID NO: 3679530 - RNA, 18 nt, Human
agcugcauuccgcagccc

SEQ ID NO: 3679531 - RNA, 22 nt, Human
agcugccaaguaaauagcaaca

SEQ ID NO: 3679532 - RNA, 23 nt, Human
agcugccaccucuccauccugcu

SEQ ID NO: 3679533 - RNA, 20 nt, Human
agcugccagccgagauagcc

SEQ ID NO: 3679534 - RNA, 11 nt, Human
agcugccagug

SEQ ID NO: 3679535 - RNA, 24 nt, Human
agcugccaguguccugagccccag

SEQ ID NO: 3679536 - RNA, 19 nt, Human
agcugccaucgcugugaug

SEQ ID NO: 3679537 - RNA, 15 nt, Human
agcugccauggcuag

SEQ ID NO: 3679538 - RNA, 17 nt, Human
agcugcccacagcaggc

SEQ ID NO: 3679539 - RNA, 18 nt, Human
agcugcccagaguugcug

SEQ ID NO: 3679540 - RNA, 16 nt, Human
agcugccccagccaga

SEQ ID NO: 3679541 - RNA, 14 nt, Human
agcugcccccagag

SEQ ID NO: 3679542 - RNA, 16 nt, Human
agcugcccccagagcc

SEQ ID NO: 3679543 - RNA, 19 nt, Human
agcugcccccagagccaca

SEQ ID NO: 3679544 - RNA, 20 nt, Human
agcugccccggggaggggcg

SEQ ID NO: 3679545 - RNA, 17 nt, Human
agcugccccucccugcc

SEQ ID NO: 3679546 - RNA, 16 nt, Human
agcugccccucucugg

SEQ ID NO: 3679547 - RNA, 18 nt, Human
agcugccccucucugggc

SEQ ID NO: 3679548 - RNA, 13 nt, Human
agcugcccucucc

SEQ ID NO: 3679549 - RNA, 15 nt, Human
agcugcccucuccug

SEQ ID NO: 3679550 - RNA, 21 nt, Human
agcugcccucuccugggcagc

SEQ ID NO: 3679551 - RNA, 22 nt, Human
agcugcccucuccugggcagcu

SEQ ID NO: 3679552 - RNA, 13 nt, Human
agcugccgaccag

SEQ ID NO: 3679553 - RNA, 14 nt, Human
agcugccuaagagg

SEQ ID NO: 3679554 - RNA, 19 nt, Human
agcugccuccccuccucug

SEQ ID NO: 3679555 - RNA, 21 nt, Human
agcugccuccccuccucugcu

SEQ ID NO: 3679556 - RNA, 23 nt, Human
agcugccuccccuccucugcuug

SEQ ID NO: 3679557 - RNA, 20 nt, Human
agcugccuccccucuccuuc

SEQ ID NO: 3679558 - RNA, 23 nt, Human
agcugccuccccucuccuuccug

SEQ ID NO: 3679559 - RNA, 15 nt, Human
agcugccucuucccu

SEQ ID NO: 3679560 - RNA, 16 nt, Human
agcugccucuucugug

SEQ ID NO: 3679561 - RNA, 19 nt, Human
agcugccugaaaaucaaga

SEQ ID NO: 3679562 - RNA, 21 nt, Human
agcugccuggaagagcagccc

SEQ ID NO: 3679563 - RNA, 15 nt, Human
agcugguuggagagc

SEQ ID NO: 3679564 - RNA, 15 nt, Human
agcugguuuccucau

SEQ ID NO: 3679565 - RNA, 12 nt, Human
agcuguaaaacg

SEQ ID NO: 3679566 - RNA, 14 nt, Human
agcuguaaaacgcu

SEQ ID NO: 3679567 - RNA, 19 nt, Human
agcuguaaaacgcugucaa

SEQ ID NO: 3679568 - RNA, 15 nt, Human
agcuguaacaguucu

SEQ ID NO: 3679569 - RNA, 18 nt, Human
agcuguaagaagagacug

SEQ ID NO: 3679570 - RNA, 18 nt, Human
agcuguaaggcaugaagg

SEQ ID NO: 3679571 - RNA, 13 nt, Human
agcuguacaaaua

SEQ ID NO: 3679572 - RNA, 21 nt, Human
agcuguauagcugcuuccagu

SEQ ID NO: 3679573 - RNA, 19 nt, Human
agcuguauugaaucaugua

SEQ ID NO: 3679574 - RNA, 17 nt, Human
agcugucaccaaggaaa

SEQ ID NO: 3679575 - RNA, 15 nt, Human
agcugucccugucac

SEQ ID NO: 3679576 - RNA, 22 nt, Human
agcugucccugucaccaagcuc

SEQ ID NO: 3679577 - RNA, 16 nt, Human
agcuguccuuuuuccu

SEQ ID NO: 3679578 - RNA, 17 nt, Human
agcuguccuuuuuccuc

SEQ ID NO: 3679579 - RNA, 17 nt, Human
agcugucugcucagaca

SEQ ID NO: 3679580 - RNA, 20 nt, Human
agcugucuuguccuugcugg

SEQ ID NO: 3679581 - RNA, 17 nt, Human
agcugucuuuuggagga

SEQ ID NO: 3679582 - RNA, 19 nt, Human
agcugucuuuuggaggacg

SEQ ID NO: 3679583 - RNA, 17 nt, Human
agcugugaacauggacu

SEQ ID NO: 3679584 - RNA, 17 nt, Human
agcaauucuccugccuc

SEQ ID NO: 3679585 - RNA, 18 nt, Human
agcaauucuccugccuca

SEQ ID NO: 3679586 - RNA, 16 nt, Human
agcaauucuuucaagu

SEQ ID NO: 3679587 - RNA, 18 nt, Human
agcaauugcugcaucuua

SEQ ID NO: 3679588 - RNA, 23 nt, Human
agcaauuguguggucaguggcuc

SEQ ID NO: 3679589 - RNA, 20 nt, Human
agcaauuuauacaauaucau

SEQ ID NO: 3679590 - RNA, 24 nt, Human
agcaauuucccccuaaaccaacug

SEQ ID NO: 3679591 - RNA, 21 nt, Human
agcaauuucuugcucuaucuc

SEQ ID NO: 3679592 - RNA, 15 nt, Human
agcaauuuuccuuga

SEQ ID NO: 3679593 - RNA, 16 nt, Human
agcaauuuuccuugaa

SEQ ID NO: 3679594 - RNA, 19 nt, Human
agcaauuuuccuugaagcc

SEQ ID NO: 3679595 - RNA, 20 nt, Human
agcaauuuuccuugaagccg

SEQ ID NO: 3679596 - RNA, 14 nt, Human
agcaauuuucgaac

SEQ ID NO: 3679597 - RNA, 16 nt, Human
agcacaaaagccucuc

SEQ ID NO: 3679598 - RNA, 15 nt, Human
agcacaaaauucaaa

SEQ ID NO: 3679599 - RNA, 14 nt, Human
agcacaaacacaag

SEQ ID NO: 3679600 - RNA, 17 nt, Human
agcacaaacacaagguc

SEQ ID NO: 3679601 - RNA, 15 nt, Human
agcacaaacuuuagg

SEQ ID NO: 3679602 - RNA, 18 nt, Human
agcacaaagacccuggcu

SEQ ID NO: 3679603 - RNA, 22 nt, Human
agcacaacccccagcucccgcu

SEQ ID NO: 3679604 - RNA, 20 nt, Human
agcacaaccuucaagcugcu

SEQ ID NO: 3679605 - RNA, 22 nt, Human
agcacaaccuucaagcugcuuu

SEQ ID NO: 3679606 - RNA, 23 nt, Human
agcacaagcagagugcacagcug

SEQ ID NO: 3679607 - RNA, 21 nt, Human
agcacaaguuauuuaaaucug

SEQ ID NO: 3679608 - RNA, 14 nt, Human
agcacacagggcag

SEQ ID NO: 3679609 - RNA, 19 nt, Human
agcacaccaaucuuacuuu

SEQ ID NO: 3679610 - RNA, 14 nt, Human
agcuuccuucagag

SEQ ID NO: 3679611 - RNA, 17 nt, Human
agcuuccuucagagagc

SEQ ID NO: 3679612 - RNA, 20 nt, Human
agcuuccuucagagagcagu

SEQ ID NO: 3679613 - RNA, 21 nt, Human
agcuuccuucagagagcagug

SEQ ID NO: 3679614 - RNA, 14 nt, Human
agcuucgcgugaga

SEQ ID NO: 3679615 - RNA, 20 nt, Human
agcuucguuuauuuucaaga

SEQ ID NO: 3679616 - RNA, 23 nt, Human
agcuucuaauaaauuauacaaau

SEQ ID NO: 3679617 - RNA, 23 nt, Human
agcuucuagugauuucuggggcc

SEQ ID NO: 3679618 - RNA, 12 nt, Human
agcuucuccaac

SEQ ID NO: 3679619 - RNA, 14 nt, Human
agcuucuccaggcu

SEQ ID NO: 3679620 - RNA, 16 nt, Human
agcuucuccuguguga

SEQ ID NO: 3679621 - RNA, 15 nt, Human
agcuucugaccucag

SEQ ID NO: 3679622 - RNA, 13 nt, Human
agcuucugcuggg

SEQ ID NO: 3679623 - RNA, 23 nt, Human
agcuucugcuuuucugcccuggc

SEQ ID NO: 3679624 - RNA, 21 nt, Human
agcuucuggaauuuguucaag

SEQ ID NO: 3679625 - RNA, 19 nt, Human
agcuucugggagauuuuuu

SEQ ID NO: 3679626 - RNA, 19 nt, Human
agcuucugggguccccagg

SEQ ID NO: 3679627 - RNA, 22 nt, Human
agcuucugggguccccagggcu

SEQ ID NO: 3679628 - RNA, 15 nt, Human
agcuucugguacucu

SEQ ID NO: 3679629 - RNA, 21 nt, Human
agcuucuggugaccuuccaag

SEQ ID NO: 3679630 - RNA, 22 nt, Human
agcuucuggugaccuuccaaga

SEQ ID NO: 3679631 - RNA, 17 nt, Human
agcuucugucuccagcu

SEQ ID NO: 3679632 - RNA, 22 nt, Human
agcuucuguugcugccucaugc

SEQ ID NO: 3679633 - RNA, 23 nt, Human
agcuucuguugcugccucaugcu

SEQ ID NO: 3679634 - RNA, 18 nt, Human
agcuucuuaaaugagaag

SEQ ID NO: 3679635 - RNA, 21 nt, Human
agcuucuuaauauaacugccu

SEQ ID NO: 3679636 - RNA, 14 nt, Human
agcuucuuguuucc

SEQ ID NO: 3679637 - RNA, 16 nt, Human
agcuucuuguuuccuu

SEQ ID NO: 3679638 - RNA, 17 nt, Human
agcuugaaaguuuucag

SEQ ID NO: 3679639 - RNA, 15 nt, Human
agcuugagccugaaa

SEQ ID NO: 3679640 - RNA, 18 nt, Human
agcuugaggguugggcug

SEQ ID NO: 3679641 - RNA, 16 nt, Human
agcuugcccuggugcc

SEQ ID NO: 3679642 - RNA, 21 nt, Human
agcuugcgcauucucauggag

SEQ ID NO: 3679643 - RNA, 23 nt, Human
agcuugcgcauucucauggagaa

SEQ ID NO: 3679644 - RNA, 17 nt, Human
agcuugcucacaucuug

SEQ ID NO: 3679645 - RNA, 15 nt, Human
agcuugcucccugug

SEQ ID NO: 3679646 - RNA, 20 nt, Human
agcuugcuucauugggcugu

SEQ ID NO: 3679647 - RNA, 21 nt, Human
agcuugcuugcuuucuuuuuu

SEQ ID NO: 3679648 - RNA, 23 nt, Human
agcuugcuugcuuucuuuuuuaa

SEQ ID NO: 3679649 - RNA, 18 nt, Human
agcuugcuuugauuuaca

SEQ ID NO: 3679650 - RNA, 22 nt, Human
agcuugcuuugauuuacagcaa

SEQ ID NO: 3679651 - RNA, 17 nt, Human
agcuuggaaaggaccag

SEQ ID NO: 3679652 - RNA, 18 nt, Human
agcuuggaagagccugca

SEQ ID NO: 3679653 - RNA, 17 nt, Human
agcuuggauuaaauaca

SEQ ID NO: 3679654 - RNA, 18 nt, Human
agcuuggauuaaauacau

SEQ ID NO: 3679655 - RNA, 21 nt, Human
agcuuggcagccgagcucgug

SEQ ID NO: 3679656 - RNA, 17 nt, Human
agcuuggcccuuuccuu

SEQ ID NO: 3679657 - RNA, 23 nt, Human
agcuuggcuguagaaggagacag

SEQ ID NO: 3679658 - RNA, 20 nt, Human
agcuugggaaaggugguguu

SEQ ID NO: 3679659 - RNA, 23 nt, Human
agcuugggcagaucucccacaug

SEQ ID NO: 3679660 - RNA, 12 nt, Human
agcuugggccca

SEQ ID NO: 3679661 - RNA, 17 nt, Human
agcuugggcccagcugg

SEQ ID NO: 3679662 - RNA, 23 nt, Human
agcuugggcccagcugggcucug

SEQ ID NO: 3679663 - RNA, 21 nt, Human
agcuuggggccaccaaagcug

SEQ ID NO: 3679664 - RNA, 18 nt, Human
agcuuggguuuuuguuac

SEQ ID NO: 3679665 - RNA, 21 nt, Human
agcuuguaaauagcucaggug

SEQ ID NO: 3679666 - RNA, 20 nt, Human
agcuuguauaguguaaaaua

SEQ ID NO: 3679667 - RNA, 17 nt, Human
agcuuguaugcaaugga

SEQ ID NO: 3679668 - RNA, 18 nt, Human
ugcacaagcuccaagcuc

SEQ ID NO: 3679669 - RNA, 20 nt, Human
ugcacaagcuccaagcuccc

SEQ ID NO: 3679670 - RNA, 14 nt, Human
ugcacaagcugcac

SEQ ID NO: 3679671 - RNA, 18 nt, Human
ugcacaagcugcacccuc

SEQ ID NO: 3679672 - RNA, 21 nt, Human
ugcacaagcugcacccucagg

SEQ ID NO: 3679673 - RNA, 17 nt, Human
ugcacaaggauugaaaa

SEQ ID NO: 3679674 - RNA, 15 nt, Human
ugcacaauaaaaaug

SEQ ID NO: 3679675 - RNA, 17 nt, Human
ugcacaauauugaacuu

SEQ ID NO: 3679676 - RNA, 13 nt, Human
ugcacaaugucuu

SEQ ID NO: 3679677 - RNA, 13 nt, Human
ugcacaauuccau

SEQ ID NO: 3679678 - RNA, 17 nt, Human
ugcacaauuuugauaaa

SEQ ID NO: 3679679 - RNA, 18 nt, Human
ugcacacaaauauuauuu

SEQ ID NO: 3679680 - RNA, 17 nt, Human
ugcacacaauuagauuu

SEQ ID NO: 3679681 - RNA, 22 nt, Human
ugcacacaccagagcccaccuu

SEQ ID NO: 3679682 - RNA, 22 nt, Human
ugcacacagaaauauauauaca

SEQ ID NO: 3679683 - RNA, 14 nt, Human
ugcacacagugcuu

SEQ ID NO: 3679684 - RNA, 16 nt, Human
ugcacaccccacuccc

SEQ ID NO: 3679685 - RNA, 20 nt, Human
ugcacacccuccagagacaa

SEQ ID NO: 3679686 - RNA, 21 nt, Human
ugcacacuagccucuccagga

SEQ ID NO: 3679687 - RNA, 21 nt, Human
ugcacacuccccugcacugga

SEQ ID NO: 3679688 - RNA, 21 nt, Human
ugcacacuugugugugggcug

SEQ ID NO: 3679689 - RNA, 22 nt, Human
ugcacacuuugccauauuuuca

SEQ ID NO: 3679690 - RNA, 18 nt, Human
ugcacacuuuggcccagg

SEQ ID NO: 3679691 - RNA, 17 nt, Human
ugcacacuuugguacca

SEQ ID NO: 3679692 - RNA, 14 nt, Human
ugcacagaaguccu

SEQ ID NO: 3679693 - RNA, 15 nt, Human
ugcacagagaagcug

SEQ ID NO: 3679694 - RNA, 19 nt, Human
ugcacagagaagcugggga

SEQ ID NO: 3679695 - RNA, 13 nt, Human
ugcacagagcucu

SEQ ID NO: 3679696 - RNA, 17 nt, Human
ugcacagaguuguuaca

SEQ ID NO: 3679697 - RNA, 19 nt, Human
ugcacagaguuguuacauu

SEQ ID NO: 3679698 - RNA, 20 nt, Human
ugcacagaguuguuacauuu

SEQ ID NO: 3679699 - RNA, 21 nt, Human
ugcacagaguuguuacauuuu

SEQ ID NO: 3679700 - RNA, 16 nt, Human
ugcacagauauacuuu

SEQ ID NO: 3679701 - RNA, 22 nt, Human
ugcacagcacaaauuaguuaua

SEQ ID NO: 3679702 - RNA, 23 nt, Human
ugcacagcacaaauuaguuauau

SEQ ID NO: 3679703 - RNA, 21 nt, Human
ugcacagcaggcugccagugc

SEQ ID NO: 3679704 - RNA, 20 nt, Human
ugcacagccacuccccggca

SEQ ID NO: 3679705 - RNA, 16 nt, Human
ugcacagcggccccug

SEQ ID NO: 3679706 - RNA, 18 nt, Human
ugcacagcggccccugca

SEQ ID NO: 3679707 - RNA, 14 nt, Human
ugcacagcugucca

SEQ ID NO: 3679708 - RNA, 12 nt, Human
ugcacaggaggg

SEQ ID NO: 3679709 - RNA, 17 nt, Human
ugcacagggcagcuggg

SEQ ID NO: 3679710 - RNA, 17 nt, Human
ugcacaguauuuguaau

SEQ ID NO: 3679711 - RNA, 18 nt, Human
ugcacaguauuuguaauu

SEQ ID NO: 3679712 - RNA, 20 nt, Human
ugcacaguauuuguaauuaa

SEQ ID NO: 3679713 - RNA, 20 nt, Human
ugcacagugcaucucagccc

SEQ ID NO: 3679714 - RNA, 22 nt, Human
ugcacaguuagcaaacuuugua

SEQ ID NO: 3679715 - RNA, 18 nt, Human
ugcacauaaacucuuuua

SEQ ID NO: 3679716 - RNA, 14 nt, Human
ugcacauauggacu

SEQ ID NO: 3679717 - RNA, 15 nt, Human
ugcacaucaaaauau

SEQ ID NO: 3679718 - RNA, 16 nt, Human
ugcacauccauuccca

SEQ ID NO: 3679719 - RNA, 12 nt, Human
ugcacaucccug

SEQ ID NO: 3679720 - RNA, 21 nt, Human
ugcacauccgcgugugccugu

SEQ ID NO: 3679721 - RNA, 14 nt, Human
ugcacaucucugcu

SEQ ID NO: 3679722 - RNA, 22 nt, Human
ugcacaucuguaaaucuacaca

SEQ ID NO: 3679723 - RNA, 19 nt, Human
ugcacaucugugucuuguu

SEQ ID NO: 3679724 - RNA, 14 nt, Human
ugcacaugaacugu

SEQ ID NO: 3679725 - RNA, 21 nt, Human
ugcacaugacucggggguggg

SEQ ID NO: 3679726 - RNA, 14 nt, Human
ugcacaugauuuca

SEQ ID NO: 3679727 - RNA, 16 nt, Human
ugcacaugauuucaca

SEQ ID NO: 3679728 - RNA, 17 nt, Human
ugcacaugauuucacaa

SEQ ID NO: 3679729 - RNA, 19 nt, Human
ugcacaugauuucacaaau

SEQ ID NO: 3679730 - RNA, 15 nt, Human
ugcacaugucuuaau

SEQ ID NO: 3679731 - RNA, 15 nt, Human
ugcacaugucuugua

SEQ ID NO: 3679732 - RNA, 19 nt, Human
ugcacaugugugcgugugc

SEQ ID NO: 3679733 - RNA, 14 nt, Human
ugcacauguuuccu

SEQ ID NO: 3679734 - RNA, 18 nt, Human
ugcacauguuuccucuag

SEQ ID NO: 3679735 - RNA, 13 nt, Human
ugcacauuaaaug

SEQ ID NO: 3679736 - RNA, 20 nt, Human
ugcaccaacccagccgcugc

SEQ ID NO: 3679737 - RNA, 14 nt, Human
ugcaccaagcagga

SEQ ID NO: 3679738 - RNA, 16 nt, Human
ugcaccaccaagccaa

SEQ ID NO: 3679739 - RNA, 12 nt, Human
ugcaccagagca

SEQ ID NO: 3679740 - RNA, 13 nt, Human
ugcaccagcccuu

SEQ ID NO: 3679741 - RNA, 14 nt, Human
ugcaccaggagaca

SEQ ID NO: 3679742 - RNA, 23 nt, Human
ugcaccaggguugaccccagagg

SEQ ID NO: 3679743 - RNA, 16 nt, Human
ugcaccaucccuuuuu

SEQ ID NO: 3679744 - RNA, 22 nt, Human
ugcaccaucccuuuuugaagug

SEQ ID NO: 3679745 - RNA, 19 nt, Human
ugcaccaugcugcugggga

SEQ ID NO: 3679746 - RNA, 23 nt, Human
ugcaccaugcugcuggggaagac

SEQ ID NO: 3679747 - RNA, 15 nt, Human
ugcaccauugcugcu

SEQ ID NO: 3679748 - RNA, 15 nt, Human
ugcacccacugaaag

SEQ ID NO: 3679749 - RNA, 13 nt, Human
ugcacccagaaca

SEQ ID NO: 3679750 - RNA, 16 nt, Human
ugcacccagcccagau

SEQ ID NO: 3679751 - RNA, 13 nt, Human
ugcacccagcccu

SEQ ID NO: 3679752 - RNA, 14 nt, Human
ugcacccagcccug

SEQ ID NO: 3679753 - RNA, 15 nt, Human
ugcacccagcccugg

SEQ ID NO: 3679754 - RNA, 17 nt, Human
ugcacccagcccugguc

SEQ ID NO: 3679755 - RNA, 21 nt, Human
ugcacccaugggcucugacag

SEQ ID NO: 3679756 - RNA, 16 nt, Human
ugcacccaugguacca

SEQ ID NO: 3679757 - RNA, 20 nt, Human
ugcaccccaaagcuuuccug

SEQ ID NO: 3679758 - RNA, 23 nt, Human
ugcaccccaaagcuuuccugccc

SEQ ID NO: 3679759 - RNA, 14 nt, Human
ugcaccccaagucc

SEQ ID NO: 3679760 - RNA, 12 nt, Human
ugcacccccucc

SEQ ID NO: 3679761 - RNA, 12 nt, Human
ugcaccccuccc

SEQ ID NO: 3679762 - RNA, 19 nt, Human
ugcaccccuucucuccucc

SEQ ID NO: 3679763 - RNA, 16 nt, Human
ugcacccgccucuccc

SEQ ID NO: 3679764 - RNA, 14 nt, Human
ugcacccuccgccu

SEQ ID NO: 3679765 - RNA, 14 nt, Human
ugcacccucuaucc

SEQ ID NO: 3679766 - RNA, 15 nt, Human
ugcacccuggggccu

SEQ ID NO: 3679767 - RNA, 16 nt, Human
ugcacccuucuuuucu

SEQ ID NO: 3679768 - RNA, 17 nt, Human
ugcacccuucuuuucuc

SEQ ID NO: 3679769 - RNA, 18 nt, Human
ugcacccuucuuuucuca

SEQ ID NO: 3679770 - RNA, 20 nt, Human
ugcaccgccggccagcuggg

SEQ ID NO: 3679771 - RNA, 19 nt, Human
ugcaccggcuggccuggcc

SEQ ID NO: 3679772 - RNA, 20 nt, Human
ugcaccggcuggccuggccc

SEQ ID NO: 3679773 - RNA, 21 nt, Human
ugcaccggcuggccuggcccc

SEQ ID NO: 3679774 - RNA, 23 nt, Human
ugcaccggcuggccuggccccuc

SEQ ID NO: 3679775 - RNA, 12 nt, Human
ugcaccggggcc

SEQ ID NO: 3679776 - RNA, 16 nt, Human
ugcaccggggccuggg

SEQ ID NO: 3679777 - RNA, 22 nt, Human
ugcaccggggccugggcaggag

SEQ ID NO: 3679778 - RNA, 19 nt, Human
ugcaccuaaagaaaaacaa

SEQ ID NO: 3679779 - RNA, 14 nt, Human
ugcaccucccccca

SEQ ID NO: 3679780 - RNA, 18 nt, Human
ugcaccuccccccacugc

SEQ ID NO: 3679781 - RNA, 20 nt, Human
ugcaccuccccccacugcag

SEQ ID NO: 3679782 - RNA, 16 nt, Human
ugcaccugccagccug

SEQ ID NO: 3679783 - RNA, 18 nt, Human
ugcaccugccagccuggc

SEQ ID NO: 3679784 - RNA, 20 nt, Human
ugcaccugccagccuggcuu

SEQ ID NO: 3679785 - RNA, 17 nt, Human
ugcaccuggaauauaua

SEQ ID NO: 3679786 - RNA, 20 nt, Human
ugcaccuggaauauauaacc

SEQ ID NO: 3679787 - RNA, 13 nt, Human
ugcaccugucccc

SEQ ID NO: 3679788 - RNA, 12 nt, Human
ugcaccugugca

SEQ ID NO: 3679789 - RNA, 22 nt, Human
ugcaccuuaucuuaaagcacuu

SEQ ID NO: 3679790 - RNA, 14 nt, Human
ugcaccuuucuagu

SEQ ID NO: 3679791 - RNA, 19 nt, Human
ugcacgcccaugugugagu

SEQ ID NO: 3679792 - RNA, 20 nt, Human
ugcacgcgcccuuucuacca

SEQ ID NO: 3679793 - RNA, 14 nt, Human
ugcacggugaaugg

SEQ ID NO: 3679794 - RNA, 19 nt, Human
ugcacggugaauggcuuug

SEQ ID NO: 3679795 - RNA, 15 nt, Human
ugcacgucaugggag

SEQ ID NO: 3679796 - RNA, 16 nt, Human
ugcacguggcaugugg

SEQ ID NO: 3679797 - RNA, 16 nt, Human
ugcacguggccucuug

SEQ ID NO: 3679798 - RNA, 22 nt, Human
ugcacguggccucuugagcagu

SEQ ID NO: 3679799 - RNA, 11 nt, Human
ugcacgugugu

SEQ ID NO: 3679800 - RNA, 13 nt, Human
ugcacguguguuu

SEQ ID NO: 3679801 - RNA, 15 nt, Human
ugcacguguguuuuu

SEQ ID NO: 3679802 - RNA, 18 nt, Human
ugcacguguguuuuucua

SEQ ID NO: 3679803 - RNA, 20 nt, Human
ugcacguuaugguguuucuc

SEQ ID NO: 3679804 - RNA, 16 nt, Human
ugcacguuuucaucuc

SEQ ID NO: 3679805 - RNA, 17 nt, Human
ugcacuaacagaguggc

SEQ ID NO: 3679806 - RNA, 15 nt, Human
ugcacuaaggggccc

SEQ ID NO: 3679807 - RNA, 17 nt, Human
ugcacuaaggggcccgg

SEQ ID NO: 3679808 - RNA, 22 nt, Human
ugcacuaaggggcccggccagc

SEQ ID NO: 3679809 - RNA, 16 nt, Human
ugcacuaagucucuuu

SEQ ID NO: 3679810 - RNA, 16 nt, Human
ugcacuacuccucugc

SEQ ID NO: 3679811 - RNA, 19 nt, Human
ugcacuacuccucugcagu

SEQ ID NO: 3679812 - RNA, 16 nt, Human
ugcacuauaugcaaac

SEQ ID NO: 3679813 - RNA, 18 nt, Human
ugcacuauaugcaaacag

SEQ ID NO: 3679814 - RNA, 15 nt, Human
ugcacuaugaggaau

SEQ ID NO: 3679815 - RNA, 14 nt, Human
ugcacucaaaucuu

SEQ ID NO: 3679816 - RNA, 16 nt, Human
ugcacucaaaucuuaa

SEQ ID NO: 3679817 - RNA, 20 nt, Human
ugcacucaaaucuuaagaaa

SEQ ID NO: 3679818 - RNA, 17 nt, Human
ugcagcccccacugccu

SEQ ID NO: 3679819 - RNA, 21 nt, Human
ugcagccccgccuccaggcca

SEQ ID NO: 3679820 - RNA, 23 nt, Human
ugcagccccgccuccaggccaca

SEQ ID NO: 3679821 - RNA, 21 nt, Human
ugcagccccgcgccuccuucc

SEQ ID NO: 3679822 - RNA, 23 nt, Human
ugcagcccguguggccccuucac

SEQ ID NO: 3679823 - RNA, 19 nt, Human
ugcagcccugagaaagccc

SEQ ID NO: 3679824 - RNA, 14 nt, Human
ugcagcccugcugc

SEQ ID NO: 3679825 - RNA, 15 nt, Human
ugcagccgccuuccu

SEQ ID NO: 3679826 - RNA, 17 nt, Human
ugcagccgccuuccuug

SEQ ID NO: 3679827 - RNA, 17 nt, Human
ugcagccggcacagggu

SEQ ID NO: 3679828 - RNA, 19 nt, Human
ugcagccggcacagggucu

SEQ ID NO: 3679829 - RNA, 15 nt, Human
ugcagccucacaguc

SEQ ID NO: 3679830 - RNA, 12 nt, Human
ugcagccucaga

SEQ ID NO: 3679831 - RNA, 13 nt, Human
ugcagccucagga

SEQ ID NO: 3679832 - RNA, 17 nt, Human
ugcagccucaggacugg

SEQ ID NO: 3679833 - RNA, 21 nt, Human
ugcagccucaggacugggagc

SEQ ID NO: 3679834 - RNA, 19 nt, Human
ugcagccuccgcuucccug

SEQ ID NO: 3679835 - RNA, 20 nt, Human
ugcagccuccgcuucccugg

SEQ ID NO: 3679836 - RNA, 23 nt, Human
ugcagccuccgcuucccugguuc

SEQ ID NO: 3679837 - RNA, 16 nt, Human
ugcagccuccuccuga

SEQ ID NO: 3679838 - RNA, 18 nt, Human
ugcagccugcaggaccuc

SEQ ID NO: 3679839 - RNA, 19 nt, Human
ugcagcgaaccaauauuug

SEQ ID NO: 3679840 - RNA, 21 nt, Human
ugcagcuaguccuagugaacc

SEQ ID NO: 3679841 - RNA, 20 nt, Human
ugcagcucaagagaucccaa

SEQ ID NO: 3679842 - RNA, 16 nt, Human
ugcagcucacuacccu

SEQ ID NO: 3679843 - RNA, 19 nt, Human
ugcagcucagaaccacagc

SEQ ID NO: 3679844 - RNA, 14 nt, Human
ugcagcucccuggc

SEQ ID NO: 3679845 - RNA, 18 nt, Human
ugcagcucccuggcuucu

SEQ ID NO: 3679846 - RNA, 16 nt, Human
ugcagcucuuccugga

SEQ ID NO: 3679847 - RNA, 18 nt, Human
ugcagcucuuccuggaca

SEQ ID NO: 3679848 - RNA, 15 nt, Human
ugcagcugaaauuga

SEQ ID NO: 3679849 - RNA, 19 nt, Human
ugcagcugagagaaaauaa

SEQ ID NO: 3679850 - RNA, 15 nt, Human
ugcagcugauuuuaa

SEQ ID NO: 3679851 - RNA, 18 nt, Human
ugcagcugauuuuaacaa

SEQ ID NO: 3679852 - RNA, 19 nt, Human
ugcagcugauuuuaacaau

SEQ ID NO: 3679853 - RNA, 15 nt, Human
ugcagcuggacagag

SEQ ID NO: 3679854 - RNA, 23 nt, Human
ugcagcuguuuuguugacauucu

SEQ ID NO: 3679855 - RNA, 22 nt, Human
ugcagcuuccuuuugagggaca

SEQ ID NO: 3679856 - RNA, 16 nt, Human
ugcagcuucuguccug

SEQ ID NO: 3679857 - RNA, 19 nt, Human
ugcagcuuguagccagccg

SEQ ID NO: 3679858 - RNA, 23 nt, Human
ugcagcuugugugcaaaagcagu

SEQ ID NO: 3679859 - RNA, 13 nt, Human
ugcagcuuuaaaa

SEQ ID NO: 3679860 - RNA, 16 nt, Human
ugcaggaaggagcugc

SEQ ID NO: 3679861 - RNA, 22 nt, Human
ugcaggaaggagcugccuggac

SEQ ID NO: 3679862 - RNA, 16 nt, Human
ugcaggaauaaggccu

SEQ ID NO: 3679863 - RNA, 19 nt, Human
ugcaggaaucaaaaauuga

SEQ ID NO: 3679864 - RNA, 15 nt, Human
ugcaggaccugccug

SEQ ID NO: 3679865 - RNA, 19 nt, Human
ugcaggaccugccuguagc

SEQ ID NO: 3679866 - RNA, 20 nt, Human
ugcaggaucucaccaggcag

SEQ ID NO: 3679867 - RNA, 22 nt, Human
ugcaggaucucaccaggcagcc

SEQ ID NO: 3679868 - RNA, 19 nt, Human
ugcaggaugauuguacaga

SEQ ID NO: 3679869 - RNA, 14 nt, Human
ugcaggaugguguc

SEQ ID NO: 3679870 - RNA, 18 nt, Human
ugcaggauggugucucuu

SEQ ID NO: 3679871 - RNA, 17 nt, Human
ugcaggauucucaccag

SEQ ID NO: 3679872 - RNA, 21 nt, Human
ugcaggauucucaccagcugu

SEQ ID NO: 3679873 - RNA, 16 nt, Human
ugcaggcaccuuagug

SEQ ID NO: 3679874 - RNA, 19 nt, Human
ugcaggcaccuuaguggcu

SEQ ID NO: 3679875 - RNA, 12 nt, Human
ugcaggcagaca

SEQ ID NO: 3679876 - RNA, 13 nt, Human
ugcaggcagccag

SEQ ID NO: 3679877 - RNA, 15 nt, Human
ugcaggcagccaggc

SEQ ID NO: 3679878 - RNA, 16 nt, Human
ugcaggcagccaggcc

SEQ ID NO: 3679879 - RNA, 18 nt, Human
ugcaggcagccaggccac

SEQ ID NO: 3679880 - RNA, 10 nt, Human
ugcaggcagg

SEQ ID NO: 3679881 - RNA, 14 nt, Human
ugcaggcaggaaca

SEQ ID NO: 3679882 - RNA, 13 nt, Human
ugcaggcaggcug

SEQ ID NO: 3679883 - RNA, 12 nt, Human
ugcaggcccacc

SEQ ID NO: 3679884 - RNA, 16 nt, Human
ugcaggcccuggccuc

SEQ ID NO: 3679885 - RNA, 19 nt, Human
ugcaggcccuggccucccc

SEQ ID NO: 3679886 - RNA, 13 nt, Human
ugcaggcuggcca

SEQ ID NO: 3679887 - RNA, 16 nt, Human
ugcaggcuuaauaaaa

SEQ ID NO: 3679888 - RNA, 20 nt, Human
ugcagggaaaauuauuugca

SEQ ID NO: 3679889 - RNA, 21 nt, Human
ugcagggaaaauuauuugcau

SEQ ID NO: 3679890 - RNA, 24 nt, Human
ugcagggaggagguggcagcccug

SEQ ID NO: 3679891 - RNA, 20 nt, Human
ugcagggagggcaguuuucu

SEQ ID NO: 3679892 - RNA, 13 nt, Human
ugcagggaguccg

SEQ ID NO: 3679893 - RNA, 14 nt, Human
ugcagggauguggg

SEQ ID NO: 3679894 - RNA, 23 nt, Human
ugcagggauguggguuccacaga

SEQ ID NO: 3679895 - RNA, 10 nt, Human
ugcagggcca

SEQ ID NO: 3679896 - RNA, 13 nt, Human
ugcagggccucca

SEQ ID NO: 3679897 - RNA, 22 nt, Human
ugcagggggugugucugcucag

SEQ ID NO: 3679898 - RNA, 19 nt, Human
ugcaggguccucuucuggg

SEQ ID NO: 3679899 - RNA, 19 nt, Human
ugcaggguggugcugggac

SEQ ID NO: 3679900 - RNA, 15 nt, Human
ugcagguagaccugu

SEQ ID NO: 3679901 - RNA, 21 nt, Human
ugcaggucaaguugucagguu

SEQ ID NO: 3679902 - RNA, 11 nt, Human
ugcaggucccu

SEQ ID NO: 3679903 - RNA, 14 nt, Human
ugcaggucccuaau

SEQ ID NO: 3679904 - RNA, 20 nt, Human
ugcaggucccuaauaaagcu

SEQ ID NO: 3679905 - RNA, 21 nt, Human
ugcaggucuuuaaaucauuuu

SEQ ID NO: 3679906 - RNA, 19 nt, Human
ugcaggugagcccauggcc

SEQ ID NO: 3679907 - RNA, 21 nt, Human
ugcaggugcuauuguuacucu

SEQ ID NO: 3679908 - RNA, 14 nt, Human
ugcaggugcugcug

SEQ ID NO: 3679909 - RNA, 20 nt, Human
ugcagguggccaaguuccuc

SEQ ID NO: 3679910 - RNA, 23 nt, Human
ugcagguggggguugcuguauaa

SEQ ID NO: 3679911 - RNA, 19 nt, Human
ugcagguggugucgggccc

SEQ ID NO: 3679912 - RNA, 15 nt, Human
ugcagguucauggau

SEQ ID NO: 3679913 - RNA, 20 nt, Human
ugcagguucuucuuccugaa

SEQ ID NO: 3679914 - RNA, 13 nt, Human
ugcaguaaaucuu

SEQ ID NO: 3679915 - RNA, 18 nt, Human
ugcaguaaaucuuuuaca

SEQ ID NO: 3679916 - RNA, 14 nt, Human
ugcaguagauuuuc

SEQ ID NO: 3679917 - RNA, 19 nt, Human
ugcaguagauuuucuuuaa

SEQ ID NO: 3679918 - RNA, 18 nt, Human
ugcaguaggggaggagca

SEQ ID NO: 3679919 - RNA, 21 nt, Human
ugcaguagucucugugcuuug

SEQ ID NO: 3679920 - RNA, 14 nt, Human
ugcaguauagaaua

SEQ ID NO: 3679921 - RNA, 20 nt, Human
ugcaguaucggcacuguaca

SEQ ID NO: 3679922 - RNA, 16 nt, Human
ugcaguaugaaaauaa

SEQ ID NO: 3679923 - RNA, 16 nt, Human
ugcaguaugguacauu

SEQ ID NO: 3679924 - RNA, 22 nt, Human
ugcaguaugguacauuuuucaa

SEQ ID NO: 3679925 - RNA, 17 nt, Human
ugcagucacuggagguu

SEQ ID NO: 3679926 - RNA, 11 nt, Human
ugcagucccaa

SEQ ID NO: 3679927 - RNA, 14 nt, Human
ugcaguccugggau

SEQ ID NO: 3679928 - RNA, 13 nt, Human
ugcagucuccucu

SEQ ID NO: 3679929 - RNA, 21 nt, Human
ugcagucucuauaccaauaaa

SEQ ID NO: 3679930 - RNA, 15 nt, Human
ugcagucugcuucug

SEQ ID NO: 3679931 - RNA, 19 nt, Human
ugcagucuggcugagcccu

SEQ ID NO: 3679932 - RNA, 19 nt, Human
ugcagucuguccaggcucg

SEQ ID NO: 3679933 - RNA, 14 nt, Human
ugcagugagccgag

SEQ ID NO: 3679934 - RNA, 20 nt, Human
ugcagugauauggcagaaga

SEQ ID NO: 3679935 - RNA, 21 nt, Human
ugcagugauauggcagaagac

SEQ ID NO: 3679936 - RNA, 22 nt, Human
ugcagugauauggcagaagaca

SEQ ID NO: 3679937 - RNA, 22 nt, Human
ugcagugauuaaggucucucuu

SEQ ID NO: 3679938 - RNA, 16 nt, Human
ugcagugcaguauaga

SEQ ID NO: 3679939 - RNA, 17 nt, Human
ugcagugcaguauagaa

SEQ ID NO: 3679940 - RNA, 16 nt, Human
ugcagugccccuagcu

SEQ ID NO: 3679941 - RNA, 17 nt, Human
ugcagugccccuagcuu

SEQ ID NO: 3679942 - RNA, 12 nt, Human
ugcagugccuug

SEQ ID NO: 3679943 - RNA, 16 nt, Human
ugcagugcugcuuugc

SEQ ID NO: 3679944 - RNA, 22 nt, Human
ugcaguggcaucaucucagcuc

SEQ ID NO: 3679945 - RNA, 22 nt, Human
ugcaguggcgaaaucccugcuc

SEQ ID NO: 3679946 - RNA, 13 nt, Human
ugcagugggguuu

SEQ ID NO: 3679947 - RNA, 21 nt, Human
ugcaguggugcgaucuggguu

SEQ ID NO: 3679948 - RNA, 18 nt, Human
ugcaguguucgcuuggcu

SEQ ID NO: 3679949 - RNA, 18 nt, Human
ugcaguuacaaauuauaa

SEQ ID NO: 3679950 - RNA, 21 nt, Human
ugcaguuacaaauuauaaugu

SEQ ID NO: 3679951 - RNA, 19 nt, Human
ugcaguucagcaccacccu

SEQ ID NO: 3679952 - RNA, 23 nt, Human
ugcaguuccccuggaagcagugc

SEQ ID NO: 3679953 - RNA, 17 nt, Human
ugcaguucuacucaggc

SEQ ID NO: 3679954 - RNA, 17 nt, Human
ugcaguucuaguuugca

SEQ ID NO: 3679955 - RNA, 12 nt, Human
ugcaguucugaa

SEQ ID NO: 3679956 - RNA, 15 nt, Human
ugcaguucugaagaa

SEQ ID NO: 3679957 - RNA, 17 nt, Human
ugcaguucugaagaaga

SEQ ID NO: 3679958 - RNA, 18 nt, Human
ugcaguucugaagaagau

SEQ ID NO: 3679959 - RNA, 14 nt, Human
ugcaguucugcagc

SEQ ID NO: 3679960 - RNA, 13 nt, Human
ugcaguucuugag

SEQ ID NO: 3679961 - RNA, 17 nt, Human
ugcaguucuugaguugc

SEQ ID NO: 3679962 - RNA, 17 nt, Human
ugcaguugacagcaggu

SEQ ID NO: 3679963 - RNA, 14 nt, Human
ugcaguugucucug

SEQ ID NO: 3679964 - RNA, 15 nt, Human
ugcaguugucucugu

SEQ ID NO: 3679965 - RNA, 13 nt, Human
ugcaguuugaaau

SEQ ID NO: 3679966 - RNA, 16 nt, Human
ugcaguuugaaauucu

SEQ ID NO: 3679967 - RNA, 17 nt, Human
ugcaguuugaaauucug

SEQ ID NO: 3679968 - RNA, 18 nt, Human
ugcaguuugaaauucuga

SEQ ID NO: 3679969 - RNA, 20 nt, Human
ugcaguuugaaauucugaau

SEQ ID NO: 3679970 - RNA, 23 nt, Human
ugcaguuugagacaggagaccug

SEQ ID NO: 3679971 - RNA, 21 nt, Human
ugcaguuugguguguccuccg

SEQ ID NO: 3679972 - RNA, 18 nt, Human
ugcaguuuugguguguaa

SEQ ID NO: 3679973 - RNA, 15 nt, Human
ugcaguuuuucagag

SEQ ID NO: 3679974 - RNA, 14 nt, Human
ugcaguuuuucagg

SEQ ID NO: 3679975 - RNA, 15 nt, Human
ugcaguuuuucauuu

SEQ ID NO: 3679976 - RNA, 11 nt, Human
ugcauaaaaug

SEQ ID NO: 3679977 - RNA, 13 nt, Human
ugcauaaaauguu

SEQ ID NO: 3679978 - RNA, 14 nt, Human
ugcauaaauaugca

SEQ ID NO: 3679979 - RNA, 17 nt, Human
ugcauaacaauuccucu

SEQ ID NO: 3679980 - RNA, 23 nt, Human
ugcauaacguauaaaagccuguu

SEQ ID NO: 3679981 - RNA, 18 nt, Human
ugcauaagugaaaaucuu

SEQ ID NO: 3679982 - RNA, 19 nt, Human
ugcauaauaagcuaaagag

SEQ ID NO: 3679983 - RNA, 22 nt, Human
ugcauaauaagcuaaagaggcu

SEQ ID NO: 3679984 - RNA, 23 nt, Human
ugcauaauaauccugcaaaguac

SEQ ID NO: 3679985 - RNA, 19 nt, Human
ugcauaauucugaaguuau

SEQ ID NO: 3679986 - RNA, 13 nt, Human
ugcauaauuucag

SEQ ID NO: 3679987 - RNA, 20 nt, Human
ugcauacaaacaagcauaua

SEQ ID NO: 3679988 - RNA, 9 nt, Human
ugcauacac

SEQ ID NO: 3679989 - RNA, 10 nt, Human
ugcauacaca

SEQ ID NO: 3679990 - RNA, 13 nt, Human
ugcauacacacac

SEQ ID NO: 3679991 - RNA, 15 nt, Human
ugcauacagaaauau

SEQ ID NO: 3679992 - RNA, 12 nt, Human
ugcauaccaacc

SEQ ID NO: 3679993 - RNA, 12 nt, Human
ugcauaccacuu

SEQ ID NO: 3679994 - RNA, 16 nt, Human
ugcauaccacuuuugu

SEQ ID NO: 3679995 - RNA, 20 nt, Human
ugcauaccacuuuuguucuu

SEQ ID NO: 3679996 - RNA, 12 nt, Human
ugcauacuauua

SEQ ID NO: 3679997 - RNA, 17 nt, Human
ugcauacuauuaaacau

SEQ ID NO: 3679998 - RNA, 18 nt, Human
ugcauacuauuaaacaug

SEQ ID NO: 3679999 - RNA, 19 nt, Human
ugcauacuggacucuucaa

SEQ ID NO: 3680000 - RNA, 20 nt, Human
ugcauacuggacucuucaaa

SEQ ID NO: 3680001 - RNA, 20 nt, Human
ugcauacuuaccuagugaaa

SEQ ID NO: 3680002 - RNA, 15 nt, Human
ugcauacuucaaaag

SEQ ID NO: 3680003 - RNA, 21 nt, Human
ugcauacuucaaaaguauuuu

SEQ ID NO: 3680004 - RNA, 22 nt, Human
ugcauacuuuguauuuugauua

SEQ ID NO: 3680005 - RNA, 16 nt, Human
ugcauagaacugggua

SEQ ID NO: 3680006 - RNA, 13 nt, Human
ugcauagaaggag

SEQ ID NO: 3680007 - RNA, 20 nt, Human
ugcauagauucccugagcag

SEQ ID NO: 3680008 - RNA, 14 nt, Human
ugcauaguauucca

SEQ ID NO: 3680009 - RNA, 15 nt, Human
ugcauagucccagcu

SEQ ID NO: 3680010 - RNA, 16 nt, Human
ugcauagugcugggau

SEQ ID NO: 3680011 - RNA, 18 nt, Human
ugcauaguuucuuuauuu

SEQ ID NO: 3680012 - RNA, 14 nt, Human
ugcauaucuucauc

SEQ ID NO: 3680013 - RNA, 21 nt, Human
ugcauaugucacuagaaugga

SEQ ID NO: 3680014 - RNA, 15 nt, Human
ugcauauguugaaua

SEQ ID NO: 3680015 - RNA, 13 nt, Human
ugcauauguuucg

SEQ ID NO: 3680016 - RNA, 20 nt, Human
ugcauauuauaaaggauaaa

SEQ ID NO: 3680017 - RNA, 15 nt, Human
ugcauauugcauacu

SEQ ID NO: 3680018 - RNA, 17 nt, Human
ugcauauuguacacuuu

SEQ ID NO: 3680019 - RNA, 20 nt, Human
ugcauauuuauaaaaauaaa

SEQ ID NO: 3680020 - RNA, 15 nt, Human
ugcauauuuauccaa

SEQ ID NO: 3680021 - RNA, 14 nt, Human
ugcaucaauccugu

SEQ ID NO: 3680022 - RNA, 22 nt, Human
ugcaucaauuuuucuuauuuca

SEQ ID NO: 3680023 - RNA, 22 nt, Human
ugcaucagaaagggagggcucu

SEQ ID NO: 3680024 - RNA, 13 nt, Human
ugcaucagguccu

SEQ ID NO: 3680025 - RNA, 16 nt, Human
ugcaucauccuugcag

SEQ ID NO: 3680026 - RNA, 16 nt, Human
ugcauccaaaggugcu

SEQ ID NO: 3680027 - RNA, 16 nt, Human
ugcauccaacuccagg

SEQ ID NO: 3680028 - RNA, 17 nt, Human
ugcauccaacuccagga

SEQ ID NO: 3680029 - RNA, 20 nt, Human
ugcauccagagauucauuuu

SEQ ID NO: 3680030 - RNA, 20 nt, Human
ugcauccauuccucagggac

SEQ ID NO: 3680031 - RNA, 21 nt, Human
ugcauccauuccucagggaca

SEQ ID NO: 3680032 - RNA, 19 nt, Human
ugcauccauucuccugagg

SEQ ID NO: 3680033 - RNA, 12 nt, Human
ugcaucccagca

SEQ ID NO: 3680034 - RNA, 16 nt, Human
ugcauccccuuggcug

SEQ ID NO: 3680035 - RNA, 14 nt, Human
ugcauccuccaaga

SEQ ID NO: 3680036 - RNA, 14 nt, Human
ugcauccuccgccu

SEQ ID NO: 3680037 - RNA, 15 nt, Human
ugcauccuccgccuc

SEQ ID NO: 3680038 - RNA, 19 nt, Human
ugcauccucuggagccagc

SEQ ID NO: 3680039 - RNA, 15 nt, Human
ugcaucguuucaucu

SEQ ID NO: 3680040 - RNA, 17 nt, Human
ugcaucguuucaucuuc

SEQ ID NO: 3680041 - RNA, 17 nt, Human
ugcaucuaagcccaugg

SEQ ID NO: 3680042 - RNA, 16 nt, Human
ugcaucuacucaggcc

SEQ ID NO: 3680043 - RNA, 19 nt, Human
ugcaucucaaaauuauucu

SEQ ID NO: 3680044 - RNA, 14 nt, Human
ugcaucucagccca

SEQ ID NO: 3680045 - RNA, 21 nt, Human
ugcaucugaccagcagcgccu

SEQ ID NO: 3680046 - RNA, 19 nt, Human
ugcaucugggauucccacc

SEQ ID NO: 3680047 - RNA, 21 nt, Human
ugcaucuggguagcuguaagg

SEQ ID NO: 3680048 - RNA, 21 nt, Human
ugcaucuguauaaguaagaaa

SEQ ID NO: 3680049 - RNA, 22 nt, Human
ugcaucuguauaaguaagaaaa

SEQ ID NO: 3680050 - RNA, 14 nt, Human
ugcaucuguccuca

SEQ ID NO: 3680051 - RNA, 17 nt, Human
ugcaucuuacugaaggu

SEQ ID NO: 3680052 - RNA, 21 nt, Human
ugcaucuuauagcacuuugaa

SEQ ID NO: 3680053 - RNA, 16 nt, Human
ugcaucuuugaugugu

SEQ ID NO: 3680054 - RNA, 20 nt, Human
ugcaugaagagaagcaauuu

SEQ ID NO: 3680055 - RNA, 22 nt, Human
ugcaugaagagaagcaauuuug

SEQ ID NO: 3680056 - RNA, 19 nt, Human
ugcaugaagguuucugaaa

SEQ ID NO: 3680057 - RNA, 20 nt, Human
ugcaugaaguaauaugcaca

SEQ ID NO: 3680058 - RNA, 19 nt, Human
ugcaugaauaaaauuauuc

SEQ ID NO: 3680059 - RNA, 19 nt, Human
ugcaugaauaucauacaaa

SEQ ID NO: 3680060 - RNA, 14 nt, Human
ugcaugauguuugc

SEQ ID NO: 3680061 - RNA, 15 nt, Human
ugcaugauguuugcc

SEQ ID NO: 3680062 - RNA, 17 nt, Human
ugcaugauguuugccca

SEQ ID NO: 3680063 - RNA, 15 nt, Human
ugcaugauugcagaa

SEQ ID NO: 3680064 - RNA, 15 nt, Human
ugcaugcaaaugagc

SEQ ID NO: 3680065 - RNA, 18 nt, Human
ugcaugcagccacugugc

SEQ ID NO: 3680066 - RNA, 18 nt, Human
ugcaugcaugcaaaugag

SEQ ID NO: 3680067 - RNA, 14 nt, Human
ugcaugcccucuca

SEQ ID NO: 3680068 - RNA, 15 nt, Human
ugcaugcccucucag

SEQ ID NO: 3680069 - RNA, 16 nt, Human
ugcaugcccucucagg

SEQ ID NO: 3680070 - RNA, 15 nt, Human
ugcaugcggcccagc

SEQ ID NO: 3680071 - RNA, 16 nt, Human
ugcaugcggcccagcc

SEQ ID NO: 3680072 - RNA, 18 nt, Human
ugcaugcggcccagcccg

SEQ ID NO: 3680073 - RNA, 19 nt, Human
ugcaugcucucugcagcca

SEQ ID NO: 3680074 - RNA, 13 nt, Human
ugcaugcugcuuu

SEQ ID NO: 3680075 - RNA, 17 nt, Human
ugcaugcugcuuuaauu

SEQ ID NO: 3680076 - RNA, 20 nt, Human
ugcaugcugcuuuaauugug

SEQ ID NO: 3680077 - RNA, 23 nt, Human
ugcaugcugcuuuaauugugaau

SEQ ID NO: 3680078 - RNA, 15 nt, Human
ugcaugcugucccuu

SEQ ID NO: 3680079 - RNA, 18 nt, Human
ugcaugcugucccuuacg

SEQ ID NO: 3680080 - RNA, 14 nt, Human
ugcaugcuuuccau

SEQ ID NO: 3680081 - RNA, 15 nt, Human
ugcauggaaaccuga

SEQ ID NO: 3680082 - RNA, 23 nt, Human
ugcauggaaauucccuucaucug

SEQ ID NO: 3680083 - RNA, 18 nt, Human
ugcauggaccuaacauuc

SEQ ID NO: 3680084 - RNA, 13 nt, Human
ugcauggacugug

SEQ ID NO: 3680085 - RNA, 16 nt, Human
ugcauggauuucuuug

SEQ ID NO: 3680086 - RNA, 19 nt, Human
ugcauggcacuugcaucug

SEQ ID NO: 3680087 - RNA, 22 nt, Human
ugcauggcagcaggccuguugc

SEQ ID NO: 3680088 - RNA, 22 nt, Human
ugcauggcagggggcugcugcu

SEQ ID NO: 3680089 - RNA, 19 nt, Human
ugcauggcuccagaaaugu

SEQ ID NO: 3680090 - RNA, 16 nt, Human
ugcaugggccagcccc

SEQ ID NO: 3680091 - RNA, 17 nt, Human
ugcaugggugaagggag

SEQ ID NO: 3680092 - RNA, 17 nt, Human
ugcauggguuuuguagg

SEQ ID NO: 3680093 - RNA, 17 nt, Human
ugcauggugccccagga

SEQ ID NO: 3680094 - RNA, 15 nt, Human
ugcaugguggccaga

SEQ ID NO: 3680095 - RNA, 17 nt, Human
ugcaugguuucagcacu

SEQ ID NO: 3680096 - RNA, 18 nt, Human
ugcaugguuucagcacua

SEQ ID NO: 3680097 - RNA, 20 nt, Human
ugcauguaaacacgccugca

SEQ ID NO: 3680098 - RNA, 23 nt, Human
ugcauguaacgcaaguucccagu

SEQ ID NO: 3680099 - RNA, 21 nt, Human
ugcauguaaucaacauggcua

SEQ ID NO: 3680100 - RNA, 16 nt, Human
ugcauguacuaucuua

SEQ ID NO: 3680101 - RNA, 17 nt, Human
ugcauguacuguauauu

SEQ ID NO: 3680102 - RNA, 18 nt, Human
ugcauguagaggcuuguu

SEQ ID NO: 3680103 - RNA, 21 nt, Human
ugcaugucgugaccaacuaga

SEQ ID NO: 3680104 - RNA, 20 nt, Human
ugcaugugacucugaagcug

SEQ ID NO: 3680105 - RNA, 24 nt, Human
ugcaugugguuugguuccucucug

SEQ ID NO: 3680106 - RNA, 12 nt, Human
ugcaugugugcg

SEQ ID NO: 3680107 - RNA, 19 nt, Human
ugcauguguguauaagugc

SEQ ID NO: 3680108 - RNA, 14 nt, Human
ugcaugugugugcu

SEQ ID NO: 3680109 - RNA, 22 nt, Human
ugcauguuauguuuaauaagcu

SEQ ID NO: 3680110 - RNA, 14 nt, Human
ugcauguuccacua

SEQ ID NO: 3680111 - RNA, 18 nt, Human
ugcauguugaccaugucu

SEQ ID NO: 3680112 - RNA, 19 nt, Human
ugcauguugucuaagaaau

SEQ ID NO: 3680113 - RNA, 20 nt, Human
ugcauguugucuaagaaauu

SEQ ID NO: 3680114 - RNA, 19 nt, Human
ugcauguuuuccagcuccu

SEQ ID NO: 3680115 - RNA, 21 nt, Human
ugcauguuuuccagcuccuca

SEQ ID NO: 3680116 - RNA, 14 nt, Human
ugcauuaaaagaaa

SEQ ID NO: 3680117 - RNA, 15 nt, Human
ugcauuaaaagaaaa

SEQ ID NO: 3680118 - RNA, 15 nt, Human
ugccauauucuguug

SEQ ID NO: 3680119 - RNA, 21 nt, Human
ugccauauucuguuggccagu

SEQ ID NO: 3680120 - RNA, 16 nt, Human
ugccauauugcacaug

SEQ ID NO: 3680121 - RNA, 19 nt, Human
ugccauauugcacaugucu

SEQ ID NO: 3680122 - RNA, 13 nt, Human
ugccauauuuuca

SEQ ID NO: 3680123 - RNA, 14 nt, Human
ugccauauuuucac

SEQ ID NO: 3680124 - RNA, 17 nt, Human
ugccauauuuucaccau

SEQ ID NO: 3680125 - RNA, 15 nt, Human
ugccaucaaacugua

SEQ ID NO: 3680126 - RNA, 17 nt, Human
ugccaucaaacuguaaa

SEQ ID NO: 3680127 - RNA, 13 nt, Human
ugccaucaaauga

SEQ ID NO: 3680128 - RNA, 22 nt, Human
ugccaucaauaaaaaauuauga

SEQ ID NO: 3680129 - RNA, 16 nt, Human
ugccaucaucuccugc

SEQ ID NO: 3680130 - RNA, 23 nt, Human
ugccaucaucuccugccuuccuc

SEQ ID NO: 3680131 - RNA, 13 nt, Human
ugccaucauguuu

SEQ ID NO: 3680132 - RNA, 22 nt, Human
ugccaucauguuuacagaggac

SEQ ID NO: 3680133 - RNA, 18 nt, Human
ugccaucauugcugucug

SEQ ID NO: 3680134 - RNA, 21 nt, Human
ugccaucauugcugucugcag

SEQ ID NO: 3680135 - RNA, 21 nt, Human
ugccauccagguucagcuugu

SEQ ID NO: 3680136 - RNA, 15 nt, Human
ugccaucccucccuc

SEQ ID NO: 3680137 - RNA, 20 nt, Human
ugccaucccucccuccaccu

SEQ ID NO: 3680138 - RNA, 21 nt, Human
ugccaucccucccuccaccuc

SEQ ID NO: 3680139 - RNA, 13 nt, Human
ugccauccucuuu

SEQ ID NO: 3680140 - RNA, 16 nt, Human
ugccauccuggcccag

SEQ ID NO: 3680141 - RNA, 21 nt, Human
ugccauccuggcccagggcau

SEQ ID NO: 3680142 - RNA, 21 nt, Human
ugccaucucaccuccugcugg

SEQ ID NO: 3680143 - RNA, 16 nt, Human
ugccaucugugggcac

SEQ ID NO: 3680144 - RNA, 13 nt, Human
ugccaucuuccca

SEQ ID NO: 3680145 - RNA, 20 nt, Human
ugccaugacaacuucuaauu

SEQ ID NO: 3680146 - RNA, 20 nt, Human
ugccaugagccgcccaaggc

SEQ ID NO: 3680147 - RNA, 16 nt, Human
ugccaugaugccucug

SEQ ID NO: 3680148 - RNA, 16 nt, Human
ugccauggaagaggcu

SEQ ID NO: 3680149 - RNA, 23 nt, Human
ugccauggaagaggcuacagggc

SEQ ID NO: 3680150 - RNA, 17 nt, Human
ugccauggaggcacaca

SEQ ID NO: 3680151 - RNA, 23 nt, Human
ugccauggaggcacacagcugca

SEQ ID NO: 3680152 - RNA, 19 nt, Human
ugccaugggcuucacugua

SEQ ID NO: 3680153 - RNA, 23 nt, Human
ugccaugggcuucacuguauaaa

SEQ ID NO: 3680154 - RNA, 19 nt, Human
ugccauguaccuccccugc

SEQ ID NO: 3680155 - RNA, 22 nt, Human
ugccauguaccuccccugccuu

SEQ ID NO: 3680156 - RNA, 15 nt, Human
ugccaugugcaccuu

SEQ ID NO: 3680157 - RNA, 16 nt, Human
ugccauuaucccugaa

SEQ ID NO: 3680158 - RNA, 21 nt, Human
ugccauuauuuucugucagau

SEQ ID NO: 3680159 - RNA, 15 nt, Human
ugccauugcacucca

SEQ ID NO: 3680160 - RNA, 20 nt, Human
ugccauuguagcgucuuucu

SEQ ID NO: 3680161 - RNA, 17 nt, Human
ugccauugucuuuauau

SEQ ID NO: 3680162 - RNA, 17 nt, Human
ugccauuugauaccccu

SEQ ID NO: 3680163 - RNA, 21 nt, Human
ugccauuugcacccuccgccu

SEQ ID NO: 3680164 - RNA, 16 nt, Human
ugccauuuuaaggaaa

SEQ ID NO: 3680165 - RNA, 20 nt, Human
ugccauuuuaaggaaaacua

SEQ ID NO: 3680166 - RNA, 19 nt, Human
ugcccaaaaauaugguuga

SEQ ID NO: 3680167 - RNA, 16 nt, Human
ugcccaaagagcacaa

SEQ ID NO: 3680168 - RNA, 23 nt, Human
ugcccaaagcagcacuuauaaau

SEQ ID NO: 3680169 - RNA, 20 nt, Human
ugcccaaauccuuagaucug

SEQ ID NO: 3680170 - RNA, 18 nt, Human
ugcccaacaccagccccu

SEQ ID NO: 3680171 - RNA, 23 nt, Human
ugcccaacaccagccccugcccc

SEQ ID NO: 3680172 - RNA, 17 nt, Human
ugcccaaccucagcaac

SEQ ID NO: 3680173 - RNA, 22 nt, Human
ugcccaacuacuaucucagaga

SEQ ID NO: 3680174 - RNA, 13 nt, Human
ugcccaagccaga

SEQ ID NO: 3680175 - RNA, 18 nt, Human
ugcccaagccagaggcug

SEQ ID NO: 3680176 - RNA, 16 nt, Human
ugcccaauuggaggaa

SEQ ID NO: 3680177 - RNA, 16 nt, Human
ugcccacaccuccugg

SEQ ID NO: 3680178 - RNA, 20 nt, Human
ugcccacaggaucagucuga

SEQ ID NO: 3680179 - RNA, 14 nt, Human
ugcccacaggccgc

SEQ ID NO: 3680180 - RNA, 16 nt, Human
ugcccacaucccaggc

SEQ ID NO: 3680181 - RNA, 23 nt, Human
ugcccacaucccaggcuucaccc

SEQ ID NO: 3680182 - RNA, 23 nt, Human
ugcccacauguguccaucccagc

SEQ ID NO: 3680183 - RNA, 17 nt, Human
ugcccaccaacauccca

SEQ ID NO: 3680184 - RNA, 12 nt, Human
ugcccaccccac

SEQ ID NO: 3680185 - RNA, 13 nt, Human
ugcccaccccacc

SEQ ID NO: 3680186 - RNA, 16 nt, Human
ugcccaccccaccccc

SEQ ID NO: 3680187 - RNA, 14 nt, Human
ugcccacccccuca

SEQ ID NO: 3680188 - RNA, 18 nt, Human
ugcccacccccucaagcc

SEQ ID NO: 3680189 - RNA, 13 nt, Human
ugcccacccccug

SEQ ID NO: 3680190 - RNA, 15 nt, Human
ugcccacccccugcc

SEQ ID NO: 3680191 - RNA, 22 nt, Human
ugcccacccucuggagaaggug

SEQ ID NO: 3680192 - RNA, 13 nt, Human
ugcccaccugccu

SEQ ID NO: 3680193 - RNA, 16 nt, Human
ugcccaccugccuggc

SEQ ID NO: 3680194 - RNA, 21 nt, Human
ugcccaccugccuggccggcc

SEQ ID NO: 3680195 - RNA, 22 nt, Human
ugcccaccugccuggccggcca

SEQ ID NO: 3680196 - RNA, 18 nt, Human
ugcccaccuggccucugc

SEQ ID NO: 3680197 - RNA, 21 nt, Human
ugcccacucccugcaaccuga

SEQ ID NO: 3680198 - RNA, 20 nt, Human
ugcccacuccugcucugcuc

SEQ ID NO: 3680199 - RNA, 22 nt, Human
ugcccacugcugcaguagggga

SEQ ID NO: 3680200 - RNA, 17 nt, Human
ugcccacugucucuccu

SEQ ID NO: 3680201 - RNA, 19 nt, Human
ugcccagaauaaguuauug

SEQ ID NO: 3680202 - RNA, 16 nt, Human
ugcccagaauacugau

SEQ ID NO: 3680203 - RNA, 16 nt, Human
ugcccagaauucccag

SEQ ID NO: 3680204 - RNA, 22 nt, Human
ugcccagaauucccagcugucu

SEQ ID NO: 3680205 - RNA, 23 nt, Human
ugcccagaauucccagcugucug

SEQ ID NO: 3680206 - RNA, 19 nt, Human
ugcccagaccccucuggcc

SEQ ID NO: 3680207 - RNA, 16 nt, Human
ugcccagagacccagc

SEQ ID NO: 3680208 - RNA, 12 nt, Human
ugcccagagaug

SEQ ID NO: 3680209 - RNA, 17 nt, Human
ugcccagagaugccucc

SEQ ID NO: 3680210 - RNA, 12 nt, Human
ugcccagagcug

SEQ ID NO: 3680211 - RNA, 13 nt, Human
ugcccagagcugg

SEQ ID NO: 3680212 - RNA, 21 nt, Human
ugcccagaggacucccaaccc

SEQ ID NO: 3680213 - RNA, 18 nt, Human
ugcccagagggcccaggc

SEQ ID NO: 3680214 - RNA, 15 nt, Human
ugcccagaguugcug

SEQ ID NO: 3680215 - RNA, 11 nt, Human
ugcccagcccc

SEQ ID NO: 3680216 - RNA, 13 nt, Human
ugcccagccccuu

SEQ ID NO: 3680217 - RNA, 16 nt, Human
ugcccagccccuucug

SEQ ID NO: 3680218 - RNA, 21 nt, Human
ugcccagccccuucugaccca

SEQ ID NO: 3680219 - RNA, 20 nt, Human
ugcccagcccggaccuuggc

SEQ ID NO: 3680220 - RNA, 19 nt, Human
ugcccagcccuaaacauca

SEQ ID NO: 3680221 - RNA, 23 nt, Human
ugcccagccucuuucccuuccag

SEQ ID NO: 3680222 - RNA, 19 nt, Human
ugcccagcggacaguggca

SEQ ID NO: 3680223 - RNA, 20 nt, Human
ugcccagcggacaguggcag

SEQ ID NO: 3680224 - RNA, 22 nt, Human
ugcccagcggacaguggcagga

SEQ ID NO: 3680225 - RNA, 20 nt, Human
ugcccagcuagcugcagagc

SEQ ID NO: 3680226 - RNA, 18 nt, Human
ugcccagcuauaccugug

SEQ ID NO: 3680227 - RNA, 12 nt, Human
ugcccagcucag

SEQ ID NO: 3680228 - RNA, 17 nt, Human
ugcccagcucagagggu

SEQ ID NO: 3680229 - RNA, 15 nt, Human
ugcccagcucagucu

SEQ ID NO: 3680230 - RNA, 13 nt, Human
ugcccagcuuggg

SEQ ID NO: 3680231 - RNA, 21 nt, Human
ugcccagcuugggcccagcug

SEQ ID NO: 3680232 - RNA, 19 nt, Human
ugcccagcuuuucauugcu

SEQ ID NO: 3680233 - RNA, 20 nt, Human
ugcccagcuuuucauugcug

SEQ ID NO: 3680234 - RNA, 17 nt, Human
ugcccaggagagccagc

SEQ ID NO: 3680235 - RNA, 21 nt, Human
ugcccaggagagccagcccuc

SEQ ID NO: 3680236 - RNA, 15 nt, Human
ugcccaggcacugca

SEQ ID NO: 3680237 - RNA, 12 nt, Human
ugcccaggcagg

SEQ ID NO: 3680238 - RNA, 14 nt, Human
ugcccaggcagguc

SEQ ID NO: 3680239 - RNA, 15 nt, Human
ugcccaggcaggucu

SEQ ID NO: 3680240 - RNA, 22 nt, Human
ugcccaggccccugccacccug

SEQ ID NO: 3680241 - RNA, 17 nt, Human
ugcccaggccugccugu

SEQ ID NO: 3680242 - RNA, 15 nt, Human
ugcccaggcuggucu

SEQ ID NO: 3680243 - RNA, 17 nt, Human
ugcccaggcuggucuca

SEQ ID NO: 3680244 - RNA, 22 nt, Human
ugcccagggccacucugccucu

SEQ ID NO: 3680245 - RNA, 11 nt, Human
ugcccagggcu

SEQ ID NO: 3680246 - RNA, 18 nt, Human
ugcccagggcucagccug

SEQ ID NO: 3680247 - RNA, 20 nt, Human
ugcccagggcucagccuggu

SEQ ID NO: 3680248 - RNA, 15 nt, Human
ugcccaggggagccc

SEQ ID NO: 3680249 - RNA, 16 nt, Human
ugcccaggggagcccu

SEQ ID NO: 3680250 - RNA, 17 nt, Human
ugcccaggggagcccuc

SEQ ID NO: 3680251 - RNA, 18 nt, Human
ugcccaggggugcccccu

SEQ ID NO: 3680252 - RNA, 21 nt, Human
ugcccaggggugcccccuccu

SEQ ID NO: 3680253 - RNA, 19 nt, Human
ugcccagguggcuguggaa

SEQ ID NO: 3680254 - RNA, 15 nt, Human
ugcccaguacauuua

SEQ ID NO: 3680255 - RNA, 16 nt, Human
ugcccagucccccaac

SEQ ID NO: 3680256 - RNA, 18 nt, Human
ugcccagucccccaaccc

SEQ ID NO: 3680257 - RNA, 12 nt, Human
ugcccaguguug

SEQ ID NO: 3680258 - RNA, 18 nt, Human
ugcccaguguuguuugua

SEQ ID NO: 3680259 - RNA, 21 nt, Human
ugcccaguguuguuuguaaau

SEQ ID NO: 3680260 - RNA, 20 nt, Human
ugcccaguuaaucuugcuuu

SEQ ID NO: 3680261 - RNA, 22 nt, Human
ugcccaguuaaucuugcuuucu

SEQ ID NO: 3680262 - RNA, 18 nt, Human
ugcccaguuucugccucu

SEQ ID NO: 3680263 - RNA, 21 nt, Human
ugcccaucauguggccccacc

SEQ ID NO: 3680264 - RNA, 15 nt, Human
ugcccauccugacug

SEQ ID NO: 3680265 - RNA, 20 nt, Human
ugcccaucgugaagaagccu

SEQ ID NO: 3680266 - RNA, 19 nt, Human
ugcccaucugggaaaauac

SEQ ID NO: 3680267 - RNA, 22 nt, Human
ugcccaugauggucacuuaaaa

SEQ ID NO: 3680268 - RNA, 14 nt, Human
ugcccaugcugggc

SEQ ID NO: 3680269 - RNA, 23 nt, Human
ugcccaugggcacugcugggugg

SEQ ID NO: 3680270 - RNA, 15 nt, Human
ugcccauguuucaaa

SEQ ID NO: 3680271 - RNA, 16 nt, Human
ugcccauuccccagcc

SEQ ID NO: 3680272 - RNA, 15 nt, Human
ugcccauuccucacc

SEQ ID NO: 3680273 - RNA, 22 nt, Human
ugcccauuucauauucuuucaa

SEQ ID NO: 3680274 - RNA, 22 nt, Human
ugccccaaaggaagcuuucucu

SEQ ID NO: 3680275 - RNA, 23 nt, Human
ugccccaaauggauuccuguuuc

SEQ ID NO: 3680276 - RNA, 16 nt, Human
ugccccaacccccagc

SEQ ID NO: 3680277 - RNA, 20 nt, Human
ugccccaacccuucuucaug

SEQ ID NO: 3680278 - RNA, 14 nt, Human
ugccccacagucuc

SEQ ID NO: 3680279 - RNA, 20 nt, Human
ugccccaccccuccccauua

SEQ ID NO: 3680280 - RNA, 13 nt, Human
ugccccaccugcc

SEQ ID NO: 3680281 - RNA, 16 nt, Human
ugccccaccugccacu

SEQ ID NO: 3680282 - RNA, 17 nt, Human
ugccccaccugccacua

SEQ ID NO: 3680283 - RNA, 21 nt, Human
ugccccaccugccacuaggcu

SEQ ID NO: 3680284 - RNA, 19 nt, Human
ugccccaccuuuauuaaaa

SEQ ID NO: 3680285 - RNA, 14 nt, Human
ugccccagagcugu

SEQ ID NO: 3680286 - RNA, 23 nt, Human
ugccccagagcuguuuauggccu

SEQ ID NO: 3680287 - RNA, 16 nt, Human
ugccccagcucuggcu

SEQ ID NO: 3680288 - RNA, 13 nt, Human
ugccccaggacca

SEQ ID NO: 3680289 - RNA, 19 nt, Human
ugccccaggaccagcucag

SEQ ID NO: 3680290 - RNA, 14 nt, Human
ugccccaggccuga

SEQ ID NO: 3680291 - RNA, 15 nt, Human
ugccccagggcuccc

SEQ ID NO: 3680292 - RNA, 16 nt, Human
ugccccaucagugcuc

SEQ ID NO: 3680293 - RNA, 21 nt, Human
ugccccauccuccagcaggga

SEQ ID NO: 3680294 - RNA, 21 nt, Human
ugccccaugaagccacagccc

SEQ ID NO: 3680295 - RNA, 18 nt, Human
ugccccauucuuuuguaa

SEQ ID NO: 3680296 - RNA, 16 nt, Human
ugcccccaaccauuuc

SEQ ID NO: 3680297 - RNA, 17 nt, Human
ugcccccacaccuggcc

SEQ ID NO: 3680298 - RNA, 18 nt, Human
ugcccccacaccuggccc

SEQ ID NO: 3680299 - RNA, 17 nt, Human
ugcccccaccccauucc

SEQ ID NO: 3680300 - RNA, 19 nt, Human
ugcccccaccccauucccg

SEQ ID NO: 3680301 - RNA, 14 nt, Human
ugcccccagccccg

SEQ ID NO: 3680302 - RNA, 20 nt, Human
ugcccccagccccgggguga

SEQ ID NO: 3680303 - RNA, 14 nt, Human
ugcccccagcuggc

SEQ ID NO: 3680304 - RNA, 11 nt, Human
ugcccccagga

SEQ ID NO: 3680305 - RNA, 17 nt, Human
ugcccccaggacugggc

SEQ ID NO: 3680306 - RNA, 19 nt, Human
ugcccccaggacugggcca

SEQ ID NO: 3680307 - RNA, 15 nt, Human
ugcccccauuucuga

SEQ ID NO: 3680308 - RNA, 12 nt, Human
ugccccccaccc

SEQ ID NO: 3680309 - RNA, 14 nt, Human
ugccccccacccca

SEQ ID NO: 3680310 - RNA, 17 nt, Human
ugccccccaccccagcc

SEQ ID NO: 3680311 - RNA, 15 nt, Human
ugccccccagccucu

SEQ ID NO: 3680312 - RNA, 17 nt, Human
ugccccccauccuggcc

SEQ ID NO: 3680313 - RNA, 19 nt, Human
ugccccccauccuggccca

SEQ ID NO: 3680314 - RNA, 20 nt, Human
ugccccccauccuggcccau

SEQ ID NO: 3680315 - RNA, 20 nt, Human
ugccccccucaaaccuccuc

SEQ ID NO: 3680316 - RNA, 22 nt, Human
ugcccccgcucaugggccccuc

SEQ ID NO: 3680317 - RNA, 17 nt, Human
ugcccccggcccccugg

SEQ ID NO: 3680318 - RNA, 21 nt, Human
ugcccccggcccccuggucuc

SEQ ID NO: 3680319 - RNA, 21 nt, Human
ugcccccuaauccccuucucc

SEQ ID NO: 3680320 - RNA, 14 nt, Human
ugcccccuccucuc

SEQ ID NO: 3680321 - RNA, 13 nt, Human
ugcccccucgugc

SEQ ID NO: 3680322 - RNA, 13 nt, Human
ugcccccugcagg

SEQ ID NO: 3680323 - RNA, 22 nt, Human
ugcccccugcaggaaggagcug

SEQ ID NO: 3680324 - RNA, 13 nt, Human
ugcccccugcugg

SEQ ID NO: 3680325 - RNA, 12 nt, Human
ugcccccuggug

SEQ ID NO: 3680326 - RNA, 13 nt, Human
ugcccccugugga

SEQ ID NO: 3680327 - RNA, 13 nt, Human
ugcccccuucucc

SEQ ID NO: 3680328 - RNA, 19 nt, Human
ugcccccuucucccacacu

SEQ ID NO: 3680329 - RNA, 22 nt, Human
ugcccccuucucccacacugcu

SEQ ID NO: 3680330 - RNA, 22 nt, Human
ugcccccuuucagaugucuucu

SEQ ID NO: 3680331 - RNA, 23 nt, Human
ugcccccuuucagaugucuucug

SEQ ID NO: 3680332 - RNA, 23 nt, Human
ugccccgaacauguuuuucuucu

SEQ ID NO: 3680333 - RNA, 13 nt, Human
ugccccgcccagc

SEQ ID NO: 3680334 - RNA, 15 nt, Human
ugccccgccuccccg

SEQ ID NO: 3680335 - RNA, 22 nt, Human
ugccccggccccggccccagcc

SEQ ID NO: 3680336 - RNA, 17 nt, Human
ugccccgucaccaucuc

SEQ ID NO: 3680337 - RNA, 19 nt, Human
ugccccgucaccaucucag

SEQ ID NO: 3680338 - RNA, 20 nt, Human
ugccccgucaccaucucagg

SEQ ID NO: 3680339 - RNA, 22 nt, Human
ugccccguccacggcucuaggu

SEQ ID NO: 3680340 - RNA, 18 nt, Human
ugccccgucccccucugg

SEQ ID NO: 3680341 - RNA, 19 nt, Human
ugccccgucuacagcuccc

SEQ ID NO: 3680342 - RNA, 16 nt, Human
ugccccgugcagacug

SEQ ID NO: 3680343 - RNA, 18 nt, Human
ugccccgugcagacugga

SEQ ID NO: 3680344 - RNA, 21 nt, Human
ugccccgugcagacuggaggg

SEQ ID NO: 3680345 - RNA, 20 nt, Human
ugccccuaaucucuguagga

SEQ ID NO: 3680346 - RNA, 16 nt, Human
ugccccuagcuuagag

SEQ ID NO: 3680347 - RNA, 12 nt, Human
ugccccucccag

SEQ ID NO: 3680348 - RNA, 17 nt, Human
ugccccucccccaaccc

SEQ ID NO: 3680349 - RNA, 16 nt, Human
ugccccucccccagcc

SEQ ID NO: 3680350 - RNA, 15 nt, Human
ugccccucccuucaa

SEQ ID NO: 3680351 - RNA, 12 nt, Human
ugccccucucac

SEQ ID NO: 3680352 - RNA, 20 nt, Human
ugccccucuccuucuuagcu

SEQ ID NO: 3680353 - RNA, 16 nt, Human
ugccccucucugggcc

SEQ ID NO: 3680354 - RNA, 15 nt, Human
ugccccucuuucucu

SEQ ID NO: 3680355 - RNA, 16 nt, Human
ugccccucuuucucuu

SEQ ID NO: 3680356 - RNA, 21 nt, Human
ugccccucuuucucuuucuuc

SEQ ID NO: 3680357 - RNA, 16 nt, Human
ugccccugcugccucc

SEQ ID NO: 3680358 - RNA, 17 nt, Human
ugccccugcugccuccc

SEQ ID NO: 3680359 - RNA, 17 nt, Human
ugccccuggcagccccu

SEQ ID NO: 3680360 - RNA, 17 nt, Human
ugccccuuccgccacug

SEQ ID NO: 3680361 - RNA, 19 nt, Human
ugccccuuccgccacuggg

SEQ ID NO: 3680362 - RNA, 23 nt, Human
ugccccuuccgccacuggggcuc

SEQ ID NO: 3680363 - RNA, 15 nt, Human
ugccccuucuacacu

SEQ ID NO: 3680364 - RNA, 23 nt, Human
ugccccuucuacacucuccuggg

SEQ ID NO: 3680365 - RNA, 21 nt, Human
ugccccuugacaacuggcagg

SEQ ID NO: 3680366 - RNA, 19 nt, Human
ugccccuuuauaaauccaa

SEQ ID NO: 3680367 - RNA, 13 nt, Human
ugcccgagcuggu

SEQ ID NO: 3680368 - RNA, 14 nt, Human
ugcccgagcuggug

SEQ ID NO: 3680369 - RNA, 19 nt, Human
ugcccgagcuggugcauua

SEQ ID NO: 3680370 - RNA, 19 nt, Human
ugcccgcacagcagccugc

SEQ ID NO: 3680371 - RNA, 17 nt, Human
ugcccgcagaccucugg

SEQ ID NO: 3680372 - RNA, 18 nt, Human
ugcccgcagaccucugga

SEQ ID NO: 3680373 - RNA, 18 nt, Human
ugcccgccugcccaccug

SEQ ID NO: 3680374 - RNA, 19 nt, Human
ugcccgccugcccaccugc

SEQ ID NO: 3680375 - RNA, 20 nt, Human
ugcccgccugggucuccuaa

SEQ ID NO: 3680376 - RNA, 21 nt, Human
ugcccggagauuggacggccu

SEQ ID NO: 3680377 - RNA, 16 nt, Human
ugcccggauucuggga

SEQ ID NO: 3680378 - RNA, 17 nt, Human
ugcccggauucugggag

SEQ ID NO: 3680379 - RNA, 18 nt, Human
ugcccggauucugggagg

SEQ ID NO: 3680380 - RNA, 22 nt, Human
ugcccggcacagaugcuccagg

SEQ ID NO: 3680381 - RNA, 21 nt, Human
ugcccggcgcccucuguccug

SEQ ID NO: 3680382 - RNA, 22 nt, Human
ugcccggcgcccucuguccuga

SEQ ID NO: 3680383 - RNA, 18 nt, Human
ugcccgggagcucaggaa

SEQ ID NO: 3680384 - RNA, 23 nt, Human
ugcccggggcagcagcagcccug

SEQ ID NO: 3680385 - RNA, 18 nt, Human
ugcccggggcagcugcca

SEQ ID NO: 3680386 - RNA, 20 nt, Human
ugcccggggcagcugccaga

SEQ ID NO: 3680387 - RNA, 14 nt, Human
ugcccggucccacc

SEQ ID NO: 3680388 - RNA, 23 nt, Human
ugcccguaaacacgccugcaaac

SEQ ID NO: 3680389 - RNA, 21 nt, Human
ugcccgucucucucccaugga

SEQ ID NO: 3680390 - RNA, 14 nt, Human
ugcccguucuugaa

SEQ ID NO: 3680391 - RNA, 17 nt, Human
ugcccuaaaguguauuu

SEQ ID NO: 3680392 - RNA, 19 nt, Human
ugcccuaaaguguauuuuu

SEQ ID NO: 3680393 - RNA, 22 nt, Human
ugcccuaaccucugagucacca

SEQ ID NO: 3680394 - RNA, 13 nt, Human
ugcccuagcucca

SEQ ID NO: 3680395 - RNA, 22 nt, Human
ugcccuaguuuucuuuccuccu

SEQ ID NO: 3680396 - RNA, 23 nt, Human
ugcccuaguuuucuuuccuccuu

SEQ ID NO: 3680397 - RNA, 12 nt, Human
ugcccucaggga

SEQ ID NO: 3680398 - RNA, 23 nt, Human
ugcccucauuacugggccuuagu

SEQ ID NO: 3680399 - RNA, 22 nt, Human
ugcccuccaagaccuucuccuu

SEQ ID NO: 3680400 - RNA, 18 nt, Human
ugcccuccacagccgcag

SEQ ID NO: 3680401 - RNA, 15 nt, Human
ugcccuccacugccc

SEQ ID NO: 3680402 - RNA, 21 nt, Human
ugcccuccagcucuuuccucc

SEQ ID NO: 3680403 - RNA, 17 nt, Human
ugcccuccaucccgaca

SEQ ID NO: 3680404 - RNA, 15 nt, Human
ugcccuccccagagc

SEQ ID NO: 3680405 - RNA, 16 nt, Human
ugcccuccccagagca

SEQ ID NO: 3680406 - RNA, 19 nt, Human
ugcccuccccagagcacug

SEQ ID NO: 3680407 - RNA, 15 nt, Human
ugcccucccuccuuc

SEQ ID NO: 3680408 - RNA, 19 nt, Human
ugcccucccuucucccugg

SEQ ID NO: 3680409 - RNA, 23 nt, Human
ugcccuccugugcucagcccuga

SEQ ID NO: 3680410 - RNA, 19 nt, Human
ugcccuccuuguccaccca

SEQ ID NO: 3680411 - RNA, 19 nt, Human
ugcccucgggcgagucacu

SEQ ID NO: 3680412 - RNA, 22 nt, Human
ugcccucgggcgagucacugcc

SEQ ID NO: 3680413 - RNA, 17 nt, Human
ugcccucguggccagcc

SEQ ID NO: 3680414 - RNA, 18 nt, Human
ugcccucguggccagccc

SEQ ID NO: 3680415 - RNA, 23 nt, Human
ugccuccaccaccacuggccacc

SEQ ID NO: 3680416 - RNA, 18 nt, Human
ugccuccaccccccagaa

SEQ ID NO: 3680417 - RNA, 11 nt, Human
ugccuccaccg

SEQ ID NO: 3680418 - RNA, 13 nt, Human
ugccuccacuccc

SEQ ID NO: 3680419 - RNA, 16 nt, Human
ugccuccacucccacu

SEQ ID NO: 3680420 - RNA, 12 nt, Human
ugccuccagggc

SEQ ID NO: 3680421 - RNA, 14 nt, Human
ugccuccagggcug

SEQ ID NO: 3680422 - RNA, 16 nt, Human
ugccuccagggcugga

SEQ ID NO: 3680423 - RNA, 18 nt, Human
ugccuccagggcuggacu

SEQ ID NO: 3680424 - RNA, 11 nt, Human
ugccuccaggu

SEQ ID NO: 3680425 - RNA, 17 nt, Human
ugccuccaggugcagag

SEQ ID NO: 3680426 - RNA, 16 nt, Human
ugccuccauggugccu

SEQ ID NO: 3680427 - RNA, 18 nt, Human
ugccuccauggugccucu

SEQ ID NO: 3680428 - RNA, 14 nt, Human
ugccucccaucacc

SEQ ID NO: 3680429 - RNA, 18 nt, Human
ugccuccccaacccugcc

SEQ ID NO: 3680430 - RNA, 20 nt, Human
ugccuccccaacccugcccc

SEQ ID NO: 3680431 - RNA, 21 nt, Human
ugccuccccauuucccaucug

SEQ ID NO: 3680432 - RNA, 13 nt, Human
ugccuccccuccu

SEQ ID NO: 3680433 - RNA, 14 nt, Human
ugccuccccuccuc

SEQ ID NO: 3680434 - RNA, 16 nt, Human
ugccuccccuccucug

SEQ ID NO: 3680435 - RNA, 18 nt, Human
ugccuccccuccucugcu

SEQ ID NO: 3680436 - RNA, 23 nt, Human
ugccuccccuccucugcuugcca

SEQ ID NO: 3680437 - RNA, 16 nt, Human
ugccucccucacccug

SEQ ID NO: 3680438 - RNA, 22 nt, Human
ugccucccucucguaagauuuc

SEQ ID NO: 3680439 - RNA, 13 nt, Human
ugccucccugagc

SEQ ID NO: 3680440 - RNA, 14 nt, Human
ugccucccugagcu

SEQ ID NO: 3680441 - RNA, 14 nt, Human
ugccucccugguga

SEQ ID NO: 3680442 - RNA, 15 nt, Human
ugccucccuguccac

SEQ ID NO: 3680443 - RNA, 16 nt, Human
ugccucccuguccacc

SEQ ID NO: 3680444 - RNA, 19 nt, Human
ugccucccuuguggcagca

SEQ ID NO: 3680445 - RNA, 12 nt, Human
ugccuccucacc

SEQ ID NO: 3680446 - RNA, 16 nt, Human
ugccuccucaggagcc

SEQ ID NO: 3680447 - RNA, 15 nt, Human
ugccuccucccuccc

SEQ ID NO: 3680448 - RNA, 19 nt, Human
ugccuccucccucccucuc

SEQ ID NO: 3680449 - RNA, 20 nt, Human
ugccuccucguuccuuucuc

SEQ ID NO: 3680450 - RNA, 14 nt, Human
ugccuccucuucaa

SEQ ID NO: 3680451 - RNA, 16 nt, Human
ugccuccucuucaacu

SEQ ID NO: 3680452 - RNA, 21 nt, Human
ugccuccugccggcuccuugg

SEQ ID NO: 3680453 - RNA, 16 nt, Human
ugccuccuuugugagg

SEQ ID NO: 3680454 - RNA, 17 nt, Human
ugccuccuuugugagga

SEQ ID NO: 3680455 - RNA, 19 nt, Human
ugccuccuuugugaggaag

SEQ ID NO: 3680456 - RNA, 22 nt, Human
ugccuccuuugugaggaagccg

SEQ ID NO: 3680457 - RNA, 17 nt, Human
ugccucgaaacacagaa

SEQ ID NO: 3680458 - RNA, 16 nt, Human
ugccucggauccccuu

SEQ ID NO: 3680459 - RNA, 16 nt, Human
ugccucggcuccugcu

SEQ ID NO: 3680460 - RNA, 20 nt, Human
ugccucggcuccugcugcac

SEQ ID NO: 3680461 - RNA, 15 nt, Human
ugccucuaccugaca

SEQ ID NO: 3680462 - RNA, 23 nt, Human
ugccucuaccugacacucccuug

SEQ ID NO: 3680463 - RNA, 12 nt, Human
ugccucuagcug

SEQ ID NO: 3680464 - RNA, 13 nt, Human
ugccucuagcuga

SEQ ID NO: 3680465 - RNA, 12 nt, Human
ugccucucacac

SEQ ID NO: 3680466 - RNA, 17 nt, Human
ugccucucacagcugag

SEQ ID NO: 3680467 - RNA, 18 nt, Human
ugccucucacagcugagu

SEQ ID NO: 3680468 - RNA, 14 nt, Human
ugccucuccaggca

SEQ ID NO: 3680469 - RNA, 16 nt, Human
ugccucucccaggcag

SEQ ID NO: 3680470 - RNA, 13 nt, Human
ugccucucccucu

SEQ ID NO: 3680471 - RNA, 14 nt, Human
ugccucucccucug

SEQ ID NO: 3680472 - RNA, 17 nt, Human
ugccucucccugcugcu

SEQ ID NO: 3680473 - RNA, 20 nt, Human
ugccucuccgccccugagcc

SEQ ID NO: 3680474 - RNA, 22 nt, Human
ugccucuccgccccugagccca

SEQ ID NO: 3680475 - RNA, 20 nt, Human
ugccucucgcuccucaaccc

SEQ ID NO: 3680476 - RNA, 12 nt, Human
ugccucucuagg

SEQ ID NO: 3680477 - RNA, 13 nt, Human
ugccucucucagg

SEQ ID NO: 3680478 - RNA, 11 nt, Human
ugccucucugc

SEQ ID NO: 3680479 - RNA, 23 nt, Human
ugccucucugcaggucccuaaua

SEQ ID NO: 3680480 - RNA, 13 nt, Human
ugccucucuguuu

SEQ ID NO: 3680481 - RNA, 16 nt, Human
ugccucugacacacag

SEQ ID NO: 3680482 - RNA, 22 nt, Human
ugccucugacacacagcucugu

SEQ ID NO: 3680483 - RNA, 11 nt, Human
ugccucugagg

SEQ ID NO: 3680484 - RNA, 12 nt, Human
ugccucugaggc

SEQ ID NO: 3680485 - RNA, 16 nt, Human
ugccucugaggccagc

SEQ ID NO: 3680486 - RNA, 18 nt, Human
ugccucugauaugggacu

SEQ ID NO: 3680487 - RNA, 17 nt, Human
ugccucugauguauuuu

SEQ ID NO: 3680488 - RNA, 12 nt, Human
ugccucugccuc

SEQ ID NO: 3680489 - RNA, 18 nt, Human
ugccucugccugucuccc

SEQ ID NO: 3680490 - RNA, 22 nt, Human
ugccucugccuuagaggagccc

SEQ ID NO: 3680491 - RNA, 20 nt, Human
ugccucuggaggccucuggg

SEQ ID NO: 3680492 - RNA, 21 nt, Human
ugccucuggcucuacacauau

SEQ ID NO: 3680493 - RNA, 13 nt, Human
ugccucugucccc

SEQ ID NO: 3680494 - RNA, 21 nt, Human
ugccucugucuagcaugccaa

SEQ ID NO: 3680495 - RNA, 18 nt, Human
ugccucugucuucuggac

SEQ ID NO: 3680496 - RNA, 16 nt, Human
ugccucuguuugacaa

SEQ ID NO: 3680497 - RNA, 23 nt, Human
ugccucuguuugacaaaccucua

SEQ ID NO: 3680498 - RNA, 23 nt, Human
ugccucuucccccugcuuccacc

SEQ ID NO: 3680499 - RNA, 17 nt, Human
ugccucuuccuugaaga

SEQ ID NO: 3680500 - RNA, 21 nt, Human
ugccucuucucuacucuaggg

SEQ ID NO: 3680501 - RNA, 15 nt, Human
ugccucuucugggag

SEQ ID NO: 3680502 - RNA, 16 nt, Human
ugccucuucugggagg

SEQ ID NO: 3680503 - RNA, 19 nt, Human
ugccucuucugggagggca

SEQ ID NO: 3680504 - RNA, 11 nt, Human
ugccucuuucc

SEQ ID NO: 3680505 - RNA, 18 nt, Human
ugccucuuuuaccugcug

SEQ ID NO: 3680506 - RNA, 20 nt, Human
ugccucuuuuaccugcugcu

SEQ ID NO: 3680507 - RNA, 13 nt, Human
ugccugaacaucc

SEQ ID NO: 3680508 - RNA, 20 nt, Human
ugccugaacauccuuccuuc

SEQ ID NO: 3680509 - RNA, 21 nt, Human
ugccugaacauccuuccuucc

SEQ ID NO: 3680510 - RNA, 18 nt, Human
ugccugaagucacacagu

SEQ ID NO: 3680511 - RNA, 22 nt, Human
ugccugaagucacacagugagu

SEQ ID NO: 3680512 - RNA, 12 nt, Human
ugccugaauaaa

SEQ ID NO: 3680513 - RNA, 13 nt, Human
ugccugaauaaag

SEQ ID NO: 3680514 - RNA, 16 nt, Human
ugccugacacacuaac

SEQ ID NO: 3680515 - RNA, 15 nt, Human
ugccugagaggcagg

SEQ ID NO: 3680516 - RNA, 19 nt, Human
ugccugagaggcaggcaua

SEQ ID NO: 3680517 - RNA, 18 nt, Human
ugccugagcaccucccag

SEQ ID NO: 3680518 - RNA, 19 nt, Human
ugccugagggcgaggggag

SEQ ID NO: 3680519 - RNA, 15 nt, Human
ugccugaggggcagc

SEQ ID NO: 3680520 - RNA, 14 nt, Human
ugccugagggugga

SEQ ID NO: 3680521 - RNA, 15 nt, Human
ugccugaggucugua

SEQ ID NO: 3680522 - RNA, 18 nt, Human
ugccugauccagccucuc

SEQ ID NO: 3680523 - RNA, 15 nt, Human
ugccugauggaccug

SEQ ID NO: 3680524 - RNA, 18 nt, Human
ugccugauucggcugucu

SEQ ID NO: 3680525 - RNA, 17 nt, Human
ugccugcacaaacucac

SEQ ID NO: 3680526 - RNA, 19 nt, Human
ugccugcaccaggagacag

SEQ ID NO: 3680527 - RNA, 15 nt, Human
ugccugcaccccugc

SEQ ID NO: 3680528 - RNA, 18 nt, Human
ugccugcagagagaagcc

SEQ ID NO: 3680529 - RNA, 19 nt, Human
ugccugcagaggucugugc

SEQ ID NO: 3680530 - RNA, 22 nt, Human
ugccugcagccccgcgccuccu

SEQ ID NO: 3680531 - RNA, 12 nt, Human
ugccugcagggc

SEQ ID NO: 3680532 - RNA, 22 nt, Human
ugccugcagggccauggcucag

SEQ ID NO: 3680533 - RNA, 16 nt, Human
ugccugccagcugcac

SEQ ID NO: 3680534 - RNA, 19 nt, Human
ugccugccagcugcacuga

SEQ ID NO: 3680535 - RNA, 13 nt, Human
ugccugcccaccc

SEQ ID NO: 3680536 - RNA, 16 nt, Human
ugccugcccaggcccc

SEQ ID NO: 3680537 - RNA, 18 nt, Human
ugccugcccaggccccug

SEQ ID NO: 3680538 - RNA, 19 nt, Human
ugccugcccaggccccugc

SEQ ID NO: 3680539 - RNA, 18 nt, Human
ugccugccccccucaucu

SEQ ID NO: 3680540 - RNA, 17 nt, Human
ugccugccccgccccca

SEQ ID NO: 3680541 - RNA, 21 nt, Human
ugccugccccuacccuggacu

SEQ ID NO: 3680542 - RNA, 22 nt, Human
ugccugccccuacccuggacuu

SEQ ID NO: 3680543 - RNA, 18 nt, Human
ugccugcccgcacagcag

SEQ ID NO: 3680544 - RNA, 22 nt, Human
ugccugcccgcacagcagccug

SEQ ID NO: 3680545 - RNA, 10 nt, Human
ugccugcccu

SEQ ID NO: 3680546 - RNA, 13 nt, Human
ugccugcccuuug

SEQ ID NO: 3680547 - RNA, 20 nt, Human
ugccugccugucugucucuc

SEQ ID NO: 3680548 - RNA, 20 nt, Human
ugccugcgcccaccccgcuc

SEQ ID NO: 3680549 - RNA, 21 nt, Human
ugccugcgcccaccccgcucu

SEQ ID NO: 3680550 - RNA, 18 nt, Human
ugccugcgucuuccgccc

SEQ ID NO: 3680551 - RNA, 17 nt, Human
ugccugcuauuugaagu

SEQ ID NO: 3680552 - RNA, 21 nt, Human
ugccugcucgcucccugcaga

SEQ ID NO: 3680553 - RNA, 11 nt, Human
ugccugcucuu

SEQ ID NO: 3680554 - RNA, 23 nt, Human
ugccugcugaaugauuuccaaag

SEQ ID NO: 3680555 - RNA, 22 nt, Human
ugccugcuuggggggugaugag

SEQ ID NO: 3680556 - RNA, 13 nt, Human
ugccugcuuugaa

SEQ ID NO: 3680557 - RNA, 20 nt, Human
ugccugcuuuuuauggccug

SEQ ID NO: 3680558 - RNA, 21 nt, Human
ugccugcuuuuuauggccugu

SEQ ID NO: 3680559 - RNA, 21 nt, Human
ugccugcuuuuuggaaaguca

SEQ ID NO: 3680560 - RNA, 18 nt, Human
ugccuggagacguggaac

SEQ ID NO: 3680561 - RNA, 22 nt, Human
ugccuggagacguggaaccucu

SEQ ID NO: 3680562 - RNA, 14 nt, Human
ugccuggagcccca

SEQ ID NO: 3680563 - RNA, 20 nt, Human
ugccuggagccccacugccc

SEQ ID NO: 3680564 - RNA, 17 nt, Human
ugccuggagcuccuggg

SEQ ID NO: 3680565 - RNA, 18 nt, Human
ugccuggaggaccugagc

SEQ ID NO: 3680566 - RNA, 23 nt, Human
ugccuggaguguaugacugcaca

SEQ ID NO: 3680567 - RNA, 14 nt, Human
ugccuggauggggc

SEQ ID NO: 3680568 - RNA, 21 nt, Human
ugccuggauggggcugcaccg

SEQ ID NO: 3680569 - RNA, 15 nt, Human
ugccuggccacgccc

SEQ ID NO: 3680570 - RNA, 15 nt, Human
ugccuggccacugcu

SEQ ID NO: 3680571 - RNA, 12 nt, Human
ugccuggccccc

SEQ ID NO: 3680572 - RNA, 16 nt, Human
ugccuggcccccagcu

SEQ ID NO: 3680573 - RNA, 21 nt, Human
ugccuggccccucgccugugg

SEQ ID NO: 3680574 - RNA, 13 nt, Human
ugccuggccggcc

SEQ ID NO: 3680575 - RNA, 14 nt, Human
ugccuggccggcca

SEQ ID NO: 3680576 - RNA, 16 nt, Human
ugccuggccggccagc

SEQ ID NO: 3680577 - RNA, 16 nt, Human
ugccuggccuggcaca

SEQ ID NO: 3680578 - RNA, 11 nt, Human
ugccuggcuca

SEQ ID NO: 3680579 - RNA, 22 nt, Human
ugccuggcuucgcaaaauguuu

SEQ ID NO: 3680580 - RNA, 21 nt, Human
ugccugggaaccuuccugucu

SEQ ID NO: 3680581 - RNA, 12 nt, Human
ugccugggcugu

SEQ ID NO: 3680582 - RNA, 19 nt, Human
ugccuggguggggcugcuc

SEQ ID NO: 3680583 - RNA, 23 nt, Human
ugccuggguggggcugcuccucc

SEQ ID NO: 3680584 - RNA, 15 nt, Human
ugccugguacaguau

SEQ ID NO: 3680585 - RNA, 20 nt, Human
ugccugguauauccaaaagc

SEQ ID NO: 3680586 - RNA, 22 nt, Human
ugccuggucacagggcaugccc

SEQ ID NO: 3680587 - RNA, 17 nt, Human
ugccuggugaauggccu

SEQ ID NO: 3680588 - RNA, 20 nt, Human
ugccuggugcuuccaaauau

SEQ ID NO: 3680589 - RNA, 11 nt, Human
ugccuguaauc

SEQ ID NO: 3680590 - RNA, 18 nt, Human
ugccuguaaucacagcua

SEQ ID NO: 3680591 - RNA, 18 nt, Human
ugccuguaauucagugua

SEQ ID NO: 3680592 - RNA, 23 nt, Human
ugccuguagcccacucugcucgc

SEQ ID NO: 3680593 - RNA, 20 nt, Human
ugccuguagccccagugaca

SEQ ID NO: 3680594 - RNA, 21 nt, Human
ugccuguagccccagugacag

SEQ ID NO: 3680595 - RNA, 16 nt, Human
ugccuguaguuaggaa

SEQ ID NO: 3680596 - RNA, 17 nt, Human
ugccuguaguuaggaaa

SEQ ID NO: 3680597 - RNA, 18 nt, Human
ugccuguccagccugggc

SEQ ID NO: 3680598 - RNA, 17 nt, Human
ugccuguccccaugcuu

SEQ ID NO: 3680599 - RNA, 11 nt, Human
ugccugucccu

SEQ ID NO: 3680600 - RNA, 14 nt, Human
ugccugucccucuc

SEQ ID NO: 3680601 - RNA, 18 nt, Human
ugccugucuguuacacug

SEQ ID NO: 3680602 - RNA, 17 nt, Human
ugccugugaacugaacu

SEQ ID NO: 3680603 - RNA, 14 nt, Human
ugccugugaggcag

SEQ ID NO: 3680604 - RNA, 16 nt, Human
ugccugugaggcaggg

SEQ ID NO: 3680605 - RNA, 12 nt, Human
ugccugugccag

SEQ ID NO: 3680606 - RNA, 16 nt, Human
ugccugugccagguga

SEQ ID NO: 3680607 - RNA, 19 nt, Human
ugccuguggaaucuggagu

SEQ ID NO: 3680608 - RNA, 14 nt, Human
ugccuguggccaug

SEQ ID NO: 3680609 - RNA, 15 nt, Human
ugccuguguauggaa

SEQ ID NO: 3680610 - RNA, 19 nt, Human
ugccuguguccaugcgcuc

SEQ ID NO: 3680611 - RNA, 15 nt, Human
ugccuguucagcucc

SEQ ID NO: 3680612 - RNA, 17 nt, Human
ugccuguucaguuacag

SEQ ID NO: 3680613 - RNA, 20 nt, Human
ugccuguucaguuacagaaa

SEQ ID NO: 3680614 - RNA, 19 nt, Human
ugccuguugggccaggagc

SEQ ID NO: 3680615 - RNA, 20 nt, Human
ugccuguugggccaggagcc

SEQ ID NO: 3680616 - RNA, 16 nt, Human
ugccuguuucugauuu

SEQ ID NO: 3680617 - RNA, 20 nt, Human
ugccuuaaaaccaaagaggg

SEQ ID NO: 3680618 - RNA, 22 nt, Human
ugccuuaaaaccaaagagggcu

SEQ ID NO: 3680619 - RNA, 14 nt, Human
ugccuuaaaaugga

SEQ ID NO: 3680620 - RNA, 22 nt, Human
ugccuuaaacacucaccuucua

SEQ ID NO: 3680621 - RNA, 15 nt, Human
ugccuuaaagaaagu

SEQ ID NO: 3680622 - RNA, 24 nt, Human
ugccuuaaagacaagacagcauuu

SEQ ID NO: 3680623 - RNA, 16 nt, Human
ugccuuaacuggagcc

SEQ ID NO: 3680624 - RNA, 23 nt, Human
ugccuuaauaagaaugguugccu

SEQ ID NO: 3680625 - RNA, 20 nt, Human
ugccuuacccucauguucuu

SEQ ID NO: 3680626 - RNA, 16 nt, Human
ugccuuaccuccugcc

SEQ ID NO: 3680627 - RNA, 17 nt, Human
ugccuuaccuccugccc

SEQ ID NO: 3680628 - RNA, 23 nt, Human
ugccuuaccuccugcccaggaga

SEQ ID NO: 3680629 - RNA, 18 nt, Human
ugccuuacuuuguaugau

SEQ ID NO: 3680630 - RNA, 14 nt, Human
ugccuuagaaccuu

SEQ ID NO: 3680631 - RNA, 15 nt, Human
ugccuuagagccagg

SEQ ID NO: 3680632 - RNA, 17 nt, Human
ugccuuagagccaggca

SEQ ID NO: 3680633 - RNA, 13 nt, Human
ugccuuagcuuca

SEQ ID NO: 3680634 - RNA, 16 nt, Human
ugccuuaggccuaccu

SEQ ID NO: 3680635 - RNA, 16 nt, Human
ugccuuagucucaguu

SEQ ID NO: 3680636 - RNA, 14 nt, Human
ugccuuaucuugca

SEQ ID NO: 3680637 - RNA, 18 nt, Human
ugccuuauggaacacucu

SEQ ID NO: 3680638 - RNA, 22 nt, Human
ugccuuauggaacacucugaga

SEQ ID NO: 3680639 - RNA, 21 nt, Human
ugccuuauuagagugucuuuc

SEQ ID NO: 3680640 - RNA, 23 nt, Human
ugccuuauuagagugucuuucca

SEQ ID NO: 3680641 - RNA, 13 nt, Human
ugccuucagcucu

SEQ ID NO: 3680642 - RNA, 18 nt, Human
ugccuucagcucuacagc

SEQ ID NO: 3680643 - RNA, 19 nt, Human
ugccuuccacgcugucucc

SEQ ID NO: 3680644 - RNA, 21 nt, Human
ugccuuccacgcugucuccag

SEQ ID NO: 3680645 - RNA, 15 nt, Human
ugccuuccagauccu

SEQ ID NO: 3680646 - RNA, 13 nt, Human
ugccuuccauaau

SEQ ID NO: 3680647 - RNA, 14 nt, Human
ugccuucccuagcu

SEQ ID NO: 3680648 - RNA, 14 nt, Human
ugccuuccuaagcc

SEQ ID NO: 3680649 - RNA, 23 nt, Human
ugccuuccuaagccuguggcugu

SEQ ID NO: 3680650 - RNA, 14 nt, Human
ugccuuccuccugg

SEQ ID NO: 3680651 - RNA, 15 nt, Human
ugccuuccuccuggg

SEQ ID NO: 3680652 - RNA, 15 nt, Human
ugccuuccuguuuuu

SEQ ID NO: 3680653 - RNA, 12 nt, Human
ugccuuccuugc

SEQ ID NO: 3680654 - RNA, 16 nt, Human
ugccuuccuuucucca

SEQ ID NO: 3680655 - RNA, 19 nt, Human
ugccuuccuuucuccagga

SEQ ID NO: 3680656 - RNA, 23 nt, Human
ugccuuccuuucuccaggaccaa

SEQ ID NO: 3680657 - RNA, 21 nt, Human
ugccuucgauacaccgggccu

SEQ ID NO: 3680658 - RNA, 13 nt, Human
ugccuucgcuucu

SEQ ID NO: 3680659 - RNA, 16 nt, Human
ugccuucuaaaggugu

SEQ ID NO: 3680660 - RNA, 16 nt, Human
ugccuucuacuuuuaa

SEQ ID NO: 3680661 - RNA, 17 nt, Human
ugccuucucaacuccaa

SEQ ID NO: 3680662 - RNA, 17 nt, Human
ugccuucucaccagcug

SEQ ID NO: 3680663 - RNA, 17 nt, Human
ugccuucugacggcccu

SEQ ID NO: 3680664 - RNA, 20 nt, Human
ugccuucugacggcccugca

SEQ ID NO: 3680665 - RNA, 17 nt, Human
ugccuucuguccuggug

SEQ ID NO: 3680666 - RNA, 14 nt, Human
ugccuucugugggg

SEQ ID NO: 3680667 - RNA, 16 nt, Human
ugccuucuucacccag

SEQ ID NO: 3680668 - RNA, 14 nt, Human
ugccuucuucaggg

SEQ ID NO: 3680669 - RNA, 18 nt, Human
ugccuucuucagggccug

SEQ ID NO: 3680670 - RNA, 19 nt, Human
ugccuucuucuuuuugcug

SEQ ID NO: 3680671 - RNA, 22 nt, Human
ugccuucuucuuuuugcuguug

SEQ ID NO: 3680672 - RNA, 13 nt, Human
ugccuucuuugaa

SEQ ID NO: 3680673 - RNA, 17 nt, Human
ugccuucuuugaagaag

SEQ ID NO: 3680674 - RNA, 20 nt, Human
ugccuucuuugaagaaggug

SEQ ID NO: 3680675 - RNA, 15 nt, Human
ugccuugaaccacuu

SEQ ID NO: 3680676 - RNA, 21 nt, Human
ugccuugaaccacuucccuca

SEQ ID NO: 3680677 - RNA, 18 nt, Human
ugccuugaaccugugagu

SEQ ID NO: 3680678 - RNA, 21 nt, Human
ugccuugacaaacuucuuuca

SEQ ID NO: 3680679 - RNA, 15 nt, Human
ugccuugaugauuua

SEQ ID NO: 3680680 - RNA, 23 nt, Human
ugccuugcccacuccugcucugc

SEQ ID NO: 3680681 - RNA, 22 nt, Human
ugccuugcuguuggucaugugg

SEQ ID NO: 3680682 - RNA, 13 nt, Human
ugccuugcuguuu

SEQ ID NO: 3680683 - RNA, 21 nt, Human
ugccuuggagggucccaagcu

SEQ ID NO: 3680684 - RNA, 17 nt, Human
ugccuuggcucagacau

SEQ ID NO: 3680685 - RNA, 13 nt, Human
ugccuuggcuuca

SEQ ID NO: 3680686 - RNA, 16 nt, Human
ugccuuggggacaaga

SEQ ID NO: 3680687 - RNA, 23 nt, Human
ugccuuggggaggacaaaacuuc

SEQ ID NO: 3680688 - RNA, 23 nt, Human
ugccuugguuuuuacugcucuga

SEQ ID NO: 3680689 - RNA, 15 nt, Human
ugccuugugcuguua

SEQ ID NO: 3680690 - RNA, 16 nt, Human
ugccuuuaaaguauga

SEQ ID NO: 3680691 - RNA, 16 nt, Human
ugccuuuagaaaauau

SEQ ID NO: 3680692 - RNA, 23 nt, Human
ugccuuuagaaaauauaaguaaa

SEQ ID NO: 3680693 - RNA, 17 nt, Human
ugccuuucaaauuuaga

SEQ ID NO: 3680694 - RNA, 16 nt, Human
ugccuuucaggaucua

SEQ ID NO: 3680695 - RNA, 19 nt, Human
ugccuuucaggaucuauuu

SEQ ID NO: 3680696 - RNA, 21 nt, Human
ugccuuuccauccauggccag

SEQ ID NO: 3680697 - RNA, 10 nt, Human
ugccuuuccu

SEQ ID NO: 3680698 - RNA, 12 nt, Human
ugccuuuccugu

SEQ ID NO: 3680699 - RNA, 16 nt, Human
ugccuuuccuguucag

SEQ ID NO: 3680700 - RNA, 20 nt, Human
ugccuuuccuguucagcauu

SEQ ID NO: 3680701 - RNA, 11 nt, Human
ugccuuucugu

SEQ ID NO: 3680702 - RNA, 16 nt, Human
ugccuuucuguguuua

SEQ ID NO: 3680703 - RNA, 13 nt, Human
ugccuuugaagag

SEQ ID NO: 3680704 - RNA, 13 nt, Human
ugccuuugaccug

SEQ ID NO: 3680705 - RNA, 17 nt, Human
ugccuuugaccugccuc

SEQ ID NO: 3680706 - RNA, 21 nt, Human
ugccuuugagacaguuucuua

SEQ ID NO: 3680707 - RNA, 19 nt, Human
ugccuuugaguuuccucag

SEQ ID NO: 3680708 - RNA, 14 nt, Human
ugccuuugcagaaa

SEQ ID NO: 3680709 - RNA, 15 nt, Human
ugccuuugcagaaac

SEQ ID NO: 3680710 - RNA, 17 nt, Human
ugccuuugcagaaacag

SEQ ID NO: 3680711 - RNA, 16 nt, Human
ugccuuugccagguga

SEQ ID NO: 3680712 - RNA, 17 nt, Human
ugccuuugccaggugac

SEQ ID NO: 3680713 - RNA, 16 nt, Human
ugccuuugccuccaga

SEQ ID NO: 3680714 - RNA, 17 nt, Human
ugccuuugcucuggucu

SEQ ID NO: 3680715 - RNA, 15 nt, Human
ugccuuugggagcag

SEQ ID NO: 3680716 - RNA, 13 nt, Human
ugaugcaugucuu

SEQ ID NO: 3680717 - RNA, 21 nt, Human
ugaugccaaaaaaaaauacau

SEQ ID NO: 3680718 - RNA, 15 nt, Human
ugaugccaaccucug

SEQ ID NO: 3680719 - RNA, 15 nt, Human
ugaugccaaguuguu

SEQ ID NO: 3680720 - RNA, 21 nt, Human
ugaugccaaguuguuugagaa

SEQ ID NO: 3680721 - RNA, 18 nt, Human
ugaugccacacagagugg

SEQ ID NO: 3680722 - RNA, 19 nt, Human
ugaugccagguucuauuug

SEQ ID NO: 3680723 - RNA, 20 nt, Human
ugaugcccugcuccagggag

SEQ ID NO: 3680724 - RNA, 11 nt, Human
ugaugccuggc

SEQ ID NO: 3680725 - RNA, 15 nt, Human
ugaugccugugaacu

SEQ ID NO: 3680726 - RNA, 20 nt, Human
ugaugcuaaaaccugaaauu

SEQ ID NO: 3680727 - RNA, 20 nt, Human
ugaugcuacaggauuugaaa

SEQ ID NO: 3680728 - RNA, 15 nt, Human
ugaugcucaggcuug

SEQ ID NO: 3680729 - RNA, 15 nt, Human
ugaugcucccucccc

SEQ ID NO: 3680730 - RNA, 17 nt, Human
ugaugcucccuccccug

SEQ ID NO: 3680731 - RNA, 22 nt, Human
ugaugcucccuccccugcccug

SEQ ID NO: 3680732 - RNA, 23 nt, Human
ugaugcucccuccccugcccugg

SEQ ID NO: 3680733 - RNA, 15 nt, Human
ugaugcugccccuca

SEQ ID NO: 3680734 - RNA, 15 nt, Human
ugaugcuggaugcuc

SEQ ID NO: 3680735 - RNA, 20 nt, Human
ugaugcuggaugcuccuucc

SEQ ID NO: 3680736 - RNA, 20 nt, Human
ugaugcugggcugggugcga

SEQ ID NO: 3680737 - RNA, 16 nt, Human
ugaugcuucuucagag

SEQ ID NO: 3680738 - RNA, 17 nt, Human
ugaugcuucuucagaga

SEQ ID NO: 3680739 - RNA, 19 nt, Human
ugaugcuucuucagagacu

SEQ ID NO: 3680740 - RNA, 20 nt, Human
ugauggacccaaugcacaca

SEQ ID NO: 3680741 - RNA, 21 nt, Human
ugauggagguuucauacucua

SEQ ID NO: 3680742 - RNA, 17 nt, Human
ugauggcaauuuuguaa

SEQ ID NO: 3680743 - RNA, 22 nt, Human
ugauggcaccacugcacuccag

SEQ ID NO: 3680744 - RNA, 20 nt, Human
ugauggcagccauagugcau

SEQ ID NO: 3680745 - RNA, 20 nt, Human
ugauggccuuaauuuccuuu

SEQ ID NO: 3680746 - RNA, 19 nt, Human
ugauggcuaacuuacaaag

SEQ ID NO: 3680747 - RNA, 13 nt, Human
ugauggcuucucc

SEQ ID NO: 3680748 - RNA, 15 nt, Human
ugauggcuucuccag

SEQ ID NO: 3680749 - RNA, 19 nt, Human
ugaugggaugauugaagaa

SEQ ID NO: 3680750 - RNA, 16 nt, Human
ugaugggcacuugaga

SEQ ID NO: 3680751 - RNA, 15 nt, Human
ugauggggcccugcc

SEQ ID NO: 3680752 - RNA, 15 nt, Human
ugaugggucaguugu

SEQ ID NO: 3680753 - RNA, 15 nt, Human
ugauggucagagggc

SEQ ID NO: 3680754 - RNA, 21 nt, Human
ugauggucagcucccuucucu

SEQ ID NO: 3680755 - RNA, 15 nt, Human
ugauggugaugaaau

SEQ ID NO: 3680756 - RNA, 13 nt, Human
ugauggugcaaug

SEQ ID NO: 3680757 - RNA, 16 nt, Human
ugauggugcaaugacc

SEQ ID NO: 3680758 - RNA, 17 nt, Human
ugauggugcaaugaccu

SEQ ID NO: 3680759 - RNA, 15 nt, Human
ugauggugcugaccu

SEQ ID NO: 3680760 - RNA, 14 nt, Human
ugaugguuccccug

SEQ ID NO: 3680761 - RNA, 17 nt, Human
ugaugguucguucuguu

SEQ ID NO: 3680762 - RNA, 18 nt, Human
ugaugguuuauguugacc

SEQ ID NO: 3680763 - RNA, 21 nt, Human
ugauguaaggaugggcauggu

SEQ ID NO: 3680764 - RNA, 19 nt, Human
ugauguaaguuuaccuaug

SEQ ID NO: 3680765 - RNA, 22 nt, Human
ugauguaaucucucugcagcug

SEQ ID NO: 3680766 - RNA, 19 nt, Human
ugauguacagucugucaug

SEQ ID NO: 3680767 - RNA, 20 nt, Human
ugauguaccaugaaacaaag

SEQ ID NO: 3680768 - RNA, 12 nt, Human
ugauguacugua

SEQ ID NO: 3680769 - RNA, 13 nt, Human
ugauguauucuag

SEQ ID NO: 3680770 - RNA, 14 nt, Human
ugauguauucuagc

SEQ ID NO: 3680771 - RNA, 18 nt, Human
ugaugucaauaacaguau

SEQ ID NO: 3680772 - RNA, 17 nt, Human
ugaugucaauuucugug

SEQ ID NO: 3680773 - RNA, 23 nt, Human
ugaugucagcaguugcugguaaa

SEQ ID NO: 3680774 - RNA, 13 nt, Human
ugaugucaugugu

SEQ ID NO: 3680775 - RNA, 14 nt, Human
ugaugucauguguu

SEQ ID NO: 3680776 - RNA, 17 nt, Human
ugaugucauuaaugugu

SEQ ID NO: 3680777 - RNA, 16 nt, Human
ugaugucccuauggaa

SEQ ID NO: 3680778 - RNA, 20 nt, Human
ugaugucuccuaagcaccug

SEQ ID NO: 3680779 - RNA, 23 nt, Human
ugaugucuuuguuaagacugcug

SEQ ID NO: 3680780 - RNA, 22 nt, Human
ugaugugaagccaauucagaca

SEQ ID NO: 3680781 - RNA, 16 nt, Human
ugaugugacaauaaua

SEQ ID NO: 3680782 - RNA, 18 nt, Human
ugaugugacaauaauauu

SEQ ID NO: 3680783 - RNA, 12 nt, Human
ugaugugacauu

SEQ ID NO: 3680784 - RNA, 13 nt, Human
ugaugugacauuu

SEQ ID NO: 3680785 - RNA, 15 nt, Human
ugaugugacauuugu

SEQ ID NO: 3680786 - RNA, 18 nt, Human
ugaugugacauuugucau

SEQ ID NO: 3680787 - RNA, 16 nt, Human
ugaugugcaaaaauuu

SEQ ID NO: 3680788 - RNA, 19 nt, Human
ugaugugcacguaaaguac

SEQ ID NO: 3680789 - RNA, 16 nt, Human
ugaugugccugcuuca

SEQ ID NO: 3680790 - RNA, 19 nt, Human
ugaugugcucaucagaaac

SEQ ID NO: 3680791 - RNA, 16 nt, Human
ugauguggugaaaagc

SEQ ID NO: 3680792 - RNA, 13 nt, Human
ugauguguacauc

SEQ ID NO: 3680793 - RNA, 22 nt, Human
ugauguguuguucuuggcaaua

SEQ ID NO: 3680794 - RNA, 13 nt, Human
ugauguuaaaaaa

SEQ ID NO: 3680795 - RNA, 23 nt, Human
ugauguuaaaaaaauaagaagaa

SEQ ID NO: 3680796 - RNA, 14 nt, Human
ugauguuaaaauuc

SEQ ID NO: 3680797 - RNA, 10 nt, Human
ugauguuaac

SEQ ID NO: 3680798 - RNA, 11 nt, Human
ugauguuaaca

SEQ ID NO: 3680799 - RNA, 15 nt, Human
ugauguuaacacauu

SEQ ID NO: 3680800 - RNA, 20 nt, Human
ugauguuaacacauuuugua

SEQ ID NO: 3680801 - RNA, 15 nt, Human
ugauguucaguguaa

SEQ ID NO: 3680802 - RNA, 21 nt, Human
ugauguucaguguaauuucuu

SEQ ID NO: 3680803 - RNA, 17 nt, Human
ugauguucuaaggcucu

SEQ ID NO: 3680804 - RNA, 18 nt, Human
ugauguucuaaggcucug

SEQ ID NO: 3680805 - RNA, 20 nt, Human
ugauguucuaaggcucugag

SEQ ID NO: 3680806 - RNA, 22 nt, Human
ugauguucuaaggcucugagag

SEQ ID NO: 3680807 - RNA, 22 nt, Human
ugauguuuagaaacacaacuau

SEQ ID NO: 3680808 - RNA, 13 nt, Human
ugauguuucauuu

SEQ ID NO: 3680809 - RNA, 11 nt, Human
ugauguuugug

SEQ ID NO: 3680810 - RNA, 19 nt, Human
ugauguuuguggccucaga

SEQ ID NO: 3680811 - RNA, 20 nt, Human
ugauguuuguggccucagaa

SEQ ID NO: 3680812 - RNA, 21 nt, Human
ugauguuuuaaggaugcuugu

SEQ ID NO: 3680813 - RNA, 17 nt, Human
ugauguuuuuaaaaucu

SEQ ID NO: 3680814 - RNA, 15 nt, Human
ugauguuuuuaugau

SEQ ID NO: 3680815 - RNA, 15 nt, Human
ugauuaaaaauauca

SEQ ID NO: 3680816 - RNA, 19 nt, Human
ugauuaaaaauaucaaauu

SEQ ID NO: 3680817 - RNA, 22 nt, Human
ugauuaaaaauaucaaauuaau

SEQ ID NO: 3680818 - RNA, 23 nt, Human
ugauuaaaaugcuuccucccagc

SEQ ID NO: 3680819 - RNA, 15 nt, Human
ugauuaaagaugagc

SEQ ID NO: 3680820 - RNA, 22 nt, Human
ugauuaaagaugagcuuugucu

SEQ ID NO: 3680821 - RNA, 19 nt, Human
ugauuaaauaagauucuaa

SEQ ID NO: 3680822 - RNA, 20 nt, Human
ugauuaaauaagauucuaac

SEQ ID NO: 3680823 - RNA, 17 nt, Human
ugauuaacaaauaugcu

SEQ ID NO: 3680824 - RNA, 19 nt, Human
ugauuaaccacuucagcug

SEQ ID NO: 3680825 - RNA, 20 nt, Human
ugauuaaggucucucuuugg

SEQ ID NO: 3680826 - RNA, 23 nt, Human
ugauuaaguaaugauaacuggaa

SEQ ID NO: 3680827 - RNA, 16 nt, Human
ugauuaauccagaaua

SEQ ID NO: 3680828 - RNA, 17 nt, Human
ugauuaauccagaauaa

SEQ ID NO: 3680829 - RNA, 14 nt, Human
ugauuacucuuuga

SEQ ID NO: 3680830 - RNA, 16 nt, Human
ugauuacugucaauaa

SEQ ID NO: 3680831 - RNA, 13 nt, Human
ugauuagacagaa

SEQ ID NO: 3680832 - RNA, 15 nt, Human
ugauuagacagaaca

SEQ ID NO: 3680833 - RNA, 17 nt, Human
ugauuagacagaacacc

SEQ ID NO: 3680834 - RNA, 13 nt, Human
ugauuagcaaguu

SEQ ID NO: 3680835 - RNA, 19 nt, Human
ugauuagcuuugucacugu

SEQ ID NO: 3680836 - RNA, 14 nt, Human
ugauuagcuuugug

SEQ ID NO: 3680837 - RNA, 16 nt, Human
ugauuagcuuuguguu

SEQ ID NO: 3680838 - RNA, 16 nt, Human
ugauuaguaaagaaau

SEQ ID NO: 3680839 - RNA, 17 nt, Human
ugauuaguaaagaaaug

SEQ ID NO: 3680840 - RNA, 19 nt, Human
ugauuaguuuucuuguugc

SEQ ID NO: 3680841 - RNA, 22 nt, Human
ugauuauuuaagacuaaaaguu

SEQ ID NO: 3680842 - RNA, 15 nt, Human
ugauuauuucacuuu

SEQ ID NO: 3680843 - RNA, 16 nt, Human
ugauuauuucacuuua

SEQ ID NO: 3680844 - RNA, 23 nt, Human
ugauuauuucacuuuagaugcug

SEQ ID NO: 3680845 - RNA, 14 nt, Human
ugauuauuugcaug

SEQ ID NO: 3680846 - RNA, 15 nt, Human
ugauuauuugcaugu

SEQ ID NO: 3680847 - RNA, 19 nt, Human
ugauuauuuucuucaucca

SEQ ID NO: 3680848 - RNA, 21 nt, Human
ugauucaaucuguaaacugug

SEQ ID NO: 3680849 - RNA, 22 nt, Human
ugauucaaucuguaaacugugu

SEQ ID NO: 3680850 - RNA, 19 nt, Human
ugauucaauuugauguggu

SEQ ID NO: 3680851 - RNA, 12 nt, Human
ugauucacagug

SEQ ID NO: 3680852 - RNA, 16 nt, Human
ugauucacaucucauu

SEQ ID NO: 3680853 - RNA, 13 nt, Human
ugauucacauguu

SEQ ID NO: 3680854 - RNA, 14 nt, Human
ugauucacauguuu

SEQ ID NO: 3680855 - RNA, 15 nt, Human
ugauucacauguuuu

SEQ ID NO: 3680856 - RNA, 17 nt, Human
ugauucacauguuuuca

SEQ ID NO: 3680857 - RNA, 21 nt, Human
ugauucacauguuuucaaaug

SEQ ID NO: 3680858 - RNA, 12 nt, Human
ugauucacugca

SEQ ID NO: 3680859 - RNA, 17 nt, Human
ugauucacugcauggcu

SEQ ID NO: 3680860 - RNA, 20 nt, Human
ugauucagacagcugccugg

SEQ ID NO: 3680861 - RNA, 13 nt, Human
ugauucagcucug

SEQ ID NO: 3680862 - RNA, 14 nt, Human
ugauucagucacau

SEQ ID NO: 3680863 - RNA, 15 nt, Human
ugauucagucacaug

SEQ ID NO: 3680864 - RNA, 21 nt, Human
ugauucaguguuaaaugugau

SEQ ID NO: 3680865 - RNA, 17 nt, Human
ugauucauaauaaauau

SEQ ID NO: 3680866 - RNA, 16 nt, Human
ugauucauaaugacuu

SEQ ID NO: 3680867 - RNA, 21 nt, Human
ugauucauaaugacuuaagca

SEQ ID NO: 3680868 - RNA, 20 nt, Human
ugauuccacuacaccuggcu

SEQ ID NO: 3680869 - RNA, 22 nt, Human
ugauuccacuacaccuggcuga

SEQ ID NO: 3680870 - RNA, 13 nt, Human
ugauuccaucucc

SEQ ID NO: 3680871 - RNA, 15 nt, Human
ugauucccaagcucu

SEQ ID NO: 3680872 - RNA, 19 nt, Human
ugauucccaagcucugcuc

SEQ ID NO: 3680873 - RNA, 18 nt, Human
ugauuccuuccuguucug

SEQ ID NO: 3680874 - RNA, 20 nt, Human
ugauuccuuccuguucugaa

SEQ ID NO: 3680875 - RNA, 17 nt, Human
ugauuccuuuuuucaaa

SEQ ID NO: 3680876 - RNA, 23 nt, Human
ugauucgagcuauauuuaaguau

SEQ ID NO: 3680877 - RNA, 16 nt, Human
ugauucgcccaaagcc

SEQ ID NO: 3680878 - RNA, 22 nt, Human
ugauucgcccaaagccagacag

SEQ ID NO: 3680879 - RNA, 17 nt, Human
ugauucuaaugucuuca

SEQ ID NO: 3680880 - RNA, 21 nt, Human
ugauucuauuuauauguacau

SEQ ID NO: 3680881 - RNA, 13 nt, Human
ugauucucaugcc

SEQ ID NO: 3680882 - RNA, 14 nt, Human
ugauucucaugccu

SEQ ID NO: 3680883 - RNA, 15 nt, Human
ugauucuccugccuc

SEQ ID NO: 3680884 - RNA, 13 nt, Human
ugauucuccuuca

SEQ ID NO: 3680885 - RNA, 14 nt, Human
ugauucuccuucag

SEQ ID NO: 3680886 - RNA, 18 nt, Human
ugauucuccuucagcccu

SEQ ID NO: 3680887 - RNA, 19 nt, Human
ugauucuccuuuuaugugu

SEQ ID NO: 3680888 - RNA, 16 nt, Human
ugauucugcaguaaau

SEQ ID NO: 3680889 - RNA, 13 nt, Human
ugauucugccuuu

SEQ ID NO: 3680890 - RNA, 17 nt, Human
ugauucuggcuuuaagc

SEQ ID NO: 3680891 - RNA, 15 nt, Human
ugauucuugaguuua

SEQ ID NO: 3680892 - RNA, 23 nt, Human
ugauucuuuuuaaaguguuucug

SEQ ID NO: 3680893 - RNA, 22 nt, Human
ugauugaaaauaguaaaugcuu

SEQ ID NO: 3680894 - RNA, 14 nt, Human
ugauugaagaaaca

SEQ ID NO: 3680895 - RNA, 12 nt, Human
ugauugacagcu

SEQ ID NO: 3680896 - RNA, 21 nt, Human
ugauugacagcuuugcugcug

SEQ ID NO: 3680897 - RNA, 17 nt, Human
ugauugagaguaacuua

SEQ ID NO: 3680898 - RNA, 20 nt, Human
ugauugcagaauuguuuaga

SEQ ID NO: 3680899 - RNA, 18 nt, Human
ugauugccaagcucagga

SEQ ID NO: 3680900 - RNA, 17 nt, Human
ugauugccuuuuuauaa

SEQ ID NO: 3680901 - RNA, 16 nt, Human
ugauugcuaaauguaa

SEQ ID NO: 3680902 - RNA, 20 nt, Human
ugauugcuaaauguaacagu

SEQ ID NO: 3680903 - RNA, 19 nt, Human
ugauugcuguguccaacuc

SEQ ID NO: 3680904 - RNA, 20 nt, Human
ugauuggaagggcuuuucaa

SEQ ID NO: 3680905 - RNA, 19 nt, Human
ugauuggaauagcuucugg

SEQ ID NO: 3680906 - RNA, 17 nt, Human
ugauuggauuauucauu

SEQ ID NO: 3680907 - RNA, 18 nt, Human
ugauuggauuauucauuu

SEQ ID NO: 3680908 - RNA, 21 nt, Human
ugauuggauuauucauuuaaa

SEQ ID NO: 3680909 - RNA, 16 nt, Human
ugauuggcauauaaug

SEQ ID NO: 3680910 - RNA, 21 nt, Human
ugauuggcuuguagaauuguu

SEQ ID NO: 3680911 - RNA, 23 nt, Human
ugauuggcuuguagaauuguuau

SEQ ID NO: 3680912 - RNA, 18 nt, Human
ugauugggaaaacauuug

SEQ ID NO: 3680913 - RNA, 21 nt, Human
ugauugggaaaacauuugcug

SEQ ID NO: 3680914 - RNA, 16 nt, Human
ugauugggaauaaaua

SEQ ID NO: 3680915 - RNA, 21 nt, Human
ugauugggaauaaauaugccu

SEQ ID NO: 3680916 - RNA, 22 nt, Human
ugauugggacuggggcugaagg

SEQ ID NO: 3680917 - RNA, 17 nt, Human
ugauugggcacaucauu

SEQ ID NO: 3680918 - RNA, 19 nt, Human
ugauuggggaauuaaaagu

SEQ ID NO: 3680919 - RNA, 19 nt, Human
ugauuggugcaacccuuac

SEQ ID NO: 3680920 - RNA, 17 nt, Human
ugauuguaaaauagcuu

SEQ ID NO: 3680921 - RNA, 17 nt, Human
ugauuguaacguugcug

SEQ ID NO: 3680922 - RNA, 19 nt, Human
ugauuguacagaaucauug

SEQ ID NO: 3680923 - RNA, 14 nt, Human
ugauugucuuaaua

SEQ ID NO: 3680924 - RNA, 14 nt, Human
ugauuguuggcaca

SEQ ID NO: 3680925 - RNA, 14 nt, Human
ugauuuaaaacaug

SEQ ID NO: 3680926 - RNA, 15 nt, Human
ugauuuaaacacauu

SEQ ID NO: 3680927 - RNA, 13 nt, Human
ugauuuaaacuuc

SEQ ID NO: 3680928 - RNA, 21 nt, Human
ugauuuaaacuucuuaacugg

SEQ ID NO: 3680929 - RNA, 18 nt, Human
ugauuuaagacacuuuuu

SEQ ID NO: 3680930 - RNA, 13 nt, Human
ugauuuaauaaaa

SEQ ID NO: 3680931 - RNA, 17 nt, Human
ugauuuaauaaaauaau

SEQ ID NO: 3680932 - RNA, 19 nt, Human
ugauuuaauaaaauaauuc

SEQ ID NO: 3680933 - RNA, 21 nt, Human
ugauuuaauaaaauaauucua

SEQ ID NO: 3680934 - RNA, 14 nt, Human
ugauuuaauaacau

SEQ ID NO: 3680935 - RNA, 13 nt, Human
ugauuuaauagug

SEQ ID NO: 3680936 - RNA, 20 nt, Human
ugauuuaauaguguuaauca

SEQ ID NO: 3680937 - RNA, 22 nt, Human
ugauuuaauaguguuaaucaau

SEQ ID NO: 3680938 - RNA, 17 nt, Human
ugauuuaauaugcaaag

SEQ ID NO: 3680939 - RNA, 15 nt, Human
ugauuuaauauggau

SEQ ID NO: 3680940 - RNA, 15 nt, Human
ugauuuaauuugaaa

SEQ ID NO: 3680941 - RNA, 16 nt, Human
ugauuuacagcaagua

SEQ ID NO: 3680942 - RNA, 20 nt, Human
ugauuuacagcaaguagaua

SEQ ID NO: 3680943 - RNA, 15 nt, Human
ugauuuacaguuuca

SEQ ID NO: 3680944 - RNA, 16 nt, Human
ugauuuacgcucauug

SEQ ID NO: 3680945 - RNA, 21 nt, Human
ugauuuaggagaagccaggaa

SEQ ID NO: 3680946 - RNA, 22 nt, Human
ugauuuaggagaagccaggaau

SEQ ID NO: 3680947 - RNA, 13 nt, Human
ugauuuaugcaug

SEQ ID NO: 3680948 - RNA, 12 nt, Human
ugauuuauuaac

SEQ ID NO: 3680949 - RNA, 18 nt, Human
ugauuuauuuuguaugaa

SEQ ID NO: 3680950 - RNA, 15 nt, Human
ugauuucacaaauau

SEQ ID NO: 3680951 - RNA, 20 nt, Human
ugauuucacaaauauuaaaa

SEQ ID NO: 3680952 - RNA, 17 nt, Human
ugauuucagcucacugc

SEQ ID NO: 3680953 - RNA, 19 nt, Human
ugauuucaguucuaggaaa

SEQ ID NO: 3680954 - RNA, 20 nt, Human
ugauuucaguucuaggaaaa

SEQ ID NO: 3680955 - RNA, 15 nt, Human
ugauuucauuaauac

SEQ ID NO: 3680956 - RNA, 14 nt, Human
ugauuuccaaagag

SEQ ID NO: 3680957 - RNA, 18 nt, Human
ugauuuccaaagagaaaa

SEQ ID NO: 3680958 - RNA, 16 nt, Human
ugauuuccaaguaaua

SEQ ID NO: 3680959 - RNA, 17 nt, Human
ugauuuccccuuuugca

SEQ ID NO: 3680960 - RNA, 23 nt, Human
ugauuucccguggccccagccug

SEQ ID NO: 3680961 - RNA, 13 nt, Human
ugauuuccuugaa

SEQ ID NO: 3680962 - RNA, 17 nt, Human
ugauuuccuugaaugug

SEQ ID NO: 3680963 - RNA, 19 nt, Human
ugauuuccuugaauguggc

SEQ ID NO: 3680964 - RNA, 23 nt, Human
ugauuuccuugaauguggcuuga

SEQ ID NO: 3680965 - RNA, 14 nt, Human
ugauuucuauucaa

SEQ ID NO: 3680966 - RNA, 17 nt, Human
ugauuucugccuuccuu

SEQ ID NO: 3680967 - RNA, 22 nt, Human
ugauuucuuaggggaaggagaa

SEQ ID NO: 3680968 - RNA, 20 nt, Human
ugauuucuuuaaaagaauga

SEQ ID NO: 3680969 - RNA, 21 nt, Human
ugauuucuuuaaaagaaugac

SEQ ID NO: 3680970 - RNA, 20 nt, Human
ugauuucuuuucuuccuggc

SEQ ID NO: 3680971 - RNA, 21 nt, Human
ugauuucuuuucuuccuggcu

SEQ ID NO: 3680972 - RNA, 14 nt, Human
ugauuugacuguuu

SEQ ID NO: 3680973 - RNA, 13 nt, Human
ugauuugagauuu

SEQ ID NO: 3680974 - RNA, 14 nt, Human
ugauuugagauuuu

SEQ ID NO: 3680975 - RNA, 11 nt, Human
ugauuugcaau

SEQ ID NO: 3680976 - RNA, 12 nt, Human
ugauuuggaaaa

SEQ ID NO: 3680977 - RNA, 20 nt, Human
ugauuugggcugaauguaug

SEQ ID NO: 3680978 - RNA, 17 nt, Human
ugauuuggggauauuuu

SEQ ID NO: 3680979 - RNA, 13 nt, Human
ugauuuggugacc

SEQ ID NO: 3680980 - RNA, 14 nt, Human
ugauuuuaaaaugu

SEQ ID NO: 3680981 - RNA, 22 nt, Human
ugauuuuaaaauguacauguau

SEQ ID NO: 3680982 - RNA, 17 nt, Human
ugauuuuaaauguguga

SEQ ID NO: 3680983 - RNA, 19 nt, Human
ugauuuuaagaauccaaac

SEQ ID NO: 3680984 - RNA, 16 nt, Human
ugauuuuaauaauaua

SEQ ID NO: 3680985 - RNA, 19 nt, Human
ugauuuuagccuucucugu

SEQ ID NO: 3680986 - RNA, 22 nt, Human
ugauuuuaggagcuaaggcucu

SEQ ID NO: 3680987 - RNA, 16 nt, Human
ugauuuuaucugugaa

SEQ ID NO: 3680988 - RNA, 12 nt, Human
ugauuuuaugau

SEQ ID NO: 3680989 - RNA, 13 nt, Human
ugauuuuauucuu

SEQ ID NO: 3680990 - RNA, 20 nt, Human
ugauuuucaaagcuuuuucc

SEQ ID NO: 3680991 - RNA, 13 nt, Human
ugauuuucuggau

SEQ ID NO: 3680992 - RNA, 15 nt, Human
ugauuuugaaaccau

SEQ ID NO: 3680993 - RNA, 15 nt, Human
ugauuuugaaaucau

SEQ ID NO: 3680994 - RNA, 20 nt, Human
ugauuuuuagaugagauugu

SEQ ID NO: 3680995 - RNA, 14 nt, Human
ugauuuuuauccaa

SEQ ID NO: 3680996 - RNA, 22 nt, Human
ugauuuuucuaaccuugaaugc

SEQ ID NO: 3680997 - RNA, 19 nt, Human
ugauuuuucuggagguuga

SEQ ID NO: 3680998 - RNA, 14 nt, Human
ugauuuuucuuuac

SEQ ID NO: 3680999 - RNA, 18 nt, Human
ugauuuuuuuuucauaca

SEQ ID NO: 3681000 - RNA, 22 nt, Human
ugauuuuuuuuucauacacuua

SEQ ID NO: 3681001 - RNA, 17 nt, Human
ugauuuuuuuuuccuuc

SEQ ID NO: 3681002 - RNA, 22 nt, Human
ugauuuuuuuuuuuuuccuguc

SEQ ID NO: 3681003 - RNA, 21 nt, Human
ugauuuuuuuuuuuuuuuccu

SEQ ID NO: 3681004 - RNA, 21 nt, Human
ugcaaaaaaucuuaauacugu

SEQ ID NO: 3681005 - RNA, 14 nt, Human
ugcaaaaaggguca

SEQ ID NO: 3681006 - RNA, 14 nt, Human
ugcaaaaauaauca

SEQ ID NO: 3681007 - RNA, 12 nt, Human
ugcaaaaaugga

SEQ ID NO: 3681008 - RNA, 23 nt, Human
ugcaaaacagcguuuaagacugu

SEQ ID NO: 3681009 - RNA, 18 nt, Human
ugcaaaacaugcuaccug

SEQ ID NO: 3681010 - RNA, 19 nt, Human
ugcaaaaccuuuuacuggu

SEQ ID NO: 3681011 - RNA, 15 nt, Human
ugcaaaagcuucaaa

SEQ ID NO: 3681012 - RNA, 12 nt, Human
ugcaaaauacau

SEQ ID NO: 3681013 - RNA, 14 nt, Human
ugcaaaauacauga

SEQ ID NO: 3681014 - RNA, 17 nt, Human
ugcaaaaugagacccuc

SEQ ID NO: 3681015 - RNA, 18 nt, Human
ugcaaaaugaggaaugua

SEQ ID NO: 3681016 - RNA, 19 nt, Human
ugagccagucccaggggca

SEQ ID NO: 3681017 - RNA, 23 nt, Human
ugagccaguucaguaccuggagg

SEQ ID NO: 3681018 - RNA, 20 nt, Human
ugagcccacugcccaccccc

SEQ ID NO: 3681019 - RNA, 21 nt, Human
ugagcccacugcccacccccu

SEQ ID NO: 3681020 - RNA, 18 nt, Human
ugagcccagcccuguucu

SEQ ID NO: 3681021 - RNA, 12 nt, Human
ugagcccaggga

SEQ ID NO: 3681022 - RNA, 21 nt, Human
ugagcccauguucugccccca

SEQ ID NO: 3681023 - RNA, 17 nt, Human
ugagccccaaguccuga

SEQ ID NO: 3681024 - RNA, 21 nt, Human
ugagccccaaguccugaagag

SEQ ID NO: 3681025 - RNA, 22 nt, Human
ugagccccaaguccugaagagg

SEQ ID NO: 3681026 - RNA, 23 nt, Human
ugagccccaaguccugaagaggc

SEQ ID NO: 3681027 - RNA, 16 nt, Human
ugagccccaucuucac

SEQ ID NO: 3681028 - RNA, 13 nt, Human
ugagcccccagcu

SEQ ID NO: 3681029 - RNA, 23 nt, Human
ugagccccgcagaccuccccagc

SEQ ID NO: 3681030 - RNA, 20 nt, Human
ugagccccgcccucuuccug

SEQ ID NO: 3681031 - RNA, 21 nt, Human
ugagccccgcccucuuccuga

SEQ ID NO: 3681032 - RNA, 13 nt, Human
ugagccccuggga

SEQ ID NO: 3681033 - RNA, 15 nt, Human
ugagccccugggacu

SEQ ID NO: 3681034 - RNA, 14 nt, Human
ugagccccuuccuu

SEQ ID NO: 3681035 - RNA, 17 nt, Human
ugagcccggaugcuucu

SEQ ID NO: 3681036 - RNA, 15 nt, Human
ugagcccgggcugcc

SEQ ID NO: 3681037 - RNA, 20 nt, Human
ugagcccgggcugccugggc

SEQ ID NO: 3681038 - RNA, 14 nt, Human
ugagcccucagaac

SEQ ID NO: 3681039 - RNA, 17 nt, Human
ugagcccucagaacccu

SEQ ID NO: 3681040 - RNA, 20 nt, Human
ugagcccucagaacccuugg

SEQ ID NO: 3681041 - RNA, 13 nt, Human
ugagcccucccca

SEQ ID NO: 3681042 - RNA, 16 nt, Human
ugagcccuccccagga

SEQ ID NO: 3681043 - RNA, 23 nt, Human
ugagccgagaucacgccacugca

SEQ ID NO: 3681044 - RNA, 14 nt, Human
ugagccgcagagaa

SEQ ID NO: 3681045 - RNA, 21 nt, Human
ugagccgcaucuucuccaucu

SEQ ID NO: 3681046 - RNA, 18 nt, Human
ugagccgcccaaggccuu

SEQ ID NO: 3681047 - RNA, 20 nt, Human
ugagccuaaaaauaaagcac

SEQ ID NO: 3681048 - RNA, 16 nt, Human
ugagccuacgcugaag

SEQ ID NO: 3681049 - RNA, 17 nt, Human
ugagccucagcauccug

SEQ ID NO: 3681050 - RNA, 21 nt, Human
ugagccucagcauccuggcac

SEQ ID NO: 3681051 - RNA, 12 nt, Human
ugagccucugcu

SEQ ID NO: 3681052 - RNA, 12 nt, Human
ugagccuggcca

SEQ ID NO: 3681053 - RNA, 19 nt, Human
ugagccugggaggucaagg

SEQ ID NO: 3681054 - RNA, 15 nt, Human
ugagccuugaacuuu

SEQ ID NO: 3681055 - RNA, 17 nt, Human
ugagccuugaacuuuga

SEQ ID NO: 3681056 - RNA, 16 nt, Human
ugagccuuuucccucu

SEQ ID NO: 3681057 - RNA, 17 nt, Human
ugagcgaggacauucuc

SEQ ID NO: 3681058 - RNA, 18 nt, Human
ugagcgccuccauccaag

SEQ ID NO: 3681059 - RNA, 20 nt, Human
ugagcgccugugcacacaca

SEQ ID NO: 3681060 - RNA, 22 nt, Human
ugagcgcuccugccgcagagcu

SEQ ID NO: 3681061 - RNA, 16 nt, Human
ugagcgggaggcagag

SEQ ID NO: 3681062 - RNA, 20 nt, Human
ugagcggugcuguccucagg

SEQ ID NO: 3681063 - RNA, 13 nt, Human
ugagcuacaaaug

SEQ ID NO: 3681064 - RNA, 24 nt, Human
ugagcuacugccgucagugcugug

SEQ ID NO: 3681065 - RNA, 19 nt, Human
ugagcuacuggauucuuau

SEQ ID NO: 3681066 - RNA, 16 nt, Human
ugagcuagaacccucu

SEQ ID NO: 3681067 - RNA, 17 nt, Human
ugagcuagaacccucug

SEQ ID NO: 3681068 - RNA, 15 nt, Human
ugagcuauguauuaa

SEQ ID NO: 3681069 - RNA, 21 nt, Human
ugagcuauuaaaacucagccu

SEQ ID NO: 3681070 - RNA, 19 nt, Human
ugagcuauuuccauuccag

SEQ ID NO: 3681071 - RNA, 17 nt, Human
ugagcucacaaggcagc

SEQ ID NO: 3681072 - RNA, 20 nt, Human
ugagcucacaaggcagcaag

SEQ ID NO: 3681073 - RNA, 23 nt, Human
ugagcucacaaggcagcaaggcc

SEQ ID NO: 3681074 - RNA, 23 nt, Human
ugagcucagaaaauaucccuccu

SEQ ID NO: 3681075 - RNA, 11 nt, Human
ugagcucagga

SEQ ID NO: 3681076 - RNA, 18 nt, Human
ugagcuccagacccccag

SEQ ID NO: 3681077 - RNA, 21 nt, Human
ugagcuccagacccccagcaa

SEQ ID NO: 3681078 - RNA, 16 nt, Human
ugagcuccaugugccc

SEQ ID NO: 3681079 - RNA, 20 nt, Human
ugagcucccacaagccugag

SEQ ID NO: 3681080 - RNA, 21 nt, Human
ugagcucccacaagccugagg

SEQ ID NO: 3681081 - RNA, 18 nt, Human
ugagcuccuguccccugc

SEQ ID NO: 3681082 - RNA, 21 nt, Human
ugagcuccuuaaggcucuuuu

SEQ ID NO: 3681083 - RNA, 21 nt, Human
ugagcucgguggacccaggga

SEQ ID NO: 3681084 - RNA, 12 nt, Human
ugagcucugaaa

SEQ ID NO: 3681085 - RNA, 12 nt, Human
ugagcucugaga

SEQ ID NO: 3681086 - RNA, 18 nt, Human
ugagcucugagaggcccu

SEQ ID NO: 3681087 - RNA, 18 nt, Human
ugagcucugcagcccagg

SEQ ID NO: 3681088 - RNA, 21 nt, Human
ugagcucugcagcccagggac

SEQ ID NO: 3681089 - RNA, 21 nt, Human
ugagcucuuccuaucccucuc

SEQ ID NO: 3681090 - RNA, 13 nt, Human
ugagcucuuguga

SEQ ID NO: 3681091 - RNA, 18 nt, Human
ugagcucuugugaggaaa

SEQ ID NO: 3681092 - RNA, 16 nt, Human
ugagcugagcagggag

SEQ ID NO: 3681093 - RNA, 16 nt, Human
ugagcugagccaggcu

SEQ ID NO: 3681094 - RNA, 17 nt, Human
ugagcugauauaaauuc

SEQ ID NO: 3681095 - RNA, 21 nt, Human
ugagcugauauaaauucugug

SEQ ID NO: 3681096 - RNA, 15 nt, Human
ugagcugcaccaggu

SEQ ID NO: 3681097 - RNA, 14 nt, Human
ugagcugccagugg

SEQ ID NO: 3681098 - RNA, 17 nt, Human
ugagcugcccacagcag

SEQ ID NO: 3681099 - RNA, 12 nt, Human
ugagcugccuuc

SEQ ID NO: 3681100 - RNA, 15 nt, Human
ugagcugccuucccu

SEQ ID NO: 3681101 - RNA, 17 nt, Human
ugagcugccuucccuag

SEQ ID NO: 3681102 - RNA, 18 nt, Human
ugagcugcuuuuuuugaa

SEQ ID NO: 3681103 - RNA, 18 nt, Human
ugagcuggaccucaccaa

SEQ ID NO: 3681104 - RNA, 10 nt, Human
ugagcuggcc

SEQ ID NO: 3681105 - RNA, 18 nt, Human
ugagcuggccucucuagc

SEQ ID NO: 3681106 - RNA, 21 nt, Human
ugagcuggccucucuagcaca

SEQ ID NO: 3681107 - RNA, 14 nt, Human
ugagcugggccgga

SEQ ID NO: 3681108 - RNA, 16 nt, Human
ugagcugucaacgaga

SEQ ID NO: 3681109 - RNA, 11 nt, Human
ugagcuguuuu

SEQ ID NO: 3681110 - RNA, 16 nt, Human
ugagcuuaaaauacaa

SEQ ID NO: 3681111 - RNA, 17 nt, Human
ugagcuuaaaauacaag

SEQ ID NO: 3681112 - RNA, 21 nt, Human
ugagcuuaaaauacaagacug

SEQ ID NO: 3681113 - RNA, 19 nt, Human
ugagcuuggccagaagggg

SEQ ID NO: 3681114 - RNA, 16 nt, Human
ugagcuuucugaacag

SEQ ID NO: 3681115 - RNA, 17 nt, Human
ugagcuuucugaacagc

SEQ ID NO: 3681116 - RNA, 20 nt, Human
ugagcuuucugaacagcugg

SEQ ID NO: 3681117 - RNA, 23 nt, Human
ugagcuuucugaacagcuggugu

SEQ ID NO: 3681118 - RNA, 19 nt, Human
ugagcuuucuuuuuaaagc

SEQ ID NO: 3681119 - RNA, 15 nt, Human
ugagcuuuggacaca

SEQ ID NO: 3681120 - RNA, 21 nt, Human
ugagcuuuggacacacacagc

SEQ ID NO: 3681121 - RNA, 16 nt, Human
ugaggaaacaacagcu

SEQ ID NO: 3681122 - RNA, 16 nt, Human
ugaggaaaggccagcu

SEQ ID NO: 3681123 - RNA, 19 nt, Human
ugaggaaaggccagcuggc

SEQ ID NO: 3681124 - RNA, 15 nt, Human
ugaggaaagucauug

SEQ ID NO: 3681125 - RNA, 21 nt, Human
ugaggaaagucauuggcuuua

SEQ ID NO: 3681126 - RNA, 19 nt, Human
ugaggaacuguacagaaaa

SEQ ID NO: 3681127 - RNA, 21 nt, Human
ugaggaacuguagaugaugua

SEQ ID NO: 3681128 - RNA, 17 nt, Human
ugaggaagaacggggcu

SEQ ID NO: 3681129 - RNA, 17 nt, Human
ugaggaagagggacugu

SEQ ID NO: 3681130 - RNA, 14 nt, Human
ugaggaagagucuu

SEQ ID NO: 3681131 - RNA, 14 nt, Human
ugaggaagccgcug

SEQ ID NO: 3681132 - RNA, 22 nt, Human
ugaggaagcgugaaggccgaga

SEQ ID NO: 3681133 - RNA, 20 nt, Human
ugaggaagcuccaguccugc

SEQ ID NO: 3681134 - RNA, 19 nt, Human
ugaggaauaauuauuuauu

SEQ ID NO: 3681135 - RNA, 19 nt, Human
ugaggaaucaacagggcag

SEQ ID NO: 3681136 - RNA, 16 nt, Human
ugaggaaugaugaagc

SEQ ID NO: 3681137 - RNA, 14 nt, Human
ugaggaauucugua

SEQ ID NO: 3681138 - RNA, 19 nt, Human
ugaggaauucuguauagau

SEQ ID NO: 3681139 - RNA, 22 nt, Human
ugaggacaaaguggaggagggc

SEQ ID NO: 3681140 - RNA, 19 nt, Human
ugaggacaaccauuccaga

SEQ ID NO: 3681141 - RNA, 22 nt, Human
ugaggacaagagaaaaaagcca

SEQ ID NO: 3681142 - RNA, 13 nt, Human
ugaggacacaugu

SEQ ID NO: 3681143 - RNA, 15 nt, Human
ugaggacacaugucc

SEQ ID NO: 3681144 - RNA, 21 nt, Human
ugaggacacuaaccacgcugg

SEQ ID NO: 3681145 - RNA, 20 nt, Human
ugaggacagaugccuccuuc

SEQ ID NO: 3681146 - RNA, 13 nt, Human
ugaggacagcugu

SEQ ID NO: 3681147 - RNA, 17 nt, Human
ugaggacauaaaucuuc

SEQ ID NO: 3681148 - RNA, 17 nt, Human
ugaggaccguaaggccu

SEQ ID NO: 3681149 - RNA, 16 nt, Human
ugaggacuauggaaau

SEQ ID NO: 3681150 - RNA, 15 nt, Human
ugaggagacacaccu

SEQ ID NO: 3681151 - RNA, 17 nt, Human
ugaggagagaaaauaua

SEQ ID NO: 3681152 - RNA, 18 nt, Human
ugaggagauucugccuuu

SEQ ID NO: 3681153 - RNA, 22 nt, Human
ugaggagcagcaggagggggga

SEQ ID NO: 3681154 - RNA, 16 nt, Human
ugaggagcagcuucag

SEQ ID NO: 3681155 - RNA, 20 nt, Human
ugaggagcccauacucagcc

SEQ ID NO: 3681156 - RNA, 21 nt, Human
ugaggagcccauacucagccu

SEQ ID NO: 3681157 - RNA, 23 nt, Human
ugaggagcccauacucagccugc

SEQ ID NO: 3681158 - RNA, 16 nt, Human
ugaggagccccagcua

SEQ ID NO: 3681159 - RNA, 11 nt, Human
ugaggagcugc

SEQ ID NO: 3681160 - RNA, 12 nt, Human
ugaggagcugcu

SEQ ID NO: 3681161 - RNA, 14 nt, Human
ugaggagcugcugg

SEQ ID NO: 3681162 - RNA, 15 nt, Human
ugaggagcugcuggc

SEQ ID NO: 3681163 - RNA, 13 nt, Human
ugaggagcugggg

SEQ ID NO: 3681164 - RNA, 13 nt, Human
ugaggaggaagga

SEQ ID NO: 3681165 - RNA, 18 nt, Human
ugaggaggaaggagagaa

SEQ ID NO: 3681166 - RNA, 21 nt, Human
ugaggaggaaggagagaaggg

SEQ ID NO: 3681167 - RNA, 23 nt, Human
ugaggaggaugucccugggccag

SEQ ID NO: 3681168 - RNA, 17 nt, Human
ugaggaggcagaaagca

SEQ ID NO: 3681169 - RNA, 23 nt, Human
ugaggaggcagaaagcagaggcu

SEQ ID NO: 3681170 - RNA, 24 nt, Human
ugaggaggcagaaagcagaggcug

SEQ ID NO: 3681171 - RNA, 16 nt, Human
ugaggaggccuccauc

SEQ ID NO: 3681172 - RNA, 23 nt, Human
ugaggaggccuugggcucugcug

SEQ ID NO: 3681173 - RNA, 12 nt, Human
ugaggaggggag

SEQ ID NO: 3681174 - RNA, 13 nt, Human
ugaggaggggagg

SEQ ID NO: 3681175 - RNA, 19 nt, Human
ugaggaggggcagguaaac

SEQ ID NO: 3681176 - RNA, 16 nt, Human
ugaggagucugagguc

SEQ ID NO: 3681177 - RNA, 17 nt, Human
ugaggagucugaggucc

SEQ ID NO: 3681178 - RNA, 22 nt, Human
ugaggagucugagguccugagc

SEQ ID NO: 3681179 - RNA, 13 nt, Human
ugaggaucagagu

SEQ ID NO: 3681180 - RNA, 14 nt, Human
ugaggaugaggccg

SEQ ID NO: 3681181 - RNA, 20 nt, Human
ugaggaugggaaggagggag

SEQ ID NO: 3681182 - RNA, 22 nt, Human
ugaggauguaaagaucaauaaa

SEQ ID NO: 3681183 - RNA, 17 nt, Human
ugaggaugucacucaga

SEQ ID NO: 3681184 - RNA, 17 nt, Human
ugaggauuaguuuagaa

SEQ ID NO: 3681185 - RNA, 21 nt, Human
ugaggauuaguuuagaacagg

SEQ ID NO: 3681186 - RNA, 16 nt, Human
ugaggcaagugugggc

SEQ ID NO: 3681187 - RNA, 21 nt, Human
ugaggcaaugucaggaacaga

SEQ ID NO: 3681188 - RNA, 22 nt, Human
ugaggcacgaaugaucuuucuu

SEQ ID NO: 3681189 - RNA, 13 nt, Human
ugaggcagaagaa

SEQ ID NO: 3681190 - RNA, 18 nt, Human
ugaggcagaagaauugaa

SEQ ID NO: 3681191 - RNA, 16 nt, Human
ugaggcagacagcagc

SEQ ID NO: 3681192 - RNA, 24 nt, Human
ugaggcagacagcagcucaggcac

SEQ ID NO: 3681193 - RNA, 20 nt, Human
ugaggcagcacgugcacaaa

SEQ ID NO: 3681194 - RNA, 12 nt, Human
ugaggcaggaga

SEQ ID NO: 3681195 - RNA, 13 nt, Human
ugaggcagggaag

SEQ ID NO: 3681196 - RNA, 23 nt, Human
ugaggcaucgcaauguaagacuc

SEQ ID NO: 3681197 - RNA, 17 nt, Human
ugaggcauugcacaggg

SEQ ID NO: 3681198 - RNA, 22 nt, Human
ugaggcauuugggugguaagag

SEQ ID NO: 3681199 - RNA, 12 nt, Human
ugaggccacacu

SEQ ID NO: 3681200 - RNA, 13 nt, Human
ugaggccacacuc

SEQ ID NO: 3681201 - RNA, 16 nt, Human
ugaggccacccagagg

SEQ ID NO: 3681202 - RNA, 18 nt, Human
ugaggccacugaagagga

SEQ ID NO: 3681203 - RNA, 14 nt, Human
ugaggccagagaca

SEQ ID NO: 3681204 - RNA, 16 nt, Human
ugaggccagagacaca

SEQ ID NO: 3681205 - RNA, 20 nt, Human
ugaggccagagacacaagcc

SEQ ID NO: 3681206 - RNA, 13 nt, Human
ugaggccagccug

SEQ ID NO: 3681207 - RNA, 16 nt, Human
ugaggccagccuggcc

SEQ ID NO: 3681208 - RNA, 21 nt, Human
ugaggccagccuggccuccug

SEQ ID NO: 3681209 - RNA, 22 nt, Human
ugaggccagccuggccuccugc

SEQ ID NO: 3681210 - RNA, 13 nt, Human
ugaggccaggagu

SEQ ID NO: 3681211 - RNA, 13 nt, Human
ugaggccagggca

SEQ ID NO: 3681212 - RNA, 14 nt, Human
ugaggccauggacu

SEQ ID NO: 3681213 - RNA, 12 nt, Human
ugaggcccagag

SEQ ID NO: 3681214 - RNA, 13 nt, Human
ugaggcccagagg

SEQ ID NO: 3681215 - RNA, 23 nt, Human
ugaggcccagagggccugcaagg

SEQ ID NO: 3681216 - RNA, 14 nt, Human
ugaggcccagggag

SEQ ID NO: 3681217 - RNA, 23 nt, Human
ugaggcccagggagaggccauga

SEQ ID NO: 3681218 - RNA, 17 nt, Human
ugaggcccuccacaccu

SEQ ID NO: 3681219 - RNA, 23 nt, Human
ugaggcccuccacaccugcggcc

SEQ ID NO: 3681220 - RNA, 14 nt, Human
ugaggcccugccca

SEQ ID NO: 3681221 - RNA, 18 nt, Human
ugaggcccuucucuccag

SEQ ID NO: 3681222 - RNA, 19 nt, Human
ugaggcccuucucuccagc

SEQ ID NO: 3681223 - RNA, 24 nt, Human
ugaggcccuucucuccagccccug

SEQ ID NO: 3681224 - RNA, 19 nt, Human
ugaggccgcuagaggccug

SEQ ID NO: 3681225 - RNA, 22 nt, Human
ugaggccgcuagaggccugagg

SEQ ID NO: 3681226 - RNA, 14 nt, Human
ugaggccguugcug

SEQ ID NO: 3681227 - RNA, 20 nt, Human
ugaggccguugcugacuuag

SEQ ID NO: 3681228 - RNA, 15 nt, Human
ugaggccucagugga

SEQ ID NO: 3681229 - RNA, 15 nt, Human
ugaggccucuuggac

SEQ ID NO: 3681230 - RNA, 23 nt, Human
ugaggccucuuggaccucugcuc

SEQ ID NO: 3681231 - RNA, 16 nt, Human
ugaggccugagaccca

SEQ ID NO: 3681232 - RNA, 19 nt, Human
ugaggccugagacccagga

SEQ ID NO: 3681233 - RNA, 20 nt, Human
ugaggccugagacccaggac

SEQ ID NO: 3681234 - RNA, 17 nt, Human
ugaggccugcccucagg

SEQ ID NO: 3681235 - RNA, 18 nt, Human
ugaggccugcccucaggg

SEQ ID NO: 3681236 - RNA, 17 nt, Human
ugaggccuggccaggca

SEQ ID NO: 3681237 - RNA, 19 nt, Human
ugaggccugucugugaccu

SEQ ID NO: 3681238 - RNA, 12 nt, Human
ugaggccuugcu

SEQ ID NO: 3681239 - RNA, 13 nt, Human
ugaggccuugcuc

SEQ ID NO: 3681240 - RNA, 21 nt, Human
ugaggcgagaagggcugcuuc

SEQ ID NO: 3681241 - RNA, 23 nt, Human
ugaggcggguggaucaccugagg

SEQ ID NO: 3681242 - RNA, 20 nt, Human
ugaggcggguggaucacgag

SEQ ID NO: 3681243 - RNA, 20 nt, Human
ugaggcguauguggcaaaau

SEQ ID NO: 3681244 - RNA, 21 nt, Human
ugaggcucaggggugugccug

SEQ ID NO: 3681245 - RNA, 15 nt, Human
ugaggcuccugugcu

SEQ ID NO: 3681246 - RNA, 18 nt, Human
ugaggcucuuucugggcc

SEQ ID NO: 3681247 - RNA, 22 nt, Human
ugaggcuggacuccagaucugc

SEQ ID NO: 3681248 - RNA, 15 nt, Human
ugaggcuggcacagg

SEQ ID NO: 3681249 - RNA, 16 nt, Human
ugaggcugggcucccu

SEQ ID NO: 3681250 - RNA, 12 nt, Human
ugaggcuguccu

SEQ ID NO: 3681251 - RNA, 20 nt, Human
ugaggcuugcugagaggggc

SEQ ID NO: 3681252 - RNA, 18 nt, Human
ugaggcuuucagguuuua

SEQ ID NO: 3681253 - RNA, 14 nt, Human
ugaggcuuuguguu

SEQ ID NO: 3681254 - RNA, 18 nt, Human
ugaggcuuuguguuguaa

SEQ ID NO: 3681255 - RNA, 21 nt, Human
ugagggaaagugcauaugaaa

SEQ ID NO: 3681256 - RNA, 22 nt, Human
ugagggaacagacaggagaaau

SEQ ID NO: 3681257 - RNA, 22 nt, Human
ugagggacgucagacuuggcuc

SEQ ID NO: 3681258 - RNA, 23 nt, Human
ugagggaggacaggcgggaggag

SEQ ID NO: 3681259 - RNA, 15 nt, Human
ugagggaggaccugg

SEQ ID NO: 3681260 - RNA, 19 nt, Human
ugagggaggaggccaccuc

SEQ ID NO: 3681261 - RNA, 14 nt, Human
ugagggauaagcaa

SEQ ID NO: 3681262 - RNA, 19 nt, Human
ugagggauacccaucccau

SEQ ID NO: 3681263 - RNA, 17 nt, Human
ugagggaucacagggcc

SEQ ID NO: 3681264 - RNA, 22 nt, Human
ugagggcagcagccagcccugc

SEQ ID NO: 3681265 - RNA, 11 nt, Human
ugagggcaguc

SEQ ID NO: 3681266 - RNA, 14 nt, Human
ugagggcagugcaa

SEQ ID NO: 3681267 - RNA, 15 nt, Human
ugagggcagugcaag

SEQ ID NO: 3681268 - RNA, 20 nt, Human
ugagggcaguucgcagccac

SEQ ID NO: 3681269 - RNA, 17 nt, Human
ugagggcccagagcagg

SEQ ID NO: 3681270 - RNA, 21 nt, Human
ugagggcccagagcaggaagc

SEQ ID NO: 3681271 - RNA, 15 nt, Human
ugagggccccucugc

SEQ ID NO: 3681272 - RNA, 17 nt, Human
ugagggccccucugccc

SEQ ID NO: 3681273 - RNA, 13 nt, Human
ugagggccugcug

SEQ ID NO: 3681274 - RNA, 18 nt, Human
ugagggccugcuggaggc

SEQ ID NO: 3681275 - RNA, 17 nt, Human
ugagggcgaggggaggg

SEQ ID NO: 3681276 - RNA, 13 nt, Human
ugagggcugcagu

SEQ ID NO: 3681277 - RNA, 15 nt, Human
ugaggggaccaggag

SEQ ID NO: 3681278 - RNA, 23 nt, Human
ugaggggagacagagcaaccccu

SEQ ID NO: 3681279 - RNA, 21 nt, Human
ugaggggaggaucacuggagc

SEQ ID NO: 3681280 - RNA, 22 nt, Human
ugaggggcaucugccccucccc

SEQ ID NO: 3681281 - RNA, 16 nt, Human
ugaggggcccgagcag

SEQ ID NO: 3681282 - RNA, 19 nt, Human
ugaggggcuaccaggaaag

SEQ ID NO: 3681283 - RNA, 18 nt, Human
ugagggguaaaagcugau

SEQ ID NO: 3681284 - RNA, 20 nt, Human
ugagggguauaucugggcug

SEQ ID NO: 3681285 - RNA, 20 nt, Human
ugaggggucuccaggaggag

SEQ ID NO: 3681286 - RNA, 17 nt, Human
ugagggguuccuccccu

SEQ ID NO: 3681287 - RNA, 18 nt, Human
ugaggguaauaaacuuag

SEQ ID NO: 3681288 - RNA, 14 nt, Human
ugaggguccugcag

SEQ ID NO: 3681289 - RNA, 18 nt, Human
ugaggguccugcagccug

SEQ ID NO: 3681290 - RNA, 19 nt, Human
ugaggguccugcagccugc

SEQ ID NO: 3681291 - RNA, 21 nt, Human
ugaggguccugcagccugcag

SEQ ID NO: 3681292 - RNA, 20 nt, Human
ugaggguugggcugguguca

SEQ ID NO: 3681293 - RNA, 19 nt, Human
ugaggucagagccugcagu

SEQ ID NO: 3681294 - RNA, 22 nt, Human
ugaggucagcacaucucaacag

SEQ ID NO: 3681295 - RNA, 16 nt, Human
ugaggucaggaguucc

SEQ ID NO: 3681296 - RNA, 21 nt, Human
ugagguccagcccuggcugaa

SEQ ID NO: 3681297 - RNA, 23 nt, Human
ugagguccagcccuggcugaagg

SEQ ID NO: 3681298 - RNA, 13 nt, Human
ugaggucccaggc

SEQ ID NO: 3681299 - RNA, 15 nt, Human
ugaggucccaggcag

SEQ ID NO: 3681300 - RNA, 17 nt, Human
ugaggucccaggcagag

SEQ ID NO: 3681301 - RNA, 16 nt, Human
ugagguccugggggcc

SEQ ID NO: 3681302 - RNA, 18 nt, Human
ugagguccugggggccug

SEQ ID NO: 3681303 - RNA, 23 nt, Human
ugaggucucgcugaugcugggcu

SEQ ID NO: 3681304 - RNA, 15 nt, Human
ugaggucugcucggc

SEQ ID NO: 3681305 - RNA, 13 nt, Human
ugaggucuguucc

SEQ ID NO: 3681306 - RNA, 16 nt, Human
ugaggucuguuccuuu

SEQ ID NO: 3681307 - RNA, 14 nt, Human
ugaggucuguucuu

SEQ ID NO: 3681308 - RNA, 20 nt, Human
ugaggucuguucuuuccaaa

SEQ ID NO: 3681309 - RNA, 19 nt, Human
ugaggucuuuugacaugug

SEQ ID NO: 3681310 - RNA, 20 nt, Human
ugaggucuuuugacaugugg

SEQ ID NO: 3681311 - RNA, 22 nt, Human
ugaggucuuuugacauguggaa

SEQ ID NO: 3681312 - RNA, 15 nt, Human
ugaggugaaagggag

SEQ ID NO: 3681313 - RNA, 21 nt, Human
ugaggugaugaagacagcccg

SEQ ID NO: 3681314 - RNA, 15 nt, Human
ugaggugcacuggga

SEQ ID NO: 3681315 - RNA, 19 nt, Human
ugaggugcacugggaggcu

SEQ ID NO: 3681316 - RNA, 22 nt, Human
ugaggugcccagcuagcugcag

SEQ ID NO: 3681317 - RNA, 13 nt, Human
ugaggugcccagg

SEQ ID NO: 3681318 - RNA, 14 nt, Human
ugaggugcccagga

SEQ ID NO: 3681319 - RNA, 17 nt, Human
ugaggugcccaggagaa

SEQ ID NO: 3681320 - RNA, 16 nt, Human
ugaggugccuguccca

SEQ ID NO: 3681321 - RNA, 17 nt, Human
ugaggugcugggaggga

SEQ ID NO: 3681322 - RNA, 16 nt, Human
ugagguggaagcccuc

SEQ ID NO: 3681323 - RNA, 18 nt, Human
ugagguggcacuuuuuca

SEQ ID NO: 3681324 - RNA, 21 nt, Human
ugagguggcacuuuuucauuu

SEQ ID NO: 3681325 - RNA, 12 nt, Human
ugaggugggagg

SEQ ID NO: 3681326 - RNA, 21 nt, Human
ugaggugggaggaucucuuga

SEQ ID NO: 3681327 - RNA, 18 nt, Human
ugaggugggagguggaag

SEQ ID NO: 3681328 - RNA, 21 nt, Human
ugaggugggagguggaagaag

SEQ ID NO: 3681329 - RNA, 15 nt, Human
ugaggugggcccagg

SEQ ID NO: 3681330 - RNA, 20 nt, Human
ugaggugggcccaggaccag

SEQ ID NO: 3681331 - RNA, 17 nt, Human
ugagguggucugaaugu

SEQ ID NO: 3681332 - RNA, 22 nt, Human
ugagguggucugaauguucuga

SEQ ID NO: 3681333 - RNA, 12 nt, Human
ugagguguacca

SEQ ID NO: 3681334 - RNA, 15 nt, Human
ugagguguccaacug

SEQ ID NO: 3681335 - RNA, 23 nt, Human
ugaggugugggggcugcagcaug

SEQ ID NO: 3681336 - RNA, 15 nt, Human
ugaggugugucacaa

SEQ ID NO: 3681337 - RNA, 12 nt, Human
ugagguuaggag

SEQ ID NO: 3681338 - RNA, 20 nt, Human
ugagguuccucugccugccc

SEQ ID NO: 3681339 - RNA, 21 nt, Human
ugagguuccucugccugcccc

SEQ ID NO: 3681340 - RNA, 22 nt, Human
ugagguuuuauuucauuuuuca

SEQ ID NO: 3681341 - RNA, 15 nt, Human
ugagguuuuuaagcc

SEQ ID NO: 3681342 - RNA, 21 nt, Human
ugaguaaaauagauuuuauaa

SEQ ID NO: 3681343 - RNA, 18 nt, Human
ugaguaacauuugcuguu

SEQ ID NO: 3681344 - RNA, 19 nt, Human
ugaguaacauuugcuguuu

SEQ ID NO: 3681345 - RNA, 15 nt, Human
ugaguaacuauuauu

SEQ ID NO: 3681346 - RNA, 17 nt, Human
ugaguaagaaaugcugc

SEQ ID NO: 3681347 - RNA, 13 nt, Human
ugaguaagagcug

SEQ ID NO: 3681348 - RNA, 14 nt, Human
ugaguaagagcugg

SEQ ID NO: 3681349 - RNA, 16 nt, Human
ugaguaagagcuggug

SEQ ID NO: 3681350 - RNA, 18 nt, Human
ugaguaagagcugguguc

SEQ ID NO: 3681351 - RNA, 21 nt, Human
ugaguaagagcuggugucuga

SEQ ID NO: 3681352 - RNA, 15 nt, Human
ugaguacagcagaaa

SEQ ID NO: 3681353 - RNA, 19 nt, Human
ugaguaccccugcuuuggg

SEQ ID NO: 3681354 - RNA, 16 nt, Human
ugaguacguugugcau

SEQ ID NO: 3681355 - RNA, 18 nt, Human
ugaguagauauuacuuua

SEQ ID NO: 3681356 - RNA, 19 nt, Human
ugaguagauccauuuccau

SEQ ID NO: 3681357 - RNA, 21 nt, Human
ugaguagauccauuuccauug

SEQ ID NO: 3681358 - RNA, 21 nt, Human
ugaguagaugcgcagccccau

SEQ ID NO: 3681359 - RNA, 13 nt, Human
ugaguagcuggau

SEQ ID NO: 3681360 - RNA, 15 nt, Human
ugaguaucagaauug

SEQ ID NO: 3681361 - RNA, 21 nt, Human
ugaguauccuuucaguguuau

SEQ ID NO: 3681362 - RNA, 15 nt, Human
ugaguaucuccucgc

SEQ ID NO: 3681363 - RNA, 21 nt, Human
ugaguaucuccucgcaagcug

SEQ ID NO: 3681364 - RNA, 20 nt, Human
ugaguauggagcagccugga

SEQ ID NO: 3681365 - RNA, 17 nt, Human
ugaguauguggaaggca

SEQ ID NO: 3681366 - RNA, 21 nt, Human
ugaguauuguuuaaaauguaa

SEQ ID NO: 3681367 - RNA, 15 nt, Human
ugagucaaaaaaucu

SEQ ID NO: 3681368 - RNA, 13 nt, Human
ugagucaaugugc

SEQ ID NO: 3681369 - RNA, 18 nt, Human
ugagucaaugugcagugu

SEQ ID NO: 3681370 - RNA, 23 nt, Human
ugagucacaaagaacauguagaa

SEQ ID NO: 3681371 - RNA, 14 nt, Human
ugagucaccaagcc

SEQ ID NO: 3681372 - RNA, 13 nt, Human
ugagucaccagga

SEQ ID NO: 3681373 - RNA, 22 nt, Human
ugagucacccuaccugugccug

SEQ ID NO: 3681374 - RNA, 21 nt, Human
ugagucagagccaugucuucu

SEQ ID NO: 3681375 - RNA, 20 nt, Human
ugagucagguuugaguagag

SEQ ID NO: 3681376 - RNA, 15 nt, Human
ugagucaucuguuag

SEQ ID NO: 3681377 - RNA, 21 nt, Human
ugagucaugaucucccugccg

SEQ ID NO: 3681378 - RNA, 20 nt, Human
ugaguccaaacuggaaugag

SEQ ID NO: 3681379 - RNA, 13 nt, Human
ugaguccagaagu

SEQ ID NO: 3681380 - RNA, 19 nt, Human
ugaguccauucucccaggu

SEQ ID NO: 3681381 - RNA, 22 nt, Human
ugaguccauucucccagguacc

SEQ ID NO: 3681382 - RNA, 16 nt, Human
ugagucccaggagcug

SEQ ID NO: 3681383 - RNA, 20 nt, Human
ugagucccaggagcugccca

SEQ ID NO: 3681384 - RNA, 21 nt, Human
ugagucccaggagcugcccag

SEQ ID NO: 3681385 - RNA, 13 nt, Human
ugagucccaggcu

SEQ ID NO: 3681386 - RNA, 16 nt, Human
ugagucccagugggag

SEQ ID NO: 3681387 - RNA, 19 nt, Human
ugagucccagugggaggcg

SEQ ID NO: 3681388 - RNA, 16 nt, Human
ugagucccuuccaggc

SEQ ID NO: 3681389 - RNA, 15 nt, Human
ugaguccuccagaac

SEQ ID NO: 3681390 - RNA, 17 nt, Human
ugaguccuggaugauac

SEQ ID NO: 3681391 - RNA, 11 nt, Human
ugaguccuggc

SEQ ID NO: 3681392 - RNA, 19 nt, Human
ugaguccuggcaugggaau

SEQ ID NO: 3681393 - RNA, 15 nt, Human
ugaguccuggcccaa

SEQ ID NO: 3681394 - RNA, 18 nt, Human
ugaguccuugaaaauauu

SEQ ID NO: 3681395 - RNA, 16 nt, Human
ugagucgaggacaggg

SEQ ID NO: 3681396 - RNA, 19 nt, Human
ugagucgaggacagggagg

SEQ ID NO: 3681397 - RNA, 17 nt, Human
ugagucguacagaaagc

SEQ ID NO: 3681398 - RNA, 15 nt, Human
ugagucuagauguuu

SEQ ID NO: 3681399 - RNA, 21 nt, Human
ugagucuguacuaaacaguaa

SEQ ID NO: 3681400 - RNA, 15 nt, Human
ugagucuguugugug

SEQ ID NO: 3681401 - RNA, 16 nt, Human
ugagucuguuuuguaa

SEQ ID NO: 3681402 - RNA, 18 nt, Human
ugagucuguuuuguaaag

SEQ ID NO: 3681403 - RNA, 17 nt, Human
ugagucuuggcggcagc

SEQ ID NO: 3681404 - RNA, 23 nt, Human
ugagucuuggcggcagcagccau

SEQ ID NO: 3681405 - RNA, 16 nt, Human
ugagucuuugguucua

SEQ ID NO: 3681406 - RNA, 18 nt, Human
ugagucuuugguucuaag

SEQ ID NO: 3681407 - RNA, 21 nt, Human
ugagucuuugguucuaaggac

SEQ ID NO: 3681408 - RNA, 13 nt, Human
ugagugagaauau

SEQ ID NO: 3681409 - RNA, 15 nt, Human
ugagugagaggggag

SEQ ID NO: 3681410 - RNA, 16 nt, Human
ugagugagccuggcuc

SEQ ID NO: 3681411 - RNA, 17 nt, Human
ugagugcagcucuggag

SEQ ID NO: 3681412 - RNA, 16 nt, Human
ugagugcaggcccacc

SEQ ID NO: 3681413 - RNA, 15 nt, Human
ugagugcaguccuga

SEQ ID NO: 3681414 - RNA, 14 nt, Human
ugagugcauguacu

SEQ ID NO: 3681415 - RNA, 17 nt, Human
ugagugccuuacacaau

SEQ ID NO: 3681416 - RNA, 19 nt, Human
ugagugcucugaucccucu

SEQ ID NO: 3681417 - RNA, 13 nt, Human
ugaguggacugga

SEQ ID NO: 3681418 - RNA, 20 nt, Human
ugaguggacuggaguggagc

SEQ ID NO: 3681419 - RNA, 14 nt, Human
ugaguggaguuacu

SEQ ID NO: 3681420 - RNA, 21 nt, Human
ugaguggcaggggacaggagu

SEQ ID NO: 3681421 - RNA, 14 nt, Human
ugaguggccaggga

SEQ ID NO: 3681422 - RNA, 21 nt, Human
ugagugggguuaucucugugu

SEQ ID NO: 3681423 - RNA, 18 nt, Human
ugagugucuuaauuaaaa

SEQ ID NO: 3681424 - RNA, 13 nt, Human
ugagugugacagg

SEQ ID NO: 3681425 - RNA, 15 nt, Human
ugagugugacagggc

SEQ ID NO: 3681426 - RNA, 19 nt, Human
ugaguguuuuaugagaaag

SEQ ID NO: 3681427 - RNA, 22 nt, Human
ugaguguuuuuacuacaguugu

SEQ ID NO: 3681428 - RNA, 16 nt, Human
ugaguuacagccuguu

SEQ ID NO: 3681429 - RNA, 15 nt, Human
ugaguuacugugcau

SEQ ID NO: 3681430 - RNA, 15 nt, Human
ugaguuacuuccuau

SEQ ID NO: 3681431 - RNA, 20 nt, Human
ugaguuauauguucacuguc

SEQ ID NO: 3681432 - RNA, 23 nt, Human
ugaguuaucaugaauuuuaaagu

SEQ ID NO: 3681433 - RNA, 15 nt, Human
ugaguuaucuaagaa

SEQ ID NO: 3681434 - RNA, 16 nt, Human
ugaguuaucuaagaau

SEQ ID NO: 3681435 - RNA, 17 nt, Human
ugaguuauuuuaauuau

SEQ ID NO: 3681436 - RNA, 20 nt, Human
ugaguucaagggcuguaggu

SEQ ID NO: 3681437 - RNA, 16 nt, Human
ugaguucagguagcug

SEQ ID NO: 3681438 - RNA, 18 nt, Human
ugaguucauaaauuuaug

SEQ ID NO: 3681439 - RNA, 17 nt, Human
ugaguuccagaaaguaa

SEQ ID NO: 3681440 - RNA, 18 nt, Human
ugaguuccagaaaguaaa

SEQ ID NO: 3681441 - RNA, 16 nt, Human
ugaguuccaguugaag

SEQ ID NO: 3681442 - RNA, 19 nt, Human
ugaguuccaguugaaguua

SEQ ID NO: 3681443 - RNA, 22 nt, Human
ugaguucuacauaaguaauuca

SEQ ID NO: 3681444 - RNA, 16 nt, Human
ugaguucucagggcuc

SEQ ID NO: 3681445 - RNA, 16 nt, Human
ugaguugauagcacag

SEQ ID NO: 3681446 - RNA, 23 nt, Human
ugaguugccaagacaaaucaaca

SEQ ID NO: 3681447 - RNA, 16 nt, Human
ugaguuggcugggaau

SEQ ID NO: 3681448 - RNA, 19 nt, Human
ugaguuggggucuggcagc

SEQ ID NO: 3681449 - RNA, 14 nt, Human
ugaguuguuuuugu

SEQ ID NO: 3681450 - RNA, 16 nt, Human
ugaguuguuuuuguau

SEQ ID NO: 3681451 - RNA, 18 nt, Human
ugaguuuaaaaaucaacu

SEQ ID NO: 3681452 - RNA, 18 nt, Human
ugaguuuaccauuuguaa

SEQ ID NO: 3681453 - RNA, 16 nt, Human
ugaguuuaccuuguau

SEQ ID NO: 3681454 - RNA, 15 nt, Human
ugaguuucauagcua

SEQ ID NO: 3681455 - RNA, 14 nt, Human
ugaguuucuuuuau

SEQ ID NO: 3681456 - RNA, 16 nt, Human
ugaguuugagcugccu

SEQ ID NO: 3681457 - RNA, 17 nt, Human
ugaguuugagcugccuu

SEQ ID NO: 3681458 - RNA, 19 nt, Human
ugaguuugagcugccuucc

SEQ ID NO: 3681459 - RNA, 18 nt, Human
ugaguuuggucuggacug

SEQ ID NO: 3681460 - RNA, 19 nt, Human
ugaguuugucgcucaugug

SEQ ID NO: 3681461 - RNA, 19 nt, Human
ugaguuuguuucuuugaau

SEQ ID NO: 3681462 - RNA, 12 nt, Human
ugaguuuuacca

SEQ ID NO: 3681463 - RNA, 22 nt, Human
ugagacuuuuugguggauguaa

SEQ ID NO: 3681464 - RNA, 15 nt, Human
ugagagaagggacac

SEQ ID NO: 3681465 - RNA, 22 nt, Human
ugagagacacacugaagaagca

SEQ ID NO: 3681466 - RNA, 18 nt, Human
ugagagacauuaacucau

SEQ ID NO: 3681467 - RNA, 24 nt, Human
ugagagaccaggcaaagcaaguga

SEQ ID NO: 3681468 - RNA, 15 nt, Human
ugagagagacaagaa

SEQ ID NO: 3681469 - RNA, 22 nt, Human
ugagagagauguguaauuuuuc

SEQ ID NO: 3681470 - RNA, 17 nt, Human
ugagagagcagccagga

SEQ ID NO: 3681471 - RNA, 13 nt, Human
ugagagaggccau

SEQ ID NO: 3681472 - RNA, 20 nt, Human
ugagagaggcuaaaauguuu

SEQ ID NO: 3681473 - RNA, 20 nt, Human
ugagagcaucaggccuagag

SEQ ID NO: 3681474 - RNA, 15 nt, Human
ugagagcccagaggu

SEQ ID NO: 3681475 - RNA, 19 nt, Human
ugagagcugcucuggaaaa

SEQ ID NO: 3681476 - RNA, 11 nt, Human
ugagaggaaau

SEQ ID NO: 3681477 - RNA, 20 nt, Human
ugagaggaggcagcaggacu

SEQ ID NO: 3681478 - RNA, 20 nt, Human
ugagaggcaaugauuguuaa

SEQ ID NO: 3681479 - RNA, 22 nt, Human
ugagaggcauccaguaucuuga

SEQ ID NO: 3681480 - RNA, 23 nt, Human
ugagaggcauccaguaucuugaa

SEQ ID NO: 3681481 - RNA, 17 nt, Human
ugagagggcaugcgcac

SEQ ID NO: 3681482 - RNA, 14 nt, Human
ugagaggggaacag

SEQ ID NO: 3681483 - RNA, 12 nt, Human
ugagaggggaag

SEQ ID NO: 3681484 - RNA, 21 nt, Human
ugagagguggcuuuugcggcc

SEQ ID NO: 3681485 - RNA, 14 nt, Human
ugagagguuugacu

SEQ ID NO: 3681486 - RNA, 22 nt, Human
ugagagguuugacuagaugaug

SEQ ID NO: 3681487 - RNA, 17 nt, Human
ugagagucagcucucug

SEQ ID NO: 3681488 - RNA, 15 nt, Human
ugagagucuagauuc

SEQ ID NO: 3681489 - RNA, 16 nt, Human
ugagagugucucugau

SEQ ID NO: 3681490 - RNA, 24 nt, Human
ugagagugucuucacggcaggaca

SEQ ID NO: 3681491 - RNA, 12 nt, Human
ugagagugugac

SEQ ID NO: 3681492 - RNA, 15 nt, Human
ugagaguuuuggaug

SEQ ID NO: 3681493 - RNA, 22 nt, Human
ugagaguuuuggaugcagugcu

SEQ ID NO: 3681494 - RNA, 22 nt, Human
ugagauaaugugauauuauaca

SEQ ID NO: 3681495 - RNA, 16 nt, Human
ugagauaauguuagag

SEQ ID NO: 3681496 - RNA, 14 nt, Human
ugagauacauacag

SEQ ID NO: 3681497 - RNA, 21 nt, Human
ugagauacauacagaauuacu

SEQ ID NO: 3681498 - RNA, 18 nt, Human
ugagauacuuugcauugu

SEQ ID NO: 3681499 - RNA, 15 nt, Human
ugagauagaagaacu

SEQ ID NO: 3681500 - RNA, 16 nt, Human
ugagauagaagaacug

SEQ ID NO: 3681501 - RNA, 19 nt, Human
ugagauagaagaacugcaa

SEQ ID NO: 3681502 - RNA, 14 nt, Human
ugagauagaagaug

SEQ ID NO: 3681503 - RNA, 16 nt, Human
ugagauagaagauguu

SEQ ID NO: 3681504 - RNA, 19 nt, Human
ugagauagaagauguuugc

SEQ ID NO: 3681505 - RNA, 16 nt, Human
ugagauagcauuguga

SEQ ID NO: 3681506 - RNA, 23 nt, Human
ugagauagcauugugaacugaca

SEQ ID NO: 3681507 - RNA, 19 nt, Human
ugagauaguagcauacauu

SEQ ID NO: 3681508 - RNA, 23 nt, Human
ugagauaguagcauacauuuaua

SEQ ID NO: 3681509 - RNA, 17 nt, Human
ugagauaguuuucaucc

SEQ ID NO: 3681510 - RNA, 18 nt, Human
ugagauaguuuucaucca

SEQ ID NO: 3681511 - RNA, 13 nt, Human
ugagauauuaaug

SEQ ID NO: 3681512 - RNA, 20 nt, Human
ugagaucgugcuacugcacu

SEQ ID NO: 3681513 - RNA, 12 nt, Human
ugagaucuaaaa

SEQ ID NO: 3681514 - RNA, 15 nt, Human
ugagaucuaaaaaua

SEQ ID NO: 3681515 - RNA, 16 nt, Human
ugagaucuaagccuuu

SEQ ID NO: 3681516 - RNA, 20 nt, Human
ugagaugauacauccaaagc

SEQ ID NO: 3681517 - RNA, 21 nt, Human
ugagaugauuuccaagccucu

SEQ ID NO: 3681518 - RNA, 20 nt, Human
ugagaugcuagaacucccuu

SEQ ID NO: 3681519 - RNA, 15 nt, Human
ugagaugcuggagaa

SEQ ID NO: 3681520 - RNA, 17 nt, Human
ugagaugcuggagaaga

SEQ ID NO: 3681521 - RNA, 18 nt, Human
ugagaugcuggagaagag

SEQ ID NO: 3681522 - RNA, 21 nt, Human
ugagaugcugguaauggccau

SEQ ID NO: 3681523 - RNA, 16 nt, Human
ugagauggacacacug

SEQ ID NO: 3681524 - RNA, 17 nt, Human
ugagauggcccucuggu

SEQ ID NO: 3681525 - RNA, 20 nt, Human
ugagaugguaugcacaauuc

SEQ ID NO: 3681526 - RNA, 13 nt, Human
ugagauguaaaaa

SEQ ID NO: 3681527 - RNA, 17 nt, Human
ugagauguaugaaggcu

SEQ ID NO: 3681528 - RNA, 24 nt, Human
ugagaugugaacacaucagcuugc

SEQ ID NO: 3681529 - RNA, 17 nt, Human
ugagauguguaucagug

SEQ ID NO: 3681530 - RNA, 19 nt, Human
ugagauguguaucaguguu

SEQ ID NO: 3681531 - RNA, 20 nt, Human
ugagauguguggacuguggc

SEQ ID NO: 3681532 - RNA, 14 nt, Human
ugagauuaauuccu

SEQ ID NO: 3681533 - RNA, 17 nt, Human
ugagauuagagggaggu

SEQ ID NO: 3681534 - RNA, 17 nt, Human
ugagauucaauauugaa

SEQ ID NO: 3681535 - RNA, 18 nt, Human
ugagauucaauauugaau

SEQ ID NO: 3681536 - RNA, 18 nt, Human
ugagauugcaccacugca

SEQ ID NO: 3681537 - RNA, 18 nt, Human
ugagauugccccaggucu

SEQ ID NO: 3681538 - RNA, 16 nt, Human
ugagauuggcauggcu

SEQ ID NO: 3681539 - RNA, 17 nt, Human
ugagauuggcauggcuu

SEQ ID NO: 3681540 - RNA, 13 nt, Human
ugagauugguuuu

SEQ ID NO: 3681541 - RNA, 15 nt, Human
ugagauugguuuucc

SEQ ID NO: 3681542 - RNA, 22 nt, Human
ugagauugguuuuccuguggca

SEQ ID NO: 3681543 - RNA, 12 nt, Human
ugagauuguccu

SEQ ID NO: 3681544 - RNA, 23 nt, Human
ugagauuuaccagggauguagau

SEQ ID NO: 3681545 - RNA, 17 nt, Human
ugagauuuauuaaagaa

SEQ ID NO: 3681546 - RNA, 18 nt, Human
ugagauuucaucugcucu

SEQ ID NO: 3681547 - RNA, 17 nt, Human
ugagauuucuuaaauaa

SEQ ID NO: 3681548 - RNA, 14 nt, Human
ugagauuuugguau

SEQ ID NO: 3681549 - RNA, 17 nt, Human
ugagauuuuuuauugcu

SEQ ID NO: 3681550 - RNA, 20 nt, Human
ugagcaaagggaacagugag

SEQ ID NO: 3681551 - RNA, 16 nt, Human
ugagcaaaucaccaca

SEQ ID NO: 3681552 - RNA, 16 nt, Human
ugagcaaauguggcuc

SEQ ID NO: 3681553 - RNA, 18 nt, Human
ugagcaaauguggcuccu

SEQ ID NO: 3681554 - RNA, 16 nt, Human
ugagcaacucuugauu

SEQ ID NO: 3681555 - RNA, 19 nt, Human
ugagcaagacccugucucu

SEQ ID NO: 3681556 - RNA, 21 nt, Human
ugagcaaggagcacaagccac

SEQ ID NO: 3681557 - RNA, 18 nt, Human
ugagcaauguauaacccc

SEQ ID NO: 3681558 - RNA, 14 nt, Human
ugagcaauucuccu

SEQ ID NO: 3681559 - RNA, 13 nt, Human
ugagcacauucug

SEQ ID NO: 3681560 - RNA, 19 nt, Human
ugagcaccgucauggcuua

SEQ ID NO: 3681561 - RNA, 21 nt, Human
ugagcaccgugucaagcugcu

SEQ ID NO: 3681562 - RNA, 21 nt, Human
ugagcaccugcuucaugcuca

SEQ ID NO: 3681563 - RNA, 17 nt, Human
ugagcacucccaagucu

SEQ ID NO: 3681564 - RNA, 17 nt, Human
ugagcacugccaggagg

SEQ ID NO: 3681565 - RNA, 18 nt, Human
ugagcacugccaggaggg

SEQ ID NO: 3681566 - RNA, 15 nt, Human
ugagcacuguuuaua

SEQ ID NO: 3681567 - RNA, 15 nt, Human
ugagcacuguuuucu

SEQ ID NO: 3681568 - RNA, 21 nt, Human
ugagcacuguuuucuagugua

SEQ ID NO: 3681569 - RNA, 13 nt, Human
ugagcagaaggaa

SEQ ID NO: 3681570 - RNA, 14 nt, Human
ugagcagaaggaaa

SEQ ID NO: 3681571 - RNA, 19 nt, Human
ugagcagacuggugagcag

SEQ ID NO: 3681572 - RNA, 21 nt, Human
ugagcagacuggugagcagac

SEQ ID NO: 3681573 - RNA, 23 nt, Human
ugagcagacuggugagcagacug

SEQ ID NO: 3681574 - RNA, 12 nt, Human
ugagcagagucu

SEQ ID NO: 3681575 - RNA, 16 nt, Human
ugagcagccuggagcc

SEQ ID NO: 3681576 - RNA, 17 nt, Human
ugagcagcgagccugcu

SEQ ID NO: 3681577 - RNA, 19 nt, Human
ugagcaggaaggccugggu

SEQ ID NO: 3681578 - RNA, 15 nt, Human
ugagcaggauuuuaa

SEQ ID NO: 3681579 - RNA, 20 nt, Human
ugagcaggauuuuaaucuuu

SEQ ID NO: 3681580 - RNA, 17 nt, Human
ugagcagggauccuggu

SEQ ID NO: 3681581 - RNA, 16 nt, Human
ugagcagggccgggga

SEQ ID NO: 3681582 - RNA, 19 nt, Human
ugagcagggcucagcgggg

SEQ ID NO: 3681583 - RNA, 23 nt, Human
ugagcagggcucagcggggacag

SEQ ID NO: 3681584 - RNA, 15 nt, Human
ugagcagucaggaaa

SEQ ID NO: 3681585 - RNA, 14 nt, Human
ugagcagugauauu

SEQ ID NO: 3681586 - RNA, 20 nt, Human
ugagcagugauauucuuugu

SEQ ID NO: 3681587 - RNA, 14 nt, Human
ugagcaguggcugg

SEQ ID NO: 3681588 - RNA, 12 nt, Human
ugagcaucacag

SEQ ID NO: 3681589 - RNA, 14 nt, Human
ugagcaucacaguu

SEQ ID NO: 3681590 - RNA, 14 nt, Human
ugagcaucaggcca

SEQ ID NO: 3681591 - RNA, 16 nt, Human
ugagcaucaggccagg

SEQ ID NO: 3681592 - RNA, 18 nt, Human
ugagcaucaggccaggcc

SEQ ID NO: 3681593 - RNA, 18 nt, Human
ugagcauccugagccccg

SEQ ID NO: 3681594 - RNA, 19 nt, Human
ugagcauccugagccccgc

SEQ ID NO: 3681595 - RNA, 14 nt, Human
ugagcauggagcug

SEQ ID NO: 3681596 - RNA, 16 nt, Human
ugagcauguuacugac

SEQ ID NO: 3681597 - RNA, 14 nt, Human
ugagcauguuuaga

SEQ ID NO: 3681598 - RNA, 24 nt, Human
ugagcauguuuagacuuuaacaua

SEQ ID NO: 3681599 - RNA, 16 nt, Human
ugagcauuacaggcaa

SEQ ID NO: 3681600 - RNA, 14 nt, Human
ugagcauuagauuu

SEQ ID NO: 3681601 - RNA, 20 nt, Human
ugagcauuggauacagcagu

SEQ ID NO: 3681602 - RNA, 21 nt, Human
ugagcauuguggcugucagca

SEQ ID NO: 3681603 - RNA, 22 nt, Human
ugagcauuguggcugucagcag

SEQ ID NO: 3681604 - RNA, 23 nt, Human
ugagccaaucugcaauuucuacu

SEQ ID NO: 3681605 - RNA, 17 nt, Human
ugagccacagcagcauu

SEQ ID NO: 3681606 - RNA, 19 nt, Human
ugagccacagcagcauuuu

SEQ ID NO: 3681607 - RNA, 14 nt, Human
ugagccagacaaau

SEQ ID NO: 3681608 - RNA, 20 nt, Human
ugagccagacaaauggagga

SEQ ID NO: 3681609 - RNA, 22 nt, Human
ugagccagauuucacucuccuu

SEQ ID NO: 3681610 - RNA, 20 nt, Human
ugagccagguaaugagggac

SEQ ID NO: 3681611 - RNA, 13 nt, Human
ugagccaguccca

SEQ ID NO: 3681612 - RNA, 21 nt, Human
ugaccucuguuguccuccccu

SEQ ID NO: 3681613 - RNA, 12 nt, Human
ugaccucuugcu

SEQ ID NO: 3681614 - RNA, 13 nt, Human
ugaccucuugcug

SEQ ID NO: 3681615 - RNA, 18 nt, Human
ugaccucuugcugucucu

SEQ ID NO: 3681616 - RNA, 14 nt, Human
ugaccugaggaagc

SEQ ID NO: 3681617 - RNA, 12 nt, Human
ugaccugaggcc

SEQ ID NO: 3681618 - RNA, 12 nt, Human
ugaccugaggcu

SEQ ID NO: 3681619 - RNA, 20 nt, Human
ugaccugccccgcccagcug

SEQ ID NO: 3681620 - RNA, 18 nt, Human
ugaccugccucucacaca

SEQ ID NO: 3681621 - RNA, 12 nt, Human
ugaccugcuccg

SEQ ID NO: 3681622 - RNA, 15 nt, Human
ugaccugcuccgcug

SEQ ID NO: 3681623 - RNA, 13 nt, Human
ugaccugcugagc

SEQ ID NO: 3681624 - RNA, 21 nt, Human
ugaccugcuggguaaacugug

SEQ ID NO: 3681625 - RNA, 16 nt, Human
ugaccuggauggggca

SEQ ID NO: 3681626 - RNA, 12 nt, Human
ugaccuggcccc

SEQ ID NO: 3681627 - RNA, 12 nt, Human
ugaccugucacc

SEQ ID NO: 3681628 - RNA, 19 nt, Human
ugaccugucaugccccccu

SEQ ID NO: 3681629 - RNA, 13 nt, Human
ugaccugugacca

SEQ ID NO: 3681630 - RNA, 18 nt, Human
ugaccugugaccagcacu

SEQ ID NO: 3681631 - RNA, 21 nt, Human
ugaccuuaguguuucugugca

SEQ ID NO: 3681632 - RNA, 23 nt, Human
ugaccuuaguguuucugugcaug

SEQ ID NO: 3681633 - RNA, 19 nt, Human
ugaccuuauccuuccucuc

SEQ ID NO: 3681634 - RNA, 19 nt, Human
ugaccuucagcucacgcuu

SEQ ID NO: 3681635 - RNA, 18 nt, Human
ugaccuuccucgcagaga

SEQ ID NO: 3681636 - RNA, 21 nt, Human
ugaccuuccucgcagagaggc

SEQ ID NO: 3681637 - RNA, 14 nt, Human
ugaccuuccucugg

SEQ ID NO: 3681638 - RNA, 17 nt, Human
ugaccuuccucuggggc

SEQ ID NO: 3681639 - RNA, 24 nt, Human
ugaccuuccucuggggcucuaggg

SEQ ID NO: 3681640 - RNA, 14 nt, Human
ugaccuucucuaua

SEQ ID NO: 3681641 - RNA, 21 nt, Human
ugaccuugaggagucuugugu

SEQ ID NO: 3681642 - RNA, 17 nt, Human
ugaccuugaugagcugu

SEQ ID NO: 3681643 - RNA, 16 nt, Human
ugaccuugcaacuuca

SEQ ID NO: 3681644 - RNA, 13 nt, Human
ugaccuuguaaug

SEQ ID NO: 3681645 - RNA, 18 nt, Human
ugaccuuguaauguaacu

SEQ ID NO: 3681646 - RNA, 15 nt, Human
ugaccuuuagguauu

SEQ ID NO: 3681647 - RNA, 17 nt, Human
ugaccuuuuauguagua

SEQ ID NO: 3681648 - RNA, 18 nt, Human
ugaccuuuuauguaguaa

SEQ ID NO: 3681649 - RNA, 14 nt, Human
ugacgaagucucuu

SEQ ID NO: 3681650 - RNA, 20 nt, Human
ugacgacaaagcugcuaaau

SEQ ID NO: 3681651 - RNA, 20 nt, Human
ugacgacaagugcugaacag

SEQ ID NO: 3681652 - RNA, 21 nt, Human
ugacgaugauguacagauucu

SEQ ID NO: 3681653 - RNA, 17 nt, Human
ugacgauuccuucucug

SEQ ID NO: 3681654 - RNA, 14 nt, Human
ugacgccaucccag

SEQ ID NO: 3681655 - RNA, 16 nt, Human
ugacgccaucccagcc

SEQ ID NO: 3681656 - RNA, 18 nt, Human
ugacgccaucccagcccc

SEQ ID NO: 3681657 - RNA, 19 nt, Human
ugacgccaucccagcccca

SEQ ID NO: 3681658 - RNA, 20 nt, Human
ugacgccaucccagccccaa

SEQ ID NO: 3681659 - RNA, 14 nt, Human
ugacgcugaauaaa

SEQ ID NO: 3681660 - RNA, 15 nt, Human
ugacgcugauacaua

SEQ ID NO: 3681661 - RNA, 21 nt, Human
ugacgcugauacauaacuaaa

SEQ ID NO: 3681662 - RNA, 20 nt, Human
ugacggaagccaacuuggcu

SEQ ID NO: 3681663 - RNA, 19 nt, Human
ugacggccagggagaagcu

SEQ ID NO: 3681664 - RNA, 14 nt, Human
ugacggcccugcaa

SEQ ID NO: 3681665 - RNA, 15 nt, Human
ugacggcgcccccag

SEQ ID NO: 3681666 - RNA, 15 nt, Human
ugacggugacaaaga

SEQ ID NO: 3681667 - RNA, 20 nt, Human
ugacgguuccuacacaggac

SEQ ID NO: 3681668 - RNA, 22 nt, Human
ugacguacaaguaguucuguau

SEQ ID NO: 3681669 - RNA, 17 nt, Human
ugacgugaccggacuuu

SEQ ID NO: 3681670 - RNA, 19 nt, Human
ugacgugcaccuguacuca

SEQ ID NO: 3681671 - RNA, 23 nt, Human
ugacgugccuuuugcaccccucc

SEQ ID NO: 3681672 - RNA, 22 nt, Human
ugacuaaaaaacaaagaagaca

SEQ ID NO: 3681673 - RNA, 14 nt, Human
ugacuaaaaauauu

SEQ ID NO: 3681674 - RNA, 22 nt, Human
ugacuaaaaauauuauaacuua

SEQ ID NO: 3681675 - RNA, 12 nt, Human
ugacuaaacuuu

SEQ ID NO: 3681676 - RNA, 19 nt, Human
ugacuaaacuuuuuuucug

SEQ ID NO: 3681677 - RNA, 21 nt, Human
ugacuaaacuuuuuuucugua

SEQ ID NO: 3681678 - RNA, 21 nt, Human
ugacuaacaggccaaagaguc

SEQ ID NO: 3681679 - RNA, 11 nt, Human
ugacuaauuag

SEQ ID NO: 3681680 - RNA, 17 nt, Human
ugacuaauucuugcaua

SEQ ID NO: 3681681 - RNA, 14 nt, Human
ugacuaauuguaua

SEQ ID NO: 3681682 - RNA, 20 nt, Human
ugacuaauuguauaacaggu

SEQ ID NO: 3681683 - RNA, 22 nt, Human
ugacuaauuguauaacagguua

SEQ ID NO: 3681684 - RNA, 21 nt, Human
ugacuaauuuuacauguuuau

SEQ ID NO: 3681685 - RNA, 14 nt, Human
ugacuacagggccg

SEQ ID NO: 3681686 - RNA, 16 nt, Human
ugacuacagucaggaa

SEQ ID NO: 3681687 - RNA, 17 nt, Human
ugacuacagucaggaaa

SEQ ID NO: 3681688 - RNA, 18 nt, Human
ugacuacagucaggaaag

SEQ ID NO: 3681689 - RNA, 19 nt, Human
ugacuagacguucauuugu

SEQ ID NO: 3681690 - RNA, 17 nt, Human
ugacuagaggcagggag

SEQ ID NO: 3681691 - RNA, 20 nt, Human
ugacuagggagccauguuuc

SEQ ID NO: 3681692 - RNA, 17 nt, Human
ugacuagggauucaggc

SEQ ID NO: 3681693 - RNA, 23 nt, Human
ugacuagggauucaggcugcuug

SEQ ID NO: 3681694 - RNA, 16 nt, Human
ugacuaguacaaauua

SEQ ID NO: 3681695 - RNA, 23 nt, Human
ugacuaguacaaauuauaaaaag

SEQ ID NO: 3681696 - RNA, 17 nt, Human
ugacuagugcugaagcu

SEQ ID NO: 3681697 - RNA, 22 nt, Human
ugacuagugcugaagcuuauua

SEQ ID NO: 3681698 - RNA, 16 nt, Human
ugacuauaaccuuguu

SEQ ID NO: 3681699 - RNA, 14 nt, Human
ugacuauauagaga

SEQ ID NO: 3681700 - RNA, 16 nt, Human
ugacuauauagagaug

SEQ ID NO: 3681701 - RNA, 19 nt, Human
ugacuauauagagauguuu

SEQ ID NO: 3681702 - RNA, 21 nt, Human
ugacuauauagagauguuuuu

SEQ ID NO: 3681703 - RNA, 22 nt, Human
ugacuaucaaacugaagccaga

SEQ ID NO: 3681704 - RNA, 14 nt, Human
ugacuaugacauaa

SEQ ID NO: 3681705 - RNA, 12 nt, Human
ugacuauguaaa

SEQ ID NO: 3681706 - RNA, 16 nt, Human
ugacuauuauguuguu

SEQ ID NO: 3681707 - RNA, 20 nt, Human
ugacuauugaaguugcagau

SEQ ID NO: 3681708 - RNA, 18 nt, Human
ugacuauuuuuguuuuua

SEQ ID NO: 3681709 - RNA, 23 nt, Human
ugacuauuuuuguuuuuauuaaa

SEQ ID NO: 3681710 - RNA, 16 nt, Human
ugacucaaaucuccag

SEQ ID NO: 3681711 - RNA, 14 nt, Human
ugacucaacauguu

SEQ ID NO: 3681712 - RNA, 14 nt, Human
ugacucaagauucc

SEQ ID NO: 3681713 - RNA, 22 nt, Human
ugacucaagauucccaggaguu

SEQ ID NO: 3681714 - RNA, 12 nt, Human
ugacucacccaa

SEQ ID NO: 3681715 - RNA, 15 nt, Human
ugacucaggagccug

SEQ ID NO: 3681716 - RNA, 13 nt, Human
ugacucagggcuc

SEQ ID NO: 3681717 - RNA, 19 nt, Human
ugacucagggcuccugggu

SEQ ID NO: 3681718 - RNA, 19 nt, Human
ugacuccacgauccugcca

SEQ ID NO: 3681719 - RNA, 22 nt, Human
ugacuccacgauccugccaccc

SEQ ID NO: 3681720 - RNA, 19 nt, Human
ugacuccagaauuucccaa

SEQ ID NO: 3681721 - RNA, 23 nt, Human
ugacuccagaauuucccaaagca

SEQ ID NO: 3681722 - RNA, 12 nt, Human
ugacuccaggag

SEQ ID NO: 3681723 - RNA, 14 nt, Human
ugacuccaggagag

SEQ ID NO: 3681724 - RNA, 14 nt, Human
ugacuccugguccu

SEQ ID NO: 3681725 - RNA, 21 nt, Human
ugacucgaggguuggguucau

SEQ ID NO: 3681726 - RNA, 15 nt, Human
ugacucgggcuccug

SEQ ID NO: 3681727 - RNA, 18 nt, Human
ugacucgggcuccugugc

SEQ ID NO: 3681728 - RNA, 14 nt, Human
ugacucgguuucuc

SEQ ID NO: 3681729 - RNA, 15 nt, Human
ugacucgucugacug

SEQ ID NO: 3681730 - RNA, 16 nt, Human
ugacucgucugacugu

SEQ ID NO: 3681731 - RNA, 24 nt, Human
ugacucuaagguuaucuacuuuua

SEQ ID NO: 3681732 - RNA, 16 nt, Human
ugacucuauaagcaaa

SEQ ID NO: 3681733 - RNA, 11 nt, Human
ugacucuccag

SEQ ID NO: 3681734 - RNA, 14 nt, Human
ugacucuccagggg

SEQ ID NO: 3681735 - RNA, 15 nt, Human
ugacucucugugacc

SEQ ID NO: 3681736 - RNA, 11 nt, Human
ugacucugaaa

SEQ ID NO: 3681737 - RNA, 13 nt, Human
ugacucugccccc

SEQ ID NO: 3681738 - RNA, 15 nt, Human
ugacucugcccccug

SEQ ID NO: 3681739 - RNA, 19 nt, Human
ugacucugcccccugcugg

SEQ ID NO: 3681740 - RNA, 12 nt, Human
ugacucugcucu

SEQ ID NO: 3681741 - RNA, 16 nt, Human
ugacucuggcuuggcc

SEQ ID NO: 3681742 - RNA, 19 nt, Human
ugacucuggguccuuccug

SEQ ID NO: 3681743 - RNA, 12 nt, Human
ugacucuuaaga

SEQ ID NO: 3681744 - RNA, 15 nt, Human
ugacucuuaagaaga

SEQ ID NO: 3681745 - RNA, 14 nt, Human
ugacucuugaguug

SEQ ID NO: 3681746 - RNA, 22 nt, Human
ugacucuugaguuguuuuugua

SEQ ID NO: 3681747 - RNA, 19 nt, Human
ugacucuuggcacagcaug

SEQ ID NO: 3681748 - RNA, 20 nt, Human
ugacucuuguuuucaguuuc

SEQ ID NO: 3681749 - RNA, 17 nt, Human
ugacucuuuauugucug

SEQ ID NO: 3681750 - RNA, 20 nt, Human
ugacucuuuauugucuguaa

SEQ ID NO: 3681751 - RNA, 13 nt, Human
ugacucuuuccaa

SEQ ID NO: 3681752 - RNA, 16 nt, Human
ugacucuuuccaaccg

SEQ ID NO: 3681753 - RNA, 19 nt, Human
ugacucuuuccaaccggcu

SEQ ID NO: 3681754 - RNA, 21 nt, Human
ugacucuuucuauuguuucuu

SEQ ID NO: 3681755 - RNA, 19 nt, Human
ugacugaacgauccuucaa

SEQ ID NO: 3681756 - RNA, 21 nt, Human
ugacugaacgauccuucaaag

SEQ ID NO: 3681757 - RNA, 13 nt, Human
ugacugaauuucu

SEQ ID NO: 3681758 - RNA, 22 nt, Human
ugacugagcaagacccugucuc

SEQ ID NO: 3681759 - RNA, 19 nt, Human
ugacugagcagacugguga

SEQ ID NO: 3681760 - RNA, 11 nt, Human
ugacugagcuu

SEQ ID NO: 3681761 - RNA, 17 nt, Human
ugacugaggcaggcaug

SEQ ID NO: 3681762 - RNA, 16 nt, Human
ucugccuuugcagaaa

SEQ ID NO: 3681763 - RNA, 19 nt, Human
ucugccuuugcagaaacag

SEQ ID NO: 3681764 - RNA, 20 nt, Human
ucugccuuugcagaaacaga

SEQ ID NO: 3681765 - RNA, 13 nt, Human
ucugccuuuuuua

SEQ ID NO: 3681766 - RNA, 17 nt, Human
ucugcggaccccagcug

SEQ ID NO: 3681767 - RNA, 21 nt, Human
ucugcggagcacacuggcuca

SEQ ID NO: 3681768 - RNA, 22 nt, Human
ucugcggagcacacuggcucac

SEQ ID NO: 3681769 - RNA, 17 nt, Human
ucugcggaucucagcuu

SEQ ID NO: 3681770 - RNA, 18 nt, Human
ucugcgggggcagugcuc

SEQ ID NO: 3681771 - RNA, 20 nt, Human
ucugcgggggcagugcucac

SEQ ID NO: 3681772 - RNA, 20 nt, Human
ucugcgucgguccuggugcc

SEQ ID NO: 3681773 - RNA, 19 nt, Human
ucugcgucucugcuuuaaa

SEQ ID NO: 3681774 - RNA, 20 nt, Human
ucugcgucucugcuuuaaag

SEQ ID NO: 3681775 - RNA, 16 nt, Human
ucugcgugacaauaaa

SEQ ID NO: 3681776 - RNA, 16 nt, Human
ucugcgugcagggaca

SEQ ID NO: 3681777 - RNA, 22 nt, Human
ucugcgugguuccuuucucagc

SEQ ID NO: 3681778 - RNA, 15 nt, Human
ucugcgugucaccug

SEQ ID NO: 3681779 - RNA, 20 nt, Human
ucugcgugucaccugugcuu

SEQ ID NO: 3681780 - RNA, 15 nt, Human
ucugcuaaauuucaa

SEQ ID NO: 3681781 - RNA, 21 nt, Human
ucugcuaacuuggagccccag

SEQ ID NO: 3681782 - RNA, 14 nt, Human
ucugcuaccuugcc

SEQ ID NO: 3681783 - RNA, 21 nt, Human
ucugcuacguuccuauuguca

SEQ ID NO: 3681784 - RNA, 16 nt, Human
ucugcuacuuugcugc

SEQ ID NO: 3681785 - RNA, 14 nt, Human
ucugcuaugcuuga

SEQ ID NO: 3681786 - RNA, 13 nt, Human
ucugcucagcagc

SEQ ID NO: 3681787 - RNA, 14 nt, Human
ucugcucagcagcu

SEQ ID NO: 3681788 - RNA, 12 nt, Human
ucugcucagcca

SEQ ID NO: 3681789 - RNA, 13 nt, Human
ucugcucagccaa

SEQ ID NO: 3681790 - RNA, 15 nt, Human
ucugcucagccaagc

SEQ ID NO: 3681791 - RNA, 13 nt, Human
ucugcucagcccu

SEQ ID NO: 3681792 - RNA, 17 nt, Human
ucugcucagcccuggag

SEQ ID NO: 3681793 - RNA, 18 nt, Human
ucugcucagcuucuccug

SEQ ID NO: 3681794 - RNA, 22 nt, Human
ucugcucaggagaccuggagga

SEQ ID NO: 3681795 - RNA, 12 nt, Human
ucugcucaucau

SEQ ID NO: 3681796 - RNA, 15 nt, Human
ucugcucaucauucu

SEQ ID NO: 3681797 - RNA, 18 nt, Human
ucugcucaucauucucug

SEQ ID NO: 3681798 - RNA, 15 nt, Human
ucugcuccacccuug

SEQ ID NO: 3681799 - RNA, 17 nt, Human
ucugcuccacccuuggc

SEQ ID NO: 3681800 - RNA, 21 nt, Human
ucugcuccaccuuucagccca

SEQ ID NO: 3681801 - RNA, 20 nt, Human
ucugcucccaaggggccuga

SEQ ID NO: 3681802 - RNA, 12 nt, Human
ucugcuccucuc

SEQ ID NO: 3681803 - RNA, 20 nt, Human
ucugcuccucuccaggcacc

SEQ ID NO: 3681804 - RNA, 21 nt, Human
ucugcuccucuccccagcaag

SEQ ID NO: 3681805 - RNA, 12 nt, Human
ucugcuccuucc

SEQ ID NO: 3681806 - RNA, 15 nt, Human
ucugcuccuucccca

SEQ ID NO: 3681807 - RNA, 21 nt, Human
ucugcucgcccuccuuucugu

SEQ ID NO: 3681808 - RNA, 14 nt, Human
ucugcucggccguc

SEQ ID NO: 3681809 - RNA, 19 nt, Human
ucugcucugaggcuuccag

SEQ ID NO: 3681810 - RNA, 20 nt, Human
ucugcucugaggcuuccaga

SEQ ID NO: 3681811 - RNA, 11 nt, Human
ucugcucugau

SEQ ID NO: 3681812 - RNA, 14 nt, Human
ucugcucugaugca

SEQ ID NO: 3681813 - RNA, 21 nt, Human
ucugcucugcgugucaccugu

SEQ ID NO: 3681814 - RNA, 21 nt, Human
ucugcucugguuguuucuguu

SEQ ID NO: 3681815 - RNA, 23 nt, Human
ucugcucuuucuucuuccacaca

SEQ ID NO: 3681816 - RNA, 22 nt, Human
ucugcugacagacacaggcccg

SEQ ID NO: 3681817 - RNA, 15 nt, Human
ucugcugcagagcag

SEQ ID NO: 3681818 - RNA, 22 nt, Human
ucugcugcagagcaguaaggga

SEQ ID NO: 3681819 - RNA, 15 nt, Human
ucugcugcccuccau

SEQ ID NO: 3681820 - RNA, 17 nt, Human
ucugcugccugcccgca

SEQ ID NO: 3681821 - RNA, 22 nt, Human
ucugcugccugcccgcacagca

SEQ ID NO: 3681822 - RNA, 15 nt, Human
ucugcugcuggcugg

SEQ ID NO: 3681823 - RNA, 23 nt, Human
ucugcuggaguuucauguacaag

SEQ ID NO: 3681824 - RNA, 14 nt, Human
ucugcuggcccagc

SEQ ID NO: 3681825 - RNA, 17 nt, Human
ucugcuggccucugcga

SEQ ID NO: 3681826 - RNA, 17 nt, Human
ucugcuggccuggaucu

SEQ ID NO: 3681827 - RNA, 14 nt, Human
ucugcugggcuggg

SEQ ID NO: 3681828 - RNA, 23 nt, Human
ucugcuggggccugggacaacug

SEQ ID NO: 3681829 - RNA, 17 nt, Human
ucugcuggucuucaauu

SEQ ID NO: 3681830 - RNA, 14 nt, Human
ucugcuguccagac

SEQ ID NO: 3681831 - RNA, 18 nt, Human
ucugcuguccagacagcc

SEQ ID NO: 3681832 - RNA, 23 nt, Human
ucugcugugggcacaggucaggc

SEQ ID NO: 3681833 - RNA, 13 nt, Human
ucugcuguuaacu

SEQ ID NO: 3681834 - RNA, 14 nt, Human
ucugcuguuccagu

SEQ ID NO: 3681835 - RNA, 21 nt, Human
ucugcuuacaauucccugcug

SEQ ID NO: 3681836 - RNA, 12 nt, Human
ucugcuuagaaa

SEQ ID NO: 3681837 - RNA, 17 nt, Human
ucugcuuaggagagacc

SEQ ID NO: 3681838 - RNA, 12 nt, Human
ucugcuucaaua

SEQ ID NO: 3681839 - RNA, 14 nt, Human
ucugcuucagcuug

SEQ ID NO: 3681840 - RNA, 13 nt, Human
ucugcuucccagg

SEQ ID NO: 3681841 - RNA, 14 nt, Human
ucugcuucucugac

SEQ ID NO: 3681842 - RNA, 18 nt, Human
ucugcuugacaacaucug

SEQ ID NO: 3681843 - RNA, 18 nt, Human
ucugcuugauuuuugccu

SEQ ID NO: 3681844 - RNA, 11 nt, Human
ucugcuugcca

SEQ ID NO: 3681845 - RNA, 16 nt, Human
ucugcuuguauuccaa

SEQ ID NO: 3681846 - RNA, 19 nt, Human
ucugcuuguuauuagagau

SEQ ID NO: 3681847 - RNA, 18 nt, Human
ucugcuuuaaagggccug

SEQ ID NO: 3681848 - RNA, 12 nt, Human
ucugcuuuagac

SEQ ID NO: 3681849 - RNA, 21 nt, Human
ucugcuuugacugagcagacu

SEQ ID NO: 3681850 - RNA, 15 nt, Human
ucugcuuuguugugu

SEQ ID NO: 3681851 - RNA, 13 nt, Human
ucugcuuuuacca

SEQ ID NO: 3681852 - RNA, 18 nt, Human
ucugcuuuuaccaugccc

SEQ ID NO: 3681853 - RNA, 15 nt, Human
ucugcuuuucugccc

SEQ ID NO: 3681854 - RNA, 17 nt, Human
ucugcuuuucugcccug

SEQ ID NO: 3681855 - RNA, 20 nt, Human
ucugcuuuucugcccuggcu

SEQ ID NO: 3681856 - RNA, 21 nt, Human
ucugcuuuucugcccuggcug

SEQ ID NO: 3681857 - RNA, 15 nt, Human
ucuggaaaauaaaag

SEQ ID NO: 3681858 - RNA, 18 nt, Human
ucuggaaaaugugaccca

SEQ ID NO: 3681859 - RNA, 16 nt, Human
ucuggaaaggaggaag

SEQ ID NO: 3681860 - RNA, 13 nt, Human
ucuggaacccaga

SEQ ID NO: 3681861 - RNA, 23 nt, Human
ucuggaacccagacucagacauu

SEQ ID NO: 3681862 - RNA, 17 nt, Human
ucuggaaccucagccug

SEQ ID NO: 3681863 - RNA, 18 nt, Human
ucuggaaccucagccugg

SEQ ID NO: 3681864 - RNA, 23 nt, Human
ucuggaaccucagccuggccaga

SEQ ID NO: 3681865 - RNA, 13 nt, Human
ucuggaagaaaaa

SEQ ID NO: 3681866 - RNA, 23 nt, Human
ucuggaagauggggaccagcagc

SEQ ID NO: 3681867 - RNA, 18 nt, Human
ucuggaagccccugggcc

SEQ ID NO: 3681868 - RNA, 13 nt, Human
ucuggaaguccaa

SEQ ID NO: 3681869 - RNA, 23 nt, Human
ucuggaaugguacaugucuucca

SEQ ID NO: 3681870 - RNA, 15 nt, Human
ucuggaauguaauca

SEQ ID NO: 3681871 - RNA, 12 nt, Human
ucuggacaagcc

SEQ ID NO: 3681872 - RNA, 21 nt, Human
ucuggacaagccaacuuguaa

SEQ ID NO: 3681873 - RNA, 23 nt, Human
ucuggacaagccaacuuguaaau

SEQ ID NO: 3681874 - RNA, 19 nt, Human
ucuggacagccccacccug

SEQ ID NO: 3681875 - RNA, 20 nt, Human
ucuggacagccccacccugg

SEQ ID NO: 3681876 - RNA, 14 nt, Human
ucuggacaggcaug

SEQ ID NO: 3681877 - RNA, 14 nt, Human
ucuggacaggcucu

SEQ ID NO: 3681878 - RNA, 20 nt, Human
ucuggacaggcucugcuucu

SEQ ID NO: 3681879 - RNA, 14 nt, Human
ucuggaccccaucu

SEQ ID NO: 3681880 - RNA, 19 nt, Human
ucuggaccccaucugugaa

SEQ ID NO: 3681881 - RNA, 18 nt, Human
ucuggacccuuauaaaau

SEQ ID NO: 3681882 - RNA, 17 nt, Human
ucuggacggcaggcuca

SEQ ID NO: 3681883 - RNA, 12 nt, Human
ucuggacucugg

SEQ ID NO: 3681884 - RNA, 15 nt, Human
ucuggacucuggacu

SEQ ID NO: 3681885 - RNA, 19 nt, Human
ucuggacugccccagaaaa

SEQ ID NO: 3681886 - RNA, 15 nt, Human
ucuggagaagcagug

SEQ ID NO: 3681887 - RNA, 23 nt, Human
ucuggagaagcucccaggaacaa

SEQ ID NO: 3681888 - RNA, 19 nt, Human
ucuggagaccagggagccu

SEQ ID NO: 3681889 - RNA, 12 nt, Human
ucuggagagaaa

SEQ ID NO: 3681890 - RNA, 15 nt, Human
ucuggagagaaacaa

SEQ ID NO: 3681891 - RNA, 14 nt, Human
ucuggagagcccag

SEQ ID NO: 3681892 - RNA, 21 nt, Human
ucuggagagcuagaaccugga

SEQ ID NO: 3681893 - RNA, 14 nt, Human
ucuggagccagccg

SEQ ID NO: 3681894 - RNA, 16 nt, Human
ucuggagcccuugggu

SEQ ID NO: 3681895 - RNA, 18 nt, Human
ucuggaggaaagggagga

SEQ ID NO: 3681896 - RNA, 19 nt, Human
ucuggaggaaagggaggag

SEQ ID NO: 3681897 - RNA, 22 nt, Human
ucuggaggggagcucugucugu

SEQ ID NO: 3681898 - RNA, 14 nt, Human
ucuggaggggaggg

SEQ ID NO: 3681899 - RNA, 15 nt, Human
ucuggaggggccccu

SEQ ID NO: 3681900 - RNA, 14 nt, Human
ucuggaguggccac

SEQ ID NO: 3681901 - RNA, 13 nt, Human
ucuggagugggca

SEQ ID NO: 3681902 - RNA, 14 nt, Human
ucuggagugggcag

SEQ ID NO: 3681903 - RNA, 23 nt, Human
ucuggauaauuuugcauaaaauu

SEQ ID NO: 3681904 - RNA, 20 nt, Human
ucuggauaggagccugcugg

SEQ ID NO: 3681905 - RNA, 19 nt, Human
ucuggauuauucugggggc

SEQ ID NO: 3681906 - RNA, 13 nt, Human
ucuggauucagcc

SEQ ID NO: 3681907 - RNA, 17 nt, Human
ucuggauucagccuucu

SEQ ID NO: 3681908 - RNA, 19 nt, Human
ucuggauucauauuuaauu

SEQ ID NO: 3681909 - RNA, 14 nt, Human
ucuggauuccagag

SEQ ID NO: 3681910 - RNA, 17 nt, Human
ucuggauucccaggaug

SEQ ID NO: 3681911 - RNA, 16 nt, Human
ucuggauucuuggccc

SEQ ID NO: 3681912 - RNA, 15 nt, Human
ucuggcaacaucuuu

SEQ ID NO: 3681913 - RNA, 22 nt, Human
ucuauucgccacacaguauuuu

SEQ ID NO: 3681914 - RNA, 18 nt, Human
ucuauucugagaaaacaa

SEQ ID NO: 3681915 - RNA, 13 nt, Human
ucuauucuuuaac

SEQ ID NO: 3681916 - RNA, 22 nt, Human
ucuauugacuucaaugauagua

SEQ ID NO: 3681917 - RNA, 16 nt, Human
ucuauugauguacagu

SEQ ID NO: 3681918 - RNA, 23 nt, Human
ucuauugcaguuauagaaaaucu

SEQ ID NO: 3681919 - RNA, 12 nt, Human
ucuauugccucu

SEQ ID NO: 3681920 - RNA, 22 nt, Human
ucuauugccucugagagcauca

SEQ ID NO: 3681921 - RNA, 17 nt, Human
ucuauugccuucuuuga

SEQ ID NO: 3681922 - RNA, 15 nt, Human
ucuauuggguucauu

SEQ ID NO: 3681923 - RNA, 17 nt, Human
ucuauuggguucauuau

SEQ ID NO: 3681924 - RNA, 22 nt, Human
ucuauuggguucauuauuggaa

SEQ ID NO: 3681925 - RNA, 13 nt, Human
ucuauuguaagau

SEQ ID NO: 3681926 - RNA, 13 nt, Human
ucuauuguacaga

SEQ ID NO: 3681927 - RNA, 15 nt, Human
ucuauuguagcauuu

SEQ ID NO: 3681928 - RNA, 18 nt, Human
ucuauuguagcauuucuu

SEQ ID NO: 3681929 - RNA, 15 nt, Human
ucuauuguccaaagu

SEQ ID NO: 3681930 - RNA, 12 nt, Human
ucuauuguuacu

SEQ ID NO: 3681931 - RNA, 12 nt, Human
ucuauuuaagcc

SEQ ID NO: 3681932 - RNA, 14 nt, Human
ucuauuuaagugua

SEQ ID NO: 3681933 - RNA, 13 nt, Human
ucuauuuaauuuu

SEQ ID NO: 3681934 - RNA, 15 nt, Human
ucuauuuauguuugc

SEQ ID NO: 3681935 - RNA, 16 nt, Human
ucuauuuauuaauauu

SEQ ID NO: 3681936 - RNA, 13 nt, Human
ucuauuuauugga

SEQ ID NO: 3681937 - RNA, 15 nt, Human
ucuauuuauuuacug

SEQ ID NO: 3681938 - RNA, 14 nt, Human
ucuauuucacugga

SEQ ID NO: 3681939 - RNA, 15 nt, Human
ucuauuucaucagaa

SEQ ID NO: 3681940 - RNA, 21 nt, Human
ucuauuucaucagaacagcug

SEQ ID NO: 3681941 - RNA, 21 nt, Human
ucuauuucccccuuucuuccu

SEQ ID NO: 3681942 - RNA, 22 nt, Human
ucuauuucccccuuucuuccuc

SEQ ID NO: 3681943 - RNA, 17 nt, Human
ucuauuucuaugagaaa

SEQ ID NO: 3681944 - RNA, 16 nt, Human
ucuauuucugccuccc

SEQ ID NO: 3681945 - RNA, 21 nt, Human
ucuauuucuggaugaaugccc

SEQ ID NO: 3681946 - RNA, 14 nt, Human
ucuauuugacuugu

SEQ ID NO: 3681947 - RNA, 18 nt, Human
ucuauuuggggcuugaug

SEQ ID NO: 3681948 - RNA, 14 nt, Human
ucuauuuuaaagac

SEQ ID NO: 3681949 - RNA, 12 nt, Human
ucuauuuuaauc

SEQ ID NO: 3681950 - RNA, 12 nt, Human
ucuauuuuaauu

SEQ ID NO: 3681951 - RNA, 18 nt, Human
ucuauuuuauuaugaaga

SEQ ID NO: 3681952 - RNA, 15 nt, Human
ucuauuuucuaugua

SEQ ID NO: 3681953 - RNA, 19 nt, Human
ucuauuuucucugauacuu

SEQ ID NO: 3681954 - RNA, 20 nt, Human
ucuauuuucucugauacuuu

SEQ ID NO: 3681955 - RNA, 20 nt, Human
ucuauuuugaugcagcauuu

SEQ ID NO: 3681956 - RNA, 21 nt, Human
ucuauuuugaugcagcauuug

SEQ ID NO: 3681957 - RNA, 18 nt, Human
ucuauuuuggauuguaua

SEQ ID NO: 3681958 - RNA, 13 nt, Human
ucuauuuuuacau

SEQ ID NO: 3681959 - RNA, 17 nt, Human
ucuauuuuuacauuuaa

SEQ ID NO: 3681960 - RNA, 16 nt, Human
ucuauuuuucucuuca

SEQ ID NO: 3681961 - RNA, 18 nt, Human
ucuauuuuuggagguuua

SEQ ID NO: 3681962 - RNA, 19 nt, Human
ucuauuuuuggagguuuau

SEQ ID NO: 3681963 - RNA, 21 nt, Human
ucuauuuuuggagguuuauua

SEQ ID NO: 3681964 - RNA, 13 nt, Human
ucuauuuuugucu

SEQ ID NO: 3681965 - RNA, 13 nt, Human
ucucaaaaaauaa

SEQ ID NO: 3681966 - RNA, 16 nt, Human
ucucaaaaauacaaaa

SEQ ID NO: 3681967 - RNA, 23 nt, Human
ucucaaaaauacaaaauaaaaac

SEQ ID NO: 3681968 - RNA, 18 nt, Human
ucucaaaagaacuuaccc

SEQ ID NO: 3681969 - RNA, 19 nt, Human
ucucaaaagaacuuacccc

SEQ ID NO: 3681970 - RNA, 13 nt, Human
ucucaaaagcauu

SEQ ID NO: 3681971 - RNA, 13 nt, Human
ucucaaaccucca

SEQ ID NO: 3681972 - RNA, 18 nt, Human
ucucaaaccuccaaaagc

SEQ ID NO: 3681973 - RNA, 20 nt, Human
ucucaaacgguacacagacu

SEQ ID NO: 3681974 - RNA, 15 nt, Human
ucucaaacuaacagg

SEQ ID NO: 3681975 - RNA, 17 nt, Human
ucucaaagaaauauuaa

SEQ ID NO: 3681976 - RNA, 17 nt, Human
ucucaaagaaauuucca

SEQ ID NO: 3681977 - RNA, 19 nt, Human
ucucaaagaaauuuccacu

SEQ ID NO: 3681978 - RNA, 19 nt, Human
ucucaaagccccauuaacu

SEQ ID NO: 3681979 - RNA, 21 nt, Human
ucucaaagccccauuaacugc

SEQ ID NO: 3681980 - RNA, 17 nt, Human
ucucaaaguguggucuc

SEQ ID NO: 3681981 - RNA, 17 nt, Human
ucucaaaguuuugaaaa

SEQ ID NO: 3681982 - RNA, 20 nt, Human
ucucaaaguuuugaaaagcu

SEQ ID NO: 3681983 - RNA, 23 nt, Human
ucucaaaguuuugaaaagcuauu

SEQ ID NO: 3681984 - RNA, 17 nt, Human
ucucaaauaacuaaaag

SEQ ID NO: 3681985 - RNA, 17 nt, Human
ucucaaauucucaaccu

SEQ ID NO: 3681986 - RNA, 23 nt, Human
ucucaaauuguaauuaauaauag

SEQ ID NO: 3681987 - RNA, 16 nt, Human
ucucaaauuucuaaau

SEQ ID NO: 3681988 - RNA, 19 nt, Human
ucucaacaaagcacagugu

SEQ ID NO: 3681989 - RNA, 19 nt, Human
ucucaacaggccucagggc

SEQ ID NO: 3681990 - RNA, 22 nt, Human
ucucaaccuaccaccccuuccu

SEQ ID NO: 3681991 - RNA, 23 nt, Human
ucucaaccuaccaccccuuccug

SEQ ID NO: 3681992 - RNA, 15 nt, Human
ucucaacuccaaacu

SEQ ID NO: 3681993 - RNA, 21 nt, Human
ucucaagaugggggcagggcu

SEQ ID NO: 3681994 - RNA, 22 nt, Human
ucucaagaugggggcagggcug

SEQ ID NO: 3681995 - RNA, 21 nt, Human
ucucaagccgcaucccagacu

SEQ ID NO: 3681996 - RNA, 15 nt, Human
ucucaagcucuuccu

SEQ ID NO: 3681997 - RNA, 20 nt, Human
ucucaaggugggccuugcua

SEQ ID NO: 3681998 - RNA, 15 nt, Human
ucucaaguucuaaga

SEQ ID NO: 3681999 - RNA, 17 nt, Human
ucucaauauucaauaaa

SEQ ID NO: 3682000 - RNA, 12 nt, Human
ucucaaugaaaa

SEQ ID NO: 3682001 - RNA, 12 nt, Human
ucucaaugugaa

SEQ ID NO: 3682002 - RNA, 13 nt, Human
ucucaaugugaaa

SEQ ID NO: 3682003 - RNA, 12 nt, Human
ucucaauuucua

SEQ ID NO: 3682004 - RNA, 12 nt, Human
ucucacacacau

SEQ ID NO: 3682005 - RNA, 14 nt, Human
ucucacacccaccg

SEQ ID NO: 3682006 - RNA, 20 nt, Human
ucucacacugguucucaaug

SEQ ID NO: 3682007 - RNA, 12 nt, Human
ucucacagacag

SEQ ID NO: 3682008 - RNA, 13 nt, Human
ucucacagacagg

SEQ ID NO: 3682009 - RNA, 19 nt, Human
ucucacagacaggaccccu

SEQ ID NO: 3682010 - RNA, 23 nt, Human
ucucacagacaggaccccugcag

SEQ ID NO: 3682011 - RNA, 20 nt, Human
ucucacagcacacucagcac

SEQ ID NO: 3682012 - RNA, 18 nt, Human
ucucacagcuaugcaaaa

SEQ ID NO: 3682013 - RNA, 22 nt, Human
ucucacagcuaugcaaaaagcu

SEQ ID NO: 3682014 - RNA, 22 nt, Human
ucucacagugggagccagggcu

SEQ ID NO: 3682015 - RNA, 20 nt, Human
ucucacaugauuccagccau

SEQ ID NO: 3682016 - RNA, 22 nt, Human
ucucacauggugcuacgccugc

SEQ ID NO: 3682017 - RNA, 23 nt, Human
ucucacauuuuuauaccuguuua

SEQ ID NO: 3682018 - RNA, 17 nt, Human
ucucaccagcugcaaag

SEQ ID NO: 3682019 - RNA, 19 nt, Human
ucucaccagcugcaaagug

SEQ ID NO: 3682020 - RNA, 13 nt, Human
ucucaccaggcag

SEQ ID NO: 3682021 - RNA, 20 nt, Human
ucucaccauuuccccagggc

SEQ ID NO: 3682022 - RNA, 21 nt, Human
ucucaccauuuccccagggca

SEQ ID NO: 3682023 - RNA, 23 nt, Human
ucucacccaugcaagcagaggac

SEQ ID NO: 3682024 - RNA, 19 nt, Human
ucucaccccaucccacacc

SEQ ID NO: 3682025 - RNA, 14 nt, Human
ucucacccuggagg

SEQ ID NO: 3682026 - RNA, 18 nt, Human
ucucacccuggaggcacc

SEQ ID NO: 3682027 - RNA, 21 nt, Human
ucucaccggcucucaccuggc

SEQ ID NO: 3682028 - RNA, 15 nt, Human
ucucaccuccugcug

SEQ ID NO: 3682029 - RNA, 18 nt, Human
ucucaccuccugcugggc

SEQ ID NO: 3682030 - RNA, 14 nt, Human
ucucaccucuaggu

SEQ ID NO: 3682031 - RNA, 14 nt, Human
ucucaccuggcccu

SEQ ID NO: 3682032 - RNA, 21 nt, Human
ucucaccuggcccugcuuccu

SEQ ID NO: 3682033 - RNA, 15 nt, Human
ucucaccuuccaaau

SEQ ID NO: 3682034 - RNA, 16 nt, Human
ucuccaccugcuccca

SEQ ID NO: 3682035 - RNA, 17 nt, Human
ucuccacucaguugcaa

SEQ ID NO: 3682036 - RNA, 15 nt, Human
ucuccacugccuucg

SEQ ID NO: 3682037 - RNA, 21 nt, Human
ucuccacugugcacacccacc

SEQ ID NO: 3682038 - RNA, 18 nt, Human
ucuccagaugagaguaca

SEQ ID NO: 3682039 - RNA, 19 nt, Human
ucuccagauguuuccagac

SEQ ID NO: 3682040 - RNA, 21 nt, Human
ucuccagauuuuucggaggcc

SEQ ID NO: 3682041 - RNA, 13 nt, Human
ucuccagccagca

SEQ ID NO: 3682042 - RNA, 12 nt, Human
ucuccagccccu

SEQ ID NO: 3682043 - RNA, 22 nt, Human
ucuccagccccuggaugcagcc

SEQ ID NO: 3682044 - RNA, 23 nt, Human
ucuccagccccuucucagaaucu

SEQ ID NO: 3682045 - RNA, 23 nt, Human
ucuccagccuggacccccagcuu

SEQ ID NO: 3682046 - RNA, 20 nt, Human
ucuccagcggcccugucauc

SEQ ID NO: 3682047 - RNA, 16 nt, Human
ucuccagcucagaacc

SEQ ID NO: 3682048 - RNA, 12 nt, Human
ucuccagcugac

SEQ ID NO: 3682049 - RNA, 21 nt, Human
ucuccagcugggcucugcaau

SEQ ID NO: 3682050 - RNA, 13 nt, Human
ucuccagcuuccc

SEQ ID NO: 3682051 - RNA, 17 nt, Human
ucuccaggcacccuucu

SEQ ID NO: 3682052 - RNA, 13 nt, Human
ucuccaggcauuu

SEQ ID NO: 3682053 - RNA, 18 nt, Human
ucuccaggggcugcuucc

SEQ ID NO: 3682054 - RNA, 23 nt, Human
ucuccaggggcugcuuccuccug

SEQ ID NO: 3682055 - RNA, 20 nt, Human
ucuccagugguugcuguuga

SEQ ID NO: 3682056 - RNA, 21 nt, Human
ucuccauaaccccacccuugc

SEQ ID NO: 3682057 - RNA, 14 nt, Human
ucuccauauguuac

SEQ ID NO: 3682058 - RNA, 15 nt, Human
ucuccauauguuaca

SEQ ID NO: 3682059 - RNA, 21 nt, Human
ucuccaucacccucuuccugu

SEQ ID NO: 3682060 - RNA, 17 nt, Human
ucuccaucagaggacac

SEQ ID NO: 3682061 - RNA, 16 nt, Human
ucuccaucucucuggc

SEQ ID NO: 3682062 - RNA, 17 nt, Human
ucuccaucuggcagggu

SEQ ID NO: 3682063 - RNA, 14 nt, Human
ucuccaucuguuug

SEQ ID NO: 3682064 - RNA, 20 nt, Human
ucuccauggccaccuuuuca

SEQ ID NO: 3682065 - RNA, 15 nt, Human
ucuccauggcccugc

SEQ ID NO: 3682066 - RNA, 17 nt, Human
ucuccauggcuuccucc

SEQ ID NO: 3682067 - RNA, 17 nt, Human
ucuccauuucacuggcu

SEQ ID NO: 3682068 - RNA, 23 nt, Human
ucuccauuugcucuucagaugcc

SEQ ID NO: 3682069 - RNA, 22 nt, Human
ucuccauuuuggugucuuucuc

SEQ ID NO: 3682070 - RNA, 22 nt, Human
ucucccaacucuugcacaguca

SEQ ID NO: 3682071 - RNA, 13 nt, Human
ucucccacccucu

SEQ ID NO: 3682072 - RNA, 15 nt, Human
ucucccacccucuuc

SEQ ID NO: 3682073 - RNA, 12 nt, Human
ucucccacccug

SEQ ID NO: 3682074 - RNA, 19 nt, Human
ucucccacuagacaagucc

SEQ ID NO: 3682075 - RNA, 17 nt, Human
ucucccagcucuagaca

SEQ ID NO: 3682076 - RNA, 13 nt, Human
ucucccaggcccc

SEQ ID NO: 3682077 - RNA, 22 nt, Human
ucucccagggcuacucacucaa

SEQ ID NO: 3682078 - RNA, 11 nt, Human
ucucccaguug

SEQ ID NO: 3682079 - RNA, 13 nt, Human
ucucccaguuguc

SEQ ID NO: 3682080 - RNA, 11 nt, Human
ucucccauccc

SEQ ID NO: 3682081 - RNA, 13 nt, Human
ucucccauccccc

SEQ ID NO: 3682082 - RNA, 14 nt, Human
ucucccaucccccu

SEQ ID NO: 3682083 - RNA, 18 nt, Human
ucucccaucccccugccc

SEQ ID NO: 3682084 - RNA, 22 nt, Human
ucucccaucccccugcccucgu

SEQ ID NO: 3682085 - RNA, 18 nt, Human
ucucccaucucuuccuug

SEQ ID NO: 3682086 - RNA, 15 nt, Human
ucucccauggagccc

SEQ ID NO: 3682087 - RNA, 18 nt, Human
ucucccauugucccucug

SEQ ID NO: 3682088 - RNA, 19 nt, Human
ucucccauugucccucugc

SEQ ID NO: 3682089 - RNA, 22 nt, Human
ucuccccaacccccauucucau

SEQ ID NO: 3682090 - RNA, 23 nt, Human
ucuccccaacccccauucucauc

SEQ ID NO: 3682091 - RNA, 13 nt, Human
ucuccccacacua

SEQ ID NO: 3682092 - RNA, 12 nt, Human
ucuccccagagu

SEQ ID NO: 3682093 - RNA, 16 nt, Human
ucuccccagcccagag

SEQ ID NO: 3682094 - RNA, 20 nt, Human
ucuccccaggguucaguccu

SEQ ID NO: 3682095 - RNA, 22 nt, Human
ucuccccaugugccugcaccag

SEQ ID NO: 3682096 - RNA, 17 nt, Human
ucucccccaacagcugg

SEQ ID NO: 3682097 - RNA, 23 nt, Human
ucucccccacccuuguuccaguu

SEQ ID NO: 3682098 - RNA, 13 nt, Human
ucucccccccggg

SEQ ID NO: 3682099 - RNA, 22 nt, Human
ucuccccgcuaaggaagauauc

SEQ ID NO: 3682100 - RNA, 13 nt, Human
ucuccccucaaag

SEQ ID NO: 3682101 - RNA, 13 nt, Human
ucuccccucagag

SEQ ID NO: 3682102 - RNA, 18 nt, Human
ucuccccucagagugcaa

SEQ ID NO: 3682103 - RNA, 14 nt, Human
ucuccccuccagcc

SEQ ID NO: 3682104 - RNA, 16 nt, Human
ucuccccuccagccuu

SEQ ID NO: 3682105 - RNA, 13 nt, Human
ucuccccucugcu

SEQ ID NO: 3682106 - RNA, 16 nt, Human
ucuccccucugcuggc

SEQ ID NO: 3682107 - RNA, 16 nt, Human
ucuccccugcacugua

SEQ ID NO: 3682108 - RNA, 20 nt, Human
ucucccggagguuggguggg

SEQ ID NO: 3682109 - RNA, 20 nt, Human
ucucccgggaagccacccuc

SEQ ID NO: 3682110 - RNA, 16 nt, Human
ucucccuagcuccucc

SEQ ID NO: 3682111 - RNA, 18 nt, Human
ucucccuauaaugcugga

SEQ ID NO: 3682112 - RNA, 23 nt, Human
ucucccucagucuggcccuuccu

SEQ ID NO: 3682113 - RNA, 18 nt, Human
ucucccuccccugccauu

SEQ ID NO: 3682114 - RNA, 12 nt, Human
ucucccucucac

SEQ ID NO: 3682115 - RNA, 17 nt, Human
ucucccucucacugucu

SEQ ID NO: 3682116 - RNA, 14 nt, Human
ucucccucuccugc

SEQ ID NO: 3682117 - RNA, 16 nt, Human
ucucccucuccugccu

SEQ ID NO: 3682118 - RNA, 17 nt, Human
ucucccucuccugccua

SEQ ID NO: 3682119 - RNA, 16 nt, Human
ucucccucuggcccug

SEQ ID NO: 3682120 - RNA, 17 nt, Human
ucucccucuggcccugc

SEQ ID NO: 3682121 - RNA, 18 nt, Human
ucucccucuggcccugcc

SEQ ID NO: 3682122 - RNA, 16 nt, Human
ucucccucugguccca

SEQ ID NO: 3682123 - RNA, 21 nt, Human
ucucccucuucucaagugccu

SEQ ID NO: 3682124 - RNA, 22 nt, Human
ucucccugagaugggcuuccca

SEQ ID NO: 3682125 - RNA, 14 nt, Human
ucucccugcauggc

SEQ ID NO: 3682126 - RNA, 15 nt, Human
ucucccugccagagg

SEQ ID NO: 3682127 - RNA, 14 nt, Human
ucucccugccgccu

SEQ ID NO: 3682128 - RNA, 12 nt, Human
ucucccugccug

SEQ ID NO: 3682129 - RNA, 17 nt, Human
ucucccugccuggcccc

SEQ ID NO: 3682130 - RNA, 18 nt, Human
ucucccugcugcuccuag

SEQ ID NO: 3682131 - RNA, 20 nt, Human
ucucccugcugcuccuagga

SEQ ID NO: 3682132 - RNA, 20 nt, Human
ucucccuggaaugaguugag

SEQ ID NO: 3682133 - RNA, 13 nt, Human
ucucccuggcccu

SEQ ID NO: 3682134 - RNA, 14 nt, Human
ucucccuggcccuc

SEQ ID NO: 3682135 - RNA, 13 nt, Human
ucucccuggugcu

SEQ ID NO: 3682136 - RNA, 13 nt, Human
ucucccuucccuc

SEQ ID NO: 3682137 - RNA, 19 nt, Human
ucucccuuggauugucccc

SEQ ID NO: 3682138 - RNA, 21 nt, Human
ucucccuuggauuguccccga

SEQ ID NO: 3682139 - RNA, 17 nt, Human
ucucccuugggcucuga

SEQ ID NO: 3682140 - RNA, 18 nt, Human
ucucccuugggcucugau

SEQ ID NO: 3682141 - RNA, 17 nt, Human
ucuccgaaaugcugucu

SEQ ID NO: 3682142 - RNA, 23 nt, Human
ucuccgaaaugcugucuuucuug

SEQ ID NO: 3682143 - RNA, 17 nt, Human
ucuccgaccagacaccu

SEQ ID NO: 3682144 - RNA, 14 nt, Human
ucuccgccagccuc

SEQ ID NO: 3682145 - RNA, 18 nt, Human
ucuccgccagccuccucu

SEQ ID NO: 3682146 - RNA, 20 nt, Human
ucuccgccagccuccucugg

SEQ ID NO: 3682147 - RNA, 21 nt, Human
ucuccgccccugagcccacug

SEQ ID NO: 3682148 - RNA, 18 nt, Human
ucuccggccucuccagcc

SEQ ID NO: 3682149 - RNA, 14 nt, Human
ucuccggcucccag

SEQ ID NO: 3682150 - RNA, 21 nt, Human
ucuccguuagcuccuguggcc

SEQ ID NO: 3682151 - RNA, 14 nt, Human
ucuccuacuccuga

SEQ ID NO: 3682152 - RNA, 16 nt, Human
ucuccuacuccugacu

SEQ ID NO: 3682153 - RNA, 19 nt, Human
ucuccuagagacagaagca

SEQ ID NO: 3682154 - RNA, 14 nt, Human
ucuccuagccccug

SEQ ID NO: 3682155 - RNA, 21 nt, Human
ucuccuaggcauucuggaccu

SEQ ID NO: 3682156 - RNA, 19 nt, Human
ucuccuauaaucugucaaa

SEQ ID NO: 3682157 - RNA, 15 nt, Human
ucuccuauauauuuc

SEQ ID NO: 3682158 - RNA, 14 nt, Human
ucuccuauguguaa

SEQ ID NO: 3682159 - RNA, 20 nt, Human
ucuccuauuuuuuuaaaauc

SEQ ID NO: 3682160 - RNA, 20 nt, Human
ucuccucaaguccccaagau

SEQ ID NO: 3682161 - RNA, 13 nt, Human
ucuccucacuccc

SEQ ID NO: 3682162 - RNA, 23 nt, Human
ucuccucacucccuucuaccugc

SEQ ID NO: 3682163 - RNA, 14 nt, Human
ucuccucagacugc

SEQ ID NO: 3682164 - RNA, 20 nt, Human
ucuccucagccuccucaucu

SEQ ID NO: 3682165 - RNA, 14 nt, Human
ucuccucaggacca

SEQ ID NO: 3682166 - RNA, 16 nt, Human
ucuccucauguucugc

SEQ ID NO: 3682167 - RNA, 20 nt, Human
ucuccuccaccgccauggcu

SEQ ID NO: 3682168 - RNA, 17 nt, Human
ucuccuccauacucagg

SEQ ID NO: 3682169 - RNA, 18 nt, Human
ucuccuccauacucagga

SEQ ID NO: 3682170 - RNA, 20 nt, Human
ucuccuccaugggagaaaau

SEQ ID NO: 3682171 - RNA, 12 nt, Human
ucuccucccagg

SEQ ID NO: 3682172 - RNA, 13 nt, Human
ucuccucccuucc

SEQ ID NO: 3682173 - RNA, 21 nt, Human
ucuccuccuuuucacaguucu

SEQ ID NO: 3682174 - RNA, 13 nt, Human
ucuccucuccccu

SEQ ID NO: 3682175 - RNA, 16 nt, Human
ucuccucugcugcugg

SEQ ID NO: 3682176 - RNA, 20 nt, Human
ucuccucugcugcuggcugg

SEQ ID NO: 3682177 - RNA, 12 nt, Human
ucuccucuuaaa

SEQ ID NO: 3682178 - RNA, 13 nt, Human
ucuccucuugcca

SEQ ID NO: 3682179 - RNA, 16 nt, Human
ucuccucuugccacug

SEQ ID NO: 3682180 - RNA, 17 nt, Human
ucuccucuugccacugc

SEQ ID NO: 3682181 - RNA, 23 nt, Human
ucuccucuuguaaauaaagcccu

SEQ ID NO: 3682182 - RNA, 20 nt, Human
ucuccucuuuaaaacaaaac

SEQ ID NO: 3682183 - RNA, 16 nt, Human
ucuccucuuuuaucuu

SEQ ID NO: 3682184 - RNA, 15 nt, Human
ucuccugacuggugc

SEQ ID NO: 3682185 - RNA, 22 nt, Human
ucuccugccacauuagaacuuc

SEQ ID NO: 3682186 - RNA, 14 nt, Human
ucuccugccucagc

SEQ ID NO: 3682187 - RNA, 20 nt, Human
ucuccugccugugcugugac

SEQ ID NO: 3682188 - RNA, 16 nt, Human
ucuccugccuuccucc

SEQ ID NO: 3682189 - RNA, 13 nt, Human
ucuccugccuuug

SEQ ID NO: 3682190 - RNA, 19 nt, Human
ucuccugcugcucccucag

SEQ ID NO: 3682191 - RNA, 21 nt, Human
ucuccugcugcucccucagac

SEQ ID NO: 3682192 - RNA, 11 nt, Human
ucuccuggagg

SEQ ID NO: 3682193 - RNA, 12 nt, Human
ucuccuggagga

SEQ ID NO: 3682194 - RNA, 13 nt, Human
ucuccuggaggau

SEQ ID NO: 3682195 - RNA, 22 nt, Human
ucuccuggcuucccauccccag

SEQ ID NO: 3682196 - RNA, 13 nt, Human
ucuccugggcagc

SEQ ID NO: 3682197 - RNA, 17 nt, Human
ucuccugggcagcugcc

SEQ ID NO: 3682198 - RNA, 19 nt, Human
ucuccugggccccucccua

SEQ ID NO: 3682199 - RNA, 20 nt, Human
ucuccugggccccucccuac

SEQ ID NO: 3682200 - RNA, 22 nt, Human
ucuccugggccccucccuaccu

SEQ ID NO: 3682201 - RNA, 15 nt, Human
ucuccuguaccucuu

SEQ ID NO: 3682202 - RNA, 16 nt, Human
ucuccuguaccucuug

SEQ ID NO: 3682203 - RNA, 16 nt, Human
ucuccuguccaaccua

SEQ ID NO: 3682204 - RNA, 23 nt, Human
ucuccugugcaugggugaaggga

SEQ ID NO: 3682205 - RNA, 15 nt, Human
ucuccugugcccaca

SEQ ID NO: 3682206 - RNA, 18 nt, Human
ucuccuguuucccuuccc

SEQ ID NO: 3682207 - RNA, 20 nt, Human
ucuccuuaaagaguguggca

SEQ ID NO: 3682208 - RNA, 18 nt, Human
ucuccuuaagagacaauu

SEQ ID NO: 3682209 - RNA, 20 nt, Human
ucuccuuaagcugcagagau

SEQ ID NO: 3682210 - RNA, 17 nt, Human
ucuccuuagcuucuggc

SEQ ID NO: 3682211 - RNA, 14 nt, Human
ucuccuuagucuuc

SEQ ID NO: 3682212 - RNA, 19 nt, Human
ucuccuuagucuucucaua

SEQ ID NO: 3682213 - RNA, 19 nt, Human
ucuccuucagcccucaccc

SEQ ID NO: 3682214 - RNA, 20 nt, Human
ucuccuucagcccucacccc

SEQ ID NO: 3682215 - RNA, 11 nt, Human
ucuccuuccaa

SEQ ID NO: 3682216 - RNA, 15 nt, Human
ucuccuuccaacugc

SEQ ID NO: 3682217 - RNA, 21 nt, Human
ucuccuuccaacugcugcccc

SEQ ID NO: 3682218 - RNA, 19 nt, Human
ucuccuuccccuuucccca

SEQ ID NO: 3682219 - RNA, 14 nt, Human
ucuccuuccugugu

SEQ ID NO: 3682220 - RNA, 16 nt, Human
ucuccuuccugugugu

SEQ ID NO: 3682221 - RNA, 18 nt, Human
ucuccuucguaucccgag

SEQ ID NO: 3682222 - RNA, 19 nt, Human
ucuccuucguaucccgagu

SEQ ID NO: 3682223 - RNA, 19 nt, Human
ucuccuucuaaaaacuucu

SEQ ID NO: 3682224 - RNA, 13 nt, Human
ucuccuucuuagc

SEQ ID NO: 3682225 - RNA, 16 nt, Human
ucuccuugauaacagc

SEQ ID NO: 3682226 - RNA, 13 nt, Human
ucuccuugcccua

SEQ ID NO: 3682227 - RNA, 19 nt, Human
ucuccuugcccuagaugag

SEQ ID NO: 3682228 - RNA, 21 nt, Human
ucuccuuggugucgggcauga

SEQ ID NO: 3682229 - RNA, 21 nt, Human
ucuccuuguguuacuaaguuu

SEQ ID NO: 3682230 - RNA, 16 nt, Human
ucuccuuucacaaccu

SEQ ID NO: 3682231 - RNA, 23 nt, Human
ucuccuuucaccccagggccuga

SEQ ID NO: 3682232 - RNA, 20 nt, Human
ucuccuuucuuuuucuucuu

SEQ ID NO: 3682233 - RNA, 22 nt, Human
ucuccuuugcacugagggccac

SEQ ID NO: 3682234 - RNA, 23 nt, Human
ucuccuuugcaggcucauaggga

SEQ ID NO: 3682235 - RNA, 19 nt, Human
ucuccuuuguacuuugugc

SEQ ID NO: 3682236 - RNA, 22 nt, Human
ucuccuuuguauauuauuucua

SEQ ID NO: 3682237 - RNA, 17 nt, Human
ucuccuuuguauucugu

SEQ ID NO: 3682238 - RNA, 17 nt, Human
ucuccuuuucuuuuguu

SEQ ID NO: 3682239 - RNA, 20 nt, Human
ucuccuuuucuuuuguuacu

SEQ ID NO: 3682240 - RNA, 22 nt, Human
ucuccuuuucuuuuguuacugu

SEQ ID NO: 3682241 - RNA, 16 nt, Human
ucucgagcgcccugca

SEQ ID NO: 3682242 - RNA, 22 nt, Human
ucucgagcgcccugcagacccu

SEQ ID NO: 3682243 - RNA, 12 nt, Human
ucucgagcuugg

SEQ ID NO: 3682244 - RNA, 17 nt, Human
ucucgaugcaaugaaca

SEQ ID NO: 3682245 - RNA, 16 nt, Human
ucucgcauaggaccuu

SEQ ID NO: 3682246 - RNA, 18 nt, Human
ucucgcucccucccagga

SEQ ID NO: 3682247 - RNA, 21 nt, Human
ucucgcucuguugcccaggcu

SEQ ID NO: 3682248 - RNA, 17 nt, Human
ucucggaaggcuggcug

SEQ ID NO: 3682249 - RNA, 22 nt, Human
ucucuugguguuaaaacacuuc

SEQ ID NO: 3682250 - RNA, 17 nt, Human
ucucuuuaacucaggac

SEQ ID NO: 3682251 - RNA, 20 nt, Human
ucucuuuaacucaggacucc

SEQ ID NO: 3682252 - RNA, 23 nt, Human
ucucuuuaacucaggacuccagc

SEQ ID NO: 3682253 - RNA, 16 nt, Human
ucucuuuaaucuucag

SEQ ID NO: 3682254 - RNA, 20 nt, Human
ucucuuuaaucuucaguuuu

SEQ ID NO: 3682255 - RNA, 14 nt, Human
ucucuuuauuccua

SEQ ID NO: 3682256 - RNA, 15 nt, Human
ucucuuuauuccuag

SEQ ID NO: 3682257 - RNA, 16 nt, Human
ucucuuucccuggucc

SEQ ID NO: 3682258 - RNA, 19 nt, Human
ucucuuucccuggucccuu

SEQ ID NO: 3682259 - RNA, 14 nt, Human
ucucuuucucucuu

SEQ ID NO: 3682260 - RNA, 17 nt, Human
ucucuuucucucuuccc

SEQ ID NO: 3682261 - RNA, 20 nt, Human
ucucuuucuuccuuuacuuu

SEQ ID NO: 3682262 - RNA, 18 nt, Human
ucucuuugauuauuugca

SEQ ID NO: 3682263 - RNA, 13 nt, Human
ucucuuugccuca

SEQ ID NO: 3682264 - RNA, 21 nt, Human
ucucuuuguggggcuuggcgu

SEQ ID NO: 3682265 - RNA, 17 nt, Human
ucucuuuguucuaaaga

SEQ ID NO: 3682266 - RNA, 16 nt, Human
ucucuuuucaaaacau

SEQ ID NO: 3682267 - RNA, 14 nt, Human
ucucuuuucaagaa

SEQ ID NO: 3682268 - RNA, 12 nt, Human
ucucuuuuccac

SEQ ID NO: 3682269 - RNA, 22 nt, Human
ucucuuuuccacuccauugucg

SEQ ID NO: 3682270 - RNA, 21 nt, Human
ucucuuuuccccuuuccuguc

SEQ ID NO: 3682271 - RNA, 21 nt, Human
ucucuuuuccuguuguauuga

SEQ ID NO: 3682272 - RNA, 12 nt, Human
ucucuuuucucu

SEQ ID NO: 3682273 - RNA, 20 nt, Human
ucucuuuugaaacaauacuc

SEQ ID NO: 3682274 - RNA, 13 nt, Human
ucucuuuuucagu

SEQ ID NO: 3682275 - RNA, 21 nt, Human
ucucuuuuugacucuugcaau

SEQ ID NO: 3682276 - RNA, 16 nt, Human
ucucuuuuuuacaaag

SEQ ID NO: 3682277 - RNA, 22 nt, Human
ucugaaaaccccauuugcuuuc

SEQ ID NO: 3682278 - RNA, 17 nt, Human
ucugaaaacggcccucu

SEQ ID NO: 3682279 - RNA, 14 nt, Human
ucugaaaacuggaa

SEQ ID NO: 3682280 - RNA, 13 nt, Human
ucugaaaagaaau

SEQ ID NO: 3682281 - RNA, 15 nt, Human
ucugaaaagaaauaa

SEQ ID NO: 3682282 - RNA, 18 nt, Human
ucugaaaagugaagacag

SEQ ID NO: 3682283 - RNA, 19 nt, Human
ucugaaaagugaagacaga

SEQ ID NO: 3682284 - RNA, 13 nt, Human
ucugaaaauauaa

SEQ ID NO: 3682285 - RNA, 18 nt, Human
ucugaaaauuaacacugc

SEQ ID NO: 3682286 - RNA, 19 nt, Human
ucugaaaauuaacacugcu

SEQ ID NO: 3682287 - RNA, 9 nt, Human
ucugaaaca

SEQ ID NO: 3682288 - RNA, 13 nt, Human
ucugaaacagcug

SEQ ID NO: 3682289 - RNA, 20 nt, Human
ucugaaacauuucauaauuu

SEQ ID NO: 3682290 - RNA, 16 nt, Human
ucugaaaccaaaugua

SEQ ID NO: 3682291 - RNA, 15 nt, Human
ucugaaacuaaugaa

SEQ ID NO: 3682292 - RNA, 12 nt, Human
ucugaaagagaa

SEQ ID NO: 3682293 - RNA, 13 nt, Human
ucugaaagcacag

SEQ ID NO: 3682294 - RNA, 19 nt, Human
ucugaaaguuacccacuga

SEQ ID NO: 3682295 - RNA, 17 nt, Human
ucugaaauaggaaacaa

SEQ ID NO: 3682296 - RNA, 17 nt, Human
ucugaaauauaaagucu

SEQ ID NO: 3682297 - RNA, 14 nt, Human
ucugaaaucuccuu

SEQ ID NO: 3682298 - RNA, 16 nt, Human
ucugaaaucugaagac

SEQ ID NO: 3682299 - RNA, 14 nt, Human
ucugaaaugaaaca

SEQ ID NO: 3682300 - RNA, 14 nt, Human
ucugaaauucuaaa

SEQ ID NO: 3682301 - RNA, 17 nt, Human
ucugaaauuuccuggga

SEQ ID NO: 3682302 - RNA, 20 nt, Human
ucugaaauuuccugggagcu

SEQ ID NO: 3682303 - RNA, 18 nt, Human
ucugaacacaggcagcuu

SEQ ID NO: 3682304 - RNA, 15 nt, Human
ucugaacacgaagcu

SEQ ID NO: 3682305 - RNA, 14 nt, Human
ucugaacagcuggu

SEQ ID NO: 3682306 - RNA, 20 nt, Human
ucugaacagcugguguagcu

SEQ ID NO: 3682307 - RNA, 21 nt, Human
ucugaacagcugguguagcua

SEQ ID NO: 3682308 - RNA, 16 nt, Human
ucugaaccauuaaagu

SEQ ID NO: 3682309 - RNA, 12 nt, Human
ucugaacucaaa

SEQ ID NO: 3682310 - RNA, 15 nt, Human
ucugaacuggagcca

SEQ ID NO: 3682311 - RNA, 20 nt, Human
ucugaacuggagccaugggc

SEQ ID NO: 3682312 - RNA, 17 nt, Human
ucugaacuugccuuaaa

SEQ ID NO: 3682313 - RNA, 20 nt, Human
ucugaacuuggcgcugcccc

SEQ ID NO: 3682314 - RNA, 21 nt, Human
ucugaacuuugggaagccuuu

SEQ ID NO: 3682315 - RNA, 22 nt, Human
ucugaagaccucgagcagauga

SEQ ID NO: 3682316 - RNA, 22 nt, Human
ucugaagaguggguuucacaag

SEQ ID NO: 3682317 - RNA, 12 nt, Human
ucugaagcagau

SEQ ID NO: 3682318 - RNA, 13 nt, Human
ucugaagcauguu

SEQ ID NO: 3682319 - RNA, 21 nt, Human
ucugaagcgugauuuuaaaau

SEQ ID NO: 3682320 - RNA, 21 nt, Human
ucugaagcucaacucucuuau

SEQ ID NO: 3682321 - RNA, 21 nt, Human
ucugaagcugacgaacuucca

SEQ ID NO: 3682322 - RNA, 18 nt, Human
ucugaagcuugacuccca

SEQ ID NO: 3682323 - RNA, 21 nt, Human
ucugaagcuuuaccagcugaa

SEQ ID NO: 3682324 - RNA, 19 nt, Human
ucugaaggacacuuccugc

SEQ ID NO: 3682325 - RNA, 20 nt, Human
ucugaaggacacuuccugcc

SEQ ID NO: 3682326 - RNA, 21 nt, Human
ucugaaggacauugcggacag

SEQ ID NO: 3682327 - RNA, 17 nt, Human
ucugaaggaggccaccu

SEQ ID NO: 3682328 - RNA, 18 nt, Human
ucugaaggcuggguucug

SEQ ID NO: 3682329 - RNA, 13 nt, Human
ucugaagggaggu

SEQ ID NO: 3682330 - RNA, 16 nt, Human
ucugaagucacugcac

SEQ ID NO: 3682331 - RNA, 18 nt, Human
ucugaagucacugcacag

SEQ ID NO: 3682332 - RNA, 22 nt, Human
ucugaagugaaacugcuuguuu

SEQ ID NO: 3682333 - RNA, 18 nt, Human
ucugaaguuauauuuccu

SEQ ID NO: 3682334 - RNA, 19 nt, Human
ucugaaguuauauuuccua

SEQ ID NO: 3682335 - RNA, 16 nt, Human
ucugaaguuggacagc

SEQ ID NO: 3682336 - RNA, 14 nt, Human
ucugaauaugcugc

SEQ ID NO: 3682337 - RNA, 19 nt, Human
ucugaaucucaagaugggg

SEQ ID NO: 3682338 - RNA, 15 nt, Human
ucugaaucuucugaa

SEQ ID NO: 3682339 - RNA, 17 nt, Human
ucugaaugcugcuacuu

SEQ ID NO: 3682340 - RNA, 13 nt, Human
ucugaaugcuucu

SEQ ID NO: 3682341 - RNA, 13 nt, Human
ucugaauggucca

SEQ ID NO: 3682342 - RNA, 16 nt, Human
ucugaauguaauuugu

SEQ ID NO: 3682343 - RNA, 23 nt, Human
ucugaauguaauuuguguaauaa

SEQ ID NO: 3682344 - RNA, 16 nt, Human
ucugaauguucugaca

SEQ ID NO: 3682345 - RNA, 19 nt, Human
ucugaauuaguccuugcuu

SEQ ID NO: 3682346 - RNA, 14 nt, Human
ucugaauuccaagu

SEQ ID NO: 3682347 - RNA, 21 nt, Human
ucugaauuuacuuccuugcau

SEQ ID NO: 3682348 - RNA, 20 nt, Human
ucugaauuugcaaaguacug

SEQ ID NO: 3682349 - RNA, 19 nt, Human
ucugaauuugcccugggaa

SEQ ID NO: 3682350 - RNA, 22 nt, Human
ucugaauuuuggggauuuucaa

SEQ ID NO: 3682351 - RNA, 15 nt, Human
ucugaauuuuuaaac

SEQ ID NO: 3682352 - RNA, 23 nt, Human
ucugacaagggcugaccugccuc

SEQ ID NO: 3682353 - RNA, 14 nt, Human
ucugacacaaaaaa

SEQ ID NO: 3682354 - RNA, 16 nt, Human
ucugacacacagcucu

SEQ ID NO: 3682355 - RNA, 18 nt, Human
ucugacacacagcucugu

SEQ ID NO: 3682356 - RNA, 13 nt, Human
ucugacaccuauu

SEQ ID NO: 3682357 - RNA, 13 nt, Human
ucugacagcagca

SEQ ID NO: 3682358 - RNA, 14 nt, Human
ucugacagcagcau

SEQ ID NO: 3682359 - RNA, 15 nt, Human
ucugacauaaguauu

SEQ ID NO: 3682360 - RNA, 12 nt, Human
ucugacaucucu

SEQ ID NO: 3682361 - RNA, 16 nt, Human
ucugacaucucugcaa

SEQ ID NO: 3682362 - RNA, 22 nt, Human
ucugacauuaacaguuuuccau

SEQ ID NO: 3682363 - RNA, 13 nt, Human
ucugaccacgugc

SEQ ID NO: 3682364 - RNA, 17 nt, Human
ucugaccagcagcgccu

SEQ ID NO: 3682365 - RNA, 11 nt, Human
ucugacccagu

SEQ ID NO: 3682366 - RNA, 15 nt, Human
ucugacccagugaga

SEQ ID NO: 3682367 - RNA, 13 nt, Human
ucugacccagugc

SEQ ID NO: 3682368 - RNA, 14 nt, Human
ucugacccaugcug

SEQ ID NO: 3682369 - RNA, 15 nt, Human
ucugacccaugcugc

SEQ ID NO: 3682370 - RNA, 16 nt, Human
ucugacccaugcugcc

SEQ ID NO: 3682371 - RNA, 20 nt, Human
ucugacccaugcugcccugu

SEQ ID NO: 3682372 - RNA, 13 nt, Human
ucugaccccuccu

SEQ ID NO: 3682373 - RNA, 18 nt, Human
ucugaccccuccucacug

SEQ ID NO: 3682374 - RNA, 21 nt, Human
ucugacccuagcucuuuccuu

SEQ ID NO: 3682375 - RNA, 14 nt, Human
ucugacccucucca

SEQ ID NO: 3682376 - RNA, 12 nt, Human
ucugaccucagc

SEQ ID NO: 3682377 - RNA, 14 nt, Human
ucugaccucagcau

SEQ ID NO: 3682378 - RNA, 18 nt, Human
ucugaccugcacugggga

SEQ ID NO: 3682379 - RNA, 15 nt, Human
ucugaccugcaggcc

SEQ ID NO: 3682380 - RNA, 16 nt, Human
ucugaccugcaggcca

SEQ ID NO: 3682381 - RNA, 17 nt, Human
ucugaccugcaggccaa

SEQ ID NO: 3682382 - RNA, 15 nt, Human
ucugaccuucagcuc

SEQ ID NO: 3682383 - RNA, 22 nt, Human
ucugacgcaaaaccacuuuccu

SEQ ID NO: 3682384 - RNA, 17 nt, Human
ucugacggcccugcaau

SEQ ID NO: 3682385 - RNA, 15 nt, Human
ucugacgggauuugu

SEQ ID NO: 3682386 - RNA, 20 nt, Human
ucugacgugccuuuugcacc

SEQ ID NO: 3682387 - RNA, 23 nt, Human
ucugacgugccuuuugcaccccu

SEQ ID NO: 3682388 - RNA, 22 nt, Human
ucugacuacugggcaaagagug

SEQ ID NO: 3682389 - RNA, 16 nt, Human
ucugacucacaagaag

SEQ ID NO: 3682390 - RNA, 19 nt, Human
ucugacucccaaagagcug

SEQ ID NO: 3682391 - RNA, 16 nt, Human
ucugacucgguuucuc

SEQ ID NO: 3682392 - RNA, 14 nt, Human
ucugacucugagcu

SEQ ID NO: 3682393 - RNA, 16 nt, Human
ucugacucuuccccag

SEQ ID NO: 3682394 - RNA, 21 nt, Human
ucugacuguuuccaucaaggg

SEQ ID NO: 3682395 - RNA, 19 nt, Human
ucugacuuaagcaaaagaa

SEQ ID NO: 3682396 - RNA, 23 nt, Human
ucugacuuccccgcauuccaggc

SEQ ID NO: 3682397 - RNA, 12 nt, Human
ucugacuucugc

SEQ ID NO: 3682398 - RNA, 14 nt, Human
ucugacuucugccu

SEQ ID NO: 3682399 - RNA, 14 nt, Human
ucugacuuggggac

SEQ ID NO: 3682400 - RNA, 17 nt, Human
aagaugggggcaagaag

SEQ ID NO: 3682401 - RNA, 21 nt, Human
aagaugggggcagggcugugc

SEQ ID NO: 3682402 - RNA, 23 nt, Human
aagaugggggcagggcugugcuu

SEQ ID NO: 3682403 - RNA, 20 nt, Human
aagauggggucuguaaaauc

SEQ ID NO: 3682404 - RNA, 16 nt, Human
aagaugguauauuugg

SEQ ID NO: 3682405 - RNA, 17 nt, Human
aagaugguuaaacauuu

SEQ ID NO: 3682406 - RNA, 19 nt, Human
aagauguagauuuauuuca

SEQ ID NO: 3682407 - RNA, 14 nt, Human
aagauguagcaaac

SEQ ID NO: 3682408 - RNA, 18 nt, Human
aagauguagcaaacccug

SEQ ID NO: 3682409 - RNA, 23 nt, Human
aagaugucucagguuuguuuugu

SEQ ID NO: 3682410 - RNA, 11 nt, Human
aagaugucugu

SEQ ID NO: 3682411 - RNA, 20 nt, Human
aagaugucuguuugcugaug

SEQ ID NO: 3682412 - RNA, 15 nt, Human
aagaugugaauuauu

SEQ ID NO: 3682413 - RNA, 18 nt, Human
aagaugugaauuauugac

SEQ ID NO: 3682414 - RNA, 23 nt, Human
aagaugugaauuauugacacuga

SEQ ID NO: 3682415 - RNA, 14 nt, Human
aagaugugacaugu

SEQ ID NO: 3682416 - RNA, 18 nt, Human
aagaugugauauucuaag

SEQ ID NO: 3682417 - RNA, 15 nt, Human
aagaugugucuucaa

SEQ ID NO: 3682418 - RNA, 18 nt, Human
aagauguguucuuauuuu

SEQ ID NO: 3682419 - RNA, 16 nt, Human
aagauguuauauuuuu

SEQ ID NO: 3682420 - RNA, 16 nt, Human
aagauguuaugguguu

SEQ ID NO: 3682421 - RNA, 21 nt, Human
aagauguugauuuuuacugug

SEQ ID NO: 3682422 - RNA, 20 nt, Human
aagauuacucaguaauuugu

SEQ ID NO: 3682423 - RNA, 18 nt, Human
aagauuacuuagaggaaa

SEQ ID NO: 3682424 - RNA, 17 nt, Human
aagauuacuuuuucuuu

SEQ ID NO: 3682425 - RNA, 13 nt, Human
aagauuagaauga

SEQ ID NO: 3682426 - RNA, 22 nt, Human
aagauuagcaaggucauuucuu

SEQ ID NO: 3682427 - RNA, 14 nt, Human
aagauuauagauuc

SEQ ID NO: 3682428 - RNA, 20 nt, Human
aagauucaaugccccugaau

SEQ ID NO: 3682429 - RNA, 20 nt, Human
aagauucauauuuacuucuu

SEQ ID NO: 3682430 - RNA, 17 nt, Human
aagauucauccauuuau

SEQ ID NO: 3682431 - RNA, 21 nt, Human
aagauucauuuuuaaucauga

SEQ ID NO: 3682432 - RNA, 20 nt, Human
aagauuccaaaaagcacaua

SEQ ID NO: 3682433 - RNA, 19 nt, Human
aagauucccagagacagga

SEQ ID NO: 3682434 - RNA, 13 nt, Human
aagauucccagga

SEQ ID NO: 3682435 - RNA, 14 nt, Human
aagauucccaggag

SEQ ID NO: 3682436 - RNA, 18 nt, Human
aagauuccuuuucuuguu

SEQ ID NO: 3682437 - RNA, 12 nt, Human
aagauucuaaag

SEQ ID NO: 3682438 - RNA, 13 nt, Human
aagauucuaaagg

SEQ ID NO: 3682439 - RNA, 16 nt, Human
aagauucuaaugauga

SEQ ID NO: 3682440 - RNA, 13 nt, Human
aagauucuagauc

SEQ ID NO: 3682441 - RNA, 17 nt, Human
aagauucuauaguucua

SEQ ID NO: 3682442 - RNA, 22 nt, Human
aagauucuauguuaauauuuua

SEQ ID NO: 3682443 - RNA, 20 nt, Human
aagauucuucuguguuuaua

SEQ ID NO: 3682444 - RNA, 13 nt, Human
aagauucuuuccc

SEQ ID NO: 3682445 - RNA, 16 nt, Human
aagauucuuucccaau

SEQ ID NO: 3682446 - RNA, 14 nt, Human
aagauucuuuuaaa

SEQ ID NO: 3682447 - RNA, 21 nt, Human
aagauugauaucuauaaaaua

SEQ ID NO: 3682448 - RNA, 15 nt, Human
aagauugcugaaauu

SEQ ID NO: 3682449 - RNA, 16 nt, Human
aagauugcuuaaaaua

SEQ ID NO: 3682450 - RNA, 23 nt, Human
aagauuggucucccauaugcaga

SEQ ID NO: 3682451 - RNA, 21 nt, Human
aagauuggugggauuuuuugu

SEQ ID NO: 3682452 - RNA, 17 nt, Human
aagauugguguuuuuuu

SEQ ID NO: 3682453 - RNA, 19 nt, Human
aagauugguguuuuuuucu

SEQ ID NO: 3682454 - RNA, 16 nt, Human
aagauuguauugcugu

SEQ ID NO: 3682455 - RNA, 21 nt, Human
aagauugugucccauuccccc

SEQ ID NO: 3682456 - RNA, 19 nt, Human
aagauuguuauuaaaugua

SEQ ID NO: 3682457 - RNA, 22 nt, Human
aagauuguuuaucuagauguaa

SEQ ID NO: 3682458 - RNA, 23 nt, Human
aagauuuaauuugccaaaauaau

SEQ ID NO: 3682459 - RNA, 17 nt, Human
aagauuuccuugugcaa

SEQ ID NO: 3682460 - RNA, 13 nt, Human
aagauuucuugag

SEQ ID NO: 3682461 - RNA, 20 nt, Human
aagauuuggaagcucuucuu

SEQ ID NO: 3682462 - RNA, 17 nt, Human
aagauuuggaauaaagu

SEQ ID NO: 3682463 - RNA, 21 nt, Human
aagauuuguuuugucaagugu

SEQ ID NO: 3682464 - RNA, 14 nt, Human
aagauuuguuuuua

SEQ ID NO: 3682465 - RNA, 23 nt, Human
aagauuuucugggccuaaaggau

SEQ ID NO: 3682466 - RNA, 11 nt, Human
aagauuuugaa

SEQ ID NO: 3682467 - RNA, 15 nt, Human
aagauuuugaaaacu

SEQ ID NO: 3682468 - RNA, 20 nt, Human
aagauuuugaaaacuacauu

SEQ ID NO: 3682469 - RNA, 21 nt, Human
aagauuuugaaugcuuccuga

SEQ ID NO: 3682470 - RNA, 23 nt, Human
aagauuuugaucucacauuuuua

SEQ ID NO: 3682471 - RNA, 23 nt, Human
aagauuuuggaggguccuccaca

SEQ ID NO: 3682472 - RNA, 13 nt, Human
aagauuuuucuca

SEQ ID NO: 3682473 - RNA, 14 nt, Human
aagauuuuucucaa

SEQ ID NO: 3682474 - RNA, 19 nt, Human
aagauuuuucucaaaguuu

SEQ ID NO: 3682475 - RNA, 21 nt, Human
aagauuuuucucaaaguuuug

SEQ ID NO: 3682476 - RNA, 13 nt, Human
aagauuuuuuaau

SEQ ID NO: 3682477 - RNA, 18 nt, Human
aagcaaaaacgaaagcug

SEQ ID NO: 3682478 - RNA, 16 nt, Human
aagcaaaauaaaaacu

SEQ ID NO: 3682479 - RNA, 13 nt, Human
aagcaaaauauua

SEQ ID NO: 3682480 - RNA, 13 nt, Human
aagcaaaauguga

SEQ ID NO: 3682481 - RNA, 14 nt, Human
aagcaaacacauua

SEQ ID NO: 3682482 - RNA, 19 nt, Human
aagcaaacccagacggcuc

SEQ ID NO: 3682483 - RNA, 12 nt, Human
aagcaaagcaca

SEQ ID NO: 3682484 - RNA, 13 nt, Human
aagcaaaggagau

SEQ ID NO: 3682485 - RNA, 18 nt, Human
aagcaaaggggacagcug

SEQ ID NO: 3682486 - RNA, 11 nt, Human
aagcaaaggug

SEQ ID NO: 3682487 - RNA, 13 nt, Human
aagcaaauaaaua

SEQ ID NO: 3682488 - RNA, 12 nt, Human
aagcaaauacuu

SEQ ID NO: 3682489 - RNA, 13 nt, Human
aagcaaauacuua

SEQ ID NO: 3682490 - RNA, 16 nt, Human
aagcaaaucauuuguu

SEQ ID NO: 3682491 - RNA, 19 nt, Human
aagcaaaugucaugcugcc

SEQ ID NO: 3682492 - RNA, 20 nt, Human
aagcaaaugucaugcugccu

SEQ ID NO: 3682493 - RNA, 22 nt, Human
aagcaaaugucaugcugccuua

SEQ ID NO: 3682494 - RNA, 12 nt, Human
aagcaaaugucu

SEQ ID NO: 3682495 - RNA, 13 nt, Human
aagcaaaugugaa

SEQ ID NO: 3682496 - RNA, 14 nt, Human
aagcaaaugugaau

SEQ ID NO: 3682497 - RNA, 17 nt, Human
aagcaaauguuaaaagu

SEQ ID NO: 3682498 - RNA, 19 nt, Human
aagcaaauguuaaaaguuu

SEQ ID NO: 3682499 - RNA, 14 nt, Human
aagcaaauugauga

SEQ ID NO: 3682500 - RNA, 17 nt, Human
aagcaaauugcuuuuuu

SEQ ID NO: 3682501 - RNA, 22 nt, Human
aagcaaauuucaaaagacaugu

SEQ ID NO: 3682502 - RNA, 12 nt, Human
aagcaacaauuu

SEQ ID NO: 3682503 - RNA, 16 nt, Human
aagcaacacuuuuuau

SEQ ID NO: 3682504 - RNA, 14 nt, Human
aagcaacauggcuu

SEQ ID NO: 3682505 - RNA, 19 nt, Human
aagcaaccauauagaaagc

SEQ ID NO: 3682506 - RNA, 17 nt, Human
aagcaacccaaauguuc

SEQ ID NO: 3682507 - RNA, 18 nt, Human
aagcaaccucaguaauuu

SEQ ID NO: 3682508 - RNA, 18 nt, Human
aagcaaccuggguccaaa

SEQ ID NO: 3682509 - RNA, 23 nt, Human
aagcaaccuggguccaaauaaaa

SEQ ID NO: 3682510 - RNA, 21 nt, Human
aagcaacugucuauuucugcu

SEQ ID NO: 3682511 - RNA, 15 nt, Human
aagcaagaaagaaac

SEQ ID NO: 3682512 - RNA, 22 nt, Human
aagcaagaggcaagcugaaauu

SEQ ID NO: 3682513 - RNA, 15 nt, Human
aagcaagcaagaggc

SEQ ID NO: 3682514 - RNA, 19 nt, Human
aagcaagcugauuaaauga

SEQ ID NO: 3682515 - RNA, 20 nt, Human
aagcaaggaagauauacaug

SEQ ID NO: 3682516 - RNA, 15 nt, Human
aagcaagggggugau

SEQ ID NO: 3682517 - RNA, 16 nt, Human
aagcaaguauuagaau

SEQ ID NO: 3682518 - RNA, 14 nt, Human
aagcaauaaaugaa

SEQ ID NO: 3682519 - RNA, 16 nt, Human
aagcaauaaaugaaug

SEQ ID NO: 3682520 - RNA, 22 nt, Human
aagcaauaauggucccauccag

SEQ ID NO: 3682521 - RNA, 13 nt, Human
aagcaauaugcau

SEQ ID NO: 3682522 - RNA, 14 nt, Human
aagcaauauuguau

SEQ ID NO: 3682523 - RNA, 15 nt, Human
aagcaauccuaggua

SEQ ID NO: 3682524 - RNA, 20 nt, Human
aagcaauccucucaccucag

SEQ ID NO: 3682525 - RNA, 11 nt, Human
aagcaaugcau

SEQ ID NO: 3682526 - RNA, 22 nt, Human
aagcaaugcugaugaaucacug

SEQ ID NO: 3682527 - RNA, 17 nt, Human
aagcaauggauauuugu

SEQ ID NO: 3682528 - RNA, 15 nt, Human
aagcaauuccaaccu

SEQ ID NO: 3682529 - RNA, 15 nt, Human
aagcaauuucuugcu

SEQ ID NO: 3682530 - RNA, 20 nt, Human
aagcaauuuuccuugaagcc

SEQ ID NO: 3682531 - RNA, 22 nt, Human
aagcaauuuuccuugaagccga

SEQ ID NO: 3682532 - RNA, 15 nt, Human
aagcacaaacuuuag

SEQ ID NO: 3682533 - RNA, 18 nt, Human
aagcacacacaaaauaaa

SEQ ID NO: 3682534 - RNA, 22 nt, Human
aagcacaccaaucuuacuuugu

SEQ ID NO: 3682535 - RNA, 23 nt, Human
aagcacaccaaucuuacuuugua

SEQ ID NO: 3682536 - RNA, 16 nt, Human
aagcacacuugacauc

SEQ ID NO: 3682537 - RNA, 11 nt, Human
aagcacagcag

SEQ ID NO: 3682538 - RNA, 13 nt, Human
aagcacaguggug

SEQ ID NO: 3682539 - RNA, 18 nt, Human
aagcacagugguggcagg

SEQ ID NO: 3682540 - RNA, 19 nt, Human
aagcacagugguggcaggg

SEQ ID NO: 3682541 - RNA, 18 nt, Human
aagcacaguguuaaauga

SEQ ID NO: 3682542 - RNA, 20 nt, Human
aagcacaguguuaaaugaaa

SEQ ID NO: 3682543 - RNA, 21 nt, Human
aagcacaugccucucucaggc

SEQ ID NO: 3682544 - RNA, 17 nt, Human
aagcaccaaaauaagaa

SEQ ID NO: 3682545 - RNA, 19 nt, Human
aagcaccaaaauaagaaaa

SEQ ID NO: 3682546 - RNA, 21 nt, Human
aagcaccaaaauaagaaaaga

SEQ ID NO: 3682547 - RNA, 14 nt, Human
aagcaccaagcuca

SEQ ID NO: 3682548 - RNA, 19 nt, Human
aagcaccagcuucuccagg

SEQ ID NO: 3682549 - RNA, 16 nt, Human
aagcaccauccccucc

SEQ ID NO: 3682550 - RNA, 18 nt, Human
ucugacuuuacacucggc

SEQ ID NO: 3682551 - RNA, 12 nt, Human
ucugagaaaaca

SEQ ID NO: 3682552 - RNA, 23 nt, Human
ucugagaaagacuauucaaacag

SEQ ID NO: 3682553 - RNA, 16 nt, Human
ucugagaagcucugaa

SEQ ID NO: 3682554 - RNA, 18 nt, Human
ucugagaagguccuuaau

SEQ ID NO: 3682555 - RNA, 15 nt, Human
ucugagaaucuuuau

SEQ ID NO: 3682556 - RNA, 19 nt, Human
ucugagaaucuuuauugag

SEQ ID NO: 3682557 - RNA, 14 nt, Human
ucugagacucacag

SEQ ID NO: 3682558 - RNA, 14 nt, Human
ucugagagaggcca

SEQ ID NO: 3682559 - RNA, 22 nt, Human
ucugagagaggcuaaaauguuu

SEQ ID NO: 3682560 - RNA, 23 nt, Human
ucugagagaggcuaaaauguuuu

SEQ ID NO: 3682561 - RNA, 15 nt, Human
ucugagagcaaacug

SEQ ID NO: 3682562 - RNA, 13 nt, Human
ucugagaggcccu

SEQ ID NO: 3682563 - RNA, 14 nt, Human
ucugagaggcccug

SEQ ID NO: 3682564 - RNA, 15 nt, Human
ucugagagucuagau

SEQ ID NO: 3682565 - RNA, 21 nt, Human
ucugagagucuagauucucug

SEQ ID NO: 3682566 - RNA, 22 nt, Human
ucugagagucuagauucucugg

SEQ ID NO: 3682567 - RNA, 19 nt, Human
ucugagauggcucccaggg

SEQ ID NO: 3682568 - RNA, 16 nt, Human
ucugagcaagagcugg

SEQ ID NO: 3682569 - RNA, 22 nt, Human
ucugagcaagaggauuuugcgu

SEQ ID NO: 3682570 - RNA, 18 nt, Human
ucugagcagcgagccugc

SEQ ID NO: 3682571 - RNA, 21 nt, Human
ucugagcagcgagccugcuag

SEQ ID NO: 3682572 - RNA, 20 nt, Human
ucugagccacagcagcauuu

SEQ ID NO: 3682573 - RNA, 21 nt, Human
ucugagccacagcagcauuuu

SEQ ID NO: 3682574 - RNA, 12 nt, Human
ucugagccaguu

SEQ ID NO: 3682575 - RNA, 18 nt, Human
ucugagcccgggcugccu

SEQ ID NO: 3682576 - RNA, 19 nt, Human
ucugagcccgggcugccug

SEQ ID NO: 3682577 - RNA, 20 nt, Human
ucugagcccgggcugccugg

SEQ ID NO: 3682578 - RNA, 23 nt, Human
ucugagcccgguaagagcaaaag

SEQ ID NO: 3682579 - RNA, 15 nt, Human
ucugagccugauauu

SEQ ID NO: 3682580 - RNA, 21 nt, Human
ucugagcgccuccauccaagg

SEQ ID NO: 3682581 - RNA, 17 nt, Human
ucugagcgggaggcaga

SEQ ID NO: 3682582 - RNA, 22 nt, Human
ucugagcgggaggcagaguuug

SEQ ID NO: 3682583 - RNA, 17 nt, Human
ucugagcugagccaggc

SEQ ID NO: 3682584 - RNA, 16 nt, Human
ucugagcuggccucuc

SEQ ID NO: 3682585 - RNA, 10 nt, Human
ucugagcugu

SEQ ID NO: 3682586 - RNA, 21 nt, Human
ucugaggaaucaacagggcag

SEQ ID NO: 3682587 - RNA, 18 nt, Human
ucugaggaauucuguaua

SEQ ID NO: 3682588 - RNA, 19 nt, Human
ucugaggaauucuguauag

SEQ ID NO: 3682589 - RNA, 20 nt, Human
ucugaggacacuaaccacgc

SEQ ID NO: 3682590 - RNA, 12 nt, Human
ucugaggacauu

SEQ ID NO: 3682591 - RNA, 13 nt, Human
ucugaggccagcc

SEQ ID NO: 3682592 - RNA, 15 nt, Human
ucugaggccagccug

SEQ ID NO: 3682593 - RNA, 12 nt, Human
ucugaggcugua

SEQ ID NO: 3682594 - RNA, 19 nt, Human
ucugaggcuuccagagagu

SEQ ID NO: 3682595 - RNA, 16 nt, Human
ucugagggaaauguuu

SEQ ID NO: 3682596 - RNA, 22 nt, Human
ucugagggaaauguuuuguaaa

SEQ ID NO: 3682597 - RNA, 18 nt, Human
ucugagggaggaggccac

SEQ ID NO: 3682598 - RNA, 20 nt, Human
ucugagggaggaggccaccu

SEQ ID NO: 3682599 - RNA, 22 nt, Human
ucugagggaggaggccaccucu

SEQ ID NO: 3682600 - RNA, 16 nt, Human
ucugagguccugagca

SEQ ID NO: 3682601 - RNA, 17 nt, Human
ucugagguccugagcac

SEQ ID NO: 3682602 - RNA, 21 nt, Human
ucugaggugccugucccaccc

SEQ ID NO: 3682603 - RNA, 20 nt, Human
ucugagucagagccaugucu

SEQ ID NO: 3682604 - RNA, 14 nt, Human
ucugagucccagga

SEQ ID NO: 3682605 - RNA, 23 nt, Human
ucugagucccaggagcugcccag

SEQ ID NO: 3682606 - RNA, 13 nt, Human
ucugaguccugga

SEQ ID NO: 3682607 - RNA, 16 nt, Human
ucugagugccuucugu

SEQ ID NO: 3682608 - RNA, 19 nt, Human
ucugagugccuucuguggg

SEQ ID NO: 3682609 - RNA, 23 nt, Human
ucugaguguuuuaugagaaagcc

SEQ ID NO: 3682610 - RNA, 23 nt, Human
ucugaguuccggcaccaguagca

SEQ ID NO: 3682611 - RNA, 17 nt, Human
ucugaguuccugcaugc

SEQ ID NO: 3682612 - RNA, 21 nt, Human
ucugaguugccaagacaaauc

SEQ ID NO: 3682613 - RNA, 14 nt, Human
ucugaguuuaccau

SEQ ID NO: 3682614 - RNA, 20 nt, Human
ucugaguuuaccauuuguaa

SEQ ID NO: 3682615 - RNA, 22 nt, Human
ucugaguuuaccauuuguaaua

SEQ ID NO: 3682616 - RNA, 24 nt, Human
ucugaguuucauucuccugccugu

SEQ ID NO: 3682617 - RNA, 14 nt, Human
ucugaguuuuacca

SEQ ID NO: 3682618 - RNA, 19 nt, Human
ucugauaagagaaucaaca

SEQ ID NO: 3682619 - RNA, 14 nt, Human
ucugauacccagag

SEQ ID NO: 3682620 - RNA, 17 nt, Human
ucugauacuuuuuugaa

SEQ ID NO: 3682621 - RNA, 12 nt, Human
ucugauagaauu

SEQ ID NO: 3682622 - RNA, 22 nt, Human
ucugauauuaauuuaucagauu

SEQ ID NO: 3682623 - RNA, 15 nt, Human
ucugaucaaggccuu

SEQ ID NO: 3682624 - RNA, 18 nt, Human
ucugaucacugaaauaaa

SEQ ID NO: 3682625 - RNA, 21 nt, Human
ucugaucauccacugugccau

SEQ ID NO: 3682626 - RNA, 14 nt, Human
ucugauccaguuuu

SEQ ID NO: 3682627 - RNA, 21 nt, Human
ucugauccaguuuuguuugga

SEQ ID NO: 3682628 - RNA, 22 nt, Human
ucugaucgugacgcugaauaaa

SEQ ID NO: 3682629 - RNA, 14 nt, Human
ucugaucugugcuu

SEQ ID NO: 3682630 - RNA, 15 nt, Human
ucugaucugugcuuu

SEQ ID NO: 3682631 - RNA, 18 nt, Human
ucugaucugugcuuucca

SEQ ID NO: 3682632 - RNA, 21 nt, Human
ucugaucugugcuuuccagcu

SEQ ID NO: 3682633 - RNA, 22 nt, Human
ucugaucugugcuuuccagcuc

SEQ ID NO: 3682634 - RNA, 13 nt, Human
ucugaugaaaugu

SEQ ID NO: 3682635 - RNA, 20 nt, Human
ucugaugaaauguuaacaau

SEQ ID NO: 3682636 - RNA, 16 nt, Human
ucugaugcagcuuaua

SEQ ID NO: 3682637 - RNA, 18 nt, Human
ucugauggaccuucuaga

SEQ ID NO: 3682638 - RNA, 13 nt, Human
ucugauggccuua

SEQ ID NO: 3682639 - RNA, 15 nt, Human
ucugauggccuuaau

SEQ ID NO: 3682640 - RNA, 15 nt, Human
ucugauggcuucucc

SEQ ID NO: 3682641 - RNA, 14 nt, Human
ucugauguaaauga

SEQ ID NO: 3682642 - RNA, 16 nt, Human
ucugauguaaaugaag

SEQ ID NO: 3682643 - RNA, 18 nt, Human
ucugauguaaaugaagua

SEQ ID NO: 3682644 - RNA, 19 nt, Human
ucugauguaaaugaaguaa

SEQ ID NO: 3682645 - RNA, 16 nt, Human
ucugauguacucuaaa

SEQ ID NO: 3682646 - RNA, 17 nt, Human
ucugauguacucuaaau

SEQ ID NO: 3682647 - RNA, 14 nt, Human
ucugaugucucuaa

SEQ ID NO: 3682648 - RNA, 17 nt, Human
ucugauuagcuuugugu

SEQ ID NO: 3682649 - RNA, 11 nt, Human
ucugauuccac

SEQ ID NO: 3682650 - RNA, 15 nt, Human
ucugauucuggcuuu

SEQ ID NO: 3682651 - RNA, 19 nt, Human
ucugauucuggcuuuaagc

SEQ ID NO: 3682652 - RNA, 23 nt, Human
ucugauucuggcuuuaagccuuc

SEQ ID NO: 3682653 - RNA, 17 nt, Human
ucugauuggcucaccca

SEQ ID NO: 3682654 - RNA, 18 nt, Human
ucugauuggcucacccaa

SEQ ID NO: 3682655 - RNA, 13 nt, Human
ucugauuggcuug

SEQ ID NO: 3682656 - RNA, 22 nt, Human
ucugauuggcuuguagaauugu

SEQ ID NO: 3682657 - RNA, 20 nt, Human
ucugauuuauuuuguaugaa

SEQ ID NO: 3682658 - RNA, 22 nt, Human
ucugauuuauuuuguaugaaau

SEQ ID NO: 3682659 - RNA, 13 nt, Human
ucugauuucagga

SEQ ID NO: 3682660 - RNA, 20 nt, Human
ucugauuugucccuaugcau

SEQ ID NO: 3682661 - RNA, 21 nt, Human
ucugauuuugugcaaaagcuu

SEQ ID NO: 3682662 - RNA, 14 nt, Human
ucugauuuuuauga

SEQ ID NO: 3682663 - RNA, 20 nt, Human
ucugcaaaaauauuuauaaa

SEQ ID NO: 3682664 - RNA, 14 nt, Human
ucugcaaacugccu

SEQ ID NO: 3682665 - RNA, 15 nt, Human
ucugcaaacugccuu

SEQ ID NO: 3682666 - RNA, 14 nt, Human
ucugcaaauagaaa

SEQ ID NO: 3682667 - RNA, 17 nt, Human
ucugcaacaagcaugca

SEQ ID NO: 3682668 - RNA, 15 nt, Human
ucugcaacucugaag

SEQ ID NO: 3682669 - RNA, 20 nt, Human
ucugcaagaauugaagcagg

SEQ ID NO: 3682670 - RNA, 20 nt, Human
ucugcaagcacaucugcauu

SEQ ID NO: 3682671 - RNA, 15 nt, Human
ucugcaagccugcgu

SEQ ID NO: 3682672 - RNA, 22 nt, Human
ucugcaaguauacuagggagcc

SEQ ID NO: 3682673 - RNA, 13 nt, Human
ucugcaagucaga

SEQ ID NO: 3682674 - RNA, 23 nt, Human
ucugcaagucagaggauggccag

SEQ ID NO: 3682675 - RNA, 14 nt, Human
ucugcaaucuucuc

SEQ ID NO: 3682676 - RNA, 16 nt, Human
ucugcaaugggcacug

SEQ ID NO: 3682677 - RNA, 14 nt, Human
ucugcaauucaaaa

SEQ ID NO: 3682678 - RNA, 18 nt, Human
ucugcaauuccccucugc

SEQ ID NO: 3682679 - RNA, 19 nt, Human
ucugcacaagcugcacccu

SEQ ID NO: 3682680 - RNA, 22 nt, Human
ucugcacacccuccagagacaa

SEQ ID NO: 3682681 - RNA, 23 nt, Human
ucugcacaccuugaaucugccug

SEQ ID NO: 3682682 - RNA, 13 nt, Human
ucugcacagaugg

SEQ ID NO: 3682683 - RNA, 15 nt, Human
ucugcacagcuggcc

SEQ ID NO: 3682684 - RNA, 22 nt, Human
ucugcacaucuguaaaucuaca

SEQ ID NO: 3682685 - RNA, 23 nt, Human
ucugcacaugcagcugcacccuc

SEQ ID NO: 3682686 - RNA, 12 nt, Human
ucugcacauguc

SEQ ID NO: 3682687 - RNA, 15 nt, Human
ucugcaccccccugg

SEQ ID NO: 3682688 - RNA, 13 nt, Human
ucugcaccccucu

SEQ ID NO: 3682689 - RNA, 21 nt, Human
ucugcaccccucugcccucau

SEQ ID NO: 3682690 - RNA, 21 nt, Human
ucugcaccccuucucuccucc

SEQ ID NO: 3682691 - RNA, 22 nt, Human
ucugcaccccuucucuccuccc

SEQ ID NO: 3682692 - RNA, 12 nt, Human
ucugcacccucc

SEQ ID NO: 3682693 - RNA, 21 nt, Human
ucugcacccuccacccugucc

SEQ ID NO: 3682694 - RNA, 15 nt, Human
ucugcacccuucuuu

SEQ ID NO: 3682695 - RNA, 21 nt, Human
ucugcacccuucuuuucucau

SEQ ID NO: 3682696 - RNA, 22 nt, Human
ucugcaccgccggccagcuggg

SEQ ID NO: 3682697 - RNA, 14 nt, Human
ucugcacuacuccu

SEQ ID NO: 3682698 - RNA, 18 nt, Human
ucugcacuacugacaugu

SEQ ID NO: 3682699 - RNA, 17 nt, Human
ugaaauaacaaaaugga

SEQ ID NO: 3682700 - RNA, 20 nt, Human
ugaaauaacuggaacaaauu

SEQ ID NO: 3682701 - RNA, 15 nt, Human
ugaaauaagaauuca

SEQ ID NO: 3682702 - RNA, 20 nt, Human
ugaaauaagccagacaucaa

SEQ ID NO: 3682703 - RNA, 12 nt, Human
ugaaauaauaga

SEQ ID NO: 3682704 - RNA, 23 nt, Human
ugaaauaauguguaguucaugua

SEQ ID NO: 3682705 - RNA, 19 nt, Human
ugaaauacacaaguaaaca

SEQ ID NO: 3682706 - RNA, 21 nt, Human
ugaaauaccaaccugaagaca

SEQ ID NO: 3682707 - RNA, 16 nt, Human
ugaaauaccauuauua

SEQ ID NO: 3682708 - RNA, 12 nt, Human
ugaaauaccuca

SEQ ID NO: 3682709 - RNA, 13 nt, Human
ugaaauacuacuu

SEQ ID NO: 3682710 - RNA, 21 nt, Human
ugaaauagugguucuuggaaa

SEQ ID NO: 3682711 - RNA, 16 nt, Human
ugaaauauacacacag

SEQ ID NO: 3682712 - RNA, 16 nt, Human
ugaaauauaugugaaa

SEQ ID NO: 3682713 - RNA, 19 nt, Human
ugaaauauaugugaaagga

SEQ ID NO: 3682714 - RNA, 20 nt, Human
ugaaauaucccggggguggg

SEQ ID NO: 3682715 - RNA, 15 nt, Human
ugaaauauccugcuu

SEQ ID NO: 3682716 - RNA, 15 nt, Human
ugaaauaugcucuuu

SEQ ID NO: 3682717 - RNA, 17 nt, Human
ugaaauauguauaacuu

SEQ ID NO: 3682718 - RNA, 16 nt, Human
ugaaauauugacuuuu

SEQ ID NO: 3682719 - RNA, 13 nt, Human
ugaaauauugcug

SEQ ID NO: 3682720 - RNA, 20 nt, Human
ugaaaucaguaaacacugug

SEQ ID NO: 3682721 - RNA, 14 nt, Human
ugaaauccugcuuc

SEQ ID NO: 3682722 - RNA, 22 nt, Human
ugaaauccuggguuuucuuaac

SEQ ID NO: 3682723 - RNA, 17 nt, Human
ugaaaucuaggaaaauu

SEQ ID NO: 3682724 - RNA, 12 nt, Human
ugaaaucuuuuu

SEQ ID NO: 3682725 - RNA, 13 nt, Human
ugaaaugaaaaca

SEQ ID NO: 3682726 - RNA, 21 nt, Human
ugaaaugaaacaaauaaucac

SEQ ID NO: 3682727 - RNA, 18 nt, Human
ugaaaugaacacaaauua

SEQ ID NO: 3682728 - RNA, 17 nt, Human
ugaaaugagcaccucca

SEQ ID NO: 3682729 - RNA, 21 nt, Human
ugaaaugaggucagagccugc

SEQ ID NO: 3682730 - RNA, 23 nt, Human
ugaaaugaggucagagccugcag

SEQ ID NO: 3682731 - RNA, 17 nt, Human
ugaaaugauagauuuga

SEQ ID NO: 3682732 - RNA, 22 nt, Human
ugaaaugauagauuugaccucc

SEQ ID NO: 3682733 - RNA, 14 nt, Human
ugaaaugccuuacu

SEQ ID NO: 3682734 - RNA, 15 nt, Human
ugaaaugccuuacuu

SEQ ID NO: 3682735 - RNA, 22 nt, Human
ugaaaugccuuacuuuguauga

SEQ ID NO: 3682736 - RNA, 23 nt, Human
ugaaaugccuuacuuuguaugau

SEQ ID NO: 3682737 - RNA, 15 nt, Human
ugaaaugcugaaaau

SEQ ID NO: 3682738 - RNA, 16 nt, Human
ugaaaugcugaaaauu

SEQ ID NO: 3682739 - RNA, 19 nt, Human
ugaaaugcugaaaauugcc

SEQ ID NO: 3682740 - RNA, 16 nt, Human
ugaaaugcuggcauuu

SEQ ID NO: 3682741 - RNA, 16 nt, Human
ugaaauggagguccuu

SEQ ID NO: 3682742 - RNA, 15 nt, Human
ugaaauguaaggcug

SEQ ID NO: 3682743 - RNA, 22 nt, Human
ugaaaugucacguacugucuga

SEQ ID NO: 3682744 - RNA, 17 nt, Human
ugaaaugucaguucuga

SEQ ID NO: 3682745 - RNA, 18 nt, Human
ugaaaugucaguucugau

SEQ ID NO: 3682746 - RNA, 20 nt, Human
ugaaaugucaguucugauau

SEQ ID NO: 3682747 - RNA, 12 nt, Human
ugaaaugugaau

SEQ ID NO: 3682748 - RNA, 22 nt, Human
ugaaaugugaauuuuuauuguu

SEQ ID NO: 3682749 - RNA, 17 nt, Human
ugaaaugugguuuuccu

SEQ ID NO: 3682750 - RNA, 16 nt, Human
ugaaaugugugugaug

SEQ ID NO: 3682751 - RNA, 20 nt, Human
ugaaaugugugugaugugac

SEQ ID NO: 3682752 - RNA, 13 nt, Human
ugaaauguguuuc

SEQ ID NO: 3682753 - RNA, 21 nt, Human
ugaaauguuaacaaugccuau

SEQ ID NO: 3682754 - RNA, 21 nt, Human
ugaaauguuagucauuguuau

SEQ ID NO: 3682755 - RNA, 18 nt, Human
ugaaauguuuuaaggcuu

SEQ ID NO: 3682756 - RNA, 22 nt, Human
ugaaauuaacuggguaaugaaa

SEQ ID NO: 3682757 - RNA, 19 nt, Human
ugaaauuaagaaggcaaaa

SEQ ID NO: 3682758 - RNA, 22 nt, Human
ugaaauuacggguaccugaaga

SEQ ID NO: 3682759 - RNA, 23 nt, Human
ugaaauuacuacaaaauuugaaa

SEQ ID NO: 3682760 - RNA, 22 nt, Human
ugaaauuacuuaucauccacau

SEQ ID NO: 3682761 - RNA, 18 nt, Human
ugaaauuauaguuucaag

SEQ ID NO: 3682762 - RNA, 21 nt, Human
ugaaauuauaguuucaagcca

SEQ ID NO: 3682763 - RNA, 14 nt, Human
ugaaauuauaucug

SEQ ID NO: 3682764 - RNA, 13 nt, Human
ugaaauuauguaa

SEQ ID NO: 3682765 - RNA, 18 nt, Human
ugaaauuauguauguuua

SEQ ID NO: 3682766 - RNA, 19 nt, Human
ugaaauuauguauguuuac

SEQ ID NO: 3682767 - RNA, 14 nt, Human
ugaaauuccaaagu

SEQ ID NO: 3682768 - RNA, 15 nt, Human
ugaaauuccaaaguc

SEQ ID NO: 3682769 - RNA, 17 nt, Human
ugaaauuccaaagucuc

SEQ ID NO: 3682770 - RNA, 19 nt, Human
ugaaauuccaaagucucua

SEQ ID NO: 3682771 - RNA, 13 nt, Human
ugaaauucuaaag

SEQ ID NO: 3682772 - RNA, 16 nt, Human
ugaaauucuccuggag

SEQ ID NO: 3682773 - RNA, 12 nt, Human
ugaaauucugaa

SEQ ID NO: 3682774 - RNA, 15 nt, Human
ugaaauucugaauuu

SEQ ID NO: 3682775 - RNA, 20 nt, Human
ugaaauucugaauuugcaaa

SEQ ID NO: 3682776 - RNA, 19 nt, Human
ugaaauugaaccuuugugc

SEQ ID NO: 3682777 - RNA, 22 nt, Human
ugaaauugaaccuuugugcccu

SEQ ID NO: 3682778 - RNA, 22 nt, Human
ugaaauugauaaugcuuucaca

SEQ ID NO: 3682779 - RNA, 13 nt, Human
ugaaauuguaauu

SEQ ID NO: 3682780 - RNA, 15 nt, Human
ugaaauuguaauuau

SEQ ID NO: 3682781 - RNA, 23 nt, Human
ugaaauuguacauauuuguggaa

SEQ ID NO: 3682782 - RNA, 22 nt, Human
ugaaauugucuagcagagcagg

SEQ ID NO: 3682783 - RNA, 22 nt, Human
ugaaauugugaacucauugcuc

SEQ ID NO: 3682784 - RNA, 18 nt, Human
ugaaauuguuuaaguguu

SEQ ID NO: 3682785 - RNA, 22 nt, Human
ugaaauuuaauauagcuauuuu

SEQ ID NO: 3682786 - RNA, 15 nt, Human
ugaaauuuauugagg

SEQ ID NO: 3682787 - RNA, 17 nt, Human
ugaaauuuauugaggaa

SEQ ID NO: 3682788 - RNA, 17 nt, Human
ugaaauuuauuuaaugu

SEQ ID NO: 3682789 - RNA, 22 nt, Human
ugaaauuucagauucccagagc

SEQ ID NO: 3682790 - RNA, 15 nt, Human
ugaaauuuccuggga

SEQ ID NO: 3682791 - RNA, 15 nt, Human
ugaaauuucuagccu

SEQ ID NO: 3682792 - RNA, 16 nt, Human
ugaaauuucuagccug

SEQ ID NO: 3682793 - RNA, 17 nt, Human
ugaaauuugaauuuugu

SEQ ID NO: 3682794 - RNA, 19 nt, Human
ugaaauuuuaaaaauuguu

SEQ ID NO: 3682795 - RNA, 14 nt, Human
ugaaauuuuaaccu

SEQ ID NO: 3682796 - RNA, 12 nt, Human
ugaaauuuugca

SEQ ID NO: 3682797 - RNA, 19 nt, Human
ugaaauuuugcaaauauaa

SEQ ID NO: 3682798 - RNA, 20 nt, Human
ugaaauuuugcaaauauaaa

SEQ ID NO: 3682799 - RNA, 19 nt, Human
ugaaauuuuuauuaaauua

SEQ ID NO: 3682800 - RNA, 20 nt, Human
ugaaauuuuuauuaaauuau

SEQ ID NO: 3682801 - RNA, 20 nt, Human
ugaaauuuuucauauuuuaa

SEQ ID NO: 3682802 - RNA, 13 nt, Human
ugaaauuuuucuu

SEQ ID NO: 3682803 - RNA, 14 nt, Human
ugaacaaaaaaaug

SEQ ID NO: 3682804 - RNA, 16 nt, Human
ugaacaaaauaaauug

SEQ ID NO: 3682805 - RNA, 18 nt, Human
ugaacaaaauaaauugga

SEQ ID NO: 3682806 - RNA, 19 nt, Human
ugaacaaagaccaauuuuu

SEQ ID NO: 3682807 - RNA, 15 nt, Human
ugaacaaagcagcca

SEQ ID NO: 3682808 - RNA, 18 nt, Human
ugaacaaauugaacucuu

SEQ ID NO: 3682809 - RNA, 21 nt, Human
ugaacaaauugaacucuuuga

SEQ ID NO: 3682810 - RNA, 18 nt, Human
ugaacaaauuuacagaga

SEQ ID NO: 3682811 - RNA, 19 nt, Human
ugaacaacgagccuuuuca

SEQ ID NO: 3682812 - RNA, 17 nt, Human
ugaacaagagaagcauu

SEQ ID NO: 3682813 - RNA, 17 nt, Human
ugaacaagcuucaguaa

SEQ ID NO: 3682814 - RNA, 19 nt, Human
ugaacaaguuuuaauguau

SEQ ID NO: 3682815 - RNA, 15 nt, Human
ugaacacacuguguc

SEQ ID NO: 3682816 - RNA, 17 nt, Human
ugaacacaggcagcuuu

SEQ ID NO: 3682817 - RNA, 13 nt, Human
ugaacacaguauu

SEQ ID NO: 3682818 - RNA, 18 nt, Human
ugaacacaucagcuagca

SEQ ID NO: 3682819 - RNA, 14 nt, Human
ugaacacauuucuu

SEQ ID NO: 3682820 - RNA, 17 nt, Human
ugaacacucaugcugaa

SEQ ID NO: 3682821 - RNA, 19 nt, Human
ugaacacuccaauuaagga

SEQ ID NO: 3682822 - RNA, 18 nt, Human
ugaacacuggcaacaaca

SEQ ID NO: 3682823 - RNA, 22 nt, Human
ugaacacugggggaggggacau

SEQ ID NO: 3682824 - RNA, 15 nt, Human
ugaacacuuggugcu

SEQ ID NO: 3682825 - RNA, 21 nt, Human
ugaacagaagcucuuacucuu

SEQ ID NO: 3682826 - RNA, 18 nt, Human
ugaacagacugaccuuga

SEQ ID NO: 3682827 - RNA, 19 nt, Human
ugaacagaggccacauuac

SEQ ID NO: 3682828 - RNA, 19 nt, Human
ugaacagcugguguagcua

SEQ ID NO: 3682829 - RNA, 22 nt, Human
ugaacaggaaacuccugugacc

SEQ ID NO: 3682830 - RNA, 22 nt, Human
ugaacaguuuaucgaccaguuu

SEQ ID NO: 3682831 - RNA, 16 nt, Human
ugaacauaauucuuau

SEQ ID NO: 3682832 - RNA, 23 nt, Human
ugaacauacaaaugcaucuuuga

SEQ ID NO: 3682833 - RNA, 19 nt, Human
ugaacauacuggcugguga

SEQ ID NO: 3682834 - RNA, 20 nt, Human
ugaacaucccuuuuucaaug

SEQ ID NO: 3682835 - RNA, 17 nt, Human
ugaacaucugaguccug

SEQ ID NO: 3682836 - RNA, 13 nt, Human
ugaacauuccaga

SEQ ID NO: 3682837 - RNA, 14 nt, Human
ugaacauuccagag

SEQ ID NO: 3682838 - RNA, 19 nt, Human
ugaacauucuccuguggaa

SEQ ID NO: 3682839 - RNA, 22 nt, Human
ugaacauuuaucaaucaguaua

SEQ ID NO: 3682840 - RNA, 23 nt, Human
ugaacauuuggguuacuauuucu

SEQ ID NO: 3682841 - RNA, 16 nt, Human
ugaacauuugugauau

SEQ ID NO: 3682842 - RNA, 21 nt, Human
ugaaccacaucuugcucugcu

SEQ ID NO: 3682843 - RNA, 22 nt, Human
ugaaccacaucuugcucugcug

SEQ ID NO: 3682844 - RNA, 17 nt, Human
ugaaccaccacacccag

SEQ ID NO: 3682845 - RNA, 21 nt, Human
ugaaccaccacacccagccca

SEQ ID NO: 3682846 - RNA, 16 nt, Human
ugaaccacuucauucu

SEQ ID NO: 3682847 - RNA, 15 nt, Human
ugaaccacuucccuc

SEQ ID NO: 3682848 - RNA, 16 nt, Human
ugaaccacuuguagau

SEQ ID NO: 3682849 - RNA, 21 nt, Human
ugaaccauaaauucaacuuug

SEQ ID NO: 3682850 - RNA, 23 nt, Human
ugaaccauggugaagugcuugga

SEQ ID NO: 3682851 - RNA, 17 nt, Human
ugaaccauuaaagucga

SEQ ID NO: 3682852 - RNA, 12 nt, Human
ugaacccaggag

SEQ ID NO: 3682853 - RNA, 22 nt, Human
ugaacccauauuuguacaccaa

SEQ ID NO: 3682854 - RNA, 21 nt, Human
ugaacccuggggccugacugc

SEQ ID NO: 3682855 - RNA, 14 nt, Human
ugaacccugugcug

SEQ ID NO: 3682856 - RNA, 17 nt, Human
ugaacccuuuguuucuu

SEQ ID NO: 3682857 - RNA, 20 nt, Human
ugaaccgaggggcucaggaa

SEQ ID NO: 3682858 - RNA, 14 nt, Human
ugaaccuaccuuca

SEQ ID NO: 3682859 - RNA, 22 nt, Human
ugaaccuaggagugccccauuc

SEQ ID NO: 3682860 - RNA, 16 nt, Human
ugaaccuauuucucuu

SEQ ID NO: 3682861 - RNA, 23 nt, Human
ugaaccucaccccgaggcccugc

SEQ ID NO: 3682862 - RNA, 15 nt, Human
ugaaccugaugcuga

SEQ ID NO: 3682863 - RNA, 12 nt, Human
ugaaccugcccu

SEQ ID NO: 3682864 - RNA, 13 nt, Human
ugaacgcccagag

SEQ ID NO: 3682865 - RNA, 15 nt, Human
ugaacggggagaaaa

SEQ ID NO: 3682866 - RNA, 15 nt, Human
ugaacggugagcauu

SEQ ID NO: 3682867 - RNA, 16 nt, Human
ugaacguccacaugaa

SEQ ID NO: 3682868 - RNA, 15 nt, Human
ugaacguuuucuaau

SEQ ID NO: 3682869 - RNA, 16 nt, Human
ugaacguuuucuaauu

SEQ ID NO: 3682870 - RNA, 19 nt, Human
ugaacguuuucuaauugcu

SEQ ID NO: 3682871 - RNA, 14 nt, Human
ugaacuaagaaacu

SEQ ID NO: 3682872 - RNA, 18 nt, Human
ugaacuaagaaacuuuug

SEQ ID NO: 3682873 - RNA, 22 nt, Human
ugaacuaagaaacuuuuguaaa

SEQ ID NO: 3682874 - RNA, 21 nt, Human
ugaacuacgcuugcucauuuu

SEQ ID NO: 3682875 - RNA, 19 nt, Human
ugaacuagcuggaauuuuu

SEQ ID NO: 3682876 - RNA, 21 nt, Human
ugaacuaggauuguaguccca

SEQ ID NO: 3682877 - RNA, 23 nt, Human
ugaacuaggguggugcauuuuug

SEQ ID NO: 3682878 - RNA, 23 nt, Human
ugaacuauuccccagcagggucu

SEQ ID NO: 3682879 - RNA, 14 nt, Human
ugaacucaaacuga

SEQ ID NO: 3682880 - RNA, 13 nt, Human
ugaacucagccaa

SEQ ID NO: 3682881 - RNA, 16 nt, Human
ugaacucagccaagca

SEQ ID NO: 3682882 - RNA, 18 nt, Human
ugaacucagccaagcaca

SEQ ID NO: 3682883 - RNA, 19 nt, Human
ugaacucagccaagcacag

SEQ ID NO: 3682884 - RNA, 20 nt, Human
ugaacucagccaagcacagu

SEQ ID NO: 3682885 - RNA, 11 nt, Human
ugaacuccugg

SEQ ID NO: 3682886 - RNA, 16 nt, Human
ugaacucugaacuuug

SEQ ID NO: 3682887 - RNA, 14 nt, Human
ugaacucuuaauca

SEQ ID NO: 3682888 - RNA, 15 nt, Human
ugaacucuucaaucu

SEQ ID NO: 3682889 - RNA, 12 nt, Human
ugaacugaacac

SEQ ID NO: 3682890 - RNA, 14 nt, Human
ugaacugaacucug

SEQ ID NO: 3682891 - RNA, 11 nt, Human
ugaacugaagg

SEQ ID NO: 3682892 - RNA, 20 nt, Human
ugaacugaaggcagcaugua

SEQ ID NO: 3682893 - RNA, 12 nt, Human
ugaacugaaguu

SEQ ID NO: 3682894 - RNA, 13 nt, Human
ugaacugaaguuu

SEQ ID NO: 3682895 - RNA, 15 nt, Human
ugaacugauaaagau

SEQ ID NO: 3682896 - RNA, 19 nt, Human
ugaacugauaguuacuguu

SEQ ID NO: 3682897 - RNA, 21 nt, Human
ugaacugauaguuacuguugu

SEQ ID NO: 3682898 - RNA, 23 nt, Human
ugaacugauaguuacuguuguga

SEQ ID NO: 3682899 - RNA, 12 nt, Human
ugaacugauuca

SEQ ID NO: 3682900 - RNA, 20 nt, Human
ugaacugauucacaucucau

SEQ ID NO: 3682901 - RNA, 19 nt, Human
ugaacuggacccuguugcu

SEQ ID NO: 3682902 - RNA, 22 nt, Human
ugaacuggacccuguugcuaag

SEQ ID NO: 3682903 - RNA, 17 nt, Human
ugaacuggcaauugucu

SEQ ID NO: 3682904 - RNA, 14 nt, Human
ugaacugggaccuu

SEQ ID NO: 3682905 - RNA, 23 nt, Human
ugaacuggguacuuguggacaca

SEQ ID NO: 3682906 - RNA, 15 nt, Human
ugaacuggucuuccu

SEQ ID NO: 3682907 - RNA, 16 nt, Human
ugaacuggucuuccuu

SEQ ID NO: 3682908 - RNA, 22 nt, Human
ugaacuguguguaauuguuccu

SEQ ID NO: 3682909 - RNA, 14 nt, Human
ugaacuguuagaau

SEQ ID NO: 3682910 - RNA, 18 nt, Human
ugaacuuaaaaugaaagu

SEQ ID NO: 3682911 - RNA, 14 nt, Human
ugaacuuaacaugc

SEQ ID NO: 3682912 - RNA, 15 nt, Human
ugaacuuaacaugcu

SEQ ID NO: 3682913 - RNA, 19 nt, Human
ugaacuuaacaugcugugu

SEQ ID NO: 3682914 - RNA, 20 nt, Human
ugaacuuacuguagccucag

SEQ ID NO: 3682915 - RNA, 17 nt, Human
ugaacuuagauuuuaca

SEQ ID NO: 3682916 - RNA, 21 nt, Human
ugaacuuagauuuuacaugaa

SEQ ID NO: 3682917 - RNA, 22 nt, Human
ugaacuuccugcagguaaacag

SEQ ID NO: 3682918 - RNA, 14 nt, Human
ugaacuucgcauca

SEQ ID NO: 3682919 - RNA, 17 nt, Human
ugaacuucuuugaauuu

SEQ ID NO: 3682920 - RNA, 22 nt, Human
ugaacuugaggacacaugucca

SEQ ID NO: 3682921 - RNA, 14 nt, Human
ugaacuuggcgcug

SEQ ID NO: 3682922 - RNA, 15 nt, Human
ugaacuuguagcugu

SEQ ID NO: 3682923 - RNA, 16 nt, Human
ugaacuuguagcugua

SEQ ID NO: 3682924 - RNA, 17 nt, Human
ugaacuuguagcuguaa

SEQ ID NO: 3682925 - RNA, 18 nt, Human
ugaacuuguagcuguaaa

SEQ ID NO: 3682926 - RNA, 19 nt, Human
ugaacuuguagcuguaaaa

SEQ ID NO: 3682927 - RNA, 21 nt, Human
ugaacuuuccuggaugucuga

SEQ ID NO: 3682928 - RNA, 11 nt, Human
ugaacuuucuc

SEQ ID NO: 3682929 - RNA, 22 nt, Human
ugaacuuucucuucauacuuuu

SEQ ID NO: 3682930 - RNA, 22 nt, Human
ugaacuuugaccucugcagcaa

SEQ ID NO: 3682931 - RNA, 18 nt, Human
ugaacuuuuguacugaau

SEQ ID NO: 3682932 - RNA, 13 nt, Human
ugaacuuuuugua

SEQ ID NO: 3682933 - RNA, 17 nt, Human
ugaagaaaaaauacauu

SEQ ID NO: 3682934 - RNA, 19 nt, Human
ugaagaaaaaauacauuuu

SEQ ID NO: 3682935 - RNA, 12 nt, Human
ugaagaaaauac

SEQ ID NO: 3682936 - RNA, 15 nt, Human
ugaagaaaaucacuu

SEQ ID NO: 3682937 - RNA, 21 nt, Human
ugaagaaagccuguuguuuaa

SEQ ID NO: 3682938 - RNA, 18 nt, Human
ugaagaaauacugcacuu

SEQ ID NO: 3682939 - RNA, 19 nt, Human
ugaagaaauacugcacuua

SEQ ID NO: 3682940 - RNA, 13 nt, Human
ugaagaacaugug

SEQ ID NO: 3682941 - RNA, 19 nt, Human
ugaagaaccagucccccca

SEQ ID NO: 3682942 - RNA, 20 nt, Human
ugaagaaccaguccccccac

SEQ ID NO: 3682943 - RNA, 17 nt, Human
ugaagaacuagcauaua

SEQ ID NO: 3682944 - RNA, 19 nt, Human
ugaagaacuauuuuauucu

SEQ ID NO: 3682945 - RNA, 18 nt, Human
ugaagaacugcaggcccu

SEQ ID NO: 3682946 - RNA, 14 nt, Human
ugaagaagauggua

SEQ ID NO: 3682947 - RNA, 22 nt, Human
ugaagaagcuaaauccuuuacu

SEQ ID NO: 3682948 - RNA, 15 nt, Human
ugaagaaggugaaua

SEQ ID NO: 3682949 - RNA, 19 nt, Human
ugaagaagguggaccuuuu

SEQ ID NO: 3682950 - RNA, 19 nt, Human
ugaagaauacuucucauuu

SEQ ID NO: 3682951 - RNA, 21 nt, Human
ugaagaauccuuuuguagaau

SEQ ID NO: 3682952 - RNA, 20 nt, Human
ugaagaaucuacuuaacccu

SEQ ID NO: 3682953 - RNA, 11 nt, Human
ugaagaauuaa

SEQ ID NO: 3682954 - RNA, 13 nt, Human
ugaagaauugaaa

SEQ ID NO: 3682955 - RNA, 11 nt, Human
ugaagaauuua

SEQ ID NO: 3682956 - RNA, 13 nt, Human
ugaagaauuuaaa

SEQ ID NO: 3682957 - RNA, 18 nt, Human
ugaagacaaaaauacucu

SEQ ID NO: 3682958 - RNA, 13 nt, Human
ugaagacaaugac

SEQ ID NO: 3682959 - RNA, 22 nt, Human
ugaagacaauuugauacauaau

SEQ ID NO: 3682960 - RNA, 19 nt, Human
ugaagacagaaccacaggg

SEQ ID NO: 3682961 - RNA, 14 nt, Human
ugaagacaggaugg

SEQ ID NO: 3682962 - RNA, 17 nt, Human
ugaagaccuaaccaggg

SEQ ID NO: 3682963 - RNA, 15 nt, Human
ugaagaccuuuuucu

SEQ ID NO: 3682964 - RNA, 18 nt, Human
ugaagaccuuuuucugca

SEQ ID NO: 3682965 - RNA, 23 nt, Human
ugaagaccuuuuucugcacuaua

SEQ ID NO: 3682966 - RNA, 16 nt, Human
ugaagacuaugaaaau

SEQ ID NO: 3682967 - RNA, 13 nt, Human
ugaagacuccaga

SEQ ID NO: 3682968 - RNA, 18 nt, Human
ugaagacuggaagcuaau

SEQ ID NO: 3682969 - RNA, 14 nt, Human
ugaagacuuuucuu

SEQ ID NO: 3682970 - RNA, 17 nt, Human
ugaagacuuuucuuuca

SEQ ID NO: 3682971 - RNA, 22 nt, Human
ugaagagaagggcagggcugag

SEQ ID NO: 3682972 - RNA, 23 nt, Human
ugaagagacaguuauuuauaguc

SEQ ID NO: 3682973 - RNA, 15 nt, Human
ugaagagagauauau

SEQ ID NO: 3682974 - RNA, 22 nt, Human
ugaagagagauauaucugaaaa

SEQ ID NO: 3682975 - RNA, 16 nt, Human
ugaagagcaaaaauau

SEQ ID NO: 3682976 - RNA, 17 nt, Human
ugaagagccacugccau

SEQ ID NO: 3682977 - RNA, 16 nt, Human
ugaagagcuugcuuug

SEQ ID NO: 3682978 - RNA, 17 nt, Human
ugaagagcuugcuuuga

SEQ ID NO: 3682979 - RNA, 19 nt, Human
ugaagagcuugcuuugauu

SEQ ID NO: 3682980 - RNA, 16 nt, Human
ugaagaggaaaaugaa

SEQ ID NO: 3682981 - RNA, 19 nt, Human
ugaagaggcgggccagcca

SEQ ID NO: 3682982 - RNA, 23 nt, Human
ugaagaggcgggccagccaggcg

SEQ ID NO: 3682983 - RNA, 18 nt, Human
ugaagagggagaagcaug

SEQ ID NO: 3682984 - RNA, 13 nt, Human
ugaagaggggcag

SEQ ID NO: 3682985 - RNA, 15 nt, Human
ugaagaggugagcac

SEQ ID NO: 3682986 - RNA, 19 nt, Human
ugaagagguuuuaaagcuu

SEQ ID NO: 3682987 - RNA, 20 nt, Human
ugaagagguuuuaaagcuuc

SEQ ID NO: 3682988 - RNA, 21 nt, Human
ugaagagguuuuaaagcuucc

SEQ ID NO: 3682989 - RNA, 23 nt, Human
ugaagauaaguguauuuuucaau

SEQ ID NO: 3682990 - RNA, 15 nt, Human
ugaagauacaugucu

SEQ ID NO: 3682991 - RNA, 14 nt, Human
ugaagauacuuugu

SEQ ID NO: 3682992 - RNA, 16 nt, Human
ugaagauacuuuguau

SEQ ID NO: 3682993 - RNA, 17 nt, Human
ugaagauagaagaaaaa

SEQ ID NO: 3682994 - RNA, 21 nt, Human
ugaagauaucuugaaaugaaa

SEQ ID NO: 3682995 - RNA, 17 nt, Human
ugaagauccagcugccu

SEQ ID NO: 3682996 - RNA, 19 nt, Human
ugaagaucguuaguaucua

SEQ ID NO: 3682997 - RNA, 21 nt, Human
ugaauggauuggauuauuuaa

SEQ ID NO: 3682998 - RNA, 22 nt, Human
ugaauggauuggauuauuuaau

SEQ ID NO: 3682999 - RNA, 19 nt, Human
ugaauggcaauguuuugcu

SEQ ID NO: 3683000 - RNA, 11 nt, Human
ugaauggcuuu

SEQ ID NO: 3683001 - RNA, 18 nt, Human
ugaaugggaaaagagaug

SEQ ID NO: 3683002 - RNA, 18 nt, Human
ugaauggggucucaaagu

SEQ ID NO: 3683003 - RNA, 17 nt, Human
ugaauggguccauuuug

SEQ ID NO: 3683004 - RNA, 20 nt, Human
ugaaugguauggaacucucu

SEQ ID NO: 3683005 - RNA, 13 nt, Human
ugaauggucagcg

SEQ ID NO: 3683006 - RNA, 21 nt, Human
ugaaugguguuguaugccuuu

SEQ ID NO: 3683007 - RNA, 16 nt, Human
ugaauguaaauuugua

SEQ ID NO: 3683008 - RNA, 20 nt, Human
ugaauguaaauuuguacuau

SEQ ID NO: 3683009 - RNA, 19 nt, Human
ugaauguagcagccccggg

SEQ ID NO: 3683010 - RNA, 14 nt, Human
ugaauguaugcuuc

SEQ ID NO: 3683011 - RNA, 22 nt, Human
ugaauguauguaauguguggug

SEQ ID NO: 3683012 - RNA, 16 nt, Human
ugaaugugaagccuuc

SEQ ID NO: 3683013 - RNA, 14 nt, Human
ugaauguguguggu

SEQ ID NO: 3683014 - RNA, 18 nt, Human
ugaauguuaaauaaauug

SEQ ID NO: 3683015 - RNA, 14 nt, Human
ugaauguucugaca

SEQ ID NO: 3683016 - RNA, 15 nt, Human
ugaauguucugacau

SEQ ID NO: 3683017 - RNA, 18 nt, Human
ugaauguucugacauuaa

SEQ ID NO: 3683018 - RNA, 21 nt, Human
ugaauguucugacauuaacag

SEQ ID NO: 3683019 - RNA, 23 nt, Human
ugaauguucugacauuaacaguu

SEQ ID NO: 3683020 - RNA, 20 nt, Human
ugaauguugcaaugugaaaa

SEQ ID NO: 3683021 - RNA, 13 nt, Human
ugaauguuuuucu

SEQ ID NO: 3683022 - RNA, 17 nt, Human
ugaauguuuuucuaaag

SEQ ID NO: 3683023 - RNA, 20 nt, Human
ugaauguuuuucuaaaggag

SEQ ID NO: 3683024 - RNA, 22 nt, Human
ugaauuaaaacuucuuaaauau

SEQ ID NO: 3683025 - RNA, 19 nt, Human
ugaauuaauaucccuacau

SEQ ID NO: 3683026 - RNA, 23 nt, Human
ugaauuaauaucccuacauguau

SEQ ID NO: 3683027 - RNA, 17 nt, Human
ugaauuaccuggauguu

SEQ ID NO: 3683028 - RNA, 21 nt, Human
ugaauuagaaacauaaauaaa

SEQ ID NO: 3683029 - RNA, 17 nt, Human
ugaauuaggcuguaacu

SEQ ID NO: 3683030 - RNA, 22 nt, Human
ugaauuaggcuguaacuacuuu

SEQ ID NO: 3683031 - RNA, 15 nt, Human
ugaauuaguuuuaaa

SEQ ID NO: 3683032 - RNA, 21 nt, Human
ugaauuaucuugguugaaaau

SEQ ID NO: 3683033 - RNA, 17 nt, Human
ugaauuaugaaacuuuu

SEQ ID NO: 3683034 - RNA, 16 nt, Human
ugaauuauuacagugu

SEQ ID NO: 3683035 - RNA, 17 nt, Human
ugaauuauuacaguguu

SEQ ID NO: 3683036 - RNA, 18 nt, Human
ugaauuauuauauacaua

SEQ ID NO: 3683037 - RNA, 13 nt, Human
ugaauuauucaau

SEQ ID NO: 3683038 - RNA, 19 nt, Human
ugaauucaccacagacuuu

SEQ ID NO: 3683039 - RNA, 12 nt, Human
ugaauucagauu

SEQ ID NO: 3683040 - RNA, 22 nt, Human
ugaauucuugguugaggaaaca

SEQ ID NO: 3683041 - RNA, 15 nt, Human
ugaauucuuuugcca

SEQ ID NO: 3683042 - RNA, 12 nt, Human
ugaauugaaguu

SEQ ID NO: 3683043 - RNA, 17 nt, Human
ugaauugaaguuucaag

SEQ ID NO: 3683044 - RNA, 19 nt, Human
ugaauugaaguuucaaguu

SEQ ID NO: 3683045 - RNA, 20 nt, Human
ugaauugagccuaaaaauaa

SEQ ID NO: 3683046 - RNA, 20 nt, Human
ugaauugaggggauuaauau

SEQ ID NO: 3683047 - RNA, 13 nt, Human
ugaauugauaaua

SEQ ID NO: 3683048 - RNA, 16 nt, Human
ugaauugccugcagag

SEQ ID NO: 3683049 - RNA, 22 nt, Human
ugaauugccugcagagagaagc

SEQ ID NO: 3683050 - RNA, 15 nt, Human
ugaauuguccccagu

SEQ ID NO: 3683051 - RNA, 17 nt, Human
ugaauugugaccaaguu

SEQ ID NO: 3683052 - RNA, 15 nt, Human
ugaauuguuugaacc

SEQ ID NO: 3683053 - RNA, 13 nt, Human
ugaauuuaacaau

SEQ ID NO: 3683054 - RNA, 18 nt, Human
ugaauuuaacaaugcgaa

SEQ ID NO: 3683055 - RNA, 23 nt, Human
ugaauuuaacaaugcgaauggua

SEQ ID NO: 3683056 - RNA, 17 nt, Human
ugaauuuacuuccuugc

SEQ ID NO: 3683057 - RNA, 21 nt, Human
ugaauuuacuuccuugcaugu

SEQ ID NO: 3683058 - RNA, 13 nt, Human
ugaauuuaucuuu

SEQ ID NO: 3683059 - RNA, 21 nt, Human
ugaauuuauuggcuuuucuga

SEQ ID NO: 3683060 - RNA, 12 nt, Human
ugaauuucucua

SEQ ID NO: 3683061 - RNA, 13 nt, Human
ugaauuugaauga

SEQ ID NO: 3683062 - RNA, 15 nt, Human
ugaauuugaaugaaa

SEQ ID NO: 3683063 - RNA, 19 nt, Human
ugaauuugaaugaaaaauu

SEQ ID NO: 3683064 - RNA, 11 nt, Human
ugaauuugcaa

SEQ ID NO: 3683065 - RNA, 14 nt, Human
ugaauuugcaaagu

SEQ ID NO: 3683066 - RNA, 17 nt, Human
ugaauuugcccugggaa

SEQ ID NO: 3683067 - RNA, 20 nt, Human
ugaauuuggccugcacuaau

SEQ ID NO: 3683068 - RNA, 15 nt, Human
ugaauuuuaaaaucu

SEQ ID NO: 3683069 - RNA, 22 nt, Human
ugaauuuuaaaguaugcauuau

SEQ ID NO: 3683070 - RNA, 17 nt, Human
ugaauuuuaaaucuaaa

SEQ ID NO: 3683071 - RNA, 15 nt, Human
ugaauuuuagcuuuu

SEQ ID NO: 3683072 - RNA, 13 nt, Human
ugaauuuucaagc

SEQ ID NO: 3683073 - RNA, 13 nt, Human
ugaauuuucacau

SEQ ID NO: 3683074 - RNA, 19 nt, Human
ugaauuuucacaugaacau

SEQ ID NO: 3683075 - RNA, 11 nt, Human
ugaauuuucau

SEQ ID NO: 3683076 - RNA, 12 nt, Human
ugaauuuucauu

SEQ ID NO: 3683077 - RNA, 14 nt, Human
ugaauuuucauuuu

SEQ ID NO: 3683078 - RNA, 16 nt, Human
ugaauuuucauuuuac

SEQ ID NO: 3683079 - RNA, 17 nt, Human
ugaauuuucauuuuaca

SEQ ID NO: 3683080 - RNA, 14 nt, Human
ugaauuuucccacu

SEQ ID NO: 3683081 - RNA, 20 nt, Human
ugaauuuucccacugcaccc

SEQ ID NO: 3683082 - RNA, 13 nt, Human
ugaauuuucugug

SEQ ID NO: 3683083 - RNA, 14 nt, Human
ugaauuuucugugu

SEQ ID NO: 3683084 - RNA, 20 nt, Human
ugaauuuuggggauuuucaa

SEQ ID NO: 3683085 - RNA, 21 nt, Human
ugaauuuuggggauuuucaaa

SEQ ID NO: 3683086 - RNA, 21 nt, Human
ugaauuuuguguuagagauuu

SEQ ID NO: 3683087 - RNA, 17 nt, Human
ugaauuuuguucucugg

SEQ ID NO: 3683088 - RNA, 18 nt, Human
ugaauuuuguucucuggg

SEQ ID NO: 3683089 - RNA, 16 nt, Human
ugaauuuuguugcugu

SEQ ID NO: 3683090 - RNA, 19 nt, Human
ugaauuuuuaaacaaguau

SEQ ID NO: 3683091 - RNA, 18 nt, Human
ugaauuuuuaugugugau

SEQ ID NO: 3683092 - RNA, 14 nt, Human
ugaauuuuuauugu

SEQ ID NO: 3683093 - RNA, 22 nt, Human
ugaauuuuucucuaacucagaa

SEQ ID NO: 3683094 - RNA, 14 nt, Human
ugaauuuuugcaau

SEQ ID NO: 3683095 - RNA, 15 nt, Human
ugaauuuuugcaaua

SEQ ID NO: 3683096 - RNA, 22 nt, Human
ugaauuuuuuuguaauaagcaa

SEQ ID NO: 3683097 - RNA, 16 nt, Human
ugaauuuuuuuuaaca

SEQ ID NO: 3683098 - RNA, 19 nt, Human
ugaauuuuuuuuaacauuc

SEQ ID NO: 3683099 - RNA, 20 nt, Human
ugaauuuuuuuuaacauucc

SEQ ID NO: 3683100 - RNA, 19 nt, Human
ugaauuuuuuuuuccuagc

SEQ ID NO: 3683101 - RNA, 20 nt, Human
ugaauuuuuuuuuccuagcc

SEQ ID NO: 3683102 - RNA, 18 nt, Human
ugacaaaaaauguuuuaa

SEQ ID NO: 3683103 - RNA, 13 nt, Human
ugacaaaauuuug

SEQ ID NO: 3683104 - RNA, 14 nt, Human
ugacaaaauuuugc

SEQ ID NO: 3683105 - RNA, 22 nt, Human
ugacaaacuucuuucacucaca

SEQ ID NO: 3683106 - RNA, 15 nt, Human
ugacaaagaaaccca

SEQ ID NO: 3683107 - RNA, 19 nt, Human
ugacaaagaaacccaagug

SEQ ID NO: 3683108 - RNA, 19 nt, Human
ugacaaagacugaguacgu

SEQ ID NO: 3683109 - RNA, 14 nt, Human
ugacaaagauggcu

SEQ ID NO: 3683110 - RNA, 20 nt, Human
ugacaaaucaaguuuccaag

SEQ ID NO: 3683111 - RNA, 17 nt, Human
ugacaaauguaaacauu

SEQ ID NO: 3683112 - RNA, 15 nt, Human
ugacaacagacuucu

SEQ ID NO: 3683113 - RNA, 19 nt, Human
ugacaacagacuucugaaa

SEQ ID NO: 3683114 - RNA, 20 nt, Human
ugacaaccaccgcuccccag

SEQ ID NO: 3683115 - RNA, 17 nt, Human
ugacaaccacuggucug

SEQ ID NO: 3683116 - RNA, 17 nt, Human
ugacaaccauuaaaguc

SEQ ID NO: 3683117 - RNA, 19 nt, Human
ugacaaccgagaagguuua

SEQ ID NO: 3683118 - RNA, 13 nt, Human
ugacaaccuccau

SEQ ID NO: 3683119 - RNA, 20 nt, Human
ugacaaccuccauucuauuu

SEQ ID NO: 3683120 - RNA, 21 nt, Human
ugacaaccuccauucuauuuu

SEQ ID NO: 3683121 - RNA, 15 nt, Human
ugacaacuggcaggc

SEQ ID NO: 3683122 - RNA, 18 nt, Human
ugacaacuggcaggcagg

SEQ ID NO: 3683123 - RNA, 14 nt, Human
ugacaacuucuaau

SEQ ID NO: 3683124 - RNA, 19 nt, Human
ugacaacuucuaauugcca

SEQ ID NO: 3683125 - RNA, 22 nt, Human
ugacaacuucuaauugccaugu

SEQ ID NO: 3683126 - RNA, 23 nt, Human
ugacaagaaaggcugcuguacug

SEQ ID NO: 3683127 - RNA, 22 nt, Human
ugacaagcagauacugcugugu

SEQ ID NO: 3683128 - RNA, 13 nt, Human
ugacaagccccag

SEQ ID NO: 3683129 - RNA, 17 nt, Human
ugacaagccccaggcag

SEQ ID NO: 3683130 - RNA, 12 nt, Human
ugacaagcucac

SEQ ID NO: 3683131 - RNA, 18 nt, Human
ugacaagcuccauuuaaa

SEQ ID NO: 3683132 - RNA, 17 nt, Human
ugacaaggcacuucaug

SEQ ID NO: 3683133 - RNA, 13 nt, Human
ugacaaggcccca

SEQ ID NO: 3683134 - RNA, 15 nt, Human
ugacaaggccccaga

SEQ ID NO: 3683135 - RNA, 22 nt, Human
ugacaaggccccagagacucag

SEQ ID NO: 3683136 - RNA, 16 nt, Human
ugacaaggucaaauuu

SEQ ID NO: 3683137 - RNA, 12 nt, Human
ugacaauaaaac

SEQ ID NO: 3683138 - RNA, 14 nt, Human
ugacaauaaaacau

SEQ ID NO: 3683139 - RNA, 14 nt, Human
ugacaauaaagcuu

SEQ ID NO: 3683140 - RNA, 13 nt, Human
ugacaauguugua

SEQ ID NO: 3683141 - RNA, 14 nt, Human
ugacaauguuguag

SEQ ID NO: 3683142 - RNA, 17 nt, Human
ugacaauucuguuuuua

SEQ ID NO: 3683143 - RNA, 14 nt, Human
ugacaauugggagc

SEQ ID NO: 3683144 - RNA, 22 nt, Human
ugacaauuuuguacaaauuugu

SEQ ID NO: 3683145 - RNA, 17 nt, Human
ugacacaaaaaaaguug

SEQ ID NO: 3683146 - RNA, 17 nt, Human
ugacacaaguggaccuu

SEQ ID NO: 3683147 - RNA, 19 nt, Human
ugacacaaguggaccuuag

SEQ ID NO: 3683148 - RNA, 15 nt, Human
ugacacacagcucug

SEQ ID NO: 3683149 - RNA, 18 nt, Human
ugacacacagcucugucc

SEQ ID NO: 3683150 - RNA, 19 nt, Human
ugacacacagcucuguccu

SEQ ID NO: 3683151 - RNA, 20 nt, Human
ugacacacuaaccaagcuga

SEQ ID NO: 3683152 - RNA, 18 nt, Human
ugacacagaaaauguuga

SEQ ID NO: 3683153 - RNA, 12 nt, Human
ugacacagacuc

SEQ ID NO: 3683154 - RNA, 17 nt, Human
ugacacagacucauccu

SEQ ID NO: 3683155 - RNA, 19 nt, Human
ugacacagacucauccuga

SEQ ID NO: 3683156 - RNA, 22 nt, Human
ugacacauaugcaccuuguguc

SEQ ID NO: 3683157 - RNA, 22 nt, Human
ugacacauggccccucccccug

SEQ ID NO: 3683158 - RNA, 22 nt, Human
ugacacauuacaagccuggaaa

SEQ ID NO: 3683159 - RNA, 14 nt, Human
ugacaccaaagcca

SEQ ID NO: 3683160 - RNA, 24 nt, Human
ugacaccagcuguucugucccuug

SEQ ID NO: 3683161 - RNA, 17 nt, Human
ugacaccaucuuuuauu

SEQ ID NO: 3683162 - RNA, 21 nt, Human
ugacaccaucuuuuauucuuu

SEQ ID NO: 3683163 - RNA, 19 nt, Human
ugacacccauguuucucug

SEQ ID NO: 3683164 - RNA, 17 nt, Human
ugacaccccacuuagcc

SEQ ID NO: 3683165 - RNA, 21 nt, Human
ugacacccgugagcgccugug

SEQ ID NO: 3683166 - RNA, 17 nt, Human
ugacaccucuuuuuucg

SEQ ID NO: 3683167 - RNA, 15 nt, Human
ugacaccugcugaga

SEQ ID NO: 3683168 - RNA, 18 nt, Human
ugacaccuuugcaggcau

SEQ ID NO: 3683169 - RNA, 19 nt, Human
ugacacgccuaaggucaca

SEQ ID NO: 3683170 - RNA, 18 nt, Human
ugacacuauaguuuaaaa

SEQ ID NO: 3683171 - RNA, 19 nt, Human
ugacacuauaucuguauau

SEQ ID NO: 3683172 - RNA, 22 nt, Human
ugacacuauaucuguauauaaa

SEQ ID NO: 3683173 - RNA, 16 nt, Human
ugacacucauauaauu

SEQ ID NO: 3683174 - RNA, 14 nt, Human
ugacacucccuugg

SEQ ID NO: 3683175 - RNA, 17 nt, Human
ugacacucuccuugcag

SEQ ID NO: 3683176 - RNA, 22 nt, Human
ugacacugaaaguuuuguaaaa

SEQ ID NO: 3683177 - RNA, 14 nt, Human
ugacacugaaaugc

SEQ ID NO: 3683178 - RNA, 18 nt, Human
ugacacugaaaugccuua

SEQ ID NO: 3683179 - RNA, 13 nt, Human
ugacacugagaac

SEQ ID NO: 3683180 - RNA, 20 nt, Human
ugacacugguauuccugccu

SEQ ID NO: 3683181 - RNA, 16 nt, Human
ugacacuucagagagc

SEQ ID NO: 3683182 - RNA, 19 nt, Human
ugacacuucagagagcugg

SEQ ID NO: 3683183 - RNA, 23 nt, Human
ugacacuucagagagcugguagu

SEQ ID NO: 3683184 - RNA, 24 nt, Human
ugacacuucagagagcugguaguu

SEQ ID NO: 3683185 - RNA, 15 nt, Human
ugacacuugucccca

SEQ ID NO: 3683186 - RNA, 14 nt, Human
ugacagaaaauaug

SEQ ID NO: 3683187 - RNA, 21 nt, Human
ugacagaacacugucuugaag

SEQ ID NO: 3683188 - RNA, 22 nt, Human
ugacagaauauguuucaaacuu

SEQ ID NO: 3683189 - RNA, 16 nt, Human
ugacagacacaggccc

SEQ ID NO: 3683190 - RNA, 15 nt, Human
ugacagacaggcucu

SEQ ID NO: 3683191 - RNA, 18 nt, Human
ugacagaccacaucuuua

SEQ ID NO: 3683192 - RNA, 22 nt, Human
ugacagaccacaucuuuaucug

SEQ ID NO: 3683193 - RNA, 14 nt, Human
ugacagacuccuga

SEQ ID NO: 3683194 - RNA, 19 nt, Human
ugacagacuccugaggaca

SEQ ID NO: 3683195 - RNA, 20 nt, Human
ugacagagagagauacucug

SEQ ID NO: 3683196 - RNA, 22 nt, Human
ugacagagcaagacucugucua

SEQ ID NO: 3683197 - RNA, 14 nt, Human
ugacagagccugcc

SEQ ID NO: 3683198 - RNA, 22 nt, Human
ugacagagccuucugaggacau

SEQ ID NO: 3683199 - RNA, 14 nt, Human
ugacagaggcagcc

SEQ ID NO: 3683200 - RNA, 17 nt, Human
ugacagaggcagcccca

SEQ ID NO: 3683201 - RNA, 14 nt, Human
ugacagagugagac

SEQ ID NO: 3683202 - RNA, 22 nt, Human
ugacagagugagacucugucuc

SEQ ID NO: 3683203 - RNA, 21 nt, Human
ugacagaucaagcugugagac

SEQ ID NO: 3683204 - RNA, 22 nt, Human
ugacagcuaggaugugcauucu

SEQ ID NO: 3683205 - RNA, 13 nt, Human
ugacagcuguccc

SEQ ID NO: 3683206 - RNA, 20 nt, Human
ugacagcugucccugucacc

SEQ ID NO: 3683207 - RNA, 13 nt, Human
ugacagcugugcu

SEQ ID NO: 3683208 - RNA, 14 nt, Human
ugacagcuuugcug

SEQ ID NO: 3683209 - RNA, 13 nt, Human
ugacaggcagcag

SEQ ID NO: 3683210 - RNA, 16 nt, Human
ugacaggcagcagaga

SEQ ID NO: 3683211 - RNA, 14 nt, Human
ugacaggccugucc

SEQ ID NO: 3683212 - RNA, 13 nt, Human
ugacagggaagcu

SEQ ID NO: 3683213 - RNA, 14 nt, Human
ugacagggaagcua

SEQ ID NO: 3683214 - RNA, 16 nt, Human
ugacagggaagcuaca

SEQ ID NO: 3683215 - RNA, 17 nt, Human
ugacagggaagcuacag

SEQ ID NO: 3683216 - RNA, 11 nt, Human
ugacagggcca

SEQ ID NO: 3683217 - RNA, 16 nt, Human
ugacagggccagugca

SEQ ID NO: 3683218 - RNA, 19 nt, Human
ugacagggccagugcaguu

SEQ ID NO: 3683219 - RNA, 17 nt, Human
ugacagguuugggaccc

SEQ ID NO: 3683220 - RNA, 22 nt, Human
ugacaguaacuugguuauacau

SEQ ID NO: 3683221 - RNA, 14 nt, Human
ugacaguaauugug

SEQ ID NO: 3683222 - RNA, 21 nt, Human
ugacaguaguaccaaaugcuu

SEQ ID NO: 3683223 - RNA, 21 nt, Human
ugacaguauuauacgcuggca

SEQ ID NO: 3683224 - RNA, 11 nt, Human
ugacagucauc

SEQ ID NO: 3683225 - RNA, 18 nt, Human
ugacagucaucaucaggg

SEQ ID NO: 3683226 - RNA, 22 nt, Human
ugacagucaucaucagggccug

SEQ ID NO: 3683227 - RNA, 23 nt, Human
ugacagucaucaucagggccugg

SEQ ID NO: 3683228 - RNA, 16 nt, Human
ugacagucaugcaguc

SEQ ID NO: 3683229 - RNA, 18 nt, Human
ugacaguccgucaaaaca

SEQ ID NO: 3683230 - RNA, 16 nt, Human
ugacaguccucuccac

SEQ ID NO: 3683231 - RNA, 18 nt, Human
ugacaguccucuccaccu

SEQ ID NO: 3683232 - RNA, 21 nt, Human
ugacagugccugggaauguau

SEQ ID NO: 3683233 - RNA, 18 nt, Human
ugacaguggaacuacauu

SEQ ID NO: 3683234 - RNA, 19 nt, Human
ugacaguguugaaaauguu

SEQ ID NO: 3683235 - RNA, 17 nt, Human
ugacauaacacuauaaa

SEQ ID NO: 3683236 - RNA, 21 nt, Human
ugacauaacacuauaaagguu

SEQ ID NO: 3683237 - RNA, 15 nt, Human
ugacauaccuuuuau

SEQ ID NO: 3683238 - RNA, 18 nt, Human
ugacauauacauacuuac

SEQ ID NO: 3683239 - RNA, 16 nt, Human
ugacauauuaugucuu

SEQ ID NO: 3683240 - RNA, 15 nt, Human
ugacauauuggcucu

SEQ ID NO: 3683241 - RNA, 14 nt, Human
ugacauauuuaaug

SEQ ID NO: 3683242 - RNA, 22 nt, Human
ugacauauuuaauguuuuaaau

SEQ ID NO: 3683243 - RNA, 15 nt, Human
ugacauauuuuugcu

SEQ ID NO: 3683244 - RNA, 14 nt, Human
ugacaucaaaaaag

SEQ ID NO: 3683245 - RNA, 23 nt, Human
ugacaucaacugcaucaagaugu

SEQ ID NO: 3683246 - RNA, 15 nt, Human
ugacaucacagcagc

SEQ ID NO: 3683247 - RNA, 16 nt, Human
ugacaucacuggcaug

SEQ ID NO: 3683248 - RNA, 17 nt, Human
ugacaucacuggcaugg

SEQ ID NO: 3683249 - RNA, 16 nt, Human
ugacaucacuuguaca

SEQ ID NO: 3683250 - RNA, 17 nt, Human
ugacaucacuuguacaa

SEQ ID NO: 3683251 - RNA, 22 nt, Human
ugacaucacuuguacaaaauaa

SEQ ID NO: 3683252 - RNA, 14 nt, Human
ugacaucagcauca

SEQ ID NO: 3683253 - RNA, 13 nt, Human
ugacaucagccag

SEQ ID NO: 3683254 - RNA, 14 nt, Human
ugacaucagccagc

SEQ ID NO: 3683255 - RNA, 18 nt, Human
ugacaucagguuuuuccc

SEQ ID NO: 3683256 - RNA, 18 nt, Human
ugacauccacaaaugcag

SEQ ID NO: 3683257 - RNA, 18 nt, Human
ugacaucucaggggccag

SEQ ID NO: 3683258 - RNA, 21 nt, Human
ugacaucucaggggccagagg

SEQ ID NO: 3683259 - RNA, 13 nt, Human
ugacaucucuuug

SEQ ID NO: 3683260 - RNA, 16 nt, Human
ugacaucuguguuuca

SEQ ID NO: 3683261 - RNA, 20 nt, Human
ugacaucuugaauccuucca

SEQ ID NO: 3683262 - RNA, 12 nt, Human
ugacaugaaaaa

SEQ ID NO: 3683263 - RNA, 17 nt, Human
ugacaugaauuuuagcu

SEQ ID NO: 3683264 - RNA, 22 nt, Human
ugacaugaauuuuagcuuuugu

SEQ ID NO: 3683265 - RNA, 14 nt, Human
ugacaugaucgcuu

SEQ ID NO: 3683266 - RNA, 15 nt, Human
ugacaugaucgcuuu

SEQ ID NO: 3683267 - RNA, 16 nt, Human
ugacaugauuccuucc

SEQ ID NO: 3683268 - RNA, 15 nt, Human
ugacaugcacugacc

SEQ ID NO: 3683269 - RNA, 21 nt, Human
ugacaugcacugacccuucca

SEQ ID NO: 3683270 - RNA, 16 nt, Human
ugacaugcccucccuu

SEQ ID NO: 3683271 - RNA, 17 nt, Human
ugacaugcgggcugggc

SEQ ID NO: 3683272 - RNA, 22 nt, Human
ugacaugcgggcugggcagcug

SEQ ID NO: 3683273 - RNA, 16 nt, Human
ugacauggugccugag

SEQ ID NO: 3683274 - RNA, 18 nt, Human
ugacauggugccugagag

SEQ ID NO: 3683275 - RNA, 13 nt, Human
ugacauguaacag

SEQ ID NO: 3683276 - RNA, 13 nt, Human
ugacauguacaga

SEQ ID NO: 3683277 - RNA, 17 nt, Human
ugacauguccuucugag

SEQ ID NO: 3683278 - RNA, 12 nt, Human
ugacaugugaaa

SEQ ID NO: 3683279 - RNA, 13 nt, Human
ugacaugugaaac

SEQ ID NO: 3683280 - RNA, 19 nt, Human
ugacaugugaaaccuuuuu

SEQ ID NO: 3683281 - RNA, 21 nt, Human
ugacaugugaaaccuuuuuua

SEQ ID NO: 3683282 - RNA, 16 nt, Human
ugacaugugacuccua

SEQ ID NO: 3683283 - RNA, 17 nt, Human
ugacauguggaaaguga

SEQ ID NO: 3683284 - RNA, 22 nt, Human
ugacauguggaaagugaauuug

SEQ ID NO: 3683285 - RNA, 17 nt, Human
ugacauguggggccagg

SEQ ID NO: 3683286 - RNA, 18 nt, Human
ugacauguuauauauuuu

SEQ ID NO: 3683287 - RNA, 13 nt, Human
ugacauuaacagu

SEQ ID NO: 3683288 - RNA, 19 nt, Human
ugacauuaacaguuuucca

SEQ ID NO: 3683289 - RNA, 15 nt, Human
ugacauuaagaaugu

SEQ ID NO: 3683290 - RNA, 21 nt, Human
ugacauuaagaauguugguuu

SEQ ID NO: 3683291 - RNA, 15 nt, Human
ugacauuauagacau

SEQ ID NO: 3683292 - RNA, 12 nt, Human
ugacauucaccu

SEQ ID NO: 3683293 - RNA, 15 nt, Human
ugacauucaccugcc

SEQ ID NO: 3683294 - RNA, 15 nt, Human
ugacauucaugccug

SEQ ID NO: 3683295 - RNA, 20 nt, Human
ugacauuccuaaacuaucuu

SEQ ID NO: 3683296 - RNA, 15 nt, Human
ugacauucugaaugc

SEQ ID NO: 3683297 - RNA, 18 nt, Human
ucuguacgucugacaggc

SEQ ID NO: 3683298 - RNA, 23 nt, Human
ucuguacugauucaauuugaugu

SEQ ID NO: 3683299 - RNA, 12 nt, Human
ucuguacuuggu

SEQ ID NO: 3683300 - RNA, 13 nt, Human
ucuguacuuuuug

SEQ ID NO: 3683301 - RNA, 21 nt, Human
ucuguagaaaugguuguauua

SEQ ID NO: 3683302 - RNA, 20 nt, Human
ucuguagagggcccuggugu

SEQ ID NO: 3683303 - RNA, 20 nt, Human
ucuguagcuauaaugagcau

SEQ ID NO: 3683304 - RNA, 23 nt, Human
ucuguagcuccucaacucaccua

SEQ ID NO: 3683305 - RNA, 16 nt, Human
ucuguagguuaaaaaa

SEQ ID NO: 3683306 - RNA, 23 nt, Human
ucuguagguugcacacuuuggua

SEQ ID NO: 3683307 - RNA, 16 nt, Human
ucuguauaaguaagaa

SEQ ID NO: 3683308 - RNA, 15 nt, Human
ucuguauauaaaaua

SEQ ID NO: 3683309 - RNA, 22 nt, Human
ucuguauauaaaauauuuucau

SEQ ID NO: 3683310 - RNA, 16 nt, Human
ucuguauauuuuggga

SEQ ID NO: 3683311 - RNA, 17 nt, Human
ucuguaucacucugugu

SEQ ID NO: 3683312 - RNA, 18 nt, Human
ucuguaucggagacagug

SEQ ID NO: 3683313 - RNA, 19 nt, Human
ucuguaucggagacaguga

SEQ ID NO: 3683314 - RNA, 12 nt, Human
ucuguaucucuc

SEQ ID NO: 3683315 - RNA, 14 nt, Human
ucuguaucuuuucu

SEQ ID NO: 3683316 - RNA, 14 nt, Human
ucuguaugauucua

SEQ ID NO: 3683317 - RNA, 17 nt, Human
ucuguauguauuaguga

SEQ ID NO: 3683318 - RNA, 17 nt, Human
ucuguauugugcugauu

SEQ ID NO: 3683319 - RNA, 15 nt, Human
ucuguauuuaauuuu

SEQ ID NO: 3683320 - RNA, 13 nt, Human
ucuguauuucaug

SEQ ID NO: 3683321 - RNA, 23 nt, Human
ucuguauuuccccaacauguaau

SEQ ID NO: 3683322 - RNA, 15 nt, Human
ucuguauuugaaagu

SEQ ID NO: 3683323 - RNA, 18 nt, Human
ucuguauuugaaagugcc

SEQ ID NO: 3683324 - RNA, 22 nt, Human
ucuguauuugaaagugccuuug

SEQ ID NO: 3683325 - RNA, 23 nt, Human
ucuguauuuuauuuagacaagag

SEQ ID NO: 3683326 - RNA, 21 nt, Human
ucuguauuuuuucuugcauug

SEQ ID NO: 3683327 - RNA, 16 nt, Human
ucugucaaaacacugu

SEQ ID NO: 3683328 - RNA, 15 nt, Human
ucugucaaagucaga

SEQ ID NO: 3683329 - RNA, 17 nt, Human
ucugucaagaguaguua

SEQ ID NO: 3683330 - RNA, 20 nt, Human
ucugucaagaguaguuauau

SEQ ID NO: 3683331 - RNA, 20 nt, Human
ucugucacaguaaaaauaaa

SEQ ID NO: 3683332 - RNA, 19 nt, Human
ucugucaccaauugguuaa

SEQ ID NO: 3683333 - RNA, 18 nt, Human
ucugucagaugagaacaa

SEQ ID NO: 3683334 - RNA, 20 nt, Human
ucugucauuugagcagggcu

SEQ ID NO: 3683335 - RNA, 23 nt, Human
ucuguccaaaggaggcuggcagg

SEQ ID NO: 3683336 - RNA, 18 nt, Human
ucuguccaacugagaagu

SEQ ID NO: 3683337 - RNA, 19 nt, Human
ucuguccaacugagaagua

SEQ ID NO: 3683338 - RNA, 12 nt, Human
ucuguccaagga

SEQ ID NO: 3683339 - RNA, 14 nt, Human
ucuguccaccagcc

SEQ ID NO: 3683340 - RNA, 13 nt, Human
ucuguccaucugc

SEQ ID NO: 3683341 - RNA, 14 nt, Human
ucuguccaucugcc

SEQ ID NO: 3683342 - RNA, 19 nt, Human
ucuguccauuuauccacag

SEQ ID NO: 3683343 - RNA, 13 nt, Human
ucugucccagguu

SEQ ID NO: 3683344 - RNA, 19 nt, Human
ucugucccauucccuggga

SEQ ID NO: 3683345 - RNA, 24 nt, Human
ucugucccauucccugggaucugg

SEQ ID NO: 3683346 - RNA, 15 nt, Human
ucuguccccagccug

SEQ ID NO: 3683347 - RNA, 23 nt, Human
ucugucccccuuuagaucucuga

SEQ ID NO: 3683348 - RNA, 15 nt, Human
ucuguccccuucucu

SEQ ID NO: 3683349 - RNA, 15 nt, Human
ucugucccucacagc

SEQ ID NO: 3683350 - RNA, 23 nt, Human
ucugucccugagagugucucuga

SEQ ID NO: 3683351 - RNA, 23 nt, Human
ucugucccuucugucccucacag

SEQ ID NO: 3683352 - RNA, 14 nt, Human
ucugucccuugcug

SEQ ID NO: 3683353 - RNA, 17 nt, Human
ucugucccuugcuguau

SEQ ID NO: 3683354 - RNA, 15 nt, Human
ucuguccuacucugu

SEQ ID NO: 3683355 - RNA, 19 nt, Human
ucuguccuacucuguguca

SEQ ID NO: 3683356 - RNA, 15 nt, Human
ucuguccucagccuu

SEQ ID NO: 3683357 - RNA, 10 nt, Human
ucuguccuga

SEQ ID NO: 3683358 - RNA, 16 nt, Human
ucuguccugcuucuga

SEQ ID NO: 3683359 - RNA, 12 nt, Human
ucuguccuggga

SEQ ID NO: 3683360 - RNA, 14 nt, Human
ucuguccugguguc

SEQ ID NO: 3683361 - RNA, 21 nt, Human
ucuguccugugagguuuccca

SEQ ID NO: 3683362 - RNA, 16 nt, Human
ucugucgcccagucug

SEQ ID NO: 3683363 - RNA, 18 nt, Human
ucugucgccuuagcaugu

SEQ ID NO: 3683364 - RNA, 15 nt, Human
ucugucuaaaaaaca

SEQ ID NO: 3683365 - RNA, 22 nt, Human
ucugucuacaaauauaagauuu

SEQ ID NO: 3683366 - RNA, 14 nt, Human
ucugucuaccaucu

SEQ ID NO: 3683367 - RNA, 18 nt, Human
ucugucuaccaucucccu

SEQ ID NO: 3683368 - RNA, 22 nt, Human
ucugucucagacuuuuguacau

SEQ ID NO: 3683369 - RNA, 17 nt, Human
ucugucucauccaucau

SEQ ID NO: 3683370 - RNA, 17 nt, Human
ucugucucauccuccug

SEQ ID NO: 3683371 - RNA, 14 nt, Human
ucugucuccuuaac

SEQ ID NO: 3683372 - RNA, 19 nt, Human
ucugucuccuuaacacuga

SEQ ID NO: 3683373 - RNA, 21 nt, Human
ucugucucgagcgcccugcag

SEQ ID NO: 3683374 - RNA, 22 nt, Human
ucugucucgagcgcccugcaga

SEQ ID NO: 3683375 - RNA, 12 nt, Human
ucugucucucuc

SEQ ID NO: 3683376 - RNA, 12 nt, Human
ucugucucugcc

SEQ ID NO: 3683377 - RNA, 22 nt, Human
ucugucucuggauuauauuaug

SEQ ID NO: 3683378 - RNA, 21 nt, Human
ucugucugccaaccuaaaacu

SEQ ID NO: 3683379 - RNA, 22 nt, Human
ucugucugcuggucacuucuuc

SEQ ID NO: 3683380 - RNA, 12 nt, Human
ucugucuggcac

SEQ ID NO: 3683381 - RNA, 13 nt, Human
ucugucugguggc

SEQ ID NO: 3683382 - RNA, 15 nt, Human
ucugucugucugucc

SEQ ID NO: 3683383 - RNA, 15 nt, Human
ucugucuucacaaca

SEQ ID NO: 3683384 - RNA, 14 nt, Human
ucugucuucacagc

SEQ ID NO: 3683385 - RNA, 14 nt, Human
ucugucuucuggac

SEQ ID NO: 3683386 - RNA, 19 nt, Human
ucugucuuggcuuucaugu

SEQ ID NO: 3683387 - RNA, 14 nt, Human
ucugucuuuccuga

SEQ ID NO: 3683388 - RNA, 21 nt, Human
ucugucuuuccugaaccaugu

SEQ ID NO: 3683389 - RNA, 18 nt, Human
ucugucuuuuaaacucug

SEQ ID NO: 3683390 - RNA, 16 nt, Human
ucugugaaauaucauc

SEQ ID NO: 3683391 - RNA, 17 nt, Human
ucugugaaaugcuggca

SEQ ID NO: 3683392 - RNA, 17 nt, Human
ucugugaacgauuuaga

SEQ ID NO: 3683393 - RNA, 14 nt, Human
ucugugaagagcaa

SEQ ID NO: 3683394 - RNA, 19 nt, Human
ucugugaagugagaccuuc

SEQ ID NO: 3683395 - RNA, 16 nt, Human
ucugugaccaaugucu

SEQ ID NO: 3683396 - RNA, 18 nt, Human
ucugugaccaaugucuug

SEQ ID NO: 3683397 - RNA, 19 nt, Human
ucugugaccaaugucuuga

SEQ ID NO: 3683398 - RNA, 16 nt, Human
ucugugaccucaggca

SEQ ID NO: 3683399 - RNA, 16 nt, Human
ucugugaccugcaucu

SEQ ID NO: 3683400 - RNA, 19 nt, Human
ucugugagaagguuuauug

SEQ ID NO: 3683401 - RNA, 20 nt, Human
ucugugaggaaagcacacag

SEQ ID NO: 3683402 - RNA, 20 nt, Human
ucugugaucuuuuaaagugu

SEQ ID NO: 3683403 - RNA, 17 nt, Human
ucugugaugacauuccc

SEQ ID NO: 3683404 - RNA, 20 nt, Human
ucugugaugacauucccugc

SEQ ID NO: 3683405 - RNA, 16 nt, Human
ucugugcaccugggcu

SEQ ID NO: 3683406 - RNA, 19 nt, Human
ucugugcacgcaguggccu

SEQ ID NO: 3683407 - RNA, 19 nt, Human
ucugugcaugguggcacca

SEQ ID NO: 3683408 - RNA, 22 nt, Human
ucugugcaugguggcaccagcg

SEQ ID NO: 3683409 - RNA, 13 nt, Human
ucugugccagagc

SEQ ID NO: 3683410 - RNA, 19 nt, Human
ucugugccagagccugggg

SEQ ID NO: 3683411 - RNA, 20 nt, Human
ucugugccagagccuggggc

SEQ ID NO: 3683412 - RNA, 22 nt, Human
ucugugccagagccuggggcuc

SEQ ID NO: 3683413 - RNA, 12 nt, Human
ucugugcccagc

SEQ ID NO: 3683414 - RNA, 13 nt, Human
ucugugcccagcu

SEQ ID NO: 3683415 - RNA, 19 nt, Human
ucugugcccagcucagucu

SEQ ID NO: 3683416 - RNA, 15 nt, Human
ucugugcccaugggc

SEQ ID NO: 3683417 - RNA, 20 nt, Human
ucugugcccaugggcacugc

SEQ ID NO: 3683418 - RNA, 15 nt, Human
ucugugccccaugcc

SEQ ID NO: 3683419 - RNA, 22 nt, Human
ucugugccccaugccuguccag

SEQ ID NO: 3683420 - RNA, 15 nt, Human
ucugugccuggagcu

SEQ ID NO: 3683421 - RNA, 16 nt, Human
ucugugccuucgucuu

SEQ ID NO: 3683422 - RNA, 18 nt, Human
ucugugccuucuuuugau

SEQ ID NO: 3683423 - RNA, 17 nt, Human
ucugugccuuguuuuuu

SEQ ID NO: 3683424 - RNA, 18 nt, Human
ucugugcuguuucaaagu

SEQ ID NO: 3683425 - RNA, 16 nt, Human
ucugugcuuuccagcu

SEQ ID NO: 3683426 - RNA, 21 nt, Human
ucugugcuuuccagcucaccc

SEQ ID NO: 3683427 - RNA, 20 nt, Human
ucuguggaaaguguaaagca

SEQ ID NO: 3683428 - RNA, 19 nt, Human
ucuguggacugaccuugua

SEQ ID NO: 3683429 - RNA, 19 nt, Human
ucuguggagguggaaaagc

SEQ ID NO: 3683430 - RNA, 18 nt, Human
ucuguggauggucauugc

SEQ ID NO: 3683431 - RNA, 22 nt, Human
ucuguggccuuguucucucuau

SEQ ID NO: 3683432 - RNA, 12 nt, Human
ucugugggcugc

SEQ ID NO: 3683433 - RNA, 16 nt, Human
ucugugggcugcacuc

SEQ ID NO: 3683434 - RNA, 17 nt, Human
ucugugguuccucugcu

SEQ ID NO: 3683435 - RNA, 19 nt, Human
ucugugguuccucugcuca

SEQ ID NO: 3683436 - RNA, 20 nt, Human
ucugugguuccucugcucac

SEQ ID NO: 3683437 - RNA, 14 nt, Human
ucugugguuggcug

SEQ ID NO: 3683438 - RNA, 20 nt, Human
ucugugguuggcugggaaau

SEQ ID NO: 3683439 - RNA, 14 nt, Human
ucuguguacaaaga

SEQ ID NO: 3683440 - RNA, 14 nt, Human
ucuguguauauuau

SEQ ID NO: 3683441 - RNA, 19 nt, Human
ucuguguauauuauuuggc

SEQ ID NO: 3683442 - RNA, 18 nt, Human
ucuguguauuuucaguca

SEQ ID NO: 3683443 - RNA, 22 nt, Human
ucugugucagguggggcagcuu

SEQ ID NO: 3683444 - RNA, 11 nt, Human
ucuguguccuu

SEQ ID NO: 3683445 - RNA, 15 nt, Human
ucuguguccuucccu

SEQ ID NO: 3683446 - RNA, 18 nt, Human
ucuguguccuucccugca

SEQ ID NO: 3683447 - RNA, 14 nt, Human
ucugugucuaagau

SEQ ID NO: 3683448 - RNA, 15 nt, Human
ucugugucuguguuu

SEQ ID NO: 3683449 - RNA, 19 nt, Human
ucugugugaaacuuucauu

SEQ ID NO: 3683450 - RNA, 13 nt, Human
ucugugugaaugu

SEQ ID NO: 3683451 - RNA, 14 nt, Human
ucugugugaaugug

SEQ ID NO: 3683452 - RNA, 14 nt, Human
ucugugugcacaaa

SEQ ID NO: 3683453 - RNA, 22 nt, Human
ucugugugcaccuuaccaacuu

SEQ ID NO: 3683454 - RNA, 13 nt, Human
ucugugugucagu

SEQ ID NO: 3683455 - RNA, 19 nt, Human
ucugugugugaccccuccu

SEQ ID NO: 3683456 - RNA, 22 nt, Human
ucugugugugaccccuccuggg

SEQ ID NO: 3683457 - RNA, 23 nt, Human
ucugugugugaccccuccugggg

SEQ ID NO: 3683458 - RNA, 13 nt, Human
ucugugugugugu

SEQ ID NO: 3683459 - RNA, 13 nt, Human
ucuguguguuccu

SEQ ID NO: 3683460 - RNA, 16 nt, Human
ucuguguugccaagcu

SEQ ID NO: 3683461 - RNA, 23 nt, Human
ucuguguuggcccaagcucuugu

SEQ ID NO: 3683462 - RNA, 23 nt, Human
ucuguguuuaauuucuucaaaau

SEQ ID NO: 3683463 - RNA, 12 nt, Human
ucuguguuuauu

SEQ ID NO: 3683464 - RNA, 16 nt, Human
ucuguguuuuugaaau

SEQ ID NO: 3683465 - RNA, 13 nt, Human
ucuguuaaaaugc

SEQ ID NO: 3683466 - RNA, 15 nt, Human
ucuguuaaaaugcau

SEQ ID NO: 3683467 - RNA, 16 nt, Human
ucuguuaacugaauac

SEQ ID NO: 3683468 - RNA, 17 nt, Human
ucuguuaagugguuuca

SEQ ID NO: 3683469 - RNA, 16 nt, Human
ucuguuacaaaaugua

SEQ ID NO: 3683470 - RNA, 22 nt, Human
ucuguuacaaaauguaacuguu

SEQ ID NO: 3683471 - RNA, 21 nt, Human
ucuguuaccaugucacugugg

SEQ ID NO: 3683472 - RNA, 17 nt, Human
ucuguuaugcugugaca

SEQ ID NO: 3683473 - RNA, 14 nt, Human
ucuguuauguacug

SEQ ID NO: 3683474 - RNA, 17 nt, Human
ucuguuauguacuguac

SEQ ID NO: 3683475 - RNA, 16 nt, Human
ucuguucaaggaauca

SEQ ID NO: 3683476 - RNA, 13 nt, Human
ucuguucaccuuc

SEQ ID NO: 3683477 - RNA, 19 nt, Human
ucuguucacuuuuccuccc

SEQ ID NO: 3683478 - RNA, 14 nt, Human
ucuguucagcguuu

SEQ ID NO: 3683479 - RNA, 19 nt, Human
ucuguucagcguuuugcaa

SEQ ID NO: 3683480 - RNA, 22 nt, Human
ucuguucaguaacagggccuug

SEQ ID NO: 3683481 - RNA, 16 nt, Human
ucuguucaguguaaau

SEQ ID NO: 3683482 - RNA, 17 nt, Human
ucuguucauuccuccag

SEQ ID NO: 3683483 - RNA, 12 nt, Human
ucuguuccaaau

SEQ ID NO: 3683484 - RNA, 14 nt, Human
ucuguuccaaauuc

SEQ ID NO: 3683485 - RNA, 19 nt, Human
ucuguuccaaauucaguuu

SEQ ID NO: 3683486 - RNA, 18 nt, Human
ucuguucccccuucacaa

SEQ ID NO: 3683487 - RNA, 23 nt, Human
ucuguuccuggcucagccucaaa

SEQ ID NO: 3683488 - RNA, 13 nt, Human
ucuguuccuucac

SEQ ID NO: 3683489 - RNA, 14 nt, Human
ucuguucuacccgu

SEQ ID NO: 3683490 - RNA, 18 nt, Human
ucuguucugcacacagca

SEQ ID NO: 3683491 - RNA, 15 nt, Human
ucuguucuguggaaa

SEQ ID NO: 3683492 - RNA, 16 nt, Human
ucuguucuguggaaag

SEQ ID NO: 3683493 - RNA, 22 nt, Human
ucuguucuguggaaaguguaaa

SEQ ID NO: 3683494 - RNA, 16 nt, Human
ucuguucuguuucaag

SEQ ID NO: 3683495 - RNA, 18 nt, Human
ucuguucuuccucagcca

SEQ ID NO: 3683496 - RNA, 13 nt, Human
ucuguucuugaag

SEQ ID NO: 3683497 - RNA, 18 nt, Human
ucuguucuuuaauuuauu

SEQ ID NO: 3683498 - RNA, 17 nt, Human
ucuguucuuuugacuua

SEQ ID NO: 3683499 - RNA, 18 nt, Human
ucuguugcaagccccucu

SEQ ID NO: 3683500 - RNA, 15 nt, Human
ucuguugcaauuagg

SEQ ID NO: 3683501 - RNA, 16 nt, Human
ucuguugcaauuagga

SEQ ID NO: 3683502 - RNA, 18 nt, Human
ucuguugccacaacccug

SEQ ID NO: 3683503 - RNA, 16 nt, Human
ucuguuggauuccaug

SEQ ID NO: 3683504 - RNA, 20 nt, Human
ucuguuggcaggcuggccag

SEQ ID NO: 3683505 - RNA, 20 nt, Human
ucuguuggccagugugacaa

SEQ ID NO: 3683506 - RNA, 13 nt, Human
ucuguuguaacuu

SEQ ID NO: 3683507 - RNA, 16 nt, Human
ucuguuguauucauug

SEQ ID NO: 3683508 - RNA, 17 nt, Human
ucuguuguccuccccuu

SEQ ID NO: 3683509 - RNA, 14 nt, Human
ucuguuguguguca

SEQ ID NO: 3683510 - RNA, 19 nt, Human
ucuguuuaagaaaaguauu

SEQ ID NO: 3683511 - RNA, 15 nt, Human
ucuguuuaauacuca

SEQ ID NO: 3683512 - RNA, 20 nt, Human
ucuguuuacaucaguuuuaa

SEQ ID NO: 3683513 - RNA, 13 nt, Human
ucuguuuagauaa

SEQ ID NO: 3683514 - RNA, 19 nt, Human
ucuguuuagauaauacacc

SEQ ID NO: 3683515 - RNA, 23 nt, Human
ucuguuuagauaauacaccacua

SEQ ID NO: 3683516 - RNA, 16 nt, Human
ucuguuuaugcuuuug

SEQ ID NO: 3683517 - RNA, 20 nt, Human
ucuguuuccugacauugucu

SEQ ID NO: 3683518 - RNA, 12 nt, Human
ucuguuuccugu

SEQ ID NO: 3683519 - RNA, 13 nt, Human
ucuguuuccuuuu

SEQ ID NO: 3683520 - RNA, 12 nt, Human
ucuguuucuagu

SEQ ID NO: 3683521 - RNA, 22 nt, Human
ucuguuucuauucucuccucag

SEQ ID NO: 3683522 - RNA, 13 nt, Human
ucuguuugauucu

SEQ ID NO: 3683523 - RNA, 14 nt, Human
ucuguuugauucuu

SEQ ID NO: 3683524 - RNA, 21 nt, Human
ucuguuuguuaaaacuggcau

SEQ ID NO: 3683525 - RNA, 13 nt, Human
ucuguuuguuauu

SEQ ID NO: 3683526 - RNA, 13 nt, Human
ucuguuuguuuca

SEQ ID NO: 3683527 - RNA, 13 nt, Human
ucuguuuuacugc

SEQ ID NO: 3683528 - RNA, 18 nt, Human
ucuguuuuagguuaaaaa

SEQ ID NO: 3683529 - RNA, 22 nt, Human
ucuguuuucaaucucguauaga

SEQ ID NO: 3683530 - RNA, 23 nt, Human
ucuguuuucuuucuaaugagaua

SEQ ID NO: 3683531 - RNA, 13 nt, Human
ucuguuuuguaaa

SEQ ID NO: 3683532 - RNA, 15 nt, Human
ucuguuuuguaaagu

SEQ ID NO: 3683533 - RNA, 20 nt, Human
ucuguuuugugguuuggaau

SEQ ID NO: 3683534 - RNA, 13 nt, Human
ucuguuuugugua

SEQ ID NO: 3683535 - RNA, 15 nt, Human
ucuguuuuuaaaaau

SEQ ID NO: 3683536 - RNA, 19 nt, Human
ucuguuuuuaaugcuauuu

SEQ ID NO: 3683537 - RNA, 18 nt, Human
ucuguuuuucuaacuggg

SEQ ID NO: 3683538 - RNA, 14 nt, Human
ucuguuuuucuuuu

SEQ ID NO: 3683539 - RNA, 22 nt, Human
ucuuaaaaaguuauaaccaacu

SEQ ID NO: 3683540 - RNA, 16 nt, Human
ucuuaaaaaguuguuc

SEQ ID NO: 3683541 - RNA, 20 nt, Human
ucuuaaaaauguuuuuucau

SEQ ID NO: 3683542 - RNA, 20 nt, Human
ucuuaaaacauuaugaguuu

SEQ ID NO: 3683543 - RNA, 19 nt, Human
ucuuaaaauauauuucaga

SEQ ID NO: 3683544 - RNA, 15 nt, Human
ucuuaaaaugcaaua

SEQ ID NO: 3683545 - RNA, 23 nt, Human
ucuuaaaauggcaaguuuuccau

SEQ ID NO: 3683546 - RNA, 16 nt, Human
ucuuaaaccuucaguu

SEQ ID NO: 3683547 - RNA, 12 nt, Human
ucuuaaacuaaa

SEQ ID NO: 3683548 - RNA, 14 nt, Human
ucuuaaacuuguga

SEQ ID NO: 3683549 - RNA, 16 nt, Human
ucuuaaagaaacagcu

SEQ ID NO: 3683550 - RNA, 19 nt, Human
ucuuaaagcugccuguagu

SEQ ID NO: 3683551 - RNA, 20 nt, Human
ucuuaaagcugccuguaguu

SEQ ID NO: 3683552 - RNA, 18 nt, Human
ucuuaaagugcaguucuu

SEQ ID NO: 3683553 - RNA, 14 nt, Human
ucuuaaaguugaau

SEQ ID NO: 3683554 - RNA, 16 nt, Human
ucuuaaaguugaauuu

SEQ ID NO: 3683555 - RNA, 15 nt, Human
ucuuaaauaaaagaa

SEQ ID NO: 3683556 - RNA, 19 nt, Human
ucuuaaauaaaagaaaugc

SEQ ID NO: 3683557 - RNA, 15 nt, Human
ucuuaaauaagaaac

SEQ ID NO: 3683558 - RNA, 15 nt, Human
ucuuaaauaauaaag

SEQ ID NO: 3683559 - RNA, 13 nt, Human
ucuuaaauaucuu

SEQ ID NO: 3683560 - RNA, 14 nt, Human
ucuuaaauaucuuu

SEQ ID NO: 3683561 - RNA, 15 nt, Human
ucuuaaauaucuuuu

SEQ ID NO: 3683562 - RNA, 17 nt, Human
ucuuaaauaucuuuuau

SEQ ID NO: 3683563 - RNA, 22 nt, Human
ucuuaaauauguggaguucauc

SEQ ID NO: 3683564 - RNA, 17 nt, Human
ucuuaaccagaucauug

SEQ ID NO: 3683565 - RNA, 22 nt, Human
ucuuaacguuagaccacaaaua

SEQ ID NO: 3683566 - RNA, 12 nt, Human
ucuuaacucuuu

SEQ ID NO: 3683567 - RNA, 16 nt, Human
ucuuaacuucuugcuu

SEQ ID NO: 3683568 - RNA, 24 nt, Human
ucuuaagacagcauguguuaaucu

SEQ ID NO: 3683569 - RNA, 23 nt, Human
ucuuaagaccaccucaaauuuaa

SEQ ID NO: 3683570 - RNA, 12 nt, Human
ucuuaagccauc

SEQ ID NO: 3683571 - RNA, 13 nt, Human
ucuuaagccaucu

SEQ ID NO: 3683572 - RNA, 23 nt, Human
ucuuaagccaucuugguaaauuu

SEQ ID NO: 3683573 - RNA, 18 nt, Human
ucuuaagccuaaaugccu

SEQ ID NO: 3683574 - RNA, 12 nt, Human
ucuuaagcuucc

SEQ ID NO: 3683575 - RNA, 16 nt, Human
ucuuaaggacaaagug

SEQ ID NO: 3683576 - RNA, 23 nt, Human
ucuuaaggauugugauauuuuua

SEQ ID NO: 3683577 - RNA, 22 nt, Human
ucuuaauacuguuauucuuugc

SEQ ID NO: 3683578 - RNA, 15 nt, Human
ucuuaauauaaauuc

SEQ ID NO: 3683579 - RNA, 21 nt, Human
ucuuaauauaaauucacuuuc

SEQ ID NO: 3683580 - RNA, 15 nt, Human
ucuuaauauauuuga

SEQ ID NO: 3683581 - RNA, 14 nt, Human
ucuuaauauucugg

SEQ ID NO: 3683582 - RNA, 22 nt, Human
ucuuaauauuuuuacaugcaga

SEQ ID NO: 3683583 - RNA, 14 nt, Human
ucuuaauccagucu

SEQ ID NO: 3683584 - RNA, 17 nt, Human
ucuuaaucuuuucacaa

SEQ ID NO: 3683585 - RNA, 20 nt, Human
ucuuaaucuuuucacaaaua

SEQ ID NO: 3683586 - RNA, 21 nt, Human
ucuuaaucuuuucacaaauaa

SEQ ID NO: 3683587 - RNA, 22 nt, Human
ucuuaaucuuuucacaaauaaa

SEQ ID NO: 3683588 - RNA, 15 nt, Human
ucuuaaugaaguuug

SEQ ID NO: 3683589 - RNA, 16 nt, Human
ucuuaaugaaguuuga

SEQ ID NO: 3683590 - RNA, 20 nt, Human
ucuuaaugaaguuugaaugu

SEQ ID NO: 3683591 - RNA, 21 nt, Human
ucuuaaugaaguuugaauguu

SEQ ID NO: 3683592 - RNA, 23 nt, Human
ucuuaaugaaguuugaauguuaa

SEQ ID NO: 3683593 - RNA, 13 nt, Human
ucuuaauguacau

SEQ ID NO: 3683594 - RNA, 13 nt, Human
ucuuaauuaagua

SEQ ID NO: 3683595 - RNA, 18 nt, Human
ucuuaauuaaguaaacua

SEQ ID NO: 3683596 - RNA, 19 nt, Human
ucuuaauuaaguaaacuaa

SEQ ID NO: 3683597 - RNA, 20 nt, Human
ucuuaauuaaguaaacuaau

SEQ ID NO: 3683598 - RNA, 16 nt, Human
ucuugaacuccuggcc

SEQ ID NO: 3683599 - RNA, 18 nt, Human
ucuugaacugagcuugga

SEQ ID NO: 3683600 - RNA, 13 nt, Human
ucuugaagacuuu

SEQ ID NO: 3683601 - RNA, 18 nt, Human
ucuugaaggaaaaauuca

SEQ ID NO: 3683602 - RNA, 22 nt, Human
ucuugaaggaaaaauucaauag

SEQ ID NO: 3683603 - RNA, 16 nt, Human
ucuugaaguccuggcu

SEQ ID NO: 3683604 - RNA, 18 nt, Human
ucuugaaguccuggcuuc

SEQ ID NO: 3683605 - RNA, 22 nt, Human
ucuugaaguccuggcuucaggc

SEQ ID NO: 3683606 - RNA, 18 nt, Human
ucuugaauacucugcccu

SEQ ID NO: 3683607 - RNA, 15 nt, Human
ucuugaauauaaaaa

SEQ ID NO: 3683608 - RNA, 13 nt, Human
ucuugaaucccau

SEQ ID NO: 3683609 - RNA, 14 nt, Human
ucuugaaugucuuu

SEQ ID NO: 3683610 - RNA, 22 nt, Human
ucuugaauguugaagaacucau

SEQ ID NO: 3683611 - RNA, 17 nt, Human
ucuugaauuguaaggaa

SEQ ID NO: 3683612 - RNA, 18 nt, Human
ucuugaauuucuaaaaaa

SEQ ID NO: 3683613 - RNA, 19 nt, Human
ucuugaccaagcaggaagc

SEQ ID NO: 3683614 - RNA, 18 nt, Human
ucuugacccugcacccuc

SEQ ID NO: 3683615 - RNA, 15 nt, Human
ucuugacucuugccu

SEQ ID NO: 3683616 - RNA, 16 nt, Human
ucuugagaugucuucu

SEQ ID NO: 3683617 - RNA, 16 nt, Human
ucuugagccuugaacu

SEQ ID NO: 3683618 - RNA, 17 nt, Human
ucuugagccuugaacuu

SEQ ID NO: 3683619 - RNA, 17 nt, Human
ucuugagcuggccucuc

SEQ ID NO: 3683620 - RNA, 21 nt, Human
ucuugagcuggccucucuagc

SEQ ID NO: 3683621 - RNA, 14 nt, Human
ucuugagggagcuu

SEQ ID NO: 3683622 - RNA, 15 nt, Human
ucuugaggggaccag

SEQ ID NO: 3683623 - RNA, 17 nt, Human
ucuugaggggaccagga

SEQ ID NO: 3683624 - RNA, 19 nt, Human
ucuugaggggaccaggagu

SEQ ID NO: 3683625 - RNA, 23 nt, Human
ucuugaggugguaguaaaacaca

SEQ ID NO: 3683626 - RNA, 20 nt, Human
ucuugaguuguuuuuguaua

SEQ ID NO: 3683627 - RNA, 21 nt, Human
ucuugaguuguuuuuguauau

SEQ ID NO: 3683628 - RNA, 20 nt, Human
ucuugaguuugucgcucaug

SEQ ID NO: 3683629 - RNA, 22 nt, Human
ucuugaguuugucgcucaugug

SEQ ID NO: 3683630 - RNA, 21 nt, Human
ucuugaguuuuguuuuaaaau

SEQ ID NO: 3683631 - RNA, 22 nt, Human
ucuugauaagaccaccaccuca

SEQ ID NO: 3683632 - RNA, 18 nt, Human
ucuugaucaacaucuuuu

SEQ ID NO: 3683633 - RNA, 17 nt, Human
ucuugaucaguaguuug

SEQ ID NO: 3683634 - RNA, 23 nt, Human
ucuugaucugcucagcccuggag

SEQ ID NO: 3683635 - RNA, 15 nt, Human
ucuugaucuguucug

SEQ ID NO: 3683636 - RNA, 22 nt, Human
ucuugaugaaaagcuuuguuug

SEQ ID NO: 3683637 - RNA, 14 nt, Human
ucuugaugccuggc

SEQ ID NO: 3683638 - RNA, 18 nt, Human
ucuugaugccuggcgggg

SEQ ID NO: 3683639 - RNA, 20 nt, Human
ucuugaugccuggcggggug

SEQ ID NO: 3683640 - RNA, 21 nt, Human
ucuugaugccuggcggggugg

SEQ ID NO: 3683641 - RNA, 14 nt, Human
ucuugauuauccau

SEQ ID NO: 3683642 - RNA, 17 nt, Human
ucuugauucagucacau

SEQ ID NO: 3683643 - RNA, 20 nt, Human
ucuugauuuguuuuagaaug

SEQ ID NO: 3683644 - RNA, 21 nt, Human
ucuugauuuguuuuagaauga

SEQ ID NO: 3683645 - RNA, 22 nt, Human
ucuugcaauggcagccuuggca

SEQ ID NO: 3683646 - RNA, 23 nt, Human
ucuugcaauggcagccuuggcaa

SEQ ID NO: 3683647 - RNA, 16 nt, Human
ucuugcaccaaauuau

SEQ ID NO: 3683648 - RNA, 20 nt, Human
ucuugcacccgccucucccg

SEQ ID NO: 3683649 - RNA, 23 nt, Human
ucuugcaggaaggacuaugaaaa

SEQ ID NO: 3683650 - RNA, 14 nt, Human
ucuugcagugauua

SEQ ID NO: 3683651 - RNA, 19 nt, Human
ucuugcaugguuuggagcu

SEQ ID NO: 3683652 - RNA, 15 nt, Human
ucuugcauuaugcaa

SEQ ID NO: 3683653 - RNA, 17 nt, Human
ucuugcauuaugcaauu

SEQ ID NO: 3683654 - RNA, 17 nt, Human
ucuugcauugacauuau

SEQ ID NO: 3683655 - RNA, 14 nt, Human
ucuugcauuucacu

SEQ ID NO: 3683656 - RNA, 23 nt, Human
ucuugccaaccuguaauaaauau

SEQ ID NO: 3683657 - RNA, 16 nt, Human
ucuugccacugccucu

SEQ ID NO: 3683658 - RNA, 17 nt, Human
ucuugccacugccucuu

SEQ ID NO: 3683659 - RNA, 16 nt, Human
ucuugccaucuauagg

SEQ ID NO: 3683660 - RNA, 21 nt, Human
ucuugccccaacccccagcac

SEQ ID NO: 3683661 - RNA, 17 nt, Human
ucuugccgaggagccag

SEQ ID NO: 3683662 - RNA, 20 nt, Human
ucuugccucagcuuccccag

SEQ ID NO: 3683663 - RNA, 20 nt, Human
ucuugccuccauggugccuc

SEQ ID NO: 3683664 - RNA, 16 nt, Human
ucuugccucugucccc

SEQ ID NO: 3683665 - RNA, 21 nt, Human
ucuugccucuguccccuucuc

SEQ ID NO: 3683666 - RNA, 14 nt, Human
ucuugccucugugc

SEQ ID NO: 3683667 - RNA, 21 nt, Human
ucuugccugccuaacaaaaua

SEQ ID NO: 3683668 - RNA, 12 nt, Human
ucuugccuucag

SEQ ID NO: 3683669 - RNA, 20 nt, Human
ucuugcgaauccaagcuccc

SEQ ID NO: 3683670 - RNA, 19 nt, Human
ucuugcuaaucagugucuc

SEQ ID NO: 3683671 - RNA, 20 nt, Human
ucuugcuaaucagugucuca

SEQ ID NO: 3683672 - RNA, 21 nt, Human
ucuugcuaaucagugucucac

SEQ ID NO: 3683673 - RNA, 22 nt, Human
ucuugcuaaucagugucucaca

SEQ ID NO: 3683674 - RNA, 14 nt, Human
ucuugcuaccagua

SEQ ID NO: 3683675 - RNA, 20 nt, Human
ucuugcuaccaguauuuaga

SEQ ID NO: 3683676 - RNA, 20 nt, Human
ucuugcuaccucagucagua

SEQ ID NO: 3683677 - RNA, 18 nt, Human
ucuugcucaaaaaucugu

SEQ ID NO: 3683678 - RNA, 17 nt, Human
ucuugcucccuucagcc

SEQ ID NO: 3683679 - RNA, 21 nt, Human
ucuugcucuaucucacagcac

SEQ ID NO: 3683680 - RNA, 11 nt, Human
ucuugcucugc

SEQ ID NO: 3683681 - RNA, 14 nt, Human
ucuugcucugcuga

SEQ ID NO: 3683682 - RNA, 13 nt, Human
ucuugcucuguaa

SEQ ID NO: 3683683 - RNA, 14 nt, Human
ucuugcucuguaau

SEQ ID NO: 3683684 - RNA, 17 nt, Human
ucuugcucuguaaucuc

SEQ ID NO: 3683685 - RNA, 13 nt, Human
ucuugcugcuaga

SEQ ID NO: 3683686 - RNA, 16 nt, Human
ucuugcugcuagaacu

SEQ ID NO: 3683687 - RNA, 17 nt, Human
ucuugcugcuagaacuu

SEQ ID NO: 3683688 - RNA, 18 nt, Human
ucuugcugcuagaacuuu

SEQ ID NO: 3683689 - RNA, 19 nt, Human
ucuugcugcuagaacuuuu

SEQ ID NO: 3683690 - RNA, 16 nt, Human
ucuugcugucucugcu

SEQ ID NO: 3683691 - RNA, 14 nt, Human
ucuugcuguggucu

SEQ ID NO: 3683692 - RNA, 14 nt, Human
ucuugcuguugaca

SEQ ID NO: 3683693 - RNA, 21 nt, Human
ucuugcuguugacauauuuaa

SEQ ID NO: 3683694 - RNA, 22 nt, Human
ucuugcuucccuaaucuauggu

SEQ ID NO: 3683695 - RNA, 11 nt, Human
ucuugcuucuu

SEQ ID NO: 3683696 - RNA, 14 nt, Human
ucuugcuugaacuu

SEQ ID NO: 3683697 - RNA, 12 nt, Human
ucuugcuuguac

SEQ ID NO: 3683698 - RNA, 17 nt, Human
ucuugcuuguaccucug

SEQ ID NO: 3683699 - RNA, 22 nt, Human
ucuugcuuguaccucuggcuga

SEQ ID NO: 3683700 - RNA, 15 nt, Human
ucuuggaaaaaguga

SEQ ID NO: 3683701 - RNA, 16 nt, Human
ucuuggaaaaagugau

SEQ ID NO: 3683702 - RNA, 16 nt, Human
ucuuggaaagaaacaa

SEQ ID NO: 3683703 - RNA, 20 nt, Human
ucuuggaacuugccugccuu

SEQ ID NO: 3683704 - RNA, 15 nt, Human
ucuuggacaaaucac

SEQ ID NO: 3683705 - RNA, 17 nt, Human
ucuuggacacuguacaa

SEQ ID NO: 3683706 - RNA, 18 nt, Human
ucuuggacacuuaauucu

SEQ ID NO: 3683707 - RNA, 19 nt, Human
ucuuggacacuuaauucug

SEQ ID NO: 3683708 - RNA, 21 nt, Human
ucuuggacacuuaauucuguu

SEQ ID NO: 3683709 - RNA, 12 nt, Human
ucuuggagccug

SEQ ID NO: 3683710 - RNA, 14 nt, Human
ucuuggagccugca

SEQ ID NO: 3683711 - RNA, 18 nt, Human
ucuuggagccugcagagc

SEQ ID NO: 3683712 - RNA, 15 nt, Human
ucuuggaguuuuuca

SEQ ID NO: 3683713 - RNA, 21 nt, Human
ucuuggcaaaagccuugugua

SEQ ID NO: 3683714 - RNA, 22 nt, Human
ucuuggcaaaagccuuguguau

SEQ ID NO: 3683715 - RNA, 17 nt, Human
ucuuggcaauauuccuu

SEQ ID NO: 3683716 - RNA, 13 nt, Human
ucuuggcagucac

SEQ ID NO: 3683717 - RNA, 13 nt, Human
ucuuggccagcca

SEQ ID NO: 3683718 - RNA, 22 nt, Human
ucuuggccaugggaggccuuuc

SEQ ID NO: 3683719 - RNA, 18 nt, Human
ucuuggcccgcacagagc

SEQ ID NO: 3683720 - RNA, 18 nt, Human
ucuuggcggcagcagcca

SEQ ID NO: 3683721 - RNA, 13 nt, Human
ucuuggcucacug

SEQ ID NO: 3683722 - RNA, 19 nt, Human
ucuuggcuuacugcagccu

SEQ ID NO: 3683723 - RNA, 12 nt, Human
ucuuggcuuugu

SEQ ID NO: 3683724 - RNA, 12 nt, Human
ucuugggaaaua

SEQ ID NO: 3683725 - RNA, 14 nt, Human
ucuugggaaauaug

SEQ ID NO: 3683726 - RNA, 20 nt, Human
ucuugggaaauaugaaugcc

SEQ ID NO: 3683727 - RNA, 22 nt, Human
ucuugggacuggguuuggaccc

SEQ ID NO: 3683728 - RNA, 23 nt, Human
ucuugggcagagcuggcucugag

SEQ ID NO: 3683729 - RNA, 13 nt, Human
ucuuggggaagau

SEQ ID NO: 3683730 - RNA, 16 nt, Human
ucuugggggaaaauac

SEQ ID NO: 3683731 - RNA, 23 nt, Human
ucuugggggacagggcuggccca

SEQ ID NO: 3683732 - RNA, 20 nt, Human
ucuuggggggguggccgcug

SEQ ID NO: 3683733 - RNA, 14 nt, Human
ucuugguccugcug

SEQ ID NO: 3683734 - RNA, 17 nt, Human
ucuugguccugcugcag

SEQ ID NO: 3683735 - RNA, 17 nt, Human
ucuugguguuaaaacac

SEQ ID NO: 3683736 - RNA, 21 nt, Human
ucuugguucauaaaugaauuu

SEQ ID NO: 3683737 - RNA, 13 nt, Human
ucuugguuccagc

SEQ ID NO: 3683738 - RNA, 18 nt, Human
ucuugguuccagccugcc

SEQ ID NO: 3683739 - RNA, 19 nt, Human
ucuugguugaaaauaaaaa

SEQ ID NO: 3683740 - RNA, 17 nt, Human
ucuugguuggcuggccu

SEQ ID NO: 3683741 - RNA, 22 nt, Human
ucuugguuucucucuacagugc

SEQ ID NO: 3683742 - RNA, 20 nt, Human
ucuugguuuucccuuugccu

SEQ ID NO: 3683743 - RNA, 15 nt, Human
ucuuguaaagacugg

SEQ ID NO: 3683744 - RNA, 18 nt, Human
ucuuguaaauaaagcccu

SEQ ID NO: 3683745 - RNA, 14 nt, Human
ucuuguaaaugugu

SEQ ID NO: 3683746 - RNA, 18 nt, Human
ucuuguaaauguguugga

SEQ ID NO: 3683747 - RNA, 22 nt, Human
ucuuguaaauguguuggacaaa

SEQ ID NO: 3683748 - RNA, 13 nt, Human
ucuuguaagauuu

SEQ ID NO: 3683749 - RNA, 15 nt, Human
ucuuguaagcaaaag

SEQ ID NO: 3683750 - RNA, 17 nt, Human
ucuuguaaggcuuugau

SEQ ID NO: 3683751 - RNA, 18 nt, Human
ucuuguaaggcuuugauu

SEQ ID NO: 3683752 - RNA, 19 nt, Human
ucuuguaauccgaaucucu

SEQ ID NO: 3683753 - RNA, 23 nt, Human
ucuuguaauuuaaacaggcccag

SEQ ID NO: 3683754 - RNA, 19 nt, Human
ucuuguaauuuuacacgcu

SEQ ID NO: 3683755 - RNA, 17 nt, Human
ucuuguacauguguagc

SEQ ID NO: 3683756 - RNA, 19 nt, Human
ucuuguacauguguagccu

SEQ ID NO: 3683757 - RNA, 21 nt, Human
ucuuguauaagauccuagauc

SEQ ID NO: 3683758 - RNA, 15 nt, Human
ucuuguauuaagaau

SEQ ID NO: 3683759 - RNA, 16 nt, Human
ucuuguauuaaguugu

SEQ ID NO: 3683760 - RNA, 18 nt, Human
ucuuguauuaaguuguua

SEQ ID NO: 3683761 - RNA, 16 nt, Human
ucuugucacaauaaau

SEQ ID NO: 3683762 - RNA, 14 nt, Human
ucuugucagacaua

SEQ ID NO: 3683763 - RNA, 19 nt, Human
ucuugucagacauaaagcc

SEQ ID NO: 3683764 - RNA, 20 nt, Human
ucuugucagacauaaagcca

SEQ ID NO: 3683765 - RNA, 15 nt, Human
ucuugucauguguau

SEQ ID NO: 3683766 - RNA, 13 nt, Human
ucuugucauuuuu

SEQ ID NO: 3683767 - RNA, 22 nt, Human
ucuuguccagagacaagacuuc

SEQ ID NO: 3683768 - RNA, 22 nt, Human
ucuuguccaugugguucuucaa

SEQ ID NO: 3683769 - RNA, 21 nt, Human
ucuuguccccaacaccccaca

SEQ ID NO: 3683770 - RNA, 12 nt, Human
ucuugucuauaa

SEQ ID NO: 3683771 - RNA, 16 nt, Human
ucuugucuauaaagca

SEQ ID NO: 3683772 - RNA, 18 nt, Human
ucuugucucaaugcucau

SEQ ID NO: 3683773 - RNA, 15 nt, Human
ucuugucucagauuu

SEQ ID NO: 3683774 - RNA, 16 nt, Human
ucuugucuccccuguu

SEQ ID NO: 3683775 - RNA, 13 nt, Human
ucuugucucuggg

SEQ ID NO: 3683776 - RNA, 15 nt, Human
ucuugucuuccuauu

SEQ ID NO: 3683777 - RNA, 10 nt, Human
ucuugugaag

SEQ ID NO: 3683778 - RNA, 11 nt, Human
ucuugugaagg

SEQ ID NO: 3683779 - RNA, 14 nt, Human
ucuugugacuagug

SEQ ID NO: 3683780 - RNA, 17 nt, Human
ucuugugcuagaauacu

SEQ ID NO: 3683781 - RNA, 19 nt, Human
ucuuguggauguuuuaauu

SEQ ID NO: 3683782 - RNA, 23 nt, Human
ucuuguggauguuuuaauuccau

SEQ ID NO: 3683783 - RNA, 23 nt, Human
ucuugugguuauaacuuaaugaa

SEQ ID NO: 3683784 - RNA, 15 nt, Human
ucuugugucuuugga

SEQ ID NO: 3683785 - RNA, 20 nt, Human
ucuugugucuuuggaggugc

SEQ ID NO: 3683786 - RNA, 21 nt, Human
ucuugugugguuuggcccuuc

SEQ ID NO: 3683787 - RNA, 21 nt, Human
ucuuguguguaugcacaugaa

SEQ ID NO: 3683788 - RNA, 22 nt, Human
ucuuguguguaugcacaugaac

SEQ ID NO: 3683789 - RNA, 16 nt, Human
ucuuguguguuuauug

SEQ ID NO: 3683790 - RNA, 13 nt, Human
ucuuguguuggcu

SEQ ID NO: 3683791 - RNA, 22 nt, Human
ucuuguguuuccacagccugca

SEQ ID NO: 3683792 - RNA, 21 nt, Human
ucuuguuaauauucuuucaau

SEQ ID NO: 3683793 - RNA, 19 nt, Human
ucuuguuaugguagaaaaa

SEQ ID NO: 3683794 - RNA, 15 nt, Human
ucuuguuccaaggcc

SEQ ID NO: 3683795 - RNA, 16 nt, Human
ucuuguucugagauuc

SEQ ID NO: 3683796 - RNA, 15 nt, Human
ucuuguucugucacu

SEQ ID NO: 3683797 - RNA, 14 nt, Human
ucuuguugcuuugu

SEQ ID NO: 3683798 - RNA, 16 nt, Human
ucuuguuggugcacag

SEQ ID NO: 3683799 - RNA, 13 nt, Human
ucuuguuucucca

SEQ ID NO: 3683800 - RNA, 14 nt, Human
ucuuguuucucccg

SEQ ID NO: 3683801 - RNA, 14 nt, Human
ucuuguuucugaaa

SEQ ID NO: 3683802 - RNA, 16 nt, Human
ucuuguuuuguuuguc

SEQ ID NO: 3683803 - RNA, 16 nt, Human
ucuuguuuuuaaguuu

SEQ ID NO: 3683804 - RNA, 15 nt, Human
ucuuguuuuuauuaa

SEQ ID NO: 3683805 - RNA, 13 nt, Human
ucuuguuuuucca

SEQ ID NO: 3683806 - RNA, 18 nt, Human
ucuuguuuuuuuuuucca

SEQ ID NO: 3683807 - RNA, 15 nt, Human
ucuuuaaaagaauga

SEQ ID NO: 3683808 - RNA, 16 nt, Human
ucuuuaaaagaaugac

SEQ ID NO: 3683809 - RNA, 15 nt, Human
ucuuuaaaagagaga

SEQ ID NO: 3683810 - RNA, 18 nt, Human
ucuuuaaaaggaaagaaa

SEQ ID NO: 3683811 - RNA, 15 nt, Human
ucuuuaaacugucgu

SEQ ID NO: 3683812 - RNA, 15 nt, Human
ucuuuaaaggcccag

SEQ ID NO: 3683813 - RNA, 18 nt, Human
ucuuuaaaggcccagccc

SEQ ID NO: 3683814 - RNA, 22 nt, Human
ucuuuaaaggcccagccccuag

SEQ ID NO: 3683815 - RNA, 18 nt, Human
ucuuuaaagucaggucca

SEQ ID NO: 3683816 - RNA, 23 nt, Human
ucuuuaaagugacuaauggcaug

SEQ ID NO: 3683817 - RNA, 12 nt, Human
ucuuuaaauaga

SEQ ID NO: 3683818 - RNA, 14 nt, Human
ucuuuaaauagaua

SEQ ID NO: 3683819 - RNA, 18 nt, Human
ucuuuaaccuuguauaaa

SEQ ID NO: 3683820 - RNA, 14 nt, Human
ucuuuaacucagga

SEQ ID NO: 3683821 - RNA, 23 nt, Human
ucuuuaacucccauuaccaugua

SEQ ID NO: 3683822 - RNA, 20 nt, Human
ucuuuaacugccguaauuua

SEQ ID NO: 3683823 - RNA, 16 nt, Human
ucuuuaacuuguaaua

SEQ ID NO: 3683824 - RNA, 11 nt, Human
ucuuuaacuuu

SEQ ID NO: 3683825 - RNA, 19 nt, Human
ucuuuaaguauugauucug

SEQ ID NO: 3683826 - RNA, 15 nt, Human
ucuuuaauaaauaac

SEQ ID NO: 3683827 - RNA, 14 nt, Human
ucuuuaaucuucag

SEQ ID NO: 3683828 - RNA, 13 nt, Human
ucuuuaaugcuuu

SEQ ID NO: 3683829 - RNA, 18 nt, Human
ucuuuaaugucacaggca

SEQ ID NO: 3683830 - RNA, 22 nt, Human
ucuuuaaugucacaggcagguc

SEQ ID NO: 3683831 - RNA, 16 nt, Human
ucuuuaauuuuggaau

SEQ ID NO: 3683832 - RNA, 14 nt, Human
ucuuuacaaaacaa

SEQ ID NO: 3683833 - RNA, 23 nt, Human
ucuuuacaaaacaaacucauuca

SEQ ID NO: 3683834 - RNA, 16 nt, Human
ucuuuaccugagacca

SEQ ID NO: 3683835 - RNA, 18 nt, Human
ucuuuaccugagaccagu

SEQ ID NO: 3683836 - RNA, 19 nt, Human
ucuuuaccuguauacagug

SEQ ID NO: 3683837 - RNA, 15 nt, Human
ucuuuagaaaaggca

SEQ ID NO: 3683838 - RNA, 11 nt, Human
ucuuuagaaca

SEQ ID NO: 3683839 - RNA, 13 nt, Human
ucuuuagagaacu

SEQ ID NO: 3683840 - RNA, 17 nt, Human
ucuuuagagaacugaaa

SEQ ID NO: 3683841 - RNA, 19 nt, Human
ucuuuagagaacugaaaag

SEQ ID NO: 3683842 - RNA, 23 nt, Human
ucuuuaggauugugaugguucgu

SEQ ID NO: 3683843 - RNA, 17 nt, Human
ucuuuaggucuuugccu

SEQ ID NO: 3683844 - RNA, 17 nt, Human
ucuuuaggucuuuguaa

SEQ ID NO: 3683845 - RNA, 13 nt, Human
ucuuuauaagaaa

SEQ ID NO: 3683846 - RNA, 15 nt, Human
ucuuuauaagaaagc

SEQ ID NO: 3683847 - RNA, 19 nt, Human
ucuuuauaagaaagccuga

SEQ ID NO: 3683848 - RNA, 20 nt, Human
ucuuuauaauucuacuuuga

SEQ ID NO: 3683849 - RNA, 13 nt, Human
ucuuuauacaaca

SEQ ID NO: 3683850 - RNA, 21 nt, Human
ucuuuauacaacagugcuaaa

SEQ ID NO: 3683851 - RNA, 15 nt, Human
ucuuuauacagcugu

SEQ ID NO: 3683852 - RNA, 15 nt, Human
ucuuuauagugcaca

SEQ ID NO: 3683853 - RNA, 22 nt, Human
ucuuuauauacaauaauggaaa

SEQ ID NO: 3683854 - RNA, 23 nt, Human
ucuuuauauacaauaauggaaaa

SEQ ID NO: 3683855 - RNA, 17 nt, Human
ucuuuauuaaauguaga

SEQ ID NO: 3683856 - RNA, 16 nt, Human
ucuuuauuaaucacua

SEQ ID NO: 3683857 - RNA, 12 nt, Human
ucuuuauugaaa

SEQ ID NO: 3683858 - RNA, 16 nt, Human
ucuuuauugagaaaga

SEQ ID NO: 3683859 - RNA, 19 nt, Human
ucuuuauugcucauuuuuu

SEQ ID NO: 3683860 - RNA, 16 nt, Human
ucuuuauugucuguaa

SEQ ID NO: 3683861 - RNA, 16 nt, Human
ucuuuauuuuguguaa

SEQ ID NO: 3683862 - RNA, 11 nt, Human
ucuuucaaaac

SEQ ID NO: 3683863 - RNA, 20 nt, Human
ucuuucaaaaccuuuugaaa

SEQ ID NO: 3683864 - RNA, 12 nt, Human
ucuuucaaacuc

SEQ ID NO: 3683865 - RNA, 23 nt, Human
ucuuucaaaggaacauugugucu

SEQ ID NO: 3683866 - RNA, 22 nt, Human
ucuuucaaagguagccaucaug

SEQ ID NO: 3683867 - RNA, 18 nt, Human
ucuuucaaauugagagaa

SEQ ID NO: 3683868 - RNA, 18 nt, Human
ucuuucaagggcuuuccu

SEQ ID NO: 3683869 - RNA, 19 nt, Human
ucuuucaauaaacuaaaga

SEQ ID NO: 3683870 - RNA, 23 nt, Human
ucuuucacacuuccaccagccug

SEQ ID NO: 3683871 - RNA, 19 nt, Human
ucuuucacccacagaaaga

SEQ ID NO: 3683872 - RNA, 23 nt, Human
ucuuucacccacagaaagagagc

SEQ ID NO: 3683873 - RNA, 14 nt, Human
ucuuucagaaaaca

SEQ ID NO: 3683874 - RNA, 15 nt, Human
ucuuucagaaaacag

SEQ ID NO: 3683875 - RNA, 18 nt, Human
ucuuucagaaauauaaca

SEQ ID NO: 3683876 - RNA, 23 nt, Human
ucuuucagaaauauaacacauuu

SEQ ID NO: 3683877 - RNA, 15 nt, Human
ucuuucagcaagaua

SEQ ID NO: 3683878 - RNA, 16 nt, Human
ucuuucagccaagaau

SEQ ID NO: 3683879 - RNA, 17 nt, Human
ucuuucagcuaucagua

SEQ ID NO: 3683880 - RNA, 18 nt, Human
ucuuucagcuaucaguag

SEQ ID NO: 3683881 - RNA, 17 nt, Human
ucuuucagggauuuuuu

SEQ ID NO: 3683882 - RNA, 16 nt, Human
ucuuucaguacuuuuu

SEQ ID NO: 3683883 - RNA, 23 nt, Human
ucuuucaguacuuuuuuaaauau

SEQ ID NO: 3683884 - RNA, 13 nt, Human
ucuuuccaaagua

SEQ ID NO: 3683885 - RNA, 17 nt, Human
ucuuuccacagaagcuc

SEQ ID NO: 3683886 - RNA, 16 nt, Human
ucuuuccauuucucuc

SEQ ID NO: 3683887 - RNA, 14 nt, Human
ucuuuccauuugca

SEQ ID NO: 3683888 - RNA, 17 nt, Human
ucuuuccauuugcauuu

SEQ ID NO: 3683889 - RNA, 12 nt, Human
ucuuucccuccc

SEQ ID NO: 3683890 - RNA, 12 nt, Human
ucuuucccuccu

SEQ ID NO: 3683891 - RNA, 14 nt, Human
ucuuucccuggucc

SEQ ID NO: 3683892 - RNA, 15 nt, Human
ucuuucccuuccucc

SEQ ID NO: 3683893 - RNA, 17 nt, Human
ucuuuccuaagaccugg

SEQ ID NO: 3683894 - RNA, 17 nt, Human
ucuuuccuaaggcugca

SEQ ID NO: 3683895 - RNA, 19 nt, Human
ucuuuccuagauggcaguc

SEQ ID NO: 3683896 - RNA, 22 nt, Human
ucuuuccuagauggcagucacu

SEQ ID NO: 3683897 - RNA, 16 nt, Human
ucuuuccuauuucagu

SEQ ID NO: 3683898 - RNA, 12 nt, Human
ucuuuccuccuu

SEQ ID NO: 3683899 - RNA, 14 nt, Human
ucuuuccuccuuuc

SEQ ID NO: 3683900 - RNA, 20 nt, Human
ucuuuccucuuccccuugcc

SEQ ID NO: 3683901 - RNA, 23 nt, Human
ucuuuccucuuccccuugcccuu

SEQ ID NO: 3683902 - RNA, 16 nt, Human
ucuuuccugaaccaug

SEQ ID NO: 3683903 - RNA, 12 nt, Human
ucuuuccugagg

SEQ ID NO: 3683904 - RNA, 13 nt, Human
ucuuuccugaggc

SEQ ID NO: 3683905 - RNA, 15 nt, Human
ucuuuccugaggcug

SEQ ID NO: 3683906 - RNA, 11 nt, Human
ucuuuccuguc

SEQ ID NO: 3683907 - RNA, 12 nt, Human
ucuuuccuuccu

SEQ ID NO: 3683908 - RNA, 15 nt, Human
ucuuucgucacccuu

SEQ ID NO: 3683909 - RNA, 14 nt, Human
ucuuucuaagaaau

SEQ ID NO: 3683910 - RNA, 23 nt, Human
ucuuucuacaaagcacuagagaa

SEQ ID NO: 3683911 - RNA, 14 nt, Human
ucuuucuacaguau

SEQ ID NO: 3683912 - RNA, 15 nt, Human
ucuuucuaguggucu

SEQ ID NO: 3683913 - RNA, 21 nt, Human
ucuuucuaugcugcuuuuaua

SEQ ID NO: 3683914 - RNA, 15 nt, Human
ucuuucucaaagaaa

SEQ ID NO: 3683915 - RNA, 21 nt, Human
ucuuucuccuuagucuucuca

SEQ ID NO: 3683916 - RNA, 24 nt, Human
ucuuucuccuuagucuucucauag

SEQ ID NO: 3683917 - RNA, 24 nt, Human
ucuuucuccuugaauaucuuucga

SEQ ID NO: 3683918 - RNA, 10 nt, Human
ucuuucucuc

SEQ ID NO: 3683919 - RNA, 12 nt, Human
ucuuucucucag

SEQ ID NO: 3683920 - RNA, 11 nt, Human
ucuuucucugc

SEQ ID NO: 3683921 - RNA, 15 nt, Human
ucuuucucugccagu

SEQ ID NO: 3683922 - RNA, 12 nt, Human
ucuuucucuuuc

SEQ ID NO: 3683923 - RNA, 23 nt, Human
ucuuucuggccugccuucguuaa

SEQ ID NO: 3683924 - RNA, 18 nt, Human
ucuuucuggcuaugcauu

SEQ ID NO: 3683925 - RNA, 21 nt, Human
ucuuucugguuguuuuuaaac

SEQ ID NO: 3683926 - RNA, 10 nt, Human
ucuuucugua

SEQ ID NO: 3683927 - RNA, 16 nt, Human
ucuuucuguccccucu

SEQ ID NO: 3683928 - RNA, 20 nt, Human
ucuuucuuacaaggaaggug

SEQ ID NO: 3683929 - RNA, 13 nt, Human
ucuuucuuagaaa

SEQ ID NO: 3683930 - RNA, 14 nt, Human
ucuuucuuagaaau

SEQ ID NO: 3683931 - RNA, 16 nt, Human
ucuuucuuagaaauuu

SEQ ID NO: 3683932 - RNA, 19 nt, Human
ucuuucuuagaaauuuauu

SEQ ID NO: 3683933 - RNA, 14 nt, Human
ucuuucuuccucug

SEQ ID NO: 3683934 - RNA, 12 nt, Human
ucuuucuuccuu

SEQ ID NO: 3683935 - RNA, 18 nt, Human
ucuuucuugcucccugac

SEQ ID NO: 3683936 - RNA, 12 nt, Human
ucuuucuuuaaa

SEQ ID NO: 3683937 - RNA, 13 nt, Human
ucuuucuuuaaau

SEQ ID NO: 3683938 - RNA, 22 nt, Human
ucuuucuuugggaauauuugaa

SEQ ID NO: 3683939 - RNA, 18 nt, Human
ucuuucuuuggugccuuu

SEQ ID NO: 3683940 - RNA, 21 nt, Human
ucuuucuuuggugccuuuccu

SEQ ID NO: 3683941 - RNA, 20 nt, Human
ucuuugaaaauaguuauuca

SEQ ID NO: 3683942 - RNA, 22 nt, Human
ucuuugaaagaaggaagacuuu

SEQ ID NO: 3683943 - RNA, 21 nt, Human
ucuuugaaauagucuguguga

SEQ ID NO: 3683944 - RNA, 15 nt, Human
ucuuugaaauuaugu

SEQ ID NO: 3683945 - RNA, 23 nt, Human
ucuuugaagaagguggaccuuuu

SEQ ID NO: 3683946 - RNA, 13 nt, Human
ucuuugaauaaau

SEQ ID NO: 3683947 - RNA, 16 nt, Human
ucuuugaauaaauguc

SEQ ID NO: 3683948 - RNA, 17 nt, Human
ucuuugaauaaauguca

SEQ ID NO: 3683949 - RNA, 16 nt, Human
ucuuugaaugacaaag

SEQ ID NO: 3683950 - RNA, 16 nt, Human
ucuuugaauuuucugu

SEQ ID NO: 3683951 - RNA, 18 nt, Human
ucuuugagauagaagaac

SEQ ID NO: 3683952 - RNA, 22 nt, Human
ucuuugagauagaagaacugca

SEQ ID NO: 3683953 - RNA, 21 nt, Human
ucuuugauaauguuaaauuug

SEQ ID NO: 3683954 - RNA, 20 nt, Human
ucuuugauacuuguucaaaa

SEQ ID NO: 3683955 - RNA, 14 nt, Human
ucuuugaucaugaa

SEQ ID NO: 3683956 - RNA, 16 nt, Human
ucuuugauguguuguu

SEQ ID NO: 3683957 - RNA, 18 nt, Human
ucuuugauuauuugcaug

SEQ ID NO: 3683958 - RNA, 20 nt, Human
ucuuugauuauuugcauguu

SEQ ID NO: 3683959 - RNA, 16 nt, Human
ucuuugauucuccuuc

SEQ ID NO: 3683960 - RNA, 20 nt, Human
ucuuugauucuccuuuuaug

SEQ ID NO: 3683961 - RNA, 21 nt, Human
ucuuugauucuccuuuuaugu

SEQ ID NO: 3683962 - RNA, 13 nt, Human
ucuuugauucugu

SEQ ID NO: 3683963 - RNA, 22 nt, Human
ucuuugcaaaguauuguaaauu

SEQ ID NO: 3683964 - RNA, 13 nt, Human
ucuuugcaacugu

SEQ ID NO: 3683965 - RNA, 20 nt, Human
ucuuugcacuuuuucuuaau

SEQ ID NO: 3683966 - RNA, 17 nt, Human
ucuuugcagacaggcaa

SEQ ID NO: 3683967 - RNA, 15 nt, Human
ucuuugcccuuuacu

SEQ ID NO: 3683968 - RNA, 15 nt, Human
ucuuugccuguucag

SEQ ID NO: 3683969 - RNA, 23 nt, Human
ucuuugccuguucaguuacagaa

SEQ ID NO: 3683970 - RNA, 13 nt, Human
ucuuugcugcaga

SEQ ID NO: 3683971 - RNA, 19 nt, Human
ucuuugcuguaagaugucu

SEQ ID NO: 3683972 - RNA, 19 nt, Human
ucuuugcuucacuucuccc

SEQ ID NO: 3683973 - RNA, 11 nt, Human
ucuuugcuuug

SEQ ID NO: 3683974 - RNA, 18 nt, Human
ucuuugcuuugcuuucug

SEQ ID NO: 3683975 - RNA, 19 nt, Human
ucuuuggaaaaauguuugu

SEQ ID NO: 3683976 - RNA, 18 nt, Human
ucuuuggaaggagugaga

SEQ ID NO: 3683977 - RNA, 17 nt, Human
ucuuuggacacucacac

SEQ ID NO: 3683978 - RNA, 21 nt, Human
ucuuuggacagaagcagcucu

SEQ ID NO: 3683979 - RNA, 13 nt, Human
ucuuuggacccug

SEQ ID NO: 3683980 - RNA, 14 nt, Human
ucuuuggacccuga

SEQ ID NO: 3683981 - RNA, 18 nt, Human
ucuuugggaauauuugaa

SEQ ID NO: 3683982 - RNA, 16 nt, Human
ucuuugggccagacau

SEQ ID NO: 3683983 - RNA, 20 nt, Human
ucuuugggccagacaugcca

SEQ ID NO: 3683984 - RNA, 19 nt, Human
ucuuuggguaccuauuuuc

SEQ ID NO: 3683985 - RNA, 14 nt, Human
ucuuuggucuacac

SEQ ID NO: 3683986 - RNA, 20 nt, Human
ucuuuggugccuuuccuguu

SEQ ID NO: 3683987 - RNA, 17 nt, Human
ucuuugguggcuuugca

SEQ ID NO: 3683988 - RNA, 17 nt, Human
ucuuugguguacagacu

SEQ ID NO: 3683989 - RNA, 12 nt, Human
ucuuugguucua

SEQ ID NO: 3683990 - RNA, 14 nt, Human
ucuuugguucuaag

SEQ ID NO: 3683991 - RNA, 12 nt, Human
ucuuuguaagaa

SEQ ID NO: 3683992 - RNA, 18 nt, Human
ucuuuguaagaguguaga

SEQ ID NO: 3683993 - RNA, 22 nt, Human
ucuuuguaaguaaacugcccug

SEQ ID NO: 3683994 - RNA, 12 nt, Human
ucuuuguaaguc

SEQ ID NO: 3683995 - RNA, 22 nt, Human
ucuuuguaagucaguguugaga

SEQ ID NO: 3683996 - RNA, 23 nt, Human
ucuuuguaaucguuaugugugua

SEQ ID NO: 3683997 - RNA, 14 nt, Human
ucuuuguaauuauu

SEQ ID NO: 3683998 - RNA, 14 nt, Human
ucuuuguacagaca

SEQ ID NO: 3683999 - RNA, 14 nt, Human
ucuuuguaccaaaa

SEQ ID NO: 3684000 - RNA, 16 nt, Human
ucuuuguaucuuccau

SEQ ID NO: 3684001 - RNA, 13 nt, Human
ucuuugucuaaaa

SEQ ID NO: 3684002 - RNA, 19 nt, Human
ucuuugucuaaaacaauaa

SEQ ID NO: 3684003 - RNA, 20 nt, Human
ucuuugucuaaaacaauaaa

SEQ ID NO: 3684004 - RNA, 20 nt, Human
ucuuugucuuaucuggcccu

SEQ ID NO: 3684005 - RNA, 16 nt, Human
ucuuugugaaggccuc

SEQ ID NO: 3684006 - RNA, 16 nt, Human
ucuuugugauaauuua

SEQ ID NO: 3684007 - RNA, 16 nt, Human
ucuuugugcuuuggcu

SEQ ID NO: 3684008 - RNA, 13 nt, Human
ucuuuguggccaa

SEQ ID NO: 3684009 - RNA, 14 nt, Human
ucuuuguggccaag

SEQ ID NO: 3684010 - RNA, 18 nt, Human
ucuuuguuaagacugcug

SEQ ID NO: 3684011 - RNA, 15 nt, Human
ucuuuguuacaggca

SEQ ID NO: 3684012 - RNA, 21 nt, Human
ucuuuguuaucaaacuucagc

SEQ ID NO: 3684013 - RNA, 14 nt, Human
ucuuuguucaagau

SEQ ID NO: 3684014 - RNA, 20 nt, Human
ucuuuguucucagcuccccc

SEQ ID NO: 3684015 - RNA, 18 nt, Human
ucuuuguuggaaaagaau

SEQ ID NO: 3684016 - RNA, 12 nt, Human
ucuuuguuuugu

SEQ ID NO: 3684017 - RNA, 17 nt, Human
ucuuuguuuugugucuc

SEQ ID NO: 3684018 - RNA, 14 nt, Human
ucuuuuaaaaagua

SEQ ID NO: 3684019 - RNA, 16 nt, Human
ucuuuuaaaaaguauu

SEQ ID NO: 3684020 - RNA, 14 nt, Human
ugaaagcugagaac

SEQ ID NO: 3684021 - RNA, 19 nt, Human
ugaaagcugagaacuccug

SEQ ID NO: 3684022 - RNA, 21 nt, Human
ugaaagcugauuacugucaau

SEQ ID NO: 3684023 - RNA, 11 nt, Human
ugaaagcugug

SEQ ID NO: 3684024 - RNA, 20 nt, Human
ugaaaggaaauuaaggcaac

SEQ ID NO: 3684025 - RNA, 22 nt, Human
ugaaaggaauuuugcuaaguaa

SEQ ID NO: 3684026 - RNA, 22 nt, Human
ugaaaggagagcaucggccuag

SEQ ID NO: 3684027 - RNA, 14 nt, Human
ugaaaggagcccuu

SEQ ID NO: 3684028 - RNA, 17 nt, Human
ugaaaggcauucucuga

SEQ ID NO: 3684029 - RNA, 15 nt, Human
ugaaaggcuuuuaaa

SEQ ID NO: 3684030 - RNA, 13 nt, Human
ugaaagggcccag

SEQ ID NO: 3684031 - RNA, 13 nt, Human
ugaaagguacuau

SEQ ID NO: 3684032 - RNA, 14 nt, Human
ugaaagguacuaua

SEQ ID NO: 3684033 - RNA, 18 nt, Human
ugaaagguacuauauuug

SEQ ID NO: 3684034 - RNA, 15 nt, Human
ugaaagguagacuuu

SEQ ID NO: 3684035 - RNA, 21 nt, Human
ugaaaggugccauggaagagg

SEQ ID NO: 3684036 - RNA, 19 nt, Human
ugaaagguuacccuguaac

SEQ ID NO: 3684037 - RNA, 23 nt, Human
ugaaaguacauuuggagacacaa

SEQ ID NO: 3684038 - RNA, 18 nt, Human
ugaaagucagaugcccag

SEQ ID NO: 3684039 - RNA, 21 nt, Human
ugaaagucaguuuaagaggcu

SEQ ID NO: 3684040 - RNA, 18 nt, Human
ugaaagucaugaacacau

SEQ ID NO: 3684041 - RNA, 16 nt, Human
ugaaagucuguccuug

SEQ ID NO: 3684042 - RNA, 18 nt, Human
ugaaagucuugugacuag

SEQ ID NO: 3684043 - RNA, 20 nt, Human
ugaaagucuugugacuagug

SEQ ID NO: 3684044 - RNA, 19 nt, Human
ugaaagugaggaaauaaag

SEQ ID NO: 3684045 - RNA, 15 nt, Human
ugaaaguuaauccac

SEQ ID NO: 3684046 - RNA, 17 nt, Human
ugaaaguuugcacugua

SEQ ID NO: 3684047 - RNA, 20 nt, Human
ugaaaguuuuguaaaagaaa

SEQ ID NO: 3684048 - RNA, 22 nt, Human
ugaaaguuuuguaaaagaaauc

SEQ ID NO: 3684049 - RNA, 22 nt, Human
ugaaauaaaacuggcuuuggcu

SEQ ID NO: 3684050 - RNA, 18 nt, Human
ugaaauaaacgucuuaaa

SEQ ID NO: 3684051 - RNA, 20 nt, Human
ugaaauaaagaaauugcaau

SEQ ID NO: 3684052 - RNA, 21 nt, Human
uuuaauaaacuacucuuugau

SEQ ID NO: 3684053 - RNA, 19 nt, Human
uuuaauaaagcgaaaaacu

SEQ ID NO: 3684054 - RNA, 15 nt, Human
uuuaauaacauuacc

SEQ ID NO: 3684055 - RNA, 20 nt, Human
uuuaauaacauuaccuuacu

SEQ ID NO: 3684056 - RNA, 20 nt, Human
uuuaauaagcuacuagcaaa

SEQ ID NO: 3684057 - RNA, 16 nt, Human
uuuaauaauaaucuag

SEQ ID NO: 3684058 - RNA, 17 nt, Human
uuuaauaauauacuugu

SEQ ID NO: 3684059 - RNA, 14 nt, Human
uuuaauaauguuuc

SEQ ID NO: 3684060 - RNA, 18 nt, Human
uuuaauaauuauaugcua

SEQ ID NO: 3684061 - RNA, 11 nt, Human
uuuaauaauuu

SEQ ID NO: 3684062 - RNA, 19 nt, Human
uuuaauagaauauaauuau

SEQ ID NO: 3684063 - RNA, 21 nt, Human
uuuaauagaauauaauuaucg

SEQ ID NO: 3684064 - RNA, 17 nt, Human
uuuaauagcaaagaauu

SEQ ID NO: 3684065 - RNA, 22 nt, Human
uuuaauagcgucauaacuagaa

SEQ ID NO: 3684066 - RNA, 14 nt, Human
uuuaauaguguuaa

SEQ ID NO: 3684067 - RNA, 23 nt, Human
uuuaauauaaaguaguccuguga

SEQ ID NO: 3684068 - RNA, 16 nt, Human
uuuaauauaaaguuuu

SEQ ID NO: 3684069 - RNA, 15 nt, Human
uuuaauauaaaugca

SEQ ID NO: 3684070 - RNA, 15 nt, Human
uuuaauauagcuauu

SEQ ID NO: 3684071 - RNA, 21 nt, Human
uuuaauauuaaagccauguuu

SEQ ID NO: 3684072 - RNA, 24 nt, Human
uuuaauauuaccuaaugaaaguga

SEQ ID NO: 3684073 - RNA, 17 nt, Human
uuuaauauuauuacugu

SEQ ID NO: 3684074 - RNA, 22 nt, Human
uuuaauauugagaaagaaacua

SEQ ID NO: 3684075 - RNA, 15 nt, Human
uuuaauauuuaaaca

SEQ ID NO: 3684076 - RNA, 16 nt, Human
uuuaauauuuacucua

SEQ ID NO: 3684077 - RNA, 14 nt, Human
uuuaaucauauaaa

SEQ ID NO: 3684078 - RNA, 18 nt, Human
uuuaaucauauaaauaga

SEQ ID NO: 3684079 - RNA, 23 nt, Human
uuuaaucauauaaauagaaugua

SEQ ID NO: 3684080 - RNA, 13 nt, Human
uuuaaucaugaaa

SEQ ID NO: 3684081 - RNA, 19 nt, Human
uuuaaucaugaaauuacuu

SEQ ID NO: 3684082 - RNA, 24 nt, Human
uuuaaucaugaaauuacuuaucau

SEQ ID NO: 3684083 - RNA, 15 nt, Human
uuuaaucaugaauau

SEQ ID NO: 3684084 - RNA, 21 nt, Human
uuuaauccuucuaguuuccca

SEQ ID NO: 3684085 - RNA, 23 nt, Human
uuuaauccuucuaguuucccaca

SEQ ID NO: 3684086 - RNA, 13 nt, Human
uuuaaucuuuuau

SEQ ID NO: 3684087 - RNA, 16 nt, Human
uuuaaugaaagacugu

SEQ ID NO: 3684088 - RNA, 12 nt, Human
uuuaaugcugcc

SEQ ID NO: 3684089 - RNA, 13 nt, Human
uuuaaugcugccu

SEQ ID NO: 3684090 - RNA, 14 nt, Human
uuuaaugcugccuu

SEQ ID NO: 3684091 - RNA, 19 nt, Human
uuuaauggacacuuuucac

SEQ ID NO: 3684092 - RNA, 17 nt, Human
uuuaauggauuguuaau

SEQ ID NO: 3684093 - RNA, 20 nt, Human
uuuaauggauuguuaauuuc

SEQ ID NO: 3684094 - RNA, 20 nt, Human
uuuaauggggguagcagcug

SEQ ID NO: 3684095 - RNA, 22 nt, Human
uuuaauggggguagcagcugga

SEQ ID NO: 3684096 - RNA, 17 nt, Human
uuuaaugugaacuugua

SEQ ID NO: 3684097 - RNA, 18 nt, Human
uuuaaugugcuguguaaa

SEQ ID NO: 3684098 - RNA, 22 nt, Human
uuuaaugugcuguguaaaguua

SEQ ID NO: 3684099 - RNA, 15 nt, Human
uuuaauguucuguga

SEQ ID NO: 3684100 - RNA, 16 nt, Human
uuuaauguuuaaaaca

SEQ ID NO: 3684101 - RNA, 19 nt, Human
uuuaauguuuuaaauguac

SEQ ID NO: 3684102 - RNA, 21 nt, Human
uuuaauuaaaaacuaguaguu

SEQ ID NO: 3684103 - RNA, 15 nt, Human
uuuaauuaaaugcuc

SEQ ID NO: 3684104 - RNA, 19 nt, Human
uuuaauuaaucaugaaugu

SEQ ID NO: 3684105 - RNA, 19 nt, Human
uuuaauuaaugaaauaucu

SEQ ID NO: 3684106 - RNA, 22 nt, Human
uuuaauuaauugggccagcuuu

SEQ ID NO: 3684107 - RNA, 21 nt, Human
uuuaauuagggguugcuaaga

SEQ ID NO: 3684108 - RNA, 19 nt, Human
uuuaauuagugcuaagugu

SEQ ID NO: 3684109 - RNA, 18 nt, Human
uuuaauuauuaacuacau

SEQ ID NO: 3684110 - RNA, 14 nt, Human
uuuaauuauuauuc

SEQ ID NO: 3684111 - RNA, 16 nt, Human
uuuaauuccaauauga

SEQ ID NO: 3684112 - RNA, 20 nt, Human
uuuaauugaaagaauguaaa

SEQ ID NO: 3684113 - RNA, 16 nt, Human
uuuaauugaaggaaag

SEQ ID NO: 3684114 - RNA, 14 nt, Human
uuuaauugauuauu

SEQ ID NO: 3684115 - RNA, 15 nt, Human
uuuaauuguaaacug

SEQ ID NO: 3684116 - RNA, 16 nt, Human
uuuaauuguaaacugu

SEQ ID NO: 3684117 - RNA, 17 nt, Human
uuuaauuguaaacugua

SEQ ID NO: 3684118 - RNA, 15 nt, Human
uuuaauuguaaagua

SEQ ID NO: 3684119 - RNA, 14 nt, Human
uuuaauuguauuuu

SEQ ID NO: 3684120 - RNA, 13 nt, Human
uuuaauugucaug

SEQ ID NO: 3684121 - RNA, 22 nt, Human
uuuaauuguuguuucuuucuag

SEQ ID NO: 3684122 - RNA, 24 nt, Human
uuuaauuguuguuucuuucuagug

SEQ ID NO: 3684123 - RNA, 16 nt, Human
uuuaauuuauuuauua

SEQ ID NO: 3684124 - RNA, 20 nt, Human
uuuaauuuauuuauuaagau

SEQ ID NO: 3684125 - RNA, 21 nt, Human
uuuaauuugaugaaagcugau

SEQ ID NO: 3684126 - RNA, 20 nt, Human
uuuaauuugccaaaauaaug

SEQ ID NO: 3684127 - RNA, 12 nt, Human
uuuaauuuuaca

SEQ ID NO: 3684128 - RNA, 22 nt, Human
uuuaauuuugacacuauaucug

SEQ ID NO: 3684129 - RNA, 22 nt, Human
uuuaauuuuugcuuuuagaaaa

SEQ ID NO: 3684130 - RNA, 19 nt, Human
uuuaauuuuuuugagacag

SEQ ID NO: 3684131 - RNA, 17 nt, Human
uuuaauuuuuuuuagua

SEQ ID NO: 3684132 - RNA, 16 nt, Human
uuuacaaaaauauaaa

SEQ ID NO: 3684133 - RNA, 11 nt, Human
uuuacaaaaga

SEQ ID NO: 3684134 - RNA, 13 nt, Human
uuuacaaaagaug

SEQ ID NO: 3684135 - RNA, 12 nt, Human
uuuacaaagugu

SEQ ID NO: 3684136 - RNA, 16 nt, Human
uuuacaaaguguguau

SEQ ID NO: 3684137 - RNA, 21 nt, Human
uuuacaaauguuaaaaugugu

SEQ ID NO: 3684138 - RNA, 14 nt, Human
uuuacaacacuuua

SEQ ID NO: 3684139 - RNA, 20 nt, Human
uuuacaacacuuuaaugggu

SEQ ID NO: 3684140 - RNA, 16 nt, Human
uuuacaaccuagaagu

SEQ ID NO: 3684141 - RNA, 16 nt, Human
uuuacaagaaguuuau

SEQ ID NO: 3684142 - RNA, 19 nt, Human
uuuacaagaaguuuauucu

SEQ ID NO: 3684143 - RNA, 15 nt, Human
uuuacaagccccccc

SEQ ID NO: 3684144 - RNA, 20 nt, Human
uuuacaagggcauaaaguaa

SEQ ID NO: 3684145 - RNA, 16 nt, Human
uuuacaaguaacaaaa

SEQ ID NO: 3684146 - RNA, 15 nt, Human
uuuacaauguaauua

SEQ ID NO: 3684147 - RNA, 17 nt, Human
uuuacaauguaauuauu

SEQ ID NO: 3684148 - RNA, 14 nt, Human
uuuacaauguauua

SEQ ID NO: 3684149 - RNA, 15 nt, Human
uuuacaauugaaaug

SEQ ID NO: 3684150 - RNA, 18 nt, Human
uuuacaauuuacaaagug

SEQ ID NO: 3684151 - RNA, 19 nt, Human
uuuacaauuuacaaagugu

SEQ ID NO: 3684152 - RNA, 21 nt, Human
uuuacacacuguacacauaag

SEQ ID NO: 3684153 - RNA, 22 nt, Human
uuuacacacuguacacauaagc

SEQ ID NO: 3684154 - RNA, 18 nt, Human
uuuacacucggcuuugga

SEQ ID NO: 3684155 - RNA, 16 nt, Human
uuuacacucuuuguaa

SEQ ID NO: 3684156 - RNA, 11 nt, Human
uuuacacugua

SEQ ID NO: 3684157 - RNA, 13 nt, Human
uuuacacuguacc

SEQ ID NO: 3684158 - RNA, 14 nt, Human
uuuacacuguacca

SEQ ID NO: 3684159 - RNA, 19 nt, Human
uuuacacuuuugagacuuu

SEQ ID NO: 3684160 - RNA, 12 nt, Human
uuuacagaaaaa

SEQ ID NO: 3684161 - RNA, 13 nt, Human
uuuacagaaaaag

SEQ ID NO: 3684162 - RNA, 19 nt, Human
uuuacagaauugcuuguuu

SEQ ID NO: 3684163 - RNA, 13 nt, Human
uuuacagaauuuu

SEQ ID NO: 3684164 - RNA, 16 nt, Human
uuuacagcacuacucu

SEQ ID NO: 3684165 - RNA, 21 nt, Human
uuuacagcacuacucugugcc

SEQ ID NO: 3684166 - RNA, 22 nt, Human
uuuacagccagugggagauguu

SEQ ID NO: 3684167 - RNA, 23 nt, Human
uuuacagcuuucaugauuagcaa

SEQ ID NO: 3684168 - RNA, 14 nt, Human
uuuacaggaacuuc

SEQ ID NO: 3684169 - RNA, 19 nt, Human
uuuacaggaacuucaucau

SEQ ID NO: 3684170 - RNA, 22 nt, Human
uuuacagggagccuccugccca

SEQ ID NO: 3684171 - RNA, 23 nt, Human
uuuacagggagccuccugcccag

SEQ ID NO: 3684172 - RNA, 15 nt, Human
uuuacaguaaauaaa

SEQ ID NO: 3684173 - RNA, 20 nt, Human
uuuacaguaaauaaauuguu

SEQ ID NO: 3684174 - RNA, 18 nt, Human
uuuacagucuauuugaga

SEQ ID NO: 3684175 - RNA, 19 nt, Human
uuuacagugaaaauguaag

SEQ ID NO: 3684176 - RNA, 19 nt, Human
uuuacaguguuucuggcuu

SEQ ID NO: 3684177 - RNA, 15 nt, Human
uuuacaguuacuuuu

SEQ ID NO: 3684178 - RNA, 21 nt, Human
uuuacaguuacuuuuccuugc

SEQ ID NO: 3684179 - RNA, 15 nt, Human
uuuacaguuauagaa

SEQ ID NO: 3684180 - RNA, 21 nt, Human
uuuacaguuucaaaaacugua

SEQ ID NO: 3684181 - RNA, 19 nt, Human
uuuacauaacugccuugaa

SEQ ID NO: 3684182 - RNA, 13 nt, Human
uuuacauagucug

SEQ ID NO: 3684183 - RNA, 19 nt, Human
uuuacauccuucacugcuc

SEQ ID NO: 3684184 - RNA, 14 nt, Human
uuuacaugcuuauu

SEQ ID NO: 3684185 - RNA, 16 nt, Human
uuuacaugcuuauucc

SEQ ID NO: 3684186 - RNA, 20 nt, Human
uuuacaugcuuauuccauga

SEQ ID NO: 3684187 - RNA, 16 nt, Human
uuuacauggcuggagc

SEQ ID NO: 3684188 - RNA, 22 nt, Human
uuuacauggcuggagcuagaau

SEQ ID NO: 3684189 - RNA, 21 nt, Human
uuuacaugugauguuuuagug

SEQ ID NO: 3684190 - RNA, 20 nt, Human
uuuacauguguagccuaugu

SEQ ID NO: 3684191 - RNA, 21 nt, Human
uuuacauguguagccuauguu

SEQ ID NO: 3684192 - RNA, 13 nt, Human
uuuacauuguaaa

SEQ ID NO: 3684193 - RNA, 15 nt, Human
uuuacauuguaaaua

SEQ ID NO: 3684194 - RNA, 18 nt, Human
uuuacauuuaaagcauug

SEQ ID NO: 3684195 - RNA, 13 nt, Human
uuuacauuuuaca

SEQ ID NO: 3684196 - RNA, 19 nt, Human
uuuacauuuuuauuuauga

SEQ ID NO: 3684197 - RNA, 20 nt, Human
uuuacauuuuuauuuaugaa

SEQ ID NO: 3684198 - RNA, 22 nt, Human
uuuacauuuuuauuuaugaagu

SEQ ID NO: 3684199 - RNA, 16 nt, Human
uuuaccaaacagcaaa

SEQ ID NO: 3684200 - RNA, 17 nt, Human
uuuaccaaguuauauaa

SEQ ID NO: 3684201 - RNA, 17 nt, Human
ucacguacugucugauu

SEQ ID NO: 3684202 - RNA, 16 nt, Human
ucacgugcgcugggca

SEQ ID NO: 3684203 - RNA, 21 nt, Human
ucacguggaggagcagugcag

SEQ ID NO: 3684204 - RNA, 16 nt, Human
ucacguguacuggcuc

SEQ ID NO: 3684205 - RNA, 16 nt, Human
ucacgugugugacuca

SEQ ID NO: 3684206 - RNA, 20 nt, Human
ucacguuaccauuuacaugu

SEQ ID NO: 3684207 - RNA, 20 nt, Human
ucacguuaccuugacacaua

SEQ ID NO: 3684208 - RNA, 20 nt, Human
ucacguuggggugauuuaau

SEQ ID NO: 3684209 - RNA, 22 nt, Human
ucacguuucauguaauccucaa

SEQ ID NO: 3684210 - RNA, 17 nt, Human
ucacguuuggugcuucu

SEQ ID NO: 3684211 - RNA, 21 nt, Human
ucacguuuggugcuucucaga

SEQ ID NO: 3684212 - RNA, 13 nt, Human
ucacuaaacuuua

SEQ ID NO: 3684213 - RNA, 23 nt, Human
ucacuaaagcaugaaaugugaau

SEQ ID NO: 3684214 - RNA, 12 nt, Human
ucacuaaaucuu

SEQ ID NO: 3684215 - RNA, 17 nt, Human
ucacuaaaucuuuuaua

SEQ ID NO: 3684216 - RNA, 16 nt, Human
ucacuaacauuauauu

SEQ ID NO: 3684217 - RNA, 22 nt, Human
ucacuaagaacaaaagaagcag

SEQ ID NO: 3684218 - RNA, 15 nt, Human
ucacuaauucauuaa

SEQ ID NO: 3684219 - RNA, 18 nt, Human
ucacuacaagucagcucc

SEQ ID NO: 3684220 - RNA, 19 nt, Human
ucacuacaagucagcucca

SEQ ID NO: 3684221 - RNA, 23 nt, Human
ucacuacccuaauagacuaaaug

SEQ ID NO: 3684222 - RNA, 19 nt, Human
ucacuacccuauucucucu

SEQ ID NO: 3684223 - RNA, 20 nt, Human
ucacuaccuccucagggaug

SEQ ID NO: 3684224 - RNA, 21 nt, Human
ucacuacgggggggagaagga

SEQ ID NO: 3684225 - RNA, 19 nt, Human
ucacuacucacagucucuu

SEQ ID NO: 3684226 - RNA, 15 nt, Human
ucacuacucagcaug

SEQ ID NO: 3684227 - RNA, 17 nt, Human
ucacuagaauggauaaa

SEQ ID NO: 3684228 - RNA, 19 nt, Human
ucacuaggcccccacuugc

SEQ ID NO: 3684229 - RNA, 22 nt, Human
ucacuaggcccccacuugccuc

SEQ ID NO: 3684230 - RNA, 23 nt, Human
ucacuaggcccccacuugccucu

SEQ ID NO: 3684231 - RNA, 21 nt, Human
ucacuauauaggcaucacauu

SEQ ID NO: 3684232 - RNA, 19 nt, Human
ucacuaucccggcugcccu

SEQ ID NO: 3684233 - RNA, 21 nt, Human
ucacuauguugcccaggcagg

SEQ ID NO: 3684234 - RNA, 13 nt, Human
ucacuauuuccuu

SEQ ID NO: 3684235 - RNA, 15 nt, Human
ucacuauuuccuuua

SEQ ID NO: 3684236 - RNA, 19 nt, Human
ucacuauuuccuuuauaau

SEQ ID NO: 3684237 - RNA, 14 nt, Human
ucacucaagcacug

SEQ ID NO: 3684238 - RNA, 17 nt, Human
ucacucaaguucaagga

SEQ ID NO: 3684239 - RNA, 21 nt, Human
ucacucaaguucaaggaccaa

SEQ ID NO: 3684240 - RNA, 13 nt, Human
ucacucacaucuu

SEQ ID NO: 3684241 - RNA, 13 nt, Human
ucacucagagcag

SEQ ID NO: 3684242 - RNA, 13 nt, Human
ucacucagcacca

SEQ ID NO: 3684243 - RNA, 19 nt, Human
ucacucagccacccugagu

SEQ ID NO: 3684244 - RNA, 20 nt, Human
ucacucagccacccugaguu

SEQ ID NO: 3684245 - RNA, 14 nt, Human
ucacucaggcugga

SEQ ID NO: 3684246 - RNA, 17 nt, Human
ucacucauacaucuggc

SEQ ID NO: 3684247 - RNA, 22 nt, Human
ucacucauugcugagccucugc

SEQ ID NO: 3684248 - RNA, 15 nt, Human
ucacuccaccaccca

SEQ ID NO: 3684249 - RNA, 21 nt, Human
ucacuccaggaaggggcugga

SEQ ID NO: 3684250 - RNA, 19 nt, Human
ucacucccaccugcaucug

SEQ ID NO: 3684251 - RNA, 14 nt, Human
ucacuccccaagga

SEQ ID NO: 3684252 - RNA, 16 nt, Human
ucacuccccagccugg

SEQ ID NO: 3684253 - RNA, 18 nt, Human
ucacuccccagccugggc

SEQ ID NO: 3684254 - RNA, 17 nt, Human
ucacuccccuccuuucc

SEQ ID NO: 3684255 - RNA, 21 nt, Human
ucacucccuucuaccugccac

SEQ ID NO: 3684256 - RNA, 20 nt, Human
ucacuccggugugccugcag

SEQ ID NO: 3684257 - RNA, 21 nt, Human
ucacuccggugugccugcagc

SEQ ID NO: 3684258 - RNA, 16 nt, Human
uuucaaguagcuggga

SEQ ID NO: 3684259 - RNA, 14 nt, Human
uuucaauaaaguuu

SEQ ID NO: 3684260 - RNA, 22 nt, Human
uuucaauaacgaaguugggcaa

SEQ ID NO: 3684261 - RNA, 20 nt, Human
uuucaauagcguguguagau

SEQ ID NO: 3684262 - RNA, 14 nt, Human
uuucaauaggaaaa

SEQ ID NO: 3684263 - RNA, 22 nt, Human
uuucaauauauugaacuuuugu

SEQ ID NO: 3684264 - RNA, 21 nt, Human
uuucaaucacuguccuccaca

SEQ ID NO: 3684265 - RNA, 13 nt, Human
uuucaaucucgua

SEQ ID NO: 3684266 - RNA, 19 nt, Human
uuucaaucucguauagaag

SEQ ID NO: 3684267 - RNA, 15 nt, Human
uuucaaucuucaauc

SEQ ID NO: 3684268 - RNA, 10 nt, Human
uuucaaugug

SEQ ID NO: 3684269 - RNA, 14 nt, Human
uuucaauuaaacgg

SEQ ID NO: 3684270 - RNA, 23 nt, Human
uuucaauuaauauuaauuuucua

SEQ ID NO: 3684271 - RNA, 18 nt, Human
uuucaauucaaaaaugua

SEQ ID NO: 3684272 - RNA, 12 nt, Human
uuucacaaauau

SEQ ID NO: 3684273 - RNA, 16 nt, Human
uuucacaaauauuaaa

SEQ ID NO: 3684274 - RNA, 20 nt, Human
uuucacaaauauuaaaaagu

SEQ ID NO: 3684275 - RNA, 22 nt, Human
uuucacaaccuucuguggcuca

SEQ ID NO: 3684276 - RNA, 14 nt, Human
uuucacaaggucuu

SEQ ID NO: 3684277 - RNA, 19 nt, Human
uuucacaccugaaaauguu

SEQ ID NO: 3684278 - RNA, 17 nt, Human
uuucacagaaaauaagg

SEQ ID NO: 3684279 - RNA, 19 nt, Human
uuucacaguguguuuguga

SEQ ID NO: 3684280 - RNA, 18 nt, Human
uuucacaguuugaaauaa

SEQ ID NO: 3684281 - RNA, 15 nt, Human
uuucacaguuuuucc

SEQ ID NO: 3684282 - RNA, 15 nt, Human
uuucacauaaaugca

SEQ ID NO: 3684283 - RNA, 18 nt, Human
uuucacauagcugucuag

SEQ ID NO: 3684284 - RNA, 21 nt, Human
uuucacauaucuaguaugaaa

SEQ ID NO: 3684285 - RNA, 14 nt, Human
uuucacaugaacau

SEQ ID NO: 3684286 - RNA, 13 nt, Human
uuucacauucuua

SEQ ID NO: 3684287 - RNA, 15 nt, Human
uuucacauucuuaua

SEQ ID NO: 3684288 - RNA, 21 nt, Human
uuucacauucuuauaaauaug

SEQ ID NO: 3684289 - RNA, 16 nt, Human
uuucacauucuuggcu

SEQ ID NO: 3684290 - RNA, 21 nt, Human
uuucaccaacuauagaaugua

SEQ ID NO: 3684291 - RNA, 21 nt, Human
uuucaccaugauggccaggcu

SEQ ID NO: 3684292 - RNA, 15 nt, Human
uuucacccacagaaa

SEQ ID NO: 3684293 - RNA, 17 nt, Human
uuucacccacagaaaga

SEQ ID NO: 3684294 - RNA, 19 nt, Human
uuucacccacagaaagaga

SEQ ID NO: 3684295 - RNA, 14 nt, Human
uuucaccccucccu

SEQ ID NO: 3684296 - RNA, 17 nt, Human
uuucaccccucccuuuc

SEQ ID NO: 3684297 - RNA, 18 nt, Human
uuucaccccucccuuucu

SEQ ID NO: 3684298 - RNA, 21 nt, Human
uuucacccuuaacccaaggag

SEQ ID NO: 3684299 - RNA, 21 nt, Human
uuucaccuccuucaauuccau

SEQ ID NO: 3684300 - RNA, 14 nt, Human
uuucaccuguaaac

SEQ ID NO: 3684301 - RNA, 22 nt, Human
uuucaccuguuuuuaagcuguu

SEQ ID NO: 3684302 - RNA, 23 nt, Human
uuucaccuguuuuuaagcuguuu

SEQ ID NO: 3684303 - RNA, 19 nt, Human
uuucaccuuuacuuuagaa

SEQ ID NO: 3684304 - RNA, 18 nt, Human
uuucaccuuuucaggaaa

SEQ ID NO: 3684305 - RNA, 20 nt, Human
uuucacgccugaggcaauua

SEQ ID NO: 3684306 - RNA, 18 nt, Human
uuucacggaaguuuucaa

SEQ ID NO: 3684307 - RNA, 12 nt, Human
uuucacucacau

SEQ ID NO: 3684308 - RNA, 18 nt, Human
uuucacucuaagucaugu

SEQ ID NO: 3684309 - RNA, 13 nt, Human
uuucacugccaua

SEQ ID NO: 3684310 - RNA, 20 nt, Human
uuucacugcugcaaggccuu

SEQ ID NO: 3684311 - RNA, 15 nt, Human
uuucacuggagcaca

SEQ ID NO: 3684312 - RNA, 16 nt, Human
uuucacuggagcacaa

SEQ ID NO: 3684313 - RNA, 14 nt, Human
uuucacuuauaccu

SEQ ID NO: 3684314 - RNA, 14 nt, Human
uuucacuucuuucc

SEQ ID NO: 3684315 - RNA, 21 nt, Human
uuucacuuucacauagauguc

SEQ ID NO: 3684316 - RNA, 22 nt, Human
uuucagaaauacagauaaauga

SEQ ID NO: 3684317 - RNA, 20 nt, Human
uuucagaaguuaguuuguau

SEQ ID NO: 3684318 - RNA, 22 nt, Human
uuucagaaguuaguuuguauau

SEQ ID NO: 3684319 - RNA, 22 nt, Human
uuucagaaguuuaaauauuaag

SEQ ID NO: 3684320 - RNA, 11 nt, Human
uuucagaaucu

SEQ ID NO: 3684321 - RNA, 17 nt, Human
uuucagaaucugaaugu

SEQ ID NO: 3684322 - RNA, 20 nt, Human
uuucagaaucugaauguaau

SEQ ID NO: 3684323 - RNA, 13 nt, Human
uuucagaccuuuu

SEQ ID NO: 3684324 - RNA, 11 nt, Human
uuucagacucc

SEQ ID NO: 3684325 - RNA, 13 nt, Human
uuucagacugcuu

SEQ ID NO: 3684326 - RNA, 16 nt, Human
uuucagagaccauugc

SEQ ID NO: 3684327 - RNA, 17 nt, Human
uuucagagaccauugca

SEQ ID NO: 3684328 - RNA, 15 nt, Human
uuucagauaaucaca

SEQ ID NO: 3684329 - RNA, 14 nt, Human
uuucagauauaaaa

SEQ ID NO: 3684330 - RNA, 16 nt, Human
uuucagauauaaaaga

SEQ ID NO: 3684331 - RNA, 15 nt, Human
uuucagauguaaugu

SEQ ID NO: 3684332 - RNA, 19 nt, Human
uuucagauguaauguuuuc

SEQ ID NO: 3684333 - RNA, 12 nt, Human
uuucagaugucu

SEQ ID NO: 3684334 - RNA, 17 nt, Human
uuucagaugucuucugc

SEQ ID NO: 3684335 - RNA, 16 nt, Human
uuucagauuugcacaa

SEQ ID NO: 3684336 - RNA, 15 nt, Human
uuucagauuuugaua

SEQ ID NO: 3684337 - RNA, 20 nt, Human
uuucagauuuuuuauuugaa

SEQ ID NO: 3684338 - RNA, 12 nt, Human
uuucagcacuag

SEQ ID NO: 3684339 - RNA, 14 nt, Human
uuucagcagacuau

SEQ ID NO: 3684340 - RNA, 15 nt, Human
uuucagcagcugcag

SEQ ID NO: 3684341 - RNA, 18 nt, Human
uuucagcaugaaaaugug

SEQ ID NO: 3684342 - RNA, 14 nt, Human
uuucagcauugaua

SEQ ID NO: 3684343 - RNA, 15 nt, Human
uuucagccaagaauu

SEQ ID NO: 3684344 - RNA, 16 nt, Human
uuucagccaagaauuc

SEQ ID NO: 3684345 - RNA, 17 nt, Human
uuucagcgauguaugca

SEQ ID NO: 3684346 - RNA, 21 nt, Human
uuucagcgauguaugcagcua

SEQ ID NO: 3684347 - RNA, 20 nt, Human
uuucagcuaagggaagacau

SEQ ID NO: 3684348 - RNA, 21 nt, Human
uuucagcuaagggaagacauu

SEQ ID NO: 3684349 - RNA, 23 nt, Human
uuucagcuaagggaagacauuuc

SEQ ID NO: 3684350 - RNA, 22 nt, Human
uuucagcuaggaacaaaucuuc

SEQ ID NO: 3684351 - RNA, 16 nt, Human
uuucagcuccugacca

SEQ ID NO: 3684352 - RNA, 21 nt, Human
uuucagcucucuguauaaaca

SEQ ID NO: 3684353 - RNA, 21 nt, Human
uuucagcugugaacauggacu

SEQ ID NO: 3684354 - RNA, 14 nt, Human
uuucagcuucugcu

SEQ ID NO: 3684355 - RNA, 20 nt, Human
uuucagcuucugcugggcug

SEQ ID NO: 3684356 - RNA, 12 nt, Human
uuucaggaaaau

SEQ ID NO: 3684357 - RNA, 21 nt, Human
uuucaggaggaauacugaaca

SEQ ID NO: 3684358 - RNA, 16 nt, Human
uuucaggauacucugu

SEQ ID NO: 3684359 - RNA, 15 nt, Human
uuucagggcuggcuc

SEQ ID NO: 3684360 - RNA, 19 nt, Human
uuucaggugcucaaaaugc

SEQ ID NO: 3684361 - RNA, 18 nt, Human
uuucagguguuuaguugc

SEQ ID NO: 3684362 - RNA, 18 nt, Human
uuucagguuauauccaau

SEQ ID NO: 3684363 - RNA, 14 nt, Human
uuucagguuuguca

SEQ ID NO: 3684364 - RNA, 14 nt, Human
uuucagguuuuagu

SEQ ID NO: 3684365 - RNA, 16 nt, Human
uuucaguaagaucaag

SEQ ID NO: 3684366 - RNA, 18 nt, Human
uuucaguaauaaaacauc

SEQ ID NO: 3684367 - RNA, 21 nt, Human
uuucaguacuucagcaagaga

SEQ ID NO: 3684368 - RNA, 23 nt, Human
uuucaguacuucagcaagagaga

SEQ ID NO: 3684369 - RNA, 19 nt, Human
uuucaguacuuuuuuaaau

SEQ ID NO: 3684370 - RNA, 14 nt, Human
uuucaguauaauuu

SEQ ID NO: 3684371 - RNA, 14 nt, Human
uuucaguauuauau

SEQ ID NO: 3684372 - RNA, 16 nt, Human
uuucagucaaaacuuu

SEQ ID NO: 3684373 - RNA, 21 nt, Human
uuucagucauauaaaagcuau

SEQ ID NO: 3684374 - RNA, 18 nt, Human
uuucaguccccacagaua

SEQ ID NO: 3684375 - RNA, 17 nt, Human
uuucaguccuguaguuu

SEQ ID NO: 3684376 - RNA, 17 nt, Human
uuucagugaaagcauca

SEQ ID NO: 3684377 - RNA, 22 nt, Human
uuucaguggcacgucaucuagu

SEQ ID NO: 3684378 - RNA, 21 nt, Human
uuucaguggggcagucauuau

SEQ ID NO: 3684379 - RNA, 14 nt, Human
uuucaguguacaug

SEQ ID NO: 3684380 - RNA, 21 nt, Human
uuucagugucaaauaaacacu

SEQ ID NO: 3684381 - RNA, 16 nt, Human
uuucaguguuaccugu

SEQ ID NO: 3684382 - RNA, 18 nt, Human
uuucauaaauuauuugau

SEQ ID NO: 3684383 - RNA, 14 nt, Human
uuucauaaauuuga

SEQ ID NO: 3684384 - RNA, 22 nt, Human
uuucauaacuuauugcugauuu

SEQ ID NO: 3684385 - RNA, 19 nt, Human
uuucauacucuagauuuug

SEQ ID NO: 3684386 - RNA, 20 nt, Human
uuucauagauugagaaguuu

SEQ ID NO: 3684387 - RNA, 16 nt, Human
uuucauaggucugaaa

SEQ ID NO: 3684388 - RNA, 15 nt, Human
uuucauauaguuagc

SEQ ID NO: 3684389 - RNA, 22 nt, Human
uuucauauguugcucagucucc

SEQ ID NO: 3684390 - RNA, 16 nt, Human
uuucauauucuuucaa

SEQ ID NO: 3684391 - RNA, 18 nt, Human
uuucauauucuuucaauu

SEQ ID NO: 3684392 - RNA, 21 nt, Human
uuucauauuuuagcuacuaua

SEQ ID NO: 3684393 - RNA, 17 nt, Human
uuucaucagaacagcug

SEQ ID NO: 3684394 - RNA, 13 nt, Human
uuucaucauuuuu

SEQ ID NO: 3684395 - RNA, 22 nt, Human
uuucauccuaaagaacaaagua

SEQ ID NO: 3684396 - RNA, 18 nt, Human
uuucaucuauuucugaga

SEQ ID NO: 3684397 - RNA, 23 nt, Human
uuucaucucauuuaagggaaaaa

SEQ ID NO: 3684398 - RNA, 15 nt, Human
uuucaucugcucucc

SEQ ID NO: 3684399 - RNA, 18 nt, Human
uuucaucugcucuccuuc

SEQ ID NO: 3684400 - RNA, 15 nt, Human
uuucaucuucaguug

SEQ ID NO: 3684401 - RNA, 17 nt, Human
uuucaugaaaauaccau

SEQ ID NO: 3684402 - RNA, 16 nt, Human
uuucaugauuuugaaa

SEQ ID NO: 3684403 - RNA, 17 nt, Human
uuucaugcaaacucuuu

SEQ ID NO: 3684404 - RNA, 17 nt, Human
uuucaugcucugcaaaa

SEQ ID NO: 3684405 - RNA, 21 nt, Human
uuucaugcuguucaugaaaga

SEQ ID NO: 3684406 - RNA, 14 nt, Human
uuucaugcuuuauc

SEQ ID NO: 3684407 - RNA, 16 nt, Human
uuucaugcuuuaucaa

SEQ ID NO: 3684408 - RNA, 19 nt, Human
uuucauggggguauuaucc

SEQ ID NO: 3684409 - RNA, 14 nt, Human
uuucauguaaaaca

SEQ ID NO: 3684410 - RNA, 15 nt, Human
uuucauguacugcau

SEQ ID NO: 3684411 - RNA, 18 nt, Human
uuucaugucccagaacuu

SEQ ID NO: 3684412 - RNA, 17 nt, Human
uuucauguccuguguca

SEQ ID NO: 3684413 - RNA, 22 nt, Human
uuucauguccugugucaguuua

SEQ ID NO: 3684414 - RNA, 16 nt, Human
uuucauguuuuaacaa

SEQ ID NO: 3684415 - RNA, 17 nt, Human
uuucauguuuuaacaaa

SEQ ID NO: 3684416 - RNA, 16 nt, Human
uuucauguuuugugac

SEQ ID NO: 3684417 - RNA, 18 nt, Human
uuucauguuuugugacua

SEQ ID NO: 3684418 - RNA, 23 nt, Human
uuucauuaaaggcuucucucuca

SEQ ID NO: 3684419 - RNA, 21 nt, Human
uuucauuaauacagggcauuu

SEQ ID NO: 3684420 - RNA, 21 nt, Human
uuucauuacaauggaaacaau

SEQ ID NO: 3684421 - RNA, 13 nt, Human
uuucauuauuuua

SEQ ID NO: 3684422 - RNA, 15 nt, Human
uuucauuauuuuauu

SEQ ID NO: 3684423 - RNA, 11 nt, Human
uuucauuccau

SEQ ID NO: 3684424 - RNA, 13 nt, Human
uuucauuccuuca

SEQ ID NO: 3684425 - RNA, 21 nt, Human
uuucauuccuucagauuuggc

SEQ ID NO: 3684426 - RNA, 21 nt, Human
uuucauugauaugaaaaauau

SEQ ID NO: 3684427 - RNA, 14 nt, Human
uuucauugucugug

SEQ ID NO: 3684428 - RNA, 15 nt, Human
uuucauugucuguga

SEQ ID NO: 3684429 - RNA, 16 nt, Human
uuucauugucugugaa

SEQ ID NO: 3684430 - RNA, 19 nt, Human
uuucauuuaagggaaagaa

SEQ ID NO: 3684431 - RNA, 17 nt, Human
uuucauuuacuguggcu

SEQ ID NO: 3684432 - RNA, 19 nt, Human
uuucauuuagucaugugac

SEQ ID NO: 3684433 - RNA, 20 nt, Human
uuucauuuaucuauaauuua

SEQ ID NO: 3684434 - RNA, 19 nt, Human
uuucauuuaugauacaaaa

SEQ ID NO: 3684435 - RNA, 16 nt, Human
uuucauuucaaaaugc

SEQ ID NO: 3684436 - RNA, 16 nt, Human
uuucauuucuucuaca

SEQ ID NO: 3684437 - RNA, 12 nt, Human
uuucauuucuug

SEQ ID NO: 3684438 - RNA, 14 nt, Human
uuucauuuuaaaaa

SEQ ID NO: 3684439 - RNA, 17 nt, Human
uuucauuuuaaaaaguc

SEQ ID NO: 3684440 - RNA, 16 nt, Human
uuucauuuucucucag

SEQ ID NO: 3684441 - RNA, 14 nt, Human
uuucauuuucugca

SEQ ID NO: 3684442 - RNA, 15 nt, Human
uuucauuuugcuuua

SEQ ID NO: 3684443 - RNA, 22 nt, Human
uuucauuuuguaacaaaugaac

SEQ ID NO: 3684444 - RNA, 22 nt, Human
uuuccaaaacaaaaagaugucu

SEQ ID NO: 3684445 - RNA, 18 nt, Human
uuuccaaaaguggccucu

SEQ ID NO: 3684446 - RNA, 19 nt, Human
uuuccaaaaucucccauuu

SEQ ID NO: 3684447 - RNA, 15 nt, Human
uuuccaaaauuuuuc

SEQ ID NO: 3684448 - RNA, 16 nt, Human
uuuccaaaccuuaucu

SEQ ID NO: 3684449 - RNA, 13 nt, Human
uuuccaaauuauu

SEQ ID NO: 3684450 - RNA, 14 nt, Human
uuuccaaauuauuu

SEQ ID NO: 3684451 - RNA, 15 nt, Human
uuuccaaauucacaa

SEQ ID NO: 3684452 - RNA, 18 nt, Human
uuuccaacaccacagaca

SEQ ID NO: 3684453 - RNA, 21 nt, Human
uuuccaacaccacagacacac

SEQ ID NO: 3684454 - RNA, 22 nt, Human
uuuccaacaccacagacacaca

SEQ ID NO: 3684455 - RNA, 17 nt, Human
uuuccaacguuuggaag

SEQ ID NO: 3684456 - RNA, 13 nt, Human
uuuccaagagcug

SEQ ID NO: 3684457 - RNA, 14 nt, Human
uuuccaagagcuga

SEQ ID NO: 3684458 - RNA, 14 nt, Human
uuuccaagcaaaug

SEQ ID NO: 3684459 - RNA, 18 nt, Human
uuuccaaguaauauaaug

SEQ ID NO: 3684460 - RNA, 16 nt, Human
uuuccaauuauuugac

SEQ ID NO: 3684461 - RNA, 14 nt, Human
uuuccaauucuccu

SEQ ID NO: 3684462 - RNA, 17 nt, Human
uuuccaauucuccuuua

SEQ ID NO: 3684463 - RNA, 19 nt, Human
uuuccacaaaaucugucca

SEQ ID NO: 3684464 - RNA, 17 nt, Human
uuuccacaccuggcacu

SEQ ID NO: 3684465 - RNA, 23 nt, Human
uuuccaccacagccagcaccugg

SEQ ID NO: 3684466 - RNA, 14 nt, Human
uuuccacuacugcu

SEQ ID NO: 3684467 - RNA, 17 nt, Human
uuuccacucaggucugu

SEQ ID NO: 3684468 - RNA, 19 nt, Human
uuuccacuccuccuagcca

SEQ ID NO: 3684469 - RNA, 21 nt, Human
uuuccagaaccacacuugaaa

SEQ ID NO: 3684470 - RNA, 13 nt, Human
uuuccagagcauu

SEQ ID NO: 3684471 - RNA, 16 nt, Human
uuuccagcagaagaca

SEQ ID NO: 3684472 - RNA, 21 nt, Human
uuuccagcagaagacaaaaag

SEQ ID NO: 3684473 - RNA, 18 nt, Human
uuuccaggaaaaagaacu

SEQ ID NO: 3684474 - RNA, 13 nt, Human
uuuccaggaaggc

SEQ ID NO: 3684475 - RNA, 20 nt, Human
uuuccaggacuguuucaaac

SEQ ID NO: 3684476 - RNA, 23 nt, Human
uuuccaggcuucugcuggggccu

SEQ ID NO: 3684477 - RNA, 18 nt, Human
uuuccagguucugaaaga

SEQ ID NO: 3684478 - RNA, 21 nt, Human
uuuccaguaaggaaugauauu

SEQ ID NO: 3684479 - RNA, 15 nt, Human
uuuccaguaccuuug

SEQ ID NO: 3684480 - RNA, 15 nt, Human
uuuccaguauuuuag

SEQ ID NO: 3684481 - RNA, 14 nt, Human
uuuccagucucuug

SEQ ID NO: 3684482 - RNA, 22 nt, Human
uuuccaguggccuggcuccgcu

SEQ ID NO: 3684483 - RNA, 19 nt, Human
uuuccauauuuuuuuccuu

SEQ ID NO: 3684484 - RNA, 22 nt, Human
uuuccauauuuuuuuccuuaca

SEQ ID NO: 3684485 - RNA, 19 nt, Human
uuuccauccauggccagca

SEQ ID NO: 3684486 - RNA, 20 nt, Human
uuuccaugacugcauuuuac

SEQ ID NO: 3684487 - RNA, 21 nt, Human
uuuccauggcaggaaggcuug

SEQ ID NO: 3684488 - RNA, 22 nt, Human
uuuccaugggaccacaacuauu

SEQ ID NO: 3684489 - RNA, 13 nt, Human
uuuccauguaucu

SEQ ID NO: 3684490 - RNA, 14 nt, Human
uuuccauguugcug

SEQ ID NO: 3684491 - RNA, 18 nt, Human
uuuccauuacaaguauuu

SEQ ID NO: 3684492 - RNA, 14 nt, Human
uuuccauuguuuga

SEQ ID NO: 3684493 - RNA, 17 nt, Human
uuuccauuuacuuaaga

SEQ ID NO: 3684494 - RNA, 14 nt, Human
uuuccauuugcauu

SEQ ID NO: 3684495 - RNA, 21 nt, Human
uuuccauuugcauuuguuuau

SEQ ID NO: 3684496 - RNA, 18 nt, Human
uuuccauuuuauaaaugu

SEQ ID NO: 3684497 - RNA, 22 nt, Human
uuucccaaagcaucccucuuag

SEQ ID NO: 3684498 - RNA, 23 nt, Human
uuucccaccccaaccugcucucc

SEQ ID NO: 3684499 - RNA, 12 nt, Human
uuucccacucca

SEQ ID NO: 3684500 - RNA, 15 nt, Human
uuucccacugcaccc

SEQ ID NO: 3684501 - RNA, 21 nt, Human
uuucccacuguuuaaggaguu

SEQ ID NO: 3684502 - RNA, 20 nt, Human
uuucccagcuacaccuuucu

SEQ ID NO: 3684503 - RNA, 11 nt, Human
uuucccaggac

SEQ ID NO: 3684504 - RNA, 14 nt, Human
uuucccaggacccu

SEQ ID NO: 3684505 - RNA, 22 nt, Human
uuucccaggcccacugugccuc

SEQ ID NO: 3684506 - RNA, 16 nt, Human
uuucccagguucuguu

SEQ ID NO: 3684507 - RNA, 14 nt, Human
uuucccauaauuuu

SEQ ID NO: 3684508 - RNA, 14 nt, Human
uuucccaugauuuc

SEQ ID NO: 3684509 - RNA, 21 nt, Human
uuucccauuugugccagagga

SEQ ID NO: 3684510 - RNA, 14 nt, Human
uuuccccaacagug

SEQ ID NO: 3684511 - RNA, 18 nt, Human
uuuccccaccagaugcug

SEQ ID NO: 3684512 - RNA, 19 nt, Human
uuuccccagcaucacuccc

SEQ ID NO: 3684513 - RNA, 11 nt, Human
uuuccccagcc

SEQ ID NO: 3684514 - RNA, 15 nt, Human
uuuccccauaacuca

SEQ ID NO: 3684515 - RNA, 15 nt, Human
uuucccccaaagugg

SEQ ID NO: 3684516 - RNA, 22 nt, Human
uuucccccaccccauuucucuc

SEQ ID NO: 3684517 - RNA, 13 nt, Human
uuuccccccacuc

SEQ ID NO: 3684518 - RNA, 17 nt, Human
uuuccccccacucuccc

SEQ ID NO: 3684519 - RNA, 18 nt, Human
uuucccccuagccugccu

SEQ ID NO: 3684520 - RNA, 23 nt, Human
uuucccccugcauucuuucugua

SEQ ID NO: 3684521 - RNA, 14 nt, Human
uuucccccuuucuu

SEQ ID NO: 3684522 - RNA, 18 nt, Human
uuucccccuuucuuccuc

SEQ ID NO: 3684523 - RNA, 18 nt, Human
uuuccccggucccuugag

SEQ ID NO: 3684524 - RNA, 12 nt, Human
uuuccccuuccu

SEQ ID NO: 3684525 - RNA, 14 nt, Human
uuuccccuuuccug

SEQ ID NO: 3684526 - RNA, 15 nt, Human
uuuccccuuuccugu

SEQ ID NO: 3684527 - RNA, 16 nt, Human
uuuccccuuuccuguc

SEQ ID NO: 3684528 - RNA, 19 nt, Human
uuucccggacuuagaaaac

SEQ ID NO: 3684529 - RNA, 14 nt, Human
uuucccgggcuguc

SEQ ID NO: 3684530 - RNA, 20 nt, Human
uuucccguggccccagccug

SEQ ID NO: 3684531 - RNA, 19 nt, Human
uuucccuaaaauacauuua

SEQ ID NO: 3684532 - RNA, 16 nt, Human
uuucccuauuagagaa

SEQ ID NO: 3684533 - RNA, 21 nt, Human
uugauaauguuaaauuuguaa

SEQ ID NO: 3684534 - RNA, 21 nt, Human
uugauaauucuuauuuugugg

SEQ ID NO: 3684535 - RNA, 16 nt, Human
uugauaauuuuccuuu

SEQ ID NO: 3684536 - RNA, 19 nt, Human
uugauacaguuuucagaaa

SEQ ID NO: 3684537 - RNA, 17 nt, Human
uugauacauucaaauuu

SEQ ID NO: 3684538 - RNA, 18 nt, Human
uugauacauucaaauuug

SEQ ID NO: 3684539 - RNA, 16 nt, Human
uugauaccccugggga

SEQ ID NO: 3684540 - RNA, 20 nt, Human
uugauaccccuggggaacau

SEQ ID NO: 3684541 - RNA, 15 nt, Human
uugauacuaagcauu

SEQ ID NO: 3684542 - RNA, 15 nt, Human
uugauacuacaguuu

SEQ ID NO: 3684543 - RNA, 17 nt, Human
uugauacuacaguuugu

SEQ ID NO: 3684544 - RNA, 16 nt, Human
uugauacuuauauuuu

SEQ ID NO: 3684545 - RNA, 20 nt, Human
uugauacuuauauuuucgua

SEQ ID NO: 3684546 - RNA, 15 nt, Human
uugauagaaaugcca

SEQ ID NO: 3684547 - RNA, 21 nt, Human
uugauagcacagacccugccc

SEQ ID NO: 3684548 - RNA, 12 nt, Human
uugauaguggga

SEQ ID NO: 3684549 - RNA, 13 nt, Human
uugauauaccaaa

SEQ ID NO: 3684550 - RNA, 13 nt, Human
uugauauauauua

SEQ ID NO: 3684551 - RNA, 14 nt, Human
uugauauauauuau

SEQ ID NO: 3684552 - RNA, 16 nt, Human
uugauaucuauaaaau

SEQ ID NO: 3684553 - RNA, 16 nt, Human
uugauaugcuuauaca

SEQ ID NO: 3684554 - RNA, 12 nt, Human
uugauauuguga

SEQ ID NO: 3684555 - RNA, 14 nt, Human
uugauauugugaac

SEQ ID NO: 3684556 - RNA, 15 nt, Human
uugauauuucuagcu

SEQ ID NO: 3684557 - RNA, 13 nt, Human
uugauauuuguau

SEQ ID NO: 3684558 - RNA, 15 nt, Human
uugauauuuguauuu

SEQ ID NO: 3684559 - RNA, 18 nt, Human
uugauauuugugcauuuu

SEQ ID NO: 3684560 - RNA, 21 nt, Human
uugauauuugugcauuuucua

SEQ ID NO: 3684561 - RNA, 17 nt, Human
uugauauuuuuucucuc

SEQ ID NO: 3684562 - RNA, 18 nt, Human
uugaucagaucugacaug

SEQ ID NO: 3684563 - RNA, 20 nt, Human
uugaucagccccacccuggc

SEQ ID NO: 3684564 - RNA, 21 nt, Human
uugaucagccccacccuggcc

SEQ ID NO: 3684565 - RNA, 17 nt, Human
uugaucaguaguuugca

SEQ ID NO: 3684566 - RNA, 14 nt, Human
uugaucaguauaau

SEQ ID NO: 3684567 - RNA, 12 nt, Human
uugaucaguuaa

SEQ ID NO: 3684568 - RNA, 23 nt, Human
uugaucauaaacugacuaucaua

SEQ ID NO: 3684569 - RNA, 17 nt, Human
uugauccauuucuaauu

SEQ ID NO: 3684570 - RNA, 21 nt, Human
uugaucccuguuacccagaga

SEQ ID NO: 3684571 - RNA, 18 nt, Human
uugaucccuucuguuggu

SEQ ID NO: 3684572 - RNA, 17 nt, Human
uugaucugcucagcccu

SEQ ID NO: 3684573 - RNA, 18 nt, Human
uugaucugcucagcccug

SEQ ID NO: 3684574 - RNA, 20 nt, Human
uugaucugcucagcccugga

SEQ ID NO: 3684575 - RNA, 14 nt, Human
uugaucuggaaccc

SEQ ID NO: 3684576 - RNA, 15 nt, Human
uuucuucaaaaugua

SEQ ID NO: 3684577 - RNA, 16 nt, Human
uuucuucaaaauguau

SEQ ID NO: 3684578 - RNA, 23 nt, Human
uuucuucaccucugcuacucaag

SEQ ID NO: 3684579 - RNA, 16 nt, Human
uuucuucacugcaaca

SEQ ID NO: 3684580 - RNA, 15 nt, Human
uuucuucagggcugc

SEQ ID NO: 3684581 - RNA, 13 nt, Human
uuucuucauccaa

SEQ ID NO: 3684582 - RNA, 18 nt, Human
uuucuucaugcaaugaca

SEQ ID NO: 3684583 - RNA, 22 nt, Human
uuucuucaugcaaugacaucuu

SEQ ID NO: 3684584 - RNA, 18 nt, Human
uuucuuccuguuaaugua

SEQ ID NO: 3684585 - RNA, 11 nt, Human
uuucuuccuuu

SEQ ID NO: 3684586 - RNA, 12 nt, Human
uuucuucuauuu

SEQ ID NO: 3684587 - RNA, 12 nt, Human
uuucuucucccu

SEQ ID NO: 3684588 - RNA, 20 nt, Human
uuucuucucugugagaaggu

SEQ ID NO: 3684589 - RNA, 21 nt, Human
uuucuucuuccacacaugcaa

SEQ ID NO: 3684590 - RNA, 13 nt, Human
uuucuucuucccu

SEQ ID NO: 3684591 - RNA, 20 nt, Human
uuucuugacaaaaccuaacu

SEQ ID NO: 3684592 - RNA, 22 nt, Human
uuucuugagguacucugcacau

SEQ ID NO: 3684593 - RNA, 21 nt, Human
uuucuugauaauuuuccuuua

SEQ ID NO: 3684594 - RNA, 21 nt, Human
uuucuugaucaacaucuuuuc

SEQ ID NO: 3684595 - RNA, 13 nt, Human
uuucuugcauuga

SEQ ID NO: 3684596 - RNA, 13 nt, Human
uuucuugcucccu

SEQ ID NO: 3684597 - RNA, 16 nt, Human
uuucuugcucccuuca

SEQ ID NO: 3684598 - RNA, 19 nt, Human
uuucuugcucccuucagcc

SEQ ID NO: 3684599 - RNA, 15 nt, Human
uuucuugcuuguacc

SEQ ID NO: 3684600 - RNA, 22 nt, Human
uuucuuggcaaaagccuugugu

SEQ ID NO: 3684601 - RNA, 14 nt, Human
uuucuuguaucugg

SEQ ID NO: 3684602 - RNA, 18 nt, Human
uuucuugucuauaaagca

SEQ ID NO: 3684603 - RNA, 20 nt, Human
uuucuugucuauaaagcauu

SEQ ID NO: 3684604 - RNA, 19 nt, Human
uuucuuguguguuuauugu

SEQ ID NO: 3684605 - RNA, 12 nt, Human
uuucuuguuuau

SEQ ID NO: 3684606 - RNA, 13 nt, Human
uuucuuguuuauu

SEQ ID NO: 3684607 - RNA, 15 nt, Human
uuucuuuaaaaaaca

SEQ ID NO: 3684608 - RNA, 14 nt, Human
uuucuuuaaaagaa

SEQ ID NO: 3684609 - RNA, 15 nt, Human
uuucuuuaagaaagu

SEQ ID NO: 3684610 - RNA, 18 nt, Human
uuucuuuaggagauuuau

SEQ ID NO: 3684611 - RNA, 20 nt, Human
uuucuuuauauuuauccacu

SEQ ID NO: 3684612 - RNA, 15 nt, Human
uuucuuucacaaaaa

SEQ ID NO: 3684613 - RNA, 12 nt, Human
uuucuuucuagu

SEQ ID NO: 3684614 - RNA, 13 nt, Human
uuucuuucuuucu

SEQ ID NO: 3684615 - RNA, 15 nt, Human
uuucuuugaauaaau

SEQ ID NO: 3684616 - RNA, 16 nt, Human
uuucuuugaucaugaa

SEQ ID NO: 3684617 - RNA, 15 nt, Human
uuucuuugcaaagua

SEQ ID NO: 3684618 - RNA, 15 nt, Human
uuucuuugccaucuc

SEQ ID NO: 3684619 - RNA, 22 nt, Human
uuucuuugccaucucugcucca

SEQ ID NO: 3684620 - RNA, 21 nt, Human
uuucuuugggaauauuugaau

SEQ ID NO: 3684621 - RNA, 19 nt, Human
uuucuuuggugccuuuccu

SEQ ID NO: 3684622 - RNA, 22 nt, Human
uuucuuuucuggaauguaauca

SEQ ID NO: 3684623 - RNA, 23 nt, Human
uuucuuuugguaaagacuggcuu

SEQ ID NO: 3684624 - RNA, 19 nt, Human
uuucuuuuguaauaaacua

SEQ ID NO: 3684625 - RNA, 20 nt, Human
uuucuuuuguuacuguucuu

SEQ ID NO: 3684626 - RNA, 21 nt, Human
uuucuuuuguuuuuugaagug

SEQ ID NO: 3684627 - RNA, 12 nt, Human
uuucuuuuuaca

SEQ ID NO: 3684628 - RNA, 14 nt, Human
uuucuuuuuacaua

SEQ ID NO: 3684629 - RNA, 19 nt, Human
uuucuuuuucuucuucccu

SEQ ID NO: 3684630 - RNA, 17 nt, Human
uuucuuuuuuaaaauca

SEQ ID NO: 3684631 - RNA, 18 nt, Human
uuucuuuuuuaaauuaau

SEQ ID NO: 3684632 - RNA, 15 nt, Human
uuucuuuuuugauau

SEQ ID NO: 3684633 - RNA, 18 nt, Human
uuugaaaaacugcucaua

SEQ ID NO: 3684634 - RNA, 12 nt, Human
uuugaaaaauau

SEQ ID NO: 3684635 - RNA, 13 nt, Human
uuugaaaaauaua

SEQ ID NO: 3684636 - RNA, 22 nt, Human
uuugaaaaauuccuauugugau

SEQ ID NO: 3684637 - RNA, 16 nt, Human
uuugaaaacagaaauu

SEQ ID NO: 3684638 - RNA, 18 nt, Human
uuugaaaagcagacauuu

SEQ ID NO: 3684639 - RNA, 15 nt, Human
uuugaaaagcuauua

SEQ ID NO: 3684640 - RNA, 19 nt, Human
uuugaaaagcuauuagcca

SEQ ID NO: 3684641 - RNA, 22 nt, Human
uuugaaaagcuucuuaauuaau

SEQ ID NO: 3684642 - RNA, 20 nt, Human
uuugaaaaggcgguacuagu

SEQ ID NO: 3684643 - RNA, 18 nt, Human
uuugaaaauaguuauuca

SEQ ID NO: 3684644 - RNA, 20 nt, Human
uuugaaaauaguuauucagu

SEQ ID NO: 3684645 - RNA, 15 nt, Human
uuugaaaauaguuua

SEQ ID NO: 3684646 - RNA, 18 nt, Human
uuugaaaauaguuuauuu

SEQ ID NO: 3684647 - RNA, 23 nt, Human
uuugaaacacugguuuuaaauau

SEQ ID NO: 3684648 - RNA, 13 nt, Human
uuugaaacauugc

SEQ ID NO: 3684649 - RNA, 16 nt, Human
uuugaaacauugcuuu

SEQ ID NO: 3684650 - RNA, 21 nt, Human
uuugaaagaauagaacacagu

SEQ ID NO: 3684651 - RNA, 23 nt, Human
uuugaaagacuuccaaagaaugu

SEQ ID NO: 3684652 - RNA, 22 nt, Human
uuugaaagggaucaucaugcag

SEQ ID NO: 3684653 - RNA, 19 nt, Human
uuugaaagucuguccuuga

SEQ ID NO: 3684654 - RNA, 21 nt, Human
uuugaaagugaauaaacuuca

SEQ ID NO: 3684655 - RNA, 14 nt, Human
uuugaaagugccuu

SEQ ID NO: 3684656 - RNA, 21 nt, Human
uuugaaagugccuuugcagcu

SEQ ID NO: 3684657 - RNA, 23 nt, Human
uuugaaagugccuuugcagcuca

SEQ ID NO: 3684658 - RNA, 16 nt, Human
uuugaaauaagcuauu

SEQ ID NO: 3684659 - RNA, 19 nt, Human
uuugaaauaagcuauuuga

SEQ ID NO: 3684660 - RNA, 19 nt, Human
uuugaaauaccucauguuu

SEQ ID NO: 3684661 - RNA, 16 nt, Human
uuugaaauauggucuu

SEQ ID NO: 3684662 - RNA, 15 nt, Human
uuugaaauauugacu

SEQ ID NO: 3684663 - RNA, 14 nt, Human
uuugaaaucaguaa

SEQ ID NO: 3684664 - RNA, 20 nt, Human
uuugaaaucaguaaacacug

SEQ ID NO: 3684665 - RNA, 13 nt, Human
uuugaaaugaaau

SEQ ID NO: 3684666 - RNA, 15 nt, Human
uuugaaaugaaauuu

SEQ ID NO: 3684667 - RNA, 22 nt, Human
uuugaaaugaaauuuaaacauu

SEQ ID NO: 3684668 - RNA, 21 nt, Human
uuugaaauuauguaaauuaug

SEQ ID NO: 3684669 - RNA, 17 nt, Human
uuugaaauucugaauuu

SEQ ID NO: 3684670 - RNA, 14 nt, Human
uuugaacacuggcu

SEQ ID NO: 3684671 - RNA, 14 nt, Human
uuugaaccaaaaca

SEQ ID NO: 3684672 - RNA, 13 nt, Human
uuugaaccaauaa

SEQ ID NO: 3684673 - RNA, 15 nt, Human
uuugaacuaagaaac

SEQ ID NO: 3684674 - RNA, 15 nt, Human
uuugaacucagaucu

SEQ ID NO: 3684675 - RNA, 14 nt, Human
uuugaacucuucaa

SEQ ID NO: 3684676 - RNA, 15 nt, Human
uuugaacugauaaag

SEQ ID NO: 3684677 - RNA, 19 nt, Human
uuugaacugauaaagauga

SEQ ID NO: 3684678 - RNA, 17 nt, Human
uuugaacuggcaauugu

SEQ ID NO: 3684679 - RNA, 22 nt, Human
uuugaacuggcaauugucuauu

SEQ ID NO: 3684680 - RNA, 19 nt, Human
uuugaagaaugaacaaauu

SEQ ID NO: 3684681 - RNA, 18 nt, Human
uuugaagcacagugauca

SEQ ID NO: 3684682 - RNA, 21 nt, Human
uuugaagguagaauguuuuca

SEQ ID NO: 3684683 - RNA, 22 nt, Human
uuugaaguaaucccgccaccua

SEQ ID NO: 3684684 - RNA, 13 nt, Human
uuugaaguauuua

SEQ ID NO: 3684685 - RNA, 21 nt, Human
uuugaaguguaggcagacaca

SEQ ID NO: 3684686 - RNA, 22 nt, Human
uuugaaguguaggcagacacag

SEQ ID NO: 3684687 - RNA, 17 nt, Human
uuugaaguuagcuuuaa

SEQ ID NO: 3684688 - RNA, 13 nt, Human
uuugaaguuuaca

SEQ ID NO: 3684689 - RNA, 21 nt, Human
uuugaauaaagaauacuugaa

SEQ ID NO: 3684690 - RNA, 20 nt, Human
uuugaauaaaugucacuuuu

SEQ ID NO: 3684691 - RNA, 23 nt, Human
uuugaauaccauuaaaacugcuu

SEQ ID NO: 3684692 - RNA, 17 nt, Human
uuugaauauaaacacua

SEQ ID NO: 3684693 - RNA, 18 nt, Human
uuugaauauaaacacuau

SEQ ID NO: 3684694 - RNA, 16 nt, Human
uuugaauauuacuccu

SEQ ID NO: 3684695 - RNA, 18 nt, Human
uuugaaucaucaagucuu

SEQ ID NO: 3684696 - RNA, 14 nt, Human
uuugaaugaaaaau

SEQ ID NO: 3684697 - RNA, 22 nt, Human
uuugaauguaugcuucauacag

SEQ ID NO: 3684698 - RNA, 22 nt, Human
uuugaaugugauuuuaaagagu

SEQ ID NO: 3684699 - RNA, 15 nt, Human
uuugaauguguuuca

SEQ ID NO: 3684700 - RNA, 16 nt, Human
uuugaauguuaaauaa

SEQ ID NO: 3684701 - RNA, 21 nt, Human
uuugaauguuaaauaaauugu

SEQ ID NO: 3684702 - RNA, 16 nt, Human
uuugaauuaucagcaa

SEQ ID NO: 3684703 - RNA, 14 nt, Human
uuugaauuuacugg

SEQ ID NO: 3684704 - RNA, 12 nt, Human
uuugaauuuugu

SEQ ID NO: 3684705 - RNA, 14 nt, Human
uuugaauuuugugu

SEQ ID NO: 3684706 - RNA, 18 nt, Human
uuugacaaagguaaauca

SEQ ID NO: 3684707 - RNA, 20 nt, Human
uuugacaauuccuagauaaa

SEQ ID NO: 3684708 - RNA, 17 nt, Human
uuugacacugaaaguuu

SEQ ID NO: 3684709 - RNA, 18 nt, Human
uuugacacugaaaguuuu

SEQ ID NO: 3684710 - RNA, 18 nt, Human
uuugacagaauauguuuc

SEQ ID NO: 3684711 - RNA, 19 nt, Human
uuugacagaauauguuuca

SEQ ID NO: 3684712 - RNA, 17 nt, Human
uuugacauguggaaagu

SEQ ID NO: 3684713 - RNA, 14 nt, Human
uuugacauuuaauu

SEQ ID NO: 3684714 - RNA, 16 nt, Human
uuugacauuuaauuua

SEQ ID NO: 3684715 - RNA, 10 nt, Human
uuugaccucc

SEQ ID NO: 3684716 - RNA, 19 nt, Human
uuugaccucugcagcaaua

SEQ ID NO: 3684717 - RNA, 19 nt, Human
uuugaccuuuuauguagua

SEQ ID NO: 3684718 - RNA, 21 nt, Human
uuugacgucacugauauuuuu

SEQ ID NO: 3684719 - RNA, 21 nt, Human
uuugacuagggauucaggcug

SEQ ID NO: 3684720 - RNA, 16 nt, Human
uuugacuauucuguau

SEQ ID NO: 3684721 - RNA, 19 nt, Human
uuugacucuauuaaaaucu

SEQ ID NO: 3684722 - RNA, 19 nt, Human
uuugacucuggcaaagcuu

SEQ ID NO: 3684723 - RNA, 21 nt, Human
uuugacucuggcaaagcuuuu

SEQ ID NO: 3684724 - RNA, 15 nt, Human
uuugacuggauauuc

SEQ ID NO: 3684725 - RNA, 23 nt, Human
uuugacuuaaugugauuacugcu

SEQ ID NO: 3684726 - RNA, 15 nt, Human
uugaucuggaaccca

SEQ ID NO: 3684727 - RNA, 22 nt, Human
uugaucuguugcaagccccucu

SEQ ID NO: 3684728 - RNA, 17 nt, Human
uugaucuuccucugcua

SEQ ID NO: 3684729 - RNA, 19 nt, Human
uugaucuuccucugcuaaa

SEQ ID NO: 3684730 - RNA, 15 nt, Human
uugaugacuggaauu

SEQ ID NO: 3684731 - RNA, 19 nt, Human
uugaugacuggcauuuuau

SEQ ID NO: 3684732 - RNA, 21 nt, Human
uugaugauacaaugaacacuu

SEQ ID NO: 3684733 - RNA, 22 nt, Human
uugaugcaauccuuacaaauga

SEQ ID NO: 3684734 - RNA, 14 nt, Human
uugaugcacagaga

SEQ ID NO: 3684735 - RNA, 12 nt, Human
uugaugcaugug

SEQ ID NO: 3684736 - RNA, 23 nt, Human
uugaugcauuaaaagaaaauaaa

SEQ ID NO: 3684737 - RNA, 18 nt, Human
uugaugcuggagagguua

SEQ ID NO: 3684738 - RNA, 21 nt, Human
uugaugggaugauugaagaaa

SEQ ID NO: 3684739 - RNA, 13 nt, Human
uugauggguucua

SEQ ID NO: 3684740 - RNA, 18 nt, Human
uugauguaaaaucuuguc

SEQ ID NO: 3684741 - RNA, 23 nt, Human
uugauguaaagauguucuggaua

SEQ ID NO: 3684742 - RNA, 19 nt, Human
uugauguacagucugucau

SEQ ID NO: 3684743 - RNA, 13 nt, Human
uugauguaucuga

SEQ ID NO: 3684744 - RNA, 12 nt, Human
uugaugucagca

SEQ ID NO: 3684745 - RNA, 16 nt, Human
uugaugugugucuagg

SEQ ID NO: 3684746 - RNA, 11 nt, Human
uugauguguuu

SEQ ID NO: 3684747 - RNA, 14 nt, Human
uugauguuccuucc

SEQ ID NO: 3684748 - RNA, 15 nt, Human
uugauguuuguggcc

SEQ ID NO: 3684749 - RNA, 19 nt, Human
uugauguuuguggccucag

SEQ ID NO: 3684750 - RNA, 14 nt, Human
uugauuaaggcagu

SEQ ID NO: 3684751 - RNA, 13 nt, Human
uugauuauaaagu

SEQ ID NO: 3684752 - RNA, 13 nt, Human
uugauuaugcaga

SEQ ID NO: 3684753 - RNA, 20 nt, Human
uugauuauuugcauguuaug

SEQ ID NO: 3684754 - RNA, 16 nt, Human
uugauucacauguuuu

SEQ ID NO: 3684755 - RNA, 20 nt, Human
uugauucacauguuuucaaa

SEQ ID NO: 3684756 - RNA, 15 nt, Human
uugauucagacagcu

SEQ ID NO: 3684757 - RNA, 16 nt, Human
uugauucagacagcug

SEQ ID NO: 3684758 - RNA, 23 nt, Human
uugauucagacagcugccuggga

SEQ ID NO: 3684759 - RNA, 14 nt, Human
uugauucagccugu

SEQ ID NO: 3684760 - RNA, 19 nt, Human
uugauucauaguaacuucu

SEQ ID NO: 3684761 - RNA, 23 nt, Human
uugauucgguauccccccaucuu

SEQ ID NO: 3684762 - RNA, 12 nt, Human
uugauucugcag

SEQ ID NO: 3684763 - RNA, 18 nt, Human
uugauucugcuugagaau

SEQ ID NO: 3684764 - RNA, 12 nt, Human
uugauucuuccu

SEQ ID NO: 3684765 - RNA, 14 nt, Human
uugauugauuugaa

SEQ ID NO: 3684766 - RNA, 13 nt, Human
uugauugcuaaau

SEQ ID NO: 3684767 - RNA, 20 nt, Human
uugauugcuaaauguaacag

SEQ ID NO: 3684768 - RNA, 13 nt, Human
uugauugcuuuuu

SEQ ID NO: 3684769 - RNA, 22 nt, Human
uugauugggcacaucauuucaa

SEQ ID NO: 3684770 - RNA, 17 nt, Human
uugauugucagcuacua

SEQ ID NO: 3684771 - RNA, 17 nt, Human
uugauuuaaacacacag

SEQ ID NO: 3684772 - RNA, 16 nt, Human
uugauuuaauaacaua

SEQ ID NO: 3684773 - RNA, 12 nt, Human
uugauuuaugca

SEQ ID NO: 3684774 - RNA, 13 nt, Human
uugauuuauuaac

SEQ ID NO: 3684775 - RNA, 20 nt, Human
uugauuucaaaguuuuguug

SEQ ID NO: 3684776 - RNA, 17 nt, Human
uugauuucccuucuucu

SEQ ID NO: 3684777 - RNA, 18 nt, Human
uugauuugaagaacaugu

SEQ ID NO: 3684778 - RNA, 13 nt, Human
uugauuugauuuu

SEQ ID NO: 3684779 - RNA, 14 nt, Human
uugauuugcauuga

SEQ ID NO: 3684780 - RNA, 19 nt, Human
uugauuugcauugaacaca

SEQ ID NO: 3684781 - RNA, 15 nt, Human
uugauuuuaaaaugu

SEQ ID NO: 3684782 - RNA, 22 nt, Human
uugauuuuaaaauguacaugua

SEQ ID NO: 3684783 - RNA, 14 nt, Human
uugauuuucuguug

SEQ ID NO: 3684784 - RNA, 18 nt, Human
uugauuuuuaccguuucu

SEQ ID NO: 3684785 - RNA, 15 nt, Human
uugauuuuugucuca

SEQ ID NO: 3684786 - RNA, 19 nt, Human
uugauuuuuuuuuuuaauc

SEQ ID NO: 3684787 - RNA, 20 nt, Human
uugcaaaaacuacaaccaau

SEQ ID NO: 3684788 - RNA, 13 nt, Human
uugcaaaauacau

SEQ ID NO: 3684789 - RNA, 14 nt, Human
uugcaaaauacaug

SEQ ID NO: 3684790 - RNA, 16 nt, Human
uugcaaaauacaugaa

SEQ ID NO: 3684791 - RNA, 17 nt, Human
uugcaaaauacaugaag

SEQ ID NO: 3684792 - RNA, 15 nt, Human
uugcaaaaucaguuu

SEQ ID NO: 3684793 - RNA, 16 nt, Human
uugcaaaaucaguuuu

SEQ ID NO: 3684794 - RNA, 21 nt, Human
uugcaaaaucaguuuuccucu

SEQ ID NO: 3684795 - RNA, 15 nt, Human
uugcaaaauuuccag

SEQ ID NO: 3684796 - RNA, 12 nt, Human
uugcaaacuuua

SEQ ID NO: 3684797 - RNA, 15 nt, Human
uugcaaagaaagaaa

SEQ ID NO: 3684798 - RNA, 12 nt, Human
uugcaaagcaaa

SEQ ID NO: 3684799 - RNA, 22 nt, Human
uugcaaaggagcucacuguggu

SEQ ID NO: 3684800 - RNA, 21 nt, Human
uugcaaaguauuguaaauuau

SEQ ID NO: 3684801 - RNA, 22 nt, Human
uugcaaauaaguguauuuugaa

SEQ ID NO: 3684802 - RNA, 17 nt, Human
uugcaaauauaaacauc

SEQ ID NO: 3684803 - RNA, 16 nt, Human
uugcaaaucaguguuu

SEQ ID NO: 3684804 - RNA, 16 nt, Human
uugcaaaucuugaaau

SEQ ID NO: 3684805 - RNA, 13 nt, Human
uugcaacaaaaua

SEQ ID NO: 3684806 - RNA, 14 nt, Human
uugcaaccgucugu

SEQ ID NO: 3684807 - RNA, 14 nt, Human
uugcaacguuuaca

SEQ ID NO: 3684808 - RNA, 14 nt, Human
uugcaagaaucagu

SEQ ID NO: 3684809 - RNA, 23 nt, Human
uugcaagaugugaauuauugaca

SEQ ID NO: 3684810 - RNA, 12 nt, Human
uugcaaggaagc

SEQ ID NO: 3684811 - RNA, 14 nt, Human
uugcaaggccgcug

SEQ ID NO: 3684812 - RNA, 17 nt, Human
uugcaaggccgcuguuc

SEQ ID NO: 3684813 - RNA, 22 nt, Human
uugcaagggccagaucuguuaa

SEQ ID NO: 3684814 - RNA, 17 nt, Human
uugcaagguuccacaga

SEQ ID NO: 3684815 - RNA, 19 nt, Human
uugcaagguuccacagagu

SEQ ID NO: 3684816 - RNA, 18 nt, Human
uugcaauaacagcugcaa

SEQ ID NO: 3684817 - RNA, 14 nt, Human
uugcaauaaugcag

SEQ ID NO: 3684818 - RNA, 22 nt, Human
uugcaauagaaauccaauugga

SEQ ID NO: 3684819 - RNA, 19 nt, Human
uugcaauaucgaucagaug

SEQ ID NO: 3684820 - RNA, 14 nt, Human
uugcaauggcagcc

SEQ ID NO: 3684821 - RNA, 19 nt, Human
uugcaauuaaacuuccaaa

SEQ ID NO: 3684822 - RNA, 20 nt, Human
uugcacaauauugaacuuuu

SEQ ID NO: 3684823 - RNA, 18 nt, Human
uugcacacaucaucugua

SEQ ID NO: 3684824 - RNA, 19 nt, Human
uugcacacaucaucuguaa

SEQ ID NO: 3684825 - RNA, 21 nt, Human
uugcacacuuuggcccagggu

SEQ ID NO: 3684826 - RNA, 14 nt, Human
uugcacacuuuggu

SEQ ID NO: 3684827 - RNA, 15 nt, Human
uugcacagaaguccu

SEQ ID NO: 3684828 - RNA, 18 nt, Human
uugcacagaaguccugua

SEQ ID NO: 3684829 - RNA, 18 nt, Human
uugcacagcaucucagcu

SEQ ID NO: 3684830 - RNA, 19 nt, Human
uugcacagcaucucagcuc

SEQ ID NO: 3684831 - RNA, 18 nt, Human
uugcacaggaugcuggcc

SEQ ID NO: 3684832 - RNA, 13 nt, Human
uugcacagggauu

SEQ ID NO: 3684833 - RNA, 14 nt, Human
uugcacauggauuc

SEQ ID NO: 3684834 - RNA, 21 nt, Human
uugcacaugucuuaaugaagu

SEQ ID NO: 3684835 - RNA, 22 nt, Human
uugcacaugucuuaaugaaguu

SEQ ID NO: 3684836 - RNA, 16 nt, Human
uugcacauguuuccuc

SEQ ID NO: 3684837 - RNA, 12 nt, Human
uugcacauuguu

SEQ ID NO: 3684838 - RNA, 23 nt, Human
uugcacauuguuguuuuuuuaau

SEQ ID NO: 3684839 - RNA, 14 nt, Human
uugcacauuuugau

SEQ ID NO: 3684840 - RNA, 18 nt, Human
uugcaccacugcacucca

SEQ ID NO: 3684841 - RNA, 21 nt, Human
uugcaccacugcacuccagcc

SEQ ID NO: 3684842 - RNA, 16 nt, Human
uugcacccagcccugg

SEQ ID NO: 3684843 - RNA, 22 nt, Human
uugcaccccaaagcuuuccugc

SEQ ID NO: 3684844 - RNA, 12 nt, Human
uugcaccccucc

SEQ ID NO: 3684845 - RNA, 16 nt, Human
uugcaccccucccauu

SEQ ID NO: 3684846 - RNA, 18 nt, Human
uugcaccuguccccaccc

SEQ ID NO: 3684847 - RNA, 20 nt, Human
uugcacgacgcccucucccc

SEQ ID NO: 3684848 - RNA, 14 nt, Human
uugcacggcugcug

SEQ ID NO: 3684849 - RNA, 15 nt, Human
uugcacguggccucu

SEQ ID NO: 3684850 - RNA, 15 nt, Human
uugcacuaaaguaug

SEQ ID NO: 3684851 - RNA, 15 nt, Human
uugcacuaucuuuca

SEQ ID NO: 3684852 - RNA, 18 nt, Human
uugcacucaaaucuuaag

SEQ ID NO: 3684853 - RNA, 11 nt, Human
uugcacugaag

SEQ ID NO: 3684854 - RNA, 21 nt, Human
uugcacugagggccacacuau

SEQ ID NO: 3684855 - RNA, 17 nt, Human
uugcacuugugauuauu

SEQ ID NO: 3684856 - RNA, 22 nt, Human
uugcacuuuuucuuaaucauuu

SEQ ID NO: 3684857 - RNA, 19 nt, Human
uugcagaaaagcaccugcc

SEQ ID NO: 3684858 - RNA, 22 nt, Human
uugcagaaacauuuugugguca

SEQ ID NO: 3684859 - RNA, 16 nt, Human
uugcagaacuguagcu

SEQ ID NO: 3684860 - RNA, 11 nt, Human
uugcagaacuu

SEQ ID NO: 3684861 - RNA, 13 nt, Human
uugcagaagaggg

SEQ ID NO: 3684862 - RNA, 13 nt, Human
uugcagaaguucu

SEQ ID NO: 3684863 - RNA, 20 nt, Human
uugcagacuagaauucuagu

SEQ ID NO: 3684864 - RNA, 18 nt, Human
uugcagagaagccuuggu

SEQ ID NO: 3684865 - RNA, 19 nt, Human
uugcagaugacaaaaauuc

SEQ ID NO: 3684866 - RNA, 17 nt, Human
uugcagcaauuaaaaau

SEQ ID NO: 3684867 - RNA, 22 nt, Human
uugcagcucccauucuaugugu

SEQ ID NO: 3684868 - RNA, 23 nt, Human
uugcagcucuccccuucucugua

SEQ ID NO: 3684869 - RNA, 13 nt, Human
uugcagcuguuuu

SEQ ID NO: 3684870 - RNA, 17 nt, Human
uugcagcuguuuuguug

SEQ ID NO: 3684871 - RNA, 18 nt, Human
uugcagcuguuuuguuga

SEQ ID NO: 3684872 - RNA, 18 nt, Human
uugcagcuuuauguucau

SEQ ID NO: 3684873 - RNA, 21 nt, Human
uugcagcuuuauguucauuug

SEQ ID NO: 3684874 - RNA, 23 nt, Human
uugcaggagcaguaucaugaagc

SEQ ID NO: 3684875 - RNA, 21 nt, Human
uugcaggcaugcaugugcuug

SEQ ID NO: 3684876 - RNA, 13 nt, Human
uugcagggcagcc

SEQ ID NO: 3684877 - RNA, 22 nt, Human
uauugaauuuuuccuaugcuau

SEQ ID NO: 3684878 - RNA, 21 nt, Human
uauugacaaaauguuauuucc

SEQ ID NO: 3684879 - RNA, 22 nt, Human
uauugacaaaauguuauuuccc

SEQ ID NO: 3684880 - RNA, 15 nt, Human
uauugacaaacucuc

SEQ ID NO: 3684881 - RNA, 21 nt, Human
uauugacaaccgagaagguuu

SEQ ID NO: 3684882 - RNA, 13 nt, Human
uauugacaauaaa

SEQ ID NO: 3684883 - RNA, 19 nt, Human
uauugacaauaaaauauua

SEQ ID NO: 3684884 - RNA, 21 nt, Human
uauugacaauaaaauauuauu

SEQ ID NO: 3684885 - RNA, 14 nt, Human
uauugacacugaac

SEQ ID NO: 3684886 - RNA, 12 nt, Human
uauugacaguug

SEQ ID NO: 3684887 - RNA, 17 nt, Human
uauugacaguugugcag

SEQ ID NO: 3684888 - RNA, 20 nt, Human
uauugacucuggguccuucc

SEQ ID NO: 3684889 - RNA, 17 nt, Human
uauugacuuguauauuu

SEQ ID NO: 3684890 - RNA, 17 nt, Human
uauugagacaaaaauua

SEQ ID NO: 3684891 - RNA, 16 nt, Human
uauugagagagaugug

SEQ ID NO: 3684892 - RNA, 22 nt, Human
uauugagagagauguguaauuu

SEQ ID NO: 3684893 - RNA, 17 nt, Human
uauugagauuguccuca

SEQ ID NO: 3684894 - RNA, 14 nt, Human
uauugagauuucuu

SEQ ID NO: 3684895 - RNA, 18 nt, Human
uauugagauuucuuaaau

SEQ ID NO: 3684896 - RNA, 19 nt, Human
uauugagcaauaugucagu

SEQ ID NO: 3684897 - RNA, 17 nt, Human
uauugagcagaauucau

SEQ ID NO: 3684898 - RNA, 19 nt, Human
uauugagcagaauucauuc

SEQ ID NO: 3684899 - RNA, 21 nt, Human
uauugagcagaauucauucau

SEQ ID NO: 3684900 - RNA, 19 nt, Human
uauugaggaaaaauaugug

SEQ ID NO: 3684901 - RNA, 23 nt, Human
uauugaggccaagaauauugcaa

SEQ ID NO: 3684902 - RNA, 15 nt, Human
uauugaggcuuugug

SEQ ID NO: 3684903 - RNA, 19 nt, Human
uauugaggcuuuguguugu

SEQ ID NO: 3684904 - RNA, 19 nt, Human
uauugaguuccaguugaag

SEQ ID NO: 3684905 - RNA, 19 nt, Human
uauugaguuuguagguaaa

SEQ ID NO: 3684906 - RNA, 21 nt, Human
uauugauaugcuuauacacuu

SEQ ID NO: 3684907 - RNA, 19 nt, Human
uauugaugugcaaaaauuu

SEQ ID NO: 3684908 - RNA, 14 nt, Human
uauugauugggaaa

SEQ ID NO: 3684909 - RNA, 20 nt, Human
uauugauugggaaaacauuu

SEQ ID NO: 3684910 - RNA, 14 nt, Human
uauugauuuaagcu

SEQ ID NO: 3684911 - RNA, 16 nt, Human
uauugcaaaauacaug

SEQ ID NO: 3684912 - RNA, 19 nt, Human
uauugcaaaauacaugaag

SEQ ID NO: 3684913 - RNA, 20 nt, Human
uauugcaaaauagcauuugu

SEQ ID NO: 3684914 - RNA, 22 nt, Human
uauugcaaagguuccaacugua

SEQ ID NO: 3684915 - RNA, 23 nt, Human
uauugcaaagguuccaacuguau

SEQ ID NO: 3684916 - RNA, 14 nt, Human
uauugcaauaaagu

SEQ ID NO: 3684917 - RNA, 16 nt, Human
uauugcaauaaaguau

SEQ ID NO: 3684918 - RNA, 12 nt, Human
uauugcacaugu

SEQ ID NO: 3684919 - RNA, 14 nt, Human
uauugcacaugucu

SEQ ID NO: 3684920 - RNA, 16 nt, Human
uauugcacaugucuua

SEQ ID NO: 3684921 - RNA, 13 nt, Human
uauugcacauugu

SEQ ID NO: 3684922 - RNA, 17 nt, Human
uauugcacauuguaaaa

SEQ ID NO: 3684923 - RNA, 14 nt, Human
uauugcacauuguu

SEQ ID NO: 3684924 - RNA, 15 nt, Human
uauugcacauuguuc

SEQ ID NO: 3684925 - RNA, 15 nt, Human
uauugcaguuauaga

SEQ ID NO: 3684926 - RNA, 22 nt, Human
uauugcaucuggguagcuguaa

SEQ ID NO: 3684927 - RNA, 18 nt, Human
uauugccaaaacccagcu

SEQ ID NO: 3684928 - RNA, 19 nt, Human
uauugccaaaacccagcug

SEQ ID NO: 3684929 - RNA, 20 nt, Human
uauugccaaaacccagcugc

SEQ ID NO: 3684930 - RNA, 21 nt, Human
uauugccaaaacccagcugca

SEQ ID NO: 3684931 - RNA, 17 nt, Human
uauugccaaacauuaau

SEQ ID NO: 3684932 - RNA, 13 nt, Human
uauugcccacgcu

SEQ ID NO: 3684933 - RNA, 14 nt, Human
uauugcccacgcug

SEQ ID NO: 3684934 - RNA, 20 nt, Human
uauugcccaggcuggucuug

SEQ ID NO: 3684935 - RNA, 20 nt, Human
uauugcccaugauauaacuu

SEQ ID NO: 3684936 - RNA, 20 nt, Human
uauugccuaagaauaaacau

SEQ ID NO: 3684937 - RNA, 16 nt, Human
uauugccuucucacca

SEQ ID NO: 3684938 - RNA, 20 nt, Human
uauugccuucucaccagcug

SEQ ID NO: 3684939 - RNA, 17 nt, Human
uauugccuucuuugaag

SEQ ID NO: 3684940 - RNA, 14 nt, Human
uauugcgucuuagc

SEQ ID NO: 3684941 - RNA, 16 nt, Human
uauugcuagagcuccu

SEQ ID NO: 3684942 - RNA, 20 nt, Human
uauugcuaguauuugaauua

SEQ ID NO: 3684943 - RNA, 20 nt, Human
uauugcugaagaaucuacuu

SEQ ID NO: 3684944 - RNA, 23 nt, Human
uauugcugauggugcaaugaccu

SEQ ID NO: 3684945 - RNA, 16 nt, Human
uauugcugauuuuaau

SEQ ID NO: 3684946 - RNA, 22 nt, Human
uauugcugcugguaauuuguau

SEQ ID NO: 3684947 - RNA, 11 nt, Human
uauugcugggg

SEQ ID NO: 3684948 - RNA, 16 nt, Human
uauugcuuaguaaaau

SEQ ID NO: 3684949 - RNA, 19 nt, Human
uauugcuuaguaaaauuua

SEQ ID NO: 3684950 - RNA, 15 nt, Human
uauugcuugcacaaa

SEQ ID NO: 3684951 - RNA, 16 nt, Human
uauugcuuuauaaaua

SEQ ID NO: 3684952 - RNA, 22 nt, Human
uauuggaaauuuguuauaauga

SEQ ID NO: 3684953 - RNA, 14 nt, Human
uauuggcaaagaug

SEQ ID NO: 3684954 - RNA, 20 nt, Human
uauuggccauaagcaacaau

SEQ ID NO: 3684955 - RNA, 23 nt, Human
uauuggcuaaauugaaaccugga

SEQ ID NO: 3684956 - RNA, 16 nt, Human
uauuggcuuuucugau

SEQ ID NO: 3684957 - RNA, 17 nt, Human
uauuggcuuuucugauc

SEQ ID NO: 3684958 - RNA, 21 nt, Human
uauuggcuuuucugauccagu

SEQ ID NO: 3684959 - RNA, 23 nt, Human
uauuggguagauauuuuuucuga

SEQ ID NO: 3684960 - RNA, 14 nt, Human
uauuggguucauua

SEQ ID NO: 3684961 - RNA, 20 nt, Human
uauuggguucauuauuggaa

SEQ ID NO: 3684962 - RNA, 18 nt, Human
uauugguaacauccuuuc

SEQ ID NO: 3684963 - RNA, 22 nt, Human
uauugguaacauccuuucuauu

SEQ ID NO: 3684964 - RNA, 17 nt, Human
uauugguauauccuuuu

SEQ ID NO: 3684965 - RNA, 19 nt, Human
uauugguauauccuuuucu

SEQ ID NO: 3684966 - RNA, 22 nt, Human
uauugguccagcuugcucuuca

SEQ ID NO: 3684967 - RNA, 17 nt, Human
uauugguggcuuuccuu

SEQ ID NO: 3684968 - RNA, 17 nt, Human
uauugguguaagguacu

SEQ ID NO: 3684969 - RNA, 14 nt, Human
uauugguuuuauga

SEQ ID NO: 3684970 - RNA, 13 nt, Human
uauuguaaauaca

SEQ ID NO: 3684971 - RNA, 17 nt, Human
uauuguaacagacauug

SEQ ID NO: 3684972 - RNA, 18 nt, Human
uauuguaacagacauugu

SEQ ID NO: 3684973 - RNA, 20 nt, Human
uauuguaacccugucuggau

SEQ ID NO: 3684974 - RNA, 16 nt, Human
uauuguaacuauguuu

SEQ ID NO: 3684975 - RNA, 19 nt, Human
uauuguaagaaauacugua

SEQ ID NO: 3684976 - RNA, 11 nt, Human
uauuguaauau

SEQ ID NO: 3684977 - RNA, 21 nt, Human
uauuguaaugagugaauugaa

SEQ ID NO: 3684978 - RNA, 15 nt, Human
uauuguacaaaguau

SEQ ID NO: 3684979 - RNA, 12 nt, Human
uauuguacacuu

SEQ ID NO: 3684980 - RNA, 12 nt, Human
uauuguacagaa

SEQ ID NO: 3684981 - RNA, 20 nt, Human
uauuguacagcuguuuaaga

SEQ ID NO: 3684982 - RNA, 14 nt, Human
uauuguacauaaaa

SEQ ID NO: 3684983 - RNA, 22 nt, Human
uauuguacauaaaagaauuuuu

SEQ ID NO: 3684984 - RNA, 13 nt, Human
uauuguaccucuc

SEQ ID NO: 3684985 - RNA, 16 nt, Human
uauuguauauuacaau

SEQ ID NO: 3684986 - RNA, 18 nt, Human
uauuguauuacuagaaga

SEQ ID NO: 3684987 - RNA, 15 nt, Human
uauuguauuuaugug

SEQ ID NO: 3684988 - RNA, 17 nt, Human
uauugucaaagugguga

SEQ ID NO: 3684989 - RNA, 22 nt, Human
uauugucaguaucuguaucucu

SEQ ID NO: 3684990 - RNA, 17 nt, Human
uauugugauuugacugu

SEQ ID NO: 3684991 - RNA, 14 nt, Human
uauugugcaaugug

SEQ ID NO: 3684992 - RNA, 17 nt, Human
uauugugcucagagaca

SEQ ID NO: 3684993 - RNA, 18 nt, Human
uauugugucuuuugcaug

SEQ ID NO: 3684994 - RNA, 19 nt, Human
uauuguguguuauuuaaau

SEQ ID NO: 3684995 - RNA, 14 nt, Human
uauuguguuuguca

SEQ ID NO: 3684996 - RNA, 16 nt, Human
uauuguguuugucauu

SEQ ID NO: 3684997 - RNA, 18 nt, Human
uauuguguuugucauuag

SEQ ID NO: 3684998 - RNA, 17 nt, Human
uauuguuaacucuuguc

SEQ ID NO: 3684999 - RNA, 20 nt, Human
uauuguuccaagacauuguc

SEQ ID NO: 3685000 - RNA, 14 nt, Human
uauuguuccuaagu

SEQ ID NO: 3685001 - RNA, 13 nt, Human
uauuguuguccuu

SEQ ID NO: 3685002 - RNA, 16 nt, Human
uauuguuguccuuuuc

SEQ ID NO: 3685003 - RNA, 18 nt, Human
uauuguuguccuuuucau

SEQ ID NO: 3685004 - RNA, 11 nt, Human
uauuguuuaaa

SEQ ID NO: 3685005 - RNA, 15 nt, Human
uauuguuuaaaauca

SEQ ID NO: 3685006 - RNA, 16 nt, Human
uauuguuuaaaaucau

SEQ ID NO: 3685007 - RNA, 16 nt, Human
uauuguuuaaaaugua

SEQ ID NO: 3685008 - RNA, 22 nt, Human
uauuguuuaaagcaacugucua

SEQ ID NO: 3685009 - RNA, 14 nt, Human
uauuguuuauguaa

SEQ ID NO: 3685010 - RNA, 24 nt, Human
uauuguuuauucuuuuuaaaguau

SEQ ID NO: 3685011 - RNA, 11 nt, Human
uauuguuucua

SEQ ID NO: 3685012 - RNA, 15 nt, Human
uauuguuucugcauu

SEQ ID NO: 3685013 - RNA, 21 nt, Human
uauuguuucuggucacuauau

SEQ ID NO: 3685014 - RNA, 20 nt, Human
uauuguuucuuuaagaaagu

SEQ ID NO: 3685015 - RNA, 14 nt, Human
uauuguuuuacaau

SEQ ID NO: 3685016 - RNA, 20 nt, Human
uauuguuuuacaauaguucu

SEQ ID NO: 3685017 - RNA, 16 nt, Human
uauuguuuugguuugc

SEQ ID NO: 3685018 - RNA, 22 nt, Human
uauuguuuuuccuuguauuuaa

SEQ ID NO: 3685019 - RNA, 16 nt, Human
uauuuaaaaaaaaagu

SEQ ID NO: 3685020 - RNA, 21 nt, Human
uauuuaaaaaacuaaaaacua

SEQ ID NO: 3685021 - RNA, 23 nt, Human
uauuuaaaaauaagucaacagua

SEQ ID NO: 3685022 - RNA, 16 nt, Human
uauuuaaaaauagaaa

SEQ ID NO: 3685023 - RNA, 18 nt, Human
uauuuaaaaauagaaaca

SEQ ID NO: 3685024 - RNA, 13 nt, Human
uauuuaaaacuug

SEQ ID NO: 3685025 - RNA, 23 nt, Human
uauuuaaaagaaagccucagaga

SEQ ID NO: 3685026 - RNA, 14 nt, Human
uuugacuuuaauuu

SEQ ID NO: 3685027 - RNA, 17 nt, Human
uuugacuuucuucugaa

SEQ ID NO: 3685028 - RNA, 13 nt, Human
uuugacuuuucug

SEQ ID NO: 3685029 - RNA, 14 nt, Human
uuugacuuuucugu

SEQ ID NO: 3685030 - RNA, 16 nt, Human
uuugacuuuucuguaa

SEQ ID NO: 3685031 - RNA, 17 nt, Human
uuugacuuuucuguaau

SEQ ID NO: 3685032 - RNA, 16 nt, Human
uuugagaaaauaaagc

SEQ ID NO: 3685033 - RNA, 13 nt, Human
uuugagaaaguca

SEQ ID NO: 3685034 - RNA, 18 nt, Human
uuugagaacaaagaugac

SEQ ID NO: 3685035 - RNA, 18 nt, Human
uuugagaacguaaagaac

SEQ ID NO: 3685036 - RNA, 14 nt, Human
uuugagaagaaaac

SEQ ID NO: 3685037 - RNA, 18 nt, Human
uuugagaagaaaacaucu

SEQ ID NO: 3685038 - RNA, 16 nt, Human
uuugagacaguuucuu

SEQ ID NO: 3685039 - RNA, 19 nt, Human
uuugagacaguuucuuagc

SEQ ID NO: 3685040 - RNA, 22 nt, Human
uuugagacaguuucuuagcuuu

SEQ ID NO: 3685041 - RNA, 16 nt, Human
uuugagaccagccugg

SEQ ID NO: 3685042 - RNA, 23 nt, Human
uuugagaccugaauagcucccag

SEQ ID NO: 3685043 - RNA, 13 nt, Human
uuugagaguucua

SEQ ID NO: 3685044 - RNA, 17 nt, Human
uuugagaucuaaaaaua

SEQ ID NO: 3685045 - RNA, 21 nt, Human
uuugagaucuaaaaauaacug

SEQ ID NO: 3685046 - RNA, 15 nt, Human
uuugagauguaaaaa

SEQ ID NO: 3685047 - RNA, 23 nt, Human
uuugagauuaagaaugccaggaa

SEQ ID NO: 3685048 - RNA, 20 nt, Human
uuugagauugccccaggucu

SEQ ID NO: 3685049 - RNA, 15 nt, Human
uuugagcaacuuucu

SEQ ID NO: 3685050 - RNA, 12 nt, Human
uuugagcugccu

SEQ ID NO: 3685051 - RNA, 14 nt, Human
uuugagcugccuuc

SEQ ID NO: 3685052 - RNA, 15 nt, Human
uuugagcuuaaucuu

SEQ ID NO: 3685053 - RNA, 19 nt, Human
uuugagcuuagugaaauua

SEQ ID NO: 3685054 - RNA, 18 nt, Human
uuugaggaaauuugcagc

SEQ ID NO: 3685055 - RNA, 21 nt, Human
uuugaggagcagcuucaguug

SEQ ID NO: 3685056 - RNA, 19 nt, Human
uuugaggagugguuuuucu

SEQ ID NO: 3685057 - RNA, 15 nt, Human
uuugaggauauauuu

SEQ ID NO: 3685058 - RNA, 23 nt, Human
uuugagggacaaauuuaaaacaa

SEQ ID NO: 3685059 - RNA, 23 nt, Human
uuugaggggaggaguuccacaga

SEQ ID NO: 3685060 - RNA, 11 nt, Human
uuugaggggcu

SEQ ID NO: 3685061 - RNA, 21 nt, Human
uuugaggguguauauuuucug

SEQ ID NO: 3685062 - RNA, 15 nt, Human
uuugagguaaagaua

SEQ ID NO: 3685063 - RNA, 17 nt, Human
uuugaggucuguucuuu

SEQ ID NO: 3685064 - RNA, 16 nt, Human
uuugagguggaagagg

SEQ ID NO: 3685065 - RNA, 21 nt, Human
uuugagugccuuacacaaugg

SEQ ID NO: 3685066 - RNA, 22 nt, Human
uuugaguggaguuacugaacag

SEQ ID NO: 3685067 - RNA, 18 nt, Human
uuugagugugugugugca

SEQ ID NO: 3685068 - RNA, 20 nt, Human
uuugauaaaguaguaaaaau

SEQ ID NO: 3685069 - RNA, 13 nt, Human
uuugauaaaguuu

SEQ ID NO: 3685070 - RNA, 18 nt, Human
uuugauaaaguuucucag

SEQ ID NO: 3685071 - RNA, 13 nt, Human
uuugauaaauagu

SEQ ID NO: 3685072 - RNA, 15 nt, Human
uuugauaacuguuua

SEQ ID NO: 3685073 - RNA, 18 nt, Human
uuugauaaucaacugggc

SEQ ID NO: 3685074 - RNA, 19 nt, Human
uuugauaauguuaaauuug

SEQ ID NO: 3685075 - RNA, 22 nt, Human
uuugauacagucaacaagccug

SEQ ID NO: 3685076 - RNA, 21 nt, Human
uuugauacaguuuucagaaaa

SEQ ID NO: 3685077 - RNA, 22 nt, Human
uuugauacaguuuucagaaaaa

SEQ ID NO: 3685078 - RNA, 16 nt, Human
uuugauaccccugggg

SEQ ID NO: 3685079 - RNA, 16 nt, Human
uuugauacuaagcauu

SEQ ID NO: 3685080 - RNA, 13 nt, Human
uuugauacuuaua

SEQ ID NO: 3685081 - RNA, 14 nt, Human
uuugauacuuauau

SEQ ID NO: 3685082 - RNA, 18 nt, Human
uuugauacuuauauuuuc

SEQ ID NO: 3685083 - RNA, 15 nt, Human
uuugauacuuguuca

SEQ ID NO: 3685084 - RNA, 21 nt, Human
uuugauagauuuucugcuacu

SEQ ID NO: 3685085 - RNA, 21 nt, Human
uuugauauaccaaauuaaaaa

SEQ ID NO: 3685086 - RNA, 20 nt, Human
uuugauaucacagucuaauu

SEQ ID NO: 3685087 - RNA, 23 nt, Human
uuugauauccaaagcugaauaca

SEQ ID NO: 3685088 - RNA, 19 nt, Human
uuugauaugaguauacaau

SEQ ID NO: 3685089 - RNA, 20 nt, Human
uuugauaugcauauuuguuu

SEQ ID NO: 3685090 - RNA, 17 nt, Human
uuugaucaguauaauuu

SEQ ID NO: 3685091 - RNA, 12 nt, Human
uuugaucaugaa

SEQ ID NO: 3685092 - RNA, 19 nt, Human
uuugaucaugaauaacuga

SEQ ID NO: 3685093 - RNA, 14 nt, Human
uuugaucucacauu

SEQ ID NO: 3685094 - RNA, 12 nt, Human
uuugaucuucaa

SEQ ID NO: 3685095 - RNA, 19 nt, Human
uuugaucuuccucugcuaa

SEQ ID NO: 3685096 - RNA, 20 nt, Human
uuugaucuuccucugcuaaa

SEQ ID NO: 3685097 - RNA, 15 nt, Human
uuugaugaguuguga

SEQ ID NO: 3685098 - RNA, 16 nt, Human
uuugaugcagcauuug

SEQ ID NO: 3685099 - RNA, 16 nt, Human
uuugaugcuggagagg

SEQ ID NO: 3685100 - RNA, 15 nt, Human
uuugaugcuguuuga

SEQ ID NO: 3685101 - RNA, 20 nt, Human
uuugauguaaagauguucug

SEQ ID NO: 3685102 - RNA, 14 nt, Human
uuugaugucagcag

SEQ ID NO: 3685103 - RNA, 17 nt, Human
uuugaugucagcaguug

SEQ ID NO: 3685104 - RNA, 21 nt, Human
uuugaugucagcaguugcugg

SEQ ID NO: 3685105 - RNA, 18 nt, Human
uuugaugucauguguucc

SEQ ID NO: 3685106 - RNA, 14 nt, Human
uuugaugugacaau

SEQ ID NO: 3685107 - RNA, 11 nt, Human
uuugauguuaa

SEQ ID NO: 3685108 - RNA, 17 nt, Human
uuugauguuccuuccag

SEQ ID NO: 3685109 - RNA, 23 nt, Human
uuugauguucuuucacccuuuuc

SEQ ID NO: 3685110 - RNA, 17 nt, Human
uuugauguuuguggccu

SEQ ID NO: 3685111 - RNA, 19 nt, Human
uuugauguuuguggccuca

SEQ ID NO: 3685112 - RNA, 21 nt, Human
uuugauuaaauucuugcaaag

SEQ ID NO: 3685113 - RNA, 23 nt, Human
uuugauuaaauucuugcaaagua

SEQ ID NO: 3685114 - RNA, 15 nt, Human
uuugauuaacaaaua

SEQ ID NO: 3685115 - RNA, 15 nt, Human
uuugauuaugacugu

SEQ ID NO: 3685116 - RNA, 13 nt, Human
uuugauucacaug

SEQ ID NO: 3685117 - RNA, 21 nt, Human
uuugauucagacagcugccug

SEQ ID NO: 3685118 - RNA, 15 nt, Human
uuugauucauaguaa

SEQ ID NO: 3685119 - RNA, 20 nt, Human
uuugauucauaguaacuucu

SEQ ID NO: 3685120 - RNA, 12 nt, Human
uuugauucuccu

SEQ ID NO: 3685121 - RNA, 21 nt, Human
uuugauucuccuucagcccuc

SEQ ID NO: 3685122 - RNA, 22 nt, Human
uuugauugagaguaacuuaagu

SEQ ID NO: 3685123 - RNA, 15 nt, Human
uuugauuuacagcaa

SEQ ID NO: 3685124 - RNA, 17 nt, Human
uuugauuuacagcaagu

SEQ ID NO: 3685125 - RNA, 20 nt, Human
uuugauuuccaaguaauaua

SEQ ID NO: 3685126 - RNA, 13 nt, Human
uuugauuucuauu

SEQ ID NO: 3685127 - RNA, 20 nt, Human
uuugcaaaaaauguuuuugg

SEQ ID NO: 3685128 - RNA, 12 nt, Human
uuugcaaaauuu

SEQ ID NO: 3685129 - RNA, 19 nt, Human
uuugcaaacccgaaaauaa

SEQ ID NO: 3685130 - RNA, 15 nt, Human
uuugcaaaggagcuc

SEQ ID NO: 3685131 - RNA, 11 nt, Human
uuugcaaagua

SEQ ID NO: 3685132 - RNA, 13 nt, Human
uuugcaaaguacu

SEQ ID NO: 3685133 - RNA, 14 nt, Human
uuugcaaaguacug

SEQ ID NO: 3685134 - RNA, 15 nt, Human
uuugcaaaguacugu

SEQ ID NO: 3685135 - RNA, 23 nt, Human
uuugcaaaguacuguaagaauaa

SEQ ID NO: 3685136 - RNA, 13 nt, Human
uuugcaaauaagu

SEQ ID NO: 3685137 - RNA, 14 nt, Human
uuugcaaccucgcu

SEQ ID NO: 3685138 - RNA, 21 nt, Human
uuugcaaggaagccacagcug

SEQ ID NO: 3685139 - RNA, 21 nt, Human
uuugcaaggugcauuuuuacu

SEQ ID NO: 3685140 - RNA, 16 nt, Human
uuugcaagugaagguu

SEQ ID NO: 3685141 - RNA, 16 nt, Human
uuugcaauaacagcug

SEQ ID NO: 3685142 - RNA, 19 nt, Human
uuugcaauaacagcugcaa

SEQ ID NO: 3685143 - RNA, 22 nt, Human
uuugcaauaaugcaguauggua

SEQ ID NO: 3685144 - RNA, 12 nt, Human
uuugcacaaaaa

SEQ ID NO: 3685145 - RNA, 22 nt, Human
uuugcacacuuuggcccagggu

SEQ ID NO: 3685146 - RNA, 16 nt, Human
uuugcacagcucuccg

SEQ ID NO: 3685147 - RNA, 12 nt, Human
uuugcacauuaa

SEQ ID NO: 3685148 - RNA, 13 nt, Human
uuugcacauuaaa

SEQ ID NO: 3685149 - RNA, 17 nt, Human
uuugcaccccaugcugu

SEQ ID NO: 3685150 - RNA, 16 nt, Human
uuugcaccccucccau

SEQ ID NO: 3685151 - RNA, 23 nt, Human
uuugcaccuguccccacccucca

SEQ ID NO: 3685152 - RNA, 17 nt, Human
uuugcaccuuucuaguu

SEQ ID NO: 3685153 - RNA, 20 nt, Human
uuugcaccuuucuaguugaa

SEQ ID NO: 3685154 - RNA, 20 nt, Human
uuugcacgacgcccucuccc

SEQ ID NO: 3685155 - RNA, 21 nt, Human
uuugcacgacgcccucucccc

SEQ ID NO: 3685156 - RNA, 20 nt, Human
uuugcacuaagauauuucca

SEQ ID NO: 3685157 - RNA, 14 nt, Human
uuugcacugagggc

SEQ ID NO: 3685158 - RNA, 18 nt, Human
uuugcacugauauaucau

SEQ ID NO: 3685159 - RNA, 21 nt, Human
uuugcacuugugauuauuuau

SEQ ID NO: 3685160 - RNA, 13 nt, Human
uuugcacuuuucu

SEQ ID NO: 3685161 - RNA, 20 nt, Human
uuugcagaaaagcaccugcc

SEQ ID NO: 3685162 - RNA, 22 nt, Human
uuugcagaaaagcaccugccga

SEQ ID NO: 3685163 - RNA, 21 nt, Human
uuugcagaggcuaugggaaga

SEQ ID NO: 3685164 - RNA, 16 nt, Human
uuugcagaugacaaaa

SEQ ID NO: 3685165 - RNA, 15 nt, Human
uuugcaggaaauccu

SEQ ID NO: 3685166 - RNA, 14 nt, Human
uuugcaguaacugu

SEQ ID NO: 3685167 - RNA, 18 nt, Human
uuugcauaacaauuccuc

SEQ ID NO: 3685168 - RNA, 17 nt, Human
uuugcauacauucuuca

SEQ ID NO: 3685169 - RNA, 18 nt, Human
uuugcauacauucuucaa

SEQ ID NO: 3685170 - RNA, 11 nt, Human
uuugcauaucc

SEQ ID NO: 3685171 - RNA, 15 nt, Human
uuugcauauguauga

SEQ ID NO: 3685172 - RNA, 20 nt, Human
uuugcaucguccccuccccc

SEQ ID NO: 3685173 - RNA, 22 nt, Human
uuugcaucugaaauaggaaaca

SEQ ID NO: 3685174 - RNA, 15 nt, Human
uuugcauguuauguu

SEQ ID NO: 3685175 - RNA, 14 nt, Human
uuugcauuaaauua

SEQ ID NO: 3685176 - RNA, 17 nt, Human
uugcaggguccucuucu

SEQ ID NO: 3685177 - RNA, 16 nt, Human
uugcagguucauggau

SEQ ID NO: 3685178 - RNA, 22 nt, Human
uugcaguaaacuuuuaauuaaa

SEQ ID NO: 3685179 - RNA, 13 nt, Human
uugcaguaacugu

SEQ ID NO: 3685180 - RNA, 15 nt, Human
uugcaguaacuguuu

SEQ ID NO: 3685181 - RNA, 16 nt, Human
uugcagugagcugaga

SEQ ID NO: 3685182 - RNA, 20 nt, Human
uugcaguguggugagaucau

SEQ ID NO: 3685183 - RNA, 13 nt, Human
uugcaguucaccu

SEQ ID NO: 3685184 - RNA, 13 nt, Human
uugcaguucuuga

SEQ ID NO: 3685185 - RNA, 19 nt, Human
uugcaguuuaucauucaag

SEQ ID NO: 3685186 - RNA, 15 nt, Human
uugcaguuuuucauu

SEQ ID NO: 3685187 - RNA, 12 nt, Human
uugcauaauaaa

SEQ ID NO: 3685188 - RNA, 13 nt, Human
uugcauacaaaca

SEQ ID NO: 3685189 - RNA, 14 nt, Human
uugcauacaaacaa

SEQ ID NO: 3685190 - RNA, 22 nt, Human
uugcauacauucuucaagaucc

SEQ ID NO: 3685191 - RNA, 16 nt, Human
uugcauacugagccaa

SEQ ID NO: 3685192 - RNA, 16 nt, Human
uugcauacuuuguauu

SEQ ID NO: 3685193 - RNA, 21 nt, Human
uugcauacuuuguauuuugau

SEQ ID NO: 3685194 - RNA, 18 nt, Human
uugcauagauucccugag

SEQ ID NO: 3685195 - RNA, 14 nt, Human
uugcauauaacuua

SEQ ID NO: 3685196 - RNA, 22 nt, Human
uugcauauaacuuauauuguaa

SEQ ID NO: 3685197 - RNA, 23 nt, Human
uugcauauaagggaaguaguuau

SEQ ID NO: 3685198 - RNA, 22 nt, Human
uugcauauauuucaugaauaca

SEQ ID NO: 3685199 - RNA, 22 nt, Human
uugcaucacuuaacggaccaaa

SEQ ID NO: 3685200 - RNA, 19 nt, Human
uugcaucagaaagcuuuau

SEQ ID NO: 3685201 - RNA, 22 nt, Human
uugcaucagaaaugucuggaga

SEQ ID NO: 3685202 - RNA, 18 nt, Human
uugcauccuuccuauaac

SEQ ID NO: 3685203 - RNA, 19 nt, Human
uugcaucguccccuccccc

SEQ ID NO: 3685204 - RNA, 18 nt, Human
uugcaucuagguaauuuu

SEQ ID NO: 3685205 - RNA, 18 nt, Human
uugcaucucaaaauuauu

SEQ ID NO: 3685206 - RNA, 19 nt, Human
uugcaucuggguagcugua

SEQ ID NO: 3685207 - RNA, 14 nt, Human
uugcaucuguauaa

SEQ ID NO: 3685208 - RNA, 16 nt, Human
uugcaugaagagaagc

SEQ ID NO: 3685209 - RNA, 15 nt, Human
uugcaugauguauuu

SEQ ID NO: 3685210 - RNA, 16 nt, Human
uugcaugcaugcaaau

SEQ ID NO: 3685211 - RNA, 23 nt, Human
uugcauggaaaucagccaaguuu

SEQ ID NO: 3685212 - RNA, 19 nt, Human
uugcauggcuccagaaaug

SEQ ID NO: 3685213 - RNA, 17 nt, Human
uugcaugggcuaaugaa

SEQ ID NO: 3685214 - RNA, 19 nt, Human
uugcaugguuuggagcuga

SEQ ID NO: 3685215 - RNA, 17 nt, Human
uugcauguaaaagccua

SEQ ID NO: 3685216 - RNA, 21 nt, Human
uugcauguaguaacacuaaua

SEQ ID NO: 3685217 - RNA, 23 nt, Human
uugcauguaucuucuaagaauuu

SEQ ID NO: 3685218 - RNA, 16 nt, Human
uugcauguuauguuua

SEQ ID NO: 3685219 - RNA, 15 nt, Human
uugcauuaaauuaca

SEQ ID NO: 3685220 - RNA, 13 nt, Human
uugcauuaaauuc

SEQ ID NO: 3685221 - RNA, 22 nt, Human
uugcauuaaauucacaaacuuu

SEQ ID NO: 3685222 - RNA, 14 nt, Human
uugcauuaugcaau

SEQ ID NO: 3685223 - RNA, 12 nt, Human
uugcauucaaau

SEQ ID NO: 3685224 - RNA, 18 nt, Human
uugcauucuauugccuuc

SEQ ID NO: 3685225 - RNA, 19 nt, Human
uugcauucuauugccuucu

SEQ ID NO: 3685226 - RNA, 20 nt, Human
uugcauucuauugccuucuu

SEQ ID NO: 3685227 - RNA, 14 nt, Human
uugcauugaacaca

SEQ ID NO: 3685228 - RNA, 23 nt, Human
uugcauugaacacaaacuguaaa

SEQ ID NO: 3685229 - RNA, 21 nt, Human
uugcauugaccgcgacuaauu

SEQ ID NO: 3685230 - RNA, 13 nt, Human
uugcauugucugu

SEQ ID NO: 3685231 - RNA, 15 nt, Human
uugcauuuaaaacag

SEQ ID NO: 3685232 - RNA, 15 nt, Human
uugcauuuauaugua

SEQ ID NO: 3685233 - RNA, 20 nt, Human
uugcauuuauauguaccgua

SEQ ID NO: 3685234 - RNA, 15 nt, Human
uugcauuugcucuuu

SEQ ID NO: 3685235 - RNA, 19 nt, Human
uugccaaaacccagcugca

SEQ ID NO: 3685236 - RNA, 19 nt, Human
uugccaaacauuaauguug

SEQ ID NO: 3685237 - RNA, 20 nt, Human
uugccaaacauuaauguuga

SEQ ID NO: 3685238 - RNA, 24 nt, Human
uugccaaacauuaauguugauuuc

SEQ ID NO: 3685239 - RNA, 21 nt, Human
uugccaaauaaaguuaaaagu

SEQ ID NO: 3685240 - RNA, 22 nt, Human
uugccaaauaaaguuaaaagua

SEQ ID NO: 3685241 - RNA, 17 nt, Human
uugccaaauauguccug

SEQ ID NO: 3685242 - RNA, 13 nt, Human
uugccaacauugc

SEQ ID NO: 3685243 - RNA, 18 nt, Human
uugccaaccuguaauaaa

SEQ ID NO: 3685244 - RNA, 19 nt, Human
uugccaaccuguaauaaau

SEQ ID NO: 3685245 - RNA, 20 nt, Human
uugccaagaacugaaaacau

SEQ ID NO: 3685246 - RNA, 13 nt, Human
uugccaagacaaa

SEQ ID NO: 3685247 - RNA, 15 nt, Human
uugccaagacaaauc

SEQ ID NO: 3685248 - RNA, 15 nt, Human
uugccaagagcccgu

SEQ ID NO: 3685249 - RNA, 16 nt, Human
uugccaaggcagaggc

SEQ ID NO: 3685250 - RNA, 18 nt, Human
uugccaauagugucaucc

SEQ ID NO: 3685251 - RNA, 15 nt, Human
uugccacaacccugu

SEQ ID NO: 3685252 - RNA, 18 nt, Human
uugccacagcuuuugcaa

SEQ ID NO: 3685253 - RNA, 18 nt, Human
uugccacaggacacaguc

SEQ ID NO: 3685254 - RNA, 11 nt, Human
uugccacaggc

SEQ ID NO: 3685255 - RNA, 18 nt, Human
uugccacaggccucccug

SEQ ID NO: 3685256 - RNA, 17 nt, Human
uugccacaguagaacug

SEQ ID NO: 3685257 - RNA, 18 nt, Human
uugccacaguagaacugu

SEQ ID NO: 3685258 - RNA, 21 nt, Human
uugccaccaacuggcccucuu

SEQ ID NO: 3685259 - RNA, 18 nt, Human
uugccaccccacccuccc

SEQ ID NO: 3685260 - RNA, 23 nt, Human
uugccaccccacccucccuggag

SEQ ID NO: 3685261 - RNA, 20 nt, Human
uugccaccucuaacagcacc

SEQ ID NO: 3685262 - RNA, 14 nt, Human
uugccacugauauu

SEQ ID NO: 3685263 - RNA, 18 nt, Human
uugccacugccucuuccu

SEQ ID NO: 3685264 - RNA, 19 nt, Human
uugccagagauccaaaaga

SEQ ID NO: 3685265 - RNA, 15 nt, Human
uugccagcccauuug

SEQ ID NO: 3685266 - RNA, 20 nt, Human
uugccagcccauuugggcag

SEQ ID NO: 3685267 - RNA, 19 nt, Human
uugccagcuuuuccucccu

SEQ ID NO: 3685268 - RNA, 23 nt, Human
uugccaggcuggagugcaguggc

SEQ ID NO: 3685269 - RNA, 19 nt, Human
uugccaguaacacaggcca

SEQ ID NO: 3685270 - RNA, 21 nt, Human
uugccagucuuuuguccugca

SEQ ID NO: 3685271 - RNA, 21 nt, Human
uugccagugucuuucuuuggu

SEQ ID NO: 3685272 - RNA, 17 nt, Human
uugccauagaguacacu

SEQ ID NO: 3685273 - RNA, 23 nt, Human
uugccauagaguacacugccugc

SEQ ID NO: 3685274 - RNA, 15 nt, Human
uugccauauugcaca

SEQ ID NO: 3685275 - RNA, 17 nt, Human
uugccauauugcacaug

SEQ ID NO: 3685276 - RNA, 23 nt, Human
uugccauauugcacaugucuuaa

SEQ ID NO: 3685277 - RNA, 14 nt, Human
uugccaucccuccc

SEQ ID NO: 3685278 - RNA, 15 nt, Human
uugccaucucugcuc

SEQ ID NO: 3685279 - RNA, 23 nt, Human
uugccaugacaacuucuaauugc

SEQ ID NO: 3685280 - RNA, 21 nt, Human
uugccaugggcuucacuguau

SEQ ID NO: 3685281 - RNA, 14 nt, Human
uugccauguguuuu

SEQ ID NO: 3685282 - RNA, 17 nt, Human
uugccauguuggccagg

SEQ ID NO: 3685283 - RNA, 21 nt, Human
uugccauguuggccaggcugg

SEQ ID NO: 3685284 - RNA, 16 nt, Human
uugccauuaaaaugua

SEQ ID NO: 3685285 - RNA, 21 nt, Human
uugccauuugauaccccuggg

SEQ ID NO: 3685286 - RNA, 17 nt, Human
uugcccaaaucugccua

SEQ ID NO: 3685287 - RNA, 18 nt, Human
uugcccaacaccagcccc

SEQ ID NO: 3685288 - RNA, 19 nt, Human
uugcccaacaccagccccu

SEQ ID NO: 3685289 - RNA, 20 nt, Human
uugcccaacaccagccccug

SEQ ID NO: 3685290 - RNA, 15 nt, Human
uugcccacuccugcu

SEQ ID NO: 3685291 - RNA, 22 nt, Human
uugcccagagaugccuccaccg

SEQ ID NO: 3685292 - RNA, 22 nt, Human
uugcccagcauuuuacugauuc

SEQ ID NO: 3685293 - RNA, 12 nt, Human
uugcccagccuc

SEQ ID NO: 3685294 - RNA, 15 nt, Human
uugcccagccuggau

SEQ ID NO: 3685295 - RNA, 16 nt, Human
uugcccaggcaggucu

SEQ ID NO: 3685296 - RNA, 18 nt, Human
uugcccaggcaggucuug

SEQ ID NO: 3685297 - RNA, 18 nt, Human
uugcccagggcucagccu

SEQ ID NO: 3685298 - RNA, 15 nt, Human
uugcccauccaucug

SEQ ID NO: 3685299 - RNA, 16 nt, Human
uugcccauccugacug

SEQ ID NO: 3685300 - RNA, 17 nt, Human
uugcccauccugacuga

SEQ ID NO: 3685301 - RNA, 15 nt, Human
uugcccaugauauaa

SEQ ID NO: 3685302 - RNA, 14 nt, Human
uugccccaucacug

SEQ ID NO: 3685303 - RNA, 13 nt, Human
uugcccccauuuc

SEQ ID NO: 3685304 - RNA, 12 nt, Human
uugccccccacc

SEQ ID NO: 3685305 - RNA, 19 nt, Human
uugccccccaccccagccu

SEQ ID NO: 3685306 - RNA, 22 nt, Human
uugcccccugcccguguacaua

SEQ ID NO: 3685307 - RNA, 13 nt, Human
uugcccugggaaa

SEQ ID NO: 3685308 - RNA, 16 nt, Human
uugcccuucacagugu

SEQ ID NO: 3685309 - RNA, 17 nt, Human
uugcccuucacaguguu

SEQ ID NO: 3685310 - RNA, 13 nt, Human
uugcccuucccug

SEQ ID NO: 3685311 - RNA, 14 nt, Human
uugcccuucccugu

SEQ ID NO: 3685312 - RNA, 18 nt, Human
uugcccuugcccugaccu

SEQ ID NO: 3685313 - RNA, 22 nt, Human
uugcccuuuacuugucuuucug

SEQ ID NO: 3685314 - RNA, 17 nt, Human
uugccgaggagccaggc

SEQ ID NO: 3685315 - RNA, 19 nt, Human
uugccgucuaccugagggg

SEQ ID NO: 3685316 - RNA, 19 nt, Human
uugccuaagaauaaacauu

SEQ ID NO: 3685317 - RNA, 23 nt, Human
uugccuaagaauaaacauuuguu

SEQ ID NO: 3685318 - RNA, 20 nt, Human
uugccuaagcauugccuggc

SEQ ID NO: 3685319 - RNA, 14 nt, Human
uugccuaaguauua

SEQ ID NO: 3685320 - RNA, 16 nt, Human
uugccuaaguauuaaa

SEQ ID NO: 3685321 - RNA, 18 nt, Human
uugccuaaguauuccuuu

SEQ ID NO: 3685322 - RNA, 22 nt, Human
uugccuaauacauuaaagcagu

SEQ ID NO: 3685323 - RNA, 23 nt, Human
uugccuaauacauuaaagcaguc

SEQ ID NO: 3685324 - RNA, 20 nt, Human
uugccuauaagccaaaauua

SEQ ID NO: 3685325 - RNA, 13 nt, Human
uauuuaaaagauu

SEQ ID NO: 3685326 - RNA, 15 nt, Human
uauuuaaaaguguca

SEQ ID NO: 3685327 - RNA, 23 nt, Human
uauuuaaaauagcaaaagaagaa

SEQ ID NO: 3685328 - RNA, 15 nt, Human
uauuuaaaauguaaa

SEQ ID NO: 3685329 - RNA, 24 nt, Human
uauuuaaacucuguugcaagugca

SEQ ID NO: 3685330 - RNA, 13 nt, Human
uauuuaaagcauu

SEQ ID NO: 3685331 - RNA, 18 nt, Human
uauuuaaauuacaauuuu

SEQ ID NO: 3685332 - RNA, 12 nt, Human
uauuuaacagaa

SEQ ID NO: 3685333 - RNA, 19 nt, Human
uauuuaacagaaauuguau

SEQ ID NO: 3685334 - RNA, 15 nt, Human
uauuuaacagcugaa

SEQ ID NO: 3685335 - RNA, 18 nt, Human
uauuuaaccucuaaauuc

SEQ ID NO: 3685336 - RNA, 11 nt, Human
uauuuaacuga

SEQ ID NO: 3685337 - RNA, 21 nt, Human
uauuuaacugccuuguguaca

SEQ ID NO: 3685338 - RNA, 22 nt, Human
uauuuaacuggugcacuuugua

SEQ ID NO: 3685339 - RNA, 13 nt, Human
uauuuaacuucug

SEQ ID NO: 3685340 - RNA, 20 nt, Human
uauuuaacuugagcuuuaaa

SEQ ID NO: 3685341 - RNA, 14 nt, Human
uauuuaagaaaaua

SEQ ID NO: 3685342 - RNA, 19 nt, Human
uauuuaagaaaauacaaua

SEQ ID NO: 3685343 - RNA, 20 nt, Human
uauuuaagaaaauacaauaa

SEQ ID NO: 3685344 - RNA, 22 nt, Human
uauuuaagaaaauacaauaaac

SEQ ID NO: 3685345 - RNA, 17 nt, Human
uauuuaagauaauuaua

SEQ ID NO: 3685346 - RNA, 13 nt, Human
uauuuaagaugug

SEQ ID NO: 3685347 - RNA, 17 nt, Human
uauuuaagcaaauacuu

SEQ ID NO: 3685348 - RNA, 17 nt, Human
uauuuaagcaacaucuu

SEQ ID NO: 3685349 - RNA, 18 nt, Human
uauuuaagccuaaagauu

SEQ ID NO: 3685350 - RNA, 21 nt, Human
uauuuaagccucauauuuaaa

SEQ ID NO: 3685351 - RNA, 16 nt, Human
uauuuaagcuuauguc

SEQ ID NO: 3685352 - RNA, 18 nt, Human
uauuuaagguagcuucag

SEQ ID NO: 3685353 - RNA, 16 nt, Human
uauuuaaguauucaag

SEQ ID NO: 3685354 - RNA, 10 nt, Human
uauuuaauaa

SEQ ID NO: 3685355 - RNA, 14 nt, Human
uauuuaauaacauu

SEQ ID NO: 3685356 - RNA, 15 nt, Human
uauuuaauaacauua

SEQ ID NO: 3685357 - RNA, 19 nt, Human
uauuuaauagcaaagaauu

SEQ ID NO: 3685358 - RNA, 20 nt, Human
uauuuaauagcaaagaauug

SEQ ID NO: 3685359 - RNA, 15 nt, Human
uauuuaaugaaagac

SEQ ID NO: 3685360 - RNA, 17 nt, Human
uauuuaaugcauuaaac

SEQ ID NO: 3685361 - RNA, 22 nt, Human
uauuuaaugcauuaaaccuguc

SEQ ID NO: 3685362 - RNA, 14 nt, Human
uauuuaauguugaa

SEQ ID NO: 3685363 - RNA, 15 nt, Human
uauuuaauguugaac

SEQ ID NO: 3685364 - RNA, 12 nt, Human
uauuuaauguuu

SEQ ID NO: 3685365 - RNA, 16 nt, Human
uauuuaauguuuuaaa

SEQ ID NO: 3685366 - RNA, 18 nt, Human
uauuuaauguuuuaaaug

SEQ ID NO: 3685367 - RNA, 21 nt, Human
uauuuaauguuuuaaauguac

SEQ ID NO: 3685368 - RNA, 16 nt, Human
uauuuaauuagugcua

SEQ ID NO: 3685369 - RNA, 23 nt, Human
uauuuaauuauuaacuacauuua

SEQ ID NO: 3685370 - RNA, 13 nt, Human
uauuuaauuguaa

SEQ ID NO: 3685371 - RNA, 14 nt, Human
uauuuaauuguaaa

SEQ ID NO: 3685372 - RNA, 15 nt, Human
uauuuaauuguaaac

SEQ ID NO: 3685373 - RNA, 23 nt, Human
uauuuaauuugaagguagaaugu

SEQ ID NO: 3685374 - RNA, 20 nt, Human
uauuuacaacacuuuaaugg

SEQ ID NO: 3685375 - RNA, 11 nt, Human
uauuuacaaga

SEQ ID NO: 3685376 - RNA, 16 nt, Human
uauuuacaauguauua

SEQ ID NO: 3685377 - RNA, 17 nt, Human
uauuuacaauguauuaa

SEQ ID NO: 3685378 - RNA, 21 nt, Human
uauuuacaugaauugcauuuu

SEQ ID NO: 3685379 - RNA, 17 nt, Human
uauuuaccccuccccua

SEQ ID NO: 3685380 - RNA, 14 nt, Human
uauuuaccucagcc

SEQ ID NO: 3685381 - RNA, 16 nt, Human
uauuuaccucagccug

SEQ ID NO: 3685382 - RNA, 17 nt, Human
uauuuaccucagccugg

SEQ ID NO: 3685383 - RNA, 14 nt, Human
uauuuacuaccuua

SEQ ID NO: 3685384 - RNA, 19 nt, Human
uauuuacuucguuuugguu

SEQ ID NO: 3685385 - RNA, 20 nt, Human
uauuuagacaagagauggga

SEQ ID NO: 3685386 - RNA, 21 nt, Human
uauuuagacucaucuuacugu

SEQ ID NO: 3685387 - RNA, 23 nt, Human
uauuuagaugauaaagagacagu

SEQ ID NO: 3685388 - RNA, 20 nt, Human
uauuuagaugcauauuacug

SEQ ID NO: 3685389 - RNA, 20 nt, Human
uauuuagauucacuuaacaa

SEQ ID NO: 3685390 - RNA, 15 nt, Human
uauuuaggaaguguu

SEQ ID NO: 3685391 - RNA, 17 nt, Human
uauuuagggaacugcuu

SEQ ID NO: 3685392 - RNA, 18 nt, Human
uauuuagggaacugcuug

SEQ ID NO: 3685393 - RNA, 14 nt, Human
uauuuagugcugca

SEQ ID NO: 3685394 - RNA, 19 nt, Human
uauuuaguguucauaaaua

SEQ ID NO: 3685395 - RNA, 14 nt, Human
uauuuauaaaacuu

SEQ ID NO: 3685396 - RNA, 16 nt, Human
uauuuauaaagaaugu

SEQ ID NO: 3685397 - RNA, 19 nt, Human
uauuuauaaauauauuuaa

SEQ ID NO: 3685398 - RNA, 21 nt, Human
uauuuauaacucaucauaaaa

SEQ ID NO: 3685399 - RNA, 17 nt, Human
uauuuauaagcagauuu

SEQ ID NO: 3685400 - RNA, 18 nt, Human
uauuuauaauacagaauc

SEQ ID NO: 3685401 - RNA, 20 nt, Human
uauuuauacaagauugaaaa

SEQ ID NO: 3685402 - RNA, 18 nt, Human
uauuuauagcaauccaug

SEQ ID NO: 3685403 - RNA, 14 nt, Human
uauuuauauauauu

SEQ ID NO: 3685404 - RNA, 16 nt, Human
uauuuauauauguauu

SEQ ID NO: 3685405 - RNA, 23 nt, Human
uauuuauauauguauuuauaaau

SEQ ID NO: 3685406 - RNA, 20 nt, Human
uauuuauauauugguaacau

SEQ ID NO: 3685407 - RNA, 18 nt, Human
uauuuauauauuuauaac

SEQ ID NO: 3685408 - RNA, 19 nt, Human
uauuuauauauuuauaacu

SEQ ID NO: 3685409 - RNA, 12 nt, Human
uauuuauaugua

SEQ ID NO: 3685410 - RNA, 16 nt, Human
uauuuauauguacugu

SEQ ID NO: 3685411 - RNA, 14 nt, Human
uauuuauauguaug

SEQ ID NO: 3685412 - RNA, 15 nt, Human
uauuuauauguaugu

SEQ ID NO: 3685413 - RNA, 19 nt, Human
uauuuauauguauguguuu

SEQ ID NO: 3685414 - RNA, 15 nt, Human
uauuuauauuuauug

SEQ ID NO: 3685415 - RNA, 13 nt, Human
uauuuaucacaua

SEQ ID NO: 3685416 - RNA, 15 nt, Human
uauuuaucagugaca

SEQ ID NO: 3685417 - RNA, 23 nt, Human
uauuuauccagaaaacugugauu

SEQ ID NO: 3685418 - RNA, 21 nt, Human
uauuuaucugauuaaguuguc

SEQ ID NO: 3685419 - RNA, 22 nt, Human
uauuuaucuguguuuuugaaau

SEQ ID NO: 3685420 - RNA, 12 nt, Human
uauuuaucuuua

SEQ ID NO: 3685421 - RNA, 20 nt, Human
uauuuaugaagaaaauacuu

SEQ ID NO: 3685422 - RNA, 21 nt, Human
uauuuaugaagaaaauacuua

SEQ ID NO: 3685423 - RNA, 15 nt, Human
uauuuaugaaguuua

SEQ ID NO: 3685424 - RNA, 13 nt, Human
uauuuauguaugg

SEQ ID NO: 3685425 - RNA, 13 nt, Human
uauuuauguauug

SEQ ID NO: 3685426 - RNA, 23 nt, Human
uauuuauuaaaugcccagccccu

SEQ ID NO: 3685427 - RNA, 13 nt, Human
uauuuauuaacag

SEQ ID NO: 3685428 - RNA, 14 nt, Human
uauuuauuacauaa

SEQ ID NO: 3685429 - RNA, 16 nt, Human
uauuuauuacauaauu

SEQ ID NO: 3685430 - RNA, 19 nt, Human
uauuuauuaugcuuuauug

SEQ ID NO: 3685431 - RNA, 13 nt, Human
uauuuauucaaua

SEQ ID NO: 3685432 - RNA, 16 nt, Human
uauuuauucaauaaag

SEQ ID NO: 3685433 - RNA, 19 nt, Human
uauuuauucaauaaaguau

SEQ ID NO: 3685434 - RNA, 12 nt, Human
uauuuauucauu

SEQ ID NO: 3685435 - RNA, 22 nt, Human
uauuuauucauuauuugucaaa

SEQ ID NO: 3685436 - RNA, 20 nt, Human
uauuuauugaaaugauuuca

SEQ ID NO: 3685437 - RNA, 12 nt, Human
uauuuauugacu

SEQ ID NO: 3685438 - RNA, 14 nt, Human
uauuuauugcuuua

SEQ ID NO: 3685439 - RNA, 11 nt, Human
uauuuauuuaa

SEQ ID NO: 3685440 - RNA, 16 nt, Human
uauuuauuuaaaagau

SEQ ID NO: 3685441 - RNA, 19 nt, Human
uauuuauuuaaaagauuca

SEQ ID NO: 3685442 - RNA, 13 nt, Human
uauuuauuuaaau

SEQ ID NO: 3685443 - RNA, 16 nt, Human
uauuuauuuacaaaug

SEQ ID NO: 3685444 - RNA, 13 nt, Human
uauuuauuuaugg

SEQ ID NO: 3685445 - RNA, 13 nt, Human
uauuuauuuaugu

SEQ ID NO: 3685446 - RNA, 14 nt, Human
uauuuauuuaugua

SEQ ID NO: 3685447 - RNA, 14 nt, Human
uauuuauuuuaaua

SEQ ID NO: 3685448 - RNA, 18 nt, Human
uauuuauuuuaauaaugu

SEQ ID NO: 3685449 - RNA, 16 nt, Human
uauuuauuuuccuaaa

SEQ ID NO: 3685450 - RNA, 20 nt, Human
uauuuauuuuccuaaagaga

SEQ ID NO: 3685451 - RNA, 18 nt, Human
uauuuauuuuccucccca

SEQ ID NO: 3685452 - RNA, 13 nt, Human
uauuuauuuugua

SEQ ID NO: 3685453 - RNA, 20 nt, Human
uauuuauuuuguaauuauga

SEQ ID NO: 3685454 - RNA, 20 nt, Human
uauuuauuuuuuuuaaguau

SEQ ID NO: 3685455 - RNA, 20 nt, Human
uauuuauuuuuuuuaauugu

SEQ ID NO: 3685456 - RNA, 21 nt, Human
uauuucaaaaauuuggaauuc

SEQ ID NO: 3685457 - RNA, 14 nt, Human
uauuucaagacauu

SEQ ID NO: 3685458 - RNA, 20 nt, Human
uauuucacuuuaguuuuuga

SEQ ID NO: 3685459 - RNA, 16 nt, Human
uauuucagaaguuuaa

SEQ ID NO: 3685460 - RNA, 23 nt, Human
uauuucagaaguuuaaauauuaa

SEQ ID NO: 3685461 - RNA, 13 nt, Human
uauuucagaugua

SEQ ID NO: 3685462 - RNA, 16 nt, Human
uauuucagauguaaug

SEQ ID NO: 3685463 - RNA, 19 nt, Human
uauuucagauguaauguuu

SEQ ID NO: 3685464 - RNA, 17 nt, Human
uauuucagauuuugaua

SEQ ID NO: 3685465 - RNA, 20 nt, Human
uauuucagauuuugauaacu

SEQ ID NO: 3685466 - RNA, 18 nt, Human
uauuucagcaaacuuguu

SEQ ID NO: 3685467 - RNA, 23 nt, Human
uauuucaguuauugucccuggcu

SEQ ID NO: 3685468 - RNA, 13 nt, Human
uauuucaucacaa

SEQ ID NO: 3685469 - RNA, 19 nt, Human
uauuucaucagaacagcug

SEQ ID NO: 3685470 - RNA, 19 nt, Human
uauuucaucauucacuuca

SEQ ID NO: 3685471 - RNA, 17 nt, Human
uauuucaugaaaauugu

SEQ ID NO: 3685472 - RNA, 20 nt, Human
uauuucaugaauacauugua

SEQ ID NO: 3685473 - RNA, 22 nt, Human
uauuucauucgggccccaccug

SEQ ID NO: 3685474 - RNA, 19 nt, Human
uauuuccacuaaaaauauu

SEQ ID NO: 3685475 - RNA, 18 nt, Human
uuugcauuaaauucacaa

SEQ ID NO: 3685476 - RNA, 14 nt, Human
uuugcauucaaauu

SEQ ID NO: 3685477 - RNA, 17 nt, Human
uuugcauucaaauuaag

SEQ ID NO: 3685478 - RNA, 16 nt, Human
uuugcauucuuauuca

SEQ ID NO: 3685479 - RNA, 16 nt, Human
uuugcauuuaaaacag

SEQ ID NO: 3685480 - RNA, 13 nt, Human
uuugcauuucaga

SEQ ID NO: 3685481 - RNA, 15 nt, Human
uuugccaagaccuuu

SEQ ID NO: 3685482 - RNA, 23 nt, Human
uuugccaagggcauaaauuauug

SEQ ID NO: 3685483 - RNA, 15 nt, Human
uuugccaauuugcac

SEQ ID NO: 3685484 - RNA, 19 nt, Human
uuugccacccucaugcugu

SEQ ID NO: 3685485 - RNA, 18 nt, Human
uuugccacuaauuuuagu

SEQ ID NO: 3685486 - RNA, 20 nt, Human
uuugccacuaauuuuaguau

SEQ ID NO: 3685487 - RNA, 22 nt, Human
uuugccacuaauuuuaguauuc

SEQ ID NO: 3685488 - RNA, 19 nt, Human
uuugccacugauauucaga

SEQ ID NO: 3685489 - RNA, 17 nt, Human
uuugccagcccauuugg

SEQ ID NO: 3685490 - RNA, 17 nt, Human
uuugccaggacaugcaa

SEQ ID NO: 3685491 - RNA, 16 nt, Human
uuugccagugggaacu

SEQ ID NO: 3685492 - RNA, 15 nt, Human
uuugccaucucugcu

SEQ ID NO: 3685493 - RNA, 18 nt, Human
uuugccaucucugcucca

SEQ ID NO: 3685494 - RNA, 22 nt, Human
uuugccaugacaacuucuaauu

SEQ ID NO: 3685495 - RNA, 14 nt, Human
uuugccaugggcuu

SEQ ID NO: 3685496 - RNA, 20 nt, Human
uuugccaugugcuucugcca

SEQ ID NO: 3685497 - RNA, 17 nt, Human
uuugccauugugaacca

SEQ ID NO: 3685498 - RNA, 14 nt, Human
uuugccauuugaua

SEQ ID NO: 3685499 - RNA, 14 nt, Human
uuugcccaacacca

SEQ ID NO: 3685500 - RNA, 16 nt, Human
uuugcccaacaccagc

SEQ ID NO: 3685501 - RNA, 16 nt, Human
uuugcccaaccucagc

SEQ ID NO: 3685502 - RNA, 15 nt, Human
uuugcccauuuacac

SEQ ID NO: 3685503 - RNA, 23 nt, Human
uuugcccccaaacccccauucug

SEQ ID NO: 3685504 - RNA, 14 nt, Human
uuugccccuuuaua

SEQ ID NO: 3685505 - RNA, 13 nt, Human
uuugcccucccau

SEQ ID NO: 3685506 - RNA, 17 nt, Human
uuugcccugcugcccuc

SEQ ID NO: 3685507 - RNA, 23 nt, Human
uuugcccugcugcccucccccuc

SEQ ID NO: 3685508 - RNA, 19 nt, Human
uuugcccugguuucacugg

SEQ ID NO: 3685509 - RNA, 18 nt, Human
uuugccggauacaaacug

SEQ ID NO: 3685510 - RNA, 15 nt, Human
uuugccguuauuaaa

SEQ ID NO: 3685511 - RNA, 13 nt, Human
uuugccucugccu

SEQ ID NO: 3685512 - RNA, 19 nt, Human
uuugccugccuggugugcc

SEQ ID NO: 3685513 - RNA, 12 nt, Human
uuugccuguaac

SEQ ID NO: 3685514 - RNA, 22 nt, Human
uuugccuguucaguuacagaaa

SEQ ID NO: 3685515 - RNA, 23 nt, Human
uuugccuguucaguuacagaaag

SEQ ID NO: 3685516 - RNA, 17 nt, Human
uuugccuuccuuucucc

SEQ ID NO: 3685517 - RNA, 22 nt, Human
uuugccuugcagaacugccauu

SEQ ID NO: 3685518 - RNA, 14 nt, Human
uuugcggacgggcu

SEQ ID NO: 3685519 - RNA, 14 nt, Human
uuugcuaaagacau

SEQ ID NO: 3685520 - RNA, 23 nt, Human
uuugcuaaguaaaucucuucugu

SEQ ID NO: 3685521 - RNA, 13 nt, Human
uuugcuaauuaaa

SEQ ID NO: 3685522 - RNA, 19 nt, Human
uuugcuaauuaaaaaguua

SEQ ID NO: 3685523 - RNA, 20 nt, Human
uuugcuaauuaacugaaaca

SEQ ID NO: 3685524 - RNA, 14 nt, Human
uuugcuacuaaguu

SEQ ID NO: 3685525 - RNA, 21 nt, Human
uuugcuacuguuguaagaauu

SEQ ID NO: 3685526 - RNA, 15 nt, Human
uuugcuagcaguaaa

SEQ ID NO: 3685527 - RNA, 13 nt, Human
uuugcuaguuuuu

SEQ ID NO: 3685528 - RNA, 20 nt, Human
uuugcuauugacaagucauu

SEQ ID NO: 3685529 - RNA, 16 nt, Human
uuugcucaccuggggu

SEQ ID NO: 3685530 - RNA, 12 nt, Human
uuugcucaugga

SEQ ID NO: 3685531 - RNA, 12 nt, Human
uuugcuccaccc

SEQ ID NO: 3685532 - RNA, 12 nt, Human
uuugcucugcca

SEQ ID NO: 3685533 - RNA, 13 nt, Human
uuugcucuucaga

SEQ ID NO: 3685534 - RNA, 18 nt, Human
uuugcucuucagaugcca

SEQ ID NO: 3685535 - RNA, 12 nt, Human
uuugcugagacu

SEQ ID NO: 3685536 - RNA, 14 nt, Human
uuugcugcugauaa

SEQ ID NO: 3685537 - RNA, 19 nt, Human
uuugcugggcaguuuuucu

SEQ ID NO: 3685538 - RNA, 19 nt, Human
uuugcuguacuagagaucu

SEQ ID NO: 3685539 - RNA, 21 nt, Human
uuugcuguagaagauggcacu

SEQ ID NO: 3685540 - RNA, 15 nt, Human
uuugcuuauuguucc

SEQ ID NO: 3685541 - RNA, 16 nt, Human
uuugcuuauuguucca

SEQ ID NO: 3685542 - RNA, 17 nt, Human
uuugcuuauuguuccaa

SEQ ID NO: 3685543 - RNA, 13 nt, Human
uuugcuucauaaa

SEQ ID NO: 3685544 - RNA, 20 nt, Human
uuugcuucaugugucccaga

SEQ ID NO: 3685545 - RNA, 22 nt, Human
uuugcuucuucccuuaaaauuu

SEQ ID NO: 3685546 - RNA, 14 nt, Human
uuugcuugaaagaa

SEQ ID NO: 3685547 - RNA, 16 nt, Human
uuugcuugaaagaaaa

SEQ ID NO: 3685548 - RNA, 14 nt, Human
uuugcuugaacaca

SEQ ID NO: 3685549 - RNA, 16 nt, Human
uuugcuugaacacagu

SEQ ID NO: 3685550 - RNA, 17 nt, Human
uuugcuugaacacagua

SEQ ID NO: 3685551 - RNA, 19 nt, Human
uuugcuugaacacaguauu

SEQ ID NO: 3685552 - RNA, 17 nt, Human
uuugcuugcaguagauu

SEQ ID NO: 3685553 - RNA, 20 nt, Human
uuugcuugcaguagauuuuc

SEQ ID NO: 3685554 - RNA, 23 nt, Human
uuugcuuguggcuccacacacac

SEQ ID NO: 3685555 - RNA, 23 nt, Human
uuugcuuuauggguuuggcuugu

SEQ ID NO: 3685556 - RNA, 15 nt, Human
uuugcuuugugauuu

SEQ ID NO: 3685557 - RNA, 21 nt, Human
uuuggaaaacgauuuaauuua

SEQ ID NO: 3685558 - RNA, 20 nt, Human
uuuggaaaaguggcguggga

SEQ ID NO: 3685559 - RNA, 12 nt, Human
uuuggaaaauaa

SEQ ID NO: 3685560 - RNA, 15 nt, Human
uuuggaaaaugcauu

SEQ ID NO: 3685561 - RNA, 20 nt, Human
uuuggaaacuaauaaaauau

SEQ ID NO: 3685562 - RNA, 16 nt, Human
uuuggaaagacuggac

SEQ ID NO: 3685563 - RNA, 22 nt, Human
uuuggaaaguacacucugcugu

SEQ ID NO: 3685564 - RNA, 23 nt, Human
uuuggaacaagaugguucuagca

SEQ ID NO: 3685565 - RNA, 20 nt, Human
uuuggaagaaaaaaaucuuc

SEQ ID NO: 3685566 - RNA, 22 nt, Human
uuuggaagaaaaaaaucuucuc

SEQ ID NO: 3685567 - RNA, 20 nt, Human
uuuggaagauccugugagga

SEQ ID NO: 3685568 - RNA, 15 nt, Human
uuuggaagcucuucu

SEQ ID NO: 3685569 - RNA, 13 nt, Human
uuuggaauaaagu

SEQ ID NO: 3685570 - RNA, 16 nt, Human
uuuggaauacauuucu

SEQ ID NO: 3685571 - RNA, 13 nt, Human
uuuggaauacuuu

SEQ ID NO: 3685572 - RNA, 18 nt, Human
uuuggaaucuagaagaaa

SEQ ID NO: 3685573 - RNA, 12 nt, Human
uuuggaaugcuu

SEQ ID NO: 3685574 - RNA, 11 nt, Human
uuuggaaugug

SEQ ID NO: 3685575 - RNA, 13 nt, Human
uuuggaauuagaa

SEQ ID NO: 3685576 - RNA, 22 nt, Human
uuuggaccaaaaaccaguauug

SEQ ID NO: 3685577 - RNA, 19 nt, Human
uuuggacccugaggcccag

SEQ ID NO: 3685578 - RNA, 19 nt, Human
uuuggaccuaaauggccuc

SEQ ID NO: 3685579 - RNA, 16 nt, Human
uuuggacuucuggggu

SEQ ID NO: 3685580 - RNA, 15 nt, Human
uuuggacuuuguaua

SEQ ID NO: 3685581 - RNA, 14 nt, Human
uuuggagagaaaua

SEQ ID NO: 3685582 - RNA, 15 nt, Human
uuuggagagaaauau

SEQ ID NO: 3685583 - RNA, 22 nt, Human
uuuggagagaaauauuuuaauu

SEQ ID NO: 3685584 - RNA, 20 nt, Human
uuuggagagggggccuggga

SEQ ID NO: 3685585 - RNA, 18 nt, Human
uuuggagcacucugaguu

SEQ ID NO: 3685586 - RNA, 20 nt, Human
uuuggaguccccucaccucc

SEQ ID NO: 3685587 - RNA, 19 nt, Human
uuuggaguguuauguauuu

SEQ ID NO: 3685588 - RNA, 22 nt, Human
uuuggaguguuauguauuuccu

SEQ ID NO: 3685589 - RNA, 16 nt, Human
uuuggauaauaaggaa

SEQ ID NO: 3685590 - RNA, 15 nt, Human
uuuggauauguaaaa

SEQ ID NO: 3685591 - RNA, 19 nt, Human
uuuggauauguaaaacauu

SEQ ID NO: 3685592 - RNA, 21 nt, Human
uuuggauauguaaaacauuua

SEQ ID NO: 3685593 - RNA, 17 nt, Human
uuuggaucuugaaugug

SEQ ID NO: 3685594 - RNA, 15 nt, Human
uuuggauguaauuua

SEQ ID NO: 3685595 - RNA, 19 nt, Human
uuuggauucuaaauacaug

SEQ ID NO: 3685596 - RNA, 20 nt, Human
uuuggauuggggucccucua

SEQ ID NO: 3685597 - RNA, 14 nt, Human
uuuggauuuuuaau

SEQ ID NO: 3685598 - RNA, 18 nt, Human
uuuggcaaacucuccacc

SEQ ID NO: 3685599 - RNA, 23 nt, Human
uuuggcaaggaaaggggagaagg

SEQ ID NO: 3685600 - RNA, 20 nt, Human
uuuggcauaacauaaaucug

SEQ ID NO: 3685601 - RNA, 16 nt, Human
uuuggcaucccugggc

SEQ ID NO: 3685602 - RNA, 18 nt, Human
uuuggcaucccugggccu

SEQ ID NO: 3685603 - RNA, 20 nt, Human
uuuggcaucuguuuaaagua

SEQ ID NO: 3685604 - RNA, 10 nt, Human
uuuggccaga

SEQ ID NO: 3685605 - RNA, 20 nt, Human
uuuggcccccgagcuggggg

SEQ ID NO: 3685606 - RNA, 21 nt, Human
uuuggcccuucuccuuuugaa

SEQ ID NO: 3685607 - RNA, 18 nt, Human
uuuggccucauuacuuua

SEQ ID NO: 3685608 - RNA, 17 nt, Human
uuuggcgcuauuacaaa

SEQ ID NO: 3685609 - RNA, 14 nt, Human
uuuggcgggccaag

SEQ ID NO: 3685610 - RNA, 17 nt, Human
uuuggcgggccaaggac

SEQ ID NO: 3685611 - RNA, 16 nt, Human
uuuggcuaguccuugu

SEQ ID NO: 3685612 - RNA, 15 nt, Human
uuuggcuccugccca

SEQ ID NO: 3685613 - RNA, 23 nt, Human
uuuggcucuccucagaagaaaga

SEQ ID NO: 3685614 - RNA, 12 nt, Human
uuuggcugcuga

SEQ ID NO: 3685615 - RNA, 19 nt, Human
uuuggcugugucuaaacug

SEQ ID NO: 3685616 - RNA, 23 nt, Human
uuugggacccugcuuuagagcua

SEQ ID NO: 3685617 - RNA, 21 nt, Human
uuugggagacaugugacauuu

SEQ ID NO: 3685618 - RNA, 16 nt, Human
uuugggagggaaaagg

SEQ ID NO: 3685619 - RNA, 12 nt, Human
uuugggaugucu

SEQ ID NO: 3685620 - RNA, 14 nt, Human
uuugggaugucuua

SEQ ID NO: 3685621 - RNA, 18 nt, Human
uuugggauuuaauuucca

SEQ ID NO: 3685622 - RNA, 20 nt, Human
uuugggcagaagggagaagg

SEQ ID NO: 3685623 - RNA, 21 nt, Human
uuugggcagcaauuuaaaugu

SEQ ID NO: 3685624 - RNA, 12 nt, Human
uuugggcccagg

SEQ ID NO: 3685625 - RNA, 15 nt, Human
uugccuccaggugca

SEQ ID NO: 3685626 - RNA, 20 nt, Human
uugccuccaggugcagaggu

SEQ ID NO: 3685627 - RNA, 18 nt, Human
uugccuccauggugccuc

SEQ ID NO: 3685628 - RNA, 20 nt, Human
uugccuccauggugccucug

SEQ ID NO: 3685629 - RNA, 20 nt, Human
uugccuccccauuucccauc

SEQ ID NO: 3685630 - RNA, 15 nt, Human
uugccucggcuccug

SEQ ID NO: 3685631 - RNA, 17 nt, Human
uugccucggcuccugcu

SEQ ID NO: 3685632 - RNA, 18 nt, Human
uugccucggcuccugcug

SEQ ID NO: 3685633 - RNA, 19 nt, Human
uugccucggcuccugcugc

SEQ ID NO: 3685634 - RNA, 22 nt, Human
uugccucggcuccugcugcacc

SEQ ID NO: 3685635 - RNA, 20 nt, Human
uugccucucgguugaaaccu

SEQ ID NO: 3685636 - RNA, 19 nt, Human
uugccucugagagcaucag

SEQ ID NO: 3685637 - RNA, 11 nt, Human
uugccucugcc

SEQ ID NO: 3685638 - RNA, 16 nt, Human
uugccucugccucuga

SEQ ID NO: 3685639 - RNA, 18 nt, Human
uugccucuguccccuucu

SEQ ID NO: 3685640 - RNA, 19 nt, Human
uugccucuguccccuucuc

SEQ ID NO: 3685641 - RNA, 12 nt, Human
uugccucugugc

SEQ ID NO: 3685642 - RNA, 20 nt, Human
uugccucuuuuaccugcugc

SEQ ID NO: 3685643 - RNA, 19 nt, Human
uugccugaacauccuuccu

SEQ ID NO: 3685644 - RNA, 20 nt, Human
uugccugaaguuggagugag

SEQ ID NO: 3685645 - RNA, 15 nt, Human
uugccugcagagaga

SEQ ID NO: 3685646 - RNA, 15 nt, Human
uugccugcagggcca

SEQ ID NO: 3685647 - RNA, 16 nt, Human
uugccugccuuuccau

SEQ ID NO: 3685648 - RNA, 21 nt, Human
uugccuguuucugauuugcug

SEQ ID NO: 3685649 - RNA, 13 nt, Human
uugccuuaaaaua

SEQ ID NO: 3685650 - RNA, 16 nt, Human
uugccuuaaagaaagu

SEQ ID NO: 3685651 - RNA, 21 nt, Human
uugccuuccacgcugucucca

SEQ ID NO: 3685652 - RNA, 20 nt, Human
uugccuuccauuuccccucu

SEQ ID NO: 3685653 - RNA, 15 nt, Human
uugccuuccuaagcc

SEQ ID NO: 3685654 - RNA, 17 nt, Human
uugccuucuacuuuuaa

SEQ ID NO: 3685655 - RNA, 17 nt, Human
uugccuugcagaacugc

SEQ ID NO: 3685656 - RNA, 23 nt, Human
uugccuuuagugaucacagcagc

SEQ ID NO: 3685657 - RNA, 18 nt, Human
uugccuuucgaggccuga

SEQ ID NO: 3685658 - RNA, 19 nt, Human
uugccuuucuguguuuauu

SEQ ID NO: 3685659 - RNA, 16 nt, Human
uugccuuugaauguua

SEQ ID NO: 3685660 - RNA, 18 nt, Human
uugccuuuucuagcccga

SEQ ID NO: 3685661 - RNA, 19 nt, Human
uugccuuuugcaaccagga

SEQ ID NO: 3685662 - RNA, 17 nt, Human
uugccuuuuucauuauu

SEQ ID NO: 3685663 - RNA, 18 nt, Human
uugcgacggagagaaaaa

SEQ ID NO: 3685664 - RNA, 19 nt, Human
uugcgauagagucucacug

SEQ ID NO: 3685665 - RNA, 19 nt, Human
uugcgcuccuggcccagcc

SEQ ID NO: 3685666 - RNA, 13 nt, Human
uugcgcuguugcg

SEQ ID NO: 3685667 - RNA, 15 nt, Human
uugcggggggaggga

SEQ ID NO: 3685668 - RNA, 16 nt, Human
uugcguaugucuguua

SEQ ID NO: 3685669 - RNA, 20 nt, Human
uugcguaugucuguuaccau

SEQ ID NO: 3685670 - RNA, 18 nt, Human
uugcguggacucugcaca

SEQ ID NO: 3685671 - RNA, 22 nt, Human
uugcguuccaugaugcugggau

SEQ ID NO: 3685672 - RNA, 21 nt, Human
uugcuaaaaauaguggccaga

SEQ ID NO: 3685673 - RNA, 13 nt, Human
uugcuaacagcaa

SEQ ID NO: 3685674 - RNA, 15 nt, Human
uugcuaacugaacuu

SEQ ID NO: 3685675 - RNA, 21 nt, Human
uugcuaacugaacuuugaaga

SEQ ID NO: 3685676 - RNA, 18 nt, Human
uugcuaagcauuccaacu

SEQ ID NO: 3685677 - RNA, 21 nt, Human
uugcuaaucaaagccaggguc

SEQ ID NO: 3685678 - RNA, 16 nt, Human
uugcuaaucagugucu

SEQ ID NO: 3685679 - RNA, 18 nt, Human
uugcuaaucagugucuca

SEQ ID NO: 3685680 - RNA, 13 nt, Human
uugcuaauguugc

SEQ ID NO: 3685681 - RNA, 14 nt, Human
uugcuaauguugcu

SEQ ID NO: 3685682 - RNA, 17 nt, Human
uugcuaauuuucucaaa

SEQ ID NO: 3685683 - RNA, 16 nt, Human
uugcuacauaauuauc

SEQ ID NO: 3685684 - RNA, 22 nt, Human
uugcuaccaguauuuagaagcc

SEQ ID NO: 3685685 - RNA, 21 nt, Human
uugcuacccugaguucaucca

SEQ ID NO: 3685686 - RNA, 20 nt, Human
uugcuacuacuuaccuacca

SEQ ID NO: 3685687 - RNA, 18 nt, Human
uugcuagagcuccucccu

SEQ ID NO: 3685688 - RNA, 23 nt, Human
uugcuagauaaaagcugaaguua

SEQ ID NO: 3685689 - RNA, 13 nt, Human
uugcuaguauuug

SEQ ID NO: 3685690 - RNA, 18 nt, Human
uugcuaucaacaauaaaa

SEQ ID NO: 3685691 - RNA, 14 nt, Human
uugggccagacaug

SEQ ID NO: 3685692 - RNA, 19 nt, Human
uugggcccacaccuccuuc

SEQ ID NO: 3685693 - RNA, 12 nt, Human
uugggcccagcu

SEQ ID NO: 3685694 - RNA, 17 nt, Human
uugggcccagcugggcu

SEQ ID NO: 3685695 - RNA, 22 nt, Human
uugggcccagcugggcucugcc

SEQ ID NO: 3685696 - RNA, 18 nt, Human
uugggccccagaggcugg

SEQ ID NO: 3685697 - RNA, 20 nt, Human
uugggcgccgugcugggcag

SEQ ID NO: 3685698 - RNA, 12 nt, Human
uugggcucccaa

SEQ ID NO: 3685699 - RNA, 19 nt, Human
uugggcuucagcugccagu

SEQ ID NO: 3685700 - RNA, 18 nt, Human
uugggcuugcuauucugu

SEQ ID NO: 3685701 - RNA, 23 nt, Human
uuggggaaacagcaucuccaagc

SEQ ID NO: 3685702 - RNA, 14 nt, Human
uuggggaagaccca

SEQ ID NO: 3685703 - RNA, 11 nt, Human
uuggggaagag

SEQ ID NO: 3685704 - RNA, 20 nt, Human
uuggggacacauguauuugg

SEQ ID NO: 3685705 - RNA, 18 nt, Human
uuggggaccagagcugcc

SEQ ID NO: 3685706 - RNA, 15 nt, Human
uuggggagguguuca

SEQ ID NO: 3685707 - RNA, 19 nt, Human
uuggggaguuaagaccugg

SEQ ID NO: 3685708 - RNA, 14 nt, Human
uuggggauauuuuu

SEQ ID NO: 3685709 - RNA, 15 nt, Human
uuggggauucuuaaa

SEQ ID NO: 3685710 - RNA, 15 nt, Human
uuggggcaaaaaucc

SEQ ID NO: 3685711 - RNA, 21 nt, Human
uuggggccaccaaagcugccc

SEQ ID NO: 3685712 - RNA, 14 nt, Human
uuggggcucccagc

SEQ ID NO: 3685713 - RNA, 22 nt, Human
uuggggcucccagccaggcccu

SEQ ID NO: 3685714 - RNA, 19 nt, Human
uugggggacguuucucauu

SEQ ID NO: 3685715 - RNA, 15 nt, Human
uugggggcucagcaa

SEQ ID NO: 3685716 - RNA, 16 nt, Human
uugggggcugugggga

SEQ ID NO: 3685717 - RNA, 17 nt, Human
uuggggggacucugagc

SEQ ID NO: 3685718 - RNA, 22 nt, Human
uuggggggcugaggugggagga

SEQ ID NO: 3685719 - RNA, 20 nt, Human
uuggggggguggccgcugag

SEQ ID NO: 3685720 - RNA, 16 nt, Human
uugggggucagugcug

SEQ ID NO: 3685721 - RNA, 20 nt, Human
uuggggguccuccuccaggg

SEQ ID NO: 3685722 - RNA, 17 nt, Human
uugggguacccacugcu

SEQ ID NO: 3685723 - RNA, 22 nt, Human
uugggguacccacugcucuggu

SEQ ID NO: 3685724 - RNA, 21 nt, Human
uugggguagcuagaggaacca

SEQ ID NO: 3685725 - RNA, 23 nt, Human
uuggggucaagaaacagccagca

SEQ ID NO: 3685726 - RNA, 16 nt, Human
uuggggucugccacca

SEQ ID NO: 3685727 - RNA, 17 nt, Human
uuggggucuggcagccu

SEQ ID NO: 3685728 - RNA, 20 nt, Human
uugggguggguauaaaagau

SEQ ID NO: 3685729 - RNA, 17 nt, Human
uuggguaaaauacuuuu

SEQ ID NO: 3685730 - RNA, 18 nt, Human
uuggguaccuauuuucau

SEQ ID NO: 3685731 - RNA, 23 nt, Human
uuggguagaaagagauacagagg

SEQ ID NO: 3685732 - RNA, 20 nt, Human
uuggguagcugccacuugaa

SEQ ID NO: 3685733 - RNA, 14 nt, Human
uuggguaggcggga

SEQ ID NO: 3685734 - RNA, 13 nt, Human
uuggguccaggag

SEQ ID NO: 3685735 - RNA, 18 nt, Human
uugggucuauuccagcuc

SEQ ID NO: 3685736 - RNA, 15 nt, Human
uugggugaucauuca

SEQ ID NO: 3685737 - RNA, 20 nt, Human
uugggugcaagagggagcac

SEQ ID NO: 3685738 - RNA, 15 nt, Human
uuggguggagaagcc

SEQ ID NO: 3685739 - RNA, 21 nt, Human
uuggguggggggcauugagua

SEQ ID NO: 3685740 - RNA, 17 nt, Human
uuggguggggggcuuca

SEQ ID NO: 3685741 - RNA, 21 nt, Human
uuggguggggggcuucauaca

SEQ ID NO: 3685742 - RNA, 23 nt, Human
uuggguguaacaggucuccucuu

SEQ ID NO: 3685743 - RNA, 15 nt, Human
uuggguguauugugc

SEQ ID NO: 3685744 - RNA, 16 nt, Human
uuggguguauugugcg

SEQ ID NO: 3685745 - RNA, 20 nt, Human
uugggugucuccuuaagcug

SEQ ID NO: 3685746 - RNA, 18 nt, Human
uuggguuagaccuacagg

SEQ ID NO: 3685747 - RNA, 13 nt, Human
uuggguucacagc

SEQ ID NO: 3685748 - RNA, 16 nt, Human
uuggguucaucugagc

SEQ ID NO: 3685749 - RNA, 17 nt, Human
uuggguucaugaugcag

SEQ ID NO: 3685750 - RNA, 12 nt, Human
uuggguuuauuu

SEQ ID NO: 3685751 - RNA, 15 nt, Human
uuggguuuuuuuccu

SEQ ID NO: 3685752 - RNA, 19 nt, Human
uugguaaaacucacuguga

SEQ ID NO: 3685753 - RNA, 20 nt, Human
uugguaaaacucacugugau

SEQ ID NO: 3685754 - RNA, 20 nt, Human
uugguaaaguccuuuucuug

SEQ ID NO: 3685755 - RNA, 21 nt, Human
uugguaaauuuccccaacagu

SEQ ID NO: 3685756 - RNA, 19 nt, Human
uugguaacacaaauuuuca

SEQ ID NO: 3685757 - RNA, 15 nt, Human
uugguaagcuuccag

SEQ ID NO: 3685758 - RNA, 13 nt, Human
uugguacaaaaau

SEQ ID NO: 3685759 - RNA, 14 nt, Human
uugguacaaaaaua

SEQ ID NO: 3685760 - RNA, 20 nt, Human
uugguacauggccaguguga

SEQ ID NO: 3685761 - RNA, 12 nt, Human
uugguaccagau

SEQ ID NO: 3685762 - RNA, 14 nt, Human
uugguaccagauaa

SEQ ID NO: 3685763 - RNA, 17 nt, Human
uugguaccuugcacaca

SEQ ID NO: 3685764 - RNA, 22 nt, Human
uugguacuacuagaugucuuua

SEQ ID NO: 3685765 - RNA, 17 nt, Human
uugguacuauaaaagcu

SEQ ID NO: 3685766 - RNA, 13 nt, Human
uugguacuguaau

SEQ ID NO: 3685767 - RNA, 17 nt, Human
uugguauauccuuuucu

SEQ ID NO: 3685768 - RNA, 18 nt, Human
uugguaucuguucuuuaa

SEQ ID NO: 3685769 - RNA, 12 nt, Human
uugguauuguau

SEQ ID NO: 3685770 - RNA, 13 nt, Human
uugguauuguauu

SEQ ID NO: 3685771 - RNA, 14 nt, Human
uugguauuguauuu

SEQ ID NO: 3685772 - RNA, 20 nt, Human
uugguauuuggauaucuguu

SEQ ID NO: 3685773 - RNA, 22 nt, Human
uuggucagaguaagcugcuuuu

SEQ ID NO: 3685774 - RNA, 14 nt, Human
uuggucaggcuggu

SEQ ID NO: 3685775 - RNA, 15 nt, Human
uugguccaggaaaug

SEQ ID NO: 3685776 - RNA, 22 nt, Human
uuggucccccuuccauggacuu

SEQ ID NO: 3685777 - RNA, 23 nt, Human
uuggucccgugcagcuucugucc

SEQ ID NO: 3685778 - RNA, 17 nt, Human
uugguccucuugccauc

SEQ ID NO: 3685779 - RNA, 13 nt, Human
uuggucguuuuuu

SEQ ID NO: 3685780 - RNA, 16 nt, Human
uuggucuguacugauu

SEQ ID NO: 3685781 - RNA, 15 nt, Human
uuggucugugagaug

SEQ ID NO: 3685782 - RNA, 16 nt, Human
uuggucugugagaugc

SEQ ID NO: 3685783 - RNA, 19 nt, Human
uuggucuuauuuauuauug

SEQ ID NO: 3685784 - RNA, 21 nt, Human
uuggugaacauugcaauagaa

SEQ ID NO: 3685785 - RNA, 17 nt, Human
uuggugaauuucacaag

SEQ ID NO: 3685786 - RNA, 20 nt, Human
uuggugauuccgcagugaga

SEQ ID NO: 3685787 - RNA, 16 nt, Human
uuggugcacagcacaa

SEQ ID NO: 3685788 - RNA, 22 nt, Human
uuggugcacagcacaaauuagu

SEQ ID NO: 3685789 - RNA, 15 nt, Human
uuggugcacagugau

SEQ ID NO: 3685790 - RNA, 21 nt, Human
uuggugcauagaacuggguaa

SEQ ID NO: 3685791 - RNA, 16 nt, Human
uuggugccuuuccugu

SEQ ID NO: 3685792 - RNA, 20 nt, Human
uuggugcgggcacaauaaau

SEQ ID NO: 3685793 - RNA, 19 nt, Human
uuggugcucauuuaaauau

SEQ ID NO: 3685794 - RNA, 17 nt, Human
uuggugcuuuuuauaaa

SEQ ID NO: 3685795 - RNA, 21 nt, Human
uuggugcuuuuuauaaaaaga

SEQ ID NO: 3685796 - RNA, 15 nt, Human
uugguggauguaaau

SEQ ID NO: 3685797 - RNA, 18 nt, Human
uugguggcucacgccugu

SEQ ID NO: 3685798 - RNA, 14 nt, Human
uugguggcuuuccu

SEQ ID NO: 3685799 - RNA, 18 nt, Human
uuggugggugaaaggaau

SEQ ID NO: 3685800 - RNA, 19 nt, Human
uuggugguuucagaaaugu

SEQ ID NO: 3685801 - RNA, 19 nt, Human
uuggugucgggcaugacac

SEQ ID NO: 3685802 - RNA, 14 nt, Human
uugguguuaaaaca

SEQ ID NO: 3685803 - RNA, 17 nt, Human
uugguuaaaaaaaagaa

SEQ ID NO: 3685804 - RNA, 22 nt, Human
uugguuaagcuuugacacugga

SEQ ID NO: 3685805 - RNA, 18 nt, Human
uugguuaauuuuuacaug

SEQ ID NO: 3685806 - RNA, 18 nt, Human
uugguuauacaugacacu

SEQ ID NO: 3685807 - RNA, 21 nt, Human
uugguuauacaugacacugaa

SEQ ID NO: 3685808 - RNA, 15 nt, Human
uugguucaaaugugu

SEQ ID NO: 3685809 - RNA, 14 nt, Human
uugguucauaaaug

SEQ ID NO: 3685810 - RNA, 15 nt, Human
uugguucauaaauga

SEQ ID NO: 3685811 - RNA, 18 nt, Human
uugguucaucaguguuaa

SEQ ID NO: 3685812 - RNA, 21 nt, Human
uugguuccaagucuuugcuau

SEQ ID NO: 3685813 - RNA, 18 nt, Human
uugguucccccacugauc

SEQ ID NO: 3685814 - RNA, 19 nt, Human
uugguucuaauagaacuca

SEQ ID NO: 3685815 - RNA, 20 nt, Human
uugguucuagcgcaguuuuu

SEQ ID NO: 3685816 - RNA, 15 nt, Human
ucaaaauagaaaagu

SEQ ID NO: 3685817 - RNA, 15 nt, Human
ucaaaauauguucuu

SEQ ID NO: 3685818 - RNA, 14 nt, Human
ucaaaauauugagc

SEQ ID NO: 3685819 - RNA, 20 nt, Human
ucaaaauauugagcagaauu

SEQ ID NO: 3685820 - RNA, 20 nt, Human
ucaaaauauuuaaaaauguc

SEQ ID NO: 3685821 - RNA, 23 nt, Human
ucaaaauauuuuuaaaagaucuu

SEQ ID NO: 3685822 - RNA, 16 nt, Human
ucaaaauccaaaaaga

SEQ ID NO: 3685823 - RNA, 16 nt, Human
ucaaaauccuuccaaa

SEQ ID NO: 3685824 - RNA, 18 nt, Human
ucaaaauccuuccaaaga

SEQ ID NO: 3685825 - RNA, 19 nt, Human
ucaaaauccuuccaaagaa

SEQ ID NO: 3685826 - RNA, 14 nt, Human
ucaaaaucucucca

SEQ ID NO: 3685827 - RNA, 14 nt, Human
ucaaaaugcucuua

SEQ ID NO: 3685828 - RNA, 19 nt, Human
ucaaaaugcucuuauuuca

SEQ ID NO: 3685829 - RNA, 22 nt, Human
ucaaaaugcucuuauuucauca

SEQ ID NO: 3685830 - RNA, 19 nt, Human
ucaaaaugcuuuuuauuuc

SEQ ID NO: 3685831 - RNA, 14 nt, Human
ucaaaauguauaua

SEQ ID NO: 3685832 - RNA, 20 nt, Human
ucaaaauguuaucuucucaa

SEQ ID NO: 3685833 - RNA, 15 nt, Human
ucaaaauuacauaua

SEQ ID NO: 3685834 - RNA, 24 nt, Human
ucaaaauuagugcuuuuuguguca

SEQ ID NO: 3685835 - RNA, 14 nt, Human
ucaaaauuauagga

SEQ ID NO: 3685836 - RNA, 17 nt, Human
ucaaaauucuaaaugua

SEQ ID NO: 3685837 - RNA, 23 nt, Human
ucaaaauuugcugccaaaugcgu

SEQ ID NO: 3685838 - RNA, 15 nt, Human
ucaaacaaagccaga

SEQ ID NO: 3685839 - RNA, 16 nt, Human
ucaaacaaagccagaa

SEQ ID NO: 3685840 - RNA, 17 nt, Human
ucaaacaacacuggugu

SEQ ID NO: 3685841 - RNA, 14 nt, Human
ucaaacacaaaugc

SEQ ID NO: 3685842 - RNA, 17 nt, Human
ucaaacacaaaugcagg

SEQ ID NO: 3685843 - RNA, 13 nt, Human
ucaaacacagaga

SEQ ID NO: 3685844 - RNA, 14 nt, Human
ucaaacacugcagg

SEQ ID NO: 3685845 - RNA, 19 nt, Human
ucaaacacuugugacuuuu

SEQ ID NO: 3685846 - RNA, 15 nt, Human
ucaaacaguagguug

SEQ ID NO: 3685847 - RNA, 21 nt, Human
ucaaacagucucaggaaauca

SEQ ID NO: 3685848 - RNA, 17 nt, Human
ucaaacauauauaacaa

SEQ ID NO: 3685849 - RNA, 17 nt, Human
ucaaacauuaguacuuu

SEQ ID NO: 3685850 - RNA, 20 nt, Human
ucaaacauuaguacuuuaua

SEQ ID NO: 3685851 - RNA, 15 nt, Human
ucaaacauuuucugg

SEQ ID NO: 3685852 - RNA, 22 nt, Human
ucaaaccaguauacaagauaag

SEQ ID NO: 3685853 - RNA, 15 nt, Human
ucaaaccauaaacuu

SEQ ID NO: 3685854 - RNA, 19 nt, Human
ucaaaccccgaccaccugc

SEQ ID NO: 3685855 - RNA, 23 nt, Human
ucaaaccccgaccaccugcccaa

SEQ ID NO: 3685856 - RNA, 15 nt, Human
ucaaaccccugaccu

SEQ ID NO: 3685857 - RNA, 15 nt, Human
ucaaacccuagccuu

SEQ ID NO: 3685858 - RNA, 17 nt, Human
ucaaacccuagccuugc

SEQ ID NO: 3685859 - RNA, 21 nt, Human
ucaaacccuagccuugcuugu

SEQ ID NO: 3685860 - RNA, 20 nt, Human
ucaaaccgcacucacccaug

SEQ ID NO: 3685861 - RNA, 21 nt, Human
ucaaacuaaaagacauuuguu

SEQ ID NO: 3685862 - RNA, 12 nt, Human
ucaaacuaacag

SEQ ID NO: 3685863 - RNA, 20 nt, Human
ucaaacuacuuugcugcuaa

SEQ ID NO: 3685864 - RNA, 21 nt, Human
ucaaacuaggggacaaagcaa

SEQ ID NO: 3685865 - RNA, 18 nt, Human
ucaaacucaaugcuuuau

SEQ ID NO: 3685866 - RNA, 22 nt, Human
ucaaacucuugaccucagguga

SEQ ID NO: 3685867 - RNA, 16 nt, Human
ucaaacuggggccucc

SEQ ID NO: 3685868 - RNA, 18 nt, Human
ucaaacugugaagcauuu

SEQ ID NO: 3685869 - RNA, 17 nt, Human
ucaaacuuacuauuuug

SEQ ID NO: 3685870 - RNA, 19 nt, Human
ucaaacuucuggcucccuc

SEQ ID NO: 3685871 - RNA, 22 nt, Human
ucaaacuuggauacuuggauuu

SEQ ID NO: 3685872 - RNA, 15 nt, Human
ucaaacuuuacuaug

SEQ ID NO: 3685873 - RNA, 22 nt, Human
ucaaagaaagaaaguuuagaag

SEQ ID NO: 3685874 - RNA, 15 nt, Human
ucaaagaaaguguau

SEQ ID NO: 3685875 - RNA, 16 nt, Human
ucaaagaaaguguauu

SEQ ID NO: 3685876 - RNA, 14 nt, Human
ucaaagaaauaucu

SEQ ID NO: 3685877 - RNA, 12 nt, Human
ucaaagaaaugc

SEQ ID NO: 3685878 - RNA, 19 nt, Human
ucaaagaaaugcugaugga

SEQ ID NO: 3685879 - RNA, 23 nt, Human
ucaaagaagguuuguguuuuucu

SEQ ID NO: 3685880 - RNA, 16 nt, Human
ucaaagaauaagaaaa

SEQ ID NO: 3685881 - RNA, 23 nt, Human
ucaaagaaucaccuaauuaauuu

SEQ ID NO: 3685882 - RNA, 17 nt, Human
ucaaagacauucugaca

SEQ ID NO: 3685883 - RNA, 21 nt, Human
ucaaagaccuuguguguaugu

SEQ ID NO: 3685884 - RNA, 16 nt, Human
ucaaagagaaaacuua

SEQ ID NO: 3685885 - RNA, 15 nt, Human
ucaaagagagaaaau

SEQ ID NO: 3685886 - RNA, 21 nt, Human
ucaaagaggcugaggcuggca

SEQ ID NO: 3685887 - RNA, 12 nt, Human
ucaaagagguuu

SEQ ID NO: 3685888 - RNA, 16 nt, Human
ucaaagagguuuuaaa

SEQ ID NO: 3685889 - RNA, 23 nt, Human
ucaaagagguuuuaaaaaaaucc

SEQ ID NO: 3685890 - RNA, 23 nt, Human
ucaaagcaaaugucuuccuggau

SEQ ID NO: 3685891 - RNA, 22 nt, Human
ucaaagcaagcauucagaagaa

SEQ ID NO: 3685892 - RNA, 15 nt, Human
ucaaagcaaugcauu

SEQ ID NO: 3685893 - RNA, 18 nt, Human
ucaaagcaaugcauuuug

SEQ ID NO: 3685894 - RNA, 12 nt, Human
ucaaagcaauug

SEQ ID NO: 3685895 - RNA, 12 nt, Human
ucaaagcauuua

SEQ ID NO: 3685896 - RNA, 15 nt, Human
ucaaagccagggucu

SEQ ID NO: 3685897 - RNA, 11 nt, Human
ucaaagcugcc

SEQ ID NO: 3685898 - RNA, 18 nt, Human
ucaaagcugcuuuauuca

SEQ ID NO: 3685899 - RNA, 17 nt, Human
ucaaagcuuccauucca

SEQ ID NO: 3685900 - RNA, 20 nt, Human
ucaaagcuugaagaucguua

SEQ ID NO: 3685901 - RNA, 22 nt, Human
ucaaagcuuggauuaaauacau

SEQ ID NO: 3685902 - RNA, 15 nt, Human
ucaaagcuuuuucca

SEQ ID NO: 3685903 - RNA, 19 nt, Human
ucaaaggcacagugaaggc

SEQ ID NO: 3685904 - RNA, 17 nt, Human
ucaaagggauaaagaaa

SEQ ID NO: 3685905 - RNA, 18 nt, Human
ucaaagggcccacaguga

SEQ ID NO: 3685906 - RNA, 16 nt, Human
ucaaagguucuagguu

SEQ ID NO: 3685907 - RNA, 20 nt, Human
ucaaagguucuagguuucaa

SEQ ID NO: 3685908 - RNA, 18 nt, Human
ucaaaguaggcaggacca

SEQ ID NO: 3685909 - RNA, 15 nt, Human
ucaaagucagaacaa

SEQ ID NO: 3685910 - RNA, 21 nt, Human
ucaaagucaugauguuuuuaa

SEQ ID NO: 3685911 - RNA, 22 nt, Human
ucaaagucaugauguuuuuaaa

SEQ ID NO: 3685912 - RNA, 13 nt, Human
ucaaagucauuaa

SEQ ID NO: 3685913 - RNA, 17 nt, Human
ucaaagucauuaaagac

SEQ ID NO: 3685914 - RNA, 21 nt, Human
ucaaagucugcucucauauaa

SEQ ID NO: 3685915 - RNA, 18 nt, Human
ucaaaguguuuucucuga

SEQ ID NO: 3685916 - RNA, 15 nt, Human
ucaaaguugaaaauu

SEQ ID NO: 3685917 - RNA, 15 nt, Human
ucaaaguugccuaaa

SEQ ID NO: 3685918 - RNA, 18 nt, Human
ucaaaguugccuaaaucc

SEQ ID NO: 3685919 - RNA, 19 nt, Human
ucaaaguugccuaaaucca

SEQ ID NO: 3685920 - RNA, 14 nt, Human
ucaaaguuuaauaa

SEQ ID NO: 3685921 - RNA, 18 nt, Human
ucaaaguuuugaaaagcu

SEQ ID NO: 3685922 - RNA, 19 nt, Human
ucaaaguuuugaaaagcua

SEQ ID NO: 3685923 - RNA, 20 nt, Human
ucaaaguuuugaaaagcuau

SEQ ID NO: 3685924 - RNA, 22 nt, Human
ucaaaguuuugaaaagcuauua

SEQ ID NO: 3685925 - RNA, 13 nt, Human
ucaaauaaacacu

SEQ ID NO: 3685926 - RNA, 12 nt, Human
ucaaauaagaaa

SEQ ID NO: 3685927 - RNA, 17 nt, Human
ucaaauaaguauuuaua

SEQ ID NO: 3685928 - RNA, 20 nt, Human
ucaaauaaguauuuauaaua

SEQ ID NO: 3685929 - RNA, 13 nt, Human
ucaaauacaucuu

SEQ ID NO: 3685930 - RNA, 21 nt, Human
ucaaauacauuuaaaacauua

SEQ ID NO: 3685931 - RNA, 23 nt, Human
ucaaauacgugggcauucaaaug

SEQ ID NO: 3685932 - RNA, 20 nt, Human
ucaaauaggcuauuaaaaaa

SEQ ID NO: 3685933 - RNA, 23 nt, Human
ucaaauaggcuauuaaaaaaguc

SEQ ID NO: 3685934 - RNA, 15 nt, Human
ucaaauaguugcaua

SEQ ID NO: 3685935 - RNA, 15 nt, Human
ucaaauauuagaugu

SEQ ID NO: 3685936 - RNA, 19 nt, Human
ucaaauauuagaugugauu

SEQ ID NO: 3685937 - RNA, 23 nt, Human
ucaaaucaggcuacuagaauucu

SEQ ID NO: 3685938 - RNA, 22 nt, Human
ucaaauccacccauauguuaaa

SEQ ID NO: 3685939 - RNA, 21 nt, Human
ucaaauccaggacccugccag

SEQ ID NO: 3685940 - RNA, 15 nt, Human
ucaaauccauccaga

SEQ ID NO: 3685941 - RNA, 15 nt, Human
ucaaauccuugaaga

SEQ ID NO: 3685942 - RNA, 16 nt, Human
ucaaaucuccaguauu

SEQ ID NO: 3685943 - RNA, 14 nt, Human
ucaaaucuuaagaa

SEQ ID NO: 3685944 - RNA, 23 nt, Human
ucaaaucuuggcaauauuccuua

SEQ ID NO: 3685945 - RNA, 15 nt, Human
ucaaaugaaauguau

SEQ ID NO: 3685946 - RNA, 21 nt, Human
ucaaaugaauaaugccuuugu

SEQ ID NO: 3685947 - RNA, 15 nt, Human
ucaaaugacccaaag

SEQ ID NO: 3685948 - RNA, 16 nt, Human
ucaaaugacccaaaga

SEQ ID NO: 3685949 - RNA, 21 nt, Human
ucaaaugacccaaagaccaau

SEQ ID NO: 3685950 - RNA, 15 nt, Human
ucaaaugagaaaaug

SEQ ID NO: 3685951 - RNA, 18 nt, Human
ucaaaugaugugccugcu

SEQ ID NO: 3685952 - RNA, 22 nt, Human
ucaaaugaugugccugcuucag

SEQ ID NO: 3685953 - RNA, 14 nt, Human
ucaaaugcucagac

SEQ ID NO: 3685954 - RNA, 19 nt, Human
ucaaaugcucagaccagcu

SEQ ID NO: 3685955 - RNA, 21 nt, Human
ucaaaugcucagaccagcucu

SEQ ID NO: 3685956 - RNA, 17 nt, Human
ucaaauggaagacacau

SEQ ID NO: 3685957 - RNA, 20 nt, Human
ucaaauggaagacacauuga

SEQ ID NO: 3685958 - RNA, 21 nt, Human
ucaaaugguaggcauuuccua

SEQ ID NO: 3685959 - RNA, 14 nt, Human
ucaaauguguuuug

SEQ ID NO: 3685960 - RNA, 14 nt, Human
ucaaauguucuaag

SEQ ID NO: 3685961 - RNA, 15 nt, Human
ucaaauguucuaagu

SEQ ID NO: 3685962 - RNA, 19 nt, Human
ucaaauguucuaaguuucu

SEQ ID NO: 3685963 - RNA, 14 nt, Human
ucaaauguuuaauc

SEQ ID NO: 3685964 - RNA, 20 nt, Human
ucaaauuaaaacagcugcau

SEQ ID NO: 3685965 - RNA, 21 nt, Human
uuuuaccuaccacagugucug

SEQ ID NO: 3685966 - RNA, 19 nt, Human
uuuuaccuagcuaauuauu

SEQ ID NO: 3685967 - RNA, 15 nt, Human
uuuuaccugcugcuu

SEQ ID NO: 3685968 - RNA, 21 nt, Human
uuuuaccugucacauugcauu

SEQ ID NO: 3685969 - RNA, 19 nt, Human
uuuuacguccaucucuugu

SEQ ID NO: 3685970 - RNA, 13 nt, Human
uuuuacuaaagaa

SEQ ID NO: 3685971 - RNA, 15 nt, Human
uuuuacuaauagaca

SEQ ID NO: 3685972 - RNA, 22 nt, Human
uuuuacuaccaaugccaagaua

SEQ ID NO: 3685973 - RNA, 14 nt, Human
uuuuacuacugugg

SEQ ID NO: 3685974 - RNA, 15 nt, Human
uuuuacuacugugga

SEQ ID NO: 3685975 - RNA, 15 nt, Human
uuuuacuagaacaca

SEQ ID NO: 3685976 - RNA, 15 nt, Human
uuuuacuccaguggu

SEQ ID NO: 3685977 - RNA, 16 nt, Human
uuuuacucugccuaca

SEQ ID NO: 3685978 - RNA, 15 nt, Human
uuuuacugguugcau

SEQ ID NO: 3685979 - RNA, 18 nt, Human
uuuuacugucuuaauuaa

SEQ ID NO: 3685980 - RNA, 22 nt, Human
uuuuacuugcauugaauauauu

SEQ ID NO: 3685981 - RNA, 19 nt, Human
uuuuacuuuuauaauaaaa

SEQ ID NO: 3685982 - RNA, 12 nt, Human
uuuuacuuuugu

SEQ ID NO: 3685983 - RNA, 12 nt, Human
uuuuacuuuuuu

SEQ ID NO: 3685984 - RNA, 16 nt, Human
uuuuagaaagcauuug

SEQ ID NO: 3685985 - RNA, 20 nt, Human
uuuuagaaagcauuugaaug

SEQ ID NO: 3685986 - RNA, 21 nt, Human
uuuuagaaagcauuugaaugc

SEQ ID NO: 3685987 - RNA, 22 nt, Human
uuuuagaaagcauuugaaugca

SEQ ID NO: 3685988 - RNA, 23 nt, Human
uuuuagaaagcauuugaaugcau

SEQ ID NO: 3685989 - RNA, 14 nt, Human
uuuuagaacagaaa

SEQ ID NO: 3685990 - RNA, 17 nt, Human
uuuuagaacagaaaaca

SEQ ID NO: 3685991 - RNA, 18 nt, Human
uuuuagaacagaaaacaa

SEQ ID NO: 3685992 - RNA, 20 nt, Human
uuuuagaauaagaauuugca

SEQ ID NO: 3685993 - RNA, 22 nt, Human
uuuuagacaaauacucaugugu

SEQ ID NO: 3685994 - RNA, 23 nt, Human
uuuuagacaaauacucaugugua

SEQ ID NO: 3685995 - RNA, 22 nt, Human
uuuuagacaaaucuaagggaaa

SEQ ID NO: 3685996 - RNA, 21 nt, Human
uuuuagacagucucacuuugu

SEQ ID NO: 3685997 - RNA, 21 nt, Human
uuuuagacccuauugcugcuu

SEQ ID NO: 3685998 - RNA, 12 nt, Human
uuuuagagaaaa

SEQ ID NO: 3685999 - RNA, 17 nt, Human
uuuuagagacuauggag

SEQ ID NO: 3686000 - RNA, 15 nt, Human
uuuuagaguaagaaa

SEQ ID NO: 3686001 - RNA, 23 nt, Human
uuuuagaguugauacuacaguuu

SEQ ID NO: 3686002 - RNA, 18 nt, Human
uuuuagauacuuugcuag

SEQ ID NO: 3686003 - RNA, 16 nt, Human
uuuuagaucaaauacu

SEQ ID NO: 3686004 - RNA, 20 nt, Human
uuuuagauugagaaaugugu

SEQ ID NO: 3686005 - RNA, 20 nt, Human
uuuuagcaguucugcaaaua

SEQ ID NO: 3686006 - RNA, 12 nt, Human
uuuuaggaaaug

SEQ ID NO: 3686007 - RNA, 18 nt, Human
uuuuaggaagcaagcuua

SEQ ID NO: 3686008 - RNA, 15 nt, Human
uuuuaggcaaguuuu

SEQ ID NO: 3686009 - RNA, 18 nt, Human
uuuuaggcagggauuuga

SEQ ID NO: 3686010 - RNA, 19 nt, Human
uuuuaggcagggauuugag

SEQ ID NO: 3686011 - RNA, 20 nt, Human
uuuuaggccaaaaaaaugua

SEQ ID NO: 3686012 - RNA, 22 nt, Human
uuuuagguguugauuuucuguu

SEQ ID NO: 3686013 - RNA, 12 nt, Human
uuuuagguucua

SEQ ID NO: 3686014 - RNA, 15 nt, Human
uuuuagguucuaaag

SEQ ID NO: 3686015 - RNA, 18 nt, Human
uuuuaguaaucuguacau

SEQ ID NO: 3686016 - RNA, 14 nt, Human
uuuuaguaauuucu

SEQ ID NO: 3686017 - RNA, 15 nt, Human
uuuuaguauucauuc

SEQ ID NO: 3686018 - RNA, 16 nt, Human
uuuuagucauuuugcu

SEQ ID NO: 3686019 - RNA, 18 nt, Human
uuuuagugauuuuaauaa

SEQ ID NO: 3686020 - RNA, 23 nt, Human
uuuuaguggacccugaaaugugu

SEQ ID NO: 3686021 - RNA, 16 nt, Human
uuuuaguucuuuggaa

SEQ ID NO: 3686022 - RNA, 12 nt, Human
uuuuaguugaau

SEQ ID NO: 3686023 - RNA, 18 nt, Human
uuuuaguuuuucauuaaa

SEQ ID NO: 3686024 - RNA, 21 nt, Human
uuuuauaaaaaaaaugaaaug

SEQ ID NO: 3686025 - RNA, 17 nt, Human
uuuuauaaaauuuugcu

SEQ ID NO: 3686026 - RNA, 12 nt, Human
uuuuauaaacuu

SEQ ID NO: 3686027 - RNA, 17 nt, Human
uuuuauaaacuuuaccu

SEQ ID NO: 3686028 - RNA, 12 nt, Human
uuuuauaaagug

SEQ ID NO: 3686029 - RNA, 20 nt, Human
uuuuauaaauauaagccuuu

SEQ ID NO: 3686030 - RNA, 12 nt, Human
uuuuauaaaucg

SEQ ID NO: 3686031 - RNA, 13 nt, Human
uuuuauaagaaaa

SEQ ID NO: 3686032 - RNA, 16 nt, Human
uuuuauaagaaaaacu

SEQ ID NO: 3686033 - RNA, 17 nt, Human
uuuuauaagaaaaacuu

SEQ ID NO: 3686034 - RNA, 19 nt, Human
uuuuauaauucucauuaaa

SEQ ID NO: 3686035 - RNA, 14 nt, Human
uuuuauaauuuugu

SEQ ID NO: 3686036 - RNA, 21 nt, Human
uuuuauaauuuugugaagcaa

SEQ ID NO: 3686037 - RNA, 14 nt, Human
uuuuauacaaaaua

SEQ ID NO: 3686038 - RNA, 14 nt, Human
uuuuauacaaaccu

SEQ ID NO: 3686039 - RNA, 13 nt, Human
uuuuauacacaua

SEQ ID NO: 3686040 - RNA, 15 nt, Human
uuuuauacaggggaa

SEQ ID NO: 3686041 - RNA, 19 nt, Human
uuuuauacucuuucuguau

SEQ ID NO: 3686042 - RNA, 12 nt, Human
uuuuauacugua

SEQ ID NO: 3686043 - RNA, 18 nt, Human
uuuuauacuuucccuacc

SEQ ID NO: 3686044 - RNA, 19 nt, Human
uuuuauagaaaaacaaauc

SEQ ID NO: 3686045 - RNA, 13 nt, Human
uuuuauagugugu

SEQ ID NO: 3686046 - RNA, 9 nt, Human
uuuuauaua

SEQ ID NO: 3686047 - RNA, 22 nt, Human
uuuuauauaauaaaguauucca

SEQ ID NO: 3686048 - RNA, 11 nt, Human
uuuuauauaua

SEQ ID NO: 3686049 - RNA, 20 nt, Human
uuuuauaucaauuuaaaaaa

SEQ ID NO: 3686050 - RNA, 21 nt, Human
uuuuauaucuggaaugagccu

SEQ ID NO: 3686051 - RNA, 16 nt, Human
uuuuauaucuguaugu

SEQ ID NO: 3686052 - RNA, 17 nt, Human
uuuuauaucuguaugua

SEQ ID NO: 3686053 - RNA, 17 nt, Human
uuuuauauuaaaauaag

SEQ ID NO: 3686054 - RNA, 17 nt, Human
uuuuauauuaauguacu

SEQ ID NO: 3686055 - RNA, 19 nt, Human
uuuuauauuacugacauuu

SEQ ID NO: 3686056 - RNA, 13 nt, Human
uuuuauauugaaa

SEQ ID NO: 3686057 - RNA, 14 nt, Human
uuuuauauugaaaa

SEQ ID NO: 3686058 - RNA, 22 nt, Human
uuuuauauugauaacagcacug

SEQ ID NO: 3686059 - RNA, 10 nt, Human
uuuuauauuu

SEQ ID NO: 3686060 - RNA, 13 nt, Human
uuuuauauuuacu

SEQ ID NO: 3686061 - RNA, 20 nt, Human
uuuuauauuuccuuuaugug

SEQ ID NO: 3686062 - RNA, 21 nt, Human
uuuuauauuuccuuuauguga

SEQ ID NO: 3686063 - RNA, 15 nt, Human
uuuuaucacauguau

SEQ ID NO: 3686064 - RNA, 15 nt, Human
uuuuaucccaaaguu

SEQ ID NO: 3686065 - RNA, 19 nt, Human
uuuuaucgucacugcuuaa

SEQ ID NO: 3686066 - RNA, 13 nt, Human
uuuuaucucagau

SEQ ID NO: 3686067 - RNA, 20 nt, Human
uuuuaucugaaaucaauuaa

SEQ ID NO: 3686068 - RNA, 13 nt, Human
uuuuaucuuuucu

SEQ ID NO: 3686069 - RNA, 20 nt, Human
uuuuaugacuucauuaauaa

SEQ ID NO: 3686070 - RNA, 11 nt, Human
uuuuaugagaa

SEQ ID NO: 3686071 - RNA, 12 nt, Human
uuuuaugagaaa

SEQ ID NO: 3686072 - RNA, 15 nt, Human
uuuuaugagaaaugu

SEQ ID NO: 3686073 - RNA, 16 nt, Human
uuuuaugagaaaugua

SEQ ID NO: 3686074 - RNA, 18 nt, Human
uuuuaugagcucauguag

SEQ ID NO: 3686075 - RNA, 21 nt, Human
uuuuaugagcucauguagcaa

SEQ ID NO: 3686076 - RNA, 22 nt, Human
uuuuaugagcucauguagcaau

SEQ ID NO: 3686077 - RNA, 21 nt, Human
uuuuaugaggagugaacauuu

SEQ ID NO: 3686078 - RNA, 15 nt, Human
uuuuaugauaucccu

SEQ ID NO: 3686079 - RNA, 20 nt, Human
uuuuaugaugacguacaagu

SEQ ID NO: 3686080 - RNA, 19 nt, Human
uuuuaugcucuuuuuuacu

SEQ ID NO: 3686081 - RNA, 22 nt, Human
uuuuaugcucuuuuuuacucau

SEQ ID NO: 3686082 - RNA, 19 nt, Human
uuuuauggagaccucuccu

SEQ ID NO: 3686083 - RNA, 22 nt, Human
uuuuauggcacuaguauuucua

SEQ ID NO: 3686084 - RNA, 19 nt, Human
uuuuauggcuuuugugcau

SEQ ID NO: 3686085 - RNA, 18 nt, Human
uuuuauggugccuaguau

SEQ ID NO: 3686086 - RNA, 23 nt, Human
uuuuauggugccuaguauugaca

SEQ ID NO: 3686087 - RNA, 13 nt, Human
uuuuauguugaca

SEQ ID NO: 3686088 - RNA, 15 nt, Human
uuuuauguuugaaua

SEQ ID NO: 3686089 - RNA, 22 nt, Human
uuuuauuaaaauauuucagguu

SEQ ID NO: 3686090 - RNA, 12 nt, Human
uuuuauuaagaa

SEQ ID NO: 3686091 - RNA, 13 nt, Human
uuuuauuaaucac

SEQ ID NO: 3686092 - RNA, 23 nt, Human
uuuuauuaaucacuguguauauu

SEQ ID NO: 3686093 - RNA, 14 nt, Human
uuuuauuaaugcac

SEQ ID NO: 3686094 - RNA, 13 nt, Human
uuuuauuaauuua

SEQ ID NO: 3686095 - RNA, 20 nt, Human
uuuuauuaguauuguugucc

SEQ ID NO: 3686096 - RNA, 22 nt, Human
uuuuauuaguauuguuguccuu

SEQ ID NO: 3686097 - RNA, 23 nt, Human
uuuuauuaguauuguuguccuuu

SEQ ID NO: 3686098 - RNA, 22 nt, Human
uuuuauuaugaaacuuguguaa

SEQ ID NO: 3686099 - RNA, 14 nt, Human
uuuuauuaugcaua

SEQ ID NO: 3686100 - RNA, 19 nt, Human
uuuuauuaugcauaacuga

SEQ ID NO: 3686101 - RNA, 14 nt, Human
uuuuauuauguaaa

SEQ ID NO: 3686102 - RNA, 13 nt, Human
uuuuauuauugug

SEQ ID NO: 3686103 - RNA, 14 nt, Human
uuuuauuauugugg

SEQ ID NO: 3686104 - RNA, 17 nt, Human
uuuuauuauuucuauua

SEQ ID NO: 3686105 - RNA, 21 nt, Human
uuuuauucagcucauggacuu

SEQ ID NO: 3686106 - RNA, 13 nt, Human
uuuuauucuugug

SEQ ID NO: 3686107 - RNA, 18 nt, Human
uuuuauucuugugaauau

SEQ ID NO: 3686108 - RNA, 16 nt, Human
uuuuauugacacagaa

SEQ ID NO: 3686109 - RNA, 18 nt, Human
uuuuauugacacagaaaa

SEQ ID NO: 3686110 - RNA, 16 nt, Human
uuuuauugccuucuca

SEQ ID NO: 3686111 - RNA, 22 nt, Human
uuuuauuguaacagacauuguu

SEQ ID NO: 3686112 - RNA, 23 nt, Human
uuuuauuucagauuuugauaacu

SEQ ID NO: 3686113 - RNA, 14 nt, Human
uuuuauuuccauca

SEQ ID NO: 3686114 - RNA, 21 nt, Human
uuuuauuucuacugucaaaug

SEQ ID NO: 3686115 - RNA, 18 nt, Human
uugguucuggacuaaaac

SEQ ID NO: 3686116 - RNA, 20 nt, Human
uugguucuggacuaaaacua

SEQ ID NO: 3686117 - RNA, 20 nt, Human
uugguugaaaauaaaaagau

SEQ ID NO: 3686118 - RNA, 16 nt, Human
uugguugaauaaacua

SEQ ID NO: 3686119 - RNA, 22 nt, Human
uugguugggaaugaggaaaauu

SEQ ID NO: 3686120 - RNA, 21 nt, Human
uugguugguaacucuguaauu

SEQ ID NO: 3686121 - RNA, 12 nt, Human
uugguugucaau

SEQ ID NO: 3686122 - RNA, 18 nt, Human
uugguugucaauauuaaa

SEQ ID NO: 3686123 - RNA, 22 nt, Human
uugguugucaauauuaaauaca

SEQ ID NO: 3686124 - RNA, 15 nt, Human
uugguugugucuuuu

SEQ ID NO: 3686125 - RNA, 17 nt, Human
uugguuuaaagaaagug

SEQ ID NO: 3686126 - RNA, 23 nt, Human
uugguuuaaagaaaguguauuug

SEQ ID NO: 3686127 - RNA, 13 nt, Human
uugguuuacauuu

SEQ ID NO: 3686128 - RNA, 20 nt, Human
uugguuuacauuuaaagcau

SEQ ID NO: 3686129 - RNA, 13 nt, Human
uugguuuacuuuc

SEQ ID NO: 3686130 - RNA, 15 nt, Human
uugguuuacuuucaa

SEQ ID NO: 3686131 - RNA, 18 nt, Human
uugguuugcagaugacaa

SEQ ID NO: 3686132 - RNA, 16 nt, Human
uugguuuuaaaauacu

SEQ ID NO: 3686133 - RNA, 12 nt, Human
uugguuuuauga

SEQ ID NO: 3686134 - RNA, 16 nt, Human
uugguuuuaugaugac

SEQ ID NO: 3686135 - RNA, 23 nt, Human
uugguuuuaugguuacuucuucu

SEQ ID NO: 3686136 - RNA, 13 nt, Human
uugguuuuccugu

SEQ ID NO: 3686137 - RNA, 15 nt, Human
uugguuuuccuguau

SEQ ID NO: 3686138 - RNA, 17 nt, Human
uugguuuuccuguggca

SEQ ID NO: 3686139 - RNA, 17 nt, Human
uugguuuugacuucaga

SEQ ID NO: 3686140 - RNA, 14 nt, Human
uugguuuugccauu

SEQ ID NO: 3686141 - RNA, 21 nt, Human
uugguuuugcuacauaauuau

SEQ ID NO: 3686142 - RNA, 14 nt, Human
uugguuuuguuccc

SEQ ID NO: 3686143 - RNA, 17 nt, Human
uugguuuuuaaagauuu

SEQ ID NO: 3686144 - RNA, 23 nt, Human
uugguuuuuacuuaacuguuuca

SEQ ID NO: 3686145 - RNA, 18 nt, Human
uuguaaaaaaaaaaaaca

SEQ ID NO: 3686146 - RNA, 20 nt, Human
uuguaaaaaaaaaugccuuu

SEQ ID NO: 3686147 - RNA, 23 nt, Human
uuguaaaaacagcauugcuuucu

SEQ ID NO: 3686148 - RNA, 12 nt, Human
uuguaaaaagaa

SEQ ID NO: 3686149 - RNA, 18 nt, Human
uuguaaaacaaaauuuga

SEQ ID NO: 3686150 - RNA, 20 nt, Human
uuguaaaaccugucaaugau

SEQ ID NO: 3686151 - RNA, 23 nt, Human
uuguaaaaccugucaaugauaca

SEQ ID NO: 3686152 - RNA, 15 nt, Human
uuguaaaagaaauca

SEQ ID NO: 3686153 - RNA, 18 nt, Human
uuguaaaagaaaucaugu

SEQ ID NO: 3686154 - RNA, 22 nt, Human
uuguaaaagaaaucauguccau

SEQ ID NO: 3686155 - RNA, 17 nt, Human
uuguaaaagcaacauca

SEQ ID NO: 3686156 - RNA, 20 nt, Human
uuguaaaagcaacaucagcu

SEQ ID NO: 3686157 - RNA, 18 nt, Human
uuguaaaauauagcugua

SEQ ID NO: 3686158 - RNA, 20 nt, Human
uuguaaaauauagcuguaca

SEQ ID NO: 3686159 - RNA, 19 nt, Human
uuguaaaaugacaaucaug

SEQ ID NO: 3686160 - RNA, 13 nt, Human
uuguaaaauggug

SEQ ID NO: 3686161 - RNA, 15 nt, Human
uuguaaaauguauua

SEQ ID NO: 3686162 - RNA, 18 nt, Human
uuguaaaauguauuaugu

SEQ ID NO: 3686163 - RNA, 17 nt, Human
uuguaaaauuauuucau

SEQ ID NO: 3686164 - RNA, 22 nt, Human
uuguaaacaaacuguguaacug

SEQ ID NO: 3686165 - RNA, 20 nt, Human
uuguaaacauuaguucuauu

SEQ ID NO: 3686166 - RNA, 22 nt, Human
uuguaaacauuaguucuauuuc

SEQ ID NO: 3686167 - RNA, 12 nt, Human
uuguaaacauuu

SEQ ID NO: 3686168 - RNA, 13 nt, Human
uuguaaacauuua

SEQ ID NO: 3686169 - RNA, 16 nt, Human
uuguaaacguuucagu

SEQ ID NO: 3686170 - RNA, 16 nt, Human
uuguaaacucaaaaua

SEQ ID NO: 3686171 - RNA, 23 nt, Human
uuguaaagaaaaauauuuaaugu

SEQ ID NO: 3686172 - RNA, 20 nt, Human
uuguaaagaaauuuacuaua

SEQ ID NO: 3686173 - RNA, 21 nt, Human
uuguaaagacugguuuucugc

SEQ ID NO: 3686174 - RNA, 16 nt, Human
uuguaaagauuucugu

SEQ ID NO: 3686175 - RNA, 16 nt, Human
uuguaaaguccccaga

SEQ ID NO: 3686176 - RNA, 22 nt, Human
uuguaaaguccccagagaaagc

SEQ ID NO: 3686177 - RNA, 18 nt, Human
uuguaaauaaaggaacca

SEQ ID NO: 3686178 - RNA, 21 nt, Human
uuguaaauaagagauuuggag

SEQ ID NO: 3686179 - RNA, 22 nt, Human
uuguaaauacaaguucuauuua

SEQ ID NO: 3686180 - RNA, 23 nt, Human
uuguaaauacaaguucuauuuaa

SEQ ID NO: 3686181 - RNA, 13 nt, Human
uuguaaauacacc

SEQ ID NO: 3686182 - RNA, 15 nt, Human
uuguaaauaccagga

SEQ ID NO: 3686183 - RNA, 18 nt, Human
uuguaaauaggauuuuua

SEQ ID NO: 3686184 - RNA, 17 nt, Human
uuguaaauaguauuuga

SEQ ID NO: 3686185 - RNA, 12 nt, Human
uuguaaauauaa

SEQ ID NO: 3686186 - RNA, 13 nt, Human
uuguaaauauaaa

SEQ ID NO: 3686187 - RNA, 17 nt, Human
uuguaaauauaaagacg

SEQ ID NO: 3686188 - RNA, 15 nt, Human
uuguaaauauauaaa

SEQ ID NO: 3686189 - RNA, 17 nt, Human
uuguaaauauauaaaua

SEQ ID NO: 3686190 - RNA, 14 nt, Human
uuguaaauauugug

SEQ ID NO: 3686191 - RNA, 21 nt, Human
uuguaaaugugguaaagaguu

SEQ ID NO: 3686192 - RNA, 22 nt, Human
uuguaaauguguuggacaaaug

SEQ ID NO: 3686193 - RNA, 19 nt, Human
uuguaaauguuauuucugc

SEQ ID NO: 3686194 - RNA, 22 nt, Human
uuguaaauuaaacauaaaacaa

SEQ ID NO: 3686195 - RNA, 16 nt, Human
uuguaaauuaaucuuu

SEQ ID NO: 3686196 - RNA, 14 nt, Human
uuguaaauuauauu

SEQ ID NO: 3686197 - RNA, 15 nt, Human
uuguaaauucugauu

SEQ ID NO: 3686198 - RNA, 15 nt, Human
uuguaaauuuagugu

SEQ ID NO: 3686199 - RNA, 16 nt, Human
uuguaaauuuaguguu

SEQ ID NO: 3686200 - RNA, 17 nt, Human
uuguaacagacauuguu

SEQ ID NO: 3686201 - RNA, 14 nt, Human
uuguaacccacuga

SEQ ID NO: 3686202 - RNA, 18 nt, Human
uuguaaccucagcucugg

SEQ ID NO: 3686203 - RNA, 19 nt, Human
uuguaaccucagcucuggg

SEQ ID NO: 3686204 - RNA, 20 nt, Human
uuguaaccucagcucuggga

SEQ ID NO: 3686205 - RNA, 16 nt, Human
uuguaacguugcugug

SEQ ID NO: 3686206 - RNA, 18 nt, Human
uuguaacuaaaauaauuu

SEQ ID NO: 3686207 - RNA, 23 nt, Human
uuguaacuaaaauaauuuuguaa

SEQ ID NO: 3686208 - RNA, 20 nt, Human
uuguaacuaggcucagagau

SEQ ID NO: 3686209 - RNA, 22 nt, Human
uuguaacuauguuuaaaguaau

SEQ ID NO: 3686210 - RNA, 14 nt, Human
uuguaacuccacca

SEQ ID NO: 3686211 - RNA, 13 nt, Human
uuguaacuuaugu

SEQ ID NO: 3686212 - RNA, 11 nt, Human
uuguaagaaau

SEQ ID NO: 3686213 - RNA, 13 nt, Human
uuguaagaaauac

SEQ ID NO: 3686214 - RNA, 13 nt, Human
uuguaagaaggca

SEQ ID NO: 3686215 - RNA, 24 nt, Human
uuguaagaaggcaauauuaaccua

SEQ ID NO: 3686216 - RNA, 20 nt, Human
uuguaagaguggaaccaaca

SEQ ID NO: 3686217 - RNA, 17 nt, Human
uuguaagaguguagaag

SEQ ID NO: 3686218 - RNA, 19 nt, Human
uuguaagaguguagaagca

SEQ ID NO: 3686219 - RNA, 22 nt, Human
uuguaagaguguagaagcauuc

SEQ ID NO: 3686220 - RNA, 15 nt, Human
uuguaagaugcuggg

SEQ ID NO: 3686221 - RNA, 17 nt, Human
uuguaagaugcuggguu

SEQ ID NO: 3686222 - RNA, 11 nt, Human
uuguaagauuu

SEQ ID NO: 3686223 - RNA, 14 nt, Human
uuguaagauuuuga

SEQ ID NO: 3686224 - RNA, 17 nt, Human
uuguaagcguauggcuu

SEQ ID NO: 3686225 - RNA, 22 nt, Human
uuguaagcguauggcuuuauuu

SEQ ID NO: 3686226 - RNA, 21 nt, Human
uuguaagugagagagacaaga

SEQ ID NO: 3686227 - RNA, 17 nt, Human
uuguaagugcuacauaa

SEQ ID NO: 3686228 - RNA, 14 nt, Human
uuguaaguuuaugu

SEQ ID NO: 3686229 - RNA, 23 nt, Human
uuguaauaaacccuuaacuggca

SEQ ID NO: 3686230 - RNA, 15 nt, Human
uuguaauaauaaaga

SEQ ID NO: 3686231 - RNA, 21 nt, Human
uuguaauauagaaaaaaacau

SEQ ID NO: 3686232 - RNA, 15 nt, Human
uuguaaucguuaugu

SEQ ID NO: 3686233 - RNA, 17 nt, Human
uuguaaucugaauaaag

SEQ ID NO: 3686234 - RNA, 14 nt, Human
uuguaauguaacug

SEQ ID NO: 3686235 - RNA, 14 nt, Human
uuguaaugucacca

SEQ ID NO: 3686236 - RNA, 15 nt, Human
uuguaauguuacuga

SEQ ID NO: 3686237 - RNA, 15 nt, Human
uuguaauuauggagu

SEQ ID NO: 3686238 - RNA, 17 nt, Human
uuguaauucuaaaugaa

SEQ ID NO: 3686239 - RNA, 12 nt, Human
uuguaauugcuu

SEQ ID NO: 3686240 - RNA, 19 nt, Human
uuguaauugcuuacauuuu

SEQ ID NO: 3686241 - RNA, 16 nt, Human
uuguaauuuaaaauaa

SEQ ID NO: 3686242 - RNA, 22 nt, Human
uuguaauuuaaacaggcccagc

SEQ ID NO: 3686243 - RNA, 12 nt, Human
uuguaauuuucu

SEQ ID NO: 3686244 - RNA, 19 nt, Human
uuguaauuuucuugaugac

SEQ ID NO: 3686245 - RNA, 16 nt, Human
uuguacaaaaaaaaag

SEQ ID NO: 3686246 - RNA, 15 nt, Human
uuguacaaaguauua

SEQ ID NO: 3686247 - RNA, 22 nt, Human
uuguacaaaguauuaagcauau

SEQ ID NO: 3686248 - RNA, 19 nt, Human
uuguacagaaucauugcuu

SEQ ID NO: 3686249 - RNA, 18 nt, Human
uuguacagacguaugcuu

SEQ ID NO: 3686250 - RNA, 11 nt, Human
uuguacaguuc

SEQ ID NO: 3686251 - RNA, 15 nt, Human
uuguacaguucaguu

SEQ ID NO: 3686252 - RNA, 11 nt, Human
uuguacaguuu

SEQ ID NO: 3686253 - RNA, 16 nt, Human
uuguacaguuuaaaau

SEQ ID NO: 3686254 - RNA, 15 nt, Human
uuguacaguuugcug

SEQ ID NO: 3686255 - RNA, 20 nt, Human
uuguacaguuugcuguacua

SEQ ID NO: 3686256 - RNA, 11 nt, Human
uuguacauaaa

SEQ ID NO: 3686257 - RNA, 18 nt, Human
uuguacauaaugcgugca

SEQ ID NO: 3686258 - RNA, 23 nt, Human
uuguacauacgauuuaagguauu

SEQ ID NO: 3686259 - RNA, 16 nt, Human
uuguacaucuggcuua

SEQ ID NO: 3686260 - RNA, 20 nt, Human
uuguacaucuggcuuauuuu

SEQ ID NO: 3686261 - RNA, 20 nt, Human
uuguacauguguagccugug

SEQ ID NO: 3686262 - RNA, 17 nt, Human
uuguacauuuaugauuu

SEQ ID NO: 3686263 - RNA, 15 nt, Human
uuguaccaacuuuua

SEQ ID NO: 3686264 - RNA, 15 nt, Human
uuguaccccccaacc

SEQ ID NO: 3686265 - RNA, 16 nt, Human
uuuuauuucuccuuuu

SEQ ID NO: 3686266 - RNA, 14 nt, Human
uuuuauuuuauguu

SEQ ID NO: 3686267 - RNA, 20 nt, Human
uuuuauuuucacccucugua

SEQ ID NO: 3686268 - RNA, 20 nt, Human
uuuuauuuugaaaagcuucu

SEQ ID NO: 3686269 - RNA, 16 nt, Human
uuuuauuuuguaauua

SEQ ID NO: 3686270 - RNA, 21 nt, Human
uuuuauuuuucucaugaugag

SEQ ID NO: 3686271 - RNA, 22 nt, Human
uuuucaaaaccagguccaauga

SEQ ID NO: 3686272 - RNA, 14 nt, Human
uuuucaaaagaaag

SEQ ID NO: 3686273 - RNA, 18 nt, Human
uuuucaaaagauaauauu

SEQ ID NO: 3686274 - RNA, 19 nt, Human
uuuucaaaauagaaaaguu

SEQ ID NO: 3686275 - RNA, 21 nt, Human
uuuucaaaccaguauacaaga

SEQ ID NO: 3686276 - RNA, 22 nt, Human
uuuucaaaccaguauacaagau

SEQ ID NO: 3686277 - RNA, 18 nt, Human
uuuucaaauggaguugga

SEQ ID NO: 3686278 - RNA, 19 nt, Human
uuuucaaauuguaucuagu

SEQ ID NO: 3686279 - RNA, 20 nt, Human
uuuucaacaaauaucuugug

SEQ ID NO: 3686280 - RNA, 18 nt, Human
uuuucaacagugaagaca

SEQ ID NO: 3686281 - RNA, 17 nt, Human
uuuucaaccucuagaau

SEQ ID NO: 3686282 - RNA, 19 nt, Human
uuuucaaccucuagaauuu

SEQ ID NO: 3686283 - RNA, 21 nt, Human
uuuucaacgcagcccugcuuu

SEQ ID NO: 3686284 - RNA, 15 nt, Human
uuuucaacuuugaau

SEQ ID NO: 3686285 - RNA, 18 nt, Human
uuuucaacuuugaauaaa

SEQ ID NO: 3686286 - RNA, 14 nt, Human
uuuucaagaaacug

SEQ ID NO: 3686287 - RNA, 18 nt, Human
uuuucaagcaucuccuga

SEQ ID NO: 3686288 - RNA, 21 nt, Human
uuuucaagcaucuccugagga

SEQ ID NO: 3686289 - RNA, 12 nt, Human
uuuucaaguauu

SEQ ID NO: 3686290 - RNA, 18 nt, Human
uuuucaauauauugaacu

SEQ ID NO: 3686291 - RNA, 16 nt, Human
uuuucaauauauuugu

SEQ ID NO: 3686292 - RNA, 11 nt, Human
uuuucaaugug

SEQ ID NO: 3686293 - RNA, 17 nt, Human
uuuucaauuaaacggau

SEQ ID NO: 3686294 - RNA, 21 nt, Human
uuuucaauuaaacggauuauu

SEQ ID NO: 3686295 - RNA, 22 nt, Human
uuuucaauuaaacggauuauuu

SEQ ID NO: 3686296 - RNA, 20 nt, Human
uuuucaauucaaaaauguac

SEQ ID NO: 3686297 - RNA, 23 nt, Human
uuuucacaggugugguguaauuu

SEQ ID NO: 3686298 - RNA, 16 nt, Human
uuuucacauaucuagu

SEQ ID NO: 3686299 - RNA, 15 nt, Human
uuuucacauccuuga

SEQ ID NO: 3686300 - RNA, 23 nt, Human
uuuucacaugaacauacuggcug

SEQ ID NO: 3686301 - RNA, 16 nt, Human
uuuucacauuggaaac

SEQ ID NO: 3686302 - RNA, 19 nt, Human
uuuucaccagauuugcuaa

SEQ ID NO: 3686303 - RNA, 17 nt, Human
uuuucacccuucuacuc

SEQ ID NO: 3686304 - RNA, 20 nt, Human
uuuucaccuuuucaggaaaa

SEQ ID NO: 3686305 - RNA, 15 nt, Human
uuuucacggaaguuu

SEQ ID NO: 3686306 - RNA, 19 nt, Human
uuuucacugcuggcugccu

SEQ ID NO: 3686307 - RNA, 14 nt, Human
uuuucacuuaugaa

SEQ ID NO: 3686308 - RNA, 17 nt, Human
uuuucagaaaaagaaau

SEQ ID NO: 3686309 - RNA, 15 nt, Human
uuuucagaaaauauu

SEQ ID NO: 3686310 - RNA, 22 nt, Human
uuuucagaaaauauuauguguu

SEQ ID NO: 3686311 - RNA, 18 nt, Human
uuuucagaaccucuuccc

SEQ ID NO: 3686312 - RNA, 13 nt, Human
uuuucagaaucug

SEQ ID NO: 3686313 - RNA, 17 nt, Human
uuuucagaaucugaaug

SEQ ID NO: 3686314 - RNA, 20 nt, Human
uuuucagaaucugaauguaa

SEQ ID NO: 3686315 - RNA, 11 nt, Human
uuuucagaccc

SEQ ID NO: 3686316 - RNA, 13 nt, Human
uuuucagaccgaa

SEQ ID NO: 3686317 - RNA, 14 nt, Human
uuuucagacucaga

SEQ ID NO: 3686318 - RNA, 21 nt, Human
uuuucagauauaaaagacuga

SEQ ID NO: 3686319 - RNA, 22 nt, Human
uuuucagauauaaaagacugac

SEQ ID NO: 3686320 - RNA, 11 nt, Human
uuuucagaugu

SEQ ID NO: 3686321 - RNA, 18 nt, Human
uuuucagaugugaaccau

SEQ ID NO: 3686322 - RNA, 18 nt, Human
uuuucagauuugcacaaa

SEQ ID NO: 3686323 - RNA, 18 nt, Human
uuuucagcgauguaugca

SEQ ID NO: 3686324 - RNA, 22 nt, Human
uuuucagcuaggaacaaaucuu

SEQ ID NO: 3686325 - RNA, 17 nt, Human
uuuucagcucucuguau

SEQ ID NO: 3686326 - RNA, 18 nt, Human
uuuucaggugcucaaaau

SEQ ID NO: 3686327 - RNA, 23 nt, Human
uuuucaguagggcuacaaaaccu

SEQ ID NO: 3686328 - RNA, 15 nt, Human
uuuucaguucaaagu

SEQ ID NO: 3686329 - RNA, 23 nt, Human
uuuucauaaauuauuugauuauu

SEQ ID NO: 3686330 - RNA, 17 nt, Human
uuuucauaagauauuuu

SEQ ID NO: 3686331 - RNA, 19 nt, Human
uuuucauaagauauuuuau

SEQ ID NO: 3686332 - RNA, 21 nt, Human
uuuucauacauuuucuaagaa

SEQ ID NO: 3686333 - RNA, 18 nt, Human
uuuucauacuuuuaccuu

SEQ ID NO: 3686334 - RNA, 19 nt, Human
uuuucauaguauccauauu

SEQ ID NO: 3686335 - RNA, 20 nt, Human
uuuucauaguauccauauuu

SEQ ID NO: 3686336 - RNA, 13 nt, Human
uuuucauauugug

SEQ ID NO: 3686337 - RNA, 19 nt, Human
uuuucauauugugccaaua

SEQ ID NO: 3686338 - RNA, 16 nt, Human
uuuucaucugggaaag

SEQ ID NO: 3686339 - RNA, 18 nt, Human
uuuucauggugaaaaugu

SEQ ID NO: 3686340 - RNA, 20 nt, Human
uuuucauuagcaaaaaaagu

SEQ ID NO: 3686341 - RNA, 17 nt, Human
uuuucauugauaugaaa

SEQ ID NO: 3686342 - RNA, 20 nt, Human
uuuucauuuaggugaggaag

SEQ ID NO: 3686343 - RNA, 13 nt, Human
uuuucauuuaucu

SEQ ID NO: 3686344 - RNA, 16 nt, Human
uuuucauuugccuauu

SEQ ID NO: 3686345 - RNA, 13 nt, Human
uuuucauuuucca

SEQ ID NO: 3686346 - RNA, 22 nt, Human
uuuucauuuucugcaagccugc

SEQ ID NO: 3686347 - RNA, 15 nt, Human
uuuuccaaaauaauu

SEQ ID NO: 3686348 - RNA, 21 nt, Human
uuuuccaacuuggcugcagga

SEQ ID NO: 3686349 - RNA, 18 nt, Human
uuuuccaagugugcauau

SEQ ID NO: 3686350 - RNA, 18 nt, Human
uuuuccaaucauuugacu

SEQ ID NO: 3686351 - RNA, 13 nt, Human
uuuuccagcuccu

SEQ ID NO: 3686352 - RNA, 21 nt, Human
uuuuccaggacuguuucaaac

SEQ ID NO: 3686353 - RNA, 20 nt, Human
uuuuccagggcaaucaaugu

SEQ ID NO: 3686354 - RNA, 16 nt, Human
uuuuccauauccuggu

SEQ ID NO: 3686355 - RNA, 14 nt, Human
uuuuccaucuaaaa

SEQ ID NO: 3686356 - RNA, 11 nt, Human
uuuuccaugaa

SEQ ID NO: 3686357 - RNA, 14 nt, Human
uuuuccaugaaaac

SEQ ID NO: 3686358 - RNA, 13 nt, Human
uuuucccaauaaa

SEQ ID NO: 3686359 - RNA, 20 nt, Human
uuuucccacugcacccccuc

SEQ ID NO: 3686360 - RNA, 20 nt, Human
uuuucccauuuaucuaaaua

SEQ ID NO: 3686361 - RNA, 19 nt, Human
uuuuccccccacucucccc

SEQ ID NO: 3686362 - RNA, 16 nt, Human
uuuucccccuuugugc

SEQ ID NO: 3686363 - RNA, 20 nt, Human
uuuuccccuaccaauauuag

SEQ ID NO: 3686364 - RNA, 16 nt, Human
uuuuccccuguccuga

SEQ ID NO: 3686365 - RNA, 15 nt, Human
uuuuccccuuuccug

SEQ ID NO: 3686366 - RNA, 16 nt, Human
uuuuccccuuuccugu

SEQ ID NO: 3686367 - RNA, 23 nt, Human
uuuucccgagcaaagucuaaagu

SEQ ID NO: 3686368 - RNA, 22 nt, Human
uuuucccuauuagagaagagau

SEQ ID NO: 3686369 - RNA, 20 nt, Human
uuuuccuaugcuauugacaa

SEQ ID NO: 3686370 - RNA, 16 nt, Human
uuuuccuccugagugc

SEQ ID NO: 3686371 - RNA, 18 nt, Human
uuuuccucgcuucuuuca

SEQ ID NO: 3686372 - RNA, 17 nt, Human
uuuuccucuuagaagaa

SEQ ID NO: 3686373 - RNA, 20 nt, Human
uuuuccugggacaucuucug

SEQ ID NO: 3686374 - RNA, 12 nt, Human
uuuuccuguccu

SEQ ID NO: 3686375 - RNA, 20 nt, Human
uuuuccuguccucuuucagc

SEQ ID NO: 3686376 - RNA, 21 nt, Human
uuuuccuguccucuuucagcu

SEQ ID NO: 3686377 - RNA, 13 nt, Human
uuuuccuguucua

SEQ ID NO: 3686378 - RNA, 19 nt, Human
uuuuccuuacauaaacauc

SEQ ID NO: 3686379 - RNA, 16 nt, Human
uuuuccuucaaaguuu

SEQ ID NO: 3686380 - RNA, 13 nt, Human
uuuuccuucaaga

SEQ ID NO: 3686381 - RNA, 14 nt, Human
uuuuccuucaagaa

SEQ ID NO: 3686382 - RNA, 19 nt, Human
uuuuccuucccuuuucugu

SEQ ID NO: 3686383 - RNA, 14 nt, Human
uuuuccuugaagcc

SEQ ID NO: 3686384 - RNA, 12 nt, Human
uuuuccuuuaaa

SEQ ID NO: 3686385 - RNA, 17 nt, Human
uuuuccuuugaauccuc

SEQ ID NO: 3686386 - RNA, 19 nt, Human
uuuuccuuuuuuauacaca

SEQ ID NO: 3686387 - RNA, 15 nt, Human
uuuucgaaaaucaaa

SEQ ID NO: 3686388 - RNA, 16 nt, Human
uuuucgaaaaucaaau

SEQ ID NO: 3686389 - RNA, 13 nt, Human
uuuucuaaaagcu

SEQ ID NO: 3686390 - RNA, 14 nt, Human
uuuucuaaagacuu

SEQ ID NO: 3686391 - RNA, 18 nt, Human
uuuucuaaaguaaaaaca

SEQ ID NO: 3686392 - RNA, 16 nt, Human
uuuucuaagaaacauu

SEQ ID NO: 3686393 - RNA, 18 nt, Human
uuuucuaagaaacauuua

SEQ ID NO: 3686394 - RNA, 15 nt, Human
uuuucuaagagaagu

SEQ ID NO: 3686395 - RNA, 19 nt, Human
uuuucuaagcaauuucuug

SEQ ID NO: 3686396 - RNA, 21 nt, Human
uuuucuaaugaggagagaaaa

SEQ ID NO: 3686397 - RNA, 15 nt, Human
uuuucuaaugugguu

SEQ ID NO: 3686398 - RNA, 21 nt, Human
uuuucuaaugugguuauuucu

SEQ ID NO: 3686399 - RNA, 16 nt, Human
uuuucuacaaguauuc

SEQ ID NO: 3686400 - RNA, 13 nt, Human
uuuucuacagugg

SEQ ID NO: 3686401 - RNA, 14 nt, Human
uuuucuacaguggu

SEQ ID NO: 3686402 - RNA, 16 nt, Human
uuuucuacccuagcca

SEQ ID NO: 3686403 - RNA, 20 nt, Human
uuuucuacucgaguuacaga

SEQ ID NO: 3686404 - RNA, 22 nt, Human
uuuucuacucgaguuacagaca

SEQ ID NO: 3686405 - RNA, 17 nt, Human
uuuucuacuuuuuuuaa

SEQ ID NO: 3686406 - RNA, 14 nt, Human
uuuucuagaauuau

SEQ ID NO: 3686407 - RNA, 15 nt, Human
uuuucuagaauuauu

SEQ ID NO: 3686408 - RNA, 22 nt, Human
uuuucuaguguaucaaaaugcu

SEQ ID NO: 3686409 - RNA, 23 nt, Human
uuuucuaguuugcucauacuaca

SEQ ID NO: 3686410 - RNA, 21 nt, Human
uuuucuauguacuaguacugu

SEQ ID NO: 3686411 - RNA, 14 nt, Human
uuuucuauuaaaag

SEQ ID NO: 3686412 - RNA, 21 nt, Human
uuuucuauuaaaagacucauc

SEQ ID NO: 3686413 - RNA, 19 nt, Human
uuuucuauuccuucuggcc

SEQ ID NO: 3686414 - RNA, 17 nt, Human
ucaaauuaauaaucuua

SEQ ID NO: 3686415 - RNA, 23 nt, Human
ucaaauuaaucuuucuuuaccug

SEQ ID NO: 3686416 - RNA, 15 nt, Human
ucaaauuaauugugu

SEQ ID NO: 3686417 - RNA, 16 nt, Human
ucaaauuaauugugug

SEQ ID NO: 3686418 - RNA, 15 nt, Human
ucaaauuagaagaca

SEQ ID NO: 3686419 - RNA, 17 nt, Human
ucaaauuagaagacauu

SEQ ID NO: 3686420 - RNA, 22 nt, Human
ucaaauuagaagacauuuauac

SEQ ID NO: 3686421 - RNA, 20 nt, Human
ucaaauucauuuuuuucacu

SEQ ID NO: 3686422 - RNA, 16 nt, Human
ucaaauucuucugaac

SEQ ID NO: 3686423 - RNA, 21 nt, Human
ucaaauucuucugaacucaaa

SEQ ID NO: 3686424 - RNA, 17 nt, Human
ucaaauuguaagcaugc

SEQ ID NO: 3686425 - RNA, 16 nt, Human
ucaaauuguaauuaau

SEQ ID NO: 3686426 - RNA, 14 nt, Human
ucaaauugugugaa

SEQ ID NO: 3686427 - RNA, 13 nt, Human
ucaaauuucuaaa

SEQ ID NO: 3686428 - RNA, 20 nt, Human
ucaaauuuguaggguuucua

SEQ ID NO: 3686429 - RNA, 23 nt, Human
ucaaauuuguaggguuucuaggu

SEQ ID NO: 3686430 - RNA, 22 nt, Human
ucaaauuugucugguuaaaaaa

SEQ ID NO: 3686431 - RNA, 14 nt, Human
ucaaauuuuuugac

SEQ ID NO: 3686432 - RNA, 12 nt, Human
ucaacaaacauu

SEQ ID NO: 3686433 - RNA, 18 nt, Human
ucaacaaagcacaguguu

SEQ ID NO: 3686434 - RNA, 21 nt, Human
ucaacaacauuccucaaaaug

SEQ ID NO: 3686435 - RNA, 15 nt, Human
ucaacaagaaauaau

SEQ ID NO: 3686436 - RNA, 17 nt, Human
ucaacaagaagaauuug

SEQ ID NO: 3686437 - RNA, 22 nt, Human
ucaacaagauuuccuugugcaa

SEQ ID NO: 3686438 - RNA, 16 nt, Human
ucaacaaggcuugcug

SEQ ID NO: 3686439 - RNA, 17 nt, Human
ucaacaagggagagacc

SEQ ID NO: 3686440 - RNA, 14 nt, Human
ucaacaauaaaaca

SEQ ID NO: 3686441 - RNA, 18 nt, Human
ucaacaauaaaauuuuuu

SEQ ID NO: 3686442 - RNA, 14 nt, Human
ucaacaauucuaaa

SEQ ID NO: 3686443 - RNA, 15 nt, Human
ucaacaauucuaaaa

SEQ ID NO: 3686444 - RNA, 14 nt, Human
ucaacaauuugggc

SEQ ID NO: 3686445 - RNA, 22 nt, Human
ucaacaccaugauuccuuuaac

SEQ ID NO: 3686446 - RNA, 23 nt, Human
ucaacacuuaaggguuuuagaaa

SEQ ID NO: 3686447 - RNA, 18 nt, Human
ucaacagaagcauuugua

SEQ ID NO: 3686448 - RNA, 21 nt, Human
ucaacagaagcauuuguauuu

SEQ ID NO: 3686449 - RNA, 22 nt, Human
ucaacagaaugaaaaaugaaag

SEQ ID NO: 3686450 - RNA, 16 nt, Human
ucaacagcuaugcugg

SEQ ID NO: 3686451 - RNA, 21 nt, Human
ucaacaggccucagggcuccu

SEQ ID NO: 3686452 - RNA, 13 nt, Human
ucaacaguaaacc

SEQ ID NO: 3686453 - RNA, 14 nt, Human
ucaacaguaaacca

SEQ ID NO: 3686454 - RNA, 14 nt, Human
ucaacaguguuuuc

SEQ ID NO: 3686455 - RNA, 22 nt, Human
ucaacaguuuuccuaugcuuug

SEQ ID NO: 3686456 - RNA, 23 nt, Human
ucaacauaacccacuugucacug

SEQ ID NO: 3686457 - RNA, 17 nt, Human
ucaacaucaauguucau

SEQ ID NO: 3686458 - RNA, 18 nt, Human
ucaacaucaauguucauu

SEQ ID NO: 3686459 - RNA, 19 nt, Human
ucaacaucaauguucauug

SEQ ID NO: 3686460 - RNA, 16 nt, Human
ucaacauccugccagc

SEQ ID NO: 3686461 - RNA, 17 nt, Human
ucaacauccugccagcc

SEQ ID NO: 3686462 - RNA, 18 nt, Human
ucaacauccugccagccc

SEQ ID NO: 3686463 - RNA, 12 nt, Human
ucaacaucuuuu

SEQ ID NO: 3686464 - RNA, 15 nt, Human
ucaacaucuuuuaca

SEQ ID NO: 3686465 - RNA, 22 nt, Human
ucaacauggcuacuugcuuuga

SEQ ID NO: 3686466 - RNA, 15 nt, Human
ucaacauguuacuga

SEQ ID NO: 3686467 - RNA, 21 nt, Human
ucaacauguuacugaccagca

SEQ ID NO: 3686468 - RNA, 14 nt, Human
ucaaccaaauggua

SEQ ID NO: 3686469 - RNA, 14 nt, Human
ucaaccagacagag

SEQ ID NO: 3686470 - RNA, 17 nt, Human
ucaaccagggauuguuu

SEQ ID NO: 3686471 - RNA, 22 nt, Human
ucaaccagguccagaugugcua

SEQ ID NO: 3686472 - RNA, 13 nt, Human
ucaaccauccugg

SEQ ID NO: 3686473 - RNA, 18 nt, Human
ucaaccauuccccauggg

SEQ ID NO: 3686474 - RNA, 15 nt, Human
ucaacccaggagcau

SEQ ID NO: 3686475 - RNA, 22 nt, Human
ucaaccccaccauaugaauugu

SEQ ID NO: 3686476 - RNA, 15 nt, Human
ucaaccccuccccuc

SEQ ID NO: 3686477 - RNA, 19 nt, Human
ucaaccccuccccuccauc

SEQ ID NO: 3686478 - RNA, 23 nt, Human
ucaaccccuccccuccaucccug

SEQ ID NO: 3686479 - RNA, 22 nt, Human
ucaacccuaaaaagcagagcuu

SEQ ID NO: 3686480 - RNA, 23 nt, Human
ucaacccuaaaaagcagagcuuu

SEQ ID NO: 3686481 - RNA, 19 nt, Human
ucaacccucaggggaaaac

SEQ ID NO: 3686482 - RNA, 18 nt, Human
ucaacccuuuugucugcc

SEQ ID NO: 3686483 - RNA, 13 nt, Human
ucaaccuaaccac

SEQ ID NO: 3686484 - RNA, 18 nt, Human
ucaaccuaccaccccuuc

SEQ ID NO: 3686485 - RNA, 22 nt, Human
ucaaccuaccaccccuuccugu

SEQ ID NO: 3686486 - RNA, 23 nt, Human
ucaaccuaccaccccuuccuguc

SEQ ID NO: 3686487 - RNA, 13 nt, Human
ucaaccuccugga

SEQ ID NO: 3686488 - RNA, 16 nt, Human
ucaaccuccugggcua

SEQ ID NO: 3686489 - RNA, 15 nt, Human
ucaaccuccugugga

SEQ ID NO: 3686490 - RNA, 19 nt, Human
ucaaccucuucuggcucaa

SEQ ID NO: 3686491 - RNA, 19 nt, Human
ucaaccuguaaauuauuuu

SEQ ID NO: 3686492 - RNA, 19 nt, Human
ucaaccuguucaucuugaa

SEQ ID NO: 3686493 - RNA, 19 nt, Human
ucaacgcuuaaaggugucu

SEQ ID NO: 3686494 - RNA, 20 nt, Human
ucaacgcuuaaaggugucuu

SEQ ID NO: 3686495 - RNA, 23 nt, Human
ucaacgcuuaaaggugucuuccu

SEQ ID NO: 3686496 - RNA, 15 nt, Human
ucaacguuaauaauu

SEQ ID NO: 3686497 - RNA, 20 nt, Human
ucaacguuguacuguaugug

SEQ ID NO: 3686498 - RNA, 17 nt, Human
ucaacguuucuucacuu

SEQ ID NO: 3686499 - RNA, 23 nt, Human
ucaacuaccucgcaucauugcag

SEQ ID NO: 3686500 - RNA, 17 nt, Human
ucaacuacuauucaaaa

SEQ ID NO: 3686501 - RNA, 16 nt, Human
ucaacucagacuaguu

SEQ ID NO: 3686502 - RNA, 20 nt, Human
ucaacucagacuaguuuagu

SEQ ID NO: 3686503 - RNA, 22 nt, Human
ucaacuccaaacugacucuuaa

SEQ ID NO: 3686504 - RNA, 21 nt, Human
ucaacucccugccccccagcc

SEQ ID NO: 3686505 - RNA, 20 nt, Human
ucaacucucuuauugccuca

SEQ ID NO: 3686506 - RNA, 23 nt, Human
ucaacucucuuauugccucacuu

SEQ ID NO: 3686507 - RNA, 14 nt, Human
ucaacucuuuguua

SEQ ID NO: 3686508 - RNA, 22 nt, Human
ucaacugaaaguguuuccuuca

SEQ ID NO: 3686509 - RNA, 19 nt, Human
ucaacugccaaaaugcucu

SEQ ID NO: 3686510 - RNA, 14 nt, Human
ucaacugccuacuc

SEQ ID NO: 3686511 - RNA, 16 nt, Human
ucaacugucuuccuca

SEQ ID NO: 3686512 - RNA, 12 nt, Human
ucaacuuaacau

SEQ ID NO: 3686513 - RNA, 20 nt, Human
ucaacuugcaaaaucaguuu

SEQ ID NO: 3686514 - RNA, 16 nt, Human
ucaacuuuuuauugcc

SEQ ID NO: 3686515 - RNA, 18 nt, Human
ucaacuuuuuauugccuu

SEQ ID NO: 3686516 - RNA, 20 nt, Human
ucaacuuuuuauugccuucu

SEQ ID NO: 3686517 - RNA, 23 nt, Human
ucaacuuuuuauugccuucucac

SEQ ID NO: 3686518 - RNA, 23 nt, Human
ucaagaaaaaauaaauggaaauc

SEQ ID NO: 3686519 - RNA, 18 nt, Human
ucaagaaacagccagcaa

SEQ ID NO: 3686520 - RNA, 20 nt, Human
ucaagaaacugaggaauuuu

SEQ ID NO: 3686521 - RNA, 22 nt, Human
ucaagaaacugaggaauuuucu

SEQ ID NO: 3686522 - RNA, 23 nt, Human
ucaagaaacugaggaauuuucuu

SEQ ID NO: 3686523 - RNA, 18 nt, Human
ucaagaaagccagucuua

SEQ ID NO: 3686524 - RNA, 21 nt, Human
ucaagaaauaaaaggaagcca

SEQ ID NO: 3686525 - RNA, 14 nt, Human
ucaagaaaugaaga

SEQ ID NO: 3686526 - RNA, 16 nt, Human
ucaagaaaugaagagc

SEQ ID NO: 3686527 - RNA, 21 nt, Human
ucaagaaaugaagagcuguug

SEQ ID NO: 3686528 - RNA, 22 nt, Human
ucaagaacacagcccugcuucu

SEQ ID NO: 3686529 - RNA, 15 nt, Human
ucaagaacuuguuua

SEQ ID NO: 3686530 - RNA, 16 nt, Human
ucaagaacuuguuuaa

SEQ ID NO: 3686531 - RNA, 23 nt, Human
ucaagaagcaggcuacacugaca

SEQ ID NO: 3686532 - RNA, 15 nt, Human
ucaagaagggcugca

SEQ ID NO: 3686533 - RNA, 18 nt, Human
ucaagaagggcugcauga

SEQ ID NO: 3686534 - RNA, 21 nt, Human
ucaagaauaaucacgcuuucc

SEQ ID NO: 3686535 - RNA, 14 nt, Human
ucaagacauagcau

SEQ ID NO: 3686536 - RNA, 20 nt, Human
ucaagacauagcauccaagu

SEQ ID NO: 3686537 - RNA, 20 nt, Human
ucaagacauuaaaucuauga

SEQ ID NO: 3686538 - RNA, 21 nt, Human
ucaagaccaaauggaaacaga

SEQ ID NO: 3686539 - RNA, 15 nt, Human
ucaagacuuccagag

SEQ ID NO: 3686540 - RNA, 19 nt, Human
ucaagagaguaauggguuu

SEQ ID NO: 3686541 - RNA, 19 nt, Human
ucaagagccuuaaaacauc

SEQ ID NO: 3686542 - RNA, 13 nt, Human
ucaagagcugccc

SEQ ID NO: 3686543 - RNA, 18 nt, Human
ucaagaggaaugaaaaaa

SEQ ID NO: 3686544 - RNA, 21 nt, Human
ucaagagggcacugguggccc

SEQ ID NO: 3686545 - RNA, 19 nt, Human
ucaagagugaauucccuca

SEQ ID NO: 3686546 - RNA, 19 nt, Human
ucaagauacugcuacugua

SEQ ID NO: 3686547 - RNA, 17 nt, Human
ucaagaucaaaaaggcu

SEQ ID NO: 3686548 - RNA, 23 nt, Human
ucaagaucaaaaaggcuuauaaa

SEQ ID NO: 3686549 - RNA, 24 nt, Human
ucaagaucaaaaaggcuuauaaaa

SEQ ID NO: 3686550 - RNA, 20 nt, Human
ucaagauguccuccuuguuc

SEQ ID NO: 3686551 - RNA, 13 nt, Human
ucaagauucagcu

SEQ ID NO: 3686552 - RNA, 15 nt, Human
ucaagauucagcuag

SEQ ID NO: 3686553 - RNA, 19 nt, Human
ucaagauuguuccugcuuu

SEQ ID NO: 3686554 - RNA, 19 nt, Human
ucaagauuuugaaugcuuc

SEQ ID NO: 3686555 - RNA, 16 nt, Human
ucaagcaauccuccug

SEQ ID NO: 3686556 - RNA, 14 nt, Human
ucaagcaccaggga

SEQ ID NO: 3686557 - RNA, 12 nt, Human
ucaagcacugau

SEQ ID NO: 3686558 - RNA, 13 nt, Human
ucaagcacugaua

SEQ ID NO: 3686559 - RNA, 17 nt, Human
ucaagcagauuggagaa

SEQ ID NO: 3686560 - RNA, 22 nt, Human
ucaagcagcgaccgcccccucc

SEQ ID NO: 3686561 - RNA, 16 nt, Human
ucaagcagguuagaga

SEQ ID NO: 3686562 - RNA, 21 nt, Human
uuguaccuguaggacucucau

SEQ ID NO: 3686563 - RNA, 23 nt, Human
uuguaccuuuuuuguuuuuucaa

SEQ ID NO: 3686564 - RNA, 16 nt, Human
uuguacgaagaguauu

SEQ ID NO: 3686565 - RNA, 23 nt, Human
uuguacgaagaguauuuuugaca

SEQ ID NO: 3686566 - RNA, 17 nt, Human
uuguacguuuaaagugu

SEQ ID NO: 3686567 - RNA, 13 nt, Human
uuguacuauuuaa

SEQ ID NO: 3686568 - RNA, 16 nt, Human
uuguacuauuuaacug

SEQ ID NO: 3686569 - RNA, 14 nt, Human
uuguacucaauuuu

SEQ ID NO: 3686570 - RNA, 17 nt, Human
uuguacuguuuaauguu

SEQ ID NO: 3686571 - RNA, 17 nt, Human
uuguacuuucuguuaaa

SEQ ID NO: 3686572 - RNA, 20 nt, Human
uuguagaacucacucugggc

SEQ ID NO: 3686573 - RNA, 17 nt, Human
uuguagaauguauugua

SEQ ID NO: 3686574 - RNA, 20 nt, Human
uuguagaauguauuguaccu

SEQ ID NO: 3686575 - RNA, 13 nt, Human
uuguagaauuguu

SEQ ID NO: 3686576 - RNA, 18 nt, Human
uuguagauacaaucagcu

SEQ ID NO: 3686577 - RNA, 18 nt, Human
uuguagcacugacagauu

SEQ ID NO: 3686578 - RNA, 22 nt, Human
uuguagcacugacagauuucca

SEQ ID NO: 3686579 - RNA, 15 nt, Human
uuguagcauccugga

SEQ ID NO: 3686580 - RNA, 12 nt, Human
uuguagccagcc

SEQ ID NO: 3686581 - RNA, 19 nt, Human
uuguagccuuuugacuuuc

SEQ ID NO: 3686582 - RNA, 18 nt, Human
uuguagcuggggcuuuga

SEQ ID NO: 3686583 - RNA, 17 nt, Human
uuguagcuuuaucaaag

SEQ ID NO: 3686584 - RNA, 21 nt, Human
uuguaggaaggucucauucuu

SEQ ID NO: 3686585 - RNA, 21 nt, Human
uuguaggggaggggcuccuuu

SEQ ID NO: 3686586 - RNA, 13 nt, Human
uuguaggguuucu

SEQ ID NO: 3686587 - RNA, 16 nt, Human
uuguagguacuuuugg

SEQ ID NO: 3686588 - RNA, 22 nt, Human
uuguagguacuuuuggaaucua

SEQ ID NO: 3686589 - RNA, 21 nt, Human
uuguaguagcguuuuuuaaau

SEQ ID NO: 3686590 - RNA, 20 nt, Human
uuguaguagucucauuacuu

SEQ ID NO: 3686591 - RNA, 19 nt, Human
uuguagugccacuguuguu

SEQ ID NO: 3686592 - RNA, 15 nt, Human
uuguaguucuuuaaa

SEQ ID NO: 3686593 - RNA, 17 nt, Human
uuguaguucuuuaaacu

SEQ ID NO: 3686594 - RNA, 16 nt, Human
uuguaguugaauauug

SEQ ID NO: 3686595 - RNA, 17 nt, Human
uuguaguuuaccucuuu

SEQ ID NO: 3686596 - RNA, 16 nt, Human
uuguauaaaaaaaaua

SEQ ID NO: 3686597 - RNA, 13 nt, Human
uuguauaaaauaa

SEQ ID NO: 3686598 - RNA, 19 nt, Human
uuguauaaauguauauaca

SEQ ID NO: 3686599 - RNA, 17 nt, Human
uuguauaacagguuauu

SEQ ID NO: 3686600 - RNA, 15 nt, Human
uuguauaauuguauc

SEQ ID NO: 3686601 - RNA, 17 nt, Human
uuguauaauuguaucgu

SEQ ID NO: 3686602 - RNA, 13 nt, Human
uuguauacaaaua

SEQ ID NO: 3686603 - RNA, 13 nt, Human
uuguauacaagua

SEQ ID NO: 3686604 - RNA, 16 nt, Human
uuguauacaaguacug

SEQ ID NO: 3686605 - RNA, 17 nt, Human
uuguauacaaguacugg

SEQ ID NO: 3686606 - RNA, 20 nt, Human
uuguauaccuuguaauuuga

SEQ ID NO: 3686607 - RNA, 20 nt, Human
uuguauacuuuaaauaauuu

SEQ ID NO: 3686608 - RNA, 20 nt, Human
uuguauagcaugaaauaaaa

SEQ ID NO: 3686609 - RNA, 14 nt, Human
uuguauaguaaagu

SEQ ID NO: 3686610 - RNA, 14 nt, Human
uuguauaguguaaa

SEQ ID NO: 3686611 - RNA, 15 nt, Human
uuguauaguguaaaa

SEQ ID NO: 3686612 - RNA, 13 nt, Human
uuguauaguuaac

SEQ ID NO: 3686613 - RNA, 18 nt, Human
uuguauaguuaacacacu

SEQ ID NO: 3686614 - RNA, 19 nt, Human
uuguauaguuauguaaaua

SEQ ID NO: 3686615 - RNA, 20 nt, Human
uuguauaguuauguaaauaa

SEQ ID NO: 3686616 - RNA, 11 nt, Human
uuguauauauc

SEQ ID NO: 3686617 - RNA, 19 nt, Human
uuguauauauuauuauaau

SEQ ID NO: 3686618 - RNA, 21 nt, Human
uuguauauuauggaagauuuu

SEQ ID NO: 3686619 - RNA, 16 nt, Human
uuguauauugguuuua

SEQ ID NO: 3686620 - RNA, 14 nt, Human
uuguauauuguaau

SEQ ID NO: 3686621 - RNA, 19 nt, Human
uuguauauugucagauauu

SEQ ID NO: 3686622 - RNA, 13 nt, Human
uuguauauugugu

SEQ ID NO: 3686623 - RNA, 18 nt, Human
uuguauauuuguacaaaa

SEQ ID NO: 3686624 - RNA, 16 nt, Human
uuguaucacaaaucuu

SEQ ID NO: 3686625 - RNA, 19 nt, Human
uuguaucacaaaucuuaac

SEQ ID NO: 3686626 - RNA, 22 nt, Human
uuguaucagaggccuauaauga

SEQ ID NO: 3686627 - RNA, 15 nt, Human
uuguaucguauagcu

SEQ ID NO: 3686628 - RNA, 17 nt, Human
uuguaucuagugcagcu

SEQ ID NO: 3686629 - RNA, 21 nt, Human
uuguaucuagugcagcugauu

SEQ ID NO: 3686630 - RNA, 21 nt, Human
uuguaucucugaagcauguuu

SEQ ID NO: 3686631 - RNA, 14 nt, Human
uuguaucucuuuug

SEQ ID NO: 3686632 - RNA, 21 nt, Human
uuguaucugcaggcagacacg

SEQ ID NO: 3686633 - RNA, 15 nt, Human
uuguaucuggaaaga

SEQ ID NO: 3686634 - RNA, 15 nt, Human
uuguaucugucuuuc

SEQ ID NO: 3686635 - RNA, 12 nt, Human
uuguaugaaaac

SEQ ID NO: 3686636 - RNA, 13 nt, Human
uuguaugaucugu

SEQ ID NO: 3686637 - RNA, 19 nt, Human
uuguaugaucugugccuuu

SEQ ID NO: 3686638 - RNA, 16 nt, Human
uuguaugauguguugu

SEQ ID NO: 3686639 - RNA, 18 nt, Human
uuguaugauguguuguga

SEQ ID NO: 3686640 - RNA, 21 nt, Human
uuguaugauguguugugauag

SEQ ID NO: 3686641 - RNA, 22 nt, Human
uuguaugcaagcaguuucaaua

SEQ ID NO: 3686642 - RNA, 20 nt, Human
uuguaugccuuuaaaucugu

SEQ ID NO: 3686643 - RNA, 16 nt, Human
uuguauguaaaugugc

SEQ ID NO: 3686644 - RNA, 16 nt, Human
uuguauuaaacucuuc

SEQ ID NO: 3686645 - RNA, 14 nt, Human
uuguauuaaagaca

SEQ ID NO: 3686646 - RNA, 16 nt, Human
uuguauuaaagacaga

SEQ ID NO: 3686647 - RNA, 14 nt, Human
uuguauuaacaaaa

SEQ ID NO: 3686648 - RNA, 14 nt, Human
uuguauuacaaauc

SEQ ID NO: 3686649 - RNA, 13 nt, Human
uuguauuacagau

SEQ ID NO: 3686650 - RNA, 16 nt, Human
uuguauuagauguucu

SEQ ID NO: 3686651 - RNA, 21 nt, Human
uuguauucaauuaaagaaaua

SEQ ID NO: 3686652 - RNA, 14 nt, Human
uuguauucagaguu

SEQ ID NO: 3686653 - RNA, 19 nt, Human
uuguauucucuccuguacc

SEQ ID NO: 3686654 - RNA, 16 nt, Human
uuguauucucugagcu

SEQ ID NO: 3686655 - RNA, 14 nt, Human
uuguauucugucuu

SEQ ID NO: 3686656 - RNA, 19 nt, Human
uuguauucuuugauguuaa

SEQ ID NO: 3686657 - RNA, 15 nt, Human
uuguauugcuguccu

SEQ ID NO: 3686658 - RNA, 20 nt, Human
uuguauuguuagauguuugu

SEQ ID NO: 3686659 - RNA, 13 nt, Human
uuguauuguugaa

SEQ ID NO: 3686660 - RNA, 18 nt, Human
uuguauuguugaaaaagu

SEQ ID NO: 3686661 - RNA, 13 nt, Human
uuguauuguuuuc

SEQ ID NO: 3686662 - RNA, 14 nt, Human
uuguauuguuuucu

SEQ ID NO: 3686663 - RNA, 18 nt, Human
uuguauuuaacagaaauu

SEQ ID NO: 3686664 - RNA, 22 nt, Human
uuguauuuaacagaaauuguau

SEQ ID NO: 3686665 - RNA, 15 nt, Human
uuguauuuauucaau

SEQ ID NO: 3686666 - RNA, 16 nt, Human
uuguauuuauucaaua

SEQ ID NO: 3686667 - RNA, 18 nt, Human
uuguauuuauuccauauu

SEQ ID NO: 3686668 - RNA, 14 nt, Human
uuguauuuauucuu

SEQ ID NO: 3686669 - RNA, 15 nt, Human
uuguauuuauuuagu

SEQ ID NO: 3686670 - RNA, 9 nt, Human
uuguauuuu

SEQ ID NO: 3686671 - RNA, 17 nt, Human
uuguauuuucaugaaaa

SEQ ID NO: 3686672 - RNA, 12 nt, Human
uuguauuuucca

SEQ ID NO: 3686673 - RNA, 16 nt, Human
uuguauuuuuguuguu

SEQ ID NO: 3686674 - RNA, 14 nt, Human
uugucaacauugug

SEQ ID NO: 3686675 - RNA, 15 nt, Human
uugucaacauuguga

SEQ ID NO: 3686676 - RNA, 22 nt, Human
uugucaagaauagcauuguaaa

SEQ ID NO: 3686677 - RNA, 20 nt, Human
uugucaauaaaauccauaca

SEQ ID NO: 3686678 - RNA, 20 nt, Human
uugucaaugcuggagaaaaa

SEQ ID NO: 3686679 - RNA, 16 nt, Human
uugucacaucagauaa

SEQ ID NO: 3686680 - RNA, 17 nt, Human
uugucaccagaucugau

SEQ ID NO: 3686681 - RNA, 13 nt, Human
uugucacgccaga

SEQ ID NO: 3686682 - RNA, 17 nt, Human
uugucacugagaagaug

SEQ ID NO: 3686683 - RNA, 14 nt, Human
uugucacugcuuca

SEQ ID NO: 3686684 - RNA, 14 nt, Human
uugucacuugcaug

SEQ ID NO: 3686685 - RNA, 21 nt, Human
uugucacuuuuuaugcuauuu

SEQ ID NO: 3686686 - RNA, 16 nt, Human
uugucacuuuuucuga

SEQ ID NO: 3686687 - RNA, 18 nt, Human
uugucagacauaaagcca

SEQ ID NO: 3686688 - RNA, 19 nt, Human
uugucagacauaaagccau

SEQ ID NO: 3686689 - RNA, 13 nt, Human
uugucauauguag

SEQ ID NO: 3686690 - RNA, 23 nt, Human
uugucauauguagccuucacaca

SEQ ID NO: 3686691 - RNA, 19 nt, Human
uugucaucuuucuucuauu

SEQ ID NO: 3686692 - RNA, 21 nt, Human
uugucaucuuucuucuauuuu

SEQ ID NO: 3686693 - RNA, 13 nt, Human
uugucauguggcu

SEQ ID NO: 3686694 - RNA, 13 nt, Human
uugucauguguau

SEQ ID NO: 3686695 - RNA, 15 nt, Human
uugucauuagccuga

SEQ ID NO: 3686696 - RNA, 18 nt, Human
uugucauuagccugagua

SEQ ID NO: 3686697 - RNA, 13 nt, Human
uugucauugcuuu

SEQ ID NO: 3686698 - RNA, 15 nt, Human
uugucauugcuuuac

SEQ ID NO: 3686699 - RNA, 18 nt, Human
uugucauugcuuuacugg

SEQ ID NO: 3686700 - RNA, 13 nt, Human
uugucauuuucau

SEQ ID NO: 3686701 - RNA, 14 nt, Human
uugucauuuucauu

SEQ ID NO: 3686702 - RNA, 21 nt, Human
uugucauuuugaagcuaauua

SEQ ID NO: 3686703 - RNA, 19 nt, Human
uugucauuuuuuuucuuug

SEQ ID NO: 3686704 - RNA, 13 nt, Human
uugucccacagcu

SEQ ID NO: 3686705 - RNA, 14 nt, Human
uugucccacagcuu

SEQ ID NO: 3686706 - RNA, 15 nt, Human
uuguccccacacucc

SEQ ID NO: 3686707 - RNA, 21 nt, Human
uuguccccuaagaguguuuaa

SEQ ID NO: 3686708 - RNA, 19 nt, Human
uugucccggauuuuuguua

SEQ ID NO: 3686709 - RNA, 16 nt, Human
uugucccucugcccca

SEQ ID NO: 3686710 - RNA, 17 nt, Human
uugucccucugccccau

SEQ ID NO: 3686711 - RNA, 20 nt, Human
uuguccuauuaguguuauau

SEQ ID NO: 3686712 - RNA, 15 nt, Human
uuguccuccccuugg

SEQ ID NO: 3686713 - RNA, 20 nt, Human
uuuucuauuccuucuggccu

SEQ ID NO: 3686714 - RNA, 18 nt, Human
uuuucuauuucacuggag

SEQ ID NO: 3686715 - RNA, 23 nt, Human
uuuucuauuucacuggagcacaa

SEQ ID NO: 3686716 - RNA, 16 nt, Human
uuuucuauuuuaauaa

SEQ ID NO: 3686717 - RNA, 15 nt, Human
uuuucucaaaagcau

SEQ ID NO: 3686718 - RNA, 22 nt, Human
uuuucucaaaagcauuuaucau

SEQ ID NO: 3686719 - RNA, 19 nt, Human
uuuucucaaaguuuugaaa

SEQ ID NO: 3686720 - RNA, 23 nt, Human
uuuucucaaaguuuugaaaagcu

SEQ ID NO: 3686721 - RNA, 12 nt, Human
uuuucucagcug

SEQ ID NO: 3686722 - RNA, 22 nt, Human
uuuucuccaauuuuuuuuuccu

SEQ ID NO: 3686723 - RNA, 12 nt, Human
uuuucuccagcu

SEQ ID NO: 3686724 - RNA, 13 nt, Human
uuuucuccagcuc

SEQ ID NO: 3686725 - RNA, 23 nt, Human
uuuucucccuggauuuuuaccag

SEQ ID NO: 3686726 - RNA, 17 nt, Human
uuuucucuaacucagaa

SEQ ID NO: 3686727 - RNA, 16 nt, Human
uuuucucuaggaaaua

SEQ ID NO: 3686728 - RNA, 10 nt, Human
uuuucucuca

SEQ ID NO: 3686729 - RNA, 15 nt, Human
uuuucucucaacacc

SEQ ID NO: 3686730 - RNA, 17 nt, Human
uuuucucugauacagaa

SEQ ID NO: 3686731 - RNA, 22 nt, Human
uuuucucugauacuuuuuugaa

SEQ ID NO: 3686732 - RNA, 16 nt, Human
uuuucucuuaucugug

SEQ ID NO: 3686733 - RNA, 13 nt, Human
uuuucucuucaua

SEQ ID NO: 3686734 - RNA, 22 nt, Human
uuuucucuugggcugagacugg

SEQ ID NO: 3686735 - RNA, 14 nt, Human
uuuucucuuucucc

SEQ ID NO: 3686736 - RNA, 17 nt, Human
uuuucucuuucucuccu

SEQ ID NO: 3686737 - RNA, 9 nt, Human
uuuucugaa

SEQ ID NO: 3686738 - RNA, 13 nt, Human
uuuucugaaacua

SEQ ID NO: 3686739 - RNA, 17 nt, Human
uuuucugaaucuucuga

SEQ ID NO: 3686740 - RNA, 13 nt, Human
uuuucugacuaau

SEQ ID NO: 3686741 - RNA, 22 nt, Human
uuuucugagcccgggcugccug

SEQ ID NO: 3686742 - RNA, 15 nt, Human
uuuucugagcgauua

SEQ ID NO: 3686743 - RNA, 19 nt, Human
uuuucugcacuauaugcaa

SEQ ID NO: 3686744 - RNA, 16 nt, Human
uuuucugcacugagca

SEQ ID NO: 3686745 - RNA, 20 nt, Human
uuuucugcacugagcagagu

SEQ ID NO: 3686746 - RNA, 12 nt, Human
uuuucugcccug

SEQ ID NO: 3686747 - RNA, 17 nt, Human
uuuucuggaauacauga

SEQ ID NO: 3686748 - RNA, 20 nt, Human
uuuucuggacucuggacuuu

SEQ ID NO: 3686749 - RNA, 11 nt, Human
uuuucuggcac

SEQ ID NO: 3686750 - RNA, 20 nt, Human
uuuucuggccaguguuuaaa

SEQ ID NO: 3686751 - RNA, 19 nt, Human
uuuucugguagauagaaau

SEQ ID NO: 3686752 - RNA, 20 nt, Human
uuuucugguagauagaaaua

SEQ ID NO: 3686753 - RNA, 14 nt, Human
uuuucugguucuaa

SEQ ID NO: 3686754 - RNA, 18 nt, Human
uuuucuguagucauuuac

SEQ ID NO: 3686755 - RNA, 17 nt, Human
uuuucuguauaaauguc

SEQ ID NO: 3686756 - RNA, 10 nt, Human
uuuucugugu

SEQ ID NO: 3686757 - RNA, 17 nt, Human
uuuucuguguguuccug

SEQ ID NO: 3686758 - RNA, 19 nt, Human
uuuucuguguguuccuggc

SEQ ID NO: 3686759 - RNA, 22 nt, Human
uuuucuguuaccucaacaagaa

SEQ ID NO: 3686760 - RNA, 14 nt, Human
uuuucuuaaaaagu

SEQ ID NO: 3686761 - RNA, 14 nt, Human
uuuucuuaaauaau

SEQ ID NO: 3686762 - RNA, 23 nt, Human
uuuucuuaaauaauaaagaucau

SEQ ID NO: 3686763 - RNA, 12 nt, Human
uuuucuuaacca

SEQ ID NO: 3686764 - RNA, 13 nt, Human
uuuucuuacauaa

SEQ ID NO: 3686765 - RNA, 17 nt, Human
uuuucuuacuccuccuc

SEQ ID NO: 3686766 - RNA, 12 nt, Human
uuuucuugauaa

SEQ ID NO: 3686767 - RNA, 14 nt, Human
uuuucuugauuuga

SEQ ID NO: 3686768 - RNA, 16 nt, Human
uuuucuugcaugguuu

SEQ ID NO: 3686769 - RNA, 21 nt, Human
uuuucuugccucuguccccuu

SEQ ID NO: 3686770 - RNA, 13 nt, Human
uuuucuugucuau

SEQ ID NO: 3686771 - RNA, 20 nt, Human
uuuucuugucuauaaagcau

SEQ ID NO: 3686772 - RNA, 14 nt, Human
uuuucuugugacag

SEQ ID NO: 3686773 - RNA, 22 nt, Human
uuuucuuguguguuuauuguca

SEQ ID NO: 3686774 - RNA, 15 nt, Human
uuuucuuguuuauca

SEQ ID NO: 3686775 - RNA, 19 nt, Human
uuuucuuguuuaucagcag

SEQ ID NO: 3686776 - RNA, 18 nt, Human
uuuucuuuaaagaaguug

SEQ ID NO: 3686777 - RNA, 15 nt, Human
uuuucuuuaaagaug

SEQ ID NO: 3686778 - RNA, 22 nt, Human
uuuucuuuacaaacaaaagcau

SEQ ID NO: 3686779 - RNA, 18 nt, Human
uuuucuuuagagaacuga

SEQ ID NO: 3686780 - RNA, 21 nt, Human
uuuucuuuagagaacugaaaa

SEQ ID NO: 3686781 - RNA, 19 nt, Human
uuuucuuuauaagaaagcc

SEQ ID NO: 3686782 - RNA, 14 nt, Human
uuuucuuuccuccu

SEQ ID NO: 3686783 - RNA, 12 nt, Human
uuuucuuugugu

SEQ ID NO: 3686784 - RNA, 15 nt, Human
uuuucuuuuaagaau

SEQ ID NO: 3686785 - RNA, 15 nt, Human
uuuucuuuuccauua

SEQ ID NO: 3686786 - RNA, 13 nt, Human
uuuucuuuucuau

SEQ ID NO: 3686787 - RNA, 21 nt, Human
uuuucuuuuguaagugcuaca

SEQ ID NO: 3686788 - RNA, 15 nt, Human
uuuucuuuuguuacu

SEQ ID NO: 3686789 - RNA, 23 nt, Human
uuuucuuuuuuaaauuaauaucu

SEQ ID NO: 3686790 - RNA, 14 nt, Human
uuuugaaaaaagcu

SEQ ID NO: 3686791 - RNA, 13 nt, Human
uuuugaaaaacug

SEQ ID NO: 3686792 - RNA, 18 nt, Human
uuuugaaaaauuccuauu

SEQ ID NO: 3686793 - RNA, 18 nt, Human
uuuugaaaacuacauuuu

SEQ ID NO: 3686794 - RNA, 15 nt, Human
uuuugaaaagcuauu

SEQ ID NO: 3686795 - RNA, 17 nt, Human
uuuugaaaagcuucuua

SEQ ID NO: 3686796 - RNA, 12 nt, Human
uuuugaaaaggc

SEQ ID NO: 3686797 - RNA, 11 nt, Human
uuuugaaaagu

SEQ ID NO: 3686798 - RNA, 20 nt, Human
uuuugaaaaguaauauuuau

SEQ ID NO: 3686799 - RNA, 22 nt, Human
uuuugaaaucaguaaacacugu

SEQ ID NO: 3686800 - RNA, 20 nt, Human
uuuugaaaucuguaucugua

SEQ ID NO: 3686801 - RNA, 11 nt, Human
uuuugaaauga

SEQ ID NO: 3686802 - RNA, 12 nt, Human
uuuugaaaugaa

SEQ ID NO: 3686803 - RNA, 17 nt, Human
uuuugaaauuaaccucu

SEQ ID NO: 3686804 - RNA, 21 nt, Human
uuuugaacuaauaaaagcaua

SEQ ID NO: 3686805 - RNA, 17 nt, Human
uuuugaacucuucucau

SEQ ID NO: 3686806 - RNA, 21 nt, Human
uuuugaagauucuauguuaau

SEQ ID NO: 3686807 - RNA, 13 nt, Human
uuuugaagcauag

SEQ ID NO: 3686808 - RNA, 21 nt, Human
uuuugaagcuaauuauuuuaa

SEQ ID NO: 3686809 - RNA, 22 nt, Human
uuuugaagcuaauuauuuuaau

SEQ ID NO: 3686810 - RNA, 14 nt, Human
uuuugaaguauuua

SEQ ID NO: 3686811 - RNA, 13 nt, Human
uuuugaagucuug

SEQ ID NO: 3686812 - RNA, 19 nt, Human
uuuugaagugagaaaauga

SEQ ID NO: 3686813 - RNA, 22 nt, Human
uuuugaaguguaggcagacaca

SEQ ID NO: 3686814 - RNA, 16 nt, Human
uuuugaaguuuacauu

SEQ ID NO: 3686815 - RNA, 17 nt, Human
uuuugaaguuuacauuu

SEQ ID NO: 3686816 - RNA, 13 nt, Human
uuuugaauguuau

SEQ ID NO: 3686817 - RNA, 14 nt, Human
uuuugaauguuauu

SEQ ID NO: 3686818 - RNA, 15 nt, Human
uuuugaauuguuaca

SEQ ID NO: 3686819 - RNA, 16 nt, Human
uuuugaauuguuacau

SEQ ID NO: 3686820 - RNA, 20 nt, Human
uuuugacaaggggcaguggu

SEQ ID NO: 3686821 - RNA, 12 nt, Human
uuuugacacuga

SEQ ID NO: 3686822 - RNA, 21 nt, Human
uuuugacacugaaauaaccgu

SEQ ID NO: 3686823 - RNA, 11 nt, Human
uuuugacagaa

SEQ ID NO: 3686824 - RNA, 15 nt, Human
uuuugacauaaaguu

SEQ ID NO: 3686825 - RNA, 15 nt, Human
uuuugacauggaaau

SEQ ID NO: 3686826 - RNA, 20 nt, Human
uuuugaccuucauuucaugu

SEQ ID NO: 3686827 - RNA, 21 nt, Human
uuuugaccuucauuucaugua

SEQ ID NO: 3686828 - RNA, 20 nt, Human
uuuugacggaugauuggauu

SEQ ID NO: 3686829 - RNA, 17 nt, Human
uuuugacuuaaagcaga

SEQ ID NO: 3686830 - RNA, 17 nt, Human
uuuugacuuaaugugau

SEQ ID NO: 3686831 - RNA, 18 nt, Human
uuuugacuuaaugugauu

SEQ ID NO: 3686832 - RNA, 18 nt, Human
uuuugagaacguaaagaa

SEQ ID NO: 3686833 - RNA, 23 nt, Human
uuuugagauauuaaugcccagac

SEQ ID NO: 3686834 - RNA, 14 nt, Human
uuuugagauguaaa

SEQ ID NO: 3686835 - RNA, 16 nt, Human
uuuugagcccuuguuu

SEQ ID NO: 3686836 - RNA, 13 nt, Human
uuuugaggcaaaa

SEQ ID NO: 3686837 - RNA, 23 nt, Human
uuuugaguagauauuacuuuauc

SEQ ID NO: 3686838 - RNA, 14 nt, Human
uuuugagugugugu

SEQ ID NO: 3686839 - RNA, 14 nt, Human
uuuugaguucuaca

SEQ ID NO: 3686840 - RNA, 13 nt, Human
uuuugauaacaau

SEQ ID NO: 3686841 - RNA, 15 nt, Human
uuuugauagcaaagc

SEQ ID NO: 3686842 - RNA, 22 nt, Human
uuuugauguuuguggccucaga

SEQ ID NO: 3686843 - RNA, 15 nt, Human
uuuugauuuaugcau

SEQ ID NO: 3686844 - RNA, 17 nt, Human
uuuugcaaagauuuaau

SEQ ID NO: 3686845 - RNA, 13 nt, Human
uuuugcaaauaua

SEQ ID NO: 3686846 - RNA, 17 nt, Human
uuuugcaaccucgcugg

SEQ ID NO: 3686847 - RNA, 20 nt, Human
uuuuucugcuuuagacuuga

SEQ ID NO: 3686848 - RNA, 11 nt, Human
uuuuucugugg

SEQ ID NO: 3686849 - RNA, 18 nt, Human
uuuuucuguuguaacuua

SEQ ID NO: 3686850 - RNA, 13 nt, Human
uuuuucuuaauca

SEQ ID NO: 3686851 - RNA, 16 nt, Human
uuuuucuucuguauuu

SEQ ID NO: 3686852 - RNA, 13 nt, Human
uuuuucuuguaau

SEQ ID NO: 3686853 - RNA, 22 nt, Human
uuuuucuugucuauaaagcauu

SEQ ID NO: 3686854 - RNA, 14 nt, Human
uuuuucuuuaagau

SEQ ID NO: 3686855 - RNA, 13 nt, Human
uuuuucuuuugua

SEQ ID NO: 3686856 - RNA, 17 nt, Human
uuuuugaaaaaagcuca

SEQ ID NO: 3686857 - RNA, 21 nt, Human
uuuuugaaaaagaaaacacuu

SEQ ID NO: 3686858 - RNA, 17 nt, Human
uuuuugaaaaagcgaaa

SEQ ID NO: 3686859 - RNA, 12 nt, Human
uuuuugaaaacc

SEQ ID NO: 3686860 - RNA, 11 nt, Human
uuuuugaaaug

SEQ ID NO: 3686861 - RNA, 16 nt, Human
uuuuugaaaugaaauu

SEQ ID NO: 3686862 - RNA, 19 nt, Human
uuuuugaacuaagaaacuu

SEQ ID NO: 3686863 - RNA, 20 nt, Human
uuuuugaacucuucucauua

SEQ ID NO: 3686864 - RNA, 15 nt, Human
uuuuugaagcuguau

SEQ ID NO: 3686865 - RNA, 11 nt, Human
uuuuugaagug

SEQ ID NO: 3686866 - RNA, 14 nt, Human
uuuuugaaguguug

SEQ ID NO: 3686867 - RNA, 13 nt, Human
uuuuugauacuaa

SEQ ID NO: 3686868 - RNA, 12 nt, Human
uuuuugauauau

SEQ ID NO: 3686869 - RNA, 16 nt, Human
uuuuugaucaaaaacu

SEQ ID NO: 3686870 - RNA, 18 nt, Human
uuuuugcaagugaagguu

SEQ ID NO: 3686871 - RNA, 19 nt, Human
uuuuugcaccccaugcugu

SEQ ID NO: 3686872 - RNA, 16 nt, Human
uuuuugcaguaacugu

SEQ ID NO: 3686873 - RNA, 21 nt, Human
uuuuugcauggcacuugcauc

SEQ ID NO: 3686874 - RNA, 14 nt, Human
uuuuugcucuaaaa

SEQ ID NO: 3686875 - RNA, 12 nt, Human
uuuuuggacuuc

SEQ ID NO: 3686876 - RNA, 19 nt, Human
uuuuuggaguguuauguau

SEQ ID NO: 3686877 - RNA, 23 nt, Human
uuuuuggcauaacauaaaucugu

SEQ ID NO: 3686878 - RNA, 15 nt, Human
uuuuugggaugucuu

SEQ ID NO: 3686879 - RNA, 21 nt, Human
uuuuugggggguuuucuugcc

SEQ ID NO: 3686880 - RNA, 12 nt, Human
uuuuugguacaa

SEQ ID NO: 3686881 - RNA, 15 nt, Human
uuuuugguauuugaa

SEQ ID NO: 3686882 - RNA, 22 nt, Human
uuuuugguguauagaaguuugu

SEQ ID NO: 3686883 - RNA, 14 nt, Human
uuuuugguugggaa

SEQ ID NO: 3686884 - RNA, 14 nt, Human
uuuuuguaaagugu

SEQ ID NO: 3686885 - RNA, 16 nt, Human
uuuuuguaaagugugg

SEQ ID NO: 3686886 - RNA, 13 nt, Human
uuuuuguaauuua

SEQ ID NO: 3686887 - RNA, 12 nt, Human
uuuuuguacaug

SEQ ID NO: 3686888 - RNA, 17 nt, Human
uuuuuguagcacugaca

SEQ ID NO: 3686889 - RNA, 20 nt, Human
uuuuuguagugaccuguuua

SEQ ID NO: 3686890 - RNA, 9 nt, Human
uuuuuguau

SEQ ID NO: 3686891 - RNA, 12 nt, Human
uuuuuguauguu

SEQ ID NO: 3686892 - RNA, 12 nt, Human
uuuuugucauca

SEQ ID NO: 3686893 - RNA, 22 nt, Human
uuuuuguguuuuguucuuuaaa

SEQ ID NO: 3686894 - RNA, 22 nt, Human
uuuuuguuccacaaguuaaaua

SEQ ID NO: 3686895 - RNA, 12 nt, Human
uuuuuguugaca

SEQ ID NO: 3686896 - RNA, 13 nt, Human
uuuuuguuugaug

SEQ ID NO: 3686897 - RNA, 11 nt, Human
uuuuuguuugg

SEQ ID NO: 3686898 - RNA, 15 nt, Human
uuuuuguuuguuucu

SEQ ID NO: 3686899 - RNA, 15 nt, Human
uuuuuguuuguuugu

SEQ ID NO: 3686900 - RNA, 14 nt, Human
uuuuuguuuuucug

SEQ ID NO: 3686901 - RNA, 23 nt, Human
uuuuuuaaaaaagaaacauuugg

SEQ ID NO: 3686902 - RNA, 13 nt, Human
uuuuuuaaaagaa

SEQ ID NO: 3686903 - RNA, 13 nt, Human
uuuuuuaaagaaa

SEQ ID NO: 3686904 - RNA, 17 nt, Human
uuuuuuaagaauaucug

SEQ ID NO: 3686905 - RNA, 18 nt, Human
uuuuuuaaucuacugcau

SEQ ID NO: 3686906 - RNA, 15 nt, Human
uuuuuuaaugugcug

SEQ ID NO: 3686907 - RNA, 16 nt, Human
uuuuuuaaugugcugu

SEQ ID NO: 3686908 - RNA, 12 nt, Human
uuuuuuaauuga

SEQ ID NO: 3686909 - RNA, 14 nt, Human
uuuaaagagagguu

SEQ ID NO: 3686910 - RNA, 13 nt, Human
uuuaaagagucua

SEQ ID NO: 3686911 - RNA, 20 nt, Human
uuuaaagcauugcuguuaug

SEQ ID NO: 3686912 - RNA, 18 nt, Human
uuuaaagcuuacucuguc

SEQ ID NO: 3686913 - RNA, 12 nt, Human
uuuaaagcuuuu

SEQ ID NO: 3686914 - RNA, 23 nt, Human
uuuaaaguaugaaucuaugccaa

SEQ ID NO: 3686915 - RNA, 15 nt, Human
uuuaaaguauuuucu

SEQ ID NO: 3686916 - RNA, 22 nt, Human
uuuaaagugacuaauggcauga

SEQ ID NO: 3686917 - RNA, 18 nt, Human
uuuaaagugauuaaacgu

SEQ ID NO: 3686918 - RNA, 14 nt, Human
uuuaaagugcaaaa

SEQ ID NO: 3686919 - RNA, 18 nt, Human
uuuaaaguguuucagcua

SEQ ID NO: 3686920 - RNA, 19 nt, Human
uuuaaaguguuucuguuau

SEQ ID NO: 3686921 - RNA, 13 nt, Human
uuuaaaguucugu

SEQ ID NO: 3686922 - RNA, 14 nt, Human
uuuaaauaaacuuu

SEQ ID NO: 3686923 - RNA, 13 nt, Human
uuuaaauaaagua

SEQ ID NO: 3686924 - RNA, 22 nt, Human
uuuaaauaaaguaucaugcauu

SEQ ID NO: 3686925 - RNA, 21 nt, Human
uuuaaauaauuuaacuacccu

SEQ ID NO: 3686926 - RNA, 20 nt, Human
uuuaaauacagucuuccauu

SEQ ID NO: 3686927 - RNA, 13 nt, Human
uuuaaauauaauu

SEQ ID NO: 3686928 - RNA, 18 nt, Human
uuuaaauauaugcuaagu

SEQ ID NO: 3686929 - RNA, 14 nt, Human
uuuaaauauuuucu

SEQ ID NO: 3686930 - RNA, 19 nt, Human
uuuaaauccugaagagcau

SEQ ID NO: 3686931 - RNA, 12 nt, Human
uuuaaaucuguu

SEQ ID NO: 3686932 - RNA, 23 nt, Human
uuuaaaugaacaagagaagcauu

SEQ ID NO: 3686933 - RNA, 14 nt, Human
uuuaaaugcugcuu

SEQ ID NO: 3686934 - RNA, 14 nt, Human
uuuaaauguauacu

SEQ ID NO: 3686935 - RNA, 18 nt, Human
uuuaaaugucuaauguau

SEQ ID NO: 3686936 - RNA, 14 nt, Human
uuuaaauguguaca

SEQ ID NO: 3686937 - RNA, 13 nt, Human
uuuaaauuacaau

SEQ ID NO: 3686938 - RNA, 15 nt, Human
uuuaaauuagaaaau

SEQ ID NO: 3686939 - RNA, 15 nt, Human
uuuaaauuauaagga

SEQ ID NO: 3686940 - RNA, 13 nt, Human
uuuaaauuguaau

SEQ ID NO: 3686941 - RNA, 21 nt, Human
uuuaaauuuucuucaguuggu

SEQ ID NO: 3686942 - RNA, 18 nt, Human
uuuaaauuuuuuuccuua

SEQ ID NO: 3686943 - RNA, 16 nt, Human
uuuaacaacagcuggu

SEQ ID NO: 3686944 - RNA, 20 nt, Human
uuuaacaagaagaugaaugg

SEQ ID NO: 3686945 - RNA, 11 nt, Human
uuuaacaaugc

SEQ ID NO: 3686946 - RNA, 18 nt, Human
uuuaacaaugcgaauggu

SEQ ID NO: 3686947 - RNA, 18 nt, Human
uuuaacagaaauguacag

SEQ ID NO: 3686948 - RNA, 20 nt, Human
uuuaacagcugaauuaucua

SEQ ID NO: 3686949 - RNA, 18 nt, Human
uuuaacaggaagaucuua

SEQ ID NO: 3686950 - RNA, 17 nt, Human
uuuaacauaagcuauuu

SEQ ID NO: 3686951 - RNA, 12 nt, Human
uuuaacauuccu

SEQ ID NO: 3686952 - RNA, 13 nt, Human
uuuaacauuugcc

SEQ ID NO: 3686953 - RNA, 16 nt, Human
uuuaacauuuuguucu

SEQ ID NO: 3686954 - RNA, 17 nt, Human
uuuaacauuuuguucuu

SEQ ID NO: 3686955 - RNA, 23 nt, Human
uuuaacauuuuguucuuacacau

SEQ ID NO: 3686956 - RNA, 17 nt, Human
uuuaaccaaacaauuau

SEQ ID NO: 3686957 - RNA, 15 nt, Human
uuuaaccaaagguga

SEQ ID NO: 3686958 - RNA, 15 nt, Human
uuuaaccaucugaua

SEQ ID NO: 3686959 - RNA, 20 nt, Human
uuuaaccauggcagggugcu

SEQ ID NO: 3686960 - RNA, 17 nt, Human
uuuaaccccccuguaca

SEQ ID NO: 3686961 - RNA, 16 nt, Human
uuuaaccccgucaaca

SEQ ID NO: 3686962 - RNA, 17 nt, Human
uuuaaccccgucaacaa

SEQ ID NO: 3686963 - RNA, 18 nt, Human
uuuaaccccgucaacaaa

SEQ ID NO: 3686964 - RNA, 21 nt, Human
uuuaaccccgucaacaaaucu

SEQ ID NO: 3686965 - RNA, 23 nt, Human
uuuaaccgguaagaguuucaguu

SEQ ID NO: 3686966 - RNA, 14 nt, Human
uuuaacuaaauuuu

SEQ ID NO: 3686967 - RNA, 17 nt, Human
uuuaacuacccuuaauu

SEQ ID NO: 3686968 - RNA, 15 nt, Human
uuuaacuagaauuua

SEQ ID NO: 3686969 - RNA, 24 nt, Human
uuuaacucaauauuuuccaugaaa

SEQ ID NO: 3686970 - RNA, 15 nt, Human
uuuaacucagaucac

SEQ ID NO: 3686971 - RNA, 18 nt, Human
uuuaacucaggacuccag

SEQ ID NO: 3686972 - RNA, 18 nt, Human
uuuaacuccccuguuuca

SEQ ID NO: 3686973 - RNA, 14 nt, Human
uuuaacucugucuu

SEQ ID NO: 3686974 - RNA, 14 nt, Human
uuuaacugacaagc

SEQ ID NO: 3686975 - RNA, 19 nt, Human
uuuaacugacaagccaucu

SEQ ID NO: 3686976 - RNA, 11 nt, Human
uuuaacugacu

SEQ ID NO: 3686977 - RNA, 23 nt, Human
uuuaacugacuauucuugaugua

SEQ ID NO: 3686978 - RNA, 12 nt, Human
uuuaacugccgu

SEQ ID NO: 3686979 - RNA, 14 nt, Human
uuuaacugccuugu

SEQ ID NO: 3686980 - RNA, 22 nt, Human
uuuaacuggugcacuuuguaaa

SEQ ID NO: 3686981 - RNA, 15 nt, Human
uuuaacuguggauau

SEQ ID NO: 3686982 - RNA, 18 nt, Human
uuuaacuguggauauugu

SEQ ID NO: 3686983 - RNA, 17 nt, Human
uuuaacuuaguuuugca

SEQ ID NO: 3686984 - RNA, 14 nt, Human
uuuaacuucuuucu

SEQ ID NO: 3686985 - RNA, 14 nt, Human
uuuaacuuuaccau

SEQ ID NO: 3686986 - RNA, 21 nt, Human
uuuaacuuuguuuuauuuuca

SEQ ID NO: 3686987 - RNA, 19 nt, Human
uuuaacuuuuuuucuucua

SEQ ID NO: 3686988 - RNA, 22 nt, Human
uuuaagaaaaaggaugcacaga

SEQ ID NO: 3686989 - RNA, 17 nt, Human
uuuaagaaaaguauuuu

SEQ ID NO: 3686990 - RNA, 20 nt, Human
uuuaagaaaaguauuuugaa

SEQ ID NO: 3686991 - RNA, 21 nt, Human
uuuaagaaaaguauuuugaag

SEQ ID NO: 3686992 - RNA, 22 nt, Human
uuuaagaaaaguauuuugaagu

SEQ ID NO: 3686993 - RNA, 11 nt, Human
uuuaagaaaau

SEQ ID NO: 3686994 - RNA, 13 nt, Human
uuuaagaaaauac

SEQ ID NO: 3686995 - RNA, 20 nt, Human
uuuaagaaaauacaauaaac

SEQ ID NO: 3686996 - RNA, 21 nt, Human
uuuaagaaaauacaauaaacu

SEQ ID NO: 3686997 - RNA, 22 nt, Human
uuuaagaaaauacaauaaacua

SEQ ID NO: 3686998 - RNA, 14 nt, Human
uuuaagaaauagaa

SEQ ID NO: 3686999 - RNA, 17 nt, Human
uuuaagaacuaaaaugu

SEQ ID NO: 3687000 - RNA, 21 nt, Human
uuuaagaauaucuguaauggu

SEQ ID NO: 3687001 - RNA, 17 nt, Human
uuuaagacacuuccguc

SEQ ID NO: 3687002 - RNA, 19 nt, Human
uuuaagacauuuuuggaag

SEQ ID NO: 3687003 - RNA, 16 nt, Human
uuuaagaccagccugg

SEQ ID NO: 3687004 - RNA, 16 nt, Human
uuuaagacuuugguua

SEQ ID NO: 3687005 - RNA, 14 nt, Human
uuuaagagagaaau

SEQ ID NO: 3687006 - RNA, 14 nt, Human
uuuaagaggcaggg

SEQ ID NO: 3687007 - RNA, 14 nt, Human
uuuaagagugaagu

SEQ ID NO: 3687008 - RNA, 18 nt, Human
uuuaagauaauaauauau

SEQ ID NO: 3687009 - RNA, 20 nt, Human
uuuaagauaauaguuuacau

SEQ ID NO: 3687010 - RNA, 22 nt, Human
uuuaagaugugucuucaauuug

SEQ ID NO: 3687011 - RNA, 18 nt, Human
uuuaagauuccuuuucuu

SEQ ID NO: 3687012 - RNA, 22 nt, Human
uuuaagauuccuuuucuuguuu

SEQ ID NO: 3687013 - RNA, 17 nt, Human
uuuaagauuuuucucaa

SEQ ID NO: 3687014 - RNA, 12 nt, Human
uuuaagcaaaua

SEQ ID NO: 3687015 - RNA, 16 nt, Human
uuuaagcaaguuaagu

SEQ ID NO: 3687016 - RNA, 20 nt, Human
uuuaagcacuacauaaacug

SEQ ID NO: 3687017 - RNA, 15 nt, Human
uuuaagcacucuuaa

SEQ ID NO: 3687018 - RNA, 17 nt, Human
uuuaagcagaauuggaa

SEQ ID NO: 3687019 - RNA, 18 nt, Human
uuuaagcagaauuggaaa

SEQ ID NO: 3687020 - RNA, 19 nt, Human
uuuaagcagaauuggaaaa

SEQ ID NO: 3687021 - RNA, 20 nt, Human
uuuaagcccaucaauuauag

SEQ ID NO: 3687022 - RNA, 13 nt, Human
uuuaagcucugag

SEQ ID NO: 3687023 - RNA, 14 nt, Human
uuuaagcucugagc

SEQ ID NO: 3687024 - RNA, 19 nt, Human
uuuaagcucugagcuguca

SEQ ID NO: 3687025 - RNA, 14 nt, Human
uuuaagcuguaaaa

SEQ ID NO: 3687026 - RNA, 11 nt, Human
uuuaagcuguu

SEQ ID NO: 3687027 - RNA, 12 nt, Human
uuuaagcuguuu

SEQ ID NO: 3687028 - RNA, 11 nt, Human
uuuaaggaaaa

SEQ ID NO: 3687029 - RNA, 14 nt, Human
uuuaaggaaaacua

SEQ ID NO: 3687030 - RNA, 18 nt, Human
uuuaaggacugacugagg

SEQ ID NO: 3687031 - RNA, 19 nt, Human
uuuaaggaugcuuguacau

SEQ ID NO: 3687032 - RNA, 18 nt, Human
uuuaaggcuaaaacuuaa

SEQ ID NO: 3687033 - RNA, 16 nt, Human
uuuaaggcuucaauuu

SEQ ID NO: 3687034 - RNA, 17 nt, Human
uuuaagggaaagaaaau

SEQ ID NO: 3687035 - RNA, 18 nt, Human
uuuaagggcaugccuugu

SEQ ID NO: 3687036 - RNA, 19 nt, Human
uuuaagggcaugccuugug

SEQ ID NO: 3687037 - RNA, 17 nt, Human
uuuaaggguuuguggaa

SEQ ID NO: 3687038 - RNA, 14 nt, Human
uuuaaggucuguuu

SEQ ID NO: 3687039 - RNA, 15 nt, Human
uuuaaggucuguuug

SEQ ID NO: 3687040 - RNA, 20 nt, Human
uuuaagguuauuuauuuaaa

SEQ ID NO: 3687041 - RNA, 21 nt, Human
uuuaagguuauuuauuuaaau

SEQ ID NO: 3687042 - RNA, 23 nt, Human
uuuaaguaauguggaagaaaaug

SEQ ID NO: 3687043 - RNA, 21 nt, Human
uuuaaguacuacacauuuuua

SEQ ID NO: 3687044 - RNA, 21 nt, Human
uuuaaguauugcaucuguaua

SEQ ID NO: 3687045 - RNA, 13 nt, Human
uuuaaguauuuag

SEQ ID NO: 3687046 - RNA, 15 nt, Human
uuuaaguauuuauau

SEQ ID NO: 3687047 - RNA, 16 nt, Human
uuuaagucccugucac

SEQ ID NO: 3687048 - RNA, 15 nt, Human
uuuaagugaaaaugg

SEQ ID NO: 3687049 - RNA, 17 nt, Human
uuuaagugaaaaugguc

SEQ ID NO: 3687050 - RNA, 15 nt, Human
uuuaagugcugcauu

SEQ ID NO: 3687051 - RNA, 16 nt, Human
uuuaagugcugcauuu

SEQ ID NO: 3687052 - RNA, 19 nt, Human
uuuaagugcugcauuuaaa

SEQ ID NO: 3687053 - RNA, 17 nt, Human
uuuaagugucucacuaa

SEQ ID NO: 3687054 - RNA, 18 nt, Human
uuuaaguuacacauuuuu

SEQ ID NO: 3687055 - RNA, 23 nt, Human
uuuaaguucuggaugcauuucuc

SEQ ID NO: 3687056 - RNA, 12 nt, Human
uuuaaguuugca

SEQ ID NO: 3687057 - RNA, 23 nt, Human
uuuaaguuugcacucaaaucuua

SEQ ID NO: 3687058 - RNA, 12 nt, Human
uuuaauaaaaga

SEQ ID NO: 3687059 - RNA, 22 nt, Human
uuuaauaaacacucuugaaaaa

SEQ ID NO: 3687060 - RNA, 12 nt, Human
uuuuuuaauuua

SEQ ID NO: 3687061 - RNA, 12 nt, Human
uuuuuuacuaau

SEQ ID NO: 3687062 - RNA, 23 nt, Human
uuuuuuagaaagcauuugaaugc

SEQ ID NO: 3687063 - RNA, 11 nt, Human
uuuuuuauaca

SEQ ID NO: 3687064 - RNA, 12 nt, Human
uuuuuuaucuuu

SEQ ID NO: 3687065 - RNA, 13 nt, Human
uuuuuuaucuuuu

SEQ ID NO: 3687066 - RNA, 16 nt, Human
uuuuuuaugcuaauca

SEQ ID NO: 3687067 - RNA, 14 nt, Human
uuuuuuauucuugu

SEQ ID NO: 3687068 - RNA, 19 nt, Human
uuuuuuauugcuaguauuu

SEQ ID NO: 3687069 - RNA, 22 nt, Human
uuuuuuccaucuuuacaaaacu

SEQ ID NO: 3687070 - RNA, 12 nt, Human
uuuuuuccuguu

SEQ ID NO: 3687071 - RNA, 15 nt, Human
uuuuuuccuguuucu

SEQ ID NO: 3687072 - RNA, 10 nt, Human
uuuuuuccuu

SEQ ID NO: 3687073 - RNA, 14 nt, Human
uuuuuuccuuacau

SEQ ID NO: 3687074 - RNA, 12 nt, Human
uuuuuucuaaga

SEQ ID NO: 3687075 - RNA, 11 nt, Human
uuuuuucuacc

SEQ ID NO: 3687076 - RNA, 13 nt, Human
uuuuuucuuacug

SEQ ID NO: 3687077 - RNA, 12 nt, Human
uuuuuucuucua

SEQ ID NO: 3687078 - RNA, 12 nt, Human
uuuuuugauaaa

SEQ ID NO: 3687079 - RNA, 17 nt, Human
uuuuuugcaguaacugu

SEQ ID NO: 3687080 - RNA, 21 nt, Human
uuuuuuggccaucugcuccug

SEQ ID NO: 3687081 - RNA, 16 nt, Human
uuuuuugggcagcaau

SEQ ID NO: 3687082 - RNA, 14 nt, Human
uuuuuuguaugaaa

SEQ ID NO: 3687083 - RNA, 13 nt, Human
uuuuuuguauuau

SEQ ID NO: 3687084 - RNA, 12 nt, Human
uuuuuugucaac

SEQ ID NO: 3687085 - RNA, 16 nt, Human
uuuuuuguuuguuucu

SEQ ID NO: 3687086 - RNA, 12 nt, Human
uuuuuuuaagug

SEQ ID NO: 3687087 - RNA, 13 nt, Human
uuuuuuuaaugug

SEQ ID NO: 3687088 - RNA, 10 nt, Human
uuuuuuucca

SEQ ID NO: 3687089 - RNA, 13 nt, Human
uuuuuuuccaauu

SEQ ID NO: 3687090 - RNA, 12 nt, Human
uuuuuuucuauu

SEQ ID NO: 3687091 - RNA, 12 nt, Human
uuuuuuucuuua

SEQ ID NO: 3687092 - RNA, 12 nt, Human
uuuuuuugagau

SEQ ID NO: 3687093 - RNA, 11 nt, Human
uuuuuuugcag

SEQ ID NO: 3687094 - RNA, 14 nt, Human
uuuuuuuguacgac

SEQ ID NO: 3687095 - RNA, 14 nt, Human
uuuuuuuuaaacua

SEQ ID NO: 3687096 - RNA, 11 nt, Human
uuuuuuuucau

SEQ ID NO: 3687097 - RNA, 13 nt, Human
uuuuuuuugacaa

SEQ ID NO: 3687098 - RNA, 13 nt, Human
uuuuuuuuuaaac

SEQ ID NO: 3687099 - RNA, 17 nt, Human
uuugcagaagagggugu

SEQ ID NO: 3687100 - RNA, 15 nt, Human
uuugcagaugacaaa

SEQ ID NO: 3687101 - RNA, 14 nt, Human
uuugcagcucagaa

SEQ ID NO: 3687102 - RNA, 12 nt, Human
uuugcaggcuca

SEQ ID NO: 3687103 - RNA, 22 nt, Human
uuugcaggucuuuaaaucauuu

SEQ ID NO: 3687104 - RNA, 12 nt, Human
uuugcaguaacu

SEQ ID NO: 3687105 - RNA, 19 nt, Human
uuugcagugcaguauagaa

SEQ ID NO: 3687106 - RNA, 20 nt, Human
uuugcauaacaauuccucua

SEQ ID NO: 3687107 - RNA, 19 nt, Human
uuugcauaacguauaaaag

SEQ ID NO: 3687108 - RNA, 21 nt, Human
uuugcauagauucccugagca

SEQ ID NO: 3687109 - RNA, 22 nt, Human
uuugcauaggugaucucauuua

SEQ ID NO: 3687110 - RNA, 23 nt, Human
uuugcauaguaccaaucauuuua

SEQ ID NO: 3687111 - RNA, 15 nt, Human
uuugcauauugcaua

SEQ ID NO: 3687112 - RNA, 13 nt, Human
uuugcaucucagu

SEQ ID NO: 3687113 - RNA, 20 nt, Human
uuugcaugcaugcaaaugag

SEQ ID NO: 3687114 - RNA, 18 nt, Human
uuugcauggcacuugcau

SEQ ID NO: 3687115 - RNA, 23 nt, Human
uuugcauggcacuugcaucugug

SEQ ID NO: 3687116 - RNA, 22 nt, Human
uuugcauggcuccagaaauguc

SEQ ID NO: 3687117 - RNA, 21 nt, Human
uuugcaugugaaaaucaaaua

SEQ ID NO: 3687118 - RNA, 14 nt, Human
uuugcauguuaugu

SEQ ID NO: 3687119 - RNA, 19 nt, Human
uuugcauuaaauuacagaa

SEQ ID NO: 3687120 - RNA, 12 nt, Human
uuugcauucaaa

SEQ ID NO: 3687121 - RNA, 15 nt, Human
uuugcauucaaauua

SEQ ID NO: 3687122 - RNA, 14 nt, Human
uuugcauuccuaca

SEQ ID NO: 3687123 - RNA, 14 nt, Human
uuugcauugucugu

SEQ ID NO: 3687124 - RNA, 19 nt, Human
uuugcauuuaaaacagaca

SEQ ID NO: 3687125 - RNA, 21 nt, Human
uuugcauuuaaaacagacacu

SEQ ID NO: 3687126 - RNA, 23 nt, Human
uuugcauuuaaaacagacacugg

SEQ ID NO: 3687127 - RNA, 15 nt, Human
uuugcauuucagaaa

SEQ ID NO: 3687128 - RNA, 14 nt, Human
uuugcauuuggaau

SEQ ID NO: 3687129 - RNA, 12 nt, Human
uuugcauuuguu

SEQ ID NO: 3687130 - RNA, 20 nt, Human
uuugcauuuguuuauguaau

SEQ ID NO: 3687131 - RNA, 23 nt, Human
uuugcauuuguuuauguaauuuc

SEQ ID NO: 3687132 - RNA, 13 nt, Human
uuugccacagcuu

SEQ ID NO: 3687133 - RNA, 21 nt, Human
uuugccacuaauuuuaguauu

SEQ ID NO: 3687134 - RNA, 21 nt, Human
uuugccagaacaguuuguaca

SEQ ID NO: 3687135 - RNA, 10 nt, Human
uuugccagcc

SEQ ID NO: 3687136 - RNA, 14 nt, Human
uuugccagcugcug

SEQ ID NO: 3687137 - RNA, 15 nt, Human
uuugccagugggaac

SEQ ID NO: 3687138 - RNA, 13 nt, Human
uuugccauacauc

SEQ ID NO: 3687139 - RNA, 18 nt, Human
uuugccauguuggccagg

SEQ ID NO: 3687140 - RNA, 22 nt, Human
uuugccauguuggccaggcugg

SEQ ID NO: 3687141 - RNA, 12 nt, Human
uuugccauuuga

SEQ ID NO: 3687142 - RNA, 16 nt, Human
uuugccauuugauacc

SEQ ID NO: 3687143 - RNA, 17 nt, Human
uuugcccaaccucagca

SEQ ID NO: 3687144 - RNA, 18 nt, Human
uuugcccagaaagaagau

SEQ ID NO: 3687145 - RNA, 18 nt, Human
uuugcccauuuacacuuu

SEQ ID NO: 3687146 - RNA, 19 nt, Human
uuugcccauuuacacuuuu

SEQ ID NO: 3687147 - RNA, 19 nt, Human
uuugcccugguagggcagu

SEQ ID NO: 3687148 - RNA, 12 nt, Human
uuugcccuuuga

SEQ ID NO: 3687149 - RNA, 14 nt, Human
uuugccucaaauaa

SEQ ID NO: 3687150 - RNA, 23 nt, Human
uuugccucaaauaaaaagugcuu

SEQ ID NO: 3687151 - RNA, 20 nt, Human
uuugccucuuuucucugugc

SEQ ID NO: 3687152 - RNA, 18 nt, Human
uuugccugguuuugucuu

SEQ ID NO: 3687153 - RNA, 16 nt, Human
uuugccuugcagaacu

SEQ ID NO: 3687154 - RNA, 17 nt, Human
uuugccuugcagaacug

SEQ ID NO: 3687155 - RNA, 12 nt, Human
uuugccuuuaaa

SEQ ID NO: 3687156 - RNA, 12 nt, Human
uuugccuuuugc

SEQ ID NO: 3687157 - RNA, 19 nt, Human
uuugccuuuugcaaacuuu

SEQ ID NO: 3687158 - RNA, 17 nt, Human
uuugcgugcccggggca

SEQ ID NO: 3687159 - RNA, 19 nt, Human
uuugcgugggagugugugc

SEQ ID NO: 3687160 - RNA, 15 nt, Human
uuugcuaaagacaug

SEQ ID NO: 3687161 - RNA, 21 nt, Human
uuugcuaauuuuuauuaauuu

SEQ ID NO: 3687162 - RNA, 21 nt, Human
uuugcuagacucuagacaaga

SEQ ID NO: 3687163 - RNA, 23 nt, Human
uuugcucacacgggguauuuuag

SEQ ID NO: 3687164 - RNA, 17 nt, Human
uuugcucagaacacauu

SEQ ID NO: 3687165 - RNA, 13 nt, Human
uuugcucauauuu

SEQ ID NO: 3687166 - RNA, 11 nt, Human
uuugcucaugg

SEQ ID NO: 3687167 - RNA, 23 nt, Human
uuugcuccccuuccccuuccuuc

SEQ ID NO: 3687168 - RNA, 15 nt, Human
uuugcucuaaaauau

SEQ ID NO: 3687169 - RNA, 18 nt, Human
uuugcucuucaagaaauc

SEQ ID NO: 3687170 - RNA, 20 nt, Human
uuugcucuucaagaaaucug

SEQ ID NO: 3687171 - RNA, 20 nt, Human
uuugcucuucagaugccacu

SEQ ID NO: 3687172 - RNA, 17 nt, Human
uuugcucuugucccacg

SEQ ID NO: 3687173 - RNA, 23 nt, Human
uuugcugacaaccauuaaaguca

SEQ ID NO: 3687174 - RNA, 19 nt, Human
uuugcugacccuccccaaa

SEQ ID NO: 3687175 - RNA, 19 nt, Human
uuugcugccaaaugcguau

SEQ ID NO: 3687176 - RNA, 13 nt, Human
uuugcugcucuuc

SEQ ID NO: 3687177 - RNA, 22 nt, Human
uuugcuggggccgaaagaacag

SEQ ID NO: 3687178 - RNA, 12 nt, Human
uuugcuguaaga

SEQ ID NO: 3687179 - RNA, 19 nt, Human
uuugcuguaagaugucugu

SEQ ID NO: 3687180 - RNA, 18 nt, Human
uuugcuguauauuuguga

SEQ ID NO: 3687181 - RNA, 14 nt, Human
uuugcugugaacaa

SEQ ID NO: 3687182 - RNA, 16 nt, Human
uuugcuuagaaaagaa

SEQ ID NO: 3687183 - RNA, 20 nt, Human
uuugcuucauaaaugaagca

SEQ ID NO: 3687184 - RNA, 21 nt, Human
uuugcuugcaguagauuuucu

SEQ ID NO: 3687185 - RNA, 21 nt, Human
uuugcuugcucauaugcaugu

SEQ ID NO: 3687186 - RNA, 23 nt, Human
uuugcuugcuuugaaguagcucu

SEQ ID NO: 3687187 - RNA, 17 nt, Human
uuugcuuguuauauuaa

SEQ ID NO: 3687188 - RNA, 23 nt, Human
uuugcuuuaauauaaaugcaaau

SEQ ID NO: 3687189 - RNA, 15 nt, Human
uuugcuuugcccagc

SEQ ID NO: 3687190 - RNA, 19 nt, Human
uuugcuuuuuaguuuugcu

SEQ ID NO: 3687191 - RNA, 12 nt, Human
uuugcuuuuucu

SEQ ID NO: 3687192 - RNA, 14 nt, Human
uuugcuuuuugcua

SEQ ID NO: 3687193 - RNA, 21 nt, Human
uuuggaaacuaauaaaauauu

SEQ ID NO: 3687194 - RNA, 16 nt, Human
uuuggaaaggaaugca

SEQ ID NO: 3687195 - RNA, 17 nt, Human
uuuggaaaggaaugcaa

SEQ ID NO: 3687196 - RNA, 18 nt, Human
uuuggaaaggaaugcaaa

SEQ ID NO: 3687197 - RNA, 19 nt, Human
uuuggaaaggaaugcaaag

SEQ ID NO: 3687198 - RNA, 13 nt, Human
uuuggaaaguaca

SEQ ID NO: 3687199 - RNA, 11 nt, Human
uuuggaaaucc

SEQ ID NO: 3687200 - RNA, 13 nt, Human
uuuggaaccuugu

SEQ ID NO: 3687201 - RNA, 14 nt, Human
uuuggaaccuuguu

SEQ ID NO: 3687202 - RNA, 19 nt, Human
uuuggaaguuuagcucuga

SEQ ID NO: 3687203 - RNA, 16 nt, Human
uuuggaaucuagaaga

SEQ ID NO: 3687204 - RNA, 17 nt, Human
uuuggaaucuagaagaa

SEQ ID NO: 3687205 - RNA, 21 nt, Human
uuuggaaucuagaagaaauga

SEQ ID NO: 3687206 - RNA, 23 nt, Human
uuuggaaucuagaagaaaugaaa

SEQ ID NO: 3687207 - RNA, 22 nt, Human
uuuggaaucuucucuuugacaa

SEQ ID NO: 3687208 - RNA, 22 nt, Human
uuuggaauuuuccuccuuucuc

SEQ ID NO: 3687209 - RNA, 21 nt, Human
uuuggaauuuugugcccccau

SEQ ID NO: 3687210 - RNA, 22 nt, Human
uuuggaauuuuugcuugacuuc

SEQ ID NO: 3687211 - RNA, 16 nt, Human
uuuggacacacacagc

SEQ ID NO: 3687212 - RNA, 20 nt, Human
uuuggacacauuuaaggugu

SEQ ID NO: 3687213 - RNA, 18 nt, Human
uuuggaccaaaaaccagu

SEQ ID NO: 3687214 - RNA, 21 nt, Human
uuuggaccaaaaaccaguauu

SEQ ID NO: 3687215 - RNA, 24 nt, Human
uuuggaccaaaaaccaguauugua

SEQ ID NO: 3687216 - RNA, 17 nt, Human
uuuggaccauuuuccug

SEQ ID NO: 3687217 - RNA, 17 nt, Human
uuuggaccccagcuggg

SEQ ID NO: 3687218 - RNA, 13 nt, Human
uuuggacccugag

SEQ ID NO: 3687219 - RNA, 16 nt, Human
uuuggaccuaauccaa

SEQ ID NO: 3687220 - RNA, 19 nt, Human
uuuggagacucuguggggc

SEQ ID NO: 3687221 - RNA, 19 nt, Human
uuuggagagaaauauuuua

SEQ ID NO: 3687222 - RNA, 22 nt, Human
uuuggaggcuggaguaaucaga

SEQ ID NO: 3687223 - RNA, 18 nt, Human
uuuggagggaagcucuug

SEQ ID NO: 3687224 - RNA, 21 nt, Human
uuuggauaucuguuagaugcu

SEQ ID NO: 3687225 - RNA, 15 nt, Human
uuuggauucuaaaua

SEQ ID NO: 3687226 - RNA, 18 nt, Human
uuuggauucuuauguagc

SEQ ID NO: 3687227 - RNA, 23 nt, Human
uuuggauugacaguaacuugguu

SEQ ID NO: 3687228 - RNA, 18 nt, Human
uuuggauugacucugcau

SEQ ID NO: 3687229 - RNA, 22 nt, Human
uuuggauuggacaaaaugacuu

SEQ ID NO: 3687230 - RNA, 14 nt, Human
uuuggauuugacau

SEQ ID NO: 3687231 - RNA, 16 nt, Human
uuuggauuugacauug

SEQ ID NO: 3687232 - RNA, 22 nt, Human
uuuggcaggggcagaaaacucu

SEQ ID NO: 3687233 - RNA, 23 nt, Human
uuuggccaaugcaccuaaagaaa

SEQ ID NO: 3687234 - RNA, 17 nt, Human
uuuggccaucugcuccu

SEQ ID NO: 3687235 - RNA, 19 nt, Human
uuuggcccaaucucugcca

SEQ ID NO: 3687236 - RNA, 17 nt, Human
uuuggccugcacuaauu

SEQ ID NO: 3687237 - RNA, 13 nt, Human
uuuggcuccugcc

SEQ ID NO: 3687238 - RNA, 22 nt, Human
uuuggcugaaauucuccuggag

SEQ ID NO: 3687239 - RNA, 13 nt, Human
uuuggcugcugaa

SEQ ID NO: 3687240 - RNA, 22 nt, Human
uuugggaaaaaaacauacacaa

SEQ ID NO: 3687241 - RNA, 12 nt, Human
uuugggaagggg

SEQ ID NO: 3687242 - RNA, 22 nt, Human
uuugggaagugaagacuggaag

SEQ ID NO: 3687243 - RNA, 17 nt, Human
uuugggaaguuaaaggg

SEQ ID NO: 3687244 - RNA, 17 nt, Human
uuugggaauauuugaau

SEQ ID NO: 3687245 - RNA, 16 nt, Human
uuugggagacauguga

SEQ ID NO: 3687246 - RNA, 14 nt, Human
uuugggagagacuu

SEQ ID NO: 3687247 - RNA, 17 nt, Human
uuugggaggcugaggcg

SEQ ID NO: 3687248 - RNA, 17 nt, Human
uuugggaggcugaggug

SEQ ID NO: 3687249 - RNA, 15 nt, Human
uuugggaguuuuuau

SEQ ID NO: 3687250 - RNA, 23 nt, Human
uuugggaguuuuuaugagaaacu

SEQ ID NO: 3687251 - RNA, 19 nt, Human
uuugggauagagaauguuc

SEQ ID NO: 3687252 - RNA, 22 nt, Human
uuugggaugucuuauuuuuaga

SEQ ID NO: 3687253 - RNA, 17 nt, Human
uuugggcagagaggcug

SEQ ID NO: 3687254 - RNA, 11 nt, Human
uuugggcaugu

SEQ ID NO: 3687255 - RNA, 15 nt, Human
uuugggcccagggac

SEQ ID NO: 3687256 - RNA, 12 nt, Human
uuugggcccugc

SEQ ID NO: 3687257 - RNA, 14 nt, Human
uuugggcugaaugu

SEQ ID NO: 3687258 - RNA, 17 nt, Human
uuuggggaaaccuagag

SEQ ID NO: 3687259 - RNA, 13 nt, Human
uuuggggaagaac

SEQ ID NO: 3687260 - RNA, 18 nt, Human
uuuggggcagaaaggacu

SEQ ID NO: 3687261 - RNA, 13 nt, Human
uuuggggccggga

SEQ ID NO: 3687262 - RNA, 15 nt, Human
uuuggggcuugauga

SEQ ID NO: 3687263 - RNA, 17 nt, Human
uuugggggaaacuuccu

SEQ ID NO: 3687264 - RNA, 20 nt, Human
uuugggggucaggcagccag

SEQ ID NO: 3687265 - RNA, 22 nt, Human
uuugggguacccacugcucugg

SEQ ID NO: 3687266 - RNA, 21 nt, Human
uuugggguugcaucagaaaug

SEQ ID NO: 3687267 - RNA, 23 nt, Human
uuuggguggggggcauugaguau

SEQ ID NO: 3687268 - RNA, 15 nt, Human
uuuggguuaaaaaaa

SEQ ID NO: 3687269 - RNA, 14 nt, Human
uuuggguucugccu

SEQ ID NO: 3687270 - RNA, 15 nt, Human
uuuggguucugccug

SEQ ID NO: 3687271 - RNA, 16 nt, Human
uuuggguucugccugc

SEQ ID NO: 3687272 - RNA, 18 nt, Human
uuuggguuuuuuuccuuu

SEQ ID NO: 3687273 - RNA, 20 nt, Human
uuugguaaaauacuucuuga

SEQ ID NO: 3687274 - RNA, 21 nt, Human
uuugguagcugggaaagcaua

SEQ ID NO: 3687275 - RNA, 19 nt, Human
uuugguaucuguucuuuaa

SEQ ID NO: 3687276 - RNA, 18 nt, Human
uuugguccacuuuuccag

SEQ ID NO: 3687277 - RNA, 19 nt, Human
uuugguccacuuuuccagu

SEQ ID NO: 3687278 - RNA, 22 nt, Human
uuuggugaacauugcaauagaa

SEQ ID NO: 3687279 - RNA, 14 nt, Human
uuuggugagaaccu

SEQ ID NO: 3687280 - RNA, 15 nt, Human
uuuggugcaaaguau

SEQ ID NO: 3687281 - RNA, 17 nt, Human
uuuggugcauagaacug

SEQ ID NO: 3687282 - RNA, 22 nt, Human
uuuggugcauagaacuggguaa

SEQ ID NO: 3687283 - RNA, 12 nt, Human
uuuggugccuuu

SEQ ID NO: 3687284 - RNA, 20 nt, Human
uuugguggagauaaagauuu

SEQ ID NO: 3687285 - RNA, 16 nt, Human
uuugguggauguaaau

SEQ ID NO: 3687286 - RNA, 15 nt, Human
uuugguggcuuugca

SEQ ID NO: 3687287 - RNA, 16 nt, Human
uuuggugucuuucucu

SEQ ID NO: 3687288 - RNA, 12 nt, Human
uuugguguguuc

SEQ ID NO: 3687289 - RNA, 14 nt, Human
uuugguguguuccc

SEQ ID NO: 3687290 - RNA, 18 nt, Human
uuugguuaaaaaaaagaa

SEQ ID NO: 3687291 - RNA, 16 nt, Human
uuugguuaagcuuuga

SEQ ID NO: 3687292 - RNA, 18 nt, Human
uuugguuaagucuguuuu

SEQ ID NO: 3687293 - RNA, 22 nt, Human
uuugguuaaguuggcuucuguu

SEQ ID NO: 3687294 - RNA, 13 nt, Human
uuugguuauagug

SEQ ID NO: 3687295 - RNA, 14 nt, Human
uuugguuauuuuac

SEQ ID NO: 3687296 - RNA, 15 nt, Human
uuugguuccucucug

SEQ ID NO: 3687297 - RNA, 16 nt, Human
uuugguuccucucugg

SEQ ID NO: 3687298 - RNA, 21 nt, Human
uuugguucuuaguucucacug

SEQ ID NO: 3687299 - RNA, 21 nt, Human
uuugguuuauauuuuuucagu

SEQ ID NO: 3687300 - RNA, 21 nt, Human
uuugguuucccaagagcuacg

SEQ ID NO: 3687301 - RNA, 23 nt, Human
uuugguuuuaaaauacuguagau

SEQ ID NO: 3687302 - RNA, 12 nt, Human
uuugguuuuguu

SEQ ID NO: 3687303 - RNA, 14 nt, Human
uuugguuuuguucc

SEQ ID NO: 3687304 - RNA, 21 nt, Human
uuugguuuuguuccccuccuc

SEQ ID NO: 3687305 - RNA, 14 nt, Human
uuuguaaaaaucuu

SEQ ID NO: 3687306 - RNA, 22 nt, Human
uuuguaaaaaucuuuugaagca

SEQ ID NO: 3687307 - RNA, 14 nt, Human
uuuguaaaaaugua

SEQ ID NO: 3687308 - RNA, 15 nt, Human
uuuguaaagaaaaau

SEQ ID NO: 3687309 - RNA, 18 nt, Human
uuuguaaagaaauuuacu

SEQ ID NO: 3687310 - RNA, 21 nt, Human
uuuguaaaggugaaaaaagcu

SEQ ID NO: 3687311 - RNA, 17 nt, Human
uuuguaaaguguggucc

SEQ ID NO: 3687312 - RNA, 17 nt, Human
uuuguaaauaagagauu

SEQ ID NO: 3687313 - RNA, 12 nt, Human
uuuguaaauguu

SEQ ID NO: 3687314 - RNA, 15 nt, Human
uuuguaaauucugau

SEQ ID NO: 3687315 - RNA, 13 nt, Human
uuuguaaauuguc

SEQ ID NO: 3687316 - RNA, 17 nt, Human
uuuguaaauuuauguga

SEQ ID NO: 3687317 - RNA, 15 nt, Human
uuuguaaccucagcu

SEQ ID NO: 3687318 - RNA, 19 nt, Human
uuuguaaccucagcucugg

SEQ ID NO: 3687319 - RNA, 19 nt, Human
uuuguaagaacuaaagaag

SEQ ID NO: 3687320 - RNA, 18 nt, Human
uuuguaagaguguagaag

SEQ ID NO: 3687321 - RNA, 21 nt, Human
uuuguaagugcuacauaaauu

SEQ ID NO: 3687322 - RNA, 16 nt, Human
uuuguaaguugaagca

SEQ ID NO: 3687323 - RNA, 21 nt, Human
uuuguaaguuuaugucuaaag

SEQ ID NO: 3687324 - RNA, 14 nt, Human
uuuguaauaaagua

SEQ ID NO: 3687325 - RNA, 24 nt, Human
uuuguaauuaaauuaugguauuaa

SEQ ID NO: 3687326 - RNA, 15 nt, Human
uuuguaauuuucuug

SEQ ID NO: 3687327 - RNA, 17 nt, Human
uuuguacaagauuguca

SEQ ID NO: 3687328 - RNA, 14 nt, Human
uuuguacagagugc

SEQ ID NO: 3687329 - RNA, 19 nt, Human
uuuguacauauguaaaaua

SEQ ID NO: 3687330 - RNA, 19 nt, Human
uuuguacaucuggcuuauu

SEQ ID NO: 3687331 - RNA, 20 nt, Human
uuuguacaugccauugaaaa

SEQ ID NO: 3687332 - RNA, 11 nt, Human
uuuguacaugu

SEQ ID NO: 3687333 - RNA, 18 nt, Human
uuuguacauuugggaguu

SEQ ID NO: 3687334 - RNA, 19 nt, Human
uuuguaccagugaauuuuu

SEQ ID NO: 3687335 - RNA, 22 nt, Human
uuuguaccagugaauuuuugca

SEQ ID NO: 3687336 - RNA, 14 nt, Human
uuuguaccauggug

SEQ ID NO: 3687337 - RNA, 19 nt, Human
uuuguaccauuuuaaaguu

SEQ ID NO: 3687338 - RNA, 19 nt, Human
uuuguaccccccaaccccu

SEQ ID NO: 3687339 - RNA, 20 nt, Human
uuuguaccccccaaccccug

SEQ ID NO: 3687340 - RNA, 16 nt, Human
uuuguacugaauuuuu

SEQ ID NO: 3687341 - RNA, 18 nt, Human
uuuguacuguuuaauguu

SEQ ID NO: 3687342 - RNA, 12 nt, Human
uuuguacuuucu

SEQ ID NO: 3687343 - RNA, 15 nt, Human
uuuguacuuucuguu

SEQ ID NO: 3687344 - RNA, 16 nt, Human
uuuguacuuucuguua

SEQ ID NO: 3687345 - RNA, 17 nt, Human
uuuguacuuucuguuaa

SEQ ID NO: 3687346 - RNA, 17 nt, Human
uuuguagaagucacauu

SEQ ID NO: 3687347 - RNA, 13 nt, Human
uuuguagagccag

SEQ ID NO: 3687348 - RNA, 23 nt, Human
uuuguaggggucaaagaaaugcu

SEQ ID NO: 3687349 - RNA, 16 nt, Human
uuuguaggguuucuag

SEQ ID NO: 3687350 - RNA, 20 nt, Human
uuuguagguaaaauguauuu

SEQ ID NO: 3687351 - RNA, 16 nt, Human
uuuguagguacuuuug

SEQ ID NO: 3687352 - RNA, 22 nt, Human
uuuguagugauuuuuaugccac

SEQ ID NO: 3687353 - RNA, 23 nt, Human
uuuguaguggaaacauuuauauu

SEQ ID NO: 3687354 - RNA, 19 nt, Human
uuuguaguguuggagaaga

SEQ ID NO: 3687355 - RNA, 12 nt, Human
uuuguaguuuuu

SEQ ID NO: 3687356 - RNA, 14 nt, Human
uuuguauaaaagug

SEQ ID NO: 3687357 - RNA, 17 nt, Human
uuuguauaaaauaauuu

SEQ ID NO: 3687358 - RNA, 19 nt, Human
uuuguauaacuucuuaaaa

SEQ ID NO: 3687359 - RNA, 13 nt, Human
uuuguauaauugg

SEQ ID NO: 3687360 - RNA, 18 nt, Human
uuuguauaauuguaucgu

SEQ ID NO: 3687361 - RNA, 19 nt, Human
uuuguauacaaauauauug

SEQ ID NO: 3687362 - RNA, 22 nt, Human
uuuguauacaaauauauuguua

SEQ ID NO: 3687363 - RNA, 19 nt, Human
uuuguauacauccugggua

SEQ ID NO: 3687364 - RNA, 20 nt, Human
uuuguauacauccuggguaa

SEQ ID NO: 3687365 - RNA, 20 nt, Human
uuuguauacuuuaaauaauu

SEQ ID NO: 3687366 - RNA, 11 nt, Human
uuuguauagaa

SEQ ID NO: 3687367 - RNA, 14 nt, Human
uuuguauaguuaug

SEQ ID NO: 3687368 - RNA, 17 nt, Human
uuuguauaguuauguaa

SEQ ID NO: 3687369 - RNA, 19 nt, Human
uuuguauaguuauguaaau

SEQ ID NO: 3687370 - RNA, 16 nt, Human
uuuguauauuauuucu

SEQ ID NO: 3687371 - RNA, 18 nt, Human
uuuguauauugguuuuau

SEQ ID NO: 3687372 - RNA, 22 nt, Human
uuuguaucugcaggcagacacg

SEQ ID NO: 3687373 - RNA, 13 nt, Human
uuuguaugaaaac

SEQ ID NO: 3687374 - RNA, 16 nt, Human
uuuguaugcacuuugu

SEQ ID NO: 3687375 - RNA, 14 nt, Human
uuuguauguaaaug

SEQ ID NO: 3687376 - RNA, 12 nt, Human
uuuguaugugug

SEQ ID NO: 3687377 - RNA, 12 nt, Human
uuuguauguuuu

SEQ ID NO: 3687378 - RNA, 17 nt, Human
uuuguauucugucuuca

SEQ ID NO: 3687379 - RNA, 22 nt, Human
uuuguauugaaagcuuuuguua

SEQ ID NO: 3687380 - RNA, 22 nt, Human
uuuguauuguccuauuaguguu

SEQ ID NO: 3687381 - RNA, 13 nt, Human
uuuguauuuauuc

SEQ ID NO: 3687382 - RNA, 13 nt, Human
uuuguauuuucau

SEQ ID NO: 3687383 - RNA, 21 nt, Human
uuuguauuuucaugaaaauac

SEQ ID NO: 3687384 - RNA, 17 nt, Human
uuuguauuuuguuuaaa

SEQ ID NO: 3687385 - RNA, 14 nt, Human
uuuguauuuuuagu

SEQ ID NO: 3687386 - RNA, 17 nt, Human
uuugucaaacuguagaa

SEQ ID NO: 3687387 - RNA, 16 nt, Human
uuugucaacauuguga

SEQ ID NO: 3687388 - RNA, 17 nt, Human
uuugucaccagaacaca

SEQ ID NO: 3687389 - RNA, 14 nt, Human
uuugucacuuuuuc

SEQ ID NO: 3687390 - RNA, 15 nt, Human
uuugucacuuuuucu

SEQ ID NO: 3687391 - RNA, 13 nt, Human
uuugucauaucaa

SEQ ID NO: 3687392 - RNA, 21 nt, Human
uuugucaugaauucuuaugcu

SEQ ID NO: 3687393 - RNA, 20 nt, Human
uuugucauuagccugaguag

SEQ ID NO: 3687394 - RNA, 14 nt, Human
uuugucauuuucau

SEQ ID NO: 3687395 - RNA, 16 nt, Human
uuugucauuuucauua

SEQ ID NO: 3687396 - RNA, 12 nt, Human
uuugucauuuug

SEQ ID NO: 3687397 - RNA, 16 nt, Human
uuuguccauuuguaaa

SEQ ID NO: 3687398 - RNA, 17 nt, Human
uuugucccccaacuuga

SEQ ID NO: 3687399 - RNA, 13 nt, Human
uuugucccuucua

SEQ ID NO: 3687400 - RNA, 18 nt, Human
uuuguccuccugcugcca

SEQ ID NO: 3687401 - RNA, 18 nt, Human
uuuguccugcaucaucuu

SEQ ID NO: 3687402 - RNA, 16 nt, Human
uuugucgaauuuuuau

SEQ ID NO: 3687403 - RNA, 19 nt, Human
uuugucgcucaugugugca

SEQ ID NO: 3687404 - RNA, 21 nt, Human
uuugucgggcaccagccagcg

SEQ ID NO: 3687405 - RNA, 15 nt, Human
uuugucuaaaaugcc

SEQ ID NO: 3687406 - RNA, 21 nt, Human
uuugucuacguuuaguuuccg

SEQ ID NO: 3687407 - RNA, 12 nt, Human
uuugucucagau

SEQ ID NO: 3687408 - RNA, 14 nt, Human
uuugucucauccca

SEQ ID NO: 3687409 - RNA, 12 nt, Human
uuugucuccucu

SEQ ID NO: 3687410 - RNA, 16 nt, Human
uuugucucuccuuuuc

SEQ ID NO: 3687411 - RNA, 21 nt, Human
uuugucugccccaaguuuugu

SEQ ID NO: 3687412 - RNA, 13 nt, Human
uuugucugguuaa

SEQ ID NO: 3687413 - RNA, 13 nt, Human
uuugucugucgug

SEQ ID NO: 3687414 - RNA, 18 nt, Human
uuugucuguuuguuucaa

SEQ ID NO: 3687415 - RNA, 15 nt, Human
uuugucuucucccca

SEQ ID NO: 3687416 - RNA, 21 nt, Human
uuugucuuguguuucuuuagu

SEQ ID NO: 3687417 - RNA, 12 nt, Human
uuugugaaauuu

SEQ ID NO: 3687418 - RNA, 18 nt, Human
uuugugaaauuuuucaua

SEQ ID NO: 3687419 - RNA, 14 nt, Human
uuugugaagcccug

SEQ ID NO: 3687420 - RNA, 17 nt, Human
uuugugaauggauugga

SEQ ID NO: 3687421 - RNA, 23 nt, Human
uuugugaauggauuggauuauuu

SEQ ID NO: 3687422 - RNA, 15 nt, Human
uuugugaauuaggcu

SEQ ID NO: 3687423 - RNA, 20 nt, Human
uuugugacuauauagagaug

SEQ ID NO: 3687424 - RNA, 22 nt, Human
uuugugagaaacaucucaauaa

SEQ ID NO: 3687425 - RNA, 18 nt, Human
uuugugaggaagccgcug

SEQ ID NO: 3687426 - RNA, 15 nt, Human
uuugugaguuuguuu

SEQ ID NO: 3687427 - RNA, 16 nt, Human
uuugugauacaaugcu

SEQ ID NO: 3687428 - RNA, 20 nt, Human
uuugugauaugcacaaugua

SEQ ID NO: 3687429 - RNA, 19 nt, Human
uuugugauauggagcccug

SEQ ID NO: 3687430 - RNA, 14 nt, Human
uuugugauucuucc

SEQ ID NO: 3687431 - RNA, 13 nt, Human
uuugugccagccg

SEQ ID NO: 3687432 - RNA, 20 nt, Human
uuugugccuggcuucuuucu

SEQ ID NO: 3687433 - RNA, 20 nt, Human
uuugugcuauaguauuugau

SEQ ID NO: 3687434 - RNA, 23 nt, Human
uuugugcuaucagacuguaggau

SEQ ID NO: 3687435 - RNA, 17 nt, Human
uuuguggaugucuuccu

SEQ ID NO: 3687436 - RNA, 11 nt, Human
uuuguggccaa

SEQ ID NO: 3687437 - RNA, 17 nt, Human
uuugugggaauuuaaga

SEQ ID NO: 3687438 - RNA, 11 nt, Human
uuuguggggag

SEQ ID NO: 3687439 - RNA, 15 nt, Human
uuugugguuuggaau

SEQ ID NO: 3687440 - RNA, 12 nt, Human
uuuguguaaauu

SEQ ID NO: 3687441 - RNA, 21 nt, Human
uuuguguaaauuauugaugaa

SEQ ID NO: 3687442 - RNA, 15 nt, Human
uuuguguaauaaagu

SEQ ID NO: 3687443 - RNA, 17 nt, Human
ucauaacagugccauug

SEQ ID NO: 3687444 - RNA, 18 nt, Human
ucauaacggaucagaaau

SEQ ID NO: 3687445 - RNA, 21 nt, Human
ucauaacggaucagaaauaca

SEQ ID NO: 3687446 - RNA, 21 nt, Human
ucauaacuuauugcugauuuu

SEQ ID NO: 3687447 - RNA, 13 nt, Human
ucauaagcacacu

SEQ ID NO: 3687448 - RNA, 18 nt, Human
ucauaagccaauuuuucu

SEQ ID NO: 3687449 - RNA, 22 nt, Human
ucauaagccaauuuuucugcac

SEQ ID NO: 3687450 - RNA, 23 nt, Human
ucauaagccaauuuuucugcacu

SEQ ID NO: 3687451 - RNA, 12 nt, Human
ucauaaugacuu

SEQ ID NO: 3687452 - RNA, 14 nt, Human
ucauaaugugaagu

SEQ ID NO: 3687453 - RNA, 18 nt, Human
ucauaaugugaaguguua

SEQ ID NO: 3687454 - RNA, 19 nt, Human
ucauaaugugaaguguuaa

SEQ ID NO: 3687455 - RNA, 20 nt, Human
ucauaauuccuacagcacua

SEQ ID NO: 3687456 - RNA, 15 nt, Human
ucauaauuuauacag

SEQ ID NO: 3687457 - RNA, 16 nt, Human
ucauaauuuguuucca

SEQ ID NO: 3687458 - RNA, 23 nt, Human
ucauacaaugacaaguaugauga

SEQ ID NO: 3687459 - RNA, 16 nt, Human
ucauacagagaaguca

SEQ ID NO: 3687460 - RNA, 23 nt, Human
ucauacagagaagucacagggca

SEQ ID NO: 3687461 - RNA, 15 nt, Human
ucauacauuguacga

SEQ ID NO: 3687462 - RNA, 14 nt, Human
ucauacauuuucua

SEQ ID NO: 3687463 - RNA, 15 nt, Human
ucauaccaaugaaaa

SEQ ID NO: 3687464 - RNA, 14 nt, Human
ucauacccaccccc

SEQ ID NO: 3687465 - RNA, 21 nt, Human
ucauacccacccccacccaag

SEQ ID NO: 3687466 - RNA, 15 nt, Human
ucauaccuaaguacu

SEQ ID NO: 3687467 - RNA, 19 nt, Human
ucauaccuaaguacuguaa

SEQ ID NO: 3687468 - RNA, 20 nt, Human
ucauaccuaaguacuguaau

SEQ ID NO: 3687469 - RNA, 15 nt, Human
ucauaccuacaugua

SEQ ID NO: 3687470 - RNA, 21 nt, Human
ucauacuacauugaguagaca

SEQ ID NO: 3687471 - RNA, 17 nt, Human
ucauacuccuaugcuuu

SEQ ID NO: 3687472 - RNA, 13 nt, Human
ucauacugaagau

SEQ ID NO: 3687473 - RNA, 15 nt, Human
ucauacugauguguu

SEQ ID NO: 3687474 - RNA, 19 nt, Human
ucauacugugcuggagcca

SEQ ID NO: 3687475 - RNA, 20 nt, Human
ucauacugugcuggagccac

SEQ ID NO: 3687476 - RNA, 14 nt, Human
ucauacuuaaaaau

SEQ ID NO: 3687477 - RNA, 16 nt, Human
ucauacuuaaaaauuu

SEQ ID NO: 3687478 - RNA, 19 nt, Human
ucauacuuaaaaauuuauu

SEQ ID NO: 3687479 - RNA, 12 nt, Human
ucauacuugaac

SEQ ID NO: 3687480 - RNA, 13 nt, Human
ucauagaaauucu

SEQ ID NO: 3687481 - RNA, 16 nt, Human
ucauagaauagcaugu

SEQ ID NO: 3687482 - RNA, 21 nt, Human
ucauagaauagcauguuguag

SEQ ID NO: 3687483 - RNA, 13 nt, Human
ucauagagacuug

SEQ ID NO: 3687484 - RNA, 14 nt, Human
ucauagagauuugu

SEQ ID NO: 3687485 - RNA, 11 nt, Human
ucauagcagcu

SEQ ID NO: 3687486 - RNA, 14 nt, Human
ucauagcauuaacu

SEQ ID NO: 3687487 - RNA, 22 nt, Human
ucauagcauugucuauuuuucu

SEQ ID NO: 3687488 - RNA, 18 nt, Human
ucauagcccagaucagcu

SEQ ID NO: 3687489 - RNA, 14 nt, Human
ucauagcccaguag

SEQ ID NO: 3687490 - RNA, 21 nt, Human
ucauagcccucacccuggggc

SEQ ID NO: 3687491 - RNA, 17 nt, Human
ucauagcugagauuccu

SEQ ID NO: 3687492 - RNA, 21 nt, Human
ucauagcugguuccugcuaga

SEQ ID NO: 3687493 - RNA, 15 nt, Human
ucauaggaaguuagc

SEQ ID NO: 3687494 - RNA, 21 nt, Human
ucauaggcaccuuuuacugug

SEQ ID NO: 3687495 - RNA, 17 nt, Human
ucauagggucucuucag

SEQ ID NO: 3687496 - RNA, 18 nt, Human
ucauagggucucuucagg

SEQ ID NO: 3687497 - RNA, 20 nt, Human
ucauagggucucuucagguu

SEQ ID NO: 3687498 - RNA, 21 nt, Human
ucauagggucucuucagguuc

SEQ ID NO: 3687499 - RNA, 15 nt, Human
ucauagguugagcaa

SEQ ID NO: 3687500 - RNA, 16 nt, Human
ucauaguaacuucuua

SEQ ID NO: 3687501 - RNA, 20 nt, Human
ucauaguacucuuuguagca

SEQ ID NO: 3687502 - RNA, 22 nt, Human
ucauaguacucuuuguagcaaa

SEQ ID NO: 3687503 - RNA, 14 nt, Human
ucauaguaguuuuu

SEQ ID NO: 3687504 - RNA, 17 nt, Human
ucauaguauccauauuu

SEQ ID NO: 3687505 - RNA, 24 nt, Human
ucauaguauccauauuuuauuacu

SEQ ID NO: 3687506 - RNA, 21 nt, Human
ucauaguaugguggcuggguu

SEQ ID NO: 3687507 - RNA, 18 nt, Human
ucauaguucagaauuuag

SEQ ID NO: 3687508 - RNA, 20 nt, Human
ucauauaaacuuuuuaaaga

SEQ ID NO: 3687509 - RNA, 13 nt, Human
ucauauaaaguau

SEQ ID NO: 3687510 - RNA, 16 nt, Human
ucauauaaaguaucau

SEQ ID NO: 3687511 - RNA, 13 nt, Human
ucauauaaauaga

SEQ ID NO: 3687512 - RNA, 14 nt, Human
ucauauaaauagaa

SEQ ID NO: 3687513 - RNA, 18 nt, Human
ucauauaaauagaaugua

SEQ ID NO: 3687514 - RNA, 16 nt, Human
ucauauaauaaaugua

SEQ ID NO: 3687515 - RNA, 17 nt, Human
ucauauauaucacccag

SEQ ID NO: 3687516 - RNA, 17 nt, Human
ucauauauuaaacaucc

SEQ ID NO: 3687517 - RNA, 14 nt, Human
ucauaucauccaca

SEQ ID NO: 3687518 - RNA, 12 nt, Human
ucauaucauuuc

SEQ ID NO: 3687519 - RNA, 19 nt, Human
ucauaucuuaauauauuuc

SEQ ID NO: 3687520 - RNA, 11 nt, Human
ucauaugaaaa

SEQ ID NO: 3687521 - RNA, 16 nt, Human
ucauaugaaaggugcc

SEQ ID NO: 3687522 - RNA, 17 nt, Human
ucauauggcccaguguc

SEQ ID NO: 3687523 - RNA, 12 nt, Human
ucauaugugauc

SEQ ID NO: 3687524 - RNA, 23 nt, Human
ucauaugugaucugucuuguaau

SEQ ID NO: 3687525 - RNA, 15 nt, Human
ucauauguugcucag

SEQ ID NO: 3687526 - RNA, 18 nt, Human
ucauauguugcucagucu

SEQ ID NO: 3687527 - RNA, 18 nt, Human
ucauauuagacuucuguu

SEQ ID NO: 3687528 - RNA, 18 nt, Human
ucauauuggaaaaaucac

SEQ ID NO: 3687529 - RNA, 21 nt, Human
ucauauugguauauccuuuuc

SEQ ID NO: 3687530 - RNA, 14 nt, Human
ucauauugugccaa

SEQ ID NO: 3687531 - RNA, 12 nt, Human
ucauauuuaaag

SEQ ID NO: 3687532 - RNA, 15 nt, Human
ucauauuuacuucuu

SEQ ID NO: 3687533 - RNA, 21 nt, Human
ucauauuucccaugauuucau

SEQ ID NO: 3687534 - RNA, 20 nt, Human
ucauauuugaggaguguuaa

SEQ ID NO: 3687535 - RNA, 17 nt, Human
ucauauuuuaauuucaa

SEQ ID NO: 3687536 - RNA, 12 nt, Human
ucauauuuugau

SEQ ID NO: 3687537 - RNA, 14 nt, Human
ucauauuuugauua

SEQ ID NO: 3687538 - RNA, 19 nt, Human
ucauauuuugauuauugua

SEQ ID NO: 3687539 - RNA, 23 nt, Human
ucauauuuuguauauaucugcuu

SEQ ID NO: 3687540 - RNA, 22 nt, Human
ucauauuuuucauagcuaaaaa

SEQ ID NO: 3687541 - RNA, 19 nt, Human
ucaucaacaagauuuccuu

SEQ ID NO: 3687542 - RNA, 13 nt, Human
ucaucaacugaau

SEQ ID NO: 3687543 - RNA, 11 nt, Human
ucaucaagacu

SEQ ID NO: 3687544 - RNA, 19 nt, Human
ucaucaagacuggaaggug

SEQ ID NO: 3687545 - RNA, 13 nt, Human
ucaucaagagaau

SEQ ID NO: 3687546 - RNA, 21 nt, Human
ucaucaagagaauuuggggcu

SEQ ID NO: 3687547 - RNA, 21 nt, Human
ucaucaaggcacugccugaug

SEQ ID NO: 3687548 - RNA, 21 nt, Human
ucaucaagggugcgucuggga

SEQ ID NO: 3687549 - RNA, 14 nt, Human
ucaucaaucauugu

SEQ ID NO: 3687550 - RNA, 16 nt, Human
ucaucaaucauuguac

SEQ ID NO: 3687551 - RNA, 15 nt, Human
ucaucacaagaacac

SEQ ID NO: 3687552 - RNA, 12 nt, Human
ucaucacacaca

SEQ ID NO: 3687553 - RNA, 13 nt, Human
ucaucacacacau

SEQ ID NO: 3687554 - RNA, 14 nt, Human
ucaucacacacaug

SEQ ID NO: 3687555 - RNA, 15 nt, Human
ucaucacagggauuu

SEQ ID NO: 3687556 - RNA, 23 nt, Human
ucaucacauuucuaugccaaaca

SEQ ID NO: 3687557 - RNA, 19 nt, Human
ucaucaccaacgucugugc

SEQ ID NO: 3687558 - RNA, 20 nt, Human
ucaucaccaacgucugugcc

SEQ ID NO: 3687559 - RNA, 15 nt, Human
ucaucacuccccucc

SEQ ID NO: 3687560 - RNA, 17 nt, Human
ucaucacuguggcuguc

SEQ ID NO: 3687561 - RNA, 21 nt, Human
ucaucacuuugaccuaaauua

SEQ ID NO: 3687562 - RNA, 15 nt, Human
ucaucacuuuucagu

SEQ ID NO: 3687563 - RNA, 19 nt, Human
ucaucagaaaggaaaaaca

SEQ ID NO: 3687564 - RNA, 13 nt, Human
ucaucagaagugg

SEQ ID NO: 3687565 - RNA, 22 nt, Human
ucaucagauggaaauauuuuga

SEQ ID NO: 3687566 - RNA, 16 nt, Human
ucaucagccaccaucc

SEQ ID NO: 3687567 - RNA, 18 nt, Human
ucaucagccaccauccua

SEQ ID NO: 3687568 - RNA, 16 nt, Human
ucaucagggccugggg

SEQ ID NO: 3687569 - RNA, 17 nt, Human
ucaucaggggccugcag

SEQ ID NO: 3687570 - RNA, 16 nt, Human
ucaucaguauugaagc

SEQ ID NO: 3687571 - RNA, 16 nt, Human
ucaucaguguuaaaaa

SEQ ID NO: 3687572 - RNA, 11 nt, Human
ucaucaucagg

SEQ ID NO: 3687573 - RNA, 13 nt, Human
ucaucaucagggc

SEQ ID NO: 3687574 - RNA, 14 nt, Human
ucaucauccuaagc

SEQ ID NO: 3687575 - RNA, 18 nt, Human
ucaucaugaguucugcug

SEQ ID NO: 3687576 - RNA, 15 nt, Human
ucaucauucccucuc

SEQ ID NO: 3687577 - RNA, 13 nt, Human
ucaucauucucug

SEQ ID NO: 3687578 - RNA, 19 nt, Human
ucauccaauccucacuggg

SEQ ID NO: 3687579 - RNA, 19 nt, Human
ucauccacauuguuuuaaa

SEQ ID NO: 3687580 - RNA, 14 nt, Human
ucauccaccccauc

SEQ ID NO: 3687581 - RNA, 16 nt, Human
ucauccaccccauccc

SEQ ID NO: 3687582 - RNA, 22 nt, Human
ucauccacuagugcaaaucaua

SEQ ID NO: 3687583 - RNA, 19 nt, Human
ucauccacugugccaugug

SEQ ID NO: 3687584 - RNA, 19 nt, Human
ucauccagacucagagcuc

SEQ ID NO: 3687585 - RNA, 21 nt, Human
ucauccagggcucugaccagu

SEQ ID NO: 3687586 - RNA, 18 nt, Human
ucaucccacgcacuccau

SEQ ID NO: 3687587 - RNA, 12 nt, Human
ucaucccacucc

SEQ ID NO: 3687588 - RNA, 14 nt, Human
ucaucccauuccag

SEQ ID NO: 3687589 - RNA, 18 nt, Human
ucaucccauucugcguca

SEQ ID NO: 3687590 - RNA, 20 nt, Human
ucauccccaccugucuucaa

SEQ ID NO: 3687591 - RNA, 14 nt, Human
ucauccccaccuug

SEQ ID NO: 3687592 - RNA, 21 nt, Human
ucaucccuaugggauucagug

SEQ ID NO: 3687593 - RNA, 21 nt, Human
ucaucccuucucuuccaggca

SEQ ID NO: 3687594 - RNA, 23 nt, Human
uuuguguaauauuacuuuaacau

SEQ ID NO: 3687595 - RNA, 14 nt, Human
uuuguguacagugu

SEQ ID NO: 3687596 - RNA, 14 nt, Human
uuuguguacuuuua

SEQ ID NO: 3687597 - RNA, 18 nt, Human
uuuguguccuccaggagc

SEQ ID NO: 3687598 - RNA, 20 nt, Human
uuugugugaccaacuguguu

SEQ ID NO: 3687599 - RNA, 14 nt, Human
uuugugugagagac

SEQ ID NO: 3687600 - RNA, 14 nt, Human
uuugugugcucucc

SEQ ID NO: 3687601 - RNA, 20 nt, Human
uuuguguggagucauuucug

SEQ ID NO: 3687602 - RNA, 16 nt, Human
uuuguguguauuugcu

SEQ ID NO: 3687603 - RNA, 18 nt, Human
uuuguguguugucuugaa

SEQ ID NO: 3687604 - RNA, 19 nt, Human
uuuguguguugucuugaaa

SEQ ID NO: 3687605 - RNA, 12 nt, Human
uuuguguuagag

SEQ ID NO: 3687606 - RNA, 13 nt, Human
uuuguguucuguu

SEQ ID NO: 3687607 - RNA, 19 nt, Human
uuuguguucuguuuguuaa

SEQ ID NO: 3687608 - RNA, 14 nt, Human
uuuguguuguuuga

SEQ ID NO: 3687609 - RNA, 22 nt, Human
uuuguguuuauucuugaugaaa

SEQ ID NO: 3687610 - RNA, 22 nt, Human
uuuguguuucagccauguauuu

SEQ ID NO: 3687611 - RNA, 21 nt, Human
uuuguguuugguuuacauuua

SEQ ID NO: 3687612 - RNA, 13 nt, Human
uuuguuaaaaucu

SEQ ID NO: 3687613 - RNA, 22 nt, Human
uuuguuaaaauuaucaauaucu

SEQ ID NO: 3687614 - RNA, 18 nt, Human
uuuguuaagguccugaaa

SEQ ID NO: 3687615 - RNA, 17 nt, Human
uuuguuaauaaagugca

SEQ ID NO: 3687616 - RNA, 21 nt, Human
uuuguuaauuuagaaaacuuu

SEQ ID NO: 3687617 - RNA, 20 nt, Human
uuuguuaauuuggaccauuu

SEQ ID NO: 3687618 - RNA, 17 nt, Human
uuuguuaccuuaaaacu

SEQ ID NO: 3687619 - RNA, 16 nt, Human
uuuguuacucuuggga

SEQ ID NO: 3687620 - RNA, 17 nt, Human
uuuguuacuguucuugc

SEQ ID NO: 3687621 - RNA, 20 nt, Human
uuuguuacuguucuugcugc

SEQ ID NO: 3687622 - RNA, 21 nt, Human
uuuguuacuguucuugcugcu

SEQ ID NO: 3687623 - RNA, 22 nt, Human
uuuguuacuguucuugcugcua

SEQ ID NO: 3687624 - RNA, 22 nt, Human
uuuguuaggauuuucacauucu

SEQ ID NO: 3687625 - RNA, 15 nt, Human
uuuguuaguuccugu

SEQ ID NO: 3687626 - RNA, 19 nt, Human
uuuguuauuuguacaguuc

SEQ ID NO: 3687627 - RNA, 17 nt, Human
uuuguucaaguuuuggg

SEQ ID NO: 3687628 - RNA, 15 nt, Human
uuuguucauguuugg

SEQ ID NO: 3687629 - RNA, 17 nt, Human
uuuguuccccacuggag

SEQ ID NO: 3687630 - RNA, 18 nt, Human
uuuguuccccuccuccac

SEQ ID NO: 3687631 - RNA, 13 nt, Human
uuuguucucuggg

SEQ ID NO: 3687632 - RNA, 13 nt, Human
uuuguucucuguc

SEQ ID NO: 3687633 - RNA, 19 nt, Human
uuuguucuuacacauacag

SEQ ID NO: 3687634 - RNA, 18 nt, Human
uuuguucuucagagauca

SEQ ID NO: 3687635 - RNA, 14 nt, Human
uuuguucuuuuuau

SEQ ID NO: 3687636 - RNA, 16 nt, Human
uuuguugaaagaaagu

SEQ ID NO: 3687637 - RNA, 16 nt, Human
uuuguugacauucuga

SEQ ID NO: 3687638 - RNA, 19 nt, Human
uuuguugacauucugaaug

SEQ ID NO: 3687639 - RNA, 16 nt, Human
uuuguugcaagaugug

SEQ ID NO: 3687640 - RNA, 19 nt, Human
uuuguugcaagaugugaau

SEQ ID NO: 3687641 - RNA, 14 nt, Human
uuuguugcuguuuu

SEQ ID NO: 3687642 - RNA, 20 nt, Human
uuuguugguuuuuaaagauu

SEQ ID NO: 3687643 - RNA, 12 nt, Human
uuuguuguaaaa

SEQ ID NO: 3687644 - RNA, 15 nt, Human
uuuguuguaaaaaga

SEQ ID NO: 3687645 - RNA, 15 nt, Human
uuuguuguaaagagu

SEQ ID NO: 3687646 - RNA, 16 nt, Human
uuuguuguaaagaguu

SEQ ID NO: 3687647 - RNA, 16 nt, Human
uuuguugucagcugaa

SEQ ID NO: 3687648 - RNA, 20 nt, Human
uuuguuuaaaaaguaauaaa

SEQ ID NO: 3687649 - RNA, 19 nt, Human
uuuguuuaauggacacuuu

SEQ ID NO: 3687650 - RNA, 12 nt, Human
uuuguuuacaca

SEQ ID NO: 3687651 - RNA, 21 nt, Human
uuuguuuaugguaaaaaauuu

SEQ ID NO: 3687652 - RNA, 15 nt, Human
uuuguuuauguaauu

SEQ ID NO: 3687653 - RNA, 21 nt, Human
uuuguuucaagaaccuggaaa

SEQ ID NO: 3687654 - RNA, 17 nt, Human
uuuguuuccucuguuca

SEQ ID NO: 3687655 - RNA, 15 nt, Human
uuuguuucuaccucc

SEQ ID NO: 3687656 - RNA, 16 nt, Human
uuuguuucugaaaauu

SEQ ID NO: 3687657 - RNA, 14 nt, Human
uuuguuucugaaag

SEQ ID NO: 3687658 - RNA, 17 nt, Human
uuuguuucugagaaaag

SEQ ID NO: 3687659 - RNA, 12 nt, Human
uuuguuucugua

SEQ ID NO: 3687660 - RNA, 16 nt, Human
uuuguuucuuccaaag

SEQ ID NO: 3687661 - RNA, 22 nt, Human
uuuguuucuuugaauuuucauu

SEQ ID NO: 3687662 - RNA, 15 nt, Human
uuuguuugguauugu

SEQ ID NO: 3687663 - RNA, 12 nt, Human
uuuguuugugcu

SEQ ID NO: 3687664 - RNA, 13 nt, Human
uuuguuuguucuu

SEQ ID NO: 3687665 - RNA, 13 nt, Human
uuuguuuucuuug

SEQ ID NO: 3687666 - RNA, 18 nt, Human
uuuguuuugcuuuuucug

SEQ ID NO: 3687667 - RNA, 13 nt, Human
uuuguuuuguguc

SEQ ID NO: 3687668 - RNA, 20 nt, Human
uuuguuuuuaaacuguacag

SEQ ID NO: 3687669 - RNA, 15 nt, Human
uuuuauuccacaucu

SEQ ID NO: 3687670 - RNA, 23 nt, Human
uuuuauuccugcccugcuguuua

SEQ ID NO: 3687671 - RNA, 18 nt, Human
uuuuauuccuguauguug

SEQ ID NO: 3687672 - RNA, 13 nt, Human
uuuuauucuuuuu

SEQ ID NO: 3687673 - RNA, 12 nt, Human
uuuuauugccuu

SEQ ID NO: 3687674 - RNA, 13 nt, Human
uuuuauugccuuc

SEQ ID NO: 3687675 - RNA, 22 nt, Human
uuuuauugccuucucaccagcu

SEQ ID NO: 3687676 - RNA, 23 nt, Human
uuuuauugccuucucaccagcug

SEQ ID NO: 3687677 - RNA, 12 nt, Human
uuuuauugcuag

SEQ ID NO: 3687678 - RNA, 23 nt, Human
uuuuauugcuaguauuugaauua

SEQ ID NO: 3687679 - RNA, 16 nt, Human
uuuuauuguaacagac

SEQ ID NO: 3687680 - RNA, 21 nt, Human
uuuuauuguaacagacauugu

SEQ ID NO: 3687681 - RNA, 20 nt, Human
uuuuauuguauaaacuauca

SEQ ID NO: 3687682 - RNA, 13 nt, Human
uuuuauuguugua

SEQ ID NO: 3687683 - RNA, 20 nt, Human
uuuuauuguuuaaagcaacu

SEQ ID NO: 3687684 - RNA, 12 nt, Human
uuuuauuguuuu

SEQ ID NO: 3687685 - RNA, 15 nt, Human
uuuuauuguuuucua

SEQ ID NO: 3687686 - RNA, 13 nt, Human
uuuuauuuaaaaa

SEQ ID NO: 3687687 - RNA, 14 nt, Human
uuuuauuuauaugu

SEQ ID NO: 3687688 - RNA, 14 nt, Human
uuuuauuucaaugu

SEQ ID NO: 3687689 - RNA, 14 nt, Human
uuuuauuucauugg

SEQ ID NO: 3687690 - RNA, 18 nt, Human
uuuuauuuccuaugaugu

SEQ ID NO: 3687691 - RNA, 15 nt, Human
uuuuauuugcaugug

SEQ ID NO: 3687692 - RNA, 16 nt, Human
uuuuauuuuacuuuua

SEQ ID NO: 3687693 - RNA, 14 nt, Human
uuuuauuuugccaa

SEQ ID NO: 3687694 - RNA, 20 nt, Human
uuuuauuuuguaauuauugu

SEQ ID NO: 3687695 - RNA, 18 nt, Human
uuuuauuuuuagacagag

SEQ ID NO: 3687696 - RNA, 13 nt, Human
uuuuauuuuucua

SEQ ID NO: 3687697 - RNA, 16 nt, Human
uuuuauuuuuuauaca

SEQ ID NO: 3687698 - RNA, 14 nt, Human
uuuucaaaagauaa

SEQ ID NO: 3687699 - RNA, 15 nt, Human
uuuucaaaagauaau

SEQ ID NO: 3687700 - RNA, 20 nt, Human
uuuucaaaauagaaaaguua

SEQ ID NO: 3687701 - RNA, 21 nt, Human
uuuucaaaauuguuacaaauu

SEQ ID NO: 3687702 - RNA, 14 nt, Human
uuuucaaauuguau

SEQ ID NO: 3687703 - RNA, 19 nt, Human
uuuucaaccccacccuguu

SEQ ID NO: 3687704 - RNA, 13 nt, Human
uuuucaacugcca

SEQ ID NO: 3687705 - RNA, 23 nt, Human
uuuucaacugccaaaaugcucua

SEQ ID NO: 3687706 - RNA, 15 nt, Human
uuuucaagaaacuga

SEQ ID NO: 3687707 - RNA, 15 nt, Human
uuuucaagcagcauc

SEQ ID NO: 3687708 - RNA, 13 nt, Human
uuuucaaggaagg

SEQ ID NO: 3687709 - RNA, 18 nt, Human
uuuucaaggcuuauauuc

SEQ ID NO: 3687710 - RNA, 17 nt, Human
uuuucaaguauuuaagc

SEQ ID NO: 3687711 - RNA, 20 nt, Human
uuuucaaguauuuaagccua

SEQ ID NO: 3687712 - RNA, 16 nt, Human
uuuucaauagccacua

SEQ ID NO: 3687713 - RNA, 15 nt, Human
uuuucaauauauuga

SEQ ID NO: 3687714 - RNA, 21 nt, Human
uuuucaauauauugaacuuuu

SEQ ID NO: 3687715 - RNA, 24 nt, Human
uuuucaaucucguauagaagucuu

SEQ ID NO: 3687716 - RNA, 13 nt, Human
uuuucaaugugau

SEQ ID NO: 3687717 - RNA, 12 nt, Human
uuuucaauuaaa

SEQ ID NO: 3687718 - RNA, 16 nt, Human
uuuucaauuaaacgga

SEQ ID NO: 3687719 - RNA, 17 nt, Human
uuuucaauucaaaaaug

SEQ ID NO: 3687720 - RNA, 14 nt, Human
uuuucaauuuugca

SEQ ID NO: 3687721 - RNA, 18 nt, Human
uuuucaauuuugcaugcu

SEQ ID NO: 3687722 - RNA, 20 nt, Human
uuuucacaaugucaguauuu

SEQ ID NO: 3687723 - RNA, 22 nt, Human
uuuucacauucuuauaaauaug

SEQ ID NO: 3687724 - RNA, 23 nt, Human
uuuucacauucuuauaaauauga

SEQ ID NO: 3687725 - RNA, 12 nt, Human
uuuucacauuuu

SEQ ID NO: 3687726 - RNA, 23 nt, Human
uuuucaccuggaagcauuuguuu

SEQ ID NO: 3687727 - RNA, 23 nt, Human
uuuucaccuguuuuuaagcuguu

SEQ ID NO: 3687728 - RNA, 23 nt, Human
uuuucacucuaagucauguaugu

SEQ ID NO: 3687729 - RNA, 21 nt, Human
uuuucacuggaguuacauuaa

SEQ ID NO: 3687730 - RNA, 18 nt, Human
uuuucagaaaaagaaaug

SEQ ID NO: 3687731 - RNA, 15 nt, Human
uuuucagaaauaugu

SEQ ID NO: 3687732 - RNA, 11 nt, Human
uuuucagaccg

SEQ ID NO: 3687733 - RNA, 16 nt, Human
uuuucagacucagacu

SEQ ID NO: 3687734 - RNA, 18 nt, Human
uuuucagacugcuuuaaa

SEQ ID NO: 3687735 - RNA, 19 nt, Human
uuuucagauauaaaagacu

SEQ ID NO: 3687736 - RNA, 18 nt, Human
uuuucagauucaggcauu

SEQ ID NO: 3687737 - RNA, 13 nt, Human
uuuucagauuugc

SEQ ID NO: 3687738 - RNA, 19 nt, Human
uuuucagcaaacucuuuuc

SEQ ID NO: 3687739 - RNA, 19 nt, Human
uuuucagcccauauuucau

SEQ ID NO: 3687740 - RNA, 23 nt, Human
uuuucagcuaggaacaaaucuuc

SEQ ID NO: 3687741 - RNA, 17 nt, Human
uuuucaggagcgcaaga

SEQ ID NO: 3687742 - RNA, 22 nt, Human
uuuucaggagcgcaagauagau

SEQ ID NO: 3687743 - RNA, 20 nt, Human
uuuucaggcuagauguaugu

SEQ ID NO: 3687744 - RNA, 22 nt, Human
uuuucagggcuggcuccugauc

SEQ ID NO: 3687745 - RNA, 21 nt, Human
uuuucaggugcucaaaaugca

SEQ ID NO: 3687746 - RNA, 16 nt, Human
uuuucaguauuuugga

SEQ ID NO: 3687747 - RNA, 15 nt, Human
uuuucagucauauaa

SEQ ID NO: 3687748 - RNA, 13 nt, Human
uuuucaguuacuu

SEQ ID NO: 3687749 - RNA, 23 nt, Human
uuuucaguucaaagucaugaugu

SEQ ID NO: 3687750 - RNA, 24 nt, Human
uuuucaguucaaagucaugauguu

SEQ ID NO: 3687751 - RNA, 12 nt, Human
uuuucaguuuuc

SEQ ID NO: 3687752 - RNA, 14 nt, Human
uuuucauaaacaag

SEQ ID NO: 3687753 - RNA, 12 nt, Human
uuuucauaauaa

SEQ ID NO: 3687754 - RNA, 16 nt, Human
uuuucauaggaagaca

SEQ ID NO: 3687755 - RNA, 17 nt, Human
uuuucauaggucugaaa

SEQ ID NO: 3687756 - RNA, 13 nt, Human
uuuucauaucauu

SEQ ID NO: 3687757 - RNA, 19 nt, Human
uuuucauauuuuaauuuca

SEQ ID NO: 3687758 - RNA, 13 nt, Human
uuuucauccuaaa

SEQ ID NO: 3687759 - RNA, 15 nt, Human
uuuucaucuguuguu

SEQ ID NO: 3687760 - RNA, 21 nt, Human
uuuucaucuucaguugucucu

SEQ ID NO: 3687761 - RNA, 21 nt, Human
uuuucaucuucucuggcgaca

SEQ ID NO: 3687762 - RNA, 13 nt, Human
uuuucaugaaaau

SEQ ID NO: 3687763 - RNA, 21 nt, Human
uuuucaugauuuugaaaucau

SEQ ID NO: 3687764 - RNA, 16 nt, Human
uuuucaugcuuuauca

SEQ ID NO: 3687765 - RNA, 21 nt, Human
uuuucauggugaaaauguacu

SEQ ID NO: 3687766 - RNA, 12 nt, Human
uuuucauguuuu

SEQ ID NO: 3687767 - RNA, 19 nt, Human
uuuucauguuuuaacaaaa

SEQ ID NO: 3687768 - RNA, 23 nt, Human
uuuucauuagcaaaaaaaguugu

SEQ ID NO: 3687769 - RNA, 15 nt, Human
uuuucauuauuuuau

SEQ ID NO: 3687770 - RNA, 21 nt, Human
uuuucauucagguauuuguaa

SEQ ID NO: 3687771 - RNA, 17 nt, Human
uuuucauuccuaaagaa

SEQ ID NO: 3687772 - RNA, 13 nt, Human
uuuucauuugccu

SEQ ID NO: 3687773 - RNA, 15 nt, Human
uuuucauuugccuau

SEQ ID NO: 3687774 - RNA, 16 nt, Human
uuuucauuuucugcaa

SEQ ID NO: 3687775 - RNA, 21 nt, Human
uuuuccaaaaaaauacugcca

SEQ ID NO: 3687776 - RNA, 19 nt, Human
uuuuccaaaacaaaaagau

SEQ ID NO: 3687777 - RNA, 11 nt, Human
uuuuccaaaug

SEQ ID NO: 3687778 - RNA, 22 nt, Human
uuuuccaaauguaauaaacuuu

SEQ ID NO: 3687779 - RNA, 18 nt, Human
uuuuccaacuacuaauag

SEQ ID NO: 3687780 - RNA, 22 nt, Human
uuuuccacaagauucccagaga

SEQ ID NO: 3687781 - RNA, 13 nt, Human
uuuuccacuacug

SEQ ID NO: 3687782 - RNA, 13 nt, Human
uuuuccaggcugg

SEQ ID NO: 3687783 - RNA, 17 nt, Human
uuuuccaggcuucugcu

SEQ ID NO: 3687784 - RNA, 14 nt, Human
uuuuccauaaagaa

SEQ ID NO: 3687785 - RNA, 15 nt, Human
uuuuccaucuaaaaa

SEQ ID NO: 3687786 - RNA, 19 nt, Human
uuuuccaugaaaaugcaac

SEQ ID NO: 3687787 - RNA, 21 nt, Human
uuuuccauggcaggaaggcuu

SEQ ID NO: 3687788 - RNA, 14 nt, Human
uuuuccauguaucu

SEQ ID NO: 3687789 - RNA, 18 nt, Human
uuuuccauuaugcuguag

SEQ ID NO: 3687790 - RNA, 17 nt, Human
uuuuccauuguuugaaa

SEQ ID NO: 3687791 - RNA, 21 nt, Human
uuuucccaauagcacuuucau

SEQ ID NO: 3687792 - RNA, 17 nt, Human
uuuucccacuccaagcc

SEQ ID NO: 3687793 - RNA, 18 nt, Human
uuuucccagcuacaccuu

SEQ ID NO: 3687794 - RNA, 19 nt, Human
uuuucccagcuacaccuuu

SEQ ID NO: 3687795 - RNA, 15 nt, Human
uuuucccauuuguaa

SEQ ID NO: 3687796 - RNA, 16 nt, Human
uuuucccccaaagugg

SEQ ID NO: 3687797 - RNA, 18 nt, Human
uuuuccccccacucuccc

SEQ ID NO: 3687798 - RNA, 19 nt, Human
uuuuccccggucccuugag

SEQ ID NO: 3687799 - RNA, 12 nt, Human
uuuuccccuccc

SEQ ID NO: 3687800 - RNA, 22 nt, Human
uuuucccucuuuggcuccccug

SEQ ID NO: 3687801 - RNA, 15 nt, Human
uuuucccucuuuucu

SEQ ID NO: 3687802 - RNA, 22 nt, Human
uuuucccugaaguuauguguau

SEQ ID NO: 3687803 - RNA, 14 nt, Human
uuuucccuuugccu

SEQ ID NO: 3687804 - RNA, 18 nt, Human
uuuuccgcauucuuugua

SEQ ID NO: 3687805 - RNA, 15 nt, Human
uuuuccuaaauguau

SEQ ID NO: 3687806 - RNA, 17 nt, Human
uuuuccuaucauguuaa

SEQ ID NO: 3687807 - RNA, 13 nt, Human
uuuuccucccuca

SEQ ID NO: 3687808 - RNA, 20 nt, Human
uuuuccucccuucugcuacu

SEQ ID NO: 3687809 - RNA, 21 nt, Human
uuuuccucccuucugcuacug

SEQ ID NO: 3687810 - RNA, 22 nt, Human
uuuuccucccuuggguucugau

SEQ ID NO: 3687811 - RNA, 21 nt, Human
uuuuccucgcuucuuucaagg

SEQ ID NO: 3687812 - RNA, 13 nt, Human
uuuuccugaaaac

SEQ ID NO: 3687813 - RNA, 13 nt, Human
uuuuccuguccuc

SEQ ID NO: 3687814 - RNA, 22 nt, Human
uuuuccuguccucuuucagcuc

SEQ ID NO: 3687815 - RNA, 12 nt, Human
uuuuccugugga

SEQ ID NO: 3687816 - RNA, 18 nt, Human
uuuuccuguuucugaaaa

SEQ ID NO: 3687817 - RNA, 15 nt, Human
uuuuccuugaagccg

SEQ ID NO: 3687818 - RNA, 21 nt, Human
uuuuccuuuaaaaaaauuuaa

SEQ ID NO: 3687819 - RNA, 14 nt, Human
uuuucgaaaaucaa

SEQ ID NO: 3687820 - RNA, 21 nt, Human
uuuucggaggccccacugaug

SEQ ID NO: 3687821 - RNA, 18 nt, Human
uuuucuaaacguaagcac

SEQ ID NO: 3687822 - RNA, 23 nt, Human
uuuucuaaacguaagcacuguuu

SEQ ID NO: 3687823 - RNA, 12 nt, Human
uuuucuaaagua

SEQ ID NO: 3687824 - RNA, 15 nt, Human
uuuucuaaauuuauc

SEQ ID NO: 3687825 - RNA, 13 nt, Human
uuuucuaagagaa

SEQ ID NO: 3687826 - RNA, 13 nt, Human
uuuucuacaguua

SEQ ID NO: 3687827 - RNA, 16 nt, Human
uuuucuacauuauugc

SEQ ID NO: 3687828 - RNA, 13 nt, Human
uuuucuacucgag

SEQ ID NO: 3687829 - RNA, 23 nt, Human
uuuucuacucgaguuacagacaa

SEQ ID NO: 3687830 - RNA, 18 nt, Human
uuuucuagacuuucuguu

SEQ ID NO: 3687831 - RNA, 19 nt, Human
uuuucuagauacaauaaau

SEQ ID NO: 3687832 - RNA, 12 nt, Human
uuuucuagugua

SEQ ID NO: 3687833 - RNA, 13 nt, Human
uuuucuaguguau

SEQ ID NO: 3687834 - RNA, 17 nt, Human
uuuucuaguguaucaaa

SEQ ID NO: 3687835 - RNA, 12 nt, Human
uuuucuauguac

SEQ ID NO: 3687836 - RNA, 18 nt, Human
uuuucuauguacuaguac

SEQ ID NO: 3687837 - RNA, 13 nt, Human
uuuucuauuaaaa

SEQ ID NO: 3687838 - RNA, 18 nt, Human
uuuucuauuaaaagacuc

SEQ ID NO: 3687839 - RNA, 19 nt, Human
uuuucuauuaaaagacuca

SEQ ID NO: 3687840 - RNA, 19 nt, Human
uuuucuauuauggaaaacu

SEQ ID NO: 3687841 - RNA, 23 nt, Human
uuuucuauuauggaaaacugugu

SEQ ID NO: 3687842 - RNA, 17 nt, Human
uuuucuauuuaugccuu

SEQ ID NO: 3687843 - RNA, 20 nt, Human
uuuucucaaaguuuugaaaa

SEQ ID NO: 3687844 - RNA, 22 nt, Human
uuuucucccuggauuuuuacca

SEQ ID NO: 3687845 - RNA, 13 nt, Human
uuuucuccuccca

SEQ ID NO: 3687846 - RNA, 19 nt, Human
uuuucuccucccaggaacu

SEQ ID NO: 3687847 - RNA, 18 nt, Human
uuuucucuguacuuuuca

SEQ ID NO: 3687848 - RNA, 14 nt, Human
uuuucucuucauau

SEQ ID NO: 3687849 - RNA, 12 nt, Human
uuuucucuuucu

SEQ ID NO: 3687850 - RNA, 14 nt, Human
uuuucugaaguugu

SEQ ID NO: 3687851 - RNA, 16 nt, Human
uuuucugaaucuucug

SEQ ID NO: 3687852 - RNA, 15 nt, Human
uuuucugagaaagac

SEQ ID NO: 3687853 - RNA, 18 nt, Human
uuuucugagaaagacuau

SEQ ID NO: 3687854 - RNA, 11 nt, Human
uuuucugauua

SEQ ID NO: 3687855 - RNA, 18 nt, Human
uuuucugauuagcuuugu

SEQ ID NO: 3687856 - RNA, 21 nt, Human
uuuucugauuguaacguugcu

SEQ ID NO: 3687857 - RNA, 16 nt, Human
uuuucugcaagccugc

SEQ ID NO: 3687858 - RNA, 13 nt, Human
uuuucugcacuau

SEQ ID NO: 3687859 - RNA, 22 nt, Human
uuuucugcuuuagacuugaaaa

SEQ ID NO: 3687860 - RNA, 21 nt, Human
uuuucuggguaggacuuuggu

SEQ ID NO: 3687861 - RNA, 15 nt, Human
uuuucugguucuaac

SEQ ID NO: 3687862 - RNA, 16 nt, Human
uuuucuguagucauuu

SEQ ID NO: 3687863 - RNA, 20 nt, Human
uuuucugucagaugagaaca

SEQ ID NO: 3687864 - RNA, 15 nt, Human
uuuucugucucugcc

SEQ ID NO: 3687865 - RNA, 17 nt, Human
uuuucugugccugaaua

SEQ ID NO: 3687866 - RNA, 15 nt, Human
uuuucuguguaacca

SEQ ID NO: 3687867 - RNA, 21 nt, Human
uuuucuguguaaccauuuuau

SEQ ID NO: 3687868 - RNA, 16 nt, Human
uuuucuguguguuccu

SEQ ID NO: 3687869 - RNA, 23 nt, Human
uuuucuguuacuuuguuuuuuaa

SEQ ID NO: 3687870 - RNA, 21 nt, Human
uuuucuuaaccagaucauugu

SEQ ID NO: 3687871 - RNA, 17 nt, Human
uuuucuuaaccaucuuu

SEQ ID NO: 3687872 - RNA, 16 nt, Human
uuuucuuacuccuccu

SEQ ID NO: 3687873 - RNA, 13 nt, Human
uuuucuucaucaa

SEQ ID NO: 3687874 - RNA, 14 nt, Human
uuuucuucucccuc

SEQ ID NO: 3687875 - RNA, 16 nt, Human
uuuucuugauaauuuu

SEQ ID NO: 3687876 - RNA, 14 nt, Human
uuuucuugcauuga

SEQ ID NO: 3687877 - RNA, 18 nt, Human
uuuucuugccucuguccc

SEQ ID NO: 3687878 - RNA, 11 nt, Human
uuuucuuguau

SEQ ID NO: 3687879 - RNA, 15 nt, Human
uuuucuuuagagaac

SEQ ID NO: 3687880 - RNA, 17 nt, Human
uuuucuuuagagaacug

SEQ ID NO: 3687881 - RNA, 16 nt, Human
uuuucuuucagccaag

SEQ ID NO: 3687882 - RNA, 12 nt, Human
uuuucuuugcaa

SEQ ID NO: 3687883 - RNA, 20 nt, Human
uuuucuuugccaucucugcu

SEQ ID NO: 3687884 - RNA, 15 nt, Human
uuuucuuuguaucau

SEQ ID NO: 3687885 - RNA, 19 nt, Human
uuuucuuuguguagcuuug

SEQ ID NO: 3687886 - RNA, 15 nt, Human
uuuucuuuuaauuuu

SEQ ID NO: 3687887 - RNA, 17 nt, Human
uuuucuuuuguuacugu

SEQ ID NO: 3687888 - RNA, 18 nt, Human
uuuucuuuuguuacuguu

SEQ ID NO: 3687889 - RNA, 23 nt, Human
uuuucuuuuuacauaacugccuu

SEQ ID NO: 3687890 - RNA, 22 nt, Human
uuuucuuuuuuuuuaaguucuu

SEQ ID NO: 3687891 - RNA, 20 nt, Human
uuuugaaaagcagacauuuu

SEQ ID NO: 3687892 - RNA, 17 nt, Human
uuuugaaagucuguccu

SEQ ID NO: 3687893 - RNA, 16 nt, Human
uuuugaaaugaaauuu

SEQ ID NO: 3687894 - RNA, 21 nt, Human
uuuugaaaugaaauuuaaaca

SEQ ID NO: 3687895 - RNA, 22 nt, Human
uuuugaaaugugguuuuccuga

SEQ ID NO: 3687896 - RNA, 18 nt, Human
uuuugaacuaagaaacuu

SEQ ID NO: 3687897 - RNA, 14 nt, Human
uuuugaaggcaaaa

SEQ ID NO: 3687898 - RNA, 16 nt, Human
uuuugaagucuuguau

SEQ ID NO: 3687899 - RNA, 10 nt, Human
uuuugaagug

SEQ ID NO: 3687900 - RNA, 18 nt, Human
uuuugaagugagaaaaug

SEQ ID NO: 3687901 - RNA, 15 nt, Human
uuuugaaguuuacau

SEQ ID NO: 3687902 - RNA, 15 nt, Human
uuuugaauaaaaacu

SEQ ID NO: 3687903 - RNA, 21 nt, Human
uuuugaauaccauuaaaacug

SEQ ID NO: 3687904 - RNA, 19 nt, Human
uuuugacacuauaucugua

SEQ ID NO: 3687905 - RNA, 13 nt, Human
uuuugacacugaa

SEQ ID NO: 3687906 - RNA, 14 nt, Human
uuuugacacugaaa

SEQ ID NO: 3687907 - RNA, 18 nt, Human
uuuugacacugaaaguuu

SEQ ID NO: 3687908 - RNA, 19 nt, Human
uuuugacaguguugaaaau

SEQ ID NO: 3687909 - RNA, 24 nt, Human
uuuugacaguguugaaaauguuca

SEQ ID NO: 3687910 - RNA, 15 nt, Human
uuuugacggaugauu

SEQ ID NO: 3687911 - RNA, 22 nt, Human
uuuugacuagggauucaggcug

SEQ ID NO: 3687912 - RNA, 11 nt, Human
uuuugagaaag

SEQ ID NO: 3687913 - RNA, 17 nt, Human
uuuugagacagaaucuc

SEQ ID NO: 3687914 - RNA, 12 nt, Human
uuuugagauauu

SEQ ID NO: 3687915 - RNA, 13 nt, Human
uuuugagauauua

SEQ ID NO: 3687916 - RNA, 16 nt, Human
uuuugagcaacuuucu

SEQ ID NO: 3687917 - RNA, 14 nt, Human
uuuugagcaugggu

SEQ ID NO: 3687918 - RNA, 23 nt, Human
uuuugagguaaagauauggagaa

SEQ ID NO: 3687919 - RNA, 19 nt, Human
uuuugaguagauauuacuu

SEQ ID NO: 3687920 - RNA, 22 nt, Human
uuuugaguagauauuacuuuau

SEQ ID NO: 3687921 - RNA, 23 nt, Human
uuuugagucuuuuuuuuuuaagu

SEQ ID NO: 3687922 - RNA, 23 nt, Human
uuuugauaaaguaguaaaaauua

SEQ ID NO: 3687923 - RNA, 19 nt, Human
uuuugauaaaguuucucag

SEQ ID NO: 3687924 - RNA, 21 nt, Human
uuuugauaaaguuucucagau

SEQ ID NO: 3687925 - RNA, 13 nt, Human
uuuugauaacugu

SEQ ID NO: 3687926 - RNA, 18 nt, Human
uuuugauaauaauauugu

SEQ ID NO: 3687927 - RNA, 15 nt, Human
uccaaccccaacucc

SEQ ID NO: 3687928 - RNA, 18 nt, Human
uccaaccccaacuccagu

SEQ ID NO: 3687929 - RNA, 17 nt, Human
uccaaccccccagcacu

SEQ ID NO: 3687930 - RNA, 19 nt, Human
uccaaccccccagcacuga

SEQ ID NO: 3687931 - RNA, 18 nt, Human
uccaaccccucgcccagu

SEQ ID NO: 3687932 - RNA, 22 nt, Human
uccaacccgucuggcccaccag

SEQ ID NO: 3687933 - RNA, 13 nt, Human
uccaacccuagca

SEQ ID NO: 3687934 - RNA, 15 nt, Human
uccaacccuagcaaa

SEQ ID NO: 3687935 - RNA, 16 nt, Human
uccaacccucaucacc

SEQ ID NO: 3687936 - RNA, 21 nt, Human
uccaaccuaaccugugucugc

SEQ ID NO: 3687937 - RNA, 14 nt, Human
uccaaccuggacaa

SEQ ID NO: 3687938 - RNA, 13 nt, Human
uccaacguuugga

SEQ ID NO: 3687939 - RNA, 19 nt, Human
uccaacuccaacauccacu

SEQ ID NO: 3687940 - RNA, 12 nt, Human
uccaacuccagc

SEQ ID NO: 3687941 - RNA, 13 nt, Human
uccaacuccagca

SEQ ID NO: 3687942 - RNA, 13 nt, Human
uccaacuccagga

SEQ ID NO: 3687943 - RNA, 12 nt, Human
uccaacuccagu

SEQ ID NO: 3687944 - RNA, 18 nt, Human
uccaacucccuuaaaaua

SEQ ID NO: 3687945 - RNA, 19 nt, Human
uccaacucgaaucugugug

SEQ ID NO: 3687946 - RNA, 23 nt, Human
uccaacugagaaguaccuuauca

SEQ ID NO: 3687947 - RNA, 21 nt, Human
uccaacuggauuauaaauaaa

SEQ ID NO: 3687948 - RNA, 20 nt, Human
uccaacuguauauauuccca

SEQ ID NO: 3687949 - RNA, 18 nt, Human
uccaacuguguucauuag

SEQ ID NO: 3687950 - RNA, 18 nt, Human
uccaacuuauguuuuuaa

SEQ ID NO: 3687951 - RNA, 20 nt, Human
uccaacuuauguuuuuaaau

SEQ ID NO: 3687952 - RNA, 15 nt, Human
uccaagaagcccagg

SEQ ID NO: 3687953 - RNA, 22 nt, Human
uccaagaagcccaggaaaggcu

SEQ ID NO: 3687954 - RNA, 23 nt, Human
uccaagaauagcaucuguacaaa

SEQ ID NO: 3687955 - RNA, 21 nt, Human
uccaagaauccacauuucuaa

SEQ ID NO: 3687956 - RNA, 22 nt, Human
uccaagaauccacauuucuaaa

SEQ ID NO: 3687957 - RNA, 12 nt, Human
uccaagaaucua

SEQ ID NO: 3687958 - RNA, 19 nt, Human
uccaagaaucuaucugcuu

SEQ ID NO: 3687959 - RNA, 15 nt, Human
uccaagaaugcugaa

SEQ ID NO: 3687960 - RNA, 14 nt, Human
uccaagaauuucua

SEQ ID NO: 3687961 - RNA, 15 nt, Human
uccaagacacugugg

SEQ ID NO: 3687962 - RNA, 17 nt, Human
uccaagacaugucuguu

SEQ ID NO: 3687963 - RNA, 11 nt, Human
uccaagacauu

SEQ ID NO: 3687964 - RNA, 15 nt, Human
uccaagacauuguca

SEQ ID NO: 3687965 - RNA, 20 nt, Human
uccaagaccuucuccuucac

SEQ ID NO: 3687966 - RNA, 23 nt, Human
uccaagacucuagaguccaaggu

SEQ ID NO: 3687967 - RNA, 13 nt, Human
uccaagagccuga

SEQ ID NO: 3687968 - RNA, 14 nt, Human
uccaagagccugag

SEQ ID NO: 3687969 - RNA, 15 nt, Human
uccaagagucuaaag

SEQ ID NO: 3687970 - RNA, 17 nt, Human
uccaagagucugaugau

SEQ ID NO: 3687971 - RNA, 18 nt, Human
uccaagauaccuaaaaga

SEQ ID NO: 3687972 - RNA, 16 nt, Human
uccaagauucuagaug

SEQ ID NO: 3687973 - RNA, 17 nt, Human
uccaagauucuagauga

SEQ ID NO: 3687974 - RNA, 18 nt, Human
uccaagauucuagaugau

SEQ ID NO: 3687975 - RNA, 17 nt, Human
uccaagcaaaugugaau

SEQ ID NO: 3687976 - RNA, 19 nt, Human
uccaagcaaauguuacaua

SEQ ID NO: 3687977 - RNA, 19 nt, Human
uccaagcagcuuagaguug

SEQ ID NO: 3687978 - RNA, 22 nt, Human
uccaagcagcuuagaguuggcc

SEQ ID NO: 3687979 - RNA, 17 nt, Human
uccaagccacugagcaa

SEQ ID NO: 3687980 - RNA, 15 nt, Human
uccaagccuccacag

SEQ ID NO: 3687981 - RNA, 23 nt, Human
uccaagcgaggucaacagagaag

SEQ ID NO: 3687982 - RNA, 22 nt, Human
uccaagcuaagcacugccacug

SEQ ID NO: 3687983 - RNA, 18 nt, Human
uccaagcuccaucuccac

SEQ ID NO: 3687984 - RNA, 14 nt, Human
uccaagcucccagg

SEQ ID NO: 3687985 - RNA, 12 nt, Human
uccaagcucccu

SEQ ID NO: 3687986 - RNA, 14 nt, Human
uccaagcucccugc

SEQ ID NO: 3687987 - RNA, 22 nt, Human
uccaagcugggagauucaaggg

SEQ ID NO: 3687988 - RNA, 12 nt, Human
uccaagcuucca

SEQ ID NO: 3687989 - RNA, 19 nt, Human
uccaaggaaaccacagcug

SEQ ID NO: 3687990 - RNA, 20 nt, Human
uccaaggagaaacagagaca

SEQ ID NO: 3687991 - RNA, 23 nt, Human
uccaaggagcugagaauagaagg

SEQ ID NO: 3687992 - RNA, 18 nt, Human
uccaaggccaggccuugg

SEQ ID NO: 3687993 - RNA, 21 nt, Human
uccaagggcuucugcacccuc

SEQ ID NO: 3687994 - RNA, 14 nt, Human
uccaaggggcaaau

SEQ ID NO: 3687995 - RNA, 18 nt, Human
uccaaggguacuaaggaa

SEQ ID NO: 3687996 - RNA, 16 nt, Human
uccaagguggggugga

SEQ ID NO: 3687997 - RNA, 13 nt, Human
uccaagguuuaaa

SEQ ID NO: 3687998 - RNA, 19 nt, Human
uccaagucuuugcuauugu

SEQ ID NO: 3687999 - RNA, 17 nt, Human
uccaagugccagaggug

SEQ ID NO: 3688000 - RNA, 22 nt, Human
uccaaguggccuccgucacuac

SEQ ID NO: 3688001 - RNA, 15 nt, Human
uccaagugugcauau

SEQ ID NO: 3688002 - RNA, 13 nt, Human
uccaagugugugu

SEQ ID NO: 3688003 - RNA, 14 nt, Human
uccaagugugugug

SEQ ID NO: 3688004 - RNA, 16 nt, Human
uccaaguuaaauguag

SEQ ID NO: 3688005 - RNA, 16 nt, Human
uccaaguuggacuggg

SEQ ID NO: 3688006 - RNA, 21 nt, Human
uccaaguuuacucaacccucu

SEQ ID NO: 3688007 - RNA, 13 nt, Human
uccaauaaacagg

SEQ ID NO: 3688008 - RNA, 14 nt, Human
uccaauaaacagga

SEQ ID NO: 3688009 - RNA, 23 nt, Human
uccaauaagacacucaaauauga

SEQ ID NO: 3688010 - RNA, 20 nt, Human
uccaaucagagaccaggccc

SEQ ID NO: 3688011 - RNA, 21 nt, Human
uccaaucagagaccaggcccu

SEQ ID NO: 3688012 - RNA, 17 nt, Human
uccaaucagaucuuuau

SEQ ID NO: 3688013 - RNA, 18 nt, Human
uccaaucccaccaacccu

SEQ ID NO: 3688014 - RNA, 16 nt, Human
uccaauccucacuggg

SEQ ID NO: 3688015 - RNA, 13 nt, Human
uccaauccugccc

SEQ ID NO: 3688016 - RNA, 17 nt, Human
uccaaucucaaggaauc

SEQ ID NO: 3688017 - RNA, 14 nt, Human
uccaaucuuguuuc

SEQ ID NO: 3688018 - RNA, 18 nt, Human
uccaaucuuguuuccaaa

SEQ ID NO: 3688019 - RNA, 13 nt, Human
uccaaugagcuuu

SEQ ID NO: 3688020 - RNA, 14 nt, Human
uccaaugagcuuuc

SEQ ID NO: 3688021 - RNA, 20 nt, Human
uccaaugagcuuucugaaca

SEQ ID NO: 3688022 - RNA, 20 nt, Human
uccaaugccacauacuugca

SEQ ID NO: 3688023 - RNA, 21 nt, Human
uccaaugccucuugucuuccu

SEQ ID NO: 3688024 - RNA, 21 nt, Human
uccaaugucuuuuuaagcuua

SEQ ID NO: 3688025 - RNA, 18 nt, Human
uccaauguggcaaggaaa

SEQ ID NO: 3688026 - RNA, 15 nt, Human
uccaauuaaggauuu

SEQ ID NO: 3688027 - RNA, 16 nt, Human
uccaauuaguuuccuu

SEQ ID NO: 3688028 - RNA, 20 nt, Human
uccaauuaguuuccuuuuua

SEQ ID NO: 3688029 - RNA, 23 nt, Human
uccaauuauuugacuuuaauuua

SEQ ID NO: 3688030 - RNA, 16 nt, Human
uccaauuguugacagu

SEQ ID NO: 3688031 - RNA, 17 nt, Human
uccaauuuacauacucu

SEQ ID NO: 3688032 - RNA, 18 nt, Human
uccaauuuacauacucug

SEQ ID NO: 3688033 - RNA, 23 nt, Human
uccaauuuuaauuuaguaaaugu

SEQ ID NO: 3688034 - RNA, 14 nt, Human
uccaauuuucugga

SEQ ID NO: 3688035 - RNA, 22 nt, Human
uccaauuuucuggaauacauga

SEQ ID NO: 3688036 - RNA, 15 nt, Human
uccacaagagcccag

SEQ ID NO: 3688037 - RNA, 19 nt, Human
uccacaagagcccaggccu

SEQ ID NO: 3688038 - RNA, 20 nt, Human
uccacaagagcccaggccuc

SEQ ID NO: 3688039 - RNA, 16 nt, Human
uccacaagauucccag

SEQ ID NO: 3688040 - RNA, 17 nt, Human
uccacaaguuaaauaaa

SEQ ID NO: 3688041 - RNA, 19 nt, Human
uccacacaagggaaggaca

SEQ ID NO: 3688042 - RNA, 13 nt, Human
uccacacacacaa

SEQ ID NO: 3688043 - RNA, 13 nt, Human
uccacacacagag

SEQ ID NO: 3688044 - RNA, 19 nt, Human
uccacacacagaggaagag

SEQ ID NO: 3688045 - RNA, 17 nt, Human
uccacacacauaauggc

SEQ ID NO: 3688046 - RNA, 16 nt, Human
uccacacagaaugcaa

SEQ ID NO: 3688047 - RNA, 19 nt, Human
uccacacagugcucaaggc

SEQ ID NO: 3688048 - RNA, 16 nt, Human
uccacacccgugagaa

SEQ ID NO: 3688049 - RNA, 18 nt, Human
uccacacccucucccagg

SEQ ID NO: 3688050 - RNA, 20 nt, Human
uccacaccucacucugcuac

SEQ ID NO: 3688051 - RNA, 23 nt, Human
uccacacucaccucuaaaacagu

SEQ ID NO: 3688052 - RNA, 14 nt, Human
uccacacugcacaa

SEQ ID NO: 3688053 - RNA, 20 nt, Human
uccacagaaacauuuucauu

SEQ ID NO: 3688054 - RNA, 22 nt, Human
uccacagacggaaggguaaaca

SEQ ID NO: 3688055 - RNA, 23 nt, Human
uccacagacggaaggguaaacaa

SEQ ID NO: 3688056 - RNA, 18 nt, Human
uccacagaguaagacauu

SEQ ID NO: 3688057 - RNA, 17 nt, Human
uccacagauuguuucua

SEQ ID NO: 3688058 - RNA, 22 nt, Human
uccacagauuguuucuauacaa

SEQ ID NO: 3688059 - RNA, 20 nt, Human
uccacagcaaccccaggcug

SEQ ID NO: 3688060 - RNA, 14 nt, Human
uccacagccgcagc

SEQ ID NO: 3688061 - RNA, 15 nt, Human
uccacagccugcaag

SEQ ID NO: 3688062 - RNA, 14 nt, Human
uccacagcuaccuc

SEQ ID NO: 3688063 - RNA, 12 nt, Human
uccacagcuucc

SEQ ID NO: 3688064 - RNA, 13 nt, Human
uccacagcuuccu

SEQ ID NO: 3688065 - RNA, 14 nt, Human
uccacagcuuccug

SEQ ID NO: 3688066 - RNA, 13 nt, Human
uccacaggaagug

SEQ ID NO: 3688067 - RNA, 16 nt, Human
uccacaggcuucugag

SEQ ID NO: 3688068 - RNA, 18 nt, Human
uccacagggucccacagc

SEQ ID NO: 3688069 - RNA, 14 nt, Human
uccacaggucuaga

SEQ ID NO: 3688070 - RNA, 15 nt, Human
uccacaggucuagac

SEQ ID NO: 3688071 - RNA, 15 nt, Human
uccacaggucucaga

SEQ ID NO: 3688072 - RNA, 19 nt, Human
uccacagucucccccaccc

SEQ ID NO: 3688073 - RNA, 19 nt, Human
uccacaguugccaccaccu

SEQ ID NO: 3688074 - RNA, 14 nt, Human
uccacaucccggga

SEQ ID NO: 3688075 - RNA, 22 nt, Human
uccacauccuuucuaaacaaga

SEQ ID NO: 3688076 - RNA, 12 nt, Human
uccacaucugcc

SEQ ID NO: 3688077 - RNA, 20 nt, Human
uuuugauaauaauauuguuu

SEQ ID NO: 3688078 - RNA, 15 nt, Human
uuuugauaguugugu

SEQ ID NO: 3688079 - RNA, 19 nt, Human
uuuugauaugcauauuugu

SEQ ID NO: 3688080 - RNA, 19 nt, Human
uuuugaucuucaacaaauu

SEQ ID NO: 3688081 - RNA, 16 nt, Human
uuuugaugaguuguga

SEQ ID NO: 3688082 - RNA, 17 nt, Human
uuuugaugcagcauuug

SEQ ID NO: 3688083 - RNA, 20 nt, Human
uuuugauguuuguggccuca

SEQ ID NO: 3688084 - RNA, 12 nt, Human
uuuugauuaugu

SEQ ID NO: 3688085 - RNA, 22 nt, Human
uuuugauuauuuuuuuuuucuu

SEQ ID NO: 3688086 - RNA, 22 nt, Human
uuuugauuuaauaacauaacaa

SEQ ID NO: 3688087 - RNA, 20 nt, Human
uuuugauuuguacugaaaaa

SEQ ID NO: 3688088 - RNA, 21 nt, Human
uuuugauuuguacugaaaaau

SEQ ID NO: 3688089 - RNA, 19 nt, Human
uuuugcaaauauaaacauc

SEQ ID NO: 3688090 - RNA, 20 nt, Human
uuuugcaaauauaaacaucu

SEQ ID NO: 3688091 - RNA, 21 nt, Human
uuuugcaaccaggaacagcaa

SEQ ID NO: 3688092 - RNA, 18 nt, Human
uuuugcaauaaugcagua

SEQ ID NO: 3688093 - RNA, 16 nt, Human
ucagcgugcuuagccu

SEQ ID NO: 3688094 - RNA, 18 nt, Human
ucagcgugcuuagccucc

SEQ ID NO: 3688095 - RNA, 23 nt, Human
ucagcguggagggguaggggcug

SEQ ID NO: 3688096 - RNA, 17 nt, Human
ucagcguggccuuguuc

SEQ ID NO: 3688097 - RNA, 14 nt, Human
ucagcguuuugcaa

SEQ ID NO: 3688098 - RNA, 15 nt, Human
ucagcuaaagaaguu

SEQ ID NO: 3688099 - RNA, 18 nt, Human
ucagcuaaagaaguuuga

SEQ ID NO: 3688100 - RNA, 18 nt, Human
ucagcuaaagcccaaccu

SEQ ID NO: 3688101 - RNA, 22 nt, Human
ucagcuaagggaagacauuucu

SEQ ID NO: 3688102 - RNA, 14 nt, Human
ucagcuacugauuu

SEQ ID NO: 3688103 - RNA, 16 nt, Human
ucagcuaggaacaaau

SEQ ID NO: 3688104 - RNA, 20 nt, Human
ucagcuauuuacugccaaag

SEQ ID NO: 3688105 - RNA, 16 nt, Human
ucagcucaaugcaguu

SEQ ID NO: 3688106 - RNA, 21 nt, Human
ucagcucacgcuucacaguga

SEQ ID NO: 3688107 - RNA, 12 nt, Human
ucagcuccagcc

SEQ ID NO: 3688108 - RNA, 22 nt, Human
ucagcuccagccccuuuccaaa

SEQ ID NO: 3688109 - RNA, 12 nt, Human
ucagcuccagcu

SEQ ID NO: 3688110 - RNA, 14 nt, Human
ucagcuccagcuca

SEQ ID NO: 3688111 - RNA, 18 nt, Human
ucagcuccagcucaccag

SEQ ID NO: 3688112 - RNA, 13 nt, Human
ucagcuccagcug

SEQ ID NO: 3688113 - RNA, 16 nt, Human
ucagcucccacaagcc

SEQ ID NO: 3688114 - RNA, 19 nt, Human
ucagcucccauuucuacuc

SEQ ID NO: 3688115 - RNA, 18 nt, Human
ucagcucccccugucccc

SEQ ID NO: 3688116 - RNA, 22 nt, Human
ucagcuccccucggagaagagc

SEQ ID NO: 3688117 - RNA, 15 nt, Human
ucagcuccuuccugg

SEQ ID NO: 3688118 - RNA, 18 nt, Human
ucagcucggggagccuua

SEQ ID NO: 3688119 - RNA, 14 nt, Human
ucagcucucugccc

SEQ ID NO: 3688120 - RNA, 15 nt, Human
ucagcucucugcccu

SEQ ID NO: 3688121 - RNA, 21 nt, Human
ucagcucucugcccuguguac

SEQ ID NO: 3688122 - RNA, 14 nt, Human
ucagcucugaaaga

SEQ ID NO: 3688123 - RNA, 23 nt, Human
ucagcucugcaagaauugaagca

SEQ ID NO: 3688124 - RNA, 11 nt, Human
ucagcucuggg

SEQ ID NO: 3688125 - RNA, 19 nt, Human
ucagcucuucaucugccca

SEQ ID NO: 3688126 - RNA, 20 nt, Human
ucagcucuucaucugcccaa

SEQ ID NO: 3688127 - RNA, 22 nt, Human
ucagcucuucuccauccuacca

SEQ ID NO: 3688128 - RNA, 22 nt, Human
ucagcucuucugacuuaagugu

SEQ ID NO: 3688129 - RNA, 19 nt, Human
ucagcucuuggcuccacug

SEQ ID NO: 3688130 - RNA, 15 nt, Human
ucagcugaaccuggg

SEQ ID NO: 3688131 - RNA, 22 nt, Human
ucagcugaaugccuccuguggg

SEQ ID NO: 3688132 - RNA, 22 nt, Human
ucagcugcaagguacucuggug

SEQ ID NO: 3688133 - RNA, 16 nt, Human
ucagcugcccccgcuc

SEQ ID NO: 3688134 - RNA, 22 nt, Human
ucagcugcucagcaaccuuuca

SEQ ID NO: 3688135 - RNA, 16 nt, Human
ucagcugcugaaacaa

SEQ ID NO: 3688136 - RNA, 17 nt, Human
ucagcugcuuuguuacc

SEQ ID NO: 3688137 - RNA, 23 nt, Human
ucagcuguaagaagagacuggga

SEQ ID NO: 3688138 - RNA, 19 nt, Human
ucagcuguccucccuccac

SEQ ID NO: 3688139 - RNA, 15 nt, Human
ucagcugucuuuugg

SEQ ID NO: 3688140 - RNA, 21 nt, Human
ucagcugugaacauggacucu

SEQ ID NO: 3688141 - RNA, 17 nt, Human
ucagcuuaaaauaaaca

SEQ ID NO: 3688142 - RNA, 18 nt, Human
ucagcuuaaaauaaacag

SEQ ID NO: 3688143 - RNA, 18 nt, Human
ucagcuuaggggcugcug

SEQ ID NO: 3688144 - RNA, 20 nt, Human
ucagcuuaucucuuuuauau

SEQ ID NO: 3688145 - RNA, 23 nt, Human
ucagcuucagaauggcauuguac

SEQ ID NO: 3688146 - RNA, 19 nt, Human
ucagcuuccuacccacacc

SEQ ID NO: 3688147 - RNA, 23 nt, Human
ucagcuuccuacccacaccucug

SEQ ID NO: 3688148 - RNA, 21 nt, Human
ucagcuucguuuauuuucaag

SEQ ID NO: 3688149 - RNA, 16 nt, Human
ucagcuucugcugggc

SEQ ID NO: 3688150 - RNA, 19 nt, Human
ucagcuucugcugggcugg

SEQ ID NO: 3688151 - RNA, 17 nt, Human
ucagcuugcacauuugg

SEQ ID NO: 3688152 - RNA, 15 nt, Human
ucagcuugcugcccu

SEQ ID NO: 3688153 - RNA, 20 nt, Human
ucagcuuguaaauagcucag

SEQ ID NO: 3688154 - RNA, 16 nt, Human
ucagcuuucaaagcau

SEQ ID NO: 3688155 - RNA, 17 nt, Human
ucagcuuucaaagcauu

SEQ ID NO: 3688156 - RNA, 15 nt, Human
ucagcuuugagaagc

SEQ ID NO: 3688157 - RNA, 15 nt, Human
ucagcuuugccuucc

SEQ ID NO: 3688158 - RNA, 16 nt, Human
ucagcuuuugcuucau

SEQ ID NO: 3688159 - RNA, 22 nt, Human
ucaggaaaacugacagaggagg

SEQ ID NO: 3688160 - RNA, 17 nt, Human
ucaggaaaagccucugu

SEQ ID NO: 3688161 - RNA, 19 nt, Human
ucaggaaaagccucugugu

SEQ ID NO: 3688162 - RNA, 14 nt, Human
ucaggaaaaggccu

SEQ ID NO: 3688163 - RNA, 19 nt, Human
ucaggaaaaggccuggggu

SEQ ID NO: 3688164 - RNA, 23 nt, Human
ucaggaaagaauagaaagaaagu

SEQ ID NO: 3688165 - RNA, 15 nt, Human
ucaggaaaggaauca

SEQ ID NO: 3688166 - RNA, 20 nt, Human
ucaggaaauauauaugugug

SEQ ID NO: 3688167 - RNA, 23 nt, Human
ucaggaaaucaaauaugcaaagc

SEQ ID NO: 3688168 - RNA, 14 nt, Human
ucaggaacagaagg

SEQ ID NO: 3688169 - RNA, 16 nt, Human
ucaggaacagaaggau

SEQ ID NO: 3688170 - RNA, 18 nt, Human
ucaggaacguuuagcuga

SEQ ID NO: 3688171 - RNA, 23 nt, Human
ucaggaagaaaucacagaaucau

SEQ ID NO: 3688172 - RNA, 13 nt, Human
ucaggaagaacac

SEQ ID NO: 3688173 - RNA, 16 nt, Human
ucaggaagagaaggag

SEQ ID NO: 3688174 - RNA, 12 nt, Human
ucaggaagcuca

SEQ ID NO: 3688175 - RNA, 18 nt, Human
ucaggaaggaugagcauu

SEQ ID NO: 3688176 - RNA, 18 nt, Human
ucaggaauauuuuccaaa

SEQ ID NO: 3688177 - RNA, 22 nt, Human
ucaggaaucaucaggaacguuu

SEQ ID NO: 3688178 - RNA, 18 nt, Human
ucaggaauucuuggagaa

SEQ ID NO: 3688179 - RNA, 20 nt, Human
ucaggaauugcccauuguuu

SEQ ID NO: 3688180 - RNA, 14 nt, Human
ucaggacagaugcc

SEQ ID NO: 3688181 - RNA, 15 nt, Human
ucaggacagaugcca

SEQ ID NO: 3688182 - RNA, 20 nt, Human
ucaggaccaaagcuuucaug

SEQ ID NO: 3688183 - RNA, 19 nt, Human
ucaggacccucgcuggccc

SEQ ID NO: 3688184 - RNA, 20 nt, Human
ucaggaccuccaagccacug

SEQ ID NO: 3688185 - RNA, 21 nt, Human
ucaggaccugggaccuccccu

SEQ ID NO: 3688186 - RNA, 23 nt, Human
ucaggaccugggaccuccccuga

SEQ ID NO: 3688187 - RNA, 14 nt, Human
ucaggaccuuuuga

SEQ ID NO: 3688188 - RNA, 18 nt, Human
ucaggagcacaggcagcu

SEQ ID NO: 3688189 - RNA, 10 nt, Human
ucaggagcag

SEQ ID NO: 3688190 - RNA, 11 nt, Human
ucaggagcccu

SEQ ID NO: 3688191 - RNA, 23 nt, Human
ucaggagcccugggaggcucugg

SEQ ID NO: 3688192 - RNA, 14 nt, Human
ucaggagccuguga

SEQ ID NO: 3688193 - RNA, 22 nt, Human
ucaggagcuccauacacacgcu

SEQ ID NO: 3688194 - RNA, 19 nt, Human
ucaggaggaauacugaaca

SEQ ID NO: 3688195 - RNA, 17 nt, Human
ucaggaggcaggaccuu

SEQ ID NO: 3688196 - RNA, 13 nt, Human
ucaggaggcugag

SEQ ID NO: 3688197 - RNA, 20 nt, Human
ucaggaggcugaggcagaag

SEQ ID NO: 3688198 - RNA, 14 nt, Human
ucaggaggcuggag

SEQ ID NO: 3688199 - RNA, 13 nt, Human
ucaggagggauug

SEQ ID NO: 3688200 - RNA, 12 nt, Human
ucaggaguuccu

SEQ ID NO: 3688201 - RNA, 16 nt, Human
ucaggauacaugugcc

SEQ ID NO: 3688202 - RNA, 18 nt, Human
ucaggauacucugucaga

SEQ ID NO: 3688203 - RNA, 17 nt, Human
ucaggaucaagaaagug

SEQ ID NO: 3688204 - RNA, 16 nt, Human
ucaggaugaacccagg

SEQ ID NO: 3688205 - RNA, 18 nt, Human
ucaggaugagggaaaaga

SEQ ID NO: 3688206 - RNA, 15 nt, Human
ucaggaugcccaggg

SEQ ID NO: 3688207 - RNA, 16 nt, Human
ucaggaugcccagggc

SEQ ID NO: 3688208 - RNA, 23 nt, Human
ucaggauugcgagagaugugugu

SEQ ID NO: 3688209 - RNA, 20 nt, Human
ucaggauuuaaaaacuggaa

SEQ ID NO: 3688210 - RNA, 21 nt, Human
ucaggauuuaaaaacuggaac

SEQ ID NO: 3688211 - RNA, 17 nt, Human
ucaggcaaggucuggcc

SEQ ID NO: 3688212 - RNA, 18 nt, Human
ucaggcaaggucuggccu

SEQ ID NO: 3688213 - RNA, 14 nt, Human
ucaggcacagguca

SEQ ID NO: 3688214 - RNA, 21 nt, Human
ucaggcacuagccuuuggcuc

SEQ ID NO: 3688215 - RNA, 18 nt, Human
ucaggcaggugggaugga

SEQ ID NO: 3688216 - RNA, 15 nt, Human
ucaggcauaggccug

SEQ ID NO: 3688217 - RNA, 16 nt, Human
ucaggcauaggccugg

SEQ ID NO: 3688218 - RNA, 17 nt, Human
ucaggcauaggccuggg

SEQ ID NO: 3688219 - RNA, 15 nt, Human
ucaggcaugccugug

SEQ ID NO: 3688220 - RNA, 16 nt, Human
ucaggcaugccugugu

SEQ ID NO: 3688221 - RNA, 22 nt, Human
ucaggcauuuucccccuuggcu

SEQ ID NO: 3688222 - RNA, 23 nt, Human
ucaggccaaacucaccugccccu

SEQ ID NO: 3688223 - RNA, 17 nt, Human
ucaggccaccugccccc

SEQ ID NO: 3688224 - RNA, 21 nt, Human
ucaggccaccugcccccuucu

SEQ ID NO: 3688225 - RNA, 14 nt, Human
ucaggccagagcca

SEQ ID NO: 3688226 - RNA, 13 nt, Human
ucaggccagcugc

SEQ ID NO: 3688227 - RNA, 15 nt, Human
ucaggccagcugcuu

SEQ ID NO: 3688228 - RNA, 15 nt, Human
ucaggccaggcccuc

SEQ ID NO: 3688229 - RNA, 16 nt, Human
ucaggccaggcccucu

SEQ ID NO: 3688230 - RNA, 18 nt, Human
ucaggccaggcccucugc

SEQ ID NO: 3688231 - RNA, 20 nt, Human
ucaggccaggcccucugccc

SEQ ID NO: 3688232 - RNA, 16 nt, Human
ucaggccaggugcagu

SEQ ID NO: 3688233 - RNA, 21 nt, Human
ucaggccauauuaucaauguu

SEQ ID NO: 3688234 - RNA, 21 nt, Human
ucaccaguguccccuccacug

SEQ ID NO: 3688235 - RNA, 19 nt, Human
ucaccaugauggggcccua

SEQ ID NO: 3688236 - RNA, 17 nt, Human
ucaccauguaaaacaaa

SEQ ID NO: 3688237 - RNA, 21 nt, Human
ucaccauguaaaacaaaaaac

SEQ ID NO: 3688238 - RNA, 23 nt, Human
ucaccauguaaaacaaaaaacaa

SEQ ID NO: 3688239 - RNA, 21 nt, Human
ucaccauguaagcacucugga

SEQ ID NO: 3688240 - RNA, 13 nt, Human
ucaccauguauuu

SEQ ID NO: 3688241 - RNA, 19 nt, Human
ucaccauguauuuuguaaa

SEQ ID NO: 3688242 - RNA, 17 nt, Human
ucaccauguuagccagg

SEQ ID NO: 3688243 - RNA, 21 nt, Human
ucaccauguuagccaggcugg

SEQ ID NO: 3688244 - RNA, 15 nt, Human
ucaccauguuggcca

SEQ ID NO: 3688245 - RNA, 21 nt, Human
ucaccauguuggccaggcugg

SEQ ID NO: 3688246 - RNA, 22 nt, Human
ucaccauguuggccaggcuggu

SEQ ID NO: 3688247 - RNA, 15 nt, Human
ucaccauuauaauga

SEQ ID NO: 3688248 - RNA, 22 nt, Human
ucaccauuugauuauguagcaa

SEQ ID NO: 3688249 - RNA, 20 nt, Human
ucaccauuuggauccugugu

SEQ ID NO: 3688250 - RNA, 21 nt, Human
ucacccaacaaucccaaggcc

SEQ ID NO: 3688251 - RNA, 13 nt, Human
ucacccaacgcuc

SEQ ID NO: 3688252 - RNA, 19 nt, Human
ucacccaagcaaggccaaa

SEQ ID NO: 3688253 - RNA, 17 nt, Human
ucacccacagaaagaga

SEQ ID NO: 3688254 - RNA, 12 nt, Human
ucacccacaggg

SEQ ID NO: 3688255 - RNA, 14 nt, Human
ucacccacagggcu

SEQ ID NO: 3688256 - RNA, 19 nt, Human
ucacccagacauaaaggaa

SEQ ID NO: 3688257 - RNA, 17 nt, Human
ucacccagcuaaucugu

SEQ ID NO: 3688258 - RNA, 19 nt, Human
ucacccaggcuggacugca

SEQ ID NO: 3688259 - RNA, 13 nt, Human
ucacccaguccug

SEQ ID NO: 3688260 - RNA, 17 nt, Human
ucacccaugaagacagg

SEQ ID NO: 3688261 - RNA, 20 nt, Human
ucacccaugcaagcagagga

SEQ ID NO: 3688262 - RNA, 12 nt, Human
ucacccaugugc

SEQ ID NO: 3688263 - RNA, 22 nt, Human
ucaccccaccccaccccaccuc

SEQ ID NO: 3688264 - RNA, 12 nt, Human
ucaccccagagc

SEQ ID NO: 3688265 - RNA, 14 nt, Human
ucaccccagcccca

SEQ ID NO: 3688266 - RNA, 12 nt, Human
ucaccccagggc

SEQ ID NO: 3688267 - RNA, 15 nt, Human
ucaccccagggccug

SEQ ID NO: 3688268 - RNA, 21 nt, Human
ucaccccaguggccacucagc

SEQ ID NO: 3688269 - RNA, 13 nt, Human
ucacccccaaggg

SEQ ID NO: 3688270 - RNA, 19 nt, Human
ucacccccucccaccccca

SEQ ID NO: 3688271 - RNA, 22 nt, Human
ucacccccuucuccauccacau

SEQ ID NO: 3688272 - RNA, 16 nt, Human
ucaccccggcaggccc

SEQ ID NO: 3688273 - RNA, 19 nt, Human
ucaccccggcaggcccugc

SEQ ID NO: 3688274 - RNA, 20 nt, Human
ucaccccggcaggcccugca

SEQ ID NO: 3688275 - RNA, 22 nt, Human
ucaccccggcaggcccugcagu

SEQ ID NO: 3688276 - RNA, 17 nt, Human
ucaccccggccaccugc

SEQ ID NO: 3688277 - RNA, 18 nt, Human
ucaccccggccaccugcg

SEQ ID NO: 3688278 - RNA, 22 nt, Human
ucaccccggccaccugcggugc

SEQ ID NO: 3688279 - RNA, 17 nt, Human
ucaccccguuacagcuc

SEQ ID NO: 3688280 - RNA, 17 nt, Human
ucaccccuccacccuug

SEQ ID NO: 3688281 - RNA, 13 nt, Human
ucaccccuccagg

SEQ ID NO: 3688282 - RNA, 14 nt, Human
ucaccccuccagga

SEQ ID NO: 3688283 - RNA, 17 nt, Human
ucaccccucccuuucuc

SEQ ID NO: 3688284 - RNA, 20 nt, Human
ucaccccucccuuucucccc

SEQ ID NO: 3688285 - RNA, 22 nt, Human
ucaccccugguucucaucuuuc

SEQ ID NO: 3688286 - RNA, 13 nt, Human
ucaccccuguccu

SEQ ID NO: 3688287 - RNA, 20 nt, Human
ucaccccuguccucacugcu

SEQ ID NO: 3688288 - RNA, 15 nt, Human
ucacccguccagacc

SEQ ID NO: 3688289 - RNA, 19 nt, Human
ucacccuaccaacuuuacu

SEQ ID NO: 3688290 - RNA, 17 nt, Human
ucacccuaccugugccu

SEQ ID NO: 3688291 - RNA, 15 nt, Human
ucacccuagcccucu

SEQ ID NO: 3688292 - RNA, 23 nt, Human
ucacccugauuuaggagaagcca

SEQ ID NO: 3688293 - RNA, 15 nt, Human
ucacccuuugcugug

SEQ ID NO: 3688294 - RNA, 12 nt, Human
ucacccuuuucu

SEQ ID NO: 3688295 - RNA, 20 nt, Human
ucaccgagaguagccgagag

SEQ ID NO: 3688296 - RNA, 19 nt, Human
ucaccgcagucgucgcaca

SEQ ID NO: 3688297 - RNA, 23 nt, Human
ucaccgcagucgucgcacagucu

SEQ ID NO: 3688298 - RNA, 15 nt, Human
ucaccgcccaucagg

SEQ ID NO: 3688299 - RNA, 19 nt, Human
ucaccgcuucccuccugcc

SEQ ID NO: 3688300 - RNA, 14 nt, Human
ucaccggagcuuuc

SEQ ID NO: 3688301 - RNA, 18 nt, Human
ucaccggggugguuuagu

SEQ ID NO: 3688302 - RNA, 21 nt, Human
ucaccguggauucgcuugagu

SEQ ID NO: 3688303 - RNA, 19 nt, Human
ucaccgugggcucccugac

SEQ ID NO: 3688304 - RNA, 19 nt, Human
ucaccuaagucucugugaa

SEQ ID NO: 3688305 - RNA, 14 nt, Human
ucaccuaauguuua

SEQ ID NO: 3688306 - RNA, 17 nt, Human
ucaccuaauuaauuuca

SEQ ID NO: 3688307 - RNA, 14 nt, Human
ucaccuagaaacuu

SEQ ID NO: 3688308 - RNA, 18 nt, Human
ucaccuagagccagacca

SEQ ID NO: 3688309 - RNA, 15 nt, Human
ucaccuaggaagccu

SEQ ID NO: 3688310 - RNA, 20 nt, Human
ucaccuauuuccauucaaca

SEQ ID NO: 3688311 - RNA, 14 nt, Human
ucaccucacucagc

SEQ ID NO: 3688312 - RNA, 15 nt, Human
ucaccucacucagca

SEQ ID NO: 3688313 - RNA, 18 nt, Human
ucaccucacucagcacca

SEQ ID NO: 3688314 - RNA, 23 nt, Human
ucaccucacucagcaccacucaa

SEQ ID NO: 3688315 - RNA, 18 nt, Human
ucaccucagauggcagcu

SEQ ID NO: 3688316 - RNA, 20 nt, Human
ucaccucagauggcagcuuu

SEQ ID NO: 3688317 - RNA, 15 nt, Human
ucaccuccccuccuu

SEQ ID NO: 3688318 - RNA, 17 nt, Human
ucaccuccugcugggca

SEQ ID NO: 3688319 - RNA, 16 nt, Human
ucaccucuaacacgca

SEQ ID NO: 3688320 - RNA, 23 nt, Human
ucaccucuagguccccauacucc

SEQ ID NO: 3688321 - RNA, 15 nt, Human
ucaccucucccuugg

SEQ ID NO: 3688322 - RNA, 13 nt, Human
ucaccucuguaau

SEQ ID NO: 3688323 - RNA, 19 nt, Human
ucaccugaagacucauucu

SEQ ID NO: 3688324 - RNA, 16 nt, Human
ucaccugccccaacuc

SEQ ID NO: 3688325 - RNA, 16 nt, Human
ucaccugcuggccccu

SEQ ID NO: 3688326 - RNA, 21 nt, Human
ucaccugcuggccccucaccu

SEQ ID NO: 3688327 - RNA, 19 nt, Human
ucaccuggaagcauuuguu

SEQ ID NO: 3688328 - RNA, 16 nt, Human
ucaccuggcccugcuu

SEQ ID NO: 3688329 - RNA, 23 nt, Human
ucaccuggcccugcuuccugcuu

SEQ ID NO: 3688330 - RNA, 20 nt, Human
ucaccugggcaccuggggag

SEQ ID NO: 3688331 - RNA, 16 nt, Human
ucaccuggggcugcug

SEQ ID NO: 3688332 - RNA, 14 nt, Human
ucaccuguaaaacu

SEQ ID NO: 3688333 - RNA, 19 nt, Human
ucaccuguaaaccugaguc

SEQ ID NO: 3688334 - RNA, 17 nt, Human
ucaccuguacucuuccg

SEQ ID NO: 3688335 - RNA, 19 nt, Human
ucaccugucuugccuuuuu

SEQ ID NO: 3688336 - RNA, 18 nt, Human
ucaccuguugcuuacaau

SEQ ID NO: 3688337 - RNA, 19 nt, Human
ucaccuguugcuuacaauu

SEQ ID NO: 3688338 - RNA, 19 nt, Human
ucaccuguuuuuaagcugu

SEQ ID NO: 3688339 - RNA, 22 nt, Human
ucaccuguuuuuaagcuguuuc

SEQ ID NO: 3688340 - RNA, 16 nt, Human
ucaccuuagaccacca

SEQ ID NO: 3688341 - RNA, 20 nt, Human
ucaccuuagaccaccaagcc

SEQ ID NO: 3688342 - RNA, 22 nt, Human
ucaccuuagaccaccaagccuu

SEQ ID NO: 3688343 - RNA, 15 nt, Human
ucaccuuaggcaggg

SEQ ID NO: 3688344 - RNA, 18 nt, Human
ucaccuucaccuucaucc

SEQ ID NO: 3688345 - RNA, 22 nt, Human
ucaccuucguuuacuaugccug

SEQ ID NO: 3688346 - RNA, 20 nt, Human
ucaccuucuagucuuggcca

SEQ ID NO: 3688347 - RNA, 19 nt, Human
ucaccuuggcaccagacac

SEQ ID NO: 3688348 - RNA, 17 nt, Human
ucaccuugguuccuggg

SEQ ID NO: 3688349 - RNA, 14 nt, Human
ucaccuuucccauc

SEQ ID NO: 3688350 - RNA, 17 nt, Human
ucaccuuucccuaaaga

SEQ ID NO: 3688351 - RNA, 14 nt, Human
ucaccuuuguguau

SEQ ID NO: 3688352 - RNA, 16 nt, Human
ucaccuuuguguauuu

SEQ ID NO: 3688353 - RNA, 19 nt, Human
ucaccuuuuaaauccuguu

SEQ ID NO: 3688354 - RNA, 15 nt, Human
ucaccuuuucaggaa

SEQ ID NO: 3688355 - RNA, 17 nt, Human
ucaccuuuucaggaaaa

SEQ ID NO: 3688356 - RNA, 14 nt, Human
ucaccuuuucuugc

SEQ ID NO: 3688357 - RNA, 21 nt, Human
ucacgauugucaucaggagaa

SEQ ID NO: 3688358 - RNA, 14 nt, Human
ucacgcaccugggu

SEQ ID NO: 3688359 - RNA, 16 nt, Human
ucacgcaugcaguguu

SEQ ID NO: 3688360 - RNA, 13 nt, Human
ucacgccacugca

SEQ ID NO: 3688361 - RNA, 16 nt, Human
ucacgccacugcacuc

SEQ ID NO: 3688362 - RNA, 17 nt, Human
ucacgccacugcacucc

SEQ ID NO: 3688363 - RNA, 21 nt, Human
ucacgccuaugaucccagcac

SEQ ID NO: 3688364 - RNA, 19 nt, Human
ucacgccuguaaucccagc

SEQ ID NO: 3688365 - RNA, 21 nt, Human
ucacgccuguaaucccagcag

SEQ ID NO: 3688366 - RNA, 19 nt, Human
ucacgccuguaauccuagc

SEQ ID NO: 3688367 - RNA, 13 nt, Human
ucacgccugugca

SEQ ID NO: 3688368 - RNA, 16 nt, Human
ucacgccugugcagug

SEQ ID NO: 3688369 - RNA, 12 nt, Human
ucacgcuccccg

SEQ ID NO: 3688370 - RNA, 16 nt, Human
ucacgcuccuuucuga

SEQ ID NO: 3688371 - RNA, 14 nt, Human
ucacgcuuuccuga

SEQ ID NO: 3688372 - RNA, 15 nt, Human
ucacgcuuuccugaa

SEQ ID NO: 3688373 - RNA, 16 nt, Human
ucacgcuuuccugaau

SEQ ID NO: 3688374 - RNA, 22 nt, Human
ucacgcuuuccugaauccaaac

SEQ ID NO: 3688375 - RNA, 17 nt, Human
ucacggaagagccuugc

SEQ ID NO: 3688376 - RNA, 15 nt, Human
ucacggaaguuuuca

SEQ ID NO: 3688377 - RNA, 19 nt, Human
ucacggccacacagcugcc

SEQ ID NO: 3688378 - RNA, 20 nt, Human
ucacggccacacagcugccg

SEQ ID NO: 3688379 - RNA, 20 nt, Human
ucacggcucacugcagccuc

SEQ ID NO: 3688380 - RNA, 19 nt, Human
ucacggcugcgcacugugu

SEQ ID NO: 3688381 - RNA, 18 nt, Human
ucacgggcaguagcugug

SEQ ID NO: 3688382 - RNA, 19 nt, Human
ucacguaaagcuagaaaug

SEQ ID NO: 3688383 - RNA, 15 nt, Human
uuuaccacccccaca

SEQ ID NO: 3688384 - RNA, 13 nt, Human
uuuaccagaaagc

SEQ ID NO: 3688385 - RNA, 14 nt, Human
uuuaccagcuuuua

SEQ ID NO: 3688386 - RNA, 20 nt, Human
uuuaccaguuaauuacucag

SEQ ID NO: 3688387 - RNA, 16 nt, Human
uuuacccaccuagaac

SEQ ID NO: 3688388 - RNA, 17 nt, Human
uuuacccauauccccuc

SEQ ID NO: 3688389 - RNA, 21 nt, Human
uuuacccauauccccucuccc

SEQ ID NO: 3688390 - RNA, 15 nt, Human
uuuacccuauaucua

SEQ ID NO: 3688391 - RNA, 17 nt, Human
uuuacccuggccccucu

SEQ ID NO: 3688392 - RNA, 20 nt, Human
uuuacccuggccccucuccc

SEQ ID NO: 3688393 - RNA, 19 nt, Human
uuuaccuaccacagugucu

SEQ ID NO: 3688394 - RNA, 19 nt, Human
uuuaccucucugucaugug

SEQ ID NO: 3688395 - RNA, 13 nt, Human
uuuaccugagacc

SEQ ID NO: 3688396 - RNA, 16 nt, Human
uuuaccugagaccagu

SEQ ID NO: 3688397 - RNA, 21 nt, Human
uuuaccuggcuuauuuaauau

SEQ ID NO: 3688398 - RNA, 15 nt, Human
uuuaccugugaaaua

SEQ ID NO: 3688399 - RNA, 14 nt, Human
uuuaccuuuuuuau

SEQ ID NO: 3688400 - RNA, 17 nt, Human
uuuacggacacccccuc

SEQ ID NO: 3688401 - RNA, 15 nt, Human
uuuacuaaaauggac

SEQ ID NO: 3688402 - RNA, 15 nt, Human
uuuacuaagaugaca

SEQ ID NO: 3688403 - RNA, 16 nt, Human
uuuacuaagaugacau

SEQ ID NO: 3688404 - RNA, 21 nt, Human
uuuacuaagaugacauugcua

SEQ ID NO: 3688405 - RNA, 22 nt, Human
uuuacuaagccacaagaaauuu

SEQ ID NO: 3688406 - RNA, 18 nt, Human
uuuacuaauagacaauuu

SEQ ID NO: 3688407 - RNA, 19 nt, Human
uuuacuaauuuucuagauu

SEQ ID NO: 3688408 - RNA, 18 nt, Human
uuuacuagggaucccuca

SEQ ID NO: 3688409 - RNA, 15 nt, Human
uuuacucauugaaau

SEQ ID NO: 3688410 - RNA, 19 nt, Human
uuuacucauugaaauguca

SEQ ID NO: 3688411 - RNA, 21 nt, Human
uuuacuccaguggugaagaaa

SEQ ID NO: 3688412 - RNA, 12 nt, Human
uuuacuccccuu

SEQ ID NO: 3688413 - RNA, 13 nt, Human
uuuacuccccuug

SEQ ID NO: 3688414 - RNA, 18 nt, Human
uuuacuccccuugagcug

SEQ ID NO: 3688415 - RNA, 13 nt, Human
uuuacugaacaau

SEQ ID NO: 3688416 - RNA, 18 nt, Human
uuuacugcauucuucuga

SEQ ID NO: 3688417 - RNA, 12 nt, Human
uuuacugccacu

SEQ ID NO: 3688418 - RNA, 17 nt, Human
uuuacugccugaauaaa

SEQ ID NO: 3688419 - RNA, 23 nt, Human
uuuacugucuauuaauauucagg

SEQ ID NO: 3688420 - RNA, 21 nt, Human
uuuacugucuuaauuaaguaa

SEQ ID NO: 3688421 - RNA, 14 nt, Human
uuuacuguuuguua

SEQ ID NO: 3688422 - RNA, 13 nt, Human
uuuacuucuuaua

SEQ ID NO: 3688423 - RNA, 17 nt, Human
uuuacuucuuauacauu

SEQ ID NO: 3688424 - RNA, 18 nt, Human
uuuacuugccauuacuca

SEQ ID NO: 3688425 - RNA, 18 nt, Human
uuuacuuuaaacuugucu

SEQ ID NO: 3688426 - RNA, 20 nt, Human
uuuacuuuagaagcacagua

SEQ ID NO: 3688427 - RNA, 20 nt, Human
uuuacuuucccuugcuuuuc

SEQ ID NO: 3688428 - RNA, 12 nt, Human
uuuacuuuggcc

SEQ ID NO: 3688429 - RNA, 18 nt, Human
uuuacuuuuaaacaguga

SEQ ID NO: 3688430 - RNA, 16 nt, Human
uuuacuuuuaaauguc

SEQ ID NO: 3688431 - RNA, 15 nt, Human
uuuacuuuuuggaaa

SEQ ID NO: 3688432 - RNA, 20 nt, Human
uuuagaaaaagaacaugcag

SEQ ID NO: 3688433 - RNA, 21 nt, Human
uuuagaaaaagaacaugcagu

SEQ ID NO: 3688434 - RNA, 12 nt, Human
uuuagaaacaca

SEQ ID NO: 3688435 - RNA, 16 nt, Human
uuuagaaacuuaucuu

SEQ ID NO: 3688436 - RNA, 19 nt, Human
uuuagaaacuuaucuuaca

SEQ ID NO: 3688437 - RNA, 23 nt, Human
uuuagaaagaagcccaauauuau

SEQ ID NO: 3688438 - RNA, 15 nt, Human
uuuagaaagauaauu

SEQ ID NO: 3688439 - RNA, 22 nt, Human
uuuagaaagcauuugaaugcau

SEQ ID NO: 3688440 - RNA, 20 nt, Human
uuuagaaauaaaccuuaaua

SEQ ID NO: 3688441 - RNA, 22 nt, Human
uuuagaaauacugcaagaaaau

SEQ ID NO: 3688442 - RNA, 16 nt, Human
uuuagaaaucauuuug

SEQ ID NO: 3688443 - RNA, 18 nt, Human
uuuagaaaucauuuugca

SEQ ID NO: 3688444 - RNA, 17 nt, Human
uuuagaacaauuuucuu

SEQ ID NO: 3688445 - RNA, 17 nt, Human
uuuagaagaaguguguc

SEQ ID NO: 3688446 - RNA, 15 nt, Human
uuuagaagugcauuu

SEQ ID NO: 3688447 - RNA, 18 nt, Human
uuuagaagugucauguuu

SEQ ID NO: 3688448 - RNA, 23 nt, Human
uuuagaauaaauucccaacuucu

SEQ ID NO: 3688449 - RNA, 15 nt, Human
uuuagaauaagaauu

SEQ ID NO: 3688450 - RNA, 19 nt, Human
uuuagaauaagaauuugca

SEQ ID NO: 3688451 - RNA, 21 nt, Human
uuuagaauaagaauuugcaua

SEQ ID NO: 3688452 - RNA, 14 nt, Human
uuuagaaucccagc

SEQ ID NO: 3688453 - RNA, 11 nt, Human
uuuagaauuga

SEQ ID NO: 3688454 - RNA, 16 nt, Human
uuuagacaaauacuca

SEQ ID NO: 3688455 - RNA, 21 nt, Human
uuuagacaaauacucaugugu

SEQ ID NO: 3688456 - RNA, 23 nt, Human
uuuagacaaauacucauguguau

SEQ ID NO: 3688457 - RNA, 16 nt, Human
uuuagacaccuucauu

SEQ ID NO: 3688458 - RNA, 16 nt, Human
uuuagacagucucacu

SEQ ID NO: 3688459 - RNA, 20 nt, Human
uuuagacagucucacuuugu

SEQ ID NO: 3688460 - RNA, 18 nt, Human
uuuagaccaaggaacaaa

SEQ ID NO: 3688461 - RNA, 22 nt, Human
uuuagacccuauugcugcuuga

SEQ ID NO: 3688462 - RNA, 22 nt, Human
uuuagacuugaaaagagacagg

SEQ ID NO: 3688463 - RNA, 15 nt, Human
uuuagagaggaaaag

SEQ ID NO: 3688464 - RNA, 21 nt, Human
uuuagagauaagaguuggcug

SEQ ID NO: 3688465 - RNA, 21 nt, Human
uuuagagaugaauuaaauuua

SEQ ID NO: 3688466 - RNA, 19 nt, Human
uuuagaguaagaaauuuca

SEQ ID NO: 3688467 - RNA, 18 nt, Human
uuuagaguagcaugagag

SEQ ID NO: 3688468 - RNA, 16 nt, Human
uuuagaguuagacugu

SEQ ID NO: 3688469 - RNA, 18 nt, Human
uuuagaguuagacuguug

SEQ ID NO: 3688470 - RNA, 13 nt, Human
uuuagauaauaca

SEQ ID NO: 3688471 - RNA, 19 nt, Human
uuuagauagcagccuggcu

SEQ ID NO: 3688472 - RNA, 13 nt, Human
uuuagauagcccu

SEQ ID NO: 3688473 - RNA, 14 nt, Human
uuuagauagcccug

SEQ ID NO: 3688474 - RNA, 18 nt, Human
uuuagauagcccuguccu

SEQ ID NO: 3688475 - RNA, 20 nt, Human
uuuagauagcccuguccugg

SEQ ID NO: 3688476 - RNA, 22 nt, Human
uuuagauagcccuguccuggug

SEQ ID NO: 3688477 - RNA, 16 nt, Human
uuuagaucaaauacuu

SEQ ID NO: 3688478 - RNA, 17 nt, Human
uuuagaucaaauacuuu

SEQ ID NO: 3688479 - RNA, 18 nt, Human
uuuagaugaaugucaguu

SEQ ID NO: 3688480 - RNA, 14 nt, Human
uuuagaugguuaca

SEQ ID NO: 3688481 - RNA, 17 nt, Human
uuuagaugguuacacug

SEQ ID NO: 3688482 - RNA, 18 nt, Human
uuuagaugguuacacugu

SEQ ID NO: 3688483 - RNA, 22 nt, Human
uuuagauugaaaacuuuucuca

SEQ ID NO: 3688484 - RNA, 18 nt, Human
uuuagauugagaaaugug

SEQ ID NO: 3688485 - RNA, 23 nt, Human
uuuagcaauuuaauauuuugcac

SEQ ID NO: 3688486 - RNA, 13 nt, Human
uuuagcaccccca

SEQ ID NO: 3688487 - RNA, 18 nt, Human
uuuagcacguuuaaaguu

SEQ ID NO: 3688488 - RNA, 19 nt, Human
uuuagcacguuuaaaguuc

SEQ ID NO: 3688489 - RNA, 22 nt, Human
uuuagcacguuuaaaguucugu

SEQ ID NO: 3688490 - RNA, 14 nt, Human
uuuagcaguucugc

SEQ ID NO: 3688491 - RNA, 16 nt, Human
uuuagcauaaaauuuu

SEQ ID NO: 3688492 - RNA, 20 nt, Human
uuuagcauuguagugcuuug

SEQ ID NO: 3688493 - RNA, 18 nt, Human
uuuagccaaacccuuguc

SEQ ID NO: 3688494 - RNA, 16 nt, Human
uuuagcccugaacauu

SEQ ID NO: 3688495 - RNA, 23 nt, Human
uuuagcuacuauauaugugauga

SEQ ID NO: 3688496 - RNA, 21 nt, Human
uuuagcuaggauuugaacacu

SEQ ID NO: 3688497 - RNA, 15 nt, Human
uuuagcugacaaaau

SEQ ID NO: 3688498 - RNA, 23 nt, Human
uuuagcugaugaacuuauucugu

SEQ ID NO: 3688499 - RNA, 13 nt, Human
uuuaggaaaauca

SEQ ID NO: 3688500 - RNA, 10 nt, Human
uuuaggaaau

SEQ ID NO: 3688501 - RNA, 22 nt, Human
uuuaggaaguugacuuauagua

SEQ ID NO: 3688502 - RNA, 18 nt, Human
uuuaggaauccuuuggug

SEQ ID NO: 3688503 - RNA, 21 nt, Human
uuuaggacacauuuagaugca

SEQ ID NO: 3688504 - RNA, 13 nt, Human
uuuaggagcagug

SEQ ID NO: 3688505 - RNA, 20 nt, Human
uuuaggcacucuuaaaugau

SEQ ID NO: 3688506 - RNA, 22 nt, Human
uuuaggcacucuuaaaugaucu

SEQ ID NO: 3688507 - RNA, 16 nt, Human
uuuagggaacaauuug

SEQ ID NO: 3688508 - RNA, 15 nt, Human
uuuagggaguauucu

SEQ ID NO: 3688509 - RNA, 13 nt, Human
uuuagggcagcuu

SEQ ID NO: 3688510 - RNA, 20 nt, Human
uuuagggcuguaaaaugcau

SEQ ID NO: 3688511 - RNA, 22 nt, Human
uuuaggguacuaaauuuaaauu

SEQ ID NO: 3688512 - RNA, 17 nt, Human
uuuagguacuauucuga

SEQ ID NO: 3688513 - RNA, 19 nt, Human
uuuaggucucuuccccucu

SEQ ID NO: 3688514 - RNA, 14 nt, Human
uuuaggucuuugua

SEQ ID NO: 3688515 - RNA, 21 nt, Human
uuuaggugaauuaauuaaaca

SEQ ID NO: 3688516 - RNA, 22 nt, Human
uuuagguguugauuuucuguug

SEQ ID NO: 3688517 - RNA, 11 nt, Human
uuuagguucua

SEQ ID NO: 3688518 - RNA, 12 nt, Human
uuuagguucuaa

SEQ ID NO: 3688519 - RNA, 14 nt, Human
uuuagguucuaaag

SEQ ID NO: 3688520 - RNA, 17 nt, Human
uuuaguaaucuguacau

SEQ ID NO: 3688521 - RNA, 13 nt, Human
uuuaguaauuucu

SEQ ID NO: 3688522 - RNA, 23 nt, Human
uuuaguagauauuaccaguuuuc

SEQ ID NO: 3688523 - RNA, 22 nt, Human
uuuaguagcagugauugucuua

SEQ ID NO: 3688524 - RNA, 21 nt, Human
uuuaguaugacgcugauacau

SEQ ID NO: 3688525 - RNA, 13 nt, Human
uuuaguauucauu

SEQ ID NO: 3688526 - RNA, 15 nt, Human
uuuaguauucauucu

SEQ ID NO: 3688527 - RNA, 14 nt, Human
uuuagucuugucuc

SEQ ID NO: 3688528 - RNA, 13 nt, Human
uuuagugcugcau

SEQ ID NO: 3688529 - RNA, 15 nt, Human
uuuaguggaaaauag

SEQ ID NO: 3688530 - RNA, 16 nt, Human
uuuaguguaaaaauga

SEQ ID NO: 3688531 - RNA, 18 nt, Human
uuuaguguaaaaaugaga

SEQ ID NO: 3688532 - RNA, 17 nt, Human
ucagauguuaaaauaaa

SEQ ID NO: 3688533 - RNA, 20 nt, Human
ucagauguuaaaauaaaugg

SEQ ID NO: 3688534 - RNA, 18 nt, Human
ucagauguugaauucuuu

SEQ ID NO: 3688535 - RNA, 16 nt, Human
ucagauguuuaaaaca

SEQ ID NO: 3688536 - RNA, 14 nt, Human
ucagauucccagag

SEQ ID NO: 3688537 - RNA, 19 nt, Human
ucagauucccagagcaaaa

SEQ ID NO: 3688538 - RNA, 22 nt, Human
ucagauucccagagcaaaauaa

SEQ ID NO: 3688539 - RNA, 22 nt, Human
ucagauugcaugugacucugaa

SEQ ID NO: 3688540 - RNA, 18 nt, Human
ucagauuguggaauguug

SEQ ID NO: 3688541 - RNA, 15 nt, Human
ucagauuuccagucu

SEQ ID NO: 3688542 - RNA, 12 nt, Human
ucagauuugaac

SEQ ID NO: 3688543 - RNA, 15 nt, Human
ucagauuugcacaaa

SEQ ID NO: 3688544 - RNA, 14 nt, Human
ucagauuuuauuau

SEQ ID NO: 3688545 - RNA, 15 nt, Human
ucagauuuuauuaug

SEQ ID NO: 3688546 - RNA, 16 nt, Human
ucagauuuuauuaugu

SEQ ID NO: 3688547 - RNA, 23 nt, Human
ucagauuuuauuauguaaauccc

SEQ ID NO: 3688548 - RNA, 15 nt, Human
ucagcaaacaggauc

SEQ ID NO: 3688549 - RNA, 13 nt, Human
ucagcaaaccauu

SEQ ID NO: 3688550 - RNA, 20 nt, Human
ucagcaaaccauuuuuaaag

SEQ ID NO: 3688551 - RNA, 15 nt, Human
ucagcaaacucuuuu

SEQ ID NO: 3688552 - RNA, 18 nt, Human
ucagcaagauaaacauua

SEQ ID NO: 3688553 - RNA, 16 nt, Human
ucagcaaggccaccuc

SEQ ID NO: 3688554 - RNA, 19 nt, Human
ucagcaaggcgcuaacuug

SEQ ID NO: 3688555 - RNA, 20 nt, Human
ucagcaaggggcucugcccu

SEQ ID NO: 3688556 - RNA, 19 nt, Human
ucagcacaaggccaucugg

SEQ ID NO: 3688557 - RNA, 18 nt, Human
ucagcacauauuuucugu

SEQ ID NO: 3688558 - RNA, 14 nt, Human
ucagcaccacccua

SEQ ID NO: 3688559 - RNA, 15 nt, Human
ucagcaccacucaag

SEQ ID NO: 3688560 - RNA, 20 nt, Human
ucagcaccacucaagaccaa

SEQ ID NO: 3688561 - RNA, 21 nt, Human
ucagcaccacucaagaccaaa

SEQ ID NO: 3688562 - RNA, 14 nt, Human
ucagcacccccuuc

SEQ ID NO: 3688563 - RNA, 17 nt, Human
ucagcaccccugucucu

SEQ ID NO: 3688564 - RNA, 15 nt, Human
ucagcaccccuucca

SEQ ID NO: 3688565 - RNA, 20 nt, Human
ucagcaccuacaguguacag

SEQ ID NO: 3688566 - RNA, 18 nt, Human
ucagcacgauuucuguuu

SEQ ID NO: 3688567 - RNA, 14 nt, Human
ucagcacuagccaa

SEQ ID NO: 3688568 - RNA, 14 nt, Human
ucagcacugaaaau

SEQ ID NO: 3688569 - RNA, 14 nt, Human
ucagcacuuggccc

SEQ ID NO: 3688570 - RNA, 23 nt, Human
ucagcacuugggggaucuguugu

SEQ ID NO: 3688571 - RNA, 21 nt, Human
ucagcacuugucucauuuuaa

SEQ ID NO: 3688572 - RNA, 11 nt, Human
ucagcagagug

SEQ ID NO: 3688573 - RNA, 16 nt, Human
ucagcagagugcuuua

SEQ ID NO: 3688574 - RNA, 18 nt, Human
ucagcagcaaauuuucag

SEQ ID NO: 3688575 - RNA, 17 nt, Human
ucagcagcccuccucac

SEQ ID NO: 3688576 - RNA, 18 nt, Human
ucagcagcccuccucacc

SEQ ID NO: 3688577 - RNA, 21 nt, Human
ucagcagccgccuuaagcuga

SEQ ID NO: 3688578 - RNA, 22 nt, Human
ucagcagccgccuuaagcugau

SEQ ID NO: 3688579 - RNA, 17 nt, Human
ucagcagcuagaaaaca

SEQ ID NO: 3688580 - RNA, 16 nt, Human
ucagcaggcagccuug

SEQ ID NO: 3688581 - RNA, 13 nt, Human
ucagcaguugcug

SEQ ID NO: 3688582 - RNA, 16 nt, Human
ucagcaguugcuggua

SEQ ID NO: 3688583 - RNA, 23 nt, Human
ucagcaguugcugguaaaaugaa

SEQ ID NO: 3688584 - RNA, 22 nt, Human
ucagcauauuuguauaguugcu

SEQ ID NO: 3688585 - RNA, 15 nt, Human
ucagcauccuggcac

SEQ ID NO: 3688586 - RNA, 21 nt, Human
ucagcauccuggcacccggcc

SEQ ID NO: 3688587 - RNA, 23 nt, Human
ucagcaucugaccucuaccuuca

SEQ ID NO: 3688588 - RNA, 14 nt, Human
ucagcaucugugau

SEQ ID NO: 3688589 - RNA, 17 nt, Human
ucagcaucugugauggg

SEQ ID NO: 3688590 - RNA, 18 nt, Human
ucagcaugaaaaugugug

SEQ ID NO: 3688591 - RNA, 18 nt, Human
ucagcaugaauuuguaau

SEQ ID NO: 3688592 - RNA, 15 nt, Human
ucagcaugcaauaca

SEQ ID NO: 3688593 - RNA, 12 nt, Human
ucagcaugucua

SEQ ID NO: 3688594 - RNA, 16 nt, Human
ucagcaugucuauuca

SEQ ID NO: 3688595 - RNA, 20 nt, Human
ucagcauuaccucuuuggaa

SEQ ID NO: 3688596 - RNA, 17 nt, Human
ucagcauuagugggaaa

SEQ ID NO: 3688597 - RNA, 23 nt, Human
ucagcauuagugggaaaaagugg

SEQ ID NO: 3688598 - RNA, 19 nt, Human
ucagcauuuccacaccaag

SEQ ID NO: 3688599 - RNA, 19 nt, Human
ucagcauuucuuuucuggc

SEQ ID NO: 3688600 - RNA, 23 nt, Human
ucagccaagguuuuauaaggcug

SEQ ID NO: 3688601 - RNA, 14 nt, Human
ucagccaaguuuua

SEQ ID NO: 3688602 - RNA, 15 nt, Human
ucagccaaguuuuau

SEQ ID NO: 3688603 - RNA, 17 nt, Human
ucagccacacccaggca

SEQ ID NO: 3688604 - RNA, 21 nt, Human
ucagccagaagccacccaaag

SEQ ID NO: 3688605 - RNA, 14 nt, Human
ucagccagagaagc

SEQ ID NO: 3688606 - RNA, 14 nt, Human
ucagccagcacuug

SEQ ID NO: 3688607 - RNA, 15 nt, Human
ucagccagccccauc

SEQ ID NO: 3688608 - RNA, 12 nt, Human
ucagccagcugc

SEQ ID NO: 3688609 - RNA, 22 nt, Human
ucagccagcugcccuaaauaac

SEQ ID NO: 3688610 - RNA, 12 nt, Human
ucagccaggagc

SEQ ID NO: 3688611 - RNA, 13 nt, Human
ucagccaggagcu

SEQ ID NO: 3688612 - RNA, 13 nt, Human
ucagccagggcca

SEQ ID NO: 3688613 - RNA, 14 nt, Human
ucagccagggccag

SEQ ID NO: 3688614 - RNA, 16 nt, Human
ucagccagggccaggg

SEQ ID NO: 3688615 - RNA, 23 nt, Human
ucagccaugaggaguugcuguuu

SEQ ID NO: 3688616 - RNA, 14 nt, Human
ucagcccacccccc

SEQ ID NO: 3688617 - RNA, 13 nt, Human
ucagcccagaaga

SEQ ID NO: 3688618 - RNA, 15 nt, Human
ucagcccagaagaaa

SEQ ID NO: 3688619 - RNA, 15 nt, Human
ucagccccaccccag

SEQ ID NO: 3688620 - RNA, 20 nt, Human
ucagccccaccccagguccu

SEQ ID NO: 3688621 - RNA, 16 nt, Human
ucagccccagcccagc

SEQ ID NO: 3688622 - RNA, 22 nt, Human
ucagccccagcccagcccagcu

SEQ ID NO: 3688623 - RNA, 13 nt, Human
ucagcccccagcc

SEQ ID NO: 3688624 - RNA, 16 nt, Human
ucagcccccugcuuca

SEQ ID NO: 3688625 - RNA, 16 nt, Human
ucagccccgagcuguc

SEQ ID NO: 3688626 - RNA, 13 nt, Human
ucagccccuagga

SEQ ID NO: 3688627 - RNA, 22 nt, Human
ucagccccuaggaguauauuuc

SEQ ID NO: 3688628 - RNA, 16 nt, Human
ucagccccuccucugc

SEQ ID NO: 3688629 - RNA, 17 nt, Human
ucagccccuccucugcc

SEQ ID NO: 3688630 - RNA, 19 nt, Human
ucagccccuccucugccac

SEQ ID NO: 3688631 - RNA, 21 nt, Human
ucagccccuccucugccaccu

SEQ ID NO: 3688632 - RNA, 21 nt, Human
ucagccccucuugccccccac

SEQ ID NO: 3688633 - RNA, 22 nt, Human
ucagccccucuugccccccacc

SEQ ID NO: 3688634 - RNA, 23 nt, Human
ucagccccucuugccccccaccc

SEQ ID NO: 3688635 - RNA, 23 nt, Human
ucagcccuaggguggagagccac

SEQ ID NO: 3688636 - RNA, 18 nt, Human
ucagcccucacacacccu

SEQ ID NO: 3688637 - RNA, 13 nt, Human
ucagcccucagaa

SEQ ID NO: 3688638 - RNA, 14 nt, Human
ucagcccucccugc

SEQ ID NO: 3688639 - RNA, 16 nt, Human
ucagcccucccugccc

SEQ ID NO: 3688640 - RNA, 17 nt, Human
ucagcccucccugcccc

SEQ ID NO: 3688641 - RNA, 16 nt, Human
ucagcccugacccugu

SEQ ID NO: 3688642 - RNA, 13 nt, Human
ucagcccugaggu

SEQ ID NO: 3688643 - RNA, 15 nt, Human
ucagcccugcaccau

SEQ ID NO: 3688644 - RNA, 19 nt, Human
ucagcccuggaggugccag

SEQ ID NO: 3688645 - RNA, 21 nt, Human
ucagcccuggaggugccagca

SEQ ID NO: 3688646 - RNA, 21 nt, Human
ucagcccugggccccaccacc

SEQ ID NO: 3688647 - RNA, 22 nt, Human
ucagcccugggccccaccaccu

SEQ ID NO: 3688648 - RNA, 23 nt, Human
ucagcccugggccccaccaccua

SEQ ID NO: 3688649 - RNA, 20 nt, Human
ucagccgagccgggccuggg

SEQ ID NO: 3688650 - RNA, 21 nt, Human
ucagccggcguggcaaauaua

SEQ ID NO: 3688651 - RNA, 23 nt, Human
ucagccguguaaccauggaccca

SEQ ID NO: 3688652 - RNA, 13 nt, Human
ucagccuaagaga

SEQ ID NO: 3688653 - RNA, 18 nt, Human
ucagccuagccgaccuca

SEQ ID NO: 3688654 - RNA, 21 nt, Human
ucagccuagccgaccucagcc

SEQ ID NO: 3688655 - RNA, 15 nt, Human
ucagccuccagccuc

SEQ ID NO: 3688656 - RNA, 14 nt, Human
ucagccucccaaag

SEQ ID NO: 3688657 - RNA, 22 nt, Human
ucagccucccaaagugcuggga

SEQ ID NO: 3688658 - RNA, 21 nt, Human
ucagccucccgaauagcuggg

SEQ ID NO: 3688659 - RNA, 17 nt, Human
ucagccucucucccagu

SEQ ID NO: 3688660 - RNA, 21 nt, Human
ucagccucucucccagucuac

SEQ ID NO: 3688661 - RNA, 12 nt, Human
ucagccucuuaa

SEQ ID NO: 3688662 - RNA, 18 nt, Human
ucagccugaggcugagac

SEQ ID NO: 3688663 - RNA, 18 nt, Human
ucagccugcuccagcugu

SEQ ID NO: 3688664 - RNA, 16 nt, Human
ucagccuggccagaca

SEQ ID NO: 3688665 - RNA, 18 nt, Human
ucagccuggccagacaca

SEQ ID NO: 3688666 - RNA, 20 nt, Human
ucagccuggccagacacagg

SEQ ID NO: 3688667 - RNA, 12 nt, Human
ucagccugggca

SEQ ID NO: 3688668 - RNA, 16 nt, Human
ucagccugucucuucc

SEQ ID NO: 3688669 - RNA, 17 nt, Human
ucagccugugcugcccg

SEQ ID NO: 3688670 - RNA, 15 nt, Human
ucagccuuacauuug

SEQ ID NO: 3688671 - RNA, 18 nt, Human
ucagccuuacauuuguga

SEQ ID NO: 3688672 - RNA, 19 nt, Human
ucagccuucuuuuucugga

SEQ ID NO: 3688673 - RNA, 19 nt, Human
ucagcgacuccguuggcca

SEQ ID NO: 3688674 - RNA, 18 nt, Human
ucagcgauguaugcagcu

SEQ ID NO: 3688675 - RNA, 16 nt, Human
ucagcggggacagcuc

SEQ ID NO: 3688676 - RNA, 17 nt, Human
ucagcggggacagcucc

SEQ ID NO: 3688677 - RNA, 18 nt, Human
ucagcggggacagcuccu

SEQ ID NO: 3688678 - RNA, 20 nt, Human
ucagcggggacagcuccuuc

SEQ ID NO: 3688679 - RNA, 21 nt, Human
ucagcggggacagcuccuucu

SEQ ID NO: 3688680 - RNA, 23 nt, Human
ucagcggggacagcuccuucugu

SEQ ID NO: 3688681 - RNA, 16 nt, Human
uuucccucagaaaaug

SEQ ID NO: 3688682 - RNA, 11 nt, Human
uuucccuccuu

SEQ ID NO: 3688683 - RNA, 13 nt, Human
uuucccugaccuc

SEQ ID NO: 3688684 - RNA, 12 nt, Human
uuucccugugcu

SEQ ID NO: 3688685 - RNA, 19 nt, Human
uuucccuucaguacccucu

SEQ ID NO: 3688686 - RNA, 14 nt, Human
uuucccuuccaguu

SEQ ID NO: 3688687 - RNA, 13 nt, Human
uuucccuuccucu

SEQ ID NO: 3688688 - RNA, 19 nt, Human
uuucccuuccuuccucucc

SEQ ID NO: 3688689 - RNA, 16 nt, Human
uuucccuucuugcauc

SEQ ID NO: 3688690 - RNA, 17 nt, Human
uuucccuugcuuccccu

SEQ ID NO: 3688691 - RNA, 20 nt, Human
uuucccuugcuuuucccucu

SEQ ID NO: 3688692 - RNA, 20 nt, Human
uuucccuuguagcuccuccc

SEQ ID NO: 3688693 - RNA, 21 nt, Human
uuucccuuuagcuguguuauu

SEQ ID NO: 3688694 - RNA, 23 nt, Human
uuucccuuugagguugcuuuguu

SEQ ID NO: 3688695 - RNA, 17 nt, Human
uuuccgccacaucccuc

SEQ ID NO: 3688696 - RNA, 22 nt, Human
uuuccguaaaaaugauuucagu

SEQ ID NO: 3688697 - RNA, 16 nt, Human
uuuccguuugcuuuug

SEQ ID NO: 3688698 - RNA, 15 nt, Human
uuuccuaaaagugua

SEQ ID NO: 3688699 - RNA, 13 nt, Human
uuuccuaaaugua

SEQ ID NO: 3688700 - RNA, 13 nt, Human
uuuccuaaauguu

SEQ ID NO: 3688701 - RNA, 23 nt, Human
uuuccuaacaaaagaugaaagca

SEQ ID NO: 3688702 - RNA, 23 nt, Human
uuuccuaauaaaguucuguacuc

SEQ ID NO: 3688703 - RNA, 12 nt, Human
uuuccuaauacu

SEQ ID NO: 3688704 - RNA, 22 nt, Human
uuuccuaaucagaaauuuuuau

SEQ ID NO: 3688705 - RNA, 20 nt, Human
uuuccuacuuuuccuucccu

SEQ ID NO: 3688706 - RNA, 21 nt, Human
uuuccuagcacacacuuuugg

SEQ ID NO: 3688707 - RNA, 17 nt, Human
uuuccuagcccucucac

SEQ ID NO: 3688708 - RNA, 23 nt, Human
uuuccuagcccucucacauuuau

SEQ ID NO: 3688709 - RNA, 14 nt, Human
uuuccuauaccauu

SEQ ID NO: 3688710 - RNA, 21 nt, Human
uuuccucaggcugcuggagga

SEQ ID NO: 3688711 - RNA, 12 nt, Human
uuuccucccuuc

SEQ ID NO: 3688712 - RNA, 13 nt, Human
uuuccucccuucu

SEQ ID NO: 3688713 - RNA, 14 nt, Human
uuuccucccuucug

SEQ ID NO: 3688714 - RNA, 22 nt, Human
uuuccuccugaggcuuuggauu

SEQ ID NO: 3688715 - RNA, 17 nt, Human
uuuccuccuuuaucaca

SEQ ID NO: 3688716 - RNA, 13 nt, Human
uuuccucugcuuu

SEQ ID NO: 3688717 - RNA, 21 nt, Human
uuuccugaaacaacuuggaaa

SEQ ID NO: 3688718 - RNA, 18 nt, Human
uuuccugaaccaugugga

SEQ ID NO: 3688719 - RNA, 20 nt, Human
uuuccugagaccacagagag

SEQ ID NO: 3688720 - RNA, 12 nt, Human
uuuccugcccug

SEQ ID NO: 3688721 - RNA, 13 nt, Human
uuuccugcccugg

SEQ ID NO: 3688722 - RNA, 17 nt, Human
uuuccugcccuuccuca

SEQ ID NO: 3688723 - RNA, 17 nt, Human
uuuccugccuucuucuu

SEQ ID NO: 3688724 - RNA, 12 nt, Human
uuuccugcuuca

SEQ ID NO: 3688725 - RNA, 20 nt, Human
uuuccuggaauugccagcug

SEQ ID NO: 3688726 - RNA, 16 nt, Human
uuuccuggacacucag

SEQ ID NO: 3688727 - RNA, 20 nt, Human
uuuccuggacauccucuucu

SEQ ID NO: 3688728 - RNA, 21 nt, Human
uuuccuggacauccucuucug

SEQ ID NO: 3688729 - RNA, 21 nt, Human
uuuccuggcacuggaccccag

SEQ ID NO: 3688730 - RNA, 22 nt, Human
uuuccuggugccaauuucaagu

SEQ ID NO: 3688731 - RNA, 23 nt, Human
uuuccuguauuuguucccaagag

SEQ ID NO: 3688732 - RNA, 20 nt, Human
uuuccuguccucuuucagcu

SEQ ID NO: 3688733 - RNA, 12 nt, Human
uuuccuguugaa

SEQ ID NO: 3688734 - RNA, 16 nt, Human
uuuccuguuucugaaa

SEQ ID NO: 3688735 - RNA, 20 nt, Human
uuuccuguuucugaaaagaa

SEQ ID NO: 3688736 - RNA, 13 nt, Human
uuuccuuaaucca

SEQ ID NO: 3688737 - RNA, 16 nt, Human
uuuccuuaauccagcu

SEQ ID NO: 3688738 - RNA, 16 nt, Human
uuuccuuacauaaaca

SEQ ID NO: 3688739 - RNA, 18 nt, Human
uuuccuuacauaaacauc

SEQ ID NO: 3688740 - RNA, 19 nt, Human
uuuccuucaagccagcaac

SEQ ID NO: 3688741 - RNA, 11 nt, Human
uuuccuucagu

SEQ ID NO: 3688742 - RNA, 12 nt, Human
uuuccuucagug

SEQ ID NO: 3688743 - RNA, 22 nt, Human
uuuccuucagugccuuauggaa

SEQ ID NO: 3688744 - RNA, 23 nt, Human
uuuccuucauucaacccaccugc

SEQ ID NO: 3688745 - RNA, 16 nt, Human
uuuccuucccucaaag

SEQ ID NO: 3688746 - RNA, 16 nt, Human
uuuccuucuugccuuc

SEQ ID NO: 3688747 - RNA, 20 nt, Human
uuuccuugaggggagccagg

SEQ ID NO: 3688748 - RNA, 19 nt, Human
uuuccuuguccccacacuc

SEQ ID NO: 3688749 - RNA, 21 nt, Human
uuuccuuguccccacacuccu

SEQ ID NO: 3688750 - RNA, 16 nt, Human
uuuccuuguuuaucag

SEQ ID NO: 3688751 - RNA, 21 nt, Human
uuuccuuuaaaaaaauuuaag

SEQ ID NO: 3688752 - RNA, 22 nt, Human
uuuccuuuaaaaaaauuuaagu

SEQ ID NO: 3688753 - RNA, 21 nt, Human
uuuccuuuaacugacaagcca

SEQ ID NO: 3688754 - RNA, 15 nt, Human
uuuccuuuaugugaa

SEQ ID NO: 3688755 - RNA, 19 nt, Human
uuuccuuuaugugaauuuu

SEQ ID NO: 3688756 - RNA, 13 nt, Human
uuuccuuugcucu

SEQ ID NO: 3688757 - RNA, 12 nt, Human
uuuccuuuggag

SEQ ID NO: 3688758 - RNA, 23 nt, Human
uuuccuuugucaucauuguauau

SEQ ID NO: 3688759 - RNA, 16 nt, Human
uuuccuuuuucugauu

SEQ ID NO: 3688760 - RNA, 17 nt, Human
uuuccuuuuugacacug

SEQ ID NO: 3688761 - RNA, 18 nt, Human
uuuccuuuuugacacuga

SEQ ID NO: 3688762 - RNA, 19 nt, Human
uuuccuuuuugacacugaa

SEQ ID NO: 3688763 - RNA, 16 nt, Human
uuuccuuuuuuaaaaa

SEQ ID NO: 3688764 - RNA, 13 nt, Human
uuuccuuuuuuau

SEQ ID NO: 3688765 - RNA, 20 nt, Human
uuuccuuuuuucccauaaga

SEQ ID NO: 3688766 - RNA, 17 nt, Human
uuuccuuuuuuguuauu

SEQ ID NO: 3688767 - RNA, 20 nt, Human
uuucgaagucauuaaacugg

SEQ ID NO: 3688768 - RNA, 15 nt, Human
uuucgacuugcauuu

SEQ ID NO: 3688769 - RNA, 13 nt, Human
uuucgaggccuga

SEQ ID NO: 3688770 - RNA, 18 nt, Human
uuucgcaggauucuuccu

SEQ ID NO: 3688771 - RNA, 17 nt, Human
uuucggauuuuuuccaa

SEQ ID NO: 3688772 - RNA, 20 nt, Human
uuucguccacagcuuccugu

SEQ ID NO: 3688773 - RNA, 18 nt, Human
uuucguuaacauugacca

SEQ ID NO: 3688774 - RNA, 19 nt, Human
uuucguuaacauugaccaa

SEQ ID NO: 3688775 - RNA, 14 nt, Human
uuucguuucuguau

SEQ ID NO: 3688776 - RNA, 14 nt, Human
uuucguuuguuugu

SEQ ID NO: 3688777 - RNA, 20 nt, Human
uuucuaaaaagauuagcaag

SEQ ID NO: 3688778 - RNA, 20 nt, Human
uuucuaaaaagucagauguu

SEQ ID NO: 3688779 - RNA, 12 nt, Human
uuucuaaaacua

SEQ ID NO: 3688780 - RNA, 13 nt, Human
uuucuaaaagcuu

SEQ ID NO: 3688781 - RNA, 15 nt, Human
uuucuaaacagagau

SEQ ID NO: 3688782 - RNA, 20 nt, Human
uuucuaaacuggagacugug

SEQ ID NO: 3688783 - RNA, 18 nt, Human
uuucuaaagccuuaaguc

SEQ ID NO: 3688784 - RNA, 17 nt, Human
uuucuaaagcugccagc

SEQ ID NO: 3688785 - RNA, 21 nt, Human
uuucuaaaggaguuuauguuc

SEQ ID NO: 3688786 - RNA, 19 nt, Human
uuucuaaaggccucuuccu

SEQ ID NO: 3688787 - RNA, 21 nt, Human
uuucuaaaggcuaccuuugua

SEQ ID NO: 3688788 - RNA, 17 nt, Human
uuucuaaaguaaaaaca

SEQ ID NO: 3688789 - RNA, 22 nt, Human
uuucuaaaguaaaaacaaagaa

SEQ ID NO: 3688790 - RNA, 16 nt, Human
uuucuaaaucuccaaa

SEQ ID NO: 3688791 - RNA, 19 nt, Human
uuucuaaaucuccaaaaua

SEQ ID NO: 3688792 - RNA, 20 nt, Human
uuucuaaccaagaggcuggu

SEQ ID NO: 3688793 - RNA, 14 nt, Human
uuucuaaccuugaa

SEQ ID NO: 3688794 - RNA, 17 nt, Human
uuucuaaccuugaaugc

SEQ ID NO: 3688795 - RNA, 19 nt, Human
uuucuaaccuugaaugcug

SEQ ID NO: 3688796 - RNA, 20 nt, Human
uuucuaaccuugaaugcugc

SEQ ID NO: 3688797 - RNA, 18 nt, Human
uuucuaacuacaaagguu

SEQ ID NO: 3688798 - RNA, 20 nt, Human
uuucuaacucugauguaaau

SEQ ID NO: 3688799 - RNA, 21 nt, Human
uuucuaacucugauguaaaug

SEQ ID NO: 3688800 - RNA, 14 nt, Human
uuucuaagaaacau

SEQ ID NO: 3688801 - RNA, 17 nt, Human
uuucuaagaaacauuua

SEQ ID NO: 3688802 - RNA, 14 nt, Human
uuucuaagauucua

SEQ ID NO: 3688803 - RNA, 20 nt, Human
uuucuaagguaacaagauga

SEQ ID NO: 3688804 - RNA, 20 nt, Human
uuucuaauggaaugguuugg

SEQ ID NO: 3688805 - RNA, 13 nt, Human
uuucuaauguggu

SEQ ID NO: 3688806 - RNA, 15 nt, Human
uuucuaauuaaccuu

SEQ ID NO: 3688807 - RNA, 16 nt, Human
uuucuaauugcuuauu

SEQ ID NO: 3688808 - RNA, 16 nt, Human
uuucuaauuugcugcu

SEQ ID NO: 3688809 - RNA, 14 nt, Human
uuucuacagcaaau

SEQ ID NO: 3688810 - RNA, 15 nt, Human
uuucuacauuauugc

SEQ ID NO: 3688811 - RNA, 17 nt, Human
uuucuacauuauugcuu

SEQ ID NO: 3688812 - RNA, 20 nt, Human
uuucuacauuauugcuuauu

SEQ ID NO: 3688813 - RNA, 21 nt, Human
uuucuacccaacggcccugca

SEQ ID NO: 3688814 - RNA, 22 nt, Human
uuucuacccagcgagcccuggu

SEQ ID NO: 3688815 - RNA, 15 nt, Human
uuucuacccuagcca

SEQ ID NO: 3688816 - RNA, 20 nt, Human
uuucuacccuagccauuccu

SEQ ID NO: 3688817 - RNA, 13 nt, Human
uuucuaccuccca

SEQ ID NO: 3688818 - RNA, 13 nt, Human
uuucuacucauuu

SEQ ID NO: 3688819 - RNA, 17 nt, Human
uuucuacucauuuuaau

SEQ ID NO: 3688820 - RNA, 16 nt, Human
uuucuacuuuuaaaga

SEQ ID NO: 3688821 - RNA, 20 nt, Human
uuucuagaacaucccugcca

SEQ ID NO: 3688822 - RNA, 22 nt, Human
uuucuagaacaucccugccagc

SEQ ID NO: 3688823 - RNA, 15 nt, Human
uuucuagacuuucug

SEQ ID NO: 3688824 - RNA, 16 nt, Human
uuucuagacuuucugu

SEQ ID NO: 3688825 - RNA, 16 nt, Human
uuucuagauuaagaua

SEQ ID NO: 3688826 - RNA, 19 nt, Human
uuucuagcuagaaauauga

SEQ ID NO: 3688827 - RNA, 21 nt, Human
uuucuagcuguugagcuguuu

SEQ ID NO: 3688828 - RNA, 17 nt, Human
uuucuaguggucuuugu

SEQ ID NO: 3688829 - RNA, 21 nt, Human
uuucuaguggucuuuguaaga

SEQ ID NO: 3688830 - RNA, 21 nt, Human
ucuagauuacccccucauugu

SEQ ID NO: 3688831 - RNA, 22 nt, Human
ucuagauucaaagguucuaggu

SEQ ID NO: 3688832 - RNA, 19 nt, Human
ucuagauuccauuggucca

SEQ ID NO: 3688833 - RNA, 21 nt, Human
ucuagauuccauugguccaag

SEQ ID NO: 3688834 - RNA, 22 nt, Human
ucuagauuccauugguccaaga

SEQ ID NO: 3688835 - RNA, 23 nt, Human
ucuagauuccauugguccaagau

SEQ ID NO: 3688836 - RNA, 16 nt, Human
ucuagcaaauguuaug

SEQ ID NO: 3688837 - RNA, 22 nt, Human
ucuagcacaauuugcacuaaau

SEQ ID NO: 3688838 - RNA, 14 nt, Human
ucuagcacuuccuu

SEQ ID NO: 3688839 - RNA, 19 nt, Human
ucuagcaugccaacaagaa

SEQ ID NO: 3688840 - RNA, 18 nt, Human
ucuagcauggcauauuuu

SEQ ID NO: 3688841 - RNA, 13 nt, Human
ucuagccagagga

SEQ ID NO: 3688842 - RNA, 11 nt, Human
ucuagccugca

SEQ ID NO: 3688843 - RNA, 20 nt, Human
ucuagccugcacuuugaugu

SEQ ID NO: 3688844 - RNA, 12 nt, Human
ucuagccugggc

SEQ ID NO: 3688845 - RNA, 20 nt, Human
ucuagcuaauggaaaaugau

SEQ ID NO: 3688846 - RNA, 15 nt, Human
ucuagcuaugcugua

SEQ ID NO: 3688847 - RNA, 15 nt, Human
ucuagcucucuaggc

SEQ ID NO: 3688848 - RNA, 16 nt, Human
ucuagcucucuaggcc

SEQ ID NO: 3688849 - RNA, 10 nt, Human
ucuagcugaa

SEQ ID NO: 3688850 - RNA, 21 nt, Human
ucuagcugggggugggccagg

SEQ ID NO: 3688851 - RNA, 16 nt, Human
ucuaggaaaauauuuu

SEQ ID NO: 3688852 - RNA, 23 nt, Human
ucuaggacacaguuccugggaac

SEQ ID NO: 3688853 - RNA, 15 nt, Human
ucuaggaccuguguc

SEQ ID NO: 3688854 - RNA, 13 nt, Human
ucuaggagaggag

SEQ ID NO: 3688855 - RNA, 20 nt, Human
ucuaggagcugggaggaaaa

SEQ ID NO: 3688856 - RNA, 21 nt, Human
ucuaggagcugggaggaaaag

SEQ ID NO: 3688857 - RNA, 15 nt, Human
ucuaggcucugccuu

SEQ ID NO: 3688858 - RNA, 12 nt, Human
ucuaggcugggg

SEQ ID NO: 3688859 - RNA, 12 nt, Human
ucuagggaaaaa

SEQ ID NO: 3688860 - RNA, 19 nt, Human
ucuagggaaggccaccugc

SEQ ID NO: 3688861 - RNA, 20 nt, Human
ucuagggaaggccaccugca

SEQ ID NO: 3688862 - RNA, 15 nt, Human
ucuagggaccccucc

SEQ ID NO: 3688863 - RNA, 17 nt, Human
ucuagggaccccuccuc

SEQ ID NO: 3688864 - RNA, 20 nt, Human
ucuagggaccccuccucccu

SEQ ID NO: 3688865 - RNA, 20 nt, Human
ucuaggguacauggugcugg

SEQ ID NO: 3688866 - RNA, 17 nt, Human
ucuagguaggaaaugug

SEQ ID NO: 3688867 - RNA, 18 nt, Human
ucuaggucaguacccacc

SEQ ID NO: 3688868 - RNA, 21 nt, Human
ucuaggucaguacccaccuga

SEQ ID NO: 3688869 - RNA, 20 nt, Human
ucuagguuuaacucagauca

SEQ ID NO: 3688870 - RNA, 19 nt, Human
ucuagguuucaaagaugcu

SEQ ID NO: 3688871 - RNA, 17 nt, Human
ucuaguaauaaagacuc

SEQ ID NO: 3688872 - RNA, 14 nt, Human
ucuaguaauauauu

SEQ ID NO: 3688873 - RNA, 16 nt, Human
ucuaguacacuuuuau

SEQ ID NO: 3688874 - RNA, 14 nt, Human
ucuaguacugugaa

SEQ ID NO: 3688875 - RNA, 15 nt, Human
ucuaguacugugaau

SEQ ID NO: 3688876 - RNA, 17 nt, Human
ucuaguacuugaaaaag

SEQ ID NO: 3688877 - RNA, 18 nt, Human
ucuaguagcugaaaugca

SEQ ID NO: 3688878 - RNA, 22 nt, Human
ucuaguauuuauggguggauuu

SEQ ID NO: 3688879 - RNA, 16 nt, Human
ucuaguccuauucuau

SEQ ID NO: 3688880 - RNA, 19 nt, Human
ucuaguccuauucuauugc

SEQ ID NO: 3688881 - RNA, 19 nt, Human
ucuagugagcagucaggaa

SEQ ID NO: 3688882 - RNA, 22 nt, Human
ucuagugagcagucaggaaaga

SEQ ID NO: 3688883 - RNA, 17 nt, Human
ucuagugcagcugaaau

SEQ ID NO: 3688884 - RNA, 19 nt, Human
ucuagugcagcugauuuua

SEQ ID NO: 3688885 - RNA, 19 nt, Human
ucuagugggacagcccaga

SEQ ID NO: 3688886 - RNA, 17 nt, Human
ucuaguggucuuuguaa

SEQ ID NO: 3688887 - RNA, 18 nt, Human
ucuaguggucuuuguaag

SEQ ID NO: 3688888 - RNA, 21 nt, Human
ucuaguggucuuuguaagagu

SEQ ID NO: 3688889 - RNA, 17 nt, Human
ucuaguguuugauuguc

SEQ ID NO: 3688890 - RNA, 14 nt, Human
ucuaguucauugaa

SEQ ID NO: 3688891 - RNA, 17 nt, Human
ucuaguuccccuguuua

SEQ ID NO: 3688892 - RNA, 15 nt, Human
ucuaguucugccagg

SEQ ID NO: 3688893 - RNA, 19 nt, Human
ucuaguugaaaauaaagug

SEQ ID NO: 3688894 - RNA, 19 nt, Human
ucuaguuucucuuagaaaa

SEQ ID NO: 3688895 - RNA, 14 nt, Human
ucuaguuucuugug

SEQ ID NO: 3688896 - RNA, 23 nt, Human
ucuaguuugauuaaauucuugca

SEQ ID NO: 3688897 - RNA, 13 nt, Human
ucuaguuugcauu

SEQ ID NO: 3688898 - RNA, 18 nt, Human
ucuaguuuucaguuugua

SEQ ID NO: 3688899 - RNA, 12 nt, Human
ucuauaaaacuc

SEQ ID NO: 3688900 - RNA, 13 nt, Human
ucuauaaaccgaa

SEQ ID NO: 3688901 - RNA, 14 nt, Human
ucuauaaacuauaa

SEQ ID NO: 3688902 - RNA, 20 nt, Human
ucuauaaagcauuuaacccc

SEQ ID NO: 3688903 - RNA, 22 nt, Human
ucuauaaagcgauauacagaug

SEQ ID NO: 3688904 - RNA, 16 nt, Human
ucuauaaauuguccgu

SEQ ID NO: 3688905 - RNA, 20 nt, Human
ucuauaaucccagcacuuug

SEQ ID NO: 3688906 - RNA, 16 nt, Human
ucuauaauuuaccuaa

SEQ ID NO: 3688907 - RNA, 11 nt, Human
ucuauacaaau

SEQ ID NO: 3688908 - RNA, 15 nt, Human
ucuauacauaucuuu

SEQ ID NO: 3688909 - RNA, 18 nt, Human
ucuauacauaucuuuauu

SEQ ID NO: 3688910 - RNA, 14 nt, Human
ucuauaccaauaaa

SEQ ID NO: 3688911 - RNA, 17 nt, Human
ucuauaccaauaaagug

SEQ ID NO: 3688912 - RNA, 16 nt, Human
ucuauagaaaguguuc

SEQ ID NO: 3688913 - RNA, 23 nt, Human
ucuauagaaaguguucuguuaca

SEQ ID NO: 3688914 - RNA, 17 nt, Human
ucuauagcaucacuuaa

SEQ ID NO: 3688915 - RNA, 20 nt, Human
ucuauaggaacauaugaaaa

SEQ ID NO: 3688916 - RNA, 14 nt, Human
ucuauaguucuaga

SEQ ID NO: 3688917 - RNA, 15 nt, Human
ucuauaguucuagac

SEQ ID NO: 3688918 - RNA, 12 nt, Human
ucuauauaaaau

SEQ ID NO: 3688919 - RNA, 14 nt, Human
ucuauauaaaauaa

SEQ ID NO: 3688920 - RNA, 15 nt, Human
ucuauauaaaauaac

SEQ ID NO: 3688921 - RNA, 21 nt, Human
ucuauauaguaccuuugcucu

SEQ ID NO: 3688922 - RNA, 14 nt, Human
ucuauauauaauuc

SEQ ID NO: 3688923 - RNA, 18 nt, Human
ucuauauauaauucugua

SEQ ID NO: 3688924 - RNA, 21 nt, Human
ucuauauauaauucuguacau

SEQ ID NO: 3688925 - RNA, 23 nt, Human
ucuauauauaauucuguacauag

SEQ ID NO: 3688926 - RNA, 12 nt, Human
ucuauaugaauu

SEQ ID NO: 3688927 - RNA, 18 nt, Human
ucuauauguacuugucaa

SEQ ID NO: 3688928 - RNA, 23 nt, Human
ucuauauguacuugucaaagaag

SEQ ID NO: 3688929 - RNA, 13 nt, Human
ucuauauuuuaca

SEQ ID NO: 3688930 - RNA, 13 nt, Human
ucuauauuuucau

SEQ ID NO: 3688931 - RNA, 19 nt, Human
ucuaucaaccccagacacu

SEQ ID NO: 3688932 - RNA, 21 nt, Human
ucuaucaaccccagacacugg

SEQ ID NO: 3688933 - RNA, 23 nt, Human
ucuaucaacuuuaaucaaguugu

SEQ ID NO: 3688934 - RNA, 15 nt, Human
ucuaucaaguauuau

SEQ ID NO: 3688935 - RNA, 22 nt, Human
ucuaucaaguauuauaccuuuu

SEQ ID NO: 3688936 - RNA, 18 nt, Human
ucuaucaagucaaucauu

SEQ ID NO: 3688937 - RNA, 13 nt, Human
ucuaucauuuaau

SEQ ID NO: 3688938 - RNA, 16 nt, Human
ucuaucauuuaauaau

SEQ ID NO: 3688939 - RNA, 22 nt, Human
ucuaucauuuaauaauauacuu

SEQ ID NO: 3688940 - RNA, 16 nt, Human
ucuaucauuuuuguac

SEQ ID NO: 3688941 - RNA, 18 nt, Human
ucuauccaaaucugaaga

SEQ ID NO: 3688942 - RNA, 17 nt, Human
ucuauccacagagaguc

SEQ ID NO: 3688943 - RNA, 12 nt, Human
ucuaucucaucu

SEQ ID NO: 3688944 - RNA, 12 nt, Human
ucuaucucucaa

SEQ ID NO: 3688945 - RNA, 12 nt, Human
ucuaucugggcc

SEQ ID NO: 3688946 - RNA, 17 nt, Human
ucuaucugggccugggc

SEQ ID NO: 3688947 - RNA, 18 nt, Human
ucuaucugggccugggcu

SEQ ID NO: 3688948 - RNA, 20 nt, Human
ucuaucuugcucuguaaucu

SEQ ID NO: 3688949 - RNA, 22 nt, Human
ucuaucuuugagcgcccacuag

SEQ ID NO: 3688950 - RNA, 18 nt, Human
ucuaucuuuuguuuccuu

SEQ ID NO: 3688951 - RNA, 17 nt, Human
ucuaugaaguauauaau

SEQ ID NO: 3688952 - RNA, 15 nt, Human
ucuaugagucuagau

SEQ ID NO: 3688953 - RNA, 22 nt, Human
ucuaugauucguguaauuacuu

SEQ ID NO: 3688954 - RNA, 14 nt, Human
ucuaugcauuuucu

SEQ ID NO: 3688955 - RNA, 21 nt, Human
ucuaugccaaagaucacuugu

SEQ ID NO: 3688956 - RNA, 12 nt, Human
ucuaugcucucg

SEQ ID NO: 3688957 - RNA, 15 nt, Human
ucuaugcugcuuuua

SEQ ID NO: 3688958 - RNA, 13 nt, Human
ucuaugcuuucca

SEQ ID NO: 3688959 - RNA, 12 nt, Human
ucuaugggacuc

SEQ ID NO: 3688960 - RNA, 19 nt, Human
ucuaugggacucaaugcac

SEQ ID NO: 3688961 - RNA, 13 nt, Human
ucuaugguaaaga

SEQ ID NO: 3688962 - RNA, 22 nt, Human
ucuaugguaaagauauuauuca

SEQ ID NO: 3688963 - RNA, 20 nt, Human
ucuaugguuaugaaagaaua

SEQ ID NO: 3688964 - RNA, 20 nt, Human
ucuauguacuaguacugugu

SEQ ID NO: 3688965 - RNA, 14 nt, Human
ucuauguaggaaaa

SEQ ID NO: 3688966 - RNA, 18 nt, Human
ucuauguaggaaaaaaau

SEQ ID NO: 3688967 - RNA, 22 nt, Human
ucuauguuuacaaauggacaua

SEQ ID NO: 3688968 - RNA, 12 nt, Human
ucuauuaaaaga

SEQ ID NO: 3688969 - RNA, 17 nt, Human
ucuauuaaaagacucau

SEQ ID NO: 3688970 - RNA, 22 nt, Human
ucuauuaaagugcuaagguucu

SEQ ID NO: 3688971 - RNA, 22 nt, Human
ucuauuaauauauguauuauuu

SEQ ID NO: 3688972 - RNA, 16 nt, Human
ucuauuaauauucagg

SEQ ID NO: 3688973 - RNA, 19 nt, Human
ucuauuagacuuuagaaau

SEQ ID NO: 3688974 - RNA, 18 nt, Human
ucuauuagcuuacugauu

SEQ ID NO: 3688975 - RNA, 23 nt, Human
ucuauuaugaaugugaagccuuc

SEQ ID NO: 3688976 - RNA, 17 nt, Human
ucuauuauggaaaacug

SEQ ID NO: 3688977 - RNA, 15 nt, Human
ucuauuccaauaaac

SEQ ID NO: 3688978 - RNA, 12 nt, Human
ucuauuccagcu

SEQ ID NO: 3688979 - RNA, 18 nt, Human
ucuauucgccacacagua

SEQ ID NO: 3688980 - RNA, 22 nt, Human
ucguuuaccuucaaacuuuagg

SEQ ID NO: 3688981 - RNA, 21 nt, Human
ucguuucaaaaacacaguguu

SEQ ID NO: 3688982 - RNA, 12 nt, Human
ucguuucuguau

SEQ ID NO: 3688983 - RNA, 15 nt, Human
ucguuuguguucugu

SEQ ID NO: 3688984 - RNA, 10 nt, Human
ucguuuguuu

SEQ ID NO: 3688985 - RNA, 20 nt, Human
ucguuuguuuguuuguuuaa

SEQ ID NO: 3688986 - RNA, 22 nt, Human
ucguuuucaaaauuguuacaaa

SEQ ID NO: 3688987 - RNA, 18 nt, Human
ucguuuuuauauuaaugu

SEQ ID NO: 3688988 - RNA, 14 nt, Human
ucguuuuuuacaaa

SEQ ID NO: 3688989 - RNA, 20 nt, Human
ucguuuuuuuuuuguuuguu

SEQ ID NO: 3688990 - RNA, 18 nt, Human
ucuaaaaagauuagcaag

SEQ ID NO: 3688991 - RNA, 19 nt, Human
ucuaaaaauauacauguuu

SEQ ID NO: 3688992 - RNA, 15 nt, Human
ucuaaaacaauaaaa

SEQ ID NO: 3688993 - RNA, 11 nt, Human
ucuaaaagaaa

SEQ ID NO: 3688994 - RNA, 17 nt, Human
ucuaaaagauccuuuuu

SEQ ID NO: 3688995 - RNA, 12 nt, Human
ucuaaaagcacc

SEQ ID NO: 3688996 - RNA, 14 nt, Human
ucuaaaaucaugaa

SEQ ID NO: 3688997 - RNA, 19 nt, Human
ucuaaaaucuuauaguucu

SEQ ID NO: 3688998 - RNA, 19 nt, Human
ucuaaaaugugauguucua

SEQ ID NO: 3688999 - RNA, 18 nt, Human
ucuaaaauuauaaaugac

SEQ ID NO: 3689000 - RNA, 19 nt, Human
ucuaaacaagauuuuaaag

SEQ ID NO: 3689001 - RNA, 13 nt, Human
ucuaaacauuaau

SEQ ID NO: 3689002 - RNA, 17 nt, Human
ucuaaacauuaaucaau

SEQ ID NO: 3689003 - RNA, 19 nt, Human
ucuaaacguaagcacuguu

SEQ ID NO: 3689004 - RNA, 18 nt, Human
uccuaccugcccuggaac

SEQ ID NO: 3689005 - RNA, 18 nt, Human
uccuacucccagacaccc

SEQ ID NO: 3689006 - RNA, 16 nt, Human
uccuacucggcucugc

SEQ ID NO: 3689007 - RNA, 22 nt, Human
uccuacucucacacugguucuc

SEQ ID NO: 3689008 - RNA, 14 nt, Human
uccuacucuguguc

SEQ ID NO: 3689009 - RNA, 23 nt, Human
uccuacucuucucucugcucuga

SEQ ID NO: 3689010 - RNA, 17 nt, Human
ucgcuucccccauagcc

SEQ ID NO: 3689011 - RNA, 19 nt, Human
ucgcuucccugaaagacug

SEQ ID NO: 3689012 - RNA, 14 nt, Human
ucgcuucucuguga

SEQ ID NO: 3689013 - RNA, 15 nt, Human
ucgcuucuugccucu

SEQ ID NO: 3689014 - RNA, 21 nt, Human
ucgcuucuugccucugugcug

SEQ ID NO: 3689015 - RNA, 21 nt, Human
ucgcuugugcagaaaacauug

SEQ ID NO: 3689016 - RNA, 23 nt, Human
ucgcuugugcagaaaacauuguu

SEQ ID NO: 3689017 - RNA, 19 nt, Human
ucgcuuuauuggcugagau

SEQ ID NO: 3689018 - RNA, 15 nt, Human
ucggaaaacaugcua

SEQ ID NO: 3689019 - RNA, 19 nt, Human
ucggaacccaagcuuagaa

SEQ ID NO: 3689020 - RNA, 20 nt, Human
ucggaacccaagcuuagaac

SEQ ID NO: 3689021 - RNA, 16 nt, Human
ucggaaccgcucaccu

SEQ ID NO: 3689022 - RNA, 19 nt, Human
ucggaaccgcucaccuaga

SEQ ID NO: 3689023 - RNA, 22 nt, Human
ucggaaccgcucaccuagagcc

SEQ ID NO: 3689024 - RNA, 13 nt, Human
ucggaagcagugc

SEQ ID NO: 3689025 - RNA, 15 nt, Human
ucggaagcagugccu

SEQ ID NO: 3689026 - RNA, 22 nt, Human
ucggaagcagugccuuccauaa

SEQ ID NO: 3689027 - RNA, 23 nt, Human
ucggaagcagugccuuccauaau

SEQ ID NO: 3689028 - RNA, 19 nt, Human
ucggaaggcuggcugggca

SEQ ID NO: 3689029 - RNA, 14 nt, Human
ucggagaagagcug

SEQ ID NO: 3689030 - RNA, 15 nt, Human
ucggagacagugauc

SEQ ID NO: 3689031 - RNA, 21 nt, Human
ucggagcaucccggaggaaau

SEQ ID NO: 3689032 - RNA, 23 nt, Human
ucggagcaucccggaggaaaucu

SEQ ID NO: 3689033 - RNA, 15 nt, Human
ucggagcccugucuc

SEQ ID NO: 3689034 - RNA, 12 nt, Human
ucggaggaagcc

SEQ ID NO: 3689035 - RNA, 17 nt, Human
ucggaguaucugggaac

SEQ ID NO: 3689036 - RNA, 13 nt, Human
ucggaguucuucu

SEQ ID NO: 3689037 - RNA, 18 nt, Human
ucggauaguugcuauuuu

SEQ ID NO: 3689038 - RNA, 20 nt, Human
ucggaucuggggcucuggga

SEQ ID NO: 3689039 - RNA, 10 nt, Human
ucggauuaga

SEQ ID NO: 3689040 - RNA, 16 nt, Human
ucggauuuggggugga

SEQ ID NO: 3689041 - RNA, 16 nt, Human
ucggcauuucaaaugu

SEQ ID NO: 3689042 - RNA, 23 nt, Human
ucggcccacagcucccaccccac

SEQ ID NO: 3689043 - RNA, 19 nt, Human
ucggccccaccagugccuc

SEQ ID NO: 3689044 - RNA, 22 nt, Human
ucggccuagggcccccacaguu

SEQ ID NO: 3689045 - RNA, 16 nt, Human
ucggccuccauccuga

SEQ ID NO: 3689046 - RNA, 17 nt, Human
ucggccuccauccugag

SEQ ID NO: 3689047 - RNA, 21 nt, Human
ucggccucuaaccccaggccc

SEQ ID NO: 3689048 - RNA, 16 nt, Human
ucggccugcccccacc

SEQ ID NO: 3689049 - RNA, 18 nt, Human
ucggcguggcccaaggcu

SEQ ID NO: 3689050 - RNA, 18 nt, Human
ucggcucacugcauccuc

SEQ ID NO: 3689051 - RNA, 22 nt, Human
ucggcuccaguccccagaacuc

SEQ ID NO: 3689052 - RNA, 14 nt, Human
ucggcucccuggag

SEQ ID NO: 3689053 - RNA, 16 nt, Human
ucggcuccugcugcac

SEQ ID NO: 3689054 - RNA, 17 nt, Human
ucggcuccugcugcacc

SEQ ID NO: 3689055 - RNA, 21 nt, Human
ucggcucugcaguccuacuca

SEQ ID NO: 3689056 - RNA, 14 nt, Human
ucggcucugggugg

SEQ ID NO: 3689057 - RNA, 13 nt, Human
ucggcuggcuccc

SEQ ID NO: 3689058 - RNA, 19 nt, Human
ucggcuggcuccccugcag

SEQ ID NO: 3689059 - RNA, 17 nt, Human
ucggcuuuucucagcug

SEQ ID NO: 3689060 - RNA, 12 nt, Human
ucgggaagagag

SEQ ID NO: 3689061 - RNA, 23 nt, Human
ucgggaagagaggaguucaauga

SEQ ID NO: 3689062 - RNA, 20 nt, Human
ucgggacaccugcccugccc

SEQ ID NO: 3689063 - RNA, 16 nt, Human
ucgggagcagugucuu

SEQ ID NO: 3689064 - RNA, 19 nt, Human
ucgggaggucgaggcagga

SEQ ID NO: 3689065 - RNA, 15 nt, Human
ucgggcaccagccag

SEQ ID NO: 3689066 - RNA, 16 nt, Human
ucgggcaccagccagc

SEQ ID NO: 3689067 - RNA, 21 nt, Human
ucgggcagcacaaguguaaug

SEQ ID NO: 3689068 - RNA, 19 nt, Human
ucgggcaggggcuggaggg

SEQ ID NO: 3689069 - RNA, 13 nt, Human
ucgggccccaccu

SEQ ID NO: 3689070 - RNA, 15 nt, Human
ucgggccccaccugc

SEQ ID NO: 3689071 - RNA, 13 nt, Human
ucgggcccuuccc

SEQ ID NO: 3689072 - RNA, 17 nt, Human
ucgggcucagcucuggc

SEQ ID NO: 3689073 - RNA, 14 nt, Human
ucgggcuccugugc

SEQ ID NO: 3689074 - RNA, 12 nt, Human
ucgggcugugcc

SEQ ID NO: 3689075 - RNA, 15 nt, Human
ucgggcugugcccgg

SEQ ID NO: 3689076 - RNA, 15 nt, Human
ucggggaacuccugg

SEQ ID NO: 3689077 - RNA, 16 nt, Human
ucggggaacuccugga

SEQ ID NO: 3689078 - RNA, 19 nt, Human
ucggggagaggcugaggac

SEQ ID NO: 3689079 - RNA, 20 nt, Human
ucggggagccgggagccuga

SEQ ID NO: 3689080 - RNA, 16 nt, Human
ucggggugcacaggag

SEQ ID NO: 3689081 - RNA, 19 nt, Human
ucggggugcacaggagggg

SEQ ID NO: 3689082 - RNA, 22 nt, Human
ucggguuuuauuguuuaaaauc

SEQ ID NO: 3689083 - RNA, 21 nt, Human
ucgguaaguugaauggccugc

SEQ ID NO: 3689084 - RNA, 15 nt, Human
ucgguacccaccaca

SEQ ID NO: 3689085 - RNA, 16 nt, Human
ucgguagguucagcca

SEQ ID NO: 3689086 - RNA, 20 nt, Human
ucgguauccccccaucuugc

SEQ ID NO: 3689087 - RNA, 13 nt, Human
ucgguccuggugc

SEQ ID NO: 3689088 - RNA, 14 nt, Human
ucggucugugcccc

SEQ ID NO: 3689089 - RNA, 17 nt, Human
ucggugccaucagugcc

SEQ ID NO: 3689090 - RNA, 15 nt, Human
ucgguuccacguccc

SEQ ID NO: 3689091 - RNA, 20 nt, Human
ucguaaccagccagauccuc

SEQ ID NO: 3689092 - RNA, 15 nt, Human
ucguacauaauacug

SEQ ID NO: 3689093 - RNA, 22 nt, Human
ucguagcuuucccaaauaaacu

SEQ ID NO: 3689094 - RNA, 21 nt, Human
ucguauaacacaauaugaaua

SEQ ID NO: 3689095 - RNA, 16 nt, Human
ucguauagaagucuuc

SEQ ID NO: 3689096 - RNA, 17 nt, Human
ucguauagaagucuuca

SEQ ID NO: 3689097 - RNA, 18 nt, Human
ucgucacuaauacacagu

SEQ ID NO: 3689098 - RNA, 23 nt, Human
ucgucacugcuuaacuucacaua

SEQ ID NO: 3689099 - RNA, 12 nt, Human
ucguccagggag

SEQ ID NO: 3689100 - RNA, 17 nt, Human
ucguccucccccugcca

SEQ ID NO: 3689101 - RNA, 18 nt, Human
ucguccucccccugccag

SEQ ID NO: 3689102 - RNA, 15 nt, Human
ucguccuuacuccug

SEQ ID NO: 3689103 - RNA, 14 nt, Human
ucgucgcacagucu

SEQ ID NO: 3689104 - RNA, 19 nt, Human
ucgucggggggacagcucc

SEQ ID NO: 3689105 - RNA, 21 nt, Human
ucgucuccagccccuucucag

SEQ ID NO: 3689106 - RNA, 15 nt, Human
ucgucuuccgucucc

SEQ ID NO: 3689107 - RNA, 15 nt, Human
ucgucuucuuggcca

SEQ ID NO: 3689108 - RNA, 16 nt, Human
ucgugaaaacacauuu

SEQ ID NO: 3689109 - RNA, 14 nt, Human
ucgugaacaucccc

SEQ ID NO: 3689110 - RNA, 19 nt, Human
ucgugaacauccccuccca

SEQ ID NO: 3689111 - RNA, 15 nt, Human
ucgugaagaagccug

SEQ ID NO: 3689112 - RNA, 21 nt, Human
ucgugaccugcuaggccagag

SEQ ID NO: 3689113 - RNA, 17 nt, Human
ucgugacgcugaauaaa

SEQ ID NO: 3689114 - RNA, 19 nt, Human
ucgugagucauuuaaaugu

SEQ ID NO: 3689115 - RNA, 22 nt, Human
ucgugcauuggaagaccccacc

SEQ ID NO: 3689116 - RNA, 22 nt, Human
ucgugccaccccgagggcugag

SEQ ID NO: 3689117 - RNA, 13 nt, Human
ucgugccuguguc

SEQ ID NO: 3689118 - RNA, 15 nt, Human
ucgugccugugucca

SEQ ID NO: 3689119 - RNA, 18 nt, Human
ucgugcuaaauuuucagu

SEQ ID NO: 3689120 - RNA, 16 nt, Human
ucgugcuacugcacuc

SEQ ID NO: 3689121 - RNA, 14 nt, Human
ucgugcuuuaagug

SEQ ID NO: 3689122 - RNA, 24 nt, Human
ucguggaaagggugcugcuucccu

SEQ ID NO: 3689123 - RNA, 21 nt, Human
ucguggaacaguuaccucugc

SEQ ID NO: 3689124 - RNA, 17 nt, Human
ucguggacacacacaga

SEQ ID NO: 3689125 - RNA, 12 nt, Human
ucguggacaccu

SEQ ID NO: 3689126 - RNA, 13 nt, Human
ucguggacaccug

SEQ ID NO: 3689127 - RNA, 14 nt, Human
ucguggacaccugc

SEQ ID NO: 3689128 - RNA, 15 nt, Human
ucguggacaccugcc

SEQ ID NO: 3689129 - RNA, 16 nt, Human
ucguggacaccugccc

SEQ ID NO: 3689130 - RNA, 17 nt, Human
ucguggacaccugcccu

SEQ ID NO: 3689131 - RNA, 18 nt, Human
ucguggacaccugcccug

SEQ ID NO: 3689132 - RNA, 21 nt, Human
ucguggagacagggcauuuga

SEQ ID NO: 3689133 - RNA, 18 nt, Human
ucguggagagcuaggagc

SEQ ID NO: 3689134 - RNA, 16 nt, Human
ucguggagaugucuuc

SEQ ID NO: 3689135 - RNA, 20 nt, Human
ucguggcagauaaucagccu

SEQ ID NO: 3689136 - RNA, 21 nt, Human
ucguggcagauaaucagccuc

SEQ ID NO: 3689137 - RNA, 23 nt, Human
ucguggcagauaaucagccucuu

SEQ ID NO: 3689138 - RNA, 14 nt, Human
ucguggccagcccg

SEQ ID NO: 3689139 - RNA, 15 nt, Human
ucguggccagcccgg

SEQ ID NO: 3689140 - RNA, 22 nt, Human
ucgugggacagucaccucaugg

SEQ ID NO: 3689141 - RNA, 22 nt, Human
ucguggguguguguagccaagg

SEQ ID NO: 3689142 - RNA, 14 nt, Human
ucgugguaggacug

SEQ ID NO: 3689143 - RNA, 15 nt, Human
ucgugguaggacugu

SEQ ID NO: 3689144 - RNA, 20 nt, Human
ucgugguaggacuguagaaa

SEQ ID NO: 3689145 - RNA, 22 nt, Human
ucgugguccccaacagcgacau

SEQ ID NO: 3689146 - RNA, 22 nt, Human
ucguggugaucaauuaaaugua

SEQ ID NO: 3689147 - RNA, 20 nt, Human
ucguguaauuacuuaucccu

SEQ ID NO: 3689148 - RNA, 15 nt, Human
ucguguauccugggg

SEQ ID NO: 3689149 - RNA, 17 nt, Human
ucgugugcaacagacaa

SEQ ID NO: 3689150 - RNA, 12 nt, Human
ucguuaacauug

SEQ ID NO: 3689151 - RNA, 14 nt, Human
ucguuaacauugac

SEQ ID NO: 3689152 - RNA, 15 nt, Human
ucguuaacuguguau

SEQ ID NO: 3689153 - RNA, 18 nt, Human
ucguuaggauacugccuc

SEQ ID NO: 3689154 - RNA, 14 nt, Human
ucguuaucuaauag

SEQ ID NO: 3689155 - RNA, 21 nt, Human
ucguucuguacuguuacuggg

SEQ ID NO: 3689156 - RNA, 21 nt, Human
ucguucuguuuacaucaguuu

SEQ ID NO: 3689157 - RNA, 15 nt, Human
ucguucuuguucugu

SEQ ID NO: 3689158 - RNA, 18 nt, Human
ucguuuaaugaaugcuua

SEQ ID NO: 3689159 - RNA, 20 nt, Human
ucguuuaaugaaugcuuaaa

SEQ ID NO: 3689160 - RNA, 16 nt, Human
uccuacuggucucucu

SEQ ID NO: 3689161 - RNA, 14 nt, Human
uccuacuuccccuu

SEQ ID NO: 3689162 - RNA, 18 nt, Human
uccuacuuuacauaugcu

SEQ ID NO: 3689163 - RNA, 17 nt, Human
uccuacuuuuccuuccc

SEQ ID NO: 3689164 - RNA, 21 nt, Human
uccuagaaauuccccacccug

SEQ ID NO: 3689165 - RNA, 22 nt, Human
uccuagaaauuccccacccuga

SEQ ID NO: 3689166 - RNA, 20 nt, Human
uccuagaaguuacugaaugc

SEQ ID NO: 3689167 - RNA, 21 nt, Human
uccuagaaguuacugaaugca

SEQ ID NO: 3689168 - RNA, 18 nt, Human
uccuagaauguuucauuu

SEQ ID NO: 3689169 - RNA, 22 nt, Human
uccuagagaaaacuugaauuca

SEQ ID NO: 3689170 - RNA, 19 nt, Human
uccuagagacagaagcagg

SEQ ID NO: 3689171 - RNA, 14 nt, Human
uccuagaggaccug

SEQ ID NO: 3689172 - RNA, 20 nt, Human
uccuagagggaggggccuag

SEQ ID NO: 3689173 - RNA, 12 nt, Human
uccuagcacaga

SEQ ID NO: 3689174 - RNA, 15 nt, Human
uccuagcagagagac

SEQ ID NO: 3689175 - RNA, 20 nt, Human
uccuagccacccaccacacu

SEQ ID NO: 3689176 - RNA, 17 nt, Human
uccuagccacucaggag

SEQ ID NO: 3689177 - RNA, 20 nt, Human
uccuagccuuauccucugau

SEQ ID NO: 3689178 - RNA, 14 nt, Human
uccuagcugcacag

SEQ ID NO: 3689179 - RNA, 21 nt, Human
uccuagcuggagaggagcccu

SEQ ID NO: 3689180 - RNA, 15 nt, Human
uccuagcugugugca

SEQ ID NO: 3689181 - RNA, 18 nt, Human
uccuaggagguaaugacc

SEQ ID NO: 3689182 - RNA, 19 nt, Human
uccuaggcauucuggaccu

SEQ ID NO: 3689183 - RNA, 13 nt, Human
uccuaggcauuug

SEQ ID NO: 3689184 - RNA, 23 nt, Human
uccuaggccucaacuccucccau

SEQ ID NO: 3689185 - RNA, 20 nt, Human
uccuagggaaaaguucauag

SEQ ID NO: 3689186 - RNA, 17 nt, Human
uccuagggccuggguuu

SEQ ID NO: 3689187 - RNA, 19 nt, Human
uccuaguaagcaucuacuu

SEQ ID NO: 3689188 - RNA, 17 nt, Human
uccuagucauucuuccc

SEQ ID NO: 3689189 - RNA, 23 nt, Human
uccuagugaaagaggcagcuuga

SEQ ID NO: 3689190 - RNA, 22 nt, Human
uccuagugcuuuccuuuuuuaa

SEQ ID NO: 3689191 - RNA, 19 nt, Human
uccuaguucaucccuucuc

SEQ ID NO: 3689192 - RNA, 20 nt, Human
uccuaguucaucccuucucu

SEQ ID NO: 3689193 - RNA, 21 nt, Human
uccuaguuccaccaucaagcc

SEQ ID NO: 3689194 - RNA, 13 nt, Human
uccuaguucuaga

SEQ ID NO: 3689195 - RNA, 22 nt, Human
uccuaguucuagaaaaacaggc

SEQ ID NO: 3689196 - RNA, 17 nt, Human
uccuaguucuguagaaa

SEQ ID NO: 3689197 - RNA, 19 nt, Human
uccuaguucuguagaaaug

SEQ ID NO: 3689198 - RNA, 14 nt, Human
uccuaguuggugag

SEQ ID NO: 3689199 - RNA, 15 nt, Human
uccuaguuugaccuc

SEQ ID NO: 3689200 - RNA, 23 nt, Human
uccuaguuugaccucacagugac

SEQ ID NO: 3689201 - RNA, 20 nt, Human
uccuaguuuucuccucccag

SEQ ID NO: 3689202 - RNA, 15 nt, Human
uccuauaaucuguca

SEQ ID NO: 3689203 - RNA, 20 nt, Human
uccuauaauucccuaucuuu

SEQ ID NO: 3689204 - RNA, 23 nt, Human
uccuauaauuuugauagugggac

SEQ ID NO: 3689205 - RNA, 20 nt, Human
uccuauaccauuuccguaau

SEQ ID NO: 3689206 - RNA, 18 nt, Human
uccuauauaguuuauuga

SEQ ID NO: 3689207 - RNA, 16 nt, Human
uccuauauauuucuau

SEQ ID NO: 3689208 - RNA, 18 nt, Human
uccuauauuguuuucagu

SEQ ID NO: 3689209 - RNA, 23 nt, Human
uccuauauuguuuucaguguaca

SEQ ID NO: 3689210 - RNA, 20 nt, Human
uccuaucaagccaguacgug

SEQ ID NO: 3689211 - RNA, 12 nt, Human
uccuaucccauc

SEQ ID NO: 3689212 - RNA, 17 nt, Human
uccuaucuaucuuccaa

SEQ ID NO: 3689213 - RNA, 19 nt, Human
uccuaucuccagcggcccu

SEQ ID NO: 3689214 - RNA, 20 nt, Human
uccuaucugggcuuccugga

SEQ ID NO: 3689215 - RNA, 13 nt, Human
uccuaucuguguu

SEQ ID NO: 3689216 - RNA, 12 nt, Human
uccuaugaugua

SEQ ID NO: 3689217 - RNA, 12 nt, Human
uccuaugcaaua

SEQ ID NO: 3689218 - RNA, 13 nt, Human
uccuaugcaauaa

SEQ ID NO: 3689219 - RNA, 16 nt, Human
uccuaugcaauaaaau

SEQ ID NO: 3689220 - RNA, 22 nt, Human
uccuaugcaugguuucagcacu

SEQ ID NO: 3689221 - RNA, 13 nt, Human
uccuaugcuuuga

SEQ ID NO: 3689222 - RNA, 20 nt, Human
uccuaugcuuugaaacagaa

SEQ ID NO: 3689223 - RNA, 20 nt, Human
uccuauggcuggccacugca

SEQ ID NO: 3689224 - RNA, 21 nt, Human
uccuaugugauuuuaacucug

SEQ ID NO: 3689225 - RNA, 13 nt, Human
uccuauuaguguu

SEQ ID NO: 3689226 - RNA, 17 nt, Human
uccuauucaaauuccua

SEQ ID NO: 3689227 - RNA, 18 nt, Human
uccuauucuauaaaacuc

SEQ ID NO: 3689228 - RNA, 17 nt, Human
uccuauucucaccagga

SEQ ID NO: 3689229 - RNA, 16 nt, Human
uccuauucucgggcug

SEQ ID NO: 3689230 - RNA, 14 nt, Human
uccuauugcaaagg

SEQ ID NO: 3689231 - RNA, 15 nt, Human
uccuauuuagacaug

SEQ ID NO: 3689232 - RNA, 13 nt, Human
uccuauuucagaa

SEQ ID NO: 3689233 - RNA, 18 nt, Human
uccuauuucuagggcugg

SEQ ID NO: 3689234 - RNA, 14 nt, Human
uccuauuuguuuuc

SEQ ID NO: 3689235 - RNA, 17 nt, Human
uccucaaaaugggagau

SEQ ID NO: 3689236 - RNA, 18 nt, Human
uccucaaagaaaguguau

SEQ ID NO: 3689237 - RNA, 19 nt, Human
uccucaaauuuuuugacuu

SEQ ID NO: 3689238 - RNA, 15 nt, Human
uccucaacaguguuu

SEQ ID NO: 3689239 - RNA, 22 nt, Human
uccucaaccccuccccuccauc

SEQ ID NO: 3689240 - RNA, 23 nt, Human
uccucaacucaccuaauguuuau

SEQ ID NO: 3689241 - RNA, 18 nt, Human
uccucaaggggccauccu

SEQ ID NO: 3689242 - RNA, 12 nt, Human
uccucaauccag

SEQ ID NO: 3689243 - RNA, 16 nt, Human
uccucacacuuacugu

SEQ ID NO: 3689244 - RNA, 20 nt, Human
uccucacaggugucuccaua

SEQ ID NO: 3689245 - RNA, 12 nt, Human
uccucacauagc

SEQ ID NO: 3689246 - RNA, 20 nt, Human
uccucacccccagcuuugcu

SEQ ID NO: 3689247 - RNA, 13 nt, Human
uccucaccccugu

SEQ ID NO: 3689248 - RNA, 22 nt, Human
uccucacccugauuucuugcuu

SEQ ID NO: 3689249 - RNA, 20 nt, Human
uccucaccucuggacuggcu

SEQ ID NO: 3689250 - RNA, 23 nt, Human
uccucaccucuggacuggcuaga

SEQ ID NO: 3689251 - RNA, 19 nt, Human
uccucaccuuuucccgggg

SEQ ID NO: 3689252 - RNA, 12 nt, Human
uccucacuccca

SEQ ID NO: 3689253 - RNA, 15 nt, Human
uccucacugcucccu

SEQ ID NO: 3689254 - RNA, 21 nt, Human
uccucacugcucccugaagcc

SEQ ID NO: 3689255 - RNA, 23 nt, Human
uccucacugcucccugaagccag

SEQ ID NO: 3689256 - RNA, 14 nt, Human
uccucacugggugg

SEQ ID NO: 3689257 - RNA, 21 nt, Human
uccucacuuccauacagcucu

SEQ ID NO: 3689258 - RNA, 22 nt, Human
uccucacuuccauacagcucua

SEQ ID NO: 3689259 - RNA, 16 nt, Human
uccucagacucuaaga

SEQ ID NO: 3689260 - RNA, 17 nt, Human
uccucagacucuaagaa

SEQ ID NO: 3689261 - RNA, 15 nt, Human
uccucagacugcuca

SEQ ID NO: 3689262 - RNA, 19 nt, Human
uccucagaucauccagaag

SEQ ID NO: 3689263 - RNA, 13 nt, Human
uccucagaugcuc

SEQ ID NO: 3689264 - RNA, 19 nt, Human
uccucagcauuucuuuucu

SEQ ID NO: 3689265 - RNA, 10 nt, Human
uccucagcca

SEQ ID NO: 3689266 - RNA, 11 nt, Human
uccucagcccc

SEQ ID NO: 3689267 - RNA, 16 nt, Human
uccucaggcacacagc

SEQ ID NO: 3689268 - RNA, 13 nt, Human
uccucaggcugcu

SEQ ID NO: 3689269 - RNA, 16 nt, Human
uccucagggacagaga

SEQ ID NO: 3689270 - RNA, 21 nt, Human
uccucagggagcagggaaggc

SEQ ID NO: 3689271 - RNA, 17 nt, Human
uccucagggcagccucc

SEQ ID NO: 3689272 - RNA, 13 nt, Human
uccucagguggcc

SEQ ID NO: 3689273 - RNA, 22 nt, Human
uccucagguggccagccuggau

SEQ ID NO: 3689274 - RNA, 18 nt, Human
uccucagguggccaugcc

SEQ ID NO: 3689275 - RNA, 19 nt, Human
uccucagugcauuugugcu

SEQ ID NO: 3689276 - RNA, 20 nt, Human
uccucaguuuaauccuucua

SEQ ID NO: 3689277 - RNA, 23 nt, Human
uccucauacccacccccacccaa

SEQ ID NO: 3689278 - RNA, 17 nt, Human
uccucauccaccccauc

SEQ ID NO: 3689279 - RNA, 14 nt, Human
uccucaucccgugu

SEQ ID NO: 3689280 - RNA, 20 nt, Human
uccucaucugggggagugga

SEQ ID NO: 3689281 - RNA, 14 nt, Human
uccucaugaaugua

SEQ ID NO: 3689282 - RNA, 20 nt, Human
uccucaugaauguaaauuug

SEQ ID NO: 3689283 - RNA, 21 nt, Human
uccucaugaauguaaauuugu

SEQ ID NO: 3689284 - RNA, 13 nt, Human
uccucuggggcuc

SEQ ID NO: 3689285 - RNA, 17 nt, Human
uccucuguacagagccc

SEQ ID NO: 3689286 - RNA, 18 nt, Human
uccucuguacagagccca

SEQ ID NO: 3689287 - RNA, 19 nt, Human
uccucuguacagagcccac

SEQ ID NO: 3689288 - RNA, 23 nt, Human
uccucuguacagagcccacgccc

SEQ ID NO: 3689289 - RNA, 19 nt, Human
uccucugucagucacagcc

SEQ ID NO: 3689290 - RNA, 22 nt, Human
uccucugucagucacagccacc

SEQ ID NO: 3689291 - RNA, 17 nt, Human
uccucuguccaggcacu

SEQ ID NO: 3689292 - RNA, 12 nt, Human
uccucugugaag

SEQ ID NO: 3689293 - RNA, 20 nt, Human
uccucugugaccaaugucuu

SEQ ID NO: 3689294 - RNA, 13 nt, Human
uccucuguggugu

SEQ ID NO: 3689295 - RNA, 22 nt, Human
uccucuguggugucugccuguu

SEQ ID NO: 3689296 - RNA, 15 nt, Human
uccucuuagaagaau

SEQ ID NO: 3689297 - RNA, 13 nt, Human
uccucuuauuugc

SEQ ID NO: 3689298 - RNA, 13 nt, Human
uccucuuccccag

SEQ ID NO: 3689299 - RNA, 14 nt, Human
uccucuuccccaga

SEQ ID NO: 3689300 - RNA, 16 nt, Human
uccucuuccccuugcc

SEQ ID NO: 3689301 - RNA, 18 nt, Human
uccucuucggcccucaga

SEQ ID NO: 3689302 - RNA, 22 nt, Human
uccucuucuacucacuuuuccc

SEQ ID NO: 3689303 - RNA, 17 nt, Human
uccucuucugcaucuug

SEQ ID NO: 3689304 - RNA, 23 nt, Human
uccucuucugcuuaggagagacc

SEQ ID NO: 3689305 - RNA, 17 nt, Human
uccucuucugggccuga

SEQ ID NO: 3689306 - RNA, 14 nt, Human
uccucuugccaucu

SEQ ID NO: 3689307 - RNA, 12 nt, Human
uccucuuguaaa

SEQ ID NO: 3689308 - RNA, 18 nt, Human
uccucuuguaaauaaagc

SEQ ID NO: 3689309 - RNA, 19 nt, Human
uccucuuguaaauaaagcc

SEQ ID NO: 3689310 - RNA, 21 nt, Human
uccucuuguaaauaaagcccu

SEQ ID NO: 3689311 - RNA, 18 nt, Human
uccucuuuaaaacaaaac

SEQ ID NO: 3689312 - RNA, 20 nt, Human
uccucuuuagaguuagacug

SEQ ID NO: 3689313 - RNA, 17 nt, Human
uccucuuucagaaaaca

SEQ ID NO: 3689314 - RNA, 21 nt, Human
uccucuuucagaaaacagaaa

SEQ ID NO: 3689315 - RNA, 14 nt, Human
uccucuuucagcuc

SEQ ID NO: 3689316 - RNA, 17 nt, Human
uccucuuucagcuccug

SEQ ID NO: 3689317 - RNA, 13 nt, Human
uccucuuucucuc

SEQ ID NO: 3689318 - RNA, 16 nt, Human
uccucuuucucucccc

SEQ ID NO: 3689319 - RNA, 14 nt, Human
uccucuuugcaugg

SEQ ID NO: 3689320 - RNA, 16 nt, Human
uccucuuugcuuugcu

SEQ ID NO: 3689321 - RNA, 22 nt, Human
uccucuuuggucuacacugugc

SEQ ID NO: 3689322 - RNA, 23 nt, Human
uccucuuuggucuacacugugcu

SEQ ID NO: 3689323 - RNA, 15 nt, Human
uccucuuuucucugc

SEQ ID NO: 3689324 - RNA, 21 nt, Human
uccucuuuugugcugcuucuc

SEQ ID NO: 3689325 - RNA, 20 nt, Human
uccucuuuuguuguuucuua

SEQ ID NO: 3689326 - RNA, 21 nt, Human
uccugaaaagguuuaugaaaa

SEQ ID NO: 3689327 - RNA, 23 nt, Human
uccugaaaagguuuaugaaaaag

SEQ ID NO: 3689328 - RNA, 17 nt, Human
uccugaaacaacuugga

SEQ ID NO: 3689329 - RNA, 22 nt, Human
uccugaaacgcuccuuugugug

SEQ ID NO: 3689330 - RNA, 16 nt, Human
uccugaaacuauauuu

SEQ ID NO: 3689331 - RNA, 21 nt, Human
uccugaaagaaacaguuaacu

SEQ ID NO: 3689332 - RNA, 16 nt, Human
uccugaaagacaauau

SEQ ID NO: 3689333 - RNA, 14 nt, Human
uccugaaauuucag

SEQ ID NO: 3689334 - RNA, 20 nt, Human
uccugaacagcauggcacuc

SEQ ID NO: 3689335 - RNA, 14 nt, Human
uccugaaccaugug

SEQ ID NO: 3689336 - RNA, 22 nt, Human
uccugaaccauguggauaacuu

SEQ ID NO: 3689337 - RNA, 16 nt, Human
uccugaaccgcacagc

SEQ ID NO: 3689338 - RNA, 19 nt, Human
uccugaaccgcacagcuca

SEQ ID NO: 3689339 - RNA, 20 nt, Human
uccugaaccgcacagcucag

SEQ ID NO: 3689340 - RNA, 20 nt, Human
uccugaagaggcgggccagc

SEQ ID NO: 3689341 - RNA, 21 nt, Human
uccugaagaggcgggccagcc

SEQ ID NO: 3689342 - RNA, 23 nt, Human
uccugaagaggcgggccagccag

SEQ ID NO: 3689343 - RNA, 13 nt, Human
uccugaagcugag

SEQ ID NO: 3689344 - RNA, 17 nt, Human
uccugaaggccugaggu

SEQ ID NO: 3689345 - RNA, 14 nt, Human
uccugaaugaaaua

SEQ ID NO: 3689346 - RNA, 17 nt, Human
uccugacacaccugcag

SEQ ID NO: 3689347 - RNA, 22 nt, Human
uccugacacaccugcagccucc

SEQ ID NO: 3689348 - RNA, 17 nt, Human
uccugacacugcuggag

SEQ ID NO: 3689349 - RNA, 17 nt, Human
uccugacagaaggugcc

SEQ ID NO: 3689350 - RNA, 21 nt, Human
uccugacaucacagcagccuc

SEQ ID NO: 3689351 - RNA, 13 nt, Human
uccugacccaggc

SEQ ID NO: 3689352 - RNA, 15 nt, Human
uccugacccaggccg

SEQ ID NO: 3689353 - RNA, 17 nt, Human
uccugacccaggccgca

SEQ ID NO: 3689354 - RNA, 19 nt, Human
uccugacccaggccgcagc

SEQ ID NO: 3689355 - RNA, 16 nt, Human
uccugacccauugcug

SEQ ID NO: 3689356 - RNA, 17 nt, Human
uccugacccauugcugu

SEQ ID NO: 3689357 - RNA, 21 nt, Human
uccugaccccaaguuauccac

SEQ ID NO: 3689358 - RNA, 16 nt, Human
uccugaccucagguga

SEQ ID NO: 3689359 - RNA, 16 nt, Human
uccugaccuccgccau

SEQ ID NO: 3689360 - RNA, 20 nt, Human
uccugaccuccgccauccac

SEQ ID NO: 3689361 - RNA, 16 nt, Human
uccugaccugaggcuc

SEQ ID NO: 3689362 - RNA, 20 nt, Human
uccugaccugucucaccaug

SEQ ID NO: 3689363 - RNA, 22 nt, Human
uccugacgaaacuggccccgga

SEQ ID NO: 3689364 - RNA, 20 nt, Human
uccugacgucugaagcuuga

SEQ ID NO: 3689365 - RNA, 19 nt, Human
uccugacucaacauguuac

SEQ ID NO: 3689366 - RNA, 15 nt, Human
uccugacucucuccu

SEQ ID NO: 3689367 - RNA, 22 nt, Human
uccugacucugcccccugcugg

SEQ ID NO: 3689368 - RNA, 19 nt, Human
uccugacuucaggggcugc

SEQ ID NO: 3689369 - RNA, 16 nt, Human
uccugagaaagcucaa

SEQ ID NO: 3689370 - RNA, 23 nt, Human
uccugagaauaagaaaguuucac

SEQ ID NO: 3689371 - RNA, 16 nt, Human
uccugagaccacagag

SEQ ID NO: 3689372 - RNA, 16 nt, Human
uccugagcacugccag

SEQ ID NO: 3689373 - RNA, 20 nt, Human
uccugagcacugccaggagg

SEQ ID NO: 3689374 - RNA, 21 nt, Human
uccugagcacugccaggaggg

SEQ ID NO: 3689375 - RNA, 23 nt, Human
uccugagcacugccaggagggac

SEQ ID NO: 3689376 - RNA, 18 nt, Human
uccugagccagauuucac

SEQ ID NO: 3689377 - RNA, 16 nt, Human
uccugagccccaggga

SEQ ID NO: 3689378 - RNA, 13 nt, Human
uccugagccccca

SEQ ID NO: 3689379 - RNA, 18 nt, Human
uccugagcccccagcuuc

SEQ ID NO: 3689380 - RNA, 13 nt, Human
uccugagccccgc

SEQ ID NO: 3689381 - RNA, 18 nt, Human
uccugagccccgcccucu

SEQ ID NO: 3689382 - RNA, 12 nt, Human
uccugagcucag

SEQ ID NO: 3689383 - RNA, 19 nt, Human
uccugaggacagcuguccu

SEQ ID NO: 3689384 - RNA, 17 nt, Human
uccugaggcuccacuug

SEQ ID NO: 3689385 - RNA, 17 nt, Human
uccugaggcugggcucc

SEQ ID NO: 3689386 - RNA, 18 nt, Human
uccugaggcuuuggauuu

SEQ ID NO: 3689387 - RNA, 17 nt, Human
uccugagggaggaccug

SEQ ID NO: 3689388 - RNA, 19 nt, Human
uccugaggggcaucugccc

SEQ ID NO: 3689389 - RNA, 17 nt, Human
uccugaggguccccacc

SEQ ID NO: 3689390 - RNA, 23 nt, Human
uccugaggugaugaagacagccc

SEQ ID NO: 3689391 - RNA, 17 nt, Human
uccugaguggccaggga

SEQ ID NO: 3689392 - RNA, 15 nt, Human
uccugaguggugcca

SEQ ID NO: 3689393 - RNA, 15 nt, Human
uccugauaaagcaca

SEQ ID NO: 3689394 - RNA, 21 nt, Human
uccugauaaagcacagcugua

SEQ ID NO: 3689395 - RNA, 17 nt, Human
uccugauaauaauugau

SEQ ID NO: 3689396 - RNA, 15 nt, Human
uccugaugacccagg

SEQ ID NO: 3689397 - RNA, 17 nt, Human
uccugaugacccaggcu

SEQ ID NO: 3689398 - RNA, 20 nt, Human
uccugaugcuucuucagaga

SEQ ID NO: 3689399 - RNA, 21 nt, Human
uccugaugcuucuucagagac

SEQ ID NO: 3689400 - RNA, 23 nt, Human
uccugaugguacaggaaagcuca

SEQ ID NO: 3689401 - RNA, 20 nt, Human
uccugauuauuuaucacaua

SEQ ID NO: 3689402 - RNA, 17 nt, Human
uccugcaaaauuuuaua

SEQ ID NO: 3689403 - RNA, 22 nt, Human
uccugcaaugaagucucugaag

SEQ ID NO: 3689404 - RNA, 14 nt, Human
uccugcacacgcuc

SEQ ID NO: 3689405 - RNA, 21 nt, Human
uccugcacacgcuccuuccuc

SEQ ID NO: 3689406 - RNA, 22 nt, Human
uccugcacacgcuccuuccucu

SEQ ID NO: 3689407 - RNA, 20 nt, Human
uccugcaccggggccugggc

SEQ ID NO: 3689408 - RNA, 16 nt, Human
uccugcacugacucug

SEQ ID NO: 3689409 - RNA, 21 nt, Human
uccugcacuuacuugcuuauu

SEQ ID NO: 3689410 - RNA, 22 nt, Human
uccugcagcaaacacuccaccc

SEQ ID NO: 3689411 - RNA, 12 nt, Human
uccugcagcaug

SEQ ID NO: 3689412 - RNA, 12 nt, Human
uccugcagccuc

SEQ ID NO: 3689413 - RNA, 18 nt, Human
uccugcagccuccuccug

SEQ ID NO: 3689414 - RNA, 13 nt, Human
uccugcagccugc

SEQ ID NO: 3689415 - RNA, 14 nt, Human
uccugcagccugga

SEQ ID NO: 3689416 - RNA, 12 nt, Human
uccugcaggcag

SEQ ID NO: 3689417 - RNA, 15 nt, Human
uccugcaggcagcca

SEQ ID NO: 3689418 - RNA, 16 nt, Human
uccugcaggcagccag

SEQ ID NO: 3689419 - RNA, 20 nt, Human
uccugcaggcagccaggcca

SEQ ID NO: 3689420 - RNA, 22 nt, Human
uccugcaggcagccaggccaca

SEQ ID NO: 3689421 - RNA, 22 nt, Human
uccugcaggcaggaacaaacag

SEQ ID NO: 3689422 - RNA, 17 nt, Human
uccugcaggccaggcca

SEQ ID NO: 3689423 - RNA, 21 nt, Human
uccugcagucuggcugagccc

SEQ ID NO: 3689424 - RNA, 16 nt, Human
uccugcauucacccag

SEQ ID NO: 3689425 - RNA, 11 nt, Human
uccugccaaaa

SEQ ID NO: 3689426 - RNA, 20 nt, Human
uccugccacauuagaacuuc

SEQ ID NO: 3689427 - RNA, 16 nt, Human
uccugccacccuguag

SEQ ID NO: 3689428 - RNA, 20 nt, Human
uccugccaccuggggcaguc

SEQ ID NO: 3689429 - RNA, 13 nt, Human
uccugcccaggag

SEQ ID NO: 3689430 - RNA, 23 nt, Human
uccugcccaggagagccagcccu

SEQ ID NO: 3689431 - RNA, 21 nt, Human
uccugcccagucccccaaccc

SEQ ID NO: 3689432 - RNA, 13 nt, Human
uccugcccagugu

SEQ ID NO: 3689433 - RNA, 14 nt, Human
uccugcccaguguu

SEQ ID NO: 3689434 - RNA, 17 nt, Human
uccugcccaguguuguu

SEQ ID NO: 3689435 - RNA, 22 nt, Human
uccugcccaguguuguuuguaa

SEQ ID NO: 3689436 - RNA, 15 nt, Human
uccugcccccacacc

SEQ ID NO: 3689437 - RNA, 17 nt, Human
uccugccccucuuucuc

SEQ ID NO: 3689438 - RNA, 18 nt, Human
uccugccccugagcccau

SEQ ID NO: 3689439 - RNA, 18 nt, Human
uccugcccuguuguguau

SEQ ID NO: 3689440 - RNA, 17 nt, Human
uccugcccuuaccugcc

SEQ ID NO: 3689441 - RNA, 16 nt, Human
uccugcccuuccucag

SEQ ID NO: 3689442 - RNA, 17 nt, Human
uccugcccuuccucagu

SEQ ID NO: 3689443 - RNA, 16 nt, Human
uccugccgcagagcug

SEQ ID NO: 3689444 - RNA, 23 nt, Human
uccugccgcccgagguggcugcc

SEQ ID NO: 3689445 - RNA, 19 nt, Human
uccugccggagaggaagag

SEQ ID NO: 3689446 - RNA, 23 nt, Human
uccugccggagaggaagagacac

SEQ ID NO: 3689447 - RNA, 17 nt, Human
uccugccggcuccuugg

SEQ ID NO: 3689448 - RNA, 11 nt, Human
uccugccuacu

SEQ ID NO: 3689449 - RNA, 15 nt, Human
uccugccucagccuc

SEQ ID NO: 3689450 - RNA, 16 nt, Human
uccugccucagccucc

SEQ ID NO: 3689451 - RNA, 17 nt, Human
uccugccucagccuccc

SEQ ID NO: 3689452 - RNA, 21 nt, Human
uccugccucgaacuggcugca

SEQ ID NO: 3689453 - RNA, 14 nt, Human
uccugccugccccu

SEQ ID NO: 3689454 - RNA, 16 nt, Human
uccugccuggccaggc

SEQ ID NO: 3689455 - RNA, 20 nt, Human
uccugccugucugccccagc

SEQ ID NO: 3689456 - RNA, 12 nt, Human
uccugccugugg

SEQ ID NO: 3689457 - RNA, 13 nt, Human
uccugccuguggc

SEQ ID NO: 3689458 - RNA, 18 nt, Human
uccugccuguggccauga

SEQ ID NO: 3689459 - RNA, 18 nt, Human
uccugccuuagagccagg

SEQ ID NO: 3689460 - RNA, 14 nt, Human
uccugccuuccucc

SEQ ID NO: 3689461 - RNA, 17 nt, Human
uccugccuucuguccug

SEQ ID NO: 3689462 - RNA, 19 nt, Human
uccugccuuggccucccaa

SEQ ID NO: 3689463 - RNA, 14 nt, Human
uccugcgaggcuau

SEQ ID NO: 3689464 - RNA, 19 nt, Human
uccugcggagugaagaggg

SEQ ID NO: 3689465 - RNA, 22 nt, Human
uccugcggagugaagaggggca

SEQ ID NO: 3689466 - RNA, 23 nt, Human
uccugcgggcuuuuccccggucc

SEQ ID NO: 3689467 - RNA, 15 nt, Human
uccugcguccuccuc

SEQ ID NO: 3689468 - RNA, 20 nt, Human
uccugcuacaacuucagcag

SEQ ID NO: 3689469 - RNA, 21 nt, Human
uccugcuacaacuucagcagu

SEQ ID NO: 3689470 - RNA, 23 nt, Human
uccugcuaccucccuugccuuuc

SEQ ID NO: 3689471 - RNA, 15 nt, Human
uccugcuagaaaugg

SEQ ID NO: 3689472 - RNA, 15 nt, Human
uccugcucauauugu

SEQ ID NO: 3689473 - RNA, 16 nt, Human
uccugcucauauugug

SEQ ID NO: 3689474 - RNA, 13 nt, Human
uccugcuccacag

SEQ ID NO: 3689475 - RNA, 16 nt, Human
uccugcuccacagugu

SEQ ID NO: 3689476 - RNA, 18 nt, Human
uccugcucucuacccagc

SEQ ID NO: 3689477 - RNA, 21 nt, Human
uccugcucucuacccagccca

SEQ ID NO: 3689478 - RNA, 24 nt, Human
uccugcucucuacccagcccaucu

SEQ ID NO: 3689479 - RNA, 11 nt, Human
uccugcucugc

SEQ ID NO: 3689480 - RNA, 12 nt, Human
uccugcucugcu

SEQ ID NO: 3689481 - RNA, 19 nt, Human
uccugcugcaccaacccag

SEQ ID NO: 3689482 - RNA, 13 nt, Human
uccugcugccagu

SEQ ID NO: 3689483 - RNA, 17 nt, Human
uccugcugcucccucag

SEQ ID NO: 3689484 - RNA, 20 nt, Human
uccugcugcucccucagacu

SEQ ID NO: 3689485 - RNA, 20 nt, Human
uccugcugcugucugggugc

SEQ ID NO: 3689486 - RNA, 19 nt, Human
uccuggaaccuugcugucc

SEQ ID NO: 3689487 - RNA, 21 nt, Human
uccuggaaccuugcuguccug

SEQ ID NO: 3689488 - RNA, 22 nt, Human
uccuggaaccuugcuguccuga

SEQ ID NO: 3689489 - RNA, 18 nt, Human
uccuggaagccagcuuuc

SEQ ID NO: 3689490 - RNA, 21 nt, Human
uccuggaagcuguguccuugc

SEQ ID NO: 3689491 - RNA, 22 nt, Human
uccuggaauaucuccgucaacu

SEQ ID NO: 3689492 - RNA, 20 nt, Human
uccuggaauugccagcugac

SEQ ID NO: 3689493 - RNA, 11 nt, Human
uccuggacagc

SEQ ID NO: 3689494 - RNA, 13 nt, Human
uccuggacagcug

SEQ ID NO: 3689495 - RNA, 16 nt, Human
uccuggacagcugugc

SEQ ID NO: 3689496 - RNA, 22 nt, Human
uccuggacauccucuucugcuu

SEQ ID NO: 3689497 - RNA, 21 nt, Human
uccuggacaugaagauucuuu

SEQ ID NO: 3689498 - RNA, 16 nt, Human
uccuggagaagccucg

SEQ ID NO: 3689499 - RNA, 14 nt, Human
uccuggagcagaag

SEQ ID NO: 3689500 - RNA, 18 nt, Human
uccuggagcagaccaccc

SEQ ID NO: 3689501 - RNA, 22 nt, Human
uccuggagcccagaggagggca

SEQ ID NO: 3689502 - RNA, 15 nt, Human
uccuggagcccgagg

SEQ ID NO: 3689503 - RNA, 20 nt, Human
uccuggagcccgaggcacca

SEQ ID NO: 3689504 - RNA, 13 nt, Human
uccuggaggccca

SEQ ID NO: 3689505 - RNA, 17 nt, Human
uccuggauguuuggaaa

SEQ ID NO: 3689506 - RNA, 17 nt, Human
uccuggcaauagucaaa

SEQ ID NO: 3689507 - RNA, 22 nt, Human
uccuggcaauaguguguucuga

SEQ ID NO: 3689508 - RNA, 23 nt, Human
uccuggcacccggccccugcugg

SEQ ID NO: 3689509 - RNA, 13 nt, Human
uccuggcacugcu

SEQ ID NO: 3689510 - RNA, 18 nt, Human
uccuggcacuggacccca

SEQ ID NO: 3689511 - RNA, 15 nt, Human
uccuggcagcccaga

SEQ ID NO: 3689512 - RNA, 17 nt, Human
uccuggcagcccagaga

SEQ ID NO: 3689513 - RNA, 19 nt, Human
uccuggcagcccagagacu

SEQ ID NO: 3689514 - RNA, 14 nt, Human
uccuggccauccca

SEQ ID NO: 3689515 - RNA, 20 nt, Human
uccuggccaucccacaagug

SEQ ID NO: 3689516 - RNA, 17 nt, Human
uccuggcccagccuuug

SEQ ID NO: 3689517 - RNA, 15 nt, Human
uccuggcccagggca

SEQ ID NO: 3689518 - RNA, 13 nt, Human
uccuggcccauca

SEQ ID NO: 3689519 - RNA, 17 nt, Human
uccuggcccaucagugu

SEQ ID NO: 3689520 - RNA, 13 nt, Human
uccuggcccucug

SEQ ID NO: 3689521 - RNA, 14 nt, Human
uccuggccgccugg

SEQ ID NO: 3689522 - RNA, 14 nt, Human
uccuggccuauccg

SEQ ID NO: 3689523 - RNA, 15 nt, Human
uccuggccucagacu

SEQ ID NO: 3689524 - RNA, 17 nt, Human
uccuggccugagaguca

SEQ ID NO: 3689525 - RNA, 16 nt, Human
uccuggccuggcuucu

SEQ ID NO: 3689526 - RNA, 13 nt, Human
uccuggcucagcc

SEQ ID NO: 3689527 - RNA, 12 nt, Human
uccuggcugcgg

SEQ ID NO: 3689528 - RNA, 13 nt, Human
uccuggcuucagg

SEQ ID NO: 3689529 - RNA, 20 nt, Human
uccuggcuucccauccccag

SEQ ID NO: 3689530 - RNA, 22 nt, Human
uccuggcuucccauccccagcg

SEQ ID NO: 3689531 - RNA, 23 nt, Human
uccuggcuuuuuaacuccccugu

SEQ ID NO: 3689532 - RNA, 18 nt, Human
uccugggagaaccucagg

SEQ ID NO: 3689533 - RNA, 23 nt, Human
uccugggagaaccucaggcuucc

SEQ ID NO: 3689534 - RNA, 13 nt, Human
uccugggaugugg

SEQ ID NO: 3689535 - RNA, 15 nt, Human
uccugggcacacgcu

SEQ ID NO: 3689536 - RNA, 18 nt, Human
uccugggcacacgcugcu

SEQ ID NO: 3689537 - RNA, 19 nt, Human
uccugggcacacgcugcuc

SEQ ID NO: 3689538 - RNA, 21 nt, Human
uccugggcacacgcugcucug

SEQ ID NO: 3689539 - RNA, 23 nt, Human
uccugggcacacgcugcucugcc

SEQ ID NO: 3689540 - RNA, 12 nt, Human
uccugggcagcu

SEQ ID NO: 3689541 - RNA, 17 nt, Human
uccugggcagcugccuc

SEQ ID NO: 3689542 - RNA, 18 nt, Human
uccugggcagcugccucc

SEQ ID NO: 3689543 - RNA, 14 nt, Human
uccugggccccucc

SEQ ID NO: 3689544 - RNA, 15 nt, Human
uccugggccccuccc

SEQ ID NO: 3689545 - RNA, 20 nt, Human
uccugggccccucccuaccu

SEQ ID NO: 3689546 - RNA, 22 nt, Human
uccugggccccucccuaccuca

SEQ ID NO: 3689547 - RNA, 17 nt, Human
uccugggcccucucugc

SEQ ID NO: 3689548 - RNA, 21 nt, Human
uccugggcccucucugcucug

SEQ ID NO: 3689549 - RNA, 23 nt, Human
uccugggcccucucugcucugcg

SEQ ID NO: 3689550 - RNA, 15 nt, Human
uccugggccugcaga

SEQ ID NO: 3689551 - RNA, 16 nt, Human
uccugggcucaagcaa

SEQ ID NO: 3689552 - RNA, 13 nt, Human
uccugggcucagg

SEQ ID NO: 3689553 - RNA, 23 nt, Human
uccugggcuuuuguuuugcuuuu

SEQ ID NO: 3689554 - RNA, 14 nt, Human
uccuggggccaggc

SEQ ID NO: 3689555 - RNA, 15 nt, Human
uccuggggccaggcc

SEQ ID NO: 3689556 - RNA, 17 nt, Human
uccuggggcgcgugagg

SEQ ID NO: 3689557 - RNA, 15 nt, Human
uccuggggcucccuu

SEQ ID NO: 3689558 - RNA, 22 nt, Human
uccuggggguucuuucuuccuc

SEQ ID NO: 3689559 - RNA, 17 nt, Human
uccuggguggcuacucu

SEQ ID NO: 3689560 - RNA, 22 nt, Human
uccuggguggcuacucugugcc

SEQ ID NO: 3689561 - RNA, 22 nt, Human
uccuggguggucugcaggcagg

SEQ ID NO: 3689562 - RNA, 23 nt, Human
uccuggguuuucuuaaccaucuu

SEQ ID NO: 3689563 - RNA, 17 nt, Human
uccuggguuuuguauuc

SEQ ID NO: 3689564 - RNA, 22 nt, Human
uccuggguuuuguauucucuga

SEQ ID NO: 3689565 - RNA, 23 nt, Human
uccuggguuuuguauucucugag

SEQ ID NO: 3689566 - RNA, 18 nt, Human
uccugguacccagccauc

SEQ ID NO: 3689567 - RNA, 20 nt, Human
uccuggucaccuaggaagcc

SEQ ID NO: 3689568 - RNA, 23 nt, Human
uccugguccuaggcuggaaggag

SEQ ID NO: 3689569 - RNA, 14 nt, Human
uccuggucgaaagu

SEQ ID NO: 3689570 - RNA, 21 nt, Human
uccuggugccaauuucaaguu

SEQ ID NO: 3689571 - RNA, 16 nt, Human
uccuggugcucucugc

SEQ ID NO: 3689572 - RNA, 20 nt, Human
uccuggugcucucugccacu

SEQ ID NO: 3689573 - RNA, 12 nt, Human
uccuggugcugg

SEQ ID NO: 3689574 - RNA, 14 nt, Human
uccuggugcuggag

SEQ ID NO: 3689575 - RNA, 16 nt, Human
uccugguggggcagcu

SEQ ID NO: 3689576 - RNA, 22 nt, Human
uccugguggguccaggggcccc

SEQ ID NO: 3689577 - RNA, 19 nt, Human
uccuggugguauuuucaau

SEQ ID NO: 3689578 - RNA, 21 nt, Human
uccuggugguauuuucaauag

SEQ ID NO: 3689579 - RNA, 19 nt, Human
uccuggugucaccccagag

SEQ ID NO: 3689580 - RNA, 22 nt, Human
uccuggugucaccccagagcca

SEQ ID NO: 3689581 - RNA, 14 nt, Human
uccuggugucacuu

SEQ ID NO: 3689582 - RNA, 21 nt, Human
uccugguucccguuucuccac

SEQ ID NO: 3689583 - RNA, 23 nt, Human
uccugguucccguuucuccaccu

SEQ ID NO: 3689584 - RNA, 23 nt, Human
uccuguaacacaagccacagaag

SEQ ID NO: 3689585 - RNA, 19 nt, Human
uccuguaacuguuacagua

SEQ ID NO: 3689586 - RNA, 21 nt, Human
uccuguaacuguuacaguaau

SEQ ID NO: 3689587 - RNA, 16 nt, Human
uccuguaagccaaaga

SEQ ID NO: 3689588 - RNA, 17 nt, Human
uccuguaagccaaagaa

SEQ ID NO: 3689589 - RNA, 13 nt, Human
uccuguaauuccu

SEQ ID NO: 3689590 - RNA, 16 nt, Human
uccuguaauuccuacc

SEQ ID NO: 3689591 - RNA, 21 nt, Human
uccuguaauuccuaccucccu

SEQ ID NO: 3689592 - RNA, 21 nt, Human
uccuguacacugaauauuuau

SEQ ID NO: 3689593 - RNA, 20 nt, Human
uccuguacauugugggaugu

SEQ ID NO: 3689594 - RNA, 20 nt, Human
uccuguaccucuugagccuu

SEQ ID NO: 3689595 - RNA, 21 nt, Human
uccuguagagguuuuguuguu

SEQ ID NO: 3689596 - RNA, 21 nt, Human
uccuguagcaucuucuggagu

SEQ ID NO: 3689597 - RNA, 16 nt, Human
uccuguagcucucccu

SEQ ID NO: 3689598 - RNA, 21 nt, Human
uccuguaggaagguacuguau

SEQ ID NO: 3689599 - RNA, 19 nt, Human
uccuguaugaaagauugug

SEQ ID NO: 3689600 - RNA, 14 nt, Human
uccuguaugucugu

SEQ ID NO: 3689601 - RNA, 16 nt, Human
uccuguaugucuguca

SEQ ID NO: 3689602 - RNA, 16 nt, Human
uccuguauucagacag

SEQ ID NO: 3689603 - RNA, 17 nt, Human
uccuguauucagacaga

SEQ ID NO: 3689604 - RNA, 21 nt, Human
uccuguauucagacagaugag

SEQ ID NO: 3689605 - RNA, 20 nt, Human
uccuguauuuguucccaaga

SEQ ID NO: 3689606 - RNA, 22 nt, Human
uccugucaucaucauggccagc

SEQ ID NO: 3689607 - RNA, 18 nt, Human
uccuguccaaccuaaccc

SEQ ID NO: 3689608 - RNA, 20 nt, Human
uccuguccaaccuaaccccu

SEQ ID NO: 3689609 - RNA, 19 nt, Human
uccuguccacacccagcuc

SEQ ID NO: 3689610 - RNA, 16 nt, Human
uccuguccagcuccaa

SEQ ID NO: 3689611 - RNA, 17 nt, Human
uccuguccagcuccaac

SEQ ID NO: 3689612 - RNA, 10 nt, Human
uccuguccca

SEQ ID NO: 3689613 - RNA, 20 nt, Human
uccuguccccaucugucggc

SEQ ID NO: 3689614 - RNA, 18 nt, Human
uccugucccuucucuuaa

SEQ ID NO: 3689615 - RNA, 15 nt, Human
uccuguccgcccucu

SEQ ID NO: 3689616 - RNA, 17 nt, Human
uccuguccucccucacc

SEQ ID NO: 3689617 - RNA, 18 nt, Human
uccuguccucuuucagcu

SEQ ID NO: 3689618 - RNA, 21 nt, Human
uccuguccucuuucagcuccu

SEQ ID NO: 3689619 - RNA, 22 nt, Human
uccuguccuucucucaccuccu

SEQ ID NO: 3689620 - RNA, 17 nt, Human
uccugucgauuagacug

SEQ ID NO: 3689621 - RNA, 21 nt, Human
uccugucgauuagacuggaca

SEQ ID NO: 3689622 - RNA, 22 nt, Human
uccugucgauuagacuggacag

SEQ ID NO: 3689623 - RNA, 16 nt, Human
uccugucuccccucug

SEQ ID NO: 3689624 - RNA, 17 nt, Human
uccugucuccccucugc

SEQ ID NO: 3689625 - RNA, 14 nt, Human
uccugucugccagc

SEQ ID NO: 3689626 - RNA, 14 nt, Human
uccugucuuauccu

SEQ ID NO: 3689627 - RNA, 11 nt, Human
uccugucuucc

SEQ ID NO: 3689628 - RNA, 12 nt, Human
uccugucuuccc

SEQ ID NO: 3689629 - RNA, 12 nt, Human
uccugucuucug

SEQ ID NO: 3689630 - RNA, 17 nt, Human
uccugucuucugcuuug

SEQ ID NO: 3689631 - RNA, 19 nt, Human
uccugucuucugcuuuguu

SEQ ID NO: 3689632 - RNA, 16 nt, Human
uccugugaaugccacu

SEQ ID NO: 3689633 - RNA, 20 nt, Human
uccugugaaugccacugccu

SEQ ID NO: 3689634 - RNA, 15 nt, Human
uccugugacauguaa

SEQ ID NO: 3689635 - RNA, 15 nt, Human
uccugugagaugugu

SEQ ID NO: 3689636 - RNA, 22 nt, Human
uccugugagauguguaucagug

SEQ ID NO: 3689637 - RNA, 17 nt, Human
uccugugagguuuccca

SEQ ID NO: 3689638 - RNA, 22 nt, Human
uccugugauagaguucuuuuaa

SEQ ID NO: 3689639 - RNA, 21 nt, Human
uccugugauccacccaacccu

SEQ ID NO: 3689640 - RNA, 20 nt, Human
uccugugcaugggugaaggg

SEQ ID NO: 3689641 - RNA, 17 nt, Human
uccugugcccacauccc

SEQ ID NO: 3689642 - RNA, 15 nt, Human
uccugugcucagccc

SEQ ID NO: 3689643 - RNA, 17 nt, Human
uccuguggaacccagca

SEQ ID NO: 3689644 - RNA, 15 nt, Human
uccuguggcaggcag

SEQ ID NO: 3689645 - RNA, 21 nt, Human
uccuguggcaggcagcgccaa

SEQ ID NO: 3689646 - RNA, 19 nt, Human
uccuguggccugccaguca

SEQ ID NO: 3689647 - RNA, 12 nt, Human
uccuguggcucc

SEQ ID NO: 3689648 - RNA, 15 nt, Human
uccuguggggaaagg

SEQ ID NO: 3689649 - RNA, 22 nt, Human
uccugugggggaagagcacagc

SEQ ID NO: 3689650 - RNA, 18 nt, Human
uccuguguaaucauuucu

SEQ ID NO: 3689651 - RNA, 13 nt, Human
uccuguguacugu

SEQ ID NO: 3689652 - RNA, 15 nt, Human
uccuguguacugugu

SEQ ID NO: 3689653 - RNA, 16 nt, Human
uccugugucaguuuau

SEQ ID NO: 3689654 - RNA, 12 nt, Human
uccuguguccug

SEQ ID NO: 3689655 - RNA, 23 nt, Human
uccugugucuugcaauggcagcc

SEQ ID NO: 3689656 - RNA, 15 nt, Human
uccugugugcaguga

SEQ ID NO: 3689657 - RNA, 21 nt, Human
uccugugugguuuaguguaaa

SEQ ID NO: 3689658 - RNA, 18 nt, Human
uccuguguguacucuguc

SEQ ID NO: 3689659 - RNA, 22 nt, Human
uccuguguguccaaaacugccu

SEQ ID NO: 3689660 - RNA, 13 nt, Human
uccugugugugcg

SEQ ID NO: 3689661 - RNA, 22 nt, Human
uccuguguguuaagcucugcua

SEQ ID NO: 3689662 - RNA, 19 nt, Human
uccuguguuucuagggaaa

SEQ ID NO: 3689663 - RNA, 14 nt, Human
uccuguguuuguga

SEQ ID NO: 3689664 - RNA, 20 nt, Human
uccuguguuuuuucugccac

SEQ ID NO: 3689665 - RNA, 23 nt, Human
uccuguuagcuccucacuguggu

SEQ ID NO: 3689666 - RNA, 22 nt, Human
uccuguuagguauuagaaagug

SEQ ID NO: 3689667 - RNA, 15 nt, Human
uccuguucagcauuc

SEQ ID NO: 3689668 - RNA, 18 nt, Human
uccuguucagcauucuua

SEQ ID NO: 3689669 - RNA, 18 nt, Human
uccuguucaguaauaaaa

SEQ ID NO: 3689670 - RNA, 12 nt, Human
uccuguucugaa

SEQ ID NO: 3689671 - RNA, 22 nt, Human
uccuguugaaaagccauguuua

SEQ ID NO: 3689672 - RNA, 20 nt, Human
uccuguugcacccagcccug

SEQ ID NO: 3689673 - RNA, 18 nt, Human
uccuguuuccuagcugug

SEQ ID NO: 3689674 - RNA, 19 nt, Human
uccuguuucugaaaagaaa

SEQ ID NO: 3689675 - RNA, 23 nt, Human
uccuguuugggaagagcuuagaa

SEQ ID NO: 3689676 - RNA, 18 nt, Human
uccuguuugggccccucu

SEQ ID NO: 3689677 - RNA, 18 nt, Human
uccuuaaaauguaagauu

SEQ ID NO: 3689678 - RNA, 23 nt, Human
uccuuaaacagggcaucuccagg

SEQ ID NO: 3689679 - RNA, 14 nt, Human
uccuuaaacugugu

SEQ ID NO: 3689680 - RNA, 15 nt, Human
uccuuaaacugugug

SEQ ID NO: 3689681 - RNA, 16 nt, Human
uccuuaaacugugugg

SEQ ID NO: 3689682 - RNA, 17 nt, Human
uccuuaaacugugugga

SEQ ID NO: 3689683 - RNA, 17 nt, Human
uccuuaaagaguguggc

SEQ ID NO: 3689684 - RNA, 19 nt, Human
uccuuaaaucuuaauguuc

SEQ ID NO: 3689685 - RNA, 13 nt, Human
uccuuaagagauu

SEQ ID NO: 3689686 - RNA, 21 nt, Human
uccuuaaguauaucauguaaa

SEQ ID NO: 3689687 - RNA, 15 nt, Human
uccuuacaaaugauu

SEQ ID NO: 3689688 - RNA, 15 nt, Human
uccuuacauaaacau

SEQ ID NO: 3689689 - RNA, 18 nt, Human
uccuuaccagcagagcac

SEQ ID NO: 3689690 - RNA, 21 nt, Human
uccuuaccagcagagcaccuu

SEQ ID NO: 3689691 - RNA, 22 nt, Human
uccuuaccgugggcacugaagg

SEQ ID NO: 3689692 - RNA, 20 nt, Human
uccuuaccuuuuuauuugca

SEQ ID NO: 3689693 - RNA, 22 nt, Human
uccuuacuccugugggagccuc

SEQ ID NO: 3689694 - RNA, 15 nt, Human
uccuuacuuuuaagg

SEQ ID NO: 3689695 - RNA, 20 nt, Human
uccuuagaacauuuuaauuc

SEQ ID NO: 3689696 - RNA, 18 nt, Human
uccuuagacucuuuuccu

SEQ ID NO: 3689697 - RNA, 19 nt, Human
uccuuagagacaucaaaau

SEQ ID NO: 3689698 - RNA, 17 nt, Human
uccuuagaucuggcaug

SEQ ID NO: 3689699 - RNA, 18 nt, Human
uccuuagaucuggcaugu

SEQ ID NO: 3689700 - RNA, 16 nt, Human
uccuuagcaacagccg

SEQ ID NO: 3689701 - RNA, 23 nt, Human
uccuuagccuggaccucugacag

SEQ ID NO: 3689702 - RNA, 18 nt, Human
uccuuagcuuagaccuca

SEQ ID NO: 3689703 - RNA, 17 nt, Human
uccuuaggccucugaga

SEQ ID NO: 3689704 - RNA, 15 nt, Human
uccuuagucuucuca

SEQ ID NO: 3689705 - RNA, 15 nt, Human
uccuuaucaaaggac

SEQ ID NO: 3689706 - RNA, 17 nt, Human
uccuuaucgaaacucau

SEQ ID NO: 3689707 - RNA, 15 nt, Human
uccuuaucuagcugc

SEQ ID NO: 3689708 - RNA, 23 nt, Human
uccuuaugccacccccgcuggag

SEQ ID NO: 3689709 - RNA, 17 nt, Human
uccuuaugcuugggccu

SEQ ID NO: 3689710 - RNA, 20 nt, Human
uccuuauuuggcgugacccg

SEQ ID NO: 3689711 - RNA, 13 nt, Human
uccuucaaagucu

SEQ ID NO: 3689712 - RNA, 19 nt, Human
uccuucaacaaggcuugcu

SEQ ID NO: 3689713 - RNA, 23 nt, Human
uccuucaagaacucugggcugcu

SEQ ID NO: 3689714 - RNA, 15 nt, Human
uccuucaagccagca

SEQ ID NO: 3689715 - RNA, 18 nt, Human
uccuucaaguuagcucag

SEQ ID NO: 3689716 - RNA, 15 nt, Human
uccuucaauuccaua

SEQ ID NO: 3689717 - RNA, 18 nt, Human
uccuucacagaugggugc

SEQ ID NO: 3689718 - RNA, 19 nt, Human
uccuucacagaugggugcu

SEQ ID NO: 3689719 - RNA, 12 nt, Human
uccuucacuguu

SEQ ID NO: 3689720 - RNA, 15 nt, Human
uccuucacuguuuca

SEQ ID NO: 3689721 - RNA, 23 nt, Human
uccuucagagagcagugcuuuug

SEQ ID NO: 3689722 - RNA, 14 nt, Human
uccuucagauauuu

SEQ ID NO: 3689723 - RNA, 15 nt, Human
uccuucagauauuuu

SEQ ID NO: 3689724 - RNA, 18 nt, Human
uccuucagggugaugcca

SEQ ID NO: 3689725 - RNA, 14 nt, Human
uccuucagugccuu

SEQ ID NO: 3689726 - RNA, 22 nt, Human
uccuucaucaugaguucugcug

SEQ ID NO: 3689727 - RNA, 19 nt, Human
uccuucaugacagccucca

SEQ ID NO: 3689728 - RNA, 14 nt, Human
uccuucauuuccuc

SEQ ID NO: 3689729 - RNA, 22 nt, Human
uccccuccuaccccucccagcu

SEQ ID NO: 3689730 - RNA, 16 nt, Human
uccccuccucuccccu

SEQ ID NO: 3689731 - RNA, 15 nt, Human
uccccuccucugcuu

SEQ ID NO: 3689732 - RNA, 24 nt, Human
uccccuccucugcuugccaucccu

SEQ ID NO: 3689733 - RNA, 12 nt, Human
uccccuccuugc

SEQ ID NO: 3689734 - RNA, 20 nt, Human
uccccuccuugccuccugug

SEQ ID NO: 3689735 - RNA, 21 nt, Human
uccccuccuugccuccugugu

SEQ ID NO: 3689736 - RNA, 17 nt, Human
uccccucuauuuagcau

SEQ ID NO: 3689737 - RNA, 16 nt, Human
uccccucuccuuccug

SEQ ID NO: 3689738 - RNA, 15 nt, Human
uccccucugaaaguu

SEQ ID NO: 3689739 - RNA, 15 nt, Human
uccccucugcugcug

SEQ ID NO: 3689740 - RNA, 14 nt, Human
uccccucugcuggc

SEQ ID NO: 3689741 - RNA, 18 nt, Human
uccccucuucccuucaac

SEQ ID NO: 3689742 - RNA, 12 nt, Human
uccccucuuccu

SEQ ID NO: 3689743 - RNA, 23 nt, Human
uccccucuuccuacccugccucc

SEQ ID NO: 3689744 - RNA, 21 nt, Human
uccccucuugccccaaccccc

SEQ ID NO: 3689745 - RNA, 12 nt, Human
uccccugacagg

SEQ ID NO: 3689746 - RNA, 12 nt, Human
uccccugaggcu

SEQ ID NO: 3689747 - RNA, 14 nt, Human
uccccugcacugga

SEQ ID NO: 3689748 - RNA, 22 nt, Human
uccccugcacuguaaaaugugg

SEQ ID NO: 3689749 - RNA, 18 nt, Human
uccccugcagcccuggcc

SEQ ID NO: 3689750 - RNA, 14 nt, Human
uccccugcaggcug

SEQ ID NO: 3689751 - RNA, 20 nt, Human
uccccugcaggcugagugca

SEQ ID NO: 3689752 - RNA, 14 nt, Human
uccccugccaccag

SEQ ID NO: 3689753 - RNA, 16 nt, Human
uccccugccaccaggc

SEQ ID NO: 3689754 - RNA, 13 nt, Human
uccccugccauuu

SEQ ID NO: 3689755 - RNA, 12 nt, Human
uccccugccccc

SEQ ID NO: 3689756 - RNA, 23 nt, Human
uccccugcccccagaccuuuuau

SEQ ID NO: 3689757 - RNA, 20 nt, Human
uccccugcccccaggacugg

SEQ ID NO: 3689758 - RNA, 16 nt, Human
uccccugcccccugca

SEQ ID NO: 3689759 - RNA, 18 nt, Human
uccccugcccccugcagg

SEQ ID NO: 3689760 - RNA, 23 nt, Human
uccccugcccccugcaggaagga

SEQ ID NO: 3689761 - RNA, 19 nt, Human
uccccugccccuuccuuua

SEQ ID NO: 3689762 - RNA, 12 nt, Human
uccccugcccug

SEQ ID NO: 3689763 - RNA, 16 nt, Human
uccccugcccugcugc

SEQ ID NO: 3689764 - RNA, 13 nt, Human
uccccugcccugg

SEQ ID NO: 3689765 - RNA, 15 nt, Human
uccccugcccugguc

SEQ ID NO: 3689766 - RNA, 13 nt, Human
uccccugccucca

SEQ ID NO: 3689767 - RNA, 18 nt, Human
uccccugccugcccuggu

SEQ ID NO: 3689768 - RNA, 13 nt, Human
uccccugcuaccc

SEQ ID NO: 3689769 - RNA, 18 nt, Human
uccccugcugcaggggcu

SEQ ID NO: 3689770 - RNA, 23 nt, Human
uccccugcugcaggggcucugga

SEQ ID NO: 3689771 - RNA, 14 nt, Human
uccccugcugggug

SEQ ID NO: 3689772 - RNA, 20 nt, Human
uccccuggaacugucucuca

SEQ ID NO: 3689773 - RNA, 20 nt, Human
uccccuggaagcagugccca

SEQ ID NO: 3689774 - RNA, 17 nt, Human
uccccuggacugggagg

SEQ ID NO: 3689775 - RNA, 15 nt, Human
uccccuggcacuggc

SEQ ID NO: 3689776 - RNA, 22 nt, Human
uccccuguagagugggagcuga

SEQ ID NO: 3689777 - RNA, 14 nt, Human
uccccugugcaguc

SEQ ID NO: 3689778 - RNA, 20 nt, Human
uccccuguggggaucucagg

SEQ ID NO: 3689779 - RNA, 12 nt, Human
uccccuguguca

SEQ ID NO: 3689780 - RNA, 17 nt, Human
uccccuguuccccucuc

SEQ ID NO: 3689781 - RNA, 18 nt, Human
uccccuguuccccucucc

SEQ ID NO: 3689782 - RNA, 20 nt, Human
uccccuguuccccucucccu

SEQ ID NO: 3689783 - RNA, 15 nt, Human
uccccuguuuauuca

SEQ ID NO: 3689784 - RNA, 18 nt, Human
uccccuguuuguuucuga

SEQ ID NO: 3689785 - RNA, 21 nt, Human
uccccuguuuguuucugaaag

SEQ ID NO: 3689786 - RNA, 20 nt, Human
uccccuuauccucccuguaa

SEQ ID NO: 3689787 - RNA, 22 nt, Human
uccccuuauccucccuguaacu

SEQ ID NO: 3689788 - RNA, 18 nt, Human
uccccuuccacugagggc

SEQ ID NO: 3689789 - RNA, 19 nt, Human
uccccuuccaucccagagg

SEQ ID NO: 3689790 - RNA, 12 nt, Human
uccccuucccag

SEQ ID NO: 3689791 - RNA, 18 nt, Human
uccccuucccgugaccug

SEQ ID NO: 3689792 - RNA, 16 nt, Human
uccccuuccuaccacc

SEQ ID NO: 3689793 - RNA, 11 nt, Human
uccccuuccuu

SEQ ID NO: 3689794 - RNA, 22 nt, Human
uccccuucgcguauuucaggau

SEQ ID NO: 3689795 - RNA, 14 nt, Human
uccccuucuccccu

SEQ ID NO: 3689796 - RNA, 18 nt, Human
uccccuucuccccugcac

SEQ ID NO: 3689797 - RNA, 13 nt, Human
uccccuucucugu

SEQ ID NO: 3689798 - RNA, 16 nt, Human
uccccuucugaaucag

SEQ ID NO: 3689799 - RNA, 15 nt, Human
uccccuugagcugag

SEQ ID NO: 3689800 - RNA, 21 nt, Human
uccccuugaggucucagcccc

SEQ ID NO: 3689801 - RNA, 17 nt, Human
uccccuugccagcugcu

SEQ ID NO: 3689802 - RNA, 15 nt, Human
uccccuugcccaggg

SEQ ID NO: 3689803 - RNA, 17 nt, Human
uccccuugcccagggcu

SEQ ID NO: 3689804 - RNA, 24 nt, Human
uccccuugcccagggcucagccug

SEQ ID NO: 3689805 - RNA, 18 nt, Human
uccccuugcccuugcccu

SEQ ID NO: 3689806 - RNA, 23 nt, Human
uccccuugcccuugcccugaccu

SEQ ID NO: 3689807 - RNA, 12 nt, Human
uccccuugccug

SEQ ID NO: 3689808 - RNA, 17 nt, Human
uccccuuuauguacagg

SEQ ID NO: 3689809 - RNA, 12 nt, Human
uccccuuuccug

SEQ ID NO: 3689810 - RNA, 21 nt, Human
uccccuuuucuuuucuacccu

SEQ ID NO: 3689811 - RNA, 21 nt, Human
ucccgaagaauggagaggaac

SEQ ID NO: 3689812 - RNA, 20 nt, Human
ucccgaauagcugggacuac

SEQ ID NO: 3689813 - RNA, 15 nt, Human
ucccgagcuccucuu

SEQ ID NO: 3689814 - RNA, 18 nt, Human
ucccgaguacagucugua

SEQ ID NO: 3689815 - RNA, 17 nt, Human
ucccgaguagcugggac

SEQ ID NO: 3689816 - RNA, 21 nt, Human
ucccgaguagcugggauuaca

SEQ ID NO: 3689817 - RNA, 16 nt, Human
ucccgagucugggaca

SEQ ID NO: 3689818 - RNA, 15 nt, Human
ucccgauuguaacuc

SEQ ID NO: 3689819 - RNA, 22 nt, Human
ucccgcaaacccccuuugugcu

SEQ ID NO: 3689820 - RNA, 22 nt, Human
ucccgccccccacacuucccug

SEQ ID NO: 3689821 - RNA, 21 nt, Human
ucccgccucuucuucuucaga

SEQ ID NO: 3689822 - RNA, 21 nt, Human
ucccgcgcuccccgcgccccg

SEQ ID NO: 3689823 - RNA, 13 nt, Human
ucccgcucagccc

SEQ ID NO: 3689824 - RNA, 20 nt, Human
ucccgcucagcccucccugc

SEQ ID NO: 3689825 - RNA, 14 nt, Human
ucccggaggaaauc

SEQ ID NO: 3689826 - RNA, 16 nt, Human
ucccggagggcccuga

SEQ ID NO: 3689827 - RNA, 15 nt, Human
ucccggcucuguggg

SEQ ID NO: 3689828 - RNA, 18 nt, Human
ucccggcugcccuuucug

SEQ ID NO: 3689829 - RNA, 21 nt, Human
ucccgggacucacuggcagcc

SEQ ID NO: 3689830 - RNA, 15 nt, Human
ucccgggccagggcu

SEQ ID NO: 3689831 - RNA, 13 nt, Human
ucccgggcccucc

SEQ ID NO: 3689832 - RNA, 15 nt, Human
ucccgggcccucccu

SEQ ID NO: 3689833 - RNA, 18 nt, Human
ucccgggcccucccuugg

SEQ ID NO: 3689834 - RNA, 16 nt, Human
ucccggggccagcacu

SEQ ID NO: 3689835 - RNA, 15 nt, Human
ucccggguccuuggc

SEQ ID NO: 3689836 - RNA, 18 nt, Human
ucccgucccauauccugc

SEQ ID NO: 3689837 - RNA, 16 nt, Human
ucccguggaacguuuu

SEQ ID NO: 3689838 - RNA, 17 nt, Human
ucccguggccccagccu

SEQ ID NO: 3689839 - RNA, 19 nt, Human
ucccguggccccagccugg

SEQ ID NO: 3689840 - RNA, 21 nt, Human
ucccguggccccagccuggcc

SEQ ID NO: 3689841 - RNA, 23 nt, Human
ucccguggccccagccuggccca

SEQ ID NO: 3689842 - RNA, 16 nt, Human
ucccguuuuccccaug

SEQ ID NO: 3689843 - RNA, 18 nt, Human
ucccuaaaaacacagaca

SEQ ID NO: 3689844 - RNA, 16 nt, Human
ucccuaaaauacauuu

SEQ ID NO: 3689845 - RNA, 18 nt, Human
ucccuaaagaaaaaaaau

SEQ ID NO: 3689846 - RNA, 16 nt, Human
ucccuaacacuuaccc

SEQ ID NO: 3689847 - RNA, 17 nt, Human
ucccuaagccagccugg

SEQ ID NO: 3689848 - RNA, 14 nt, Human
ucccuaagccagcu

SEQ ID NO: 3689849 - RNA, 11 nt, Human
ucccuaauaaa

SEQ ID NO: 3689850 - RNA, 12 nt, Human
ucccuaauaaag

SEQ ID NO: 3689851 - RNA, 14 nt, Human
ucccuaauguguuu

SEQ ID NO: 3689852 - RNA, 13 nt, Human
ucccuacauuaaa

SEQ ID NO: 3689853 - RNA, 20 nt, Human
ucccuacccccuaagagcca

SEQ ID NO: 3689854 - RNA, 19 nt, Human
ucccuacccuaaccaaguu

SEQ ID NO: 3689855 - RNA, 15 nt, Human
ucccuaccucaggca

SEQ ID NO: 3689856 - RNA, 17 nt, Human
ucccuaccucaggcagg

SEQ ID NO: 3689857 - RNA, 19 nt, Human
ucccuaccuugaaagaaga

SEQ ID NO: 3689858 - RNA, 18 nt, Human
ucccuacugaagcccuug

SEQ ID NO: 3689859 - RNA, 16 nt, Human
ucccuacuuccuguga

SEQ ID NO: 3689860 - RNA, 17 nt, Human
ucccuacuuccugugac

SEQ ID NO: 3689861 - RNA, 22 nt, Human
ucccuagaaaacaaugcaaaac

SEQ ID NO: 3689862 - RNA, 20 nt, Human
ucccuagacuuuaggcuuuc

SEQ ID NO: 3689863 - RNA, 22 nt, Human
ucccuagacuuuaggcuuucag

SEQ ID NO: 3689864 - RNA, 15 nt, Human
ucccuagcagugaac

SEQ ID NO: 3689865 - RNA, 16 nt, Human
ucccuagccagcacuu

SEQ ID NO: 3689866 - RNA, 20 nt, Human
ucccuagccagcacuuguau

SEQ ID NO: 3689867 - RNA, 22 nt, Human
ucccuagccagcacuuguauau

SEQ ID NO: 3689868 - RNA, 23 nt, Human
ucccuagguguuuuguucaccau

SEQ ID NO: 3689869 - RNA, 16 nt, Human
ucccuaguaaaaauac

SEQ ID NO: 3689870 - RNA, 18 nt, Human
ucccuagucuucaagcag

SEQ ID NO: 3689871 - RNA, 20 nt, Human
ucccuagugacccggaggcc

SEQ ID NO: 3689872 - RNA, 17 nt, Human
ucccuauacugcuugga

SEQ ID NO: 3689873 - RNA, 20 nt, Human
ucccuaucacugaagcuuuu

SEQ ID NO: 3689874 - RNA, 21 nt, Human
ucccuaucacugaagcuuuuu

SEQ ID NO: 3689875 - RNA, 16 nt, Human
ucccuauccaaucaau

SEQ ID NO: 3689876 - RNA, 16 nt, Human
ucccuauuagagaaga

SEQ ID NO: 3689877 - RNA, 22 nt, Human
ucccuauuuuucucuccugucc

SEQ ID NO: 3689878 - RNA, 20 nt, Human
ucccucaaagcuuccauucc

SEQ ID NO: 3689879 - RNA, 22 nt, Human
ucccucaaagcuuccauuccac

SEQ ID NO: 3689880 - RNA, 13 nt, Human
ucccucaaaugac

SEQ ID NO: 3689881 - RNA, 14 nt, Human
ucccucacaagugg

SEQ ID NO: 3689882 - RNA, 22 nt, Human
ucccucacccacuuuggccucc

SEQ ID NO: 3689883 - RNA, 12 nt, Human
ucccucacccau

SEQ ID NO: 3689884 - RNA, 15 nt, Human
ucccucacccccucc

SEQ ID NO: 3689885 - RNA, 17 nt, Human
ucccucacccugagccc

SEQ ID NO: 3689886 - RNA, 21 nt, Human
ucccucacccugagccccuuc

SEQ ID NO: 3689887 - RNA, 13 nt, Human
ucccucaccugua

SEQ ID NO: 3689888 - RNA, 14 nt, Human
ucccucaccuguag

SEQ ID NO: 3689889 - RNA, 21 nt, Human
ucccucaccuuggcaccagac

SEQ ID NO: 3689890 - RNA, 22 nt, Human
ucccucacucgucucccccaac

SEQ ID NO: 3689891 - RNA, 15 nt, Human
ucccucagaaaauga

SEQ ID NO: 3689892 - RNA, 12 nt, Human
ucccucagacug

SEQ ID NO: 3689893 - RNA, 17 nt, Human
ucccucagccccucuug

SEQ ID NO: 3689894 - RNA, 22 nt, Human
ucccucauccucauacccaccc

SEQ ID NO: 3689895 - RNA, 16 nt, Human
ucccucaucugucccu

SEQ ID NO: 3689896 - RNA, 15 nt, Human
ucccucauuucagga

SEQ ID NO: 3689897 - RNA, 15 nt, Human
ucccuccaccccagg

SEQ ID NO: 3689898 - RNA, 17 nt, Human
ucccuccaccccaggac

SEQ ID NO: 3689899 - RNA, 18 nt, Human
ucccuccaccccaggacg

SEQ ID NO: 3689900 - RNA, 13 nt, Human
ucccuccaucccc

SEQ ID NO: 3689901 - RNA, 15 nt, Human
ucccucccaccucug

SEQ ID NO: 3689902 - RNA, 14 nt, Human
ucccucccaggacu

SEQ ID NO: 3689903 - RNA, 12 nt, Human
ucccuccccccc

SEQ ID NO: 3689904 - RNA, 16 nt, Human
ucccucccccccaugc

SEQ ID NO: 3689905 - RNA, 21 nt, Human
ucccucccccccaugcacugu

SEQ ID NO: 3689906 - RNA, 16 nt, Human
ucccuccccugcccuc

SEQ ID NO: 3689907 - RNA, 17 nt, Human
ucccuccccugcccugg

SEQ ID NO: 3689908 - RNA, 14 nt, Human
ucccuccccuucuc

SEQ ID NO: 3689909 - RNA, 14 nt, Human
ucccuccccuugcc

SEQ ID NO: 3689910 - RNA, 15 nt, Human
ucccuccccuugccu

SEQ ID NO: 3689911 - RNA, 20 nt, Human
ucccucccggcaugggaaag

SEQ ID NO: 3689912 - RNA, 22 nt, Human
ucccucccggcaugggaaagcc

SEQ ID NO: 3689913 - RNA, 17 nt, Human
ucccucccuccaccucc

SEQ ID NO: 3689914 - RNA, 15 nt, Human
ucccucccucuuucc

SEQ ID NO: 3689915 - RNA, 13 nt, Human
ucccucccuuggg

SEQ ID NO: 3689916 - RNA, 14 nt, Human
ucccuccgccccca

SEQ ID NO: 3689917 - RNA, 19 nt, Human
ucccuccgcccccagguag

SEQ ID NO: 3689918 - RNA, 20 nt, Human
ucccuccgcggcgggcccug

SEQ ID NO: 3689919 - RNA, 19 nt, Human
ucccuccggcuugaccugu

SEQ ID NO: 3689920 - RNA, 15 nt, Human
ucccuccgggaccug

SEQ ID NO: 3689921 - RNA, 18 nt, Human
ucccuccgggucuuccua

SEQ ID NO: 3689922 - RNA, 15 nt, Human
ucccuccucuguccc

SEQ ID NO: 3689923 - RNA, 21 nt, Human
ucccuccugccgacuccuggg

SEQ ID NO: 3689924 - RNA, 21 nt, Human
ucccuccuggugucaccccag

SEQ ID NO: 3689925 - RNA, 19 nt, Human
ucccucgcugcacaaauac

SEQ ID NO: 3689926 - RNA, 17 nt, Human
ucccucuaaugagacug

SEQ ID NO: 3689927 - RNA, 15 nt, Human
ucccucuacauggac

SEQ ID NO: 3689928 - RNA, 20 nt, Human
ucccucuaggcucugccuuc

SEQ ID NO: 3689929 - RNA, 15 nt, Human
ucccucuccagcagg

SEQ ID NO: 3689930 - RNA, 12 nt, Human
ucccucucccag

SEQ ID NO: 3689931 - RNA, 14 nt, Human
ucccucucccaggc

SEQ ID NO: 3689932 - RNA, 16 nt, Human
ucccucucccaggccc

SEQ ID NO: 3689933 - RNA, 20 nt, Human
ucccucucccaggccccaug

SEQ ID NO: 3689934 - RNA, 22 nt, Human
ucccucucggaaggcuggcugg

SEQ ID NO: 3689935 - RNA, 23 nt, Human
ucccucucggaaggcuggcuggg

SEQ ID NO: 3689936 - RNA, 13 nt, Human
ucccucucucuga

SEQ ID NO: 3689937 - RNA, 15 nt, Human
ucccucucucugacu

SEQ ID NO: 3689938 - RNA, 16 nt, Human
ucccucucucuggaaa

SEQ ID NO: 3689939 - RNA, 16 nt, Human
ucccucucucuucugc

SEQ ID NO: 3689940 - RNA, 19 nt, Human
ucccucucucuucugcucc

SEQ ID NO: 3689941 - RNA, 13 nt, Human
ucccucucuggag

SEQ ID NO: 3689942 - RNA, 13 nt, Human
ucccucugaccug

SEQ ID NO: 3689943 - RNA, 13 nt, Human
ucccucugcccca

SEQ ID NO: 3689944 - RNA, 13 nt, Human
ucccucugccggc

SEQ ID NO: 3689945 - RNA, 16 nt, Human
ucccucugccuguccc

SEQ ID NO: 3689946 - RNA, 20 nt, Human
ucccucugccugucccucuc

SEQ ID NO: 3689947 - RNA, 12 nt, Human
ucccucugcuca

SEQ ID NO: 3689948 - RNA, 14 nt, Human
ucccucugguccca

SEQ ID NO: 3689949 - RNA, 15 nt, Human
ucccucuucacuccc

SEQ ID NO: 3689950 - RNA, 19 nt, Human
ucccucuucucaagugccu

SEQ ID NO: 3689951 - RNA, 16 nt, Human
ucccucuucuuucaga

SEQ ID NO: 3689952 - RNA, 17 nt, Human
ucccucuuggucuuccc

SEQ ID NO: 3689953 - RNA, 13 nt, Human
ucccucuuguuuu

SEQ ID NO: 3689954 - RNA, 21 nt, Human
ucccucuuguuuuguuugucu

SEQ ID NO: 3689955 - RNA, 23 nt, Human
ucccucuuuggcuccccuguacc

SEQ ID NO: 3689956 - RNA, 15 nt, Human
ucccugaaaacccag

SEQ ID NO: 3689957 - RNA, 19 nt, Human
ucccugaaaacccagagag

SEQ ID NO: 3689958 - RNA, 20 nt, Human
ucccugaaaacccagagagg

SEQ ID NO: 3689959 - RNA, 21 nt, Human
ucccugaaacacgaaacuugu

SEQ ID NO: 3689960 - RNA, 14 nt, Human
ucccugaacuggga

SEQ ID NO: 3689961 - RNA, 17 nt, Human
ucccugaacugggaccu

SEQ ID NO: 3689962 - RNA, 15 nt, Human
ucccugaagccagcc

SEQ ID NO: 3689963 - RNA, 20 nt, Human
ucccugaaggaaccaaagcg

SEQ ID NO: 3689964 - RNA, 17 nt, Human
ucccugaaggccccgcc

SEQ ID NO: 3689965 - RNA, 21 nt, Human
ucccugaaggccccgcccagg

SEQ ID NO: 3689966 - RNA, 22 nt, Human
ucccugacacugcggggcuugg

SEQ ID NO: 3689967 - RNA, 23 nt, Human
ucccugacacugcggggcuuggc

SEQ ID NO: 3689968 - RNA, 14 nt, Human
ucccugacccugca

SEQ ID NO: 3689969 - RNA, 14 nt, Human
ucccugacucauuc

SEQ ID NO: 3689970 - RNA, 19 nt, Human
ucccugacucauucugaag

SEQ ID NO: 3689971 - RNA, 12 nt, Human
ucccugacuggg

SEQ ID NO: 3689972 - RNA, 15 nt, Human
ucccugacugggagu

SEQ ID NO: 3689973 - RNA, 23 nt, Human
ucccugacugggggcagacaugg

SEQ ID NO: 3689974 - RNA, 15 nt, Human
ucccugagacaggga

SEQ ID NO: 3689975 - RNA, 11 nt, Human
ucccugagcag

SEQ ID NO: 3689976 - RNA, 23 nt, Human
ucccugagcuagaacccucuguu

SEQ ID NO: 3689977 - RNA, 20 nt, Human
ucccugaggacugauuucag

SEQ ID NO: 3689978 - RNA, 14 nt, Human
ucccugaggauggg

SEQ ID NO: 3689979 - RNA, 23 nt, Human
ucccugaggaugggucagagcua

SEQ ID NO: 3689980 - RNA, 11 nt, Human
ucccugaggca

SEQ ID NO: 3689981 - RNA, 21 nt, Human
ucccugaggcagguccccaga

SEQ ID NO: 3689982 - RNA, 20 nt, Human
ucccugaggcuggacuccag

SEQ ID NO: 3689983 - RNA, 16 nt, Human
ucccugagucaccagg

SEQ ID NO: 3689984 - RNA, 14 nt, Human
ucccugauaaauau

SEQ ID NO: 3689985 - RNA, 17 nt, Human
ucccugaucccuuccac

SEQ ID NO: 3689986 - RNA, 16 nt, Human
ucccugauugaccugc

SEQ ID NO: 3689987 - RNA, 20 nt, Human
ucccugauugaccugcuccg

SEQ ID NO: 3689988 - RNA, 18 nt, Human
ucccugcacaagccaggg

SEQ ID NO: 3689989 - RNA, 20 nt, Human
ucccugcacagugacuucug

SEQ ID NO: 3689990 - RNA, 21 nt, Human
ucccugcacuaaagccagccu

SEQ ID NO: 3689991 - RNA, 23 nt, Human
ucccugcacuaaagccagccuga

SEQ ID NO: 3689992 - RNA, 20 nt, Human
ucccugcacuugcagacucu

SEQ ID NO: 3689993 - RNA, 23 nt, Human
ucccugcagaugccacccuagcc

SEQ ID NO: 3689994 - RNA, 21 nt, Human
ucccugcaucugaccagcagc

SEQ ID NO: 3689995 - RNA, 21 nt, Human
ucccugcauggcauccuccag

SEQ ID NO: 3689996 - RNA, 12 nt, Human
ucccugccagag

SEQ ID NO: 3689997 - RNA, 15 nt, Human
ucccugccagcaccc

SEQ ID NO: 3689998 - RNA, 18 nt, Human
ucccugccagcaccccca

SEQ ID NO: 3689999 - RNA, 12 nt, Human
ucccugcccagg

SEQ ID NO: 3690000 - RNA, 13 nt, Human
ucccugcccaggc

SEQ ID NO: 3690001 - RNA, 19 nt, Human
ucccugcccaggccggcca

SEQ ID NO: 3690002 - RNA, 17 nt, Human
ucccugcccccuccccu

SEQ ID NO: 3690003 - RNA, 20 nt, Human
ucccugccccucccuucaac

SEQ ID NO: 3690004 - RNA, 15 nt, Human
ucccugcccucaucu

SEQ ID NO: 3690005 - RNA, 16 nt, Human
ucccugccucaggccu

SEQ ID NO: 3690006 - RNA, 18 nt, Human
ucccugccuccugccggc

SEQ ID NO: 3690007 - RNA, 17 nt, Human
ucccugccucucaucaa

SEQ ID NO: 3690008 - RNA, 12 nt, Human
ucccugccuggc

SEQ ID NO: 3690009 - RNA, 15 nt, Human
ucccugccuggucac

SEQ ID NO: 3690010 - RNA, 15 nt, Human
ucccugcgccuuucc

SEQ ID NO: 3690011 - RNA, 18 nt, Human
ucccugcugcuccuagga

SEQ ID NO: 3690012 - RNA, 13 nt, Human
ucccugcuguccc

SEQ ID NO: 3690013 - RNA, 14 nt, Human
ucccugcuuccagg

SEQ ID NO: 3690014 - RNA, 23 nt, Human
ucccuggaaaccuuccacccagu

SEQ ID NO: 3690015 - RNA, 13 nt, Human
ucccuggaaggug

SEQ ID NO: 3690016 - RNA, 19 nt, Human
ucccuggagccagacucug

SEQ ID NO: 3690017 - RNA, 11 nt, Human
ucccuggagug

SEQ ID NO: 3690018 - RNA, 22 nt, Human
ucccuggaguguggcugaggag

SEQ ID NO: 3690019 - RNA, 19 nt, Human
ucccuggaucuaccuggag

SEQ ID NO: 3690020 - RNA, 21 nt, Human
ucccuggaucuaccuggaggg

SEQ ID NO: 3690021 - RNA, 22 nt, Human
ucccuggaucuaccuggaggga

SEQ ID NO: 3690022 - RNA, 20 nt, Human
ucccuggauuuuuaccaguc

SEQ ID NO: 3690023 - RNA, 14 nt, Human
ucccuggccaucuc

SEQ ID NO: 3690024 - RNA, 16 nt, Human
ucccuggccaucucug

SEQ ID NO: 3690025 - RNA, 15 nt, Human
ucccuggccuuucau

SEQ ID NO: 3690026 - RNA, 21 nt, Human
ucccuggcgcaggugggcugg

SEQ ID NO: 3690027 - RNA, 12 nt, Human
ucccuggcuccc

SEQ ID NO: 3690028 - RNA, 17 nt, Human
ucccuggcucccuccuc

SEQ ID NO: 3690029 - RNA, 15 nt, Human
ucccuggcucucaga

SEQ ID NO: 3690030 - RNA, 17 nt, Human
ucauugcuucuucugag

SEQ ID NO: 3690031 - RNA, 15 nt, Human
ucauugcuuuacugg

SEQ ID NO: 3690032 - RNA, 21 nt, Human
ucauuggaaauuuagcauugu

SEQ ID NO: 3690033 - RNA, 18 nt, Human
ucauuggaacaacugaua

SEQ ID NO: 3690034 - RNA, 21 nt, Human
ucauuguaaacaaacucuuga

SEQ ID NO: 3690035 - RNA, 13 nt, Human
ucauuguaaucac

SEQ ID NO: 3690036 - RNA, 19 nt, Human
ucauuguacaguuuguuua

SEQ ID NO: 3690037 - RNA, 15 nt, Human
ucauuguauauaugu

SEQ ID NO: 3690038 - RNA, 18 nt, Human
ucauuguaugauguguug

SEQ ID NO: 3690039 - RNA, 15 nt, Human
ucauuguccagagcu

SEQ ID NO: 3690040 - RNA, 20 nt, Human
ucauugucccucuucacucc

SEQ ID NO: 3690041 - RNA, 22 nt, Human
ucauugucucucacagauguga

SEQ ID NO: 3690042 - RNA, 23 nt, Human
ucauugucugugaagugagaccu

SEQ ID NO: 3690043 - RNA, 22 nt, Human
ucauugugguuauuuuuauaca

SEQ ID NO: 3690044 - RNA, 23 nt, Human
ucauugugguuauuuuuauacag

SEQ ID NO: 3690045 - RNA, 20 nt, Human
ucauuguguuaccuguagau

SEQ ID NO: 3690046 - RNA, 17 nt, Human
ucauuguucaauuccca

SEQ ID NO: 3690047 - RNA, 12 nt, Human
ucauuguuuuga

SEQ ID NO: 3690048 - RNA, 23 nt, Human
ucauuuaaaaaaaaaauuuguuu

SEQ ID NO: 3690049 - RNA, 22 nt, Human
ucauuuaaaaagguuuaaaacu

SEQ ID NO: 3690050 - RNA, 13 nt, Human
ucauuuaaaauga

SEQ ID NO: 3690051 - RNA, 20 nt, Human
ucauuuaauaauauacuugu

SEQ ID NO: 3690052 - RNA, 22 nt, Human
ucauuuacuaaacauaugauuu

SEQ ID NO: 3690053 - RNA, 16 nt, Human
ucauuuagaacuugca

SEQ ID NO: 3690054 - RNA, 22 nt, Human
ucauuuagaacuugcagcugau

SEQ ID NO: 3690055 - RNA, 12 nt, Human
ucauuuaucuau

SEQ ID NO: 3690056 - RNA, 21 nt, Human
ucauuuaucuauaauuuaccu

SEQ ID NO: 3690057 - RNA, 16 nt, Human
ucauuuauuuuaagca

SEQ ID NO: 3690058 - RNA, 19 nt, Human
ucauuucacauuaaugguc

SEQ ID NO: 3690059 - RNA, 16 nt, Human
ucauuucaccccuccc

SEQ ID NO: 3690060 - RNA, 18 nt, Human
ucauuucaccugcugcuu

SEQ ID NO: 3690061 - RNA, 21 nt, Human
ucauuucagaaguuaguuugu

SEQ ID NO: 3690062 - RNA, 15 nt, Human
ucauuucaggagcag

SEQ ID NO: 3690063 - RNA, 12 nt, Human
ucauuucaggau

SEQ ID NO: 3690064 - RNA, 18 nt, Human
ucauuucauccuuucacu

SEQ ID NO: 3690065 - RNA, 17 nt, Human
ucauuucaucucauuua

SEQ ID NO: 3690066 - RNA, 20 nt, Human
ucauuucauguccuguguca

SEQ ID NO: 3690067 - RNA, 23 nt, Human
ucauuucauguccugugucaguu

SEQ ID NO: 3690068 - RNA, 13 nt, Human
ucauuucauucca

SEQ ID NO: 3690069 - RNA, 15 nt, Human
ucauuucauuccauu

SEQ ID NO: 3690070 - RNA, 16 nt, Human
ucauuucauuccauug

SEQ ID NO: 3690071 - RNA, 16 nt, Human
ucauuucauuccuaac

SEQ ID NO: 3690072 - RNA, 15 nt, Human
ucauuucauuuccua

SEQ ID NO: 3690073 - RNA, 12 nt, Human
ucauuuccaugu

SEQ ID NO: 3690074 - RNA, 13 nt, Human
ucauuuccugccc

SEQ ID NO: 3690075 - RNA, 23 nt, Human
ucauuuccugcccuuccucaguu

SEQ ID NO: 3690076 - RNA, 17 nt, Human
ucauuucuaaaagaaua

SEQ ID NO: 3690077 - RNA, 15 nt, Human
ucauuucuacuguga

SEQ ID NO: 3690078 - RNA, 23 nt, Human
ucauuucucacuguguacauaau

SEQ ID NO: 3690079 - RNA, 13 nt, Human
ucauuucuugggc

SEQ ID NO: 3690080 - RNA, 23 nt, Human
ucauuucuuuuugggagagacuu

SEQ ID NO: 3690081 - RNA, 16 nt, Human
ucauuugagucucuua

SEQ ID NO: 3690082 - RNA, 19 nt, Human
ucauuugcccuuaaggaca

SEQ ID NO: 3690083 - RNA, 13 nt, Human
ucauuugcuuuuu

SEQ ID NO: 3690084 - RNA, 22 nt, Human
ucauuuggaggaaaaaaagcau

SEQ ID NO: 3690085 - RNA, 16 nt, Human
ucauuuguaugucaaa

SEQ ID NO: 3690086 - RNA, 21 nt, Human
ucauuuguggugauauagaau

SEQ ID NO: 3690087 - RNA, 19 nt, Human
ucauuuguuauucuuaaga

SEQ ID NO: 3690088 - RNA, 16 nt, Human
ucauuuguugugaugu

SEQ ID NO: 3690089 - RNA, 12 nt, Human
ucauuuguuuaa

SEQ ID NO: 3690090 - RNA, 17 nt, Human
ucauuuguuuaaaaagg

SEQ ID NO: 3690091 - RNA, 15 nt, Human
ucauuuguuuuucuc

SEQ ID NO: 3690092 - RNA, 13 nt, Human
ucauuuuaaaaag

SEQ ID NO: 3690093 - RNA, 12 nt, Human
ucauuuuaaugu

SEQ ID NO: 3690094 - RNA, 17 nt, Human
ucauuuuaauguaaaga

SEQ ID NO: 3690095 - RNA, 16 nt, Human
ucauuuuacaguaucu

SEQ ID NO: 3690096 - RNA, 19 nt, Human
ucauuuuacaguuacuuuu

SEQ ID NO: 3690097 - RNA, 18 nt, Human
ucauuuuacccuuggcuc

SEQ ID NO: 3690098 - RNA, 17 nt, Human
ucauuuuauaugucaaa

SEQ ID NO: 3690099 - RNA, 18 nt, Human
ucauuuuauaugucaaag

SEQ ID NO: 3690100 - RNA, 21 nt, Human
ucauuuuauaugucaaagcag

SEQ ID NO: 3690101 - RNA, 16 nt, Human
ucauuuuauauugaaa

SEQ ID NO: 3690102 - RNA, 17 nt, Human
ucauuuuauauugaaaa

SEQ ID NO: 3690103 - RNA, 22 nt, Human
ucauuuucaagacugaauucca

SEQ ID NO: 3690104 - RNA, 11 nt, Human
ucauuuucauu

SEQ ID NO: 3690105 - RNA, 19 nt, Human
ucauuuuccccccacucuc

SEQ ID NO: 3690106 - RNA, 23 nt, Human
ucauuuucuagauacaauaaauu

SEQ ID NO: 3690107 - RNA, 13 nt, Human
ucauuuucucuuu

SEQ ID NO: 3690108 - RNA, 21 nt, Human
ucauuuucugccuaucuucuu

SEQ ID NO: 3690109 - RNA, 21 nt, Human
ucauuuucuuaucuucugcaa

SEQ ID NO: 3690110 - RNA, 16 nt, Human
ucauuuucuuuuuuaa

SEQ ID NO: 3690111 - RNA, 16 nt, Human
ucauuuugaaauuguu

SEQ ID NO: 3690112 - RNA, 16 nt, Human
ucauuuugaagcuaau

SEQ ID NO: 3690113 - RNA, 18 nt, Human
ucauuuugaagcuaauua

SEQ ID NO: 3690114 - RNA, 12 nt, Human
ucauuuugaggg

SEQ ID NO: 3690115 - RNA, 17 nt, Human
ucauuuugcauucaaau

SEQ ID NO: 3690116 - RNA, 13 nt, Human
ucauuuuuauagc

SEQ ID NO: 3690117 - RNA, 15 nt, Human
ucauuuuuccguaaa

SEQ ID NO: 3690118 - RNA, 21 nt, Human
ucauuuuugaaacugcauuug

SEQ ID NO: 3690119 - RNA, 16 nt, Human
ucauuuuuuaaaaaag

SEQ ID NO: 3690120 - RNA, 23 nt, Human
ucauuuuuuccuguuugggaaga

SEQ ID NO: 3690121 - RNA, 18 nt, Human
ucauuuuuuuccaggcug

SEQ ID NO: 3690122 - RNA, 19 nt, Human
uccaaaaagauuuucagaa

SEQ ID NO: 3690123 - RNA, 20 nt, Human
uccaaaaagauuuucagaaa

SEQ ID NO: 3690124 - RNA, 13 nt, Human
uccaaaaauuauu

SEQ ID NO: 3690125 - RNA, 21 nt, Human
uccaaaaccgccagcucuguu

SEQ ID NO: 3690126 - RNA, 15 nt, Human
uccaaaacuccugcc

SEQ ID NO: 3690127 - RNA, 14 nt, Human
uccaaaagaaaaac

SEQ ID NO: 3690128 - RNA, 21 nt, Human
uccaaaagaagcccccagcua

SEQ ID NO: 3690129 - RNA, 19 nt, Human
uccaaaagauugcugaaau

SEQ ID NO: 3690130 - RNA, 15 nt, Human
uccaaaauaauuuua

SEQ ID NO: 3690131 - RNA, 18 nt, Human
uccaaaaucuugaucagu

SEQ ID NO: 3690132 - RNA, 15 nt, Human
uccaaaaugugccua

SEQ ID NO: 3690133 - RNA, 19 nt, Human
uccaaaauguguauuucuu

SEQ ID NO: 3690134 - RNA, 15 nt, Human
uccaaaauuuuucaa

SEQ ID NO: 3690135 - RNA, 14 nt, Human
uccaaacacaggca

SEQ ID NO: 3690136 - RNA, 19 nt, Human
uccaaacauguauuuaugu

SEQ ID NO: 3690137 - RNA, 22 nt, Human
uccaaaccacuuuuugcagcuu

SEQ ID NO: 3690138 - RNA, 21 nt, Human
uccaaaccuccuguuagcugu

SEQ ID NO: 3690139 - RNA, 22 nt, Human
uccaaaccuucacacacagacu

SEQ ID NO: 3690140 - RNA, 19 nt, Human
uccaaacuaccuuccaguu

SEQ ID NO: 3690141 - RNA, 19 nt, Human
uccaaacucuucccucucu

SEQ ID NO: 3690142 - RNA, 18 nt, Human
uccaaacuuggauuuuug

SEQ ID NO: 3690143 - RNA, 22 nt, Human
uccaaacuuggauuuuugacuc

SEQ ID NO: 3690144 - RNA, 14 nt, Human
uccaaagaaaugua

SEQ ID NO: 3690145 - RNA, 12 nt, Human
uccaaagaaugu

SEQ ID NO: 3690146 - RNA, 19 nt, Human
uccaaagaggcugccccuc

SEQ ID NO: 3690147 - RNA, 23 nt, Human
uccaaagaguagaauugcauuga

SEQ ID NO: 3690148 - RNA, 19 nt, Human
uccaaagcacauugaaaga

SEQ ID NO: 3690149 - RNA, 17 nt, Human
uccaaagccaaugugaa

SEQ ID NO: 3690150 - RNA, 15 nt, Human
uccaaagcuuuccug

SEQ ID NO: 3690151 - RNA, 23 nt, Human
uccaaaggaaucuccaguuuuca

SEQ ID NO: 3690152 - RNA, 15 nt, Human
uccaaaggaggcugg

SEQ ID NO: 3690153 - RNA, 17 nt, Human
uccaaagucucuaauuc

SEQ ID NO: 3690154 - RNA, 18 nt, Human
uccaaagucucuaauucu

SEQ ID NO: 3690155 - RNA, 16 nt, Human
uccaaauaauaaaguc

SEQ ID NO: 3690156 - RNA, 20 nt, Human
uccaaaugaauguugucugu

SEQ ID NO: 3690157 - RNA, 16 nt, Human
uccaaaugcaauuuga

SEQ ID NO: 3690158 - RNA, 19 nt, Human
uccaaaugcccagcuuaaa

SEQ ID NO: 3690159 - RNA, 21 nt, Human
uccaaauggagaagcugcagg

SEQ ID NO: 3690160 - RNA, 20 nt, Human
uccaaauguccuccagaagc

SEQ ID NO: 3690161 - RNA, 22 nt, Human
uccaaauguccuccagaagccu

SEQ ID NO: 3690162 - RNA, 15 nt, Human
uccaaauuauuucuu

SEQ ID NO: 3690163 - RNA, 13 nt, Human
uccaaauucacaa

SEQ ID NO: 3690164 - RNA, 14 nt, Human
uccaaauugugcuu

SEQ ID NO: 3690165 - RNA, 21 nt, Human
uccaaauuuuuuuuuaaagca

SEQ ID NO: 3690166 - RNA, 18 nt, Human
uccaacaaaggguuuuaa

SEQ ID NO: 3690167 - RNA, 15 nt, Human
uccaacacaaggcuc

SEQ ID NO: 3690168 - RNA, 23 nt, Human
uccaacacaaggcuccaagaccu

SEQ ID NO: 3690169 - RNA, 17 nt, Human
uccaacaccaagcacag

SEQ ID NO: 3690170 - RNA, 17 nt, Human
uccaacaccacagacac

SEQ ID NO: 3690171 - RNA, 18 nt, Human
uccaacaccacagacaca

SEQ ID NO: 3690172 - RNA, 17 nt, Human
uccaacagaagaacugu

SEQ ID NO: 3690173 - RNA, 16 nt, Human
uccaacaggagcuggg

SEQ ID NO: 3690174 - RNA, 14 nt, Human
uccaaccagaccug

SEQ ID NO: 3690175 - RNA, 15 nt, Human
uccaaccagaccugg

SEQ ID NO: 3690176 - RNA, 17 nt, Human
uccaaccagaccuggaa

SEQ ID NO: 3690177 - RNA, 16 nt, Human
uccaaccauuuucauu

SEQ ID NO: 3690178 - RNA, 14 nt, Human
uccaaccccaacuc

SEQ ID NO: 3690179 - RNA, 14 nt, Human
uccagacuuccuug

SEQ ID NO: 3690180 - RNA, 14 nt, Human
uccagagacuggga

SEQ ID NO: 3690181 - RNA, 19 nt, Human
uccagagagagaagugccc

SEQ ID NO: 3690182 - RNA, 21 nt, Human
uccagagagagaagugccccu

SEQ ID NO: 3690183 - RNA, 23 nt, Human
uccagagagagaagugccccugc

SEQ ID NO: 3690184 - RNA, 18 nt, Human
uccagagaguccucugga

SEQ ID NO: 3690185 - RNA, 20 nt, Human
uccagagcggaggcugugug

SEQ ID NO: 3690186 - RNA, 13 nt, Human
uccagagcugcca

SEQ ID NO: 3690187 - RNA, 20 nt, Human
uccagaggcuauuauuuuca

SEQ ID NO: 3690188 - RNA, 12 nt, Human
uccagagggcac

SEQ ID NO: 3690189 - RNA, 18 nt, Human
uccagagucccugccugg

SEQ ID NO: 3690190 - RNA, 19 nt, Human
uccagagucccugccugga

SEQ ID NO: 3690191 - RNA, 20 nt, Human
uccagagucccugccuggac

SEQ ID NO: 3690192 - RNA, 15 nt, Human
uccagaucacugcca

SEQ ID NO: 3690193 - RNA, 16 nt, Human
uccagaucacugccac

SEQ ID NO: 3690194 - RNA, 17 nt, Human
uccagauccucucuggg

SEQ ID NO: 3690195 - RNA, 20 nt, Human
uccagauccucucuggggcu

SEQ ID NO: 3690196 - RNA, 14 nt, Human
uccagauccuggaa

SEQ ID NO: 3690197 - RNA, 17 nt, Human
uccagauccuggaaauc

SEQ ID NO: 3690198 - RNA, 15 nt, Human
uccagaucugcaccg

SEQ ID NO: 3690199 - RNA, 15 nt, Human
uccagaugcagggca

SEQ ID NO: 3690200 - RNA, 18 nt, Human
uccagaugcagggcaguc

SEQ ID NO: 3690201 - RNA, 17 nt, Human
uccagauggucauccag

SEQ ID NO: 3690202 - RNA, 18 nt, Human
uccagauggucauccaga

SEQ ID NO: 3690203 - RNA, 17 nt, Human
uccagaugugaugcuug

SEQ ID NO: 3690204 - RNA, 23 nt, Human
uccagauuaucuauuugugugug

SEQ ID NO: 3690205 - RNA, 12 nt, Human
uccagauuuuua

SEQ ID NO: 3690206 - RNA, 20 nt, Human
uccagcaacacagccugggc

SEQ ID NO: 3690207 - RNA, 21 nt, Human
uccagcaauucuccugccuca

SEQ ID NO: 3690208 - RNA, 14 nt, Human
uccagcaccacacu

SEQ ID NO: 3690209 - RNA, 14 nt, Human
uccagcaccuugug

SEQ ID NO: 3690210 - RNA, 22 nt, Human
uccagcagauuuccagccuucu

SEQ ID NO: 3690211 - RNA, 15 nt, Human
uccagcaggcccaug

SEQ ID NO: 3690212 - RNA, 23 nt, Human
uccagcagucucugccuugccuu

SEQ ID NO: 3690213 - RNA, 15 nt, Human
uccagcauucccagg

SEQ ID NO: 3690214 - RNA, 16 nt, Human
uccagccaaccccugu

SEQ ID NO: 3690215 - RNA, 14 nt, Human
uccagccagcgccu

SEQ ID NO: 3690216 - RNA, 21 nt, Human
uccagccagcgccucccucca

SEQ ID NO: 3690217 - RNA, 20 nt, Human
uccagccaucaagagacuga

SEQ ID NO: 3690218 - RNA, 11 nt, Human
uccagcccauc

SEQ ID NO: 3690219 - RNA, 18 nt, Human
uccagcccaucucggagc

SEQ ID NO: 3690220 - RNA, 19 nt, Human
uccagcccaucucggagca

SEQ ID NO: 3690221 - RNA, 12 nt, Human
uccagcccauug

SEQ ID NO: 3690222 - RNA, 23 nt, Human
uccagccccucuggucgcuccug

SEQ ID NO: 3690223 - RNA, 21 nt, Human
uccagccccucuuggagaagu

SEQ ID NO: 3690224 - RNA, 12 nt, Human
uccagccccugg

SEQ ID NO: 3690225 - RNA, 17 nt, Human
uccagccccuucucaga

SEQ ID NO: 3690226 - RNA, 18 nt, Human
uccagccccuucucagaa

SEQ ID NO: 3690227 - RNA, 15 nt, Human
uccagccccuuucca

SEQ ID NO: 3690228 - RNA, 16 nt, Human
uccagccccuuuccaa

SEQ ID NO: 3690229 - RNA, 17 nt, Human
uccagccccuuuccaaa

SEQ ID NO: 3690230 - RNA, 18 nt, Human
uccagccccuuuccaaaa

SEQ ID NO: 3690231 - RNA, 14 nt, Human
uccagcccgggagc

SEQ ID NO: 3690232 - RNA, 18 nt, Human
uccagcccgggagccuag

SEQ ID NO: 3690233 - RNA, 19 nt, Human
uccagcccuggcugaagga

SEQ ID NO: 3690234 - RNA, 21 nt, Human
uccagccgccauugccaccag

SEQ ID NO: 3690235 - RNA, 23 nt, Human
uccagccgccauugccaccagga

SEQ ID NO: 3690236 - RNA, 12 nt, Human
uccagccuagag

SEQ ID NO: 3690237 - RNA, 15 nt, Human
uccagccucuccccu

SEQ ID NO: 3690238 - RNA, 12 nt, Human
uccagccucugu

SEQ ID NO: 3690239 - RNA, 21 nt, Human
uccagccucuguuccccuagu

SEQ ID NO: 3690240 - RNA, 11 nt, Human
uccagccugac

SEQ ID NO: 3690241 - RNA, 13 nt, Human
uccagccugagca

SEQ ID NO: 3690242 - RNA, 20 nt, Human
uccagccugagcgacaguga

SEQ ID NO: 3690243 - RNA, 13 nt, Human
uccagccuggacc

SEQ ID NO: 3690244 - RNA, 19 nt, Human
uccagccuggacccccagc

SEQ ID NO: 3690245 - RNA, 14 nt, Human
uccagccuggagau

SEQ ID NO: 3690246 - RNA, 13 nt, Human
uccagccuggcuc

SEQ ID NO: 3690247 - RNA, 13 nt, Human
uccagccugggug

SEQ ID NO: 3690248 - RNA, 20 nt, Human
uccagcuauaacaguaggga

SEQ ID NO: 3690249 - RNA, 14 nt, Human
uccagcucaccagc

SEQ ID NO: 3690250 - RNA, 18 nt, Human
uccagcucaccagcccca

SEQ ID NO: 3690251 - RNA, 21 nt, Human
uccagcucaccccccacacuc

SEQ ID NO: 3690252 - RNA, 16 nt, Human
uccagcucagaaccca

SEQ ID NO: 3690253 - RNA, 17 nt, Human
uccagcucagaacccag

SEQ ID NO: 3690254 - RNA, 21 nt, Human
uccagcucagaacccagggcu

SEQ ID NO: 3690255 - RNA, 16 nt, Human
uccagcucauucauuu

SEQ ID NO: 3690256 - RNA, 18 nt, Human
uccagcuccaaccugcaa

SEQ ID NO: 3690257 - RNA, 19 nt, Human
uccagcuccaaccugcaaa

SEQ ID NO: 3690258 - RNA, 22 nt, Human
uccagcuccaagaccuguuggu

SEQ ID NO: 3690259 - RNA, 20 nt, Human
uccagcucuggaggggaggg

SEQ ID NO: 3690260 - RNA, 15 nt, Human
uccagcucuggcaug

SEQ ID NO: 3690261 - RNA, 14 nt, Human
uccagcugacuaaa

SEQ ID NO: 3690262 - RNA, 14 nt, Human
uccagcugcaccag

SEQ ID NO: 3690263 - RNA, 16 nt, Human
uccagcugcaccagag

SEQ ID NO: 3690264 - RNA, 22 nt, Human
uccagcugccccggccccuccc

SEQ ID NO: 3690265 - RNA, 17 nt, Human
uccagcugccuauugau

SEQ ID NO: 3690266 - RNA, 12 nt, Human
uccagcuggccu

SEQ ID NO: 3690267 - RNA, 13 nt, Human
uccagcuggccug

SEQ ID NO: 3690268 - RNA, 19 nt, Human
uccagcuggguuggaaaac

SEQ ID NO: 3690269 - RNA, 16 nt, Human
uccagcugucccccca

SEQ ID NO: 3690270 - RNA, 19 nt, Human
uccagcuucugguacucuc

SEQ ID NO: 3690271 - RNA, 15 nt, Human
uccagcuugcucuuc

SEQ ID NO: 3690272 - RNA, 19 nt, Human
uccagcuugcucuucagug

SEQ ID NO: 3690273 - RNA, 17 nt, Human
uccagcuuguggagccc

SEQ ID NO: 3690274 - RNA, 23 nt, Human
uccagcuuguggagccccacacu

SEQ ID NO: 3690275 - RNA, 17 nt, Human
uccagcuuuccuguauu

SEQ ID NO: 3690276 - RNA, 23 nt, Human
uccaggaaaaaggacaggcagaa

SEQ ID NO: 3690277 - RNA, 17 nt, Human
uccaggaaaugugcaca

SEQ ID NO: 3690278 - RNA, 20 nt, Human
uccaggaaggcggggcuuca

SEQ ID NO: 3690279 - RNA, 15 nt, Human
uccaggacccugcca

SEQ ID NO: 3690280 - RNA, 18 nt, Human
uccaggacccugccaggc

SEQ ID NO: 3690281 - RNA, 21 nt, Human
uccaggacccugccaggcaca

SEQ ID NO: 3690282 - RNA, 22 nt, Human
uccaggacccugccaggcacag

SEQ ID NO: 3690283 - RNA, 22 nt, Human
uccaggacuguuucaaacaugc

SEQ ID NO: 3690284 - RNA, 13 nt, Human
uccaggagaggag

SEQ ID NO: 3690285 - RNA, 14 nt, Human
uccaggagcagcca

SEQ ID NO: 3690286 - RNA, 18 nt, Human
uccaggagcagccacauu

SEQ ID NO: 3690287 - RNA, 22 nt, Human
uccaggagcagccacauuccug

SEQ ID NO: 3690288 - RNA, 13 nt, Human
uccaggagccugg

SEQ ID NO: 3690289 - RNA, 15 nt, Human
uccaggagccugugc

SEQ ID NO: 3690290 - RNA, 18 nt, Human
uccaggagccugugccuc

SEQ ID NO: 3690291 - RNA, 20 nt, Human
uccaggagcuccaguguccu

SEQ ID NO: 3690292 - RNA, 24 nt, Human
uccaggagcuccaguguccugagc

SEQ ID NO: 3690293 - RNA, 22 nt, Human
uccaggaugcuaacaucuaaaa

SEQ ID NO: 3690294 - RNA, 15 nt, Human
uccaggauuccucuu

SEQ ID NO: 3690295 - RNA, 19 nt, Human
uccaggauugaagagcauu

SEQ ID NO: 3690296 - RNA, 15 nt, Human
uccaggcaccaucuc

SEQ ID NO: 3690297 - RNA, 15 nt, Human
uccaggcacccuucu

SEQ ID NO: 3690298 - RNA, 11 nt, Human
uccaugaaaac

SEQ ID NO: 3690299 - RNA, 19 nt, Human
uccaugaaaacguuuuauu

SEQ ID NO: 3690300 - RNA, 12 nt, Human
uccaugaaaaug

SEQ ID NO: 3690301 - RNA, 17 nt, Human
uccaugaaagaacuuaa

SEQ ID NO: 3690302 - RNA, 23 nt, Human
uccaugaagaccacauccacaca

SEQ ID NO: 3690303 - RNA, 13 nt, Human
uccaugaagaugu

SEQ ID NO: 3690304 - RNA, 18 nt, Human
uccaugaaucgcuucucu

SEQ ID NO: 3690305 - RNA, 12 nt, Human
uccaugaaugua

SEQ ID NO: 3690306 - RNA, 13 nt, Human
uccaugaauguau

SEQ ID NO: 3690307 - RNA, 14 nt, Human
uccaugaauguauc

SEQ ID NO: 3690308 - RNA, 20 nt, Human
uccaugacaggccugaagau

SEQ ID NO: 3690309 - RNA, 15 nt, Human
uccaugacaucaaga

SEQ ID NO: 3690310 - RNA, 13 nt, Human
uccaugacugcuu

SEQ ID NO: 3690311 - RNA, 20 nt, Human
uccaugacugcuugcccuaa

SEQ ID NO: 3690312 - RNA, 16 nt, Human
uccaugaguccccugu

SEQ ID NO: 3690313 - RNA, 17 nt, Human
uccaugaguccccuguu

SEQ ID NO: 3690314 - RNA, 16 nt, Human
uccaugaugauaguug

SEQ ID NO: 3690315 - RNA, 13 nt, Human
uccaugcaccaaa

SEQ ID NO: 3690316 - RNA, 16 nt, Human
uccaugccugagggug

SEQ ID NO: 3690317 - RNA, 21 nt, Human
uccaugccugaggguggagac

SEQ ID NO: 3690318 - RNA, 21 nt, Human
uccaugcguguuucugacucu

SEQ ID NO: 3690319 - RNA, 13 nt, Human
uccaugcuccuca

SEQ ID NO: 3690320 - RNA, 15 nt, Human
uccauggaaugcuug

SEQ ID NO: 3690321 - RNA, 22 nt, Human
uccauggaaugcuugaaaaaug

SEQ ID NO: 3690322 - RNA, 20 nt, Human
uccauggcuuccuccucccu

SEQ ID NO: 3690323 - RNA, 15 nt, Human
uccaugggcagagcc

SEQ ID NO: 3690324 - RNA, 17 nt, Human
uccaugggcagagccca

SEQ ID NO: 3690325 - RNA, 23 nt, Human
uccaugggcagagcccaagggaa

SEQ ID NO: 3690326 - RNA, 20 nt, Human
uccaugggccauaugaaaag

SEQ ID NO: 3690327 - RNA, 15 nt, Human
uccauggugccucug

SEQ ID NO: 3690328 - RNA, 22 nt, Human
uccauguaacugccuagaaaca

SEQ ID NO: 3690329 - RNA, 13 nt, Human
uccauguacugua

SEQ ID NO: 3690330 - RNA, 16 nt, Human
uccauguagaagccac

SEQ ID NO: 3690331 - RNA, 19 nt, Human
uccauguagccuuuaauau

SEQ ID NO: 3690332 - RNA, 15 nt, Human
uccauguaugcauaa

SEQ ID NO: 3690333 - RNA, 20 nt, Human
uccaugucaagauucagcua

SEQ ID NO: 3690334 - RNA, 23 nt, Human
uccaugucaagauucagcuagug

SEQ ID NO: 3690335 - RNA, 23 nt, Human
uccaugucgccucugcauucagg

SEQ ID NO: 3690336 - RNA, 14 nt, Human
uccaugucggccuc

SEQ ID NO: 3690337 - RNA, 21 nt, Human
uccaugugaggguuuucagca

SEQ ID NO: 3690338 - RNA, 14 nt, Human
uccaugugcccagu

SEQ ID NO: 3690339 - RNA, 16 nt, Human
uccaugugcccaguua

SEQ ID NO: 3690340 - RNA, 19 nt, Human
uccaugugcccccucuacc

SEQ ID NO: 3690341 - RNA, 22 nt, Human
uccauguggagaaaggagugaa

SEQ ID NO: 3690342 - RNA, 13 nt, Human
uccauguuuguaa

SEQ ID NO: 3690343 - RNA, 16 nt, Human
uccauguuuguaaaac

SEQ ID NO: 3690344 - RNA, 19 nt, Human
uccauguuuguaaaacuac

SEQ ID NO: 3690345 - RNA, 20 nt, Human
uccauuaacuuagcaugugu

SEQ ID NO: 3690346 - RNA, 13 nt, Human
uccauuaauuuaa

SEQ ID NO: 3690347 - RNA, 15 nt, Human
uccauuaauuuaaau

SEQ ID NO: 3690348 - RNA, 19 nt, Human
uccauuaauuuaaaugauu

SEQ ID NO: 3690349 - RNA, 21 nt, Human
uccauuaauuuaaaugauuua

SEQ ID NO: 3690350 - RNA, 22 nt, Human
uccauuaauuuaaaugauuuaa

SEQ ID NO: 3690351 - RNA, 15 nt, Human
uccauuaggccagca

SEQ ID NO: 3690352 - RNA, 14 nt, Human
uccauuauuuauau

SEQ ID NO: 3690353 - RNA, 22 nt, Human
uccauucacaguucuuugggcc

SEQ ID NO: 3690354 - RNA, 22 nt, Human
uccauuccacacagaaugcaac

SEQ ID NO: 3690355 - RNA, 13 nt, Human
uccauuccucagg

SEQ ID NO: 3690356 - RNA, 18 nt, Human
uccauucucacagguccc

SEQ ID NO: 3690357 - RNA, 15 nt, Human
uccauucucccaggu

SEQ ID NO: 3690358 - RNA, 20 nt, Human
uccauucugcuccuucccca

SEQ ID NO: 3690359 - RNA, 13 nt, Human
uccauucuggaag

SEQ ID NO: 3690360 - RNA, 14 nt, Human
uccauucuggaagu

SEQ ID NO: 3690361 - RNA, 19 nt, Human
uccauucuuucugauaacu

SEQ ID NO: 3690362 - RNA, 21 nt, Human
uccauugaagccgacucuggc

SEQ ID NO: 3690363 - RNA, 22 nt, Human
uccauugaagccgacucuggcc

SEQ ID NO: 3690364 - RNA, 15 nt, Human
uccauugacauguac

SEQ ID NO: 3690365 - RNA, 18 nt, Human
uccauugccuagcucuuu

SEQ ID NO: 3690366 - RNA, 15 nt, Human
uccauugguccaaga

SEQ ID NO: 3690367 - RNA, 18 nt, Human
uccauugguccaagauuc

SEQ ID NO: 3690368 - RNA, 19 nt, Human
uccauugguccaagauucc

SEQ ID NO: 3690369 - RNA, 14 nt, Human
uccauugugugagu

SEQ ID NO: 3690370 - RNA, 14 nt, Human
uccauuguuugaaa

SEQ ID NO: 3690371 - RNA, 23 nt, Human
uccauuuaauggggugcaccugu

SEQ ID NO: 3690372 - RNA, 22 nt, Human
uccauuuacaaacuacuugauu

SEQ ID NO: 3690373 - RNA, 17 nt, Human
uccauuuacuuaagacu

SEQ ID NO: 3690374 - RNA, 19 nt, Human
uccauuuacuuaagacuua

SEQ ID NO: 3690375 - RNA, 14 nt, Human
uccauuuauauaug

SEQ ID NO: 3690376 - RNA, 19 nt, Human
uccauuuauauaugaaaac

SEQ ID NO: 3690377 - RNA, 14 nt, Human
uccauuucacuggc

SEQ ID NO: 3690378 - RNA, 23 nt, Human
uccauuucaucuauuucugagaa

SEQ ID NO: 3690379 - RNA, 14 nt, Human
uccauuucuaauua

SEQ ID NO: 3690380 - RNA, 12 nt, Human
uccauuucucuc

SEQ ID NO: 3690381 - RNA, 12 nt, Human
uccauuugagaa

SEQ ID NO: 3690382 - RNA, 13 nt, Human
uccauuugagaaa

SEQ ID NO: 3690383 - RNA, 12 nt, Human
uccauuugagga

SEQ ID NO: 3690384 - RNA, 16 nt, Human
uccauuugcauuuguu

SEQ ID NO: 3690385 - RNA, 20 nt, Human
uccauuuggaaaucuuuaaa

SEQ ID NO: 3690386 - RNA, 13 nt, Human
uccauuuguaauu

SEQ ID NO: 3690387 - RNA, 21 nt, Human
uccauuuguaauuaaauuaug

SEQ ID NO: 3690388 - RNA, 19 nt, Human
uccauuuguuaucugggaa

SEQ ID NO: 3690389 - RNA, 17 nt, Human
uccauuuucccccacua

SEQ ID NO: 3690390 - RNA, 20 nt, Human
uccauuuuggugucuuucuc

SEQ ID NO: 3690391 - RNA, 22 nt, Human
uccauuuuggugucuuucucuu

SEQ ID NO: 3690392 - RNA, 14 nt, Human
uccauuuugugaag

SEQ ID NO: 3690393 - RNA, 15 nt, Human
uccauuuugugaagc

SEQ ID NO: 3690394 - RNA, 19 nt, Human
uccauuuugugaagcccug

SEQ ID NO: 3690395 - RNA, 14 nt, Human
ucccaaaaaacuac

SEQ ID NO: 3690396 - RNA, 22 nt, Human
ucccaaaauuguuuugagcuuu

SEQ ID NO: 3690397 - RNA, 13 nt, Human
ucccaaagagcug

SEQ ID NO: 3690398 - RNA, 15 nt, Human
ucccaaagagcugcc

SEQ ID NO: 3690399 - RNA, 16 nt, Human
ucccaaagagcugccu

SEQ ID NO: 3690400 - RNA, 18 nt, Human
ucccaaagcagugcaugc

SEQ ID NO: 3690401 - RNA, 21 nt, Human
ucccaaagcagugcaugcugu

SEQ ID NO: 3690402 - RNA, 22 nt, Human
ucccaaagccuugugucuacag

SEQ ID NO: 3690403 - RNA, 23 nt, Human
ucccaaagugcugagauuacagg

SEQ ID NO: 3690404 - RNA, 16 nt, Human
ucccaaagugcuggga

SEQ ID NO: 3690405 - RNA, 17 nt, Human
ucccaaauuugauugau

SEQ ID NO: 3690406 - RNA, 19 nt, Human
ucccaaauuugauugauuu

SEQ ID NO: 3690407 - RNA, 21 nt, Human
ucccaacacaaggugggcagg

SEQ ID NO: 3690408 - RNA, 19 nt, Human
ucccaacaggaggacaauu

SEQ ID NO: 3690409 - RNA, 21 nt, Human
ucccaacaggaggacaauuca

SEQ ID NO: 3690410 - RNA, 22 nt, Human
ucccaacaggaggacaauucau

SEQ ID NO: 3690411 - RNA, 15 nt, Human
ucccaaccaggcacc

SEQ ID NO: 3690412 - RNA, 17 nt, Human
ucccaaccagugccaag

SEQ ID NO: 3690413 - RNA, 18 nt, Human
ucccaaccagugccaagg

SEQ ID NO: 3690414 - RNA, 15 nt, Human
ucccaacucacccca

SEQ ID NO: 3690415 - RNA, 17 nt, Human
ucccaacuccuauaauu

SEQ ID NO: 3690416 - RNA, 14 nt, Human
ucccaacucuagcu

SEQ ID NO: 3690417 - RNA, 16 nt, Human
ucccaacucuagcugg

SEQ ID NO: 3690418 - RNA, 17 nt, Human
ucccaagaacagcaggc

SEQ ID NO: 3690419 - RNA, 18 nt, Human
ucccaagaacagcaggcc

SEQ ID NO: 3690420 - RNA, 20 nt, Human
ucccaagaaugcaagauuuc

SEQ ID NO: 3690421 - RNA, 22 nt, Human
ucccaagagcaucaugccucug

SEQ ID NO: 3690422 - RNA, 21 nt, Human
ucccaagcaccugggauuaca

SEQ ID NO: 3690423 - RNA, 13 nt, Human
ucccaagccuccu

SEQ ID NO: 3690424 - RNA, 13 nt, Human
ucccaagcucugc

SEQ ID NO: 3690425 - RNA, 17 nt, Human
ucccaagcucugcuccu

SEQ ID NO: 3690426 - RNA, 12 nt, Human
ucccaagcugga

SEQ ID NO: 3690427 - RNA, 14 nt, Human
ucccaagcugggcc

SEQ ID NO: 3690428 - RNA, 19 nt, Human
ucccaagcugggccccagc

SEQ ID NO: 3690429 - RNA, 13 nt, Human
ucccaaggaaagc

SEQ ID NO: 3690430 - RNA, 18 nt, Human
ucccaaggagaacaaaua

SEQ ID NO: 3690431 - RNA, 19 nt, Human
ucccaaggagaacaaauau

SEQ ID NO: 3690432 - RNA, 18 nt, Human
ucccaaggcucugagcaa

SEQ ID NO: 3690433 - RNA, 21 nt, Human
ucccaagggauggugcccugu

SEQ ID NO: 3690434 - RNA, 15 nt, Human
ucccaagggcugccg

SEQ ID NO: 3690435 - RNA, 17 nt, Human
ucccaaggggccugagc

SEQ ID NO: 3690436 - RNA, 20 nt, Human
ucccaagguuggagcccagg

SEQ ID NO: 3690437 - RNA, 19 nt, Human
ucccaaguagaaucucagu

SEQ ID NO: 3690438 - RNA, 15 nt, Human
ucccaagucuacaga

SEQ ID NO: 3690439 - RNA, 13 nt, Human
ucccaagugccaa

SEQ ID NO: 3690440 - RNA, 23 nt, Human
ucccaagugccaaagaagcagac

SEQ ID NO: 3690441 - RNA, 12 nt, Human
ucccaaguggug

SEQ ID NO: 3690442 - RNA, 18 nt, Human
ucccaaguggugccuaaa

SEQ ID NO: 3690443 - RNA, 16 nt, Human
ucccaaguugugcuug

SEQ ID NO: 3690444 - RNA, 18 nt, Human
ucccaauagcacuuucau

SEQ ID NO: 3690445 - RNA, 20 nt, Human
ucccaauagcacuuucauug

SEQ ID NO: 3690446 - RNA, 17 nt, Human
ucccaauaggcagacug

SEQ ID NO: 3690447 - RNA, 13 nt, Human
ucccaaucagcac

SEQ ID NO: 3690448 - RNA, 18 nt, Human
ucccaaucagcacugaaa

SEQ ID NO: 3690449 - RNA, 14 nt, Human
ucccaaugcacauc

SEQ ID NO: 3690450 - RNA, 14 nt, Human
ucccaaugguguuu

SEQ ID NO: 3690451 - RNA, 16 nt, Human
ucccaaugguguuuuu

SEQ ID NO: 3690452 - RNA, 18 nt, Human
ucccaauuucagacuccc

SEQ ID NO: 3690453 - RNA, 16 nt, Human
ucccacaaaggagagc

SEQ ID NO: 3690454 - RNA, 14 nt, Human
ucccacaagccuga

SEQ ID NO: 3690455 - RNA, 15 nt, Human
ucccacaagccugag

SEQ ID NO: 3690456 - RNA, 16 nt, Human
ucccacaagccugagg

SEQ ID NO: 3690457 - RNA, 14 nt, Human
ucccacaaguggug

SEQ ID NO: 3690458 - RNA, 16 nt, Human
ucccacaagugguggu

SEQ ID NO: 3690459 - RNA, 22 nt, Human
ucccacaaucuuaaggggcagc

SEQ ID NO: 3690460 - RNA, 23 nt, Human
ucccacaaucuuaaggggcagcu

SEQ ID NO: 3690461 - RNA, 11 nt, Human
ucccacacagg

SEQ ID NO: 3690462 - RNA, 12 nt, Human
ucccacacccaa

SEQ ID NO: 3690463 - RNA, 13 nt, Human
ucccacaccccaa

SEQ ID NO: 3690464 - RNA, 18 nt, Human
ucccacaccguguaaacc

SEQ ID NO: 3690465 - RNA, 16 nt, Human
ucccacaccuccacag

SEQ ID NO: 3690466 - RNA, 18 nt, Human
ucccacaccuccacaguu

SEQ ID NO: 3690467 - RNA, 15 nt, Human
ucccacaggcccuuc

SEQ ID NO: 3690468 - RNA, 17 nt, Human
ucccacaggcccuuccu

SEQ ID NO: 3690469 - RNA, 22 nt, Human
ucccacaggcccuuccucucca

SEQ ID NO: 3690470 - RNA, 21 nt, Human
ucccacagugcugggauuaca

SEQ ID NO: 3690471 - RNA, 13 nt, Human
ucccacaucccug

SEQ ID NO: 3690472 - RNA, 14 nt, Human
ucccacaucccugg

SEQ ID NO: 3690473 - RNA, 15 nt, Human
ucccacaucccuggg

SEQ ID NO: 3690474 - RNA, 17 nt, Human
ucccacaucccugggcc

SEQ ID NO: 3690475 - RNA, 18 nt, Human
ucccacaucccugggccu

SEQ ID NO: 3690476 - RNA, 22 nt, Human
ucccacaucccugggccugcug

SEQ ID NO: 3690477 - RNA, 19 nt, Human
ucccacaugggcccaggcc

SEQ ID NO: 3690478 - RNA, 22 nt, Human
ucccacaugggcccaggccuca

SEQ ID NO: 3690479 - RNA, 15 nt, Human
ucccacauuaaagaa

SEQ ID NO: 3690480 - RNA, 19 nt, Human
ucccacauuaaagaagacc

SEQ ID NO: 3690481 - RNA, 17 nt, Human
ucccaccacagcaggug

SEQ ID NO: 3690482 - RNA, 22 nt, Human
ucccaccaggcugcucagggcu

SEQ ID NO: 3690483 - RNA, 19 nt, Human
ucccacccaccgccacaau

SEQ ID NO: 3690484 - RNA, 15 nt, Human
ucccacccagccugg

SEQ ID NO: 3690485 - RNA, 20 nt, Human
ucccaccccaaccugcucuc

SEQ ID NO: 3690486 - RNA, 21 nt, Human
ucccaccccaaccugcucucc

SEQ ID NO: 3690487 - RNA, 23 nt, Human
ucccaccccaaccugcucuccuc

SEQ ID NO: 3690488 - RNA, 11 nt, Human
ucccaccccac

SEQ ID NO: 3690489 - RNA, 15 nt, Human
ucccaccccacacac

SEQ ID NO: 3690490 - RNA, 15 nt, Human
ucccaccccauccuc

SEQ ID NO: 3690491 - RNA, 18 nt, Human
ucccaccccauccuccag

SEQ ID NO: 3690492 - RNA, 20 nt, Human
ucccaccccauuuucugugg

SEQ ID NO: 3690493 - RNA, 18 nt, Human
ucccacccccacccccag

SEQ ID NO: 3690494 - RNA, 13 nt, Human
ucccacccccagc

SEQ ID NO: 3690495 - RNA, 14 nt, Human
ucccacccccagcc

SEQ ID NO: 3690496 - RNA, 17 nt, Human
ucccacccccagccccg

SEQ ID NO: 3690497 - RNA, 19 nt, Human
ucccacccccuucucugcu

SEQ ID NO: 3690498 - RNA, 20 nt, Human
ucccacccccuucucugcuc

SEQ ID NO: 3690499 - RNA, 19 nt, Human
ucccaccccucccucuguc

SEQ ID NO: 3690500 - RNA, 16 nt, Human
ucccacccgaugcugc

SEQ ID NO: 3690501 - RNA, 20 nt, Human
ucccacccuguaccucaucc

SEQ ID NO: 3690502 - RNA, 18 nt, Human
ucccaccgguugcuucug

SEQ ID NO: 3690503 - RNA, 17 nt, Human
ucccaccuccagcccgg

SEQ ID NO: 3690504 - RNA, 23 nt, Human
ucccaccugacacaccaggcgcu

SEQ ID NO: 3690505 - RNA, 20 nt, Human
ucccaccugcaucuggggcc

SEQ ID NO: 3690506 - RNA, 13 nt, Human
ucccaccuuggcu

SEQ ID NO: 3690507 - RNA, 19 nt, Human
ucccaccuuggcugcaggg

SEQ ID NO: 3690508 - RNA, 21 nt, Human
ucccaccuuggcugcagggag

SEQ ID NO: 3690509 - RNA, 20 nt, Human
ucccaccuuucgggccaugu

SEQ ID NO: 3690510 - RNA, 20 nt, Human
ucccacggaaaaugccaauc

SEQ ID NO: 3690511 - RNA, 18 nt, Human
ucccacgggaccuggggc

SEQ ID NO: 3690512 - RNA, 15 nt, Human
ucccacgugucuucc

SEQ ID NO: 3690513 - RNA, 15 nt, Human
ucccacuaucugggu

SEQ ID NO: 3690514 - RNA, 20 nt, Human
ucccacuaucugggugcaug

SEQ ID NO: 3690515 - RNA, 13 nt, Human
ucccacucacccc

SEQ ID NO: 3690516 - RNA, 14 nt, Human
ucccacuccaagcc

SEQ ID NO: 3690517 - RNA, 18 nt, Human
ucccacuccaagccagca

SEQ ID NO: 3690518 - RNA, 16 nt, Human
ucccacucuccuaggc

SEQ ID NO: 3690519 - RNA, 13 nt, Human
ucccacucuucuc

SEQ ID NO: 3690520 - RNA, 20 nt, Human
ucccacugcacccccuccug

SEQ ID NO: 3690521 - RNA, 16 nt, Human
ucccacugccucaggu

SEQ ID NO: 3690522 - RNA, 22 nt, Human
ucccacugggguccagggagca

SEQ ID NO: 3690523 - RNA, 18 nt, Human
ucccacuuaaaaauuaaa

SEQ ID NO: 3690524 - RNA, 17 nt, Human
ucccacuucaaaacaaa

SEQ ID NO: 3690525 - RNA, 16 nt, Human
ucccacuucccacccu

SEQ ID NO: 3690526 - RNA, 15 nt, Human
ucccacuugccccug

SEQ ID NO: 3690527 - RNA, 17 nt, Human
ucccacuuggaggccuu

SEQ ID NO: 3690528 - RNA, 19 nt, Human
ucccagaaaaaguaacuca

SEQ ID NO: 3690529 - RNA, 20 nt, Human
ucccagaacacacuccauca

SEQ ID NO: 3690530 - RNA, 18 nt, Human
ucccagaaucaaagcaau

SEQ ID NO: 3690531 - RNA, 16 nt, Human
ucccagaaucccagcc

SEQ ID NO: 3690532 - RNA, 20 nt, Human
ucccagacuacuauuuucuu

SEQ ID NO: 3690533 - RNA, 13 nt, Human
ucccagacuugcu

SEQ ID NO: 3690534 - RNA, 19 nt, Human
ucccagagcaccugcuguc

SEQ ID NO: 3690535 - RNA, 22 nt, Human
ucccagagcugguggacccagg

SEQ ID NO: 3690536 - RNA, 20 nt, Human
ucccagaggagccaccaguu

SEQ ID NO: 3690537 - RNA, 16 nt, Human
ucccagaggcugcccc

SEQ ID NO: 3690538 - RNA, 17 nt, Human
ucccagagguccagccc

SEQ ID NO: 3690539 - RNA, 18 nt, Human
ucccagagguccagccca

SEQ ID NO: 3690540 - RNA, 22 nt, Human
ucccagagguccagcccaucuc

SEQ ID NO: 3690541 - RNA, 16 nt, Human
ucccagauaaugugaa

SEQ ID NO: 3690542 - RNA, 18 nt, Human
ucccagauacuugggggg

SEQ ID NO: 3690543 - RNA, 18 nt, Human
ucccagauuggcucacac

SEQ ID NO: 3690544 - RNA, 19 nt, Human
ucccagauuggcucacacu

SEQ ID NO: 3690545 - RNA, 22 nt, Human
ucccagauuggcucacacugag

SEQ ID NO: 3690546 - RNA, 23 nt, Human
ucccagauuggcucacacugaga

SEQ ID NO: 3690547 - RNA, 19 nt, Human
ucccagcacuuugggaggc

SEQ ID NO: 3690548 - RNA, 18 nt, Human
ucccagcagcccuaagga

SEQ ID NO: 3690549 - RNA, 21 nt, Human
ucccagcagcccuaaggaucu

SEQ ID NO: 3690550 - RNA, 20 nt, Human
ucccagcaugcugagauuac

SEQ ID NO: 3690551 - RNA, 17 nt, Human
ucccagccagcaguuca

SEQ ID NO: 3690552 - RNA, 16 nt, Human
ucccagcccaauccag

SEQ ID NO: 3690553 - RNA, 15 nt, Human
ucccagcccccugac

SEQ ID NO: 3690554 - RNA, 21 nt, Human
ucccagccuuggcaucuagag

SEQ ID NO: 3690555 - RNA, 22 nt, Human
ucccagcggcuggugcagggcc

SEQ ID NO: 3690556 - RNA, 17 nt, Human
ucccagcuacucaggag

SEQ ID NO: 3690557 - RNA, 17 nt, Human
ucccagcuacuugggaa

SEQ ID NO: 3690558 - RNA, 17 nt, Human
ucccagcucuacccugc

SEQ ID NO: 3690559 - RNA, 19 nt, Human
ucccagcucuacccugcau

SEQ ID NO: 3690560 - RNA, 23 nt, Human
ucccagcucucccucuggcccug

SEQ ID NO: 3690561 - RNA, 18 nt, Human
ucccagcugacaguccuc

SEQ ID NO: 3690562 - RNA, 20 nt, Human
ucccagcugacaguccucuc

SEQ ID NO: 3690563 - RNA, 22 nt, Human
ucccagcugacaguccucucca

SEQ ID NO: 3690564 - RNA, 13 nt, Human
ucccagcugcccc

SEQ ID NO: 3690565 - RNA, 14 nt, Human
ucccagcugccccu

SEQ ID NO: 3690566 - RNA, 16 nt, Human
ucccagcugccccucc

SEQ ID NO: 3690567 - RNA, 17 nt, Human
ucccagcugccccuccc

SEQ ID NO: 3690568 - RNA, 22 nt, Human
ucccagcugccccucccugcca

SEQ ID NO: 3690569 - RNA, 17 nt, Human
ucccagcugugcucugg

SEQ ID NO: 3690570 - RNA, 20 nt, Human
ucccagcugugcucuggaca

SEQ ID NO: 3690571 - RNA, 20 nt, Human
ucccaggaaagaagcauuuc

SEQ ID NO: 3690572 - RNA, 23 nt, Human
ucccaggaacaaucgauggccuu

SEQ ID NO: 3690573 - RNA, 11 nt, Human
ucccaggaacu

SEQ ID NO: 3690574 - RNA, 16 nt, Human
ucccaggaacugggcc

SEQ ID NO: 3690575 - RNA, 23 nt, Human
ucccaggacaccacacccagccu

SEQ ID NO: 3690576 - RNA, 24 nt, Human
ucccaggaccacaggcucaggcag

SEQ ID NO: 3690577 - RNA, 19 nt, Human
ucccaggacccugaagggg

SEQ ID NO: 3690578 - RNA, 19 nt, Human
ucccaggacccuggaccca

SEQ ID NO: 3690579 - RNA, 13 nt, Human
ucccaggagccug

SEQ ID NO: 3690580 - RNA, 22 nt, Human
ucccaggaugagcaucccagga

SEQ ID NO: 3690581 - RNA, 18 nt, Human
ucccaggaugcugggugg

SEQ ID NO: 3690582 - RNA, 18 nt, Human
ucccaggcaaauaaaauu

SEQ ID NO: 3690583 - RNA, 17 nt, Human
ucccaggcaaggcugug

SEQ ID NO: 3690584 - RNA, 15 nt, Human
ucccaggccaggcuc

SEQ ID NO: 3690585 - RNA, 18 nt, Human
ucccaggccaguaaggga

SEQ ID NO: 3690586 - RNA, 17 nt, Human
ucccaggccccuggagg

SEQ ID NO: 3690587 - RNA, 19 nt, Human
ucccaggccccuggaggcu

SEQ ID NO: 3690588 - RNA, 16 nt, Human
ucccaggcgccccuuc

SEQ ID NO: 3690589 - RNA, 20 nt, Human
ucccaggcgccccuuccccc

SEQ ID NO: 3690590 - RNA, 21 nt, Human
ucccaggcucucaacagggga

SEQ ID NO: 3690591 - RNA, 16 nt, Human
ucccaggcugagccuc

SEQ ID NO: 3690592 - RNA, 15 nt, Human
ucccaggcuucaccc

SEQ ID NO: 3690593 - RNA, 18 nt, Human
ucccagggaagugcucug

SEQ ID NO: 3690594 - RNA, 22 nt, Human
ucccagggccagggcccugcag

SEQ ID NO: 3690595 - RNA, 23 nt, Human
ucccagggccagggcccugcaga

SEQ ID NO: 3690596 - RNA, 20 nt, Human
uaagccacuuaaaauguuca

SEQ ID NO: 3690597 - RNA, 14 nt, Human
uaagccacuugaaa

SEQ ID NO: 3690598 - RNA, 13 nt, Human
uaagccagacauc

SEQ ID NO: 3690599 - RNA, 15 nt, Human
uaagccagcugcccc

SEQ ID NO: 3690600 - RNA, 13 nt, Human
uaagccaugagaa

SEQ ID NO: 3690601 - RNA, 17 nt, Human
uaagccaugagaauguu

SEQ ID NO: 3690602 - RNA, 13 nt, Human
uaagcccuggcag

SEQ ID NO: 3690603 - RNA, 13 nt, Human
uaagcccuggccc

SEQ ID NO: 3690604 - RNA, 16 nt, Human
uaagcccugucgagac

SEQ ID NO: 3690605 - RNA, 18 nt, Human
uaagccucaaauuugaac

SEQ ID NO: 3690606 - RNA, 16 nt, Human
uaagccucauauuuaa

SEQ ID NO: 3690607 - RNA, 17 nt, Human
uaagccucauauuuaaa

SEQ ID NO: 3690608 - RNA, 20 nt, Human
uaagccucauauuuaaagac

SEQ ID NO: 3690609 - RNA, 14 nt, Human
uaagccuccauuua

SEQ ID NO: 3690610 - RNA, 17 nt, Human
uaagccuccauuuaguu

SEQ ID NO: 3690611 - RNA, 20 nt, Human
uaagccuccauuuaguucuu

SEQ ID NO: 3690612 - RNA, 14 nt, Human
uaagccuguggcug

SEQ ID NO: 3690613 - RNA, 17 nt, Human
uaagccuuuggaaacag

SEQ ID NO: 3690614 - RNA, 21 nt, Human
uaagccuuuguugaacuguua

SEQ ID NO: 3690615 - RNA, 20 nt, Human
uaagccuuuuauacugauua

SEQ ID NO: 3690616 - RNA, 23 nt, Human
uaagcgaauguguacaaagugua

SEQ ID NO: 3690617 - RNA, 22 nt, Human
uaagcgcuagaggaagcagcca

SEQ ID NO: 3690618 - RNA, 20 nt, Human
uaagcggcucaagcccagga

SEQ ID NO: 3690619 - RNA, 15 nt, Human
uaagcguauggcuuu

SEQ ID NO: 3690620 - RNA, 16 nt, Human
uaagcguauggcuuua

SEQ ID NO: 3690621 - RNA, 22 nt, Human
uaagcguauggcuuuauuuuuu

SEQ ID NO: 3690622 - RNA, 18 nt, Human
uaagcuagaagaagugag

SEQ ID NO: 3690623 - RNA, 20 nt, Human
uaagcuaggaaaagaaaucu

SEQ ID NO: 3690624 - RNA, 14 nt, Human
uaagcuauucagua

SEQ ID NO: 3690625 - RNA, 21 nt, Human
uaagcuauucaguaauaacuc

SEQ ID NO: 3690626 - RNA, 15 nt, Human
uaagcuauuugaugu

SEQ ID NO: 3690627 - RNA, 22 nt, Human
uaagcuauuugauguaauacuu

SEQ ID NO: 3690628 - RNA, 17 nt, Human
uaagcuauuuuucuaac

SEQ ID NO: 3690629 - RNA, 15 nt, Human
uaagcucagaaucca

SEQ ID NO: 3690630 - RNA, 22 nt, Human
uaagcucccagggccugucuca

SEQ ID NO: 3690631 - RNA, 10 nt, Human
uaagcucuga

SEQ ID NO: 3690632 - RNA, 12 nt, Human
uaagcucugagc

SEQ ID NO: 3690633 - RNA, 13 nt, Human
uaagcucuggcuu

SEQ ID NO: 3690634 - RNA, 10 nt, Human
uaagcugcaa

SEQ ID NO: 3690635 - RNA, 15 nt, Human
uaagcuguaaaaaga

SEQ ID NO: 3690636 - RNA, 22 nt, Human
uaagcuguuccuguucaguaau

SEQ ID NO: 3690637 - RNA, 21 nt, Human
uaagcuguuuauuuuauauua

SEQ ID NO: 3690638 - RNA, 22 nt, Human
uaagcuguuugguuuuaaaaua

SEQ ID NO: 3690639 - RNA, 16 nt, Human
uaagcuuaugucagac

SEQ ID NO: 3690640 - RNA, 22 nt, Human
uaagcuuccaggcugcauagaa

SEQ ID NO: 3690641 - RNA, 19 nt, Human
uaagcuuugccagcugcug

SEQ ID NO: 3690642 - RNA, 22 nt, Human
uaagcuuugccagcugcugcug

SEQ ID NO: 3690643 - RNA, 21 nt, Human
uaagcuuuggacccaaggaaa

SEQ ID NO: 3690644 - RNA, 13 nt, Human
uaagcuuuuugga

SEQ ID NO: 3690645 - RNA, 21 nt, Human
uaaggaaaaguuuaauauuaa

SEQ ID NO: 3690646 - RNA, 11 nt, Human
uaaggaaacaa

SEQ ID NO: 3690647 - RNA, 15 nt, Human
uaaggaaacucuuau

SEQ ID NO: 3690648 - RNA, 20 nt, Human
uaaggaaacucuuaucucag

SEQ ID NO: 3690649 - RNA, 16 nt, Human
uaaggaaagcaauaaa

SEQ ID NO: 3690650 - RNA, 21 nt, Human
uaaggaaagcaauaaaugaau

SEQ ID NO: 3690651 - RNA, 19 nt, Human
uaaggaaaucaacuugcuu

SEQ ID NO: 3690652 - RNA, 20 nt, Human
uaaggaaaucaacuugcuua

SEQ ID NO: 3690653 - RNA, 15 nt, Human
uaaggaaccuuccuu

SEQ ID NO: 3690654 - RNA, 13 nt, Human
uaaggaagaaaaa

SEQ ID NO: 3690655 - RNA, 14 nt, Human
uaaggaagaaaaau

SEQ ID NO: 3690656 - RNA, 20 nt, Human
uaaggaauaugggagaaaua

SEQ ID NO: 3690657 - RNA, 19 nt, Human
uaaggaaucuuucugcuuu

SEQ ID NO: 3690658 - RNA, 14 nt, Human
uaaggacacacuaa

SEQ ID NO: 3690659 - RNA, 14 nt, Human
uaaggacaggcagg

SEQ ID NO: 3690660 - RNA, 21 nt, Human
uaaggaccguggcccugcccu

SEQ ID NO: 3690661 - RNA, 15 nt, Human
uaaggaccugaaauu

SEQ ID NO: 3690662 - RNA, 16 nt, Human
uaaggaccuuaagaca

SEQ ID NO: 3690663 - RNA, 18 nt, Human
uaaggacugacugaggca

SEQ ID NO: 3690664 - RNA, 14 nt, Human
uaaggacugcaugg

SEQ ID NO: 3690665 - RNA, 21 nt, Human
uaaggacugcaugguaauuua

SEQ ID NO: 3690666 - RNA, 14 nt, Human
uaaggacuuccuga

SEQ ID NO: 3690667 - RNA, 15 nt, Human
uaaggacuucuuuaa

SEQ ID NO: 3690668 - RNA, 15 nt, Human
uaaggacuuguuaga

SEQ ID NO: 3690669 - RNA, 22 nt, Human
uaaggagaaucauguuucuuug

SEQ ID NO: 3690670 - RNA, 22 nt, Human
uaaggaggggaaaaaaauguug

SEQ ID NO: 3690671 - RNA, 22 nt, Human
uaaggauaaaucauaaagucag

SEQ ID NO: 3690672 - RNA, 16 nt, Human
uaaggauacaggcugg

SEQ ID NO: 3690673 - RNA, 18 nt, Human
uaaggauccggaaagaag

SEQ ID NO: 3690674 - RNA, 16 nt, Human
uaaggaucucucagga

SEQ ID NO: 3690675 - RNA, 20 nt, Human
uaaggaugcuuguacauaau

SEQ ID NO: 3690676 - RNA, 13 nt, Human
uaaggauguagcu

SEQ ID NO: 3690677 - RNA, 22 nt, Human
uaaggauguagcuuuucaccuu

SEQ ID NO: 3690678 - RNA, 17 nt, Human
uaaggaugucacagggc

SEQ ID NO: 3690679 - RNA, 20 nt, Human
uaaggaugucacagggccaa

SEQ ID NO: 3690680 - RNA, 16 nt, Human
uaaggauguucuagca

SEQ ID NO: 3690681 - RNA, 17 nt, Human
uaaggauuuuaugcuuu

SEQ ID NO: 3690682 - RNA, 19 nt, Human
uaaggauuuuaugcuuuaa

SEQ ID NO: 3690683 - RNA, 22 nt, Human
uaaggauuuuaugcuuuaaaca

SEQ ID NO: 3690684 - RNA, 17 nt, Human
uaaggauuuuucucuua

SEQ ID NO: 3690685 - RNA, 20 nt, Human
uaaggcaacaaaagaagccc

SEQ ID NO: 3690686 - RNA, 17 nt, Human
uaaggcguggagcugcc

SEQ ID NO: 3690687 - RNA, 19 nt, Human
uaaggcucuaugagucuag

SEQ ID NO: 3690688 - RNA, 15 nt, Human
uaaggcucugagagu

SEQ ID NO: 3690689 - RNA, 11 nt, Human
uaagggaaaaa

SEQ ID NO: 3690690 - RNA, 17 nt, Human
uaagggaaaaauauaua

SEQ ID NO: 3690691 - RNA, 17 nt, Human
uaagggaaaagggaaca

SEQ ID NO: 3690692 - RNA, 14 nt, Human
uaagggaaauagaa

SEQ ID NO: 3690693 - RNA, 19 nt, Human
uaagggaagacauuucuuu

SEQ ID NO: 3690694 - RNA, 22 nt, Human
uaagggaaguaguuaucauguu

SEQ ID NO: 3690695 - RNA, 17 nt, Human
uaagggacugauguuug

SEQ ID NO: 3690696 - RNA, 18 nt, Human
uaagggacugauguuugu

SEQ ID NO: 3690697 - RNA, 14 nt, Human
uaagggagaaaaaa

SEQ ID NO: 3690698 - RNA, 13 nt, Human
uaagggcagaguc

SEQ ID NO: 3690699 - RNA, 15 nt, Human
uaagggcaugccuug

SEQ ID NO: 3690700 - RNA, 16 nt, Human
uaagggcccaggucag

SEQ ID NO: 3690701 - RNA, 22 nt, Human
uaagggcuggucucugcugaag

SEQ ID NO: 3690702 - RNA, 16 nt, Human
uaaggggaagaaugaa

SEQ ID NO: 3690703 - RNA, 22 nt, Human
uaaggggaauuaacaauugcca

SEQ ID NO: 3690704 - RNA, 13 nt, Human
uaagggguggggc

SEQ ID NO: 3690705 - RNA, 23 nt, Human
uaagggguuugccauuugauacc

SEQ ID NO: 3690706 - RNA, 16 nt, Human
uaagggugacaaaugg

SEQ ID NO: 3690707 - RNA, 20 nt, Human
uaaggguuaguuuacaauca

SEQ ID NO: 3690708 - RNA, 13 nt, Human
uaaggguuuuaga

SEQ ID NO: 3690709 - RNA, 19 nt, Human
uaagguacaagaagcauuu

SEQ ID NO: 3690710 - RNA, 17 nt, Human
uaagguccgguguucua

SEQ ID NO: 3690711 - RNA, 21 nt, Human
uaagguccgguguucuaagau

SEQ ID NO: 3690712 - RNA, 16 nt, Human
uaagguccugaaagua

SEQ ID NO: 3690713 - RNA, 13 nt, Human
uaaggucuguuug

SEQ ID NO: 3690714 - RNA, 19 nt, Human
uaaggugaaggugaaucua

SEQ ID NO: 3690715 - RNA, 15 nt, Human
uaaggugaggccugu

SEQ ID NO: 3690716 - RNA, 18 nt, Human
uaaggugauauauuuaaa

SEQ ID NO: 3690717 - RNA, 13 nt, Human
uaagguguagcca

SEQ ID NO: 3690718 - RNA, 16 nt, Human
uaagguguuugaaaau

SEQ ID NO: 3690719 - RNA, 18 nt, Human
uaagguguuugaaaauag

SEQ ID NO: 3690720 - RNA, 17 nt, Human
uaagguguuuucugugu

SEQ ID NO: 3690721 - RNA, 18 nt, Human
uaagguguuuucugugua

SEQ ID NO: 3690722 - RNA, 19 nt, Human
uaaguaaaaccacagcagu

SEQ ID NO: 3690723 - RNA, 14 nt, Human
uaaguaaacuaaug

SEQ ID NO: 3690724 - RNA, 13 nt, Human
uaaguaaacugcc

SEQ ID NO: 3690725 - RNA, 12 nt, Human
uaaguaaaguga

SEQ ID NO: 3690726 - RNA, 16 nt, Human
uaaguaaauacaauuu

SEQ ID NO: 3690727 - RNA, 16 nt, Human
uaaguaaaucucuucu

SEQ ID NO: 3690728 - RNA, 12 nt, Human
uaaguaagaaaa

SEQ ID NO: 3690729 - RNA, 14 nt, Human
uaaguaaucaauaa

SEQ ID NO: 3690730 - RNA, 18 nt, Human
uaaguaaucaauaaagaa

SEQ ID NO: 3690731 - RNA, 19 nt, Human
uaaguaaugauaacuggaa

SEQ ID NO: 3690732 - RNA, 15 nt, Human
uaaguaauguggaag

SEQ ID NO: 3690733 - RNA, 21 nt, Human
uaaguaauuaucgggaacagu

SEQ ID NO: 3690734 - RNA, 12 nt, Human
uaaguaauuaug

SEQ ID NO: 3690735 - RNA, 18 nt, Human
uaaguacacaauaagcaa

SEQ ID NO: 3690736 - RNA, 15 nt, Human
uuacaggcaccgaga

SEQ ID NO: 3690737 - RNA, 24 nt, Human
uuacaggcgugagccaccgugccu

SEQ ID NO: 3690738 - RNA, 17 nt, Human
uuacagggagccuccug

SEQ ID NO: 3690739 - RNA, 20 nt, Human
uuacagggagccuccugccc

SEQ ID NO: 3690740 - RNA, 13 nt, Human
uuacaggugauua

SEQ ID NO: 3690741 - RNA, 16 nt, Human
uuacaguaaauaaauu

SEQ ID NO: 3690742 - RNA, 17 nt, Human
uuacaguaaauaaauug

SEQ ID NO: 3690743 - RNA, 22 nt, Human
uuacaguaaauaaauuguuuga

SEQ ID NO: 3690744 - RNA, 18 nt, Human
uuacaguaaugucauaaa

SEQ ID NO: 3690745 - RNA, 16 nt, Human
uuacaguauaauuaac

SEQ ID NO: 3690746 - RNA, 19 nt, Human
uuacaguauaauuaacaug

SEQ ID NO: 3690747 - RNA, 19 nt, Human
uuacaguccaaaauacugu

SEQ ID NO: 3690748 - RNA, 16 nt, Human
uuacaguccuucaaaa

SEQ ID NO: 3690749 - RNA, 15 nt, Human
uuacagucuauuuga

SEQ ID NO: 3690750 - RNA, 17 nt, Human
uuacagugaaaauguaa

SEQ ID NO: 3690751 - RNA, 17 nt, Human
uuacagugccuaaaaua

SEQ ID NO: 3690752 - RNA, 13 nt, Human
uuacaguguuccg

SEQ ID NO: 3690753 - RNA, 19 nt, Human
uuacaguuacuuuuccuug

SEQ ID NO: 3690754 - RNA, 22 nt, Human
uuacaguucugugguuucaugu

SEQ ID NO: 3690755 - RNA, 14 nt, Human
uuacauaaacauca

SEQ ID NO: 3690756 - RNA, 14 nt, Human
uuacauaaauaaau

SEQ ID NO: 3690757 - RNA, 20 nt, Human
uuacauaagauaaaugugcu

SEQ ID NO: 3690758 - RNA, 21 nt, Human
uuacauaaucuguacaaugaa

SEQ ID NO: 3690759 - RNA, 20 nt, Human
uuacauaauucacucugagu

SEQ ID NO: 3690760 - RNA, 13 nt, Human
uuacauagucuga

SEQ ID NO: 3690761 - RNA, 21 nt, Human
uuacauaguguaggcuuuacu

SEQ ID NO: 3690762 - RNA, 13 nt, Human
uuacaucauuucu

SEQ ID NO: 3690763 - RNA, 14 nt, Human
uuacaucauuuuug

SEQ ID NO: 3690764 - RNA, 20 nt, Human
uuacaucauuuuuguaucua

SEQ ID NO: 3690765 - RNA, 13 nt, Human
uuacauccuuaaa

SEQ ID NO: 3690766 - RNA, 14 nt, Human
uuacaucuguuuua

SEQ ID NO: 3690767 - RNA, 19 nt, Human
uuacaucuguuuuaaauuu

SEQ ID NO: 3690768 - RNA, 13 nt, Human
uuacaugaaguau

SEQ ID NO: 3690769 - RNA, 20 nt, Human
uuacaugaaguauuuuuuca

SEQ ID NO: 3690770 - RNA, 22 nt, Human
uuacaugaggacucuauucuuu

SEQ ID NO: 3690771 - RNA, 16 nt, Human
uuacaugauucauuuu

SEQ ID NO: 3690772 - RNA, 17 nt, Human
uuacaugauucauuuua

SEQ ID NO: 3690773 - RNA, 22 nt, Human
uuacaugcaauuuauuaaaaug

SEQ ID NO: 3690774 - RNA, 15 nt, Human
uuacaugcauacuuc

SEQ ID NO: 3690775 - RNA, 22 nt, Human
uuacaugcauuacugcaugcac

SEQ ID NO: 3690776 - RNA, 15 nt, Human
uuacauguaauuuga

SEQ ID NO: 3690777 - RNA, 16 nt, Human
uuacauguuuauaaau

SEQ ID NO: 3690778 - RNA, 13 nt, Human
uuacauguuugca

SEQ ID NO: 3690779 - RNA, 22 nt, Human
uuacauguuuucuuugcuuuaa

SEQ ID NO: 3690780 - RNA, 16 nt, Human
uuacauuaauguuaau

SEQ ID NO: 3690781 - RNA, 13 nt, Human
uuacauucaguug

SEQ ID NO: 3690782 - RNA, 18 nt, Human
uuacauuccuugauaaug

SEQ ID NO: 3690783 - RNA, 16 nt, Human
uuacauucucuaauaa

SEQ ID NO: 3690784 - RNA, 20 nt, Human
uuacauugcuggucuuguaa

SEQ ID NO: 3690785 - RNA, 21 nt, Human
uuacauuuaaagcauugcugu

SEQ ID NO: 3690786 - RNA, 20 nt, Human
uuacauuuacaaacugaaga

SEQ ID NO: 3690787 - RNA, 19 nt, Human
uuacauuuguaauuuaagg

SEQ ID NO: 3690788 - RNA, 14 nt, Human
uuacauuuguauaa

SEQ ID NO: 3690789 - RNA, 19 nt, Human
uuacauuuguauuuuucca

SEQ ID NO: 3690790 - RNA, 17 nt, Human
uuacauuuuuaagugcu

SEQ ID NO: 3690791 - RNA, 23 nt, Human
uuacauuuuuaagugcugcauuu

SEQ ID NO: 3690792 - RNA, 15 nt, Human
uuacauuuuuacaau

SEQ ID NO: 3690793 - RNA, 15 nt, Human
uuacauuuuuauuua

SEQ ID NO: 3690794 - RNA, 17 nt, Human
uuacauuuuuauuuaug

SEQ ID NO: 3690795 - RNA, 22 nt, Human
uuacauuuuuauuuaugaaguu

SEQ ID NO: 3690796 - RNA, 21 nt, Human
uuaccaaaaauaaauauaucu

SEQ ID NO: 3690797 - RNA, 16 nt, Human
uuaccaaaaauuuugu

SEQ ID NO: 3690798 - RNA, 20 nt, Human
uuaccaaacagcaaaccaag

SEQ ID NO: 3690799 - RNA, 23 nt, Human
uuaccaaagaugaaugaagcaaa

SEQ ID NO: 3690800 - RNA, 15 nt, Human
uuaccaaauaaagua

SEQ ID NO: 3690801 - RNA, 20 nt, Human
uuaccaaccuguuaccuacu

SEQ ID NO: 3690802 - RNA, 13 nt, Human
uuaccaagaagcc

SEQ ID NO: 3690803 - RNA, 16 nt, Human
uuaccaaguuauauaa

SEQ ID NO: 3690804 - RNA, 17 nt, Human
uuaccaaguuauauaaa

SEQ ID NO: 3690805 - RNA, 20 nt, Human
uuaccaauaggcaaauuaau

SEQ ID NO: 3690806 - RNA, 22 nt, Human
uuaccaauugaaguaaaaugug

SEQ ID NO: 3690807 - RNA, 13 nt, Human
uuaccacccccac

SEQ ID NO: 3690808 - RNA, 15 nt, Human
uuaccacccccacac

SEQ ID NO: 3690809 - RNA, 12 nt, Human
uuaccacucagg

SEQ ID NO: 3690810 - RNA, 14 nt, Human
uuaccacucaggca

SEQ ID NO: 3690811 - RNA, 21 nt, Human
uuaccacugaagauagaagaa

SEQ ID NO: 3690812 - RNA, 22 nt, Human
uuaccagagguugugcacuguu

SEQ ID NO: 3690813 - RNA, 18 nt, Human
uuaccagauaaugcuacu

SEQ ID NO: 3690814 - RNA, 24 nt, Human
uuaccagauuuuuacacauguauc

SEQ ID NO: 3690815 - RNA, 14 nt, Human
uuaccagcagagca

SEQ ID NO: 3690816 - RNA, 20 nt, Human
uuaccagccuccguauuuca

SEQ ID NO: 3690817 - RNA, 16 nt, Human
uuaccagcuuuuaacc

SEQ ID NO: 3690818 - RNA, 19 nt, Human
uuaccagcuuuuaaccauc

SEQ ID NO: 3690819 - RNA, 21 nt, Human
uuaccaggcaccaaaagaagu

SEQ ID NO: 3690820 - RNA, 16 nt, Human
uuaccaguaaagugua

SEQ ID NO: 3690821 - RNA, 22 nt, Human
uuaccaguaaaguguaacauau

SEQ ID NO: 3690822 - RNA, 23 nt, Human
uuaccagucuuuaaaggcccagc

SEQ ID NO: 3690823 - RNA, 17 nt, Human
uuaccagugccuuaaac

SEQ ID NO: 3690824 - RNA, 18 nt, Human
uuaccagugccuuaaacu

SEQ ID NO: 3690825 - RNA, 16 nt, Human
uuaccaguuaauuacu

SEQ ID NO: 3690826 - RNA, 19 nt, Human
uuaccaguugccuuuuauc

SEQ ID NO: 3690827 - RNA, 19 nt, Human
uuaccauggaguuaacauc

SEQ ID NO: 3690828 - RNA, 13 nt, Human
uuaccauucacaa

SEQ ID NO: 3690829 - RNA, 14 nt, Human
uuaccauucacaau

SEQ ID NO: 3690830 - RNA, 17 nt, Human
uuaccauucacaauaaa

SEQ ID NO: 3690831 - RNA, 18 nt, Human
uuaccauuggaaauuuca

SEQ ID NO: 3690832 - RNA, 14 nt, Human
uuaccauuuacaug

SEQ ID NO: 3690833 - RNA, 13 nt, Human
uuaccauuuguaa

SEQ ID NO: 3690834 - RNA, 14 nt, Human
uuaccauuuuucau

SEQ ID NO: 3690835 - RNA, 12 nt, Human
uuacccaagcaa

SEQ ID NO: 3690836 - RNA, 20 nt, Human
uuacccaagcaaaaucaugg

SEQ ID NO: 3690837 - RNA, 17 nt, Human
uuacccaauaagauaca

SEQ ID NO: 3690838 - RNA, 16 nt, Human
uuacccacacacagau

SEQ ID NO: 3690839 - RNA, 20 nt, Human
uuacccaggguggagugcag

SEQ ID NO: 3690840 - RNA, 18 nt, Human
uuacccauauccccucuc

SEQ ID NO: 3690841 - RNA, 17 nt, Human
uuacccauuuguucaua

SEQ ID NO: 3690842 - RNA, 19 nt, Human
uuacccauuuguucauauu

SEQ ID NO: 3690843 - RNA, 16 nt, Human
uuaccccuuagccucc

SEQ ID NO: 3690844 - RNA, 22 nt, Human
uuacccucaggcauaggccugg

SEQ ID NO: 3690845 - RNA, 18 nt, Human
uuacccuccuagcuuucc

SEQ ID NO: 3690846 - RNA, 16 nt, Human
uuacccuccuguaaau

SEQ ID NO: 3690847 - RNA, 22 nt, Human
uuacccugcgauuuugccugug

SEQ ID NO: 3690848 - RNA, 12 nt, Human
uuacccugggaa

SEQ ID NO: 3690849 - RNA, 23 nt, Human
uuacccuguacauauguaaacau

SEQ ID NO: 3690850 - RNA, 17 nt, Human
uuacccuucugugccca

SEQ ID NO: 3690851 - RNA, 20 nt, Human
uuacccuucugugcccagcu

SEQ ID NO: 3690852 - RNA, 16 nt, Human
uuacccuuuagacugu

SEQ ID NO: 3690853 - RNA, 18 nt, Human
uuaccgcguuguaaaaua

SEQ ID NO: 3690854 - RNA, 14 nt, Human
uuaccguuucuucc

SEQ ID NO: 3690855 - RNA, 16 nt, Human
uuaccuaaacagauau

SEQ ID NO: 3690856 - RNA, 19 nt, Human
uuaccuaaacagauauaaa

SEQ ID NO: 3690857 - RNA, 16 nt, Human
uuaccuaaaguauuuu

SEQ ID NO: 3690858 - RNA, 18 nt, Human
uuaccuaagauuacaaau

SEQ ID NO: 3690859 - RNA, 20 nt, Human
uuaccuaagugacauuugua

SEQ ID NO: 3690860 - RNA, 21 nt, Human
uuaccuaagugacauuuguag

SEQ ID NO: 3690861 - RNA, 17 nt, Human
uuaccuaccacaguguc

SEQ ID NO: 3690862 - RNA, 18 nt, Human
uuaccuaccacagugucu

SEQ ID NO: 3690863 - RNA, 19 nt, Human
uuaccuagugaaacuuuuc

SEQ ID NO: 3690864 - RNA, 13 nt, Human
uuaccucagccug

SEQ ID NO: 3690865 - RNA, 22 nt, Human
uuaccuccaacagaacuaaaug

SEQ ID NO: 3690866 - RNA, 19 nt, Human
uuaccuccugagaaaaaag

SEQ ID NO: 3690867 - RNA, 15 nt, Human
uuaccuccugcccag

SEQ ID NO: 3690868 - RNA, 21 nt, Human
uuaccucugauaccucaaccc

SEQ ID NO: 3690869 - RNA, 12 nt, Human
uuaccucuuuaa

SEQ ID NO: 3690870 - RNA, 13 nt, Human
uuaccucuuugga

SEQ ID NO: 3690871 - RNA, 18 nt, Human
uuaccugaaaacacugug

SEQ ID NO: 3690872 - RNA, 17 nt, Human
uuaccugaccucuugcu

SEQ ID NO: 3690873 - RNA, 17 nt, Human
uuaccugaucaaugaca

SEQ ID NO: 3690874 - RNA, 19 nt, Human
uuaccugaucaaugacaga

SEQ ID NO: 3690875 - RNA, 23 nt, Human
uuaccugaucaaugacagagccu

SEQ ID NO: 3690876 - RNA, 14 nt, Human
uuaccugcaggcug

SEQ ID NO: 3690877 - RNA, 15 nt, Human
uuaccugcugcuucu

SEQ ID NO: 3690878 - RNA, 16 nt, Human
uuaccuggaaucaaau

SEQ ID NO: 3690879 - RNA, 15 nt, Human
uuaccuggauguucu

SEQ ID NO: 3690880 - RNA, 18 nt, Human
uuaccuguauacagugca

SEQ ID NO: 3690881 - RNA, 11 nt, Human
uuaccugucac

SEQ ID NO: 3690882 - RNA, 18 nt, Human
uuaccugucacauugcau

SEQ ID NO: 3690883 - RNA, 22 nt, Human
uuaccugucacauugcauucua

SEQ ID NO: 3690884 - RNA, 13 nt, Human
uuaccugugaaau

SEQ ID NO: 3690885 - RNA, 14 nt, Human
ugucccugugccua

SEQ ID NO: 3690886 - RNA, 19 nt, Human
ugucccuuacgugaguccu

SEQ ID NO: 3690887 - RNA, 17 nt, Human
ugucccuucacauaguu

SEQ ID NO: 3690888 - RNA, 18 nt, Human
ugucccuucacauaguuu

SEQ ID NO: 3690889 - RNA, 18 nt, Human
ugucccuugaugcacaga

SEQ ID NO: 3690890 - RNA, 14 nt, Human
ugucccuugcugua

SEQ ID NO: 3690891 - RNA, 20 nt, Human
ugucccuuucugugugaaga

SEQ ID NO: 3690892 - RNA, 16 nt, Human
ugucccuuucuuggcc

SEQ ID NO: 3690893 - RNA, 13 nt, Human
uguccgagcuuug

SEQ ID NO: 3690894 - RNA, 15 nt, Human
uguccgauuuuucca

SEQ ID NO: 3690895 - RNA, 17 nt, Human
uguccgcccucuucccc

SEQ ID NO: 3690896 - RNA, 23 nt, Human
uguccgcugggugguacccucug

SEQ ID NO: 3690897 - RNA, 16 nt, Human
uguccuaaggacacac

SEQ ID NO: 3690898 - RNA, 15 nt, Human
uguccuaauggugau

SEQ ID NO: 3690899 - RNA, 18 nt, Human
uguccuaauggugaugca

SEQ ID NO: 3690900 - RNA, 12 nt, Human
uguccuacagaa

SEQ ID NO: 3690901 - RNA, 16 nt, Human
uguccuacccacccuc

SEQ ID NO: 3690902 - RNA, 20 nt, Human
uguccuacccacccuccuuu

SEQ ID NO: 3690903 - RNA, 12 nt, Human
uguccuacucug

SEQ ID NO: 3690904 - RNA, 15 nt, Human
uguccuagcacagau

SEQ ID NO: 3690905 - RNA, 19 nt, Human
uguccuaucuaucuuccaa

SEQ ID NO: 3690906 - RNA, 12 nt, Human
uguccuaugcaa

SEQ ID NO: 3690907 - RNA, 22 nt, Human
uguccuaugugugacucuaaau

SEQ ID NO: 3690908 - RNA, 17 nt, Human
uguccuauuaguguuau

SEQ ID NO: 3690909 - RNA, 13 nt, Human
uguccucaccaug

SEQ ID NO: 3690910 - RNA, 20 nt, Human
uguccucacggugccuuuuu

SEQ ID NO: 3690911 - RNA, 20 nt, Human
uguccucagccuugccagag

SEQ ID NO: 3690912 - RNA, 21 nt, Human
uguccucagccuugccagaga

SEQ ID NO: 3690913 - RNA, 22 nt, Human
uguccucagccuugccagagau

SEQ ID NO: 3690914 - RNA, 12 nt, Human
uguccucaggga

SEQ ID NO: 3690915 - RNA, 19 nt, Human
uguccucagggagcaggga

SEQ ID NO: 3690916 - RNA, 19 nt, Human
uguccucagguggccaugc

SEQ ID NO: 3690917 - RNA, 18 nt, Human
uguccuccagaagccucu

SEQ ID NO: 3690918 - RNA, 22 nt, Human
uguccuccagaagccucuggcu

SEQ ID NO: 3690919 - RNA, 16 nt, Human
uguccuccaggagcuu

SEQ ID NO: 3690920 - RNA, 18 nt, Human
uguccucccagcuccuca

SEQ ID NO: 3690921 - RNA, 17 nt, Human
uguccucccauccccug

SEQ ID NO: 3690922 - RNA, 18 nt, Human
uguccuccccucaaggac

SEQ ID NO: 3690923 - RNA, 17 nt, Human
uguccucccgagcuccu

SEQ ID NO: 3690924 - RNA, 21 nt, Human
uguccuccucggaucaccgag

SEQ ID NO: 3690925 - RNA, 21 nt, Human
uguccuccugguggguccagg

SEQ ID NO: 3690926 - RNA, 22 nt, Human
uguccucuccccuccagccuuu

SEQ ID NO: 3690927 - RNA, 19 nt, Human
uguccucucuggcugggga

SEQ ID NO: 3690928 - RNA, 17 nt, Human
uguccucuuucagaaaa

SEQ ID NO: 3690929 - RNA, 15 nt, Human
uguccucuuucagcu

SEQ ID NO: 3690930 - RNA, 16 nt, Human
uguccucuuucagcuc

SEQ ID NO: 3690931 - RNA, 17 nt, Human
uguccucuuucagcucc

SEQ ID NO: 3690932 - RNA, 18 nt, Human
uguccucuuucagcuccu

SEQ ID NO: 3690933 - RNA, 22 nt, Human
uguccucuuuuguuguuucuua

SEQ ID NO: 3690934 - RNA, 23 nt, Human
uguccugaaaauuguuucaagaa

SEQ ID NO: 3690935 - RNA, 22 nt, Human
uguccugaaacgcuccuuugug

SEQ ID NO: 3690936 - RNA, 18 nt, Human
uguccugaaggccugagg

SEQ ID NO: 3690937 - RNA, 17 nt, Human
uguccugaccacccucc

SEQ ID NO: 3690938 - RNA, 23 nt, Human
uguccugaccacccuccccucuc

SEQ ID NO: 3690939 - RNA, 14 nt, Human
uguccugagcccca

SEQ ID NO: 3690940 - RNA, 18 nt, Human
uguccugagccccaggga

SEQ ID NO: 3690941 - RNA, 21 nt, Human
uguccugagccccagggagag

SEQ ID NO: 3690942 - RNA, 14 nt, Human
uguccugagcucag

SEQ ID NO: 3690943 - RNA, 15 nt, Human
uguccugagcucagc

SEQ ID NO: 3690944 - RNA, 17 nt, Human
uguccugagcucagcgu

SEQ ID NO: 3690945 - RNA, 18 nt, Human
uguccugauggucagcuc

SEQ ID NO: 3690946 - RNA, 19 nt, Human
uguccugauggucagcucc

SEQ ID NO: 3690947 - RNA, 18 nt, Human
uguccugcaccggggccu

SEQ ID NO: 3690948 - RNA, 18 nt, Human
uguccugccacccagccc

SEQ ID NO: 3690949 - RNA, 22 nt, Human
uguccugccacccagccccagc

SEQ ID NO: 3690950 - RNA, 22 nt, Human
uguccugccugcaauauuugaa

SEQ ID NO: 3690951 - RNA, 17 nt, Human
uguccugcuccacagug

SEQ ID NO: 3690952 - RNA, 15 nt, Human
uguccugcuucugaa

SEQ ID NO: 3690953 - RNA, 17 nt, Human
uguccugggccugcaga

SEQ ID NO: 3690954 - RNA, 13 nt, Human
uguccuggugcuc

SEQ ID NO: 3690955 - RNA, 16 nt, Human
uguccuggugcucucu

SEQ ID NO: 3690956 - RNA, 13 nt, Human
uguccugguggua

SEQ ID NO: 3690957 - RNA, 18 nt, Human
uguccuggugguauuuuc

SEQ ID NO: 3690958 - RNA, 19 nt, Human
uguccuggugguauuuuca

SEQ ID NO: 3690959 - RNA, 20 nt, Human
uguccuggugguauuuucaa

SEQ ID NO: 3690960 - RNA, 21 nt, Human
uguccuggugucacuuacugu

SEQ ID NO: 3690961 - RNA, 15 nt, Human
uguccugguucccgu

SEQ ID NO: 3690962 - RNA, 15 nt, Human
uguccuguaaacacu

SEQ ID NO: 3690963 - RNA, 20 nt, Human
uguccuguaacuguuacagu

SEQ ID NO: 3690964 - RNA, 24 nt, Human
uguccuguaguugcguggacucug

SEQ ID NO: 3690965 - RNA, 15 nt, Human
uguccugucaucauc

SEQ ID NO: 3690966 - RNA, 11 nt, Human
uguccuguccu

SEQ ID NO: 3690967 - RNA, 13 nt, Human
uguccuguccugc

SEQ ID NO: 3690968 - RNA, 15 nt, Human
uguccuguccugcuc

SEQ ID NO: 3690969 - RNA, 19 nt, Human
uguccugugagguuuccca

SEQ ID NO: 3690970 - RNA, 16 nt, Human
uguccugugucaguuu

SEQ ID NO: 3690971 - RNA, 18 nt, Human
uguccugugucaguuuau

SEQ ID NO: 3690972 - RNA, 20 nt, Human
uguccuuacccaucugcacc

SEQ ID NO: 3690973 - RNA, 12 nt, Human
uguccuuagaac

SEQ ID NO: 3690974 - RNA, 18 nt, Human
uguccuuagaacauuuua

SEQ ID NO: 3690975 - RNA, 23 nt, Human
uguccuuagccuggaccucugac

SEQ ID NO: 3690976 - RNA, 16 nt, Human
uguccuugcaccugca

SEQ ID NO: 3690977 - RNA, 12 nt, Human
uguccuuuccuu

SEQ ID NO: 3690978 - RNA, 14 nt, Human
uguccuuucuagag

SEQ ID NO: 3690979 - RNA, 22 nt, Human
uguccuuuucauaggucugaaa

SEQ ID NO: 3690980 - RNA, 16 nt, Human
uguccuuuugucuucu

SEQ ID NO: 3690981 - RNA, 17 nt, Human
uguccuuuuuguuauua

SEQ ID NO: 3690982 - RNA, 18 nt, Human
ugucgauuagacuggaca

SEQ ID NO: 3690983 - RNA, 15 nt, Human
ugucgcccagucugg

SEQ ID NO: 3690984 - RNA, 13 nt, Human
ugucgccucugca

SEQ ID NO: 3690985 - RNA, 14 nt, Human
ugucgccucugcau

SEQ ID NO: 3690986 - RNA, 12 nt, Human
ugucgcugcuuc

SEQ ID NO: 3690987 - RNA, 18 nt, Human
ugucgcuuucccuuggau

SEQ ID NO: 3690988 - RNA, 16 nt, Human
ugucggaggaaagaca

SEQ ID NO: 3690989 - RNA, 19 nt, Human
ugucggaggaaagacaaca

SEQ ID NO: 3690990 - RNA, 21 nt, Human
ugucggccccaccagugccuc

SEQ ID NO: 3690991 - RNA, 12 nt, Human
ugucggccucua

SEQ ID NO: 3690992 - RNA, 14 nt, Human
ugucggccucuaac

SEQ ID NO: 3690993 - RNA, 23 nt, Human
ugucggccucuaaccccaggccc

SEQ ID NO: 3690994 - RNA, 12 nt, Human
ugucgggcauga

SEQ ID NO: 3690995 - RNA, 21 nt, Human
ugucgggcccuucuugcugcc

SEQ ID NO: 3690996 - RNA, 22 nt, Human
ugucguaguuacucucaggcau

SEQ ID NO: 3690997 - RNA, 23 nt, Human
ugucgugagugucucuugucuaa

SEQ ID NO: 3690998 - RNA, 17 nt, Human
ugucguuaaaaacagau

SEQ ID NO: 3690999 - RNA, 20 nt, Human
ugucguugacuuuagggacu

SEQ ID NO: 3691000 - RNA, 14 nt, Human
ugucuaaaaaacaa

SEQ ID NO: 3691001 - RNA, 15 nt, Human
ugucuaaaaaccaga

SEQ ID NO: 3691002 - RNA, 17 nt, Human
ugucuaaaacaauaaaa

SEQ ID NO: 3691003 - RNA, 20 nt, Human
ugucuaaacaaugcugauuu

SEQ ID NO: 3691004 - RNA, 19 nt, Human
ugucuaaagagcuuuaguc

SEQ ID NO: 3691005 - RNA, 19 nt, Human
ugucuaaaguguauuuuca

SEQ ID NO: 3691006 - RNA, 23 nt, Human
ugucuaaaguguauuuucagagc

SEQ ID NO: 3691007 - RNA, 18 nt, Human
ugucuaacucagaauuau

SEQ ID NO: 3691008 - RNA, 19 nt, Human
ugucuaagaaacauuggaa

SEQ ID NO: 3691009 - RNA, 23 nt, Human
ugucuaagaaauugaauacuuug

SEQ ID NO: 3691010 - RNA, 14 nt, Human
ugucuaagauagua

SEQ ID NO: 3691011 - RNA, 14 nt, Human
ugucuaagauucua

SEQ ID NO: 3691012 - RNA, 18 nt, Human
ugucuaagauucuagauc

SEQ ID NO: 3691013 - RNA, 22 nt, Human
ugucuaaggucacacaguauua

SEQ ID NO: 3691014 - RNA, 13 nt, Human
ugucuaauguauu

SEQ ID NO: 3691015 - RNA, 17 nt, Human
ugucuaauguauuuuau

SEQ ID NO: 3691016 - RNA, 18 nt, Human
ugucuaauguauuuuauu

SEQ ID NO: 3691017 - RNA, 19 nt, Human
ugucuaauguauuuuauug

SEQ ID NO: 3691018 - RNA, 18 nt, Human
ugucuaauuaaaacacuu

SEQ ID NO: 3691019 - RNA, 21 nt, Human
ugucuacaaauauaagauuuu

SEQ ID NO: 3691020 - RNA, 17 nt, Human
ugucuacacuaagagag

SEQ ID NO: 3691021 - RNA, 19 nt, Human
ugucuacagagaaccugga

SEQ ID NO: 3691022 - RNA, 20 nt, Human
ugucuacauaugaucugucu

SEQ ID NO: 3691023 - RNA, 14 nt, Human
ugucuagagaggga

SEQ ID NO: 3691024 - RNA, 18 nt, Human
ugucuagcacuuccuugc

SEQ ID NO: 3691025 - RNA, 17 nt, Human
ugucuagcaugccaaca

SEQ ID NO: 3691026 - RNA, 20 nt, Human
ugucuagcaugccaacaaga

SEQ ID NO: 3691027 - RNA, 23 nt, Human
ugucuaguuguuugauucagaca

SEQ ID NO: 3691028 - RNA, 16 nt, Human
ugucuauaaaagaaac

SEQ ID NO: 3691029 - RNA, 12 nt, Human
ugucuauaaagc

SEQ ID NO: 3691030 - RNA, 16 nt, Human
ugucuaugggacucaa

SEQ ID NO: 3691031 - RNA, 18 nt, Human
ugucuauuaccuguuagu

SEQ ID NO: 3691032 - RNA, 14 nt, Human
ugucuauucagcuu

SEQ ID NO: 3691033 - RNA, 13 nt, Human
ugucuauuucugc

SEQ ID NO: 3691034 - RNA, 21 nt, Human
uaaguacagagaagccaucac

SEQ ID NO: 3691035 - RNA, 14 nt, Human
uaaguacuguaaua

SEQ ID NO: 3691036 - RNA, 16 nt, Human
uaaguagauaagcaga

SEQ ID NO: 3691037 - RNA, 12 nt, Human
uaaguagauuuc

SEQ ID NO: 3691038 - RNA, 16 nt, Human
uaaguaucugacaucu

SEQ ID NO: 3691039 - RNA, 17 nt, Human
uaaguaucuucauguau

SEQ ID NO: 3691040 - RNA, 20 nt, Human
uaaguauguguaaaauguga

SEQ ID NO: 3691041 - RNA, 17 nt, Human
uaaguauuaaaacauug

SEQ ID NO: 3691042 - RNA, 18 nt, Human
uaaguauuaaaacauugg

SEQ ID NO: 3691043 - RNA, 17 nt, Human
uaaguauuaugucucuu

SEQ ID NO: 3691044 - RNA, 21 nt, Human
uaaguauuaugucucuucuga

SEQ ID NO: 3691045 - RNA, 14 nt, Human
uaaguauucaagaa

SEQ ID NO: 3691046 - RNA, 20 nt, Human
uaaguauucuuauuuaauga

SEQ ID NO: 3691047 - RNA, 18 nt, Human
uaaguauugcaucuguau

SEQ ID NO: 3691048 - RNA, 20 nt, Human
uaaguauugcaucuguauaa

SEQ ID NO: 3691049 - RNA, 19 nt, Human
uaaguauuuauauauuuau

SEQ ID NO: 3691050 - RNA, 20 nt, Human
uaaguauuucagaugcuuua

SEQ ID NO: 3691051 - RNA, 13 nt, Human
uaaguauuuggaa

SEQ ID NO: 3691052 - RNA, 15 nt, Human
uaagucaacaguaaa

SEQ ID NO: 3691053 - RNA, 12 nt, Human
uaagucaguguu

SEQ ID NO: 3691054 - RNA, 13 nt, Human
uaagucaguguug

SEQ ID NO: 3691055 - RNA, 15 nt, Human
uaagucaguguugag

SEQ ID NO: 3691056 - RNA, 17 nt, Human
uaagucaguguugagau

SEQ ID NO: 3691057 - RNA, 14 nt, Human
uaagucauguaugu

SEQ ID NO: 3691058 - RNA, 15 nt, Human
uaagucccugccccc

SEQ ID NO: 3691059 - RNA, 22 nt, Human
uaagucccugcccccuccccuu

SEQ ID NO: 3691060 - RNA, 16 nt, Human
uaagucccugucaccu

SEQ ID NO: 3691061 - RNA, 17 nt, Human
uaaguccuuuaugugga

SEQ ID NO: 3691062 - RNA, 20 nt, Human
uaaguccuuuauguggaaaa

SEQ ID NO: 3691063 - RNA, 13 nt, Human
uaagucucaacug

SEQ ID NO: 3691064 - RNA, 16 nt, Human
uaagucucaagguagg

SEQ ID NO: 3691065 - RNA, 17 nt, Human
uaagucucuuuuuuaca

SEQ ID NO: 3691066 - RNA, 18 nt, Human
uaagucucuuuuuuacaa

SEQ ID NO: 3691067 - RNA, 13 nt, Human
uaagucuguuuua

SEQ ID NO: 3691068 - RNA, 16 nt, Human
uaagucuguuuuauga

SEQ ID NO: 3691069 - RNA, 20 nt, Human
uaagucuguuuuaugacuuc

SEQ ID NO: 3691070 - RNA, 14 nt, Human
uaagucuuucaugg

SEQ ID NO: 3691071 - RNA, 13 nt, Human
uaagugaaauaag

SEQ ID NO: 3691072 - RNA, 14 nt, Human
uaagugaaauuuau

SEQ ID NO: 3691073 - RNA, 18 nt, Human
uaagugaacacccaugaa

SEQ ID NO: 3691074 - RNA, 14 nt, Human
uaagugcccucucc

SEQ ID NO: 3691075 - RNA, 14 nt, Human
uaagugccuuccau

SEQ ID NO: 3691076 - RNA, 14 nt, Human
uaagugcugcauuu

SEQ ID NO: 3691077 - RNA, 12 nt, Human
uaagugcuguau

SEQ ID NO: 3691078 - RNA, 14 nt, Human
uaagugcuguauaa

SEQ ID NO: 3691079 - RNA, 18 nt, Human
uaagugcuguauaaaauc

SEQ ID NO: 3691080 - RNA, 19 nt, Human
uaagugcuguauaaaauca

SEQ ID NO: 3691081 - RNA, 20 nt, Human
uaagugcuguauaaaaucag

SEQ ID NO: 3691082 - RNA, 15 nt, Human
uaagugcuuuguaau

SEQ ID NO: 3691083 - RNA, 17 nt, Human
uaaguggaggcacuuua

SEQ ID NO: 3691084 - RNA, 15 nt, Human
uaagugggcccaccc

SEQ ID NO: 3691085 - RNA, 18 nt, Human
uaagugggcccacccggu

SEQ ID NO: 3691086 - RNA, 20 nt, Human
uaagugguacuaacuuuccu

SEQ ID NO: 3691087 - RNA, 15 nt, Human
uaaguggugugugua

SEQ ID NO: 3691088 - RNA, 14 nt, Human
uaaguguacauaug

SEQ ID NO: 3691089 - RNA, 13 nt, Human
uaaguguauuuuu

SEQ ID NO: 3691090 - RNA, 20 nt, Human
uaaguguauuuuucaauaaa

SEQ ID NO: 3691091 - RNA, 20 nt, Human
uaagugugugguagaaacaa

SEQ ID NO: 3691092 - RNA, 21 nt, Human
uaagugugugguagaaacaaa

SEQ ID NO: 3691093 - RNA, 17 nt, Human
uaaguguguguuuuuca

SEQ ID NO: 3691094 - RNA, 16 nt, Human
uaaguuaauaaauaag

SEQ ID NO: 3691095 - RNA, 16 nt, Human
uaaguuaauguauaua

SEQ ID NO: 3691096 - RNA, 21 nt, Human
uaaguuaauguauauaaaaau

SEQ ID NO: 3691097 - RNA, 15 nt, Human
uaaguuacaauguuu

SEQ ID NO: 3691098 - RNA, 12 nt, Human
uaaguuauugca

SEQ ID NO: 3691099 - RNA, 16 nt, Human
uaaguuauugcaguuu

SEQ ID NO: 3691100 - RNA, 20 nt, Human
uaaguuauuucuuguuuguu

SEQ ID NO: 3691101 - RNA, 20 nt, Human
uaaguucaaauucuucugaa

SEQ ID NO: 3691102 - RNA, 13 nt, Human
uaaguucacauua

SEQ ID NO: 3691103 - RNA, 16 nt, Human
uaaguucacauuagaa

SEQ ID NO: 3691104 - RNA, 12 nt, Human
uaaguucauaca

SEQ ID NO: 3691105 - RNA, 14 nt, Human
uaaguucauacauu

SEQ ID NO: 3691106 - RNA, 15 nt, Human
uaaguuccacugagc

SEQ ID NO: 3691107 - RNA, 23 nt, Human
uaaguucuggaugcauuucucug

SEQ ID NO: 3691108 - RNA, 22 nt, Human
uaaguugagauaguuuucaucc

SEQ ID NO: 3691109 - RNA, 15 nt, Human
uaaguugaggcauuu

SEQ ID NO: 3691110 - RNA, 12 nt, Human
uaaguugaguau

SEQ ID NO: 3691111 - RNA, 12 nt, Human
uaaguugcugau

SEQ ID NO: 3691112 - RNA, 13 nt, Human
uaaguuggaaaca

SEQ ID NO: 3691113 - RNA, 13 nt, Human
uaaguugggcuug

SEQ ID NO: 3691114 - RNA, 22 nt, Human
uaaguugggcuugcuauucugu

SEQ ID NO: 3691115 - RNA, 20 nt, Human
uaaguuuaugucuaaagagc

SEQ ID NO: 3691116 - RNA, 19 nt, Human
uaaguuucaggugacaugu

SEQ ID NO: 3691117 - RNA, 15 nt, Human
uaaguuucuaagauu

SEQ ID NO: 3691118 - RNA, 19 nt, Human
uaaguuucuaagauucuaa

SEQ ID NO: 3691119 - RNA, 20 nt, Human
uaaguuucuaagauucuaaa

SEQ ID NO: 3691120 - RNA, 14 nt, Human
uaaguuucucagcu

SEQ ID NO: 3691121 - RNA, 17 nt, Human
uaaguuucucugcagaa

SEQ ID NO: 3691122 - RNA, 16 nt, Human
uaaguuugauuucauu

SEQ ID NO: 3691123 - RNA, 12 nt, Human
uaaguuugcacu

SEQ ID NO: 3691124 - RNA, 18 nt, Human
uaaguuuuuuuuuaaaaa

SEQ ID NO: 3691125 - RNA, 19 nt, Human
uaauaaaaaauggaaagaa

SEQ ID NO: 3691126 - RNA, 21 nt, Human
uaauaaaaaauggaaagaauc

SEQ ID NO: 3691127 - RNA, 15 nt, Human
uaauaaaaagacaac

SEQ ID NO: 3691128 - RNA, 13 nt, Human
uaauaaaaagauu

SEQ ID NO: 3691129 - RNA, 12 nt, Human
uaauaaaaaggu

SEQ ID NO: 3691130 - RNA, 15 nt, Human
uaauaaaaaggugac

SEQ ID NO: 3691131 - RNA, 15 nt, Human
uaauaaaaauaauuu

SEQ ID NO: 3691132 - RNA, 12 nt, Human
uaauaaaagaaa

SEQ ID NO: 3691133 - RNA, 13 nt, Human
uaauaaaagaaaa

SEQ ID NO: 3691134 - RNA, 20 nt, Human
uaauaaaaggaaaagcaaau

SEQ ID NO: 3691135 - RNA, 19 nt, Human
uaauaaaauaauucuaaag

SEQ ID NO: 3691136 - RNA, 17 nt, Human
uaauaaaauaucauuca

SEQ ID NO: 3691137 - RNA, 12 nt, Human
uaauaaaauauu

SEQ ID NO: 3691138 - RNA, 13 nt, Human
uaauaaaauauuu

SEQ ID NO: 3691139 - RNA, 14 nt, Human
uaauaaaauauuuu

SEQ ID NO: 3691140 - RNA, 20 nt, Human
uaauaaaauauuuucugugu

SEQ ID NO: 3691141 - RNA, 21 nt, Human
uaauaaaauauuuucugugug

SEQ ID NO: 3691142 - RNA, 22 nt, Human
uaauaaaauauuuucugugugu

SEQ ID NO: 3691143 - RNA, 12 nt, Human
uaauaaacucau

SEQ ID NO: 3691144 - RNA, 20 nt, Human
uaauaaacuguccucuuuca

SEQ ID NO: 3691145 - RNA, 14 nt, Human
uaauaaacuguguu

SEQ ID NO: 3691146 - RNA, 15 nt, Human
uaauaaacuguguuu

SEQ ID NO: 3691147 - RNA, 17 nt, Human
uaauaaagaucauguaa

SEQ ID NO: 3691148 - RNA, 17 nt, Human
uaauaaagcgaaaaacu

SEQ ID NO: 3691149 - RNA, 20 nt, Human
uaauaaagcgaaaaacucaa

SEQ ID NO: 3691150 - RNA, 11 nt, Human
uaauaaagcug

SEQ ID NO: 3691151 - RNA, 12 nt, Human
uaauaaagcugu

SEQ ID NO: 3691152 - RNA, 16 nt, Human
uaauaaaggacuguaa

SEQ ID NO: 3691153 - RNA, 13 nt, Human
uaauaaaguauuc

SEQ ID NO: 3691154 - RNA, 18 nt, Human
uaauaaaguuuuuuucca

SEQ ID NO: 3691155 - RNA, 14 nt, Human
uaauaaauauauac

SEQ ID NO: 3691156 - RNA, 19 nt, Human
uaauaaauauuuuugccau

SEQ ID NO: 3691157 - RNA, 19 nt, Human
uaauaaaugaaugucacuu

SEQ ID NO: 3691158 - RNA, 14 nt, Human
uaauaaaugcccuc

SEQ ID NO: 3691159 - RNA, 19 nt, Human
uaauaaauguacauuaauu

SEQ ID NO: 3691160 - RNA, 21 nt, Human
uaauaaauugcaugcugcuuu

SEQ ID NO: 3691161 - RNA, 23 nt, Human
uaauaaauugcaugcugcuuuaa

SEQ ID NO: 3691162 - RNA, 13 nt, Human
uaauaacauaaca

SEQ ID NO: 3691163 - RNA, 21 nt, Human
uaauaacauuaccuuacugug

SEQ ID NO: 3691164 - RNA, 14 nt, Human
uaauaaccagacac

SEQ ID NO: 3691165 - RNA, 21 nt, Human
uaauaacugugaaguuuacau

SEQ ID NO: 3691166 - RNA, 17 nt, Human
uaauaagacauaacguu

SEQ ID NO: 3691167 - RNA, 20 nt, Human
uaauaagacauaacguuuuu

SEQ ID NO: 3691168 - RNA, 16 nt, Human
uaauaagcacuguaaa

SEQ ID NO: 3691169 - RNA, 16 nt, Human
uaauaagcuaguugaa

SEQ ID NO: 3691170 - RNA, 17 nt, Human
uaauaagggaaaaauca

SEQ ID NO: 3691171 - RNA, 15 nt, Human
uaauaagguugaaca

SEQ ID NO: 3691172 - RNA, 13 nt, Human
uaauaagguuuua

SEQ ID NO: 3691173 - RNA, 15 nt, Human
uaauaauaaauaguu

SEQ ID NO: 3691174 - RNA, 14 nt, Human
uaauaauaccucaa

SEQ ID NO: 3691175 - RNA, 13 nt, Human
uaauaauauacuu

SEQ ID NO: 3691176 - RNA, 19 nt, Human
uaauaauauacuuguggac

SEQ ID NO: 3691177 - RNA, 14 nt, Human
uaauaauauuguuu

SEQ ID NO: 3691178 - RNA, 20 nt, Human
uaauaaucuuauuagggaga

SEQ ID NO: 3691179 - RNA, 15 nt, Human
uaauaaucuuguuuc

SEQ ID NO: 3691180 - RNA, 20 nt, Human
uaauaaucuuguuucugaaa

SEQ ID NO: 3691181 - RNA, 16 nt, Human
uaauaauggcaucaau

SEQ ID NO: 3691182 - RNA, 22 nt, Human
uaauaauguuaaccaaggaaau

SEQ ID NO: 3691183 - RNA, 15 nt, Human
uaauaauguuuaaua

SEQ ID NO: 3691184 - RNA, 19 nt, Human
uaauaauuauaugcuauuu

SEQ ID NO: 3691185 - RNA, 23 nt, Human
uaauaauuauaugcuauuucuau

SEQ ID NO: 3691186 - RNA, 12 nt, Human
uuaccuguggau

SEQ ID NO: 3691187 - RNA, 13 nt, Human
uuaccuguggaua

SEQ ID NO: 3691188 - RNA, 20 nt, Human
uuaccuguggauauuuguau

SEQ ID NO: 3691189 - RNA, 13 nt, Human
uuaccugugugcu

SEQ ID NO: 3691190 - RNA, 23 nt, Human
uuaccuguuuucgcaccuaccau

SEQ ID NO: 3691191 - RNA, 19 nt, Human
uuaccuuagauuagcucug

SEQ ID NO: 3691192 - RNA, 18 nt, Human
uuaccuuauaguuacugu

SEQ ID NO: 3691193 - RNA, 20 nt, Human
uuaccuuugacaaagguaaa

SEQ ID NO: 3691194 - RNA, 20 nt, Human
uuaccuuuuuuauacauaaa

SEQ ID NO: 3691195 - RNA, 15 nt, Human
uuaccuuuuuugaua

SEQ ID NO: 3691196 - RNA, 23 nt, Human
uuacgaaaaaaugguagcauuuu

SEQ ID NO: 3691197 - RNA, 20 nt, Human
uuacgaaguucaagaucaaa

SEQ ID NO: 3691198 - RNA, 17 nt, Human
uuacgaauauuuucagu

SEQ ID NO: 3691199 - RNA, 18 nt, Human
uuacgauaaggaagaaac

SEQ ID NO: 3691200 - RNA, 18 nt, Human
uuacggcccuggccuugg

SEQ ID NO: 3691201 - RNA, 14 nt, Human
uuacggguaccuga

SEQ ID NO: 3691202 - RNA, 21 nt, Human
uuacguaguguagauuuguuu

SEQ ID NO: 3691203 - RNA, 22 nt, Human
uuacguaugucugguucucaau

SEQ ID NO: 3691204 - RNA, 12 nt, Human
uuacgugagcca

SEQ ID NO: 3691205 - RNA, 13 nt, Human
uuacgugaguccu

SEQ ID NO: 3691206 - RNA, 14 nt, Human
uuacgugaguccug

SEQ ID NO: 3691207 - RNA, 18 nt, Human
uuacuaaaauggacugug

SEQ ID NO: 3691208 - RNA, 13 nt, Human
uuacuaaacauuu

SEQ ID NO: 3691209 - RNA, 21 nt, Human
uuacuaaacauuuuguuauug

SEQ ID NO: 3691210 - RNA, 11 nt, Human
uuacuaaagaa

SEQ ID NO: 3691211 - RNA, 15 nt, Human
uuacuaacuaaacuc

SEQ ID NO: 3691212 - RNA, 17 nt, Human
uuacuaacuucuaaaac

SEQ ID NO: 3691213 - RNA, 22 nt, Human
uuacuaagccacaagaaauuug

SEQ ID NO: 3691214 - RNA, 22 nt, Human
uuacuaagcuuugccagcugcu

SEQ ID NO: 3691215 - RNA, 20 nt, Human
uuacuaaggaagauuacuca

SEQ ID NO: 3691216 - RNA, 13 nt, Human
uuacuaaguuuuu

SEQ ID NO: 3691217 - RNA, 14 nt, Human
uuacuaaguuuuua

SEQ ID NO: 3691218 - RNA, 18 nt, Human
uuacuacagccuuaauau

SEQ ID NO: 3691219 - RNA, 13 nt, Human
uuacuacugugga

SEQ ID NO: 3691220 - RNA, 13 nt, Human
uuacuagaacaca

SEQ ID NO: 3691221 - RNA, 20 nt, Human
uuacuagcaccugccaggga

SEQ ID NO: 3691222 - RNA, 19 nt, Human
uuacuagguaacuucauau

SEQ ID NO: 3691223 - RNA, 15 nt, Human
uuacuauagcaaagu

SEQ ID NO: 3691224 - RNA, 22 nt, Human
uuacuauagcaaaguaguacuu

SEQ ID NO: 3691225 - RNA, 14 nt, Human
uuacuauauauaua

SEQ ID NO: 3691226 - RNA, 21 nt, Human
uuacuaucaugucaaacguga

SEQ ID NO: 3691227 - RNA, 19 nt, Human
uuacuauuaagcaguaaaa

SEQ ID NO: 3691228 - RNA, 21 nt, Human
uuacuauuuucuacaauuaau

SEQ ID NO: 3691229 - RNA, 15 nt, Human
uuacucaaugugugc

SEQ ID NO: 3691230 - RNA, 23 nt, Human
uuacucagaauucucuaguuuga

SEQ ID NO: 3691231 - RNA, 19 nt, Human
uuacucagggcuccuccca

SEQ ID NO: 3691232 - RNA, 20 nt, Human
uuacucagggcuccucccag

SEQ ID NO: 3691233 - RNA, 17 nt, Human
uuacucaugaucuugug

SEQ ID NO: 3691234 - RNA, 16 nt, Human
uuacucauugaaaugu

SEQ ID NO: 3691235 - RNA, 21 nt, Human
uuacucauuuuuuuaauuuau

SEQ ID NO: 3691236 - RNA, 23 nt, Human
uuacuccauauauauauaugugu

SEQ ID NO: 3691237 - RNA, 12 nt, Human
uuacucuaagau

SEQ ID NO: 3691238 - RNA, 21 nt, Human
uuacucuaugccccaaauaua

SEQ ID NO: 3691239 - RNA, 16 nt, Human
uuacucuccaaccugg

SEQ ID NO: 3691240 - RNA, 23 nt, Human
uuacucucuugcaccaaauuauc

SEQ ID NO: 3691241 - RNA, 13 nt, Human
uuacucugaaggg

SEQ ID NO: 3691242 - RNA, 22 nt, Human
uuacucugaagggcaucaugca

SEQ ID NO: 3691243 - RNA, 16 nt, Human
uuacucuuguaagauu

SEQ ID NO: 3691244 - RNA, 12 nt, Human
uuacugaaugca

SEQ ID NO: 3691245 - RNA, 12 nt, Human
uuacugaccagc

SEQ ID NO: 3691246 - RNA, 20 nt, Human
uuacugaccucaccuaggaa

SEQ ID NO: 3691247 - RNA, 18 nt, Human
uuacugagcuucucugug

SEQ ID NO: 3691248 - RNA, 19 nt, Human
uuacugagcuucucuguga

SEQ ID NO: 3691249 - RNA, 14 nt, Human
uuacugauaauuuu

SEQ ID NO: 3691250 - RNA, 22 nt, Human
uuacugauagggauacaugcuc

SEQ ID NO: 3691251 - RNA, 23 nt, Human
uuacugauauauuuuacaauuuu

SEQ ID NO: 3691252 - RNA, 17 nt, Human
uuacugaucaugcauug

SEQ ID NO: 3691253 - RNA, 21 nt, Human
uuacugaucaugcauuguuga

SEQ ID NO: 3691254 - RNA, 18 nt, Human
uuacugcaaaugucauca

SEQ ID NO: 3691255 - RNA, 15 nt, Human
uuacugcagcuuugu

SEQ ID NO: 3691256 - RNA, 11 nt, Human
uuacugccuug

SEQ ID NO: 3691257 - RNA, 20 nt, Human
uuacugcuaaguauuuccca

SEQ ID NO: 3691258 - RNA, 21 nt, Human
uuacugcuaaguauuucccag

SEQ ID NO: 3691259 - RNA, 14 nt, Human
uuacugcucugaga

SEQ ID NO: 3691260 - RNA, 17 nt, Human
uuacuggacaaagaauu

SEQ ID NO: 3691261 - RNA, 13 nt, Human
uuacuggccuuuu

SEQ ID NO: 3691262 - RNA, 23 nt, Human
uuacuggcguggauuaaacuuau

SEQ ID NO: 3691263 - RNA, 16 nt, Human
uuacuggcuucucuug

SEQ ID NO: 3691264 - RNA, 24 nt, Human
uuacugguaggaacuugagaacuu

SEQ ID NO: 3691265 - RNA, 14 nt, Human
uuacugguccaaaa

SEQ ID NO: 3691266 - RNA, 15 nt, Human
uuacugguccaaaag

SEQ ID NO: 3691267 - RNA, 14 nt, Human
uuacugguugcaug

SEQ ID NO: 3691268 - RNA, 18 nt, Human
uuacugguugcauggaaa

SEQ ID NO: 3691269 - RNA, 19 nt, Human
uuacugguugcauggaaau

SEQ ID NO: 3691270 - RNA, 22 nt, Human
uuacuguacaugaaaacacauu

SEQ ID NO: 3691271 - RNA, 13 nt, Human
uuacuguaccugu

SEQ ID NO: 3691272 - RNA, 16 nt, Human
uuacuguagccucaga

SEQ ID NO: 3691273 - RNA, 21 nt, Human
uuacuguagccucagaugauu

SEQ ID NO: 3691274 - RNA, 23 nt, Human
uuacugucaaggcugcuuagaau

SEQ ID NO: 3691275 - RNA, 13 nt, Human
uuacugucaauaa

SEQ ID NO: 3691276 - RNA, 19 nt, Human
uuacugucuauuaauauuc

SEQ ID NO: 3691277 - RNA, 12 nt, Human
uuacugucuuaa

SEQ ID NO: 3691278 - RNA, 13 nt, Human
uuacugucuuaau

SEQ ID NO: 3691279 - RNA, 19 nt, Human
uuacugucuuuuuucuaaa

SEQ ID NO: 3691280 - RNA, 14 nt, Human
uuacuguggaggaa

SEQ ID NO: 3691281 - RNA, 18 nt, Human
uuacuguggaggaaggau

SEQ ID NO: 3691282 - RNA, 16 nt, Human
uuacuguguaauuagu

SEQ ID NO: 3691283 - RNA, 20 nt, Human
uuacuguguaauuagugcca

SEQ ID NO: 3691284 - RNA, 13 nt, Human
uuacugugucuuu

SEQ ID NO: 3691285 - RNA, 23 nt, Human
uuacuguucauuugauuuguaca

SEQ ID NO: 3691286 - RNA, 12 nt, Human
uuacuguucuug

SEQ ID NO: 3691287 - RNA, 13 nt, Human
uuacuguucuugc

SEQ ID NO: 3691288 - RNA, 17 nt, Human
uuacuguucuugcugcu

SEQ ID NO: 3691289 - RNA, 19 nt, Human
uuacuguucuugcugcuag

SEQ ID NO: 3691290 - RNA, 22 nt, Human
uuacuguucuugcugcuagaac

SEQ ID NO: 3691291 - RNA, 15 nt, Human
uuacuguuuauuucu

SEQ ID NO: 3691292 - RNA, 16 nt, Human
uuacuguuuauuucug

SEQ ID NO: 3691293 - RNA, 15 nt, Human
uuacuguuuguuaug

SEQ ID NO: 3691294 - RNA, 22 nt, Human
uuacuuaaagauuuaucaaauc

SEQ ID NO: 3691295 - RNA, 16 nt, Human
uuacuuaaucaaaacu

SEQ ID NO: 3691296 - RNA, 15 nt, Human
uuacuuagaggaaau

SEQ ID NO: 3691297 - RNA, 13 nt, Human
uuacuuaguauug

SEQ ID NO: 3691298 - RNA, 19 nt, Human
uuacuuaguauugcaaagu

SEQ ID NO: 3691299 - RNA, 17 nt, Human
uuacuuaucccugccca

SEQ ID NO: 3691300 - RNA, 19 nt, Human
uuacuucacuuuaauucuc

SEQ ID NO: 3691301 - RNA, 14 nt, Human
uuacuuccaugaau

SEQ ID NO: 3691302 - RNA, 15 nt, Human
uuacuuccaugaauu

SEQ ID NO: 3691303 - RNA, 12 nt, Human
uuacuucugcua

SEQ ID NO: 3691304 - RNA, 23 nt, Human
uuacuucuuauacauuugauaaa

SEQ ID NO: 3691305 - RNA, 13 nt, Human
uuacuucuucucu

SEQ ID NO: 3691306 - RNA, 18 nt, Human
uuacuugaauaguauugu

SEQ ID NO: 3691307 - RNA, 14 nt, Human
uuacuugaccuccu

SEQ ID NO: 3691308 - RNA, 17 nt, Human
uuacuuggaaauauuaa

SEQ ID NO: 3691309 - RNA, 13 nt, Human
uuacuuguaaaua

SEQ ID NO: 3691310 - RNA, 23 nt, Human
uuacuuguaaauauaaagacguu

SEQ ID NO: 3691311 - RNA, 17 nt, Human
uuacuuguugccuauaa

SEQ ID NO: 3691312 - RNA, 16 nt, Human
uuacuuuaaacuuguc

SEQ ID NO: 3691313 - RNA, 20 nt, Human
uuacuuuacugccugaauaa

SEQ ID NO: 3691314 - RNA, 16 nt, Human
uuacuuuauguuacua

SEQ ID NO: 3691315 - RNA, 19 nt, Human
uuacuuuccaauucuccuu

SEQ ID NO: 3691316 - RNA, 11 nt, Human
uuacuuucccu

SEQ ID NO: 3691317 - RNA, 17 nt, Human
uuacuuucccuugcuuu

SEQ ID NO: 3691318 - RNA, 14 nt, Human
uuacuuuccucuga

SEQ ID NO: 3691319 - RNA, 13 nt, Human
uuacuuugcugag

SEQ ID NO: 3691320 - RNA, 14 nt, Human
uuacuuuguaaauu

SEQ ID NO: 3691321 - RNA, 23 nt, Human
uuacuuuguaaauucugauuucu

SEQ ID NO: 3691322 - RNA, 19 nt, Human
uuacuuuuaaacuguguac

SEQ ID NO: 3691323 - RNA, 21 nt, Human
uuacuuuuauuugcaacauuu

SEQ ID NO: 3691324 - RNA, 23 nt, Human
uuacuuuuauuugcaacauuuac

SEQ ID NO: 3691325 - RNA, 21 nt, Human
uuacuuuucauauuugcacua

SEQ ID NO: 3691326 - RNA, 14 nt, Human
uuacuuuugcugua

SEQ ID NO: 3691327 - RNA, 14 nt, Human
uuacuuuuuaaaau

SEQ ID NO: 3691328 - RNA, 15 nt, Human
uuagaaaaaaauuac

SEQ ID NO: 3691329 - RNA, 23 nt, Human
uuagaaaaaaguuuacaacauaa

SEQ ID NO: 3691330 - RNA, 21 nt, Human
uuagaaaaagaacaugcaguu

SEQ ID NO: 3691331 - RNA, 23 nt, Human
uuagaaaaccagcucagcacugc

SEQ ID NO: 3691332 - RNA, 14 nt, Human
uuagaaaacuuuaa

SEQ ID NO: 3691333 - RNA, 15 nt, Human
uuagaaaacuuuguu

SEQ ID NO: 3691334 - RNA, 12 nt, Human
uuagaaaaggca

SEQ ID NO: 3691335 - RNA, 22 nt, Human
uuagaaaaggugauaaaaucau

SEQ ID NO: 3691336 - RNA, 17 nt, Human
ugucucaagagggcacu

SEQ ID NO: 3691337 - RNA, 23 nt, Human
ugucucaagagggcacugguggc

SEQ ID NO: 3691338 - RNA, 19 nt, Human
ugucucaaugcucauaacg

SEQ ID NO: 3691339 - RNA, 17 nt, Human
ugucucacuaaagcaug

SEQ ID NO: 3691340 - RNA, 20 nt, Human
ugucucacuaaagcaugaaa

SEQ ID NO: 3691341 - RNA, 14 nt, Human
ugucucacugagca

SEQ ID NO: 3691342 - RNA, 20 nt, Human
ugucucacugagcacuguuu

SEQ ID NO: 3691343 - RNA, 16 nt, Human
ugucucagauuuuauu

SEQ ID NO: 3691344 - RNA, 20 nt, Human
ugucucagauuuuauuaugu

SEQ ID NO: 3691345 - RNA, 13 nt, Human
ugucucaggcugc

SEQ ID NO: 3691346 - RNA, 22 nt, Human
ugucucaguccaugaagaugua

SEQ ID NO: 3691347 - RNA, 16 nt, Human
ugucucaguuggaaau

SEQ ID NO: 3691348 - RNA, 17 nt, Human
ugucucauccaucauca

SEQ ID NO: 3691349 - RNA, 14 nt, Human
ugucucauccuccu

SEQ ID NO: 3691350 - RNA, 18 nt, Human
ugucucauccuccuggaa

SEQ ID NO: 3691351 - RNA, 20 nt, Human
ugucucaugugugcucuucu

SEQ ID NO: 3691352 - RNA, 23 nt, Human
ugucucauuuuaauguaaagauu

SEQ ID NO: 3691353 - RNA, 14 nt, Human
ugucuccacugugc

SEQ ID NO: 3691354 - RNA, 14 nt, Human
ugucuccagacccc

SEQ ID NO: 3691355 - RNA, 16 nt, Human
ugucuccagaccccca

SEQ ID NO: 3691356 - RNA, 23 nt, Human
ugucuccccuguuccccucuccc

SEQ ID NO: 3691357 - RNA, 24 nt, Human
ugucucccgccccccacacuuccc

SEQ ID NO: 3691358 - RNA, 23 nt, Human
ugucucccuauaaugcuggagcg

SEQ ID NO: 3691359 - RNA, 14 nt, Human
ugucucccuggccc

SEQ ID NO: 3691360 - RNA, 16 nt, Human
ugucuccuacugagga

SEQ ID NO: 3691361 - RNA, 22 nt, Human
ugucuccuauauauuucuauua

SEQ ID NO: 3691362 - RNA, 21 nt, Human
ugucuccucuauccugggcuu

SEQ ID NO: 3691363 - RNA, 11 nt, Human
ugucuccuggc

SEQ ID NO: 3691364 - RNA, 18 nt, Human
ugucucgagcgcccugca

SEQ ID NO: 3691365 - RNA, 19 nt, Human
ugucucgagcgcccugcag

SEQ ID NO: 3691366 - RNA, 20 nt, Human
ugucucgugguaggacugua

SEQ ID NO: 3691367 - RNA, 21 nt, Human
ugucucgugguaggacuguag

SEQ ID NO: 3691368 - RNA, 19 nt, Human
ugucucuagccacuuuggu

SEQ ID NO: 3691369 - RNA, 13 nt, Human
ugucucucagaau

SEQ ID NO: 3691370 - RNA, 20 nt, Human
ugucucuccuuuucuuuugu

SEQ ID NO: 3691371 - RNA, 22 nt, Human
ugucucuccuuuucuuuuguua

SEQ ID NO: 3691372 - RNA, 18 nt, Human
ugucucucuucucagagu

SEQ ID NO: 3691373 - RNA, 16 nt, Human
ugucucugaagcguga

SEQ ID NO: 3691374 - RNA, 13 nt, Human
ugucucugagagu

SEQ ID NO: 3691375 - RNA, 17 nt, Human
ugucucugccucccuca

SEQ ID NO: 3691376 - RNA, 22 nt, Human
ugucucugccucccucacccug

SEQ ID NO: 3691377 - RNA, 13 nt, Human
ugucucuggccug

SEQ ID NO: 3691378 - RNA, 16 nt, Human
ugucucugucauggua

SEQ ID NO: 3691379 - RNA, 13 nt, Human
ugucucuuccaua

SEQ ID NO: 3691380 - RNA, 13 nt, Human
ugucucuugaaaa

SEQ ID NO: 3691381 - RNA, 15 nt, Human
ugucucuugaaaaau

SEQ ID NO: 3691382 - RNA, 14 nt, Human
ugucucuugaguuu

SEQ ID NO: 3691383 - RNA, 19 nt, Human
ugucucuugguccugcugc

SEQ ID NO: 3691384 - RNA, 23 nt, Human
ugucucuuuggcgaccuccuuuc

SEQ ID NO: 3691385 - RNA, 17 nt, Human
ugucucuuuuuuaaguu

SEQ ID NO: 3691386 - RNA, 12 nt, Human
ugucugaaaaau

SEQ ID NO: 3691387 - RNA, 18 nt, Human
ugucugaacuugcauugu

SEQ ID NO: 3691388 - RNA, 17 nt, Human
ugucugaaggacacuuc

SEQ ID NO: 3691389 - RNA, 19 nt, Human
ugucugaaggacacuuccu

SEQ ID NO: 3691390 - RNA, 23 nt, Human
ugucugaaggacacuuccugccu

SEQ ID NO: 3691391 - RNA, 18 nt, Human
ugucugaagucacugcac

SEQ ID NO: 3691392 - RNA, 19 nt, Human
ugucugaagucacugcaca

SEQ ID NO: 3691393 - RNA, 22 nt, Human
ugucugaaucgagugagacaaa

SEQ ID NO: 3691394 - RNA, 20 nt, Human
ugucugagacagaaucucag

SEQ ID NO: 3691395 - RNA, 18 nt, Human
ugucugagcccucaaagu

SEQ ID NO: 3691396 - RNA, 20 nt, Human
ugucugagcccucaaaguga

SEQ ID NO: 3691397 - RNA, 14 nt, Human
ugucugagugaacc

SEQ ID NO: 3691398 - RNA, 15 nt, Human
ugucugagugaaccu

SEQ ID NO: 3691399 - RNA, 20 nt, Human
ugucugagugaaccuguaua

SEQ ID NO: 3691400 - RNA, 21 nt, Human
ugucugagugaaccuguauaa

SEQ ID NO: 3691401 - RNA, 21 nt, Human
ugucugauuggcuuguagaau

SEQ ID NO: 3691402 - RNA, 23 nt, Human
ugucugauuggcuuguagaauug

SEQ ID NO: 3691403 - RNA, 21 nt, Human
ugucugcacaccuugaaucug

SEQ ID NO: 3691404 - RNA, 15 nt, Human
ugucugcacccaggg

SEQ ID NO: 3691405 - RNA, 18 nt, Human
ugucugcaggauugauua

SEQ ID NO: 3691406 - RNA, 13 nt, Human
ugucugcauuucg

SEQ ID NO: 3691407 - RNA, 15 nt, Human
ugucugccaaccuaa

SEQ ID NO: 3691408 - RNA, 16 nt, Human
ugucugccaauuuuug

SEQ ID NO: 3691409 - RNA, 18 nt, Human
ugucugccacauuaacua

SEQ ID NO: 3691410 - RNA, 18 nt, Human
ugucugccagccagcagc

SEQ ID NO: 3691411 - RNA, 19 nt, Human
ugucugccccagcccagau

SEQ ID NO: 3691412 - RNA, 14 nt, Human
ugucugccucuuag

SEQ ID NO: 3691413 - RNA, 15 nt, Human
ugucugcgaaguccu

SEQ ID NO: 3691414 - RNA, 23 nt, Human
ugucugcgaaguccuauggaaac

SEQ ID NO: 3691415 - RNA, 17 nt, Human
ugucugcuccagcucug

SEQ ID NO: 3691416 - RNA, 23 nt, Human
ugucugcuggucacuucuucugu

SEQ ID NO: 3691417 - RNA, 15 nt, Human
ugucuggaauugugg

SEQ ID NO: 3691418 - RNA, 12 nt, Human
ugucuggagacc

SEQ ID NO: 3691419 - RNA, 13 nt, Human
ugucuggagacca

SEQ ID NO: 3691420 - RNA, 17 nt, Human
ugucuggagaccaccag

SEQ ID NO: 3691421 - RNA, 20 nt, Human
ugucuggaucaguaaaauua

SEQ ID NO: 3691422 - RNA, 21 nt, Human
ugucuggaucaguaaaauuau

SEQ ID NO: 3691423 - RNA, 15 nt, Human
ugucuggcaaugcca

SEQ ID NO: 3691424 - RNA, 22 nt, Human
ugucuggcaaugccacagcccu

SEQ ID NO: 3691425 - RNA, 20 nt, Human
ugucuggcacagccugcacu

SEQ ID NO: 3691426 - RNA, 19 nt, Human
ugucuggcugaggauuuca

SEQ ID NO: 3691427 - RNA, 14 nt, Human
ugucuggcugcaga

SEQ ID NO: 3691428 - RNA, 21 nt, Human
ugucuggggagcgggucugcu

SEQ ID NO: 3691429 - RNA, 14 nt, Human
ugucuggggcagaa

SEQ ID NO: 3691430 - RNA, 20 nt, Human
ugucugggugcuacugggga

SEQ ID NO: 3691431 - RNA, 16 nt, Human
ugucuggguuugagaa

SEQ ID NO: 3691432 - RNA, 14 nt, Human
ugucugguggcccc

SEQ ID NO: 3691433 - RNA, 14 nt, Human
ugucugguuaaaaa

SEQ ID NO: 3691434 - RNA, 16 nt, Human
ugucugguuuuaacaa

SEQ ID NO: 3691435 - RNA, 12 nt, Human
ugucuguaaaua

SEQ ID NO: 3691436 - RNA, 21 nt, Human
ugucuguaaaucuaacauuau

SEQ ID NO: 3691437 - RNA, 13 nt, Human
ugucuguacacgu

SEQ ID NO: 3691438 - RNA, 19 nt, Human
ugucuguacacguguccug

SEQ ID NO: 3691439 - RNA, 14 nt, Human
ugucuguauuucau

SEQ ID NO: 3691440 - RNA, 20 nt, Human
ugucuguauuucauguggcu

SEQ ID NO: 3691441 - RNA, 21 nt, Human
ugucugucccgggguccugug

SEQ ID NO: 3691442 - RNA, 14 nt, Human
ugucuguccuuuau

SEQ ID NO: 3691443 - RNA, 14 nt, Human
ugucugucuggcac

SEQ ID NO: 3691444 - RNA, 16 nt, Human
ugucugucugguccau

SEQ ID NO: 3691445 - RNA, 15 nt, Human
ugucugucuguccca

SEQ ID NO: 3691446 - RNA, 15 nt, Human
ugucugucugucugu

SEQ ID NO: 3691447 - RNA, 15 nt, Human
ugucugugucagccu

SEQ ID NO: 3691448 - RNA, 20 nt, Human
ugucuguguuuugaaagaau

SEQ ID NO: 3691449 - RNA, 11 nt, Human
ugucuguuaca

SEQ ID NO: 3691450 - RNA, 17 nt, Human
ugucuguuacacuggag

SEQ ID NO: 3691451 - RNA, 19 nt, Human
ugucuguuaccaugucacu

SEQ ID NO: 3691452 - RNA, 15 nt, Human
ugucuguucuacaua

SEQ ID NO: 3691453 - RNA, 16 nt, Human
ugucuguuguauucau

SEQ ID NO: 3691454 - RNA, 15 nt, Human
ugucuguuuaagaaa

SEQ ID NO: 3691455 - RNA, 13 nt, Human
ugucuguuuguuu

SEQ ID NO: 3691456 - RNA, 23 nt, Human
ugucuguuuguuucaagaaccug

SEQ ID NO: 3691457 - RNA, 16 nt, Human
ugucuguuuuaaaaac

SEQ ID NO: 3691458 - RNA, 14 nt, Human
ugucuuaaauaaaa

SEQ ID NO: 3691459 - RNA, 20 nt, Human
ugucuuaaauaaaagaaaug

SEQ ID NO: 3691460 - RNA, 15 nt, Human
ugucuuaaugaaguu

SEQ ID NO: 3691461 - RNA, 19 nt, Human
ugucuuaaugaaguuugaa

SEQ ID NO: 3691462 - RNA, 22 nt, Human
ugucuuaaugaaguuugaaugu

SEQ ID NO: 3691463 - RNA, 16 nt, Human
ugucuuaauggaugaa

SEQ ID NO: 3691464 - RNA, 13 nt, Human
ugucuuaauuaag

SEQ ID NO: 3691465 - RNA, 16 nt, Human
ugucuuaauuaaguaa

SEQ ID NO: 3691466 - RNA, 18 nt, Human
ugucuuaauuaaguaaac

SEQ ID NO: 3691467 - RNA, 22 nt, Human
ugucuuaauuaaguaaacuaau

SEQ ID NO: 3691468 - RNA, 15 nt, Human
ugucuuaauuauuau

SEQ ID NO: 3691469 - RNA, 18 nt, Human
ugucuuaauuuucuuuca

SEQ ID NO: 3691470 - RNA, 14 nt, Human
ugucuuauauagca

SEQ ID NO: 3691471 - RNA, 17 nt, Human
ugucuuauuuuuagaug

SEQ ID NO: 3691472 - RNA, 13 nt, Human
ugucuucaccuga

SEQ ID NO: 3691473 - RNA, 24 nt, Human
ugucuucaccugauucaacuaaaa

SEQ ID NO: 3691474 - RNA, 22 nt, Human
ugucuucagccucuccaggcac

SEQ ID NO: 3691475 - RNA, 15 nt, Human
ugucuucauaaagua

SEQ ID NO: 3691476 - RNA, 21 nt, Human
ugucuucauccuuagcaacag

SEQ ID NO: 3691477 - RNA, 15 nt, Human
ugucuucauguacau

SEQ ID NO: 3691478 - RNA, 13 nt, Human
ugucuuccauaau

SEQ ID NO: 3691479 - RNA, 17 nt, Human
ugucuuccauaauguau

SEQ ID NO: 3691480 - RNA, 16 nt, Human
ugucuuccauguaucu

SEQ ID NO: 3691481 - RNA, 18 nt, Human
ugucuuccauuccauugu

SEQ ID NO: 3691482 - RNA, 22 nt, Human
ugucuucccaggguagcccgcc

SEQ ID NO: 3691483 - RNA, 16 nt, Human
ugucuuccuauuucag

SEQ ID NO: 3691484 - RNA, 22 nt, Human
ugucuuccucaaaauaaagaag

SEQ ID NO: 3691485 - RNA, 14 nt, Human
uuagaaaccuuaau

SEQ ID NO: 3691486 - RNA, 13 nt, Human
uuagaaacuggaa

SEQ ID NO: 3691487 - RNA, 22 nt, Human
uuagaaagaagcccaauauuau

SEQ ID NO: 3691488 - RNA, 12 nt, Human
uuagaaagcauu

SEQ ID NO: 3691489 - RNA, 13 nt, Human
uuagaaagcauuu

SEQ ID NO: 3691490 - RNA, 21 nt, Human
uuagaaagcauuugaaugcau

SEQ ID NO: 3691491 - RNA, 23 nt, Human
uuagaaagcauuugaaugcauuu

SEQ ID NO: 3691492 - RNA, 22 nt, Human
uuagaaagcugacauugccaaa

SEQ ID NO: 3691493 - RNA, 17 nt, Human
uuagaaauaaagcaucu

SEQ ID NO: 3691494 - RNA, 16 nt, Human
uuagaaauaacagaag

SEQ ID NO: 3691495 - RNA, 14 nt, Human
uuagaaauauaauu

SEQ ID NO: 3691496 - RNA, 22 nt, Human
uuagaaauauuuuaaaaucagc

SEQ ID NO: 3691497 - RNA, 18 nt, Human
uuagaaaugaccaauauu

SEQ ID NO: 3691498 - RNA, 17 nt, Human
uuagaacacuauuuuca

SEQ ID NO: 3691499 - RNA, 20 nt, Human
uuagaacacugguuuaaagg

SEQ ID NO: 3691500 - RNA, 16 nt, Human
uuagaacagaaaacaa

SEQ ID NO: 3691501 - RNA, 22 nt, Human
uuagaacaggcaagugaagaaa

SEQ ID NO: 3691502 - RNA, 13 nt, Human
uuagaacagguuu

SEQ ID NO: 3691503 - RNA, 12 nt, Human
uuagaacauuuu

SEQ ID NO: 3691504 - RNA, 18 nt, Human
uuagaacauuuuaauuca

SEQ ID NO: 3691505 - RNA, 16 nt, Human
uuagaagaaguguguc

SEQ ID NO: 3691506 - RNA, 18 nt, Human
uuagaagauauuagucuu

SEQ ID NO: 3691507 - RNA, 13 nt, Human
uuagaagccugca

SEQ ID NO: 3691508 - RNA, 16 nt, Human
uuagaagucacacagu

SEQ ID NO: 3691509 - RNA, 17 nt, Human
uuagaagugcauuucug

SEQ ID NO: 3691510 - RNA, 17 nt, Human
uuagaagugucauguuu

SEQ ID NO: 3691511 - RNA, 16 nt, Human
uuagaauaaauuccca

SEQ ID NO: 3691512 - RNA, 19 nt, Human
uuagaauaagaauuugcau

SEQ ID NO: 3691513 - RNA, 21 nt, Human
uuagaaucagccuugaaacau

SEQ ID NO: 3691514 - RNA, 22 nt, Human
uuagaauccaaacuuggauuuu

SEQ ID NO: 3691515 - RNA, 23 nt, Human
uuagaaucccuguguuaauuuaa

SEQ ID NO: 3691516 - RNA, 23 nt, Human
uuagaaucuauuuucuauguacu

SEQ ID NO: 3691517 - RNA, 12 nt, Human
uuagaaugaaaa

SEQ ID NO: 3691518 - RNA, 13 nt, Human
uuagaauguugaa

SEQ ID NO: 3691519 - RNA, 13 nt, Human
uuagaauuaaaaa

SEQ ID NO: 3691520 - RNA, 17 nt, Human
uuagaauuaccauuugu

SEQ ID NO: 3691521 - RNA, 23 nt, Human
uuagaauuaguggcacuugcuuu

SEQ ID NO: 3691522 - RNA, 12 nt, Human
uuagaauuauuu

SEQ ID NO: 3691523 - RNA, 15 nt, Human
uuagaauuauuuaaa

SEQ ID NO: 3691524 - RNA, 16 nt, Human
uuagaauuauuuaaac

SEQ ID NO: 3691525 - RNA, 18 nt, Human
uuagaauuccuucagggu

SEQ ID NO: 3691526 - RNA, 17 nt, Human
uuagaauucuguauaga

SEQ ID NO: 3691527 - RNA, 18 nt, Human
uuagaauugaagguuuuu

SEQ ID NO: 3691528 - RNA, 19 nt, Human
uuagaauuuugugaaacag

SEQ ID NO: 3691529 - RNA, 20 nt, Human
uuagacaaauacucaugugu

SEQ ID NO: 3691530 - RNA, 21 nt, Human
uuagacaaauacucaugugua

SEQ ID NO: 3691531 - RNA, 17 nt, Human
uuagacaccuucauuuu

SEQ ID NO: 3691532 - RNA, 22 nt, Human
uuagacagaacaccuaugcaaa

SEQ ID NO: 3691533 - RNA, 13 nt, Human
uuagacagagucu

SEQ ID NO: 3691534 - RNA, 13 nt, Human
uuagaccaaggaa

SEQ ID NO: 3691535 - RNA, 15 nt, Human
uuagaccacaaauag

SEQ ID NO: 3691536 - RNA, 16 nt, Human
uuagaccaccaagccu

SEQ ID NO: 3691537 - RNA, 21 nt, Human
uuagacucaucaaucaaauaa

SEQ ID NO: 3691538 - RNA, 19 nt, Human
uuagacucaucuuacugua

SEQ ID NO: 3691539 - RNA, 21 nt, Human
uuagacucaugguguguuaca

SEQ ID NO: 3691540 - RNA, 13 nt, Human
uuagacuccuccu

SEQ ID NO: 3691541 - RNA, 17 nt, Human
uuagacucuuuuccuuc

SEQ ID NO: 3691542 - RNA, 16 nt, Human
uuagacugccagcucu

SEQ ID NO: 3691543 - RNA, 15 nt, Human
uuagacuggacagcu

SEQ ID NO: 3691544 - RNA, 16 nt, Human
uuagacuggacagcuu

SEQ ID NO: 3691545 - RNA, 20 nt, Human
uuagacuguagccuggauau

SEQ ID NO: 3691546 - RNA, 23 nt, Human
uuagacuguaggaagaguagcau

SEQ ID NO: 3691547 - RNA, 15 nt, Human
uuagacuuacuauua

SEQ ID NO: 3691548 - RNA, 14 nt, Human
uuagacuucuguuu

SEQ ID NO: 3691549 - RNA, 15 nt, Human
uuagacuucuguuuu

SEQ ID NO: 3691550 - RNA, 19 nt, Human
uuagacuucuguuuucaau

SEQ ID NO: 3691551 - RNA, 20 nt, Human
uuagacuugaaaagagacag

SEQ ID NO: 3691552 - RNA, 22 nt, Human
uuagacuuuaacauaagcuauu

SEQ ID NO: 3691553 - RNA, 13 nt, Human
uuagagaaaacua

SEQ ID NO: 3691554 - RNA, 18 nt, Human
uuagagaguguugaaacg

SEQ ID NO: 3691555 - RNA, 15 nt, Human
uuagagauaagaguu

SEQ ID NO: 3691556 - RNA, 21 nt, Human
uuagagcagaugaccccuccc

SEQ ID NO: 3691557 - RNA, 15 nt, Human
uuagagcauugccau

SEQ ID NO: 3691558 - RNA, 16 nt, Human
uuagagccaggcacac

SEQ ID NO: 3691559 - RNA, 22 nt, Human
uuagagccaggcacacacugug

SEQ ID NO: 3691560 - RNA, 14 nt, Human
uuagagccucccuc

SEQ ID NO: 3691561 - RNA, 19 nt, Human
uuagaggaaaaaaaugacu

SEQ ID NO: 3691562 - RNA, 18 nt, Human
uuagagggaggagaauga

SEQ ID NO: 3691563 - RNA, 18 nt, Human
uuagagggagguguuuaa

SEQ ID NO: 3691564 - RNA, 20 nt, Human
uuagagguuuuaaagugauu

SEQ ID NO: 3691565 - RNA, 22 nt, Human
uuagagucaacuacacaaagca

SEQ ID NO: 3691566 - RNA, 20 nt, Human
uuagaguccuaguuuuccua

SEQ ID NO: 3691567 - RNA, 13 nt, Human
uuagagugucuua

SEQ ID NO: 3691568 - RNA, 12 nt, Human
uuagaguuagac

SEQ ID NO: 3691569 - RNA, 13 nt, Human
uuagaguuagacu

SEQ ID NO: 3691570 - RNA, 13 nt, Human
uuagaguuucugu

SEQ ID NO: 3691571 - RNA, 17 nt, Human
uuagaguuucuguuuga

SEQ ID NO: 3691572 - RNA, 15 nt, Human
uuagauaaauauuga

SEQ ID NO: 3691573 - RNA, 15 nt, Human
uuagaucauaguuuu

SEQ ID NO: 3691574 - RNA, 19 nt, Human
uuagaugcauauuacugua

SEQ ID NO: 3691575 - RNA, 16 nt, Human
uuagauggauucucca

SEQ ID NO: 3691576 - RNA, 15 nt, Human
uuagaugugagaaaa

SEQ ID NO: 3691577 - RNA, 13 nt, Human
uuagaugugauuu

SEQ ID NO: 3691578 - RNA, 20 nt, Human
uuagaugugauuuaauagug

SEQ ID NO: 3691579 - RNA, 21 nt, Human
uuagaugugauuuaauagugu

SEQ ID NO: 3691580 - RNA, 16 nt, Human
uuagaugugcugcuuu

SEQ ID NO: 3691581 - RNA, 20 nt, Human
uuagauguucucuaucauuu

SEQ ID NO: 3691582 - RNA, 22 nt, Human
uuagauguucucuaucauuuaa

SEQ ID NO: 3691583 - RNA, 19 nt, Human
uuagauguugccauguguu

SEQ ID NO: 3691584 - RNA, 14 nt, Human
uuagauuagcucug

SEQ ID NO: 3691585 - RNA, 14 nt, Human
uuagauuauugaaa

SEQ ID NO: 3691586 - RNA, 20 nt, Human
uuagauucucugugucuaag

SEQ ID NO: 3691587 - RNA, 22 nt, Human
uuagauucucugugucuaagau

SEQ ID NO: 3691588 - RNA, 19 nt, Human
uuagauugagaaaugugua

SEQ ID NO: 3691589 - RNA, 13 nt, Human
uuagauuguaaac

SEQ ID NO: 3691590 - RNA, 10 nt, Human
uuagauuuca

SEQ ID NO: 3691591 - RNA, 21 nt, Human
uuagauuucucacacucuaac

SEQ ID NO: 3691592 - RNA, 16 nt, Human
uuagauuugccauaga

SEQ ID NO: 3691593 - RNA, 13 nt, Human
uuagauuuuaauc

SEQ ID NO: 3691594 - RNA, 20 nt, Human
uuagauuuucugguucuaac

SEQ ID NO: 3691595 - RNA, 14 nt, Human
uuagcaaaaaaagu

SEQ ID NO: 3691596 - RNA, 16 nt, Human
uuagcaaaaaaaguug

SEQ ID NO: 3691597 - RNA, 13 nt, Human
uuagcaaagaguu

SEQ ID NO: 3691598 - RNA, 20 nt, Human
uuagcaaagaguuaauauau

SEQ ID NO: 3691599 - RNA, 18 nt, Human
uuagcaaauucuguuuuu

SEQ ID NO: 3691600 - RNA, 17 nt, Human
uuagcacaaaaaaaauu

SEQ ID NO: 3691601 - RNA, 20 nt, Human
uuagcacagauuuuaauugu

SEQ ID NO: 3691602 - RNA, 21 nt, Human
uuagcacuguugauguaucug

SEQ ID NO: 3691603 - RNA, 12 nt, Human
uuagcagacagg

SEQ ID NO: 3691604 - RNA, 20 nt, Human
uuagcaggagaggagagcca

SEQ ID NO: 3691605 - RNA, 19 nt, Human
uuagcaggccaaggucuga

SEQ ID NO: 3691606 - RNA, 16 nt, Human
uuagcaguaaaauagc

SEQ ID NO: 3691607 - RNA, 17 nt, Human
uuagcagugauuuuuau

SEQ ID NO: 3691608 - RNA, 21 nt, Human
uuagcaguucugcaaauagaa

SEQ ID NO: 3691609 - RNA, 21 nt, Human
uuagcaugacaagccccaggc

SEQ ID NO: 3691610 - RNA, 15 nt, Human
uuagcaugcacaaag

SEQ ID NO: 3691611 - RNA, 20 nt, Human
uuagcauuuucugcaucucc

SEQ ID NO: 3691612 - RNA, 13 nt, Human
uuagccacaaaau

SEQ ID NO: 3691613 - RNA, 17 nt, Human
uuagccagauuugucuu

SEQ ID NO: 3691614 - RNA, 15 nt, Human
uuagccaguaauccu

SEQ ID NO: 3691615 - RNA, 14 nt, Human
uuagccccauaauu

SEQ ID NO: 3691616 - RNA, 13 nt, Human
uuagcccccaccc

SEQ ID NO: 3691617 - RNA, 15 nt, Human
uuagcccugaacauu

SEQ ID NO: 3691618 - RNA, 15 nt, Human
uuagccuaagauaua

SEQ ID NO: 3691619 - RNA, 16 nt, Human
uuagccuaagauauac

SEQ ID NO: 3691620 - RNA, 15 nt, Human
uuagccucccugaaa

SEQ ID NO: 3691621 - RNA, 12 nt, Human
uuagccuggagc

SEQ ID NO: 3691622 - RNA, 23 nt, Human
uuagccuggagcaccuuuccuuc

SEQ ID NO: 3691623 - RNA, 22 nt, Human
uuagccuguggcaguaaagaga

SEQ ID NO: 3691624 - RNA, 15 nt, Human
uuagcuaauaaaaag

SEQ ID NO: 3691625 - RNA, 12 nt, Human
uuagcucagccc

SEQ ID NO: 3691626 - RNA, 13 nt, Human
uuagcucagcccc

SEQ ID NO: 3691627 - RNA, 20 nt, Human
uuagcucccuguucuugggu

SEQ ID NO: 3691628 - RNA, 13 nt, Human
uuagcucugagaa

SEQ ID NO: 3691629 - RNA, 19 nt, Human
uuagcucuggaccagccug

SEQ ID NO: 3691630 - RNA, 15 nt, Human
uuagcugacaaaaua

SEQ ID NO: 3691631 - RNA, 18 nt, Human
uuagcugacaaaauacuu

SEQ ID NO: 3691632 - RNA, 10 nt, Human
uuagcugagc

SEQ ID NO: 3691633 - RNA, 13 nt, Human
uuagcugcagaac

SEQ ID NO: 3691634 - RNA, 12 nt, Human
uuagcugcuucu

SEQ ID NO: 3691635 - RNA, 20 nt, Human
uuagcugcuucuauguuuca

SEQ ID NO: 3691636 - RNA, 22 nt, Human
uaauaauuuagacuucaagcau

SEQ ID NO: 3691637 - RNA, 16 nt, Human
uaauaauuucuaaugu

SEQ ID NO: 3691638 - RNA, 20 nt, Human
uaauaauuuuuaagaaauaa

SEQ ID NO: 3691639 - RNA, 15 nt, Human
uaauacaaacuauau

SEQ ID NO: 3691640 - RNA, 22 nt, Human
uaauacaacauguagcugaguu

SEQ ID NO: 3691641 - RNA, 14 nt, Human
uaauacaagguaua

SEQ ID NO: 3691642 - RNA, 19 nt, Human
uaauacaagguauaauaaa

SEQ ID NO: 3691643 - RNA, 15 nt, Human
uaauacacacaguua

SEQ ID NO: 3691644 - RNA, 14 nt, Human
uaauacaccacuac

SEQ ID NO: 3691645 - RNA, 16 nt, Human
uaauacaccacuacau

SEQ ID NO: 3691646 - RNA, 21 nt, Human
uaauacaccacuacauucugu

SEQ ID NO: 3691647 - RNA, 23 nt, Human
uaauacaccacuacauucuguua

SEQ ID NO: 3691648 - RNA, 18 nt, Human
uaauacacuugcccugcu

SEQ ID NO: 3691649 - RNA, 22 nt, Human
uaauacagcaacaauuuaugaa

SEQ ID NO: 3691650 - RNA, 22 nt, Human
uaauacaggauuauuuugauua

SEQ ID NO: 3691651 - RNA, 18 nt, Human
uaauacauuaaagcaguc

SEQ ID NO: 3691652 - RNA, 16 nt, Human
uaauacauuauauuuc

SEQ ID NO: 3691653 - RNA, 21 nt, Human
uaauaccucuaauaguauaaa

SEQ ID NO: 3691654 - RNA, 15 nt, Human
uaauaccucugugug

SEQ ID NO: 3691655 - RNA, 22 nt, Human
uaauacgcaggcaucugauuug

SEQ ID NO: 3691656 - RNA, 13 nt, Human
uaauacuaaaaua

SEQ ID NO: 3691657 - RNA, 18 nt, Human
uaauacuaaaauaugucu

SEQ ID NO: 3691658 - RNA, 12 nt, Human
uaauacuauauu

SEQ ID NO: 3691659 - RNA, 16 nt, Human
uaauacucaaaugagu

SEQ ID NO: 3691660 - RNA, 21 nt, Human
uaauacucaaaugaguaacau

SEQ ID NO: 3691661 - RNA, 13 nt, Human
uaauacucuauuu

SEQ ID NO: 3691662 - RNA, 19 nt, Human
uaauacugaaccacuugua

SEQ ID NO: 3691663 - RNA, 21 nt, Human
uaauacugaaccacuuguaga

SEQ ID NO: 3691664 - RNA, 22 nt, Human
uaauacugaaccacuuguagau

SEQ ID NO: 3691665 - RNA, 14 nt, Human
uaauacugcugaga

SEQ ID NO: 3691666 - RNA, 23 nt, Human
uaauacugcugagauacauacag

SEQ ID NO: 3691667 - RNA, 13 nt, Human
uaauacuguuauu

SEQ ID NO: 3691668 - RNA, 17 nt, Human
uaauacuguuauucuuu

SEQ ID NO: 3691669 - RNA, 18 nt, Human
uaauacuugcuuuggaaa

SEQ ID NO: 3691670 - RNA, 20 nt, Human
uaauacuuuuuuauuuuguu

SEQ ID NO: 3691671 - RNA, 15 nt, Human
uaauagaaaacugaa

SEQ ID NO: 3691672 - RNA, 19 nt, Human
uaauagaaaacugaaaauc

SEQ ID NO: 3691673 - RNA, 12 nt, Human
uaauagaagaac

SEQ ID NO: 3691674 - RNA, 21 nt, Human
uaauagaagaacauccaagga

SEQ ID NO: 3691675 - RNA, 22 nt, Human
uaauagacuguaacuuccaaau

SEQ ID NO: 3691676 - RNA, 14 nt, Human
uaauagauguuuga

SEQ ID NO: 3691677 - RNA, 16 nt, Human
uaauagauguuugaua

SEQ ID NO: 3691678 - RNA, 22 nt, Human
uaauagcggguuacuuucacau

SEQ ID NO: 3691679 - RNA, 11 nt, Human
uaauagcugua

SEQ ID NO: 3691680 - RNA, 21 nt, Human
uaauagcuuuuauuguauaaa

SEQ ID NO: 3691681 - RNA, 18 nt, Human
uaauaggcucugccugac

SEQ ID NO: 3691682 - RNA, 18 nt, Human
uaauagggaaaauucuaa

SEQ ID NO: 3691683 - RNA, 15 nt, Human
uaauagggaauauau

SEQ ID NO: 3691684 - RNA, 14 nt, Human
uaauagguuuggac

SEQ ID NO: 3691685 - RNA, 19 nt, Human
uaauagguuuggacaaaau

SEQ ID NO: 3691686 - RNA, 18 nt, Human
uaauaguaauuuguaaag

SEQ ID NO: 3691687 - RNA, 21 nt, Human
uaauaguaauuuguaaaguug

SEQ ID NO: 3691688 - RNA, 14 nt, Human
uaauaguauaaacc

SEQ ID NO: 3691689 - RNA, 21 nt, Human
uaauagugcuuaaaaaucauu

SEQ ID NO: 3691690 - RNA, 21 nt, Human
uaauaguguuaaucaauuuaa

SEQ ID NO: 3691691 - RNA, 19 nt, Human
uaauaguuuacauguagua

SEQ ID NO: 3691692 - RNA, 21 nt, Human
uaauauaaaaagcuuccauga

SEQ ID NO: 3691693 - RNA, 21 nt, Human
uaauauaaaguaguccuguga

SEQ ID NO: 3691694 - RNA, 14 nt, Human
uaauauaaaugcaa

SEQ ID NO: 3691695 - RNA, 16 nt, Human
uaauauaaaugcaaau

SEQ ID NO: 3691696 - RNA, 16 nt, Human
uaauauaacugccuua

SEQ ID NO: 3691697 - RNA, 21 nt, Human
uaauauaacugccuuaaaacu

SEQ ID NO: 3691698 - RNA, 23 nt, Human
uaauauaacugccuuaaaacuuu

SEQ ID NO: 3691699 - RNA, 18 nt, Human
uaauauaauggaagagaa

SEQ ID NO: 3691700 - RNA, 21 nt, Human
uaauauaccagcuuguaugca

SEQ ID NO: 3691701 - RNA, 13 nt, Human
uaauauacuugug

SEQ ID NO: 3691702 - RNA, 15 nt, Human
uaauauacuugugga

SEQ ID NO: 3691703 - RNA, 12 nt, Human
uaauauagaaaa

SEQ ID NO: 3691704 - RNA, 23 nt, Human
uaauauagaaaaaaacauucuau

SEQ ID NO: 3691705 - RNA, 17 nt, Human
uaauauauaucugcugu

SEQ ID NO: 3691706 - RNA, 14 nt, Human
uaauauauuuccau

SEQ ID NO: 3691707 - RNA, 17 nt, Human
uaauaucacucauuaau

SEQ ID NO: 3691708 - RNA, 21 nt, Human
uaauaucacucauuaauuaac

SEQ ID NO: 3691709 - RNA, 22 nt, Human
uaauauccaggucaacagaaug

SEQ ID NO: 3691710 - RNA, 15 nt, Human
uaauauccuaaacau

SEQ ID NO: 3691711 - RNA, 17 nt, Human
uaauauccuaaacauca

SEQ ID NO: 3691712 - RNA, 16 nt, Human
uaauaucuaaaguuau

SEQ ID NO: 3691713 - RNA, 12 nt, Human
uaauaugagaau

SEQ ID NO: 3691714 - RNA, 15 nt, Human
uaauaugaugacugu

SEQ ID NO: 3691715 - RNA, 16 nt, Human
uaauaugcacacauuu

SEQ ID NO: 3691716 - RNA, 18 nt, Human
uaauauggcaaaaauggc

SEQ ID NO: 3691717 - RNA, 21 nt, Human
uaauauggcuaugcuuaaaag

SEQ ID NO: 3691718 - RNA, 19 nt, Human
uaauauguauuuuauguau

SEQ ID NO: 3691719 - RNA, 21 nt, Human
uaauauguauuuuauguaugu

SEQ ID NO: 3691720 - RNA, 20 nt, Human
uaauauguucuuuuaaauga

SEQ ID NO: 3691721 - RNA, 12 nt, Human
uaauauuaaaag

SEQ ID NO: 3691722 - RNA, 18 nt, Human
uaauauuaaaagucacaa

SEQ ID NO: 3691723 - RNA, 15 nt, Human
uaauauuaaagccau

SEQ ID NO: 3691724 - RNA, 20 nt, Human
uaauauuaaggaagacaaug

SEQ ID NO: 3691725 - RNA, 16 nt, Human
uaauauucauuguaua

SEQ ID NO: 3691726 - RNA, 14 nt, Human
uaauauucugcuau

SEQ ID NO: 3691727 - RNA, 14 nt, Human
uaauauucuuucaa

SEQ ID NO: 3691728 - RNA, 17 nt, Human
uaauauucuuucaauaa

SEQ ID NO: 3691729 - RNA, 20 nt, Human
uaauauucuuucaauaacga

SEQ ID NO: 3691730 - RNA, 20 nt, Human
uaauauugaaaauugaaaag

SEQ ID NO: 3691731 - RNA, 19 nt, Human
uaauauugagaaagaaacu

SEQ ID NO: 3691732 - RNA, 16 nt, Human
uaauauuguggugcca

SEQ ID NO: 3691733 - RNA, 18 nt, Human
uaauauuguuguauaauu

SEQ ID NO: 3691734 - RNA, 21 nt, Human
uaauauuguuguauaauuucg

SEQ ID NO: 3691735 - RNA, 23 nt, Human
uaauauuguuuuucuuucuacaa

SEQ ID NO: 3691736 - RNA, 21 nt, Human
uaauauuuaaacagcaguguu

SEQ ID NO: 3691737 - RNA, 20 nt, Human
uaauauuuacaauguauuaa

SEQ ID NO: 3691738 - RNA, 16 nt, Human
uaauauuuauuaaauu

SEQ ID NO: 3691739 - RNA, 17 nt, Human
uaauauuuauuaaauuu

SEQ ID NO: 3691740 - RNA, 15 nt, Human
uaauauuuauugcuu

SEQ ID NO: 3691741 - RNA, 18 nt, Human
uaauauuuauugcuuuau

SEQ ID NO: 3691742 - RNA, 20 nt, Human
uaauauuuauugcuuuauaa

SEQ ID NO: 3691743 - RNA, 18 nt, Human
uaauauuucuucaaauau

SEQ ID NO: 3691744 - RNA, 16 nt, Human
uaauauuuuacauaca

SEQ ID NO: 3691745 - RNA, 21 nt, Human
uaauauuuuccuccugagugc

SEQ ID NO: 3691746 - RNA, 14 nt, Human
uaauauuuuuaauu

SEQ ID NO: 3691747 - RNA, 23 nt, Human
uaaucaacauggcuacuugcuuu

SEQ ID NO: 3691748 - RNA, 18 nt, Human
uaaucaacugaaaguguu

SEQ ID NO: 3691749 - RNA, 14 nt, Human
uaaucaagagccuu

SEQ ID NO: 3691750 - RNA, 19 nt, Human
uaaucaagagccuuaaaac

SEQ ID NO: 3691751 - RNA, 20 nt, Human
uaaucaagagccuuaaaaca

SEQ ID NO: 3691752 - RNA, 14 nt, Human
uaaucaagccucug

SEQ ID NO: 3691753 - RNA, 17 nt, Human
uaaucaaugaauauuga

SEQ ID NO: 3691754 - RNA, 19 nt, Human
uaaucaaugaauauugaag

SEQ ID NO: 3691755 - RNA, 14 nt, Human
uuauccauaaaaaa

SEQ ID NO: 3691756 - RNA, 17 nt, Human
uuauccauauugaguca

SEQ ID NO: 3691757 - RNA, 19 nt, Human
uuauccauauugagucaaa

SEQ ID NO: 3691758 - RNA, 14 nt, Human
uuauccauuuguaa

SEQ ID NO: 3691759 - RNA, 15 nt, Human
uuauccauuuguaau

SEQ ID NO: 3691760 - RNA, 17 nt, Human
uuaucccaagaaugcaa

SEQ ID NO: 3691761 - RNA, 22 nt, Human
uuaucccacggaaaaugccaau

SEQ ID NO: 3691762 - RNA, 13 nt, Human
uuaucccucucca

SEQ ID NO: 3691763 - RNA, 23 nt, Human
uuaucccuuccuuuuagccuagu

SEQ ID NO: 3691764 - RNA, 20 nt, Human
uuauccuagcacaugcuuca

SEQ ID NO: 3691765 - RNA, 21 nt, Human
uuauccuagcacaugcuucaa

SEQ ID NO: 3691766 - RNA, 13 nt, Human
uuauccuauuuca

SEQ ID NO: 3691767 - RNA, 18 nt, Human
uuauccucccuguaacuu

SEQ ID NO: 3691768 - RNA, 14 nt, Human
uuauccucugaucu

SEQ ID NO: 3691769 - RNA, 15 nt, Human
uuauccucugaucuc

SEQ ID NO: 3691770 - RNA, 16 nt, Human
uuauccucugguuuaa

SEQ ID NO: 3691771 - RNA, 17 nt, Human
uuauccucuuuagaguu

SEQ ID NO: 3691772 - RNA, 19 nt, Human
uuaucgcccuggcaggcag

SEQ ID NO: 3691773 - RNA, 16 nt, Human
uuaucgggaacagugu

SEQ ID NO: 3691774 - RNA, 23 nt, Human
uuaucgggaacaguguuucccau

SEQ ID NO: 3691775 - RNA, 18 nt, Human
uuaucgggagcagugucu

SEQ ID NO: 3691776 - RNA, 19 nt, Human
uuaucgggagcagugucuu

SEQ ID NO: 3691777 - RNA, 23 nt, Human
uuaucgggagcagugucuuccau

SEQ ID NO: 3691778 - RNA, 21 nt, Human
uuaucuaaaagaaaugucuau

SEQ ID NO: 3691779 - RNA, 15 nt, Human
uuaucuaagaauaca

SEQ ID NO: 3691780 - RNA, 17 nt, Human
uuaucuaagaauacagc

SEQ ID NO: 3691781 - RNA, 19 nt, Human
uuaucuaauaccucugugu

SEQ ID NO: 3691782 - RNA, 20 nt, Human
uuaucuaauaccucugugug

SEQ ID NO: 3691783 - RNA, 18 nt, Human
uuaucuaaucaugaaacu

SEQ ID NO: 3691784 - RNA, 22 nt, Human
uuaucuaaucaugaaacucccu

SEQ ID NO: 3691785 - RNA, 16 nt, Human
uuaucuaauuuauaaa

SEQ ID NO: 3691786 - RNA, 14 nt, Human
uuaucuaccaacuu

SEQ ID NO: 3691787 - RNA, 20 nt, Human
uuaucuacuuccaaacuaau

SEQ ID NO: 3691788 - RNA, 16 nt, Human
uuaucuagauacugua

SEQ ID NO: 3691789 - RNA, 17 nt, Human
uuaucuagauguaaauu

SEQ ID NO: 3691790 - RNA, 22 nt, Human
uuaucuauaauuuaccuaagau

SEQ ID NO: 3691791 - RNA, 18 nt, Human
uuaucuauagcuaaguac

SEQ ID NO: 3691792 - RNA, 16 nt, Human
uuaucuauauaaaaua

SEQ ID NO: 3691793 - RNA, 20 nt, Human
uuaucuauucugagaaaaca

SEQ ID NO: 3691794 - RNA, 15 nt, Human
uuaucuauuguaaga

SEQ ID NO: 3691795 - RNA, 16 nt, Human
uuaucuauuguaagau

SEQ ID NO: 3691796 - RNA, 18 nt, Human
uuaucuauuguaagauaa

SEQ ID NO: 3691797 - RNA, 22 nt, Human
uuaucuauuuguauauauacau

SEQ ID NO: 3691798 - RNA, 22 nt, Human
uuaucucagucaugcauaaaua

SEQ ID NO: 3691799 - RNA, 20 nt, Human
uuaucugaauuuuuaaacaa

SEQ ID NO: 3691800 - RNA, 21 nt, Human
uuaucugaauuuuuaaacaag

SEQ ID NO: 3691801 - RNA, 18 nt, Human
uuaucugagcugagccag

SEQ ID NO: 3691802 - RNA, 18 nt, Human
uuaucugcaagugaggug

SEQ ID NO: 3691803 - RNA, 12 nt, Human
uuaucugggcuu

SEQ ID NO: 3691804 - RNA, 19 nt, Human
uuaucugugcgugaaacac

SEQ ID NO: 3691805 - RNA, 18 nt, Human
uuaucuguguuuuugaaa

SEQ ID NO: 3691806 - RNA, 15 nt, Human
uuaucuguucuuuug

SEQ ID NO: 3691807 - RNA, 22 nt, Human
uuaucuguuuccugacauuguc

SEQ ID NO: 3691808 - RNA, 16 nt, Human
uuaucuuacaaagugu

SEQ ID NO: 3691809 - RNA, 17 nt, Human
uuaucuuacaaagugua

SEQ ID NO: 3691810 - RNA, 21 nt, Human
uuaucuucugcucuuucuucu

SEQ ID NO: 3691811 - RNA, 14 nt, Human
uuaucuugaauaau

SEQ ID NO: 3691812 - RNA, 16 nt, Human
uuaucuugauacauuc

SEQ ID NO: 3691813 - RNA, 18 nt, Human
uuaucuugauacauucaa

SEQ ID NO: 3691814 - RNA, 19 nt, Human
uuaucuuggccuuacugua

SEQ ID NO: 3691815 - RNA, 14 nt, Human
uuaucuugggacug

SEQ ID NO: 3691816 - RNA, 16 nt, Human
uuaucuugucucuggg

SEQ ID NO: 3691817 - RNA, 17 nt, Human
uuaugaaaaagaagaau

SEQ ID NO: 3691818 - RNA, 19 nt, Human
uuaugaaaaagaagaaucu

SEQ ID NO: 3691819 - RNA, 13 nt, Human
uuaugaaaauaau

SEQ ID NO: 3691820 - RNA, 13 nt, Human
uuaugaaacuugu

SEQ ID NO: 3691821 - RNA, 16 nt, Human
uuaugaaacuugugua

SEQ ID NO: 3691822 - RNA, 18 nt, Human
uuaugaaacuuguguaaa

SEQ ID NO: 3691823 - RNA, 19 nt, Human
uuaugaaacuuguguaaau

SEQ ID NO: 3691824 - RNA, 17 nt, Human
uuaugaaacuuuuggaa

SEQ ID NO: 3691825 - RNA, 15 nt, Human
uuaugaacugcaugu

SEQ ID NO: 3691826 - RNA, 18 nt, Human
uuaugaagaaaaaauaca

SEQ ID NO: 3691827 - RNA, 16 nt, Human
uguggacuuuguucac

SEQ ID NO: 3691828 - RNA, 13 nt, Human
uguggagacugcu

SEQ ID NO: 3691829 - RNA, 18 nt, Human
uguggagacugcuccuga

SEQ ID NO: 3691830 - RNA, 17 nt, Human
uguggagagggaaugug

SEQ ID NO: 3691831 - RNA, 20 nt, Human
uguggagagggaaugugaaa

SEQ ID NO: 3691832 - RNA, 19 nt, Human
uguggagagugcaacagua

SEQ ID NO: 3691833 - RNA, 12 nt, Human
uguggagccagg

SEQ ID NO: 3691834 - RNA, 19 nt, Human
uguggagcccgcaccccca

SEQ ID NO: 3691835 - RNA, 19 nt, Human
uguggagccgaggccuacc

SEQ ID NO: 3691836 - RNA, 15 nt, Human
uguggagcucagccc

SEQ ID NO: 3691837 - RNA, 19 nt, Human
uguggaggcagugucauuu

SEQ ID NO: 3691838 - RNA, 19 nt, Human
uguggagggcacauuccuu

SEQ ID NO: 3691839 - RNA, 22 nt, Human
uguggagucagccucgcaggcc

SEQ ID NO: 3691840 - RNA, 16 nt, Human
uguggaguggggcagu

SEQ ID NO: 3691841 - RNA, 17 nt, Human
uguggaguucaucuuga

SEQ ID NO: 3691842 - RNA, 16 nt, Human
uguggauaacaaagau

SEQ ID NO: 3691843 - RNA, 17 nt, Human
uguggauaacaaagaua

SEQ ID NO: 3691844 - RNA, 18 nt, Human
uguggauaacaaagauau

SEQ ID NO: 3691845 - RNA, 14 nt, Human
uguggaucagagau

SEQ ID NO: 3691846 - RNA, 22 nt, Human
uguggauucugaggcccugccc

SEQ ID NO: 3691847 - RNA, 20 nt, Human
uguggauuuaacagaaaugu

SEQ ID NO: 3691848 - RNA, 14 nt, Human
uguggauuucaguu

SEQ ID NO: 3691849 - RNA, 23 nt, Human
uguggcaaaauguuacagaaucu

SEQ ID NO: 3691850 - RNA, 14 nt, Human
uguggcacauucuu

SEQ ID NO: 3691851 - RNA, 14 nt, Human
uguggcagagagag

SEQ ID NO: 3691852 - RNA, 15 nt, Human
uguggcagagagaga

SEQ ID NO: 3691853 - RNA, 22 nt, Human
uguggcagagagagagaaagag

SEQ ID NO: 3691854 - RNA, 23 nt, Human
uguggcaggcagcgccaagcaac

SEQ ID NO: 3691855 - RNA, 21 nt, Human
uguggcagggguuagagcagg

SEQ ID NO: 3691856 - RNA, 22 nt, Human
uguggcaguaaagagaaacuuu

SEQ ID NO: 3691857 - RNA, 19 nt, Human
uguggcagucccuuauaau

SEQ ID NO: 3691858 - RNA, 16 nt, Human
uguggcagugguuuug

SEQ ID NO: 3691859 - RNA, 23 nt, Human
uguggcauaaauugcaucacugu

SEQ ID NO: 3691860 - RNA, 16 nt, Human
uguggcauccagaguc

SEQ ID NO: 3691861 - RNA, 15 nt, Human
uguggccaaggagcu

SEQ ID NO: 3691862 - RNA, 18 nt, Human
uguggccaaggagcugcu

SEQ ID NO: 3691863 - RNA, 16 nt, Human
uguggccacuucuguc

SEQ ID NO: 3691864 - RNA, 11 nt, Human
uguggccagga

SEQ ID NO: 3691865 - RNA, 21 nt, Human
uguggccaugacccugccucu

SEQ ID NO: 3691866 - RNA, 23 nt, Human
uguggccaugacccugccucucc

SEQ ID NO: 3691867 - RNA, 22 nt, Human
uguggccaugguccccaagacc

SEQ ID NO: 3691868 - RNA, 13 nt, Human
uguggccccaccc

SEQ ID NO: 3691869 - RNA, 12 nt, Human
uguggcccuggc

SEQ ID NO: 3691870 - RNA, 14 nt, Human
uguggcccuggccu

SEQ ID NO: 3691871 - RNA, 14 nt, Human
uguggcccuguccu

SEQ ID NO: 3691872 - RNA, 11 nt, Human
uguggccucag

SEQ ID NO: 3691873 - RNA, 17 nt, Human
uguggccuuugcgcucc

SEQ ID NO: 3691874 - RNA, 22 nt, Human
uguggcgagccauuugucccaa

SEQ ID NO: 3691875 - RNA, 19 nt, Human
uguggcgccgucuccaggg

SEQ ID NO: 3691876 - RNA, 23 nt, Human
uguggcgccgucuccaggggcug

SEQ ID NO: 3691877 - RNA, 21 nt, Human
uguggcuaaaugccuaauaaa

SEQ ID NO: 3691878 - RNA, 22 nt, Human
uguggcuauuaaaacucuuuua

SEQ ID NO: 3691879 - RNA, 13 nt, Human
uguggcuccccuc

SEQ ID NO: 3691880 - RNA, 17 nt, Human
uguggcuccuaucugug

SEQ ID NO: 3691881 - RNA, 18 nt, Human
uguggcuccuaucugugu

SEQ ID NO: 3691882 - RNA, 19 nt, Human
uguggcuccuaucuguguu

SEQ ID NO: 3691883 - RNA, 14 nt, Human
uguggcuccuuccc

SEQ ID NO: 3691884 - RNA, 21 nt, Human
uguggcugaggaggccuccau

SEQ ID NO: 3691885 - RNA, 14 nt, Human
uguggcugcagcag

SEQ ID NO: 3691886 - RNA, 19 nt, Human
uguggcuugcuagcuaugu

SEQ ID NO: 3691887 - RNA, 17 nt, Human
uguggcuuucagagccu

SEQ ID NO: 3691888 - RNA, 21 nt, Human
ugugggaaaaaaaugaaugag

SEQ ID NO: 3691889 - RNA, 23 nt, Human
ugugggaacgagaggggaagagu

SEQ ID NO: 3691890 - RNA, 12 nt, Human
ugugggaagggg

SEQ ID NO: 3691891 - RNA, 19 nt, Human
ugugggaaugcggcaagaa

SEQ ID NO: 3691892 - RNA, 13 nt, Human
ugugggacuguac

SEQ ID NO: 3691893 - RNA, 19 nt, Human
ugugggacuguacacacuu

SEQ ID NO: 3691894 - RNA, 13 nt, Human
ugugggagggagc

SEQ ID NO: 3691895 - RNA, 15 nt, Human
ugugggaguguguaa

SEQ ID NO: 3691896 - RNA, 17 nt, Human
ugugggauauugaaugu

SEQ ID NO: 3691897 - RNA, 19 nt, Human
ugugggauguucagcacug

SEQ ID NO: 3691898 - RNA, 18 nt, Human
ugugggauuaugggucac

SEQ ID NO: 3691899 - RNA, 15 nt, Human
ugugggcaaaagagu

SEQ ID NO: 3691900 - RNA, 14 nt, Human
ugugggcacuggcc

SEQ ID NO: 3691901 - RNA, 16 nt, Human
ugugggcacuggccca

SEQ ID NO: 3691902 - RNA, 21 nt, Human
ugugggcauuucuugcgagcc

SEQ ID NO: 3691903 - RNA, 14 nt, Human
ugugggccugggcu

SEQ ID NO: 3691904 - RNA, 21 nt, Human
ugugggcgugagaccugcccc

SEQ ID NO: 3691905 - RNA, 13 nt, Human
ugugggcugcacu

SEQ ID NO: 3691906 - RNA, 21 nt, Human
ugugggcugcacucugugccc

SEQ ID NO: 3691907 - RNA, 14 nt, Human
ugugggcugugagu

SEQ ID NO: 3691908 - RNA, 16 nt, Human
ugugggcuugaccagg

SEQ ID NO: 3691909 - RNA, 13 nt, Human
uguggggaaaggg

SEQ ID NO: 3691910 - RNA, 23 nt, Human
uguggggaaccaauugcuuuguc

SEQ ID NO: 3691911 - RNA, 23 nt, Human
uguggggccaugccuccucagga

SEQ ID NO: 3691912 - RNA, 14 nt, Human
uguggggccuggga

SEQ ID NO: 3691913 - RNA, 12 nt, Human
uguggggccuug

SEQ ID NO: 3691914 - RNA, 18 nt, Human
uguggggcuuggcgugga

SEQ ID NO: 3691915 - RNA, 23 nt, Human
ugugggggaagagcacagcccuc

SEQ ID NO: 3691916 - RNA, 15 nt, Human
ugugggggacuguaa

SEQ ID NO: 3691917 - RNA, 20 nt, Human
uguggggugacgggacucag

SEQ ID NO: 3691918 - RNA, 16 nt, Human
ugugggucugugugug

SEQ ID NO: 3691919 - RNA, 20 nt, Human
ugugggucugugugugugua

SEQ ID NO: 3691920 - RNA, 15 nt, Human
ugugggucuuccagg

SEQ ID NO: 3691921 - RNA, 22 nt, Human
uguggguggauauaaauauaua

SEQ ID NO: 3691922 - RNA, 13 nt, Human
uguggguguccug

SEQ ID NO: 3691923 - RNA, 21 nt, Human
uguggguguccugccugucug

SEQ ID NO: 3691924 - RNA, 15 nt, Human
uguggguuccacaga

SEQ ID NO: 3691925 - RNA, 16 nt, Human
uguggguuccacagac

SEQ ID NO: 3691926 - RNA, 16 nt, Human
ugugguaaaugccaca

SEQ ID NO: 3691927 - RNA, 14 nt, Human
ugugguacagagaa

SEQ ID NO: 3691928 - RNA, 21 nt, Human
ugugguacagagaagccagcu

SEQ ID NO: 3691929 - RNA, 16 nt, Human
ugugguacaugguguu

SEQ ID NO: 3691930 - RNA, 18 nt, Human
ugugguagggggugucuc

SEQ ID NO: 3691931 - RNA, 17 nt, Human
ugugguaguuaauaaaa

SEQ ID NO: 3691932 - RNA, 19 nt, Human
ugugguauugaauauugug

SEQ ID NO: 3691933 - RNA, 22 nt, Human
uguggucaacauuucucauguu

SEQ ID NO: 3691934 - RNA, 23 nt, Human
uguggucacagcggaggugugga

SEQ ID NO: 3691935 - RNA, 13 nt, Human
ugugguccaaaua

SEQ ID NO: 3691936 - RNA, 15 nt, Human
uguggucucaggaua

SEQ ID NO: 3691937 - RNA, 17 nt, Human
uguggucuccuuggaaa

SEQ ID NO: 3691938 - RNA, 13 nt, Human
uguggugaugaaa

SEQ ID NO: 3691939 - RNA, 15 nt, Human
ugugguggccucagc

SEQ ID NO: 3691940 - RNA, 22 nt, Human
ugugguggguucuuuggaagga

SEQ ID NO: 3691941 - RNA, 14 nt, Human
uguggugguuguga

SEQ ID NO: 3691942 - RNA, 20 nt, Human
ugugguguaauuuauaaaau

SEQ ID NO: 3691943 - RNA, 23 nt, Human
uguggugugucccccucugucca

SEQ ID NO: 3691944 - RNA, 16 nt, Human
ugugguguugaggcuu

SEQ ID NO: 3691945 - RNA, 21 nt, Human
ugugguguuuccugcaggcca

SEQ ID NO: 3691946 - RNA, 20 nt, Human
ugugguuaaugccauggaca

SEQ ID NO: 3691947 - RNA, 17 nt, Human
ugugguuauuucucuga

SEQ ID NO: 3691948 - RNA, 14 nt, Human
ugugguuuauauau

SEQ ID NO: 3691949 - RNA, 12 nt, Human
ugugguuucauu

SEQ ID NO: 3691950 - RNA, 18 nt, Human
ugugguuugguuccucuc

SEQ ID NO: 3691951 - RNA, 21 nt, Human
ugugguuugguuccucucugg

SEQ ID NO: 3691952 - RNA, 14 nt, Human
ugugguuuuaugga

SEQ ID NO: 3691953 - RNA, 16 nt, Human
ugugguuuuccccucc

SEQ ID NO: 3691954 - RNA, 18 nt, Human
ugugguuuucuguuucua

SEQ ID NO: 3691955 - RNA, 21 nt, Human
ugugguuuucuuuugccauga

SEQ ID NO: 3691956 - RNA, 17 nt, Human
uguguaaaauguaaugc

SEQ ID NO: 3691957 - RNA, 17 nt, Human
uguguaaaguuagucua

SEQ ID NO: 3691958 - RNA, 21 nt, Human
uguguaacaauuuuaaugcua

SEQ ID NO: 3691959 - RNA, 12 nt, Human
uguguaacacag

SEQ ID NO: 3691960 - RNA, 15 nt, Human
uguguaaccauuuua

SEQ ID NO: 3691961 - RNA, 19 nt, Human
uguguaaccucuucaccuu

SEQ ID NO: 3691962 - RNA, 18 nt, Human
uguguaacugcccaaagc

SEQ ID NO: 3691963 - RNA, 21 nt, Human
uguguaacugcccaaagcagc

SEQ ID NO: 3691964 - RNA, 14 nt, Human
uguguaagagaaug

SEQ ID NO: 3691965 - RNA, 12 nt, Human
uguguaagauuu

SEQ ID NO: 3691966 - RNA, 18 nt, Human
uguguaauaaaguguuuu

SEQ ID NO: 3691967 - RNA, 18 nt, Human
uguguaauagaaaacuga

SEQ ID NO: 3691968 - RNA, 13 nt, Human
uguguaauauuac

SEQ ID NO: 3691969 - RNA, 19 nt, Human
uguguaaucaauaaacgau

SEQ ID NO: 3691970 - RNA, 22 nt, Human
uguguaaucauuucuugggccc

SEQ ID NO: 3691971 - RNA, 23 nt, Human
uguguaaucauuucuugggcccu

SEQ ID NO: 3691972 - RNA, 14 nt, Human
uguguaauuuuucu

SEQ ID NO: 3691973 - RNA, 17 nt, Human
uguguaauuuuucugua

SEQ ID NO: 3691974 - RNA, 19 nt, Human
uguguaauuuuucuguaua

SEQ ID NO: 3691975 - RNA, 17 nt, Human
uguguacaccucuggau

SEQ ID NO: 3691976 - RNA, 21 nt, Human
uuaugaagaaaaauuugaaaa

SEQ ID NO: 3691977 - RNA, 13 nt, Human
uuaugaagaaaau

SEQ ID NO: 3691978 - RNA, 13 nt, Human
uuaugaagagcua

SEQ ID NO: 3691979 - RNA, 20 nt, Human
uuaugaagugcgugaaugua

SEQ ID NO: 3691980 - RNA, 19 nt, Human
uuaugaauauuuacguuuu

SEQ ID NO: 3691981 - RNA, 14 nt, Human
uuaugaaucuuucc

SEQ ID NO: 3691982 - RNA, 14 nt, Human
uuaugaauuacauu

SEQ ID NO: 3691983 - RNA, 21 nt, Human
uuaugaauuacauuuguauaa

SEQ ID NO: 3691984 - RNA, 23 nt, Human
uuaugacaaugacugugcuacug

SEQ ID NO: 3691985 - RNA, 13 nt, Human
uuaugacaguaau

SEQ ID NO: 3691986 - RNA, 18 nt, Human
uuaugacaucacuuguac

SEQ ID NO: 3691987 - RNA, 23 nt, Human
uuaugacaucacuuguacaaaau

SEQ ID NO: 3691988 - RNA, 16 nt, Human
uuaugacuauguaaac

SEQ ID NO: 3691989 - RNA, 15 nt, Human
uuaugacugccaaga

SEQ ID NO: 3691990 - RNA, 21 nt, Human
uuaugagaaacuggcaaagca

SEQ ID NO: 3691991 - RNA, 13 nt, Human
uuaugagaaacuu

SEQ ID NO: 3691992 - RNA, 16 nt, Human
uuaugagauacuuugc

SEQ ID NO: 3691993 - RNA, 19 nt, Human
uuaugaggguccucuacuu

SEQ ID NO: 3691994 - RNA, 15 nt, Human
uuaugaguuuuugau

SEQ ID NO: 3691995 - RNA, 18 nt, Human
uuaugauaauagauucuc

SEQ ID NO: 3691996 - RNA, 12 nt, Human
uuaugauagauu

SEQ ID NO: 3691997 - RNA, 21 nt, Human
uuaugauauuuuuuuaagucu

SEQ ID NO: 3691998 - RNA, 19 nt, Human
uuaugaucaccauguauuu

SEQ ID NO: 3691999 - RNA, 15 nt, Human
uuaugaugacguaca

SEQ ID NO: 3692000 - RNA, 22 nt, Human
uuaugaugacguacaaguaguu

SEQ ID NO: 3692001 - RNA, 20 nt, Human
uuaugaugguuuuaaacuuu

SEQ ID NO: 3692002 - RNA, 22 nt, Human
uuaugauuaaguaaugauaacu

SEQ ID NO: 3692003 - RNA, 14 nt, Human
uuaugauuagcuuu

SEQ ID NO: 3692004 - RNA, 21 nt, Human
uuaugauugccuuuuuauaac

SEQ ID NO: 3692005 - RNA, 15 nt, Human
uuaugauuuaauaaa

SEQ ID NO: 3692006 - RNA, 19 nt, Human
uuaugauuuucauaacuua

SEQ ID NO: 3692007 - RNA, 16 nt, Human
uuaugauuuuuaaaga

SEQ ID NO: 3692008 - RNA, 19 nt, Human
uuaugauuuuuuuuucaua

SEQ ID NO: 3692009 - RNA, 20 nt, Human
uuaugcaagggacugugugu

SEQ ID NO: 3692010 - RNA, 20 nt, Human
uuaugcaauuagguuuuucc

SEQ ID NO: 3692011 - RNA, 17 nt, Human
uuaugcauaacugacaa

SEQ ID NO: 3692012 - RNA, 17 nt, Human
uuaugcauguuuguugu

SEQ ID NO: 3692013 - RNA, 23 nt, Human
uuaugccacccccgcuggaggau

SEQ ID NO: 3692014 - RNA, 17 nt, Human
uuaugcccagcguuuga

SEQ ID NO: 3692015 - RNA, 16 nt, Human
uuaugcggucuaggga

SEQ ID NO: 3692016 - RNA, 15 nt, Human
uuaugcuaagaauuu

SEQ ID NO: 3692017 - RNA, 16 nt, Human
uuaugcuaagaauuuu

SEQ ID NO: 3692018 - RNA, 19 nt, Human
uuaugcucucacuguuugu

SEQ ID NO: 3692019 - RNA, 18 nt, Human
uuaugcucuuaauugcca

SEQ ID NO: 3692020 - RNA, 21 nt, Human
uuaugcucuuuuuuacucauu

SEQ ID NO: 3692021 - RNA, 13 nt, Human
uuaugcugaaaca

SEQ ID NO: 3692022 - RNA, 15 nt, Human
uuaugcugauuuauu

SEQ ID NO: 3692023 - RNA, 18 nt, Human
uuaugcuguaaaagcaag

SEQ ID NO: 3692024 - RNA, 12 nt, Human
uuaugcuuuugg

SEQ ID NO: 3692025 - RNA, 17 nt, Human
uuauggaaaaauaaaac

SEQ ID NO: 3692026 - RNA, 16 nt, Human
uuauggaacacucuga

SEQ ID NO: 3692027 - RNA, 23 nt, Human
uuauggaagauaguuuucuccuu

SEQ ID NO: 3692028 - RNA, 20 nt, Human
uuauggaauugauuugcauu

SEQ ID NO: 3692029 - RNA, 17 nt, Human
uuauggccacagcccau

SEQ ID NO: 3692030 - RNA, 16 nt, Human
uuauggccgggcaggg

SEQ ID NO: 3692031 - RNA, 18 nt, Human
uuauggccucagcugccu

SEQ ID NO: 3692032 - RNA, 17 nt, Human
uuauggcuauaggugcu

SEQ ID NO: 3692033 - RNA, 19 nt, Human
uuauggcuuuugugcauua

SEQ ID NO: 3692034 - RNA, 17 nt, Human
uuaugggaaucaagauu

SEQ ID NO: 3692035 - RNA, 22 nt, Human
uuaugggcauugacaaaucugu

SEQ ID NO: 3692036 - RNA, 22 nt, Human
uuaugggcuggguucuacccag

SEQ ID NO: 3692037 - RNA, 16 nt, Human
uuaugguaaucauauu

SEQ ID NO: 3692038 - RNA, 18 nt, Human
uuaugguaaucauauuag

SEQ ID NO: 3692039 - RNA, 19 nt, Human
uuaugguagaaaaauuuca

SEQ ID NO: 3692040 - RNA, 22 nt, Human
uuauggucaaucccaaaaguca

SEQ ID NO: 3692041 - RNA, 21 nt, Human
uuaugguccuaaaagcaaaau

SEQ ID NO: 3692042 - RNA, 13 nt, Human
uuaugguguuucu

SEQ ID NO: 3692043 - RNA, 14 nt, Human
uuaugguuacuucu

SEQ ID NO: 3692044 - RNA, 20 nt, Human
uuaugguuacuucuucucuu

SEQ ID NO: 3692045 - RNA, 11 nt, Human
uuaugguuuug

SEQ ID NO: 3692046 - RNA, 17 nt, Human
uuaugguuuugugaugu

SEQ ID NO: 3692047 - RNA, 22 nt, Human
uuauguaaacaaaucuuuccau

SEQ ID NO: 3692048 - RNA, 12 nt, Human
uuauguaaauaa

SEQ ID NO: 3692049 - RNA, 15 nt, Human
uuauguaaauaauuc

SEQ ID NO: 3692050 - RNA, 20 nt, Human
uuauguaaauguuuguuaaa

SEQ ID NO: 3692051 - RNA, 22 nt, Human
uuauguaaauuaucaggcaaau

SEQ ID NO: 3692052 - RNA, 21 nt, Human
uuauguaauaaugugaaucau

SEQ ID NO: 3692053 - RNA, 18 nt, Human
uuauguagcucuuuguca

SEQ ID NO: 3692054 - RNA, 11 nt, Human
uuauguaguuu

SEQ ID NO: 3692055 - RNA, 21 nt, Human
uuauguaguuuuuauauguug

SEQ ID NO: 3692056 - RNA, 17 nt, Human
uuaugucccuucacaua

SEQ ID NO: 3692057 - RNA, 21 nt, Human
uuaugucugcugaauaauaaa

SEQ ID NO: 3692058 - RNA, 14 nt, Human
uuaugucuguuuaa

SEQ ID NO: 3692059 - RNA, 16 nt, Human
uuaugucuguuuaaga

SEQ ID NO: 3692060 - RNA, 21 nt, Human
uuaugucuuuuauauuuguau

SEQ ID NO: 3692061 - RNA, 13 nt, Human
uuaugugaaacau

SEQ ID NO: 3692062 - RNA, 11 nt, Human
uuaugugaauu

SEQ ID NO: 3692063 - RNA, 19 nt, Human
uuaugugaauuuuuaagcu

SEQ ID NO: 3692064 - RNA, 19 nt, Human
uuaugugacauuuuacauu

SEQ ID NO: 3692065 - RNA, 20 nt, Human
uuaugugacauuuuacauua

SEQ ID NO: 3692066 - RNA, 13 nt, Human
uuaugugagagaa

SEQ ID NO: 3692067 - RNA, 22 nt, Human
uuaugugccagauuuaugcaua

SEQ ID NO: 3692068 - RNA, 16 nt, Human
uuaugugguuuuagau

SEQ ID NO: 3692069 - RNA, 19 nt, Human
uuaugugguuuuagauuuu

SEQ ID NO: 3692070 - RNA, 15 nt, Human
uuauguguaaauaca

SEQ ID NO: 3692071 - RNA, 22 nt, Human
uuauguguaguugucucucuuc

SEQ ID NO: 3692072 - RNA, 19 nt, Human
uuaugugugaggagcugcu

SEQ ID NO: 3692073 - RNA, 18 nt, Human
uuaugugugcaugugugu

SEQ ID NO: 3692074 - RNA, 20 nt, Human
uuaugugugcauguguguau

SEQ ID NO: 3692075 - RNA, 12 nt, Human
uuauguguguau

SEQ ID NO: 3692076 - RNA, 10 nt, Human
uuauguuaaa

SEQ ID NO: 3692077 - RNA, 12 nt, Human
uuauguuaaaau

SEQ ID NO: 3692078 - RNA, 13 nt, Human
uuauguuaaacua

SEQ ID NO: 3692079 - RNA, 18 nt, Human
uuauguuauugaaaaaaa

SEQ ID NO: 3692080 - RNA, 20 nt, Human
uuauguuauuuauauauugg

SEQ ID NO: 3692081 - RNA, 13 nt, Human
uuauguugacauu

SEQ ID NO: 3692082 - RNA, 14 nt, Human
uuauguugacauuu

SEQ ID NO: 3692083 - RNA, 17 nt, Human
uuauguugcauagaaua

SEQ ID NO: 3692084 - RNA, 15 nt, Human
uuauguuguuagaga

SEQ ID NO: 3692085 - RNA, 22 nt, Human
uuauguuuucgaaaaucaaaug

SEQ ID NO: 3692086 - RNA, 23 nt, Human
uuauguuuugguccacuuuucca

SEQ ID NO: 3692087 - RNA, 19 nt, Human
uuauguuuuguuucugaaa

SEQ ID NO: 3692088 - RNA, 19 nt, Human
uuauuaaaaugauuguaaa

SEQ ID NO: 3692089 - RNA, 13 nt, Human
uuauuaaaauugu

SEQ ID NO: 3692090 - RNA, 10 nt, Human
uuauuaaagg

SEQ ID NO: 3692091 - RNA, 12 nt, Human
uuauuaaauaaa

SEQ ID NO: 3692092 - RNA, 20 nt, Human
uuauuaaauacaaaacuucc

SEQ ID NO: 3692093 - RNA, 19 nt, Human
uuauuaaaugcccagcccc

SEQ ID NO: 3692094 - RNA, 12 nt, Human
uuauuaaaugua

SEQ ID NO: 3692095 - RNA, 20 nt, Human
uuauuaaauuuuuuuguaug

SEQ ID NO: 3692096 - RNA, 19 nt, Human
uuauuaacaaauuauguua

SEQ ID NO: 3692097 - RNA, 17 nt, Human
uuauuaacuuaauaauc

SEQ ID NO: 3692098 - RNA, 19 nt, Human
uuauuaacuuaauaaucaa

SEQ ID NO: 3692099 - RNA, 23 nt, Human
uuauuaagauggauucucagaua

SEQ ID NO: 3692100 - RNA, 22 nt, Human
uuauuaaguucucaaugugaaa

SEQ ID NO: 3692101 - RNA, 14 nt, Human
uuauuaaucacugu

SEQ ID NO: 3692102 - RNA, 11 nt, Human
uuauuaaugca

SEQ ID NO: 3692103 - RNA, 13 nt, Human
uuauuaaugcuuu

SEQ ID NO: 3692104 - RNA, 17 nt, Human
uuauuaauguuuucaaa

SEQ ID NO: 3692105 - RNA, 18 nt, Human
uuauuaauuuuuaaggau

SEQ ID NO: 3692106 - RNA, 12 nt, Human
uuauuacaauuu

SEQ ID NO: 3692107 - RNA, 23 nt, Human
uuauuacagggcauucaaauggg

SEQ ID NO: 3692108 - RNA, 13 nt, Human
uuauuacaguguu

SEQ ID NO: 3692109 - RNA, 15 nt, Human
uuauuacauccuugu

SEQ ID NO: 3692110 - RNA, 17 nt, Human
uuauuacauccuugugg

SEQ ID NO: 3692111 - RNA, 19 nt, Human
uuauuacauccuuguggca

SEQ ID NO: 3692112 - RNA, 12 nt, Human
uuauuacaucuu

SEQ ID NO: 3692113 - RNA, 19 nt, Human
uuauuacccccuccuucag

SEQ ID NO: 3692114 - RNA, 13 nt, Human
uuauuaccucuga

SEQ ID NO: 3692115 - RNA, 23 nt, Human
uuauuacguaugucugguucuca

SEQ ID NO: 3692116 - RNA, 18 nt, Human
uuauuacuguaagaaaau

SEQ ID NO: 3692117 - RNA, 17 nt, Human
uuauuacuuccaugaau

SEQ ID NO: 3692118 - RNA, 18 nt, Human
uuauuacuuguaaauaua

SEQ ID NO: 3692119 - RNA, 20 nt, Human
uuauuacuuguaaauauaaa

SEQ ID NO: 3692120 - RNA, 20 nt, Human
uuauuacuuguugcaaaggu

SEQ ID NO: 3692121 - RNA, 19 nt, Human
uuauuagaaaaauauuaua

SEQ ID NO: 3692122 - RNA, 21 nt, Human
uuauuagaaucaaacauuuug

SEQ ID NO: 3692123 - RNA, 22 nt, Human
uuauuagccagguaaugugaau

SEQ ID NO: 3692124 - RNA, 20 nt, Human
uuauuagggagaaaauucaa

SEQ ID NO: 3692125 - RNA, 20 nt, Human
uuauuaguaaaugcuuauca

SEQ ID NO: 3692126 - RNA, 19 nt, Human
uaauuguguuuacauuuua

SEQ ID NO: 3692127 - RNA, 20 nt, Human
uaauuguuaagauaugaugu

SEQ ID NO: 3692128 - RNA, 14 nt, Human
uaauuguuccuuuu

SEQ ID NO: 3692129 - RNA, 14 nt, Human
uaauuguugaaauu

SEQ ID NO: 3692130 - RNA, 18 nt, Human
uaauuguugaaauuuugc

SEQ ID NO: 3692131 - RNA, 18 nt, Human
uaauuguuguucuguuaa

SEQ ID NO: 3692132 - RNA, 20 nt, Human
uaauuguuguucuguuaacu

SEQ ID NO: 3692133 - RNA, 23 nt, Human
uaauuguuguucuguuaacugaa

SEQ ID NO: 3692134 - RNA, 14 nt, Human
uaauuguuguuucu

SEQ ID NO: 3692135 - RNA, 15 nt, Human
uaauuguuguuucuu

SEQ ID NO: 3692136 - RNA, 19 nt, Human
uaauuguuguuucuuucua

SEQ ID NO: 3692137 - RNA, 22 nt, Human
uaauuguuguuucuuucuagug

SEQ ID NO: 3692138 - RNA, 18 nt, Human
uaauuguuguuuguaugu

SEQ ID NO: 3692139 - RNA, 23 nt, Human
uaauuguuguuuguauguauaau

SEQ ID NO: 3692140 - RNA, 14 nt, Human
uaauuuaaaaauau

SEQ ID NO: 3692141 - RNA, 15 nt, Human
uaauuuaaaauugug

SEQ ID NO: 3692142 - RNA, 19 nt, Human
uaauuuaaacaccuccuca

SEQ ID NO: 3692143 - RNA, 14 nt, Human
uaauuuaaacaggc

SEQ ID NO: 3692144 - RNA, 19 nt, Human
uaauuuaaacaggcccagc

SEQ ID NO: 3692145 - RNA, 19 nt, Human
uaauuuaaagccacaacca

SEQ ID NO: 3692146 - RNA, 16 nt, Human
uaauuuaaaugaaaga

SEQ ID NO: 3692147 - RNA, 16 nt, Human
uaauuuaacccagcuc

SEQ ID NO: 3692148 - RNA, 11 nt, Human
uaauuuaacuu

SEQ ID NO: 3692149 - RNA, 20 nt, Human
uaauuuacuuguuuuggaug

SEQ ID NO: 3692150 - RNA, 16 nt, Human
uaauuuagaaaacuuu

SEQ ID NO: 3692151 - RNA, 14 nt, Human
uaauuuagaaauca

SEQ ID NO: 3692152 - RNA, 21 nt, Human
uaauuuagacuucaagcaugg

SEQ ID NO: 3692153 - RNA, 15 nt, Human
uaauuuaguaaaugu

SEQ ID NO: 3692154 - RNA, 21 nt, Human
uaauuuagugaucuuagcaua

SEQ ID NO: 3692155 - RNA, 17 nt, Human
uaauuuaguuguuucua

SEQ ID NO: 3692156 - RNA, 16 nt, Human
uaauuuauaaaaaggu

SEQ ID NO: 3692157 - RNA, 21 nt, Human
uaauuuauaaaagaauaaaau

SEQ ID NO: 3692158 - RNA, 12 nt, Human
uaauuuauagua

SEQ ID NO: 3692159 - RNA, 20 nt, Human
uaauuuaucuaaauuaaagc

SEQ ID NO: 3692160 - RNA, 23 nt, Human
uaauuuaucuugucucugggcuu

SEQ ID NO: 3692161 - RNA, 20 nt, Human
uaauuuaugaguuuuugaua

SEQ ID NO: 3692162 - RNA, 18 nt, Human
uaauuuauuauugaaauu

SEQ ID NO: 3692163 - RNA, 17 nt, Human
uaauuuauuuauuaaga

SEQ ID NO: 3692164 - RNA, 19 nt, Human
uaauuuauuuauuaagaug

SEQ ID NO: 3692165 - RNA, 19 nt, Human
uaauuuauuuccacuaaaa

SEQ ID NO: 3692166 - RNA, 19 nt, Human
uaauuucaaaaauauaacu

SEQ ID NO: 3692167 - RNA, 20 nt, Human
uaauuucaaaaauauaacuu

SEQ ID NO: 3692168 - RNA, 21 nt, Human
uaauuucaaaaauauaacuua

SEQ ID NO: 3692169 - RNA, 15 nt, Human
uaauuucaaaaugcu

SEQ ID NO: 3692170 - RNA, 20 nt, Human
uaauuucaaaaugcuuuuua

SEQ ID NO: 3692171 - RNA, 22 nt, Human
uaauuucaggaggaauacugaa

SEQ ID NO: 3692172 - RNA, 23 nt, Human
uaauuucaggaggaauacugaac

SEQ ID NO: 3692173 - RNA, 23 nt, Human
uaauuucaguccuguaguuuuau

SEQ ID NO: 3692174 - RNA, 20 nt, Human
uaauuucauguaaaacagaa

SEQ ID NO: 3692175 - RNA, 16 nt, Human
uaauuuccauuuacuu

SEQ ID NO: 3692176 - RNA, 10 nt, Human
uaauuuccuu

SEQ ID NO: 3692177 - RNA, 17 nt, Human
uaauuuccuuaaagcaa

SEQ ID NO: 3692178 - RNA, 11 nt, Human
uaauuuccuuu

SEQ ID NO: 3692179 - RNA, 13 nt, Human
uaauuuccuuuuu

SEQ ID NO: 3692180 - RNA, 19 nt, Human
uaauuuccuuuuugacacu

SEQ ID NO: 3692181 - RNA, 20 nt, Human
uaauuuccuuuuugacacug

SEQ ID NO: 3692182 - RNA, 21 nt, Human
uaauuuccuuuuugacacuga

SEQ ID NO: 3692183 - RNA, 22 nt, Human
uaauuuccuuuuugacacugaa

SEQ ID NO: 3692184 - RNA, 17 nt, Human
uaauuucgagauuugua

SEQ ID NO: 3692185 - RNA, 15 nt, Human
uaauuucuucaaaau

SEQ ID NO: 3692186 - RNA, 15 nt, Human
uaauuucuucucaaa

SEQ ID NO: 3692187 - RNA, 12 nt, Human
uaauuucuuugc

SEQ ID NO: 3692188 - RNA, 16 nt, Human
uaauuucuuugccugu

SEQ ID NO: 3692189 - RNA, 14 nt, Human
uaauuugaagauug

SEQ ID NO: 3692190 - RNA, 15 nt, Human
uaauuugagagaaau

SEQ ID NO: 3692191 - RNA, 22 nt, Human
uaauuugauaguauugugcaua

SEQ ID NO: 3692192 - RNA, 22 nt, Human
uaauuugauaucacagucuaau

SEQ ID NO: 3692193 - RNA, 18 nt, Human
uaauuugaugaaagcuga

SEQ ID NO: 3692194 - RNA, 20 nt, Human
uaauuugaugaaagcugauu

SEQ ID NO: 3692195 - RNA, 17 nt, Human
uaauuugauuaacaaau

SEQ ID NO: 3692196 - RNA, 23 nt, Human
uaauuugccaaaauaaugucuug

SEQ ID NO: 3692197 - RNA, 13 nt, Human
uaauuugcugcug

SEQ ID NO: 3692198 - RNA, 11 nt, Human
uaauuuggaaa

SEQ ID NO: 3692199 - RNA, 19 nt, Human
uaauuuggaaacuaauaaa

SEQ ID NO: 3692200 - RNA, 21 nt, Human
uaauuuggaaacuaauaaaau

SEQ ID NO: 3692201 - RNA, 21 nt, Human
uaauuuggagcacaaaauuca

SEQ ID NO: 3692202 - RNA, 18 nt, Human
uaauuugguuuucacauu

SEQ ID NO: 3692203 - RNA, 12 nt, Human
uaauuuguaaag

SEQ ID NO: 3692204 - RNA, 15 nt, Human
uaauuuguaagaaua

SEQ ID NO: 3692205 - RNA, 21 nt, Human
uaauuuguacauauguaaaau

SEQ ID NO: 3692206 - RNA, 20 nt, Human
uaauuuguaguguuggagaa

SEQ ID NO: 3692207 - RNA, 23 nt, Human
uaauuuguaguguuggagaagaa

SEQ ID NO: 3692208 - RNA, 17 nt, Human
uaauuuguuuuggauau

SEQ ID NO: 3692209 - RNA, 14 nt, Human
uaauuuuaaacaaa

SEQ ID NO: 3692210 - RNA, 13 nt, Human
uaauuuuaaauuc

SEQ ID NO: 3692211 - RNA, 21 nt, Human
uaauuuuacauguuuauaaau

SEQ ID NO: 3692212 - RNA, 19 nt, Human
uaauuuuaggcacccaucc

SEQ ID NO: 3692213 - RNA, 19 nt, Human
uaauuuuaguuuuucauua

SEQ ID NO: 3692214 - RNA, 21 nt, Human
uaauuuuaguuuuucauuaaa

SEQ ID NO: 3692215 - RNA, 16 nt, Human
uaauuuuauucaagaa

SEQ ID NO: 3692216 - RNA, 19 nt, Human
uaauuuuauuuuaaaauuu

SEQ ID NO: 3692217 - RNA, 21 nt, Human
uaauuuucuagauuuucuacu

SEQ ID NO: 3692218 - RNA, 18 nt, Human
uaauuuucucaaaagcau

SEQ ID NO: 3692219 - RNA, 22 nt, Human
uaauuuucucaaaagcauuuau

SEQ ID NO: 3692220 - RNA, 12 nt, Human
uaauuuucugaa

SEQ ID NO: 3692221 - RNA, 12 nt, Human
uaauuuucuuga

SEQ ID NO: 3692222 - RNA, 13 nt, Human
uaauuuucuugau

SEQ ID NO: 3692223 - RNA, 14 nt, Human
uaauuuucuugaug

SEQ ID NO: 3692224 - RNA, 15 nt, Human
uaauuuugcauaaaa

SEQ ID NO: 3692225 - RNA, 12 nt, Human
uaauuuuggaau

SEQ ID NO: 3692226 - RNA, 22 nt, Human
uaauuuugguuguauucuuuga

SEQ ID NO: 3692227 - RNA, 19 nt, Human
uaauuuuguaaaggugaaa

SEQ ID NO: 3692228 - RNA, 12 nt, Human
uaauuuuguaau

SEQ ID NO: 3692229 - RNA, 13 nt, Human
uaauuuuguguaa

SEQ ID NO: 3692230 - RNA, 19 nt, Human
uaauuuuuaaaugcaguua

SEQ ID NO: 3692231 - RNA, 19 nt, Human
uaauuuuuaaugaugacaa

SEQ ID NO: 3692232 - RNA, 16 nt, Human
uaauuuuuacagaauu

SEQ ID NO: 3692233 - RNA, 14 nt, Human
uaauuuuuacccua

SEQ ID NO: 3692234 - RNA, 16 nt, Human
uaauuuuuauauuuaa

SEQ ID NO: 3692235 - RNA, 13 nt, Human
uaauuuuuauuca

SEQ ID NO: 3692236 - RNA, 23 nt, Human
uaauuuuuauuuuugcugagacu

SEQ ID NO: 3692237 - RNA, 14 nt, Human
uaauuuuucuguau

SEQ ID NO: 3692238 - RNA, 15 nt, Human
uaauuuuucuguaua

SEQ ID NO: 3692239 - RNA, 18 nt, Human
uaauuuuugcuuuuagaa

SEQ ID NO: 3692240 - RNA, 19 nt, Human
uaauuuuuuagagagcugu

SEQ ID NO: 3692241 - RNA, 18 nt, Human
uaauuuuuugguacaaaa

SEQ ID NO: 3692242 - RNA, 16 nt, Human
uaauuuuuuguaaugu

SEQ ID NO: 3692243 - RNA, 18 nt, Human
uaauuuuuuuauuguuua

SEQ ID NO: 3692244 - RNA, 20 nt, Human
uaauuuuuuuauuguuuaaa

SEQ ID NO: 3692245 - RNA, 16 nt, Human
uaauuuuuuucaauau

SEQ ID NO: 3692246 - RNA, 22 nt, Human
uaauuuuuuucaauauuuauua

SEQ ID NO: 3692247 - RNA, 13 nt, Human
uaauuuuuuuuaa

SEQ ID NO: 3692248 - RNA, 20 nt, Human
uaauuuuuuuuaaaauagaa

SEQ ID NO: 3692249 - RNA, 22 nt, Human
uaauuuuuuuuuuccuuuuaaa

SEQ ID NO: 3692250 - RNA, 21 nt, Human
uacaaaaaaaaaaaaaaauua

SEQ ID NO: 3692251 - RNA, 20 nt, Human
uacaaaaaaaaaguuuuauu

SEQ ID NO: 3692252 - RNA, 14 nt, Human
uacaaaaacacagc

SEQ ID NO: 3692253 - RNA, 18 nt, Human
uacaaaaacacagcaagg

SEQ ID NO: 3692254 - RNA, 13 nt, Human
uacaaaaacacuu

SEQ ID NO: 3692255 - RNA, 23 nt, Human
uacaaaaacacuucguucgcaga

SEQ ID NO: 3692256 - RNA, 12 nt, Human
uacaaaaauaaa

SEQ ID NO: 3692257 - RNA, 22 nt, Human
uacaaaaauaaacuauaaaaca

SEQ ID NO: 3692258 - RNA, 17 nt, Human
uacaaaaauauaaaaua

SEQ ID NO: 3692259 - RNA, 22 nt, Human
uacaaaaauuugccaggcgugg

SEQ ID NO: 3692260 - RNA, 17 nt, Human
uacaaaacaaacucauu

SEQ ID NO: 3692261 - RNA, 16 nt, Human
uacaaaacauuaaacu

SEQ ID NO: 3692262 - RNA, 19 nt, Human
uacaaaaccacuggaaagu

SEQ ID NO: 3692263 - RNA, 19 nt, Human
uacaaaaccugauguuaaa

SEQ ID NO: 3692264 - RNA, 20 nt, Human
uacaaaacgcgcagaugugc

SEQ ID NO: 3692265 - RNA, 12 nt, Human
uacaaaacuucc

SEQ ID NO: 3692266 - RNA, 13 nt, Human
uacaaaauaaaaa

SEQ ID NO: 3692267 - RNA, 19 nt, Human
uacaaaauaaacaaauaac

SEQ ID NO: 3692268 - RNA, 20 nt, Human
uacaaaauaaaguuacauug

SEQ ID NO: 3692269 - RNA, 10 nt, Human
uacaaaauca

SEQ ID NO: 3692270 - RNA, 14 nt, Human
uacaaaauguaacu

SEQ ID NO: 3692271 - RNA, 23 nt, Human
uacaaaauuaagcaaauguuaaa

SEQ ID NO: 3692272 - RNA, 15 nt, Human
uacaaacaagcauau

SEQ ID NO: 3692273 - RNA, 19 nt, Human
uacaaacaagcauauaaaa

SEQ ID NO: 3692274 - RNA, 20 nt, Human
uacaaacaagcauauaaaau

SEQ ID NO: 3692275 - RNA, 19 nt, Human
uguguacaguguguaaagu

SEQ ID NO: 3692276 - RNA, 20 nt, Human
uguguacauaacucuguaaa

SEQ ID NO: 3692277 - RNA, 20 nt, Human
uguguacaucccauguaaca

SEQ ID NO: 3692278 - RNA, 23 nt, Human
uguguacaucccauguaacagaa

SEQ ID NO: 3692279 - RNA, 24 nt, Human
uguguacaucccauguaacagaaa

SEQ ID NO: 3692280 - RNA, 19 nt, Human
uguguacauggcagaguuu

SEQ ID NO: 3692281 - RNA, 15 nt, Human
uguguacccaaacgu

SEQ ID NO: 3692282 - RNA, 15 nt, Human
uguguacguggagag

SEQ ID NO: 3692283 - RNA, 16 nt, Human
uguguacguggagagg

SEQ ID NO: 3692284 - RNA, 20 nt, Human
uguguacucuggccucuguc

SEQ ID NO: 3692285 - RNA, 14 nt, Human
uguguacucugucc

SEQ ID NO: 3692286 - RNA, 17 nt, Human
uguguacuguaaagaau

SEQ ID NO: 3692287 - RNA, 14 nt, Human
uguguacuguguca

SEQ ID NO: 3692288 - RNA, 12 nt, Human
uguguacuuuua

SEQ ID NO: 3692289 - RNA, 15 nt, Human
uguguacuuuuaaga

SEQ ID NO: 3692290 - RNA, 23 nt, Human
uguguagacgaagggggcaucug

SEQ ID NO: 3692291 - RNA, 13 nt, Human
uguguagaguuaa

SEQ ID NO: 3692292 - RNA, 16 nt, Human
uguguagaguuaagaa

SEQ ID NO: 3692293 - RNA, 19 nt, Human
uguguagcauacuggcuuc

SEQ ID NO: 3692294 - RNA, 14 nt, Human
uguguagccugugc

SEQ ID NO: 3692295 - RNA, 16 nt, Human
uguguagccugugcau

SEQ ID NO: 3692296 - RNA, 23 nt, Human
uguguagccugugcauguauguc

SEQ ID NO: 3692297 - RNA, 18 nt, Human
uguguagcugcaaaaaua

SEQ ID NO: 3692298 - RNA, 16 nt, Human
uguguagggcgggagg

SEQ ID NO: 3692299 - RNA, 21 nt, Human
uguguauaaaaauaaaaaaga

SEQ ID NO: 3692300 - RNA, 14 nt, Human
uguguauaaacaag

SEQ ID NO: 3692301 - RNA, 22 nt, Human
uguguauaaacaagaaaaauaa

SEQ ID NO: 3692302 - RNA, 21 nt, Human
uguguauagaugcaagauauu

SEQ ID NO: 3692303 - RNA, 15 nt, Human
uguguauauauacau

SEQ ID NO: 3692304 - RNA, 23 nt, Human
uguguauauauguguauauauac

SEQ ID NO: 3692305 - RNA, 22 nt, Human
uguguauauauuuugugugaaa

SEQ ID NO: 3692306 - RNA, 13 nt, Human
uguguauauggua

SEQ ID NO: 3692307 - RNA, 15 nt, Human
uguguauauuauuug

SEQ ID NO: 3692308 - RNA, 18 nt, Human
uguguauccauuaucaug

SEQ ID NO: 3692309 - RNA, 22 nt, Human
uguguauccauuaucaugugua

SEQ ID NO: 3692310 - RNA, 22 nt, Human
uguguaugugaguauucucauu

SEQ ID NO: 3692311 - RNA, 14 nt, Human
uguguaugugcgug

SEQ ID NO: 3692312 - RNA, 13 nt, Human
uguguaugugggg

SEQ ID NO: 3692313 - RNA, 23 nt, Human
uguguaugugggggucugugugu

SEQ ID NO: 3692314 - RNA, 13 nt, Human
uguguauuguucc

SEQ ID NO: 3692315 - RNA, 13 nt, Human
uguguauuguugu

SEQ ID NO: 3692316 - RNA, 18 nt, Human
uguguauuuaacagggag

SEQ ID NO: 3692317 - RNA, 20 nt, Human
uguguauuuaacagggaggg

SEQ ID NO: 3692318 - RNA, 17 nt, Human
uguguauuuaauuguaa

SEQ ID NO: 3692319 - RNA, 18 nt, Human
uguguauuuaauuguaaa

SEQ ID NO: 3692320 - RNA, 19 nt, Human
uguguauuuaauuguaaac

SEQ ID NO: 3692321 - RNA, 20 nt, Human
uguguauuuaauuguaaacu

SEQ ID NO: 3692322 - RNA, 22 nt, Human
uguguauuuaauuguaaacugu

SEQ ID NO: 3692323 - RNA, 19 nt, Human
uguguauuuccagugcaau

SEQ ID NO: 3692324 - RNA, 14 nt, Human
ugugucaauccaga

SEQ ID NO: 3692325 - RNA, 16 nt, Human
ugugucacaaagaauu

SEQ ID NO: 3692326 - RNA, 13 nt, Human
ugugucacuggcu

SEQ ID NO: 3692327 - RNA, 22 nt, Human
ugugucacuggcugccuccacu

SEQ ID NO: 3692328 - RNA, 15 nt, Human
ugugucacuugugcu

SEQ ID NO: 3692329 - RNA, 19 nt, Human
ugugucaguggggcucucu

SEQ ID NO: 3692330 - RNA, 21 nt, Human
ugugucaguggggcucucuga

SEQ ID NO: 3692331 - RNA, 20 nt, Human
ugugucaguuuauguuuugg

SEQ ID NO: 3692332 - RNA, 14 nt, Human
ugugucaguuuuca

SEQ ID NO: 3692333 - RNA, 15 nt, Human
ugugucaguuuucau

SEQ ID NO: 3692334 - RNA, 21 nt, Human
uguguccaaaaccgccagcuc

SEQ ID NO: 3692335 - RNA, 15 nt, Human
uguguccaacuccag

SEQ ID NO: 3692336 - RNA, 19 nt, Human
uguguccaagugugugugc

SEQ ID NO: 3692337 - RNA, 14 nt, Human
uguguccaugugug

SEQ ID NO: 3692338 - RNA, 16 nt, Human
uguguccaugugugug

SEQ ID NO: 3692339 - RNA, 18 nt, Human
uguguccaugugugugca

SEQ ID NO: 3692340 - RNA, 21 nt, Human
ugugucccaugacccaccccu

SEQ ID NO: 3692341 - RNA, 19 nt, Human
ugugucccaugaucccugu

SEQ ID NO: 3692342 - RNA, 20 nt, Human
ugugucccaugaucccugug

SEQ ID NO: 3692343 - RNA, 16 nt, Human
ugugucccccucuguc

SEQ ID NO: 3692344 - RNA, 18 nt, Human
ugugucccccucugucca

SEQ ID NO: 3692345 - RNA, 14 nt, Human
uguguccuaguucu

SEQ ID NO: 3692346 - RNA, 14 nt, Human
uguguccucaggga

SEQ ID NO: 3692347 - RNA, 18 nt, Human
uguguccuccaggagcuu

SEQ ID NO: 3692348 - RNA, 19 nt, Human
uguguccuggugcucucug

SEQ ID NO: 3692349 - RNA, 22 nt, Human
uguguccuggugcucucugcca

SEQ ID NO: 3692350 - RNA, 14 nt, Human
uguguccuucccug

SEQ ID NO: 3692351 - RNA, 16 nt, Human
uguguccuucccugca

SEQ ID NO: 3692352 - RNA, 17 nt, Human
uguguccuucccugcau

SEQ ID NO: 3692353 - RNA, 14 nt, Human
uguguccuugcacc

SEQ ID NO: 3692354 - RNA, 18 nt, Human
uguguccuugcaccugca

SEQ ID NO: 3692355 - RNA, 19 nt, Human
uguguccuugcaccugcau

SEQ ID NO: 3692356 - RNA, 12 nt, Human
ugugucuaaacu

SEQ ID NO: 3692357 - RNA, 13 nt, Human
ugugucuaaacug

SEQ ID NO: 3692358 - RNA, 19 nt, Human
ugugucuccugcaugcaga

SEQ ID NO: 3692359 - RNA, 13 nt, Human
ugugucucuuggu

SEQ ID NO: 3692360 - RNA, 16 nt, Human
ugugucucuugguccu

SEQ ID NO: 3692361 - RNA, 14 nt, Human
ugugucucuuuucu

SEQ ID NO: 3692362 - RNA, 16 nt, Human
ugugucugccacauua

SEQ ID NO: 3692363 - RNA, 22 nt, Human
ugugucugcuuuaaagggccug

SEQ ID NO: 3692364 - RNA, 14 nt, Human
ugugucuuaauuau

SEQ ID NO: 3692365 - RNA, 16 nt, Human
ugugucuuaauuauua

SEQ ID NO: 3692366 - RNA, 16 nt, Human
ugugucuuguguuuuu

SEQ ID NO: 3692367 - RNA, 22 nt, Human
ugugucuuucacagcuccuccc

SEQ ID NO: 3692368 - RNA, 12 nt, Human
ugugucuuucua

SEQ ID NO: 3692369 - RNA, 22 nt, Human
ugugugaaagguacuucaaauc

SEQ ID NO: 3692370 - RNA, 14 nt, Human
ugugugaaauugca

SEQ ID NO: 3692371 - RNA, 22 nt, Human
ugugugaagcuuaagggucaua

SEQ ID NO: 3692372 - RNA, 17 nt, Human
ugugugaagugagugag

SEQ ID NO: 3692373 - RNA, 16 nt, Human
ugugugaaugaacacu

SEQ ID NO: 3692374 - RNA, 18 nt, Human
ugugugaaugaacacucu

SEQ ID NO: 3692375 - RNA, 15 nt, Human
ugugugacaauucug

SEQ ID NO: 3692376 - RNA, 20 nt, Human
ugugugacaauucuguuuuu

SEQ ID NO: 3692377 - RNA, 20 nt, Human
ugugugaccaacuguguugu

SEQ ID NO: 3692378 - RNA, 19 nt, Human
ugugugaccccuccugggg

SEQ ID NO: 3692379 - RNA, 20 nt, Human
ugugugaggagcugcuggcu

SEQ ID NO: 3692380 - RNA, 17 nt, Human
ugugugagugugaauau

SEQ ID NO: 3692381 - RNA, 16 nt, Human
ugugugauauuucaga

SEQ ID NO: 3692382 - RNA, 14 nt, Human
ugugugaugugaca

SEQ ID NO: 3692383 - RNA, 17 nt, Human
ugugugaugugacauuu

SEQ ID NO: 3692384 - RNA, 15 nt, Human
ugugugauuaaaagg

SEQ ID NO: 3692385 - RNA, 15 nt, Human
ugugugauugacagc

SEQ ID NO: 3692386 - RNA, 17 nt, Human
ugugugcaaaagcagug

SEQ ID NO: 3692387 - RNA, 22 nt, Human
ugugugcaccuuaccaacuuuc

SEQ ID NO: 3692388 - RNA, 14 nt, Human
ugugugcagagcug

SEQ ID NO: 3692389 - RNA, 15 nt, Human
ugugugcaucaggcu

SEQ ID NO: 3692390 - RNA, 17 nt, Human
ugugugcaucaggcuuu

SEQ ID NO: 3692391 - RNA, 18 nt, Human
ugugugccgagcccuugc

SEQ ID NO: 3692392 - RNA, 14 nt, Human
uguguggacaggac

SEQ ID NO: 3692393 - RNA, 23 nt, Human
uguguggauugccucugaaaagu

SEQ ID NO: 3692394 - RNA, 16 nt, Human
uguguggccacuucug

SEQ ID NO: 3692395 - RNA, 18 nt, Human
ugugugggacuguacaca

SEQ ID NO: 3692396 - RNA, 16 nt, Human
ugugugggagugugua

SEQ ID NO: 3692397 - RNA, 21 nt, Human
uguguggguggauauaaauau

SEQ ID NO: 3692398 - RNA, 22 nt, Human
uguguggguggauauaaauaua

SEQ ID NO: 3692399 - RNA, 14 nt, Human
uguguggucaacau

SEQ ID NO: 3692400 - RNA, 23 nt, Human
uguguggucaacauuucucaugu

SEQ ID NO: 3692401 - RNA, 20 nt, Human
ugugugguuugguguguucc

SEQ ID NO: 3692402 - RNA, 12 nt, Human
uguguguaugug

SEQ ID NO: 3692403 - RNA, 14 nt, Human
uguguguaugugua

SEQ ID NO: 3692404 - RNA, 13 nt, Human
uguguguauuugc

SEQ ID NO: 3692405 - RNA, 19 nt, Human
uguguguccaaaacugccu

SEQ ID NO: 3692406 - RNA, 15 nt, Human
ugugugucccaggca

SEQ ID NO: 3692407 - RNA, 16 nt, Human
ugugugugaaugaaca

SEQ ID NO: 3692408 - RNA, 14 nt, Human
ugugugugauguga

SEQ ID NO: 3692409 - RNA, 18 nt, Human
ugugugugaugugacauu

SEQ ID NO: 3692410 - RNA, 13 nt, Human
ugugugugcgugu

SEQ ID NO: 3692411 - RNA, 20 nt, Human
ugugugugguuuuuuuucua

SEQ ID NO: 3692412 - RNA, 13 nt, Human
uguguguguaugu

SEQ ID NO: 3692413 - RNA, 14 nt, Human
uguguguguauguu

SEQ ID NO: 3692414 - RNA, 13 nt, Human
ugugugugugaau

SEQ ID NO: 3692415 - RNA, 12 nt, Human
ugugugugugug

SEQ ID NO: 3692416 - RNA, 14 nt, Human
ugugugugugugca

SEQ ID NO: 3692417 - RNA, 12 nt, Human
uguguguuccug

SEQ ID NO: 3692418 - RNA, 17 nt, Human
uguguguugccacagga

SEQ ID NO: 3692419 - RNA, 20 nt, Human
uguguguugccacaggacac

SEQ ID NO: 3692420 - RNA, 11 nt, Human
uguguguuuau

SEQ ID NO: 3692421 - RNA, 19 nt, Human
uguguguuuauugucaaag

SEQ ID NO: 3692422 - RNA, 12 nt, Human
uguguuaagagu

SEQ ID NO: 3692423 - RNA, 21 nt, Human
uguguuaagcucugcuauuag

SEQ ID NO: 3692424 - RNA, 19 nt, Human
uguguuaaguauguguaaa

SEQ ID NO: 3692425 - RNA, 15 nt, Human
uacaaacaaucucuu

SEQ ID NO: 3692426 - RNA, 22 nt, Human
uacaaacaauggaaacugaaug

SEQ ID NO: 3692427 - RNA, 19 nt, Human
uacaaacugaagaguaauc

SEQ ID NO: 3692428 - RNA, 16 nt, Human
uacaaacugguauucu

SEQ ID NO: 3692429 - RNA, 16 nt, Human
uacaaagaagacaugu

SEQ ID NO: 3692430 - RNA, 17 nt, Human
uacaaagaagacauguu

SEQ ID NO: 3692431 - RNA, 19 nt, Human
uacaaagaagacauguuuu

SEQ ID NO: 3692432 - RNA, 18 nt, Human
uacaaagcacuagagaau

SEQ ID NO: 3692433 - RNA, 16 nt, Human
uacaaaggcuguauuc

SEQ ID NO: 3692434 - RNA, 18 nt, Human
uacaaaggggaaagaaca

SEQ ID NO: 3692435 - RNA, 16 nt, Human
uacaaagguuuaaaug

SEQ ID NO: 3692436 - RNA, 18 nt, Human
uacaaaguagaagucuua

SEQ ID NO: 3692437 - RNA, 18 nt, Human
uacaaaguauuaagcaua

SEQ ID NO: 3692438 - RNA, 20 nt, Human
uacaaaguguauuuuauaaa

SEQ ID NO: 3692439 - RNA, 13 nt, Human
uacaaagugugua

SEQ ID NO: 3692440 - RNA, 20 nt, Human
uacaaaguuucaauuuguuu

SEQ ID NO: 3692441 - RNA, 17 nt, Human
uacaaauacucuuagga

SEQ ID NO: 3692442 - RNA, 13 nt, Human
uacaaauauauug

SEQ ID NO: 3692443 - RNA, 14 nt, Human
uacaaauauauugu

SEQ ID NO: 3692444 - RNA, 15 nt, Human
uacaaaucaguaauu

SEQ ID NO: 3692445 - RNA, 18 nt, Human
uacaaaugauugcuuuua

SEQ ID NO: 3692446 - RNA, 20 nt, Human
uacaaaugauugcuuuuaaa

SEQ ID NO: 3692447 - RNA, 16 nt, Human
uacaaaugcaucuuug

SEQ ID NO: 3692448 - RNA, 21 nt, Human
uacaaaugcaucuuugaugug

SEQ ID NO: 3692449 - RNA, 17 nt, Human
uacaaauguuaaaaugu

SEQ ID NO: 3692450 - RNA, 21 nt, Human
uacaaauguuaaaauguguug

SEQ ID NO: 3692451 - RNA, 13 nt, Human
uacaaauuauaaa

SEQ ID NO: 3692452 - RNA, 15 nt, Human
uacaaauuauaaaaa

SEQ ID NO: 3692453 - RNA, 15 nt, Human
uacaaauuauaaugu

SEQ ID NO: 3692454 - RNA, 15 nt, Human
uacaaauugcuuacu

SEQ ID NO: 3692455 - RNA, 16 nt, Human
uacaaauugcuugaaa

SEQ ID NO: 3692456 - RNA, 15 nt, Human
uacaaauuuuucugu

SEQ ID NO: 3692457 - RNA, 15 nt, Human
uacaacacaaagaga

SEQ ID NO: 3692458 - RNA, 16 nt, Human
uacaacaccaaaaaau

SEQ ID NO: 3692459 - RNA, 19 nt, Human
uacaacaccaaaaaauauc

SEQ ID NO: 3692460 - RNA, 12 nt, Human
uacaacagauuu

SEQ ID NO: 3692461 - RNA, 17 nt, Human
uacaacagauuugugaa

SEQ ID NO: 3692462 - RNA, 18 nt, Human
uacaacagauuugugaac

SEQ ID NO: 3692463 - RNA, 17 nt, Human
uacaagaaaaaaugaau

SEQ ID NO: 3692464 - RNA, 14 nt, Human
uacaagaagcauuu

SEQ ID NO: 3692465 - RNA, 19 nt, Human
uacaagaagcauuuuguaa

SEQ ID NO: 3692466 - RNA, 15 nt, Human
uacaagacacaguga

SEQ ID NO: 3692467 - RNA, 22 nt, Human
uacaagacugccauauuaaauu

SEQ ID NO: 3692468 - RNA, 23 nt, Human
uacaagagcagccuguggcaucu

SEQ ID NO: 3692469 - RNA, 15 nt, Human
uacaagauaagcuuc

SEQ ID NO: 3692470 - RNA, 15 nt, Human
uacaagauugaaaau

SEQ ID NO: 3692471 - RNA, 17 nt, Human
uacaagauuuagaaaaa

SEQ ID NO: 3692472 - RNA, 16 nt, Human
uacaagccugcacaau

SEQ ID NO: 3692473 - RNA, 18 nt, Human
uacaagcgugagccacug

SEQ ID NO: 3692474 - RNA, 21 nt, Human
uacaaggccccaagguuuaca

SEQ ID NO: 3692475 - RNA, 22 nt, Human
uacaaggccccaagguuuacau

SEQ ID NO: 3692476 - RNA, 17 nt, Human
uacaagguauaauaaaa

SEQ ID NO: 3692477 - RNA, 15 nt, Human
uacaaguaacaaaaa

SEQ ID NO: 3692478 - RNA, 18 nt, Human
uacaaguacugguaagau

SEQ ID NO: 3692479 - RNA, 16 nt, Human
uacaaguaguucugua

SEQ ID NO: 3692480 - RNA, 17 nt, Human
uacaaguauuuuuaauu

SEQ ID NO: 3692481 - RNA, 18 nt, Human
uacaaguauuuuuaauua

SEQ ID NO: 3692482 - RNA, 13 nt, Human
uacaaguuagaaa

SEQ ID NO: 3692483 - RNA, 18 nt, Human
uacaaguucuauuuaagu

SEQ ID NO: 3692484 - RNA, 22 nt, Human
uacaauaaauugcuaauguugc

SEQ ID NO: 3692485 - RNA, 12 nt, Human
uacaauaaugga

SEQ ID NO: 3692486 - RNA, 15 nt, Human
uacaauaauggaaaa

SEQ ID NO: 3692487 - RNA, 18 nt, Human
uacaauauauaaaaauau

SEQ ID NO: 3692488 - RNA, 23 nt, Human
uacaauauauagcuggcaagaau

SEQ ID NO: 3692489 - RNA, 23 nt, Human
uacaauauugauugggaaaacau

SEQ ID NO: 3692490 - RNA, 14 nt, Human
uacaauauuuuaag

SEQ ID NO: 3692491 - RNA, 17 nt, Human
uacaauauuuuaagcau

SEQ ID NO: 3692492 - RNA, 16 nt, Human
uacaaucagcugcuuu

SEQ ID NO: 3692493 - RNA, 20 nt, Human
uacaaucagcugcuuuguua

SEQ ID NO: 3692494 - RNA, 22 nt, Human
uacaaucagcugcuuuguuacc

SEQ ID NO: 3692495 - RNA, 18 nt, Human
uacaaucgcaaaucaaaa

SEQ ID NO: 3692496 - RNA, 17 nt, Human
uacaaucucuuuuuguu

SEQ ID NO: 3692497 - RNA, 13 nt, Human
uacaaugacuuua

SEQ ID NO: 3692498 - RNA, 18 nt, Human
uacaaugaugcuauuugc

SEQ ID NO: 3692499 - RNA, 15 nt, Human
uacaauguaauuauu

SEQ ID NO: 3692500 - RNA, 17 nt, Human
uacaauguauuuauuua

SEQ ID NO: 3692501 - RNA, 19 nt, Human
uacaauguauuuauuuaaa

SEQ ID NO: 3692502 - RNA, 20 nt, Human
uacaaugugaacuuuauuaa

SEQ ID NO: 3692503 - RNA, 21 nt, Human
uacaaugugaacuuuauuaaa

SEQ ID NO: 3692504 - RNA, 22 nt, Human
uacaaugugaacuuuauuaaau

SEQ ID NO: 3692505 - RNA, 17 nt, Human
uacaaugugacuuugaa

SEQ ID NO: 3692506 - RNA, 22 nt, Human
uacaauguucaucccaugaugu

SEQ ID NO: 3692507 - RNA, 13 nt, Human
uacaauguuuuau

SEQ ID NO: 3692508 - RNA, 18 nt, Human
uacaauuaaaaaaaaaga

SEQ ID NO: 3692509 - RNA, 22 nt, Human
uacaauuaaaaaaaaagaucug

SEQ ID NO: 3692510 - RNA, 19 nt, Human
uacaauuauaucaguccuc

SEQ ID NO: 3692511 - RNA, 13 nt, Human
uacaauugaaaug

SEQ ID NO: 3692512 - RNA, 14 nt, Human
uacaauugaacuua

SEQ ID NO: 3692513 - RNA, 22 nt, Human
uacaauugugggcauaaacugu

SEQ ID NO: 3692514 - RNA, 16 nt, Human
uacaauuuacaaagug

SEQ ID NO: 3692515 - RNA, 12 nt, Human
uacaauuuuauc

SEQ ID NO: 3692516 - RNA, 18 nt, Human
uacaauuuucucccagga

SEQ ID NO: 3692517 - RNA, 16 nt, Human
uacaauuuuguuucug

SEQ ID NO: 3692518 - RNA, 17 nt, Human
uacaauuuuuauuucuu

SEQ ID NO: 3692519 - RNA, 22 nt, Human
uacaauuuuuauuucuuuuacu

SEQ ID NO: 3692520 - RNA, 23 nt, Human
uacacaaaacaaaugccacacau

SEQ ID NO: 3692521 - RNA, 13 nt, Human
uacacaaagggga

SEQ ID NO: 3692522 - RNA, 14 nt, Human
uacacaaaggggau

SEQ ID NO: 3692523 - RNA, 19 nt, Human
uacacaaauacuuauucau

SEQ ID NO: 3692524 - RNA, 23 nt, Human
uacacaaaugauagcauaacaua

SEQ ID NO: 3692525 - RNA, 18 nt, Human
uacacaacuaguuuuguu

SEQ ID NO: 3692526 - RNA, 22 nt, Human
uacacaacucacuccuuuuaaa

SEQ ID NO: 3692527 - RNA, 22 nt, Human
uacacaagacuuuccccauacu

SEQ ID NO: 3692528 - RNA, 15 nt, Human
uacacaaguaaacau

SEQ ID NO: 3692529 - RNA, 14 nt, Human
uacacaauaagcaa

SEQ ID NO: 3692530 - RNA, 15 nt, Human
uacacaauaagcaaa

SEQ ID NO: 3692531 - RNA, 17 nt, Human
uacacaaugguuuucuu

SEQ ID NO: 3692532 - RNA, 23 nt, Human
uacacaaugguuuucuugugugu

SEQ ID NO: 3692533 - RNA, 16 nt, Human
uacacaaugugucuuu

SEQ ID NO: 3692534 - RNA, 17 nt, Human
uacacacacacacacag

SEQ ID NO: 3692535 - RNA, 20 nt, Human
uacacacacacacacagcca

SEQ ID NO: 3692536 - RNA, 14 nt, Human
uacacacacagaug

SEQ ID NO: 3692537 - RNA, 15 nt, Human
uacacacacauacac

SEQ ID NO: 3692538 - RNA, 15 nt, Human
uacacacauccacgc

SEQ ID NO: 3692539 - RNA, 16 nt, Human
uacacacggugccuuu

SEQ ID NO: 3692540 - RNA, 17 nt, Human
uacacacggugccuuua

SEQ ID NO: 3692541 - RNA, 17 nt, Human
uacacacguuuguuucu

SEQ ID NO: 3692542 - RNA, 15 nt, Human
uacacacugcauguu

SEQ ID NO: 3692543 - RNA, 20 nt, Human
uacacacugucaugcuucau

SEQ ID NO: 3692544 - RNA, 11 nt, Human
uacacagaaac

SEQ ID NO: 3692545 - RNA, 14 nt, Human
uacacagaaacacu

SEQ ID NO: 3692546 - RNA, 15 nt, Human
uacacagaaacacug

SEQ ID NO: 3692547 - RNA, 22 nt, Human
uacacagaaaugcugcuggcca

SEQ ID NO: 3692548 - RNA, 21 nt, Human
uacacaggacagggguuccuu

SEQ ID NO: 3692549 - RNA, 16 nt, Human
uacacagucugcaaga

SEQ ID NO: 3692550 - RNA, 11 nt, Human
uacacagugug

SEQ ID NO: 3692551 - RNA, 11 nt, Human
uacacaguugc

SEQ ID NO: 3692552 - RNA, 23 nt, Human
uacacauacaguuuuaugcucuu

SEQ ID NO: 3692553 - RNA, 14 nt, Human
uacacauauaccua

SEQ ID NO: 3692554 - RNA, 20 nt, Human
uacacauguauccuuucaca

SEQ ID NO: 3692555 - RNA, 18 nt, Human
uacacauuaaguaaucaa

SEQ ID NO: 3692556 - RNA, 14 nt, Human
uacacauuagauuu

SEQ ID NO: 3692557 - RNA, 23 nt, Human
uacacauuagauuuuauuuuacu

SEQ ID NO: 3692558 - RNA, 20 nt, Human
uacacauucggcucccugga

SEQ ID NO: 3692559 - RNA, 16 nt, Human
uacacauuuguacaga

SEQ ID NO: 3692560 - RNA, 23 nt, Human
uacacauuuuauuuuauuaugca

SEQ ID NO: 3692561 - RNA, 23 nt, Human
uacacauuuuuaaauuguuagcu

SEQ ID NO: 3692562 - RNA, 21 nt, Human
uacacauuuuucagauauaaa

SEQ ID NO: 3692563 - RNA, 17 nt, Human
uacaccacacacaacag

SEQ ID NO: 3692564 - RNA, 18 nt, Human
uacaccacacacaacagc

SEQ ID NO: 3692565 - RNA, 19 nt, Human
uacaccaccucacuccugu

SEQ ID NO: 3692566 - RNA, 20 nt, Human
uacaccacuacauucuguua

SEQ ID NO: 3692567 - RNA, 17 nt, Human
uacaccacucuggcagc

SEQ ID NO: 3692568 - RNA, 20 nt, Human
uacaccacucuggcagccac

SEQ ID NO: 3692569 - RNA, 21 nt, Human
uacaccacucuggcagccaca

SEQ ID NO: 3692570 - RNA, 20 nt, Human
uacaccagagauaauaugag

SEQ ID NO: 3692571 - RNA, 14 nt, Human
uacacccaaagagg

SEQ ID NO: 3692572 - RNA, 11 nt, Human
uacacccagca

SEQ ID NO: 3692573 - RNA, 12 nt, Human
uacacccagcaa

SEQ ID NO: 3692574 - RNA, 19 nt, Human
uacacccaugaaagaaaac

SEQ ID NO: 3692575 - RNA, 19 nt, Human
uuauuaguauuguuguccu

SEQ ID NO: 3692576 - RNA, 13 nt, Human
uuauuauaaaaau

SEQ ID NO: 3692577 - RNA, 22 nt, Human
uuauuauaaucuuauaauuguu

SEQ ID NO: 3692578 - RNA, 15 nt, Human
uuauuauaauuguau

SEQ ID NO: 3692579 - RNA, 13 nt, Human
uuauuauauaauu

SEQ ID NO: 3692580 - RNA, 22 nt, Human
uuauuaucuaaaguguguuguu

SEQ ID NO: 3692581 - RNA, 11 nt, Human
uuauuaugaaa

SEQ ID NO: 3692582 - RNA, 21 nt, Human
uuauuaugaaacuuguguaaa

SEQ ID NO: 3692583 - RNA, 13 nt, Human
uuauuauguaaau

SEQ ID NO: 3692584 - RNA, 14 nt, Human
uuauuauguaaauc

SEQ ID NO: 3692585 - RNA, 22 nt, Human
uuauuauguaaaucccauuauu

SEQ ID NO: 3692586 - RNA, 14 nt, Human
uuauuauuaacaaa

SEQ ID NO: 3692587 - RNA, 16 nt, Human
uuauuauuauuuuuua

SEQ ID NO: 3692588 - RNA, 14 nt, Human
uuauuauuguggua

SEQ ID NO: 3692589 - RNA, 14 nt, Human
uuauucaaagagaa

SEQ ID NO: 3692590 - RNA, 19 nt, Human
uuauucaaagagaaaacau

SEQ ID NO: 3692591 - RNA, 23 nt, Human
uuauucaaagagaaaacaucuca

SEQ ID NO: 3692592 - RNA, 15 nt, Human
uuauucaaaguugcc

SEQ ID NO: 3692593 - RNA, 19 nt, Human
uuauucaauaaaguauuua

SEQ ID NO: 3692594 - RNA, 18 nt, Human
uuauucaauuccucuggg

SEQ ID NO: 3692595 - RNA, 17 nt, Human
uuauucaauuuauuuga

SEQ ID NO: 3692596 - RNA, 18 nt, Human
uuauucaauuuauuugaa

SEQ ID NO: 3692597 - RNA, 21 nt, Human
uuauucaauuuauuugaauga

SEQ ID NO: 3692598 - RNA, 21 nt, Human
uuauucaggaaaagccucugu

SEQ ID NO: 3692599 - RNA, 18 nt, Human
uuauucaguaacugucag

SEQ ID NO: 3692600 - RNA, 16 nt, Human
uuauucaguuaagaaa

SEQ ID NO: 3692601 - RNA, 18 nt, Human
uuauucaguuaagaaaaa

SEQ ID NO: 3692602 - RNA, 16 nt, Human
uuauucauaugcauau

SEQ ID NO: 3692603 - RNA, 21 nt, Human
uuauucauuaguuuugaagau

SEQ ID NO: 3692604 - RNA, 18 nt, Human
uuauucauuauuugucaa

SEQ ID NO: 3692605 - RNA, 12 nt, Human
uuauucauugug

SEQ ID NO: 3692606 - RNA, 12 nt, Human
uuauucauuuaa

SEQ ID NO: 3692607 - RNA, 20 nt, Human
uuauuccaaaccaaauuuua

SEQ ID NO: 3692608 - RNA, 20 nt, Human
uuauuccagaaugcuguaca

SEQ ID NO: 3692609 - RNA, 19 nt, Human
uuauuccauauuagaaaac

SEQ ID NO: 3692610 - RNA, 23 nt, Human
uuauuccauauuagaaaacuuug

SEQ ID NO: 3692611 - RNA, 18 nt, Human
uuauucccuuccugccag

SEQ ID NO: 3692612 - RNA, 22 nt, Human
uuauuccuauauaguuuauuga

SEQ ID NO: 3692613 - RNA, 16 nt, Human
uuauuccuccugcuca

SEQ ID NO: 3692614 - RNA, 20 nt, Human
uuauuccuccugcucauauu

SEQ ID NO: 3692615 - RNA, 19 nt, Human
uuauucguagauauuggac

SEQ ID NO: 3692616 - RNA, 14 nt, Human
uuauucuacuauac

SEQ ID NO: 3692617 - RNA, 13 nt, Human
uuauucuagauua

SEQ ID NO: 3692618 - RNA, 15 nt, Human
uuauucucaaagcag

SEQ ID NO: 3692619 - RNA, 19 nt, Human
uuauucucuuuuaucuguu

SEQ ID NO: 3692620 - RNA, 13 nt, Human
uuauucuggaguu

SEQ ID NO: 3692621 - RNA, 19 nt, Human
uuauucugggaauguauag

SEQ ID NO: 3692622 - RNA, 14 nt, Human
uuauucuucuagag

SEQ ID NO: 3692623 - RNA, 14 nt, Human
uuauucuugugaau

SEQ ID NO: 3692624 - RNA, 16 nt, Human
uuauucuuuuuaaagu

SEQ ID NO: 3692625 - RNA, 22 nt, Human
uuauucuuuuuuucucuagagu

SEQ ID NO: 3692626 - RNA, 14 nt, Human
uuauugaaagaauu

SEQ ID NO: 3692627 - RNA, 12 nt, Human
uuauugaagcag

SEQ ID NO: 3692628 - RNA, 17 nt, Human
uuauugaagcagagugg

SEQ ID NO: 3692629 - RNA, 14 nt, Human
uuauugacacagaa

SEQ ID NO: 3692630 - RNA, 13 nt, Human
uuauugaccauuu

SEQ ID NO: 3692631 - RNA, 14 nt, Human
uuauugacucuuga

SEQ ID NO: 3692632 - RNA, 16 nt, Human
uuauugagaaagagca

SEQ ID NO: 3692633 - RNA, 13 nt, Human
uuauugagaauuu

SEQ ID NO: 3692634 - RNA, 19 nt, Human
uuauugagaauuuuaaauu

SEQ ID NO: 3692635 - RNA, 19 nt, Human
uuauugaggaaaaauaugu

SEQ ID NO: 3692636 - RNA, 23 nt, Human
uuauugaggaaaaauaugugaag

SEQ ID NO: 3692637 - RNA, 19 nt, Human
uuauugaguuccaguugaa

SEQ ID NO: 3692638 - RNA, 15 nt, Human
uuauugauaaguuca

SEQ ID NO: 3692639 - RNA, 21 nt, Human
uuauugauauucuaagaaaua

SEQ ID NO: 3692640 - RNA, 14 nt, Human
uuauugaugaaaau

SEQ ID NO: 3692641 - RNA, 20 nt, Human
uuauugcaauaaaagugcuu

SEQ ID NO: 3692642 - RNA, 13 nt, Human
uuauugcauuaua

SEQ ID NO: 3692643 - RNA, 21 nt, Human
uuauugccaaaacccagcugc

SEQ ID NO: 3692644 - RNA, 19 nt, Human
uuauugccaggaaaggaga

SEQ ID NO: 3692645 - RNA, 12 nt, Human
uuauugccuucu

SEQ ID NO: 3692646 - RNA, 17 nt, Human
uuauugccuucucacca

SEQ ID NO: 3692647 - RNA, 14 nt, Human
uuauugcuaguauu

SEQ ID NO: 3692648 - RNA, 18 nt, Human
uuauugcuaguauuugaa

SEQ ID NO: 3692649 - RNA, 12 nt, Human
uuauuggaaagg

SEQ ID NO: 3692650 - RNA, 13 nt, Human
uuauuggaauuaa

SEQ ID NO: 3692651 - RNA, 19 nt, Human
uuauuggccugaaaugauc

SEQ ID NO: 3692652 - RNA, 15 nt, Human
uuauuggcugagaua

SEQ ID NO: 3692653 - RNA, 19 nt, Human
uuauugggcaagugauuga

SEQ ID NO: 3692654 - RNA, 20 nt, Human
uuauugguuuuccaaucauu

SEQ ID NO: 3692655 - RNA, 18 nt, Human
uuauugguuuugcagaag

SEQ ID NO: 3692656 - RNA, 12 nt, Human
uuauuguaaauu

SEQ ID NO: 3692657 - RNA, 14 nt, Human
uuauuguauaaacu

SEQ ID NO: 3692658 - RNA, 22 nt, Human
uuauuguauaaacuaucaguuu

SEQ ID NO: 3692659 - RNA, 13 nt, Human
uuauuguauucug

SEQ ID NO: 3692660 - RNA, 13 nt, Human
uuauugucuguaa

SEQ ID NO: 3692661 - RNA, 22 nt, Human
uuauugugaaugauucauguua

SEQ ID NO: 3692662 - RNA, 19 nt, Human
uuauuguggauaacaaaga

SEQ ID NO: 3692663 - RNA, 20 nt, Human
uuauugugguaggccuuuua

SEQ ID NO: 3692664 - RNA, 15 nt, Human
uuauuguguuuguca

SEQ ID NO: 3692665 - RNA, 16 nt, Human
uuauuguuccaagaca

SEQ ID NO: 3692666 - RNA, 17 nt, Human
uuauuguuuaaaaucau

SEQ ID NO: 3692667 - RNA, 17 nt, Human
uuauuuaaaaaacuaaa

SEQ ID NO: 3692668 - RNA, 14 nt, Human
uuauuuaaaagauu

SEQ ID NO: 3692669 - RNA, 15 nt, Human
uuauuuaaaagauuc

SEQ ID NO: 3692670 - RNA, 17 nt, Human
uuauuuaaaagauucau

SEQ ID NO: 3692671 - RNA, 15 nt, Human
uuauuuaaaauagca

SEQ ID NO: 3692672 - RNA, 22 nt, Human
uuauuuaaaauagcaaaagaag

SEQ ID NO: 3692673 - RNA, 23 nt, Human
uuauuuaaaccgcuaaaagaaac

SEQ ID NO: 3692674 - RNA, 15 nt, Human
uuauuuaaaugucua

SEQ ID NO: 3692675 - RNA, 20 nt, Human
uuauuuaaaugucuaaugua

SEQ ID NO: 3692676 - RNA, 22 nt, Human
uuauuuaaugaaagacuguaca

SEQ ID NO: 3692677 - RNA, 16 nt, Human
uuauuuaauguuaugu

SEQ ID NO: 3692678 - RNA, 15 nt, Human
uuauuuacauuuaau

SEQ ID NO: 3692679 - RNA, 16 nt, Human
uuauuuacauuuaaua

SEQ ID NO: 3692680 - RNA, 22 nt, Human
uuauuuacugagcuucucugug

SEQ ID NO: 3692681 - RNA, 12 nt, Human
uuauuuagagau

SEQ ID NO: 3692682 - RNA, 15 nt, Human
uuauuuaguauuuau

SEQ ID NO: 3692683 - RNA, 16 nt, Human
uuauuuaguuccuuga

SEQ ID NO: 3692684 - RNA, 14 nt, Human
uuauuuauagucau

SEQ ID NO: 3692685 - RNA, 14 nt, Human
uuauuuauauguac

SEQ ID NO: 3692686 - RNA, 17 nt, Human
uuauuuauauguacugu

SEQ ID NO: 3692687 - RNA, 15 nt, Human
uuauuuauauuuauu

SEQ ID NO: 3692688 - RNA, 16 nt, Human
uuauuuauauuuauug

SEQ ID NO: 3692689 - RNA, 17 nt, Human
uuauuuauauuuauuga

SEQ ID NO: 3692690 - RNA, 14 nt, Human
uuauuuauguauug

SEQ ID NO: 3692691 - RNA, 13 nt, Human
uuauuuauuaaga

SEQ ID NO: 3692692 - RNA, 17 nt, Human
uuauuuauucagcuuca

SEQ ID NO: 3692693 - RNA, 22 nt, Human
uuauuuauucugggaauguaua

SEQ ID NO: 3692694 - RNA, 21 nt, Human
uuauuucacuuuagaugcuga

SEQ ID NO: 3692695 - RNA, 11 nt, Human
uuauuucagaa

SEQ ID NO: 3692696 - RNA, 15 nt, Human
uuauuucagaaaugu

SEQ ID NO: 3692697 - RNA, 23 nt, Human
uuauuucagauuuugauaacugu

SEQ ID NO: 3692698 - RNA, 15 nt, Human
uuauuuccacuaaaa

SEQ ID NO: 3692699 - RNA, 18 nt, Human
uuauuuccacuaaaaaua

SEQ ID NO: 3692700 - RNA, 20 nt, Human
uuauuuccaguguucuauga

SEQ ID NO: 3692701 - RNA, 21 nt, Human
uuauuuccuaguucuguagaa

SEQ ID NO: 3692702 - RNA, 22 nt, Human
uuauuucucagacuuuggaaaa

SEQ ID NO: 3692703 - RNA, 17 nt, Human
uuauuucugcaaacaaa

SEQ ID NO: 3692704 - RNA, 20 nt, Human
uuauuucugcauauguugaa

SEQ ID NO: 3692705 - RNA, 12 nt, Human
uuauuucuguca

SEQ ID NO: 3692706 - RNA, 12 nt, Human
uuauuucuucaa

SEQ ID NO: 3692707 - RNA, 14 nt, Human
uuauuugacaaaau

SEQ ID NO: 3692708 - RNA, 15 nt, Human
uuauuugcagagaca

SEQ ID NO: 3692709 - RNA, 11 nt, Human
uuauuugcaua

SEQ ID NO: 3692710 - RNA, 19 nt, Human
uuauuugcauguuauguuu

SEQ ID NO: 3692711 - RNA, 13 nt, Human
uuauuuguaaauu

SEQ ID NO: 3692712 - RNA, 16 nt, Human
uuauuuguaauagaug

SEQ ID NO: 3692713 - RNA, 15 nt, Human
uuauuuguacaguuc

SEQ ID NO: 3692714 - RNA, 15 nt, Human
uuauuugucagugua

SEQ ID NO: 3692715 - RNA, 19 nt, Human
uuauuugugauguacugua

SEQ ID NO: 3692716 - RNA, 13 nt, Human
uuauuuguguaau

SEQ ID NO: 3692717 - RNA, 16 nt, Human
uuauuuguguaauaga

SEQ ID NO: 3692718 - RNA, 14 nt, Human
uuauuuuaaaauuu

SEQ ID NO: 3692719 - RNA, 17 nt, Human
uuauuuuaauaauguuu

SEQ ID NO: 3692720 - RNA, 20 nt, Human
uuauuuuaauaauguuucaa

SEQ ID NO: 3692721 - RNA, 14 nt, Human
uuauuuuaauguga

SEQ ID NO: 3692722 - RNA, 18 nt, Human
uuauuuuaaugugaugau

SEQ ID NO: 3692723 - RNA, 23 nt, Human
uuauuuuaaugugaugauguaau

SEQ ID NO: 3692724 - RNA, 17 nt, Human
uuauuuuacacagaaac

SEQ ID NO: 3692725 - RNA, 15 nt, Human
uuauuuuacuuuuug

SEQ ID NO: 3692726 - RNA, 16 nt, Human
uguguuagagauuuuu

SEQ ID NO: 3692727 - RNA, 14 nt, Human
uguguuauuuaaau

SEQ ID NO: 3692728 - RNA, 21 nt, Human
uguguucccuuugucuuucaa

SEQ ID NO: 3692729 - RNA, 12 nt, Human
uguguuccuggc

SEQ ID NO: 3692730 - RNA, 24 nt, Human
uguguuccuggcaauaguguguuc

SEQ ID NO: 3692731 - RNA, 18 nt, Human
uguguucucggagugugu

SEQ ID NO: 3692732 - RNA, 19 nt, Human
uguguucuguuuguuaaaa

SEQ ID NO: 3692733 - RNA, 13 nt, Human
uguguugaaaacc

SEQ ID NO: 3692734 - RNA, 14 nt, Human
uguguugaaaacca

SEQ ID NO: 3692735 - RNA, 13 nt, Human
uguguugaaacug

SEQ ID NO: 3692736 - RNA, 18 nt, Human
uguguugauacuguugca

SEQ ID NO: 3692737 - RNA, 19 nt, Human
uguguugauacuguugcac

SEQ ID NO: 3692738 - RNA, 20 nt, Human
uguguugauacuguugcacg

SEQ ID NO: 3692739 - RNA, 23 nt, Human
uguguugccacaggacacaguca

SEQ ID NO: 3692740 - RNA, 18 nt, Human
uguguugccaugugugcu

SEQ ID NO: 3692741 - RNA, 15 nt, Human
uguguugcuauccug

SEQ ID NO: 3692742 - RNA, 21 nt, Human
uguguuggacaaaugugaaga

SEQ ID NO: 3692743 - RNA, 17 nt, Human
uguguugguguggccca

SEQ ID NO: 3692744 - RNA, 19 nt, Human
uguguuguauuaacaaaag

SEQ ID NO: 3692745 - RNA, 14 nt, Human
uguguugucuugaa

SEQ ID NO: 3692746 - RNA, 18 nt, Human
uguguugucuugaaagau

SEQ ID NO: 3692747 - RNA, 13 nt, Human
uguguugugaaug

SEQ ID NO: 3692748 - RNA, 21 nt, Human
uguguuguugcuucuugugaa

SEQ ID NO: 3692749 - RNA, 15 nt, Human
uguguuuaaauaaag

SEQ ID NO: 3692750 - RNA, 18 nt, Human
uguguuuagaauugaagg

SEQ ID NO: 3692751 - RNA, 22 nt, Human
uguguuuagaauugaagguuuu

SEQ ID NO: 3692752 - RNA, 22 nt, Human
uguguuuaggaacuacugagga

SEQ ID NO: 3692753 - RNA, 22 nt, Human
uguguuuauucaaacugaaaag

SEQ ID NO: 3692754 - RNA, 12 nt, Human
uguguuuauucu

SEQ ID NO: 3692755 - RNA, 14 nt, Human
uguguuuauucuug

SEQ ID NO: 3692756 - RNA, 15 nt, Human
uguguuuauucuuga

SEQ ID NO: 3692757 - RNA, 20 nt, Human
uguguuuauucuugaugaaa

SEQ ID NO: 3692758 - RNA, 13 nt, Human
uguguuuauuguc

SEQ ID NO: 3692759 - RNA, 14 nt, Human
uguguuuauuucac

SEQ ID NO: 3692760 - RNA, 13 nt, Human
uguguuucaaacu

SEQ ID NO: 3692761 - RNA, 15 nt, Human
uguguuucaaguuca

SEQ ID NO: 3692762 - RNA, 18 nt, Human
uguguuucacaguuugaa

SEQ ID NO: 3692763 - RNA, 19 nt, Human
uguguuucacaguuugaaa

SEQ ID NO: 3692764 - RNA, 13 nt, Human
uguguuucacuuu

SEQ ID NO: 3692765 - RNA, 21 nt, Human
uguguuucuccugagcuagga

SEQ ID NO: 3692766 - RNA, 17 nt, Human
uguguuucuugccucau

SEQ ID NO: 3692767 - RNA, 16 nt, Human
uguguuugcagccugc

SEQ ID NO: 3692768 - RNA, 17 nt, Human
uguguuuggcuuucagg

SEQ ID NO: 3692769 - RNA, 17 nt, Human
uguguuugguuuacauu

SEQ ID NO: 3692770 - RNA, 18 nt, Human
uguguuugguuuacauuu

SEQ ID NO: 3692771 - RNA, 15 nt, Human
uguguuuguguauuu

SEQ ID NO: 3692772 - RNA, 20 nt, Human
uguguuuuagaguaagaaau

SEQ ID NO: 3692773 - RNA, 12 nt, Human
uguguuuuauaa

SEQ ID NO: 3692774 - RNA, 14 nt, Human
uguguuuuuaaaag

SEQ ID NO: 3692775 - RNA, 20 nt, Human
uguguuuuuaauaaagacag

SEQ ID NO: 3692776 - RNA, 15 nt, Human
uguguuuuucauaaa

SEQ ID NO: 3692777 - RNA, 15 nt, Human
uguguuuuucuauua

SEQ ID NO: 3692778 - RNA, 19 nt, Human
uguguuuuucuauuaaaag

SEQ ID NO: 3692779 - RNA, 22 nt, Human
uguguuuuucuauuaaaagacu

SEQ ID NO: 3692780 - RNA, 16 nt, Human
uguguuuuucuccagu

SEQ ID NO: 3692781 - RNA, 19 nt, Human
uguguuuuugggaugucuu

SEQ ID NO: 3692782 - RNA, 14 nt, Human
uguguuuuuuaaga

SEQ ID NO: 3692783 - RNA, 20 nt, Human
uguuaaaaaaauaagaagaa

SEQ ID NO: 3692784 - RNA, 22 nt, Human
uguuaaaaaaauaagaagaaug

SEQ ID NO: 3692785 - RNA, 18 nt, Human
uguuaaaaaauuuuugaa

SEQ ID NO: 3692786 - RNA, 19 nt, Human
uguuaaaaaauuuuugaaa

SEQ ID NO: 3692787 - RNA, 13 nt, Human
uguuaaaaauguu

SEQ ID NO: 3692788 - RNA, 20 nt, Human
uguuaaaaguuuuauaugcu

SEQ ID NO: 3692789 - RNA, 13 nt, Human
uguuaaaauaaau

SEQ ID NO: 3692790 - RNA, 12 nt, Human
uguuaaaaucua

SEQ ID NO: 3692791 - RNA, 14 nt, Human
uguuaaaaucuauu

SEQ ID NO: 3692792 - RNA, 21 nt, Human
uguuaaaauuaucaauaucua

SEQ ID NO: 3692793 - RNA, 20 nt, Human
uguuaaaauuaugaaucuga

SEQ ID NO: 3692794 - RNA, 17 nt, Human
uguuaaacagccuauuc

SEQ ID NO: 3692795 - RNA, 19 nt, Human
uguuaaacuagcauaucug

SEQ ID NO: 3692796 - RNA, 20 nt, Human
uguuaaacuagcauaucugc

SEQ ID NO: 3692797 - RNA, 22 nt, Human
uguuaaacuagcauaucugccu

SEQ ID NO: 3692798 - RNA, 13 nt, Human
uguuaaacuguua

SEQ ID NO: 3692799 - RNA, 19 nt, Human
uguuaaacuguuagcacug

SEQ ID NO: 3692800 - RNA, 21 nt, Human
uguuaaacuguuagcacuguu

SEQ ID NO: 3692801 - RNA, 13 nt, Human
uguuaaagaugua

SEQ ID NO: 3692802 - RNA, 18 nt, Human
uguuaaagauguagcaaa

SEQ ID NO: 3692803 - RNA, 14 nt, Human
uguuaaauaaauug

SEQ ID NO: 3692804 - RNA, 19 nt, Human
uguuaaaugaaauuguaaa

SEQ ID NO: 3692805 - RNA, 18 nt, Human
uguuaaauugcuguguau

SEQ ID NO: 3692806 - RNA, 18 nt, Human
uguuaaauuuguaaguuu

SEQ ID NO: 3692807 - RNA, 16 nt, Human
uguuaacauuccaaga

SEQ ID NO: 3692808 - RNA, 20 nt, Human
uguuaacauuuuugguaguc

SEQ ID NO: 3692809 - RNA, 16 nt, Human
uguuaaccagaauaaa

SEQ ID NO: 3692810 - RNA, 15 nt, Human
uguuaaccauuuaag

SEQ ID NO: 3692811 - RNA, 19 nt, Human
uguuaaccucagugucauu

SEQ ID NO: 3692812 - RNA, 17 nt, Human
uguuaagacuugacagu

SEQ ID NO: 3692813 - RNA, 23 nt, Human
uguuaagcagcuaaauuuucuga

SEQ ID NO: 3692814 - RNA, 20 nt, Human
uguuaaggaaacucuuaucu

SEQ ID NO: 3692815 - RNA, 20 nt, Human
uguuaagggaagaauuccag

SEQ ID NO: 3692816 - RNA, 24 nt, Human
uguuaagguccugaaaguaacuca

SEQ ID NO: 3692817 - RNA, 15 nt, Human
uguuaaguaugugua

SEQ ID NO: 3692818 - RNA, 16 nt, Human
uguuaaguauguguaa

SEQ ID NO: 3692819 - RNA, 15 nt, Human
uguuaaguauuuuca

SEQ ID NO: 3692820 - RNA, 21 nt, Human
uguuaaguuauagugaauacu

SEQ ID NO: 3692821 - RNA, 13 nt, Human
uguuaauaaaagu

SEQ ID NO: 3692822 - RNA, 22 nt, Human
uguuaauaaagugcacugccac

SEQ ID NO: 3692823 - RNA, 16 nt, Human
uguuaauacaagguau

SEQ ID NO: 3692824 - RNA, 18 nt, Human
uguuaauacuaguuguga

SEQ ID NO: 3692825 - RNA, 17 nt, Human
uguuaaucaauuuaaac

SEQ ID NO: 3692826 - RNA, 23 nt, Human
uguuaaucucuguuauguacugu

SEQ ID NO: 3692827 - RNA, 19 nt, Human
uguuaaucuuaauguauau

SEQ ID NO: 3692828 - RNA, 23 nt, Human
uguuaaucuuaggggagagcuuu

SEQ ID NO: 3692829 - RNA, 14 nt, Human
uguuaaugaaaaug

SEQ ID NO: 3692830 - RNA, 20 nt, Human
uguuaauucagcacugauuu

SEQ ID NO: 3692831 - RNA, 17 nt, Human
uguuaauuuagaaaacu

SEQ ID NO: 3692832 - RNA, 18 nt, Human
uguuaauuuagaaaacuu

SEQ ID NO: 3692833 - RNA, 22 nt, Human
uguuaauuuuuugguacaaaaa

SEQ ID NO: 3692834 - RNA, 15 nt, Human
uguuacaaaauguaa

SEQ ID NO: 3692835 - RNA, 18 nt, Human
uguuacaaaauguaacug

SEQ ID NO: 3692836 - RNA, 16 nt, Human
uguuacacaaugguuu

SEQ ID NO: 3692837 - RNA, 23 nt, Human
uguuacagccaagugccaaaugc

SEQ ID NO: 3692838 - RNA, 14 nt, Human
uguuacaguaaugu

SEQ ID NO: 3692839 - RNA, 14 nt, Human
uguuacauagugua

SEQ ID NO: 3692840 - RNA, 12 nt, Human
uguuacauguau

SEQ ID NO: 3692841 - RNA, 18 nt, Human
uguuaccaugucacugug

SEQ ID NO: 3692842 - RNA, 19 nt, Human
uguuaccaugucacugugg

SEQ ID NO: 3692843 - RNA, 14 nt, Human
uguuaccauucaca

SEQ ID NO: 3692844 - RNA, 18 nt, Human
uguuaccauuggaaauuu

SEQ ID NO: 3692845 - RNA, 15 nt, Human
uguuaccugaaaaca

SEQ ID NO: 3692846 - RNA, 12 nt, Human
uguuaccuuaaa

SEQ ID NO: 3692847 - RNA, 17 nt, Human
uguuacuaaagaaaaua

SEQ ID NO: 3692848 - RNA, 13 nt, Human
uguuacuaacuaa

SEQ ID NO: 3692849 - RNA, 14 nt, Human
uguuacuaacuaaa

SEQ ID NO: 3692850 - RNA, 18 nt, Human
uguuacuaacuaaacucu

SEQ ID NO: 3692851 - RNA, 16 nt, Human
uguuacuaucugcuuu

SEQ ID NO: 3692852 - RNA, 22 nt, Human
uguuacucucuugcaccaaauu

SEQ ID NO: 3692853 - RNA, 15 nt, Human
uguuacugaccagca

SEQ ID NO: 3692854 - RNA, 13 nt, Human
uguuacugaucau

SEQ ID NO: 3692855 - RNA, 12 nt, Human
uguuacugccuu

SEQ ID NO: 3692856 - RNA, 15 nt, Human
uguuacugggcccug

SEQ ID NO: 3692857 - RNA, 14 nt, Human
uguuacuguaauuc

SEQ ID NO: 3692858 - RNA, 17 nt, Human
uguuacuguuaaccauu

SEQ ID NO: 3692859 - RNA, 18 nt, Human
uguuacuguuaaccauuu

SEQ ID NO: 3692860 - RNA, 13 nt, Human
uguuacuguucuu

SEQ ID NO: 3692861 - RNA, 14 nt, Human
uguuacuguucuug

SEQ ID NO: 3692862 - RNA, 20 nt, Human
uguuacuguucuugcugcua

SEQ ID NO: 3692863 - RNA, 12 nt, Human
uguuacuuaccu

SEQ ID NO: 3692864 - RNA, 18 nt, Human
uguuacuuaccuaaacag

SEQ ID NO: 3692865 - RNA, 15 nt, Human
uguuacuucucuaau

SEQ ID NO: 3692866 - RNA, 21 nt, Human
uguuagaacacuauuuucaga

SEQ ID NO: 3692867 - RNA, 22 nt, Human
uguuagaacacuauuuucagaa

SEQ ID NO: 3692868 - RNA, 13 nt, Human
uguuagagacuuu

SEQ ID NO: 3692869 - RNA, 21 nt, Human
uguuagagguuuuaaagugau

SEQ ID NO: 3692870 - RNA, 23 nt, Human
uguuagaguccaacguggggcag

SEQ ID NO: 3692871 - RNA, 20 nt, Human
uguuagauauuuuucauaaa

SEQ ID NO: 3692872 - RNA, 23 nt, Human
uguuagauauuuuucauaaacaa

SEQ ID NO: 3692873 - RNA, 12 nt, Human
uguuagauguuu

SEQ ID NO: 3692874 - RNA, 17 nt, Human
uguuagauuaagaaaua

SEQ ID NO: 3692875 - RNA, 14 nt, Human
uguuagcacuguug

SEQ ID NO: 3692876 - RNA, 15 nt, Human
uguuagcacuguuga

SEQ ID NO: 3692877 - RNA, 16 nt, Human
uguuagcacuguugau

SEQ ID NO: 3692878 - RNA, 19 nt, Human
uguuagccuuuuuucccca

SEQ ID NO: 3692879 - RNA, 20 nt, Human
uguuagccuuuuuuccccag

SEQ ID NO: 3692880 - RNA, 18 nt, Human
uguuagcuccucacugug

SEQ ID NO: 3692881 - RNA, 20 nt, Human
uguuagcuuccuuaaguaua

SEQ ID NO: 3692882 - RNA, 20 nt, Human
uguuagcuuuuuaaaacauu

SEQ ID NO: 3692883 - RNA, 14 nt, Human
uguuaggcugggcc

SEQ ID NO: 3692884 - RNA, 17 nt, Human
uguuaguaugaggcauu

SEQ ID NO: 3692885 - RNA, 20 nt, Human
uguuaguaugaggcauuugu

SEQ ID NO: 3692886 - RNA, 14 nt, Human
uguuaguucccaac

SEQ ID NO: 3692887 - RNA, 15 nt, Human
uguuaguucccaaca

SEQ ID NO: 3692888 - RNA, 14 nt, Human
uguuaguuccugua

SEQ ID NO: 3692889 - RNA, 20 nt, Human
uguuaguuccuguaugaaag

SEQ ID NO: 3692890 - RNA, 17 nt, Human
uguuauacaaccuucau

SEQ ID NO: 3692891 - RNA, 21 nt, Human
uguuauacaaccuucauuuaa

SEQ ID NO: 3692892 - RNA, 22 nt, Human
uguuauacaaccuucauuuaaa

SEQ ID NO: 3692893 - RNA, 16 nt, Human
uguuauacaauacaga

SEQ ID NO: 3692894 - RNA, 19 nt, Human
uguuauagguccuuuagaa

SEQ ID NO: 3692895 - RNA, 18 nt, Human
uguuauagguuguuggau

SEQ ID NO: 3692896 - RNA, 13 nt, Human
uguuauauauaaa

SEQ ID NO: 3692897 - RNA, 15 nt, Human
uguuauaugaacaua

SEQ ID NO: 3692898 - RNA, 19 nt, Human
uguuauauuuaaugcauua

SEQ ID NO: 3692899 - RNA, 20 nt, Human
uguuauauuuaaugcauuaa

SEQ ID NO: 3692900 - RNA, 14 nt, Human
uguuauauuuuucu

SEQ ID NO: 3692901 - RNA, 18 nt, Human
uguuauauuuuucuuaaa

SEQ ID NO: 3692902 - RNA, 22 nt, Human
uguuaucaaacaccaacauaaa

SEQ ID NO: 3692903 - RNA, 21 nt, Human
uguuaucagucaauauuuuua

SEQ ID NO: 3692904 - RNA, 18 nt, Human
uguuaucccaaucauugu

SEQ ID NO: 3692905 - RNA, 19 nt, Human
uguuauccuuuuuuaaaag

SEQ ID NO: 3692906 - RNA, 17 nt, Human
uguuaucuguuugagaa

SEQ ID NO: 3692907 - RNA, 16 nt, Human
uguuaucuucucaagu

SEQ ID NO: 3692908 - RNA, 22 nt, Human
uguuaucuucucaaguucuaag

SEQ ID NO: 3692909 - RNA, 23 nt, Human
uguuaucuucucaaguucuaaga

SEQ ID NO: 3692910 - RNA, 17 nt, Human
uguuaugacuauguaaa

SEQ ID NO: 3692911 - RNA, 22 nt, Human
uucagggaauuucaggaacuag

SEQ ID NO: 3692912 - RNA, 18 nt, Human
uucagggcagggcucuga

SEQ ID NO: 3692913 - RNA, 13 nt, Human
uucagggccucca

SEQ ID NO: 3692914 - RNA, 19 nt, Human
uucagggccugguugaaga

SEQ ID NO: 3692915 - RNA, 20 nt, Human
uucagggcuggcuccugauc

SEQ ID NO: 3692916 - RNA, 18 nt, Human
uacaugggacuaugcuuu

SEQ ID NO: 3692917 - RNA, 14 nt, Human
uacauggugcuggg

SEQ ID NO: 3692918 - RNA, 15 nt, Human
uacaugguguuugug

SEQ ID NO: 3692919 - RNA, 17 nt, Human
uacauguauuaaauuac

SEQ ID NO: 3692920 - RNA, 18 nt, Human
uacauguauuaaauuaca

SEQ ID NO: 3692921 - RNA, 12 nt, Human
uacauguauuau

SEQ ID NO: 3692922 - RNA, 15 nt, Human
uacauguauugcaca

SEQ ID NO: 3692923 - RNA, 15 nt, Human
uacaugugauacauu

SEQ ID NO: 3692924 - RNA, 16 nt, Human
uacaugugauacauuu

SEQ ID NO: 3692925 - RNA, 18 nt, Human
uacaugugauacauuuuu

SEQ ID NO: 3692926 - RNA, 19 nt, Human
uacaugugccgaaugugca

SEQ ID NO: 3692927 - RNA, 20 nt, Human
uacaugugccgaaugugcag

SEQ ID NO: 3692928 - RNA, 14 nt, Human
uacaugugguuuau

SEQ ID NO: 3692929 - RNA, 14 nt, Human
uacauguguguaua

SEQ ID NO: 3692930 - RNA, 20 nt, Human
uacauguguguauauguaga

SEQ ID NO: 3692931 - RNA, 14 nt, Human
uacauguuuaugua

SEQ ID NO: 3692932 - RNA, 21 nt, Human
uacauguuuauguaaacaaau

SEQ ID NO: 3692933 - RNA, 13 nt, Human
uacauuaaagcag

SEQ ID NO: 3692934 - RNA, 23 nt, Human
uacauuaauuauuauugcuguug

SEQ ID NO: 3692935 - RNA, 15 nt, Human
uacauuaguaaaugu

SEQ ID NO: 3692936 - RNA, 18 nt, Human
uacauuaguaaaugucuu

SEQ ID NO: 3692937 - RNA, 19 nt, Human
uacauuaguaaaugucuuu

SEQ ID NO: 3692938 - RNA, 22 nt, Human
uacauuaguaaaugucuuugua

SEQ ID NO: 3692939 - RNA, 21 nt, Human
uacauuagucauucaauaaau

SEQ ID NO: 3692940 - RNA, 21 nt, Human
uacauuaucuaacugugcuca

SEQ ID NO: 3692941 - RNA, 14 nt, Human
uacauuauugcuua

SEQ ID NO: 3692942 - RNA, 15 nt, Human
uacauucaaauuugu

SEQ ID NO: 3692943 - RNA, 17 nt, Human
uacauucaaauuugucu

SEQ ID NO: 3692944 - RNA, 14 nt, Human
uacauuccaacucg

SEQ ID NO: 3692945 - RNA, 20 nt, Human
uacauuccuugauaauguug

SEQ ID NO: 3692946 - RNA, 21 nt, Human
uacauucucuaauaagaaaac

SEQ ID NO: 3692947 - RNA, 12 nt, Human
uacauucuguua

SEQ ID NO: 3692948 - RNA, 16 nt, Human
uacauucuucaagauc

SEQ ID NO: 3692949 - RNA, 18 nt, Human
uacauucuuuuugcucua

SEQ ID NO: 3692950 - RNA, 21 nt, Human
uacauucuuuuugcucuaaaa

SEQ ID NO: 3692951 - RNA, 19 nt, Human
uacauuguacgaagaguau

SEQ ID NO: 3692952 - RNA, 15 nt, Human
uacauuguauauaug

SEQ ID NO: 3692953 - RNA, 17 nt, Human
uacauugucauuuauau

SEQ ID NO: 3692954 - RNA, 17 nt, Human
uacauuguuaccucuau

SEQ ID NO: 3692955 - RNA, 19 nt, Human
uacauuguuugucugucuu

SEQ ID NO: 3692956 - RNA, 15 nt, Human
uacauuuaaaacauu

SEQ ID NO: 3692957 - RNA, 20 nt, Human
uacauuuaaaacauuaaaau

SEQ ID NO: 3692958 - RNA, 15 nt, Human
uacauuuaaaacuua

SEQ ID NO: 3692959 - RNA, 17 nt, Human
uacauuuaaaauugcua

SEQ ID NO: 3692960 - RNA, 11 nt, Human
uacauuuaaag

SEQ ID NO: 3692961 - RNA, 14 nt, Human
uacauuuaaagcau

SEQ ID NO: 3692962 - RNA, 19 nt, Human
uacauuuaaagcauugcug

SEQ ID NO: 3692963 - RNA, 14 nt, Human
uacauuuaaauuuu

SEQ ID NO: 3692964 - RNA, 11 nt, Human
uacauuuaaua

SEQ ID NO: 3692965 - RNA, 13 nt, Human
uacauuuaauaca

SEQ ID NO: 3692966 - RNA, 14 nt, Human
uacauuuauaauug

SEQ ID NO: 3692967 - RNA, 19 nt, Human
uacauuuaugauuuaauaa

SEQ ID NO: 3692968 - RNA, 22 nt, Human
uacauuuaugauuuaauaaaau

SEQ ID NO: 3692969 - RNA, 23 nt, Human
uacauuuauuuauccagaaaacu

SEQ ID NO: 3692970 - RNA, 21 nt, Human
uacauuucaccuacuuuguaa

SEQ ID NO: 3692971 - RNA, 22 nt, Human
uacauuuccgccacaucccucu

SEQ ID NO: 3692972 - RNA, 14 nt, Human
uacauuucgauguu

SEQ ID NO: 3692973 - RNA, 16 nt, Human
uacauuucugaaauga

SEQ ID NO: 3692974 - RNA, 17 nt, Human
uacauuuguauaaaaua

SEQ ID NO: 3692975 - RNA, 17 nt, Human
uacauuuguauguugug

SEQ ID NO: 3692976 - RNA, 13 nt, Human
uacauuuuaacau

SEQ ID NO: 3692977 - RNA, 14 nt, Human
uacauuuuaacaug

SEQ ID NO: 3692978 - RNA, 22 nt, Human
uacauuuuacacacuguacaca

SEQ ID NO: 3692979 - RNA, 14 nt, Human
uacauuuuauauua

SEQ ID NO: 3692980 - RNA, 23 nt, Human
uacauuuuauuaagcuuuuugga

SEQ ID NO: 3692981 - RNA, 20 nt, Human
uacauuuucuaagaaacauu

SEQ ID NO: 3692982 - RNA, 16 nt, Human
uacauuuuguaccaac

SEQ ID NO: 3692983 - RNA, 16 nt, Human
uacauuuuguuguaaa

SEQ ID NO: 3692984 - RNA, 21 nt, Human
uacauuuuguuguaaaaagaa

SEQ ID NO: 3692985 - RNA, 14 nt, Human
uacauuuuuacaau

SEQ ID NO: 3692986 - RNA, 16 nt, Human
uacauuuuuauuuaug

SEQ ID NO: 3692987 - RNA, 22 nt, Human
uacauuuuuauuuaugaaguuu

SEQ ID NO: 3692988 - RNA, 16 nt, Human
uacauuuuucaacuuu

SEQ ID NO: 3692989 - RNA, 17 nt, Human
uacauuuuucaacuuug

SEQ ID NO: 3692990 - RNA, 15 nt, Human
uaccaaaaauuuugu

SEQ ID NO: 3692991 - RNA, 18 nt, Human
uaccaaaauguccaccaa

SEQ ID NO: 3692992 - RNA, 23 nt, Human
uaccaaaauuuuaaaaaagggag

SEQ ID NO: 3692993 - RNA, 17 nt, Human
uaccaaagaugaaugaa

SEQ ID NO: 3692994 - RNA, 20 nt, Human
uaccaaaugcuuuaaaaacu

SEQ ID NO: 3692995 - RNA, 19 nt, Human
uaccaaauuaaaaaaaaau

SEQ ID NO: 3692996 - RNA, 12 nt, Human
uaccaaccuguu

SEQ ID NO: 3692997 - RNA, 14 nt, Human
uaccaacuuuacug

SEQ ID NO: 3692998 - RNA, 13 nt, Human
uaccaacuuucaa

SEQ ID NO: 3692999 - RNA, 14 nt, Human
uaccaacuuucaag

SEQ ID NO: 3693000 - RNA, 16 nt, Human
uaccaaguuucaggua

SEQ ID NO: 3693001 - RNA, 17 nt, Human
uaccaauaaagugaccc

SEQ ID NO: 3693002 - RNA, 13 nt, Human
uaccaauauuuaa

SEQ ID NO: 3693003 - RNA, 21 nt, Human
uaccaauauuuaaucuuuuau

SEQ ID NO: 3693004 - RNA, 20 nt, Human
uaccaaucauuuuaauuauu

SEQ ID NO: 3693005 - RNA, 14 nt, Human
uaccaaugcaugca

SEQ ID NO: 3693006 - RNA, 14 nt, Human
uaccaaugccaaga

SEQ ID NO: 3693007 - RNA, 21 nt, Human
uaccaaugcucuuuucacagc

SEQ ID NO: 3693008 - RNA, 17 nt, Human
uaccacacaucuaugau

SEQ ID NO: 3693009 - RNA, 13 nt, Human
uaccacagacaua

SEQ ID NO: 3693010 - RNA, 23 nt, Human
uaccacaggaaccacaagacugc

SEQ ID NO: 3693011 - RNA, 18 nt, Human
uaccaccagucugacugu

SEQ ID NO: 3693012 - RNA, 15 nt, Human
uaccacccaaugcug

SEQ ID NO: 3693013 - RNA, 18 nt, Human
uaccaccccuuccugucc

SEQ ID NO: 3693014 - RNA, 19 nt, Human
uaccaccccuuccuguccc

SEQ ID NO: 3693015 - RNA, 19 nt, Human
uaccacuaacuccugagaa

SEQ ID NO: 3693016 - RNA, 16 nt, Human
uaccacucacaugaca

SEQ ID NO: 3693017 - RNA, 20 nt, Human
uaccacucgugcaucccuga

SEQ ID NO: 3693018 - RNA, 18 nt, Human
uaccacucuguaauugca

SEQ ID NO: 3693019 - RNA, 19 nt, Human
uaccacucuguaauugcaa

SEQ ID NO: 3693020 - RNA, 11 nt, Human
uaccacugaau

SEQ ID NO: 3693021 - RNA, 15 nt, Human
uaccacugaaucugu

SEQ ID NO: 3693022 - RNA, 20 nt, Human
uaccacugcugauauuuucu

SEQ ID NO: 3693023 - RNA, 21 nt, Human
uaccacugcugauauuuucuc

SEQ ID NO: 3693024 - RNA, 15 nt, Human
uaccacuuuugcaaa

SEQ ID NO: 3693025 - RNA, 21 nt, Human
uaccagacgguucaccagccu

SEQ ID NO: 3693026 - RNA, 21 nt, Human
uaccagacugcagguuggacc

SEQ ID NO: 3693027 - RNA, 23 nt, Human
uaccagacugcagguuggacccc

SEQ ID NO: 3693028 - RNA, 15 nt, Human
uaccagacuguguau

SEQ ID NO: 3693029 - RNA, 19 nt, Human
uaccagagguugugcacug

SEQ ID NO: 3693030 - RNA, 15 nt, Human
uaccagauaacuuuu

SEQ ID NO: 3693031 - RNA, 13 nt, Human
uaccagcagagca

SEQ ID NO: 3693032 - RNA, 14 nt, Human
uaccagcagagcac

SEQ ID NO: 3693033 - RNA, 18 nt, Human
uaccagccaguaaauggg

SEQ ID NO: 3693034 - RNA, 22 nt, Human
uaccagcccuggggcugggccc

SEQ ID NO: 3693035 - RNA, 15 nt, Human
uaccagcgaggaggc

SEQ ID NO: 3693036 - RNA, 22 nt, Human
uaccagcuacuccggaggcuga

SEQ ID NO: 3693037 - RNA, 16 nt, Human
uaccagcuuuuaacca

SEQ ID NO: 3693038 - RNA, 16 nt, Human
uaccaggaacuauaaa

SEQ ID NO: 3693039 - RNA, 16 nt, Human
uaccaggucuccucca

SEQ ID NO: 3693040 - RNA, 14 nt, Human
uaccagguguucua

SEQ ID NO: 3693041 - RNA, 15 nt, Human
uaccagguugaaaga

SEQ ID NO: 3693042 - RNA, 19 nt, Human
uaccaguaaaguguaacau

SEQ ID NO: 3693043 - RNA, 12 nt, Human
uaccaguauuua

SEQ ID NO: 3693044 - RNA, 18 nt, Human
uaccagugaaccaaagag

SEQ ID NO: 3693045 - RNA, 21 nt, Human
uaccagugaauuuuugcaaua

SEQ ID NO: 3693046 - RNA, 19 nt, Human
uaccaguugccuuuuaucc

SEQ ID NO: 3693047 - RNA, 16 nt, Human
uaccauacucauuucu

SEQ ID NO: 3693048 - RNA, 16 nt, Human
uaccauauacagcuca

SEQ ID NO: 3693049 - RNA, 14 nt, Human
uaccauaugaucug

SEQ ID NO: 3693050 - RNA, 17 nt, Human
uaccauccccuguagag

SEQ ID NO: 3693051 - RNA, 15 nt, Human
uaccaugaaacaaag

SEQ ID NO: 3693052 - RNA, 20 nt, Human
uaccaugagaagagggccug

SEQ ID NO: 3693053 - RNA, 22 nt, Human
uaccaugagaagagggccugug

SEQ ID NO: 3693054 - RNA, 15 nt, Human
uaccauguaauggca

SEQ ID NO: 3693055 - RNA, 16 nt, Human
uaccaugugccugauc

SEQ ID NO: 3693056 - RNA, 18 nt, Human
uaccauuauuuuuaggau

SEQ ID NO: 3693057 - RNA, 17 nt, Human
uaccauucacaauaaaa

SEQ ID NO: 3693058 - RNA, 15 nt, Human
uaccauucagaucac

SEQ ID NO: 3693059 - RNA, 14 nt, Human
uaccauucagugau

SEQ ID NO: 3693060 - RNA, 16 nt, Human
uaccauugcuguucua

SEQ ID NO: 3693061 - RNA, 15 nt, Human
uaccauuggaaauuu

SEQ ID NO: 3693062 - RNA, 19 nt, Human
uaccauuggaaauuucacg

SEQ ID NO: 3693063 - RNA, 21 nt, Human
uaccauuuauacaaauuagaa

SEQ ID NO: 3693064 - RNA, 12 nt, Human
uaccauuucaga

SEQ ID NO: 3693065 - RNA, 16 nt, Human
uaccauuucagagagg

SEQ ID NO: 3693066 - RNA, 15 nt, Human
uaccauuugccuccc

SEQ ID NO: 3693067 - RNA, 16 nt, Human
uguuuaucagauacau

SEQ ID NO: 3693068 - RNA, 18 nt, Human
uguuuaucagauacauca

SEQ ID NO: 3693069 - RNA, 19 nt, Human
uguuuaucagauacaucac

SEQ ID NO: 3693070 - RNA, 22 nt, Human
uguuuaucagauacaucacugc

SEQ ID NO: 3693071 - RNA, 23 nt, Human
uguuuaucagauacaucacugcu

SEQ ID NO: 3693072 - RNA, 14 nt, Human
uguuuaucagcagu

SEQ ID NO: 3693073 - RNA, 21 nt, Human
uguuuauccuuucauauaguu

SEQ ID NO: 3693074 - RNA, 22 nt, Human
uguuuaucuagauguaaauuuu

SEQ ID NO: 3693075 - RNA, 14 nt, Human
uguuuaugaaaaua

SEQ ID NO: 3693076 - RNA, 18 nt, Human
uguuuaugaaaauaaaua

SEQ ID NO: 3693077 - RNA, 17 nt, Human
uguuuauggccacauuu

SEQ ID NO: 3693078 - RNA, 13 nt, Human
uguuuauggccuc

SEQ ID NO: 3693079 - RNA, 14 nt, Human
uguuuauggccuca

SEQ ID NO: 3693080 - RNA, 15 nt, Human
uguuuauggccucag

SEQ ID NO: 3693081 - RNA, 16 nt, Human
uguuuaugguaaaaaa

SEQ ID NO: 3693082 - RNA, 11 nt, Human
uguuuauguaa

SEQ ID NO: 3693083 - RNA, 15 nt, Human
uguuuauguaauuuc

SEQ ID NO: 3693084 - RNA, 17 nt, Human
uguuuaugugcuauuaa

SEQ ID NO: 3693085 - RNA, 22 nt, Human
uguuuauguuguuuauaauaaa

SEQ ID NO: 3693086 - RNA, 16 nt, Human
uguuuauuaaaugcuu

SEQ ID NO: 3693087 - RNA, 16 nt, Human
uguuuauuaacaaauu

SEQ ID NO: 3693088 - RNA, 18 nt, Human
uguuuauuacaguauaau

SEQ ID NO: 3693089 - RNA, 18 nt, Human
uguuuauuacuuccauga

SEQ ID NO: 3693090 - RNA, 19 nt, Human
uguuuauuaguuuugcaua

SEQ ID NO: 3693091 - RNA, 13 nt, Human
uguuuauucuuga

SEQ ID NO: 3693092 - RNA, 14 nt, Human
uguuuauucuugau

SEQ ID NO: 3693093 - RNA, 14 nt, Human
uguuuauuuacaag

SEQ ID NO: 3693094 - RNA, 22 nt, Human
uguuuauuuauaagcagauuua

SEQ ID NO: 3693095 - RNA, 14 nt, Human
uguuuauuuauaga

SEQ ID NO: 3693096 - RNA, 13 nt, Human
uguuuauuucagg

SEQ ID NO: 3693097 - RNA, 16 nt, Human
uguuuauuucauuuua

SEQ ID NO: 3693098 - RNA, 22 nt, Human
uguuuauuuucuacguuucuuu

SEQ ID NO: 3693099 - RNA, 21 nt, Human
uguuucaaacauauauaacaa

SEQ ID NO: 3693100 - RNA, 22 nt, Human
uguuucaaacauauauaacaau

SEQ ID NO: 3693101 - RNA, 14 nt, Human
uguuucaaacaugc

SEQ ID NO: 3693102 - RNA, 15 nt, Human
uguuucaaacuguaa

SEQ ID NO: 3693103 - RNA, 13 nt, Human
uguuucaaaguuc

SEQ ID NO: 3693104 - RNA, 10 nt, Human
uguuucaaga

SEQ ID NO: 3693105 - RNA, 16 nt, Human
uguuucaagaaccugg

SEQ ID NO: 3693106 - RNA, 19 nt, Human
uguuucaagaggagccccc

SEQ ID NO: 3693107 - RNA, 22 nt, Human
uguuucaagaggagcccccacc

SEQ ID NO: 3693108 - RNA, 14 nt, Human
uguuucaaucacug

SEQ ID NO: 3693109 - RNA, 20 nt, Human
uguuucacaguuugaaauaa

SEQ ID NO: 3693110 - RNA, 21 nt, Human
uguuucagaggcucagauugu

SEQ ID NO: 3693111 - RNA, 17 nt, Human
uguuucagcuaagggaa

SEQ ID NO: 3693112 - RNA, 19 nt, Human
uguuucagcuaagggaaga

SEQ ID NO: 3693113 - RNA, 23 nt, Human
uguuucagcuaagggaagacauu

SEQ ID NO: 3693114 - RNA, 21 nt, Human
uguuucagugaauaugccugu

SEQ ID NO: 3693115 - RNA, 20 nt, Human
uguuucauauugaugugugu

SEQ ID NO: 3693116 - RNA, 14 nt, Human
uguuucaucuaagu

SEQ ID NO: 3693117 - RNA, 13 nt, Human
uguuucauguuuu

SEQ ID NO: 3693118 - RNA, 14 nt, Human
uguuucauguuuug

SEQ ID NO: 3693119 - RNA, 21 nt, Human
uguuuccagcagaagacaaaa

SEQ ID NO: 3693120 - RNA, 14 nt, Human
uguuuccagcauuc

SEQ ID NO: 3693121 - RNA, 15 nt, Human
uguuuccagcauucc

SEQ ID NO: 3693122 - RNA, 18 nt, Human
uguuuccagcauucccag

SEQ ID NO: 3693123 - RNA, 23 nt, Human
uguuuccuagcacacacuuuugg

SEQ ID NO: 3693124 - RNA, 14 nt, Human
uguuuccucuguuc

SEQ ID NO: 3693125 - RNA, 15 nt, Human
uguuuccucuuccaa

SEQ ID NO: 3693126 - RNA, 11 nt, Human
uguuuccugag

SEQ ID NO: 3693127 - RNA, 21 nt, Human
uguuuccuggcacugcuucca

SEQ ID NO: 3693128 - RNA, 22 nt, Human
uguuuccuggcacugcuuccag

SEQ ID NO: 3693129 - RNA, 16 nt, Human
uguuuccuucauuucu

SEQ ID NO: 3693130 - RNA, 18 nt, Human
uguuuccuuuuucagaua

SEQ ID NO: 3693131 - RNA, 20 nt, Human
uguuucgugaaguauacugu

SEQ ID NO: 3693132 - RNA, 15 nt, Human
uguuucuagggaaau

SEQ ID NO: 3693133 - RNA, 16 nt, Human
uguuucuauacaaaua

SEQ ID NO: 3693134 - RNA, 16 nt, Human
uguuucuaucugauuu

SEQ ID NO: 3693135 - RNA, 22 nt, Human
uguuucuauuuuuugaaaagca

SEQ ID NO: 3693136 - RNA, 15 nt, Human
uguuucucaaaucuu

SEQ ID NO: 3693137 - RNA, 23 nt, Human
uguuucucccccugggcucugcc

SEQ ID NO: 3693138 - RNA, 15 nt, Human
uguuucucccgugcu

SEQ ID NO: 3693139 - RNA, 16 nt, Human
uguuucucccgugcuu

SEQ ID NO: 3693140 - RNA, 13 nt, Human
uguuucucugaaa

SEQ ID NO: 3693141 - RNA, 13 nt, Human
uguuucucugcug

SEQ ID NO: 3693142 - RNA, 14 nt, Human
uguuucucugcugu

SEQ ID NO: 3693143 - RNA, 19 nt, Human
uguuucugaaaagaaauaa

SEQ ID NO: 3693144 - RNA, 14 nt, Human
uguuucugaaaauu

SEQ ID NO: 3693145 - RNA, 22 nt, Human
uguuucugcaguagucucugug

SEQ ID NO: 3693146 - RNA, 16 nt, Human
uguuucuguaagaaac

SEQ ID NO: 3693147 - RNA, 18 nt, Human
uguuucuguccuguaacu

SEQ ID NO: 3693148 - RNA, 15 nt, Human
uguuucuguuauuaa

SEQ ID NO: 3693149 - RNA, 19 nt, Human
uguuucuuccaaagcacau

SEQ ID NO: 3693150 - RNA, 17 nt, Human
uguuucuuccuguuaau

SEQ ID NO: 3693151 - RNA, 12 nt, Human
uguuucuugccu

SEQ ID NO: 3693152 - RNA, 15 nt, Human
uguuucuugccucau

SEQ ID NO: 3693153 - RNA, 15 nt, Human
uguuucuugcuugua

SEQ ID NO: 3693154 - RNA, 13 nt, Human
uguuucuuucuag

SEQ ID NO: 3693155 - RNA, 20 nt, Human
uguuucuuucucugaggaca

SEQ ID NO: 3693156 - RNA, 12 nt, Human
uguuucuuugaa

SEQ ID NO: 3693157 - RNA, 19 nt, Human
uguuucuuugaauuuucau

SEQ ID NO: 3693158 - RNA, 23 nt, Human
uguuucuuugaauuuucauuuua

SEQ ID NO: 3693159 - RNA, 15 nt, Human
uguuucuuugaucau

SEQ ID NO: 3693160 - RNA, 19 nt, Human
uguuucuuuguaaugaaaa

SEQ ID NO: 3693161 - RNA, 15 nt, Human
uguuucuuuucacau

SEQ ID NO: 3693162 - RNA, 18 nt, Human
uguuucuuuuguuuggua

SEQ ID NO: 3693163 - RNA, 22 nt, Human
uguuugaaaauauuaucuuugu

SEQ ID NO: 3693164 - RNA, 17 nt, Human
uguuugaagccugcccu

SEQ ID NO: 3693165 - RNA, 19 nt, Human
uguuugaauauggacaaga

SEQ ID NO: 3693166 - RNA, 22 nt, Human
uguuugacaaagaaacccaagu

SEQ ID NO: 3693167 - RNA, 14 nt, Human
uguuugacaccucu

SEQ ID NO: 3693168 - RNA, 14 nt, Human
uguuugagaaauua

SEQ ID NO: 3693169 - RNA, 14 nt, Human
uguuugagcucaga

SEQ ID NO: 3693170 - RNA, 18 nt, Human
uguuugagcucugcagcc

SEQ ID NO: 3693171 - RNA, 13 nt, Human
uguuugaugcauu

SEQ ID NO: 3693172 - RNA, 18 nt, Human
uguuugcaccuuucuagu

SEQ ID NO: 3693173 - RNA, 22 nt, Human
uguuugcaccuuucuaguugaa

SEQ ID NO: 3693174 - RNA, 22 nt, Human
uguuugcacguuaugguguuuc

SEQ ID NO: 3693175 - RNA, 23 nt, Human
uguuugcacguuaugguguuucu

SEQ ID NO: 3693176 - RNA, 12 nt, Human
uguuugcccaaa

SEQ ID NO: 3693177 - RNA, 19 nt, Human
uguuugcuaagcauuccaa

SEQ ID NO: 3693178 - RNA, 17 nt, Human
uguuugcuaucuuaauu

SEQ ID NO: 3693179 - RNA, 20 nt, Human
uguuugcugaacauuggaga

SEQ ID NO: 3693180 - RNA, 16 nt, Human
uguuugcuuauuguuc

SEQ ID NO: 3693181 - RNA, 16 nt, Human
uguuugcuucaccgug

SEQ ID NO: 3693182 - RNA, 22 nt, Human
uguuugcuucaugugucccaga

SEQ ID NO: 3693183 - RNA, 13 nt, Human
uguuugcuuucug

SEQ ID NO: 3693184 - RNA, 18 nt, Human
uguuuggaauauugucca

SEQ ID NO: 3693185 - RNA, 19 nt, Human
uguuuggagacauuccugg

SEQ ID NO: 3693186 - RNA, 15 nt, Human
uguuuggaggagcaa

SEQ ID NO: 3693187 - RNA, 17 nt, Human
uguuuggauguaauuua

SEQ ID NO: 3693188 - RNA, 16 nt, Human
uguuuggcauguaaau

SEQ ID NO: 3693189 - RNA, 13 nt, Human
uguuuggcuuuca

SEQ ID NO: 3693190 - RNA, 14 nt, Human
uguuuggcuuucag

SEQ ID NO: 3693191 - RNA, 17 nt, Human
uguuugggaugaccagg

SEQ ID NO: 3693192 - RNA, 23 nt, Human
uguuuggggcaggaguagcugag

SEQ ID NO: 3693193 - RNA, 19 nt, Human
uguuugggggacguuucuc

SEQ ID NO: 3693194 - RNA, 15 nt, Human
uguuuggguauccug

SEQ ID NO: 3693195 - RNA, 22 nt, Human
uguuuggugcauagaacugggu

SEQ ID NO: 3693196 - RNA, 18 nt, Human
uguuuggugcucauuuaa

SEQ ID NO: 3693197 - RNA, 18 nt, Human
uguuugguuauagugcaa

SEQ ID NO: 3693198 - RNA, 16 nt, Human
uguuugguucuggggc

SEQ ID NO: 3693199 - RNA, 16 nt, Human
uguuugguuuacauuu

SEQ ID NO: 3693200 - RNA, 22 nt, Human
uguuugguuuuaaaauacugua

SEQ ID NO: 3693201 - RNA, 13 nt, Human
uguuuguaaauaa

SEQ ID NO: 3693202 - RNA, 15 nt, Human
uguuuguaaauaaga

SEQ ID NO: 3693203 - RNA, 21 nt, Human
uguuuguaaauaagagauuug

SEQ ID NO: 3693204 - RNA, 15 nt, Human
uguuugucucuccuu

SEQ ID NO: 3693205 - RNA, 17 nt, Human
uguuugucucuccuuuu

SEQ ID NO: 3693206 - RNA, 15 nt, Human
uguuugugcuucuaa

SEQ ID NO: 3693207 - RNA, 19 nt, Human
uguuugugcuucuaauauu

SEQ ID NO: 3693208 - RNA, 12 nt, Human
uguuuguggccu

SEQ ID NO: 3693209 - RNA, 13 nt, Human
uguuuguggccuc

SEQ ID NO: 3693210 - RNA, 13 nt, Human
uguuugugugugu

SEQ ID NO: 3693211 - RNA, 17 nt, Human
uguuuguuaaaacuggc

SEQ ID NO: 3693212 - RNA, 21 nt, Human
uguuuguuaaaacuggcaucu

SEQ ID NO: 3693213 - RNA, 14 nt, Human
uguuuguucuguuu

SEQ ID NO: 3693214 - RNA, 16 nt, Human
uguuuguucuuguuuu

SEQ ID NO: 3693215 - RNA, 16 nt, Human
uguuuguugcuggcuu

SEQ ID NO: 3693216 - RNA, 11 nt, Human
uguuuguuggu

SEQ ID NO: 3693217 - RNA, 21 nt, Human
uguuuguuuagucuugucuca

SEQ ID NO: 3693218 - RNA, 22 nt, Human
uucaggggcugcccgcucccag

SEQ ID NO: 3693219 - RNA, 13 nt, Human
uucagggggccag

SEQ ID NO: 3693220 - RNA, 22 nt, Human
uucagggggccaggugcacaga

SEQ ID NO: 3693221 - RNA, 22 nt, Human
uucagggggguugugaggccug

SEQ ID NO: 3693222 - RNA, 14 nt, Human
uucaggguaaauag

SEQ ID NO: 3693223 - RNA, 13 nt, Human
uucagggucauag

SEQ ID NO: 3693224 - RNA, 15 nt, Human
uucagggugaugcca

SEQ ID NO: 3693225 - RNA, 16 nt, Human
uucaggguuggccccu

SEQ ID NO: 3693226 - RNA, 17 nt, Human
uucaggguuggccccug

SEQ ID NO: 3693227 - RNA, 21 nt, Human
uucaggguuuucugagggaaa

SEQ ID NO: 3693228 - RNA, 16 nt, Human
uucagguauguugccu

SEQ ID NO: 3693229 - RNA, 13 nt, Human
uucaggugacaug

SEQ ID NO: 3693230 - RNA, 18 nt, Human
uucaggugacaugugaaa

SEQ ID NO: 3693231 - RNA, 22 nt, Human
uucaggugacaugugaaaccuu

SEQ ID NO: 3693232 - RNA, 17 nt, Human
uucaggugcagaggaag

SEQ ID NO: 3693233 - RNA, 20 nt, Human
uucagguguuuaguugcaga

SEQ ID NO: 3693234 - RNA, 15 nt, Human
uucagguuuuguaaa

SEQ ID NO: 3693235 - RNA, 14 nt, Human
uucaguaauaacuc

SEQ ID NO: 3693236 - RNA, 22 nt, Human
uucaguacccucucagcuccag

SEQ ID NO: 3693237 - RNA, 15 nt, Human
uucaguacuucagca

SEQ ID NO: 3693238 - RNA, 14 nt, Human
uucaguacuuuuuu

SEQ ID NO: 3693239 - RNA, 16 nt, Human
uucaguauaauuuaac

SEQ ID NO: 3693240 - RNA, 17 nt, Human
uucaguauuuuggagaa

SEQ ID NO: 3693241 - RNA, 18 nt, Human
uucaguauuuuggagaaa

SEQ ID NO: 3693242 - RNA, 19 nt, Human
uucaguauuuuggagaaau

SEQ ID NO: 3693243 - RNA, 20 nt, Human
uucaguauuuuggagaaauu

SEQ ID NO: 3693244 - RNA, 13 nt, Human
uucagucauuaaa

SEQ ID NO: 3693245 - RNA, 15 nt, Human
uucagucauuaaauu

SEQ ID NO: 3693246 - RNA, 16 nt, Human
uucaguccugcuccag

SEQ ID NO: 3693247 - RNA, 22 nt, Human
uucaguccugggagacccaugu

SEQ ID NO: 3693248 - RNA, 20 nt, Human
uucagucugaaugcugccac

SEQ ID NO: 3693249 - RNA, 14 nt, Human
uucagucuugccuu

SEQ ID NO: 3693250 - RNA, 13 nt, Human
uucagucuuuucc

SEQ ID NO: 3693251 - RNA, 16 nt, Human
uucagugaaagcauca

SEQ ID NO: 3693252 - RNA, 18 nt, Human
uucagugccuuauggaac

SEQ ID NO: 3693253 - RNA, 19 nt, Human
uucagugcuguggccuggg

SEQ ID NO: 3693254 - RNA, 24 nt, Human
uucaguggcacgucaucuaguuuu

SEQ ID NO: 3693255 - RNA, 15 nt, Human
uucaguggcagcugc

SEQ ID NO: 3693256 - RNA, 16 nt, Human
uucaguggcagcugcu

SEQ ID NO: 3693257 - RNA, 17 nt, Human
uucagugguuccuucug

SEQ ID NO: 3693258 - RNA, 12 nt, Human
uucaguguaauu

SEQ ID NO: 3693259 - RNA, 21 nt, Human
uucaguguaauuucuuugccu

SEQ ID NO: 3693260 - RNA, 12 nt, Human
uucaguguacau

SEQ ID NO: 3693261 - RNA, 18 nt, Human
uucaguguuaccugugug

SEQ ID NO: 3693262 - RNA, 16 nt, Human
uucaguucaaagucau

SEQ ID NO: 3693263 - RNA, 15 nt, Human
uucaguucccagaau

SEQ ID NO: 3693264 - RNA, 19 nt, Human
uucaguucccagaaucaaa

SEQ ID NO: 3693265 - RNA, 21 nt, Human
uucaguuccgucagaaagugu

SEQ ID NO: 3693266 - RNA, 23 nt, Human
uucaguuccucuuugcauggaau

SEQ ID NO: 3693267 - RNA, 20 nt, Human
uucaguucuuuggauucuaa

SEQ ID NO: 3693268 - RNA, 18 nt, Human
uucaguugguugugucuu

SEQ ID NO: 3693269 - RNA, 22 nt, Human
uucaguuuauuugaaccaauaa

SEQ ID NO: 3693270 - RNA, 19 nt, Human
uucaguuucaauucagugc

SEQ ID NO: 3693271 - RNA, 19 nt, Human
uucaguuucuaaaauugag

SEQ ID NO: 3693272 - RNA, 11 nt, Human
uucauaaacaa

SEQ ID NO: 3693273 - RNA, 15 nt, Human
uucauaaacaaguuc

SEQ ID NO: 3693274 - RNA, 16 nt, Human
uucauaaaguacuuga

SEQ ID NO: 3693275 - RNA, 20 nt, Human
uucauaaauaaaguuuguug

SEQ ID NO: 3693276 - RNA, 17 nt, Human
uucauaacagugccauu

SEQ ID NO: 3693277 - RNA, 21 nt, Human
uucauaacagugccauugucu

SEQ ID NO: 3693278 - RNA, 18 nt, Human
uucauaacuuauugcuga

SEQ ID NO: 3693279 - RNA, 14 nt, Human
uucauaacuuucau

SEQ ID NO: 3693280 - RNA, 12 nt, Human
uucauaaguauu

SEQ ID NO: 3693281 - RNA, 20 nt, Human
uucauaaguauuaugucucu

SEQ ID NO: 3693282 - RNA, 14 nt, Human
uucauacaaagcau

SEQ ID NO: 3693283 - RNA, 18 nt, Human
uucauacacagccugggc

SEQ ID NO: 3693284 - RNA, 19 nt, Human
uucauaccuaaguacugua

SEQ ID NO: 3693285 - RNA, 20 nt, Human
uucauaccuaaguacuguaa

SEQ ID NO: 3693286 - RNA, 16 nt, Human
uucauaccuacaugua

SEQ ID NO: 3693287 - RNA, 15 nt, Human
uucauaccucagaau

SEQ ID NO: 3693288 - RNA, 22 nt, Human
uucauacuguaacauucaggaa

SEQ ID NO: 3693289 - RNA, 11 nt, Human
uucauagagaa

SEQ ID NO: 3693290 - RNA, 19 nt, Human
uucauagagauuugucuaa

SEQ ID NO: 3693291 - RNA, 20 nt, Human
uucauagagauuugucuaau

SEQ ID NO: 3693292 - RNA, 13 nt, Human
uucauagauugug

SEQ ID NO: 3693293 - RNA, 13 nt, Human
uucauagcccagu

SEQ ID NO: 3693294 - RNA, 22 nt, Human
uucauagcugguuccugcuaga

SEQ ID NO: 3693295 - RNA, 18 nt, Human
uucauagcuguacuucuu

SEQ ID NO: 3693296 - RNA, 19 nt, Human
uucauagggucucuucagg

SEQ ID NO: 3693297 - RNA, 14 nt, Human
uucauaggucacug

SEQ ID NO: 3693298 - RNA, 19 nt, Human
uucauaggucacuggcucu

SEQ ID NO: 3693299 - RNA, 15 nt, Human
uucauaggucugaaa

SEQ ID NO: 3693300 - RNA, 19 nt, Human
uucauaguauccauauuuu

SEQ ID NO: 3693301 - RNA, 17 nt, Human
uucauaguucagaauuu

SEQ ID NO: 3693302 - RNA, 20 nt, Human
uucauaguucagaauuuagu

SEQ ID NO: 3693303 - RNA, 23 nt, Human
uucauaugacauucaugccuggc

SEQ ID NO: 3693304 - RNA, 12 nt, Human
uucauaugcaua

SEQ ID NO: 3693305 - RNA, 16 nt, Human
uucauauguugcucag

SEQ ID NO: 3693306 - RNA, 16 nt, Human
uucauauuaagaauga

SEQ ID NO: 3693307 - RNA, 13 nt, Human
uucauauuacaau

SEQ ID NO: 3693308 - RNA, 22 nt, Human
uucauauucuucauauccuucu

SEQ ID NO: 3693309 - RNA, 14 nt, Human
uucauauucuuuua

SEQ ID NO: 3693310 - RNA, 18 nt, Human
uucauauugcugagagaa

SEQ ID NO: 3693311 - RNA, 14 nt, Human
uucauauugugcca

SEQ ID NO: 3693312 - RNA, 20 nt, Human
uucauauuguggcacaagca

SEQ ID NO: 3693313 - RNA, 19 nt, Human
uucauauuuaauauaugug

SEQ ID NO: 3693314 - RNA, 16 nt, Human
uucauauuuacuucuu

SEQ ID NO: 3693315 - RNA, 20 nt, Human
uucauauuuguacuuucugu

SEQ ID NO: 3693316 - RNA, 17 nt, Human
uucauauuuuaauuuca

SEQ ID NO: 3693317 - RNA, 18 nt, Human
uucauauuuuaauuucaa

SEQ ID NO: 3693318 - RNA, 20 nt, Human
uucauauuuuaauuucaagc

SEQ ID NO: 3693319 - RNA, 22 nt, Human
uucauauuuuaauuucaagcuu

SEQ ID NO: 3693320 - RNA, 17 nt, Human
uucauauuuuucaaaau

SEQ ID NO: 3693321 - RNA, 16 nt, Human
uucaucaaucauugua

SEQ ID NO: 3693322 - RNA, 22 nt, Human
uucaucagaacagcuguugacu

SEQ ID NO: 3693323 - RNA, 15 nt, Human
uucaucauccagaug

SEQ ID NO: 3693324 - RNA, 15 nt, Human
uucaucauuguuucu

SEQ ID NO: 3693325 - RNA, 14 nt, Human
uucaucauuuuuua

SEQ ID NO: 3693326 - RNA, 15 nt, Human
uucauccacuagugc

SEQ ID NO: 3693327 - RNA, 15 nt, Human
uucauccauaacuga

SEQ ID NO: 3693328 - RNA, 13 nt, Human
uucaucccagccc

SEQ ID NO: 3693329 - RNA, 18 nt, Human
uucaucccaugauguagu

SEQ ID NO: 3693330 - RNA, 17 nt, Human
uucaucccucuggggcu

SEQ ID NO: 3693331 - RNA, 18 nt, Human
uucauccggcagccugga

SEQ ID NO: 3693332 - RNA, 16 nt, Human
uucauccuauuguuga

SEQ ID NO: 3693333 - RNA, 11 nt, Human
uucauccuggc

SEQ ID NO: 3693334 - RNA, 17 nt, Human
uucauccuucccacucu

SEQ ID NO: 3693335 - RNA, 20 nt, Human
uucauccuuucacuucuuuc

SEQ ID NO: 3693336 - RNA, 20 nt, Human
uucaucgaaucuacuaauuc

SEQ ID NO: 3693337 - RNA, 23 nt, Human
uucaucgaaucuacuaauuccac

SEQ ID NO: 3693338 - RNA, 22 nt, Human
uucaucucccaccuagcagcac

SEQ ID NO: 3693339 - RNA, 14 nt, Human
uucaucucucagaa

SEQ ID NO: 3693340 - RNA, 17 nt, Human
uucaucucucagaaggg

SEQ ID NO: 3693341 - RNA, 21 nt, Human
uucaucucucagaagggaggc

SEQ ID NO: 3693342 - RNA, 16 nt, Human
uucaucugcucuccuu

SEQ ID NO: 3693343 - RNA, 19 nt, Human
uucaucugcucuccuuccu

SEQ ID NO: 3693344 - RNA, 23 nt, Human
uucaucuggaaccaucagaaaca

SEQ ID NO: 3693345 - RNA, 19 nt, Human
uucaucuggcaacaucuuu

SEQ ID NO: 3693346 - RNA, 13 nt, Human
uucaucugggaaa

SEQ ID NO: 3693347 - RNA, 18 nt, Human
uucaucugggaaagacau

SEQ ID NO: 3693348 - RNA, 18 nt, Human
uucaucuguaacucuaaa

SEQ ID NO: 3693349 - RNA, 21 nt, Human
uucaucuguaacucuaaaaga

SEQ ID NO: 3693350 - RNA, 16 nt, Human
uucaucugucuauauu

SEQ ID NO: 3693351 - RNA, 19 nt, Human
uucaucuucaguugucucu

SEQ ID NO: 3693352 - RNA, 22 nt, Human
uucaucuuuugaggcuucuguu

SEQ ID NO: 3693353 - RNA, 16 nt, Human
uucaucuuuuguauag

SEQ ID NO: 3693354 - RNA, 22 nt, Human
uucaugaaaauagcucuuucag

SEQ ID NO: 3693355 - RNA, 17 nt, Human
uucaugaaagauucaau

SEQ ID NO: 3693356 - RNA, 22 nt, Human
uucaugaaaugcuaugucauuu

SEQ ID NO: 3693357 - RNA, 16 nt, Human
uucaugaccaguaaag

SEQ ID NO: 3693358 - RNA, 23 nt, Human
uucaugacuuuuccauguaucua

SEQ ID NO: 3693359 - RNA, 18 nt, Human
uucaugauaaugaacaga

SEQ ID NO: 3693360 - RNA, 14 nt, Human
uucaugaugcaguc

SEQ ID NO: 3693361 - RNA, 17 nt, Human
uucaugaugcagucucc

SEQ ID NO: 3693362 - RNA, 15 nt, Human
uucaugauuuugaaa

SEQ ID NO: 3693363 - RNA, 17 nt, Human
uucaugauuuugaaauc

SEQ ID NO: 3693364 - RNA, 14 nt, Human
uucaugcauggaaa

SEQ ID NO: 3693365 - RNA, 15 nt, Human
uucaugcauggaaau

SEQ ID NO: 3693366 - RNA, 16 nt, Human
uucaugccuggcuucg

SEQ ID NO: 3693367 - RNA, 17 nt, Human
uucaugccuuuguaagu

SEQ ID NO: 3693368 - RNA, 18 nt, Human
uucaugcuaucucugugu

SEQ ID NO: 3693369 - RNA, 14 nt, Human
uucaugcucagccc

SEQ ID NO: 3693370 - RNA, 14 nt, Human
uucaugcucugcaa

SEQ ID NO: 3693371 - RNA, 14 nt, Human
uucaugcuuuauca

SEQ ID NO: 3693372 - RNA, 19 nt, Human
uucauggaacgcguugaaa

SEQ ID NO: 3693373 - RNA, 20 nt, Human
uucauggacacuuugaaaug

SEQ ID NO: 3693374 - RNA, 16 nt, Human
uucauggaccacuguu

SEQ ID NO: 3693375 - RNA, 20 nt, Human
uucauggaccacuguuucuu

SEQ ID NO: 3693376 - RNA, 22 nt, Human
uucauggcugcuguugcuuaaa

SEQ ID NO: 3693377 - RNA, 17 nt, Human
uucauguaaacugugca

SEQ ID NO: 3693378 - RNA, 20 nt, Human
uucauguaaagugucagaag

SEQ ID NO: 3693379 - RNA, 14 nt, Human
uucauguaaauaaa

SEQ ID NO: 3693380 - RNA, 17 nt, Human
uucauguacaagaugaa

SEQ ID NO: 3693381 - RNA, 21 nt, Human
uucauguacaagaugaaggag

SEQ ID NO: 3693382 - RNA, 20 nt, Human
uucauguccugugucaguuu

SEQ ID NO: 3693383 - RNA, 21 nt, Human
uucauguccugugucaguuua

SEQ ID NO: 3693384 - RNA, 14 nt, Human
uucauguggcugua

SEQ ID NO: 3693385 - RNA, 17 nt, Human
uucauguucccacuuca

SEQ ID NO: 3693386 - RNA, 13 nt, Human
uucauguuucuua

SEQ ID NO: 3693387 - RNA, 17 nt, Human
uucauguuuuaacaaaa

SEQ ID NO: 3693388 - RNA, 16 nt, Human
uucauguuuugugacu

SEQ ID NO: 3693389 - RNA, 17 nt, Human
uucauguuuugugacua

SEQ ID NO: 3693390 - RNA, 18 nt, Human
uucauguuuugugacuau

SEQ ID NO: 3693391 - RNA, 12 nt, Human
uucauuaaauaa

SEQ ID NO: 3693392 - RNA, 16 nt, Human
uucauuaacaaaaugu

SEQ ID NO: 3693393 - RNA, 19 nt, Human
uucauuaagcccucuucca

SEQ ID NO: 3693394 - RNA, 16 nt, Human
uucauuaauucuauaa

SEQ ID NO: 3693395 - RNA, 21 nt, Human
uucauuagcaaaaaaaguugu

SEQ ID NO: 3693396 - RNA, 17 nt, Human
uucauuauguaaaaugu

SEQ ID NO: 3693397 - RNA, 15 nt, Human
uucauuauucucugc

SEQ ID NO: 3693398 - RNA, 20 nt, Human
uucauuauuggaauuaaccu

SEQ ID NO: 3693399 - RNA, 16 nt, Human
uucauuauuugucaaa

SEQ ID NO: 3693400 - RNA, 15 nt, Human
uucauucaauauuga

SEQ ID NO: 3693401 - RNA, 16 nt, Human
uucauucaauauugac

SEQ ID NO: 3693402 - RNA, 17 nt, Human
uucauucacuucucuua

SEQ ID NO: 3693403 - RNA, 16 nt, Human
uucauucauacuuaaa

SEQ ID NO: 3693404 - RNA, 13 nt, Human
uucauucauauua

SEQ ID NO: 3693405 - RNA, 14 nt, Human
uucauuccuccagg

SEQ ID NO: 3693406 - RNA, 21 nt, Human
uucauuccuucagauuuggcu

SEQ ID NO: 3693407 - RNA, 12 nt, Human
uucauucucaua

SEQ ID NO: 3693408 - RNA, 12 nt, Human
uucauucuccuu

SEQ ID NO: 3693409 - RNA, 15 nt, Human
uucauucuccuuguu

SEQ ID NO: 3693410 - RNA, 14 nt, Human
uucauucucuuuua

SEQ ID NO: 3693411 - RNA, 13 nt, Human
uucauucugcaag

SEQ ID NO: 3693412 - RNA, 15 nt, Human
uucauucugcagggu

SEQ ID NO: 3693413 - RNA, 16 nt, Human
uucauucuucagauau

SEQ ID NO: 3693414 - RNA, 16 nt, Human
uucauucuucucuagc

SEQ ID NO: 3693415 - RNA, 17 nt, Human
uucauugagaguuuugu

SEQ ID NO: 3693416 - RNA, 19 nt, Human
uucauugagaguuuugucu

SEQ ID NO: 3693417 - RNA, 19 nt, Human
uucauugcacuuugauuag

SEQ ID NO: 3693418 - RNA, 16 nt, Human
uucauugccagugucu

SEQ ID NO: 3693419 - RNA, 19 nt, Human
uucauugccagugucuuuc

SEQ ID NO: 3693420 - RNA, 21 nt, Human
uucauugccuuaacuggagcc

SEQ ID NO: 3693421 - RNA, 13 nt, Human
uucauugcuguga

SEQ ID NO: 3693422 - RNA, 13 nt, Human
uucauugggcugu

SEQ ID NO: 3693423 - RNA, 19 nt, Human
uucauugguacugccuuaa

SEQ ID NO: 3693424 - RNA, 16 nt, Human
uucauugguuaauuuu

SEQ ID NO: 3693425 - RNA, 16 nt, Human
uucauuguaugaugug

SEQ ID NO: 3693426 - RNA, 12 nt, Human
uucauugugguu

SEQ ID NO: 3693427 - RNA, 19 nt, Human
uucauugugguuauuuuua

SEQ ID NO: 3693428 - RNA, 21 nt, Human
uucauugugguuauuuuuaua

SEQ ID NO: 3693429 - RNA, 15 nt, Human
uucauuuaaaaugau

SEQ ID NO: 3693430 - RNA, 15 nt, Human
uucauuuaagggaaa

SEQ ID NO: 3693431 - RNA, 16 nt, Human
uucauuuacuguggcu

SEQ ID NO: 3693432 - RNA, 22 nt, Human
uucauuuagagcuagucuuuca

SEQ ID NO: 3693433 - RNA, 21 nt, Human
uucauuuagcuaaacggauuc

SEQ ID NO: 3693434 - RNA, 18 nt, Human
uucauuuagugaguuauu

SEQ ID NO: 3693435 - RNA, 13 nt, Human
uucauuucaucua

SEQ ID NO: 3693436 - RNA, 13 nt, Human
uucauuucauugu

SEQ ID NO: 3693437 - RNA, 15 nt, Human
uucauuucauuguau

SEQ ID NO: 3693438 - RNA, 13 nt, Human
uucauuuccacuc

SEQ ID NO: 3693439 - RNA, 13 nt, Human
uucauuuccucaa

SEQ ID NO: 3693440 - RNA, 13 nt, Human
uucauuucugaua

SEQ ID NO: 3693441 - RNA, 12 nt, Human
uucauuugcuuu

SEQ ID NO: 3693442 - RNA, 22 nt, Human
uucauuugguucauuaauucua

SEQ ID NO: 3693443 - RNA, 18 nt, Human
uucauuuguaugucaaag

SEQ ID NO: 3693444 - RNA, 15 nt, Human
uucauuugugucaau

SEQ ID NO: 3693445 - RNA, 18 nt, Human
uucauuuuaacaucugag

SEQ ID NO: 3693446 - RNA, 11 nt, Human
uucauuuucca

SEQ ID NO: 3693447 - RNA, 19 nt, Human
uucauuuugagcugaaaug

SEQ ID NO: 3693448 - RNA, 22 nt, Human
uucauuuugcacugaggauauu

SEQ ID NO: 3693449 - RNA, 17 nt, Human
uucauuuugcuuuaauu

SEQ ID NO: 3693450 - RNA, 14 nt, Human
uucauuuuuaaaug

SEQ ID NO: 3693451 - RNA, 16 nt, Human
uucauuuuuaaaugug

SEQ ID NO: 3693452 - RNA, 17 nt, Human
uucauuuuuaaucauga

SEQ ID NO: 3693453 - RNA, 18 nt, Human
uucauuuuuaaucaugaa

SEQ ID NO: 3693454 - RNA, 13 nt, Human
uucauuuuuccua

SEQ ID NO: 3693455 - RNA, 23 nt, Human
uucauuuuuuucacuggaguuac

SEQ ID NO: 3693456 - RNA, 17 nt, Human
uucauuuuuuuccaggc

SEQ ID NO: 3693457 - RNA, 18 nt, Human
uucauuuuuuuuaauuga

SEQ ID NO: 3693458 - RNA, 14 nt, Human
uuccaaaacaaaaa

SEQ ID NO: 3693459 - RNA, 22 nt, Human
uuccaaaaguggccucuuuguc

SEQ ID NO: 3693460 - RNA, 18 nt, Human
uuccaaaaucucccauuu

SEQ ID NO: 3693461 - RNA, 19 nt, Human
uuccaaaaucucccauuuu

SEQ ID NO: 3693462 - RNA, 13 nt, Human
uuccaaaauucuu

SEQ ID NO: 3693463 - RNA, 16 nt, Human
uuccaaaauucuuauu

SEQ ID NO: 3693464 - RNA, 15 nt, Human
uuccaaaccuuaucu

SEQ ID NO: 3693465 - RNA, 20 nt, Human
uuccaaaccuuaucuccaca

SEQ ID NO: 3693466 - RNA, 13 nt, Human
uuccaaagaaugu

SEQ ID NO: 3693467 - RNA, 20 nt, Human
uuccaaagaauguuagagca

SEQ ID NO: 3693468 - RNA, 22 nt, Human
uuccaaagaguagaauugcauu

SEQ ID NO: 3693469 - RNA, 11 nt, Human
uuccaaagcaa

SEQ ID NO: 3693470 - RNA, 12 nt, Human
uuccaaagcaaa

SEQ ID NO: 3693471 - RNA, 20 nt, Human
uuccaaagcacauugaaaga

SEQ ID NO: 3693472 - RNA, 14 nt, Human
uuccaaaguuaaca

SEQ ID NO: 3693473 - RNA, 20 nt, Human
uuccaaauaaaauguucccu

SEQ ID NO: 3693474 - RNA, 16 nt, Human
uuccaaauaaauaauu

SEQ ID NO: 3693475 - RNA, 17 nt, Human
uuccaaaugcaauuuga

SEQ ID NO: 3693476 - RNA, 16 nt, Human
uuccaaauuauuucuu

SEQ ID NO: 3693477 - RNA, 18 nt, Human
uuccaaauuauuucuuaa

SEQ ID NO: 3693478 - RNA, 13 nt, Human
uuccaaauucaug

SEQ ID NO: 3693479 - RNA, 20 nt, Human
uuccaacaagaagggacuga

SEQ ID NO: 3693480 - RNA, 21 nt, Human
uuccaacaccacagacacaca

SEQ ID NO: 3693481 - RNA, 22 nt, Human
uuccaacaccacagacacacac

SEQ ID NO: 3693482 - RNA, 19 nt, Human
uuccaaccauuuaucuuga

SEQ ID NO: 3693483 - RNA, 20 nt, Human
uuccaaccauuuaucuugaa

SEQ ID NO: 3693484 - RNA, 18 nt, Human
uuccaacuacuaauagaa

SEQ ID NO: 3693485 - RNA, 22 nt, Human
uuccaacugcugccccaaagga

SEQ ID NO: 3693486 - RNA, 14 nt, Human
uuccaagacauugu

SEQ ID NO: 3693487 - RNA, 16 nt, Human
uuccaagacauuguca

SEQ ID NO: 3693488 - RNA, 17 nt, Human
uuccaagacauugucaa

SEQ ID NO: 3693489 - RNA, 20 nt, Human
uuccaagacauugucaauaa

SEQ ID NO: 3693490 - RNA, 21 nt, Human
uuccaagacucuagaguccaa

SEQ ID NO: 3693491 - RNA, 13 nt, Human
uuccaagagccug

SEQ ID NO: 3693492 - RNA, 12 nt, Human
uuccaagagcug

SEQ ID NO: 3693493 - RNA, 12 nt, Human
uuccaagagucu

SEQ ID NO: 3693494 - RNA, 15 nt, Human
uuccaagagucuaaa

SEQ ID NO: 3693495 - RNA, 19 nt, Human
uuccaagcaaauguuacau

SEQ ID NO: 3693496 - RNA, 13 nt, Human
uuccaaggagcug

SEQ ID NO: 3693497 - RNA, 22 nt, Human
uuccaaggagcugagaauagaa

SEQ ID NO: 3693498 - RNA, 23 nt, Human
uuccaaggagcugagaauagaag

SEQ ID NO: 3693499 - RNA, 13 nt, Human
uuccaaggcuucu

SEQ ID NO: 3693500 - RNA, 17 nt, Human
uuccaaggguacuaagg

SEQ ID NO: 3693501 - RNA, 20 nt, Human
uuccaagguggucugcucgg

SEQ ID NO: 3693502 - RNA, 22 nt, Human
uuccaaguagaauugauuuccc

SEQ ID NO: 3693503 - RNA, 14 nt, Human
uuccaagugugcau

SEQ ID NO: 3693504 - RNA, 20 nt, Human
uuccaagugugcauauugua

SEQ ID NO: 3693505 - RNA, 16 nt, Human
uuccaaguugcuaaua

SEQ ID NO: 3693506 - RNA, 21 nt, Human
uuccaauaaaccagguuuaga

SEQ ID NO: 3693507 - RNA, 13 nt, Human
uuccaauauguga

SEQ ID NO: 3693508 - RNA, 15 nt, Human
uuccaauauuucugc

SEQ ID NO: 3693509 - RNA, 15 nt, Human
uuccaauccuggcuc

SEQ ID NO: 3693510 - RNA, 13 nt, Human
uuccaauguuuca

SEQ ID NO: 3693511 - RNA, 22 nt, Human
uuccacaagugccgcaaauugu

SEQ ID NO: 3693512 - RNA, 23 nt, Human
uuccacaaguuaaauaaaucaua

SEQ ID NO: 3693513 - RNA, 13 nt, Human
uuccacaccccca

SEQ ID NO: 3693514 - RNA, 17 nt, Human
uuccacacccccacccc

SEQ ID NO: 3693515 - RNA, 21 nt, Human
uuccacaccuggcacugcugu

SEQ ID NO: 3693516 - RNA, 14 nt, Human
uuccacagaggaca

SEQ ID NO: 3693517 - RNA, 18 nt, Human
uuccacagauuguuucua

SEQ ID NO: 3693518 - RNA, 17 nt, Human
uuccacaggucucagaa

SEQ ID NO: 3693519 - RNA, 13 nt, Human
uguuuguuuauua

SEQ ID NO: 3693520 - RNA, 15 nt, Human
uguuuguuucaagaa

SEQ ID NO: 3693521 - RNA, 13 nt, Human
uguuuguuugucu

SEQ ID NO: 3693522 - RNA, 20 nt, Human
uguuuuaaaaagaaacaaga

SEQ ID NO: 3693523 - RNA, 22 nt, Human
uguuuuaaacauuaauagcagc

SEQ ID NO: 3693524 - RNA, 19 nt, Human
uguuuuaaagaauaugacu

SEQ ID NO: 3693525 - RNA, 19 nt, Human
uguuuuaaauauagaauuu

SEQ ID NO: 3693526 - RNA, 14 nt, Human
uguuuuaaauguac

SEQ ID NO: 3693527 - RNA, 15 nt, Human
uguuuuaaauguaca

SEQ ID NO: 3693528 - RNA, 12 nt, Human
uguuuuaaauuc

SEQ ID NO: 3693529 - RNA, 19 nt, Human
uguuuuaacaagaagcaau

SEQ ID NO: 3693530 - RNA, 17 nt, Human
uguuuuaagaggcaggg

SEQ ID NO: 3693531 - RNA, 18 nt, Human
uguuuuaaggaugcuugu

SEQ ID NO: 3693532 - RNA, 15 nt, Human
uguuuuaaucugaaa

SEQ ID NO: 3693533 - RNA, 18 nt, Human
uguuuuaaucugaaauuc

SEQ ID NO: 3693534 - RNA, 20 nt, Human
uguuuuacaaguuggaguca

SEQ ID NO: 3693535 - RNA, 19 nt, Human
uguuuuacgucugggagaa

SEQ ID NO: 3693536 - RNA, 15 nt, Human
uguuuuacugugaaa

SEQ ID NO: 3693537 - RNA, 23 nt, Human
uguuuuagacaaauacucaugug

SEQ ID NO: 3693538 - RNA, 17 nt, Human
uguuuuaguuaaauuuc

SEQ ID NO: 3693539 - RNA, 20 nt, Human
uguuuuauaauuuugugaag

SEQ ID NO: 3693540 - RNA, 13 nt, Human
uguuuuaucuggu

SEQ ID NO: 3693541 - RNA, 16 nt, Human
uguuuuaucuucuaua

SEQ ID NO: 3693542 - RNA, 18 nt, Human
uguuuuaugacuucauua

SEQ ID NO: 3693543 - RNA, 15 nt, Human
uguuuuaugagaaag

SEQ ID NO: 3693544 - RNA, 20 nt, Human
uguuuuauggccuaaauuua

SEQ ID NO: 3693545 - RNA, 13 nt, Human
uguuuucaaaugg

SEQ ID NO: 3693546 - RNA, 13 nt, Human
uguuuucaaaugu

SEQ ID NO: 3693547 - RNA, 22 nt, Human
uguuuucaaucucguauagaag

SEQ ID NO: 3693548 - RNA, 20 nt, Human
uguuuuccaugaguccccug

SEQ ID NO: 3693549 - RNA, 16 nt, Human
uguuuucccacgagga

SEQ ID NO: 3693550 - RNA, 22 nt, Human
uguuuuccucccuucugcuacu

SEQ ID NO: 3693551 - RNA, 21 nt, Human
uguuuucuaguguaucaaaau

SEQ ID NO: 3693552 - RNA, 12 nt, Human
uguuuucucuga

SEQ ID NO: 3693553 - RNA, 17 nt, Human
uguuuucugaauaacau

SEQ ID NO: 3693554 - RNA, 13 nt, Human
uguuuucugugua

SEQ ID NO: 3693555 - RNA, 14 nt, Human
uguuuucuugauuu

SEQ ID NO: 3693556 - RNA, 22 nt, Human
uguuuucuuucuuuaaauguuu

SEQ ID NO: 3693557 - RNA, 17 nt, Human
uguuuugaaacucagua

SEQ ID NO: 3693558 - RNA, 19 nt, Human
uguuuugaaucucauaauu

SEQ ID NO: 3693559 - RNA, 22 nt, Human
uguuuugaaugguguuguaugc

SEQ ID NO: 3693560 - RNA, 19 nt, Human
uguuuugagcuuuccaugu

SEQ ID NO: 3693561 - RNA, 20 nt, Human
uguuuugauaaaguaguaaa

SEQ ID NO: 3693562 - RNA, 14 nt, Human
uguuuugcacuuuu

SEQ ID NO: 3693563 - RNA, 17 nt, Human
uguuuugccaauuugca

SEQ ID NO: 3693564 - RNA, 21 nt, Human
uguuuugccaauuugcacauu

SEQ ID NO: 3693565 - RNA, 23 nt, Human
uguuuugccaauuugcacauuaa

SEQ ID NO: 3693566 - RNA, 17 nt, Human
uguuuugcucaauagau

SEQ ID NO: 3693567 - RNA, 19 nt, Human
uguuuugcuuuugcucgau

SEQ ID NO: 3693568 - RNA, 16 nt, Human
uguuuugcuuuuucug

SEQ ID NO: 3693569 - RNA, 20 nt, Human
uguuuugcuuuuucugacuc

SEQ ID NO: 3693570 - RNA, 19 nt, Human
uguuuuggacuccaucucu

SEQ ID NO: 3693571 - RNA, 23 nt, Human
uguuuuggcugaaauucuccugg

SEQ ID NO: 3693572 - RNA, 19 nt, Human
uguuuugguagauuaaaua

SEQ ID NO: 3693573 - RNA, 16 nt, Human
uguuuugguaucuguu

SEQ ID NO: 3693574 - RNA, 17 nt, Human
uguuuuguaaacauuua

SEQ ID NO: 3693575 - RNA, 18 nt, Human
uguuuuguaaacauuuau

SEQ ID NO: 3693576 - RNA, 15 nt, Human
uguuuuguaaacuuu

SEQ ID NO: 3693577 - RNA, 19 nt, Human
uguuuuguaaacuuugaaa

SEQ ID NO: 3693578 - RNA, 19 nt, Human
uguuuuguaaaguccccag

SEQ ID NO: 3693579 - RNA, 18 nt, Human
uguuuuguacauagauuu

SEQ ID NO: 3693580 - RNA, 12 nt, Human
uguuuuguacca

SEQ ID NO: 3693581 - RNA, 13 nt, Human
uguuuuguauaca

SEQ ID NO: 3693582 - RNA, 16 nt, Human
uguuuuguauacaaau

SEQ ID NO: 3693583 - RNA, 17 nt, Human
uguuuuguauacaaaua

SEQ ID NO: 3693584 - RNA, 14 nt, Human
uguuuuguguuguu

SEQ ID NO: 3693585 - RNA, 12 nt, Human
uguuuuguuaau

SEQ ID NO: 3693586 - RNA, 22 nt, Human
uguuuuguucaccauuauaaug

SEQ ID NO: 3693587 - RNA, 13 nt, Human
uguuuuguugaca

SEQ ID NO: 3693588 - RNA, 14 nt, Human
uguuuuguugacau

SEQ ID NO: 3693589 - RNA, 15 nt, Human
uguuuuguugacauu

SEQ ID NO: 3693590 - RNA, 20 nt, Human
uguuuuguugacauucugaa

SEQ ID NO: 3693591 - RNA, 21 nt, Human
uguuuuguugacauucugaau

SEQ ID NO: 3693592 - RNA, 14 nt, Human
uguuuuguugcacu

SEQ ID NO: 3693593 - RNA, 20 nt, Human
uguuuuguugguuuuuaaag

SEQ ID NO: 3693594 - RNA, 13 nt, Human
uguuuuguuucug

SEQ ID NO: 3693595 - RNA, 17 nt, Human
uguuuuguuuggagaca

SEQ ID NO: 3693596 - RNA, 23 nt, Human
uguuuuguuugucucuccuuuuc

SEQ ID NO: 3693597 - RNA, 20 nt, Human
uguuuuuaaaaaucauaaac

SEQ ID NO: 3693598 - RNA, 15 nt, Human
uguuuuuaaaaucuu

SEQ ID NO: 3693599 - RNA, 21 nt, Human
uguuuuuaaaaucuuauuaaa

SEQ ID NO: 3693600 - RNA, 19 nt, Human
uguuuuuaaacuguacagu

SEQ ID NO: 3693601 - RNA, 12 nt, Human
uguuuuuaacuc

SEQ ID NO: 3693602 - RNA, 12 nt, Human
uguuuuuaagau

SEQ ID NO: 3693603 - RNA, 14 nt, Human
uguuuuuaagcugu

SEQ ID NO: 3693604 - RNA, 16 nt, Human
uguuuuuaaguuugca

SEQ ID NO: 3693605 - RNA, 13 nt, Human
uguuuuuacccau

SEQ ID NO: 3693606 - RNA, 17 nt, Human
uguuuuuagacaccuuc

SEQ ID NO: 3693607 - RNA, 15 nt, Human
uguuuuuauaaaaau

SEQ ID NO: 3693608 - RNA, 15 nt, Human
uguuuuuauuauuaa

SEQ ID NO: 3693609 - RNA, 17 nt, Human
uguuuuucaguucaaag

SEQ ID NO: 3693610 - RNA, 19 nt, Human
uguuuuucaguucaaaguc

SEQ ID NO: 3693611 - RNA, 14 nt, Human
uguuuuucaugaaa

SEQ ID NO: 3693612 - RNA, 14 nt, Human
uguuuuucauucau

SEQ ID NO: 3693613 - RNA, 20 nt, Human
uguuuuuccuuguauuuaaa

SEQ ID NO: 3693614 - RNA, 15 nt, Human
uguuuuucuauuaaa

SEQ ID NO: 3693615 - RNA, 16 nt, Human
uguuuuucuauuaaaa

SEQ ID NO: 3693616 - RNA, 17 nt, Human
uguuuuucuauuaaaag

SEQ ID NO: 3693617 - RNA, 18 nt, Human
uguuuuucuauuaaaaga

SEQ ID NO: 3693618 - RNA, 19 nt, Human
uguuuuucuauuaaaagac

SEQ ID NO: 3693619 - RNA, 11 nt, Human
uguuuuucuca

SEQ ID NO: 3693620 - RNA, 18 nt, Human
uguuuuucugcuuuagac

SEQ ID NO: 3693621 - RNA, 12 nt, Human
uguuuuucuggg

SEQ ID NO: 3693622 - RNA, 18 nt, Human
uguuuuugaggcuuucug

SEQ ID NO: 3693623 - RNA, 17 nt, Human
uguuuuugggaugucuu

SEQ ID NO: 3693624 - RNA, 18 nt, Human
uguuuuugggaugucuua

SEQ ID NO: 3693625 - RNA, 16 nt, Human
uguuuuuguaaagaaa

SEQ ID NO: 3693626 - RNA, 17 nt, Human
uguuuuuguaaagaaaa

SEQ ID NO: 3693627 - RNA, 15 nt, Human
uguuuuuguaaagug

SEQ ID NO: 3693628 - RNA, 12 nt, Human
uguuuuuguaua

SEQ ID NO: 3693629 - RNA, 14 nt, Human
uguuuuuguauauu

SEQ ID NO: 3693630 - RNA, 19 nt, Human
uguuuuuguauuuuuaaug

SEQ ID NO: 3693631 - RNA, 13 nt, Human
uguuuuugucuua

SEQ ID NO: 3693632 - RNA, 18 nt, Human
uguuuuuguuuuguugca

SEQ ID NO: 3693633 - RNA, 20 nt, Human
uguuuuuuaagauaguguaa

SEQ ID NO: 3693634 - RNA, 14 nt, Human
uguuuuuucaaaau

SEQ ID NO: 3693635 - RNA, 16 nt, Human
uguuuuuucaaaauag

SEQ ID NO: 3693636 - RNA, 23 nt, Human
uguuuuuucaaaauagaaaaguu

SEQ ID NO: 3693637 - RNA, 17 nt, Human
uguuuuuuccugagcuu

SEQ ID NO: 3693638 - RNA, 15 nt, Human
uguuuuuucugccac

SEQ ID NO: 3693639 - RNA, 9 nt, Human
uguuuuuug

SEQ ID NO: 3693640 - RNA, 19 nt, Human
uguuuuuugaaaacauggu

SEQ ID NO: 3693641 - RNA, 17 nt, Human
uguuuuuugagucuuuu

SEQ ID NO: 3693642 - RNA, 15 nt, Human
uguuuuuugccacag

SEQ ID NO: 3693643 - RNA, 18 nt, Human
uguuuuuugccacagcuu

SEQ ID NO: 3693644 - RNA, 14 nt, Human
uguuuuuuggucuu

SEQ ID NO: 3693645 - RNA, 22 nt, Human
uguuuuuuucuuuuuuuauaaa

SEQ ID NO: 3693646 - RNA, 16 nt, Human
uguuuuuuuguuauua

SEQ ID NO: 3693647 - RNA, 17 nt, Human
uguuuuuuuucagccac

SEQ ID NO: 3693648 - RNA, 18 nt, Human
uuaaaaaaaaagaucugu

SEQ ID NO: 3693649 - RNA, 14 nt, Human
uuaaaaaaaacaaa

SEQ ID NO: 3693650 - RNA, 15 nt, Human
uuaaaaaaaacaaaa

SEQ ID NO: 3693651 - RNA, 18 nt, Human
uuaaaaaaaacaaaaaga

SEQ ID NO: 3693652 - RNA, 23 nt, Human
uuaaaaaaaacaaaaagaacaaa

SEQ ID NO: 3693653 - RNA, 19 nt, Human
uuaaaaaaaauuugcucau

SEQ ID NO: 3693654 - RNA, 14 nt, Human
uuaaaaaaagaaaa

SEQ ID NO: 3693655 - RNA, 17 nt, Human
uuaaaaaaauaaaacau

SEQ ID NO: 3693656 - RNA, 23 nt, Human
uuaaaaaaaucacaaaaauuuga

SEQ ID NO: 3693657 - RNA, 14 nt, Human
uuaaaaaaaugaca

SEQ ID NO: 3693658 - RNA, 15 nt, Human
uuaaaaaagaaacau

SEQ ID NO: 3693659 - RNA, 19 nt, Human
uuaaaaaagaaacauuugg

SEQ ID NO: 3693660 - RNA, 21 nt, Human
uuaaaaaagauaaacacaaga

SEQ ID NO: 3693661 - RNA, 19 nt, Human
uuaaaaaagcuuaaaacuu

SEQ ID NO: 3693662 - RNA, 14 nt, Human
uuaaaaaauaaaua

SEQ ID NO: 3693663 - RNA, 15 nt, Human
uuaaaaaauauuuau

SEQ ID NO: 3693664 - RNA, 20 nt, Human
uuaaaaaauauuuucucugu

SEQ ID NO: 3693665 - RNA, 16 nt, Human
uuaaaaaaucuuaaug

SEQ ID NO: 3693666 - RNA, 16 nt, Human
uuaaaaaaugaaaucc

SEQ ID NO: 3693667 - RNA, 16 nt, Human
uuaaaaaauggaacau

SEQ ID NO: 3693668 - RNA, 13 nt, Human
uuaaaaaaugucc

SEQ ID NO: 3693669 - RNA, 16 nt, Human
uuaaaaaauuuuugaa

SEQ ID NO: 3693670 - RNA, 14 nt, Human
uaccauuuguaaua

SEQ ID NO: 3693671 - RNA, 17 nt, Human
uaccauuuguaauaaag

SEQ ID NO: 3693672 - RNA, 22 nt, Human
uaccauuuguaauaaaguauau

SEQ ID NO: 3693673 - RNA, 18 nt, Human
uaccauuuuaaaguuagu

SEQ ID NO: 3693674 - RNA, 16 nt, Human
uaccauuuucugguuc

SEQ ID NO: 3693675 - RNA, 17 nt, Human
uacccaaaagagaaaaa

SEQ ID NO: 3693676 - RNA, 20 nt, Human
uacccaaacccuagguuccc

SEQ ID NO: 3693677 - RNA, 11 nt, Human
uacccaaagga

SEQ ID NO: 3693678 - RNA, 17 nt, Human
uacccaaauccucucca

SEQ ID NO: 3693679 - RNA, 13 nt, Human
uacccaaccacuc

SEQ ID NO: 3693680 - RNA, 13 nt, Human
uacccaauuuccc

SEQ ID NO: 3693681 - RNA, 19 nt, Human
uacccacaccucugccaga

SEQ ID NO: 3693682 - RNA, 15 nt, Human
uacccacccccaccc

SEQ ID NO: 3693683 - RNA, 15 nt, Human
uacccaccuagaaca

SEQ ID NO: 3693684 - RNA, 22 nt, Human
uacccaccuagaacacuaacuc

SEQ ID NO: 3693685 - RNA, 11 nt, Human
uacccaccuga

SEQ ID NO: 3693686 - RNA, 14 nt, Human
uacccaccugagcu

SEQ ID NO: 3693687 - RNA, 15 nt, Human
uacccaccugagcuu

SEQ ID NO: 3693688 - RNA, 18 nt, Human
uacccaccugagcuuugg

SEQ ID NO: 3693689 - RNA, 20 nt, Human
uacccacguucucacaccca

SEQ ID NO: 3693690 - RNA, 21 nt, Human
uacccacguucucacacccac

SEQ ID NO: 3693691 - RNA, 17 nt, Human
uacccacucggucccag

SEQ ID NO: 3693692 - RNA, 11 nt, Human
uacccacugcu

SEQ ID NO: 3693693 - RNA, 12 nt, Human
uacccacugcuc

SEQ ID NO: 3693694 - RNA, 13 nt, Human
uacccacugcucu

SEQ ID NO: 3693695 - RNA, 15 nt, Human
uacccacugcucugg

SEQ ID NO: 3693696 - RNA, 21 nt, Human
uacccacuucuaaauagcaau

SEQ ID NO: 3693697 - RNA, 18 nt, Human
uacccagagaagccccuu

SEQ ID NO: 3693698 - RNA, 19 nt, Human
uacccagagaagccccuuc

SEQ ID NO: 3693699 - RNA, 21 nt, Human
uacccagagaagccccuuccc

SEQ ID NO: 3693700 - RNA, 16 nt, Human
uacccagagaguccug

SEQ ID NO: 3693701 - RNA, 13 nt, Human
uacccagagcauu

SEQ ID NO: 3693702 - RNA, 17 nt, Human
uacccagccaucugccc

SEQ ID NO: 3693703 - RNA, 15 nt, Human
uacccagcccaucuu

SEQ ID NO: 3693704 - RNA, 16 nt, Human
uacccagcgagcccug

SEQ ID NO: 3693705 - RNA, 16 nt, Human
uacccagcuaaauaau

SEQ ID NO: 3693706 - RNA, 21 nt, Human
uacccagcuaaauaaucuuac

SEQ ID NO: 3693707 - RNA, 21 nt, Human
uacccaggaccaagccacagc

SEQ ID NO: 3693708 - RNA, 18 nt, Human
uacccaggguggagugca

SEQ ID NO: 3693709 - RNA, 15 nt, Human
uacccaggugggucc

SEQ ID NO: 3693710 - RNA, 22 nt, Human
uacccaguaacucaucugucac

SEQ ID NO: 3693711 - RNA, 22 nt, Human
uacccaguuucuaaacuggaga

SEQ ID NO: 3693712 - RNA, 23 nt, Human
uacccauacacccccucuucuga

SEQ ID NO: 3693713 - RNA, 15 nt, Human
uacccauagacauga

SEQ ID NO: 3693714 - RNA, 15 nt, Human
uacccauauccccuc

SEQ ID NO: 3693715 - RNA, 22 nt, Human
uacccauccccgcagugugcac

SEQ ID NO: 3693716 - RNA, 21 nt, Human
uacccaucgguguccauuuau

SEQ ID NO: 3693717 - RNA, 21 nt, Human
uacccaucuaguacuugaaaa

SEQ ID NO: 3693718 - RNA, 19 nt, Human
uacccaugucuacacagau

SEQ ID NO: 3693719 - RNA, 17 nt, Human
uaccccaauuccuugua

SEQ ID NO: 3693720 - RNA, 12 nt, Human
uaccccacccuc

SEQ ID NO: 3693721 - RNA, 13 nt, Human
uaccccaucccug

SEQ ID NO: 3693722 - RNA, 16 nt, Human
uaccccauggaccaug

SEQ ID NO: 3693723 - RNA, 16 nt, Human
uacccccaaccucauu

SEQ ID NO: 3693724 - RNA, 17 nt, Human
uaccccccaaccccuga

SEQ ID NO: 3693725 - RNA, 17 nt, Human
uacccccgcccaggcug

SEQ ID NO: 3693726 - RNA, 13 nt, Human
uacccccuccuuc

SEQ ID NO: 3693727 - RNA, 16 nt, Human
uacccccuccuucaga

SEQ ID NO: 3693728 - RNA, 17 nt, Human
uacccccuccuucagac

SEQ ID NO: 3693729 - RNA, 15 nt, Human
uacccccugugccuu

SEQ ID NO: 3693730 - RNA, 10 nt, Human
uaccccuccc

SEQ ID NO: 3693731 - RNA, 19 nt, Human
uaccccucccagcugacag

SEQ ID NO: 3693732 - RNA, 19 nt, Human
uaccccugacuucuguuua

SEQ ID NO: 3693733 - RNA, 19 nt, Human
uaccccuuacaaaugaaaa

SEQ ID NO: 3693734 - RNA, 19 nt, Human
uaccccuuagccucccuga

SEQ ID NO: 3693735 - RNA, 18 nt, Human
uaccccuuucuggcucuc

SEQ ID NO: 3693736 - RNA, 14 nt, Human
uacccgcagaguuc

SEQ ID NO: 3693737 - RNA, 23 nt, Human
uacccgggaagggggcugggaca

SEQ ID NO: 3693738 - RNA, 17 nt, Human
uacccguucacauuuuu

SEQ ID NO: 3693739 - RNA, 17 nt, Human
uacccuaaccaaguucc

SEQ ID NO: 3693740 - RNA, 16 nt, Human
uacccuagccauuccu

SEQ ID NO: 3693741 - RNA, 13 nt, Human
uacccuauaucua

SEQ ID NO: 3693742 - RNA, 16 nt, Human
uacccuauucucucuu

SEQ ID NO: 3693743 - RNA, 22 nt, Human
uacccucaggacaaugucugaa

SEQ ID NO: 3693744 - RNA, 23 nt, Human
uacccucaggcauaggccugggu

SEQ ID NO: 3693745 - RNA, 15 nt, Human
uacccucauguucuu

SEQ ID NO: 3693746 - RNA, 15 nt, Human
uacccucccaccccc

SEQ ID NO: 3693747 - RNA, 12 nt, Human
uacccucccugc

SEQ ID NO: 3693748 - RNA, 23 nt, Human
uacccucccugcuguccccucuu

SEQ ID NO: 3693749 - RNA, 15 nt, Human
uacccucucagcucc

SEQ ID NO: 3693750 - RNA, 20 nt, Human
uacccucucagcuccaggug

SEQ ID NO: 3693751 - RNA, 15 nt, Human
uacccucugaaauac

SEQ ID NO: 3693752 - RNA, 16 nt, Human
uacccucugaaauaca

SEQ ID NO: 3693753 - RNA, 12 nt, Human
uacccucuggag

SEQ ID NO: 3693754 - RNA, 22 nt, Human
uacccucuggagggguguggcu

SEQ ID NO: 3693755 - RNA, 13 nt, Human
uacccugaccugg

SEQ ID NO: 3693756 - RNA, 20 nt, Human
uacccugaccuggcccccuc

SEQ ID NO: 3693757 - RNA, 16 nt, Human
uacccugagcugaggc

SEQ ID NO: 3693758 - RNA, 18 nt, Human
uacccugagcugaggcag

SEQ ID NO: 3693759 - RNA, 13 nt, Human
uacccuggccccu

SEQ ID NO: 3693760 - RNA, 19 nt, Human
uacccuggccccucucccu

SEQ ID NO: 3693761 - RNA, 21 nt, Human
uacccuggccccucucccuug

SEQ ID NO: 3693762 - RNA, 21 nt, Human
uacccugggaaggccucuugg

SEQ ID NO: 3693763 - RNA, 14 nt, Human
uacccuuaagcuag

SEQ ID NO: 3693764 - RNA, 13 nt, Human
uacccuuaauuac

SEQ ID NO: 3693765 - RNA, 17 nt, Human
uacccuuaauuacuuaa

SEQ ID NO: 3693766 - RNA, 16 nt, Human
uacccuucccugcacu

SEQ ID NO: 3693767 - RNA, 17 nt, Human
uacccuucccugcacua

SEQ ID NO: 3693768 - RNA, 21 nt, Human
uacccuucugugcccagcuca

SEQ ID NO: 3693769 - RNA, 22 nt, Human
uacccuucuuuccauuucucuc

SEQ ID NO: 3693770 - RNA, 16 nt, Human
uacccuugagcccucc

SEQ ID NO: 3693771 - RNA, 19 nt, Human
uacccuugagcccucccca

SEQ ID NO: 3693772 - RNA, 17 nt, Human
uacccuuuuucuccagc

SEQ ID NO: 3693773 - RNA, 19 nt, Human
uacccuuuuucuccagcug

SEQ ID NO: 3693774 - RNA, 17 nt, Human
uaccgaaaccuugccuu

SEQ ID NO: 3693775 - RNA, 18 nt, Human
uaccgaaaccuugccuuu

SEQ ID NO: 3693776 - RNA, 17 nt, Human
uaccgaaugugucuuua

SEQ ID NO: 3693777 - RNA, 14 nt, Human
uaccgacccagggu

SEQ ID NO: 3693778 - RNA, 21 nt, Human
uaccgagucucuucuccacug

SEQ ID NO: 3693779 - RNA, 17 nt, Human
uaccgcguaaugcgcca

SEQ ID NO: 3693780 - RNA, 21 nt, Human
uaccgcguaaugcgccaauaa

SEQ ID NO: 3693781 - RNA, 18 nt, Human
uaccggagagagaaugua

SEQ ID NO: 3693782 - RNA, 20 nt, Human
uaccguaggcuuuguauuca

SEQ ID NO: 3693783 - RNA, 15 nt, Human
uaccguuucuucccu

SEQ ID NO: 3693784 - RNA, 15 nt, Human
uaccuaacauuauuu

SEQ ID NO: 3693785 - RNA, 13 nt, Human
uaccuaaguacug

SEQ ID NO: 3693786 - RNA, 17 nt, Human
uaccuaauuagagcaga

SEQ ID NO: 3693787 - RNA, 20 nt, Human
uaccuaauuagagcagauga

SEQ ID NO: 3693788 - RNA, 15 nt, Human
uaccuacauacaauu

SEQ ID NO: 3693789 - RNA, 13 nt, Human
uaccuacauguau

SEQ ID NO: 3693790 - RNA, 18 nt, Human
uaccuaccacagugucug

SEQ ID NO: 3693791 - RNA, 13 nt, Human
uaccuacuuugac

SEQ ID NO: 3693792 - RNA, 18 nt, Human
uaccuagauuuaauauaa

SEQ ID NO: 3693793 - RNA, 16 nt, Human
uaccuagauuuacagc

SEQ ID NO: 3693794 - RNA, 15 nt, Human
uaccuagcuggcucu

SEQ ID NO: 3693795 - RNA, 15 nt, Human
uaccuagugaaacuu

SEQ ID NO: 3693796 - RNA, 21 nt, Human
uaccuaucccaccuccauccc

SEQ ID NO: 3693797 - RNA, 14 nt, Human
uaccucaaacuauc

SEQ ID NO: 3693798 - RNA, 19 nt, Human
uaccucaaccauccuggcu

SEQ ID NO: 3693799 - RNA, 17 nt, Human
uaccucaaccuguaaau

SEQ ID NO: 3693800 - RNA, 16 nt, Human
uaccucaggcagcuca

SEQ ID NO: 3693801 - RNA, 21 nt, Human
uaccucagguugcugguugcu

SEQ ID NO: 3693802 - RNA, 13 nt, Human
uaccucagucagu

SEQ ID NO: 3693803 - RNA, 12 nt, Human
uaccucauguuu

SEQ ID NO: 3693804 - RNA, 15 nt, Human
uaccucauguuuaug

SEQ ID NO: 3693805 - RNA, 17 nt, Human
uaccucauguuuaugaa

SEQ ID NO: 3693806 - RNA, 20 nt, Human
uaccucauguuuaugaaaau

SEQ ID NO: 3693807 - RNA, 23 nt, Human
uaccuccaacagaacuaaauguu

SEQ ID NO: 3693808 - RNA, 17 nt, Human
uaccucccacacuccca

SEQ ID NO: 3693809 - RNA, 15 nt, Human
uaccuccucagggau

SEQ ID NO: 3693810 - RNA, 14 nt, Human
uaccuccucucagu

SEQ ID NO: 3693811 - RNA, 17 nt, Human
uaccuccucucaguguu

SEQ ID NO: 3693812 - RNA, 15 nt, Human
uaccuccugucucug

SEQ ID NO: 3693813 - RNA, 19 nt, Human
uaccucuaauaguauaaac

SEQ ID NO: 3693814 - RNA, 23 nt, Human
uaccucuccagccucagcucuca

SEQ ID NO: 3693815 - RNA, 14 nt, Human
uaccucucuguccc

SEQ ID NO: 3693816 - RNA, 20 nt, Human
uaccucucugucccuugcug

SEQ ID NO: 3693817 - RNA, 17 nt, Human
uaccucucuuauagaau

SEQ ID NO: 3693818 - RNA, 23 nt, Human
uaccucucuuauagaauauuuau

SEQ ID NO: 3693819 - RNA, 22 nt, Human
uaccucuugagccuugaacuuu

SEQ ID NO: 3693820 - RNA, 12 nt, Human
uaccucuuuugc

SEQ ID NO: 3693821 - RNA, 17 nt, Human
uuccaccaaaugugcuu

SEQ ID NO: 3693822 - RNA, 22 nt, Human
uuccaccacagccagcaccugg

SEQ ID NO: 3693823 - RNA, 12 nt, Human
uuccaccagccu

SEQ ID NO: 3693824 - RNA, 19 nt, Human
uuccacccaggggcagccc

SEQ ID NO: 3693825 - RNA, 21 nt, Human
uuccacccaggggcagcccca

SEQ ID NO: 3693826 - RNA, 15 nt, Human
uuccaccccaagaga

SEQ ID NO: 3693827 - RNA, 20 nt, Human
uuccaccccaagagaacucg

SEQ ID NO: 3693828 - RNA, 12 nt, Human
uuccacccccuc

SEQ ID NO: 3693829 - RNA, 14 nt, Human
uuccacccccuccc

SEQ ID NO: 3693830 - RNA, 15 nt, Human
uuccacccccucccu

SEQ ID NO: 3693831 - RNA, 18 nt, Human
uuccacccccucccuggc

SEQ ID NO: 3693832 - RNA, 13 nt, Human
uuccaccugcucu

SEQ ID NO: 3693833 - RNA, 14 nt, Human
uuccaccuuaaauu

SEQ ID NO: 3693834 - RNA, 14 nt, Human
uuccacgaugaaaa

SEQ ID NO: 3693835 - RNA, 19 nt, Human
uuccacgaugaaaaacuuc

SEQ ID NO: 3693836 - RNA, 18 nt, Human
uuccacgcugucuccaga

SEQ ID NO: 3693837 - RNA, 15 nt, Human
uuccacggagccacu

SEQ ID NO: 3693838 - RNA, 21 nt, Human
uuccacggagccacuccucug

SEQ ID NO: 3693839 - RNA, 23 nt, Human
uuccacuaagaacaccugcauuc

SEQ ID NO: 3693840 - RNA, 15 nt, Human
uuccacuacaccugg

SEQ ID NO: 3693841 - RNA, 18 nt, Human
uuccacucaggucuguuu

SEQ ID NO: 3693842 - RNA, 19 nt, Human
uuccacucguguguuucua

SEQ ID NO: 3693843 - RNA, 16 nt, Human
uuccacucugauagaa

SEQ ID NO: 3693844 - RNA, 21 nt, Human
uuccacucuggauucagccuu

SEQ ID NO: 3693845 - RNA, 13 nt, Human
uuccacugagacc

SEQ ID NO: 3693846 - RNA, 14 nt, Human
uuccacugagcucc

SEQ ID NO: 3693847 - RNA, 20 nt, Human
uuccacugagcuccaugugc

SEQ ID NO: 3693848 - RNA, 15 nt, Human
uuccacugagggcag

SEQ ID NO: 3693849 - RNA, 18 nt, Human
uuccacugauggaaacaa

SEQ ID NO: 3693850 - RNA, 13 nt, Human
uuccacugccucu

SEQ ID NO: 3693851 - RNA, 18 nt, Human
uuccacuucuuccuuucu

SEQ ID NO: 3693852 - RNA, 12 nt, Human
uuccacuuggcu

SEQ ID NO: 3693853 - RNA, 15 nt, Human
uuccagaaaggauau

SEQ ID NO: 3693854 - RNA, 21 nt, Human
uuccagaaccacacuugaaac

SEQ ID NO: 3693855 - RNA, 18 nt, Human
uuccagaagaagagaagc

SEQ ID NO: 3693856 - RNA, 15 nt, Human
uuccagaagugugau

SEQ ID NO: 3693857 - RNA, 16 nt, Human
uuccagaaucccaaga

SEQ ID NO: 3693858 - RNA, 14 nt, Human
uuccagaaucugua

SEQ ID NO: 3693859 - RNA, 16 nt, Human
uuccagaaugcuguac

SEQ ID NO: 3693860 - RNA, 22 nt, Human
uuccagacauucucgcuucccu

SEQ ID NO: 3693861 - RNA, 11 nt, Human
uuccagagaag

SEQ ID NO: 3693862 - RNA, 13 nt, Human
uuccagagccuca

SEQ ID NO: 3693863 - RNA, 16 nt, Human
uuccagagggguugag

SEQ ID NO: 3693864 - RNA, 18 nt, Human
uuccagauccuggaaauc

SEQ ID NO: 3693865 - RNA, 19 nt, Human
uuccagauccuggaaauca

SEQ ID NO: 3693866 - RNA, 23 nt, Human
uuccagauggucauccagacuca

SEQ ID NO: 3693867 - RNA, 20 nt, Human
uuccagcaauucuccugccu

SEQ ID NO: 3693868 - RNA, 12 nt, Human
uuccagccaggg

SEQ ID NO: 3693869 - RNA, 14 nt, Human
uuccagccugccac

SEQ ID NO: 3693870 - RNA, 20 nt, Human
uuccagcucaccccccacac

SEQ ID NO: 3693871 - RNA, 19 nt, Human
uuccagcucauucauuuua

SEQ ID NO: 3693872 - RNA, 11 nt, Human
uuccagcuccu

SEQ ID NO: 3693873 - RNA, 18 nt, Human
uuccagcuggaugagaau

SEQ ID NO: 3693874 - RNA, 13 nt, Human
uuccaggaaaaag

SEQ ID NO: 3693875 - RNA, 22 nt, Human
uuccaggaaacuccacaucugc

SEQ ID NO: 3693876 - RNA, 13 nt, Human
uuccaggaccccu

SEQ ID NO: 3693877 - RNA, 20 nt, Human
uuccaggacuguuucaaaca

SEQ ID NO: 3693878 - RNA, 21 nt, Human
uuccaggacuguuucaaacau

SEQ ID NO: 3693879 - RNA, 14 nt, Human
uuccaggauggugu

SEQ ID NO: 3693880 - RNA, 11 nt, Human
uuccaggcagc

SEQ ID NO: 3693881 - RNA, 21 nt, Human
uuccaggcuaguccggaccca

SEQ ID NO: 3693882 - RNA, 15 nt, Human
uuccaggcugggaga

SEQ ID NO: 3693883 - RNA, 16 nt, Human
uuccaggcuucugcug

SEQ ID NO: 3693884 - RNA, 22 nt, Human
uuccaggcuucugcuggggccu

SEQ ID NO: 3693885 - RNA, 19 nt, Human
uuccagggucccucugugu

SEQ ID NO: 3693886 - RNA, 20 nt, Human
uuccagggucccucugugua

SEQ ID NO: 3693887 - RNA, 21 nt, Human
uuccagguacccuucucgcuu

SEQ ID NO: 3693888 - RNA, 18 nt, Human
uuccaguaccuuugucac

SEQ ID NO: 3693889 - RNA, 22 nt, Human
uuccagucaggcucucugggcu

SEQ ID NO: 3693890 - RNA, 18 nt, Human
uuccagucucugcaugua

SEQ ID NO: 3693891 - RNA, 15 nt, Human
uuccagugaggcucu

SEQ ID NO: 3693892 - RNA, 17 nt, Human
uuccagugaggcucugc

SEQ ID NO: 3693893 - RNA, 22 nt, Human
uuccaguggccuggcuccgcug

SEQ ID NO: 3693894 - RNA, 23 nt, Human
uuccagugguccauggaaugcuu

SEQ ID NO: 3693895 - RNA, 17 nt, Human
uuccauaaggaauguag

SEQ ID NO: 3693896 - RNA, 22 nt, Human
uuccauaaucuggacuccucug

SEQ ID NO: 3693897 - RNA, 16 nt, Human
uuccauaauguauaaa

SEQ ID NO: 3693898 - RNA, 12 nt, Human
uuccauaauuau

SEQ ID NO: 3693899 - RNA, 13 nt, Human
uuccauaauuaug

SEQ ID NO: 3693900 - RNA, 15 nt, Human
uuccauacagcucua

SEQ ID NO: 3693901 - RNA, 18 nt, Human
uuccauauauccuuuucu

SEQ ID NO: 3693902 - RNA, 15 nt, Human
uuccauaucuugcga

SEQ ID NO: 3693903 - RNA, 20 nt, Human
uuccauaugaccucaugcau

SEQ ID NO: 3693904 - RNA, 17 nt, Human
uuccauauuagaaaacu

SEQ ID NO: 3693905 - RNA, 23 nt, Human
uuccauauuuuuuuccuuacaua

SEQ ID NO: 3693906 - RNA, 22 nt, Human
uuccaucacccguacaggcaau

SEQ ID NO: 3693907 - RNA, 16 nt, Human
uuccaucaugucccca

SEQ ID NO: 3693908 - RNA, 17 nt, Human
uuccaucauguccccaa

SEQ ID NO: 3693909 - RNA, 19 nt, Human
uuccauccaccuuucccaa

SEQ ID NO: 3693910 - RNA, 15 nt, Human
uuccauccauggcca

SEQ ID NO: 3693911 - RNA, 20 nt, Human
uuccauccauggccagcagc

SEQ ID NO: 3693912 - RNA, 14 nt, Human
uuccaucccagagg

SEQ ID NO: 3693913 - RNA, 21 nt, Human
uuccaucccuacccccuaaga

SEQ ID NO: 3693914 - RNA, 17 nt, Human
uuccaucuaaaaauaua

SEQ ID NO: 3693915 - RNA, 23 nt, Human
uuccaucuccuauaaucugucaa

SEQ ID NO: 3693916 - RNA, 23 nt, Human
uuccaucucgccaccccuccuuc

SEQ ID NO: 3693917 - RNA, 13 nt, Human
uuccaucuuuaca

SEQ ID NO: 3693918 - RNA, 22 nt, Human
uuccaugaaaacguuuuauugu

SEQ ID NO: 3693919 - RNA, 13 nt, Human
uuccaugaauuuu

SEQ ID NO: 3693920 - RNA, 21 nt, Human
uuccaugacugcuugcccuaa

SEQ ID NO: 3693921 - RNA, 13 nt, Human
uuccaugccugag

SEQ ID NO: 3693922 - RNA, 22 nt, Human
uuccaugccugaggguggagac

SEQ ID NO: 3693923 - RNA, 18 nt, Human
uuccaugcguguuucuga

SEQ ID NO: 3693924 - RNA, 21 nt, Human
uuccaugcguguuucugacuc

SEQ ID NO: 3693925 - RNA, 23 nt, Human
uuccaugcugugcgcccagggcu

SEQ ID NO: 3693926 - RNA, 14 nt, Human
uuccauggauuuug

SEQ ID NO: 3693927 - RNA, 20 nt, Human
uuccauguccccucccagag

SEQ ID NO: 3693928 - RNA, 16 nt, Human
uuccaugucgccucug

SEQ ID NO: 3693929 - RNA, 18 nt, Human
uuccaugucgccucugca

SEQ ID NO: 3693930 - RNA, 17 nt, Human
uuccaugugcccaguua

SEQ ID NO: 3693931 - RNA, 15 nt, Human
uuccauguugcugcc

SEQ ID NO: 3693932 - RNA, 14 nt, Human
uuccauuccacaca

SEQ ID NO: 3693933 - RNA, 15 nt, Human
uuccauucuggaagu

SEQ ID NO: 3693934 - RNA, 13 nt, Human
uuccauugcuuau

SEQ ID NO: 3693935 - RNA, 21 nt, Human
uuccauugcuuugaaaaaguu

SEQ ID NO: 3693936 - RNA, 16 nt, Human
uuccauuggaucucau

SEQ ID NO: 3693937 - RNA, 17 nt, Human
uuccauugguccaagau

SEQ ID NO: 3693938 - RNA, 13 nt, Human
uuccauuguguga

SEQ ID NO: 3693939 - RNA, 15 nt, Human
uuccauuguuugaaa

SEQ ID NO: 3693940 - RNA, 22 nt, Human
uuccauuguuugaaacaaagaa

SEQ ID NO: 3693941 - RNA, 20 nt, Human
uuccauuguuuggagacauu

SEQ ID NO: 3693942 - RNA, 17 nt, Human
uuccauuuacugcauuc

SEQ ID NO: 3693943 - RNA, 18 nt, Human
uuccauuuacuuaagacu

SEQ ID NO: 3693944 - RNA, 12 nt, Human
uuccauuuccaa

SEQ ID NO: 3693945 - RNA, 13 nt, Human
uuccauuugcaag

SEQ ID NO: 3693946 - RNA, 13 nt, Human
uuccauuuuaauu

SEQ ID NO: 3693947 - RNA, 16 nt, Human
uucccaaacgccuccc

SEQ ID NO: 3693948 - RNA, 19 nt, Human
uucccaaaggacuccaccc

SEQ ID NO: 3693949 - RNA, 22 nt, Human
uucccaaaugugugcccagcuu

SEQ ID NO: 3693950 - RNA, 21 nt, Human
uucccaacacggguaaaucua

SEQ ID NO: 3693951 - RNA, 18 nt, Human
uucccaacucuagcuggg

SEQ ID NO: 3693952 - RNA, 15 nt, Human
uucccaacugcaagu

SEQ ID NO: 3693953 - RNA, 20 nt, Human
uucccaacuugccuuugaag

SEQ ID NO: 3693954 - RNA, 14 nt, Human
uucccaagaaaugc

SEQ ID NO: 3693955 - RNA, 13 nt, Human
uucccaagcucug

SEQ ID NO: 3693956 - RNA, 12 nt, Human
uucccaauaaau

SEQ ID NO: 3693957 - RNA, 21 nt, Human
uucccaauagcacuuucauug

SEQ ID NO: 3693958 - RNA, 13 nt, Human
uucccaauugcuu

SEQ ID NO: 3693959 - RNA, 16 nt, Human
uucccacauuaaagaa

SEQ ID NO: 3693960 - RNA, 16 nt, Human
uucccacccagccugg

SEQ ID NO: 3693961 - RNA, 22 nt, Human
uucccaccccaaccugcucucc

SEQ ID NO: 3693962 - RNA, 17 nt, Human
uucccaccgcccucccu

SEQ ID NO: 3693963 - RNA, 21 nt, Human
uucccaccucccugcccaggc

SEQ ID NO: 3693964 - RNA, 19 nt, Human
uucccacugcacccccucc

SEQ ID NO: 3693965 - RNA, 13 nt, Human
uucccagaaggca

SEQ ID NO: 3693966 - RNA, 23 nt, Human
uucccagaaucaaagcaaugcau

SEQ ID NO: 3693967 - RNA, 21 nt, Human
uucccagagugugaaacuucc

SEQ ID NO: 3693968 - RNA, 22 nt, Human
uucccagcaguggacucaaaac

SEQ ID NO: 3693969 - RNA, 18 nt, Human
uucccagcucucccucug

SEQ ID NO: 3693970 - RNA, 19 nt, Human
uucccagcucucccucugg

SEQ ID NO: 3693971 - RNA, 16 nt, Human
uuaaaaacaaaaggca

SEQ ID NO: 3693972 - RNA, 16 nt, Human
uuaaaaagaaugacgu

SEQ ID NO: 3693973 - RNA, 18 nt, Human
uuaaaaagggaagaaacu

SEQ ID NO: 3693974 - RNA, 23 nt, Human
uuaaaaagggcagggcaucuccu

SEQ ID NO: 3693975 - RNA, 23 nt, Human
uuaaaaaguauugccaaacauua

SEQ ID NO: 3693976 - RNA, 23 nt, Human
uuaaaaaguccauaccuuauaua

SEQ ID NO: 3693977 - RNA, 17 nt, Human
uuaaaaagucugcauua

SEQ ID NO: 3693978 - RNA, 21 nt, Human
uuaaaaagucugcauuacauu

SEQ ID NO: 3693979 - RNA, 23 nt, Human
uuaaaaagucuuuuaaaaaguau

SEQ ID NO: 3693980 - RNA, 13 nt, Human
uuaaaaaguguuu

SEQ ID NO: 3693981 - RNA, 16 nt, Human
uuaaaaaguuguucaa

SEQ ID NO: 3693982 - RNA, 11 nt, Human
uuaaaaauaaa

SEQ ID NO: 3693983 - RNA, 19 nt, Human
uuaaaaauaucaaauuaau

SEQ ID NO: 3693984 - RNA, 23 nt, Human
uuaaaaauauggaacuucuaaua

SEQ ID NO: 3693985 - RNA, 23 nt, Human
uuaaaaaucaacuuuuuauugcc

SEQ ID NO: 3693986 - RNA, 14 nt, Human
uuaaaaaucucaaa

SEQ ID NO: 3693987 - RNA, 19 nt, Human
uuaaaaaugagugugaagg

SEQ ID NO: 3693988 - RNA, 12 nt, Human
uuaaaaaugcaa

SEQ ID NO: 3693989 - RNA, 14 nt, Human
uuaaaaauguaaau

SEQ ID NO: 3693990 - RNA, 18 nt, Human
uuaaaaaugucuuauugu

SEQ ID NO: 3693991 - RNA, 17 nt, Human
uuaaaaauucagcaaag

SEQ ID NO: 3693992 - RNA, 19 nt, Human
uuaaaaauugucuucaugu

SEQ ID NO: 3693993 - RNA, 12 nt, Human
uuaaaacaaaac

SEQ ID NO: 3693994 - RNA, 18 nt, Human
uuaaaacaaaacaaaaca

SEQ ID NO: 3693995 - RNA, 12 nt, Human
uuaaaacaaaca

SEQ ID NO: 3693996 - RNA, 11 nt, Human
uuaaaacaaga

SEQ ID NO: 3693997 - RNA, 13 nt, Human
uuaaaacacaaca

SEQ ID NO: 3693998 - RNA, 23 nt, Human
uuaaaacacguuuuaaggacuga

SEQ ID NO: 3693999 - RNA, 14 nt, Human
uuaaaacacuucug

SEQ ID NO: 3694000 - RNA, 14 nt, Human
uuaaaacagacacu

SEQ ID NO: 3694001 - RNA, 12 nt, Human
uuaaaacagcug

SEQ ID NO: 3694002 - RNA, 21 nt, Human
uuaaaacagcugcauuagaaa

SEQ ID NO: 3694003 - RNA, 16 nt, Human
uuaaaacaucauuccu

SEQ ID NO: 3694004 - RNA, 23 nt, Human
uuaaaacaucauuccuuuuuauu

SEQ ID NO: 3694005 - RNA, 23 nt, Human
uuaaaacaugcccccuggaaagg

SEQ ID NO: 3694006 - RNA, 13 nt, Human
uuaaaacuaaauu

SEQ ID NO: 3694007 - RNA, 19 nt, Human
uuaaaacuaggcauuugua

SEQ ID NO: 3694008 - RNA, 22 nt, Human
uuaaaacuaggcauuuguaaau

SEQ ID NO: 3694009 - RNA, 23 nt, Human
uuaaaacuaggcauuuguaaaua

SEQ ID NO: 3694010 - RNA, 19 nt, Human
uuaaaacucagccugggac

SEQ ID NO: 3694011 - RNA, 20 nt, Human
uuaaaacugaagucugaaau

SEQ ID NO: 3694012 - RNA, 13 nt, Human
uuaaaacugcuuu

SEQ ID NO: 3694013 - RNA, 22 nt, Human
uuaaaacugcuuuuuuuuuucc

SEQ ID NO: 3694014 - RNA, 9 nt, Human
uuaaaagaa

SEQ ID NO: 3694015 - RNA, 20 nt, Human
uuaaaagaaagccucagaga

SEQ ID NO: 3694016 - RNA, 23 nt, Human
uuaaaagaaaggguucuguaaaa

SEQ ID NO: 3694017 - RNA, 12 nt, Human
uuaaaagaaauu

SEQ ID NO: 3694018 - RNA, 21 nt, Human
uuaaaagaaugggcaguuaca

SEQ ID NO: 3694019 - RNA, 12 nt, Human
uuaaaagacaag

SEQ ID NO: 3694020 - RNA, 15 nt, Human
uuaaaagacaagacu

SEQ ID NO: 3694021 - RNA, 13 nt, Human
uuaaaagacucau

SEQ ID NO: 3694022 - RNA, 23 nt, Human
uuaaaagagagagagagaaaaaa

SEQ ID NO: 3694023 - RNA, 15 nt, Human
uuaaaagaugaaaau

SEQ ID NO: 3694024 - RNA, 14 nt, Human
uuaaaagcauuuuu

SEQ ID NO: 3694025 - RNA, 17 nt, Human
uuaaaagccacauagag

SEQ ID NO: 3694026 - RNA, 13 nt, Human
uuaaaagccugcu

SEQ ID NO: 3694027 - RNA, 21 nt, Human
uuaaaagcuaucuucauguaa

SEQ ID NO: 3694028 - RNA, 23 nt, Human
uuaaaagggauuacccaagcaaa

SEQ ID NO: 3694029 - RNA, 14 nt, Human
uuaaaaguaaaugu

SEQ ID NO: 3694030 - RNA, 18 nt, Human
uuaaaaguguauuuguua

SEQ ID NO: 3694031 - RNA, 16 nt, Human
uuaaaaguuucaaugu

SEQ ID NO: 3694032 - RNA, 22 nt, Human
uuaaaaguuucaaugugauucu

SEQ ID NO: 3694033 - RNA, 16 nt, Human
uuaaaauaaaaauucu

SEQ ID NO: 3694034 - RNA, 20 nt, Human
uuaaaauaaaaauucugaau

SEQ ID NO: 3694035 - RNA, 14 nt, Human
uuaaaauaaaauga

SEQ ID NO: 3694036 - RNA, 17 nt, Human
uuaaaauaaaaugaaaa

SEQ ID NO: 3694037 - RNA, 21 nt, Human
uuaaaauaaaaugaaaauugu

SEQ ID NO: 3694038 - RNA, 20 nt, Human
uuaaaauaagcacugugcua

SEQ ID NO: 3694039 - RNA, 15 nt, Human
uuaaaauaaggauuu

SEQ ID NO: 3694040 - RNA, 17 nt, Human
uuaaaauaagucugauu

SEQ ID NO: 3694041 - RNA, 15 nt, Human
uuaaaauaauuauau

SEQ ID NO: 3694042 - RNA, 11 nt, Human
uuaaaauacaa

SEQ ID NO: 3694043 - RNA, 15 nt, Human
uuaaaauacaagacu

SEQ ID NO: 3694044 - RNA, 19 nt, Human
uuaaaauacacacucaaau

SEQ ID NO: 3694045 - RNA, 21 nt, Human
uuaaaauaccagccaguaaau

SEQ ID NO: 3694046 - RNA, 16 nt, Human
uuaaaauacuguagau

SEQ ID NO: 3694047 - RNA, 18 nt, Human
uuaaaauacuguagauaa

SEQ ID NO: 3694048 - RNA, 20 nt, Human
uuaaaauacuguagauaauu

SEQ ID NO: 3694049 - RNA, 15 nt, Human
uuaaaauagaaauaa

SEQ ID NO: 3694050 - RNA, 18 nt, Human
uuaaaauaggggauauuu

SEQ ID NO: 3694051 - RNA, 20 nt, Human
uuaaaauauauauguugauu

SEQ ID NO: 3694052 - RNA, 13 nt, Human
uuaaaauaucuuu

SEQ ID NO: 3694053 - RNA, 19 nt, Human
uuaaaauaucuuuugaccu

SEQ ID NO: 3694054 - RNA, 17 nt, Human
uuaaaauauuuauuuau

SEQ ID NO: 3694055 - RNA, 17 nt, Human
uuaaaaucacuaacauu

SEQ ID NO: 3694056 - RNA, 20 nt, Human
uuaaaaucacuaacauuaua

SEQ ID NO: 3694057 - RNA, 12 nt, Human
uuaaaauccuca

SEQ ID NO: 3694058 - RNA, 17 nt, Human
uuaaaaucuauucugug

SEQ ID NO: 3694059 - RNA, 12 nt, Human
uuaaaaugagaa

SEQ ID NO: 3694060 - RNA, 19 nt, Human
uuaaaaugagaaaucuaaa

SEQ ID NO: 3694061 - RNA, 16 nt, Human
uuaaaaugauuguaaa

SEQ ID NO: 3694062 - RNA, 18 nt, Human
uuaaaaugauuguaaaau

SEQ ID NO: 3694063 - RNA, 16 nt, Human
uuaaaaugcaacaugu

SEQ ID NO: 3694064 - RNA, 13 nt, Human
uuaaaaugcaaua

SEQ ID NO: 3694065 - RNA, 21 nt, Human
uuaaaauggaugccuugaaua

SEQ ID NO: 3694066 - RNA, 11 nt, Human
uuaaaauguaa

SEQ ID NO: 3694067 - RNA, 16 nt, Human
uuaaaauguaaagcca

SEQ ID NO: 3694068 - RNA, 17 nt, Human
uuaaaauguaauuuaaa

SEQ ID NO: 3694069 - RNA, 21 nt, Human
uuaaaauguaauuuaaaugaa

SEQ ID NO: 3694070 - RNA, 15 nt, Human
uuaaaauguacaugu

SEQ ID NO: 3694071 - RNA, 23 nt, Human
uuaaaauguauucuuaaauucau

SEQ ID NO: 3694072 - RNA, 13 nt, Human
uuaaaauguucac

SEQ ID NO: 3694073 - RNA, 23 nt, Human
uacucccagggcuuacggcccug

SEQ ID NO: 3694074 - RNA, 15 nt, Human
uacucccuugcccua

SEQ ID NO: 3694075 - RNA, 15 nt, Human
uacuccuaccucagc

SEQ ID NO: 3694076 - RNA, 17 nt, Human
uacuccuaccucagccu

SEQ ID NO: 3694077 - RNA, 19 nt, Human
uacuccuaugaucugaguc

SEQ ID NO: 3694078 - RNA, 15 nt, Human
uacuccucacacuua

SEQ ID NO: 3694079 - RNA, 12 nt, Human
uacuccucccag

SEQ ID NO: 3694080 - RNA, 11 nt, Human
uacuccuccuc

SEQ ID NO: 3694081 - RNA, 16 nt, Human
uacuccuccucuuucu

SEQ ID NO: 3694082 - RNA, 18 nt, Human
uacuccuccucuuucucu

SEQ ID NO: 3694083 - RNA, 16 nt, Human
uacuccucugcagugc

SEQ ID NO: 3694084 - RNA, 12 nt, Human
uacuccugacuc

SEQ ID NO: 3694085 - RNA, 14 nt, Human
uacuccugcaaaau

SEQ ID NO: 3694086 - RNA, 22 nt, Human
uacuccugcaaaauuuuauagc

SEQ ID NO: 3694087 - RNA, 19 nt, Human
uacuccuguaauuccuacc

SEQ ID NO: 3694088 - RNA, 13 nt, Human
uacuccugucuuc

SEQ ID NO: 3694089 - RNA, 15 nt, Human
uacuccugucuucug

SEQ ID NO: 3694090 - RNA, 17 nt, Human
uacuccugucuucugcu

SEQ ID NO: 3694091 - RNA, 19 nt, Human
uacuccugucuucugcuuu

SEQ ID NO: 3694092 - RNA, 20 nt, Human
uacuccugucuucugcuuug

SEQ ID NO: 3694093 - RNA, 21 nt, Human
uacuccugucuucugcuuugu

SEQ ID NO: 3694094 - RNA, 22 nt, Human
uacuccugucuucugcuuuguu

SEQ ID NO: 3694095 - RNA, 18 nt, Human
uacuccugugggagccuc

SEQ ID NO: 3694096 - RNA, 14 nt, Human
uacuccuuaagaac

SEQ ID NO: 3694097 - RNA, 21 nt, Human
uacuccuuaagaacacaaagc

SEQ ID NO: 3694098 - RNA, 22 nt, Human
uacucgaguuacagacaaagcg

SEQ ID NO: 3694099 - RNA, 19 nt, Human
uacucggaaauuaaaguuu

SEQ ID NO: 3694100 - RNA, 13 nt, Human
uacucuaagaucu

SEQ ID NO: 3694101 - RNA, 15 nt, Human
uacucuaagaucuua

SEQ ID NO: 3694102 - RNA, 21 nt, Human
uacucuaauucuaaccagagc

SEQ ID NO: 3694103 - RNA, 14 nt, Human
uacucuagaugaag

SEQ ID NO: 3694104 - RNA, 12 nt, Human
uacucuagauuu

SEQ ID NO: 3694105 - RNA, 20 nt, Human
uacucuaugccccaaauaua

SEQ ID NO: 3694106 - RNA, 22 nt, Human
uacucucacacugguucucaau

SEQ ID NO: 3694107 - RNA, 22 nt, Human
uacucuccuggaaauauuaaga

SEQ ID NO: 3694108 - RNA, 23 nt, Human
uacucuccuggaaauauuaagaa

SEQ ID NO: 3694109 - RNA, 20 nt, Human
uacucugaaacacacugaaa

SEQ ID NO: 3694110 - RNA, 22 nt, Human
uacucugaagggcaucaugcau

SEQ ID NO: 3694111 - RNA, 12 nt, Human
uacucugggaac

SEQ ID NO: 3694112 - RNA, 15 nt, Human
uacucugguucuuug

SEQ ID NO: 3694113 - RNA, 19 nt, Human
uacucugugccagagccug

SEQ ID NO: 3694114 - RNA, 22 nt, Human
uacucugugccagagccugggg

SEQ ID NO: 3694115 - RNA, 17 nt, Human
uacucuuaagccaucuu

SEQ ID NO: 3694116 - RNA, 23 nt, Human
uacucuuaagccaucuugguaaa

SEQ ID NO: 3694117 - RNA, 15 nt, Human
uacucuuaaguuucu

SEQ ID NO: 3694118 - RNA, 18 nt, Human
uacucuuauagacaacau

SEQ ID NO: 3694119 - RNA, 18 nt, Human
uacucuucuugaaauuuu

SEQ ID NO: 3694120 - RNA, 19 nt, Human
uacucuuguaagauuuuga

SEQ ID NO: 3694121 - RNA, 23 nt, Human
uacucuuguaagauuuugaaaac

SEQ ID NO: 3694122 - RNA, 12 nt, Human
uacucuuuccua

SEQ ID NO: 3694123 - RNA, 13 nt, Human
uacucuuuccuau

SEQ ID NO: 3694124 - RNA, 15 nt, Human
uacucuuucuguaua

SEQ ID NO: 3694125 - RNA, 14 nt, Human
uacugaaacagauu

SEQ ID NO: 3694126 - RNA, 19 nt, Human
uacugaaagaguccauugu

SEQ ID NO: 3694127 - RNA, 20 nt, Human
uacugaaagguuacccugua

SEQ ID NO: 3694128 - RNA, 22 nt, Human
uacugaaauaaacgucuuaaau

SEQ ID NO: 3694129 - RNA, 19 nt, Human
uacugaacaucugaguccu

SEQ ID NO: 3694130 - RNA, 12 nt, Human
uacugaaggaaa

SEQ ID NO: 3694131 - RNA, 14 nt, Human
uacugaaggaaaaa

SEQ ID NO: 3694132 - RNA, 16 nt, Human
uacugaauuuuuuugu

SEQ ID NO: 3694133 - RNA, 18 nt, Human
uacugaauuuuuuuguaa

SEQ ID NO: 3694134 - RNA, 20 nt, Human
uacugacauguggggccagg

SEQ ID NO: 3694135 - RNA, 14 nt, Human
uacugacauuucuu

SEQ ID NO: 3694136 - RNA, 16 nt, Human
uacugacauuucuucu

SEQ ID NO: 3694137 - RNA, 15 nt, Human
uacugacccuggggc

SEQ ID NO: 3694138 - RNA, 17 nt, Human
uacugacccuggggcug

SEQ ID NO: 3694139 - RNA, 16 nt, Human
uacugacuuugcuugc

SEQ ID NO: 3694140 - RNA, 18 nt, Human
uacugacuuugcuugcuu

SEQ ID NO: 3694141 - RNA, 17 nt, Human
uacugagaaaaccuguu

SEQ ID NO: 3694142 - RNA, 17 nt, Human
uacugagagugaacaaa

SEQ ID NO: 3694143 - RNA, 18 nt, Human
uacugagccuuguaauuc

SEQ ID NO: 3694144 - RNA, 22 nt, Human
uacugaggccuaaaaguaaaca

SEQ ID NO: 3694145 - RNA, 17 nt, Human
uacugaucaugcauugu

SEQ ID NO: 3694146 - RNA, 14 nt, Human
uacugauuguuuca

SEQ ID NO: 3694147 - RNA, 14 nt, Human
uacugauuucagua

SEQ ID NO: 3694148 - RNA, 21 nt, Human
uacugauuuccuuuggagcuu

SEQ ID NO: 3694149 - RNA, 23 nt, Human
uacugauuugggcugaauguaug

SEQ ID NO: 3694150 - RNA, 17 nt, Human
uacugauuuuugugauu

SEQ ID NO: 3694151 - RNA, 14 nt, Human
uacugcaaaucagg

SEQ ID NO: 3694152 - RNA, 23 nt, Human
uacugcaaaucaggcuuuuguuu

SEQ ID NO: 3694153 - RNA, 18 nt, Human
uacugcaaaugucaucag

SEQ ID NO: 3694154 - RNA, 17 nt, Human
uacugcagccuccagag

SEQ ID NO: 3694155 - RNA, 15 nt, Human
uacugcagcuuuaca

SEQ ID NO: 3694156 - RNA, 19 nt, Human
uacugcagcuuuacaugca

SEQ ID NO: 3694157 - RNA, 18 nt, Human
uacugcagggccaggacu

SEQ ID NO: 3694158 - RNA, 18 nt, Human
uacugcauucuucugauc

SEQ ID NO: 3694159 - RNA, 15 nt, Human
uacugcauuuaggga

SEQ ID NO: 3694160 - RNA, 13 nt, Human
uacugccaaccuc

SEQ ID NO: 3694161 - RNA, 16 nt, Human
uacugccaaccucgcu

SEQ ID NO: 3694162 - RNA, 20 nt, Human
uuaaucaauuuaaacccauu

SEQ ID NO: 3694163 - RNA, 19 nt, Human
uuaaucacaaauuucacuu

SEQ ID NO: 3694164 - RNA, 21 nt, Human
uuaaucacaaauuucacuuau

SEQ ID NO: 3694165 - RNA, 17 nt, Human
uuaaucacuguguauau

SEQ ID NO: 3694166 - RNA, 20 nt, Human
uuaaucacuuaacauuccua

SEQ ID NO: 3694167 - RNA, 20 nt, Human
uuaaucagguccucagagaa

SEQ ID NO: 3694168 - RNA, 16 nt, Human
uuaaucauauaaauag

SEQ ID NO: 3694169 - RNA, 19 nt, Human
uuaaucauauaaauagaau

SEQ ID NO: 3694170 - RNA, 18 nt, Human
uuaaucaugaauguguaa

SEQ ID NO: 3694171 - RNA, 13 nt, Human
uuaaucauugccu

SEQ ID NO: 3694172 - RNA, 13 nt, Human
uuaaucauuuuca

SEQ ID NO: 3694173 - RNA, 15 nt, Human
uuaaucauuuucauu

SEQ ID NO: 3694174 - RNA, 12 nt, Human
uuaaucauuuuu

SEQ ID NO: 3694175 - RNA, 18 nt, Human
uuaauccagaauaacuag

SEQ ID NO: 3694176 - RNA, 19 nt, Human
uuaauccaguuauaagaag

SEQ ID NO: 3694177 - RNA, 15 nt, Human
uuaaucuacugcauu

SEQ ID NO: 3694178 - RNA, 16 nt, Human
uuaaucuacugcauuu

SEQ ID NO: 3694179 - RNA, 20 nt, Human
uuaaucuagacaauauacaa

SEQ ID NO: 3694180 - RNA, 17 nt, Human
uuaaucucuaacagugg

SEQ ID NO: 3694181 - RNA, 18 nt, Human
uuaaucucuaacagugga

SEQ ID NO: 3694182 - RNA, 23 nt, Human
uuaaucucuguuauguacuguac

SEQ ID NO: 3694183 - RNA, 15 nt, Human
uuaaucugaaauucu

SEQ ID NO: 3694184 - RNA, 17 nt, Human
uuaaucugaaauucuaa

SEQ ID NO: 3694185 - RNA, 23 nt, Human
uuaaucugaaauucuaaagagca

SEQ ID NO: 3694186 - RNA, 22 nt, Human
uuaaucugguuuauuuuuguuc

SEQ ID NO: 3694187 - RNA, 18 nt, Human
uuaaucuucaaagccuuc

SEQ ID NO: 3694188 - RNA, 20 nt, Human
uuaaucuucaaagccuucuc

SEQ ID NO: 3694189 - RNA, 17 nt, Human
uuaaucuucaguuuuau

SEQ ID NO: 3694190 - RNA, 17 nt, Human
uuaaucuuuaauuuuac

SEQ ID NO: 3694191 - RNA, 20 nt, Human
uuaaucuuuucacaaauaaa

SEQ ID NO: 3694192 - RNA, 18 nt, Human
uuaaugaaagacuguaca

SEQ ID NO: 3694193 - RNA, 20 nt, Human
uuaaugaaagacuguacaaa

SEQ ID NO: 3694194 - RNA, 17 nt, Human
uuaaugaaauaucugua

SEQ ID NO: 3694195 - RNA, 14 nt, Human
uuaaugaagaaagu

SEQ ID NO: 3694196 - RNA, 23 nt, Human
uuaaugaagaaaguggaaaacaa

SEQ ID NO: 3694197 - RNA, 15 nt, Human
uuaaugaagaucuaa

SEQ ID NO: 3694198 - RNA, 15 nt, Human
uuaaugaaguuugaa

SEQ ID NO: 3694199 - RNA, 16 nt, Human
uuaaugaaguuugaau

SEQ ID NO: 3694200 - RNA, 22 nt, Human
uuaaugaaucguaaugaaguug

SEQ ID NO: 3694201 - RNA, 20 nt, Human
uuaaugaaugcuuaaagaau

SEQ ID NO: 3694202 - RNA, 21 nt, Human
uuaaugaaugcuuaaagaauu

SEQ ID NO: 3694203 - RNA, 16 nt, Human
uuaaugagacuuuaaa

SEQ ID NO: 3694204 - RNA, 21 nt, Human
uuaaugauaugcuuguaacua

SEQ ID NO: 3694205 - RNA, 12 nt, Human
uuaaugcacuuu

SEQ ID NO: 3694206 - RNA, 15 nt, Human
uuaaugcacuuucua

SEQ ID NO: 3694207 - RNA, 20 nt, Human
uuaaugcauguuaggaaaau

SEQ ID NO: 3694208 - RNA, 23 nt, Human
uuaaugcauuaaaccugucucca

SEQ ID NO: 3694209 - RNA, 21 nt, Human
uuaaugccugcuuuuuggaaa

SEQ ID NO: 3694210 - RNA, 18 nt, Human
uuaaugccuuuaaaguau

SEQ ID NO: 3694211 - RNA, 21 nt, Human
uuaaugcuaagggcaggccca

SEQ ID NO: 3694212 - RNA, 23 nt, Human
uuaaugcuaaucuugugaaaaua

SEQ ID NO: 3694213 - RNA, 16 nt, Human
uuaaugcuauuugaac

SEQ ID NO: 3694214 - RNA, 21 nt, Human
uuaaugcuauuugaacaagug

SEQ ID NO: 3694215 - RNA, 17 nt, Human
uuaaugcugccuuuucu

SEQ ID NO: 3694216 - RNA, 18 nt, Human
uuaauggaugaaaucaua

SEQ ID NO: 3694217 - RNA, 21 nt, Human
uuaauggauuguuaauuucag

SEQ ID NO: 3694218 - RNA, 22 nt, Human
uuaauggucuaaaaauaaacca

SEQ ID NO: 3694219 - RNA, 17 nt, Human
uuaauguacauagugcu

SEQ ID NO: 3694220 - RNA, 18 nt, Human
uuaauguacauagugcua

SEQ ID NO: 3694221 - RNA, 14 nt, Human
uuaauguauauaaa

SEQ ID NO: 3694222 - RNA, 18 nt, Human
uuaauguauguuaccaaa

SEQ ID NO: 3694223 - RNA, 21 nt, Human
uuaauguauuuguucauguuu

SEQ ID NO: 3694224 - RNA, 22 nt, Human
uuaauguccucucaaaguaaaa

SEQ ID NO: 3694225 - RNA, 19 nt, Human
uuaaugugaacuuguagcu

SEQ ID NO: 3694226 - RNA, 13 nt, Human
uuaaugugaguuu

SEQ ID NO: 3694227 - RNA, 15 nt, Human
uuaaugugcugugua

SEQ ID NO: 3694228 - RNA, 18 nt, Human
uuaaugugcuguguaaag

SEQ ID NO: 3694229 - RNA, 13 nt, Human
uuaauguucugug

SEQ ID NO: 3694230 - RNA, 23 nt, Human
uuaauguugaacaaaauaaauug

SEQ ID NO: 3694231 - RNA, 10 nt, Human
uuaauguuuu

SEQ ID NO: 3694232 - RNA, 14 nt, Human
uuaauguuuucaaa

SEQ ID NO: 3694233 - RNA, 16 nt, Human
uuaauguuuucaaaag

SEQ ID NO: 3694234 - RNA, 18 nt, Human
uuaauguuuuuaaauaua

SEQ ID NO: 3694235 - RNA, 18 nt, Human
uuaauguuuuuugccaca

SEQ ID NO: 3694236 - RNA, 20 nt, Human
uuaauuaaaaacuaguaguu

SEQ ID NO: 3694237 - RNA, 15 nt, Human
uuaauuaaauagcuu

SEQ ID NO: 3694238 - RNA, 14 nt, Human
uuaauuaaaugcuc

SEQ ID NO: 3694239 - RNA, 16 nt, Human
uuaauuaaguaaacua

SEQ ID NO: 3694240 - RNA, 21 nt, Human
uuaauuaaguaaacuaaugag

SEQ ID NO: 3694241 - RNA, 20 nt, Human
uuaauuagggguugcuaaga

SEQ ID NO: 3694242 - RNA, 18 nt, Human
uuaauuagugcuaagugu

SEQ ID NO: 3694243 - RNA, 22 nt, Human
uuaauuaugccuuuuuugauca

SEQ ID NO: 3694244 - RNA, 18 nt, Human
uuaauuauuaacuacauu

SEQ ID NO: 3694245 - RNA, 17 nt, Human
uuaauuauuauucuuca

SEQ ID NO: 3694246 - RNA, 17 nt, Human
uuaauucaacuuaacua

SEQ ID NO: 3694247 - RNA, 16 nt, Human
uuaauucaccaaagua

SEQ ID NO: 3694248 - RNA, 15 nt, Human
uuaauucacucccac

SEQ ID NO: 3694249 - RNA, 22 nt, Human
uuaauucagcacugauuucaca

SEQ ID NO: 3694250 - RNA, 15 nt, Human
uuaauucauguuucu

SEQ ID NO: 3694251 - RNA, 19 nt, Human
uuaauuccaauaugaugac

SEQ ID NO: 3694252 - RNA, 21 nt, Human
uuaauuccaugaaucgcuucu

SEQ ID NO: 3694253 - RNA, 19 nt, Human
uuaauuccuucagcacuuu

SEQ ID NO: 3694254 - RNA, 16 nt, Human
uuaauuccuuucucau

SEQ ID NO: 3694255 - RNA, 17 nt, Human
uuaauucucuuucaaag

SEQ ID NO: 3694256 - RNA, 15 nt, Human
uuaauucuuagcuca

SEQ ID NO: 3694257 - RNA, 13 nt, Human
uuaauugaaauuu

SEQ ID NO: 3694258 - RNA, 15 nt, Human
uuaauugaaggaaag

SEQ ID NO: 3694259 - RNA, 23 nt, Human
uuaauugagaagcguauguuuuu

SEQ ID NO: 3694260 - RNA, 16 nt, Human
uuaauugaucaguuuu

SEQ ID NO: 3694261 - RNA, 22 nt, Human
uuaauugauuauucugauucca

SEQ ID NO: 3694262 - RNA, 15 nt, Human
uuaauuguaaacugu

SEQ ID NO: 3694263 - RNA, 13 nt, Human
uuaauuguauuuu

SEQ ID NO: 3694264 - RNA, 15 nt, Human
uuaauugucuugcac

SEQ ID NO: 3694265 - RNA, 20 nt, Human
uuaauugugaauugauaaua

SEQ ID NO: 3694266 - RNA, 22 nt, Human
uuaauugugaauugauaauaaa

SEQ ID NO: 3694267 - RNA, 21 nt, Human
uuaauugugugaacuuggaag

SEQ ID NO: 3694268 - RNA, 16 nt, Human
uuaauuguuguuucuu

SEQ ID NO: 3694269 - RNA, 18 nt, Human
uuaauuuaaacaccuccu

SEQ ID NO: 3694270 - RNA, 13 nt, Human
uuaauuuaaauga

SEQ ID NO: 3694271 - RNA, 14 nt, Human
uuaauuuaaaugau

SEQ ID NO: 3694272 - RNA, 23 nt, Human
uuaauuuaaguuuugacaagcug

SEQ ID NO: 3694273 - RNA, 16 nt, Human
uuaauuuaggacacau

SEQ ID NO: 3694274 - RNA, 16 nt, Human
uuaauuuauacuggca

SEQ ID NO: 3694275 - RNA, 14 nt, Human
uuaauuuauaugua

SEQ ID NO: 3694276 - RNA, 14 nt, Human
uuaauuuauuuuug

SEQ ID NO: 3694277 - RNA, 13 nt, Human
uuaauuucagucc

SEQ ID NO: 3694278 - RNA, 15 nt, Human
uuaauuuccuuuuug

SEQ ID NO: 3694279 - RNA, 16 nt, Human
uuaauuuccuuuuuga

SEQ ID NO: 3694280 - RNA, 21 nt, Human
uuaauuuccuuuuugacacug

SEQ ID NO: 3694281 - RNA, 15 nt, Human
uuaauuucuucaaaa

SEQ ID NO: 3694282 - RNA, 21 nt, Human
uuaauuucuucaaaauguaua

SEQ ID NO: 3694283 - RNA, 15 nt, Human
uuaauuugaaauaug

SEQ ID NO: 3694284 - RNA, 20 nt, Human
uuaauuugauaucacagucu

SEQ ID NO: 3694285 - RNA, 13 nt, Human
uuaauuugccaaa

SEQ ID NO: 3694286 - RNA, 20 nt, Human
uuaauuuggaaacuaauaaa

SEQ ID NO: 3694287 - RNA, 18 nt, Human
uuaauuuggaccauuuuc

SEQ ID NO: 3694288 - RNA, 19 nt, Human
uuaauuuuaaagugcaaaa

SEQ ID NO: 3694289 - RNA, 17 nt, Human
uuaauuuuaguuuuuca

SEQ ID NO: 3694290 - RNA, 13 nt, Human
uuaauuuucagua

SEQ ID NO: 3694291 - RNA, 22 nt, Human
uuaauuuugacacuauaucugu

SEQ ID NO: 3694292 - RNA, 20 nt, Human
uuaauuuugguuguauucuu

SEQ ID NO: 3694293 - RNA, 23 nt, Human
uuaauuuugguuguauucuuuga

SEQ ID NO: 3694294 - RNA, 14 nt, Human
uuaauuuuuaaaug

SEQ ID NO: 3694295 - RNA, 15 nt, Human
uuaauuuuuccaacu

SEQ ID NO: 3694296 - RNA, 12 nt, Human
uuaauuuuugau

SEQ ID NO: 3694297 - RNA, 13 nt, Human
uuaauuuuugaua

SEQ ID NO: 3694298 - RNA, 15 nt, Human
uuaauuuuugcuuuu

SEQ ID NO: 3694299 - RNA, 22 nt, Human
uuaauuuuuuuaaccaaaggug

SEQ ID NO: 3694300 - RNA, 17 nt, Human
uuacaaaacaaacucau

SEQ ID NO: 3694301 - RNA, 18 nt, Human
uuacaaaacuacaugaga

SEQ ID NO: 3694302 - RNA, 20 nt, Human
uuacaaaagaaauaccuuga

SEQ ID NO: 3694303 - RNA, 12 nt, Human
uuacaaacaugu

SEQ ID NO: 3694304 - RNA, 15 nt, Human
uuacaaacauguggu

SEQ ID NO: 3694305 - RNA, 12 nt, Human
uuacaaacugca

SEQ ID NO: 3694306 - RNA, 18 nt, Human
uuacaaaggcuguauuca

SEQ ID NO: 3694307 - RNA, 17 nt, Human
uuacaaaguguguauua

SEQ ID NO: 3694308 - RNA, 16 nt, Human
uuacaaaucagaaguc

SEQ ID NO: 3694309 - RNA, 17 nt, Human
uuacaaaucagaaguca

SEQ ID NO: 3694310 - RNA, 17 nt, Human
uuacaacagauuuguga

SEQ ID NO: 3694311 - RNA, 14 nt, Human
uucgggcuggccau

SEQ ID NO: 3694312 - RNA, 17 nt, Human
uucggggcugggaaguc

SEQ ID NO: 3694313 - RNA, 18 nt, Human
uucggugagcuacaaaug

SEQ ID NO: 3694314 - RNA, 13 nt, Human
uucggugugcacc

SEQ ID NO: 3694315 - RNA, 18 nt, Human
uucgguugagaauggaaa

SEQ ID NO: 3694316 - RNA, 14 nt, Human
uucgguuucuaacu

SEQ ID NO: 3694317 - RNA, 23 nt, Human
uucguacaguucuucgggaagag

SEQ ID NO: 3694318 - RNA, 18 nt, Human
uucguacauaauacugaa

SEQ ID NO: 3694319 - RNA, 15 nt, Human
uucguagauauugga

SEQ ID NO: 3694320 - RNA, 13 nt, Human
uucguaugaaaau

SEQ ID NO: 3694321 - RNA, 18 nt, Human
uucguccacagcuuccug

SEQ ID NO: 3694322 - RNA, 19 nt, Human
uucguccacagcuuccugu

SEQ ID NO: 3694323 - RNA, 23 nt, Human
uucgugagccccaucuucaccca

SEQ ID NO: 3694324 - RNA, 20 nt, Human
uucgugcggaaucagcuucu

SEQ ID NO: 3694325 - RNA, 17 nt, Human
uucguucuguacuguua

SEQ ID NO: 3694326 - RNA, 20 nt, Human
uucguucuuguucuguuuug

SEQ ID NO: 3694327 - RNA, 16 nt, Human
uucguuucuguauaca

SEQ ID NO: 3694328 - RNA, 13 nt, Human
uucuaaaaaacag

SEQ ID NO: 3694329 - RNA, 14 nt, Human
uucuaaaaacuucu

SEQ ID NO: 3694330 - RNA, 14 nt, Human
uucuaaaaagauua

SEQ ID NO: 3694331 - RNA, 14 nt, Human
uucuaaaaagucag

SEQ ID NO: 3694332 - RNA, 18 nt, Human
uucuaaaaagucagaugu

SEQ ID NO: 3694333 - RNA, 16 nt, Human
uucuaaaacuguacuu

SEQ ID NO: 3694334 - RNA, 18 nt, Human
uucuaaaacuguacuuug

SEQ ID NO: 3694335 - RNA, 17 nt, Human
uucuaaaagcuuucaug

SEQ ID NO: 3694336 - RNA, 18 nt, Human
uucuaaaaucaugaaacu

SEQ ID NO: 3694337 - RNA, 15 nt, Human
uucuaaaaugugaug

SEQ ID NO: 3694338 - RNA, 23 nt, Human
uucuaaaaugugauguucuaagg

SEQ ID NO: 3694339 - RNA, 22 nt, Human
uucuaaacaagaaucagucuau

SEQ ID NO: 3694340 - RNA, 16 nt, Human
uucuaaacaagauuuu

SEQ ID NO: 3694341 - RNA, 23 nt, Human
uucuaaagauaauauuacuguuu

SEQ ID NO: 3694342 - RNA, 13 nt, Human
uucuaaagaugga

SEQ ID NO: 3694343 - RNA, 23 nt, Human
uucuaaagauucuauaguucuag

SEQ ID NO: 3694344 - RNA, 17 nt, Human
uucuaaagcucugacau

SEQ ID NO: 3694345 - RNA, 20 nt, Human
uucuaaaggccucuuccuug

SEQ ID NO: 3694346 - RNA, 20 nt, Human
uucuaaagguguugucccuu

SEQ ID NO: 3694347 - RNA, 16 nt, Human
uucuaaaguucuaaga

SEQ ID NO: 3694348 - RNA, 17 nt, Human
uucuaaaguucuaagau

SEQ ID NO: 3694349 - RNA, 23 nt, Human
uucuaaauacaugccacaucaaa

SEQ ID NO: 3694350 - RNA, 13 nt, Human
uucuaaauagcaa

SEQ ID NO: 3694351 - RNA, 22 nt, Human
uucuaaauaucccuuggacauu

SEQ ID NO: 3694352 - RNA, 18 nt, Human
uucuaaaugaauguuuac

SEQ ID NO: 3694353 - RNA, 21 nt, Human
uucuaaaugaauguuuacacu

SEQ ID NO: 3694354 - RNA, 13 nt, Human
uucuaaaugcaua

SEQ ID NO: 3694355 - RNA, 20 nt, Human
uucuaaauguuuggcaugua

SEQ ID NO: 3694356 - RNA, 14 nt, Human
uucuaaauuuuaua

SEQ ID NO: 3694357 - RNA, 18 nt, Human
uucuaaccaagaggcugg

SEQ ID NO: 3694358 - RNA, 14 nt, Human
uucuaagaaacauu

SEQ ID NO: 3694359 - RNA, 16 nt, Human
uucuaagaaacauuua

SEQ ID NO: 3694360 - RNA, 23 nt, Human
uucuaagaaacauuuauauugau

SEQ ID NO: 3694361 - RNA, 21 nt, Human
uucuaagacucaaauguucua

SEQ ID NO: 3694362 - RNA, 22 nt, Human
uucuaagacucaaauguucuaa

SEQ ID NO: 3694363 - RNA, 20 nt, Human
uucuaagacuuacucuaaga

SEQ ID NO: 3694364 - RNA, 12 nt, Human
uucuaagagaag

SEQ ID NO: 3694365 - RNA, 12 nt, Human
uucuaagaugug

SEQ ID NO: 3694366 - RNA, 21 nt, Human
uucuaagaugugauauucuaa

SEQ ID NO: 3694367 - RNA, 22 nt, Human
uucuaagaugugauauucuaag

SEQ ID NO: 3694368 - RNA, 14 nt, Human
uucuaagauucuaa

SEQ ID NO: 3694369 - RNA, 16 nt, Human
uucuaagauucuaaag

SEQ ID NO: 3694370 - RNA, 17 nt, Human
uucuaagauucuaaagg

SEQ ID NO: 3694371 - RNA, 17 nt, Human
uucuaagauucuaauga

SEQ ID NO: 3694372 - RNA, 19 nt, Human
uucuaagauucuaaugaug

SEQ ID NO: 3694373 - RNA, 18 nt, Human
uucuaaggaauaugagcu

SEQ ID NO: 3694374 - RNA, 21 nt, Human
uucuaaggaccugaaauucca

SEQ ID NO: 3694375 - RNA, 22 nt, Human
uucuaaggaccugaaauuccaa

SEQ ID NO: 3694376 - RNA, 20 nt, Human
uucuaaggccuaggauucua

SEQ ID NO: 3694377 - RNA, 21 nt, Human
uucuaaggccuaggauucuaa

SEQ ID NO: 3694378 - RNA, 13 nt, Human
uucuaaggcucug

SEQ ID NO: 3694379 - RNA, 16 nt, Human
uucuaaggcucugaga

SEQ ID NO: 3694380 - RNA, 18 nt, Human
uucuaaggcucugagagu

SEQ ID NO: 3694381 - RNA, 20 nt, Human
uucuaaggcucugagagucu

SEQ ID NO: 3694382 - RNA, 20 nt, Human
uucuaagguccgguguucua

SEQ ID NO: 3694383 - RNA, 16 nt, Human
uucuaaguaaaaccac

SEQ ID NO: 3694384 - RNA, 19 nt, Human
uucuaaguaaaaccacagc

SEQ ID NO: 3694385 - RNA, 16 nt, Human
uucuaaguaaauacaa

SEQ ID NO: 3694386 - RNA, 12 nt, Human
uucuaaguuucu

SEQ ID NO: 3694387 - RNA, 18 nt, Human
uucuaaguuucuaagauu

SEQ ID NO: 3694388 - RNA, 15 nt, Human
uucuaauaaaacaaa

SEQ ID NO: 3694389 - RNA, 18 nt, Human
uucuaauaaauuauacaa

SEQ ID NO: 3694390 - RNA, 22 nt, Human
uucuaauauauuuuuauauuua

SEQ ID NO: 3694391 - RNA, 23 nt, Human
uucuaaugauggcccauucuacu

SEQ ID NO: 3694392 - RNA, 22 nt, Human
uucuaauuaaccuuacuaauua

SEQ ID NO: 3694393 - RNA, 20 nt, Human
uucuaauuaauaaauuauuu

SEQ ID NO: 3694394 - RNA, 16 nt, Human
uucuaauuagauuaac

SEQ ID NO: 3694395 - RNA, 14 nt, Human
uucuaauugccaug

SEQ ID NO: 3694396 - RNA, 15 nt, Human
uucuaauuugcugcu

SEQ ID NO: 3694397 - RNA, 16 nt, Human
uucuaauuugcugcug

SEQ ID NO: 3694398 - RNA, 22 nt, Human
uucuaauuugcugcugauaaug

SEQ ID NO: 3694399 - RNA, 17 nt, Human
uucuaauuuuggaugga

SEQ ID NO: 3694400 - RNA, 14 nt, Human
uucuacaaagcacu

SEQ ID NO: 3694401 - RNA, 18 nt, Human
uucuacaaugugaacuuu

SEQ ID NO: 3694402 - RNA, 22 nt, Human
uucuacacagugggaacucuga

SEQ ID NO: 3694403 - RNA, 14 nt, Human
uucuacacucuccu

SEQ ID NO: 3694404 - RNA, 17 nt, Human
uucuacacucuccuggg

SEQ ID NO: 3694405 - RNA, 23 nt, Human
uucuacacugggugcugauccuu

SEQ ID NO: 3694406 - RNA, 18 nt, Human
uucuaccaacuggaagca

SEQ ID NO: 3694407 - RNA, 18 nt, Human
uucuaccauuucagagag

SEQ ID NO: 3694408 - RNA, 19 nt, Human
uucuacccagcgagcccug

SEQ ID NO: 3694409 - RNA, 20 nt, Human
uucuacccagcgagcccugg

SEQ ID NO: 3694410 - RNA, 14 nt, Human
uucuacccaggugc

SEQ ID NO: 3694411 - RNA, 14 nt, Human
uucuacggaucauc

SEQ ID NO: 3694412 - RNA, 20 nt, Human
uucuacuaaaaauacaaaaa

SEQ ID NO: 3694413 - RNA, 15 nt, Human
uucuacucauauaua

SEQ ID NO: 3694414 - RNA, 13 nt, Human
uucuacugugacu

SEQ ID NO: 3694415 - RNA, 13 nt, Human
uucuacuugcucu

SEQ ID NO: 3694416 - RNA, 14 nt, Human
uucuacuugcucug

SEQ ID NO: 3694417 - RNA, 19 nt, Human
uucuacuugcucuggaccu

SEQ ID NO: 3694418 - RNA, 22 nt, Human
uucuacuugcucuggaccugcc

SEQ ID NO: 3694419 - RNA, 23 nt, Human
uucuagaaagccuguuccccuca

SEQ ID NO: 3694420 - RNA, 21 nt, Human
uucuagaacaucccugccagc

SEQ ID NO: 3694421 - RNA, 22 nt, Human
uucuagaauuauaagucacaaa

SEQ ID NO: 3694422 - RNA, 21 nt, Human
uucuagaauuuaucacacuuc

SEQ ID NO: 3694423 - RNA, 14 nt, Human
uucuagagaagagg

SEQ ID NO: 3694424 - RNA, 19 nt, Human
uucuagaguucagaguccu

SEQ ID NO: 3694425 - RNA, 16 nt, Human
uucuagauacaauaaa

SEQ ID NO: 3694426 - RNA, 20 nt, Human
uucuagauacaauaaauugc

SEQ ID NO: 3694427 - RNA, 16 nt, Human
uucuagaucagaugcu

SEQ ID NO: 3694428 - RNA, 22 nt, Human
uucuagaucagaugcuccaaga

SEQ ID NO: 3694429 - RNA, 24 nt, Human
uucuagaucagaugcuccaagauu

SEQ ID NO: 3694430 - RNA, 15 nt, Human
uucuagauuaccaug

SEQ ID NO: 3694431 - RNA, 12 nt, Human
uucuagcacugg

SEQ ID NO: 3694432 - RNA, 14 nt, Human
uucuagcacuggcc

SEQ ID NO: 3694433 - RNA, 15 nt, Human
uucuagcauggcaua

SEQ ID NO: 3694434 - RNA, 18 nt, Human
uucuagcauggcauauuu

SEQ ID NO: 3694435 - RNA, 16 nt, Human
uucuagcauggcugcc

SEQ ID NO: 3694436 - RNA, 21 nt, Human
uucuagcccgaauacaaacac

SEQ ID NO: 3694437 - RNA, 20 nt, Human
uucuagcuguugagcuguuu

SEQ ID NO: 3694438 - RNA, 21 nt, Human
uucuaggcacuguaguucuaa

SEQ ID NO: 3694439 - RNA, 14 nt, Human
uucuagguaggaaa

SEQ ID NO: 3694440 - RNA, 18 nt, Human
uucuagguaggaaaugug

SEQ ID NO: 3694441 - RNA, 18 nt, Human
uucuagguggcaaggcug

SEQ ID NO: 3694442 - RNA, 13 nt, Human
uucuagguuucaa

SEQ ID NO: 3694443 - RNA, 14 nt, Human
uucuagucucucug

SEQ ID NO: 3694444 - RNA, 15 nt, Human
uucuaguggucuuug

SEQ ID NO: 3694445 - RNA, 20 nt, Human
uucuaguugaggaguuuccu

SEQ ID NO: 3694446 - RNA, 15 nt, Human
uucuaguuugcucau

SEQ ID NO: 3694447 - RNA, 19 nt, Human
uucuauaaaauacugguau

SEQ ID NO: 3694448 - RNA, 15 nt, Human
uucuauaacagauau

SEQ ID NO: 3694449 - RNA, 21 nt, Human
uucuauaaggccauaaaacag

SEQ ID NO: 3694450 - RNA, 22 nt, Human
uucuauaaguuuuauguuaaau

SEQ ID NO: 3694451 - RNA, 14 nt, Human
uucuauaauuuaaa

SEQ ID NO: 3694452 - RNA, 13 nt, Human
uucuauacaaaua

SEQ ID NO: 3694453 - RNA, 23 nt, Human
uucuauagcagauuguguaacaa

SEQ ID NO: 3694454 - RNA, 16 nt, Human
uucuauaguucuagac

SEQ ID NO: 3694455 - RNA, 17 nt, Human
uucuauaguucuagaca

SEQ ID NO: 3694456 - RNA, 14 nt, Human
uucuauauguuuaa

SEQ ID NO: 3694457 - RNA, 14 nt, Human
uucuaucacauauu

SEQ ID NO: 3694458 - RNA, 17 nt, Human
uucuaucauuuuuguac

SEQ ID NO: 3694459 - RNA, 20 nt, Human
uucuaucauuuuuguacagu

SEQ ID NO: 3694460 - RNA, 19 nt, Human
uuacaacauaaucuaguuu

SEQ ID NO: 3694461 - RNA, 19 nt, Human
uuacaacccgguucacucu

SEQ ID NO: 3694462 - RNA, 23 nt, Human
uuacaacggagucaaaaauuaaa

SEQ ID NO: 3694463 - RNA, 19 nt, Human
uuacaacugaccaaguuuc

SEQ ID NO: 3694464 - RNA, 22 nt, Human
uuacaacugccucgaaacacag

SEQ ID NO: 3694465 - RNA, 16 nt, Human
uuacaagaagaacuca

SEQ ID NO: 3694466 - RNA, 21 nt, Human
uuacaagaaguuuauucucau

SEQ ID NO: 3694467 - RNA, 20 nt, Human
uuacaagggaagauuuaugu

SEQ ID NO: 3694468 - RNA, 17 nt, Human
uuacaaguauacuuaua

SEQ ID NO: 3694469 - RNA, 14 nt, Human
uuacaaguguauau

SEQ ID NO: 3694470 - RNA, 17 nt, Human
uuacaauaguucugugg

SEQ ID NO: 3694471 - RNA, 15 nt, Human
uuacaauauuugugu

SEQ ID NO: 3694472 - RNA, 22 nt, Human
uuacaaucauugcugaaaaugg

SEQ ID NO: 3694473 - RNA, 23 nt, Human
uuacaaucauugcugaaaauggu

SEQ ID NO: 3694474 - RNA, 13 nt, Human
uuacaauguauua

SEQ ID NO: 3694475 - RNA, 18 nt, Human
uuacaauucccugcuguc

SEQ ID NO: 3694476 - RNA, 18 nt, Human
uuacacaaugguuuuuaa

SEQ ID NO: 3694477 - RNA, 20 nt, Human
uuacacaaugguuuuuaaau

SEQ ID NO: 3694478 - RNA, 22 nt, Human
uuacacaaugguuuuuaaauuu

SEQ ID NO: 3694479 - RNA, 18 nt, Human
uuacacacuguacacaua

SEQ ID NO: 3694480 - RNA, 14 nt, Human
uuacacagaaacac

SEQ ID NO: 3694481 - RNA, 18 nt, Human
uuacacagaaaugcugcu

SEQ ID NO: 3694482 - RNA, 18 nt, Human
uuacacaucucagacccu

SEQ ID NO: 3694483 - RNA, 17 nt, Human
uuacacaucuucaacag

SEQ ID NO: 3694484 - RNA, 16 nt, Human
uuacacauuagauuuu

SEQ ID NO: 3694485 - RNA, 23 nt, Human
uuacacauuuuucagauauaaaa

SEQ ID NO: 3694486 - RNA, 14 nt, Human
uuacacgcuuuugu

SEQ ID NO: 3694487 - RNA, 23 nt, Human
uuacacguggaggaaugcucccc

SEQ ID NO: 3694488 - RNA, 14 nt, Human
uuacacugccaucu

SEQ ID NO: 3694489 - RNA, 21 nt, Human
uuacacuggaggagagaagaa

SEQ ID NO: 3694490 - RNA, 22 nt, Human
uuacacuggaggagagaagaau

SEQ ID NO: 3694491 - RNA, 20 nt, Human
uuacacuggcaaugguaguu

SEQ ID NO: 3694492 - RNA, 21 nt, Human
uuacacuguuauuuucagcau

SEQ ID NO: 3694493 - RNA, 14 nt, Human
uuacacuuuugaga

SEQ ID NO: 3694494 - RNA, 15 nt, Human
uuacagaaaaaucuu

SEQ ID NO: 3694495 - RNA, 19 nt, Human
uuacagaaaguggugcuca

SEQ ID NO: 3694496 - RNA, 17 nt, Human
uuacagaaauacuauaa

SEQ ID NO: 3694497 - RNA, 20 nt, Human
uuacagaacacgcuuucaca

SEQ ID NO: 3694498 - RNA, 14 nt, Human
uuacagagaggaga

SEQ ID NO: 3694499 - RNA, 20 nt, Human
uuacagagaggagaaacaca

SEQ ID NO: 3694500 - RNA, 16 nt, Human
uuacagaggaaguuau

SEQ ID NO: 3694501 - RNA, 16 nt, Human
uuacagauuuaauaca

SEQ ID NO: 3694502 - RNA, 22 nt, Human
uuacagccaagugccaaaugcu

SEQ ID NO: 3694503 - RNA, 17 nt, Human
uuacagccucacuugaa

SEQ ID NO: 3694504 - RNA, 15 nt, Human
uuacagccucugacu

SEQ ID NO: 3694505 - RNA, 15 nt, Human
uuacagcgagaggca

SEQ ID NO: 3694506 - RNA, 21 nt, Human
uuacagcgagaggcagagaaa

SEQ ID NO: 3694507 - RNA, 13 nt, Human
uuacagcugccug

SEQ ID NO: 3694508 - RNA, 14 nt, Human
uuacagcugccugc

SEQ ID NO: 3694509 - RNA, 21 nt, Human
uuacagcuggguggcacugcc

SEQ ID NO: 3694510 - RNA, 16 nt, Human
uuacaggaaguacugg

SEQ ID NO: 3694511 - RNA, 24 nt, Human
uuacaggcaccgagaauguuguau

SEQ ID NO: 3694512 - RNA, 17 nt, Human
uuacaggcccugcuccu

SEQ ID NO: 3694513 - RNA, 22 nt, Human
uuacaggcccugcuccugcagc

SEQ ID NO: 3694514 - RNA, 18 nt, Human
uuacagggagccuccugc

SEQ ID NO: 3694515 - RNA, 19 nt, Human
uuacagggagccuccugcc

SEQ ID NO: 3694516 - RNA, 18 nt, Human
uuacagggagcugggaca

SEQ ID NO: 3694517 - RNA, 22 nt, Human
uuacaggguaacugugcugaau

SEQ ID NO: 3694518 - RNA, 19 nt, Human
uuacaggugugcaccacca

SEQ ID NO: 3694519 - RNA, 13 nt, Human
uuacaguaaauaa

SEQ ID NO: 3694520 - RNA, 15 nt, Human
uuacaguaaauaaau

SEQ ID NO: 3694521 - RNA, 18 nt, Human
uuacaguaaauaaauugu

SEQ ID NO: 3694522 - RNA, 22 nt, Human
uuacaguaaugucauaaaguga

SEQ ID NO: 3694523 - RNA, 17 nt, Human
uuacaguccuucaaaau

SEQ ID NO: 3694524 - RNA, 14 nt, Human
uuacagugaagaaa

SEQ ID NO: 3694525 - RNA, 17 nt, Human
uuacaguguagcuugcc

SEQ ID NO: 3694526 - RNA, 12 nt, Human
uuacaguguuua

SEQ ID NO: 3694527 - RNA, 18 nt, Human
uuacaguuacuuuuccuu

SEQ ID NO: 3694528 - RNA, 12 nt, Human
uuacaguucugu

SEQ ID NO: 3694529 - RNA, 22 nt, Human
uuacauaauuuaguuguuucua

SEQ ID NO: 3694530 - RNA, 16 nt, Human
uuacauacuuuaucaa

SEQ ID NO: 3694531 - RNA, 13 nt, Human
uuacaucauuuuu

SEQ ID NO: 3694532 - RNA, 18 nt, Human
uuacaucuguuuuaaauu

SEQ ID NO: 3694533 - RNA, 15 nt, Human
uuacaucuuucacau

SEQ ID NO: 3694534 - RNA, 15 nt, Human
uuacaugaaguauuu

SEQ ID NO: 3694535 - RNA, 17 nt, Human
uuacaugaauugcauuu

SEQ ID NO: 3694536 - RNA, 14 nt, Human
uuacaugacacagc

SEQ ID NO: 3694537 - RNA, 23 nt, Human
uuacaugcaauuuauuaaaauga

SEQ ID NO: 3694538 - RNA, 14 nt, Human
uuacaugcauacuu

SEQ ID NO: 3694539 - RNA, 19 nt, Human
uuacaugcauacuucaaaa

SEQ ID NO: 3694540 - RNA, 22 nt, Human
uuacaugcauacuucaaaagua

SEQ ID NO: 3694541 - RNA, 13 nt, Human
uuacaugcauuug

SEQ ID NO: 3694542 - RNA, 12 nt, Human
uuacaugcuuau

SEQ ID NO: 3694543 - RNA, 13 nt, Human
uuacaugcuuauu

SEQ ID NO: 3694544 - RNA, 19 nt, Human
uuacaugcuuauuccauga

SEQ ID NO: 3694545 - RNA, 17 nt, Human
uuacauggacagaauuu

SEQ ID NO: 3694546 - RNA, 22 nt, Human
uuacaugguuaagguaaaguaa

SEQ ID NO: 3694547 - RNA, 12 nt, Human
uuacaugugaug

SEQ ID NO: 3694548 - RNA, 12 nt, Human
uuacauguuugc

SEQ ID NO: 3694549 - RNA, 19 nt, Human
uuacauuauuaucaacaau

SEQ ID NO: 3694550 - RNA, 22 nt, Human
uuacauuccuugauaauguugu

SEQ ID NO: 3694551 - RNA, 12 nt, Human
uuacauuguaaa

SEQ ID NO: 3694552 - RNA, 13 nt, Human
uuacauuguucaa

SEQ ID NO: 3694553 - RNA, 15 nt, Human
uuacauuuaaagcau

SEQ ID NO: 3694554 - RNA, 18 nt, Human
uuacauuuacaaacugaa

SEQ ID NO: 3694555 - RNA, 19 nt, Human
uuacauuuacaaacugaag

SEQ ID NO: 3694556 - RNA, 17 nt, Human
uuacauuuccaaaugaa

SEQ ID NO: 3694557 - RNA, 14 nt, Human
uuacauuuccuaaa

SEQ ID NO: 3694558 - RNA, 20 nt, Human
uuacauuugaugcaugucuu

SEQ ID NO: 3694559 - RNA, 18 nt, Human
uuacauuuguaauuuaag

SEQ ID NO: 3694560 - RNA, 15 nt, Human
uuacauuuguauaaa

SEQ ID NO: 3694561 - RNA, 16 nt, Human
uuacauuuuacuuuuu

SEQ ID NO: 3694562 - RNA, 14 nt, Human
uuacauuuuauggu

SEQ ID NO: 3694563 - RNA, 23 nt, Human
uuacauuuuauggugccuaguau

SEQ ID NO: 3694564 - RNA, 12 nt, Human
uuacauuuuuaa

SEQ ID NO: 3694565 - RNA, 22 nt, Human
uuacauuuuuaagugcugcauu

SEQ ID NO: 3694566 - RNA, 13 nt, Human
uuacauuuuuaca

SEQ ID NO: 3694567 - RNA, 14 nt, Human
uuacauuuuuacaa

SEQ ID NO: 3694568 - RNA, 19 nt, Human
uuacauuuuuauuuaugaa

SEQ ID NO: 3694569 - RNA, 12 nt, Human
uuaccaaaaauu

SEQ ID NO: 3694570 - RNA, 15 nt, Human
uuaccaaaagucaac

SEQ ID NO: 3694571 - RNA, 14 nt, Human
uuaccaaacagcaa

SEQ ID NO: 3694572 - RNA, 16 nt, Human
uuaccaaagaugaaug

SEQ ID NO: 3694573 - RNA, 14 nt, Human
uuaccaaguuauau

SEQ ID NO: 3694574 - RNA, 15 nt, Human
uuaccacacaucuau

SEQ ID NO: 3694575 - RNA, 20 nt, Human
uuaccacacaucuaugauau

SEQ ID NO: 3694576 - RNA, 22 nt, Human
uuaccacugaagauagaagaaa

SEQ ID NO: 3694577 - RNA, 17 nt, Human
uuaccagaagcuuccau

SEQ ID NO: 3694578 - RNA, 19 nt, Human
uuaccagauaaugcuacuu

SEQ ID NO: 3694579 - RNA, 19 nt, Human
uuaccagcaagaauaaaaa

SEQ ID NO: 3694580 - RNA, 19 nt, Human
uuaccagcagagcaccuua

SEQ ID NO: 3694581 - RNA, 14 nt, Human
uuaccaguugccuu

SEQ ID NO: 3694582 - RNA, 20 nt, Human
uuaccaugagaagagggccu

SEQ ID NO: 3694583 - RNA, 14 nt, Human
uuaccauguaaugg

SEQ ID NO: 3694584 - RNA, 16 nt, Human
uuaccauuggaaauuu

SEQ ID NO: 3694585 - RNA, 15 nt, Human
uuaccauuuguaaua

SEQ ID NO: 3694586 - RNA, 20 nt, Human
uuaccauuuguaauaaagua

SEQ ID NO: 3694587 - RNA, 24 nt, Human
uuacccaaaaacuaaaucucuaau

SEQ ID NO: 3694588 - RNA, 13 nt, Human
uuacccaagcaaa

SEQ ID NO: 3694589 - RNA, 15 nt, Human
uuacccaccuagaac

SEQ ID NO: 3694590 - RNA, 16 nt, Human
uuacccaccuagaaca

SEQ ID NO: 3694591 - RNA, 21 nt, Human
uuacccagagaauauauacau

SEQ ID NO: 3694592 - RNA, 16 nt, Human
uuacccagaguuuuua

SEQ ID NO: 3694593 - RNA, 20 nt, Human
uuacccauauccccucuccc

SEQ ID NO: 3694594 - RNA, 23 nt, Human
uuacccauuugggugggaguguu

SEQ ID NO: 3694595 - RNA, 21 nt, Human
uuaccccauggcugcacaguu

SEQ ID NO: 3694596 - RNA, 19 nt, Human
uuacccucauguucuuaau

SEQ ID NO: 3694597 - RNA, 13 nt, Human
uuacccucuuugc

SEQ ID NO: 3694598 - RNA, 15 nt, Human
uuacccucuuugcug

SEQ ID NO: 3694599 - RNA, 13 nt, Human
uuacccuggcccc

SEQ ID NO: 3694600 - RNA, 17 nt, Human
uuacccuggccccucuc

SEQ ID NO: 3694601 - RNA, 12 nt, Human
uuacccuuagaa

SEQ ID NO: 3694602 - RNA, 17 nt, Human
uuacccuucccugcacu

SEQ ID NO: 3694603 - RNA, 16 nt, Human
uuacccuucugugccc

SEQ ID NO: 3694604 - RNA, 19 nt, Human
uuacccuucugugcccagc

SEQ ID NO: 3694605 - RNA, 13 nt, Human
uuacccuuuagac

SEQ ID NO: 3694606 - RNA, 16 nt, Human
uuaccguuucuucccu

SEQ ID NO: 3694607 - RNA, 17 nt, Human
uuaccuaaacagauaua

SEQ ID NO: 3694608 - RNA, 14 nt, Human
uuaccuaagauuac

SEQ ID NO: 3694609 - RNA, 21 nt, Human
uuaccuagcuaauuauuuaau

SEQ ID NO: 3694610 - RNA, 23 nt, Human
uacugccaaccucgcuccaacuc

SEQ ID NO: 3694611 - RNA, 14 nt, Human
uacugccagaugcu

SEQ ID NO: 3694612 - RNA, 17 nt, Human
uacugccagaugcugau

SEQ ID NO: 3694613 - RNA, 15 nt, Human
uacugccauccuggc

SEQ ID NO: 3694614 - RNA, 22 nt, Human
uacugccauccuggcccagggc

SEQ ID NO: 3694615 - RNA, 20 nt, Human
uacugccauucacuucauaa

SEQ ID NO: 3694616 - RNA, 23 nt, Human
uacugcccaauaugcaguucugc

SEQ ID NO: 3694617 - RNA, 15 nt, Human
uacugccugaauaaa

SEQ ID NO: 3694618 - RNA, 10 nt, Human
uacugccugc

SEQ ID NO: 3694619 - RNA, 14 nt, Human
uacugccugcuugg

SEQ ID NO: 3694620 - RNA, 12 nt, Human
uacugccuugaa

SEQ ID NO: 3694621 - RNA, 15 nt, Human
uacugccuuuagaaa

SEQ ID NO: 3694622 - RNA, 18 nt, Human
uacugccuuuagaaaaua

SEQ ID NO: 3694623 - RNA, 16 nt, Human
uacugcgacuuucugc

SEQ ID NO: 3694624 - RNA, 20 nt, Human
uacugcgacuuucugccugg

SEQ ID NO: 3694625 - RNA, 22 nt, Human
uacugcgacuuucugccuggag

SEQ ID NO: 3694626 - RNA, 19 nt, Human
uacugcuaaguauuuccca

SEQ ID NO: 3694627 - RNA, 22 nt, Human
uacugcuaaguauuucccagca

SEQ ID NO: 3694628 - RNA, 15 nt, Human
uacugcuacuguaau

SEQ ID NO: 3694629 - RNA, 20 nt, Human
uacugcuacuguaauuuuau

SEQ ID NO: 3694630 - RNA, 12 nt, Human
uacugcucugag

SEQ ID NO: 3694631 - RNA, 14 nt, Human
uacugcucugagaa

SEQ ID NO: 3694632 - RNA, 19 nt, Human
uacugcuuggagcugagca

SEQ ID NO: 3694633 - RNA, 24 nt, Human
uacugcuuggagcugagcaaauca

SEQ ID NO: 3694634 - RNA, 14 nt, Human
uacuggaaagcuuu

SEQ ID NO: 3694635 - RNA, 18 nt, Human
uacuggaaauuaggggau

SEQ ID NO: 3694636 - RNA, 21 nt, Human
uacuggaacccuuuuaaaguu

SEQ ID NO: 3694637 - RNA, 23 nt, Human
uacuggaaguuuugcauuuaugg

SEQ ID NO: 3694638 - RNA, 16 nt, Human
uacuggagaaaaugga

SEQ ID NO: 3694639 - RNA, 19 nt, Human
uacuggagcuucauuuugg

SEQ ID NO: 3694640 - RNA, 17 nt, Human
uacuggauaaauuguuu

SEQ ID NO: 3694641 - RNA, 13 nt, Human
uacuggauucuua

SEQ ID NO: 3694642 - RNA, 17 nt, Human
uacuggcauaguuucau

SEQ ID NO: 3694643 - RNA, 15 nt, Human
uacuggcguggauua

SEQ ID NO: 3694644 - RNA, 13 nt, Human
uacugggaaggcu

SEQ ID NO: 3694645 - RNA, 23 nt, Human
uacugggccuuagugggccaggg

SEQ ID NO: 3694646 - RNA, 17 nt, Human
uacugguaagauuguua

SEQ ID NO: 3694647 - RNA, 13 nt, Human
uacugguccaaaa

SEQ ID NO: 3694648 - RNA, 13 nt, Human
uacuggucucucu

SEQ ID NO: 3694649 - RNA, 18 nt, Human
uacugguugcauggaaau

SEQ ID NO: 3694650 - RNA, 15 nt, Human
uacugguuggcuccc

SEQ ID NO: 3694651 - RNA, 12 nt, Human
uacuguaaagaa

SEQ ID NO: 3694652 - RNA, 13 nt, Human
uacuguaaagaaa

SEQ ID NO: 3694653 - RNA, 16 nt, Human
uacuguaaagaaagag

SEQ ID NO: 3694654 - RNA, 19 nt, Human
uacuguaaagaaagagaga

SEQ ID NO: 3694655 - RNA, 18 nt, Human
uacuguaacacuuuacaa

SEQ ID NO: 3694656 - RNA, 13 nt, Human
uacuguaagaaaa

SEQ ID NO: 3694657 - RNA, 14 nt, Human
uacuguaagaaaau

SEQ ID NO: 3694658 - RNA, 18 nt, Human
uacuguaagaauaauuua

SEQ ID NO: 3694659 - RNA, 15 nt, Human
uacuguaagacauua

SEQ ID NO: 3694660 - RNA, 19 nt, Human
uacuguaauaauaccucaa

SEQ ID NO: 3694661 - RNA, 16 nt, Human
uacuguaauuccucaa

SEQ ID NO: 3694662 - RNA, 15 nt, Human
uacuguaauuuguga

SEQ ID NO: 3694663 - RNA, 19 nt, Human
uacuguaauuugugauaca

SEQ ID NO: 3694664 - RNA, 20 nt, Human
uacuguaauuuuauaugaag

SEQ ID NO: 3694665 - RNA, 14 nt, Human
uacuguacagcugg

SEQ ID NO: 3694666 - RNA, 15 nt, Human
uacuguacaugggac

SEQ ID NO: 3694667 - RNA, 21 nt, Human
uacuguacuaauucuuacacu

SEQ ID NO: 3694668 - RNA, 13 nt, Human
uacuguaguuuuu

SEQ ID NO: 3694669 - RNA, 15 nt, Human
uacuguauauucagg

SEQ ID NO: 3694670 - RNA, 13 nt, Human
uacuguaugauca

SEQ ID NO: 3694671 - RNA, 16 nt, Human
uacuguaugaucaaau

SEQ ID NO: 3694672 - RNA, 17 nt, Human
uacuguaugaucaaaug

SEQ ID NO: 3694673 - RNA, 19 nt, Human
uacuguaugaucaaauguu

SEQ ID NO: 3694674 - RNA, 21 nt, Human
uacuguaugaucaaauguuua

SEQ ID NO: 3694675 - RNA, 22 nt, Human
uacuguaugaucaaauguuuaa

SEQ ID NO: 3694676 - RNA, 16 nt, Human
uacuguaugugaugaa

SEQ ID NO: 3694677 - RNA, 17 nt, Human
uacugucaaaugaugug

SEQ ID NO: 3694678 - RNA, 20 nt, Human
uacugucaaaugaugugcaa

SEQ ID NO: 3694679 - RNA, 14 nt, Human
uacugucaauaaac

SEQ ID NO: 3694680 - RNA, 23 nt, Human
uacugucagcuccccucggagaa

SEQ ID NO: 3694681 - RNA, 23 nt, Human
uacugucauccucaaagaaagug

SEQ ID NO: 3694682 - RNA, 17 nt, Human
uacugucuauuaauauu

SEQ ID NO: 3694683 - RNA, 16 nt, Human
uacugucugguuuuaa

SEQ ID NO: 3694684 - RNA, 19 nt, Human
uacugucugguuuuaacaa

SEQ ID NO: 3694685 - RNA, 19 nt, Human
uacugucuuaauuaaguaa

SEQ ID NO: 3694686 - RNA, 20 nt, Human
uacugucuuaauuaaguaaa

SEQ ID NO: 3694687 - RNA, 21 nt, Human
uacugucuucaguaagccgug

SEQ ID NO: 3694688 - RNA, 15 nt, Human
uacugugcuggagcc

SEQ ID NO: 3694689 - RNA, 16 nt, Human
uacugugcuggagcca

SEQ ID NO: 3694690 - RNA, 19 nt, Human
uacuguggaaaaauauuua

SEQ ID NO: 3694691 - RNA, 14 nt, Human
uacuguggaggaag

SEQ ID NO: 3694692 - RNA, 12 nt, Human
uacugugggcaa

SEQ ID NO: 3694693 - RNA, 19 nt, Human
uacugugggcaauuuagaa

SEQ ID NO: 3694694 - RNA, 16 nt, Human
uacugugguguuuugu

SEQ ID NO: 3694695 - RNA, 18 nt, Human
uacuguguacuguauaga

SEQ ID NO: 3694696 - RNA, 13 nt, Human
uacuguguggaac

SEQ ID NO: 3694697 - RNA, 17 nt, Human
uacugugugugagugug

SEQ ID NO: 3694698 - RNA, 23 nt, Human
uacugugugugagugugaauaua

SEQ ID NO: 3694699 - RNA, 18 nt, Human
uacugugugugugaauga

SEQ ID NO: 3694700 - RNA, 19 nt, Human
uacugugugugugaaugaa

SEQ ID NO: 3694701 - RNA, 15 nt, Human
uacuguguuaugcaa

SEQ ID NO: 3694702 - RNA, 16 nt, Human
uacuguguuaugcaaa

SEQ ID NO: 3694703 - RNA, 13 nt, Human
uacuguguuccug

SEQ ID NO: 3694704 - RNA, 14 nt, Human
uacuguguuccugg

SEQ ID NO: 3694705 - RNA, 13 nt, Human
uacuguguuucag

SEQ ID NO: 3694706 - RNA, 19 nt, Human
uacuguuaaccauuuaagu

SEQ ID NO: 3694707 - RNA, 14 nt, Human
uacuguuacuugau

SEQ ID NO: 3694708 - RNA, 17 nt, Human
uacuguuacuugauaac

SEQ ID NO: 3694709 - RNA, 23 nt, Human
uacuguucaaugguucugaaaua

SEQ ID NO: 3694710 - RNA, 23 nt, Human
uacuguucggaagggguuccuca

SEQ ID NO: 3694711 - RNA, 15 nt, Human
uacuguucuaaagcu

SEQ ID NO: 3694712 - RNA, 12 nt, Human
uacuguucucuu

SEQ ID NO: 3694713 - RNA, 14 nt, Human
uacuguucuguguc

SEQ ID NO: 3694714 - RNA, 16 nt, Human
uacuguucuugcugcu

SEQ ID NO: 3694715 - RNA, 18 nt, Human
uacuguucuugcugcuag

SEQ ID NO: 3694716 - RNA, 19 nt, Human
uacuguucuugcugcuaga

SEQ ID NO: 3694717 - RNA, 22 nt, Human
uacuguucuugcugcuagaacu

SEQ ID NO: 3694718 - RNA, 21 nt, Human
uacuguuuaagacacuuccgu

SEQ ID NO: 3694719 - RNA, 21 nt, Human
uacuguuuaccauuuuucauu

SEQ ID NO: 3694720 - RNA, 19 nt, Human
uacuguuuauuaaaguaca

SEQ ID NO: 3694721 - RNA, 18 nt, Human
uacuuaaaaauuuauuag

SEQ ID NO: 3694722 - RNA, 14 nt, Human
uacuuaagacuuaa

SEQ ID NO: 3694723 - RNA, 15 nt, Human
uacuuaagagaaaug

SEQ ID NO: 3694724 - RNA, 13 nt, Human
uacuuaauaaauu

SEQ ID NO: 3694725 - RNA, 14 nt, Human
uacuuaauaaauuc

SEQ ID NO: 3694726 - RNA, 18 nt, Human
uacuuaauuccuuucuca

SEQ ID NO: 3694727 - RNA, 13 nt, Human
uacuuaauuucuu

SEQ ID NO: 3694728 - RNA, 19 nt, Human
uacuuacaugcauuacugc

SEQ ID NO: 3694729 - RNA, 15 nt, Human
uacuuacauucucua

SEQ ID NO: 3694730 - RNA, 17 nt, Human
uacuuaccauaugugcu

SEQ ID NO: 3694731 - RNA, 16 nt, Human
uacuuaccuaaacaga

SEQ ID NO: 3694732 - RNA, 19 nt, Human
uacuuaccuagugaaacuu

SEQ ID NO: 3694733 - RNA, 16 nt, Human
uacuuagaguuucugu

SEQ ID NO: 3694734 - RNA, 17 nt, Human
uacuuagcacuuggccu

SEQ ID NO: 3694735 - RNA, 19 nt, Human
uacuuagcauccuaagaaa

SEQ ID NO: 3694736 - RNA, 21 nt, Human
uacuuagcauccuaagaaaua

SEQ ID NO: 3694737 - RNA, 15 nt, Human
uacuuagcuuaucaa

SEQ ID NO: 3694738 - RNA, 16 nt, Human
uacuuauauuuucgua

SEQ ID NO: 3694739 - RNA, 20 nt, Human
uacuuaucauccacauuguu

SEQ ID NO: 3694740 - RNA, 18 nt, Human
uacuuaucccugcccauu

SEQ ID NO: 3694741 - RNA, 15 nt, Human
uacuuauucauugug

SEQ ID NO: 3694742 - RNA, 18 nt, Human
uacuuauuuguauauggu

SEQ ID NO: 3694743 - RNA, 17 nt, Human
uacuuauuuuugacagu

SEQ ID NO: 3694744 - RNA, 19 nt, Human
uacuuauuuuugacagugu

SEQ ID NO: 3694745 - RNA, 12 nt, Human
uacuucaaaagu

SEQ ID NO: 3694746 - RNA, 14 nt, Human
uacuucaaaaguau

SEQ ID NO: 3694747 - RNA, 18 nt, Human
uacuucaaguuaaaguga

SEQ ID NO: 3694748 - RNA, 21 nt, Human
uacuucaaguuaaagugaaua

SEQ ID NO: 3694749 - RNA, 23 nt, Human
uacuucaaguuaaagugaauaac

SEQ ID NO: 3694750 - RNA, 19 nt, Human
uacuucacugucaggaaga

SEQ ID NO: 3694751 - RNA, 15 nt, Human
uacuucagcaagaga

SEQ ID NO: 3694752 - RNA, 22 nt, Human
uacuucagcaagagagaaccua

SEQ ID NO: 3694753 - RNA, 19 nt, Human
uacuucaggggcacuucau

SEQ ID NO: 3694754 - RNA, 22 nt, Human
uacuucaggggcacuucauuga

SEQ ID NO: 3694755 - RNA, 14 nt, Human
uacuuccaaacuaa

SEQ ID NO: 3694756 - RNA, 23 nt, Human
uacuucccauuuuggaaguuuuc

SEQ ID NO: 3694757 - RNA, 22 nt, Human
uacuuccugaguggccagggaa

SEQ ID NO: 3694758 - RNA, 22 nt, Human
uacuuccugccuggucuccugc

SEQ ID NO: 3694759 - RNA, 18 nt, Human
uacuucgacacuguucuu

SEQ ID NO: 3694760 - RNA, 20 nt, Human
uucuauccaaacauguauuu

SEQ ID NO: 3694761 - RNA, 14 nt, Human
uucuaucccaaacu

SEQ ID NO: 3694762 - RNA, 15 nt, Human
uucuaucuacugauu

SEQ ID NO: 3694763 - RNA, 20 nt, Human
uucuaucuuuuguuuccuuu

SEQ ID NO: 3694764 - RNA, 14 nt, Human
uucuaugaaauauu

SEQ ID NO: 3694765 - RNA, 17 nt, Human
uucuaugacacaugcaa

SEQ ID NO: 3694766 - RNA, 15 nt, Human
uucuaugcugcuuuu

SEQ ID NO: 3694767 - RNA, 19 nt, Human
uucuaugguuaugaaagaa

SEQ ID NO: 3694768 - RNA, 13 nt, Human
uucuauguacuag

SEQ ID NO: 3694769 - RNA, 15 nt, Human
uucuauguacuagua

SEQ ID NO: 3694770 - RNA, 18 nt, Human
uucuauguacuaguacug

SEQ ID NO: 3694771 - RNA, 15 nt, Human
uucuauuaaaagacu

SEQ ID NO: 3694772 - RNA, 18 nt, Human
uucuauuaaaagacucau

SEQ ID NO: 3694773 - RNA, 18 nt, Human
uucuauuaaaagugggaa

SEQ ID NO: 3694774 - RNA, 23 nt, Human
uucuauuaaaagugggaauuagg

SEQ ID NO: 3694775 - RNA, 15 nt, Human
uucuauuaaauaguu

SEQ ID NO: 3694776 - RNA, 20 nt, Human
uucuauuagccagucuuuac

SEQ ID NO: 3694777 - RNA, 18 nt, Human
uucuauuauggaaaacug

SEQ ID NO: 3694778 - RNA, 22 nt, Human
uucuauucaagguggccaaauu

SEQ ID NO: 3694779 - RNA, 13 nt, Human
uucuauugaaaaa

SEQ ID NO: 3694780 - RNA, 14 nt, Human
uucuauugaaaaau

SEQ ID NO: 3694781 - RNA, 23 nt, Human
uucuauugacuucaaugauagua

SEQ ID NO: 3694782 - RNA, 18 nt, Human
uucuauugcaguuauaga

SEQ ID NO: 3694783 - RNA, 15 nt, Human
uucuauugccucuga

SEQ ID NO: 3694784 - RNA, 18 nt, Human
uucuauugccuucuuuga

SEQ ID NO: 3694785 - RNA, 19 nt, Human
uucuauugccuucuuugaa

SEQ ID NO: 3694786 - RNA, 15 nt, Human
uucuauuguacagaa

SEQ ID NO: 3694787 - RNA, 15 nt, Human
uucuauuguuguaca

SEQ ID NO: 3694788 - RNA, 16 nt, Human
uucuauuuaaguguac

SEQ ID NO: 3694789 - RNA, 13 nt, Human
uucuauuuauaau

SEQ ID NO: 3694790 - RNA, 17 nt, Human
uucuauuucacuggagc

SEQ ID NO: 3694791 - RNA, 19 nt, Human
uucuauuucagugccaaua

SEQ ID NO: 3694792 - RNA, 19 nt, Human
uucuauuucuccuccaugg

SEQ ID NO: 3694793 - RNA, 12 nt, Human
uucuauuuggaa

SEQ ID NO: 3694794 - RNA, 18 nt, Human
uucuauuuggggcuugau

SEQ ID NO: 3694795 - RNA, 15 nt, Human
uucuauuuuauuaug

SEQ ID NO: 3694796 - RNA, 16 nt, Human
uucuauuuucucugau

SEQ ID NO: 3694797 - RNA, 15 nt, Human
uucucaaaagcauuu

SEQ ID NO: 3694798 - RNA, 20 nt, Human
uucucaaaagcauuuaucau

SEQ ID NO: 3694799 - RNA, 21 nt, Human
uucucaaaagcauuuaucauu

SEQ ID NO: 3694800 - RNA, 19 nt, Human
uucucaaagaaauuuccac

SEQ ID NO: 3694801 - RNA, 15 nt, Human
uucucaaaguuuuga

SEQ ID NO: 3694802 - RNA, 17 nt, Human
uucucaaaguuuugaaa

SEQ ID NO: 3694803 - RNA, 12 nt, Human
uucucaaauaaa

SEQ ID NO: 3694804 - RNA, 15 nt, Human
uucucaagcccugca

SEQ ID NO: 3694805 - RNA, 11 nt, Human
uucucaagugc

SEQ ID NO: 3694806 - RNA, 17 nt, Human
uucucaagugccuuaau

SEQ ID NO: 3694807 - RNA, 13 nt, Human
uucucaaguucua

SEQ ID NO: 3694808 - RNA, 14 nt, Human
uucucaaguucuaa

SEQ ID NO: 3694809 - RNA, 16 nt, Human
uucucaaguucuaaga

SEQ ID NO: 3694810 - RNA, 18 nt, Human
uucucaaugaaaaauagu

SEQ ID NO: 3694811 - RNA, 20 nt, Human
uucucaauuccaacaguuua

SEQ ID NO: 3694812 - RNA, 18 nt, Human
uucucacacccaccgucc

SEQ ID NO: 3694813 - RNA, 22 nt, Human
uucucacacccaccguccgccc

SEQ ID NO: 3694814 - RNA, 21 nt, Human
uucucacagugggagccaggg

SEQ ID NO: 3694815 - RNA, 12 nt, Human
uucucaccagcu

SEQ ID NO: 3694816 - RNA, 15 nt, Human
uucucaccagcugca

SEQ ID NO: 3694817 - RNA, 16 nt, Human
uucucaccagcugcaa

SEQ ID NO: 3694818 - RNA, 18 nt, Human
uucucaccagcugcaaag

SEQ ID NO: 3694819 - RNA, 21 nt, Human
uucucaccagcugcaaagugu

SEQ ID NO: 3694820 - RNA, 14 nt, Human
uucucaccagcugu

SEQ ID NO: 3694821 - RNA, 15 nt, Human
uucucacuaaaucuu

SEQ ID NO: 3694822 - RNA, 15 nt, Human
uucucacuaauuugu

SEQ ID NO: 3694823 - RNA, 14 nt, Human
uucucacuccacca

SEQ ID NO: 3694824 - RNA, 15 nt, Human
uucucacuccaccac

SEQ ID NO: 3694825 - RNA, 19 nt, Human
uucucacuccuuuuggugu

SEQ ID NO: 3694826 - RNA, 21 nt, Human
uucucacugccaugccagcuu

SEQ ID NO: 3694827 - RNA, 18 nt, Human
uucucacuguucccucug

SEQ ID NO: 3694828 - RNA, 21 nt, Human
uucucagaaggcaaaugacuu

SEQ ID NO: 3694829 - RNA, 22 nt, Human
uucucagaaucucaaauaacua

SEQ ID NO: 3694830 - RNA, 23 nt, Human
uucucagacuuuggaaaaugcau

SEQ ID NO: 3694831 - RNA, 15 nt, Human
uucucagauccuugu

SEQ ID NO: 3694832 - RNA, 21 nt, Human
uucucagauggauugauaauu

SEQ ID NO: 3694833 - RNA, 18 nt, Human
uucucagcucccauuucu

SEQ ID NO: 3694834 - RNA, 19 nt, Human
uucucagcucccauuucua

SEQ ID NO: 3694835 - RNA, 20 nt, Human
uucucagcucccccuguccc

SEQ ID NO: 3694836 - RNA, 13 nt, Human
uucucagggcucc

SEQ ID NO: 3694837 - RNA, 17 nt, Human
uucucagggcuccugcc

SEQ ID NO: 3694838 - RNA, 17 nt, Human
uucucagggucucugcu

SEQ ID NO: 3694839 - RNA, 19 nt, Human
uucucagggucucugcugc

SEQ ID NO: 3694840 - RNA, 20 nt, Human
uucucagggucucugcugcc

SEQ ID NO: 3694841 - RNA, 17 nt, Human
uucucagguguugccaa

SEQ ID NO: 3694842 - RNA, 23 nt, Human
uucucagugccaacuguggcugg

SEQ ID NO: 3694843 - RNA, 18 nt, Human
uucucaguuuuucuuaau

SEQ ID NO: 3694844 - RNA, 19 nt, Human
uucucaguuuuucuuaaua

SEQ ID NO: 3694845 - RNA, 12 nt, Human
uucucauaacuu

SEQ ID NO: 3694846 - RNA, 14 nt, Human
uucucauagcauua

SEQ ID NO: 3694847 - RNA, 16 nt, Human
uucucauagccccggu

SEQ ID NO: 3694848 - RNA, 20 nt, Human
uucucauaggaaaaguacau

SEQ ID NO: 3694849 - RNA, 15 nt, Human
uucucaucacacaca

SEQ ID NO: 3694850 - RNA, 16 nt, Human
uucucaucacuccccu

SEQ ID NO: 3694851 - RNA, 20 nt, Human
uucucaucugcacccuucuu

SEQ ID NO: 3694852 - RNA, 18 nt, Human
uucucaucuugugaaaug

SEQ ID NO: 3694853 - RNA, 11 nt, Human
uucucaugccu

SEQ ID NO: 3694854 - RNA, 12 nt, Human
uucucaugccuc

SEQ ID NO: 3694855 - RNA, 13 nt, Human
uucucauguguuu

SEQ ID NO: 3694856 - RNA, 18 nt, Human
uucucauuccaacaguga

SEQ ID NO: 3694857 - RNA, 20 nt, Human
uucucauuccaacagugagu

SEQ ID NO: 3694858 - RNA, 20 nt, Human
uucucauugacuuuuauaaa

SEQ ID NO: 3694859 - RNA, 13 nt, Human
uucucauugcucu

SEQ ID NO: 3694860 - RNA, 18 nt, Human
uucucauuggaaauuuag

SEQ ID NO: 3694861 - RNA, 15 nt, Human
uucucauuucacccc

SEQ ID NO: 3694862 - RNA, 20 nt, Human
uucucauuugccaauaauaa

SEQ ID NO: 3694863 - RNA, 16 nt, Human
uucucauuuucuuuuc

SEQ ID NO: 3694864 - RNA, 19 nt, Human
uucuccaaaaaucugccug

SEQ ID NO: 3694865 - RNA, 22 nt, Human
uucuccacagcaaccccaggcu

SEQ ID NO: 3694866 - RNA, 15 nt, Human
uucuccaccugccag

SEQ ID NO: 3694867 - RNA, 20 nt, Human
uucuccaccugccagggaca

SEQ ID NO: 3694868 - RNA, 12 nt, Human
uucuccagaacc

SEQ ID NO: 3694869 - RNA, 23 nt, Human
uucuccagauuuuucggaggccc

SEQ ID NO: 3694870 - RNA, 13 nt, Human
uucuccagccagc

SEQ ID NO: 3694871 - RNA, 19 nt, Human
uucuccagcucagaaccca

SEQ ID NO: 3694872 - RNA, 20 nt, Human
uucuccagcucagaacccag

SEQ ID NO: 3694873 - RNA, 12 nt, Human
uucuccagcugg

SEQ ID NO: 3694874 - RNA, 20 nt, Human
uucuccagcugggcucugca

SEQ ID NO: 3694875 - RNA, 18 nt, Human
uucuccaggcucuuuggg

SEQ ID NO: 3694876 - RNA, 14 nt, Human
uucuccagggucag

SEQ ID NO: 3694877 - RNA, 20 nt, Human
uucuccauccacaugggagc

SEQ ID NO: 3694878 - RNA, 15 nt, Human
uucuccaucucucug

SEQ ID NO: 3694879 - RNA, 22 nt, Human
uucuccauggccaccuuuucag

SEQ ID NO: 3694880 - RNA, 12 nt, Human
uucucccacucu

SEQ ID NO: 3694881 - RNA, 18 nt, Human
uucucccacucuccuagg

SEQ ID NO: 3694882 - RNA, 20 nt, Human
uucucccagguaccagcugc

SEQ ID NO: 3694883 - RNA, 12 nt, Human
uucuccccagaa

SEQ ID NO: 3694884 - RNA, 15 nt, Human
uucuccccagcuccc

SEQ ID NO: 3694885 - RNA, 21 nt, Human
uucucccccccggggcugggu

SEQ ID NO: 3694886 - RNA, 23 nt, Human
uucucccccccggggcuggguug

SEQ ID NO: 3694887 - RNA, 14 nt, Human
uucucccccugggc

SEQ ID NO: 3694888 - RNA, 19 nt, Human
uucuccccgcuaaggaaga

SEQ ID NO: 3694889 - RNA, 19 nt, Human
uucuccccugcacuguaaa

SEQ ID NO: 3694890 - RNA, 20 nt, Human
uucuccccugcacuguaaaa

SEQ ID NO: 3694891 - RNA, 19 nt, Human
uucuccccugcccccagga

SEQ ID NO: 3694892 - RNA, 22 nt, Human
uucuccccugcccccaggacug

SEQ ID NO: 3694893 - RNA, 12 nt, Human
uucucccuggau

SEQ ID NO: 3694894 - RNA, 13 nt, Human
uucucccuucggu

SEQ ID NO: 3694895 - RNA, 14 nt, Human
uucuccgccagccu

SEQ ID NO: 3694896 - RNA, 17 nt, Human
uucuccgccagccuccu

SEQ ID NO: 3694897 - RNA, 18 nt, Human
uucuccgccagccuccuc

SEQ ID NO: 3694898 - RNA, 21 nt, Human
uucuccgccagccuccucugg

SEQ ID NO: 3694899 - RNA, 18 nt, Human
uucuccguuagcuccugu

SEQ ID NO: 3694900 - RNA, 15 nt, Human
uucuccuauguguaa

SEQ ID NO: 3694901 - RNA, 11 nt, Human
uucuccucccc

SEQ ID NO: 3694902 - RNA, 19 nt, Human
uucuccucuuguaaauaaa

SEQ ID NO: 3694903 - RNA, 18 nt, Human
uucuccugacccaguccc

SEQ ID NO: 3694904 - RNA, 20 nt, Human
uucuccugcguguucucaga

SEQ ID NO: 3694905 - RNA, 19 nt, Human
uucuccugcugcucccuca

SEQ ID NO: 3694906 - RNA, 23 nt, Human
uucuccugcugcucccucagacu

SEQ ID NO: 3694907 - RNA, 15 nt, Human
uucuccuucagcccu

SEQ ID NO: 3694908 - RNA, 20 nt, Human
uucuccuucagcccucaccc

SEQ ID NO: 3694909 - RNA, 21 nt, Human
uucuccuuguguuacuaaguu

SEQ ID NO: 3694910 - RNA, 13 nt, Human
uuaccuagugaaa

SEQ ID NO: 3694911 - RNA, 21 nt, Human
uuaccuagugaaacuuuucua

SEQ ID NO: 3694912 - RNA, 22 nt, Human
uuaccuagugaaacuuuucuag

SEQ ID NO: 3694913 - RNA, 17 nt, Human
uuaccucaacaagaaga

SEQ ID NO: 3694914 - RNA, 20 nt, Human
uuaccucagccugggcgcug

SEQ ID NO: 3694915 - RNA, 19 nt, Human
uuaccuccaacagaacuaa

SEQ ID NO: 3694916 - RNA, 21 nt, Human
uuaccucccuacuuucuuaga

SEQ ID NO: 3694917 - RNA, 12 nt, Human
uuaccuccugcc

SEQ ID NO: 3694918 - RNA, 14 nt, Human
uuaccuccugccca

SEQ ID NO: 3694919 - RNA, 17 nt, Human
uuaccucucugucaugu

SEQ ID NO: 3694920 - RNA, 22 nt, Human
uuaccugaaaacacugugcaca

SEQ ID NO: 3694921 - RNA, 21 nt, Human
uuaccugaagggguuuucuug

SEQ ID NO: 3694922 - RNA, 13 nt, Human
uuaccugacacaa

SEQ ID NO: 3694923 - RNA, 18 nt, Human
uuaccugaccucuugcug

SEQ ID NO: 3694924 - RNA, 20 nt, Human
uuaccugaccucuugcuguc

SEQ ID NO: 3694925 - RNA, 21 nt, Human
uuaccugaccucuugcugucu

SEQ ID NO: 3694926 - RNA, 18 nt, Human
uuaccugaucaaugacag

SEQ ID NO: 3694927 - RNA, 22 nt, Human
uuaccuguacacugacuugaga

SEQ ID NO: 3694928 - RNA, 19 nt, Human
uuaccugucacauugcauu

SEQ ID NO: 3694929 - RNA, 19 nt, Human
uuaccugugaaguguuacu

SEQ ID NO: 3694930 - RNA, 22 nt, Human
uuaccuguuuucgcaccuacca

SEQ ID NO: 3694931 - RNA, 21 nt, Human
uuaccuuagauuagcucugga

SEQ ID NO: 3694932 - RNA, 14 nt, Human
uuaccuucaauaaa

SEQ ID NO: 3694933 - RNA, 17 nt, Human
uuaccuucaauaaagua

SEQ ID NO: 3694934 - RNA, 18 nt, Human
uuaccuucaauaaaguau

SEQ ID NO: 3694935 - RNA, 19 nt, Human
uuaccuucaauaaaguauc

SEQ ID NO: 3694936 - RNA, 20 nt, Human
uuaccuugucauuuuggucu

SEQ ID NO: 3694937 - RNA, 15 nt, Human
uuaccuuguuauuua

SEQ ID NO: 3694938 - RNA, 13 nt, Human
uuaccuuucauac

SEQ ID NO: 3694939 - RNA, 18 nt, Human
uuaccuuuucagggcugg

SEQ ID NO: 3694940 - RNA, 15 nt, Human
uuaccuuuuuauuug

SEQ ID NO: 3694941 - RNA, 19 nt, Human
uuaccuuuuuuuuuucuug

SEQ ID NO: 3694942 - RNA, 16 nt, Human
uuacgauaaggaagaa

SEQ ID NO: 3694943 - RNA, 22 nt, Human
uuacgaucaggcacaggucagg

SEQ ID NO: 3694944 - RNA, 20 nt, Human
uuacgcacacguacuuaaau

SEQ ID NO: 3694945 - RNA, 16 nt, Human
uuacggaacucaaaua

SEQ ID NO: 3694946 - RNA, 20 nt, Human
uuacgguuuuccagguuuaa

SEQ ID NO: 3694947 - RNA, 17 nt, Human
uuacuaaaaaaaagaug

SEQ ID NO: 3694948 - RNA, 18 nt, Human
uuacuaaaaaaaagauga

SEQ ID NO: 3694949 - RNA, 20 nt, Human
uuacuaaaaguuuugagaaa

SEQ ID NO: 3694950 - RNA, 14 nt, Human
uuacuaaaauauau

SEQ ID NO: 3694951 - RNA, 15 nt, Human
uuacuaaaauggacu

SEQ ID NO: 3694952 - RNA, 18 nt, Human
uuacuaaacauaugauuu

SEQ ID NO: 3694953 - RNA, 22 nt, Human
uuacuaaacauaugauuucacu

SEQ ID NO: 3694954 - RNA, 22 nt, Human
uuacuaaagaaagauuacuuag

SEQ ID NO: 3694955 - RNA, 13 nt, Human
uuacuaagaagaa

SEQ ID NO: 3694956 - RNA, 22 nt, Human
uuacuaagaugacauugcuaag

SEQ ID NO: 3694957 - RNA, 23 nt, Human
uuacuaagaugacauugcuaaga

SEQ ID NO: 3694958 - RNA, 21 nt, Human
uuacuaagcauagcaaacaga

SEQ ID NO: 3694959 - RNA, 17 nt, Human
uuacuaagccacaagaa

SEQ ID NO: 3694960 - RNA, 20 nt, Human
uuacuaagccacaagaaauu

SEQ ID NO: 3694961 - RNA, 17 nt, Human
uuacuaauuauacuacu

SEQ ID NO: 3694962 - RNA, 13 nt, Human
uuacuacaguugu

SEQ ID NO: 3694963 - RNA, 15 nt, Human
uuacuacaguuguuu

SEQ ID NO: 3694964 - RNA, 22 nt, Human
uuacuacaguuuuuaacucuac

SEQ ID NO: 3694965 - RNA, 18 nt, Human
uuacuacaugugggagcu

SEQ ID NO: 3694966 - RNA, 16 nt, Human
uuacuagggaucccuc

SEQ ID NO: 3694967 - RNA, 14 nt, Human
uuacuagguaacuu

SEQ ID NO: 3694968 - RNA, 21 nt, Human
uuacuaggugcccagaaugag

SEQ ID NO: 3694969 - RNA, 23 nt, Human
uuacuauaagaacuuugagcuac

SEQ ID NO: 3694970 - RNA, 22 nt, Human
uuacuauccuggcuuugcccaa

SEQ ID NO: 3694971 - RNA, 13 nt, Human
uuacuaugccugu

SEQ ID NO: 3694972 - RNA, 14 nt, Human
uuacuaugccugug

SEQ ID NO: 3694973 - RNA, 23 nt, Human
uuacuauuaagcaguaaaaacug

SEQ ID NO: 3694974 - RNA, 21 nt, Human
uuacuauucauuaaauguuug

SEQ ID NO: 3694975 - RNA, 15 nt, Human
uuacuauuucuugug

SEQ ID NO: 3694976 - RNA, 19 nt, Human
uuacuauuuuacuucuaga

SEQ ID NO: 3694977 - RNA, 17 nt, Human
uuacuauuuucuacaau

SEQ ID NO: 3694978 - RNA, 21 nt, Human
uuacucaaaguuaaccuaccu

SEQ ID NO: 3694979 - RNA, 15 nt, Human
uuacucaacccucuc

SEQ ID NO: 3694980 - RNA, 13 nt, Human
uuacucagcccug

SEQ ID NO: 3694981 - RNA, 14 nt, Human
uuacucaggaagaa

SEQ ID NO: 3694982 - RNA, 17 nt, Human
uuacucaggaagaacac

SEQ ID NO: 3694983 - RNA, 16 nt, Human
uuacucaguaauuugu

SEQ ID NO: 3694984 - RNA, 16 nt, Human
uuacuccauaaacaga

SEQ ID NO: 3694985 - RNA, 12 nt, Human
uuacuccuccuc

SEQ ID NO: 3694986 - RNA, 17 nt, Human
uuacuccuccucuuucu

SEQ ID NO: 3694987 - RNA, 18 nt, Human
uuacuccuccucuuucuc

SEQ ID NO: 3694988 - RNA, 19 nt, Human
uuacuccugugggagccuc

SEQ ID NO: 3694989 - RNA, 14 nt, Human
uuacucugccuaca

SEQ ID NO: 3694990 - RNA, 23 nt, Human
uuacucuucaguuaagccuuugg

SEQ ID NO: 3694991 - RNA, 14 nt, Human
uuacucuuguaaga

SEQ ID NO: 3694992 - RNA, 17 nt, Human
uuacucuuguaagauuu

SEQ ID NO: 3694993 - RNA, 13 nt, Human
uuacucuuuccua

SEQ ID NO: 3694994 - RNA, 15 nt, Human
uuacugaacaguaac

SEQ ID NO: 3694995 - RNA, 16 nt, Human
uuacugaagccuuucu

SEQ ID NO: 3694996 - RNA, 19 nt, Human
uuacugaagguaaaauuga

SEQ ID NO: 3694997 - RNA, 20 nt, Human
uuacugaagguaaaauugaa

SEQ ID NO: 3694998 - RNA, 23 nt, Human
uuacugaaugcaccauggucaaa

SEQ ID NO: 3694999 - RNA, 19 nt, Human
uuacugacccuggggcugg

SEQ ID NO: 3695000 - RNA, 16 nt, Human
uuacugagcuucucug

SEQ ID NO: 3695001 - RNA, 17 nt, Human
uuacugagcuucucugu

SEQ ID NO: 3695002 - RNA, 16 nt, Human
uuacugaucaugcauu

SEQ ID NO: 3695003 - RNA, 22 nt, Human
uuacugcagccuuugccucccc

SEQ ID NO: 3695004 - RNA, 12 nt, Human
uuacugcaguug

SEQ ID NO: 3695005 - RNA, 14 nt, Human
uuacugccuugaaa

SEQ ID NO: 3695006 - RNA, 17 nt, Human
uuacugcuaaguauuuc

SEQ ID NO: 3695007 - RNA, 22 nt, Human
uuacugcuaaguauuucccagc

SEQ ID NO: 3695008 - RNA, 23 nt, Human
uuacugcuaaguauuucccagca

SEQ ID NO: 3695009 - RNA, 15 nt, Human
uuacugcucugagaa

SEQ ID NO: 3695010 - RNA, 20 nt, Human
uuacuggccuuuuucauuua

SEQ ID NO: 3695011 - RNA, 16 nt, Human
uuacuggcguggauua

SEQ ID NO: 3695012 - RNA, 22 nt, Human
uuacuggcguggauuaaacuua

SEQ ID NO: 3695013 - RNA, 18 nt, Human
uuacugguccaaaagauu

SEQ ID NO: 3695014 - RNA, 13 nt, Human
uuacugguugcau

SEQ ID NO: 3695015 - RNA, 15 nt, Human
uuacugguugcaugg

SEQ ID NO: 3695016 - RNA, 14 nt, Human
uuacuguaaaaugc

SEQ ID NO: 3695017 - RNA, 20 nt, Human
uuacuguaaaaugcaaaaaa

SEQ ID NO: 3695018 - RNA, 18 nt, Human
uuacuguaaccuguugcu

SEQ ID NO: 3695019 - RNA, 15 nt, Human
uuacuguaacugauu

SEQ ID NO: 3695020 - RNA, 15 nt, Human
uuacuguaagaaaau

SEQ ID NO: 3695021 - RNA, 15 nt, Human
uuacuguaauuccuc

SEQ ID NO: 3695022 - RNA, 23 nt, Human
uuacuguacagacagaaaaaacu

SEQ ID NO: 3695023 - RNA, 13 nt, Human
uuacuguacauga

SEQ ID NO: 3695024 - RNA, 14 nt, Human
uuacugucaauaaa

SEQ ID NO: 3695025 - RNA, 15 nt, Human
uuacugucaauaaac

SEQ ID NO: 3695026 - RNA, 18 nt, Human
uuacugucaauaaacagc

SEQ ID NO: 3695027 - RNA, 22 nt, Human
uuacugucugguuuuaacaauu

SEQ ID NO: 3695028 - RNA, 23 nt, Human
uuacugucugguuuuaacaauuu

SEQ ID NO: 3695029 - RNA, 11 nt, Human
uuacugucuua

SEQ ID NO: 3695030 - RNA, 20 nt, Human
uuacuguggaggaaggauug

SEQ ID NO: 3695031 - RNA, 18 nt, Human
uuacuguggccaguauuu

SEQ ID NO: 3695032 - RNA, 16 nt, Human
uuacuguggcuucuua

SEQ ID NO: 3695033 - RNA, 20 nt, Human
uuacuguguuuuauaaaaua

SEQ ID NO: 3695034 - RNA, 23 nt, Human
uuacuguuaccugaucaaugaca

SEQ ID NO: 3695035 - RNA, 18 nt, Human
uuacuguuagucauuugc

SEQ ID NO: 3695036 - RNA, 14 nt, Human
uuacuguucuugcu

SEQ ID NO: 3695037 - RNA, 21 nt, Human
uuacuguugauaauucuuauu

SEQ ID NO: 3695038 - RNA, 14 nt, Human
uuacuguugugacc

SEQ ID NO: 3695039 - RNA, 17 nt, Human
uuacuguuuauuacuuc

SEQ ID NO: 3695040 - RNA, 23 nt, Human
uuacuguuuauuacuuccaugaa

SEQ ID NO: 3695041 - RNA, 14 nt, Human
uuacuguuucuguc

SEQ ID NO: 3695042 - RNA, 21 nt, Human
uuacuguuugucuucucccca

SEQ ID NO: 3695043 - RNA, 23 nt, Human
uuacuguuuugaaaucaaugcaa

SEQ ID NO: 3695044 - RNA, 21 nt, Human
uuacuuaaaccgccaaggcug

SEQ ID NO: 3695045 - RNA, 14 nt, Human
uuacuuaaagauuu

SEQ ID NO: 3695046 - RNA, 19 nt, Human
uuacuuaaagauuuaucaa

SEQ ID NO: 3695047 - RNA, 16 nt, Human
uuacuuaacuguuuca

SEQ ID NO: 3695048 - RNA, 22 nt, Human
uuacuuaagacuuaaugagacu

SEQ ID NO: 3695049 - RNA, 13 nt, Human
uuacuuaccuaaa

SEQ ID NO: 3695050 - RNA, 20 nt, Human
uuacuuagaggaaauaagaa

SEQ ID NO: 3695051 - RNA, 15 nt, Human
uuacuuagcuuauca

SEQ ID NO: 3695052 - RNA, 19 nt, Human
uuacuuagcuuaucaauuu

SEQ ID NO: 3695053 - RNA, 18 nt, Human
uuacuuagguguggggga

SEQ ID NO: 3695054 - RNA, 15 nt, Human
uuacuuaguauugca

SEQ ID NO: 3695055 - RNA, 17 nt, Human
uuacuuaucauccacau

SEQ ID NO: 3695056 - RNA, 16 nt, Human
uuacuuaucuuaugcc

SEQ ID NO: 3695057 - RNA, 18 nt, Human
uuacuuauuaucuucagg

SEQ ID NO: 3695058 - RNA, 19 nt, Human
uuacuugcauugaauauau

SEQ ID NO: 3695059 - RNA, 17 nt, Human
uucuccuuucacaaccu

SEQ ID NO: 3695060 - RNA, 23 nt, Human
uucucguuuuuauagucaauggc

SEQ ID NO: 3695061 - RNA, 21 nt, Human
uucucuaaguuccacugagcu

SEQ ID NO: 3695062 - RNA, 23 nt, Human
uucucuaaguuccacugagcucc

SEQ ID NO: 3695063 - RNA, 16 nt, Human
uucucuaauaagaaaa

SEQ ID NO: 3695064 - RNA, 12 nt, Human
uucucuaauaug

SEQ ID NO: 3695065 - RNA, 15 nt, Human
uucucuaaucgaaag

SEQ ID NO: 3695066 - RNA, 20 nt, Human
uucucuacuuugaggaaacc

SEQ ID NO: 3695067 - RNA, 18 nt, Human
uucucuagcucucuaggc

SEQ ID NO: 3695068 - RNA, 20 nt, Human
uucucuagggaaggccaccu

SEQ ID NO: 3695069 - RNA, 21 nt, Human
uucucuauaaaaaauauguau

SEQ ID NO: 3695070 - RNA, 21 nt, Human
uucucucagaccgucuuccuc

SEQ ID NO: 3695071 - RNA, 22 nt, Human
uucucucagaccgucuuccucc

SEQ ID NO: 3695072 - RNA, 12 nt, Human
uucucucaucuc

SEQ ID NO: 3695073 - RNA, 15 nt, Human
uucucuccagccccu

SEQ ID NO: 3695074 - RNA, 12 nt, Human
uucucuccagcu

SEQ ID NO: 3695075 - RNA, 23 nt, Human
uucucuccccaacccccauucuc

SEQ ID NO: 3695076 - RNA, 19 nt, Human
uucucuccuguccucccuc

SEQ ID NO: 3695077 - RNA, 22 nt, Human
uucucuccuguccucccucacc

SEQ ID NO: 3695078 - RNA, 17 nt, Human
uucucucuacagugcca

SEQ ID NO: 3695079 - RNA, 20 nt, Human
uucucucuacugguccucuu

SEQ ID NO: 3695080 - RNA, 12 nt, Human
uucucucucacc

SEQ ID NO: 3695081 - RNA, 13 nt, Human
uucucucucuaag

SEQ ID NO: 3695082 - RNA, 21 nt, Human
uucucucuuuauacagcugua

SEQ ID NO: 3695083 - RNA, 19 nt, Human
uucucugaacacaggcagc

SEQ ID NO: 3695084 - RNA, 16 nt, Human
uucucugaagggaggu

SEQ ID NO: 3695085 - RNA, 17 nt, Human
uucucugacuucugccu

SEQ ID NO: 3695086 - RNA, 13 nt, Human
uucucugaggaag

SEQ ID NO: 3695087 - RNA, 13 nt, Human
uucucugaggaca

SEQ ID NO: 3695088 - RNA, 16 nt, Human
uucucugaggacaaga

SEQ ID NO: 3695089 - RNA, 14 nt, Human
uucucugaggacac

SEQ ID NO: 3695090 - RNA, 16 nt, Human
uucucugauacagaaa

SEQ ID NO: 3695091 - RNA, 17 nt, Human
uucucugauacagaaaa

SEQ ID NO: 3695092 - RNA, 13 nt, Human
uucucugccagug

SEQ ID NO: 3695093 - RNA, 21 nt, Human
uucucugcccagcuuuucauu

SEQ ID NO: 3695094 - RNA, 21 nt, Human
uucucugcccauuccccagcc

SEQ ID NO: 3695095 - RNA, 11 nt, Human
uucucugcuuc

SEQ ID NO: 3695096 - RNA, 19 nt, Human
uucucugcuucagcuugcu

SEQ ID NO: 3695097 - RNA, 22 nt, Human
uucucuggaaaggggggagcug

SEQ ID NO: 3695098 - RNA, 20 nt, Human
uucucuggcuguaaggcucu

SEQ ID NO: 3695099 - RNA, 11 nt, Human
uucucuguaca

SEQ ID NO: 3695100 - RNA, 14 nt, Human
uucucuguauagua

SEQ ID NO: 3695101 - RNA, 22 nt, Human
uucucugucucagacuuuugua

SEQ ID NO: 3695102 - RNA, 13 nt, Human
uucucugucucau

SEQ ID NO: 3695103 - RNA, 18 nt, Human
uucucuguggcaaagcag

SEQ ID NO: 3695104 - RNA, 16 nt, Human
uucucugugucuaaga

SEQ ID NO: 3695105 - RNA, 17 nt, Human
uucucugugucuaagau

SEQ ID NO: 3695106 - RNA, 23 nt, Human
uucucuguucuacccguuccaaa

SEQ ID NO: 3695107 - RNA, 23 nt, Human
uucucuguugucguaaagauuug

SEQ ID NO: 3695108 - RNA, 14 nt, Human
uucucuuacugcaa

SEQ ID NO: 3695109 - RNA, 23 nt, Human
uucucuuacugcaaaugucauca

SEQ ID NO: 3695110 - RNA, 16 nt, Human
uucucuucauuuuccc

SEQ ID NO: 3695111 - RNA, 21 nt, Human
uucucuuccacucuccuugcu

SEQ ID NO: 3695112 - RNA, 23 nt, Human
uucucuucccugcgccugugaug

SEQ ID NO: 3695113 - RNA, 23 nt, Human
uucucuucuccccuuccauuucu

SEQ ID NO: 3695114 - RNA, 14 nt, Human
uucucuucucuguu

SEQ ID NO: 3695115 - RNA, 15 nt, Human
uucucuugagcuggc

SEQ ID NO: 3695116 - RNA, 13 nt, Human
uucucuugccuca

SEQ ID NO: 3695117 - RNA, 22 nt, Human
uucucuugccucagcuucccca

SEQ ID NO: 3695118 - RNA, 11 nt, Human
uucucuuggug

SEQ ID NO: 3695119 - RNA, 14 nt, Human
uucucuuucccugg

SEQ ID NO: 3695120 - RNA, 11 nt, Human
uucucuuucuc

SEQ ID NO: 3695121 - RNA, 14 nt, Human
uucucuuucucucu

SEQ ID NO: 3695122 - RNA, 14 nt, Human
uucucuuucuuccu

SEQ ID NO: 3695123 - RNA, 12 nt, Human
uucucuuugaaa

SEQ ID NO: 3695124 - RNA, 14 nt, Human
uucucuuugccuca

SEQ ID NO: 3695125 - RNA, 23 nt, Human
uucucuuugguguacaaaaugga

SEQ ID NO: 3695126 - RNA, 21 nt, Human
uucucuuuuccccuuuccugu

SEQ ID NO: 3695127 - RNA, 15 nt, Human
uucucuuuucuaaaa

SEQ ID NO: 3695128 - RNA, 15 nt, Human
uucugaaaagaaaua

SEQ ID NO: 3695129 - RNA, 17 nt, Human
uucugaaaagaaauaau

SEQ ID NO: 3695130 - RNA, 15 nt, Human
uucugaaaauauaac

SEQ ID NO: 3695131 - RNA, 19 nt, Human
uucugaaaguuacccacug

SEQ ID NO: 3695132 - RNA, 12 nt, Human
uucugaacagcu

SEQ ID NO: 3695133 - RNA, 14 nt, Human
uucugaacagcugg

SEQ ID NO: 3695134 - RNA, 15 nt, Human
uucugaacagcuggu

SEQ ID NO: 3695135 - RNA, 16 nt, Human
uucugaacagcuggug

SEQ ID NO: 3695136 - RNA, 22 nt, Human
uucugaacuaaagugcugcacu

SEQ ID NO: 3695137 - RNA, 16 nt, Human
uucugaacucaaacug

SEQ ID NO: 3695138 - RNA, 22 nt, Human
uucugaaguuauauuuccuaua

SEQ ID NO: 3695139 - RNA, 16 nt, Human
uucugaauaauuucuu

SEQ ID NO: 3695140 - RNA, 17 nt, Human
uucugaauaauuucuua

SEQ ID NO: 3695141 - RNA, 18 nt, Human
uucugaaugcugcuacuu

SEQ ID NO: 3695142 - RNA, 13 nt, Human
uucugaauuugca

SEQ ID NO: 3695143 - RNA, 16 nt, Human
uucugaauuugcaaag

SEQ ID NO: 3695144 - RNA, 21 nt, Human
uucugaauuugcaaaguacug

SEQ ID NO: 3695145 - RNA, 22 nt, Human
uucugaauuugcaaaguacugu

SEQ ID NO: 3695146 - RNA, 19 nt, Human
uucugacaaaaaguuucca

SEQ ID NO: 3695147 - RNA, 14 nt, Human
uucugacaaacugu

SEQ ID NO: 3695148 - RNA, 20 nt, Human
uucugacaaacuguguacau

SEQ ID NO: 3695149 - RNA, 13 nt, Human
uucugacagccuc

SEQ ID NO: 3695150 - RNA, 18 nt, Human
uucugacaguuuuucugu

SEQ ID NO: 3695151 - RNA, 23 nt, Human
uucugacauuaacaguuuuccau

SEQ ID NO: 3695152 - RNA, 14 nt, Human
uucugaccacacuu

SEQ ID NO: 3695153 - RNA, 16 nt, Human
uucugacccaugcugc

SEQ ID NO: 3695154 - RNA, 23 nt, Human
uucugacccaugcugcccuguga

SEQ ID NO: 3695155 - RNA, 18 nt, Human
uucugacccugcuucaaa

SEQ ID NO: 3695156 - RNA, 14 nt, Human
uucugaccucagca

SEQ ID NO: 3695157 - RNA, 16 nt, Human
uucugaccuucagcuc

SEQ ID NO: 3695158 - RNA, 18 nt, Human
uucugaccuucagcucac

SEQ ID NO: 3695159 - RNA, 13 nt, Human
uucugacggcccu

SEQ ID NO: 3695160 - RNA, 20 nt, Human
uucugacgugccuuuugcac

SEQ ID NO: 3695161 - RNA, 19 nt, Human
uucugacucgguuucucca

SEQ ID NO: 3695162 - RNA, 22 nt, Human
uucugacuucauagauuuccuu

SEQ ID NO: 3695163 - RNA, 12 nt, Human
uucugagaaaac

SEQ ID NO: 3695164 - RNA, 15 nt, Human
uucugagaaagacua

SEQ ID NO: 3695165 - RNA, 21 nt, Human
uucugagaaagacuauucaaa

SEQ ID NO: 3695166 - RNA, 17 nt, Human
uucugagacgucaugag

SEQ ID NO: 3695167 - RNA, 16 nt, Human
uucugagaucuguuga

SEQ ID NO: 3695168 - RNA, 23 nt, Human
uucugagauggcucccaggggcu

SEQ ID NO: 3695169 - RNA, 19 nt, Human
uucugagauucaauauuga

SEQ ID NO: 3695170 - RNA, 21 nt, Human
uucugagauucaauauugaau

SEQ ID NO: 3695171 - RNA, 20 nt, Human
uucugagcagcgagccugcu

SEQ ID NO: 3695172 - RNA, 19 nt, Human
uucugagcccgguaagagc

SEQ ID NO: 3695173 - RNA, 21 nt, Human
uucugaggccugaauccaaaa

SEQ ID NO: 3695174 - RNA, 20 nt, Human
uucugaggguccacuacuca

SEQ ID NO: 3695175 - RNA, 17 nt, Human
uucugaggugcacuggg

SEQ ID NO: 3695176 - RNA, 20 nt, Human
uucugaguuucauucuccug

SEQ ID NO: 3695177 - RNA, 15 nt, Human
uucugaguuuuacca

SEQ ID NO: 3695178 - RNA, 19 nt, Human
uucugaguuuuguguuugu

SEQ ID NO: 3695179 - RNA, 22 nt, Human
uucugaguuuuguguuuguugu

SEQ ID NO: 3695180 - RNA, 18 nt, Human
uucugauaaccauagcau

SEQ ID NO: 3695181 - RNA, 22 nt, Human
uucugauaacuagauggugcug

SEQ ID NO: 3695182 - RNA, 14 nt, Human
uucugauauagaau

SEQ ID NO: 3695183 - RNA, 14 nt, Human
uucugaucaaggcc

SEQ ID NO: 3695184 - RNA, 20 nt, Human
uucugaucacugaaauaaaa

SEQ ID NO: 3695185 - RNA, 14 nt, Human
uucugaucuucacu

SEQ ID NO: 3695186 - RNA, 15 nt, Human
uucugaugaaucuug

SEQ ID NO: 3695187 - RNA, 14 nt, Human
uucugaugagcaac

SEQ ID NO: 3695188 - RNA, 16 nt, Human
uucugauguacucuaa

SEQ ID NO: 3695189 - RNA, 14 nt, Human
uucugauuagaaau

SEQ ID NO: 3695190 - RNA, 13 nt, Human
uucugauuagcuu

SEQ ID NO: 3695191 - RNA, 21 nt, Human
uucugauucgaaugacacugu

SEQ ID NO: 3695192 - RNA, 21 nt, Human
uucugauuguaacguugcugu

SEQ ID NO: 3695193 - RNA, 13 nt, Human
uucugauuucuuu

SEQ ID NO: 3695194 - RNA, 17 nt, Human
uucugauuuuaggagcu

SEQ ID NO: 3695195 - RNA, 24 nt, Human
uucugauuuuaggagcuaaggcuc

SEQ ID NO: 3695196 - RNA, 12 nt, Human
uucugcaaacaa

SEQ ID NO: 3695197 - RNA, 17 nt, Human
uucugcaacaagcaugc

SEQ ID NO: 3695198 - RNA, 15 nt, Human
uucugcacacagcac

SEQ ID NO: 3695199 - RNA, 22 nt, Human
uucugcacccuccacccugucc

SEQ ID NO: 3695200 - RNA, 16 nt, Human
uucugcaccuuaucuu

SEQ ID NO: 3695201 - RNA, 13 nt, Human
uucugcacugaaa

SEQ ID NO: 3695202 - RNA, 15 nt, Human
uucugcacugagcag

SEQ ID NO: 3695203 - RNA, 20 nt, Human
uucugcacugagcagagucu

SEQ ID NO: 3695204 - RNA, 12 nt, Human
uucugcagaaga

SEQ ID NO: 3695205 - RNA, 20 nt, Human
uucugcaguagucucugugc

SEQ ID NO: 3695206 - RNA, 21 nt, Human
uucugcaguagucucugugcu

SEQ ID NO: 3695207 - RNA, 20 nt, Human
uucugcaucaucuguagaua

SEQ ID NO: 3695208 - RNA, 16 nt, Human
uucugcaucuccacuu

SEQ ID NO: 3695209 - RNA, 22 nt, Human
uacuucguguccgacucuucug

SEQ ID NO: 3695210 - RNA, 21 nt, Human
uacuucuagagauaguacaua

SEQ ID NO: 3695211 - RNA, 20 nt, Human
uacuucucauuuuuuaaaaa

SEQ ID NO: 3695212 - RNA, 20 nt, Human
uacuucuccacccugcucuc

SEQ ID NO: 3695213 - RNA, 21 nt, Human
uacuucugagggcaucuuggu

SEQ ID NO: 3695214 - RNA, 14 nt, Human
uacuucuuauacau

SEQ ID NO: 3695215 - RNA, 18 nt, Human
uacuucuucauucaauac

SEQ ID NO: 3695216 - RNA, 15 nt, Human
uacuucuucuguaau

SEQ ID NO: 3695217 - RNA, 13 nt, Human
uacuucuugaaua

SEQ ID NO: 3695218 - RNA, 15 nt, Human
uacuugaaaaaguaa

SEQ ID NO: 3695219 - RNA, 13 nt, Human
uacuugaacaaaa

SEQ ID NO: 3695220 - RNA, 15 nt, Human
uacuugaacaaaagg

SEQ ID NO: 3695221 - RNA, 17 nt, Human
uacuugaaccauaaaau

SEQ ID NO: 3695222 - RNA, 24 nt, Human
uacuugaacguuuucuaauugcuu

SEQ ID NO: 3695223 - RNA, 16 nt, Human
uacuugaagggccaga

SEQ ID NO: 3695224 - RNA, 19 nt, Human
uacuugaagggccagagcc

SEQ ID NO: 3695225 - RNA, 22 nt, Human
uacuugaagggccagagccagg

SEQ ID NO: 3695226 - RNA, 14 nt, Human
uacuugaccuccua

SEQ ID NO: 3695227 - RNA, 17 nt, Human
uacuugauaacaauguu

SEQ ID NO: 3695228 - RNA, 23 nt, Human
uacuugaugaguguaacaagaaa

SEQ ID NO: 3695229 - RNA, 19 nt, Human
uuauacaaccuucauuuaa

SEQ ID NO: 3695230 - RNA, 12 nt, Human
uuauacacauaa

SEQ ID NO: 3695231 - RNA, 13 nt, Human
uuauacacauaau

SEQ ID NO: 3695232 - RNA, 18 nt, Human
uuauacagcucagcuuuu

SEQ ID NO: 3695233 - RNA, 22 nt, Human
uuauacaggucauauuaauaua

SEQ ID NO: 3695234 - RNA, 17 nt, Human
uuauacaguagugagaa

SEQ ID NO: 3695235 - RNA, 17 nt, Human
uuauacaguuauaaaau

SEQ ID NO: 3695236 - RNA, 15 nt, Human
uuauacaguuuuaaa

SEQ ID NO: 3695237 - RNA, 16 nt, Human
uuauacaguuuuaaag

SEQ ID NO: 3695238 - RNA, 13 nt, Human
uuauacauaaaca

SEQ ID NO: 3695239 - RNA, 23 nt, Human
uuauacaugacacugaaaugccu

SEQ ID NO: 3695240 - RNA, 18 nt, Human
uuauacccagaaaguuau

SEQ ID NO: 3695241 - RNA, 18 nt, Human
uuauacccguuucacaug

SEQ ID NO: 3695242 - RNA, 16 nt, Human
uuauaccuaccugugu

SEQ ID NO: 3695243 - RNA, 20 nt, Human
uuauacgaguaauaugccug

SEQ ID NO: 3695244 - RNA, 21 nt, Human
uuauacgauaaauaacuuuuu

SEQ ID NO: 3695245 - RNA, 15 nt, Human
uuauacguguagcua

SEQ ID NO: 3695246 - RNA, 21 nt, Human
uuauacguguagcuauaucua

SEQ ID NO: 3695247 - RNA, 18 nt, Human
uuauacuccaguguacau

SEQ ID NO: 3695248 - RNA, 13 nt, Human
uuauacugauuau

SEQ ID NO: 3695249 - RNA, 11 nt, Human
uucuugugaag

SEQ ID NO: 3695250 - RNA, 19 nt, Human
uucuugugaauauguacau

SEQ ID NO: 3695251 - RNA, 14 nt, Human
uucuugugcuuuuc

SEQ ID NO: 3695252 - RNA, 18 nt, Human
uucuuguguguaugcaca

SEQ ID NO: 3695253 - RNA, 13 nt, Human
uucuuguucuguu

SEQ ID NO: 3695254 - RNA, 16 nt, Human
uucuuguuuccuuguu

SEQ ID NO: 3695255 - RNA, 19 nt, Human
uucuuuaaaagaaugacua

SEQ ID NO: 3695256 - RNA, 16 nt, Human
uucuuuaaaagaaugg

SEQ ID NO: 3695257 - RNA, 15 nt, Human
uucuuuaaaauuaca

SEQ ID NO: 3695258 - RNA, 13 nt, Human
uucuuuaaacugu

SEQ ID NO: 3695259 - RNA, 13 nt, Human
uucuuuaaagaug

SEQ ID NO: 3695260 - RNA, 12 nt, Human
uucuuuaaauua

SEQ ID NO: 3695261 - RNA, 19 nt, Human
uucuuuaacugccguaauu

SEQ ID NO: 3695262 - RNA, 14 nt, Human
uucuuuaacuuaau

SEQ ID NO: 3695263 - RNA, 12 nt, Human
uucuuuaaugcu

SEQ ID NO: 3695264 - RNA, 20 nt, Human
uucuuuacaaaacaaacuca

SEQ ID NO: 3695265 - RNA, 20 nt, Human
uucuuuaccugagaccaguu

SEQ ID NO: 3695266 - RNA, 11 nt, Human
uucuuuagaac

SEQ ID NO: 3695267 - RNA, 15 nt, Human
uucuuuaggagauuu

SEQ ID NO: 3695268 - RNA, 13 nt, Human
uucuuuauaaacu

SEQ ID NO: 3695269 - RNA, 18 nt, Human
uucuuuauaauucuacuu

SEQ ID NO: 3695270 - RNA, 19 nt, Human
uucuuuauacaacagugcu

SEQ ID NO: 3695271 - RNA, 22 nt, Human
uucuuuauacaacagugcuaaa

SEQ ID NO: 3695272 - RNA, 16 nt, Human
uucuuuauacuguaau

SEQ ID NO: 3695273 - RNA, 23 nt, Human
uucuuuauauacaauaauggaaa

SEQ ID NO: 3695274 - RNA, 12 nt, Human
uucuuucagugg

SEQ ID NO: 3695275 - RNA, 14 nt, Human
uucuuucauuucuu

SEQ ID NO: 3695276 - RNA, 17 nt, Human
uucuuuccauuaugauu

SEQ ID NO: 3695277 - RNA, 20 nt, Human
uucuuuccauuaugauucuu

SEQ ID NO: 3695278 - RNA, 12 nt, Human
uucuuucuagaa

SEQ ID NO: 3695279 - RNA, 13 nt, Human
uucuuucuagaaa

SEQ ID NO: 3695280 - RNA, 22 nt, Human
uucuuucuaguggucuuuguaa

SEQ ID NO: 3695281 - RNA, 13 nt, Human
uucuuucucucag

SEQ ID NO: 3695282 - RNA, 12 nt, Human
uucuuucuggcu

SEQ ID NO: 3695283 - RNA, 17 nt, Human
uucuuucuggcuaugca

SEQ ID NO: 3695284 - RNA, 13 nt, Human
uucuuucuuuaaa

SEQ ID NO: 3695285 - RNA, 16 nt, Human
uucuuucuuugggaau

SEQ ID NO: 3695286 - RNA, 22 nt, Human
uucuuugaaaauaguuauucag

SEQ ID NO: 3695287 - RNA, 17 nt, Human
uucuuugaauaaauguc

SEQ ID NO: 3695288 - RNA, 18 nt, Human
uucuuugaauaaauguca

SEQ ID NO: 3695289 - RNA, 15 nt, Human
uucuuugaauuuacu

SEQ ID NO: 3695290 - RNA, 22 nt, Human
uucuuugaauuuucauuuuaca

SEQ ID NO: 3695291 - RNA, 16 nt, Human
uucuuugauaauguua

SEQ ID NO: 3695292 - RNA, 22 nt, Human
uucuuugaucaugaauaacuga

SEQ ID NO: 3695293 - RNA, 13 nt, Human
uucuuugauucuc

SEQ ID NO: 3695294 - RNA, 14 nt, Human
uucuuugauucugu

SEQ ID NO: 3695295 - RNA, 18 nt, Human
uucuuugccaucucugcu

SEQ ID NO: 3695296 - RNA, 14 nt, Human
uucuuugcuguaag

SEQ ID NO: 3695297 - RNA, 17 nt, Human
uucuuugcuugaacaca

SEQ ID NO: 3695298 - RNA, 22 nt, Human
uucuuugcuugaacacaguauu

SEQ ID NO: 3695299 - RNA, 16 nt, Human
uucuuuggaguuaaaa

SEQ ID NO: 3695300 - RNA, 18 nt, Human
uucuuugggaauauuuga

SEQ ID NO: 3695301 - RNA, 20 nt, Human
uucuuugggaauauuugaau

SEQ ID NO: 3695302 - RNA, 21 nt, Human
uucuuuggugccuuuccuguu

SEQ ID NO: 3695303 - RNA, 12 nt, Human
uucuuuguguag

SEQ ID NO: 3695304 - RNA, 19 nt, Human
uucuuuguguagcuuugcu

SEQ ID NO: 3695305 - RNA, 23 nt, Human
uucuuuguuaauuuggaccauuu

SEQ ID NO: 3695306 - RNA, 12 nt, Human
uucuuuuaagaa

SEQ ID NO: 3695307 - RNA, 13 nt, Human
uucuuuuaauuuu

SEQ ID NO: 3695308 - RNA, 21 nt, Human
uucuuuuauaaaaaaaaugaa

SEQ ID NO: 3695309 - RNA, 15 nt, Human
uucuuuucacauucu

SEQ ID NO: 3695310 - RNA, 13 nt, Human
uucuuuucccccu

SEQ ID NO: 3695311 - RNA, 22 nt, Human
uucuuuucucauguguuugcau

SEQ ID NO: 3695312 - RNA, 21 nt, Human
uucuuuucuggaauguaauca

SEQ ID NO: 3695313 - RNA, 20 nt, Human
uucuuuucuucacucaaauu

SEQ ID NO: 3695314 - RNA, 23 nt, Human
uucuuuuguuacuguucuugcug

SEQ ID NO: 3695315 - RNA, 14 nt, Human
uucuuuuguuuggu

SEQ ID NO: 3695316 - RNA, 15 nt, Human
uucuuuuguuuggua

SEQ ID NO: 3695317 - RNA, 22 nt, Human
uucuuuuguuuuuugaaguguu

SEQ ID NO: 3695318 - RNA, 16 nt, Human
uucuuuuuaaaauggu

SEQ ID NO: 3695319 - RNA, 20 nt, Human
uucuuuuuaaaauggugcuu

SEQ ID NO: 3695320 - RNA, 20 nt, Human
uucuuuuuaaagcuuuugau

SEQ ID NO: 3695321 - RNA, 13 nt, Human
uucuuuuuacaua

SEQ ID NO: 3695322 - RNA, 18 nt, Human
uucuuuuuacauaacugc

SEQ ID NO: 3695323 - RNA, 16 nt, Human
uucuuuuuauuuucuu

SEQ ID NO: 3695324 - RNA, 13 nt, Human
uucuuuuugcucu

SEQ ID NO: 3695325 - RNA, 20 nt, Human
uucuuuuugcucuaaaauau

SEQ ID NO: 3695326 - RNA, 14 nt, Human
uucuuuuuuauuaa

SEQ ID NO: 3695327 - RNA, 22 nt, Human
uucuuuuuugugugauuuaaga

SEQ ID NO: 3695328 - RNA, 21 nt, Human
uucuuuuuuuuuuuuuugaga

SEQ ID NO: 3695329 - RNA, 13 nt, Human
uugaaaaaaaaua

SEQ ID NO: 3695330 - RNA, 11 nt, Human
uugaaaaaagc

SEQ ID NO: 3695331 - RNA, 14 nt, Human
uugaaaaaagcuca

SEQ ID NO: 3695332 - RNA, 15 nt, Human
uugaaaaaagcucau

SEQ ID NO: 3695333 - RNA, 17 nt, Human
uugaaaaaagcucauuu

SEQ ID NO: 3695334 - RNA, 18 nt, Human
uugaaaaaguuaaugcuu

SEQ ID NO: 3695335 - RNA, 19 nt, Human
uugaaaaauauaaaauuau

SEQ ID NO: 3695336 - RNA, 16 nt, Human
uugaaaaauuccuauu

SEQ ID NO: 3695337 - RNA, 19 nt, Human
uugaaaacacuguucucug

SEQ ID NO: 3695338 - RNA, 22 nt, Human
uugaaaacacuguucucugccc

SEQ ID NO: 3695339 - RNA, 23 nt, Human
uugaaaacacuguucucugcccu

SEQ ID NO: 3695340 - RNA, 16 nt, Human
uugaaaaccaaaauga

SEQ ID NO: 3695341 - RNA, 17 nt, Human
uugaaaaccaaaaugac

SEQ ID NO: 3695342 - RNA, 22 nt, Human
uugaaaaccaaaaugacaucuu

SEQ ID NO: 3695343 - RNA, 24 nt, Human
uugaaaaccaacaccaucacagcu

SEQ ID NO: 3695344 - RNA, 18 nt, Human
uugaaaaccuaaaagaca

SEQ ID NO: 3695345 - RNA, 15 nt, Human
uugaaaacuacauuu

SEQ ID NO: 3695346 - RNA, 20 nt, Human
uugaaaacuacauuuuaaca

SEQ ID NO: 3695347 - RNA, 16 nt, Human
uugaaaacuucagaag

SEQ ID NO: 3695348 - RNA, 13 nt, Human
uugaaaacuuuuc

SEQ ID NO: 3695349 - RNA, 16 nt, Human
uugaaaacuuuucuca

SEQ ID NO: 3695350 - RNA, 13 nt, Human
uugaaaagacauc

SEQ ID NO: 3695351 - RNA, 13 nt, Human
uugaaaagaggug

SEQ ID NO: 3695352 - RNA, 22 nt, Human
uugaaaaguaauauuuauuaaa

SEQ ID NO: 3695353 - RNA, 15 nt, Human
uugaaaagucaaacu

SEQ ID NO: 3695354 - RNA, 20 nt, Human
uugaaaauguaaguaaaugu

SEQ ID NO: 3695355 - RNA, 16 nt, Human
uugaaaauguccagga

SEQ ID NO: 3695356 - RNA, 15 nt, Human
uugaaacaauacuca

SEQ ID NO: 3695357 - RNA, 15 nt, Human
uugaaacacugguuu

SEQ ID NO: 3695358 - RNA, 19 nt, Human
uugaaacacuuuuuugggg

SEQ ID NO: 3695359 - RNA, 12 nt, Human
uugaaacauugc

SEQ ID NO: 3695360 - RNA, 18 nt, Human
uugaaacauugcuuuuaa

SEQ ID NO: 3695361 - RNA, 14 nt, Human
uugaaaccugcucu

SEQ ID NO: 3695362 - RNA, 14 nt, Human
uugaaaccuguaua

SEQ ID NO: 3695363 - RNA, 20 nt, Human
uugaaacggaugauuucuau

SEQ ID NO: 3695364 - RNA, 22 nt, Human
uugaaacggaugauuucuaugc

SEQ ID NO: 3695365 - RNA, 15 nt, Human
uugaaagaauguaaa

SEQ ID NO: 3695366 - RNA, 16 nt, Human
uugaaagaauuauccu

SEQ ID NO: 3695367 - RNA, 13 nt, Human
uugaaagaccuuc

SEQ ID NO: 3695368 - RNA, 15 nt, Human
uugaaagauucaggu

SEQ ID NO: 3695369 - RNA, 13 nt, Human
uugaaagcaaaaa

SEQ ID NO: 3695370 - RNA, 19 nt, Human
uugaaagcaaaaaugcuaa

SEQ ID NO: 3695371 - RNA, 19 nt, Human
uugaaagccccagaaauca

SEQ ID NO: 3695372 - RNA, 12 nt, Human
uugaaagcugug

SEQ ID NO: 3695373 - RNA, 22 nt, Human
uugaaagcuguggccagcuugu

SEQ ID NO: 3695374 - RNA, 20 nt, Human
uugaaaggcauucucugaag

SEQ ID NO: 3695375 - RNA, 21 nt, Human
uugaaagggguugugaagagg

SEQ ID NO: 3695376 - RNA, 22 nt, Human
uugaaagugaauaaacuucagc

SEQ ID NO: 3695377 - RNA, 20 nt, Human
uugaaagugggcaaaagcuu

SEQ ID NO: 3695378 - RNA, 16 nt, Human
uugaaauaaaaagagu

SEQ ID NO: 3695379 - RNA, 16 nt, Human
uugaaauaacuggaac

SEQ ID NO: 3695380 - RNA, 21 nt, Human
uugaaauaacuggaacaaauu

SEQ ID NO: 3695381 - RNA, 15 nt, Human
uugaaauaagcuauu

SEQ ID NO: 3695382 - RNA, 20 nt, Human
uugaaauauaggaacuuaaa

SEQ ID NO: 3695383 - RNA, 22 nt, Human
uugaaauauauggucuaauguu

SEQ ID NO: 3695384 - RNA, 19 nt, Human
uugaaaucaaugcaagagu

SEQ ID NO: 3695385 - RNA, 15 nt, Human
uugaaaucuguaucu

SEQ ID NO: 3695386 - RNA, 21 nt, Human
uugaaaugaaauuuaaacauu

SEQ ID NO: 3695387 - RNA, 15 nt, Human
uugaaauggaaauua

SEQ ID NO: 3695388 - RNA, 11 nt, Human
uugaaauguaa

SEQ ID NO: 3695389 - RNA, 14 nt, Human
uugaaaugucacgu

SEQ ID NO: 3695390 - RNA, 19 nt, Human
uugaaauguguuucuguau

SEQ ID NO: 3695391 - RNA, 18 nt, Human
uugaaauuaaccucucac

SEQ ID NO: 3695392 - RNA, 19 nt, Human
uugaaauuauaucuguggu

SEQ ID NO: 3695393 - RNA, 20 nt, Human
uugaaauuaugugacauuuu

SEQ ID NO: 3695394 - RNA, 21 nt, Human
uugaaauucuauuuauaauac

SEQ ID NO: 3695395 - RNA, 12 nt, Human
uugaaauucuga

SEQ ID NO: 3695396 - RNA, 15 nt, Human
uugaaauucugaauu

SEQ ID NO: 3695397 - RNA, 18 nt, Human
uugaaauugaaccuuugu

SEQ ID NO: 3695398 - RNA, 15 nt, Human
uugaaauuguaauua

SEQ ID NO: 3695399 - RNA, 19 nt, Human
uugaaauugugaacucauu

SEQ ID NO: 3695400 - RNA, 14 nt, Human
uuauacuggcaugc

SEQ ID NO: 3695401 - RNA, 24 nt, Human
uuauacugggacaccauuaccaaa

SEQ ID NO: 3695402 - RNA, 23 nt, Human
uuauagagcagaaauucuguuuu

SEQ ID NO: 3695403 - RNA, 19 nt, Human
uuauagagggccaagacuu

SEQ ID NO: 3695404 - RNA, 21 nt, Human
uuauagaugggaaugaagcuu

SEQ ID NO: 3695405 - RNA, 14 nt, Human
uuauagauucuaaa

SEQ ID NO: 3695406 - RNA, 15 nt, Human
uuauagauucuaaag

SEQ ID NO: 3695407 - RNA, 19 nt, Human
uuauagauucuaaagauuc

SEQ ID NO: 3695408 - RNA, 20 nt, Human
uuauagauucuaaagauucu

SEQ ID NO: 3695409 - RNA, 21 nt, Human
uuauagauucuaaagauucua

SEQ ID NO: 3695410 - RNA, 17 nt, Human
uuauagccucugucugg

SEQ ID NO: 3695411 - RNA, 24 nt, Human
uuauaggauuuauuuaaaauagca

SEQ ID NO: 3695412 - RNA, 18 nt, Human
uuauaggucacuccuggg

SEQ ID NO: 3695413 - RNA, 18 nt, Human
uuauagguccuuuagaaa

SEQ ID NO: 3695414 - RNA, 16 nt, Human
uuauaguacaugauaa

SEQ ID NO: 3695415 - RNA, 17 nt, Human
uuauaguacaugauaaa

SEQ ID NO: 3695416 - RNA, 15 nt, Human
uuauaguauaucugg

SEQ ID NO: 3695417 - RNA, 17 nt, Human
uuauagugcaauauauu

SEQ ID NO: 3695418 - RNA, 19 nt, Human
uuauagugcaauauauuuu

SEQ ID NO: 3695419 - RNA, 17 nt, Human
uuauaguuaaucuauaa

SEQ ID NO: 3695420 - RNA, 19 nt, Human
uuauaguuacuguguaauu

SEQ ID NO: 3695421 - RNA, 15 nt, Human
uuauaguuguaacua

SEQ ID NO: 3695422 - RNA, 12 nt, Human
uuauaguuucug

SEQ ID NO: 3695423 - RNA, 13 nt, Human
uuauaguuucuga

SEQ ID NO: 3695424 - RNA, 17 nt, Human
uuauauaaagagaaaau

SEQ ID NO: 3695425 - RNA, 19 nt, Human
uuauauaaagagaaaauug

SEQ ID NO: 3695426 - RNA, 14 nt, Human
uuauauaaaguauu

SEQ ID NO: 3695427 - RNA, 18 nt, Human
uuauauaaaguauucuuu

SEQ ID NO: 3695428 - RNA, 23 nt, Human
uuauauaaauguaaaaauaauaa

SEQ ID NO: 3695429 - RNA, 12 nt, Human
uuauauaacugu

SEQ ID NO: 3695430 - RNA, 16 nt, Human
uuauauaaguauucua

SEQ ID NO: 3695431 - RNA, 18 nt, Human
uuauauaauaucuaaagu

SEQ ID NO: 3695432 - RNA, 17 nt, Human
uuauauacaauaaugga

SEQ ID NO: 3695433 - RNA, 19 nt, Human
uuauauacaauaauggaaa

SEQ ID NO: 3695434 - RNA, 14 nt, Human
uuauauacagagga

SEQ ID NO: 3695435 - RNA, 21 nt, Human
uuauauacagaggaaaucugu

SEQ ID NO: 3695436 - RNA, 18 nt, Human
uuauauacuuguuguuua

SEQ ID NO: 3695437 - RNA, 22 nt, Human
uuauauacuuguuguuuaaugu

SEQ ID NO: 3695438 - RNA, 21 nt, Human
uuauauagguuuuguuugcua

SEQ ID NO: 3695439 - RNA, 23 nt, Human
uuauauagguuuuguuugcuauc

SEQ ID NO: 3695440 - RNA, 15 nt, Human
uuauauauaaauaua

SEQ ID NO: 3695441 - RNA, 15 nt, Human
uuauauauacaguaa

SEQ ID NO: 3695442 - RNA, 14 nt, Human
uuauauauauaucu

SEQ ID NO: 3695443 - RNA, 22 nt, Human
uuauauauauuuuuuucugaaa

SEQ ID NO: 3695444 - RNA, 14 nt, Human
uuauauauggacau

SEQ ID NO: 3695445 - RNA, 19 nt, Human
uuauauauuauauggaaau

SEQ ID NO: 3695446 - RNA, 16 nt, Human
uuauauauuuaaaagu

SEQ ID NO: 3695447 - RNA, 15 nt, Human
uuauauauuuauaac

SEQ ID NO: 3695448 - RNA, 20 nt, Human
uuauauauuuauaacucauc

SEQ ID NO: 3695449 - RNA, 23 nt, Human
uuauauauuuauaacucaucaua

SEQ ID NO: 3695450 - RNA, 14 nt, Human
uuauaucaaaguau

SEQ ID NO: 3695451 - RNA, 19 nt, Human
uuauaucuauauuuuacau

SEQ ID NO: 3695452 - RNA, 16 nt, Human
uuauaucuggccucug

SEQ ID NO: 3695453 - RNA, 17 nt, Human
uuauaucuguacaauga

SEQ ID NO: 3695454 - RNA, 22 nt, Human
uuauaucuuguagcuuuaucaa

SEQ ID NO: 3695455 - RNA, 18 nt, Human
uuauaugcuauuucuaua

SEQ ID NO: 3695456 - RNA, 13 nt, Human
uuauaugcuuacu

SEQ ID NO: 3695457 - RNA, 14 nt, Human
uuauauggaaauuc

SEQ ID NO: 3695458 - RNA, 15 nt, Human
uuauauggaagaaag

SEQ ID NO: 3695459 - RNA, 18 nt, Human
uuauauggaagaaaguaa

SEQ ID NO: 3695460 - RNA, 20 nt, Human
uuauauggaugauucagaaa

SEQ ID NO: 3695461 - RNA, 19 nt, Human
uuauauguacccucugaaa

SEQ ID NO: 3695462 - RNA, 24 nt, Human
uuauauguacccucugaaauacau

SEQ ID NO: 3695463 - RNA, 16 nt, Human
uuauauguaccguagg

SEQ ID NO: 3695464 - RNA, 14 nt, Human
uuauauguacuguu

SEQ ID NO: 3695465 - RNA, 20 nt, Human
uuauauguauccaguacauu

SEQ ID NO: 3695466 - RNA, 21 nt, Human
uuauauguauccaguacauuu

SEQ ID NO: 3695467 - RNA, 15 nt, Human
uuauauguauguguu

SEQ ID NO: 3695468 - RNA, 20 nt, Human
uuauauguauguguuuagaa

SEQ ID NO: 3695469 - RNA, 18 nt, Human
uuauauguuguaagcaac

SEQ ID NO: 3695470 - RNA, 18 nt, Human
uuauauguuguaauauuu

SEQ ID NO: 3695471 - RNA, 15 nt, Human
uuauauguuguucuu

SEQ ID NO: 3695472 - RNA, 11 nt, Human
uuauauucaac

SEQ ID NO: 3695473 - RNA, 16 nt, Human
uuauauucaaccaugg

SEQ ID NO: 3695474 - RNA, 14 nt, Human
uuauauugaaaaaa

SEQ ID NO: 3695475 - RNA, 22 nt, Human
uuauauugaagacaauuugaua

SEQ ID NO: 3695476 - RNA, 18 nt, Human
uuauauugagacaaaaau

SEQ ID NO: 3695477 - RNA, 15 nt, Human
uuauauugauaacag

SEQ ID NO: 3695478 - RNA, 16 nt, Human
uuauauuguaagaaau

SEQ ID NO: 3695479 - RNA, 16 nt, Human
uuauauuuacaaaugg

SEQ ID NO: 3695480 - RNA, 17 nt, Human
uuauauuuaguuauagu

SEQ ID NO: 3695481 - RNA, 18 nt, Human
uuauauuuaguuauaguu

SEQ ID NO: 3695482 - RNA, 18 nt, Human
uuauauuuaugugucugu

SEQ ID NO: 3695483 - RNA, 20 nt, Human
uuauauuucccuaaaauaca

SEQ ID NO: 3695484 - RNA, 22 nt, Human
uuauauuucccuaaaauacauu

SEQ ID NO: 3695485 - RNA, 14 nt, Human
uuauauuuccuuua

SEQ ID NO: 3695486 - RNA, 20 nt, Human
uuauauuuccuuuaugugaa

SEQ ID NO: 3695487 - RNA, 12 nt, Human
uuauauuugaaa

SEQ ID NO: 3695488 - RNA, 13 nt, Human
uuauauuugaaau

SEQ ID NO: 3695489 - RNA, 19 nt, Human
uuauauuuuacuacugugg

SEQ ID NO: 3695490 - RNA, 12 nt, Human
uuauauuuucaa

SEQ ID NO: 3695491 - RNA, 15 nt, Human
uuauauuuugcaguu

SEQ ID NO: 3695492 - RNA, 19 nt, Human
uuauauuuuuaauaaaagu

SEQ ID NO: 3695493 - RNA, 15 nt, Human
uuauauuuuucuuaa

SEQ ID NO: 3695494 - RNA, 16 nt, Human
uuauauuuuucuuaaa

SEQ ID NO: 3695495 - RNA, 20 nt, Human
uuauauuuuucuuaaaaagu

SEQ ID NO: 3695496 - RNA, 21 nt, Human
uuauauuuuucuuaaaaagua

SEQ ID NO: 3695497 - RNA, 22 nt, Human
uuaucaaaaaaaaaaaaaugug

SEQ ID NO: 3695498 - RNA, 16 nt, Human
uuaucaaaacuuucuu

SEQ ID NO: 3695499 - RNA, 13 nt, Human
uuaucaaaucagu

SEQ ID NO: 3695500 - RNA, 15 nt, Human
uuaucaacuuccuaa

SEQ ID NO: 3695501 - RNA, 20 nt, Human
uuaucaagcuaauaaaauau

SEQ ID NO: 3695502 - RNA, 11 nt, Human
uuaucaagugu

SEQ ID NO: 3695503 - RNA, 14 nt, Human
uuaucaagugucuu

SEQ ID NO: 3695504 - RNA, 17 nt, Human
uuaucaauaucuaauau

SEQ ID NO: 3695505 - RNA, 22 nt, Human
uuaucaauaucuaauauauaug

SEQ ID NO: 3695506 - RNA, 19 nt, Human
uuaucaauuacaacaguga

SEQ ID NO: 3695507 - RNA, 23 nt, Human
uuaucaauuugucauuuugaagc

SEQ ID NO: 3695508 - RNA, 19 nt, Human
uuaucacacaaagcagaau

SEQ ID NO: 3695509 - RNA, 19 nt, Human
uuaucacauguauguuuug

SEQ ID NO: 3695510 - RNA, 18 nt, Human
uuaucacauuauuugcau

SEQ ID NO: 3695511 - RNA, 18 nt, Human
uuaucaccacaguaaguu

SEQ ID NO: 3695512 - RNA, 20 nt, Human
uuaucaccagagagggacug

SEQ ID NO: 3695513 - RNA, 19 nt, Human
uuaucaccagcugccucuu

SEQ ID NO: 3695514 - RNA, 21 nt, Human
uuaucacccagaagaaaauag

SEQ ID NO: 3695515 - RNA, 18 nt, Human
uuaucaccuggcuuguuu

SEQ ID NO: 3695516 - RNA, 15 nt, Human
uuaucacuuuucugu

SEQ ID NO: 3695517 - RNA, 17 nt, Human
uuaucacuuuuugaacu

SEQ ID NO: 3695518 - RNA, 21 nt, Human
uuaucacuuuuugaacuaaga

SEQ ID NO: 3695519 - RNA, 15 nt, Human
uuaucagaacuaugu

SEQ ID NO: 3695520 - RNA, 15 nt, Human
uuaucagagucauga

SEQ ID NO: 3695521 - RNA, 22 nt, Human
uuaucagcuacuuaagagaaau

SEQ ID NO: 3695522 - RNA, 21 nt, Human
uuaucaguaagaaaaagaaga

SEQ ID NO: 3695523 - RNA, 14 nt, Human
uuaucagucaauau

SEQ ID NO: 3695524 - RNA, 23 nt, Human
uuaucagucaauauuuuuagaua

SEQ ID NO: 3695525 - RNA, 13 nt, Human
uuaucaugaagcc

SEQ ID NO: 3695526 - RNA, 22 nt, Human
uuaucaugaagccuguggauga

SEQ ID NO: 3695527 - RNA, 11 nt, Human
uuaucaugcaa

SEQ ID NO: 3695528 - RNA, 13 nt, Human
uuaucaugcuguc

SEQ ID NO: 3695529 - RNA, 20 nt, Human
uuaucaugugaaaucauuca

SEQ ID NO: 3695530 - RNA, 13 nt, Human
uuaucauguguaa

SEQ ID NO: 3695531 - RNA, 15 nt, Human
uuaucauguguaauc

SEQ ID NO: 3695532 - RNA, 21 nt, Human
uuaucauguguaaucaauaaa

SEQ ID NO: 3695533 - RNA, 18 nt, Human
uuaucauguuaguaauac

SEQ ID NO: 3695534 - RNA, 12 nt, Human
uuaucauuuuca

SEQ ID NO: 3695535 - RNA, 22 nt, Human
uuauccaaaaguggaagugaca

SEQ ID NO: 3695536 - RNA, 19 nt, Human
uuauccauuuguaauuaaa

SEQ ID NO: 3695537 - RNA, 13 nt, Human
uuaucccugccca

SEQ ID NO: 3695538 - RNA, 16 nt, Human
uuaucccuuaagaaug

SEQ ID NO: 3695539 - RNA, 21 nt, Human
uuauccucugaucuccauggc

SEQ ID NO: 3695540 - RNA, 11 nt, Human
uuauccucugu

SEQ ID NO: 3695541 - RNA, 20 nt, Human
uuauccucuuuagaguuaga

SEQ ID NO: 3695542 - RNA, 16 nt, Human
uuauccugaaauuuca

SEQ ID NO: 3695543 - RNA, 22 nt, Human
uuauccugaacucuucugcaaa

SEQ ID NO: 3695544 - RNA, 15 nt, Human
uuaucgaaauaacaa

SEQ ID NO: 3695545 - RNA, 21 nt, Human
uuaucgaaauaacaauguuaa

SEQ ID NO: 3695546 - RNA, 21 nt, Human
uuaucgccuuuugacagcugu

SEQ ID NO: 3695547 - RNA, 14 nt, Human
uuaucggaagcagu

SEQ ID NO: 3695548 - RNA, 14 nt, Human
uuaucgggaacagu

SEQ ID NO: 3695549 - RNA, 11 nt, Human
uagauagaaau

SEQ ID NO: 3695550 - RNA, 12 nt, Human
uagauagaaaua

SEQ ID NO: 3695551 - RNA, 23 nt, Human
uagauagaaauaaauagcuauau

SEQ ID NO: 3695552 - RNA, 19 nt, Human
uagauagcagccuggcucc

SEQ ID NO: 3695553 - RNA, 17 nt, Human
uagauagcccuguccug

SEQ ID NO: 3695554 - RNA, 19 nt, Human
uagauagcccuguccuggu

SEQ ID NO: 3695555 - RNA, 14 nt, Human
uagauaggccaugg

SEQ ID NO: 3695556 - RNA, 17 nt, Human
uagauaggccaugggca

SEQ ID NO: 3695557 - RNA, 13 nt, Human
uagauagggcugg

SEQ ID NO: 3695558 - RNA, 16 nt, Human
uagauagguaaauacc

SEQ ID NO: 3695559 - RNA, 13 nt, Human
uagauauaaugaa

SEQ ID NO: 3695560 - RNA, 14 nt, Human
uagauauaaugaac

SEQ ID NO: 3695561 - RNA, 23 nt, Human
uagauauaaugaacaaaauuauu

SEQ ID NO: 3695562 - RNA, 15 nt, Human
uagauauccucugcu

SEQ ID NO: 3695563 - RNA, 15 nt, Human
uagauauuacuuuau

SEQ ID NO: 3695564 - RNA, 13 nt, Human
uagauauuuggcu

SEQ ID NO: 3695565 - RNA, 17 nt, Human
uagauauuuggcuuaaa

SEQ ID NO: 3695566 - RNA, 12 nt, Human
uagauauuuuca

SEQ ID NO: 3695567 - RNA, 15 nt, Human
uagauauuuucacaa

SEQ ID NO: 3695568 - RNA, 17 nt, Human
uagaucaaauacuuuaa

SEQ ID NO: 3695569 - RNA, 17 nt, Human
uagaucacauaacagaa

SEQ ID NO: 3695570 - RNA, 20 nt, Human
uagaucacauaacagaaugc

SEQ ID NO: 3695571 - RNA, 19 nt, Human
uagaucagaugcuccaaga

SEQ ID NO: 3695572 - RNA, 14 nt, Human
uagaucauaaggcu

SEQ ID NO: 3695573 - RNA, 13 nt, Human
uagaucauaguuu

SEQ ID NO: 3695574 - RNA, 17 nt, Human
uagaucauaguuuuauu

SEQ ID NO: 3695575 - RNA, 21 nt, Human
uagauccauuuccauugcuua

SEQ ID NO: 3695576 - RNA, 17 nt, Human
uagauccuaagaugugu

SEQ ID NO: 3695577 - RNA, 21 nt, Human
uagauccuaagauguguucuu

SEQ ID NO: 3695578 - RNA, 19 nt, Human
uagaucuccaggagaacug

SEQ ID NO: 3695579 - RNA, 13 nt, Human
uagaucucugaag

SEQ ID NO: 3695580 - RNA, 16 nt, Human
uagaucuggcauguua

SEQ ID NO: 3695581 - RNA, 15 nt, Human
uagaugaacucaacu

SEQ ID NO: 3695582 - RNA, 18 nt, Human
uagaugacauugacuauu

SEQ ID NO: 3695583 - RNA, 20 nt, Human
uagaugagaauucagcugcc

SEQ ID NO: 3695584 - RNA, 23 nt, Human
uagaugagcccagcccuguucug

SEQ ID NO: 3695585 - RNA, 12 nt, Human
uagaugauaaag

SEQ ID NO: 3695586 - RNA, 14 nt, Human
uagaugauguauuu

SEQ ID NO: 3695587 - RNA, 21 nt, Human
uagaugauuaaauaagauucu

SEQ ID NO: 3695588 - RNA, 18 nt, Human
uagaugauuucaguucua

SEQ ID NO: 3695589 - RNA, 22 nt, Human
uagaugauuucaguucuaggaa

SEQ ID NO: 3695590 - RNA, 15 nt, Human
uagaugcaguucuga

SEQ ID NO: 3695591 - RNA, 20 nt, Human
uagaugcauuuggguccagg

SEQ ID NO: 3695592 - RNA, 22 nt, Human
uagaugcauuuggguccaggag

SEQ ID NO: 3695593 - RNA, 23 nt, Human
uagaugcauuuggguccaggagg

SEQ ID NO: 3695594 - RNA, 16 nt, Human
uagaugccugaacuug

SEQ ID NO: 3695595 - RNA, 17 nt, Human
uagaugcgcagccccau

SEQ ID NO: 3695596 - RNA, 16 nt, Human
uagaugcuacuaagaa

SEQ ID NO: 3695597 - RNA, 10 nt, Human
uagaugcuga

SEQ ID NO: 3695598 - RNA, 23 nt, Human
uagaugcugacuguacuccuccc

SEQ ID NO: 3695599 - RNA, 15 nt, Human
uagaugcuggcccag

SEQ ID NO: 3695600 - RNA, 16 nt, Human
uagaugcuggcccagg

SEQ ID NO: 3695601 - RNA, 22 nt, Human
uagaugcuggcccagggcccag

SEQ ID NO: 3695602 - RNA, 14 nt, Human
uagauggugaaauu

SEQ ID NO: 3695603 - RNA, 16 nt, Human
uagaugguuacacugu

SEQ ID NO: 3695604 - RNA, 20 nt, Human
uagaugguuacacuguuaga

SEQ ID NO: 3695605 - RNA, 15 nt, Human
uagauguaguauuuu

SEQ ID NO: 3695606 - RNA, 17 nt, Human
uagauguaguauuuuuu

SEQ ID NO: 3695607 - RNA, 19 nt, Human
uagauguaugcacacacau

SEQ ID NO: 3695608 - RNA, 16 nt, Human
uagauguauguacuuc

SEQ ID NO: 3695609 - RNA, 18 nt, Human
uagaugucccuuucuugg

SEQ ID NO: 3695610 - RNA, 23 nt, Human
uagaugucccuuucuuggccagu

SEQ ID NO: 3695611 - RNA, 19 nt, Human
uagaugugauuuaauagug

SEQ ID NO: 3695612 - RNA, 22 nt, Human
uagaugugcauuuuugugaaau

SEQ ID NO: 3695613 - RNA, 21 nt, Human
uagauguucuaagucuuucca

SEQ ID NO: 3695614 - RNA, 15 nt, Human
uagauguucuacuuu

SEQ ID NO: 3695615 - RNA, 21 nt, Human
uagauguucucuaucauuuaa

SEQ ID NO: 3695616 - RNA, 22 nt, Human
uagauguucucuaucauuuaau

SEQ ID NO: 3695617 - RNA, 21 nt, Human
uagauguuuauucuucuagag

SEQ ID NO: 3695618 - RNA, 16 nt, Human
uagauguuuugguaga

SEQ ID NO: 3695619 - RNA, 21 nt, Human
uagauguuuugguagauuaaa

SEQ ID NO: 3695620 - RNA, 20 nt, Human
uagauuaaauauagauuaga

SEQ ID NO: 3695621 - RNA, 18 nt, Human
uagauuaaaucauacucc

SEQ ID NO: 3695622 - RNA, 15 nt, Human
uagauuaauggcacu

SEQ ID NO: 3695623 - RNA, 16 nt, Human
uagauuagaauucugu

SEQ ID NO: 3695624 - RNA, 16 nt, Human
uagauuagcucuggac

SEQ ID NO: 3695625 - RNA, 21 nt, Human
uagauuaguacuggauuauuc

SEQ ID NO: 3695626 - RNA, 21 nt, Human
uagauuauauugagacaaaaa

SEQ ID NO: 3695627 - RNA, 13 nt, Human
uagauucaaaggu

SEQ ID NO: 3695628 - RNA, 16 nt, Human
uagauucaaagguucu

SEQ ID NO: 3695629 - RNA, 17 nt, Human
uagauucaaagguucua

SEQ ID NO: 3695630 - RNA, 22 nt, Human
uagauucaccuguaaaacuuua

SEQ ID NO: 3695631 - RNA, 16 nt, Human
uagauuccauuuacug

SEQ ID NO: 3695632 - RNA, 15 nt, Human
uagauucuaaagauu

SEQ ID NO: 3695633 - RNA, 23 nt, Human
uagauucucuggcuguaaggcuc

SEQ ID NO: 3695634 - RNA, 23 nt, Human
uagauucucugugucuaagauuc

SEQ ID NO: 3695635 - RNA, 21 nt, Human
uagauugaaaacuuuucucag

SEQ ID NO: 3695636 - RNA, 16 nt, Human
uagauugcuucuguag

SEQ ID NO: 3695637 - RNA, 18 nt, Human
uagauuguccuuuugcaa

SEQ ID NO: 3695638 - RNA, 13 nt, Human
uagauuuaauaua

SEQ ID NO: 3695639 - RNA, 23 nt, Human
uagauuucauaguucagaauuua

SEQ ID NO: 3695640 - RNA, 23 nt, Human
uagauuucucacacucuaacugu

SEQ ID NO: 3695641 - RNA, 13 nt, Human
uagauuugaccua

SEQ ID NO: 3695642 - RNA, 14 nt, Human
uagauuugaccucc

SEQ ID NO: 3695643 - RNA, 24 nt, Human
uagauuuggcuccucugcuucuca

SEQ ID NO: 3695644 - RNA, 20 nt, Human
uagauuugugugcaucaggc

SEQ ID NO: 3695645 - RNA, 13 nt, Human
uagauuuguuuug

SEQ ID NO: 3695646 - RNA, 14 nt, Human
uagauuuguuuugu

SEQ ID NO: 3695647 - RNA, 17 nt, Human
uagauuuuacaugaagu

SEQ ID NO: 3695648 - RNA, 17 nt, Human
uagauuuuauuuuacua

SEQ ID NO: 3695649 - RNA, 12 nt, Human
uagauuuuccaa

SEQ ID NO: 3695650 - RNA, 13 nt, Human
uagauuuuccaaa

SEQ ID NO: 3695651 - RNA, 14 nt, Human
uagauuuucugguu

SEQ ID NO: 3695652 - RNA, 17 nt, Human
uagauuuucugguucua

SEQ ID NO: 3695653 - RNA, 19 nt, Human
uagauuuucugguucuaac

SEQ ID NO: 3695654 - RNA, 21 nt, Human
uagauuuucugguucuaacau

SEQ ID NO: 3695655 - RNA, 15 nt, Human
uagauuuucuuuaaa

SEQ ID NO: 3695656 - RNA, 23 nt, Human
uagauuuuguuuugcuuuuucug

SEQ ID NO: 3695657 - RNA, 18 nt, Human
uagcaaaaaguggggcag

SEQ ID NO: 3695658 - RNA, 23 nt, Human
uagcaaaacgcauggagugugua

SEQ ID NO: 3695659 - RNA, 16 nt, Human
uagcaaaacuuuuaaa

SEQ ID NO: 3695660 - RNA, 21 nt, Human
uagcaaaacuuuuaaacuaca

SEQ ID NO: 3695661 - RNA, 14 nt, Human
uagcaaaagaagua

SEQ ID NO: 3695662 - RNA, 17 nt, Human
uagcaaaagaaguaaca

SEQ ID NO: 3695663 - RNA, 23 nt, Human
uagcaaaauaaaacauagcaaau

SEQ ID NO: 3695664 - RNA, 17 nt, Human
uagcaaacccugucaaa

SEQ ID NO: 3695665 - RNA, 12 nt, Human
uagcaaagaauu

SEQ ID NO: 3695666 - RNA, 21 nt, Human
uagcaaagcggguuauaauga

SEQ ID NO: 3695667 - RNA, 16 nt, Human
uagcaacaacaauugg

SEQ ID NO: 3695668 - RNA, 19 nt, Human
uagcaacaacaauugguaa

SEQ ID NO: 3695669 - RNA, 17 nt, Human
uagcaagacacaucccu

SEQ ID NO: 3695670 - RNA, 24 nt, Human
uagcaagauugcuuaaaauagcaa

SEQ ID NO: 3695671 - RNA, 15 nt, Human
uagcaagcuggccuc

SEQ ID NO: 3695672 - RNA, 16 nt, Human
uagcaagcuggccucu

SEQ ID NO: 3695673 - RNA, 19 nt, Human
uagcaaggucauuucuuca

SEQ ID NO: 3695674 - RNA, 18 nt, Human
uagcaagugaauuuuucu

SEQ ID NO: 3695675 - RNA, 18 nt, Human
uagcaaguuacagugaug

SEQ ID NO: 3695676 - RNA, 15 nt, Human
uagcacagacccugc

SEQ ID NO: 3695677 - RNA, 17 nt, Human
uagcacagacccugccc

SEQ ID NO: 3695678 - RNA, 20 nt, Human
uagcacagacccugcccugu

SEQ ID NO: 3695679 - RNA, 22 nt, Human
uagcacagacccugcccugugg

SEQ ID NO: 3695680 - RNA, 14 nt, Human
uagcacagauuuua

SEQ ID NO: 3695681 - RNA, 22 nt, Human
uagcacagauuuuaauugucau

SEQ ID NO: 3695682 - RNA, 20 nt, Human
uagcacagcguuaugugucu

SEQ ID NO: 3695683 - RNA, 12 nt, Human
uagcacagcucc

SEQ ID NO: 3695684 - RNA, 13 nt, Human
uagcacagcuccc

SEQ ID NO: 3695685 - RNA, 15 nt, Human
uagcacaggcugagu

SEQ ID NO: 3695686 - RNA, 19 nt, Human
uagcacaggcugagugcag

SEQ ID NO: 3695687 - RNA, 18 nt, Human
uagcacaggggggccgcc

SEQ ID NO: 3695688 - RNA, 18 nt, Human
uagcacauaaacuuuggg

SEQ ID NO: 3695689 - RNA, 14 nt, Human
uagcaccagggaag

SEQ ID NO: 3695690 - RNA, 13 nt, Human
uagcaccagggac

SEQ ID NO: 3695691 - RNA, 20 nt, Human
uagcacguuuaaaguucugu

SEQ ID NO: 3695692 - RNA, 16 nt, Human
uagcacuaccacuccu

SEQ ID NO: 3695693 - RNA, 14 nt, Human
uagcacuaggcacc

SEQ ID NO: 3695694 - RNA, 16 nt, Human
uagcacuaggcaccca

SEQ ID NO: 3695695 - RNA, 18 nt, Human
uagcacucacaugcugga

SEQ ID NO: 3695696 - RNA, 19 nt, Human
uagcacugacagauuucca

SEQ ID NO: 3695697 - RNA, 13 nt, Human
uagcacugagcaa

SEQ ID NO: 3695698 - RNA, 15 nt, Human
uugaaauuuugcaaa

SEQ ID NO: 3695699 - RNA, 17 nt, Human
uugaaauuuugcaaaua

SEQ ID NO: 3695700 - RNA, 20 nt, Human
uugaaauuuugcaaauauaa

SEQ ID NO: 3695701 - RNA, 21 nt, Human
uugaaauuuuuauuaaauuau

SEQ ID NO: 3695702 - RNA, 14 nt, Human
uugaacacaaacug

SEQ ID NO: 3695703 - RNA, 15 nt, Human
uugaacacaaacugu

SEQ ID NO: 3695704 - RNA, 14 nt, Human
uugaacacaguauu

SEQ ID NO: 3695705 - RNA, 15 nt, Human
uugaacauguggcuu

SEQ ID NO: 3695706 - RNA, 18 nt, Human
uugaaccaaaacauuccg

SEQ ID NO: 3695707 - RNA, 17 nt, Human
uugaaccauaaaauguc

SEQ ID NO: 3695708 - RNA, 14 nt, Human
uugaaccauaguua

SEQ ID NO: 3695709 - RNA, 21 nt, Human
uugaaccauccacuuacauau

SEQ ID NO: 3695710 - RNA, 18 nt, Human
uugaacccgggaggcaga

SEQ ID NO: 3695711 - RNA, 19 nt, Human
uugaacccgggaggcagag

SEQ ID NO: 3695712 - RNA, 13 nt, Human
uugaaccuauuuc

SEQ ID NO: 3695713 - RNA, 19 nt, Human
uugaaccugaugaaaauaa

SEQ ID NO: 3695714 - RNA, 21 nt, Human
uugaaccugugaguaaauauu

SEQ ID NO: 3695715 - RNA, 22 nt, Human
uugaacgcccccccccaccccu

SEQ ID NO: 3695716 - RNA, 16 nt, Human
uugaacguuuucuaau

SEQ ID NO: 3695717 - RNA, 20 nt, Human
uugaacguuuucuaauugcu

SEQ ID NO: 3695718 - RNA, 18 nt, Human
uugaacuaagaaacuuuu

SEQ ID NO: 3695719 - RNA, 19 nt, Human
uugaacuaagaaacuuuug

SEQ ID NO: 3695720 - RNA, 16 nt, Human
uugaacucuucucauu

SEQ ID NO: 3695721 - RNA, 19 nt, Human
uugaacucuucucauuacu

SEQ ID NO: 3695722 - RNA, 15 nt, Human
uugaacugagcuugg

SEQ ID NO: 3695723 - RNA, 21 nt, Human
uugaacugauaguuacuguug

SEQ ID NO: 3695724 - RNA, 17 nt, Human
uugaacuguuagaaugu

SEQ ID NO: 3695725 - RNA, 18 nt, Human
uugaacuuccugcaggua

SEQ ID NO: 3695726 - RNA, 22 nt, Human
uugaacuuuccuggaugucuga

SEQ ID NO: 3695727 - RNA, 15 nt, Human
uugaacuuugaccuc

SEQ ID NO: 3695728 - RNA, 18 nt, Human
uugaacuuugaccucugc

SEQ ID NO: 3695729 - RNA, 22 nt, Human
uugaacuuugaccucugcagca

SEQ ID NO: 3695730 - RNA, 23 nt, Human
uugaacuuuuguacugaauuuuu

SEQ ID NO: 3695731 - RNA, 22 nt, Human
uugaagaaauuauaaagauaaa

SEQ ID NO: 3695732 - RNA, 16 nt, Human
uugaagaacugcaggc

SEQ ID NO: 3695733 - RNA, 22 nt, Human
uugaagaagguggaccuuuuaa

SEQ ID NO: 3695734 - RNA, 16 nt, Human
uugaagaaugaacaaa

SEQ ID NO: 3695735 - RNA, 15 nt, Human
uugaagaauguuaag

SEQ ID NO: 3695736 - RNA, 17 nt, Human
uugaagacaaaaauacu

SEQ ID NO: 3695737 - RNA, 13 nt, Human
uugaagacaauuu

SEQ ID NO: 3695738 - RNA, 16 nt, Human
uugaagacaauuugau

SEQ ID NO: 3695739 - RNA, 22 nt, Human
uugaagacaauuugauacauaa

SEQ ID NO: 3695740 - RNA, 19 nt, Human
uugaagacuuuucuuucag

SEQ ID NO: 3695741 - RNA, 17 nt, Human
uugaagagagagcugag

SEQ ID NO: 3695742 - RNA, 22 nt, Human
uugaagaggaaaaugaauaaua

SEQ ID NO: 3695743 - RNA, 22 nt, Human
uugaagauaucuugaaaugaaa

SEQ ID NO: 3695744 - RNA, 12 nt, Human
uugaagcagagu

SEQ ID NO: 3695745 - RNA, 19 nt, Human
uugaagcauagauaauauu

SEQ ID NO: 3695746 - RNA, 17 nt, Human
uugaagcauuuuauaaa

SEQ ID NO: 3695747 - RNA, 13 nt, Human
uugaagccacuga

SEQ ID NO: 3695748 - RNA, 21 nt, Human
uugaagccugcccuugucuga

SEQ ID NO: 3695749 - RNA, 15 nt, Human
uugaagccugcuccu

SEQ ID NO: 3695750 - RNA, 19 nt, Human
uugaagcuaauuauuuuaa

SEQ ID NO: 3695751 - RNA, 23 nt, Human
uugaagcucuggugacaccagcc

SEQ ID NO: 3695752 - RNA, 16 nt, Human
uugaaggaauacaaua

SEQ ID NO: 3695753 - RNA, 18 nt, Human
uugaaggaauacaauaua

SEQ ID NO: 3695754 - RNA, 14 nt, Human
uugaaggacuaaua

SEQ ID NO: 3695755 - RNA, 16 nt, Human
uugaaggaugcugucu

SEQ ID NO: 3695756 - RNA, 15 nt, Human
uugaagggcccagga

SEQ ID NO: 3695757 - RNA, 23 nt, Human
uugaaggugcugacggccaggga

SEQ ID NO: 3695758 - RNA, 14 nt, Human
uugaagguuuuuga

SEQ ID NO: 3695759 - RNA, 16 nt, Human
uugaagguuuuugaua

SEQ ID NO: 3695760 - RNA, 16 nt, Human
uugaaguaaugaauuu

SEQ ID NO: 3695761 - RNA, 12 nt, Human
uugaaguauuua

SEQ ID NO: 3695762 - RNA, 15 nt, Human
uugaagucaugcucc

SEQ ID NO: 3695763 - RNA, 19 nt, Human
uugaagucuauaaaaaaua

SEQ ID NO: 3695764 - RNA, 18 nt, Human
uugaagucuuuaauaaau

SEQ ID NO: 3695765 - RNA, 18 nt, Human
uugaaguggccagaugag

SEQ ID NO: 3695766 - RNA, 21 nt, Human
uugaaguuguuacuaacuaaa

SEQ ID NO: 3695767 - RNA, 15 nt, Human
uugaaguuuacauuu

SEQ ID NO: 3695768 - RNA, 22 nt, Human
uugaaguuucaaguuuuaaagu

SEQ ID NO: 3695769 - RNA, 17 nt, Human
uugaauaaaaaccuuuu

SEQ ID NO: 3695770 - RNA, 14 nt, Human
uugaauaaaagugc

SEQ ID NO: 3695771 - RNA, 23 nt, Human
uugaauaaacaccacuggauuaa

SEQ ID NO: 3695772 - RNA, 21 nt, Human
uugaauaaagccugcuuuuua

SEQ ID NO: 3695773 - RNA, 19 nt, Human
uugaauaaugguaccagau

SEQ ID NO: 3695774 - RNA, 16 nt, Human
uugaauaccauuaaaa

SEQ ID NO: 3695775 - RNA, 14 nt, Human
uugaauacuugaac

SEQ ID NO: 3695776 - RNA, 19 nt, Human
uugaauacuuugaaugugu

SEQ ID NO: 3695777 - RNA, 13 nt, Human
uugaauacuuuuu

SEQ ID NO: 3695778 - RNA, 15 nt, Human
uugaauauaaacacu

SEQ ID NO: 3695779 - RNA, 16 nt, Human
uugaauauaaacacua

SEQ ID NO: 3695780 - RNA, 18 nt, Human
uugaauauaaacacuaua

SEQ ID NO: 3695781 - RNA, 13 nt, Human
uugaauauaugau

SEQ ID NO: 3695782 - RNA, 19 nt, Human
uugaauauauuauaaucuu

SEQ ID NO: 3695783 - RNA, 15 nt, Human
uugaauaugauuaaa

SEQ ID NO: 3695784 - RNA, 15 nt, Human
uugaauauggacaag

SEQ ID NO: 3695785 - RNA, 17 nt, Human
uugaauauggacaagag

SEQ ID NO: 3695786 - RNA, 13 nt, Human
uugaauauuacuc

SEQ ID NO: 3695787 - RNA, 21 nt, Human
uugaauauuacuccuauuuuu

SEQ ID NO: 3695788 - RNA, 23 nt, Human
uugaauauuacuccuauuuuugu

SEQ ID NO: 3695789 - RNA, 12 nt, Human
uugaauauugug

SEQ ID NO: 3695790 - RNA, 14 nt, Human
uugaaucaauaaua

SEQ ID NO: 3695791 - RNA, 19 nt, Human
uugaauccaugcuugggug

SEQ ID NO: 3695792 - RNA, 15 nt, Human
uugaauccucucucu

SEQ ID NO: 3695793 - RNA, 15 nt, Human
uugaaucuauuuaag

SEQ ID NO: 3695794 - RNA, 14 nt, Human
uugaaucuauuuca

SEQ ID NO: 3695795 - RNA, 14 nt, Human
uugaaucuugucuc

SEQ ID NO: 3695796 - RNA, 15 nt, Human
uugaaucuugucuca

SEQ ID NO: 3695797 - RNA, 16 nt, Human
uugaaucuugucucaa

SEQ ID NO: 3695798 - RNA, 17 nt, Human
uugaaucuugucucaau

SEQ ID NO: 3695799 - RNA, 17 nt, Human
uugaaugacaacagaag

SEQ ID NO: 3695800 - RNA, 20 nt, Human
uugaaugacaacagaagcuu

SEQ ID NO: 3695801 - RNA, 22 nt, Human
uugaaugacuaagaggaaagua

SEQ ID NO: 3695802 - RNA, 20 nt, Human
uugaaugauuuuucuuuaca

SEQ ID NO: 3695803 - RNA, 23 nt, Human
uugaaugccauagucaaagagag

SEQ ID NO: 3695804 - RNA, 15 nt, Human
uugaaugcugccagu

SEQ ID NO: 3695805 - RNA, 23 nt, Human
uugaaugcugccaguguggagug

SEQ ID NO: 3695806 - RNA, 23 nt, Human
uugaaugcuuuuugaauguuauu

SEQ ID NO: 3695807 - RNA, 20 nt, Human
uugaauggcuauguuuuuaa

SEQ ID NO: 3695808 - RNA, 15 nt, Human
uugaauggguccauu

SEQ ID NO: 3695809 - RNA, 22 nt, Human
uugaauguggcuugagaaauau

SEQ ID NO: 3695810 - RNA, 20 nt, Human
uugaauguguuucacaguuu

SEQ ID NO: 3695811 - RNA, 14 nt, Human
uugaauguuaagca

SEQ ID NO: 3695812 - RNA, 17 nt, Human
uugaauuaaaacuucuu

SEQ ID NO: 3695813 - RNA, 23 nt, Human
uugaauuaaauuaggaauaaaua

SEQ ID NO: 3695814 - RNA, 23 nt, Human
uugaauuauccacaugaaaauaa

SEQ ID NO: 3695815 - RNA, 13 nt, Human
uugaauuaucuug

SEQ ID NO: 3695816 - RNA, 18 nt, Human
uugaauuaucuugguuga

SEQ ID NO: 3695817 - RNA, 12 nt, Human
uugaauucauuu

SEQ ID NO: 3695818 - RNA, 19 nt, Human
uugaauucauuucacugua

SEQ ID NO: 3695819 - RNA, 15 nt, Human
uugaauuuaacaaug

SEQ ID NO: 3695820 - RNA, 16 nt, Human
uugaauuuaacaaugc

SEQ ID NO: 3695821 - RNA, 16 nt, Human
uugaauuuucccacug

SEQ ID NO: 3695822 - RNA, 17 nt, Human
uugaauuuucccacugc

SEQ ID NO: 3695823 - RNA, 18 nt, Human
uugaauuuugaugaacaa

SEQ ID NO: 3695824 - RNA, 16 nt, Human
uugaauuuuuccuaug

SEQ ID NO: 3695825 - RNA, 14 nt, Human
uugaauuuuucucu

SEQ ID NO: 3695826 - RNA, 16 nt, Human
uugacaaaauuuguug

SEQ ID NO: 3695827 - RNA, 13 nt, Human
uugacaaacucuc

SEQ ID NO: 3695828 - RNA, 13 nt, Human
uugacaauaaaau

SEQ ID NO: 3695829 - RNA, 16 nt, Human
uugacaauaaaauauu

SEQ ID NO: 3695830 - RNA, 19 nt, Human
uugacaauuccuagauaaa

SEQ ID NO: 3695831 - RNA, 16 nt, Human
uugacacagaaaaugu

SEQ ID NO: 3695832 - RNA, 20 nt, Human
uugacacauccgccuuuugu

SEQ ID NO: 3695833 - RNA, 23 nt, Human
uugacacauccgccuuuuguaua

SEQ ID NO: 3695834 - RNA, 19 nt, Human
uugacacuauaucuguaua

SEQ ID NO: 3695835 - RNA, 22 nt, Human
uugacacuauucacuaaaauua

SEQ ID NO: 3695836 - RNA, 17 nt, Human
uugacacugaaaguuuu

SEQ ID NO: 3695837 - RNA, 15 nt, Human
uugacacugaacuua

SEQ ID NO: 3695838 - RNA, 18 nt, Human
uugacacuggaaugaguu

SEQ ID NO: 3695839 - RNA, 17 nt, Human
uugacacuuaaaaaugg

SEQ ID NO: 3695840 - RNA, 19 nt, Human
uugacacuuuucauaucau

SEQ ID NO: 3695841 - RNA, 17 nt, Human
uugacagaacacugucu

SEQ ID NO: 3695842 - RNA, 17 nt, Human
uugacagagccugcccc

SEQ ID NO: 3695843 - RNA, 19 nt, Human
uugacagaucaagcuguga

SEQ ID NO: 3695844 - RNA, 12 nt, Human
uugacagcucag

SEQ ID NO: 3695845 - RNA, 14 nt, Human
uugacagcuuugcu

SEQ ID NO: 3695846 - RNA, 17 nt, Human
uugacagcuuugcugcu

SEQ ID NO: 3695847 - RNA, 16 nt, Human
uuaucgggagcagugu

SEQ ID NO: 3695848 - RNA, 21 nt, Human
uuaucgggagcagugucuucc

SEQ ID NO: 3695849 - RNA, 17 nt, Human
uuaucguccagugacuu

SEQ ID NO: 3695850 - RNA, 15 nt, Human
uuaucuaaaagaaau

SEQ ID NO: 3695851 - RNA, 15 nt, Human
uuaucuaaauuaaag

SEQ ID NO: 3695852 - RNA, 19 nt, Human
uuaucuaagaauacagcuu

SEQ ID NO: 3695853 - RNA, 17 nt, Human
uuaucuaauuuauaaaa

SEQ ID NO: 3695854 - RNA, 20 nt, Human
uuaucuaccaacuuucaaga

SEQ ID NO: 3695855 - RNA, 21 nt, Human
uuaucuacccaagggcagaaa

SEQ ID NO: 3695856 - RNA, 23 nt, Human
uuaucuacccaagggcagaaagu

SEQ ID NO: 3695857 - RNA, 19 nt, Human
uuaucuacuuccaaacuaa

SEQ ID NO: 3695858 - RNA, 17 nt, Human
uuaucuagauacuguau

SEQ ID NO: 3695859 - RNA, 15 nt, Human
uuaucuagauguaaa

SEQ ID NO: 3695860 - RNA, 16 nt, Human
uuaucuagauguaaau

SEQ ID NO: 3695861 - RNA, 15 nt, Human
uuaucuauaauuuac

SEQ ID NO: 3695862 - RNA, 13 nt, Human
uuaucuauauaaa

SEQ ID NO: 3695863 - RNA, 15 nt, Human
uuaucuauauaaaau

SEQ ID NO: 3695864 - RNA, 13 nt, Human
uuaucuauuugua

SEQ ID NO: 3695865 - RNA, 21 nt, Human
uuaucuauuuguauauauaca

SEQ ID NO: 3695866 - RNA, 11 nt, Human
uuaucucaaaa

SEQ ID NO: 3695867 - RNA, 18 nt, Human
uuaucucagauauuugca

SEQ ID NO: 3695868 - RNA, 17 nt, Human
uuaucucagucaugcau

SEQ ID NO: 3695869 - RNA, 14 nt, Human
uuaucucuauuuaa

SEQ ID NO: 3695870 - RNA, 15 nt, Human
uuaucucuauuuaau

SEQ ID NO: 3695871 - RNA, 19 nt, Human
uuaucucuauuuaauauuu

SEQ ID NO: 3695872 - RNA, 17 nt, Human
uuaucugaauuuuuaaa

SEQ ID NO: 3695873 - RNA, 14 nt, Human
uuaucugaucagaa

SEQ ID NO: 3695874 - RNA, 12 nt, Human
uuaucugugaau

SEQ ID NO: 3695875 - RNA, 19 nt, Human
uuaucuguuuaaagcauau

SEQ ID NO: 3695876 - RNA, 12 nt, Human
uuaucuguuucc

SEQ ID NO: 3695877 - RNA, 16 nt, Human
uuaucuuaaaacuccu

SEQ ID NO: 3695878 - RNA, 15 nt, Human
uuaucuuaaagcacu

SEQ ID NO: 3695879 - RNA, 15 nt, Human
uuaucuuacaauauu

SEQ ID NO: 3695880 - RNA, 18 nt, Human
uuaucuuauacuguacaa

SEQ ID NO: 3695881 - RNA, 20 nt, Human
uuaucuuauacuguacaaua

SEQ ID NO: 3695882 - RNA, 22 nt, Human
uuaucuuauacuguacaauaaa

SEQ ID NO: 3695883 - RNA, 17 nt, Human
uuaucuuaugccacggg

SEQ ID NO: 3695884 - RNA, 20 nt, Human
uuaucuucaggacacucacu

SEQ ID NO: 3695885 - RNA, 19 nt, Human
uuaucuucucaaguucuaa

SEQ ID NO: 3695886 - RNA, 22 nt, Human
uuaucuucucaaguucuaagau

SEQ ID NO: 3695887 - RNA, 17 nt, Human
uuaucuugaaggaaaaa

SEQ ID NO: 3695888 - RNA, 17 nt, Human
uuaucuugauacauuca

SEQ ID NO: 3695889 - RNA, 19 nt, Human
uuaucuugggacuggguuu

SEQ ID NO: 3695890 - RNA, 17 nt, Human
uuaucuugguugaaaau

SEQ ID NO: 3695891 - RNA, 15 nt, Human
uuaucuuucgcacag

SEQ ID NO: 3695892 - RNA, 17 nt, Human
uuaucuuucgugauaaa

SEQ ID NO: 3695893 - RNA, 14 nt, Human
uuaugaaaaagaag

SEQ ID NO: 3695894 - RNA, 18 nt, Human
uuaugaaaauaaauagcu

SEQ ID NO: 3695895 - RNA, 14 nt, Human
uuaugaaauaaaga

SEQ ID NO: 3695896 - RNA, 19 nt, Human
uuaugaacacuuaaauuau

SEQ ID NO: 3695897 - RNA, 22 nt, Human
uuaugaagaaaauacuuaaaug

SEQ ID NO: 3695898 - RNA, 22 nt, Human
uuaugaagaaggugaauagcca

SEQ ID NO: 3695899 - RNA, 20 nt, Human
uuaugaaguuuaaaacagua

SEQ ID NO: 3695900 - RNA, 17 nt, Human
uuaugaauauuuauaac

SEQ ID NO: 3695901 - RNA, 18 nt, Human
uuaugaaugugaagccuu

SEQ ID NO: 3695902 - RNA, 20 nt, Human
uuaugaaugugaagccuucc

SEQ ID NO: 3695903 - RNA, 13 nt, Human
uuaugaauguuuc

SEQ ID NO: 3695904 - RNA, 15 nt, Human
uuaugacaguaauug

SEQ ID NO: 3695905 - RNA, 16 nt, Human
uuaugacaguaauugu

SEQ ID NO: 3695906 - RNA, 16 nt, Human
uuaugacaucacuugu

SEQ ID NO: 3695907 - RNA, 21 nt, Human
uuaugacaucacuuguacaaa

SEQ ID NO: 3695908 - RNA, 11 nt, Human
uuaugacucca

SEQ ID NO: 3695909 - RNA, 19 nt, Human
uuaugacuucauuaauaau

SEQ ID NO: 3695910 - RNA, 23 nt, Human
uuaugagaaacuggcaaagcaga

SEQ ID NO: 3695911 - RNA, 14 nt, Human
uuaugagaaaugua

SEQ ID NO: 3695912 - RNA, 21 nt, Human
uuaugagaaauguaaugcgau

SEQ ID NO: 3695913 - RNA, 16 nt, Human
uuaugagcagaaggaa

SEQ ID NO: 3695914 - RNA, 18 nt, Human
uuaugagcucuucauguu

SEQ ID NO: 3695915 - RNA, 14 nt, Human
uuaugagcugugag

SEQ ID NO: 3695916 - RNA, 21 nt, Human
uuaugagcugugagaagggug

SEQ ID NO: 3695917 - RNA, 13 nt, Human
uuaugagggccac

SEQ ID NO: 3695918 - RNA, 18 nt, Human
uuaugagggccacggguc

SEQ ID NO: 3695919 - RNA, 15 nt, Human
uuaugaguaacuauu

SEQ ID NO: 3695920 - RNA, 13 nt, Human
uuaugaguuuuug

SEQ ID NO: 3695921 - RNA, 23 nt, Human
uuaugaguuuuugauagcuuuau

SEQ ID NO: 3695922 - RNA, 21 nt, Human
uuaugauaaaaaauuuuguaa

SEQ ID NO: 3695923 - RNA, 23 nt, Human
uuaugauccagcagauuauucac

SEQ ID NO: 3695924 - RNA, 13 nt, Human
uuaugaucuggcc

SEQ ID NO: 3695925 - RNA, 21 nt, Human
uuaugaucuggcccuugcuua

SEQ ID NO: 3695926 - RNA, 23 nt, Human
uuaugaugaaaaccuacauauuc

SEQ ID NO: 3695927 - RNA, 23 nt, Human
uuaugaugacguacaaguaguuc

SEQ ID NO: 3695928 - RNA, 21 nt, Human
uuaugauggaagacaggaaag

SEQ ID NO: 3695929 - RNA, 23 nt, Human
uuaugauggaagacaggaaaguu

SEQ ID NO: 3695930 - RNA, 13 nt, Human
uuaugaugugcuu

SEQ ID NO: 3695931 - RNA, 17 nt, Human
uuaugaugugcuuaaca

SEQ ID NO: 3695932 - RNA, 19 nt, Human
uuaugauuaaguaaugaua

SEQ ID NO: 3695933 - RNA, 15 nt, Human
uuaugauuguuaugu

SEQ ID NO: 3695934 - RNA, 13 nt, Human
uuaugauuugggu

SEQ ID NO: 3695935 - RNA, 18 nt, Human
uuaugauuuucauaacuu

SEQ ID NO: 3695936 - RNA, 19 nt, Human
uuaugauuuuuaaagaaaa

SEQ ID NO: 3695937 - RNA, 18 nt, Human
uuaugauuuuuuuuucau

SEQ ID NO: 3695938 - RNA, 17 nt, Human
uuaugcaaaagcaagcu

SEQ ID NO: 3695939 - RNA, 21 nt, Human
uuaugcaaaagcaagcugauu

SEQ ID NO: 3695940 - RNA, 22 nt, Human
uuaugcacuaaauaugaacccu

SEQ ID NO: 3695941 - RNA, 23 nt, Human
uuaugcaggggcaaacaccugcu

SEQ ID NO: 3695942 - RNA, 15 nt, Human
uuaugcagugcugcu

SEQ ID NO: 3695943 - RNA, 16 nt, Human
uuaugcaugaaguaau

SEQ ID NO: 3695944 - RNA, 16 nt, Human
uuaugccaccugaaua

SEQ ID NO: 3695945 - RNA, 20 nt, Human
uuaugccggaugugcuuuuc

SEQ ID NO: 3695946 - RNA, 13 nt, Human
uuaugccugcuuu

SEQ ID NO: 3695947 - RNA, 17 nt, Human
uuaugccuuuuuugauc

SEQ ID NO: 3695948 - RNA, 15 nt, Human
uuaugcuauuaaagu

SEQ ID NO: 3695949 - RNA, 14 nt, Human
uuaugcucaggguc

SEQ ID NO: 3695950 - RNA, 21 nt, Human
uuaugcucuuaauugccaccu

SEQ ID NO: 3695951 - RNA, 20 nt, Human
uuaugcucuuuuuuacucau

SEQ ID NO: 3695952 - RNA, 18 nt, Human
uuaugcuguagucuuacc

SEQ ID NO: 3695953 - RNA, 14 nt, Human
uuaugcuuccagaa

SEQ ID NO: 3695954 - RNA, 15 nt, Human
uuaugcuuccagaaa

SEQ ID NO: 3695955 - RNA, 14 nt, Human
uuaugcuuuaaaca

SEQ ID NO: 3695956 - RNA, 15 nt, Human
uuauggaaaaauaaa

SEQ ID NO: 3695957 - RNA, 18 nt, Human
uuauggaacacucugaga

SEQ ID NO: 3695958 - RNA, 20 nt, Human
uuauggaacacucugagacu

SEQ ID NO: 3695959 - RNA, 22 nt, Human
uuauggaaucuaccaacuguuu

SEQ ID NO: 3695960 - RNA, 23 nt, Human
uuauggaauugauuugcauugaa

SEQ ID NO: 3695961 - RNA, 14 nt, Human
uuauggagaccucu

SEQ ID NO: 3695962 - RNA, 19 nt, Human
uuauggagucauuuuuaca

SEQ ID NO: 3695963 - RNA, 16 nt, Human
uuauggaugauuuaag

SEQ ID NO: 3695964 - RNA, 14 nt, Human
uuauggcacaucag

SEQ ID NO: 3695965 - RNA, 13 nt, Human
uuauggccucagc

SEQ ID NO: 3695966 - RNA, 23 nt, Human
uuaugggaaccccuucauccucu

SEQ ID NO: 3695967 - RNA, 19 nt, Human
uuaugggaauaauugcuuu

SEQ ID NO: 3695968 - RNA, 15 nt, Human
uuaugggccccuggc

SEQ ID NO: 3695969 - RNA, 13 nt, Human
uuaugggcugggu

SEQ ID NO: 3695970 - RNA, 13 nt, Human
uuaugggucacag

SEQ ID NO: 3695971 - RNA, 21 nt, Human
uuaugguaacugcuuucuguu

SEQ ID NO: 3695972 - RNA, 19 nt, Human
uuaugguccuaaaagcaaa

SEQ ID NO: 3695973 - RNA, 20 nt, Human
uuaugguguuucucccucuc

SEQ ID NO: 3695974 - RNA, 20 nt, Human
uuauguaaaaggccaaaccu

SEQ ID NO: 3695975 - RNA, 13 nt, Human
uuauguaaauaau

SEQ ID NO: 3695976 - RNA, 11 nt, Human
uuauguaaauc

SEQ ID NO: 3695977 - RNA, 13 nt, Human
uuauguaaauccc

SEQ ID NO: 3695978 - RNA, 21 nt, Human
uuauguaaaucccauuauuca

SEQ ID NO: 3695979 - RNA, 23 nt, Human
uuauguaaaucccauuauucaaa

SEQ ID NO: 3695980 - RNA, 13 nt, Human
uuauguaauuuca

SEQ ID NO: 3695981 - RNA, 20 nt, Human
uuauguacuaguguucuguu

SEQ ID NO: 3695982 - RNA, 12 nt, Human
uuauguacugua

SEQ ID NO: 3695983 - RNA, 18 nt, Human
uuauguacuguacuaauu

SEQ ID NO: 3695984 - RNA, 15 nt, Human
uuauguagauauuug

SEQ ID NO: 3695985 - RNA, 18 nt, Human
uuauguagauauuuggcu

SEQ ID NO: 3695986 - RNA, 15 nt, Human
uuauguagaugugca

SEQ ID NO: 3695987 - RNA, 16 nt, Human
uuauguagcacauaaa

SEQ ID NO: 3695988 - RNA, 13 nt, Human
uuauguagcucuu

SEQ ID NO: 3695989 - RNA, 15 nt, Human
uuauguaguaauuga

SEQ ID NO: 3695990 - RNA, 19 nt, Human
uuauguaguaauugacaug

SEQ ID NO: 3695991 - RNA, 13 nt, Human
uuauguauauggu

SEQ ID NO: 3695992 - RNA, 17 nt, Human
uuauguaucagaagaga

SEQ ID NO: 3695993 - RNA, 19 nt, Human
uuauguauuuccuggaugu

SEQ ID NO: 3695994 - RNA, 17 nt, Human
uuaugucaucauacaug

SEQ ID NO: 3695995 - RNA, 15 nt, Human
uuauguccacugugu

SEQ ID NO: 3695996 - RNA, 18 nt, Human
uuauguccacuguguaua

SEQ ID NO: 3695997 - RNA, 12 nt, Human
uugacagggcac

SEQ ID NO: 3695998 - RNA, 19 nt, Human
uugacagggcacaccgggc

SEQ ID NO: 3695999 - RNA, 19 nt, Human
uugacaguaacuugguuau

SEQ ID NO: 3696000 - RNA, 19 nt, Human
uugacaguguugaaaaugu

SEQ ID NO: 3696001 - RNA, 18 nt, Human
uugacaguucugaagaau

SEQ ID NO: 3696002 - RNA, 13 nt, Human
uugacaucaacug

SEQ ID NO: 3696003 - RNA, 13 nt, Human
uugacaugggaca

SEQ ID NO: 3696004 - RNA, 18 nt, Human
uugacauguacagagaac

SEQ ID NO: 3696005 - RNA, 15 nt, Human
uugacauuauagaca

SEQ ID NO: 3696006 - RNA, 13 nt, Human
uugacauucugaa

SEQ ID NO: 3696007 - RNA, 15 nt, Human
uugacauucugaaug

SEQ ID NO: 3696008 - RNA, 23 nt, Human
uugacauugaaaucuaggaaaau

SEQ ID NO: 3696009 - RNA, 15 nt, Human
uugacauuuguaguu

SEQ ID NO: 3696010 - RNA, 16 nt, Human
uugaccaagaacugca

SEQ ID NO: 3696011 - RNA, 17 nt, Human
uugaccaagaacugcau

SEQ ID NO: 3696012 - RNA, 20 nt, Human
uugaccaagcaggaagcuca

SEQ ID NO: 3696013 - RNA, 22 nt, Human
uugaccaagcaggaagcucaga

SEQ ID NO: 3696014 - RNA, 22 nt, Human
uugaccagcagaucccagcuca

SEQ ID NO: 3696015 - RNA, 19 nt, Human
uugaccauucuccaccugc

SEQ ID NO: 3696016 - RNA, 17 nt, Human
uugacccacaagaaaug

SEQ ID NO: 3696017 - RNA, 15 nt, Human
uugacccugcacccu

SEQ ID NO: 3696018 - RNA, 16 nt, Human
uugacccuugcuguga

SEQ ID NO: 3696019 - RNA, 15 nt, Human
uugaccgacagcuuu

SEQ ID NO: 3696020 - RNA, 22 nt, Human
uugaccguguuggucuguacug

SEQ ID NO: 3696021 - RNA, 18 nt, Human
uugaccuaagauuuauuu

SEQ ID NO: 3696022 - RNA, 15 nt, Human
uugaccucaggugau

SEQ ID NO: 3696023 - RNA, 21 nt, Human
uugaccucaggugauccaccc

SEQ ID NO: 3696024 - RNA, 24 nt, Human
uugaccuccucccuguuauuuuca

SEQ ID NO: 3696025 - RNA, 14 nt, Human
uugaccucugcagc

SEQ ID NO: 3696026 - RNA, 16 nt, Human
uugaccucugcagcaa

SEQ ID NO: 3696027 - RNA, 12 nt, Human
uugaccugaggc

SEQ ID NO: 3696028 - RNA, 13 nt, Human
uugaccugaggcu

SEQ ID NO: 3696029 - RNA, 17 nt, Human
uugaccugcauuguaaa

SEQ ID NO: 3696030 - RNA, 21 nt, Human
uugaccugccucccuucaugc

SEQ ID NO: 3696031 - RNA, 23 nt, Human
uugaccugccucccuucaugcau

SEQ ID NO: 3696032 - RNA, 16 nt, Human
uugaccugcuccgcug

SEQ ID NO: 3696033 - RNA, 20 nt, Human
uugaccuucauuucauguau

SEQ ID NO: 3696034 - RNA, 13 nt, Human
uugaccuuuguac

SEQ ID NO: 3696035 - RNA, 23 nt, Human
uugacgguuuuuuauuauugugg

SEQ ID NO: 3696036 - RNA, 19 nt, Human
uugacuauuuuuguuuuua

SEQ ID NO: 3696037 - RNA, 21 nt, Human
uugacuauuuuuguuuuuauu

SEQ ID NO: 3696038 - RNA, 23 nt, Human
uugacucaggauuuaaaaacugg

SEQ ID NO: 3696039 - RNA, 19 nt, Human
uugacucccaaguuuccau

SEQ ID NO: 3696040 - RNA, 12 nt, Human
uugacucugggu

SEQ ID NO: 3696041 - RNA, 19 nt, Human
uugacucuggguccuuccu

SEQ ID NO: 3696042 - RNA, 21 nt, Human
uugacucuuuugccauuaaac

SEQ ID NO: 3696043 - RNA, 20 nt, Human
uugacugaagaugcagcuca

SEQ ID NO: 3696044 - RNA, 21 nt, Human
uugacugguuuacaggcccug

SEQ ID NO: 3696045 - RNA, 20 nt, Human
uugacuguuauuuguugaga

SEQ ID NO: 3696046 - RNA, 16 nt, Human
uugacuuauuuucucu

SEQ ID NO: 3696047 - RNA, 16 nt, Human
uugacuugauuagugc

SEQ ID NO: 3696048 - RNA, 23 nt, Human
uugacuuuacgcccaucucagga

SEQ ID NO: 3696049 - RNA, 13 nt, Human
uugacuuuauaaa

SEQ ID NO: 3696050 - RNA, 23 nt, Human
uugacuuuccccaccagaugcug

SEQ ID NO: 3696051 - RNA, 11 nt, Human
uugacuuuguc

SEQ ID NO: 3696052 - RNA, 18 nt, Human
uugacuuuuauaaagcau

SEQ ID NO: 3696053 - RNA, 16 nt, Human
uugacuuuuugcauuu

SEQ ID NO: 3696054 - RNA, 11 nt, Human
uugagaaaaau

SEQ ID NO: 3696055 - RNA, 10 nt, Human
uugagaaacc

SEQ ID NO: 3696056 - RNA, 19 nt, Human
uugagaaagagcacuuaag

SEQ ID NO: 3696057 - RNA, 15 nt, Human
uugagaaaugaauaa

SEQ ID NO: 3696058 - RNA, 19 nt, Human
uugagaaaugcauauugua

SEQ ID NO: 3696059 - RNA, 18 nt, Human
uugagaacuuuauuucca

SEQ ID NO: 3696060 - RNA, 15 nt, Human
uugagaacuuuccau

SEQ ID NO: 3696061 - RNA, 13 nt, Human
uugagaagcugcu

SEQ ID NO: 3696062 - RNA, 17 nt, Human
uugagaaggagagaaag

SEQ ID NO: 3696063 - RNA, 19 nt, Human
uugagaaguuuuguacaga

SEQ ID NO: 3696064 - RNA, 23 nt, Human
uugagacaaaaauuaucuauuug

SEQ ID NO: 3696065 - RNA, 22 nt, Human
uugagacacggagcccagcccu

SEQ ID NO: 3696066 - RNA, 20 nt, Human
uugagacacugguuuacacu

SEQ ID NO: 3696067 - RNA, 16 nt, Human
uugagaccgugaagau

SEQ ID NO: 3696068 - RNA, 21 nt, Human
uugagaccgugaagauacuuu

SEQ ID NO: 3696069 - RNA, 16 nt, Human
uugagacuucaagcuu

SEQ ID NO: 3696070 - RNA, 12 nt, Human
uugagacuuuuu

SEQ ID NO: 3696071 - RNA, 15 nt, Human
uugagacuuuuuggu

SEQ ID NO: 3696072 - RNA, 13 nt, Human
uugagagagaugu

SEQ ID NO: 3696073 - RNA, 15 nt, Human
uugagagagaugugu

SEQ ID NO: 3696074 - RNA, 23 nt, Human
uugagagagauguguaauuuuuc

SEQ ID NO: 3696075 - RNA, 15 nt, Human
uugagagugugacca

SEQ ID NO: 3696076 - RNA, 18 nt, Human
uugagaguuuugucuuga

SEQ ID NO: 3696077 - RNA, 17 nt, Human
uugagauagaagaacug

SEQ ID NO: 3696078 - RNA, 20 nt, Human
uugagauauuaaugcccaga

SEQ ID NO: 3696079 - RNA, 13 nt, Human
uugagauggggau

SEQ ID NO: 3696080 - RNA, 18 nt, Human
uugagauggggauaaaau

SEQ ID NO: 3696081 - RNA, 23 nt, Human
uugagauggggauaaaaugacua

SEQ ID NO: 3696082 - RNA, 16 nt, Human
uugagauguguucaca

SEQ ID NO: 3696083 - RNA, 12 nt, Human
uugagauuagag

SEQ ID NO: 3696084 - RNA, 15 nt, Human
uugagauuguccuca

SEQ ID NO: 3696085 - RNA, 15 nt, Human
uugagcaauuucccc

SEQ ID NO: 3696086 - RNA, 20 nt, Human
uugagcaugacagccugcag

SEQ ID NO: 3696087 - RNA, 19 nt, Human
uugagccagcagacauugu

SEQ ID NO: 3696088 - RNA, 19 nt, Human
uugagcccacaaagccuua

SEQ ID NO: 3696089 - RNA, 23 nt, Human
uugagccccaaguccugaagagg

SEQ ID NO: 3696090 - RNA, 22 nt, Human
uugagcccuccccaggaauuug

SEQ ID NO: 3696091 - RNA, 18 nt, Human
uugagcccuuguuucagg

SEQ ID NO: 3696092 - RNA, 20 nt, Human
uugagccgggccccugggcu

SEQ ID NO: 3696093 - RNA, 21 nt, Human
uugagccuaaaaauaaagcac

SEQ ID NO: 3696094 - RNA, 11 nt, Human
uugagccuggg

SEQ ID NO: 3696095 - RNA, 14 nt, Human
uugagccugggagg

SEQ ID NO: 3696096 - RNA, 19 nt, Human
uugagcuacuggauucuua

SEQ ID NO: 3696097 - RNA, 15 nt, Human
uugagcuauugcugu

SEQ ID NO: 3696098 - RNA, 15 nt, Human
uugagcucucugccc

SEQ ID NO: 3696099 - RNA, 14 nt, Human
uugagcugagaugg

SEQ ID NO: 3696100 - RNA, 20 nt, Human
uugagcugcuuuuuuugaaa

SEQ ID NO: 3696101 - RNA, 16 nt, Human
uugagcuuaaucuuug

SEQ ID NO: 3696102 - RNA, 18 nt, Human
uugagcuuagugaaauua

SEQ ID NO: 3696103 - RNA, 14 nt, Human
uugagcuuuccaug

SEQ ID NO: 3696104 - RNA, 20 nt, Human
uugaggaaaaauaugugaag

SEQ ID NO: 3696105 - RNA, 18 nt, Human
uugaggaaacaacagcuu

SEQ ID NO: 3696106 - RNA, 11 nt, Human
uugaggacaca

SEQ ID NO: 3696107 - RNA, 14 nt, Human
uugaggacacaugu

SEQ ID NO: 3696108 - RNA, 15 nt, Human
uugaggacuucuugc

SEQ ID NO: 3696109 - RNA, 15 nt, Human
uugaggagcauguuu

SEQ ID NO: 3696110 - RNA, 21 nt, Human
uugaggagcauguuuuguaua

SEQ ID NO: 3696111 - RNA, 13 nt, Human
uugaggaguguga

SEQ ID NO: 3696112 - RNA, 21 nt, Human
uugaggauauauuuucacuuu

SEQ ID NO: 3696113 - RNA, 18 nt, Human
uugaggauuaguuuagaa

SEQ ID NO: 3696114 - RNA, 18 nt, Human
uugaggauuuagaagugu

SEQ ID NO: 3696115 - RNA, 16 nt, Human
uugaggauuuugagua

SEQ ID NO: 3696116 - RNA, 20 nt, Human
uugaggccaagaauauugca

SEQ ID NO: 3696117 - RNA, 19 nt, Human
uugaggccugcccucaggg

SEQ ID NO: 3696118 - RNA, 14 nt, Human
uugaggcugcagcg

SEQ ID NO: 3696119 - RNA, 20 nt, Human
uugaggcuuauauuugugua

SEQ ID NO: 3696120 - RNA, 14 nt, Human
uugagggcccagag

SEQ ID NO: 3696121 - RNA, 21 nt, Human
uugagggcccagagcaggaag

SEQ ID NO: 3696122 - RNA, 13 nt, Human
uugagggcugcag

SEQ ID NO: 3696123 - RNA, 14 nt, Human
uugaggggaccagg

SEQ ID NO: 3696124 - RNA, 17 nt, Human
uugaggggaccaggagu

SEQ ID NO: 3696125 - RNA, 16 nt, Human
uugaggggauuaauau

SEQ ID NO: 3696126 - RNA, 16 nt, Human
uugaggggcuccugga

SEQ ID NO: 3696127 - RNA, 18 nt, Human
uugaggguauguuuuaua

SEQ ID NO: 3696128 - RNA, 16 nt, Human
uugagguaaagauaug

SEQ ID NO: 3696129 - RNA, 19 nt, Human
uugagguacucugcacaua

SEQ ID NO: 3696130 - RNA, 21 nt, Human
uugagguagaccaggauuucu

SEQ ID NO: 3696131 - RNA, 16 nt, Human
uugaggucaaguaaga

SEQ ID NO: 3696132 - RNA, 22 nt, Human
uugaggucaaguaagaagacau

SEQ ID NO: 3696133 - RNA, 13 nt, Human
uugaggucucagc

SEQ ID NO: 3696134 - RNA, 15 nt, Human
uugaggucuguucuu

SEQ ID NO: 3696135 - RNA, 17 nt, Human
uugaggucuuuugacau

SEQ ID NO: 3696136 - RNA, 23 nt, Human
uugaggucuuuugacauguggaa

SEQ ID NO: 3696137 - RNA, 12 nt, Human
uugaguaaaaua

SEQ ID NO: 3696138 - RNA, 18 nt, Human
uugaguaaaauaaauauu

SEQ ID NO: 3696139 - RNA, 15 nt, Human
uugaguagacacauu

SEQ ID NO: 3696140 - RNA, 20 nt, Human
uugaguagagagcaagggaa

SEQ ID NO: 3696141 - RNA, 13 nt, Human
uugaguagauauu

SEQ ID NO: 3696142 - RNA, 21 nt, Human
uugaguagauauuacuuuauc

SEQ ID NO: 3696143 - RNA, 16 nt, Human
uugagucaaaaaaucu

SEQ ID NO: 3696144 - RNA, 15 nt, Human
uugagucccuuccag

SEQ ID NO: 3696145 - RNA, 12 nt, Human
uugagugauuau

SEQ ID NO: 3696146 - RNA, 14 nt, Human
uugagugucaagcu

SEQ ID NO: 3696147 - RNA, 13 nt, Human
uagcacuggccug

SEQ ID NO: 3696148 - RNA, 15 nt, Human
uagcacuggccugca

SEQ ID NO: 3696149 - RNA, 20 nt, Human
uagcacuguugauguaucug

SEQ ID NO: 3696150 - RNA, 17 nt, Human
uagcacuuauguuacug

SEQ ID NO: 3696151 - RNA, 20 nt, Human
uagcacuuccuugccagucu

SEQ ID NO: 3696152 - RNA, 17 nt, Human
uagcacuuucauugcca

SEQ ID NO: 3696153 - RNA, 17 nt, Human
uagcacuuugaaauacc

SEQ ID NO: 3696154 - RNA, 21 nt, Human
uagcagaagaaaggaacauuu

SEQ ID NO: 3696155 - RNA, 13 nt, Human
uagcagacaggcc

SEQ ID NO: 3696156 - RNA, 15 nt, Human
uagcagacaguguuu

SEQ ID NO: 3696157 - RNA, 22 nt, Human
uagcagagggguaagagaggau

SEQ ID NO: 3696158 - RNA, 12 nt, Human
uagcagaugguu

SEQ ID NO: 3696159 - RNA, 21 nt, Human
uagcagcaaaaauauaaaaua

SEQ ID NO: 3696160 - RNA, 19 nt, Human
uagcagcaccguucugugc

SEQ ID NO: 3696161 - RNA, 20 nt, Human
uagcagcccucaauugugaa

SEQ ID NO: 3696162 - RNA, 21 nt, Human
uagcagcccucaauugugaaa

SEQ ID NO: 3696163 - RNA, 21 nt, Human
uagcagccuggcuccccuggg

SEQ ID NO: 3696164 - RNA, 10 nt, Human
uagcagcugg

SEQ ID NO: 3696165 - RNA, 17 nt, Human
uagcaggagaggagagc

SEQ ID NO: 3696166 - RNA, 19 nt, Human
uagcaggagaggagagcca

SEQ ID NO: 3696167 - RNA, 14 nt, Human
uagcagggaaaaua

SEQ ID NO: 3696168 - RNA, 20 nt, Human
uagcaguaaaagaugaaguu

SEQ ID NO: 3696169 - RNA, 13 nt, Human
uagcaguaaaaua

SEQ ID NO: 3696170 - RNA, 16 nt, Human
uagcaguccccuuccc

SEQ ID NO: 3696171 - RNA, 17 nt, Human
uagcagugagucauauc

SEQ ID NO: 3696172 - RNA, 13 nt, Human
uagcagugauuuu

SEQ ID NO: 3696173 - RNA, 15 nt, Human
uagcagugauuuuua

SEQ ID NO: 3696174 - RNA, 20 nt, Human
uagcagugucuguaaaagag

SEQ ID NO: 3696175 - RNA, 14 nt, Human
uagcaguucugcaa

SEQ ID NO: 3696176 - RNA, 17 nt, Human
uagcaguucugcaaaua

SEQ ID NO: 3696177 - RNA, 23 nt, Human
uagcauaaacacaucacagauga

SEQ ID NO: 3696178 - RNA, 15 nt, Human
uagcauacauuuaua

SEQ ID NO: 3696179 - RNA, 21 nt, Human
uagcauacauuuauaauguuu

SEQ ID NO: 3696180 - RNA, 16 nt, Human
uagcauacguacacau

SEQ ID NO: 3696181 - RNA, 14 nt, Human
uagcauaucugccu

SEQ ID NO: 3696182 - RNA, 18 nt, Human
uagcauaucugccuuuau

SEQ ID NO: 3696183 - RNA, 21 nt, Human
uagcauaucugccuuuauugu

SEQ ID NO: 3696184 - RNA, 23 nt, Human
uagcauaucugccuuuauugugu

SEQ ID NO: 3696185 - RNA, 14 nt, Human
uagcauaugacaaa

SEQ ID NO: 3696186 - RNA, 18 nt, Human
uagcauaugacaaauguu

SEQ ID NO: 3696187 - RNA, 23 nt, Human
uagcaucacuuaaaacacguuuu

SEQ ID NO: 3696188 - RNA, 18 nt, Human
uagcauccuggaauaucu

SEQ ID NO: 3696189 - RNA, 17 nt, Human
uagcaucuguacaaagg

SEQ ID NO: 3696190 - RNA, 16 nt, Human
uagcaugaagacagag

SEQ ID NO: 3696191 - RNA, 22 nt, Human
uagcaugacaagccccaggcag

SEQ ID NO: 3696192 - RNA, 15 nt, Human
uagcaugacauuucu

SEQ ID NO: 3696193 - RNA, 19 nt, Human
uagcaugaggccacugcug

SEQ ID NO: 3696194 - RNA, 17 nt, Human
uagcaugcacaaagugu

SEQ ID NO: 3696195 - RNA, 19 nt, Human
uagcaugcacaaaguguau

SEQ ID NO: 3696196 - RNA, 19 nt, Human
uagcaugccaacaagaaug

SEQ ID NO: 3696197 - RNA, 17 nt, Human
uagcauggauagaguau

SEQ ID NO: 3696198 - RNA, 18 nt, Human
uagcauguauugugucuu

SEQ ID NO: 3696199 - RNA, 18 nt, Human
uagcaugucgucaaagcu

SEQ ID NO: 3696200 - RNA, 22 nt, Human
uagcauguguuugguucugggg

SEQ ID NO: 3696201 - RNA, 16 nt, Human
uagcauuaacuaaucu

SEQ ID NO: 3696202 - RNA, 16 nt, Human
uagcauuaugcaauua

SEQ ID NO: 3696203 - RNA, 15 nt, Human
uagcauucuggcagu

SEQ ID NO: 3696204 - RNA, 19 nt, Human
uagcauuuguguugaagag

SEQ ID NO: 3696205 - RNA, 16 nt, Human
uagcauuuuaaacaaa

SEQ ID NO: 3696206 - RNA, 16 nt, Human
uagccaaaaauagcua

SEQ ID NO: 3696207 - RNA, 21 nt, Human
uagccaaaaauagcuaaauac

SEQ ID NO: 3696208 - RNA, 13 nt, Human
uagccaaaaugug

SEQ ID NO: 3696209 - RNA, 15 nt, Human
uagccaaaaugugag

SEQ ID NO: 3696210 - RNA, 17 nt, Human
uagccaaaccucaccaa

SEQ ID NO: 3696211 - RNA, 23 nt, Human
uagccaaaugacugaaagcacug

SEQ ID NO: 3696212 - RNA, 19 nt, Human
uagccaacggccccagcuu

SEQ ID NO: 3696213 - RNA, 21 nt, Human
uagccaacggccccagcuucu

SEQ ID NO: 3696214 - RNA, 21 nt, Human
uagccaaggugggcugagccc

SEQ ID NO: 3696215 - RNA, 21 nt, Human
uagccaaugucuccuccccuu

SEQ ID NO: 3696216 - RNA, 14 nt, Human
uagccaccaacucu

SEQ ID NO: 3696217 - RNA, 14 nt, Human
uagccaccaucuuu

SEQ ID NO: 3696218 - RNA, 18 nt, Human
uagccaccgccuccuaca

SEQ ID NO: 3696219 - RNA, 13 nt, Human
uagccacucagga

SEQ ID NO: 3696220 - RNA, 14 nt, Human
uagccacucaggag

SEQ ID NO: 3696221 - RNA, 17 nt, Human
uagccacuuaccuucaa

SEQ ID NO: 3696222 - RNA, 14 nt, Human
uagccagacacucu

SEQ ID NO: 3696223 - RNA, 15 nt, Human
uagccagaggacugu

SEQ ID NO: 3696224 - RNA, 15 nt, Human
uagccagauuugucu

SEQ ID NO: 3696225 - RNA, 19 nt, Human
uagccagcacacagggcag

SEQ ID NO: 3696226 - RNA, 14 nt, Human
uagccagcugcucc

SEQ ID NO: 3696227 - RNA, 22 nt, Human
uagccaggaucaugguguaaua

SEQ ID NO: 3696228 - RNA, 22 nt, Human
uagccagggggacuagccccug

SEQ ID NO: 3696229 - RNA, 22 nt, Human
uagccagguaaugugaauaaau

SEQ ID NO: 3696230 - RNA, 18 nt, Human
uagccaggucccccugca

SEQ ID NO: 3696231 - RNA, 21 nt, Human
uagccaggucccccugcagcu

SEQ ID NO: 3696232 - RNA, 15 nt, Human
uagccaguaauccug

SEQ ID NO: 3696233 - RNA, 22 nt, Human
uagccaguaauccuguaggaag

SEQ ID NO: 3696234 - RNA, 15 nt, Human
uagccagugaacaua

SEQ ID NO: 3696235 - RNA, 16 nt, Human
uagccagugcuccagg

SEQ ID NO: 3696236 - RNA, 15 nt, Human
uagccauauuuguaa

SEQ ID NO: 3696237 - RNA, 22 nt, Human
uagccauuccugguacccagcc

SEQ ID NO: 3696238 - RNA, 18 nt, Human
uagcccaaugaaaugaau

SEQ ID NO: 3696239 - RNA, 23 nt, Human
uagcccacacuugagaggaugaa

SEQ ID NO: 3696240 - RNA, 18 nt, Human
uagcccacccugcugccu

SEQ ID NO: 3696241 - RNA, 21 nt, Human
uagcccacuuacauuuacaaa

SEQ ID NO: 3696242 - RNA, 12 nt, Human
uagcccaggaga

SEQ ID NO: 3696243 - RNA, 18 nt, Human
uagcccaggagagagaaa

SEQ ID NO: 3696244 - RNA, 22 nt, Human
uagcccaggagagagaaagcca

SEQ ID NO: 3696245 - RNA, 16 nt, Human
uagcccaucccugccu

SEQ ID NO: 3696246 - RNA, 20 nt, Human
uagcccaucccugccugguc

SEQ ID NO: 3696247 - RNA, 18 nt, Human
uagccccaagaaggcugg

SEQ ID NO: 3696248 - RNA, 19 nt, Human
uagcccccaggcugcugga

SEQ ID NO: 3696249 - RNA, 14 nt, Human
uagcccccucuucc

SEQ ID NO: 3696250 - RNA, 16 nt, Human
uagcccccuggccucu

SEQ ID NO: 3696251 - RNA, 22 nt, Human
uagcccccugguaauagcugua

SEQ ID NO: 3696252 - RNA, 18 nt, Human
uagccccuuagcccccac

SEQ ID NO: 3696253 - RNA, 16 nt, Human
uagcccgccugccagu

SEQ ID NO: 3696254 - RNA, 19 nt, Human
uagcccgccugccaguccu

SEQ ID NO: 3696255 - RNA, 20 nt, Human
uagcccgccugccaguccua

SEQ ID NO: 3696256 - RNA, 18 nt, Human
uagcccucacccuggggc

SEQ ID NO: 3696257 - RNA, 20 nt, Human
uagcccuccuuuuuccaaca

SEQ ID NO: 3696258 - RNA, 15 nt, Human
uagcccucucccucu

SEQ ID NO: 3696259 - RNA, 16 nt, Human
uagcccuggccagagg

SEQ ID NO: 3696260 - RNA, 17 nt, Human
uagcccuguccuggugg

SEQ ID NO: 3696261 - RNA, 14 nt, Human
uagcccuuucugug

SEQ ID NO: 3696262 - RNA, 17 nt, Human
uagcccuuucugugugc

SEQ ID NO: 3696263 - RNA, 15 nt, Human
uagccgaccucagcc

SEQ ID NO: 3696264 - RNA, 14 nt, Human
uagccgagagccug

SEQ ID NO: 3696265 - RNA, 22 nt, Human
uagccgggcgugguggcaggca

SEQ ID NO: 3696266 - RNA, 22 nt, Human
uagccuaagauauacuuguuuu

SEQ ID NO: 3696267 - RNA, 16 nt, Human
uagccuaggugacaga

SEQ ID NO: 3696268 - RNA, 19 nt, Human
uagccucaauuucugaaca

SEQ ID NO: 3696269 - RNA, 11 nt, Human
uagccucacgc

SEQ ID NO: 3696270 - RNA, 20 nt, Human
uagccucagaugauuucccc

SEQ ID NO: 3696271 - RNA, 14 nt, Human
uagccucauaguua

SEQ ID NO: 3696272 - RNA, 13 nt, Human
uagccucccugaa

SEQ ID NO: 3696273 - RNA, 17 nt, Human
uagccuccugaccugag

SEQ ID NO: 3696274 - RNA, 16 nt, Human
uagccucugucuggca

SEQ ID NO: 3696275 - RNA, 11 nt, Human
uagccuggacc

SEQ ID NO: 3696276 - RNA, 14 nt, Human
uagccuggacugcu

SEQ ID NO: 3696277 - RNA, 20 nt, Human
uagccuguccugucaucauc

SEQ ID NO: 3696278 - RNA, 18 nt, Human
uagccugugccucuggga

SEQ ID NO: 3696279 - RNA, 23 nt, Human
uagccuguggcaguaaagagaaa

SEQ ID NO: 3696280 - RNA, 20 nt, Human
uagccuguggcccuguccug

SEQ ID NO: 3696281 - RNA, 20 nt, Human
uagccuuauccucugaucuc

SEQ ID NO: 3696282 - RNA, 18 nt, Human
uagccuuccuccacaucc

SEQ ID NO: 3696283 - RNA, 14 nt, Human
uagccuucucuguu

SEQ ID NO: 3696284 - RNA, 20 nt, Human
uagccuucucuguucauuuc

SEQ ID NO: 3696285 - RNA, 12 nt, Human
uagccuugcuug

SEQ ID NO: 3696286 - RNA, 13 nt, Human
uagccuuucuuuu

SEQ ID NO: 3696287 - RNA, 18 nt, Human
uagccuuuggcucuggag

SEQ ID NO: 3696288 - RNA, 20 nt, Human
uagcgacaacagauuggauu

SEQ ID NO: 3696289 - RNA, 15 nt, Human
uagcgaggcucuaac

SEQ ID NO: 3696290 - RNA, 19 nt, Human
uagcgaggcucuaaccaca

SEQ ID NO: 3696291 - RNA, 19 nt, Human
uagcgaucucuccuggccu

SEQ ID NO: 3696292 - RNA, 19 nt, Human
uagcgcuauaguuacuguc

SEQ ID NO: 3696293 - RNA, 18 nt, Human
uagcgggauggggcuccc

SEQ ID NO: 3696294 - RNA, 15 nt, Human
uagcguucuuguaau

SEQ ID NO: 3696295 - RNA, 18 nt, Human
uagcguucuuguaauuuu

SEQ ID NO: 3696296 - RNA, 17 nt, Human
uuauguccugugagaug

SEQ ID NO: 3696297 - RNA, 22 nt, Human
uuauguccugugagauguguau

SEQ ID NO: 3696298 - RNA, 18 nt, Human
uuaugucuaaaauccugc

SEQ ID NO: 3696299 - RNA, 15 nt, Human
uuaugucucuucuga

SEQ ID NO: 3696300 - RNA, 17 nt, Human
uuaugucuguuuaagaa

SEQ ID NO: 3696301 - RNA, 23 nt, Human
uuaugugaaugaucucucugaau

SEQ ID NO: 3696302 - RNA, 17 nt, Human
uuaugugaauuuuuaag

SEQ ID NO: 3696303 - RNA, 14 nt, Human
uuaugugacauuuu

SEQ ID NO: 3696304 - RNA, 16 nt, Human
uuaugugaucaugugu

SEQ ID NO: 3696305 - RNA, 21 nt, Human
uuaugugcuauuaauauuugu

SEQ ID NO: 3696306 - RNA, 20 nt, Human
uuaugugguuuuagauuuuc

SEQ ID NO: 3696307 - RNA, 20 nt, Human
uuauguguaugugaguauuc

SEQ ID NO: 3696308 - RNA, 17 nt, Human
uuaugugugcaugugug

SEQ ID NO: 3696309 - RNA, 12 nt, Human
uuaugugugugu

SEQ ID NO: 3696310 - RNA, 14 nt, Human
uuaugugugugugu

SEQ ID NO: 3696311 - RNA, 16 nt, Human
uuauguuauauauaaa

SEQ ID NO: 3696312 - RNA, 10 nt, Human
uuauguugac

SEQ ID NO: 3696313 - RNA, 15 nt, Human
uuauguugacauuug

SEQ ID NO: 3696314 - RNA, 18 nt, Human
uuauguuuugguccacuu

SEQ ID NO: 3696315 - RNA, 20 nt, Human
uuauguuuugguccacuuuu

SEQ ID NO: 3696316 - RNA, 15 nt, Human
uuauguuuuguuucu

SEQ ID NO: 3696317 - RNA, 18 nt, Human
uuauguuuuuguacucug

SEQ ID NO: 3696318 - RNA, 12 nt, Human
uuauuaaaaucu

SEQ ID NO: 3696319 - RNA, 21 nt, Human
uuauuaaaaugauuguaaaau

SEQ ID NO: 3696320 - RNA, 16 nt, Human
uuauuaaaauucugaa

SEQ ID NO: 3696321 - RNA, 12 nt, Human
uuauuaaaauug

SEQ ID NO: 3696322 - RNA, 16 nt, Human
uuauuaaacaaauaau

SEQ ID NO: 3696323 - RNA, 18 nt, Human
uuauuaaacguaugcaug

SEQ ID NO: 3696324 - RNA, 21 nt, Human
uuauuaaagaaaaaaauguau

SEQ ID NO: 3696325 - RNA, 19 nt, Human
uuauuaaaguuucaaaaau

SEQ ID NO: 3696326 - RNA, 15 nt, Human
uuauuaaauaaaauc

SEQ ID NO: 3696327 - RNA, 18 nt, Human
uuauuaaauacaaaacuu

SEQ ID NO: 3696328 - RNA, 18 nt, Human
uuauuaaauguagcuuca

SEQ ID NO: 3696329 - RNA, 13 nt, Human
uuauuaaauugca

SEQ ID NO: 3696330 - RNA, 22 nt, Human
uuauuaaauuuuuuuguaugaa

SEQ ID NO: 3696331 - RNA, 16 nt, Human
uuauuaacaaaacagu

SEQ ID NO: 3696332 - RNA, 16 nt, Human
uuauuaacaauuaggc

SEQ ID NO: 3696333 - RNA, 21 nt, Human
uuauuaacuaauaugggcauu

SEQ ID NO: 3696334 - RNA, 15 nt, Human
uuauuaacuacauuu

SEQ ID NO: 3696335 - RNA, 18 nt, Human
uuauuaacuacauuuaug

SEQ ID NO: 3696336 - RNA, 14 nt, Human
uuauuaacuuaaua

SEQ ID NO: 3696337 - RNA, 19 nt, Human
uuauuaagauggauucuca

SEQ ID NO: 3696338 - RNA, 19 nt, Human
uuauuaagcuuuuuggaau

SEQ ID NO: 3696339 - RNA, 20 nt, Human
uuauuaauauauauuaucuu

SEQ ID NO: 3696340 - RNA, 11 nt, Human
uuauuaauauu

SEQ ID NO: 3696341 - RNA, 18 nt, Human
uuauuaauauuuaacauu

SEQ ID NO: 3696342 - RNA, 16 nt, Human
uuauuaaugcuaaggg

SEQ ID NO: 3696343 - RNA, 22 nt, Human
uuauuaauuguuuugcacuuuu

SEQ ID NO: 3696344 - RNA, 12 nt, Human
uuauuaauuuga

SEQ ID NO: 3696345 - RNA, 20 nt, Human
uuauuaauuuuaguuuuuca

SEQ ID NO: 3696346 - RNA, 14 nt, Human
uuauuacaguauaa

SEQ ID NO: 3696347 - RNA, 21 nt, Human
uuauuacauccuuguggcaca

SEQ ID NO: 3696348 - RNA, 18 nt, Human
uuauuacaucuuucacau

SEQ ID NO: 3696349 - RNA, 18 nt, Human
uuauuacguaugucuggu

SEQ ID NO: 3696350 - RNA, 17 nt, Human
uuauuacuguaagaaaa

SEQ ID NO: 3696351 - RNA, 13 nt, Human
uuauuacuguuua

SEQ ID NO: 3696352 - RNA, 18 nt, Human
uuauuacuguuugucuuc

SEQ ID NO: 3696353 - RNA, 14 nt, Human
uuauuacuuccaug

SEQ ID NO: 3696354 - RNA, 11 nt, Human
uuauuagauga

SEQ ID NO: 3696355 - RNA, 12 nt, Human
uuauuagauguu

SEQ ID NO: 3696356 - RNA, 23 nt, Human
uuauuagcagcugacuuucaaag

SEQ ID NO: 3696357 - RNA, 18 nt, Human
uuauuagcccugcauuuu

SEQ ID NO: 3696358 - RNA, 23 nt, Human
uuauuagggagaaaauucaauug

SEQ ID NO: 3696359 - RNA, 20 nt, Human
uuauuaguaagaaaacauca

SEQ ID NO: 3696360 - RNA, 16 nt, Human
uuauuaguauuguugu

SEQ ID NO: 3696361 - RNA, 20 nt, Human
uuauuaguguaugcuuugaa

SEQ ID NO: 3696362 - RNA, 18 nt, Human
uuauuaguuuacaucauu

SEQ ID NO: 3696363 - RNA, 12 nt, Human
uuauuaguuuug

SEQ ID NO: 3696364 - RNA, 14 nt, Human
uuauuauaaacugu

SEQ ID NO: 3696365 - RNA, 14 nt, Human
uuauuauauuuaca

SEQ ID NO: 3696366 - RNA, 17 nt, Human
uuauuaucaaguagacu

SEQ ID NO: 3696367 - RNA, 13 nt, Human
uuauuaucuuuaa

SEQ ID NO: 3696368 - RNA, 23 nt, Human
uuauuaugaaacuuguguaaaua

SEQ ID NO: 3696369 - RNA, 13 nt, Human
uuauuaugaagaa

SEQ ID NO: 3696370 - RNA, 14 nt, Human
uuauuaugcauuau

SEQ ID NO: 3696371 - RNA, 14 nt, Human
uuauuauuacuguu

SEQ ID NO: 3696372 - RNA, 16 nt, Human
uuauuauugaaauugu

SEQ ID NO: 3696373 - RNA, 11 nt, Human
uuauuauugug

SEQ ID NO: 3696374 - RNA, 12 nt, Human
uuauuauuuauu

SEQ ID NO: 3696375 - RNA, 13 nt, Human
uuauucaaagaga

SEQ ID NO: 3696376 - RNA, 13 nt, Human
uuauucaaaguug

SEQ ID NO: 3696377 - RNA, 19 nt, Human
uuauucaaaguugccuaaa

SEQ ID NO: 3696378 - RNA, 14 nt, Human
uuauucaacagcaa

SEQ ID NO: 3696379 - RNA, 11 nt, Human
uuauucaaggu

SEQ ID NO: 3696380 - RNA, 16 nt, Human
uuauucaaguuauugu

SEQ ID NO: 3696381 - RNA, 20 nt, Human
uuauucaauaaaguauuuaa

SEQ ID NO: 3696382 - RNA, 19 nt, Human
uuauucaauuccucuggga

SEQ ID NO: 3696383 - RNA, 14 nt, Human
uuauucacugauuu

SEQ ID NO: 3696384 - RNA, 15 nt, Human
uuauucagcuucauu

SEQ ID NO: 3696385 - RNA, 20 nt, Human
uuauucagcuucauuugugu

SEQ ID NO: 3696386 - RNA, 20 nt, Human
uuauucaggaaaagccucug

SEQ ID NO: 3696387 - RNA, 23 nt, Human
uuauucauaagccaauuuuucug

SEQ ID NO: 3696388 - RNA, 12 nt, Human
uucacucucuga

SEQ ID NO: 3696389 - RNA, 14 nt, Human
uucacucuuccaga

SEQ ID NO: 3696390 - RNA, 15 nt, Human
uucacucuuccagaa

SEQ ID NO: 3696391 - RNA, 18 nt, Human
uucacucuuggagccugc

SEQ ID NO: 3696392 - RNA, 12 nt, Human
uucacugcugca

SEQ ID NO: 3696393 - RNA, 15 nt, Human
uucacugcuggcugc

SEQ ID NO: 3696394 - RNA, 18 nt, Human
uucacugcuggcugccuu

SEQ ID NO: 3696395 - RNA, 17 nt, Human
uucacuggagcacaaua

SEQ ID NO: 3696396 - RNA, 16 nt, Human
uucacuggaguuacau

SEQ ID NO: 3696397 - RNA, 19 nt, Human
uucacuggaguuacauuaa

SEQ ID NO: 3696398 - RNA, 13 nt, Human
uucacuggcccaa

SEQ ID NO: 3696399 - RNA, 12 nt, Human
uucacuguacgu

SEQ ID NO: 3696400 - RNA, 15 nt, Human
uucacuguagaauga

SEQ ID NO: 3696401 - RNA, 22 nt, Human
uucacuguagaaugauuucaug

SEQ ID NO: 3696402 - RNA, 13 nt, Human
uucacuguauaaa

SEQ ID NO: 3696403 - RNA, 21 nt, Human
uucacugucaggaagaaauca

SEQ ID NO: 3696404 - RNA, 15 nt, Human
uucacugucugucug

SEQ ID NO: 3696405 - RNA, 19 nt, Human
uucacugucuuuaauucug

SEQ ID NO: 3696406 - RNA, 22 nt, Human
uucacugugaccuugagaagau

SEQ ID NO: 3696407 - RNA, 13 nt, Human
uucacugugcugu

SEQ ID NO: 3696408 - RNA, 16 nt, Human
uucacuguuagcuuuu

SEQ ID NO: 3696409 - RNA, 19 nt, Human
uucacuguuucaucuaagu

SEQ ID NO: 3696410 - RNA, 15 nt, Human
uucacuuauauguuc

SEQ ID NO: 3696411 - RNA, 22 nt, Human
uucacuuaugaaugauuugcau

SEQ ID NO: 3696412 - RNA, 12 nt, Human
uucacuucaaaa

SEQ ID NO: 3696413 - RNA, 19 nt, Human
uucacuucugacucuuccc

SEQ ID NO: 3696414 - RNA, 19 nt, Human
uucacuuucacauagaugu

SEQ ID NO: 3696415 - RNA, 15 nt, Human
uucagaaaaagaaau

SEQ ID NO: 3696416 - RNA, 17 nt, Human
uucagaaaacagaaaaa

SEQ ID NO: 3696417 - RNA, 21 nt, Human
uucagaaaauauuauguguuu

SEQ ID NO: 3696418 - RNA, 19 nt, Human
uucagaaagcauuacauuu

SEQ ID NO: 3696419 - RNA, 20 nt, Human
uucagaaagcauuacauuuc

SEQ ID NO: 3696420 - RNA, 16 nt, Human
uucagaaagugugcuu

SEQ ID NO: 3696421 - RNA, 15 nt, Human
uucagaaauauaaca

SEQ ID NO: 3696422 - RNA, 20 nt, Human
uucagaaauauaacacauuu

SEQ ID NO: 3696423 - RNA, 22 nt, Human
uucagaaauauaacacauuuuu

SEQ ID NO: 3696424 - RNA, 17 nt, Human
uucagaaaugcugccug

SEQ ID NO: 3696425 - RNA, 19 nt, Human
uucagaaaugcugccugcc

SEQ ID NO: 3696426 - RNA, 22 nt, Human
uucagaaaugcugccugccugu

SEQ ID NO: 3696427 - RNA, 12 nt, Human
uucagaaauguu

SEQ ID NO: 3696428 - RNA, 20 nt, Human
uucagaaauuggaacagaau

SEQ ID NO: 3696429 - RNA, 21 nt, Human
uucagaaauuggaacagaaug

SEQ ID NO: 3696430 - RNA, 19 nt, Human
uucagaaccucuuccccag

SEQ ID NO: 3696431 - RNA, 15 nt, Human
uucagaaguuaguuu

SEQ ID NO: 3696432 - RNA, 20 nt, Human
uucagaaguuaguuuguaua

SEQ ID NO: 3696433 - RNA, 13 nt, Human
uucagaaguuuaa

SEQ ID NO: 3696434 - RNA, 16 nt, Human
uucagaauaagcuucc

SEQ ID NO: 3696435 - RNA, 21 nt, Human
uucagaaucacuucugagaac

SEQ ID NO: 3696436 - RNA, 18 nt, Human
uucagaaucugaauguaa

SEQ ID NO: 3696437 - RNA, 23 nt, Human
uucagaauuuuauacuuucccua

SEQ ID NO: 3696438 - RNA, 21 nt, Human
uucagacaagcaacagguuuu

SEQ ID NO: 3696439 - RNA, 15 nt, Human
uucagacacuuugga

SEQ ID NO: 3696440 - RNA, 16 nt, Human
uucagacagcugccug

SEQ ID NO: 3696441 - RNA, 17 nt, Human
uucagacagcugccugg

SEQ ID NO: 3696442 - RNA, 16 nt, Human
uucagacauagaauua

SEQ ID NO: 3696443 - RNA, 15 nt, Human
uucagaccccagcgg

SEQ ID NO: 3696444 - RNA, 20 nt, Human
uucagacucccauuccugaa

SEQ ID NO: 3696445 - RNA, 23 nt, Human
uucagacuugccaugugacucug

SEQ ID NO: 3696446 - RNA, 14 nt, Human
uucagagaaaggca

SEQ ID NO: 3696447 - RNA, 13 nt, Human
uucagagaauauc

SEQ ID NO: 3696448 - RNA, 15 nt, Human
uucagagaggccuuu

SEQ ID NO: 3696449 - RNA, 23 nt, Human
uucagagauuuauauaaauguaa

SEQ ID NO: 3696450 - RNA, 23 nt, Human
uucagagcugacacaggaugaag

SEQ ID NO: 3696451 - RNA, 21 nt, Human
uucagagcugcccucuccugg

SEQ ID NO: 3696452 - RNA, 22 nt, Human
uucagagcugcccucuccuggg

SEQ ID NO: 3696453 - RNA, 22 nt, Human
uucagaggcccucgcugccagc

SEQ ID NO: 3696454 - RNA, 23 nt, Human
uucagaggcccucgcugccagcu

SEQ ID NO: 3696455 - RNA, 13 nt, Human
uucagaggcucag

SEQ ID NO: 3696456 - RNA, 14 nt, Human
uucagaguuuucug

SEQ ID NO: 3696457 - RNA, 16 nt, Human
uucagaguuuucuggg

SEQ ID NO: 3696458 - RNA, 18 nt, Human
uucagaguuuucugggua

SEQ ID NO: 3696459 - RNA, 17 nt, Human
uucagauaacuguuauu

SEQ ID NO: 3696460 - RNA, 16 nt, Human
uucagauacuggauug

SEQ ID NO: 3696461 - RNA, 12 nt, Human
uucagauauaaa

SEQ ID NO: 3696462 - RNA, 18 nt, Human
uucagauauuauugcuuu

SEQ ID NO: 3696463 - RNA, 13 nt, Human
uucagauccuacc

SEQ ID NO: 3696464 - RNA, 15 nt, Human
uucagauccuacccc

SEQ ID NO: 3696465 - RNA, 15 nt, Human
uucagaugcuucugg

SEQ ID NO: 3696466 - RNA, 21 nt, Human
uucagaugggaggaaagagag

SEQ ID NO: 3696467 - RNA, 17 nt, Human
uucagauguaauguuuu

SEQ ID NO: 3696468 - RNA, 13 nt, Human
uucagauguaugu

SEQ ID NO: 3696469 - RNA, 19 nt, Human
uucagaugucuucugccug

SEQ ID NO: 3696470 - RNA, 20 nt, Human
uucagaugucuucugccugu

SEQ ID NO: 3696471 - RNA, 16 nt, Human
uucagaugugaaccau

SEQ ID NO: 3696472 - RNA, 18 nt, Human
uucagaugugaaccauua

SEQ ID NO: 3696473 - RNA, 19 nt, Human
uucagauguggagccaggc

SEQ ID NO: 3696474 - RNA, 17 nt, Human
uucagauuugcacaaaa

SEQ ID NO: 3696475 - RNA, 19 nt, Human
uucagauuugcacaaaaag

SEQ ID NO: 3696476 - RNA, 20 nt, Human
uucagcaaacucuuuuccca

SEQ ID NO: 3696477 - RNA, 19 nt, Human
uucagcaaagugguucccu

SEQ ID NO: 3696478 - RNA, 18 nt, Human
uucagcaagagagaaccu

SEQ ID NO: 3696479 - RNA, 22 nt, Human
uucagcaccaagcaugucccag

SEQ ID NO: 3696480 - RNA, 22 nt, Human
uucagcaccuacaguguacagu

SEQ ID NO: 3696481 - RNA, 16 nt, Human
uucagcacuagccaaa

SEQ ID NO: 3696482 - RNA, 14 nt, Human
uucagcacuguccc

SEQ ID NO: 3696483 - RNA, 16 nt, Human
uucagcacugucccuu

SEQ ID NO: 3696484 - RNA, 20 nt, Human
uucagcacugucccuugccu

SEQ ID NO: 3696485 - RNA, 21 nt, Human
uucagcacugucccuugccuc

SEQ ID NO: 3696486 - RNA, 17 nt, Human
uucagcacuugucucau

SEQ ID NO: 3696487 - RNA, 20 nt, Human
uucagcacuugucucauuuu

SEQ ID NO: 3696488 - RNA, 22 nt, Human
uucagcacuuuagaauaugccu

SEQ ID NO: 3696489 - RNA, 16 nt, Human
uugcuaauuaaaaagu

SEQ ID NO: 3696490 - RNA, 20 nt, Human
uugcuaauuaacugaaacau

SEQ ID NO: 3696491 - RNA, 18 nt, Human
uugcuaauugcuguugaa

SEQ ID NO: 3696492 - RNA, 21 nt, Human
uugcuaauugcuguugaaagc

SEQ ID NO: 3696493 - RNA, 15 nt, Human
uugcuaauuuucuca

SEQ ID NO: 3696494 - RNA, 23 nt, Human
uugcuaccacggccuccuuuccg

SEQ ID NO: 3696495 - RNA, 15 nt, Human
uugcuaccaguauuu

SEQ ID NO: 3696496 - RNA, 23 nt, Human
uugcuaccaguauuuagaagcca

SEQ ID NO: 3696497 - RNA, 13 nt, Human
uugcuaccucagu

SEQ ID NO: 3696498 - RNA, 17 nt, Human
uugcuaccucagucagu

SEQ ID NO: 3696499 - RNA, 18 nt, Human
uugcuagacucuagacaa

SEQ ID NO: 3696500 - RNA, 14 nt, Human
uugcuagagcuccu

SEQ ID NO: 3696501 - RNA, 15 nt, Human
uugcuagagcuccuc

SEQ ID NO: 3696502 - RNA, 18 nt, Human
uugcuagcaguaaaagau

SEQ ID NO: 3696503 - RNA, 23 nt, Human
uugcuagcaguaaaagaugaagu

SEQ ID NO: 3696504 - RNA, 17 nt, Human
uugcuaguauuugaauu

SEQ ID NO: 3696505 - RNA, 18 nt, Human
uugcuaguauuugaauua

SEQ ID NO: 3696506 - RNA, 22 nt, Human
uugcuaucaacaauaaaauuuu

SEQ ID NO: 3696507 - RNA, 16 nt, Human
uugcuaucggggaagc

SEQ ID NO: 3696508 - RNA, 20 nt, Human
uugcuaucggggaagccaga

SEQ ID NO: 3696509 - RNA, 19 nt, Human
uugcuauguuacuauuuuc

SEQ ID NO: 3696510 - RNA, 14 nt, Human
uugcuauucugucc

SEQ ID NO: 3696511 - RNA, 16 nt, Human
uugcuauucugucccu

SEQ ID NO: 3696512 - RNA, 19 nt, Human
uugcuauucugucccuagg

SEQ ID NO: 3696513 - RNA, 12 nt, Human
uugcucacccag

SEQ ID NO: 3696514 - RNA, 15 nt, Human
uugcucaccuggggu

SEQ ID NO: 3696515 - RNA, 23 nt, Human
uugcucaugcauagucccagcua

SEQ ID NO: 3696516 - RNA, 11 nt, Human
uugcucaugga

SEQ ID NO: 3696517 - RNA, 12 nt, Human
uugcuccacccc

SEQ ID NO: 3696518 - RNA, 16 nt, Human
uugcuccccagugaag

SEQ ID NO: 3696519 - RNA, 14 nt, Human
uugcuccccuuccc

SEQ ID NO: 3696520 - RNA, 21 nt, Human
uugcuccccuuccccuuccuu

SEQ ID NO: 3696521 - RNA, 17 nt, Human
uugcucccuucagcccc

SEQ ID NO: 3696522 - RNA, 17 nt, Human
uugcuccgccuggccug

SEQ ID NO: 3696523 - RNA, 17 nt, Human
uugcuccuaauguugaa

SEQ ID NO: 3696524 - RNA, 14 nt, Human
uugcuccuggccuu

SEQ ID NO: 3696525 - RNA, 22 nt, Human
uugcucgggucccuucaccucc

SEQ ID NO: 3696526 - RNA, 20 nt, Human
uugcucuaaaauauuuauga

SEQ ID NO: 3696527 - RNA, 16 nt, Human
uugcucuaucucucaa

SEQ ID NO: 3696528 - RNA, 21 nt, Human
uugcucuccccugcccugcug

SEQ ID NO: 3696529 - RNA, 21 nt, Human
uugcucucccgguucuuccag

SEQ ID NO: 3696530 - RNA, 16 nt, Human
uugcucucccucuucu

SEQ ID NO: 3696531 - RNA, 20 nt, Human
uugcucucugugucugagag

SEQ ID NO: 3696532 - RNA, 15 nt, Human
uugcucugcaggcac

SEQ ID NO: 3696533 - RNA, 15 nt, Human
uugcucuggaccugc

SEQ ID NO: 3696534 - RNA, 14 nt, Human
uugcucugggugga

SEQ ID NO: 3696535 - RNA, 18 nt, Human
uugcucuugaugccuggc

SEQ ID NO: 3696536 - RNA, 22 nt, Human
uugcucuugcagagaagccuug

SEQ ID NO: 3696537 - RNA, 11 nt, Human
uugcugaaauu

SEQ ID NO: 3696538 - RNA, 16 nt, Human
uugcugaaauuuuaua

SEQ ID NO: 3696539 - RNA, 19 nt, Human
uugcugaauacagaggcaa

SEQ ID NO: 3696540 - RNA, 18 nt, Human
uugcugaauaggcgauca

SEQ ID NO: 3696541 - RNA, 22 nt, Human
uugcugaaucggaaucucuggg

SEQ ID NO: 3696542 - RNA, 20 nt, Human
uugcugaccccacuuggacu

SEQ ID NO: 3696543 - RNA, 14 nt, Human
uugcugacccuccc

SEQ ID NO: 3696544 - RNA, 11 nt, Human
uugcugagagc

SEQ ID NO: 3696545 - RNA, 17 nt, Human
uugcugagcuguuuaua

SEQ ID NO: 3696546 - RNA, 24 nt, Human
uugcugagcuguuuauagagaaug

SEQ ID NO: 3696547 - RNA, 15 nt, Human
uugcugauucuugag

SEQ ID NO: 3696548 - RNA, 14 nt, Human
uugcugauuuuaau

SEQ ID NO: 3696549 - RNA, 18 nt, Human
uugcugauuuuauucuug

SEQ ID NO: 3696550 - RNA, 15 nt, Human
uugcugcaaaccuga

SEQ ID NO: 3696551 - RNA, 18 nt, Human
uugcugcaauuuuauaag

SEQ ID NO: 3696552 - RNA, 21 nt, Human
uugcugcagagaaacuuaagc

SEQ ID NO: 3696553 - RNA, 15 nt, Human
uugcugcauggcagg

SEQ ID NO: 3696554 - RNA, 20 nt, Human
uugcugccauuacagaggua

SEQ ID NO: 3696555 - RNA, 20 nt, Human
uugcugccccaucagugcuc

SEQ ID NO: 3696556 - RNA, 15 nt, Human
uugcugccucaugcu

SEQ ID NO: 3696557 - RNA, 22 nt, Human
uugcugccucggauccccuucc

SEQ ID NO: 3696558 - RNA, 23 nt, Human
uugcugcuagaacuuuuuuaaau

SEQ ID NO: 3696559 - RNA, 20 nt, Human
uugcugcuauuuuacugucu

SEQ ID NO: 3696560 - RNA, 23 nt, Human
uugcugcuauuuuacugucuuaa

SEQ ID NO: 3696561 - RNA, 15 nt, Human
uugcugcuucuccca

SEQ ID NO: 3696562 - RNA, 17 nt, Human
uugcugcuucucccagg

SEQ ID NO: 3696563 - RNA, 21 nt, Human
uugcugcuucucccaggcaag

SEQ ID NO: 3696564 - RNA, 16 nt, Human
uugcugcuuguacacu

SEQ ID NO: 3696565 - RNA, 23 nt, Human
uugcugcuuuuccuuggggcagg

SEQ ID NO: 3696566 - RNA, 15 nt, Human
uugcuggaguacuua

SEQ ID NO: 3696567 - RNA, 11 nt, Human
uugcuggcuug

SEQ ID NO: 3696568 - RNA, 12 nt, Human
uugcugggcuuu

SEQ ID NO: 3696569 - RNA, 15 nt, Human
uugcuggucacugcc

SEQ ID NO: 3696570 - RNA, 23 nt, Human
uugcuggucuuguaagagcuaua

SEQ ID NO: 3696571 - RNA, 15 nt, Human
uugcugguugcugug

SEQ ID NO: 3696572 - RNA, 16 nt, Human
uugcugguugcugugu

SEQ ID NO: 3696573 - RNA, 13 nt, Human
uugcuguacaaaa

SEQ ID NO: 3696574 - RNA, 14 nt, Human
uugcuguacuagag

SEQ ID NO: 3696575 - RNA, 18 nt, Human
uugcugucccuuuuccuu

SEQ ID NO: 3696576 - RNA, 20 nt, Human
uugcuguccugaucugugau

SEQ ID NO: 3696577 - RNA, 11 nt, Human
uugcugucucu

SEQ ID NO: 3696578 - RNA, 20 nt, Human
uugcugugagcaagaaguca

SEQ ID NO: 3696579 - RNA, 17 nt, Human
uugcugugaggcugucc

SEQ ID NO: 3696580 - RNA, 14 nt, Human
uugcugugccuccc

SEQ ID NO: 3696581 - RNA, 21 nt, Human
uugcuguguuuaauuugacuu

SEQ ID NO: 3696582 - RNA, 21 nt, Human
uugcuguugaugaggccucuu

SEQ ID NO: 3696583 - RNA, 20 nt, Human
uugcuguugauuucuuucca

SEQ ID NO: 3696584 - RNA, 19 nt, Human
uugcuguugucccucugcu

SEQ ID NO: 3696585 - RNA, 18 nt, Human
uugcuguuuuaaacauua

SEQ ID NO: 3696586 - RNA, 13 nt, Human
uugcuguuuugau

SEQ ID NO: 3696587 - RNA, 24 nt, Human
uugcuuaaaugugaauuacuaacu

SEQ ID NO: 3696588 - RNA, 23 nt, Human
uugcuuaaauuucuuaugugaca

SEQ ID NO: 3696589 - RNA, 21 nt, Human
uugcuuaauuacaauauuucu

SEQ ID NO: 3696590 - RNA, 15 nt, Human
uugcuuacaauuuuu

SEQ ID NO: 3696591 - RNA, 13 nt, Human
uugcuuacauuuu

SEQ ID NO: 3696592 - RNA, 12 nt, Human
uugcuuacuaag

SEQ ID NO: 3696593 - RNA, 12 nt, Human
uugcuuaguaaa

SEQ ID NO: 3696594 - RNA, 15 nt, Human
uugcuuaguaaaauu

SEQ ID NO: 3696595 - RNA, 16 nt, Human
uugcuuauuguuccaa

SEQ ID NO: 3696596 - RNA, 23 nt, Human
uugcuuauuguuccaagacauug

SEQ ID NO: 3696597 - RNA, 13 nt, Human
uugcuuauuuaau

SEQ ID NO: 3696598 - RNA, 14 nt, Human
uugcuucauaaaug

SEQ ID NO: 3696599 - RNA, 15 nt, Human
uugcuucauaaauga

SEQ ID NO: 3696600 - RNA, 21 nt, Human
uugcuucauagcugguuccug

SEQ ID NO: 3696601 - RNA, 13 nt, Human
uugcuucaugugu

SEQ ID NO: 3696602 - RNA, 18 nt, Human
uugcuucaugugucccag

SEQ ID NO: 3696603 - RNA, 19 nt, Human
uugcuucaugugucccaga

SEQ ID NO: 3696604 - RNA, 15 nt, Human
uugcuucuuacugau

SEQ ID NO: 3696605 - RNA, 22 nt, Human
uugcuucuucccuuaaaauuua

SEQ ID NO: 3696606 - RNA, 22 nt, Human
uugcuucuucuccuauguguaa

SEQ ID NO: 3696607 - RNA, 15 nt, Human
uugcuucuugugaag

SEQ ID NO: 3696608 - RNA, 17 nt, Human
uugcuucuuucuagaaa

SEQ ID NO: 3696609 - RNA, 22 nt, Human
uugcuugaaagaaaauaugcau

SEQ ID NO: 3696610 - RNA, 17 nt, Human
uugcuugagcccaggag

SEQ ID NO: 3696611 - RNA, 20 nt, Human
uugcuugcaguagauuuucu

SEQ ID NO: 3696612 - RNA, 16 nt, Human
uugcuugccucucugu

SEQ ID NO: 3696613 - RNA, 18 nt, Human
uugcuugccugauauaaa

SEQ ID NO: 3696614 - RNA, 15 nt, Human
uugcuuguaccucug

SEQ ID NO: 3696615 - RNA, 14 nt, Human
uugcuugucuucug

SEQ ID NO: 3696616 - RNA, 16 nt, Human
uugcuuuaauauaaau

SEQ ID NO: 3696617 - RNA, 18 nt, Human
uugcuuuaauauaaaugc

SEQ ID NO: 3696618 - RNA, 19 nt, Human
uugcuuuaauauaaaugca

SEQ ID NO: 3696619 - RNA, 16 nt, Human
uugcuuuaccuuuuca

SEQ ID NO: 3696620 - RNA, 19 nt, Human
uugcuuuacugucaaaaua

SEQ ID NO: 3696621 - RNA, 22 nt, Human
uugcuuuacugucaaaauaauu

SEQ ID NO: 3696622 - RNA, 11 nt, Human
uugcuuucacu

SEQ ID NO: 3696623 - RNA, 13 nt, Human
uugcuuucacucu

SEQ ID NO: 3696624 - RNA, 15 nt, Human
uugcuuucugcucag

SEQ ID NO: 3696625 - RNA, 15 nt, Human
uugcuuucuuuucuc

SEQ ID NO: 3696626 - RNA, 11 nt, Human
uugcuuugagc

SEQ ID NO: 3696627 - RNA, 14 nt, Human
uugcuuuguugcac

SEQ ID NO: 3696628 - RNA, 16 nt, Human
uugcuuuuaaaaucca

SEQ ID NO: 3696629 - RNA, 15 nt, Human
uugcuuuuaaaauuu

SEQ ID NO: 3696630 - RNA, 18 nt, Human
uugcuuuuaaaauuuuaa

SEQ ID NO: 3696631 - RNA, 14 nt, Human
uugcuuuuaauuaa

SEQ ID NO: 3696632 - RNA, 13 nt, Human
uugcuuuuagaaa

SEQ ID NO: 3696633 - RNA, 12 nt, Human
uugcuuuucaug

SEQ ID NO: 3696634 - RNA, 13 nt, Human
uugcuuuucaugc

SEQ ID NO: 3696635 - RNA, 22 nt, Human
uugcuuuucaugcaaacucuuu

SEQ ID NO: 3696636 - RNA, 19 nt, Human
uugcuuuuccacugccugg

SEQ ID NO: 3696637 - RNA, 21 nt, Human
uugcuuuucccucuuuucuua

SEQ ID NO: 3696638 - RNA, 19 nt, Human
uugcuuuuucacagucacu

SEQ ID NO: 3696639 - RNA, 17 nt, Human
uagguucccuguucuuc

SEQ ID NO: 3696640 - RNA, 13 nt, Human
uagguucuaaagu

SEQ ID NO: 3696641 - RNA, 20 nt, Human
uagguucuaaaguucuaaga

SEQ ID NO: 3696642 - RNA, 12 nt, Human
uagguucuucuu

SEQ ID NO: 3696643 - RNA, 15 nt, Human
uagguuggacuggaa

SEQ ID NO: 3696644 - RNA, 12 nt, Human
uagguugugaau

SEQ ID NO: 3696645 - RNA, 16 nt, Human
uagguuuaacauaaag

SEQ ID NO: 3696646 - RNA, 18 nt, Human
uagguuucuaaaaaguca

SEQ ID NO: 3696647 - RNA, 17 nt, Human
uagguuugcaagccucc

SEQ ID NO: 3696648 - RNA, 22 nt, Human
uagguuuggacaaaauggaaua

SEQ ID NO: 3696649 - RNA, 23 nt, Human
uagguuuuaauaauuuuuuaauu

SEQ ID NO: 3696650 - RNA, 19 nt, Human
uagguuuuuuuguauagua

SEQ ID NO: 3696651 - RNA, 16 nt, Human
uaguaaaaauuaaaaa

SEQ ID NO: 3696652 - RNA, 16 nt, Human
uaguaaaacacagagg

SEQ ID NO: 3696653 - RNA, 18 nt, Human
uaguaaaauuuauuucau

SEQ ID NO: 3696654 - RNA, 12 nt, Human
uaguaaagaaau

SEQ ID NO: 3696655 - RNA, 13 nt, Human
uaguaaagaaauu

SEQ ID NO: 3696656 - RNA, 14 nt, Human
uaguaaauaaugcu

SEQ ID NO: 3696657 - RNA, 15 nt, Human
uaguaaauaaugcuu

SEQ ID NO: 3696658 - RNA, 16 nt, Human
uaguaaauaaugcuuu

SEQ ID NO: 3696659 - RNA, 19 nt, Human
uaguaaauaaugcuuugaa

SEQ ID NO: 3696660 - RNA, 14 nt, Human
uaguaacacuaaua

SEQ ID NO: 3696661 - RNA, 22 nt, Human
uaguaacacuaauauauuuaaa

SEQ ID NO: 3696662 - RNA, 12 nt, Human
uaguaacugaca

SEQ ID NO: 3696663 - RNA, 18 nt, Human
uaguaacuucuuauggaa

SEQ ID NO: 3696664 - RNA, 19 nt, Human
uaguaacuucuuauggaau

SEQ ID NO: 3696665 - RNA, 16 nt, Human
uaguaagaaaacauca

SEQ ID NO: 3696666 - RNA, 11 nt, Human
uaguaagaaua

SEQ ID NO: 3696667 - RNA, 21 nt, Human
uaguaagaucucuuucuaaag

SEQ ID NO: 3696668 - RNA, 21 nt, Human
uaguaagauugauaucuauaa

SEQ ID NO: 3696669 - RNA, 22 nt, Human
uaguaagauugauaucuauaaa

SEQ ID NO: 3696670 - RNA, 15 nt, Human
uaguaagcauagaaa

SEQ ID NO: 3696671 - RNA, 17 nt, Human
uaguaaggaguucauuu

SEQ ID NO: 3696672 - RNA, 14 nt, Human
uaguaaggcugugu

SEQ ID NO: 3696673 - RNA, 17 nt, Human
uaguaaguaauuaugca

SEQ ID NO: 3696674 - RNA, 21 nt, Human
uaguaaguaauuaugcacuaa

SEQ ID NO: 3696675 - RNA, 23 nt, Human
uaguaaguuaauguauauaaaaa

SEQ ID NO: 3696676 - RNA, 17 nt, Human
uaguaaguucagcacuu

SEQ ID NO: 3696677 - RNA, 14 nt, Human
uaguaauagagcaa

SEQ ID NO: 3696678 - RNA, 19 nt, Human
uaguaauauauuuaaaggg

SEQ ID NO: 3696679 - RNA, 12 nt, Human
uaguaaucugua

SEQ ID NO: 3696680 - RNA, 21 nt, Human
uaguaaugcuacgugugauuu

SEQ ID NO: 3696681 - RNA, 22 nt, Human
uaguaaugcuacgugugauuuu

SEQ ID NO: 3696682 - RNA, 14 nt, Human
uaguaauucucagg

SEQ ID NO: 3696683 - RNA, 21 nt, Human
uaguaauuucuuuuuuuccuu

SEQ ID NO: 3696684 - RNA, 16 nt, Human
uaguacaaaguuucaa

SEQ ID NO: 3696685 - RNA, 19 nt, Human
uaguacacuuuuaugagcu

SEQ ID NO: 3696686 - RNA, 16 nt, Human
uaguaccaaaugcuuu

SEQ ID NO: 3696687 - RNA, 23 nt, Human
uaguaccaaucauuuuaauuauu

SEQ ID NO: 3696688 - RNA, 20 nt, Human
uaguaccauuuauacaaauu

SEQ ID NO: 3696689 - RNA, 17 nt, Human
uaguacccaccugagcu

SEQ ID NO: 3696690 - RNA, 15 nt, Human
uaguaccugaaaagu

SEQ ID NO: 3696691 - RNA, 14 nt, Human
uaguacuaacuccu

SEQ ID NO: 3696692 - RNA, 16 nt, Human
uaguacuauaucuguu

SEQ ID NO: 3696693 - RNA, 23 nt, Human
uaguacuauaucuguuuuacugc

SEQ ID NO: 3696694 - RNA, 19 nt, Human
uaguacuccugcaaaauuu

SEQ ID NO: 3696695 - RNA, 19 nt, Human
uaguacuccuuaagaacac

SEQ ID NO: 3696696 - RNA, 13 nt, Human
uaguacugcucuu

SEQ ID NO: 3696697 - RNA, 18 nt, Human
uaguacuucuucuguaau

SEQ ID NO: 3696698 - RNA, 15 nt, Human
uaguacuuuauagaa

SEQ ID NO: 3696699 - RNA, 18 nt, Human
uaguacuuuauagaagaa

SEQ ID NO: 3696700 - RNA, 15 nt, Human
uaguagaaauuuuac

SEQ ID NO: 3696701 - RNA, 19 nt, Human
uaguagaaauuuuacaaua

SEQ ID NO: 3696702 - RNA, 12 nt, Human
uaguagagacag

SEQ ID NO: 3696703 - RNA, 22 nt, Human
uaguagagguacacuugugaau

SEQ ID NO: 3696704 - RNA, 23 nt, Human
uaguagauguucuacuuuguucu

SEQ ID NO: 3696705 - RNA, 14 nt, Human
uaguagauuaaaaa

SEQ ID NO: 3696706 - RNA, 17 nt, Human
uaguagcccuuucugug

SEQ ID NO: 3696707 - RNA, 21 nt, Human
uaguagcguuuuuuaaaugua

SEQ ID NO: 3696708 - RNA, 17 nt, Human
uaguagggguaccacug

SEQ ID NO: 3696709 - RNA, 22 nt, Human
uaguagggugagggauaagcaa

SEQ ID NO: 3696710 - RNA, 19 nt, Human
uaguaguuccugcuacaac

SEQ ID NO: 3696711 - RNA, 14 nt, Human
uaguaguucucuug

SEQ ID NO: 3696712 - RNA, 14 nt, Human
uaguaguuuuuaca

SEQ ID NO: 3696713 - RNA, 14 nt, Human
uaguauaaagaaaa

SEQ ID NO: 3696714 - RNA, 16 nt, Human
uaguauaaagaaaagu

SEQ ID NO: 3696715 - RNA, 19 nt, Human
uaguauauuaaaaauggua

SEQ ID NO: 3696716 - RNA, 19 nt, Human
uaguauauuuauauaauua

SEQ ID NO: 3696717 - RNA, 13 nt, Human
uaguaucaaaaga

SEQ ID NO: 3696718 - RNA, 17 nt, Human
uaguaucaguguuuuaa

SEQ ID NO: 3696719 - RNA, 19 nt, Human
uaguaucaguguuuuaaau

SEQ ID NO: 3696720 - RNA, 21 nt, Human
uaguaucaguguuuuaaauuc

SEQ ID NO: 3696721 - RNA, 22 nt, Human
uaguaucaguguuuuaaauucu

SEQ ID NO: 3696722 - RNA, 15 nt, Human
uaguauccuccaggu

SEQ ID NO: 3696723 - RNA, 18 nt, Human
uaguauccuccagguuuu

SEQ ID NO: 3696724 - RNA, 16 nt, Human
uaguaucuaacaugua

SEQ ID NO: 3696725 - RNA, 15 nt, Human
uaguaucuauaugac

SEQ ID NO: 3696726 - RNA, 16 nt, Human
uaguaucuauaugacu

SEQ ID NO: 3696727 - RNA, 19 nt, Human
uaguauggccugugucacu

SEQ ID NO: 3696728 - RNA, 23 nt, Human
uaguauuaucuuguucaggaaaa

SEQ ID NO: 3696729 - RNA, 13 nt, Human
uaguauugacaaa

SEQ ID NO: 3696730 - RNA, 17 nt, Human
uaguauugacaaaaugu

SEQ ID NO: 3696731 - RNA, 18 nt, Human
uaguauugacaaaauguu

SEQ ID NO: 3696732 - RNA, 21 nt, Human
uaguauugacaaaauguuauu

SEQ ID NO: 3696733 - RNA, 22 nt, Human
uaguauugacaaaauguuauuu

SEQ ID NO: 3696734 - RNA, 16 nt, Human
uaguauugcaaaguca

SEQ ID NO: 3696735 - RNA, 16 nt, Human
uaguauuguuguccuu

SEQ ID NO: 3696736 - RNA, 16 nt, Human
uaguauuuauuuaaug

SEQ ID NO: 3696737 - RNA, 22 nt, Human
uaguauuugaaaacagaaauug

SEQ ID NO: 3696738 - RNA, 14 nt, Human
uaguauuugaauua

SEQ ID NO: 3696739 - RNA, 21 nt, Human
uaguauuugaauuaaaacuuc

SEQ ID NO: 3696740 - RNA, 14 nt, Human
uaguauuuucuaaa

SEQ ID NO: 3696741 - RNA, 13 nt, Human
uaguauuuuuauc

SEQ ID NO: 3696742 - RNA, 18 nt, Human
uaguauuuuuuacauuuu

SEQ ID NO: 3696743 - RNA, 14 nt, Human
uagucaaauugugu

SEQ ID NO: 3696744 - RNA, 23 nt, Human
uagucaagaaaaauuauuguaua

SEQ ID NO: 3696745 - RNA, 19 nt, Human
uagucaagacgaacaugua

SEQ ID NO: 3696746 - RNA, 15 nt, Human
uagucaagauugugu

SEQ ID NO: 3696747 - RNA, 21 nt, Human
uagucaaucaagucuguuuac

SEQ ID NO: 3696748 - RNA, 18 nt, Human
uagucaaugacaugaauu

SEQ ID NO: 3696749 - RNA, 19 nt, Human
uagucaccccaaguagucu

SEQ ID NO: 3696750 - RNA, 14 nt, Human
uagucaccuuuuaa

SEQ ID NO: 3696751 - RNA, 14 nt, Human
uagucacugagaca

SEQ ID NO: 3696752 - RNA, 23 nt, Human
uagucacugccugcagaggucug

SEQ ID NO: 3696753 - RNA, 17 nt, Human
uagucacuuauuucaua

SEQ ID NO: 3696754 - RNA, 14 nt, Human
uagucauagaagaa

SEQ ID NO: 3696755 - RNA, 13 nt, Human
uagucauuuacua

SEQ ID NO: 3696756 - RNA, 19 nt, Human
uagucauuuauuuuaaaaa

SEQ ID NO: 3696757 - RNA, 22 nt, Human
uaguccaaugucuuuuuaagcu

SEQ ID NO: 3696758 - RNA, 23 nt, Human
uaguccagcuuuguucuucuuaa

SEQ ID NO: 3696759 - RNA, 15 nt, Human
uagucccagcuacuc

SEQ ID NO: 3696760 - RNA, 21 nt, Human
uagucccagcuacucagaagc

SEQ ID NO: 3696761 - RNA, 17 nt, Human
uagucccuuccacaccc

SEQ ID NO: 3696762 - RNA, 14 nt, Human
uagucccuuccccu

SEQ ID NO: 3696763 - RNA, 22 nt, Human
uaguccgugcugacagcugcuc

SEQ ID NO: 3696764 - RNA, 18 nt, Human
uaguccuagaggaccuga

SEQ ID NO: 3696765 - RNA, 14 nt, Human
uaguccuauucuau

SEQ ID NO: 3696766 - RNA, 22 nt, Human
uaguccugugaaugccacugcc

SEQ ID NO: 3696767 - RNA, 10 nt, Human
uaguccuugg

SEQ ID NO: 3696768 - RNA, 12 nt, Human
uagucgugagcu

SEQ ID NO: 3696769 - RNA, 13 nt, Human
uagucuaagacua

SEQ ID NO: 3696770 - RNA, 19 nt, Human
uagucuagauggcuccucu

SEQ ID NO: 3696771 - RNA, 19 nt, Human
uagucucacugcuugaacu

SEQ ID NO: 3696772 - RNA, 17 nt, Human
uagucuccuuugcacug

SEQ ID NO: 3696773 - RNA, 18 nt, Human
uagucuccuuugcacuga

SEQ ID NO: 3696774 - RNA, 16 nt, Human
uagucucuuuaaaagg

SEQ ID NO: 3696775 - RNA, 15 nt, Human
uagucucuuuauucc

SEQ ID NO: 3696776 - RNA, 18 nt, Human
uagucucuuuauuccuag

SEQ ID NO: 3696777 - RNA, 13 nt, Human
uagucugguuucu

SEQ ID NO: 3696778 - RNA, 18 nt, Human
uagucugugugaagguga

SEQ ID NO: 3696779 - RNA, 17 nt, Human
uagucugugugcugugg

SEQ ID NO: 3696780 - RNA, 18 nt, Human
uagucuucucauagcauu

SEQ ID NO: 3696781 - RNA, 22 nt, Human
uagucuugucucagauuuuauu

SEQ ID NO: 3696782 - RNA, 18 nt, Human
uagucuuuagcuauuacu

SEQ ID NO: 3696783 - RNA, 19 nt, Human
uagucuuuagcuauuacug

SEQ ID NO: 3696784 - RNA, 12 nt, Human
uagucuuucaca

SEQ ID NO: 3696785 - RNA, 22 nt, Human
uagugaaacucguuaauuugua

SEQ ID NO: 3696786 - RNA, 13 nt, Human
uagugaaacuuuu

SEQ ID NO: 3696787 - RNA, 19 nt, Human
uagugaaacuuuucuagaa

SEQ ID NO: 3696788 - RNA, 17 nt, Human
uagugaaccucaccccg

SEQ ID NO: 3696789 - RNA, 21 nt, Human
uugcuuuuugugauaugcaca

SEQ ID NO: 3696790 - RNA, 14 nt, Human
uugcuuuuuuaugg

SEQ ID NO: 3696791 - RNA, 13 nt, Human
uuggaaaaaguga

SEQ ID NO: 3696792 - RNA, 22 nt, Human
uuggaaaagaauacagaaagau

SEQ ID NO: 3696793 - RNA, 12 nt, Human
uuggaaaauaaa

SEQ ID NO: 3696794 - RNA, 17 nt, Human
uuggaaaauaaauuauu

SEQ ID NO: 3696795 - RNA, 14 nt, Human
uuggaaacacuaaa

SEQ ID NO: 3696796 - RNA, 21 nt, Human
uuggaaacacuaaauguuaaa

SEQ ID NO: 3696797 - RNA, 22 nt, Human
uuggaaacauuuuuuaaaacaa

SEQ ID NO: 3696798 - RNA, 18 nt, Human
uuggaaaccugcccugcc

SEQ ID NO: 3696799 - RNA, 21 nt, Human
uuggaaaccugcccugccuga

SEQ ID NO: 3696800 - RNA, 18 nt, Human
uuggaaacuaauaaaaua

SEQ ID NO: 3696801 - RNA, 20 nt, Human
uuggaaacuaauaaaauauu

SEQ ID NO: 3696802 - RNA, 23 nt, Human
uuggaaacuaauaaaauauuuuc

SEQ ID NO: 3696803 - RNA, 18 nt, Human
uuggaaagaagaaagacu

SEQ ID NO: 3696804 - RNA, 20 nt, Human
uuggaaagcaucaccucagg

SEQ ID NO: 3696805 - RNA, 22 nt, Human
uuggaaagcaucaccucaggcc

SEQ ID NO: 3696806 - RNA, 22 nt, Human
uuggaaagcuccuagcagagag

SEQ ID NO: 3696807 - RNA, 21 nt, Human
uuggaaaguacacucugcugu

SEQ ID NO: 3696808 - RNA, 14 nt, Human
uuggaaagucagaa

SEQ ID NO: 3696809 - RNA, 22 nt, Human
uuggaaauagaaauuuccagag

SEQ ID NO: 3696810 - RNA, 24 nt, Human
uuggaaauccuaguuuccucuccu

SEQ ID NO: 3696811 - RNA, 21 nt, Human
uuggaaauuagguugaaacau

SEQ ID NO: 3696812 - RNA, 23 nt, Human
uuggaaauuagguugaaacauau

SEQ ID NO: 3696813 - RNA, 11 nt, Human
uuggaaauucc

SEQ ID NO: 3696814 - RNA, 15 nt, Human
uuggaaauuuagcau

SEQ ID NO: 3696815 - RNA, 17 nt, Human
uuggaaauuuagcauug

SEQ ID NO: 3696816 - RNA, 14 nt, Human
uuggaaauuuguua

SEQ ID NO: 3696817 - RNA, 15 nt, Human
uuggaaccagacucu

SEQ ID NO: 3696818 - RNA, 17 nt, Human
uuggaaccaugccuucc

SEQ ID NO: 3696819 - RNA, 19 nt, Human
uuggaaccuuguuuuggac

SEQ ID NO: 3696820 - RNA, 20 nt, Human
uuggaacuaacacgugaugu

SEQ ID NO: 3696821 - RNA, 22 nt, Human
uuggaacuaacacgugauguga

SEQ ID NO: 3696822 - RNA, 16 nt, Human
uuggaacucugcuuga

SEQ ID NO: 3696823 - RNA, 13 nt, Human
uuggaacuggagg

SEQ ID NO: 3696824 - RNA, 14 nt, Human
uuggaacuggaggc

SEQ ID NO: 3696825 - RNA, 14 nt, Human
uuggaacuugccug

SEQ ID NO: 3696826 - RNA, 15 nt, Human
uuggaagaccccacc

SEQ ID NO: 3696827 - RNA, 14 nt, Human
uuggaagaggaaaa

SEQ ID NO: 3696828 - RNA, 22 nt, Human
uuggaagauggcauaaccuguc

SEQ ID NO: 3696829 - RNA, 15 nt, Human
uuggaagauucagcu

SEQ ID NO: 3696830 - RNA, 19 nt, Human
uuggaagcuccgcuuucua

SEQ ID NO: 3696831 - RNA, 11 nt, Human
uuggaaggaac

SEQ ID NO: 3696832 - RNA, 19 nt, Human
uuggaaggaacguccccug

SEQ ID NO: 3696833 - RNA, 13 nt, Human
uuggaaggagaca

SEQ ID NO: 3696834 - RNA, 18 nt, Human
uuggaaggagacacagau

SEQ ID NO: 3696835 - RNA, 17 nt, Human
uuggaaguuuagcucug

SEQ ID NO: 3696836 - RNA, 15 nt, Human
uuggaaguuuuaauc

SEQ ID NO: 3696837 - RNA, 15 nt, Human
uuggaauauaauugu

SEQ ID NO: 3696838 - RNA, 17 nt, Human
uuggaaucuagaagaaa

SEQ ID NO: 3696839 - RNA, 19 nt, Human
uuggaaucuagaagaaaug

SEQ ID NO: 3696840 - RNA, 23 nt, Human
uuggaaugcacucagacuguaua

SEQ ID NO: 3696841 - RNA, 18 nt, Human
uuggaaugggcagcucau

SEQ ID NO: 3696842 - RNA, 19 nt, Human
uuggaauuaaccuggugcu

SEQ ID NO: 3696843 - RNA, 19 nt, Human
uuggaauuuguaaccucag

SEQ ID NO: 3696844 - RNA, 14 nt, Human
uuggacaaaucaca

SEQ ID NO: 3696845 - RNA, 19 nt, Human
uuggacaaaucacauauuu

SEQ ID NO: 3696846 - RNA, 15 nt, Human
uuggacaagcuucug

SEQ ID NO: 3696847 - RNA, 17 nt, Human
uuggacaagcuucugag

SEQ ID NO: 3696848 - RNA, 19 nt, Human
uuggacaagcuucugagac

SEQ ID NO: 3696849 - RNA, 15 nt, Human
uuggacaaucaugaa

SEQ ID NO: 3696850 - RNA, 15 nt, Human
uuggacacuguacaa

SEQ ID NO: 3696851 - RNA, 18 nt, Human
uuggacacuuaauucugu

SEQ ID NO: 3696852 - RNA, 19 nt, Human
uuggacacuuaauucuguu

SEQ ID NO: 3696853 - RNA, 19 nt, Human
uuggacagaagcagcucuu

SEQ ID NO: 3696854 - RNA, 23 nt, Human
uuggacauagauauuuucacaau

SEQ ID NO: 3696855 - RNA, 18 nt, Human
uuggacauuaagcaucac

SEQ ID NO: 3696856 - RNA, 16 nt, Human
uuggacauuuuauguc

SEQ ID NO: 3696857 - RNA, 18 nt, Human
uuggacauuuucuucaga

SEQ ID NO: 3696858 - RNA, 21 nt, Human
uuggaccaaaaaccaguauug

SEQ ID NO: 3696859 - RNA, 14 nt, Human
uuggaccauuuucc

SEQ ID NO: 3696860 - RNA, 13 nt, Human
uuggaccccagcu

SEQ ID NO: 3696861 - RNA, 20 nt, Human
uuggaccccagcugggaggc

SEQ ID NO: 3696862 - RNA, 15 nt, Human
uuggacccgcucugg

SEQ ID NO: 3696863 - RNA, 16 nt, Human
uuggacccgcucugga

SEQ ID NO: 3696864 - RNA, 16 nt, Human
uuggacccuuccaugg

SEQ ID NO: 3696865 - RNA, 21 nt, Human
uuggaccuaaauggccucaug

SEQ ID NO: 3696866 - RNA, 18 nt, Human
uuggaccucgugcuuuaa

SEQ ID NO: 3696867 - RNA, 15 nt, Human
uuggaccucugcucu

SEQ ID NO: 3696868 - RNA, 18 nt, Human
uuggaccucugcucugag

SEQ ID NO: 3696869 - RNA, 21 nt, Human
uuggaccucugcucugaggcu

SEQ ID NO: 3696870 - RNA, 22 nt, Human
uuggaccuuacgaucaggcaca

SEQ ID NO: 3696871 - RNA, 21 nt, Human
uuggacggccugaugcucccu

SEQ ID NO: 3696872 - RNA, 15 nt, Human
uuggacucuugcucu

SEQ ID NO: 3696873 - RNA, 16 nt, Human
uuggacucuugcucuu

SEQ ID NO: 3696874 - RNA, 13 nt, Human
uuggacuucuggg

SEQ ID NO: 3696875 - RNA, 23 nt, Human
uuggacuuucaaaauuaaaucug

SEQ ID NO: 3696876 - RNA, 18 nt, Human
uuggacuuuucguuaaca

SEQ ID NO: 3696877 - RNA, 14 nt, Human
uuggagaaauuauu

SEQ ID NO: 3696878 - RNA, 15 nt, Human
uuggagaaauuauuu

SEQ ID NO: 3696879 - RNA, 15 nt, Human
uuggagaagaacuga

SEQ ID NO: 3696880 - RNA, 20 nt, Human
uuggagaagcccgugugaga

SEQ ID NO: 3696881 - RNA, 18 nt, Human
uuggagaagucucagcua

SEQ ID NO: 3696882 - RNA, 18 nt, Human
uuggagaauuuagguuuu

SEQ ID NO: 3696883 - RNA, 11 nt, Human
uuggagacaga

SEQ ID NO: 3696884 - RNA, 18 nt, Human
uuggagaguaaaaacuga

SEQ ID NO: 3696885 - RNA, 20 nt, Human
uuggagaguaaaaacugaau

SEQ ID NO: 3696886 - RNA, 14 nt, Human
uuggagaucaagga

SEQ ID NO: 3696887 - RNA, 22 nt, Human
uuggagaugcugaggguguuuc

SEQ ID NO: 3696888 - RNA, 11 nt, Human
uuggagccugc

SEQ ID NO: 3696889 - RNA, 15 nt, Human
uuggagccugcagag

SEQ ID NO: 3696890 - RNA, 14 nt, Human
uuggagccugcagg

SEQ ID NO: 3696891 - RNA, 19 nt, Human
uuggagcucguggaacagu

SEQ ID NO: 3696892 - RNA, 13 nt, Human
uuggagcucugag

SEQ ID NO: 3696893 - RNA, 14 nt, Human
uuggagcuucaugg

SEQ ID NO: 3696894 - RNA, 21 nt, Human
uuggaggcaauccuaccuugc

SEQ ID NO: 3696895 - RNA, 16 nt, Human
uuggaggccuuuagau

SEQ ID NO: 3696896 - RNA, 22 nt, Human
uuggagggcccacuuguauccu

SEQ ID NO: 3696897 - RNA, 15 nt, Human
uuggagggccugggc

SEQ ID NO: 3696898 - RNA, 22 nt, Human
uuggagggucccaagcugggcc

SEQ ID NO: 3696899 - RNA, 14 nt, Human
uuggaguagaaugu

SEQ ID NO: 3696900 - RNA, 19 nt, Human
uuggaguucauucauauua

SEQ ID NO: 3696901 - RNA, 15 nt, Human
uuggauaauaaggaa

SEQ ID NO: 3696902 - RNA, 19 nt, Human
uuggauaauaaggaaaagu

SEQ ID NO: 3696903 - RNA, 22 nt, Human
uuggauacagcaguagacauuu

SEQ ID NO: 3696904 - RNA, 20 nt, Human
uuggauauguaaaacauuua

SEQ ID NO: 3696905 - RNA, 16 nt, Human
uuggaucuugaaugug

SEQ ID NO: 3696906 - RNA, 17 nt, Human
uuggaucuugaaugugg

SEQ ID NO: 3696907 - RNA, 16 nt, Human
uuggauggcuugucua

SEQ ID NO: 3696908 - RNA, 21 nt, Human
uuggaugggagugagacagaa

SEQ ID NO: 3696909 - RNA, 15 nt, Human
uuggauuaaauacau

SEQ ID NO: 3696910 - RNA, 20 nt, Human
uuggauuauucauuuaaaau

SEQ ID NO: 3696911 - RNA, 17 nt, Human
uuggauuauucuuucuc

SEQ ID NO: 3696912 - RNA, 15 nt, Human
uuggauuauuuaaua

SEQ ID NO: 3696913 - RNA, 18 nt, Human
uuggauuauuuaauaaca

SEQ ID NO: 3696914 - RNA, 14 nt, Human
uuggauuguauauu

SEQ ID NO: 3696915 - RNA, 21 nt, Human
uuggauuuaaaagccugcuca

SEQ ID NO: 3696916 - RNA, 14 nt, Human
uuggauuuccuaau

SEQ ID NO: 3696917 - RNA, 22 nt, Human
uuggauuuuauguugacauuug

SEQ ID NO: 3696918 - RNA, 20 nt, Human
uuggauuuugcaaggugcau

SEQ ID NO: 3696919 - RNA, 21 nt, Human
uuggauuuuuaauuaaaaacu

SEQ ID NO: 3696920 - RNA, 15 nt, Human
uuggcaaaagccuug

SEQ ID NO: 3696921 - RNA, 20 nt, Human
uuggcaaaagccuuguguau

SEQ ID NO: 3696922 - RNA, 15 nt, Human
uuggcacagaaacac

SEQ ID NO: 3696923 - RNA, 13 nt, Human
uuggcaccagaca

SEQ ID NO: 3696924 - RNA, 23 nt, Human
uuggcaccagacacccaggacuu

SEQ ID NO: 3696925 - RNA, 16 nt, Human
uuggcaccuucccccu

SEQ ID NO: 3696926 - RNA, 16 nt, Human
uuggcagaugcagcuc

SEQ ID NO: 3696927 - RNA, 21 nt, Human
uuggcagaugcagcucuuccu

SEQ ID NO: 3696928 - RNA, 22 nt, Human
uuggcagaugcagcucuuccug

SEQ ID NO: 3696929 - RNA, 18 nt, Human
uuggcagcaggugcugcu

SEQ ID NO: 3696930 - RNA, 21 nt, Human
uuggcagcaggugcugcuacc

SEQ ID NO: 3696931 - RNA, 13 nt, Human
uuggcagccuugu

SEQ ID NO: 3696932 - RNA, 20 nt, Human
uuggcagguaggaauauuau

SEQ ID NO: 3696933 - RNA, 14 nt, Human
uuggcagucugaau

SEQ ID NO: 3696934 - RNA, 19 nt, Human
uuggcauaacauaaaucug

SEQ ID NO: 3696935 - RNA, 23 nt, Human
uuggcauaacauaaaucugugaa

SEQ ID NO: 3696936 - RNA, 17 nt, Human
uuggcaucccugggccu

SEQ ID NO: 3696937 - RNA, 16 nt, Human
uuggcauggaaauuua

SEQ ID NO: 3696938 - RNA, 23 nt, Human
uucagcacuuuagaauaugccuu

SEQ ID NO: 3696939 - RNA, 19 nt, Human
uucagcagcaaauuuucag

SEQ ID NO: 3696940 - RNA, 16 nt, Human
uucagcauauuuauag

SEQ ID NO: 3696941 - RNA, 13 nt, Human
uucagcaucugac

SEQ ID NO: 3696942 - RNA, 22 nt, Human
uucagcaugaaaauguguguuu

SEQ ID NO: 3696943 - RNA, 11 nt, Human
uucagcauuug

SEQ ID NO: 3696944 - RNA, 18 nt, Human
uucagccaccagccccug

SEQ ID NO: 3696945 - RNA, 13 nt, Human
uucagcccaucuc

SEQ ID NO: 3696946 - RNA, 13 nt, Human
uucagccuaagag

SEQ ID NO: 3696947 - RNA, 21 nt, Human
uucagccuagccgaccucagc

SEQ ID NO: 3696948 - RNA, 12 nt, Human
uucagccucugg

SEQ ID NO: 3696949 - RNA, 14 nt, Human
uucagccugccuuc

SEQ ID NO: 3696950 - RNA, 18 nt, Human
uucagcuaagggaagaca

SEQ ID NO: 3696951 - RNA, 14 nt, Human
uucagcuaggaaca

SEQ ID NO: 3696952 - RNA, 22 nt, Human
uucagcuaggaacaaaucuucc

SEQ ID NO: 3696953 - RNA, 13 nt, Human
uucagcucacugu

SEQ ID NO: 3696954 - RNA, 15 nt, Human
uucagcuccagcccc

SEQ ID NO: 3696955 - RNA, 21 nt, Human
uucagcuccagccccuuucca

SEQ ID NO: 3696956 - RNA, 23 nt, Human
uucagcuccagccccuuuccaaa

SEQ ID NO: 3696957 - RNA, 15 nt, Human
uucagcuccagcuca

SEQ ID NO: 3696958 - RNA, 10 nt, Human
uucagcuccu

SEQ ID NO: 3696959 - RNA, 18 nt, Human
uucagcucucuguauaaa

SEQ ID NO: 3696960 - RNA, 21 nt, Human
uucagcucucuguauaaacau

SEQ ID NO: 3696961 - RNA, 15 nt, Human
uucagcucugaaaga

SEQ ID NO: 3696962 - RNA, 17 nt, Human
uucagcucugcaagaau

SEQ ID NO: 3696963 - RNA, 24 nt, Human
uucagcucugcaagaauugaagca

SEQ ID NO: 3696964 - RNA, 13 nt, Human
uucagcucuuuuu

SEQ ID NO: 3696965 - RNA, 13 nt, Human
uucagcugccagu

SEQ ID NO: 3696966 - RNA, 13 nt, Human
uucagcugcccca

SEQ ID NO: 3696967 - RNA, 15 nt, Human
uucagcuguccuccc

SEQ ID NO: 3696968 - RNA, 16 nt, Human
uucagcugucuuuugg

SEQ ID NO: 3696969 - RNA, 20 nt, Human
uucagcugucuuuuggagga

SEQ ID NO: 3696970 - RNA, 14 nt, Human
uucagcuucauuug

SEQ ID NO: 3696971 - RNA, 17 nt, Human
uucagcuucugcugggc

SEQ ID NO: 3696972 - RNA, 19 nt, Human
uucaggaaaagccucugug

SEQ ID NO: 3696973 - RNA, 18 nt, Human
uucaggaaaaggccuggg

SEQ ID NO: 3696974 - RNA, 20 nt, Human
uucaggaaccucgaguacug

SEQ ID NO: 3696975 - RNA, 11 nt, Human
uucaggaagcu

SEQ ID NO: 3696976 - RNA, 16 nt, Human
uucaggaagcucaggg

SEQ ID NO: 3696977 - RNA, 19 nt, Human
uucaggaauguguggccug

SEQ ID NO: 3696978 - RNA, 18 nt, Human
uucaggacacucacuaca

SEQ ID NO: 3696979 - RNA, 20 nt, Human
uucaggagcagccucagaac

SEQ ID NO: 3696980 - RNA, 17 nt, Human
uucaggagcgcaagaua

SEQ ID NO: 3696981 - RNA, 18 nt, Human
uucaggaggaauacugaa

SEQ ID NO: 3696982 - RNA, 12 nt, Human
uucaggagggau

SEQ ID NO: 3696983 - RNA, 17 nt, Human
uucaggauacucuguca

SEQ ID NO: 3696984 - RNA, 17 nt, Human
uucaggcauuuuccccc

SEQ ID NO: 3696985 - RNA, 13 nt, Human
uucaggcugcuug

SEQ ID NO: 3696986 - RNA, 19 nt, Human
uucagggaagauaaguugg

SEQ ID NO: 3696987 - RNA, 23 nt, Human
uucagggaaggaggagccugucc

SEQ ID NO: 3696988 - RNA, 16 nt, Human
uucagggcagauuuua

SEQ ID NO: 3696989 - RNA, 23 nt, Human
uucagggcagauuuuaguuuuau

SEQ ID NO: 3696990 - RNA, 17 nt, Human
uucaggggacucagccc

SEQ ID NO: 3696991 - RNA, 19 nt, Human
uucaggggacucagcccug

SEQ ID NO: 3696992 - RNA, 23 nt, Human
uucaggggcuagcuaagccaaga

SEQ ID NO: 3696993 - RNA, 23 nt, Human
uucagggugcagcccaaucugcc

SEQ ID NO: 3696994 - RNA, 22 nt, Human
uucaggguuggccccugcccgg

SEQ ID NO: 3696995 - RNA, 16 nt, Human
uucagguaacaggcag

SEQ ID NO: 3696996 - RNA, 20 nt, Human
uucagguagaggugcaugcc

SEQ ID NO: 3696997 - RNA, 19 nt, Human
uucagguagcugccccugg

SEQ ID NO: 3696998 - RNA, 14 nt, Human
uucaggugacaugu

SEQ ID NO: 3696999 - RNA, 16 nt, Human
uucaggugacauguga

SEQ ID NO: 3697000 - RNA, 17 nt, Human
uucaggugacaugugaa

SEQ ID NO: 3697001 - RNA, 18 nt, Human
uucaggugcagaggaagu

SEQ ID NO: 3697002 - RNA, 19 nt, Human
uucagguuaucgaaauaac

SEQ ID NO: 3697003 - RNA, 16 nt, Human
uucaguaauaaaacau

SEQ ID NO: 3697004 - RNA, 18 nt, Human
uucaguaauaaaacaucu

SEQ ID NO: 3697005 - RNA, 20 nt, Human
uucaguaauaaacuguguuu

SEQ ID NO: 3697006 - RNA, 21 nt, Human
uucaguacuuuuuuaaauauu

SEQ ID NO: 3697007 - RNA, 23 nt, Human
uucaguauaauuuaacuucagag

SEQ ID NO: 3697008 - RNA, 19 nt, Human
uucaguauguugucaaaga

SEQ ID NO: 3697009 - RNA, 16 nt, Human
uucaguauguuuuaca

SEQ ID NO: 3697010 - RNA, 19 nt, Human
uucaguauguuuuacacug

SEQ ID NO: 3697011 - RNA, 20 nt, Human
uucaguauguuuuacacugu

SEQ ID NO: 3697012 - RNA, 16 nt, Human
uucagucauuaaauua

SEQ ID NO: 3697013 - RNA, 18 nt, Human
uucagucucuauaccaau

SEQ ID NO: 3697014 - RNA, 21 nt, Human
uucagugauaacuccuaagag

SEQ ID NO: 3697015 - RNA, 16 nt, Human
uucagugauuacuguc

SEQ ID NO: 3697016 - RNA, 13 nt, Human
uucagugccaaua

SEQ ID NO: 3697017 - RNA, 14 nt, Human
uucagugcccacca

SEQ ID NO: 3697018 - RNA, 13 nt, Human
uucagugcugugg

SEQ ID NO: 3697019 - RNA, 21 nt, Human
uucagugcuguggccugggca

SEQ ID NO: 3697020 - RNA, 13 nt, Human
uucaguggcagcu

SEQ ID NO: 3697021 - RNA, 14 nt, Human
uucaguggcagcug

SEQ ID NO: 3697022 - RNA, 17 nt, Human
uucaguggcagcugcuu

SEQ ID NO: 3697023 - RNA, 20 nt, Human
uucaguggcagggcucagga

SEQ ID NO: 3697024 - RNA, 13 nt, Human
uucaguguaauuu

SEQ ID NO: 3697025 - RNA, 17 nt, Human
uucaguguaauuucuuu

SEQ ID NO: 3697026 - RNA, 19 nt, Human
uucaguguaauuucuuugc

SEQ ID NO: 3697027 - RNA, 13 nt, Human
uucaguguacaug

SEQ ID NO: 3697028 - RNA, 16 nt, Human
uucaguguaguuaauu

SEQ ID NO: 3697029 - RNA, 18 nt, Human
uucaguguaguuaauuua

SEQ ID NO: 3697030 - RNA, 20 nt, Human
uucaguguaguuaauuuauc

SEQ ID NO: 3697031 - RNA, 15 nt, Human
uucaguguauuucag

SEQ ID NO: 3697032 - RNA, 22 nt, Human
uucagugucaaauaaacacugu

SEQ ID NO: 3697033 - RNA, 23 nt, Human
uucagugucaaauaaacacugug

SEQ ID NO: 3697034 - RNA, 13 nt, Human
uucagugucccgg

SEQ ID NO: 3697035 - RNA, 18 nt, Human
uucagugucccgggcccg

SEQ ID NO: 3697036 - RNA, 12 nt, Human
uucaguguuaaa

SEQ ID NO: 3697037 - RNA, 10 nt, Human
uucaguguuu

SEQ ID NO: 3697038 - RNA, 14 nt, Human
uucaguuaagaaaa

SEQ ID NO: 3697039 - RNA, 16 nt, Human
uucaguuaagaaaaaa

SEQ ID NO: 3697040 - RNA, 18 nt, Human
uucaguuaagaaaaaaau

SEQ ID NO: 3697041 - RNA, 11 nt, Human
uucaguuacag

SEQ ID NO: 3697042 - RNA, 13 nt, Human
uucaguuacagaa

SEQ ID NO: 3697043 - RNA, 15 nt, Human
uucaguuacagaaag

SEQ ID NO: 3697044 - RNA, 16 nt, Human
uucaguuacagaaagu

SEQ ID NO: 3697045 - RNA, 22 nt, Human
uucaguucaaagucaugauguu

SEQ ID NO: 3697046 - RNA, 17 nt, Human
uucaguucccagaauca

SEQ ID NO: 3697047 - RNA, 16 nt, Human
uucaguucuaggaaaa

SEQ ID NO: 3697048 - RNA, 14 nt, Human
uucaguucuuugga

SEQ ID NO: 3697049 - RNA, 17 nt, Human
uucaguugcuugucuuc

SEQ ID NO: 3697050 - RNA, 19 nt, Human
uucaguugcuugucuucug

SEQ ID NO: 3697051 - RNA, 19 nt, Human
uucaguuggcugacuucca

SEQ ID NO: 3697052 - RNA, 20 nt, Human
uucaguuguguuuguugcug

SEQ ID NO: 3697053 - RNA, 22 nt, Human
uucaguuguguuuguugcuggc

SEQ ID NO: 3697054 - RNA, 17 nt, Human
uucaguuguucuuuuua

SEQ ID NO: 3697055 - RNA, 17 nt, Human
uucaguuuuaucuuuaa

SEQ ID NO: 3697056 - RNA, 19 nt, Human
uucauaaacaacuuaaugu

SEQ ID NO: 3697057 - RNA, 19 nt, Human
uucauaacuuauugcugau

SEQ ID NO: 3697058 - RNA, 21 nt, Human
uucauaacuuauugcugauuu

SEQ ID NO: 3697059 - RNA, 16 nt, Human
uucauaacuuccugua

SEQ ID NO: 3697060 - RNA, 17 nt, Human
uucauaacuuucauuaa

SEQ ID NO: 3697061 - RNA, 22 nt, Human
uucauaagccaauuuuucugca

SEQ ID NO: 3697062 - RNA, 23 nt, Human
uucauaagccaauuuuucugcac

SEQ ID NO: 3697063 - RNA, 17 nt, Human
uucauaaguauuucaaa

SEQ ID NO: 3697064 - RNA, 14 nt, Human
uucauaaucuuugc

SEQ ID NO: 3697065 - RNA, 23 nt, Human
uucauaaugacuuaagcacacuu

SEQ ID NO: 3697066 - RNA, 11 nt, Human
uucauaauggc

SEQ ID NO: 3697067 - RNA, 20 nt, Human
uucauaauggccugagacuu

SEQ ID NO: 3697068 - RNA, 19 nt, Human
uucauaauuauuauuuggc

SEQ ID NO: 3697069 - RNA, 13 nt, Human
uucauacauugua

SEQ ID NO: 3697070 - RNA, 19 nt, Human
uucauacauuguacgaaga

SEQ ID NO: 3697071 - RNA, 22 nt, Human
uucauaccuaaguacuguaaua

SEQ ID NO: 3697072 - RNA, 19 nt, Human
uucauaccuacauguauuu

SEQ ID NO: 3697073 - RNA, 14 nt, Human
uucauacuuaaaaa

SEQ ID NO: 3697074 - RNA, 13 nt, Human
uucauacuugaac

SEQ ID NO: 3697075 - RNA, 15 nt, Human
uucauagaaaaagua

SEQ ID NO: 3697076 - RNA, 18 nt, Human
uucauagagacuugggaa

SEQ ID NO: 3697077 - RNA, 18 nt, Human
uucauagagauuugucua

SEQ ID NO: 3697078 - RNA, 19 nt, Human
uucauagcuaagaaauaaa

SEQ ID NO: 3697079 - RNA, 15 nt, Human
uucauagcuguacuu

SEQ ID NO: 3697080 - RNA, 13 nt, Human
uucauaggagaca

SEQ ID NO: 3697081 - RNA, 16 nt, Human
uucauaggagacacau

SEQ ID NO: 3697082 - RNA, 13 nt, Human
uucauaggucuga

SEQ ID NO: 3697083 - RNA, 17 nt, Human
uucauaggucugaaauu

SEQ ID NO: 3697084 - RNA, 22 nt, Human
uucauaggucugaaauuuuucu

SEQ ID NO: 3697085 - RNA, 17 nt, Human
uucauaguaacuucuua

SEQ ID NO: 3697086 - RNA, 21 nt, Human
uucauauaguuagcuaauaaa

SEQ ID NO: 3697087 - RNA, 15 nt, Human
uucauaucauccaca

SEQ ID NO: 3697088 - RNA, 18 nt, Human
uagugaagacuccagaaa

SEQ ID NO: 3697089 - RNA, 23 nt, Human
uagugaauuaucccuuuucuuga

SEQ ID NO: 3697090 - RNA, 20 nt, Human
uagugacccggaggccacau

SEQ ID NO: 3697091 - RNA, 19 nt, Human
uagugacuuuucaaguauu

SEQ ID NO: 3697092 - RNA, 15 nt, Human
uagugagaagaauau

SEQ ID NO: 3697093 - RNA, 15 nt, Human
uagugagaccccugu

SEQ ID NO: 3697094 - RNA, 18 nt, Human
uagugagaccccugucuc

SEQ ID NO: 3697095 - RNA, 13 nt, Human
uagugagcccaga

SEQ ID NO: 3697096 - RNA, 19 nt, Human
uagugaucaaauugugcag

SEQ ID NO: 3697097 - RNA, 18 nt, Human
uagugaucugaacagaaa

SEQ ID NO: 3697098 - RNA, 15 nt, Human
uagugcaaauuguca

SEQ ID NO: 3697099 - RNA, 17 nt, Human
uagugcaauauauuuug

SEQ ID NO: 3697100 - RNA, 18 nt, Human
uagugcaauauauuuugu

SEQ ID NO: 3697101 - RNA, 15 nt, Human
uagugcacaaaauga

SEQ ID NO: 3697102 - RNA, 15 nt, Human
uagugcagcugaaau

SEQ ID NO: 3697103 - RNA, 15 nt, Human
uagugcagcugauuu

SEQ ID NO: 3697104 - RNA, 17 nt, Human
uagugcagcugauuuua

SEQ ID NO: 3697105 - RNA, 18 nt, Human
uagugcagcugauuuuaa

SEQ ID NO: 3697106 - RNA, 16 nt, Human
uagugcaguuauuugc

SEQ ID NO: 3697107 - RNA, 19 nt, Human
uagugcaucuuugccucuc

SEQ ID NO: 3697108 - RNA, 17 nt, Human
uagugcccuccacagcc

SEQ ID NO: 3697109 - RNA, 19 nt, Human
uagugccuucuaaaggugu

SEQ ID NO: 3697110 - RNA, 15 nt, Human
uagugcuacaggguc

SEQ ID NO: 3697111 - RNA, 17 nt, Human
uagugcuacagggucca

SEQ ID NO: 3697112 - RNA, 15 nt, Human
uagugcuauauauau

SEQ ID NO: 3697113 - RNA, 21 nt, Human
uagugcuauauauauaaauau

SEQ ID NO: 3697114 - RNA, 19 nt, Human
uagugcucgcuuucuaugu

SEQ ID NO: 3697115 - RNA, 12 nt, Human
uagugcugaagc

SEQ ID NO: 3697116 - RNA, 15 nt, Human
uagugcugaagcuua

SEQ ID NO: 3697117 - RNA, 17 nt, Human
uagugcugaagcuuauu

SEQ ID NO: 3697118 - RNA, 22 nt, Human
uagugcugcugugugcuuuuuu

SEQ ID NO: 3697119 - RNA, 13 nt, Human
uagugcugugaaa

SEQ ID NO: 3697120 - RNA, 23 nt, Human
uagugcuuuccuuuuuuaaaaau

SEQ ID NO: 3697121 - RNA, 23 nt, Human
uaguggaaaaacacauggggaaa

SEQ ID NO: 3697122 - RNA, 18 nt, Human
uaguggacccugaaaugu

SEQ ID NO: 3697123 - RNA, 19 nt, Human
uaguggacccugaaaugug

SEQ ID NO: 3697124 - RNA, 16 nt, Human
uaguggccagaccaga

SEQ ID NO: 3697125 - RNA, 18 nt, Human
uaguggccaucauuucug

SEQ ID NO: 3697126 - RNA, 15 nt, Human
uagugggccagggcu

SEQ ID NO: 3697127 - RNA, 18 nt, Human
uaguggggucucccucuc

SEQ ID NO: 3697128 - RNA, 23 nt, Human
uaguggggucucccucuccugcc

SEQ ID NO: 3697129 - RNA, 15 nt, Human
uaguggucuuuguaa

SEQ ID NO: 3697130 - RNA, 16 nt, Human
uaguggucuuuguaag

SEQ ID NO: 3697131 - RNA, 13 nt, Human
uagugguggcucu

SEQ ID NO: 3697132 - RNA, 18 nt, Human
uagugguucuuggaaaaa

SEQ ID NO: 3697133 - RNA, 13 nt, Human
uaguguaaaaaug

SEQ ID NO: 3697134 - RNA, 14 nt, Human
uaguguaaaaauga

SEQ ID NO: 3697135 - RNA, 22 nt, Human
uaguguaaaaaugagaacaugu

SEQ ID NO: 3697136 - RNA, 11 nt, Human
uaguguaaaau

SEQ ID NO: 3697137 - RNA, 19 nt, Human
uaguguaaaauaagaauga

SEQ ID NO: 3697138 - RNA, 15 nt, Human
uaguguaggcuuuac

SEQ ID NO: 3697139 - RNA, 21 nt, Human
uaguguaggcuuuacuuagcu

SEQ ID NO: 3697140 - RNA, 19 nt, Human
uaguguaucaaaaugcucu

SEQ ID NO: 3697141 - RNA, 19 nt, Human
uaguguaugauuacuggcc

SEQ ID NO: 3697142 - RNA, 23 nt, Human
uaguguccauuuugugaagcccu

SEQ ID NO: 3697143 - RNA, 12 nt, Human
uagugucuauca

SEQ ID NO: 3697144 - RNA, 18 nt, Human
uagugucuggaucaguaa

SEQ ID NO: 3697145 - RNA, 21 nt, Human
uagugucuggaucaguaaaau

SEQ ID NO: 3697146 - RNA, 17 nt, Human
uagugugaaauauauua

SEQ ID NO: 3697147 - RNA, 20 nt, Human
uaguguguugugcuuucaag

SEQ ID NO: 3697148 - RNA, 12 nt, Human
uaguguuaauca

SEQ ID NO: 3697149 - RNA, 14 nt, Human
uaguguuaaucaau

SEQ ID NO: 3697150 - RNA, 23 nt, Human
uaguguuaaucaauuuaaaccca

SEQ ID NO: 3697151 - RNA, 22 nt, Human
uaguguuauugagagagaugug

SEQ ID NO: 3697152 - RNA, 12 nt, Human
uaguguucuguu

SEQ ID NO: 3697153 - RNA, 17 nt, Human
uaguguuucugugcaug

SEQ ID NO: 3697154 - RNA, 20 nt, Human
uaguguuuggguauauucau

SEQ ID NO: 3697155 - RNA, 13 nt, Human
uaguuaaagaaag

SEQ ID NO: 3697156 - RNA, 15 nt, Human
uaguuaaauuucugg

SEQ ID NO: 3697157 - RNA, 14 nt, Human
uaguuaagacauga

SEQ ID NO: 3697158 - RNA, 18 nt, Human
uaguuaauuuaucuaaau

SEQ ID NO: 3697159 - RNA, 22 nt, Human
uaguuaccuuauaguuacugug

SEQ ID NO: 3697160 - RNA, 23 nt, Human
uaguuaccuuauaguuacugugu

SEQ ID NO: 3697161 - RNA, 14 nt, Human
uaguuacuguaaaa

SEQ ID NO: 3697162 - RNA, 15 nt, Human
uaguuacuguguaaa

SEQ ID NO: 3697163 - RNA, 16 nt, Human
uaguuacuguguaaac

SEQ ID NO: 3697164 - RNA, 17 nt, Human
uaguuacuguguaauua

SEQ ID NO: 3697165 - RNA, 19 nt, Human
uaguuacuguguaauuagu

SEQ ID NO: 3697166 - RNA, 22 nt, Human
uaguuagccaauauuuuucuua

SEQ ID NO: 3697167 - RNA, 15 nt, Human
uaguuauaguuucag

SEQ ID NO: 3697168 - RNA, 15 nt, Human
uaguuauauaauugu

SEQ ID NO: 3697169 - RNA, 12 nt, Human
uaguuaucaugu

SEQ ID NO: 3697170 - RNA, 13 nt, Human
uaguuaucauguu

SEQ ID NO: 3697171 - RNA, 14 nt, Human
uaguuaucauguua

SEQ ID NO: 3697172 - RNA, 15 nt, Human
uaguuaucauguuag

SEQ ID NO: 3697173 - RNA, 19 nt, Human
uaguuauguaaauaauucu

SEQ ID NO: 3697174 - RNA, 13 nt, Human
uaguuauuuugca

SEQ ID NO: 3697175 - RNA, 21 nt, Human
uaguucaagaaaugaagagcu

SEQ ID NO: 3697176 - RNA, 19 nt, Human
uaguucaauauuuguuacu

SEQ ID NO: 3697177 - RNA, 16 nt, Human
uaguucaaucuggauu

SEQ ID NO: 3697178 - RNA, 23 nt, Human
uaguucaaucuggauucauauuu

SEQ ID NO: 3697179 - RNA, 15 nt, Human
uaguucagacacuuu

SEQ ID NO: 3697180 - RNA, 20 nt, Human
uaguucauccaauccucacu

SEQ ID NO: 3697181 - RNA, 14 nt, Human
uaguucauguaaau

SEQ ID NO: 3697182 - RNA, 22 nt, Human
uaguucauguaaauaauacauu

SEQ ID NO: 3697183 - RNA, 20 nt, Human
uaguuccaccaucaagccac

SEQ ID NO: 3697184 - RNA, 20 nt, Human
uaguuccacuuauagccucu

SEQ ID NO: 3697185 - RNA, 18 nt, Human
uaguucccucugcucagc

SEQ ID NO: 3697186 - RNA, 16 nt, Human
uaguuccuaagaagcu

SEQ ID NO: 3697187 - RNA, 21 nt, Human
uaguuccugcuaaaacaauga

SEQ ID NO: 3697188 - RNA, 22 nt, Human
uaguucuagaaaaacaggcacu

SEQ ID NO: 3697189 - RNA, 12 nt, Human
uaguucuagaca

SEQ ID NO: 3697190 - RNA, 22 nt, Human
uaguucuagugcagcugaaauu

SEQ ID NO: 3697191 - RNA, 22 nt, Human
uaguucucuugguguuaaaaca

SEQ ID NO: 3697192 - RNA, 14 nt, Human
uaguucugccagga

SEQ ID NO: 3697193 - RNA, 15 nt, Human
uaguucugcuccaga

SEQ ID NO: 3697194 - RNA, 16 nt, Human
uaguucuguagaaaug

SEQ ID NO: 3697195 - RNA, 12 nt, Human
uaguucuguauu

SEQ ID NO: 3697196 - RNA, 15 nt, Human
uaguucuguauuuga

SEQ ID NO: 3697197 - RNA, 17 nt, Human
uaguucuguauuugaaa

SEQ ID NO: 3697198 - RNA, 22 nt, Human
uaguucuguuugguguguccca

SEQ ID NO: 3697199 - RNA, 19 nt, Human
uaguugaaacgcagacacu

SEQ ID NO: 3697200 - RNA, 22 nt, Human
uaguugaacugauaguuacugu

SEQ ID NO: 3697201 - RNA, 13 nt, Human
uaguugaauacuu

SEQ ID NO: 3697202 - RNA, 17 nt, Human
uaguugaauacuugaac

SEQ ID NO: 3697203 - RNA, 21 nt, Human
uaguugaauacuugaaccaua

SEQ ID NO: 3697204 - RNA, 17 nt, Human
uaguugagccagcagac

SEQ ID NO: 3697205 - RNA, 20 nt, Human
uaguugagccagcagacauu

SEQ ID NO: 3697206 - RNA, 23 nt, Human
uaguugagccagcagacauuguc

SEQ ID NO: 3697207 - RNA, 12 nt, Human
uaguugagcccc

SEQ ID NO: 3697208 - RNA, 17 nt, Human
uaguugagccccaaguc

SEQ ID NO: 3697209 - RNA, 13 nt, Human
uaguugauauguu

SEQ ID NO: 3697210 - RNA, 20 nt, Human
uaguugcaacuuuguauaaa

SEQ ID NO: 3697211 - RNA, 19 nt, Human
uaguugcagaaacauuuug

SEQ ID NO: 3697212 - RNA, 18 nt, Human
uaguugcagacucaguuu

SEQ ID NO: 3697213 - RNA, 15 nt, Human
uaguugcuccgccuc

SEQ ID NO: 3697214 - RNA, 16 nt, Human
uaguugcuccgccucu

SEQ ID NO: 3697215 - RNA, 16 nt, Human
uaguuggcagaaauac

SEQ ID NO: 3697216 - RNA, 17 nt, Human
uaguuggcagaaauaca

SEQ ID NO: 3697217 - RNA, 18 nt, Human
uaguuguaaaccaaguga

SEQ ID NO: 3697218 - RNA, 18 nt, Human
uaguugucaguauuauuc

SEQ ID NO: 3697219 - RNA, 21 nt, Human
uaguuguccauauuuucacag

SEQ ID NO: 3697220 - RNA, 18 nt, Human
uaguuguguacucuggcc

SEQ ID NO: 3697221 - RNA, 12 nt, Human
uaguugugucug

SEQ ID NO: 3697222 - RNA, 14 nt, Human
uaguuguuaaguuu

SEQ ID NO: 3697223 - RNA, 16 nt, Human
uaguuguuuuaaguac

SEQ ID NO: 3697224 - RNA, 13 nt, Human
uaguuuacagaaa

SEQ ID NO: 3697225 - RNA, 20 nt, Human
uaguuuacagaaaaaucuug

SEQ ID NO: 3697226 - RNA, 14 nt, Human
uaguuuacuguuuu

SEQ ID NO: 3697227 - RNA, 14 nt, Human
uaguuuauaaaaga

SEQ ID NO: 3697228 - RNA, 18 nt, Human
uaguuuauacaguuuuaa

SEQ ID NO: 3697229 - RNA, 21 nt, Human
uaguuuauacaguuuuaaaga

SEQ ID NO: 3697230 - RNA, 17 nt, Human
uaguuucauaauugugu

SEQ ID NO: 3697231 - RNA, 13 nt, Human
uaguuuccuuuuu

SEQ ID NO: 3697232 - RNA, 18 nt, Human
uaguuucuguucugugga

SEQ ID NO: 3697233 - RNA, 20 nt, Human
uaguuugaccucacagugac

SEQ ID NO: 3697234 - RNA, 20 nt, Human
uaguuugaggaaauuugcag

SEQ ID NO: 3697235 - RNA, 18 nt, Human
uaguuugcauuccugaua

SEQ ID NO: 3697236 - RNA, 17 nt, Human
uaguuugcauuucagaa

SEQ ID NO: 3697237 - RNA, 17 nt, Human
uaguuuguacaugcauu

SEQ ID NO: 3697238 - RNA, 15 nt, Human
uuggcauuaaaacuu

SEQ ID NO: 3697239 - RNA, 13 nt, Human
uuggcauucccca

SEQ ID NO: 3697240 - RNA, 16 nt, Human
uuggccaagcagggag

SEQ ID NO: 3697241 - RNA, 23 nt, Human
uuggccaaugcaccuaaagaaaa

SEQ ID NO: 3697242 - RNA, 14 nt, Human
uuggccacuccgag

SEQ ID NO: 3697243 - RNA, 13 nt, Human
uuggccaggcugg

SEQ ID NO: 3697244 - RNA, 21 nt, Human
uuggccauaagcaacaauuuu

SEQ ID NO: 3697245 - RNA, 18 nt, Human
uuggccauauuuaccuca

SEQ ID NO: 3697246 - RNA, 16 nt, Human
uuggccaucucuggau

SEQ ID NO: 3697247 - RNA, 20 nt, Human
uuggcccaggaguuuggcca

SEQ ID NO: 3697248 - RNA, 21 nt, Human
uuggcccaggaguuuggccag

SEQ ID NO: 3697249 - RNA, 15 nt, Human
uuggcccccgagcug

SEQ ID NO: 3697250 - RNA, 16 nt, Human
uuggcccccgagcugg

SEQ ID NO: 3697251 - RNA, 19 nt, Human
uuggcccccgagcuggggg

SEQ ID NO: 3697252 - RNA, 13 nt, Human
uuggcccuauuua

SEQ ID NO: 3697253 - RNA, 22 nt, Human
uuggccgcaccuaaagcagcca

SEQ ID NO: 3697254 - RNA, 13 nt, Human
uuggccucagagg

SEQ ID NO: 3697255 - RNA, 17 nt, Human
uuggccuccccugcuga

SEQ ID NO: 3697256 - RNA, 19 nt, Human
uuggccuccggccuccccu

SEQ ID NO: 3697257 - RNA, 19 nt, Human
uuggccugaucagaccacg

SEQ ID NO: 3697258 - RNA, 14 nt, Human
uuggccuggaguuu

SEQ ID NO: 3697259 - RNA, 19 nt, Human
uuggccuguagaguugcug

SEQ ID NO: 3697260 - RNA, 16 nt, Human
uuggccugucucaucc

SEQ ID NO: 3697261 - RNA, 23 nt, Human
uuggccugucucauccccagggg

SEQ ID NO: 3697262 - RNA, 17 nt, Human
uuggcgaugccagccaa

SEQ ID NO: 3697263 - RNA, 17 nt, Human
uuggcgcacccuccccu

SEQ ID NO: 3697264 - RNA, 20 nt, Human
uuggcguaggcuacagagaa

SEQ ID NO: 3697265 - RNA, 21 nt, Human
uuggcguaggcuacagagaag

SEQ ID NO: 3697266 - RNA, 22 nt, Human
uuggcguaggcuacagagaagc

SEQ ID NO: 3697267 - RNA, 18 nt, Human
uuggcucacacucgacau

SEQ ID NO: 3697268 - RNA, 17 nt, Human
uuggcucgaaucucugu

SEQ ID NO: 3697269 - RNA, 21 nt, Human
uuggcucgaaucucugugccu

SEQ ID NO: 3697270 - RNA, 19 nt, Human
uuggcucugccaguccugu

SEQ ID NO: 3697271 - RNA, 23 nt, Human
uuggcucugccaguccuguccuu

SEQ ID NO: 3697272 - RNA, 14 nt, Human
uuggcucuggagac

SEQ ID NO: 3697273 - RNA, 21 nt, Human
uuggcugaaauucuccuggag

SEQ ID NO: 3697274 - RNA, 15 nt, Human
uuggcugcuuggccu

SEQ ID NO: 3697275 - RNA, 12 nt, Human
uuggcuggaccc

SEQ ID NO: 3697276 - RNA, 15 nt, Human
uuggcuggacccagc

SEQ ID NO: 3697277 - RNA, 21 nt, Human
uuggcuggaugaaauuuucua

SEQ ID NO: 3697278 - RNA, 20 nt, Human
uuggcuggugugguacagag

SEQ ID NO: 3697279 - RNA, 18 nt, Human
uuggcugugucuaaacug

SEQ ID NO: 3697280 - RNA, 23 nt, Human
uuggcugugucuaaacugcauua

SEQ ID NO: 3697281 - RNA, 18 nt, Human
uuggcuuauaauucuuuc

SEQ ID NO: 3697282 - RNA, 21 nt, Human
uuggcuuccaugaugguuauu

SEQ ID NO: 3697283 - RNA, 22 nt, Human
uuggcuucugugaugagcugau

SEQ ID NO: 3697284 - RNA, 16 nt, Human
uuggcuucuguuucua

SEQ ID NO: 3697285 - RNA, 14 nt, Human
uuggcuugacucag

SEQ ID NO: 3697286 - RNA, 21 nt, Human
uuggcuuguagaauuguuaua

SEQ ID NO: 3697287 - RNA, 20 nt, Human
uuggcuuuauccucuuuaga

SEQ ID NO: 3697288 - RNA, 22 nt, Human
uuggcuuuauccucuuuagagu

SEQ ID NO: 3697289 - RNA, 22 nt, Human
uuggcuuuucugauccaguuuu

SEQ ID NO: 3697290 - RNA, 12 nt, Human
uugggaaaacau

SEQ ID NO: 3697291 - RNA, 15 nt, Human
uugggaaaacauuug

SEQ ID NO: 3697292 - RNA, 17 nt, Human
uugggaaacuugucacu

SEQ ID NO: 3697293 - RNA, 22 nt, Human
uugggaaguuaaagggaagaaa

SEQ ID NO: 3697294 - RNA, 14 nt, Human
uugggaauaaauau

SEQ ID NO: 3697295 - RNA, 17 nt, Human
uugggaauaaauaugcc

SEQ ID NO: 3697296 - RNA, 16 nt, Human
uugggaauauuugaau

SEQ ID NO: 3697297 - RNA, 19 nt, Human
uugggaaugaggcuugcug

SEQ ID NO: 3697298 - RNA, 11 nt, Human
uugggaauguu

SEQ ID NO: 3697299 - RNA, 20 nt, Human
uugggacccaguggcagggc

SEQ ID NO: 3697300 - RNA, 16 nt, Human
uugggaccccuggugg

SEQ ID NO: 3697301 - RNA, 20 nt, Human
uugggacccugcuuuagagc

SEQ ID NO: 3697302 - RNA, 13 nt, Human
uugggagagacuu

SEQ ID NO: 3697303 - RNA, 21 nt, Human
uugggagagccauacauaaaa

SEQ ID NO: 3697304 - RNA, 16 nt, Human
uugggagauauauuuu

SEQ ID NO: 3697305 - RNA, 15 nt, Human
uugggagcacuggag

SEQ ID NO: 3697306 - RNA, 11 nt, Human
uugggagcagg

SEQ ID NO: 3697307 - RNA, 17 nt, Human
uugggagcuugggaaug

SEQ ID NO: 3697308 - RNA, 20 nt, Human
uugggaggaagcagaauaaa

SEQ ID NO: 3697309 - RNA, 14 nt, Human
uugggaggccgagg

SEQ ID NO: 3697310 - RNA, 18 nt, Human
uugggaggccgaggcagg

SEQ ID NO: 3697311 - RNA, 12 nt, Human
uugggaggcuga

SEQ ID NO: 3697312 - RNA, 15 nt, Human
uugggaguccaggca

SEQ ID NO: 3697313 - RNA, 18 nt, Human
uugggaguccaggcacag

SEQ ID NO: 3697314 - RNA, 18 nt, Human
uugggaguuuugaauguu

SEQ ID NO: 3697315 - RNA, 13 nt, Human
uugggaugucuua

SEQ ID NO: 3697316 - RNA, 21 nt, Human
uugggauuccugacccaggcc

SEQ ID NO: 3697317 - RNA, 14 nt, Human
uugggauugggggc

SEQ ID NO: 3697318 - RNA, 16 nt, Human
uugggauugggggcug

SEQ ID NO: 3697319 - RNA, 14 nt, Human
uugggauuugcugu

SEQ ID NO: 3697320 - RNA, 18 nt, Human
uugggcacccccagccug

SEQ ID NO: 3697321 - RNA, 21 nt, Human
uugggcacccccagccugggc

SEQ ID NO: 3697322 - RNA, 17 nt, Human
uugggcagagcuggcuc

SEQ ID NO: 3697323 - RNA, 21 nt, Human
uugggcagcgcccuuccucuc

SEQ ID NO: 3697324 - RNA, 22 nt, Human
uugggcagcgcccuuccucucc

SEQ ID NO: 3697325 - RNA, 23 nt, Human
uugggcagcgcccuuccucucca

SEQ ID NO: 3697326 - RNA, 17 nt, Human
uugggcaugugggcuuc

SEQ ID NO: 3697327 - RNA, 13 nt, Human
uugggccagacau

SEQ ID NO: 3697328 - RNA, 17 nt, Human
uugggccauacuggccu

SEQ ID NO: 3697329 - RNA, 18 nt, Human
uugggccauacuggccuc

SEQ ID NO: 3697330 - RNA, 14 nt, Human
uugggccccagccu

SEQ ID NO: 3697331 - RNA, 11 nt, Human
uugggcccugc

SEQ ID NO: 3697332 - RNA, 12 nt, Human
uugggcccugca

SEQ ID NO: 3697333 - RNA, 16 nt, Human
uugggccugcuccaga

SEQ ID NO: 3697334 - RNA, 18 nt, Human
uugggcgccgugcugggc

SEQ ID NO: 3697335 - RNA, 19 nt, Human
uugggcgccgugcugggca

SEQ ID NO: 3697336 - RNA, 12 nt, Human
uugggcucugau

SEQ ID NO: 3697337 - RNA, 13 nt, Human
uugggcucugaug

SEQ ID NO: 3697338 - RNA, 13 nt, Human
uugggcucugcug

SEQ ID NO: 3697339 - RNA, 17 nt, Human
uugggcugaauguaugu

SEQ ID NO: 3697340 - RNA, 22 nt, Human
uugggcugaauguauguaaaua

SEQ ID NO: 3697341 - RNA, 18 nt, Human
uugggcuucagcugccag

SEQ ID NO: 3697342 - RNA, 19 nt, Human
uuggggaaacagcaucucc

SEQ ID NO: 3697343 - RNA, 23 nt, Human
uuggggaagagagccugcaggau

SEQ ID NO: 3697344 - RNA, 14 nt, Human
uuggggacacaugu

SEQ ID NO: 3697345 - RNA, 20 nt, Human
uuggggaggacaaaacuucu

SEQ ID NO: 3697346 - RNA, 15 nt, Human
uuggggauuuucaaa

SEQ ID NO: 3697347 - RNA, 15 nt, Human
uuggggcccagugca

SEQ ID NO: 3697348 - RNA, 18 nt, Human
uuggggcucccagccagg

SEQ ID NO: 3697349 - RNA, 18 nt, Human
uugggggacagggcuggc

SEQ ID NO: 3697350 - RNA, 21 nt, Human
uugggggacagggcuggccca

SEQ ID NO: 3697351 - RNA, 23 nt, Human
uugggggaggggagacuuugaug

SEQ ID NO: 3697352 - RNA, 16 nt, Human
uuggggggcauauauu

SEQ ID NO: 3697353 - RNA, 23 nt, Human
uuggggggggcccgccuggcaga

SEQ ID NO: 3697354 - RNA, 16 nt, Human
uuggggguaaaaaaua

SEQ ID NO: 3697355 - RNA, 22 nt, Human
uugggggucaggcagccaguga

SEQ ID NO: 3697356 - RNA, 17 nt, Human
uuggggguucaggcccg

SEQ ID NO: 3697357 - RNA, 13 nt, Human
uuggggugacagu

SEQ ID NO: 3697358 - RNA, 22 nt, Human
uuggggugccccucuccuucuu

SEQ ID NO: 3697359 - RNA, 18 nt, Human
uuggggugguugaggcua

SEQ ID NO: 3697360 - RNA, 21 nt, Human
uuggguauccugcccaguguu

SEQ ID NO: 3697361 - RNA, 15 nt, Human
uugggucuauuccag

SEQ ID NO: 3697362 - RNA, 14 nt, Human
uuggguggagaagc

SEQ ID NO: 3697363 - RNA, 16 nt, Human
uuggguggagaagcca

SEQ ID NO: 3697364 - RNA, 16 nt, Human
uuggguggaugccugg

SEQ ID NO: 3697365 - RNA, 17 nt, Human
uugggugggcaggaaaa

SEQ ID NO: 3697366 - RNA, 19 nt, Human
uuggguggggggcuucaua

SEQ ID NO: 3697367 - RNA, 20 nt, Human
uuggguggggggcuucauac

SEQ ID NO: 3697368 - RNA, 22 nt, Human
uuggguucaagcgauucuucug

SEQ ID NO: 3697369 - RNA, 21 nt, Human
uuggguucaugaugcagucuc

SEQ ID NO: 3697370 - RNA, 22 nt, Human
uuggguucaugaugcagucucc

SEQ ID NO: 3697371 - RNA, 14 nt, Human
uugguaaaccuuuu

SEQ ID NO: 3697372 - RNA, 16 nt, Human
uugguaaagacuggcu

SEQ ID NO: 3697373 - RNA, 19 nt, Human
uugguaaagacuggcuuuu

SEQ ID NO: 3697374 - RNA, 14 nt, Human
uugguaaauguuuc

SEQ ID NO: 3697375 - RNA, 17 nt, Human
uugguaaauguuucuuu

SEQ ID NO: 3697376 - RNA, 23 nt, Human
uugguaaauuuccccaacagugu

SEQ ID NO: 3697377 - RNA, 18 nt, Human
uugguaacucuguaauuc

SEQ ID NO: 3697378 - RNA, 12 nt, Human
uugguaacuuuu

SEQ ID NO: 3697379 - RNA, 19 nt, Human
uugguaccagauaacuuuu

SEQ ID NO: 3697380 - RNA, 16 nt, Human
uugguaccuugcacac

SEQ ID NO: 3697381 - RNA, 12 nt, Human
uugguauauuuu

SEQ ID NO: 3697382 - RNA, 17 nt, Human
uugguaucaagaaaguc

SEQ ID NO: 3697383 - RNA, 13 nt, Human
uugguauccuuau

SEQ ID NO: 3697384 - RNA, 21 nt, Human
uugguauuguauuuauucaau

SEQ ID NO: 3697385 - RNA, 23 nt, Human
uuggucaugugggucuuccaggg

SEQ ID NO: 3697386 - RNA, 14 nt, Human
uugguccacuuuuc

SEQ ID NO: 3697387 - RNA, 22 nt, Human
uugguccagagcggaggcugug

SEQ ID NO: 3697388 - RNA, 16 nt, Human
uuggucccccuuccau

SEQ ID NO: 3697389 - RNA, 12 nt, Human
uugguccucuug

SEQ ID NO: 3697390 - RNA, 12 nt, Human
uugguccugcug

SEQ ID NO: 3697391 - RNA, 14 nt, Human
uugguccuuuacac

SEQ ID NO: 3697392 - RNA, 22 nt, Human
uuggucucccuucucuacacuc

SEQ ID NO: 3697393 - RNA, 20 nt, Human
uuggucuguacugauucaau

SEQ ID NO: 3697394 - RNA, 14 nt, Human
uuggucuuuguauc

SEQ ID NO: 3697395 - RNA, 16 nt, Human
uuggugauucaaaugg

SEQ ID NO: 3697396 - RNA, 16 nt, Human
uuggugcaacccuuac

SEQ ID NO: 3697397 - RNA, 21 nt, Human
uuggugcaacccuuaccccuu

SEQ ID NO: 3697398 - RNA, 16 nt, Human
uuggugcauagaacug

SEQ ID NO: 3697399 - RNA, 20 nt, Human
uuggugccuggccuggcaca

SEQ ID NO: 3697400 - RNA, 18 nt, Human
uuggugccuuuccuguuc

SEQ ID NO: 3697401 - RNA, 19 nt, Human
uuggugcuuuuuauaaaaa

SEQ ID NO: 3697402 - RNA, 14 nt, Human
uugguggauguaaa

SEQ ID NO: 3697403 - RNA, 21 nt, Human
uugguggcagauuuuacaaaa

SEQ ID NO: 3697404 - RNA, 12 nt, Human
uuggugguuuuu

SEQ ID NO: 3697405 - RNA, 20 nt, Human
uugguguaaagccaacaccc

SEQ ID NO: 3697406 - RNA, 15 nt, Human
uugguguaauuugaa

SEQ ID NO: 3697407 - RNA, 20 nt, Human
uugguguaauuugaagauug

SEQ ID NO: 3697408 - RNA, 23 nt, Human
uugguguauagaaguuuguccau

SEQ ID NO: 3697409 - RNA, 14 nt, Human
uuggugugcugagg

SEQ ID NO: 3697410 - RNA, 13 nt, Human
uugguguguccca

SEQ ID NO: 3697411 - RNA, 16 nt, Human
uugguguguggagaug

SEQ ID NO: 3697412 - RNA, 13 nt, Human
uugguguugacau

SEQ ID NO: 3697413 - RNA, 15 nt, Human
uugguuaaaacugua

SEQ ID NO: 3697414 - RNA, 19 nt, Human
uugguuaagcuuugacacu

SEQ ID NO: 3697415 - RNA, 20 nt, Human
uugguuaagcuuugacacug

SEQ ID NO: 3697416 - RNA, 16 nt, Human
uugguuaagucuguuu

SEQ ID NO: 3697417 - RNA, 18 nt, Human
uugguuaagucuguuuua

SEQ ID NO: 3697418 - RNA, 19 nt, Human
uugguuaggcauuguggga

SEQ ID NO: 3697419 - RNA, 21 nt, Human
uugguucaauaaagcacugag

SEQ ID NO: 3697420 - RNA, 20 nt, Human
uugguucauuaauucuauaa

SEQ ID NO: 3697421 - RNA, 15 nt, Human
uugguuccucucugg

SEQ ID NO: 3697422 - RNA, 15 nt, Human
uugguuccuucccaa

SEQ ID NO: 3697423 - RNA, 13 nt, Human
uugguucuaagga

SEQ ID NO: 3697424 - RNA, 15 nt, Human
uugguucuaauagaa

SEQ ID NO: 3697425 - RNA, 13 nt, Human
uugguucuggggc

SEQ ID NO: 3697426 - RNA, 13 nt, Human
uugguucuguguc

SEQ ID NO: 3697427 - RNA, 15 nt, Human
uugguucuugagggg

SEQ ID NO: 3697428 - RNA, 23 nt, Human
uugguucuugaggggaccaggag

SEQ ID NO: 3697429 - RNA, 13 nt, Human
uugguugcuuuaa

SEQ ID NO: 3697430 - RNA, 12 nt, Human
uugguuggaagg

SEQ ID NO: 3697431 - RNA, 18 nt, Human
uugguugguaggguggga

SEQ ID NO: 3697432 - RNA, 12 nt, Human
uugguuguauuc

SEQ ID NO: 3697433 - RNA, 12 nt, Human
uugguuuaaaaa

SEQ ID NO: 3697434 - RNA, 12 nt, Human
uugguuuaauau

SEQ ID NO: 3697435 - RNA, 21 nt, Human
uugguuuacauuuaaagcauu

SEQ ID NO: 3697436 - RNA, 14 nt, Human
uugguuugccuucc

SEQ ID NO: 3697437 - RNA, 19 nt, Human
uugguuuuaauugaaggaa

SEQ ID NO: 3697438 - RNA, 16 nt, Human
uugguuuugcuacaua

SEQ ID NO: 3697439 - RNA, 18 nt, Human
uugguuuuguuccccucc

SEQ ID NO: 3697440 - RNA, 22 nt, Human
uugguuuuuacugcucugagaa

SEQ ID NO: 3697441 - RNA, 15 nt, Human
uuguaaaaaaaaaug

SEQ ID NO: 3697442 - RNA, 21 nt, Human
uuguaaaaaaaaaugccuuug

SEQ ID NO: 3697443 - RNA, 22 nt, Human
uuguaaaaaaaaaugccuuuga

SEQ ID NO: 3697444 - RNA, 19 nt, Human
uuguaaaaacagcauugcu

SEQ ID NO: 3697445 - RNA, 14 nt, Human
uuguaaaaagaaaa

SEQ ID NO: 3697446 - RNA, 13 nt, Human
uuguaaaacaggu

SEQ ID NO: 3697447 - RNA, 13 nt, Human
uuguaaaagaaau

SEQ ID NO: 3697448 - RNA, 23 nt, Human
uuguaaaagcaacaucagcuuga

SEQ ID NO: 3697449 - RNA, 17 nt, Human
uuguaaaagcauuuugu

SEQ ID NO: 3697450 - RNA, 18 nt, Human
uuguaaaagcauuuugua

SEQ ID NO: 3697451 - RNA, 15 nt, Human
uuguaaaaugacaau

SEQ ID NO: 3697452 - RNA, 15 nt, Human
uuguaaacaaacucu

SEQ ID NO: 3697453 - RNA, 16 nt, Human
uuguaaacaaacucuu

SEQ ID NO: 3697454 - RNA, 15 nt, Human
uuguaaacauguguu

SEQ ID NO: 3697455 - RNA, 14 nt, Human
uuguaaacuuugaa

SEQ ID NO: 3697456 - RNA, 17 nt, Human
uuguaaacuuugaaaua

SEQ ID NO: 3697457 - RNA, 19 nt, Human
uuguaaacuuugaaauaua

SEQ ID NO: 3697458 - RNA, 21 nt, Human
uuguaaacuuugaaauauaug

SEQ ID NO: 3697459 - RNA, 21 nt, Human
uuguaaagaaauuuacuauau

SEQ ID NO: 3697460 - RNA, 13 nt, Human
uuguaaagacugg

SEQ ID NO: 3697461 - RNA, 17 nt, Human
uuguaaaguauguauua

SEQ ID NO: 3697462 - RNA, 12 nt, Human
uuguaaaguuuc

SEQ ID NO: 3697463 - RNA, 13 nt, Human
uuguaaauaagag

SEQ ID NO: 3697464 - RNA, 14 nt, Human
uuguaaauacacau

SEQ ID NO: 3697465 - RNA, 17 nt, Human
uuguaaauagcucaggu

SEQ ID NO: 3697466 - RNA, 11 nt, Human
uuguaaauaua

SEQ ID NO: 3697467 - RNA, 16 nt, Human
uuguaaauauaaagac

SEQ ID NO: 3697468 - RNA, 13 nt, Human
uuguaaauauaua

SEQ ID NO: 3697469 - RNA, 18 nt, Human
uuguaaauauauaaauau

SEQ ID NO: 3697470 - RNA, 21 nt, Human
uuguaaauauauaaauauaua

SEQ ID NO: 3697471 - RNA, 14 nt, Human
uuguaaauauuaaa

SEQ ID NO: 3697472 - RNA, 13 nt, Human
uuguaaauauugu

SEQ ID NO: 3697473 - RNA, 19 nt, Human
uuguaaauauuuauguaaa

SEQ ID NO: 3697474 - RNA, 14 nt, Human
uuguaaaucacauc

SEQ ID NO: 3697475 - RNA, 16 nt, Human
uuguaaaugugguaaa

SEQ ID NO: 3697476 - RNA, 20 nt, Human
uuguaaauguguuggacaaa

SEQ ID NO: 3697477 - RNA, 14 nt, Human
uuguaaauguuauu

SEQ ID NO: 3697478 - RNA, 21 nt, Human
uuguaaauuaaacauaaaaca

SEQ ID NO: 3697479 - RNA, 18 nt, Human
uuguaaauuaacuuuuau

SEQ ID NO: 3697480 - RNA, 15 nt, Human
uuguaaauuaaucuu

SEQ ID NO: 3697481 - RNA, 20 nt, Human
uuguaaauuaggaggcucaa

SEQ ID NO: 3697482 - RNA, 17 nt, Human
uuguaaauuauauuugu

SEQ ID NO: 3697483 - RNA, 14 nt, Human
uuguaaauuucucu

SEQ ID NO: 3697484 - RNA, 16 nt, Human
uuguaacaagaaaaca

SEQ ID NO: 3697485 - RNA, 14 nt, Human
uuguaacagacauu

SEQ ID NO: 3697486 - RNA, 16 nt, Human
uuguaacccagauuuu

SEQ ID NO: 3697487 - RNA, 22 nt, Human
uuguaacccagauuuugcugua

SEQ ID NO: 3697488 - RNA, 15 nt, Human
uuguaaccucagcuc

SEQ ID NO: 3697489 - RNA, 12 nt, Human
uuguaaccugcu

SEQ ID NO: 3697490 - RNA, 17 nt, Human
uuguaacuaaaauaauu

SEQ ID NO: 3697491 - RNA, 21 nt, Human
uuguaacuaaaauaauuuugu

SEQ ID NO: 3697492 - RNA, 22 nt, Human
uuguaacuaaaauaauuuugua

SEQ ID NO: 3697493 - RNA, 21 nt, Human
uuguaacuguuuagaugaaug

SEQ ID NO: 3697494 - RNA, 15 nt, Human
uuguaagaaggcaau

SEQ ID NO: 3697495 - RNA, 18 nt, Human
uuguaagacaaagguuuu

SEQ ID NO: 3697496 - RNA, 16 nt, Human
uuguaagacaauccau

SEQ ID NO: 3697497 - RNA, 19 nt, Human
uuguaagacaauccaugua

SEQ ID NO: 3697498 - RNA, 22 nt, Human
uuguaagcaugcacaaauucug

SEQ ID NO: 3697499 - RNA, 20 nt, Human
uuguaaggaaugauuaauua

SEQ ID NO: 3697500 - RNA, 19 nt, Human
uuguaaguaaacugcccug

SEQ ID NO: 3697501 - RNA, 20 nt, Human
uuguaagucaguguugagau

SEQ ID NO: 3697502 - RNA, 19 nt, Human
uuguaagugaaaaacauga

SEQ ID NO: 3697503 - RNA, 16 nt, Human
uuguaagugagugugc

SEQ ID NO: 3697504 - RNA, 19 nt, Human
uuguaagugagugugcugc

SEQ ID NO: 3697505 - RNA, 21 nt, Human
uuguaagugcuacauaaauug

SEQ ID NO: 3697506 - RNA, 17 nt, Human
uuguaaguuucagguga

SEQ ID NO: 3697507 - RNA, 19 nt, Human
uuguaaguuucaggugaca

SEQ ID NO: 3697508 - RNA, 22 nt, Human
uuguaaguuucaggugacaugu

SEQ ID NO: 3697509 - RNA, 18 nt, Human
uuguaauaaaguauauaa

SEQ ID NO: 3697510 - RNA, 19 nt, Human
uuguaauaaaguauauaau

SEQ ID NO: 3697511 - RNA, 14 nt, Human
uuguaauaagcaau

SEQ ID NO: 3697512 - RNA, 21 nt, Human
uuguaauagauguuugauaga

SEQ ID NO: 3697513 - RNA, 15 nt, Human
uuguaaucugaauaa

SEQ ID NO: 3697514 - RNA, 13 nt, Human
uuguaaugaaaac

SEQ ID NO: 3697515 - RNA, 18 nt, Human
uuguaaugaauuccuaga

SEQ ID NO: 3697516 - RNA, 14 nt, Human
uuguaaugcugcac

SEQ ID NO: 3697517 - RNA, 19 nt, Human
uuguaaugucuugagcucu

SEQ ID NO: 3697518 - RNA, 21 nt, Human
uuguaauguugugaauaauua

SEQ ID NO: 3697519 - RNA, 23 nt, Human
uuguaauguugugaauaauuaca

SEQ ID NO: 3697520 - RNA, 23 nt, Human
uuguaauuaaaagcaaaucauuu

SEQ ID NO: 3697521 - RNA, 15 nt, Human
uuguaauuauaucug

SEQ ID NO: 3697522 - RNA, 14 nt, Human
uuguaauuaugauu

SEQ ID NO: 3697523 - RNA, 17 nt, Human
uuguaauuaugauuugg

SEQ ID NO: 3697524 - RNA, 14 nt, Human
uuguaauuauggag

SEQ ID NO: 3697525 - RNA, 18 nt, Human
uuguaauuauugugauuu

SEQ ID NO: 3697526 - RNA, 22 nt, Human
uuguaauuauuuuuaauaugua

SEQ ID NO: 3697527 - RNA, 18 nt, Human
uuguaauugcuuacauuu

SEQ ID NO: 3697528 - RNA, 21 nt, Human
uuguaauuuaaacaggcccag

SEQ ID NO: 3697529 - RNA, 13 nt, Human
uuguaauuuuaca

SEQ ID NO: 3697530 - RNA, 22 nt, Human
uuguaauuuuacacgcuuuugu

SEQ ID NO: 3697531 - RNA, 15 nt, Human
uuguaauuuucuuga

SEQ ID NO: 3697532 - RNA, 22 nt, Human
uuguaauuuucuugaugacugg

SEQ ID NO: 3697533 - RNA, 23 nt, Human
uuguaauuuucuugaugacugga

SEQ ID NO: 3697534 - RNA, 14 nt, Human
uuguacaaaguauu

SEQ ID NO: 3697535 - RNA, 20 nt, Human
uuguacaaaguauuaagcau

SEQ ID NO: 3697536 - RNA, 21 nt, Human
uuguacaaaguauuaagcaua

SEQ ID NO: 3697537 - RNA, 11 nt, Human
uucauaucauu

SEQ ID NO: 3697538 - RNA, 13 nt, Human
uucauaugcugua

SEQ ID NO: 3697539 - RNA, 14 nt, Human
uucauauguugcuc

SEQ ID NO: 3697540 - RNA, 18 nt, Human
uucauauguugcucaguc

SEQ ID NO: 3697541 - RNA, 22 nt, Human
uucauauuaagaaugaucugau

SEQ ID NO: 3697542 - RNA, 14 nt, Human
uucauauucagcuu

SEQ ID NO: 3697543 - RNA, 16 nt, Human
uucauauucuuucaau

SEQ ID NO: 3697544 - RNA, 13 nt, Human
uucauauucuuuu

SEQ ID NO: 3697545 - RNA, 12 nt, Human
uucauauugugc

SEQ ID NO: 3697546 - RNA, 16 nt, Human
uucauauugugccaau

SEQ ID NO: 3697547 - RNA, 17 nt, Human
uuguucuguuaacugaa

SEQ ID NO: 3697548 - RNA, 14 nt, Human
uuguucuuacacau

SEQ ID NO: 3697549 - RNA, 14 nt, Human
uuguucuuccaaag

SEQ ID NO: 3697550 - RNA, 17 nt, Human
uuguucuugguuuguaa

SEQ ID NO: 3697551 - RNA, 20 nt, Human
uuguucuugguuuguaaauu

SEQ ID NO: 3697552 - RNA, 14 nt, Human
uuguucuuguauuu

SEQ ID NO: 3697553 - RNA, 15 nt, Human
uuguucuuguauuua

SEQ ID NO: 3697554 - RNA, 20 nt, Human
uuguucuuguuuuuaaguuu

SEQ ID NO: 3697555 - RNA, 14 nt, Human
uuguucuuucagaa

SEQ ID NO: 3697556 - RNA, 13 nt, Human
uuguucuuuuuau

SEQ ID NO: 3697557 - RNA, 15 nt, Human
uuguugaacuguuag

SEQ ID NO: 3697558 - RNA, 18 nt, Human
uuguugaacuguuagaau

SEQ ID NO: 3697559 - RNA, 18 nt, Human
uuguugacaguucugaag

SEQ ID NO: 3697560 - RNA, 20 nt, Human
uuguugacauucugaaugcu

SEQ ID NO: 3697561 - RNA, 14 nt, Human
uuguugacuuauuu

SEQ ID NO: 3697562 - RNA, 18 nt, Human
uuguugagcuauugcugu

SEQ ID NO: 3697563 - RNA, 20 nt, Human
uuguugauaaauuccacugg

SEQ ID NO: 3697564 - RNA, 21 nt, Human
uuguugaugggcacuugagaa

SEQ ID NO: 3697565 - RNA, 16 nt, Human
uuguugcaagauguga

SEQ ID NO: 3697566 - RNA, 19 nt, Human
uuguugcaagaugugaauu

SEQ ID NO: 3697567 - RNA, 20 nt, Human
uuguugcacugaaguuugau

SEQ ID NO: 3697568 - RNA, 20 nt, Human
uuguugccaugugcaccuug

SEQ ID NO: 3697569 - RNA, 14 nt, Human
uuguugcggaugga

SEQ ID NO: 3697570 - RNA, 20 nt, Human
uuguugcucagcaaggggcu

SEQ ID NO: 3697571 - RNA, 18 nt, Human
uuguugcucccugugaca

SEQ ID NO: 3697572 - RNA, 14 nt, Human
uuguugcuucuugu

SEQ ID NO: 3697573 - RNA, 21 nt, Human
uuguuggaaaagaauacagaa

SEQ ID NO: 3697574 - RNA, 20 nt, Human
uuguuggaguguuucuaaua

SEQ ID NO: 3697575 - RNA, 20 nt, Human
uuguuggaucuucaauggcu

SEQ ID NO: 3697576 - RNA, 20 nt, Human
uuguuggcagcauaaaggcc

SEQ ID NO: 3697577 - RNA, 16 nt, Human
uuguuggcauagcucu

SEQ ID NO: 3697578 - RNA, 14 nt, Human
uauagaaacacgaa

SEQ ID NO: 3697579 - RNA, 12 nt, Human
uauagaaagaua

SEQ ID NO: 3697580 - RNA, 11 nt, Human
uauagaaagug

SEQ ID NO: 3697581 - RNA, 14 nt, Human
uauagaaaguguuc

SEQ ID NO: 3697582 - RNA, 22 nt, Human
uauagaaaguguucuguuacaa

SEQ ID NO: 3697583 - RNA, 23 nt, Human
uauagaaaguguucuguuacaaa

SEQ ID NO: 3697584 - RNA, 18 nt, Human
uauagaacugaaugagaa

SEQ ID NO: 3697585 - RNA, 13 nt, Human
uauagaacuucau

SEQ ID NO: 3697586 - RNA, 13 nt, Human
uauagaagaaugc

SEQ ID NO: 3697587 - RNA, 22 nt, Human
uauagaaguauaaagaauugug

SEQ ID NO: 3697588 - RNA, 15 nt, Human
uauagaauuagcuuu

SEQ ID NO: 3697589 - RNA, 22 nt, Human
uauagaauuagcuuuuucaucc

SEQ ID NO: 3697590 - RNA, 21 nt, Human
uauagaauugcaauuuuaaca

SEQ ID NO: 3697591 - RNA, 17 nt, Human
uauagaauuuuuaaugu

SEQ ID NO: 3697592 - RNA, 16 nt, Human
uauagacaaauaauaa

SEQ ID NO: 3697593 - RNA, 16 nt, Human
uauagacacccuggca

SEQ ID NO: 3697594 - RNA, 20 nt, Human
uauagacaggagaagaaaga

SEQ ID NO: 3697595 - RNA, 23 nt, Human
uauagacaguccuuaaaaaucac

SEQ ID NO: 3697596 - RNA, 14 nt, Human
uauagacaguuugu

SEQ ID NO: 3697597 - RNA, 15 nt, Human
uauagagcagaaauu

SEQ ID NO: 3697598 - RNA, 18 nt, Human
uauagagucauuguaaug

SEQ ID NO: 3697599 - RNA, 15 nt, Human
uauagauauaaugaa

SEQ ID NO: 3697600 - RNA, 23 nt, Human
uauagauauaaugaacaaaauua

SEQ ID NO: 3697601 - RNA, 22 nt, Human
uauagaucacauaacagaaugc

SEQ ID NO: 3697602 - RNA, 23 nt, Human
uauagaucacauaacagaaugca

SEQ ID NO: 3697603 - RNA, 17 nt, Human
uauagaugggaaugaag

SEQ ID NO: 3697604 - RNA, 20 nt, Human
uauagauguugcuaacagca

SEQ ID NO: 3697605 - RNA, 20 nt, Human
uauagauuagaauucuguau

SEQ ID NO: 3697606 - RNA, 22 nt, Human
uauagauuagagaguguugaaa

SEQ ID NO: 3697607 - RNA, 15 nt, Human
uauagauuauaacuu

SEQ ID NO: 3697608 - RNA, 15 nt, Human
uauagauucuaaaga

SEQ ID NO: 3697609 - RNA, 17 nt, Human
uauagauucuaaagauu

SEQ ID NO: 3697610 - RNA, 14 nt, Human
uauagauuugaccu

SEQ ID NO: 3697611 - RNA, 22 nt, Human
uauagcaaaacuuuuaaacuac

SEQ ID NO: 3697612 - RNA, 16 nt, Human
uauagcaacaacaauu

SEQ ID NO: 3697613 - RNA, 23 nt, Human
uauagcaauccauguuaguuuuu

SEQ ID NO: 3697614 - RNA, 20 nt, Human
uauagcagcaaaaauauaaa

SEQ ID NO: 3697615 - RNA, 17 nt, Human
uauagcaucacuuaaaa

SEQ ID NO: 3697616 - RNA, 20 nt, Human
uauagcaugaaauaaaauau

SEQ ID NO: 3697617 - RNA, 18 nt, Human
uauagccaaaaauagcua

SEQ ID NO: 3697618 - RNA, 14 nt, Human
uauagccaauauaa

SEQ ID NO: 3697619 - RNA, 18 nt, Human
uauagccuaggugacaga

SEQ ID NO: 3697620 - RNA, 21 nt, Human
uauagccuauggcagaaaaaa

SEQ ID NO: 3697621 - RNA, 22 nt, Human
uauagcuaggugacauauacau

SEQ ID NO: 3697622 - RNA, 11 nt, Human
uauagcuauua

SEQ ID NO: 3697623 - RNA, 22 nt, Human
uauagcuauuacugucugguuu

SEQ ID NO: 3697624 - RNA, 13 nt, Human
uauagcuauuuuu

SEQ ID NO: 3697625 - RNA, 22 nt, Human
uauagcuguacaaauauaagaa

SEQ ID NO: 3697626 - RNA, 20 nt, Human
uauagcuguauugaaucaug

SEQ ID NO: 3697627 - RNA, 21 nt, Human
uauagcuguauugaaucaugu

SEQ ID NO: 3697628 - RNA, 12 nt, Human
uauaggaauuga

SEQ ID NO: 3697629 - RNA, 14 nt, Human
uauaggaauugacc

SEQ ID NO: 3697630 - RNA, 19 nt, Human
uauaggauuuauuuaaaau

SEQ ID NO: 3697631 - RNA, 21 nt, Human
uauaggauuuauuuaaaauag

SEQ ID NO: 3697632 - RNA, 23 nt, Human
uauaggcaccuaccaccacgccc

SEQ ID NO: 3697633 - RNA, 13 nt, Human
uauaggcuauuuu

SEQ ID NO: 3697634 - RNA, 17 nt, Human
uauaggcuauuuucuaa

SEQ ID NO: 3697635 - RNA, 20 nt, Human
uauaggugauguuugcucuu

SEQ ID NO: 3697636 - RNA, 22 nt, Human
uauagguugugcaaauuaacag

SEQ ID NO: 3697637 - RNA, 18 nt, Human
uauagguuuuguuugcua

SEQ ID NO: 3697638 - RNA, 15 nt, Human
uauaguaaugaguuu

SEQ ID NO: 3697639 - RNA, 12 nt, Human
uauaguacauga

SEQ ID NO: 3697640 - RNA, 11 nt, Human
uauaguauuug

SEQ ID NO: 3697641 - RNA, 13 nt, Human
uauagucauuuau

SEQ ID NO: 3697642 - RNA, 21 nt, Human
uauagucauuuauuuuaaaaa

SEQ ID NO: 3697643 - RNA, 20 nt, Human
uauagucccagcuacucaga

SEQ ID NO: 3697644 - RNA, 16 nt, Human
uauagugcaauauauu

SEQ ID NO: 3697645 - RNA, 18 nt, Human
uauaguggaaaaacacau

SEQ ID NO: 3697646 - RNA, 13 nt, Human
uauaguguaaaau

SEQ ID NO: 3697647 - RNA, 14 nt, Human
uauaguguauagaa

SEQ ID NO: 3697648 - RNA, 17 nt, Human
uauaguuacuguccugu

SEQ ID NO: 3697649 - RNA, 18 nt, Human
uauaguuacuguguaauu

SEQ ID NO: 3697650 - RNA, 20 nt, Human
uauaguuacuguguaauuag

SEQ ID NO: 3697651 - RNA, 17 nt, Human
uauaguuaggauagcau

SEQ ID NO: 3697652 - RNA, 19 nt, Human
uauaguuaggauagcauuu

SEQ ID NO: 3697653 - RNA, 20 nt, Human
uauaguuauguaaauaauuc

SEQ ID NO: 3697654 - RNA, 17 nt, Human
uauaguuccuaagaagc

SEQ ID NO: 3697655 - RNA, 12 nt, Human
uauaguucuagg

SEQ ID NO: 3697656 - RNA, 13 nt, Human
uauaguugcuuuu

SEQ ID NO: 3697657 - RNA, 18 nt, Human
uauaguuuaaaacacauu

SEQ ID NO: 3697658 - RNA, 14 nt, Human
uauaguuucugagg

SEQ ID NO: 3697659 - RNA, 23 nt, Human
uauaguuuuacuuuuaaacugug

SEQ ID NO: 3697660 - RNA, 12 nt, Human
uauauaaaaaga

SEQ ID NO: 3697661 - RNA, 21 nt, Human
uauauaaaaauauauauagug

SEQ ID NO: 3697662 - RNA, 16 nt, Human
uauauaaaauaaauau

SEQ ID NO: 3697663 - RNA, 17 nt, Human
uauauaaaauaaauaua

SEQ ID NO: 3697664 - RNA, 18 nt, Human
uauauaaaauaaauauau

SEQ ID NO: 3697665 - RNA, 23 nt, Human
uauauaaaauaaauauauauaaa

SEQ ID NO: 3697666 - RNA, 14 nt, Human
uauauaaaauaacu

SEQ ID NO: 3697667 - RNA, 21 nt, Human
uauauaaaauauuuucauaca

SEQ ID NO: 3697668 - RNA, 15 nt, Human
uauauaaaccuaaaa

SEQ ID NO: 3697669 - RNA, 12 nt, Human
uauauaaagaaa

SEQ ID NO: 3697670 - RNA, 15 nt, Human
uauauaaagagaaaa

SEQ ID NO: 3697671 - RNA, 16 nt, Human
uauauaaagagaaaau

SEQ ID NO: 3697672 - RNA, 19 nt, Human
uauauaaagagaaaauuga

SEQ ID NO: 3697673 - RNA, 20 nt, Human
uauauaaagagaaaauugaa

SEQ ID NO: 3697674 - RNA, 14 nt, Human
uauauaaaguauag

SEQ ID NO: 3697675 - RNA, 15 nt, Human
uauauaaauaaauau

SEQ ID NO: 3697676 - RNA, 18 nt, Human
uauauaaauaaauauaua

SEQ ID NO: 3697677 - RNA, 12 nt, Human
uauauaaauaua

SEQ ID NO: 3697678 - RNA, 13 nt, Human
uauauaaauauau

SEQ ID NO: 3697679 - RNA, 20 nt, Human
uauauaaauauauauaaaua

SEQ ID NO: 3697680 - RNA, 19 nt, Human
uauauaaauauauuauuac

SEQ ID NO: 3697681 - RNA, 18 nt, Human
uauauaaauguaaaaaua

SEQ ID NO: 3697682 - RNA, 23 nt, Human
uauauaaauuuuuuuuguuucau

SEQ ID NO: 3697683 - RNA, 13 nt, Human
uauauaacaaugc

SEQ ID NO: 3697684 - RNA, 17 nt, Human
uauauaacaaugcugua

SEQ ID NO: 3697685 - RNA, 18 nt, Human
uauauaacagauacauuu

SEQ ID NO: 3697686 - RNA, 17 nt, Human
uauauaagaaagacauc

SEQ ID NO: 3697687 - RNA, 20 nt, Human
uauauaagagcaugaaauuu

SEQ ID NO: 3697688 - RNA, 18 nt, Human
uauauaaguauucuaaau

SEQ ID NO: 3697689 - RNA, 14 nt, Human
uauauaauaaagua

SEQ ID NO: 3697690 - RNA, 13 nt, Human
uauauaauaaauu

SEQ ID NO: 3697691 - RNA, 19 nt, Human
uauauaauaucuaaaguua

SEQ ID NO: 3697692 - RNA, 18 nt, Human
uauauacaaaaagaaaau

SEQ ID NO: 3697693 - RNA, 19 nt, Human
uauauacaaccugcuuggg

SEQ ID NO: 3697694 - RNA, 13 nt, Human
uauauacaauaau

SEQ ID NO: 3697695 - RNA, 21 nt, Human
uauauacacacacaaagagag

SEQ ID NO: 3697696 - RNA, 17 nt, Human
uauauacaguaacuuua

SEQ ID NO: 3697697 - RNA, 23 nt, Human
uauauacauacacuuguauaaau

SEQ ID NO: 3697698 - RNA, 14 nt, Human
uauauacauaugua

SEQ ID NO: 3697699 - RNA, 15 nt, Human
uauauacaugugugu

SEQ ID NO: 3697700 - RNA, 18 nt, Human
uauauacauguguguaua

SEQ ID NO: 3697701 - RNA, 13 nt, Human
uauauagaaugcu

SEQ ID NO: 3697702 - RNA, 14 nt, Human
uauauagagauguu

SEQ ID NO: 3697703 - RNA, 18 nt, Human
uauauagcauuuauggua

SEQ ID NO: 3697704 - RNA, 14 nt, Human
uauauaggcuauuu

SEQ ID NO: 3697705 - RNA, 24 nt, Human
uauauagguuuuguuugcuaucuu

SEQ ID NO: 3697706 - RNA, 18 nt, Human
uauauaguaccuuugcuc

SEQ ID NO: 3697707 - RNA, 22 nt, Human
uauauaguuuauugacaauaau

SEQ ID NO: 3697708 - RNA, 10 nt, Human
uauauauaaa

SEQ ID NO: 3697709 - RNA, 12 nt, Human
uauauauaaacc

SEQ ID NO: 3697710 - RNA, 14 nt, Human
uauauauaaagaau

SEQ ID NO: 3697711 - RNA, 16 nt, Human
uauauauacacacaca

SEQ ID NO: 3697712 - RNA, 13 nt, Human
uauauauacauaa

SEQ ID NO: 3697713 - RNA, 14 nt, Human
uauauauacauaug

SEQ ID NO: 3697714 - RNA, 15 nt, Human
uauauauagaaauau

SEQ ID NO: 3697715 - RNA, 12 nt, Human
uauauauagaau

SEQ ID NO: 3697716 - RNA, 16 nt, Human
uauauauauaaaugua

SEQ ID NO: 3697717 - RNA, 14 nt, Human
uauauauauauaac

SEQ ID NO: 3697718 - RNA, 14 nt, Human
uauauauauauaua

SEQ ID NO: 3697719 - RNA, 16 nt, Human
uauauauauauaugua

SEQ ID NO: 3697720 - RNA, 15 nt, Human
uauauauauaucagu

SEQ ID NO: 3697721 - RNA, 13 nt, Human
uauauauaugugu

SEQ ID NO: 3697722 - RNA, 16 nt, Human
uauauaucaguuugau

SEQ ID NO: 3697723 - RNA, 14 nt, Human
uauauauccucugu

SEQ ID NO: 3697724 - RNA, 21 nt, Human
uauauaucugcuucaguggag

SEQ ID NO: 3697725 - RNA, 13 nt, Human
uauauauggacau

SEQ ID NO: 3697726 - RNA, 17 nt, Human
uauauauguacaguuau

SEQ ID NO: 3697727 - RNA, 19 nt, Human
uauauauguacaguuaucu

SEQ ID NO: 3697728 - RNA, 12 nt, Human
uauauaugugua

SEQ ID NO: 3697729 - RNA, 23 nt, Human
uuccccgagggaugaugccacac

SEQ ID NO: 3697730 - RNA, 19 nt, Human
uuccccuaaccucauuccc

SEQ ID NO: 3697731 - RNA, 20 nt, Human
uuccccuaaucuuuucugaa

SEQ ID NO: 3697732 - RNA, 15 nt, Human
uuccccuaucauuua

SEQ ID NO: 3697733 - RNA, 16 nt, Human
uuccccuccuaccccu

SEQ ID NO: 3697734 - RNA, 19 nt, Human
uuccccuccuaccccuccc

SEQ ID NO: 3697735 - RNA, 21 nt, Human
uuccccuccuaccccucccag

SEQ ID NO: 3697736 - RNA, 22 nt, Human
uuccccuccuaccccucccagc

SEQ ID NO: 3697737 - RNA, 18 nt, Human
uuccccucugcugcuguc

SEQ ID NO: 3697738 - RNA, 16 nt, Human
uuccccucuugucucc

SEQ ID NO: 3697739 - RNA, 16 nt, Human
uuccccuggggaccca

SEQ ID NO: 3697740 - RNA, 15 nt, Human
uuccccuguggggau

SEQ ID NO: 3697741 - RNA, 12 nt, Human
uuccccuguguc

SEQ ID NO: 3697742 - RNA, 13 nt, Human
uuccccuguguca

SEQ ID NO: 3697743 - RNA, 19 nt, Human
uuccccuguuuauucauau

SEQ ID NO: 3697744 - RNA, 16 nt, Human
uuccccuuauccuccc

SEQ ID NO: 3697745 - RNA, 14 nt, Human
uuccccuuccacug

SEQ ID NO: 3697746 - RNA, 15 nt, Human
uuccccuuccacuga

SEQ ID NO: 3697747 - RNA, 13 nt, Human
uuccccuuccuuc

SEQ ID NO: 3697748 - RNA, 14 nt, Human
uuccccuuccuucu

SEQ ID NO: 3697749 - RNA, 22 nt, Human
uuccccuugcccagggcucagc

SEQ ID NO: 3697750 - RNA, 22 nt, Human
uuccccuugcccuugcccugac

SEQ ID NO: 3697751 - RNA, 13 nt, Human
uuccccuuuugca

SEQ ID NO: 3697752 - RNA, 16 nt, Human
uuccccuuuugccaau

SEQ ID NO: 3697753 - RNA, 23 nt, Human
uucccgaaccccaaggagggaga

SEQ ID NO: 3697754 - RNA, 12 nt, Human
uucccgcucagc

SEQ ID NO: 3697755 - RNA, 16 nt, Human
uucccgcucagcccuc

SEQ ID NO: 3697756 - RNA, 21 nt, Human
uucccgcucagcccucccugc

SEQ ID NO: 3697757 - RNA, 17 nt, Human
uucccgggccagggcug

SEQ ID NO: 3697758 - RNA, 18 nt, Human
uucccgggccagggcugc

SEQ ID NO: 3697759 - RNA, 19 nt, Human
uucccggucccgaguacag

SEQ ID NO: 3697760 - RNA, 21 nt, Human
uucccgucccauauccugccu

SEQ ID NO: 3697761 - RNA, 13 nt, Human
uucccguggcccc

SEQ ID NO: 3697762 - RNA, 17 nt, Human
uucccguggccccagcc

SEQ ID NO: 3697763 - RNA, 19 nt, Human
uucccguggccccagccug

SEQ ID NO: 3697764 - RNA, 14 nt, Human
uucccguuucucca

SEQ ID NO: 3697765 - RNA, 14 nt, Human
uucccuaacacuua

SEQ ID NO: 3697766 - RNA, 19 nt, Human
uucccuaagccaagggccu

SEQ ID NO: 3697767 - RNA, 16 nt, Human
uucccuaaucuauggu

SEQ ID NO: 3697768 - RNA, 16 nt, Human
uucccuacccucuaga

SEQ ID NO: 3697769 - RNA, 14 nt, Human
uucccuaccucagg

SEQ ID NO: 3697770 - RNA, 17 nt, Human
uucccuacuuccuguga

SEQ ID NO: 3697771 - RNA, 18 nt, Human
uucccuagggcugggugu

SEQ ID NO: 3697772 - RNA, 19 nt, Human
uucccuaggggacacuucc

SEQ ID NO: 3697773 - RNA, 12 nt, Human
uucccuaucacu

SEQ ID NO: 3697774 - RNA, 16 nt, Human
uucccuaucuuugcca

SEQ ID NO: 3697775 - RNA, 20 nt, Human
uucccucaccuuucccaucu

SEQ ID NO: 3697776 - RNA, 19 nt, Human
uucccucccagaggagcca

SEQ ID NO: 3697777 - RNA, 11 nt, Human
uucccucccuu

SEQ ID NO: 3697778 - RNA, 14 nt, Human
uucccucucaucuc

SEQ ID NO: 3697779 - RNA, 21 nt, Human
uucccucucucauacccuccc

SEQ ID NO: 3697780 - RNA, 21 nt, Human
uucccucugccugucccucuc

SEQ ID NO: 3697781 - RNA, 14 nt, Human
uucccucuuuggcu

SEQ ID NO: 3697782 - RNA, 15 nt, Human
uucccugaauguauu

SEQ ID NO: 3697783 - RNA, 17 nt, Human
uucccugacacugcggg

SEQ ID NO: 3697784 - RNA, 13 nt, Human
uucccugacucau

SEQ ID NO: 3697785 - RNA, 18 nt, Human
uucccugacuccucuaag

SEQ ID NO: 3697786 - RNA, 12 nt, Human
uucccugaggug

SEQ ID NO: 3697787 - RNA, 16 nt, Human
uucccugagucaccag

SEQ ID NO: 3697788 - RNA, 19 nt, Human
uucccugauugaccugcuc

SEQ ID NO: 3697789 - RNA, 19 nt, Human
uucccugcauuucugaguu

SEQ ID NO: 3697790 - RNA, 14 nt, Human
uucccugccucuca

SEQ ID NO: 3697791 - RNA, 12 nt, Human
uucccugccugg

SEQ ID NO: 3697792 - RNA, 17 nt, Human
uucccugcuuaaugaaa

SEQ ID NO: 3697793 - RNA, 14 nt, Human
uucccugcuuccag

SEQ ID NO: 3697794 - RNA, 16 nt, Human
uucccugcuuccagga

SEQ ID NO: 3697795 - RNA, 23 nt, Human
uucccuggaaaccuuccacccag

SEQ ID NO: 3697796 - RNA, 12 nt, Human
uucccuggacca

SEQ ID NO: 3697797 - RNA, 16 nt, Human
uucccuggccuuucau

SEQ ID NO: 3697798 - RNA, 15 nt, Human
uucccuggcggcccc

SEQ ID NO: 3697799 - RNA, 20 nt, Human
uucccuggcggccccaacuc

SEQ ID NO: 3697800 - RNA, 20 nt, Human
uucccugggaucuggugguc

SEQ ID NO: 3697801 - RNA, 17 nt, Human
uucccugggcugugcua

SEQ ID NO: 3697802 - RNA, 20 nt, Human
uucccugggcugugcuaccu

SEQ ID NO: 3697803 - RNA, 13 nt, Human
uucccuggguuag

SEQ ID NO: 3697804 - RNA, 15 nt, Human
uucccugugccuccu

SEQ ID NO: 3697805 - RNA, 18 nt, Human
uucccugugccuccuccc

SEQ ID NO: 3697806 - RNA, 12 nt, Human
uucccuguucuu

SEQ ID NO: 3697807 - RNA, 15 nt, Human
uucccuguucuuccu

SEQ ID NO: 3697808 - RNA, 19 nt, Human
uucccuucaguacccucuc

SEQ ID NO: 3697809 - RNA, 23 nt, Human
uucccuucaguacccucucagcu

SEQ ID NO: 3697810 - RNA, 14 nt, Human
uucccuucaucugg

SEQ ID NO: 3697811 - RNA, 16 nt, Human
uucccuucaucuggaa

SEQ ID NO: 3697812 - RNA, 18 nt, Human
uucccuucccuaaaguga

SEQ ID NO: 3697813 - RNA, 15 nt, Human
uucccuucccuucca

SEQ ID NO: 3697814 - RNA, 12 nt, Human
uucccuucucca

SEQ ID NO: 3697815 - RNA, 20 nt, Human
uucccuucuccaucucucug

SEQ ID NO: 3697816 - RNA, 20 nt, Human
uucccuucuccuuccaacug

SEQ ID NO: 3697817 - RNA, 13 nt, Human
uucccuucucuca

SEQ ID NO: 3697818 - RNA, 22 nt, Human
uucccuugaaacuuugggaaaa

SEQ ID NO: 3697819 - RNA, 15 nt, Human
uucccuugagcccuc

SEQ ID NO: 3697820 - RNA, 18 nt, Human
uucccuugcuuuucccuc

SEQ ID NO: 3697821 - RNA, 11 nt, Human
uucccuuggcc

SEQ ID NO: 3697822 - RNA, 14 nt, Human
uucccuuggccuca

SEQ ID NO: 3697823 - RNA, 20 nt, Human
uucccuuguagcuccucccc

SEQ ID NO: 3697824 - RNA, 21 nt, Human
uucccuuuagcacguuuaaag

SEQ ID NO: 3697825 - RNA, 18 nt, Human
uucccuuugcuccacccc

SEQ ID NO: 3697826 - RNA, 14 nt, Human
uucccuuugucuuu

SEQ ID NO: 3697827 - RNA, 22 nt, Human
uucccuuugugagucaauacau

SEQ ID NO: 3697828 - RNA, 21 nt, Human
uucccuuuuaaacacauuuug

SEQ ID NO: 3697829 - RNA, 15 nt, Human
uucccuuuuuuuaag

SEQ ID NO: 3697830 - RNA, 20 nt, Human
uuccgaaaaauccucuuccu

SEQ ID NO: 3697831 - RNA, 22 nt, Human
uuccgaagaagaugcuccagca

SEQ ID NO: 3697832 - RNA, 16 nt, Human
uuccgacccucuggga

SEQ ID NO: 3697833 - RNA, 15 nt, Human
uuccgcacuuuccac

SEQ ID NO: 3697834 - RNA, 14 nt, Human
uuccgccccuuccc

SEQ ID NO: 3697835 - RNA, 15 nt, Human
uuccgccccuucccu

SEQ ID NO: 3697836 - RNA, 13 nt, Human
uuccggccccucc

SEQ ID NO: 3697837 - RNA, 18 nt, Human
uuccggccccuccccucc

SEQ ID NO: 3697838 - RNA, 19 nt, Human
uuccgggcaaaugccaggg

SEQ ID NO: 3697839 - RNA, 19 nt, Human
uuccgguagggaggcagcc

SEQ ID NO: 3697840 - RNA, 16 nt, Human
uuccguagacuguuua

SEQ ID NO: 3697841 - RNA, 19 nt, Human
uuccguagguuauuuucag

SEQ ID NO: 3697842 - RNA, 13 nt, Human
uuccgucuccccc

SEQ ID NO: 3697843 - RNA, 15 nt, Human
uuccguguccacccc

SEQ ID NO: 3697844 - RNA, 14 nt, Human
uuccguuaaaauac

SEQ ID NO: 3697845 - RNA, 16 nt, Human
uuccguuaaaauacca

SEQ ID NO: 3697846 - RNA, 13 nt, Human
uuccguuuacauu

SEQ ID NO: 3697847 - RNA, 12 nt, Human
uuccuaaaacag

SEQ ID NO: 3697848 - RNA, 13 nt, Human
uuccuaaaauuau

SEQ ID NO: 3697849 - RNA, 20 nt, Human
uuccuaaauauauuuuaaga

SEQ ID NO: 3697850 - RNA, 13 nt, Human
uuccuaaaugcag

SEQ ID NO: 3697851 - RNA, 16 nt, Human
uuccuaagaagcuucu

SEQ ID NO: 3697852 - RNA, 18 nt, Human
uuccuaagaccugggguu

SEQ ID NO: 3697853 - RNA, 21 nt, Human
uuccuaagccacuugaaaugu

SEQ ID NO: 3697854 - RNA, 17 nt, Human
uuccuaaggcacccaca

SEQ ID NO: 3697855 - RNA, 17 nt, Human
uuccuaaguauaaaugg

SEQ ID NO: 3697856 - RNA, 13 nt, Human
uuccuaagugauu

SEQ ID NO: 3697857 - RNA, 14 nt, Human
uuccuaaguucuua

SEQ ID NO: 3697858 - RNA, 15 nt, Human
uuccuaauaaaguuc

SEQ ID NO: 3697859 - RNA, 23 nt, Human
uuccuaaucagaaauuuuuauca

SEQ ID NO: 3697860 - RNA, 17 nt, Human
uuccuaauccucuagga

SEQ ID NO: 3697861 - RNA, 16 nt, Human
uuccuaauuccacagc

SEQ ID NO: 3697862 - RNA, 17 nt, Human
uuccuaauuccacagcu

SEQ ID NO: 3697863 - RNA, 20 nt, Human
uuccuacaagagcagccugu

SEQ ID NO: 3697864 - RNA, 22 nt, Human
uuccuacaagagcagccugugg

SEQ ID NO: 3697865 - RNA, 23 nt, Human
uuccuacaagagcagccuguggc

SEQ ID NO: 3697866 - RNA, 14 nt, Human
uuccuacaauauau

SEQ ID NO: 3697867 - RNA, 15 nt, Human
uuccuacagcacuac

SEQ ID NO: 3697868 - RNA, 20 nt, Human
uuccuacagcacuacugggu

SEQ ID NO: 3697869 - RNA, 21 nt, Human
uuccuacagcacuacugggug

SEQ ID NO: 3697870 - RNA, 22 nt, Human
uuccuacagcacuacugggugu

SEQ ID NO: 3697871 - RNA, 19 nt, Human
uuccuaccaagucaaacuu

SEQ ID NO: 3697872 - RNA, 17 nt, Human
uuccuacccaaccacuc

SEQ ID NO: 3697873 - RNA, 21 nt, Human
uuccuacccacaccucugcca

SEQ ID NO: 3697874 - RNA, 16 nt, Human
uuccuacccugccucc

SEQ ID NO: 3697875 - RNA, 15 nt, Human
uuccuaccucccugc

SEQ ID NO: 3697876 - RNA, 22 nt, Human
uuccuacucuucucucugcucu

SEQ ID NO: 3697877 - RNA, 15 nt, Human
uuccuacuggucucu

SEQ ID NO: 3697878 - RNA, 22 nt, Human
uuccuagauggcagucacugaa

SEQ ID NO: 3697879 - RNA, 15 nt, Human
uuccuagccaccgcc

SEQ ID NO: 3697880 - RNA, 22 nt, Human
uuccuagccaccgccuccuaca

SEQ ID NO: 3697881 - RNA, 18 nt, Human
uuccuagcccucucacau

SEQ ID NO: 3697882 - RNA, 13 nt, Human
uuccuaguuggug

SEQ ID NO: 3697883 - RNA, 21 nt, Human
uuccuaguuggugagaaaccu

SEQ ID NO: 3697884 - RNA, 22 nt, Human
uuccuaguuggugagaaaccug

SEQ ID NO: 3697885 - RNA, 15 nt, Human
uuccuaguuuucucc

SEQ ID NO: 3697886 - RNA, 15 nt, Human
uuccuauaacacugu

SEQ ID NO: 3697887 - RNA, 20 nt, Human
uuccuauaacuugaugcaug

SEQ ID NO: 3697888 - RNA, 18 nt, Human
uuccuauaccauuuccgu

SEQ ID NO: 3697889 - RNA, 19 nt, Human
uuccuauauaguuuauuga

SEQ ID NO: 3697890 - RNA, 12 nt, Human
uuccuauaugca

SEQ ID NO: 3697891 - RNA, 17 nt, Human
uuccuaucaaaaagaua

SEQ ID NO: 3697892 - RNA, 18 nt, Human
uuccuaucaaaaagauau

SEQ ID NO: 3697893 - RNA, 17 nt, Human
uuccuauugucauuaaa

SEQ ID NO: 3697894 - RNA, 18 nt, Human
uuccuauugucauuaaag

SEQ ID NO: 3697895 - RNA, 12 nt, Human
uuccuauuguga

SEQ ID NO: 3697896 - RNA, 23 nt, Human
uuccuauuucagaaguuuaaaua

SEQ ID NO: 3697897 - RNA, 18 nt, Human
uuccuauuugccaugggc

SEQ ID NO: 3697898 - RNA, 22 nt, Human
uuccuauuugccaugggcuuca

SEQ ID NO: 3697899 - RNA, 21 nt, Human
uuccuauuuguuuucauggug

SEQ ID NO: 3697900 - RNA, 17 nt, Human
uuccuauuuucagccca

SEQ ID NO: 3697901 - RNA, 16 nt, Human
uuccuauuuuuaaaua

SEQ ID NO: 3697902 - RNA, 17 nt, Human
uuccuauuuuuaaauaa

SEQ ID NO: 3697903 - RNA, 21 nt, Human
uuccucaacaguguuuucaga

SEQ ID NO: 3697904 - RNA, 22 nt, Human
uuccucaacaguguuuucagaa

SEQ ID NO: 3697905 - RNA, 14 nt, Human
uuccucacaguccc

SEQ ID NO: 3697906 - RNA, 15 nt, Human
uuccucagccagccu

SEQ ID NO: 3697907 - RNA, 19 nt, Human
uuccucauccaccccaucc

SEQ ID NO: 3697908 - RNA, 14 nt, Human
uuccucauccucag

SEQ ID NO: 3697909 - RNA, 15 nt, Human
uuccucaugaaugua

SEQ ID NO: 3697910 - RNA, 21 nt, Human
uuccucaugaauguaaauuug

SEQ ID NO: 3697911 - RNA, 17 nt, Human
uuccucauuaaauuacc

SEQ ID NO: 3697912 - RNA, 16 nt, Human
uuccucauuccugaaa

SEQ ID NO: 3697913 - RNA, 16 nt, Human
uuccuccagcugcacc

SEQ ID NO: 3697914 - RNA, 13 nt, Human
uuccuccauccuc

SEQ ID NO: 3697915 - RNA, 18 nt, Human
uuccuccauccuccuccu

SEQ ID NO: 3697916 - RNA, 12 nt, Human
uuccuccccagc

SEQ ID NO: 3697917 - RNA, 19 nt, Human
uuccucccucccucuuucc

SEQ ID NO: 3697918 - RNA, 22 nt, Human
uuccucccucccucuuucccuc

SEQ ID NO: 3697919 - RNA, 14 nt, Human
uuccuccuccccac

SEQ ID NO: 3697920 - RNA, 12 nt, Human
uuccuccugaca

SEQ ID NO: 3697921 - RNA, 14 nt, Human
uuccuccuggaaau

SEQ ID NO: 3697922 - RNA, 17 nt, Human
uuccuccuguguacagg

SEQ ID NO: 3697923 - RNA, 15 nt, Human
uuccuccuuccaugg

SEQ ID NO: 3697924 - RNA, 15 nt, Human
uuccucgccucuccc

SEQ ID NO: 3697925 - RNA, 13 nt, Human
uuccucgcuucuu

SEQ ID NO: 3697926 - RNA, 15 nt, Human
uuccucuagaagcca

SEQ ID NO: 3697927 - RNA, 19 nt, Human
uuccucuagugcccuccac

SEQ ID NO: 3697928 - RNA, 17 nt, Human
uuccucuauacaucucu

SEQ ID NO: 3697929 - RNA, 20 nt, Human
uuccucuauacaucucuccc

SEQ ID NO: 3697930 - RNA, 22 nt, Human
uuccucuauacaucucucccca

SEQ ID NO: 3697931 - RNA, 17 nt, Human
uuccucuauugauguac

SEQ ID NO: 3697932 - RNA, 21 nt, Human
uuccucuauugauguacaguc

SEQ ID NO: 3697933 - RNA, 13 nt, Human
uuccucuccacug

SEQ ID NO: 3697934 - RNA, 14 nt, Human
uuccucuccacugc

SEQ ID NO: 3697935 - RNA, 19 nt, Human
uuccucuccacugccuucg

SEQ ID NO: 3697936 - RNA, 13 nt, Human
uuccucugagccu

SEQ ID NO: 3697937 - RNA, 11 nt, Human
uuccucugccc

SEQ ID NO: 3697938 - RNA, 12 nt, Human
uuccucugccug

SEQ ID NO: 3697939 - RNA, 13 nt, Human
uuccucugccugc

SEQ ID NO: 3697940 - RNA, 14 nt, Human
uuccucugccugcc

SEQ ID NO: 3697941 - RNA, 14 nt, Human
uuccucugcuaaau

SEQ ID NO: 3697942 - RNA, 17 nt, Human
uuccucugcuaaauuga

SEQ ID NO: 3697943 - RNA, 22 nt, Human
uuccucugcuaaauugauguug

SEQ ID NO: 3697944 - RNA, 11 nt, Human
uuccucugcuc

SEQ ID NO: 3697945 - RNA, 13 nt, Human
uuccucugcuccc

SEQ ID NO: 3697946 - RNA, 14 nt, Human
uuccucugcucccc

SEQ ID NO: 3697947 - RNA, 15 nt, Human
uuccucugcuuugaa

SEQ ID NO: 3697948 - RNA, 21 nt, Human
uuccucuguauugugcugauu

SEQ ID NO: 3697949 - RNA, 19 nt, Human
uuccucuugacccugcacc

SEQ ID NO: 3697950 - RNA, 23 nt, Human
uuccucuugacccugcacccucc

SEQ ID NO: 3697951 - RNA, 15 nt, Human
uuccucuugucugau

SEQ ID NO: 3697952 - RNA, 11 nt, Human
uuccucuuucc

SEQ ID NO: 3697953 - RNA, 17 nt, Human
uuccucuuuccaucuac

SEQ ID NO: 3697954 - RNA, 13 nt, Human
uuccucuuugcuu

SEQ ID NO: 3697955 - RNA, 17 nt, Human
uuccugaaacuauauuu

SEQ ID NO: 3697956 - RNA, 20 nt, Human
uuccugaaacuauauuuugu

SEQ ID NO: 3697957 - RNA, 12 nt, Human
uuccugaaagaa

SEQ ID NO: 3697958 - RNA, 18 nt, Human
uuccugaaagaaacaguu

SEQ ID NO: 3697959 - RNA, 15 nt, Human
uuccugaacuauaac

SEQ ID NO: 3697960 - RNA, 11 nt, Human
uuccugaagcu

SEQ ID NO: 3697961 - RNA, 18 nt, Human
uuccugaauccaaacuaa

SEQ ID NO: 3697962 - RNA, 14 nt, Human
uuccugaaugaaau

SEQ ID NO: 3697963 - RNA, 16 nt, Human
uuccugaaugaaauau

SEQ ID NO: 3697964 - RNA, 20 nt, Human
uuccugacaucacagcagcc

SEQ ID NO: 3697965 - RNA, 13 nt, Human
uuccugacccagg

SEQ ID NO: 3697966 - RNA, 16 nt, Human
uuccugacccaggccg

SEQ ID NO: 3697967 - RNA, 21 nt, Human
uuccugagauuuccuccuggc

SEQ ID NO: 3697968 - RNA, 20 nt, Human
uuccugagcuuggccagaag

SEQ ID NO: 3697969 - RNA, 14 nt, Human
uuccugagcuuuau

SEQ ID NO: 3697970 - RNA, 20 nt, Human
uuccugaggcugggcucccu

SEQ ID NO: 3697971 - RNA, 23 nt, Human
uuccugagggaucuauacuugcu

SEQ ID NO: 3697972 - RNA, 22 nt, Human
uuccugagucccaucccugcgu

SEQ ID NO: 3697973 - RNA, 20 nt, Human
uuccugaguuaggcuuucuc

SEQ ID NO: 3697974 - RNA, 20 nt, Human
uuccugauagcauaugacaa

SEQ ID NO: 3697975 - RNA, 22 nt, Human
uuccugauagcauaugacaaau

SEQ ID NO: 3697976 - RNA, 20 nt, Human
uuccugauaugauuuaaaac

SEQ ID NO: 3697977 - RNA, 13 nt, Human
uuccugaugaccc

SEQ ID NO: 3697978 - RNA, 19 nt, Human
uuccugaugcuucuucaga

SEQ ID NO: 3697979 - RNA, 21 nt, Human
uuccugauggcaggauggccu

SEQ ID NO: 3697980 - RNA, 15 nt, Human
uuccugcagccugga

SEQ ID NO: 3697981 - RNA, 21 nt, Human
uuccugcaggcaggaacaaac

SEQ ID NO: 3697982 - RNA, 18 nt, Human
uuccugcauucacccaga

SEQ ID NO: 3697983 - RNA, 15 nt, Human
uuccugcauuuguga

SEQ ID NO: 3697984 - RNA, 16 nt, Human
uuccugcauuugugaa

SEQ ID NO: 3697985 - RNA, 12 nt, Human
uuccugccacca

SEQ ID NO: 3697986 - RNA, 18 nt, Human
uuccugccaccagucacu

SEQ ID NO: 3697987 - RNA, 20 nt, Human
uuccugccagccccugccau

SEQ ID NO: 3697988 - RNA, 14 nt, Human
uuccugccccucuu

SEQ ID NO: 3697989 - RNA, 15 nt, Human
uuccugccccucuuu

SEQ ID NO: 3697990 - RNA, 18 nt, Human
uuccugccgcaacaguuu

SEQ ID NO: 3697991 - RNA, 16 nt, Human
uuccugccuggucucc

SEQ ID NO: 3697992 - RNA, 17 nt, Human
uuccugccuggucuccu

SEQ ID NO: 3697993 - RNA, 16 nt, Human
uuccugccugucuccu

SEQ ID NO: 3697994 - RNA, 23 nt, Human
uuccugccuucuucuuuuugcug

SEQ ID NO: 3697995 - RNA, 17 nt, Human
uuccugcggagugaaga

SEQ ID NO: 3697996 - RNA, 19 nt, Human
uuccugcggagugaagagg

SEQ ID NO: 3697997 - RNA, 21 nt, Human
uuccugcgggcuuuuccccgg

SEQ ID NO: 3697998 - RNA, 16 nt, Human
uuccugcuagaaaugg

SEQ ID NO: 3697999 - RNA, 14 nt, Human
uuccugcugagccu

SEQ ID NO: 3698000 - RNA, 15 nt, Human
uuccugcugcugucu

SEQ ID NO: 3698001 - RNA, 18 nt, Human
uuccuggaauugccagcu

SEQ ID NO: 3698002 - RNA, 22 nt, Human
uuccuggagcagaagcagcaac

SEQ ID NO: 3698003 - RNA, 15 nt, Human
uuccuggagcccaga

SEQ ID NO: 3698004 - RNA, 16 nt, Human
uuccuggagcccagag

SEQ ID NO: 3698005 - RNA, 13 nt, Human
uuccuggaugucu

SEQ ID NO: 3698006 - RNA, 15 nt, Human
uuccuggaugucuga

SEQ ID NO: 3698007 - RNA, 18 nt, Human
uuccuggcaauagugugu

SEQ ID NO: 3698008 - RNA, 14 nt, Human
uuccuggcacugcu

SEQ ID NO: 3698009 - RNA, 22 nt, Human
uuccuggcacugcuuccaguga

SEQ ID NO: 3698010 - RNA, 14 nt, Human
uuccuggccugaga

SEQ ID NO: 3698011 - RNA, 14 nt, Human
uuccuggcuucuua

SEQ ID NO: 3698012 - RNA, 15 nt, Human
uuccugggagcuuuu

SEQ ID NO: 3698013 - RNA, 16 nt, Human
uuccugggagcuuuug

SEQ ID NO: 3698014 - RNA, 20 nt, Human
uuccuggggugcccuccacu

SEQ ID NO: 3698015 - RNA, 22 nt, Human
uuccuggggugcccuccacugc

SEQ ID NO: 3698016 - RNA, 22 nt, Human
uuccugguagaccacugccaua

SEQ ID NO: 3698017 - RNA, 19 nt, Human
uuccuggugccaauuucaa

SEQ ID NO: 3698018 - RNA, 11 nt, Human
uuccuggugcu

SEQ ID NO: 3698019 - RNA, 21 nt, Human
uuccuguaaaaaaaaaaaagu

SEQ ID NO: 3698020 - RNA, 19 nt, Human
uuccuguaacacaagccac

SEQ ID NO: 3698021 - RNA, 22 nt, Human
uuccuguaacacaagccacaga

SEQ ID NO: 3698022 - RNA, 16 nt, Human
uuccuguacugugucu

SEQ ID NO: 3698023 - RNA, 17 nt, Human
uuccuguagcaucuucu

SEQ ID NO: 3698024 - RNA, 18 nt, Human
uuccuguagcaucuucug

SEQ ID NO: 3698025 - RNA, 23 nt, Human
uuccugucccaccauacgagcac

SEQ ID NO: 3698026 - RNA, 14 nt, Human
uuccugucccaccu

SEQ ID NO: 3698027 - RNA, 15 nt, Human
uuccugucccaccuc

SEQ ID NO: 3698028 - RNA, 18 nt, Human
uuccuguccccaucuguc

SEQ ID NO: 3698029 - RNA, 23 nt, Human
uuccugucccugcgccuuuccuu

SEQ ID NO: 3698030 - RNA, 20 nt, Human
uuccuguccucccagcuccu

SEQ ID NO: 3698031 - RNA, 21 nt, Human
uauauauguguaugcacagua

SEQ ID NO: 3698032 - RNA, 23 nt, Human
uauauauguguaugcacaguaaa

SEQ ID NO: 3698033 - RNA, 22 nt, Human
uauauauguguguuuaaauaaa

SEQ ID NO: 3698034 - RNA, 13 nt, Human
uauauauuauacu

SEQ ID NO: 3698035 - RNA, 14 nt, Human
uauauauuauacuu

SEQ ID NO: 3698036 - RNA, 18 nt, Human
uauauauuauacuuguaa

SEQ ID NO: 3698037 - RNA, 14 nt, Human
uauauauuaucuuu

SEQ ID NO: 3698038 - RNA, 18 nt, Human
uauauauuaucuuuucau

SEQ ID NO: 3698039 - RNA, 14 nt, Human
uauauauucuauua

SEQ ID NO: 3698040 - RNA, 21 nt, Human
uauauauucuggcugauaaaa

SEQ ID NO: 3698041 - RNA, 17 nt, Human
uauauauucuuauaaaa

SEQ ID NO: 3698042 - RNA, 11 nt, Human
uauauauuucc

SEQ ID NO: 3698043 - RNA, 13 nt, Human
uauauauuucuau

SEQ ID NO: 3698044 - RNA, 23 nt, Human
uauauauuuugugugaaauugca

SEQ ID NO: 3698045 - RNA, 20 nt, Human
uauauauuuuugguugucaa

SEQ ID NO: 3698046 - RNA, 21 nt, Human
uauauauuuuuuucugaaauu

SEQ ID NO: 3698047 - RNA, 15 nt, Human
uauaucaaaguauuu

SEQ ID NO: 3698048 - RNA, 22 nt, Human
uauaucacccagacauaaagga

SEQ ID NO: 3698049 - RNA, 13 nt, Human
uauaucagaaaag

SEQ ID NO: 3698050 - RNA, 23 nt, Human
uauaucagccugagucuccugug

SEQ ID NO: 3698051 - RNA, 13 nt, Human
uauaucaguuuga

SEQ ID NO: 3698052 - RNA, 15 nt, Human
uauaucauauguaua

SEQ ID NO: 3698053 - RNA, 22 nt, Human
uauaucauuggaacaacugaua

SEQ ID NO: 3698054 - RNA, 14 nt, Human
uauauccauguacu

SEQ ID NO: 3698055 - RNA, 17 nt, Human
uauauccauguacugua

SEQ ID NO: 3698056 - RNA, 18 nt, Human
uauauccauguacuguag

SEQ ID NO: 3698057 - RNA, 19 nt, Human
uauaucccugauaaauauu

SEQ ID NO: 3698058 - RNA, 15 nt, Human
uauauccugugacug

SEQ ID NO: 3698059 - RNA, 21 nt, Human
uauauccuuuucuucuaugua

SEQ ID NO: 3698060 - RNA, 16 nt, Human
uauaucguuaucacug

SEQ ID NO: 3698061 - RNA, 20 nt, Human
uauaucguuaucacugugca

SEQ ID NO: 3698062 - RNA, 15 nt, Human
uauaucuaaaucugu

SEQ ID NO: 3698063 - RNA, 18 nt, Human
uauaucuauaaacacugu

SEQ ID NO: 3698064 - RNA, 13 nt, Human
uauaucuauauau

SEQ ID NO: 3698065 - RNA, 22 nt, Human
uauaucuauauauaauucugua

SEQ ID NO: 3698066 - RNA, 16 nt, Human
uauaucuauauguacu

SEQ ID NO: 3698067 - RNA, 21 nt, Human
uauaucuauauuuuacauaaa

SEQ ID NO: 3698068 - RNA, 17 nt, Human
uauaucuaucuauuuga

SEQ ID NO: 3698069 - RNA, 15 nt, Human
uauaucuaucuuaua

SEQ ID NO: 3698070 - RNA, 17 nt, Human
uauaucucaaauuguaa

SEQ ID NO: 3698071 - RNA, 19 nt, Human
uauaucugaggaauucugu

SEQ ID NO: 3698072 - RNA, 20 nt, Human
uauaucugaggaauucugua

SEQ ID NO: 3698073 - RNA, 21 nt, Human
uauaucugaggaauucuguau

SEQ ID NO: 3698074 - RNA, 22 nt, Human
uauaucugaggaauucuguaua

SEQ ID NO: 3698075 - RNA, 13 nt, Human
uauaucugcuguc

SEQ ID NO: 3698076 - RNA, 14 nt, Human
uauaucuggaauga

SEQ ID NO: 3698077 - RNA, 14 nt, Human
uauaucuguauaua

SEQ ID NO: 3698078 - RNA, 20 nt, Human
uauaucuguauguauuagug

SEQ ID NO: 3698079 - RNA, 14 nt, Human
uauaucuuguagcu

SEQ ID NO: 3698080 - RNA, 14 nt, Human
uauaucuuuuucca

SEQ ID NO: 3698081 - RNA, 14 nt, Human
uauaugagaagaau

SEQ ID NO: 3698082 - RNA, 15 nt, Human
uauaugagaagaaua

SEQ ID NO: 3698083 - RNA, 13 nt, Human
uauaugcuucugu

SEQ ID NO: 3698084 - RNA, 18 nt, Human
uauauggacaaaacaaga

SEQ ID NO: 3698085 - RNA, 18 nt, Human
uauauggaugauucagaa

SEQ ID NO: 3698086 - RNA, 22 nt, Human
uauauggaugauucagaaauug

SEQ ID NO: 3698087 - RNA, 16 nt, Human
uauauggcaagaaagc

SEQ ID NO: 3698088 - RNA, 17 nt, Human
uauauggccucaagauc

SEQ ID NO: 3698089 - RNA, 22 nt, Human
uauaugguauauauacauauau

SEQ ID NO: 3698090 - RNA, 17 nt, Human
uauauggucuaauguuu

SEQ ID NO: 3698091 - RNA, 22 nt, Human
uauauggugguaauaagggaaa

SEQ ID NO: 3698092 - RNA, 14 nt, Human
uauauguacuguuu

SEQ ID NO: 3698093 - RNA, 13 nt, Human
uauauguacuugu

SEQ ID NO: 3698094 - RNA, 11 nt, Human
uauauguaugu

SEQ ID NO: 3698095 - RNA, 12 nt, Human
uauauguaugug

SEQ ID NO: 3698096 - RNA, 13 nt, Human
uauauguaugugu

SEQ ID NO: 3698097 - RNA, 14 nt, Human
uauauguauguguu

SEQ ID NO: 3698098 - RNA, 15 nt, Human
uauauguauguguuu

SEQ ID NO: 3698099 - RNA, 18 nt, Human
uauauguauguguuuaga

SEQ ID NO: 3698100 - RNA, 18 nt, Human
uauauguguauauauaca

SEQ ID NO: 3698101 - RNA, 22 nt, Human
uauauguguguguauguuugca

SEQ ID NO: 3698102 - RNA, 19 nt, Human
uauauguguguuuaaauaa

SEQ ID NO: 3698103 - RNA, 18 nt, Human
uauauguguuuuucacau

SEQ ID NO: 3698104 - RNA, 15 nt, Human
uauauuaaaaauaua

SEQ ID NO: 3698105 - RNA, 19 nt, Human
uauauuaaaaauauaaaac

SEQ ID NO: 3698106 - RNA, 20 nt, Human
uauauuaaaaauauaaaacu

SEQ ID NO: 3698107 - RNA, 23 nt, Human
uauauuaaaaauauaaaacugcg

SEQ ID NO: 3698108 - RNA, 17 nt, Human
uauauuaaaaaugguaa

SEQ ID NO: 3698109 - RNA, 15 nt, Human
uauauuaaaauaagc

SEQ ID NO: 3698110 - RNA, 22 nt, Human
uauauuaaacaaaguuucagag

SEQ ID NO: 3698111 - RNA, 23 nt, Human
uauauuaauaguaauuuguaaag

SEQ ID NO: 3698112 - RNA, 15 nt, Human
uauauuaauguacuu

SEQ ID NO: 3698113 - RNA, 12 nt, Human
uauauuacaaug

SEQ ID NO: 3698114 - RNA, 13 nt, Human
uauauuacaauga

SEQ ID NO: 3698115 - RNA, 22 nt, Human
uauauuacacuacacacugugu

SEQ ID NO: 3698116 - RNA, 22 nt, Human
uauauuacuagcauaugaguuu

SEQ ID NO: 3698117 - RNA, 16 nt, Human
uauauuacugacauuu

SEQ ID NO: 3698118 - RNA, 16 nt, Human
uauauuaguauguaug

SEQ ID NO: 3698119 - RNA, 20 nt, Human
uauauuauaaauauauauaa

SEQ ID NO: 3698120 - RNA, 21 nt, Human
uauauuauaaauauauauaaa

SEQ ID NO: 3698121 - RNA, 22 nt, Human
uauauuauaaauauauauaaag

SEQ ID NO: 3698122 - RNA, 20 nt, Human
uauauuauacuuguaauuau

SEQ ID NO: 3698123 - RNA, 22 nt, Human
uauauuaucaugcaaaugcugu

SEQ ID NO: 3698124 - RNA, 20 nt, Human
uauauuauuacuuguaaaua

SEQ ID NO: 3698125 - RNA, 23 nt, Human
uauauuauuucuaggaagaauuu

SEQ ID NO: 3698126 - RNA, 14 nt, Human
uauauuauuugcag

SEQ ID NO: 3698127 - RNA, 21 nt, Human
uauauuccauauauuagcauu

SEQ ID NO: 3698128 - RNA, 23 nt, Human
uauauuccuuuucccaggaaaga

SEQ ID NO: 3698129 - RNA, 22 nt, Human
uauauucucuuugguguacaaa

SEQ ID NO: 3698130 - RNA, 16 nt, Human
uauauucuuucaaagg

SEQ ID NO: 3698131 - RNA, 12 nt, Human
uauauugaacuu

SEQ ID NO: 3698132 - RNA, 22 nt, Human
uauauugaacuuuuguacugaa

SEQ ID NO: 3698133 - RNA, 20 nt, Human
uauauugaagacaauuugau

SEQ ID NO: 3698134 - RNA, 14 nt, Human
uauauugcaaugaa

SEQ ID NO: 3698135 - RNA, 19 nt, Human
uauauuguaagaaauacug

SEQ ID NO: 3698136 - RNA, 22 nt, Human
uauauuguaagaaauacuguac

SEQ ID NO: 3698137 - RNA, 19 nt, Human
uauauuguguuuguguauu

SEQ ID NO: 3698138 - RNA, 14 nt, Human
uauauuuaaaaaca

SEQ ID NO: 3698139 - RNA, 15 nt, Human
uauauuuaaaaauaa

SEQ ID NO: 3698140 - RNA, 17 nt, Human
uauauuuaaaaauaagu

SEQ ID NO: 3698141 - RNA, 19 nt, Human
uauauuuaacucucuuuau

SEQ ID NO: 3698142 - RNA, 15 nt, Human
uauauuuacaaaugg

SEQ ID NO: 3698143 - RNA, 16 nt, Human
uauauuuaguaucuuu

SEQ ID NO: 3698144 - RNA, 16 nt, Human
uauauuuaguuauagu

SEQ ID NO: 3698145 - RNA, 18 nt, Human
uauauuuaguuauaguuu

SEQ ID NO: 3698146 - RNA, 12 nt, Human
uauauuuauaac

SEQ ID NO: 3698147 - RNA, 16 nt, Human
uauauuuauaacucau

SEQ ID NO: 3698148 - RNA, 18 nt, Human
uauauuuauauaauuaug

SEQ ID NO: 3698149 - RNA, 19 nt, Human
uauauuucagauguaaugu

SEQ ID NO: 3698150 - RNA, 13 nt, Human
uauauuucccuga

SEQ ID NO: 3698151 - RNA, 21 nt, Human
uauauuucccugaaggaacca

SEQ ID NO: 3698152 - RNA, 21 nt, Human
uauauuuccuauaccauuucc

SEQ ID NO: 3698153 - RNA, 13 nt, Human
uauauuuccuuua

SEQ ID NO: 3698154 - RNA, 14 nt, Human
uauauuuccuuuau

SEQ ID NO: 3698155 - RNA, 20 nt, Human
uauauuuccuuuaugugaau

SEQ ID NO: 3698156 - RNA, 13 nt, Human
uauauuucuaaau

SEQ ID NO: 3698157 - RNA, 20 nt, Human
uauauuugaaauauugacuu

SEQ ID NO: 3698158 - RNA, 13 nt, Human
uauauuugauuua

SEQ ID NO: 3698159 - RNA, 20 nt, Human
uauauuugauuuauuaacuu

SEQ ID NO: 3698160 - RNA, 22 nt, Human
uauauuugauuuauuaacuuaa

SEQ ID NO: 3698161 - RNA, 14 nt, Human
uauauuuguacaaa

SEQ ID NO: 3698162 - RNA, 15 nt, Human
uauauuuguacaaaa

SEQ ID NO: 3698163 - RNA, 17 nt, Human
uauauuuguaggagaaa

SEQ ID NO: 3698164 - RNA, 22 nt, Human
uauauuugugauagcacuuucu

SEQ ID NO: 3698165 - RNA, 22 nt, Human
uauauuuuaaccugcauaaaaa

SEQ ID NO: 3698166 - RNA, 13 nt, Human
uauauuuuauaua

SEQ ID NO: 3698167 - RNA, 22 nt, Human
uauauuuuauuuuuagaauuuu

SEQ ID NO: 3698168 - RNA, 24 nt, Human
uauauuuucaugacuuuuccaugu

SEQ ID NO: 3698169 - RNA, 18 nt, Human
uauauuuucguaugaaaa

SEQ ID NO: 3698170 - RNA, 14 nt, Human
uauauuuucuguuu

SEQ ID NO: 3698171 - RNA, 13 nt, Human
uauauuuugggaa

SEQ ID NO: 3698172 - RNA, 19 nt, Human
uauauuuugugugaaauug

SEQ ID NO: 3698173 - RNA, 15 nt, Human
uauauuuuuaagaua

SEQ ID NO: 3698174 - RNA, 17 nt, Human
uauauuuuuaagauaau

SEQ ID NO: 3698175 - RNA, 21 nt, Human
uauauuuuuauaauaaacaua

SEQ ID NO: 3698176 - RNA, 15 nt, Human
uauauuuuucuuaaa

SEQ ID NO: 3698177 - RNA, 18 nt, Human
uauauuuuucuuaaaaag

SEQ ID NO: 3698178 - RNA, 12 nt, Human
uauauuuuuguc

SEQ ID NO: 3698179 - RNA, 17 nt, Human
uauauuuuuguuuguuu

SEQ ID NO: 3698180 - RNA, 18 nt, Human
uuguuggccuccggccuc

SEQ ID NO: 3698181 - RNA, 21 nt, Human
uuguuggcguaggcuacagag

SEQ ID NO: 3698182 - RNA, 22 nt, Human
uuguuggcguaggcuacagaga

SEQ ID NO: 3698183 - RNA, 19 nt, Human
uuguugggauuccugaccc

SEQ ID NO: 3698184 - RNA, 22 nt, Human
uuguugggauuccugacccagg

SEQ ID NO: 3698185 - RNA, 16 nt, Human
uuguuguaaaaagaaa

SEQ ID NO: 3698186 - RNA, 15 nt, Human
uuguuguaaccugcu

SEQ ID NO: 3698187 - RNA, 17 nt, Human
uuguuguguacagacuu

SEQ ID NO: 3698188 - RNA, 15 nt, Human
uuguuguucuguuaa

SEQ ID NO: 3698189 - RNA, 15 nt, Human
uuguuguuucuugcc

SEQ ID NO: 3698190 - RNA, 15 nt, Human
uuguuguuuguaugu

SEQ ID NO: 3698191 - RNA, 17 nt, Human
uuguuguuuguuuaguc

SEQ ID NO: 3698192 - RNA, 9 nt, Human
uuguuuaaa

SEQ ID NO: 3698193 - RNA, 21 nt, Human
uuguuuaaaaaccgaauaaau

SEQ ID NO: 3698194 - RNA, 15 nt, Human
uuguuuaaaauguaa

SEQ ID NO: 3698195 - RNA, 17 nt, Human
uuguuuaaagcaacugu

SEQ ID NO: 3698196 - RNA, 12 nt, Human
uuguuuaauggu

SEQ ID NO: 3698197 - RNA, 17 nt, Human
uuguuuaaugugaacuu

SEQ ID NO: 3698198 - RNA, 20 nt, Human
uuguuuaaugugaacuugua

SEQ ID NO: 3698199 - RNA, 23 nt, Human
uuguuuaaugugaacuuguagcu

SEQ ID NO: 3698200 - RNA, 23 nt, Human
uuguuuacaugcuuauuccauga

SEQ ID NO: 3698201 - RNA, 18 nt, Human
uuguuuacuuaaagauuu

SEQ ID NO: 3698202 - RNA, 23 nt, Human
uuguuuagucuuuauacugcaaa

SEQ ID NO: 3698203 - RNA, 21 nt, Human
uuguuuaucagauacaucacu

SEQ ID NO: 3698204 - RNA, 22 nt, Human
uuguuuaucagauacaucacug

SEQ ID NO: 3698205 - RNA, 18 nt, Human
uuguuuauuaaauaguua

SEQ ID NO: 3698206 - RNA, 17 nt, Human
uuguuuauuuuuauaua

SEQ ID NO: 3698207 - RNA, 14 nt, Human
uuguuucaagaacc

SEQ ID NO: 3698208 - RNA, 16 nt, Human
uuguuucaauugcauc

SEQ ID NO: 3698209 - RNA, 16 nt, Human
uuguuuccucuuccaa

SEQ ID NO: 3698210 - RNA, 19 nt, Human
uuguuuccucuuccaaagu

SEQ ID NO: 3698211 - RNA, 17 nt, Human
uuguuuccuuuuuuccc

SEQ ID NO: 3698212 - RNA, 15 nt, Human
uuguuucgcucuuug

SEQ ID NO: 3698213 - RNA, 14 nt, Human
uuguuucuaccucc

SEQ ID NO: 3698214 - RNA, 16 nt, Human
uuguuucuaccuccca

SEQ ID NO: 3698215 - RNA, 14 nt, Human
uuguuucuacuuug

SEQ ID NO: 3698216 - RNA, 18 nt, Human
uuguuucugagaaaagaa

SEQ ID NO: 3698217 - RNA, 12 nt, Human
uuguuucuguac

SEQ ID NO: 3698218 - RNA, 15 nt, Human
uuguuucuguuccaa

SEQ ID NO: 3698219 - RNA, 23 nt, Human
uuguuucuuaaauaagaaacuuu

SEQ ID NO: 3698220 - RNA, 17 nt, Human
uuguuucuuaauuugga

SEQ ID NO: 3698221 - RNA, 15 nt, Human
uuguuucuuccaaag

SEQ ID NO: 3698222 - RNA, 17 nt, Human
uuguuucuuguuuauug

SEQ ID NO: 3698223 - RNA, 16 nt, Human
uuguuucuuucucuga

SEQ ID NO: 3698224 - RNA, 20 nt, Human
uuguuucuuugaauuuucau

SEQ ID NO: 3698225 - RNA, 21 nt, Human
uuguuugaaacaaagaagguu

SEQ ID NO: 3698226 - RNA, 21 nt, Human
uuguuugagaaauuaaguauc

SEQ ID NO: 3698227 - RNA, 23 nt, Human
uuguuugaugcauuaaaagaaaa

SEQ ID NO: 3698228 - RNA, 15 nt, Human
uuguuugcuuauugu

SEQ ID NO: 3698229 - RNA, 12 nt, Human
uuguuuggagac

SEQ ID NO: 3698230 - RNA, 18 nt, Human
uuguuuggcaaggaaagg

SEQ ID NO: 3698231 - RNA, 14 nt, Human
uuguuuggcuuccu

SEQ ID NO: 3698232 - RNA, 21 nt, Human
uuguuuggguauccugcccag

SEQ ID NO: 3698233 - RNA, 19 nt, Human
uuguuugguauuguauuua

SEQ ID NO: 3698234 - RNA, 18 nt, Human
uuguuugguuauagugca

SEQ ID NO: 3698235 - RNA, 22 nt, Human
uuguuuguaaauaagagauuug

SEQ ID NO: 3698236 - RNA, 13 nt, Human
uuguuuguaugua

SEQ ID NO: 3698237 - RNA, 20 nt, Human
uuguuugucucuccuuuucu

SEQ ID NO: 3698238 - RNA, 13 nt, Human
uuguuugucuuua

SEQ ID NO: 3698239 - RNA, 19 nt, Human
uuguuuguuaauaaagugc

SEQ ID NO: 3698240 - RNA, 14 nt, Human
uuguuuguuuaguc

SEQ ID NO: 3698241 - RNA, 13 nt, Human
uuguuuguuucaa

SEQ ID NO: 3698242 - RNA, 13 nt, Human
uuguuuguuuucc

SEQ ID NO: 3698243 - RNA, 12 nt, Human
uuguuuguuuug

SEQ ID NO: 3698244 - RNA, 15 nt, Human
uuguuuguuuuugcu

SEQ ID NO: 3698245 - RNA, 13 nt, Human
uuguuuuaaaacu

SEQ ID NO: 3698246 - RNA, 14 nt, Human
uuguuuuaaaauua

SEQ ID NO: 3698247 - RNA, 18 nt, Human
uuguuuuaaaauuaaagc

SEQ ID NO: 3698248 - RNA, 13 nt, Human
uuguuuuaaucug

SEQ ID NO: 3698249 - RNA, 13 nt, Human
uuguuuuacaaua

SEQ ID NO: 3698250 - RNA, 19 nt, Human
uuguuuuaucaugacaugu

SEQ ID NO: 3698251 - RNA, 16 nt, Human
uuguuuucaguguaca

SEQ ID NO: 3698252 - RNA, 17 nt, Human
uuguuuucccgccaagc

SEQ ID NO: 3698253 - RNA, 20 nt, Human
uuguuuucuucuguauguua

SEQ ID NO: 3698254 - RNA, 14 nt, Human
uuguuuugaaaaua

SEQ ID NO: 3698255 - RNA, 19 nt, Human
uuguuuugacggaugauug

SEQ ID NO: 3698256 - RNA, 24 nt, Human
uuguuuugagcuuuccauguugcu

SEQ ID NO: 3698257 - RNA, 23 nt, Human
uuguuuugauguuuguggccuca

SEQ ID NO: 3698258 - RNA, 14 nt, Human
uuguuuugcacuuu

SEQ ID NO: 3698259 - RNA, 16 nt, Human
uuguuuugcacuuuuu

SEQ ID NO: 3698260 - RNA, 18 nt, Human
uuguuuugccaacauugc

SEQ ID NO: 3698261 - RNA, 14 nt, Human
uuguuuugcuuccc

SEQ ID NO: 3698262 - RNA, 22 nt, Human
uuguuuuggcugaaauucuccu

SEQ ID NO: 3698263 - RNA, 18 nt, Human
uuguuuugggggucaggc

SEQ ID NO: 3698264 - RNA, 16 nt, Human
uuguuuugugcagaga

SEQ ID NO: 3698265 - RNA, 19 nt, Human
uuguuuugugucucuuaug

SEQ ID NO: 3698266 - RNA, 14 nt, Human
uuguuuuguugcac

SEQ ID NO: 3698267 - RNA, 14 nt, Human
uuguuuuguuuuaa

SEQ ID NO: 3698268 - RNA, 16 nt, Human
uuguuuuuauuaaaag

SEQ ID NO: 3698269 - RNA, 13 nt, Human
uuguuuuucugau

SEQ ID NO: 3698270 - RNA, 18 nt, Human
uuguuuuucugcuuuaga

SEQ ID NO: 3698271 - RNA, 21 nt, Human
uuguuuuuuaaagucuugcug

SEQ ID NO: 3698272 - RNA, 14 nt, Human
uuguuuuuuaguuc

SEQ ID NO: 3698273 - RNA, 14 nt, Human
uuguuuuuuaucuu

SEQ ID NO: 3698274 - RNA, 13 nt, Human
uuguuuuuugagu

SEQ ID NO: 3698275 - RNA, 22 nt, Human
uuuaaaaaaaaaaguuacagaa

SEQ ID NO: 3698276 - RNA, 14 nt, Human
uuuaaaaaaaaagu

SEQ ID NO: 3698277 - RNA, 15 nt, Human
uuuaaaaaaauaaaa

SEQ ID NO: 3698278 - RNA, 18 nt, Human
uuuaaaaaaauaaaacau

SEQ ID NO: 3698279 - RNA, 22 nt, Human
uuuaaaaaaauacaguauucug

SEQ ID NO: 3698280 - RNA, 15 nt, Human
uuuaaaaaacuaaaa

SEQ ID NO: 3698281 - RNA, 20 nt, Human
uuuaaaaaagaaacauuugg

SEQ ID NO: 3698282 - RNA, 19 nt, Human
uuuaaaaaagcaacagaaa

SEQ ID NO: 3698283 - RNA, 13 nt, Human
uuuaaaaaagcuu

SEQ ID NO: 3698284 - RNA, 16 nt, Human
uuuaaaaaaguuuaaa

SEQ ID NO: 3698285 - RNA, 22 nt, Human
uuuaaaaaauaaauaaaaacua

SEQ ID NO: 3698286 - RNA, 20 nt, Human
uuuaaaaaauaacuaccaag

SEQ ID NO: 3698287 - RNA, 18 nt, Human
uuuaaaaaauauuuauua

SEQ ID NO: 3698288 - RNA, 22 nt, Human
uuuaaaaaauauuuauuaaaua

SEQ ID NO: 3698289 - RNA, 20 nt, Human
uuuaaaaaaugaaauccuuu

SEQ ID NO: 3698290 - RNA, 22 nt, Human
uuuaaaaaauggacucuugaaa

SEQ ID NO: 3698291 - RNA, 17 nt, Human
uuuaaaaaauuaaucug

SEQ ID NO: 3698292 - RNA, 19 nt, Human
uuuaaaaacauagaaaaau

SEQ ID NO: 3698293 - RNA, 15 nt, Human
uuuaaaaaccuugua

SEQ ID NO: 3698294 - RNA, 12 nt, Human
uuuaaaaaguaa

SEQ ID NO: 3698295 - RNA, 16 nt, Human
uuuaaaaaguauugcc

SEQ ID NO: 3698296 - RNA, 13 nt, Human
uuuaaaaaucaac

SEQ ID NO: 3698297 - RNA, 15 nt, Human
uuuaaaaaucaacuu

SEQ ID NO: 3698298 - RNA, 22 nt, Human
uuuaaaaaucuaccuucuguag

SEQ ID NO: 3698299 - RNA, 18 nt, Human
uuuaaaaaucuuaaugua

SEQ ID NO: 3698300 - RNA, 19 nt, Human
uuuaaaaaugguaucaaaa

SEQ ID NO: 3698301 - RNA, 12 nt, Human
uuuaaaaauguc

SEQ ID NO: 3698302 - RNA, 12 nt, Human
uuuaaaaauugu

SEQ ID NO: 3698303 - RNA, 12 nt, Human
uuuaaaaauuua

SEQ ID NO: 3698304 - RNA, 14 nt, Human
uuuaaaaauuuacu

SEQ ID NO: 3698305 - RNA, 23 nt, Human
uuuaaaacacauguuuuuauaca

SEQ ID NO: 3698306 - RNA, 15 nt, Human
uuuaaaacaguauuu

SEQ ID NO: 3698307 - RNA, 14 nt, Human
uuuaaaacauguaa

SEQ ID NO: 3698308 - RNA, 14 nt, Human
uuuaaaacccauuu

SEQ ID NO: 3698309 - RNA, 16 nt, Human
uuuaaaacuggaccug

SEQ ID NO: 3698310 - RNA, 13 nt, Human
uuuaaaagaauga

SEQ ID NO: 3698311 - RNA, 17 nt, Human
uuuaaaagaaugggcag

SEQ ID NO: 3698312 - RNA, 16 nt, Human
uuuaaaagacaagacu

SEQ ID NO: 3698313 - RNA, 19 nt, Human
uuuaaaagacaagacuuca

SEQ ID NO: 3698314 - RNA, 19 nt, Human
uuuaaaagacacacuuguc

SEQ ID NO: 3698315 - RNA, 14 nt, Human
uuuaaaagacacug

SEQ ID NO: 3698316 - RNA, 14 nt, Human
uuuaaaagauucau

SEQ ID NO: 3698317 - RNA, 19 nt, Human
uuuaaaagcacgacagugg

SEQ ID NO: 3698318 - RNA, 19 nt, Human
uuuaaaagcccuuuccaaa

SEQ ID NO: 3698319 - RNA, 19 nt, Human
uuuaaaagguauuuugaau

SEQ ID NO: 3698320 - RNA, 22 nt, Human
uuuaaaagguauuuugaauacc

SEQ ID NO: 3698321 - RNA, 23 nt, Human
uuuaaaaguaaaaugucuuucca

SEQ ID NO: 3698322 - RNA, 15 nt, Human
uuuaaaaguuauuaa

SEQ ID NO: 3698323 - RNA, 17 nt, Human
uuuaaaaguuucaaugu

SEQ ID NO: 3698324 - RNA, 20 nt, Human
uuuaaaaguuucaaugugau

SEQ ID NO: 3698325 - RNA, 16 nt, Human
uuuaaaauaaaaugaa

SEQ ID NO: 3698326 - RNA, 22 nt, Human
uuuaaaauaaaaugaaaauugu

SEQ ID NO: 3698327 - RNA, 13 nt, Human
uuuaaaauagaaa

SEQ ID NO: 3698328 - RNA, 23 nt, Human
uuuaaaauagcguucuuguaauu

SEQ ID NO: 3698329 - RNA, 15 nt, Human
uuuaaaaucaacuua

SEQ ID NO: 3698330 - RNA, 18 nt, Human
uuuaaaaucacuaacauu

SEQ ID NO: 3698331 - RNA, 19 nt, Human
uuccuguccucuuucagcu

SEQ ID NO: 3698332 - RNA, 20 nt, Human
uuccugucuagucucuccug

SEQ ID NO: 3698333 - RNA, 22 nt, Human
uuccuguguguccaaaacugcc

SEQ ID NO: 3698334 - RNA, 17 nt, Human
uuccuguucagcauucu

SEQ ID NO: 3698335 - RNA, 14 nt, Human
uuccuguucaguaa

SEQ ID NO: 3698336 - RNA, 17 nt, Human
uuccuguugucaagaau

SEQ ID NO: 3698337 - RNA, 13 nt, Human
uuccuguuucaag

SEQ ID NO: 3698338 - RNA, 15 nt, Human
uuccuuaaacugugu

SEQ ID NO: 3698339 - RNA, 19 nt, Human
uuccuuaaguauaucaugu

SEQ ID NO: 3698340 - RNA, 20 nt, Human
uuccuuaaguauaucaugua

SEQ ID NO: 3698341 - RNA, 20 nt, Human
uuccuuaagucagaacagca

SEQ ID NO: 3698342 - RNA, 16 nt, Human
uuccuuacugcagaau

SEQ ID NO: 3698343 - RNA, 22 nt, Human
uuccuuagacucuuuuccuucc

SEQ ID NO: 3698344 - RNA, 23 nt, Human
uuccuuagcuuagaccucagccu

SEQ ID NO: 3698345 - RNA, 23 nt, Human
uuccuuauguauauuuaaaagaa

SEQ ID NO: 3698346 - RNA, 14 nt, Human
uuccuucaagaaug

SEQ ID NO: 3698347 - RNA, 21 nt, Human
uuccuucaagaaugcaguacu

SEQ ID NO: 3698348 - RNA, 22 nt, Human
uuccuucagagagcagugcuuu

SEQ ID NO: 3698349 - RNA, 12 nt, Human
uuccuucagauu

SEQ ID NO: 3698350 - RNA, 15 nt, Human
uuccuucagcacuuu

SEQ ID NO: 3698351 - RNA, 22 nt, Human
uuccuucagggugaugccaggu

SEQ ID NO: 3698352 - RNA, 22 nt, Human
uuccuucagugcaucugggaag

SEQ ID NO: 3698353 - RNA, 19 nt, Human
uuccuucauucaacccacc

SEQ ID NO: 3698354 - RNA, 17 nt, Human
uuccuucauuuccuccg

SEQ ID NO: 3698355 - RNA, 12 nt, Human
uuccuucccacc

SEQ ID NO: 3698356 - RNA, 19 nt, Human
uuccuucccugcugugaaa

SEQ ID NO: 3698357 - RNA, 21 nt, Human
uuccuucccugcugugaaaga

SEQ ID NO: 3698358 - RNA, 12 nt, Human
uuccuucccugg

SEQ ID NO: 3698359 - RNA, 16 nt, Human
uuccuucccugggcug

SEQ ID NO: 3698360 - RNA, 14 nt, Human
uuccuuccuucccu

SEQ ID NO: 3698361 - RNA, 16 nt, Human
uuccuucucaucugug

SEQ ID NO: 3698362 - RNA, 13 nt, Human
uuccuucucccau

SEQ ID NO: 3698363 - RNA, 15 nt, Human
uuccuucucccaucu

SEQ ID NO: 3698364 - RNA, 17 nt, Human
uuccuucugccugagcu

SEQ ID NO: 3698365 - RNA, 20 nt, Human
uuccuucugugaaaguacau

SEQ ID NO: 3698366 - RNA, 12 nt, Human
uuccuucuuuga

SEQ ID NO: 3698367 - RNA, 13 nt, Human
uuccuugaccagc

SEQ ID NO: 3698368 - RNA, 15 nt, Human
uuccuugaccuuccu

SEQ ID NO: 3698369 - RNA, 20 nt, Human
uuccuugaguugauucagcu

SEQ ID NO: 3698370 - RNA, 21 nt, Human
uuccuugaguugauucagcuc

SEQ ID NO: 3698371 - RNA, 14 nt, Human
uuccuugaucauuu

SEQ ID NO: 3698372 - RNA, 17 nt, Human
uuccuugcauacaaaca

SEQ ID NO: 3698373 - RNA, 11 nt, Human
uuccuugcucu

SEQ ID NO: 3698374 - RNA, 18 nt, Human
uuccuugcuguccuaggc

SEQ ID NO: 3698375 - RNA, 17 nt, Human
uuccuuggacucauuuu

SEQ ID NO: 3698376 - RNA, 20 nt, Human
uuccuuggacucauuuuaaa

SEQ ID NO: 3698377 - RNA, 13 nt, Human
uuccuuggcuggu

SEQ ID NO: 3698378 - RNA, 15 nt, Human
uuccuuggcuggugc

SEQ ID NO: 3698379 - RNA, 14 nt, Human
uuccuuggggcagg

SEQ ID NO: 3698380 - RNA, 19 nt, Human
uuccuuguagccuuuugac

SEQ ID NO: 3698381 - RNA, 20 nt, Human
uuccuuguagcgacuaaacu

SEQ ID NO: 3698382 - RNA, 13 nt, Human
uuccuugucccca

SEQ ID NO: 3698383 - RNA, 16 nt, Human
uuccuuguccccacac

SEQ ID NO: 3698384 - RNA, 20 nt, Human
uuccuuguccccacacuccu

SEQ ID NO: 3698385 - RNA, 14 nt, Human
uuccuuguuuauca

SEQ ID NO: 3698386 - RNA, 21 nt, Human
uuccuuguuuaucagauacau

SEQ ID NO: 3698387 - RNA, 16 nt, Human
uuccuuuaaaaaaauu

SEQ ID NO: 3698388 - RNA, 15 nt, Human
uuccuuuaaaaaacu

SEQ ID NO: 3698389 - RNA, 16 nt, Human
uuccuuuacuuucccu

SEQ ID NO: 3698390 - RNA, 17 nt, Human
uuccuuuacuuucccuu

SEQ ID NO: 3698391 - RNA, 14 nt, Human
uuccuuuauauuua

SEQ ID NO: 3698392 - RNA, 15 nt, Human
uuccuuuaugugaau

SEQ ID NO: 3698393 - RNA, 16 nt, Human
uuccuuuauguucuca

SEQ ID NO: 3698394 - RNA, 20 nt, Human
uuccuuucauuuacuguggc

SEQ ID NO: 3698395 - RNA, 23 nt, Human
uuccuuuccaacguuuggaagau

SEQ ID NO: 3698396 - RNA, 18 nt, Human
uuccuuuccagguauuuu

SEQ ID NO: 3698397 - RNA, 15 nt, Human
uuccuuuccccagcc

SEQ ID NO: 3698398 - RNA, 12 nt, Human
uuccuuucccuu

SEQ ID NO: 3698399 - RNA, 14 nt, Human
uuccuuucccuucc

SEQ ID NO: 3698400 - RNA, 18 nt, Human
uuccuuucccuuccucuu

SEQ ID NO: 3698401 - RNA, 14 nt, Human
uuccuuucucaccg

SEQ ID NO: 3698402 - RNA, 19 nt, Human
uuccuuucuccaggaccaa

SEQ ID NO: 3698403 - RNA, 17 nt, Human
uuccuuucucuuucucu

SEQ ID NO: 3698404 - RNA, 12 nt, Human
uuccuuucuuga

SEQ ID NO: 3698405 - RNA, 17 nt, Human
uuccuuucuuuuccccc

SEQ ID NO: 3698406 - RNA, 13 nt, Human
uuccuuugaagau

SEQ ID NO: 3698407 - RNA, 14 nt, Human
uuccuuugaagaua

SEQ ID NO: 3698408 - RNA, 19 nt, Human
uuccuuugcauauuauaaa

SEQ ID NO: 3698409 - RNA, 15 nt, Human
uuccuuugcucuuuc

SEQ ID NO: 3698410 - RNA, 16 nt, Human
uuccuuuggaagaaaa

SEQ ID NO: 3698411 - RNA, 17 nt, Human
uuccuuuggaagaaaaa

SEQ ID NO: 3698412 - RNA, 18 nt, Human
uuccuuuguguuucuauu

SEQ ID NO: 3698413 - RNA, 21 nt, Human
uuccuuuuaaaacacuuccau

SEQ ID NO: 3698414 - RNA, 21 nt, Human
uuccuuuuaaguaagguccaa

SEQ ID NO: 3698415 - RNA, 12 nt, Human
uuccuuuuacuu

SEQ ID NO: 3698416 - RNA, 20 nt, Human
uuccuuuuauuucuucacca

SEQ ID NO: 3698417 - RNA, 13 nt, Human
uuccuuuucccag

SEQ ID NO: 3698418 - RNA, 23 nt, Human
uuccuuuucccaggaaagaagca

SEQ ID NO: 3698419 - RNA, 13 nt, Human
uuccuuuucuuua

SEQ ID NO: 3698420 - RNA, 15 nt, Human
uuccuuuuguguaca

SEQ ID NO: 3698421 - RNA, 17 nt, Human
uuccuuuuguguacagu

SEQ ID NO: 3698422 - RNA, 20 nt, Human
uuccuuuuuauuuauaugua

SEQ ID NO: 3698423 - RNA, 18 nt, Human
uuccuuuuugacacugaa

SEQ ID NO: 3698424 - RNA, 13 nt, Human
uuccuuuuuuccc

SEQ ID NO: 3698425 - RNA, 22 nt, Human
uuccuuuuuucccauaagacaa

SEQ ID NO: 3698426 - RNA, 14 nt, Human
uuccuuuuuuugua

SEQ ID NO: 3698427 - RNA, 14 nt, Human
uucgaagcucagcc

SEQ ID NO: 3698428 - RNA, 22 nt, Human
uucgaagcucagcccacccccc

SEQ ID NO: 3698429 - RNA, 15 nt, Human
uucgaagucauuaaa

SEQ ID NO: 3698430 - RNA, 14 nt, Human
uucgaccagccagg

SEQ ID NO: 3698431 - RNA, 17 nt, Human
uucgaccugauuuacag

SEQ ID NO: 3698432 - RNA, 15 nt, Human
uucgagaagcugcuc

SEQ ID NO: 3698433 - RNA, 21 nt, Human
uucgagaagcugcucuggaau

SEQ ID NO: 3698434 - RNA, 14 nt, Human
uucgagaccagccu

SEQ ID NO: 3698435 - RNA, 21 nt, Human
uucgaugggcccaauucuuac

SEQ ID NO: 3698436 - RNA, 11 nt, Human
uucgcagccac

SEQ ID NO: 3698437 - RNA, 16 nt, Human
uucgcagccacccuga

SEQ ID NO: 3698438 - RNA, 19 nt, Human
uucgcagccacccugagga

SEQ ID NO: 3698439 - RNA, 24 nt, Human
uucgcagccacccugaggagucug

SEQ ID NO: 3698440 - RNA, 17 nt, Human
uucgcagcugaagugga

SEQ ID NO: 3698441 - RNA, 21 nt, Human
uucgcaggauucuuccucccu

SEQ ID NO: 3698442 - RNA, 19 nt, Human
uucgcaucaaaagacaauu

SEQ ID NO: 3698443 - RNA, 17 nt, Human
uucgcauggucacacac

SEQ ID NO: 3698444 - RNA, 19 nt, Human
uucgcauggucacacacug

SEQ ID NO: 3698445 - RNA, 23 nt, Human
uucgcauggucacacacugaugc

SEQ ID NO: 3698446 - RNA, 20 nt, Human
uucgcccgagcuguuuaugu

SEQ ID NO: 3698447 - RNA, 20 nt, Human
uucgccguggcugcggcacc

SEQ ID NO: 3698448 - RNA, 14 nt, Human
uucgccuggagccc

SEQ ID NO: 3698449 - RNA, 19 nt, Human
uucgcuccugugucuugca

SEQ ID NO: 3698450 - RNA, 16 nt, Human
uucgcuugagaaaaaa

SEQ ID NO: 3698451 - RNA, 12 nt, Human
uucggaaaccuu

SEQ ID NO: 3698452 - RNA, 19 nt, Human
uucggaggccccacugaug

SEQ ID NO: 3698453 - RNA, 17 nt, Human
uucggauuuggggugga

SEQ ID NO: 3698454 - RNA, 20 nt, Human
uucggcagauacugucucuu

SEQ ID NO: 3698455 - RNA, 22 nt, Human
uucggccuccauccugaggcuc

SEQ ID NO: 3698456 - RNA, 18 nt, Human
uucggcucugggugggca

SEQ ID NO: 3698457 - RNA, 14 nt, Human
uucgggaagagagg

SEQ ID NO: 3698458 - RNA, 23 nt, Human
uucgggaagagaggaguucaaug

SEQ ID NO: 3698459 - RNA, 14 nt, Human
uucgggcugugccc

SEQ ID NO: 3698460 - RNA, 13 nt, Human
uucggggcuggga

SEQ ID NO: 3698461 - RNA, 17 nt, Human
uucgggugugcaauguc

SEQ ID NO: 3698462 - RNA, 20 nt, Human
uucgguuucuaacuuggagc

SEQ ID NO: 3698463 - RNA, 13 nt, Human
uucguaacacagc

SEQ ID NO: 3698464 - RNA, 20 nt, Human
uucguacaguucuucgggaa

SEQ ID NO: 3698465 - RNA, 17 nt, Human
uucgugaacauccccuc

SEQ ID NO: 3698466 - RNA, 17 nt, Human
uucgugaaguauacugu

SEQ ID NO: 3698467 - RNA, 18 nt, Human
uucgugaaguauacugua

SEQ ID NO: 3698468 - RNA, 18 nt, Human
uucgugacaauguuuaca

SEQ ID NO: 3698469 - RNA, 19 nt, Human
uucgugacaauguuuacaa

SEQ ID NO: 3698470 - RNA, 15 nt, Human
uucgugagccccauc

SEQ ID NO: 3698471 - RNA, 13 nt, Human
uucguggggaggu

SEQ ID NO: 3698472 - RNA, 17 nt, Human
uucguggugaucaauua

SEQ ID NO: 3698473 - RNA, 22 nt, Human
uucguggugaucaauuaaaugu

SEQ ID NO: 3698474 - RNA, 19 nt, Human
uucguuaacuguguaugua

SEQ ID NO: 3698475 - RNA, 12 nt, Human
uucguucugugg

SEQ ID NO: 3698476 - RNA, 13 nt, Human
uucguucuguuua

SEQ ID NO: 3698477 - RNA, 17 nt, Human
uucguucuuguuaguac

SEQ ID NO: 3698478 - RNA, 16 nt, Human
uucguuuaaugaaugc

SEQ ID NO: 3698479 - RNA, 15 nt, Human
uucguuuauuuucaa

SEQ ID NO: 3698480 - RNA, 14 nt, Human
uucguuucuguaua

SEQ ID NO: 3698481 - RNA, 11 nt, Human
uucguuuguuu

SEQ ID NO: 3698482 - RNA, 18 nt, Human
uuuaaaaucagcuauuuu

SEQ ID NO: 3698483 - RNA, 21 nt, Human
uuuaaaaucugagggaaaugu

SEQ ID NO: 3698484 - RNA, 16 nt, Human
uuuaaaaugagaaauc

SEQ ID NO: 3698485 - RNA, 12 nt, Human
uuuaaaaugauu

SEQ ID NO: 3698486 - RNA, 18 nt, Human
uuuaaaauguaauuuaaa

SEQ ID NO: 3698487 - RNA, 16 nt, Human
uuuaaaauuacaacua

SEQ ID NO: 3698488 - RNA, 19 nt, Human
uuuaaaauucucuuccaac

SEQ ID NO: 3698489 - RNA, 16 nt, Human
uuuaaaauugugaugu

SEQ ID NO: 3698490 - RNA, 10 nt, Human
uuuaaaauuu

SEQ ID NO: 3698491 - RNA, 13 nt, Human
uuuaaaauuucau

SEQ ID NO: 3698492 - RNA, 13 nt, Human
uuuaaaauuucuu

SEQ ID NO: 3698493 - RNA, 17 nt, Human
uuuaaaauuuuaucucu

SEQ ID NO: 3698494 - RNA, 13 nt, Human
uuuaaacaaaaua

SEQ ID NO: 3698495 - RNA, 16 nt, Human
uuuaaacaaaauagaa

SEQ ID NO: 3698496 - RNA, 20 nt, Human
uuuaaacaaaauagaagcug

SEQ ID NO: 3698497 - RNA, 18 nt, Human
uuuaaacaaacauugugu

SEQ ID NO: 3698498 - RNA, 23 nt, Human
uuuaaacaaacauuguguugaca

SEQ ID NO: 3698499 - RNA, 15 nt, Human
uuuaaacacauuaaa

SEQ ID NO: 3698500 - RNA, 14 nt, Human
uuuaaacaccuccu

SEQ ID NO: 3698501 - RNA, 16 nt, Human
uuuaaacaggcccagc

SEQ ID NO: 3698502 - RNA, 13 nt, Human
uuuaaacauaucc

SEQ ID NO: 3698503 - RNA, 13 nt, Human
uuuaaacauuaaa

SEQ ID NO: 3698504 - RNA, 19 nt, Human
uuuaaaccaauugcugcua

SEQ ID NO: 3698505 - RNA, 20 nt, Human
uuuaaaccgcuaaaagaaac

SEQ ID NO: 3698506 - RNA, 22 nt, Human
uuuaaaccgcuaaaagaaacuu

SEQ ID NO: 3698507 - RNA, 22 nt, Human
uuuaaaccucaccuuugugggg

SEQ ID NO: 3698508 - RNA, 21 nt, Human
uuuaaacucugaauuuaucuu

SEQ ID NO: 3698509 - RNA, 22 nt, Human
uuuaaacugaaugaacaaccuc

SEQ ID NO: 3698510 - RNA, 18 nt, Human
uuuaaacuucuuaacugg

SEQ ID NO: 3698511 - RNA, 17 nt, Human
uuuaaagaaaaaaaugu

SEQ ID NO: 3698512 - RNA, 18 nt, Human
uuuaaagaaaagaugaaa

SEQ ID NO: 3698513 - RNA, 13 nt, Human
uuuaaagaaaagu

SEQ ID NO: 3698514 - RNA, 18 nt, Human
uuuaaagaaacaugguuu

SEQ ID NO: 3698515 - RNA, 16 nt, Human
uuuaaagaaaguguau

SEQ ID NO: 3698516 - RNA, 17 nt, Human
uuuaaagaagaaaaaaa

SEQ ID NO: 3698517 - RNA, 18 nt, Human
uuuaaagaaucauuauuu

SEQ ID NO: 3698518 - RNA, 15 nt, Human
uuuaaagaauuucuu

SEQ ID NO: 3698519 - RNA, 17 nt, Human
uuuaaagacccuccuau

SEQ ID NO: 3698520 - RNA, 17 nt, Human
uuuaaagagaauguaga

SEQ ID NO: 3698521 - RNA, 15 nt, Human
uuuaaagagagguua

SEQ ID NO: 3698522 - RNA, 17 nt, Human
uuuaaagagucuagauu

SEQ ID NO: 3698523 - RNA, 18 nt, Human
uuuaaagagucuagauuc

SEQ ID NO: 3698524 - RNA, 23 nt, Human
uuuaaagagucuagauucaaagg

SEQ ID NO: 3698525 - RNA, 17 nt, Human
uuuaaagauguagacag

SEQ ID NO: 3698526 - RNA, 12 nt, Human
uuuaaagauuuu

SEQ ID NO: 3698527 - RNA, 17 nt, Human
uuuaaagcaacugucua

SEQ ID NO: 3698528 - RNA, 15 nt, Human
uuuaaagcagguucu

SEQ ID NO: 3698529 - RNA, 16 nt, Human
uuuaaagcauugcuuu

SEQ ID NO: 3698530 - RNA, 18 nt, Human
uuuaaagccauucugauu

SEQ ID NO: 3698531 - RNA, 16 nt, Human
uuuaaagcuuccauug

SEQ ID NO: 3698532 - RNA, 17 nt, Human
uuuaaaggaaaaaaugu

SEQ ID NO: 3698533 - RNA, 21 nt, Human
uuuaaaggaaaaaauguugga

SEQ ID NO: 3698534 - RNA, 18 nt, Human
uuuaaaggcauuagaguc

SEQ ID NO: 3698535 - RNA, 17 nt, Human
uuuaaaggcccuaucug

SEQ ID NO: 3698536 - RNA, 22 nt, Human
uuuaaaggggcagaaaaacucu

SEQ ID NO: 3698537 - RNA, 16 nt, Human
uuuaaaguagauuaga

SEQ ID NO: 3698538 - RNA, 15 nt, Human
uuuaaagucuugcug

SEQ ID NO: 3698539 - RNA, 17 nt, Human
uuuaaaguguauuauaa

SEQ ID NO: 3698540 - RNA, 23 nt, Human
uuuaaauaaaagaaaaaauaucu

SEQ ID NO: 3698541 - RNA, 21 nt, Human
uuuaaauaaacuuuuuuucaa

SEQ ID NO: 3698542 - RNA, 22 nt, Human
uuuaaauaaacuuuuuuucaau

SEQ ID NO: 3698543 - RNA, 21 nt, Human
uuuaaauaaauaaauagcuag

SEQ ID NO: 3698544 - RNA, 20 nt, Human
uuuaaauacgcacuacaugu

SEQ ID NO: 3698545 - RNA, 12 nt, Human
uuuaaauauaau

SEQ ID NO: 3698546 - RNA, 18 nt, Human
uuuaaauauaauucugua

SEQ ID NO: 3698547 - RNA, 23 nt, Human
uuuaaauaucugaacauuuacua

SEQ ID NO: 3698548 - RNA, 19 nt, Human
uuuaaauauuuucuauuuu

SEQ ID NO: 3698549 - RNA, 20 nt, Human
uuuaaauccuguugaaaagc

SEQ ID NO: 3698550 - RNA, 22 nt, Human
uuuaaaucuaaaucuauuuauu

SEQ ID NO: 3698551 - RNA, 14 nt, Human
uuuaaaugaagaaa

SEQ ID NO: 3698552 - RNA, 11 nt, Human
uuuaaaugcac

SEQ ID NO: 3698553 - RNA, 11 nt, Human
uuuaaauguac

SEQ ID NO: 3698554 - RNA, 20 nt, Human
uuuaaauguacaguuugggg

SEQ ID NO: 3698555 - RNA, 18 nt, Human
uuuaaauguuuuucuaug

SEQ ID NO: 3698556 - RNA, 16 nt, Human
uuuaaauuaauaucuu

SEQ ID NO: 3698557 - RNA, 22 nt, Human
uuuaaauuagaaaauauucucu

SEQ ID NO: 3698558 - RNA, 20 nt, Human
uuuaaauuauaacuuaaaau

SEQ ID NO: 3698559 - RNA, 19 nt, Human
uuuaaauuauaaggacugc

SEQ ID NO: 3698560 - RNA, 21 nt, Human
uuuaaauucacaauagaaacu

SEQ ID NO: 3698561 - RNA, 12 nt, Human
uuuaaauucuga

SEQ ID NO: 3698562 - RNA, 17 nt, Human
uuuaaauucugagacau

SEQ ID NO: 3698563 - RNA, 21 nt, Human
uuuaaauucuuuuuuaaauuu

SEQ ID NO: 3698564 - RNA, 23 nt, Human
uuuaaauugcucacaguuauuac

SEQ ID NO: 3698565 - RNA, 11 nt, Human
uuuaaauugug

SEQ ID NO: 3698566 - RNA, 14 nt, Human
uuuaaauuuaagua

SEQ ID NO: 3698567 - RNA, 15 nt, Human
uuuaacaaaaaccaa

SEQ ID NO: 3698568 - RNA, 19 nt, Human
uuuaacaaaaagugcuuca

SEQ ID NO: 3698569 - RNA, 20 nt, Human
uuuaacaacauguuuccagc

SEQ ID NO: 3698570 - RNA, 18 nt, Human
uuuaacaauaacuacugu

SEQ ID NO: 3698571 - RNA, 23 nt, Human
uuuaacaauaacuacuguguucc

SEQ ID NO: 3698572 - RNA, 23 nt, Human
uuuaacaauuuccuuuauauuua

SEQ ID NO: 3698573 - RNA, 12 nt, Human
uuuaacagaaau

SEQ ID NO: 3698574 - RNA, 21 nt, Human
uuuaacagaaauuguauauug

SEQ ID NO: 3698575 - RNA, 15 nt, Human
uuuaacagucauuua

SEQ ID NO: 3698576 - RNA, 14 nt, Human
uuuaacauaaaggu

SEQ ID NO: 3698577 - RNA, 13 nt, Human
uuuaacauaagcu

SEQ ID NO: 3698578 - RNA, 11 nt, Human
uuuaacaugcc

SEQ ID NO: 3698579 - RNA, 22 nt, Human
uuuaacauuugccuugcagaac

SEQ ID NO: 3698580 - RNA, 11 nt, Human
uuuaacauuuu

SEQ ID NO: 3698581 - RNA, 22 nt, Human
uuuaacauuuuguucuuacaca

SEQ ID NO: 3698582 - RNA, 14 nt, Human
uuuaaccaaaacau

SEQ ID NO: 3698583 - RNA, 13 nt, Human
uuuaaccaaaggu

SEQ ID NO: 3698584 - RNA, 14 nt, Human
uuuaaccucuaaau

SEQ ID NO: 3698585 - RNA, 16 nt, Human
uuuaaccuuugauaga

SEQ ID NO: 3698586 - RNA, 22 nt, Human
uuuaacgaaugaagaugucuaa

SEQ ID NO: 3698587 - RNA, 17 nt, Human
uuuaacuaaauuuuaaa

SEQ ID NO: 3698588 - RNA, 14 nt, Human
uuuaacuacccuua

SEQ ID NO: 3698589 - RNA, 12 nt, Human
uuuaacucagau

SEQ ID NO: 3698590 - RNA, 18 nt, Human
uuuaacucagaucacuac

SEQ ID NO: 3698591 - RNA, 22 nt, Human
uuuaacucauaccuuuaaagga

SEQ ID NO: 3698592 - RNA, 17 nt, Human
uuuaacucuacugugua

SEQ ID NO: 3698593 - RNA, 18 nt, Human
uuuaacucuacuguguaa

SEQ ID NO: 3698594 - RNA, 18 nt, Human
uuuaacucuagaauuugg

SEQ ID NO: 3698595 - RNA, 19 nt, Human
uuuaacucuauaauguguu

SEQ ID NO: 3698596 - RNA, 13 nt, Human
uuuaacucugucu

SEQ ID NO: 3698597 - RNA, 17 nt, Human
uuuaacucugucuucac

SEQ ID NO: 3698598 - RNA, 19 nt, Human
uuuaacugaagauguugag

SEQ ID NO: 3698599 - RNA, 23 nt, Human
uuuaacuggugcacuuuguaaau

SEQ ID NO: 3698600 - RNA, 17 nt, Human
uuuaacuguggauauug

SEQ ID NO: 3698601 - RNA, 14 nt, Human
uuuaacuuaaauag

SEQ ID NO: 3698602 - RNA, 16 nt, Human
uuuaacuuaacugaaa

SEQ ID NO: 3698603 - RNA, 13 nt, Human
uuuaacuucugcc

SEQ ID NO: 3698604 - RNA, 18 nt, Human
uuuaagaaaaaauaacac

SEQ ID NO: 3698605 - RNA, 18 nt, Human
uuuaagaaaaaggaugca

SEQ ID NO: 3698606 - RNA, 12 nt, Human
uuuaagaaaagu

SEQ ID NO: 3698607 - RNA, 16 nt, Human
uuuaagaaaaguauuu

SEQ ID NO: 3698608 - RNA, 23 nt, Human
uuuaagaaaaguauuuugaaguu

SEQ ID NO: 3698609 - RNA, 12 nt, Human
uuuaagaaagaa

SEQ ID NO: 3698610 - RNA, 15 nt, Human
uuuaagaauaucugu

SEQ ID NO: 3698611 - RNA, 22 nt, Human
uuuaagacagucccaucaaaac

SEQ ID NO: 3698612 - RNA, 18 nt, Human
uuuaagacagucuuuggg

SEQ ID NO: 3698613 - RNA, 17 nt, Human
uuuaagacguguuugug

SEQ ID NO: 3698614 - RNA, 23 nt, Human
uuuaagacucucgcaucuuccca

SEQ ID NO: 3698615 - RNA, 12 nt, Human
uuuaagagaaau

SEQ ID NO: 3698616 - RNA, 15 nt, Human
uuuaagauaaauuau

SEQ ID NO: 3698617 - RNA, 15 nt, Human
uuuaagauaauaguu

SEQ ID NO: 3698618 - RNA, 12 nt, Human
uuuaagauguga

SEQ ID NO: 3698619 - RNA, 17 nt, Human
uuuaagauuccuuuucu

SEQ ID NO: 3698620 - RNA, 14 nt, Human
uuuaagauuuuucu

SEQ ID NO: 3698621 - RNA, 16 nt, Human
uuuaagauuuuucuca

SEQ ID NO: 3698622 - RNA, 16 nt, Human
uuuaagcaaauacuua

SEQ ID NO: 3698623 - RNA, 20 nt, Human
uuuaagcacucuuaaagcaa

SEQ ID NO: 3698624 - RNA, 14 nt, Human
uuuaagcagaauug

SEQ ID NO: 3698625 - RNA, 15 nt, Human
uuuaagcagaauugg

SEQ ID NO: 3698626 - RNA, 20 nt, Human
uuuaagcagcucuugcuaau

SEQ ID NO: 3698627 - RNA, 23 nt, Human
uuuaagcauuacucuuguaagau

SEQ ID NO: 3698628 - RNA, 12 nt, Human
uuuaagccaaaa

SEQ ID NO: 3698629 - RNA, 18 nt, Human
uuuaagccuucaaaacua

SEQ ID NO: 3698630 - RNA, 22 nt, Human
uuuaagcuaggaaaagaaaucu

SEQ ID NO: 3698631 - RNA, 23 nt, Human
uuuaagcuaggaaaagaaaucua

SEQ ID NO: 3698632 - RNA, 18 nt, Human
uauauuuuuuuaauuuaa

SEQ ID NO: 3698633 - RNA, 20 nt, Human
uauauuuuuuucugaaauuu

SEQ ID NO: 3698634 - RNA, 19 nt, Human
uaucaaaaagauaucaaag

SEQ ID NO: 3698635 - RNA, 14 nt, Human
uaucaaaauagucu

SEQ ID NO: 3698636 - RNA, 15 nt, Human
uaucaaacagcucag

SEQ ID NO: 3698637 - RNA, 17 nt, Human
uaucaaacccuagccuu

SEQ ID NO: 3698638 - RNA, 20 nt, Human
uaucaaacccuagccuugcu

SEQ ID NO: 3698639 - RNA, 13 nt, Human
uaucaaacugaag

SEQ ID NO: 3698640 - RNA, 19 nt, Human
uaucaaagggugaaaauua

SEQ ID NO: 3698641 - RNA, 12 nt, Human
uaucaaagucau

SEQ ID NO: 3698642 - RNA, 20 nt, Human
uaucaaauauuagaugugau

SEQ ID NO: 3698643 - RNA, 14 nt, Human
uaucaaauuaauug

SEQ ID NO: 3698644 - RNA, 16 nt, Human
uaucaaauuaauugug

SEQ ID NO: 3698645 - RNA, 17 nt, Human
uaucaaauuaauugugu

SEQ ID NO: 3698646 - RNA, 18 nt, Human
uaucaaccccagacacug

SEQ ID NO: 3698647 - RNA, 19 nt, Human
uaucaaccccagacacugg

SEQ ID NO: 3698648 - RNA, 21 nt, Human
uaucaaccccagacacugguu

SEQ ID NO: 3698649 - RNA, 16 nt, Human
uaucaagacauagcau

SEQ ID NO: 3698650 - RNA, 23 nt, Human
uaucaagccaguacgugcuaaca

SEQ ID NO: 3698651 - RNA, 12 nt, Human
uaucaagcuaau

SEQ ID NO: 3698652 - RNA, 23 nt, Human
uaucaagcuaauaaaauaucauu

SEQ ID NO: 3698653 - RNA, 22 nt, Human
uaucaaggacucugguuucuca

SEQ ID NO: 3698654 - RNA, 16 nt, Human
uaucaaguauagaaaa

SEQ ID NO: 3698655 - RNA, 18 nt, Human
uaucaaguauuauaccuu

SEQ ID NO: 3698656 - RNA, 17 nt, Human
uaucaagucaaucauuu

SEQ ID NO: 3698657 - RNA, 20 nt, Human
uaucaagucaaucauuucuc

SEQ ID NO: 3698658 - RNA, 18 nt, Human
uaucaaguggcaugugcu

SEQ ID NO: 3698659 - RNA, 17 nt, Human
uaucaauaucuaauaua

SEQ ID NO: 3698660 - RNA, 22 nt, Human
uaucaauaucuaauauauauga

SEQ ID NO: 3698661 - RNA, 15 nt, Human
uaucaaucaguauaa

SEQ ID NO: 3698662 - RNA, 21 nt, Human
uaucaauuugucauuuugaag

SEQ ID NO: 3698663 - RNA, 20 nt, Human
uaucacaaaucuuaacuuga

SEQ ID NO: 3698664 - RNA, 20 nt, Human
uaucacacacauugcuguga

SEQ ID NO: 3698665 - RNA, 16 nt, Human
uaucacagucuaauuu

SEQ ID NO: 3698666 - RNA, 20 nt, Human
uaucacagucuaauuuuuau

SEQ ID NO: 3698667 - RNA, 18 nt, Human
uaucacauguauguuuug

SEQ ID NO: 3698668 - RNA, 21 nt, Human
uaucacauguauguuuuggua

SEQ ID NO: 3698669 - RNA, 12 nt, Human
uaucacauguuu

SEQ ID NO: 3698670 - RNA, 20 nt, Human
uaucacauuggagucacugc

SEQ ID NO: 3698671 - RNA, 21 nt, Human
uaucacccaacgcuccaaagu

SEQ ID NO: 3698672 - RNA, 18 nt, Human
uaucacccagaagaaaau

SEQ ID NO: 3698673 - RNA, 22 nt, Human
uaucacccagaagaaaauagug

SEQ ID NO: 3698674 - RNA, 23 nt, Human
uaucaccgugggcucccugacug

SEQ ID NO: 3698675 - RNA, 13 nt, Human
uaucacucauuaa

SEQ ID NO: 3698676 - RNA, 19 nt, Human
uaucacucauuaauuaacc

SEQ ID NO: 3698677 - RNA, 18 nt, Human
uaucacugacacaaaaag

SEQ ID NO: 3698678 - RNA, 20 nt, Human
uaucacugugcaguugcugu

SEQ ID NO: 3698679 - RNA, 22 nt, Human
uaucacuuaaacuugcaucacu

SEQ ID NO: 3698680 - RNA, 15 nt, Human
uaucacuuuuugaac

SEQ ID NO: 3698681 - RNA, 22 nt, Human
uaucacuuuuugaacuaagaaa

SEQ ID NO: 3698682 - RNA, 14 nt, Human
uaucagaacuaugu

SEQ ID NO: 3698683 - RNA, 17 nt, Human
uaucagaauucucagaa

SEQ ID NO: 3698684 - RNA, 20 nt, Human
uaucagacacucuggcuggu

SEQ ID NO: 3698685 - RNA, 14 nt, Human
uaucagagaugucc

SEQ ID NO: 3698686 - RNA, 18 nt, Human
uaucagaguauccacugu

SEQ ID NO: 3698687 - RNA, 15 nt, Human
uaucagauacaucac

SEQ ID NO: 3698688 - RNA, 19 nt, Human
uaucagauacaucacugcu

SEQ ID NO: 3698689 - RNA, 14 nt, Human
uaucagauugcuuu

SEQ ID NO: 3698690 - RNA, 14 nt, Human
uaucagcaaaaaag

SEQ ID NO: 3698691 - RNA, 14 nt, Human
uaucagcaaagaaa

SEQ ID NO: 3698692 - RNA, 20 nt, Human
uaucagcacauauuuucugu

SEQ ID NO: 3698693 - RNA, 15 nt, Human
uaucagcacgugugg

SEQ ID NO: 3698694 - RNA, 13 nt, Human
uaucagccugagu

SEQ ID NO: 3698695 - RNA, 11 nt, Human
uaucagccugu

SEQ ID NO: 3698696 - RNA, 21 nt, Human
uaucaggacccagaggaaggg

SEQ ID NO: 3698697 - RNA, 16 nt, Human
uaucaggauuuuucaa

SEQ ID NO: 3698698 - RNA, 23 nt, Human
uaucaggucucccacgugggaga

SEQ ID NO: 3698699 - RNA, 23 nt, Human
uaucaggugcccaucccuggaag

SEQ ID NO: 3698700 - RNA, 19 nt, Human
uaucaggugcugccaucca

SEQ ID NO: 3698701 - RNA, 15 nt, Human
uaucaguaaauaacu

SEQ ID NO: 3698702 - RNA, 21 nt, Human
uaucagucaauauuuuuagau

SEQ ID NO: 3698703 - RNA, 16 nt, Human
uaucagugacagaguu

SEQ ID NO: 3698704 - RNA, 17 nt, Human
uaucagugacagaguuc

SEQ ID NO: 3698705 - RNA, 23 nt, Human
uaucagugcucgagacacaguga

SEQ ID NO: 3698706 - RNA, 17 nt, Human
uaucagugugcccccca

SEQ ID NO: 3698707 - RNA, 15 nt, Human
uaucaguuacacaug

SEQ ID NO: 3698708 - RNA, 15 nt, Human
uaucaguuacucagc

SEQ ID NO: 3698709 - RNA, 17 nt, Human
uaugaacauauuguuga

SEQ ID NO: 3698710 - RNA, 17 nt, Human
uaugaacuuaacaugcu

SEQ ID NO: 3698711 - RNA, 21 nt, Human
uaugaacuugaggacacaugu

SEQ ID NO: 3698712 - RNA, 16 nt, Human
uaugaagaaaaaauac

SEQ ID NO: 3698713 - RNA, 15 nt, Human
uaugaagaaaauacu

SEQ ID NO: 3698714 - RNA, 20 nt, Human
uaugaagaaaauacuuaaau

SEQ ID NO: 3698715 - RNA, 23 nt, Human
uaugaagcuuuuaugugaaacau

SEQ ID NO: 3698716 - RNA, 15 nt, Human
uaugaaguauauaau

SEQ ID NO: 3698717 - RNA, 16 nt, Human
uaugaaguauauaaug

SEQ ID NO: 3698718 - RNA, 13 nt, Human
uaugaagugcgug

SEQ ID NO: 3698719 - RNA, 19 nt, Human
uaugaagugcgugaaugua

SEQ ID NO: 3698720 - RNA, 20 nt, Human
uaugaaguuacuuucuuaau

SEQ ID NO: 3698721 - RNA, 12 nt, Human
uaugaauaacau

SEQ ID NO: 3698722 - RNA, 17 nt, Human
uaugaauacagcagcaa

SEQ ID NO: 3698723 - RNA, 21 nt, Human
uaugaauauauggcauuugca

SEQ ID NO: 3698724 - RNA, 14 nt, Human
uaugaaucucuacg

SEQ ID NO: 3698725 - RNA, 21 nt, Human
uaugaaucugagagaugcugu

SEQ ID NO: 3698726 - RNA, 23 nt, Human
uaugaaugauuugcauaugaaag

SEQ ID NO: 3698727 - RNA, 20 nt, Human
uaugaaugcccccagcuggc

SEQ ID NO: 3698728 - RNA, 17 nt, Human
uaugaauuacauuugua

SEQ ID NO: 3698729 - RNA, 14 nt, Human
uaugaauuauucaa

SEQ ID NO: 3698730 - RNA, 18 nt, Human
uaugaauuauucaauuua

SEQ ID NO: 3698731 - RNA, 13 nt, Human
uaugaauuguaca

SEQ ID NO: 3698732 - RNA, 14 nt, Human
uaugaauuguacag

SEQ ID NO: 3698733 - RNA, 15 nt, Human
uaugaauuuaaauau

SEQ ID NO: 3698734 - RNA, 14 nt, Human
uaugacaguaaaca

SEQ ID NO: 3698735 - RNA, 15 nt, Human
uaugacaguaauugu

SEQ ID NO: 3698736 - RNA, 18 nt, Human
uaugacaguaauuguguu

SEQ ID NO: 3698737 - RNA, 15 nt, Human
uaugacaguuauacu

SEQ ID NO: 3698738 - RNA, 22 nt, Human
uaugacauaaaaacaacuuuau

SEQ ID NO: 3698739 - RNA, 23 nt, Human
uaugacauaaaaacaacuuuaua

SEQ ID NO: 3698740 - RNA, 14 nt, Human
uaugacauucaugc

SEQ ID NO: 3698741 - RNA, 20 nt, Human
uaugacauucaugccuggcu

SEQ ID NO: 3698742 - RNA, 16 nt, Human
uaugaccuucuaggaa

SEQ ID NO: 3698743 - RNA, 12 nt, Human
uaugacuaaaga

SEQ ID NO: 3698744 - RNA, 13 nt, Human
uaugacuaaagag

SEQ ID NO: 3698745 - RNA, 14 nt, Human
uaugacuaaagaga

SEQ ID NO: 3698746 - RNA, 21 nt, Human
uaugacuaaagagagaaugua

SEQ ID NO: 3698747 - RNA, 17 nt, Human
uaugacuccagaauuuc

SEQ ID NO: 3698748 - RNA, 17 nt, Human
uaugacugcuccccagc

SEQ ID NO: 3698749 - RNA, 16 nt, Human
uaugacuucauuaaua

SEQ ID NO: 3698750 - RNA, 21 nt, Human
uaugacuugggcacccccagc

SEQ ID NO: 3698751 - RNA, 22 nt, Human
uaugacuugggcacccccagcc

SEQ ID NO: 3698752 - RNA, 13 nt, Human
uaugacuuuuuau

SEQ ID NO: 3698753 - RNA, 12 nt, Human
uaugagaaaugu

SEQ ID NO: 3698754 - RNA, 13 nt, Human
uaugagaaaugua

SEQ ID NO: 3698755 - RNA, 16 nt, Human
uaugagaaauguaaug

SEQ ID NO: 3698756 - RNA, 15 nt, Human
uaugagacuuuaugu

SEQ ID NO: 3698757 - RNA, 20 nt, Human
uaugagcauccugagccccg

SEQ ID NO: 3698758 - RNA, 22 nt, Human
uaugagcauccugagccccgcc

SEQ ID NO: 3698759 - RNA, 21 nt, Human
uaugagccgugaacugugcau

SEQ ID NO: 3698760 - RNA, 15 nt, Human
uaugagcucuucaug

SEQ ID NO: 3698761 - RNA, 13 nt, Human
uaugagcugaggg

SEQ ID NO: 3698762 - RNA, 23 nt, Human
uaugaggacuugugucucugugc

SEQ ID NO: 3698763 - RNA, 13 nt, Human
uaugaggagggga

SEQ ID NO: 3698764 - RNA, 14 nt, Human
uaugaggaugcaga

SEQ ID NO: 3698765 - RNA, 14 nt, Human
uaugaggcauuugu

SEQ ID NO: 3698766 - RNA, 15 nt, Human
uaugagggaaaauga

SEQ ID NO: 3698767 - RNA, 15 nt, Human
uaugaggucuaggaa

SEQ ID NO: 3698768 - RNA, 19 nt, Human
uaugaggucuaggaacaua

SEQ ID NO: 3698769 - RNA, 18 nt, Human
uaugaguaacuauuauua

SEQ ID NO: 3698770 - RNA, 16 nt, Human
uaugaguacaaaugcc

SEQ ID NO: 3698771 - RNA, 17 nt, Human
uaugaguacaaaugccu

SEQ ID NO: 3698772 - RNA, 14 nt, Human
uaugaguauacaau

SEQ ID NO: 3698773 - RNA, 20 nt, Human
uaugaguauacaauauauaa

SEQ ID NO: 3698774 - RNA, 17 nt, Human
uaugagucaaugugcag

SEQ ID NO: 3698775 - RNA, 16 nt, Human
uaugagucuagauguu

SEQ ID NO: 3698776 - RNA, 22 nt, Human
uaugaguuguuuucagacucag

SEQ ID NO: 3698777 - RNA, 17 nt, Human
uaugaguuucauagcua

SEQ ID NO: 3698778 - RNA, 22 nt, Human
uaugaguuuuugauagcuuuau

SEQ ID NO: 3698779 - RNA, 15 nt, Human
uaugauaaaaaauuu

SEQ ID NO: 3698780 - RNA, 23 nt, Human
uaugauaaaaaauuuuguaauuu

SEQ ID NO: 3698781 - RNA, 17 nt, Human
uaugauacuugaaaauu

SEQ ID NO: 3698782 - RNA, 13 nt, Human
uaugauaucccug

SEQ ID NO: 3698783 - RNA, 14 nt, Human
uaugauauuccaua

SEQ ID NO: 3698784 - RNA, 18 nt, Human
uaugauauuccauaguau

SEQ ID NO: 3698785 - RNA, 19 nt, Human
uaugauauuccauaguaua

SEQ ID NO: 3698786 - RNA, 20 nt, Human
uaugauauuccauaguauau

SEQ ID NO: 3698787 - RNA, 18 nt, Human
uaugauauugcauaugca

SEQ ID NO: 3698788 - RNA, 15 nt, Human
uaugaucaaauguuu

SEQ ID NO: 3698789 - RNA, 20 nt, Human
uaugaucaaauguuuaauca

SEQ ID NO: 3698790 - RNA, 10 nt, Human
uaugauccag

SEQ ID NO: 3698791 - RNA, 19 nt, Human
uaugauccagcagauuauu

SEQ ID NO: 3698792 - RNA, 21 nt, Human
uaugauccagcagauuauuca

SEQ ID NO: 3698793 - RNA, 22 nt, Human
uaugauccagcagauuauucac

SEQ ID NO: 3698794 - RNA, 14 nt, Human
uaugaucugucugu

SEQ ID NO: 3698795 - RNA, 20 nt, Human
uaugaucuguuuuguaucuu

SEQ ID NO: 3698796 - RNA, 21 nt, Human
uaugaugacguacaaguaguu

SEQ ID NO: 3698797 - RNA, 15 nt, Human
uaugaugacuguuuu

SEQ ID NO: 3698798 - RNA, 22 nt, Human
uaugauguaaucucucugcagc

SEQ ID NO: 3698799 - RNA, 21 nt, Human
uaugauguauacugccacuaa

SEQ ID NO: 3698800 - RNA, 17 nt, Human
uaugaugugcuuaacag

SEQ ID NO: 3698801 - RNA, 21 nt, Human
uaugaugugcuuaacagggaa

SEQ ID NO: 3698802 - RNA, 19 nt, Human
uaugauguuaguuuuccuu

SEQ ID NO: 3698803 - RNA, 23 nt, Human
uaugauuaaaaauaucaaauuaa

SEQ ID NO: 3698804 - RNA, 16 nt, Human
uaugauuaaguaauga

SEQ ID NO: 3698805 - RNA, 20 nt, Human
uaugauuaaguaaugauaac

SEQ ID NO: 3698806 - RNA, 16 nt, Human
uaugauuaguaaagaa

SEQ ID NO: 3698807 - RNA, 21 nt, Human
uaugauuauuaacgaugucca

SEQ ID NO: 3698808 - RNA, 14 nt, Human
uaugauucugcuuu

SEQ ID NO: 3698809 - RNA, 17 nt, Human
uaugauuuaaaacaugu

SEQ ID NO: 3698810 - RNA, 13 nt, Human
uaugauuuacauu

SEQ ID NO: 3698811 - RNA, 17 nt, Human
uaugauuuauaaacaga

SEQ ID NO: 3698812 - RNA, 19 nt, Human
uaugauuuauaaacagaca

SEQ ID NO: 3698813 - RNA, 18 nt, Human
uaugauuuauaguuugua

SEQ ID NO: 3698814 - RNA, 18 nt, Human
uaugauuuggaaaauaaa

SEQ ID NO: 3698815 - RNA, 16 nt, Human
uaugauuuuauuugac

SEQ ID NO: 3698816 - RNA, 14 nt, Human
uaugauuuucauaa

SEQ ID NO: 3698817 - RNA, 12 nt, Human
uaugauuuuuaa

SEQ ID NO: 3698818 - RNA, 23 nt, Human
uaugauuuuuaaagaaaaguuuu

SEQ ID NO: 3698819 - RNA, 18 nt, Human
uaugauuuuuuaaaagaa

SEQ ID NO: 3698820 - RNA, 12 nt, Human
uaugcaaagcac

SEQ ID NO: 3698821 - RNA, 16 nt, Human
uucugcagcuguuuua

SEQ ID NO: 3698822 - RNA, 23 nt, Human
uucugcagguugaagccaugucu

SEQ ID NO: 3698823 - RNA, 15 nt, Human
uucugcaguaaaucu

SEQ ID NO: 3698824 - RNA, 18 nt, Human
uucugcaguaaaucuuuu

SEQ ID NO: 3698825 - RNA, 22 nt, Human
uucugcaguaaaucuuuuacaa

SEQ ID NO: 3698826 - RNA, 21 nt, Human
uucugcauauguugaauacuu

SEQ ID NO: 3698827 - RNA, 16 nt, Human
uucugcaucagcugcu

SEQ ID NO: 3698828 - RNA, 23 nt, Human
uucugcaucagcugcugaaacaa

SEQ ID NO: 3698829 - RNA, 13 nt, Human
uucugcauugcua

SEQ ID NO: 3698830 - RNA, 23 nt, Human
uucugcauuuuauucuggaugga

SEQ ID NO: 3698831 - RNA, 17 nt, Human
uucugcauuuugcuauu

SEQ ID NO: 3698832 - RNA, 15 nt, Human
uucugccacauaaaa

SEQ ID NO: 3698833 - RNA, 15 nt, Human
uucugccagggagcu

SEQ ID NO: 3698834 - RNA, 13 nt, Human
uucugcccccagc

SEQ ID NO: 3698835 - RNA, 16 nt, Human
uucugcccuggcugcu

SEQ ID NO: 3698836 - RNA, 18 nt, Human
uucugcccuggcugcugc

SEQ ID NO: 3698837 - RNA, 20 nt, Human
uucugcccuggcugcugccc

SEQ ID NO: 3698838 - RNA, 22 nt, Human
uucugccgaccccuaguucccu

SEQ ID NO: 3698839 - RNA, 15 nt, Human
uucugccgcccccuc

SEQ ID NO: 3698840 - RNA, 17 nt, Human
uucugccggcccugggg

SEQ ID NO: 3698841 - RNA, 14 nt, Human
uucugccuccccuu

SEQ ID NO: 3698842 - RNA, 18 nt, Human
uucugccucucuaggacc

SEQ ID NO: 3698843 - RNA, 15 nt, Human
uucugccucugaugu

SEQ ID NO: 3698844 - RNA, 23 nt, Human
uucugccugaggggcagccugcc

SEQ ID NO: 3698845 - RNA, 16 nt, Human
uucugccugccagcug

SEQ ID NO: 3698846 - RNA, 22 nt, Human
uucugccugccagcugcacuga

SEQ ID NO: 3698847 - RNA, 21 nt, Human
uucugccuguuauaacucugc

SEQ ID NO: 3698848 - RNA, 15 nt, Human
uucugccuuugaugu

SEQ ID NO: 3698849 - RNA, 21 nt, Human
uucugccuuugccaggugacu

SEQ ID NO: 3698850 - RNA, 16 nt, Human
uucugccuuuucacug

SEQ ID NO: 3698851 - RNA, 15 nt, Human
uucugcucagcucug

SEQ ID NO: 3698852 - RNA, 19 nt, Human
uucugcucaucauucucug

SEQ ID NO: 3698853 - RNA, 9 nt, Human
uucugcucc

SEQ ID NO: 3698854 - RNA, 20 nt, Human
uucugcuccacccuuggccu

SEQ ID NO: 3698855 - RNA, 16 nt, Human
uucugcuccuucccca

SEQ ID NO: 3698856 - RNA, 23 nt, Human
uucugcucugguuguuucuguuc

SEQ ID NO: 3698857 - RNA, 18 nt, Human
uucugcuggaaacagacu

SEQ ID NO: 3698858 - RNA, 13 nt, Human
uucugcuggauaa

SEQ ID NO: 3698859 - RNA, 12 nt, Human
uucugcuggccu

SEQ ID NO: 3698860 - RNA, 20 nt, Human
uucugcugggcuggggccug

SEQ ID NO: 3698861 - RNA, 21 nt, Human
uucugcuggggccugggacaa

SEQ ID NO: 3698862 - RNA, 18 nt, Human
uucugcuuuccucuuccu

SEQ ID NO: 3698863 - RNA, 15 nt, Human
uucugcuuucuuuga

SEQ ID NO: 3698864 - RNA, 11 nt, Human
uucugcuuugu

SEQ ID NO: 3698865 - RNA, 18 nt, Human
uucuggaaaagaggaguu

SEQ ID NO: 3698866 - RNA, 17 nt, Human
uucuggaauacaugaaa

SEQ ID NO: 3698867 - RNA, 15 nt, Human
uucuggaauguaauc

SEQ ID NO: 3698868 - RNA, 16 nt, Human
uucuggaauguaauca

SEQ ID NO: 3698869 - RNA, 22 nt, Human
uucuggaauguaaucaauguuu

SEQ ID NO: 3698870 - RNA, 17 nt, Human
uucuggaauuuguucaa

SEQ ID NO: 3698871 - RNA, 19 nt, Human
uucuggacagucagcucuu

SEQ ID NO: 3698872 - RNA, 19 nt, Human
uucuggacccuuauaaaau

SEQ ID NO: 3698873 - RNA, 17 nt, Human
uucuggaccucuggguu

SEQ ID NO: 3698874 - RNA, 18 nt, Human
uucuggaccucuggguug

SEQ ID NO: 3698875 - RNA, 15 nt, Human
uucuggacuaaaacu

SEQ ID NO: 3698876 - RNA, 17 nt, Human
uucuggacuauagcugu

SEQ ID NO: 3698877 - RNA, 13 nt, Human
uucuggagcccuu

SEQ ID NO: 3698878 - RNA, 19 nt, Human
uucuggaggaaagggagga

SEQ ID NO: 3698879 - RNA, 20 nt, Human
uucuggagguugauaacuuu

SEQ ID NO: 3698880 - RNA, 13 nt, Human
uucuggauaaagc

SEQ ID NO: 3698881 - RNA, 19 nt, Human
uucuggauaaagccacuga

SEQ ID NO: 3698882 - RNA, 14 nt, Human
uucuggaugggaca

SEQ ID NO: 3698883 - RNA, 18 nt, Human
uucuggauggugugccuu

SEQ ID NO: 3698884 - RNA, 23 nt, Human
uucuggauggugugccuuccaga

SEQ ID NO: 3698885 - RNA, 15 nt, Human
uucuggcagaggagg

SEQ ID NO: 3698886 - RNA, 20 nt, Human
uucuggcagaguugaagaca

SEQ ID NO: 3698887 - RNA, 17 nt, Human
uucuggcagguccuccc

SEQ ID NO: 3698888 - RNA, 19 nt, Human
uucuggcagguccuccccu

SEQ ID NO: 3698889 - RNA, 18 nt, Human
uucuggccaguguuuaaa

SEQ ID NO: 3698890 - RNA, 22 nt, Human
uucuggccaguguuuaaaacuu

SEQ ID NO: 3698891 - RNA, 16 nt, Human
uucuggcuaugcauuu

SEQ ID NO: 3698892 - RNA, 10 nt, Human
uucuggcuca

SEQ ID NO: 3698893 - RNA, 19 nt, Human
uucuggcugaacacuggca

SEQ ID NO: 3698894 - RNA, 22 nt, Human
uucuggcuggagccuagaacag

SEQ ID NO: 3698895 - RNA, 17 nt, Human
uucugggaaauggcuug

SEQ ID NO: 3698896 - RNA, 23 nt, Human
uucugggaaauggcuugaagcca

SEQ ID NO: 3698897 - RNA, 23 nt, Human
uucugggaauguauaguauuuga

SEQ ID NO: 3698898 - RNA, 16 nt, Human
uucugggaggaagcag

SEQ ID NO: 3698899 - RNA, 21 nt, Human
uucugggagggcagcagggcu

SEQ ID NO: 3698900 - RNA, 20 nt, Human
uucugggcaccacaaaauau

SEQ ID NO: 3698901 - RNA, 16 nt, Human
uucugggcucuuuccu

SEQ ID NO: 3698902 - RNA, 16 nt, Human
uucugggcuucaucug

SEQ ID NO: 3698903 - RNA, 14 nt, Human
uucuggggaaagac

SEQ ID NO: 3698904 - RNA, 20 nt, Human
uucuggggaaagacacugcc

SEQ ID NO: 3698905 - RNA, 22 nt, Human
uucuggggaaagacacugccug

SEQ ID NO: 3698906 - RNA, 18 nt, Human
uucuggggcaggcugggc

SEQ ID NO: 3698907 - RNA, 14 nt, Human
uucuggggccccuu

SEQ ID NO: 3698908 - RNA, 19 nt, Human
uucuggggggacccagugc

SEQ ID NO: 3698909 - RNA, 21 nt, Human
uucuggggggacccagugcag

SEQ ID NO: 3698910 - RNA, 14 nt, Human
uucuggggucccca

SEQ ID NO: 3698911 - RNA, 15 nt, Human
uucugggguuuuucu

SEQ ID NO: 3698912 - RNA, 19 nt, Human
uucuggguggggcaguggg

SEQ ID NO: 3698913 - RNA, 13 nt, Human
uucugggugucca

SEQ ID NO: 3698914 - RNA, 18 nt, Human
uucugguacucuccuaga

SEQ ID NO: 3698915 - RNA, 15 nt, Human
uucugguacuuucug

SEQ ID NO: 3698916 - RNA, 17 nt, Human
uucugguacuuucuguu

SEQ ID NO: 3698917 - RNA, 17 nt, Human
uucugguagauagaaau

SEQ ID NO: 3698918 - RNA, 22 nt, Human
uucugguaggaauagcauguca

SEQ ID NO: 3698919 - RNA, 22 nt, Human
uucugguaugaacuugaggaca

SEQ ID NO: 3698920 - RNA, 14 nt, Human
uucugguccuuuuu

SEQ ID NO: 3698921 - RNA, 16 nt, Human
uucugguccuuuuugg

SEQ ID NO: 3698922 - RNA, 13 nt, Human
uucuggucucguc

SEQ ID NO: 3698923 - RNA, 19 nt, Human
uucuggugggguguguucc

SEQ ID NO: 3698924 - RNA, 21 nt, Human
uucuggugugaacuaaacuuu

SEQ ID NO: 3698925 - RNA, 15 nt, Human
uucugguuagcucag

SEQ ID NO: 3698926 - RNA, 16 nt, Human
uucugguuagcucagc

SEQ ID NO: 3698927 - RNA, 19 nt, Human
uucugguuagcucagcccc

SEQ ID NO: 3698928 - RNA, 21 nt, Human
uucugguucuuguguuggcug

SEQ ID NO: 3698929 - RNA, 22 nt, Human
uucugguugaugccugugaacu

SEQ ID NO: 3698930 - RNA, 17 nt, Human
uucugguuuaaacuugu

SEQ ID NO: 3698931 - RNA, 22 nt, Human
uucugguuuaaacuuguuugcu

SEQ ID NO: 3698932 - RNA, 19 nt, Human
uucuguaaaauggaaaacu

SEQ ID NO: 3698933 - RNA, 17 nt, Human
uucuguaaaaugucugu

SEQ ID NO: 3698934 - RNA, 19 nt, Human
uucuguaagaaaccuacug

SEQ ID NO: 3698935 - RNA, 13 nt, Human
uucuguaauugug

SEQ ID NO: 3698936 - RNA, 15 nt, Human
uucuguacauagccu

SEQ ID NO: 3698937 - RNA, 18 nt, Human
uucuguacauagccuaua

SEQ ID NO: 3698938 - RNA, 12 nt, Human
uucuguaccagu

SEQ ID NO: 3698939 - RNA, 21 nt, Human
uucuguaccaguuaauuuuuc

SEQ ID NO: 3698940 - RNA, 15 nt, Human
uucuguacuguuacu

SEQ ID NO: 3698941 - RNA, 21 nt, Human
uucuguagaaaugguuguauu

SEQ ID NO: 3698942 - RNA, 20 nt, Human
uucuguagagccuucugaug

SEQ ID NO: 3698943 - RNA, 16 nt, Human
uucuguagguucugug

SEQ ID NO: 3698944 - RNA, 20 nt, Human
uucuguaguacuccuuaaga

SEQ ID NO: 3698945 - RNA, 21 nt, Human
uucuguauaaagccuguauuc

SEQ ID NO: 3698946 - RNA, 13 nt, Human
uucuguauacaac

SEQ ID NO: 3698947 - RNA, 23 nt, Human
uucuguauacaacccuggcauua

SEQ ID NO: 3698948 - RNA, 14 nt, Human
uucuguauagauua

SEQ ID NO: 3698949 - RNA, 17 nt, Human
uucuguauauaaauggg

SEQ ID NO: 3698950 - RNA, 15 nt, Human
uucuguauauacuuu

SEQ ID NO: 3698951 - RNA, 11 nt, Human
uucuguauuug

SEQ ID NO: 3698952 - RNA, 15 nt, Human
uucuguauuugaaag

SEQ ID NO: 3698953 - RNA, 13 nt, Human
uucugucacucag

SEQ ID NO: 3698954 - RNA, 22 nt, Human
uucugucagaugagaacaaagc

SEQ ID NO: 3698955 - RNA, 13 nt, Human
uucugucccuagg

SEQ ID NO: 3698956 - RNA, 18 nt, Human
uucugucgccuuagcaug

SEQ ID NO: 3698957 - RNA, 21 nt, Human
uucugucgccuuagcauguuu

SEQ ID NO: 3698958 - RNA, 14 nt, Human
uucugucucugccu

SEQ ID NO: 3698959 - RNA, 22 nt, Human
uucugucuucauccccucagaa

SEQ ID NO: 3698960 - RNA, 19 nt, Human
uucugugagacccccacac

SEQ ID NO: 3698961 - RNA, 18 nt, Human
uucugugaugagcugauc

SEQ ID NO: 3698962 - RNA, 19 nt, Human
uucugugcccagaauacug

SEQ ID NO: 3698963 - RNA, 20 nt, Human
uucugugcccagaauacuga

SEQ ID NO: 3698964 - RNA, 14 nt, Human
uucugugcccagcu

SEQ ID NO: 3698965 - RNA, 16 nt, Human
uucugugccugaauau

SEQ ID NO: 3698966 - RNA, 19 nt, Human
uucuguggaaaguguaaag

SEQ ID NO: 3698967 - RNA, 21 nt, Human
uucuguggaaaguguaaagca

SEQ ID NO: 3698968 - RNA, 22 nt, Human
uucuguggcgaggcaugcuauc

SEQ ID NO: 3698969 - RNA, 12 nt, Human
uucuguggcuca

SEQ ID NO: 3698970 - RNA, 12 nt, Human
uuuaugagaaau

SEQ ID NO: 3698971 - RNA, 14 nt, Human
uuuaugagaaaugu

SEQ ID NO: 3698972 - RNA, 14 nt, Human
uuuaugagauggau

SEQ ID NO: 3698973 - RNA, 23 nt, Human
uuuaugagcucauguagcaauca

SEQ ID NO: 3698974 - RNA, 20 nt, Human
uuuaugaguaacuauuauua

SEQ ID NO: 3698975 - RNA, 22 nt, Human
uuuaugauacuugaaaauuaac

SEQ ID NO: 3698976 - RNA, 14 nt, Human
uuuaugaucagugu

SEQ ID NO: 3698977 - RNA, 21 nt, Human
uuuaugaucaguguuguugcu

SEQ ID NO: 3698978 - RNA, 17 nt, Human
uuuaugaugaugaaaau

SEQ ID NO: 3698979 - RNA, 19 nt, Human
uuuaugauuuucauaacuu

SEQ ID NO: 3698980 - RNA, 22 nt, Human
uuuaugauuuucauaacuuauu

SEQ ID NO: 3698981 - RNA, 16 nt, Human
uuuaugcaaaagguuu

SEQ ID NO: 3698982 - RNA, 16 nt, Human
uuuaugcaaauauuuu

SEQ ID NO: 3698983 - RNA, 17 nt, Human
uuuaugcaaggaaggaa

SEQ ID NO: 3698984 - RNA, 18 nt, Human
uuuaugcaaggaaggaaa

SEQ ID NO: 3698985 - RNA, 19 nt, Human
uuuaugcagugcugcuuug

SEQ ID NO: 3698986 - RNA, 14 nt, Human
uuuaugcauauuau

SEQ ID NO: 3698987 - RNA, 20 nt, Human
uuuaugcauuugcauuugcu

SEQ ID NO: 3698988 - RNA, 16 nt, Human
uuuaugcucaauccau

SEQ ID NO: 3698989 - RNA, 14 nt, Human
uuuaugcucuuuuu

SEQ ID NO: 3698990 - RNA, 12 nt, Human
uuuaugcuuuaa

SEQ ID NO: 3698991 - RNA, 17 nt, Human
uuuauggaaucuaccaa

SEQ ID NO: 3698992 - RNA, 23 nt, Human
uuuauggaggauggagagagggg

SEQ ID NO: 3698993 - RNA, 17 nt, Human
uuuauggcacuaguauu

SEQ ID NO: 3698994 - RNA, 21 nt, Human
uuuauggcagacauugugcua

SEQ ID NO: 3698995 - RNA, 22 nt, Human
uuuauggccacauuuaauaucu

SEQ ID NO: 3698996 - RNA, 22 nt, Human
uuuauggccucagcugccucac

SEQ ID NO: 3698997 - RNA, 19 nt, Human
uuuaugguaaaaaauuuau

SEQ ID NO: 3698998 - RNA, 21 nt, Human
uuuaugguaacugcuuucugu

SEQ ID NO: 3698999 - RNA, 18 nt, Human
uuuaugguaaucauauua

SEQ ID NO: 3699000 - RNA, 18 nt, Human
uuuaugguccuaaaagca

SEQ ID NO: 3699001 - RNA, 21 nt, Human
uuuaugguuacuucuucucuu

SEQ ID NO: 3699002 - RNA, 15 nt, Human
uuuaugguuauguuu

SEQ ID NO: 3699003 - RNA, 16 nt, Human
uuuaugguuauguuuu

SEQ ID NO: 3699004 - RNA, 21 nt, Human
uuuaugguuauguuuuucugu

SEQ ID NO: 3699005 - RNA, 21 nt, Human
uuuaugguuucccccuucuac

SEQ ID NO: 3699006 - RNA, 19 nt, Human
uuuauguaaugaaguaaag

SEQ ID NO: 3699007 - RNA, 22 nt, Human
uuuauguaaugaaguaaagcca

SEQ ID NO: 3699008 - RNA, 20 nt, Human
uuuauguauguuuacacugu

SEQ ID NO: 3699009 - RNA, 11 nt, Human
uuuauguauug

SEQ ID NO: 3699010 - RNA, 22 nt, Human
uuuaugucccuucacauaguuu

SEQ ID NO: 3699011 - RNA, 14 nt, Human
uuuaugugaaacau

SEQ ID NO: 3699012 - RNA, 15 nt, Human
uuuaugugaauuuuu

SEQ ID NO: 3699013 - RNA, 20 nt, Human
uuuaugugaauuuuuaagcu

SEQ ID NO: 3699014 - RNA, 18 nt, Human
uuuaugugugaggagcug

SEQ ID NO: 3699015 - RNA, 21 nt, Human
uuuauguuauauauaaauaua

SEQ ID NO: 3699016 - RNA, 17 nt, Human
uuuauguucauuuguuu

SEQ ID NO: 3699017 - RNA, 11 nt, Human
uuuauguugac

SEQ ID NO: 3699018 - RNA, 14 nt, Human
uuuauguugacauu

SEQ ID NO: 3699019 - RNA, 17 nt, Human
uuuauguugacauuugu

SEQ ID NO: 3699020 - RNA, 18 nt, Human
uuuauguugacauuuguu

SEQ ID NO: 3699021 - RNA, 13 nt, Human
uuuauguuugaau

SEQ ID NO: 3699022 - RNA, 14 nt, Human
uuuauguuugucuu

SEQ ID NO: 3699023 - RNA, 18 nt, Human
uuuauguuuuguuucuga

SEQ ID NO: 3699024 - RNA, 12 nt, Human
uuuauuaaaaca

SEQ ID NO: 3699025 - RNA, 18 nt, Human
uuuauuaaaauauuucag

SEQ ID NO: 3699026 - RNA, 14 nt, Human
uuuauuaaaaucuu

SEQ ID NO: 3699027 - RNA, 15 nt, Human
uuuauuaaaaucuua

SEQ ID NO: 3699028 - RNA, 23 nt, Human
uuuauuaaacagauuuuuacaaa

SEQ ID NO: 3699029 - RNA, 12 nt, Human
uuuauuaaagaa

SEQ ID NO: 3699030 - RNA, 11 nt, Human
uuuauuaaaua

SEQ ID NO: 3699031 - RNA, 19 nt, Human
uuuauuaaauaaaaucaau

SEQ ID NO: 3699032 - RNA, 12 nt, Human
uuuauuaacaaa

SEQ ID NO: 3699033 - RNA, 16 nt, Human
uuuauuaauaaacauu

SEQ ID NO: 3699034 - RNA, 21 nt, Human
uuuauuaauaaacauucuauc

SEQ ID NO: 3699035 - RNA, 19 nt, Human
uuuauuaaucacuguguau

SEQ ID NO: 3699036 - RNA, 21 nt, Human
uuuauuaaucacuguguauau

SEQ ID NO: 3699037 - RNA, 19 nt, Human
uuuauuaaucuuaguguau

SEQ ID NO: 3699038 - RNA, 12 nt, Human
uuuauuaccagu

SEQ ID NO: 3699039 - RNA, 14 nt, Human
uuuauuaccucuga

SEQ ID NO: 3699040 - RNA, 16 nt, Human
uuuauuacguaugucu

SEQ ID NO: 3699041 - RNA, 18 nt, Human
uuuauuacguaugucugg

SEQ ID NO: 3699042 - RNA, 13 nt, Human
uuuauuacugauu

SEQ ID NO: 3699043 - RNA, 21 nt, Human
uuuauuacuguuuauuacuuc

SEQ ID NO: 3699044 - RNA, 21 nt, Human
uuuauuaugaaacuuguguaa

SEQ ID NO: 3699045 - RNA, 17 nt, Human
uuuauuaugcauuauau

SEQ ID NO: 3699046 - RNA, 14 nt, Human
uuuauuauguaaau

SEQ ID NO: 3699047 - RNA, 21 nt, Human
uuuauuauguacaaauagauu

SEQ ID NO: 3699048 - RNA, 14 nt, Human
uuuauucaaacuga

SEQ ID NO: 3699049 - RNA, 12 nt, Human
uuuauucaaggu

SEQ ID NO: 3699050 - RNA, 13 nt, Human
uuuauucaauaaa

SEQ ID NO: 3699051 - RNA, 17 nt, Human
uuuauucaauuccucug

SEQ ID NO: 3699052 - RNA, 15 nt, Human
uuuauucauaugcau

SEQ ID NO: 3699053 - RNA, 22 nt, Human
uuuauuccagaaugcuguacau

SEQ ID NO: 3699054 - RNA, 23 nt, Human
uuuauuccagaaugcuguacauc

SEQ ID NO: 3699055 - RNA, 13 nt, Human
uuuauuccagagc

SEQ ID NO: 3699056 - RNA, 17 nt, Human
uuuauucuugugaauau

SEQ ID NO: 3699057 - RNA, 16 nt, Human
uuuauucuuuuuaaag

SEQ ID NO: 3699058 - RNA, 12 nt, Human
uuuauugacaca

SEQ ID NO: 3699059 - RNA, 14 nt, Human
uuuauugagaaaga

SEQ ID NO: 3699060 - RNA, 16 nt, Human
uuuauugagaaagagc

SEQ ID NO: 3699061 - RNA, 20 nt, Human
uuuauugaggaaaaauaugu

SEQ ID NO: 3699062 - RNA, 17 nt, Human
uuuauugcacaaaauau

SEQ ID NO: 3699063 - RNA, 22 nt, Human
uuuauugccaaaacccagcugc

SEQ ID NO: 3699064 - RNA, 13 nt, Human
uuuauugccuucu

SEQ ID NO: 3699065 - RNA, 23 nt, Human
uuuauugccuuuuaauuuuuaau

SEQ ID NO: 3699066 - RNA, 17 nt, Human
uuuauugcuugauacuu

SEQ ID NO: 3699067 - RNA, 14 nt, Human
uuuauugcuuuaua

SEQ ID NO: 3699068 - RNA, 16 nt, Human
uuuauuguaacagaca

SEQ ID NO: 3699069 - RNA, 20 nt, Human
uuuauuguaacagacauugu

SEQ ID NO: 3699070 - RNA, 22 nt, Human
uuuauuguaacagacauuguuu

SEQ ID NO: 3699071 - RNA, 13 nt, Human
uuuauuguauucu

SEQ ID NO: 3699072 - RNA, 14 nt, Human
uuuauuguauucug

SEQ ID NO: 3699073 - RNA, 18 nt, Human
uuuauuguauucuggggu

SEQ ID NO: 3699074 - RNA, 12 nt, Human
uuuauugucugu

SEQ ID NO: 3699075 - RNA, 14 nt, Human
uuuauugucuguaa

SEQ ID NO: 3699076 - RNA, 22 nt, Human
uuuauuguuuucuauuuaugcc

SEQ ID NO: 3699077 - RNA, 15 nt, Human
uuuauuuaaaagauu

SEQ ID NO: 3699078 - RNA, 22 nt, Human
uuuauuuaacuuuuaguaaagu

SEQ ID NO: 3699079 - RNA, 19 nt, Human
uuuauuuaaugcuguggca

SEQ ID NO: 3699080 - RNA, 17 nt, Human
uuuauuuaauguuaugu

SEQ ID NO: 3699081 - RNA, 11 nt, Human
uuuauuuacua

SEQ ID NO: 3699082 - RNA, 16 nt, Human
uuuauuuacugcuagu

SEQ ID NO: 3699083 - RNA, 15 nt, Human
uuuauuuauacuauu

SEQ ID NO: 3699084 - RNA, 14 nt, Human
uuuauuuaugaagu

SEQ ID NO: 3699085 - RNA, 14 nt, Human
uuuauuuauguacu

SEQ ID NO: 3699086 - RNA, 14 nt, Human
uuuauuuauuaaga

SEQ ID NO: 3699087 - RNA, 13 nt, Human
uuuauuuauuuau

SEQ ID NO: 3699088 - RNA, 16 nt, Human
uuuauuuauuuauuca

SEQ ID NO: 3699089 - RNA, 15 nt, Human
uuuauuuauuuuauc

SEQ ID NO: 3699090 - RNA, 11 nt, Human
uuuauuucacu

SEQ ID NO: 3699091 - RNA, 13 nt, Human
uuuauuuccagug

SEQ ID NO: 3699092 - RNA, 16 nt, Human
uuuauuucuccuuuug

SEQ ID NO: 3699093 - RNA, 16 nt, Human
uuuauuucugcauaug

SEQ ID NO: 3699094 - RNA, 16 nt, Human
uuuauuuguaaauuua

SEQ ID NO: 3699095 - RNA, 12 nt, Human
uuuauuuguuga

SEQ ID NO: 3699096 - RNA, 12 nt, Human
uuuauuuuauga

SEQ ID NO: 3699097 - RNA, 16 nt, Human
uuuauuuuauguuuag

SEQ ID NO: 3699098 - RNA, 16 nt, Human
uuuauuuucuuuugaa

SEQ ID NO: 3699099 - RNA, 21 nt, Human
uuuauuuucuuuuguaaaugu

SEQ ID NO: 3699100 - RNA, 18 nt, Human
uuuauuuugaaauggaaa

SEQ ID NO: 3699101 - RNA, 15 nt, Human
uuuauuuuguaugaa

SEQ ID NO: 3699102 - RNA, 21 nt, Human
uuuauuuuguaugaaauauau

SEQ ID NO: 3699103 - RNA, 13 nt, Human
uuuauuuugugua

SEQ ID NO: 3699104 - RNA, 15 nt, Human
uuuauuuuguuaaaa

SEQ ID NO: 3699105 - RNA, 23 nt, Human
uuuauuuuuagaauuuugugaaa

SEQ ID NO: 3699106 - RNA, 12 nt, Human
uuuauuuuucau

SEQ ID NO: 3699107 - RNA, 17 nt, Human
uuuauuuuucuugucuu

SEQ ID NO: 3699108 - RNA, 16 nt, Human
uuuauuuuuuauacag

SEQ ID NO: 3699109 - RNA, 13 nt, Human
uuuauuuuuuggg

SEQ ID NO: 3699110 - RNA, 17 nt, Human
uuuauuuuuuucugaau

SEQ ID NO: 3699111 - RNA, 15 nt, Human
uuucaaaaaaauaaa

SEQ ID NO: 3699112 - RNA, 13 nt, Human
uuucaaaaacauu

SEQ ID NO: 3699113 - RNA, 17 nt, Human
uuucaaaaauauaacuu

SEQ ID NO: 3699114 - RNA, 22 nt, Human
uuucaaaaauuuggaauucugu

SEQ ID NO: 3699115 - RNA, 12 nt, Human
uuucaaaaccag

SEQ ID NO: 3699116 - RNA, 20 nt, Human
uuucaaaauagaaaaguuau

SEQ ID NO: 3699117 - RNA, 17 nt, Human
uuucaaaauccaaaaag

SEQ ID NO: 3699118 - RNA, 19 nt, Human
uuucaaaauccaaaaagaa

SEQ ID NO: 3699119 - RNA, 22 nt, Human
uuucaaaauuguuacaaauugu

SEQ ID NO: 3699120 - RNA, 17 nt, Human
uuucaaacacaaaugca

SEQ ID NO: 3699121 - RNA, 14 nt, Human
uaugcaaagcacug

SEQ ID NO: 3699122 - RNA, 17 nt, Human
uaugcaaggaaggaaag

SEQ ID NO: 3699123 - RNA, 20 nt, Human
uaugcaaggaaggaaagaaa

SEQ ID NO: 3699124 - RNA, 21 nt, Human
uaugcaauaaaauuauuugca

SEQ ID NO: 3699125 - RNA, 15 nt, Human
uaugcaauauaucua

SEQ ID NO: 3699126 - RNA, 20 nt, Human
uaugcaaucaaaucugcuuu

SEQ ID NO: 3699127 - RNA, 15 nt, Human
uaugcacaauuccau

SEQ ID NO: 3699128 - RNA, 14 nt, Human
uaugcacacauuuu

SEQ ID NO: 3699129 - RNA, 16 nt, Human
uaugcacaugaacuua

SEQ ID NO: 3699130 - RNA, 14 nt, Human
uaugcaccuugugu

SEQ ID NO: 3699131 - RNA, 20 nt, Human
uaugcaccuugugucuguac

SEQ ID NO: 3699132 - RNA, 22 nt, Human
uaugcaccuugugucuguacac

SEQ ID NO: 3699133 - RNA, 17 nt, Human
uaugcacgaccuuggga

SEQ ID NO: 3699134 - RNA, 16 nt, Human
uaugcacuaagucucu

SEQ ID NO: 3699135 - RNA, 18 nt, Human
uaugcagaaauagacaaa

SEQ ID NO: 3699136 - RNA, 21 nt, Human
uaugcagaaauagacaaaaag

SEQ ID NO: 3699137 - RNA, 18 nt, Human
uaugcagaacacauuuca

SEQ ID NO: 3699138 - RNA, 14 nt, Human
uaugcagaauguuu

SEQ ID NO: 3699139 - RNA, 17 nt, Human
uaugcagauagaaucaa

SEQ ID NO: 3699140 - RNA, 19 nt, Human
uaugcaguauugagcacug

SEQ ID NO: 3699141 - RNA, 18 nt, Human
uaugcaguguagauuuua

SEQ ID NO: 3699142 - RNA, 15 nt, Human
uaugcauaaagucag

SEQ ID NO: 3699143 - RNA, 17 nt, Human
uaugcauauauauaugu

SEQ ID NO: 3699144 - RNA, 14 nt, Human
uaugcauauuuguu

SEQ ID NO: 3699145 - RNA, 16 nt, Human
uaugcaucuaauaaaa

SEQ ID NO: 3699146 - RNA, 22 nt, Human
uaugcaugaaguaauaugcaca

SEQ ID NO: 3699147 - RNA, 22 nt, Human
uaugcaugguguagaugcccug

SEQ ID NO: 3699148 - RNA, 24 nt, Human
uaugcauuugaaaauuuugauguu

SEQ ID NO: 3699149 - RNA, 20 nt, Human
uaugccacuuccuuuuaacu

SEQ ID NO: 3699150 - RNA, 14 nt, Human
uaugccagcucagu

SEQ ID NO: 3699151 - RNA, 17 nt, Human
uaugccagcucaguccc

SEQ ID NO: 3699152 - RNA, 17 nt, Human
uaugccucuccuuugua

SEQ ID NO: 3699153 - RNA, 18 nt, Human
uaugccucuccuuuguau

SEQ ID NO: 3699154 - RNA, 21 nt, Human
uaugccucuccuuuguauauu

SEQ ID NO: 3699155 - RNA, 14 nt, Human
uaugccugcucuuu

SEQ ID NO: 3699156 - RNA, 10 nt, Human
uaugccugug

SEQ ID NO: 3699157 - RNA, 14 nt, Human
uaugccuucuuauu

SEQ ID NO: 3699158 - RNA, 19 nt, Human
uaugccuucuuauugcuuu

SEQ ID NO: 3699159 - RNA, 18 nt, Human
uaugccuuggggaggaca

SEQ ID NO: 3699160 - RNA, 23 nt, Human
uaugccuuggggaggacaaaacu

SEQ ID NO: 3699161 - RNA, 20 nt, Human
uaugccuuuaaaucugugau

SEQ ID NO: 3699162 - RNA, 13 nt, Human
uaugcgguuaauu

SEQ ID NO: 3699163 - RNA, 19 nt, Human
uaugcuaccaccagcugug

SEQ ID NO: 3699164 - RNA, 18 nt, Human
uaugcuauugacaauaaa

SEQ ID NO: 3699165 - RNA, 15 nt, Human
uaugcuauuucuaua

SEQ ID NO: 3699166 - RNA, 18 nt, Human
uaugcuauuucuauauuu

SEQ ID NO: 3699167 - RNA, 23 nt, Human
uaugcuauuucuauauuuucauu

SEQ ID NO: 3699168 - RNA, 14 nt, Human
uaugcucuuuuguu

SEQ ID NO: 3699169 - RNA, 19 nt, Human
uaugcugaaacagaauacu

SEQ ID NO: 3699170 - RNA, 15 nt, Human
uaugcugaguuugug

SEQ ID NO: 3699171 - RNA, 20 nt, Human
uaugcugaucaucgccagag

SEQ ID NO: 3699172 - RNA, 11 nt, Human
uaugcugcuuu

SEQ ID NO: 3699173 - RNA, 12 nt, Human
uaugcugcuuuu

SEQ ID NO: 3699174 - RNA, 16 nt, Human
uaugcuguaaaagcaa

SEQ ID NO: 3699175 - RNA, 14 nt, Human
uaugcuguaucugu

SEQ ID NO: 3699176 - RNA, 15 nt, Human
uaugcuguaucugug

SEQ ID NO: 3699177 - RNA, 15 nt, Human
uaugcuguauuuucu

SEQ ID NO: 3699178 - RNA, 16 nt, Human
uaugcuguauuuucuu

SEQ ID NO: 3699179 - RNA, 16 nt, Human
uaugcuuaaaauaagc

SEQ ID NO: 3699180 - RNA, 21 nt, Human
uaugcuuacugauauauuuua

SEQ ID NO: 3699181 - RNA, 17 nt, Human
uaugcuuaguaaugcua

SEQ ID NO: 3699182 - RNA, 15 nt, Human
uaugcuuauacacuu

SEQ ID NO: 3699183 - RNA, 13 nt, Human
uaugcuuauuuua

SEQ ID NO: 3699184 - RNA, 14 nt, Human
uaugcuuauuuuaa

SEQ ID NO: 3699185 - RNA, 13 nt, Human
uaugcuucauaca

SEQ ID NO: 3699186 - RNA, 17 nt, Human
uaugcuucauacaggga

SEQ ID NO: 3699187 - RNA, 15 nt, Human
uaugcuucuguuuua

SEQ ID NO: 3699188 - RNA, 13 nt, Human
uaugcuucuugga

SEQ ID NO: 3699189 - RNA, 20 nt, Human
uaugcuuguaacuaaaauaa

SEQ ID NO: 3699190 - RNA, 13 nt, Human
uaugcuuuauuaa

SEQ ID NO: 3699191 - RNA, 21 nt, Human
uaugcuuuccaaaccuuaucu

SEQ ID NO: 3699192 - RNA, 15 nt, Human
uaugcuuugaaacag

SEQ ID NO: 3699193 - RNA, 21 nt, Human
uauggaaaaaccauuugaagu

SEQ ID NO: 3699194 - RNA, 20 nt, Human
uauggaaaaauaaaacuguc

SEQ ID NO: 3699195 - RNA, 13 nt, Human
uauggaaaacugu

SEQ ID NO: 3699196 - RNA, 13 nt, Human
uauggaacucucu

SEQ ID NO: 3699197 - RNA, 17 nt, Human
uauggaacuucuaauau

SEQ ID NO: 3699198 - RNA, 14 nt, Human
uauggaagaaagua

SEQ ID NO: 3699199 - RNA, 22 nt, Human
uauggaagcauauuguuauuau

SEQ ID NO: 3699200 - RNA, 19 nt, Human
uauggaaggguuuguggcu

SEQ ID NO: 3699201 - RNA, 18 nt, Human
uauggaaguugcauaauu

SEQ ID NO: 3699202 - RNA, 23 nt, Human
uauggaauacaguguuauuuucu

SEQ ID NO: 3699203 - RNA, 19 nt, Human
uauggaauugauuugcauu

SEQ ID NO: 3699204 - RNA, 20 nt, Human
uauggaauuuauaauucagu

SEQ ID NO: 3699205 - RNA, 22 nt, Human
uauggacacuggugccauguca

SEQ ID NO: 3699206 - RNA, 16 nt, Human
uauggacggugcucca

SEQ ID NO: 3699207 - RNA, 16 nt, Human
uauggacucugcacau

SEQ ID NO: 3699208 - RNA, 15 nt, Human
uauggagagaaaaca

SEQ ID NO: 3699209 - RNA, 14 nt, Human
uauggagagcccug

SEQ ID NO: 3699210 - RNA, 23 nt, Human
uauggaggagaguguuuaacuga

SEQ ID NO: 3699211 - RNA, 15 nt, Human
uauggaggauggaga

SEQ ID NO: 3699212 - RNA, 19 nt, Human
uauggaggcuuugcauaga

SEQ ID NO: 3699213 - RNA, 20 nt, Human
uauggaugauucagaaauug

SEQ ID NO: 3699214 - RNA, 15 nt, Human
uauggauguccccag

SEQ ID NO: 3699215 - RNA, 22 nt, Human
uauggauucauuuauaagaaga

SEQ ID NO: 3699216 - RNA, 15 nt, Human
uauggauucuaaaau

SEQ ID NO: 3699217 - RNA, 19 nt, Human
uauggauuuucuaaggaag

SEQ ID NO: 3699218 - RNA, 22 nt, Human
uauggcagaagacaccagagca

SEQ ID NO: 3699219 - RNA, 20 nt, Human
uauggcagaguuguaaauau

SEQ ID NO: 3699220 - RNA, 14 nt, Human
uauggcagcgaaag

SEQ ID NO: 3699221 - RNA, 13 nt, Human
uauggcagugucu

SEQ ID NO: 3699222 - RNA, 13 nt, Human
uauggcauuugca

SEQ ID NO: 3699223 - RNA, 20 nt, Human
uauggcccuggccuagcaua

SEQ ID NO: 3699224 - RNA, 12 nt, Human
uauggccucagc

SEQ ID NO: 3699225 - RNA, 19 nt, Human
uauggccucagcugccuca

SEQ ID NO: 3699226 - RNA, 13 nt, Human
uauggccuguguc

SEQ ID NO: 3699227 - RNA, 17 nt, Human
uauggcuauaggugcua

SEQ ID NO: 3699228 - RNA, 21 nt, Human
uauggcugcauaguauuccau

SEQ ID NO: 3699229 - RNA, 16 nt, Human
uaugggacucaaugca

SEQ ID NO: 3699230 - RNA, 22 nt, Human
uaugggagagugucaaccagac

SEQ ID NO: 3699231 - RNA, 16 nt, Human
uaugggagccccaggg

SEQ ID NO: 3699232 - RNA, 21 nt, Human
uauggggaagguuaucagugc

SEQ ID NO: 3699233 - RNA, 18 nt, Human
uauggguaggguaaauca

SEQ ID NO: 3699234 - RNA, 11 nt, Human
uaugggucaca

SEQ ID NO: 3699235 - RNA, 22 nt, Human
uauggguguguguuugugugag

SEQ ID NO: 3699236 - RNA, 22 nt, Human
uauggguuagauguugccaugu

SEQ ID NO: 3699237 - RNA, 13 nt, Human
uauggguuuggcu

SEQ ID NO: 3699238 - RNA, 15 nt, Human
uaugguaaaaaauuu

SEQ ID NO: 3699239 - RNA, 21 nt, Human
uaugguacauuuuucaacuuu

SEQ ID NO: 3699240 - RNA, 16 nt, Human
uaugguaccagaugca

SEQ ID NO: 3699241 - RNA, 14 nt, Human
uaugguauuugagu

SEQ ID NO: 3699242 - RNA, 22 nt, Human
uauggucaacacuuaaggguuu

SEQ ID NO: 3699243 - RNA, 15 nt, Human
uauggucauagccca

SEQ ID NO: 3699244 - RNA, 17 nt, Human
uauggucuaauguuuaa

SEQ ID NO: 3699245 - RNA, 16 nt, Human
uauggugaacccacaa

SEQ ID NO: 3699246 - RNA, 22 nt, Human
uauggugcaauguguguauaug

SEQ ID NO: 3699247 - RNA, 20 nt, Human
uaugguuacuucuucucuua

SEQ ID NO: 3699248 - RNA, 21 nt, Human
uaugguugauaguuuaccuga

SEQ ID NO: 3699249 - RNA, 22 nt, Human
uaugguuuuugagauauuaaug

SEQ ID NO: 3699250 - RNA, 23 nt, Human
uauguaaaaauaaccuugcagaa

SEQ ID NO: 3699251 - RNA, 13 nt, Human
uauguaaaacauu

SEQ ID NO: 3699252 - RNA, 12 nt, Human
uauguaaaauaa

SEQ ID NO: 3699253 - RNA, 19 nt, Human
uauguaaaauaaaauuaug

SEQ ID NO: 3699254 - RNA, 14 nt, Human
uauguaaacauaau

SEQ ID NO: 3699255 - RNA, 19 nt, Human
uauguaaacugcauuagaa

SEQ ID NO: 3699256 - RNA, 17 nt, Human
uauguaaaguauguaaa

SEQ ID NO: 3699257 - RNA, 20 nt, Human
uauguaaaucccauuauuca

SEQ ID NO: 3699258 - RNA, 24 nt, Human
uauguaacugcauugagaacugca

SEQ ID NO: 3699259 - RNA, 21 nt, Human
uauguaagaauucagaagacc

SEQ ID NO: 3699260 - RNA, 15 nt, Human
uauguaagagcaccu

SEQ ID NO: 3699261 - RNA, 17 nt, Human
uauguaaucucuaggaa

SEQ ID NO: 3699262 - RNA, 16 nt, Human
uauguaaugaaguaaa

SEQ ID NO: 3699263 - RNA, 15 nt, Human
uauguaaugcaaaau

SEQ ID NO: 3699264 - RNA, 18 nt, Human
uauguacaauauuuuaag

SEQ ID NO: 3699265 - RNA, 20 nt, Human
uauguacaauauuuuaagca

SEQ ID NO: 3699266 - RNA, 18 nt, Human
uauguacaggaugcuuug

SEQ ID NO: 3699267 - RNA, 12 nt, Human
uauguacaguua

SEQ ID NO: 3699268 - RNA, 14 nt, Human
uauguacauauaua

SEQ ID NO: 3699269 - RNA, 14 nt, Human
uauguacauuucua

SEQ ID NO: 3699270 - RNA, 15 nt, Human
uauguacauuucuaa

SEQ ID NO: 3699271 - RNA, 16 nt, Human
uucuguggcucacaga

SEQ ID NO: 3699272 - RNA, 22 nt, Human
uucugugggagaauucuuacau

SEQ ID NO: 3699273 - RNA, 20 nt, Human
uucuguggggccccucaccu

SEQ ID NO: 3699274 - RNA, 22 nt, Human
uucuguggggccccucaccuac

SEQ ID NO: 3699275 - RNA, 23 nt, Human
uucuguggggccccucaccuacu

SEQ ID NO: 3699276 - RNA, 20 nt, Human
uucugugguuggcugggaaa

SEQ ID NO: 3699277 - RNA, 18 nt, Human
uucugugguuucauguua

SEQ ID NO: 3699278 - RNA, 15 nt, Human
uucuguguaaccauu

SEQ ID NO: 3699279 - RNA, 18 nt, Human
uucuguguaaccauuuua

SEQ ID NO: 3699280 - RNA, 14 nt, Human
uucuguguaucucu

SEQ ID NO: 3699281 - RNA, 23 nt, Human
uucugugucuuucacagcuccuc

SEQ ID NO: 3699282 - RNA, 17 nt, Human
uucugugugucaguuuu

SEQ ID NO: 3699283 - RNA, 21 nt, Human
uucugugugucaguuuucaua

SEQ ID NO: 3699284 - RNA, 22 nt, Human
uucugugugugaugugcauggg

SEQ ID NO: 3699285 - RNA, 16 nt, Human
uucuguguguuccugg

SEQ ID NO: 3699286 - RNA, 20 nt, Human
uucuguguuuaauuucuuca

SEQ ID NO: 3699287 - RNA, 17 nt, Human
uucuguguuuauucaaa

SEQ ID NO: 3699288 - RNA, 21 nt, Human
uucuguuaaaaucuauucugu

SEQ ID NO: 3699289 - RNA, 16 nt, Human
uucuguuaaaaugcau

SEQ ID NO: 3699290 - RNA, 14 nt, Human
uucuguuaacugaa

SEQ ID NO: 3699291 - RNA, 21 nt, Human
uucuguuauauccccugcuac

SEQ ID NO: 3699292 - RNA, 15 nt, Human
uucuguucauuuguu

SEQ ID NO: 3699293 - RNA, 20 nt, Human
uucuguucuguggaaagugu

SEQ ID NO: 3699294 - RNA, 18 nt, Human
uucuguucuuucuggcua

SEQ ID NO: 3699295 - RNA, 17 nt, Human
uucuguugcugccucau

SEQ ID NO: 3699296 - RNA, 21 nt, Human
uucuguuggccagugugacaa

SEQ ID NO: 3699297 - RNA, 11 nt, Human
uucuguuguaa

SEQ ID NO: 3699298 - RNA, 13 nt, Human
uucuguuguaacu

SEQ ID NO: 3699299 - RNA, 20 nt, Human
uucuguugucauugcuguug

SEQ ID NO: 3699300 - RNA, 19 nt, Human
uucuguuuaauuuucacuu

SEQ ID NO: 3699301 - RNA, 18 nt, Human
uucuguuuauggccacau

SEQ ID NO: 3699302 - RNA, 21 nt, Human
uucuguuucuaauuugcugcu

SEQ ID NO: 3699303 - RNA, 23 nt, Human
uucuguuucuaauuugcugcuga

SEQ ID NO: 3699304 - RNA, 22 nt, Human
uucuguuucuauucucuccuca

SEQ ID NO: 3699305 - RNA, 15 nt, Human
uucuguuugauucuu

SEQ ID NO: 3699306 - RNA, 14 nt, Human
uucuguuuguuaaa

SEQ ID NO: 3699307 - RNA, 14 nt, Human
uucuguuuucaauc

SEQ ID NO: 3699308 - RNA, 15 nt, Human
uucuguuuucuguuu

SEQ ID NO: 3699309 - RNA, 17 nt, Human
uucuguuuugccugaag

SEQ ID NO: 3699310 - RNA, 20 nt, Human
uucuguuuuucuaggccugg

SEQ ID NO: 3699311 - RNA, 15 nt, Human
uucuuaaaauauauu

SEQ ID NO: 3699312 - RNA, 18 nt, Human
uucuuaaaaugcaauauu

SEQ ID NO: 3699313 - RNA, 21 nt, Human
uucuuaaaaugcaauauuugu

SEQ ID NO: 3699314 - RNA, 17 nt, Human
uucuuaaacaaauguau

SEQ ID NO: 3699315 - RNA, 17 nt, Human
uucuuaaacacuugcaa

SEQ ID NO: 3699316 - RNA, 13 nt, Human
uucuuaaagaguu

SEQ ID NO: 3699317 - RNA, 17 nt, Human
uucuuaaagucaagauu

SEQ ID NO: 3699318 - RNA, 13 nt, Human
uucuuaaaguuga

SEQ ID NO: 3699319 - RNA, 18 nt, Human
uucuuaaauaagaaacuu

SEQ ID NO: 3699320 - RNA, 21 nt, Human
uucuuaaauaucuuuuauguu

SEQ ID NO: 3699321 - RNA, 21 nt, Human
uucuuaaaugggcuacuuugu

SEQ ID NO: 3699322 - RNA, 16 nt, Human
uucuuaacaaccuggc

SEQ ID NO: 3699323 - RNA, 13 nt, Human
uucuuaaccaucu

SEQ ID NO: 3699324 - RNA, 20 nt, Human
uucuuaacccuuuccagagu

SEQ ID NO: 3699325 - RNA, 13 nt, Human
uucuuaacuucuu

SEQ ID NO: 3699326 - RNA, 20 nt, Human
uucuuaaggauugugauauu

SEQ ID NO: 3699327 - RNA, 22 nt, Human
uucuuaaggauugugauauuuu

SEQ ID NO: 3699328 - RNA, 23 nt, Human
uucuuaaggugaggccugucugu

SEQ ID NO: 3699329 - RNA, 14 nt, Human
uucuuaaucauuuu

SEQ ID NO: 3699330 - RNA, 21 nt, Human
uucuuaauguacauagugcua

SEQ ID NO: 3699331 - RNA, 13 nt, Human
uucuuaauuaauu

SEQ ID NO: 3699332 - RNA, 22 nt, Human
uucuuaauuauuauaaaaauau

SEQ ID NO: 3699333 - RNA, 19 nt, Human
uucuuaauucaugaggagg

SEQ ID NO: 3699334 - RNA, 17 nt, Human
uucuuaauuuggaaacu

SEQ ID NO: 3699335 - RNA, 22 nt, Human
uucuuaauuuggaaacuaauaa

SEQ ID NO: 3699336 - RNA, 23 nt, Human
uucuuaauuuggaaacuaauaaa

SEQ ID NO: 3699337 - RNA, 16 nt, Human
uucuuacacauacagu

SEQ ID NO: 3699338 - RNA, 14 nt, Human
uucuuacaugcauu

SEQ ID NO: 3699339 - RNA, 16 nt, Human
uucuuacaugcauuug

SEQ ID NO: 3699340 - RNA, 12 nt, Human
uucuuacuccuc

SEQ ID NO: 3699341 - RNA, 14 nt, Human
uucuuacugcuuaa

SEQ ID NO: 3699342 - RNA, 23 nt, Human
uucuuacuugaugaguguaacaa

SEQ ID NO: 3699343 - RNA, 22 nt, Human
uucuuagaaauuuauuuccuag

SEQ ID NO: 3699344 - RNA, 18 nt, Human
uucuuagccuguggcagu

SEQ ID NO: 3699345 - RNA, 12 nt, Human
uucuuagcucaa

SEQ ID NO: 3699346 - RNA, 18 nt, Human
uucuuaggggaaggagaa

SEQ ID NO: 3699347 - RNA, 13 nt, Human
uucuuagugacuu

SEQ ID NO: 3699348 - RNA, 18 nt, Human
uucuuaguucucacuguu

SEQ ID NO: 3699349 - RNA, 12 nt, Human
uucuuauaauac

SEQ ID NO: 3699350 - RNA, 18 nt, Human
uucuuaugaggaggggag

SEQ ID NO: 3699351 - RNA, 16 nt, Human
uucuuaugcaaaaugg

SEQ ID NO: 3699352 - RNA, 17 nt, Human
uucuuauuacuagacug

SEQ ID NO: 3699353 - RNA, 19 nt, Human
uucuuauucucacuccacc

SEQ ID NO: 3699354 - RNA, 13 nt, Human
uucuuauuuugug

SEQ ID NO: 3699355 - RNA, 22 nt, Human
uucuuauuuuuccuaacaaaag

SEQ ID NO: 3699356 - RNA, 19 nt, Human
uucuuauuuuuuucuauuu

SEQ ID NO: 3699357 - RNA, 21 nt, Human
uucuucaaaauguauauauuu

SEQ ID NO: 3699358 - RNA, 22 nt, Human
uucuucaacaucaauguucauu

SEQ ID NO: 3699359 - RNA, 14 nt, Human
uucuucaaccagca

SEQ ID NO: 3699360 - RNA, 18 nt, Human
uucuucacacagacacua

SEQ ID NO: 3699361 - RNA, 16 nt, Human
uucuucaccaaaucuu

SEQ ID NO: 3699362 - RNA, 21 nt, Human
uucuucaccuaagucucugug

SEQ ID NO: 3699363 - RNA, 14 nt, Human
uucuucagccaccu

SEQ ID NO: 3699364 - RNA, 23 nt, Human
uucuucagccaccucucuuuuuc

SEQ ID NO: 3699365 - RNA, 22 nt, Human
uucuucagcguaaaauggugaa

SEQ ID NO: 3699366 - RNA, 11 nt, Human
uucuucaguug

SEQ ID NO: 3699367 - RNA, 17 nt, Human
uucuucaugcaaugaca

SEQ ID NO: 3699368 - RNA, 15 nt, Human
uucuucauguucaau

SEQ ID NO: 3699369 - RNA, 21 nt, Human
uucuuccacaagagcccaggc

SEQ ID NO: 3699370 - RNA, 11 nt, Human
uucuuccagga

SEQ ID NO: 3699371 - RNA, 11 nt, Human
uucuuccaguu

SEQ ID NO: 3699372 - RNA, 22 nt, Human
uucuuccaguuacuuuccaauu

SEQ ID NO: 3699373 - RNA, 14 nt, Human
uucuuccaucccag

SEQ ID NO: 3699374 - RNA, 19 nt, Human
uucuucccaucacuggagc

SEQ ID NO: 3699375 - RNA, 17 nt, Human
uucuucccuuaucccug

SEQ ID NO: 3699376 - RNA, 21 nt, Human
uucuucccuuuuacauacugc

SEQ ID NO: 3699377 - RNA, 22 nt, Human
uucuucccuuuuacauacugcu

SEQ ID NO: 3699378 - RNA, 12 nt, Human
uucuuccucagc

SEQ ID NO: 3699379 - RNA, 13 nt, Human
uucuuccucagcc

SEQ ID NO: 3699380 - RNA, 14 nt, Human
uucuuccucagcca

SEQ ID NO: 3699381 - RNA, 17 nt, Human
uucuuccucagccagcc

SEQ ID NO: 3699382 - RNA, 13 nt, Human
uucuuccucccuc

SEQ ID NO: 3699383 - RNA, 14 nt, Human
uucuuccuggccgc

SEQ ID NO: 3699384 - RNA, 16 nt, Human
uucuuccuuuucacug

SEQ ID NO: 3699385 - RNA, 16 nt, Human
uucuucgacuguuguu

SEQ ID NO: 3699386 - RNA, 23 nt, Human
uucuucuauguaggaaaaaaaua

SEQ ID NO: 3699387 - RNA, 22 nt, Human
uucuucuccacuuucuagccag

SEQ ID NO: 3699388 - RNA, 15 nt, Human
uucuucuccuaugug

SEQ ID NO: 3699389 - RNA, 13 nt, Human
uucuucugaacuc

SEQ ID NO: 3699390 - RNA, 20 nt, Human
uucuucugaacucaaacuga

SEQ ID NO: 3699391 - RNA, 23 nt, Human
uucuucugaacucaaacugagga

SEQ ID NO: 3699392 - RNA, 15 nt, Human
uucuucugcuucagc

SEQ ID NO: 3699393 - RNA, 15 nt, Human
uucuucuguaauauu

SEQ ID NO: 3699394 - RNA, 20 nt, Human
uucuucuguccugagaagca

SEQ ID NO: 3699395 - RNA, 20 nt, Human
uucuucuguguuuauaaaau

SEQ ID NO: 3699396 - RNA, 16 nt, Human
uucuucuguucugcag

SEQ ID NO: 3699397 - RNA, 13 nt, Human
uucuucuucagaa

SEQ ID NO: 3699398 - RNA, 15 nt, Human
uucuucuucagaaga

SEQ ID NO: 3699399 - RNA, 13 nt, Human
uucuucuucccuc

SEQ ID NO: 3699400 - RNA, 13 nt, Human
uucuucuuccuga

SEQ ID NO: 3699401 - RNA, 12 nt, Human
uucuucuuuaau

SEQ ID NO: 3699402 - RNA, 15 nt, Human
uucuucuuuuugcug

SEQ ID NO: 3699403 - RNA, 16 nt, Human
uucuucuuuuugcugu

SEQ ID NO: 3699404 - RNA, 21 nt, Human
uucuucuuuuugcuucaaaaa

SEQ ID NO: 3699405 - RNA, 13 nt, Human
uucuugaaagcug

SEQ ID NO: 3699406 - RNA, 21 nt, Human
uucuugaauuuaauaaucugu

SEQ ID NO: 3699407 - RNA, 21 nt, Human
uucuugacaaaaccuaacuug

SEQ ID NO: 3699408 - RNA, 19 nt, Human
uucuugaggggaccaggag

SEQ ID NO: 3699409 - RNA, 21 nt, Human
uucuugaucaacaucuuuucu

SEQ ID NO: 3699410 - RNA, 21 nt, Human
uucuugaugacuggaauuuuu

SEQ ID NO: 3699411 - RNA, 22 nt, Human
uucuugaugacuggaauuuuua

SEQ ID NO: 3699412 - RNA, 14 nt, Human
uucuugauguaaaa

SEQ ID NO: 3699413 - RNA, 16 nt, Human
uucuugauguugcuua

SEQ ID NO: 3699414 - RNA, 20 nt, Human
uucuugcauauuuuguaacu

SEQ ID NO: 3699415 - RNA, 20 nt, Human
uucuugcauccuuccuauaa

SEQ ID NO: 3699416 - RNA, 16 nt, Human
uucuugccucugugcu

SEQ ID NO: 3699417 - RNA, 15 nt, Human
uucuugcugcccugc

SEQ ID NO: 3699418 - RNA, 12 nt, Human
uucuugcugcua

SEQ ID NO: 3699419 - RNA, 13 nt, Human
uucuugcugcuag

SEQ ID NO: 3699420 - RNA, 16 nt, Human
uuucaaacauauauaa

SEQ ID NO: 3699421 - RNA, 19 nt, Human
uuucaaacuuacuauuuug

SEQ ID NO: 3699422 - RNA, 15 nt, Human
uuucaaacuuuacua

SEQ ID NO: 3699423 - RNA, 22 nt, Human
uuucaaacuuuauugacaagug

SEQ ID NO: 3699424 - RNA, 19 nt, Human
uuucaaagaugcugugagu

SEQ ID NO: 3699425 - RNA, 16 nt, Human
uuucaaagauucaaaa

SEQ ID NO: 3699426 - RNA, 22 nt, Human
uuucaaagcaauugaaaugcau

SEQ ID NO: 3699427 - RNA, 17 nt, Human
uuucaaagggagagaga

SEQ ID NO: 3699428 - RNA, 14 nt, Human
uuucaaauguucuc

SEQ ID NO: 3699429 - RNA, 16 nt, Human
uuucaaauugagagaa

SEQ ID NO: 3699430 - RNA, 18 nt, Human
uuucaaauuuagaaacua

SEQ ID NO: 3699431 - RNA, 17 nt, Human
uuucaacagugaagaca

SEQ ID NO: 3699432 - RNA, 19 nt, Human
uuucaacagugaagacaga

SEQ ID NO: 3699433 - RNA, 15 nt, Human
uuucaacggaaagug

SEQ ID NO: 3699434 - RNA, 13 nt, Human
uuucaacucauug

SEQ ID NO: 3699435 - RNA, 16 nt, Human
uuucaacugccaaaau

SEQ ID NO: 3699436 - RNA, 22 nt, Human
uuucaacuuggcuuccuuucuu

SEQ ID NO: 3699437 - RNA, 21 nt, Human
uuucaagaaaaaauaaaugga

SEQ ID NO: 3699438 - RNA, 15 nt, Human
uuucaagaaccugga

SEQ ID NO: 3699439 - RNA, 17 nt, Human
uuucaagaaccuggaaa

SEQ ID NO: 3699440 - RNA, 16 nt, Human
uuucaagaacuuguuu

SEQ ID NO: 3699441 - RNA, 18 nt, Human
uuucaagacugaauucca

SEQ ID NO: 3699442 - RNA, 21 nt, Human
uuucaagagucuaauagucuu

SEQ ID NO: 3699443 - RNA, 22 nt, Human
uuucaagagucuaauagucuuu

SEQ ID NO: 3699444 - RNA, 23 nt, Human
uuucaagcagucgugccuguguc

SEQ ID NO: 3699445 - RNA, 14 nt, Human
uuucaagcaucucc

SEQ ID NO: 3699446 - RNA, 17 nt, Human
uuucaagcaucuccuga

SEQ ID NO: 3699447 - RNA, 18 nt, Human
uuucaaggcacucuagau

SEQ ID NO: 3699448 - RNA, 17 nt, Human
uuucaaggcccucagca

SEQ ID NO: 3699449 - RNA, 13 nt, Human
uuucaagguucua

SEQ ID NO: 3699450 - RNA, 14 nt, Human
uuucaagguucuaa

SEQ ID NO: 3699451 - RNA, 18 nt, Human
uuucaagucaaauuaaua

SEQ ID NO: 3699452 - RNA, 23 nt, Human
uuucaagugccuuucugcaguuu

SEQ ID NO: 3699453 - RNA, 18 nt, Human
uuucaaguuuuaaaguuc

SEQ ID NO: 3699454 - RNA, 19 nt, Human
uuucaauaaagcauuuaua

SEQ ID NO: 3699455 - RNA, 18 nt, Human
uuucaauaacgaaguugg

SEQ ID NO: 3699456 - RNA, 16 nt, Human
uuucaauacagauaua

SEQ ID NO: 3699457 - RNA, 21 nt, Human
uuucaauagccacuaaccuug

SEQ ID NO: 3699458 - RNA, 22 nt, Human
uuucaauaggaaaaacugauuu

SEQ ID NO: 3699459 - RNA, 17 nt, Human
uuucaauauauugaacu

SEQ ID NO: 3699460 - RNA, 23 nt, Human
uuucaaugugauauaaacagcuu

SEQ ID NO: 3699461 - RNA, 13 nt, Human
uuucaaugugauu

SEQ ID NO: 3699462 - RNA, 14 nt, Human
uuucaaugugauuc

SEQ ID NO: 3699463 - RNA, 22 nt, Human
uuucaaugugauucuaaugucu

SEQ ID NO: 3699464 - RNA, 23 nt, Human
uuucaauguguugauacauuccc

SEQ ID NO: 3699465 - RNA, 13 nt, Human
uuucaauuaaacg

SEQ ID NO: 3699466 - RNA, 17 nt, Human
uuucaauuaaacggauu

SEQ ID NO: 3699467 - RNA, 18 nt, Human
uuucaauuaaacggauua

SEQ ID NO: 3699468 - RNA, 17 nt, Human
uuucaauucaaaaaugu

SEQ ID NO: 3699469 - RNA, 14 nt, Human
uuucaauucucaaa

SEQ ID NO: 3699470 - RNA, 18 nt, Human
uuucaauugcaucuccca

SEQ ID NO: 3699471 - RNA, 20 nt, Human
uuucaauugcaucucccaga

SEQ ID NO: 3699472 - RNA, 14 nt, Human
uuucaauuuccaag

SEQ ID NO: 3699473 - RNA, 16 nt, Human
uuucaauuuuaaacau

SEQ ID NO: 3699474 - RNA, 17 nt, Human
uuucaauuuugcaugcu

SEQ ID NO: 3699475 - RNA, 13 nt, Human
uuucacaaauaaa

SEQ ID NO: 3699476 - RNA, 13 nt, Human
uuucacaaauauu

SEQ ID NO: 3699477 - RNA, 17 nt, Human
uuucacaaauauuaaaa

SEQ ID NO: 3699478 - RNA, 13 nt, Human
uuucacaacauuu

SEQ ID NO: 3699479 - RNA, 20 nt, Human
uuucacaccggaagguuuuu

SEQ ID NO: 3699480 - RNA, 23 nt, Human
uuucacaccugaaaauguuagug

SEQ ID NO: 3699481 - RNA, 20 nt, Human
uuucacaggugugguguaau

SEQ ID NO: 3699482 - RNA, 20 nt, Human
uuucacagugugauuuugau

SEQ ID NO: 3699483 - RNA, 21 nt, Human
uuucacauaaaugcagcccau

SEQ ID NO: 3699484 - RNA, 21 nt, Human
uuucacauagcccacuuacau

SEQ ID NO: 3699485 - RNA, 16 nt, Human
uuucacauagcugucu

SEQ ID NO: 3699486 - RNA, 20 nt, Human
uuucacauuaauggucuaaa

SEQ ID NO: 3699487 - RNA, 18 nt, Human
uuucacauuagaagacaa

SEQ ID NO: 3699488 - RNA, 16 nt, Human
uuucacauucuuauaa

SEQ ID NO: 3699489 - RNA, 13 nt, Human
uuucacauuggaa

SEQ ID NO: 3699490 - RNA, 15 nt, Human
uuucacauuguuugc

SEQ ID NO: 3699491 - RNA, 14 nt, Human
uuucacauuuuccu

SEQ ID NO: 3699492 - RNA, 22 nt, Human
uuucaccccucccuuucucccc

SEQ ID NO: 3699493 - RNA, 16 nt, Human
uuucaccuacuuugua

SEQ ID NO: 3699494 - RNA, 17 nt, Human
uuucaccuccuucaauu

SEQ ID NO: 3699495 - RNA, 15 nt, Human
uuucaccugcugcuu

SEQ ID NO: 3699496 - RNA, 18 nt, Human
uuucaccuggaagcauuu

SEQ ID NO: 3699497 - RNA, 22 nt, Human
uuucaccuggaagcauuuguuu

SEQ ID NO: 3699498 - RNA, 17 nt, Human
uuucaccuguaaaccug

SEQ ID NO: 3699499 - RNA, 18 nt, Human
uuucaccuguaaaccuga

SEQ ID NO: 3699500 - RNA, 14 nt, Human
uuucaccuuuacuu

SEQ ID NO: 3699501 - RNA, 16 nt, Human
uuucaccuuuacuuua

SEQ ID NO: 3699502 - RNA, 16 nt, Human
uuucaccuuuucagga

SEQ ID NO: 3699503 - RNA, 16 nt, Human
uuucacgauucauuuu

SEQ ID NO: 3699504 - RNA, 22 nt, Human
uuucacggugccagguuuucug

SEQ ID NO: 3699505 - RNA, 16 nt, Human
uuucacuauaauguga

SEQ ID NO: 3699506 - RNA, 20 nt, Human
uuucacuauaaugugaaaug

SEQ ID NO: 3699507 - RNA, 16 nt, Human
uuucacuauuuccuuu

SEQ ID NO: 3699508 - RNA, 19 nt, Human
uuucacuauuuuuauuuau

SEQ ID NO: 3699509 - RNA, 19 nt, Human
uuucacucuaagucaugua

SEQ ID NO: 3699510 - RNA, 15 nt, Human
uuucacucuccuugg

SEQ ID NO: 3699511 - RNA, 24 nt, Human
uuucacucuuauugcccacgcugg

SEQ ID NO: 3699512 - RNA, 14 nt, Human
uuucacugcuggcu

SEQ ID NO: 3699513 - RNA, 24 nt, Human
uuucacugcuggcugccuuagaac

SEQ ID NO: 3699514 - RNA, 23 nt, Human
uuucacugcuguuauauuucauc

SEQ ID NO: 3699515 - RNA, 15 nt, Human
uuucacugucugucu

SEQ ID NO: 3699516 - RNA, 21 nt, Human
uuucacugucuuuaauucugu

SEQ ID NO: 3699517 - RNA, 15 nt, Human
uuucacuuauaccug

SEQ ID NO: 3699518 - RNA, 20 nt, Human
uuucacuucgggcuguguaa

SEQ ID NO: 3699519 - RNA, 17 nt, Human
uuucacuuuagaugcug

SEQ ID NO: 3699520 - RNA, 13 nt, Human
uuucagaaaacag

SEQ ID NO: 3699521 - RNA, 21 nt, Human
uuucagaaagaaguggggaca

SEQ ID NO: 3699522 - RNA, 16 nt, Human
uuucagaaagccuuuc

SEQ ID NO: 3699523 - RNA, 21 nt, Human
uuucagaaagccuuucauuuu

SEQ ID NO: 3699524 - RNA, 13 nt, Human
uuucagaaauaua

SEQ ID NO: 3699525 - RNA, 20 nt, Human
uuucagaaauauaacacauu

SEQ ID NO: 3699526 - RNA, 11 nt, Human
uuucagaaaug

SEQ ID NO: 3699527 - RNA, 12 nt, Human
uuucagaaaugu

SEQ ID NO: 3699528 - RNA, 13 nt, Human
uuucagaaaugug

SEQ ID NO: 3699529 - RNA, 13 nt, Human
uuucagaagaaau

SEQ ID NO: 3699530 - RNA, 23 nt, Human
uuucagaaguuaguuuguauaua

SEQ ID NO: 3699531 - RNA, 15 nt, Human
uuucagaauauguca

SEQ ID NO: 3699532 - RNA, 10 nt, Human
uuucagaccc

SEQ ID NO: 3699533 - RNA, 12 nt, Human
uuucagaccuuu

SEQ ID NO: 3699534 - RNA, 15 nt, Human
uuucagacugcuuua

SEQ ID NO: 3699535 - RNA, 18 nt, Human
uuucagaguucuuuuuga

SEQ ID NO: 3699536 - RNA, 18 nt, Human
uuucagauaacuguuauu

SEQ ID NO: 3699537 - RNA, 13 nt, Human
uuucagauacugg

SEQ ID NO: 3699538 - RNA, 21 nt, Human
uuucagauacuggauuguacu

SEQ ID NO: 3699539 - RNA, 15 nt, Human
uuucagauauauauc

SEQ ID NO: 3699540 - RNA, 16 nt, Human
uuucagauauauauca

SEQ ID NO: 3699541 - RNA, 12 nt, Human
uuucagaugcuu

SEQ ID NO: 3699542 - RNA, 16 nt, Human
uuucagauguaauguu

SEQ ID NO: 3699543 - RNA, 17 nt, Human
uuucagauguaauguuu

SEQ ID NO: 3699544 - RNA, 15 nt, Human
uuucagaugucuucu

SEQ ID NO: 3699545 - RNA, 11 nt, Human
uuucagaugug

SEQ ID NO: 3699546 - RNA, 18 nt, Human
uuucagaugugaaccauu

SEQ ID NO: 3699547 - RNA, 15 nt, Human
uuucagauuugcaca

SEQ ID NO: 3699548 - RNA, 17 nt, Human
uuucagauuugcacaaa

SEQ ID NO: 3699549 - RNA, 19 nt, Human
uuucagauuugcacaaaaa

SEQ ID NO: 3699550 - RNA, 22 nt, Human
uuucagcacuagccaaaccuca

SEQ ID NO: 3699551 - RNA, 23 nt, Human
uuucagcacuagccaaaccucac

SEQ ID NO: 3699552 - RNA, 21 nt, Human
uuucagcagacuaugaauauu

SEQ ID NO: 3699553 - RNA, 18 nt, Human
uuucagcgacuccguugg

SEQ ID NO: 3699554 - RNA, 23 nt, Human
uuucagcgacuccguuggccacu

SEQ ID NO: 3699555 - RNA, 22 nt, Human
uuucagcgauguaugcagcuau

SEQ ID NO: 3699556 - RNA, 15 nt, Human
uuucagcuaucagua

SEQ ID NO: 3699557 - RNA, 11 nt, Human
uuucagcucuc

SEQ ID NO: 3699558 - RNA, 16 nt, Human
uuucagcucucuguau

SEQ ID NO: 3699559 - RNA, 16 nt, Human
uuucagcugucuuuug

SEQ ID NO: 3699560 - RNA, 14 nt, Human
uuucagcugugaac

SEQ ID NO: 3699561 - RNA, 14 nt, Human
uuucagcuuacaca

SEQ ID NO: 3699562 - RNA, 19 nt, Human
uuucagcuucugcugggcu

SEQ ID NO: 3699563 - RNA, 19 nt, Human
uuucaggauacucugucag

SEQ ID NO: 3699564 - RNA, 13 nt, Human
uuucaggaucuau

SEQ ID NO: 3699565 - RNA, 16 nt, Human
uuucaggaucuauuuu

SEQ ID NO: 3699566 - RNA, 22 nt, Human
uuucaggcaggcaccuagcaau

SEQ ID NO: 3699567 - RNA, 13 nt, Human
uuucagggcuggc

SEQ ID NO: 3699568 - RNA, 18 nt, Human
uuucagggcuggcuccug

SEQ ID NO: 3699569 - RNA, 16 nt, Human
uuucaggguuuucuga

SEQ ID NO: 3699570 - RNA, 15 nt, Human
uucuugcugcuagaa

SEQ ID NO: 3699571 - RNA, 17 nt, Human
uucuugcugcuagaacu

SEQ ID NO: 3699572 - RNA, 20 nt, Human
uucuugcugcuagaacuuuu

SEQ ID NO: 3699573 - RNA, 23 nt, Human
uucuugcugcuagaacuuuuuua

SEQ ID NO: 3699574 - RNA, 13 nt, Human
uucuugcuuguac

SEQ ID NO: 3699575 - RNA, 22 nt, Human
uucuugcuuguaccucuggcug

SEQ ID NO: 3699576 - RNA, 23 nt, Human
uucuugcuuguaccucuggcuga

SEQ ID NO: 3699577 - RNA, 17 nt, Human
uucuuggacacuuaauu

SEQ ID NO: 3699578 - RNA, 23 nt, Human
uucuuggacacuuaauucuguuc

SEQ ID NO: 3699579 - RNA, 19 nt, Human
uucuuggcaaaagccuugu

SEQ ID NO: 3699580 - RNA, 20 nt, Human
uucuuggcaaaagccuugug

SEQ ID NO: 3699581 - RNA, 22 nt, Human
uucuuggcuuaaucauuuucau

SEQ ID NO: 3699582 - RNA, 17 nt, Human
uucuuggggcccagugc

SEQ ID NO: 3699583 - RNA, 18 nt, Human
uucuuggggcccagugca

SEQ ID NO: 3699584 - RNA, 15 nt, Human
uucuugguagagauu

SEQ ID NO: 3699585 - RNA, 16 nt, Human
uucuugguugaggaaa

SEQ ID NO: 3699586 - RNA, 16 nt, Human
uucuugguuggcuggc

SEQ ID NO: 3699587 - RNA, 20 nt, Human
uucuugguuggcuggccuuc

SEQ ID NO: 3699588 - RNA, 16 nt, Human
uucuugguuuguaaau

SEQ ID NO: 3699589 - RNA, 19 nt, Human
uucuuguaaggcuuugauu

SEQ ID NO: 3699590 - RNA, 14 nt, Human
uucuuguaucugga

SEQ ID NO: 3699591 - RNA, 18 nt, Human
uucuuguauuaagaauga

SEQ ID NO: 3699592 - RNA, 13 nt, Human
uucuuguauuuau

SEQ ID NO: 3699593 - RNA, 16 nt, Human
uucuugucacaauaaa

SEQ ID NO: 3699594 - RNA, 19 nt, Human
uucuugucagacauaaagc

SEQ ID NO: 3699595 - RNA, 21 nt, Human
uucuugucagacauaaagcca

SEQ ID NO: 3699596 - RNA, 11 nt, Human
uucuugucuau

SEQ ID NO: 3699597 - RNA, 18 nt, Human
uucuugucuauaaagcau

SEQ ID NO: 3699598 - RNA, 14 nt, Human
uucuugucuauagu

SEQ ID NO: 3699599 - RNA, 19 nt, Human
uucuugucugauuggcuca

SEQ ID NO: 3699600 - RNA, 14 nt, Human
uucuuguguguuua

SEQ ID NO: 3699601 - RNA, 21 nt, Human
uucuuguguguuuauugucaa

SEQ ID NO: 3699602 - RNA, 23 nt, Human
uucuuguuaguacuauaucuguu

SEQ ID NO: 3699603 - RNA, 14 nt, Human
uucuuguucuguuu

SEQ ID NO: 3699604 - RNA, 14 nt, Human
uucuuguuggugca

SEQ ID NO: 3699605 - RNA, 13 nt, Human
uucuuuaaaagaa

SEQ ID NO: 3699606 - RNA, 14 nt, Human
uucuuuaaacacuc

SEQ ID NO: 3699607 - RNA, 14 nt, Human
uucuuuaaagaagu

SEQ ID NO: 3699608 - RNA, 20 nt, Human
uucuuuaaaguucuucuaag

SEQ ID NO: 3699609 - RNA, 13 nt, Human
uucuuuaaauguu

SEQ ID NO: 3699610 - RNA, 13 nt, Human
uucuuuaaauuau

SEQ ID NO: 3699611 - RNA, 15 nt, Human
uucuuuaaauuaugu

SEQ ID NO: 3699612 - RNA, 19 nt, Human
uucuuuaaccuuguauaaa

SEQ ID NO: 3699613 - RNA, 17 nt, Human
uucuuuaauuuuggaau

SEQ ID NO: 3699614 - RNA, 14 nt, Human
uucuuuagagaacu

SEQ ID NO: 3699615 - RNA, 19 nt, Human
uucuuuagagaacugaaaa

SEQ ID NO: 3699616 - RNA, 14 nt, Human
uucuuuauaaacuu

SEQ ID NO: 3699617 - RNA, 18 nt, Human
uucuuuauacaacagugc

SEQ ID NO: 3699618 - RNA, 15 nt, Human
uucuuuauacuguaa

SEQ ID NO: 3699619 - RNA, 18 nt, Human
uucuuuauauacaauaau

SEQ ID NO: 3699620 - RNA, 21 nt, Human
uucuuuauauacaauaaugga

SEQ ID NO: 3699621 - RNA, 23 nt, Human
uucuuucaagggcuuuccugugc

SEQ ID NO: 3699622 - RNA, 12 nt, Human
uucuuucagaaa

SEQ ID NO: 3699623 - RNA, 12 nt, Human
uucuuuccagag

SEQ ID NO: 3699624 - RNA, 14 nt, Human
uucuuuccauuaug

SEQ ID NO: 3699625 - RNA, 15 nt, Human
uucuuuccauuugca

SEQ ID NO: 3699626 - RNA, 16 nt, Human
uucuuucccagucugu

SEQ ID NO: 3699627 - RNA, 13 nt, Human
uucuuucccagug

SEQ ID NO: 3699628 - RNA, 21 nt, Human
uucuuucccugcuuaaugaaa

SEQ ID NO: 3699629 - RNA, 14 nt, Human
uucuuucccuuccu

SEQ ID NO: 3699630 - RNA, 22 nt, Human
uucuuuccucuuccccuugccc

SEQ ID NO: 3699631 - RNA, 13 nt, Human
uucuuuccugccu

SEQ ID NO: 3699632 - RNA, 19 nt, Human
uucuuucuaguucagcugc

SEQ ID NO: 3699633 - RNA, 20 nt, Human
uucuuucuggcuaugcauuu

SEQ ID NO: 3699634 - RNA, 15 nt, Human
uucuuucugucuuua

SEQ ID NO: 3699635 - RNA, 13 nt, Human
uucuuucuuccuc

SEQ ID NO: 3699636 - RNA, 15 nt, Human
uucuuucuuccucug

SEQ ID NO: 3699637 - RNA, 20 nt, Human
uucuuugaaaaaaaauaaau

SEQ ID NO: 3699638 - RNA, 13 nt, Human
uucuuugaauaaa

SEQ ID NO: 3699639 - RNA, 19 nt, Human
uucuuugaauaaaugucac

SEQ ID NO: 3699640 - RNA, 15 nt, Human
uucuuugaauuuuca

SEQ ID NO: 3699641 - RNA, 18 nt, Human
uucuuugaauuuucauuu

SEQ ID NO: 3699642 - RNA, 17 nt, Human
uucuuugauaauguuaa

SEQ ID NO: 3699643 - RNA, 18 nt, Human
uucuuugauaauguuaaa

SEQ ID NO: 3699644 - RNA, 16 nt, Human
uucuuugaucaugaau

SEQ ID NO: 3699645 - RNA, 13 nt, Human
uucuuugauguua

SEQ ID NO: 3699646 - RNA, 18 nt, Human
uucuuugauguuaacaca

SEQ ID NO: 3699647 - RNA, 15 nt, Human
uucuuugcaaaaauc

SEQ ID NO: 3699648 - RNA, 16 nt, Human
uucuuugcaaaaaucc

SEQ ID NO: 3699649 - RNA, 15 nt, Human
uucuuugccaucucu

SEQ ID NO: 3699650 - RNA, 19 nt, Human
uucuuugccaucucugcuc

SEQ ID NO: 3699651 - RNA, 21 nt, Human
uucuuugccaucucugcucca

SEQ ID NO: 3699652 - RNA, 18 nt, Human
uucuuugccuguucaguu

SEQ ID NO: 3699653 - RNA, 16 nt, Human
uucuuugcuugaacac

SEQ ID NO: 3699654 - RNA, 20 nt, Human
uucuuuggaaaguacacucu

SEQ ID NO: 3699655 - RNA, 22 nt, Human
uucuuugggaauauuugaaucu

SEQ ID NO: 3699656 - RNA, 13 nt, Human
uucuuugggccag

SEQ ID NO: 3699657 - RNA, 14 nt, Human
uucuuuggugccuu

SEQ ID NO: 3699658 - RNA, 19 nt, Human
uucuuuggugccuuuccug

SEQ ID NO: 3699659 - RNA, 12 nt, Human
uucuuuguauca

SEQ ID NO: 3699660 - RNA, 11 nt, Human
uucuuuguguu

SEQ ID NO: 3699661 - RNA, 16 nt, Human
uucuuuguuacaggca

SEQ ID NO: 3699662 - RNA, 19 nt, Human
uucuuuuaacuucuuucua

SEQ ID NO: 3699663 - RNA, 14 nt, Human
uucuuuuaagaauc

SEQ ID NO: 3699664 - RNA, 12 nt, Human
uucuuuuaucac

SEQ ID NO: 3699665 - RNA, 17 nt, Human
uucuuuucacauucuua

SEQ ID NO: 3699666 - RNA, 14 nt, Human
uucuuuucucagug

SEQ ID NO: 3699667 - RNA, 15 nt, Human
uucuuuucuuuguau

SEQ ID NO: 3699668 - RNA, 14 nt, Human
uucuuuucuuuuua

SEQ ID NO: 3699669 - RNA, 12 nt, Human
uucuuuugaauu

SEQ ID NO: 3699670 - RNA, 14 nt, Human
uucuuuugccauga

SEQ ID NO: 3699671 - RNA, 21 nt, Human
uucuuuugcccuucacagugu

SEQ ID NO: 3699672 - RNA, 23 nt, Human
uucuuuugcccuucacaguguuu

SEQ ID NO: 3699673 - RNA, 12 nt, Human
uucuuuuguaaa

SEQ ID NO: 3699674 - RNA, 14 nt, Human
uucuuuuguaagug

SEQ ID NO: 3699675 - RNA, 20 nt, Human
uucuuuuguauguaaaugug

SEQ ID NO: 3699676 - RNA, 15 nt, Human
uucuuuuguuacugu

SEQ ID NO: 3699677 - RNA, 19 nt, Human
uucuuuuguuuuuugaagu

SEQ ID NO: 3699678 - RNA, 16 nt, Human
uucuuuuuauuuuuua

SEQ ID NO: 3699679 - RNA, 13 nt, Human
uucuuuuucugga

SEQ ID NO: 3699680 - RNA, 14 nt, Human
uucuuuuucuggac

SEQ ID NO: 3699681 - RNA, 18 nt, Human
uucuuuuucuucuucccu

SEQ ID NO: 3699682 - RNA, 15 nt, Human
uucuuuuugaaaugu

SEQ ID NO: 3699683 - RNA, 15 nt, Human
uucuuuuugaaguau

SEQ ID NO: 3699684 - RNA, 16 nt, Human
uucuuuuugaaguauu

SEQ ID NO: 3699685 - RNA, 17 nt, Human
uucuuuuugaucaucuu

SEQ ID NO: 3699686 - RNA, 12 nt, Human
uucuuuuugcuc

SEQ ID NO: 3699687 - RNA, 21 nt, Human
uucuuuuugcucuaaaauauu

SEQ ID NO: 3699688 - RNA, 14 nt, Human
uucuuuuugcuguu

SEQ ID NO: 3699689 - RNA, 19 nt, Human
uucuuuuugggagagacuu

SEQ ID NO: 3699690 - RNA, 21 nt, Human
uucuuuuugggagagacuugu

SEQ ID NO: 3699691 - RNA, 17 nt, Human
uucuuuuuuaaauuaau

SEQ ID NO: 3699692 - RNA, 23 nt, Human
uucuuuuuuaaauuuucuucagu

SEQ ID NO: 3699693 - RNA, 16 nt, Human
uucuuuuuuauuaauc

SEQ ID NO: 3699694 - RNA, 20 nt, Human
uucuuuuuuauuaaucacug

SEQ ID NO: 3699695 - RNA, 21 nt, Human
uucuuuuuuauuaaucacugu

SEQ ID NO: 3699696 - RNA, 20 nt, Human
uucuuuuuuuuuaaguucuu

SEQ ID NO: 3699697 - RNA, 22 nt, Human
uucuuuuuuuuuuuuuugagac

SEQ ID NO: 3699698 - RNA, 20 nt, Human
uugaaaaaaacuucauucuc

SEQ ID NO: 3699699 - RNA, 22 nt, Human
uugaaaaaagaaauucccugga

SEQ ID NO: 3699700 - RNA, 13 nt, Human
uugaaaaaagcuc

SEQ ID NO: 3699701 - RNA, 20 nt, Human
uugaaaaaagcucauuucau

SEQ ID NO: 3699702 - RNA, 22 nt, Human
uugaaaaaauagagccugaggg

SEQ ID NO: 3699703 - RNA, 21 nt, Human
uugaaaaaauuuaaaaguaaa

SEQ ID NO: 3699704 - RNA, 14 nt, Human
uugaaaaagacauu

SEQ ID NO: 3699705 - RNA, 16 nt, Human
uugaaaaagacauuca

SEQ ID NO: 3699706 - RNA, 12 nt, Human
uugaaaaagcag

SEQ ID NO: 3699707 - RNA, 15 nt, Human
uugaaaaaguuuguu

SEQ ID NO: 3699708 - RNA, 13 nt, Human
uugaaaaauauaa

SEQ ID NO: 3699709 - RNA, 17 nt, Human
uugaaaaauauaaaauu

SEQ ID NO: 3699710 - RNA, 21 nt, Human
uugaaaaaugugcaaaacagc

SEQ ID NO: 3699711 - RNA, 23 nt, Human
uugaaaaauuccuauugugauuu

SEQ ID NO: 3699712 - RNA, 15 nt, Human
uugaaaacagaaauu

SEQ ID NO: 3699713 - RNA, 18 nt, Human
uugaaaacauaaucugca

SEQ ID NO: 3699714 - RNA, 20 nt, Human
uugaaaaccaaaaugacauc

SEQ ID NO: 3699715 - RNA, 23 nt, Human
uugaaaaccaaaaugacaucuuu

SEQ ID NO: 3699716 - RNA, 16 nt, Human
uugaaaacuacauuuu

SEQ ID NO: 3699717 - RNA, 21 nt, Human
uugaaaacuacauuuuaacau

SEQ ID NO: 3699718 - RNA, 18 nt, Human
uugaaaagacuccaaaga

SEQ ID NO: 3699719 - RNA, 21 nt, Human
uugaaaagaggugugcaagag

SEQ ID NO: 3699720 - RNA, 15 nt, Human
uugaaaagcagacau

SEQ ID NO: 3699721 - RNA, 17 nt, Human
uauguacauuucuaagu

SEQ ID NO: 3699722 - RNA, 21 nt, Human
uauguacauuucuaagucaaa

SEQ ID NO: 3699723 - RNA, 16 nt, Human
uauguaccauguacau

SEQ ID NO: 3699724 - RNA, 20 nt, Human
uauguacccucugaaauaca

SEQ ID NO: 3699725 - RNA, 16 nt, Human
uauguacguuuguaug

SEQ ID NO: 3699726 - RNA, 18 nt, Human
uauguacguuuguaugug

SEQ ID NO: 3699727 - RNA, 19 nt, Human
uauguacguuuguaugugu

SEQ ID NO: 3699728 - RNA, 14 nt, Human
uauguacuacauga

SEQ ID NO: 3699729 - RNA, 18 nt, Human
uauguacuaguacugugu

SEQ ID NO: 3699730 - RNA, 19 nt, Human
uauguacuaguacugugua

SEQ ID NO: 3699731 - RNA, 23 nt, Human
uauguacuaguacuguguacugu

SEQ ID NO: 3699732 - RNA, 14 nt, Human
uauguacuaguguu

SEQ ID NO: 3699733 - RNA, 21 nt, Human
uauguacuccucuuuacacug

SEQ ID NO: 3699734 - RNA, 19 nt, Human
uauguacuugucaaagaag

SEQ ID NO: 3699735 - RNA, 19 nt, Human
uauguagacuauauacaug

SEQ ID NO: 3699736 - RNA, 15 nt, Human
uauguagauauuugg

SEQ ID NO: 3699737 - RNA, 18 nt, Human
uauguagauauuuggcuu

SEQ ID NO: 3699738 - RNA, 15 nt, Human
uauguagcaaaauac

SEQ ID NO: 3699739 - RNA, 19 nt, Human
uauguagcagggaaaauau

SEQ ID NO: 3699740 - RNA, 19 nt, Human
uauguagccuucacacaga

SEQ ID NO: 3699741 - RNA, 15 nt, Human
uauguagcucuuugu

SEQ ID NO: 3699742 - RNA, 17 nt, Human
uauguagguaagacugu

SEQ ID NO: 3699743 - RNA, 18 nt, Human
uauguaguaucuauauga

SEQ ID NO: 3699744 - RNA, 15 nt, Human
uauguauaauucaaa

SEQ ID NO: 3699745 - RNA, 14 nt, Human
uauguauacaugug

SEQ ID NO: 3699746 - RNA, 21 nt, Human
uauguauacaugugccaugcu

SEQ ID NO: 3699747 - RNA, 23 nt, Human
uauguauggguaggguaaaucag

SEQ ID NO: 3699748 - RNA, 17 nt, Human
uauguauggugcaaugu

SEQ ID NO: 3699749 - RNA, 16 nt, Human
uauguaugguuugaaa

SEQ ID NO: 3699750 - RNA, 14 nt, Human
uauguaugugugua

SEQ ID NO: 3699751 - RNA, 17 nt, Human
uauguauguguguaugg

SEQ ID NO: 3699752 - RNA, 17 nt, Human
uauguauguguuuagaa

SEQ ID NO: 3699753 - RNA, 16 nt, Human
uauguauguuuacaua

SEQ ID NO: 3699754 - RNA, 20 nt, Human
uauguauuagugauauuucu

SEQ ID NO: 3699755 - RNA, 21 nt, Human
uauguauuagugauauuucuc

SEQ ID NO: 3699756 - RNA, 20 nt, Human
uauguauuguaaacaugugu

SEQ ID NO: 3699757 - RNA, 17 nt, Human
uauguauugugcaaugu

SEQ ID NO: 3699758 - RNA, 21 nt, Human
uauguauugugcaauguguau

SEQ ID NO: 3699759 - RNA, 11 nt, Human
uauguauuucc

SEQ ID NO: 3699760 - RNA, 16 nt, Human
uauguauuuuauguau

SEQ ID NO: 3699761 - RNA, 16 nt, Human
uaugucagucacuaaa

SEQ ID NO: 3699762 - RNA, 19 nt, Human
uaugucaucauacaugacu

SEQ ID NO: 3699763 - RNA, 16 nt, Human
uaugucauuucauguc

SEQ ID NO: 3699764 - RNA, 13 nt, Human
uauguccaggugu

SEQ ID NO: 3699765 - RNA, 13 nt, Human
uauguccauaucu

SEQ ID NO: 3699766 - RNA, 15 nt, Human
uauguccauaucuaa

SEQ ID NO: 3699767 - RNA, 14 nt, Human
uaugucucuucuga

SEQ ID NO: 3699768 - RNA, 12 nt, Human
uaugucugaugg

SEQ ID NO: 3699769 - RNA, 14 nt, Human
uaugucugccaugu

SEQ ID NO: 3699770 - RNA, 17 nt, Human
uaugucugguucucaau

SEQ ID NO: 3699771 - RNA, 22 nt, Human
uaugucugguucucaauuccaa

SEQ ID NO: 3699772 - RNA, 17 nt, Human
uaugucuuuuauauuug

SEQ ID NO: 3699773 - RNA, 14 nt, Human
uaugugaaaggaua

SEQ ID NO: 3699774 - RNA, 14 nt, Human
uaugugaacauuua

SEQ ID NO: 3699775 - RNA, 22 nt, Human
uaugugaauauggacucaguuu

SEQ ID NO: 3699776 - RNA, 21 nt, Human
uaugugaauccucuucuuuau

SEQ ID NO: 3699777 - RNA, 22 nt, Human
uaugugaaugaucucucugaau

SEQ ID NO: 3699778 - RNA, 18 nt, Human
uaugugaauuuuuaagcu

SEQ ID NO: 3699779 - RNA, 19 nt, Human
uaugugacaauuuuguaca

SEQ ID NO: 3699780 - RNA, 14 nt, Human
uaugugacauuaac

SEQ ID NO: 3699781 - RNA, 14 nt, Human
uaugugacauuuua

SEQ ID NO: 3699782 - RNA, 22 nt, Human
uaugugagagauucugugaucu

SEQ ID NO: 3699783 - RNA, 21 nt, Human
uaugugagauuuuuuauugcu

SEQ ID NO: 3699784 - RNA, 14 nt, Human
uaugugaguauucu

SEQ ID NO: 3699785 - RNA, 17 nt, Human
uaugugaguauucucau

SEQ ID NO: 3699786 - RNA, 23 nt, Human
uaugugaguguguguuugugcug

SEQ ID NO: 3699787 - RNA, 14 nt, Human
uaugugaucugucu

SEQ ID NO: 3699788 - RNA, 17 nt, Human
uaugugcacugucacuu

SEQ ID NO: 3699789 - RNA, 12 nt, Human
uauguggaagug

SEQ ID NO: 3699790 - RNA, 18 nt, Human
uaugugggauauugaaug

SEQ ID NO: 3699791 - RNA, 19 nt, Human
uaugugggauauugaaugu

SEQ ID NO: 3699792 - RNA, 20 nt, Human
uaugugggggucuguguguu

SEQ ID NO: 3699793 - RNA, 19 nt, Human
uauguggguugccugguga

SEQ ID NO: 3699794 - RNA, 19 nt, Human
uaugugguuuccacgauga

SEQ ID NO: 3699795 - RNA, 16 nt, Human
uaugugguuuuagauu

SEQ ID NO: 3699796 - RNA, 13 nt, Human
uauguguaauaaa

SEQ ID NO: 3699797 - RNA, 21 nt, Human
uauguguauauauacauacac

SEQ ID NO: 3699798 - RNA, 17 nt, Human
uauguguaucucacacu

SEQ ID NO: 3699799 - RNA, 12 nt, Human
uauguguaugua

SEQ ID NO: 3699800 - RNA, 13 nt, Human
uauguguauguac

SEQ ID NO: 3699801 - RNA, 16 nt, Human
uauguguccauuuccu

SEQ ID NO: 3699802 - RNA, 22 nt, Human
uauguguccauuuccuuaugcu

SEQ ID NO: 3699803 - RNA, 21 nt, Human
uaugugugaggagcugcuggc

SEQ ID NO: 3699804 - RNA, 12 nt, Human
uauguguguaua

SEQ ID NO: 3699805 - RNA, 12 nt, Human
uaugugugugua

SEQ ID NO: 3699806 - RNA, 22 nt, Human
uauguguguguguugugugugg

SEQ ID NO: 3699807 - RNA, 13 nt, Human
uauguguguuuaa

SEQ ID NO: 3699808 - RNA, 21 nt, Human
uauguguguuuaaauaaagua

SEQ ID NO: 3699809 - RNA, 16 nt, Human
uauguguguuucuguc

SEQ ID NO: 3699810 - RNA, 13 nt, Human
uauguguguuuua

SEQ ID NO: 3699811 - RNA, 16 nt, Human
uauguguuuagaauug

SEQ ID NO: 3699812 - RNA, 16 nt, Human
uauguguuuuucacau

SEQ ID NO: 3699813 - RNA, 15 nt, Human
uauguuaaaagauuu

SEQ ID NO: 3699814 - RNA, 19 nt, Human
uauguuaaccucaguguca

SEQ ID NO: 3699815 - RNA, 18 nt, Human
uauguuaagcucuuuaug

SEQ ID NO: 3699816 - RNA, 13 nt, Human
uauguuaauauuu

SEQ ID NO: 3699817 - RNA, 16 nt, Human
uauguuaauauuucug

SEQ ID NO: 3699818 - RNA, 14 nt, Human
uauguuaauauuuu

SEQ ID NO: 3699819 - RNA, 19 nt, Human
uauguuacaucuguuuuaa

SEQ ID NO: 3699820 - RNA, 12 nt, Human
uauguuacuauu

SEQ ID NO: 3699821 - RNA, 21 nt, Human
uauguuauagaacuucaugga

SEQ ID NO: 3699822 - RNA, 21 nt, Human
uauguucaacuaggaucagaa

SEQ ID NO: 3699823 - RNA, 13 nt, Human
uauguucacuguc

SEQ ID NO: 3699824 - RNA, 16 nt, Human
uauguucagauuauug

SEQ ID NO: 3699825 - RNA, 16 nt, Human
uauguuccauuaaacg

SEQ ID NO: 3699826 - RNA, 18 nt, Human
uauguucuaaccuuuaca

SEQ ID NO: 3699827 - RNA, 16 nt, Human
uauguugcccaggcag

SEQ ID NO: 3699828 - RNA, 19 nt, Human
uauguugcccaggcagguc

SEQ ID NO: 3699829 - RNA, 21 nt, Human
uauguugcccaggcaggucuu

SEQ ID NO: 3699830 - RNA, 14 nt, Human
uauguugccuuuau

SEQ ID NO: 3699831 - RNA, 17 nt, Human
uauguugcucagucucc

SEQ ID NO: 3699832 - RNA, 22 nt, Human
uauguuguaauauuucuucaaa

SEQ ID NO: 3699833 - RNA, 15 nt, Human
uauguuguauagauu

SEQ ID NO: 3699834 - RNA, 13 nt, Human
uauguugucaaag

SEQ ID NO: 3699835 - RNA, 20 nt, Human
uauguugugaagauguuugc

SEQ ID NO: 3699836 - RNA, 20 nt, Human
uauguuguuuauaauaaaaa

SEQ ID NO: 3699837 - RNA, 23 nt, Human
uauguuuaaaguaauuguuccag

SEQ ID NO: 3699838 - RNA, 12 nt, Human
uauguuuacaaa

SEQ ID NO: 3699839 - RNA, 18 nt, Human
uauguuuacacugucaaa

SEQ ID NO: 3699840 - RNA, 22 nt, Human
uauguuuagauagggcugggca

SEQ ID NO: 3699841 - RNA, 18 nt, Human
uauguuuauauaaaugcu

SEQ ID NO: 3699842 - RNA, 22 nt, Human
uauguuucucuuugauuauuug

SEQ ID NO: 3699843 - RNA, 19 nt, Human
uauguuuguacaagauugu

SEQ ID NO: 3699844 - RNA, 12 nt, Human
uauguuuuacac

SEQ ID NO: 3699845 - RNA, 15 nt, Human
uauguuuuacacugu

SEQ ID NO: 3699846 - RNA, 17 nt, Human
uauguuuuacacuguac

SEQ ID NO: 3699847 - RNA, 18 nt, Human
uauguuuuagcauguguu

SEQ ID NO: 3699848 - RNA, 16 nt, Human
uauguuuuuauaaaaa

SEQ ID NO: 3699849 - RNA, 16 nt, Human
uauguuuuugaaggca

SEQ ID NO: 3699850 - RNA, 18 nt, Human
uauguuuuuguguauuug

SEQ ID NO: 3699851 - RNA, 15 nt, Human
uauguuuuuguucaa

SEQ ID NO: 3699852 - RNA, 16 nt, Human
uauguuuuuguucaaa

SEQ ID NO: 3699853 - RNA, 23 nt, Human
uauguuuuuguucaguuuaucug

SEQ ID NO: 3699854 - RNA, 17 nt, Human
uauguuuuuuagaucaa

SEQ ID NO: 3699855 - RNA, 19 nt, Human
uauguuuuuuagaucaaau

SEQ ID NO: 3699856 - RNA, 22 nt, Human
uauguuuuuuuucugcuggaaa

SEQ ID NO: 3699857 - RNA, 18 nt, Human
uauuaaaaaacuucaugu

SEQ ID NO: 3699858 - RNA, 17 nt, Human
uauuaaaaaagagacau

SEQ ID NO: 3699859 - RNA, 23 nt, Human
uauuaaaaaagagacauccaaau

SEQ ID NO: 3699860 - RNA, 20 nt, Human
uauuaaaaagguuuacagaa

SEQ ID NO: 3699861 - RNA, 12 nt, Human
uauuaaaaaguc

SEQ ID NO: 3699862 - RNA, 17 nt, Human
uauuaaaaagucuuuua

SEQ ID NO: 3699863 - RNA, 19 nt, Human
uauuaaaaagucuuuuaaa

SEQ ID NO: 3699864 - RNA, 21 nt, Human
uauuaaaaauauaaaacugcg

SEQ ID NO: 3699865 - RNA, 16 nt, Human
uauuaaaaaucucaaa

SEQ ID NO: 3699866 - RNA, 20 nt, Human
uauuaaaaaucucaaauuuc

SEQ ID NO: 3699867 - RNA, 22 nt, Human
uauuaaaaaucucaaauuucua

SEQ ID NO: 3699868 - RNA, 23 nt, Human
uauuaaaaauuggcuaguugaau

SEQ ID NO: 3699869 - RNA, 16 nt, Human
ucuuuucuuuuuacau

SEQ ID NO: 3699870 - RNA, 14 nt, Human
ucuuuugaagcaua

SEQ ID NO: 3699871 - RNA, 19 nt, Human
ucuuuugaauccaugcuug

SEQ ID NO: 3699872 - RNA, 17 nt, Human
ucuuuugaauuguuaca

SEQ ID NO: 3699873 - RNA, 18 nt, Human
ucuuuugaauuguuacau

SEQ ID NO: 3699874 - RNA, 14 nt, Human
ucuuuugacaugug

SEQ ID NO: 3699875 - RNA, 21 nt, Human
ucuuuugcccuucacaguguu

SEQ ID NO: 3699876 - RNA, 19 nt, Human
ucuuuugcuuuugcccauu

SEQ ID NO: 3699877 - RNA, 21 nt, Human
ucuuuuggaggacguacguaa

SEQ ID NO: 3699878 - RNA, 17 nt, Human
ucuuuugggggaaacuu

SEQ ID NO: 3699879 - RNA, 10 nt, Human
ucuuuuguaa

SEQ ID NO: 3699880 - RNA, 19 nt, Human
ucuuuuguaagguuuuugu

SEQ ID NO: 3699881 - RNA, 18 nt, Human
ucuuuuguaagugcuaca

SEQ ID NO: 3699882 - RNA, 19 nt, Human
ucuuuuguaauaaacuauu

SEQ ID NO: 3699883 - RNA, 10 nt, Human
ucuuuuguau

SEQ ID NO: 3699884 - RNA, 21 nt, Human
ucuuuuguuacuguucuugcu

SEQ ID NO: 3699885 - RNA, 14 nt, Human
ucuuuuguuuccuu

SEQ ID NO: 3699886 - RNA, 12 nt, Human
ucuuuuguuugg

SEQ ID NO: 3699887 - RNA, 18 nt, Human
ucuuuuguuuuuugaagu

SEQ ID NO: 3699888 - RNA, 20 nt, Human
ucuuuuuaaaaauuguuauu

SEQ ID NO: 3699889 - RNA, 14 nt, Human
ucuuuuuaaagcuu

SEQ ID NO: 3699890 - RNA, 19 nt, Human
ucuuuuuaaguaaugugga

SEQ ID NO: 3699891 - RNA, 19 nt, Human
ucuuuuuaccuuucauaca

SEQ ID NO: 3699892 - RNA, 14 nt, Human
ucuuuuuaugcauu

SEQ ID NO: 3699893 - RNA, 14 nt, Human
ucuuuuuauugaau

SEQ ID NO: 3699894 - RNA, 15 nt, Human
ucuuuuuauugaauc

SEQ ID NO: 3699895 - RNA, 22 nt, Human
ucuuuuuauugaugugcaaaaa

SEQ ID NO: 3699896 - RNA, 21 nt, Human
ucuuuuuauuuuuuaauuauu

SEQ ID NO: 3699897 - RNA, 12 nt, Human
ucuuuuucuacc

SEQ ID NO: 3699898 - RNA, 11 nt, Human
ucuuuuucuga

SEQ ID NO: 3699899 - RNA, 12 nt, Human
ucuuuuucuucu

SEQ ID NO: 3699900 - RNA, 19 nt, Human
ucuuuuugacucuugcaau

SEQ ID NO: 3699901 - RNA, 16 nt, Human
ucuuuuugcuuugcuu

SEQ ID NO: 3699902 - RNA, 19 nt, Human
ucuuuuugggagagacuug

SEQ ID NO: 3699903 - RNA, 15 nt, Human
ucuuuuuguuguaaa

SEQ ID NO: 3699904 - RNA, 15 nt, Human
ucuuuuuuaaaauca

SEQ ID NO: 3699905 - RNA, 19 nt, Human
ucuuuuuuaauaaacuacu

SEQ ID NO: 3699906 - RNA, 13 nt, Human
ucuuuuuuacaaa

SEQ ID NO: 3699907 - RNA, 19 nt, Human
ucuuuuuuacaaaggcugu

SEQ ID NO: 3699908 - RNA, 15 nt, Human
ucuuuuuuacucauu

SEQ ID NO: 3699909 - RNA, 20 nt, Human
ucuuuuuuacucauugaaau

SEQ ID NO: 3699910 - RNA, 21 nt, Human
ucuuuuuuacucauugaaaug

SEQ ID NO: 3699911 - RNA, 15 nt, Human
ucuuuuuuagcauaa

SEQ ID NO: 3699912 - RNA, 24 nt, Human
ucuuuuuuauuaaucacuguguau

SEQ ID NO: 3699913 - RNA, 14 nt, Human
ucuuuuuucacaaa

SEQ ID NO: 3699914 - RNA, 23 nt, Human
ucuuuuuucauggacacuuugaa

SEQ ID NO: 3699915 - RNA, 17 nt, Human
ucuuuuuuucccccccu

SEQ ID NO: 3699916 - RNA, 16 nt, Human
ucuuuuuuucucuaga

SEQ ID NO: 3699917 - RNA, 15 nt, Human
ucuuuuuuucuuugg

SEQ ID NO: 3699918 - RNA, 22 nt, Human
ucuuuuuuuuaaugugcugugu

SEQ ID NO: 3699919 - RNA, 19 nt, Human
ucuuuuuuuuauuccacau

SEQ ID NO: 3699920 - RNA, 20 nt, Human
ucuuuuuuuuuaaguucuua

SEQ ID NO: 3699921 - RNA, 23 nt, Human
ucuuuuuuuuuuaagugaaauuu

SEQ ID NO: 3699922 - RNA, 23 nt, Human
ucuuuuuuuuuuuuuaaagacag

SEQ ID NO: 3699923 - RNA, 22 nt, Human
ucuuuuuuuuuuuuuaauaaau

SEQ ID NO: 3699924 - RNA, 23 nt, Human
ucuuuuuuuuuuuuuaauaaauu

SEQ ID NO: 3699925 - RNA, 14 nt, Human
ugagaaggagagaa

SEQ ID NO: 3699926 - RNA, 15 nt, Human
ugagaaggagagaaa

SEQ ID NO: 3699927 - RNA, 22 nt, Human
ugagaaggagucagaaacuguu

SEQ ID NO: 3699928 - RNA, 16 nt, Human
ugagaaggcagccacc

SEQ ID NO: 3699929 - RNA, 17 nt, Human
ugagaaggcagccacca

SEQ ID NO: 3699930 - RNA, 17 nt, Human
ugagaagguuuauuguu

SEQ ID NO: 3699931 - RNA, 18 nt, Human
ugagaagugaaugcuggg

SEQ ID NO: 3699932 - RNA, 22 nt, Human
ugagaagugaaugcugggacuc

SEQ ID NO: 3699933 - RNA, 17 nt, Human
ugagaauaagagaguca

SEQ ID NO: 3699934 - RNA, 16 nt, Human
ugagaauagaaggaaa

SEQ ID NO: 3699935 - RNA, 18 nt, Human
ugagaauagaaggaaacu

SEQ ID NO: 3699936 - RNA, 22 nt, Human
ugagaauagaaggaaacuagcu

SEQ ID NO: 3699937 - RNA, 23 nt, Human
ugagaauagaaggaaacuagcuu

SEQ ID NO: 3699938 - RNA, 16 nt, Human
ugagaaucaaaacucu

SEQ ID NO: 3699939 - RNA, 12 nt, Human
ugagaaucuacc

SEQ ID NO: 3699940 - RNA, 17 nt, Human
ugagaauucagcugccc

SEQ ID NO: 3699941 - RNA, 18 nt, Human
ugagaauucagcugcccc

SEQ ID NO: 3699942 - RNA, 15 nt, Human
ugagaauuccaagga

SEQ ID NO: 3699943 - RNA, 19 nt, Human
ugagaauugggcggcucug

SEQ ID NO: 3699944 - RNA, 14 nt, Human
ugagaauuucuaaa

SEQ ID NO: 3699945 - RNA, 20 nt, Human
ugagaauuugagugcucuga

SEQ ID NO: 3699946 - RNA, 15 nt, Human
ugagaauuuuaaauu

SEQ ID NO: 3699947 - RNA, 23 nt, Human
ugagaauuuuaaauuauaacuua

SEQ ID NO: 3699948 - RNA, 16 nt, Human
ugagacaaaaauuauc

SEQ ID NO: 3699949 - RNA, 14 nt, Human
ugagacaaacaugc

SEQ ID NO: 3699950 - RNA, 18 nt, Human
ugagacaaauggaggccu

SEQ ID NO: 3699951 - RNA, 23 nt, Human
ugagacaagaaaauaagagcuca

SEQ ID NO: 3699952 - RNA, 15 nt, Human
ugagacaaugccuug

SEQ ID NO: 3699953 - RNA, 16 nt, Human
ugagacacaggaugaa

SEQ ID NO: 3699954 - RNA, 17 nt, Human
ugagacacggagcccag

SEQ ID NO: 3699955 - RNA, 21 nt, Human
ugagacacggagcccagcccu

SEQ ID NO: 3699956 - RNA, 22 nt, Human
ugagacacggagcccagcccuc

SEQ ID NO: 3699957 - RNA, 14 nt, Human
ugagacagaaucuc

SEQ ID NO: 3699958 - RNA, 11 nt, Human
ugagacagagu

SEQ ID NO: 3699959 - RNA, 13 nt, Human
ugagacagcccgg

SEQ ID NO: 3699960 - RNA, 20 nt, Human
ugagacagcccgggcucugc

SEQ ID NO: 3699961 - RNA, 14 nt, Human
ugagacagcucugc

SEQ ID NO: 3699962 - RNA, 18 nt, Human
ugagacaguccagccugg

SEQ ID NO: 3699963 - RNA, 19 nt, Human
ugagacaguccagccugga

SEQ ID NO: 3699964 - RNA, 17 nt, Human
ugagacagugaauuugg

SEQ ID NO: 3699965 - RNA, 16 nt, Human
ugagacaguuucuuag

SEQ ID NO: 3699966 - RNA, 23 nt, Human
ugagacaguuucuuagcuuuuua

SEQ ID NO: 3699967 - RNA, 15 nt, Human
ugagaccaaccuggg

SEQ ID NO: 3699968 - RNA, 15 nt, Human
ugagaccaccucuca

SEQ ID NO: 3699969 - RNA, 14 nt, Human
ugagaccacuguua

SEQ ID NO: 3699970 - RNA, 14 nt, Human
ugagaccagccugg

SEQ ID NO: 3699971 - RNA, 17 nt, Human
ugagaccagccugggca

SEQ ID NO: 3699972 - RNA, 12 nt, Human
ugagaccaguug

SEQ ID NO: 3699973 - RNA, 23 nt, Human
ugagaccaguugggagcacugga

SEQ ID NO: 3699974 - RNA, 12 nt, Human
ugagacccagga

SEQ ID NO: 3699975 - RNA, 14 nt, Human
ugagacccaggacu

SEQ ID NO: 3699976 - RNA, 21 nt, Human
ugagacccauuccuauuucuu

SEQ ID NO: 3699977 - RNA, 14 nt, Human
ugagacccccacac

SEQ ID NO: 3699978 - RNA, 15 nt, Human
ugagacccccacacc

SEQ ID NO: 3699979 - RNA, 17 nt, Human
ugagacccccacaccuc

SEQ ID NO: 3699980 - RNA, 15 nt, Human
ugagaccccugucuc

SEQ ID NO: 3699981 - RNA, 23 nt, Human
ugagaccgugaagauacuuugua

SEQ ID NO: 3699982 - RNA, 18 nt, Human
ugagaccuaaucucugua

SEQ ID NO: 3699983 - RNA, 19 nt, Human
ugagaccuaaucucuguaa

SEQ ID NO: 3699984 - RNA, 20 nt, Human
ugagaccuaaucucuguaaa

SEQ ID NO: 3699985 - RNA, 17 nt, Human
ugagaccuacaggcuga

SEQ ID NO: 3699986 - RNA, 18 nt, Human
ugagaccuacaggcugac

SEQ ID NO: 3699987 - RNA, 14 nt, Human
ugagaccucagcca

SEQ ID NO: 3699988 - RNA, 13 nt, Human
ugagaccugcccc

SEQ ID NO: 3699989 - RNA, 14 nt, Human
ugagaccugccccu

SEQ ID NO: 3699990 - RNA, 20 nt, Human
ugagacgccaccauuccugg

SEQ ID NO: 3699991 - RNA, 21 nt, Human
ugagacgccaccauuccugga

SEQ ID NO: 3699992 - RNA, 22 nt, Human
ugagacuaaucuuauucauuuu

SEQ ID NO: 3699993 - RNA, 15 nt, Human
ugagacucagugcag

SEQ ID NO: 3699994 - RNA, 12 nt, Human
ugagacucgaga

SEQ ID NO: 3699995 - RNA, 16 nt, Human
ugagacucgagaacuu

SEQ ID NO: 3699996 - RNA, 20 nt, Human
ugagacucgcgacaaugcaa

SEQ ID NO: 3699997 - RNA, 23 nt, Human
ugagacucgcgacaaugcaaacc

SEQ ID NO: 3699998 - RNA, 12 nt, Human
ugagacucuguc

SEQ ID NO: 3699999 - RNA, 20 nt, Human
ugagacucugucucaaaaaa

SEQ ID NO: 3700000 - RNA, 23 nt, Human
ugagacugcgggaugguccuggg

SEQ ID NO: 3700001 - RNA, 21 nt, Human
ugagacuggauacugcccggg

SEQ ID NO: 3700002 - RNA, 21 nt, Human
ugagacugugcuguuguucuc

SEQ ID NO: 3700003 - RNA, 17 nt, Human
ugagacuugccuuccua

SEQ ID NO: 3700004 - RNA, 19 nt, Human
ugagacuugccuuccuaag

SEQ ID NO: 3700005 - RNA, 14 nt, Human
ugagacuuuaaaag

SEQ ID NO: 3700006 - RNA, 14 nt, Human
ugagacuuucuuuc

SEQ ID NO: 3700007 - RNA, 15 nt, Human
ugagacuuuuuggug

SEQ ID NO: 3700008 - RNA, 13 nt, Human
ugagagaaaauaa

SEQ ID NO: 3700009 - RNA, 19 nt, Human
ugagagaauggaaaacaga

SEQ ID NO: 3700010 - RNA, 23 nt, Human
ugagagaauggaaaacagacuca

SEQ ID NO: 3700011 - RNA, 17 nt, Human
ugagagacacacugaag

SEQ ID NO: 3700012 - RNA, 19 nt, Human
ugagagacacacugaagaa

SEQ ID NO: 3700013 - RNA, 19 nt, Human
ugagagacauuaacucauu

SEQ ID NO: 3700014 - RNA, 14 nt, Human
ugagagaccaggca

SEQ ID NO: 3700015 - RNA, 20 nt, Human
ugagagacccaaggaggaaa

SEQ ID NO: 3700016 - RNA, 21 nt, Human
ugagagacccaaggaggaaaa

SEQ ID NO: 3700017 - RNA, 21 nt, Human
ugagagacggugucuuguucu

SEQ ID NO: 3700018 - RNA, 12 nt, Human
ugagagacuuuu

SEQ ID NO: 3700019 - RNA, 16 nt, Human
ugagagagaugggagc

SEQ ID NO: 3700020 - RNA, 14 nt, Human
ugagagagaugugu

SEQ ID NO: 3700021 - RNA, 21 nt, Human
ugagagaugcagaaauauuug

SEQ ID NO: 3700022 - RNA, 23 nt, Human
ugagagaugcuguagacaucugu

SEQ ID NO: 3700023 - RNA, 21 nt, Human
ugagagcaguuugguuucuag

SEQ ID NO: 3700024 - RNA, 15 nt, Human
ugagagcauaauuua

SEQ ID NO: 3700025 - RNA, 21 nt, Human
ugagagcaucaggccuagagg

SEQ ID NO: 3700026 - RNA, 20 nt, Human
ugagagcccagagguaacag

SEQ ID NO: 3700027 - RNA, 12 nt, Human
ugagagccccag

SEQ ID NO: 3700028 - RNA, 15 nt, Human
ugagagccccagcug

SEQ ID NO: 3700029 - RNA, 15 nt, Human
ugagagcgaggcuga

SEQ ID NO: 3700030 - RNA, 15 nt, Human
ugagagcgcagcccg

SEQ ID NO: 3700031 - RNA, 14 nt, Human
ugagagcugggugu

SEQ ID NO: 3700032 - RNA, 14 nt, Human
ugagaggaaaucac

SEQ ID NO: 3700033 - RNA, 23 nt, Human
ugagaggaugaauguaugugcac

SEQ ID NO: 3700034 - RNA, 18 nt, Human
ugagaggcagacuucccu

SEQ ID NO: 3700035 - RNA, 13 nt, Human
ugagaggcaggca

SEQ ID NO: 3700036 - RNA, 16 nt, Human
ugagaggcaggcauag

SEQ ID NO: 3700037 - RNA, 14 nt, Human
ugagaggcauuucc

SEQ ID NO: 3700038 - RNA, 12 nt, Human
ugagaggcccug

SEQ ID NO: 3700039 - RNA, 14 nt, Human
ugagaggcccugga

SEQ ID NO: 3700040 - RNA, 17 nt, Human
ugagaggcccuggauca

SEQ ID NO: 3700041 - RNA, 21 nt, Human
ugagaggcgacaggaguauuu

SEQ ID NO: 3700042 - RNA, 22 nt, Human
ugagagggcaugcgcacaaggc

SEQ ID NO: 3700043 - RNA, 22 nt, Human
ugagagggcucgaggggugggc

SEQ ID NO: 3700044 - RNA, 18 nt, Human
ugagaggggaacagacug

SEQ ID NO: 3700045 - RNA, 19 nt, Human
ugagaggggagagcugaac

SEQ ID NO: 3700046 - RNA, 17 nt, Human
ugagaggggaggccaag

SEQ ID NO: 3700047 - RNA, 17 nt, Human
ugagaguaucaggucuc

SEQ ID NO: 3700048 - RNA, 23 nt, Human
ugagaguauuuaggcagauugaa

SEQ ID NO: 3700049 - RNA, 16 nt, Human
ugagagucagcucucu

SEQ ID NO: 3700050 - RNA, 19 nt, Human
ugagagucagcucucugcc

SEQ ID NO: 3700051 - RNA, 14 nt, Human
ugagagucuagauu

SEQ ID NO: 3700052 - RNA, 19 nt, Human
ugagagucuagcacucauu

SEQ ID NO: 3700053 - RNA, 20 nt, Human
ugagagucugcacuuaacaa

SEQ ID NO: 3700054 - RNA, 16 nt, Human
ugagagugaacaaauu

SEQ ID NO: 3700055 - RNA, 16 nt, Human
ugagaguuuaguugua

SEQ ID NO: 3700056 - RNA, 17 nt, Human
ugagaguuuuggaugca

SEQ ID NO: 3700057 - RNA, 19 nt, Human
ugagaguuuuggaugcagu

SEQ ID NO: 3700058 - RNA, 20 nt, Human
ugagauaccagcgaggaggc

SEQ ID NO: 3700059 - RNA, 15 nt, Human
ugagauacuuugcau

SEQ ID NO: 3700060 - RNA, 21 nt, Human
ugagauagaagaacugcaaag

SEQ ID NO: 3700061 - RNA, 18 nt, Human
ugagauagcauugugaac

SEQ ID NO: 3700062 - RNA, 22 nt, Human
ugagauagcugguguuagggcu

SEQ ID NO: 3700063 - RNA, 20 nt, Human
ugagauauuuauuguuuauu

SEQ ID NO: 3700064 - RNA, 13 nt, Human
ugagaucaggcuc

SEQ ID NO: 3700065 - RNA, 16 nt, Human
ugagaucuaaaaauaa

SEQ ID NO: 3700066 - RNA, 23 nt, Human
ugagaucuaaaaauaacuguaau

SEQ ID NO: 3700067 - RNA, 20 nt, Human
ugagaucuaagccuuuccau

SEQ ID NO: 3700068 - RNA, 21 nt, Human
ugagaucuaagccuuuccaua

SEQ ID NO: 3700069 - RNA, 23 nt, Human
ugagaucuaagccuuuccauaag

SEQ ID NO: 3700070 - RNA, 15 nt, Human
ugagaugcagcugga

SEQ ID NO: 3700071 - RNA, 22 nt, Human
ugagaugcguuguuacaggaag

SEQ ID NO: 3700072 - RNA, 14 nt, Human
ugagaugcuagaac

SEQ ID NO: 3700073 - RNA, 16 nt, Human
ugagaugcuagaacuc

SEQ ID NO: 3700074 - RNA, 11 nt, Human
ggguacaugug

SEQ ID NO: 3700075 - RNA, 13 nt, Human
ggguacccacugc

SEQ ID NO: 3700076 - RNA, 14 nt, Human
ggguagcagcugga

SEQ ID NO: 3700077 - RNA, 14 nt, Human
ggguagcccgccug

SEQ ID NO: 3700078 - RNA, 18 nt, Human
ggguagcccgccugccag

SEQ ID NO: 3700079 - RNA, 15 nt, Human
ggguagcuagaggaa

SEQ ID NO: 3700080 - RNA, 12 nt, Human
ggguaggcggga

SEQ ID NO: 3700081 - RNA, 15 nt, Human
ggguaggguaaauca

SEQ ID NO: 3700082 - RNA, 10 nt, Human
ggguauccug

SEQ ID NO: 3700083 - RNA, 22 nt, Human
ggguauguuuaaucuguuaugu

SEQ ID NO: 3700084 - RNA, 14 nt, Human
gggucacucuggca

SEQ ID NO: 3700085 - RNA, 18 nt, Human
gggucagaaacaggaccg

SEQ ID NO: 3700086 - RNA, 20 nt, Human
gggucagaacccugccaugg

SEQ ID NO: 3700087 - RNA, 12 nt, Human
gggucagccagg

SEQ ID NO: 3700088 - RNA, 16 nt, Human
gggucagccagggccu

SEQ ID NO: 3700089 - RNA, 13 nt, Human
gggucaggaagga

SEQ ID NO: 3700090 - RNA, 17 nt, Human
gggucaggccgggcaga

SEQ ID NO: 3700091 - RNA, 21 nt, Human
gggucagucuggugggaggac

SEQ ID NO: 3700092 - RNA, 20 nt, Human
gggucauguuugcaggggug

SEQ ID NO: 3700093 - RNA, 18 nt, Human
gggucauucauggccugg

SEQ ID NO: 3700094 - RNA, 12 nt, Human
ggguccaaauaa

SEQ ID NO: 3700095 - RNA, 23 nt, Human
gggucccaagcugggccccagcc

SEQ ID NO: 3700096 - RNA, 16 nt, Human
gggucccagccacccc

SEQ ID NO: 3700097 - RNA, 22 nt, Human
gggucccagugggaggggcagg

SEQ ID NO: 3700098 - RNA, 23 nt, Human
gggucccagugggaggggcaggc

SEQ ID NO: 3700099 - RNA, 16 nt, Human
ggguccggcagcuucu

SEQ ID NO: 3700100 - RNA, 15 nt, Human
ggguccuagaaauuc

SEQ ID NO: 3700101 - RNA, 18 nt, Human
ggguccuccuccagggac

SEQ ID NO: 3700102 - RNA, 19 nt, Human
ggguccucuucugggccug

SEQ ID NO: 3700103 - RNA, 18 nt, Human
ggguccugcagccugcag

SEQ ID NO: 3700104 - RNA, 20 nt, Human
ggguccuguggcaggcagcg

SEQ ID NO: 3700105 - RNA, 23 nt, Human
ggguccuguggcaggcagcgcca

SEQ ID NO: 3700106 - RNA, 18 nt, Human
gggucgacuucgggcugg

SEQ ID NO: 3700107 - RNA, 23 nt, Human
gggucggaacccaagcuuagaac

SEQ ID NO: 3700108 - RNA, 15 nt, Human
gggucggcugaccau

SEQ ID NO: 3700109 - RNA, 13 nt, Human
gggucguggagag

SEQ ID NO: 3700110 - RNA, 22 nt, Human
gggucguuugcuuuucaggguu

SEQ ID NO: 3700111 - RNA, 23 nt, Human
gggucucacuauguugcccaggc

SEQ ID NO: 3700112 - RNA, 18 nt, Human
gggucuccaggaggagac

SEQ ID NO: 3700113 - RNA, 13 nt, Human
gggucucccuggc

SEQ ID NO: 3700114 - RNA, 14 nt, Human
gggucucccuggcu

SEQ ID NO: 3700115 - RNA, 18 nt, Human
gggucucccuggcucccu

SEQ ID NO: 3700116 - RNA, 14 nt, Human
gggucucucccuca

SEQ ID NO: 3700117 - RNA, 14 nt, Human
gggucucugcugcc

SEQ ID NO: 3700118 - RNA, 15 nt, Human
gggucucugcugccg

SEQ ID NO: 3700119 - RNA, 17 nt, Human
gggucucuuuuguaaau

SEQ ID NO: 3700120 - RNA, 22 nt, Human
gggucuggcagccucccaucca

SEQ ID NO: 3700121 - RNA, 18 nt, Human
gggucuggcugguguuaa

SEQ ID NO: 3700122 - RNA, 21 nt, Human
gggucugggggcacaagacug

SEQ ID NO: 3700123 - RNA, 15 nt, Human
gggucuguaaaaucu

SEQ ID NO: 3700124 - RNA, 23 nt, Human
gggucuucccuaccucaggcagg

SEQ ID NO: 3700125 - RNA, 18 nt, Human
gggucuugcaaaauuccu

SEQ ID NO: 3700126 - RNA, 20 nt, Human
gggucuugguuccagccugc

SEQ ID NO: 3700127 - RNA, 22 nt, Human
gggucuuugugguagcuuaucu

SEQ ID NO: 3700128 - RNA, 13 nt, Human
gggugaaggcugg

SEQ ID NO: 3700129 - RNA, 16 nt, Human
gggugacaagagccug

SEQ ID NO: 3700130 - RNA, 21 nt, Human
gggugacaagauagagagcua

SEQ ID NO: 3700131 - RNA, 13 nt, Human
gggugacacagac

SEQ ID NO: 3700132 - RNA, 14 nt, Human
gggugacacagacu

SEQ ID NO: 3700133 - RNA, 19 nt, Human
gggugacagagcaagugag

SEQ ID NO: 3700134 - RNA, 13 nt, Human
gggugacagucau

SEQ ID NO: 3700135 - RNA, 13 nt, Human
gggugacggcccu

SEQ ID NO: 3700136 - RNA, 18 nt, Human
gggugagaugcuggagaa

SEQ ID NO: 3700137 - RNA, 15 nt, Human
gggugaggaccacuc

SEQ ID NO: 3700138 - RNA, 15 nt, Human
gggugaggagcuggg

SEQ ID NO: 3700139 - RNA, 18 nt, Human
gggugauauggacagcag

SEQ ID NO: 3700140 - RNA, 14 nt, Human
gggugaugagggca

SEQ ID NO: 3700141 - RNA, 18 nt, Human
gggugaugagggcagcag

SEQ ID NO: 3700142 - RNA, 19 nt, Human
gggugaugagggcagcagc

SEQ ID NO: 3700143 - RNA, 21 nt, Human
gggugaugagggcagcagcca

SEQ ID NO: 3700144 - RNA, 22 nt, Human
gggugauuucagagagggcaga

SEQ ID NO: 3700145 - RNA, 23 nt, Human
gggugcaguaucaugcccugugc

SEQ ID NO: 3700146 - RNA, 18 nt, Human
gggugcccaagcucagaa

SEQ ID NO: 3700147 - RNA, 13 nt, Human
gggugcccacagc

SEQ ID NO: 3700148 - RNA, 12 nt, Human
gggugcccccuc

SEQ ID NO: 3700149 - RNA, 15 nt, Human
gggugcccccuccuc

SEQ ID NO: 3700150 - RNA, 18 nt, Human
gggugcccuccacugccc

SEQ ID NO: 3700151 - RNA, 20 nt, Human
gggugcccuccacugcccuc

SEQ ID NO: 3700152 - RNA, 21 nt, Human
gggugcggcggucccagcucc

SEQ ID NO: 3700153 - RNA, 16 nt, Human
gggugcuacuggggaa

SEQ ID NO: 3700154 - RNA, 16 nt, Human
gggugcucccuaccac

SEQ ID NO: 3700155 - RNA, 15 nt, Human
gggugcugggaggag

SEQ ID NO: 3700156 - RNA, 19 nt, Human
gggugcugggccccugccu

SEQ ID NO: 3700157 - RNA, 21 nt, Human
gggugcuuuuauagaggcuag

SEQ ID NO: 3700158 - RNA, 22 nt, Human
ggguggagacugcuucccaucc

SEQ ID NO: 3700159 - RNA, 14 nt, Human
ggguggaggagagc

SEQ ID NO: 3700160 - RNA, 19 nt, Human
ggguggaggagagccuggu

SEQ ID NO: 3700161 - RNA, 14 nt, Human
ggguggaugccugg

SEQ ID NO: 3700162 - RNA, 13 nt, Human
ggguggcagcaac

SEQ ID NO: 3700163 - RNA, 20 nt, Human
ggguggccaggccgggaaaa

SEQ ID NO: 3700164 - RNA, 11 nt, Human
ggguggcccau

SEQ ID NO: 3700165 - RNA, 18 nt, Human
ggguggcuacucugugcc

SEQ ID NO: 3700166 - RNA, 18 nt, Human
ggguggcuagucagagag

SEQ ID NO: 3700167 - RNA, 15 nt, Human
ggguggcugcagccu

SEQ ID NO: 3700168 - RNA, 19 nt, Human
gggugggccaggcugaugg

SEQ ID NO: 3700169 - RNA, 12 nt, Human
gggugggccucu

SEQ ID NO: 3700170 - RNA, 22 nt, Human
ggguggggaauguuugggcaga

SEQ ID NO: 3700171 - RNA, 20 nt, Human
ggguggggaccucaggccug

SEQ ID NO: 3700172 - RNA, 18 nt, Human
ggguggggagagacgggc

SEQ ID NO: 3700173 - RNA, 14 nt, Human
ggguggggcagugc

SEQ ID NO: 3700174 - RNA, 16 nt, Human
gggugggggccaccug

SEQ ID NO: 3700175 - RNA, 21 nt, Human
ggguggggucaugcccuccuc

SEQ ID NO: 3700176 - RNA, 11 nt, Human
gggugggucag

SEQ ID NO: 3700177 - RNA, 13 nt, Human
gggugguggggag

SEQ ID NO: 3700178 - RNA, 19 nt, Human
ggguguaacaggucuccuc

SEQ ID NO: 3700179 - RNA, 19 nt, Human
ggguguccccgcugcugug

SEQ ID NO: 3700180 - RNA, 14 nt, Human
gggugucugccccc

SEQ ID NO: 3700181 - RNA, 12 nt, Human
ggguguggcagu

SEQ ID NO: 3700182 - RNA, 18 nt, Human
ggguguuguauggggagg

SEQ ID NO: 3700183 - RNA, 12 nt, Human
ggguuacaaacu

SEQ ID NO: 3700184 - RNA, 16 nt, Human
ggguuacaaacugcaa

SEQ ID NO: 3700185 - RNA, 22 nt, Human
ggguuacaguaugcuugcucua

SEQ ID NO: 3700186 - RNA, 20 nt, Human
ggguucagccccuccucugc

SEQ ID NO: 3700187 - RNA, 21 nt, Human
ggguucagccccuccucugcc

SEQ ID NO: 3700188 - RNA, 22 nt, Human
ggguucagccccuccucugcca

SEQ ID NO: 3700189 - RNA, 13 nt, Human
ggguucaggggac

SEQ ID NO: 3700190 - RNA, 20 nt, Human
ggguucauaggucacuggcu

SEQ ID NO: 3700191 - RNA, 14 nt, Human
ggguucaugaugca

SEQ ID NO: 3700192 - RNA, 19 nt, Human
ggguuccagcaccacacuc

SEQ ID NO: 3700193 - RNA, 23 nt, Human
ggguucccuugagggcugcaguu

SEQ ID NO: 3700194 - RNA, 16 nt, Human
ggguuccgcacuuucc

SEQ ID NO: 3700195 - RNA, 21 nt, Human
ggguuccguguccacccccau

SEQ ID NO: 3700196 - RNA, 17 nt, Human
ggguuccuccccuccag

SEQ ID NO: 3700197 - RNA, 12 nt, Human
ggguucuaccca

SEQ ID NO: 3700198 - RNA, 22 nt, Human
ggguucuacccaggugcuagga

SEQ ID NO: 3700199 - RNA, 15 nt, Human
ggguucuguaaaaug

SEQ ID NO: 3700200 - RNA, 19 nt, Human
ggguucuuucuuccucugc

SEQ ID NO: 3700201 - RNA, 23 nt, Human
ggguugaaaauucaaaaaguguu

SEQ ID NO: 3700202 - RNA, 11 nt, Human
ggguugauuaa

SEQ ID NO: 3700203 - RNA, 19 nt, Human
ggguugauuaaggcaguac

SEQ ID NO: 3700204 - RNA, 18 nt, Human
ggguugccacaggccucc

SEQ ID NO: 3700205 - RNA, 19 nt, Human
ggguugccacaggccuccc

SEQ ID NO: 3700206 - RNA, 20 nt, Human
ggguugcuguauaaguuauu

SEQ ID NO: 3700207 - RNA, 21 nt, Human
ggguuggagcaguagcuggag

SEQ ID NO: 3700208 - RNA, 18 nt, Human
ggguuggccccugcccgg

SEQ ID NO: 3700209 - RNA, 19 nt, Human
ggguuggccccugcccggc

SEQ ID NO: 3700210 - RNA, 20 nt, Human
ggguuggcgcacccuccccu

SEQ ID NO: 3700211 - RNA, 20 nt, Human
ggguuggcugggcccagaag

SEQ ID NO: 3700212 - RNA, 13 nt, Human
ggguuggcugggu

SEQ ID NO: 3700213 - RNA, 14 nt, Human
ggguuggcugggua

SEQ ID NO: 3700214 - RNA, 12 nt, Human
ggguuggcuuuu

SEQ ID NO: 3700215 - RNA, 22 nt, Human
ggguuggggugguugaggcuaa

SEQ ID NO: 3700216 - RNA, 15 nt, Human
ggguuggugugcuga

SEQ ID NO: 3700217 - RNA, 14 nt, Human
ggguugugaggccu

SEQ ID NO: 3700218 - RNA, 19 nt, Human
ggguuuacagugaagaaag

SEQ ID NO: 3700219 - RNA, 20 nt, Human
ggguuucgucauguuggcca

SEQ ID NO: 3700220 - RNA, 17 nt, Human
ggguuucuaaagcugcc

SEQ ID NO: 3700221 - RNA, 22 nt, Human
ggguuucugagcugcucugaau

SEQ ID NO: 3700222 - RNA, 15 nt, Human
ggguuucugcccugc

SEQ ID NO: 3700223 - RNA, 18 nt, Human
ggguuugaggauaggagu

SEQ ID NO: 3700224 - RNA, 18 nt, Human
ugaaaaaaaaaaugcuga

SEQ ID NO: 3700225 - RNA, 16 nt, Human
ugaaaaaaaguuuaca

SEQ ID NO: 3700226 - RNA, 16 nt, Human
ugaaaaaagcaguucu

SEQ ID NO: 3700227 - RNA, 12 nt, Human
ugaaaaaagcuc

SEQ ID NO: 3700228 - RNA, 20 nt, Human
ugaaaaaagcucauuucaug

SEQ ID NO: 3700229 - RNA, 18 nt, Human
ugaaaaaaggacaauuuc

SEQ ID NO: 3700230 - RNA, 23 nt, Human
ugaaaaaauauauaucaaauaua

SEQ ID NO: 3700231 - RNA, 12 nt, Human
ugaaaaacuucc

SEQ ID NO: 3700232 - RNA, 9 nt, Human
ugaaaaaga

SEQ ID NO: 3700233 - RNA, 17 nt, Human
ugaaaaagcauguacag

SEQ ID NO: 3700234 - RNA, 23 nt, Human
ugaaaaagcauguacaguguucu

SEQ ID NO: 3700235 - RNA, 22 nt, Human
ugaaaaaguucugcagauaaac

SEQ ID NO: 3700236 - RNA, 13 nt, Human
ugaaaaauauaaa

SEQ ID NO: 3700237 - RNA, 19 nt, Human
ugaaaaauauaaaauuaug

SEQ ID NO: 3700238 - RNA, 16 nt, Human
ugaaaaaugaaagaug

SEQ ID NO: 3700239 - RNA, 19 nt, Human
ugaaaaaugggcacuuaaa

SEQ ID NO: 3700240 - RNA, 16 nt, Human
ugaaaaaugugcaaaa

SEQ ID NO: 3700241 - RNA, 20 nt, Human
ugaaaaaugugcaaaacagc

SEQ ID NO: 3700242 - RNA, 21 nt, Human
ugaaaaauuccacucaaaaua

SEQ ID NO: 3700243 - RNA, 12 nt, Human
ugaaaaauuccu

SEQ ID NO: 3700244 - RNA, 13 nt, Human
ugaaaaauuccua

SEQ ID NO: 3700245 - RNA, 22 nt, Human
ugaaaaauuccuauugugauuu

SEQ ID NO: 3700246 - RNA, 14 nt, Human
ugaaaacaagugcu

SEQ ID NO: 3700247 - RNA, 17 nt, Human
ugaaaacacauuuuucu

SEQ ID NO: 3700248 - RNA, 21 nt, Human
ugaaaacacauuuuucuuagg

SEQ ID NO: 3700249 - RNA, 16 nt, Human
ugaaaacacugugcac

SEQ ID NO: 3700250 - RNA, 14 nt, Human
ugaaaacagaaauu

SEQ ID NO: 3700251 - RNA, 15 nt, Human
ugaaaacagaaauug

SEQ ID NO: 3700252 - RNA, 21 nt, Human
ugaaaacagaaauugguaccu

SEQ ID NO: 3700253 - RNA, 14 nt, Human
ugaaaacauguaau

SEQ ID NO: 3700254 - RNA, 21 nt, Human
ugaaaaccaaaaugacaucuu

SEQ ID NO: 3700255 - RNA, 21 nt, Human
ugaaaaccaucuggccuggcc

SEQ ID NO: 3700256 - RNA, 16 nt, Human
ugaaaacccagagagg

SEQ ID NO: 3700257 - RNA, 13 nt, Human
ugaaaaccucaca

SEQ ID NO: 3700258 - RNA, 20 nt, Human
ugaaaacggagcugaacaau

SEQ ID NO: 3700259 - RNA, 19 nt, Human
ugaaaacguuuuauugugu

SEQ ID NO: 3700260 - RNA, 20 nt, Human
ugaaaacuacauuuuaacau

SEQ ID NO: 3700261 - RNA, 19 nt, Human
ugaaaacucauuacuuuuc

SEQ ID NO: 3700262 - RNA, 19 nt, Human
ugaaaagaaaaaugagccu

SEQ ID NO: 3700263 - RNA, 14 nt, Human
ugaaaagaaauaau

SEQ ID NO: 3700264 - RNA, 16 nt, Human
ugaaaagaaggaaaga

SEQ ID NO: 3700265 - RNA, 19 nt, Human
ugaaaagacaagaaaauca

SEQ ID NO: 3700266 - RNA, 17 nt, Human
ugaaaagacaucaagca

SEQ ID NO: 3700267 - RNA, 17 nt, Human
ugaaaagacuccaaaga

SEQ ID NO: 3700268 - RNA, 22 nt, Human
ugaaaagacuccaaagaaaugu

SEQ ID NO: 3700269 - RNA, 13 nt, Human
ugaaaagaggugu

SEQ ID NO: 3700270 - RNA, 13 nt, Human
ugaaaagauguac

SEQ ID NO: 3700271 - RNA, 22 nt, Human
ugaaaagauguaccugguggau

SEQ ID NO: 3700272 - RNA, 14 nt, Human
ugaaaagcaauauu

SEQ ID NO: 3700273 - RNA, 16 nt, Human
ugaaaagcaauauugu

SEQ ID NO: 3700274 - RNA, 18 nt, Human
ugaaaagcagguugauaa

SEQ ID NO: 3700275 - RNA, 19 nt, Human
ugaaaagcagguugauaaa

SEQ ID NO: 3700276 - RNA, 16 nt, Human
ugaaaagccauguuua

SEQ ID NO: 3700277 - RNA, 19 nt, Human
ugaaaagccucuguuuuga

SEQ ID NO: 3700278 - RNA, 19 nt, Human
ugaaaagcuauuagccagg

SEQ ID NO: 3700279 - RNA, 16 nt, Human
ugaaaagcuucuuaau

SEQ ID NO: 3700280 - RNA, 21 nt, Human
ugaaaagcuuuguuuguucuu

SEQ ID NO: 3700281 - RNA, 14 nt, Human
ugaaaaggccaaga

SEQ ID NO: 3700282 - RNA, 20 nt, Human
ugaaaaggguguugggaggg

SEQ ID NO: 3700283 - RNA, 21 nt, Human
ugaaaagguucuucaucccuu

SEQ ID NO: 3700284 - RNA, 12 nt, Human
ugaaaagucaaa

SEQ ID NO: 3700285 - RNA, 17 nt, Human
ugaaaagucguuuucca

SEQ ID NO: 3700286 - RNA, 22 nt, Human
ugaaaagucguuuuccaaacug

SEQ ID NO: 3700287 - RNA, 18 nt, Human
ugaaaaguguguauauau

SEQ ID NO: 3700288 - RNA, 19 nt, Human
ugaaaaguguguauauauu

SEQ ID NO: 3700289 - RNA, 20 nt, Human
ugaaaaguuacuaccuguca

SEQ ID NO: 3700290 - RNA, 20 nt, Human
ugaaaauaaaaagaucacuu

SEQ ID NO: 3700291 - RNA, 13 nt, Human
ugaaaauaaagaa

SEQ ID NO: 3700292 - RNA, 16 nt, Human
ugaaaauaacugaauu

SEQ ID NO: 3700293 - RNA, 16 nt, Human
ugaaaauaagaauaga

SEQ ID NO: 3700294 - RNA, 20 nt, Human
ugaaaauaagccaugagaau

SEQ ID NO: 3700295 - RNA, 17 nt, Human
ugaaaauaaucucugau

SEQ ID NO: 3700296 - RNA, 12 nt, Human
ugaaaauaauug

SEQ ID NO: 3700297 - RNA, 13 nt, Human
ugaaaauaccauu

SEQ ID NO: 3700298 - RNA, 18 nt, Human
ugaaaauacuuaggaagg

SEQ ID NO: 3700299 - RNA, 18 nt, Human
ugaaaauagguauacagu

SEQ ID NO: 3700300 - RNA, 18 nt, Human
ugaaaauaguuuauuuua

SEQ ID NO: 3700301 - RNA, 22 nt, Human
ugaaaauaguuuauuuuaaaac

SEQ ID NO: 3700302 - RNA, 19 nt, Human
ugaaaauauuaucuuugua

SEQ ID NO: 3700303 - RNA, 20 nt, Human
ugaaaauauuguuuuacaau

SEQ ID NO: 3700304 - RNA, 23 nt, Human
ugaaaauauuguuuuacaauagu

SEQ ID NO: 3700305 - RNA, 12 nt, Human
ugaaaauauuua

SEQ ID NO: 3700306 - RNA, 21 nt, Human
ugaaaauauuuguaucacaaa

SEQ ID NO: 3700307 - RNA, 16 nt, Human
ugaaaaucgugacaac

SEQ ID NO: 3700308 - RNA, 21 nt, Human
ugaaaaugaauaucuauuaau

SEQ ID NO: 3700309 - RNA, 23 nt, Human
ugaaaaugaauaucuauuaauau

SEQ ID NO: 3700310 - RNA, 20 nt, Human
ugaaaauggaaguggcaaua

SEQ ID NO: 3700311 - RNA, 19 nt, Human
ugaaaauguaagcuguuua

SEQ ID NO: 3700312 - RNA, 22 nt, Human
ugaaaauguaaguaaaugucug

SEQ ID NO: 3700313 - RNA, 12 nt, Human
ugaaaauguacu

SEQ ID NO: 3700314 - RNA, 13 nt, Human
ugaaaauguacug

SEQ ID NO: 3700315 - RNA, 14 nt, Human
ugaaaaugucagaa

SEQ ID NO: 3700316 - RNA, 14 nt, Human
ugaaaauguccuug

SEQ ID NO: 3700317 - RNA, 16 nt, Human
ugaaaauguccuugug

SEQ ID NO: 3700318 - RNA, 18 nt, Human
ugaaaauguccuugugau

SEQ ID NO: 3700319 - RNA, 13 nt, Human
ugaaaaugucuug

SEQ ID NO: 3700320 - RNA, 16 nt, Human
ugaaaaugucuugugu

SEQ ID NO: 3700321 - RNA, 13 nt, Human
ugaaaaugugaau

SEQ ID NO: 3700322 - RNA, 15 nt, Human
ugaaaauuaacacug

SEQ ID NO: 3700323 - RNA, 16 nt, Human
ugaaaauuaacacugc

SEQ ID NO: 3700324 - RNA, 15 nt, Human
ugaaaauuauuugaa

SEQ ID NO: 3700325 - RNA, 16 nt, Human
ugaaaauuauuuuaaa

SEQ ID NO: 3700326 - RNA, 21 nt, Human
ugaaaauuauuuuaaacaaaa

SEQ ID NO: 3700327 - RNA, 22 nt, Human
ugaaaauuauuuuguucauaca

SEQ ID NO: 3700328 - RNA, 17 nt, Human
ugaaaauucaaaaagug

SEQ ID NO: 3700329 - RNA, 18 nt, Human
ugaaaauucaaaaagugu

SEQ ID NO: 3700330 - RNA, 14 nt, Human
ugaaaauucagugg

SEQ ID NO: 3700331 - RNA, 18 nt, Human
ugaaaauuccagaaagga

SEQ ID NO: 3700332 - RNA, 22 nt, Human
ugaaaauucgcccgagcuguuu

SEQ ID NO: 3700333 - RNA, 23 nt, Human
ugaaaauugccuuucuguguuua

SEQ ID NO: 3700334 - RNA, 17 nt, Human
ugaaaauuggacagauu

SEQ ID NO: 3700335 - RNA, 23 nt, Human
ugaaaauuggacagauugccugu

SEQ ID NO: 3700336 - RNA, 22 nt, Human
ugaaaauuugagacuauuuaaa

SEQ ID NO: 3700337 - RNA, 18 nt, Human
ugaaacaaauaaucacau

SEQ ID NO: 3700338 - RNA, 19 nt, Human
ugaaacaaauaaucacauu

SEQ ID NO: 3700339 - RNA, 18 nt, Human
ugaaacacaccaggcugu

SEQ ID NO: 3700340 - RNA, 22 nt, Human
ugaaacacaccaggcugugggc

SEQ ID NO: 3700341 - RNA, 13 nt, Human
ugaaacacagcug

SEQ ID NO: 3700342 - RNA, 14 nt, Human
ugaaacacagcugu

SEQ ID NO: 3700343 - RNA, 18 nt, Human
ugaaacacagcuguucuu

SEQ ID NO: 3700344 - RNA, 19 nt, Human
ugaaacacagcuguucuuc

SEQ ID NO: 3700345 - RNA, 23 nt, Human
ugaaacacucaguuguucaauaa

SEQ ID NO: 3700346 - RNA, 15 nt, Human
ugaaacacugguuuu

SEQ ID NO: 3700347 - RNA, 20 nt, Human
ugaaacacugguuuuaaaua

SEQ ID NO: 3700348 - RNA, 12 nt, Human
ugaaacagaaaa

SEQ ID NO: 3700349 - RNA, 15 nt, Human
ugaaacagaaaaaua

SEQ ID NO: 3700350 - RNA, 16 nt, Human
ugaaacagaaacaaaa

SEQ ID NO: 3700351 - RNA, 14 nt, Human
ugaaacagcugccu

SEQ ID NO: 3700352 - RNA, 15 nt, Human
ugaaacagcugccuu

SEQ ID NO: 3700353 - RNA, 19 nt, Human
ugaaacagcugccuuagcu

SEQ ID NO: 3700354 - RNA, 23 nt, Human
ugaaacagcugccuuagcuucag

SEQ ID NO: 3700355 - RNA, 22 nt, Human
ugaaacauaucucuuaucuuac

SEQ ID NO: 3700356 - RNA, 20 nt, Human
ugaaacaugcuuguguuucu

SEQ ID NO: 3700357 - RNA, 18 nt, Human
ugaaacauuuucucccug

SEQ ID NO: 3700358 - RNA, 19 nt, Human
ugaaacauuuucucccugg

SEQ ID NO: 3700359 - RNA, 14 nt, Human
ugaaacauuuuguc

SEQ ID NO: 3700360 - RNA, 23 nt, Human
ugaaacccugucucuacuaaaaa

SEQ ID NO: 3700361 - RNA, 16 nt, Human
ugaaaccuacacacug

SEQ ID NO: 3700362 - RNA, 18 nt, Human
ugaaaccuaguacugccc

SEQ ID NO: 3700363 - RNA, 18 nt, Human
ugaaaccuuuagggcagc

SEQ ID NO: 3700364 - RNA, 20 nt, Human
ugaaaccuuuagggcagcuu

SEQ ID NO: 3700365 - RNA, 21 nt, Human
ugaaaccuuuagggcagcuug

SEQ ID NO: 3700366 - RNA, 19 nt, Human
ugaaaccuuuuuccuagua

SEQ ID NO: 3700367 - RNA, 17 nt, Human
ugaaaccuuuuuuaaga

SEQ ID NO: 3700368 - RNA, 18 nt, Human
ugaaaccuuuuuuaagau

SEQ ID NO: 3700369 - RNA, 23 nt, Human
ugaaaccuuuuuuaagauuuuuc

SEQ ID NO: 3700370 - RNA, 20 nt, Human
ugaaacgcuccuuugugugu

SEQ ID NO: 3700371 - RNA, 20 nt, Human
ugaaacggaugauuucuaug

SEQ ID NO: 3700372 - RNA, 22 nt, Human
ugaaacuagaaagcagagauuu

SEQ ID NO: 3700373 - RNA, 15 nt, Human
ugaaacuagacuuga

SEQ ID NO: 3700374 - RNA, 20 nt, Human
ugaaacuagacuugaggaaa

SEQ ID NO: 3700375 - RNA, 13 nt, Human
ugaaacuauauuu

SEQ ID NO: 3700376 - RNA, 21 nt, Human
ugaaacuauauuuugucauau

SEQ ID NO: 3700377 - RNA, 19 nt, Human
ugaaacucauagacacuga

SEQ ID NO: 3700378 - RNA, 20 nt, Human
ugaaacugcuuguuuccuag

SEQ ID NO: 3700379 - RNA, 22 nt, Human
ugaaacuuauuuuuuucugauu

SEQ ID NO: 3700380 - RNA, 18 nt, Human
ugaaacuucaagcaccag

SEQ ID NO: 3700381 - RNA, 14 nt, Human
ugaaacuuugagau

SEQ ID NO: 3700382 - RNA, 23 nt, Human
ugaaacuuugagaucuaaaaaua

SEQ ID NO: 3700383 - RNA, 21 nt, Human
ugaaacuuugggaaaacaugu

SEQ ID NO: 3700384 - RNA, 15 nt, Human
ugaaacuuuucuaga

SEQ ID NO: 3700385 - RNA, 16 nt, Human
ugaaacuuuucuagaa

SEQ ID NO: 3700386 - RNA, 21 nt, Human
ugaaacuuuucuagaauuauu

SEQ ID NO: 3700387 - RNA, 22 nt, Human
ugaaagaaaauaccaaggaaca

SEQ ID NO: 3700388 - RNA, 20 nt, Human
ugaaagaaaauaugcaucua

SEQ ID NO: 3700389 - RNA, 14 nt, Human
ugaaagaaaauuga

SEQ ID NO: 3700390 - RNA, 14 nt, Human
ugaaagaaacaguu

SEQ ID NO: 3700391 - RNA, 16 nt, Human
ugaaagaaaggacucu

SEQ ID NO: 3700392 - RNA, 21 nt, Human
ugaaagaaaggggcaggagcu

SEQ ID NO: 3700393 - RNA, 20 nt, Human
ugaaagaauagaacacaguu

SEQ ID NO: 3700394 - RNA, 15 nt, Human
ugaaagacugaagaa

SEQ ID NO: 3700395 - RNA, 16 nt, Human
ugaaagacugaagaaa

SEQ ID NO: 3700396 - RNA, 21 nt, Human
ugaaagacuuccaaagaaugu

SEQ ID NO: 3700397 - RNA, 19 nt, Human
ugaaagaggcugaggccug

SEQ ID NO: 3700398 - RNA, 15 nt, Human
ugaaagagucuuucu

SEQ ID NO: 3700399 - RNA, 16 nt, Human
ugaaagaugaucauuu

SEQ ID NO: 3700400 - RNA, 22 nt, Human
ugaaagaugauuugcaauggga

SEQ ID NO: 3700401 - RNA, 18 nt, Human
ugaaagauggcugugccu

SEQ ID NO: 3700402 - RNA, 23 nt, Human
ugaaagauggcugugccucugcc

SEQ ID NO: 3700403 - RNA, 13 nt, Human
ugaaagauuaaac

SEQ ID NO: 3700404 - RNA, 15 nt, Human
ugaaagauuaaacag

SEQ ID NO: 3700405 - RNA, 21 nt, Human
ugaaagauucagguauguugc

SEQ ID NO: 3700406 - RNA, 20 nt, Human
ugaaagcaaaaaugcuaaua

SEQ ID NO: 3700407 - RNA, 11 nt, Human
ugaaagcacag

SEQ ID NO: 3700408 - RNA, 19 nt, Human
ugaaagcagggaauuucua

SEQ ID NO: 3700409 - RNA, 18 nt, Human
ugaaagcagggacuugaa

SEQ ID NO: 3700410 - RNA, 23 nt, Human
ugaaagcagggacuugaacccau

SEQ ID NO: 3700411 - RNA, 17 nt, Human
ugaaagcauccaugugu

SEQ ID NO: 3700412 - RNA, 13 nt, Human
ugaaagcccaagu

SEQ ID NO: 3700413 - RNA, 13 nt, Human
ugaaagcuagaga

SEQ ID NO: 3700414 - RNA, 17 nt, Human
ugaaagcucuguugcaa

SEQ ID NO: 3700415 - RNA, 21 nt, Human
ugaaagcugagaacuccugac

SEQ ID NO: 3700416 - RNA, 22 nt, Human
ugaaagcugagaacuccugacu

SEQ ID NO: 3700417 - RNA, 12 nt, Human
ugaaaggaaaga

SEQ ID NO: 3700418 - RNA, 13 nt, Human
ugaaaggaaagug

SEQ ID NO: 3700419 - RNA, 16 nt, Human
ugaaaggaaauuaagg

SEQ ID NO: 3700420 - RNA, 19 nt, Human
ugaaaggaagauaaacgug

SEQ ID NO: 3700421 - RNA, 22 nt, Human
ugaaaggcaggccuauuucauc

SEQ ID NO: 3700422 - RNA, 23 nt, Human
ugaaaggcaggccuauuucauca

SEQ ID NO: 3700423 - RNA, 21 nt, Human
ugaaaggcuuuucaaccacaa

SEQ ID NO: 3700424 - RNA, 22 nt, Human
ugaaagggagcuaucaggaaca

SEQ ID NO: 3700425 - RNA, 16 nt, Human
ugaaagggaucaucau

SEQ ID NO: 3700426 - RNA, 17 nt, Human
ugaaagggaucaucaug

SEQ ID NO: 3700427 - RNA, 23 nt, Human
ugaaagggcaauaugaaguuacu

SEQ ID NO: 3700428 - RNA, 15 nt, Human
ugaaagggcccagag

SEQ ID NO: 3700429 - RNA, 17 nt, Human
ugaaagggcccagagag

SEQ ID NO: 3700430 - RNA, 18 nt, Human
ugaaagggcccagagagg

SEQ ID NO: 3700431 - RNA, 16 nt, Human
ugaaagguaauuugag

SEQ ID NO: 3700432 - RNA, 15 nt, Human
ugaaagguacuauau

SEQ ID NO: 3700433 - RNA, 18 nt, Human
ugaaagguagacuuuuau

SEQ ID NO: 3700434 - RNA, 17 nt, Human
ugaaagguuuuuuuuca

SEQ ID NO: 3700435 - RNA, 18 nt, Human
ugaaagguuuuuuuucag

SEQ ID NO: 3700436 - RNA, 20 nt, Human
ugaaaguagcagugugaagu

SEQ ID NO: 3700437 - RNA, 14 nt, Human
ugaaagucaguuua

SEQ ID NO: 3700438 - RNA, 17 nt, Human
ugaaagucaugaacaca

SEQ ID NO: 3700439 - RNA, 22 nt, Human
ugaaagucuugugacuagugcu

SEQ ID NO: 3700440 - RNA, 16 nt, Human
ugaaagugaugacaua

SEQ ID NO: 3700441 - RNA, 18 nt, Human
ugaaagugcauuuuugua

SEQ ID NO: 3700442 - RNA, 21 nt, Human
ugaaagugcauuuuuguaaau

SEQ ID NO: 3700443 - RNA, 16 nt, Human
ugaaagugccuuugca

SEQ ID NO: 3700444 - RNA, 19 nt, Human
ugaaagugggcaaaagcuu

SEQ ID NO: 3700445 - RNA, 15 nt, Human
ugaaaguuguacaug

SEQ ID NO: 3700446 - RNA, 18 nt, Human
ugaaaguuuucagaaccu

SEQ ID NO: 3700447 - RNA, 13 nt, Human
ugaaaguuuugua

SEQ ID NO: 3700448 - RNA, 20 nt, Human
ugaaauaacaaaauggacau

SEQ ID NO: 3700449 - RNA, 20 nt, Human
ugaaauaagaauucagacau

SEQ ID NO: 3700450 - RNA, 18 nt, Human
ugaaauaagccagacauc

SEQ ID NO: 3700451 - RNA, 13 nt, Human
ugaaauaagcuau

SEQ ID NO: 3700452 - RNA, 22 nt, Human
ugaaauacauaugauaaauuug

SEQ ID NO: 3700453 - RNA, 22 nt, Human
ugaaauaccagugaaccaaaga

SEQ ID NO: 3700454 - RNA, 11 nt, Human
ugaaauaccuc

SEQ ID NO: 3700455 - RNA, 13 nt, Human
ugaaauaccucau

SEQ ID NO: 3700456 - RNA, 17 nt, Human
ugaaauaccucauguuu

SEQ ID NO: 3700457 - RNA, 19 nt, Human
ugaaauaccucauguuuau

SEQ ID NO: 3700458 - RNA, 16 nt, Human
ugaaauacuguuugag

SEQ ID NO: 3700459 - RNA, 17 nt, Human
ugaaauaggaaacaagu

SEQ ID NO: 3700460 - RNA, 18 nt, Human
ugaaauaggaaacaagug

SEQ ID NO: 3700461 - RNA, 19 nt, Human
ugaaauaguucaaagccaa

SEQ ID NO: 3700462 - RNA, 15 nt, Human
ugaaauaucuguauu

SEQ ID NO: 3700463 - RNA, 16 nt, Human
ugaaauaugauguuaa

SEQ ID NO: 3700464 - RNA, 20 nt, Human
ugaaauaugauguuaaaaaa

SEQ ID NO: 3700465 - RNA, 12 nt, Human
ugaaauaugcau

SEQ ID NO: 3700466 - RNA, 18 nt, Human
ugaaauaugcuggcugga

SEQ ID NO: 3700467 - RNA, 15 nt, Human
ugaaauaugugaagu

SEQ ID NO: 3700468 - RNA, 18 nt, Human
ugaaauauuauguuaaaa

SEQ ID NO: 3700469 - RNA, 16 nt, Human
ugaaauauuuuacagu

SEQ ID NO: 3700470 - RNA, 21 nt, Human
ugaaauauuuuuuaauuuaaa

SEQ ID NO: 3700471 - RNA, 22 nt, Human
ugaaaucaguaaacacugugua

SEQ ID NO: 3700472 - RNA, 16 nt, Human
ugaaaucaguuacucu

SEQ ID NO: 3700473 - RNA, 17 nt, Human
ugaaauccuugacugga

SEQ ID NO: 3700474 - RNA, 15 nt, Human
ugaaaucuaggaaaa

SEQ ID NO: 3700475 - RNA, 19 nt, Human
ugaaaucuaggaaaauuau

SEQ ID NO: 3700476 - RNA, 19 nt, Human
ugaaaucuuacagcugggu

SEQ ID NO: 3700477 - RNA, 14 nt, Human
ugaaaugaaauuua

SEQ ID NO: 3700478 - RNA, 17 nt, Human
ugaaaugaaauuuaaac

SEQ ID NO: 3700479 - RNA, 14 nt, Human
ugaaaugaacacaa

SEQ ID NO: 3700480 - RNA, 17 nt, Human
ugaaaugaacacaaauu

SEQ ID NO: 3700481 - RNA, 22 nt, Human
ugaaaugaacacaaauuaugcu

SEQ ID NO: 3700482 - RNA, 17 nt, Human
ugaaaugaccucugucc

SEQ ID NO: 3700483 - RNA, 19 nt, Human
ugaaaugaggucagagccu

SEQ ID NO: 3700484 - RNA, 20 nt, Human
ugaaaugaggucagagccug

SEQ ID NO: 3700485 - RNA, 19 nt, Human
ugaaaugaggucuguuuaa

SEQ ID NO: 3700486 - RNA, 14 nt, Human
ugaaaugauagauu

SEQ ID NO: 3700487 - RNA, 19 nt, Human
ugaaaugcagagucaauga

SEQ ID NO: 3700488 - RNA, 18 nt, Human
ugaaaugcaucauucuug

SEQ ID NO: 3700489 - RNA, 20 nt, Human
ugaaaugccuuacuuuguau

SEQ ID NO: 3700490 - RNA, 21 nt, Human
ugaaaugccuuacuuuguaug

SEQ ID NO: 3700491 - RNA, 17 nt, Human
ugaaaugcuaugucauu

SEQ ID NO: 3700492 - RNA, 17 nt, Human
ugaaaugcugaaaauug

SEQ ID NO: 3700493 - RNA, 19 nt, Human
ugaaauggacuuuuguaca

SEQ ID NO: 3700494 - RNA, 17 nt, Human
ugaaauggauacuacau

SEQ ID NO: 3700495 - RNA, 19 nt, Human
ugaaauguaaggcugugua

SEQ ID NO: 3700496 - RNA, 20 nt, Human
ugaaauguaaggcuguguaa

SEQ ID NO: 3700497 - RNA, 21 nt, Human
ugaaaugugaauuuuuauugu

SEQ ID NO: 3700498 - RNA, 19 nt, Human
ugaaaugugguuuuccuga

SEQ ID NO: 3700499 - RNA, 14 nt, Human
ugaaauguguguga

SEQ ID NO: 3700500 - RNA, 17 nt, Human
ugaaaugugugugaugu

SEQ ID NO: 3700501 - RNA, 19 nt, Human
ugaaaugugugugauguga

SEQ ID NO: 3700502 - RNA, 20 nt, Human
ugaaauguuacaaaaauaaa

SEQ ID NO: 3700503 - RNA, 18 nt, Human
ugaaauuaaccauagaug

SEQ ID NO: 3700504 - RNA, 22 nt, Human
ugaaauuaaccauagauguaga

SEQ ID NO: 3700505 - RNA, 17 nt, Human
ugaaauuaaccucucac

SEQ ID NO: 3700506 - RNA, 21 nt, Human
ugaaauuaagaaggcaaaaau

SEQ ID NO: 3700507 - RNA, 23 nt, Human
ugaaauuaagaaggcaaaaaugu

SEQ ID NO: 3700508 - RNA, 13 nt, Human
ugaaauuauaguu

SEQ ID NO: 3700509 - RNA, 12 nt, Human
ugaaauuauuca

SEQ ID NO: 3700510 - RNA, 18 nt, Human
ugaaauucacaaaguuaa

SEQ ID NO: 3700511 - RNA, 16 nt, Human
ugaaauuccaaagucu

SEQ ID NO: 3700512 - RNA, 15 nt, Human
ugaaauuccauuugu

SEQ ID NO: 3700513 - RNA, 23 nt, Human
ugaaauucuaaagagcacuuacu

SEQ ID NO: 3700514 - RNA, 13 nt, Human
ugaaauucuauuu

SEQ ID NO: 3700515 - RNA, 11 nt, Human
ugaaauucuga

SEQ ID NO: 3700516 - RNA, 13 nt, Human
ugaaauucugaau

SEQ ID NO: 3700517 - RNA, 16 nt, Human
ugaaauugaaaaguua

SEQ ID NO: 3700518 - RNA, 18 nt, Human
ugaaauugaaaaguuauu

SEQ ID NO: 3700519 - RNA, 16 nt, Human
ugaaauugcauacuuu

SEQ ID NO: 3700520 - RNA, 17 nt, Human
ugaaauuguacauauuu

SEQ ID NO: 3700521 - RNA, 16 nt, Human
ugaaauuuaaacauua

SEQ ID NO: 3700522 - RNA, 16 nt, Human
ugagaugcuggagaag

SEQ ID NO: 3700523 - RNA, 12 nt, Human
ugagaugcuggc

SEQ ID NO: 3700524 - RNA, 15 nt, Human
ugagaugcuggcuug

SEQ ID NO: 3700525 - RNA, 17 nt, Human
ugagauggagucuugcu

SEQ ID NO: 3700526 - RNA, 18 nt, Human
ugagauggcccucuggua

SEQ ID NO: 3700527 - RNA, 17 nt, Human
ugagauggggauaaaau

SEQ ID NO: 3700528 - RNA, 23 nt, Human
ugagauguaagucucaacucugu

SEQ ID NO: 3700529 - RNA, 23 nt, Human
ugagauguagccccucuccugga

SEQ ID NO: 3700530 - RNA, 12 nt, Human
ugagauguauga

SEQ ID NO: 3700531 - RNA, 19 nt, Human
ugagauugccccaggucug

SEQ ID NO: 3700532 - RNA, 16 nt, Human
ugagauuuauuaaaga

SEQ ID NO: 3700533 - RNA, 15 nt, Human
ugagauuuccuccug

SEQ ID NO: 3700534 - RNA, 22 nt, Human
ugagauuuuuaaaaaauauuuu

SEQ ID NO: 3700535 - RNA, 16 nt, Human
ugagcaaaccugcccc

SEQ ID NO: 3700536 - RNA, 20 nt, Human
ugagcaaaccugccccaucc

SEQ ID NO: 3700537 - RNA, 15 nt, Human
ugagcaaauguggcu

SEQ ID NO: 3700538 - RNA, 21 nt, Human
ugagcaacgcuauuccagcug

SEQ ID NO: 3700539 - RNA, 23 nt, Human
ugagcaaggagcacaagccacaa

SEQ ID NO: 3700540 - RNA, 22 nt, Human
ugagcacaacuuuaagaggaca

SEQ ID NO: 3700541 - RNA, 13 nt, Human
ugagcacacuuua

SEQ ID NO: 3700542 - RNA, 13 nt, Human
ugagcacagagug

SEQ ID NO: 3700543 - RNA, 16 nt, Human
ugagcaccaggggaug

SEQ ID NO: 3700544 - RNA, 14 nt, Human
ugagcaccucccag

SEQ ID NO: 3700545 - RNA, 15 nt, Human
ugagcaccucccagc

SEQ ID NO: 3700546 - RNA, 16 nt, Human
ugagcaccucccagcc

SEQ ID NO: 3700547 - RNA, 20 nt, Human
ugagcacggccaacaaagcu

SEQ ID NO: 3700548 - RNA, 20 nt, Human
ugagcacuaaggugugcucu

SEQ ID NO: 3700549 - RNA, 21 nt, Human
ugagcacuaaggugugcucug

SEQ ID NO: 3700550 - RNA, 23 nt, Human
ugagcacuaaggugugcucugau

SEQ ID NO: 3700551 - RNA, 15 nt, Human
ugagcacucccaagu

SEQ ID NO: 3700552 - RNA, 23 nt, Human
ugagcacucccaagucuacagag

SEQ ID NO: 3700553 - RNA, 15 nt, Human
ugagcacugccagga

SEQ ID NO: 3700554 - RNA, 16 nt, Human
ugagcacugccaggag

SEQ ID NO: 3700555 - RNA, 19 nt, Human
ugagcacugccaggaggga

SEQ ID NO: 3700556 - RNA, 22 nt, Human
ugagcacugccaggagggacaa

SEQ ID NO: 3700557 - RNA, 13 nt, Human
ugagcacuguagg

SEQ ID NO: 3700558 - RNA, 13 nt, Human
ugagcacuguuuu

SEQ ID NO: 3700559 - RNA, 14 nt, Human
ugagcacuguuuuc

SEQ ID NO: 3700560 - RNA, 14 nt, Human
ugagcacuuuucaa

SEQ ID NO: 3700561 - RNA, 18 nt, Human
ugagcagccuggagcccu

SEQ ID NO: 3700562 - RNA, 16 nt, Human
ugagcaggaaggccug

SEQ ID NO: 3700563 - RNA, 17 nt, Human
ugagcaggaaggccugg

SEQ ID NO: 3700564 - RNA, 18 nt, Human
ugagcaggaaggccuggg

SEQ ID NO: 3700565 - RNA, 22 nt, Human
ugagcaggccacacuucaaacu

SEQ ID NO: 3700566 - RNA, 17 nt, Human
ugagcagggcucagcgg

SEQ ID NO: 3700567 - RNA, 17 nt, Human
ugagcagucaggaaaga

SEQ ID NO: 3700568 - RNA, 20 nt, Human
ugagcagucaggaaagagaa

SEQ ID NO: 3700569 - RNA, 17 nt, Human
ugagcaguccuuggccu

SEQ ID NO: 3700570 - RNA, 20 nt, Human
ugagcaguccuuggccugcu

SEQ ID NO: 3700571 - RNA, 23 nt, Human
ugagcagugauauucuuuguuaa

SEQ ID NO: 3700572 - RNA, 12 nt, Human
ugagcaguggcu

SEQ ID NO: 3700573 - RNA, 15 nt, Human
ugagcaguggcuggu

SEQ ID NO: 3700574 - RNA, 15 nt, Human
ugagcagugugucuc

SEQ ID NO: 3700575 - RNA, 18 nt, Human
ugagcagugugucuccug

SEQ ID NO: 3700576 - RNA, 16 nt, Human
ugagcaguguuagcuu

SEQ ID NO: 3700577 - RNA, 13 nt, Human
ugagcauagguga

SEQ ID NO: 3700578 - RNA, 21 nt, Human
ugagcauaggugauccaugua

SEQ ID NO: 3700579 - RNA, 13 nt, Human
ugagcaucacaga

SEQ ID NO: 3700580 - RNA, 14 nt, Human
ugagcaucacagaa

SEQ ID NO: 3700581 - RNA, 15 nt, Human
ugagcaucacagaau

SEQ ID NO: 3700582 - RNA, 16 nt, Human
ugagcaucacaguuuu

SEQ ID NO: 3700583 - RNA, 13 nt, Human
ugagcaucaggcc

SEQ ID NO: 3700584 - RNA, 19 nt, Human
ugagcaucaggccaggccc

SEQ ID NO: 3700585 - RNA, 22 nt, Human
ugagcaucaggccaggcccucu

SEQ ID NO: 3700586 - RNA, 24 nt, Human
ugagcaucaggccaggcccucugc

SEQ ID NO: 3700587 - RNA, 16 nt, Human
ugagcauccugagccc

SEQ ID NO: 3700588 - RNA, 23 nt, Human
ugagcaucgcuuaggagaagucu

SEQ ID NO: 3700589 - RNA, 16 nt, Human
ugagcaucuguccccc

SEQ ID NO: 3700590 - RNA, 16 nt, Human
ugagcauggagcuggc

SEQ ID NO: 3700591 - RNA, 15 nt, Human
ugagccaccacgccc

SEQ ID NO: 3700592 - RNA, 19 nt, Human
ugagccaccgugccuggcc

SEQ ID NO: 3700593 - RNA, 20 nt, Human
ugagccaccgugccuggcca

SEQ ID NO: 3700594 - RNA, 13 nt, Human
ugagccacugcac

SEQ ID NO: 3700595 - RNA, 14 nt, Human
ugagccagauuuca

SEQ ID NO: 3700596 - RNA, 19 nt, Human
ugagccagauuucacucuc

SEQ ID NO: 3700597 - RNA, 23 nt, Human
ugagccagcagacauugucagca

SEQ ID NO: 3700598 - RNA, 21 nt, Human
ugagccaggcuagcuggagcc

SEQ ID NO: 3700599 - RNA, 22 nt, Human
ugagccagggucuccagaaagc

SEQ ID NO: 3700600 - RNA, 14 nt, Human
ugagccagucccag

SEQ ID NO: 3700601 - RNA, 19 nt, Human
ugagcccacugugcguggg

SEQ ID NO: 3700602 - RNA, 15 nt, Human
ugagcccagagaaca

SEQ ID NO: 3700603 - RNA, 21 nt, Human
ugagcccagcugggucaggca

SEQ ID NO: 3700604 - RNA, 13 nt, Human
ugagcccaggagu

SEQ ID NO: 3700605 - RNA, 14 nt, Human
ugagcccagggagg

SEQ ID NO: 3700606 - RNA, 15 nt, Human
ugagcccagggaggc

SEQ ID NO: 3700607 - RNA, 18 nt, Human
ugagcccauguucugccc

SEQ ID NO: 3700608 - RNA, 23 nt, Human
ugagcccauguucugcccccagc

SEQ ID NO: 3700609 - RNA, 14 nt, Human
ugagccccagggag

SEQ ID NO: 3700610 - RNA, 21 nt, Human
ugagccccagggugcccagaa

SEQ ID NO: 3700611 - RNA, 23 nt, Human
ugagccccagggugcccagaacu

SEQ ID NO: 3700612 - RNA, 20 nt, Human
ugagcccccccaacacugug

SEQ ID NO: 3700613 - RNA, 23 nt, Human
ugagcccccccaacacugugccc

SEQ ID NO: 3700614 - RNA, 22 nt, Human
ugagccccgcccucuuccugac

SEQ ID NO: 3700615 - RNA, 12 nt, Human
ugagccccuucc

SEQ ID NO: 3700616 - RNA, 14 nt, Human
ugagcccgggcugc

SEQ ID NO: 3700617 - RNA, 17 nt, Human
ugagcccgggcugccug

SEQ ID NO: 3700618 - RNA, 21 nt, Human
ugagcccgggcugccugggcu

SEQ ID NO: 3700619 - RNA, 22 nt, Human
ugagcccgggcugccugggcug

SEQ ID NO: 3700620 - RNA, 20 nt, Human
ugagcccuacucccugcaga

SEQ ID NO: 3700621 - RNA, 12 nt, Human
ugagcccucaga

SEQ ID NO: 3700622 - RNA, 14 nt, Human
ugagcccuccccag

SEQ ID NO: 3700623 - RNA, 24 nt, Human
ugagcccuucggaggaccagggcu

SEQ ID NO: 3700624 - RNA, 21 nt, Human
ugagccgagaucacgccacug

SEQ ID NO: 3700625 - RNA, 20 nt, Human
ugagccgcaucuucuccauc

SEQ ID NO: 3700626 - RNA, 15 nt, Human
ugagccgcccaaggc

SEQ ID NO: 3700627 - RNA, 19 nt, Human
ugagccgcccaaggccuuc

SEQ ID NO: 3700628 - RNA, 17 nt, Human
ugagccgggccccuggg

SEQ ID NO: 3700629 - RNA, 19 nt, Human
ugagccgggccccugggcu

SEQ ID NO: 3700630 - RNA, 20 nt, Human
ugagccgggccccugggcuu

SEQ ID NO: 3700631 - RNA, 14 nt, Human
ugagccgugaacug

SEQ ID NO: 3700632 - RNA, 14 nt, Human
ugagccuaaaaaua

SEQ ID NO: 3700633 - RNA, 16 nt, Human
ugagccuacagaugaa

SEQ ID NO: 3700634 - RNA, 15 nt, Human
ugagccucacagcag

SEQ ID NO: 3700635 - RNA, 13 nt, Human
ugagccucagcau

SEQ ID NO: 3700636 - RNA, 22 nt, Human
ugagccucagcauccuggcacc

SEQ ID NO: 3700637 - RNA, 14 nt, Human
ugagccucagucuc

SEQ ID NO: 3700638 - RNA, 19 nt, Human
ugagccucucaccuguacu

SEQ ID NO: 3700639 - RNA, 14 nt, Human
ugagccucugcucc

SEQ ID NO: 3700640 - RNA, 17 nt, Human
ugagccugcagggaagc

SEQ ID NO: 3700641 - RNA, 10 nt, Human
ugagccuggc

SEQ ID NO: 3700642 - RNA, 11 nt, Human
ugagccuggcc

SEQ ID NO: 3700643 - RNA, 13 nt, Human
ugagccuggcucu

SEQ ID NO: 3700644 - RNA, 16 nt, Human
ugagccugggaaauaa

SEQ ID NO: 3700645 - RNA, 11 nt, Human
ugagccugguc

SEQ ID NO: 3700646 - RNA, 13 nt, Human
ugagccuucaguc

SEQ ID NO: 3700647 - RNA, 14 nt, Human
ugagccuucugagc

SEQ ID NO: 3700648 - RNA, 17 nt, Human
ugagcgacaaagaugau

SEQ ID NO: 3700649 - RNA, 20 nt, Human
ugagcgacagugagacucug

SEQ ID NO: 3700650 - RNA, 22 nt, Human
ugagcgaggagaugcuccuugg

SEQ ID NO: 3700651 - RNA, 23 nt, Human
ugagcgauuauuaucuaaagugu

SEQ ID NO: 3700652 - RNA, 23 nt, Human
ugagcgccuccauccaaggccag

SEQ ID NO: 3700653 - RNA, 18 nt, Human
ugagcgccuggauuucug

SEQ ID NO: 3700654 - RNA, 14 nt, Human
ugagcgcuccugcc

SEQ ID NO: 3700655 - RNA, 18 nt, Human
ugagcgcuccugccgcag

SEQ ID NO: 3700656 - RNA, 12 nt, Human
ugagcgggaggc

SEQ ID NO: 3700657 - RNA, 21 nt, Human
ugagcggugcuguccucaggu

SEQ ID NO: 3700658 - RNA, 17 nt, Human
ugagcguccagaaaugg

SEQ ID NO: 3700659 - RNA, 15 nt, Human
ugagcgugacacuca

SEQ ID NO: 3700660 - RNA, 14 nt, Human
ugagcuacaaaugc

SEQ ID NO: 3700661 - RNA, 18 nt, Human
ugagcuacuggauucuua

SEQ ID NO: 3700662 - RNA, 19 nt, Human
ugagcuagaagcuggagga

SEQ ID NO: 3700663 - RNA, 19 nt, Human
ugagcuaugacuuaacaua

SEQ ID NO: 3700664 - RNA, 18 nt, Human
ugagcuauuaaaacucag

SEQ ID NO: 3700665 - RNA, 16 nt, Human
ugagcuauugcuguuc

SEQ ID NO: 3700666 - RNA, 22 nt, Human
ugagcucagacccccacucuca

SEQ ID NO: 3700667 - RNA, 20 nt, Human
ugagcucagcccuggugggc

SEQ ID NO: 3700668 - RNA, 14 nt, Human
ugagcucagcgugg

SEQ ID NO: 3700669 - RNA, 19 nt, Human
ugagcucaggaguuugaga

SEQ ID NO: 3700670 - RNA, 17 nt, Human
ugagcuccagaccccca

SEQ ID NO: 3700671 - RNA, 19 nt, Human
ugagcucccacaagccuga

SEQ ID NO: 3700672 - RNA, 17 nt, Human
ggguuugccauuugaua

SEQ ID NO: 3700673 - RNA, 20 nt, Human
ggguuuggcgggccaaggac

SEQ ID NO: 3700674 - RNA, 22 nt, Human
ggguuuggcgggccaaggacug

SEQ ID NO: 3700675 - RNA, 14 nt, Human
ggguuuuauauuuu

SEQ ID NO: 3700676 - RNA, 20 nt, Human
ggguuuuauuguuuaaaauc

SEQ ID NO: 3700677 - RNA, 18 nt, Human
ggguuuuccaaugugacu

SEQ ID NO: 3700678 - RNA, 16 nt, Human
ggguuuuccacccugg

SEQ ID NO: 3700679 - RNA, 14 nt, Human
gguaaaacaaaaca

SEQ ID NO: 3700680 - RNA, 23 nt, Human
gguaaaagugugagcagugaguu

SEQ ID NO: 3700681 - RNA, 13 nt, Human
gguaaaauacuuc

SEQ ID NO: 3700682 - RNA, 23 nt, Human
gguaaaauacuuuuacucugccu

SEQ ID NO: 3700683 - RNA, 13 nt, Human
gguaaaauguauu

SEQ ID NO: 3700684 - RNA, 16 nt, Human
gguaaaauuagaugca

SEQ ID NO: 3700685 - RNA, 22 nt, Human
gguaaaauuagaugcauguuga

SEQ ID NO: 3700686 - RNA, 16 nt, Human
gguaaacacgccugca

SEQ ID NO: 3700687 - RNA, 15 nt, Human
gguaaagacuggcuu

SEQ ID NO: 3700688 - RNA, 20 nt, Human
gguaaaguuaaguugagaua

SEQ ID NO: 3700689 - RNA, 15 nt, Human
gguaaaucaguaaga

SEQ ID NO: 3700690 - RNA, 16 nt, Human
gguaaauguuucuuuu

SEQ ID NO: 3700691 - RNA, 21 nt, Human
gguaaauguuucuuuuaaaga

SEQ ID NO: 3700692 - RNA, 18 nt, Human
gguaaauuuccccaacag

SEQ ID NO: 3700693 - RNA, 21 nt, Human
gguaacagaacagcuucaggu

SEQ ID NO: 3700694 - RNA, 22 nt, Human
gguaacauccuuucuauugaaa

SEQ ID NO: 3700695 - RNA, 17 nt, Human
gguaacuguccuguccu

SEQ ID NO: 3700696 - RNA, 24 nt, Human
gguaacuuuugugaauuaggcugu

SEQ ID NO: 3700697 - RNA, 23 nt, Human
gguaagaagccgggaacagacaa

SEQ ID NO: 3700698 - RNA, 15 nt, Human
gguaagauuguuauu

SEQ ID NO: 3700699 - RNA, 13 nt, Human
gguaagcuuccag

SEQ ID NO: 3700700 - RNA, 20 nt, Human
gguaaucaaugaauauugaa

SEQ ID NO: 3700701 - RNA, 22 nt, Human
gguaauuguugcuaaucuucuu

SEQ ID NO: 3700702 - RNA, 19 nt, Human
gguacaaaaauaaauuuau

SEQ ID NO: 3700703 - RNA, 16 nt, Human
gguacaauuucuuuug

SEQ ID NO: 3700704 - RNA, 16 nt, Human
gguacauggugcuggg

SEQ ID NO: 3700705 - RNA, 19 nt, Human
gguacauuuauaauugcau

SEQ ID NO: 3700706 - RNA, 23 nt, Human
gguacauuuuucaacuuugaaua

SEQ ID NO: 3700707 - RNA, 17 nt, Human
gguaccagauaacuuuu

SEQ ID NO: 3700708 - RNA, 14 nt, Human
gguaccagaugcag

SEQ ID NO: 3700709 - RNA, 20 nt, Human
gguaccaggucuccuccacc

SEQ ID NO: 3700710 - RNA, 16 nt, Human
gguacccacugcucug

SEQ ID NO: 3700711 - RNA, 12 nt, Human
gguacccagcca

SEQ ID NO: 3700712 - RNA, 21 nt, Human
gguacccagccaucugcccag

SEQ ID NO: 3700713 - RNA, 14 nt, Human
gguacccuccuggc

SEQ ID NO: 3700714 - RNA, 11 nt, Human
gguacccuggg

SEQ ID NO: 3700715 - RNA, 23 nt, Human
gguaccuugcacacaucaucugu

SEQ ID NO: 3700716 - RNA, 14 nt, Human
gguacuaaauuuaa

SEQ ID NO: 3700717 - RNA, 16 nt, Human
gguacucuccuagaga

SEQ ID NO: 3700718 - RNA, 15 nt, Human
gguacucuuguugag

SEQ ID NO: 3700719 - RNA, 20 nt, Human
gguacuguacagcuggcucu

SEQ ID NO: 3700720 - RNA, 16 nt, Human
gguacuucuugaaggu

SEQ ID NO: 3700721 - RNA, 16 nt, Human
gguacuugucauuucg

SEQ ID NO: 3700722 - RNA, 21 nt, Human
gguacuuuuaugauguauauu

SEQ ID NO: 3700723 - RNA, 20 nt, Human
gguacuuuugagugugugug

SEQ ID NO: 3700724 - RNA, 17 nt, Human
gguacuuuuugugaaga

SEQ ID NO: 3700725 - RNA, 15 nt, Human
gguagaauguaaagc

SEQ ID NO: 3700726 - RNA, 15 nt, Human
gguagacacacauga

SEQ ID NO: 3700727 - RNA, 19 nt, Human
gguagaccaggauuucuaa

SEQ ID NO: 3700728 - RNA, 14 nt, Human
gguagaccugucuc

SEQ ID NO: 3700729 - RNA, 15 nt, Human
gguagagcugaucca

SEQ ID NO: 3700730 - RNA, 23 nt, Human
gguagagcugauccagagcacag

SEQ ID NO: 3700731 - RNA, 23 nt, Human
gguagaguuugaaggaggugagg

SEQ ID NO: 3700732 - RNA, 14 nt, Human
gguagcauuuuaaa

SEQ ID NO: 3700733 - RNA, 14 nt, Human
gguagccaggggga

SEQ ID NO: 3700734 - RNA, 13 nt, Human
gguagccugcugg

SEQ ID NO: 3700735 - RNA, 22 nt, Human
gguagcgggggaggguaggcag

SEQ ID NO: 3700736 - RNA, 18 nt, Human
gguagcugccccuggcuc

SEQ ID NO: 3700737 - RNA, 19 nt, Human
gguagcugccccuggcucu

SEQ ID NO: 3700738 - RNA, 18 nt, Human
gguagcuuaccugacaca

SEQ ID NO: 3700739 - RNA, 18 nt, Human
gguaggaacugcugggcu

SEQ ID NO: 3700740 - RNA, 20 nt, Human
gguaggccuuuuaacauuuu

SEQ ID NO: 3700741 - RNA, 15 nt, Human
gguagggaggcagcc

SEQ ID NO: 3700742 - RNA, 17 nt, Human
gguagggaggcagccuc

SEQ ID NO: 3700743 - RNA, 13 nt, Human
gguaggggcuggg

SEQ ID NO: 3700744 - RNA, 23 nt, Human
gguagggggcuggaggagcccag

SEQ ID NO: 3700745 - RNA, 23 nt, Human
gguaggggggaaacagguuggga

SEQ ID NO: 3700746 - RNA, 16 nt, Human
gguaggguaaaucagu

SEQ ID NO: 3700747 - RNA, 17 nt, Human
gguagguugggacacca

SEQ ID NO: 3700748 - RNA, 21 nt, Human
gguaguaccuuuuauauccca

SEQ ID NO: 3700749 - RNA, 20 nt, Human
gguagucucacugcuugaac

SEQ ID NO: 3700750 - RNA, 21 nt, Human
gguaguuaggaugcucaguug

SEQ ID NO: 3700751 - RNA, 19 nt, Human
gguaguuaguagcauguug

SEQ ID NO: 3700752 - RNA, 18 nt, Human
gguaguugcaauugaauu

SEQ ID NO: 3700753 - RNA, 21 nt, Human
gguauaaaacuuuccucgccu

SEQ ID NO: 3700754 - RNA, 13 nt, Human
gguauaaaagaug

SEQ ID NO: 3700755 - RNA, 16 nt, Human
gguauaaaagaugggg

SEQ ID NO: 3700756 - RNA, 23 nt, Human
gguauaaaggcauugauauuuua

SEQ ID NO: 3700757 - RNA, 18 nt, Human
gguauaaguggugugugu

SEQ ID NO: 3700758 - RNA, 20 nt, Human
gguauaaugguugacugggu

SEQ ID NO: 3700759 - RNA, 23 nt, Human
gguauaguucaugucugcuauca

SEQ ID NO: 3700760 - RNA, 18 nt, Human
gguauauauccgccuggc

SEQ ID NO: 3700761 - RNA, 22 nt, Human
gguauaucauuauaacugaagg

SEQ ID NO: 3700762 - RNA, 17 nt, Human
gguauaucauucuaaag

SEQ ID NO: 3700763 - RNA, 15 nt, Human
gguauaucugggcug

SEQ ID NO: 3700764 - RNA, 14 nt, Human
gguaucaaaauuac

SEQ ID NO: 3700765 - RNA, 21 nt, Human
gguaucaaacagcucaggcug

SEQ ID NO: 3700766 - RNA, 14 nt, Human
gguaucaggugcug

SEQ ID NO: 3700767 - RNA, 19 nt, Human
gguaucaggugcugccauc

SEQ ID NO: 3700768 - RNA, 18 nt, Human
gguauccccccaucuugc

SEQ ID NO: 3700769 - RNA, 20 nt, Human
gguaucuaauucuuuaauga

SEQ ID NO: 3700770 - RNA, 16 nt, Human
gguaucuguucuuuaa

SEQ ID NO: 3700771 - RNA, 21 nt, Human
gguaugaacuugaggacacau

SEQ ID NO: 3700772 - RNA, 22 nt, Human
gguaugaacuugaggacacaug

SEQ ID NO: 3700773 - RNA, 14 nt, Human
gguaugagcugagg

SEQ ID NO: 3700774 - RNA, 16 nt, Human
gguaugagcugagggg

SEQ ID NO: 3700775 - RNA, 22 nt, Human
gguauggcguaaguacagagaa

SEQ ID NO: 3700776 - RNA, 14 nt, Human
gguaugucugccau

SEQ ID NO: 3700777 - RNA, 14 nt, Human
gguaugugugugua

SEQ ID NO: 3700778 - RNA, 18 nt, Human
gguauuaugcuucuugga

SEQ ID NO: 3700779 - RNA, 18 nt, Human
gguauuccuuuuguguac

SEQ ID NO: 3700780 - RNA, 12 nt, Human
gguauuguauuu

SEQ ID NO: 3700781 - RNA, 20 nt, Human
gguauuguauuuauucaaua

SEQ ID NO: 3700782 - RNA, 14 nt, Human
gguauuuaaaguau

SEQ ID NO: 3700783 - RNA, 20 nt, Human
gguauuuaucuauuguaaga

SEQ ID NO: 3700784 - RNA, 20 nt, Human
gguauuuucccccuuuucug

SEQ ID NO: 3700785 - RNA, 18 nt, Human
gguauuuuugcccugagu

SEQ ID NO: 3700786 - RNA, 18 nt, Human
ggucaaaauagugccacu

SEQ ID NO: 3700787 - RNA, 18 nt, Human
ggucaacagaaugaaaaa

SEQ ID NO: 3700788 - RNA, 22 nt, Human
ggucaacuugagcauguuacug

SEQ ID NO: 3700789 - RNA, 14 nt, Human
ggucaagaaacagc

SEQ ID NO: 3700790 - RNA, 15 nt, Human
ggucaagcccaggag

SEQ ID NO: 3700791 - RNA, 19 nt, Human
ggucaagcccaggaggacu

SEQ ID NO: 3700792 - RNA, 18 nt, Human
ggucaaguuauuaauuuc

SEQ ID NO: 3700793 - RNA, 22 nt, Human
ggucaaguugucagguuauuua

SEQ ID NO: 3700794 - RNA, 20 nt, Human
ggucaauacaguacaggcag

SEQ ID NO: 3700795 - RNA, 13 nt, Human
ggucaaucccaaa

SEQ ID NO: 3700796 - RNA, 14 nt, Human
ggucaaugcuauuu

SEQ ID NO: 3700797 - RNA, 23 nt, Human
ggucaaugcuauuuuuguuuuua

SEQ ID NO: 3700798 - RNA, 17 nt, Human
ggucacagccaggcgcu

SEQ ID NO: 3700799 - RNA, 13 nt, Human
ggucacagccucc

SEQ ID NO: 3700800 - RNA, 17 nt, Human
ggucacauucaggaaga

SEQ ID NO: 3700801 - RNA, 21 nt, Human
ggucacauucaggaagaugaa

SEQ ID NO: 3700802 - RNA, 15 nt, Human
ggucaccaugaaacu

SEQ ID NO: 3700803 - RNA, 19 nt, Human
ggucaccucacucagcacc

SEQ ID NO: 3700804 - RNA, 21 nt, Human
ggucaccucacucagcaccac

SEQ ID NO: 3700805 - RNA, 12 nt, Human
ggucacucuggc

SEQ ID NO: 3700806 - RNA, 19 nt, Human
ggucacugaaacuucaagc

SEQ ID NO: 3700807 - RNA, 20 nt, Human
ggucacugaggccugagacc

SEQ ID NO: 3700808 - RNA, 15 nt, Human
ggucacugccaugga

SEQ ID NO: 3700809 - RNA, 13 nt, Human
ggucacuggaaag

SEQ ID NO: 3700810 - RNA, 16 nt, Human
ggucacuggcucucca

SEQ ID NO: 3700811 - RNA, 18 nt, Human
ggucacuguuuccugggc

SEQ ID NO: 3700812 - RNA, 21 nt, Human
ggucacuuaaaaugugcagua

SEQ ID NO: 3700813 - RNA, 17 nt, Human
ggucagaaacaggaccg

SEQ ID NO: 3700814 - RNA, 17 nt, Human
ggucagaagagagggug

SEQ ID NO: 3700815 - RNA, 16 nt, Human
ggucagagccugcagu

SEQ ID NO: 3700816 - RNA, 18 nt, Human
ggucagaggaccuguauu

SEQ ID NO: 3700817 - RNA, 19 nt, Human
ggucagaggaccuguauuu

SEQ ID NO: 3700818 - RNA, 21 nt, Human
ggucagcaugucuauucagcu

SEQ ID NO: 3700819 - RNA, 18 nt, Human
ggucagccagggccaggg

SEQ ID NO: 3700820 - RNA, 16 nt, Human
ugagcuccccaaaaac

SEQ ID NO: 3700821 - RNA, 20 nt, Human
ugagcuccccaccaccccag

SEQ ID NO: 3700822 - RNA, 16 nt, Human
ugagcuccucugggca

SEQ ID NO: 3700823 - RNA, 19 nt, Human
ugagcuccucugggcagga

SEQ ID NO: 3700824 - RNA, 20 nt, Human
ugagcuccuguccccugcua

SEQ ID NO: 3700825 - RNA, 22 nt, Human
ugagcuccuguccccugcuaca

SEQ ID NO: 3700826 - RNA, 20 nt, Human
ugagcucgguggacccaggg

SEQ ID NO: 3700827 - RNA, 22 nt, Human
ugagcucuacccagggccugca

SEQ ID NO: 3700828 - RNA, 20 nt, Human
ugagcucucggaacugcaug

SEQ ID NO: 3700829 - RNA, 21 nt, Human
ugagcucucggaacugcaugc

SEQ ID NO: 3700830 - RNA, 13 nt, Human
ugagcucucugcc

SEQ ID NO: 3700831 - RNA, 22 nt, Human
ugagcucugcauuugucuauuc

SEQ ID NO: 3700832 - RNA, 15 nt, Human
ugagcucuucauguu

SEQ ID NO: 3700833 - RNA, 22 nt, Human
ugagcucuugugaggaaaguca

SEQ ID NO: 3700834 - RNA, 17 nt, Human
ugagcugaaagaggcca

SEQ ID NO: 3700835 - RNA, 20 nt, Human
ugagcugaaaugcugcauuu

SEQ ID NO: 3700836 - RNA, 17 nt, Human
ugagcugagaucgugcc

SEQ ID NO: 3700837 - RNA, 15 nt, Human
ugagcugagccaggc

SEQ ID NO: 3700838 - RNA, 14 nt, Human
ugagcugaggcagc

SEQ ID NO: 3700839 - RNA, 16 nt, Human
ugagcugauauaaauu

SEQ ID NO: 3700840 - RNA, 16 nt, Human
ugagcugaucugcgga

SEQ ID NO: 3700841 - RNA, 11 nt, Human
ugagcugccuu

SEQ ID NO: 3700842 - RNA, 19 nt, Human
ugagcugcugacugccaau

SEQ ID NO: 3700843 - RNA, 13 nt, Human
ugagcugggauga

SEQ ID NO: 3700844 - RNA, 14 nt, Human
ugagcugggcaugg

SEQ ID NO: 3700845 - RNA, 20 nt, Human
ugagcuggggaugucucuca

SEQ ID NO: 3700846 - RNA, 15 nt, Human
ugagcuguugccuca

SEQ ID NO: 3700847 - RNA, 23 nt, Human
ugagcuuaagaauuuugagcagg

SEQ ID NO: 3700848 - RNA, 16 nt, Human
ugagcuuagugaaauu

SEQ ID NO: 3700849 - RNA, 15 nt, Human
ugagcuucucuguga

SEQ ID NO: 3700850 - RNA, 16 nt, Human
ugagcuucucugugaa

SEQ ID NO: 3700851 - RNA, 15 nt, Human
ugagcuuggccagaa

SEQ ID NO: 3700852 - RNA, 22 nt, Human
ugagcuuuauguaauaauguga

SEQ ID NO: 3700853 - RNA, 18 nt, Human
ugagcuuucugaacagcu

SEQ ID NO: 3700854 - RNA, 22 nt, Human
ugagcuuugcauguuccacuaa

SEQ ID NO: 3700855 - RNA, 17 nt, Human
ugagcuuugcugcuaca

SEQ ID NO: 3700856 - RNA, 17 nt, Human
ugagcuuuggacacaca

SEQ ID NO: 3700857 - RNA, 22 nt, Human
ugagcuuuggacacacacagcu

SEQ ID NO: 3700858 - RNA, 19 nt, Human
ugagcuuuggacgcacaca

SEQ ID NO: 3700859 - RNA, 12 nt, Human
ugagcuuuucua

SEQ ID NO: 3700860 - RNA, 13 nt, Human
ugagcuuuucuag

SEQ ID NO: 3700861 - RNA, 23 nt, Human
ugaggaaaaaaaucguccaggga

SEQ ID NO: 3700862 - RNA, 18 nt, Human
ugaggaaaaauaugugaa

SEQ ID NO: 3700863 - RNA, 19 nt, Human
ugaggaaaaauaugugaag

SEQ ID NO: 3700864 - RNA, 15 nt, Human
ugaggaaaauucuua

SEQ ID NO: 3700865 - RNA, 17 nt, Human
ugaggaaagcacacagu

SEQ ID NO: 3700866 - RNA, 19 nt, Human
ugaggaaagcauguauuca

SEQ ID NO: 3700867 - RNA, 15 nt, Human
ugaggaaaggccagc

SEQ ID NO: 3700868 - RNA, 17 nt, Human
ugaggaaagucauuggc

SEQ ID NO: 3700869 - RNA, 18 nt, Human
ugaggaaagucauuggcu

SEQ ID NO: 3700870 - RNA, 16 nt, Human
ugaggaaaucaaagug

SEQ ID NO: 3700871 - RNA, 18 nt, Human
ugaggaaaucaaagugcu

SEQ ID NO: 3700872 - RNA, 22 nt, Human
ugaggaaaucaaagugcuauua

SEQ ID NO: 3700873 - RNA, 14 nt, Human
ugaggaaauuugca

SEQ ID NO: 3700874 - RNA, 15 nt, Human
ugaggaacuguacag

SEQ ID NO: 3700875 - RNA, 19 nt, Human
ugaggaacuguagaugaug

SEQ ID NO: 3700876 - RNA, 22 nt, Human
ugaggaagcaaaagcaucuaug

SEQ ID NO: 3700877 - RNA, 23 nt, Human
ugaggaagccagguccacggucu

SEQ ID NO: 3700878 - RNA, 17 nt, Human
ugaggaagccgcugggg

SEQ ID NO: 3700879 - RNA, 16 nt, Human
ugaggaagcuccaguc

SEQ ID NO: 3700880 - RNA, 19 nt, Human
ugaggaagcuccaguccug

SEQ ID NO: 3700881 - RNA, 23 nt, Human
ugaggaagcuccaguccugcucu

SEQ ID NO: 3700882 - RNA, 19 nt, Human
ugaggaaggcaggaagaga

SEQ ID NO: 3700883 - RNA, 20 nt, Human
ugaggaaggcaggaagagag

SEQ ID NO: 3700884 - RNA, 19 nt, Human
ugaggaauaguugagcccc

SEQ ID NO: 3700885 - RNA, 20 nt, Human
ugaggaauaguugagcccca

SEQ ID NO: 3700886 - RNA, 19 nt, Human
ugaggaauguauauguuuu

SEQ ID NO: 3700887 - RNA, 15 nt, Human
ugaggaauuucaccu

SEQ ID NO: 3700888 - RNA, 13 nt, Human
ugaggacaagaga

SEQ ID NO: 3700889 - RNA, 16 nt, Human
ugaggacacaugucca

SEQ ID NO: 3700890 - RNA, 18 nt, Human
ugaggacagaugccuccu

SEQ ID NO: 3700891 - RNA, 16 nt, Human
ugaggacagcuguccu

SEQ ID NO: 3700892 - RNA, 17 nt, Human
ugaggacagcuguccuc

SEQ ID NO: 3700893 - RNA, 21 nt, Human
ugaggagagaaaauauaugua

SEQ ID NO: 3700894 - RNA, 11 nt, Human
ugaggagcccc

SEQ ID NO: 3700895 - RNA, 16 nt, Human
ugaggagcuugaaacc

SEQ ID NO: 3700896 - RNA, 17 nt, Human
ugaggaggccuccaucu

SEQ ID NO: 3700897 - RNA, 13 nt, Human
ugaggaggguggg

SEQ ID NO: 3700898 - RNA, 16 nt, Human
ugaggaguaaaauuca

SEQ ID NO: 3700899 - RNA, 16 nt, Human
ugaggagucuugugug

SEQ ID NO: 3700900 - RNA, 16 nt, Human
ugaggagugugagaau

SEQ ID NO: 3700901 - RNA, 14 nt, Human
ugaggaguuuccua

SEQ ID NO: 3700902 - RNA, 21 nt, Human
ugaggaguuuccuaaaaguuc

SEQ ID NO: 3700903 - RNA, 15 nt, Human
ugaggaucagaaagu

SEQ ID NO: 3700904 - RNA, 17 nt, Human
ugaggaucagaguaauc

SEQ ID NO: 3700905 - RNA, 19 nt, Human
ugaggaucagaguaaucca

SEQ ID NO: 3700906 - RNA, 22 nt, Human
ugaggaugaaaaaauaacacug

SEQ ID NO: 3700907 - RNA, 16 nt, Human
ugaggaugagcuggaa

SEQ ID NO: 3700908 - RNA, 14 nt, Human
ugaggaugauguac

SEQ ID NO: 3700909 - RNA, 12 nt, Human
ugaggaugggaa

SEQ ID NO: 3700910 - RNA, 16 nt, Human
ugaggaugggaaggag

SEQ ID NO: 3700911 - RNA, 20 nt, Human
ugaggauuaguuuagaacag

SEQ ID NO: 3700912 - RNA, 16 nt, Human
ugaggauuuagaagug

SEQ ID NO: 3700913 - RNA, 16 nt, Human
ugaggauuuugaguau

SEQ ID NO: 3700914 - RNA, 14 nt, Human
ugaggcaaaagaag

SEQ ID NO: 3700915 - RNA, 20 nt, Human
ugaggcaaccugauuguaaa

SEQ ID NO: 3700916 - RNA, 15 nt, Human
ugaggcaaguguggg

SEQ ID NO: 3700917 - RNA, 16 nt, Human
ugaggcaaugucagga

SEQ ID NO: 3700918 - RNA, 20 nt, Human
ugaggcaaugucaggaacag

SEQ ID NO: 3700919 - RNA, 14 nt, Human
ugaggcagacagca

SEQ ID NO: 3700920 - RNA, 15 nt, Human
ugaggcagacagcag

SEQ ID NO: 3700921 - RNA, 21 nt, Human
ugaggcagcagugugaggcca

SEQ ID NO: 3700922 - RNA, 22 nt, Human
ugaggcagggaaguccccaggc

SEQ ID NO: 3700923 - RNA, 15 nt, Human
ugaggcaggggcgga

SEQ ID NO: 3700924 - RNA, 17 nt, Human
ugaggcagguccccaga

SEQ ID NO: 3700925 - RNA, 19 nt, Human
ugaggcagugggucccacu

SEQ ID NO: 3700926 - RNA, 21 nt, Human
ugaggcagugggucccacuuc

SEQ ID NO: 3700927 - RNA, 22 nt, Human
ugaggcagugggucccacuucc

SEQ ID NO: 3700928 - RNA, 18 nt, Human
ugaggcauugcacaggga

SEQ ID NO: 3700929 - RNA, 21 nt, Human
ugaggcauuuguuugaacuga

SEQ ID NO: 3700930 - RNA, 22 nt, Human
ugaggccaaacguuuugaacua

SEQ ID NO: 3700931 - RNA, 21 nt, Human
ugaggccaagaauauugcaaa

SEQ ID NO: 3700932 - RNA, 15 nt, Human
ugaggccacugaaga

SEQ ID NO: 3700933 - RNA, 12 nt, Human
ugaggccagaga

SEQ ID NO: 3700934 - RNA, 17 nt, Human
ugaggccagccuggccu

SEQ ID NO: 3700935 - RNA, 18 nt, Human
ugaggccagccuggccuc

SEQ ID NO: 3700936 - RNA, 20 nt, Human
ugaggccauggacucugucc

SEQ ID NO: 3700937 - RNA, 17 nt, Human
ugaggcccagagggccu

SEQ ID NO: 3700938 - RNA, 18 nt, Human
ugaggcccagagggccug

SEQ ID NO: 3700939 - RNA, 20 nt, Human
ugaggcccagagggccugca

SEQ ID NO: 3700940 - RNA, 13 nt, Human
ugaggcccaggga

SEQ ID NO: 3700941 - RNA, 21 nt, Human
ugaggccccuucuagguggca

SEQ ID NO: 3700942 - RNA, 12 nt, Human
ugaggcccucca

SEQ ID NO: 3700943 - RNA, 13 nt, Human
ugaggcccuccac

SEQ ID NO: 3700944 - RNA, 19 nt, Human
ugaggcccuccacaccugc

SEQ ID NO: 3700945 - RNA, 20 nt, Human
ugaggccgcuagaggccuga

SEQ ID NO: 3700946 - RNA, 19 nt, Human
ugaggccuaaaaguaaaca

SEQ ID NO: 3700947 - RNA, 18 nt, Human
ugaggccugagacccagg

SEQ ID NO: 3700948 - RNA, 19 nt, Human
ugaggccugcccucaggga

SEQ ID NO: 3700949 - RNA, 11 nt, Human
ugaggccugga

SEQ ID NO: 3700950 - RNA, 14 nt, Human
ugaggccuggacuu

SEQ ID NO: 3700951 - RNA, 23 nt, Human
ugaggccuggacuuuccugcaac

SEQ ID NO: 3700952 - RNA, 14 nt, Human
ugaggccuggccag

SEQ ID NO: 3700953 - RNA, 15 nt, Human
ugaggccuggccagg

SEQ ID NO: 3700954 - RNA, 16 nt, Human
ugaggccuggccaggc

SEQ ID NO: 3700955 - RNA, 13 nt, Human
ugaggccugggcc

SEQ ID NO: 3700956 - RNA, 14 nt, Human
ugaggccugucugu

SEQ ID NO: 3700957 - RNA, 22 nt, Human
ugaggccuuaucauucauucuu

SEQ ID NO: 3700958 - RNA, 20 nt, Human
ugaggcgagaagggcugcuu

SEQ ID NO: 3700959 - RNA, 17 nt, Human
ugaggcuaguguggugu

SEQ ID NO: 3700960 - RNA, 23 nt, Human
ugaggcuagugugguguuuccug

SEQ ID NO: 3700961 - RNA, 18 nt, Human
ugaggcucugcccuuggu

SEQ ID NO: 3700962 - RNA, 17 nt, Human
ugaggcucuuucugggc

SEQ ID NO: 3700963 - RNA, 19 nt, Human
ugaggcucuuucugggcca

SEQ ID NO: 3700964 - RNA, 13 nt, Human
ugaggcugagacu

SEQ ID NO: 3700965 - RNA, 21 nt, Human
ugaggcuggacuccagaucug

SEQ ID NO: 3700966 - RNA, 11 nt, Human
ugaggcugggc

SEQ ID NO: 3700967 - RNA, 13 nt, Human
ugaggcuguccug

SEQ ID NO: 3700968 - RNA, 21 nt, Human
ugaggcuguggucacagcgga

SEQ ID NO: 3700969 - RNA, 14 nt, Human
ggucagcccuagga

SEQ ID NO: 3700970 - RNA, 16 nt, Human
ggucagcguugcaugu

SEQ ID NO: 3700971 - RNA, 22 nt, Human
ggucaggaguuagaggccagcc

SEQ ID NO: 3700972 - RNA, 13 nt, Human
ggucaggcagggu

SEQ ID NO: 3700973 - RNA, 20 nt, Human
ggucaggccuuugagcucag

SEQ ID NO: 3700974 - RNA, 18 nt, Human
ggucaggcuggucucaaa

SEQ ID NO: 3700975 - RNA, 23 nt, Human
ggucagggagugcuggcucacag

SEQ ID NO: 3700976 - RNA, 18 nt, Human
ggucaggggugacacaga

SEQ ID NO: 3700977 - RNA, 15 nt, Human
ggucagguuuaacau

SEQ ID NO: 3700978 - RNA, 17 nt, Human
ggucaguacccaccuga

SEQ ID NO: 3700979 - RNA, 14 nt, Human
ggucaguggcucuu

SEQ ID NO: 3700980 - RNA, 24 nt, Human
ggucaguguccaaagcagggucug

SEQ ID NO: 3700981 - RNA, 21 nt, Human
ggucauacuaucuacucuccu

SEQ ID NO: 3700982 - RNA, 21 nt, Human
ggucauauuaauauauuucca

SEQ ID NO: 3700983 - RNA, 22 nt, Human
ggucauccagacucagagcucu

SEQ ID NO: 3700984 - RNA, 14 nt, Human
ggucauccugcccc

SEQ ID NO: 3700985 - RNA, 20 nt, Human
ggucaugaugcucuuuccca

SEQ ID NO: 3700986 - RNA, 19 nt, Human
ggucauguuugcaggggug

SEQ ID NO: 3700987 - RNA, 20 nt, Human
ggucauuaaggccacaucca

SEQ ID NO: 3700988 - RNA, 15 nt, Human
ggucauuuaugaaaa

SEQ ID NO: 3700989 - RNA, 15 nt, Human
gguccaaauaaaaac

SEQ ID NO: 3700990 - RNA, 15 nt, Human
gguccaacugcaacu

SEQ ID NO: 3700991 - RNA, 17 nt, Human
gguccaaugagcuuucu

SEQ ID NO: 3700992 - RNA, 14 nt, Human
gguccaccccaugu

SEQ ID NO: 3700993 - RNA, 14 nt, Human
gguccagaagagaa

SEQ ID NO: 3700994 - RNA, 20 nt, Human
gguccagaaggagacaggca

SEQ ID NO: 3700995 - RNA, 22 nt, Human
gguccagccucguuggaagagg

SEQ ID NO: 3700996 - RNA, 12 nt, Human
gguccagcucug

SEQ ID NO: 3700997 - RNA, 13 nt, Human
gguccagcucugg

SEQ ID NO: 3700998 - RNA, 22 nt, Human
gguccagcucuggaggggaggg

SEQ ID NO: 3700999 - RNA, 15 nt, Human
gguccagcuggccug

SEQ ID NO: 3701000 - RNA, 18 nt, Human
gguccagcuggccuggac

SEQ ID NO: 3701001 - RNA, 22 nt, Human
gguccaggccuacuccugucuu

SEQ ID NO: 3701002 - RNA, 13 nt, Human
gguccaggcugug

SEQ ID NO: 3701003 - RNA, 15 nt, Human
gguccaggggccccu

SEQ ID NO: 3701004 - RNA, 23 nt, Human
gguccaggggccccuccagcuug

SEQ ID NO: 3701005 - RNA, 16 nt, Human
gguccaucagccccuc

SEQ ID NO: 3701006 - RNA, 17 nt, Human
gguccaugggcagagcc

SEQ ID NO: 3701007 - RNA, 20 nt, Human
ggucccaagcugggccccag

SEQ ID NO: 3701008 - RNA, 23 nt, Human
ggucccaagcugggccccagccc

SEQ ID NO: 3701009 - RNA, 19 nt, Human
ggucccacaucccugggcc

SEQ ID NO: 3701010 - RNA, 22 nt, Human
ggucccacaucccugggccugc

SEQ ID NO: 3701011 - RNA, 14 nt, Human
ggucccaccccaca

SEQ ID NO: 3701012 - RNA, 16 nt, Human
ggucccaccccacaca

SEQ ID NO: 3701013 - RNA, 22 nt, Human
ggucccaccccacacacgccag

SEQ ID NO: 3701014 - RNA, 16 nt, Human
ggucccaccuccagcc

SEQ ID NO: 3701015 - RNA, 17 nt, Human
ggucccaccuccagccc

SEQ ID NO: 3701016 - RNA, 22 nt, Human
ggucccaccuccagcccgggag

SEQ ID NO: 3701017 - RNA, 22 nt, Human
ggucccacucaguccauagcag

SEQ ID NO: 3701018 - RNA, 15 nt, Human
ggucccagcagcugc

SEQ ID NO: 3701019 - RNA, 14 nt, Human
ggucccagccaccc

SEQ ID NO: 3701020 - RNA, 12 nt, Human
ggucccagcucc

SEQ ID NO: 3701021 - RNA, 15 nt, Human
ggucccagugggagg

SEQ ID NO: 3701022 - RNA, 18 nt, Human
ggucccagugggaggggc

SEQ ID NO: 3701023 - RNA, 13 nt, Human
ggugcugggcccc

SEQ ID NO: 3701024 - RNA, 16 nt, Human
ggugcuggggccuggu

SEQ ID NO: 3701025 - RNA, 18 nt, Human
ggugcuguuuugccagcc

SEQ ID NO: 3701026 - RNA, 17 nt, Human
ggugcuuacacaucuca

SEQ ID NO: 3701027 - RNA, 14 nt, Human
ggugcuucuccucu

SEQ ID NO: 3701028 - RNA, 18 nt, Human
ggugcuuuuuauaaaaag

SEQ ID NO: 3701029 - RNA, 21 nt, Human
ggugcuuuuuauaaaaagaua

SEQ ID NO: 3701030 - RNA, 11 nt, Human
gguggaagagc

SEQ ID NO: 3701031 - RNA, 16 nt, Human
gguggaagaggggaca

SEQ ID NO: 3701032 - RNA, 19 nt, Human
gguggaagcccuccuucca

SEQ ID NO: 3701033 - RNA, 20 nt, Human
gguggaagcccuccuuccac

SEQ ID NO: 3701034 - RNA, 15 nt, Human
gguggaaggcagaca

SEQ ID NO: 3701035 - RNA, 17 nt, Human
gguggacaguccuggga

SEQ ID NO: 3701036 - RNA, 14 nt, Human
gguggacccaggga

SEQ ID NO: 3701037 - RNA, 23 nt, Human
gguggacuuagaaagcaggggcu

SEQ ID NO: 3701038 - RNA, 14 nt, Human
gguggagaaaggag

SEQ ID NO: 3701039 - RNA, 12 nt, Human
gguggagaagcc

SEQ ID NO: 3701040 - RNA, 21 nt, Human
gguggagccaguaaacagagg

SEQ ID NO: 3701041 - RNA, 17 nt, Human
gguggaucacagaggcu

SEQ ID NO: 3701042 - RNA, 14 nt, Human
gguggaugccuggu

SEQ ID NO: 3701043 - RNA, 23 nt, Human
gguggcacaggaguguccucuuc

SEQ ID NO: 3701044 - RNA, 14 nt, Human
gguggcaccagcag

SEQ ID NO: 3701045 - RNA, 15 nt, Human
gguggcacugagccc

SEQ ID NO: 3701046 - RNA, 13 nt, Human
gguggcacugcca

SEQ ID NO: 3701047 - RNA, 13 nt, Human
gguggcagcaaca

SEQ ID NO: 3701048 - RNA, 15 nt, Human
gguggcagcccugua

SEQ ID NO: 3701049 - RNA, 13 nt, Human
gguggcagcucac

SEQ ID NO: 3701050 - RNA, 13 nt, Human
gguggcagcugcg

SEQ ID NO: 3701051 - RNA, 15 nt, Human
gguggcagcugcggu

SEQ ID NO: 3701052 - RNA, 18 nt, Human
gguggcaguggagguggg

SEQ ID NO: 3701053 - RNA, 21 nt, Human
gguggcaugcaccugcaaucc

SEQ ID NO: 3701054 - RNA, 13 nt, Human
gguggccacagcg

SEQ ID NO: 3701055 - RNA, 17 nt, Human
gguggccacagcgccag

SEQ ID NO: 3701056 - RNA, 21 nt, Human
gguggccacuccagaccccug

SEQ ID NO: 3701057 - RNA, 23 nt, Human
gguggccacuccagaccccuggc

SEQ ID NO: 3701058 - RNA, 17 nt, Human
gguggccagagguguca

SEQ ID NO: 3701059 - RNA, 12 nt, Human
gguggccaggcc

SEQ ID NO: 3701060 - RNA, 13 nt, Human
gguggccaggccg

SEQ ID NO: 3701061 - RNA, 18 nt, Human
gguggccauuuagccacc

SEQ ID NO: 3701062 - RNA, 19 nt, Human
gguggcccacgccuguaau

SEQ ID NO: 3701063 - RNA, 14 nt, Human
gguggccccugccu

SEQ ID NO: 3701064 - RNA, 17 nt, Human
gguggcccgacagccug

SEQ ID NO: 3701065 - RNA, 18 nt, Human
gguggcccgacagccugg

SEQ ID NO: 3701066 - RNA, 20 nt, Human
gguggcccgacagccuggca

SEQ ID NO: 3701067 - RNA, 22 nt, Human
gguggcccucuccccugccccc

SEQ ID NO: 3701068 - RNA, 13 nt, Human
gguggcccugucc

SEQ ID NO: 3701069 - RNA, 20 nt, Human
gguggccgcugaguggcagg

SEQ ID NO: 3701070 - RNA, 12 nt, Human
gguggccucagc

SEQ ID NO: 3701071 - RNA, 17 nt, Human
gguggccucccaacuca

SEQ ID NO: 3701072 - RNA, 23 nt, Human
gguggccucccaacucaccccag

SEQ ID NO: 3701073 - RNA, 14 nt, Human
gguggcuaaagguc

SEQ ID NO: 3701074 - RNA, 20 nt, Human
gguggcuagucaagcuccuc

SEQ ID NO: 3701075 - RNA, 15 nt, Human
gguggcuagucagag

SEQ ID NO: 3701076 - RNA, 19 nt, Human
gguggcucacgccuguaau

SEQ ID NO: 3701077 - RNA, 13 nt, Human
gguggcucugaga

SEQ ID NO: 3701078 - RNA, 18 nt, Human
gguggcugacccaguccc

SEQ ID NO: 3701079 - RNA, 19 nt, Human
gguggcugacccagucccu

SEQ ID NO: 3701080 - RNA, 22 nt, Human
gguggcugacccagucccuggg

SEQ ID NO: 3701081 - RNA, 13 nt, Human
gguggcugggcag

SEQ ID NO: 3701082 - RNA, 18 nt, Human
gguggcuggguuggaggg

SEQ ID NO: 3701083 - RNA, 14 nt, Human
gguggcuucagcuc

SEQ ID NO: 3701084 - RNA, 22 nt, Human
ggugggaaaugguaugagcuga

SEQ ID NO: 3701085 - RNA, 21 nt, Human
ggugggaaccaugaagacagg

SEQ ID NO: 3701086 - RNA, 16 nt, Human
ggugggacacccugug

SEQ ID NO: 3701087 - RNA, 20 nt, Human
ggugggacccccguggggca

SEQ ID NO: 3701088 - RNA, 13 nt, Human
ggugggagcagga

SEQ ID NO: 3701089 - RNA, 14 nt, Human
ggugggauccucca

SEQ ID NO: 3701090 - RNA, 16 nt, Human
ggugggcaccuauaau

SEQ ID NO: 3701091 - RNA, 16 nt, Human
ggugggcagguggugg

SEQ ID NO: 3701092 - RNA, 12 nt, Human
ggugggcccagg

SEQ ID NO: 3701093 - RNA, 18 nt, Human
ggugggcccaggaccagc

SEQ ID NO: 3701094 - RNA, 14 nt, Human
ggugggccucuggu

SEQ ID NO: 3701095 - RNA, 12 nt, Human
ggugggccuggu

SEQ ID NO: 3701096 - RNA, 20 nt, Human
ggugggcgggcagcacagca

SEQ ID NO: 3701097 - RNA, 21 nt, Human
ggugggcguggucacugcugu

SEQ ID NO: 3701098 - RNA, 16 nt, Human
ggugggcucugugcag

SEQ ID NO: 3701099 - RNA, 14 nt, Human
ggugggcuggacuu

SEQ ID NO: 3701100 - RNA, 17 nt, Human
ggugggcuucagggcag

SEQ ID NO: 3701101 - RNA, 13 nt, Human
gguggggaauguu

SEQ ID NO: 3701102 - RNA, 19 nt, Human
gguggggaccucaggccug

SEQ ID NO: 3701103 - RNA, 12 nt, Human
gguggggcagcu

SEQ ID NO: 3701104 - RNA, 15 nt, Human
gguggggcagcuccu

SEQ ID NO: 3701105 - RNA, 18 nt, Human
gguggggcagugcuuggc

SEQ ID NO: 3701106 - RNA, 15 nt, Human
gguggggcgaggcag

SEQ ID NO: 3701107 - RNA, 18 nt, Human
gguggggggcuucauaca

SEQ ID NO: 3701108 - RNA, 15 nt, Human
ggugggggggcagag

SEQ ID NO: 3701109 - RNA, 23 nt, Human
gguggggucacucuggcagcuca

SEQ ID NO: 3701110 - RNA, 23 nt, Human
gguggggucaugcccuccucucc

SEQ ID NO: 3701111 - RNA, 17 nt, Human
gguggguccaugggcag

SEQ ID NO: 3701112 - RNA, 19 nt, Human
ggugggugccuaggccugg

SEQ ID NO: 3701113 - RNA, 13 nt, Human
ggugggugcucag

SEQ ID NO: 3701114 - RNA, 14 nt, Human
ggugggugcucaga

SEQ ID NO: 3701115 - RNA, 16 nt, Human
ggugggugguggggag

SEQ ID NO: 3701116 - RNA, 19 nt, Human
gguggguucuuuggaagga

SEQ ID NO: 3701117 - RNA, 15 nt, Human
ggugguaccaggucu

SEQ ID NO: 3701118 - RNA, 16 nt, Human
ggugguaccaggucuc

SEQ ID NO: 3701119 - RNA, 13 nt, Human
ggugguauuuuca

SEQ ID NO: 3701120 - RNA, 19 nt, Human
ggugguccugacucaacau

SEQ ID NO: 3701121 - RNA, 17 nt, Human
ggugguccugagaccug

SEQ ID NO: 3701122 - RNA, 14 nt, Human
gguggucugcucgg

SEQ ID NO: 3701123 - RNA, 20 nt, Human
gguggucugcucgggcccag

SEQ ID NO: 3701124 - RNA, 21 nt, Human
gguggucuguuggcaggcugg

SEQ ID NO: 3701125 - RNA, 14 nt, Human
gguggugaccucug

SEQ ID NO: 3701126 - RNA, 21 nt, Human
gguggugcagguagaccuguc

SEQ ID NO: 3701127 - RNA, 17 nt, Human
ggugguggcacugagcc

SEQ ID NO: 3701128 - RNA, 20 nt, Human
gguggugggaaccaugaaga

SEQ ID NO: 3701129 - RNA, 22 nt, Human
ggugguucacucuuggagccug

SEQ ID NO: 3701130 - RNA, 23 nt, Human
ggugguugcuguuuuccucccuu

SEQ ID NO: 3701131 - RNA, 13 nt, Human
gguguaaacacau

SEQ ID NO: 3701132 - RNA, 18 nt, Human
gguguaaucaugaaggag

SEQ ID NO: 3701133 - RNA, 17 nt, Human
gguguagcuacagagaa

SEQ ID NO: 3701134 - RNA, 18 nt, Human
gguguagcuacagagaaa

SEQ ID NO: 3701135 - RNA, 13 nt, Human
gguguauuuaaac

SEQ ID NO: 3701136 - RNA, 22 nt, Human
gguguauuuauuuuccucccca

SEQ ID NO: 3701137 - RNA, 17 nt, Human
ggugucaagagggucug

SEQ ID NO: 3701138 - RNA, 24 nt, Human
ggugucacccaaaccggcaggugc

SEQ ID NO: 3701139 - RNA, 11 nt, Human
ggugucacccc

SEQ ID NO: 3701140 - RNA, 17 nt, Human
ggugucaccccagagcc

SEQ ID NO: 3701141 - RNA, 20 nt, Human
ggugucacugucccuccugg

SEQ ID NO: 3701142 - RNA, 15 nt, Human
ggugucacuuacugu

SEQ ID NO: 3701143 - RNA, 20 nt, Human
ggugucaggcugcuggcgcc

SEQ ID NO: 3701144 - RNA, 17 nt, Human
ggugucaguauccaggc

SEQ ID NO: 3701145 - RNA, 14 nt, Human
ggugucauuucauu

SEQ ID NO: 3701146 - RNA, 18 nt, Human
ggugucauuucauuccau

SEQ ID NO: 3701147 - RNA, 21 nt, Human
gguguccagcauugcuggacu

SEQ ID NO: 3701148 - RNA, 15 nt, Human
gguguccccaacagc

SEQ ID NO: 3701149 - RNA, 19 nt, Human
gguguccccaacagcgccc

SEQ ID NO: 3701150 - RNA, 20 nt, Human
gguguccccaacagcgccca

SEQ ID NO: 3701151 - RNA, 13 nt, Human
gguguccccacca

SEQ ID NO: 3701152 - RNA, 18 nt, Human
gguguccuacagaaaaac

SEQ ID NO: 3701153 - RNA, 20 nt, Human
gguguccugaccacccuccc

SEQ ID NO: 3701154 - RNA, 21 nt, Human
gguguccugcaccggggccug

SEQ ID NO: 3701155 - RNA, 17 nt, Human
gguguccuuucccucca

SEQ ID NO: 3701156 - RNA, 21 nt, Human
ggugucgcucugcuggccugg

SEQ ID NO: 3701157 - RNA, 17 nt, Human
ggugucucaggcugccu

SEQ ID NO: 3701158 - RNA, 18 nt, Human
ggugucucaggcugccug

SEQ ID NO: 3701159 - RNA, 15 nt, Human
ggugucuccuuaagc

SEQ ID NO: 3701160 - RNA, 17 nt, Human
ggugugaacccgggagc

SEQ ID NO: 3701161 - RNA, 16 nt, Human
ggugugacugaauuuc

SEQ ID NO: 3701162 - RNA, 10 nt, Human
ugaaggggcg

SEQ ID NO: 3701163 - RNA, 18 nt, Human
ugaagggggcggccuaug

SEQ ID NO: 3701164 - RNA, 19 nt, Human
ugaagguagaauguuuuca

SEQ ID NO: 3701165 - RNA, 21 nt, Human
ugaaggugaaacauuuucucc

SEQ ID NO: 3701166 - RNA, 18 nt, Human
ugaaggugauaagggaaa

SEQ ID NO: 3701167 - RNA, 19 nt, Human
ugaaggugauaagggaaaa

SEQ ID NO: 3701168 - RNA, 22 nt, Human
ugaaggugauuuaagggcccag

SEQ ID NO: 3701169 - RNA, 20 nt, Human
ugaaggugcugacggccagg

SEQ ID NO: 3701170 - RNA, 14 nt, Human
ugaagguugaagag

SEQ ID NO: 3701171 - RNA, 13 nt, Human
ugaagguuucuga

SEQ ID NO: 3701172 - RNA, 16 nt, Human
ugaagguuucugaaaa

SEQ ID NO: 3701173 - RNA, 18 nt, Human
ugaagguuucugaaaauu

SEQ ID NO: 3701174 - RNA, 18 nt, Human
ugaagguuuuaagugguu

SEQ ID NO: 3701175 - RNA, 15 nt, Human
ugaagguuuuuguaa

SEQ ID NO: 3701176 - RNA, 13 nt, Human
ugaaguaaaacaa

SEQ ID NO: 3701177 - RNA, 15 nt, Human
ugaaguaaaagcaag

SEQ ID NO: 3701178 - RNA, 16 nt, Human
ugaaguaaacuuuuug

SEQ ID NO: 3701179 - RNA, 19 nt, Human
ugaaguaaagccauuaaau

SEQ ID NO: 3701180 - RNA, 14 nt, Human
ugaaguaagcaaag

SEQ ID NO: 3701181 - RNA, 16 nt, Human
ugaaguaauaugcaca

SEQ ID NO: 3701182 - RNA, 14 nt, Human
ugaaguaaugaauu

SEQ ID NO: 3701183 - RNA, 20 nt, Human
ugaaguacauauuaggaaaa

SEQ ID NO: 3701184 - RNA, 22 nt, Human
ugaaguauauaaugguuucaaa

SEQ ID NO: 3701185 - RNA, 20 nt, Human
ugaagucaauuacucuauaa

SEQ ID NO: 3701186 - RNA, 14 nt, Human
ugaagucaccuugu

SEQ ID NO: 3701187 - RNA, 20 nt, Human
ugaagucagaucugccuaag

SEQ ID NO: 3701188 - RNA, 22 nt, Human
ugaaguccaagcauuuagaugu

SEQ ID NO: 3701189 - RNA, 17 nt, Human
ugaagucuguauuguaa

SEQ ID NO: 3701190 - RNA, 10 nt, Human
ugaagucuug

SEQ ID NO: 3701191 - RNA, 13 nt, Human
ugaagucuuguau

SEQ ID NO: 3701192 - RNA, 22 nt, Human
ugaagucuuuguacagacaaca

SEQ ID NO: 3701193 - RNA, 14 nt, Human
ugaagugaaacugc

SEQ ID NO: 3701194 - RNA, 13 nt, Human
ugaagugccuuaa

SEQ ID NO: 3701195 - RNA, 13 nt, Human
ugaagugcgugaa

SEQ ID NO: 3701196 - RNA, 22 nt, Human
ugaagugcuguuuauuaaucuu

SEQ ID NO: 3701197 - RNA, 13 nt, Human
ugaagugcuugga

SEQ ID NO: 3701198 - RNA, 18 nt, Human
ugaaguguaggcagacac

SEQ ID NO: 3701199 - RNA, 18 nt, Human
ugaaguguguuuccuuca

SEQ ID NO: 3701200 - RNA, 16 nt, Human
ugaaguuacuuuaugu

SEQ ID NO: 3701201 - RNA, 19 nt, Human
ugaaguuacuuucuuaaug

SEQ ID NO: 3701202 - RNA, 19 nt, Human
ugaaguuagaauuccuuca

SEQ ID NO: 3701203 - RNA, 21 nt, Human
ugaaguuagguucuuaaaagu

SEQ ID NO: 3701204 - RNA, 22 nt, Human
ugaaguuagguucuuaaaagug

SEQ ID NO: 3701205 - RNA, 17 nt, Human
ugaaguuaucuggcuuc

SEQ ID NO: 3701206 - RNA, 16 nt, Human
ugaaguucaccauuaa

SEQ ID NO: 3701207 - RNA, 15 nt, Human
ugaaguugcugcuuc

SEQ ID NO: 3701208 - RNA, 22 nt, Human
ugaaguugcugcuucucccagg

SEQ ID NO: 3701209 - RNA, 19 nt, Human
ugaaguuuaaaacaguauu

SEQ ID NO: 3701210 - RNA, 16 nt, Human
ugaaguuuacauugua

SEQ ID NO: 3701211 - RNA, 15 nt, Human
ugaaguuuacauuuu

SEQ ID NO: 3701212 - RNA, 13 nt, Human
ugaaguuucacau

SEQ ID NO: 3701213 - RNA, 17 nt, Human
ugaaguuucacuccgga

SEQ ID NO: 3701214 - RNA, 15 nt, Human
ugaaguuucauuuau

SEQ ID NO: 3701215 - RNA, 21 nt, Human
ugaaguuucauuuaugauaca

SEQ ID NO: 3701216 - RNA, 16 nt, Human
ugaaguuuccuuggcu

SEQ ID NO: 3701217 - RNA, 21 nt, Human
ugaaguuuccuuggcuggugc

SEQ ID NO: 3701218 - RNA, 18 nt, Human
ugaaguuugaacuucaua

SEQ ID NO: 3701219 - RNA, 20 nt, Human
ugaaguuugaauguuaaaua

SEQ ID NO: 3701220 - RNA, 21 nt, Human
ugaaguuugaauguuaaauaa

SEQ ID NO: 3701221 - RNA, 14 nt, Human
ugaaguuugauaaa

SEQ ID NO: 3701222 - RNA, 20 nt, Human
ugaaguuugauaaauagugu

SEQ ID NO: 3701223 - RNA, 20 nt, Human
ugaaguuuguaguuguuuua

SEQ ID NO: 3701224 - RNA, 14 nt, Human
ugaaguuuuacauu

SEQ ID NO: 3701225 - RNA, 17 nt, Human
ugaaguuuuacauuguu

SEQ ID NO: 3701226 - RNA, 16 nt, Human
ugaaguuuuacugucu

SEQ ID NO: 3701227 - RNA, 22 nt, Human
ugaaguuuuuuugcugcugccu

SEQ ID NO: 3701228 - RNA, 20 nt, Human
ugaauaaaaacuuugcuaaa

SEQ ID NO: 3701229 - RNA, 15 nt, Human
ugaauaaaauuauuu

SEQ ID NO: 3701230 - RNA, 14 nt, Human
ugaauaaacuucag

SEQ ID NO: 3701231 - RNA, 18 nt, Human
ugaauaaacuucagcacc

SEQ ID NO: 3701232 - RNA, 16 nt, Human
ugaauaaagaauacuu

SEQ ID NO: 3701233 - RNA, 17 nt, Human
ugaauaaagaauacuug

SEQ ID NO: 3701234 - RNA, 19 nt, Human
ugaauaaagaauacuugaa

SEQ ID NO: 3701235 - RNA, 14 nt, Human
ugaauaaagacacc

SEQ ID NO: 3701236 - RNA, 18 nt, Human
ugaauaaagccugcuuuu

SEQ ID NO: 3701237 - RNA, 17 nt, Human
ugaauaaaguugaagcu

SEQ ID NO: 3701238 - RNA, 14 nt, Human
ugaauaaauaccuc

SEQ ID NO: 3701239 - RNA, 15 nt, Human
ugaauaaauaccucu

SEQ ID NO: 3701240 - RNA, 17 nt, Human
ugaauaaauaccucuua

SEQ ID NO: 3701241 - RNA, 19 nt, Human
ugaauaaauaccucuuagc

SEQ ID NO: 3701242 - RNA, 16 nt, Human
ugaauaaaugucacuu

SEQ ID NO: 3701243 - RNA, 23 nt, Human
ugaauaacugauuaguaagucuu

SEQ ID NO: 3701244 - RNA, 17 nt, Human
ugaauaagccauucuga

SEQ ID NO: 3701245 - RNA, 13 nt, Human
ugaauaauacagu

SEQ ID NO: 3701246 - RNA, 21 nt, Human
ugaauaaugccuuuguaacca

SEQ ID NO: 3701247 - RNA, 19 nt, Human
ugaauaauggaaaaugcca

SEQ ID NO: 3701248 - RNA, 18 nt, Human
ugaauaaugguaccagau

SEQ ID NO: 3701249 - RNA, 23 nt, Human
ugaauaauguaagacaaauaugu

SEQ ID NO: 3701250 - RNA, 17 nt, Human
ugaauaauuacagugcc

SEQ ID NO: 3701251 - RNA, 18 nt, Human
ugaauaauuacagugccu

SEQ ID NO: 3701252 - RNA, 13 nt, Human
ugaauaauuucuu

SEQ ID NO: 3701253 - RNA, 20 nt, Human
ugaauacaaacaauggaaac

SEQ ID NO: 3701254 - RNA, 14 nt, Human
ugaauacagcagca

SEQ ID NO: 3701255 - RNA, 21 nt, Human
ugaauacagcagcaagaaaaa

SEQ ID NO: 3701256 - RNA, 15 nt, Human
ugaauacauuuccaa

SEQ ID NO: 3701257 - RNA, 21 nt, Human
ugaauaccauuaaaacugcuu

SEQ ID NO: 3701258 - RNA, 16 nt, Human
ugaauacccuuuucug

SEQ ID NO: 3701259 - RNA, 16 nt, Human
ugaauaccuuagugca

SEQ ID NO: 3701260 - RNA, 22 nt, Human
ugaauaccuuagugcaguuauu

SEQ ID NO: 3701261 - RNA, 22 nt, Human
ugaauacucugcccucuagagc

SEQ ID NO: 3701262 - RNA, 14 nt, Human
ugaauacugcuaca

SEQ ID NO: 3701263 - RNA, 15 nt, Human
ugaauacugcuugaa

SEQ ID NO: 3701264 - RNA, 18 nt, Human
ugaauacugcuugaauaa

SEQ ID NO: 3701265 - RNA, 21 nt, Human
ugaauacugcuugaauaaaca

SEQ ID NO: 3701266 - RNA, 16 nt, Human
ugaauacuugaaccau

SEQ ID NO: 3701267 - RNA, 19 nt, Human
ugaauacuugaaccauaaa

SEQ ID NO: 3701268 - RNA, 14 nt, Human
ugaauacuuugaau

SEQ ID NO: 3701269 - RNA, 18 nt, Human
ugaauacuuugaaugugu

SEQ ID NO: 3701270 - RNA, 15 nt, Human
ugaauagaaauggga

SEQ ID NO: 3701271 - RNA, 21 nt, Human
ugaauagcaauagcauggaua

SEQ ID NO: 3701272 - RNA, 20 nt, Human
ugaauagccauauuuguaaa

SEQ ID NO: 3701273 - RNA, 20 nt, Human
ugaauagcucccagauuuca

SEQ ID NO: 3701274 - RNA, 19 nt, Human
ugaauaggcgaucacaacg

SEQ ID NO: 3701275 - RNA, 12 nt, Human
ugaauauaaaaa

SEQ ID NO: 3701276 - RNA, 16 nt, Human
ugaauauaaacacuau

SEQ ID NO: 3701277 - RNA, 17 nt, Human
ugaauauaaaugugugu

SEQ ID NO: 3701278 - RNA, 21 nt, Human
ugaauauaaauguguguaugu

SEQ ID NO: 3701279 - RNA, 22 nt, Human
ugaauauaaauguguguaugug

SEQ ID NO: 3701280 - RNA, 22 nt, Human
ugaauauaauauauuuguguau

SEQ ID NO: 3701281 - RNA, 14 nt, Human
ugaauauaaucccu

SEQ ID NO: 3701282 - RNA, 21 nt, Human
ugaauauacagcaggugcuca

SEQ ID NO: 3701283 - RNA, 15 nt, Human
ugaauauacucauua

SEQ ID NO: 3701284 - RNA, 19 nt, Human
ugaauauacucauuagaau

SEQ ID NO: 3701285 - RNA, 16 nt, Human
ugaauauauggcauuu

SEQ ID NO: 3701286 - RNA, 21 nt, Human
ugaauauauggcauuugcaga

SEQ ID NO: 3701287 - RNA, 23 nt, Human
ugaauauauuuaagcaacaucuu

SEQ ID NO: 3701288 - RNA, 17 nt, Human
ugaauaucuauuaauau

SEQ ID NO: 3701289 - RNA, 22 nt, Human
ugaauaugaggcauuuggcauu

SEQ ID NO: 3701290 - RNA, 22 nt, Human
ugaauaugauuaaaaauaucaa

SEQ ID NO: 3701291 - RNA, 19 nt, Human
ugaauaugauuaguaaaga

SEQ ID NO: 3701292 - RNA, 12 nt, Human
ugaauauggaca

SEQ ID NO: 3701293 - RNA, 21 nt, Human
ugaauauggacucaguuuucu

SEQ ID NO: 3701294 - RNA, 22 nt, Human
ugaauauuacuccuauuuuugu

SEQ ID NO: 3701295 - RNA, 20 nt, Human
ugaauauuuuaucuuuccuu

SEQ ID NO: 3701296 - RNA, 12 nt, Human
ugaauauuuuca

SEQ ID NO: 3701297 - RNA, 22 nt, Human
ugaaucaauaauauauuuucug

SEQ ID NO: 3701298 - RNA, 14 nt, Human
ugaaucacuguuuu

SEQ ID NO: 3701299 - RNA, 19 nt, Human
ugaaucacuguuuuuagac

SEQ ID NO: 3701300 - RNA, 22 nt, Human
ugaaucagacccuaccccacca

SEQ ID NO: 3701301 - RNA, 16 nt, Human
ugaaucaguauaaaca

SEQ ID NO: 3701302 - RNA, 20 nt, Human
ugaaucaguuuccaauuauu

SEQ ID NO: 3701303 - RNA, 15 nt, Human
ugaaucaugagccug

SEQ ID NO: 3701304 - RNA, 19 nt, Human
ugaaucaugguuuuucuua

SEQ ID NO: 3701305 - RNA, 12 nt, Human
ugaaucauguag

SEQ ID NO: 3701306 - RNA, 21 nt, Human
ugaaucauguaguaucaaaua

SEQ ID NO: 3701307 - RNA, 22 nt, Human
ugaaucauuuuaccuuugacaa

SEQ ID NO: 3701308 - RNA, 23 nt, Human
ugaaucauuuuaccuuugacaaa

SEQ ID NO: 3701309 - RNA, 16 nt, Human
ugaauccaaacuaauc

SEQ ID NO: 3701310 - RNA, 18 nt, Human
ugaauccaacugcuuaaa

SEQ ID NO: 3701311 - RNA, 18 nt, Human
ugauguuuguggccucag

SEQ ID NO: 3701312 - RNA, 18 nt, Human
ugauguuuuaaggaugcu

SEQ ID NO: 3701313 - RNA, 18 nt, Human
ugauguuuuccuauaaua

SEQ ID NO: 3701314 - RNA, 15 nt, Human
ugauguuuuuaaaau

SEQ ID NO: 3701315 - RNA, 18 nt, Human
ugauguuuuuaaaaucuu

SEQ ID NO: 3701316 - RNA, 20 nt, Human
ugauuaaaaauaucaaauua

SEQ ID NO: 3701317 - RNA, 17 nt, Human
ugauuaaauaagauucu

SEQ ID NO: 3701318 - RNA, 13 nt, Human
ugauuaaaugaca

SEQ ID NO: 3701319 - RNA, 17 nt, Human
ugauuaacucaguccug

SEQ ID NO: 3701320 - RNA, 21 nt, Human
ugauuaacuuggaugaguuuu

SEQ ID NO: 3701321 - RNA, 12 nt, Human
ugauuaaggcag

SEQ ID NO: 3701322 - RNA, 22 nt, Human
ugauuaaggucucucuuuggac

SEQ ID NO: 3701323 - RNA, 16 nt, Human
ugauuaaguaaugaua

SEQ ID NO: 3701324 - RNA, 15 nt, Human
ugauuaauuaaaaca

SEQ ID NO: 3701325 - RNA, 19 nt, Human
ugauuaauuaaauagcuuu

SEQ ID NO: 3701326 - RNA, 15 nt, Human
ugauuacacaaaaca

SEQ ID NO: 3701327 - RNA, 13 nt, Human
ugauuacacaguu

SEQ ID NO: 3701328 - RNA, 14 nt, Human
ugauuacacaguug

SEQ ID NO: 3701329 - RNA, 14 nt, Human
ugauuacagugcag

SEQ ID NO: 3701330 - RNA, 14 nt, Human
ugauuaccagggac

SEQ ID NO: 3701331 - RNA, 20 nt, Human
ugauuacuggccuuuuucau

SEQ ID NO: 3701332 - RNA, 21 nt, Human
ugauuacuggccuuuuucauu

SEQ ID NO: 3701333 - RNA, 23 nt, Human
ugauuacuggccuuuuucauuua

SEQ ID NO: 3701334 - RNA, 24 nt, Human
ugauuacugucaaggcugcuuaga

SEQ ID NO: 3701335 - RNA, 14 nt, Human
ugauuacugucaau

SEQ ID NO: 3701336 - RNA, 18 nt, Human
ugauuacugucaauaaac

SEQ ID NO: 3701337 - RNA, 19 nt, Human
ugauuacugucaauaaaca

SEQ ID NO: 3701338 - RNA, 23 nt, Human
ugauuagaaauuaccuguggaua

SEQ ID NO: 3701339 - RNA, 14 nt, Human
ugauuaguaagucu

SEQ ID NO: 3701340 - RNA, 19 nt, Human
ugauuaugaauuacauuug

SEQ ID NO: 3701341 - RNA, 21 nt, Human
ugauuaugaauuacauuugua

SEQ ID NO: 3701342 - RNA, 22 nt, Human
ugauuaugucuuuuauauuugu

SEQ ID NO: 3701343 - RNA, 20 nt, Human
ugauuauuaacgauguccaa

SEQ ID NO: 3701344 - RNA, 18 nt, Human
ugauuauucugauuccac

SEQ ID NO: 3701345 - RNA, 15 nt, Human
ugauuauuguauuua

SEQ ID NO: 3701346 - RNA, 16 nt, Human
ugauuauuuaucacau

SEQ ID NO: 3701347 - RNA, 17 nt, Human
ugauuauuuaucacaua

SEQ ID NO: 3701348 - RNA, 13 nt, Human
ugauuauuugcau

SEQ ID NO: 3701349 - RNA, 20 nt, Human
ugauuauuuucauuacaaug

SEQ ID NO: 3701350 - RNA, 13 nt, Human
ugauucaaaauau

SEQ ID NO: 3701351 - RNA, 17 nt, Human
ugauucaaaauauuuaa

SEQ ID NO: 3701352 - RNA, 23 nt, Human
ugauucaaaauauuuaaaaaugu

SEQ ID NO: 3701353 - RNA, 20 nt, Human
ugauucaacagguuuuccug

SEQ ID NO: 3701354 - RNA, 21 nt, Human
ugauucaagccauuccaaagu

SEQ ID NO: 3701355 - RNA, 17 nt, Human
ugauucaaucuguaaac

SEQ ID NO: 3701356 - RNA, 21 nt, Human
ugauucaauucaacacucccu

SEQ ID NO: 3701357 - RNA, 16 nt, Human
ugauucaauuugaugu

SEQ ID NO: 3701358 - RNA, 19 nt, Human
ugauucacauguuuucaaa

SEQ ID NO: 3701359 - RNA, 21 nt, Human
ugauucaccuccuaaaacaac

SEQ ID NO: 3701360 - RNA, 16 nt, Human
ugauucaccucuucuu

SEQ ID NO: 3701361 - RNA, 20 nt, Human
ugauucacuucacgcuuuca

SEQ ID NO: 3701362 - RNA, 18 nt, Human
ugauucagaaaauguucu

SEQ ID NO: 3701363 - RNA, 15 nt, Human
ugauucagacagcug

SEQ ID NO: 3701364 - RNA, 16 nt, Human
ugauucagacagcugc

SEQ ID NO: 3701365 - RNA, 23 nt, Human
ugauucagacagcugccugggau

SEQ ID NO: 3701366 - RNA, 14 nt, Human
ugauucaggugcag

SEQ ID NO: 3701367 - RNA, 12 nt, Human
ugauucaguguu

SEQ ID NO: 3701368 - RNA, 24 nt, Human
ugauucaguguuaaaugugaugaa

SEQ ID NO: 3701369 - RNA, 13 nt, Human
ugauucauaaaga

SEQ ID NO: 3701370 - RNA, 19 nt, Human
ugauucaugccaauuagca

SEQ ID NO: 3701371 - RNA, 20 nt, Human
ugauucauuuuaacaucuga

SEQ ID NO: 3701372 - RNA, 18 nt, Human
ugauuccauccaccuuuc

SEQ ID NO: 3701373 - RNA, 16 nt, Human
ugauucccaagcucug

SEQ ID NO: 3701374 - RNA, 21 nt, Human
ugauucccaagcucugcuccu

SEQ ID NO: 3701375 - RNA, 23 nt, Human
ugauucccaagcucugcuccucu

SEQ ID NO: 3701376 - RNA, 19 nt, Human
ugauucccuuguuauucaa

SEQ ID NO: 3701377 - RNA, 12 nt, Human
ugauuccuuccu

SEQ ID NO: 3701378 - RNA, 14 nt, Human
ugauuccuuuaaca

SEQ ID NO: 3701379 - RNA, 15 nt, Human
ugauucgagcuauau

SEQ ID NO: 3701380 - RNA, 21 nt, Human
ugauucgcccaaagccagaca

SEQ ID NO: 3701381 - RNA, 15 nt, Human
ugauucuaaugucuu

SEQ ID NO: 3701382 - RNA, 22 nt, Human
ugauucuauuuauauguacaug

SEQ ID NO: 3701383 - RNA, 11 nt, Human
ugauucucagg

SEQ ID NO: 3701384 - RNA, 15 nt, Human
ugauucucagggucu

SEQ ID NO: 3701385 - RNA, 21 nt, Human
ugauucucagggucucugcug

SEQ ID NO: 3701386 - RNA, 16 nt, Human
ugauucucaugccuca

SEQ ID NO: 3701387 - RNA, 13 nt, Human
ugauucuccugcc

SEQ ID NO: 3701388 - RNA, 20 nt, Human
ugauucuccugccucagccu

SEQ ID NO: 3701389 - RNA, 12 nt, Human
ugauucuccuuc

SEQ ID NO: 3701390 - RNA, 16 nt, Human
ugauucuccuucagcc

SEQ ID NO: 3701391 - RNA, 19 nt, Human
ugauucuccuucagcccuc

SEQ ID NO: 3701392 - RNA, 23 nt, Human
ugauucuccuucagcccucaccc

SEQ ID NO: 3701393 - RNA, 11 nt, Human
ugauucucucc

SEQ ID NO: 3701394 - RNA, 19 nt, Human
ugauucugauguacucuaa

SEQ ID NO: 3701395 - RNA, 21 nt, Human
ugauucuggcuuuaagccuuc

SEQ ID NO: 3701396 - RNA, 19 nt, Human
ugauucuuuguuacaggca

SEQ ID NO: 3701397 - RNA, 22 nt, Human
ugauugaaucugauuggacauu

SEQ ID NO: 3701398 - RNA, 12 nt, Human
ugauugauuuga

SEQ ID NO: 3701399 - RNA, 15 nt, Human
ugauugcuaaaugua

SEQ ID NO: 3701400 - RNA, 22 nt, Human
ugauugcuguguccaacuccag

SEQ ID NO: 3701401 - RNA, 14 nt, Human
ugauugcuuuuaaa

SEQ ID NO: 3701402 - RNA, 21 nt, Human
ugauuggaggggggagguggg

SEQ ID NO: 3701403 - RNA, 15 nt, Human
ugauuggauuauuca

SEQ ID NO: 3701404 - RNA, 19 nt, Human
ugauuggauuauucauuua

SEQ ID NO: 3701405 - RNA, 21 nt, Human
ugauuggccuguagaguugcu

SEQ ID NO: 3701406 - RNA, 16 nt, Human
ugauugggaaaacauu

SEQ ID NO: 3701407 - RNA, 20 nt, Human
ugauugggaaaacauuugcu

SEQ ID NO: 3701408 - RNA, 22 nt, Human
ugauuguaacguugcuguggga

SEQ ID NO: 3701409 - RNA, 14 nt, Human
ugauugucagcuac

SEQ ID NO: 3701410 - RNA, 18 nt, Human
ugauugucuuaauauugu

SEQ ID NO: 3701411 - RNA, 14 nt, Human
ugauuguggaaugg

SEQ ID NO: 3701412 - RNA, 19 nt, Human
ugauuguuaauuuacagcu

SEQ ID NO: 3701413 - RNA, 18 nt, Human
ugauuguucgggugugca

SEQ ID NO: 3701414 - RNA, 16 nt, Human
ugauuguuugcucuga

SEQ ID NO: 3701415 - RNA, 16 nt, Human
ugauuuaaaacaugua

SEQ ID NO: 3701416 - RNA, 15 nt, Human
ugauuuaaacacaca

SEQ ID NO: 3701417 - RNA, 16 nt, Human
ugauuuaaacacacag

SEQ ID NO: 3701418 - RNA, 16 nt, Human
ugauuuaaacacauua

SEQ ID NO: 3701419 - RNA, 19 nt, Human
ugauuuacagcaaguagau

SEQ ID NO: 3701420 - RNA, 13 nt, Human
ugauuuacaguuu

SEQ ID NO: 3701421 - RNA, 22 nt, Human
ugauuuacauauauuauuuauu

SEQ ID NO: 3701422 - RNA, 21 nt, Human
ugauuuagaacuguaugucag

SEQ ID NO: 3701423 - RNA, 16 nt, Human
ugauuuaggagaagcc

SEQ ID NO: 3701424 - RNA, 20 nt, Human
ugauuuaggagaagccagga

SEQ ID NO: 3701425 - RNA, 15 nt, Human
ugauuuauaaacaga

SEQ ID NO: 3701426 - RNA, 18 nt, Human
ugauuuaucacacaaagc

SEQ ID NO: 3701427 - RNA, 16 nt, Human
ugauuuauuaacuuaa

SEQ ID NO: 3701428 - RNA, 22 nt, Human
ugauuuauuaacuuaauaauca

SEQ ID NO: 3701429 - RNA, 23 nt, Human
ugauuuauuaauauauauuaucu

SEQ ID NO: 3701430 - RNA, 20 nt, Human
ugauuucaaaguuuuguugu

SEQ ID NO: 3701431 - RNA, 23 nt, Human
ugauuucacaaauauuaaaaagu

SEQ ID NO: 3701432 - RNA, 16 nt, Human
ugauuucacaacagau

SEQ ID NO: 3701433 - RNA, 16 nt, Human
ugauuucacagugugu

SEQ ID NO: 3701434 - RNA, 13 nt, Human
ugauuucagaaac

SEQ ID NO: 3701435 - RNA, 22 nt, Human
ugauuucaguagcacaaguuau

SEQ ID NO: 3701436 - RNA, 21 nt, Human
ugauuucaguucuaggaaaau

SEQ ID NO: 3701437 - RNA, 21 nt, Human
ugauuuccccuccaagguaug

SEQ ID NO: 3701438 - RNA, 22 nt, Human
ugauuuccguuaaaauaccagc

SEQ ID NO: 3701439 - RNA, 15 nt, Human
ugauuuccucccucu

SEQ ID NO: 3701440 - RNA, 19 nt, Human
ugauuuccugugucaaucc

SEQ ID NO: 3701441 - RNA, 15 nt, Human
ugauuuccuugaaug

SEQ ID NO: 3701442 - RNA, 16 nt, Human
ugauuuccuugaaugu

SEQ ID NO: 3701443 - RNA, 17 nt, Human
ugauuucuagaaagccu

SEQ ID NO: 3701444 - RNA, 12 nt, Human
ugauuucuaugc

SEQ ID NO: 3701445 - RNA, 16 nt, Human
ugauuucuaugcugag

SEQ ID NO: 3701446 - RNA, 13 nt, Human
ugauuucuauuca

SEQ ID NO: 3701447 - RNA, 18 nt, Human
ugauuucuuuaaaagaau

SEQ ID NO: 3701448 - RNA, 17 nt, Human
ugauuugaagaacaugu

SEQ ID NO: 3701449 - RNA, 19 nt, Human
ugauuugaagaacauguga

SEQ ID NO: 3701450 - RNA, 18 nt, Human
ugauuugacuguuuuuac

SEQ ID NO: 3701451 - RNA, 20 nt, Human
ugauuugacuguuuuuaccc

SEQ ID NO: 3701452 - RNA, 22 nt, Human
ugauuugaguugauugagaaga

SEQ ID NO: 3701453 - RNA, 17 nt, Human
ugauuugcaauaaaaau

SEQ ID NO: 3701454 - RNA, 15 nt, Human
ugauuugcauauuca

SEQ ID NO: 3701455 - RNA, 15 nt, Human
ugauuugcauugaac

SEQ ID NO: 3701456 - RNA, 14 nt, Human
ugauuugccacuga

SEQ ID NO: 3701457 - RNA, 21 nt, Human
ugauuugggcugaauguaugu

SEQ ID NO: 3701458 - RNA, 22 nt, Human
ugauuuggggauucagauuucu

SEQ ID NO: 3701459 - RNA, 20 nt, Human
ugauuuggugaccaacuguc

SEQ ID NO: 3701460 - RNA, 14 nt, Human
ugaauccucucucu

SEQ ID NO: 3701461 - RNA, 20 nt, Human
ugaaucuaagcagcauuucu

SEQ ID NO: 3701462 - RNA, 14 nt, Human
ugaaucuaugccaa

SEQ ID NO: 3701463 - RNA, 21 nt, Human
ugaaucuauuauacuguauua

SEQ ID NO: 3701464 - RNA, 22 nt, Human
ugaaucuauuauacuguauuaa

SEQ ID NO: 3701465 - RNA, 14 nt, Human
ugaaucucaauuug

SEQ ID NO: 3701466 - RNA, 15 nt, Human
ugaaucucaauuuga

SEQ ID NO: 3701467 - RNA, 23 nt, Human
ugaaucugauuggacauuuucuu

SEQ ID NO: 3701468 - RNA, 15 nt, Human
ugaaucugauuuuua

SEQ ID NO: 3701469 - RNA, 16 nt, Human
ugaaucuuggugucua

SEQ ID NO: 3701470 - RNA, 16 nt, Human
ugaaucuugucucaau

SEQ ID NO: 3701471 - RNA, 20 nt, Human
ugaaucuugucucaaugcuc

SEQ ID NO: 3701472 - RNA, 13 nt, Human
ugaaucuuugugc

SEQ ID NO: 3701473 - RNA, 17 nt, Human
ugaaugaaaaauuuaag

SEQ ID NO: 3701474 - RNA, 21 nt, Human
ugaaugaaaaauuuaagcauu

SEQ ID NO: 3701475 - RNA, 17 nt, Human
ugaaugaaaauguccau

SEQ ID NO: 3701476 - RNA, 22 nt, Human
ugaaugaaagauuaaacagaug

SEQ ID NO: 3701477 - RNA, 14 nt, Human
ugaaugaaauauca

SEQ ID NO: 3701478 - RNA, 22 nt, Human
ugaaugaagcaaaugucaugcu

SEQ ID NO: 3701479 - RNA, 16 nt, Human
ugaaugaagcaguauu

SEQ ID NO: 3701480 - RNA, 12 nt, Human
ugaaugacaaag

SEQ ID NO: 3701481 - RNA, 17 nt, Human
ugaaugacaacagaagc

SEQ ID NO: 3701482 - RNA, 17 nt, Human
ugaaugacuaagaggaa

SEQ ID NO: 3701483 - RNA, 21 nt, Human
ugaaugacuuccccaauaucu

SEQ ID NO: 3701484 - RNA, 19 nt, Human
ugaaugaggucccaggcag

SEQ ID NO: 3701485 - RNA, 21 nt, Human
ugaaugagucuguuguguguc

SEQ ID NO: 3701486 - RNA, 15 nt, Human
ugaaugaucucucug

SEQ ID NO: 3701487 - RNA, 17 nt, Human
ugaaugauucauguuau

SEQ ID NO: 3701488 - RNA, 14 nt, Human
ugaaugauuugcau

SEQ ID NO: 3701489 - RNA, 19 nt, Human
ugaaugauuuuucuuuaca

SEQ ID NO: 3701490 - RNA, 19 nt, Human
ugaaugcaccauggucaaa

SEQ ID NO: 3701491 - RNA, 18 nt, Human
ugaaugcagguuuuauca

SEQ ID NO: 3701492 - RNA, 22 nt, Human
ugaaugcagucuguccaggcuc

SEQ ID NO: 3701493 - RNA, 12 nt, Human
ugaaugcauuuu

SEQ ID NO: 3701494 - RNA, 14 nt, Human
ugaaugcauuuugu

SEQ ID NO: 3701495 - RNA, 21 nt, Human
ugaaugcauuuuguuugguau

SEQ ID NO: 3701496 - RNA, 22 nt, Human
ugaaugcauuuuguuugguauu

SEQ ID NO: 3701497 - RNA, 20 nt, Human
ugaaugccacgcgguacaaa

SEQ ID NO: 3701498 - RNA, 21 nt, Human
ugaaugccacugccuucgcuu

SEQ ID NO: 3701499 - RNA, 21 nt, Human
ugaaugccgcgaugggucagg

SEQ ID NO: 3701500 - RNA, 16 nt, Human
ugaaugccuccugugg

SEQ ID NO: 3701501 - RNA, 17 nt, Human
ugaaugccuccuguggg

SEQ ID NO: 3701502 - RNA, 18 nt, Human
ugaaugccuccugugggg

SEQ ID NO: 3701503 - RNA, 14 nt, Human
ugaaugcugccagu

SEQ ID NO: 3701504 - RNA, 11 nt, Human
ugaaugcuggg

SEQ ID NO: 3701505 - RNA, 12 nt, Human
ugaaugcuggga

SEQ ID NO: 3701506 - RNA, 14 nt, Human
ugaaugcugggacu

SEQ ID NO: 3701507 - RNA, 22 nt, Human
ugaaugcuuaaagaauucaaau

SEQ ID NO: 3701508 - RNA, 19 nt, Human
ugaaugcuuauagguggcc

SEQ ID NO: 3701509 - RNA, 21 nt, Human
ugaaugcuuauagguggccuc

SEQ ID NO: 3701510 - RNA, 23 nt, Human
ugaaugcuucuaaguaaauacaa

SEQ ID NO: 3701511 - RNA, 14 nt, Human
ugaaugcuuugcau

SEQ ID NO: 3701512 - RNA, 19 nt, Human
ugaaugcuuuuugaauguu

SEQ ID NO: 3701513 - RNA, 23 nt, Human
ugaaugcuuuuugaauguuauuu

SEQ ID NO: 3701514 - RNA, 15 nt, Human
ugaauggauuggauu

SEQ ID NO: 3701515 - RNA, 23 nt, Human
ugaauggauuggauuauuuaaua

SEQ ID NO: 3701516 - RNA, 15 nt, Human
ugaauggccugccuu

SEQ ID NO: 3701517 - RNA, 17 nt, Human
ugaauggccugccuuga

SEQ ID NO: 3701518 - RNA, 20 nt, Human
ugaauggcuauguuuuuaau

SEQ ID NO: 3701519 - RNA, 17 nt, Human
ugaauggcuuuguauag

SEQ ID NO: 3701520 - RNA, 18 nt, Human
ugaauggcuuuguauaga

SEQ ID NO: 3701521 - RNA, 18 nt, Human
ugaaugggacagaguuga

SEQ ID NO: 3701522 - RNA, 13 nt, Human
ugaaugggaucau

SEQ ID NO: 3701523 - RNA, 19 nt, Human
ugaaugggcaaaacugaau

SEQ ID NO: 3701524 - RNA, 13 nt, Human
ugaaugguaugga

SEQ ID NO: 3701525 - RNA, 21 nt, Human
ugaauggucagcguugcaugu

SEQ ID NO: 3701526 - RNA, 15 nt, Human
ugaaugguguuguau

SEQ ID NO: 3701527 - RNA, 20 nt, Human
ugaaugguuuucaaaauaaa

SEQ ID NO: 3701528 - RNA, 21 nt, Human
ugaauguaaauuuguacuauu

SEQ ID NO: 3701529 - RNA, 18 nt, Human
ugaauguaauuuguguaa

SEQ ID NO: 3701530 - RNA, 23 nt, Human
ugaauguaggcuggcuuucagag

SEQ ID NO: 3701531 - RNA, 16 nt, Human
ugaauguaucaggaaa

SEQ ID NO: 3701532 - RNA, 19 nt, Human
ugaauguaugcuucauaca

SEQ ID NO: 3701533 - RNA, 20 nt, Human
ugaauguaugcuucauacag

SEQ ID NO: 3701534 - RNA, 14 nt, Human
ugaauguauguaaa

SEQ ID NO: 3701535 - RNA, 20 nt, Human
ugaauguauguaaugugugg

SEQ ID NO: 3701536 - RNA, 15 nt, Human
ugaauguaugugcac

SEQ ID NO: 3701537 - RNA, 16 nt, Human
ugaauguauugaacuu

SEQ ID NO: 3701538 - RNA, 11 nt, Human
ugaauguauuu

SEQ ID NO: 3701539 - RNA, 15 nt, Human
ugaauguauuuauuu

SEQ ID NO: 3701540 - RNA, 15 nt, Human
ugaaugucaguguga

SEQ ID NO: 3701541 - RNA, 15 nt, Human
ugaaugucaguuguu

SEQ ID NO: 3701542 - RNA, 16 nt, Human
ugaaugucauucacaa

SEQ ID NO: 3701543 - RNA, 18 nt, Human
ugaaugucuaaaauuguu

SEQ ID NO: 3701544 - RNA, 15 nt, Human
ugaaugucuuuugaa

SEQ ID NO: 3701545 - RNA, 22 nt, Human
ugaaugucuuuuuucaaacuuu

SEQ ID NO: 3701546 - RNA, 15 nt, Human
ugaaugugaagccuu

SEQ ID NO: 3701547 - RNA, 17 nt, Human
ugaaugugaagccuucc

SEQ ID NO: 3701548 - RNA, 18 nt, Human
ugaauguggcuugagaaa

SEQ ID NO: 3701549 - RNA, 16 nt, Human
ugaaugugggcacugg

SEQ ID NO: 3701550 - RNA, 15 nt, Human
ugaauguggucucag

SEQ ID NO: 3701551 - RNA, 20 nt, Human
ugaauguguuucacaguuug

SEQ ID NO: 3701552 - RNA, 23 nt, Human
ugaauguguuucacaguuugaaa

SEQ ID NO: 3701553 - RNA, 11 nt, Human
ugaauguuaaa

SEQ ID NO: 3701554 - RNA, 16 nt, Human
ugaauguuaaauaaau

SEQ ID NO: 3701555 - RNA, 21 nt, Human
ugaauguuaaauaaauuguau

SEQ ID NO: 3701556 - RNA, 17 nt, Human
ugaauguuaagaauuga

SEQ ID NO: 3701557 - RNA, 16 nt, Human
ugaauguuaauuuuuu

SEQ ID NO: 3701558 - RNA, 22 nt, Human
ugaauguuuacacucuuuguaa

SEQ ID NO: 3701559 - RNA, 19 nt, Human
ugaauguuuauuccuugau

SEQ ID NO: 3701560 - RNA, 11 nt, Human
ugaauguuucc

SEQ ID NO: 3701561 - RNA, 14 nt, Human
ugaauuaaguuuuu

SEQ ID NO: 3701562 - RNA, 16 nt, Human
ugaauuaauaucccua

SEQ ID NO: 3701563 - RNA, 20 nt, Human
ugaauuaaugacagagccag

SEQ ID NO: 3701564 - RNA, 19 nt, Human
ugaauuaauuaauuuggag

SEQ ID NO: 3701565 - RNA, 16 nt, Human
ugaauuacuaacuucu

SEQ ID NO: 3701566 - RNA, 20 nt, Human
ugaauuacuaacuucuaaaa

SEQ ID NO: 3701567 - RNA, 19 nt, Human
ugaauuagaaacauaaaua

SEQ ID NO: 3701568 - RNA, 15 nt, Human
ugaauuagugaguau

SEQ ID NO: 3701569 - RNA, 15 nt, Human
ugaauuaugaaacuu

SEQ ID NO: 3701570 - RNA, 18 nt, Human
ugaauuauuacaguguuu

SEQ ID NO: 3701571 - RNA, 18 nt, Human
ugaauuauugacacugaa

SEQ ID NO: 3701572 - RNA, 21 nt, Human
ugaauuauugacacugaacuu

SEQ ID NO: 3701573 - RNA, 13 nt, Human
ugaauucauagaa

SEQ ID NO: 3701574 - RNA, 15 nt, Human
ugaauucauuucacu

SEQ ID NO: 3701575 - RNA, 13 nt, Human
ugaauucccucac

SEQ ID NO: 3701576 - RNA, 14 nt, Human
ugaauucccucacu

SEQ ID NO: 3701577 - RNA, 22 nt, Human
ugaauucccucacucgucuccc

SEQ ID NO: 3701578 - RNA, 17 nt, Human
ugaauuccuaaaauuau

SEQ ID NO: 3701579 - RNA, 23 nt, Human
ugaauuccuaaaauuauggaaac

SEQ ID NO: 3701580 - RNA, 23 nt, Human
ugaauucggaacuguccuuuccu

SEQ ID NO: 3701581 - RNA, 16 nt, Human
ugaauugaaguuucaa

SEQ ID NO: 3701582 - RNA, 13 nt, Human
ugaauugacuacc

SEQ ID NO: 3701583 - RNA, 17 nt, Human
ugaauugagccuaaaaa

SEQ ID NO: 3701584 - RNA, 15 nt, Human
ugaauugauaauaaa

SEQ ID NO: 3701585 - RNA, 16 nt, Human
ugaauugauaauaaac

SEQ ID NO: 3701586 - RNA, 14 nt, Human
ugaauuggaaugca

SEQ ID NO: 3701587 - RNA, 19 nt, Human
ugaauuguaacuguucuug

SEQ ID NO: 3701588 - RNA, 13 nt, Human
ugaauuguaagga

SEQ ID NO: 3701589 - RNA, 12 nt, Human
ugaauuguacag

SEQ ID NO: 3701590 - RNA, 13 nt, Human
ugaauuguacaga

SEQ ID NO: 3701591 - RNA, 19 nt, Human
ugaauuuaaauauaauucu

SEQ ID NO: 3701592 - RNA, 19 nt, Human
ugaauuuagugagauuuac

SEQ ID NO: 3701593 - RNA, 15 nt, Human
ugaauuuagugagca

SEQ ID NO: 3701594 - RNA, 17 nt, Human
ugaauuuauaaaguacc

SEQ ID NO: 3701595 - RNA, 15 nt, Human
ugaauuuaucuuuga

SEQ ID NO: 3701596 - RNA, 16 nt, Human
ugaauuuaucuuugau

SEQ ID NO: 3701597 - RNA, 20 nt, Human
ugaauuuauugcacauuguu

SEQ ID NO: 3701598 - RNA, 15 nt, Human
ugaauuuauuggcuu

SEQ ID NO: 3701599 - RNA, 17 nt, Human
ugaauuuauuggcuuuu

SEQ ID NO: 3701600 - RNA, 11 nt, Human
ugaauuucauc

SEQ ID NO: 3701601 - RNA, 14 nt, Human
ugaauuucucuaca

SEQ ID NO: 3701602 - RNA, 20 nt, Human
ugaauuucuucacuguugaa

SEQ ID NO: 3701603 - RNA, 23 nt, Human
ugaauuucuucacuguugaaaau

SEQ ID NO: 3701604 - RNA, 16 nt, Human
ugaauuugaaugaaaa

SEQ ID NO: 3701605 - RNA, 15 nt, Human
ugaauuugcaaagua

SEQ ID NO: 3701606 - RNA, 17 nt, Human
ugaauuugcaaaguacu

SEQ ID NO: 3701607 - RNA, 18 nt, Human
ugaauuugcaaaguacug

SEQ ID NO: 3701608 - RNA, 11 nt, Human
ugaauuuggag

SEQ ID NO: 3701609 - RNA, 20 nt, Human
ugaauuuggagacucugugg

SEQ ID NO: 3701610 - RNA, 19 nt, Human
ggugugaggacauaaaucu

SEQ ID NO: 3701611 - RNA, 16 nt, Human
ggugugaggcaggaga

SEQ ID NO: 3701612 - RNA, 15 nt, Human
ggugugcacaucucu

SEQ ID NO: 3701613 - RNA, 16 nt, Human
ggugugcacaucucug

SEQ ID NO: 3701614 - RNA, 14 nt, Human
ggugugcuauagcu

SEQ ID NO: 3701615 - RNA, 12 nt, Human
ggugugcuggga

SEQ ID NO: 3701616 - RNA, 19 nt, Human
ggugugcugggagcuccac

SEQ ID NO: 3701617 - RNA, 12 nt, Human
gguguggaagag

SEQ ID NO: 3701618 - RNA, 15 nt, Human
gguguggcccugcca

SEQ ID NO: 3701619 - RNA, 15 nt, Human
ggugugggggccccg

SEQ ID NO: 3701620 - RNA, 12 nt, Human
ggugugucugcu

SEQ ID NO: 3701621 - RNA, 14 nt, Human
gguguguguagcca

SEQ ID NO: 3701622 - RNA, 21 nt, Human
gguguguuggacagagaaggg

SEQ ID NO: 3701623 - RNA, 15 nt, Human
gguguuaacagaagg

SEQ ID NO: 3701624 - RNA, 14 nt, Human
gguguuaauuuuug

SEQ ID NO: 3701625 - RNA, 17 nt, Human
gguguuacugcaguuga

SEQ ID NO: 3701626 - RNA, 23 nt, Human
gguguuccgaaaccaaagaagaa

SEQ ID NO: 3701627 - RNA, 13 nt, Human
gguguucuaagau

SEQ ID NO: 3701628 - RNA, 17 nt, Human
gguguugccaguugucc

SEQ ID NO: 3701629 - RNA, 20 nt, Human
gguguuguacucaauuuuaa

SEQ ID NO: 3701630 - RNA, 15 nt, Human
gguguuguaugccuu

SEQ ID NO: 3701631 - RNA, 17 nt, Human
gguguuuccuggcacug

SEQ ID NO: 3701632 - RNA, 21 nt, Human
gguguuucuagcacuggccug

SEQ ID NO: 3701633 - RNA, 14 nt, Human
gguguuuucaugua

SEQ ID NO: 3701634 - RNA, 13 nt, Human
gguguuuucugug

SEQ ID NO: 3701635 - RNA, 17 nt, Human
gguguuuucuguguaac

SEQ ID NO: 3701636 - RNA, 19 nt, Human
gguguuuuuuaugaagugc

SEQ ID NO: 3701637 - RNA, 11 nt, Human
gguuaaaacug

SEQ ID NO: 3701638 - RNA, 12 nt, Human
gguuaaaaugga

SEQ ID NO: 3701639 - RNA, 14 nt, Human
gguuaaauguuuug

SEQ ID NO: 3701640 - RNA, 17 nt, Human
gguuaacuauguacaau

SEQ ID NO: 3701641 - RNA, 15 nt, Human
gguuaaggcugagga

SEQ ID NO: 3701642 - RNA, 13 nt, Human
gguuaagucuguu

SEQ ID NO: 3701643 - RNA, 13 nt, Human
gguuaauaaguuu

SEQ ID NO: 3701644 - RNA, 14 nt, Human
gguuacaaacugca

SEQ ID NO: 3701645 - RNA, 15 nt, Human
gguuacuucuucucu

SEQ ID NO: 3701646 - RNA, 15 nt, Human
gguuagaccuacagg

SEQ ID NO: 3701647 - RNA, 22 nt, Human
gguuagaccuacagggggucug

SEQ ID NO: 3701648 - RNA, 14 nt, Human
gguuagauauagag

SEQ ID NO: 3701649 - RNA, 22 nt, Human
gguuagcucagccccagcccag

SEQ ID NO: 3701650 - RNA, 20 nt, Human
gguuaggaguucgagaccag

SEQ ID NO: 3701651 - RNA, 17 nt, Human
gguuaggcauuguggga

SEQ ID NO: 3701652 - RNA, 16 nt, Human
gguuagggaaaacauu

SEQ ID NO: 3701653 - RNA, 22 nt, Human
gguuaguggauggaaggggcug

SEQ ID NO: 3701654 - RNA, 15 nt, Human
gguuauagugcaaua

SEQ ID NO: 3701655 - RNA, 17 nt, Human
gguuauagugcaauaua

SEQ ID NO: 3701656 - RNA, 21 nt, Human
gguuauauuuuacuacugugg

SEQ ID NO: 3701657 - RNA, 21 nt, Human
gguuaugaaagaauauauuua

SEQ ID NO: 3701658 - RNA, 13 nt, Human
gguuaugaauauu

SEQ ID NO: 3701659 - RNA, 11 nt, Human
gguuauguuuu

SEQ ID NO: 3701660 - RNA, 14 nt, Human
gguuauuuauuuaa

SEQ ID NO: 3701661 - RNA, 18 nt, Human
gguuauuuauuuaaaugu

SEQ ID NO: 3701662 - RNA, 24 nt, Human
gguuauuucucaacaaagcacagu

SEQ ID NO: 3701663 - RNA, 13 nt, Human
gguuauuucucug

SEQ ID NO: 3701664 - RNA, 17 nt, Human
gguucaaaccugugaag

SEQ ID NO: 3701665 - RNA, 19 nt, Human
gguucaagugauucucuug

SEQ ID NO: 3701666 - RNA, 13 nt, Human
gguucaccagccu

SEQ ID NO: 3701667 - RNA, 16 nt, Human
gguucaccauugagac

SEQ ID NO: 3701668 - RNA, 19 nt, Human
gguucacucuuggagccug

SEQ ID NO: 3701669 - RNA, 21 nt, Human
gguucacucuuggagccugca

SEQ ID NO: 3701670 - RNA, 16 nt, Human
gguucagaaaugcugc

SEQ ID NO: 3701671 - RNA, 16 nt, Human
gguucagagacucagg

SEQ ID NO: 3701672 - RNA, 13 nt, Human
gguucaggcccgg

SEQ ID NO: 3701673 - RNA, 21 nt, Human
gguucaggguuggccccugcc

SEQ ID NO: 3701674 - RNA, 15 nt, Human
gguucaguguuucug

SEQ ID NO: 3701675 - RNA, 14 nt, Human
gguucaguuucuuc

SEQ ID NO: 3701676 - RNA, 15 nt, Human
gguucaugaugcagu

SEQ ID NO: 3701677 - RNA, 18 nt, Human
gguuccaauccuggcucu

SEQ ID NO: 3701678 - RNA, 12 nt, Human
gguuccacagac

SEQ ID NO: 3701679 - RNA, 13 nt, Human
gguuccacagagu

SEQ ID NO: 3701680 - RNA, 19 nt, Human
gguuccacagaguaagaca

SEQ ID NO: 3701681 - RNA, 22 nt, Human
gguuccacagaguaagacauug

SEQ ID NO: 3701682 - RNA, 23 nt, Human
gguuccagcaauucuccugccuc

SEQ ID NO: 3701683 - RNA, 16 nt, Human
gguuccagccugccac

SEQ ID NO: 3701684 - RNA, 13 nt, Human
gguucccaagcuc

SEQ ID NO: 3701685 - RNA, 16 nt, Human
gguucccaagcucaga

SEQ ID NO: 3701686 - RNA, 17 nt, Human
gguucccauuugcuccu

SEQ ID NO: 3701687 - RNA, 18 nt, Human
gguucccuguucuuccuc

SEQ ID NO: 3701688 - RNA, 12 nt, Human
gguucccuuccu

SEQ ID NO: 3701689 - RNA, 17 nt, Human
gguucccuuuccuucca

SEQ ID NO: 3701690 - RNA, 23 nt, Human
gguucccuuugacgccaucccag

SEQ ID NO: 3701691 - RNA, 22 nt, Human
gguuccgcuuggagcagagggg

SEQ ID NO: 3701692 - RNA, 21 nt, Human
gguuccggaauccuguccuca

SEQ ID NO: 3701693 - RNA, 16 nt, Human
gguuccuccucuccua

SEQ ID NO: 3701694 - RNA, 18 nt, Human
gguuccucugccugcccc

SEQ ID NO: 3701695 - RNA, 16 nt, Human
gguuccuucugggcau

SEQ ID NO: 3701696 - RNA, 19 nt, Human
gguucguucuguacuguua

SEQ ID NO: 3701697 - RNA, 14 nt, Human
gguucuaaaguucu

SEQ ID NO: 3701698 - RNA, 23 nt, Human
gguucuaaggccuaggauucuaa

SEQ ID NO: 3701699 - RNA, 18 nt, Human
gguucuaggcaucucugu

SEQ ID NO: 3701700 - RNA, 18 nt, Human
gguucucccccuuucucu

SEQ ID NO: 3701701 - RNA, 17 nt, Human
gguucugagauggcucc

SEQ ID NO: 3701702 - RNA, 12 nt, Human
gguucugccucu

SEQ ID NO: 3701703 - RNA, 13 nt, Human
gguucugccugcu

SEQ ID NO: 3701704 - RNA, 22 nt, Human
gguucugguuagcucagcccca

SEQ ID NO: 3701705 - RNA, 16 nt, Human
gguucuuagugucacu

SEQ ID NO: 3701706 - RNA, 22 nt, Human
gguucuuguauuaagaaugaaa

SEQ ID NO: 3701707 - RNA, 18 nt, Human
gguucuuucauuugcuuu

SEQ ID NO: 3701708 - RNA, 23 nt, Human
gguucuuugagggacugccucug

SEQ ID NO: 3701709 - RNA, 15 nt, Human
gguucuuuggaagga

SEQ ID NO: 3701710 - RNA, 13 nt, Human
gguucuuugugua

SEQ ID NO: 3701711 - RNA, 14 nt, Human
gguugaagcaccaa

SEQ ID NO: 3701712 - RNA, 18 nt, Human
gguugaggggcuccugga

SEQ ID NO: 3701713 - RNA, 19 nt, Human
gguugagguggaagcccuc

SEQ ID NO: 3701714 - RNA, 14 nt, Human
gguugaucacacuc

SEQ ID NO: 3701715 - RNA, 14 nt, Human
gguugccacaggcc

SEQ ID NO: 3701716 - RNA, 18 nt, Human
gguugccacaggccuccc

SEQ ID NO: 3701717 - RNA, 17 nt, Human
gguugcgggacagagua

SEQ ID NO: 3701718 - RNA, 16 nt, Human
gguugcucacagcugu

SEQ ID NO: 3701719 - RNA, 18 nt, Human
gguugcuccgccuggccu

SEQ ID NO: 3701720 - RNA, 16 nt, Human
gguugcugguugcugu

SEQ ID NO: 3701721 - RNA, 17 nt, Human
gguugcugguugcugug

SEQ ID NO: 3701722 - RNA, 18 nt, Human
gguugcugguugcugugu

SEQ ID NO: 3701723 - RNA, 18 nt, Human
gguugcuguuuuccuccc

SEQ ID NO: 3701724 - RNA, 22 nt, Human
gguuggaagugagggucagaga

SEQ ID NO: 3701725 - RNA, 15 nt, Human
gguugggaugggaua

SEQ ID NO: 3701726 - RNA, 14 nt, Human
gguuggggugacag

SEQ ID NO: 3701727 - RNA, 19 nt, Human
gguuguaauuaaauucuga

SEQ ID NO: 3701728 - RNA, 19 nt, Human
gguuguauucuuugauguu

SEQ ID NO: 3701729 - RNA, 10 nt, Human
gguugucaau

SEQ ID NO: 3701730 - RNA, 14 nt, Human
gguugucagcucuc

SEQ ID NO: 3701731 - RNA, 21 nt, Human
gguugucuguuuuuguaacuu

SEQ ID NO: 3701732 - RNA, 14 nt, Human
gguugugaggccug

SEQ ID NO: 3701733 - RNA, 16 nt, Human
gguugugaggccuggc

SEQ ID NO: 3701734 - RNA, 21 nt, Human
gguugugaggccuggccaggc

SEQ ID NO: 3701735 - RNA, 20 nt, Human
gguuuaaacuuguuugcugu

SEQ ID NO: 3701736 - RNA, 23 nt, Human
gguuuaacucagaucacuacugc

SEQ ID NO: 3701737 - RNA, 16 nt, Human
gguuuaaguagauuuc

SEQ ID NO: 3701738 - RNA, 14 nt, Human
gguuuacaggcccu

SEQ ID NO: 3701739 - RNA, 22 nt, Human
gguuuacaugugauguuuuagu

SEQ ID NO: 3701740 - RNA, 19 nt, Human
gguuuacauucaucucauu

SEQ ID NO: 3701741 - RNA, 18 nt, Human
gguuuacucacugcugca

SEQ ID NO: 3701742 - RNA, 12 nt, Human
gguuuacuuuca

SEQ ID NO: 3701743 - RNA, 16 nt, Human
gguuuagaaagcuugc

SEQ ID NO: 3701744 - RNA, 22 nt, Human
gguuuaggcugguggcccagga

SEQ ID NO: 3701745 - RNA, 18 nt, Human
gguuuaguguaaaaauga

SEQ ID NO: 3701746 - RNA, 23 nt, Human
gguuuaucgcccuggcaggcagg

SEQ ID NO: 3701747 - RNA, 11 nt, Human
gguuuauuugg

SEQ ID NO: 3701748 - RNA, 17 nt, Human
gguuuauuuuucuguua

SEQ ID NO: 3701749 - RNA, 16 nt, Human
gguuucaaagaugcug

SEQ ID NO: 3701750 - RNA, 19 nt, Human
gguuucaccauguugccca

SEQ ID NO: 3701751 - RNA, 14 nt, Human
gguuucagaaaugu

SEQ ID NO: 3701752 - RNA, 13 nt, Human
gguuucagcacua

SEQ ID NO: 3701753 - RNA, 17 nt, Human
gguuucauauuucuuau

SEQ ID NO: 3701754 - RNA, 16 nt, Human
gguuucauguuaguua

SEQ ID NO: 3701755 - RNA, 12 nt, Human
gguuuccaaagg

SEQ ID NO: 3701756 - RNA, 20 nt, Human
gguuucccaaugguguuuuu

SEQ ID NO: 3701757 - RNA, 13 nt, Human
gguuuccugcccu

SEQ ID NO: 3701758 - RNA, 16 nt, Human
gguuuccugcccuggg

SEQ ID NO: 3701759 - RNA, 17 nt, Human
gguuucgaagucauuaa

SEQ ID NO: 3701760 - RNA, 15 nt, Human
gguuucgagaagcug

SEQ ID NO: 3701761 - RNA, 20 nt, Human
gguuucucuauuaaaaugca

SEQ ID NO: 3701762 - RNA, 17 nt, Human
ugauuuguaacccacug

SEQ ID NO: 3701763 - RNA, 20 nt, Human
ugauuuguaacccacugaga

SEQ ID NO: 3701764 - RNA, 22 nt, Human
ugauuuuaaaccauaaaaagcu

SEQ ID NO: 3701765 - RNA, 15 nt, Human
ugauuuuaaaugugu

SEQ ID NO: 3701766 - RNA, 12 nt, Human
ugauuuuaacaa

SEQ ID NO: 3701767 - RNA, 22 nt, Human
ugauuuuaacaauaacuacugu

SEQ ID NO: 3701768 - RNA, 15 nt, Human
ugauuuuaacucugu

SEQ ID NO: 3701769 - RNA, 17 nt, Human
ugauuuuaacucugucu

SEQ ID NO: 3701770 - RNA, 19 nt, Human
ugauuuuaaguuucucugc

SEQ ID NO: 3701771 - RNA, 22 nt, Human
ugauuuuaaguuucucugcaga

SEQ ID NO: 3701772 - RNA, 21 nt, Human
ugauuuuaauggauuguuaau

SEQ ID NO: 3701773 - RNA, 19 nt, Human
ugauuuuacaauugaaaug

SEQ ID NO: 3701774 - RNA, 18 nt, Human
ugauuuuagcugcagaac

SEQ ID NO: 3701775 - RNA, 18 nt, Human
ugauuuuaugaucagugu

SEQ ID NO: 3701776 - RNA, 12 nt, Human
ugauuuuauucu

SEQ ID NO: 3701777 - RNA, 14 nt, Human
ugauuuuauucuug

SEQ ID NO: 3701778 - RNA, 17 nt, Human
ugauuuucaagcagcau

SEQ ID NO: 3701779 - RNA, 15 nt, Human
ugauuuucauugcug

SEQ ID NO: 3701780 - RNA, 17 nt, Human
ugauuuuccaucuaaaa

SEQ ID NO: 3701781 - RNA, 14 nt, Human
ugauuuucccucua

SEQ ID NO: 3701782 - RNA, 12 nt, Human
ugauuuucuguu

SEQ ID NO: 3701783 - RNA, 13 nt, Human
ugauuuucuguug

SEQ ID NO: 3701784 - RNA, 23 nt, Human
ugauuuugaaccugaugaaaaua

SEQ ID NO: 3701785 - RNA, 13 nt, Human
ugauuuugcaaau

SEQ ID NO: 3701786 - RNA, 14 nt, Human
ugauuuugcuguag

SEQ ID NO: 3701787 - RNA, 16 nt, Human
ugauuuugcuguagaa

SEQ ID NO: 3701788 - RNA, 19 nt, Human
ugauuuugcuguagaagau

SEQ ID NO: 3701789 - RNA, 21 nt, Human
ugauuuuuaccguuucuuccc

SEQ ID NO: 3701790 - RNA, 23 nt, Human
ugauuuuuauaaauacugcaaau

SEQ ID NO: 3701791 - RNA, 20 nt, Human
ugauuuuuaugaugaugaaa

SEQ ID NO: 3701792 - RNA, 15 nt, Human
ugauuuuucuuuaca

SEQ ID NO: 3701793 - RNA, 23 nt, Human
ugauuuuugagcccuuguuucag

SEQ ID NO: 3701794 - RNA, 22 nt, Human
ugauuuuugccucuuccagucu

SEQ ID NO: 3701795 - RNA, 18 nt, Human
ugauuuuuguaagacaau

SEQ ID NO: 3701796 - RNA, 13 nt, Human
ugauuuuugucuc

SEQ ID NO: 3701797 - RNA, 14 nt, Human
ugauuuuuguugau

SEQ ID NO: 3701798 - RNA, 19 nt, Human
ugauuuuuguugauuaaaa

SEQ ID NO: 3701799 - RNA, 13 nt, Human
ugauuuuuuaaaa

SEQ ID NO: 3701800 - RNA, 16 nt, Human
ugauuuuuuaaaagaa

SEQ ID NO: 3701801 - RNA, 23 nt, Human
ugauuuuuuuucccauuuagaau

SEQ ID NO: 3701802 - RNA, 23 nt, Human
ugauuuuuuuuuagaacagaaaa

SEQ ID NO: 3701803 - RNA, 12 nt, Human
ugcaaaaaauag

SEQ ID NO: 3701804 - RNA, 22 nt, Human
ugcaaaaagaaaugacuaauua

SEQ ID NO: 3701805 - RNA, 21 nt, Human
ugcaaaaagcuagucaacagu

SEQ ID NO: 3701806 - RNA, 18 nt, Human
ugcaaaaagcuucugugg

SEQ ID NO: 3701807 - RNA, 23 nt, Human
ugcaaaaauauuuauaaaacuuc

SEQ ID NO: 3701808 - RNA, 17 nt, Human
ugcaaaaauccaaauau

SEQ ID NO: 3701809 - RNA, 22 nt, Human
ugcaaaaauccaaauauuguua

SEQ ID NO: 3701810 - RNA, 20 nt, Human
ugcaaaaauuuuuggauuga

SEQ ID NO: 3701811 - RNA, 14 nt, Human
ugcaaaaccuuuga

SEQ ID NO: 3701812 - RNA, 20 nt, Human
ugcaaaagacuaauuuaaaa

SEQ ID NO: 3701813 - RNA, 19 nt, Human
ugcaaaaggacucucagga

SEQ ID NO: 3701814 - RNA, 22 nt, Human
ugcaaaaggacucucaggacca

SEQ ID NO: 3701815 - RNA, 23 nt, Human
ugcaaaagguucacuaaagcagu

SEQ ID NO: 3701816 - RNA, 20 nt, Human
ugcaaaaguucugacuugac

SEQ ID NO: 3701817 - RNA, 15 nt, Human
ugcaaaauacaugaa

SEQ ID NO: 3701818 - RNA, 23 nt, Human
ugcaaaauacaugaugauuucag

SEQ ID NO: 3701819 - RNA, 14 nt, Human
ugcaaaaucaguuu

SEQ ID NO: 3701820 - RNA, 15 nt, Human
ugcaaaaucaguuuu

SEQ ID NO: 3701821 - RNA, 20 nt, Human
ugcaaaaucaguuuuccucu

SEQ ID NO: 3701822 - RNA, 14 nt, Human
ugcaaaauuuccag

SEQ ID NO: 3701823 - RNA, 21 nt, Human
ugcaaaauuugaugccaggac

SEQ ID NO: 3701824 - RNA, 14 nt, Human
ugcaaacagaacag

SEQ ID NO: 3701825 - RNA, 13 nt, Human
ugcaaacauugga

SEQ ID NO: 3701826 - RNA, 16 nt, Human
ugcaaacauuggaaga

SEQ ID NO: 3701827 - RNA, 12 nt, Human
ugcaaaccauca

SEQ ID NO: 3701828 - RNA, 20 nt, Human
ugcaaaccaucauugaaauc

SEQ ID NO: 3701829 - RNA, 16 nt, Human
ugcaaacgcugccugc

SEQ ID NO: 3701830 - RNA, 21 nt, Human
ugcaaacgcugccugcccgua

SEQ ID NO: 3701831 - RNA, 11 nt, Human
ugcaaacuggg

SEQ ID NO: 3701832 - RNA, 13 nt, Human
ugcaaacugggaa

SEQ ID NO: 3701833 - RNA, 22 nt, Human
ugcaaacugggcuggaagauau

SEQ ID NO: 3701834 - RNA, 23 nt, Human
ugcaaacugggcuggaagauauu

SEQ ID NO: 3701835 - RNA, 16 nt, Human
ugcaaagaaagaaaaa

SEQ ID NO: 3701836 - RNA, 22 nt, Human
ugcaaagaaagaaaaaaaacca

SEQ ID NO: 3701837 - RNA, 12 nt, Human
ugcaaagaugaa

SEQ ID NO: 3701838 - RNA, 20 nt, Human
ugcaaagcacugacuucuaa

SEQ ID NO: 3701839 - RNA, 13 nt, Human
ugcaaaggacaga

SEQ ID NO: 3701840 - RNA, 15 nt, Human
ugcaaaggacagauc

SEQ ID NO: 3701841 - RNA, 22 nt, Human
ugcaaaggucuuuuuaaaccag

SEQ ID NO: 3701842 - RNA, 15 nt, Human
ugcaaaguacaaugu

SEQ ID NO: 3701843 - RNA, 18 nt, Human
ugcaaaguacaauguguu

SEQ ID NO: 3701844 - RNA, 21 nt, Human
ugcaaaguacagguacuuugu

SEQ ID NO: 3701845 - RNA, 21 nt, Human
ugcaaaguacuguaagaauaa

SEQ ID NO: 3701846 - RNA, 19 nt, Human
ugcaaaguauaaauuugug

SEQ ID NO: 3701847 - RNA, 20 nt, Human
ugcaaaguaucccuacugua

SEQ ID NO: 3701848 - RNA, 12 nt, Human
ugcaaaguauug

SEQ ID NO: 3701849 - RNA, 15 nt, Human
ugcaaaguauuguaa

SEQ ID NO: 3701850 - RNA, 18 nt, Human
ugcaaaguauuguaaauu

SEQ ID NO: 3701851 - RNA, 23 nt, Human
ugcaaagucaugcaaaggcuggg

SEQ ID NO: 3701852 - RNA, 23 nt, Human
ugcaaaguucccuacuuccugug

SEQ ID NO: 3701853 - RNA, 14 nt, Human
ugcaaaguucugug

SEQ ID NO: 3701854 - RNA, 13 nt, Human
ugcaaauaacaaa

SEQ ID NO: 3701855 - RNA, 17 nt, Human
ugcaaauaacaaaugcc

SEQ ID NO: 3701856 - RNA, 15 nt, Human
ugcaaauaaguguau

SEQ ID NO: 3701857 - RNA, 23 nt, Human
ugcaaauacuguauauucaggac

SEQ ID NO: 3701858 - RNA, 13 nt, Human
ugcaaauauaaac

SEQ ID NO: 3701859 - RNA, 15 nt, Human
ugcaaauauaaacau

SEQ ID NO: 3701860 - RNA, 16 nt, Human
ugcaaauauaaacauc

SEQ ID NO: 3701861 - RNA, 15 nt, Human
ugcaaauccuaugug

SEQ ID NO: 3701862 - RNA, 18 nt, Human
ugcaaauccuaugugauu

SEQ ID NO: 3701863 - RNA, 19 nt, Human
ugcaaauccuaugugauuu

SEQ ID NO: 3701864 - RNA, 14 nt, Human
ugcaaaucugaugg

SEQ ID NO: 3701865 - RNA, 20 nt, Human
ugcaaaugagcucugaaauc

SEQ ID NO: 3701866 - RNA, 22 nt, Human
ugcaaauggugguuguuucuuc

SEQ ID NO: 3701867 - RNA, 20 nt, Human
ugcaaauucccagauuugaa

SEQ ID NO: 3701868 - RNA, 12 nt, Human
ugcaaauuucau

SEQ ID NO: 3701869 - RNA, 16 nt, Human
ugcaacaaaauacauu

SEQ ID NO: 3701870 - RNA, 17 nt, Human
ugcaacaaaauguagaa

SEQ ID NO: 3701871 - RNA, 13 nt, Human
ugcaacaaaauuc

SEQ ID NO: 3701872 - RNA, 15 nt, Human
ugcaacaagcaugca

SEQ ID NO: 3701873 - RNA, 12 nt, Human
ugcaacacacag

SEQ ID NO: 3701874 - RNA, 14 nt, Human
ugcaacacacagac

SEQ ID NO: 3701875 - RNA, 12 nt, Human
ugcaacacuggu

SEQ ID NO: 3701876 - RNA, 16 nt, Human
ugcaacagacuugaau

SEQ ID NO: 3701877 - RNA, 24 nt, Human
ugcaacagcacuggcucucuccag

SEQ ID NO: 3701878 - RNA, 15 nt, Human
ugcaacaggcugggc

SEQ ID NO: 3701879 - RNA, 16 nt, Human
ugcaacaggcugggcu

SEQ ID NO: 3701880 - RNA, 19 nt, Human
ugcaacaggcugggcuuca

SEQ ID NO: 3701881 - RNA, 20 nt, Human
ugcaacaggcugggcuucag

SEQ ID NO: 3701882 - RNA, 24 nt, Human
ugcaacaggguauggacuaucugu

SEQ ID NO: 3701883 - RNA, 23 nt, Human
ugcaacauuuacaguccuucaaa

SEQ ID NO: 3701884 - RNA, 16 nt, Human
ugcaaccaagucacac

SEQ ID NO: 3701885 - RNA, 17 nt, Human
ugcaaccaagucacacg

SEQ ID NO: 3701886 - RNA, 14 nt, Human
ugcaaccacacacc

SEQ ID NO: 3701887 - RNA, 15 nt, Human
ugcaaccacugcaac

SEQ ID NO: 3701888 - RNA, 17 nt, Human
ugcaaccagggagcugc

SEQ ID NO: 3701889 - RNA, 16 nt, Human
ugcaacccaaggacug

SEQ ID NO: 3701890 - RNA, 15 nt, Human
ugcaaccuccaccuc

SEQ ID NO: 3701891 - RNA, 21 nt, Human
ugcaaccuccaccuccugggu

SEQ ID NO: 3701892 - RNA, 13 nt, Human
ugcaaccuccgcc

SEQ ID NO: 3701893 - RNA, 21 nt, Human
ugcaaccuccgccucuugggu

SEQ ID NO: 3701894 - RNA, 22 nt, Human
ugcaaccucgcuggacucucag

SEQ ID NO: 3701895 - RNA, 21 nt, Human
ugcaaccucugcuucccaggu

SEQ ID NO: 3701896 - RNA, 14 nt, Human
ugcaaccuguugau

SEQ ID NO: 3701897 - RNA, 14 nt, Human
ugcaaccuucaccu

SEQ ID NO: 3701898 - RNA, 16 nt, Human
ugcaacggcuuagacu

SEQ ID NO: 3701899 - RNA, 20 nt, Human
ugcaacggucuccugacugg

SEQ ID NO: 3701900 - RNA, 21 nt, Human
ugcaacggucuccugacuggu

SEQ ID NO: 3701901 - RNA, 19 nt, Human
ugcaacucaucaucgguga

SEQ ID NO: 3701902 - RNA, 17 nt, Human
ugcaacuucuuuuuauu

SEQ ID NO: 3701903 - RNA, 20 nt, Human
ugcaacuuuaagcagcucuu

SEQ ID NO: 3701904 - RNA, 23 nt, Human
ugcaacuuuaagcagcucuugcu

SEQ ID NO: 3701905 - RNA, 20 nt, Human
ugcaagaaaaugauguguac

SEQ ID NO: 3701906 - RNA, 18 nt, Human
ugcaagaacucaucacug

SEQ ID NO: 3701907 - RNA, 18 nt, Human
ugcaagagacucuggccu

SEQ ID NO: 3701908 - RNA, 23 nt, Human
ugcaagagccuugguguccaccu

SEQ ID NO: 3701909 - RNA, 17 nt, Human
ugcaagagugauugcag

SEQ ID NO: 3701910 - RNA, 20 nt, Human
ugcaagagugauugcagcuu

SEQ ID NO: 3701911 - RNA, 13 nt, Human
ugaauuuguaaug

SEQ ID NO: 3701912 - RNA, 13 nt, Human
ugaauuugugaag

SEQ ID NO: 3701913 - RNA, 21 nt, Human
ugaauuugugaagguggaaau

SEQ ID NO: 3701914 - RNA, 13 nt, Human
ugaauuuuaaagu

SEQ ID NO: 3701915 - RNA, 17 nt, Human
ugaauuuuaaggguuuc

SEQ ID NO: 3701916 - RNA, 14 nt, Human
ugaauuuuagcuuu

SEQ ID NO: 3701917 - RNA, 15 nt, Human
ugaauuuucacauga

SEQ ID NO: 3701918 - RNA, 16 nt, Human
ugaauuuucacaugaa

SEQ ID NO: 3701919 - RNA, 21 nt, Human
ugaauuuucauuuuacaguua

SEQ ID NO: 3701920 - RNA, 15 nt, Human
ugaauuuucuguguu

SEQ ID NO: 3701921 - RNA, 13 nt, Human
ugaauuuugggga

SEQ ID NO: 3701922 - RNA, 20 nt, Human
ugaauuuuguucucugggag

SEQ ID NO: 3701923 - RNA, 14 nt, Human
ugaauuuuguugcu

SEQ ID NO: 3701924 - RNA, 18 nt, Human
ugaauuuuguuuggacuu

SEQ ID NO: 3701925 - RNA, 17 nt, Human
ugaauuuuuaaacaagu

SEQ ID NO: 3701926 - RNA, 16 nt, Human
ugaauuuuuauuguug

SEQ ID NO: 3701927 - RNA, 15 nt, Human
ugaauuuuuccuaug

SEQ ID NO: 3701928 - RNA, 13 nt, Human
ugaauuuuugcaa

SEQ ID NO: 3701929 - RNA, 16 nt, Human
ugaauuuuugcaauaa

SEQ ID NO: 3701930 - RNA, 23 nt, Human
ugaauuuuuuucaucuucucugg

SEQ ID NO: 3701931 - RNA, 16 nt, Human
ugaauuuuuuuguaau

SEQ ID NO: 3701932 - RNA, 15 nt, Human
ugaauuuuuuuuaac

SEQ ID NO: 3701933 - RNA, 22 nt, Human
ugaauuuuuuuuaacauuccuc

SEQ ID NO: 3701934 - RNA, 19 nt, Human
ugacaaaaaauuaaagcau

SEQ ID NO: 3701935 - RNA, 16 nt, Human
ugacaaaaccuaacuu

SEQ ID NO: 3701936 - RNA, 17 nt, Human
ugacaaaaccuaacuug

SEQ ID NO: 3701937 - RNA, 13 nt, Human
ugacaaaauguua

SEQ ID NO: 3701938 - RNA, 14 nt, Human
ugacaaaauguuau

SEQ ID NO: 3701939 - RNA, 12 nt, Human
ugacaaacugug

SEQ ID NO: 3701940 - RNA, 17 nt, Human
ugacaaagaaacccaag

SEQ ID NO: 3701941 - RNA, 21 nt, Human
ugacaaagaguagacauuucu

SEQ ID NO: 3701942 - RNA, 16 nt, Human
ugacaaagauggcuca

SEQ ID NO: 3701943 - RNA, 23 nt, Human
ugacaaagauggcucagaggggg

SEQ ID NO: 3701944 - RNA, 16 nt, Human
ugacaaagcuuggaag

SEQ ID NO: 3701945 - RNA, 17 nt, Human
ugacaaaggcaagcacu

SEQ ID NO: 3701946 - RNA, 19 nt, Human
ugacaaaucaaguuuccaa

SEQ ID NO: 3701947 - RNA, 23 nt, Human
ugacaaaucuguguauauuauuu

SEQ ID NO: 3701948 - RNA, 17 nt, Human
ugacaaauguuucuaag

SEQ ID NO: 3701949 - RNA, 19 nt, Human
ugacaaauguuucuaaggu

SEQ ID NO: 3701950 - RNA, 23 nt, Human
ugacaacacucauugaccugagg

SEQ ID NO: 3701951 - RNA, 16 nt, Human
ugacaacauuucuaua

SEQ ID NO: 3701952 - RNA, 23 nt, Human
ugacaacauuucuauagccaaaa

SEQ ID NO: 3701953 - RNA, 16 nt, Human
ugacaaccaccgcucc

SEQ ID NO: 3701954 - RNA, 21 nt, Human
ugacaaccaccgcuccccagc

SEQ ID NO: 3701955 - RNA, 19 nt, Human
ugacaaccauuaaagucag

SEQ ID NO: 3701956 - RNA, 21 nt, Human
ugacaaccauuaaagucagaa

SEQ ID NO: 3701957 - RNA, 17 nt, Human
ugacaaccgagaagguu

SEQ ID NO: 3701958 - RNA, 21 nt, Human
ugacaacguuucagcgacucc

SEQ ID NO: 3701959 - RNA, 16 nt, Human
ugacaacuacagaaaa

SEQ ID NO: 3701960 - RNA, 22 nt, Human
ugacaacuacagaaaaaccaga

SEQ ID NO: 3701961 - RNA, 17 nt, Human
ugacaacuggcaggcag

SEQ ID NO: 3701962 - RNA, 14 nt, Human
ugacaacugugacu

SEQ ID NO: 3701963 - RNA, 16 nt, Human
ugacaacugugacugu

SEQ ID NO: 3701964 - RNA, 15 nt, Human
ugacaacuucuaauu

SEQ ID NO: 3701965 - RNA, 22 nt, Human
ugacaagagccugaucucuucc

SEQ ID NO: 3701966 - RNA, 22 nt, Human
ugacaagauuauaauauuuuaa

SEQ ID NO: 3701967 - RNA, 15 nt, Human
ugacaagccccaggc

SEQ ID NO: 3701968 - RNA, 21 nt, Human
ugacaagcuccauuuaaacag

SEQ ID NO: 3701969 - RNA, 14 nt, Human
ugacaagcuggcuu

SEQ ID NO: 3701970 - RNA, 18 nt, Human
ugacaaggauugcuacug

SEQ ID NO: 3701971 - RNA, 16 nt, Human
ugacaagggcugaccu

SEQ ID NO: 3701972 - RNA, 20 nt, Human
ugacaagucauuuuaacuuu

SEQ ID NO: 3701973 - RNA, 16 nt, Human
ugacaauaaaacauua

SEQ ID NO: 3701974 - RNA, 17 nt, Human
ugacaauaaaacauuaa

SEQ ID NO: 3701975 - RNA, 15 nt, Human
ugacaauaaagcuug

SEQ ID NO: 3701976 - RNA, 19 nt, Human
ugacaauaaagcuuguuga

SEQ ID NO: 3701977 - RNA, 14 nt, Human
ugacaauaaaugug

SEQ ID NO: 3701978 - RNA, 22 nt, Human
ugacaauaauauuguuguauaa

SEQ ID NO: 3701979 - RNA, 14 nt, Human
ugacaauaauuuca

SEQ ID NO: 3701980 - RNA, 24 nt, Human
ugacaauauuccagaucuuucaga

SEQ ID NO: 3701981 - RNA, 18 nt, Human
ugacaaucaacucuaaua

SEQ ID NO: 3701982 - RNA, 13 nt, Human
ugacaaucaugug

SEQ ID NO: 3701983 - RNA, 15 nt, Human
ugacaaucaugugug

SEQ ID NO: 3701984 - RNA, 13 nt, Human
ugacaaugaugau

SEQ ID NO: 3701985 - RNA, 14 nt, Human
ugacaauguuuaca

SEQ ID NO: 3701986 - RNA, 13 nt, Human
ugacaauugucac

SEQ ID NO: 3701987 - RNA, 12 nt, Human
ugacacaaacac

SEQ ID NO: 3701988 - RNA, 17 nt, Human
ugacacaaaccugccug

SEQ ID NO: 3701989 - RNA, 13 nt, Human
ugacacaaaggaa

SEQ ID NO: 3701990 - RNA, 15 nt, Human
ugacacaaaggaagu

SEQ ID NO: 3701991 - RNA, 16 nt, Human
ugacacaacuguguga

SEQ ID NO: 3701992 - RNA, 16 nt, Human
ugacacaaguggaccu

SEQ ID NO: 3701993 - RNA, 17 nt, Human
ugacacaauuggaauug

SEQ ID NO: 3701994 - RNA, 14 nt, Human
ugacacacagcucu

SEQ ID NO: 3701995 - RNA, 16 nt, Human
ugacacaccaggcgcu

SEQ ID NO: 3701996 - RNA, 16 nt, Human
ugacacacuacaccac

SEQ ID NO: 3701997 - RNA, 18 nt, Human
ugacacacuacaccacac

SEQ ID NO: 3701998 - RNA, 22 nt, Human
ugacacagcagcuucaccagag

SEQ ID NO: 3701999 - RNA, 16 nt, Human
ugacacaggaaaccaa

SEQ ID NO: 3702000 - RNA, 23 nt, Human
ugacacagucuuggcucacugca

SEQ ID NO: 3702001 - RNA, 19 nt, Human
ugacacauccgccuuuugu

SEQ ID NO: 3702002 - RNA, 22 nt, Human
ugacacauccgccuuuuguaua

SEQ ID NO: 3702003 - RNA, 12 nt, Human
ugacacaugcaa

SEQ ID NO: 3702004 - RNA, 20 nt, Human
ugacaccaaagccaccucug

SEQ ID NO: 3702005 - RNA, 12 nt, Human
ugacaccagccu

SEQ ID NO: 3702006 - RNA, 15 nt, Human
ugacaccagccuuuc

SEQ ID NO: 3702007 - RNA, 16 nt, Human
ugacaccagccuuucu

SEQ ID NO: 3702008 - RNA, 23 nt, Human
ugacaccagccuuucucccaggc

SEQ ID NO: 3702009 - RNA, 19 nt, Human
ugacacccuucucccacuc

SEQ ID NO: 3702010 - RNA, 21 nt, Human
ugacacccuucucccacucuc

SEQ ID NO: 3702011 - RNA, 19 nt, Human
ugacacgaauauugcugau

SEQ ID NO: 3702012 - RNA, 21 nt, Human
ugacacgacuucuguuucaca

SEQ ID NO: 3702013 - RNA, 15 nt, Human
ugacacuagaaaacu

SEQ ID NO: 3702014 - RNA, 18 nt, Human
ugacacuagcccaaugaa

SEQ ID NO: 3702015 - RNA, 19 nt, Human
ugacacuagcccaaugaaa

SEQ ID NO: 3702016 - RNA, 17 nt, Human
ugacacuauaucuguau

SEQ ID NO: 3702017 - RNA, 18 nt, Human
ugacacuauaucuguaua

SEQ ID NO: 3702018 - RNA, 22 nt, Human
ugacacucauauaauuauaugu

SEQ ID NO: 3702019 - RNA, 16 nt, Human
ugacacucccacccag

SEQ ID NO: 3702020 - RNA, 20 nt, Human
ugacacucccacccagucuc

SEQ ID NO: 3702021 - RNA, 15 nt, Human
ugacacucuccuugc

SEQ ID NO: 3702022 - RNA, 12 nt, Human
ugacacugaaag

SEQ ID NO: 3702023 - RNA, 19 nt, Human
ugacacugaaaguuuugua

SEQ ID NO: 3702024 - RNA, 13 nt, Human
ugacacugaaaug

SEQ ID NO: 3702025 - RNA, 16 nt, Human
ugacacugaaaugccu

SEQ ID NO: 3702026 - RNA, 22 nt, Human
ugacacugaacuuaauaacugu

SEQ ID NO: 3702027 - RNA, 11 nt, Human
ugacacugacc

SEQ ID NO: 3702028 - RNA, 13 nt, Human
ugacacugcucua

SEQ ID NO: 3702029 - RNA, 15 nt, Human
ugacacugcucuaac

SEQ ID NO: 3702030 - RNA, 19 nt, Human
ugacacugcucuaacagcc

SEQ ID NO: 3702031 - RNA, 20 nt, Human
ugacacugcuggagaggccc

SEQ ID NO: 3702032 - RNA, 20 nt, Human
ugacacuucagagagcuggu

SEQ ID NO: 3702033 - RNA, 20 nt, Human
ugacacuuuucauaucauuu

SEQ ID NO: 3702034 - RNA, 23 nt, Human
ugacagaaaauauguauuaacac

SEQ ID NO: 3702035 - RNA, 14 nt, Human
ugacagaacacugu

SEQ ID NO: 3702036 - RNA, 17 nt, Human
ugacagaaggugccacu

SEQ ID NO: 3702037 - RNA, 20 nt, Human
ugacagaaggugccacuuua

SEQ ID NO: 3702038 - RNA, 14 nt, Human
ugacagacacaggc

SEQ ID NO: 3702039 - RNA, 17 nt, Human
ugacagacacaggcccg

SEQ ID NO: 3702040 - RNA, 23 nt, Human
ugacagacacaggcccggcucca

SEQ ID NO: 3702041 - RNA, 15 nt, Human
ugacagacuccugag

SEQ ID NO: 3702042 - RNA, 14 nt, Human
ugacagacucucgu

SEQ ID NO: 3702043 - RNA, 23 nt, Human
ugacagagagagauacucuggga

SEQ ID NO: 3702044 - RNA, 22 nt, Human
ugacagagcaagugagacccug

SEQ ID NO: 3702045 - RNA, 16 nt, Human
ugacagagccugcccc

SEQ ID NO: 3702046 - RNA, 17 nt, Human
ugacagagccugcccca

SEQ ID NO: 3702047 - RNA, 22 nt, Human
ugacagagccugccccagcgcu

SEQ ID NO: 3702048 - RNA, 23 nt, Human
ugacagagccugccccagcgcug

SEQ ID NO: 3702049 - RNA, 15 nt, Human
ugacagaggcagccc

SEQ ID NO: 3702050 - RNA, 16 nt, Human
ugacagaggcagcccc

SEQ ID NO: 3702051 - RNA, 18 nt, Human
ugacagaggcagccccau

SEQ ID NO: 3702052 - RNA, 15 nt, Human
ugacagaucaagcug

SEQ ID NO: 3702053 - RNA, 16 nt, Human
ugacagaucaagcugu

SEQ ID NO: 3702054 - RNA, 18 nt, Human
ugacagaucaagcuguga

SEQ ID NO: 3702055 - RNA, 19 nt, Human
ugacagaugucagccgagc

SEQ ID NO: 3702056 - RNA, 12 nt, Human
ugacagcagcau

SEQ ID NO: 3702057 - RNA, 16 nt, Human
ugacagcagcaucucu

SEQ ID NO: 3702058 - RNA, 20 nt, Human
ugacagcaugugcccuccug

SEQ ID NO: 3702059 - RNA, 14 nt, Human
ugacagccagaacu

SEQ ID NO: 3702060 - RNA, 15 nt, Human
ugacagccucaguga

SEQ ID NO: 3702061 - RNA, 15 nt, Human
ugcaagcagaggacc

SEQ ID NO: 3702062 - RNA, 17 nt, Human
ugcaagcagaggaccag

SEQ ID NO: 3702063 - RNA, 21 nt, Human
ugcaagcagaggaccagggcc

SEQ ID NO: 3702064 - RNA, 23 nt, Human
ugcaagccccugcuccagaagau

SEQ ID NO: 3702065 - RNA, 18 nt, Human
ugcaagccugucugagac

SEQ ID NO: 3702066 - RNA, 17 nt, Human
ugcaagcuuuuccuaau

SEQ ID NO: 3702067 - RNA, 19 nt, Human
ugcaaggaaggaaagaaag

SEQ ID NO: 3702068 - RNA, 13 nt, Human
ugcaaggaccagg

SEQ ID NO: 3702069 - RNA, 17 nt, Human
ugcaaggaccaggacuc

SEQ ID NO: 3702070 - RNA, 14 nt, Human
ugcaaggcaaaugu

SEQ ID NO: 3702071 - RNA, 18 nt, Human
ugcaaggcagccgugggc

SEQ ID NO: 3702072 - RNA, 13 nt, Human
ugcaaggcccaca

SEQ ID NO: 3702073 - RNA, 14 nt, Human
ugcaaggcccacag

SEQ ID NO: 3702074 - RNA, 16 nt, Human
ugcaaggcccacagga

SEQ ID NO: 3702075 - RNA, 21 nt, Human
ugcaaggccugguguuucuug

SEQ ID NO: 3702076 - RNA, 22 nt, Human
ugcaagggcagaacacuaaccu

SEQ ID NO: 3702077 - RNA, 20 nt, Human
ugcaagggcggccuuuccca

SEQ ID NO: 3702078 - RNA, 16 nt, Human
ugcaagggcuccccac

SEQ ID NO: 3702079 - RNA, 16 nt, Human
ugcaagguacucuggu

SEQ ID NO: 3702080 - RNA, 16 nt, Human
ugcaaggucuuugguu

SEQ ID NO: 3702081 - RNA, 12 nt, Human
ugcaagguucca

SEQ ID NO: 3702082 - RNA, 14 nt, Human
ugcaagguuccaca

SEQ ID NO: 3702083 - RNA, 19 nt, Human
ugcaagguuccacagagua

SEQ ID NO: 3702084 - RNA, 19 nt, Human
ugcaaguacugcuguaaau

SEQ ID NO: 3702085 - RNA, 20 nt, Human
ugcaaguauacuagggagcc

SEQ ID NO: 3702086 - RNA, 14 nt, Human
ugcaaguauucuca

SEQ ID NO: 3702087 - RNA, 18 nt, Human
ugcaagucacaaaggaau

SEQ ID NO: 3702088 - RNA, 13 nt, Human
ugcaagucagagg

SEQ ID NO: 3702089 - RNA, 14 nt, Human
ugcaagucagagga

SEQ ID NO: 3702090 - RNA, 16 nt, Human
ugcaagucagaggaug

SEQ ID NO: 3702091 - RNA, 19 nt, Human
ugcaaguccuuuuguaaag

SEQ ID NO: 3702092 - RNA, 13 nt, Human
ugcaagugaaggu

SEQ ID NO: 3702093 - RNA, 18 nt, Human
ugcaagugaagguuuaca

SEQ ID NO: 3702094 - RNA, 20 nt, Human
ugcaagugagcaaaccugcc

SEQ ID NO: 3702095 - RNA, 14 nt, Human
ugcaagugugugca

SEQ ID NO: 3702096 - RNA, 13 nt, Human
ugcaaguugagga

SEQ ID NO: 3702097 - RNA, 24 nt, Human
ugcaauaaaaaugauacugauggu

SEQ ID NO: 3702098 - RNA, 17 nt, Human
ugcaauaaaauuuaaaa

SEQ ID NO: 3702099 - RNA, 14 nt, Human
ugcaauaaaguaua

SEQ ID NO: 3702100 - RNA, 14 nt, Human
ugcaauaacuucug

SEQ ID NO: 3702101 - RNA, 18 nt, Human
ugcaauaacuucugaccu

SEQ ID NO: 3702102 - RNA, 21 nt, Human
ugcaauaagaauuuagggaga

SEQ ID NO: 3702103 - RNA, 14 nt, Human
ugcaauaauacuuc

SEQ ID NO: 3702104 - RNA, 14 nt, Human
ugcaauaaugcagu

SEQ ID NO: 3702105 - RNA, 18 nt, Human
ugcaauacaaguuucauc

SEQ ID NO: 3702106 - RNA, 21 nt, Human
ugcaauagaagugcuccccuc

SEQ ID NO: 3702107 - RNA, 20 nt, Human
ugcaauagagacuguagauu

SEQ ID NO: 3702108 - RNA, 15 nt, Human
ugcaauauacuggaa

SEQ ID NO: 3702109 - RNA, 18 nt, Human
ugcaauauauuuuguaug

SEQ ID NO: 3702110 - RNA, 21 nt, Human
ugcaauauauuuuguaugcaa

SEQ ID NO: 3702111 - RNA, 22 nt, Human
ugcaauauuuccucaugugauc

SEQ ID NO: 3702112 - RNA, 14 nt, Human
ugcaauauuugaau

SEQ ID NO: 3702113 - RNA, 13 nt, Human
ugcaaucauaugu

SEQ ID NO: 3702114 - RNA, 15 nt, Human
ugcaaucauauguga

SEQ ID NO: 3702115 - RNA, 14 nt, Human
ugcaauccuuacaa

SEQ ID NO: 3702116 - RNA, 20 nt, Human
ugcaauccuuacaaaugauu

SEQ ID NO: 3702117 - RNA, 11 nt, Human
ugcaaugaaca

SEQ ID NO: 3702118 - RNA, 18 nt, Human
ugcaaugaagucucugaa

SEQ ID NO: 3702119 - RNA, 17 nt, Human
ugcaaugacaucuucaa

SEQ ID NO: 3702120 - RNA, 22 nt, Human
ugcaaugaccuuucaauaggaa

SEQ ID NO: 3702121 - RNA, 23 nt, Human
ugcaaugaccuuucaauaggaaa

SEQ ID NO: 3702122 - RNA, 20 nt, Human
ugcaauggcgugaucucggc

SEQ ID NO: 3702123 - RNA, 17 nt, Human
ugcaaugguuaacaucu

SEQ ID NO: 3702124 - RNA, 22 nt, Human
ugcaauguagaggggaaaagag

SEQ ID NO: 3702125 - RNA, 22 nt, Human
ugcaaugucugagugaaccugu

SEQ ID NO: 3702126 - RNA, 15 nt, Human
ugcaaugugaaaaau

SEQ ID NO: 3702127 - RNA, 18 nt, Human
ugcaaugugaucuauguu

SEQ ID NO: 3702128 - RNA, 18 nt, Human
ugcaauguguauaaacaa

SEQ ID NO: 3702129 - RNA, 19 nt, Human
ugcaauguguguauaugga

SEQ ID NO: 3702130 - RNA, 20 nt, Human
ugcaauguguguauauggac

SEQ ID NO: 3702131 - RNA, 19 nt, Human
ugcaauuaaacuuccaaag

SEQ ID NO: 3702132 - RNA, 22 nt, Human
ugcaauuggcaccgaagcccag

SEQ ID NO: 3702133 - RNA, 13 nt, Human
ugcaauuucaagg

SEQ ID NO: 3702134 - RNA, 19 nt, Human
ugcaauuuguuugugcuuc

SEQ ID NO: 3702135 - RNA, 19 nt, Human
ugcacaaaacccagaccug

SEQ ID NO: 3702136 - RNA, 23 nt, Human
ugcacaaaaugaaugaggucugg

SEQ ID NO: 3702137 - RNA, 19 nt, Human
ugcacaaacagaggccgcc

SEQ ID NO: 3702138 - RNA, 17 nt, Human
ugcacaaagcccuucca

SEQ ID NO: 3702139 - RNA, 14 nt, Human
ugcacaacauuaca

SEQ ID NO: 3702140 - RNA, 12 nt, Human
ugcacaaggauu

SEQ ID NO: 3702141 - RNA, 19 nt, Human
ugcacaaggauugaaaauu

SEQ ID NO: 3702142 - RNA, 18 nt, Human
ugcacaauaacuccuccc

SEQ ID NO: 3702143 - RNA, 13 nt, Human
ugcacaauguaga

SEQ ID NO: 3702144 - RNA, 21 nt, Human
ugcacacacacacacaugcac

SEQ ID NO: 3702145 - RNA, 18 nt, Human
ugcacacaccagagccca

SEQ ID NO: 3702146 - RNA, 21 nt, Human
ugcacacaccagagcccaccu

SEQ ID NO: 3702147 - RNA, 20 nt, Human
ugcacacagaaauauauaua

SEQ ID NO: 3702148 - RNA, 12 nt, Human
ugcacacagcac

SEQ ID NO: 3702149 - RNA, 24 nt, Human
ugcacacagcacgggggccaagga

SEQ ID NO: 3702150 - RNA, 12 nt, Human
ugcacacauuuu

SEQ ID NO: 3702151 - RNA, 14 nt, Human
ugcacacccacuca

SEQ ID NO: 3702152 - RNA, 17 nt, Human
ugcacacccacucagcu

SEQ ID NO: 3702153 - RNA, 18 nt, Human
ugcacaccccacucccac

SEQ ID NO: 3702154 - RNA, 22 nt, Human
ugcacaccuacuagucaccaga

SEQ ID NO: 3702155 - RNA, 15 nt, Human
ugcacacucaugugc

SEQ ID NO: 3702156 - RNA, 18 nt, Human
ugcacacuccccugcacu

SEQ ID NO: 3702157 - RNA, 14 nt, Human
ugcacacuguccua

SEQ ID NO: 3702158 - RNA, 23 nt, Human
ugcacacuugugugugggcugug

SEQ ID NO: 3702159 - RNA, 16 nt, Human
ugcacacuuuggccca

SEQ ID NO: 3702160 - RNA, 19 nt, Human
ugcacacuuuggcccaggg

SEQ ID NO: 3702161 - RNA, 20 nt, Human
ugcacacuuuggcccagggu

SEQ ID NO: 3702162 - RNA, 21 nt, Human
ugcacacuuuggcccagggug

SEQ ID NO: 3702163 - RNA, 14 nt, Human
ugcacagaagcaca

SEQ ID NO: 3702164 - RNA, 15 nt, Human
ugcacagaaguccug

SEQ ID NO: 3702165 - RNA, 19 nt, Human
ugcacagacgucccuccac

SEQ ID NO: 3702166 - RNA, 13 nt, Human
ugcacagagaagc

SEQ ID NO: 3702167 - RNA, 12 nt, Human
ugcacagagcuc

SEQ ID NO: 3702168 - RNA, 19 nt, Human
ugcacagagcucuccagcu

SEQ ID NO: 3702169 - RNA, 21 nt, Human
ugcacagagcucuccagcucc

SEQ ID NO: 3702170 - RNA, 18 nt, Human
ugcacagaguuguuacau

SEQ ID NO: 3702171 - RNA, 22 nt, Human
ugcacagaguuguuacauuuuu

SEQ ID NO: 3702172 - RNA, 18 nt, Human
ugcacagauauacuuugu

SEQ ID NO: 3702173 - RNA, 19 nt, Human
ugcacagauauacuuugug

SEQ ID NO: 3702174 - RNA, 23 nt, Human
ugcacagauggauuugccugugc

SEQ ID NO: 3702175 - RNA, 23 nt, Human
ugcacagcaggcugccagugccu

SEQ ID NO: 3702176 - RNA, 17 nt, Human
ugcacagcuaacaugga

SEQ ID NO: 3702177 - RNA, 13 nt, Human
ugcacagcugucc

SEQ ID NO: 3702178 - RNA, 13 nt, Human
ugcacaggagggg

SEQ ID NO: 3702179 - RNA, 15 nt, Human
ugcacaggagggggu

SEQ ID NO: 3702180 - RNA, 23 nt, Human
ugcacaggagggggucguggaga

SEQ ID NO: 3702181 - RNA, 18 nt, Human
ugcagccucacaguccuu

SEQ ID NO: 3702182 - RNA, 14 nt, Human
ugcagccucagaga

SEQ ID NO: 3702183 - RNA, 14 nt, Human
ugcagccuccuccu

SEQ ID NO: 3702184 - RNA, 15 nt, Human
ugcagccuccuccug

SEQ ID NO: 3702185 - RNA, 22 nt, Human
ugcagccucgaacuccugggcu

SEQ ID NO: 3702186 - RNA, 14 nt, Human
ugcagccugcgcca

SEQ ID NO: 3702187 - RNA, 22 nt, Human
ugcagccugcucuagugggaca

SEQ ID NO: 3702188 - RNA, 15 nt, Human
ugcagccuggaggcc

SEQ ID NO: 3702189 - RNA, 20 nt, Human
ugcagccuguccugggcugg

SEQ ID NO: 3702190 - RNA, 21 nt, Human
ugcagccuugaacucugggcu

SEQ ID NO: 3702191 - RNA, 23 nt, Human
ugcagccuuugccuccccggcuc

SEQ ID NO: 3702192 - RNA, 18 nt, Human
ugcagcgauuaauaacag

SEQ ID NO: 3702193 - RNA, 19 nt, Human
ugcagcuaguccuagugaa

SEQ ID NO: 3702194 - RNA, 14 nt, Human
ugcagcuaucuggu

SEQ ID NO: 3702195 - RNA, 22 nt, Human
ugcagcucaaggaaaggccuga

SEQ ID NO: 3702196 - RNA, 18 nt, Human
ugcagcucagaaccacag

SEQ ID NO: 3702197 - RNA, 20 nt, Human
ugcagcucagaaccacagca

SEQ ID NO: 3702198 - RNA, 21 nt, Human
ugcagcucucaugcugccccu

SEQ ID NO: 3702199 - RNA, 20 nt, Human
ugcagcucuccccuucucug

SEQ ID NO: 3702200 - RNA, 22 nt, Human
ugcagcucuccccuucucugua

SEQ ID NO: 3702201 - RNA, 22 nt, Human
ugcagcugaaauugaaaaguua

SEQ ID NO: 3702202 - RNA, 12 nt, Human
ugcagcuggaca

SEQ ID NO: 3702203 - RNA, 13 nt, Human
ugcagcuggacag

SEQ ID NO: 3702204 - RNA, 20 nt, Human
ugcagcuguggcagaguuac

SEQ ID NO: 3702205 - RNA, 21 nt, Human
ugcagcuguuuuguugacauu

SEQ ID NO: 3702206 - RNA, 13 nt, Human
ugcagcuuccugu

SEQ ID NO: 3702207 - RNA, 16 nt, Human
ugcagcuugggagagc

SEQ ID NO: 3702208 - RNA, 23 nt, Human
ugcagcuugggagagccccuggg

SEQ ID NO: 3702209 - RNA, 14 nt, Human
ugcagcuuguagcc

SEQ ID NO: 3702210 - RNA, 20 nt, Human
ugcagcuuguagccagccgg

SEQ ID NO: 3702211 - RNA, 15 nt, Human
ugcagcuuuacaugc

SEQ ID NO: 3702212 - RNA, 15 nt, Human
ugcagcuuuauguuc

SEQ ID NO: 3702213 - RNA, 22 nt, Human
ugcagcuuuauguucauuuguu

SEQ ID NO: 3702214 - RNA, 15 nt, Human
ugcagcuuugcaaac

SEQ ID NO: 3702215 - RNA, 17 nt, Human
ugcaggaaauggcugug

SEQ ID NO: 3702216 - RNA, 12 nt, Human
ugcaggaaggag

SEQ ID NO: 3702217 - RNA, 14 nt, Human
ugcaggaaggagcu

SEQ ID NO: 3702218 - RNA, 23 nt, Human
ugcaggaaggagcugccuggacc

SEQ ID NO: 3702219 - RNA, 17 nt, Human
ugcaggaauaaggccuu

SEQ ID NO: 3702220 - RNA, 14 nt, Human
ugcaggaaucaaaa

SEQ ID NO: 3702221 - RNA, 15 nt, Human
ugcaggaaucaaaaa

SEQ ID NO: 3702222 - RNA, 15 nt, Human
ugcaggaccucaggu

SEQ ID NO: 3702223 - RNA, 22 nt, Human
ugcaggagcaguaucaugaagc

SEQ ID NO: 3702224 - RNA, 17 nt, Human
ugcaggaucucaccagg

SEQ ID NO: 3702225 - RNA, 21 nt, Human
ugcaggaucucaccaggcagc

SEQ ID NO: 3702226 - RNA, 17 nt, Human
ugcaggcagccaggcca

SEQ ID NO: 3702227 - RNA, 19 nt, Human
ugcaggcagccaggccaca

SEQ ID NO: 3702228 - RNA, 20 nt, Human
ugcaggcaggaacaaacagg

SEQ ID NO: 3702229 - RNA, 16 nt, Human
ugcaggcaucacagcu

SEQ ID NO: 3702230 - RNA, 20 nt, Human
ugcaggccaagagcagaggc

SEQ ID NO: 3702231 - RNA, 21 nt, Human
ugcaggccaagagcagaggca

SEQ ID NO: 3702232 - RNA, 15 nt, Human
ugcaggcccuggccu

SEQ ID NO: 3702233 - RNA, 11 nt, Human
ugcaggcccuu

SEQ ID NO: 3702234 - RNA, 15 nt, Human
ugcaggcuccccuga

SEQ ID NO: 3702235 - RNA, 17 nt, Human
ugcaggcuccccugagg

SEQ ID NO: 3702236 - RNA, 18 nt, Human
ugcaggcuggcaccgccu

SEQ ID NO: 3702237 - RNA, 21 nt, Human
ugcaggcuggcaccgccuucu

SEQ ID NO: 3702238 - RNA, 22 nt, Human
ugcaggcuggcaccgccuucuc

SEQ ID NO: 3702239 - RNA, 22 nt, Human
ugcaggcuggccagccgcucuc

SEQ ID NO: 3702240 - RNA, 19 nt, Human
ugcaggcuuugccauugug

SEQ ID NO: 3702241 - RNA, 22 nt, Human
ugcagggaaaauuauuugcaua

SEQ ID NO: 3702242 - RNA, 15 nt, Human
ugcagggacaaagag

SEQ ID NO: 3702243 - RNA, 16 nt, Human
ugcagggacagagcau

SEQ ID NO: 3702244 - RNA, 18 nt, Human
ugcagggauguggguucc

SEQ ID NO: 3702245 - RNA, 19 nt, Human
ugcagggauugcugccacu

SEQ ID NO: 3702246 - RNA, 22 nt, Human
ugcagggcaaaauauucacugg

SEQ ID NO: 3702247 - RNA, 15 nt, Human
ugcagggccaggacu

SEQ ID NO: 3702248 - RNA, 19 nt, Human
ugcagggcuuuaaaauucu

SEQ ID NO: 3702249 - RNA, 20 nt, Human
ugcaggggauugaagcccuc

SEQ ID NO: 3702250 - RNA, 16 nt, Human
ugacuuuuauaaagca

SEQ ID NO: 3702251 - RNA, 18 nt, Human
ugacuuuuauaaagcaug

SEQ ID NO: 3702252 - RNA, 22 nt, Human
ugacuuuuccauguaucuaccu

SEQ ID NO: 3702253 - RNA, 22 nt, Human
ugacuuuucuguaauucagguu

SEQ ID NO: 3702254 - RNA, 17 nt, Human
ugacuuuugcuuuaauu

SEQ ID NO: 3702255 - RNA, 21 nt, Human
ugacuuuugcuuuaauuccau

SEQ ID NO: 3702256 - RNA, 17 nt, Human
ugacuuuuugcauuuaa

SEQ ID NO: 3702257 - RNA, 14 nt, Human
ugacuuuuuuugua

SEQ ID NO: 3702258 - RNA, 12 nt, Human
ugagaaaacaug

SEQ ID NO: 3702259 - RNA, 16 nt, Human
ugagaaaacuucuuuu

SEQ ID NO: 3702260 - RNA, 15 nt, Human
ugagaaaauaaagcu

SEQ ID NO: 3702261 - RNA, 21 nt, Human
ugagaaaauugaaauaaagcu

SEQ ID NO: 3702262 - RNA, 20 nt, Human
ugagaaacaucucaauaaag

SEQ ID NO: 3702263 - RNA, 16 nt, Human
ugagaaaccuguaucu

SEQ ID NO: 3702264 - RNA, 20 nt, Human
ugagaaaccuguaucuuucu

SEQ ID NO: 3702265 - RNA, 21 nt, Human
ugagaaaccuguaucuuucua

SEQ ID NO: 3702266 - RNA, 23 nt, Human
ugagaaaccuuauuguaccucuc

SEQ ID NO: 3702267 - RNA, 13 nt, Human
ugagaaagagcac

SEQ ID NO: 3702268 - RNA, 20 nt, Human
ugagaaagucagauucuugc

SEQ ID NO: 3702269 - RNA, 15 nt, Human
ugagaaauauggaca

SEQ ID NO: 3702270 - RNA, 17 nt, Human
ugagaaauauggacacu

SEQ ID NO: 3702271 - RNA, 14 nt, Human
ugagaaauccugga

SEQ ID NO: 3702272 - RNA, 13 nt, Human
ugagaaaucuaaa

SEQ ID NO: 3702273 - RNA, 14 nt, Human
ugagaaaugaaaua

SEQ ID NO: 3702274 - RNA, 18 nt, Human
ugagaaaugaaauauugu

SEQ ID NO: 3702275 - RNA, 15 nt, Human
ugagaaaugaauaau

SEQ ID NO: 3702276 - RNA, 14 nt, Human
ugagaaauuaagua

SEQ ID NO: 3702277 - RNA, 18 nt, Human
ugagaaauuuaaacuaua

SEQ ID NO: 3702278 - RNA, 12 nt, Human
ugagaacaaagc

SEQ ID NO: 3702279 - RNA, 15 nt, Human
ugagaacaaagcugu

SEQ ID NO: 3702280 - RNA, 16 nt, Human
ugagaacaaagcuguu

SEQ ID NO: 3702281 - RNA, 19 nt, Human
ugagaacaaagcuguuaaa

SEQ ID NO: 3702282 - RNA, 23 nt, Human
ugagaacagauaaagauugugug

SEQ ID NO: 3702283 - RNA, 22 nt, Human
ugagaacagaucuccaaagcuu

SEQ ID NO: 3702284 - RNA, 16 nt, Human
ugagaacauguuggua

SEQ ID NO: 3702285 - RNA, 12 nt, Human
ugagaaccuggc

SEQ ID NO: 3702286 - RNA, 14 nt, Human
ugagaaccuggccu

SEQ ID NO: 3702287 - RNA, 15 nt, Human
ugagaaccuggccuu

SEQ ID NO: 3702288 - RNA, 17 nt, Human
ugagaacugcauauguu

SEQ ID NO: 3702289 - RNA, 23 nt, Human
ugagaagaaaacaucuauucucu

SEQ ID NO: 3702290 - RNA, 12 nt, Human
ugagaagaauag

SEQ ID NO: 3702291 - RNA, 13 nt, Human
ugagaagaauauu

SEQ ID NO: 3702292 - RNA, 21 nt, Human
ugagaagaauauuguuccuaa

SEQ ID NO: 3702293 - RNA, 22 nt, Human
ugagaagaauauuguuccuaag

SEQ ID NO: 3702294 - RNA, 15 nt, Human
ugagaagagggccug

SEQ ID NO: 3702295 - RNA, 16 nt, Human
ugagaagagggccugu

SEQ ID NO: 3702296 - RNA, 16 nt, Human
ugagaagauugugaau

SEQ ID NO: 3702297 - RNA, 14 nt, Human
ugagaagccuucag

SEQ ID NO: 3702298 - RNA, 20 nt, Human
ugagaagccuucagcuccag

SEQ ID NO: 3702299 - RNA, 12 nt, Human
ugagaagcucug

SEQ ID NO: 3702300 - RNA, 17 nt, Human
ugagaagcugcucaacu

SEQ ID NO: 3702301 - RNA, 15 nt, Human
ugagaagcugcucca

SEQ ID NO: 3702302 - RNA, 19 nt, Human
ugagaagcuuuugaauaaa

SEQ ID NO: 3702303 - RNA, 13 nt, Human
ugagaaggcagcc

SEQ ID NO: 3702304 - RNA, 14 nt, Human
ugagaaggcagcca

SEQ ID NO: 3702305 - RNA, 15 nt, Human
ugagaagguuuauug

SEQ ID NO: 3702306 - RNA, 12 nt, Human
ugagaaguauac

SEQ ID NO: 3702307 - RNA, 18 nt, Human
ugagaaguuuuguacaga

SEQ ID NO: 3702308 - RNA, 24 nt, Human
ugagaaguuuuguacagagaauua

SEQ ID NO: 3702309 - RNA, 17 nt, Human
ugagaauagaaggaaac

SEQ ID NO: 3702310 - RNA, 13 nt, Human
ugagaaucccaaa

SEQ ID NO: 3702311 - RNA, 22 nt, Human
ugagaaucccaaauuugauuga

SEQ ID NO: 3702312 - RNA, 18 nt, Human
ugagaaucuauauuuaac

SEQ ID NO: 3702313 - RNA, 20 nt, Human
ugagaaucuuuauugagaaa

SEQ ID NO: 3702314 - RNA, 14 nt, Human
ugagaaugaacaaa

SEQ ID NO: 3702315 - RNA, 15 nt, Human
ugagaauguaagaac

SEQ ID NO: 3702316 - RNA, 12 nt, Human
ugagaauuaccc

SEQ ID NO: 3702317 - RNA, 16 nt, Human
ugagaauucagcugcc

SEQ ID NO: 3702318 - RNA, 22 nt, Human
ugagaauucagcugcccccgcu

SEQ ID NO: 3702319 - RNA, 12 nt, Human
ugagacaaaaau

SEQ ID NO: 3702320 - RNA, 23 nt, Human
ugagacaaauuuuaacuucuugu

SEQ ID NO: 3702321 - RNA, 23 nt, Human
ugagacacacaacggcagugaag

SEQ ID NO: 3702322 - RNA, 20 nt, Human
ugagacagaaucucgcucug

SEQ ID NO: 3702323 - RNA, 17 nt, Human
ugagacagcccgggcuc

SEQ ID NO: 3702324 - RNA, 22 nt, Human
ugagacagcccgggcucugccu

SEQ ID NO: 3702325 - RNA, 22 nt, Human
ugagacaggagaaacacuugaa

SEQ ID NO: 3702326 - RNA, 15 nt, Human
ugagacaggagaauc

SEQ ID NO: 3702327 - RNA, 16 nt, Human
ugagacaguccagccu

SEQ ID NO: 3702328 - RNA, 13 nt, Human
ugagacaguggga

SEQ ID NO: 3702329 - RNA, 18 nt, Human
ugagacagugggaaauau

SEQ ID NO: 3702330 - RNA, 18 nt, Human
ugagacaguuucuuagcu

SEQ ID NO: 3702331 - RNA, 10 nt, Human
ugagacaucc

SEQ ID NO: 3702332 - RNA, 12 nt, Human
ugagacauccag

SEQ ID NO: 3702333 - RNA, 12 nt, Human
ugagaccaccuc

SEQ ID NO: 3702334 - RNA, 19 nt, Human
ugagaccaccucucaauau

SEQ ID NO: 3702335 - RNA, 13 nt, Human
ugagaccagccug

SEQ ID NO: 3702336 - RNA, 18 nt, Human
ugagacccagcccucauc

SEQ ID NO: 3702337 - RNA, 20 nt, Human
ugagacccagcccucauccc

SEQ ID NO: 3702338 - RNA, 13 nt, Human
ugagacccaggac

SEQ ID NO: 3702339 - RNA, 16 nt, Human
ugagacccccacaccu

SEQ ID NO: 3702340 - RNA, 15 nt, Human
ugagaccccuggccu

SEQ ID NO: 3702341 - RNA, 18 nt, Human
ugagaccccuggccuccg

SEQ ID NO: 3702342 - RNA, 12 nt, Human
ugagaccucagc

SEQ ID NO: 3702343 - RNA, 19 nt, Human
ugagaccucagccaugagg

SEQ ID NO: 3702344 - RNA, 22 nt, Human
ugagaccugccccuccucucug

SEQ ID NO: 3702345 - RNA, 23 nt, Human
ugagacggagucucgcucuguca

SEQ ID NO: 3702346 - RNA, 23 nt, Human
ugagacguuuuuggaagaguagu

SEQ ID NO: 3702347 - RNA, 18 nt, Human
ugagacuaugcguuuuua

SEQ ID NO: 3702348 - RNA, 14 nt, Human
ugagacuauuuaaa

SEQ ID NO: 3702349 - RNA, 17 nt, Human
ugagacucacaggaagg

SEQ ID NO: 3702350 - RNA, 17 nt, Human
ugagacuccagaccuga

SEQ ID NO: 3702351 - RNA, 18 nt, Human
ugagacugggucucgcuu

SEQ ID NO: 3702352 - RNA, 13 nt, Human
ugagacuugccuu

SEQ ID NO: 3702353 - RNA, 20 nt, Human
ugagacuugcucucuggccu

SEQ ID NO: 3702354 - RNA, 13 nt, Human
ugagacuuuaaaa

SEQ ID NO: 3702355 - RNA, 14 nt, Human
ugagacuuuuuggu

SEQ ID NO: 3702356 - RNA, 22 nt, Human
ugagagaaauauggaacuuaca

SEQ ID NO: 3702357 - RNA, 18 nt, Human
ugagagaauaagucaugu

SEQ ID NO: 3702358 - RNA, 14 nt, Human
ugagagaauggaaa

SEQ ID NO: 3702359 - RNA, 18 nt, Human
ugagagacggugucuugu

SEQ ID NO: 3702360 - RNA, 18 nt, Human
ugagagagagucuuacuc

SEQ ID NO: 3702361 - RNA, 17 nt, Human
ugagagagaugggagcu

SEQ ID NO: 3702362 - RNA, 21 nt, Human
ugagagagaugggagcuccuc

SEQ ID NO: 3702363 - RNA, 22 nt, Human
ugagagagaugggagcuccucu

SEQ ID NO: 3702364 - RNA, 16 nt, Human
ugagagagauguguaa

SEQ ID NO: 3702365 - RNA, 18 nt, Human
ugagagaggcuaaaaugu

SEQ ID NO: 3702366 - RNA, 19 nt, Human
ugagagaggcuaaaauguu

SEQ ID NO: 3702367 - RNA, 21 nt, Human
ugagagaggcuaaaauguuuu

SEQ ID NO: 3702368 - RNA, 22 nt, Human
ugagagaguggcuggggcaugg

SEQ ID NO: 3702369 - RNA, 17 nt, Human
ugagagaucugcuguca

SEQ ID NO: 3702370 - RNA, 14 nt, Human
ugagagaugcugua

SEQ ID NO: 3702371 - RNA, 14 nt, Human
ugagagauucugug

SEQ ID NO: 3702372 - RNA, 13 nt, Human
ugagagcauaauu

SEQ ID NO: 3702373 - RNA, 19 nt, Human
ugagagcccagagguaaca

SEQ ID NO: 3702374 - RNA, 19 nt, Human
ugagagccccagcugacau

SEQ ID NO: 3702375 - RNA, 22 nt, Human
ugagagccccagcugacaugga

SEQ ID NO: 3702376 - RNA, 16 nt, Human
ugagagcgcagcccgc

SEQ ID NO: 3702377 - RNA, 23 nt, Human
ugagagcgugcuccagccuggcu

SEQ ID NO: 3702378 - RNA, 16 nt, Human
ugagagcugcucugga

SEQ ID NO: 3702379 - RNA, 17 nt, Human
ugagagcugugcaucag

SEQ ID NO: 3702380 - RNA, 13 nt, Human
ugagaggaaauca

SEQ ID NO: 3702381 - RNA, 17 nt, Human
ugagaggaaaucaccga

SEQ ID NO: 3702382 - RNA, 16 nt, Human
ugagaggacacucccg

SEQ ID NO: 3702383 - RNA, 23 nt, Human
ugagaggacuuuucuuuguggcu

SEQ ID NO: 3702384 - RNA, 15 nt, Human
ugagaggaugaaugu

SEQ ID NO: 3702385 - RNA, 22 nt, Human
ugagaggaugaauguaugugca

SEQ ID NO: 3702386 - RNA, 14 nt, Human
ugagaggcaggcau

SEQ ID NO: 3702387 - RNA, 16 nt, Human
ugagaggcauuucccc

SEQ ID NO: 3702388 - RNA, 23 nt, Human
ugagaggcccuggaucagcgugg

SEQ ID NO: 3702389 - RNA, 19 nt, Human
ugagaggcugggaauggag

SEQ ID NO: 3702390 - RNA, 19 nt, Human
ugagaggcugucuguugua

SEQ ID NO: 3702391 - RNA, 21 nt, Human
ugagagggcaguguuuccuuu

SEQ ID NO: 3702392 - RNA, 14 nt, Human
ugagagggccgggc

SEQ ID NO: 3702393 - RNA, 16 nt, Human
ugagaggggaagcggc

SEQ ID NO: 3702394 - RNA, 13 nt, Human
ugagaggggagag

SEQ ID NO: 3702395 - RNA, 18 nt, Human
ugagagguggcuuuugcg

SEQ ID NO: 3702396 - RNA, 18 nt, Human
ugagaguaacuuaaguua

SEQ ID NO: 3702397 - RNA, 17 nt, Human
ugagaguagagucacug

SEQ ID NO: 3702398 - RNA, 22 nt, Human
ugagagucagcucucugcccug

SEQ ID NO: 3702399 - RNA, 16 nt, Human
ugagagucuagauucu

SEQ ID NO: 3702400 - RNA, 17 nt, Human
ugagagucuagauucuc

SEQ ID NO: 3702401 - RNA, 21 nt, Human
ugagagucuagcacucauuuu

SEQ ID NO: 3702402 - RNA, 21 nt, Human
ugagagugucucugauaaaag

SEQ ID NO: 3702403 - RNA, 22 nt, Human
ugagagugucuucacggcagga

SEQ ID NO: 3702404 - RNA, 13 nt, Human
ugagagugugacc

SEQ ID NO: 3702405 - RNA, 15 nt, Human
ugagauacauacaga

SEQ ID NO: 3702406 - RNA, 22 nt, Human
ugagauacuuugcauugucugu

SEQ ID NO: 3702407 - RNA, 21 nt, Human
ugagauacuuuuucuuuugua

SEQ ID NO: 3702408 - RNA, 19 nt, Human
ugagauagcauugugaacu

SEQ ID NO: 3702409 - RNA, 15 nt, Human
ugagauaguuuucau

SEQ ID NO: 3702410 - RNA, 16 nt, Human
ugagauaguuuucauc

SEQ ID NO: 3702411 - RNA, 15 nt, Human
ugagauauuuauugu

SEQ ID NO: 3702412 - RNA, 15 nt, Human
ugagaucagccuggg

SEQ ID NO: 3702413 - RNA, 16 nt, Human
ugagauccccugagcc

SEQ ID NO: 3702414 - RNA, 21 nt, Human
ugagaucgugcuacugcacuc

SEQ ID NO: 3702415 - RNA, 22 nt, Human
ugagaucuaaaaauaacuguaa

SEQ ID NO: 3702416 - RNA, 22 nt, Human
ugagaucuaagccuuuccauaa

SEQ ID NO: 3702417 - RNA, 23 nt, Human
ugagaugagggaugggccuggca

SEQ ID NO: 3702418 - RNA, 18 nt, Human
ugagaugauucagaaggg

SEQ ID NO: 3702419 - RNA, 14 nt, Human
ugagaugcagcugg

SEQ ID NO: 3702420 - RNA, 18 nt, Human
ugagaugcagcuggaaaa

SEQ ID NO: 3702421 - RNA, 17 nt, Human
ugagaugcugguuuucu

SEQ ID NO: 3702422 - RNA, 21 nt, Human
ugagauggaaaaguguccuuc

SEQ ID NO: 3702423 - RNA, 21 nt, Human
ugagauggaacccuuuuggcc

SEQ ID NO: 3702424 - RNA, 13 nt, Human
ugagauggacaca

SEQ ID NO: 3702425 - RNA, 18 nt, Human
ugagauggagucucacuc

SEQ ID NO: 3702426 - RNA, 18 nt, Human
ugagauggagucuugcuc

SEQ ID NO: 3702427 - RNA, 12 nt, Human
ugagauggcccu

SEQ ID NO: 3702428 - RNA, 15 nt, Human
ugagauggcccucug

SEQ ID NO: 3702429 - RNA, 16 nt, Human
ugagauggcccucugg

SEQ ID NO: 3702430 - RNA, 22 nt, Human
ugagaugggcuucccaagggcu

SEQ ID NO: 3702431 - RNA, 21 nt, Human
ugagauggggauaaaaugacu

SEQ ID NO: 3702432 - RNA, 18 nt, Human
ugagaugugaacacauca

SEQ ID NO: 3702433 - RNA, 19 nt, Human
ugagaugugaacacaucag

SEQ ID NO: 3702434 - RNA, 15 nt, Human
ugagauuacagagga

SEQ ID NO: 3702435 - RNA, 15 nt, Human
ugagauuauuuuaau

SEQ ID NO: 3702436 - RNA, 23 nt, Human
ugagauucaauauugaauuuuuc

SEQ ID NO: 3702437 - RNA, 22 nt, Human
ugagauucucaaaggagcgagc

SEQ ID NO: 3702438 - RNA, 22 nt, Human
ugagauuguccucauuucucca

SEQ ID NO: 3702439 - RNA, 21 nt, Human
ugagauuuauuaaagaaaaaa

SEQ ID NO: 3702440 - RNA, 19 nt, Human
ugagauuucaucugcucuc

SEQ ID NO: 3702441 - RNA, 22 nt, Human
ugagauuucaucugcucuccuu

SEQ ID NO: 3702442 - RNA, 16 nt, Human
ugagauuuuuuauugc

SEQ ID NO: 3702443 - RNA, 18 nt, Human
ugagcaaaccugccccau

SEQ ID NO: 3702444 - RNA, 19 nt, Human
ugagcaaaccugccccauc

SEQ ID NO: 3702445 - RNA, 18 nt, Human
ugagcaaacuaacuugac

SEQ ID NO: 3702446 - RNA, 15 nt, Human
ugagcaacaagaauc

SEQ ID NO: 3702447 - RNA, 17 nt, Human
ugagcaacuuucuuaca

SEQ ID NO: 3702448 - RNA, 15 nt, Human
ugagcaagcccagga

SEQ ID NO: 3702449 - RNA, 15 nt, Human
ugagcaauccugcaa

SEQ ID NO: 3702450 - RNA, 16 nt, Human
ugagcaaugucugugc

SEQ ID NO: 3702451 - RNA, 17 nt, Human
ugagcaaugucugugcu

SEQ ID NO: 3702452 - RNA, 18 nt, Human
ugagcaaugucugugcua

SEQ ID NO: 3702453 - RNA, 21 nt, Human
ugagcacaacuuuaagaggac

SEQ ID NO: 3702454 - RNA, 20 nt, Human
ugagcacacuuuaguggccg

SEQ ID NO: 3702455 - RNA, 13 nt, Human
ugagcaccagggg

SEQ ID NO: 3702456 - RNA, 15 nt, Human
ugagcacccucugga

SEQ ID NO: 3702457 - RNA, 16 nt, Human
ugagcacccucuggau

SEQ ID NO: 3702458 - RNA, 20 nt, Human
ugagcaccucccagccccug

SEQ ID NO: 3702459 - RNA, 22 nt, Human
ugagcacuaaggugugcucuga

SEQ ID NO: 3702460 - RNA, 14 nt, Human
ugagcacugccagg

SEQ ID NO: 3702461 - RNA, 18 nt, Human
ugagcagaaggaaacaaa

SEQ ID NO: 3702462 - RNA, 16 nt, Human
ugagcagacuggugag

SEQ ID NO: 3702463 - RNA, 17 nt, Human
ugagcagacuggugagc

SEQ ID NO: 3702464 - RNA, 21 nt, Human
ugagcagagucuugcuaccuc

SEQ ID NO: 3702465 - RNA, 22 nt, Human
ugagcagggagauccugguugg

SEQ ID NO: 3702466 - RNA, 12 nt, Human
ugagcagggccg

SEQ ID NO: 3702467 - RNA, 14 nt, Human
ugagcagggccggg

SEQ ID NO: 3702468 - RNA, 20 nt, Human
ugagcagggccggggaacug

SEQ ID NO: 3702469 - RNA, 13 nt, Human
ugagcagggcuca

SEQ ID NO: 3702470 - RNA, 14 nt, Human
ugagcagggcucag

SEQ ID NO: 3702471 - RNA, 15 nt, Human
ugagcagggcucagc

SEQ ID NO: 3702472 - RNA, 22 nt, Human
ugagcagggcucagcggggaca

SEQ ID NO: 3702473 - RNA, 16 nt, Human
ugagcaguccuuggcc

SEQ ID NO: 3702474 - RNA, 15 nt, Human
ugagcagugagcaga

SEQ ID NO: 3702475 - RNA, 23 nt, Human
ugagcagugaguuacagcgagag

SEQ ID NO: 3702476 - RNA, 22 nt, Human
ugagcauacaucuuaaaucuuu

SEQ ID NO: 3702477 - RNA, 17 nt, Human
ugagcaucacaguuuug

SEQ ID NO: 3702478 - RNA, 15 nt, Human
ugagcaucaggccag

SEQ ID NO: 3702479 - RNA, 20 nt, Human
ugagcaucaggccaggcccu

SEQ ID NO: 3702480 - RNA, 21 nt, Human
ugagcaucaggccaggcccuc

SEQ ID NO: 3702481 - RNA, 14 nt, Human
ugagcauccugagc

SEQ ID NO: 3702482 - RNA, 15 nt, Human
ugagcauccugagcc

SEQ ID NO: 3702483 - RNA, 18 nt, Human
ugagcaucugucccccuu

SEQ ID NO: 3702484 - RNA, 19 nt, Human
ugagcaugacagccugcag

SEQ ID NO: 3702485 - RNA, 19 nt, Human
ugagcauggaacacuucga

SEQ ID NO: 3702486 - RNA, 15 nt, Human
ugagcauggagcugg

SEQ ID NO: 3702487 - RNA, 15 nt, Human
ugagcauguuacuga

SEQ ID NO: 3702488 - RNA, 15 nt, Human
ugagcauguuuagac

SEQ ID NO: 3702489 - RNA, 23 nt, Human
ugagcauguuuagacuuuaacau

SEQ ID NO: 3702490 - RNA, 18 nt, Human
ugagcauguuugccuaga

SEQ ID NO: 3702491 - RNA, 16 nt, Human
ugagcauuagauuucu

SEQ ID NO: 3702492 - RNA, 19 nt, Human
ugagcauuggauacagcag

SEQ ID NO: 3702493 - RNA, 14 nt, Human
ugagccaaagagaa

SEQ ID NO: 3702494 - RNA, 16 nt, Human
ugagccacagcagcau

SEQ ID NO: 3702495 - RNA, 18 nt, Human
ugagccacagcagcauuu

SEQ ID NO: 3702496 - RNA, 16 nt, Human
ugagccaccacaccug

SEQ ID NO: 3702497 - RNA, 14 nt, Human
ugagccaccgugcc

SEQ ID NO: 3702498 - RNA, 18 nt, Human
ugagccaccgugccuggc

SEQ ID NO: 3702499 - RNA, 21 nt, Human
ugagccaccgugccuggccac

SEQ ID NO: 3702500 - RNA, 18 nt, Human
ugagccaccugcccuuuu

SEQ ID NO: 3702501 - RNA, 19 nt, Human
ugagccaccugcccuuuuu

SEQ ID NO: 3702502 - RNA, 16 nt, Human
ugagccacucucuucc

SEQ ID NO: 3702503 - RNA, 11 nt, Human
ugagccacugc

SEQ ID NO: 3702504 - RNA, 12 nt, Human
ugagccacugca

SEQ ID NO: 3702505 - RNA, 23 nt, Human
ugagccacugcaccgggccacag

SEQ ID NO: 3702506 - RNA, 13 nt, Human
ugagccagauuuc

SEQ ID NO: 3702507 - RNA, 17 nt, Human
ugagccagauuucacuc

SEQ ID NO: 3702508 - RNA, 18 nt, Human
ugagccagauuucacucu

SEQ ID NO: 3702509 - RNA, 20 nt, Human
ugagccagauuucacucucc

SEQ ID NO: 3702510 - RNA, 17 nt, Human
ugagccagcagacauug

SEQ ID NO: 3702511 - RNA, 18 nt, Human
ugagccagcagacauugu

SEQ ID NO: 3702512 - RNA, 14 nt, Human
ugagccaggccugg

SEQ ID NO: 3702513 - RNA, 18 nt, Human
ugagccaggccugggucu

SEQ ID NO: 3702514 - RNA, 22 nt, Human
ugagccaggcuagcuggagccu

SEQ ID NO: 3702515 - RNA, 23 nt, Human
ugagccaggcuagcuggagccug

SEQ ID NO: 3702516 - RNA, 13 nt, Human
ugagccagggucu

SEQ ID NO: 3702517 - RNA, 17 nt, Human
ugagccagucccagggg

SEQ ID NO: 3702518 - RNA, 18 nt, Human
ugagccagucccaggggc

SEQ ID NO: 3702519 - RNA, 21 nt, Human
ugagccagugcuuuaauggca

SEQ ID NO: 3702520 - RNA, 17 nt, Human
ugagcccacaaagccuu

SEQ ID NO: 3702521 - RNA, 23 nt, Human
ugagcccacugcccacccccuca

SEQ ID NO: 3702522 - RNA, 12 nt, Human
ugagcccacugu

SEQ ID NO: 3702523 - RNA, 13 nt, Human
ugagcccagagaa

SEQ ID NO: 3702524 - RNA, 16 nt, Human
ugagcccagagaacag

SEQ ID NO: 3702525 - RNA, 17 nt, Human
ugagcccagagaacagc

SEQ ID NO: 3702526 - RNA, 17 nt, Human
ugagcccagcuggguca

SEQ ID NO: 3702527 - RNA, 12 nt, Human
ugagcccaggag

SEQ ID NO: 3702528 - RNA, 17 nt, Human
ugagcccagggaggccg

SEQ ID NO: 3702529 - RNA, 17 nt, Human
ugagcccauggcccucc

SEQ ID NO: 3702530 - RNA, 21 nt, Human
ugagcccauguggagucagcc

SEQ ID NO: 3702531 - RNA, 22 nt, Human
ugagcccauguucugcccccag

SEQ ID NO: 3702532 - RNA, 18 nt, Human
ugagccccagggugccca

SEQ ID NO: 3702533 - RNA, 20 nt, Human
ugagccccagggugcccaga

SEQ ID NO: 3702534 - RNA, 12 nt, Human
ugagccccaucu

SEQ ID NO: 3702535 - RNA, 14 nt, Human
ugagccccaucuuc

SEQ ID NO: 3702536 - RNA, 15 nt, Human
ugagcccccagcuuc

SEQ ID NO: 3702537 - RNA, 22 nt, Human
ugagcccccccaacacugugcc

SEQ ID NO: 3702538 - RNA, 16 nt, Human
ugagccccgcagaccu

SEQ ID NO: 3702539 - RNA, 17 nt, Human
ugagccccgcagaccuc

SEQ ID NO: 3702540 - RNA, 19 nt, Human
ugagccccuaccccacacc

SEQ ID NO: 3702541 - RNA, 21 nt, Human
ugagccccuaccccacaccag

SEQ ID NO: 3702542 - RNA, 15 nt, Human
ugagccccugguccu

SEQ ID NO: 3702543 - RNA, 17 nt, Human
ugagccccugucuagag

SEQ ID NO: 3702544 - RNA, 21 nt, Human
ugagccccugucuagagaggg

SEQ ID NO: 3702545 - RNA, 19 nt, Human
ugagcccgggcugccuggg

SEQ ID NO: 3702546 - RNA, 19 nt, Human
ugagcccuacucccugcag

SEQ ID NO: 3702547 - RNA, 23 nt, Human
ugagcccuacucccugcagaugc

SEQ ID NO: 3702548 - RNA, 16 nt, Human
ugagcccucaaaguga

SEQ ID NO: 3702549 - RNA, 21 nt, Human
ugcaggggauugaagcccucc

SEQ ID NO: 3702550 - RNA, 18 nt, Human
ugcaggggcucuggagag

SEQ ID NO: 3702551 - RNA, 21 nt, Human
ugcaggggcucuggagagaaa

SEQ ID NO: 3702552 - RNA, 16 nt, Human
ugcagggggcuccugg

SEQ ID NO: 3702553 - RNA, 19 nt, Human
ugcagggggugugucugcu

SEQ ID NO: 3702554 - RNA, 14 nt, Human
ugcaggggugacgg

SEQ ID NO: 3702555 - RNA, 15 nt, Human
ugcaggguccucuuc

SEQ ID NO: 3702556 - RNA, 22 nt, Human
ugcaggguccucuucugggccu

SEQ ID NO: 3702557 - RNA, 20 nt, Human
ugcaggguggugcugggacu

SEQ ID NO: 3702558 - RNA, 23 nt, Human
ugcaggguucucccucccaccuu

SEQ ID NO: 3702559 - RNA, 22 nt, Human
ugcagguagaccugucuccugg

SEQ ID NO: 3702560 - RNA, 16 nt, Human
ugcaggucccuaauaa

SEQ ID NO: 3702561 - RNA, 23 nt, Human
ugcaggugagcccauggcccucc

SEQ ID NO: 3702562 - RNA, 13 nt, Human
ugcagguggggag

SEQ ID NO: 3702563 - RNA, 21 nt, Human
ugcagguggugucgggcccuu

SEQ ID NO: 3702564 - RNA, 16 nt, Human
ugcagguuggacccca

SEQ ID NO: 3702565 - RNA, 15 nt, Human
ugcaguaaaucuuuu

SEQ ID NO: 3702566 - RNA, 16 nt, Human
ugcaguaacuguuuuu

SEQ ID NO: 3702567 - RNA, 21 nt, Human
ugcaguaacuguuuuuuaagu

SEQ ID NO: 3702568 - RNA, 16 nt, Human
ugcaguacaggacaua

SEQ ID NO: 3702569 - RNA, 22 nt, Human
ugcaguagagucaucuccauca

SEQ ID NO: 3702570 - RNA, 15 nt, Human
ugcaguagucucugu

SEQ ID NO: 3702571 - RNA, 16 nt, Human
ugcaguaucugugaac

SEQ ID NO: 3702572 - RNA, 15 nt, Human
ugcaguaugaaaaua

SEQ ID NO: 3702573 - RNA, 17 nt, Human
ugcaguauugagcacug

SEQ ID NO: 3702574 - RNA, 19 nt, Human
ugcagucacguggaggagc

SEQ ID NO: 3702575 - RNA, 14 nt, Human
ugcagucacuggag

SEQ ID NO: 3702576 - RNA, 13 nt, Human
ugcagucaucuug

SEQ ID NO: 3702577 - RNA, 21 nt, Human
ugcagucccaagcggugucuc

SEQ ID NO: 3702578 - RNA, 23 nt, Human
ugcagucccaagcggugucucuc

SEQ ID NO: 3702579 - RNA, 22 nt, Human
ugcaguccugaucagagccgug

SEQ ID NO: 3702580 - RNA, 15 nt, Human
ugcagucuccucuuu

SEQ ID NO: 3702581 - RNA, 17 nt, Human
ugcagucuccucuuuaa

SEQ ID NO: 3702582 - RNA, 19 nt, Human
ugcagucucuauaccaaua

SEQ ID NO: 3702583 - RNA, 14 nt, Human
ugcagucugcuucu

SEQ ID NO: 3702584 - RNA, 14 nt, Human
ugcagucuggcuga

SEQ ID NO: 3702585 - RNA, 20 nt, Human
ugcagucuggcugagcccug

SEQ ID NO: 3702586 - RNA, 13 nt, Human
ugcagucugggug

SEQ ID NO: 3702587 - RNA, 19 nt, Human
ugcagugaacuuccagaca

SEQ ID NO: 3702588 - RNA, 13 nt, Human
ugcagugaauugu

SEQ ID NO: 3702589 - RNA, 18 nt, Human
ugcagugacgugcaccug

SEQ ID NO: 3702590 - RNA, 19 nt, Human
ugcagugacgugcaccugu

SEQ ID NO: 3702591 - RNA, 22 nt, Human
ugcagugacgugcaccuguacu

SEQ ID NO: 3702592 - RNA, 17 nt, Human
ugcagugauauggcaga

SEQ ID NO: 3702593 - RNA, 23 nt, Human
ugcagugauauggcagaagacac

SEQ ID NO: 3702594 - RNA, 23 nt, Human
ugcagugccuuggggaauuuccu

SEQ ID NO: 3702595 - RNA, 21 nt, Human
ugcagugcucgcuguugcuga

SEQ ID NO: 3702596 - RNA, 23 nt, Human
ugcagugcucgcuguugcugaau

SEQ ID NO: 3702597 - RNA, 13 nt, Human
ugcagugcugcuu

SEQ ID NO: 3702598 - RNA, 19 nt, Human
ugcagugguauuaauuuug

SEQ ID NO: 3702599 - RNA, 15 nt, Human
ugcaguguagauuuu

SEQ ID NO: 3702600 - RNA, 16 nt, Human
ugcaguguucgcuugg

SEQ ID NO: 3702601 - RNA, 17 nt, Human
ugcaguguucgcuuggc

SEQ ID NO: 3702602 - RNA, 23 nt, Human
ugcaguuacaaauuauaauguau

SEQ ID NO: 3702603 - RNA, 14 nt, Human
ugcaguuauuugcu

SEQ ID NO: 3702604 - RNA, 13 nt, Human
ugcaguucccauc

SEQ ID NO: 3702605 - RNA, 20 nt, Human
ugcaguucccccaaccucag

SEQ ID NO: 3702606 - RNA, 21 nt, Human
ugcaguucccccaaccucaga

SEQ ID NO: 3702607 - RNA, 18 nt, Human
ugcaguucuaguuugcau

SEQ ID NO: 3702608 - RNA, 22 nt, Human
ugcaguucugaagaagauggua

SEQ ID NO: 3702609 - RNA, 16 nt, Human
ugcaguucuugaguug

SEQ ID NO: 3702610 - RNA, 15 nt, Human
ugcaguugccaguca

SEQ ID NO: 3702611 - RNA, 12 nt, Human
ugcaguuuauca

SEQ ID NO: 3702612 - RNA, 17 nt, Human
ugcaguuuaucauucaa

SEQ ID NO: 3702613 - RNA, 19 nt, Human
ugcaguuuaucauucaagu

SEQ ID NO: 3702614 - RNA, 11 nt, Human
ugcaguuugaa

SEQ ID NO: 3702615 - RNA, 15 nt, Human
ugcaguuugaaauuc

SEQ ID NO: 3702616 - RNA, 19 nt, Human
ugcaguuugagacaggaga

SEQ ID NO: 3702617 - RNA, 12 nt, Human
ugcaguuuuccu

SEQ ID NO: 3702618 - RNA, 16 nt, Human
ugcaguuuuucagagu

SEQ ID NO: 3702619 - RNA, 17 nt, Human
ugcauaaaauuggauua

SEQ ID NO: 3702620 - RNA, 15 nt, Human
ugcauaaauaugcag

SEQ ID NO: 3702621 - RNA, 18 nt, Human
ugcauaagguuuuuaugc

SEQ ID NO: 3702622 - RNA, 14 nt, Human
ugcauaagugaaaa

SEQ ID NO: 3702623 - RNA, 22 nt, Human
ugcauaagugaaaaucuuacaa

SEQ ID NO: 3702624 - RNA, 17 nt, Human
ugcauaaguuaacuucc

SEQ ID NO: 3702625 - RNA, 17 nt, Human
ugcauaauguuucugga

SEQ ID NO: 3702626 - RNA, 21 nt, Human
ugcauaccacuuuuguucuug

SEQ ID NO: 3702627 - RNA, 22 nt, Human
ugcauacuuaccuagugaaacu

SEQ ID NO: 3702628 - RNA, 18 nt, Human
ugcauacuucaaaaguau

SEQ ID NO: 3702629 - RNA, 13 nt, Human
ugcauacuuugua

SEQ ID NO: 3702630 - RNA, 20 nt, Human
ugcauacuuuguauuuugau

SEQ ID NO: 3702631 - RNA, 17 nt, Human
ugcauagaacuggguaa

SEQ ID NO: 3702632 - RNA, 22 nt, Human
ugcauagaacuggguaaaugca

SEQ ID NO: 3702633 - RNA, 17 nt, Human
ugcauagaaggaggaga

SEQ ID NO: 3702634 - RNA, 19 nt, Human
ugcauagagccacguaugu

SEQ ID NO: 3702635 - RNA, 15 nt, Human
ugcauagcaguauau

SEQ ID NO: 3702636 - RNA, 16 nt, Human
ugcauagcaguauaug

SEQ ID NO: 3702637 - RNA, 20 nt, Human
ugcauagguuagauauagag

SEQ ID NO: 3702638 - RNA, 21 nt, Human
ugcauaguaccaaucauuuua

SEQ ID NO: 3702639 - RNA, 21 nt, Human
ugcauaguauuccauugugug

SEQ ID NO: 3702640 - RNA, 18 nt, Human
ugcauaguuguagacaaa

SEQ ID NO: 3702641 - RNA, 21 nt, Human
ugcauaguuguagacaaagua

SEQ ID NO: 3702642 - RNA, 13 nt, Human
ugcauaguuucuu

SEQ ID NO: 3702643 - RNA, 18 nt, Human
ugcauauaacuuauauug

SEQ ID NO: 3702644 - RNA, 21 nt, Human
ugcauauaacuuauauuguaa

SEQ ID NO: 3702645 - RNA, 17 nt, Human
ugcauauauacauauau

SEQ ID NO: 3702646 - RNA, 17 nt, Human
ugcauauauauaugugu

SEQ ID NO: 3702647 - RNA, 15 nt, Human
ugcauauguaugacu

SEQ ID NO: 3702648 - RNA, 19 nt, Human
ugcauaugucacuagaaug

SEQ ID NO: 3702649 - RNA, 19 nt, Human
ugcauauguugaauacuuu

SEQ ID NO: 3702650 - RNA, 16 nt, Human
ugcauauuauaaagga

SEQ ID NO: 3702651 - RNA, 18 nt, Human
ugcauauuauuuuauguu

SEQ ID NO: 3702652 - RNA, 13 nt, Human
ugcauauuccuuu

SEQ ID NO: 3702653 - RNA, 22 nt, Human
ugcauauuccuuucuaucauuu

SEQ ID NO: 3702654 - RNA, 13 nt, Human
ugcauauuguaca

SEQ ID NO: 3702655 - RNA, 15 nt, Human
ugcauauuguauuac

SEQ ID NO: 3702656 - RNA, 16 nt, Human
ugcauauuguauuacu

SEQ ID NO: 3702657 - RNA, 15 nt, Human
ugcauauuuguuuau

SEQ ID NO: 3702658 - RNA, 19 nt, Human
ugcaucaagaugugacaug

SEQ ID NO: 3702659 - RNA, 20 nt, Human
ugcaucaauccugugugguu

SEQ ID NO: 3702660 - RNA, 16 nt, Human
ugcaucaccucuguaa

SEQ ID NO: 3702661 - RNA, 13 nt, Human
ugcaucagaaagc

SEQ ID NO: 3702662 - RNA, 17 nt, Human
ugcaucagaaagggagg

SEQ ID NO: 3702663 - RNA, 21 nt, Human
ugcaucagaaagggagggcuc

SEQ ID NO: 3702664 - RNA, 14 nt, Human
ugcaucagaaaugu

SEQ ID NO: 3702665 - RNA, 19 nt, Human
ugcaucagcugcugaaaca

SEQ ID NO: 3702666 - RNA, 13 nt, Human
ugcauccaacucc

SEQ ID NO: 3702667 - RNA, 14 nt, Human
ugcauccagaggca

SEQ ID NO: 3702668 - RNA, 22 nt, Human
ugcaucccaaaccacgccucuu

SEQ ID NO: 3702669 - RNA, 19 nt, Human
ugcaucccagcaccugccu

SEQ ID NO: 3702670 - RNA, 14 nt, Human
ugcaucccugagac

SEQ ID NO: 3702671 - RNA, 16 nt, Human
ugcauccgugagcagu

SEQ ID NO: 3702672 - RNA, 23 nt, Human
ugcauccgugagcagugugucuc

SEQ ID NO: 3702673 - RNA, 13 nt, Human
ugcauccuuccua

SEQ ID NO: 3702674 - RNA, 18 nt, Human
ugcauccuuccuauaacu

SEQ ID NO: 3702675 - RNA, 14 nt, Human
ugcaucguggagac

SEQ ID NO: 3702676 - RNA, 15 nt, Human
ugcaucuaagcccau

SEQ ID NO: 3702677 - RNA, 16 nt, Human
ugcaucuaagcccaug

SEQ ID NO: 3702678 - RNA, 14 nt, Human
ugcaucuacuccca

SEQ ID NO: 3702679 - RNA, 18 nt, Human
ugcaucuagccucaagcu

SEQ ID NO: 3702680 - RNA, 21 nt, Human
ugcaucucacuggaugcaaag

SEQ ID NO: 3702681 - RNA, 13 nt, Human
ugcaucucagccc

SEQ ID NO: 3702682 - RNA, 15 nt, Human
ugcaucucagcccac

SEQ ID NO: 3702683 - RNA, 13 nt, Human
ugcaucucccaga

SEQ ID NO: 3702684 - RNA, 17 nt, Human
ugcaucugaccagcagc

SEQ ID NO: 3702685 - RNA, 23 nt, Human
ugcaucugggauucccaccaagg

SEQ ID NO: 3702686 - RNA, 20 nt, Human
ugcaucuggguagcuguaag

SEQ ID NO: 3702687 - RNA, 18 nt, Human
ugcaucuuacugaaggua

SEQ ID NO: 3702688 - RNA, 18 nt, Human
ugcaucuuuuuuucauuu

SEQ ID NO: 3702689 - RNA, 18 nt, Human
ugcaugaagagaagcaau

SEQ ID NO: 3702690 - RNA, 21 nt, Human
ugcaugaagagaagcaauuuu

SEQ ID NO: 3702691 - RNA, 18 nt, Human
ugcaugaagguuucugaa

SEQ ID NO: 3702692 - RNA, 22 nt, Human
ugcaugaaguaauaugcacaca

SEQ ID NO: 3702693 - RNA, 15 nt, Human
ugcaugacagccucu

SEQ ID NO: 3702694 - RNA, 15 nt, Human
ugcaugacuuguagc

SEQ ID NO: 3702695 - RNA, 21 nt, Human
ugcaugagcuacgccugccuc

SEQ ID NO: 3702696 - RNA, 14 nt, Human
ugcaugauguauuu

SEQ ID NO: 3702697 - RNA, 22 nt, Human
ugcaugcacuguucccccugug

SEQ ID NO: 3702698 - RNA, 13 nt, Human
guacagugucuuu

SEQ ID NO: 3702699 - RNA, 14 nt, Human
guacagugucuuuu

SEQ ID NO: 3702700 - RNA, 21 nt, Human
guacaguuauuuaugccucug

SEQ ID NO: 3702701 - RNA, 16 nt, Human
guacaguucaguuccu

SEQ ID NO: 3702702 - RNA, 19 nt, Human
guacaguucaguuccucuu

SEQ ID NO: 3702703 - RNA, 22 nt, Human
guacaguucuucgggaagagag

SEQ ID NO: 3702704 - RNA, 13 nt, Human
guacaguuuuuau

SEQ ID NO: 3702705 - RNA, 23 nt, Human
guacauaaaggugguaugugugu

SEQ ID NO: 3702706 - RNA, 16 nt, Human
guacauaacucuguaa

SEQ ID NO: 3702707 - RNA, 19 nt, Human
guacauaauacugaaccac

SEQ ID NO: 3702708 - RNA, 22 nt, Human
guacauaaugcuuaauuucuaa

SEQ ID NO: 3702709 - RNA, 22 nt, Human
guacauacccuggccgcccccu

SEQ ID NO: 3702710 - RNA, 19 nt, Human
guacauacuuuuuggguuu

SEQ ID NO: 3702711 - RNA, 12 nt, Human
guacauagccua

SEQ ID NO: 3702712 - RNA, 15 nt, Human
guacauagccuauau

SEQ ID NO: 3702713 - RNA, 16 nt, Human
guacauaugugcugga

SEQ ID NO: 3702714 - RNA, 17 nt, Human
guacauauuuauuuucu

SEQ ID NO: 3702715 - RNA, 13 nt, Human
guacaucuggcuu

SEQ ID NO: 3702716 - RNA, 20 nt, Human
guacaucuggcuuauuuuaa

SEQ ID NO: 3702717 - RNA, 21 nt, Human
guacaucuggcuuauuuuaau

SEQ ID NO: 3702718 - RNA, 14 nt, Human
guacaugaaaacac

SEQ ID NO: 3702719 - RNA, 16 nt, Human
guacaugaaaacacau

SEQ ID NO: 3702720 - RNA, 17 nt, Human
guacaugaaaacacauu

SEQ ID NO: 3702721 - RNA, 19 nt, Human
guacaugaaaacacauuuu

SEQ ID NO: 3702722 - RNA, 14 nt, Human
guacaugaaaguag

SEQ ID NO: 3702723 - RNA, 19 nt, Human
guacauggaauaacaugua

SEQ ID NO: 3702724 - RNA, 17 nt, Human
guacauucaauguuuau

SEQ ID NO: 3702725 - RNA, 17 nt, Human
guacauugaaggccugg

SEQ ID NO: 3702726 - RNA, 14 nt, Human
guacauuuaaaauu

SEQ ID NO: 3702727 - RNA, 16 nt, Human
guacauuuaauugaga

SEQ ID NO: 3702728 - RNA, 17 nt, Human
guacauuuaauugagaa

SEQ ID NO: 3702729 - RNA, 23 nt, Human
guacauuuaauugagaagcguau

SEQ ID NO: 3702730 - RNA, 12 nt, Human
guacauuuauaa

SEQ ID NO: 3702731 - RNA, 14 nt, Human
guacauuuauaauu

SEQ ID NO: 3702732 - RNA, 16 nt, Human
guacauuuaugauuua

SEQ ID NO: 3702733 - RNA, 22 nt, Human
guacauuuaugauuuaauaaaa

SEQ ID NO: 3702734 - RNA, 16 nt, Human
guacauuucccugugc

SEQ ID NO: 3702735 - RNA, 18 nt, Human
guacauuucccugugcug

SEQ ID NO: 3702736 - RNA, 14 nt, Human
guacauuucuauaa

SEQ ID NO: 3702737 - RNA, 21 nt, Human
guacauuucuauaaauagaug

SEQ ID NO: 3702738 - RNA, 13 nt, Human
guacauuucugaa

SEQ ID NO: 3702739 - RNA, 17 nt, Human
guacauuuuguuguaaa

SEQ ID NO: 3702740 - RNA, 23 nt, Human
guacauuuuucaacuuugaauaa

SEQ ID NO: 3702741 - RNA, 14 nt, Human
guacauuuuuugaa

SEQ ID NO: 3702742 - RNA, 19 nt, Human
guaccaaaauuuuaaaaaa

SEQ ID NO: 3702743 - RNA, 18 nt, Human
guaccaaaugcuuuaaaa

SEQ ID NO: 3702744 - RNA, 21 nt, Human
guaccaagaaucuugguuugc

SEQ ID NO: 3702745 - RNA, 13 nt, Human
guaccaagugaaa

SEQ ID NO: 3702746 - RNA, 22 nt, Human
guaccaaugcagaacucccaag

SEQ ID NO: 3702747 - RNA, 18 nt, Human
guaccacugaaucuguac

SEQ ID NO: 3702748 - RNA, 15 nt, Human
guaccagauaacuuu

SEQ ID NO: 3702749 - RNA, 17 nt, Human
guaccagauaacuuuuu

SEQ ID NO: 3702750 - RNA, 21 nt, Human
guaccagcgcucuaaaagcac

SEQ ID NO: 3702751 - RNA, 21 nt, Human
guaccagugaauuuuugcaau

SEQ ID NO: 3702752 - RNA, 20 nt, Human
guaccaguuaauuuuuccaa

SEQ ID NO: 3702753 - RNA, 21 nt, Human
guaccaguucuuuaagaagau

SEQ ID NO: 3702754 - RNA, 20 nt, Human
guaccauagcgcugcucuua

SEQ ID NO: 3702755 - RNA, 20 nt, Human
guaccaugaaacaaagcugc

SEQ ID NO: 3702756 - RNA, 15 nt, Human
guaccauuaaaauau

SEQ ID NO: 3702757 - RNA, 15 nt, Human
guacccaccugagcu

SEQ ID NO: 3702758 - RNA, 17 nt, Human
guacccaccugagcuuu

SEQ ID NO: 3702759 - RNA, 12 nt, Human
guacccacugcu

SEQ ID NO: 3702760 - RNA, 12 nt, Human
guacccagccau

SEQ ID NO: 3702761 - RNA, 18 nt, Human
guacccagccaucugccc

SEQ ID NO: 3702762 - RNA, 12 nt, Human
guaccccacccu

SEQ ID NO: 3702763 - RNA, 23 nt, Human
guaccccacccucagcaccccuu

SEQ ID NO: 3702764 - RNA, 21 nt, Human
guaccccccaaccccugagga

SEQ ID NO: 3702765 - RNA, 17 nt, Human
guacccccgcccaggcu

SEQ ID NO: 3702766 - RNA, 18 nt, Human
guacccccgcccaggcug

SEQ ID NO: 3702767 - RNA, 14 nt, Human
guacccccuucugg

SEQ ID NO: 3702768 - RNA, 15 nt, Human
guacccccuucuggg

SEQ ID NO: 3702769 - RNA, 18 nt, Human
guacccucucagcuccag

SEQ ID NO: 3702770 - RNA, 18 nt, Human
guaccgcgucuacccugg

SEQ ID NO: 3702771 - RNA, 20 nt, Human
guaccgcgucuacccuggga

SEQ ID NO: 3702772 - RNA, 17 nt, Human
guaccuccccugccuug

SEQ ID NO: 3702773 - RNA, 15 nt, Human
guaccugggcaagcu

SEQ ID NO: 3702774 - RNA, 16 nt, Human
guaccugggcaagcug

SEQ ID NO: 3702775 - RNA, 15 nt, Human
guaccuggggccaaa

SEQ ID NO: 3702776 - RNA, 19 nt, Human
guaccuucagauccuaccc

SEQ ID NO: 3702777 - RNA, 20 nt, Human
guaccuugaccuuuguacag

SEQ ID NO: 3702778 - RNA, 23 nt, Human
guaccuugcacacaucaucugua

SEQ ID NO: 3702779 - RNA, 11 nt, Human
guaccuugcuu

SEQ ID NO: 3702780 - RNA, 13 nt, Human
guaccuugcuucu

SEQ ID NO: 3702781 - RNA, 21 nt, Human
guaccuuuugaggagccccag

SEQ ID NO: 3702782 - RNA, 23 nt, Human
guaccuuuugaggagccccagcu

SEQ ID NO: 3702783 - RNA, 22 nt, Human
guaccuuuuuuguuuuuucaaa

SEQ ID NO: 3702784 - RNA, 13 nt, Human
guacgcacagaca

SEQ ID NO: 3702785 - RNA, 15 nt, Human
guacgcacagacagg

SEQ ID NO: 3702786 - RNA, 17 nt, Human
guacgucugacaggcaa

SEQ ID NO: 3702787 - RNA, 13 nt, Human
guacgugacccuc

SEQ ID NO: 3702788 - RNA, 14 nt, Human
guacguugugcauu

SEQ ID NO: 3702789 - RNA, 15 nt, Human
guacguugugcauuu

SEQ ID NO: 3702790 - RNA, 13 nt, Human
guacuaaauuuaa

SEQ ID NO: 3702791 - RNA, 17 nt, Human
guacuaaauuuaaauuu

SEQ ID NO: 3702792 - RNA, 20 nt, Human
guacuacuagaugucuuuag

SEQ ID NO: 3702793 - RNA, 21 nt, Human
guacuacuagaugucuuuagg

SEQ ID NO: 3702794 - RNA, 14 nt, Human
guacuagagauauu

SEQ ID NO: 3702795 - RNA, 22 nt, Human
guacuagagaucugguuuugcu

SEQ ID NO: 3702796 - RNA, 22 nt, Human
guacuagggggaagugacaagg

SEQ ID NO: 3702797 - RNA, 16 nt, Human
guacuaguacugugua

SEQ ID NO: 3702798 - RNA, 20 nt, Human
guacuaguggcauggagaau

SEQ ID NO: 3702799 - RNA, 14 nt, Human
guacuaguguucug

SEQ ID NO: 3702800 - RNA, 15 nt, Human
guacuaguguucugu

SEQ ID NO: 3702801 - RNA, 13 nt, Human
guacuauaucugu

SEQ ID NO: 3702802 - RNA, 16 nt, Human
guacuauaucuguuuu

SEQ ID NO: 3702803 - RNA, 13 nt, Human
guacuauguauca

SEQ ID NO: 3702804 - RNA, 15 nt, Human
guacuauguaucaau

SEQ ID NO: 3702805 - RNA, 18 nt, Human
guacuauuuaacugacua

SEQ ID NO: 3702806 - RNA, 15 nt, Human
guacucaaauguagc

SEQ ID NO: 3702807 - RNA, 20 nt, Human
guacucacugaagccugcgu

SEQ ID NO: 3702808 - RNA, 19 nt, Human
guacuccacacugcacaau

SEQ ID NO: 3702809 - RNA, 15 nt, Human
guacucccucucagg

SEQ ID NO: 3702810 - RNA, 21 nt, Human
guacuccugcaaaauuuuaua

SEQ ID NO: 3702811 - RNA, 17 nt, Human
guacucgcuugugcaga

SEQ ID NO: 3702812 - RNA, 21 nt, Human
guacucugccacuuuauuucu

SEQ ID NO: 3702813 - RNA, 14 nt, Human
guacucuuccgaaa

SEQ ID NO: 3702814 - RNA, 14 nt, Human
guacugaaagccuu

SEQ ID NO: 3702815 - RNA, 23 nt, Human
guacugaaagccuuagggaagcu

SEQ ID NO: 3702816 - RNA, 16 nt, Human
guacugauuuuuguaa

SEQ ID NO: 3702817 - RNA, 11 nt, Human
guacugccugc

SEQ ID NO: 3702818 - RNA, 13 nt, Human
guacugccugcuu

SEQ ID NO: 3702819 - RNA, 12 nt, Human
guacuggggguu

SEQ ID NO: 3702820 - RNA, 19 nt, Human
guacugguaagauuguuau

SEQ ID NO: 3702821 - RNA, 12 nt, Human
guacuguaauaa

SEQ ID NO: 3702822 - RNA, 17 nt, Human
guacugucugauuggcu

SEQ ID NO: 3702823 - RNA, 18 nt, Human
guacugucugauuggcuu

SEQ ID NO: 3702824 - RNA, 11 nt, Human
guacugugaau

SEQ ID NO: 3702825 - RNA, 17 nt, Human
guacuguucugugucuu

SEQ ID NO: 3702826 - RNA, 13 nt, Human
guacuguuuacca

SEQ ID NO: 3702827 - RNA, 20 nt, Human
guacuguuuaccauuuuuca

SEQ ID NO: 3702828 - RNA, 17 nt, Human
guacuuaaaugaaagca

SEQ ID NO: 3702829 - RNA, 23 nt, Human
guacuuaaaugguaauaagcacu

SEQ ID NO: 3702830 - RNA, 16 nt, Human
guacuuauuacugcua

SEQ ID NO: 3702831 - RNA, 18 nt, Human
guacuuauuacugcuaag

SEQ ID NO: 3702832 - RNA, 15 nt, Human
guacuucacugucag

SEQ ID NO: 3702833 - RNA, 14 nt, Human
guacuucagcaaga

SEQ ID NO: 3702834 - RNA, 18 nt, Human
guacuucaggggcacuuc

SEQ ID NO: 3702835 - RNA, 21 nt, Human
guacuucccgggccagggcug

SEQ ID NO: 3702836 - RNA, 14 nt, Human
guacuucuccaccc

SEQ ID NO: 3702837 - RNA, 18 nt, Human
guacuucuccacccugcu

SEQ ID NO: 3702838 - RNA, 19 nt, Human
guacuucuccacccugcuc

SEQ ID NO: 3702839 - RNA, 20 nt, Human
guacuucuccacccugcucu

SEQ ID NO: 3702840 - RNA, 20 nt, Human
guacuucuugaauauaaaaa

SEQ ID NO: 3702841 - RNA, 23 nt, Human
guacuugaagucuaaaagcagaa

SEQ ID NO: 3702842 - RNA, 18 nt, Human
guacuugaguguaauguu

SEQ ID NO: 3702843 - RNA, 23 nt, Human
guacuugccagaaguuguggauu

SEQ ID NO: 3702844 - RNA, 22 nt, Human
guacuugccuuauuagaguguc

SEQ ID NO: 3702845 - RNA, 18 nt, Human
guacuugcugcuauuuua

SEQ ID NO: 3702846 - RNA, 15 nt, Human
guacuugguccaacu

SEQ ID NO: 3702847 - RNA, 17 nt, Human
guacuugucaaagaagg

SEQ ID NO: 3702848 - RNA, 22 nt, Human
ugcaugcagccacugugcugaa

SEQ ID NO: 3702849 - RNA, 18 nt, Human
ugcaugcccagagaccca

SEQ ID NO: 3702850 - RNA, 16 nt, Human
ugcaugcucucugcag

SEQ ID NO: 3702851 - RNA, 15 nt, Human
ugcaugcuuuccaua

SEQ ID NO: 3702852 - RNA, 18 nt, Human
ugcaugcuuuccauauuu

SEQ ID NO: 3702853 - RNA, 12 nt, Human
ugcauggaaauc

SEQ ID NO: 3702854 - RNA, 17 nt, Human
ugcauggaaaucagcca

SEQ ID NO: 3702855 - RNA, 22 nt, Human
ugcauggaaaucagccaaguuu

SEQ ID NO: 3702856 - RNA, 23 nt, Human
ugcauggacaccccuuauccagg

SEQ ID NO: 3702857 - RNA, 13 nt, Human
ugcauggagcagg

SEQ ID NO: 3702858 - RNA, 16 nt, Human
ugcauggaggcccucc

SEQ ID NO: 3702859 - RNA, 14 nt, Human
ugcauggauuucuu

SEQ ID NO: 3702860 - RNA, 20 nt, Human
ugcauggauuucuuugaaaa

SEQ ID NO: 3702861 - RNA, 15 nt, Human
ugcauggcagcaggc

SEQ ID NO: 3702862 - RNA, 20 nt, Human
ugcauggcagggggcugcug

SEQ ID NO: 3702863 - RNA, 21 nt, Human
ugcauggcagggggcugcugc

SEQ ID NO: 3702864 - RNA, 23 nt, Human
ugcauggcagggggcugcugcug

SEQ ID NO: 3702865 - RNA, 20 nt, Human
ugcauggcauccuccagccc

SEQ ID NO: 3702866 - RNA, 22 nt, Human
ugcauggcuccagaaaugucua

SEQ ID NO: 3702867 - RNA, 21 nt, Human
ugcaugggccagccccuccau

SEQ ID NO: 3702868 - RNA, 16 nt, Human
ugcaugggugaaggga

SEQ ID NO: 3702869 - RNA, 18 nt, Human
ugcauggguuuuguaggu

SEQ ID NO: 3702870 - RNA, 19 nt, Human
ugcauggguuuuguaggua

SEQ ID NO: 3702871 - RNA, 16 nt, Human
ugcaugguaauuuaua

SEQ ID NO: 3702872 - RNA, 19 nt, Human
ugcaugguaauuuauaguu

SEQ ID NO: 3702873 - RNA, 19 nt, Human
ugcauggugccccaggacc

SEQ ID NO: 3702874 - RNA, 20 nt, Human
ugcauggugccccaggacca

SEQ ID NO: 3702875 - RNA, 15 nt, Human
ugcaugguuucagca

SEQ ID NO: 3702876 - RNA, 16 nt, Human
ugcaugguuucagcac

SEQ ID NO: 3702877 - RNA, 15 nt, Human
ugcauguacuaucuu

SEQ ID NO: 3702878 - RNA, 14 nt, Human
ugcauguaguaaca

SEQ ID NO: 3702879 - RNA, 15 nt, Human
ugcauguauaaauga

SEQ ID NO: 3702880 - RNA, 17 nt, Human
ugcauguauaaaugaag

SEQ ID NO: 3702881 - RNA, 14 nt, Human
ugcauguaugucuu

SEQ ID NO: 3702882 - RNA, 16 nt, Human
ugcauguccuguaaag

SEQ ID NO: 3702883 - RNA, 13 nt, Human
ugcaugugacucu

SEQ ID NO: 3702884 - RNA, 14 nt, Human
ugcaugugacucug

SEQ ID NO: 3702885 - RNA, 15 nt, Human
ugcaugugacucuga

SEQ ID NO: 3702886 - RNA, 16 nt, Human
ugcaugugucuuuaua

SEQ ID NO: 3702887 - RNA, 11 nt, Human
ugcaugugugu

SEQ ID NO: 3702888 - RNA, 14 nt, Human
ugcaugugugugug

SEQ ID NO: 3702889 - RNA, 16 nt, Human
ugcauguuccacuaac

SEQ ID NO: 3702890 - RNA, 15 nt, Human
ugcauguuugugauu

SEQ ID NO: 3702891 - RNA, 16 nt, Human
ugcauuaaauucacaa

SEQ ID NO: 3702892 - RNA, 19 nt, Human
ugcauuaaauucacaaacu

SEQ ID NO: 3702893 - RNA, 22 nt, Human
ugcauuaccgcguuguaaaaua

SEQ ID NO: 3702894 - RNA, 14 nt, Human
ugcauuagaaauua

SEQ ID NO: 3702895 - RNA, 18 nt, Human
ugcauuagcacagauuuu

SEQ ID NO: 3702896 - RNA, 19 nt, Human
ugcauuagggaugccuccu

SEQ ID NO: 3702897 - RNA, 14 nt, Human
ugcauuauauuuau

SEQ ID NO: 3702898 - RNA, 15 nt, Human
ugcauuauauuuauu

SEQ ID NO: 3702899 - RNA, 13 nt, Human
ugcauuaugcaau

SEQ ID NO: 3702900 - RNA, 17 nt, Human
ugcauuauuaaauugua

SEQ ID NO: 3702901 - RNA, 15 nt, Human
ugcauuauuugagaa

SEQ ID NO: 3702902 - RNA, 16 nt, Human
ugcauuauuugagaag

SEQ ID NO: 3702903 - RNA, 12 nt, Human
ugcauucaaauu

SEQ ID NO: 3702904 - RNA, 14 nt, Human
ugcauucacccaga

SEQ ID NO: 3702905 - RNA, 16 nt, Human
ugcauucacccagaca

SEQ ID NO: 3702906 - RNA, 11 nt, Human
ugcauucauuu

SEQ ID NO: 3702907 - RNA, 23 nt, Human
ugcauuccugauaugauuuaaaa

SEQ ID NO: 3702908 - RNA, 20 nt, Human
ugcauuccuuugucuucaaa

SEQ ID NO: 3702909 - RNA, 12 nt, Human
ugcauucuagua

SEQ ID NO: 3702910 - RNA, 13 nt, Human
ugcauucuauugc

SEQ ID NO: 3702911 - RNA, 19 nt, Human
ugcauucuauugccuucuu

SEQ ID NO: 3702912 - RNA, 21 nt, Human
ugcauucucccuccuucccuu

SEQ ID NO: 3702913 - RNA, 21 nt, Human
ugcauucugccgugugcccuc

SEQ ID NO: 3702914 - RNA, 16 nt, Human
ugcauucuggauuuua

SEQ ID NO: 3702915 - RNA, 15 nt, Human
ugcauucuuauucau

SEQ ID NO: 3702916 - RNA, 20 nt, Human
ugcauucuucugagcacugu

SEQ ID NO: 3702917 - RNA, 15 nt, Human
ugcauucuucugauc

SEQ ID NO: 3702918 - RNA, 20 nt, Human
ugcauucuugguuggcuggc

SEQ ID NO: 3702919 - RNA, 16 nt, Human
ugcauucuuuuaaaag

SEQ ID NO: 3702920 - RNA, 17 nt, Human
ugcauugaacacaaacu

SEQ ID NO: 3702921 - RNA, 19 nt, Human
ugcauugaacacaaacugu

SEQ ID NO: 3702922 - RNA, 13 nt, Human
ugcauugaauaua

SEQ ID NO: 3702923 - RNA, 15 nt, Human
ugcauugaauauauu

SEQ ID NO: 3702924 - RNA, 17 nt, Human
ugcauugagaacugcau

SEQ ID NO: 3702925 - RNA, 15 nt, Human
ugcauugcuagauaa

SEQ ID NO: 3702926 - RNA, 18 nt, Human
ugcauugcuagauaaaag

SEQ ID NO: 3702927 - RNA, 19 nt, Human
ugcauugcuuuuuuuuccu

SEQ ID NO: 3702928 - RNA, 18 nt, Human
ugcauuggaagaccccac

SEQ ID NO: 3702929 - RNA, 18 nt, Human
ugcauugggauuuuagaa

SEQ ID NO: 3702930 - RNA, 17 nt, Human
ugcauugugauuggccu

SEQ ID NO: 3702931 - RNA, 19 nt, Human
ugcauuguuagcacuaggc

SEQ ID NO: 3702932 - RNA, 17 nt, Human
ugcauuuaaaacagaca

SEQ ID NO: 3702933 - RNA, 22 nt, Human
ugcauuuaaaacagacacuggc

SEQ ID NO: 3702934 - RNA, 20 nt, Human
ugcauuuaaaagauacaguu

SEQ ID NO: 3702935 - RNA, 16 nt, Human
ugcauuuaaauacagu

SEQ ID NO: 3702936 - RNA, 21 nt, Human
ugcauuuagggaguauucuaa

SEQ ID NO: 3702937 - RNA, 19 nt, Human
ugcauuucugaauagaaau

SEQ ID NO: 3702938 - RNA, 19 nt, Human
ugcauuugaaaauuuugau

SEQ ID NO: 3702939 - RNA, 13 nt, Human
ugcauuugagguc

SEQ ID NO: 3702940 - RNA, 18 nt, Human
ugcauuugaggucuguuc

SEQ ID NO: 3702941 - RNA, 19 nt, Human
ugcauuugaggucuguucu

SEQ ID NO: 3702942 - RNA, 20 nt, Human
ugcauuugaggucuguucuu

SEQ ID NO: 3702943 - RNA, 14 nt, Human
ugcauuugggucca

SEQ ID NO: 3702944 - RNA, 18 nt, Human
ugcauuuggguccaggag

SEQ ID NO: 3702945 - RNA, 21 nt, Human
ugcauuuggugguuucagaaa

SEQ ID NO: 3702946 - RNA, 23 nt, Human
ugcauuuggugguuucagaaaug

SEQ ID NO: 3702947 - RNA, 18 nt, Human
ugcauuugugcuagaaau

SEQ ID NO: 3702948 - RNA, 19 nt, Human
ugcauuuguuuauguaauu

SEQ ID NO: 3702949 - RNA, 14 nt, Human
ugcauuuuaccauc

SEQ ID NO: 3702950 - RNA, 16 nt, Human
ugcauuuucugaaacu

SEQ ID NO: 3702951 - RNA, 19 nt, Human
ugcauuuucugaaacuaau

SEQ ID NO: 3702952 - RNA, 23 nt, Human
ugcauuuucugaaacuaaugaaa

SEQ ID NO: 3702953 - RNA, 15 nt, Human
ugcauuuugcuauug

SEQ ID NO: 3702954 - RNA, 13 nt, Human
ugcauuuuucugc

SEQ ID NO: 3702955 - RNA, 17 nt, Human
ugcauuuuucugcagaa

SEQ ID NO: 3702956 - RNA, 14 nt, Human
ugcauuuuuguaaa

SEQ ID NO: 3702957 - RNA, 19 nt, Human
ugcauuuuugugaaaugaa

SEQ ID NO: 3702958 - RNA, 15 nt, Human
ugcauuuuuuaaaac

SEQ ID NO: 3702959 - RNA, 17 nt, Human
ugcauuuuuuaaaacaa

SEQ ID NO: 3702960 - RNA, 20 nt, Human
ugccaaaaaaagacagggcu

SEQ ID NO: 3702961 - RNA, 19 nt, Human
ugccaaaaaggauacauaa

SEQ ID NO: 3702962 - RNA, 21 nt, Human
ugccaaaaagugaaauaaugu

SEQ ID NO: 3702963 - RNA, 19 nt, Human
ugccaaaacccagcugcac

SEQ ID NO: 3702964 - RNA, 20 nt, Human
ugccaaaacccagcugcacc

SEQ ID NO: 3702965 - RNA, 21 nt, Human
ugccaaaacccagcugcaccc

SEQ ID NO: 3702966 - RNA, 22 nt, Human
ugccaaaacccagcugcacccc

SEQ ID NO: 3702967 - RNA, 17 nt, Human
ugccaaaauucauuucu

SEQ ID NO: 3702968 - RNA, 20 nt, Human
ugccaaacauuaauguugau

SEQ ID NO: 3702969 - RNA, 17 nt, Human
ugccaaagaagcagacc

SEQ ID NO: 3702970 - RNA, 14 nt, Human
ugccaaagaucacu

SEQ ID NO: 3702971 - RNA, 19 nt, Human
ugccaaaggaugugauaua

SEQ ID NO: 3702972 - RNA, 11 nt, Human
ugccaaaguac

SEQ ID NO: 3702973 - RNA, 17 nt, Human
ugccaaauuaaaaaaga

SEQ ID NO: 3702974 - RNA, 18 nt, Human
ugccaaauuaaaaaagau

SEQ ID NO: 3702975 - RNA, 19 nt, Human
ugccaaauuaaaaaagaua

SEQ ID NO: 3702976 - RNA, 23 nt, Human
ugccaaauuuuggccaaaguguu

SEQ ID NO: 3702977 - RNA, 23 nt, Human
ugccaacaagaaugcauugauau

SEQ ID NO: 3702978 - RNA, 15 nt, Human
ugccaacaauccuag

SEQ ID NO: 3702979 - RNA, 19 nt, Human
ugccaaccuguaauaaaua

SEQ ID NO: 3702980 - RNA, 20 nt, Human
ugccaaccuguaauaaauau

SEQ ID NO: 3702981 - RNA, 16 nt, Human
ugccaacuguggcugg

SEQ ID NO: 3702982 - RNA, 17 nt, Human
ugccaacuguggcuggu

SEQ ID NO: 3702983 - RNA, 23 nt, Human
ugccaacuguuguaacuaggcuc

SEQ ID NO: 3702984 - RNA, 12 nt, Human
ugccaagacaaa

SEQ ID NO: 3702985 - RNA, 17 nt, Human
ugccaagacugcugugg

SEQ ID NO: 3702986 - RNA, 21 nt, Human
ugccaagacugcuguggccag

SEQ ID NO: 3702987 - RNA, 22 nt, Human
ugccaagacugcuguggccagg

SEQ ID NO: 3702988 - RNA, 19 nt, Human
ugccaagagcccgucugcu

SEQ ID NO: 3702989 - RNA, 14 nt, Human
ugccaagcacugug

SEQ ID NO: 3702990 - RNA, 15 nt, Human
ugccaagcacugugc

SEQ ID NO: 3702991 - RNA, 22 nt, Human
ugccaagcucaggaccaggcaa

SEQ ID NO: 3702992 - RNA, 13 nt, Human
ugccaagcuccaa

SEQ ID NO: 3702993 - RNA, 16 nt, Human
ugccaagcuccaagcc

SEQ ID NO: 3702994 - RNA, 17 nt, Human
ugccaaggcagaggccu

SEQ ID NO: 3702995 - RNA, 19 nt, Human
ugccaaggcagaggccugg

SEQ ID NO: 3702996 - RNA, 21 nt, Human
ugccaaggccagaguggccug

SEQ ID NO: 3702997 - RNA, 17 nt, Human
ugccaagggcauaaauu

SEQ ID NO: 3702998 - RNA, 21 nt, Human
guacuugugaaacacagcugu

SEQ ID NO: 3702999 - RNA, 15 nt, Human
guacuuguggacaca

SEQ ID NO: 3703000 - RNA, 12 nt, Human
guacuuguuugc

SEQ ID NO: 3703001 - RNA, 22 nt, Human
guacuuucauauuuuaaacaga

SEQ ID NO: 3703002 - RNA, 11 nt, Human
guacuuucugu

SEQ ID NO: 3703003 - RNA, 14 nt, Human
guacuuucuguuaa

SEQ ID NO: 3703004 - RNA, 18 nt, Human
guacuuucuguuaaaaug

SEQ ID NO: 3703005 - RNA, 19 nt, Human
guacuuucuguuaaaaugc

SEQ ID NO: 3703006 - RNA, 16 nt, Human
guacuuugauucacau

SEQ ID NO: 3703007 - RNA, 17 nt, Human
guacuuugauucacaug

SEQ ID NO: 3703008 - RNA, 23 nt, Human
guacuuugauucacauguuuuca

SEQ ID NO: 3703009 - RNA, 23 nt, Human
guacuuugucuaagaaacauugg

SEQ ID NO: 3703010 - RNA, 14 nt, Human
guacuuuuaagacu

SEQ ID NO: 3703011 - RNA, 16 nt, Human
guacuuuucauucucu

SEQ ID NO: 3703012 - RNA, 20 nt, Human
guacuuuucauucucuuuua

SEQ ID NO: 3703013 - RNA, 12 nt, Human
guacuuuuuggc

SEQ ID NO: 3703014 - RNA, 20 nt, Human
guacuuuuuuaaauauuuuc

SEQ ID NO: 3703015 - RNA, 20 nt, Human
guagaaaaaaaaacagcucu

SEQ ID NO: 3703016 - RNA, 13 nt, Human
guagaaaagcuau

SEQ ID NO: 3703017 - RNA, 17 nt, Human
guagaaaaugugacccu

SEQ ID NO: 3703018 - RNA, 15 nt, Human
guagaaacugcaggg

SEQ ID NO: 3703019 - RNA, 18 nt, Human
guagaaaugguuguauua

SEQ ID NO: 3703020 - RNA, 15 nt, Human
guagaacacuaauuc

SEQ ID NO: 3703021 - RNA, 16 nt, Human
guagaacgccagggac

SEQ ID NO: 3703022 - RNA, 18 nt, Human
guagaacguaaccacgga

SEQ ID NO: 3703023 - RNA, 19 nt, Human
guagaacguaaccacggaa

SEQ ID NO: 3703024 - RNA, 22 nt, Human
guagaacucacucugggcugua

SEQ ID NO: 3703025 - RNA, 17 nt, Human
guagaacuuacuauuca

SEQ ID NO: 3703026 - RNA, 15 nt, Human
guagaagcauuccuu

SEQ ID NO: 3703027 - RNA, 22 nt, Human
guagaagcauuccuucuuugau

SEQ ID NO: 3703028 - RNA, 18 nt, Human
guagaagggaaagcccau

SEQ ID NO: 3703029 - RNA, 19 nt, Human
guagaaguuuuuguacugu

SEQ ID NO: 3703030 - RNA, 23 nt, Human
guagaaugaccuuguaauguaac

SEQ ID NO: 3703031 - RNA, 14 nt, Human
guagaauguauugu

SEQ ID NO: 3703032 - RNA, 18 nt, Human
guagaauguauuguaccu

SEQ ID NO: 3703033 - RNA, 18 nt, Human
guagacaaucauuguuuu

SEQ ID NO: 3703034 - RNA, 18 nt, Human
guagacacgcucuucuau

SEQ ID NO: 3703035 - RNA, 19 nt, Human
guagacacgcucuucuauu

SEQ ID NO: 3703036 - RNA, 18 nt, Human
guagacaguauauaacua

SEQ ID NO: 3703037 - RNA, 16 nt, Human
guagacaguuggguuu

SEQ ID NO: 3703038 - RNA, 13 nt, Human
guagacaguuuug

SEQ ID NO: 3703039 - RNA, 17 nt, Human
guagaccccuggcuggu

SEQ ID NO: 3703040 - RNA, 17 nt, Human
guagaccuagggaggac

SEQ ID NO: 3703041 - RNA, 21 nt, Human
guagaccugugagaaaacguu

SEQ ID NO: 3703042 - RNA, 21 nt, Human
guagaccuuguuacuucugag

SEQ ID NO: 3703043 - RNA, 22 nt, Human
guagaccuuguuacuucugagg

SEQ ID NO: 3703044 - RNA, 21 nt, Human
guagacggcucaguauagaua

SEQ ID NO: 3703045 - RNA, 17 nt, Human
guagacuauauacaugu

SEQ ID NO: 3703046 - RNA, 18 nt, Human
guagacuggccugaacca

SEQ ID NO: 3703047 - RNA, 12 nt, Human
guagacuuuuau

SEQ ID NO: 3703048 - RNA, 13 nt, Human
guagagaaacacu

SEQ ID NO: 3703049 - RNA, 18 nt, Human
guagagaccgagccucug

SEQ ID NO: 3703050 - RNA, 10 nt, Human
guagagccag

SEQ ID NO: 3703051 - RNA, 12 nt, Human
guagagccagcu

SEQ ID NO: 3703052 - RNA, 16 nt, Human
guagagcggagaaagg

SEQ ID NO: 3703053 - RNA, 18 nt, Human
guagagcggagaaaggaa

SEQ ID NO: 3703054 - RNA, 15 nt, Human
guagaggagaaacug

SEQ ID NO: 3703055 - RNA, 16 nt, Human
guagagguauaauugu

SEQ ID NO: 3703056 - RNA, 19 nt, Human
guagagguauaauugugug

SEQ ID NO: 3703057 - RNA, 14 nt, Human
guagagguuuuguu

SEQ ID NO: 3703058 - RNA, 12 nt, Human
guagagucugag

SEQ ID NO: 3703059 - RNA, 12 nt, Human
guagaguuaaga

SEQ ID NO: 3703060 - RNA, 18 nt, Human
guagaguuaagaagcugu

SEQ ID NO: 3703061 - RNA, 14 nt, Human
guagaguugcugag

SEQ ID NO: 3703062 - RNA, 21 nt, Human
guagauaaacucagaaauuua

SEQ ID NO: 3703063 - RNA, 16 nt, Human
guagauaauuucaggg

SEQ ID NO: 3703064 - RNA, 15 nt, Human
guagauacaaucagc

SEQ ID NO: 3703065 - RNA, 20 nt, Human
guagauacaaucagcugcuu

SEQ ID NO: 3703066 - RNA, 17 nt, Human
guagauauguauucuuu

SEQ ID NO: 3703067 - RNA, 18 nt, Human
guagauauguauucuuuu

SEQ ID NO: 3703068 - RNA, 17 nt, Human
guagauauuacuuuauc

SEQ ID NO: 3703069 - RNA, 18 nt, Human
guagauauuacuuuauca

SEQ ID NO: 3703070 - RNA, 13 nt, Human
guagauauuuggc

SEQ ID NO: 3703071 - RNA, 19 nt, Human
guagauauuuuuucugaau

SEQ ID NO: 3703072 - RNA, 21 nt, Human
guagaugaaaaagcauguaca

SEQ ID NO: 3703073 - RNA, 20 nt, Human
guagaugcauuuggguccag

SEQ ID NO: 3703074 - RNA, 22 nt, Human
guagaugcauuuggguccagga

SEQ ID NO: 3703075 - RNA, 17 nt, Human
guagaugggagggaggc

SEQ ID NO: 3703076 - RNA, 17 nt, Human
guagauguaugcacaca

SEQ ID NO: 3703077 - RNA, 23 nt, Human
guagauguucagauugcuuugau

SEQ ID NO: 3703078 - RNA, 14 nt, Human
guagauucagguaa

SEQ ID NO: 3703079 - RNA, 15 nt, Human
guagauugauuguau

SEQ ID NO: 3703080 - RNA, 14 nt, Human
guagauugcuucug

SEQ ID NO: 3703081 - RNA, 15 nt, Human
guagauuuguuuugu

SEQ ID NO: 3703082 - RNA, 16 nt, Human
guagauuuguuuugug

SEQ ID NO: 3703083 - RNA, 14 nt, Human
guagauuuuccaaa

SEQ ID NO: 3703084 - RNA, 16 nt, Human
guagauuuucuuuaaa

SEQ ID NO: 3703085 - RNA, 23 nt, Human
guagcaaacccugucaaacauua

SEQ ID NO: 3703086 - RNA, 17 nt, Human
guagcaaaugagacagc

SEQ ID NO: 3703087 - RNA, 21 nt, Human
guagcaaguucuagagaagag

SEQ ID NO: 3703088 - RNA, 14 nt, Human
guagcacaggcuga

SEQ ID NO: 3703089 - RNA, 16 nt, Human
guagcacauguaugcu

SEQ ID NO: 3703090 - RNA, 13 nt, Human
guagcacuuacug

SEQ ID NO: 3703091 - RNA, 11 nt, Human
guagcagcugg

SEQ ID NO: 3703092 - RNA, 15 nt, Human
guagcaguagaugca

SEQ ID NO: 3703093 - RNA, 23 nt, Human
guagcagugugaaguacaauaau

SEQ ID NO: 3703094 - RNA, 12 nt, Human
guagcaugagag

SEQ ID NO: 3703095 - RNA, 13 nt, Human
guagcauuucauu

SEQ ID NO: 3703096 - RNA, 17 nt, Human
guagcauuucauucuuc

SEQ ID NO: 3703097 - RNA, 19 nt, Human
guagcauuucauucuucuc

SEQ ID NO: 3703098 - RNA, 14 nt, Human
guagccaaagguuc

SEQ ID NO: 3703099 - RNA, 13 nt, Human
guagccacaccag

SEQ ID NO: 3703100 - RNA, 15 nt, Human
guagccacaccagga

SEQ ID NO: 3703101 - RNA, 15 nt, Human
guagccagccggggc

SEQ ID NO: 3703102 - RNA, 21 nt, Human
guagccaggucccccugcagc

SEQ ID NO: 3703103 - RNA, 23 nt, Human
guagccaucccaugaacacacug

SEQ ID NO: 3703104 - RNA, 14 nt, Human
guagccccaagaag

SEQ ID NO: 3703105 - RNA, 17 nt, Human
guagcccccuggccucu

SEQ ID NO: 3703106 - RNA, 15 nt, Human
guagcccgccugcca

SEQ ID NO: 3703107 - RNA, 17 nt, Human
guagcccgccugccagu

SEQ ID NO: 3703108 - RNA, 14 nt, Human
guagcccucccacu

SEQ ID NO: 3703109 - RNA, 15 nt, Human
guagcccuggccaga

SEQ ID NO: 3703110 - RNA, 21 nt, Human
guagccucgccgucugugaau

SEQ ID NO: 3703111 - RNA, 22 nt, Human
guagccuggauauuauucuugu

SEQ ID NO: 3703112 - RNA, 23 nt, Human
guagccuugcccggauucuggga

SEQ ID NO: 3703113 - RNA, 17 nt, Human
guagcgucuuucuuuuu

SEQ ID NO: 3703114 - RNA, 14 nt, Human
guagcuacagagaa

SEQ ID NO: 3703115 - RNA, 18 nt, Human
guagcuacagagaaacca

SEQ ID NO: 3703116 - RNA, 14 nt, Human
guagcuagaggaac

SEQ ID NO: 3703117 - RNA, 13 nt, Human
guagcuauaucua

SEQ ID NO: 3703118 - RNA, 12 nt, Human
guagcucaggug

SEQ ID NO: 3703119 - RNA, 22 nt, Human
guagcucuaggagggcuggcaa

SEQ ID NO: 3703120 - RNA, 14 nt, Human
guagcugccacuug

SEQ ID NO: 3703121 - RNA, 16 nt, Human
guagcugccccuggcu

SEQ ID NO: 3703122 - RNA, 12 nt, Human
guagcugggacu

SEQ ID NO: 3703123 - RNA, 12 nt, Human
guagcuggggcu

SEQ ID NO: 3703124 - RNA, 23 nt, Human
guagcuggggcuuugauguuccu

SEQ ID NO: 3703125 - RNA, 13 nt, Human
guagcugugaccu

SEQ ID NO: 3703126 - RNA, 16 nt, Human
guagcuuaagaaaaaa

SEQ ID NO: 3703127 - RNA, 22 nt, Human
guagcuuaccagaagcuuccau

SEQ ID NO: 3703128 - RNA, 14 nt, Human
guagcuucagucau

SEQ ID NO: 3703129 - RNA, 14 nt, Human
guagcuugcucccu

SEQ ID NO: 3703130 - RNA, 19 nt, Human
guagcuugcucccuguguc

SEQ ID NO: 3703131 - RNA, 12 nt, Human
guagcuuugcuc

SEQ ID NO: 3703132 - RNA, 14 nt, Human
guaggaaaaaaaua

SEQ ID NO: 3703133 - RNA, 19 nt, Human
guaggaauauuauauuugg

SEQ ID NO: 3703134 - RNA, 21 nt, Human
guaggacaaggugcaggcagg

SEQ ID NO: 3703135 - RNA, 15 nt, Human
guaggacuguagaaa

SEQ ID NO: 3703136 - RNA, 20 nt, Human
guaggagacuguuuggaaau

SEQ ID NO: 3703137 - RNA, 22 nt, Human
guaggagcugccuuggcucaga

SEQ ID NO: 3703138 - RNA, 23 nt, Human
guaggagcugccuuggcucagac

SEQ ID NO: 3703139 - RNA, 14 nt, Human
guaggagguuugga

SEQ ID NO: 3703140 - RNA, 15 nt, Human
guaggaucuaaggcu

SEQ ID NO: 3703141 - RNA, 12 nt, Human
guaggcagacac

SEQ ID NO: 3703142 - RNA, 22 nt, Human
guaggcagacacagggacuuga

SEQ ID NO: 3703143 - RNA, 15 nt, Human
guaggcagagccuuu

SEQ ID NO: 3703144 - RNA, 18 nt, Human
guaggcaggauuggggaa

SEQ ID NO: 3703145 - RNA, 22 nt, Human
guaggccaagguguccuacaga

SEQ ID NO: 3703146 - RNA, 23 nt, Human
guaggccaagguguccuacagaa

SEQ ID NO: 3703147 - RNA, 19 nt, Human
guaggccuuuuaacauuuu

SEQ ID NO: 3703148 - RNA, 13 nt, Human
guaggcuacagag

SEQ ID NO: 3703149 - RNA, 12 nt, Human
ugagcccuggcu

SEQ ID NO: 3703150 - RNA, 13 nt, Human
ugagcccuggcug

SEQ ID NO: 3703151 - RNA, 19 nt, Human
ugagccgagaucacgccac

SEQ ID NO: 3703152 - RNA, 17 nt, Human
ugagccgcaucuucucc

SEQ ID NO: 3703153 - RNA, 23 nt, Human
ugagccgcaucuucuccaucugg

SEQ ID NO: 3703154 - RNA, 14 nt, Human
ugagccgcccaagg

SEQ ID NO: 3703155 - RNA, 17 nt, Human
ugagccgcccaaggccu

SEQ ID NO: 3703156 - RNA, 19 nt, Human
ugagccggucaggcacaca

SEQ ID NO: 3703157 - RNA, 19 nt, Human
ugagccgugaacugugcau

SEQ ID NO: 3703158 - RNA, 13 nt, Human
ugagccuaaaaau

SEQ ID NO: 3703159 - RNA, 14 nt, Human
ugagccucacagca

SEQ ID NO: 3703160 - RNA, 16 nt, Human
ugagccucacagcagu

SEQ ID NO: 3703161 - RNA, 15 nt, Human
ugagccucagcaucc

SEQ ID NO: 3703162 - RNA, 18 nt, Human
ugagccucagcauccugg

SEQ ID NO: 3703163 - RNA, 13 nt, Human
ugagccucucacc

SEQ ID NO: 3703164 - RNA, 15 nt, Human
ugagccucucaccug

SEQ ID NO: 3703165 - RNA, 16 nt, Human
ugagccucugcucccc

SEQ ID NO: 3703166 - RNA, 17 nt, Human
ugagccucugcucccca

SEQ ID NO: 3703167 - RNA, 15 nt, Human
ugagccugcagggaa

SEQ ID NO: 3703168 - RNA, 11 nt, Human
ugagccuggca

SEQ ID NO: 3703169 - RNA, 16 nt, Human
ugagccuggccagccu

SEQ ID NO: 3703170 - RNA, 17 nt, Human
ugagccuggcuggcaca

SEQ ID NO: 3703171 - RNA, 14 nt, Human
ugagccuucagucu

SEQ ID NO: 3703172 - RNA, 18 nt, Human
ugagccuucgugcccccc

SEQ ID NO: 3703173 - RNA, 19 nt, Human
ugagccuucgugccccccc

SEQ ID NO: 3703174 - RNA, 14 nt, Human
ugagccuugaacuu

SEQ ID NO: 3703175 - RNA, 18 nt, Human
ugagccuugaacuuugac

SEQ ID NO: 3703176 - RNA, 21 nt, Human
ugagcgaguggagucugccac

SEQ ID NO: 3703177 - RNA, 23 nt, Human
ugagcgaguggagucugccaccc

SEQ ID NO: 3703178 - RNA, 12 nt, Human
ugagcgccagga

SEQ ID NO: 3703179 - RNA, 18 nt, Human
ugagcgccugugcacaca

SEQ ID NO: 3703180 - RNA, 13 nt, Human
ugagcgcuugggc

SEQ ID NO: 3703181 - RNA, 13 nt, Human
ugagcgggaggca

SEQ ID NO: 3703182 - RNA, 14 nt, Human
ugagcgggaggcag

SEQ ID NO: 3703183 - RNA, 21 nt, Human
ugagcuaaauaaagauauugu

SEQ ID NO: 3703184 - RNA, 18 nt, Human
ugagcuacgccugccucc

SEQ ID NO: 3703185 - RNA, 22 nt, Human
ugagcuagaagcuggaggacua

SEQ ID NO: 3703186 - RNA, 16 nt, Human
ugagcuaggaagaguc

SEQ ID NO: 3703187 - RNA, 14 nt, Human
ugagcuauguauua

SEQ ID NO: 3703188 - RNA, 15 nt, Human
ugagcuauuaaaacu

SEQ ID NO: 3703189 - RNA, 15 nt, Human
ugagcuauuucaucu

SEQ ID NO: 3703190 - RNA, 19 nt, Human
ugagcucacaaggcagcaa

SEQ ID NO: 3703191 - RNA, 17 nt, Human
ugagcucagacccccac

SEQ ID NO: 3703192 - RNA, 18 nt, Human
ugagcucagacccccacu

SEQ ID NO: 3703193 - RNA, 20 nt, Human
ugagcucagacccccacucu

SEQ ID NO: 3703194 - RNA, 15 nt, Human
ugagcucauguagca

SEQ ID NO: 3703195 - RNA, 12 nt, Human
ugagcuccagac

SEQ ID NO: 3703196 - RNA, 14 nt, Human
ugagcuccagaccc

SEQ ID NO: 3703197 - RNA, 16 nt, Human
ugagcuccagaccccc

SEQ ID NO: 3703198 - RNA, 19 nt, Human
ugagcuccagacccccagc

SEQ ID NO: 3703199 - RNA, 20 nt, Human
ugagcuccagacccccagca

SEQ ID NO: 3703200 - RNA, 15 nt, Human
ugagcucccacaagc

SEQ ID NO: 3703201 - RNA, 21 nt, Human
ugagcucccacuucugccaga

SEQ ID NO: 3703202 - RNA, 21 nt, Human
ugagcucccaggugcagccag

SEQ ID NO: 3703203 - RNA, 23 nt, Human
ugagcucccaggugcagccagag

SEQ ID NO: 3703204 - RNA, 21 nt, Human
ugagcuccccaaaaaccucac

SEQ ID NO: 3703205 - RNA, 23 nt, Human
ugagcuccccaaaaaccucaccc

SEQ ID NO: 3703206 - RNA, 15 nt, Human
ugagcuccccaccac

SEQ ID NO: 3703207 - RNA, 22 nt, Human
ugagcuccccaccaccccagcu

SEQ ID NO: 3703208 - RNA, 23 nt, Human
ugagcuccccaccaccccagcug

SEQ ID NO: 3703209 - RNA, 13 nt, Human
ugagcuccucugg

SEQ ID NO: 3703210 - RNA, 14 nt, Human
ugagcuccucuggg

SEQ ID NO: 3703211 - RNA, 18 nt, Human
ugagcuccucugggcagg

SEQ ID NO: 3703212 - RNA, 21 nt, Human
ugagcuccuguccccugcuac

SEQ ID NO: 3703213 - RNA, 19 nt, Human
ugagcuccuuaaggcucuu

SEQ ID NO: 3703214 - RNA, 14 nt, Human
ugagcucgguggac

SEQ ID NO: 3703215 - RNA, 17 nt, Human
ugagcucuacccagggc

SEQ ID NO: 3703216 - RNA, 19 nt, Human
ugagcucuacccagggccu

SEQ ID NO: 3703217 - RNA, 12 nt, Human
ugagcucucugu

SEQ ID NO: 3703218 - RNA, 17 nt, Human
ugagcucugaaaucuuc

SEQ ID NO: 3703219 - RNA, 15 nt, Human
ugagcucugagaggc

SEQ ID NO: 3703220 - RNA, 17 nt, Human
ugagcucugagaggccc

SEQ ID NO: 3703221 - RNA, 19 nt, Human
ugagcucugagaggcccug

SEQ ID NO: 3703222 - RNA, 22 nt, Human
ugagcucugagaggcccuggau

SEQ ID NO: 3703223 - RNA, 23 nt, Human
ugagcucugagaggcccuggauc

SEQ ID NO: 3703224 - RNA, 23 nt, Human
ugagcucugcauuugucuauucu

SEQ ID NO: 3703225 - RNA, 12 nt, Human
ugagcucuucau

SEQ ID NO: 3703226 - RNA, 16 nt, Human
ugagcucuucauguuu

SEQ ID NO: 3703227 - RNA, 23 nt, Human
ugagcucuugugaggaaagucau

SEQ ID NO: 3703228 - RNA, 15 nt, Human
ugagcucuuugcacu

SEQ ID NO: 3703229 - RNA, 16 nt, Human
ugagcucuuugcacua

SEQ ID NO: 3703230 - RNA, 17 nt, Human
ugagcugaaaugcugca

SEQ ID NO: 3703231 - RNA, 18 nt, Human
ugagcugaaaugcugcau

SEQ ID NO: 3703232 - RNA, 18 nt, Human
ugagcugaaggugaaaca

SEQ ID NO: 3703233 - RNA, 15 nt, Human
ugagcugaccagccg

SEQ ID NO: 3703234 - RNA, 24 nt, Human
ugagcugaccagccgugagcaugu

SEQ ID NO: 3703235 - RNA, 19 nt, Human
ugagcugagaucgugccgu

SEQ ID NO: 3703236 - RNA, 13 nt, Human
ugagcugagcagg

SEQ ID NO: 3703237 - RNA, 14 nt, Human
ugagcugagcaggg

SEQ ID NO: 3703238 - RNA, 13 nt, Human
ugagcugagccag

SEQ ID NO: 3703239 - RNA, 14 nt, Human
ugagcugagccagg

SEQ ID NO: 3703240 - RNA, 15 nt, Human
ugagcugauauaaau

SEQ ID NO: 3703241 - RNA, 15 nt, Human
ugagcugcagaaacg

SEQ ID NO: 3703242 - RNA, 20 nt, Human
ugagcugccuguaacuugag

SEQ ID NO: 3703243 - RNA, 19 nt, Human
ugagcugcuuuuuuugaaa

SEQ ID NO: 3703244 - RNA, 12 nt, Human
ugagcuggaagg

SEQ ID NO: 3703245 - RNA, 21 nt, Human
ugagcuggaaggagugagagg

SEQ ID NO: 3703246 - RNA, 22 nt, Human
ugagcuggggaccugguacccu

SEQ ID NO: 3703247 - RNA, 20 nt, Human
ugagcugugcacaaaguggc

SEQ ID NO: 3703248 - RNA, 20 nt, Human
ugagcuuaaaauacaagacu

SEQ ID NO: 3703249 - RNA, 22 nt, Human
ugagcuuaaaauacaagacugc

SEQ ID NO: 3703250 - RNA, 15 nt, Human
ugagcuuaucaugcu

SEQ ID NO: 3703251 - RNA, 20 nt, Human
ugagcuuggcagcugaacua

SEQ ID NO: 3703252 - RNA, 16 nt, Human
ugagcuuggccagaag

SEQ ID NO: 3703253 - RNA, 12 nt, Human
ugagcuuuaaaa

SEQ ID NO: 3703254 - RNA, 22 nt, Human
ugagcuuucugaacagcuggug

SEQ ID NO: 3703255 - RNA, 23 nt, Human
ugagcuuugcauguuccacuaac

SEQ ID NO: 3703256 - RNA, 14 nt, Human
ugagcuuugcugcu

SEQ ID NO: 3703257 - RNA, 15 nt, Human
ugagcuuugcugcua

SEQ ID NO: 3703258 - RNA, 16 nt, Human
ugagcuuugcugcuac

SEQ ID NO: 3703259 - RNA, 23 nt, Human
ugagcuuuggacacacacagcuu

SEQ ID NO: 3703260 - RNA, 21 nt, Human
ugagcuuuggacgcacacagc

SEQ ID NO: 3703261 - RNA, 22 nt, Human
ugagcuuuggacgcacacagcu

SEQ ID NO: 3703262 - RNA, 23 nt, Human
ugagcuuuggacgcacacagcuu

SEQ ID NO: 3703263 - RNA, 15 nt, Human
ugaggaaaaauaugu

SEQ ID NO: 3703264 - RNA, 18 nt, Human
ugaggaaagcaagaauca

SEQ ID NO: 3703265 - RNA, 22 nt, Human
ugaggaaagucauuggcuuuau

SEQ ID NO: 3703266 - RNA, 15 nt, Human
ugaggaaaucaaagu

SEQ ID NO: 3703267 - RNA, 17 nt, Human
ugaggaacuguacagaa

SEQ ID NO: 3703268 - RNA, 19 nt, Human
ugaggaagaacggggcucu

SEQ ID NO: 3703269 - RNA, 23 nt, Human
ugaggaagaacggggcucuucuc

SEQ ID NO: 3703270 - RNA, 23 nt, Human
ugaggaagaugggggcaagaaga

SEQ ID NO: 3703271 - RNA, 15 nt, Human
ugaggaagcaaaagc

SEQ ID NO: 3703272 - RNA, 18 nt, Human
ugaggaagccgcuggggc

SEQ ID NO: 3703273 - RNA, 21 nt, Human
ugaggaagccgcuggggccag

SEQ ID NO: 3703274 - RNA, 23 nt, Human
ugaggaaggaggggaagcugcag

SEQ ID NO: 3703275 - RNA, 17 nt, Human
ugaggaauaauuauuua

SEQ ID NO: 3703276 - RNA, 22 nt, Human
ugaggaauccagacccggcugc

SEQ ID NO: 3703277 - RNA, 15 nt, Human
ugaggaauucuguau

SEQ ID NO: 3703278 - RNA, 16 nt, Human
ugaggaauucuguaua

SEQ ID NO: 3703279 - RNA, 22 nt, Human
ugaggaauuucaccuguaaacc

SEQ ID NO: 3703280 - RNA, 19 nt, Human
ugaggaauuucuguucuuc

SEQ ID NO: 3703281 - RNA, 13 nt, Human
ugaggaauuuucu

SEQ ID NO: 3703282 - RNA, 20 nt, Human
ugaggacaaauugagacagu

SEQ ID NO: 3703283 - RNA, 12 nt, Human
ugaggacacaug

SEQ ID NO: 3703284 - RNA, 15 nt, Human
ugaggacagcugucc

SEQ ID NO: 3703285 - RNA, 18 nt, Human
ugaggacagcuguccucu

SEQ ID NO: 3703286 - RNA, 21 nt, Human
ugaggacauguuuuuguuuuc

SEQ ID NO: 3703287 - RNA, 19 nt, Human
ugaggagcagcaggagggg

SEQ ID NO: 3703288 - RNA, 13 nt, Human
ugaggagcugcug

SEQ ID NO: 3703289 - RNA, 12 nt, Human
ugaggagcuggg

SEQ ID NO: 3703290 - RNA, 20 nt, Human
ugaggagcuggggaucccuc

SEQ ID NO: 3703291 - RNA, 13 nt, Human
ugaggaggaggcu

SEQ ID NO: 3703292 - RNA, 14 nt, Human
ugaggaggccucca

SEQ ID NO: 3703293 - RNA, 21 nt, Human
ugaggaggccuugggcucugc

SEQ ID NO: 3703294 - RNA, 16 nt, Human
ugaggaggggagggua

SEQ ID NO: 3703295 - RNA, 22 nt, Human
ugaggaggggaggguaaauaaa

SEQ ID NO: 3703296 - RNA, 20 nt, Human
ugaggagggugggggaggga

SEQ ID NO: 3703297 - RNA, 14 nt, Human
ugaggagucugagg

SEQ ID NO: 3703298 - RNA, 21 nt, Human
ugccaagggcuuuguuuugca

SEQ ID NO: 3703299 - RNA, 17 nt, Human
ugccaaguccagguccu

SEQ ID NO: 3703300 - RNA, 20 nt, Human
ugccaaguccagguccuggu

SEQ ID NO: 3703301 - RNA, 21 nt, Human
ugccaauauuaaaucugcugg

SEQ ID NO: 3703302 - RNA, 16 nt, Human
ugccaaucucaacacc

SEQ ID NO: 3703303 - RNA, 21 nt, Human
ugccaaugaggucugaaaugg

SEQ ID NO: 3703304 - RNA, 18 nt, Human
ugccaauggaaccuccuu

SEQ ID NO: 3703305 - RNA, 19 nt, Human
ugccaauggaaccuccuuu

SEQ ID NO: 3703306 - RNA, 18 nt, Human
ugccaaugggagcucaug

SEQ ID NO: 3703307 - RNA, 15 nt, Human
ugccaauuagcaauu

SEQ ID NO: 3703308 - RNA, 13 nt, Human
ugccaauuugcac

SEQ ID NO: 3703309 - RNA, 18 nt, Human
ugccaauuuuugccuuca

SEQ ID NO: 3703310 - RNA, 19 nt, Human
ugccaauuuuugccuucau

SEQ ID NO: 3703311 - RNA, 21 nt, Human
ugccaauuuuugccuucauua

SEQ ID NO: 3703312 - RNA, 18 nt, Human
ugccacaacgccuggcua

SEQ ID NO: 3703313 - RNA, 19 nt, Human
ugccacaaggacuuccugu

SEQ ID NO: 3703314 - RNA, 23 nt, Human
ugccacaaugcaguucugagcac

SEQ ID NO: 3703315 - RNA, 22 nt, Human
ugccacaccaagcugugccacc

SEQ ID NO: 3703316 - RNA, 21 nt, Human
ugccacaccccccaccccuag

SEQ ID NO: 3703317 - RNA, 14 nt, Human
ugccacacuucagg

SEQ ID NO: 3703318 - RNA, 22 nt, Human
ugccacacuucaggcucuucuc

SEQ ID NO: 3703319 - RNA, 17 nt, Human
ugccacagaguguagcc

SEQ ID NO: 3703320 - RNA, 18 nt, Human
ugccacagaguguagcca

SEQ ID NO: 3703321 - RNA, 21 nt, Human
ugccacagccuccccugccag

SEQ ID NO: 3703322 - RNA, 22 nt, Human
ugccacagccuccccugccagg

SEQ ID NO: 3703323 - RNA, 12 nt, Human
ugccacagcucu

SEQ ID NO: 3703324 - RNA, 13 nt, Human
ugccacaggacac

SEQ ID NO: 3703325 - RNA, 12 nt, Human
ugccacaggccu

SEQ ID NO: 3703326 - RNA, 14 nt, Human
ugccacaggccucc

SEQ ID NO: 3703327 - RNA, 20 nt, Human
ugccacaggcuuagggacag

SEQ ID NO: 3703328 - RNA, 17 nt, Human
ugccacaguauauuuuu

SEQ ID NO: 3703329 - RNA, 16 nt, Human
ugccacaucuuaaacu

SEQ ID NO: 3703330 - RNA, 15 nt, Human
ugccacauuagaacu

SEQ ID NO: 3703331 - RNA, 17 nt, Human
ugccacauuagaacuuc

SEQ ID NO: 3703332 - RNA, 22 nt, Human
ugccacauuuauuuuuauaucu

SEQ ID NO: 3703333 - RNA, 17 nt, Human
ugccaccaacuggcccu

SEQ ID NO: 3703334 - RNA, 19 nt, Human
ugccaccaacuggcccucu

SEQ ID NO: 3703335 - RNA, 20 nt, Human
ugccaccaacuggcccucuu

SEQ ID NO: 3703336 - RNA, 15 nt, Human
ugccaccaccucugu

SEQ ID NO: 3703337 - RNA, 16 nt, Human
ugcccgcacacccuca

SEQ ID NO: 3703338 - RNA, 18 nt, Human
ugauaacaaccuggagac

SEQ ID NO: 3703339 - RNA, 20 nt, Human
ugauaacaauguuuuaacaa

SEQ ID NO: 3703340 - RNA, 16 nt, Human
ugauaacagaacuuuu

SEQ ID NO: 3703341 - RNA, 23 nt, Human
ugauaacagcuaccaugacaacc

SEQ ID NO: 3703342 - RNA, 20 nt, Human
ugauaacagggauugauuuu

SEQ ID NO: 3703343 - RNA, 21 nt, Human
ugauaacagggauugauuuua

SEQ ID NO: 3703344 - RNA, 22 nt, Human
ugauaacagggauugauuuuaa

SEQ ID NO: 3703345 - RNA, 16 nt, Human
ugauaacuggaaacuu

SEQ ID NO: 3703346 - RNA, 15 nt, Human
ugauaacuuugcuug

SEQ ID NO: 3703347 - RNA, 20 nt, Human
ugauaagaaccuuuugagug

SEQ ID NO: 3703348 - RNA, 19 nt, Human
ugauaagagggcacacacu

SEQ ID NO: 3703349 - RNA, 22 nt, Human
ugauaagaucuuuuauuuugcc

SEQ ID NO: 3703350 - RNA, 18 nt, Human
ugauaagggaaaagauaa

SEQ ID NO: 3703351 - RNA, 19 nt, Human
ugauaagggacugauguuu

SEQ ID NO: 3703352 - RNA, 12 nt, Human
ugauaaguaaau

SEQ ID NO: 3703353 - RNA, 13 nt, Human
ugauaaguucaua

SEQ ID NO: 3703354 - RNA, 19 nt, Human
ugauaaguucauacauugu

SEQ ID NO: 3703355 - RNA, 14 nt, Human
ugauaauaaauuga

SEQ ID NO: 3703356 - RNA, 23 nt, Human
ugauaauaaauugaaauugugaa

SEQ ID NO: 3703357 - RNA, 16 nt, Human
ugauaauaauauuguu

SEQ ID NO: 3703358 - RNA, 17 nt, Human
ugauaauaauauuguuu

SEQ ID NO: 3703359 - RNA, 15 nt, Human
ugauaauagaagagu

SEQ ID NO: 3703360 - RNA, 14 nt, Human
ugauaauagauucu

SEQ ID NO: 3703361 - RNA, 17 nt, Human
ugauaauauauuguguu

SEQ ID NO: 3703362 - RNA, 20 nt, Human
ugauaaugaacagaacauag

SEQ ID NO: 3703363 - RNA, 14 nt, Human
ugauaauguuaaau

SEQ ID NO: 3703364 - RNA, 17 nt, Human
ugauaauguuaaauuug

SEQ ID NO: 3703365 - RNA, 18 nt, Human
ugauaauguuaaauuugu

SEQ ID NO: 3703366 - RNA, 16 nt, Human
ugauaauugcauucau

SEQ ID NO: 3703367 - RNA, 18 nt, Human
ugauaauuuaagagcuaa

SEQ ID NO: 3703368 - RNA, 13 nt, Human
ugauaauuuuaaa

SEQ ID NO: 3703369 - RNA, 21 nt, Human
ugauaauuuuccuuuaauaug

SEQ ID NO: 3703370 - RNA, 20 nt, Human
ugauacaaauugcagacugu

SEQ ID NO: 3703371 - RNA, 15 nt, Human
ugauacaaugcugug

SEQ ID NO: 3703372 - RNA, 17 nt, Human
ugauacauaacuaaauu

SEQ ID NO: 3703373 - RNA, 19 nt, Human
ugauacauaacuaaauuug

SEQ ID NO: 3703374 - RNA, 22 nt, Human
ugauacauaacuaaauuugaua

SEQ ID NO: 3703375 - RNA, 13 nt, Human
ugauacauuccca

SEQ ID NO: 3703376 - RNA, 18 nt, Human
ugauacauuuuuuaagcu

SEQ ID NO: 3703377 - RNA, 18 nt, Human
ugauaccagaagggaaag

SEQ ID NO: 3703378 - RNA, 21 nt, Human
ugauaccagaagggaaagcuu

SEQ ID NO: 3703379 - RNA, 13 nt, Human
ugauacccagagc

SEQ ID NO: 3703380 - RNA, 16 nt, Human
ugauaccccuggggaa

SEQ ID NO: 3703381 - RNA, 17 nt, Human
ugauacuaaaaguucuu

SEQ ID NO: 3703382 - RNA, 16 nt, Human
ugauacuaauaaacua

SEQ ID NO: 3703383 - RNA, 17 nt, Human
ugauacuacaguuuguu

SEQ ID NO: 3703384 - RNA, 18 nt, Human
ugauacuguugcacgugu

SEQ ID NO: 3703385 - RNA, 17 nt, Human
ugauacuucgacacugu

SEQ ID NO: 3703386 - RNA, 21 nt, Human
ugauacuucgacacuguucuu

SEQ ID NO: 3703387 - RNA, 21 nt, Human
ugauacuuuugacaacaaauu

SEQ ID NO: 3703388 - RNA, 21 nt, Human
ugauagaaggcuauggggaua

SEQ ID NO: 3703389 - RNA, 18 nt, Human
ugauagacaauugaggua

SEQ ID NO: 3703390 - RNA, 21 nt, Human
ugauagacacauaugaggggg

SEQ ID NO: 3703391 - RNA, 17 nt, Human
ugauagauuugaccucc

SEQ ID NO: 3703392 - RNA, 16 nt, Human
ugauagcacagacccu

SEQ ID NO: 3703393 - RNA, 18 nt, Human
ugauagcacagacccugc

SEQ ID NO: 3703394 - RNA, 20 nt, Human
ugauagcacagacccugccc

SEQ ID NO: 3703395 - RNA, 23 nt, Human
ugauagcacagacccugcccugu

SEQ ID NO: 3703396 - RNA, 15 nt, Human
ugauagcacuuucua

SEQ ID NO: 3703397 - RNA, 15 nt, Human
ugauagcauaugaca

SEQ ID NO: 3703398 - RNA, 23 nt, Human
ugauagcauaugacaaauguuuc

SEQ ID NO: 3703399 - RNA, 16 nt, Human
ugauagcauuguaagc

SEQ ID NO: 3703400 - RNA, 16 nt, Human
ugauagcguuggaauu

SEQ ID NO: 3703401 - RNA, 21 nt, Human
ugauagcuaacauuuuaaaua

SEQ ID NO: 3703402 - RNA, 22 nt, Human
ugauagcucuuuggcagucuau

SEQ ID NO: 3703403 - RNA, 14 nt, Human
ugauagcuuuauuu

SEQ ID NO: 3703404 - RNA, 22 nt, Human
ugauaggaagaggggaagcaga

SEQ ID NO: 3703405 - RNA, 21 nt, Human
ugauaggaaugugaaagcacg

SEQ ID NO: 3703406 - RNA, 17 nt, Human
ugauagggauacaugcu

SEQ ID NO: 3703407 - RNA, 19 nt, Human
ugauaggguuugugacagg

SEQ ID NO: 3703408 - RNA, 17 nt, Human
ugauaguuacuguugug

SEQ ID NO: 3703409 - RNA, 14 nt, Human
ugauaguugugugu

SEQ ID NO: 3703410 - RNA, 14 nt, Human
ugauauaaauaaaa

SEQ ID NO: 3703411 - RNA, 19 nt, Human
ugauauaaaucagauucuu

SEQ ID NO: 3703412 - RNA, 13 nt, Human
ugauauaaaugca

SEQ ID NO: 3703413 - RNA, 16 nt, Human
ugauauaacuuuagaa

SEQ ID NO: 3703414 - RNA, 15 nt, Human
ugauauaccaaauua

SEQ ID NO: 3703415 - RNA, 16 nt, Human
ugauauaccaaauuaa

SEQ ID NO: 3703416 - RNA, 22 nt, Human
ugauauagaacagugcuugcca

SEQ ID NO: 3703417 - RNA, 21 nt, Human
ugauauaucucaaauuguaau

SEQ ID NO: 3703418 - RNA, 13 nt, Human
ugauauauuuuac

SEQ ID NO: 3703419 - RNA, 14 nt, Human
ugauauauuuucca

SEQ ID NO: 3703420 - RNA, 19 nt, Human
ugauaucacagucuaauuu

SEQ ID NO: 3703421 - RNA, 21 nt, Human
ugauauccauucuuucugaua

SEQ ID NO: 3703422 - RNA, 17 nt, Human
ugauaucuauaaaauag

SEQ ID NO: 3703423 - RNA, 15 nt, Human
ugauaugaaaaauau

SEQ ID NO: 3703424 - RNA, 12 nt, Human
ugauaugaguau

SEQ ID NO: 3703425 - RNA, 18 nt, Human
ugauaugaguauacaaua

SEQ ID NO: 3703426 - RNA, 15 nt, Human
ugauaugauuuaaaa

SEQ ID NO: 3703427 - RNA, 15 nt, Human
ugauaugcacaaugu

SEQ ID NO: 3703428 - RNA, 18 nt, Human
ugauaugcauauuuguuu

SEQ ID NO: 3703429 - RNA, 19 nt, Human
ugauaugcauuuccugcug

SEQ ID NO: 3703430 - RNA, 17 nt, Human
ugauauggcagaagaca

SEQ ID NO: 3703431 - RNA, 20 nt, Human
ugauauggcagaagacacca

SEQ ID NO: 3703432 - RNA, 14 nt, Human
ugauaugggacuga

SEQ ID NO: 3703433 - RNA, 18 nt, Human
ugauauggguaguauuuu

SEQ ID NO: 3703434 - RNA, 21 nt, Human
ugauauguaaacauaauucuu

SEQ ID NO: 3703435 - RNA, 15 nt, Human
ugauauguauuguuu

SEQ ID NO: 3703436 - RNA, 16 nt, Human
ugauaugugaacaguu

SEQ ID NO: 3703437 - RNA, 19 nt, Human
ugauauguugguagauucu

SEQ ID NO: 3703438 - RNA, 16 nt, Human
ugauauuaaaggaguu

SEQ ID NO: 3703439 - RNA, 23 nt, Human
ugauauuaaaggaguuaagagua

SEQ ID NO: 3703440 - RNA, 20 nt, Human
ugauauucaaauggacaaac

SEQ ID NO: 3703441 - RNA, 16 nt, Human
ugauauuccaugaaug

SEQ ID NO: 3703442 - RNA, 20 nt, Human
ugauauuccaugaauguauc

SEQ ID NO: 3703443 - RNA, 21 nt, Human
ugauauuccccccacuuaaga

SEQ ID NO: 3703444 - RNA, 13 nt, Human
ugauauugugaac

SEQ ID NO: 3703445 - RNA, 13 nt, Human
ugauauuucagaa

SEQ ID NO: 3703446 - RNA, 14 nt, Human
ugauauuucucuag

SEQ ID NO: 3703447 - RNA, 15 nt, Human
ugauauuuguauuua

SEQ ID NO: 3703448 - RNA, 21 nt, Human
ugauauuuguauuuauucuuu

SEQ ID NO: 3703449 - RNA, 13 nt, Human
ugauauuuuaaaa

SEQ ID NO: 3703450 - RNA, 21 nt, Human
ugauauuuucaacgcagcccu

SEQ ID NO: 3703451 - RNA, 23 nt, Human
ugauauuuucaacgcagcccugc

SEQ ID NO: 3703452 - RNA, 15 nt, Human
ugauauuuucucuag

SEQ ID NO: 3703453 - RNA, 15 nt, Human
ugauauuuuuuuaag

SEQ ID NO: 3703454 - RNA, 20 nt, Human
ugauauuuuuuuaagucuuu

SEQ ID NO: 3703455 - RNA, 17 nt, Human
ugaucaaaaauaaugca

SEQ ID NO: 3703456 - RNA, 19 nt, Human
ugaucaaaaucaauuaaaa

SEQ ID NO: 3703457 - RNA, 15 nt, Human
ugaucaaauguuuaa

SEQ ID NO: 3703458 - RNA, 17 nt, Human
ugaucaaauguuuaauc

SEQ ID NO: 3703459 - RNA, 22 nt, Human
ugaucaaauguuuaaucauaua

SEQ ID NO: 3703460 - RNA, 15 nt, Human
ugaucaaauucauuu

SEQ ID NO: 3703461 - RNA, 22 nt, Human
ugaucaaauucauuuuuuucac

SEQ ID NO: 3703462 - RNA, 14 nt, Human
ugaucaacaucuuu

SEQ ID NO: 3703463 - RNA, 12 nt, Human
ugaucaaggccu

SEQ ID NO: 3703464 - RNA, 15 nt, Human
ugaucaauaaaaugu

SEQ ID NO: 3703465 - RNA, 16 nt, Human
ugaucaauaaaaugug

SEQ ID NO: 3703466 - RNA, 18 nt, Human
ugaucaauaaaaugugau

SEQ ID NO: 3703467 - RNA, 19 nt, Human
ugaucaaugacagagccuu

SEQ ID NO: 3703468 - RNA, 16 nt, Human
ugaucaauuaaaugua

SEQ ID NO: 3703469 - RNA, 22 nt, Human
ugaucaauuauaguuucugagg

SEQ ID NO: 3703470 - RNA, 16 nt, Human
ugaucacacuauuuua

SEQ ID NO: 3703471 - RNA, 15 nt, Human
ugaucacacucuggg

SEQ ID NO: 3703472 - RNA, 17 nt, Human
ugaucaccgacugaaaa

SEQ ID NO: 3703473 - RNA, 14 nt, Human
ugaucacgccuggc

SEQ ID NO: 3703474 - RNA, 15 nt, Human
ugaucacgccuggcu

SEQ ID NO: 3703475 - RNA, 18 nt, Human
ugaucacggcucacugca

SEQ ID NO: 3703476 - RNA, 21 nt, Human
ugaucacggcucacugcagcc

SEQ ID NO: 3703477 - RNA, 22 nt, Human
ugaucacggcucacugcagccu

SEQ ID NO: 3703478 - RNA, 14 nt, Human
ugaucacugaaaua

SEQ ID NO: 3703479 - RNA, 21 nt, Human
ugaucagaccaaacagugcug

SEQ ID NO: 3703480 - RNA, 22 nt, Human
ugaucagagccgugguccuuug

SEQ ID NO: 3703481 - RNA, 23 nt, Human
ugaucagagccgugguccuuugg

SEQ ID NO: 3703482 - RNA, 17 nt, Human
ugaucagcuguuuguca

SEQ ID NO: 3703483 - RNA, 20 nt, Human
ugaucaggaccuccaagcca

SEQ ID NO: 3703484 - RNA, 22 nt, Human
ugaucaguaguuugcauuucag

SEQ ID NO: 3703485 - RNA, 20 nt, Human
ugaucaguuaagaaauuuca

SEQ ID NO: 3703486 - RNA, 21 nt, Human
ugaucaguuuuuucaccugga

SEQ ID NO: 3703487 - RNA, 22 nt, Human
ugcccgcacacccucacucugc

SEQ ID NO: 3703488 - RNA, 15 nt, Human
ugcccgcacagcagc

SEQ ID NO: 3703489 - RNA, 17 nt, Human
ugcccgcacagcagccu

SEQ ID NO: 3703490 - RNA, 20 nt, Human
ugcccgcacagcagccugcu

SEQ ID NO: 3703491 - RNA, 12 nt, Human
ugcccgccugcc

SEQ ID NO: 3703492 - RNA, 14 nt, Human
ugcccgccugccca

SEQ ID NO: 3703493 - RNA, 23 nt, Human
ugcccggagauuggacggccuga

SEQ ID NO: 3703494 - RNA, 22 nt, Human
ugcccggauucugggaggaagc

SEQ ID NO: 3703495 - RNA, 15 nt, Human
ugcccggcgcccucu

SEQ ID NO: 3703496 - RNA, 16 nt, Human
ugcccggcgcccucug

SEQ ID NO: 3703497 - RNA, 18 nt, Human
ugcccggcgcccucuguc

SEQ ID NO: 3703498 - RNA, 12 nt, Human
ugcccggcugcg

SEQ ID NO: 3703499 - RNA, 21 nt, Human
ugcccgggaaggucaccagca

SEQ ID NO: 3703500 - RNA, 17 nt, Human
ugcccgggagcucagga

SEQ ID NO: 3703501 - RNA, 19 nt, Human
ugcccgggcgcggccagcc

SEQ ID NO: 3703502 - RNA, 18 nt, Human
ugcccggggaaaggcaag

SEQ ID NO: 3703503 - RNA, 22 nt, Human
ugcccggggcagcagcagcccu

SEQ ID NO: 3703504 - RNA, 23 nt, Human
ugcccggggcagcugccagagaa

SEQ ID NO: 3703505 - RNA, 18 nt, Human
ugcccgucucucucccau

SEQ ID NO: 3703506 - RNA, 14 nt, Human
ugcccguguacaua

SEQ ID NO: 3703507 - RNA, 20 nt, Human
ugcccuaaaguguauuuuuu

SEQ ID NO: 3703508 - RNA, 15 nt, Human
ugcccuaauaaaaag

SEQ ID NO: 3703509 - RNA, 22 nt, Human
ugcccuacagcacccugugguc

SEQ ID NO: 3703510 - RNA, 17 nt, Human
ugcccuagagcacacug

SEQ ID NO: 3703511 - RNA, 14 nt, Human
ugcccuaggcuccg

SEQ ID NO: 3703512 - RNA, 18 nt, Human
ugcccuaggcuccgucag

SEQ ID NO: 3703513 - RNA, 19 nt, Human
ugcccuaucacccaacgcu

SEQ ID NO: 3703514 - RNA, 15 nt, Human
ugcccuaugggccug

SEQ ID NO: 3703515 - RNA, 17 nt, Human
ugcccucauggccccuc

SEQ ID NO: 3703516 - RNA, 19 nt, Human
ugcccucauggccccucug

SEQ ID NO: 3703517 - RNA, 23 nt, Human
ugcccucauggccccucugaccu

SEQ ID NO: 3703518 - RNA, 19 nt, Human
ugcccuccaagaccuucuc

SEQ ID NO: 3703519 - RNA, 20 nt, Human
ugcccuccaagaccuucucc

SEQ ID NO: 3703520 - RNA, 17 nt, Human
ugcccuccacugcccuc

SEQ ID NO: 3703521 - RNA, 18 nt, Human
ugcccuccacugcccucu

SEQ ID NO: 3703522 - RNA, 21 nt, Human
ugcccuccacugcccucuguu

SEQ ID NO: 3703523 - RNA, 18 nt, Human
ugcccuccagcucuuucc

SEQ ID NO: 3703524 - RNA, 19 nt, Human
ugcccuccagcucuuuccu

SEQ ID NO: 3703525 - RNA, 15 nt, Human
ugcccucccaucccg

SEQ ID NO: 3703526 - RNA, 22 nt, Human
ugcccucccccuccucuccacc

SEQ ID NO: 3703527 - RNA, 21 nt, Human
ugcccuccccucucugcaccg

SEQ ID NO: 3703528 - RNA, 15 nt, Human
ugcccuccucuccca

SEQ ID NO: 3703529 - RNA, 20 nt, Human
ugcccuccugugcucagccc

SEQ ID NO: 3703530 - RNA, 22 nt, Human
ugcccuccuuguccacccaccu

SEQ ID NO: 3703531 - RNA, 13 nt, Human
ugcccucgcugcu

SEQ ID NO: 3703532 - RNA, 14 nt, Human
ugcccucgcugcuu

SEQ ID NO: 3703533 - RNA, 17 nt, Human
ugcccucgcugcuucug

SEQ ID NO: 3703534 - RNA, 20 nt, Human
ugcccucguggccagcccgg

SEQ ID NO: 3703535 - RNA, 12 nt, Human
ugcccucuccca

SEQ ID NO: 3703536 - RNA, 15 nt, Human
ugcccucucccaccc

SEQ ID NO: 3703537 - RNA, 16 nt, Human
ugcccucuccccucag

SEQ ID NO: 3703538 - RNA, 16 nt, Human
ugcccucuccugggca

SEQ ID NO: 3703539 - RNA, 18 nt, Human
ugcccucuccugggcagc

SEQ ID NO: 3703540 - RNA, 14 nt, Human
ugcccucugggcuc

SEQ ID NO: 3703541 - RNA, 15 nt, Human
ugcccucugggcucu

SEQ ID NO: 3703542 - RNA, 17 nt, Human
ugcccucugggcucuga

SEQ ID NO: 3703543 - RNA, 19 nt, Human
ugcccugaccaugcauuuu

SEQ ID NO: 3703544 - RNA, 12 nt, Human
ugcccugaccuc

SEQ ID NO: 3703545 - RNA, 13 nt, Human
ugcccugaccucc

SEQ ID NO: 3703546 - RNA, 15 nt, Human
ugcccugaccuccca

SEQ ID NO: 3703547 - RNA, 11 nt, Human
ugcccugagaa

SEQ ID NO: 3703548 - RNA, 15 nt, Human
ugcccugccaccugu

SEQ ID NO: 3703549 - RNA, 14 nt, Human
ugcccugcccaccu

SEQ ID NO: 3703550 - RNA, 15 nt, Human
ugcccugcccaccug

SEQ ID NO: 3703551 - RNA, 16 nt, Human
ugcccugcccaccugg

SEQ ID NO: 3703552 - RNA, 20 nt, Human
ugcccugcccaccuggccuc

SEQ ID NO: 3703553 - RNA, 16 nt, Human
ugcccugcccccacga

SEQ ID NO: 3703554 - RNA, 16 nt, Human
ugcccugcccuagcuc

SEQ ID NO: 3703555 - RNA, 12 nt, Human
ugcccugccuga

SEQ ID NO: 3703556 - RNA, 19 nt, Human
ugcccugcgggucacagga

SEQ ID NO: 3703557 - RNA, 13 nt, Human
ugcccugcucccu

SEQ ID NO: 3703558 - RNA, 21 nt, Human
ugcccugcugccgccucccag

SEQ ID NO: 3703559 - RNA, 14 nt, Human
ugcccugcuguuua

SEQ ID NO: 3703560 - RNA, 16 nt, Human
ugcccugcuuucagau

SEQ ID NO: 3703561 - RNA, 18 nt, Human
ugcccuggaugcccagga

SEQ ID NO: 3703562 - RNA, 16 nt, Human
ugcccuggcccugagg

SEQ ID NO: 3703563 - RNA, 17 nt, Human
ugcccuggcccugaggu

SEQ ID NO: 3703564 - RNA, 12 nt, Human
ugcccuggcugc

SEQ ID NO: 3703565 - RNA, 14 nt, Human
ugcccuggcugcug

SEQ ID NO: 3703566 - RNA, 15 nt, Human
ugcccuggcugcugc

SEQ ID NO: 3703567 - RNA, 16 nt, Human
ugcccuggcugcugcc

SEQ ID NO: 3703568 - RNA, 21 nt, Human
ugcccuggggcugaucucagg

SEQ ID NO: 3703569 - RNA, 22 nt, Human
ugcccuggggcugaucucaggg

SEQ ID NO: 3703570 - RNA, 17 nt, Human
ugcccugguagggcagu

SEQ ID NO: 3703571 - RNA, 17 nt, Human
ugcccuggugcugccac

SEQ ID NO: 3703572 - RNA, 15 nt, Human
ugcccugguggagaa

SEQ ID NO: 3703573 - RNA, 23 nt, Human
ugcccugguggagaaagcacuga

SEQ ID NO: 3703574 - RNA, 17 nt, Human
ugcccugguuucacugg

SEQ ID NO: 3703575 - RNA, 15 nt, Human
ugcccugguuuccug

SEQ ID NO: 3703576 - RNA, 12 nt, Human
ugcccugugcaa

SEQ ID NO: 3703577 - RNA, 18 nt, Human
ugcccugugggcccccaa

SEQ ID NO: 3703578 - RNA, 17 nt, Human
ugcccuguucucuacca

SEQ ID NO: 3703579 - RNA, 19 nt, Human
ugcccuguucucuaccaag

SEQ ID NO: 3703580 - RNA, 19 nt, Human
ugcccuguuguguauagau

SEQ ID NO: 3703581 - RNA, 18 nt, Human
ugcccuuacacuuacugu

SEQ ID NO: 3703582 - RNA, 15 nt, Human
ugcccuucaccccag

SEQ ID NO: 3703583 - RNA, 20 nt, Human
ugcccuucaccccaguggcc

SEQ ID NO: 3703584 - RNA, 16 nt, Human
ugcccuucccuguccc

SEQ ID NO: 3703585 - RNA, 17 nt, Human
ugcccuucccugucccu

SEQ ID NO: 3703586 - RNA, 20 nt, Human
ugcccuucccugucccucua

SEQ ID NO: 3703587 - RNA, 14 nt, Human
ugcccuucuuucua

SEQ ID NO: 3703588 - RNA, 13 nt, Human
ugcccuugucuga

SEQ ID NO: 3703589 - RNA, 21 nt, Human
ugcccuuuacuugucuuucug

SEQ ID NO: 3703590 - RNA, 19 nt, Human
ugcccuuuguccuccugcu

SEQ ID NO: 3703591 - RNA, 17 nt, Human
ugcccuuuuuucugccu

SEQ ID NO: 3703592 - RNA, 18 nt, Human
ugcccuuuuuucugccuc

SEQ ID NO: 3703593 - RNA, 20 nt, Human
ugcccuuuuuucugccuccu

SEQ ID NO: 3703594 - RNA, 13 nt, Human
ugccgaaacugga

SEQ ID NO: 3703595 - RNA, 16 nt, Human
ugccgaaacuggaagu

SEQ ID NO: 3703596 - RNA, 13 nt, Human
ugccgaaccagga

SEQ ID NO: 3703597 - RNA, 15 nt, Human
ugccgacagaaggaa

SEQ ID NO: 3703598 - RNA, 21 nt, Human
ugccgaccagagccccacacg

SEQ ID NO: 3703599 - RNA, 16 nt, Human
ugccgaccgaggcugg

SEQ ID NO: 3703600 - RNA, 21 nt, Human
ugccgaccucguccucccccu

SEQ ID NO: 3703601 - RNA, 22 nt, Human
ugccgagaguccaucagccucc

SEQ ID NO: 3703602 - RNA, 19 nt, Human
ugccgagcaaccguggccc

SEQ ID NO: 3703603 - RNA, 21 nt, Human
ugccgagcaaccguggcccuu

SEQ ID NO: 3703604 - RNA, 18 nt, Human
ugccgauuucuguaaacu

SEQ ID NO: 3703605 - RNA, 12 nt, Human
ugccgcagcccu

SEQ ID NO: 3703606 - RNA, 14 nt, Human
ugccgcagcccugc

SEQ ID NO: 3703607 - RNA, 16 nt, Human
ugccgccucaaugugg

SEQ ID NO: 3703608 - RNA, 13 nt, Human
ugccgccucccag

SEQ ID NO: 3703609 - RNA, 17 nt, Human
ugccgccucccagccug

SEQ ID NO: 3703610 - RNA, 18 nt, Human
ugccgccucccagccugg

SEQ ID NO: 3703611 - RNA, 10 nt, Human
ugccgccugc

SEQ ID NO: 3703612 - RNA, 16 nt, Human
ugccgccugcacuccu

SEQ ID NO: 3703613 - RNA, 16 nt, Human
ugccgcgaugggucag

SEQ ID NO: 3703614 - RNA, 20 nt, Human
ugccgcgucgcccucccagg

SEQ ID NO: 3703615 - RNA, 13 nt, Human
ugccgcugauguu

SEQ ID NO: 3703616 - RNA, 22 nt, Human
ugccgcugauguuuggccguga

SEQ ID NO: 3703617 - RNA, 15 nt, Human
ugccggagaggaaga

SEQ ID NO: 3703618 - RNA, 20 nt, Human
ugccggcucuuuccuugcuc

SEQ ID NO: 3703619 - RNA, 22 nt, Human
ugccgggcugagggccugcugg

SEQ ID NO: 3703620 - RNA, 20 nt, Human
ugccgguaaacacgccugca

SEQ ID NO: 3703621 - RNA, 16 nt, Human
ugccggugagaauaag

SEQ ID NO: 3703622 - RNA, 19 nt, Human
ugccgucagugcugugcug

SEQ ID NO: 3703623 - RNA, 12 nt, Human
ugccgucucugg

SEQ ID NO: 3703624 - RNA, 13 nt, Human
ugccgucucugga

SEQ ID NO: 3703625 - RNA, 23 nt, Human
ugccguggggccgccgccucuuu

SEQ ID NO: 3703626 - RNA, 20 nt, Human
ugccgugugagugugacagg

SEQ ID NO: 3703627 - RNA, 22 nt, Human
ugccguuacuuuucauauuugc

SEQ ID NO: 3703628 - RNA, 20 nt, Human
ugccuaaauaaguuauaaag

SEQ ID NO: 3703629 - RNA, 15 nt, Human
ugccuaaauccauuu

SEQ ID NO: 3703630 - RNA, 22 nt, Human
ugccuaaauccauuuggaaauc

SEQ ID NO: 3703631 - RNA, 21 nt, Human
ugccuaaauuuaaugcugccu

SEQ ID NO: 3703632 - RNA, 14 nt, Human
ugccuaacaccagc

SEQ ID NO: 3703633 - RNA, 13 nt, Human
ugccuaagacaug

SEQ ID NO: 3703634 - RNA, 14 nt, Human
ugccuaaggacuuc

SEQ ID NO: 3703635 - RNA, 16 nt, Human
ugccuaaggacuucuu

SEQ ID NO: 3703636 - RNA, 23 nt, Human
ugccuaaggacuucuuuaauuuu

SEQ ID NO: 3703637 - RNA, 14 nt, Human
gucaacuacacaaa

SEQ ID NO: 3703638 - RNA, 17 nt, Human
gucaacuugagcauguu

SEQ ID NO: 3703639 - RNA, 21 nt, Human
gucaagaauagcauuguaaaa

SEQ ID NO: 3703640 - RNA, 19 nt, Human
gucaagauucagcuagugg

SEQ ID NO: 3703641 - RNA, 14 nt, Human
gucaagauuuugaa

SEQ ID NO: 3703642 - RNA, 16 nt, Human
gucaagcauguauuuu

SEQ ID NO: 3703643 - RNA, 14 nt, Human
gucaagcccaggag

SEQ ID NO: 3703644 - RNA, 17 nt, Human
gucaagcuccuccuccc

SEQ ID NO: 3703645 - RNA, 20 nt, Human
gucaagcuccuccucccugc

SEQ ID NO: 3703646 - RNA, 13 nt, Human
gucaagcugcucu

SEQ ID NO: 3703647 - RNA, 14 nt, Human
gucaagcugcucug

SEQ ID NO: 3703648 - RNA, 17 nt, Human
gucaagcugcucugagc

SEQ ID NO: 3703649 - RNA, 18 nt, Human
gucaagcugcucugagcc

SEQ ID NO: 3703650 - RNA, 19 nt, Human
gucaagcugcucugagcca

SEQ ID NO: 3703651 - RNA, 14 nt, Human
gucaagcugcuugg

SEQ ID NO: 3703652 - RNA, 12 nt, Human
gucaaggccagc

SEQ ID NO: 3703653 - RNA, 16 nt, Human
gucaaggccugcuccc

SEQ ID NO: 3703654 - RNA, 20 nt, Human
gucaaggcuuagacccucau

SEQ ID NO: 3703655 - RNA, 21 nt, Human
gucaagggcagcuuugcucau

SEQ ID NO: 3703656 - RNA, 22 nt, Human
gucaagggcugucauugcacau

SEQ ID NO: 3703657 - RNA, 20 nt, Human
gucaagggcuuacuauuucu

SEQ ID NO: 3703658 - RNA, 22 nt, Human
gucaaguggcaaagcuguucuu

SEQ ID NO: 3703659 - RNA, 11 nt, Human
gucaaguuauu

SEQ ID NO: 3703660 - RNA, 17 nt, Human
gucaaguugugcuuguu

SEQ ID NO: 3703661 - RNA, 15 nt, Human
gucaauaaaauccau

SEQ ID NO: 3703662 - RNA, 17 nt, Human
gucaauaaacaacagcu

SEQ ID NO: 3703663 - RNA, 20 nt, Human
gucaauaaacaacagcugaa

SEQ ID NO: 3703664 - RNA, 14 nt, Human
gucaauauuaaaua

SEQ ID NO: 3703665 - RNA, 17 nt, Human
gucaauauuaaauacag

SEQ ID NO: 3703666 - RNA, 20 nt, Human
gucaauauuaaauacagaca

SEQ ID NO: 3703667 - RNA, 17 nt, Human
gucaaucccaaaaguca

SEQ ID NO: 3703668 - RNA, 18 nt, Human
gucaaugaacaagcauuc

SEQ ID NO: 3703669 - RNA, 15 nt, Human
gucaaugcagccccc

SEQ ID NO: 3703670 - RNA, 13 nt, Human
gucaauggcuugu

SEQ ID NO: 3703671 - RNA, 21 nt, Human
gucaauggcuuguucaucauc

SEQ ID NO: 3703672 - RNA, 22 nt, Human
gucaauuacaggaaguacugga

SEQ ID NO: 3703673 - RNA, 20 nt, Human
gucaauuaccagaaagauaa

SEQ ID NO: 3703674 - RNA, 17 nt, Human
gucacaaagaauuuaaa

SEQ ID NO: 3703675 - RNA, 17 nt, Human
gucacaagagcccagca

SEQ ID NO: 3703676 - RNA, 21 nt, Human
gucacaagccucgaggugccu

SEQ ID NO: 3703677 - RNA, 11 nt, Human
gucacaauaaa

SEQ ID NO: 3703678 - RNA, 19 nt, Human
gucacacauuacaaaguua

SEQ ID NO: 3703679 - RNA, 18 nt, Human
gucacacgcuuuugaauu

SEQ ID NO: 3703680 - RNA, 21 nt, Human
gucacagccuccucugucugc

SEQ ID NO: 3703681 - RNA, 12 nt, Human
gucacagcugua

SEQ ID NO: 3703682 - RNA, 13 nt, Human
gucacaggaagua

SEQ ID NO: 3703683 - RNA, 17 nt, Human
gucacaggacucugccu

SEQ ID NO: 3703684 - RNA, 18 nt, Human
gucacaggacucugccuc

SEQ ID NO: 3703685 - RNA, 12 nt, Human
gucacaggcagg

SEQ ID NO: 3703686 - RNA, 13 nt, Human
gucacaggcaggu

SEQ ID NO: 3703687 - RNA, 11 nt, Human
gucacagggca

SEQ ID NO: 3703688 - RNA, 17 nt, Human
gucacagggcaguaccu

SEQ ID NO: 3703689 - RNA, 13 nt, Human
gucacagggccaa

SEQ ID NO: 3703690 - RNA, 15 nt, Human
gucacagggccaacu

SEQ ID NO: 3703691 - RNA, 14 nt, Human
gucacauaaaacuu

SEQ ID NO: 3703692 - RNA, 14 nt, Human
gucacauacaauua

SEQ ID NO: 3703693 - RNA, 15 nt, Human
gucacaucacaggac

SEQ ID NO: 3703694 - RNA, 17 nt, Human
gucacaucagauaagac

SEQ ID NO: 3703695 - RNA, 21 nt, Human
gucacauggccuaugcacaua

SEQ ID NO: 3703696 - RNA, 23 nt, Human
gucacauggccuaugcacauaug

SEQ ID NO: 3703697 - RNA, 14 nt, Human
gucacauucaggaa

SEQ ID NO: 3703698 - RNA, 17 nt, Human
gucacauugcauucuau

SEQ ID NO: 3703699 - RNA, 18 nt, Human
gucacauugcauucuauu

SEQ ID NO: 3703700 - RNA, 21 nt, Human
gucacauugcauucuauugcc

SEQ ID NO: 3703701 - RNA, 22 nt, Human
gucaccaaaucagcugcuacua

SEQ ID NO: 3703702 - RNA, 17 nt, Human
gucaccaagcucacagu

SEQ ID NO: 3703703 - RNA, 14 nt, Human
gucaccaaggaaac

SEQ ID NO: 3703704 - RNA, 20 nt, Human
gucaccaccaccccuaccac

SEQ ID NO: 3703705 - RNA, 16 nt, Human
gucaccaccuucccag

SEQ ID NO: 3703706 - RNA, 22 nt, Human
gucaccaccuucccagcucucc

SEQ ID NO: 3703707 - RNA, 21 nt, Human
gucaccacgacuggccagggc

SEQ ID NO: 3703708 - RNA, 17 nt, Human
gucaccagacggggcug

SEQ ID NO: 3703709 - RNA, 14 nt, Human
gucaccagcuccuc

SEQ ID NO: 3703710 - RNA, 23 nt, Human
gucaccaggaauguuaaagucag

SEQ ID NO: 3703711 - RNA, 13 nt, Human
gucaccagguacu

SEQ ID NO: 3703712 - RNA, 16 nt, Human
gucaccaucucaggcc

SEQ ID NO: 3703713 - RNA, 17 nt, Human
gucaccaucucaggcca

SEQ ID NO: 3703714 - RNA, 20 nt, Human
gucaccaucucaggccaccu

SEQ ID NO: 3703715 - RNA, 23 nt, Human
gucaccaucuuaagagaugccuc

SEQ ID NO: 3703716 - RNA, 20 nt, Human
gucacccaggcuggacugca

SEQ ID NO: 3703717 - RNA, 16 nt, Human
gucaccccaaguaguc

SEQ ID NO: 3703718 - RNA, 20 nt, Human
gucaccccagagccacacau

SEQ ID NO: 3703719 - RNA, 15 nt, Human
gucaccccggccacc

SEQ ID NO: 3703720 - RNA, 17 nt, Human
gucaccccggccaccug

SEQ ID NO: 3703721 - RNA, 20 nt, Human
gucacccuagcccucucccu

SEQ ID NO: 3703722 - RNA, 16 nt, Human
gucacccuccaccucu

SEQ ID NO: 3703723 - RNA, 16 nt, Human
gucaccggauccuggg

SEQ ID NO: 3703724 - RNA, 21 nt, Human
gucaccguggaccuuccugcc

SEQ ID NO: 3703725 - RNA, 16 nt, Human
gucaccuagcaagcug

SEQ ID NO: 3703726 - RNA, 23 nt, Human
gucaccugcccagaucccagaag

SEQ ID NO: 3703727 - RNA, 13 nt, Human
gucaccugugcuu

SEQ ID NO: 3703728 - RNA, 19 nt, Human
gucaccuuccaggaccccu

SEQ ID NO: 3703729 - RNA, 17 nt, Human
gucaccuuuuaaauccu

SEQ ID NO: 3703730 - RNA, 23 nt, Human
gucacggagggugacggggguga

SEQ ID NO: 3703731 - RNA, 16 nt, Human
gucacguacugucuga

SEQ ID NO: 3703732 - RNA, 23 nt, Human
gucacgugcgcugggcacuuccc

SEQ ID NO: 3703733 - RNA, 14 nt, Human
gucacuaauacaca

SEQ ID NO: 3703734 - RNA, 14 nt, Human
gucacuaccuggcu

SEQ ID NO: 3703735 - RNA, 16 nt, Human
gucacuaccuggcugc

SEQ ID NO: 3703736 - RNA, 14 nt, Human
gucacuacucacag

SEQ ID NO: 3703737 - RNA, 22 nt, Human
gucacuacucacagucucuuua

SEQ ID NO: 3703738 - RNA, 19 nt, Human
gucacuaugggaugagaaa

SEQ ID NO: 3703739 - RNA, 20 nt, Human
gucacuaugggaugagaaaa

SEQ ID NO: 3703740 - RNA, 14 nt, Human
gucacucauugcug

SEQ ID NO: 3703741 - RNA, 18 nt, Human
gucacucauugcugagcc

SEQ ID NO: 3703742 - RNA, 22 nt, Human
gucacucauugcugagccucug

SEQ ID NO: 3703743 - RNA, 18 nt, Human
gucacucccaagcccccu

SEQ ID NO: 3703744 - RNA, 21 nt, Human
gucacuccuggggccucuugg

SEQ ID NO: 3703745 - RNA, 12 nt, Human
gucacucuggca

SEQ ID NO: 3703746 - RNA, 13 nt, Human
gucacucuggcag

SEQ ID NO: 3703747 - RNA, 17 nt, Human
gucacucuggcagcuca

SEQ ID NO: 3703748 - RNA, 18 nt, Human
gucacugagacagcccgg

SEQ ID NO: 3703749 - RNA, 12 nt, Human
gucacugagacc

SEQ ID NO: 3703750 - RNA, 16 nt, Human
gucacugccacuuugc

SEQ ID NO: 3703751 - RNA, 17 nt, Human
gucacugccacuuugca

SEQ ID NO: 3703752 - RNA, 20 nt, Human
gucacugccauggaggcaca

SEQ ID NO: 3703753 - RNA, 23 nt, Human
gucacugccucucccuggcccuc

SEQ ID NO: 3703754 - RNA, 15 nt, Human
gucacugcucuggac

SEQ ID NO: 3703755 - RNA, 12 nt, Human
gucacuggaaag

SEQ ID NO: 3703756 - RNA, 20 nt, Human
gucacuggaaaggggagagc

SEQ ID NO: 3703757 - RNA, 19 nt, Human
gucacuggaccacugggca

SEQ ID NO: 3703758 - RNA, 18 nt, Human
gucacuggagguugaagc

SEQ ID NO: 3703759 - RNA, 20 nt, Human
gucacuggagguugaagcca

SEQ ID NO: 3703760 - RNA, 19 nt, Human
gucacuggcugccuccacu

SEQ ID NO: 3703761 - RNA, 17 nt, Human
gucacuggggcccaaga

SEQ ID NO: 3703762 - RNA, 21 nt, Human
gucacugguagaccaaaauaa

SEQ ID NO: 3703763 - RNA, 14 nt, Human
gucacugucccucc

SEQ ID NO: 3703764 - RNA, 16 nt, Human
gucacugucccuccug

SEQ ID NO: 3703765 - RNA, 17 nt, Human
gucacugucccuccugg

SEQ ID NO: 3703766 - RNA, 14 nt, Human
gucacugugguccu

SEQ ID NO: 3703767 - RNA, 17 nt, Human
gucacuguuuccugggc

SEQ ID NO: 3703768 - RNA, 14 nt, Human
gucacuuaaaaugu

SEQ ID NO: 3703769 - RNA, 18 nt, Human
gucacuucgcgugcccuc

SEQ ID NO: 3703770 - RNA, 17 nt, Human
gucacuucuucugucca

SEQ ID NO: 3703771 - RNA, 24 nt, Human
gucacuugugcuuugcucuugucc

SEQ ID NO: 3703772 - RNA, 16 nt, Human
gucacuuugcucuggg

SEQ ID NO: 3703773 - RNA, 17 nt, Human
gucacuuugcucugggu

SEQ ID NO: 3703774 - RNA, 11 nt, Human
gucacuuuuag

SEQ ID NO: 3703775 - RNA, 17 nt, Human
gucacuuuuugaggcaa

SEQ ID NO: 3703776 - RNA, 15 nt, Human
gucagaaacaggacc

SEQ ID NO: 3703777 - RNA, 15 nt, Human
gucagaaacuaaaac

SEQ ID NO: 3703778 - RNA, 13 nt, Human
gucagaaacuguu

SEQ ID NO: 3703779 - RNA, 16 nt, Human
gucagaacagcagacu

SEQ ID NO: 3703780 - RNA, 16 nt, Human
gucagaacccugccau

SEQ ID NO: 3703781 - RNA, 21 nt, Human
gucagaaguuucugccgcagc

SEQ ID NO: 3703782 - RNA, 13 nt, Human
gucagaauagaaa

SEQ ID NO: 3703783 - RNA, 17 nt, Human
gucagaauagaaauuag

SEQ ID NO: 3703784 - RNA, 13 nt, Human
gucagacacagau

SEQ ID NO: 3703785 - RNA, 13 nt, Human
gucagacauaaag

SEQ ID NO: 3703786 - RNA, 14 nt, Human
gucagacccuggag

SEQ ID NO: 3703787 - RNA, 15 nt, Human
gucagacccuggagg

SEQ ID NO: 3703788 - RNA, 18 nt, Human
ugaucauaagugaauuua

SEQ ID NO: 3703789 - RNA, 24 nt, Human
ugaucauccacugugccaugugcc

SEQ ID NO: 3703790 - RNA, 15 nt, Human
ugaucaucgccagag

SEQ ID NO: 3703791 - RNA, 16 nt, Human
ugaucaucgccagagg

SEQ ID NO: 3703792 - RNA, 16 nt, Human
ugaucaugcauuguug

SEQ ID NO: 3703793 - RNA, 17 nt, Human
ugaucaugcauuguuga

SEQ ID NO: 3703794 - RNA, 23 nt, Human
ugaucaugcauuguugagguggu

SEQ ID NO: 3703795 - RNA, 17 nt, Human
ugaucauguacuuuuua

SEQ ID NO: 3703796 - RNA, 18 nt, Human
ugaucauguuuaugagaa

SEQ ID NO: 3703797 - RNA, 19 nt, Human
ugaucauucaccaguacau

SEQ ID NO: 3703798 - RNA, 13 nt, Human
ugaucauuuauuu

SEQ ID NO: 3703799 - RNA, 20 nt, Human
ugaucauuuauuuuaagcac

SEQ ID NO: 3703800 - RNA, 22 nt, Human
ugaucauuuuccccccacucuc

SEQ ID NO: 3703801 - RNA, 14 nt, Human
ugauccaacuaaug

SEQ ID NO: 3703802 - RNA, 13 nt, Human
ugauccaagcugg

SEQ ID NO: 3703803 - RNA, 15 nt, Human
ugauccaagcugguc

SEQ ID NO: 3703804 - RNA, 21 nt, Human
ugauccacccaacccuaucuc

SEQ ID NO: 3703805 - RNA, 21 nt, Human
ugauccacccaccucagccuc

SEQ ID NO: 3703806 - RNA, 22 nt, Human
ugauccacccaccucagccucc

SEQ ID NO: 3703807 - RNA, 20 nt, Human
ugauccacucgccuucaucu

SEQ ID NO: 3703808 - RNA, 19 nt, Human
ugauccagcagauuauuca

SEQ ID NO: 3703809 - RNA, 21 nt, Human
ugauccagcagauuauucacu

SEQ ID NO: 3703810 - RNA, 15 nt, Human
ugauccagcccugag

SEQ ID NO: 3703811 - RNA, 17 nt, Human
ugauccagcccugaguu

SEQ ID NO: 3703812 - RNA, 22 nt, Human
ugauccaguuuuguuuggacca

SEQ ID NO: 3703813 - RNA, 12 nt, Human
ugauccauguaa

SEQ ID NO: 3703814 - RNA, 15 nt, Human
ugauccauuucuaau

SEQ ID NO: 3703815 - RNA, 21 nt, Human
ugauccauuucuaauuaugua

SEQ ID NO: 3703816 - RNA, 19 nt, Human
ugauccccacgccacagcc

SEQ ID NO: 3703817 - RNA, 19 nt, Human
ugaucccuguguugucucu

SEQ ID NO: 3703818 - RNA, 23 nt, Human
ugaucccuuccaccugcucugcu

SEQ ID NO: 3703819 - RNA, 22 nt, Human
ugauccguuccauugcaagcuu

SEQ ID NO: 3703820 - RNA, 13 nt, Human
ugauccuccaaca

SEQ ID NO: 3703821 - RNA, 17 nt, Human
ugauccuccaacuucau

SEQ ID NO: 3703822 - RNA, 15 nt, Human
ugauccucccaccuc

SEQ ID NO: 3703823 - RNA, 18 nt, Human
ugauccucccaccucagc

SEQ ID NO: 3703824 - RNA, 22 nt, Human
ugauccucccaccucagccucc

SEQ ID NO: 3703825 - RNA, 14 nt, Human
ugauccucucaccu

SEQ ID NO: 3703826 - RNA, 21 nt, Human
ugauccugcggagaacacccu

SEQ ID NO: 3703827 - RNA, 16 nt, Human
ugauccuggaggccca

SEQ ID NO: 3703828 - RNA, 20 nt, Human
ugauccuggaggcccaguuc

SEQ ID NO: 3703829 - RNA, 21 nt, Human
ugauccuguauucagacagau

SEQ ID NO: 3703830 - RNA, 15 nt, Human
ugauccuuacaaguu

SEQ ID NO: 3703831 - RNA, 18 nt, Human
ugauccuuuuggagucag

SEQ ID NO: 3703832 - RNA, 17 nt, Human
ugaucgaaaaaauaauu

SEQ ID NO: 3703833 - RNA, 17 nt, Human
ugaucgcacaaccugca

SEQ ID NO: 3703834 - RNA, 14 nt, Human
ugaucgccuucccc

SEQ ID NO: 3703835 - RNA, 17 nt, Human
ugaucgccuuucccagg

SEQ ID NO: 3703836 - RNA, 19 nt, Human
ugaucgugacgcugaauaa

SEQ ID NO: 3703837 - RNA, 21 nt, Human
ugaucgugacgcugaauaaau

SEQ ID NO: 3703838 - RNA, 15 nt, Human
ugaucuaggaagacu

SEQ ID NO: 3703839 - RNA, 19 nt, Human
ugaucuaggaagacuuugg

SEQ ID NO: 3703840 - RNA, 21 nt, Human
ugaucuaggaagacuuuggaa

SEQ ID NO: 3703841 - RNA, 14 nt, Human
ugaucuagguuuaa

SEQ ID NO: 3703842 - RNA, 20 nt, Human
ugaucuagguuuaacucaga

SEQ ID NO: 3703843 - RNA, 16 nt, Human
ugaucucaaacuauga

SEQ ID NO: 3703844 - RNA, 18 nt, Human
ugaucucagcucacugca

SEQ ID NO: 3703845 - RNA, 14 nt, Human
ugaucucagggaag

SEQ ID NO: 3703846 - RNA, 14 nt, Human
ugaucucccugccg

SEQ ID NO: 3703847 - RNA, 15 nt, Human
ugaucucccugccgc

SEQ ID NO: 3703848 - RNA, 16 nt, Human
ugaucucccugccgcc

SEQ ID NO: 3703849 - RNA, 17 nt, Human
ugaucucccugccgccu

SEQ ID NO: 3703850 - RNA, 18 nt, Human
ugaucuccguggcuuugg

SEQ ID NO: 3703851 - RNA, 18 nt, Human
ugaucucggcucacugca

SEQ ID NO: 3703852 - RNA, 13 nt, Human
ugaucucuuccug

SEQ ID NO: 3703853 - RNA, 14 nt, Human
ugaucucuuccugu

SEQ ID NO: 3703854 - RNA, 23 nt, Human
ugaucucuucuuuuggcuuccau

SEQ ID NO: 3703855 - RNA, 17 nt, Human
ugaucugagucccagga

SEQ ID NO: 3703856 - RNA, 20 nt, Human
ugaucugaugcaagcaagaa

SEQ ID NO: 3703857 - RNA, 21 nt, Human
ugaucugaugcaagcaagaaa

SEQ ID NO: 3703858 - RNA, 13 nt, Human
ugaucuggaaccc

SEQ ID NO: 3703859 - RNA, 15 nt, Human
ugaucuguauauaca

SEQ ID NO: 3703860 - RNA, 22 nt, Human
ugaucuguauauacaauaacau

SEQ ID NO: 3703861 - RNA, 17 nt, Human
ugaucugucuguggcaa

SEQ ID NO: 3703862 - RNA, 16 nt, Human
ugaucugucuuguaau

SEQ ID NO: 3703863 - RNA, 13 nt, Human
ugaucuguugcaa

SEQ ID NO: 3703864 - RNA, 18 nt, Human
ugaucuuaauauauuuga

SEQ ID NO: 3703865 - RNA, 19 nt, Human
ugaucuuauuuuucuaaac

SEQ ID NO: 3703866 - RNA, 20 nt, Human
ugaucuuauuuuucuaaacg

SEQ ID NO: 3703867 - RNA, 14 nt, Human
ugaucuucaacaaa

SEQ ID NO: 3703868 - RNA, 12 nt, Human
ugaucuucacua

SEQ ID NO: 3703869 - RNA, 20 nt, Human
ugaucuuccucugcuaaauu

SEQ ID NO: 3703870 - RNA, 18 nt, Human
ugaucuugcucuaucuca

SEQ ID NO: 3703871 - RNA, 15 nt, Human
ugaucuugugacaua

SEQ ID NO: 3703872 - RNA, 14 nt, Human
ugaucuuuaaaaua

SEQ ID NO: 3703873 - RNA, 19 nt, Human
ugaucuuucuuuccuuucu

SEQ ID NO: 3703874 - RNA, 21 nt, Human
ugaucuuugcagacaggcaag

SEQ ID NO: 3703875 - RNA, 23 nt, Human
ugaucuuugcagacaggcaagca

SEQ ID NO: 3703876 - RNA, 21 nt, Human
ugaucuuuuaaaguguuacuu

SEQ ID NO: 3703877 - RNA, 16 nt, Human
ugaugaaaagcuuugu

SEQ ID NO: 3703878 - RNA, 18 nt, Human
ugaugaaaauauuuaaag

SEQ ID NO: 3703879 - RNA, 18 nt, Human
ugaugaacucuuaaucaa

SEQ ID NO: 3703880 - RNA, 13 nt, Human
ugaugaacuuucu

SEQ ID NO: 3703881 - RNA, 14 nt, Human
ugaugaacuuucuc

SEQ ID NO: 3703882 - RNA, 23 nt, Human
ugaugaacuuucucuucauacuu

SEQ ID NO: 3703883 - RNA, 12 nt, Human
ugaugaagaaaa

SEQ ID NO: 3703884 - RNA, 11 nt, Human
ugaugaagaag

SEQ ID NO: 3703885 - RNA, 15 nt, Human
ugaugaagcaaggaa

SEQ ID NO: 3703886 - RNA, 23 nt, Human
ugaugaagcaaggaagauauaca

SEQ ID NO: 3703887 - RNA, 24 nt, Human
ugaugaagcaaggaagauauacau

SEQ ID NO: 3703888 - RNA, 14 nt, Human
ugaugaauacugua

SEQ ID NO: 3703889 - RNA, 13 nt, Human
ugaugaaucuugc

SEQ ID NO: 3703890 - RNA, 20 nt, Human
ugaugacaaaaaauguuuua

SEQ ID NO: 3703891 - RNA, 19 nt, Human
ugaugacaacuggaauagu

SEQ ID NO: 3703892 - RNA, 18 nt, Human
ugaugacauucccugcua

SEQ ID NO: 3703893 - RNA, 14 nt, Human
ugaugaccaaaguc

SEQ ID NO: 3703894 - RNA, 15 nt, Human
ugaugacccaggcug

SEQ ID NO: 3703895 - RNA, 18 nt, Human
ugaugacccccccagcuu

SEQ ID NO: 3703896 - RNA, 21 nt, Human
ugaugacguacaaguaguucu

SEQ ID NO: 3703897 - RNA, 17 nt, Human
ugaugacuggaauuuuu

SEQ ID NO: 3703898 - RNA, 18 nt, Human
ugaugacuggcauuuuau

SEQ ID NO: 3703899 - RNA, 23 nt, Human
ugaugagaauuucuaaaaagauu

SEQ ID NO: 3703900 - RNA, 15 nt, Human
ugaugagcuccucuu

SEQ ID NO: 3703901 - RNA, 16 nt, Human
ugaugagcuccucuuc

SEQ ID NO: 3703902 - RNA, 24 nt, Human
ugaugagcugugcacaaaguggca

SEQ ID NO: 3703903 - RNA, 15 nt, Human
ugaugaggcccucca

SEQ ID NO: 3703904 - RNA, 23 nt, Human
ugaugaggcccuccacaccugcg

SEQ ID NO: 3703905 - RNA, 13 nt, Human
ugaugagggcagc

SEQ ID NO: 3703906 - RNA, 15 nt, Human
ugaugagggcagcag

SEQ ID NO: 3703907 - RNA, 22 nt, Human
ugaugagggcagcagccagccc

SEQ ID NO: 3703908 - RNA, 23 nt, Human
ugaugagggcagcagccagcccu

SEQ ID NO: 3703909 - RNA, 13 nt, Human
ugaugagguauuu

SEQ ID NO: 3703910 - RNA, 13 nt, Human
ugaugaguuguga

SEQ ID NO: 3703911 - RNA, 21 nt, Human
ugaugaucagcuguuugucau

SEQ ID NO: 3703912 - RNA, 13 nt, Human
ugaugauccauua

SEQ ID NO: 3703913 - RNA, 14 nt, Human
ugaugauccuaggc

SEQ ID NO: 3703914 - RNA, 17 nt, Human
ugaugaucuuuaaaaua

SEQ ID NO: 3703915 - RNA, 21 nt, Human
ugaugaucuuugcagacaggc

SEQ ID NO: 3703916 - RNA, 22 nt, Human
ugaugaucuuugcagacaggca

SEQ ID NO: 3703917 - RNA, 20 nt, Human
ugaugaugaaaugaggucag

SEQ ID NO: 3703918 - RNA, 14 nt, Human
ugaugauguaauug

SEQ ID NO: 3703919 - RNA, 18 nt, Human
ugaugcaauccuuacaaa

SEQ ID NO: 3703920 - RNA, 19 nt, Human
ugaugcaauccuuacaaau

SEQ ID NO: 3703921 - RNA, 20 nt, Human
ugaugcacagagaagcuggg

SEQ ID NO: 3703922 - RNA, 19 nt, Human
ugaugcaggauuuguucuc

SEQ ID NO: 3703923 - RNA, 15 nt, Human
ugaugcagucuccuc

SEQ ID NO: 3703924 - RNA, 21 nt, Human
ugaugcagucuccucuuuaaa

SEQ ID NO: 3703925 - RNA, 22 nt, Human
ugaugcaucagaaagggagggc

SEQ ID NO: 3703926 - RNA, 18 nt, Human
ugaugcaugcacuguucc

SEQ ID NO: 3703927 - RNA, 21 nt, Human
ugaugcaugugguuugguucc

SEQ ID NO: 3703928 - RNA, 21 nt, Human
ugaugcauuaaaagaaaauaa

SEQ ID NO: 3703929 - RNA, 15 nt, Human
ugaugccacaccaag

SEQ ID NO: 3703930 - RNA, 18 nt, Human
ugaugccacaccaagcug

SEQ ID NO: 3703931 - RNA, 14 nt, Human
ugaugcccugcccu

SEQ ID NO: 3703932 - RNA, 19 nt, Human
ugaugcccugcuccaggga

SEQ ID NO: 3703933 - RNA, 14 nt, Human
ugaugccucugucu

SEQ ID NO: 3703934 - RNA, 21 nt, Human
ugaugccucugucuucuggac

SEQ ID NO: 3703935 - RNA, 21 nt, Human
ugaugccugugaacugaacuc

SEQ ID NO: 3703936 - RNA, 23 nt, Human
ugaugcgggccagugcuccagcc

SEQ ID NO: 3703937 - RNA, 23 nt, Human
ugaugcuacaggauuugaaauug

SEQ ID NO: 3703938 - RNA, 14 nt, Human
ugaugcucaggcuu

SEQ ID NO: 3703939 - RNA, 13 nt, Human
ugaugcucauggu

SEQ ID NO: 3703940 - RNA, 14 nt, Human
ugaugcucccuccc

SEQ ID NO: 3703941 - RNA, 20 nt, Human
ugaugcucccuccccugccc

SEQ ID NO: 3703942 - RNA, 21 nt, Human
ugaugcucccuccccugcccu

SEQ ID NO: 3703943 - RNA, 15 nt, Human
ugaugcucuuuccca

SEQ ID NO: 3703944 - RNA, 19 nt, Human
ugaugcucuuucccaccca

SEQ ID NO: 3703945 - RNA, 14 nt, Human
ugaugcuggagagg

SEQ ID NO: 3703946 - RNA, 20 nt, Human
ugaugcugggaguucuaaca

SEQ ID NO: 3703947 - RNA, 16 nt, Human
ugaugcugggcugggu

SEQ ID NO: 3703948 - RNA, 22 nt, Human
ugaugcuucuucagagacuccu

SEQ ID NO: 3703949 - RNA, 19 nt, Human
ugaugcuugauauuuucua

SEQ ID NO: 3703950 - RNA, 18 nt, Human
ugaugcuuucagauuaaa

SEQ ID NO: 3703951 - RNA, 15 nt, Human
ugauggaaacaaagu

SEQ ID NO: 3703952 - RNA, 19 nt, Human
ugauggacacuccagggac

SEQ ID NO: 3703953 - RNA, 16 nt, Human
ugauggcaacagaucu

SEQ ID NO: 3703954 - RNA, 22 nt, Human
ugauggcacuuagcuaucagaa

SEQ ID NO: 3703955 - RNA, 17 nt, Human
ugauggcccauucuacu

SEQ ID NO: 3703956 - RNA, 16 nt, Human
ugauggccuuaauuuc

SEQ ID NO: 3703957 - RNA, 18 nt, Human
ugauggccuuaauuuccu

SEQ ID NO: 3703958 - RNA, 17 nt, Human
ugauggcuuaugauagc

SEQ ID NO: 3703959 - RNA, 14 nt, Human
ugaugggaaagcau

SEQ ID NO: 3703960 - RNA, 19 nt, Human
ugaugggagaguagauggu

SEQ ID NO: 3703961 - RNA, 17 nt, Human
ugaugggauucuggaca

SEQ ID NO: 3703962 - RNA, 24 nt, Human
ugaugggauucuggacaggaugug

SEQ ID NO: 3703963 - RNA, 14 nt, Human
ugaugggauuuggu

SEQ ID NO: 3703964 - RNA, 21 nt, Human
ugaugggcaacccccagccug

SEQ ID NO: 3703965 - RNA, 14 nt, Human
ugauggggaaggag

SEQ ID NO: 3703966 - RNA, 24 nt, Human
ugauggggcaagggcacaaguccu

SEQ ID NO: 3703967 - RNA, 13 nt, Human
ugauggggcccug

SEQ ID NO: 3703968 - RNA, 19 nt, Human
ugauggggcccugccuccu

SEQ ID NO: 3703969 - RNA, 22 nt, Human
ugauggggcccugccuccuuug

SEQ ID NO: 3703970 - RNA, 14 nt, Human
ugauggucagaggg

SEQ ID NO: 3703971 - RNA, 15 nt, Human
ugauggucuggucua

SEQ ID NO: 3703972 - RNA, 15 nt, Human
ugauggugacuuccu

SEQ ID NO: 3703973 - RNA, 15 nt, Human
ugauggugcaaugac

SEQ ID NO: 3703974 - RNA, 21 nt, Human
ugaugguguagcccucccacu

SEQ ID NO: 3703975 - RNA, 19 nt, Human
ugaugguucuucaccuccu

SEQ ID NO: 3703976 - RNA, 14 nt, Human
ugaugguuguacau

SEQ ID NO: 3703977 - RNA, 21 nt, Human
ugaugguuguacauauaagug

SEQ ID NO: 3703978 - RNA, 18 nt, Human
ugaugguuuccaauuuca

SEQ ID NO: 3703979 - RNA, 15 nt, Human
ugauguaaaaucuug

SEQ ID NO: 3703980 - RNA, 19 nt, Human
ugauguaaaaucuugucau

SEQ ID NO: 3703981 - RNA, 21 nt, Human
ugauguaaaaucuugucaugu

SEQ ID NO: 3703982 - RNA, 15 nt, Human
ugauguaaaugaagu

SEQ ID NO: 3703983 - RNA, 17 nt, Human
ugauguaaucucucugc

SEQ ID NO: 3703984 - RNA, 23 nt, Human
ugauguaaucucucugcagcugc

SEQ ID NO: 3703985 - RNA, 22 nt, Human
ugauguaaucuugaauuguaac

SEQ ID NO: 3703986 - RNA, 11 nt, Human
ugauguaauug

SEQ ID NO: 3703987 - RNA, 17 nt, Human
ugauguacagucuguca

SEQ ID NO: 3703988 - RNA, 15 nt, Human
ugauguacaguuggg

SEQ ID NO: 3703989 - RNA, 18 nt, Human
ugauguaccaugaaacaa

SEQ ID NO: 3703990 - RNA, 19 nt, Human
ugauguacugauugagaag

SEQ ID NO: 3703991 - RNA, 18 nt, Human
ugauguagugccucuuuc

SEQ ID NO: 3703992 - RNA, 12 nt, Human
ugauguauauuu

SEQ ID NO: 3703993 - RNA, 18 nt, Human
ugauguaucugaguugcc

SEQ ID NO: 3703994 - RNA, 23 nt, Human
ugaugucaauuucuguguugcca

SEQ ID NO: 3703995 - RNA, 15 nt, Human
ugaugucauacagag

SEQ ID NO: 3703996 - RNA, 16 nt, Human
ugaugucauacagaga

SEQ ID NO: 3703997 - RNA, 18 nt, Human
ugaugucauacagagaag

SEQ ID NO: 3703998 - RNA, 19 nt, Human
ugaugucauacagagaagu

SEQ ID NO: 3703999 - RNA, 21 nt, Human
ugaugucauacagagaaguca

SEQ ID NO: 3704000 - RNA, 13 nt, Human
ugauguccagaag

SEQ ID NO: 3704001 - RNA, 23 nt, Human
ugauguccagaagaauauucagg

SEQ ID NO: 3704002 - RNA, 15 nt, Human
ugaugucccuaugga

SEQ ID NO: 3704003 - RNA, 21 nt, Human
ugauguccuguaaacacucag

SEQ ID NO: 3704004 - RNA, 12 nt, Human
ugaugucuccua

SEQ ID NO: 3704005 - RNA, 12 nt, Human
ugaugugaaacu

SEQ ID NO: 3704006 - RNA, 14 nt, Human
ugaugugacauuug

SEQ ID NO: 3704007 - RNA, 16 nt, Human
ugaugugacauuuguc

SEQ ID NO: 3704008 - RNA, 18 nt, Human
ugaugugcaaaaauuuuu

SEQ ID NO: 3704009 - RNA, 23 nt, Human
ugaugugcaaaaccuuuuacugg

SEQ ID NO: 3704010 - RNA, 20 nt, Human
ugaugugccuaaauaaguua

SEQ ID NO: 3704011 - RNA, 13 nt, Human
ugaugugccuggg

SEQ ID NO: 3704012 - RNA, 18 nt, Human
ugaugugcucaucagaaa

SEQ ID NO: 3704013 - RNA, 13 nt, Human
ugaugugcuuaac

SEQ ID NO: 3704014 - RNA, 19 nt, Human
ugauguggcccuggcugcc

SEQ ID NO: 3704015 - RNA, 23 nt, Human
ugauguggcccuggcugccggca

SEQ ID NO: 3704016 - RNA, 20 nt, Human
ugauguggugaggcaggcuu

SEQ ID NO: 3704017 - RNA, 14 nt, Human
ugauguuaaaaaaa

SEQ ID NO: 3704018 - RNA, 16 nt, Human
ugauguuaaaauucca

SEQ ID NO: 3704019 - RNA, 21 nt, Human
ugauguucuaaggcucugaga

SEQ ID NO: 3704020 - RNA, 20 nt, Human
ugauguugacaucacuggca

SEQ ID NO: 3704021 - RNA, 15 nt, Human
ugauguugaugcaau

SEQ ID NO: 3704022 - RNA, 19 nt, Human
ugauguugaugcaauccuu

SEQ ID NO: 3704023 - RNA, 13 nt, Human
ugauguuggaaga

SEQ ID NO: 3704024 - RNA, 16 nt, Human
ugauguuggcugggaa

SEQ ID NO: 3704025 - RNA, 17 nt, Human
ugauguuuguggccuca

SEQ ID NO: 3704026 - RNA, 17 nt, Human
ugauguuuuaaggaugc

SEQ ID NO: 3704027 - RNA, 23 nt, Human
ugauguuuuccaugaguccccug

SEQ ID NO: 3704028 - RNA, 12 nt, Human
ugauuaaaccaa

SEQ ID NO: 3704029 - RNA, 20 nt, Human
ugauuaaacgugcagacuau

SEQ ID NO: 3704030 - RNA, 12 nt, Human
ugauuaaagugc

SEQ ID NO: 3704031 - RNA, 18 nt, Human
ugauuaaauaagauucua

SEQ ID NO: 3704032 - RNA, 14 nt, Human
ugauuaaaugacac

SEQ ID NO: 3704033 - RNA, 16 nt, Human
ugauuaaauucuugca

SEQ ID NO: 3704034 - RNA, 19 nt, Human
ugauuaaauucuugcaaag

SEQ ID NO: 3704035 - RNA, 14 nt, Human
ugauuaacaaauau

SEQ ID NO: 3704036 - RNA, 13 nt, Human
ugauuaacuugga

SEQ ID NO: 3704037 - RNA, 14 nt, Human
ugauuaacuuggau

SEQ ID NO: 3704038 - RNA, 17 nt, Human
ugauuaagauuuuacaa

SEQ ID NO: 3704039 - RNA, 13 nt, Human
ugauuaaggcagu

SEQ ID NO: 3704040 - RNA, 17 nt, Human
ugauuaaggcaguacaa

SEQ ID NO: 3704041 - RNA, 18 nt, Human
ugauuaaggucucucuuu

SEQ ID NO: 3704042 - RNA, 13 nt, Human
ugauuaauccaga

SEQ ID NO: 3704043 - RNA, 21 nt, Human
ugauuaauucaccuuccagug

SEQ ID NO: 3704044 - RNA, 14 nt, Human
ugauuacacaaaac

SEQ ID NO: 3704045 - RNA, 17 nt, Human
ugauuacacaaaacaaa

SEQ ID NO: 3704046 - RNA, 16 nt, Human
ugauuacagugcagug

SEQ ID NO: 3704047 - RNA, 16 nt, Human
ugauuacucuuugaga

SEQ ID NO: 3704048 - RNA, 21 nt, Human
ugauuagaaggcaaguuucua

SEQ ID NO: 3704049 - RNA, 11 nt, Human
ugauuagauga

SEQ ID NO: 3704050 - RNA, 15 nt, Human
ugauuagcagaagaa

SEQ ID NO: 3704051 - RNA, 18 nt, Human
ugauuagcuuuguguuug

SEQ ID NO: 3704052 - RNA, 13 nt, Human
ugauuauauguca

SEQ ID NO: 3704053 - RNA, 22 nt, Human
ugauuaugaauuacauuuguau

SEQ ID NO: 3704054 - RNA, 14 nt, Human
ugauuauucagugu

SEQ ID NO: 3704055 - RNA, 14 nt, Human
ugauuauugcagaa

SEQ ID NO: 3704056 - RNA, 13 nt, Human
ugauuauuguauu

SEQ ID NO: 3704057 - RNA, 12 nt, Human
ugauuauuugca

SEQ ID NO: 3704058 - RNA, 14 nt, Human
ugauuauuuucaag

SEQ ID NO: 3704059 - RNA, 21 nt, Human
ugauuauuuuuuuuuucuucu

SEQ ID NO: 3704060 - RNA, 11 nt, Human
ugauucaaaug

SEQ ID NO: 3704061 - RNA, 16 nt, Human
ugauucaaucuguaaa

SEQ ID NO: 3704062 - RNA, 12 nt, Human
ugauucaauuca

SEQ ID NO: 3704063 - RNA, 14 nt, Human
ugauucaauuugau

SEQ ID NO: 3704064 - RNA, 18 nt, Human
ugauucacauguuuucaa

SEQ ID NO: 3704065 - RNA, 20 nt, Human
ugauucacauguuuucaaau

SEQ ID NO: 3704066 - RNA, 21 nt, Human
ugauucagaaaauguucuguu

SEQ ID NO: 3704067 - RNA, 22 nt, Human
ugauucagaaaauguucuguuu

SEQ ID NO: 3704068 - RNA, 13 nt, Human
ugauucagacagc

SEQ ID NO: 3704069 - RNA, 14 nt, Human
ugauucagacagcu

SEQ ID NO: 3704070 - RNA, 19 nt, Human
ugauucagacagcugccug

SEQ ID NO: 3704071 - RNA, 21 nt, Human
ugauucagacagcugccuggg

SEQ ID NO: 3704072 - RNA, 14 nt, Human
ugauucagcucugc

SEQ ID NO: 3704073 - RNA, 13 nt, Human
ugauucagucaca

SEQ ID NO: 3704074 - RNA, 16 nt, Human
ugauucauaguaacuu

SEQ ID NO: 3704075 - RNA, 19 nt, Human
ugauucauaguaacuucuu

SEQ ID NO: 3704076 - RNA, 19 nt, Human
ugauuccacuacaccuggc

SEQ ID NO: 3704077 - RNA, 18 nt, Human
ugauucccaagcucugcu

SEQ ID NO: 3704078 - RNA, 22 nt, Human
ugauucccaagcucugcuccuc

SEQ ID NO: 3704079 - RNA, 17 nt, Human
ugauucccuccugcuac

SEQ ID NO: 3704080 - RNA, 18 nt, Human
ugauucccuccugcuacu

SEQ ID NO: 3704081 - RNA, 16 nt, Human
ugauucccugauuuaa

SEQ ID NO: 3704082 - RNA, 18 nt, Human
ugauucccuuguuauuca

SEQ ID NO: 3704083 - RNA, 14 nt, Human
ugauuccuuccugu

SEQ ID NO: 3704084 - RNA, 22 nt, Human
ugauuccuugauggagauauuu

SEQ ID NO: 3704085 - RNA, 17 nt, Human
ugauuccuuugaagagg

SEQ ID NO: 3704086 - RNA, 21 nt, Human
ugauuccuuugaagaggaaaa

SEQ ID NO: 3704087 - RNA, 18 nt, Human
ugauucgaaugacacugu

SEQ ID NO: 3704088 - RNA, 19 nt, Human
ugccuaaggcugaacuugu

SEQ ID NO: 3704089 - RNA, 15 nt, Human
ugccuaaguauuaaa

SEQ ID NO: 3704090 - RNA, 20 nt, Human
ugccuaaguauuaaaacauu

SEQ ID NO: 3704091 - RNA, 22 nt, Human
ugccuaaguccaguguuucuuu

SEQ ID NO: 3704092 - RNA, 18 nt, Human
ugccuaauaaacauccuu

SEQ ID NO: 3704093 - RNA, 21 nt, Human
ugccuaauaaacauccuucaa

SEQ ID NO: 3704094 - RNA, 18 nt, Human
ugccuaauacauuaaagc

SEQ ID NO: 3704095 - RNA, 17 nt, Human
ugccuaauaugaugacu

SEQ ID NO: 3704096 - RNA, 23 nt, Human
ugccuacagaacuucagaaagac

SEQ ID NO: 3704097 - RNA, 20 nt, Human
ugccuagcaagcuggccucu

SEQ ID NO: 3704098 - RNA, 22 nt, Human
ugccuagcacucacaugcugga

SEQ ID NO: 3704099 - RNA, 17 nt, Human
ugccuaggaauucccag

SEQ ID NO: 3704100 - RNA, 20 nt, Human
ugccuaggccugggcagugg

SEQ ID NO: 3704101 - RNA, 17 nt, Human
ugccuaguauugacaaa

SEQ ID NO: 3704102 - RNA, 18 nt, Human
ugccuaguauugacaaaa

SEQ ID NO: 3704103 - RNA, 13 nt, Human
ugccuaguuuuua

SEQ ID NO: 3704104 - RNA, 17 nt, Human
ugccuauagucccagcu

SEQ ID NO: 3704105 - RNA, 18 nt, Human
ugccuauagucccagcua

SEQ ID NO: 3704106 - RNA, 20 nt, Human
ugccuauaugagaagaauag

SEQ ID NO: 3704107 - RNA, 22 nt, Human
ugccuauucccacaccuccaca

SEQ ID NO: 3704108 - RNA, 19 nt, Human
ugccucaagccccagagug

SEQ ID NO: 3704109 - RNA, 22 nt, Human
ugccucaaugugaaucagaccc

SEQ ID NO: 3704110 - RNA, 24 nt, Human
ugccucaaugugaaucagacccua

SEQ ID NO: 3704111 - RNA, 18 nt, Human
ugccucaaugugaccagg

SEQ ID NO: 3704112 - RNA, 19 nt, Human
ugccucaaugugaccaggg

SEQ ID NO: 3704113 - RNA, 19 nt, Human
ugccucacauuuuuuucua

SEQ ID NO: 3704114 - RNA, 22 nt, Human
ugccucaccgcuucccuccugc

SEQ ID NO: 3704115 - RNA, 12 nt, Human
ugccucagcccg

SEQ ID NO: 3704116 - RNA, 16 nt, Human
ugccucagcccugacc

SEQ ID NO: 3704117 - RNA, 15 nt, Human
ugccucagccucccg

SEQ ID NO: 3704118 - RNA, 16 nt, Human
ugccucagccucccga

SEQ ID NO: 3704119 - RNA, 15 nt, Human
ugccucagccuccug

SEQ ID NO: 3704120 - RNA, 16 nt, Human
ugccucagguuccuau

SEQ ID NO: 3704121 - RNA, 15 nt, Human
ugccucaguguauuu

SEQ ID NO: 3704122 - RNA, 21 nt, Human
ugccucauuuuuuuccuugca

SEQ ID NO: 3704123 - RNA, 19 nt, Human
ugccuccaccaccacuggc

SEQ ID NO: 3704124 - RNA, 22 nt, Human
ugccuccaccaccacuggccac

SEQ ID NO: 3704125 - RNA, 18 nt, Human
ugccuccaccgcugccua

SEQ ID NO: 3704126 - RNA, 15 nt, Human
ugccuccacucccac

SEQ ID NO: 3704127 - RNA, 17 nt, Human
ugccuccacucccacuu

SEQ ID NO: 3704128 - RNA, 17 nt, Human
ugccuccagaagcacug

SEQ ID NO: 3704129 - RNA, 17 nt, Human
ugccuccaggaaccaca

SEQ ID NO: 3704130 - RNA, 20 nt, Human
ugccuccaggaaccacacca

SEQ ID NO: 3704131 - RNA, 16 nt, Human
ugccuccaggugcaga

SEQ ID NO: 3704132 - RNA, 21 nt, Human
ugccuccaggugcagagguac

SEQ ID NO: 3704133 - RNA, 15 nt, Human
ugccuccaggugugc

SEQ ID NO: 3704134 - RNA, 20 nt, Human
ugccuccauggugccucugg

SEQ ID NO: 3704135 - RNA, 13 nt, Human
ugccucccaucac

SEQ ID NO: 3704136 - RNA, 19 nt, Human
ugccucccaucacccgcua

SEQ ID NO: 3704137 - RNA, 15 nt, Human
ugccuccccaacccu

SEQ ID NO: 3704138 - RNA, 19 nt, Human
ugccuccccaacccugccc

SEQ ID NO: 3704139 - RNA, 22 nt, Human
ugccuccccauuucccaucugc

SEQ ID NO: 3704140 - RNA, 18 nt, Human
ugccuccccggcucgagc

SEQ ID NO: 3704141 - RNA, 17 nt, Human
ugccuccccucuccuuc

SEQ ID NO: 3704142 - RNA, 16 nt, Human
ugccucccgcccccuu

SEQ ID NO: 3704143 - RNA, 23 nt, Human
ugccucccucucguaagauuucc

SEQ ID NO: 3704144 - RNA, 13 nt, Human
ugccucccuggug

SEQ ID NO: 3704145 - RNA, 13 nt, Human
ugccucccugucc

SEQ ID NO: 3704146 - RNA, 12 nt, Human
ugccucccuuga

SEQ ID NO: 3704147 - RNA, 22 nt, Human
ugccuccgcgugaucaaagcca

SEQ ID NO: 3704148 - RNA, 24 nt, Human
ugccuccucacccccagcuuugcu

SEQ ID NO: 3704149 - RNA, 11 nt, Human
ugccuccuccc

SEQ ID NO: 3704150 - RNA, 12 nt, Human
ugccuccucccu

SEQ ID NO: 3704151 - RNA, 13 nt, Human
ugccuccucccuc

SEQ ID NO: 3704152 - RNA, 20 nt, Human
ugccuccuccuucccaaagg

SEQ ID NO: 3704153 - RNA, 14 nt, Human
ugccuccugccggc

SEQ ID NO: 3704154 - RNA, 14 nt, Human
ugccuccugccugc

SEQ ID NO: 3704155 - RNA, 13 nt, Human
ugccuccuguggg

SEQ ID NO: 3704156 - RNA, 13 nt, Human
ugccuccugugua

SEQ ID NO: 3704157 - RNA, 20 nt, Human
ugccuccuguguacuguguc

SEQ ID NO: 3704158 - RNA, 13 nt, Human
ugccuccuuccuc

SEQ ID NO: 3704159 - RNA, 18 nt, Human
ugccuccuugauauuugu

SEQ ID NO: 3704160 - RNA, 22 nt, Human
ugccuccuugauauuuguauuu

SEQ ID NO: 3704161 - RNA, 18 nt, Human
ugccuccuuugugaggaa

SEQ ID NO: 3704162 - RNA, 13 nt, Human
ugccucgaaacac

SEQ ID NO: 3704163 - RNA, 23 nt, Human
ugccucgaaacacagaaaccuuu

SEQ ID NO: 3704164 - RNA, 19 nt, Human
ugccucgaacuggcugcaa

SEQ ID NO: 3704165 - RNA, 20 nt, Human
ugccucgaacuggcugcaaa

SEQ ID NO: 3704166 - RNA, 18 nt, Human
ugccucggcuccugcugc

SEQ ID NO: 3704167 - RNA, 22 nt, Human
ugccucggcuccugcugcacca

SEQ ID NO: 3704168 - RNA, 23 nt, Human
ugccucggcuggcuccccugcag

SEQ ID NO: 3704169 - RNA, 20 nt, Human
ugccucggcuuuucucagcu

SEQ ID NO: 3704170 - RNA, 18 nt, Human
ugccucgggaaccucacu

SEQ ID NO: 3704171 - RNA, 23 nt, Human
ugccucgggaaccucacucuugc

SEQ ID NO: 3704172 - RNA, 23 nt, Human
ugccucuacugggaaggcuacuu

SEQ ID NO: 3704173 - RNA, 14 nt, Human
ugccucuagcugaa

SEQ ID NO: 3704174 - RNA, 13 nt, Human
ugccucucacaca

SEQ ID NO: 3704175 - RNA, 15 nt, Human
ugccucucacacaca

SEQ ID NO: 3704176 - RNA, 18 nt, Human
ugccucucaucaacugaa

SEQ ID NO: 3704177 - RNA, 13 nt, Human
ugccucuccaggc

SEQ ID NO: 3704178 - RNA, 13 nt, Human
ugccucucccagg

SEQ ID NO: 3704179 - RNA, 15 nt, Human
ugccucuccgccccu

SEQ ID NO: 3704180 - RNA, 14 nt, Human
ugccucucucaggc

SEQ ID NO: 3704181 - RNA, 17 nt, Human
ugccucucucaggccaa

SEQ ID NO: 3704182 - RNA, 12 nt, Human
ugccucucugca

SEQ ID NO: 3704183 - RNA, 21 nt, Human
ugccucucugcaggucccuaa

SEQ ID NO: 3704184 - RNA, 21 nt, Human
ugccucugacacacagcucug

SEQ ID NO: 3704185 - RNA, 17 nt, Human
ugccucugaggccagcc

SEQ ID NO: 3704186 - RNA, 18 nt, Human
ugccucugaggccagccu

SEQ ID NO: 3704187 - RNA, 20 nt, Human
ugccucugaggccagccugg

SEQ ID NO: 3704188 - RNA, 21 nt, Human
ugccucugaggccagccuggc

SEQ ID NO: 3704189 - RNA, 23 nt, Human
ugccucugaggccagccuggccu

SEQ ID NO: 3704190 - RNA, 19 nt, Human
ugccucugauaugggacug

SEQ ID NO: 3704191 - RNA, 11 nt, Human
ugccucugcca

SEQ ID NO: 3704192 - RNA, 22 nt, Human
ugccucugccaaaggaugugau

SEQ ID NO: 3704193 - RNA, 11 nt, Human
ugccucugccu

SEQ ID NO: 3704194 - RNA, 15 nt, Human
ugccucugccucuga

SEQ ID NO: 3704195 - RNA, 17 nt, Human
ugccucugccucugaca

SEQ ID NO: 3704196 - RNA, 20 nt, Human
ugccucugccucugacacac

SEQ ID NO: 3704197 - RNA, 14 nt, Human
ugccucugccuuag

SEQ ID NO: 3704198 - RNA, 14 nt, Human
ugccucugggacug

SEQ ID NO: 3704199 - RNA, 14 nt, Human
ugccucuguccccu

SEQ ID NO: 3704200 - RNA, 17 nt, Human
ugccucugucuagcaug

SEQ ID NO: 3704201 - RNA, 11 nt, Human
ugccucugugc

SEQ ID NO: 3704202 - RNA, 12 nt, Human
ugccucugugcu

SEQ ID NO: 3704203 - RNA, 21 nt, Human
ugccucugugcugugugugac

SEQ ID NO: 3704204 - RNA, 14 nt, Human
ugccucuucccucu

SEQ ID NO: 3704205 - RNA, 16 nt, Human
ugccucuuucauccac

SEQ ID NO: 3704206 - RNA, 17 nt, Human
ugccucuuucauccacu

SEQ ID NO: 3704207 - RNA, 12 nt, Human
ugccucuuuccc

SEQ ID NO: 3704208 - RNA, 17 nt, Human
ugccucuuucccuagga

SEQ ID NO: 3704209 - RNA, 14 nt, Human
ugccucuuuccugu

SEQ ID NO: 3704210 - RNA, 19 nt, Human
ugccucuuuuaccugcugc

SEQ ID NO: 3704211 - RNA, 21 nt, Human
ugccucuuuuaccugcugcuu

SEQ ID NO: 3704212 - RNA, 21 nt, Human
ugccucuuuuuaaaguucaaa

SEQ ID NO: 3704213 - RNA, 13 nt, Human
ugccugaagaaca

SEQ ID NO: 3704214 - RNA, 19 nt, Human
ugccugaaguuggagugag

SEQ ID NO: 3704215 - RNA, 13 nt, Human
ugccugacacacu

SEQ ID NO: 3704216 - RNA, 23 nt, Human
ugccugacccuacuucuuuugcu

SEQ ID NO: 3704217 - RNA, 21 nt, Human
ugccugacuagggagccaugu

SEQ ID NO: 3704218 - RNA, 18 nt, Human
ugccugagaggcaggcau

SEQ ID NO: 3704219 - RNA, 19 nt, Human
ugccugagcaccucccagc

SEQ ID NO: 3704220 - RNA, 14 nt, Human
ugccugagggcccc

SEQ ID NO: 3704221 - RNA, 15 nt, Human
ugccugagggccccu

SEQ ID NO: 3704222 - RNA, 17 nt, Human
ugccugagggccccucu

SEQ ID NO: 3704223 - RNA, 18 nt, Human
ugccugaggggcagccug

SEQ ID NO: 3704224 - RNA, 22 nt, Human
ugccugaggggcagccugccuu

SEQ ID NO: 3704225 - RNA, 19 nt, Human
ugccugagucacccaugaa

SEQ ID NO: 3704226 - RNA, 19 nt, Human
ugccugagucgugaccugc

SEQ ID NO: 3704227 - RNA, 23 nt, Human
ugccugagucgugaccugcuagg

SEQ ID NO: 3704228 - RNA, 16 nt, Human
ugccugaugacaauaa

SEQ ID NO: 3704229 - RNA, 21 nt, Human
ugccugauucggcugucucag

SEQ ID NO: 3704230 - RNA, 15 nt, Human
ugccugauugccaag

SEQ ID NO: 3704231 - RNA, 15 nt, Human
ugccugcaccaggag

SEQ ID NO: 3704232 - RNA, 20 nt, Human
ugccugcaccaggagacaga

SEQ ID NO: 3704233 - RNA, 15 nt, Human
ugccugcagagagaa

SEQ ID NO: 3704234 - RNA, 15 nt, Human
ugccugcagaguuug

SEQ ID NO: 3704235 - RNA, 15 nt, Human
ugccugcauguauuu

SEQ ID NO: 3704236 - RNA, 12 nt, Human
ugccugccaugu

SEQ ID NO: 3704237 - RNA, 18 nt, Human
gucagacgccugaggaac

SEQ ID NO: 3704238 - RNA, 20 nt, Human
gucagacugcugggacuggc

SEQ ID NO: 3704239 - RNA, 20 nt, Human
gucagagccaugucuucucc

SEQ ID NO: 3704240 - RNA, 21 nt, Human
gucagagccaugucuucuccc

SEQ ID NO: 3704241 - RNA, 22 nt, Human
gucagagccaugucuucucccu

SEQ ID NO: 3704242 - RNA, 16 nt, Human
gucagagccugcaguu

SEQ ID NO: 3704243 - RNA, 13 nt, Human
gucagagcuggga

SEQ ID NO: 3704244 - RNA, 16 nt, Human
gucagaggagagauag

SEQ ID NO: 3704245 - RNA, 19 nt, Human
gucagaggauggccagugu

SEQ ID NO: 3704246 - RNA, 18 nt, Human
gucagaguaagcugcuuu

SEQ ID NO: 3704247 - RNA, 15 nt, Human
gucagauacaaugua

SEQ ID NO: 3704248 - RNA, 16 nt, Human
gucagaucugccuaag

SEQ ID NO: 3704249 - RNA, 19 nt, Human
gucagaucugccuaaggac

SEQ ID NO: 3704250 - RNA, 20 nt, Human
gucagaucugccuaaggacu

SEQ ID NO: 3704251 - RNA, 21 nt, Human
gucagaugagaacaaagcugu

SEQ ID NO: 3704252 - RNA, 21 nt, Human
gucagaugcccgagggagggg

SEQ ID NO: 3704253 - RNA, 22 nt, Human
gucagaugcugugcaaauguua

SEQ ID NO: 3704254 - RNA, 18 nt, Human
gucagaugggaagacaug

SEQ ID NO: 3704255 - RNA, 15 nt, Human
gucagauguuuaaaa

SEQ ID NO: 3704256 - RNA, 19 nt, Human
gucagauguuuaaaacacc

SEQ ID NO: 3704257 - RNA, 14 nt, Human
gucagauuccuuuc

SEQ ID NO: 3704258 - RNA, 15 nt, Human
gucagauucuugcau

SEQ ID NO: 3704259 - RNA, 21 nt, Human
gucagauuuccagucuccacc

SEQ ID NO: 3704260 - RNA, 23 nt, Human
gucagcaaaaagcaaaaucauuu

SEQ ID NO: 3704261 - RNA, 22 nt, Human
gucagcaaauuaauuggcagca

SEQ ID NO: 3704262 - RNA, 23 nt, Human
gucagcaguugcugguaaaauga

SEQ ID NO: 3704263 - RNA, 15 nt, Human
gucagcaugaauuug

SEQ ID NO: 3704264 - RNA, 20 nt, Human
gucagcaugaauuuguaaug

SEQ ID NO: 3704265 - RNA, 14 nt, Human
gucagcauuugauc

SEQ ID NO: 3704266 - RNA, 13 nt, Human
gucagccacaugg

SEQ ID NO: 3704267 - RNA, 13 nt, Human
gucagccacuguu

SEQ ID NO: 3704268 - RNA, 19 nt, Human
gucagccaggaccauaccg

SEQ ID NO: 3704269 - RNA, 15 nt, Human
gucagccaggagcug

SEQ ID NO: 3704270 - RNA, 20 nt, Human
gucagccaggagcugucacc

SEQ ID NO: 3704271 - RNA, 16 nt, Human
gucagccagggccagg

SEQ ID NO: 3704272 - RNA, 22 nt, Human
gucagcccaaaccaccagaagc

SEQ ID NO: 3704273 - RNA, 22 nt, Human
gucagcccuaggguggagagcc

SEQ ID NO: 3704274 - RNA, 16 nt, Human
gucagccgagccgggc

SEQ ID NO: 3704275 - RNA, 14 nt, Human
gucagccuccagcc

SEQ ID NO: 3704276 - RNA, 18 nt, Human
gucagcguugcaugucgu

SEQ ID NO: 3704277 - RNA, 17 nt, Human
gucagcuacuaaugaug

SEQ ID NO: 3704278 - RNA, 16 nt, Human
gucagcucucaucuga

SEQ ID NO: 3704279 - RNA, 14 nt, Human
gucagcucucugcc

SEQ ID NO: 3704280 - RNA, 17 nt, Human
gucagcucucugcccug

SEQ ID NO: 3704281 - RNA, 18 nt, Human
gucagcucucugcccugu

SEQ ID NO: 3704282 - RNA, 21 nt, Human
gucagcucucugcccugugua

SEQ ID NO: 3704283 - RNA, 20 nt, Human
gucagcuugcugcccuaggc

SEQ ID NO: 3704284 - RNA, 17 nt, Human
gucaggaaacccagucg

SEQ ID NO: 3704285 - RNA, 13 nt, Human
gucaggaaagaga

SEQ ID NO: 3704286 - RNA, 17 nt, Human
gucaggaacagaaggau

SEQ ID NO: 3704287 - RNA, 18 nt, Human
gucaggaaggaugagcau

SEQ ID NO: 3704288 - RNA, 19 nt, Human
gucaggaguccaagaccag

SEQ ID NO: 3704289 - RNA, 18 nt, Human
gucaggagugugugugag

SEQ ID NO: 3704290 - RNA, 19 nt, Human
gucaggaguuagaggccag

SEQ ID NO: 3704291 - RNA, 23 nt, Human
gucaggaguucgagaccagccug

SEQ ID NO: 3704292 - RNA, 16 nt, Human
gucaggcacugggcau

SEQ ID NO: 3704293 - RNA, 20 nt, Human
gucaggcagccagugagaug

SEQ ID NO: 3704294 - RNA, 14 nt, Human
gucaggccacggca

SEQ ID NO: 3704295 - RNA, 15 nt, Human
gucaggcccuggaac

SEQ ID NO: 3704296 - RNA, 21 nt, Human
gucaggcccuuauuuucaaga

SEQ ID NO: 3704297 - RNA, 15 nt, Human
gucaggccgggcaga

SEQ ID NO: 3704298 - RNA, 17 nt, Human
gucaggccgggcagagc

SEQ ID NO: 3704299 - RNA, 17 nt, Human
gucaggcuccauuagga

SEQ ID NO: 3704300 - RNA, 16 nt, Human
gucaggcucucugggc

SEQ ID NO: 3704301 - RNA, 20 nt, Human
gucaggcucucugggcugac

SEQ ID NO: 3704302 - RNA, 15 nt, Human
gucaggcugcuggcg

SEQ ID NO: 3704303 - RNA, 14 nt, Human
gucagggaccccug

SEQ ID NO: 3704304 - RNA, 13 nt, Human
gucagggagugcu

SEQ ID NO: 3704305 - RNA, 14 nt, Human
gucagggagugcug

SEQ ID NO: 3704306 - RNA, 21 nt, Human
gucagggcccaagucccuguu

SEQ ID NO: 3704307 - RNA, 14 nt, Human
gucagggcccagag

SEQ ID NO: 3704308 - RNA, 15 nt, Human
gucagggcccagagg

SEQ ID NO: 3704309 - RNA, 17 nt, Human
gucaggggugacacaga

SEQ ID NO: 3704310 - RNA, 17 nt, Human
gucaggguuggugugcu

SEQ ID NO: 3704311 - RNA, 15 nt, Human
gucagguagggggga

SEQ ID NO: 3704312 - RNA, 14 nt, Human
gucaggugacccug

SEQ ID NO: 3704313 - RNA, 13 nt, Human
gucagguuuaaca

SEQ ID NO: 3704314 - RNA, 20 nt, Human
gucaguaguuuaaaaguucu

SEQ ID NO: 3704315 - RNA, 20 nt, Human
gucaguaucuguaucucucu

SEQ ID NO: 3704316 - RNA, 17 nt, Human
gucaguauguggaagug

SEQ ID NO: 3704317 - RNA, 23 nt, Human
gucagugcagcccguguggcccc

SEQ ID NO: 3704318 - RNA, 23 nt, Human
gucagugccgccgccucgcccac

SEQ ID NO: 3704319 - RNA, 16 nt, Human
gucagugcugccuguc

SEQ ID NO: 3704320 - RNA, 22 nt, Human
gucagugcugccuguccccaug

SEQ ID NO: 3704321 - RNA, 15 nt, Human
gucaguggcucuuuu

SEQ ID NO: 3704322 - RNA, 18 nt, Human
gucaguggggcucucuga

SEQ ID NO: 3704323 - RNA, 24 nt, Human
gucaguguccaaagcagggucugg

SEQ ID NO: 3704324 - RNA, 14 nt, Human
gucaguguugagau

SEQ ID NO: 3704325 - RNA, 13 nt, Human
gucaguuguauca

SEQ ID NO: 3704326 - RNA, 13 nt, Human
gucaguuucuaca

SEQ ID NO: 3704327 - RNA, 13 nt, Human
gucaguuuucaua

SEQ ID NO: 3704328 - RNA, 12 nt, Human
gucauaauugca

SEQ ID NO: 3704329 - RNA, 14 nt, Human
gucauaauugcauu

SEQ ID NO: 3704330 - RNA, 18 nt, Human
gucauaauugcauugacu

SEQ ID NO: 3704331 - RNA, 17 nt, Human
gucauacaauccauucu

SEQ ID NO: 3704332 - RNA, 15 nt, Human
gucauacagagaagu

SEQ ID NO: 3704333 - RNA, 16 nt, Human
gucauacagagaaguc

SEQ ID NO: 3704334 - RNA, 16 nt, Human
gucauaccaggccgcc

SEQ ID NO: 3704335 - RNA, 21 nt, Human
gucauacuaucuacucuccuc

SEQ ID NO: 3704336 - RNA, 18 nt, Human
gucauacucgagucugag

SEQ ID NO: 3704337 - RNA, 13 nt, Human
gucauagaaauua

SEQ ID NO: 3704338 - RNA, 17 nt, Human
gucauauacugccaugu

SEQ ID NO: 3704339 - RNA, 16 nt, Human
gucauauguuaagcag

SEQ ID NO: 3704340 - RNA, 14 nt, Human
gucauauguuugcu

SEQ ID NO: 3704341 - RNA, 20 nt, Human
gucauauuuugauuauugua

SEQ ID NO: 3704342 - RNA, 23 nt, Human
gucaucaauuaaaggcaaaggca

SEQ ID NO: 3704343 - RNA, 20 nt, Human
gucaucagagcuccucuguc

SEQ ID NO: 3704344 - RNA, 17 nt, Human
gucaucaucagggccug

SEQ ID NO: 3704345 - RNA, 21 nt, Human
gucaucaucauggccagcugg

SEQ ID NO: 3704346 - RNA, 18 nt, Human
gucaucauguuuugauuu

SEQ ID NO: 3704347 - RNA, 14 nt, Human
gucaucccauuguc

SEQ ID NO: 3704348 - RNA, 19 nt, Human
gucauccucaaagaaagug

SEQ ID NO: 3704349 - RNA, 23 nt, Human
gucaucgcucguguguucuaucc

SEQ ID NO: 3704350 - RNA, 15 nt, Human
gucaucuaguuuuaa

SEQ ID NO: 3704351 - RNA, 16 nt, Human
gucaucuaguuuuaaa

SEQ ID NO: 3704352 - RNA, 17 nt, Human
gucaucugauuggacag

SEQ ID NO: 3704353 - RNA, 20 nt, Human
gucaucuugaccaagcagga

SEQ ID NO: 3704354 - RNA, 22 nt, Human
gucaucuugaccaagcaggaag

SEQ ID NO: 3704355 - RNA, 15 nt, Human
gucaucuugcuacca

SEQ ID NO: 3704356 - RNA, 22 nt, Human
gucaucuugcuaccaguauuua

SEQ ID NO: 3704357 - RNA, 22 nt, Human
gucaucuuuuucucuaaaauag

SEQ ID NO: 3704358 - RNA, 23 nt, Human
gucaucuuuuucucuaaaauagc

SEQ ID NO: 3704359 - RNA, 18 nt, Human
gucaugagcugagcaggg

SEQ ID NO: 3704360 - RNA, 21 nt, Human
gucaugaggagauucugccuu

SEQ ID NO: 3704361 - RNA, 22 nt, Human
gucaugaggagauucugccuuu

SEQ ID NO: 3704362 - RNA, 14 nt, Human
gucaugaucucccu

SEQ ID NO: 3704363 - RNA, 16 nt, Human
gucaugaucucccugc

SEQ ID NO: 3704364 - RNA, 17 nt, Human
gucaugaucucccugcc

SEQ ID NO: 3704365 - RNA, 19 nt, Human
gucaugaugcucuuuccca

SEQ ID NO: 3704366 - RNA, 15 nt, Human
gucaugauggcacca

SEQ ID NO: 3704367 - RNA, 20 nt, Human
gucaugauguuuuuaaaauc

SEQ ID NO: 3704368 - RNA, 16 nt, Human
gucaugcaaaggcugg

SEQ ID NO: 3704369 - RNA, 18 nt, Human
gucaugcaaaggcuggga

SEQ ID NO: 3704370 - RNA, 14 nt, Human
gucaugcauaaaua

SEQ ID NO: 3704371 - RNA, 12 nt, Human
gucaugcaugaa

SEQ ID NO: 3704372 - RNA, 18 nt, Human
gucaugcccuccucuccc

SEQ ID NO: 3704373 - RNA, 17 nt, Human
gucaugcuccccugugc

SEQ ID NO: 3704374 - RNA, 13 nt, Human
gucaugcugccuu

SEQ ID NO: 3704375 - RNA, 12 nt, Human
gucaugcuucau

SEQ ID NO: 3704376 - RNA, 13 nt, Human
gucauggccacac

SEQ ID NO: 3704377 - RNA, 17 nt, Human
gucauggccacacugug

SEQ ID NO: 3704378 - RNA, 21 nt, Human
gucauggccacacugugacac

SEQ ID NO: 3704379 - RNA, 20 nt, Human
gucaugguuacaaacuacag

SEQ ID NO: 3704380 - RNA, 11 nt, Human
gucaugugacc

SEQ ID NO: 3704381 - RNA, 18 nt, Human
gucaugugggucuuccag

SEQ ID NO: 3704382 - RNA, 13 nt, Human
gucauguguauaa

SEQ ID NO: 3704383 - RNA, 14 nt, Human
gucauguguauaaa

SEQ ID NO: 3704384 - RNA, 15 nt, Human
gucauguuuaagaaa

SEQ ID NO: 3704385 - RNA, 15 nt, Human
gucauguuugcaggg

SEQ ID NO: 3704386 - RNA, 15 nt, Human
gucauuaaacugguu

SEQ ID NO: 3704387 - RNA, 23 nt, Human
ugccugccauguaccuccccugc

SEQ ID NO: 3704388 - RNA, 15 nt, Human
ugccugcccaggccc

SEQ ID NO: 3704389 - RNA, 18 nt, Human
ugccugccccaaacaaau

SEQ ID NO: 3704390 - RNA, 12 nt, Human
ugccugccccgc

SEQ ID NO: 3704391 - RNA, 20 nt, Human
ugccugcccgcacagcagcc

SEQ ID NO: 3704392 - RNA, 15 nt, Human
ugccugcccuuuguc

SEQ ID NO: 3704393 - RNA, 21 nt, Human
ugccugccugucugucucucc

SEQ ID NO: 3704394 - RNA, 11 nt, Human
ugccugccuua

SEQ ID NO: 3704395 - RNA, 13 nt, Human
ugccugcgucuuc

SEQ ID NO: 3704396 - RNA, 15 nt, Human
ugccugcgucuuccg

SEQ ID NO: 3704397 - RNA, 17 nt, Human
ugccugcgucuuccgcc

SEQ ID NO: 3704398 - RNA, 19 nt, Human
ugccugcgugggugugugc

SEQ ID NO: 3704399 - RNA, 20 nt, Human
ugccugcucccauccugugu

SEQ ID NO: 3704400 - RNA, 22 nt, Human
ugccugcucccauccugugugu

SEQ ID NO: 3704401 - RNA, 16 nt, Human
ugccugcucgcucccu

SEQ ID NO: 3704402 - RNA, 21 nt, Human
ugccugcuuuucacugcugca

SEQ ID NO: 3704403 - RNA, 22 nt, Human
ugccugcuuuucacugcugcaa

SEQ ID NO: 3704404 - RNA, 22 nt, Human
ugccugcuuuuuauggccugug

SEQ ID NO: 3704405 - RNA, 18 nt, Human
ugccuggaagagcagccc

SEQ ID NO: 3704406 - RNA, 20 nt, Human
ugccuggaagagcagcccua

SEQ ID NO: 3704407 - RNA, 23 nt, Human
ugccuggaagcuuuguccccugc

SEQ ID NO: 3704408 - RNA, 21 nt, Human
ugccuggacauuugccuugcu

SEQ ID NO: 3704409 - RNA, 12 nt, Human
ugccuggacccg

SEQ ID NO: 3704410 - RNA, 18 nt, Human
ugccuggagcuccuggga

SEQ ID NO: 3704411 - RNA, 16 nt, Human
ugccuggaggaccuga

SEQ ID NO: 3704412 - RNA, 21 nt, Human
ugccuggaggaccugagccug

SEQ ID NO: 3704413 - RNA, 23 nt, Human
ugccuggauccccucugucuaca

SEQ ID NO: 3704414 - RNA, 16 nt, Human
ugccuggauggggcug

SEQ ID NO: 3704415 - RNA, 23 nt, Human
ugccuggcaggcugucuggccag

SEQ ID NO: 3704416 - RNA, 20 nt, Human
ugccuggccaggcagaucug

SEQ ID NO: 3704417 - RNA, 17 nt, Human
ugccuggcccccugucc

SEQ ID NO: 3704418 - RNA, 15 nt, Human
ugccuggccggccag

SEQ ID NO: 3704419 - RNA, 17 nt, Human
ugccuggccggccagcc

SEQ ID NO: 3704420 - RNA, 17 nt, Human
ugccuggccuggcacac

SEQ ID NO: 3704421 - RNA, 20 nt, Human
ugccuggccuggcacacauc

SEQ ID NO: 3704422 - RNA, 15 nt, Human
ugccuggcggggugg

SEQ ID NO: 3704423 - RNA, 22 nt, Human
ugccugggcucccuugugcgug

SEQ ID NO: 3704424 - RNA, 17 nt, Human
ugccugggcuguuggca

SEQ ID NO: 3704425 - RNA, 19 nt, Human
ugccugggggaguuuuccu

SEQ ID NO: 3704426 - RNA, 20 nt, Human
ugccugggggaguuuuccuc

SEQ ID NO: 3704427 - RNA, 23 nt, Human
ugccugggguguuaguggcaccg

SEQ ID NO: 3704428 - RNA, 21 nt, Human
ugccuggguggacauggcccc

SEQ ID NO: 3704429 - RNA, 19 nt, Human
ugccuggguggaugggcca

SEQ ID NO: 3704430 - RNA, 17 nt, Human
ugccuggucacagggca

SEQ ID NO: 3704431 - RNA, 20 nt, Human
ugccuggucuccugccccca

SEQ ID NO: 3704432 - RNA, 19 nt, Human
ugccuggugcacugugucu

SEQ ID NO: 3704433 - RNA, 14 nt, Human
ugccugguggcagc

SEQ ID NO: 3704434 - RNA, 19 nt, Human
ugccuguaaucccagcacu

SEQ ID NO: 3704435 - RNA, 19 nt, Human
ugccuguacucgcuugugc

SEQ ID NO: 3704436 - RNA, 13 nt, Human
ugccuguaguuag

SEQ ID NO: 3704437 - RNA, 23 nt, Human
ugccuguaguuaggaaauaaaac

SEQ ID NO: 3704438 - RNA, 16 nt, Human
ugccuguauacuuuag

SEQ ID NO: 3704439 - RNA, 16 nt, Human
ugccuguccagccugg

SEQ ID NO: 3704440 - RNA, 14 nt, Human
ugccugucugcccc

SEQ ID NO: 3704441 - RNA, 16 nt, Human
ugccugucugccccag

SEQ ID NO: 3704442 - RNA, 21 nt, Human
ugccugugaacugaacucuga

SEQ ID NO: 3704443 - RNA, 15 nt, Human
ugccugugagccagu

SEQ ID NO: 3704444 - RNA, 16 nt, Human
ugccugugagccaguc

SEQ ID NO: 3704445 - RNA, 17 nt, Human
ugccugugaggcagggg

SEQ ID NO: 3704446 - RNA, 20 nt, Human
ugccugugcacggccagcug

SEQ ID NO: 3704447 - RNA, 21 nt, Human
ugccugugcacggccagcugc

SEQ ID NO: 3704448 - RNA, 19 nt, Human
ugccugugccacccaccag

SEQ ID NO: 3704449 - RNA, 14 nt, Human
ugccuguggaacug

SEQ ID NO: 3704450 - RNA, 21 nt, Human
ugccuguggaaucuggaguga

SEQ ID NO: 3704451 - RNA, 21 nt, Human
ugccuguggcgccgucuccag

SEQ ID NO: 3704452 - RNA, 11 nt, Human
ugccuguggcu

SEQ ID NO: 3704453 - RNA, 13 nt, Human
ugccuguggcugc

SEQ ID NO: 3704454 - RNA, 14 nt, Human
ugccuguggcugcg

SEQ ID NO: 3704455 - RNA, 15 nt, Human
ugccuguguccaugc

SEQ ID NO: 3704456 - RNA, 22 nt, Human
ugccuguguccaugcgcucagg

SEQ ID NO: 3704457 - RNA, 12 nt, Human
ugccugugugcg

SEQ ID NO: 3704458 - RNA, 20 nt, Human
ugccuguuauaacucugcac

SEQ ID NO: 3704459 - RNA, 11 nt, Human
ugccuguucag

SEQ ID NO: 3704460 - RNA, 20 nt, Human
ugccuguucagcuccagcuc

SEQ ID NO: 3704461 - RNA, 18 nt, Human
ugccuguucaguuacaga

SEQ ID NO: 3704462 - RNA, 19 nt, Human
ugccuguucaguuacagaa

SEQ ID NO: 3704463 - RNA, 22 nt, Human
ugccuguucaguuacagaaagu

SEQ ID NO: 3704464 - RNA, 16 nt, Human
ugccuguugggccagg

SEQ ID NO: 3704465 - RNA, 19 nt, Human
ugccuguuucccaggccca

SEQ ID NO: 3704466 - RNA, 15 nt, Human
ugccuuaaaauggaa

SEQ ID NO: 3704467 - RNA, 20 nt, Human
ugccuuaaaauggaauugaa

SEQ ID NO: 3704468 - RNA, 17 nt, Human
ugccuuaaaccuaccuc

SEQ ID NO: 3704469 - RNA, 13 nt, Human
ugccuuaaagaaa

SEQ ID NO: 3704470 - RNA, 15 nt, Human
ugccuuaagugagga

SEQ ID NO: 3704471 - RNA, 21 nt, Human
ugccuuacccucauguucuua

SEQ ID NO: 3704472 - RNA, 18 nt, Human
ugccuuaccuccugccca

SEQ ID NO: 3704473 - RNA, 21 nt, Human
ugccuuaccuccugcccagga

SEQ ID NO: 3704474 - RNA, 18 nt, Human
ugccuuacucuucuugaa

SEQ ID NO: 3704475 - RNA, 19 nt, Human
ugccuuacucuucuugaaa

SEQ ID NO: 3704476 - RNA, 20 nt, Human
ugccuuagaaauguaaacug

SEQ ID NO: 3704477 - RNA, 22 nt, Human
ugccuuagaaauguaaacugcc

SEQ ID NO: 3704478 - RNA, 23 nt, Human
ugccuuagaaauguaaacugcca

SEQ ID NO: 3704479 - RNA, 21 nt, Human
ugccuuagaaccuuucuuaca

SEQ ID NO: 3704480 - RNA, 14 nt, Human
ugccuuagaggagc

SEQ ID NO: 3704481 - RNA, 16 nt, Human
ugccuuagaggagccc

SEQ ID NO: 3704482 - RNA, 21 nt, Human
ugccuuaggccuaccugaugg

SEQ ID NO: 3704483 - RNA, 15 nt, Human
ugccuuagucucagu

SEQ ID NO: 3704484 - RNA, 15 nt, Human
ugccuuauggaacac

SEQ ID NO: 3704485 - RNA, 16 nt, Human
ugccuuauuaaaguuc

SEQ ID NO: 3704486 - RNA, 17 nt, Human
ugccuuauucagggaag

SEQ ID NO: 3704487 - RNA, 20 nt, Human
ugccuucaacuaaaaacaaa

SEQ ID NO: 3704488 - RNA, 17 nt, Human
ugccuucagcucuacag

SEQ ID NO: 3704489 - RNA, 24 nt, Human
ugccuucauggaacucagcugucu

SEQ ID NO: 3704490 - RNA, 17 nt, Human
ugccuucauuaccuuuu

SEQ ID NO: 3704491 - RNA, 19 nt, Human
ugccuucauuaccuuuuuu

SEQ ID NO: 3704492 - RNA, 12 nt, Human
ugccuucauuug

SEQ ID NO: 3704493 - RNA, 13 nt, Human
ugccuuccacgcu

SEQ ID NO: 3704494 - RNA, 17 nt, Human
uguaaggaugggcaugg

SEQ ID NO: 3704495 - RNA, 21 nt, Human
uguaaggcuuguuccaaugcc

SEQ ID NO: 3704496 - RNA, 19 nt, Human
uguaagggaaacugccagc

SEQ ID NO: 3704497 - RNA, 15 nt, Human
uguaaguaaacgguc

SEQ ID NO: 3704498 - RNA, 21 nt, Human
uguaaguaacuucacauuaaa

SEQ ID NO: 3704499 - RNA, 18 nt, Human
uguaagugaaaaacauga

SEQ ID NO: 3704500 - RNA, 16 nt, Human
uguaagugcuacauaa

SEQ ID NO: 3704501 - RNA, 14 nt, Human
uguaagugugagua

SEQ ID NO: 3704502 - RNA, 15 nt, Human
uguaagugugugugu

SEQ ID NO: 3704503 - RNA, 16 nt, Human
uguaaguugaagcaaa

SEQ ID NO: 3704504 - RNA, 14 nt, Human
uguaaguugggcuu

SEQ ID NO: 3704505 - RNA, 18 nt, Human
uguaaguugggcuugcua

SEQ ID NO: 3704506 - RNA, 15 nt, Human
uguaaguuucaggug

SEQ ID NO: 3704507 - RNA, 16 nt, Human
uguaaguuucagguga

SEQ ID NO: 3704508 - RNA, 19 nt, Human
uguaaguuucaggugacau

SEQ ID NO: 3704509 - RNA, 20 nt, Human
uguaauaaaaaguauauguu

SEQ ID NO: 3704510 - RNA, 14 nt, Human
uguaauaaacccuu

SEQ ID NO: 3704511 - RNA, 16 nt, Human
uguaauaaaguauaua

SEQ ID NO: 3704512 - RNA, 19 nt, Human
uguaauaaaguauauaauu

SEQ ID NO: 3704513 - RNA, 16 nt, Human
uguaauaaaguguuuu

SEQ ID NO: 3704514 - RNA, 17 nt, Human
uguaauaaaguguuuuc

SEQ ID NO: 3704515 - RNA, 15 nt, Human
uguaauaaauaugag

SEQ ID NO: 3704516 - RNA, 17 nt, Human
uguaauaacugugaagu

SEQ ID NO: 3704517 - RNA, 12 nt, Human
uguaauaagaca

SEQ ID NO: 3704518 - RNA, 14 nt, Human
uguaauaagacaua

SEQ ID NO: 3704519 - RNA, 17 nt, Human
uguaauaauaccucaau

SEQ ID NO: 3704520 - RNA, 20 nt, Human
uguaauagaaaacugaaaau

SEQ ID NO: 3704521 - RNA, 13 nt, Human
uguaauauuuaca

SEQ ID NO: 3704522 - RNA, 14 nt, Human
uguaauauuuugua

SEQ ID NO: 3704523 - RNA, 22 nt, Human
uguaauauuuuguauuauugcu

SEQ ID NO: 3704524 - RNA, 13 nt, Human
uguaaucaauaaa

SEQ ID NO: 3704525 - RNA, 15 nt, Human
uguaaucaauaaacg

SEQ ID NO: 3704526 - RNA, 16 nt, Human
uguaaucccagcuacu

SEQ ID NO: 3704527 - RNA, 16 nt, Human
uguaaucguuaugugu

SEQ ID NO: 3704528 - RNA, 18 nt, Human
uguaaucguuaugugugu

SEQ ID NO: 3704529 - RNA, 19 nt, Human
uguaaucucguuucaaaaa

SEQ ID NO: 3704530 - RNA, 14 nt, Human
uguaaucucucugc

SEQ ID NO: 3704531 - RNA, 18 nt, Human
uguaaucucucugcagcu

SEQ ID NO: 3704532 - RNA, 20 nt, Human
uguaaucucucugcagcugc

SEQ ID NO: 3704533 - RNA, 19 nt, Human
uguaaucuuguugauaaaa

SEQ ID NO: 3704534 - RNA, 13 nt, Human
uguaaugaaaacc

SEQ ID NO: 3704535 - RNA, 18 nt, Human
uguaaugaaaaugaauau

SEQ ID NO: 3704536 - RNA, 21 nt, Human
uguaaugaaaaugaauaucua

SEQ ID NO: 3704537 - RNA, 20 nt, Human
uguaaugaaacaccuucucu

SEQ ID NO: 3704538 - RNA, 11 nt, Human
uguaaugaaua

SEQ ID NO: 3704539 - RNA, 19 nt, Human
uguaaugaauuccuagaau

SEQ ID NO: 3704540 - RNA, 12 nt, Human
uguaaugcaaaa

SEQ ID NO: 3704541 - RNA, 22 nt, Human
uguaaugcgauuuuauuacugg

SEQ ID NO: 3704542 - RNA, 13 nt, Human
uguaaugcugcac

SEQ ID NO: 3704543 - RNA, 15 nt, Human
uguaauguaacugcu

SEQ ID NO: 3704544 - RNA, 21 nt, Human
uguaauguagcguguuuacau

SEQ ID NO: 3704545 - RNA, 20 nt, Human
uguaauguaggggaaaguuu

SEQ ID NO: 3704546 - RNA, 23 nt, Human
uguaaugucaccaccuucccagc

SEQ ID NO: 3704547 - RNA, 19 nt, Human
uguaaugugugaaaaagau

SEQ ID NO: 3704548 - RNA, 22 nt, Human
uguaaugugugguggccucagc

SEQ ID NO: 3704549 - RNA, 15 nt, Human
uguaauguuaauauu

SEQ ID NO: 3704550 - RNA, 14 nt, Human
uguaauguuacuga

SEQ ID NO: 3704551 - RNA, 22 nt, Human
uguaauguuacugaucaugcau

SEQ ID NO: 3704552 - RNA, 16 nt, Human
uguaauguuuguuacc

SEQ ID NO: 3704553 - RNA, 21 nt, Human
uguaauguuuucuuugcaaag

SEQ ID NO: 3704554 - RNA, 14 nt, Human
uguaauuaaaagca

SEQ ID NO: 3704555 - RNA, 16 nt, Human
uguaauuaaaagcaaa

SEQ ID NO: 3704556 - RNA, 18 nt, Human
uguaauuaaguacuaugu

SEQ ID NO: 3704557 - RNA, 21 nt, Human
uguaauuaaguacuauguauc

SEQ ID NO: 3704558 - RNA, 22 nt, Human
uguaauuacuuaucccugccca

SEQ ID NO: 3704559 - RNA, 15 nt, Human
uguaauuauaucuga

SEQ ID NO: 3704560 - RNA, 16 nt, Human
uguaauuaugauuugg

SEQ ID NO: 3704561 - RNA, 13 nt, Human
uguaauuauuuga

SEQ ID NO: 3704562 - RNA, 16 nt, Human
uguaauuauuugaaug

SEQ ID NO: 3704563 - RNA, 14 nt, Human
uguaauucagugua

SEQ ID NO: 3704564 - RNA, 15 nt, Human
uguaauuccuaccuc

SEQ ID NO: 3704565 - RNA, 14 nt, Human
uguaauucuucagu

SEQ ID NO: 3704566 - RNA, 23 nt, Human
uguaauugacgguuuuuuauuau

SEQ ID NO: 3704567 - RNA, 14 nt, Human
uguaauugcuuaca

SEQ ID NO: 3704568 - RNA, 21 nt, Human
uguaauuguguggauucuuua

SEQ ID NO: 3704569 - RNA, 19 nt, Human
uguaauuguuccuuuuauu

SEQ ID NO: 3704570 - RNA, 23 nt, Human
uguaauuguuguuuguauguaua

SEQ ID NO: 3704571 - RNA, 18 nt, Human
uguaauuuaaaauuguga

SEQ ID NO: 3704572 - RNA, 22 nt, Human
uguaauuuaaaauugugaugug

SEQ ID NO: 3704573 - RNA, 15 nt, Human
uguaauuuaaacagg

SEQ ID NO: 3704574 - RNA, 19 nt, Human
uguaauuuaaacaggccca

SEQ ID NO: 3704575 - RNA, 22 nt, Human
uguaauuuaaacaggcccagca

SEQ ID NO: 3704576 - RNA, 19 nt, Human
uguaauuuaaggucuguuu

SEQ ID NO: 3704577 - RNA, 20 nt, Human
uguaauuuaggguacuaaau

SEQ ID NO: 3704578 - RNA, 21 nt, Human
uguaauuuaggguacuaaauu

SEQ ID NO: 3704579 - RNA, 15 nt, Human
uguaauuuauaaaau

SEQ ID NO: 3704580 - RNA, 18 nt, Human
uguaauuucuuugccugu

SEQ ID NO: 3704581 - RNA, 21 nt, Human
uguaauuucuuugccuguuca

SEQ ID NO: 3704582 - RNA, 23 nt, Human
uguaauuucuuugccuguucagu

SEQ ID NO: 3704583 - RNA, 16 nt, Human
uguaauuugugauaca

SEQ ID NO: 3704584 - RNA, 17 nt, Human
uguaauuugugauacaa

SEQ ID NO: 3704585 - RNA, 21 nt, Human
uguaauuugugauacaaugcu

SEQ ID NO: 3704586 - RNA, 13 nt, Human
uguaauuugugua

SEQ ID NO: 3704587 - RNA, 15 nt, Human
uguaauuuguguaau

SEQ ID NO: 3704588 - RNA, 20 nt, Human
uguaauuuguguaauaaagu

SEQ ID NO: 3704589 - RNA, 14 nt, Human
uguaauuuguuuga

SEQ ID NO: 3704590 - RNA, 23 nt, Human
uguaauuuuacacgcuuuuguga

SEQ ID NO: 3704591 - RNA, 16 nt, Human
uguaauuuuauaugaa

SEQ ID NO: 3704592 - RNA, 20 nt, Human
uguaauuuuguguaagaaau

SEQ ID NO: 3704593 - RNA, 15 nt, Human
uguaauuuuucugua

SEQ ID NO: 3704594 - RNA, 17 nt, Human
uguaauuuuucuguaua

SEQ ID NO: 3704595 - RNA, 17 nt, Human
uguacaaaaaaaucuuc

SEQ ID NO: 3704596 - RNA, 22 nt, Human
uguacaaaagggacaugaaaua

SEQ ID NO: 3704597 - RNA, 22 nt, Human
uguacaaaauaaacaaauaaca

SEQ ID NO: 3704598 - RNA, 17 nt, Human
uguacaaaauaaaguua

SEQ ID NO: 3704599 - RNA, 14 nt, Human
uguacaaaauggaa

SEQ ID NO: 3704600 - RNA, 20 nt, Human
uguacaaaauggaauucauu

SEQ ID NO: 3704601 - RNA, 19 nt, Human
uguacaaaguagaagucuu

SEQ ID NO: 3704602 - RNA, 23 nt, Human
uguacaaaguagaagucuuagau

SEQ ID NO: 3704603 - RNA, 13 nt, Human
uguacaaaguauu

SEQ ID NO: 3704604 - RNA, 18 nt, Human
uguacaaaguauuaagca

SEQ ID NO: 3704605 - RNA, 19 nt, Human
uguacaaaguauuaagcau

SEQ ID NO: 3704606 - RNA, 16 nt, Human
guucuaaguuucuaag

SEQ ID NO: 3704607 - RNA, 21 nt, Human
guucuaaguuucuaagauucu

SEQ ID NO: 3704608 - RNA, 19 nt, Human
guucuaauaauuucuaaug

SEQ ID NO: 3704609 - RNA, 17 nt, Human
guucuacccguuccaaa

SEQ ID NO: 3704610 - RNA, 16 nt, Human
guucuacucaggcugg

SEQ ID NO: 3704611 - RNA, 13 nt, Human
guucuagaaaaac

SEQ ID NO: 3704612 - RNA, 15 nt, Human
guucuagagaagagg

SEQ ID NO: 3704613 - RNA, 23 nt, Human
guucuagagaagaggcuggugcu

SEQ ID NO: 3704614 - RNA, 19 nt, Human
guucuagcauggcauauuu

SEQ ID NO: 3704615 - RNA, 14 nt, Human
guucuagucuccuu

SEQ ID NO: 3704616 - RNA, 17 nt, Human
guucuaugguuaugaaa

SEQ ID NO: 3704617 - RNA, 14 nt, Human
guucuauuuaagug

SEQ ID NO: 3704618 - RNA, 23 nt, Human
guucuauuuaaguguacuaauua

SEQ ID NO: 3704619 - RNA, 18 nt, Human
guucuauuucagugccaa

SEQ ID NO: 3704620 - RNA, 13 nt, Human
guucuauuuggaa

SEQ ID NO: 3704621 - RNA, 15 nt, Human
guucuauuuggaauu

SEQ ID NO: 3704622 - RNA, 22 nt, Human
guucucaaacgguacacagacu

SEQ ID NO: 3704623 - RNA, 12 nt, Human
guucucaaugaa

SEQ ID NO: 3704624 - RNA, 15 nt, Human
guucucaaugaaaaa

SEQ ID NO: 3704625 - RNA, 17 nt, Human
guucucaauuccaacag

SEQ ID NO: 3704626 - RNA, 17 nt, Human
guucucacacccaccgu

SEQ ID NO: 3704627 - RNA, 23 nt, Human
guucucagaaucccuuaacaguu

SEQ ID NO: 3704628 - RNA, 19 nt, Human
guucucagcucccccuguc

SEQ ID NO: 3704629 - RNA, 17 nt, Human
guucucagguguugcca

SEQ ID NO: 3704630 - RNA, 19 nt, Human
guucucauggguggcacuc

SEQ ID NO: 3704631 - RNA, 20 nt, Human
guucucccucccaccuuaaa

SEQ ID NO: 3704632 - RNA, 17 nt, Human
guucuccugcugcuccc

SEQ ID NO: 3704633 - RNA, 18 nt, Human
guucuccugcugcucccu

SEQ ID NO: 3704634 - RNA, 21 nt, Human
guucuccugcugcucccucag

SEQ ID NO: 3704635 - RNA, 22 nt, Human
guucuccugcugcucccucaga

SEQ ID NO: 3704636 - RNA, 12 nt, Human
guucucuagaaa

SEQ ID NO: 3704637 - RNA, 18 nt, Human
guucucuaucauuuaaua

SEQ ID NO: 3704638 - RNA, 17 nt, Human
guucucucugccuguga

SEQ ID NO: 3704639 - RNA, 14 nt, Human
guucucugaggaca

SEQ ID NO: 3704640 - RNA, 18 nt, Human
guucucugcccuccaaga

SEQ ID NO: 3704641 - RNA, 12 nt, Human
guucucugggag

SEQ ID NO: 3704642 - RNA, 20 nt, Human
guucucugggagaaaaucau

SEQ ID NO: 3704643 - RNA, 16 nt, Human
guucucuguccagcag

SEQ ID NO: 3704644 - RNA, 21 nt, Human
guucugaaauauuuuaccacu

SEQ ID NO: 3704645 - RNA, 14 nt, Human
guucugaagaagau

SEQ ID NO: 3704646 - RNA, 23 nt, Human
guucugacauuaacaguuuucca

SEQ ID NO: 3704647 - RNA, 21 nt, Human
guucugagauggcucccaggg

SEQ ID NO: 3704648 - RNA, 14 nt, Human
guucugauuagaaa

SEQ ID NO: 3704649 - RNA, 20 nt, Human
guucugauuagaaaugacca

SEQ ID NO: 3704650 - RNA, 22 nt, Human
guucugcaaaaauauuuauaaa

SEQ ID NO: 3704651 - RNA, 18 nt, Human
guucugcaaauagaaaac

SEQ ID NO: 3704652 - RNA, 19 nt, Human
guucugcaaauagaaaaca

SEQ ID NO: 3704653 - RNA, 15 nt, Human
guucugcacacagca

SEQ ID NO: 3704654 - RNA, 16 nt, Human
guucugcacacagcac

SEQ ID NO: 3704655 - RNA, 13 nt, Human
guucugcacugaa

SEQ ID NO: 3704656 - RNA, 14 nt, Human
guucugcacugaaa

SEQ ID NO: 3704657 - RNA, 12 nt, Human
guucugccagga

SEQ ID NO: 3704658 - RNA, 19 nt, Human
guucugcccccagcccaaa

SEQ ID NO: 3704659 - RNA, 17 nt, Human
guucugccugccagcug

SEQ ID NO: 3704660 - RNA, 23 nt, Human
guucugcucaucauucucugucu

SEQ ID NO: 3704661 - RNA, 16 nt, Human
guucugcuccagacag

SEQ ID NO: 3704662 - RNA, 20 nt, Human
guucugcuccagacagggaa

SEQ ID NO: 3704663 - RNA, 13 nt, Human
guucugcuccucu

SEQ ID NO: 3704664 - RNA, 16 nt, Human
guucugcuccucucca

SEQ ID NO: 3704665 - RNA, 18 nt, Human
guucugcuccucuccagg

SEQ ID NO: 3704666 - RNA, 22 nt, Human
guucugcucugguuguuucugu

SEQ ID NO: 3704667 - RNA, 16 nt, Human
guucugcuggccugga

SEQ ID NO: 3704668 - RNA, 21 nt, Human
guucugcuucaauaaaucuuu

SEQ ID NO: 3704669 - RNA, 14 nt, Human
guucugcuuucucc

SEQ ID NO: 3704670 - RNA, 23 nt, Human
guucuggcagaguugaagacaga

SEQ ID NO: 3704671 - RNA, 12 nt, Human
guucuggccaga

SEQ ID NO: 3704672 - RNA, 13 nt, Human
guucuggccagaa

SEQ ID NO: 3704673 - RNA, 21 nt, Human
guucuggcccucaccccugcc

SEQ ID NO: 3704674 - RNA, 16 nt, Human
guucuggcucuuccag

SEQ ID NO: 3704675 - RNA, 12 nt, Human
guucugggacac

SEQ ID NO: 3704676 - RNA, 23 nt, Human
guucugggacacaguucaauucu

SEQ ID NO: 3704677 - RNA, 21 nt, Human
guucuggggggacccagugca

SEQ ID NO: 3704678 - RNA, 17 nt, Human
guucugguccuuuuugg

SEQ ID NO: 3704679 - RNA, 19 nt, Human
guucuggugaggccuugcu

SEQ ID NO: 3704680 - RNA, 20 nt, Human
guucuggugaggccuugcuc

SEQ ID NO: 3704681 - RNA, 12 nt, Human
guucugguguua

SEQ ID NO: 3704682 - RNA, 15 nt, Human
guucuguauuugaaa

SEQ ID NO: 3704683 - RNA, 12 nt, Human
guucugucacca

SEQ ID NO: 3704684 - RNA, 17 nt, Human
guucuguggaaagugua

SEQ ID NO: 3704685 - RNA, 14 nt, Human
guucugugguuccu

SEQ ID NO: 3704686 - RNA, 23 nt, Human
guucuguguauuuaauuguaaac

SEQ ID NO: 3704687 - RNA, 18 nt, Human
guucuguguauuuucagu

SEQ ID NO: 3704688 - RNA, 23 nt, Human
guucugugucuuucacagcuccu

SEQ ID NO: 3704689 - RNA, 15 nt, Human
guucuguguuuaauu

SEQ ID NO: 3704690 - RNA, 22 nt, Human
guucuguguuuaauuucuucaa

SEQ ID NO: 3704691 - RNA, 13 nt, Human
guucuguuacaaa

SEQ ID NO: 3704692 - RNA, 20 nt, Human
guucuguuacaaaauguaac

SEQ ID NO: 3704693 - RNA, 21 nt, Human
guucuguuauauccccugcua

SEQ ID NO: 3704694 - RNA, 13 nt, Human
guucuguuucaag

SEQ ID NO: 3704695 - RNA, 13 nt, Human
guucuguuugcug

SEQ ID NO: 3704696 - RNA, 22 nt, Human
guucuguuuguuauuguuuugu

SEQ ID NO: 3704697 - RNA, 16 nt, Human
guucuguuuuguuucg

SEQ ID NO: 3704698 - RNA, 16 nt, Human
guucuguuuuguuuug

SEQ ID NO: 3704699 - RNA, 23 nt, Human
guucuguuuuguuuuguuuuuua

SEQ ID NO: 3704700 - RNA, 13 nt, Human
guucuuaauucuu

SEQ ID NO: 3704701 - RNA, 13 nt, Human
guucuuaauugca

SEQ ID NO: 3704702 - RNA, 15 nt, Human
guucuuaauugcacu

SEQ ID NO: 3704703 - RNA, 16 nt, Human
guucuuacugcuuaau

SEQ ID NO: 3704704 - RNA, 18 nt, Human
guucuuagauaucuuuuu

SEQ ID NO: 3704705 - RNA, 17 nt, Human
guucuuaguuugcaguu

SEQ ID NO: 3704706 - RNA, 14 nt, Human
guucuuccaaagca

SEQ ID NO: 3704707 - RNA, 13 nt, Human
guucuuccucagc

SEQ ID NO: 3704708 - RNA, 18 nt, Human
guucuuccucagccagcc

SEQ ID NO: 3704709 - RNA, 15 nt, Human
guucuuccuguaauc

SEQ ID NO: 3704710 - RNA, 14 nt, Human
guucuucgggaaga

SEQ ID NO: 3704711 - RNA, 19 nt, Human
guucuugccacugcacucc

SEQ ID NO: 3704712 - RNA, 13 nt, Human
guucuugcugcua

SEQ ID NO: 3704713 - RNA, 14 nt, Human
guucuugcugcuag

SEQ ID NO: 3704714 - RNA, 15 nt, Human
guucuugcugcuaga

SEQ ID NO: 3704715 - RNA, 17 nt, Human
guucuugcugcuagaac

SEQ ID NO: 3704716 - RNA, 20 nt, Human
guucuuggcaauaaauuuug

SEQ ID NO: 3704717 - RNA, 12 nt, Human
guucuugucuga

SEQ ID NO: 3704718 - RNA, 14 nt, Human
guucuuguucuguu

SEQ ID NO: 3704719 - RNA, 18 nt, Human
guucuuguucuguuuugu

SEQ ID NO: 3704720 - RNA, 23 nt, Human
guucuuguuuuuaaguuugcacu

SEQ ID NO: 3704721 - RNA, 16 nt, Human
guucuuuaggagauuu

SEQ ID NO: 3704722 - RNA, 13 nt, Human
guucuuuauauac

SEQ ID NO: 3704723 - RNA, 19 nt, Human
guucuuuauauacaauaau

SEQ ID NO: 3704724 - RNA, 12 nt, Human
guucuuucagaa

SEQ ID NO: 3704725 - RNA, 20 nt, Human
guucuuuccauaauaaaagg

SEQ ID NO: 3704726 - RNA, 14 nt, Human
guucuuucuuccuc

SEQ ID NO: 3704727 - RNA, 15 nt, Human
guucuuucuuccucu

SEQ ID NO: 3704728 - RNA, 16 nt, Human
guucuuucuuccucug

SEQ ID NO: 3704729 - RNA, 21 nt, Human
guucuuugagggacugccucu

SEQ ID NO: 3704730 - RNA, 23 nt, Human
guucuuugcugcauucugccucu

SEQ ID NO: 3704731 - RNA, 11 nt, Human
guucuuuggaa

SEQ ID NO: 3704732 - RNA, 18 nt, Human
guucuuuggaaggaguga

SEQ ID NO: 3704733 - RNA, 17 nt, Human
guucuuugggccagaca

SEQ ID NO: 3704734 - RNA, 20 nt, Human
guucuuuguucauagcccag

SEQ ID NO: 3704735 - RNA, 21 nt, Human
guucuuuguucauagcccagu

SEQ ID NO: 3704736 - RNA, 13 nt, Human
guucuuuuaaagg

SEQ ID NO: 3704737 - RNA, 16 nt, Human
guucuuuuguuguaaa

SEQ ID NO: 3704738 - RNA, 15 nt, Human
guucuuuuuaaguua

SEQ ID NO: 3704739 - RNA, 17 nt, Human
guucuuuuuaaguuaau

SEQ ID NO: 3704740 - RNA, 21 nt, Human
guugaaaaaauuuaaaaguaa

SEQ ID NO: 3704741 - RNA, 17 nt, Human
guugaaaaacagcugag

SEQ ID NO: 3704742 - RNA, 17 nt, Human
guugaaaagacuccaaa

SEQ ID NO: 3704743 - RNA, 22 nt, Human
guugaaaagacuccaaagaaau

SEQ ID NO: 3704744 - RNA, 23 nt, Human
guugaaaagacuccaaagaaaug

SEQ ID NO: 3704745 - RNA, 12 nt, Human
guugaaacauau

SEQ ID NO: 3704746 - RNA, 12 nt, Human
guugaaagcaaa

SEQ ID NO: 3704747 - RNA, 16 nt, Human
guugaaagcaaaaaug

SEQ ID NO: 3704748 - RNA, 21 nt, Human
guugaaagcaaaaaugcuaau

SEQ ID NO: 3704749 - RNA, 20 nt, Human
guugaaagguuuuuuuucag

SEQ ID NO: 3704750 - RNA, 20 nt, Human
guugaaauuauguauguuua

SEQ ID NO: 3704751 - RNA, 15 nt, Human
guugaaauuguaauu

SEQ ID NO: 3704752 - RNA, 16 nt, Human
guugaaauuguaauua

SEQ ID NO: 3704753 - RNA, 19 nt, Human
guugaacuguuagaaugua

SEQ ID NO: 3704754 - RNA, 21 nt, Human
guugaagaccuaaccagggcc

SEQ ID NO: 3704755 - RNA, 16 nt, Human
guugaagacuuuguuu

SEQ ID NO: 3704756 - RNA, 17 nt, Human
uggaggccucaggugcu

SEQ ID NO: 3704757 - RNA, 19 nt, Human
uggaggccuuccagcugcu

SEQ ID NO: 3704758 - RNA, 21 nt, Human
uggaggccuuccagcugcugu

SEQ ID NO: 3704759 - RNA, 22 nt, Human
uggaggcggugcggcagggaag

SEQ ID NO: 3704760 - RNA, 19 nt, Human
uggaggcugacgugugagg

SEQ ID NO: 3704761 - RNA, 14 nt, Human
uggaggcugucuuc

SEQ ID NO: 3704762 - RNA, 15 nt, Human
uggaggcuuccugcg

SEQ ID NO: 3704763 - RNA, 22 nt, Human
uggaggcuuccugcguccuccu

SEQ ID NO: 3704764 - RNA, 13 nt, Human
uggagggccuggg

SEQ ID NO: 3704765 - RNA, 18 nt, Human
uggagggccugggccugg

SEQ ID NO: 3704766 - RNA, 21 nt, Human
uggagggcuagaaucuggaga

SEQ ID NO: 3704767 - RNA, 21 nt, Human
uggagggcuggaaucuggaga

SEQ ID NO: 3704768 - RNA, 14 nt, Human
uggaggggcagagc

SEQ ID NO: 3704769 - RNA, 20 nt, Human
uggaggggcauggccagcag

SEQ ID NO: 3704770 - RNA, 23 nt, Human
uggaggggggaggugggauccuc

SEQ ID NO: 3704771 - RNA, 17 nt, Human
uggagggguaggggcug

SEQ ID NO: 3704772 - RNA, 14 nt, Human
uggagggguguggc

SEQ ID NO: 3704773 - RNA, 15 nt, Human
uggagggucccaagc

SEQ ID NO: 3704774 - RNA, 16 nt, Human
uggagggucccaagcu

SEQ ID NO: 3704775 - RNA, 20 nt, Human
uggagggugggagagcccag

SEQ ID NO: 3704776 - RNA, 18 nt, Human
uggaggucacauucagga

SEQ ID NO: 3704777 - RNA, 20 nt, Human
uggaggucacauucaggaag

SEQ ID NO: 3704778 - RNA, 20 nt, Human
uggaggucagcauuugaucu

SEQ ID NO: 3704779 - RNA, 20 nt, Human
uggaggucgguagguucagc

SEQ ID NO: 3704780 - RNA, 23 nt, Human
uggagguggaaaagcaacauuca

SEQ ID NO: 3704781 - RNA, 17 nt, Human
uggaggugggagcagga

SEQ ID NO: 3704782 - RNA, 18 nt, Human
uggaggugggagcaggag

SEQ ID NO: 3704783 - RNA, 19 nt, Human
uggagguggggccuggagc

SEQ ID NO: 3704784 - RNA, 15 nt, Human
uggaggugggguugg

SEQ ID NO: 3704785 - RNA, 17 nt, Human
uggagguuaaggcugag

SEQ ID NO: 3704786 - RNA, 20 nt, Human
uggagguuaaggcugaggaa

SEQ ID NO: 3704787 - RNA, 22 nt, Human
uggagguuaaggcugaggaaag

SEQ ID NO: 3704788 - RNA, 15 nt, Human
uggagguucuaaggc

SEQ ID NO: 3704789 - RNA, 15 nt, Human
uggagguugaagcca

SEQ ID NO: 3704790 - RNA, 18 nt, Human
uggagguugaagccaagu

SEQ ID NO: 3704791 - RNA, 14 nt, Human
uggagguugauaac

SEQ ID NO: 3704792 - RNA, 14 nt, Human
uggagguugcagug

SEQ ID NO: 3704793 - RNA, 16 nt, Human
uggagucaaaaagaac

SEQ ID NO: 3704794 - RNA, 14 nt, Human
uggaguccagucuc

SEQ ID NO: 3704795 - RNA, 14 nt, Human
uggaguccccucac

SEQ ID NO: 3704796 - RNA, 14 nt, Human
uggagucggaaggg

SEQ ID NO: 3704797 - RNA, 13 nt, Human
uggagucuccuga

SEQ ID NO: 3704798 - RNA, 22 nt, Human
uggagucugccacccaggaucc

SEQ ID NO: 3704799 - RNA, 18 nt, Human
uggagucuggagugggca

SEQ ID NO: 3704800 - RNA, 15 nt, Human
uggagugcagggagg

SEQ ID NO: 3704801 - RNA, 14 nt, Human
uggagugcagugag

SEQ ID NO: 3704802 - RNA, 16 nt, Human
uggagugcuguuuugu

SEQ ID NO: 3704803 - RNA, 17 nt, Human
uggagugcuguuuuguu

SEQ ID NO: 3704804 - RNA, 16 nt, Human
uggaguggagugagag

SEQ ID NO: 3704805 - RNA, 16 nt, Human
uggaguggcucgccag

SEQ ID NO: 3704806 - RNA, 16 nt, Human
uggaguggggcaguag

SEQ ID NO: 3704807 - RNA, 15 nt, Human
uggagugugagccac

SEQ ID NO: 3704808 - RNA, 21 nt, Human
uggagugugaggguccugcag

SEQ ID NO: 3704809 - RNA, 19 nt, Human
uggaguguguauuguuccc

SEQ ID NO: 3704810 - RNA, 18 nt, Human
uggaguguuauguauuuc

SEQ ID NO: 3704811 - RNA, 19 nt, Human
uggaguguuccccuuccac

SEQ ID NO: 3704812 - RNA, 22 nt, Human
uggaguguuccccuuccacuga

SEQ ID NO: 3704813 - RNA, 18 nt, Human
uggaguucauucauauua

SEQ ID NO: 3704814 - RNA, 16 nt, Human
uggaguuccugaaccu

SEQ ID NO: 3704815 - RNA, 20 nt, Human
uggaguuccugaaccugaug

SEQ ID NO: 3704816 - RNA, 14 nt, Human
uggaguucuugugc

SEQ ID NO: 3704817 - RNA, 22 nt, Human
uggaguugaaagaguuaagaau

SEQ ID NO: 3704818 - RNA, 17 nt, Human
uggaguugaucuggaac

SEQ ID NO: 3704819 - RNA, 11 nt, Human
uggaguuggag

SEQ ID NO: 3704820 - RNA, 21 nt, Human
uggaguuucauguacaagaug

SEQ ID NO: 3704821 - RNA, 16 nt, Human
uggaguuucuaagguc

SEQ ID NO: 3704822 - RNA, 17 nt, Human
uggaguuuuuuguacca

SEQ ID NO: 3704823 - RNA, 18 nt, Human
uggaguuuuuuguaccaa

SEQ ID NO: 3704824 - RNA, 17 nt, Human
uggauaaaauaaugcug

SEQ ID NO: 3704825 - RNA, 19 nt, Human
uggauaaaauaaugcugca

SEQ ID NO: 3704826 - RNA, 16 nt, Human
uggauaacaaagauau

SEQ ID NO: 3704827 - RNA, 17 nt, Human
uggauaacaaagauauc

SEQ ID NO: 3704828 - RNA, 21 nt, Human
uggauaauuuugcauaaaauu

SEQ ID NO: 3704829 - RNA, 18 nt, Human
uggauacauacaccagca

SEQ ID NO: 3704830 - RNA, 14 nt, Human
uggauacuuggauu

SEQ ID NO: 3704831 - RNA, 15 nt, Human
uggauacuuggauuu

SEQ ID NO: 3704832 - RNA, 14 nt, Human
uggauagaugcccu

SEQ ID NO: 3704833 - RNA, 17 nt, Human
uggauagaugcccugcu

SEQ ID NO: 3704834 - RNA, 16 nt, Human
uggauagcaugucuuu

SEQ ID NO: 3704835 - RNA, 17 nt, Human
uggauagcuaauaauga

SEQ ID NO: 3704836 - RNA, 12 nt, Human
uggauauaaaua

SEQ ID NO: 3704837 - RNA, 13 nt, Human
uggauauaaauau

SEQ ID NO: 3704838 - RNA, 23 nt, Human
uggauauagcuaggugacauaua

SEQ ID NO: 3704839 - RNA, 14 nt, Human
uggauaucuguuag

SEQ ID NO: 3704840 - RNA, 16 nt, Human
uggauaucuguuagau

SEQ ID NO: 3704841 - RNA, 15 nt, Human
uggauauuagucaua

SEQ ID NO: 3704842 - RNA, 17 nt, Human
uggauauuauuagaaau

SEQ ID NO: 3704843 - RNA, 18 nt, Human
uggauauuuucaaauugu

SEQ ID NO: 3704844 - RNA, 22 nt, Human
uggauauuuucaaauuguaucu

SEQ ID NO: 3704845 - RNA, 14 nt, Human
uggaucacaaagug

SEQ ID NO: 3704846 - RNA, 16 nt, Human
uggaucacaagaugga

SEQ ID NO: 3704847 - RNA, 14 nt, Human
uggaucacagcugc

SEQ ID NO: 3704848 - RNA, 16 nt, Human
uggaucacagcugcuu

SEQ ID NO: 3704849 - RNA, 19 nt, Human
uggaucacgacgcugcaga

SEQ ID NO: 3704850 - RNA, 17 nt, Human
uggaucagcguggccuu

SEQ ID NO: 3704851 - RNA, 18 nt, Human
uggauccaauguuagaga

SEQ ID NO: 3704852 - RNA, 21 nt, Human
uggauccacuggcuggacaaa

SEQ ID NO: 3704853 - RNA, 14 nt, Human
uggaucuccaagga

SEQ ID NO: 3704854 - RNA, 15 nt, Human
uggaucuccccacuc

SEQ ID NO: 3704855 - RNA, 22 nt, Human
uggaucucccugagaugggcuu

SEQ ID NO: 3704856 - RNA, 22 nt, Human
uggaucucuucuuaauguacau

SEQ ID NO: 3704857 - RNA, 19 nt, Human
uggaucugggacccuuucc

SEQ ID NO: 3704858 - RNA, 23 nt, Human
uggaucugggacccuuuccuucc

SEQ ID NO: 3704859 - RNA, 20 nt, Human
uggaucuguccaaggaaacu

SEQ ID NO: 3704860 - RNA, 14 nt, Human
uggaucuugaaugu

SEQ ID NO: 3704861 - RNA, 19 nt, Human
uggaucuugaauguggucu

SEQ ID NO: 3704862 - RNA, 17 nt, Human
uggaugaaauuuucuag

SEQ ID NO: 3704863 - RNA, 19 nt, Human
uggaugaagauucuccugu

SEQ ID NO: 3704864 - RNA, 22 nt, Human
uggaugaagauucuccugugcu

SEQ ID NO: 3704865 - RNA, 23 nt, Human
uggaugaagauucuccugugcua

SEQ ID NO: 3704866 - RNA, 15 nt, Human
uggaugagcccucag

SEQ ID NO: 3704867 - RNA, 17 nt, Human
uggaugagcccucagaa

SEQ ID NO: 3704868 - RNA, 23 nt, Human
uggaugagcucccacaagccuga

SEQ ID NO: 3704869 - RNA, 20 nt, Human
uggaugauacuaauaaacua

SEQ ID NO: 3704870 - RNA, 19 nt, Human
uggaugauauuuuuuauca

SEQ ID NO: 3704871 - RNA, 13 nt, Human
uggaugcaaagua

SEQ ID NO: 3704872 - RNA, 13 nt, Human
uggaugcagccuc

SEQ ID NO: 3704873 - RNA, 23 nt, Human
uggaugcagugcucgcuguugcu

SEQ ID NO: 3704874 - RNA, 22 nt, Human
uggaugcauguuuuccagcucc

SEQ ID NO: 3704875 - RNA, 22 nt, Human
uggaugccagggccgaccagag

SEQ ID NO: 3704876 - RNA, 13 nt, Human
uggaugcccagga

SEQ ID NO: 3704877 - RNA, 14 nt, Human
uggaugcccaggaa

SEQ ID NO: 3704878 - RNA, 20 nt, Human
uggaugccucauuaugucaa

SEQ ID NO: 3704879 - RNA, 14 nt, Human
uggaugccuggugg

SEQ ID NO: 3704880 - RNA, 18 nt, Human
uggaugccugguggcagc

SEQ ID NO: 3704881 - RNA, 19 nt, Human
uggaugccugguggcagcu

SEQ ID NO: 3704882 - RNA, 21 nt, Human
uggaugccugguggcagcugc

SEQ ID NO: 3704883 - RNA, 13 nt, Human
uggauggaagggg

SEQ ID NO: 3704884 - RNA, 15 nt, Human
uggauggaaggggcu

SEQ ID NO: 3704885 - RNA, 23 nt, Human
uggauggcuugucuauacuccuu

SEQ ID NO: 3704886 - RNA, 17 nt, Human
uggaugggagugagaca

SEQ ID NO: 3704887 - RNA, 21 nt, Human
uggaugggggaaauggugccu

SEQ ID NO: 3704888 - RNA, 21 nt, Human
uggaugggggaacucagaucc

SEQ ID NO: 3704889 - RNA, 23 nt, Human
uggaugggggaacucagauccag

SEQ ID NO: 3704890 - RNA, 14 nt, Human
uggauguccccagc

SEQ ID NO: 3704891 - RNA, 15 nt, Human
uggauguccccagca

SEQ ID NO: 3704892 - RNA, 16 nt, Human
uggauguccccagcag

SEQ ID NO: 3704893 - RNA, 23 nt, Human
uggaugugggguccccaucaucc

SEQ ID NO: 3704894 - RNA, 20 nt, Human
uggauuacuucucuauaaaa

SEQ ID NO: 3704895 - RNA, 15 nt, Human
uggauuaggucucug

SEQ ID NO: 3704896 - RNA, 17 nt, Human
uggauuauauuaugaag

SEQ ID NO: 3704897 - RNA, 14 nt, Human
uggauuauccugag

SEQ ID NO: 3704898 - RNA, 13 nt, Human
uggauuauucauu

SEQ ID NO: 3704899 - RNA, 16 nt, Human
uggauuauucauuuaa

SEQ ID NO: 3704900 - RNA, 17 nt, Human
uggauuauucauuuaaa

SEQ ID NO: 3704901 - RNA, 18 nt, Human
uggauuauucauuuaaaa

SEQ ID NO: 3704902 - RNA, 19 nt, Human
uggauuauucauuuaaaau

SEQ ID NO: 3704903 - RNA, 20 nt, Human
uggauuauucauuuaaaaug

SEQ ID NO: 3704904 - RNA, 16 nt, Human
uggauuauucuuucuc

SEQ ID NO: 3704905 - RNA, 21 nt, Human
uguacaaaguauuaagcauau

SEQ ID NO: 3704906 - RNA, 12 nt, Human
uguacaauaaaa

SEQ ID NO: 3704907 - RNA, 20 nt, Human
uguacaauaaaaacauugcc

SEQ ID NO: 3704908 - RNA, 15 nt, Human
uguacaauauuuaaa

SEQ ID NO: 3704909 - RNA, 14 nt, Human
uguacacacuuuau

SEQ ID NO: 3704910 - RNA, 17 nt, Human
uguacacauauuugaag

SEQ ID NO: 3704911 - RNA, 12 nt, Human
uguacacugaau

SEQ ID NO: 3704912 - RNA, 15 nt, Human
uguacacugaauauu

SEQ ID NO: 3704913 - RNA, 17 nt, Human
uguacacugaauauuua

SEQ ID NO: 3704914 - RNA, 13 nt, Human
uguacacuuuuuu

SEQ ID NO: 3704915 - RNA, 19 nt, Human
uguacagaauuuuggaaga

SEQ ID NO: 3704916 - RNA, 14 nt, Human
uguacagacauauu

SEQ ID NO: 3704917 - RNA, 17 nt, Human
uguacagacauauuuaa

SEQ ID NO: 3704918 - RNA, 20 nt, Human
uguacagacauauuuaacug

SEQ ID NO: 3704919 - RNA, 22 nt, Human
uguacagacauauuuaacuggu

SEQ ID NO: 3704920 - RNA, 19 nt, Human
uguacagacguaugcuuau

SEQ ID NO: 3704921 - RNA, 11 nt, Human
uguacagagcc

SEQ ID NO: 3704922 - RNA, 12 nt, Human
uguacagagccc

SEQ ID NO: 3704923 - RNA, 13 nt, Human
uguacagagccca

SEQ ID NO: 3704924 - RNA, 21 nt, Human
uguacagagcccacgccccca

SEQ ID NO: 3704925 - RNA, 19 nt, Human
uguacagaugaaugauaaa

SEQ ID NO: 3704926 - RNA, 19 nt, Human
uguacagauucuuucaguu

SEQ ID NO: 3704927 - RNA, 20 nt, Human
uguacagauugcugcuucug

SEQ ID NO: 3704928 - RNA, 19 nt, Human
uguacaggaugcuuugguu

SEQ ID NO: 3704929 - RNA, 18 nt, Human
uguacaguagauuuucca

SEQ ID NO: 3704930 - RNA, 14 nt, Human
uguacagucugucu

SEQ ID NO: 3704931 - RNA, 19 nt, Human
uguacagucugucuucugu

SEQ ID NO: 3704932 - RNA, 11 nt, Human
uguacaguguu

SEQ ID NO: 3704933 - RNA, 13 nt, Human
uguacaguguuac

SEQ ID NO: 3704934 - RNA, 16 nt, Human
uguacaguguucuguu

SEQ ID NO: 3704935 - RNA, 20 nt, Human
uguacaguguucuguuuaau

SEQ ID NO: 3704936 - RNA, 21 nt, Human
uguacaguuaucuaaguuaau

SEQ ID NO: 3704937 - RNA, 14 nt, Human
uguacaguucaguu

SEQ ID NO: 3704938 - RNA, 15 nt, Human
uguacaguugggaaa

SEQ ID NO: 3704939 - RNA, 22 nt, Human
uguacaguuuguuuacacacgu

SEQ ID NO: 3704940 - RNA, 17 nt, Human
uguacauaacugaaaau

SEQ ID NO: 3704941 - RNA, 19 nt, Human
uguacauacgauuuaaggu

SEQ ID NO: 3704942 - RNA, 11 nt, Human
uguacauagcc

SEQ ID NO: 3704943 - RNA, 14 nt, Human
uguacauagugcua

SEQ ID NO: 3704944 - RNA, 17 nt, Human
uguacauagugcuaaca

SEQ ID NO: 3704945 - RNA, 15 nt, Human
uguacauaguguaau

SEQ ID NO: 3704946 - RNA, 16 nt, Human
uguacauauauauauu

SEQ ID NO: 3704947 - RNA, 18 nt, Human
uguacauauguaaaauaa

SEQ ID NO: 3704948 - RNA, 21 nt, Human
uguacauauuagcgacaacag

SEQ ID NO: 3704949 - RNA, 22 nt, Human
uguacauauuagcgacaacaga

SEQ ID NO: 3704950 - RNA, 18 nt, Human
uguacaucccauguaaca

SEQ ID NO: 3704951 - RNA, 23 nt, Human
uguacaucccauguaacagaaag

SEQ ID NO: 3704952 - RNA, 19 nt, Human
uguacaucuauuuuggauu

SEQ ID NO: 3704953 - RNA, 20 nt, Human
uguacaucuauuuuggauug

SEQ ID NO: 3704954 - RNA, 23 nt, Human
uguacaucuauuuuggauuguau

SEQ ID NO: 3704955 - RNA, 14 nt, Human
uguacaucuggccu

SEQ ID NO: 3704956 - RNA, 14 nt, Human
uguacaucuggcuu

SEQ ID NO: 3704957 - RNA, 16 nt, Human
uguacaucuggcuuau

SEQ ID NO: 3704958 - RNA, 14 nt, Human
uguacaugaaaaca

SEQ ID NO: 3704959 - RNA, 20 nt, Human
uguacaugaaaacacauuuu

SEQ ID NO: 3704960 - RNA, 19 nt, Human
uguacaugaaauuuuugua

SEQ ID NO: 3704961 - RNA, 20 nt, Human
uguacaugaaauuuuuguaa

SEQ ID NO: 3704962 - RNA, 20 nt, Human
uguacauguauuaaauuaca

SEQ ID NO: 3704963 - RNA, 14 nt, Human
uguacauuaauuac

SEQ ID NO: 3704964 - RNA, 15 nt, Human
uguacauucuaaaau

SEQ ID NO: 3704965 - RNA, 20 nt, Human
uguacauuuaaaauugcuau

SEQ ID NO: 3704966 - RNA, 20 nt, Human
uguacauuuaugauuuaaua

SEQ ID NO: 3704967 - RNA, 10 nt, Human
uguacauuuc

SEQ ID NO: 3704968 - RNA, 22 nt, Human
uguacauuuccaaauucacaag

SEQ ID NO: 3704969 - RNA, 17 nt, Human
uguacauuucuauaaau

SEQ ID NO: 3704970 - RNA, 16 nt, Human
uguacauuucugaaau

SEQ ID NO: 3704971 - RNA, 16 nt, Human
uguacauuugggaguu

SEQ ID NO: 3704972 - RNA, 19 nt, Human
uguacauuuuguuguaaaa

SEQ ID NO: 3704973 - RNA, 21 nt, Human
uguacauuuuguuguaaaaag

SEQ ID NO: 3704974 - RNA, 14 nt, Human
uguaccaaaauuca

SEQ ID NO: 3704975 - RNA, 15 nt, Human
uguaccaaaauuuua

SEQ ID NO: 3704976 - RNA, 19 nt, Human
uguaccagugaauuuuugc

SEQ ID NO: 3704977 - RNA, 21 nt, Human
uguaccaguuaauuuuuccaa

SEQ ID NO: 3704978 - RNA, 18 nt, Human
uguaccauaugaucuguu

SEQ ID NO: 3704979 - RNA, 17 nt, Human
uguaccauguacaugaa

SEQ ID NO: 3704980 - RNA, 19 nt, Human
uguaccaugugcuacaggg

SEQ ID NO: 3704981 - RNA, 15 nt, Human
uguaccauuaaaaua

SEQ ID NO: 3704982 - RNA, 18 nt, Human
uguaccauuuuaaaguua

SEQ ID NO: 3704983 - RNA, 21 nt, Human
uguacccaguauucuagguag

SEQ ID NO: 3704984 - RNA, 12 nt, Human
uguacccaguuu

SEQ ID NO: 3704985 - RNA, 20 nt, Human
uguaccccccaaccccugag

SEQ ID NO: 3704986 - RNA, 14 nt, Human
uguacccccgccca

SEQ ID NO: 3704987 - RNA, 15 nt, Human
uguacccccgcccag

SEQ ID NO: 3704988 - RNA, 22 nt, Human
uguacccccgcccaggcuggcc

SEQ ID NO: 3704989 - RNA, 17 nt, Human
uguacccucugaaauac

SEQ ID NO: 3704990 - RNA, 15 nt, Human
uguaccgcaauguga

SEQ ID NO: 3704991 - RNA, 16 nt, Human
uguaccgcaaugugac

SEQ ID NO: 3704992 - RNA, 19 nt, Human
uguaccgcgucuacccugg

SEQ ID NO: 3704993 - RNA, 15 nt, Human
uguaccuccccugcc

SEQ ID NO: 3704994 - RNA, 18 nt, Human
uguaccuccccugccuug

SEQ ID NO: 3704995 - RNA, 22 nt, Human
uguaccuccccugccuugcugu

SEQ ID NO: 3704996 - RNA, 20 nt, Human
uguaccucuggcugacuaaa

SEQ ID NO: 3704997 - RNA, 22 nt, Human
uguaccucuugagccuugaacu

SEQ ID NO: 3704998 - RNA, 16 nt, Human
uguaccuguguacaua

SEQ ID NO: 3704999 - RNA, 19 nt, Human
uguaccuguguacauaacu

SEQ ID NO: 3705000 - RNA, 18 nt, Human
uguaccuucuuucacucu

SEQ ID NO: 3705001 - RNA, 15 nt, Human
uguaccuuuuaacac

SEQ ID NO: 3705002 - RNA, 22 nt, Human
uguaccuuuugaggagccccag

SEQ ID NO: 3705003 - RNA, 21 nt, Human
uguaccuuuuuuguuuuuuca

SEQ ID NO: 3705004 - RNA, 23 nt, Human
uguacgacgucagauguuuaaaa

SEQ ID NO: 3705005 - RNA, 21 nt, Human
uguacggauuuucaguuacuu

SEQ ID NO: 3705006 - RNA, 14 nt, Human
uguacguccagccu

SEQ ID NO: 3705007 - RNA, 17 nt, Human
uguacgucugacaggca

SEQ ID NO: 3705008 - RNA, 15 nt, Human
uguacguggagaggg

SEQ ID NO: 3705009 - RNA, 17 nt, Human
uguacguuuaaagugua

SEQ ID NO: 3705010 - RNA, 16 nt, Human
uguacguuuguaugug

SEQ ID NO: 3705011 - RNA, 20 nt, Human
uguacguuuguaugugugua

SEQ ID NO: 3705012 - RNA, 14 nt, Human
uguacuaaacagua

SEQ ID NO: 3705013 - RNA, 20 nt, Human
uguacuaaacaguaagauau

SEQ ID NO: 3705014 - RNA, 16 nt, Human
uguacuaauucuuaca

SEQ ID NO: 3705015 - RNA, 14 nt, Human
uguacuaccugugu

SEQ ID NO: 3705016 - RNA, 18 nt, Human
uguacuaguacuguguac

SEQ ID NO: 3705017 - RNA, 19 nt, Human
uguacuauggaaaaucagc

SEQ ID NO: 3705018 - RNA, 21 nt, Human
uguacuauggaaaaucagcug

SEQ ID NO: 3705019 - RNA, 15 nt, Human
uguacuauuuaacug

SEQ ID NO: 3705020 - RNA, 18 nt, Human
uguacucaggaggcugag

SEQ ID NO: 3705021 - RNA, 12 nt, Human
uguacuccuccc

SEQ ID NO: 3705022 - RNA, 23 nt, Human
uguacucgcuugugcagaaaaca

SEQ ID NO: 3705023 - RNA, 15 nt, Human
uguacucuaacuuaa

SEQ ID NO: 3705024 - RNA, 14 nt, Human
uguacucuggccuc

SEQ ID NO: 3705025 - RNA, 20 nt, Human
uguacugaaaaaugguaauu

SEQ ID NO: 3705026 - RNA, 20 nt, Human
uguacugaauuuuuuuguaa

SEQ ID NO: 3705027 - RNA, 23 nt, Human
uguacugaauuuuuuuguaauaa

SEQ ID NO: 3705028 - RNA, 17 nt, Human
uguacugagccuuguaa

SEQ ID NO: 3705029 - RNA, 22 nt, Human
uguacugagccuuguaauucua

SEQ ID NO: 3705030 - RNA, 22 nt, Human
uguacugauuuuuguaagacaa

SEQ ID NO: 3705031 - RNA, 12 nt, Human
uguacugccugc

SEQ ID NO: 3705032 - RNA, 14 nt, Human
uguacugccugcuu

SEQ ID NO: 3705033 - RNA, 16 nt, Human
uguacugcucaggcug

SEQ ID NO: 3705034 - RNA, 17 nt, Human
uguacugcucaggcugc

SEQ ID NO: 3705035 - RNA, 15 nt, Human
uguacugggccaugu

SEQ ID NO: 3705036 - RNA, 16 nt, Human
uguacuguaaagaauu

SEQ ID NO: 3705037 - RNA, 16 nt, Human
uguacuguacuaauuc

SEQ ID NO: 3705038 - RNA, 12 nt, Human
uguacuguaguu

SEQ ID NO: 3705039 - RNA, 17 nt, Human
uguacuguauagacagu

SEQ ID NO: 3705040 - RNA, 19 nt, Human
uguacuguauagacaguuu

SEQ ID NO: 3705041 - RNA, 21 nt, Human
uguacuguauagacaguuugu

SEQ ID NO: 3705042 - RNA, 15 nt, Human
uguacuguuacuggg

SEQ ID NO: 3705043 - RNA, 18 nt, Human
uguacuguuacugggccc

SEQ ID NO: 3705044 - RNA, 19 nt, Human
uguacuguucugugucuuu

SEQ ID NO: 3705045 - RNA, 24 nt, Human
uguacuguuuaauguucugugaua

SEQ ID NO: 3705046 - RNA, 15 nt, Human
uguacuuaaauggua

SEQ ID NO: 3705047 - RNA, 20 nt, Human
uguacuuaauaaauucagau

SEQ ID NO: 3705048 - RNA, 21 nt, Human
uguacuuaauaaauucagaua

SEQ ID NO: 3705049 - RNA, 22 nt, Human
uguacuuaauaaauucagauau

SEQ ID NO: 3705050 - RNA, 14 nt, Human
uguacuucacuguc

SEQ ID NO: 3705051 - RNA, 21 nt, Human
uguacuucacugucaggaaga

SEQ ID NO: 3705052 - RNA, 18 nt, Human
uguacuucccgggccagg

SEQ ID NO: 3705053 - RNA, 21 nt, Human
uguacuucccgggccagggcu

SEQ ID NO: 3705054 - RNA, 15 nt, Human
guugaagaggaaggg

SEQ ID NO: 3705055 - RNA, 14 nt, Human
guugaagcucuggu

SEQ ID NO: 3705056 - RNA, 19 nt, Human
guugaauguugcaauguga

SEQ ID NO: 3705057 - RNA, 13 nt, Human
guugaauuuuaca

SEQ ID NO: 3705058 - RNA, 20 nt, Human
guugaauuuuguucucuggg

SEQ ID NO: 3705059 - RNA, 15 nt, Human
guugacaaaauuuuc

SEQ ID NO: 3705060 - RNA, 14 nt, Human
guugacaacuguga

SEQ ID NO: 3705061 - RNA, 15 nt, Human
guugacaacugugac

SEQ ID NO: 3705062 - RNA, 15 nt, Human
guugacacaggucuu

SEQ ID NO: 3705063 - RNA, 20 nt, Human
guugacaccucgccccugcu

SEQ ID NO: 3705064 - RNA, 12 nt, Human
guugacagcagg

SEQ ID NO: 3705065 - RNA, 17 nt, Human
guugacaguucugaaga

SEQ ID NO: 3705066 - RNA, 14 nt, Human
guugacauauuuaa

SEQ ID NO: 3705067 - RNA, 18 nt, Human
guugacauauuuaauguu

SEQ ID NO: 3705068 - RNA, 14 nt, Human
guugacaugggaca

SEQ ID NO: 3705069 - RNA, 13 nt, Human
guugacauucuga

SEQ ID NO: 3705070 - RNA, 17 nt, Human
guugacauucugaaugc

SEQ ID NO: 3705071 - RNA, 22 nt, Human
guugaccaugucuaugauucgu

SEQ ID NO: 3705072 - RNA, 15 nt, Human
guugaccccagagga

SEQ ID NO: 3705073 - RNA, 20 nt, Human
guugacuuauuuucucugug

SEQ ID NO: 3705074 - RNA, 19 nt, Human
guugacuugacagaacacu

SEQ ID NO: 3705075 - RNA, 18 nt, Human
guugacuuuagggacuca

SEQ ID NO: 3705076 - RNA, 14 nt, Human
guugacuuucaggu

SEQ ID NO: 3705077 - RNA, 18 nt, Human
guugagaggacacucccg

SEQ ID NO: 3705078 - RNA, 17 nt, Human
guugagauaguuuucau

SEQ ID NO: 3705079 - RNA, 14 nt, Human
guugagcaagcagu

SEQ ID NO: 3705080 - RNA, 19 nt, Human
guugagcagggauccuggu

SEQ ID NO: 3705081 - RNA, 15 nt, Human
guugagccagcagac

SEQ ID NO: 3705082 - RNA, 16 nt, Human
guugagccccaagucc

SEQ ID NO: 3705083 - RNA, 21 nt, Human
guugagcuucauauaccagca

SEQ ID NO: 3705084 - RNA, 20 nt, Human
guugaggaaagcacagaggc

SEQ ID NO: 3705085 - RNA, 21 nt, Human
guugaggccacuguguuccuu

SEQ ID NO: 3705086 - RNA, 17 nt, Human
guugagggaacagacag

SEQ ID NO: 3705087 - RNA, 23 nt, Human
guugagggaacagacaggagaaa

SEQ ID NO: 3705088 - RNA, 16 nt, Human
guugaggggcuccugg

SEQ ID NO: 3705089 - RNA, 17 nt, Human
guugaggggcuccugga

SEQ ID NO: 3705090 - RNA, 15 nt, Human
guugagucuguacua

SEQ ID NO: 3705091 - RNA, 14 nt, Human
guugauagcacaga

SEQ ID NO: 3705092 - RNA, 20 nt, Human
guugauauuucgaaagcugc

SEQ ID NO: 3705093 - RNA, 22 nt, Human
guugaucuggaacccagacuca

SEQ ID NO: 3705094 - RNA, 23 nt, Human
guugaugaucuuugcagacaggc

SEQ ID NO: 3705095 - RNA, 24 nt, Human
guugaugcaauccuuacaaaugau

SEQ ID NO: 3705096 - RNA, 21 nt, Human
guugauguaucugaguugcca

SEQ ID NO: 3705097 - RNA, 17 nt, Human
guugauguuggcuggga

SEQ ID NO: 3705098 - RNA, 13 nt, Human
guugauuaaggca

SEQ ID NO: 3705099 - RNA, 16 nt, Human
guugauuacagugcag

SEQ ID NO: 3705100 - RNA, 16 nt, Human
guugauugcuaaaugu

SEQ ID NO: 3705101 - RNA, 18 nt, Human
guugauuucuuuccagag

SEQ ID NO: 3705102 - RNA, 15 nt, Human
guugcaagaugugaa

SEQ ID NO: 3705103 - RNA, 23 nt, Human
guugcaaggccgcuguucaccca

SEQ ID NO: 3705104 - RNA, 11 nt, Human
guugcacagca

SEQ ID NO: 3705105 - RNA, 19 nt, Human
guugcacagcaucucagcu

SEQ ID NO: 3705106 - RNA, 13 nt, Human
guugcacccagcc

SEQ ID NO: 3705107 - RNA, 17 nt, Human
guugcacccagcccugg

SEQ ID NO: 3705108 - RNA, 17 nt, Human
guugcacguguguuuuu

SEQ ID NO: 3705109 - RNA, 14 nt, Human
guugcacugauauu

SEQ ID NO: 3705110 - RNA, 19 nt, Human
guugcacuuaugauuucau

SEQ ID NO: 3705111 - RNA, 19 nt, Human
guugcacuuggccucugga

SEQ ID NO: 3705112 - RNA, 14 nt, Human
guugcagacaggaa

SEQ ID NO: 3705113 - RNA, 20 nt, Human
guugcagacaggaaucuuaa

SEQ ID NO: 3705114 - RNA, 15 nt, Human
guugcaggaccucag

SEQ ID NO: 3705115 - RNA, 17 nt, Human
guugcagguucauggau

SEQ ID NO: 3705116 - RNA, 13 nt, Human
guugcagugagcu

SEQ ID NO: 3705117 - RNA, 15 nt, Human
guugcagugagcuga

SEQ ID NO: 3705118 - RNA, 20 nt, Human
guugcaugucgugaccaacu

SEQ ID NO: 3705119 - RNA, 23 nt, Human
guugcauuuuaacccuauuuuac

SEQ ID NO: 3705120 - RNA, 20 nt, Human
guugccaaaucuggcuccuu

SEQ ID NO: 3705121 - RNA, 17 nt, Human
guugccaagaacugaaa

SEQ ID NO: 3705122 - RNA, 22 nt, Human
guugccaagaacugaaaacaua

SEQ ID NO: 3705123 - RNA, 14 nt, Human
guugccaagacaaa

SEQ ID NO: 3705124 - RNA, 18 nt, Human
guugccaagcuccaagcc

SEQ ID NO: 3705125 - RNA, 11 nt, Human
guugccagaga

SEQ ID NO: 3705126 - RNA, 15 nt, Human
guugccagagaugga

SEQ ID NO: 3705127 - RNA, 17 nt, Human
guugccagagauggagg

SEQ ID NO: 3705128 - RNA, 13 nt, Human
guugccagucacc

SEQ ID NO: 3705129 - RNA, 16 nt, Human
guugccagucaccccg

SEQ ID NO: 3705130 - RNA, 18 nt, Human
guugccagucaccccggc

SEQ ID NO: 3705131 - RNA, 23 nt, Human
guugccauccuaccgucuuuucc

SEQ ID NO: 3705132 - RNA, 21 nt, Human
guugcccagccucuuucccuu

SEQ ID NO: 3705133 - RNA, 18 nt, Human
guugcccaggcaggucuu

SEQ ID NO: 3705134 - RNA, 19 nt, Human
guugcccaggcaggucuug

SEQ ID NO: 3705135 - RNA, 23 nt, Human
guugcccaggcaggucuugaacu

SEQ ID NO: 3705136 - RNA, 17 nt, Human
guugcccaggcuggcgu

SEQ ID NO: 3705137 - RNA, 16 nt, Human
guugcccagugugagg

SEQ ID NO: 3705138 - RNA, 17 nt, Human
guugccccgucucuguu

SEQ ID NO: 3705139 - RNA, 21 nt, Human
guugccuugaaccacuucccu

SEQ ID NO: 3705140 - RNA, 16 nt, Human
guugcgacggagagaa

SEQ ID NO: 3705141 - RNA, 17 nt, Human
guugcgacggagagaaa

SEQ ID NO: 3705142 - RNA, 20 nt, Human
guugcggauggauggaaggu

SEQ ID NO: 3705143 - RNA, 23 nt, Human
guugcgugacacucuccuugcag

SEQ ID NO: 3705144 - RNA, 13 nt, Human
guugcuaaacacu

SEQ ID NO: 3705145 - RNA, 14 nt, Human
guugcuaaacacug

SEQ ID NO: 3705146 - RNA, 15 nt, Human
guugcuaaacacugc

SEQ ID NO: 3705147 - RNA, 19 nt, Human
guugcuaaacacugcgcuu

SEQ ID NO: 3705148 - RNA, 14 nt, Human
guugcuaacagcaa

SEQ ID NO: 3705149 - RNA, 17 nt, Human
guugcuaacugaacuuu

SEQ ID NO: 3705150 - RNA, 22 nt, Human
guugcuaacugaacuuugaaga

SEQ ID NO: 3705151 - RNA, 18 nt, Human
guugcucaaaaaaugagc

SEQ ID NO: 3705152 - RNA, 19 nt, Human
guugcuccgccuggccugg

SEQ ID NO: 3705153 - RNA, 20 nt, Human
guugcucuaggaagacauuu

SEQ ID NO: 3705154 - RNA, 19 nt, Human
guugcugaaacuugcugag

SEQ ID NO: 3705155 - RNA, 16 nt, Human
guugcugcuucaauuu

SEQ ID NO: 3705156 - RNA, 22 nt, Human
guugcugcuucucccaggcaag

SEQ ID NO: 3705157 - RNA, 22 nt, Human
guugcuggcuuguuguaaagca

SEQ ID NO: 3705158 - RNA, 12 nt, Human
guugcugguaaa

SEQ ID NO: 3705159 - RNA, 16 nt, Human
guugcugguaaaauga

SEQ ID NO: 3705160 - RNA, 15 nt, Human
guugcugguugcugu

SEQ ID NO: 3705161 - RNA, 19 nt, Human
guugcuguuuuccucccuu

SEQ ID NO: 3705162 - RNA, 21 nt, Human
guugcuguuuuccucccuucu

SEQ ID NO: 3705163 - RNA, 14 nt, Human
guugcuuacaauuu

SEQ ID NO: 3705164 - RNA, 23 nt, Human
guugcuuccguucauggaagcgc

SEQ ID NO: 3705165 - RNA, 23 nt, Human
guugcuucuucuacuucagucuu

SEQ ID NO: 3705166 - RNA, 13 nt, Human
guugcuugucuuc

SEQ ID NO: 3705167 - RNA, 15 nt, Human
guugcuuucacucuc

SEQ ID NO: 3705168 - RNA, 15 nt, Human
guugcuuugcccugg

SEQ ID NO: 3705169 - RNA, 15 nt, Human
guuggaaaaaauuug

SEQ ID NO: 3705170 - RNA, 15 nt, Human
guuggaaaagaauac

SEQ ID NO: 3705171 - RNA, 17 nt, Human
guuggaaaauaucuuug

SEQ ID NO: 3705172 - RNA, 16 nt, Human
guuggaaacacuaaau

SEQ ID NO: 3705173 - RNA, 18 nt, Human
guuggaaacacuaaaugu

SEQ ID NO: 3705174 - RNA, 20 nt, Human
guuggaagcuuguuuuccag

SEQ ID NO: 3705175 - RNA, 15 nt, Human
guuggaauggauuuu

SEQ ID NO: 3705176 - RNA, 17 nt, Human
guuggaauggauuuuuc

SEQ ID NO: 3705177 - RNA, 15 nt, Human
guuggacaaauguga

SEQ ID NO: 3705178 - RNA, 16 nt, Human
guuggacccgcucugg

SEQ ID NO: 3705179 - RNA, 20 nt, Human
guuggacccgcucuggacca

SEQ ID NO: 3705180 - RNA, 15 nt, Human
guuggacuaaaugcc

SEQ ID NO: 3705181 - RNA, 18 nt, Human
guuggacuaaaugccuag

SEQ ID NO: 3705182 - RNA, 22 nt, Human
guuggagagcuagaaccuggag

SEQ ID NO: 3705183 - RNA, 18 nt, Human
guuggagccacucuguuc

SEQ ID NO: 3705184 - RNA, 12 nt, Human
guuggagccugc

SEQ ID NO: 3705185 - RNA, 16 nt, Human
guuggagccugcaggg

SEQ ID NO: 3705186 - RNA, 14 nt, Human
guuggaguucauuc

SEQ ID NO: 3705187 - RNA, 22 nt, Human
guuggauggauggguggauggc

SEQ ID NO: 3705188 - RNA, 23 nt, Human
guuggauggauggguggauggcc

SEQ ID NO: 3705189 - RNA, 18 nt, Human
guuggauuuauaaaugcu

SEQ ID NO: 3705190 - RNA, 14 nt, Human
guuggauuuuuguc

SEQ ID NO: 3705191 - RNA, 20 nt, Human
guuggauuuuugucuugugu

SEQ ID NO: 3705192 - RNA, 19 nt, Human
guuggcaaaauauuuuaaa

SEQ ID NO: 3705193 - RNA, 13 nt, Human
guuggcaccuucc

SEQ ID NO: 3705194 - RNA, 20 nt, Human
guuggcaggcuggccagucc

SEQ ID NO: 3705195 - RNA, 23 nt, Human
guuggcagugagugagccuggcu

SEQ ID NO: 3705196 - RNA, 19 nt, Human
guuggcauagcucuggggu

SEQ ID NO: 3705197 - RNA, 12 nt, Human
guuggcaugcau

SEQ ID NO: 3705198 - RNA, 17 nt, Human
guuggccaggcuggucu

SEQ ID NO: 3705199 - RNA, 18 nt, Human
guuggccaggcuggucua

SEQ ID NO: 3705200 - RNA, 19 nt, Human
guuggccaggcuggucuca

SEQ ID NO: 3705201 - RNA, 22 nt, Human
guuggccauauuuaccucagcc

SEQ ID NO: 3705202 - RNA, 14 nt, Human
guuggccccugccc

SEQ ID NO: 3705203 - RNA, 13 nt, Human
guuggccucugca

SEQ ID NO: 3705204 - RNA, 14 nt, Human
uggauuauuuaaua

SEQ ID NO: 3705205 - RNA, 13 nt, Human
uggauucagccuu

SEQ ID NO: 3705206 - RNA, 14 nt, Human
uggauucagccuuc

SEQ ID NO: 3705207 - RNA, 17 nt, Human
uggauucagccuucuuu

SEQ ID NO: 3705208 - RNA, 18 nt, Human
uggauucauuacagcuua

SEQ ID NO: 3705209 - RNA, 17 nt, Human
uggauucauucucauaa

SEQ ID NO: 3705210 - RNA, 17 nt, Human
uggauucauuuauaaga

SEQ ID NO: 3705211 - RNA, 17 nt, Human
uggauuccaaccccaac

SEQ ID NO: 3705212 - RNA, 18 nt, Human
uggauucccuuaaacaaa

SEQ ID NO: 3705213 - RNA, 14 nt, Human
uggauuccuguuuc

SEQ ID NO: 3705214 - RNA, 13 nt, Human
uggauucuaaaau

SEQ ID NO: 3705215 - RNA, 15 nt, Human
uggauucucagauau

SEQ ID NO: 3705216 - RNA, 17 nt, Human
uggauucuuauguagca

SEQ ID NO: 3705217 - RNA, 20 nt, Human
uggauugacaguaacuuggu

SEQ ID NO: 3705218 - RNA, 21 nt, Human
uggauugacaguaacuugguu

SEQ ID NO: 3705219 - RNA, 15 nt, Human
uggauuggacaaaau

SEQ ID NO: 3705220 - RNA, 23 nt, Human
uggauuggagaaguaauccuagg

SEQ ID NO: 3705221 - RNA, 21 nt, Human
uggauuguccccgacccuugc

SEQ ID NO: 3705222 - RNA, 20 nt, Human
uggauugugccuaauguguu

SEQ ID NO: 3705223 - RNA, 17 nt, Human
uggauuuaacagaaaug

SEQ ID NO: 3705224 - RNA, 16 nt, Human
uggauuuaguuucagu

SEQ ID NO: 3705225 - RNA, 15 nt, Human
uggauuuccuaauac

SEQ ID NO: 3705226 - RNA, 19 nt, Human
uggauuucugguucugaug

SEQ ID NO: 3705227 - RNA, 19 nt, Human
uggauuucuuugaaaaaaa

SEQ ID NO: 3705228 - RNA, 16 nt, Human
uggauuucuuuuguaa

SEQ ID NO: 3705229 - RNA, 13 nt, Human
uggauuugacauu

SEQ ID NO: 3705230 - RNA, 14 nt, Human
uggauuugacauug

SEQ ID NO: 3705231 - RNA, 13 nt, Human
uggauuugaugcu

SEQ ID NO: 3705232 - RNA, 17 nt, Human
uggauuuggagagaaau

SEQ ID NO: 3705233 - RNA, 20 nt, Human
uggauuuggagagaaauauu

SEQ ID NO: 3705234 - RNA, 18 nt, Human
uggauuuggcacuagcca

SEQ ID NO: 3705235 - RNA, 21 nt, Human
uggauuuggcacuagccaaag

SEQ ID NO: 3705236 - RNA, 17 nt, Human
uggauuuguuuaaaagg

SEQ ID NO: 3705237 - RNA, 19 nt, Human
uggauuuucuauuguuacu

SEQ ID NO: 3705238 - RNA, 13 nt, Human
uggauuuuuacca

SEQ ID NO: 3705239 - RNA, 19 nt, Human
uggauuuuugacucuggca

SEQ ID NO: 3705240 - RNA, 17 nt, Human
uggcaaaaauggcuaga

SEQ ID NO: 3705241 - RNA, 15 nt, Human
uggcaaaagccuugu

SEQ ID NO: 3705242 - RNA, 19 nt, Human
uggcaaacagggccucugc

SEQ ID NO: 3705243 - RNA, 13 nt, Human
uggcaaagcagaa

SEQ ID NO: 3705244 - RNA, 15 nt, Human
uggcaaagcagaaaa

SEQ ID NO: 3705245 - RNA, 21 nt, Human
uggcaaagggagcagaacuga

SEQ ID NO: 3705246 - RNA, 20 nt, Human
uggcaaauuaacuugaguuu

SEQ ID NO: 3705247 - RNA, 19 nt, Human
uggcaacaaacugcacaug

SEQ ID NO: 3705248 - RNA, 22 nt, Human
uggcaacagaucuggaaccuca

SEQ ID NO: 3705249 - RNA, 13 nt, Human
uggcaaccugcuu

SEQ ID NO: 3705250 - RNA, 22 nt, Human
uggcaaccuugucucuaugcca

SEQ ID NO: 3705251 - RNA, 19 nt, Human
uggcaagaaagcugguaaa

SEQ ID NO: 3705252 - RNA, 13 nt, Human
uggcaagagcccc

SEQ ID NO: 3705253 - RNA, 18 nt, Human
uggcaagagggugacagc

SEQ ID NO: 3705254 - RNA, 15 nt, Human
uggcaagccccugcc

SEQ ID NO: 3705255 - RNA, 21 nt, Human
uggcaagccccugcccaucug

SEQ ID NO: 3705256 - RNA, 13 nt, Human
uggcaagcuguga

SEQ ID NO: 3705257 - RNA, 19 nt, Human
uggcaaggacacagaugaa

SEQ ID NO: 3705258 - RNA, 17 nt, Human
uggcaaggacugcaggg

SEQ ID NO: 3705259 - RNA, 13 nt, Human
uggcaaggacuuu

SEQ ID NO: 3705260 - RNA, 12 nt, Human
uggcaaggcugu

SEQ ID NO: 3705261 - RNA, 14 nt, Human
uggcaaggcugugc

SEQ ID NO: 3705262 - RNA, 15 nt, Human
uggcaaggcugugcu

SEQ ID NO: 3705263 - RNA, 20 nt, Human
uggcaaggcugugcucccug

SEQ ID NO: 3705264 - RNA, 23 nt, Human
uggcaaggcugugcucccugguu

SEQ ID NO: 3705265 - RNA, 20 nt, Human
uggcaauaaauuuugaaaag

SEQ ID NO: 3705266 - RNA, 21 nt, Human
uggcaauaaauuuugaaaagu

SEQ ID NO: 3705267 - RNA, 15 nt, Human
uggcaauaguguguu

SEQ ID NO: 3705268 - RNA, 20 nt, Human
uggcaaugccacagcccugu

SEQ ID NO: 3705269 - RNA, 21 nt, Human
uggcaaugccacagcccuguc

SEQ ID NO: 3705270 - RNA, 23 nt, Human
uggcaaugccacagcccugucag

SEQ ID NO: 3705271 - RNA, 17 nt, Human
uggcaaugguaguuucu

SEQ ID NO: 3705272 - RNA, 18 nt, Human
uggcaaugguaguuucug

SEQ ID NO: 3705273 - RNA, 18 nt, Human
uggcaauguuuugcuuuu

SEQ ID NO: 3705274 - RNA, 23 nt, Human
uggcaauucuuugaccucaaccu

SEQ ID NO: 3705275 - RNA, 15 nt, Human
uggcaauuuuguaac

SEQ ID NO: 3705276 - RNA, 23 nt, Human
uggcacaauggcuaauucccaga

SEQ ID NO: 3705277 - RNA, 22 nt, Human
uggcacacaccuguagucccag

SEQ ID NO: 3705278 - RNA, 13 nt, Human
uggcacacagcag

SEQ ID NO: 3705279 - RNA, 22 nt, Human
uggcacagaaaccucuacuaaa

SEQ ID NO: 3705280 - RNA, 22 nt, Human
uggcacagccuggcuguggccu

SEQ ID NO: 3705281 - RNA, 14 nt, Human
uggcacaggacuga

SEQ ID NO: 3705282 - RNA, 15 nt, Human
uggcacaggacugau

SEQ ID NO: 3705283 - RNA, 16 nt, Human
uggcacagggcagugg

SEQ ID NO: 3705284 - RNA, 16 nt, Human
uggcacagugucuggg

SEQ ID NO: 3705285 - RNA, 18 nt, Human
uggcacaguuuucugaga

SEQ ID NO: 3705286 - RNA, 19 nt, Human
uggcacaguuuucugagaa

SEQ ID NO: 3705287 - RNA, 17 nt, Human
uggcaccaaagaugcag

SEQ ID NO: 3705288 - RNA, 19 nt, Human
uggcaccaaagaugcagcc

SEQ ID NO: 3705289 - RNA, 13 nt, Human
uggcaccacucuc

SEQ ID NO: 3705290 - RNA, 17 nt, Human
uggcaccagacacccag

SEQ ID NO: 3705291 - RNA, 23 nt, Human
uggcaccagaggcugcagaaggc

SEQ ID NO: 3705292 - RNA, 16 nt, Human
uggcaccagcagccug

SEQ ID NO: 3705293 - RNA, 14 nt, Human
uggcacccaagacc

SEQ ID NO: 3705294 - RNA, 23 nt, Human
uggcacccaagaccucagggcac

SEQ ID NO: 3705295 - RNA, 21 nt, Human
uggcacccaccguggaggagg

SEQ ID NO: 3705296 - RNA, 16 nt, Human
uggcacccggccccug

SEQ ID NO: 3705297 - RNA, 19 nt, Human
uggcacccggccccugcug

SEQ ID NO: 3705298 - RNA, 20 nt, Human
uggcacccggccccugcugg

SEQ ID NO: 3705299 - RNA, 21 nt, Human
uggcacccggccccugcuggu

SEQ ID NO: 3705300 - RNA, 16 nt, Human
uggcaccgaagcccag

SEQ ID NO: 3705301 - RNA, 17 nt, Human
uggcaccgaagcccaga

SEQ ID NO: 3705302 - RNA, 18 nt, Human
uggcaccgaagcccagag

SEQ ID NO: 3705303 - RNA, 21 nt, Human
uggcaccugucugcuccagcu

SEQ ID NO: 3705304 - RNA, 23 nt, Human
uggcaccugucugcuccagcucu

SEQ ID NO: 3705305 - RNA, 15 nt, Human
uggcacuaguauuuc

SEQ ID NO: 3705306 - RNA, 21 nt, Human
uggcacuauaauguaagcucu

SEQ ID NO: 3705307 - RNA, 22 nt, Human
uggcacucacagaccuggagcc

SEQ ID NO: 3705308 - RNA, 20 nt, Human
uggcacucccuccagcacaa

SEQ ID NO: 3705309 - RNA, 15 nt, Human
uggcacugagccccc

SEQ ID NO: 3705310 - RNA, 16 nt, Human
uggcacugagcccccc

SEQ ID NO: 3705311 - RNA, 17 nt, Human
uggcacugagccccccc

SEQ ID NO: 3705312 - RNA, 18 nt, Human
uggcacugagccccccca

SEQ ID NO: 3705313 - RNA, 16 nt, Human
uggcacugcuuccagu

SEQ ID NO: 3705314 - RNA, 22 nt, Human
uggcacuggcaaacagggccuc

SEQ ID NO: 3705315 - RNA, 22 nt, Human
uggcacugguagguugggacac

SEQ ID NO: 3705316 - RNA, 15 nt, Human
uggcacuuaucauua

SEQ ID NO: 3705317 - RNA, 14 nt, Human
uggcacuugcaucu

SEQ ID NO: 3705318 - RNA, 18 nt, Human
uggcacuugccuggguca

SEQ ID NO: 3705319 - RNA, 21 nt, Human
uggcacuuuuucauuugccua

SEQ ID NO: 3705320 - RNA, 12 nt, Human
uggcagaaaagu

SEQ ID NO: 3705321 - RNA, 20 nt, Human
uggcagaagacaccagagca

SEQ ID NO: 3705322 - RNA, 21 nt, Human
uggcagaagacaccagagcag

SEQ ID NO: 3705323 - RNA, 18 nt, Human
uggcagaagggagcagca

SEQ ID NO: 3705324 - RNA, 18 nt, Human
uggcagaaugcuagcucu

SEQ ID NO: 3705325 - RNA, 22 nt, Human
uggcagaauggggugcaugaag

SEQ ID NO: 3705326 - RNA, 13 nt, Human
uggcagagaugcc

SEQ ID NO: 3705327 - RNA, 15 nt, Human
uggcagaguccugga

SEQ ID NO: 3705328 - RNA, 17 nt, Human
uggcagaguuacaguuc

SEQ ID NO: 3705329 - RNA, 19 nt, Human
uggcagaguugaagacaga

SEQ ID NO: 3705330 - RNA, 22 nt, Human
uggcagaguugaagacagagcu

SEQ ID NO: 3705331 - RNA, 17 nt, Human
uggcagaguuugugugu

SEQ ID NO: 3705332 - RNA, 21 nt, Human
uggcagauaaucagccucuua

SEQ ID NO: 3705333 - RNA, 23 nt, Human
uggcagaugacaagaugguacaa

SEQ ID NO: 3705334 - RNA, 15 nt, Human
uggcagaugcagcuc

SEQ ID NO: 3705335 - RNA, 16 nt, Human
uggcagaugcagcucu

SEQ ID NO: 3705336 - RNA, 22 nt, Human
uggcagauguaaaguuauucuu

SEQ ID NO: 3705337 - RNA, 15 nt, Human
uggcagauguaggag

SEQ ID NO: 3705338 - RNA, 17 nt, Human
uggcagauuuuacaaaa

SEQ ID NO: 3705339 - RNA, 20 nt, Human
uggcagauuuuacaaaagau

SEQ ID NO: 3705340 - RNA, 23 nt, Human
uggcagcaccgccucuucccgcc

SEQ ID NO: 3705341 - RNA, 20 nt, Human
uggcagcagaguguggccuu

SEQ ID NO: 3705342 - RNA, 15 nt, Human
uggcagcaggugcug

SEQ ID NO: 3705343 - RNA, 16 nt, Human
uggcagcaggugcugc

SEQ ID NO: 3705344 - RNA, 21 nt, Human
uggcagcaggugcugcuaccc

SEQ ID NO: 3705345 - RNA, 18 nt, Human
uggcagccacacuucuca

SEQ ID NO: 3705346 - RNA, 19 nt, Human
uggcagccacacuucucag

SEQ ID NO: 3705347 - RNA, 12 nt, Human
uggcagcccagc

SEQ ID NO: 3705348 - RNA, 13 nt, Human
uggcagcccagcc

SEQ ID NO: 3705349 - RNA, 14 nt, Human
uggcagcccagcca

SEQ ID NO: 3705350 - RNA, 15 nt, Human
uggcagcccagccag

SEQ ID NO: 3705351 - RNA, 17 nt, Human
uggcagcccagccagcg

SEQ ID NO: 3705352 - RNA, 17 nt, Human
uggcagcccgcaucagc

SEQ ID NO: 3705353 - RNA, 12 nt, Human
uguacuuccuga

SEQ ID NO: 3705354 - RNA, 22 nt, Human
uguacuugcucuugaugccugg

SEQ ID NO: 3705355 - RNA, 22 nt, Human
uguacuuggaguauuggggucu

SEQ ID NO: 3705356 - RNA, 17 nt, Human
uguacuugguccaacug

SEQ ID NO: 3705357 - RNA, 20 nt, Human
uguacuugguccaacugcaa

SEQ ID NO: 3705358 - RNA, 20 nt, Human
uguacuuuaucaugaaugcu

SEQ ID NO: 3705359 - RNA, 17 nt, Human
uguacuuugauucacau

SEQ ID NO: 3705360 - RNA, 18 nt, Human
uguacuuugauucacaug

SEQ ID NO: 3705361 - RNA, 15 nt, Human
uguacuuugcuugcu

SEQ ID NO: 3705362 - RNA, 18 nt, Human
uguacuuuuaagacuuug

SEQ ID NO: 3705363 - RNA, 12 nt, Human
uguacuuuucau

SEQ ID NO: 3705364 - RNA, 22 nt, Human
uguacuuuucauucucuuuuaa

SEQ ID NO: 3705365 - RNA, 20 nt, Human
uguacuuuuuaguaauuucu

SEQ ID NO: 3705366 - RNA, 21 nt, Human
uguacuuuuuaguaauuucuu

SEQ ID NO: 3705367 - RNA, 12 nt, Human
uguacuuuuugg

SEQ ID NO: 3705368 - RNA, 17 nt, Human
uguacuuuuuggcauaa

SEQ ID NO: 3705369 - RNA, 11 nt, Human
uguagaaaaca

SEQ ID NO: 3705370 - RNA, 19 nt, Human
uguagaaaagggaacugaa

SEQ ID NO: 3705371 - RNA, 14 nt, Human
uguagaacacuaau

SEQ ID NO: 3705372 - RNA, 19 nt, Human
uguagaacacuaauucaua

SEQ ID NO: 3705373 - RNA, 20 nt, Human
uguagaacacuaauucauaa

SEQ ID NO: 3705374 - RNA, 16 nt, Human
uguagaagcauuccuu

SEQ ID NO: 3705375 - RNA, 17 nt, Human
uguagaagcauuccuuc

SEQ ID NO: 3705376 - RNA, 22 nt, Human
uguagaagcauuccuucuuuga

SEQ ID NO: 3705377 - RNA, 18 nt, Human
uguagaauagccuguggc

SEQ ID NO: 3705378 - RNA, 16 nt, Human
uguagaaugauuucau

SEQ ID NO: 3705379 - RNA, 17 nt, Human
uguagaaugauuucaug

SEQ ID NO: 3705380 - RNA, 14 nt, Human
uguagaauuguuau

SEQ ID NO: 3705381 - RNA, 16 nt, Human
uguagaauuguuauag

SEQ ID NO: 3705382 - RNA, 15 nt, Human
uguagacuauauaca

SEQ ID NO: 3705383 - RNA, 18 nt, Human
uguagacuauauacaugu

SEQ ID NO: 3705384 - RNA, 18 nt, Human
uguagaggagaaacugga

SEQ ID NO: 3705385 - RNA, 12 nt, Human
uguagaguuaag

SEQ ID NO: 3705386 - RNA, 14 nt, Human
uguagaguuaagaa

SEQ ID NO: 3705387 - RNA, 13 nt, Human
uguagaguugcug

SEQ ID NO: 3705388 - RNA, 14 nt, Human
uguagaguugcuga

SEQ ID NO: 3705389 - RNA, 15 nt, Human
uguagaguugcugag

SEQ ID NO: 3705390 - RNA, 20 nt, Human
uguagaguugcugagagggc

SEQ ID NO: 3705391 - RNA, 20 nt, Human
uguagaguuuugucauucag

SEQ ID NO: 3705392 - RNA, 17 nt, Human
uguagauaauacaguuc

SEQ ID NO: 3705393 - RNA, 18 nt, Human
uguagauauguauucuuu

SEQ ID NO: 3705394 - RNA, 21 nt, Human
uguagauauugugaaguacau

SEQ ID NO: 3705395 - RNA, 14 nt, Human
uguagauauuuggc

SEQ ID NO: 3705396 - RNA, 18 nt, Human
uguagaucagagcagcag

SEQ ID NO: 3705397 - RNA, 13 nt, Human
uguagaucccaag

SEQ ID NO: 3705398 - RNA, 22 nt, Human
uguagaugaaaaagcauguaca

SEQ ID NO: 3705399 - RNA, 19 nt, Human
uguagauggaaaaacuugu

SEQ ID NO: 3705400 - RNA, 16 nt, Human
uguagauucagguaau

SEQ ID NO: 3705401 - RNA, 16 nt, Human
uguagauuuauuucau

SEQ ID NO: 3705402 - RNA, 12 nt, Human
uguagauuugau

SEQ ID NO: 3705403 - RNA, 17 nt, Human
uguagauuuuauagugu

SEQ ID NO: 3705404 - RNA, 20 nt, Human
uguagcaaaacgcauggagu

SEQ ID NO: 3705405 - RNA, 23 nt, Human
uguagcaaacccugucaaacauu

SEQ ID NO: 3705406 - RNA, 16 nt, Human
uguagcacugacagau

SEQ ID NO: 3705407 - RNA, 11 nt, Human
uguagcaguga

SEQ ID NO: 3705408 - RNA, 17 nt, Human
uguagcauccuggaaua

SEQ ID NO: 3705409 - RNA, 10 nt, Human
uguagccaag

SEQ ID NO: 3705410 - RNA, 17 nt, Human
uguagccacaccaggau

SEQ ID NO: 3705411 - RNA, 18 nt, Human
uguagccacaccaggaua

SEQ ID NO: 3705412 - RNA, 20 nt, Human
uguagccacuaguaaguaau

SEQ ID NO: 3705413 - RNA, 15 nt, Human
uguagccagccgggg

SEQ ID NO: 3705414 - RNA, 17 nt, Human
uguagccagguauggcu

SEQ ID NO: 3705415 - RNA, 20 nt, Human
uguagccagguauggcucug

SEQ ID NO: 3705416 - RNA, 21 nt, Human
uguagccagguauggcucugc

SEQ ID NO: 3705417 - RNA, 18 nt, Human
uguagccaggucccccug

SEQ ID NO: 3705418 - RNA, 22 nt, Human
uguagccaugaccuuacauuuc

SEQ ID NO: 3705419 - RNA, 17 nt, Human
uguagcccacucugcuc

SEQ ID NO: 3705420 - RNA, 22 nt, Human
uguagcccacucugcucgccuu

SEQ ID NO: 3705421 - RNA, 23 nt, Human
uguagcccauccuucccuuugga

SEQ ID NO: 3705422 - RNA, 22 nt, Human
uguagccccaagaaggcugggg

SEQ ID NO: 3705423 - RNA, 17 nt, Human
uguagcccccuggccuc

SEQ ID NO: 3705424 - RNA, 19 nt, Human
uguagcccccuggccucug

SEQ ID NO: 3705425 - RNA, 20 nt, Human
uguagcccccuggccucugu

SEQ ID NO: 3705426 - RNA, 15 nt, Human
uguagcccucccacu

SEQ ID NO: 3705427 - RNA, 23 nt, Human
uguagccuggauauuauucuugu

SEQ ID NO: 3705428 - RNA, 15 nt, Human
uguagccugugcaug

SEQ ID NO: 3705429 - RNA, 22 nt, Human
uguagccugugcauguaugucu

SEQ ID NO: 3705430 - RNA, 16 nt, Human
uguagcgucuuucuuu

SEQ ID NO: 3705431 - RNA, 16 nt, Human
uguagcguguuuacau

SEQ ID NO: 3705432 - RNA, 13 nt, Human
uguagcuacagag

SEQ ID NO: 3705433 - RNA, 20 nt, Human
uguagcucugcaucuccugu

SEQ ID NO: 3705434 - RNA, 13 nt, Human
uguagcuguaaaa

SEQ ID NO: 3705435 - RNA, 11 nt, Human
uguagcuguga

SEQ ID NO: 3705436 - RNA, 14 nt, Human
uguagcugugaccu

SEQ ID NO: 3705437 - RNA, 17 nt, Human
uguagcugugaccugcu

SEQ ID NO: 3705438 - RNA, 18 nt, Human
uguagcugugaccugcug

SEQ ID NO: 3705439 - RNA, 19 nt, Human
uguagcugugaccugcuga

SEQ ID NO: 3705440 - RNA, 14 nt, Human
uguagcuuuaucaa

SEQ ID NO: 3705441 - RNA, 13 nt, Human
uguagcuuugcuc

SEQ ID NO: 3705442 - RNA, 15 nt, Human
uguagcuuugcucuu

SEQ ID NO: 3705443 - RNA, 13 nt, Human
uguagcuuuucac

SEQ ID NO: 3705444 - RNA, 21 nt, Human
uguaggaaccgugguaugucu

SEQ ID NO: 3705445 - RNA, 22 nt, Human
uguaggaaccgugguaugucug

SEQ ID NO: 3705446 - RNA, 19 nt, Human
uguaggaagaguagcauuu

SEQ ID NO: 3705447 - RNA, 19 nt, Human
uguaggaaggucucauucu

SEQ ID NO: 3705448 - RNA, 21 nt, Human
uguaggaaggucucauucuuc

SEQ ID NO: 3705449 - RNA, 22 nt, Human
uguaggagcugccuuggcucag

SEQ ID NO: 3705450 - RNA, 14 nt, Human
uguaggagggacug

SEQ ID NO: 3705451 - RNA, 18 nt, Human
uguaggcaucaugcaugu

SEQ ID NO: 3705452 - RNA, 22 nt, Human
uguaggccaguaguucucaaag

SEQ ID NO: 3705453 - RNA, 15 nt, Human
uguagggcuggaccu

SEQ ID NO: 3705454 - RNA, 21 nt, Human
uguaggggaggggcuccuuuc

SEQ ID NO: 3705455 - RNA, 21 nt, Human
uguaggguccaaccagaccug

SEQ ID NO: 3705456 - RNA, 16 nt, Human
uguaggguuauaauaa

SEQ ID NO: 3705457 - RNA, 15 nt, Human
uguagguaaaaugua

SEQ ID NO: 3705458 - RNA, 15 nt, Human
uguagguaagacugu

SEQ ID NO: 3705459 - RNA, 17 nt, Human
uguagguaugaauaagu

SEQ ID NO: 3705460 - RNA, 19 nt, Human
uguaggugucugcacccag

SEQ ID NO: 3705461 - RNA, 22 nt, Human
uguagguuauuaugauuagcuu

SEQ ID NO: 3705462 - RNA, 16 nt, Human
uguaguaaauaaugcu

SEQ ID NO: 3705463 - RNA, 17 nt, Human
uguaguaaauaaugcuu

SEQ ID NO: 3705464 - RNA, 21 nt, Human
uguaguaaauaaugcuuugaa

SEQ ID NO: 3705465 - RNA, 21 nt, Human
uguaguagcguuuuuuaaaug

SEQ ID NO: 3705466 - RNA, 22 nt, Human
uguaguagcguuuuuuaaaugu

SEQ ID NO: 3705467 - RNA, 14 nt, Human
uguaguaucaaaua
